United States Patent Application Publication US 2005/0255487 A1 - sequence listing, part 55

SEQ ID NO: 1506558 - RNA, 19 nt, Homo sapiens
  misc_RNA (1)...(19): siRNA sense strand
ccgaagauggcagaaauua

SEQ ID NO: 1506559 - RNA, 19 nt, Homo sapiens
  misc_RNA (1)...(19): siRNA sense strand
gaggaccacuucccagaca

SEQ ID NO: 1506560 - RNA, 19 nt, Homo sapiens
  misc_RNA (1)...(19): siRNA sense strand
guccgaagauggcagaaau

SEQ ID NO: 1506561 - RNA, 19 nt, Homo sapiens
  misc_RNA (1)...(19): siRNA sense strand
gaacaacauguaucacaag

SEQ ID NO: 1506562 - RNA, 19 nt, Homo sapiens
  misc_RNA (1)...(19): siRNA sense strand
gaaguccacccucgagaug

SEQ ID NO: 1506563 - RNA, 19 nt, Homo sapiens
  misc_RNA (1)...(19): siRNA sense strand
gcagcaguuugagaaauug

SEQ ID NO: 1506564 - RNA, 19 nt, Homo sapiens
  misc_RNA (1)...(19): siRNA sense strand
ggagaaugccaaccacaau

SEQ ID NO: 1506565 - RNA, 19 nt, Homo sapiens
  misc_RNA (1)...(19): siRNA sense strand
agaacaacauguaucacaa

SEQ ID NO: 1506566 - RNA, 19 nt, Homo sapiens
  misc_RNA (1)...(19): siRNA sense strand
agagugaauucuacaacaa

SEQ ID NO: 1506567 - RNA, 19 nt, Homo sapiens
  misc_RNA (1)...(19): siRNA sense strand
ugaggcaguuugagaacaa

SEQ ID NO: 1506568 - RNA, 19 nt, Homo sapiens
  misc_RNA (1)...(19): siRNA sense strand
gaagcagaccgagcugaaa

SEQ ID NO: 1506569 - RNA, 19 nt, Homo sapiens
  misc_RNA (1)...(19): siRNA sense strand
uggcagaaauuagaaggaa

SEQ ID NO: 1506570 - RNA, 19 nt, Homo sapiens
  misc_RNA (1)...(19): siRNA sense strand
caccaucaccuccaaauuc

SEQ ID NO: 1506571 - RNA, 19 nt, Homo sapiens
  misc_RNA (1)...(19): siRNA sense strand
ggcagaaauuagaaggaaa

SEQ ID NO: 1506572 - RNA, 19 nt, Homo sapiens
  misc_RNA (1)...(19): siRNA sense strand
gagugaauucuacaacaaa

SEQ ID NO: 1506573 - RNA, 19 nt, Homo sapiens
  misc_RNA (1)...(19): siRNA sense strand
caagaguggccuagacgaa

SEQ ID NO: 1506574 - RNA, 19 nt, Homo sapiens
  misc_RNA (1)...(19): siRNA sense strand
agaaugccaaccacaauuu

SEQ ID NO: 1506575 - RNA, 19 nt, Homo sapiens
  misc_RNA (1)...(19): siRNA sense strand
ugcagcaguuugagaaauu

SEQ ID NO: 1506576 - RNA, 19 nt, Homo sapiens
  misc_RNA (1)...(19): siRNA sense strand
gcucagugcuggaguacac

SEQ ID NO: 1506577 - RNA, 19 nt, Homo sapiens
  misc_RNA (1)...(19): siRNA sense strand
gaaggccacggucaccauu

SEQ ID NO: 1506578 - RNA, 19 nt, Homo sapiens
  misc_RNA (1)...(19): siRNA sense strand
caaguuugcccucaagauc

SEQ ID NO: 1506579 - RNA, 19 nt, Homo sapiens
  misc_RNA (1)...(19): siRNA sense strand
cagaagaccaacugugaug

SEQ ID NO: 1506580 - RNA, 19 nt, Homo sapiens
  misc_RNA (1)...(19): siRNA sense strand
gaaggacaucaacgcugua

SEQ ID NO: 1506581 - RNA, 19 nt, Homo sapiens
  misc_RNA (1)...(19): siRNA sense strand
gggcaacuccgacaucuac

SEQ ID NO: 1506582 - RNA, 19 nt, Homo sapiens
  misc_RNA (1)...(19): siRNA sense strand
ggaaguccacccucgagau

SEQ ID NO: 1506583 - RNA, 19 nt, Homo sapiens
  misc_RNA (1)...(19): siRNA sense strand
cugcugagccuaaggaaga

SEQ ID NO: 1506584 - RNA, 19 nt, Homo sapiens
  misc_RNA (1)...(19): siRNA sense strand
ggcccacacugaccuggaa

SEQ ID NO: 1506585 - RNA, 19 nt, Homo sapiens
  misc_RNA (1)...(19): siRNA sense strand
caacugugauggcuaugcu

SEQ ID NO: 1506586 - RNA, 19 nt, Homo sapiens
  misc_RNA (1)...(19): siRNA sense strand
gaagaaugggaugaaguug

SEQ ID NO: 1506587 - RNA, 19 nt, Homo sapiens
  misc_RNA (1)...(19): siRNA sense strand
aaauucaccuuccucuaca

SEQ ID NO: 1506588 - RNA, 19 nt, Homo sapiens
  misc_RNA (1)...(19): siRNA sense strand
ggaccgccaagccuucaaa

SEQ ID NO: 1506589 - RNA, 19 nt, Homo sapiens
  misc_RNA (1)...(19): siRNA sense strand
gaaugccaaccacaauuuc

SEQ ID NO: 1506590 - RNA, 19 nt, Homo sapiens
  misc_RNA (1)...(19): siRNA sense strand
aagagugaauucuacaaca

SEQ ID NO: 1506591 - RNA, 19 nt, Homo sapiens
  misc_RNA (1)...(19): siRNA sense strand
ccggcaaccuggagggaaa

SEQ ID NO: 1506592 - RNA, 19 nt, Homo sapiens
  misc_RNA (1)...(19): siRNA sense strand
ccuacauccugaaauacaa

SEQ ID NO: 1506593 - RNA, 19 nt, Homo sapiens
  misc_RNA (1)...(19): siRNA sense strand
ccaaauucaccuuccucua

SEQ ID NO: 1506594 - RNA, 19 nt, Homo sapiens
  misc_RNA (1)...(19): siRNA sense strand
uggcuaugcuggccucuuc

SEQ ID NO: 1506595 - RNA, 19 nt, Homo sapiens
  misc_RNA (1)...(19): siRNA sense strand
cccagaagaccaacuguga

SEQ ID NO: 1506596 - RNA, 19 nt, Homo sapiens
  misc_RNA (1)...(19): siRNA sense strand
caaccuggagggaaagaug

SEQ ID NO: 1506597 - RNA, 19 nt, Homo sapiens
  misc_RNA (1)...(19): siRNA sense strand
uaaggaagaaugggaugaa

SEQ ID NO: 1506598 - RNA, 19 nt, Homo sapiens
  misc_RNA (1)...(19): siRNA sense strand
aacaacauguaucacaaga

SEQ ID NO: 1506599 - RNA, 19 nt, Homo sapiens
  misc_RNA (1)...(19): siRNA sense strand
caacaaagggaugcugagu

SEQ ID NO: 1506600 - RNA, 19 nt, Homo sapiens
  misc_RNA (1)...(19): siRNA sense strand
cccagcugcucaagaaguu

SEQ ID NO: 1506601 - RNA, 19 nt, Homo sapiens
  misc_RNA (1)...(19): siRNA sense strand
aguacacgcucaagugcaa

SEQ ID NO: 1506602 - RNA, 19 nt, Homo sapiens
  misc_RNA (1)...(19): siRNA sense strand
cucacaagcugcagaucuu

SEQ ID NO: 1506603 - RNA, 19 nt, Homo sapiens
  misc_RNA (1)...(19): siRNA sense strand
gcgcggaggaggauuccaa

SEQ ID NO: 1506604 - RNA, 19 nt, Homo sapiens
  misc_RNA (1)...(19): siRNA sense strand
agacuuccaugaucagaac

SEQ ID NO: 1506605 - RNA, 19 nt, Homo sapiens
  misc_RNA (1)...(19): siRNA sense strand
cccagagacuuccaugauc

SEQ ID NO: 1506606 - RNA, 19 nt, Homo sapiens
  misc_RNA (1)...(19): siRNA sense strand
guucaucgaggaccacuuc

SEQ ID NO: 1506607 - RNA, 19 nt, Homo sapiens
  misc_RNA (1)...(19): siRNA sense strand
cuacaaugaguucuacuuc

SEQ ID NO: 1506608 - RNA, 19 nt, Homo sapiens
  misc_RNA (1)...(19): siRNA sense strand
ggacaccaucaccuccaaa

SEQ ID NO: 1506609 - RNA, 19 nt, Homo sapiens
  misc_RNA (1)...(19): siRNA sense strand
ggacccagaagaccaacug

SEQ ID NO: 1506610 - RNA, 19 nt, Homo sapiens
  misc_RNA (1)...(19): siRNA sense strand
cacccacccugcacuguuc

SEQ ID NO: 1506611 - RNA, 19 nt, Homo sapiens
  misc_RNA (1)...(19): siRNA sense strand
ugaaauacaaagugaaugc

SEQ ID NO: 1506612 - RNA, 19 nt, Homo sapiens
  misc_RNA (1)...(19): siRNA sense strand
gcucaagugcaauuaugug

SEQ ID NO: 1506613 - RNA, 19 nt, Homo sapiens
  misc_RNA (1)...(19): siRNA sense strand
gacaucaacgcuguaucua

SEQ ID NO: 1506614 - RNA, 19 nt, Homo sapiens
  misc_RNA (1)...(19): siRNA sense strand
acgcucaagugcaauuaug

SEQ ID NO: 1506615 - RNA, 19 nt, Homo sapiens
  misc_RNA (1)...(19): siRNA sense strand
accaucaccuccaaauuca

SEQ ID NO: 1506616 - RNA, 19 nt, Homo sapiens
  misc_RNA (1)...(19): siRNA sense strand
ggaucugccaucacauaga

SEQ ID NO: 1506617 - RNA, 19 nt, Homo sapiens
  misc_RNA (1)...(19): siRNA sense strand
caauuucuacuccuacauc

SEQ ID NO: 1506618 - RNA, 19 nt, Homo sapiens
  misc_RNA (1)...(19): siRNA sense strand
ucauggugcuggagaaugc

SEQ ID NO: 1506619 - RNA, 19 nt, Homo sapiens
  misc_RNA (1)...(19): siRNA sense strand
ggaggagggcauuaauguc

SEQ ID NO: 1506620 - RNA, 19 nt, Homo sapiens
  misc_RNA (1)...(19): siRNA sense strand
uggaggagggcauuaaugu

SEQ ID NO: 1506621 - RNA, 19 nt, Homo sapiens
  misc_RNA (1)...(19): siRNA sense strand
ggaaggccacggucaccau

SEQ ID NO: 1506622 - RNA, 19 nt, Homo sapiens
  misc_RNA (1)...(19): siRNA sense strand
gagacuuccaugaucagaa

SEQ ID NO: 1506623 - RNA, 19 nt, Homo sapiens
  misc_RNA (1)...(19): siRNA sense strand
gcaguuugagaacaacaug

SEQ ID NO: 1506624 - RNA, 19 nt, Homo sapiens
  misc_RNA (1)...(19): siRNA sense strand
ccacuucccagacaacaag

SEQ ID NO: 1506625 - RNA, 19 nt, Homo sapiens
  misc_RNA (1)...(19): siRNA sense strand
acaaugaguucuacuuccu

SEQ ID NO: 1506626 - RNA, 19 nt, Homo sapiens
  misc_RNA (1)...(19): siRNA sense strand
cuggaucugccaucacaua

SEQ ID NO: 1506627 - RNA, 19 nt, Homo sapiens
  misc_RNA (1)...(19): siRNA sense strand
aggccacggucaccauuga

SEQ ID NO: 1506628 - RNA, 19 nt, Homo sapiens
  misc_RNA (1)...(19): siRNA sense strand
uccaugaucagaacaguga

SEQ ID NO: 1506629 - RNA, 19 nt, Homo sapiens
  misc_RNA (1)...(19): siRNA sense strand
agaacuggcagcugcuaaa

SEQ ID NO: 1506630 - RNA, 19 nt, Homo sapiens
  misc_RNA (1)...(19): siRNA sense strand
cacaauuucuacuccuaca

SEQ ID NO: 1506631 - RNA, 19 nt, Homo sapiens
  misc_RNA (1)...(19): siRNA sense strand
ccugaaauacaaagugaau

SEQ ID NO: 1506632 - RNA, 19 nt, Homo sapiens
  misc_RNA (1)...(19): siRNA sense strand
gaaguuggcuuauaaaguu

SEQ ID NO: 1506633 - RNA, 19 nt, Homo sapiens
  misc_RNA (1)...(19): siRNA sense strand
gaacucagcuaugacauuu

SEQ ID NO: 1506634 - RNA, 19 nt, Homo sapiens
  misc_RNA (1)...(19): siRNA sense strand
guaaagauguucucauuga

SEQ ID NO: 1506635 - RNA, 19 nt, Homo sapiens
  misc_RNA (1)...(19): siRNA sense strand
ggacauaauuggagagcua

SEQ ID NO: 1506636 - RNA, 19 nt, Homo sapiens
  misc_RNA (1)...(19): siRNA sense strand
ggcaagagguuuaaaugua

SEQ ID NO: 1506637 - RNA, 19 nt, Homo sapiens
  misc_RNA (1)...(19): siRNA sense strand
gaauauacaggacagauua

SEQ ID NO: 1506638 - RNA, 19 nt, Homo sapiens
  misc_RNA (1)...(19): siRNA sense strand
ggccaucucuggaauauaa

SEQ ID NO: 1506639 - RNA, 19 nt, Homo sapiens
  misc_RNA (1)...(19): siRNA sense strand
gaaaguaacagaccugauu

SEQ ID NO: 1506640 - RNA, 19 nt, Homo sapiens
  misc_RNA (1)...(19): siRNA sense strand
ggaaguaccacaaauguuu

SEQ ID NO: 1506641 - RNA, 19 nt, Homo sapiens
  misc_RNA (1)...(19): siRNA sense strand
gaacaaccaggaaagaaua

SEQ ID NO: 1506642 - RNA, 19 nt, Homo sapiens
  misc_RNA (1)...(19): siRNA sense strand
gcaagagguuuaaauguau

SEQ ID NO: 1506643 - RNA, 19 nt, Homo sapiens
  misc_RNA (1)...(19): siRNA sense strand
gagcuuacccaaagaaaua

SEQ ID NO: 1506644 - RNA, 19 nt, Homo sapiens
  misc_RNA (1)...(19): siRNA sense strand
gaagaucgaacuuguaauu

SEQ ID NO: 1506645 - RNA, 19 nt, Homo sapiens
  misc_RNA (1)...(19): siRNA sense strand
acaaauagcugucugugaa

SEQ ID NO: 1506646 - RNA, 19 nt, Homo sapiens
  misc_RNA (1)...(19): siRNA sense strand
ggauuuauaugaaggcuuu

SEQ ID NO: 1506647 - RNA, 19 nt, Homo sapiens
  misc_RNA (1)...(19): siRNA sense strand
uaacagaccugauuuacuc

SEQ ID NO: 1506648 - RNA, 19 nt, Homo sapiens
  misc_RNA (1)...(19): siRNA sense strand
gaaguuagauuuguguguu

SEQ ID NO: 1506649 - RNA, 19 nt, Homo sapiens
  misc_RNA (1)...(19): siRNA sense strand
gcauugaacucagcuauga

SEQ ID NO: 1506650 - RNA, 19 nt, Homo sapiens
  misc_RNA (1)...(19): siRNA sense strand
ccagacaacuuggcucuua

SEQ ID NO: 1506651 - RNA, 19 nt, Homo sapiens
  misc_RNA (1)...(19): siRNA sense strand
gcacugauaucaauaaacu

SEQ ID NO: 1506652 - RNA, 19 nt, Homo sapiens
  misc_RNA (1)...(19): siRNA sense strand
cacaacagaugaagcuuua

SEQ ID NO: 1506653 - RNA, 19 nt, Homo sapiens
  misc_RNA (1)...(19): siRNA sense strand
gcaguguaauugauacuaa

SEQ ID NO: 1506654 - RNA, 19 nt, Homo sapiens
  misc_RNA (1)...(19): siRNA sense strand
ucaagaagaugccaaacuu

SEQ ID NO: 1506655 - RNA, 19 nt, Homo sapiens
  misc_RNA (1)...(19): siRNA sense strand
aagcauauguggaaacuuu

SEQ ID NO: 1506656 - RNA, 19 nt, Homo sapiens
  misc_RNA (1)...(19): siRNA sense strand
ccacaaauguuuauacucu

SEQ ID NO: 1506657 - RNA, 19 nt, Homo sapiens
  misc_RNA (1)...(19): siRNA sense strand
caaaugaucuugcaaaaug

SEQ ID NO: 1506658 - RNA, 19 nt, Homo sapiens
  misc_RNA (1)...(19): siRNA sense strand
caacuuggcucuuauacag

SEQ ID NO: 1506659 - RNA, 19 nt, Homo sapiens
  misc_RNA (1)...(19): siRNA sense strand
gaacucagccacuaugaau

SEQ ID NO: 1506660 - RNA, 19 nt, Homo sapiens
  misc_RNA (1)...(19): siRNA sense strand
gauaagaauugcagaugug

SEQ ID NO: 1506661 - RNA, 19 nt, Homo sapiens
  misc_RNA (1)...(19): siRNA sense strand
guacagaacacaauaacuu

SEQ ID NO: 1506662 - RNA, 19 nt, Homo sapiens
  misc_RNA (1)...(19): siRNA sense strand
caaauugucuacccucuuc

SEQ ID NO: 1506663 - RNA, 19 nt, Homo sapiens
  misc_RNA (1)...(19): siRNA sense strand
gaugaggacuuaagguuuc

SEQ ID NO: 1506664 - RNA, 19 nt, Homo sapiens
  misc_RNA (1)...(19): siRNA sense strand
gcacauacaggagauagua

SEQ ID NO: 1506665 - RNA, 19 nt, Homo sapiens
  misc_RNA (1)...(19): siRNA sense strand
gaaguaccacaaauguuua

SEQ ID NO: 1506666 - RNA, 19 nt, Homo sapiens
  misc_RNA (1)...(19): siRNA sense strand
gaagccagauugcauguag

SEQ ID NO: 1506667 - RNA, 19 nt, Homo sapiens
  misc_RNA (1)...(19): siRNA sense strand
caacuuauaugagaacuag

SEQ ID NO: 1506668 - RNA, 19 nt, Homo sapiens
  misc_RNA (1)...(19): siRNA sense strand
caucugagcuuacccaaag

SEQ ID NO: 1506669 - RNA, 19 nt, Homo sapiens
  misc_RNA (1)...(19): siRNA sense strand
ggagauaccauuuguaaag

SEQ ID NO: 1506670 - RNA, 19 nt, Homo sapiens
  misc_RNA (1)...(19): siRNA sense strand
gauguucaaucaagcauau

SEQ ID NO: 1506671 - RNA, 19 nt, Homo sapiens
  misc_RNA (1)...(19): siRNA sense strand
acuagaaguuggcuuauaa

SEQ ID NO: 1506672 - RNA, 19 nt, Homo sapiens
  misc_RNA (1)...(19): siRNA sense strand
gaaauaguaacaccaaugu

SEQ ID NO: 1506673 - RNA, 19 nt, Homo sapiens
  misc_RNA (1)...(19): siRNA sense strand
cacuauaccuuucauauuc

SEQ ID NO: 1506674 - RNA, 19 nt, Homo sapiens
  misc_RNA (1)...(19): siRNA sense strand
ccagugacauguuuacaga

SEQ ID NO: 1506675 - RNA, 19 nt, Homo sapiens
  misc_RNA (1)...(19): siRNA sense strand
ucauuuggcuggaagguaa

SEQ ID NO: 1506676 - RNA, 19 nt, Homo sapiens
  misc_RNA (1)...(19): siRNA sense strand
uaacuggaccuuaguagaa

SEQ ID NO: 1506677 - RNA, 19 nt, Homo sapiens
  misc_RNA (1)...(19): siRNA sense strand
guaaucacguggucuggaa

SEQ ID NO: 1506678 - RNA, 19 nt, Homo sapiens
  misc_RNA (1)...(19): siRNA sense strand
gauaguacagaacacaaua

SEQ ID NO: 1506679 - RNA, 19 nt, Homo sapiens
  misc_RNA (1)...(19): siRNA sense strand
gaauagagaguaaucaaag

SEQ ID NO: 1506680 - RNA, 19 nt, Homo sapiens
  misc_RNA (1)...(19): siRNA sense strand
ggaccuuaguagaagauaa

SEQ ID NO: 1506681 - RNA, 19 nt, Homo sapiens
  misc_RNA (1)...(19): siRNA sense strand
gauagaggguccagugaca

SEQ ID NO: 1506682 - RNA, 19 nt, Homo sapiens
  misc_RNA (1)...(19): siRNA sense strand
ggaauagagaguaaucaaa

SEQ ID NO: 1506683 - RNA, 19 nt, Homo sapiens
  misc_RNA (1)...(19): siRNA sense strand
ggacacauggccuacaauu

SEQ ID NO: 1506684 - RNA, 19 nt, Homo sapiens
  misc_RNA (1)...(19): siRNA sense strand
uaguuuaucuccuaccuuu

SEQ ID NO: 1506685 - RNA, 19 nt, Homo sapiens
  misc_RNA (1)...(19): siRNA sense strand
ccacaaggaaucuacuuaa

SEQ ID NO: 1506686 - RNA, 19 nt, Homo sapiens
  misc_RNA (1)...(19): siRNA sense strand
gcaugagggucgugauguu

SEQ ID NO: 1506687 - RNA, 19 nt, Homo sapiens
  misc_RNA (1)...(19): siRNA sense strand
cgccucagcuugauguaua

SEQ ID NO: 1506688 - RNA, 19 nt, Homo sapiens
  misc_RNA (1)...(19): siRNA sense strand
guaccaauacugauaagaa

SEQ ID NO: 1506689 - RNA, 19 nt, Homo sapiens
  misc_RNA (1)...(19): siRNA sense strand
agacagaggaaccauauuu

SEQ ID NO: 1506690 - RNA, 19 nt, Homo sapiens
  misc_RNA (1)...(19): siRNA sense strand
caaggaaaauucaugagua

SEQ ID NO: 1506691 - RNA, 19 nt, Homo sapiens
  misc_RNA (1)...(19): siRNA sense strand
gcuggaagguaaagauguu

SEQ ID NO: 1506692 - RNA, 19 nt, Homo sapiens
  misc_RNA (1)...(19): siRNA sense strand
aaacgaggaucgaauacau

SEQ ID NO: 1506693 - RNA, 19 nt, Homo sapiens
  misc_RNA (1)...(19): siRNA sense strand
gaagacagaauccacaaca

SEQ ID NO: 1506694 - RNA, 19 nt, Homo sapiens
  misc_RNA (1)...(19): siRNA sense strand
caucacccuuggcauuaua

SEQ ID NO: 1506695 - RNA, 19 nt, Homo sapiens
  misc_RNA (1)...(19): siRNA sense strand
caaccaggaaagaauauaa

SEQ ID NO: 1506696 - RNA, 19 nt, Homo sapiens
  misc_RNA (1)...(19): siRNA sense strand
gaacuucugauuuaagcaa

SEQ ID NO: 1506697 - RNA, 19 nt, Homo sapiens
  misc_RNA (1)...(19): siRNA sense strand
uuacaggccugcuuuaucu

SEQ ID NO: 1506698 - RNA, 19 nt, Homo sapiens
  misc_RNA (1)...(19): siRNA sense strand
ggaaugugauugcuaaagc

SEQ ID NO: 1506699 - RNA, 19 nt, Homo sapiens
  misc_RNA (1)...(19): siRNA sense strand
gaugccaaacuucuaauaa

SEQ ID NO: 1506700 - RNA, 19 nt, Homo sapiens
  misc_RNA (1)...(19): siRNA sense strand
caacaucauuuggcuggaa

SEQ ID NO: 1506701 - RNA, 19 nt, Homo sapiens
  misc_RNA (1)...(19): siRNA sense strand
acauauaccuucacaacau

SEQ ID NO: 1506702 - RNA, 19 nt, Homo sapiens
  misc_RNA (1)...(19): siRNA sense strand
gaucgaacuuguaauuacu

SEQ ID NO: 1506703 - RNA, 19 nt, Homo sapiens
  misc_RNA (1)...(19): siRNA sense strand
uugcauaguuuaucuccua

SEQ ID NO: 1506704 - RNA, 19 nt, Homo sapiens
  misc_RNA (1)...(19): siRNA sense strand
gagaguaauacauuucuga

SEQ ID NO: 1506705 - RNA, 19 nt, Homo sapiens
  misc_RNA (1)...(19): siRNA sense strand
gcaagcaucauaauuggau

SEQ ID NO: 1506706 - RNA, 19 nt, Homo sapiens
  misc_RNA (1)...(19): siRNA sense strand
agaggcagcccggauauua

SEQ ID NO: 1506707 - RNA, 19 nt, Homo sapiens
  misc_RNA (1)...(19): siRNA sense strand
gcuuaagcgugaaauugaa

SEQ ID NO: 1506708 - RNA, 19 nt, Homo sapiens
  misc_RNA (1)...(19): siRNA sense strand
agguaaagauguucucauu

SEQ ID NO: 1506709 - RNA, 19 nt, Homo sapiens
  misc_RNA (1)...(19): siRNA sense strand
aaucucaccuuccuuuguu

SEQ ID NO: 1506710 - RNA, 19 nt, Homo sapiens
  misc_RNA (1)...(19): siRNA sense strand
caaucuugccuacucuuua

SEQ ID NO: 1506711 - RNA, 19 nt, Homo sapiens
  misc_RNA (1)...(19): siRNA sense strand
gcaccuugcauuauaccua

SEQ ID NO: 1506712 - RNA, 19 nt, Homo sapiens
  misc_RNA (1)...(19): siRNA sense strand
uaagacagaggaaccauau

SEQ ID NO: 1506713 - RNA, 19 nt, Homo sapiens
  misc_RNA (1)...(19): siRNA sense strand
cacaaggaaucuacuuaau

SEQ ID NO: 1506714 - RNA, 19 nt, Homo sapiens
  misc_RNA (1)...(19): siRNA sense strand
caacagaugaagcuuuaau

SEQ ID NO: 1506715 - RNA, 19 nt, Homo sapiens
  misc_RNA (1)...(19): siRNA sense strand
gaccuuaguagaagauaaa

SEQ ID NO: 1506716 - RNA, 19 nt, Homo sapiens
  misc_RNA (1)...(19): siRNA sense strand
cacguggucuggaauuaaa

SEQ ID NO: 1506717 - RNA, 19 nt, Homo sapiens
  misc_RNA (1)...(19): siRNA sense strand
cagcaagcaucauaauugg

SEQ ID NO: 1506718 - RNA, 19 nt, Homo sapiens
  misc_RNA (1)...(19): siRNA sense strand
gcaagcugcugauaaucca

SEQ ID NO: 1506719 - RNA, 19 nt, Homo sapiens
  misc_RNA (1)...(19): siRNA sense strand
aauauaccgucaucuguga

SEQ ID NO: 1506720 - RNA, 19 nt, Homo sapiens
  misc_RNA (1)...(19): siRNA sense strand
ccgaagaucgaacuuguaa

SEQ ID NO: 1506721 - RNA, 19 nt, Homo sapiens
  misc_RNA (1)...(19): siRNA sense strand
acagcaagcaucauaauug

SEQ ID NO: 1506722 - RNA, 19 nt, Homo sapiens
  misc_RNA (1)...(19): siRNA sense strand
caacacggucuuugaacaa

SEQ ID NO: 1506723 - RNA, 19 nt, Homo sapiens
  misc_RNA (1)...(19): siRNA sense strand
caaagaauuaguacucaug

SEQ ID NO: 1506724 - RNA, 19 nt, Homo sapiens
  misc_RNA (1)...(19): siRNA sense strand
cagcacugauaucaauaaa

SEQ ID NO: 1506725 - RNA, 19 nt, Homo sapiens
  misc_RNA (1)...(19): siRNA sense strand
ccacaacagaugaagcuuu

SEQ ID NO: 1506726 - RNA, 19 nt, Homo sapiens
  misc_RNA (1)...(19): siRNA sense strand
gaauuucacacuauaccuu

SEQ ID NO: 1506727 - RNA, 19 nt, Homo sapiens
  misc_RNA (1)...(19): siRNA sense strand
ugauaagaauugcagaugu

SEQ ID NO: 1506728 - RNA, 19 nt, Homo sapiens
  misc_RNA (1)...(19): siRNA sense strand
caaucaagcauauguggaa

SEQ ID NO: 1506729 - RNA, 19 nt, Homo sapiens
  misc_RNA (1)...(19): siRNA sense strand
ccuggaggauuuauaugaa

SEQ ID NO: 1506730 - RNA, 19 nt, Homo sapiens
  misc_RNA (1)...(19): siRNA sense strand
ggugaaaugccacaaggaa

SEQ ID NO: 1506731 - RNA, 19 nt, Homo sapiens
  misc_RNA (1)...(19): siRNA sense strand
ucauugcuuugaagacuaa

SEQ ID NO: 1506732 - RNA, 19 nt, Homo sapiens
  misc_RNA (1)...(19): siRNA sense strand
gaauacagaagcagauuua

SEQ ID NO: 1506733 - RNA, 19 nt, Homo sapiens
  misc_RNA (1)...(19): siRNA sense strand
ucaggugaauguaguauua

SEQ ID NO: 1506734 - RNA, 19 nt, Homo sapiens
  misc_RNA (1)...(19): siRNA sense strand
gaugagaaguugcaagaga

SEQ ID NO: 1506735 - RNA, 19 nt, Homo sapiens
  misc_RNA (1)...(19): siRNA sense strand
gaugacaaauccugccaua

SEQ ID NO: 1506736 - RNA, 19 nt, Homo sapiens
  misc_RNA (1)...(19): siRNA sense strand
gagacuaccuccaagcaaa

SEQ ID NO: 1506737 - RNA, 19 nt, Homo sapiens
  misc_RNA (1)...(19): siRNA sense strand
gaaagguuguaucaaaguu

SEQ ID NO: 1506738 - RNA, 19 nt, Homo sapiens
  misc_RNA (1)...(19): siRNA sense strand
uuaaauccaugcugcaaua

SEQ ID NO: 1506739 - RNA, 19 nt, Homo sapiens
  misc_RNA (1)...(19): siRNA sense strand
gagguuagaagcagcauua

SEQ ID NO: 1506740 - RNA, 19 nt, Homo sapiens
  misc_RNA (1)...(19): siRNA sense strand
ggaccaaccuccuaauagu

SEQ ID NO: 1506741 - RNA, 19 nt, Homo sapiens
  misc_RNA (1)...(19): siRNA sense strand
agaagaacauugagucgua

SEQ ID NO: 1506742 - RNA, 19 nt, Homo sapiens
  misc_RNA (1)...(19): siRNA sense strand
cagaggagcuggccacgaa

SEQ ID NO: 1506743 - RNA, 19 nt, Homo sapiens
  misc_RNA (1)...(19): siRNA sense strand
ggaaacaccggaauacaga

SEQ ID NO: 1506744 - RNA, 19 nt, Homo sapiens
  misc_RNA (1)...(19): siRNA sense strand
aauggugggugucauaaua

SEQ ID NO: 1506745 - RNA, 19 nt, Homo sapiens
  misc_RNA (1)...(19): siRNA sense strand
gaagaacauugagucguau

SEQ ID NO: 1506746 - RNA, 19 nt, Homo sapiens
  misc_RNA (1)...(19): siRNA sense strand
guuagaagcagcauuaaga

SEQ ID NO: 1506747 - RNA, 19 nt, Homo sapiens
  misc_RNA (1)...(19): siRNA sense strand
gaacucaagaugacaaauc

SEQ ID NO: 1506748 - RNA, 19 nt, Homo sapiens
  misc_RNA (1)...(19): siRNA sense strand
gggaaucuucuuaaaguuu

SEQ ID NO: 1506749 - RNA, 19 nt, Homo sapiens
  misc_RNA (1)...(19): siRNA sense strand
gcuaaaacuuccaaaauug

SEQ ID NO: 1506750 - RNA, 19 nt, Homo sapiens
  misc_RNA (1)...(19): siRNA sense strand
ugacaaauccugccauaca

SEQ ID NO: 1506751 - RNA, 19 nt, Homo sapiens
  misc_RNA (1)...(19): siRNA sense strand
cagaaugauuucagcuauu

SEQ ID NO: 1506752 - RNA, 19 nt, Homo sapiens
  misc_RNA (1)...(19): siRNA sense strand
gcuaguguaugcagaguca

SEQ ID NO: 1506753 - RNA, 19 nt, Homo sapiens
  misc_RNA (1)...(19): siRNA sense strand
gcucucagguacacaacaa

SEQ ID NO: 1506754 - RNA, 19 nt, Homo sapiens
  misc_RNA (1)...(19): siRNA sense strand
guaucaaaguucuuaagga

SEQ ID NO: 1506755 - RNA, 19 nt, Homo sapiens
  misc_RNA (1)...(19): siRNA sense strand
ggaauacagaagcagauuu

SEQ ID NO: 1506756 - RNA, 19 nt, Homo sapiens
  misc_RNA (1)...(19): siRNA sense strand
gguaauggugggugucaua

SEQ ID NO: 1506757 - RNA, 19 nt, Homo sapiens
  misc_RNA (1)...(19): siRNA sense strand
ccacuaguaggcaaauuaa

SEQ ID NO: 1506758 - RNA, 19 nt, Homo sapiens
  misc_RNA (1)...(19): siRNA sense strand
ccaagcaaauuaaauccau

SEQ ID NO: 1506759 - RNA, 19 nt, Homo sapiens
  misc_RNA (1)...(19): siRNA sense strand
agucugagaaggaaauuua

SEQ ID NO: 1506760 - RNA, 19 nt, Homo sapiens
  misc_RNA (1)...(19): siRNA sense strand
cugggagccuuaacaagua

SEQ ID NO: 1506761 - RNA, 19 nt, Homo sapiens
  misc_RNA (1)...(19): siRNA sense strand
acagaaugauuucagcuau

SEQ ID NO: 1506762 - RNA, 19 nt, Homo sapiens
  misc_RNA (1)...(19): siRNA sense strand
gaaaauaccacagauuguu

SEQ ID NO: 1506763 - RNA, 19 nt, Homo sapiens
  misc_RNA (1)...(19): siRNA sense strand
cacaauggcuaguguaugc

SEQ ID NO: 1506764 - RNA, 19 nt, Homo sapiens
  misc_RNA (1)...(19): siRNA sense strand
uggcaaaucgaaugucuuu

SEQ ID NO: 1506765 - RNA, 19 nt, Homo sapiens
  misc_RNA (1)...(19): siRNA sense strand
ugagugaugccacaacaaa

SEQ ID NO: 1506766 - RNA, 19 nt, Homo sapiens
  misc_RNA (1)...(19): siRNA sense strand
cagaugagaaguugcaaga

SEQ ID NO: 1506767 - RNA, 19 nt, Homo sapiens
  misc_RNA (1)...(19): siRNA sense strand
gacaaauccugccauacag

SEQ ID NO: 1506768 - RNA, 19 nt, Homo sapiens
  misc_RNA (1)...(19): siRNA sense strand
uacagaagcagauuuacaa

SEQ ID NO: 1506769 - RNA, 19 nt, Homo sapiens
  misc_RNA (1)...(19): siRNA sense strand
aauacucuaugaccacgua

SEQ ID NO: 1506770 - RNA, 19 nt, Homo sapiens
  misc_RNA (1)...(19): siRNA sense strand
ucauucugcuugaggguaa

SEQ ID NO: 1506771 - RNA, 19 nt, Homo sapiens
  misc_RNA (1)...(19): siRNA sense strand
caaauccugccauacagaa

SEQ ID NO: 1506772 - RNA, 19 nt, Homo sapiens
  misc_RNA (1)...(19): siRNA sense strand
gcagagucaugcuggaaac

SEQ ID NO: 1506773 - RNA, 19 nt, Homo sapiens
  misc_RNA (1)...(19): siRNA sense strand
uaagcacaauggcuagugu

SEQ ID NO: 1506774 - RNA, 19 nt, Homo sapiens
  misc_RNA (1)...(19): siRNA sense strand
ugaauuggcaaaucgaaug

SEQ ID NO: 1506775 - RNA, 19 nt, Homo sapiens
  misc_RNA (1)...(19): siRNA sense strand
gguuguaucaaaguucuua

SEQ ID NO: 1506776 - RNA, 19 nt, Homo sapiens
  misc_RNA (1)...(19): siRNA sense strand
gggugcaguuguuccacua

SEQ ID NO: 1506777 - RNA, 19 nt, Homo sapiens
  misc_RNA (1)...(19): siRNA sense strand
guaauggugggugucauaa

SEQ ID NO: 1506778 - RNA, 19 nt, Homo sapiens
  misc_RNA (1)...(19): siRNA sense strand
gaaacaccggaauacagaa

SEQ ID NO: 1506779 - RNA, 19 nt, Homo sapiens
  misc_RNA (1)...(19): siRNA sense strand
gcacaauggcuaguguaug

SEQ ID NO: 1506780 - RNA, 19 nt, Homo sapiens
  misc_RNA (1)...(19): siRNA sense strand
ugagucguaugaggauuaa

SEQ ID NO: 1506781 - RNA, 19 nt, Homo sapiens
  misc_RNA (1)...(19): siRNA sense strand
cuaguaggcaaauuaaaga

SEQ ID NO: 1506782 - RNA, 19 nt, Homo sapiens
  misc_RNA (1)...(19): siRNA sense strand
uaccacagauuguuuaagc

SEQ ID NO: 1506783 - RNA, 19 nt, Homo sapiens
  misc_RNA (1)...(19): siRNA sense strand
cgaauuuucucagagguua

SEQ ID NO: 1506784 - RNA, 19 nt, Homo sapiens
  misc_RNA (1)...(19): siRNA sense strand
gaugaacucaagaugacaa

SEQ ID NO: 1506785 - RNA, 19 nt, Homo sapiens
  misc_RNA (1)...(19): siRNA sense strand
auaaucaggugaauguagu

SEQ ID NO: 1506786 - RNA, 19 nt, Homo sapiens
  misc_RNA (1)...(19): siRNA sense strand
uaaaugcucucagguacac

SEQ ID NO: 1506787 - RNA, 19 nt, Homo sapiens
  misc_RNA (1)...(19): siRNA sense strand
gcaguuguuccacuaguag

SEQ ID NO: 1506788 - RNA, 19 nt, Homo sapiens
  misc_RNA (1)...(19): siRNA sense strand
gaauuggcaaaucgaaugu

SEQ ID NO: 1506789 - RNA, 19 nt, Homo sapiens
  misc_RNA (1)...(19): siRNA sense strand
gaccaaccuccuaauagug

SEQ ID NO: 1506790 - RNA, 19 nt, Homo sapiens
  misc_RNA (1)...(19): siRNA sense strand
augagaaguugcaagagaa

SEQ ID NO: 1506791 - RNA, 19 nt, Homo sapiens
  misc_RNA (1)...(19): siRNA sense strand
auaaugaauuggcaaaucg

SEQ ID NO: 1506792 - RNA, 19 nt, Homo sapiens
  misc_RNA (1)...(19): siRNA sense strand
ugcaguuguuccacuagua

SEQ ID NO: 1506793 - RNA, 19 nt, Homo sapiens
  misc_RNA (1)...(19): siRNA sense strand
ugacaugcacagaccuuga

SEQ ID NO: 1506794 - RNA, 19 nt, Homo sapiens
  misc_RNA (1)...(19): siRNA sense strand
cugaaaaccuugagugaug

SEQ ID NO: 1506795 - RNA, 19 nt, Homo sapiens
  misc_RNA (1)...(19): siRNA sense strand
gaacauugagucguaugag

SEQ ID NO: 1506796 - RNA, 19 nt, Homo sapiens
  misc_RNA (1)...(19): siRNA sense strand
uccacuaguaggcaaauua

SEQ ID NO: 1506797 - RNA, 19 nt, Homo sapiens
  misc_RNA (1)...(19): siRNA sense strand
uaacaaguaccccauauuc

SEQ ID NO: 1506798 - RNA, 19 nt, Homo sapiens
  misc_RNA (1)...(19): siRNA sense strand
aaauguaccggcagaagga

SEQ ID NO: 1506799 - RNA, 19 nt, Homo sapiens
  misc_RNA (1)...(19): siRNA sense strand
ucacacuccgguuugauga

SEQ ID NO: 1506800 - RNA, 19 nt, Homo sapiens
  misc_RNA (1)...(19): siRNA sense strand
acagugucauucugcuuga

SEQ ID NO: 1506801 - RNA, 19 nt, Homo sapiens
  misc_RNA (1)...(19): siRNA sense strand
ugaaagguuguaucaaagu

SEQ ID NO: 1506802 - RNA, 19 nt, Homo sapiens
  misc_RNA (1)...(19): siRNA sense strand
uaaauccaugcugcaauaa

SEQ ID NO: 1506803 - RNA, 19 nt, Homo sapiens
  misc_RNA (1)...(19): siRNA sense strand
cuaccuccaagcaaauuaa

SEQ ID NO: 1506804 - RNA, 19 nt, Homo sapiens
  misc_RNA (1)...(19): siRNA sense strand
uauaaucaggugaauguag

SEQ ID NO: 1506805 - RNA, 19 nt, Homo sapiens
  misc_RNA (1)...(19): siRNA sense strand
cgaaauacgagaggcaauc

SEQ ID NO: 1506806 - RNA, 19 nt, Homo sapiens
  misc_RNA (1)...(19): siRNA sense strand
ccuccaagcaaauuaaauc

SEQ ID NO: 1506807 - RNA, 19 nt, Homo sapiens
  misc_RNA (1)...(19): siRNA sense strand
ucugggagccuuaacaagu

SEQ ID NO: 1506808 - RNA, 19 nt, Homo sapiens
  misc_RNA (1)...(19): siRNA sense strand
uagaaaauaccacagauug

SEQ ID NO: 1506809 - RNA, 19 nt, Homo sapiens
  misc_RNA (1)...(19): siRNA sense strand
uacagaaugauuucagcua

SEQ ID NO: 1506810 - RNA, 19 nt, Homo sapiens
  misc_RNA (1)...(19): siRNA sense strand
gaggagcuggccacgaaau

SEQ ID NO: 1506811 - RNA, 19 nt, Homo sapiens
  misc_RNA (1)...(19): siRNA sense strand
ucauuucacacuccgguuu

SEQ ID NO: 1506812 - RNA, 19 nt, Homo sapiens
  misc_RNA (1)...(19): siRNA sense strand
uccagcagaugagaaguug

SEQ ID NO: 1506813 - RNA, 19 nt, Homo sapiens
  misc_RNA (1)...(19): siRNA sense strand
uugagucguaugaggauua

SEQ ID NO: 1506814 - RNA, 19 nt, Homo sapiens
  misc_RNA (1)...(19): siRNA sense strand
acagaagcagauuuacaaa

SEQ ID NO: 1506815 - RNA, 19 nt, Homo sapiens
  misc_RNA (1)...(19): siRNA sense strand
gaaugucuuuguuuuaugc

SEQ ID NO: 1506816 - RNA, 19 nt, Homo sapiens
  misc_RNA (1)...(19): siRNA sense strand
gugcaguuguuccacuagu

SEQ ID NO: 1506817 - RNA, 19 nt, Homo sapiens
  misc_RNA (1)...(19): siRNA sense strand
augaaagguuguaucaaag

SEQ ID NO: 1506818 - RNA, 19 nt, Homo sapiens
  misc_RNA (1)...(19): siRNA sense strand
auacagaagcagauuuaca

SEQ ID NO: 1506819 - RNA, 19 nt, Homo sapiens
  misc_RNA (1)...(19): siRNA sense strand
cagcagaugagaaguugca

SEQ ID NO: 1506820 - RNA, 19 nt, Homo sapiens
  misc_RNA (1)...(19): siRNA sense strand
agaaggagaaaaugaagua

SEQ ID NO: 1506821 - RNA, 19 nt, Homo sapiens
  misc_RNA (1)...(19): siRNA sense strand
caggugaauguaguauuaa

SEQ ID NO: 1506822 - RNA, 19 nt, Homo sapiens
  misc_RNA (1)...(19): siRNA sense strand
acuaguaggcaaauuaaag

SEQ ID NO: 1506823 - RNA, 19 nt, Homo sapiens
  misc_RNA (1)...(19): siRNA sense strand
ggagcuggccacgaaauac

SEQ ID NO: 1506824 - RNA, 19 nt, Homo sapiens
  misc_RNA (1)...(19): siRNA sense strand
gaaagcagcugcagagaua

SEQ ID NO: 1506825 - RNA, 19 nt, Homo sapiens
  misc_RNA (1)...(19): siRNA sense strand
gaacagagguuucagaaga

SEQ ID NO: 1506826 - RNA, 19 nt, Homo sapiens
  misc_RNA (1)...(19): siRNA sense strand
gaacccagcucuaugaaua

SEQ ID NO: 1506827 - RNA, 19 nt, Homo sapiens
  misc_RNA (1)...(19): siRNA sense strand
gaagaaacaucugugaaga

SEQ ID NO: 1506828 - RNA, 19 nt, Homo sapiens
  misc_RNA (1)...(19): siRNA sense strand
gaacagagccaaauuagag

SEQ ID NO: 1506829 - RNA, 19 nt, Homo sapiens
  misc_RNA (1)...(19): siRNA sense strand
ggauacagcagaagcauua

SEQ ID NO: 1506830 - RNA, 19 nt, Homo sapiens
  misc_RNA (1)...(19): siRNA sense strand
gcaauuuccuuguuagaug

SEQ ID NO: 1506831 - RNA, 19 nt, Homo sapiens
  misc_RNA (1)...(19): siRNA sense strand
gcaauauucugcaucuuug

SEQ ID NO: 1506832 - RNA, 19 nt, Homo sapiens
  misc_RNA (1)...(19): siRNA sense strand
aaacaucugugaagaagaa

SEQ ID NO: 1506833 - RNA, 19 nt, Homo sapiens
  misc_RNA (1)...(19): siRNA sense strand
ggaauucguucacaaaugg

SEQ ID NO: 1506834 - RNA, 19 nt, Homo sapiens
  misc_RNA (1)...(19): siRNA sense strand
gaagacagagggauaagaa

SEQ ID NO: 1506835 - RNA, 19 nt, Homo sapiens
  misc_RNA (1)...(19): siRNA sense strand
acaaauggauggauuaauc

SEQ ID NO: 1506836 - RNA, 19 nt, Homo sapiens
  misc_RNA (1)...(19): siRNA sense strand
gcauuucccugaauuagga

SEQ ID NO: 1506837 - RNA, 19 nt, Homo sapiens
  misc_RNA (1)...(19): siRNA sense strand
ugacuuggauaaagaacua

SEQ ID NO: 1506838 - RNA, 19 nt, Homo sapiens
  misc_RNA (1)...(19): siRNA sense strand
gaagaagaaacaucuguga

SEQ ID NO: 1506839 - RNA, 19 nt, Homo sapiens
  misc_RNA (1)...(19): siRNA sense strand
ugaaaucucugaauaucga

SEQ ID NO: 1506840 - RNA, 19 nt, Homo sapiens
  misc_RNA (1)...(19): siRNA sense strand
ucaggcaauuuccuuguua

SEQ ID NO: 1506841 - RNA, 19 nt, Homo sapiens
  misc_RNA (1)...(19): siRNA sense strand
uagaacagguagauaaaga

SEQ ID NO: 1506842 - RNA, 19 nt, Homo sapiens
  misc_RNA (1)...(19): siRNA sense strand
agaaacacauuaaggaaga

SEQ ID NO: 1506843 - RNA, 19 nt, Homo sapiens
  misc_RNA (1)...(19): siRNA sense strand
agagagagaacgaggauua

SEQ ID NO: 1506844 - RNA, 19 nt, Homo sapiens
  misc_RNA (1)...(19): siRNA sense strand
agaagaaguugaagcagaa

SEQ ID NO: 1506845 - RNA, 19 nt, Homo sapiens
  misc_RNA (1)...(19): siRNA sense strand
cuaaguauggucucauuua

SEQ ID NO: 1506846 - RNA, 19 nt, Homo sapiens
  misc_RNA (1)...(19): siRNA sense strand
gaacuuaugagaggaauuc

SEQ ID NO: 1506847 - RNA, 19 nt, Homo sapiens
  misc_RNA (1)...(19): siRNA sense strand
gagaggaauucguucacaa

SEQ ID NO: 1506848 - RNA, 19 nt, Homo sapiens
  misc_RNA (1)...(19): siRNA sense strand
ucagagcccucaaaucuag

SEQ ID NO: 1506849 - RNA, 19 nt, Homo sapiens
  misc_RNA (1)...(19): siRNA sense strand
ugagaacagagccaaauua

SEQ ID NO: 1506850 - RNA, 19 nt, Homo sapiens
  misc_RNA (1)...(19): siRNA sense strand
guucacaaauggauggauu

SEQ ID NO: 1506851 - RNA, 19 nt, Homo sapiens
  misc_RNA (1)...(19): siRNA sense strand
ggauucaaguucugcaaug

SEQ ID NO: 1506852 - RNA, 19 nt, Homo sapiens
  misc_RNA (1)...(19): siRNA sense strand
uagaugacuuggauaaaga

SEQ ID NO: 1506853 - RNA, 19 nt, Homo sapiens
  misc_RNA (1)...(19): siRNA sense strand
gauaaaguagacacaauga

SEQ ID NO: 1506854 - RNA, 19 nt, Homo sapiens
  misc_RNA (1)...(19): siRNA sense strand
caauuuccuuguuagauga

SEQ ID NO: 1506855 - RNA, 19 nt, Homo sapiens
  misc_RNA (1)...(19): siRNA sense strand
ugaagaagaggaagaagaa

SEQ ID NO: 1506856 - RNA, 19 nt, Homo sapiens
  misc_RNA (1)...(19): siRNA sense strand
gcaaguguuuacagaaagu

SEQ ID NO: 1506857 - RNA, 19 nt, Homo sapiens
  misc_RNA (1)...(19): siRNA sense strand
aaucucaguuguauccaua

SEQ ID NO: 1506858 - RNA, 19 nt, Homo sapiens
  misc_RNA (1)...(19): siRNA sense strand
cuaaacaacuacauuaugc

SEQ ID NO: 1506859 - RNA, 19 nt, Homo sapiens
  misc_RNA (1)...(19): siRNA sense strand
gcagcuaugugucuuggau

SEQ ID NO: 1506860 - RNA, 19 nt, Homo sapiens
  misc_RNA (1)...(19): siRNA sense strand
gguagaaccacgugaaaug

SEQ ID NO: 1506861 - RNA, 19 nt, Homo sapiens
  misc_RNA (1)...(19): siRNA sense strand
gaaacacauuaaggaagaa

SEQ ID NO: 1506862 - RNA, 19 nt, Homo sapiens
  misc_RNA (1)...(19): siRNA sense strand
guugauaguuuauggaaag

SEQ ID NO: 1506863 - RNA, 19 nt, Homo sapiens
  misc_RNA (1)...(19): siRNA sense strand
aguauggucucauuuauca

SEQ ID NO: 1506864 - RNA, 19 nt, Homo sapiens
  misc_RNA (1)...(19): siRNA sense strand
gagaacagagccaaauuag

SEQ ID NO: 1506865 - RNA, 19 nt, Homo sapiens
  misc_RNA (1)...(19): siRNA sense strand
ugaaauggcagcuaugugu

SEQ ID NO: 1506866 - RNA, 19 nt, Homo sapiens
  misc_RNA (1)...(19): siRNA sense strand
gaggaugaaauuacugaaa

SEQ ID NO: 1506867 - RNA, 19 nt, Homo sapiens
  misc_RNA (1)...(19): siRNA sense strand
cugcaaguguuuacagaaa

SEQ ID NO: 1506868 - RNA, 19 nt, Homo sapiens
  misc_RNA (1)...(19): siRNA sense strand
gaggccagguugagaacuu

SEQ ID NO: 1506869 - RNA, 19 nt, Homo sapiens
  misc_RNA (1)...(19): siRNA sense strand
cagccugucucgauauaga

SEQ ID NO: 1506870 - RNA, 19 nt, Homo sapiens
  misc_RNA (1)...(19): siRNA sense strand
gcucaugcagguucucuuu

SEQ ID NO: 1506871 - RNA, 19 nt, Homo sapiens
  misc_RNA (1)...(19): siRNA sense strand
ccagcucuaugaauaucua

SEQ ID NO: 1506872 - RNA, 19 nt, Homo sapiens
  misc_RNA (1)...(19): siRNA sense strand
cugccaagcuuucugaguu

SEQ ID NO: 1506873 - RNA, 19 nt, Homo sapiens
  misc_RNA (1)...(19): siRNA sense strand
ccauaguccuguuguuaau

SEQ ID NO: 1506874 - RNA, 19 nt, Homo sapiens
  misc_RNA (1)...(19): siRNA sense strand
ggauaaagaacuaaacaac

SEQ ID NO: 1506875 - RNA, 19 nt, Homo sapiens
  misc_RNA (1)...(19): siRNA sense strand
gagagagaacgaggauuaa

SEQ ID NO: 1506876 - RNA, 19 nt, Homo sapiens
  misc_RNA (1)...(19): siRNA sense strand
agaaacaucugugaagaag

SEQ ID NO: 1506877 - RNA, 19 nt, Homo sapiens
  misc_RNA (1)...(19): siRNA sense strand
gggaacagagguuucagaa

SEQ ID NO: 1506878 - RNA, 19 nt, Homo sapiens
  misc_RNA (1)...(19): siRNA sense strand
gcuggcauuucccugaauu

SEQ ID NO: 1506879 - RNA, 19 nt, Homo sapiens
  misc_RNA (1)...(19): siRNA sense strand
gaaguugaagcagaaguga

SEQ ID NO: 1506880 - RNA, 19 nt, Homo sapiens
  misc_RNA (1)...(19): siRNA sense strand
gaagaagaggaagaagaaa

SEQ ID NO: 1506881 - RNA, 19 nt, Homo sapiens
  misc_RNA (1)...(19): siRNA sense strand
caaacacaaaggaaagauu

SEQ ID NO: 1506882 - RNA, 19 nt, Homo sapiens
  misc_RNA (1)...(19): siRNA sense strand
gaaucucaguuguauccau

SEQ ID NO: 1506883 - RNA, 19 nt, Homo sapiens
  misc_RNA (1)...(19): siRNA sense strand
gcagaagcauuagcagcau

SEQ ID NO: 1506884 - RNA, 19 nt, Homo sapiens
  misc_RNA (1)...(19): siRNA sense strand
acagguagauaaagaggau

SEQ ID NO: 1506885 - RNA, 19 nt, Homo sapiens
  misc_RNA (1)...(19): siRNA sense strand
agacaagucccaaacacaa

SEQ ID NO: 1506886 - RNA, 19 nt, Homo sapiens
  misc_RNA (1)...(19): siRNA sense strand
uuagaugacuuggauaaag

SEQ ID NO: 1506887 - RNA, 19 nt, Homo sapiens
  misc_RNA (1)...(19): siRNA sense strand
gaauuugaaacuccagaga

SEQ ID NO: 1506888 - RNA, 19 nt, Homo sapiens
  misc_RNA (1)...(19): siRNA sense strand
cagaagaagauauuugcaa

SEQ ID NO: 1506889 - RNA, 19 nt, Homo sapiens
  misc_RNA (1)...(19): siRNA sense strand
gacaagucccaaacacaaa

SEQ ID NO: 1506890 - RNA, 19 nt, Homo sapiens
  misc_RNA (1)...(19): siRNA sense strand
ucaugcagguucucuuuua

SEQ ID NO: 1506891 - RNA, 19 nt, Homo sapiens
  misc_RNA (1)...(19): siRNA sense strand
ucacaaauggauggauuaa

SEQ ID NO: 1506892 - RNA, 19 nt, Homo sapiens
  misc_RNA (1)...(19): siRNA sense strand
cagaagcauuagcagcauu

SEQ ID NO: 1506893 - RNA, 19 nt, Homo sapiens
  misc_RNA (1)...(19): siRNA sense strand
auaguccuguuguuaauga

SEQ ID NO: 1506894 - RNA, 19 nt, Homo sapiens
  misc_RNA (1)...(19): siRNA sense strand
acagaaaguuggcgauagg

SEQ ID NO: 1506895 - RNA, 19 nt, Homo sapiens
  misc_RNA (1)...(19): siRNA sense strand
uaaaguugaagaagaggaa

SEQ ID NO: 1506896 - RNA, 19 nt, Homo sapiens
  misc_RNA (1)...(19): siRNA sense strand
ggaagacagagggauaaga

SEQ ID NO: 1506897 - RNA, 19 nt, Homo sapiens
  misc_RNA (1)...(19): siRNA sense strand
ugagaaauuucaggauaca

SEQ ID NO: 1506898 - RNA, 19 nt, Homo sapiens
  misc_RNA (1)...(19): siRNA sense strand
uuucagagcccucaaaucu

SEQ ID NO: 1506899 - RNA, 19 nt, Homo sapiens
  misc_RNA (1)...(19): siRNA sense strand
aacagagguuucagaagaa

SEQ ID NO: 1506900 - RNA, 19 nt, Homo sapiens
  misc_RNA (1)...(19): siRNA sense strand
gaggaauucguucacaaau

SEQ ID NO: 1506901 - RNA, 19 nt, Homo sapiens
  misc_RNA (1)...(19): siRNA sense strand
gcaauugcuaguccagaga

SEQ ID NO: 1506902 - RNA, 19 nt, Homo sapiens
  misc_RNA (1)...(19): siRNA sense strand
ggcagaagaagaagaaaca

SEQ ID NO: 1506903 - RNA, 19 nt, Homo sapiens
  misc_RNA (1)...(19): siRNA sense strand
guagauaaagaggaugaaa

SEQ ID NO: 1506904 - RNA, 19 nt, Homo sapiens
  misc_RNA (1)...(19): siRNA sense strand
guugagaacuuuggaagac

SEQ ID NO: 1506905 - RNA, 19 nt, Homo sapiens
  misc_RNA (1)...(19): siRNA sense strand
cacgugaaauggcagcuau

SEQ ID NO: 1506906 - RNA, 19 nt, Homo sapiens
  misc_RNA (1)...(19): siRNA sense strand
cuuguuagaugacuuggau

SEQ ID NO: 1506907 - RNA, 19 nt, Homo sapiens
  misc_RNA (1)...(19): siRNA sense strand
gaagaagaagaaacaucug

SEQ ID NO: 1506908 - RNA, 19 nt, Homo sapiens
  misc_RNA (1)...(19): siRNA sense strand
aggaauucguucacaaaug

SEQ ID NO: 1506909 - RNA, 19 nt, Homo sapiens
  misc_RNA (1)...(19): siRNA sense strand
ggucucauuuaucaugcuu

SEQ ID NO: 1506910 - RNA, 19 nt, Homo sapiens
  misc_RNA (1)...(19): siRNA sense strand
gguugauaguuuauggaaa

SEQ ID NO: 1506911 - RNA, 19 nt, Homo sapiens
  misc_RNA (1)...(19): siRNA sense strand
auuugaaacuccagagaaa

SEQ ID NO: 1506912 - RNA, 19 nt, Homo sapiens
  misc_RNA (1)...(19): siRNA sense strand
cugaguugcugccagaaga

SEQ ID NO: 1506913 - RNA, 19 nt, Homo sapiens
  misc_RNA (1)...(19): siRNA sense strand
cugauaaaguagacacaau

SEQ ID NO: 1506914 - RNA, 19 nt, Homo sapiens
  misc_RNA (1)...(19): siRNA sense strand
agaagaaacaucugugaag

SEQ ID NO: 1506915 - RNA, 19 nt, Homo sapiens
  misc_RNA (1)...(19): siRNA sense strand
uuacagaaaguuggcgaua

SEQ ID NO: 1506916 - RNA, 19 nt, Homo sapiens
  misc_RNA (1)...(19): siRNA sense strand
gcucuaugaauaucuacaa

SEQ ID NO: 1506917 - RNA, 19 nt, Homo sapiens
  misc_RNA (1)...(19): siRNA sense strand
agaagaagaagaaacaucu

SEQ ID NO: 1506918 - RNA, 19 nt, Homo sapiens
  misc_RNA (1)...(19): siRNA sense strand
ucuggugacuccacacuuc

SEQ ID NO: 1506919 - RNA, 19 nt, Homo sapiens
  misc_RNA (1)...(19): siRNA sense strand
gcaaugggaguugagaaca

SEQ ID NO: 1506920 - RNA, 19 nt, Homo sapiens
  misc_RNA (1)...(19): siRNA sense strand
uugaaacgucuguggguua

SEQ ID NO: 1506921 - RNA, 19 nt, Homo sapiens
  misc_RNA (1)...(19): siRNA sense strand
ggugaggauucaaguucug

SEQ ID NO: 1506922 - RNA, 19 nt, Homo sapiens
  misc_RNA (1)...(19): siRNA sense strand
uuaguuggagcacggcuua

SEQ ID NO: 1506923 - RNA, 19 nt, Homo sapiens
  misc_RNA (1)...(19): siRNA sense strand
gguuucagaagaagauauu

SEQ ID NO: 1506924 - RNA, 19 nt, Homo sapiens
  misc_RNA (1)...(19): siRNA sense strand
gaaccaagccgccuucagu

SEQ ID NO: 1506925 - RNA, 19 nt, Homo sapiens
  misc_RNA (1)...(19): siRNA sense strand
ccagagggauucgucuaua

SEQ ID NO: 1506926 - RNA, 19 nt, Homo sapiens
  misc_RNA (1)...(19): siRNA sense strand
uuacaaagccuucaccuau

SEQ ID NO: 1506927 - RNA, 19 nt, Homo sapiens
  misc_RNA (1)...(19): siRNA sense strand
cagagggauucgucuauaa

SEQ ID NO: 1506928 - RNA, 19 nt, Homo sapiens
  misc_RNA (1)...(19): siRNA sense strand
acaaagccuucaccuauga

SEQ ID NO: 1506929 - RNA, 19 nt, Homo sapiens
  misc_RNA (1)...(19): siRNA sense strand
cagccucccuggaugcuua

SEQ ID NO: 1506930 - RNA, 19 nt, Homo sapiens
  misc_RNA (1)...(19): siRNA sense strand
uacaaagccuucaccuaug

SEQ ID NO: 1506931 - RNA, 19 nt, Homo sapiens
  misc_RNA (1)...(19): siRNA sense strand
cagaaaaggugauugugaa

SEQ ID NO: 1506932 - RNA, 19 nt, Homo sapiens
  misc_RNA (1)...(19): siRNA sense strand
agacaagaacggaauauca

SEQ ID NO: 1506933 - RNA, 19 nt, Homo sapiens
  misc_RNA (1)...(19): siRNA sense strand
ccaagccgccuucaguuga

SEQ ID NO: 1506934 - RNA, 19 nt, Homo sapiens
  misc_RNA (1)...(19): siRNA sense strand
gaagacaagaacggaauau

SEQ ID NO: 1506935 - RNA, 19 nt, Homo sapiens
  misc_RNA (1)...(19): siRNA sense strand
cuuggagguuaaucacuua

SEQ ID NO: 1506936 - RNA, 19 nt, Homo sapiens
  misc_RNA (1)...(19): siRNA sense strand
aauaucagccggaacagaa

SEQ ID NO: 1506937 - RNA, 19 nt, Homo sapiens
  misc_RNA (1)...(19): siRNA sense strand
gaccgucccucucaucacu

SEQ ID NO: 1506938 - RNA, 19 nt, Homo sapiens
  misc_RNA (1)...(19): siRNA sense strand
gaauaucagccggaacaga

SEQ ID NO: 1506939 - RNA, 19 nt, Homo sapiens
  misc_RNA (1)...(19): siRNA sense strand
ggagguuaaucacuuacag

SEQ ID NO: 1506940 - RNA, 19 nt, Homo sapiens
  misc_RNA (1)...(19): siRNA sense strand
ccuuggagguuaaucacuu

SEQ ID NO: 1506941 - RNA, 19 nt, Homo sapiens
  misc_RNA (1)...(19): siRNA sense strand
ugaagacaagaacggaaua

SEQ ID NO: 1506942 - RNA, 19 nt, Homo sapiens
  misc_RNA (1)...(19): siRNA sense strand
gacaagaacggaauaucag

SEQ ID NO: 1506943 - RNA, 19 nt, Homo sapiens
  misc_RNA (1)...(19): siRNA sense strand
acagcugccugcuccagaa

SEQ ID NO: 1506944 - RNA, 19 nt, Homo sapiens
  misc_RNA (1)...(19): siRNA sense strand
uauaagcacaaacgcugua

SEQ ID NO: 1506945 - RNA, 19 nt, Homo sapiens
  misc_RNA (1)...(19): siRNA sense strand
ucguguuccuggugguuua

SEQ ID NO: 1506946 - RNA, 19 nt, Homo sapiens
  misc_RNA (1)...(19): siRNA sense strand
acacagucaucagccacua

SEQ ID NO: 1506947 - RNA, 19 nt, Homo sapiens
  misc_RNA (1)...(19): siRNA sense strand
cggaauaucagccggaaca

SEQ ID NO: 1506948 - RNA, 19 nt, Homo sapiens
  misc_RNA (1)...(19): siRNA sense strand
gugaagacaagaacggaau

SEQ ID NO: 1506949 - RNA, 19 nt, Homo sapiens
  misc_RNA (1)...(19): siRNA sense strand
gaaguuccgggugccgaaa

SEQ ID NO: 1506950 - RNA, 19 nt, Homo sapiens
  misc_RNA (1)...(19): siRNA sense strand
caagccgccuucaguugag

SEQ ID NO: 1506951 - RNA, 19 nt, Homo sapiens
  misc_RNA (1)...(19): siRNA sense strand
gcccagagggauucgucua

SEQ ID NO: 1506952 - RNA, 19 nt, Homo sapiens
  misc_RNA (1)...(19): siRNA sense strand
gaaaaggugauugugaaga

SEQ ID NO: 1506953 - RNA, 19 nt, Homo sapiens
  misc_RNA (1)...(19): siRNA sense strand
cagccuggcccuagcuuuc

SEQ ID NO: 1506954 - RNA, 19 nt, Homo sapiens
  misc_RNA (1)...(19): siRNA sense strand
uagcuuuccuugcgugcau

SEQ ID NO: 1506955 - RNA, 19 nt, Homo sapiens
  misc_RNA (1)...(19): siRNA sense strand
ccagaaaaggugauuguga

SEQ ID NO: 1506956 - RNA, 19 nt, Homo sapiens
  misc_RNA (1)...(19): siRNA sense strand
ccaagacccagggccacua

SEQ ID NO: 1506957 - RNA, 19 nt, Homo sapiens
  misc_RNA (1)...(19): siRNA sense strand
ccagaaagcuuggcagaua

SEQ ID NO: 1506958 - RNA, 19 nt, Homo sapiens
  misc_RNA (1)...(19): siRNA sense strand
gaaaucaaccuuacaaaug

SEQ ID NO: 1506959 - RNA, 19 nt, Homo sapiens
  misc_RNA (1)...(19): siRNA sense strand
ggucuucucuguccuguuu

SEQ ID NO: 1506960 - RNA, 19 nt, Homo sapiens
  misc_RNA (1)...(19): siRNA sense strand
ggaagauucuggacuguau

SEQ ID NO: 1506961 - RNA, 19 nt, Homo sapiens
  misc_RNA (1)...(19): siRNA sense strand
ggaaaaguaugaacugaaa

SEQ ID NO: 1506962 - RNA, 19 nt, Homo sapiens
  misc_RNA (1)...(19): siRNA sense strand
cagaaagcuuggcagauaa

SEQ ID NO: 1506963 - RNA, 19 nt, Homo sapiens
  misc_RNA (1)...(19): siRNA sense strand
gcugguggauuccugagua

SEQ ID NO: 1506964 - RNA, 19 nt, Homo sapiens
  misc_RNA (1)...(19): siRNA sense strand
ggucaaccuucaaguggaa

SEQ ID NO: 1506965 - RNA, 19 nt, Homo sapiens
  misc_RNA (1)...(19): siRNA sense strand
gggcagacccuggauguga

SEQ ID NO: 1506966 - RNA, 19 nt, Homo sapiens
  misc_RNA (1)...(19): siRNA sense strand
acuccgagcugcaacuaaa

SEQ ID NO: 1506967 - RNA, 19 nt, Homo sapiens
  misc_RNA (1)...(19): siRNA sense strand
ggaggaucauacuagaaga

SEQ ID NO: 1506968 - RNA, 19 nt, Homo sapiens
  misc_RNA (1)...(19): siRNA sense strand
gaauucccauccaguccaa

SEQ ID NO: 1506969 - RNA, 19 nt, Homo sapiens
  misc_RNA (1)...(19): siRNA sense strand
gaaagcuuggcagauaaua

SEQ ID NO: 1506970 - RNA, 19 nt, Homo sapiens
  misc_RNA (1)...(19): siRNA sense strand
gaacuccgagcugcaacua

SEQ ID NO: 1506971 - RNA, 19 nt, Homo sapiens
  misc_RNA (1)...(19): siRNA sense strand
ggcagacccuggaugugaa

SEQ ID NO: 1506972 - RNA, 19 nt, Homo sapiens
  misc_RNA (1)...(19): siRNA sense strand
cuacccagaauguguauaa

SEQ ID NO: 1506973 - RNA, 19 nt, Homo sapiens
  misc_RNA (1)...(19): siRNA sense strand
cuagaagacuaccaugauc

SEQ ID NO: 1506974 - RNA, 19 nt, Homo sapiens
  misc_RNA (1)...(19): siRNA sense strand
ggaucauacuagaagacua

SEQ ID NO: 1506975 - RNA, 19 nt, Homo sapiens
  misc_RNA (1)...(19): siRNA sense strand
gaugugaaaugugacuaca

SEQ ID NO: 1506976 - RNA, 19 nt, Homo sapiens
  misc_RNA (1)...(19): siRNA sense strand
cccagaauguguauaagau

SEQ ID NO: 1506977 - RNA, 19 nt, Homo sapiens
  misc_RNA (1)...(19): siRNA sense strand
gacccuggaugugaaaugu

SEQ ID NO: 1506978 - RNA, 19 nt, Homo sapiens
  misc_RNA (1)...(19): siRNA sense strand
gaugcucuuugucucagaa

SEQ ID NO: 1506979 - RNA, 19 nt, Homo sapiens
  misc_RNA (1)...(19): siRNA sense strand
gaucauacuagaagacuac

SEQ ID NO: 1506980 - RNA, 19 nt, Homo sapiens
  misc_RNA (1)...(19): siRNA sense strand
gggaggaucauacuagaag

SEQ ID NO: 1506981 - RNA, 19 nt, Homo sapiens
  misc_RNA (1)...(19): siRNA sense strand
ccaaggagccucacaugcu

SEQ ID NO: 1506982 - RNA, 19 nt, Homo sapiens
  misc_RNA (1)...(19): siRNA sense strand
ucuccuggcugguggauuc

SEQ ID NO: 1506983 - RNA, 19 nt, Homo sapiens
  misc_RNA (1)...(19): siRNA sense strand
acuacacgcuagagaaguu

SEQ ID NO: 1506984 - RNA, 19 nt, Homo sapiens
  misc_RNA (1)...(19): siRNA sense strand
acgcugaggucauuuguac

SEQ ID NO: 1506985 - RNA, 19 nt, Homo sapiens
  misc_RNA (1)...(19): siRNA sense strand
caucaggguuccgguguuc

SEQ ID NO: 1506986 - RNA, 19 nt, Homo sapiens
  misc_RNA (1)...(19): siRNA sense strand
ccagaauguguauaagauu

SEQ ID NO: 1506987 - RNA, 19 nt, Homo sapiens
  misc_RNA (1)...(19): siRNA sense strand
gguggauuccugaguaaga

SEQ ID NO: 1506988 - RNA, 19 nt, Homo sapiens
  misc_RNA (1)...(19): siRNA sense strand
ccgagcugcaacuaaauua

SEQ ID NO: 1506989 - RNA, 19 nt, Homo sapiens
  misc_RNA (1)...(19): siRNA sense strand
uaacugaggaaaaguauga

SEQ ID NO: 1506990 - RNA, 19 nt, Homo sapiens
  misc_RNA (1)...(19): siRNA sense strand
gaggaaaaguaugaacuga

SEQ ID NO: 1506991 - RNA, 19 nt, Homo sapiens
  misc_RNA (1)...(19): siRNA sense strand
aauaagggacggagagaug

SEQ ID NO: 1506992 - RNA, 19 nt, Homo sapiens
  misc_RNA (1)...(19): siRNA sense strand
aaagcuuggcagauaauaa

SEQ ID NO: 1506993 - RNA, 19 nt, Homo sapiens
  misc_RNA (1)...(19): siRNA sense strand
gagcugcaacuaaauuaac

SEQ ID NO: 1506994 - RNA, 19 nt, Homo sapiens
  misc_RNA (1)...(19): siRNA sense strand
gcagacccuggaugugaaa

SEQ ID NO: 1506995 - RNA, 19 nt, Homo sapiens
  misc_RNA (1)...(19): siRNA sense strand
cgagcugcaacuaaauuaa

SEQ ID NO: 1506996 - RNA, 19 nt, Homo sapiens
  misc_RNA (1)...(19): siRNA sense strand
cccuggaugugaaauguga

SEQ ID NO: 1506997 - RNA, 19 nt, Homo sapiens
  misc_RNA (1)...(19): siRNA sense strand
guucaacauugucauucuc

SEQ ID NO: 1506998 - RNA, 19 nt, Homo sapiens
  misc_RNA (1)...(19): siRNA sense strand
uagaagacuaccaugauca

SEQ ID NO: 1506999 - RNA, 19 nt, Homo sapiens
  misc_RNA (1)...(19): siRNA sense strand
gugacuacacgcuagagaa

SEQ ID NO: 1507000 - RNA, 19 nt, Homo sapiens
  misc_RNA (1)...(19): siRNA sense strand
cugguggauuccugaguaa

SEQ ID NO: 1507001 - RNA, 19 nt, Homo sapiens
  misc_RNA (1)...(19): siRNA sense strand
aaucaaccuuacaaaugug

SEQ ID NO: 1507002 - RNA, 19 nt, Homo sapiens
  misc_RNA (1)...(19): siRNA sense strand
acucugaaaucaaccuuac

SEQ ID NO: 1507003 - RNA, 19 nt, Homo sapiens
  misc_RNA (1)...(19): siRNA sense strand
guguauaagauuccuccua

SEQ ID NO: 1507004 - RNA, 19 nt, Homo sapiens
  misc_RNA (1)...(19): siRNA sense strand
ugacuacacgcuagagaag

SEQ ID NO: 1507005 - RNA, 19 nt, Homo sapiens
  misc_RNA (1)...(19): siRNA sense strand
caaaugugacagauaucau

SEQ ID NO: 1507006 - RNA, 19 nt, Homo sapiens
  misc_RNA (1)...(19): siRNA sense strand
acaaaugugacagauauca

SEQ ID NO: 1507007 - RNA, 19 nt, Homo sapiens
  misc_RNA (1)...(19): siRNA sense strand
ucugaaaucaaccuuacaa

SEQ ID NO: 1507008 - RNA, 19 nt, Homo sapiens
  misc_RNA (1)...(19): siRNA sense strand
ggaugcucuuugucucaga

SEQ ID NO: 1507009 - RNA, 19 nt, Homo sapiens
  misc_RNA (1)...(19): siRNA sense strand
uuacugcgcguccgaaugg

SEQ ID NO: 1507010 - RNA, 19 nt, Homo sapiens
  misc_RNA (1)...(19): siRNA sense strand
gccagcagccagaaagcuu

SEQ ID NO: 1507011 - RNA, 19 nt, Homo sapiens
  misc_RNA (1)...(19): siRNA sense strand
gccuugugcccacucuaua

SEQ ID NO: 1507012 - RNA, 19 nt, Homo sapiens
  misc_RNA (1)...(19): siRNA sense strand
ggccuugugcccacucuau

SEQ ID NO: 1507013 - RNA, 19 nt, Homo sapiens
  misc_RNA (1)...(19): siRNA sense strand
acggagagaugcccaagac

SEQ ID NO: 1507014 - RNA, 19 nt, Homo sapiens
  misc_RNA (1)...(19): siRNA sense strand
aagcuuggcagauaauaag

SEQ ID NO: 1507015 - RNA, 19 nt, Homo sapiens
  misc_RNA (1)...(19): siRNA sense strand
ucaucaggguuccgguguu

SEQ ID NO: 1507016 - RNA, 19 nt, Homo sapiens
  misc_RNA (1)...(19): siRNA sense strand
acuccugacucugaaauca

SEQ ID NO: 1507017 - RNA, 19 nt, Homo sapiens
  misc_RNA (1)...(19): siRNA sense strand
uauaagauuccuccuacca

SEQ ID NO: 1507018 - RNA, 19 nt, Homo sapiens
  misc_RNA (1)...(19): siRNA sense strand
gaagauucuggacuguauc

SEQ ID NO: 1507019 - RNA, 19 nt, Homo sapiens
  misc_RNA (1)...(19): siRNA sense strand
acuagaagacuaccaugau

SEQ ID NO: 1507020 - RNA, 19 nt, Homo sapiens
  misc_RNA (1)...(19): siRNA sense strand
gaacagggcugcacugacu

SEQ ID NO: 1507021 - RNA, 19 nt, Homo sapiens
  misc_RNA (1)...(19): siRNA sense strand
agaagaagcuggaggaguu

SEQ ID NO: 1507022 - RNA, 19 nt, Homo sapiens
  misc_RNA (1)...(19): siRNA sense strand
gcucugcacuccaugauga

SEQ ID NO: 1507023 - RNA, 19 nt, Homo sapiens
  misc_RNA (1)...(19): siRNA sense strand
gaagagagugugagaucaa

SEQ ID NO: 1507024 - RNA, 19 nt, Homo sapiens
  misc_RNA (1)...(19): siRNA sense strand
ggaagaggccgaggugcua

SEQ ID NO: 1507025 - RNA, 19 nt, Homo sapiens
  misc_RNA (1)...(19): siRNA sense strand
caucguggcucguggaaca

SEQ ID NO: 1507026 - RNA, 19 nt, Homo sapiens
  misc_RNA (1)...(19): siRNA sense strand
ugcaagaccugccagauuc

SEQ ID NO: 1507027 - RNA, 19 nt, Homo sapiens
  misc_RNA (1)...(19): siRNA sense strand
gcugaaagacugcaucauc

SEQ ID NO: 1507028 - RNA, 19 nt, Homo sapiens
  misc_RNA (1)...(19): siRNA sense strand
agaaggagaucaacaaacg

SEQ ID NO: 1507029 - RNA, 19 nt, Homo sapiens
  misc_RNA (1)...(19): siRNA sense strand
gugcaagaccugccagauu

SEQ ID NO: 1507030 - RNA, 19 nt, Homo sapiens
  misc_RNA (1)...(19): siRNA sense strand
aggcugagcuggccaagau

SEQ ID NO: 1507031 - RNA, 19 nt, Homo sapiens
  misc_RNA (1)...(19): siRNA sense strand
aggagcagaucaagaagaa

SEQ ID NO: 1507032 - RNA, 19 nt, Homo sapiens
  misc_RNA (1)...(19): siRNA sense strand
ggacaucccuacgguacag

SEQ ID NO: 1507033 - RNA, 19 nt, Homo sapiens
  misc_RNA (1)...(19): siRNA sense strand
gcgaagagagugugagauc

SEQ ID NO: 1507034 - RNA, 19 nt, Homo sapiens
  misc_RNA (1)...(19): siRNA sense strand
cgaagagagugugagauca

SEQ ID NO: 1507035 - RNA, 19 nt, Homo sapiens
  misc_RNA (1)...(19): siRNA sense strand
uggccaagaucaagcagaa

SEQ ID NO: 1507036 - RNA, 19 nt, Homo sapiens
  misc_RNA (1)...(19): siRNA sense strand
ucgaggagcagaucaagaa

SEQ ID NO: 1507037 - RNA, 19 nt, Homo sapiens
  misc_RNA (1)...(19): siRNA sense strand
aaagaaggagaucaacaaa

SEQ ID NO: 1507038 - RNA, 19 nt, Homo sapiens
  misc_RNA (1)...(19): siRNA sense strand
ggaagacagcagcguuugu

SEQ ID NO: 1507039 - RNA, 19 nt, Homo sapiens
  misc_RNA (1)...(19): siRNA sense strand
gccaagaucaagcagaaga

SEQ ID NO: 1507040 - RNA, 19 nt, Homo sapiens
  misc_RNA (1)...(19): siRNA sense strand
cugcgcagcuccaacacuu

SEQ ID NO: 1507041 - RNA, 19 nt, Homo sapiens
  misc_RNA (1)...(19): siRNA sense strand
gaggagcagaucaagaaga

SEQ ID NO: 1507042 - RNA, 19 nt, Homo sapiens
  misc_RNA (1)...(19): siRNA sense strand
gaggaucccuauggcaucu

SEQ ID NO: 1507043 - RNA, 19 nt, Homo sapiens
  misc_RNA (1)...(19): siRNA sense strand
aagagagugugagaucaaa

SEQ ID NO: 1507044 - RNA, 19 nt, Homo sapiens
  misc_RNA (1)...(19): siRNA sense strand
ggaucccuauggcaucuuc

SEQ ID NO: 1507045 - RNA, 19 nt, Homo sapiens
  misc_RNA (1)...(19): siRNA sense strand
ggagcucucucggaaacca

SEQ ID NO: 1507046 - RNA, 19 nt, Homo sapiens
  misc_RNA (1)...(19): siRNA sense strand
cagaccggcugcuggaaca

SEQ ID NO: 1507047 - RNA, 19 nt, Homo sapiens
  misc_RNA (1)...(19): siRNA sense strand
ccagaucgcagagcaguuc

SEQ ID NO: 1507048 - RNA, 19 nt, Homo sapiens
  misc_RNA (1)...(19): siRNA sense strand
gaaaagaaggagaucaaca

SEQ ID NO: 1507049 - RNA, 19 nt, Homo sapiens
  misc_RNA (1)...(19): siRNA sense strand
ccaaccagcccuucuucug

SEQ ID NO: 1507050 - RNA, 19 nt, Homo sapiens
  misc_RNA (1)...(19): siRNA sense strand
cgguacagguggucaucaa

SEQ ID NO: 1507051 - RNA, 19 nt, Homo sapiens
  misc_RNA (1)...(19): siRNA sense strand
ccauuaucaucuucaccaa

SEQ ID NO: 1507052 - RNA, 19 nt, Homo sapiens
  misc_RNA (1)...(19): siRNA sense strand
ccaagaucaagcagaagaa

SEQ ID NO: 1507053 - RNA, 19 nt, Homo sapiens
  misc_RNA (1)...(19): siRNA sense strand
gaagaagcuggaggaguuc

SEQ ID NO: 1507054 - RNA, 19 nt, Homo sapiens
  misc_RNA (1)...(19): siRNA sense strand
auuaucaucuucaccaaca

SEQ ID NO: 1507055 - RNA, 19 nt, Homo sapiens
  misc_RNA (1)...(19): siRNA sense strand
cuccaacacuuuuaguaua

SEQ ID NO: 1507056 - RNA, 19 nt, Homo sapiens
  misc_RNA (1)...(19): siRNA sense strand
ccaccaaccagcccuucuu

SEQ ID NO: 1507057 - RNA, 19 nt, Homo sapiens
  misc_RNA (1)...(19): siRNA sense strand
gggaagacagcagcguuug

SEQ ID NO: 1507058 - RNA, 19 nt, Homo sapiens
  misc_RNA (1)...(19): siRNA sense strand
gucggcagcuggguuugaa

SEQ ID NO: 1507059 - RNA, 19 nt, Homo sapiens
  misc_RNA (1)...(19): siRNA sense strand
gacaggcagugggaagaca

SEQ ID NO: 1507060 - RNA, 19 nt, Homo sapiens
  misc_RNA (1)...(19): siRNA sense strand
gagagugugagaucaaacu

SEQ ID NO: 1507061 - RNA, 19 nt, Homo sapiens
  misc_RNA (1)...(19): siRNA sense strand
gggcugaaagacugcauca

SEQ ID NO: 1507062 - RNA, 19 nt, Homo sapiens
  misc_RNA (1)...(19): siRNA sense strand
gugcgaagagagugugaga

SEQ ID NO: 1507063 - RNA, 19 nt, Homo sapiens
  misc_RNA (1)...(19): siRNA sense strand
guuuguccuucccaucuug

SEQ ID NO: 1507064 - RNA, 19 nt, Homo sapiens
  misc_RNA (1)...(19): siRNA sense strand
guucaaguccagcaucuac

SEQ ID NO: 1507065 - RNA, 19 nt, Homo sapiens
  misc_RNA (1)...(19): siRNA sense strand
aaaagaaggagaucaacaa

SEQ ID NO: 1507066 - RNA, 19 nt, Homo sapiens
  misc_RNA (1)...(19): siRNA sense strand
ucaacguggugcgaagaga

SEQ ID NO: 1507067 - RNA, 19 nt, Homo sapiens
  misc_RNA (1)...(19): siRNA sense strand
gaagaaaccuuaugcaaua

SEQ ID NO: 1507068 - RNA, 19 nt, Homo sapiens
  misc_RNA (1)...(19): siRNA sense strand
ggacauagcuccgguauua

SEQ ID NO: 1507069 - RNA, 19 nt, Homo sapiens
  misc_RNA (1)...(19): siRNA sense strand
gcauagagcuggagaaaua

SEQ ID NO: 1507070 - RNA, 19 nt, Homo sapiens
  misc_RNA (1)...(19): siRNA sense strand
gaagaauucucuaaggaua

SEQ ID NO: 1507071 - RNA, 19 nt, Homo sapiens
  misc_RNA (1)...(19): siRNA sense strand
gaaauuaccuaccaaggaa

SEQ ID NO: 1507072 - RNA, 19 nt, Homo sapiens
  misc_RNA (1)...(19): siRNA sense strand
ggacauacuugaagaaaga

SEQ ID NO: 1507073 - RNA, 19 nt, Homo sapiens
  misc_RNA (1)...(19): siRNA sense strand
gaacaggacucaaccuuuc

SEQ ID NO: 1507074 - RNA, 19 nt, Homo sapiens
  misc_RNA (1)...(19): siRNA sense strand
ucagagaacuccaguagua

SEQ ID NO: 1507075 - RNA, 19 nt, Homo sapiens
  misc_RNA (1)...(19): siRNA sense strand
gaggagagaucuagaaguu

SEQ ID NO: 1507076 - RNA, 19 nt, Homo sapiens
  misc_RNA (1)...(19): siRNA sense strand
ggacagaguuucagcaaau

SEQ ID NO: 1507077 - RNA, 19 nt, Homo sapiens
  misc_RNA (1)...(19): siRNA sense strand
uaaaugagcugagugguaa

SEQ ID NO: 1507078 - RNA, 19 nt, Homo sapiens
  misc_RNA (1)...(19): siRNA sense strand
gaacuaacauccaaagaag

SEQ ID NO: 1507079 - RNA, 19 nt, Homo sapiens
  misc_RNA (1)...(19): siRNA sense strand
gcaaaugaccaaacagaua

SEQ ID NO: 1507080 - RNA, 19 nt, Homo sapiens
  misc_RNA (1)...(19): siRNA sense strand
gaaguagugugauuaauag

SEQ ID NO: 1507081 - RNA, 19 nt, Homo sapiens
  misc_RNA (1)...(19): siRNA sense strand
ggaagaaacuauggaauuc

SEQ ID NO: 1507082 - RNA, 19 nt, Homo sapiens
  misc_RNA (1)...(19): siRNA sense strand
gaagagaaauuaccuacca

SEQ ID NO: 1507083 - RNA, 19 nt, Homo sapiens
  misc_RNA (1)...(19): siRNA sense strand
ggaaagagcucugaaacag

SEQ ID NO: 1507084 - RNA, 19 nt, Homo sapiens
  misc_RNA (1)...(19): siRNA sense strand
cuaauagacucaaagcaua

SEQ ID NO: 1507085 - RNA, 19 nt, Homo sapiens
  misc_RNA (1)...(19): siRNA sense strand
ggagaaaacucuaaaauag

SEQ ID NO: 1507086 - RNA, 19 nt, Homo sapiens
  misc_RNA (1)...(19): siRNA sense strand
caauauagaugacagagau

SEQ ID NO: 1507087 - RNA, 19 nt, Homo sapiens
  misc_RNA (1)...(19): siRNA sense strand
gagaugagggaaacucuua

SEQ ID NO: 1507088 - RNA, 19 nt, Homo sapiens
  misc_RNA (1)...(19): siRNA sense strand
caaaugaccaaacagauaa

SEQ ID NO: 1507089 - RNA, 19 nt, Homo sapiens
  misc_RNA (1)...(19): siRNA sense strand
caaagaagcagacuuaaca

SEQ ID NO: 1507090 - RNA, 19 nt, Homo sapiens
  misc_RNA (1)...(19): siRNA sense strand
uagaggagcuggaugaaga

SEQ ID NO: 1507091 - RNA, 19 nt, Homo sapiens
  misc_RNA (1)...(19): siRNA sense strand
ggaagaaaccuuaugcaau

SEQ ID NO: 1507092 - RNA, 19 nt, Homo sapiens
  misc_RNA (1)...(19): siRNA sense strand
gaauggacauacuugaaga

SEQ ID NO: 1507093 - RNA, 19 nt, Homo sapiens
  misc_RNA (1)...(19): siRNA sense strand
gggcagaggacauaauuaa

SEQ ID NO: 1507094 - RNA, 19 nt, Homo sapiens
  misc_RNA (1)...(19): siRNA sense strand
ugagcugagugguaaauua

SEQ ID NO: 1507095 - RNA, 19 nt, Homo sapiens
  misc_RNA (1)...(19): siRNA sense strand
aaagaaaggcaaagagaua

SEQ ID NO: 1507096 - RNA, 19 nt, Homo sapiens
  misc_RNA (1)...(19): siRNA sense strand
ggauggagaggaugaauuu

SEQ ID NO: 1507097 - RNA, 19 nt, Homo sapiens
  misc_RNA (1)...(19): siRNA sense strand
ggacguaucagcaauuaug

SEQ ID NO: 1507098 - RNA, 19 nt, Homo sapiens
  misc_RNA (1)...(19): siRNA sense strand
aagaggagauuggaaauuu

SEQ ID NO: 1507099 - RNA, 19 nt, Homo sapiens
  misc_RNA (1)...(19): siRNA sense strand
uaacagaaacugauaagga

SEQ ID NO: 1507100 - RNA, 19 nt, Homo sapiens
  misc_RNA (1)...(19): siRNA sense strand
cagaagaacuaacauccaa

SEQ ID NO: 1507101 - RNA, 19 nt, Homo sapiens
  misc_RNA (1)...(19): siRNA sense strand
cagcaacacuggauauuag

SEQ ID NO: 1507102 - RNA, 19 nt, Homo sapiens
  misc_RNA (1)...(19): siRNA sense strand
gaaaagagacugacuccua

SEQ ID NO: 1507103 - RNA, 19 nt, Homo sapiens
  misc_RNA (1)...(19): siRNA sense strand
gaauagggcagaggacaua

SEQ ID NO: 1507104 - RNA, 19 nt, Homo sapiens
  misc_RNA (1)...(19): siRNA sense strand
gcaauggaguaaugucuuc

SEQ ID NO: 1507105 - RNA, 19 nt, Homo sapiens
  misc_RNA (1)...(19): siRNA sense strand
guaaaugagcugaguggua

SEQ ID NO: 1507106 - RNA, 19 nt, Homo sapiens
  misc_RNA (1)...(19): siRNA sense strand
gaaggaaagagcucugaaa

SEQ ID NO: 1507107 - RNA, 19 nt, Homo sapiens
  misc_RNA (1)...(19): siRNA sense strand
ggagcaaugucuucaaagu

SEQ ID NO: 1507108 - RNA, 19 nt, Homo sapiens
  misc_RNA (1)...(19): siRNA sense strand
gauggaggaugaugaagau

SEQ ID NO: 1507109 - RNA, 19 nt, Homo sapiens
  misc_RNA (1)...(19): siRNA sense strand
gcacacagaagaacuaaca

SEQ ID NO: 1507110 - RNA, 19 nt, Homo sapiens
  misc_RNA (1)...(19): siRNA sense strand
gcaaggacguaucagcaau

SEQ ID NO: 1507111 - RNA, 19 nt, Homo sapiens
  misc_RNA (1)...(19): siRNA sense strand
gaaaugagagaggaaagaa

SEQ ID NO: 1507112 - RNA, 19 nt, Homo sapiens
  misc_RNA (1)...(19): siRNA sense strand
ggaauucuagugauaaaga

SEQ ID NO: 1507113 - RNA, 19 nt, Homo sapiens
  misc_RNA (1)...(19): siRNA sense strand
gaaaccuuaugcaauauag

SEQ ID NO: 1507114 - RNA, 19 nt, Homo sapiens
  misc_RNA (1)...(19): siRNA sense strand
agaaguaaauggagcaaug

SEQ ID NO: 1507115 - RNA, 19 nt, Homo sapiens
  misc_RNA (1)...(19): siRNA sense strand
agagagagaagagaaauua

SEQ ID NO: 1507116 - RNA, 19 nt, Homo sapiens
  misc_RNA (1)...(19): siRNA sense strand
caacaggagucaccaaacu

SEQ ID NO: 1507117 - RNA, 19 nt, Homo sapiens
  misc_RNA (1)...(19): siRNA sense strand
gcaaagccuuagaaaauuu

SEQ ID NO: 1507118 - RNA, 19 nt, Homo sapiens
  misc_RNA (1)...(19): siRNA sense strand
ugucagugcuugucgagua

SEQ ID NO: 1507119 - RNA, 19 nt, Homo sapiens
  misc_RNA (1)...(19): siRNA sense strand
guaaagaaaggcaaagaga

SEQ ID NO: 1507120 - RNA, 19 nt, Homo sapiens
  misc_RNA (1)...(19): siRNA sense strand
gcauucacauacaaauuug

SEQ ID NO: 1507121 - RNA, 19 nt, Homo sapiens
  misc_RNA (1)...(19): siRNA sense strand
gacagaguuucagcaaaua

SEQ ID NO: 1507122 - RNA, 19 nt, Homo sapiens
  misc_RNA (1)...(19): siRNA sense strand
gaugaaggagcaguacuua

SEQ ID NO: 1507123 - RNA, 19 nt, Homo sapiens
  misc_RNA (1)...(19): siRNA sense strand
ggaacaagaaucagguuga

SEQ ID NO: 1507124 - RNA, 19 nt, Homo sapiens
  misc_RNA (1)...(19): siRNA sense strand
gaaguugcaacauucguuu

SEQ ID NO: 1507125 - RNA, 19 nt, Homo sapiens
  misc_RNA (1)...(19): siRNA sense strand
ggagaaauaaccagugaug

SEQ ID NO: 1507126 - RNA, 19 nt, Homo sapiens
  misc_RNA (1)...(19): siRNA sense strand
ggaacagacuucagaacag

SEQ ID NO: 1507127 - RNA, 19 nt, Homo sapiens
  misc_RNA (1)...(19): siRNA sense strand
ugauguaucuacuagugua

SEQ ID NO: 1507128 - RNA, 19 nt, Homo sapiens
  misc_RNA (1)...(19): siRNA sense strand
agacaacacuaacgaauac

SEQ ID NO: 1507129 - RNA, 19 nt, Homo sapiens
  misc_RNA (1)...(19): siRNA sense strand
ucaggugucuuggaaauug

SEQ ID NO: 1507130 - RNA, 19 nt, Homo sapiens
  misc_RNA (1)...(19): siRNA sense strand
ggcuugagcuuccuauuuc

SEQ ID NO: 1507131 - RNA, 19 nt, Homo sapiens
  misc_RNA (1)...(19): siRNA sense strand
caacacuggauauuaguaa

SEQ ID NO: 1507132 - RNA, 19 nt, Homo sapiens
  misc_RNA (1)...(19): siRNA sense strand
caacauucguuugauagga

SEQ ID NO: 1507133 - RNA, 19 nt, Homo sapiens
  misc_RNA (1)...(19): siRNA sense strand
cagaggacauaauuaagga

SEQ ID NO: 1507134 - RNA, 19 nt, Homo sapiens
  misc_RNA (1)...(19): siRNA sense strand
gaaacuauggaauucaaga

SEQ ID NO: 1507135 - RNA, 19 nt, Homo sapiens
  misc_RNA (1)...(19): siRNA sense strand
gaacaagaaucagguugac

SEQ ID NO: 1507136 - RNA, 19 nt, Homo sapiens
  misc_RNA (1)...(19): siRNA sense strand
cuacuaguguacaaucaaa

SEQ ID NO: 1507137 - RNA, 19 nt, Homo sapiens
  misc_RNA (1)...(19): siRNA sense strand
caaagucacuagagaugag

SEQ ID NO: 1507138 - RNA, 19 nt, Homo sapiens
  misc_RNA (1)...(19): siRNA sense strand
ggucauacuuugguagaug

SEQ ID NO: 1507139 - RNA, 19 nt, Homo sapiens
  misc_RNA (1)...(19): siRNA sense strand
ggaggaggaagaagaagaa

SEQ ID NO: 1507140 - RNA, 19 nt, Homo sapiens
  misc_RNA (1)...(19): siRNA sense strand
gguaaagaauucagagaac

SEQ ID NO: 1507141 - RNA, 19 nt, Homo sapiens
  misc_RNA (1)...(19): siRNA sense strand
gagaauuacuggggaauaa

SEQ ID NO: 1507142 - RNA, 19 nt, Homo sapiens
  misc_RNA (1)...(19): siRNA sense strand
gagcaaugucuucaaaguu

SEQ ID NO: 1507143 - RNA, 19 nt, Homo sapiens
  misc_RNA (1)...(19): siRNA sense strand
agacacaucuuggugaaau

SEQ ID NO: 1507144 - RNA, 19 nt, Homo sapiens
  misc_RNA (1)...(19): siRNA sense strand
caaugcaaaugaccaaaca

SEQ ID NO: 1507145 - RNA, 19 nt, Homo sapiens
  misc_RNA (1)...(19): siRNA sense strand
ggaaggauggagaggauga

SEQ ID NO: 1507146 - RNA, 19 nt, Homo sapiens
  misc_RNA (1)...(19): siRNA sense strand
cuucagggauggaggauga

SEQ ID NO: 1507147 - RNA, 19 nt, Homo sapiens
  misc_RNA (1)...(19): siRNA sense strand
ggaggaagaaacuauggaa

SEQ ID NO: 1507148 - RNA, 19 nt, Homo sapiens
  misc_RNA (1)...(19): siRNA sense strand
aaaggagaguuaugagaau

SEQ ID NO: 1507149 - RNA, 19 nt, Homo sapiens
  misc_RNA (1)...(19): siRNA sense strand
ccauucaggugucuuggaa

SEQ ID NO: 1507150 - RNA, 19 nt, Homo sapiens
  misc_RNA (1)...(19): siRNA sense strand
gaggagauuggaaauuuga

SEQ ID NO: 1507151 - RNA, 19 nt, Homo sapiens
  misc_RNA (1)...(19): siRNA sense strand
gcuccgguauuagauuuaa

SEQ ID NO: 1507152 - RNA, 19 nt, Homo sapiens
  misc_RNA (1)...(19): siRNA sense strand
caggaaagguaaagacuac

SEQ ID NO: 1507153 - RNA, 19 nt, Homo sapiens
  misc_RNA (1)...(19): siRNA sense strand
uagcuccgguauuagauuu

SEQ ID NO: 1507154 - RNA, 19 nt, Homo sapiens
  misc_RNA (1)...(19): siRNA sense strand
gcagaggacauaauuaagg

SEQ ID NO: 1507155 - RNA, 19 nt, Homo sapiens
  misc_RNA (1)...(19): siRNA sense strand
ucuagaaguugcaacauuc

SEQ ID NO: 1507156 - RNA, 19 nt, Homo sapiens
  misc_RNA (1)...(19): siRNA sense strand
gagaaguagugugauuaau

SEQ ID NO: 1507157 - RNA, 19 nt, Homo sapiens
  misc_RNA (1)...(19): siRNA sense strand
gaagaacuaacauccaaag

SEQ ID NO: 1507158 - RNA, 19 nt, Homo sapiens
  misc_RNA (1)...(19): siRNA sense strand
gaaauaaaucaaggaggaa

SEQ ID NO: 1507159 - RNA, 19 nt, Homo sapiens
  misc_RNA (1)...(19): siRNA sense strand
gcaacacuggauauuagua

SEQ ID NO: 1507160 - RNA, 19 nt, Homo sapiens
  misc_RNA (1)...(19): siRNA sense strand
gaaaauagaaggagaaaac

SEQ ID NO: 1507161 - RNA, 19 nt, Homo sapiens
  misc_RNA (1)...(19): siRNA sense strand
gaaaggcaaagagauauag

SEQ ID NO: 1507162 - RNA, 19 nt, Homo sapiens
  misc_RNA (1)...(19): siRNA sense strand
ggagauuggaaauuugaaa

SEQ ID NO: 1507163 - RNA, 19 nt, Homo sapiens
  misc_RNA (1)...(19): siRNA sense strand
ggagucaccaaacuuaaga

SEQ ID NO: 1507164 - RNA, 19 nt, Homo sapiens
  misc_RNA (1)...(19): siRNA sense strand
uagacaacacuaacgaaua

SEQ ID NO: 1507165 - RNA, 19 nt, Homo sapiens
  misc_RNA (1)...(19): siRNA sense strand
cagguugacagcagacuua

SEQ ID NO: 1507166 - RNA, 19 nt, Homo sapiens
  misc_RNA (1)...(19): siRNA sense strand
aaggacguaucagcaauua

SEQ ID NO: 1507167 - RNA, 19 nt, Homo sapiens
  misc_RNA (1)...(19): siRNA sense strand
gaacagguaucucaggaaa

SEQ ID NO: 1507168 - RNA, 19 nt, Homo sapiens
  misc_RNA (1)...(19): siRNA sense strand
caucaaagccucaagaaua

SEQ ID NO: 1507169 - RNA, 19 nt, Homo sapiens
  misc_RNA (1)...(19): siRNA sense strand
gcucuaagcagugauaaua

SEQ ID NO: 1507170 - RNA, 19 nt, Homo sapiens
  misc_RNA (1)...(19): siRNA sense strand
ugaagaagcucuggacaug

SEQ ID NO: 1507171 - RNA, 19 nt, Homo sapiens
  misc_RNA (1)...(19): siRNA sense strand
ggacagcuccagaacauug

SEQ ID NO: 1507172 - RNA, 19 nt, Homo sapiens
  misc_RNA (1)...(19): siRNA sense strand
gaagcuauacugacuguga

SEQ ID NO: 1507173 - RNA, 19 nt, Homo sapiens
  misc_RNA (1)...(19): siRNA sense strand
aaauggacauggugaacua

SEQ ID NO: 1507174 - RNA, 19 nt, Homo sapiens
  misc_RNA (1)...(19): siRNA sense strand
gaacauuccauucaguaug

SEQ ID NO: 1507175 - RNA, 19 nt, Homo sapiens
  misc_RNA (1)...(19): siRNA sense strand
cagaaccgccugagaauug

SEQ ID NO: 1507176 - RNA, 19 nt, Homo sapiens
  misc_RNA (1)...(19): siRNA sense strand
uaaguacguucucaacaug

SEQ ID NO: 1507177 - RNA, 19 nt, Homo sapiens
  misc_RNA (1)...(19): siRNA sense strand
gauaaacugaaacgcauaa

SEQ ID NO: 1507178 - RNA, 19 nt, Homo sapiens
  misc_RNA (1)...(19): siRNA sense strand
cagcugugcucuugaacuu

SEQ ID NO: 1507179 - RNA, 19 nt, Homo sapiens
  misc_RNA (1)...(19): siRNA sense strand
gugcagcggucucuauuag

SEQ ID NO: 1507180 - RNA, 19 nt, Homo sapiens
  misc_RNA (1)...(19): siRNA sense strand
cuaaguacguucucaacau

SEQ ID NO: 1507181 - RNA, 19 nt, Homo sapiens
  misc_RNA (1)...(19): siRNA sense strand
gauccuguuuggcuacuga

SEQ ID NO: 1507182 - RNA, 19 nt, Homo sapiens
  misc_RNA (1)...(19): siRNA sense strand
caugauggcuuugcugugu

SEQ ID NO: 1507183 - RNA, 19 nt, Homo sapiens
  misc_RNA (1)...(19): siRNA sense strand
cuacuacacugagauccua

SEQ ID NO: 1507184 - RNA, 19 nt, Homo sapiens
  misc_RNA (1)...(19): siRNA sense strand
caacuugacacaucacaau

SEQ ID NO: 1507185 - RNA, 19 nt, Homo sapiens
  misc_RNA (1)...(19): siRNA sense strand
cgucauggccucagucuug

SEQ ID NO: 1507186 - RNA, 19 nt, Homo sapiens
  misc_RNA (1)...(19): siRNA sense strand
caggagaccucaccauguc

SEQ ID NO: 1507187 - RNA, 19 nt, Homo sapiens
  misc_RNA (1)...(19): siRNA sense strand
aagaagcucuggacaugga

SEQ ID NO: 1507188 - RNA, 19 nt, Homo sapiens
  misc_RNA (1)...(19): siRNA sense strand
gcaggagaccucaccaugu

SEQ ID NO: 1507189 - RNA, 19 nt, Homo sapiens
  misc_RNA (1)...(19): siRNA sense strand
aacauuccauucaguauga

SEQ ID NO: 1507190 - RNA, 19 nt, Homo sapiens
  misc_RNA (1)...(19): siRNA sense strand
gagaauugagauugaagaa

SEQ ID NO: 1507191 - RNA, 19 nt, Homo sapiens
  misc_RNA (1)...(19): siRNA sense strand
ugaggaagcuauacugacu

SEQ ID NO: 1507192 - RNA, 19 nt, Homo sapiens
  misc_RNA (1)...(19): siRNA sense strand
acagguaucucaggaaauc

SEQ ID NO: 1507193 - RNA, 19 nt, Homo sapiens
  misc_RNA (1)...(19): siRNA sense strand
ccaagaaggagaacugugu

SEQ ID NO: 1507194 - RNA, 19 nt, Homo sapiens
  misc_RNA (1)...(19): siRNA sense strand
gacuucagcugugcucuug

SEQ ID NO: 1507195 - RNA, 19 nt, Homo sapiens
  misc_RNA (1)...(19): siRNA sense strand
aagcagaacuggcagaacu

SEQ ID NO: 1507196 - RNA, 19 nt, Homo sapiens
  misc_RNA (1)...(19): siRNA sense strand
ccaaugaggcagccaacaa

SEQ ID NO: 1507197 - RNA, 19 nt, Homo sapiens
  misc_RNA (1)...(19): siRNA sense strand
gagaugaagcagugcagaa

SEQ ID NO: 1507198 - RNA, 19 nt, Homo sapiens
  misc_RNA (1)...(19): siRNA sense strand
gaaaguccucuaucucucu

SEQ ID NO: 1507199 - RNA, 19 nt, Homo sapiens
  misc_RNA (1)...(19): siRNA sense strand
aaacaaaaguggagucugu

SEQ ID NO: 1507200 - RNA, 19 nt, Homo sapiens
  misc_RNA (1)...(19): siRNA sense strand
ugaaacgcauaaccaaauc

SEQ ID NO: 1507201 - RNA, 19 nt, Homo sapiens
  misc_RNA (1)...(19): siRNA sense strand
ucaauaagcagccuagucu

SEQ ID NO: 1507202 - RNA, 19 nt, Homo sapiens
  misc_RNA (1)...(19): siRNA sense strand
gagcaacuaucagcaacuc

SEQ ID NO: 1507203 - RNA, 19 nt, Homo sapiens
  misc_RNA (1)...(19): siRNA sense strand
uccagaacauugccaagaa

SEQ ID NO: 1507204 - RNA, 19 nt, Homo sapiens
  misc_RNA (1)...(19): siRNA sense strand
aucaaagccucaagaauau

SEQ ID NO: 1507205 - RNA, 19 nt, Homo sapiens
  misc_RNA (1)...(19): siRNA sense strand
ucuaagcagugauaauaca

SEQ ID NO: 1507206 - RNA, 19 nt, Homo sapiens
  misc_RNA (1)...(19): siRNA sense strand
gcugugcucuugaacuucu

SEQ ID NO: 1507207 - RNA, 19 nt, Homo sapiens
  misc_RNA (1)...(19): siRNA sense strand
ccagaacauugccaagaag

SEQ ID NO: 1507208 - RNA, 19 nt, Homo sapiens
  misc_RNA (1)...(19): siRNA sense strand
ugggacagcuccagaacau

SEQ ID NO: 1507209 - RNA, 19 nt, Homo sapiens
  misc_RNA (1)...(19): siRNA sense strand
aaugaagaguucccugaga

SEQ ID NO: 1507210 - RNA, 19 nt, Homo sapiens
  misc_RNA (1)...(19): siRNA sense strand
aguaugaacgggcuaaauu

SEQ ID NO: 1507211 - RNA, 19 nt, Homo sapiens
  misc_RNA (1)...(19): siRNA sense strand
uccucuaucucucuaagua

SEQ ID NO: 1507212 - RNA, 19 nt, Homo sapiens
  misc_RNA (1)...(19): siRNA sense strand
aaaguccucuaucucucua

SEQ ID NO: 1507213 - RNA, 19 nt, Homo sapiens
  misc_RNA (1)...(19): siRNA sense strand
gccugagaauugagauuga

SEQ ID NO: 1507214 - RNA, 19 nt, Homo sapiens
  misc_RNA (1)...(19): siRNA sense strand
gcagugcagaaacuagaaa

SEQ ID NO: 1507215 - RNA, 19 nt, Homo sapiens
  misc_RNA (1)...(19): siRNA sense strand
guaugaacgggcuaaauuc

SEQ ID NO: 1507216 - RNA, 19 nt, Homo sapiens
  misc_RNA (1)...(19): siRNA sense strand
aagaauaugggccuuguug

SEQ ID NO: 1507217 - RNA, 19 nt, Homo sapiens
  misc_RNA (1)...(19): siRNA sense strand
agccuagucuccuuaauca

SEQ ID NO: 1507218 - RNA, 19 nt, Homo sapiens
  misc_RNA (1)...(19): siRNA sense strand
ucaaggagacagugcacaa

SEQ ID NO: 1507219 - RNA, 19 nt, Homo sapiens
  misc_RNA (1)...(19): siRNA sense strand
gaauaugggccuuguugcu

SEQ ID NO: 1507220 - RNA, 19 nt, Homo sapiens
  misc_RNA (1)...(19): siRNA sense strand
aaacugaaacgcauaacca

SEQ ID NO: 1507221 - RNA, 19 nt, Homo sapiens
  misc_RNA (1)...(19): siRNA sense strand
uaagcagccuagucuccuu

SEQ ID NO: 1507222 - RNA, 19 nt, Homo sapiens
  misc_RNA (1)...(19): siRNA sense strand
cgacuugcccagacacuuc

SEQ ID NO: 1507223 - RNA, 19 nt, Homo sapiens
  misc_RNA (1)...(19): siRNA sense strand
aaagagcaacuaucagcaa

SEQ ID NO: 1507224 - RNA, 19 nt, Homo sapiens
  misc_RNA (1)...(19): siRNA sense strand
ccugagaauugagauugaa

SEQ ID NO: 1507225 - RNA, 19 nt, Homo sapiens
  misc_RNA (1)...(19): siRNA sense strand
cagcggauccauuuguuuc

SEQ ID NO: 1507226 - RNA, 19 nt, Homo sapiens
  misc_RNA (1)...(19): siRNA sense strand
ucugggaccuugaaaauga

SEQ ID NO: 1507227 - RNA, 19 nt, Homo sapiens
  misc_RNA (1)...(19): siRNA sense strand
ccaugucaccuccgacuug

SEQ ID NO: 1507228 - RNA, 19 nt, Homo sapiens
  misc_RNA (1)...(19): siRNA sense strand
uuaaucacaccaccaaaug

SEQ ID NO: 1507229 - RNA, 19 nt, Homo sapiens
  misc_RNA (1)...(19): siRNA sense strand
gaucuugcuaucacugcua

SEQ ID NO: 1507230 - RNA, 19 nt, Homo sapiens
  misc_RNA (1)...(19): siRNA sense strand
gugcaccaguucgagauga

SEQ ID NO: 1507231 - RNA, 19 nt, Homo sapiens
  misc_RNA (1)...(19): siRNA sense strand
ggucauuuccaacagcuau

SEQ ID NO: 1507232 - RNA, 19 nt, Homo sapiens
  misc_RNA (1)...(19): siRNA sense strand
cgccagaaccgccugagaa

SEQ ID NO: 1507233 - RNA, 19 nt, Homo sapiens
  misc_RNA (1)...(19): siRNA sense strand
gagagggaucuuccagguu

SEQ ID NO: 1507234 - RNA, 19 nt, Homo sapiens
  misc_RNA (1)...(19): siRNA sense strand
gaagcagugcagaaacuag

SEQ ID NO: 1507235 - RNA, 19 nt, Homo sapiens
  misc_RNA (1)...(19): siRNA sense strand
gguguuuggucccuacuac

SEQ ID NO: 1507236 - RNA, 19 nt, Homo sapiens
  misc_RNA (1)...(19): siRNA sense strand
gacagugcacaaugccuuu

SEQ ID NO: 1507237 - RNA, 19 nt, Homo sapiens
  misc_RNA (1)...(19): siRNA sense strand
cauaaccaaauccuuguug

SEQ ID NO: 1507238 - RNA, 19 nt, Homo sapiens
  misc_RNA (1)...(19): siRNA sense strand
cugaaacgcauaaccaaau

SEQ ID NO: 1507239 - RNA, 19 nt, Homo sapiens
  misc_RNA (1)...(19): siRNA sense strand
gcagaaacuagaaaacauu

SEQ ID NO: 1507240 - RNA, 19 nt, Homo sapiens
  misc_RNA (1)...(19): siRNA sense strand
gcauaaccaaauccuuguu

SEQ ID NO: 1507241 - RNA, 19 nt, Homo sapiens
  misc_RNA (1)...(19): siRNA sense strand
ggagcugaagucccaguug

SEQ ID NO: 1507242 - RNA, 19 nt, Homo sapiens
  misc_RNA (1)...(19): siRNA sense strand
agaaccgccugagaauuga

SEQ ID NO: 1507243 - RNA, 19 nt, Homo sapiens
  misc_RNA (1)...(19): siRNA sense strand
gccagaaccgccugagaau

SEQ ID NO: 1507244 - RNA, 19 nt, Homo sapiens
  misc_RNA (1)...(19): siRNA sense strand
ggauccauuuguuucucaa

SEQ ID NO: 1507245 - RNA, 19 nt, Homo sapiens
  misc_RNA (1)...(19): siRNA sense strand
caaagccucaagaauaugg

SEQ ID NO: 1507246 - RNA, 19 nt, Homo sapiens
  misc_RNA (1)...(19): siRNA sense strand
gcucuugaacuucugaaag

SEQ ID NO: 1507247 - RNA, 19 nt, Homo sapiens
  misc_RNA (1)...(19): siRNA sense strand
ccagaaccgccugagaauu

SEQ ID NO: 1507248 - RNA, 19 nt, Homo sapiens
  misc_RNA (1)...(19): siRNA sense strand
ugucugcaguguuauugau

SEQ ID NO: 1507249 - RNA, 19 nt, Homo sapiens
  misc_RNA (1)...(19): siRNA sense strand
uauacugacugugagugaa

SEQ ID NO: 1507250 - RNA, 19 nt, Homo sapiens
  misc_RNA (1)...(19): siRNA sense strand
cugagacccugcugaugga

SEQ ID NO: 1507251 - RNA, 19 nt, Homo sapiens
  misc_RNA (1)...(19): siRNA sense strand
cagccuagucuccuuaauc

SEQ ID NO: 1507252 - RNA, 19 nt, Homo sapiens
  misc_RNA (1)...(19): siRNA sense strand
gcagccuagucuccuuaau

SEQ ID NO: 1507253 - RNA, 19 nt, Homo sapiens
  misc_RNA (1)...(19): siRNA sense strand
gcuauuaccacgccagaac

SEQ ID NO: 1507254 - RNA, 19 nt, Homo sapiens
  misc_RNA (1)...(19): siRNA sense strand
cauuacggauccuguuugg

SEQ ID NO: 1507255 - RNA, 19 nt, Homo sapiens
  misc_RNA (1)...(19): siRNA sense strand
acaaucagcagguguuugg

SEQ ID NO: 1507256 - RNA, 19 nt, Homo sapiens
  misc_RNA (1)...(19): siRNA sense strand
ccuagucuccuuaaucaca

SEQ ID NO: 1507257 - RNA, 19 nt, Homo sapiens
  misc_RNA (1)...(19): siRNA sense strand
cuugcuaucacugcuauua

SEQ ID NO: 1507258 - RNA, 19 nt, Homo sapiens
  misc_RNA (1)...(19): siRNA sense strand
ccuggaggccuuacucuca

SEQ ID NO: 1507259 - RNA, 19 nt, Homo sapiens
  misc_RNA (1)...(19): siRNA sense strand
ucucaggaaauccaucaaa

SEQ ID NO: 1507260 - RNA, 19 nt, Homo sapiens
  misc_RNA (1)...(19): siRNA sense strand
agaugaagcagugcagaaa

SEQ ID NO: 1507261 - RNA, 19 nt, Homo sapiens
  misc_RNA (1)...(19): siRNA sense strand
ggugugcagcggucucuau

SEQ ID NO: 1507262 - RNA, 19 nt, Homo sapiens
  misc_RNA (1)...(19): siRNA sense strand
aggaagcuauacugacugu

SEQ ID NO: 1507263 - RNA, 19 nt, Homo sapiens
  misc_RNA (1)...(19): siRNA sense strand
ggacauggugaacuacacu

SEQ ID NO: 1507264 - RNA, 19 nt, Homo sapiens
  misc_RNA (1)...(19): siRNA sense strand
aagcagccuagucuccuua

SEQ ID NO: 1507265 - RNA, 19 nt, Homo sapiens
  misc_RNA (1)...(19): siRNA sense strand
uaaccgucauggccucagu

SEQ ID NO: 1507266 - RNA, 19 nt, Homo sapiens
  misc_RNA (1)...(19): siRNA sense strand
cggauccauuuguuucuca

SEQ ID NO: 1507267 - RNA, 19 nt, Homo sapiens
  misc_RNA (1)...(19): siRNA sense strand
gaaagugaccgacagguuu

SEQ ID NO: 1507268 - RNA, 19 nt, Homo sapiens
  misc_RNA (1)...(19): siRNA sense strand
ccaaagcagugcacaauuc

SEQ ID NO: 1507269 - RNA, 19 nt, Homo sapiens
  misc_RNA (1)...(19): siRNA sense strand
ugaagaaucuagccgagaa

SEQ ID NO: 1507270 - RNA, 19 nt, Homo sapiens
  misc_RNA (1)...(19): siRNA sense strand
ggaagggcaucgugugcaa

SEQ ID NO: 1507271 - RNA, 19 nt, Homo sapiens
  misc_RNA (1)...(19): siRNA sense strand
cccaagacaugcuuuaaau

SEQ ID NO: 1507272 - RNA, 19 nt, Homo sapiens
  misc_RNA (1)...(19): siRNA sense strand
cggagaagcuggcccuguu

SEQ ID NO: 1507273 - RNA, 19 nt, Homo sapiens
  misc_RNA (1)...(19): siRNA sense strand
gggcccagguggugaagaa

SEQ ID NO: 1507274 - RNA, 19 nt, Homo sapiens
  misc_RNA (1)...(19): siRNA sense strand
uggaggacauugugacuug

SEQ ID NO: 1507275 - RNA, 19 nt, Homo sapiens
  misc_RNA (1)...(19): siRNA sense strand
gaagcuggcccuguuccua

SEQ ID NO: 1507276 - RNA, 19 nt, Homo sapiens
  misc_RNA (1)...(19): siRNA sense strand
gcccaagacaugcuuuaaa

SEQ ID NO: 1507277 - RNA, 19 nt, Homo sapiens
  misc_RNA (1)...(19): siRNA sense strand
ggacugcugggagaacuuu

SEQ ID NO: 1507278 - RNA, 19 nt, Homo sapiens
  misc_RNA (1)...(19): siRNA sense strand
ggacguggaggacauugug

SEQ ID NO: 1507279 - RNA, 19 nt, Homo sapiens
  misc_RNA (1)...(19): siRNA sense strand
gaaucuagccgagaagaag

SEQ ID NO: 1507280 - RNA, 19 nt, Homo sapiens
  misc_RNA (1)...(19): siRNA sense strand
caagcgaggacacgccuuu

SEQ ID NO: 1507281 - RNA, 19 nt, Homo sapiens
  misc_RNA (1)...(19): siRNA sense strand
gaagggccgucggagagau

SEQ ID NO: 1507282 - RNA, 19 nt, Homo sapiens
  misc_RNA (1)...(19): siRNA sense strand
ugaaagugaccgacagguu

SEQ ID NO: 1507283 - RNA, 19 nt, Homo sapiens
  misc_RNA (1)...(19): siRNA sense strand
gacccgggacuucguggua

SEQ ID NO: 1507284 - RNA, 19 nt, Homo sapiens
  misc_RNA (1)...(19): siRNA sense strand
cgagaagaagggcgaauuc

SEQ ID NO: 1507285 - RNA, 19 nt, Homo sapiens
  misc_RNA (1)...(19): siRNA sense strand
ccaagacaugcuuuaaaug

SEQ ID NO: 1507286 - RNA, 19 nt, Homo sapiens
  misc_RNA (1)...(19): siRNA sense strand
ggaguacaaaugcgagauc

SEQ ID NO: 1507287 - RNA, 19 nt, Homo sapiens
  misc_RNA (1)...(19): siRNA sense strand
aaagugaccgacagguuug

SEQ ID NO: 1507288 - RNA, 19 nt, Homo sapiens
  misc_RNA (1)...(19): siRNA sense strand
ggagaagcuggcccuguuc

SEQ ID NO: 1507289 - RNA, 19 nt, Homo sapiens
  misc_RNA (1)...(19): siRNA sense strand
gcgcggaggaagagaggaa

SEQ ID NO: 1507290 - RNA, 19 nt, Homo sapiens
  misc_RNA (1)...(19): siRNA sense strand
cagcccaagacaugcuuua

SEQ ID NO: 1507291 - RNA, 19 nt, Homo sapiens
  misc_RNA (1)...(19): siRNA sense strand
gaggacugcugggagaacu

SEQ ID NO: 1507292 - RNA, 19 nt, Homo sapiens
  misc_RNA (1)...(19): siRNA sense strand
gaagaaucuagccgagaag

SEQ ID NO: 1507293 - RNA, 19 nt, Homo sapiens
  misc_RNA (1)...(19): siRNA sense strand
gccggaaggugcuggaguu

SEQ ID NO: 1507294 - RNA, 19 nt, Homo sapiens
  misc_RNA (1)...(19): siRNA sense strand
gcggaugucuguggacuca

SEQ ID NO: 1507295 - RNA, 19 nt, Homo sapiens
  misc_RNA (1)...(19): siRNA sense strand
ucgcugggcuucagacaca

SEQ ID NO: 1507296 - RNA, 19 nt, Homo sapiens
  misc_RNA (1)...(19): siRNA sense strand
ggacaucgagcaguacuac

SEQ ID NO: 1507297 - RNA, 19 nt, Homo sapiens
  misc_RNA (1)...(19): siRNA sense strand
gcaacguggugggcauugu

SEQ ID NO: 1507298 - RNA, 19 nt, Homo sapiens
  misc_RNA (1)...(19): siRNA sense strand
caacguggugggcauugug

SEQ ID NO: 1507299 - RNA, 19 nt, Homo sapiens
  misc_RNA (1)...(19): siRNA sense strand
ucgccguggugcacaacua

SEQ ID NO: 1507300 - RNA, 19 nt, Homo sapiens
  misc_RNA (1)...(19): siRNA sense strand
uggcugagcgccucuucuu

SEQ ID NO: 1507301 - RNA, 19 nt, Homo sapiens
  misc_RNA (1)...(19): siRNA sense strand
gaagagaaagcuaauaaga

SEQ ID NO: 1507302 - RNA, 19 nt, Homo sapiens
  misc_RNA (1)...(19): siRNA sense strand
agagaaagcuaauaagaag

SEQ ID NO: 1507303 - RNA, 19 nt, Homo sapiens
  misc_RNA (1)...(19): siRNA sense strand
gcugcuggaucaaguauca

SEQ ID NO: 1507304 - RNA, 19 nt, Homo sapiens
  misc_RNA (1)...(19): siRNA sense strand
cugaagagaaagcuaauaa

SEQ ID NO: 1507305 - RNA, 19 nt, Homo sapiens
  misc_RNA (1)...(19): siRNA sense strand
gagagaagaggaagagucu

SEQ ID NO: 1507306 - RNA, 19 nt, Homo sapiens
  misc_RNA (1)...(19): siRNA sense strand
gucuuggucuuuggaaaua

SEQ ID NO: 1507307 - RNA, 19 nt, Homo sapiens
  misc_RNA (1)...(19): siRNA sense strand
uaagaaggcagagagaaga

SEQ ID NO: 1507308 - RNA, 19 nt, Homo sapiens
  misc_RNA (1)...(19): siRNA sense strand
gcagagagaagaggaagag

SEQ ID NO: 1507309 - RNA, 19 nt, Homo sapiens
  misc_RNA (1)...(19): siRNA sense strand
gagucuuggucuuuggaaa

SEQ ID NO: 1507310 - RNA, 19 nt, Homo sapiens
  misc_RNA (1)...(19): siRNA sense strand
ggucuuuggaaauaucuuu

SEQ ID NO: 1507311 - RNA, 19 nt, Homo sapiens
  misc_RNA (1)...(19): siRNA sense strand
ggagcugcuggaucaagua

SEQ ID NO: 1507312 - RNA, 19 nt, Homo sapiens
  misc_RNA (1)...(19): siRNA sense strand
uaauaagaaggcagagaga

SEQ ID NO: 1507313 - RNA, 19 nt, Homo sapiens
  misc_RNA (1)...(19): siRNA sense strand
gagcugcuggaucaaguau

SEQ ID NO: 1507314 - RNA, 19 nt, Homo sapiens
  misc_RNA (1)...(19): siRNA sense strand
gcuaauaagaaggcagaga

SEQ ID NO: 1507315 - RNA, 19 nt, Homo sapiens
  misc_RNA (1)...(19): siRNA sense strand
gaagagaaagcuaauaaga

SEQ ID NO: 1507316 - RNA, 19 nt, Homo sapiens
  misc_RNA (1)...(19): siRNA sense strand
agagaaagcuaauaagaag

SEQ ID NO: 1507317 - RNA, 19 nt, Homo sapiens
  misc_RNA (1)...(19): siRNA sense strand
gcugcuggaucaaguauca

SEQ ID NO: 1507318 - RNA, 19 nt, Homo sapiens
  misc_RNA (1)...(19): siRNA sense strand
cugaagagaaagcuaauaa

SEQ ID NO: 1507319 - RNA, 19 nt, Homo sapiens
  misc_RNA (1)...(19): siRNA sense strand
gagagaagaggaagagucu

SEQ ID NO: 1507320 - RNA, 19 nt, Homo sapiens
  misc_RNA (1)...(19): siRNA sense strand
gucuuggucuuuggaaaua

SEQ ID NO: 1507321 - RNA, 19 nt, Homo sapiens
  misc_RNA (1)...(19): siRNA sense strand
uaagaaggcagagagaaga

SEQ ID NO: 1507322 - RNA, 19 nt, Homo sapiens
  misc_RNA (1)...(19): siRNA sense strand
gcagagagaagaggaagag

SEQ ID NO: 1507323 - RNA, 19 nt, Homo sapiens
  misc_RNA (1)...(19): siRNA sense strand
gagucuuggucuuuggaaa

SEQ ID NO: 1507324 - RNA, 19 nt, Homo sapiens
  misc_RNA (1)...(19): siRNA sense strand
ggucuuuggaaauaucuuu

SEQ ID NO: 1507325 - RNA, 19 nt, Homo sapiens
  misc_RNA (1)...(19): siRNA sense strand
ggagcugcuggaucaagua

SEQ ID NO: 1507326 - RNA, 19 nt, Homo sapiens
  misc_RNA (1)...(19): siRNA sense strand
uaauaagaaggcagagaga

SEQ ID NO: 1507327 - RNA, 19 nt, Homo sapiens
  misc_RNA (1)...(19): siRNA sense strand
gagcugcuggaucaaguau

SEQ ID NO: 1507328 - RNA, 19 nt, Homo sapiens
  misc_RNA (1)...(19): siRNA sense strand
gcuaauaagaaggcagaga

SEQ ID NO: 1507329 - RNA, 19 nt, Homo sapiens
  misc_RNA (1)...(19): siRNA sense strand
uggaacagcugcagccauu

SEQ ID NO: 1507330 - RNA, 19 nt, Homo sapiens
  misc_RNA (1)...(19): siRNA sense strand
ccucaccuuucuacaagua

SEQ ID NO: 1507331 - RNA, 19 nt, Homo sapiens
  misc_RNA (1)...(19): siRNA sense strand
ggaaaccugggacaucuga

SEQ ID NO: 1507332 - RNA, 19 nt, Homo sapiens
  misc_RNA (1)...(19): siRNA sense strand
gaacagcugcagccauuuu

SEQ ID NO: 1507333 - RNA, 19 nt, Homo sapiens
  misc_RNA (1)...(19): siRNA sense strand
gaugugaggucuggaacag

SEQ ID NO: 1507334 - RNA, 19 nt, Homo sapiens
  misc_RNA (1)...(19): siRNA sense strand
ccugggacaucugaacuga

SEQ ID NO: 1507335 - RNA, 19 nt, Homo sapiens
  misc_RNA (1)...(19): siRNA sense strand
acucuucccucaccuuucu

SEQ ID NO: 1507336 - RNA, 19 nt, Homo sapiens
  misc_RNA (1)...(19): siRNA sense strand
ugggaaaccugggacaucu

SEQ ID NO: 1507337 - RNA, 19 nt, Homo sapiens
  misc_RNA (1)...(19): siRNA sense strand
ucccucaccuuucuacaag

SEQ ID NO: 1507338 - RNA, 19 nt, Homo sapiens
  misc_RNA (1)...(19): siRNA sense strand
cuacucuucccucaccuuu

SEQ ID NO: 1507339 - RNA, 19 nt, Homo sapiens
  misc_RNA (1)...(19): siRNA sense strand
ggaacagcugcagccauuu

SEQ ID NO: 1507340 - RNA, 19 nt, Homo sapiens
  misc_RNA (1)...(19): siRNA sense strand
uggaacagcugcagccauu

SEQ ID NO: 1507341 - RNA, 19 nt, Homo sapiens
  misc_RNA (1)...(19): siRNA sense strand
ccucaccuuucuacaagua

SEQ ID NO: 1507342 - RNA, 19 nt, Homo sapiens
  misc_RNA (1)...(19): siRNA sense strand
ggaaaccugggacaucuga

SEQ ID NO: 1507343 - RNA, 19 nt, Homo sapiens
  misc_RNA (1)...(19): siRNA sense strand
gaacagcugcagccauuuu

SEQ ID NO: 1507344 - RNA, 19 nt, Homo sapiens
  misc_RNA (1)...(19): siRNA sense strand
gaugugaggucuggaacag

SEQ ID NO: 1507345 - RNA, 19 nt, Homo sapiens
  misc_RNA (1)...(19): siRNA sense strand
ccugggacaucugaacuga

SEQ ID NO: 1507346 - RNA, 19 nt, Homo sapiens
  misc_RNA (1)...(19): siRNA sense strand
acucuucccucaccuuucu

SEQ ID NO: 1507347 - RNA, 19 nt, Homo sapiens
  misc_RNA (1)...(19): siRNA sense strand
ugggaaaccugggacaucu

SEQ ID NO: 1507348 - RNA, 19 nt, Homo sapiens
  misc_RNA (1)...(19): siRNA sense strand
ucccucaccuuucuacaag

SEQ ID NO: 1507349 - RNA, 19 nt, Homo sapiens
  misc_RNA (1)...(19): siRNA sense strand
cuacucuucccucaccuuu

SEQ ID NO: 1507350 - RNA, 19 nt, Homo sapiens
  misc_RNA (1)...(19): siRNA sense strand
ggaacagcugcagccauuu

SEQ ID NO: 1507351 - RNA, 19 nt, Homo sapiens
  misc_RNA (1)...(19): siRNA sense strand
ggcuauggcuccagcuuug

SEQ ID NO: 1507352 - RNA, 19 nt, Homo sapiens
  misc_RNA (1)...(19): siRNA sense strand
ggccugggcugugguuaug

SEQ ID NO: 1507353 - RNA, 19 nt, Homo sapiens
  misc_RNA (1)...(19): siRNA sense strand
uguggcagcuacuacagaa

SEQ ID NO: 1507354 - RNA, 19 nt, Homo sapiens
  misc_RNA (1)...(19): siRNA sense strand
cuacagaaacuacaauggu

SEQ ID NO: 1507355 - RNA, 19 nt, Homo sapiens
  misc_RNA (1)...(19): siRNA sense strand
ggccugggcuuuggcuaug

SEQ ID NO: 1507356 - RNA, 19 nt, Homo sapiens
  misc_RNA (1)...(19): siRNA sense strand
cagcuuuggcuacuacuau

SEQ ID NO: 1507357 - RNA, 19 nt, Homo sapiens
  misc_RNA (1)...(19): siRNA sense strand
cuacggaggccugggcuuu

SEQ ID NO: 1507358 - RNA, 19 nt, Homo sapiens
  misc_RNA (1)...(19): siRNA sense strand
gcuccagcuuuggcuacua

SEQ ID NO: 1507359 - RNA, 19 nt, Homo sapiens
  misc_RNA (1)...(19): siRNA sense strand
ggcuauggcuguggcuaug

SEQ ID NO: 1507360 - RNA, 19 nt, Homo sapiens
  misc_RNA (1)...(19): siRNA sense strand
gcagcuacuacagaaacua

SEQ ID NO: 1507361 - RNA, 19 nt, Homo sapiens
  misc_RNA (1)...(19): siRNA sense strand
ggccuggacuguggcuaug

SEQ ID NO: 1507362 - RNA, 19 nt, Homo sapiens
  misc_RNA (1)...(19): siRNA sense strand
ggccuggacuguggcuaug

SEQ ID NO: 1507363 - RNA, 19 nt, Homo sapiens
  misc_RNA (1)...(19): siRNA sense strand
gcuacuacagaaacuacaa

SEQ ID NO: 1507364 - RNA, 19 nt, Homo sapiens
  misc_RNA (1)...(19): siRNA sense strand
ugagguacaugaucaauuu

SEQ ID NO: 1507365 - RNA, 19 nt, Homo sapiens
  misc_RNA (1)...(19): siRNA sense strand
cgacagaauugcagagauu

SEQ ID NO: 1507366 - RNA, 19 nt, Homo sapiens
  misc_RNA (1)...(19): siRNA sense strand
gaaguuucauuauccagaa

SEQ ID NO: 1507367 - RNA, 19 nt, Homo sapiens
  misc_RNA (1)...(19): siRNA sense strand
caagaguugucaaacguaa

SEQ ID NO: 1507368 - RNA, 19 nt, Homo sapiens
  misc_RNA (1)...(19): siRNA sense strand
gcgcagaaguuucauuauc

SEQ ID NO: 1507369 - RNA, 19 nt, Homo sapiens
  misc_RNA (1)...(19): siRNA sense strand
ggccaucgaucaagaguug

SEQ ID NO: 1507370 - RNA, 19 nt, Homo sapiens
  misc_RNA (1)...(19): siRNA sense strand
ccacagccuucuagaauuc

SEQ ID NO: 1507371 - RNA, 19 nt, Homo sapiens
  misc_RNA (1)...(19): siRNA sense strand
ggagaacuguggcccaauc

SEQ ID NO: 1507372 - RNA, 19 nt, Homo sapiens
  misc_RNA (1)...(19): siRNA sense strand
gaccacagccuucuagaau

SEQ ID NO: 1507373 - RNA, 19 nt, Homo sapiens
  misc_RNA (1)...(19): siRNA sense strand
cagcgcagaaguuucauua

SEQ ID NO: 1507374 - RNA, 19 nt, Homo sapiens
  misc_RNA (1)...(19): siRNA sense strand
gaucaagaguugucaaacg

SEQ ID NO: 1507375 - RNA, 19 nt, Homo sapiens
  misc_RNA (1)...(19): siRNA sense strand
gaucaguggccaagaugaa

SEQ ID NO: 1507376 - RNA, 19 nt, Homo sapiens
  misc_RNA (1)...(19): siRNA sense strand
gcagaaguuucauuaucca

SEQ ID NO: 1507377 - RNA, 19 nt, Homo sapiens
  misc_RNA (1)...(19): siRNA sense strand
augaagacaugcugaggua

SEQ ID NO: 1507378 - RNA, 19 nt, Homo sapiens
  misc_RNA (1)...(19): siRNA sense strand
gaagacaugcugagguaca

SEQ ID NO: 1507379 - RNA, 19 nt, Homo sapiens
  misc_RNA (1)...(19): siRNA sense strand
uugcagagauuaucaaagg

SEQ ID NO: 1507380 - RNA, 19 nt, Homo sapiens
  misc_RNA (1)...(19): siRNA sense strand
uccagaauaucccagguuu

SEQ ID NO: 1507381 - RNA, 19 nt, Homo sapiens
  misc_RNA (1)...(19): siRNA sense strand
ggaauucgaggcccaccaa

SEQ ID NO: 1507382 - RNA, 19 nt, Homo sapiens
  misc_RNA (1)...(19): siRNA sense strand
gacagaauugcagagauua

SEQ ID NO: 1507383 - RNA, 19 nt, Homo sapiens
  misc_RNA (1)...(19): siRNA sense strand
uggccaagaugaagacaug

SEQ ID NO: 1507384 - RNA, 19 nt, Homo sapiens
  misc_RNA (1)...(19): siRNA sense strand
gcaaauucaaguucaucuu

SEQ ID NO: 1507385 - RNA, 19 nt, Homo sapiens
  misc_RNA (1)...(19): siRNA sense strand
gguacaugaucaauuugga

SEQ ID NO: 1507386 - RNA, 19 nt, Homo sapiens
  misc_RNA (1)...(19): siRNA sense strand
uaugaucaguggccaagau

SEQ ID NO: 1507387 - RNA, 19 nt, Homo sapiens
  misc_RNA (1)...(19): siRNA sense strand
gggccuuccuucagcuuga

SEQ ID NO: 1507388 - RNA, 19 nt, Homo sapiens
  misc_RNA (1)...(19): siRNA sense strand
aggcucauauccacagaaa

SEQ ID NO: 1507389 - RNA, 19 nt, Homo sapiens
  misc_RNA (1)...(19): siRNA sense strand
gaauugcagagauuaucaa

SEQ ID NO: 1507390 - RNA, 19 nt, Homo sapiens
  misc_RNA (1)...(19): siRNA sense strand
ggagguggaggagcuuaaa

SEQ ID NO: 1507391 - RNA, 19 nt, Homo sapiens
  misc_RNA (1)...(19): siRNA sense strand
ucaagaguugucaaacgua

SEQ ID NO: 1507392 - RNA, 19 nt, Homo sapiens
  misc_RNA (1)...(19): siRNA sense strand
ccaauccccuacaauacua

SEQ ID NO: 1507393 - RNA, 19 nt, Homo sapiens
  misc_RNA (1)...(19): siRNA sense strand
uggaggccaucgaucaaga

SEQ ID NO: 1507394 - RNA, 19 nt, Homo sapiens
  misc_RNA (1)...(19): siRNA sense strand
gaaaugaggggcuugucaa

SEQ ID NO: 1507395 - RNA, 19 nt, Homo sapiens
  misc_RNA (1)...(19): siRNA sense strand
ugacagggccuuccuucag

SEQ ID NO: 1507396 - RNA, 19 nt, Homo sapiens
  misc_RNA (1)...(19): siRNA sense strand
gcucauauccacagaaacc

SEQ ID NO: 1507397 - RNA, 19 nt, Homo sapiens
  misc_RNA (1)...(19): siRNA sense strand
augcugagguacaugauca

SEQ ID NO: 1507398 - RNA, 19 nt, Homo sapiens
  misc_RNA (1)...(19): siRNA sense strand
guaaaugcccaggcugaca

SEQ ID NO: 1507399 - RNA, 19 nt, Homo sapiens
  misc_RNA (1)...(19): siRNA sense strand
accacagccuucuagaauu

SEQ ID NO: 1507400 - RNA, 19 nt, Homo sapiens
  misc_RNA (1)...(19): siRNA sense strand
gcugcaaauucaaguucau

SEQ ID NO: 1507401 - RNA, 19 nt, Homo sapiens
  misc_RNA (1)...(19): siRNA sense strand
gcugucaccuaugaucagu

SEQ ID NO: 1507402 - RNA, 19 nt, Homo sapiens
  misc_RNA (1)...(19): siRNA sense strand
ccuacaauacuaccugaug

SEQ ID NO: 1507403 - RNA, 19 nt, Homo sapiens
  misc_RNA (1)...(19): siRNA sense strand
gauuaucaaaggagaacug

SEQ ID NO: 1507404 - RNA, 19 nt, Homo sapiens
  misc_RNA (1)...(19): siRNA sense strand
cgcagaaguuucauuaucc

SEQ ID NO: 1507405 - RNA, 19 nt, Homo sapiens
  misc_RNA (1)...(19): siRNA sense strand
gcagcgcagaaguuucauu

SEQ ID NO: 1507406 - RNA, 19 nt, Homo sapiens
  misc_RNA (1)...(19): siRNA sense strand
agaccacagccuucuagaa

SEQ ID NO: 1507407 - RNA, 19 nt, Homo sapiens
  misc_RNA (1)...(19): siRNA sense strand
ggcugcaaauucaaguuca

SEQ ID NO: 1507408 - RNA, 19 nt, Homo sapiens
  misc_RNA (1)...(19): siRNA sense strand
gagagcgccagauccuuca

SEQ ID NO: 1507409 - RNA, 19 nt, Homo sapiens
  misc_RNA (1)...(19): siRNA sense strand
uuucuggguuacugccuuu

SEQ ID NO: 1507410 - RNA, 19 nt, Homo sapiens
  misc_RNA (1)...(19): siRNA sense strand
agaauugcagagauuauca

SEQ ID NO: 1507411 - RNA, 19 nt, Homo sapiens
  misc_RNA (1)...(19): siRNA sense strand
gaauaugaacgcagauccu

SEQ ID NO: 1507412 - RNA, 19 nt, Homo sapiens
  misc_RNA (1)...(19): siRNA sense strand
gaacauuaagcaccacuau

SEQ ID NO: 1507413 - RNA, 19 nt, Homo sapiens
  misc_RNA (1)...(19): siRNA sense strand
guccggagcugcuguucaa

SEQ ID NO: 1507414 - RNA, 19 nt, Homo sapiens
  misc_RNA (1)...(19): siRNA sense strand
acauuaagcaccacuauug

SEQ ID NO: 1507415 - RNA, 19 nt, Homo sapiens
  misc_RNA (1)...(19): siRNA sense strand
ccaggaauuucuccguaug

SEQ ID NO: 1507416 - RNA, 19 nt, Homo sapiens
  misc_RNA (1)...(19): siRNA sense strand
gaccuaguggagaacauua

SEQ ID NO: 1507417 - RNA, 19 nt, Homo sapiens
  misc_RNA (1)...(19): siRNA sense strand
ccgacaggcugccaccaaa

SEQ ID NO: 1507418 - RNA, 19 nt, Homo sapiens
  misc_RNA (1)...(19): siRNA sense strand
cuacguggccuccgacuuc

SEQ ID NO: 1507419 - RNA, 19 nt, Homo sapiens
  misc_RNA (1)...(19): siRNA sense strand
ggaccuaguggagaacauu

SEQ ID NO: 1507420 - RNA, 19 nt, Homo sapiens
  misc_RNA (1)...(19): siRNA sense strand
ggccggagcaggaguacaa

SEQ ID NO: 1507421 - RNA, 19 nt, Homo sapiens
  misc_RNA (1)...(19): siRNA sense strand
gacaggcugccaccaaaga

SEQ ID NO: 1507422 - RNA, 19 nt, Homo sapiens
  misc_RNA (1)...(19): siRNA sense strand
gcagagucuccgcaaguug

SEQ ID NO: 1507423 - RNA, 19 nt, Homo sapiens
  misc_RNA (1)...(19): siRNA sense strand
gcccagcccaccaggaauu

SEQ ID NO: 1507424 - RNA, 19 nt, Homo sapiens
  misc_RNA (1)...(19): siRNA sense strand
gcgcggugguuauugacau

SEQ ID NO: 1507425 - RNA, 19 nt, Homo sapiens
  misc_RNA (1)...(19): siRNA sense strand
guaccgcaaaugcuacuga

SEQ ID NO: 1507426 - RNA, 19 nt, Homo sapiens
  misc_RNA (1)...(19): siRNA sense strand
gucccaacguggugaacaa

SEQ ID NO: 1507427 - RNA, 19 nt, Homo sapiens
  misc_RNA (1)...(19): siRNA sense strand
agucggugcugucugucua

SEQ ID NO: 1507428 - RNA, 19 nt, Homo sapiens
  misc_RNA (1)...(19): siRNA sense strand
gguggguccucgcucuuca

SEQ ID NO: 1507429 - RNA, 19 nt, Homo sapiens
  misc_RNA (1)...(19): siRNA sense strand
aguccgggcugcagacguu

SEQ ID NO: 1507430 - RNA, 19 nt, Homo sapiens
  misc_RNA (1)...(19): siRNA sense strand
cgcagucggugcugucugu

SEQ ID NO: 1507431 - RNA, 19 nt, Homo sapiens
  misc_RNA (1)...(19): siRNA sense strand
caaguugucacuggagaug

SEQ ID NO: 1507432 - RNA, 19 nt, Homo sapiens
  misc_RNA (1)...(19): siRNA sense strand
cagagucuccgcaaguugu

SEQ ID NO: 1507433 - RNA, 19 nt, Homo sapiens
  misc_RNA (1)...(19): siRNA sense strand
ggaauuucuccguauggau

SEQ ID NO: 1507434 - RNA, 19 nt, Homo sapiens
  misc_RNA (1)...(19): siRNA sense strand
uaguggagguggccuucga

SEQ ID NO: 1507435 - RNA, 19 nt, Homo sapiens
  misc_RNA (1)...(19): siRNA sense strand
uauaucguguaccgcaaau

SEQ ID NO: 1507436 - RNA, 19 nt, Homo sapiens
  misc_RNA (1)...(19): siRNA sense strand
cuacacagugcccgucuuc

SEQ ID NO: 1507437 - RNA, 19 nt, Homo sapiens
  misc_RNA (1)...(19): siRNA sense strand
gcaaguugucacuggagau

SEQ ID NO: 1507438 - RNA, 19 nt, Homo sapiens
  misc_RNA (1)...(19): siRNA sense strand
auaacgcgcucaccuauua

SEQ ID NO: 1507439 - RNA, 19 nt, Homo sapiens
  misc_RNA (1)...(19): siRNA sense strand
ggccucaucuugcacuuug

SEQ ID NO: 1507440 - RNA, 19 nt, Homo sapiens
  misc_RNA (1)...(19): siRNA sense strand
gaucaaucccaucaucuau

SEQ ID NO: 1507441 - RNA, 19 nt, Homo sapiens
  misc_RNA (1)...(19): siRNA sense strand
guauaacgcgcucaccuau

SEQ ID NO: 1507442 - RNA, 19 nt, Homo sapiens
  misc_RNA (1)...(19): siRNA sense strand
gcuguggccucaucuugca

SEQ ID NO: 1507443 - RNA, 19 nt, Homo sapiens
  misc_RNA (1)...(19): siRNA sense strand
ucaaucccaucaucuaugc

SEQ ID NO: 1507444 - RNA, 19 nt, Homo sapiens
  misc_RNA (1)...(19): siRNA sense strand
cagaaaggguguggguaca

SEQ ID NO: 1507445 - RNA, 19 nt, Homo sapiens
  misc_RNA (1)...(19): siRNA sense strand
caucuugcacuuuguguuc

SEQ ID NO: 1507446 - RNA, 19 nt, Homo sapiens
  misc_RNA (1)...(19): siRNA sense strand
gggcuguggccucaucuug

SEQ ID NO: 1507447 - RNA, 19 nt, Homo sapiens
  misc_RNA (1)...(19): siRNA sense strand
uguauaacgcgcucaccua

SEQ ID NO: 1507448 - RNA, 19 nt, Homo sapiens
  misc_RNA (1)...(19): siRNA sense strand
cuacaacuccaugaucaau

SEQ ID NO: 1507449 - RNA, 19 nt, Homo sapiens
  misc_RNA (1)...(19): siRNA sense strand
gcacuuuguguuccaguac

SEQ ID NO: 1507450 - RNA, 19 nt, Homo sapiens
  misc_RNA (1)...(19): siRNA sense strand
acagugaucgcuggagaaa

SEQ ID NO: 1507451 - RNA, 19 nt, Homo sapiens
  misc_RNA (1)...(19): siRNA sense strand
gcuaccugucccuguauaa

SEQ ID NO: 1507452 - RNA, 19 nt, Homo sapiens
  misc_RNA (1)...(19): siRNA sense strand
gacagugaucgcuggagaa

SEQ ID NO: 1507453 - RNA, 19 nt, Homo sapiens
  misc_RNA (1)...(19): siRNA sense strand
uauaacgcgcucaccuauu

SEQ ID NO: 1507454 - RNA, 19 nt, Homo sapiens
  misc_RNA (1)...(19): siRNA sense strand
ggaauguaauuaccacuga

SEQ ID NO: 1507455 - RNA, 19 nt, Homo sapiens
  misc_RNA (1)...(19): siRNA sense strand
gcaaacacuucugugcaua

SEQ ID NO: 1507456 - RNA, 19 nt, Homo sapiens
  misc_RNA (1)...(19): siRNA sense strand
aaacaaccaucagaaacua

SEQ ID NO: 1507457 - RNA, 19 nt, Homo sapiens
  misc_RNA (1)...(19): siRNA sense strand
ugacaaagggaauguaauu

SEQ ID NO: 1507458 - RNA, 19 nt, Homo sapiens
  misc_RNA (1)...(19): siRNA sense strand
gaaauagaaacaaccauca

SEQ ID NO: 1507459 - RNA, 19 nt, Homo sapiens
  misc_RNA (1)...(19): siRNA sense strand
caacugagccaggaagaaa

SEQ ID NO: 1507460 - RNA, 19 nt, Homo sapiens
  misc_RNA (1)...(19): siRNA sense strand
auaacaagcuccgaaauug

SEQ ID NO: 1507461 - RNA, 19 nt, Homo sapiens
  misc_RNA (1)...(19): siRNA sense strand
acacuucugugcauacaaa

SEQ ID NO: 1507462 - RNA, 19 nt, Homo sapiens
  misc_RNA (1)...(19): siRNA sense strand
gacaaagggaauguaauua

SEQ ID NO: 1507463 - RNA, 19 nt, Homo sapiens
  misc_RNA (1)...(19): siRNA sense strand
gaaacaaccaucagaaacu

SEQ ID NO: 1507464 - RNA, 19 nt, Homo sapiens
  misc_RNA (1)...(19): siRNA sense strand
ccacagaaauagaaacaac

SEQ ID NO: 1507465 - RNA, 19 nt, Homo sapiens
  misc_RNA (1)...(19): siRNA sense strand
caucagaaacuacugcaaa

SEQ ID NO: 1507466 - RNA, 19 nt, Homo sapiens
  misc_RNA (1)...(19): siRNA sense strand
gaggaugauugaaauaaac

SEQ ID NO: 1507467 - RNA, 19 nt, Homo sapiens
  misc_RNA (1)...(19): siRNA sense strand
uaacaagcuccgaaauuga

SEQ ID NO: 1507468 - RNA, 19 nt, Homo sapiens
  misc_RNA (1)...(19): siRNA sense strand
caaauacacccucccacaa

SEQ ID NO: 1507469 - RNA, 19 nt, Homo sapiens
  misc_RNA (1)...(19): siRNA sense strand
auacagaggaugauugaaa

SEQ ID NO: 1507470 - RNA, 19 nt, Homo sapiens
  misc_RNA (1)...(19): siRNA sense strand
gcuagcagacuaauacaga

SEQ ID NO: 1507471 - RNA, 19 nt, Homo sapiens
  misc_RNA (1)...(19): siRNA sense strand
gaaaugacaaagggaaugu

SEQ ID NO: 1507472 - RNA, 19 nt, Homo sapiens
  misc_RNA (1)...(19): siRNA sense strand
gcuccgaaauugaaucagu

SEQ ID NO: 1507473 - RNA, 19 nt, Homo sapiens
  misc_RNA (1)...(19): siRNA sense strand
cuagaaaacuucaaagaga

SEQ ID NO: 1507474 - RNA, 19 nt, Homo sapiens
  misc_RNA (1)...(19): siRNA sense strand
caaaagaucuacgaauuca

SEQ ID NO: 1507475 - RNA, 19 nt, Homo sapiens
  misc_RNA (1)...(19): siRNA sense strand
uaauacagaggaugauuga

SEQ ID NO: 1507476 - RNA, 19 nt, Homo sapiens
  misc_RNA (1)...(19): siRNA sense strand
uagaaacaaccaucagaaa

SEQ ID NO: 1507477 - RNA, 19 nt, Homo sapiens
  misc_RNA (1)...(19): siRNA sense strand
gcccagaacaugauggauu

SEQ ID NO: 1507478 - RNA, 19 nt, Homo sapiens
  misc_RNA (1)...(19): siRNA sense strand
caaagagauggauaaauuc

SEQ ID NO: 1507479 - RNA, 19 nt, Homo sapiens
  misc_RNA (1)...(19): siRNA sense strand
uacagaggaugauugaaau

SEQ ID NO: 1507480 - RNA, 19 nt, Homo sapiens
  misc_RNA (1)...(19): siRNA sense strand
cagaggaugauugaaauaa

SEQ ID NO: 1507481 - RNA, 19 nt, Homo sapiens
  misc_RNA (1)...(19): siRNA sense strand
aauaacaagcuccgaaauu

SEQ ID NO: 1507482 - RNA, 19 nt, Homo sapiens
  misc_RNA (1)...(19): siRNA sense strand
gaaacuacugcaaacacuu

SEQ ID NO: 1507483 - RNA, 19 nt, Homo sapiens
  misc_RNA (1)...(19): siRNA sense strand
ccaauaacaagcuccgaaa

SEQ ID NO: 1507484 - RNA, 19 nt, Homo sapiens
  misc_RNA (1)...(19): siRNA sense strand
ggauaaauuccuggacaaa

SEQ ID NO: 1507485 - RNA, 19 nt, Homo sapiens
  misc_RNA (1)...(19): siRNA sense strand
gauaaauuccuggacaaau

SEQ ID NO: 1507486 - RNA, 19 nt, Homo sapiens
  misc_RNA (1)...(19): siRNA sense strand
uugcugaacagaccaauaa

SEQ ID NO: 1507487 - RNA, 19 nt, Homo sapiens
  misc_RNA (1)...(19): siRNA sense strand
agacuaauacagaggauga

SEQ ID NO: 1507488 - RNA, 19 nt, Homo sapiens
  misc_RNA (1)...(19): siRNA sense strand
cccagaacaugauggauuc

SEQ ID NO: 1507489 - RNA, 19 nt, Homo sapiens
  misc_RNA (1)...(19): siRNA sense strand
caaagggaauguaauuacc

SEQ ID NO: 1507490 - RNA, 19 nt, Homo sapiens
  misc_RNA (1)...(19): siRNA sense strand
cuccgaaauugaaucagua

SEQ ID NO: 1507491 - RNA, 19 nt, Homo sapiens
  misc_RNA (1)...(19): siRNA sense strand
uggauaaauuccuggacaa

SEQ ID NO: 1507492 - RNA, 19 nt, Homo sapiens
  misc_RNA (1)...(19): siRNA sense strand
ucccagccauauucuacua

SEQ ID NO: 1507493 - RNA, 19 nt, Homo sapiens
  misc_RNA (1)...(19): siRNA sense strand
gcagacuaauacagaggau

SEQ ID NO: 1507494 - RNA, 19 nt, Homo sapiens
  misc_RNA (1)...(19): siRNA sense strand
aaacacuucugugcauaca

SEQ ID NO: 1507495 - RNA, 19 nt, Homo sapiens
  misc_RNA (1)...(19): siRNA sense strand
cugaacagaccaauaacaa

SEQ ID NO: 1507496 - RNA, 19 nt, Homo sapiens
  misc_RNA (1)...(19): siRNA sense strand
cuaauacagaggaugauug

SEQ ID NO: 1507497 - RNA, 19 nt, Homo sapiens
  misc_RNA (1)...(19): siRNA sense strand
acaaagggaauguaauuac

SEQ ID NO: 1507498 - RNA, 19 nt, Homo sapiens
  misc_RNA (1)...(19): siRNA sense strand
acagaggaugauugaaaua

SEQ ID NO: 1507499 - RNA, 19 nt, Homo sapiens
  misc_RNA (1)...(19): siRNA sense strand
aacaagcuccgaaauugaa

SEQ ID NO: 1507500 - RNA, 19 nt, Homo sapiens
  misc_RNA (1)...(19): siRNA sense strand
caauaacaagcuccgaaau

SEQ ID NO: 1507501 - RNA, 19 nt, Homo sapiens
  misc_RNA (1)...(19): siRNA sense strand
aaugacaaagggaauguaa

SEQ ID NO: 1507502 - RNA, 19 nt, Homo sapiens
  misc_RNA (1)...(19): siRNA sense strand
aaacuacugcaaacacuuc

SEQ ID NO: 1507503 - RNA, 19 nt, Homo sapiens
  misc_RNA (1)...(19): siRNA sense strand
agaaacuacugcaaacacu

SEQ ID NO: 1507504 - RNA, 19 nt, Homo sapiens
  misc_RNA (1)...(19): siRNA sense strand
aauagaaacaaccaucaga

SEQ ID NO: 1507505 - RNA, 19 nt, Homo sapiens
  misc_RNA (1)...(19): siRNA sense strand
gcugaacagaccaauaaca

SEQ ID NO: 1507506 - RNA, 19 nt, Homo sapiens
  misc_RNA (1)...(19): siRNA sense strand
uaaauuccuggacaaauac

SEQ ID NO: 1507507 - RNA, 19 nt, Homo sapiens
  misc_RNA (1)...(19): siRNA sense strand
auaagaaagucugcuagca

SEQ ID NO: 1507508 - RNA, 19 nt, Homo sapiens
  misc_RNA (1)...(19): siRNA sense strand
auagaaacaaccaucagaa

SEQ ID NO: 1507509 - RNA, 19 nt, Homo sapiens
  misc_RNA (1)...(19): siRNA sense strand
gagccaggaagaaauugau

SEQ ID NO: 1507510 - RNA, 19 nt, Homo sapiens
  misc_RNA (1)...(19): siRNA sense strand
cuucugugcauacaaacua

SEQ ID NO: 1507511 - RNA, 19 nt, Homo sapiens
  misc_RNA (1)...(19): siRNA sense strand
agaaacaaccaucagaaac

SEQ ID NO: 1507512 - RNA, 19 nt, Homo sapiens
  misc_RNA (1)...(19): siRNA sense strand
cgaauucaggguagguuuc

SEQ ID NO: 1507513 - RNA, 19 nt, Homo sapiens
  misc_RNA (1)...(19): siRNA sense strand
ccacugaccccacagaaau

SEQ ID NO: 1507514 - RNA, 19 nt, Homo sapiens
  misc_RNA (1)...(19): siRNA sense strand
uggauucccagccauauuc

SEQ ID NO: 1507515 - RNA, 19 nt, Homo sapiens
  misc_RNA (1)...(19): siRNA sense strand
gagcgagucugaugggaau

SEQ ID NO: 1507516 - RNA, 19 nt, Homo sapiens
  misc_RNA (1)...(19): siRNA sense strand
gaggagcccuuggaacugu

SEQ ID NO: 1507517 - RNA, 19 nt, Homo sapiens
  misc_RNA (1)...(19): siRNA sense strand
gaacuaagcgcaggaacag

SEQ ID NO: 1507518 - RNA, 19 nt, Homo sapiens
  misc_RNA (1)...(19): siRNA sense strand
gucagcaacugguucaaga

SEQ ID NO: 1507519 - RNA, 19 nt, Homo sapiens
  misc_RNA (1)...(19): siRNA sense strand
ggaacuaagcgcaggaaca

SEQ ID NO: 1507520 - RNA, 19 nt, Homo sapiens
  misc_RNA (1)...(19): siRNA sense strand
cgccagcucuugcagacuu

SEQ ID NO: 1507521 - RNA, 19 nt, Homo sapiens
  misc_RNA (1)...(19): siRNA sense strand
gcgaguacgccgagcucua

SEQ ID NO: 1507522 - RNA, 19 nt, Homo sapiens
  misc_RNA (1)...(19): siRNA sense strand
ucacgcaggucagcaacug

SEQ ID NO: 1507523 - RNA, 19 nt, Homo sapiens
  misc_RNA (1)...(19): siRNA sense strand
ccaaugugcaccucaucaa

SEQ ID NO: 1507524 - RNA, 19 nt, Homo sapiens
  misc_RNA (1)...(19): siRNA sense strand
ggaagcugaggccaagguu

SEQ ID NO: 1507525 - RNA, 19 nt, Homo sapiens
  misc_RNA (1)...(19): siRNA sense strand
ggaggagcccuuggaacug

SEQ ID NO: 1507526 - RNA, 19 nt, Homo sapiens
  misc_RNA (1)...(19): siRNA sense strand
gccagcucuugcagacuuu

SEQ ID NO: 1507527 - RNA, 19 nt, Homo sapiens
  misc_RNA (1)...(19): siRNA sense strand
gaucugcaauguagaauua

SEQ ID NO: 1507528 - RNA, 19 nt, Homo sapiens
  misc_RNA (1)...(19): siRNA sense strand
ggaaugaucugcaauguag

SEQ ID NO: 1507529 - RNA, 19 nt, Homo sapiens
  misc_RNA (1)...(19): siRNA sense strand
ggaagaagcacauccauca

SEQ ID NO: 1507530 - RNA, 19 nt, Homo sapiens
  misc_RNA (1)...(19): siRNA sense strand
ucagaaagcugggcauuug

SEQ ID NO: 1507531 - RNA, 19 nt, Homo sapiens
  misc_RNA (1)...(19): siRNA sense strand
gaaggaaugaucugcaaug

SEQ ID NO: 1507532 - RNA, 19 nt, Homo sapiens
  misc_RNA (1)...(19): siRNA sense strand
caaauagcuucaagugcuu

SEQ ID NO: 1507533 - RNA, 19 nt, Homo sapiens
  misc_RNA (1)...(19): siRNA sense strand
gagaggagccugacaacca

SEQ ID NO: 1507534 - RNA, 19 nt, Homo sapiens
  misc_RNA (1)...(19): siRNA sense strand
gaacauacggaguguaggu

SEQ ID NO: 1507535 - RNA, 19 nt, Homo sapiens
  misc_RNA (1)...(19): siRNA sense strand
gugaaggaaugaucugcaa

SEQ ID NO: 1507536 - RNA, 19 nt, Homo sapiens
  misc_RNA (1)...(19): siRNA sense strand
gcuguuguccagaucguua

SEQ ID NO: 1507537 - RNA, 19 nt, Homo sapiens
  misc_RNA (1)...(19): siRNA sense strand
guaaugcacgcucagagaa

SEQ ID NO: 1507538 - RNA, 19 nt, Homo sapiens
  misc_RNA (1)...(19): siRNA sense strand
ucucgacccuacaccauuu

SEQ ID NO: 1507539 - RNA, 19 nt, Homo sapiens
  misc_RNA (1)...(19): siRNA sense strand
gcaugcugcuccucuguca

SEQ ID NO: 1507540 - RNA, 19 nt, Homo sapiens
  misc_RNA (1)...(19): siRNA sense strand
cagccgagauucugaacau

SEQ ID NO: 1507541 - RNA, 19 nt, Homo sapiens
  misc_RNA (1)...(19): siRNA sense strand
caaaugguguccacaaaau

SEQ ID NO: 1507542 - RNA, 19 nt, Homo sapiens
  misc_RNA (1)...(19): siRNA sense strand
gugcaaaccuuuucacugu

SEQ ID NO: 1507543 - RNA, 19 nt, Homo sapiens
  misc_RNA (1)...(19): siRNA sense strand
gaauuacccaccaaucaca

SEQ ID NO: 1507544 - RNA, 19 nt, Homo sapiens
  misc_RNA (1)...(19): siRNA sense strand
uagaauuacccaccaauca

SEQ ID NO: 1507545 - RNA, 19 nt, Homo sapiens
  misc_RNA (1)...(19): siRNA sense strand
guguaggucuugcugugaa

SEQ ID NO: 1507546 - RNA, 19 nt, Homo sapiens
  misc_RNA (1)...(19): siRNA sense strand
ccagagaggagccugacaa

SEQ ID NO: 1507547 - RNA, 19 nt, Homo sapiens
  misc_RNA (1)...(19): siRNA sense strand
gcaaaccuuuucacuguuc

SEQ ID NO: 1507548 - RNA, 19 nt, Homo sapiens
  misc_RNA (1)...(19): siRNA sense strand
gugcuugccugggucuuug

SEQ ID NO: 1507549 - RNA, 19 nt, Homo sapiens
  misc_RNA (1)...(19): siRNA sense strand
cacauucuccuucucaaga

SEQ ID NO: 1507550 - RNA, 19 nt, Homo sapiens
  misc_RNA (1)...(19): siRNA sense strand
cauucuccuucucaagaua

SEQ ID NO: 1507551 - RNA, 19 nt, Homo sapiens
  misc_RNA (1)...(19): siRNA sense strand
ucgaugggcagaagacaaa

SEQ ID NO: 1507552 - RNA, 19 nt, Homo sapiens
  misc_RNA (1)...(19): siRNA sense strand
gggauaauuauaacugcaa

SEQ ID NO: 1507553 - RNA, 19 nt, Homo sapiens
  misc_RNA (1)...(19): siRNA sense strand
ccaccaaucacacuaaugc

SEQ ID NO: 1507554 - RNA, 19 nt, Homo sapiens
  misc_RNA (1)...(19): siRNA sense strand
cuauagcuguuguccagau

SEQ ID NO: 1507555 - RNA, 19 nt, Homo sapiens
  misc_RNA (1)...(19): siRNA sense strand
caucaacuucuauaaugug

SEQ ID NO: 1507556 - RNA, 19 nt, Homo sapiens
  misc_RNA (1)...(19): siRNA sense strand
gcauuugccaagaacauca

SEQ ID NO: 1507557 - RNA, 19 nt, Homo sapiens
  misc_RNA (1)...(19): siRNA sense strand
gaagcacauccaucaccaa

SEQ ID NO: 1507558 - RNA, 19 nt, Homo sapiens
  misc_RNA (1)...(19): siRNA sense strand
ccacagccgagauucugaa

SEQ ID NO: 1507559 - RNA, 19 nt, Homo sapiens
  misc_RNA (1)...(19): siRNA sense strand
aagcacauccaucaccaaa

SEQ ID NO: 1507560 - RNA, 19 nt, Homo sapiens
  misc_RNA (1)...(19): siRNA sense strand
cugucacgcucucgcuaua

SEQ ID NO: 1507561 - RNA, 19 nt, Homo sapiens
  misc_RNA (1)...(19): siRNA sense strand
uuugacaguucaucacuuc

SEQ ID NO: 1507562 - RNA, 19 nt, Homo sapiens
  misc_RNA (1)...(19): siRNA sense strand
gacccuacaccauuuccaa

SEQ ID NO: 1507563 - RNA, 19 nt, Homo sapiens
  misc_RNA (1)...(19): siRNA sense strand
aaggaaugaucugcaaugu

SEQ ID NO: 1507564 - RNA, 19 nt, Homo sapiens
  misc_RNA (1)...(19): siRNA sense strand
cguaaugcacgcucagaga

SEQ ID NO: 1507565 - RNA, 19 nt, Homo sapiens
  misc_RNA (1)...(19): siRNA sense strand
guagaauuacccaccaauc

SEQ ID NO: 1507566 - RNA, 19 nt, Homo sapiens
  misc_RNA (1)...(19): siRNA sense strand
ugacaaccacauucuccuu

SEQ ID NO: 1507567 - RNA, 19 nt, Homo sapiens
  misc_RNA (1)...(19): siRNA sense strand
caaccacauucuccuucuc

SEQ ID NO: 1507568 - RNA, 19 nt, Homo sapiens
  misc_RNA (1)...(19): siRNA sense strand
gcaaucgaugggcagaaga

SEQ ID NO: 1507569 - RNA, 19 nt, Homo sapiens
  misc_RNA (1)...(19): siRNA sense strand
aagugugccuccagaagug

SEQ ID NO: 1507570 - RNA, 19 nt, Homo sapiens
  misc_RNA (1)...(19): siRNA sense strand
guuugacaguucaucacuu

SEQ ID NO: 1507571 - RNA, 19 nt, Homo sapiens
  misc_RNA (1)...(19): siRNA sense strand
aaagugugccuccagaagu

SEQ ID NO: 1507572 - RNA, 19 nt, Homo sapiens
  misc_RNA (1)...(19): siRNA sense strand
cauacggaguguaggucuu

SEQ ID NO: 1507573 - RNA, 19 nt, Homo sapiens
  misc_RNA (1)...(19): siRNA sense strand
gaaaacgcaggggauaauu

SEQ ID NO: 1507574 - RNA, 19 nt, Homo sapiens
  misc_RNA (1)...(19): siRNA sense strand
ggucuuugugcuuccauug

SEQ ID NO: 1507575 - RNA, 19 nt, Homo sapiens
  misc_RNA (1)...(19): siRNA sense strand
aggaaugaucugcaaugua

SEQ ID NO: 1507576 - RNA, 19 nt, Homo sapiens
  misc_RNA (1)...(19): siRNA sense strand
gagccugacaaccacauuc

SEQ ID NO: 1507577 - RNA, 19 nt, Homo sapiens
  misc_RNA (1)...(19): siRNA sense strand
gaugggcagaagacaaaug

SEQ ID NO: 1507578 - RNA, 19 nt, Homo sapiens
  misc_RNA (1)...(19): siRNA sense strand
aaaacgcaggggauaauua

SEQ ID NO: 1507579 - RNA, 19 nt, Homo sapiens
  misc_RNA (1)...(19): siRNA sense strand
aaugaucugcaauguagaa

SEQ ID NO: 1507580 - RNA, 19 nt, Homo sapiens
  misc_RNA (1)...(19): siRNA sense strand
gaaaauagaugaugcagaa

SEQ ID NO: 1507581 - RNA, 19 nt, Homo sapiens
  misc_RNA (1)...(19): siRNA sense strand
ggaggaacguucaagaaga

SEQ ID NO: 1507582 - RNA, 19 nt, Homo sapiens
  misc_RNA (1)...(19): siRNA sense strand
gaaagaagccucaauuuug

SEQ ID NO: 1507583 - RNA, 19 nt, Homo sapiens
  misc_RNA (1)...(19): siRNA sense strand
gaggaacguucaagaagaa

SEQ ID NO: 1507584 - RNA, 19 nt, Homo sapiens
  misc_RNA (1)...(19): siRNA sense strand
gcaggaugcugagugauuu

SEQ ID NO: 1507585 - RNA, 19 nt, Homo sapiens
  misc_RNA (1)...(19): siRNA sense strand
ggagacugcuauucaagaa

SEQ ID NO: 1507586 - RNA, 19 nt, Homo sapiens
  misc_RNA (1)...(19): siRNA sense strand
caaggagacugcuauucaa

SEQ ID NO: 1507587 - RNA, 19 nt, Homo sapiens
  misc_RNA (1)...(19): siRNA sense strand
ggaaagaagccucaauuuu

SEQ ID NO: 1507588 - RNA, 19 nt, Homo sapiens
  misc_RNA (1)...(19): siRNA sense strand
ccugagaucuggaagaaau

SEQ ID NO: 1507589 - RNA, 19 nt, Homo sapiens
  misc_RNA (1)...(19): siRNA sense strand
gaguacaccugcagucaau

SEQ ID NO: 1507590 - RNA, 19 nt, Homo sapiens
  misc_RNA (1)...(19): siRNA sense strand
gggaaagaagccucaauuu

SEQ ID NO: 1507591 - RNA, 19 nt, Homo sapiens
  misc_RNA (1)...(19): siRNA sense strand
guacaccugcagucaauaa

SEQ ID NO: 1507592 - RNA, 19 nt, Homo sapiens
  misc_RNA (1)...(19): siRNA sense strand
aauagaugaugcagaauug

SEQ ID NO: 1507593 - RNA, 19 nt, Homo sapiens
  misc_RNA (1)...(19): siRNA sense strand
gaacguucaagaagaaaga

SEQ ID NO: 1507594 - RNA, 19 nt, Homo sapiens
  misc_RNA (1)...(19): siRNA sense strand
caacuugccauugagauuu

SEQ ID NO: 1507595 - RNA, 19 nt, Homo sapiens
  misc_RNA (1)...(19): siRNA sense strand
ugucaaggauccaugcauu

SEQ ID NO: 1507596 - RNA, 19 nt, Homo sapiens
  misc_RNA (1)...(19): siRNA sense strand
ucaaggagacugcuauuca

SEQ ID NO: 1507597 - RNA, 19 nt, Homo sapiens
  misc_RNA (1)...(19): siRNA sense strand
gagaacaacaacagccaaa

SEQ ID NO: 1507598 - RNA, 19 nt, Homo sapiens
  misc_RNA (1)...(19): siRNA sense strand
gaugcugagugauuugugu

SEQ ID NO: 1507599 - RNA, 19 nt, Homo sapiens
  misc_RNA (1)...(19): siRNA sense strand
gcaccaagaaauccagaau

SEQ ID NO: 1507600 - RNA, 19 nt, Homo sapiens
  misc_RNA (1)...(19): siRNA sense strand
caagcuuguuaacaucaaa

SEQ ID NO: 1507601 - RNA, 19 nt, Homo sapiens
  misc_RNA (1)...(19): siRNA sense strand
gaugcagaauugaaacaag

SEQ ID NO: 1507602 - RNA, 19 nt, Homo sapiens
  misc_RNA (1)...(19): siRNA sense strand
gcagaauugaaacaagaaa

SEQ ID NO: 1507603 - RNA, 19 nt, Homo sapiens
  misc_RNA (1)...(19): siRNA sense strand
ccaacuugccauugagauu

SEQ ID NO: 1507604 - RNA, 19 nt, Homo sapiens
  misc_RNA (1)...(19): siRNA sense strand
gggaggaacguucaagaag

SEQ ID NO: 1507605 - RNA, 19 nt, Homo sapiens
  misc_RNA (1)...(19): siRNA sense strand
augcagaauugaaacaaga

SEQ ID NO: 1507606 - RNA, 19 nt, Homo sapiens
  misc_RNA (1)...(19): siRNA sense strand
ucaagcuuguuaacaucaa

SEQ ID NO: 1507607 - RNA, 19 nt, Homo sapiens
  misc_RNA (1)...(19): siRNA sense strand
uagaugaugcagaauugaa

SEQ ID NO: 1507608 - RNA, 19 nt, Homo sapiens
  misc_RNA (1)...(19): siRNA sense strand
agacugcuauucaagaaaa

SEQ ID NO: 1507609 - RNA, 19 nt, Homo sapiens
  misc_RNA (1)...(19): siRNA sense strand
ucaaggauccaugcauuca

SEQ ID NO: 1507610 - RNA, 19 nt, Homo sapiens
  misc_RNA (1)...(19): siRNA sense strand
gaacaacaacagccaaaag

SEQ ID NO: 1507611 - RNA, 19 nt, Homo sapiens
  misc_RNA (1)...(19): siRNA sense strand
gagacugcuauucaagaaa

SEQ ID NO: 1507612 - RNA, 19 nt, Homo sapiens
  misc_RNA (1)...(19): siRNA sense strand
ucugcaggaugcugaguga

SEQ ID NO: 1507613 - RNA, 19 nt, Homo sapiens
  misc_RNA (1)...(19): siRNA sense strand
gcugagugauuugugucaa

SEQ ID NO: 1507614 - RNA, 19 nt, Homo sapiens
  misc_RNA (1)...(19): siRNA sense strand
gcauucaccaugugccaau

SEQ ID NO: 1507615 - RNA, 19 nt, Homo sapiens
  misc_RNA (1)...(19): siRNA sense strand
auuccaaucuucacagcaa

SEQ ID NO: 1507616 - RNA, 19 nt, Homo sapiens
  misc_RNA (1)...(19): siRNA sense strand
gaccugccagcaccaagaa

SEQ ID NO: 1507617 - RNA, 19 nt, Homo sapiens
  misc_RNA (1)...(19): siRNA sense strand
auucugagccuagaggaua

SEQ ID NO: 1507618 - RNA, 19 nt, Homo sapiens
  misc_RNA (1)...(19): siRNA sense strand
acuucaagcuuguuaacau

SEQ ID NO: 1507619 - RNA, 19 nt, Homo sapiens
  misc_RNA (1)...(19): siRNA sense strand
cuucaagcuuguuaacauc

SEQ ID NO: 1507620 - RNA, 19 nt, Homo sapiens
  misc_RNA (1)...(19): siRNA sense strand
gaucuggaagaaauaugga

SEQ ID NO: 1507621 - RNA, 19 nt, Homo sapiens
  misc_RNA (1)...(19): siRNA sense strand
caacaacagccaaaagugu

SEQ ID NO: 1507622 - RNA, 19 nt, Homo sapiens
  misc_RNA (1)...(19): siRNA sense strand
accaugugccaaugacuua

SEQ ID NO: 1507623 - RNA, 19 nt, Homo sapiens
  misc_RNA (1)...(19): siRNA sense strand
agaugaugcagaauugaaa

SEQ ID NO: 1507624 - RNA, 19 nt, Homo sapiens
  misc_RNA (1)...(19): siRNA sense strand
gccaaugacuuauuuuacu

SEQ ID NO: 1507625 - RNA, 19 nt, Homo sapiens
  misc_RNA (1)...(19): siRNA sense strand
caugugccaaugacuuauu

SEQ ID NO: 1507626 - RNA, 19 nt, Homo sapiens
  misc_RNA (1)...(19): siRNA sense strand
ugaguacaccugcagucaa

SEQ ID NO: 1507627 - RNA, 19 nt, Homo sapiens
  misc_RNA (1)...(19): siRNA sense strand
ggggaaagaagccucaauu

SEQ ID NO: 1507628 - RNA, 19 nt, Homo sapiens
  misc_RNA (1)...(19): siRNA sense strand
ggagauggcuguacuggaa

SEQ ID NO: 1507629 - RNA, 19 nt, Homo sapiens
  misc_RNA (1)...(19): siRNA sense strand
ucauggagcuggacaaauu

SEQ ID NO: 1507630 - RNA, 19 nt, Homo sapiens
  misc_RNA (1)...(19): siRNA sense strand
ccagaaaggucauccagau

SEQ ID NO: 1507631 - RNA, 19 nt, Homo sapiens
  misc_RNA (1)...(19): siRNA sense strand
ccucggagcucgugcacua

SEQ ID NO: 1507632 - RNA, 19 nt, Homo sapiens
  misc_RNA (1)...(19): siRNA sense strand
gagagcaccuuccucaagu

SEQ ID NO: 1507633 - RNA, 19 nt, Homo sapiens
  misc_RNA (1)...(19): siRNA sense strand
ggaaucuacccacugauga

SEQ ID NO: 1507634 - RNA, 19 nt, Homo sapiens
  misc_RNA (1)...(19): siRNA sense strand
aauggaaucuacccacuga

SEQ ID NO: 1507635 - RNA, 19 nt, Homo sapiens
  misc_RNA (1)...(19): siRNA sense strand
ggagagcaccuuccucaag

SEQ ID NO: 1507636 - RNA, 19 nt, Homo sapiens
  misc_RNA (1)...(19): siRNA sense strand
gaaucuacccacugaugaa

SEQ ID NO: 1507637 - RNA, 19 nt, Homo sapiens
  misc_RNA (1)...(19): siRNA sense strand
gaggaugucaggaauggaa

SEQ ID NO: 1507638 - RNA, 19 nt, Homo sapiens
  misc_RNA (1)...(19): siRNA sense strand
agaaugugguggaggagaa

SEQ ID NO: 1507639 - RNA, 19 nt, Homo sapiens
  misc_RNA (1)...(19): siRNA sense strand
agagcaccuuccucaagua

SEQ ID NO: 1507640 - RNA, 19 nt, Homo sapiens
  misc_RNA (1)...(19): siRNA sense strand
ugucaggaauggaaucuac

SEQ ID NO: 1507641 - RNA, 19 nt, Homo sapiens
  misc_RNA (1)...(19): siRNA sense strand
ggagagaagcgaggacaag

SEQ ID NO: 1507642 - RNA, 19 nt, Homo sapiens
  misc_RNA (1)...(19): siRNA sense strand
gagauggcuguacuggaaa

SEQ ID NO: 1507643 - RNA, 19 nt, Homo sapiens
  misc_RNA (1)...(19): siRNA sense strand
gcagugcaaccuggagaga

SEQ ID NO: 1507644 - RNA, 19 nt, Homo sapiens
  misc_RNA (1)...(19): siRNA sense strand
ucacagaggaggccauugc

SEQ ID NO: 1507645 - RNA, 19 nt, Homo sapiens
  misc_RNA (1)...(19): siRNA sense strand
ucuacccacugaugaacuu

SEQ ID NO: 1507646 - RNA, 19 nt, Homo sapiens
  misc_RNA (1)...(19): siRNA sense strand
ggucacagaggaggccauu

SEQ ID NO: 1507647 - RNA, 19 nt, Homo sapiens
  misc_RNA (1)...(19): siRNA sense strand
gcaucucacucugcuucug

SEQ ID NO: 1507648 - RNA, 19 nt, Homo sapiens
  misc_RNA (1)...(19): siRNA sense strand
augcgggaguucauccuuu

SEQ ID NO: 1507649 - RNA, 19 nt, Homo sapiens
  misc_RNA (1)...(19): siRNA sense strand
uggaggaugucaggaaugg

SEQ ID NO: 1507650 - RNA, 19 nt, Homo sapiens
  misc_RNA (1)...(19): siRNA sense strand
caacaugcgggaguucauc

SEQ ID NO: 1507651 - RNA, 19 nt, Homo sapiens
  misc_RNA (1)...(19): siRNA sense strand
ugcgggaguucauccuuug

SEQ ID NO: 1507652 - RNA, 19 nt, Homo sapiens
  misc_RNA (1)...(19): siRNA sense strand
uggaaucuacccacugaug

SEQ ID NO: 1507653 - RNA, 19 nt, Homo sapiens
  misc_RNA (1)...(19): siRNA sense strand
gcaaauaccugaucugcaa

SEQ ID NO: 1507654 - RNA, 19 nt, Homo sapiens
  misc_RNA (1)...(19): siRNA sense strand
gagccgagauggaaauuua

SEQ ID NO: 1507655 - RNA, 19 nt, Homo sapiens
  misc_RNA (1)...(19): siRNA sense strand
gcaagaugcugcucaggua

SEQ ID NO: 1507656 - RNA, 19 nt, Homo sapiens
  misc_RNA (1)...(19): siRNA sense strand
ugaauuaccucauugaaga

SEQ ID NO: 1507657 - RNA, 19 nt, Homo sapiens
  misc_RNA (1)...(19): siRNA sense strand
cagaauaacuuugagaaug

SEQ ID NO: 1507658 - RNA, 19 nt, Homo sapiens
  misc_RNA (1)...(19): siRNA sense strand
caacacagccauccucaaa

SEQ ID NO: 1507659 - RNA, 19 nt, Homo sapiens
  misc_RNA (1)...(19): siRNA sense strand
gaagaggccaugcuuucua

SEQ ID NO: 1507660 - RNA, 19 nt, Homo sapiens
  misc_RNA (1)...(19): siRNA sense strand
aaacaugggugcucuugga

SEQ ID NO: 1507661 - RNA, 19 nt, Homo sapiens
  misc_RNA (1)...(19): siRNA sense strand
gagaccagcuuggccauga

SEQ ID NO: 1507662 - RNA, 19 nt, Homo sapiens
  misc_RNA (1)...(19): siRNA sense strand
ugaagaagcugccaaaaug

SEQ ID NO: 1507663 - RNA, 19 nt, Homo sapiens
  misc_RNA (1)...(19): siRNA sense strand
gaugugaauuaccucauug

SEQ ID NO: 1507664 - RNA, 19 nt, Homo sapiens
  misc_RNA (1)...(19): siRNA sense strand
gaggaacuguguaucuaug

SEQ ID NO: 1507665 - RNA, 19 nt, Homo sapiens
  misc_RNA (1)...(19): siRNA sense strand
guguacagcuuugcaauug

SEQ ID NO: 1507666 - RNA, 19 nt, Homo sapiens
  misc_RNA (1)...(19): siRNA sense strand
ucaccuggcugcacagaau

SEQ ID NO: 1507667 - RNA, 19 nt, Homo sapiens
  misc_RNA (1)...(19): siRNA sense strand
guauugugauggaguuuau

SEQ ID NO: 1507668 - RNA, 19 nt, Homo sapiens
  misc_RNA (1)...(19): siRNA sense strand
gcagagagccacgcaaaca

SEQ ID NO: 1507669 - RNA, 19 nt, Homo sapiens
  misc_RNA (1)...(19): siRNA sense strand
gcuacucacucagaagaaa

SEQ ID NO: 1507670 - RNA, 19 nt, Homo sapiens
  misc_RNA (1)...(19): siRNA sense strand
ggaccuaaauaugaugugu

SEQ ID NO: 1507671 - RNA, 19 nt, Homo sapiens
  misc_RNA (1)...(19): siRNA sense strand
gcacagaauaacuuugaga

SEQ ID NO: 1507672 - RNA, 19 nt, Homo sapiens
  misc_RNA (1)...(19): siRNA sense strand
guacagcuuugcaauuguc

SEQ ID NO: 1507673 - RNA, 19 nt, Homo sapiens
  misc_RNA (1)...(19): siRNA sense strand
gaauaacuuugagaaugug

SEQ ID NO: 1507674 - RNA, 19 nt, Homo sapiens
  misc_RNA (1)...(19): siRNA sense strand
gagaugaggaacuguguau

SEQ ID NO: 1507675 - RNA, 19 nt, Homo sapiens
  misc_RNA (1)...(19): siRNA sense strand
ucacucagaagaaaccaua

SEQ ID NO: 1507676 - RNA, 19 nt, Homo sapiens
  misc_RNA (1)...(19): siRNA sense strand
acacagccauccucaaagu

SEQ ID NO: 1507677 - RNA, 19 nt, Homo sapiens
  misc_RNA (1)...(19): siRNA sense strand
ccuagaacaucacgcaaau

SEQ ID NO: 1507678 - RNA, 19 nt, Homo sapiens
  misc_RNA (1)...(19): siRNA sense strand
gaacuguguaucuaugaga

SEQ ID NO: 1507679 - RNA, 19 nt, Homo sapiens
  misc_RNA (1)...(19): siRNA sense strand
ugaugugaauuaccucauu

SEQ ID NO: 1507680 - RNA, 19 nt, Homo sapiens
  misc_RNA (1)...(19): siRNA sense strand
aauaugauguguacagcuu

SEQ ID NO: 1507681 - RNA, 19 nt, Homo sapiens
  misc_RNA (1)...(19): siRNA sense strand
gagcuacucacucagaaga

SEQ ID NO: 1507682 - RNA, 19 nt, Homo sapiens
  misc_RNA (1)...(19): siRNA sense strand
caagaagaggccaugcuuu

SEQ ID NO: 1507683 - RNA, 19 nt, Homo sapiens
  misc_RNA (1)...(19): siRNA sense strand
gaaagcagggcaucauguc

SEQ ID NO: 1507684 - RNA, 19 nt, Homo sapiens
  misc_RNA (1)...(19): siRNA sense strand
gcacuuugcagcccagaau

SEQ ID NO: 1507685 - RNA, 19 nt, Homo sapiens
  misc_RNA (1)...(19): siRNA sense strand
gaacuuccugcacagcauu

SEQ ID NO: 1507686 - RNA, 19 nt, Homo sapiens
  misc_RNA (1)...(19): siRNA sense strand
ccagcucugaugugaauua

SEQ ID NO: 1507687 - RNA, 19 nt, Homo sapiens
  misc_RNA (1)...(19): siRNA sense strand
gccaugcuuucuagacauu

SEQ ID NO: 1507688 - RNA, 19 nt, Homo sapiens
  misc_RNA (1)...(19): siRNA sense strand
gaucaaguuucagcacauc

SEQ ID NO: 1507689 - RNA, 19 nt, Homo sapiens
  misc_RNA (1)...(19): siRNA sense strand
gcaaacaugggugcucuug

SEQ ID NO: 1507690 - RNA, 19 nt, Homo sapiens
  misc_RNA (1)...(19): siRNA sense strand
gcacaucgugucuaucuac

SEQ ID NO: 1507691 - RNA, 19 nt, Homo sapiens
  misc_RNA (1)...(19): siRNA sense strand
agauguuccuggagaguaa

SEQ ID NO: 1507692 - RNA, 19 nt, Homo sapiens
  misc_RNA (1)...(19): siRNA sense strand
agaauuuggucccgagaga

SEQ ID NO: 1507693 - RNA, 19 nt, Homo sapiens
  misc_RNA (1)...(19): siRNA sense strand
gcucugaugugaauuaccu

SEQ ID NO: 1507694 - RNA, 19 nt, Homo sapiens
  misc_RNA (1)...(19): siRNA sense strand
gcagagaaaccugagaaca

SEQ ID NO: 1507695 - RNA, 19 nt, Homo sapiens
  misc_RNA (1)...(19): siRNA sense strand
cgccagcucugaugugaau

SEQ ID NO: 1507696 - RNA, 19 nt, Homo sapiens
  misc_RNA (1)...(19): siRNA sense strand
ggacggaguacgccaucaa

SEQ ID NO: 1507697 - RNA, 19 nt, Homo sapiens
  misc_RNA (1)...(19): siRNA sense strand
gggagcuacucacucagaa

SEQ ID NO: 1507698 - RNA, 19 nt, Homo sapiens
  misc_RNA (1)...(19): siRNA sense strand
ucugggagcuacucacuca

SEQ ID NO: 1507699 - RNA, 19 nt, Homo sapiens
  misc_RNA (1)...(19): siRNA sense strand
gaugaggaacuguguaucu

SEQ ID NO: 1507700 - RNA, 19 nt, Homo sapiens
  misc_RNA (1)...(19): siRNA sense strand
gaauuaccucauugaagaa

SEQ ID NO: 1507701 - RNA, 19 nt, Homo sapiens
  misc_RNA (1)...(19): siRNA sense strand
aagcucagguuccgcauca

SEQ ID NO: 1507702 - RNA, 19 nt, Homo sapiens
  misc_RNA (1)...(19): siRNA sense strand
ccaagaagaggccaugcuu

SEQ ID NO: 1507703 - RNA, 19 nt, Homo sapiens
  misc_RNA (1)...(19): siRNA sense strand
gcagaugguggaccugaug

SEQ ID NO: 1507704 - RNA, 19 nt, Homo sapiens
  misc_RNA (1)...(19): siRNA sense strand
gagauguuccuggagagua

SEQ ID NO: 1507705 - RNA, 19 nt, Homo sapiens
  misc_RNA (1)...(19): siRNA sense strand
gaccuaaauaugaugugua

SEQ ID NO: 1507706 - RNA, 19 nt, Homo sapiens
  misc_RNA (1)...(19): siRNA sense strand
ucaucaaccuccuagaaca

SEQ ID NO: 1507707 - RNA, 19 nt, Homo sapiens
  misc_RNA (1)...(19): siRNA sense strand
ggaacuguguaucuaugag

SEQ ID NO: 1507708 - RNA, 19 nt, Homo sapiens
  misc_RNA (1)...(19): siRNA sense strand
ucuccgaccguaagaauuu

SEQ ID NO: 1507709 - RNA, 19 nt, Homo sapiens
  misc_RNA (1)...(19): siRNA sense strand
ggacagugacucaggaaac

SEQ ID NO: 1507710 - RNA, 19 nt, Homo sapiens
  misc_RNA (1)...(19): siRNA sense strand
gaugguggaccugaugaaa

SEQ ID NO: 1507711 - RNA, 19 nt, Homo sapiens
  misc_RNA (1)...(19): siRNA sense strand
caucauguccuuccuagag

SEQ ID NO: 1507712 - RNA, 19 nt, Homo sapiens
  misc_RNA (1)...(19): siRNA sense strand
cagcagagaaaccugagaa

SEQ ID NO: 1507713 - RNA, 19 nt, Homo sapiens
  misc_RNA (1)...(19): siRNA sense strand
uaugauguguacagcuuug

SEQ ID NO: 1507714 - RNA, 19 nt, Homo sapiens
  misc_RNA (1)...(19): siRNA sense strand
ggagcaccuuccugagugu

SEQ ID NO: 1507715 - RNA, 19 nt, Homo sapiens
  misc_RNA (1)...(19): siRNA sense strand
guacggagccagccuugag

SEQ ID NO: 1507716 - RNA, 19 nt, Homo sapiens
  misc_RNA (1)...(19): siRNA sense strand
gacagugacucaggaaacu

SEQ ID NO: 1507717 - RNA, 19 nt, Homo sapiens
  misc_RNA (1)...(19): siRNA sense strand
gguauugugauggaguuua

SEQ ID NO: 1507718 - RNA, 19 nt, Homo sapiens
  misc_RNA (1)...(19): siRNA sense strand
aagaagaggccaugcuuuc

SEQ ID NO: 1507719 - RNA, 19 nt, Homo sapiens
  misc_RNA (1)...(19): siRNA sense strand
ggacaucagccaggaacug

SEQ ID NO: 1507720 - RNA, 19 nt, Homo sapiens
  misc_RNA (1)...(19): siRNA sense strand
gcaucuagcagccuacaag

SEQ ID NO: 1507721 - RNA, 19 nt, Homo sapiens
  misc_RNA (1)...(19): siRNA sense strand
gccaggagccgagauggaa

SEQ ID NO: 1507722 - RNA, 19 nt, Homo sapiens
  misc_RNA (1)...(19): siRNA sense strand
cagcacaucgugucuaucu

SEQ ID NO: 1507723 - RNA, 19 nt, Homo sapiens
  misc_RNA (1)...(19): siRNA sense strand
cccaggaccuaaauaugau

SEQ ID NO: 1507724 - RNA, 19 nt, Homo sapiens
  misc_RNA (1)...(19): siRNA sense strand
cgaaagcagggcaucaugu

SEQ ID NO: 1507725 - RNA, 19 nt, Homo sapiens
  misc_RNA (1)...(19): siRNA sense strand
gguucaacaugaugaugau

SEQ ID NO: 1507726 - RNA, 19 nt, Homo sapiens
  misc_RNA (1)...(19): siRNA sense strand
gcaagcagccccuggguau

SEQ ID NO: 1507727 - RNA, 19 nt, Homo sapiens
  misc_RNA (1)...(19): siRNA sense strand
ugucaucaaccuccuagaa

SEQ ID NO: 1507728 - RNA, 19 nt, Homo sapiens
  misc_RNA (1)...(19): siRNA sense strand
gccgccagcucugauguga

SEQ ID NO: 1507729 - RNA, 19 nt, Homo sapiens
  misc_RNA (1)...(19): siRNA sense strand
cgaccucugugcccugcuu

SEQ ID NO: 1507730 - RNA, 19 nt, Homo sapiens
  misc_RNA (1)...(19): siRNA sense strand
augaggaacuguguaucua

SEQ ID NO: 1507731 - RNA, 19 nt, Homo sapiens
  misc_RNA (1)...(19): siRNA sense strand
ggagguuaaugaggacauc

SEQ ID NO: 1507732 - RNA, 19 nt, Homo sapiens
  misc_RNA (1)...(19): siRNA sense strand
aagaggccaugcuuucuag

SEQ ID NO: 1507733 - RNA, 19 nt, Homo sapiens
  misc_RNA (1)...(19): siRNA sense strand
gaagaagcugccaaaauga

SEQ ID NO: 1507734 - RNA, 19 nt, Homo sapiens
  misc_RNA (1)...(19): siRNA sense strand
ggguucaacaugaugauga

SEQ ID NO: 1507735 - RNA, 19 nt, Homo sapiens
  misc_RNA (1)...(19): siRNA sense strand
cugcacagaauaacuuuga

SEQ ID NO: 1507736 - RNA, 19 nt, Homo sapiens
  misc_RNA (1)...(19): siRNA sense strand
uaccaucgagacagacaua

SEQ ID NO: 1507737 - RNA, 19 nt, Homo sapiens
  misc_RNA (1)...(19): siRNA sense strand
acauuaccaucgagacaga

SEQ ID NO: 1507738 - RNA, 19 nt, Homo sapiens
  misc_RNA (1)...(19): siRNA sense strand
ccacccggaugcaguacau

SEQ ID NO: 1507739 - RNA, 19 nt, Homo sapiens
  misc_RNA (1)...(19): siRNA sense strand
caaagugagggccauccaa

SEQ ID NO: 1507740 - RNA, 19 nt, Homo sapiens
  misc_RNA (1)...(19): siRNA sense strand
cacagaauaacuuugagaa

SEQ ID NO: 1507741 - RNA, 19 nt, Homo sapiens
  misc_RNA (1)...(19): siRNA sense strand
ccagcaacccgaccucugu

SEQ ID NO: 1507742 - RNA, 19 nt, Homo sapiens
  misc_RNA (1)...(19): siRNA sense strand
gagagaugaggaacugugu

SEQ ID NO: 1507743 - RNA, 19 nt, Homo sapiens
  misc_RNA (1)...(19): siRNA sense strand
cuaaauaugauguguacag

SEQ ID NO: 1507744 - RNA, 19 nt, Homo sapiens
  misc_RNA (1)...(19): siRNA sense strand
uccaacaccugcugaagag

SEQ ID NO: 1507745 - RNA, 19 nt, Homo sapiens
  misc_RNA (1)...(19): siRNA sense strand
caagcgaggcccagcagau

SEQ ID NO: 1507746 - RNA, 19 nt, Homo sapiens
  misc_RNA (1)...(19): siRNA sense strand
gccugucucugaccaaugg

SEQ ID NO: 1507747 - RNA, 19 nt, Homo sapiens
  misc_RNA (1)...(19): siRNA sense strand
ucagaagaaaccauacuca

SEQ ID NO: 1507748 - RNA, 19 nt, Homo sapiens
  misc_RNA (1)...(19): siRNA sense strand
gggcaucauguccuuccua

SEQ ID NO: 1507749 - RNA, 19 nt, Homo sapiens
  misc_RNA (1)...(19): siRNA sense strand
gugaauuaccucauugaag

SEQ ID NO: 1507750 - RNA, 19 nt, Homo sapiens
  misc_RNA (1)...(19): siRNA sense strand
gcaacacagccauccucaa

SEQ ID NO: 1507751 - RNA, 19 nt, Homo sapiens
  misc_RNA (1)...(19): siRNA sense strand
gcucuccgaccguaagaau

SEQ ID NO: 1507752 - RNA, 19 nt, Homo sapiens
  misc_RNA (1)...(19): siRNA sense strand
ggccaugcuuucuagacau

SEQ ID NO: 1507753 - RNA, 19 nt, Homo sapiens
  misc_RNA (1)...(19): siRNA sense strand
guacaugugucguaucaua

SEQ ID NO: 1507754 - RNA, 19 nt, Homo sapiens
  misc_RNA (1)...(19): siRNA sense strand
gaauagacauacagcugaa

SEQ ID NO: 1507755 - RNA, 19 nt, Homo sapiens
  misc_RNA (1)...(19): siRNA sense strand
ucacgggaccuuugaaaua

SEQ ID NO: 1507756 - RNA, 19 nt, Homo sapiens
  misc_RNA (1)...(19): siRNA sense strand
ggaaguacaugugucguau

SEQ ID NO: 1507757 - RNA, 19 nt, Homo sapiens
  misc_RNA (1)...(19): siRNA sense strand
aaacugacuucgaggaauu

SEQ ID NO: 1507758 - RNA, 19 nt, Homo sapiens
  misc_RNA (1)...(19): siRNA sense strand
ggagaagguuggugcuuuc

SEQ ID NO: 1507759 - RNA, 19 nt, Homo sapiens
  misc_RNA (1)...(19): siRNA sense strand
gaaccagacuagcauuucu

SEQ ID NO: 1507760 - RNA, 19 nt, Homo sapiens
  misc_RNA (1)...(19): siRNA sense strand
gaagguuggugcuuucaca

SEQ ID NO: 1507761 - RNA, 19 nt, Homo sapiens
  misc_RNA (1)...(19): siRNA sense strand
acauacagcugaauaggaa

SEQ ID NO: 1507762 - RNA, 19 nt, Homo sapiens
  misc_RNA (1)...(19): siRNA sense strand
gaggaauucuuucuaaggu

SEQ ID NO: 1507763 - RNA, 19 nt, Homo sapiens
  misc_RNA (1)...(19): siRNA sense strand
gcagcgaucuugggauaug

SEQ ID NO: 1507764 - RNA, 19 nt, Homo sapiens
  misc_RNA (1)...(19): siRNA sense strand
ggaaacagauacaguaccu

SEQ ID NO: 1507765 - RNA, 19 nt, Homo sapiens
  misc_RNA (1)...(19): siRNA sense strand
uugaauugcugguagagua

SEQ ID NO: 1507766 - RNA, 19 nt, Homo sapiens
  misc_RNA (1)...(19): siRNA sense strand
ccaagcaugugguggauca

SEQ ID NO: 1507767 - RNA, 19 nt, Homo sapiens
  misc_RNA (1)...(19): siRNA sense strand
cacguaagcuuucuacuac

SEQ ID NO: 1507768 - RNA, 19 nt, Homo sapiens
  misc_RNA (1)...(19): siRNA sense strand
ugaggaaacagauacagua

SEQ ID NO: 1507769 - RNA, 19 nt, Homo sapiens
  misc_RNA (1)...(19): siRNA sense strand
acacguaagcuuucuacua

SEQ ID NO: 1507770 - RNA, 19 nt, Homo sapiens
  misc_RNA (1)...(19): siRNA sense strand
caacgacgagggacuuuga

SEQ ID NO: 1507771 - RNA, 19 nt, Homo sapiens
  misc_RNA (1)...(19): siRNA sense strand
ccuauauccugaagaagaa

SEQ ID NO: 1507772 - RNA, 19 nt, Homo sapiens
  misc_RNA (1)...(19): siRNA sense strand
ugacuucgaggaauucuuu

SEQ ID NO: 1507773 - RNA, 19 nt, Homo sapiens
  misc_RNA (1)...(19): siRNA sense strand
uaauagaagccaugggauu

SEQ ID NO: 1507774 - RNA, 19 nt, Homo sapiens
  misc_RNA (1)...(19): siRNA sense strand
ggaugugucuaguccgaau

SEQ ID NO: 1507775 - RNA, 19 nt, Homo sapiens
  misc_RNA (1)...(19): siRNA sense strand
gggaaguacaugugucgua

SEQ ID NO: 1507776 - RNA, 19 nt, Homo sapiens
  misc_RNA (1)...(19): siRNA sense strand
gguagaguaugugaggaaa

SEQ ID NO: 1507777 - RNA, 19 nt, Homo sapiens
  misc_RNA (1)...(19): siRNA sense strand
gcccugcgcauguauacua

SEQ ID NO: 1507778 - RNA, 19 nt, Homo sapiens
  misc_RNA (1)...(19): siRNA sense strand
augcagcgaucuugggaua

SEQ ID NO: 1507779 - RNA, 19 nt, Homo sapiens
  misc_RNA (1)...(19): siRNA sense strand
ccugauacauucaauucau

SEQ ID NO: 1507780 - RNA, 19 nt, Homo sapiens
  misc_RNA (1)...(19): siRNA sense strand
uagaguaugugaggaaaca

SEQ ID NO: 1507781 - RNA, 19 nt, Homo sapiens
  misc_RNA (1)...(19): siRNA sense strand
uaagcuuucuacuaccaaa

SEQ ID NO: 1507782 - RNA, 19 nt, Homo sapiens
  misc_RNA (1)...(19): siRNA sense strand
aggagaagguuggugcuuu

SEQ ID NO: 1507783 - RNA, 19 nt, Homo sapiens
  misc_RNA (1)...(19): siRNA sense strand
gacauacagcugaauagga

SEQ ID NO: 1507784 - RNA, 19 nt, Homo sapiens
  misc_RNA (1)...(19): siRNA sense strand
ggaaccagacuagcauuuc

SEQ ID NO: 1507785 - RNA, 19 nt, Homo sapiens
  misc_RNA (1)...(19): siRNA sense strand
aauggaagauuaagauugc

SEQ ID NO: 1507786 - RNA, 19 nt, Homo sapiens
  misc_RNA (1)...(19): siRNA sense strand
gagccagucccaagcaugu

SEQ ID NO: 1507787 - RNA, 19 nt, Homo sapiens
  misc_RNA (1)...(19): siRNA sense strand
aaguacaugugucguauca

SEQ ID NO: 1507788 - RNA, 19 nt, Homo sapiens
  misc_RNA (1)...(19): siRNA sense strand
ggagugggaaguacaugug

SEQ ID NO: 1507789 - RNA, 19 nt, Homo sapiens
  misc_RNA (1)...(19): siRNA sense strand
gaccuuugaaauacaguaa

SEQ ID NO: 1507790 - RNA, 19 nt, Homo sapiens
  misc_RNA (1)...(19): siRNA sense strand
uucgaggaauucuuucuaa

SEQ ID NO: 1507791 - RNA, 19 nt, Homo sapiens
  misc_RNA (1)...(19): siRNA sense strand
ccaguaugcagccgauuga

SEQ ID NO: 1507792 - RNA, 19 nt, Homo sapiens
  misc_RNA (1)...(19): siRNA sense strand
gggauucacgggaccuuug

SEQ ID NO: 1507793 - RNA, 19 nt, Homo sapiens
  misc_RNA (1)...(19): siRNA sense strand
agaagaauccucagagcau

SEQ ID NO: 1507794 - RNA, 19 nt, Homo sapiens
  misc_RNA (1)...(19): siRNA sense strand
cagacuagcauuucucagu

SEQ ID NO: 1507795 - RNA, 19 nt, Homo sapiens
  misc_RNA (1)...(19): siRNA sense strand
cacgggaccuuugaaauac

SEQ ID NO: 1507796 - RNA, 19 nt, Homo sapiens
  misc_RNA (1)...(19): siRNA sense strand
ggauucacgggaccuuuga

SEQ ID NO: 1507797 - RNA, 19 nt, Homo sapiens
  misc_RNA (1)...(19): siRNA sense strand
gcauguauacuagcugugu

SEQ ID NO: 1507798 - RNA, 19 nt, Homo sapiens
  misc_RNA (1)...(19): siRNA sense strand
auagacauacagcugaaua

SEQ ID NO: 1507799 - RNA, 19 nt, Homo sapiens
  misc_RNA (1)...(19): siRNA sense strand
gaaaacugacuucgaggaa

SEQ ID NO: 1507800 - RNA, 19 nt, Homo sapiens
  misc_RNA (1)...(19): siRNA sense strand
ggaccuuugaaauacagua

SEQ ID NO: 1507801 - RNA, 19 nt, Homo sapiens
  misc_RNA (1)...(19): siRNA sense strand
guaugugaggaaacagaua

SEQ ID NO: 1507802 - RNA, 19 nt, Homo sapiens
  misc_RNA (1)...(19): siRNA sense strand
gaucuugggauaugaugag

SEQ ID NO: 1507803 - RNA, 19 nt, Homo sapiens
  misc_RNA (1)...(19): siRNA sense strand
ucaguggguuccaguaugc

SEQ ID NO: 1507804 - RNA, 19 nt, Homo sapiens
  misc_RNA (1)...(19): siRNA sense strand
caugugucguaucauaguu

SEQ ID NO: 1507805 - RNA, 19 nt, Homo sapiens
  misc_RNA (1)...(19): siRNA sense strand
cugauacauucaauucaug

SEQ ID NO: 1507806 - RNA, 19 nt, Homo sapiens
  misc_RNA (1)...(19): siRNA sense strand
gaggaaacagauacaguac

SEQ ID NO: 1507807 - RNA, 19 nt, Homo sapiens
  misc_RNA (1)...(19): siRNA sense strand
gaguaugugaggaaacaga

SEQ ID NO: 1507808 - RNA, 19 nt, Homo sapiens
  misc_RNA (1)...(19): siRNA sense strand
aguaugcagccgauugaua

SEQ ID NO: 1507809 - RNA, 19 nt, Homo sapiens
  misc_RNA (1)...(19): siRNA sense strand
cguaagcuuucuacuacca

SEQ ID NO: 1507810 - RNA, 19 nt, Homo sapiens
  misc_RNA (1)...(19): siRNA sense strand
gcccucuaguggagaagaa

SEQ ID NO: 1507811 - RNA, 19 nt, Homo sapiens
  misc_RNA (1)...(19): siRNA sense strand
cagcgaucuugggauauga

SEQ ID NO: 1507812 - RNA, 19 nt, Homo sapiens
  misc_RNA (1)...(19): siRNA sense strand
ugucguaucauaguucauu

SEQ ID NO: 1507813 - RNA, 19 nt, Homo sapiens
  misc_RNA (1)...(19): siRNA sense strand
gaaguacaugugucguauc

SEQ ID NO: 1507814 - RNA, 19 nt, Homo sapiens
  misc_RNA (1)...(19): siRNA sense strand
cccuauauccugaagaaga

SEQ ID NO: 1507815 - RNA, 19 nt, Homo sapiens
  misc_RNA (1)...(19): siRNA sense strand
gucguaucauaguucauuu

SEQ ID NO: 1507816 - RNA, 19 nt, Homo sapiens
  misc_RNA (1)...(19): siRNA sense strand
ucacaccacacguaagcuu

SEQ ID NO: 1507817 - RNA, 19 nt, Homo sapiens
  misc_RNA (1)...(19): siRNA sense strand
cccucgacaucuugaauug

SEQ ID NO: 1507818 - RNA, 19 nt, Homo sapiens
  misc_RNA (1)...(19): siRNA sense strand
gugaagacccucgacaucu

SEQ ID NO: 1507819 - RNA, 19 nt, Homo sapiens
  misc_RNA (1)...(19): siRNA sense strand
cgaggaauucuuucuaagg

SEQ ID NO: 1507820 - RNA, 19 nt, Homo sapiens
  misc_RNA (1)...(19): siRNA sense strand
aauagaagccaugggauuc

SEQ ID NO: 1507821 - RNA, 19 nt, Homo sapiens
  misc_RNA (1)...(19): siRNA sense strand
gaugccugauacauucaau

SEQ ID NO: 1507822 - RNA, 19 nt, Homo sapiens
  misc_RNA (1)...(19): siRNA sense strand
ugaauugcugguagaguau

SEQ ID NO: 1507823 - RNA, 19 nt, Homo sapiens
  misc_RNA (1)...(19): siRNA sense strand
gaggggauccuuucagaug

SEQ ID NO: 1507824 - RNA, 19 nt, Homo sapiens
  misc_RNA (1)...(19): siRNA sense strand
ucgaggaauucuuucuaag

SEQ ID NO: 1507825 - RNA, 19 nt, Homo sapiens
  misc_RNA (1)...(19): siRNA sense strand
gaggagaagguuggugcuu

SEQ ID NO: 1507826 - RNA, 19 nt, Homo sapiens
  misc_RNA (1)...(19): siRNA sense strand
cccauucuccgacuuacaa

SEQ ID NO: 1507827 - RNA, 19 nt, Homo sapiens
  misc_RNA (1)...(19): siRNA sense strand
aaguaucacaccacacgua

SEQ ID NO: 1507828 - RNA, 19 nt, Homo sapiens
  misc_RNA (1)...(19): siRNA sense strand
gaugagccagucccaagca

SEQ ID NO: 1507829 - RNA, 19 nt, Homo sapiens
  misc_RNA (1)...(19): siRNA sense strand
gaagaacuccucagacuug

SEQ ID NO: 1507830 - RNA, 19 nt, Homo sapiens
  misc_RNA (1)...(19): siRNA sense strand
gagaagaacuccucagacu

SEQ ID NO: 1507831 - RNA, 19 nt, Homo sapiens
  misc_RNA (1)...(19): siRNA sense strand
gaaaagugaugauagaaga

SEQ ID NO: 1507832 - RNA, 19 nt, Homo sapiens
  misc_RNA (1)...(19): siRNA sense strand
gcaaagacaaagagaagaa

SEQ ID NO: 1507833 - RNA, 19 nt, Homo sapiens
  misc_RNA (1)...(19): siRNA sense strand
gaacuucguccuuccagaa

SEQ ID NO: 1507834 - RNA, 19 nt, Homo sapiens
  misc_RNA (1)...(19): siRNA sense strand
gaaccgacacuuccacaug

SEQ ID NO: 1507835 - RNA, 19 nt, Homo sapiens
  misc_RNA (1)...(19): siRNA sense strand
aagaggagaugaaggaaga

SEQ ID NO: 1507836 - RNA, 19 nt, Homo sapiens
  misc_RNA (1)...(19): siRNA sense strand
gcaaagaaggcgcagacaa

SEQ ID NO: 1507837 - RNA, 19 nt, Homo sapiens
  misc_RNA (1)...(19): siRNA sense strand
gauagaagaggagaugaaa

SEQ ID NO: 1507838 - RNA, 19 nt, Homo sapiens
  misc_RNA (1)...(19): siRNA sense strand
ugaaagaggagaugaagga

SEQ ID NO: 1507839 - RNA, 19 nt, Homo sapiens
  misc_RNA (1)...(19): siRNA sense strand
uagaagaggagaugaaaga

SEQ ID NO: 1507840 - RNA, 19 nt, Homo sapiens
  misc_RNA (1)...(19): siRNA sense strand
acaaaguccugaccgcaaa

SEQ ID NO: 1507841 - RNA, 19 nt, Homo sapiens
  misc_RNA (1)...(19): siRNA sense strand
caaagaaggcgcagacaag

SEQ ID NO: 1507842 - RNA, 19 nt, Homo sapiens
  misc_RNA (1)...(19): siRNA sense strand
agucugagauucuuccauu

SEQ ID NO: 1507843 - RNA, 19 nt, Homo sapiens
  misc_RNA (1)...(19): siRNA sense strand
gcaugagucugagauucuu

SEQ ID NO: 1507844 - RNA, 19 nt, Homo sapiens
  misc_RNA (1)...(19): siRNA sense strand
aaccgacacuuccacauga

SEQ ID NO: 1507845 - RNA, 19 nt, Homo sapiens
  misc_RNA (1)...(19): siRNA sense strand
gaugauagaagaggagaug

SEQ ID NO: 1507846 - RNA, 19 nt, Homo sapiens
  misc_RNA (1)...(19): siRNA sense strand
gaaagaggagaugaaggaa

SEQ ID NO: 1507847 - RNA, 19 nt, Homo sapiens
  misc_RNA (1)...(19): siRNA sense strand
cgacacuuccacaugauuu

SEQ ID NO: 1507848 - RNA, 19 nt, Homo sapiens
  misc_RNA (1)...(19): siRNA sense strand
gggacaaguucagccagaa

SEQ ID NO: 1507849 - RNA, 19 nt, Homo sapiens
  misc_RNA (1)...(19): siRNA sense strand
cagcaaagacaaagagaag

SEQ ID NO: 1507850 - RNA, 19 nt, Homo sapiens
  misc_RNA (1)...(19): siRNA sense strand
gcaaacagcaacccuucca

SEQ ID NO: 1507851 - RNA, 19 nt, Homo sapiens
  misc_RNA (1)...(19): siRNA sense strand
gaugaaagaggagaugaag

SEQ ID NO: 1507852 - RNA, 19 nt, Homo sapiens
  misc_RNA (1)...(19): siRNA sense strand
caauggggcugacgauguu

SEQ ID NO: 1507853 - RNA, 19 nt, Homo sapiens
  misc_RNA (1)...(19): siRNA sense strand
gagaugaaagaggagauga

SEQ ID NO: 1507854 - RNA, 19 nt, Homo sapiens
  misc_RNA (1)...(19): siRNA sense strand
ggagaugaaagaggagaug

SEQ ID NO: 1507855 - RNA, 19 nt, Homo sapiens
  misc_RNA (1)...(19): siRNA sense strand
aagagaagaacuccucaga

SEQ ID NO: 1507856 - RNA, 19 nt, Homo sapiens
  misc_RNA (1)...(19): siRNA sense strand
gaaggaaaagugaugauag

SEQ ID NO: 1507857 - RNA, 19 nt, Homo sapiens
  misc_RNA (1)...(19): siRNA sense strand
ugauagaagaggagaugaa

SEQ ID NO: 1507858 - RNA, 19 nt, Homo sapiens
  misc_RNA (1)...(19): siRNA sense strand
gaccaucugagcaccaugu

SEQ ID NO: 1507859 - RNA, 19 nt, Homo sapiens
  misc_RNA (1)...(19): siRNA sense strand
ccagcaaagacaaagagaa

SEQ ID NO: 1507860 - RNA, 19 nt, Homo sapiens
  misc_RNA (1)...(19): siRNA sense strand
aaggaaaagugaugauaga

SEQ ID NO: 1507861 - RNA, 19 nt, Homo sapiens
  misc_RNA (1)...(19): siRNA sense strand
cugcaugagucugagauuc

SEQ ID NO: 1507862 - RNA, 19 nt, Homo sapiens
  misc_RNA (1)...(19): siRNA sense strand
gacacuuccacaugauuug

SEQ ID NO: 1507863 - RNA, 19 nt, Homo sapiens
  misc_RNA (1)...(19): siRNA sense strand
agaagaacuccucagacuu

SEQ ID NO: 1507864 - RNA, 19 nt, Homo sapiens
  misc_RNA (1)...(19): siRNA sense strand
gcauaaagccuucaaauga

SEQ ID NO: 1507865 - RNA, 19 nt, Homo sapiens
  misc_RNA (1)...(19): siRNA sense strand
gagauuugcuucugucuuu

SEQ ID NO: 1507866 - RNA, 19 nt, Homo sapiens
  misc_RNA (1)...(19): siRNA sense strand
ggagggagcuugaacugaa

SEQ ID NO: 1507867 - RNA, 19 nt, Homo sapiens
  misc_RNA (1)...(19): siRNA sense strand
caauguagagcaacaauua

SEQ ID NO: 1507868 - RNA, 19 nt, Homo sapiens
  misc_RNA (1)...(19): siRNA sense strand
cuaaugacauggaaaguuu

SEQ ID NO: 1507869 - RNA, 19 nt, Homo sapiens
  misc_RNA (1)...(19): siRNA sense strand
caagaacuaucaagaguau

SEQ ID NO: 1507870 - RNA, 19 nt, Homo sapiens
  misc_RNA (1)...(19): siRNA sense strand
gacaauaagucuucagguu

SEQ ID NO: 1507871 - RNA, 19 nt, Homo sapiens
  misc_RNA (1)...(19): siRNA sense strand
ggaaggugcugccaucuca

SEQ ID NO: 1507872 - RNA, 19 nt, Homo sapiens
  misc_RNA (1)...(19): siRNA sense strand
gaagagaggauucaaaugg

SEQ ID NO: 1507873 - RNA, 19 nt, Homo sapiens
  misc_RNA (1)...(19): siRNA sense strand
ucaguuaccuucagauguu

SEQ ID NO: 1507874 - RNA, 19 nt, Homo sapiens
  misc_RNA (1)...(19): siRNA sense strand
gcauggaagucuugguaaa

SEQ ID NO: 1507875 - RNA, 19 nt, Homo sapiens
  misc_RNA (1)...(19): siRNA sense strand
ggugguaacuaaugaguau

SEQ ID NO: 1507876 - RNA, 19 nt, Homo sapiens
  misc_RNA (1)...(19): siRNA sense strand
gcaagaacuaucaagagua

SEQ ID NO: 1507877 - RNA, 19 nt, Homo sapiens
  misc_RNA (1)...(19): siRNA sense strand
ucacuaagcccaucgaaga

SEQ ID NO: 1507878 - RNA, 19 nt, Homo sapiens
  misc_RNA (1)...(19): siRNA sense strand
gaaaaggaauugauaccaa

SEQ ID NO: 1507879 - RNA, 19 nt, Homo sapiens
  misc_RNA (1)...(19): siRNA sense strand
gggcaacagucacauacuu

SEQ ID NO: 1507880 - RNA, 19 nt, Homo sapiens
  misc_RNA (1)...(19): siRNA sense strand
gagcaacaauuaucuacca

SEQ ID NO: 1507881 - RNA, 19 nt, Homo sapiens
  misc_RNA (1)...(19): siRNA sense strand
gaagcaagaacuaucaaga

SEQ ID NO: 1507882 - RNA, 19 nt, Homo sapiens
  misc_RNA (1)...(19): siRNA sense strand
gauccaucccuaucaguua

SEQ ID NO: 1507883 - RNA, 19 nt, Homo sapiens
  misc_RNA (1)...(19): siRNA sense strand
gaagacaguugccauucuc

SEQ ID NO: 1507884 - RNA, 19 nt, Homo sapiens
  misc_RNA (1)...(19): siRNA sense strand
cuagugaccuggguaguuu

SEQ ID NO: 1507885 - RNA, 19 nt, Homo sapiens
  misc_RNA (1)...(19): siRNA sense strand
cuuauuaacuucucuguca

SEQ ID NO: 1507886 - RNA, 19 nt, Homo sapiens
  misc_RNA (1)...(19): siRNA sense strand
gcgagccucucucuaguga

SEQ ID NO: 1507887 - RNA, 19 nt, Homo sapiens
  misc_RNA (1)...(19): siRNA sense strand
ucaaauggaaggacaauau

SEQ ID NO: 1507888 - RNA, 19 nt, Homo sapiens
  misc_RNA (1)...(19): siRNA sense strand
caacccauuucaacaguga

SEQ ID NO: 1507889 - RNA, 19 nt, Homo sapiens
  misc_RNA (1)...(19): siRNA sense strand
ucagaacacagaaagauuu

SEQ ID NO: 1507890 - RNA, 19 nt, Homo sapiens
  misc_RNA (1)...(19): siRNA sense strand
ggagaagacaguugccauu

SEQ ID NO: 1507891 - RNA, 19 nt, Homo sapiens
  misc_RNA (1)...(19): siRNA sense strand
gcugccaucucaauuguga

SEQ ID NO: 1507892 - RNA, 19 nt, Homo sapiens
  misc_RNA (1)...(19): siRNA sense strand
caauaagucuucagguucu

SEQ ID NO: 1507893 - RNA, 19 nt, Homo sapiens
  misc_RNA (1)...(19): siRNA sense strand
gaucccuggugguaacuaa

SEQ ID NO: 1507894 - RNA, 19 nt, Homo sapiens
  misc_RNA (1)...(19): siRNA sense strand
gcagcgagccucucucuag

SEQ ID NO: 1507895 - RNA, 19 nt, Homo sapiens
  misc_RNA (1)...(19): siRNA sense strand
uagagaaggguaccaagua

SEQ ID NO: 1507896 - RNA, 19 nt, Homo sapiens
  misc_RNA (1)...(19): siRNA sense strand
ggcaacagucacauacuua

SEQ ID NO: 1507897 - RNA, 19 nt, Homo sapiens
  misc_RNA (1)...(19): siRNA sense strand
agagaaggguaccaaguau

SEQ ID NO: 1507898 - RNA, 19 nt, Homo sapiens
  misc_RNA (1)...(19): siRNA sense strand
cauaaagccuucaaaugac

SEQ ID NO: 1507899 - RNA, 19 nt, Homo sapiens
  misc_RNA (1)...(19): siRNA sense strand
uccuggagcuuguggauaa

SEQ ID NO: 1507900 - RNA, 19 nt, Homo sapiens
  misc_RNA (1)...(19): siRNA sense strand
cagccuggaugauuuaaca

SEQ ID NO: 1507901 - RNA, 19 nt, Homo sapiens
  misc_RNA (1)...(19): siRNA sense strand
gcaacagucacauacuuau

SEQ ID NO: 1507902 - RNA, 19 nt, Homo sapiens
  misc_RNA (1)...(19): siRNA sense strand
cugcgcagcuggucccuaa

SEQ ID NO: 1507903 - RNA, 19 nt, Homo sapiens
  misc_RNA (1)...(19): siRNA sense strand
gacaguuguuauucucaaa

SEQ ID NO: 1507904 - RNA, 19 nt, Homo sapiens
  misc_RNA (1)...(19): siRNA sense strand
ucagagaucccugguggua

SEQ ID NO: 1507905 - RNA, 19 nt, Homo sapiens
  misc_RNA (1)...(19): siRNA sense strand
ucaagaguauagcauaaag

SEQ ID NO: 1507906 - RNA, 19 nt, Homo sapiens
  misc_RNA (1)...(19): siRNA sense strand
ugagaagggucaucaucug

SEQ ID NO: 1507907 - RNA, 19 nt, Homo sapiens
  misc_RNA (1)...(19): siRNA sense strand
aagcaugguuuccaagaug

SEQ ID NO: 1507908 - RNA, 19 nt, Homo sapiens
  misc_RNA (1)...(19): siRNA sense strand
ggacuucagaacacagaaa

SEQ ID NO: 1507909 - RNA, 19 nt, Homo sapiens
  misc_RNA (1)...(19): siRNA sense strand
gcuggucccuaaugacaug

SEQ ID NO: 1507910 - RNA, 19 nt, Homo sapiens
  misc_RNA (1)...(19): siRNA sense strand
caaccugaaucuaaagcau

SEQ ID NO: 1507911 - RNA, 19 nt, Homo sapiens
  misc_RNA (1)...(19): siRNA sense strand
acauuccuguggagacuua

SEQ ID NO: 1507912 - RNA, 19 nt, Homo sapiens
  misc_RNA (1)...(19): siRNA sense strand
ccugauacuuuucaucuua

SEQ ID NO: 1507913 - RNA, 19 nt, Homo sapiens
  misc_RNA (1)...(19): siRNA sense strand
aagagaggauucaaaugga

SEQ ID NO: 1507914 - RNA, 19 nt, Homo sapiens
  misc_RNA (1)...(19): siRNA sense strand
uguggagacuuauuaacuu

SEQ ID NO: 1507915 - RNA, 19 nt, Homo sapiens
  misc_RNA (1)...(19): siRNA sense strand
ugacaguuguuauucucaa

SEQ ID NO: 1507916 - RNA, 19 nt, Homo sapiens
  misc_RNA (1)...(19): siRNA sense strand
agagaggauucaaauggaa

SEQ ID NO: 1507917 - RNA, 19 nt, Homo sapiens
  misc_RNA (1)...(19): siRNA sense strand
guggagacuuauuaacuuc

SEQ ID NO: 1507918 - RNA, 19 nt, Homo sapiens
  misc_RNA (1)...(19): siRNA sense strand
ucuaaagcaugguuuccaa

SEQ ID NO: 1507919 - RNA, 19 nt, Homo sapiens
  misc_RNA (1)...(19): siRNA sense strand
gaagcuuaguucagaucug

SEQ ID NO: 1507920 - RNA, 19 nt, Homo sapiens
  misc_RNA (1)...(19): siRNA sense strand
ccucaccaguggcacauga

SEQ ID NO: 1507921 - RNA, 19 nt, Homo sapiens
  misc_RNA (1)...(19): siRNA sense strand
gagaagacaguugccauuc

SEQ ID NO: 1507922 - RNA, 19 nt, Homo sapiens
  misc_RNA (1)...(19): siRNA sense strand
gugcugccaucucaauugu

SEQ ID NO: 1507923 - RNA, 19 nt, Homo sapiens
  misc_RNA (1)...(19): siRNA sense strand
aagacacgaugaaagcauu

SEQ ID NO: 1507924 - RNA, 19 nt, Homo sapiens
  misc_RNA (1)...(19): siRNA sense strand
gaccaccgcuucacauucc

SEQ ID NO: 1507925 - RNA, 19 nt, Homo sapiens
  misc_RNA (1)...(19): siRNA sense strand
gaagacacgaugaaagcau

SEQ ID NO: 1507926 - RNA, 19 nt, Homo sapiens
  misc_RNA (1)...(19): siRNA sense strand
uaaagcaugguuuccaaga

SEQ ID NO: 1507927 - RNA, 19 nt, Homo sapiens
  misc_RNA (1)...(19): siRNA sense strand
uugccaaccugaaucuaaa

SEQ ID NO: 1507928 - RNA, 19 nt, Homo sapiens
  misc_RNA (1)...(19): siRNA sense strand
ggaaaauuaugacaguugu

SEQ ID NO: 1507929 - RNA, 19 nt, Homo sapiens
  misc_RNA (1)...(19): siRNA sense strand
caguugccauucuccauga

SEQ ID NO: 1507930 - RNA, 19 nt, Homo sapiens
  misc_RNA (1)...(19): siRNA sense strand
uagcauaaagccuucaaau

SEQ ID NO: 1507931 - RNA, 19 nt, Homo sapiens
  misc_RNA (1)...(19): siRNA sense strand
gggagaucaucgcccuuug

SEQ ID NO: 1507932 - RNA, 19 nt, Homo sapiens
  misc_RNA (1)...(19): siRNA sense strand
gcuccugccuccugagaag

SEQ ID NO: 1507933 - RNA, 19 nt, Homo sapiens
  misc_RNA (1)...(19): siRNA sense strand
augaugaucuucugcacaa

SEQ ID NO: 1507934 - RNA, 19 nt, Homo sapiens
  misc_RNA (1)...(19): siRNA sense strand
caaauggaaggacaauauc

SEQ ID NO: 1507935 - RNA, 19 nt, Homo sapiens
  misc_RNA (1)...(19): siRNA sense strand
cagugacccugcuguacuu

SEQ ID NO: 1507936 - RNA, 19 nt, Homo sapiens
  misc_RNA (1)...(19): siRNA sense strand
cagcgagccucucucuagu

SEQ ID NO: 1507937 - RNA, 19 nt, Homo sapiens
  misc_RNA (1)...(19): siRNA sense strand
ucagagugcuggaggaaaa

SEQ ID NO: 1507938 - RNA, 19 nt, Homo sapiens
  misc_RNA (1)...(19): siRNA sense strand
cauggaaaguuugaagcaa

SEQ ID NO: 1507939 - RNA, 19 nt, Homo sapiens
  misc_RNA (1)...(19): siRNA sense strand
ucgaagagaggauucaaau

SEQ ID NO: 1507940 - RNA, 19 nt, Homo sapiens
  misc_RNA (1)...(19): siRNA sense strand
gaaucuaaagcaugguuuc

SEQ ID NO: 1507941 - RNA, 19 nt, Homo sapiens
  misc_RNA (1)...(19): siRNA sense strand
gguaaaaggccucagagaa

SEQ ID NO: 1507942 - RNA, 19 nt, Homo sapiens
  misc_RNA (1)...(19): siRNA sense strand
ccuaucaguuaccuucaga

SEQ ID NO: 1507943 - RNA, 19 nt, Homo sapiens
  misc_RNA (1)...(19): siRNA sense strand
aaagcaugguuuccaagau

SEQ ID NO: 1507944 - RNA, 19 nt, Homo sapiens
  misc_RNA (1)...(19): siRNA sense strand
cugcuguacuugucaaugu

SEQ ID NO: 1507945 - RNA, 19 nt, Homo sapiens
  misc_RNA (1)...(19): siRNA sense strand
aagcuuaguucagaucugu

SEQ ID NO: 1507946 - RNA, 19 nt, Homo sapiens
  misc_RNA (1)...(19): siRNA sense strand
auaaagccuucaaaugaca

SEQ ID NO: 1507947 - RNA, 19 nt, Homo sapiens
  misc_RNA (1)...(19): siRNA sense strand
gagaagcaagaacuaucaa

SEQ ID NO: 1507948 - RNA, 19 nt, Homo sapiens
  misc_RNA (1)...(19): siRNA sense strand
uaccaaaaccugauacuuu

SEQ ID NO: 1507949 - RNA, 19 nt, Homo sapiens
  misc_RNA (1)...(19): siRNA sense strand
gcgcagcuggucccuaaug

SEQ ID NO: 1507950 - RNA, 19 nt, Homo sapiens
  misc_RNA (1)...(19): siRNA sense strand
gagggagcuugaacugaag

SEQ ID NO: 1507951 - RNA, 19 nt, Homo sapiens
  misc_RNA (1)...(19): siRNA sense strand
acaacgcuguccugggaaa

SEQ ID NO: 1507952 - RNA, 19 nt, Homo sapiens
  misc_RNA (1)...(19): siRNA sense strand
agcaagaacuaucaagagu

SEQ ID NO: 1507953 - RNA, 19 nt, Homo sapiens
  misc_RNA (1)...(19): siRNA sense strand
ggaaaagcacguugucuuc

SEQ ID NO: 1507954 - RNA, 19 nt, Homo sapiens
  misc_RNA (1)...(19): siRNA sense strand
ccacaacccauuucaacag

SEQ ID NO: 1507955 - RNA, 19 nt, Homo sapiens
  misc_RNA (1)...(19): siRNA sense strand
uaaagaccaccgcuucaca

SEQ ID NO: 1507956 - RNA, 19 nt, Homo sapiens
  misc_RNA (1)...(19): siRNA sense strand
guaaaaggccucagagaag

SEQ ID NO: 1507957 - RNA, 19 nt, Homo sapiens
  misc_RNA (1)...(19): siRNA sense strand
ccagauccaucccuaucag

SEQ ID NO: 1507958 - RNA, 19 nt, Homo sapiens
  misc_RNA (1)...(19): siRNA sense strand
cauaaagaccaccgcuuca

SEQ ID NO: 1507959 - RNA, 19 nt, Homo sapiens
  misc_RNA (1)...(19): siRNA sense strand
ggugcugccaucucaauug

SEQ ID NO: 1507960 - RNA, 19 nt, Homo sapiens
  misc_RNA (1)...(19): siRNA sense strand
gcccgagauuugcuucugu

SEQ ID NO: 1507961 - RNA, 19 nt, Homo sapiens
  misc_RNA (1)...(19): siRNA sense strand
cgaagagaggauucaaaug

SEQ ID NO: 1507962 - RNA, 19 nt, Homo sapiens
  misc_RNA (1)...(19): siRNA sense strand
auaaggagccaaaagguua

SEQ ID NO: 1507963 - RNA, 19 nt, Homo sapiens
  misc_RNA (1)...(19): siRNA sense strand
ggagaucaucgcccuuugg

SEQ ID NO: 1507964 - RNA, 19 nt, Homo sapiens
  misc_RNA (1)...(19): siRNA sense strand
gggccuugcugguguguua

SEQ ID NO: 1507965 - RNA, 19 nt, Homo sapiens
  misc_RNA (1)...(19): siRNA sense strand
ugggaaggcuggacucuuu

SEQ ID NO: 1507966 - RNA, 19 nt, Homo sapiens
  misc_RNA (1)...(19): siRNA sense strand
guggaggccucucaguuaa

SEQ ID NO: 1507967 - RNA, 19 nt, Homo sapiens
  misc_RNA (1)...(19): siRNA sense strand
ggaaaccguuggcaucuac

SEQ ID NO: 1507968 - RNA, 19 nt, Homo sapiens
  misc_RNA (1)...(19): siRNA sense strand
cagagaaacagaagaugua

SEQ ID NO: 1507969 - RNA, 19 nt, Homo sapiens
  misc_RNA (1)...(19): siRNA sense strand
aggaugagcuucaacucua

SEQ ID NO: 1507970 - RNA, 19 nt, Homo sapiens
  misc_RNA (1)...(19): siRNA sense strand
aaacagaagauguagacua

SEQ ID NO: 1507971 - RNA, 19 nt, Homo sapiens
  misc_RNA (1)...(19): siRNA sense strand
ggaggccucucaguuaaga

SEQ ID NO: 1507972 - RNA, 19 nt, Homo sapiens
  misc_RNA (1)...(19): siRNA sense strand
cagaagauguagacuaugg

SEQ ID NO: 1507973 - RNA, 19 nt, Homo sapiens
  misc_RNA (1)...(19): siRNA sense strand
aacagaagauguagacuau

SEQ ID NO: 1507974 - RNA, 19 nt, Homo sapiens
  misc_RNA (1)...(19): siRNA sense strand
gcugguguguuaucacuau

SEQ ID NO: 1507975 - RNA, 19 nt, Homo sapiens
  misc_RNA (1)...(19): siRNA sense strand
caagaacaauaugagagaa

SEQ ID NO: 1507976 - RNA, 19 nt, Homo sapiens
  misc_RNA (1)...(19): siRNA sense strand
ggaugagcuucaacucuau

SEQ ID NO: 1507977 - RNA, 19 nt, Homo sapiens
  misc_RNA (1)...(19): siRNA sense strand
agacagauuuccacaagca

SEQ ID NO: 1507978 - RNA, 19 nt, Homo sapiens
  misc_RNA (1)...(19): siRNA sense strand
ccucagagagcaaugauga

SEQ ID NO: 1507979 - RNA, 19 nt, Homo sapiens
  misc_RNA (1)...(19): siRNA sense strand
agagacagauuuccacaag

SEQ ID NO: 1507980 - RNA, 19 nt, Homo sapiens
  misc_RNA (1)...(19): siRNA sense strand
ccaagaacaauaugagaga

SEQ ID NO: 1507981 - RNA, 19 nt, Homo sapiens
  misc_RNA (1)...(19): siRNA sense strand
ccacagagaaacagaagau

SEQ ID NO: 1507982 - RNA, 19 nt, Homo sapiens
  misc_RNA (1)...(19): siRNA sense strand
gauguagacuauggagaga

SEQ ID NO: 1507983 - RNA, 19 nt, Homo sapiens
  misc_RNA (1)...(19): siRNA sense strand
gaaucaggacuccgaagga

SEQ ID NO: 1507984 - RNA, 19 nt, Homo sapiens
  misc_RNA (1)...(19): siRNA sense strand
ggacuaguguaccguaucc

SEQ ID NO: 1507985 - RNA, 19 nt, Homo sapiens
  misc_RNA (1)...(19): siRNA sense strand
aguggaggccucucaguua

SEQ ID NO: 1507986 - RNA, 19 nt, Homo sapiens
  misc_RNA (1)...(19): siRNA sense strand
gaacaauaugagagaaaca

SEQ ID NO: 1507987 - RNA, 19 nt, Homo sapiens
  misc_RNA (1)...(19): siRNA sense strand
acagucaaguccacagaga

SEQ ID NO: 1507988 - RNA, 19 nt, Homo sapiens
  misc_RNA (1)...(19): siRNA sense strand
caacagucaaguccacaga

SEQ ID NO: 1507989 - RNA, 19 nt, Homo sapiens
  misc_RNA (1)...(19): siRNA sense strand
gagaaacagaagauguaga

SEQ ID NO: 1507990 - RNA, 19 nt, Homo sapiens
  misc_RNA (1)...(19): siRNA sense strand
gagagacagauuuccacaa

SEQ ID NO: 1507991 - RNA, 19 nt, Homo sapiens
  misc_RNA (1)...(19): siRNA sense strand
caccuucgccucccuggaa

SEQ ID NO: 1507992 - RNA, 19 nt, Homo sapiens
  misc_RNA (1)...(19): siRNA sense strand
gaccagcaacccagagcaa

SEQ ID NO: 1507993 - RNA, 19 nt, Homo sapiens
  misc_RNA (1)...(19): siRNA sense strand
uggaaaccguuggcaucua

SEQ ID NO: 1507994 - RNA, 19 nt, Homo sapiens
  misc_RNA (1)...(19): siRNA sense strand
gguguguuaucacuauuac

SEQ ID NO: 1507995 - RNA, 19 nt, Homo sapiens
  misc_RNA (1)...(19): siRNA sense strand
gaaguggaggccucucagu

SEQ ID NO: 1507996 - RNA, 19 nt, Homo sapiens
  misc_RNA (1)...(19): siRNA sense strand
acagagaaacagaagaugu

SEQ ID NO: 1507997 - RNA, 19 nt, Homo sapiens
  misc_RNA (1)...(19): siRNA sense strand
uguagacuauggagagaca

SEQ ID NO: 1507998 - RNA, 19 nt, Homo sapiens
  misc_RNA (1)...(19): siRNA sense strand
agucaaguccacagagaaa

SEQ ID NO: 1507999 - RNA, 19 nt, Homo sapiens
  misc_RNA (1)...(19): siRNA sense strand
cuucaacucuauggagaug

SEQ ID NO: 1508000 - RNA, 19 nt, Homo sapiens
  misc_RNA (1)...(19): siRNA sense strand
caauaugagagaaacaagu

SEQ ID NO: 1508001 - RNA, 19 nt, Homo sapiens
  misc_RNA (1)...(19): siRNA sense strand
uggcaucuacuucggacua

SEQ ID NO: 1508002 - RNA, 19 nt, Homo sapiens
  misc_RNA (1)...(19): siRNA sense strand
ugacaggguucaggaagac

SEQ ID NO: 1508003 - RNA, 19 nt, Homo sapiens
  misc_RNA (1)...(19): siRNA sense strand
cccagcaaguggagaagug

SEQ ID NO: 1508004 - RNA, 19 nt, Homo sapiens
  misc_RNA (1)...(19): siRNA sense strand
gacuauggagagacagauu

SEQ ID NO: 1508005 - RNA, 19 nt, Homo sapiens
  misc_RNA (1)...(19): siRNA sense strand
cagauuuccacaagcaaga

SEQ ID NO: 1508006 - RNA, 19 nt, Homo sapiens
  misc_RNA (1)...(19): siRNA sense strand
agaaacagaagauguagac

SEQ ID NO: 1508007 - RNA, 19 nt, Homo sapiens
  misc_RNA (1)...(19): siRNA sense strand
agaacaauaugagagaaac

SEQ ID NO: 1508008 - RNA, 19 nt, Homo sapiens
  misc_RNA (1)...(19): siRNA sense strand
ucaaguccacagagaaaca

SEQ ID NO: 1508009 - RNA, 19 nt, Homo sapiens
  misc_RNA (1)...(19): siRNA sense strand
ccaagaagcuggccaacaa

SEQ ID NO: 1508010 - RNA, 19 nt, Homo sapiens
  misc_RNA (1)...(19): siRNA sense strand
agaaguggcugacaucuuu

SEQ ID NO: 1508011 - RNA, 19 nt, Homo sapiens
  misc_RNA (1)...(19): siRNA sense strand
gaagagcuaagaagaauuu

SEQ ID NO: 1508012 - RNA, 19 nt, Homo sapiens
  misc_RNA (1)...(19): siRNA sense strand
agaggaagaugaagaagaa

SEQ ID NO: 1508013 - RNA, 19 nt, Homo sapiens
  misc_RNA (1)...(19): siRNA sense strand
gagaugauguucccaugga

SEQ ID NO: 1508014 - RNA, 19 nt, Homo sapiens
  misc_RNA (1)...(19): siRNA sense strand
gaaguuugcucuagagaac

SEQ ID NO: 1508015 - RNA, 19 nt, Homo sapiens
  misc_RNA (1)...(19): siRNA sense strand
ugaacucgaugccagauuu

SEQ ID NO: 1508016 - RNA, 19 nt, Homo sapiens
  misc_RNA (1)...(19): siRNA sense strand
agagugaucugaauggaaa

SEQ ID NO: 1508017 - RNA, 19 nt, Homo sapiens
  misc_RNA (1)...(19): siRNA sense strand
cagaagagcuaagaagaau

SEQ ID NO: 1508018 - RNA, 19 nt, Homo sapiens
  misc_RNA (1)...(19): siRNA sense strand
guagacaggugauacaaag

SEQ ID NO: 1508019 - RNA, 19 nt, Homo sapiens
  misc_RNA (1)...(19): siRNA sense strand
agaagcaggucuagaagaa

SEQ ID NO: 1508020 - RNA, 19 nt, Homo sapiens
  misc_RNA (1)...(19): siRNA sense strand
ggaagaggaagaugaagaa

SEQ ID NO: 1508021 - RNA, 19 nt, Homo sapiens
  misc_RNA (1)...(19): siRNA sense strand
uaaauuugcggaagaguuu

SEQ ID NO: 1508022 - RNA, 19 nt, Homo sapiens
  misc_RNA (1)...(19): siRNA sense strand
gcuaccagaucccuaaaga

SEQ ID NO: 1508023 - RNA, 19 nt, Homo sapiens
  misc_RNA (1)...(19): siRNA sense strand
gaacaucaaggagaacaaa

SEQ ID NO: 1508024 - RNA, 19 nt, Homo sapiens
  misc_RNA (1)...(19): siRNA sense strand
gaagaggacuuagaaaaug

SEQ ID NO: 1508025 - RNA, 19 nt, Homo sapiens
  misc_RNA (1)...(19): siRNA sense strand
ccagaucccuaaagaagug

SEQ ID NO: 1508026 - RNA, 19 nt, Homo sapiens
  misc_RNA (1)...(19): siRNA sense strand
cuagagaacuucacugucu

SEQ ID NO: 1508027 - RNA, 19 nt, Homo sapiens
  misc_RNA (1)...(19): siRNA sense strand
agaagaagcaggucuagaa

SEQ ID NO: 1508028 - RNA, 19 nt, Homo sapiens
  misc_RNA (1)...(19): siRNA sense strand
gcugguagaagacaauuaa

SEQ ID NO: 1508029 - RNA, 19 nt, Homo sapiens
  misc_RNA (1)...(19): siRNA sense strand
aaaaggagcugguagaaga

SEQ ID NO: 1508030 - RNA, 19 nt, Homo sapiens
  misc_RNA (1)...(19): siRNA sense strand
gaagaugaagaagaagaua

SEQ ID NO: 1508031 - RNA, 19 nt, Homo sapiens
  misc_RNA (1)...(19): siRNA sense strand
ugucucagccgcuaaauuu

SEQ ID NO: 1508032 - RNA, 19 nt, Homo sapiens
  misc_RNA (1)...(19): siRNA sense strand
cgaagaaggaagacaauug

SEQ ID NO: 1508033 - RNA, 19 nt, Homo sapiens
  misc_RNA (1)...(19): siRNA sense strand
gaagaaggaagacaauugg

SEQ ID NO: 1508034 - RNA, 19 nt, Homo sapiens
  misc_RNA (1)...(19): siRNA sense strand
ccaugaacaucaaggagaa

SEQ ID NO: 1508035 - RNA, 19 nt, Homo sapiens
  misc_RNA (1)...(19): siRNA sense strand
ccauaacuguucgagauaa

SEQ ID NO: 1508036 - RNA, 19 nt, Homo sapiens
  misc_RNA (1)...(19): siRNA sense strand
gaugugcgcuuucauucca

SEQ ID NO: 1508037 - RNA, 19 nt, Homo sapiens
  misc_RNA (1)...(19): siRNA sense strand
ucauucaucuggccaaguu

SEQ ID NO: 1508038 - RNA, 19 nt, Homo sapiens
  misc_RNA (1)...(19): siRNA sense strand
gggaagauucuaccucuga

SEQ ID NO: 1508039 - RNA, 19 nt, Homo sapiens
  misc_RNA (1)...(19): siRNA sense strand
gaaagaaagaaagacugua

SEQ ID NO: 1508040 - RNA, 19 nt, Homo sapiens
  misc_RNA (1)...(19): siRNA sense strand
aggaauaucuggagagcuu

SEQ ID NO: 1508041 - RNA, 19 nt, Homo sapiens
  misc_RNA (1)...(19): siRNA sense strand
cuaaagaaguggcugacau

SEQ ID NO: 1508042 - RNA, 19 nt, Homo sapiens
  misc_RNA (1)...(19): siRNA sense strand
uggaaacccucucgucaga

SEQ ID NO: 1508043 - RNA, 19 nt, Homo sapiens
  misc_RNA (1)...(19): siRNA sense strand
gguaacacgugccaucagu

SEQ ID NO: 1508044 - RNA, 19 nt, Homo sapiens
  misc_RNA (1)...(19): siRNA sense strand
cauaacuguucgagauaaa

SEQ ID NO: 1508045 - RNA, 19 nt, Homo sapiens
  misc_RNA (1)...(19): siRNA sense strand
gaucugaauggaaagacua

SEQ ID NO: 1508046 - RNA, 19 nt, Homo sapiens
  misc_RNA (1)...(19): siRNA sense strand
ccagauuucuucccaguac

SEQ ID NO: 1508047 - RNA, 19 nt, Homo sapiens
  misc_RNA (1)...(19): siRNA sense strand
gaaguggcugacaucuuua

SEQ ID NO: 1508048 - RNA, 19 nt, Homo sapiens
  misc_RNA (1)...(19): siRNA sense strand
gaugagagccaggagaguu

SEQ ID NO: 1508049 - RNA, 19 nt, Homo sapiens
  misc_RNA (1)...(19): siRNA sense strand
gaaagaaagacuguagaca

SEQ ID NO: 1508050 - RNA, 19 nt, Homo sapiens
  misc_RNA (1)...(19): siRNA sense strand
uggaaagacuaacccagaa

SEQ ID NO: 1508051 - RNA, 19 nt, Homo sapiens
  misc_RNA (1)...(19): siRNA sense strand
ucuagaagaaguaguauug

SEQ ID NO: 1508052 - RNA, 19 nt, Homo sapiens
  misc_RNA (1)...(19): siRNA sense strand
cagugaugaugaagaguuu

SEQ ID NO: 1508053 - RNA, 19 nt, Homo sapiens
  misc_RNA (1)...(19): siRNA sense strand
ggagucagauuugagugau

SEQ ID NO: 1508054 - RNA, 19 nt, Homo sapiens
  misc_RNA (1)...(19): siRNA sense strand
gaaagacuaacccagaagu

SEQ ID NO: 1508055 - RNA, 19 nt, Homo sapiens
  misc_RNA (1)...(19): siRNA sense strand
uaguauuggucuucgagua

SEQ ID NO: 1508056 - RNA, 19 nt, Homo sapiens
  misc_RNA (1)...(19): siRNA sense strand
ugccauaacuguucgagau

SEQ ID NO: 1508057 - RNA, 19 nt, Homo sapiens
  misc_RNA (1)...(19): siRNA sense strand
gcgcacgcuuacagaauga

SEQ ID NO: 1508058 - RNA, 19 nt, Homo sapiens
  misc_RNA (1)...(19): siRNA sense strand
ggaagaugaagaagaagau

SEQ ID NO: 1508059 - RNA, 19 nt, Homo sapiens
  misc_RNA (1)...(19): siRNA sense strand
uggaggauaucaccgaaga

SEQ ID NO: 1508060 - RNA, 19 nt, Homo sapiens
  misc_RNA (1)...(19): siRNA sense strand
aaaggaccaugaacaucaa

SEQ ID NO: 1508061 - RNA, 19 nt, Homo sapiens
  misc_RNA (1)...(19): siRNA sense strand
ggagaguucagaugcuuug

SEQ ID NO: 1508062 - RNA, 19 nt, Homo sapiens
  misc_RNA (1)...(19): siRNA sense strand
ucgaguagccuuucaguuc

SEQ ID NO: 1508063 - RNA, 19 nt, Homo sapiens
  misc_RNA (1)...(19): siRNA sense strand
gaagaagcaggucuagaag

SEQ ID NO: 1508064 - RNA, 19 nt, Homo sapiens
  misc_RNA (1)...(19): siRNA sense strand
augauaaaguucuggguaa

SEQ ID NO: 1508065 - RNA, 19 nt, Homo sapiens
  misc_RNA (1)...(19): siRNA sense strand
gcgaggaagaggaagauga

SEQ ID NO: 1508066 - RNA, 19 nt, Homo sapiens
  misc_RNA (1)...(19): siRNA sense strand
cgacgucaccguauaucuu

SEQ ID NO: 1508067 - RNA, 19 nt, Homo sapiens
  misc_RNA (1)...(19): siRNA sense strand
ggaaaugccgggaguacag

SEQ ID NO: 1508068 - RNA, 19 nt, Homo sapiens
  misc_RNA (1)...(19): siRNA sense strand
gcgcuuucauuccaaauac

SEQ ID NO: 1508069 - RNA, 19 nt, Homo sapiens
  misc_RNA (1)...(19): siRNA sense strand
cgaggaagaggaagaugaa

SEQ ID NO: 1508070 - RNA, 19 nt, Homo sapiens
  misc_RNA (1)...(19): siRNA sense strand
uagaagaaguaguauuggu

SEQ ID NO: 1508071 - RNA, 19 nt, Homo sapiens
  misc_RNA (1)...(19): siRNA sense strand
ggucguggagucagauuug

SEQ ID NO: 1508072 - RNA, 19 nt, Homo sapiens
  misc_RNA (1)...(19): siRNA sense strand
aaagaaagaaagacuguag

SEQ ID NO: 1508073 - RNA, 19 nt, Homo sapiens
  misc_RNA (1)...(19): siRNA sense strand
acagaagagcuaagaagaa

SEQ ID NO: 1508074 - RNA, 19 nt, Homo sapiens
  misc_RNA (1)...(19): siRNA sense strand
gccauaacuguucgagaua

SEQ ID NO: 1508075 - RNA, 19 nt, Homo sapiens
  misc_RNA (1)...(19): siRNA sense strand
gaugaugaagaguuuguug

SEQ ID NO: 1508076 - RNA, 19 nt, Homo sapiens
  misc_RNA (1)...(19): siRNA sense strand
uaaagaaguggcugacauc

SEQ ID NO: 1508077 - RNA, 19 nt, Homo sapiens
  misc_RNA (1)...(19): siRNA sense strand
ugccaucagugucgacaaa

SEQ ID NO: 1508078 - RNA, 19 nt, Homo sapiens
  misc_RNA (1)...(19): siRNA sense strand
gaaaugccgggaguacaga

SEQ ID NO: 1508079 - RNA, 19 nt, Homo sapiens
  misc_RNA (1)...(19): siRNA sense strand
caaccucagcuucuaggaa

SEQ ID NO: 1508080 - RNA, 19 nt, Homo sapiens
  misc_RNA (1)...(19): siRNA sense strand
ugaaagaaagaaagacugu

SEQ ID NO: 1508081 - RNA, 19 nt, Homo sapiens
  misc_RNA (1)...(19): siRNA sense strand
aagcaggucuagaagaagu

SEQ ID NO: 1508082 - RNA, 19 nt, Homo sapiens
  misc_RNA (1)...(19): siRNA sense strand
caccgaagaggacuuagaa

SEQ ID NO: 1508083 - RNA, 19 nt, Homo sapiens
  misc_RNA (1)...(19): siRNA sense strand
agccaugcuugcccaguua

SEQ ID NO: 1508084 - RNA, 19 nt, Homo sapiens
  misc_RNA (1)...(19): siRNA sense strand
caggagaguucagaugcuu

SEQ ID NO: 1508085 - RNA, 19 nt, Homo sapiens
  misc_RNA (1)...(19): siRNA sense strand
caagaagcuggccaacaaa

SEQ ID NO: 1508086 - RNA, 19 nt, Homo sapiens
  misc_RNA (1)...(19): siRNA sense strand
agucagauuugagugauga

SEQ ID NO: 1508087 - RNA, 19 nt, Homo sapiens
  misc_RNA (1)...(19): siRNA sense strand
guuaugacaauguuaagga

SEQ ID NO: 1508088 - RNA, 19 nt, Homo sapiens
  misc_RNA (1)...(19): siRNA sense strand
cugagaaguuugcucuaga

SEQ ID NO: 1508089 - RNA, 19 nt, Homo sapiens
  misc_RNA (1)...(19): siRNA sense strand
gaagcuggccaacaaacca

SEQ ID NO: 1508090 - RNA, 19 nt, Homo sapiens
  misc_RNA (1)...(19): siRNA sense strand
aaagacuaacccagaagua

SEQ ID NO: 1508091 - RNA, 19 nt, Homo sapiens
  misc_RNA (1)...(19): siRNA sense strand
ccagugaugaugaagaguu

SEQ ID NO: 1508092 - RNA, 19 nt, Homo sapiens
  misc_RNA (1)...(19): siRNA sense strand
caggaugugcgcuuucauu

SEQ ID NO: 1508093 - RNA, 19 nt, Homo sapiens
  misc_RNA (1)...(19): siRNA sense strand
ugagaaguuugcucuagag

SEQ ID NO: 1508094 - RNA, 19 nt, Homo sapiens
  misc_RNA (1)...(19): siRNA sense strand
gacuaacccagaaguaaug

SEQ ID NO: 1508095 - RNA, 19 nt, Homo sapiens
  misc_RNA (1)...(19): siRNA sense strand
ggaaagacuaacccagaag

SEQ ID NO: 1508096 - RNA, 19 nt, Homo sapiens
  misc_RNA (1)...(19): siRNA sense strand
uaccagaucccuaaagaag

SEQ ID NO: 1508097 - RNA, 19 nt, Homo sapiens
  misc_RNA (1)...(19): siRNA sense strand
cacagaagagcuaagaaga

SEQ ID NO: 1508098 - RNA, 19 nt, Homo sapiens
  misc_RNA (1)...(19): siRNA sense strand
gaacucgaugccagauuuc

SEQ ID NO: 1508099 - RNA, 19 nt, Homo sapiens
  misc_RNA (1)...(19): siRNA sense strand
uuuguuggcuuccgagaug

SEQ ID NO: 1508100 - RNA, 19 nt, Homo sapiens
  misc_RNA (1)...(19): siRNA sense strand
ggccaacaaaccagauaaa

SEQ ID NO: 1508101 - RNA, 19 nt, Homo sapiens
  misc_RNA (1)...(19): siRNA sense strand
gagugaugauggcaaagca

SEQ ID NO: 1508102 - RNA, 19 nt, Homo sapiens
  misc_RNA (1)...(19): siRNA sense strand
ucacagaagagcuaagaag

SEQ ID NO: 1508103 - RNA, 19 nt, Homo sapiens
  misc_RNA (1)...(19): siRNA sense strand
aagacuaacccagaaguaa

SEQ ID NO: 1508104 - RNA, 19 nt, Homo sapiens
  misc_RNA (1)...(19): siRNA sense strand
gauaaaguucuggguaaca

SEQ ID NO: 1508105 - RNA, 19 nt, Homo sapiens
  misc_RNA (1)...(19): siRNA sense strand
uaucaccgaagaggacuua

SEQ ID NO: 1508106 - RNA, 19 nt, Homo sapiens
  misc_RNA (1)...(19): siRNA sense strand
ccugagaaguuugcucuag

SEQ ID NO: 1508107 - RNA, 19 nt, Homo sapiens
  misc_RNA (1)...(19): siRNA sense strand
ggaccaugaacaucaagga

SEQ ID NO: 1508108 - RNA, 19 nt, Homo sapiens
  misc_RNA (1)...(19): siRNA sense strand
ggaauaucuggagagcuua

SEQ ID NO: 1508109 - RNA, 19 nt, Homo sapiens
  misc_RNA (1)...(19): siRNA sense strand
ggaauucacugcgggauuu

SEQ ID NO: 1508110 - RNA, 19 nt, Homo sapiens
  misc_RNA (1)...(19): siRNA sense strand
ccagaaauauccagugaaa

SEQ ID NO: 1508111 - RNA, 19 nt, Homo sapiens
  misc_RNA (1)...(19): siRNA sense strand
cagaugaggcuaauacuua

SEQ ID NO: 1508112 - RNA, 19 nt, Homo sapiens
  misc_RNA (1)...(19): siRNA sense strand
caagaacccuggcuacuac

SEQ ID NO: 1508113 - RNA, 19 nt, Homo sapiens
  misc_RNA (1)...(19): siRNA sense strand
ggaaaucaaagacgaaugu

SEQ ID NO: 1508114 - RNA, 19 nt, Homo sapiens
  misc_RNA (1)...(19): siRNA sense strand
cagcugugcuucuauucua

SEQ ID NO: 1508115 - RNA, 19 nt, Homo sapiens
  misc_RNA (1)...(19): siRNA sense strand
ggaaaguguuggacugaca

SEQ ID NO: 1508116 - RNA, 19 nt, Homo sapiens
  misc_RNA (1)...(19): siRNA sense strand
gaauggaccuguucuucgu

SEQ ID NO: 1508117 - RNA, 19 nt, Homo sapiens
  misc_RNA (1)...(19): siRNA sense strand
cccagaagcugcaaggaaa

SEQ ID NO: 1508118 - RNA, 19 nt, Homo sapiens
  misc_RNA (1)...(19): siRNA sense strand
ggauauggaacucauguug

SEQ ID NO: 1508119 - RNA, 19 nt, Homo sapiens
  misc_RNA (1)...(19): siRNA sense strand
gaggauggaguacagauga

SEQ ID NO: 1508120 - RNA, 19 nt, Homo sapiens
  misc_RNA (1)...(19): siRNA sense strand
gaacucauguugguuacag

SEQ ID NO: 1508121 - RNA, 19 nt, Homo sapiens
  misc_RNA (1)...(19): siRNA sense strand
uaccagaaauauccaguga

SEQ ID NO: 1508122 - RNA, 19 nt, Homo sapiens
  misc_RNA (1)...(19): siRNA sense strand
ggugaucccuguggucuau

SEQ ID NO: 1508123 - RNA, 19 nt, Homo sapiens
  misc_RNA (1)...(19): siRNA sense strand
guacagaugaggcuaauac

SEQ ID NO: 1508124 - RNA, 19 nt, Homo sapiens
  misc_RNA (1)...(19): siRNA sense strand
gcaacugggccaacuacaa

SEQ ID NO: 1508125 - RNA, 19 nt, Homo sapiens
  misc_RNA (1)...(19): siRNA sense strand
gugcuucuauucuaucguu

SEQ ID NO: 1508126 - RNA, 19 nt, Homo sapiens
  misc_RNA (1)...(19): siRNA sense strand
gcacugagaaugguguuau

SEQ ID NO: 1508127 - RNA, 19 nt, Homo sapiens
  misc_RNA (1)...(19): siRNA sense strand
ugaggcagcugugcuucua

SEQ ID NO: 1508128 - RNA, 19 nt, Homo sapiens
  misc_RNA (1)...(19): siRNA sense strand
gaaaacagcaucuuauuac

SEQ ID NO: 1508129 - RNA, 19 nt, Homo sapiens
  misc_RNA (1)...(19): siRNA sense strand
cagcagcagccgugagaua

SEQ ID NO: 1508130 - RNA, 19 nt, Homo sapiens
  misc_RNA (1)...(19): siRNA sense strand
aaagacgaauguccuagug

SEQ ID NO: 1508131 - RNA, 19 nt, Homo sapiens
  misc_RNA (1)...(19): siRNA sense strand
gaaauauggagaaggaaag

SEQ ID NO: 1508132 - RNA, 19 nt, Homo sapiens
  misc_RNA (1)...(19): siRNA sense strand
ggaguacagaugaggcuaa

SEQ ID NO: 1508133 - RNA, 19 nt, Homo sapiens
  misc_RNA (1)...(19): siRNA sense strand
auacuuacuucaaggaaug

SEQ ID NO: 1508134 - RNA, 19 nt, Homo sapiens
  misc_RNA (1)...(19): siRNA sense strand
aacagcaucuuauuacuca

SEQ ID NO: 1508135 - RNA, 19 nt, Homo sapiens
  misc_RNA (1)...(19): siRNA sense strand
agugaaauauggagaagga

SEQ ID NO: 1508136 - RNA, 19 nt, Homo sapiens
  misc_RNA (1)...(19): siRNA sense strand
ugagaaugguguuaucuac

SEQ ID NO: 1508137 - RNA, 19 nt, Homo sapiens
  misc_RNA (1)...(19): siRNA sense strand
acaagaacccuggcuacua

SEQ ID NO: 1508138 - RNA, 19 nt, Homo sapiens
  misc_RNA (1)...(19): siRNA sense strand
ccaaggaccugggcaucug

SEQ ID NO: 1508139 - RNA, 19 nt, Homo sapiens
  misc_RNA (1)...(19): siRNA sense strand
gaaaguguuggacugacaa

SEQ ID NO: 1508140 - RNA, 19 nt, Homo sapiens
  misc_RNA (1)...(19): siRNA sense strand
ugaaauauggagaaggaaa

SEQ ID NO: 1508141 - RNA, 19 nt, Homo sapiens
  misc_RNA (1)...(19): siRNA sense strand
gaguacagaugaggcuaau

SEQ ID NO: 1508142 - RNA, 19 nt, Homo sapiens
  misc_RNA (1)...(19): siRNA sense strand
gcccagaagcugcaaggaa

SEQ ID NO: 1508143 - RNA, 19 nt, Homo sapiens
  misc_RNA (1)...(19): siRNA sense strand
cauuugauggccuguauuu

SEQ ID NO: 1508144 - RNA, 19 nt, Homo sapiens
  misc_RNA (1)...(19): siRNA sense strand
guucaguucaggguauuua

SEQ ID NO: 1508145 - RNA, 19 nt, Homo sapiens
  misc_RNA (1)...(19): siRNA sense strand
ggagaaggaaaguguugga

SEQ ID NO: 1508146 - RNA, 19 nt, Homo sapiens
  misc_RNA (1)...(19): siRNA sense strand
acugggacauaaucuguuu

SEQ ID NO: 1508147 - RNA, 19 nt, Homo sapiens
  misc_RNA (1)...(19): siRNA sense strand
cuacaacaccuuuggaucu

SEQ ID NO: 1508148 - RNA, 19 nt, Homo sapiens
  misc_RNA (1)...(19): siRNA sense strand
caaggaaaucaaagacgaa

SEQ ID NO: 1508149 - RNA, 19 nt, Homo sapiens
  misc_RNA (1)...(19): siRNA sense strand
caacugggccaacuacaac

SEQ ID NO: 1508150 - RNA, 19 nt, Homo sapiens
  misc_RNA (1)...(19): siRNA sense strand
cauaaucuguuuggcaucu

SEQ ID NO: 1508151 - RNA, 19 nt, Homo sapiens
  misc_RNA (1)...(19): siRNA sense strand
ucccuguggucuaugauuu

SEQ ID NO: 1508152 - RNA, 19 nt, Homo sapiens
  misc_RNA (1)...(19): siRNA sense strand
caacuacaacaccuuugga

SEQ ID NO: 1508153 - RNA, 19 nt, Homo sapiens
  misc_RNA (1)...(19): siRNA sense strand
aggcagcugugcuucuauu

SEQ ID NO: 1508154 - RNA, 19 nt, Homo sapiens
  misc_RNA (1)...(19): siRNA sense strand
cacgagcgaugacuacaag

SEQ ID NO: 1508155 - RNA, 19 nt, Homo sapiens
  misc_RNA (1)...(19): siRNA sense strand
caaagacgaauguccuagu

SEQ ID NO: 1508156 - RNA, 19 nt, Homo sapiens
  misc_RNA (1)...(19): siRNA sense strand
augcagcacuggagaaaca

SEQ ID NO: 1508157 - RNA, 19 nt, Homo sapiens
  misc_RNA (1)...(19): siRNA sense strand
gauuggaguggauauggaa

SEQ ID NO: 1508158 - RNA, 19 nt, Homo sapiens
  misc_RNA (1)...(19): siRNA sense strand
gaagcugcaaggaaaucaa

SEQ ID NO: 1508159 - RNA, 19 nt, Homo sapiens
  misc_RNA (1)...(19): siRNA sense strand
ggccaacuacaacaccuuu

SEQ ID NO: 1508160 - RNA, 19 nt, Homo sapiens
  misc_RNA (1)...(19): siRNA sense strand
ggcuaauacuuacuucaag

SEQ ID NO: 1508161 - RNA, 19 nt, Homo sapiens
  misc_RNA (1)...(19): siRNA sense strand
ugauuggaguggauaugga

SEQ ID NO: 1508162 - RNA, 19 nt, Homo sapiens
  misc_RNA (1)...(19): siRNA sense strand
cgagcgaugacuacaagaa

SEQ ID NO: 1508163 - RNA, 19 nt, Homo sapiens
  misc_RNA (1)...(19): siRNA sense strand
gggaauucacugcgggauu

SEQ ID NO: 1508164 - RNA, 19 nt, Homo sapiens
  misc_RNA (1)...(19): siRNA sense strand
ccagugaaauauggagaag

SEQ ID NO: 1508165 - RNA, 19 nt, Homo sapiens
  misc_RNA (1)...(19): siRNA sense strand
ccagcgugcacgagaauga

SEQ ID NO: 1508166 - RNA, 19 nt, Homo sapiens
  misc_RNA (1)...(19): siRNA sense strand
gcugcaaggaaaucaaaga

SEQ ID NO: 1508167 - RNA, 19 nt, Homo sapiens
  misc_RNA (1)...(19): siRNA sense strand
aaacagcaucuuauuacuc

SEQ ID NO: 1508168 - RNA, 19 nt, Homo sapiens
  misc_RNA (1)...(19): siRNA sense strand
ccacgagcgaugacuacaa

SEQ ID NO: 1508169 - RNA, 19 nt, Homo sapiens
  misc_RNA (1)...(19): siRNA sense strand
acacugagcaccacugcau

SEQ ID NO: 1508170 - RNA, 19 nt, Homo sapiens
  misc_RNA (1)...(19): siRNA sense strand
gagcagccaacgccuugug

SEQ ID NO: 1508171 - RNA, 19 nt, Homo sapiens
  misc_RNA (1)...(19): siRNA sense strand
ugaucccuguggucuauga

SEQ ID NO: 1508172 - RNA, 19 nt, Homo sapiens
  misc_RNA (1)...(19): siRNA sense strand
ugcauuugauggccuguau

SEQ ID NO: 1508173 - RNA, 19 nt, Homo sapiens
  misc_RNA (1)...(19): siRNA sense strand
cagcagccgugagauaacu

SEQ ID NO: 1508174 - RNA, 19 nt, Homo sapiens
  misc_RNA (1)...(19): siRNA sense strand
auauggaacucauguuggu

SEQ ID NO: 1508175 - RNA, 19 nt, Homo sapiens
  misc_RNA (1)...(19): siRNA sense strand
agaugaggcuaauacuuac

SEQ ID NO: 1508176 - RNA, 19 nt, Homo sapiens
  misc_RNA (1)...(19): siRNA sense strand
uacaacaccuuuggaucug

SEQ ID NO: 1508177 - RNA, 19 nt, Homo sapiens
  misc_RNA (1)...(19): siRNA sense strand
ucaaggaauggaccuguuc

SEQ ID NO: 1508178 - RNA, 19 nt, Homo sapiens
  misc_RNA (1)...(19): siRNA sense strand
acacugggacauaaucugu

SEQ ID NO: 1508179 - RNA, 19 nt, Homo sapiens
  misc_RNA (1)...(19): siRNA sense strand
gagcgaugacuacaagaac

SEQ ID NO: 1508180 - RNA, 19 nt, Homo sapiens
  misc_RNA (1)...(19): siRNA sense strand
cgccuugugugcuggaaug

SEQ ID NO: 1508181 - RNA, 19 nt, Homo sapiens
  misc_RNA (1)...(19): siRNA sense strand
uggcaucuaccagaaauau

SEQ ID NO: 1508182 - RNA, 19 nt, Homo sapiens
  misc_RNA (1)...(19): siRNA sense strand
gcagcugugcuucuauucu

SEQ ID NO: 1508183 - RNA, 19 nt, Homo sapiens
  misc_RNA (1)...(19): siRNA sense strand
auggaacucauguugguua

SEQ ID NO: 1508184 - RNA, 19 nt, Homo sapiens
  misc_RNA (1)...(19): siRNA sense strand
cagaaaacagcaucuuauu

SEQ ID NO: 1508185 - RNA, 19 nt, Homo sapiens
  misc_RNA (1)...(19): siRNA sense strand
ccagaaaacagcaucuuau

SEQ ID NO: 1508186 - RNA, 19 nt, Homo sapiens
  misc_RNA (1)...(19): siRNA sense strand
acagaugaggcuaauacuu

SEQ ID NO: 1508187 - RNA, 19 nt, Homo sapiens
  misc_RNA (1)...(19): siRNA sense strand
ccaugcagcacuggagaaa

SEQ ID NO: 1508188 - RNA, 19 nt, Homo sapiens
  misc_RNA (1)...(19): siRNA sense strand
gcagccgugagauaacuga

SEQ ID NO: 1508189 - RNA, 19 nt, Homo sapiens
  misc_RNA (1)...(19): siRNA sense strand
ccagcaguguggagauuuu

SEQ ID NO: 1508190 - RNA, 19 nt, Homo sapiens
  misc_RNA (1)...(19): siRNA sense strand
gaaaucaaagacgaauguc

SEQ ID NO: 1508191 - RNA, 19 nt, Homo sapiens
  misc_RNA (1)...(19): siRNA sense strand
gcaucuaccagaaauaucc

SEQ ID NO: 1508192 - RNA, 19 nt, Homo sapiens
  misc_RNA (1)...(19): siRNA sense strand
gcacagacauggcgguguu

SEQ ID NO: 1508193 - RNA, 19 nt, Homo sapiens
  misc_RNA (1)...(19): siRNA sense strand
gaaggaauguccggugaaa

SEQ ID NO: 1508194 - RNA, 19 nt, Homo sapiens
  misc_RNA (1)...(19): siRNA sense strand
gaacugaaagagagugaaa

SEQ ID NO: 1508195 - RNA, 19 nt, Homo sapiens
  misc_RNA (1)...(19): siRNA sense strand
ggaaaagguugaacugaaa

SEQ ID NO: 1508196 - RNA, 19 nt, Homo sapiens
  misc_RNA (1)...(19): siRNA sense strand
ccaacgaggucuuuuauaa

SEQ ID NO: 1508197 - RNA, 19 nt, Homo sapiens
  misc_RNA (1)...(19): siRNA sense strand
ccaaaggaauccagaucaa

SEQ ID NO: 1508198 - RNA, 19 nt, Homo sapiens
  misc_RNA (1)...(19): siRNA sense strand
ggaauguccagcucaauga

SEQ ID NO: 1508199 - RNA, 19 nt, Homo sapiens
  misc_RNA (1)...(19): siRNA sense strand
ucagaucugugguugcaaa

SEQ ID NO: 1508200 - RNA, 19 nt, Homo sapiens
  misc_RNA (1)...(19): siRNA sense strand
gaaacgggagcgacuauca

SEQ ID NO: 1508201 - RNA, 19 nt, Homo sapiens
  misc_RNA (1)...(19): siRNA sense strand
gaccugacaugugcuguga

SEQ ID NO: 1508202 - RNA, 19 nt, Homo sapiens
  misc_RNA (1)...(19): siRNA sense strand
ggacgugccucuguacuac

SEQ ID NO: 1508203 - RNA, 19 nt, Homo sapiens
  misc_RNA (1)...(19): siRNA sense strand
ggagagguuugacgucauc

SEQ ID NO: 1508204 - RNA, 19 nt, Homo sapiens
  misc_RNA (1)...(19): siRNA sense strand
gaucugugguugcaaacga

SEQ ID NO: 1508205 - RNA, 19 nt, Homo sapiens
  misc_RNA (1)...(19): siRNA sense strand
gagcgacuaucagagacua

SEQ ID NO: 1508206 - RNA, 19 nt, Homo sapiens
  misc_RNA (1)...(19): siRNA sense strand
gcucagaucugugguugca

SEQ ID NO: 1508207 - RNA, 19 nt, Homo sapiens
  misc_RNA (1)...(19): siRNA sense strand
caccaagccuccugcaguu

SEQ ID NO: 1508208 - RNA, 19 nt, Homo sapiens
  misc_RNA (1)...(19): siRNA sense strand
gcaagcaggcgcugguguu

SEQ ID NO: 1508209 - RNA, 19 nt, Homo sapiens
  misc_RNA (1)...(19): siRNA sense strand
ggagagaaggacacgcaaa

SEQ ID NO: 1508210 - RNA, 19 nt, Homo sapiens
  misc_RNA (1)...(19): siRNA sense strand
gaucucauacgccggaaug

SEQ ID NO: 1508211 - RNA, 19 nt, Homo sapiens
  misc_RNA (1)...(19): siRNA sense strand
gaucgucucuguggcuaag

SEQ ID NO: 1508212 - RNA, 19 nt, Homo sapiens
  misc_RNA (1)...(19): siRNA sense strand
gugcugugaucaccgaguu

SEQ ID NO: 1508213 - RNA, 19 nt, Homo sapiens
  misc_RNA (1)...(19): siRNA sense strand
gagauggcccugagaaucg

SEQ ID NO: 1508214 - RNA, 19 nt, Homo sapiens
  misc_RNA (1)...(19): siRNA sense strand
ucaagcgcuuccaggcuaa

SEQ ID NO: 1508215 - RNA, 19 nt, Homo sapiens
  misc_RNA (1)...(19): siRNA sense strand
ggaggguugcuguguguga

SEQ ID NO: 1508216 - RNA, 19 nt, Homo sapiens
  misc_RNA (1)...(19): siRNA sense strand
guaagaacgcugugaagac

SEQ ID NO: 1508217 - RNA, 19 nt, Homo sapiens
  misc_RNA (1)...(19): siRNA sense strand
gguuugacgucaucgaucu

SEQ ID NO: 1508218 - RNA, 19 nt, Homo sapiens
  misc_RNA (1)...(19): siRNA sense strand
cuccagggcugccgaauac

SEQ ID NO: 1508219 - RNA, 19 nt, Homo sapiens
  misc_RNA (1)...(19): siRNA sense strand
gccaaaggaauccagauca

SEQ ID NO: 1508220 - RNA, 19 nt, Homo sapiens
  misc_RNA (1)...(19): siRNA sense strand
ggccuacguuccauucgau

SEQ ID NO: 1508221 - RNA, 19 nt, Homo sapiens
  misc_RNA (1)...(19): siRNA sense strand
cgagauggcccugagaauc

SEQ ID NO: 1508222 - RNA, 19 nt, Homo sapiens
  misc_RNA (1)...(19): siRNA sense strand
gagagaaggacacgcaaaa

SEQ ID NO: 1508223 - RNA, 19 nt, Homo sapiens
  misc_RNA (1)...(19): siRNA sense strand
ccugacaugugcugugauc

SEQ ID NO: 1508224 - RNA, 19 nt, Homo sapiens
  misc_RNA (1)...(19): siRNA sense strand
auaacccggugcaggaauu

SEQ ID NO: 1508225 - RNA, 19 nt, Homo sapiens
  misc_RNA (1)...(19): siRNA sense strand
aaggaggguugcugugugu

SEQ ID NO: 1508226 - RNA, 19 nt, Homo sapiens
  misc_RNA (1)...(19): siRNA sense strand
gccggaauguccagcucaa

SEQ ID NO: 1508227 - RNA, 19 nt, Homo sapiens
  misc_RNA (1)...(19): siRNA sense strand
uuaaggagggcaccuguca

SEQ ID NO: 1508228 - RNA, 19 nt, Homo sapiens
  misc_RNA (1)...(19): siRNA sense strand
ucccggacgugccucugua

SEQ ID NO: 1508229 - RNA, 19 nt, Homo sapiens
  misc_RNA (1)...(19): siRNA sense strand
caaaggaauccagaucaag

SEQ ID NO: 1508230 - RNA, 19 nt, Homo sapiens
  misc_RNA (1)...(19): siRNA sense strand
cggaauguccagcucaaug

SEQ ID NO: 1508231 - RNA, 19 nt, Homo sapiens
  misc_RNA (1)...(19): siRNA sense strand
cuacguuccauucgauuug

SEQ ID NO: 1508232 - RNA, 19 nt, Homo sapiens
  misc_RNA (1)...(19): siRNA sense strand
agaggugccugggcucaga

SEQ ID NO: 1508233 - RNA, 19 nt, Homo sapiens
  misc_RNA (1)...(19): siRNA sense strand
gagggugucggagagguuu

SEQ ID NO: 1508234 - RNA, 19 nt, Homo sapiens
  misc_RNA (1)...(19): siRNA sense strand
gcaagaggaggaaaagguu

SEQ ID NO: 1508235 - RNA, 19 nt, Homo sapiens
  misc_RNA (1)...(19): siRNA sense strand
cgggagcgacuaucagaga

SEQ ID NO: 1508236 - RNA, 19 nt, Homo sapiens
  misc_RNA (1)...(19): siRNA sense strand
uguaagaacgcugugaaga

SEQ ID NO: 1508237 - RNA, 19 nt, Homo sapiens
  misc_RNA (1)...(19): siRNA sense strand
ggccaaaggaauccagauc

SEQ ID NO: 1508238 - RNA, 19 nt, Homo sapiens
  misc_RNA (1)...(19): siRNA sense strand
gugaaacgggagcgacuau

SEQ ID NO: 1508239 - RNA, 19 nt, Homo sapiens
  misc_RNA (1)...(19): siRNA sense strand
auacagcagcgauggagaa

SEQ ID NO: 1508240 - RNA, 19 nt, Homo sapiens
  misc_RNA (1)...(19): siRNA sense strand
ucuccagggcugccgaaua

SEQ ID NO: 1508241 - RNA, 19 nt, Homo sapiens
  misc_RNA (1)...(19): siRNA sense strand
aggaaaagguugaacugaa

SEQ ID NO: 1508242 - RNA, 19 nt, Homo sapiens
  misc_RNA (1)...(19): siRNA sense strand
gcugugaucaccgaguuug

SEQ ID NO: 1508243 - RNA, 19 nt, Homo sapiens
  misc_RNA (1)...(19): siRNA sense strand
cggacgugccucuguacua

SEQ ID NO: 1508244 - RNA, 19 nt, Homo sapiens
  misc_RNA (1)...(19): siRNA sense strand
ugaaggaggguugcugugu

SEQ ID NO: 1508245 - RNA, 19 nt, Homo sapiens
  misc_RNA (1)...(19): siRNA sense strand
gagguuugacgucaucgau

SEQ ID NO: 1508246 - RNA, 19 nt, Homo sapiens
  misc_RNA (1)...(19): siRNA sense strand
ggugaaacgggagcgacua

SEQ ID NO: 1508247 - RNA, 19 nt, Homo sapiens
  misc_RNA (1)...(19): siRNA sense strand
caaagugacugaccuguga

SEQ ID NO: 1508248 - RNA, 19 nt, Homo sapiens
  misc_RNA (1)...(19): siRNA sense strand
ggaagagacucaacaccuu

SEQ ID NO: 1508249 - RNA, 19 nt, Homo sapiens
  misc_RNA (1)...(19): siRNA sense strand
aaacggacccugaaugaua

SEQ ID NO: 1508250 - RNA, 19 nt, Homo sapiens
  misc_RNA (1)...(19): siRNA sense strand
gcagaugaauacuuccauu

SEQ ID NO: 1508251 - RNA, 19 nt, Homo sapiens
  misc_RNA (1)...(19): siRNA sense strand
caacacccaugcucuuuau

SEQ ID NO: 1508252 - RNA, 19 nt, Homo sapiens
  misc_RNA (1)...(19): siRNA sense strand
ggaugcagaugaauacuuc

SEQ ID NO: 1508253 - RNA, 19 nt, Homo sapiens
  misc_RNA (1)...(19): siRNA sense strand
cagcuuggcucauguggaa

SEQ ID NO: 1508254 - RNA, 19 nt, Homo sapiens
  misc_RNA (1)...(19): siRNA sense strand
gaugaauacuuccauugug

SEQ ID NO: 1508255 - RNA, 19 nt, Homo sapiens
  misc_RNA (1)...(19): siRNA sense strand
acaccaaccuguacuccua

SEQ ID NO: 1508256 - RNA, 19 nt, Homo sapiens
  misc_RNA (1)...(19): siRNA sense strand
gagaugaacucugcuuugg

SEQ ID NO: 1508257 - RNA, 19 nt, Homo sapiens
  misc_RNA (1)...(19): siRNA sense strand
ggagcugccuggagaacuu

SEQ ID NO: 1508258 - RNA, 19 nt, Homo sapiens
  misc_RNA (1)...(19): siRNA sense strand
ccaaacggacccugaauga

SEQ ID NO: 1508259 - RNA, 19 nt, Homo sapiens
  misc_RNA (1)...(19): siRNA sense strand
gaacccacagcucaucuuu

SEQ ID NO: 1508260 - RNA, 19 nt, Homo sapiens
  misc_RNA (1)...(19): siRNA sense strand
ggacaacacccaugcucuu

SEQ ID NO: 1508261 - RNA, 19 nt, Homo sapiens
  misc_RNA (1)...(19): siRNA sense strand
uggaugagcuagcagagaa

SEQ ID NO: 1508262 - RNA, 19 nt, Homo sapiens
  misc_RNA (1)...(19): siRNA sense strand
ggagaugaacucugcuuug

SEQ ID NO: 1508263 - RNA, 19 nt, Homo sapiens
  misc_RNA (1)...(19): siRNA sense strand
gugcggaaccuucaacauu

SEQ ID NO: 1508264 - RNA, 19 nt, Homo sapiens
  misc_RNA (1)...(19): siRNA sense strand
cagguacuaugaucagauu

SEQ ID NO: 1508265 - RNA, 19 nt, Homo sapiens
  misc_RNA (1)...(19): siRNA sense strand
gcccagaccuucauugacu

SEQ ID NO: 1508266 - RNA, 19 nt, Homo sapiens
  misc_RNA (1)...(19): siRNA sense strand
acccacagcucaucuuuga

SEQ ID NO: 1508267 - RNA, 19 nt, Homo sapiens
  misc_RNA (1)...(19): siRNA sense strand
ugcggaaccuucaacauuu

SEQ ID NO: 1508268 - RNA, 19 nt, Homo sapiens
  misc_RNA (1)...(19): siRNA sense strand
ccaaggccauuccggaaau

SEQ ID NO: 1508269 - RNA, 19 nt, Homo sapiens
  misc_RNA (1)...(19): siRNA sense strand
caagaccaggugccacuua

SEQ ID NO: 1508270 - RNA, 19 nt, Homo sapiens
  misc_RNA (1)...(19): siRNA sense strand
uggagaaacugcucaccaa

SEQ ID NO: 1508271 - RNA, 19 nt, Homo sapiens
  misc_RNA (1)...(19): siRNA sense strand
ucacccaggucaaggagaa

SEQ ID NO: 1508272 - RNA, 19 nt, Homo sapiens
  misc_RNA (1)...(19): siRNA sense strand
ccaacuggcuguccaucug

SEQ ID NO: 1508273 - RNA, 19 nt, Homo sapiens
  misc_RNA (1)...(19): siRNA sense strand
gcagaugggcacaugauag

SEQ ID NO: 1508274 - RNA, 19 nt, Homo sapiens
  misc_RNA (1)...(19): siRNA sense strand
gagguacuaugcggacauu

SEQ ID NO: 1508275 - RNA, 19 nt, Homo sapiens
  misc_RNA (1)...(19): siRNA sense strand
uguuugaccuucuggauga

SEQ ID NO: 1508276 - RNA, 19 nt, Homo sapiens
  misc_RNA (1)...(19): siRNA sense strand
cagagaccaugguggagaa

SEQ ID NO: 1508277 - RNA, 19 nt, Homo sapiens
  misc_RNA (1)...(19): siRNA sense strand
guacuaugaucagauuauc

SEQ ID NO: 1508278 - RNA, 19 nt, Homo sapiens
  misc_RNA (1)...(19): siRNA sense strand
acaaccacauccacaggua

SEQ ID NO: 1508279 - RNA, 19 nt, Homo sapiens
  misc_RNA (1)...(19): siRNA sense strand
ccaccaacuucuccuuuua

SEQ ID NO: 1508280 - RNA, 19 nt, Homo sapiens
  misc_RNA (1)...(19): siRNA sense strand
ggaguucacagaccucaug

SEQ ID NO: 1508281 - RNA, 19 nt, Homo sapiens
  misc_RNA (1)...(19): siRNA sense strand
gcggaaccuucaacauuuc

SEQ ID NO: 1508282 - RNA, 19 nt, Homo sapiens
  misc_RNA (1)...(19): siRNA sense strand
accaguggcuguggaguua

SEQ ID NO: 1508283 - RNA, 19 nt, Homo sapiens
  misc_RNA (1)...(19): siRNA sense strand
agaaacugcucaccaacug

SEQ ID NO: 1508284 - RNA, 19 nt, Homo sapiens
  misc_RNA (1)...(19): siRNA sense strand
gacaacacccaugcucuuu

SEQ ID NO: 1508285 - RNA, 19 nt, Homo sapiens
  misc_RNA (1)...(19): siRNA sense strand
aagaccaggugccacuuaa

SEQ ID NO: 1508286 - RNA, 19 nt, Homo sapiens
  misc_RNA (1)...(19): siRNA sense strand
caagccagcacuucaccua

SEQ ID NO: 1508287 - RNA, 19 nt, Homo sapiens
  misc_RNA (1)...(19): siRNA sense strand
gcgagugccuggugaagac

SEQ ID NO: 1508288 - RNA, 19 nt, Homo sapiens
  misc_RNA (1)...(19): siRNA sense strand
ugcaagaacucuacaacca

SEQ ID NO: 1508289 - RNA, 19 nt, Homo sapiens
  misc_RNA (1)...(19): siRNA sense strand
ggagaucccacgcuacaag

SEQ ID NO: 1508290 - RNA, 19 nt, Homo sapiens
  misc_RNA (1)...(19): siRNA sense strand
gaagaacccacagcucauc

SEQ ID NO: 1508291 - RNA, 19 nt, Homo sapiens
  misc_RNA (1)...(19): siRNA sense strand
ggucccagauggagcaaca

SEQ ID NO: 1508292 - RNA, 19 nt, Homo sapiens
  misc_RNA (1)...(19): siRNA sense strand
ucacgcagcucuccaaccu

SEQ ID NO: 1508293 - RNA, 19 nt, Homo sapiens
  misc_RNA (1)...(19): siRNA sense strand
ucaacaccuugcaacacua

SEQ ID NO: 1508294 - RNA, 19 nt, Homo sapiens
  misc_RNA (1)...(19): siRNA sense strand
acaacacccaugcucuuua

SEQ ID NO: 1508295 - RNA, 19 nt, Homo sapiens
  misc_RNA (1)...(19): siRNA sense strand
gguacuaugaucagauuau

SEQ ID NO: 1508296 - RNA, 19 nt, Homo sapiens
  misc_RNA (1)...(19): siRNA sense strand
cccauuacgugcacaggaa

SEQ ID NO: 1508297 - RNA, 19 nt, Homo sapiens
  misc_RNA (1)...(19): siRNA sense strand
ccaggcagaugggcacaug

SEQ ID NO: 1508298 - RNA, 19 nt, Homo sapiens
  misc_RNA (1)...(19): siRNA sense strand
gcacgcugcagaaguuugu

SEQ ID NO: 1508299 - RNA, 19 nt, Homo sapiens
  misc_RNA (1)...(19): siRNA sense strand
ucaaggagaagguguugga

SEQ ID NO: 1508300 - RNA, 19 nt, Homo sapiens
  misc_RNA (1)...(19): siRNA sense strand
ggaggagcagcccagcuuu

SEQ ID NO: 1508301 - RNA, 19 nt, Homo sapiens
  misc_RNA (1)...(19): siRNA sense strand
gagaagcagcgguccuugu

SEQ ID NO: 1508302 - RNA, 19 nt, Homo sapiens
  misc_RNA (1)...(19): siRNA sense strand
gcucccagggccagguuua

SEQ ID NO: 1508303 - RNA, 19 nt, Homo sapiens
  misc_RNA (1)...(19): siRNA sense strand
ucuggaggcucugcaagaa

SEQ ID NO: 1508304 - RNA, 19 nt, Homo sapiens
  misc_RNA (1)...(19): siRNA sense strand
gcaccuaauaccacucuca

SEQ ID NO: 1508305 - RNA, 19 nt, Homo sapiens
  misc_RNA (1)...(19): siRNA sense strand
guaccaccucggagcauaa

SEQ ID NO: 1508306 - RNA, 19 nt, Homo sapiens
  misc_RNA (1)...(19): siRNA sense strand
gggugaaugccuugaagaa

SEQ ID NO: 1508307 - RNA, 19 nt, Homo sapiens
  misc_RNA (1)...(19): siRNA sense strand
cagaugaauacuuccauug

SEQ ID NO: 1508308 - RNA, 19 nt, Homo sapiens
  misc_RNA (1)...(19): siRNA sense strand
uggaguaccugacggacau

SEQ ID NO: 1508309 - RNA, 19 nt, Homo sapiens
  misc_RNA (1)...(19): siRNA sense strand
cagccugccugucgcuaug

SEQ ID NO: 1508310 - RNA, 19 nt, Homo sapiens
  misc_RNA (1)...(19): siRNA sense strand
gagaaacugcucaccaacu

SEQ ID NO: 1508311 - RNA, 19 nt, Homo sapiens
  misc_RNA (1)...(19): siRNA sense strand
ggcugucacuggcccugua

SEQ ID NO: 1508312 - RNA, 19 nt, Homo sapiens
  misc_RNA (1)...(19): siRNA sense strand
guaccugacggacaucaug

SEQ ID NO: 1508313 - RNA, 19 nt, Homo sapiens
  misc_RNA (1)...(19): siRNA sense strand
gagcagggccaggucacuu

SEQ ID NO: 1508314 - RNA, 19 nt, Homo sapiens
  misc_RNA (1)...(19): siRNA sense strand
gccaaggccauuccggaaa

SEQ ID NO: 1508315 - RNA, 19 nt, Homo sapiens
  misc_RNA (1)...(19): siRNA sense strand
auaccacucucaaccacuu

SEQ ID NO: 1508316 - RNA, 19 nt, Homo sapiens
  misc_RNA (1)...(19): siRNA sense strand
caguggcagucaccucuau

SEQ ID NO: 1508317 - RNA, 19 nt, Homo sapiens
  misc_RNA (1)...(19): siRNA sense strand
cgagcuaccaggagaugaa

SEQ ID NO: 1508318 - RNA, 19 nt, Homo sapiens
  misc_RNA (1)...(19): siRNA sense strand
cgacuucuccgacuacaac

SEQ ID NO: 1508319 - RNA, 19 nt, Homo sapiens
  misc_RNA (1)...(19): siRNA sense strand
ggcagaugggcacaugaua

SEQ ID NO: 1508320 - RNA, 19 nt, Homo sapiens
  misc_RNA (1)...(19): siRNA sense strand
guaccuguuugaccuucug

SEQ ID NO: 1508321 - RNA, 19 nt, Homo sapiens
  misc_RNA (1)...(19): siRNA sense strand
agggcacgcugcagaaguu

SEQ ID NO: 1508322 - RNA, 19 nt, Homo sapiens
  misc_RNA (1)...(19): siRNA sense strand
cacccaugcucuuuaugug

SEQ ID NO: 1508323 - RNA, 19 nt, Homo sapiens
  misc_RNA (1)...(19): siRNA sense strand
gcagggccaggucacuuug

SEQ ID NO: 1508324 - RNA, 19 nt, Homo sapiens
  misc_RNA (1)...(19): siRNA sense strand
gcaguggcagucaccucua

SEQ ID NO: 1508325 - RNA, 19 nt, Homo sapiens
  misc_RNA (1)...(19): siRNA sense strand
gccaaacggacccugaaug

SEQ ID NO: 1508326 - RNA, 19 nt, Homo sapiens
  misc_RNA (1)...(19): siRNA sense strand
uguaccaccucggagcaua

SEQ ID NO: 1508327 - RNA, 19 nt, Homo sapiens
  misc_RNA (1)...(19): siRNA sense strand
caauguggacgccauccuu

SEQ ID NO: 1508328 - RNA, 19 nt, Homo sapiens
  misc_RNA (1)...(19): siRNA sense strand
ggacccugcacaucuggaa

SEQ ID NO: 1508329 - RNA, 19 nt, Homo sapiens
  misc_RNA (1)...(19): siRNA sense strand
ucacuggcccuguaaucga

SEQ ID NO: 1508330 - RNA, 19 nt, Homo sapiens
  misc_RNA (1)...(19): siRNA sense strand
ugaagggcacgcugcagaa

SEQ ID NO: 1508331 - RNA, 19 nt, Homo sapiens
  misc_RNA (1)...(19): siRNA sense strand
cuacaaggucccagaugga

SEQ ID NO: 1508332 - RNA, 19 nt, Homo sapiens
  misc_RNA (1)...(19): siRNA sense strand
gugaaccacuguacaugcu

SEQ ID NO: 1508333 - RNA, 19 nt, Homo sapiens
  misc_RNA (1)...(19): siRNA sense strand
cagcgguccuuguggucuu

SEQ ID NO: 1508334 - RNA, 19 nt, Homo sapiens
  misc_RNA (1)...(19): siRNA sense strand
cccaugcucuuuaugugau

SEQ ID NO: 1508335 - RNA, 19 nt, Homo sapiens
  misc_RNA (1)...(19): siRNA sense strand
caguggcuguggaguuaug

SEQ ID NO: 1508336 - RNA, 19 nt, Homo sapiens
  misc_RNA (1)...(19): siRNA sense strand
ccacauccacagguacuau

SEQ ID NO: 1508337 - RNA, 19 nt, Homo sapiens
  misc_RNA (1)...(19): siRNA sense strand
agaagcagcgguccuugug

SEQ ID NO: 1508338 - RNA, 19 nt, Homo sapiens
  misc_RNA (1)...(19): siRNA sense strand
aggcccagcucacugacaa

SEQ ID NO: 1508339 - RNA, 19 nt, Homo sapiens
  misc_RNA (1)...(19): siRNA sense strand
ggucaaggagaagguguug

SEQ ID NO: 1508340 - RNA, 19 nt, Homo sapiens
  misc_RNA (1)...(19): siRNA sense strand
aacggacccugaaugauag

SEQ ID NO: 1508341 - RNA, 19 nt, Homo sapiens
  misc_RNA (1)...(19): siRNA sense strand
cugccaggcccaccaguuu

SEQ ID NO: 1508342 - RNA, 19 nt, Homo sapiens
  misc_RNA (1)...(19): siRNA sense strand
gcugagcucuccgggaacu

SEQ ID NO: 1508343 - RNA, 19 nt, Homo sapiens
  misc_RNA (1)...(19): siRNA sense strand
gccgucaaguaccuguuug

SEQ ID NO: 1508344 - RNA, 19 nt, Homo sapiens
  misc_RNA (1)...(19): siRNA sense strand
gaagggcacgcugcagaag

SEQ ID NO: 1508345 - RNA, 19 nt, Homo sapiens
  misc_RNA (1)...(19): siRNA sense strand
ccuaucggacgaagacuug

SEQ ID NO: 1508346 - RNA, 19 nt, Homo sapiens
  misc_RNA (1)...(19): siRNA sense strand
ucuccaaccugcucaacag

SEQ ID NO: 1508347 - RNA, 19 nt, Homo sapiens
  misc_RNA (1)...(19): siRNA sense strand
caacaaagauucugauaac

SEQ ID NO: 1508348 - RNA, 19 nt, Homo sapiens
  misc_RNA (1)...(19): siRNA sense strand
gaucugauaucauuaggaa

SEQ ID NO: 1508349 - RNA, 19 nt, Homo sapiens
  misc_RNA (1)...(19): siRNA sense strand
aagcagaucugauaucauu

SEQ ID NO: 1508350 - RNA, 19 nt, Homo sapiens
  misc_RNA (1)...(19): siRNA sense strand
cuacagagguugacagcua

SEQ ID NO: 1508351 - RNA, 19 nt, Homo sapiens
  misc_RNA (1)...(19): siRNA sense strand
ggaggugcuuuaacugaua

SEQ ID NO: 1508352 - RNA, 19 nt, Homo sapiens
  misc_RNA (1)...(19): siRNA sense strand
gcaagcagaucugauauca

SEQ ID NO: 1508353 - RNA, 19 nt, Homo sapiens
  misc_RNA (1)...(19): siRNA sense strand
caagcgaguuuauuccuaa

SEQ ID NO: 1508354 - RNA, 19 nt, Homo sapiens
  misc_RNA (1)...(19): siRNA sense strand
gcaagcgaguuuauuccua

SEQ ID NO: 1508355 - RNA, 19 nt, Homo sapiens
  misc_RNA (1)...(19): siRNA sense strand
gaagaagucacacuccaaa

SEQ ID NO: 1508356 - RNA, 19 nt, Homo sapiens
  misc_RNA (1)...(19): siRNA sense strand
gcgagagaauuuacagaaa

SEQ ID NO: 1508357 - RNA, 19 nt, Homo sapiens
  misc_RNA (1)...(19): siRNA sense strand
cgacuuacuucuauacaga

SEQ ID NO: 1508358 - RNA, 19 nt, Homo sapiens
  misc_RNA (1)...(19): siRNA sense strand
aaacgcaccuuccuucuuc

SEQ ID NO: 1508359 - RNA, 19 nt, Homo sapiens
  misc_RNA (1)...(19): siRNA sense strand
gacaggagcugaucaacag

SEQ ID NO: 1508360 - RNA, 19 nt, Homo sapiens
  misc_RNA (1)...(19): siRNA sense strand
gcgaguaaauuguguugga

SEQ ID NO: 1508361 - RNA, 19 nt, Homo sapiens
  misc_RNA (1)...(19): siRNA sense strand
gguuuggcaugucgaguua

SEQ ID NO: 1508362 - RNA, 19 nt, Homo sapiens
  misc_RNA (1)...(19): siRNA sense strand
caugauuggugcucgauuu

SEQ ID NO: 1508363 - RNA, 19 nt, Homo sapiens
  misc_RNA (1)...(19): siRNA sense strand
ggauggaggugcuuuaacu

SEQ ID NO: 1508364 - RNA, 19 nt, Homo sapiens
  misc_RNA (1)...(19): siRNA sense strand
gaagaaaauucaacacuca

SEQ ID NO: 1508365 - RNA, 19 nt, Homo sapiens
  misc_RNA (1)...(19): siRNA sense strand
gcauauauuguccaacuaa

SEQ ID NO: 1508366 - RNA, 19 nt, Homo sapiens
  misc_RNA (1)...(19): siRNA sense strand
gccagaaucucuuauuugg

SEQ ID NO: 1508367 - RNA, 19 nt, Homo sapiens
  misc_RNA (1)...(19): siRNA sense strand
ccagcaagcagaucugaua

SEQ ID NO: 1508368 - RNA, 19 nt, Homo sapiens
  misc_RNA (1)...(19): siRNA sense strand
auacaagucucacagauuc

SEQ ID NO: 1508369 - RNA, 19 nt, Homo sapiens
  misc_RNA (1)...(19): siRNA sense strand
ggauacagaaaucaaguaa

SEQ ID NO: 1508370 - RNA, 19 nt, Homo sapiens
  misc_RNA (1)...(19): siRNA sense strand
ccauggaacuggugacaau

SEQ ID NO: 1508371 - RNA, 19 nt, Homo sapiens
  misc_RNA (1)...(19): siRNA sense strand
gggcauauauuguccaacu

SEQ ID NO: 1508372 - RNA, 19 nt, Homo sapiens
  misc_RNA (1)...(19): siRNA sense strand
gcugagcccucucuugugu

SEQ ID NO: 1508373 - RNA, 19 nt, Homo sapiens
  misc_RNA (1)...(19): siRNA sense strand
gauacaagucucacagauu

SEQ ID NO: 1508374 - RNA, 19 nt, Homo sapiens
  misc_RNA (1)...(19): siRNA sense strand
uaacaucaccugcuucauc

SEQ ID NO: 1508375 - RNA, 19 nt, Homo sapiens
  misc_RNA (1)...(19): siRNA sense strand
caaaggagguucaaaaugg

SEQ ID NO: 1508376 - RNA, 19 nt, Homo sapiens
  misc_RNA (1)...(19): siRNA sense strand
ccucugaccugaagaaucu

SEQ ID NO: 1508377 - RNA, 19 nt, Homo sapiens
  misc_RNA (1)...(19): siRNA sense strand
cgagagaauuuacagaaag

SEQ ID NO: 1508378 - RNA, 19 nt, Homo sapiens
  misc_RNA (1)...(19): siRNA sense strand
gcugaucaacagacauuua

SEQ ID NO: 1508379 - RNA, 19 nt, Homo sapiens
  misc_RNA (1)...(19): siRNA sense strand
gagcugaucaacagacauu

SEQ ID NO: 1508380 - RNA, 19 nt, Homo sapiens
  misc_RNA (1)...(19): siRNA sense strand
gugaaguauuuaccacuaa

SEQ ID NO: 1508381 - RNA, 19 nt, Homo sapiens
  misc_RNA (1)...(19): siRNA sense strand
ggagaccguuaucuguuga

SEQ ID NO: 1508382 - RNA, 19 nt, Homo sapiens
  misc_RNA (1)...(19): siRNA sense strand
gaagcccuguagaaacaaa

SEQ ID NO: 1508383 - RNA, 19 nt, Homo sapiens
  misc_RNA (1)...(19): siRNA sense strand
aaacaagguugcgaguaaa

SEQ ID NO: 1508384 - RNA, 19 nt, Homo sapiens
  misc_RNA (1)...(19): siRNA sense strand
ccaacaaagauucugauaa

SEQ ID NO: 1508385 - RNA, 19 nt, Homo sapiens
  misc_RNA (1)...(19): siRNA sense strand
aaaacaagguugcgaguaa

SEQ ID NO: 1508386 - RNA, 19 nt, Homo sapiens
  misc_RNA (1)...(19): siRNA sense strand
gaccuacagugacuuaaag

SEQ ID NO: 1508387 - RNA, 19 nt, Homo sapiens
  misc_RNA (1)...(19): siRNA sense strand
gaccucagucauauaauuu

SEQ ID NO: 1508388 - RNA, 19 nt, Homo sapiens
  misc_RNA (1)...(19): siRNA sense strand
caagauuacuccacauacu

SEQ ID NO: 1508389 - RNA, 19 nt, Homo sapiens
  misc_RNA (1)...(19): siRNA sense strand
caaaauggaagacuguuua

SEQ ID NO: 1508390 - RNA, 19 nt, Homo sapiens
  misc_RNA (1)...(19): siRNA sense strand
uggaagcccuguagaaaca

SEQ ID NO: 1508391 - RNA, 19 nt, Homo sapiens
  misc_RNA (1)...(19): siRNA sense strand
ggccggaguuucagaagga

SEQ ID NO: 1508392 - RNA, 19 nt, Homo sapiens
  misc_RNA (1)...(19): siRNA sense strand
ucaauuggaugcugcucaa

SEQ ID NO: 1508393 - RNA, 19 nt, Homo sapiens
  misc_RNA (1)...(19): siRNA sense strand
cgugaaguauuuaccacua

SEQ ID NO: 1508394 - RNA, 19 nt, Homo sapiens
  misc_RNA (1)...(19): siRNA sense strand
caccucacguugcuuauau

SEQ ID NO: 1508395 - RNA, 19 nt, Homo sapiens
  misc_RNA (1)...(19): siRNA sense strand
gggacgacuuacuucuaua

SEQ ID NO: 1508396 - RNA, 19 nt, Homo sapiens
  misc_RNA (1)...(19): siRNA sense strand
caaagugcaugguguuggu

SEQ ID NO: 1508397 - RNA, 19 nt, Homo sapiens
  misc_RNA (1)...(19): siRNA sense strand
gagguugacagcuaccaua

SEQ ID NO: 1508398 - RNA, 19 nt, Homo sapiens
  misc_RNA (1)...(19): siRNA sense strand
gcaccucacguugcuuaua

SEQ ID NO: 1508399 - RNA, 19 nt, Homo sapiens
  misc_RNA (1)...(19): siRNA sense strand
aaauaugucugccuucucu

SEQ ID NO: 1508400 - RNA, 19 nt, Homo sapiens
  misc_RNA (1)...(19): siRNA sense strand
ggaggagaaacuaugauga

SEQ ID NO: 1508401 - RNA, 19 nt, Homo sapiens
  misc_RNA (1)...(19): siRNA sense strand
uaucguaacuuugcgugaa

SEQ ID NO: 1508402 - RNA, 19 nt, Homo sapiens
  misc_RNA (1)...(19): siRNA sense strand
augcagagaaugacuaaua

SEQ ID NO: 1508403 - RNA, 19 nt, Homo sapiens
  misc_RNA (1)...(19): siRNA sense strand
ugagaagaguguacuugug

SEQ ID NO: 1508404 - RNA, 19 nt, Homo sapiens
  misc_RNA (1)...(19): siRNA sense strand
gcagaucugauaucauuag

SEQ ID NO: 1508405 - RNA, 19 nt, Homo sapiens
  misc_RNA (1)...(19): siRNA sense strand
gcauugcguaccauucaua

SEQ ID NO: 1508406 - RNA, 19 nt, Homo sapiens
  misc_RNA (1)...(19): siRNA sense strand
ugagcccucucuuguguuu

SEQ ID NO: 1508407 - RNA, 19 nt, Homo sapiens
  misc_RNA (1)...(19): siRNA sense strand
gcagauaugccagcaguuc

SEQ ID NO: 1508408 - RNA, 19 nt, Homo sapiens
  misc_RNA (1)...(19): siRNA sense strand
cuccaaauccagcaaguua

SEQ ID NO: 1508409 - RNA, 19 nt, Homo sapiens
  misc_RNA (1)...(19): siRNA sense strand
caaaagacaccaaauccua

SEQ ID NO: 1508410 - RNA, 19 nt, Homo sapiens
  misc_RNA (1)...(19): siRNA sense strand
caagguugcgaguaaauug

SEQ ID NO: 1508411 - RNA, 19 nt, Homo sapiens
  misc_RNA (1)...(19): siRNA sense strand
ucucuuauuugggcauaua

SEQ ID NO: 1508412 - RNA, 19 nt, Homo sapiens
  misc_RNA (1)...(19): siRNA sense strand
cuacaucuguuaauaaucc

SEQ ID NO: 1508413 - RNA, 19 nt, Homo sapiens
  misc_RNA (1)...(19): siRNA sense strand
gcaacucuuuggcaggaau

SEQ ID NO: 1508414 - RNA, 19 nt, Homo sapiens
  misc_RNA (1)...(19): siRNA sense strand
ccucuaacaucaccugcuu

SEQ ID NO: 1508415 - RNA, 19 nt, Homo sapiens
  misc_RNA (1)...(19): siRNA sense strand
gagagaauuuacagaaagc

SEQ ID NO: 1508416 - RNA, 19 nt, Homo sapiens
  misc_RNA (1)...(19): siRNA sense strand
ucaaauaugucugccuucu

SEQ ID NO: 1508417 - RNA, 19 nt, Homo sapiens
  misc_RNA (1)...(19): siRNA sense strand
gaucccacuuggucagaga

SEQ ID NO: 1508418 - RNA, 19 nt, Homo sapiens
  misc_RNA (1)...(19): siRNA sense strand
acacaacuccagcaccuuu

SEQ ID NO: 1508419 - RNA, 19 nt, Homo sapiens
  misc_RNA (1)...(19): siRNA sense strand
gccucuacaucuguuaaua

SEQ ID NO: 1508420 - RNA, 19 nt, Homo sapiens
  misc_RNA (1)...(19): siRNA sense strand
ccucuacaucuguuaauaa

SEQ ID NO: 1508421 - RNA, 19 nt, Homo sapiens
  misc_RNA (1)...(19): siRNA sense strand
gaugagaagaguguacuug

SEQ ID NO: 1508422 - RNA, 19 nt, Homo sapiens
  misc_RNA (1)...(19): siRNA sense strand
caaaugagaaaugauguca

SEQ ID NO: 1508423 - RNA, 19 nt, Homo sapiens
  misc_RNA (1)...(19): siRNA sense strand
gagcagacacuuuaaugac

SEQ ID NO: 1508424 - RNA, 19 nt, Homo sapiens
  misc_RNA (1)...(19): siRNA sense strand
augaugagcagacacuuua

SEQ ID NO: 1508425 - RNA, 19 nt, Homo sapiens
  misc_RNA (1)...(19): siRNA sense strand
ucucacagauuccuauuuu

SEQ ID NO: 1508426 - RNA, 19 nt, Homo sapiens
  misc_RNA (1)...(19): siRNA sense strand
caaccuccaggcugaguaa

SEQ ID NO: 1508427 - RNA, 19 nt, Homo sapiens
  misc_RNA (1)...(19): siRNA sense strand
ggugaccuacagugacuua

SEQ ID NO: 1508428 - RNA, 19 nt, Homo sapiens
  misc_RNA (1)...(19): siRNA sense strand
uggagaccguuaucuguug

SEQ ID NO: 1508429 - RNA, 19 nt, Homo sapiens
  misc_RNA (1)...(19): siRNA sense strand
ucaaugagaggccggaguu

SEQ ID NO: 1508430 - RNA, 19 nt, Homo sapiens
  misc_RNA (1)...(19): siRNA sense strand
uggcauuaauggcccagua

SEQ ID NO: 1508431 - RNA, 19 nt, Homo sapiens
  misc_RNA (1)...(19): siRNA sense strand
ggcauauauuguccaacua

SEQ ID NO: 1508432 - RNA, 19 nt, Homo sapiens
  misc_RNA (1)...(19): siRNA sense strand
uugccagaaucucuuauuu

SEQ ID NO: 1508433 - RNA, 19 nt, Homo sapiens
  misc_RNA (1)...(19): siRNA sense strand
gaggagaaacuaugaugag

SEQ ID NO: 1508434 - RNA, 19 nt, Homo sapiens
  misc_RNA (1)...(19): siRNA sense strand
caaauugaucaagcagaua

SEQ ID NO: 1508435 - RNA, 19 nt, Homo sapiens
  misc_RNA (1)...(19): siRNA sense strand
caaacgcaccuuccuucuu

SEQ ID NO: 1508436 - RNA, 19 nt, Homo sapiens
  misc_RNA (1)...(19): siRNA sense strand
ugggacgacuuacuucuau

SEQ ID NO: 1508437 - RNA, 19 nt, Homo sapiens
  misc_RNA (1)...(19): siRNA sense strand
gauccaacaaagauucuga

SEQ ID NO: 1508438 - RNA, 19 nt, Homo sapiens
  misc_RNA (1)...(19): siRNA sense strand
guaaauuguguuggaguuu

SEQ ID NO: 1508439 - RNA, 19 nt, Homo sapiens
  misc_RNA (1)...(19): siRNA sense strand
gcuucauccuuguuuaaug

SEQ ID NO: 1508440 - RNA, 19 nt, Homo sapiens
  misc_RNA (1)...(19): siRNA sense strand
guaaacagcaaagaugauc

SEQ ID NO: 1508441 - RNA, 19 nt, Homo sapiens
  misc_RNA (1)...(19): siRNA sense strand
ccagagaugagaagagugu

SEQ ID NO: 1508442 - RNA, 19 nt, Homo sapiens
  misc_RNA (1)...(19): siRNA sense strand
gaacuggugacaaucaacu

SEQ ID NO: 1508443 - RNA, 19 nt, Homo sapiens
  misc_RNA (1)...(19): siRNA sense strand
acaaagauucugauaacug

SEQ ID NO: 1508444 - RNA, 19 nt, Homo sapiens
  misc_RNA (1)...(19): siRNA sense strand
ugauacaagucucacagau

SEQ ID NO: 1508445 - RNA, 19 nt, Homo sapiens
  misc_RNA (1)...(19): siRNA sense strand
ugagcagacacuuuaauga

SEQ ID NO: 1508446 - RNA, 19 nt, Homo sapiens
  misc_RNA (1)...(19): siRNA sense strand
ugaccuacagugacuuaaa

SEQ ID NO: 1508447 - RNA, 19 nt, Homo sapiens
  misc_RNA (1)...(19): siRNA sense strand
agacugggcuguggcuaug

SEQ ID NO: 1508448 - RNA, 19 nt, Homo sapiens
  misc_RNA (1)...(19): siRNA sense strand
ggcucuggcuacuauuauu

SEQ ID NO: 1508449 - RNA, 19 nt, Homo sapiens
  misc_RNA (1)...(19): siRNA sense strand
gcucuggcuacuauuauug

SEQ ID NO: 1508450 - RNA, 19 nt, Homo sapiens
  misc_RNA (1)...(19): siRNA sense strand
gcuacuacggaaacuacua

SEQ ID NO: 1508451 - RNA, 19 nt, Homo sapiens
  misc_RNA (1)...(19): siRNA sense strand
cuacuacggaaacuacuau

SEQ ID NO: 1508452 - RNA, 19 nt, Homo sapiens
  misc_RNA (1)...(19): siRNA sense strand
ggccugggcuauggcuaug

SEQ ID NO: 1508453 - RNA, 19 nt, Homo sapiens
  misc_RNA (1)...(19): siRNA sense strand
gcagcuacuacggaaacua

SEQ ID NO: 1508454 - RNA, 19 nt, Homo sapiens
  misc_RNA (1)...(19): siRNA sense strand
gggcuguggcuauggcuau

SEQ ID NO: 1508455 - RNA, 19 nt, Homo sapiens
  misc_RNA (1)...(19): siRNA sense strand
caagaaaucugcacugugu

SEQ ID NO: 1508456 - RNA, 19 nt, Homo sapiens
  misc_RNA (1)...(19): siRNA sense strand
caacucauuugaccuuuaa

SEQ ID NO: 1508457 - RNA, 19 nt, Homo sapiens
  misc_RNA (1)...(19): siRNA sense strand
cuacuccgauccucauaua

SEQ ID NO: 1508458 - RNA, 19 nt, Homo sapiens
  misc_RNA (1)...(19): siRNA sense strand
gugcugggcuugcuacaug

SEQ ID NO: 1508459 - RNA, 19 nt, Homo sapiens
  misc_RNA (1)...(19): siRNA sense strand
ucaacaaucggcugguuua

SEQ ID NO: 1508460 - RNA, 19 nt, Homo sapiens
  misc_RNA (1)...(19): siRNA sense strand
ucuaugagccagaugcuua

SEQ ID NO: 1508461 - RNA, 19 nt, Homo sapiens
  misc_RNA (1)...(19): siRNA sense strand
ggaagaguuucgugaaggu

SEQ ID NO: 1508462 - RNA, 19 nt, Homo sapiens
  misc_RNA (1)...(19): siRNA sense strand
ccagccacaucuucuauga

SEQ ID NO: 1508463 - RNA, 19 nt, Homo sapiens
  misc_RNA (1)...(19): siRNA sense strand
gaggaagaguuucgugaag

SEQ ID NO: 1508464 - RNA, 19 nt, Homo sapiens
  misc_RNA (1)...(19): siRNA sense strand
gaugacgaccuggauauuu

SEQ ID NO: 1508465 - RNA, 19 nt, Homo sapiens
  misc_RNA (1)...(19): siRNA sense strand
gagagagaagccagagaua

SEQ ID NO: 1508466 - RNA, 19 nt, Homo sapiens
  misc_RNA (1)...(19): siRNA sense strand
ggacgcaaguuggagaugu

SEQ ID NO: 1508467 - RNA, 19 nt, Homo sapiens
  misc_RNA (1)...(19): siRNA sense strand
caccauugcucucgauuca

SEQ ID NO: 1508468 - RNA, 19 nt, Homo sapiens
  misc_RNA (1)...(19): siRNA sense strand
acaacucauuugaccuuua

SEQ ID NO: 1508469 - RNA, 19 nt, Homo sapiens
  misc_RNA (1)...(19): siRNA sense strand
ccacaacucauuugaccuu

SEQ ID NO: 1508470 - RNA, 19 nt, Homo sapiens
  misc_RNA (1)...(19): siRNA sense strand
gacgcaaguuggagauguu

SEQ ID NO: 1508471 - RNA, 19 nt, Homo sapiens
  misc_RNA (1)...(19): siRNA sense strand
ggaccaagaagacccagau

SEQ ID NO: 1508472 - RNA, 19 nt, Homo sapiens
  misc_RNA (1)...(19): siRNA sense strand
gguuuaccaugacuucuuc

SEQ ID NO: 1508473 - RNA, 19 nt, Homo sapiens
  misc_RNA (1)...(19): siRNA sense strand
gaagugagcgaggaagagu

SEQ ID NO: 1508474 - RNA, 19 nt, Homo sapiens
  misc_RNA (1)...(19): siRNA sense strand
gauccugcccuuccaguuc

SEQ ID NO: 1508475 - RNA, 19 nt, Homo sapiens
  misc_RNA (1)...(19): siRNA sense strand
uaucaacaaucggcugguu

SEQ ID NO: 1508476 - RNA, 19 nt, Homo sapiens
  misc_RNA (1)...(19): siRNA sense strand
augaugaccuggaccaaga

SEQ ID NO: 1508477 - RNA, 19 nt, Homo sapiens
  misc_RNA (1)...(19): siRNA sense strand
gucaagaaaucugcacugu

SEQ ID NO: 1508478 - RNA, 19 nt, Homo sapiens
  misc_RNA (1)...(19): siRNA sense strand
gagagaagccagagauagc

SEQ ID NO: 1508479 - RNA, 19 nt, Homo sapiens
  misc_RNA (1)...(19): siRNA sense strand
cgaggaagaguuucgugaa

SEQ ID NO: 1508480 - RNA, 19 nt, Homo sapiens
  misc_RNA (1)...(19): siRNA sense strand
augacgaccuggauauuug

SEQ ID NO: 1508481 - RNA, 19 nt, Homo sapiens
  misc_RNA (1)...(19): siRNA sense strand
gcaaguuggagauguugga

SEQ ID NO: 1508482 - RNA, 19 nt, Homo sapiens
  misc_RNA (1)...(19): siRNA sense strand
gauguuggacucgcuguug

SEQ ID NO: 1508483 - RNA, 19 nt, Homo sapiens
  misc_RNA (1)...(19): siRNA sense strand
gaucccacaacucauuuga

SEQ ID NO: 1508484 - RNA, 19 nt, Homo sapiens
  misc_RNA (1)...(19): siRNA sense strand
ugagccagaugcuuaugau

SEQ ID NO: 1508485 - RNA, 19 nt, Homo sapiens
  misc_RNA (1)...(19): siRNA sense strand
ugacucugauaucaacaau

SEQ ID NO: 1508486 - RNA, 19 nt, Homo sapiens
  misc_RNA (1)...(19): siRNA sense strand
cagaugacgaccuggauau

SEQ ID NO: 1508487 - RNA, 19 nt, Homo sapiens
  misc_RNA (1)...(19): siRNA sense strand
ccauugcucucgauucacu

SEQ ID NO: 1508488 - RNA, 19 nt, Homo sapiens
  misc_RNA (1)...(19): siRNA sense strand
ggaccggacgcaaguugga

SEQ ID NO: 1508489 - RNA, 19 nt, Homo sapiens
  misc_RNA (1)...(19): siRNA sense strand
acucugauaucaacaaucg

SEQ ID NO: 1508490 - RNA, 19 nt, Homo sapiens
  misc_RNA (1)...(19): siRNA sense strand
ccaagaagacccagaugac

SEQ ID NO: 1508491 - RNA, 19 nt, Homo sapiens
  misc_RNA (1)...(19): siRNA sense strand
gaagaguuucgugaagguu

SEQ ID NO: 1508492 - RNA, 19 nt, Homo sapiens
  misc_RNA (1)...(19): siRNA sense strand
gccagaugcuuaugaugac

SEQ ID NO: 1508493 - RNA, 19 nt, Homo sapiens
  misc_RNA (1)...(19): siRNA sense strand
gcgcccaacugaccagacu

SEQ ID NO: 1508494 - RNA, 19 nt, Homo sapiens
  misc_RNA (1)...(19): siRNA sense strand
ucauuugaccuuuaaccuu

SEQ ID NO: 1508495 - RNA, 19 nt, Homo sapiens
  misc_RNA (1)...(19): siRNA sense strand
agccagaugcuuaugauga

SEQ ID NO: 1508496 - RNA, 19 nt, Homo sapiens
  misc_RNA (1)...(19): siRNA sense strand
agagagagaagccagagau

SEQ ID NO: 1508497 - RNA, 19 nt, Homo sapiens
  misc_RNA (1)...(19): siRNA sense strand
ugacgaccuggauauuuga

SEQ ID NO: 1508498 - RNA, 19 nt, Homo sapiens
  misc_RNA (1)...(19): siRNA sense strand
gugaagguuuugacucuga

SEQ ID NO: 1508499 - RNA, 19 nt, Homo sapiens
  misc_RNA (1)...(19): siRNA sense strand
agccagagauagccugauc

SEQ ID NO: 1508500 - RNA, 19 nt, Homo sapiens
  misc_RNA (1)...(19): siRNA sense strand
ugagagccaugugcaagag

SEQ ID NO: 1508501 - RNA, 19 nt, Homo sapiens
  misc_RNA (1)...(19): siRNA sense strand
cacaacucauuugaccuuu

SEQ ID NO: 1508502 - RNA, 19 nt, Homo sapiens
  misc_RNA (1)...(19): siRNA sense strand
cuaccagccacaucuucua

SEQ ID NO: 1508503 - RNA, 19 nt, Homo sapiens
  misc_RNA (1)...(19): siRNA sense strand
accaugacuucuucagaga

SEQ ID NO: 1508504 - RNA, 19 nt, Homo sapiens
  misc_RNA (1)...(19): siRNA sense strand
agugagcgaggaagaguuu

SEQ ID NO: 1508505 - RNA, 19 nt, Homo sapiens
  misc_RNA (1)...(19): siRNA sense strand
gcuacuacggaaacuacua

SEQ ID NO: 1508506 - RNA, 19 nt, Homo sapiens
  misc_RNA (1)...(19): siRNA sense strand
gcucuggcuacuacuauug

SEQ ID NO: 1508507 - RNA, 19 nt, Homo sapiens
  misc_RNA (1)...(19): siRNA sense strand
ccuaggcuauggcuaugga

SEQ ID NO: 1508508 - RNA, 19 nt, Homo sapiens
  misc_RNA (1)...(19): siRNA sense strand
auacgaaggccuaggcuau

SEQ ID NO: 1508509 - RNA, 19 nt, Homo sapiens
  misc_RNA (1)...(19): siRNA sense strand
cuacggcucccgcuucuuc

SEQ ID NO: 1508510 - RNA, 19 nt, Homo sapiens
  misc_RNA (1)...(19): siRNA sense strand
cuacggcgaccauggcuau

SEQ ID NO: 1508511 - RNA, 19 nt, Homo sapiens
  misc_RNA (1)...(19): siRNA sense strand
ggccuaggcuauggcuaug

SEQ ID NO: 1508512 - RNA, 19 nt, Homo sapiens
  misc_RNA (1)...(19): siRNA sense strand
ggcuaugggugcuguggau

SEQ ID NO: 1508513 - RNA, 19 nt, Homo sapiens
  misc_RNA (1)...(19): siRNA sense strand
ggcucuggcuacuacuauu

SEQ ID NO: 1508514 - RNA, 19 nt, Homo sapiens
  misc_RNA (1)...(19): siRNA sense strand
gcagcuacuacggaaacua

SEQ ID NO: 1508515 - RNA, 19 nt, Homo sapiens
  misc_RNA (1)...(19): siRNA sense strand
ugggugcuguggauacgaa

SEQ ID NO: 1508516 - RNA, 19 nt, Homo sapiens
  misc_RNA (1)...(19): siRNA sense strand
gcuaugggugcuguggaua

SEQ ID NO: 1508517 - RNA, 19 nt, Homo sapiens
  misc_RNA (1)...(19): siRNA sense strand
gaauguaacugcaaacuuu

SEQ ID NO: 1508518 - RNA, 19 nt, Homo sapiens
  misc_RNA (1)...(19): siRNA sense strand
caaauuaacugccguaacu

SEQ ID NO: 1508519 - RNA, 19 nt, Homo sapiens
  misc_RNA (1)...(19): siRNA sense strand
caucuuagcuuguguuuua

SEQ ID NO: 1508520 - RNA, 19 nt, Homo sapiens
  misc_RNA (1)...(19): siRNA sense strand
guuguuaccuguuaucuuu

SEQ ID NO: 1508521 - RNA, 19 nt, Homo sapiens
  misc_RNA (1)...(19): siRNA sense strand
guaacugccucaauuugua

SEQ ID NO: 1508522 - RNA, 19 nt, Homo sapiens
  misc_RNA (1)...(19): siRNA sense strand
uaauguaacugccucaauu

SEQ ID NO: 1508523 - RNA, 19 nt, Homo sapiens
  misc_RNA (1)...(19): siRNA sense strand
caaauuguguuacaucuuc

SEQ ID NO: 1508524 - RNA, 19 nt, Homo sapiens
  misc_RNA (1)...(19): siRNA sense strand
gaaugaugcugcuucaaug

SEQ ID NO: 1508525 - RNA, 19 nt, Homo sapiens
  misc_RNA (1)...(19): siRNA sense strand
gagcagauucgacuucaua

SEQ ID NO: 1508526 - RNA, 19 nt, Homo sapiens
  misc_RNA (1)...(19): siRNA sense strand
uaacaggacuucauucucu

SEQ ID NO: 1508527 - RNA, 19 nt, Homo sapiens
  misc_RNA (1)...(19): siRNA sense strand
caacuuacuacuucuguua

SEQ ID NO: 1508528 - RNA, 19 nt, Homo sapiens
  misc_RNA (1)...(19): siRNA sense strand
guacuuaaaucuacaaagg

SEQ ID NO: 1508529 - RNA, 19 nt, Homo sapiens
  misc_RNA (1)...(19): siRNA sense strand
gggaaaacaucucuaauuu

SEQ ID NO: 1508530 - RNA, 19 nt, Homo sapiens
  misc_RNA (1)...(19): siRNA sense strand
gagaaugccuuugguaauc

SEQ ID NO: 1508531 - RNA, 19 nt, Homo sapiens
  misc_RNA (1)...(19): siRNA sense strand
gaaucaggcuuucaacauc

SEQ ID NO: 1508532 - RNA, 19 nt, Homo sapiens
  misc_RNA (1)...(19): siRNA sense strand
cgagaggaguauuuaauga

SEQ ID NO: 1508533 - RNA, 19 nt, Homo sapiens
  misc_RNA (1)...(19): siRNA sense strand
cacaagaaguugagaaguu

SEQ ID NO: 1508534 - RNA, 19 nt, Homo sapiens
  misc_RNA (1)...(19): siRNA sense strand
auacagcccuuugcauuua

SEQ ID NO: 1508535 - RNA, 19 nt, Homo sapiens
  misc_RNA (1)...(19): siRNA sense strand
acgcuuagauccuggaaua

SEQ ID NO: 1508536 - RNA, 19 nt, Homo sapiens
  misc_RNA (1)...(19): siRNA sense strand
cuaaacaucuauugucaga

SEQ ID NO: 1508537 - RNA, 19 nt, Homo sapiens
  misc_RNA (1)...(19): siRNA sense strand
gcuagcaucuucagccauu

SEQ ID NO: 1508538 - RNA, 19 nt, Homo sapiens
  misc_RNA (1)...(19): siRNA sense strand
ucagcaagguauaauguaa

SEQ ID NO: 1508539 - RNA, 19 nt, Homo sapiens
  misc_RNA (1)...(19): siRNA sense strand
ggacuucauucucuuguag

SEQ ID NO: 1508540 - RNA, 19 nt, Homo sapiens
  misc_RNA (1)...(19): siRNA sense strand
ggcagagcauuacguuaua

SEQ ID NO: 1508541 - RNA, 19 nt, Homo sapiens
  misc_RNA (1)...(19): siRNA sense strand
aaacagugcucuaccgaau

SEQ ID NO: 1508542 - RNA, 19 nt, Homo sapiens
  misc_RNA (1)...(19): siRNA sense strand
gcacugggagacaaauuaa

SEQ ID NO: 1508543 - RNA, 19 nt, Homo sapiens
  misc_RNA (1)...(19): siRNA sense strand
gaauuaacaggacuucauu

SEQ ID NO: 1508544 - RNA, 19 nt, Homo sapiens
  misc_RNA (1)...(19): siRNA sense strand
caauacagcccuuugcauu

SEQ ID NO: 1508545 - RNA, 19 nt, Homo sapiens
  misc_RNA (1)...(19): siRNA sense strand
gagacuggcuagcaucuuc

SEQ ID NO: 1508546 - RNA, 19 nt, Homo sapiens
  misc_RNA (1)...(19): siRNA sense strand
uuaaaggacuugccaaucu

SEQ ID NO: 1508547 - RNA, 19 nt, Homo sapiens
  misc_RNA (1)...(19): siRNA sense strand
ggcauaaaguaaccacaaa

SEQ ID NO: 1508548 - RNA, 19 nt, Homo sapiens
  misc_RNA (1)...(19): siRNA sense strand
agacugagaacauuacuuu

SEQ ID NO: 1508549 - RNA, 19 nt, Homo sapiens
  misc_RNA (1)...(19): siRNA sense strand
gauaucagaaucaggcuuu

SEQ ID NO: 1508550 - RNA, 19 nt, Homo sapiens
  misc_RNA (1)...(19): siRNA sense strand
gccguugucuucauugauu

SEQ ID NO: 1508551 - RNA, 19 nt, Homo sapiens
  misc_RNA (1)...(19): siRNA sense strand
cuuagauccuggaauauuu

SEQ ID NO: 1508552 - RNA, 19 nt, Homo sapiens
  misc_RNA (1)...(19): siRNA sense strand
uggaauaccuccuccugaa

SEQ ID NO: 1508553 - RNA, 19 nt, Homo sapiens
  misc_RNA (1)...(19): siRNA sense strand
uaugguugcucuucggaua

SEQ ID NO: 1508554 - RNA, 19 nt, Homo sapiens
  misc_RNA (1)...(19): siRNA sense strand
aguguuaccugugcaaaua

SEQ ID NO: 1508555 - RNA, 19 nt, Homo sapiens
  misc_RNA (1)...(19): siRNA sense strand
gcagagcauuacguuauau

SEQ ID NO: 1508556 - RNA, 19 nt, Homo sapiens
  misc_RNA (1)...(19): siRNA sense strand
ugacacauucaguuuguua

SEQ ID NO: 1508557 - RNA, 19 nt, Homo sapiens
  misc_RNA (1)...(19): siRNA sense strand
acaagaaguugagaaguug

SEQ ID NO: 1508558 - RNA, 19 nt, Homo sapiens
  misc_RNA (1)...(19): siRNA sense strand
caagagaaugccuuuggua

SEQ ID NO: 1508559 - RNA, 19 nt, Homo sapiens
  misc_RNA (1)...(19): siRNA sense strand
ccauuacucuaaacaucua

SEQ ID NO: 1508560 - RNA, 19 nt, Homo sapiens
  misc_RNA (1)...(19): siRNA sense strand
cuacuucuguuaccuugaa

SEQ ID NO: 1508561 - RNA, 19 nt, Homo sapiens
  misc_RNA (1)...(19): siRNA sense strand
gagcuugggcuguuguaaa

SEQ ID NO: 1508562 - RNA, 19 nt, Homo sapiens
  misc_RNA (1)...(19): siRNA sense strand
caauugaggcaucuauauu

SEQ ID NO: 1508563 - RNA, 19 nt, Homo sapiens
  misc_RNA (1)...(19): siRNA sense strand
aaacuaaaggcaucagaaa

SEQ ID NO: 1508564 - RNA, 19 nt, Homo sapiens
  misc_RNA (1)...(19): siRNA sense strand
acagugcucuaccgaauga

SEQ ID NO: 1508565 - RNA, 19 nt, Homo sapiens
  misc_RNA (1)...(19): siRNA sense strand
gugcaaauacaacuuacua

SEQ ID NO: 1508566 - RNA, 19 nt, Homo sapiens
  misc_RNA (1)...(19): siRNA sense strand
ggguuuaguggaauuaaua

SEQ ID NO: 1508567 - RNA, 19 nt, Homo sapiens
  misc_RNA (1)...(19): siRNA sense strand
ggaauaccuccuccugaaa

SEQ ID NO: 1508568 - RNA, 19 nt, Homo sapiens
  misc_RNA (1)...(19): siRNA sense strand
ugauucaucuucaggcaaa

SEQ ID NO: 1508569 - RNA, 19 nt, Homo sapiens
  misc_RNA (1)...(19): siRNA sense strand
guucaguacuuaaaucuac

SEQ ID NO: 1508570 - RNA, 19 nt, Homo sapiens
  misc_RNA (1)...(19): siRNA sense strand
gaauuaggaauguuacuag

SEQ ID NO: 1508571 - RNA, 19 nt, Homo sapiens
  misc_RNA (1)...(19): siRNA sense strand
gacuuucuuugucucauaa

SEQ ID NO: 1508572 - RNA, 19 nt, Homo sapiens
  misc_RNA (1)...(19): siRNA sense strand
ucagaaaacucaagggaaa

SEQ ID NO: 1508573 - RNA, 19 nt, Homo sapiens
  misc_RNA (1)...(19): siRNA sense strand
gauccuuaaucugucauuu

SEQ ID NO: 1508574 - RNA, 19 nt, Homo sapiens
  misc_RNA (1)...(19): siRNA sense strand
uaaaggacuugccaaucug

SEQ ID NO: 1508575 - RNA, 19 nt, Homo sapiens
  misc_RNA (1)...(19): siRNA sense strand
cgaaugaugcugcuucaau

SEQ ID NO: 1508576 - RNA, 19 nt, Homo sapiens
  misc_RNA (1)...(19): siRNA sense strand
uaucugacugggaauaaua

SEQ ID NO: 1508577 - RNA, 19 nt, Homo sapiens
  misc_RNA (1)...(19): siRNA sense strand
caagacuacugcgcuaaug

SEQ ID NO: 1508578 - RNA, 19 nt, Homo sapiens
  misc_RNA (1)...(19): siRNA sense strand
ggaauguaacugcaaacuu

SEQ ID NO: 1508579 - RNA, 19 nt, Homo sapiens
  misc_RNA (1)...(19): siRNA sense strand
ccacaaagaaauacuugga

SEQ ID NO: 1508580 - RNA, 19 nt, Homo sapiens
  misc_RNA (1)...(19): siRNA sense strand
ggauaauucuaacauucug

SEQ ID NO: 1508581 - RNA, 19 nt, Homo sapiens
  misc_RNA (1)...(19): siRNA sense strand
gcaaauacaacuuacuacu

SEQ ID NO: 1508582 - RNA, 19 nt, Homo sapiens
  misc_RNA (1)...(19): siRNA sense strand
gcucuucggauacuugauu

SEQ ID NO: 1508583 - RNA, 19 nt, Homo sapiens
  misc_RNA (1)...(19): siRNA sense strand
gauucgacuucauaaacaa

SEQ ID NO: 1508584 - RNA, 19 nt, Homo sapiens
  misc_RNA (1)...(19): siRNA sense strand
gcagauucgacuucauaaa

SEQ ID NO: 1508585 - RNA, 19 nt, Homo sapiens
  misc_RNA (1)...(19): siRNA sense strand
caaagaaauacuuggaugu

SEQ ID NO: 1508586 - RNA, 19 nt, Homo sapiens
  misc_RNA (1)...(19): siRNA sense strand
ggauggguuuaguggaauu

SEQ ID NO: 1508587 - RNA, 19 nt, Homo sapiens
  misc_RNA (1)...(19): siRNA sense strand
gcuuagauccuggaauauu

SEQ ID NO: 1508588 - RNA, 19 nt, Homo sapiens
  misc_RNA (1)...(19): siRNA sense strand
uaacugccucaauuuguaa

SEQ ID NO: 1508589 - RNA, 19 nt, Homo sapiens
  misc_RNA (1)...(19): siRNA sense strand
auaaauguauccagagcuu

SEQ ID NO: 1508590 - RNA, 19 nt, Homo sapiens
  misc_RNA (1)...(19): siRNA sense strand
gaagcaauacagcccuuug

SEQ ID NO: 1508591 - RNA, 19 nt, Homo sapiens
  misc_RNA (1)...(19): siRNA sense strand
gagaggaguauuuaaugau

SEQ ID NO: 1508592 - RNA, 19 nt, Homo sapiens
  misc_RNA (1)...(19): siRNA sense strand
cauaaaguaaccacaaaug

SEQ ID NO: 1508593 - RNA, 19 nt, Homo sapiens
  misc_RNA (1)...(19): siRNA sense strand
cuucagccauuacucuaaa

SEQ ID NO: 1508594 - RNA, 19 nt, Homo sapiens
  misc_RNA (1)...(19): siRNA sense strand
guagcauuguauuuggaua

SEQ ID NO: 1508595 - RNA, 19 nt, Homo sapiens
  misc_RNA (1)...(19): siRNA sense strand
guuguaaaaucuccucaua

SEQ ID NO: 1508596 - RNA, 19 nt, Homo sapiens
  misc_RNA (1)...(19): siRNA sense strand
uggcagagcauuacguuau

SEQ ID NO: 1508597 - RNA, 19 nt, Homo sapiens
  misc_RNA (1)...(19): siRNA sense strand
uuaagccguugucuucauu

SEQ ID NO: 1508598 - RNA, 19 nt, Homo sapiens
  misc_RNA (1)...(19): siRNA sense strand
ucaauugaggcaucuauau

SEQ ID NO: 1508599 - RNA, 19 nt, Homo sapiens
  misc_RNA (1)...(19): siRNA sense strand
ucaguucaguacuuaaauc

SEQ ID NO: 1508600 - RNA, 19 nt, Homo sapiens
  misc_RNA (1)...(19): siRNA sense strand
gaaguugaaugaggcuuuu

SEQ ID NO: 1508601 - RNA, 19 nt, Homo sapiens
  misc_RNA (1)...(19): siRNA sense strand
gaaguugagaaguugaaug

SEQ ID NO: 1508602 - RNA, 19 nt, Homo sapiens
  misc_RNA (1)...(19): siRNA sense strand
cuaaugauggccuggcaua

SEQ ID NO: 1508603 - RNA, 19 nt, Homo sapiens
  misc_RNA (1)...(19): siRNA sense strand
gcucugcacugggagacaa

SEQ ID NO: 1508604 - RNA, 19 nt, Homo sapiens
  misc_RNA (1)...(19): siRNA sense strand
aagagaaugccuuugguaa

SEQ ID NO: 1508605 - RNA, 19 nt, Homo sapiens
  misc_RNA (1)...(19): siRNA sense strand
gcauaaaguaaccacaaau

SEQ ID NO: 1508606 - RNA, 19 nt, Homo sapiens
  misc_RNA (1)...(19): siRNA sense strand
agaggaguauuuaaugauc

SEQ ID NO: 1508607 - RNA, 19 nt, Homo sapiens
  misc_RNA (1)...(19): siRNA sense strand
aauuaacugccguaacuua

SEQ ID NO: 1508608 - RNA, 19 nt, Homo sapiens
  misc_RNA (1)...(19): siRNA sense strand
guacacaagaaguugagaa

SEQ ID NO: 1508609 - RNA, 19 nt, Homo sapiens
  misc_RNA (1)...(19): siRNA sense strand
gaggaguauuuaaugaucu

SEQ ID NO: 1508610 - RNA, 19 nt, Homo sapiens
  misc_RNA (1)...(19): siRNA sense strand
guuccgagaggaguauuua

SEQ ID NO: 1508611 - RNA, 19 nt, Homo sapiens
  misc_RNA (1)...(19): siRNA sense strand
gauguucgucuguuuguca

SEQ ID NO: 1508612 - RNA, 19 nt, Homo sapiens
  misc_RNA (1)...(19): siRNA sense strand
ggaaaacaucucuaauuug

SEQ ID NO: 1508613 - RNA, 19 nt, Homo sapiens
  misc_RNA (1)...(19): siRNA sense strand
uuucgaguauuccuaagaa

SEQ ID NO: 1508614 - RNA, 19 nt, Homo sapiens
  misc_RNA (1)...(19): siRNA sense strand
agggauggguuuaguggaa

SEQ ID NO: 1508615 - RNA, 19 nt, Homo sapiens
  misc_RNA (1)...(19): siRNA sense strand
ucaagagaaugccuuuggu

SEQ ID NO: 1508616 - RNA, 19 nt, Homo sapiens
  misc_RNA (1)...(19): siRNA sense strand
aagaaauacuuggauguuc

SEQ ID NO: 1508617 - RNA, 19 nt, Homo sapiens
  misc_RNA (1)...(19): siRNA sense strand
gcagggaucucuccgaaga

SEQ ID NO: 1508618 - RNA, 19 nt, Homo sapiens
  misc_RNA (1)...(19): siRNA sense strand
caucucugcuccuguguuu

SEQ ID NO: 1508619 - RNA, 19 nt, Homo sapiens
  misc_RNA (1)...(19): siRNA sense strand
uaccagagugggaaagaaa

SEQ ID NO: 1508620 - RNA, 19 nt, Homo sapiens
  misc_RNA (1)...(19): siRNA sense strand
cagaaucccuggguuuuga

SEQ ID NO: 1508621 - RNA, 19 nt, Homo sapiens
  misc_RNA (1)...(19): siRNA sense strand
uuaccagagugggaaagaa

SEQ ID NO: 1508622 - RNA, 19 nt, Homo sapiens
  misc_RNA (1)...(19): siRNA sense strand
ggaaagaccaggaaauuua

SEQ ID NO: 1508623 - RNA, 19 nt, Homo sapiens
  misc_RNA (1)...(19): siRNA sense strand
ggacugagcuacaggauau

SEQ ID NO: 1508624 - RNA, 19 nt, Homo sapiens
  misc_RNA (1)...(19): siRNA sense strand
caaagugacugaugcauuu

SEQ ID NO: 1508625 - RNA, 19 nt, Homo sapiens
  misc_RNA (1)...(19): siRNA sense strand
gcaaugauaucaaugaaga

SEQ ID NO: 1508626 - RNA, 19 nt, Homo sapiens
  misc_RNA (1)...(19): siRNA sense strand
ggacaucacugcugaacuu

SEQ ID NO: 1508627 - RNA, 19 nt, Homo sapiens
  misc_RNA (1)...(19): siRNA sense strand
gaaauagaaugugcaguuu

SEQ ID NO: 1508628 - RNA, 19 nt, Homo sapiens
  misc_RNA (1)...(19): siRNA sense strand
gagaagagcaccuaaguga

SEQ ID NO: 1508629 - RNA, 19 nt, Homo sapiens
  misc_RNA (1)...(19): siRNA sense strand
ucaaugaacugaauucugu

SEQ ID NO: 1508630 - RNA, 19 nt, Homo sapiens
  misc_RNA (1)...(19): siRNA sense strand
gaaagaccaggaaauuuaa

SEQ ID NO: 1508631 - RNA, 19 nt, Homo sapiens
  misc_RNA (1)...(19): siRNA sense strand
gcacugaaccuguugcaaa

SEQ ID NO: 1508632 - RNA, 19 nt, Homo sapiens
  misc_RNA (1)...(19): siRNA sense strand
guaaugacuuugugacuug

SEQ ID NO: 1508633 - RNA, 19 nt, Homo sapiens
  misc_RNA (1)...(19): siRNA sense strand
caauguagcugauucaaag

SEQ ID NO: 1508634 - RNA, 19 nt, Homo sapiens
  misc_RNA (1)...(19): siRNA sense strand
gaagcagccuguuauagug

SEQ ID NO: 1508635 - RNA, 19 nt, Homo sapiens
  misc_RNA (1)...(19): siRNA sense strand
gguagaagcuuggauaaca

SEQ ID NO: 1508636 - RNA, 19 nt, Homo sapiens
  misc_RNA (1)...(19): siRNA sense strand
gcaagaaggugagauugga

SEQ ID NO: 1508637 - RNA, 19 nt, Homo sapiens
  misc_RNA (1)...(19): siRNA sense strand
ucagagcacuuuccacauu

SEQ ID NO: 1508638 - RNA, 19 nt, Homo sapiens
  misc_RNA (1)...(19): siRNA sense strand
gagcagaggaugaugauga

SEQ ID NO: 1508639 - RNA, 19 nt, Homo sapiens
  misc_RNA (1)...(19): siRNA sense strand
agacucagcugauaauuca

SEQ ID NO: 1508640 - RNA, 19 nt, Homo sapiens
  misc_RNA (1)...(19): siRNA sense strand
ggauauaaaugcuguuucu

SEQ ID NO: 1508641 - RNA, 19 nt, Homo sapiens
  misc_RNA (1)...(19): siRNA sense strand
gagcagagacagaauguug

SEQ ID NO: 1508642 - RNA, 19 nt, Homo sapiens
  misc_RNA (1)...(19): siRNA sense strand
gaacacauguacaucugau

SEQ ID NO: 1508643 - RNA, 19 nt, Homo sapiens
  misc_RNA (1)...(19): siRNA sense strand
gcacuaaccauucgggaaa

SEQ ID NO: 1508644 - RNA, 19 nt, Homo sapiens
  misc_RNA (1)...(19): siRNA sense strand
ggaugauucuuuaagugua

SEQ ID NO: 1508645 - RNA, 19 nt, Homo sapiens
  misc_RNA (1)...(19): siRNA sense strand
gaaaggacagucugauguu

SEQ ID NO: 1508646 - RNA, 19 nt, Homo sapiens
  misc_RNA (1)...(19): siRNA sense strand
ugaaccaggugaugacuuu

SEQ ID NO: 1508647 - RNA, 19 nt, Homo sapiens
  misc_RNA (1)...(19): siRNA sense strand
gcacauggcuugagauacc

SEQ ID NO: 1508648 - RNA, 19 nt, Homo sapiens
  misc_RNA (1)...(19): siRNA sense strand
gcacugaguauaauuuaga

SEQ ID NO: 1508649 - RNA, 19 nt, Homo sapiens
  misc_RNA (1)...(19): siRNA sense strand
ggaaucagccacuucaguu

SEQ ID NO: 1508650 - RNA, 19 nt, Homo sapiens
  misc_RNA (1)...(19): siRNA sense strand
agagaggccuuaccugaaa

SEQ ID NO: 1508651 - RNA, 19 nt, Homo sapiens
  misc_RNA (1)...(19): siRNA sense strand
gaagagcaccuaagugaag

SEQ ID NO: 1508652 - RNA, 19 nt, Homo sapiens
  misc_RNA (1)...(19): siRNA sense strand
acaagcacuuugccaauaa

SEQ ID NO: 1508653 - RNA, 19 nt, Homo sapiens
  misc_RNA (1)...(19): siRNA sense strand
gaaaggauacaauuagaag

SEQ ID NO: 1508654 - RNA, 19 nt, Homo sapiens
  misc_RNA (1)...(19): siRNA sense strand
ggaaaggauacaauuagaa

SEQ ID NO: 1508655 - RNA, 19 nt, Homo sapiens
  misc_RNA (1)...(19): siRNA sense strand
gcaagaaaaucuaguggaa

SEQ ID NO: 1508656 - RNA, 19 nt, Homo sapiens
  misc_RNA (1)...(19): siRNA sense strand
uaaaugugcucaccuaugc

SEQ ID NO: 1508657 - RNA, 19 nt, Homo sapiens
  misc_RNA (1)...(19): siRNA sense strand
guagaagcuuggauaacaa

SEQ ID NO: 1508658 - RNA, 19 nt, Homo sapiens
  misc_RNA (1)...(19): siRNA sense strand
acaagcacaucuaccagua

SEQ ID NO: 1508659 - RNA, 19 nt, Homo sapiens
  misc_RNA (1)...(19): siRNA sense strand
gagaagacaagcacaucua

SEQ ID NO: 1508660 - RNA, 19 nt, Homo sapiens
  misc_RNA (1)...(19): siRNA sense strand
caccagauaugaacacaug

SEQ ID NO: 1508661 - RNA, 19 nt, Homo sapiens
  misc_RNA (1)...(19): siRNA sense strand
caggaugacugcaaugguu

SEQ ID NO: 1508662 - RNA, 19 nt, Homo sapiens
  misc_RNA (1)...(19): siRNA sense strand
ggaugaugaugaugaugaa

SEQ ID NO: 1508663 - RNA, 19 nt, Homo sapiens
  misc_RNA (1)...(19): siRNA sense strand
guagauagccuuacaagcu

SEQ ID NO: 1508664 - RNA, 19 nt, Homo sapiens
  misc_RNA (1)...(19): siRNA sense strand
guucagacagcuuuauuaa

SEQ ID NO: 1508665 - RNA, 19 nt, Homo sapiens
  misc_RNA (1)...(19): siRNA sense strand
uaacaaagucagaccuaaa

SEQ ID NO: 1508666 - RNA, 19 nt, Homo sapiens
  misc_RNA (1)...(19): siRNA sense strand
gaaguggcuuuggguagaa

SEQ ID NO: 1508667 - RNA, 19 nt, Homo sapiens
  misc_RNA (1)...(19): siRNA sense strand
ggaagccucuuagcacuca

SEQ ID NO: 1508668 - RNA, 19 nt, Homo sapiens
  misc_RNA (1)...(19): siRNA sense strand
cagagcacuuuccacauuu

SEQ ID NO: 1508669 - RNA, 19 nt, Homo sapiens
  misc_RNA (1)...(19): siRNA sense strand
ggaguuguaugaguuaaca

SEQ ID NO: 1508670 - RNA, 19 nt, Homo sapiens
  misc_RNA (1)...(19): siRNA sense strand
gagagaggccuuaccugaa

SEQ ID NO: 1508671 - RNA, 19 nt, Homo sapiens
  misc_RNA (1)...(19): siRNA sense strand
ugccaaauauucaggauga

SEQ ID NO: 1508672 - RNA, 19 nt, Homo sapiens
  misc_RNA (1)...(19): siRNA sense strand
ggaauagacacccgaaaca

SEQ ID NO: 1508673 - RNA, 19 nt, Homo sapiens
  misc_RNA (1)...(19): siRNA sense strand
gcaccuaagugaagaagcu

SEQ ID NO: 1508674 - RNA, 19 nt, Homo sapiens
  misc_RNA (1)...(19): siRNA sense strand
gauaugaacacauguacau

SEQ ID NO: 1508675 - RNA, 19 nt, Homo sapiens
  misc_RNA (1)...(19): siRNA sense strand
uaagaagcagccuguuaua

SEQ ID NO: 1508676 - RNA, 19 nt, Homo sapiens
  misc_RNA (1)...(19): siRNA sense strand
aauaagaagcagccuguua

SEQ ID NO: 1508677 - RNA, 19 nt, Homo sapiens
  misc_RNA (1)...(19): siRNA sense strand
agaaauagaaugugcaguu

SEQ ID NO: 1508678 - RNA, 19 nt, Homo sapiens
  misc_RNA (1)...(19): siRNA sense strand
uccacaagcucucaagaaa

SEQ ID NO: 1508679 - RNA, 19 nt, Homo sapiens
  misc_RNA (1)...(19): siRNA sense strand
guguaggguuuguugauuu

SEQ ID NO: 1508680 - RNA, 19 nt, Homo sapiens
  misc_RNA (1)...(19): siRNA sense strand
gauguucccagccacguua

SEQ ID NO: 1508681 - RNA, 19 nt, Homo sapiens
  misc_RNA (1)...(19): siRNA sense strand
aacaagcacuuugccaaua

SEQ ID NO: 1508682 - RNA, 19 nt, Homo sapiens
  misc_RNA (1)...(19): siRNA sense strand
ucaagacucugaugauuuu

SEQ ID NO: 1508683 - RNA, 19 nt, Homo sapiens
  misc_RNA (1)...(19): siRNA sense strand
gcucaccuaugcauggauu

SEQ ID NO: 1508684 - RNA, 19 nt, Homo sapiens
  misc_RNA (1)...(19): siRNA sense strand
gagaggaucagguuugugu

SEQ ID NO: 1508685 - RNA, 19 nt, Homo sapiens
  misc_RNA (1)...(19): siRNA sense strand
gagaagcacuaaccauucg

SEQ ID NO: 1508686 - RNA, 19 nt, Homo sapiens
  misc_RNA (1)...(19): siRNA sense strand
gaggaucagguuuguguuu

SEQ ID NO: 1508687 - RNA, 19 nt, Homo sapiens
  misc_RNA (1)...(19): siRNA sense strand
ugaugacuuuggagaauuu

SEQ ID NO: 1508688 - RNA, 19 nt, Homo sapiens
  misc_RNA (1)...(19): siRNA sense strand
uagauagccuuacaagcuu

SEQ ID NO: 1508689 - RNA, 19 nt, Homo sapiens
  misc_RNA (1)...(19): siRNA sense strand
gguguaggguuuguugauu

SEQ ID NO: 1508690 - RNA, 19 nt, Homo sapiens
  misc_RNA (1)...(19): siRNA sense strand
caagcacuuugccaauaaa

SEQ ID NO: 1508691 - RNA, 19 nt, Homo sapiens
  misc_RNA (1)...(19): siRNA sense strand
aaggugagauuggacauuu

SEQ ID NO: 1508692 - RNA, 19 nt, Homo sapiens
  misc_RNA (1)...(19): siRNA sense strand
ggugaugacuuuggagaau

SEQ ID NO: 1508693 - RNA, 19 nt, Homo sapiens
  misc_RNA (1)...(19): siRNA sense strand
aaaggacagucugauguuu

SEQ ID NO: 1508694 - RNA, 19 nt, Homo sapiens
  misc_RNA (1)...(19): siRNA sense strand
gcagcaggauuggguaugu

SEQ ID NO: 1508695 - RNA, 19 nt, Homo sapiens
  misc_RNA (1)...(19): siRNA sense strand
ucagaaauaagcauaguga

SEQ ID NO: 1508696 - RNA, 19 nt, Homo sapiens
  misc_RNA (1)...(19): siRNA sense strand
caaaggagacacugaugga

SEQ ID NO: 1508697 - RNA, 19 nt, Homo sapiens
  misc_RNA (1)...(19): siRNA sense strand
gcugaggaauuugcagauu

SEQ ID NO: 1508698 - RNA, 19 nt, Homo sapiens
  misc_RNA (1)...(19): siRNA sense strand
ggacggaagccucuuagca

SEQ ID NO: 1508699 - RNA, 19 nt, Homo sapiens
  misc_RNA (1)...(19): siRNA sense strand
gaaaauguagauagccuua

SEQ ID NO: 1508700 - RNA, 19 nt, Homo sapiens
  misc_RNA (1)...(19): siRNA sense strand
gccaccaugucaccagaua

SEQ ID NO: 1508701 - RNA, 19 nt, Homo sapiens
  misc_RNA (1)...(19): siRNA sense strand
gaaccacugaaaccacuuu

SEQ ID NO: 1508702 - RNA, 19 nt, Homo sapiens
  misc_RNA (1)...(19): siRNA sense strand
ggauauccaugaugcacau

SEQ ID NO: 1508703 - RNA, 19 nt, Homo sapiens
  misc_RNA (1)...(19): siRNA sense strand
ucacauaggacagaugaaa

SEQ ID NO: 1508704 - RNA, 19 nt, Homo sapiens
  misc_RNA (1)...(19): siRNA sense strand
uagagaagcacuaaccauu

SEQ ID NO: 1508705 - RNA, 19 nt, Homo sapiens
  misc_RNA (1)...(19): siRNA sense strand
cugaggaauuugcagauuu

SEQ ID NO: 1508706 - RNA, 19 nt, Homo sapiens
  misc_RNA (1)...(19): siRNA sense strand
gucuggagauucuaacaaa

SEQ ID NO: 1508707 - RNA, 19 nt, Homo sapiens
  misc_RNA (1)...(19): siRNA sense strand
augcauggauucuguuaaa

SEQ ID NO: 1508708 - RNA, 19 nt, Homo sapiens
  misc_RNA (1)...(19): siRNA sense strand
uaacaaaggagacacugau

SEQ ID NO: 1508709 - RNA, 19 nt, Homo sapiens
  misc_RNA (1)...(19): siRNA sense strand
gagaccagcaggcuacuga

SEQ ID NO: 1508710 - RNA, 19 nt, Homo sapiens
  misc_RNA (1)...(19): siRNA sense strand
uagagucaaugaacugaau

SEQ ID NO: 1508711 - RNA, 19 nt, Homo sapiens
  misc_RNA (1)...(19): siRNA sense strand
ccagauaugaacacaugua

SEQ ID NO: 1508712 - RNA, 19 nt, Homo sapiens
  misc_RNA (1)...(19): siRNA sense strand
caaagaagaaaguagaaag

SEQ ID NO: 1508713 - RNA, 19 nt, Homo sapiens
  misc_RNA (1)...(19): siRNA sense strand
ggaucagguuuguguuuca

SEQ ID NO: 1508714 - RNA, 19 nt, Homo sapiens
  misc_RNA (1)...(19): siRNA sense strand
agaaguggcuuuggguaga

SEQ ID NO: 1508715 - RNA, 19 nt, Homo sapiens
  misc_RNA (1)...(19): siRNA sense strand
ggaaugcuuuugaggauga

SEQ ID NO: 1508716 - RNA, 19 nt, Homo sapiens
  misc_RNA (1)...(19): siRNA sense strand
agucagguguucagucaaa

SEQ ID NO: 1508717 - RNA, 19 nt, Homo sapiens
  misc_RNA (1)...(19): siRNA sense strand
acagucagguguucaguca

SEQ ID NO: 1508718 - RNA, 19 nt, Homo sapiens
  misc_RNA (1)...(19): siRNA sense strand
caucacugcugaacuuucu

SEQ ID NO: 1508719 - RNA, 19 nt, Homo sapiens
  misc_RNA (1)...(19): siRNA sense strand
gauccggaguuguaugagu

SEQ ID NO: 1508720 - RNA, 19 nt, Homo sapiens
  misc_RNA (1)...(19): siRNA sense strand
gaaaagagaagagcaccua

SEQ ID NO: 1508721 - RNA, 19 nt, Homo sapiens
  misc_RNA (1)...(19): siRNA sense strand
ucaaagugacugaugcauu

SEQ ID NO: 1508722 - RNA, 19 nt, Homo sapiens
  misc_RNA (1)...(19): siRNA sense strand
gauccgagcuguucccuuu

SEQ ID NO: 1508723 - RNA, 19 nt, Homo sapiens
  misc_RNA (1)...(19): siRNA sense strand
ggacaauacagaucuaaua

SEQ ID NO: 1508724 - RNA, 19 nt, Homo sapiens
  misc_RNA (1)...(19): siRNA sense strand
caaacauggugauagauuu

SEQ ID NO: 1508725 - RNA, 19 nt, Homo sapiens
  misc_RNA (1)...(19): siRNA sense strand
gaaagaauuggcuauaaga

SEQ ID NO: 1508726 - RNA, 19 nt, Homo sapiens
  misc_RNA (1)...(19): siRNA sense strand
gaacaaauuggacuuggaa

SEQ ID NO: 1508727 - RNA, 19 nt, Homo sapiens
  misc_RNA (1)...(19): siRNA sense strand
uaacugacauucuucaaca

SEQ ID NO: 1508728 - RNA, 19 nt, Homo sapiens
  misc_RNA (1)...(19): siRNA sense strand
gcccaaacauggugauaga

SEQ ID NO: 1508729 - RNA, 19 nt, Homo sapiens
  misc_RNA (1)...(19): siRNA sense strand
uaagaagucuaggaacaaa

SEQ ID NO: 1508730 - RNA, 19 nt, Homo sapiens
  misc_RNA (1)...(19): siRNA sense strand
auacagcacuggcaugauu

SEQ ID NO: 1508731 - RNA, 19 nt, Homo sapiens
  misc_RNA (1)...(19): siRNA sense strand
ggaacaaauuggacuugga

SEQ ID NO: 1508732 - RNA, 19 nt, Homo sapiens
  misc_RNA (1)...(19): siRNA sense strand
ucaaucaucuucuguacug

SEQ ID NO: 1508733 - RNA, 19 nt, Homo sapiens
  misc_RNA (1)...(19): siRNA sense strand
uauaagaagucuaggaaca

SEQ ID NO: 1508734 - RNA, 19 nt, Homo sapiens
  misc_RNA (1)...(19): siRNA sense strand
uuacagcacuccagccaaa

SEQ ID NO: 1508735 - RNA, 19 nt, Homo sapiens
  misc_RNA (1)...(19): siRNA sense strand
gaaagcuugugcccaaaca

SEQ ID NO: 1508736 - RNA, 19 nt, Homo sapiens
  misc_RNA (1)...(19): siRNA sense strand
agaauuggcuauaagaagu

SEQ ID NO: 1508737 - RNA, 19 nt, Homo sapiens
  misc_RNA (1)...(19): siRNA sense strand
gcuauaagaagucuaggaa

SEQ ID NO: 1508738 - RNA, 19 nt, Homo sapiens
  misc_RNA (1)...(19): siRNA sense strand
uaaggacaauacagaucua

SEQ ID NO: 1508739 - RNA, 19 nt, Homo sapiens
  misc_RNA (1)...(19): siRNA sense strand
ccaaacauggugauagauu

SEQ ID NO: 1508740 - RNA, 19 nt, Homo sapiens
  misc_RNA (1)...(19): siRNA sense strand
gauggugucuccaggucaa

SEQ ID NO: 1508741 - RNA, 19 nt, Homo sapiens
  misc_RNA (1)...(19): siRNA sense strand
ggaaacauuaacugacauu

SEQ ID NO: 1508742 - RNA, 19 nt, Homo sapiens
  misc_RNA (1)...(19): siRNA sense strand
gagaaagcuugugcccaaa

SEQ ID NO: 1508743 - RNA, 19 nt, Homo sapiens
  misc_RNA (1)...(19): siRNA sense strand
gaucaaguugugagaagaa

SEQ ID NO: 1508744 - RNA, 19 nt, Homo sapiens
  misc_RNA (1)...(19): siRNA sense strand
caaauuggacuuggaaaca

SEQ ID NO: 1508745 - RNA, 19 nt, Homo sapiens
  misc_RNA (1)...(19): siRNA sense strand
gacaauacagaucuaauag

SEQ ID NO: 1508746 - RNA, 19 nt, Homo sapiens
  misc_RNA (1)...(19): siRNA sense strand
ucuuaagccucgaacaauu

SEQ ID NO: 1508747 - RNA, 19 nt, Homo sapiens
  misc_RNA (1)...(19): siRNA sense strand
gagcuguucccuuugagaa

SEQ ID NO: 1508748 - RNA, 19 nt, Homo sapiens
  misc_RNA (1)...(19): siRNA sense strand
aauauuuccuugcagagaa

SEQ ID NO: 1508749 - RNA, 19 nt, Homo sapiens
  misc_RNA (1)...(19): siRNA sense strand
ggucaaucaucuucuguac

SEQ ID NO: 1508750 - RNA, 19 nt, Homo sapiens
  misc_RNA (1)...(19): siRNA sense strand
ggagauucaauuauaagga

SEQ ID NO: 1508751 - RNA, 19 nt, Homo sapiens
  misc_RNA (1)...(19): siRNA sense strand
guggcagccucuggaguua

SEQ ID NO: 1508752 - RNA, 19 nt, Homo sapiens
  misc_RNA (1)...(19): siRNA sense strand
cucgaacaauugaagauuu

SEQ ID NO: 1508753 - RNA, 19 nt, Homo sapiens
  misc_RNA (1)...(19): siRNA sense strand
guaucuagaccaaaucaga

SEQ ID NO: 1508754 - RNA, 19 nt, Homo sapiens
  misc_RNA (1)...(19): siRNA sense strand
caaaucagaacccaacagu

SEQ ID NO: 1508755 - RNA, 19 nt, Homo sapiens
  misc_RNA (1)...(19): siRNA sense strand
cagaugggguucacuguuu

SEQ ID NO: 1508756 - RNA, 19 nt, Homo sapiens
  misc_RNA (1)...(19): siRNA sense strand
ugccauggacuuaggcuua

SEQ ID NO: 1508757 - RNA, 19 nt, Homo sapiens
  misc_RNA (1)...(19): siRNA sense strand
agaagucuaggaacaaauu

SEQ ID NO: 1508758 - RNA, 19 nt, Homo sapiens
  misc_RNA (1)...(19): siRNA sense strand
ggcagccucuggaguuaau

SEQ ID NO: 1508759 - RNA, 19 nt, Homo sapiens
  misc_RNA (1)...(19): siRNA sense strand
cccauaggagauucaauua

SEQ ID NO: 1508760 - RNA, 19 nt, Homo sapiens
  misc_RNA (1)...(19): siRNA sense strand
aaucagaacccaacaguac

SEQ ID NO: 1508761 - RNA, 19 nt, Homo sapiens
  misc_RNA (1)...(19): siRNA sense strand
ggacuuggaaacauuaacu

SEQ ID NO: 1508762 - RNA, 19 nt, Homo sapiens
  misc_RNA (1)...(19): siRNA sense strand
ccaggucaaucaucuucug

SEQ ID NO: 1508763 - RNA, 19 nt, Homo sapiens
  misc_RNA (1)...(19): siRNA sense strand
caaguugugagaagaaauc

SEQ ID NO: 1508764 - RNA, 19 nt, Homo sapiens
  misc_RNA (1)...(19): siRNA sense strand
ggacgcucauaccagaugu

SEQ ID NO: 1508765 - RNA, 19 nt, Homo sapiens
  misc_RNA (1)...(19): siRNA sense strand
gauggcaccaacuacauug

SEQ ID NO: 1508766 - RNA, 19 nt, Homo sapiens
  misc_RNA (1)...(19): siRNA sense strand
guuaauuucugggaaggau

SEQ ID NO: 1508767 - RNA, 19 nt, Homo sapiens
  misc_RNA (1)...(19): siRNA sense strand
gaagucuaggaacaaauug

SEQ ID NO: 1508768 - RNA, 19 nt, Homo sapiens
  misc_RNA (1)...(19): siRNA sense strand
aauuggacuuggaaacauu

SEQ ID NO: 1508769 - RNA, 19 nt, Homo sapiens
  misc_RNA (1)...(19): siRNA sense strand
uuggaaacauuaacugaca

SEQ ID NO: 1508770 - RNA, 19 nt, Homo sapiens
  misc_RNA (1)...(19): siRNA sense strand
uaucuagaccaaaucagaa

SEQ ID NO: 1508771 - RNA, 19 nt, Homo sapiens
  misc_RNA (1)...(19): siRNA sense strand
gaaccuuaacauccauugu

SEQ ID NO: 1508772 - RNA, 19 nt, Homo sapiens
  misc_RNA (1)...(19): siRNA sense strand
aaauacagcacuggcauga

SEQ ID NO: 1508773 - RNA, 19 nt, Homo sapiens
  misc_RNA (1)...(19): siRNA sense strand
gggaugccauggacuuagg

SEQ ID NO: 1508774 - RNA, 19 nt, Homo sapiens
  misc_RNA (1)...(19): siRNA sense strand
ccauaggagauucaauuau

SEQ ID NO: 1508775 - RNA, 19 nt, Homo sapiens
  misc_RNA (1)...(19): siRNA sense strand
acugggcucugaccacuau

SEQ ID NO: 1508776 - RNA, 19 nt, Homo sapiens
  misc_RNA (1)...(19): siRNA sense strand
aaauuggacuuggaaacau

SEQ ID NO: 1508777 - RNA, 19 nt, Homo sapiens
  misc_RNA (1)...(19): siRNA sense strand
ucuacuccuuuacucuuaa

SEQ ID NO: 1508778 - RNA, 19 nt, Homo sapiens
  misc_RNA (1)...(19): siRNA sense strand
gccauggacuuaggcuuag

SEQ ID NO: 1508779 - RNA, 19 nt, Homo sapiens
  misc_RNA (1)...(19): siRNA sense strand
gcuucacccucacccauag

SEQ ID NO: 1508780 - RNA, 19 nt, Homo sapiens
  misc_RNA (1)...(19): siRNA sense strand
ccuagaagacagcaaauac

SEQ ID NO: 1508781 - RNA, 19 nt, Homo sapiens
  misc_RNA (1)...(19): siRNA sense strand
aauggauucugguaucuag

SEQ ID NO: 1508782 - RNA, 19 nt, Homo sapiens
  misc_RNA (1)...(19): siRNA sense strand
ccucuggaguuaauuucug

SEQ ID NO: 1508783 - RNA, 19 nt, Homo sapiens
  misc_RNA (1)...(19): siRNA sense strand
gaacccaacaguacauucc

SEQ ID NO: 1508784 - RNA, 19 nt, Homo sapiens
  misc_RNA (1)...(19): siRNA sense strand
caccagauccgagcuguuc

SEQ ID NO: 1508785 - RNA, 19 nt, Homo sapiens
  misc_RNA (1)...(19): siRNA sense strand
acccauaggagauucaauu

SEQ ID NO: 1508786 - RNA, 19 nt, Homo sapiens
  misc_RNA (1)...(19): siRNA sense strand
uccgagcuguucccuuuga

SEQ ID NO: 1508787 - RNA, 19 nt, Homo sapiens
  misc_RNA (1)...(19): siRNA sense strand
uugagaaccuuaacaucca

SEQ ID NO: 1508788 - RNA, 19 nt, Homo sapiens
  misc_RNA (1)...(19): siRNA sense strand
gaaacauuaacugacauuc

SEQ ID NO: 1508789 - RNA, 19 nt, Homo sapiens
  misc_RNA (1)...(19): siRNA sense strand
ugaucaaguugugagaaga

SEQ ID NO: 1508790 - RNA, 19 nt, Homo sapiens
  misc_RNA (1)...(19): siRNA sense strand
cuuaagccucgaacaauug

SEQ ID NO: 1508791 - RNA, 19 nt, Homo sapiens
  misc_RNA (1)...(19): siRNA sense strand
gaauuggcuauaagaaguc

SEQ ID NO: 1508792 - RNA, 19 nt, Homo sapiens
  misc_RNA (1)...(19): siRNA sense strand
uaauauuuccuugcagaga

SEQ ID NO: 1508793 - RNA, 19 nt, Homo sapiens
  misc_RNA (1)...(19): siRNA sense strand
ugauggcaccaacuacauu

SEQ ID NO: 1508794 - RNA, 19 nt, Homo sapiens
  misc_RNA (1)...(19): siRNA sense strand
uauaaggacaauacagauc

SEQ ID NO: 1508795 - RNA, 19 nt, Homo sapiens
  misc_RNA (1)...(19): siRNA sense strand
ggcuucacccucacccaua

SEQ ID NO: 1508796 - RNA, 19 nt, Homo sapiens
  misc_RNA (1)...(19): siRNA sense strand
cagccucuggaguuaauuu

SEQ ID NO: 1508797 - RNA, 19 nt, Homo sapiens
  misc_RNA (1)...(19): siRNA sense strand
aaaucagaacccaacagua

SEQ ID NO: 1508798 - RNA, 19 nt, Homo sapiens
  misc_RNA (1)...(19): siRNA sense strand
aaucuacuccuuuacucuu

SEQ ID NO: 1508799 - RNA, 19 nt, Homo sapiens
  misc_RNA (1)...(19): siRNA sense strand
gccauuugcucucuacuga

SEQ ID NO: 1508800 - RNA, 19 nt, Homo sapiens
  misc_RNA (1)...(19): siRNA sense strand
gcuacccgcugggauauag

SEQ ID NO: 1508801 - RNA, 19 nt, Homo sapiens
  misc_RNA (1)...(19): siRNA sense strand
caggagauacucgccauuu

SEQ ID NO: 1508802 - RNA, 19 nt, Homo sapiens
  misc_RNA (1)...(19): siRNA sense strand
ggagauacucgccauuugc

SEQ ID NO: 1508803 - RNA, 19 nt, Homo sapiens
  misc_RNA (1)...(19): siRNA sense strand
aggagauacucgccauuug

SEQ ID NO: 1508804 - RNA, 19 nt, Homo sapiens
  misc_RNA (1)...(19): siRNA sense strand
ggcuauggcuucggcuaug

SEQ ID NO: 1508805 - RNA, 19 nt, Homo sapiens
  misc_RNA (1)...(19): siRNA sense strand
gggcuauggcuucggcuau

SEQ ID NO: 1508806 - RNA, 19 nt, Homo sapiens
  misc_RNA (1)...(19): siRNA sense strand
gcuuucggcuacaggagau

SEQ ID NO: 1508807 - RNA, 19 nt, Homo sapiens
  misc_RNA (1)...(19): siRNA sense strand
gcuauggcuucggcuaugg

SEQ ID NO: 1508808 - RNA, 19 nt, Homo sapiens
  misc_RNA (1)...(19): siRNA sense strand
gauaugagguggagauuaa

SEQ ID NO: 1508809 - RNA, 19 nt, Homo sapiens
  misc_RNA (1)...(19): siRNA sense strand
gagaauccauccucuguga

SEQ ID NO: 1508810 - RNA, 19 nt, Homo sapiens
  misc_RNA (1)...(19): siRNA sense strand
ggacaaagacaucaaguuc

SEQ ID NO: 1508811 - RNA, 19 nt, Homo sapiens
  misc_RNA (1)...(19): siRNA sense strand
ggaaucggcguauuucuuu

SEQ ID NO: 1508812 - RNA, 19 nt, Homo sapiens
  misc_RNA (1)...(19): siRNA sense strand
ggaagcagcuggagacacu

SEQ ID NO: 1508813 - RNA, 19 nt, Homo sapiens
  misc_RNA (1)...(19): siRNA sense strand
gcacaacagcagagaauga

SEQ ID NO: 1508814 - RNA, 19 nt, Homo sapiens
  misc_RNA (1)...(19): siRNA sense strand
caaguucgccuccuucauu

SEQ ID NO: 1508815 - RNA, 19 nt, Homo sapiens
  misc_RNA (1)...(19): siRNA sense strand
ggagggaaucggcguauuu

SEQ ID NO: 1508816 - RNA, 19 nt, Homo sapiens
  misc_RNA (1)...(19): siRNA sense strand
caggaugucuggugagaau

SEQ ID NO: 1508817 - RNA, 19 nt, Homo sapiens
  misc_RNA (1)...(19): siRNA sense strand
ucaaggugcugaacgacaa

SEQ ID NO: 1508818 - RNA, 19 nt, Homo sapiens
  misc_RNA (1)...(19): siRNA sense strand
cugaacaacugcaagaaga

SEQ ID NO: 1508819 - RNA, 19 nt, Homo sapiens
  misc_RNA (1)...(19): siRNA sense strand
gaaacuggcccuggacaug

SEQ ID NO: 1508820 - RNA, 19 nt, Homo sapiens
  misc_RNA (1)...(19): siRNA sense strand
ggugugagaucgggaaugu

SEQ ID NO: 1508821 - RNA, 19 nt, Homo sapiens
  misc_RNA (1)...(19): siRNA sense strand
gaggagaucgcccugaaga

SEQ ID NO: 1508822 - RNA, 19 nt, Homo sapiens
  misc_RNA (1)...(19): siRNA sense strand
acauggagauugccaccua

SEQ ID NO: 1508823 - RNA, 19 nt, Homo sapiens
  misc_RNA (1)...(19): siRNA sense strand
guggaggacuauaagaaga

SEQ ID NO: 1508824 - RNA, 19 nt, Homo sapiens
  misc_RNA (1)...(19): siRNA sense strand
caacagcagagaaugaguu

SEQ ID NO: 1508825 - RNA, 19 nt, Homo sapiens
  misc_RNA (1)...(19): siRNA sense strand
ccaggucacugucaacaag

SEQ ID NO: 1508826 - RNA, 19 nt, Homo sapiens
  misc_RNA (1)...(19): siRNA sense strand
cagcagagaaugaguuugu

SEQ ID NO: 1508827 - RNA, 19 nt, Homo sapiens
  misc_RNA (1)...(19): siRNA sense strand
gacaucaaguuccucaagu

SEQ ID NO: 1508828 - RNA, 19 nt, Homo sapiens
  misc_RNA (1)...(19): siRNA sense strand
gggaaucggcguauuucuu

SEQ ID NO: 1508829 - RNA, 19 nt, Homo sapiens
  misc_RNA (1)...(19): siRNA sense strand
cagaggauccggugugaga

SEQ ID NO: 1508830 - RNA, 19 nt, Homo sapiens
  misc_RNA (1)...(19): siRNA sense strand
ggaggacuauaagaagaga

SEQ ID NO: 1508831 - RNA, 19 nt, Homo sapiens
  misc_RNA (1)...(19): siRNA sense strand
cggcguauuucuuucaaug

SEQ ID NO: 1508832 - RNA, 19 nt, Homo sapiens
  misc_RNA (1)...(19): siRNA sense strand
gcguauuucuuucaaugug

SEQ ID NO: 1508833 - RNA, 19 nt, Homo sapiens
  misc_RNA (1)...(19): siRNA sense strand
gagacaaugcccugaagga

SEQ ID NO: 1508834 - RNA, 19 nt, Homo sapiens
  misc_RNA (1)...(19): siRNA sense strand
uggacucacuggacaaaga

SEQ ID NO: 1508835 - RNA, 19 nt, Homo sapiens
  misc_RNA (1)...(19): siRNA sense strand
gcugagguccgcaugcauu

SEQ ID NO: 1508836 - RNA, 19 nt, Homo sapiens
  misc_RNA (1)...(19): siRNA sense strand
ucaaguuccucaagugucu

SEQ ID NO: 1508837 - RNA, 19 nt, Homo sapiens
  misc_RNA (1)...(19): siRNA sense strand
gaaccuggagcccauccuu

SEQ ID NO: 1508838 - RNA, 19 nt, Homo sapiens
  misc_RNA (1)...(19): siRNA sense strand
gugagcaucucugucauca

SEQ ID NO: 1508839 - RNA, 19 nt, Homo sapiens
  misc_RNA (1)...(19): siRNA sense strand
gcgagaugguggagcugaa

SEQ ID NO: 1508840 - RNA, 19 nt, Homo sapiens
  misc_RNA (1)...(19): siRNA sense strand
gggaucugguggaggacua

SEQ ID NO: 1508841 - RNA, 19 nt, Homo sapiens
  misc_RNA (1)...(19): siRNA sense strand
gaaucggcguauuucuuuc

SEQ ID NO: 1508842 - RNA, 19 nt, Homo sapiens
  misc_RNA (1)...(19): siRNA sense strand
gggagacaaugcccugaag

SEQ ID NO: 1508843 - RNA, 19 nt, Homo sapiens
  misc_RNA (1)...(19): siRNA sense strand
gaucgggaaugugaagaag

SEQ ID NO: 1508844 - RNA, 19 nt, Homo sapiens
  misc_RNA (1)...(19): siRNA sense strand
gcgcacaacagcagagaau

SEQ ID NO: 1508845 - RNA, 19 nt, Homo sapiens
  misc_RNA (1)...(19): siRNA sense strand
ucgcucagauccagacuca

SEQ ID NO: 1508846 - RNA, 19 nt, Homo sapiens
  misc_RNA (1)...(19): siRNA sense strand
gaccugaacaacugcaaga

SEQ ID NO: 1508847 - RNA, 19 nt, Homo sapiens
  misc_RNA (1)...(19): siRNA sense strand
cagcaucccagcaaggaaa

SEQ ID NO: 1508848 - RNA, 19 nt, Homo sapiens
  misc_RNA (1)...(19): siRNA sense strand
gcauggugacgaccugaaa

SEQ ID NO: 1508849 - RNA, 19 nt, Homo sapiens
  misc_RNA (1)...(19): siRNA sense strand
gcaguauguuuggcagugu

SEQ ID NO: 1508850 - RNA, 19 nt, Homo sapiens
  misc_RNA (1)...(19): siRNA sense strand
acaaagacaucaaguuccu

SEQ ID NO: 1508851 - RNA, 19 nt, Homo sapiens
  misc_RNA (1)...(19): siRNA sense strand
gaaugaguuuguggugcuu

SEQ ID NO: 1508852 - RNA, 19 nt, Homo sapiens
  misc_RNA (1)...(19): siRNA sense strand
caagguacgcuuccuagag

SEQ ID NO: 1508853 - RNA, 19 nt, Homo sapiens
  misc_RNA (1)...(19): siRNA sense strand
ugacaagguacgcuuccua

SEQ ID NO: 1508854 - RNA, 19 nt, Homo sapiens
  misc_RNA (1)...(19): siRNA sense strand
caaguccaguggugacaag

SEQ ID NO: 1508855 - RNA, 19 nt, Homo sapiens
  misc_RNA (1)...(19): siRNA sense strand
ugugagaucgggaauguga

SEQ ID NO: 1508856 - RNA, 19 nt, Homo sapiens
  misc_RNA (1)...(19): siRNA sense strand
gcagucggagccucuauag

SEQ ID NO: 1508857 - RNA, 19 nt, Homo sapiens
  misc_RNA (1)...(19): siRNA sense strand
gagccucuauagccuugga

SEQ ID NO: 1508858 - RNA, 19 nt, Homo sapiens
  misc_RNA (1)...(19): siRNA sense strand
caacuucagugugcauucg

SEQ ID NO: 1508859 - RNA, 19 nt, Homo sapiens
  misc_RNA (1)...(19): siRNA sense strand
gugagaauccauccucugu

SEQ ID NO: 1508860 - RNA, 19 nt, Homo sapiens
  misc_RNA (1)...(19): siRNA sense strand
ggcgaggagugcaggaugu

SEQ ID NO: 1508861 - RNA, 19 nt, Homo sapiens
  misc_RNA (1)...(19): siRNA sense strand
gagguccgcaugcauuaug

SEQ ID NO: 1508862 - RNA, 19 nt, Homo sapiens
  misc_RNA (1)...(19): siRNA sense strand
augcagagaucgcucagau

SEQ ID NO: 1508863 - RNA, 19 nt, Homo sapiens
  misc_RNA (1)...(19): siRNA sense strand
gaacaacugcaagaagaac

SEQ ID NO: 1508864 - RNA, 19 nt, Homo sapiens
  misc_RNA (1)...(19): siRNA sense strand
gagggaaucggcguauuuc

SEQ ID NO: 1508865 - RNA, 19 nt, Homo sapiens
  misc_RNA (1)...(19): siRNA sense strand
uggcuuugcuggcaguaug

SEQ ID NO: 1508866 - RNA, 19 nt, Homo sapiens
  misc_RNA (1)...(19): siRNA sense strand
agaucaaggugcugaacga

SEQ ID NO: 1508867 - RNA, 19 nt, Homo sapiens
  misc_RNA (1)...(19): siRNA sense strand
ggcagucggagccucuaua

SEQ ID NO: 1508868 - RNA, 19 nt, Homo sapiens
  misc_RNA (1)...(19): siRNA sense strand
acaucaaguuccucaagug

SEQ ID NO: 1508869 - RNA, 19 nt, Homo sapiens
  misc_RNA (1)...(19): siRNA sense strand
gucggcaacugaacaucaa

SEQ ID NO: 1508870 - RNA, 19 nt, Homo sapiens
  misc_RNA (1)...(19): siRNA sense strand
ggagcuggacccugagauc

SEQ ID NO: 1508871 - RNA, 19 nt, Homo sapiens
  misc_RNA (1)...(19): siRNA sense strand
ugacaagggcaacuucagu

SEQ ID NO: 1508872 - RNA, 19 nt, Homo sapiens
  misc_RNA (1)...(19): siRNA sense strand
ugaacaacugcaagaagaa

SEQ ID NO: 1508873 - RNA, 19 nt, Homo sapiens
  misc_RNA (1)...(19): siRNA sense strand
caucaaguuccucaagugu

SEQ ID NO: 1508874 - RNA, 19 nt, Homo sapiens
  misc_RNA (1)...(19): siRNA sense strand
cagucaagguggagcuuca

SEQ ID NO: 1508875 - RNA, 19 nt, Homo sapiens
  misc_RNA (1)...(19): siRNA sense strand
gaguuuguggugcuuaaga

SEQ ID NO: 1508876 - RNA, 19 nt, Homo sapiens
  misc_RNA (1)...(19): siRNA sense strand
gagauaugagguggagauu

SEQ ID NO: 1508877 - RNA, 19 nt, Homo sapiens
  misc_RNA (1)...(19): siRNA sense strand
gguggaggacuauaagaag

SEQ ID NO: 1508878 - RNA, 19 nt, Homo sapiens
  misc_RNA (1)...(19): siRNA sense strand
ucgggaaugugaagaagca

SEQ ID NO: 1508879 - RNA, 19 nt, Homo sapiens
  misc_RNA (1)...(19): siRNA sense strand
ucagcaaccugcggaagca

SEQ ID NO: 1508880 - RNA, 19 nt, Homo sapiens
  misc_RNA (1)...(19): siRNA sense strand
ucugugagcaucucuguca

SEQ ID NO: 1508881 - RNA, 19 nt, Homo sapiens
  misc_RNA (1)...(19): siRNA sense strand
ggugacgaccugaaacaca

SEQ ID NO: 1508882 - RNA, 19 nt, Homo sapiens
  misc_RNA (1)...(19): siRNA sense strand
augaggagaucgcccugaa

SEQ ID NO: 1508883 - RNA, 19 nt, Homo sapiens
  misc_RNA (1)...(19): siRNA sense strand
ccucaagugucuguaugau

SEQ ID NO: 1508884 - RNA, 19 nt, Homo sapiens
  misc_RNA (1)...(19): siRNA sense strand
aaguucgccuccuucauug

SEQ ID NO: 1508885 - RNA, 19 nt, Homo sapiens
  misc_RNA (1)...(19): siRNA sense strand
gaugcagccuacgcaguca

SEQ ID NO: 1508886 - RNA, 19 nt, Homo sapiens
  misc_RNA (1)...(19): siRNA sense strand
aggacuauaagaagagaua

SEQ ID NO: 1508887 - RNA, 19 nt, Homo sapiens
  misc_RNA (1)...(19): siRNA sense strand
ugagaagcaugagggaucu

SEQ ID NO: 1508888 - RNA, 19 nt, Homo sapiens
  misc_RNA (1)...(19): siRNA sense strand
agauaugagguggagauua

SEQ ID NO: 1508889 - RNA, 19 nt, Homo sapiens
  misc_RNA (1)...(19): siRNA sense strand
gcaacuucagugugcauuc

SEQ ID NO: 1508890 - RNA, 19 nt, Homo sapiens
  misc_RNA (1)...(19): siRNA sense strand
acucggagcugagaagcau

SEQ ID NO: 1508891 - RNA, 19 nt, Homo sapiens
  misc_RNA (1)...(19): siRNA sense strand
ccagugagaccucugucau

SEQ ID NO: 1508892 - RNA, 19 nt, Homo sapiens
  misc_RNA (1)...(19): siRNA sense strand
acccugagauccagaaggu

SEQ ID NO: 1508893 - RNA, 19 nt, Homo sapiens
  misc_RNA (1)...(19): siRNA sense strand
gacuauaagaagagauaug

SEQ ID NO: 1508894 - RNA, 19 nt, Homo sapiens
  misc_RNA (1)...(19): siRNA sense strand
gacaaguucgccuccuuca

SEQ ID NO: 1508895 - RNA, 19 nt, Homo sapiens
  misc_RNA (1)...(19): siRNA sense strand
cugagguccgcaugcauua

SEQ ID NO: 1508896 - RNA, 19 nt, Homo sapiens
  misc_RNA (1)...(19): siRNA sense strand
accgggaccuggaccuuga

SEQ ID NO: 1508897 - RNA, 19 nt, Homo sapiens
  misc_RNA (1)...(19): siRNA sense strand
ggacuauaagaagagauau

SEQ ID NO: 1508898 - RNA, 19 nt, Homo sapiens
  misc_RNA (1)...(19): siRNA sense strand
gaucugguggaggacuaua

SEQ ID NO: 1508899 - RNA, 19 nt, Homo sapiens
  misc_RNA (1)...(19): siRNA sense strand
ggaggacgcugcauuguuc

SEQ ID NO: 1508900 - RNA, 19 nt, Homo sapiens
  misc_RNA (1)...(19): siRNA sense strand
cgacaaacuaccuguauuu

SEQ ID NO: 1508901 - RNA, 19 nt, Homo sapiens
  misc_RNA (1)...(19): siRNA sense strand
caaacuaccuguauuucca

SEQ ID NO: 1508902 - RNA, 19 nt, Homo sapiens
  misc_RNA (1)...(19): siRNA sense strand
ggaggagucucuacugucu

SEQ ID NO: 1508903 - RNA, 19 nt, Homo sapiens
  misc_RNA (1)...(19): siRNA sense strand
gugacuugcucucgacaaa

SEQ ID NO: 1508904 - RNA, 19 nt, Homo sapiens
  misc_RNA (1)...(19): siRNA sense strand
caacugcuccacaagaaau

SEQ ID NO: 1508905 - RNA, 19 nt, Homo sapiens
  misc_RNA (1)...(19): siRNA sense strand
gaacuucaugugucuccaa

SEQ ID NO: 1508906 - RNA, 19 nt, Homo sapiens
  misc_RNA (1)...(19): siRNA sense strand
ucgacaaacuaccuguauu

SEQ ID NO: 1508907 - RNA, 19 nt, Homo sapiens
  misc_RNA (1)...(19): siRNA sense strand
guguccagcugccgaagaa

SEQ ID NO: 1508908 - RNA, 19 nt, Homo sapiens
  misc_RNA (1)...(19): siRNA sense strand
gcaucuguuugcccaguuc

SEQ ID NO: 1508909 - RNA, 19 nt, Homo sapiens
  misc_RNA (1)...(19): siRNA sense strand
gacaaacuaccuguauuuc

SEQ ID NO: 1508910 - RNA, 19 nt, Homo sapiens
  misc_RNA (1)...(19): siRNA sense strand
gacuugcucucgacaaacu

SEQ ID NO: 1508911 - RNA, 19 nt, Homo sapiens
  misc_RNA (1)...(19): siRNA sense strand
gucaagagaccugcuguga

SEQ ID NO: 1508912 - RNA, 19 nt, Homo sapiens
  misc_RNA (1)...(19): siRNA sense strand
ccacgacuuccaccacuga

SEQ ID NO: 1508913 - RNA, 19 nt, Homo sapiens
  misc_RNA (1)...(19): siRNA sense strand
ccgcucaccuuugucucua

SEQ ID NO: 1508914 - RNA, 19 nt, Homo sapiens
  misc_RNA (1)...(19): siRNA sense strand
ggcggcaucucuacugucu

SEQ ID NO: 1508915 - RNA, 19 nt, Homo sapiens
  misc_RNA (1)...(19): siRNA sense strand
guuccaguggcccaaguua

SEQ ID NO: 1508916 - RNA, 19 nt, Homo sapiens
  misc_RNA (1)...(19): siRNA sense strand
uucaacugcuccacaagaa

SEQ ID NO: 1508917 - RNA, 19 nt, Homo sapiens
  misc_RNA (1)...(19): siRNA sense strand
cuggaccacugucaagaga

SEQ ID NO: 1508918 - RNA, 19 nt, Homo sapiens
  misc_RNA (1)...(19): siRNA sense strand
gcucaccuuugucucuagu

SEQ ID NO: 1508919 - RNA, 19 nt, Homo sapiens
  misc_RNA (1)...(19): siRNA sense strand
ugggaggagucucuacugu

SEQ ID NO: 1508920 - RNA, 19 nt, Homo sapiens
  misc_RNA (1)...(19): siRNA sense strand
cggcgaacuucaugugucu

SEQ ID NO: 1508921 - RNA, 19 nt, Homo sapiens
  misc_RNA (1)...(19): siRNA sense strand
cuugccagccaaccuguua

SEQ ID NO: 1508922 - RNA, 19 nt, Homo sapiens
  misc_RNA (1)...(19): siRNA sense strand
ucaacugcuccacaagaaa

SEQ ID NO: 1508923 - RNA, 19 nt, Homo sapiens
  misc_RNA (1)...(19): siRNA sense strand
gaagauccuuuaaacaaga

SEQ ID NO: 1508924 - RNA, 19 nt, Homo sapiens
  misc_RNA (1)...(19): siRNA sense strand
gaaacgaaagagccaauua

SEQ ID NO: 1508925 - RNA, 19 nt, Homo sapiens
  misc_RNA (1)...(19): siRNA sense strand
cgaaagagccaauuacaaa

SEQ ID NO: 1508926 - RNA, 19 nt, Homo sapiens
  misc_RNA (1)...(19): siRNA sense strand
gaggcagucugggaaauua

SEQ ID NO: 1508927 - RNA, 19 nt, Homo sapiens
  misc_RNA (1)...(19): siRNA sense strand
ggugugaucuuucugaaug

SEQ ID NO: 1508928 - RNA, 19 nt, Homo sapiens
  misc_RNA (1)...(19): siRNA sense strand
caaauuagaccucaccuau

SEQ ID NO: 1508929 - RNA, 19 nt, Homo sapiens
  misc_RNA (1)...(19): siRNA sense strand
aauuagaccucaccuauga

SEQ ID NO: 1508930 - RNA, 19 nt, Homo sapiens
  misc_RNA (1)...(19): siRNA sense strand
ggagauaugauaaaguuug

SEQ ID NO: 1508931 - RNA, 19 nt, Homo sapiens
  misc_RNA (1)...(19): siRNA sense strand
gcaaaugcacguuccagaa

SEQ ID NO: 1508932 - RNA, 19 nt, Homo sapiens
  misc_RNA (1)...(19): siRNA sense strand
ucagaaguaugaaacgaaa

SEQ ID NO: 1508933 - RNA, 19 nt, Homo sapiens
  misc_RNA (1)...(19): siRNA sense strand
gcugagggcuggaaagaag

SEQ ID NO: 1508934 - RNA, 19 nt, Homo sapiens
  misc_RNA (1)...(19): siRNA sense strand
gaaacuagcaagaugaaag

SEQ ID NO: 1508935 - RNA, 19 nt, Homo sapiens
  misc_RNA (1)...(19): siRNA sense strand
ugaaaguccuggaguuugu

SEQ ID NO: 1508936 - RNA, 19 nt, Homo sapiens
  misc_RNA (1)...(19): siRNA sense strand
uagugucgcuggugcauuu

SEQ ID NO: 1508937 - RNA, 19 nt, Homo sapiens
  misc_RNA (1)...(19): siRNA sense strand
gaugaaaguccuggaguuu

SEQ ID NO: 1508938 - RNA, 19 nt, Homo sapiens
  misc_RNA (1)...(19): siRNA sense strand
gugcauuucuugcuucaga

SEQ ID NO: 1508939 - RNA, 19 nt, Homo sapiens
  misc_RNA (1)...(19): siRNA sense strand
gcaccuguuucaugcaguu

SEQ ID NO: 1508940 - RNA, 19 nt, Homo sapiens
  misc_RNA (1)...(19): siRNA sense strand
caaagggagauaugauaaa

SEQ ID NO: 1508941 - RNA, 19 nt, Homo sapiens
  misc_RNA (1)...(19): siRNA sense strand
ugaauaugauggguguaua

SEQ ID NO: 1508942 - RNA, 19 nt, Homo sapiens
  misc_RNA (1)...(19): siRNA sense strand
agggagauaugauaaaguu

SEQ ID NO: 1508943 - RNA, 19 nt, Homo sapiens
  misc_RNA (1)...(19): siRNA sense strand
uccaagagcucacgcugaa

SEQ ID NO: 1508944 - RNA, 19 nt, Homo sapiens
  misc_RNA (1)...(19): siRNA sense strand
gaagaggcagucugggaaa

SEQ ID NO: 1508945 - RNA, 19 nt, Homo sapiens
  misc_RNA (1)...(19): siRNA sense strand
gaaagagccaauuacaaag

SEQ ID NO: 1508946 - RNA, 19 nt, Homo sapiens
  misc_RNA (1)...(19): siRNA sense strand
gaccucaccuaugaugaaa

SEQ ID NO: 1508947 - RNA, 19 nt, Homo sapiens
  misc_RNA (1)...(19): siRNA sense strand
acaaagggagauaugauaa

SEQ ID NO: 1508948 - RNA, 19 nt, Homo sapiens
  misc_RNA (1)...(19): siRNA sense strand
gcaaauuagaccucaccua

SEQ ID NO: 1508949 - RNA, 19 nt, Homo sapiens
  misc_RNA (1)...(19): siRNA sense strand
uacaaagggagauaugaua

SEQ ID NO: 1508950 - RNA, 19 nt, Homo sapiens
  misc_RNA (1)...(19): siRNA sense strand
aaagggagauaugauaaag

SEQ ID NO: 1508951 - RNA, 19 nt, Homo sapiens
  misc_RNA (1)...(19): siRNA sense strand
ggaguuuguagccaagaua

SEQ ID NO: 1508952 - RNA, 19 nt, Homo sapiens
  misc_RNA (1)...(19): siRNA sense strand
gaaaguccuggaguuugua

SEQ ID NO: 1508953 - RNA, 19 nt, Homo sapiens
  misc_RNA (1)...(19): siRNA sense strand
agaagauccuuuaaacaag

SEQ ID NO: 1508954 - RNA, 19 nt, Homo sapiens
  misc_RNA (1)...(19): siRNA sense strand
gagcuacgcaggccacugu

SEQ ID NO: 1508955 - RNA, 19 nt, Homo sapiens
  misc_RNA (1)...(19): siRNA sense strand
gcacuugguguugauuuga

SEQ ID NO: 1508956 - RNA, 19 nt, Homo sapiens
  misc_RNA (1)...(19): siRNA sense strand
agacuggccuccugaugau

SEQ ID NO: 1508957 - RNA, 19 nt, Homo sapiens
  misc_RNA (1)...(19): siRNA sense strand
gcuggugcauuucuugcuu

SEQ ID NO: 1508958 - RNA, 19 nt, Homo sapiens
  misc_RNA (1)...(19): siRNA sense strand
agaugaaaguccuggaguu

SEQ ID NO: 1508959 - RNA, 19 nt, Homo sapiens
  misc_RNA (1)...(19): siRNA sense strand
ccaauuacaaagggagaua

SEQ ID NO: 1508960 - RNA, 19 nt, Homo sapiens
  misc_RNA (1)...(19): siRNA sense strand
caugauaccgucccuagug

SEQ ID NO: 1508961 - RNA, 19 nt, Homo sapiens
  misc_RNA (1)...(19): siRNA sense strand
guagccaagauacaugaua

SEQ ID NO: 1508962 - RNA, 19 nt, Homo sapiens
  misc_RNA (1)...(19): siRNA sense strand
gcugaaacuagcaagauga

SEQ ID NO: 1508963 - RNA, 19 nt, Homo sapiens
  misc_RNA (1)...(19): siRNA sense strand
ccucaccuaugaugaaaca

SEQ ID NO: 1508964 - RNA, 19 nt, Homo sapiens
  misc_RNA (1)...(19): siRNA sense strand
ggcacuugguguugauuug

SEQ ID NO: 1508965 - RNA, 19 nt, Homo sapiens
  misc_RNA (1)...(19): siRNA sense strand
gagcucacgcugaaacuag

SEQ ID NO: 1508966 - RNA, 19 nt, Homo sapiens
  misc_RNA (1)...(19): siRNA sense strand
aagauuuggugcagcuaaa

SEQ ID NO: 1508967 - RNA, 19 nt, Homo sapiens
  misc_RNA (1)...(19): siRNA sense strand
uaucuucucuuuggugaca

SEQ ID NO: 1508968 - RNA, 19 nt, Homo sapiens
  misc_RNA (1)...(19): siRNA sense strand
uagccaagauacaugauac

SEQ ID NO: 1508969 - RNA, 19 nt, Homo sapiens
  misc_RNA (1)...(19): siRNA sense strand
gcacugggugugaucuuuc

SEQ ID NO: 1508970 - RNA, 19 nt, Homo sapiens
  misc_RNA (1)...(19): siRNA sense strand
gcacauggagcuggcacuu

SEQ ID NO: 1508971 - RNA, 19 nt, Homo sapiens
  misc_RNA (1)...(19): siRNA sense strand
ucaggaaggauaaguguca

SEQ ID NO: 1508972 - RNA, 19 nt, Homo sapiens
  misc_RNA (1)...(19): siRNA sense strand
cagcagccaagaugagaaa

SEQ ID NO: 1508973 - RNA, 19 nt, Homo sapiens
  misc_RNA (1)...(19): siRNA sense strand
gcaagugcccaacagugau

SEQ ID NO: 1508974 - RNA, 19 nt, Homo sapiens
  misc_RNA (1)...(19): siRNA sense strand
ggagcuggcacuugguguu

SEQ ID NO: 1508975 - RNA, 19 nt, Homo sapiens
  misc_RNA (1)...(19): siRNA sense strand
agaaguaugaaacgaaaga

SEQ ID NO: 1508976 - RNA, 19 nt, Homo sapiens
  misc_RNA (1)...(19): siRNA sense strand
gcagucugggaaauuauga

SEQ ID NO: 1508977 - RNA, 19 nt, Homo sapiens
  misc_RNA (1)...(19): siRNA sense strand
gcuccgugcccgugagaaa

SEQ ID NO: 1508978 - RNA, 19 nt, Homo sapiens
  misc_RNA (1)...(19): siRNA sense strand
gagcuggcacuugguguug

SEQ ID NO: 1508979 - RNA, 19 nt, Homo sapiens
  misc_RNA (1)...(19): siRNA sense strand
aagacuggccuccugauga

SEQ ID NO: 1508980 - RNA, 19 nt, Homo sapiens
  misc_RNA (1)...(19): siRNA sense strand
aaacgaaagagccaauuac

SEQ ID NO: 1508981 - RNA, 19 nt, Homo sapiens
  misc_RNA (1)...(19): siRNA sense strand
aaacuagcaagaugaaagu

SEQ ID NO: 1508982 - RNA, 19 nt, Homo sapiens
  misc_RNA (1)...(19): siRNA sense strand
gauccuccacgcuaugaau

SEQ ID NO: 1508983 - RNA, 19 nt, Homo sapiens
  misc_RNA (1)...(19): siRNA sense strand
agaccucaccuaugaugaa

SEQ ID NO: 1508984 - RNA, 19 nt, Homo sapiens
  misc_RNA (1)...(19): siRNA sense strand
cugccuaucuucucuuugg

SEQ ID NO: 1508985 - RNA, 19 nt, Homo sapiens
  misc_RNA (1)...(19): siRNA sense strand
caagagcucacgcugaaac

SEQ ID NO: 1508986 - RNA, 19 nt, Homo sapiens
  misc_RNA (1)...(19): siRNA sense strand
ggaagcugagggcuggaaa

SEQ ID NO: 1508987 - RNA, 19 nt, Homo sapiens
  misc_RNA (1)...(19): siRNA sense strand
gaaccacgucuagcagcuu

SEQ ID NO: 1508988 - RNA, 19 nt, Homo sapiens
  misc_RNA (1)...(19): siRNA sense strand
aaagauuuggugcagcuaa

SEQ ID NO: 1508989 - RNA, 19 nt, Homo sapiens
  misc_RNA (1)...(19): siRNA sense strand
caagacuggccuccugaug

SEQ ID NO: 1508990 - RNA, 19 nt, Homo sapiens
  misc_RNA (1)...(19): siRNA sense strand
uuacaaagggagauaugau

SEQ ID NO: 1508991 - RNA, 19 nt, Homo sapiens
  misc_RNA (1)...(19): siRNA sense strand
cuucucccaugcuaaguga

SEQ ID NO: 1508992 - RNA, 19 nt, Homo sapiens
  misc_RNA (1)...(19): siRNA sense strand
cacuugguguugauuugaa

SEQ ID NO: 1508993 - RNA, 19 nt, Homo sapiens
  misc_RNA (1)...(19): siRNA sense strand
aaauuagaccucaccuaug

SEQ ID NO: 1508994 - RNA, 19 nt, Homo sapiens
  misc_RNA (1)...(19): siRNA sense strand
acaccuagcaucccugaag

SEQ ID NO: 1508995 - RNA, 19 nt, Homo sapiens
  misc_RNA (1)...(19): siRNA sense strand
cuauugcaccuguuucaug

SEQ ID NO: 1508996 - RNA, 19 nt, Homo sapiens
  misc_RNA (1)...(19): siRNA sense strand
gcuggcacuugguguugau

SEQ ID NO: 1508997 - RNA, 19 nt, Homo sapiens
  misc_RNA (1)...(19): siRNA sense strand
guguugauuugaaggaagu

SEQ ID NO: 1508998 - RNA, 19 nt, Homo sapiens
  misc_RNA (1)...(19): siRNA sense strand
gagggaugaggaacagaga

SEQ ID NO: 1508999 - RNA, 19 nt, Homo sapiens
  misc_RNA (1)...(19): siRNA sense strand
ugacagaccccagaauuug

SEQ ID NO: 1509000 - RNA, 19 nt, Homo sapiens
  misc_RNA (1)...(19): siRNA sense strand
cgcugaaacuagcaagaug

SEQ ID NO: 1509001 - RNA, 19 nt, Homo sapiens
  misc_RNA (1)...(19): siRNA sense strand
cagugauccuccacgcuau

SEQ ID NO: 1509002 - RNA, 19 nt, Homo sapiens
  misc_RNA (1)...(19): siRNA sense strand
acgaaagagccaauuacaa

SEQ ID NO: 1509003 - RNA, 19 nt, Homo sapiens
  misc_RNA (1)...(19): siRNA sense strand
gaagaaagcuuuuaucaga

SEQ ID NO: 1509004 - RNA, 19 nt, Homo sapiens
  misc_RNA (1)...(19): siRNA sense strand
caucgaaggugccacuuua

SEQ ID NO: 1509005 - RNA, 19 nt, Homo sapiens
  misc_RNA (1)...(19): siRNA sense strand
gcaagcagguguuugauag

SEQ ID NO: 1509006 - RNA, 19 nt, Homo sapiens
  misc_RNA (1)...(19): siRNA sense strand
gaaugcaucuagacuuauu

SEQ ID NO: 1509007 - RNA, 19 nt, Homo sapiens
  misc_RNA (1)...(19): siRNA sense strand
gaaggccugugagcuauuu

SEQ ID NO: 1509008 - RNA, 19 nt, Homo sapiens
  misc_RNA (1)...(19): siRNA sense strand
gugcacggcuuucucauga

SEQ ID NO: 1509009 - RNA, 19 nt, Homo sapiens
  misc_RNA (1)...(19): siRNA sense strand
caugaacgauugcuuguug

SEQ ID NO: 1509010 - RNA, 19 nt, Homo sapiens
  misc_RNA (1)...(19): siRNA sense strand
aggaaugcaucuagacuua

SEQ ID NO: 1509011 - RNA, 19 nt, Homo sapiens
  misc_RNA (1)...(19): siRNA sense strand
ccacuuuacucuauauuca

SEQ ID NO: 1509012 - RNA, 19 nt, Homo sapiens
  misc_RNA (1)...(19): siRNA sense strand
ggaggaggaugaacuugau

SEQ ID NO: 1509013 - RNA, 19 nt, Homo sapiens
  misc_RNA (1)...(19): siRNA sense strand
caaggccacuaacccauuu

SEQ ID NO: 1509014 - RNA, 19 nt, Homo sapiens
  misc_RNA (1)...(19): siRNA sense strand
gcugugccaugucuucuuu

SEQ ID NO: 1509015 - RNA, 19 nt, Homo sapiens
  misc_RNA (1)...(19): siRNA sense strand
caagagaauuugagaucga

SEQ ID NO: 1509016 - RNA, 19 nt, Homo sapiens
  misc_RNA (1)...(19): siRNA sense strand
uggguaagcucaaagaaga

SEQ ID NO: 1509017 - RNA, 19 nt, Homo sapiens
  misc_RNA (1)...(19): siRNA sense strand
accauuaccuggaagauaa

SEQ ID NO: 1509018 - RNA, 19 nt, Homo sapiens
  misc_RNA (1)...(19): siRNA sense strand
ccaagcaacuccaagaucu

SEQ ID NO: 1509019 - RNA, 19 nt, Homo sapiens
  misc_RNA (1)...(19): siRNA sense strand
gcauguggauuauagucuu

SEQ ID NO: 1509020 - RNA, 19 nt, Homo sapiens
  misc_RNA (1)...(19): siRNA sense strand
ggaaagcagcgcacucuca

SEQ ID NO: 1509021 - RNA, 19 nt, Homo sapiens
  misc_RNA (1)...(19): siRNA sense strand
ggaauggauccaggaguua

SEQ ID NO: 1509022 - RNA, 19 nt, Homo sapiens
  misc_RNA (1)...(19): siRNA sense strand
cgguugaccugcuggauaa

SEQ ID NO: 1509023 - RNA, 19 nt, Homo sapiens
  misc_RNA (1)...(19): siRNA sense strand
gagaauuugagaucgauuu

SEQ ID NO: 1509024 - RNA, 19 nt, Homo sapiens
  misc_RNA (1)...(19): siRNA sense strand
gcucaaagaagagaugaaa

SEQ ID NO: 1509025 - RNA, 19 nt, Homo sapiens
  misc_RNA (1)...(19): siRNA sense strand
aagcagguguuugauagua

SEQ ID NO: 1509026 - RNA, 19 nt, Homo sapiens
  misc_RNA (1)...(19): siRNA sense strand
ucaccacccugcuugagaa

SEQ ID NO: 1509027 - RNA, 19 nt, Homo sapiens
  misc_RNA (1)...(19): siRNA sense strand
cuaaacaucgcaacucuga

SEQ ID NO: 1509028 - RNA, 19 nt, Homo sapiens
  misc_RNA (1)...(19): siRNA sense strand
cuacaacgcucucuauucc

SEQ ID NO: 1509029 - RNA, 19 nt, Homo sapiens
  misc_RNA (1)...(19): siRNA sense strand
gaccaugggcuucuuggaa

SEQ ID NO: 1509030 - RNA, 19 nt, Homo sapiens
  misc_RNA (1)...(19): siRNA sense strand
ucacugaggugcuaguuuu

SEQ ID NO: 1509031 - RNA, 19 nt, Homo sapiens
  misc_RNA (1)...(19): siRNA sense strand
cuggauaaauugaaccauu

SEQ ID NO: 1509032 - RNA, 19 nt, Homo sapiens
  misc_RNA (1)...(19): siRNA sense strand
cagacagaaugcauccuuu

SEQ ID NO: 1509033 - RNA, 19 nt, Homo sapiens
  misc_RNA (1)...(19): siRNA sense strand
aagaagagaugaaaaguug

SEQ ID NO: 1509034 - RNA, 19 nt, Homo sapiens
  misc_RNA (1)...(19): siRNA sense strand
aagaggcccugaagcugua

SEQ ID NO: 1509035 - RNA, 19 nt, Homo sapiens
  misc_RNA (1)...(19): siRNA sense strand
ggaugacgaagaagaagaa

SEQ ID NO: 1509036 - RNA, 19 nt, Homo sapiens
  misc_RNA (1)...(19): siRNA sense strand
gaaaagguuugaagaaggu

SEQ ID NO: 1509037 - RNA, 19 nt, Homo sapiens
  misc_RNA (1)...(19): siRNA sense strand
ggauuauagucuucgaugu

SEQ ID NO: 1509038 - RNA, 19 nt, Homo sapiens
  misc_RNA (1)...(19): siRNA sense strand
gcacaguuacaaagaaauc

SEQ ID NO: 1509039 - RNA, 19 nt, Homo sapiens
  misc_RNA (1)...(19): siRNA sense strand
gagcugcacaugguacuuu

SEQ ID NO: 1509040 - RNA, 19 nt, Homo sapiens
  misc_RNA (1)...(19): siRNA sense strand
gcacggcuuucucaugaac

SEQ ID NO: 1509041 - RNA, 19 nt, Homo sapiens
  misc_RNA (1)...(19): siRNA sense strand
guuacacagugguugcuuu

SEQ ID NO: 1509042 - RNA, 19 nt, Homo sapiens
  misc_RNA (1)...(19): siRNA sense strand
cauaagcugugccaugucu

SEQ ID NO: 1509043 - RNA, 19 nt, Homo sapiens
  misc_RNA (1)...(19): siRNA sense strand
gaaggugccacuuuacucu

SEQ ID NO: 1509044 - RNA, 19 nt, Homo sapiens
  misc_RNA (1)...(19): siRNA sense strand
gcgguugaccugcuggaua

SEQ ID NO: 1509045 - RNA, 19 nt, Homo sapiens
  misc_RNA (1)...(19): siRNA sense strand
cuggagagcaucccgcuua

SEQ ID NO: 1509046 - RNA, 19 nt, Homo sapiens
  misc_RNA (1)...(19): siRNA sense strand
gauuauagucuucgaugug

SEQ ID NO: 1509047 - RNA, 19 nt, Homo sapiens
  misc_RNA (1)...(19): siRNA sense strand
uguaccagcucagccauuu

SEQ ID NO: 1509048 - RNA, 19 nt, Homo sapiens
  misc_RNA (1)...(19): siRNA sense strand
gagaaaagguuugaagaag

SEQ ID NO: 1509049 - RNA, 19 nt, Homo sapiens
  misc_RNA (1)...(19): siRNA sense strand
gcagguguuugauaguaag

SEQ ID NO: 1509050 - RNA, 19 nt, Homo sapiens
  misc_RNA (1)...(19): siRNA sense strand
gcuacaacgcucucuauuc

SEQ ID NO: 1509051 - RNA, 19 nt, Homo sapiens
  misc_RNA (1)...(19): siRNA sense strand
ggugccacuuuacucuaua

SEQ ID NO: 1509052 - RNA, 19 nt, Homo sapiens
  misc_RNA (1)...(19): siRNA sense strand
cgagacugcaagagaauuu

SEQ ID NO: 1509053 - RNA, 19 nt, Homo sapiens
  misc_RNA (1)...(19): siRNA sense strand
gcugggugaaccuaaguua

SEQ ID NO: 1509054 - RNA, 19 nt, Homo sapiens
  misc_RNA (1)...(19): siRNA sense strand
caucauccaugcccuucug

SEQ ID NO: 1509055 - RNA, 19 nt, Homo sapiens
  misc_RNA (1)...(19): siRNA sense strand
gaggaaugcaucuagacuu

SEQ ID NO: 1509056 - RNA, 19 nt, Homo sapiens
  misc_RNA (1)...(19): siRNA sense strand
ggagaaaagguuugaagaa

SEQ ID NO: 1509057 - RNA, 19 nt, Homo sapiens
  misc_RNA (1)...(19): siRNA sense strand
gcaucgaaggugccacuuu

SEQ ID NO: 1509058 - RNA, 19 nt, Homo sapiens
  misc_RNA (1)...(19): siRNA sense strand
gagaagaaagcuuuuauca

SEQ ID NO: 1509059 - RNA, 19 nt, Homo sapiens
  misc_RNA (1)...(19): siRNA sense strand
ucccagagcugcacauggu

SEQ ID NO: 1509060 - RNA, 19 nt, Homo sapiens
  misc_RNA (1)...(19): siRNA sense strand
gacuggaucucaccuucau

SEQ ID NO: 1509061 - RNA, 19 nt, Homo sapiens
  misc_RNA (1)...(19): siRNA sense strand
ugacuuccaaggccacuaa

SEQ ID NO: 1509062 - RNA, 19 nt, Homo sapiens
  misc_RNA (1)...(19): siRNA sense strand
uggagagccugguggaaau

SEQ ID NO: 1509063 - RNA, 19 nt, Homo sapiens
  misc_RNA (1)...(19): siRNA sense strand
gagauguggaggaggauga

SEQ ID NO: 1509064 - RNA, 19 nt, Homo sapiens
  misc_RNA (1)...(19): siRNA sense strand
cacgaaggccugugagcua

SEQ ID NO: 1509065 - RNA, 19 nt, Homo sapiens
  misc_RNA (1)...(19): siRNA sense strand
ccaaggccacuaacccauu

SEQ ID NO: 1509066 - RNA, 19 nt, Homo sapiens
  misc_RNA (1)...(19): siRNA sense strand
gaucugaggaaugcaucua

SEQ ID NO: 1509067 - RNA, 19 nt, Homo sapiens
  misc_RNA (1)...(19): siRNA sense strand
ggaccuaguggaauacgau

SEQ ID NO: 1509068 - RNA, 19 nt, Homo sapiens
  misc_RNA (1)...(19): siRNA sense strand
aaacaucgcaacucugaag

SEQ ID NO: 1509069 - RNA, 19 nt, Homo sapiens
  misc_RNA (1)...(19): siRNA sense strand
uugcacaguuacaaagaaa

SEQ ID NO: 1509070 - RNA, 19 nt, Homo sapiens
  misc_RNA (1)...(19): siRNA sense strand
uuagcaagcagguguuuga

SEQ ID NO: 1509071 - RNA, 19 nt, Homo sapiens
  misc_RNA (1)...(19): siRNA sense strand
ggggaaaccugccaagcaa

SEQ ID NO: 1509072 - RNA, 19 nt, Homo sapiens
  misc_RNA (1)...(19): siRNA sense strand
ggacuggaucucaccuuca

SEQ ID NO: 1509073 - RNA, 19 nt, Homo sapiens
  misc_RNA (1)...(19): siRNA sense strand
gcuacucgcagagcaguuu

SEQ ID NO: 1509074 - RNA, 19 nt, Homo sapiens
  misc_RNA (1)...(19): siRNA sense strand
ggaaugcaucuagacuuau

SEQ ID NO: 1509075 - RNA, 19 nt, Homo sapiens
  misc_RNA (1)...(19): siRNA sense strand
caaacgagaguggcuggaa

SEQ ID NO: 1509076 - RNA, 19 nt, Homo sapiens
  misc_RNA (1)...(19): siRNA sense strand
guacaacaucaguggucua

SEQ ID NO: 1509077 - RNA, 19 nt, Homo sapiens
  misc_RNA (1)...(19): siRNA sense strand
uaccggcaguucauagaga

SEQ ID NO: 1509078 - RNA, 19 nt, Homo sapiens
  misc_RNA (1)...(19): siRNA sense strand
gagccugguggaaaucauu

SEQ ID NO: 1509079 - RNA, 19 nt, Homo sapiens
  misc_RNA (1)...(19): siRNA sense strand
gaaaaguugugggguaagu

SEQ ID NO: 1509080 - RNA, 19 nt, Homo sapiens
  misc_RNA (1)...(19): siRNA sense strand
gcgcagagagacuuugaag

SEQ ID NO: 1509081 - RNA, 19 nt, Homo sapiens
  misc_RNA (1)...(19): siRNA sense strand
agaagaagaaccagcuguu

SEQ ID NO: 1509082 - RNA, 19 nt, Homo sapiens
  misc_RNA (1)...(19): siRNA sense strand
gagagcaucccgcuuacgu

SEQ ID NO: 1509083 - RNA, 19 nt, Homo sapiens
  misc_RNA (1)...(19): siRNA sense strand
ugaggaugacgaagaagaa

SEQ ID NO: 1509084 - RNA, 19 nt, Homo sapiens
  misc_RNA (1)...(19): siRNA sense strand
caucauugaagccacuaaa

SEQ ID NO: 1509085 - RNA, 19 nt, Homo sapiens
  misc_RNA (1)...(19): siRNA sense strand
caaaguggaggagcgaguu

SEQ ID NO: 1509086 - RNA, 19 nt, Homo sapiens
  misc_RNA (1)...(19): siRNA sense strand
ugacgaagaagaagaacca

SEQ ID NO: 1509087 - RNA, 19 nt, Homo sapiens
  misc_RNA (1)...(19): siRNA sense strand
ucugaggaaugcaucuaga

SEQ ID NO: 1509088 - RNA, 19 nt, Homo sapiens
  misc_RNA (1)...(19): siRNA sense strand
ggaaaccugccaagcaacu

SEQ ID NO: 1509089 - RNA, 19 nt, Homo sapiens
  misc_RNA (1)...(19): siRNA sense strand
auuauagucuucgauguga

SEQ ID NO: 1509090 - RNA, 19 nt, Homo sapiens
  misc_RNA (1)...(19): siRNA sense strand
cuguucagcauguggauua

SEQ ID NO: 1509091 - RNA, 19 nt, Homo sapiens
  misc_RNA (1)...(19): siRNA sense strand
ggaucucaccuucaucauc

SEQ ID NO: 1509092 - RNA, 19 nt, Homo sapiens
  misc_RNA (1)...(19): siRNA sense strand
cugcuacucugccuuugug

SEQ ID NO: 1509093 - RNA, 19 nt, Homo sapiens
  misc_RNA (1)...(19): siRNA sense strand
ugccaugucuucuuuacca

SEQ ID NO: 1509094 - RNA, 19 nt, Homo sapiens
  misc_RNA (1)...(19): siRNA sense strand
gugccacuuuacucuauau

SEQ ID NO: 1509095 - RNA, 19 nt, Homo sapiens
  misc_RNA (1)...(19): siRNA sense strand
ccacccugcuugagaaggu

SEQ ID NO: 1509096 - RNA, 19 nt, Homo sapiens
  misc_RNA (1)...(19): siRNA sense strand
cuaacccauuugaggauga

SEQ ID NO: 1509097 - RNA, 19 nt, Homo sapiens
  misc_RNA (1)...(19): siRNA sense strand
gcaggauccagagaagaaa

SEQ ID NO: 1509098 - RNA, 19 nt, Homo sapiens
  misc_RNA (1)...(19): siRNA sense strand
ugagcaggauccagagaag

SEQ ID NO: 1509099 - RNA, 19 nt, Homo sapiens
  misc_RNA (1)...(19): siRNA sense strand
cacuaaacaucgcaacucu

SEQ ID NO: 1509100 - RNA, 19 nt, Homo sapiens
  misc_RNA (1)...(19): siRNA sense strand
ucagacagaaugcauccuu

SEQ ID NO: 1509101 - RNA, 19 nt, Homo sapiens
  misc_RNA (1)...(19): siRNA sense strand
uacaacaucaguggucuaa

SEQ ID NO: 1509102 - RNA, 19 nt, Homo sapiens
  misc_RNA (1)...(19): siRNA sense strand
uccaagaucugaggaaugc

SEQ ID NO: 1509103 - RNA, 19 nt, Homo sapiens
  misc_RNA (1)...(19): siRNA sense strand
gaagagguaugaagaagaa

SEQ ID NO: 1509104 - RNA, 19 nt, Homo sapiens
  misc_RNA (1)...(19): siRNA sense strand
gaaaucaaguucuucaagu

SEQ ID NO: 1509105 - RNA, 19 nt, Homo sapiens
  misc_RNA (1)...(19): siRNA sense strand
gagcaucucuuucaaugug

SEQ ID NO: 1509106 - RNA, 19 nt, Homo sapiens
  misc_RNA (1)...(19): siRNA sense strand
gcacaacugcugagaauga

SEQ ID NO: 1509107 - RNA, 19 nt, Homo sapiens
  misc_RNA (1)...(19): siRNA sense strand
cugaacaacugcaagaaua

SEQ ID NO: 1509108 - RNA, 19 nt, Homo sapiens
  misc_RNA (1)...(19): siRNA sense strand
gcgcacaacugcugagaau

SEQ ID NO: 1509109 - RNA, 19 nt, Homo sapiens
  misc_RNA (1)...(19): siRNA sense strand
caaguucgccuccuucauu

SEQ ID NO: 1509110 - RNA, 19 nt, Homo sapiens
  misc_RNA (1)...(19): siRNA sense strand
gcaggaggcuauggauuug

SEQ ID NO: 1509111 - RNA, 19 nt, Homo sapiens
  misc_RNA (1)...(19): siRNA sense strand
gaaauaaacaagcgcacaa

SEQ ID NO: 1509112 - RNA, 19 nt, Homo sapiens
  misc_RNA (1)...(19): siRNA sense strand
ucaaggugcugaacaacaa

SEQ ID NO: 1509113 - RNA, 19 nt, Homo sapiens
  misc_RNA (1)...(19): siRNA sense strand
gugaagcugucccuggaua

SEQ ID NO: 1509114 - RNA, 19 nt, Homo sapiens
  misc_RNA (1)...(19): siRNA sense strand
gcgaagugguggaggacua

SEQ ID NO: 1509115 - RNA, 19 nt, Homo sapiens
  misc_RNA (1)...(19): siRNA sense strand
gagguaugaagaagaaaua

SEQ ID NO: 1509116 - RNA, 19 nt, Homo sapiens
  misc_RNA (1)...(19): siRNA sense strand
ggcaggaggcuauggauuu

SEQ ID NO: 1509117 - RNA, 19 nt, Homo sapiens
  misc_RNA (1)...(19): siRNA sense strand
caagaagagguaugaagaa

SEQ ID NO: 1509118 - RNA, 19 nt, Homo sapiens
  misc_RNA (1)...(19): siRNA sense strand
gggaaagaccuuagcucua

SEQ ID NO: 1509119 - RNA, 19 nt, Homo sapiens
  misc_RNA (1)...(19): siRNA sense strand
agacugcgcucggagauug

SEQ ID NO: 1509120 - RNA, 19 nt, Homo sapiens
  misc_RNA (1)...(19): siRNA sense strand
cggagcaucucuuucaaug

SEQ ID NO: 1509121 - RNA, 19 nt, Homo sapiens
  misc_RNA (1)...(19): siRNA sense strand
caagguggaugcccuggau

SEQ ID NO: 1509122 - RNA, 19 nt, Homo sapiens
  misc_RNA (1)...(19): siRNA sense strand
caacugcugagaaugaauu

SEQ ID NO: 1509123 - RNA, 19 nt, Homo sapiens
  misc_RNA (1)...(19): siRNA sense strand
gaaugaauuuguggugcuu

SEQ ID NO: 1509124 - RNA, 19 nt, Homo sapiens
  misc_RNA (1)...(19): siRNA sense strand
caggauguccggagaauau

SEQ ID NO: 1509125 - RNA, 19 nt, Homo sapiens
  misc_RNA (1)...(19): siRNA sense strand
gaauuuguggugcuuaaga

SEQ ID NO: 1509126 - RNA, 19 nt, Homo sapiens
  misc_RNA (1)...(19): siRNA sense strand
gcauuucggucaucaacag

SEQ ID NO: 1509127 - RNA, 19 nt, Homo sapiens
  misc_RNA (1)...(19): siRNA sense strand
guggaggacuacaagaaga

SEQ ID NO: 1509128 - RNA, 19 nt, Homo sapiens
  misc_RNA (1)...(19): siRNA sense strand
gaagcugucccuggauauu

SEQ ID NO: 1509129 - RNA, 19 nt, Homo sapiens
  misc_RNA (1)...(19): siRNA sense strand
ggacugugcccucaaggau

SEQ ID NO: 1509130 - RNA, 19 nt, Homo sapiens
  misc_RNA (1)...(19): siRNA sense strand
ggaccuggacagcaucauu

SEQ ID NO: 1509131 - RNA, 19 nt, Homo sapiens
  misc_RNA (1)...(19): siRNA sense strand
ugaacaacugcaagaauaa

SEQ ID NO: 1509132 - RNA, 19 nt, Homo sapiens
  misc_RNA (1)...(19): siRNA sense strand
aaaucaaguucuucaagug

SEQ ID NO: 1509133 - RNA, 19 nt, Homo sapiens
  misc_RNA (1)...(19): siRNA sense strand
acaagaagagguaugaaga

SEQ ID NO: 1509134 - RNA, 19 nt, Homo sapiens
  misc_RNA (1)...(19): siRNA sense strand
auauugagaucgccaccua

SEQ ID NO: 1509135 - RNA, 19 nt, Homo sapiens
  misc_RNA (1)...(19): siRNA sense strand
gaccuggacagcaucauug

SEQ ID NO: 1509136 - RNA, 19 nt, Homo sapiens
  misc_RNA (1)...(19): siRNA sense strand
ugagguccgugcccaguau

SEQ ID NO: 1509137 - RNA, 19 nt, Homo sapiens
  misc_RNA (1)...(19): siRNA sense strand
agaucaaggugcugaacaa

SEQ ID NO: 1509138 - RNA, 19 nt, Homo sapiens
  misc_RNA (1)...(19): siRNA sense strand
ggauggagaaaucaaguuc

SEQ ID NO: 1509139 - RNA, 19 nt, Homo sapiens
  misc_RNA (1)...(19): siRNA sense strand
gcccggagcaucucuuuca

SEQ ID NO: 1509140 - RNA, 19 nt, Homo sapiens
  misc_RNA (1)...(19): siRNA sense strand
ggagcuggacccugaaauc

SEQ ID NO: 1509141 - RNA, 19 nt, Homo sapiens
  misc_RNA (1)...(19): siRNA sense strand
gcauggggaugaccugaaa

SEQ ID NO: 1509142 - RNA, 19 nt, Homo sapiens
  misc_RNA (1)...(19): siRNA sense strand
acaacaaguucgccuccuu

SEQ ID NO: 1509143 - RNA, 19 nt, Homo sapiens
  misc_RNA (1)...(19): siRNA sense strand
gaccugaacaacugcaaga

SEQ ID NO: 1509144 - RNA, 19 nt, Homo sapiens
  misc_RNA (1)...(19): siRNA sense strand
ggacguggacgcagcuuac

SEQ ID NO: 1509145 - RNA, 19 nt, Homo sapiens
  misc_RNA (1)...(19): siRNA sense strand
ggcuuuggauucagcaaug

SEQ ID NO: 1509146 - RNA, 19 nt, Homo sapiens
  misc_RNA (1)...(19): siRNA sense strand
gaacaacugcaagaauaac

SEQ ID NO: 1509147 - RNA, 19 nt, Homo sapiens
  misc_RNA (1)...(19): siRNA sense strand
gcaggauguccggagaaua

SEQ ID NO: 1509148 - RNA, 19 nt, Homo sapiens
  misc_RNA (1)...(19): siRNA sense strand
cagauccagucccacauca

SEQ ID NO: 1509149 - RNA, 19 nt, Homo sapiens
  misc_RNA (1)...(19): siRNA sense strand
aagaagagguaugaagaag

SEQ ID NO: 1509150 - RNA, 19 nt, Homo sapiens
  misc_RNA (1)...(19): siRNA sense strand
cacaacugcugagaaugaa

SEQ ID NO: 1509151 - RNA, 19 nt, Homo sapiens
  misc_RNA (1)...(19): siRNA sense strand
ggcgaggagugcaggaugu

SEQ ID NO: 1509152 - RNA, 19 nt, Homo sapiens
  misc_RNA (1)...(19): siRNA sense strand
gcugacccgucucauccaa

SEQ ID NO: 1509153 - RNA, 19 nt, Homo sapiens
  misc_RNA (1)...(19): siRNA sense strand
caucaggucaccaucaaca

SEQ ID NO: 1509154 - RNA, 19 nt, Homo sapiens
  misc_RNA (1)...(19): siRNA sense strand
aauuuguggugcuuaagaa

SEQ ID NO: 1509155 - RNA, 19 nt, Homo sapiens
  misc_RNA (1)...(19): siRNA sense strand
ccaacuccgugagcauuuc

SEQ ID NO: 1509156 - RNA, 19 nt, Homo sapiens
  misc_RNA (1)...(19): siRNA sense strand
gggcaggaggcuauggauu

SEQ ID NO: 1509157 - RNA, 19 nt, Homo sapiens
  misc_RNA (1)...(19): siRNA sense strand
ugacccgucucauccaaag

SEQ ID NO: 1509158 - RNA, 19 nt, Homo sapiens
  misc_RNA (1)...(19): siRNA sense strand
augaauuuguggugcuuaa

SEQ ID NO: 1509159 - RNA, 19 nt, Homo sapiens
  misc_RNA (1)...(19): siRNA sense strand
ucagcaaccugcggaagca

SEQ ID NO: 1509160 - RNA, 19 nt, Homo sapiens
  misc_RNA (1)...(19): siRNA sense strand
gagcauuucggucaucaac

SEQ ID NO: 1509161 - RNA, 19 nt, Homo sapiens
  misc_RNA (1)...(19): siRNA sense strand
acccugaaauccagaaagu

SEQ ID NO: 1509162 - RNA, 19 nt, Homo sapiens
  misc_RNA (1)...(19): siRNA sense strand
cacggaugcugcgcgagua

SEQ ID NO: 1509163 - RNA, 19 nt, Homo sapiens
  misc_RNA (1)...(19): siRNA sense strand
aaguucgccuccuucauug

SEQ ID NO: 1509164 - RNA, 19 nt, Homo sapiens
  misc_RNA (1)...(19): siRNA sense strand
ucuaagcucacccaccaaa

SEQ ID NO: 1509165 - RNA, 19 nt, Homo sapiens
  misc_RNA (1)...(19): siRNA sense strand
uccaucaggucaccaucaa

SEQ ID NO: 1509166 - RNA, 19 nt, Homo sapiens
  misc_RNA (1)...(19): siRNA sense strand
caggucaccaucaacaaga

SEQ ID NO: 1509167 - RNA, 19 nt, Homo sapiens
  misc_RNA (1)...(19): siRNA sense strand
ucaaguucuucaagugucu

SEQ ID NO: 1509168 - RNA, 19 nt, Homo sapiens
  misc_RNA (1)...(19): siRNA sense strand
agaagagguaugaagaaga

SEQ ID NO: 1509169 - RNA, 19 nt, Homo sapiens
  misc_RNA (1)...(19): siRNA sense strand
gguggaggacuacaagaag

SEQ ID NO: 1509170 - RNA, 19 nt, Homo sapiens
  misc_RNA (1)...(19): siRNA sense strand
gcagcauguuuggcagugu

SEQ ID NO: 1509171 - RNA, 19 nt, Homo sapiens
  misc_RNA (1)...(19): siRNA sense strand
gcgcgaguaccaagagcuu

SEQ ID NO: 1509172 - RNA, 19 nt, Homo sapiens
  misc_RNA (1)...(19): siRNA sense strand
ggacuacaagaagagguau

SEQ ID NO: 1509173 - RNA, 19 nt, Homo sapiens
  misc_RNA (1)...(19): siRNA sense strand
cugcugagaaugaauuugu

SEQ ID NO: 1509174 - RNA, 19 nt, Homo sapiens
  misc_RNA (1)...(19): siRNA sense strand
ggagugaaauguugucaua

SEQ ID NO: 1509175 - RNA, 19 nt, Homo sapiens
  misc_RNA (1)...(19): siRNA sense strand
caacgaagccauagucuuu

SEQ ID NO: 1509176 - RNA, 19 nt, Homo sapiens
  misc_RNA (1)...(19): siRNA sense strand
aagcagaggucauuggaua

SEQ ID NO: 1509177 - RNA, 19 nt, Homo sapiens
  misc_RNA (1)...(19): siRNA sense strand
ggacauaacaggagcauca

SEQ ID NO: 1509178 - RNA, 19 nt, Homo sapiens
  misc_RNA (1)...(19): siRNA sense strand
agacuaaaguucacagaaa

SEQ ID NO: 1509179 - RNA, 19 nt, Homo sapiens
  misc_RNA (1)...(19): siRNA sense strand
ucgaauaugucaccaauga

SEQ ID NO: 1509180 - RNA, 19 nt, Homo sapiens
  misc_RNA (1)...(19): siRNA sense strand
caaauccacuuguccauag

SEQ ID NO: 1509181 - RNA, 19 nt, Homo sapiens
  misc_RNA (1)...(19): siRNA sense strand
gcagacgacugaagaagag

SEQ ID NO: 1509182 - RNA, 19 nt, Homo sapiens
  misc_RNA (1)...(19): siRNA sense strand
gugaaagucucgcugaugu

SEQ ID NO: 1509183 - RNA, 19 nt, Homo sapiens
  misc_RNA (1)...(19): siRNA sense strand
ggugguggaucacuuccua

SEQ ID NO: 1509184 - RNA, 19 nt, Homo sapiens
  misc_RNA (1)...(19): siRNA sense strand
ggagaacagugaggacuuc

SEQ ID NO: 1509185 - RNA, 19 nt, Homo sapiens
  misc_RNA (1)...(19): siRNA sense strand
gcuggcaggcugaccauua

SEQ ID NO: 1509186 - RNA, 19 nt, Homo sapiens
  misc_RNA (1)...(19): siRNA sense strand
caucagaucccuaugugaa

SEQ ID NO: 1509187 - RNA, 19 nt, Homo sapiens
  misc_RNA (1)...(19): siRNA sense strand
caacucaacuugucaaacc

SEQ ID NO: 1509188 - RNA, 19 nt, Homo sapiens
  misc_RNA (1)...(19): siRNA sense strand
gggagugcauccuuuggaa

SEQ ID NO: 1509189 - RNA, 19 nt, Homo sapiens
  misc_RNA (1)...(19): siRNA sense strand
uggcgugucucucuucgua

SEQ ID NO: 1509190 - RNA, 19 nt, Homo sapiens
  misc_RNA (1)...(19): siRNA sense strand
cacgacagcugccaggauu

SEQ ID NO: 1509191 - RNA, 19 nt, Homo sapiens
  misc_RNA (1)...(19): siRNA sense strand
ggacuucagauccuuaugu

SEQ ID NO: 1509192 - RNA, 19 nt, Homo sapiens
  misc_RNA (1)...(19): siRNA sense strand
ggcauucccugguggagaa

SEQ ID NO: 1509193 - RNA, 19 nt, Homo sapiens
  misc_RNA (1)...(19): siRNA sense strand
cgagaacauugaccaaauc

SEQ ID NO: 1509194 - RNA, 19 nt, Homo sapiens
  misc_RNA (1)...(19): siRNA sense strand
uaucgaauaugucaccaau

SEQ ID NO: 1509195 - RNA, 19 nt, Homo sapiens
  misc_RNA (1)...(19): siRNA sense strand
gacuaaaguucacagaaag

SEQ ID NO: 1509196 - RNA, 19 nt, Homo sapiens
  misc_RNA (1)...(19): siRNA sense strand
ccgagaacauugaccaaau

SEQ ID NO: 1509197 - RNA, 19 nt, Homo sapiens
  misc_RNA (1)...(19): siRNA sense strand
guucucucgucaugacuua

SEQ ID NO: 1509198 - RNA, 19 nt, Homo sapiens
  misc_RNA (1)...(19): siRNA sense strand
gacagguucucucgucaug

SEQ ID NO: 1509199 - RNA, 19 nt, Homo sapiens
  misc_RNA (1)...(19): siRNA sense strand
gcugaccauuaccauuaua

SEQ ID NO: 1509200 - RNA, 19 nt, Homo sapiens
  misc_RNA (1)...(19): siRNA sense strand
gaaagucucgcugaugugu

SEQ ID NO: 1509201 - RNA, 19 nt, Homo sapiens
  misc_RNA (1)...(19): siRNA sense strand
caaggaauuuaaaggcaau

SEQ ID NO: 1509202 - RNA, 19 nt, Homo sapiens
  misc_RNA (1)...(19): siRNA sense strand
uuaacuacauggacacaga

SEQ ID NO: 1509203 - RNA, 19 nt, Homo sapiens
  misc_RNA (1)...(19): siRNA sense strand
ccaaauccacuuguccaua

SEQ ID NO: 1509204 - RNA, 19 nt, Homo sapiens
  misc_RNA (1)...(19): siRNA sense strand
uaaaggcaauggacauaac

SEQ ID NO: 1509205 - RNA, 19 nt, Homo sapiens
  misc_RNA (1)...(19): siRNA sense strand
aggcugaccauuaccauua

SEQ ID NO: 1509206 - RNA, 19 nt, Homo sapiens
  misc_RNA (1)...(19): siRNA sense strand
aaacaaaacaccagacuaa

SEQ ID NO: 1509207 - RNA, 19 nt, Homo sapiens
  misc_RNA (1)...(19): siRNA sense strand
aagcuucacuucucugugu

SEQ ID NO: 1509208 - RNA, 19 nt, Homo sapiens
  misc_RNA (1)...(19): siRNA sense strand
aaacauccaccaagaggaa

SEQ ID NO: 1509209 - RNA, 19 nt, Homo sapiens
  misc_RNA (1)...(19): siRNA sense strand
gagcaucagaucccuaugu

SEQ ID NO: 1509210 - RNA, 19 nt, Homo sapiens
  misc_RNA (1)...(19): siRNA sense strand
uauauaagcagaggucauu

SEQ ID NO: 1509211 - RNA, 19 nt, Homo sapiens
  misc_RNA (1)...(19): siRNA sense strand
cauggacuaugaccgugua

SEQ ID NO: 1509212 - RNA, 19 nt, Homo sapiens
  misc_RNA (1)...(19): siRNA sense strand
gcugccaggauuucauuua

SEQ ID NO: 1509213 - RNA, 19 nt, Homo sapiens
  misc_RNA (1)...(19): siRNA sense strand
uguguuugaugaaguguuu

SEQ ID NO: 1509214 - RNA, 19 nt, Homo sapiens
  misc_RNA (1)...(19): siRNA sense strand
gccaaguggugguggauca

SEQ ID NO: 1509215 - RNA, 19 nt, Homo sapiens
  misc_RNA (1)...(19): siRNA sense strand
gauggcagacgacugaaga

SEQ ID NO: 1509216 - RNA, 19 nt, Homo sapiens
  misc_RNA (1)...(19): siRNA sense strand
ugaacccuguguuugauga

SEQ ID NO: 1509217 - RNA, 19 nt, Homo sapiens
  misc_RNA (1)...(19): siRNA sense strand
ugaauccuguuuacaacga

SEQ ID NO: 1509218 - RNA, 19 nt, Homo sapiens
  misc_RNA (1)...(19): siRNA sense strand
ccaaugagcaggagaacag

SEQ ID NO: 1509219 - RNA, 19 nt, Homo sapiens
  misc_RNA (1)...(19): siRNA sense strand
gcagaggucauuggauaau

SEQ ID NO: 1509220 - RNA, 19 nt, Homo sapiens
  misc_RNA (1)...(19): siRNA sense strand
caaacccggacuucaauau

SEQ ID NO: 1509221 - RNA, 19 nt, Homo sapiens
  misc_RNA (1)...(19): siRNA sense strand
gaagccauagucuuugaug

SEQ ID NO: 1509222 - RNA, 19 nt, Homo sapiens
  misc_RNA (1)...(19): siRNA sense strand
aaauaugacugugacuuag

SEQ ID NO: 1509223 - RNA, 19 nt, Homo sapiens
  misc_RNA (1)...(19): siRNA sense strand
gaugacgggagacggagua

SEQ ID NO: 1509224 - RNA, 19 nt, Homo sapiens
  misc_RNA (1)...(19): siRNA sense strand
ugacuggaauugguagaau

SEQ ID NO: 1509225 - RNA, 19 nt, Homo sapiens
  misc_RNA (1)...(19): siRNA sense strand
gaauccuguuuacaacgaa

SEQ ID NO: 1509226 - RNA, 19 nt, Homo sapiens
  misc_RNA (1)...(19): siRNA sense strand
agugaaauguugucauauc

SEQ ID NO: 1509227 - RNA, 19 nt, Homo sapiens
  misc_RNA (1)...(19): siRNA sense strand
ggacuaugaccguguaggu

SEQ ID NO: 1509228 - RNA, 19 nt, Homo sapiens
  misc_RNA (1)...(19): siRNA sense strand
ccgaagacaacucaacuug

SEQ ID NO: 1509229 - RNA, 19 nt, Homo sapiens
  misc_RNA (1)...(19): siRNA sense strand
gacgggagacggaguaaca

SEQ ID NO: 1509230 - RNA, 19 nt, Homo sapiens
  misc_RNA (1)...(19): siRNA sense strand
ugucaaacccggacuucaa

SEQ ID NO: 1509231 - RNA, 19 nt, Homo sapiens
  misc_RNA (1)...(19): siRNA sense strand
guggaucacuuccuagacu

SEQ ID NO: 1509232 - RNA, 19 nt, Homo sapiens
  misc_RNA (1)...(19): siRNA sense strand
ggagacggaguaacagcaa

SEQ ID NO: 1509233 - RNA, 19 nt, Homo sapiens
  misc_RNA (1)...(19): siRNA sense strand
aaaccagaguuauauaagc

SEQ ID NO: 1509234 - RNA, 19 nt, Homo sapiens
  misc_RNA (1)...(19): siRNA sense strand
gcacgacagcugccaggau

SEQ ID NO: 1509235 - RNA, 19 nt, Homo sapiens
  misc_RNA (1)...(19): siRNA sense strand
caucggcgugugucaagua

SEQ ID NO: 1509236 - RNA, 19 nt, Homo sapiens
  misc_RNA (1)...(19): siRNA sense strand
acgaagccauagucuuuga

SEQ ID NO: 1509237 - RNA, 19 nt, Homo sapiens
  misc_RNA (1)...(19): siRNA sense strand
aagucucgcugauguguga

SEQ ID NO: 1509238 - RNA, 19 nt, Homo sapiens
  misc_RNA (1)...(19): siRNA sense strand
aaccagaguuauauaagca

SEQ ID NO: 1509239 - RNA, 19 nt, Homo sapiens
  misc_RNA (1)...(19): siRNA sense strand
gccaggauuucauuuacca

SEQ ID NO: 1509240 - RNA, 19 nt, Homo sapiens
  misc_RNA (1)...(19): siRNA sense strand
gacccugaacccuguguuu

SEQ ID NO: 1509241 - RNA, 19 nt, Homo sapiens
  misc_RNA (1)...(19): siRNA sense strand
ggacacagagaccaaugag

SEQ ID NO: 1509242 - RNA, 19 nt, Homo sapiens
  misc_RNA (1)...(19): siRNA sense strand
ggcagacgacugaagaaga

SEQ ID NO: 1509243 - RNA, 19 nt, Homo sapiens
  misc_RNA (1)...(19): siRNA sense strand
ggaauuuaaaggcaaugga

SEQ ID NO: 1509244 - RNA, 19 nt, Homo sapiens
  misc_RNA (1)...(19): siRNA sense strand
gacuucagauccuuauguc

SEQ ID NO: 1509245 - RNA, 19 nt, Homo sapiens
  misc_RNA (1)...(19): siRNA sense strand
ucaaacccggacuucaaua

SEQ ID NO: 1509246 - RNA, 19 nt, Homo sapiens
  misc_RNA (1)...(19): siRNA sense strand
ggcugaccauuaccauuau

SEQ ID NO: 1509247 - RNA, 19 nt, Homo sapiens
  misc_RNA (1)...(19): siRNA sense strand
ugggagagcugauguuuuc

SEQ ID NO: 1509248 - RNA, 19 nt, Homo sapiens
  misc_RNA (1)...(19): siRNA sense strand
cuucagauccuuaugucaa

SEQ ID NO: 1509249 - RNA, 19 nt, Homo sapiens
  misc_RNA (1)...(19): siRNA sense strand
gcauaauucaauccgaaga

SEQ ID NO: 1509250 - RNA, 19 nt, Homo sapiens
  misc_RNA (1)...(19): siRNA sense strand
gaucaucggcgugugucaa

SEQ ID NO: 1509251 - RNA, 19 nt, Homo sapiens
  misc_RNA (1)...(19): siRNA sense strand
ucagaucccuaugugaaag

SEQ ID NO: 1509252 - RNA, 19 nt, Homo sapiens
  misc_RNA (1)...(19): siRNA sense strand
gcgugucucucuucguauc

SEQ ID NO: 1509253 - RNA, 19 nt, Homo sapiens
  misc_RNA (1)...(19): siRNA sense strand
uuuggaaggauaucgaaua

SEQ ID NO: 1509254 - RNA, 19 nt, Homo sapiens
  misc_RNA (1)...(19): siRNA sense strand
cccagggagugcauccuuu

SEQ ID NO: 1509255 - RNA, 19 nt, Homo sapiens
  misc_RNA (1)...(19): siRNA sense strand
uccuagacuuggcugauuu

SEQ ID NO: 1509256 - RNA, 19 nt, Homo sapiens
  misc_RNA (1)...(19): siRNA sense strand
ccuugaauccuguuuacaa

SEQ ID NO: 1509257 - RNA, 19 nt, Homo sapiens
  misc_RNA (1)...(19): siRNA sense strand
caccuugaauccuguuuac

SEQ ID NO: 1509258 - RNA, 19 nt, Homo sapiens
  misc_RNA (1)...(19): siRNA sense strand
ccaccaagaggaacaccuu

SEQ ID NO: 1509259 - RNA, 19 nt, Homo sapiens
  misc_RNA (1)...(19): siRNA sense strand
ugugauggcagacgacuga

SEQ ID NO: 1509260 - RNA, 19 nt, Homo sapiens
  misc_RNA (1)...(19): siRNA sense strand
cauaacaggagcaucagau

SEQ ID NO: 1509261 - RNA, 19 nt, Homo sapiens
  misc_RNA (1)...(19): siRNA sense strand
caaaacaccagacuaaagu

SEQ ID NO: 1509262 - RNA, 19 nt, Homo sapiens
  misc_RNA (1)...(19): siRNA sense strand
uuaaaggcaauggacauaa

SEQ ID NO: 1509263 - RNA, 19 nt, Homo sapiens
  misc_RNA (1)...(19): siRNA sense strand
gaucugggagagcugaugu

SEQ ID NO: 1509264 - RNA, 19 nt, Homo sapiens
  misc_RNA (1)...(19): siRNA sense strand
aaacaccagacuaaaguuc

SEQ ID NO: 1509265 - RNA, 19 nt, Homo sapiens
  misc_RNA (1)...(19): siRNA sense strand
auccuuaugucaagaucua

SEQ ID NO: 1509266 - RNA, 19 nt, Homo sapiens
  misc_RNA (1)...(19): siRNA sense strand
ccaaugacaacguggaucu

SEQ ID NO: 1509267 - RNA, 19 nt, Homo sapiens
  misc_RNA (1)...(19): siRNA sense strand
cuacaaugaccuugaagca

SEQ ID NO: 1509268 - RNA, 19 nt, Homo sapiens
  misc_RNA (1)...(19): siRNA sense strand
cagacuaaaguucacagaa

SEQ ID NO: 1509269 - RNA, 19 nt, Homo sapiens
  misc_RNA (1)...(19): siRNA sense strand
ccugacuccuccaugaaga

SEQ ID NO: 1509270 - RNA, 19 nt, Homo sapiens
  misc_RNA (1)...(19): siRNA sense strand
gugaaauguugucauaucc

SEQ ID NO: 1509271 - RNA, 19 nt, Homo sapiens
  misc_RNA (1)...(19): siRNA sense strand
cugagaggcugggcagaga

SEQ ID NO: 1509272 - RNA, 19 nt, Homo sapiens
  misc_RNA (1)...(19): siRNA sense strand
cagcugccaggauuucauu

SEQ ID NO: 1509273 - RNA, 19 nt, Homo sapiens
  misc_RNA (1)...(19): siRNA sense strand
acaccuugaauccuguuua

SEQ ID NO: 1509274 - RNA, 19 nt, Homo sapiens
  misc_RNA (1)...(19): siRNA sense strand
ucacagagcugccaauuua

SEQ ID NO: 1509275 - RNA, 19 nt, Homo sapiens
  misc_RNA (1)...(19): siRNA sense strand
ggacauccaugacugauua

SEQ ID NO: 1509276 - RNA, 19 nt, Homo sapiens
  misc_RNA (1)...(19): siRNA sense strand
gaaauaagcccucaaauca

SEQ ID NO: 1509277 - RNA, 19 nt, Homo sapiens
  misc_RNA (1)...(19): siRNA sense strand
caaagaaggucaugaguga

SEQ ID NO: 1509278 - RNA, 19 nt, Homo sapiens
  misc_RNA (1)...(19): siRNA sense strand
gaacaggacucugaaguug

SEQ ID NO: 1509279 - RNA, 19 nt, Homo sapiens
  misc_RNA (1)...(19): siRNA sense strand
gaaaucagaggcauacuua

SEQ ID NO: 1509280 - RNA, 19 nt, Homo sapiens
  misc_RNA (1)...(19): siRNA sense strand
gaucaaggcuacucugaaa

SEQ ID NO: 1509281 - RNA, 19 nt, Homo sapiens
  misc_RNA (1)...(19): siRNA sense strand
gauggaaucugucacauug

SEQ ID NO: 1509282 - RNA, 19 nt, Homo sapiens
  misc_RNA (1)...(19): siRNA sense strand
caaggaaacuuaucucugu

SEQ ID NO: 1509283 - RNA, 19 nt, Homo sapiens
  misc_RNA (1)...(19): siRNA sense strand
gagcaagucuggagaaaca

SEQ ID NO: 1509284 - RNA, 19 nt, Homo sapiens
  misc_RNA (1)...(19): siRNA sense strand
ggagaacaaacuuacauua

SEQ ID NO: 1509285 - RNA, 19 nt, Homo sapiens
  misc_RNA (1)...(19): siRNA sense strand
gcaaugaagucagcaaguu

SEQ ID NO: 1509286 - RNA, 19 nt, Homo sapiens
  misc_RNA (1)...(19): siRNA sense strand
gguagcaucuugucuuauu

SEQ ID NO: 1509287 - RNA, 19 nt, Homo sapiens
  misc_RNA (1)...(19): siRNA sense strand
aaagugaaguggugaaauu

SEQ ID NO: 1509288 - RNA, 19 nt, Homo sapiens
  misc_RNA (1)...(19): siRNA sense strand
ggaaauaagcccucaaauc

SEQ ID NO: 1509289 - RNA, 19 nt, Homo sapiens
  misc_RNA (1)...(19): siRNA sense strand
ccaaucagcuggcaaguca

SEQ ID NO: 1509290 - RNA, 19 nt, Homo sapiens
  misc_RNA (1)...(19): siRNA sense strand
ggacuaaagcucucaagaa

SEQ ID NO: 1509291 - RNA, 19 nt, Homo sapiens
  misc_RNA (1)...(19): siRNA sense strand
gagcaagugucauuaagug

SEQ ID NO: 1509292 - RNA, 19 nt, Homo sapiens
  misc_RNA (1)...(19): siRNA sense strand
ccaacaugauucucuauuu

SEQ ID NO: 1509293 - RNA, 19 nt, Homo sapiens
  misc_RNA (1)...(19): siRNA sense strand
gagauggucuguccgaaga

SEQ ID NO: 1509294 - RNA, 19 nt, Homo sapiens
  misc_RNA (1)...(19): siRNA sense strand
caacagggaagaauuacua

SEQ ID NO: 1509295 - RNA, 19 nt, Homo sapiens
  misc_RNA (1)...(19): siRNA sense strand
gcaaguuccugugcuauug

SEQ ID NO: 1509296 - RNA, 19 nt, Homo sapiens
  misc_RNA (1)...(19): siRNA sense strand
uuacagaaguggucagaaa

SEQ ID NO: 1509297 - RNA, 19 nt, Homo sapiens
  misc_RNA (1)...(19): siRNA sense strand
guuacgagcuggacucauu

SEQ ID NO: 1509298 - RNA, 19 nt, Homo sapiens
  misc_RNA (1)...(19): siRNA sense strand
uuacaggucuugauuccua

SEQ ID NO: 1509299 - RNA, 19 nt, Homo sapiens
  misc_RNA (1)...(19): siRNA sense strand
cuaaagcucucaagaagug

SEQ ID NO: 1509300 - RNA, 19 nt, Homo sapiens
  misc_RNA (1)...(19): siRNA sense strand
ggucaucccugcagacaug

SEQ ID NO: 1509301 - RNA, 19 nt, Homo sapiens
  misc_RNA (1)...(19): siRNA sense strand
ccagugacuuugccguuua

SEQ ID NO: 1509302 - RNA, 19 nt, Homo sapiens
  misc_RNA (1)...(19): siRNA sense strand
ugacaacagggaagaauua

SEQ ID NO: 1509303 - RNA, 19 nt, Homo sapiens
  misc_RNA (1)...(19): siRNA sense strand
gaaucuggcugagcaggua

SEQ ID NO: 1509304 - RNA, 19 nt, Homo sapiens
  misc_RNA (1)...(19): siRNA sense strand
caagugacaucaaaguaug

SEQ ID NO: 1509305 - RNA, 19 nt, Homo sapiens
  misc_RNA (1)...(19): siRNA sense strand
ugaaucaagugacaucaaa

SEQ ID NO: 1509306 - RNA, 19 nt, Homo sapiens
  misc_RNA (1)...(19): siRNA sense strand
ggaaagaugaaucaaguga

SEQ ID NO: 1509307 - RNA, 19 nt, Homo sapiens
  misc_RNA (1)...(19): siRNA sense strand
aaagugauguggauuucua

SEQ ID NO: 1509308 - RNA, 19 nt, Homo sapiens
  misc_RNA (1)...(19): siRNA sense strand
ggaaggcaccggauuguug

SEQ ID NO: 1509309 - RNA, 19 nt, Homo sapiens
  misc_RNA (1)...(19): siRNA sense strand
gacuaaagcucucaagaag

SEQ ID NO: 1509310 - RNA, 19 nt, Homo sapiens
  misc_RNA (1)...(19): siRNA sense strand
cuuagaggaugcaccauua

SEQ ID NO: 1509311 - RNA, 19 nt, Homo sapiens
  misc_RNA (1)...(19): siRNA sense strand
ccaaucaaguuguggugua

SEQ ID NO: 1509312 - RNA, 19 nt, Homo sapiens
  misc_RNA (1)...(19): siRNA sense strand
aagauggccuggaagguua

SEQ ID NO: 1509313 - RNA, 19 nt, Homo sapiens
  misc_RNA (1)...(19): siRNA sense strand
aaacaaggccuucguacuu

SEQ ID NO: 1509314 - RNA, 19 nt, Homo sapiens
  misc_RNA (1)...(19): siRNA sense strand
ggagaaacaacagaugaua

SEQ ID NO: 1509315 - RNA, 19 nt, Homo sapiens
  misc_RNA (1)...(19): siRNA sense strand
gagcugccaauuuauauuu

SEQ ID NO: 1509316 - RNA, 19 nt, Homo sapiens
  misc_RNA (1)...(19): siRNA sense strand
gcaacugccugaacuuuac

SEQ ID NO: 1509317 - RNA, 19 nt, Homo sapiens
  misc_RNA (1)...(19): siRNA sense strand
gcacagaaacagagaaaca

SEQ ID NO: 1509318 - RNA, 19 nt, Homo sapiens
  misc_RNA (1)...(19): siRNA sense strand
gagcagacucccucucuuu

SEQ ID NO: 1509319 - RNA, 19 nt, Homo sapiens
  misc_RNA (1)...(19): siRNA sense strand
gauuacaccucggcucuuu

SEQ ID NO: 1509320 - RNA, 19 nt, Homo sapiens
  misc_RNA (1)...(19): siRNA sense strand
ccuagaacauuccaacaaa

SEQ ID NO: 1509321 - RNA, 19 nt, Homo sapiens
  misc_RNA (1)...(19): siRNA sense strand
gcaggacaguucauaaugg

SEQ ID NO: 1509322 - RNA, 19 nt, Homo sapiens
  misc_RNA (1)...(19): siRNA sense strand
guggugguccuuacaauua

SEQ ID NO: 1509323 - RNA, 19 nt, Homo sapiens
  misc_RNA (1)...(19): siRNA sense strand
gggaagaauuacuacuuga

SEQ ID NO: 1509324 - RNA, 19 nt, Homo sapiens
  misc_RNA (1)...(19): siRNA sense strand
acaaugaccucagcagauu

SEQ ID NO: 1509325 - RNA, 19 nt, Homo sapiens
  misc_RNA (1)...(19): siRNA sense strand
ccaguaggauagaauguga

SEQ ID NO: 1509326 - RNA, 19 nt, Homo sapiens
  misc_RNA (1)...(19): siRNA sense strand
gaaguggucagaaaucaga

SEQ ID NO: 1509327 - RNA, 19 nt, Homo sapiens
  misc_RNA (1)...(19): siRNA sense strand
gaagcugucucugaagaug

SEQ ID NO: 1509328 - RNA, 19 nt, Homo sapiens
  misc_RNA (1)...(19): siRNA sense strand
gaaguucuccggagccuau

SEQ ID NO: 1509329 - RNA, 19 nt, Homo sapiens
  misc_RNA (1)...(19): siRNA sense strand
guauaagcgcagcaaauua

SEQ ID NO: 1509330 - RNA, 19 nt, Homo sapiens
  misc_RNA (1)...(19): siRNA sense strand
gguauaagcgcagcaaauu

SEQ ID NO: 1509331 - RNA, 19 nt, Homo sapiens
  misc_RNA (1)...(19): siRNA sense strand
gaauacgaacaacaaagua

SEQ ID NO: 1509332 - RNA, 19 nt, Homo sapiens
  misc_RNA (1)...(19): siRNA sense strand
gaaacuaaggccuuugaga

SEQ ID NO: 1509333 - RNA, 19 nt, Homo sapiens
  misc_RNA (1)...(19): siRNA sense strand
ggaugacuaugccaaacaa

SEQ ID NO: 1509334 - RNA, 19 nt, Homo sapiens
  misc_RNA (1)...(19): siRNA sense strand
ccagugaagugccucauuc

SEQ ID NO: 1509335 - RNA, 19 nt, Homo sapiens
  misc_RNA (1)...(19): siRNA sense strand
aaaguaugcuaaccaauca

SEQ ID NO: 1509336 - RNA, 19 nt, Homo sapiens
  misc_RNA (1)...(19): siRNA sense strand
aguacacacuucugaauuu

SEQ ID NO: 1509337 - RNA, 19 nt, Homo sapiens
  misc_RNA (1)...(19): siRNA sense strand
caaaguaugcuaaccaauc

SEQ ID NO: 1509338 - RNA, 19 nt, Homo sapiens
  misc_RNA (1)...(19): siRNA sense strand
gcaagugucauuaagugaa

SEQ ID NO: 1509339 - RNA, 19 nt, Homo sapiens
  misc_RNA (1)...(19): siRNA sense strand
cagaguggcugaggaauca

SEQ ID NO: 1509340 - RNA, 19 nt, Homo sapiens
  misc_RNA (1)...(19): siRNA sense strand
acaaggccuucguacuuua

SEQ ID NO: 1509341 - RNA, 19 nt, Homo sapiens
  misc_RNA (1)...(19): siRNA sense strand
gaaacaacagaugauagua

SEQ ID NO: 1509342 - RNA, 19 nt, Homo sapiens
  misc_RNA (1)...(19): siRNA sense strand
gaacaucgccgaggaucug

SEQ ID NO: 1509343 - RNA, 19 nt, Homo sapiens
  misc_RNA (1)...(19): siRNA sense strand
uaucauaucaccacuguug

SEQ ID NO: 1509344 - RNA, 19 nt, Homo sapiens
  misc_RNA (1)...(19): siRNA sense strand
ucugagagcuaagcacuuu

SEQ ID NO: 1509345 - RNA, 19 nt, Homo sapiens
  misc_RNA (1)...(19): siRNA sense strand
ggaagaauuacuacuugaa

SEQ ID NO: 1509346 - RNA, 19 nt, Homo sapiens
  misc_RNA (1)...(19): siRNA sense strand
gauguaguguggcaggauu

SEQ ID NO: 1509347 - RNA, 19 nt, Homo sapiens
  misc_RNA (1)...(19): siRNA sense strand
gaggaugcaccauuagaaa

SEQ ID NO: 1509348 - RNA, 19 nt, Homo sapiens
  misc_RNA (1)...(19): siRNA sense strand
aaagaugaaucaagugaca

SEQ ID NO: 1509349 - RNA, 19 nt, Homo sapiens
  misc_RNA (1)...(19): siRNA sense strand
ggagccagaugacaagcuu

SEQ ID NO: 1509350 - RNA, 19 nt, Homo sapiens
  misc_RNA (1)...(19): siRNA sense strand
gaagagcaaacacagaugu

SEQ ID NO: 1509351 - RNA, 19 nt, Homo sapiens
  misc_RNA (1)...(19): siRNA sense strand
caucauugguagcaucuug

SEQ ID NO: 1509352 - RNA, 19 nt, Homo sapiens
  misc_RNA (1)...(19): siRNA sense strand
auacugacaucuuugcauu

SEQ ID NO: 1509353 - RNA, 19 nt, Homo sapiens
  misc_RNA (1)...(19): siRNA sense strand
auaagaauguggccuaugu

SEQ ID NO: 1509354 - RNA, 19 nt, Homo sapiens
  misc_RNA (1)...(19): siRNA sense strand
gauguuagcaugauacaag

SEQ ID NO: 1509355 - RNA, 19 nt, Homo sapiens
  misc_RNA (1)...(19): siRNA sense strand
aauaagcccucaaaucauc

SEQ ID NO: 1509356 - RNA, 19 nt, Homo sapiens
  misc_RNA (1)...(19): siRNA sense strand
ugugaagcuuggacaaaua

SEQ ID NO: 1509357 - RNA, 19 nt, Homo sapiens
  misc_RNA (1)...(19): siRNA sense strand
ccuggaagguuaucggaaa

SEQ ID NO: 1509358 - RNA, 19 nt, Homo sapiens
  misc_RNA (1)...(19): siRNA sense strand
gaaagcaagaguuugacuu

SEQ ID NO: 1509359 - RNA, 19 nt, Homo sapiens
  misc_RNA (1)...(19): siRNA sense strand
caaugauguuagcaugaua

SEQ ID NO: 1509360 - RNA, 19 nt, Homo sapiens
  misc_RNA (1)...(19): siRNA sense strand
gauguggauuucuacaaug

SEQ ID NO: 1509361 - RNA, 19 nt, Homo sapiens
  misc_RNA (1)...(19): siRNA sense strand
gauguccucugguguguca

SEQ ID NO: 1509362 - RNA, 19 nt, Homo sapiens
  misc_RNA (1)...(19): siRNA sense strand
aauuaaagauggccuggaa

SEQ ID NO: 1509363 - RNA, 19 nt, Homo sapiens
  misc_RNA (1)...(19): siRNA sense strand
guagcaucuugucuuauuu

SEQ ID NO: 1509364 - RNA, 19 nt, Homo sapiens
  misc_RNA (1)...(19): siRNA sense strand
gagccuaugugaacaaucg

SEQ ID NO: 1509365 - RNA, 19 nt, Homo sapiens
  misc_RNA (1)...(19): siRNA sense strand
gugaaagcccaaacaauga

SEQ ID NO: 1509366 - RNA, 19 nt, Homo sapiens
  misc_RNA (1)...(19): siRNA sense strand
gaagcuuggacaaauauau

SEQ ID NO: 1509367 - RNA, 19 nt, Homo sapiens
  misc_RNA (1)...(19): siRNA sense strand
ugacaucuuugcauuugga

SEQ ID NO: 1509368 - RNA, 19 nt, Homo sapiens
  misc_RNA (1)...(19): siRNA sense strand
ggaggacccuggaguuugc

SEQ ID NO: 1509369 - RNA, 19 nt, Homo sapiens
  misc_RNA (1)...(19): siRNA sense strand
gagaacaaacuuacauuac

SEQ ID NO: 1509370 - RNA, 19 nt, Homo sapiens
  misc_RNA (1)...(19): siRNA sense strand
gaagcggccuuaguguaug

SEQ ID NO: 1509371 - RNA, 19 nt, Homo sapiens
  misc_RNA (1)...(19): siRNA sense strand
caaguucuccaucgcuuaa

SEQ ID NO: 1509372 - RNA, 19 nt, Homo sapiens
  misc_RNA (1)...(19): siRNA sense strand
ccaaugauguuagcaugau

SEQ ID NO: 1509373 - RNA, 19 nt, Homo sapiens
  misc_RNA (1)...(19): siRNA sense strand
aaacuaaggccuuugagau

SEQ ID NO: 1509374 - RNA, 19 nt, Homo sapiens
  misc_RNA (1)...(19): siRNA sense strand
gcaaagcguuuaacaaguu

SEQ ID NO: 1509375 - RNA, 19 nt, Homo sapiens
  misc_RNA (1)...(19): siRNA sense strand
gcaaacaccucuaccaguu

SEQ ID NO: 1509376 - RNA, 19 nt, Homo sapiens
  misc_RNA (1)...(19): siRNA sense strand
caacauaggagaauucaua

SEQ ID NO: 1509377 - RNA, 19 nt, Homo sapiens
  misc_RNA (1)...(19): siRNA sense strand
gcaauagacuuacucaaug

SEQ ID NO: 1509378 - RNA, 19 nt, Homo sapiens
  misc_RNA (1)...(19): siRNA sense strand
aaacagugcucucaccuaa

SEQ ID NO: 1509379 - RNA, 19 nt, Homo sapiens
  misc_RNA (1)...(19): siRNA sense strand
caauagauguucaaaccua

SEQ ID NO: 1509380 - RNA, 19 nt, Homo sapiens
  misc_RNA (1)...(19): siRNA sense strand
cuacaaaugugaugaaugu

SEQ ID NO: 1509381 - RNA, 19 nt, Homo sapiens
  misc_RNA (1)...(19): siRNA sense strand
cuacaaaugugaagaaugu

SEQ ID NO: 1509382 - RNA, 19 nt, Homo sapiens
  misc_RNA (1)...(19): siRNA sense strand
cuacaaaugugaagaaugu

SEQ ID NO: 1509383 - RNA, 19 nt, Homo sapiens
  misc_RNA (1)...(19): siRNA sense strand
cuacaaaugugaagaaugu

SEQ ID NO: 1509384 - RNA, 19 nt, Homo sapiens
  misc_RNA (1)...(19): siRNA sense strand
cuacaaaugugaagaaugu

SEQ ID NO: 1509385 - RNA, 19 nt, Homo sapiens
  misc_RNA (1)...(19): siRNA sense strand
gcagaaccuuuacucaauu

SEQ ID NO: 1509386 - RNA, 19 nt, Homo sapiens
  misc_RNA (1)...(19): siRNA sense strand
gaauguggcagaaccuuua

SEQ ID NO: 1509387 - RNA, 19 nt, Homo sapiens
  misc_RNA (1)...(19): siRNA sense strand
gagagaaacccuacaaaug

SEQ ID NO: 1509388 - RNA, 19 nt, Homo sapiens
  misc_RNA (1)...(19): siRNA sense strand
gaagagaaacccuacaaau

SEQ ID NO: 1509389 - RNA, 19 nt, Homo sapiens
  misc_RNA (1)...(19): siRNA sense strand
gagagaaacccuacaaaug

SEQ ID NO: 1509390 - RNA, 19 nt, Homo sapiens
  misc_RNA (1)...(19): siRNA sense strand
gagagaaacccuacaaaug

SEQ ID NO: 1509391 - RNA, 19 nt, Homo sapiens
  misc_RNA (1)...(19): siRNA sense strand
gagagaaacccuacaaaug

SEQ ID NO: 1509392 - RNA, 19 nt, Homo sapiens
  misc_RNA (1)...(19): siRNA sense strand
gagagaaacccuacaaaug

SEQ ID NO: 1509393 - RNA, 19 nt, Homo sapiens
  misc_RNA (1)...(19): siRNA sense strand
gagagaaacccuacaaaug

SEQ ID NO: 1509394 - RNA, 19 nt, Homo sapiens
  misc_RNA (1)...(19): siRNA sense strand
gagagaaacccuacaaaug

SEQ ID NO: 1509395 - RNA, 19 nt, Homo sapiens
  misc_RNA (1)...(19): siRNA sense strand
cuacaaaugugacgaaugu

SEQ ID NO: 1509396 - RNA, 19 nt, Homo sapiens
  misc_RNA (1)...(19): siRNA sense strand
ggaggucaauccuuacuga

SEQ ID NO: 1509397 - RNA, 19 nt, Homo sapiens
  misc_RNA (1)...(19): siRNA sense strand
ugaagaauguggcaaaguu

SEQ ID NO: 1509398 - RNA, 19 nt, Homo sapiens
  misc_RNA (1)...(19): siRNA sense strand
gagagaagccauacaaaug

SEQ ID NO: 1509399 - RNA, 19 nt, Homo sapiens
  misc_RNA (1)...(19): siRNA sense strand
gagaggaaccugacaaaug

SEQ ID NO: 1509400 - RNA, 19 nt, Homo sapiens
  misc_RNA (1)...(19): siRNA sense strand
ugacgaauguggcaaaguu

SEQ ID NO: 1509401 - RNA, 19 nt, Homo sapiens
  misc_RNA (1)...(19): siRNA sense strand
agacauaggagaauucaua

SEQ ID NO: 1509402 - RNA, 19 nt, Homo sapiens
  misc_RNA (1)...(19): siRNA sense strand
agagaaaccuuacaagugu

SEQ ID NO: 1509403 - RNA, 19 nt, Homo sapiens
  misc_RNA (1)...(19): siRNA sense strand
gagaaacccuacaaaugug

SEQ ID NO: 1509404 - RNA, 19 nt, Homo sapiens
  misc_RNA (1)...(19): siRNA sense strand
gagaaacccuacaaaugug

SEQ ID NO: 1509405 - RNA, 19 nt, Homo sapiens
  misc_RNA (1)...(19): siRNA sense strand
gagaaacccuacaaaugug

SEQ ID NO: 1509406 - RNA, 19 nt, Homo sapiens
  misc_RNA (1)...(19): siRNA sense strand
gagaaacccuacaaaugug

SEQ ID NO: 1509407 - RNA, 19 nt, Homo sapiens
  misc_RNA (1)...(19): siRNA sense strand
gagagaaaccuuacaagug

SEQ ID NO: 1509408 - RNA, 19 nt, Homo sapiens
  misc_RNA (1)...(19): siRNA sense strand
gagaaacccuacaaaugug

SEQ ID NO: 1509409 - RNA, 19 nt, Homo sapiens
  misc_RNA (1)...(19): siRNA sense strand
gagagaaacgcuacaaaug

SEQ ID NO: 1509410 - RNA, 19 nt, Homo sapiens
  misc_RNA (1)...(19): siRNA sense strand
ggcagaaccuuuacucaau

SEQ ID NO: 1509411 - RNA, 19 nt, Homo sapiens
  misc_RNA (1)...(19): siRNA sense strand
gaacugugaaugaagguaa

SEQ ID NO: 1509412 - RNA, 19 nt, Homo sapiens
  misc_RNA (1)...(19): siRNA sense strand
agaggaaccugacaaaugu

SEQ ID NO: 1509413 - RNA, 19 nt, Homo sapiens
  misc_RNA (1)...(19): siRNA sense strand
ugaagaauguggcaacguu

SEQ ID NO: 1509414 - RNA, 19 nt, Homo sapiens
  misc_RNA (1)...(19): siRNA sense strand
gcagaaagaauauugcaau

SEQ ID NO: 1509415 - RNA, 19 nt, Homo sapiens
  misc_RNA (1)...(19): siRNA sense strand
ggagagaaacgcuacaaau

SEQ ID NO: 1509416 - RNA, 19 nt, Homo sapiens
  misc_RNA (1)...(19): siRNA sense strand
ggagagaaacccuacaaau

SEQ ID NO: 1509417 - RNA, 19 nt, Homo sapiens
  misc_RNA (1)...(19): siRNA sense strand
ggagagaaacccuacaaau

SEQ ID NO: 1509418 - RNA, 19 nt, Homo sapiens
  misc_RNA (1)...(19): siRNA sense strand
ggagagaaacccuacaaau

SEQ ID NO: 1509419 - RNA, 19 nt, Homo sapiens
  misc_RNA (1)...(19): siRNA sense strand
ggagagaaacccuacaaau

SEQ ID NO: 1509420 - RNA, 19 nt, Homo sapiens
  misc_RNA (1)...(19): siRNA sense strand
ggagagaaacccuacaaau

SEQ ID NO: 1509421 - RNA, 19 nt, Homo sapiens
  misc_RNA (1)...(19): siRNA sense strand
ggagagaaacccuacaaau

SEQ ID NO: 1509422 - RNA, 19 nt, Homo sapiens
  misc_RNA (1)...(19): siRNA sense strand
ggagagaaacccuacaaau

SEQ ID NO: 1509423 - RNA, 19 nt, Homo sapiens
  misc_RNA (1)...(19): siRNA sense strand
ggagagaagccauacaaau

SEQ ID NO: 1509424 - RNA, 19 nt, Homo sapiens
  misc_RNA (1)...(19): siRNA sense strand
uaccaauccucaauccuua

SEQ ID NO: 1509425 - RNA, 19 nt, Homo sapiens
  misc_RNA (1)...(19): siRNA sense strand
gaagaauguggcaaaguuu

SEQ ID NO: 1509426 - RNA, 19 nt, Homo sapiens
  misc_RNA (1)...(19): siRNA sense strand
gaagaaugugggaaaguuu

SEQ ID NO: 1509427 - RNA, 19 nt, Homo sapiens
  misc_RNA (1)...(19): siRNA sense strand
ucucaaaccuuacacaaca

SEQ ID NO: 1509428 - RNA, 19 nt, Homo sapiens
  misc_RNA (1)...(19): siRNA sense strand
gagaaacccuacaaaugca

SEQ ID NO: 1509429 - RNA, 19 nt, Homo sapiens
  misc_RNA (1)...(19): siRNA sense strand
uuacaagugugaagaaugu

SEQ ID NO: 1509430 - RNA, 19 nt, Homo sapiens
  misc_RNA (1)...(19): siRNA sense strand
ucucaaaccuuacucaaca

SEQ ID NO: 1509431 - RNA, 19 nt, Homo sapiens
  misc_RNA (1)...(19): siRNA sense strand
gagaaacccuacaaaugca

SEQ ID NO: 1509432 - RNA, 19 nt, Homo sapiens
  misc_RNA (1)...(19): siRNA sense strand
caauagacuuacucaaugu

SEQ ID NO: 1509433 - RNA, 19 nt, Homo sapiens
  misc_RNA (1)...(19): siRNA sense strand
ugaagaaugugggaaaguu

SEQ ID NO: 1509434 - RNA, 19 nt, Homo sapiens
  misc_RNA (1)...(19): siRNA sense strand
aacaaguucucaaaccuua

SEQ ID NO: 1509435 - RNA, 19 nt, Homo sapiens
  misc_RNA (1)...(19): siRNA sense strand
ugaugaaugugacaaaguu

SEQ ID NO: 1509436 - RNA, 19 nt, Homo sapiens
  misc_RNA (1)...(19): siRNA sense strand
gaauguggcagaaauuuua

SEQ ID NO: 1509437 - RNA, 19 nt, Homo sapiens
  misc_RNA (1)...(19): siRNA sense strand
ggagagaaaccuuacaagu

SEQ ID NO: 1509438 - RNA, 19 nt, Homo sapiens
  misc_RNA (1)...(19): siRNA sense strand
gagaagccauacaaaugug

SEQ ID NO: 1509439 - RNA, 19 nt, Homo sapiens
  misc_RNA (1)...(19): siRNA sense strand
ggucaauccuuacugaaca

SEQ ID NO: 1509440 - RNA, 19 nt, Homo sapiens
  misc_RNA (1)...(19): siRNA sense strand
gugaaagacuggagaacug

SEQ ID NO: 1509441 - RNA, 19 nt, Homo sapiens
  misc_RNA (1)...(19): siRNA sense strand
agagaaacccuacaaaugu

SEQ ID NO: 1509442 - RNA, 19 nt, Homo sapiens
  misc_RNA (1)...(19): siRNA sense strand
uaaagaauguggcaaagcu

SEQ ID NO: 1509443 - RNA, 19 nt, Homo sapiens
  misc_RNA (1)...(19): siRNA sense strand
agagaaacccuacaaaugu

SEQ ID NO: 1509444 - RNA, 19 nt, Homo sapiens
  misc_RNA (1)...(19): siRNA sense strand
gagugaaacccuacaaaug

SEQ ID NO: 1509445 - RNA, 19 nt, Homo sapiens
  misc_RNA (1)...(19): siRNA sense strand
aacaaguucucaagccuua

SEQ ID NO: 1509446 - RNA, 19 nt, Homo sapiens
  misc_RNA (1)...(19): siRNA sense strand
agagaaacccuacaaaugu

SEQ ID NO: 1509447 - RNA, 19 nt, Homo sapiens
  misc_RNA (1)...(19): siRNA sense strand
cuaccaaugugaagaaugu

SEQ ID NO: 1509448 - RNA, 19 nt, Homo sapiens
  misc_RNA (1)...(19): siRNA sense strand
agagaaacccuacaaaugu

SEQ ID NO: 1509449 - RNA, 19 nt, Homo sapiens
  misc_RNA (1)...(19): siRNA sense strand
gcucacaccuaacuagaca

SEQ ID NO: 1509450 - RNA, 19 nt, Homo sapiens
  misc_RNA (1)...(19): siRNA sense strand
agagaaacccuacaaaugu

SEQ ID NO: 1509451 - RNA, 19 nt, Homo sapiens
  misc_RNA (1)...(19): siRNA sense strand
agagaaacccuacaaaugu

SEQ ID NO: 1509452 - RNA, 19 nt, Homo sapiens
  misc_RNA (1)...(19): siRNA sense strand
cuaaguagccauaagagaa

SEQ ID NO: 1509453 - RNA, 19 nt, Homo sapiens
  misc_RNA (1)...(19): siRNA sense strand
uaccaauccucaauccaua

SEQ ID NO: 1509454 - RNA, 19 nt, Homo sapiens
  misc_RNA (1)...(19): siRNA sense strand
ggagugaaacccuacaaau

SEQ ID NO: 1509455 - RNA, 19 nt, Homo sapiens
  misc_RNA (1)...(19): siRNA sense strand
gagaaaccauacccaugug

SEQ ID NO: 1509456 - RNA, 19 nt, Homo sapiens
  misc_RNA (1)...(19): siRNA sense strand
aaccaguucucaagccuua

SEQ ID NO: 1509457 - RNA, 19 nt, Homo sapiens
  misc_RNA (1)...(19): siRNA sense strand
ggucacaacuaacuaacca

SEQ ID NO: 1509458 - RNA, 19 nt, Homo sapiens
  misc_RNA (1)...(19): siRNA sense strand
aaaccucacucagcauaaa

SEQ ID NO: 1509459 - RNA, 19 nt, Homo sapiens
  misc_RNA (1)...(19): siRNA sense strand
gaagaauguggcaacguuu

SEQ ID NO: 1509460 - RNA, 19 nt, Homo sapiens
  misc_RNA (1)...(19): siRNA sense strand
caacuaacuagccauaaga

SEQ ID NO: 1509461 - RNA, 19 nt, Homo sapiens
  misc_RNA (1)...(19): siRNA sense strand
ucacaacuaacuaaccaua

SEQ ID NO: 1509462 - RNA, 19 nt, Homo sapiens
  misc_RNA (1)...(19): siRNA sense strand
gaauguggcaaagcguuua

SEQ ID NO: 1509463 - RNA, 19 nt, Homo sapiens
  misc_RNA (1)...(19): siRNA sense strand
cauaagagaauucauacug

SEQ ID NO: 1509464 - RNA, 19 nt, Homo sapiens
  misc_RNA (1)...(19): siRNA sense strand
aagagaaacccuacaaaug

SEQ ID NO: 1509465 - RNA, 19 nt, Homo sapiens
  misc_RNA (1)...(19): siRNA sense strand
cauaagagaauucauacug

SEQ ID NO: 1509466 - RNA, 19 nt, Homo sapiens
  misc_RNA (1)...(19): siRNA sense strand
cauaagagaauucauacug

SEQ ID NO: 1509467 - RNA, 19 nt, Homo sapiens
  misc_RNA (1)...(19): siRNA sense strand
gugaaacccuacaaaugug

SEQ ID NO: 1509468 - RNA, 19 nt, Homo sapiens
  misc_RNA (1)...(19): siRNA sense strand
cauaagagaauucauacug

SEQ ID NO: 1509469 - RNA, 19 nt, Homo sapiens
  misc_RNA (1)...(19): siRNA sense strand
agcaggauaugaaagauuu

SEQ ID NO: 1509470 - RNA, 19 nt, Homo sapiens
  misc_RNA (1)...(19): siRNA sense strand
cauaagagaauucauacug

SEQ ID NO: 1509471 - RNA, 19 nt, Homo sapiens
  misc_RNA (1)...(19): siRNA sense strand
cauaagagaauucauacug

SEQ ID NO: 1509472 - RNA, 19 nt, Homo sapiens
  misc_RNA (1)...(19): siRNA sense strand
gaaaccauacccaugugaa

SEQ ID NO: 1509473 - RNA, 19 nt, Homo sapiens
  misc_RNA (1)...(19): siRNA sense strand
aauccucaauccauaguaa

SEQ ID NO: 1509474 - RNA, 19 nt, Homo sapiens
  misc_RNA (1)...(19): siRNA sense strand
gcagaggguucaucaauaa

SEQ ID NO: 1509475 - RNA, 19 nt, Homo sapiens
  misc_RNA (1)...(19): siRNA sense strand
uggaauaccugguuaauaa

SEQ ID NO: 1509476 - RNA, 19 nt, Homo sapiens
  misc_RNA (1)...(19): siRNA sense strand
gaagggacccacaaguuua

SEQ ID NO: 1509477 - RNA, 19 nt, Homo sapiens
  misc_RNA (1)...(19): siRNA sense strand
gauggcagauggaauguuu

SEQ ID NO: 1509478 - RNA, 19 nt, Homo sapiens
  misc_RNA (1)...(19): siRNA sense strand
aaacagaucuggcacugaa

SEQ ID NO: 1509479 - RNA, 19 nt, Homo sapiens
  misc_RNA (1)...(19): siRNA sense strand
gaaacaaccuggugguauc

SEQ ID NO: 1509480 - RNA, 19 nt, Homo sapiens
  misc_RNA (1)...(19): siRNA sense strand
ggaagggacccacaaguuu

SEQ ID NO: 1509481 - RNA, 19 nt, Homo sapiens
  misc_RNA (1)...(19): siRNA sense strand
gcacauuugucagcacuuu

SEQ ID NO: 1509482 - RNA, 19 nt, Homo sapiens
  misc_RNA (1)...(19): siRNA sense strand
gcuauuacgaugaagauua

SEQ ID NO: 1509483 - RNA, 19 nt, Homo sapiens
  misc_RNA (1)...(19): siRNA sense strand
gggcuucuuuacaaauuua

SEQ ID NO: 1509484 - RNA, 19 nt, Homo sapiens
  misc_RNA (1)...(19): siRNA sense strand
ugaaccugcuccuuuauaa

SEQ ID NO: 1509485 - RNA, 19 nt, Homo sapiens
  misc_RNA (1)...(19): siRNA sense strand
gaaguguuccgauuuguga

SEQ ID NO: 1509486 - RNA, 19 nt, Homo sapiens
  misc_RNA (1)...(19): siRNA sense strand
gacauucgauaugaucuuu

SEQ ID NO: 1509487 - RNA, 19 nt, Homo sapiens
  misc_RNA (1)...(19): siRNA sense strand
ggaaacaaccuggugguau

SEQ ID NO: 1509488 - RNA, 19 nt, Homo sapiens
  misc_RNA (1)...(19): siRNA sense strand
uaccugggcuucuuuacaa

SEQ ID NO: 1509489 - RNA, 19 nt, Homo sapiens
  misc_RNA (1)...(19): siRNA sense strand
gugcaaguaggaaauauuu

SEQ ID NO: 1509490 - RNA, 19 nt, Homo sapiens
  misc_RNA (1)...(19): siRNA sense strand
ccacaaguuuaguguugaa

SEQ ID NO: 1509491 - RNA, 19 nt, Homo sapiens
  misc_RNA (1)...(19): siRNA sense strand
gauaugaucuuuuccuuag

SEQ ID NO: 1509492 - RNA, 19 nt, Homo sapiens
  misc_RNA (1)...(19): siRNA sense strand
caccaacaaucaucagcua

SEQ ID NO: 1509493 - RNA, 19 nt, Homo sapiens
  misc_RNA (1)...(19): siRNA sense strand
ugcagaggguucaucaaua

SEQ ID NO: 1509494 - RNA, 19 nt, Homo sapiens
  misc_RNA (1)...(19): siRNA sense strand
aguauaggauuaccuuuga

SEQ ID NO: 1509495 - RNA, 19 nt, Homo sapiens
  misc_RNA (1)...(19): siRNA sense strand
cuuugaaccugcuccuuua

SEQ ID NO: 1509496 - RNA, 19 nt, Homo sapiens
  misc_RNA (1)...(19): siRNA sense strand
ccauuggaauaccugguua

SEQ ID NO: 1509497 - RNA, 19 nt, Homo sapiens
  misc_RNA (1)...(19): siRNA sense strand
caggaaacccaaaugauga

SEQ ID NO: 1509498 - RNA, 19 nt, Homo sapiens
  misc_RNA (1)...(19): siRNA sense strand
gaaacacaagaaucagaaa

SEQ ID NO: 1509499 - RNA, 19 nt, Homo sapiens
  misc_RNA (1)...(19): siRNA sense strand
gaggguucaucaauaacaa

SEQ ID NO: 1509500 - RNA, 19 nt, Homo sapiens
  misc_RNA (1)...(19): siRNA sense strand
caaguuuaguguugaaugg

SEQ ID NO: 1509501 - RNA, 19 nt, Homo sapiens
  misc_RNA (1)...(19): siRNA sense strand
caacaaucaucagcuaucu

SEQ ID NO: 1509502 - RNA, 19 nt, Homo sapiens
  misc_RNA (1)...(19): siRNA sense strand
ucaggaaacccaaaugaug

SEQ ID NO: 1509503 - RNA, 19 nt, Homo sapiens
  misc_RNA (1)...(19): siRNA sense strand
gaugccaaccuccacagua

SEQ ID NO: 1509504 - RNA, 19 nt, Homo sapiens
  misc_RNA (1)...(19): siRNA sense strand
caucaggaaacccaaauga

SEQ ID NO: 1509505 - RNA, 19 nt, Homo sapiens
  misc_RNA (1)...(19): siRNA sense strand
agucagugcuuauggaaau

SEQ ID NO: 1509506 - RNA, 19 nt, Homo sapiens
  misc_RNA (1)...(19): siRNA sense strand
gaucuggcacugaauggaa

SEQ ID NO: 1509507 - RNA, 19 nt, Homo sapiens
  misc_RNA (1)...(19): siRNA sense strand
gaaaauguccacugucuuc

SEQ ID NO: 1509508 - RNA, 19 nt, Homo sapiens
  misc_RNA (1)...(19): siRNA sense strand
caaccuccacaguagauuu

SEQ ID NO: 1509509 - RNA, 19 nt, Homo sapiens
  misc_RNA (1)...(19): siRNA sense strand
ggagggcuguggaaacaac

SEQ ID NO: 1509510 - RNA, 19 nt, Homo sapiens
  misc_RNA (1)...(19): siRNA sense strand
gggaaaugaugaagguuuu

SEQ ID NO: 1509511 - RNA, 19 nt, Homo sapiens
  misc_RNA (1)...(19): siRNA sense strand
guauaggauuaccuuugaa

SEQ ID NO: 1509512 - RNA, 19 nt, Homo sapiens
  misc_RNA (1)...(19): siRNA sense strand
ggaauaccugguuaauaau

SEQ ID NO: 1509513 - RNA, 19 nt, Homo sapiens
  misc_RNA (1)...(19): siRNA sense strand
ugaaacacaagaaucagaa

SEQ ID NO: 1509514 - RNA, 19 nt, Homo sapiens
  misc_RNA (1)...(19): siRNA sense strand
caauggaacaaauaugguu

SEQ ID NO: 1509515 - RNA, 19 nt, Homo sapiens
  misc_RNA (1)...(19): siRNA sense strand
guucaacggcuacaacugu

SEQ ID NO: 1509516 - RNA, 19 nt, Homo sapiens
  misc_RNA (1)...(19): siRNA sense strand
uacaaccagcaguuaauua

SEQ ID NO: 1509517 - RNA, 19 nt, Homo sapiens
  misc_RNA (1)...(19): siRNA sense strand
ggagucagugcuuauggaa

SEQ ID NO: 1509518 - RNA, 19 nt, Homo sapiens
  misc_RNA (1)...(19): siRNA sense strand
caaccuacaaccagcaguu

SEQ ID NO: 1509519 - RNA, 19 nt, Homo sapiens
  misc_RNA (1)...(19): siRNA sense strand
gugaugagacuccaaccaa

SEQ ID NO: 1509520 - RNA, 19 nt, Homo sapiens
  misc_RNA (1)...(19): siRNA sense strand
aauguccacugucuucuug

SEQ ID NO: 1509521 - RNA, 19 nt, Homo sapiens
  misc_RNA (1)...(19): siRNA sense strand
gauggaauguuuuaaugga

SEQ ID NO: 1509522 - RNA, 19 nt, Homo sapiens
  misc_RNA (1)...(19): siRNA sense strand
acaaccagcaguuaauuau

SEQ ID NO: 1509523 - RNA, 19 nt, Homo sapiens
  misc_RNA (1)...(19): siRNA sense strand
gaaacagaucuggcacuga

SEQ ID NO: 1509524 - RNA, 19 nt, Homo sapiens
  misc_RNA (1)...(19): siRNA sense strand
guuacgagcuuuucucuuc

SEQ ID NO: 1509525 - RNA, 19 nt, Homo sapiens
  misc_RNA (1)...(19): siRNA sense strand
gaugagacuccaaccaaca

SEQ ID NO: 1509526 - RNA, 19 nt, Homo sapiens
  misc_RNA (1)...(19): siRNA sense strand
cugcugcuucuaacaauua

SEQ ID NO: 1509527 - RNA, 19 nt, Homo sapiens
  misc_RNA (1)...(19): siRNA sense strand
gcugcugcuucuaacaauu

SEQ ID NO: 1509528 - RNA, 19 nt, Homo sapiens
  misc_RNA (1)...(19): siRNA sense strand
caguagauuuccugcugaa

SEQ ID NO: 1509529 - RNA, 19 nt, Homo sapiens
  misc_RNA (1)...(19): siRNA sense strand
agaccaccgucauugagaa

SEQ ID NO: 1509530 - RNA, 19 nt, Homo sapiens
  misc_RNA (1)...(19): siRNA sense strand
cacaauuccuggagucagu

SEQ ID NO: 1509531 - RNA, 19 nt, Homo sapiens
  misc_RNA (1)...(19): siRNA sense strand
acccacaaguuuaguguug

SEQ ID NO: 1509532 - RNA, 19 nt, Homo sapiens
  misc_RNA (1)...(19): siRNA sense strand
augaugacauucgauauga

SEQ ID NO: 1509533 - RNA, 19 nt, Homo sapiens
  misc_RNA (1)...(19): siRNA sense strand
caguauaggauuaccuuug

SEQ ID NO: 1509534 - RNA, 19 nt, Homo sapiens
  misc_RNA (1)...(19): siRNA sense strand
aauaauacccagcuugcuu

SEQ ID NO: 1509535 - RNA, 19 nt, Homo sapiens
  misc_RNA (1)...(19): siRNA sense strand
gagacuccaaccaacaauu

SEQ ID NO: 1509536 - RNA, 19 nt, Homo sapiens
  misc_RNA (1)...(19): siRNA sense strand
uuugaaguguuccgauuug

SEQ ID NO: 1509537 - RNA, 19 nt, Homo sapiens
  misc_RNA (1)...(19): siRNA sense strand
gaugacauucgauaugauc

SEQ ID NO: 1509538 - RNA, 19 nt, Homo sapiens
  misc_RNA (1)...(19): siRNA sense strand
gcaauggaacaaauauggu

SEQ ID NO: 1509539 - RNA, 19 nt, Homo sapiens
  misc_RNA (1)...(19): siRNA sense strand
cagauggaauguuuuaaug

SEQ ID NO: 1509540 - RNA, 19 nt, Homo sapiens
  misc_RNA (1)...(19): siRNA sense strand
uguccaagccacuaauuug

SEQ ID NO: 1509541 - RNA, 19 nt, Homo sapiens
  misc_RNA (1)...(19): siRNA sense strand
uuauggaaaugcaacuuca

SEQ ID NO: 1509542 - RNA, 19 nt, Homo sapiens
  misc_RNA (1)...(19): siRNA sense strand
ccucagcggcuauuucugu

SEQ ID NO: 1509543 - RNA, 19 nt, Homo sapiens
  misc_RNA (1)...(19): siRNA sense strand
aguguugaauggcauaaga

SEQ ID NO: 1509544 - RNA, 19 nt, Homo sapiens
  misc_RNA (1)...(19): siRNA sense strand
ggacccacaaguuuagugu

SEQ ID NO: 1509545 - RNA, 19 nt, Homo sapiens
  misc_RNA (1)...(19): siRNA sense strand
caacaauucgcaacuuggu

SEQ ID NO: 1509546 - RNA, 19 nt, Homo sapiens
  misc_RNA (1)...(19): siRNA sense strand
gugaaacacaagaaucaga

SEQ ID NO: 1509547 - RNA, 19 nt, Homo sapiens
  misc_RNA (1)...(19): siRNA sense strand
cuacaaccagcaguuaauu

SEQ ID NO: 1509548 - RNA, 19 nt, Homo sapiens
  misc_RNA (1)...(19): siRNA sense strand
caucaauaacaacaccuuu

SEQ ID NO: 1509549 - RNA, 19 nt, Homo sapiens
  misc_RNA (1)...(19): siRNA sense strand
gggaggaggacgacuugga

SEQ ID NO: 1509550 - RNA, 19 nt, Homo sapiens
  misc_RNA (1)...(19): siRNA sense strand
ccagacccaccaacaauca

SEQ ID NO: 1509551 - RNA, 19 nt, Homo sapiens
  misc_RNA (1)...(19): siRNA sense strand
ucagugcaaguaggaaaua

SEQ ID NO: 1509552 - RNA, 19 nt, Homo sapiens
  misc_RNA (1)...(19): siRNA sense strand
ccaacaaucaucagcuauc

SEQ ID NO: 1509553 - RNA, 19 nt, Homo sapiens
  misc_RNA (1)...(19): siRNA sense strand
ggagugcaggcuauuacga

SEQ ID NO: 1509554 - RNA, 19 nt, Homo sapiens
  misc_RNA (1)...(19): siRNA sense strand
guacuuuucucggguuauu

SEQ ID NO: 1509555 - RNA, 19 nt, Homo sapiens
  misc_RNA (1)...(19): siRNA sense strand
aggaagggacccacaaguu

SEQ ID NO: 1509556 - RNA, 19 nt, Homo sapiens
  misc_RNA (1)...(19): siRNA sense strand
ccucagaccaccgucauug

SEQ ID NO: 1509557 - RNA, 19 nt, Homo sapiens
  misc_RNA (1)...(19): siRNA sense strand
gcagauggaauguuuuaau

SEQ ID NO: 1509558 - RNA, 19 nt, Homo sapiens
  misc_RNA (1)...(19): siRNA sense strand
gaaccugcuccuuuauaac

SEQ ID NO: 1509559 - RNA, 19 nt, Homo sapiens
  misc_RNA (1)...(19): siRNA sense strand
cugggcuucuuuacaaauu

SEQ ID NO: 1509560 - RNA, 19 nt, Homo sapiens
  misc_RNA (1)...(19): siRNA sense strand
ugaugaagguuuugcaaug

SEQ ID NO: 1509561 - RNA, 19 nt, Homo sapiens
  misc_RNA (1)...(19): siRNA sense strand
uggagucagugcuuaugga

SEQ ID NO: 1509562 - RNA, 19 nt, Homo sapiens
  misc_RNA (1)...(19): siRNA sense strand
gauuugcagccacagagaa

SEQ ID NO: 1509563 - RNA, 19 nt, Homo sapiens
  misc_RNA (1)...(19): siRNA sense strand
gaugacugccccuuccuua

SEQ ID NO: 1509564 - RNA, 19 nt, Homo sapiens
  misc_RNA (1)...(19): siRNA sense strand
cagaaaauguccacugucu

SEQ ID NO: 1509565 - RNA, 19 nt, Homo sapiens
  misc_RNA (1)...(19): siRNA sense strand
caaccagcaguuaauuauc

SEQ ID NO: 1509566 - RNA, 19 nt, Homo sapiens
  misc_RNA (1)...(19): siRNA sense strand
gcuccuuuauaacgauuca

SEQ ID NO: 1509567 - RNA, 19 nt, Homo sapiens
  misc_RNA (1)...(19): siRNA sense strand
uaguuguaguuauccauug

SEQ ID NO: 1509568 - RNA, 19 nt, Homo sapiens
  misc_RNA (1)...(19): siRNA sense strand
ucaucaaucucagcaccuu

SEQ ID NO: 1509569 - RNA, 19 nt, Homo sapiens
  misc_RNA (1)...(19): siRNA sense strand
caccagcgcacugauauca

SEQ ID NO: 1509570 - RNA, 19 nt, Homo sapiens
  misc_RNA (1)...(19): siRNA sense strand
accaacaauucgcaacuug

SEQ ID NO: 1509571 - RNA, 19 nt, Homo sapiens
  misc_RNA (1)...(19): siRNA sense strand
ugcaggcuauuacgaugaa

SEQ ID NO: 1509572 - RNA, 19 nt, Homo sapiens
  misc_RNA (1)...(19): siRNA sense strand
gagugcaggcuauuacgau

SEQ ID NO: 1509573 - RNA, 19 nt, Homo sapiens
  misc_RNA (1)...(19): siRNA sense strand
agacuccaaccaacaauuc

SEQ ID NO: 1509574 - RNA, 19 nt, Homo sapiens
  misc_RNA (1)...(19): siRNA sense strand
gcacacaccuacaaacuuu

SEQ ID NO: 1509575 - RNA, 19 nt, Homo sapiens
  misc_RNA (1)...(19): siRNA sense strand
gaacgaauccugcauuaaa

SEQ ID NO: 1509576 - RNA, 19 nt, Homo sapiens
  misc_RNA (1)...(19): siRNA sense strand
ggagagcuguugguacuuu

SEQ ID NO: 1509577 - RNA, 19 nt, Homo sapiens
  misc_RNA (1)...(19): siRNA sense strand
gugaacgaauccugcauua

SEQ ID NO: 1509578 - RNA, 19 nt, Homo sapiens
  misc_RNA (1)...(19): siRNA sense strand
uaacuccuccuuauguuua

SEQ ID NO: 1509579 - RNA, 19 nt, Homo sapiens
  misc_RNA (1)...(19): siRNA sense strand
gaaacuuacuggucaugau

SEQ ID NO: 1509580 - RNA, 19 nt, Homo sapiens
  misc_RNA (1)...(19): siRNA sense strand
cagcauuucuugucucuug

SEQ ID NO: 1509581 - RNA, 19 nt, Homo sapiens
  misc_RNA (1)...(19): siRNA sense strand
ccuacaaacuuucugauug

SEQ ID NO: 1509582 - RNA, 19 nt, Homo sapiens
  misc_RNA (1)...(19): siRNA sense strand
ggauaugcauuguucuuuc

SEQ ID NO: 1509583 - RNA, 19 nt, Homo sapiens
  misc_RNA (1)...(19): siRNA sense strand
ggaauuaguaguugcucua

SEQ ID NO: 1509584 - RNA, 19 nt, Homo sapiens
  misc_RNA (1)...(19): siRNA sense strand
ucagagaguuacaaggaaa

SEQ ID NO: 1509585 - RNA, 19 nt, Homo sapiens
  misc_RNA (1)...(19): siRNA sense strand
gcaucaggcuaggaagaua

SEQ ID NO: 1509586 - RNA, 19 nt, Homo sapiens
  misc_RNA (1)...(19): siRNA sense strand
gcauuguucuuuccugguu

SEQ ID NO: 1509587 - RNA, 19 nt, Homo sapiens
  misc_RNA (1)...(19): siRNA sense strand
gcucaguccuccucagaga

SEQ ID NO: 1509588 - RNA, 19 nt, Homo sapiens
  misc_RNA (1)...(19): siRNA sense strand
ucagggauaugcauuguuc

SEQ ID NO: 1509589 - RNA, 19 nt, Homo sapiens
  misc_RNA (1)...(19): siRNA sense strand
gaagaaguagagacagauu

SEQ ID NO: 1509590 - RNA, 19 nt, Homo sapiens
  misc_RNA (1)...(19): siRNA sense strand
ggccugugcugacuucuug

SEQ ID NO: 1509591 - RNA, 19 nt, Homo sapiens
  misc_RNA (1)...(19): siRNA sense strand
gauagauacauugcuguua

SEQ ID NO: 1509592 - RNA, 19 nt, Homo sapiens
  misc_RNA (1)...(19): siRNA sense strand
acaagaacgugaacgaauc

SEQ ID NO: 1509593 - RNA, 19 nt, Homo sapiens
  misc_RNA (1)...(19): siRNA sense strand
ggucaugauugcuauccuu

SEQ ID NO: 1509594 - RNA, 19 nt, Homo sapiens
  misc_RNA (1)...(19): siRNA sense strand
caacugcacacaccuacaa

SEQ ID NO: 1509595 - RNA, 19 nt, Homo sapiens
  misc_RNA (1)...(19): siRNA sense strand
agaaguagagacagauuaa

SEQ ID NO: 1509596 - RNA, 19 nt, Homo sapiens
  misc_RNA (1)...(19): siRNA sense strand
uuacugauccucugaccua

SEQ ID NO: 1509597 - RNA, 19 nt, Homo sapiens
  misc_RNA (1)...(19): siRNA sense strand
ccaaccaaguuuacugugu

SEQ ID NO: 1509598 - RNA, 19 nt, Homo sapiens
  misc_RNA (1)...(19): siRNA sense strand
gcuaggaagauagaaagua

SEQ ID NO: 1509599 - RNA, 19 nt, Homo sapiens
  misc_RNA (1)...(19): siRNA sense strand
cuacaaacuuucugauugc

SEQ ID NO: 1509600 - RNA, 19 nt, Homo sapiens
  misc_RNA (1)...(19): siRNA sense strand
augcagugauugaugcuua

SEQ ID NO: 1509601 - RNA, 19 nt, Homo sapiens
  misc_RNA (1)...(19): siRNA sense strand
guggagcuguguuacaaga

SEQ ID NO: 1509602 - RNA, 19 nt, Homo sapiens
  misc_RNA (1)...(19): siRNA sense strand
guggagagcuguugguacu

SEQ ID NO: 1509603 - RNA, 19 nt, Homo sapiens
  misc_RNA (1)...(19): siRNA sense strand
gaagaaggaauugaggaau

SEQ ID NO: 1509604 - RNA, 19 nt, Homo sapiens
  misc_RNA (1)...(19): siRNA sense strand
cuaggaagauagaaaguac

SEQ ID NO: 1509605 - RNA, 19 nt, Homo sapiens
  misc_RNA (1)...(19): siRNA sense strand
caacgaagaaggaauugag

SEQ ID NO: 1509606 - RNA, 19 nt, Homo sapiens
  misc_RNA (1)...(19): siRNA sense strand
gcuaugaaccccuugauuu

SEQ ID NO: 1509607 - RNA, 19 nt, Homo sapiens
  misc_RNA (1)...(19): siRNA sense strand
ccucguugaugcagugauu

SEQ ID NO: 1509608 - RNA, 19 nt, Homo sapiens
  misc_RNA (1)...(19): siRNA sense strand
cgaagaaggaauugaggaa

SEQ ID NO: 1509609 - RNA, 19 nt, Homo sapiens
  misc_RNA (1)...(19): siRNA sense strand
aaacuuacuggucaugauu

SEQ ID NO: 1509610 - RNA, 19 nt, Homo sapiens
  misc_RNA (1)...(19): siRNA sense strand
gccaugguguuuauauaca

SEQ ID NO: 1509611 - RNA, 19 nt, Homo sapiens
  misc_RNA (1)...(19): siRNA sense strand
ucgccaugguguuuauaua

SEQ ID NO: 1509612 - RNA, 19 nt, Homo sapiens
  misc_RNA (1)...(19): siRNA sense strand
ugaccuauccaaccaaguu

SEQ ID NO: 1509613 - RNA, 19 nt, Homo sapiens
  misc_RNA (1)...(19): siRNA sense strand
auacauugcuguuacugau

SEQ ID NO: 1509614 - RNA, 19 nt, Homo sapiens
  misc_RNA (1)...(19): siRNA sense strand
gagagcuguugguacuuug

SEQ ID NO: 1509615 - RNA, 19 nt, Homo sapiens
  misc_RNA (1)...(19): siRNA sense strand
cugaagaaguagagacaga

SEQ ID NO: 1509616 - RNA, 19 nt, Homo sapiens
  misc_RNA (1)...(19): siRNA sense strand
ccucagagaguuacaagga

SEQ ID NO: 1509617 - RNA, 19 nt, Homo sapiens
  misc_RNA (1)...(19): siRNA sense strand
gggauaugcauuguucuuu

SEQ ID NO: 1509618 - RNA, 19 nt, Homo sapiens
  misc_RNA (1)...(19): siRNA sense strand
aaacaacugcacacaccua

SEQ ID NO: 1509619 - RNA, 19 nt, Homo sapiens
  misc_RNA (1)...(19): siRNA sense strand
ccaagcaucaggcuaggaa

SEQ ID NO: 1509620 - RNA, 19 nt, Homo sapiens
  misc_RNA (1)...(19): siRNA sense strand
ugugucaguuucagggaua

SEQ ID NO: 1509621 - RNA, 19 nt, Homo sapiens
  misc_RNA (1)...(19): siRNA sense strand
caaugucgccaugguguuu

SEQ ID NO: 1509622 - RNA, 19 nt, Homo sapiens
  misc_RNA (1)...(19): siRNA sense strand
ggacugauucgucaacaac

SEQ ID NO: 1509623 - RNA, 19 nt, Homo sapiens
  misc_RNA (1)...(19): siRNA sense strand
ggagcuguguuacaagaac

SEQ ID NO: 1509624 - RNA, 19 nt, Homo sapiens
  misc_RNA (1)...(19): siRNA sense strand
ggaaacuuacuggucauga

SEQ ID NO: 1509625 - RNA, 19 nt, Homo sapiens
  misc_RNA (1)...(19): siRNA sense strand
gcagugauugaugcuuaua

SEQ ID NO: 1509626 - RNA, 19 nt, Homo sapiens
  misc_RNA (1)...(19): siRNA sense strand
auagauacauugcuguuac

SEQ ID NO: 1509627 - RNA, 19 nt, Homo sapiens
  misc_RNA (1)...(19): siRNA sense strand
aagaaguagagacagauua

SEQ ID NO: 1509628 - RNA, 19 nt, Homo sapiens
  misc_RNA (1)...(19): siRNA sense strand
gcaaggucuuaaggacuga

SEQ ID NO: 1509629 - RNA, 19 nt, Homo sapiens
  misc_RNA (1)...(19): siRNA sense strand
gauacauugcuguuacuga

SEQ ID NO: 1509630 - RNA, 19 nt, Homo sapiens
  misc_RNA (1)...(19): siRNA sense strand
gaguuacaaggaaagagua

SEQ ID NO: 1509631 - RNA, 19 nt, Homo sapiens
  misc_RNA (1)...(19): siRNA sense strand
gggaaggcaauaaaacuua

SEQ ID NO: 1509632 - RNA, 19 nt, Homo sapiens
  misc_RNA (1)...(19): siRNA sense strand
gcuauggcagcauuucuug

SEQ ID NO: 1509633 - RNA, 19 nt, Homo sapiens
  misc_RNA (1)...(19): siRNA sense strand
gauaugcauuguucuuucc

SEQ ID NO: 1509634 - RNA, 19 nt, Homo sapiens
  misc_RNA (1)...(19): siRNA sense strand
ugacacauccuucuguuuu

SEQ ID NO: 1509635 - RNA, 19 nt, Homo sapiens
  misc_RNA (1)...(19): siRNA sense strand
uuacuggucaugauugcua

SEQ ID NO: 1509636 - RNA, 19 nt, Homo sapiens
  misc_RNA (1)...(19): siRNA sense strand
aaacuggguccuacuuugu

SEQ ID NO: 1509637 - RNA, 19 nt, Homo sapiens
  misc_RNA (1)...(19): siRNA sense strand
ccucugaccuauccaacca

SEQ ID NO: 1509638 - RNA, 19 nt, Homo sapiens
  misc_RNA (1)...(19): siRNA sense strand
ugauugcuauccuucacuu

SEQ ID NO: 1509639 - RNA, 19 nt, Homo sapiens
  misc_RNA (1)...(19): siRNA sense strand
agugauugaugcuuauaug

SEQ ID NO: 1509640 - RNA, 19 nt, Homo sapiens
  misc_RNA (1)...(19): siRNA sense strand
gagaaaggcugccaaaacc

SEQ ID NO: 1509641 - RNA, 19 nt, Homo sapiens
  misc_RNA (1)...(19): siRNA sense strand
cacgggagccaacgaagaa

SEQ ID NO: 1509642 - RNA, 19 nt, Homo sapiens
  misc_RNA (1)...(19): siRNA sense strand
gugauugaugcuuauauga

SEQ ID NO: 1509643 - RNA, 19 nt, Homo sapiens
  misc_RNA (1)...(19): siRNA sense strand
acugauucgucaacaacua

SEQ ID NO: 1509644 - RNA, 19 nt, Homo sapiens
  misc_RNA (1)...(19): siRNA sense strand
uaugcuguaucucuguuga

SEQ ID NO: 1509645 - RNA, 19 nt, Homo sapiens
  misc_RNA (1)...(19): siRNA sense strand
cuaugaaccccuugauuua

SEQ ID NO: 1509646 - RNA, 19 nt, Homo sapiens
  misc_RNA (1)...(19): siRNA sense strand
gaccuauccaaccaaguuu

SEQ ID NO: 1509647 - RNA, 19 nt, Homo sapiens
  misc_RNA (1)...(19): siRNA sense strand
uacaagaacgugaacgaau

SEQ ID NO: 1509648 - RNA, 19 nt, Homo sapiens
  misc_RNA (1)...(19): siRNA sense strand
agagagaaaggcugccaaa

SEQ ID NO: 1509649 - RNA, 19 nt, Homo sapiens
  misc_RNA (1)...(19): siRNA sense strand
cugccaggcuccacugaau

SEQ ID NO: 1509650 - RNA, 19 nt, Homo sapiens
  misc_RNA (1)...(19): siRNA sense strand
gcuggccugugcugacuuc

SEQ ID NO: 1509651 - RNA, 19 nt, Homo sapiens
  misc_RNA (1)...(19): siRNA sense strand
cuccuuauguuuaugagau

SEQ ID NO: 1509652 - RNA, 19 nt, Homo sapiens
  misc_RNA (1)...(19): siRNA sense strand
ugaacgaauccugcauuaa

SEQ ID NO: 1509653 - RNA, 19 nt, Homo sapiens
  misc_RNA (1)...(19): siRNA sense strand
gguuugggaaggcaauaaa

SEQ ID NO: 1509654 - RNA, 19 nt, Homo sapiens
  misc_RNA (1)...(19): siRNA sense strand
cuguggagcuguguuacaa

SEQ ID NO: 1509655 - RNA, 19 nt, Homo sapiens
  misc_RNA (1)...(19): siRNA sense strand
ucuacgccguccuugguuu

SEQ ID NO: 1509656 - RNA, 19 nt, Homo sapiens
  misc_RNA (1)...(19): siRNA sense strand
gccaggcuccacugaauca

SEQ ID NO: 1509657 - RNA, 19 nt, Homo sapiens
  misc_RNA (1)...(19): siRNA sense strand
guucuuuccugguucuuuu

SEQ ID NO: 1509658 - RNA, 19 nt, Homo sapiens
  misc_RNA (1)...(19): siRNA sense strand
acaaggaaagaguagcaaa

SEQ ID NO: 1509659 - RNA, 19 nt, Homo sapiens
  misc_RNA (1)...(19): siRNA sense strand
aaaacuggguccuacuuug

SEQ ID NO: 1509660 - RNA, 19 nt, Homo sapiens
  misc_RNA (1)...(19): siRNA sense strand
ugauagauacauugcuguu

SEQ ID NO: 1509661 - RNA, 19 nt, Homo sapiens
  misc_RNA (1)...(19): siRNA sense strand
ggcagcauuucuugucucu

SEQ ID NO: 1509662 - RNA, 19 nt, Homo sapiens
  misc_RNA (1)...(19): siRNA sense strand
acuggguccuacuuuguuu

SEQ ID NO: 1509663 - RNA, 19 nt, Homo sapiens
  misc_RNA (1)...(19): siRNA sense strand
uaguugcucuaaccugugu

SEQ ID NO: 1509664 - RNA, 19 nt, Homo sapiens
  misc_RNA (1)...(19): siRNA sense strand
gccagguccucgaucuauc

SEQ ID NO: 1509665 - RNA, 19 nt, Homo sapiens
  misc_RNA (1)...(19): siRNA sense strand
cucagagaguuacaaggaa

SEQ ID NO: 1509666 - RNA, 19 nt, Homo sapiens
  misc_RNA (1)...(19): siRNA sense strand
caaggaaagaguagcaaaa

SEQ ID NO: 1509667 - RNA, 19 nt, Homo sapiens
  misc_RNA (1)...(19): siRNA sense strand
uuacaagaacgugaacgaa

SEQ ID NO: 1509668 - RNA, 19 nt, Homo sapiens
  misc_RNA (1)...(19): siRNA sense strand
guuacaagaacgugaacga

SEQ ID NO: 1509669 - RNA, 19 nt, Homo sapiens
  misc_RNA (1)...(19): siRNA sense strand
gaaggaaacugaauucaaa

SEQ ID NO: 1509670 - RNA, 19 nt, Homo sapiens
  misc_RNA (1)...(19): siRNA sense strand
ggaaauauguacuacgaaa

SEQ ID NO: 1509671 - RNA, 19 nt, Homo sapiens
  misc_RNA (1)...(19): siRNA sense strand
ccacaaagcagugaauuua

SEQ ID NO: 1509672 - RNA, 19 nt, Homo sapiens
  misc_RNA (1)...(19): siRNA sense strand
guaacaagcucacgcaguu

SEQ ID NO: 1509673 - RNA, 19 nt, Homo sapiens
  misc_RNA (1)...(19): siRNA sense strand
gauccaagcugucccaaug

SEQ ID NO: 1509674 - RNA, 19 nt, Homo sapiens
  misc_RNA (1)...(19): siRNA sense strand
guaauuauguggugacaga

SEQ ID NO: 1509675 - RNA, 19 nt, Homo sapiens
  misc_RNA (1)...(19): siRNA sense strand
gaaagaauaccaugcagaa

SEQ ID NO: 1509676 - RNA, 19 nt, Homo sapiens
  misc_RNA (1)...(19): siRNA sense strand
caaaguguguaacggaaua

SEQ ID NO: 1509677 - RNA, 19 nt, Homo sapiens
  misc_RNA (1)...(19): siRNA sense strand
ggagauaagugauggagau

SEQ ID NO: 1509678 - RNA, 19 nt, Homo sapiens
  misc_RNA (1)...(19): siRNA sense strand
gcuaugagauggaggaaga

SEQ ID NO: 1509679 - RNA, 19 nt, Homo sapiens
  misc_RNA (1)...(19): siRNA sense strand
ggaacuggauauucugaaa

SEQ ID NO: 1509680 - RNA, 19 nt, Homo sapiens
  misc_RNA (1)...(19): siRNA sense strand
caagcaacauggucaguuu

SEQ ID NO: 1509681 - RNA, 19 nt, Homo sapiens
  misc_RNA (1)...(19): siRNA sense strand
gaaaggcagccaccaaauu

SEQ ID NO: 1509682 - RNA, 19 nt, Homo sapiens
  misc_RNA (1)...(19): siRNA sense strand
gaacacaaagacaauauug

SEQ ID NO: 1509683 - RNA, 19 nt, Homo sapiens
  misc_RNA (1)...(19): siRNA sense strand
gaggaaauauguacuacga

SEQ ID NO: 1509684 - RNA, 19 nt, Homo sapiens
  misc_RNA (1)...(19): siRNA sense strand
gcagaggaauuaugaucuu

SEQ ID NO: 1509685 - RNA, 19 nt, Homo sapiens
  misc_RNA (1)...(19): siRNA sense strand
gcaaagugccuaucaagug

SEQ ID NO: 1509686 - RNA, 19 nt, Homo sapiens
  misc_RNA (1)...(19): siRNA sense strand
caagggaguuuguggagaa

SEQ ID NO: 1509687 - RNA, 19 nt, Homo sapiens
  misc_RNA (1)...(19): siRNA sense strand
aaaggcagccaccaaauua

SEQ ID NO: 1509688 - RNA, 19 nt, Homo sapiens
  misc_RNA (1)...(19): siRNA sense strand
caugagaaauuuacaggaa

SEQ ID NO: 1509689 - RNA, 19 nt, Homo sapiens
  misc_RNA (1)...(19): siRNA sense strand
gcaaagcugucccaucaag

SEQ ID NO: 1509690 - RNA, 19 nt, Homo sapiens
  misc_RNA (1)...(19): siRNA sense strand
caaagggcaugaacuacuu

SEQ ID NO: 1509691 - RNA, 19 nt, Homo sapiens
  misc_RNA (1)...(19): siRNA sense strand
ggagguggcugguuauguc

SEQ ID NO: 1509692 - RNA, 19 nt, Homo sapiens
  misc_RNA (1)...(19): siRNA sense strand
gaggagaacugccagaaac

SEQ ID NO: 1509693 - RNA, 19 nt, Homo sapiens
  misc_RNA (1)...(19): siRNA sense strand
gauaagugauggagaugug

SEQ ID NO: 1509694 - RNA, 19 nt, Homo sapiens
  misc_RNA (1)...(19): siRNA sense strand
gaagcaacaucuccgaaag

SEQ ID NO: 1509695 - RNA, 19 nt, Homo sapiens
  misc_RNA (1)...(19): siRNA sense strand
cugcaaagcugucccauca

SEQ ID NO: 1509696 - RNA, 19 nt, Homo sapiens
  misc_RNA (1)...(19): siRNA sense strand
gcagugacuuucucagcaa

SEQ ID NO: 1509697 - RNA, 19 nt, Homo sapiens
  misc_RNA (1)...(19): siRNA sense strand
uaaagacucacucuccaua

SEQ ID NO: 1509698 - RNA, 19 nt, Homo sapiens
  misc_RNA (1)...(19): siRNA sense strand
gaucaucgaauucuccaaa

SEQ ID NO: 1509699 - RNA, 19 nt, Homo sapiens
  misc_RNA (1)...(19): siRNA sense strand
ugauggagaugugauaauu

SEQ ID NO: 1509700 - RNA, 19 nt, Homo sapiens
  misc_RNA (1)...(19): siRNA sense strand
ugaaggagcugcccaugag

SEQ ID NO: 1509701 - RNA, 19 nt, Homo sapiens
  misc_RNA (1)...(19): siRNA sense strand
ccgaguaucucaacacugu

SEQ ID NO: 1509702 - RNA, 19 nt, Homo sapiens
  misc_RNA (1)...(19): siRNA sense strand
cccagugccugaauacaua

SEQ ID NO: 1509703 - RNA, 19 nt, Homo sapiens
  misc_RNA (1)...(19): siRNA sense strand
gagcugcccaugagaaauu

SEQ ID NO: 1509704 - RNA, 19 nt, Homo sapiens
  misc_RNA (1)...(19): siRNA sense strand
uccagaggauguucaauaa

SEQ ID NO: 1509705 - RNA, 19 nt, Homo sapiens
  misc_RNA (1)...(19): siRNA sense strand
ccauaaaugcuacgaauau

SEQ ID NO: 1509706 - RNA, 19 nt, Homo sapiens
  misc_RNA (1)...(19): siRNA sense strand
gcagauagucgcccaaagu

SEQ ID NO: 1509707 - RNA, 19 nt, Homo sapiens
  misc_RNA (1)...(19): siRNA sense strand
gggaaugcguggacaagug

SEQ ID NO: 1509708 - RNA, 19 nt, Homo sapiens
  misc_RNA (1)...(19): siRNA sense strand
gaugauagacgcagauagu

SEQ ID NO: 1509709 - RNA, 19 nt, Homo sapiens
  misc_RNA (1)...(19): siRNA sense strand
ggucagaaaaccaaaauua

SEQ ID NO: 1509710 - RNA, 19 nt, Homo sapiens
  misc_RNA (1)...(19): siRNA sense strand
ucaaguggauggcauugga

SEQ ID NO: 1509711 - RNA, 19 nt, Homo sapiens
  misc_RNA (1)...(19): siRNA sense strand
ggaauuaagagaagcaaca

SEQ ID NO: 1509712 - RNA, 19 nt, Homo sapiens
  misc_RNA (1)...(19): siRNA sense strand
gugaguugaucaucgaauu

SEQ ID NO: 1509713 - RNA, 19 nt, Homo sapiens
  misc_RNA (1)...(19): siRNA sense strand
cagaggauguucaauaacu

SEQ ID NO: 1509714 - RNA, 19 nt, Homo sapiens
  misc_RNA (1)...(19): siRNA sense strand
caaagcagugaauuuauug

SEQ ID NO: 1509715 - RNA, 19 nt, Homo sapiens
  misc_RNA (1)...(19): siRNA sense strand
ccaaauggcaucuuuaagg

SEQ ID NO: 1509716 - RNA, 19 nt, Homo sapiens
  misc_RNA (1)...(19): siRNA sense strand
uugaggaucuugaaggaaa

SEQ ID NO: 1509717 - RNA, 19 nt, Homo sapiens
  misc_RNA (1)...(19): siRNA sense strand
cacaggaacuggauauucu

SEQ ID NO: 1509718 - RNA, 19 nt, Homo sapiens
  misc_RNA (1)...(19): siRNA sense strand
agaauaccaugcagaagga

SEQ ID NO: 1509719 - RNA, 19 nt, Homo sapiens
  misc_RNA (1)...(19): siRNA sense strand
ggaacacaaagacaauauu

SEQ ID NO: 1509720 - RNA, 19 nt, Homo sapiens
  misc_RNA (1)...(19): siRNA sense strand
gaucaucagaggaaauaug

SEQ ID NO: 1509721 - RNA, 19 nt, Homo sapiens
  misc_RNA (1)...(19): siRNA sense strand
cgaugaagccuacgugaug

SEQ ID NO: 1509722 - RNA, 19 nt, Homo sapiens
  misc_RNA (1)...(19): siRNA sense strand
ccagaaggugagaaaguua

SEQ ID NO: 1509723 - RNA, 19 nt, Homo sapiens
  misc_RNA (1)...(19): siRNA sense strand
aagacucacucuccauaaa

SEQ ID NO: 1509724 - RNA, 19 nt, Homo sapiens
  misc_RNA (1)...(19): siRNA sense strand
gagaacugccagaaacuga

SEQ ID NO: 1509725 - RNA, 19 nt, Homo sapiens
  misc_RNA (1)...(19): siRNA sense strand
gauggagaugugauaauuu

SEQ ID NO: 1509726 - RNA, 19 nt, Homo sapiens
  misc_RNA (1)...(19): siRNA sense strand
ugaauuuauuggagcauga

SEQ ID NO: 1509727 - RNA, 19 nt, Homo sapiens
  misc_RNA (1)...(19): siRNA sense strand
ccaaggaagccaagccaaa

SEQ ID NO: 1509728 - RNA, 19 nt, Homo sapiens
  misc_RNA (1)...(19): siRNA sense strand
ucacgcaguugggcacuuu

SEQ ID NO: 1509729 - RNA, 19 nt, Homo sapiens
  misc_RNA (1)...(19): siRNA sense strand
gggaugaaagaaugcauuu

SEQ ID NO: 1509730 - RNA, 19 nt, Homo sapiens
  misc_RNA (1)...(19): siRNA sense strand
gucaagugcuggaugauag

SEQ ID NO: 1509731 - RNA, 19 nt, Homo sapiens
  misc_RNA (1)...(19): siRNA sense strand
cagaggaauuaugaucuuu

SEQ ID NO: 1509732 - RNA, 19 nt, Homo sapiens
  misc_RNA (1)...(19): siRNA sense strand
ggucaagugcuggaugaua

SEQ ID NO: 1509733 - RNA, 19 nt, Homo sapiens
  misc_RNA (1)...(19): siRNA sense strand
gcaaagggcaugaacuacu

SEQ ID NO: 1509734 - RNA, 19 nt, Homo sapiens
  misc_RNA (1)...(19): siRNA sense strand
gagcuuguggagccucuua

SEQ ID NO: 1509735 - RNA, 19 nt, Homo sapiens
  misc_RNA (1)...(19): siRNA sense strand
gaugugauaauuucaggaa

SEQ ID NO: 1509736 - RNA, 19 nt, Homo sapiens
  misc_RNA (1)...(19): siRNA sense strand
cagaucaucagaggaaaua

SEQ ID NO: 1509737 - RNA, 19 nt, Homo sapiens
  misc_RNA (1)...(19): siRNA sense strand
cagaaaggcagccaccaaa

SEQ ID NO: 1509738 - RNA, 19 nt, Homo sapiens
  misc_RNA (1)...(19): siRNA sense strand
ccacaggcgccuugacuga

SEQ ID NO: 1509739 - RNA, 19 nt, Homo sapiens
  misc_RNA (1)...(19): siRNA sense strand
uggcuugcauugauagaaa

SEQ ID NO: 1509740 - RNA, 19 nt, Homo sapiens
  misc_RNA (1)...(19): siRNA sense strand
gcccaaaguuccgugaguu

SEQ ID NO: 1509741 - RNA, 19 nt, Homo sapiens
  misc_RNA (1)...(19): siRNA sense strand
gugcggaagagaaagaaua

SEQ ID NO: 1509742 - RNA, 19 nt, Homo sapiens
  misc_RNA (1)...(19): siRNA sense strand
ccacguaccagauggaugu

SEQ ID NO: 1509743 - RNA, 19 nt, Homo sapiens
  misc_RNA (1)...(19): siRNA sense strand
caacgaaugggccuaagau

SEQ ID NO: 1509744 - RNA, 19 nt, Homo sapiens
  misc_RNA (1)...(19): siRNA sense strand
gacucacucuccauaaaug

SEQ ID NO: 1509745 - RNA, 19 nt, Homo sapiens
  misc_RNA (1)...(19): siRNA sense strand
acaacacccuggucuggaa

SEQ ID NO: 1509746 - RNA, 19 nt, Homo sapiens
  misc_RNA (1)...(19): siRNA sense strand
gcagagacccacacuacca

SEQ ID NO: 1509747 - RNA, 19 nt, Homo sapiens
  misc_RNA (1)...(19): siRNA sense strand
caccguggcuugcauugau

SEQ ID NO: 1509748 - RNA, 19 nt, Homo sapiens
  misc_RNA (1)...(19): siRNA sense strand
ggaaucaauuuuacacaga

SEQ ID NO: 1509749 - RNA, 19 nt, Homo sapiens
  misc_RNA (1)...(19): siRNA sense strand
uuaccuaugugcagaggaa

SEQ ID NO: 1509750 - RNA, 19 nt, Homo sapiens
  misc_RNA (1)...(19): siRNA sense strand
ucgcaaagggcaugaacua

SEQ ID NO: 1509751 - RNA, 19 nt, Homo sapiens
  misc_RNA (1)...(19): siRNA sense strand
cuacagacuccaacuucua

SEQ ID NO: 1509752 - RNA, 19 nt, Homo sapiens
  misc_RNA (1)...(19): siRNA sense strand
gaugaaagaaugcauuugc

SEQ ID NO: 1509753 - RNA, 19 nt, Homo sapiens
  misc_RNA (1)...(19): siRNA sense strand
ucagaggaaauauguacua

SEQ ID NO: 1509754 - RNA, 19 nt, Homo sapiens
  misc_RNA (1)...(19): siRNA sense strand
caacuggugugugcagauc

SEQ ID NO: 1509755 - RNA, 19 nt, Homo sapiens
  misc_RNA (1)...(19): siRNA sense strand
ccaccugcgugaagaagug

SEQ ID NO: 1509756 - RNA, 19 nt, Homo sapiens
  misc_RNA (1)...(19): siRNA sense strand
gcagucuuaucuaacuaug

SEQ ID NO: 1509757 - RNA, 19 nt, Homo sapiens
  misc_RNA (1)...(19): siRNA sense strand
gccagaaacugaccaaaau

SEQ ID NO: 1509758 - RNA, 19 nt, Homo sapiens
  misc_RNA (1)...(19): siRNA sense strand
caaggaagccaagccaaau

SEQ ID NO: 1509759 - RNA, 19 nt, Homo sapiens
  misc_RNA (1)...(19): siRNA sense strand
gcagaauccugucuaucac

SEQ ID NO: 1509760 - RNA, 19 nt, Homo sapiens
  misc_RNA (1)...(19): siRNA sense strand
gauagaaaugggcugcaaa

SEQ ID NO: 1509761 - RNA, 19 nt, Homo sapiens
  misc_RNA (1)...(19): siRNA sense strand
caagccauaugacggaauc

SEQ ID NO: 1509762 - RNA, 19 nt, Homo sapiens
  misc_RNA (1)...(19): siRNA sense strand
cagaaggugagaaaguuaa

SEQ ID NO: 1509763 - RNA, 19 nt, Homo sapiens
  misc_RNA (1)...(19): siRNA sense strand
cccagaaggugagaaaguu

SEQ ID NO: 1509764 - RNA, 19 nt, Homo sapiens
  misc_RNA (1)...(19): siRNA sense strand
gaucccagaaggugagaaa

SEQ ID NO: 1509765 - RNA, 19 nt, Homo sapiens
  misc_RNA (1)...(19): siRNA sense strand
ggccuaagaucccguccau

SEQ ID NO: 1509766 - RNA, 19 nt, Homo sapiens
  misc_RNA (1)...(19): siRNA sense strand
ugaaggcuguccaacgaau

SEQ ID NO: 1509767 - RNA, 19 nt, Homo sapiens
  misc_RNA (1)...(19): siRNA sense strand
gggaacacaaagacaauau

SEQ ID NO: 1509768 - RNA, 19 nt, Homo sapiens
  misc_RNA (1)...(19): siRNA sense strand
cagcagagacccacacuac

SEQ ID NO: 1509769 - RNA, 19 nt, Homo sapiens
  misc_RNA (1)...(19): siRNA sense strand
gaaaggagccacuugcuua

SEQ ID NO: 1509770 - RNA, 19 nt, Homo sapiens
  misc_RNA (1)...(19): siRNA sense strand
gcacaacuaucgggaauua

SEQ ID NO: 1509771 - RNA, 19 nt, Homo sapiens
  misc_RNA (1)...(19): siRNA sense strand
aaacauaccuggugaagaa

SEQ ID NO: 1509772 - RNA, 19 nt, Homo sapiens
  misc_RNA (1)...(19): siRNA sense strand
gcaaagaacccacuuggua

SEQ ID NO: 1509773 - RNA, 19 nt, Homo sapiens
  misc_RNA (1)...(19): siRNA sense strand
gaaacaaugugcucuauca

SEQ ID NO: 1509774 - RNA, 19 nt, Homo sapiens
  misc_RNA (1)...(19): siRNA sense strand
gacaagaccuucucagauu

SEQ ID NO: 1509775 - RNA, 19 nt, Homo sapiens
  misc_RNA (1)...(19): siRNA sense strand
gcagaucccucuugguuaa

SEQ ID NO: 1509776 - RNA, 19 nt, Homo sapiens
  misc_RNA (1)...(19): siRNA sense strand
ggaauaaaguuggcuauau

SEQ ID NO: 1509777 - RNA, 19 nt, Homo sapiens
  misc_RNA (1)...(19): siRNA sense strand
guagacaggccucaaauua

SEQ ID NO: 1509778 - RNA, 19 nt, Homo sapiens
  misc_RNA (1)...(19): siRNA sense strand
aaacacaaauggacuauga

SEQ ID NO: 1509779 - RNA, 19 nt, Homo sapiens
  misc_RNA (1)...(19): siRNA sense strand
ggagaagccagauguaaua

SEQ ID NO: 1509780 - RNA, 19 nt, Homo sapiens
  misc_RNA (1)...(19): siRNA sense strand
caucuacucuaaucuguua

SEQ ID NO: 1509781 - RNA, 19 nt, Homo sapiens
  misc_RNA (1)...(19): siRNA sense strand
gaucaaagaugucaauguc

SEQ ID NO: 1509782 - RNA, 19 nt, Homo sapiens
  misc_RNA (1)...(19): siRNA sense strand
ucaaaucacuuuaccaaga

SEQ ID NO: 1509783 - RNA, 19 nt, Homo sapiens
  misc_RNA (1)...(19): siRNA sense strand
gaacauugguccuccacaa

SEQ ID NO: 1509784 - RNA, 19 nt, Homo sapiens
  misc_RNA (1)...(19): siRNA sense strand
ccaaagagaucacaguuca

SEQ ID NO: 1509785 - RNA, 19 nt, Homo sapiens
  misc_RNA (1)...(19): siRNA sense strand
ggacuugauuuaucuaaga

SEQ ID NO: 1509786 - RNA, 19 nt, Homo sapiens
  misc_RNA (1)...(19): siRNA sense strand
gaacaggacugacccaaac

SEQ ID NO: 1509787 - RNA, 19 nt, Homo sapiens
  misc_RNA (1)...(19): siRNA sense strand
ucaaagagccugacuauuc

SEQ ID NO: 1509788 - RNA, 19 nt, Homo sapiens
  misc_RNA (1)...(19): siRNA sense strand
ggaaagcaaucauuagaca

SEQ ID NO: 1509789 - RNA, 19 nt, Homo sapiens
  misc_RNA (1)...(19): siRNA sense strand
ccacaacaauauugaguuu

SEQ ID NO: 1509790 - RNA, 19 nt, Homo sapiens
  misc_RNA (1)...(19): siRNA sense strand
ucaauggucuguauacaaa

SEQ ID NO: 1509791 - RNA, 19 nt, Homo sapiens
  misc_RNA (1)...(19): siRNA sense strand
caauggaacuuuauacuuc

SEQ ID NO: 1509792 - RNA, 19 nt, Homo sapiens
  misc_RNA (1)...(19): siRNA sense strand
gcacaaaccauacucagaa

SEQ ID NO: 1509793 - RNA, 19 nt, Homo sapiens
  misc_RNA (1)...(19): siRNA sense strand
ccuaauggaucccuguuua

SEQ ID NO: 1509794 - RNA, 19 nt, Homo sapiens
  misc_RNA (1)...(19): siRNA sense strand
gaaaugaagguccacuuaa

SEQ ID NO: 1509795 - RNA, 19 nt, Homo sapiens
  misc_RNA (1)...(19): siRNA sense strand
gaccugugauugccauuua

SEQ ID NO: 1509796 - RNA, 19 nt, Homo sapiens
  misc_RNA (1)...(19): siRNA sense strand
ugacagaugugauugaaga

SEQ ID NO: 1509797 - RNA, 19 nt, Homo sapiens
  misc_RNA (1)...(19): siRNA sense strand
caacaagugugaugcaaau

SEQ ID NO: 1509798 - RNA, 19 nt, Homo sapiens
  misc_RNA (1)...(19): siRNA sense strand
ggacugaaauuucccaagu

SEQ ID NO: 1509799 - RNA, 19 nt, Homo sapiens
  misc_RNA (1)...(19): siRNA sense strand
gaagagagcauuuccaaag

SEQ ID NO: 1509800 - RNA, 19 nt, Homo sapiens
  misc_RNA (1)...(19): siRNA sense strand
ggaacauacugucuuggua

SEQ ID NO: 1509801 - RNA, 19 nt, Homo sapiens
  misc_RNA (1)...(19): siRNA sense strand
aaacaccgcagcucuauua

SEQ ID NO: 1509802 - RNA, 19 nt, Homo sapiens
  misc_RNA (1)...(19): siRNA sense strand
ggacaucacccauugcauu

SEQ ID NO: 1509803 - RNA, 19 nt, Homo sapiens
  misc_RNA (1)...(19): siRNA sense strand
cagcuucacuuacaaggua

SEQ ID NO: 1509804 - RNA, 19 nt, Homo sapiens
  misc_RNA (1)...(19): siRNA sense strand
gcaugacaauggcaccuua

SEQ ID NO: 1509805 - RNA, 19 nt, Homo sapiens
  misc_RNA (1)...(19): siRNA sense strand
aauggaaccuuggaaauua

SEQ ID NO: 1509806 - RNA, 19 nt, Homo sapiens
  misc_RNA (1)...(19): siRNA sense strand
cggcauagauacagcauuu

SEQ ID NO: 1509807 - RNA, 19 nt, Homo sapiens
  misc_RNA (1)...(19): siRNA sense strand
ggacuaugaucaaagaugu

SEQ ID NO: 1509808 - RNA, 19 nt, Homo sapiens
  misc_RNA (1)...(19): siRNA sense strand
gaaaaggacugaagugaau

SEQ ID NO: 1509809 - RNA, 19 nt, Homo sapiens
  misc_RNA (1)...(19): siRNA sense strand
gcagauauucucaccuaua

SEQ ID NO: 1509810 - RNA, 19 nt, Homo sapiens
  misc_RNA (1)...(19): siRNA sense strand
ccagagauaucuuggaguu

SEQ ID NO: 1509811 - RNA, 19 nt, Homo sapiens
  misc_RNA (1)...(19): siRNA sense strand
gaacaaacccaguguagag

SEQ ID NO: 1509812 - RNA, 19 nt, Homo sapiens
  misc_RNA (1)...(19): siRNA sense strand
cgaaagaccaagguuauua

SEQ ID NO: 1509813 - RNA, 19 nt, Homo sapiens
  misc_RNA (1)...(19): siRNA sense strand
gagcagaucccucuugguu

SEQ ID NO: 1509814 - RNA, 19 nt, Homo sapiens
  misc_RNA (1)...(19): siRNA sense strand
gccaagugguuauguagua

SEQ ID NO: 1509815 - RNA, 19 nt, Homo sapiens
  misc_RNA (1)...(19): siRNA sense strand
ccaaacaguugucucagaa

SEQ ID NO: 1509816 - RNA, 19 nt, Homo sapiens
  misc_RNA (1)...(19): siRNA sense strand
gaucuuccaugccauucua

SEQ ID NO: 1509817 - RNA, 19 nt, Homo sapiens
  misc_RNA (1)...(19): siRNA sense strand
ggagguacacugcacauuu

SEQ ID NO: 1509818 - RNA, 19 nt, Homo sapiens
  misc_RNA (1)...(19): siRNA sense strand
aaacacaccucaagcacaa

SEQ ID NO: 1509819 - RNA, 19 nt, Homo sapiens
  misc_RNA (1)...(19): siRNA sense strand
ucaaggacaucacccauug

SEQ ID NO: 1509820 - RNA, 19 nt, Homo sapiens
  misc_RNA (1)...(19): siRNA sense strand
aaucaaagcuggagacaca

SEQ ID NO: 1509821 - RNA, 19 nt, Homo sapiens
  misc_RNA (1)...(19): siRNA sense strand
acaguuaccuggauucuug

SEQ ID NO: 1509822 - RNA, 19 nt, Homo sapiens
  misc_RNA (1)...(19): siRNA sense strand
gcacagaccaccuucaugu

SEQ ID NO: 1509823 - RNA, 19 nt, Homo sapiens
  misc_RNA (1)...(19): siRNA sense strand
uaagaaaccaguucaagaa

SEQ ID NO: 1509824 - RNA, 19 nt, Homo sapiens
  misc_RNA (1)...(19): siRNA sense strand
aaacaacacccacaauaaa

SEQ ID NO: 1509825 - RNA, 19 nt, Homo sapiens
  misc_RNA (1)...(19): siRNA sense strand
gcacauggaccacaacaau

SEQ ID NO: 1509826 - RNA, 19 nt, Homo sapiens
  misc_RNA (1)...(19): siRNA sense strand
ccaauggaccacaaaguua

SEQ ID NO: 1509827 - RNA, 19 nt, Homo sapiens
  misc_RNA (1)...(19): siRNA sense strand
ccaaugacaugauuuccuu

SEQ ID NO: 1509828 - RNA, 19 nt, Homo sapiens
  misc_RNA (1)...(19): siRNA sense strand
uaaggacuaugaucaaaga

SEQ ID NO: 1509829 - RNA, 19 nt, Homo sapiens
  misc_RNA (1)...(19): siRNA sense strand
ggauacaacagcuugguua

SEQ ID NO: 1509830 - RNA, 19 nt, Homo sapiens
  misc_RNA (1)...(19): siRNA sense strand
ggacggauccuaauagaca

SEQ ID NO: 1509831 - RNA, 19 nt, Homo sapiens
  misc_RNA (1)...(19): siRNA sense strand
caaagagccugacuauucu

SEQ ID NO: 1509832 - RNA, 19 nt, Homo sapiens
  misc_RNA (1)...(19): siRNA sense strand
gaacuagcccaagcaagua

SEQ ID NO: 1509833 - RNA, 19 nt, Homo sapiens
  misc_RNA (1)...(19): siRNA sense strand
gcauugaauugcucuguug

SEQ ID NO: 1509834 - RNA, 19 nt, Homo sapiens
  misc_RNA (1)...(19): siRNA sense strand
uaacucagaugccuuucuu

SEQ ID NO: 1509835 - RNA, 19 nt, Homo sapiens
  misc_RNA (1)...(19): siRNA sense strand
gaaaccaguucaagaagca

SEQ ID NO: 1509836 - RNA, 19 nt, Homo sapiens
  misc_RNA (1)...(19): siRNA sense strand
gaauugacccacaacauug

SEQ ID NO: 1509837 - RNA, 19 nt, Homo sapiens
  misc_RNA (1)...(19): siRNA sense strand
agacaggccucaaauuaau

SEQ ID NO: 1509838 - RNA, 19 nt, Homo sapiens
  misc_RNA (1)...(19): siRNA sense strand
aaaguuggcuauauugaga

SEQ ID NO: 1509839 - RNA, 19 nt, Homo sapiens
  misc_RNA (1)...(19): siRNA sense strand
gaucaugccagacaauauu

SEQ ID NO: 1509840 - RNA, 19 nt, Homo sapiens
  misc_RNA (1)...(19): siRNA sense strand
caaauaauguggagguuac

SEQ ID NO: 1509841 - RNA, 19 nt, Homo sapiens
  misc_RNA (1)...(19): siRNA sense strand
gaaaacaacacccacaaua

SEQ ID NO: 1509842 - RNA, 19 nt, Homo sapiens
  misc_RNA (1)...(19): siRNA sense strand
guaaauaccacaaauaguc

SEQ ID NO: 1509843 - RNA, 19 nt, Homo sapiens
  misc_RNA (1)...(19): siRNA sense strand
ucaaagaugucaaugucaa

SEQ ID NO: 1509844 - RNA, 19 nt, Homo sapiens
  misc_RNA (1)...(19): siRNA sense strand
gagguacacugcacauuuc

SEQ ID NO: 1509845 - RNA, 19 nt, Homo sapiens
  misc_RNA (1)...(19): siRNA sense strand
cuacagccaugucaaagaa

SEQ ID NO: 1509846 - RNA, 19 nt, Homo sapiens
  misc_RNA (1)...(19): siRNA sense strand
gaagccagauguaauaaaa

SEQ ID NO: 1509847 - RNA, 19 nt, Homo sapiens
  misc_RNA (1)...(19): siRNA sense strand
gcaccuuagucauuaaaga

SEQ ID NO: 1509848 - RNA, 19 nt, Homo sapiens
  misc_RNA (1)...(19): siRNA sense strand
gaagaccgacauuuagaaa

SEQ ID NO: 1509849 - RNA, 19 nt, Homo sapiens
  misc_RNA (1)...(19): siRNA sense strand
cugcaucugucaucacuua

SEQ ID NO: 1509850 - RNA, 19 nt, Homo sapiens
  misc_RNA (1)...(19): siRNA sense strand
gaaagaccaagguuauuau

SEQ ID NO: 1509851 - RNA, 19 nt, Homo sapiens
  misc_RNA (1)...(19): siRNA sense strand
ggucgaagccuaucaggaa

SEQ ID NO: 1509852 - RNA, 19 nt, Homo sapiens
  misc_RNA (1)...(19): siRNA sense strand
caagggauaacaauacuaa

SEQ ID NO: 1509853 - RNA, 19 nt, Homo sapiens
  misc_RNA (1)...(19): siRNA sense strand
ggacagaagaacacaaaga

SEQ ID NO: 1509854 - RNA, 19 nt, Homo sapiens
  misc_RNA (1)...(19): siRNA sense strand
caaguaagaggcacaacua

SEQ ID NO: 1509855 - RNA, 19 nt, Homo sapiens
  misc_RNA (1)...(19): siRNA sense strand
gguagaaccuuuggucgaa

SEQ ID NO: 1509856 - RNA, 19 nt, Homo sapiens
  misc_RNA (1)...(19): siRNA sense strand
ugagcuaccuccagauauu

SEQ ID NO: 1509857 - RNA, 19 nt, Homo sapiens
  misc_RNA (1)...(19): siRNA sense strand
ccaaauaucaaauggacua

SEQ ID NO: 1509858 - RNA, 19 nt, Homo sapiens
  misc_RNA (1)...(19): siRNA sense strand
ugaaaugaagguccacuua

SEQ ID NO: 1509859 - RNA, 19 nt, Homo sapiens
  misc_RNA (1)...(19): siRNA sense strand
gggaugaucugauacugau

SEQ ID NO: 1509860 - RNA, 19 nt, Homo sapiens
  misc_RNA (1)...(19): siRNA sense strand
aaacacaacugggauuuca

SEQ ID NO: 1509861 - RNA, 19 nt, Homo sapiens
  misc_RNA (1)...(19): siRNA sense strand
gagauucagugauuacauc

SEQ ID NO: 1509862 - RNA, 19 nt, Homo sapiens
  misc_RNA (1)...(19): siRNA sense strand
caaacugucuacugcuauu

SEQ ID NO: 1509863 - RNA, 19 nt, Homo sapiens
  misc_RNA (1)...(19): siRNA sense strand
auaaacagguggcuccuaa

SEQ ID NO: 1509864 - RNA, 19 nt, Homo sapiens
  misc_RNA (1)...(19): siRNA sense strand
guaagcauguuggcuacua

SEQ ID NO: 1509865 - RNA, 19 nt, Homo sapiens
  misc_RNA (1)...(19): siRNA sense strand
agaggaaacuauaucugua

SEQ ID NO: 1509866 - RNA, 19 nt, Homo sapiens
  misc_RNA (1)...(19): siRNA sense strand
gguaguacaguuagaagua

SEQ ID NO: 1509867 - RNA, 19 nt, Homo sapiens
  misc_RNA (1)...(19): siRNA sense strand
gaaccaugaucaacaaugc

SEQ ID NO: 1509868 - RNA, 19 nt, Homo sapiens
  misc_RNA (1)...(19): siRNA sense strand
ccaaguagauugcaaagcu

SEQ ID NO: 1509869 - RNA, 19 nt, Homo sapiens
  misc_RNA (1)...(19): siRNA sense strand
aaagagaacuucagaauuc

SEQ ID NO: 1509870 - RNA, 19 nt, Homo sapiens
  misc_RNA (1)...(19): siRNA sense strand
gaacaaagaccagcuagaa

SEQ ID NO: 1509871 - RNA, 19 nt, Homo sapiens
  misc_RNA (1)...(19): siRNA sense strand
cgucagcgcucccaguuua

SEQ ID NO: 1509872 - RNA, 19 nt, Homo sapiens
  misc_RNA (1)...(19): siRNA sense strand
gagcgacacugacgucaaa

SEQ ID NO: 1509873 - RNA, 19 nt, Homo sapiens
  misc_RNA (1)...(19): siRNA sense strand
aaagaucuauggagaauug

SEQ ID NO: 1509874 - RNA, 19 nt, Homo sapiens
  misc_RNA (1)...(19): siRNA sense strand
gaucuuggcucaguauguu

SEQ ID NO: 1509875 - RNA, 19 nt, Homo sapiens
  misc_RNA (1)...(19): siRNA sense strand
gaacgaauaccugaaguug

SEQ ID NO: 1509876 - RNA, 19 nt, Homo sapiens
  misc_RNA (1)...(19): siRNA sense strand
gucaagaacucaucucaug

SEQ ID NO: 1509877 - RNA, 19 nt, Homo sapiens
  misc_RNA (1)...(19): siRNA sense strand
acagacagauggagcagua

SEQ ID NO: 1509878 - RNA, 19 nt, Homo sapiens
  misc_RNA (1)...(19): siRNA sense strand
gagcugcggucguauguca

SEQ ID NO: 1509879 - RNA, 19 nt, Homo sapiens
  misc_RNA (1)...(19): siRNA sense strand
gcaggagucuucccuugga

SEQ ID NO: 1509880 - RNA, 19 nt, Homo sapiens
  misc_RNA (1)...(19): siRNA sense strand
gaagaaagaccuggaguac

SEQ ID NO: 1509881 - RNA, 19 nt, Homo sapiens
  misc_RNA (1)...(19): siRNA sense strand
caagauacgagcccuuaaa

SEQ ID NO: 1509882 - RNA, 19 nt, Homo sapiens
  misc_RNA (1)...(19): siRNA sense strand
uggaguaccuggaucuaaa

SEQ ID NO: 1509883 - RNA, 19 nt, Homo sapiens
  misc_RNA (1)...(19): siRNA sense strand
aaacacagccaaaggaaga

SEQ ID NO: 1509884 - RNA, 19 nt, Homo sapiens
  misc_RNA (1)...(19): siRNA sense strand
gacaagauacgagcccuua

SEQ ID NO: 1509885 - RNA, 19 nt, Homo sapiens
  misc_RNA (1)...(19): siRNA sense strand
gaaugcugccugccucaua

SEQ ID NO: 1509886 - RNA, 19 nt, Homo sapiens
  misc_RNA (1)...(19): siRNA sense strand
ccaagugacuacaaguaug

SEQ ID NO: 1509887 - RNA, 19 nt, Homo sapiens
  misc_RNA (1)...(19): siRNA sense strand
gcaaauaaagagaacuuca

SEQ ID NO: 1509888 - RNA, 19 nt, Homo sapiens
  misc_RNA (1)...(19): siRNA sense strand
agaaagaucuauggagaau

SEQ ID NO: 1509889 - RNA, 19 nt, Homo sapiens
  misc_RNA (1)...(19): siRNA sense strand
gauacgagcccuuaaagag

SEQ ID NO: 1509890 - RNA, 19 nt, Homo sapiens
  misc_RNA (1)...(19): siRNA sense strand
cccgaaaccugccaaguga

SEQ ID NO: 1509891 - RNA, 19 nt, Homo sapiens
  misc_RNA (1)...(19): siRNA sense strand
acgaauaccugaaguugga

SEQ ID NO: 1509892 - RNA, 19 nt, Homo sapiens
  misc_RNA (1)...(19): siRNA sense strand
agaaaucgcagauacagaa

SEQ ID NO: 1509893 - RNA, 19 nt, Homo sapiens
  misc_RNA (1)...(19): siRNA sense strand
ggaaaaugcuuggaacgaa

SEQ ID NO: 1509894 - RNA, 19 nt, Homo sapiens
  misc_RNA (1)...(19): siRNA sense strand
gaacuucagaauucuagug

SEQ ID NO: 1509895 - RNA, 19 nt, Homo sapiens
  misc_RNA (1)...(19): siRNA sense strand
agaaagaccuggaguaccu

SEQ ID NO: 1509896 - RNA, 19 nt, Homo sapiens
  misc_RNA (1)...(19): siRNA sense strand
ccaaaguucaggaagauga

SEQ ID NO: 1509897 - RNA, 19 nt, Homo sapiens
  misc_RNA (1)...(19): siRNA sense strand
caggagaaaucgcagauac

SEQ ID NO: 1509898 - RNA, 19 nt, Homo sapiens
  misc_RNA (1)...(19): siRNA sense strand
ugaagaaagaccuggagua

SEQ ID NO: 1509899 - RNA, 19 nt, Homo sapiens
  misc_RNA (1)...(19): siRNA sense strand
aaucgcagauacagaaaga

SEQ ID NO: 1509900 - RNA, 19 nt, Homo sapiens
  misc_RNA (1)...(19): siRNA sense strand
gaaaucgcagauacagaaa

SEQ ID NO: 1509901 - RNA, 19 nt, Homo sapiens
  misc_RNA (1)...(19): siRNA sense strand
gcucccaguuuacauggaa

SEQ ID NO: 1509902 - RNA, 19 nt, Homo sapiens
  misc_RNA (1)...(19): siRNA sense strand
gcaugaagcgacaccagaa

SEQ ID NO: 1509903 - RNA, 19 nt, Homo sapiens
  misc_RNA (1)...(19): siRNA sense strand
gaaaaugcuuggaacgaau

SEQ ID NO: 1509904 - RNA, 19 nt, Homo sapiens
  misc_RNA (1)...(19): siRNA sense strand
uacgagcccuuaaagagaa

SEQ ID NO: 1509905 - RNA, 19 nt, Homo sapiens
  misc_RNA (1)...(19): siRNA sense strand
gagcaucuucugugaacaa

SEQ ID NO: 1509906 - RNA, 19 nt, Homo sapiens
  misc_RNA (1)...(19): siRNA sense strand
gaagaugucgagugaagag

SEQ ID NO: 1509907 - RNA, 19 nt, Homo sapiens
  misc_RNA (1)...(19): siRNA sense strand
cagcagucguccaccauug

SEQ ID NO: 1509908 - RNA, 19 nt, Homo sapiens
  misc_RNA (1)...(19): siRNA sense strand
caagagaggccaccaucau

SEQ ID NO: 1509909 - RNA, 19 nt, Homo sapiens
  misc_RNA (1)...(19): siRNA sense strand
gcccaaaguucaggaagau

SEQ ID NO: 1509910 - RNA, 19 nt, Homo sapiens
  misc_RNA (1)...(19): siRNA sense strand
ggaacgaauaccugaaguu

SEQ ID NO: 1509911 - RNA, 19 nt, Homo sapiens
  misc_RNA (1)...(19): siRNA sense strand
caagaacucaucucaugug

SEQ ID NO: 1509912 - RNA, 19 nt, Homo sapiens
  misc_RNA (1)...(19): siRNA sense strand
gggcagagaagaauggaau

SEQ ID NO: 1509913 - RNA, 19 nt, Homo sapiens
  misc_RNA (1)...(19): siRNA sense strand
gaaaaucggcugaugauac

SEQ ID NO: 1509914 - RNA, 19 nt, Homo sapiens
  misc_RNA (1)...(19): siRNA sense strand
acaaagaccagcuagaauc

SEQ ID NO: 1509915 - RNA, 19 nt, Homo sapiens
  misc_RNA (1)...(19): siRNA sense strand
gaaguuggagaaugaugug

SEQ ID NO: 1509916 - RNA, 19 nt, Homo sapiens
  misc_RNA (1)...(19): siRNA sense strand
guuggagaaugauguggaa

SEQ ID NO: 1509917 - RNA, 19 nt, Homo sapiens
  misc_RNA (1)...(19): siRNA sense strand
ggagaucuuggcucaguau

SEQ ID NO: 1509918 - RNA, 19 nt, Homo sapiens
  misc_RNA (1)...(19): siRNA sense strand
gggccacgcugucaagaac

SEQ ID NO: 1509919 - RNA, 19 nt, Homo sapiens
  misc_RNA (1)...(19): siRNA sense strand
uauggagaauugaagaugu

SEQ ID NO: 1509920 - RNA, 19 nt, Homo sapiens
  misc_RNA (1)...(19): siRNA sense strand
ggagaaugauguggaacag

SEQ ID NO: 1509921 - RNA, 19 nt, Homo sapiens
  misc_RNA (1)...(19): siRNA sense strand
auaccuaccuccagcugaa

SEQ ID NO: 1509922 - RNA, 19 nt, Homo sapiens
  misc_RNA (1)...(19): siRNA sense strand
ggaggaguguggacaucuc

SEQ ID NO: 1509923 - RNA, 19 nt, Homo sapiens
  misc_RNA (1)...(19): siRNA sense strand
ggacuugugggcccugaga

SEQ ID NO: 1509924 - RNA, 19 nt, Homo sapiens
  misc_RNA (1)...(19): siRNA sense strand
gccaagugacuacaaguau

SEQ ID NO: 1509925 - RNA, 19 nt, Homo sapiens
  misc_RNA (1)...(19): siRNA sense strand
ccacugagauggaaaaugc

SEQ ID NO: 1509926 - RNA, 19 nt, Homo sapiens
  misc_RNA (1)...(19): siRNA sense strand
uggagaagauugccuacca

SEQ ID NO: 1509927 - RNA, 19 nt, Homo sapiens
  misc_RNA (1)...(19): siRNA sense strand
cugaagaugucgagugaag

SEQ ID NO: 1509928 - RNA, 19 nt, Homo sapiens
  misc_RNA (1)...(19): siRNA sense strand
gaggaggaguguggacauc

SEQ ID NO: 1509929 - RNA, 19 nt, Homo sapiens
  misc_RNA (1)...(19): siRNA sense strand
gaccuaagagugccuugga

SEQ ID NO: 1509930 - RNA, 19 nt, Homo sapiens
  misc_RNA (1)...(19): siRNA sense strand
ggagaaaucgcagauacag

SEQ ID NO: 1509931 - RNA, 19 nt, Homo sapiens
  misc_RNA (1)...(19): siRNA sense strand
ccagagaguccacugagau

SEQ ID NO: 1509932 - RNA, 19 nt, Homo sapiens
  misc_RNA (1)...(19): siRNA sense strand
aaucugugcuggagguguu

SEQ ID NO: 1509933 - RNA, 19 nt, Homo sapiens
  misc_RNA (1)...(19): siRNA sense strand
caaagaccagcuagaaucu

SEQ ID NO: 1509934 - RNA, 19 nt, Homo sapiens
  misc_RNA (1)...(19): siRNA sense strand
gacacugacgucaaacuga

SEQ ID NO: 1509935 - RNA, 19 nt, Homo sapiens
  misc_RNA (1)...(19): siRNA sense strand
cagaaagaucuauggagaa

SEQ ID NO: 1509936 - RNA, 19 nt, Homo sapiens
  misc_RNA (1)...(19): siRNA sense strand
gcaggagcaacacagaaga

SEQ ID NO: 1509937 - RNA, 19 nt, Homo sapiens
  misc_RNA (1)...(19): siRNA sense strand
aagaccagcuagaaucugu

SEQ ID NO: 1509938 - RNA, 19 nt, Homo sapiens
  misc_RNA (1)...(19): siRNA sense strand
gagaaaucgcagauacaga

SEQ ID NO: 1509939 - RNA, 19 nt, Homo sapiens
  misc_RNA (1)...(19): siRNA sense strand
gaccuucccuagaccuaag

SEQ ID NO: 1509940 - RNA, 19 nt, Homo sapiens
  misc_RNA (1)...(19): siRNA sense strand
ugccuucacucucaacuuc

SEQ ID NO: 1509941 - RNA, 19 nt, Homo sapiens
  misc_RNA (1)...(19): siRNA sense strand
gaauucuaguggagucagu

SEQ ID NO: 1509942 - RNA, 19 nt, Homo sapiens
  misc_RNA (1)...(19): siRNA sense strand
cagcagagcgagucacagu

SEQ ID NO: 1509943 - RNA, 19 nt, Homo sapiens
  misc_RNA (1)...(19): siRNA sense strand
gagcagcuggagcgcauga

SEQ ID NO: 1509944 - RNA, 19 nt, Homo sapiens
  misc_RNA (1)...(19): siRNA sense strand
caaauaaagagaacuucag

SEQ ID NO: 1509945 - RNA, 19 nt, Homo sapiens
  misc_RNA (1)...(19): siRNA sense strand
gcaggccugagugcaaaua

SEQ ID NO: 1509946 - RNA, 19 nt, Homo sapiens
  misc_RNA (1)...(19): siRNA sense strand
gaaagaucuauggagaauu

SEQ ID NO: 1509947 - RNA, 19 nt, Homo sapiens
  misc_RNA (1)...(19): siRNA sense strand
gcaacacagaagagccuuu

SEQ ID NO: 1509948 - RNA, 19 nt, Homo sapiens
  misc_RNA (1)...(19): siRNA sense strand
gugcaaauaaagagaacuu

SEQ ID NO: 1509949 - RNA, 19 nt, Homo sapiens
  misc_RNA (1)...(19): siRNA sense strand
ccagccaccugaagauguc

SEQ ID NO: 1509950 - RNA, 19 nt, Homo sapiens
  misc_RNA (1)...(19): siRNA sense strand
gccugugccuucacucuca

SEQ ID NO: 1509951 - RNA, 19 nt, Homo sapiens
  misc_RNA (1)...(19): siRNA sense strand
aaugcugccugccucauau

SEQ ID NO: 1509952 - RNA, 19 nt, Homo sapiens
  misc_RNA (1)...(19): siRNA sense strand
auacgagcccuuaaagaga

SEQ ID NO: 1509953 - RNA, 19 nt, Homo sapiens
  misc_RNA (1)...(19): siRNA sense strand
caccagcgaggcaagauga

SEQ ID NO: 1509954 - RNA, 19 nt, Homo sapiens
  misc_RNA (1)...(19): siRNA sense strand
uaccugaaguuggagaaug

SEQ ID NO: 1509955 - RNA, 19 nt, Homo sapiens
  misc_RNA (1)...(19): siRNA sense strand
gaaaccugccaagugacua

SEQ ID NO: 1509956 - RNA, 19 nt, Homo sapiens
  misc_RNA (1)...(19): siRNA sense strand
gauacagaaagaucuaugg

SEQ ID NO: 1509957 - RNA, 19 nt, Homo sapiens
  misc_RNA (1)...(19): siRNA sense strand
gaucuauggagaauugaag

SEQ ID NO: 1509958 - RNA, 19 nt, Homo sapiens
  misc_RNA (1)...(19): siRNA sense strand
caaacugagcaucuucugu

SEQ ID NO: 1509959 - RNA, 19 nt, Homo sapiens
  misc_RNA (1)...(19): siRNA sense strand
aggcgaagcccaaaguuca

SEQ ID NO: 1509960 - RNA, 19 nt, Homo sapiens
  misc_RNA (1)...(19): siRNA sense strand
gagaauugaagaugucacu

SEQ ID NO: 1509961 - RNA, 19 nt, Homo sapiens
  misc_RNA (1)...(19): siRNA sense strand
cagagaguccacugagaug

SEQ ID NO: 1509962 - RNA, 19 nt, Homo sapiens
  misc_RNA (1)...(19): siRNA sense strand
accugaaguuggagaauga

SEQ ID NO: 1509963 - RNA, 19 nt, Homo sapiens
  misc_RNA (1)...(19): siRNA sense strand
caacgggcagagaagaaug

SEQ ID NO: 1509964 - RNA, 19 nt, Homo sapiens
  misc_RNA (1)...(19): siRNA sense strand
ucccuguccuucccagaaa

SEQ ID NO: 1509965 - RNA, 19 nt, Homo sapiens
  misc_RNA (1)...(19): siRNA sense strand
gaagcccaaaguucaggaa

SEQ ID NO: 1509966 - RNA, 19 nt, Homo sapiens
  misc_RNA (1)...(19): siRNA sense strand
gagccagccaccugaagau

SEQ ID NO: 1509967 - RNA, 19 nt, Homo sapiens
  misc_RNA (1)...(19): siRNA sense strand
accugaagaugucgaguga

SEQ ID NO: 1509968 - RNA, 19 nt, Homo sapiens
  misc_RNA (1)...(19): siRNA sense strand
aggccugagugcaaauaaa

SEQ ID NO: 1509969 - RNA, 19 nt, Homo sapiens
  misc_RNA (1)...(19): siRNA sense strand
gaaaugaaacggagaaaua

SEQ ID NO: 1509970 - RNA, 19 nt, Homo sapiens
  misc_RNA (1)...(19): siRNA sense strand
gaacaucagcggaauauuu

SEQ ID NO: 1509971 - RNA, 19 nt, Homo sapiens
  misc_RNA (1)...(19): siRNA sense strand
uaagguggcuguuggaauu

SEQ ID NO: 1509972 - RNA, 19 nt, Homo sapiens
  misc_RNA (1)...(19): siRNA sense strand
cgacuccuaugauguaaua

SEQ ID NO: 1509973 - RNA, 19 nt, Homo sapiens
  misc_RNA (1)...(19): siRNA sense strand
ggaagaaaccagccuuaaa

SEQ ID NO: 1509974 - RNA, 19 nt, Homo sapiens
  misc_RNA (1)...(19): siRNA sense strand
aaagauugcuuccuuguau

SEQ ID NO: 1509975 - RNA, 19 nt, Homo sapiens
  misc_RNA (1)...(19): siRNA sense strand
uuacauaugucacgaaguu

SEQ ID NO: 1509976 - RNA, 19 nt, Homo sapiens
  misc_RNA (1)...(19): siRNA sense strand
gauccagccuuguuuauca

SEQ ID NO: 1509977 - RNA, 19 nt, Homo sapiens
  misc_RNA (1)...(19): siRNA sense strand
guugugaucucuuugauga

SEQ ID NO: 1509978 - RNA, 19 nt, Homo sapiens
  misc_RNA (1)...(19): siRNA sense strand
gaauaaugguccuguuuua

SEQ ID NO: 1509979 - RNA, 19 nt, Homo sapiens
  misc_RNA (1)...(19): siRNA sense strand
ggaaugccaccaugucuuu

SEQ ID NO: 1509980 - RNA, 19 nt, Homo sapiens
  misc_RNA (1)...(19): siRNA sense strand
gaaagauugcuuccuugua

SEQ ID NO: 1509981 - RNA, 19 nt, Homo sapiens
  misc_RNA (1)...(19): siRNA sense strand
gaagaaaccagccuuaaac

SEQ ID NO: 1509982 - RNA, 19 nt, Homo sapiens
  misc_RNA (1)...(19): siRNA sense strand
gaauaagacauuaggagaa

SEQ ID NO: 1509983 - RNA, 19 nt, Homo sapiens
  misc_RNA (1)...(19): siRNA sense strand
uuagaaagauugcuuccuu

SEQ ID NO: 1509984 - RNA, 19 nt, Homo sapiens
  misc_RNA (1)...(19): siRNA sense strand
ccaugucuuugaugaauaa

SEQ ID NO: 1509985 - RNA, 19 nt, Homo sapiens
  misc_RNA (1)...(19): siRNA sense strand
cagauccuauucacaauga

SEQ ID NO: 1509986 - RNA, 19 nt, Homo sapiens
  misc_RNA (1)...(19): siRNA sense strand
gugcugucuuccucuauua

SEQ ID NO: 1509987 - RNA, 19 nt, Homo sapiens
  misc_RNA (1)...(19): siRNA sense strand
uaagauccagccuuguuua

SEQ ID NO: 1509988 - RNA, 19 nt, Homo sapiens
  misc_RNA (1)...(19): siRNA sense strand
gaacagcagcuuaugaacu

SEQ ID NO: 1509989 - RNA, 19 nt, Homo sapiens
  misc_RNA (1)...(19): siRNA sense strand
uaagaacgcguaucacaau

SEQ ID NO: 1509990 - RNA, 19 nt, Homo sapiens
  misc_RNA (1)...(19): siRNA sense strand
ucaccuagcugguuuuaaa

SEQ ID NO: 1509991 - RNA, 19 nt, Homo sapiens
  misc_RNA (1)...(19): siRNA sense strand
ugaauaagaacgcguauca

SEQ ID NO: 1509992 - RNA, 19 nt, Homo sapiens
  misc_RNA (1)...(19): siRNA sense strand
gagaacaucagcggaauau

SEQ ID NO: 1509993 - RNA, 19 nt, Homo sapiens
  misc_RNA (1)...(19): siRNA sense strand
guugaugggugacaaaaua

SEQ ID NO: 1509994 - RNA, 19 nt, Homo sapiens
  misc_RNA (1)...(19): siRNA sense strand
aggacaaccuuccgacuuu

SEQ ID NO: 1509995 - RNA, 19 nt, Homo sapiens
  misc_RNA (1)...(19): siRNA sense strand
gaaguucaccuagcugguu

SEQ ID NO: 1509996 - RNA, 19 nt, Homo sapiens
  misc_RNA (1)...(19): siRNA sense strand
cagaacagcagcuuaugaa

SEQ ID NO: 1509997 - RNA, 19 nt, Homo sapiens
  misc_RNA (1)...(19): siRNA sense strand
ugaugaguuugacaacaua

SEQ ID NO: 1509998 - RNA, 19 nt, Homo sapiens
  misc_RNA (1)...(19): siRNA sense strand
ucaagaguccuuugcacua

SEQ ID NO: 1509999 - RNA, 19 nt, Homo sapiens
  misc_RNA (1)...(19): siRNA sense strand
ccaacaacaggaauuauug

SEQ ID NO: 1510000 - RNA, 19 nt, Homo sapiens
  misc_RNA (1)...(19): siRNA sense strand
ucuauuauguacugcauug

SEQ ID NO: 1510001 - RNA, 19 nt, Homo sapiens
  misc_RNA (1)...(19): siRNA sense strand
ccaaaaguguuucccaaaa

SEQ ID NO: 1510002 - RNA, 19 nt, Homo sapiens
  misc_RNA (1)...(19): siRNA sense strand
ggaggaguuuugaagaaua

SEQ ID NO: 1510003 - RNA, 19 nt, Homo sapiens
  misc_RNA (1)...(19): siRNA sense strand
guagcgauaaguuugauuu

SEQ ID NO: 1510004 - RNA, 19 nt, Homo sapiens
  misc_RNA (1)...(19): siRNA sense strand
gaaguugggagaaggacaa

SEQ ID NO: 1510005 - RNA, 19 nt, Homo sapiens
  misc_RNA (1)...(19): siRNA sense strand
uuuaggacaugaagaagaa

SEQ ID NO: 1510006 - RNA, 19 nt, Homo sapiens
  misc_RNA (1)...(19): siRNA sense strand
gaauuauugccaucacauu

SEQ ID NO: 1510007 - RNA, 19 nt, Homo sapiens
  misc_RNA (1)...(19): siRNA sense strand
gaagaaguugggagaagga

SEQ ID NO: 1510008 - RNA, 19 nt, Homo sapiens
  misc_RNA (1)...(19): siRNA sense strand
caccaugucuuugaugaau

SEQ ID NO: 1510009 - RNA, 19 nt, Homo sapiens
  misc_RNA (1)...(19): siRNA sense strand
gaagaagaaguugggagaa

SEQ ID NO: 1510010 - RNA, 19 nt, Homo sapiens
  misc_RNA (1)...(19): siRNA sense strand
uaucagaacagcagcuuau

SEQ ID NO: 1510011 - RNA, 19 nt, Homo sapiens
  misc_RNA (1)...(19): siRNA sense strand
aaucgacuccuaugaugua

SEQ ID NO: 1510012 - RNA, 19 nt, Homo sapiens
  misc_RNA (1)...(19): siRNA sense strand
gccaccaugucuuugauga

SEQ ID NO: 1510013 - RNA, 19 nt, Homo sapiens
  misc_RNA (1)...(19): siRNA sense strand
gggaacgaaugucuauugg

SEQ ID NO: 1510014 - RNA, 19 nt, Homo sapiens
  misc_RNA (1)...(19): siRNA sense strand
gaagaauaagacauuagga

SEQ ID NO: 1510015 - RNA, 19 nt, Homo sapiens
  misc_RNA (1)...(19): siRNA sense strand
ucacgaaguucaccuagcu

SEQ ID NO: 1510016 - RNA, 19 nt, Homo sapiens
  misc_RNA (1)...(19): siRNA sense strand
gaggaguuuugaagaauaa

SEQ ID NO: 1510017 - RNA, 19 nt, Homo sapiens
  misc_RNA (1)...(19): siRNA sense strand
ggaaaugaaacggagaaau

SEQ ID NO: 1510018 - RNA, 19 nt, Homo sapiens
  misc_RNA (1)...(19): siRNA sense strand
caagaguccuuugcacuac

SEQ ID NO: 1510019 - RNA, 19 nt, Homo sapiens
  misc_RNA (1)...(19): siRNA sense strand
aacagcagcuuaugaacug

SEQ ID NO: 1510020 - RNA, 19 nt, Homo sapiens
  misc_RNA (1)...(19): siRNA sense strand
gguaucuuguggccauauu

SEQ ID NO: 1510021 - RNA, 19 nt, Homo sapiens
  misc_RNA (1)...(19): siRNA sense strand
uaaguuugauuugcccuau

SEQ ID NO: 1510022 - RNA, 19 nt, Homo sapiens
  misc_RNA (1)...(19): siRNA sense strand
ugagugcugucuuccucua

SEQ ID NO: 1510023 - RNA, 19 nt, Homo sapiens
  misc_RNA (1)...(19): siRNA sense strand
aauaagauccagccuuguu

SEQ ID NO: 1510024 - RNA, 19 nt, Homo sapiens
  misc_RNA (1)...(19): siRNA sense strand
ggacaugaagaagaaguug

SEQ ID NO: 1510025 - RNA, 19 nt, Homo sapiens
  misc_RNA (1)...(19): siRNA sense strand
gauuugcccuaugggauga

SEQ ID NO: 1510026 - RNA, 19 nt, Homo sapiens
  misc_RNA (1)...(19): siRNA sense strand
caaauccgaauauuagauc

SEQ ID NO: 1510027 - RNA, 19 nt, Homo sapiens
  misc_RNA (1)...(19): siRNA sense strand
ucagaacagcagcuuauga

SEQ ID NO: 1510028 - RNA, 19 nt, Homo sapiens
  misc_RNA (1)...(19): siRNA sense strand
gaguugugaucucuuugau

SEQ ID NO: 1510029 - RNA, 19 nt, Homo sapiens
  misc_RNA (1)...(19): siRNA sense strand
uaagccacaugauuuaagg

SEQ ID NO: 1510030 - RNA, 19 nt, Homo sapiens
  misc_RNA (1)...(19): siRNA sense strand
ugaucucuuugaugaguuu

SEQ ID NO: 1510031 - RNA, 19 nt, Homo sapiens
  misc_RNA (1)...(19): siRNA sense strand
ggaauuauugccaucacau

SEQ ID NO: 1510032 - RNA, 19 nt, Homo sapiens
  misc_RNA (1)...(19): siRNA sense strand
uuucagauccuauucacaa

SEQ ID NO: 1510033 - RNA, 19 nt, Homo sapiens
  misc_RNA (1)...(19): siRNA sense strand
aauaagaacgcguaucaca

SEQ ID NO: 1510034 - RNA, 19 nt, Homo sapiens
  misc_RNA (1)...(19): siRNA sense strand
cacaaugacccuaauacga

SEQ ID NO: 1510035 - RNA, 19 nt, Homo sapiens
  misc_RNA (1)...(19): siRNA sense strand
ggacaaccuuccgacuuuu

SEQ ID NO: 1510036 - RNA, 19 nt, Homo sapiens
  misc_RNA (1)...(19): siRNA sense strand
gauccuuucauuaucagaa

SEQ ID NO: 1510037 - RNA, 19 nt, Homo sapiens
  misc_RNA (1)...(19): siRNA sense strand
ugagaacaucagcggaaua

SEQ ID NO: 1510038 - RNA, 19 nt, Homo sapiens
  misc_RNA (1)...(19): siRNA sense strand
guaugguagcgauaaguuu

SEQ ID NO: 1510039 - RNA, 19 nt, Homo sapiens
  misc_RNA (1)...(19): siRNA sense strand
gaaacggagaaauaagauc

SEQ ID NO: 1510040 - RNA, 19 nt, Homo sapiens
  misc_RNA (1)...(19): siRNA sense strand
cccaacaacaggaauuauu

SEQ ID NO: 1510041 - RNA, 19 nt, Homo sapiens
  misc_RNA (1)...(19): siRNA sense strand
aagaagaaguugggagaag

SEQ ID NO: 1510042 - RNA, 19 nt, Homo sapiens
  misc_RNA (1)...(19): siRNA sense strand
uugacaacauacccuguaa

SEQ ID NO: 1510043 - RNA, 19 nt, Homo sapiens
  misc_RNA (1)...(19): siRNA sense strand
uaugguagcgauaaguuug

SEQ ID NO: 1510044 - RNA, 19 nt, Homo sapiens
  misc_RNA (1)...(19): siRNA sense strand
uggcaccuguggaaaugaa

SEQ ID NO: 1510045 - RNA, 19 nt, Homo sapiens
  misc_RNA (1)...(19): siRNA sense strand
agaguccuuugcacuacua

SEQ ID NO: 1510046 - RNA, 19 nt, Homo sapiens
  misc_RNA (1)...(19): siRNA sense strand
gacaacauacccuguaaaa

SEQ ID NO: 1510047 - RNA, 19 nt, Homo sapiens
  misc_RNA (1)...(19): siRNA sense strand
uugaugaguuugacaacau

SEQ ID NO: 1510048 - RNA, 19 nt, Homo sapiens
  misc_RNA (1)...(19): siRNA sense strand
aaaccuaaacacccaacaa

SEQ ID NO: 1510049 - RNA, 19 nt, Homo sapiens
  misc_RNA (1)...(19): siRNA sense strand
aaaaucgacuccuaugaug

SEQ ID NO: 1510050 - RNA, 19 nt, Homo sapiens
  misc_RNA (1)...(19): siRNA sense strand
cacccaacaacaggaauua

SEQ ID NO: 1510051 - RNA, 19 nt, Homo sapiens
  misc_RNA (1)...(19): siRNA sense strand
gggaaugccaccaugucuu

SEQ ID NO: 1510052 - RNA, 19 nt, Homo sapiens
  misc_RNA (1)...(19): siRNA sense strand
ugacaacauacccuguaaa

SEQ ID NO: 1510053 - RNA, 19 nt, Homo sapiens
  misc_RNA (1)...(19): siRNA sense strand
caacuuuucugaccucaag

SEQ ID NO: 1510054 - RNA, 19 nt, Homo sapiens
  misc_RNA (1)...(19): siRNA sense strand
aaguucaccuagcugguuu

SEQ ID NO: 1510055 - RNA, 19 nt, Homo sapiens
  misc_RNA (1)...(19): siRNA sense strand
uggaagaaaccagccuuaa

SEQ ID NO: 1510056 - RNA, 19 nt, Homo sapiens
  misc_RNA (1)...(19): siRNA sense strand
aaacacccaacaacaggaa

SEQ ID NO: 1510057 - RNA, 19 nt, Homo sapiens
  misc_RNA (1)...(19): siRNA sense strand
ugugaucucuuugaugagu

SEQ ID NO: 1510058 - RNA, 19 nt, Homo sapiens
  misc_RNA (1)...(19): siRNA sense strand
aagaacgcguaucacaaug

SEQ ID NO: 1510059 - RNA, 19 nt, Homo sapiens
  misc_RNA (1)...(19): siRNA sense strand
caacaacaggaauuauugc

SEQ ID NO: 1510060 - RNA, 19 nt, Homo sapiens
  misc_RNA (1)...(19): siRNA sense strand
ugaaacggagaaauaagau

SEQ ID NO: 1510061 - RNA, 19 nt, Homo sapiens
  misc_RNA (1)...(19): siRNA sense strand
gguugguaauggaggaguu

SEQ ID NO: 1510062 - RNA, 19 nt, Homo sapiens
  misc_RNA (1)...(19): siRNA sense strand
auaagaacgcguaucacaa

SEQ ID NO: 1510063 - RNA, 19 nt, Homo sapiens
  misc_RNA (1)...(19): siRNA sense strand
uucaucaguuucacccuuu

SEQ ID NO: 1510064 - RNA, 19 nt, Homo sapiens
  misc_RNA (1)...(19): siRNA sense strand
aagauugcuuccuuguaug

SEQ ID NO: 1510065 - RNA, 19 nt, Homo sapiens
  misc_RNA (1)...(19): siRNA sense strand
aaugaauaaugguccuguu

SEQ ID NO: 1510066 - RNA, 19 nt, Homo sapiens
  misc_RNA (1)...(19): siRNA sense strand
ugaagaauaagacauuagg

SEQ ID NO: 1510067 - RNA, 19 nt, Homo sapiens
  misc_RNA (1)...(19): siRNA sense strand
ugucuuccucuauuaugua

SEQ ID NO: 1510068 - RNA, 19 nt, Homo sapiens
  misc_RNA (1)...(19): siRNA sense strand
cacauuggcguuuuacaua

SEQ ID NO: 1510069 - RNA, 19 nt, Homo sapiens
  misc_RNA (1)...(19): siRNA sense strand
gaagacagcauguguguua

SEQ ID NO: 1510070 - RNA, 19 nt, Homo sapiens
  misc_RNA (1)...(19): siRNA sense strand
aaagucaugugccauauua

SEQ ID NO: 1510071 - RNA, 19 nt, Homo sapiens
  misc_RNA (1)...(19): siRNA sense strand
acaagugucugcagaagua

SEQ ID NO: 1510072 - RNA, 19 nt, Homo sapiens
  misc_RNA (1)...(19): siRNA sense strand
guucaugaauugagaguaa

SEQ ID NO: 1510073 - RNA, 19 nt, Homo sapiens
  misc_RNA (1)...(19): siRNA sense strand
aaagagaucucgaaguguu

SEQ ID NO: 1510074 - RNA, 19 nt, Homo sapiens
  misc_RNA (1)...(19): siRNA sense strand
caacuuaacucuucaucca

SEQ ID NO: 1510075 - RNA, 19 nt, Homo sapiens
  misc_RNA (1)...(19): siRNA sense strand
gagaaccacuccagaauac

SEQ ID NO: 1510076 - RNA, 19 nt, Homo sapiens
  misc_RNA (1)...(19): siRNA sense strand
uuuaauggcucucaugaaa

SEQ ID NO: 1510077 - RNA, 19 nt, Homo sapiens
  misc_RNA (1)...(19): siRNA sense strand
cuuauacacugucuucaua

SEQ ID NO: 1510078 - RNA, 19 nt, Homo sapiens
  misc_RNA (1)...(19): siRNA sense strand
ugauugggcucuauacauu

SEQ ID NO: 1510079 - RNA, 19 nt, Homo sapiens
  misc_RNA (1)...(19): siRNA sense strand
agaagaagauauagcaaga

SEQ ID NO: 1510080 - RNA, 19 nt, Homo sapiens
  misc_RNA (1)...(19): siRNA sense strand
guauuuauguguugaguca

SEQ ID NO: 1510081 - RNA, 19 nt, Homo sapiens
  misc_RNA (1)...(19): siRNA sense strand
gcaaagucaugugccauau

SEQ ID NO: 1510082 - RNA, 19 nt, Homo sapiens
  misc_RNA (1)...(19): siRNA sense strand
ccacuugcuuugagauaaa

SEQ ID NO: 1510083 - RNA, 19 nt, Homo sapiens
  misc_RNA (1)...(19): siRNA sense strand
gcaagaagacagcaugugu

SEQ ID NO: 1510084 - RNA, 19 nt, Homo sapiens
  misc_RNA (1)...(19): siRNA sense strand
gaacuucaagaaacauuug

SEQ ID NO: 1510085 - RNA, 19 nt, Homo sapiens
  misc_RNA (1)...(19): siRNA sense strand
caagagaaccacuccagaa

SEQ ID NO: 1510086 - RNA, 19 nt, Homo sapiens
  misc_RNA (1)...(19): siRNA sense strand
agaauugccuuuacuaucu

SEQ ID NO: 1510087 - RNA, 19 nt, Homo sapiens
  misc_RNA (1)...(19): siRNA sense strand
cagcagguauuuauguguu

SEQ ID NO: 1510088 - RNA, 19 nt, Homo sapiens
  misc_RNA (1)...(19): siRNA sense strand
gaaccacuccagaauacuu

SEQ ID NO: 1510089 - RNA, 19 nt, Homo sapiens
  misc_RNA (1)...(19): siRNA sense strand
cgacgaguauuauaacaag

SEQ ID NO: 1510090 - RNA, 19 nt, Homo sapiens
  misc_RNA (1)...(19): siRNA sense strand
aaccauggcuacuuucuga

SEQ ID NO: 1510091 - RNA, 19 nt, Homo sapiens
  misc_RNA (1)...(19): siRNA sense strand
gaagauauagcaagaagac

SEQ ID NO: 1510092 - RNA, 19 nt, Homo sapiens
  misc_RNA (1)...(19): siRNA sense strand
gaaaacagacuugaagaaa

SEQ ID NO: 1510093 - RNA, 19 nt, Homo sapiens
  misc_RNA (1)...(19): siRNA sense strand
gagcagcagguauuuaugu

SEQ ID NO: 1510094 - RNA, 19 nt, Homo sapiens
  misc_RNA (1)...(19): siRNA sense strand
guauugcauuugucauuug

SEQ ID NO: 1510095 - RNA, 19 nt, Homo sapiens
  misc_RNA (1)...(19): siRNA sense strand
gcagguauuuauguguuga

SEQ ID NO: 1510096 - RNA, 19 nt, Homo sapiens
  misc_RNA (1)...(19): siRNA sense strand
gccauugucagguaucaua

SEQ ID NO: 1510097 - RNA, 19 nt, Homo sapiens
  misc_RNA (1)...(19): siRNA sense strand
uguguuaccugcuccagaa

SEQ ID NO: 1510098 - RNA, 19 nt, Homo sapiens
  misc_RNA (1)...(19): siRNA sense strand
acacugucuucauauguaa

SEQ ID NO: 1510099 - RNA, 19 nt, Homo sapiens
  misc_RNA (1)...(19): siRNA sense strand
gauuuagugucccuuauac

SEQ ID NO: 1510100 - RNA, 19 nt, Homo sapiens
  misc_RNA (1)...(19): siRNA sense strand
agacugaccauacugauau

SEQ ID NO: 1510101 - RNA, 19 nt, Homo sapiens
  misc_RNA (1)...(19): siRNA sense strand
gaagaaaauucagauguuc

SEQ ID NO: 1510102 - RNA, 19 nt, Homo sapiens
  misc_RNA (1)...(19): siRNA sense strand
uaucuugguugugcuguuu

SEQ ID NO: 1510103 - RNA, 19 nt, Homo sapiens
  misc_RNA (1)...(19): siRNA sense strand
gauguccuguugucuuaau

SEQ ID NO: 1510104 - RNA, 19 nt, Homo sapiens
  misc_RNA (1)...(19): siRNA sense strand
agagaaccacuccagaaua

SEQ ID NO: 1510105 - RNA, 19 nt, Homo sapiens
  misc_RNA (1)...(19): siRNA sense strand
gaagaagauauagcaagaa

SEQ ID NO: 1510106 - RNA, 19 nt, Homo sapiens
  misc_RNA (1)...(19): siRNA sense strand
ggaacuucaagaaacauuu

SEQ ID NO: 1510107 - RNA, 19 nt, Homo sapiens
  misc_RNA (1)...(19): siRNA sense strand
augauguccuguugucuua

SEQ ID NO: 1510108 - RNA, 19 nt, Homo sapiens
  misc_RNA (1)...(19): siRNA sense strand
ccacucggaauucugauuu

SEQ ID NO: 1510109 - RNA, 19 nt, Homo sapiens
  misc_RNA (1)...(19): siRNA sense strand
aguauaagcuguggauugu

SEQ ID NO: 1510110 - RNA, 19 nt, Homo sapiens
  misc_RNA (1)...(19): siRNA sense strand
ucaagaaacauuugguuca

SEQ ID NO: 1510111 - RNA, 19 nt, Homo sapiens
  misc_RNA (1)...(19): siRNA sense strand
caagaaacauuugguucag

SEQ ID NO: 1510112 - RNA, 19 nt, Homo sapiens
  misc_RNA (1)...(19): siRNA sense strand
aaacuuuggcucuguaaga

SEQ ID NO: 1510113 - RNA, 19 nt, Homo sapiens
  misc_RNA (1)...(19): siRNA sense strand
uauauucugcccuuaguuu

SEQ ID NO: 1510114 - RNA, 19 nt, Homo sapiens
  misc_RNA (1)...(19): siRNA sense strand
guaagucuucuuggcuuua

SEQ ID NO: 1510115 - RNA, 19 nt, Homo sapiens
  misc_RNA (1)...(19): siRNA sense strand
gagugggccucaggugaaa

SEQ ID NO: 1510116 - RNA, 19 nt, Homo sapiens
  misc_RNA (1)...(19): siRNA sense strand
aagaagauauagcaagaag

SEQ ID NO: 1510117 - RNA, 19 nt, Homo sapiens
  misc_RNA (1)...(19): siRNA sense strand
caaagucaugugccauauu

SEQ ID NO: 1510118 - RNA, 19 nt, Homo sapiens
  misc_RNA (1)...(19): siRNA sense strand
ugauuuagugucccuuaua

SEQ ID NO: 1510119 - RNA, 19 nt, Homo sapiens
  misc_RNA (1)...(19): siRNA sense strand
ccauggcuacuuucugaua

SEQ ID NO: 1510120 - RNA, 19 nt, Homo sapiens
  misc_RNA (1)...(19): siRNA sense strand
agcaaaccauggcuacuuu

SEQ ID NO: 1510121 - RNA, 19 nt, Homo sapiens
  misc_RNA (1)...(19): siRNA sense strand
acgguaaacuuccucauag

SEQ ID NO: 1510122 - RNA, 19 nt, Homo sapiens
  misc_RNA (1)...(19): siRNA sense strand
cagacugaccauacugaua

SEQ ID NO: 1510123 - RNA, 19 nt, Homo sapiens
  misc_RNA (1)...(19): siRNA sense strand
ccagaauacuuccagaaaa

SEQ ID NO: 1510124 - RNA, 19 nt, Homo sapiens
  misc_RNA (1)...(19): siRNA sense strand
aaucagaagacuacgguaa

SEQ ID NO: 1510125 - RNA, 19 nt, Homo sapiens
  misc_RNA (1)...(19): siRNA sense strand
uauacacugucuucauaug

SEQ ID NO: 1510126 - RNA, 19 nt, Homo sapiens
  misc_RNA (1)...(19): siRNA sense strand
ccuguugucuuaauccaau

SEQ ID NO: 1510127 - RNA, 19 nt, Homo sapiens
  misc_RNA (1)...(19): siRNA sense strand
guuaccugcuccagaaaga

SEQ ID NO: 1510128 - RNA, 19 nt, Homo sapiens
  misc_RNA (1)...(19): siRNA sense strand
ggaguuauucauucaucaa

SEQ ID NO: 1510129 - RNA, 19 nt, Homo sapiens
  misc_RNA (1)...(19): siRNA sense strand
gaugaucaacuuaacucuu

SEQ ID NO: 1510130 - RNA, 19 nt, Homo sapiens
  misc_RNA (1)...(19): siRNA sense strand
gaauugccuuuacuaucuc

SEQ ID NO: 1510131 - RNA, 19 nt, Homo sapiens
  misc_RNA (1)...(19): siRNA sense strand
aaucuggccuuuucugaua

SEQ ID NO: 1510132 - RNA, 19 nt, Homo sapiens
  misc_RNA (1)...(19): siRNA sense strand
ugccuuuacuaucucuuua

SEQ ID NO: 1510133 - RNA, 19 nt, Homo sapiens
  misc_RNA (1)...(19): siRNA sense strand
ggcaugauguccuguuguc

SEQ ID NO: 1510134 - RNA, 19 nt, Homo sapiens
  misc_RNA (1)...(19): siRNA sense strand
guugguguauugcauuugu

SEQ ID NO: 1510135 - RNA, 19 nt, Homo sapiens
  misc_RNA (1)...(19): siRNA sense strand
ugaccauacugauauuagu

SEQ ID NO: 1510136 - RNA, 19 nt, Homo sapiens
  misc_RNA (1)...(19): siRNA sense strand
gagaugaucaacuuaacuc

SEQ ID NO: 1510137 - RNA, 19 nt, Homo sapiens
  misc_RNA (1)...(19): siRNA sense strand
gcccuuaguuugucuuacu

SEQ ID NO: 1510138 - RNA, 19 nt, Homo sapiens
  misc_RNA (1)...(19): siRNA sense strand
uacgguaaacuuccucaua

SEQ ID NO: 1510139 - RNA, 19 nt, Homo sapiens
  misc_RNA (1)...(19): siRNA sense strand
uaagucuucuuggcuuuau

SEQ ID NO: 1510140 - RNA, 19 nt, Homo sapiens
  misc_RNA (1)...(19): siRNA sense strand
gcugauuuagugucccuua

SEQ ID NO: 1510141 - RNA, 19 nt, Homo sapiens
  misc_RNA (1)...(19): siRNA sense strand
caaguugguguauugcauu

SEQ ID NO: 1510142 - RNA, 19 nt, Homo sapiens
  misc_RNA (1)...(19): siRNA sense strand
ucaaguugguguauugcau

SEQ ID NO: 1510143 - RNA, 19 nt, Homo sapiens
  misc_RNA (1)...(19): siRNA sense strand
cuuuauugcuaguucagua

SEQ ID NO: 1510144 - RNA, 19 nt, Homo sapiens
  misc_RNA (1)...(19): siRNA sense strand
cagaauugccuuuacuauc

SEQ ID NO: 1510145 - RNA, 19 nt, Homo sapiens
  misc_RNA (1)...(19): siRNA sense strand
augaucaacuuaacucuuc

SEQ ID NO: 1510146 - RNA, 19 nt, Homo sapiens
  misc_RNA (1)...(19): siRNA sense strand
gacugaccauacugauauu

SEQ ID NO: 1510147 - RNA, 19 nt, Homo sapiens
  misc_RNA (1)...(19): siRNA sense strand
gauugggcucuauacauuu

SEQ ID NO: 1510148 - RNA, 19 nt, Homo sapiens
  misc_RNA (1)...(19): siRNA sense strand
aacauuugguucagcauug

SEQ ID NO: 1510149 - RNA, 19 nt, Homo sapiens
  misc_RNA (1)...(19): siRNA sense strand
cagcaaaccauggcuacuu

SEQ ID NO: 1510150 - RNA, 19 nt, Homo sapiens
  misc_RNA (1)...(19): siRNA sense strand
uugcauuugucauuuguug

SEQ ID NO: 1510151 - RNA, 19 nt, Homo sapiens
  misc_RNA (1)...(19): siRNA sense strand
gaauugagaguaaaacguu

SEQ ID NO: 1510152 - RNA, 19 nt, Homo sapiens
  misc_RNA (1)...(19): siRNA sense strand
acacuugccacagagaaua

SEQ ID NO: 1510153 - RNA, 19 nt, Homo sapiens
  misc_RNA (1)...(19): siRNA sense strand
ucauacagaauugccuuua

SEQ ID NO: 1510154 - RNA, 19 nt, Homo sapiens
  misc_RNA (1)...(19): siRNA sense strand
cauacagaauugccuuuac

SEQ ID NO: 1510155 - RNA, 19 nt, Homo sapiens
  misc_RNA (1)...(19): siRNA sense strand
ccaauucuauauggguuuc

SEQ ID NO: 1510156 - RNA, 19 nt, Homo sapiens
  misc_RNA (1)...(19): siRNA sense strand
uguaagucuucuuggcuuu

SEQ ID NO: 1510157 - RNA, 19 nt, Homo sapiens
  misc_RNA (1)...(19): siRNA sense strand
auacagaauugccuuuacu

SEQ ID NO: 1510158 - RNA, 19 nt, Homo sapiens
  misc_RNA (1)...(19): siRNA sense strand
gacgaguauuauaacaaga

SEQ ID NO: 1510159 - RNA, 19 nt, Homo sapiens
  misc_RNA (1)...(19): siRNA sense strand
ucaguauauucugcccuua

SEQ ID NO: 1510160 - RNA, 19 nt, Homo sapiens
  misc_RNA (1)...(19): siRNA sense strand
uuucugauaucuugguugu

SEQ ID NO: 1510161 - RNA, 19 nt, Homo sapiens
  misc_RNA (1)...(19): siRNA sense strand
agaguaaaacguucuguua

SEQ ID NO: 1510162 - RNA, 19 nt, Homo sapiens
  misc_RNA (1)...(19): siRNA sense strand
cccacuugcuuugagauaa

SEQ ID NO: 1510163 - RNA, 19 nt, Homo sapiens
  misc_RNA (1)...(19): siRNA sense strand
agaagacuacgguaaacuu

SEQ ID NO: 1510164 - RNA, 19 nt, Homo sapiens
  misc_RNA (1)...(19): siRNA sense strand
aaacauuugguucagcauu

SEQ ID NO: 1510165 - RNA, 19 nt, Homo sapiens
  misc_RNA (1)...(19): siRNA sense strand
auugucagguaucauauga

SEQ ID NO: 1510166 - RNA, 19 nt, Homo sapiens
  misc_RNA (1)...(19): siRNA sense strand
ucagaagacuacgguaaac

SEQ ID NO: 1510167 - RNA, 19 nt, Homo sapiens
  misc_RNA (1)...(19): siRNA sense strand
cuuaguuugucuuacugua

SEQ ID NO: 1510168 - RNA, 19 nt, Homo sapiens
  misc_RNA (1)...(19): siRNA sense strand
uguggaacuucaagaaaca

SEQ ID NO: 1510169 - RNA, 19 nt, Homo sapiens
  misc_RNA (1)...(19): siRNA sense strand
gcagaaccguuauuacaaa

SEQ ID NO: 1510170 - RNA, 19 nt, Homo sapiens
  misc_RNA (1)...(19): siRNA sense strand
cagaaggacugcccauaua

SEQ ID NO: 1510171 - RNA, 19 nt, Homo sapiens
  misc_RNA (1)...(19): siRNA sense strand
caagagaggcgucuguuua

SEQ ID NO: 1510172 - RNA, 19 nt, Homo sapiens
  misc_RNA (1)...(19): siRNA sense strand
gaaccguuauuacaaauga

SEQ ID NO: 1510173 - RNA, 19 nt, Homo sapiens
  misc_RNA (1)...(19): siRNA sense strand
caaaugaguacaugaaaga

SEQ ID NO: 1510174 - RNA, 19 nt, Homo sapiens
  misc_RNA (1)...(19): siRNA sense strand
agagacagcuggaugaaau

SEQ ID NO: 1510175 - RNA, 19 nt, Homo sapiens
  misc_RNA (1)...(19): siRNA sense strand
ugaaugagcccuacgagaa

SEQ ID NO: 1510176 - RNA, 19 nt, Homo sapiens
  misc_RNA (1)...(19): siRNA sense strand
cguggaagccguauauaua

SEQ ID NO: 1510177 - RNA, 19 nt, Homo sapiens
  misc_RNA (1)...(19): siRNA sense strand
gagcaaaguacccacguuu

SEQ ID NO: 1510178 - RNA, 19 nt, Homo sapiens
  misc_RNA (1)...(19): siRNA sense strand
caaggaguaucgaguaauc

SEQ ID NO: 1510179 - RNA, 19 nt, Homo sapiens
  misc_RNA (1)...(19): siRNA sense strand
gcaagagaggcgucuguuu

SEQ ID NO: 1510180 - RNA, 19 nt, Homo sapiens
  misc_RNA (1)...(19): siRNA sense strand
gcucaaggaguaucgagua

SEQ ID NO: 1510181 - RNA, 19 nt, Homo sapiens
  misc_RNA (1)...(19): siRNA sense strand
gaaggacugcccauauaug

SEQ ID NO: 1510182 - RNA, 19 nt, Homo sapiens
  misc_RNA (1)...(19): siRNA sense strand
gaacuucauccauaagcaa

SEQ ID NO: 1510183 - RNA, 19 nt, Homo sapiens
  misc_RNA (1)...(19): siRNA sense strand
ggacugcccauauaugugu

SEQ ID NO: 1510184 - RNA, 19 nt, Homo sapiens
  misc_RNA (1)...(19): siRNA sense strand
cgagaaggacggugagaaa

SEQ ID NO: 1510185 - RNA, 19 nt, Homo sapiens
  misc_RNA (1)...(19): siRNA sense strand
gaagagacagcuggaugaa

SEQ ID NO: 1510186 - RNA, 19 nt, Homo sapiens
  misc_RNA (1)...(19): siRNA sense strand
ggaagacccagcaaaauuu

SEQ ID NO: 1510187 - RNA, 19 nt, Homo sapiens
  misc_RNA (1)...(19): siRNA sense strand
agaggcgucuguuuacaaa

SEQ ID NO: 1510188 - RNA, 19 nt, Homo sapiens
  misc_RNA (1)...(19): siRNA sense strand
ccagaaggacugcccauau

SEQ ID NO: 1510189 - RNA, 19 nt, Homo sapiens
  misc_RNA (1)...(19): siRNA sense strand
aaugacagcagaugacuaa

SEQ ID NO: 1510190 - RNA, 19 nt, Homo sapiens
  misc_RNA (1)...(19): siRNA sense strand
cgaguaauccugccugugu

SEQ ID NO: 1510191 - RNA, 19 nt, Homo sapiens
  misc_RNA (1)...(19): siRNA sense strand
cgaagagacagcuggauga

SEQ ID NO: 1510192 - RNA, 19 nt, Homo sapiens
  misc_RNA (1)...(19): siRNA sense strand
ggguugaccugaccaugga

SEQ ID NO: 1510193 - RNA, 19 nt, Homo sapiens
  misc_RNA (1)...(19): siRNA sense strand
ucuguuggcucgauaagug

SEQ ID NO: 1510194 - RNA, 19 nt, Homo sapiens
  misc_RNA (1)...(19): siRNA sense strand
gagaggcgucuguuuacaa

SEQ ID NO: 1510195 - RNA, 19 nt, Homo sapiens
  misc_RNA (1)...(19): siRNA sense strand
uggagguccuggugaauga

SEQ ID NO: 1510196 - RNA, 19 nt, Homo sapiens
  misc_RNA (1)...(19): siRNA sense strand
gaagacccagcaaaauuua

SEQ ID NO: 1510197 - RNA, 19 nt, Homo sapiens
  misc_RNA (1)...(19): siRNA sense strand
gaaugagcccuacgagaag

SEQ ID NO: 1510198 - RNA, 19 nt, Homo sapiens
  misc_RNA (1)...(19): siRNA sense strand
acaaaugaguacaugaaag

SEQ ID NO: 1510199 - RNA, 19 nt, Homo sapiens
  misc_RNA (1)...(19): siRNA sense strand
gcguggagguccuggugaa

SEQ ID NO: 1510200 - RNA, 19 nt, Homo sapiens
  misc_RNA (1)...(19): siRNA sense strand
gaaugacagcagaugacua

SEQ ID NO: 1510201 - RNA, 19 nt, Homo sapiens
  misc_RNA (1)...(19): siRNA sense strand
gaagccguauauauagaca

SEQ ID NO: 1510202 - RNA, 19 nt, Homo sapiens
  misc_RNA (1)...(19): siRNA sense strand
cagaaccguuauuacaaau

SEQ ID NO: 1510203 - RNA, 19 nt, Homo sapiens
  misc_RNA (1)...(19): siRNA sense strand
gcaggagaaugugcauaag

SEQ ID NO: 1510204 - RNA, 19 nt, Homo sapiens
  misc_RNA (1)...(19): siRNA sense strand
acagcuggaugaaaugaga

SEQ ID NO: 1510205 - RNA, 19 nt, Homo sapiens
  misc_RNA (1)...(19): siRNA sense strand
guacccacguuuguucgaa

SEQ ID NO: 1510206 - RNA, 19 nt, Homo sapiens
  misc_RNA (1)...(19): siRNA sense strand
gaaaggaaugacagcagau

SEQ ID NO: 1510207 - RNA, 19 nt, Homo sapiens
  misc_RNA (1)...(19): siRNA sense strand
uggaagccguauauauaga

SEQ ID NO: 1510208 - RNA, 19 nt, Homo sapiens
  misc_RNA (1)...(19): siRNA sense strand
augaguacaugaaagaaga

SEQ ID NO: 1510209 - RNA, 19 nt, Homo sapiens
  misc_RNA (1)...(19): siRNA sense strand
cgcaggagaaugugcauaa

SEQ ID NO: 1510210 - RNA, 19 nt, Homo sapiens
  misc_RNA (1)...(19): siRNA sense strand
acacguggaagccguauau

SEQ ID NO: 1510211 - RNA, 19 nt, Homo sapiens
  misc_RNA (1)...(19): siRNA sense strand
cucaaggaguaucgaguaa

SEQ ID NO: 1510212 - RNA, 19 nt, Homo sapiens
  misc_RNA (1)...(19): siRNA sense strand
guggaagccguauauauag

SEQ ID NO: 1510213 - RNA, 19 nt, Homo sapiens
  misc_RNA (1)...(19): siRNA sense strand
cugcagaaccguuauuaca

SEQ ID NO: 1510214 - RNA, 19 nt, Homo sapiens
  misc_RNA (1)...(19): siRNA sense strand
agccguauauauagacauu

SEQ ID NO: 1510215 - RNA, 19 nt, Homo sapiens
  misc_RNA (1)...(19): siRNA sense strand
aaaguacccacguuuguuc

SEQ ID NO: 1510216 - RNA, 19 nt, Homo sapiens
  misc_RNA (1)...(19): siRNA sense strand
agaaggacugcccauauau

SEQ ID NO: 1510217 - RNA, 19 nt, Homo sapiens
  misc_RNA (1)...(19): siRNA sense strand
ugagaaaggccaguacaca

SEQ ID NO: 1510218 - RNA, 19 nt, Homo sapiens
  misc_RNA (1)...(19): siRNA sense strand
ggauuacaaggcagaggaa

SEQ ID NO: 1510219 - RNA, 19 nt, Homo sapiens
  misc_RNA (1)...(19): siRNA sense strand
agaaaggccaguacacaca

SEQ ID NO: 1510220 - RNA, 19 nt, Homo sapiens
  misc_RNA (1)...(19): siRNA sense strand
cagaggaagacccagcaaa

SEQ ID NO: 1510221 - RNA, 19 nt, Homo sapiens
  misc_RNA (1)...(19): siRNA sense strand
gagaaggacggugagaaag

SEQ ID NO: 1510222 - RNA, 19 nt, Homo sapiens
  misc_RNA (1)...(19): siRNA sense strand
agagcaaaguacccacguu

SEQ ID NO: 1510223 - RNA, 19 nt, Homo sapiens
  misc_RNA (1)...(19): siRNA sense strand
ggagaacuucauccauaag

SEQ ID NO: 1510224 - RNA, 19 nt, Homo sapiens
  misc_RNA (1)...(19): siRNA sense strand
cgagaaagccuggaaugcu

SEQ ID NO: 1510225 - RNA, 19 nt, Homo sapiens
  misc_RNA (1)...(19): siRNA sense strand
aauccugccugugucugua

SEQ ID NO: 1510226 - RNA, 19 nt, Homo sapiens
  misc_RNA (1)...(19): siRNA sense strand
gcucagcaaggauuacaag

SEQ ID NO: 1510227 - RNA, 19 nt, Homo sapiens
  misc_RNA (1)...(19): siRNA sense strand
ccaccugcagagcaaagua

SEQ ID NO: 1510228 - RNA, 19 nt, Homo sapiens
  misc_RNA (1)...(19): siRNA sense strand
ucuaccaccugcagagcaa

SEQ ID NO: 1510229 - RNA, 19 nt, Homo sapiens
  misc_RNA (1)...(19): siRNA sense strand
uauagacauugcagaucga

SEQ ID NO: 1510230 - RNA, 19 nt, Homo sapiens
  misc_RNA (1)...(19): siRNA sense strand
gcagaggaagacccagcaa

SEQ ID NO: 1510231 - RNA, 19 nt, Homo sapiens
  misc_RNA (1)...(19): siRNA sense strand
ugcagaaccguuauuacaa

SEQ ID NO: 1510232 - RNA, 19 nt, Homo sapiens
  misc_RNA (1)...(19): siRNA sense strand
ggaaugacagcagaugacu

SEQ ID NO: 1510233 - RNA, 19 nt, Homo sapiens
  misc_RNA (1)...(19): siRNA sense strand
ggacccagugaaaggaaug

SEQ ID NO: 1510234 - RNA, 19 nt, Homo sapiens
  misc_RNA (1)...(19): siRNA sense strand
acaaaaggacccagugaaa

SEQ ID NO: 1510235 - RNA, 19 nt, Homo sapiens
  misc_RNA (1)...(19): siRNA sense strand
gagacagcuggaugaaaug

SEQ ID NO: 1510236 - RNA, 19 nt, Homo sapiens
  misc_RNA (1)...(19): siRNA sense strand
auugaaaccuggcacaaac

SEQ ID NO: 1510237 - RNA, 19 nt, Homo sapiens
  misc_RNA (1)...(19): siRNA sense strand
agagaggcgucuguuuaca

SEQ ID NO: 1510238 - RNA, 19 nt, Homo sapiens
  misc_RNA (1)...(19): siRNA sense strand
gcaugaaugugcaccauaa

SEQ ID NO: 1510239 - RNA, 19 nt, Homo sapiens
  misc_RNA (1)...(19): siRNA sense strand
gaaagaacgcuucaacauc

SEQ ID NO: 1510240 - RNA, 19 nt, Homo sapiens
  misc_RNA (1)...(19): siRNA sense strand
agaagaagccgaccaugua

SEQ ID NO: 1510241 - RNA, 19 nt, Homo sapiens
  misc_RNA (1)...(19): siRNA sense strand
ggacugcaguuucuacaca

SEQ ID NO: 1510242 - RNA, 19 nt, Homo sapiens
  misc_RNA (1)...(19): siRNA sense strand
guugaugucuguucaguau

SEQ ID NO: 1510243 - RNA, 19 nt, Homo sapiens
  misc_RNA (1)...(19): siRNA sense strand
ggaaaacacuggugcagaa

SEQ ID NO: 1510244 - RNA, 19 nt, Homo sapiens
  misc_RNA (1)...(19): siRNA sense strand
gaaagggaaccaaccaaga

SEQ ID NO: 1510245 - RNA, 19 nt, Homo sapiens
  misc_RNA (1)...(19): siRNA sense strand
caucaagauugccgacuuu

SEQ ID NO: 1510246 - RNA, 19 nt, Homo sapiens
  misc_RNA (1)...(19): siRNA sense strand
ugaugucuguucaguauuu

SEQ ID NO: 1510247 - RNA, 19 nt, Homo sapiens
  misc_RNA (1)...(19): siRNA sense strand
ucaaggcccucaagaagga

SEQ ID NO: 1510248 - RNA, 19 nt, Homo sapiens
  misc_RNA (1)...(19): siRNA sense strand
gcuucaagguucacaacua

SEQ ID NO: 1510249 - RNA, 19 nt, Homo sapiens
  misc_RNA (1)...(19): siRNA sense strand
gaccaccuguucuuuguga

SEQ ID NO: 1510250 - RNA, 19 nt, Homo sapiens
  misc_RNA (1)...(19): siRNA sense strand
aaacacuggugcagaagaa

SEQ ID NO: 1510251 - RNA, 19 nt, Homo sapiens
  misc_RNA (1)...(19): siRNA sense strand
gaagaagccgaccauguau

SEQ ID NO: 1510252 - RNA, 19 nt, Homo sapiens
  misc_RNA (1)...(19): siRNA sense strand
gccgagcgcugcaagaaga

SEQ ID NO: 1510253 - RNA, 19 nt, Homo sapiens
  misc_RNA (1)...(19): siRNA sense strand
caucaagaaccaugaguuu

SEQ ID NO: 1510254 - RNA, 19 nt, Homo sapiens
  misc_RNA (1)...(19): siRNA sense strand
gcaagggcaucauuuacag

SEQ ID NO: 1510255 - RNA, 19 nt, Homo sapiens
  misc_RNA (1)...(19): siRNA sense strand
gggaggacaugcaagacaa

SEQ ID NO: 1510256 - RNA, 19 nt, Homo sapiens
  misc_RNA (1)...(19): siRNA sense strand
caacaagcaaggcuacaaa

SEQ ID NO: 1510257 - RNA, 19 nt, Homo sapiens
  misc_RNA (1)...(19): siRNA sense strand
ucaagaaccaugaguuuau

SEQ ID NO: 1510258 - RNA, 19 nt, Homo sapiens
  misc_RNA (1)...(19): siRNA sense strand
agaaaugcaucgacaagau

SEQ ID NO: 1510259 - RNA, 19 nt, Homo sapiens
  misc_RNA (1)...(19): siRNA sense strand
caacagccgggacacuaua

SEQ ID NO: 1510260 - RNA, 19 nt, Homo sapiens
  misc_RNA (1)...(19): siRNA sense strand
aaacuggacucugcuggaa

SEQ ID NO: 1510261 - RNA, 19 nt, Homo sapiens
  misc_RNA (1)...(19): siRNA sense strand
caagaaccaugaguuuauc

SEQ ID NO: 1510262 - RNA, 19 nt, Homo sapiens
  misc_RNA (1)...(19): siRNA sense strand
gaaccaagucacccagaga

SEQ ID NO: 1510263 - RNA, 19 nt, Homo sapiens
  misc_RNA (1)...(19): siRNA sense strand
caacccaccuucuguucug

SEQ ID NO: 1510264 - RNA, 19 nt, Homo sapiens
  misc_RNA (1)...(19): siRNA sense strand
gaaaugcaucgacaagauc

SEQ ID NO: 1510265 - RNA, 19 nt, Homo sapiens
  misc_RNA (1)...(19): siRNA sense strand
gagacuacaguaacuuuga

SEQ ID NO: 1510266 - RNA, 19 nt, Homo sapiens
  misc_RNA (1)...(19): siRNA sense strand
gaagacugcggcaugaaug

SEQ ID NO: 1510267 - RNA, 19 nt, Homo sapiens
  misc_RNA (1)...(19): siRNA sense strand
gacacuauauuccagaaag

SEQ ID NO: 1510268 - RNA, 19 nt, Homo sapiens
  misc_RNA (1)...(19): siRNA sense strand
gcaagugcaacaucaacaa

SEQ ID NO: 1510269 - RNA, 19 nt, Homo sapiens
  misc_RNA (1)...(19): siRNA sense strand
acaaaugcaggcaauguaa

SEQ ID NO: 1510270 - RNA, 19 nt, Homo sapiens
  misc_RNA (1)...(19): siRNA sense strand
gugcaaagagaacauauuc

SEQ ID NO: 1510271 - RNA, 19 nt, Homo sapiens
  misc_RNA (1)...(19): siRNA sense strand
gaccaaggaccaccuguuc

SEQ ID NO: 1510272 - RNA, 19 nt, Homo sapiens
  misc_RNA (1)...(19): siRNA sense strand
ugaugaggaugaacucuuc

SEQ ID NO: 1510273 - RNA, 19 nt, Homo sapiens
  misc_RNA (1)...(19): siRNA sense strand
acagcaagggcaucauuua

SEQ ID NO: 1510274 - RNA, 19 nt, Homo sapiens
  misc_RNA (1)...(19): siRNA sense strand
gaagcagggauuaaagugu

SEQ ID NO: 1510275 - RNA, 19 nt, Homo sapiens
  misc_RNA (1)...(19): siRNA sense strand
ggagugacgggaaacauca

SEQ ID NO: 1510276 - RNA, 19 nt, Homo sapiens
  misc_RNA (1)...(19): siRNA sense strand
caucaaggcccucaagaag

SEQ ID NO: 1510277 - RNA, 19 nt, Homo sapiens
  misc_RNA (1)...(19): siRNA sense strand
caacaucaacaacuucauc

SEQ ID NO: 1510278 - RNA, 19 nt, Homo sapiens
  misc_RNA (1)...(19): siRNA sense strand
gaagaagaccggaguugcu

SEQ ID NO: 1510279 - RNA, 19 nt, Homo sapiens
  misc_RNA (1)...(19): siRNA sense strand
ccaagguguugaugucugu

SEQ ID NO: 1510280 - RNA, 19 nt, Homo sapiens
  misc_RNA (1)...(19): siRNA sense strand
caucaacaacuucaucuuc

SEQ ID NO: 1510281 - RNA, 19 nt, Homo sapiens
  misc_RNA (1)...(19): siRNA sense strand
ccauguauccugaguggaa

SEQ ID NO: 1510282 - RNA, 19 nt, Homo sapiens
  misc_RNA (1)...(19): siRNA sense strand
ggacaugcaagacaacagu

SEQ ID NO: 1510283 - RNA, 19 nt, Homo sapiens
  misc_RNA (1)...(19): siRNA sense strand
gagaagaagaccggaguug

SEQ ID NO: 1510284 - RNA, 19 nt, Homo sapiens
  misc_RNA (1)...(19): siRNA sense strand
ugaaugugcaccauaaaug

SEQ ID NO: 1510285 - RNA, 19 nt, Homo sapiens
  misc_RNA (1)...(19): siRNA sense strand
agaaagaacgcuucaacau

SEQ ID NO: 1510286 - RNA, 19 nt, Homo sapiens
  misc_RNA (1)...(19): siRNA sense strand
gagcaccuccuggaagauu

SEQ ID NO: 1510287 - RNA, 19 nt, Homo sapiens
  misc_RNA (1)...(19): siRNA sense strand
guuuaucgccaccuucuuu

SEQ ID NO: 1510288 - RNA, 19 nt, Homo sapiens
  misc_RNA (1)...(19): siRNA sense strand
gcuggcuucuccuuuguga

SEQ ID NO: 1510289 - RNA, 19 nt, Homo sapiens
  misc_RNA (1)...(19): siRNA sense strand
cagaagaagccgaccaugu

SEQ ID NO: 1510290 - RNA, 19 nt, Homo sapiens
  misc_RNA (1)...(19): siRNA sense strand
aagcaaggcuacaaaugca

SEQ ID NO: 1510291 - RNA, 19 nt, Homo sapiens
  misc_RNA (1)...(19): siRNA sense strand
caagaaaugcaucgacaag

SEQ ID NO: 1510292 - RNA, 19 nt, Homo sapiens
  misc_RNA (1)...(19): siRNA sense strand
ccaaggaccaccuguucuu

SEQ ID NO: 1510293 - RNA, 19 nt, Homo sapiens
  misc_RNA (1)...(19): siRNA sense strand
cagagccuguugggauaua

SEQ ID NO: 1510294 - RNA, 19 nt, Homo sapiens
  misc_RNA (1)...(19): siRNA sense strand
acacuauauuccagaaaga

SEQ ID NO: 1510295 - RNA, 19 nt, Homo sapiens
  misc_RNA (1)...(19): siRNA sense strand
gggacacuauauuccagaa

SEQ ID NO: 1510296 - RNA, 19 nt, Homo sapiens
  misc_RNA (1)...(19): siRNA sense strand
ucgagcaccuccuggaaga

SEQ ID NO: 1510297 - RNA, 19 nt, Homo sapiens
  misc_RNA (1)...(19): siRNA sense strand
uaucaggguuucgagaaga

SEQ ID NO: 1510298 - RNA, 19 nt, Homo sapiens
  misc_RNA (1)...(19): siRNA sense strand
gccaaguucccaacgauga

SEQ ID NO: 1510299 - RNA, 19 nt, Homo sapiens
  misc_RNA (1)...(19): siRNA sense strand
cagagacuacaguaacuuu

SEQ ID NO: 1510300 - RNA, 19 nt, Homo sapiens
  misc_RNA (1)...(19): siRNA sense strand
caaggaccaccuguucuuu

SEQ ID NO: 1510301 - RNA, 19 nt, Homo sapiens
  misc_RNA (1)...(19): siRNA sense strand
cucagagccuguugggaua

SEQ ID NO: 1510302 - RNA, 19 nt, Homo sapiens
  misc_RNA (1)...(19): siRNA sense strand
ggauuaaagugugaagacu

SEQ ID NO: 1510303 - RNA, 19 nt, Homo sapiens
  misc_RNA (1)...(19): siRNA sense strand
caagcaaggcuacaaaugc

SEQ ID NO: 1510304 - RNA, 19 nt, Homo sapiens
  misc_RNA (1)...(19): siRNA sense strand
gaaugugcaccauaaaugc

SEQ ID NO: 1510305 - RNA, 19 nt, Homo sapiens
  misc_RNA (1)...(19): siRNA sense strand
gcaucgccuucaacuccua

SEQ ID NO: 1510306 - RNA, 19 nt, Homo sapiens
  misc_RNA (1)...(19): siRNA sense strand
ggaggacguggauugcaaa

SEQ ID NO: 1510307 - RNA, 19 nt, Homo sapiens
  misc_RNA (1)...(19): siRNA sense strand
gccaacagccgggacacua

SEQ ID NO: 1510308 - RNA, 19 nt, Homo sapiens
  misc_RNA (1)...(19): siRNA sense strand
ugaaguacacauucucugu

SEQ ID NO: 1510309 - RNA, 19 nt, Homo sapiens
  misc_RNA (1)...(19): siRNA sense strand
ugugaagacugcggcauga

SEQ ID NO: 1510310 - RNA, 19 nt, Homo sapiens
  misc_RNA (1)...(19): siRNA sense strand
ggacacuauauuccagaaa

SEQ ID NO: 1510311 - RNA, 19 nt, Homo sapiens
  misc_RNA (1)...(19): siRNA sense strand
uggaggacguggauugcaa

SEQ ID NO: 1510312 - RNA, 19 nt, Homo sapiens
  misc_RNA (1)...(19): siRNA sense strand
ccaucaaggcccucaagaa

SEQ ID NO: 1510313 - RNA, 19 nt, Homo sapiens
  misc_RNA (1)...(19): siRNA sense strand
ggcaucaaccagaagcuuu

SEQ ID NO: 1510314 - RNA, 19 nt, Homo sapiens
  misc_RNA (1)...(19): siRNA sense strand
gaggccaaguucccaacga

SEQ ID NO: 1510315 - RNA, 19 nt, Homo sapiens
  misc_RNA (1)...(19): siRNA sense strand
cagcacagagcgugggaaa

SEQ ID NO: 1510316 - RNA, 19 nt, Homo sapiens
  misc_RNA (1)...(19): siRNA sense strand
gggcaacccaccuucuguu

SEQ ID NO: 1510317 - RNA, 19 nt, Homo sapiens
  misc_RNA (1)...(19): siRNA sense strand
ccagaaagaacgcuucaac

SEQ ID NO: 1510318 - RNA, 19 nt, Homo sapiens
  misc_RNA (1)...(19): siRNA sense strand
uguacgagaugcucauugg

SEQ ID NO: 1510319 - RNA, 19 nt, Homo sapiens
  misc_RNA (1)...(19): siRNA sense strand
ggccugaaguacacauucu

SEQ ID NO: 1510320 - RNA, 19 nt, Homo sapiens
  misc_RNA (1)...(19): siRNA sense strand
acaucaagauugccgacuu

SEQ ID NO: 1510321 - RNA, 19 nt, Homo sapiens
  misc_RNA (1)...(19): siRNA sense strand
acacagcaagggcaucauu

SEQ ID NO: 1510322 - RNA, 19 nt, Homo sapiens
  misc_RNA (1)...(19): siRNA sense strand
ggauauaucaggguuucga

SEQ ID NO: 1510323 - RNA, 19 nt, Homo sapiens
  misc_RNA (1)...(19): siRNA sense strand
cagaaagaacgcuucaaca

SEQ ID NO: 1510324 - RNA, 19 nt, Homo sapiens
  misc_RNA (1)...(19): siRNA sense strand
acgcugccauccacaagaa

SEQ ID NO: 1510325 - RNA, 19 nt, Homo sapiens
  misc_RNA (1)...(19): siRNA sense strand
gcaccuccuggaagauuga

SEQ ID NO: 1510326 - RNA, 19 nt, Homo sapiens
  misc_RNA (1)...(19): siRNA sense strand
uuacagggaccucaaacug

SEQ ID NO: 1510327 - RNA, 19 nt, Homo sapiens
  misc_RNA (1)...(19): siRNA sense strand
caacuucaucuuccacaag

SEQ ID NO: 1510328 - RNA, 19 nt, Homo sapiens
  misc_RNA (1)...(19): siRNA sense strand
gcagcaagugcaacaucaa

SEQ ID NO: 1510329 - RNA, 19 nt, Homo sapiens
  misc_RNA (1)...(19): siRNA sense strand
gacaagaucaucggcagau

SEQ ID NO: 1510330 - RNA, 19 nt, Homo sapiens
  misc_RNA (1)...(19): siRNA sense strand
ccauggaccagucugcauu

SEQ ID NO: 1510331 - RNA, 19 nt, Homo sapiens
  misc_RNA (1)...(19): siRNA sense strand
cuggagaagcucuuugaaa

SEQ ID NO: 1510332 - RNA, 19 nt, Homo sapiens
  misc_RNA (1)...(19): siRNA sense strand
ucaccaaggaguccaagga

SEQ ID NO: 1510333 - RNA, 19 nt, Homo sapiens
  misc_RNA (1)...(19): siRNA sense strand
uauaucaggguuucgagaa

SEQ ID NO: 1510334 - RNA, 19 nt, Homo sapiens
  misc_RNA (1)...(19): siRNA sense strand
gccaaccucugcggcauca

SEQ ID NO: 1510335 - RNA, 19 nt, Homo sapiens
  misc_RNA (1)...(19): siRNA sense strand
ggcaugaaugugcaccaua

SEQ ID NO: 1510336 - RNA, 19 nt, Homo sapiens
  misc_RNA (1)...(19): siRNA sense strand
cuucaagguucacaacuac

SEQ ID NO: 1510337 - RNA, 19 nt, Homo sapiens
  misc_RNA (1)...(19): siRNA sense strand
ccaacagccgggacacuau

SEQ ID NO: 1510338 - RNA, 19 nt, Homo sapiens
  misc_RNA (1)...(19): siRNA sense strand
gaacacacauuaagugaaa

SEQ ID NO: 1510339 - RNA, 19 nt, Homo sapiens
  misc_RNA (1)...(19): siRNA sense strand
gaaugugacuucaagaaua

SEQ ID NO: 1510340 - RNA, 19 nt, Homo sapiens
  misc_RNA (1)...(19): siRNA sense strand
gcagaaauaugaagaucua

SEQ ID NO: 1510341 - RNA, 19 nt, Homo sapiens
  misc_RNA (1)...(19): siRNA sense strand
gauaugagccaacuuuaua

SEQ ID NO: 1510342 - RNA, 19 nt, Homo sapiens
  misc_RNA (1)...(19): siRNA sense strand
gagcagaauuuccuguaua

SEQ ID NO: 1510343 - RNA, 19 nt, Homo sapiens
  misc_RNA (1)...(19): siRNA sense strand
gcacaaaccuugggucgaa

SEQ ID NO: 1510344 - RNA, 19 nt, Homo sapiens
  misc_RNA (1)...(19): siRNA sense strand
gaaggaagcuaaauuugca

SEQ ID NO: 1510345 - RNA, 19 nt, Homo sapiens
  misc_RNA (1)...(19): siRNA sense strand
gaagauaugagccaacuuu

SEQ ID NO: 1510346 - RNA, 19 nt, Homo sapiens
  misc_RNA (1)...(19): siRNA sense strand
ggaccuucauucaauauuu

SEQ ID NO: 1510347 - RNA, 19 nt, Homo sapiens
  misc_RNA (1)...(19): siRNA sense strand
gacauuagauacuacauug

SEQ ID NO: 1510348 - RNA, 19 nt, Homo sapiens
  misc_RNA (1)...(19): siRNA sense strand
ugagagggcuuaaugagaa

SEQ ID NO: 1510349 - RNA, 19 nt, Homo sapiens
  misc_RNA (1)...(19): siRNA sense strand
caaauaagaaggaagcuaa

SEQ ID NO: 1510350 - RNA, 19 nt, Homo sapiens
  misc_RNA (1)...(19): siRNA sense strand
ucagaaagauugccaggaa

SEQ ID NO: 1510351 - RNA, 19 nt, Homo sapiens
  misc_RNA (1)...(19): siRNA sense strand
gaauguugcuugcagaaau

SEQ ID NO: 1510352 - RNA, 19 nt, Homo sapiens
  misc_RNA (1)...(19): siRNA sense strand
gaauuucucagcaaagaua

SEQ ID NO: 1510353 - RNA, 19 nt, Homo sapiens
  misc_RNA (1)...(19): siRNA sense strand
aaaguggaauugcaacaua

SEQ ID NO: 1510354 - RNA, 19 nt, Homo sapiens
  misc_RNA (1)...(19): siRNA sense strand
gaagaugacauaagacaga

SEQ ID NO: 1510355 - RNA, 19 nt, Homo sapiens
  misc_RNA (1)...(19): siRNA sense strand
cagcaaagauaucaguuau

SEQ ID NO: 1510356 - RNA, 19 nt, Homo sapiens
  misc_RNA (1)...(19): siRNA sense strand
caaaggaucucaaggaaaa

SEQ ID NO: 1510357 - RNA, 19 nt, Homo sapiens
  misc_RNA (1)...(19): siRNA sense strand
gauggaaguucauuuaagu

SEQ ID NO: 1510358 - RNA, 19 nt, Homo sapiens
  misc_RNA (1)...(19): siRNA sense strand
gaagucagauacugugcuu

SEQ ID NO: 1510359 - RNA, 19 nt, Homo sapiens
  misc_RNA (1)...(19): siRNA sense strand
aaacagauggcgauaagua

SEQ ID NO: 1510360 - RNA, 19 nt, Homo sapiens
  misc_RNA (1)...(19): siRNA sense strand
gaaacucaccuucuaagug

SEQ ID NO: 1510361 - RNA, 19 nt, Homo sapiens
  misc_RNA (1)...(19): siRNA sense strand
ccaaacagauggcgauaag

SEQ ID NO: 1510362 - RNA, 19 nt, Homo sapiens
  misc_RNA (1)...(19): siRNA sense strand
gcaaaggcuccauuccaua

SEQ ID NO: 1510363 - RNA, 19 nt, Homo sapiens
  misc_RNA (1)...(19): siRNA sense strand
gaauugagagggcuuaaug

SEQ ID NO: 1510364 - RNA, 19 nt, Homo sapiens
  misc_RNA (1)...(19): siRNA sense strand
ccaggaagaugauacaaca

SEQ ID NO: 1510365 - RNA, 19 nt, Homo sapiens
  misc_RNA (1)...(19): siRNA sense strand
gaccaucucugaaaucucu

SEQ ID NO: 1510366 - RNA, 19 nt, Homo sapiens
  misc_RNA (1)...(19): siRNA sense strand
ccaugaggauccacaguaa

SEQ ID NO: 1510367 - RNA, 19 nt, Homo sapiens
  misc_RNA (1)...(19): siRNA sense strand
gaaaaggacacaccuaaaa

SEQ ID NO: 1510368 - RNA, 19 nt, Homo sapiens
  misc_RNA (1)...(19): siRNA sense strand
uuacuagacuuguuucaga

SEQ ID NO: 1510369 - RNA, 19 nt, Homo sapiens
  misc_RNA (1)...(19): siRNA sense strand
aaggguagaucacuauaaa

SEQ ID NO: 1510370 - RNA, 19 nt, Homo sapiens
  misc_RNA (1)...(19): siRNA sense strand
ggagcagaauuuccuguau

SEQ ID NO: 1510371 - RNA, 19 nt, Homo sapiens
  misc_RNA (1)...(19): siRNA sense strand
acagcuaccucuacauaaa

SEQ ID NO: 1510372 - RNA, 19 nt, Homo sapiens
  misc_RNA (1)...(19): siRNA sense strand
gaagaugauacaacaguga

SEQ ID NO: 1510373 - RNA, 19 nt, Homo sapiens
  misc_RNA (1)...(19): siRNA sense strand
caagagcaccuaacuguuc

SEQ ID NO: 1510374 - RNA, 19 nt, Homo sapiens
  misc_RNA (1)...(19): siRNA sense strand
aaagcaaacucagguuaaa

SEQ ID NO: 1510375 - RNA, 19 nt, Homo sapiens
  misc_RNA (1)...(19): siRNA sense strand
gcaaaggaucucaaggaaa

SEQ ID NO: 1510376 - RNA, 19 nt, Homo sapiens
  misc_RNA (1)...(19): siRNA sense strand
ugaaaucucugaaaacuga

SEQ ID NO: 1510377 - RNA, 19 nt, Homo sapiens
  misc_RNA (1)...(19): siRNA sense strand
uaaccaguaucaaguuguu

SEQ ID NO: 1510378 - RNA, 19 nt, Homo sapiens
  misc_RNA (1)...(19): siRNA sense strand
gagcaacacagaaacuuug

SEQ ID NO: 1510379 - RNA, 19 nt, Homo sapiens
  misc_RNA (1)...(19): siRNA sense strand
uaagugagcaacacagaaa

SEQ ID NO: 1510380 - RNA, 19 nt, Homo sapiens
  misc_RNA (1)...(19): siRNA sense strand
aaacagaagucagauacug

SEQ ID NO: 1510381 - RNA, 19 nt, Homo sapiens
  misc_RNA (1)...(19): siRNA sense strand
gaaaccacuucaccucauc

SEQ ID NO: 1510382 - RNA, 19 nt, Homo sapiens
  misc_RNA (1)...(19): siRNA sense strand
ucaugauucuggucugaua

SEQ ID NO: 1510383 - RNA, 19 nt, Homo sapiens
  misc_RNA (1)...(19): siRNA sense strand
aaacucagguuaaacuaag

SEQ ID NO: 1510384 - RNA, 19 nt, Homo sapiens
  misc_RNA (1)...(19): siRNA sense strand
guucaccgguacagucuuu

SEQ ID NO: 1510385 - RNA, 19 nt, Homo sapiens
  misc_RNA (1)...(19): siRNA sense strand
guacauguuucugauuuca

SEQ ID NO: 1510386 - RNA, 19 nt, Homo sapiens
  misc_RNA (1)...(19): siRNA sense strand
acacagcuaccucuacaua

SEQ ID NO: 1510387 - RNA, 19 nt, Homo sapiens
  misc_RNA (1)...(19): siRNA sense strand
gagagggcuuaaugagaaa

SEQ ID NO: 1510388 - RNA, 19 nt, Homo sapiens
  misc_RNA (1)...(19): siRNA sense strand
aaacaaacaggaaugcauu

SEQ ID NO: 1510389 - RNA, 19 nt, Homo sapiens
  misc_RNA (1)...(19): siRNA sense strand
gaauauggauaguuuaccu

SEQ ID NO: 1510390 - RNA, 19 nt, Homo sapiens
  misc_RNA (1)...(19): siRNA sense strand
ggcaaaggcuccauuccau

SEQ ID NO: 1510391 - RNA, 19 nt, Homo sapiens
  misc_RNA (1)...(19): siRNA sense strand
caaacucagguuaaacuaa

SEQ ID NO: 1510392 - RNA, 19 nt, Homo sapiens
  misc_RNA (1)...(19): siRNA sense strand
gagggcgaguugaagaauu

SEQ ID NO: 1510393 - RNA, 19 nt, Homo sapiens
  misc_RNA (1)...(19): siRNA sense strand
agugguauaugcaauguuu

SEQ ID NO: 1510394 - RNA, 19 nt, Homo sapiens
  misc_RNA (1)...(19): siRNA sense strand
gguggaaccucaauucaac

SEQ ID NO: 1510395 - RNA, 19 nt, Homo sapiens
  misc_RNA (1)...(19): siRNA sense strand
gacaagccaucuaguaugc

SEQ ID NO: 1510396 - RNA, 19 nt, Homo sapiens
  misc_RNA (1)...(19): siRNA sense strand
caagaaaucaaguacuuca

SEQ ID NO: 1510397 - RNA, 19 nt, Homo sapiens
  misc_RNA (1)...(19): siRNA sense strand
ggguagaucacuauaaaug

SEQ ID NO: 1510398 - RNA, 19 nt, Homo sapiens
  misc_RNA (1)...(19): siRNA sense strand
gaugacauaagacagaauu

SEQ ID NO: 1510399 - RNA, 19 nt, Homo sapiens
  misc_RNA (1)...(19): siRNA sense strand
gaaacuuugcacagaguaa

SEQ ID NO: 1510400 - RNA, 19 nt, Homo sapiens
  misc_RNA (1)...(19): siRNA sense strand
aauguugcuugcagaaaua

SEQ ID NO: 1510401 - RNA, 19 nt, Homo sapiens
  misc_RNA (1)...(19): siRNA sense strand
cacagaaacuuugcacaga

SEQ ID NO: 1510402 - RNA, 19 nt, Homo sapiens
  misc_RNA (1)...(19): siRNA sense strand
caauaaacaguucacaaga

SEQ ID NO: 1510403 - RNA, 19 nt, Homo sapiens
  misc_RNA (1)...(19): siRNA sense strand
ucagcaaagauaucaguua

SEQ ID NO: 1510404 - RNA, 19 nt, Homo sapiens
  misc_RNA (1)...(19): siRNA sense strand
gugaagagaaaucagaauu

SEQ ID NO: 1510405 - RNA, 19 nt, Homo sapiens
  misc_RNA (1)...(19): siRNA sense strand
cagcaaaggaucucaagga

SEQ ID NO: 1510406 - RNA, 19 nt, Homo sapiens
  misc_RNA (1)...(19): siRNA sense strand
gaaaaugacuuagaagaac

SEQ ID NO: 1510407 - RNA, 19 nt, Homo sapiens
  misc_RNA (1)...(19): siRNA sense strand
gcaaacucagguuaaacua

SEQ ID NO: 1510408 - RNA, 19 nt, Homo sapiens
  misc_RNA (1)...(19): siRNA sense strand
agcagaauuuccuguauaa

SEQ ID NO: 1510409 - RNA, 19 nt, Homo sapiens
  misc_RNA (1)...(19): siRNA sense strand
ggucgaauuucuccuguac

SEQ ID NO: 1510410 - RNA, 19 nt, Homo sapiens
  misc_RNA (1)...(19): siRNA sense strand
uagaagaacuaaggguaga

SEQ ID NO: 1510411 - RNA, 19 nt, Homo sapiens
  misc_RNA (1)...(19): siRNA sense strand
uuacacagcuaccucuaca

SEQ ID NO: 1510412 - RNA, 19 nt, Homo sapiens
  misc_RNA (1)...(19): siRNA sense strand
uaaguacagcugaagauga

SEQ ID NO: 1510413 - RNA, 19 nt, Homo sapiens
  misc_RNA (1)...(19): siRNA sense strand
caagccaucuaguaugcaa

SEQ ID NO: 1510414 - RNA, 19 nt, Homo sapiens
  misc_RNA (1)...(19): siRNA sense strand
uaucaaaugccuugucaug

SEQ ID NO: 1510415 - RNA, 19 nt, Homo sapiens
  misc_RNA (1)...(19): siRNA sense strand
cucaagaaaucaaguacuu

SEQ ID NO: 1510416 - RNA, 19 nt, Homo sapiens
  misc_RNA (1)...(19): siRNA sense strand
ccuucaacuucuacauuua

SEQ ID NO: 1510417 - RNA, 19 nt, Homo sapiens
  misc_RNA (1)...(19): siRNA sense strand
cacaagagcaccuaacugu

SEQ ID NO: 1510418 - RNA, 19 nt, Homo sapiens
  misc_RNA (1)...(19): siRNA sense strand
cuaagaauccaaacagaug

SEQ ID NO: 1510419 - RNA, 19 nt, Homo sapiens
  misc_RNA (1)...(19): siRNA sense strand
uaucuucagcugaccaaua

SEQ ID NO: 1510420 - RNA, 19 nt, Homo sapiens
  misc_RNA (1)...(19): siRNA sense strand
gccaugaggauccacagua

SEQ ID NO: 1510421 - RNA, 19 nt, Homo sapiens
  misc_RNA (1)...(19): siRNA sense strand
aagaaaaucuggaaccaaa

SEQ ID NO: 1510422 - RNA, 19 nt, Homo sapiens
  misc_RNA (1)...(19): siRNA sense strand
ggucugauaacaauaaaca

SEQ ID NO: 1510423 - RNA, 19 nt, Homo sapiens
  misc_RNA (1)...(19): siRNA sense strand
aauaguggaucucaaccaa

SEQ ID NO: 1510424 - RNA, 19 nt, Homo sapiens
  misc_RNA (1)...(19): siRNA sense strand
caacagugaaggagcagaa

SEQ ID NO: 1510425 - RNA, 19 nt, Homo sapiens
  misc_RNA (1)...(19): siRNA sense strand
cagaagcccugcaguccau

SEQ ID NO: 1510426 - RNA, 19 nt, Homo sapiens
  misc_RNA (1)...(19): siRNA sense strand
uuguaaagguggaagauau

SEQ ID NO: 1510427 - RNA, 19 nt, Homo sapiens
  misc_RNA (1)...(19): siRNA sense strand
gauaauaguggaucucaac

SEQ ID NO: 1510428 - RNA, 19 nt, Homo sapiens
  misc_RNA (1)...(19): siRNA sense strand
gaacuaaggguagaucacu

SEQ ID NO: 1510429 - RNA, 19 nt, Homo sapiens
  misc_RNA (1)...(19): siRNA sense strand
cagugaaggagcagaauuu

SEQ ID NO: 1510430 - RNA, 19 nt, Homo sapiens
  misc_RNA (1)...(19): siRNA sense strand
gaucugggagggcgaguug

SEQ ID NO: 1510431 - RNA, 19 nt, Homo sapiens
  misc_RNA (1)...(19): siRNA sense strand
augaagaucuagaaacuca

SEQ ID NO: 1510432 - RNA, 19 nt, Homo sapiens
  misc_RNA (1)...(19): siRNA sense strand
gcaguccauuugauguaga

SEQ ID NO: 1510433 - RNA, 19 nt, Homo sapiens
  misc_RNA (1)...(19): siRNA sense strand
caaggaccaugauuuuauu

SEQ ID NO: 1510434 - RNA, 19 nt, Homo sapiens
  misc_RNA (1)...(19): siRNA sense strand
cccuucaacuucuacauuu

SEQ ID NO: 1510435 - RNA, 19 nt, Homo sapiens
  misc_RNA (1)...(19): siRNA sense strand
ucagacuagugaagagaaa

SEQ ID NO: 1510436 - RNA, 19 nt, Homo sapiens
  misc_RNA (1)...(19): siRNA sense strand
aauaaacaguucacaagag

SEQ ID NO: 1510437 - RNA, 19 nt, Homo sapiens
  misc_RNA (1)...(19): siRNA sense strand
ugaggaacccaaugaaugu

SEQ ID NO: 1510438 - RNA, 19 nt, Homo sapiens
  misc_RNA (1)...(19): siRNA sense strand
agagagaccugcugcaaua

SEQ ID NO: 1510439 - RNA, 19 nt, Homo sapiens
  misc_RNA (1)...(19): siRNA sense strand
gugaugaacuggaaagaaa

SEQ ID NO: 1510440 - RNA, 19 nt, Homo sapiens
  misc_RNA (1)...(19): siRNA sense strand
gcaauaccuuccuacauga

SEQ ID NO: 1510441 - RNA, 19 nt, Homo sapiens
  misc_RNA (1)...(19): siRNA sense strand
ggacauguguaugcaauga

SEQ ID NO: 1510442 - RNA, 19 nt, Homo sapiens
  misc_RNA (1)...(19): siRNA sense strand
ggcaauaccuuccuacaug

SEQ ID NO: 1510443 - RNA, 19 nt, Homo sapiens
  misc_RNA (1)...(19): siRNA sense strand
gcagaaaccuggaaaagaa

SEQ ID NO: 1510444 - RNA, 19 nt, Homo sapiens
  misc_RNA (1)...(19): siRNA sense strand
gaacgagaaaugagacaaa

SEQ ID NO: 1510445 - RNA, 19 nt, Homo sapiens
  misc_RNA (1)...(19): siRNA sense strand
caacaguggccacaaguaa

SEQ ID NO: 1510446 - RNA, 19 nt, Homo sapiens
  misc_RNA (1)...(19): siRNA sense strand
guaaucauccugagacuga

SEQ ID NO: 1510447 - RNA, 19 nt, Homo sapiens
  misc_RNA (1)...(19): siRNA sense strand
gaagaaagauacgggacau

SEQ ID NO: 1510448 - RNA, 19 nt, Homo sapiens
  misc_RNA (1)...(19): siRNA sense strand
gaaagccaaggaucuaauu

SEQ ID NO: 1510449 - RNA, 19 nt, Homo sapiens
  misc_RNA (1)...(19): siRNA sense strand
ggacagaauuuuauaggaa

SEQ ID NO: 1510450 - RNA, 19 nt, Homo sapiens
  misc_RNA (1)...(19): siRNA sense strand
acaacaagcucugugauug

SEQ ID NO: 1510451 - RNA, 19 nt, Homo sapiens
  misc_RNA (1)...(19): siRNA sense strand
gaaacaguauuagccauag

SEQ ID NO: 1510452 - RNA, 19 nt, Homo sapiens
  misc_RNA (1)...(19): siRNA sense strand
cuaaaccucuaccuaauca

SEQ ID NO: 1510453 - RNA, 19 nt, Homo sapiens
  misc_RNA (1)...(19): siRNA sense strand
gaaagcagaaaccuggaaa

SEQ ID NO: 1510454 - RNA, 19 nt, Homo sapiens
  misc_RNA (1)...(19): siRNA sense strand
gaagaaggccuaaaagaug

SEQ ID NO: 1510455 - RNA, 19 nt, Homo sapiens
  misc_RNA (1)...(19): siRNA sense strand
gacugggucuucaucaauu

SEQ ID NO: 1510456 - RNA, 19 nt, Homo sapiens
  misc_RNA (1)...(19): siRNA sense strand
gaacaugaauuccaaaagg

SEQ ID NO: 1510457 - RNA, 19 nt, Homo sapiens
  misc_RNA (1)...(19): siRNA sense strand
ccuuaucgcucaacaugaa

SEQ ID NO: 1510458 - RNA, 19 nt, Homo sapiens
  misc_RNA (1)...(19): siRNA sense strand
gaaugggaacauagaauug

SEQ ID NO: 1510459 - RNA, 19 nt, Homo sapiens
  misc_RNA (1)...(19): siRNA sense strand
agacuuggauuggaagauu

SEQ ID NO: 1510460 - RNA, 19 nt, Homo sapiens
  misc_RNA (1)...(19): siRNA sense strand
auaagaaggugaugaacug

SEQ ID NO: 1510461 - RNA, 19 nt, Homo sapiens
  misc_RNA (1)...(19): siRNA sense strand
gcacaugcucggaaggaaa

SEQ ID NO: 1510462 - RNA, 19 nt, Homo sapiens
  misc_RNA (1)...(19): siRNA sense strand
augaugaccuuguugauga

SEQ ID NO: 1510463 - RNA, 19 nt, Homo sapiens
  misc_RNA (1)...(19): siRNA sense strand
aagcuaaaccucuaccuaa

SEQ ID NO: 1510464 - RNA, 19 nt, Homo sapiens
  misc_RNA (1)...(19): siRNA sense strand
caacaugaagaacgagaaa

SEQ ID NO: 1510465 - RNA, 19 nt, Homo sapiens
  misc_RNA (1)...(19): siRNA sense strand
cagcaagggccaugugaaa

SEQ ID NO: 1510466 - RNA, 19 nt, Homo sapiens
  misc_RNA (1)...(19): siRNA sense strand
aggauaagcuaaaccucua

SEQ ID NO: 1510467 - RNA, 19 nt, Homo sapiens
  misc_RNA (1)...(19): siRNA sense strand
ggaagaagaaggccuaaaa

SEQ ID NO: 1510468 - RNA, 19 nt, Homo sapiens
  misc_RNA (1)...(19): siRNA sense strand
gagacugacuacaagaaca

SEQ ID NO: 1510469 - RNA, 19 nt, Homo sapiens
  misc_RNA (1)...(19): siRNA sense strand
caaaggaaagggugacaau

SEQ ID NO: 1510470 - RNA, 19 nt, Homo sapiens
  misc_RNA (1)...(19): siRNA sense strand
ggcguugacugggaacaua

SEQ ID NO: 1510471 - RNA, 19 nt, Homo sapiens
  misc_RNA (1)...(19): siRNA sense strand
cauauaagaaggugaugaa

SEQ ID NO: 1510472 - RNA, 19 nt, Homo sapiens
  misc_RNA (1)...(19): siRNA sense strand
ccaccuuucuguucugaga

SEQ ID NO: 1510473 - RNA, 19 nt, Homo sapiens
  misc_RNA (1)...(19): siRNA sense strand
gagaaacgacuccggagau

SEQ ID NO: 1510474 - RNA, 19 nt, Homo sapiens
  misc_RNA (1)...(19): siRNA sense strand
cagaagaggagacucaguu

SEQ ID NO: 1510475 - RNA, 19 nt, Homo sapiens
  misc_RNA (1)...(19): siRNA sense strand
ugaaugggaacauagaauu

SEQ ID NO: 1510476 - RNA, 19 nt, Homo sapiens
  misc_RNA (1)...(19): siRNA sense strand
gagaaagccaaggaucuaa

SEQ ID NO: 1510477 - RNA, 19 nt, Homo sapiens
  misc_RNA (1)...(19): siRNA sense strand
gaaagauacgggacaugug

SEQ ID NO: 1510478 - RNA, 19 nt, Homo sapiens
  misc_RNA (1)...(19): siRNA sense strand
agaaggugaugaacuggaa

SEQ ID NO: 1510479 - RNA, 19 nt, Homo sapiens
  misc_RNA (1)...(19): siRNA sense strand
gcacauaggacagaauuuu

SEQ ID NO: 1510480 - RNA, 19 nt, Homo sapiens
  misc_RNA (1)...(19): siRNA sense strand
uagaaaaggugauggaaga

SEQ ID NO: 1510481 - RNA, 19 nt, Homo sapiens
  misc_RNA (1)...(19): siRNA sense strand
gagaccugcugcaauaucu

SEQ ID NO: 1510482 - RNA, 19 nt, Homo sapiens
  misc_RNA (1)...(19): siRNA sense strand
caucaaaccagacaaccuu

SEQ ID NO: 1510483 - RNA, 19 nt, Homo sapiens
  misc_RNA (1)...(19): siRNA sense strand
agaaacaguauuagccaua

SEQ ID NO: 1510484 - RNA, 19 nt, Homo sapiens
  misc_RNA (1)...(19): siRNA sense strand
gacuuggauuggaagauuu

SEQ ID NO: 1510485 - RNA, 19 nt, Homo sapiens
  misc_RNA (1)...(19): siRNA sense strand
aaggaaagggugacaauga

SEQ ID NO: 1510486 - RNA, 19 nt, Homo sapiens
  misc_RNA (1)...(19): siRNA sense strand
ugagaaagccaaggaucua

SEQ ID NO: 1510487 - RNA, 19 nt, Homo sapiens
  misc_RNA (1)...(19): siRNA sense strand
ggaaagcagaaaccuggaa

SEQ ID NO: 1510488 - RNA, 19 nt, Homo sapiens
  misc_RNA (1)...(19): siRNA sense strand
acauguguaugcaaugaaa

SEQ ID NO: 1510489 - RNA, 19 nt, Homo sapiens
  misc_RNA (1)...(19): siRNA sense strand
caagggccaugugaaacuu

SEQ ID NO: 1510490 - RNA, 19 nt, Homo sapiens
  misc_RNA (1)...(19): siRNA sense strand
uaagcuaaaccucuaccua

SEQ ID NO: 1510491 - RNA, 19 nt, Homo sapiens
  misc_RNA (1)...(19): siRNA sense strand
gagagagaccugcugcaau

SEQ ID NO: 1510492 - RNA, 19 nt, Homo sapiens
  misc_RNA (1)...(19): siRNA sense strand
ggacaugaugaccuuguug

SEQ ID NO: 1510493 - RNA, 19 nt, Homo sapiens
  misc_RNA (1)...(19): siRNA sense strand
gggacaugaugaccuuguu

SEQ ID NO: 1510494 - RNA, 19 nt, Homo sapiens
  misc_RNA (1)...(19): siRNA sense strand
ccacagagacaucaaacca

SEQ ID NO: 1510495 - RNA, 19 nt, Homo sapiens
  misc_RNA (1)...(19): siRNA sense strand
ugacagaagaggagacuca

SEQ ID NO: 1510496 - RNA, 19 nt, Homo sapiens
  misc_RNA (1)...(19): siRNA sense strand
ugaagaacgagaaaugaga

SEQ ID NO: 1510497 - RNA, 19 nt, Homo sapiens
  misc_RNA (1)...(19): siRNA sense strand
gcaagggccaugugaaacu

SEQ ID NO: 1510498 - RNA, 19 nt, Homo sapiens
  misc_RNA (1)...(19): siRNA sense strand
ugaguaaccacacaaagga

SEQ ID NO: 1510499 - RNA, 19 nt, Homo sapiens
  misc_RNA (1)...(19): siRNA sense strand
gaaaugagacaaaagaagu

SEQ ID NO: 1510500 - RNA, 19 nt, Homo sapiens
  misc_RNA (1)...(19): siRNA sense strand
cagaguuucuucguuugaa

SEQ ID NO: 1510501 - RNA, 19 nt, Homo sapiens
  misc_RNA (1)...(19): siRNA sense strand
ucgaugaguuuccagaauc

SEQ ID NO: 1510502 - RNA, 19 nt, Homo sapiens
  misc_RNA (1)...(19): siRNA sense strand
aaacaguauuagccauaga

SEQ ID NO: 1510503 - RNA, 19 nt, Homo sapiens
  misc_RNA (1)...(19): siRNA sense strand
caaaagaaguuagaaaagg

SEQ ID NO: 1510504 - RNA, 19 nt, Homo sapiens
  misc_RNA (1)...(19): siRNA sense strand
gacaugaugaccuuguuga

SEQ ID NO: 1510505 - RNA, 19 nt, Homo sapiens
  misc_RNA (1)...(19): siRNA sense strand
gaaaauacuccguaaagca

SEQ ID NO: 1510506 - RNA, 19 nt, Homo sapiens
  misc_RNA (1)...(19): siRNA sense strand
ggacagcaagggccaugug

SEQ ID NO: 1510507 - RNA, 19 nt, Homo sapiens
  misc_RNA (1)...(19): siRNA sense strand
gacaaugaccaaagugaca

SEQ ID NO: 1510508 - RNA, 19 nt, Homo sapiens
  misc_RNA (1)...(19): siRNA sense strand
gcuaaaccucuaccuaauc

SEQ ID NO: 1510509 - RNA, 19 nt, Homo sapiens
  misc_RNA (1)...(19): siRNA sense strand
ccuaaaagaugaggagaaa

SEQ ID NO: 1510510 - RNA, 19 nt, Homo sapiens
  misc_RNA (1)...(19): siRNA sense strand
ugacugggaacauaucaga

SEQ ID NO: 1510511 - RNA, 19 nt, Homo sapiens
  misc_RNA (1)...(19): siRNA sense strand
caacaagcucugugauugg

SEQ ID NO: 1510512 - RNA, 19 nt, Homo sapiens
  misc_RNA (1)...(19): siRNA sense strand
aaagauacgggacaugugu

SEQ ID NO: 1510513 - RNA, 19 nt, Homo sapiens
  misc_RNA (1)...(19): siRNA sense strand
gaaacgacuccggagauca

SEQ ID NO: 1510514 - RNA, 19 nt, Homo sapiens
  misc_RNA (1)...(19): siRNA sense strand
ccaacaguggccacaagua

SEQ ID NO: 1510515 - RNA, 19 nt, Homo sapiens
  misc_RNA (1)...(19): siRNA sense strand
gguacaacaagcucuguga

SEQ ID NO: 1510516 - RNA, 19 nt, Homo sapiens
  misc_RNA (1)...(19): siRNA sense strand
caugaagaacgagaaauga

SEQ ID NO: 1510517 - RNA, 19 nt, Homo sapiens
  misc_RNA (1)...(19): siRNA sense strand
aaaccagacaaccuucuuu

SEQ ID NO: 1510518 - RNA, 19 nt, Homo sapiens
  misc_RNA (1)...(19): siRNA sense strand
gagacucaguuuuauauag

SEQ ID NO: 1510519 - RNA, 19 nt, Homo sapiens
  misc_RNA (1)...(19): siRNA sense strand
gacaguuuguggguuguga

SEQ ID NO: 1510520 - RNA, 19 nt, Homo sapiens
  misc_RNA (1)...(19): siRNA sense strand
caaugaaaauacuccguaa

SEQ ID NO: 1510521 - RNA, 19 nt, Homo sapiens
  misc_RNA (1)...(19): siRNA sense strand
aagaggagacucaguuuua

SEQ ID NO: 1510522 - RNA, 19 nt, Homo sapiens
  misc_RNA (1)...(19): siRNA sense strand
acugggucuucaucaauua

SEQ ID NO: 1510523 - RNA, 19 nt, Homo sapiens
  misc_RNA (1)...(19): siRNA sense strand
gauuucacuuuccagaaca

SEQ ID NO: 1510524 - RNA, 19 nt, Homo sapiens
  misc_RNA (1)...(19): siRNA sense strand
gggugacaaugaccaaagu

SEQ ID NO: 1510525 - RNA, 19 nt, Homo sapiens
  misc_RNA (1)...(19): siRNA sense strand
ucaagagacauauaagaag

SEQ ID NO: 1510526 - RNA, 19 nt, Homo sapiens
  misc_RNA (1)...(19): siRNA sense strand
cucaagagacauauaagaa

SEQ ID NO: 1510527 - RNA, 19 nt, Homo sapiens
  misc_RNA (1)...(19): siRNA sense strand
ccucaagagacauauaaga

SEQ ID NO: 1510528 - RNA, 19 nt, Homo sapiens
  misc_RNA (1)...(19): siRNA sense strand
gcaaccuuaucgcucaaca

SEQ ID NO: 1510529 - RNA, 19 nt, Homo sapiens
  misc_RNA (1)...(19): siRNA sense strand
uccagaacaugaauuccaa

SEQ ID NO: 1510530 - RNA, 19 nt, Homo sapiens
  misc_RNA (1)...(19): siRNA sense strand
ugauuucacuuuccagaac

SEQ ID NO: 1510531 - RNA, 19 nt, Homo sapiens
  misc_RNA (1)...(19): siRNA sense strand
agaagaggagacucaguuu

SEQ ID NO: 1510532 - RNA, 19 nt, Homo sapiens
  misc_RNA (1)...(19): siRNA sense strand
ggaagauuuugaguccuua

SEQ ID NO: 1510533 - RNA, 19 nt, Homo sapiens
  misc_RNA (1)...(19): siRNA sense strand
gggcaauaccuuccuacau

SEQ ID NO: 1510534 - RNA, 19 nt, Homo sapiens
  misc_RNA (1)...(19): siRNA sense strand
ggugaugaacuggaaagaa

SEQ ID NO: 1510535 - RNA, 19 nt, Homo sapiens
  misc_RNA (1)...(19): siRNA sense strand
uacaacaagcucugugauu

SEQ ID NO: 1510536 - RNA, 19 nt, Homo sapiens
  misc_RNA (1)...(19): siRNA sense strand
gaagaggagacucaguuuu

SEQ ID NO: 1510537 - RNA, 19 nt, Homo sapiens
  misc_RNA (1)...(19): siRNA sense strand
gaaggugaugaacuggaaa

SEQ ID NO: 1510538 - RNA, 19 nt, Homo sapiens
  misc_RNA (1)...(19): siRNA sense strand
gaacagacauaguuaguug

SEQ ID NO: 1510539 - RNA, 19 nt, Homo sapiens
  misc_RNA (1)...(19): siRNA sense strand
ggaggaagaugaaguuauu

SEQ ID NO: 1510540 - RNA, 19 nt, Homo sapiens
  misc_RNA (1)...(19): siRNA sense strand
gguaaacccugauucauuu

SEQ ID NO: 1510541 - RNA, 19 nt, Homo sapiens
  misc_RNA (1)...(19): siRNA sense strand
ggaagaggaugaagaagaa

SEQ ID NO: 1510542 - RNA, 19 nt, Homo sapiens
  misc_RNA (1)...(19): siRNA sense strand
acaaacaccuugccaguua

SEQ ID NO: 1510543 - RNA, 19 nt, Homo sapiens
  misc_RNA (1)...(19): siRNA sense strand
gggaauaucuaucaguaaa

SEQ ID NO: 1510544 - RNA, 19 nt, Homo sapiens
  misc_RNA (1)...(19): siRNA sense strand
ccaacaaugucagaaauua

SEQ ID NO: 1510545 - RNA, 19 nt, Homo sapiens
  misc_RNA (1)...(19): siRNA sense strand
ggacguuccugaagagaaa

SEQ ID NO: 1510546 - RNA, 19 nt, Homo sapiens
  misc_RNA (1)...(19): siRNA sense strand
gaacugcaauacuuaagga

SEQ ID NO: 1510547 - RNA, 19 nt, Homo sapiens
  misc_RNA (1)...(19): siRNA sense strand
gcuuacaucucaacaauga

SEQ ID NO: 1510548 - RNA, 19 nt, Homo sapiens
  misc_RNA (1)...(19): siRNA sense strand
ggauugcaguucaucauaa

SEQ ID NO: 1510549 - RNA, 19 nt, Homo sapiens
  misc_RNA (1)...(19): siRNA sense strand
agaaaucgaugcuugguuu

SEQ ID NO: 1510550 - RNA, 19 nt, Homo sapiens
  misc_RNA (1)...(19): siRNA sense strand
gaagguggauaugaaugua

SEQ ID NO: 1510551 - RNA, 19 nt, Homo sapiens
  misc_RNA (1)...(19): siRNA sense strand
gaaaugguacuacuacuau

SEQ ID NO: 1510552 - RNA, 19 nt, Homo sapiens
  misc_RNA (1)...(19): siRNA sense strand
gaagagaaagagaaugaaa

SEQ ID NO: 1510553 - RNA, 19 nt, Homo sapiens
  misc_RNA (1)...(19): siRNA sense strand
cagagaaauucaaagagua

SEQ ID NO: 1510554 - RNA, 19 nt, Homo sapiens
  misc_RNA (1)...(19): siRNA sense strand
cugcaauacuuaaggauua

SEQ ID NO: 1510555 - RNA, 19 nt, Homo sapiens
  misc_RNA (1)...(19): siRNA sense strand
agacauaguuaguugguuu

SEQ ID NO: 1510556 - RNA, 19 nt, Homo sapiens
  misc_RNA (1)...(19): siRNA sense strand
gauaucagauuuggaugaa

SEQ ID NO: 1510557 - RNA, 19 nt, Homo sapiens
  misc_RNA (1)...(19): siRNA sense strand
gcaccuaagucagggagua

SEQ ID NO: 1510558 - RNA, 19 nt, Homo sapiens
  misc_RNA (1)...(19): siRNA sense strand
uuacagacaugccaaauag

SEQ ID NO: 1510559 - RNA, 19 nt, Homo sapiens
  misc_RNA (1)...(19): siRNA sense strand
acagagaagaucagaauua

SEQ ID NO: 1510560 - RNA, 19 nt, Homo sapiens
  misc_RNA (1)...(19): siRNA sense strand
acaugaaacugcauuggua

SEQ ID NO: 1510561 - RNA, 19 nt, Homo sapiens
  misc_RNA (1)...(19): siRNA sense strand
gaagaagaaacagaugaua

SEQ ID NO: 1510562 - RNA, 19 nt, Homo sapiens
  misc_RNA (1)...(19): siRNA sense strand
agaagaagcuggagaaacu

SEQ ID NO: 1510563 - RNA, 19 nt, Homo sapiens
  misc_RNA (1)...(19): siRNA sense strand
gcagguaguuccaaagaag

SEQ ID NO: 1510564 - RNA, 19 nt, Homo sapiens
  misc_RNA (1)...(19): siRNA sense strand
uaacaggccugacgaaagg

SEQ ID NO: 1510565 - RNA, 19 nt, Homo sapiens
  misc_RNA (1)...(19): siRNA sense strand
ccagagaaauucaaagagu

SEQ ID NO: 1510566 - RNA, 19 nt, Homo sapiens
  misc_RNA (1)...(19): siRNA sense strand
gaccaucacucauaaaauu

SEQ ID NO: 1510567 - RNA, 19 nt, Homo sapiens
  misc_RNA (1)...(19): siRNA sense strand
gaagaugaaguuauugaug

SEQ ID NO: 1510568 - RNA, 19 nt, Homo sapiens
  misc_RNA (1)...(19): siRNA sense strand
ugacuauggugaaacguaa

SEQ ID NO: 1510569 - RNA, 19 nt, Homo sapiens
  misc_RNA (1)...(19): siRNA sense strand
gcagaaagacagagaagau

SEQ ID NO: 1510570 - RNA, 19 nt, Homo sapiens
  misc_RNA (1)...(19): siRNA sense strand
aaacuuaccagaagagaaa

SEQ ID NO: 1510571 - RNA, 19 nt, Homo sapiens
  misc_RNA (1)...(19): siRNA sense strand
caaguucccuuacccaaca

SEQ ID NO: 1510572 - RNA, 19 nt, Homo sapiens
  misc_RNA (1)...(19): siRNA sense strand
caaagaagaagcuggagaa

SEQ ID NO: 1510573 - RNA, 19 nt, Homo sapiens
  misc_RNA (1)...(19): siRNA sense strand
gaacagaucaagauauggu

SEQ ID NO: 1510574 - RNA, 19 nt, Homo sapiens
  misc_RNA (1)...(19): siRNA sense strand
aaaccaaacuuaccagaag

SEQ ID NO: 1510575 - RNA, 19 nt, Homo sapiens
  misc_RNA (1)...(19): siRNA sense strand
gaagcugucuaaaucagau

SEQ ID NO: 1510576 - RNA, 19 nt, Homo sapiens
  misc_RNA (1)...(19): siRNA sense strand
gagaagaucagaauuaggu

SEQ ID NO: 1510577 - RNA, 19 nt, Homo sapiens
  misc_RNA (1)...(19): siRNA sense strand
gaaggaaacaauucaaugg

SEQ ID NO: 1510578 - RNA, 19 nt, Homo sapiens
  misc_RNA (1)...(19): siRNA sense strand
ccaauguagugcuaaauuc

SEQ ID NO: 1510579 - RNA, 19 nt, Homo sapiens
  misc_RNA (1)...(19): siRNA sense strand
guuaacaaaucacauaugg

SEQ ID NO: 1510580 - RNA, 19 nt, Homo sapiens
  misc_RNA (1)...(19): siRNA sense strand
gcuagaacagacauaguua

SEQ ID NO: 1510581 - RNA, 19 nt, Homo sapiens
  misc_RNA (1)...(19): siRNA sense strand
agaagaguaugacaaguug

SEQ ID NO: 1510582 - RNA, 19 nt, Homo sapiens
  misc_RNA (1)...(19): siRNA sense strand
gaaaucgaugcuugguuua

SEQ ID NO: 1510583 - RNA, 19 nt, Homo sapiens
  misc_RNA (1)...(19): siRNA sense strand
gcaagaaggaaacaauuca

SEQ ID NO: 1510584 - RNA, 19 nt, Homo sapiens
  misc_RNA (1)...(19): siRNA sense strand
gcaagcagaaucuacagaa

SEQ ID NO: 1510585 - RNA, 19 nt, Homo sapiens
  misc_RNA (1)...(19): siRNA sense strand
gaucagaauuagguauaga

SEQ ID NO: 1510586 - RNA, 19 nt, Homo sapiens
  misc_RNA (1)...(19): siRNA sense strand
gaaccuccacgacauguga

SEQ ID NO: 1510587 - RNA, 19 nt, Homo sapiens
  misc_RNA (1)...(19): siRNA sense strand
gcaugguccuugccaguga

SEQ ID NO: 1510588 - RNA, 19 nt, Homo sapiens
  misc_RNA (1)...(19): siRNA sense strand
gaagaauggaaacuugaaa

SEQ ID NO: 1510589 - RNA, 19 nt, Homo sapiens
  misc_RNA (1)...(19): siRNA sense strand
aaacuucuccugcagauga

SEQ ID NO: 1510590 - RNA, 19 nt, Homo sapiens
  misc_RNA (1)...(19): siRNA sense strand
gugcuuacaucucaacaau

SEQ ID NO: 1510591 - RNA, 19 nt, Homo sapiens
  misc_RNA (1)...(19): siRNA sense strand
aaucagugcuuacaucuca

SEQ ID NO: 1510592 - RNA, 19 nt, Homo sapiens
  misc_RNA (1)...(19): siRNA sense strand
ugaacaagauccagaccuu

SEQ ID NO: 1510593 - RNA, 19 nt, Homo sapiens
  misc_RNA (1)...(19): siRNA sense strand
guaauaaccagacaaucuu

SEQ ID NO: 1510594 - RNA, 19 nt, Homo sapiens
  misc_RNA (1)...(19): siRNA sense strand
cagcaguucuuccuggauu

SEQ ID NO: 1510595 - RNA, 19 nt, Homo sapiens
  misc_RNA (1)...(19): siRNA sense strand
cagagaagaucagaauuag

SEQ ID NO: 1510596 - RNA, 19 nt, Homo sapiens
  misc_RNA (1)...(19): siRNA sense strand
gcuaugagcaggucagaga

SEQ ID NO: 1510597 - RNA, 19 nt, Homo sapiens
  misc_RNA (1)...(19): siRNA sense strand
cagagaagaagaaaucaaa

SEQ ID NO: 1510598 - RNA, 19 nt, Homo sapiens
  misc_RNA (1)...(19): siRNA sense strand
aagagcaacuggcagaauu

SEQ ID NO: 1510599 - RNA, 19 nt, Homo sapiens
  misc_RNA (1)...(19): siRNA sense strand
caaagugucaaacaugaaa

SEQ ID NO: 1510600 - RNA, 19 nt, Homo sapiens
  misc_RNA (1)...(19): siRNA sense strand
ccacagggaguaaugguuu

SEQ ID NO: 1510601 - RNA, 19 nt, Homo sapiens
  misc_RNA (1)...(19): siRNA sense strand
gagcauaaucugaaauauc

SEQ ID NO: 1510602 - RNA, 19 nt, Homo sapiens
  misc_RNA (1)...(19): siRNA sense strand
aaagaguaaucagugcuua

SEQ ID NO: 1510603 - RNA, 19 nt, Homo sapiens
  misc_RNA (1)...(19): siRNA sense strand
ucaaguggcuggaacaaac

SEQ ID NO: 1510604 - RNA, 19 nt, Homo sapiens
  misc_RNA (1)...(19): siRNA sense strand
guaaacagaauacauccaa

SEQ ID NO: 1510605 - RNA, 19 nt, Homo sapiens
  misc_RNA (1)...(19): siRNA sense strand
uaaguugacuauggugaaa

SEQ ID NO: 1510606 - RNA, 19 nt, Homo sapiens
  misc_RNA (1)...(19): siRNA sense strand
gaaauaucacccaggagaa

SEQ ID NO: 1510607 - RNA, 19 nt, Homo sapiens
  misc_RNA (1)...(19): siRNA sense strand
caaaccagaccgugaagaa

SEQ ID NO: 1510608 - RNA, 19 nt, Homo sapiens
  misc_RNA (1)...(19): siRNA sense strand
gagagugguuugcagaaag

SEQ ID NO: 1510609 - RNA, 19 nt, Homo sapiens
  misc_RNA (1)...(19): siRNA sense strand
gcaaaagaauuaacaacug

SEQ ID NO: 1510610 - RNA, 19 nt, Homo sapiens
  misc_RNA (1)...(19): siRNA sense strand
gaaaguaaugcagguaguu

SEQ ID NO: 1510611 - RNA, 19 nt, Homo sapiens
  misc_RNA (1)...(19): siRNA sense strand
ucgggaauaucuaucagua

SEQ ID NO: 1510612 - RNA, 19 nt, Homo sapiens
  misc_RNA (1)...(19): siRNA sense strand
aaacggaagcugucuaaau

SEQ ID NO: 1510613 - RNA, 19 nt, Homo sapiens
  misc_RNA (1)...(19): siRNA sense strand
ggaagaauggaaacuugaa

SEQ ID NO: 1510614 - RNA, 19 nt, Homo sapiens
  misc_RNA (1)...(19): siRNA sense strand
gcacaaaccaaacuuacca

SEQ ID NO: 1510615 - RNA, 19 nt, Homo sapiens
  misc_RNA (1)...(19): siRNA sense strand
caaacuccagaucuaaaua

SEQ ID NO: 1510616 - RNA, 19 nt, Homo sapiens
  misc_RNA (1)...(19): siRNA sense strand
guacuuccauuguaaacag

SEQ ID NO: 1510617 - RNA, 19 nt, Homo sapiens
  misc_RNA (1)...(19): siRNA sense strand
uuaauagcauucccaccua

SEQ ID NO: 1510618 - RNA, 19 nt, Homo sapiens
  misc_RNA (1)...(19): siRNA sense strand
ugaaaugguacuacuacua

SEQ ID NO: 1510619 - RNA, 19 nt, Homo sapiens
  misc_RNA (1)...(19): siRNA sense strand
cagaagaguaugacaaguu

SEQ ID NO: 1510620 - RNA, 19 nt, Homo sapiens
  misc_RNA (1)...(19): siRNA sense strand
caagguacaaccagagaaa

SEQ ID NO: 1510621 - RNA, 19 nt, Homo sapiens
  misc_RNA (1)...(19): siRNA sense strand
aggaacagaucaagauaug

SEQ ID NO: 1510622 - RNA, 19 nt, Homo sapiens
  misc_RNA (1)...(19): siRNA sense strand
aacggaagcugucuaaauc

SEQ ID NO: 1510623 - RNA, 19 nt, Homo sapiens
  misc_RNA (1)...(19): siRNA sense strand
ccaggaagaggaugaagaa

SEQ ID NO: 1510624 - RNA, 19 nt, Homo sapiens
  misc_RNA (1)...(19): siRNA sense strand
gaagaucagaauuagguau

SEQ ID NO: 1510625 - RNA, 19 nt, Homo sapiens
  misc_RNA (1)...(19): siRNA sense strand
ggaaguagaggaggcaaga

SEQ ID NO: 1510626 - RNA, 19 nt, Homo sapiens
  misc_RNA (1)...(19): siRNA sense strand
cacagggaguaaugguuua

SEQ ID NO: 1510627 - RNA, 19 nt, Homo sapiens
  misc_RNA (1)...(19): siRNA sense strand
aauggucugucuucccuua

SEQ ID NO: 1510628 - RNA, 19 nt, Homo sapiens
  misc_RNA (1)...(19): siRNA sense strand
uaucagagcgccaauucaa

SEQ ID NO: 1510629 - RNA, 19 nt, Homo sapiens
  misc_RNA (1)...(19): siRNA sense strand
guuaagggcacaaaccaaa

SEQ ID NO: 1510630 - RNA, 19 nt, Homo sapiens
  misc_RNA (1)...(19): siRNA sense strand
gguaugaugcacuuucuga

SEQ ID NO: 1510631 - RNA, 19 nt, Homo sapiens
  misc_RNA (1)...(19): siRNA sense strand
ugaaacggaagcugucuaa

SEQ ID NO: 1510632 - RNA, 19 nt, Homo sapiens
  misc_RNA (1)...(19): siRNA sense strand
aagcgcaaguuucuuaaug

SEQ ID NO: 1510633 - RNA, 19 nt, Homo sapiens
  misc_RNA (1)...(19): siRNA sense strand
uaaugcagguaguuccaaa

SEQ ID NO: 1510634 - RNA, 19 nt, Homo sapiens
  misc_RNA (1)...(19): siRNA sense strand
uuacagagaagaagaaauc

SEQ ID NO: 1510635 - RNA, 19 nt, Homo sapiens
  misc_RNA (1)...(19): siRNA sense strand
gaaacguaauaaccagaca

SEQ ID NO: 1510636 - RNA, 19 nt, Homo sapiens
  misc_RNA (1)...(19): siRNA sense strand
cuccagaucuaaauauguu

SEQ ID NO: 1510637 - RNA, 19 nt, Homo sapiens
  misc_RNA (1)...(19): siRNA sense strand
gaagaaacagaugauagug

SEQ ID NO: 1510638 - RNA, 19 nt, Homo sapiens
  misc_RNA (1)...(19): siRNA sense strand
ucaggaagaugcagcaaua

SEQ ID NO: 1510639 - RNA, 19 nt, Homo sapiens
  misc_RNA (1)...(19): siRNA sense strand
gagcaggagucccuaaaga

SEQ ID NO: 1510640 - RNA, 19 nt, Homo sapiens
  misc_RNA (1)...(19): siRNA sense strand
gcccugaguuacauaaaua

SEQ ID NO: 1510641 - RNA, 19 nt, Homo sapiens
  misc_RNA (1)...(19): siRNA sense strand
uaaaguaucacgcuaagaa

SEQ ID NO: 1510642 - RNA, 19 nt, Homo sapiens
  misc_RNA (1)...(19): siRNA sense strand
gaaugugaauggcauaaag

SEQ ID NO: 1510643 - RNA, 19 nt, Homo sapiens
  misc_RNA (1)...(19): siRNA sense strand
gcauaaaguaucacgcuaa

SEQ ID NO: 1510644 - RNA, 19 nt, Homo sapiens
  misc_RNA (1)...(19): siRNA sense strand
aggaggagguggacuauga

SEQ ID NO: 1510645 - RNA, 19 nt, Homo sapiens
  misc_RNA (1)...(19): siRNA sense strand
gaggacaaccacaucgaua

SEQ ID NO: 1510646 - RNA, 19 nt, Homo sapiens
  misc_RNA (1)...(19): siRNA sense strand
ugaauggcauaaaguauca

SEQ ID NO: 1510647 - RNA, 19 nt, Homo sapiens
  misc_RNA (1)...(19): siRNA sense strand
uaagaauggucacagaaca

SEQ ID NO: 1510648 - RNA, 19 nt, Homo sapiens
  misc_RNA (1)...(19): siRNA sense strand
gauacaagaaugugaaugg

SEQ ID NO: 1510649 - RNA, 19 nt, Homo sapiens
  misc_RNA (1)...(19): siRNA sense strand
cauaaaguaucacgcuaag

SEQ ID NO: 1510650 - RNA, 19 nt, Homo sapiens
  misc_RNA (1)...(19): siRNA sense strand
gcaggagucccuaaagaag

SEQ ID NO: 1510651 - RNA, 19 nt, Homo sapiens
  misc_RNA (1)...(19): siRNA sense strand
ggucacagaacacagauuc

SEQ ID NO: 1510652 - RNA, 19 nt, Homo sapiens
  misc_RNA (1)...(19): siRNA sense strand
ggacaaccacaucgauaca

SEQ ID NO: 1510653 - RNA, 19 nt, Homo sapiens
  misc_RNA (1)...(19): siRNA sense strand
ccacaucgauacagaucca

SEQ ID NO: 1510654 - RNA, 19 nt, Homo sapiens
  misc_RNA (1)...(19): siRNA sense strand
gagagcaggagucccuaaa

SEQ ID NO: 1510655 - RNA, 19 nt, Homo sapiens
  misc_RNA (1)...(19): siRNA sense strand
gcuaagaauggucacagaa

SEQ ID NO: 1510656 - RNA, 19 nt, Homo sapiens
  misc_RNA (1)...(19): siRNA sense strand
gcgaggaggagguggacua

SEQ ID NO: 1510657 - RNA, 19 nt, Homo sapiens
  misc_RNA (1)...(19): siRNA sense strand
acaaccacaucgauacaga

SEQ ID NO: 1510658 - RNA, 19 nt, Homo sapiens
  misc_RNA (1)...(19): siRNA sense strand
aggagucccuaaagaagaa

SEQ ID NO: 1510659 - RNA, 19 nt, Homo sapiens
  misc_RNA (1)...(19): siRNA sense strand
gcaccacacaaucaauuuc

SEQ ID NO: 1510660 - RNA, 19 nt, Homo sapiens
  misc_RNA (1)...(19): siRNA sense strand
ccgcaaaccauucaagugu

SEQ ID NO: 1510661 - RNA, 19 nt, Homo sapiens
  misc_RNA (1)...(19): siRNA sense strand
gugaauggcauaaaguauc

SEQ ID NO: 1510662 - RNA, 19 nt, Homo sapiens
  misc_RNA (1)...(19): siRNA sense strand
caagaaugugaauggcaua

SEQ ID NO: 1510663 - RNA, 19 nt, Homo sapiens
  misc_RNA (1)...(19): siRNA sense strand
acagauucguguccgcaaa

SEQ ID NO: 1510664 - RNA, 19 nt, Homo sapiens
  misc_RNA (1)...(19): siRNA sense strand
ccuauguugcccugaguua

SEQ ID NO: 1510665 - RNA, 19 nt, Homo sapiens
  misc_RNA (1)...(19): siRNA sense strand
gauacagauccacggguuu

SEQ ID NO: 1510666 - RNA, 19 nt, Homo sapiens
  misc_RNA (1)...(19): siRNA sense strand
ggugucggcugagauuauc

SEQ ID NO: 1510667 - RNA, 19 nt, Homo sapiens
  misc_RNA (1)...(19): siRNA sense strand
gagauacaagaaugugaau

SEQ ID NO: 1510668 - RNA, 19 nt, Homo sapiens
  misc_RNA (1)...(19): siRNA sense strand
agagauacaagaaugugaa

SEQ ID NO: 1510669 - RNA, 19 nt, Homo sapiens
  misc_RNA (1)...(19): siRNA sense strand
uccaauaccugccgauucg

SEQ ID NO: 1510670 - RNA, 19 nt, Homo sapiens
  misc_RNA (1)...(19): siRNA sense strand
caggagucccuaaagaaga

SEQ ID NO: 1510671 - RNA, 19 nt, Homo sapiens
  misc_RNA (1)...(19): siRNA sense strand
ccacagagagugccaucag

SEQ ID NO: 1510672 - RNA, 19 nt, Homo sapiens
  misc_RNA (1)...(19): siRNA sense strand
ggcaccacacaaucaauuu

SEQ ID NO: 1510673 - RNA, 19 nt, Homo sapiens
  misc_RNA (1)...(19): siRNA sense strand
ugggaagaguuacaagaca

SEQ ID NO: 1510674 - RNA, 19 nt, Homo sapiens
  misc_RNA (1)...(19): siRNA sense strand
cgacaggcagcgaguaugg

SEQ ID NO: 1510675 - RNA, 19 nt, Homo sapiens
  misc_RNA (1)...(19): siRNA sense strand
cggcaccacacaaucaauu

SEQ ID NO: 1510676 - RNA, 19 nt, Homo sapiens
  misc_RNA (1)...(19): siRNA sense strand
cacagcaguggaagccuua

SEQ ID NO: 1510677 - RNA, 19 nt, Homo sapiens
  misc_RNA (1)...(19): siRNA sense strand
uacagcagccaaccuaugu

SEQ ID NO: 1510678 - RNA, 19 nt, Homo sapiens
  misc_RNA (1)...(19): siRNA sense strand
aauuacagcagccaaccua

SEQ ID NO: 1510679 - RNA, 19 nt, Homo sapiens
  misc_RNA (1)...(19): siRNA sense strand
gccuccuucuucuccaaua

SEQ ID NO: 1510680 - RNA, 19 nt, Homo sapiens
  misc_RNA (1)...(19): siRNA sense strand
cgagagcaggagucccuaa

SEQ ID NO: 1510681 - RNA, 19 nt, Homo sapiens
  misc_RNA (1)...(19): siRNA sense strand
aaagagauacaagaaugug

SEQ ID NO: 1510682 - RNA, 19 nt, Homo sapiens
  misc_RNA (1)...(19): siRNA sense strand
uuacagcagccaaccuaug

SEQ ID NO: 1510683 - RNA, 19 nt, Homo sapiens
  misc_RNA (1)...(19): siRNA sense strand
gaaagccacuuccagagaa

SEQ ID NO: 1510684 - RNA, 19 nt, Homo sapiens
  misc_RNA (1)...(19): siRNA sense strand
ggaaauaggagacaaacaa

SEQ ID NO: 1510685 - RNA, 19 nt, Homo sapiens
  misc_RNA (1)...(19): siRNA sense strand
gaacguagcagagagauga

SEQ ID NO: 1510686 - RNA, 19 nt, Homo sapiens
  misc_RNA (1)...(19): siRNA sense strand
ggacagacaccaccagaaa

SEQ ID NO: 1510687 - RNA, 19 nt, Homo sapiens
  misc_RNA (1)...(19): siRNA sense strand
gaucaaggcucaggaagga

SEQ ID NO: 1510688 - RNA, 19 nt, Homo sapiens
  misc_RNA (1)...(19): siRNA sense strand
ggaaaggaguaucuugaau

SEQ ID NO: 1510689 - RNA, 19 nt, Homo sapiens
  misc_RNA (1)...(19): siRNA sense strand
gaguauggguucagaaaug

SEQ ID NO: 1510690 - RNA, 19 nt, Homo sapiens
  misc_RNA (1)...(19): siRNA sense strand
gggaagauguccugcagaa

SEQ ID NO: 1510691 - RNA, 19 nt, Homo sapiens
  misc_RNA (1)...(19): siRNA sense strand
guagguggcugcacauuca

SEQ ID NO: 1510692 - RNA, 19 nt, Homo sapiens
  misc_RNA (1)...(19): siRNA sense strand
gaaaggaguaucuugaaug

SEQ ID NO: 1510693 - RNA, 19 nt, Homo sapiens
  misc_RNA (1)...(19): siRNA sense strand
guaaaccagugccugcuaa

SEQ ID NO: 1510694 - RNA, 19 nt, Homo sapiens
  misc_RNA (1)...(19): siRNA sense strand
gacaaagccuggaccauca

SEQ ID NO: 1510695 - RNA, 19 nt, Homo sapiens
  misc_RNA (1)...(19): siRNA sense strand
ggaggcagaaggugacuua

SEQ ID NO: 1510696 - RNA, 19 nt, Homo sapiens
  misc_RNA (1)...(19): siRNA sense strand
ggaaggaugugcagaagac

SEQ ID NO: 1510697 - RNA, 19 nt, Homo sapiens
  misc_RNA (1)...(19): siRNA sense strand
gaagauguccugcagaaag

SEQ ID NO: 1510698 - RNA, 19 nt, Homo sapiens
  misc_RNA (1)...(19): siRNA sense strand
gauaaagccuccacuucuc

SEQ ID NO: 1510699 - RNA, 19 nt, Homo sapiens
  misc_RNA (1)...(19): siRNA sense strand
ugaaggcucuggacgaaga

SEQ ID NO: 1510700 - RNA, 19 nt, Homo sapiens
  misc_RNA (1)...(19): siRNA sense strand
aggcauggcuugagaguga

SEQ ID NO: 1510701 - RNA, 19 nt, Homo sapiens
  misc_RNA (1)...(19): siRNA sense strand
ggagacaacagaacaacaa

SEQ ID NO: 1510702 - RNA, 19 nt, Homo sapiens
  misc_RNA (1)...(19): siRNA sense strand
ggaaauacaaccagcuuca

SEQ ID NO: 1510703 - RNA, 19 nt, Homo sapiens
  misc_RNA (1)...(19): siRNA sense strand
ggacaucacgacccuaaau

SEQ ID NO: 1510704 - RNA, 19 nt, Homo sapiens
  misc_RNA (1)...(19): siRNA sense strand
cagagcagcugcaccugaa

SEQ ID NO: 1510705 - RNA, 19 nt, Homo sapiens
  misc_RNA (1)...(19): siRNA sense strand
ugaacuaccuucuggaaag

SEQ ID NO: 1510706 - RNA, 19 nt, Homo sapiens
  misc_RNA (1)...(19): siRNA sense strand
gaacaacaagcaagucagu

SEQ ID NO: 1510707 - RNA, 19 nt, Homo sapiens
  misc_RNA (1)...(19): siRNA sense strand
gagacgacauugcacuuca

SEQ ID NO: 1510708 - RNA, 19 nt, Homo sapiens
  misc_RNA (1)...(19): siRNA sense strand
ggauaaagccuccacuucu

SEQ ID NO: 1510709 - RNA, 19 nt, Homo sapiens
  misc_RNA (1)...(19): siRNA sense strand
agagagcacugaugaagau

SEQ ID NO: 1510710 - RNA, 19 nt, Homo sapiens
  misc_RNA (1)...(19): siRNA sense strand
gcaggaaggaugugcagaa

SEQ ID NO: 1510711 - RNA, 19 nt, Homo sapiens
  misc_RNA (1)...(19): siRNA sense strand
gacaaauccugguggacaa

SEQ ID NO: 1510712 - RNA, 19 nt, Homo sapiens
  misc_RNA (1)...(19): siRNA sense strand
gagcacugguggcaaggaa

SEQ ID NO: 1510713 - RNA, 19 nt, Homo sapiens
  misc_RNA (1)...(19): siRNA sense strand
cagaaacgcagccagcuuu

SEQ ID NO: 1510714 - RNA, 19 nt, Homo sapiens
  misc_RNA (1)...(19): siRNA sense strand
ccaccacuguccugucaaa

SEQ ID NO: 1510715 - RNA, 19 nt, Homo sapiens
  misc_RNA (1)...(19): siRNA sense strand
gguaagaacaugacagcuu

SEQ ID NO: 1510716 - RNA, 19 nt, Homo sapiens
  misc_RNA (1)...(19): siRNA sense strand
gagcacugaugaagaugug

SEQ ID NO: 1510717 - RNA, 19 nt, Homo sapiens
  misc_RNA (1)...(19): siRNA sense strand
cuuguaagguucuguguga

SEQ ID NO: 1510718 - RNA, 19 nt, Homo sapiens
  misc_RNA (1)...(19): siRNA sense strand
gccaagagagcacugauga

SEQ ID NO: 1510719 - RNA, 19 nt, Homo sapiens
  misc_RNA (1)...(19): siRNA sense strand
caugugcccuccuauggaa

SEQ ID NO: 1510720 - RNA, 19 nt, Homo sapiens
  misc_RNA (1)...(19): siRNA sense strand
gaaauaggagacaaacaag

SEQ ID NO: 1510721 - RNA, 19 nt, Homo sapiens
  misc_RNA (1)...(19): siRNA sense strand
ccacagaagagucagaaga

SEQ ID NO: 1510722 - RNA, 19 nt, Homo sapiens
  misc_RNA (1)...(19): siRNA sense strand
aaaaugcucuuuccucuga

SEQ ID NO: 1510723 - RNA, 19 nt, Homo sapiens
  misc_RNA (1)...(19): siRNA sense strand
cagacaggcugcccacuca

SEQ ID NO: 1510724 - RNA, 19 nt, Homo sapiens
  misc_RNA (1)...(19): siRNA sense strand
aaaggaguaucuugaaugg

SEQ ID NO: 1510725 - RNA, 19 nt, Homo sapiens
  misc_RNA (1)...(19): siRNA sense strand
gaagauguggcaggagaaa

SEQ ID NO: 1510726 - RNA, 19 nt, Homo sapiens
  misc_RNA (1)...(19): siRNA sense strand
gaaguaccaaucaguaagu

SEQ ID NO: 1510727 - RNA, 19 nt, Homo sapiens
  misc_RNA (1)...(19): siRNA sense strand
gugcuuaggguccaaacua

SEQ ID NO: 1510728 - RNA, 19 nt, Homo sapiens
  misc_RNA (1)...(19): siRNA sense strand
aagcgcagguggucaguga

SEQ ID NO: 1510729 - RNA, 19 nt, Homo sapiens
  misc_RNA (1)...(19): siRNA sense strand
cgacauugcacuucagaug

SEQ ID NO: 1510730 - RNA, 19 nt, Homo sapiens
  misc_RNA (1)...(19): siRNA sense strand
uuacggagguccuggaagu

SEQ ID NO: 1510731 - RNA, 19 nt, Homo sapiens
  misc_RNA (1)...(19): siRNA sense strand
ggaaccacuuacagcagaa

SEQ ID NO: 1510732 - RNA, 19 nt, Homo sapiens
  misc_RNA (1)...(19): siRNA sense strand
agacaaacaagaaaggaaa

SEQ ID NO: 1510733 - RNA, 19 nt, Homo sapiens
  misc_RNA (1)...(19): siRNA sense strand
gggaguauggguucagaaa

SEQ ID NO: 1510734 - RNA, 19 nt, Homo sapiens
  misc_RNA (1)...(19): siRNA sense strand
uaucuugaauggcccuuga

SEQ ID NO: 1510735 - RNA, 19 nt, Homo sapiens
  misc_RNA (1)...(19): siRNA sense strand
caagagagcacugaugaag

SEQ ID NO: 1510736 - RNA, 19 nt, Homo sapiens
  misc_RNA (1)...(19): siRNA sense strand
ggccaccacuguccuguca

SEQ ID NO: 1510737 - RNA, 19 nt, Homo sapiens
  misc_RNA (1)...(19): siRNA sense strand
agaggucaaucgccacaaa

SEQ ID NO: 1510738 - RNA, 19 nt, Homo sapiens
  misc_RNA (1)...(19): siRNA sense strand
ugaagaagcgaccaaagug

SEQ ID NO: 1510739 - RNA, 19 nt, Homo sapiens
  misc_RNA (1)...(19): siRNA sense strand
gagacaaacaagaaaggaa

SEQ ID NO: 1510740 - RNA, 19 nt, Homo sapiens
  misc_RNA (1)...(19): siRNA sense strand
gggaaggagugggacauca

SEQ ID NO: 1510741 - RNA, 19 nt, Homo sapiens
  misc_RNA (1)...(19): siRNA sense strand
ggaaguaccaaucaguaag

SEQ ID NO: 1510742 - RNA, 19 nt, Homo sapiens
  misc_RNA (1)...(19): siRNA sense strand
gaacuaccuucuggaaagc

SEQ ID NO: 1510743 - RNA, 19 nt, Homo sapiens
  misc_RNA (1)...(19): siRNA sense strand
ggacugcauggcugacaaa

SEQ ID NO: 1510744 - RNA, 19 nt, Homo sapiens
  misc_RNA (1)...(19): siRNA sense strand
aauaggagacaaacaagaa

SEQ ID NO: 1510745 - RNA, 19 nt, Homo sapiens
  misc_RNA (1)...(19): siRNA sense strand
uugaauggcccuugaagaa

SEQ ID NO: 1510746 - RNA, 19 nt, Homo sapiens
  misc_RNA (1)...(19): siRNA sense strand
gcagaaacgcagccagcuu

SEQ ID NO: 1510747 - RNA, 19 nt, Homo sapiens
  misc_RNA (1)...(19): siRNA sense strand
uaucucggguugaaucugu

SEQ ID NO: 1510748 - RNA, 19 nt, Homo sapiens
  misc_RNA (1)...(19): siRNA sense strand
cucccagccuucugaauuu

SEQ ID NO: 1510749 - RNA, 19 nt, Homo sapiens
  misc_RNA (1)...(19): siRNA sense strand
caagaacguagcagagaga

SEQ ID NO: 1510750 - RNA, 19 nt, Homo sapiens
  misc_RNA (1)...(19): siRNA sense strand
gagugugucugguaagaac

SEQ ID NO: 1510751 - RNA, 19 nt, Homo sapiens
  misc_RNA (1)...(19): siRNA sense strand
gcagguggucagugagauu

SEQ ID NO: 1510752 - RNA, 19 nt, Homo sapiens
  misc_RNA (1)...(19): siRNA sense strand
ucaggaaggaccucaguga

SEQ ID NO: 1510753 - RNA, 19 nt, Homo sapiens
  misc_RNA (1)...(19): siRNA sense strand
gaccuccccucucucaaua

SEQ ID NO: 1510754 - RNA, 19 nt, Homo sapiens
  misc_RNA (1)...(19): siRNA sense strand
gcaaaggccccacagaaga

SEQ ID NO: 1510755 - RNA, 19 nt, Homo sapiens
  misc_RNA (1)...(19): siRNA sense strand
guacccaagguucccauuu

SEQ ID NO: 1510756 - RNA, 19 nt, Homo sapiens
  misc_RNA (1)...(19): siRNA sense strand
gaacccuuccucacagaau

SEQ ID NO: 1510757 - RNA, 19 nt, Homo sapiens
  misc_RNA (1)...(19): siRNA sense strand
gagagugggcagaggauuc

SEQ ID NO: 1510758 - RNA, 19 nt, Homo sapiens
  misc_RNA (1)...(19): siRNA sense strand
gaaacccaaacccagacua

SEQ ID NO: 1510759 - RNA, 19 nt, Homo sapiens
  misc_RNA (1)...(19): siRNA sense strand
gacaacagaacaacaagca

SEQ ID NO: 1510760 - RNA, 19 nt, Homo sapiens
  misc_RNA (1)...(19): siRNA sense strand
aaauccaucuggccaggaa

SEQ ID NO: 1510761 - RNA, 19 nt, Homo sapiens
  misc_RNA (1)...(19): siRNA sense strand
ggaagggcaggaaggaugu

SEQ ID NO: 1510762 - RNA, 19 nt, Homo sapiens
  misc_RNA (1)...(19): siRNA sense strand
gugcacaggagacgacauu

SEQ ID NO: 1510763 - RNA, 19 nt, Homo sapiens
  misc_RNA (1)...(19): siRNA sense strand
aaagccacuuccagagaaa

SEQ ID NO: 1510764 - RNA, 19 nt, Homo sapiens
  misc_RNA (1)...(19): siRNA sense strand
gaacgaggcauggcuugag

SEQ ID NO: 1510765 - RNA, 19 nt, Homo sapiens
  misc_RNA (1)...(19): siRNA sense strand
agacaaggagcaucuggaa

SEQ ID NO: 1510766 - RNA, 19 nt, Homo sapiens
  misc_RNA (1)...(19): siRNA sense strand
ggcaggagaaagaaagaaa

SEQ ID NO: 1510767 - RNA, 19 nt, Homo sapiens
  misc_RNA (1)...(19): siRNA sense strand
gggaaaugcaugcaagauc

SEQ ID NO: 1510768 - RNA, 19 nt, Homo sapiens
  misc_RNA (1)...(19): siRNA sense strand
acauugcacuucagaugga

SEQ ID NO: 1510769 - RNA, 19 nt, Homo sapiens
  misc_RNA (1)...(19): siRNA sense strand
ggaagauguccugcagaaa

SEQ ID NO: 1510770 - RNA, 19 nt, Homo sapiens
  misc_RNA (1)...(19): siRNA sense strand
gcacacggugggaagaugu

SEQ ID NO: 1510771 - RNA, 19 nt, Homo sapiens
  misc_RNA (1)...(19): siRNA sense strand
agaaagccacuuccagaga

SEQ ID NO: 1510772 - RNA, 19 nt, Homo sapiens
  misc_RNA (1)...(19): siRNA sense strand
ccucccagccuucugaauu

SEQ ID NO: 1510773 - RNA, 19 nt, Homo sapiens
  misc_RNA (1)...(19): siRNA sense strand
aaagaucagucaccaucca

SEQ ID NO: 1510774 - RNA, 19 nt, Homo sapiens
  misc_RNA (1)...(19): siRNA sense strand
ggagacaaacaagaaagga

SEQ ID NO: 1510775 - RNA, 19 nt, Homo sapiens
  misc_RNA (1)...(19): siRNA sense strand
ggaacgaggcauggcuuga

SEQ ID NO: 1510776 - RNA, 19 nt, Homo sapiens
  misc_RNA (1)...(19): siRNA sense strand
ggaguauggguucagaaau

SEQ ID NO: 1510777 - RNA, 19 nt, Homo sapiens
  misc_RNA (1)...(19): siRNA sense strand
ggaaagcccacgugaacac

SEQ ID NO: 1510778 - RNA, 19 nt, Homo sapiens
  misc_RNA (1)...(19): siRNA sense strand
ccagggacccagacaagga

SEQ ID NO: 1510779 - RNA, 19 nt, Homo sapiens
  misc_RNA (1)...(19): siRNA sense strand
gacaaggagcaucuggaaa

SEQ ID NO: 1510780 - RNA, 19 nt, Homo sapiens
  misc_RNA (1)...(19): siRNA sense strand
ggaauccgggaaacccaaa

SEQ ID NO: 1510781 - RNA, 19 nt, Homo sapiens
  misc_RNA (1)...(19): siRNA sense strand
ccaccaaggcaguuuaugg

SEQ ID NO: 1510782 - RNA, 19 nt, Homo sapiens
  misc_RNA (1)...(19): siRNA sense strand
caccaaggcaguuuaugga

SEQ ID NO: 1510783 - RNA, 19 nt, Homo sapiens
  misc_RNA (1)...(19): siRNA sense strand
caaugaagcuucuuacaug

SEQ ID NO: 1510784 - RNA, 19 nt, Homo sapiens
  misc_RNA (1)...(19): siRNA sense strand
caaaggaacuggaagacuu

SEQ ID NO: 1510785 - RNA, 19 nt, Homo sapiens
  misc_RNA (1)...(19): siRNA sense strand
acacagccaugaaguauaa

SEQ ID NO: 1510786 - RNA, 19 nt, Homo sapiens
  misc_RNA (1)...(19): siRNA sense strand
gagaacagcugccuauguc

SEQ ID NO: 1510787 - RNA, 19 nt, Homo sapiens
  misc_RNA (1)...(19): siRNA sense strand
gagaagcaguugaccaaau

SEQ ID NO: 1510788 - RNA, 19 nt, Homo sapiens
  misc_RNA (1)...(19): siRNA sense strand
gcaaagcccuaugaaggaa

SEQ ID NO: 1510789 - RNA, 19 nt, Homo sapiens
  misc_RNA (1)...(19): siRNA sense strand
ggaggucgacugugacaua

SEQ ID NO: 1510790 - RNA, 19 nt, Homo sapiens
  misc_RNA (1)...(19): siRNA sense strand
ccauggagcuagcaaagaa

SEQ ID NO: 1510791 - RNA, 19 nt, Homo sapiens
  misc_RNA (1)...(19): siRNA sense strand
ggaaugacaccaggguuua

SEQ ID NO: 1510792 - RNA, 19 nt, Homo sapiens
  misc_RNA (1)...(19): siRNA sense strand
uggcuucucugaugacaua

SEQ ID NO: 1510793 - RNA, 19 nt, Homo sapiens
  misc_RNA (1)...(19): siRNA sense strand
ugaaagggauucuaacuac

SEQ ID NO: 1510794 - RNA, 19 nt, Homo sapiens
  misc_RNA (1)...(19): siRNA sense strand
acaccaggguuuagagaua

SEQ ID NO: 1510795 - RNA, 19 nt, Homo sapiens
  misc_RNA (1)...(19): siRNA sense strand
ccagaucucuacuugaaug

SEQ ID NO: 1510796 - RNA, 19 nt, Homo sapiens
  misc_RNA (1)...(19): siRNA sense strand
gcaagggagguauccguua

SEQ ID NO: 1510797 - RNA, 19 nt, Homo sapiens
  misc_RNA (1)...(19): siRNA sense strand
gcacacagccaugaaguau

SEQ ID NO: 1510798 - RNA, 19 nt, Homo sapiens
  misc_RNA (1)...(19): siRNA sense strand
gaggagugacaguaucuua

SEQ ID NO: 1510799 - RNA, 19 nt, Homo sapiens
  misc_RNA (1)...(19): siRNA sense strand
ggacgcaucucugcuacug

SEQ ID NO: 1510800 - RNA, 19 nt, Homo sapiens
  misc_RNA (1)...(19): siRNA sense strand
gaacagcugccuaugucaa

SEQ ID NO: 1510801 - RNA, 19 nt, Homo sapiens
  misc_RNA (1)...(19): siRNA sense strand
gaguguagaugaaguaaaa

SEQ ID NO: 1510802 - RNA, 19 nt, Homo sapiens
  misc_RNA (1)...(19): siRNA sense strand
guucagggauuugguaaug

SEQ ID NO: 1510803 - RNA, 19 nt, Homo sapiens
  misc_RNA (1)...(19): siRNA sense strand
gcacuaugauauuaaugca

SEQ ID NO: 1510804 - RNA, 19 nt, Homo sapiens
  misc_RNA (1)...(19): siRNA sense strand
cccaagaacuauaccgaaa

SEQ ID NO: 1510805 - RNA, 19 nt, Homo sapiens
  misc_RNA (1)...(19): siRNA sense strand
gagagaaacauuuugguua

SEQ ID NO: 1510806 - RNA, 19 nt, Homo sapiens
  misc_RNA (1)...(19): siRNA sense strand
uuacagcacugaugugagu

SEQ ID NO: 1510807 - RNA, 19 nt, Homo sapiens
  misc_RNA (1)...(19): siRNA sense strand
caacgcacccagagucaaa

SEQ ID NO: 1510808 - RNA, 19 nt, Homo sapiens
  misc_RNA (1)...(19): siRNA sense strand
cagaugguauugacccaaa

SEQ ID NO: 1510809 - RNA, 19 nt, Homo sapiens
  misc_RNA (1)...(19): siRNA sense strand
cgggagauguccuggauug

SEQ ID NO: 1510810 - RNA, 19 nt, Homo sapiens
  misc_RNA (1)...(19): siRNA sense strand
caagaucauugcugaaggu

SEQ ID NO: 1510811 - RNA, 19 nt, Homo sapiens
  misc_RNA (1)...(19): siRNA sense strand
caaggagguucaccaugga

SEQ ID NO: 1510812 - RNA, 19 nt, Homo sapiens
  misc_RNA (1)...(19): siRNA sense strand
gaaagacauugugcacucu

SEQ ID NO: 1510813 - RNA, 19 nt, Homo sapiens
  misc_RNA (1)...(19): siRNA sense strand
uccagaagcugauaagauc

SEQ ID NO: 1510814 - RNA, 19 nt, Homo sapiens
  misc_RNA (1)...(19): siRNA sense strand
caccaggguuuagagauaa

SEQ ID NO: 1510815 - RNA, 19 nt, Homo sapiens
  misc_RNA (1)...(19): siRNA sense strand
uaagaucaaucccaagaac

SEQ ID NO: 1510816 - RNA, 19 nt, Homo sapiens
  misc_RNA (1)...(19): siRNA sense strand
uaaaucaugucagcuaugg

SEQ ID NO: 1510817 - RNA, 19 nt, Homo sapiens
  misc_RNA (1)...(19): siRNA sense strand
gcaaccaugugcugagucu

SEQ ID NO: 1510818 - RNA, 19 nt, Homo sapiens
  misc_RNA (1)...(19): siRNA sense strand
caagggagguauccguuac

SEQ ID NO: 1510819 - RNA, 19 nt, Homo sapiens
  misc_RNA (1)...(19): siRNA sense strand
uuccagaucucuacuugaa

SEQ ID NO: 1510820 - RNA, 19 nt, Homo sapiens
  misc_RNA (1)...(19): siRNA sense strand
agaagcaguugaccaaauc

SEQ ID NO: 1510821 - RNA, 19 nt, Homo sapiens
  misc_RNA (1)...(19): siRNA sense strand
ggccuacacucuaugagau

SEQ ID NO: 1510822 - RNA, 19 nt, Homo sapiens
  misc_RNA (1)...(19): siRNA sense strand
gaaagcaugguggaacuau

SEQ ID NO: 1510823 - RNA, 19 nt, Homo sapiens
  misc_RNA (1)...(19): siRNA sense strand
gcugaagaaucuaaaucau

SEQ ID NO: 1510824 - RNA, 19 nt, Homo sapiens
  misc_RNA (1)...(19): siRNA sense strand
auacaagugugcagugguu

SEQ ID NO: 1510825 - RNA, 19 nt, Homo sapiens
  misc_RNA (1)...(19): siRNA sense strand
ggucgacugugacauacug

SEQ ID NO: 1510826 - RNA, 19 nt, Homo sapiens
  misc_RNA (1)...(19): siRNA sense strand
uaaagcugguguuaagauc

SEQ ID NO: 1510827 - RNA, 19 nt, Homo sapiens
  misc_RNA (1)...(19): siRNA sense strand
aaugaagcuucuuacauga

SEQ ID NO: 1510828 - RNA, 19 nt, Homo sapiens
  misc_RNA (1)...(19): siRNA sense strand
ggcaaagcccuaugaagga

SEQ ID NO: 1510829 - RNA, 19 nt, Homo sapiens
  misc_RNA (1)...(19): siRNA sense strand
guuaagaucaaucccaaga

SEQ ID NO: 1510830 - RNA, 19 nt, Homo sapiens
  misc_RNA (1)...(19): siRNA sense strand
guauaucgggugcaucuga

SEQ ID NO: 1510831 - RNA, 19 nt, Homo sapiens
  misc_RNA (1)...(19): siRNA sense strand
gccaacaacuccagaagcu

SEQ ID NO: 1510832 - RNA, 19 nt, Homo sapiens
  misc_RNA (1)...(19): siRNA sense strand
gaauccagaugguauugac

SEQ ID NO: 1510833 - RNA, 19 nt, Homo sapiens
  misc_RNA (1)...(19): siRNA sense strand
ccaaggcaaagcccuauga

SEQ ID NO: 1510834 - RNA, 19 nt, Homo sapiens
  misc_RNA (1)...(19): siRNA sense strand
gacuucaaauugcaacaug

SEQ ID NO: 1510835 - RNA, 19 nt, Homo sapiens
  misc_RNA (1)...(19): siRNA sense strand
gaacuauaccgaaaaugaa

SEQ ID NO: 1510836 - RNA, 19 nt, Homo sapiens
  misc_RNA (1)...(19): siRNA sense strand
gcagaguuccaagacagua

SEQ ID NO: 1510837 - RNA, 19 nt, Homo sapiens
  misc_RNA (1)...(19): siRNA sense strand
ucagggauuugguaaugug

SEQ ID NO: 1510838 - RNA, 19 nt, Homo sapiens
  misc_RNA (1)...(19): siRNA sense strand
ucaaugaagcuucuuacau

SEQ ID NO: 1510839 - RNA, 19 nt, Homo sapiens
  misc_RNA (1)...(19): siRNA sense strand
ugaugugaguguagaugaa

SEQ ID NO: 1510840 - RNA, 19 nt, Homo sapiens
  misc_RNA (1)...(19): siRNA sense strand
ugaaguauaaccugggauu

SEQ ID NO: 1510841 - RNA, 19 nt, Homo sapiens
  misc_RNA (1)...(19): siRNA sense strand
uugaguggcugaagaaucu

SEQ ID NO: 1510842 - RNA, 19 nt, Homo sapiens
  misc_RNA (1)...(19): siRNA sense strand
ucuuggaggucgacuguga

SEQ ID NO: 1510843 - RNA, 19 nt, Homo sapiens
  misc_RNA (1)...(19): siRNA sense strand
ugucagcuauggccguuug

SEQ ID NO: 1510844 - RNA, 19 nt, Homo sapiens
  misc_RNA (1)...(19): siRNA sense strand
gaaguauaaccugggauug

SEQ ID NO: 1510845 - RNA, 19 nt, Homo sapiens
  misc_RNA (1)...(19): siRNA sense strand
caagaacuauaccgaaaau

SEQ ID NO: 1510846 - RNA, 19 nt, Homo sapiens
  misc_RNA (1)...(19): siRNA sense strand
aaagcaugguggaacuauu

SEQ ID NO: 1510847 - RNA, 19 nt, Homo sapiens
  misc_RNA (1)...(19): siRNA sense strand
cuggauugcugauaccuau

SEQ ID NO: 1510848 - RNA, 19 nt, Homo sapiens
  misc_RNA (1)...(19): siRNA sense strand
gaucaaucccaagaacuau

SEQ ID NO: 1510849 - RNA, 19 nt, Homo sapiens
  misc_RNA (1)...(19): siRNA sense strand
gcuuuggcuucucugauga

SEQ ID NO: 1510850 - RNA, 19 nt, Homo sapiens
  misc_RNA (1)...(19): siRNA sense strand
ugcuaaagcugguguuaag

SEQ ID NO: 1510851 - RNA, 19 nt, Homo sapiens
  misc_RNA (1)...(19): siRNA sense strand
ugagaacagcugccuaugu

SEQ ID NO: 1510852 - RNA, 19 nt, Homo sapiens
  misc_RNA (1)...(19): siRNA sense strand
ucuaaaucaugucagcuau

SEQ ID NO: 1510853 - RNA, 19 nt, Homo sapiens
  misc_RNA (1)...(19): siRNA sense strand
uauuccagaucucuacuug

SEQ ID NO: 1510854 - RNA, 19 nt, Homo sapiens
  misc_RNA (1)...(19): siRNA sense strand
caacuccagaagcugauaa

SEQ ID NO: 1510855 - RNA, 19 nt, Homo sapiens
  misc_RNA (1)...(19): siRNA sense strand
agaucaaucccaagaacua

SEQ ID NO: 1510856 - RNA, 19 nt, Homo sapiens
  misc_RNA (1)...(19): siRNA sense strand
aagcugguguuaagaucaa

SEQ ID NO: 1510857 - RNA, 19 nt, Homo sapiens
  misc_RNA (1)...(19): siRNA sense strand
agucaaagccaagaucauu

SEQ ID NO: 1510858 - RNA, 19 nt, Homo sapiens
  misc_RNA (1)...(19): siRNA sense strand
gggccuacacucuaugaga

SEQ ID NO: 1510859 - RNA, 19 nt, Homo sapiens
  misc_RNA (1)...(19): siRNA sense strand
caucguggaggacaaguug

SEQ ID NO: 1510860 - RNA, 19 nt, Homo sapiens
  misc_RNA (1)...(19): siRNA sense strand
cauggacgcaucucugcua

SEQ ID NO: 1510861 - RNA, 19 nt, Homo sapiens
  misc_RNA (1)...(19): siRNA sense strand
gaugggaguauauggaauc

SEQ ID NO: 1510862 - RNA, 19 nt, Homo sapiens
  misc_RNA (1)...(19): siRNA sense strand
ggaaagcgaggagcagaag

SEQ ID NO: 1510863 - RNA, 19 nt, Homo sapiens
  misc_RNA (1)...(19): siRNA sense strand
gacaguauaucgggugcau

SEQ ID NO: 1510864 - RNA, 19 nt, Homo sapiens
  misc_RNA (1)...(19): siRNA sense strand
gugcuaaagcugguguuaa

SEQ ID NO: 1510865 - RNA, 19 nt, Homo sapiens
  misc_RNA (1)...(19): siRNA sense strand
aguauaaccugggauugga

SEQ ID NO: 1510866 - RNA, 19 nt, Homo sapiens
  misc_RNA (1)...(19): siRNA sense strand
gaugguggagggcuucuuc

SEQ ID NO: 1510867 - RNA, 19 nt, Homo sapiens
  misc_RNA (1)...(19): siRNA sense strand
caucugagaaagacauugu

SEQ ID NO: 1510868 - RNA, 19 nt, Homo sapiens
  misc_RNA (1)...(19): siRNA sense strand
caaggcaaagcccuaugaa

SEQ ID NO: 1510869 - RNA, 19 nt, Homo sapiens
  misc_RNA (1)...(19): siRNA sense strand
ggaauccagaugguauuga

SEQ ID NO: 1510870 - RNA, 19 nt, Homo sapiens
  misc_RNA (1)...(19): siRNA sense strand
uaaauguauugcuguuggu

SEQ ID NO: 1510871 - RNA, 19 nt, Homo sapiens
  misc_RNA (1)...(19): siRNA sense strand
ggagagaaacauuuugguu

SEQ ID NO: 1510872 - RNA, 19 nt, Homo sapiens
  misc_RNA (1)...(19): siRNA sense strand
ggugcuaaagcugguguua

SEQ ID NO: 1510873 - RNA, 19 nt, Homo sapiens
  misc_RNA (1)...(19): siRNA sense strand
cuaaagcugguguuaagau

SEQ ID NO: 1510874 - RNA, 19 nt, Homo sapiens
  misc_RNA (1)...(19): siRNA sense strand
ugagucugaugggaguaua

SEQ ID NO: 1510875 - RNA, 19 nt, Homo sapiens
  misc_RNA (1)...(19): siRNA sense strand
ucuucaaaguguacaguga

SEQ ID NO: 1510876 - RNA, 19 nt, Homo sapiens
  misc_RNA (1)...(19): siRNA sense strand
gcuauggccguuugaccuu

SEQ ID NO: 1510877 - RNA, 19 nt, Homo sapiens
  misc_RNA (1)...(19): siRNA sense strand
ggcugaagaaucuaaauca

SEQ ID NO: 1510878 - RNA, 19 nt, Homo sapiens
  misc_RNA (1)...(19): siRNA sense strand
gcuggaggagugacaguau

SEQ ID NO: 1510879 - RNA, 19 nt, Homo sapiens
  misc_RNA (1)...(19): siRNA sense strand
gaggucgacugugacauac

SEQ ID NO: 1510880 - RNA, 19 nt, Homo sapiens
  misc_RNA (1)...(19): siRNA sense strand
aggacaaguuggugaagga

SEQ ID NO: 1510881 - RNA, 19 nt, Homo sapiens
  misc_RNA (1)...(19): siRNA sense strand
caucaagcccugcaaccau

SEQ ID NO: 1510882 - RNA, 19 nt, Homo sapiens
  misc_RNA (1)...(19): siRNA sense strand
cugaagaaucuaaaucaug

SEQ ID NO: 1510883 - RNA, 19 nt, Homo sapiens
  misc_RNA (1)...(19): siRNA sense strand
gaacaagacaauucaguaa

SEQ ID NO: 1510884 - RNA, 19 nt, Homo sapiens
  misc_RNA (1)...(19): siRNA sense strand
gcgcagagcucccuaacug

SEQ ID NO: 1510885 - RNA, 19 nt, Homo sapiens
  misc_RNA (1)...(19): siRNA sense strand
ccaaagaccugcuguucug

SEQ ID NO: 1510886 - RNA, 19 nt, Homo sapiens
  misc_RNA (1)...(19): siRNA sense strand
gagcgugauuuccaaguuu

SEQ ID NO: 1510887 - RNA, 19 nt, Homo sapiens
  misc_RNA (1)...(19): siRNA sense strand
gcacagcaguaguaguguu

SEQ ID NO: 1510888 - RNA, 19 nt, Homo sapiens
  misc_RNA (1)...(19): siRNA sense strand
cagagaacauggccaauca

SEQ ID NO: 1510889 - RNA, 19 nt, Homo sapiens
  misc_RNA (1)...(19): siRNA sense strand
gagcacagcaguaguagug

SEQ ID NO: 1510890 - RNA, 19 nt, Homo sapiens
  misc_RNA (1)...(19): siRNA sense strand
ucacagagcacgaugucua

SEQ ID NO: 1510891 - RNA, 19 nt, Homo sapiens
  misc_RNA (1)...(19): siRNA sense strand
ggagcgugauuuccaaguu

SEQ ID NO: 1510892 - RNA, 19 nt, Homo sapiens
  misc_RNA (1)...(19): siRNA sense strand
gcaccacgcuaccaugaag

SEQ ID NO: 1510893 - RNA, 19 nt, Homo sapiens
  misc_RNA (1)...(19): siRNA sense strand
ccucuuggcucuagugaug

SEQ ID NO: 1510894 - RNA, 19 nt, Homo sapiens
  misc_RNA (1)...(19): siRNA sense strand
gccguggucuucauauuug

SEQ ID NO: 1510895 - RNA, 19 nt, Homo sapiens
  misc_RNA (1)...(19): siRNA sense strand
acaagacaauucaguaaca

SEQ ID NO: 1510896 - RNA, 19 nt, Homo sapiens
  misc_RNA (1)...(19): siRNA sense strand
guaccuccgugcuggcaaa

SEQ ID NO: 1510897 - RNA, 19 nt, Homo sapiens
  misc_RNA (1)...(19): siRNA sense strand
caaucagggucgacgagaa

SEQ ID NO: 1510898 - RNA, 19 nt, Homo sapiens
  misc_RNA (1)...(19): siRNA sense strand
gaucuugaccaugacagua

SEQ ID NO: 1510899 - RNA, 19 nt, Homo sapiens
  misc_RNA (1)...(19): siRNA sense strand
gcagagaacauggccaauc

SEQ ID NO: 1510900 - RNA, 19 nt, Homo sapiens
  misc_RNA (1)...(19): siRNA sense strand
caagacaauucaguaacau

SEQ ID NO: 1510901 - RNA, 19 nt, Homo sapiens
  misc_RNA (1)...(19): siRNA sense strand
cuucaaaugucccuucaag

SEQ ID NO: 1510902 - RNA, 19 nt, Homo sapiens
  misc_RNA (1)...(19): siRNA sense strand
gcuuugggcuccaguucug

SEQ ID NO: 1510903 - RNA, 19 nt, Homo sapiens
  misc_RNA (1)...(19): siRNA sense strand
guaccaguuugaggucuug

SEQ ID NO: 1510904 - RNA, 19 nt, Homo sapiens
  misc_RNA (1)...(19): siRNA sense strand
gaucacagagcacgauguc

SEQ ID NO: 1510905 - RNA, 19 nt, Homo sapiens
  misc_RNA (1)...(19): siRNA sense strand
gacaauucaguaacaucua

SEQ ID NO: 1510906 - RNA, 19 nt, Homo sapiens
  misc_RNA (1)...(19): siRNA sense strand
gaugucuacccuucaaaug

SEQ ID NO: 1510907 - RNA, 19 nt, Homo sapiens
  misc_RNA (1)...(19): siRNA sense strand
ugucuacccuucaaauguc

SEQ ID NO: 1510908 - RNA, 19 nt, Homo sapiens
  misc_RNA (1)...(19): siRNA sense strand
agcgugauuuccaaguuua

SEQ ID NO: 1510909 - RNA, 19 nt, Homo sapiens
  misc_RNA (1)...(19): siRNA sense strand
cacgaugucuacccuucaa

SEQ ID NO: 1510910 - RNA, 19 nt, Homo sapiens
  misc_RNA (1)...(19): siRNA sense strand
cagcucccgaucucaguua

SEQ ID NO: 1510911 - RNA, 19 nt, Homo sapiens
  misc_RNA (1)...(19): siRNA sense strand
guaguaguguuggugaucu

SEQ ID NO: 1510912 - RNA, 19 nt, Homo sapiens
  misc_RNA (1)...(19): siRNA sense strand
cagggagcgugauuuccaa

SEQ ID NO: 1510913 - RNA, 19 nt, Homo sapiens
  misc_RNA (1)...(19): siRNA sense strand
gcacgaugucuacccuuca

SEQ ID NO: 1510914 - RNA, 19 nt, Homo sapiens
  misc_RNA (1)...(19): siRNA sense strand
cuaacugccuagacgacuu

SEQ ID NO: 1510915 - RNA, 19 nt, Homo sapiens
  misc_RNA (1)...(19): siRNA sense strand
acggcuaccugugcaagua

SEQ ID NO: 1510916 - RNA, 19 nt, Homo sapiens
  misc_RNA (1)...(19): siRNA sense strand
uaacugccuagacgacuug

SEQ ID NO: 1510917 - RNA, 19 nt, Homo sapiens
  misc_RNA (1)...(19): siRNA sense strand
caaacucucgggcgaugug

SEQ ID NO: 1510918 - RNA, 19 nt, Homo sapiens
  misc_RNA (1)...(19): siRNA sense strand
ugccguggucuucauauuu

SEQ ID NO: 1510919 - RNA, 19 nt, Homo sapiens
  misc_RNA (1)...(19): siRNA sense strand
gacgagaagcugggagaga

SEQ ID NO: 1510920 - RNA, 19 nt, Homo sapiens
  misc_RNA (1)...(19): siRNA sense strand
ccaaggaaggagucuaugg

SEQ ID NO: 1510921 - RNA, 19 nt, Homo sapiens
  misc_RNA (1)...(19): siRNA sense strand
gccucuaacuugagcuauc

SEQ ID NO: 1510922 - RNA, 19 nt, Homo sapiens
  misc_RNA (1)...(19): siRNA sense strand
gagucaaaggccacuauca

SEQ ID NO: 1510923 - RNA, 19 nt, Homo sapiens
  misc_RNA (1)...(19): siRNA sense strand
gggcuccaguucugcacau

SEQ ID NO: 1510924 - RNA, 19 nt, Homo sapiens
  misc_RNA (1)...(19): siRNA sense strand
gcgcagccuucuagauuua

SEQ ID NO: 1510925 - RNA, 19 nt, Homo sapiens
  misc_RNA (1)...(19): siRNA sense strand
gugcgcagccuucuagauu

SEQ ID NO: 1510926 - RNA, 19 nt, Homo sapiens
  misc_RNA (1)...(19): siRNA sense strand
ccacgcaggucaagaucug

SEQ ID NO: 1510927 - RNA, 19 nt, Homo sapiens
  misc_RNA (1)...(19): siRNA sense strand
ccagaaucaucgcuacaag

SEQ ID NO: 1510928 - RNA, 19 nt, Homo sapiens
  misc_RNA (1)...(19): siRNA sense strand
cgcagacgcuggaguugga

SEQ ID NO: 1510929 - RNA, 19 nt, Homo sapiens
  misc_RNA (1)...(19): siRNA sense strand
ugcgcagccuucuagauuu

SEQ ID NO: 1510930 - RNA, 19 nt, Homo sapiens
  misc_RNA (1)...(19): siRNA sense strand
gcccuggucuccuggaacu

SEQ ID NO: 1510931 - RNA, 19 nt, Homo sapiens
  misc_RNA (1)...(19): siRNA sense strand
ggcgggugcuauucuccaa

SEQ ID NO: 1510932 - RNA, 19 nt, Homo sapiens
  misc_RNA (1)...(19): siRNA sense strand
gaaauugucuccacaggaa

SEQ ID NO: 1510933 - RNA, 19 nt, Homo sapiens
  misc_RNA (1)...(19): siRNA sense strand
gaaacgaaacuauuacuga

SEQ ID NO: 1510934 - RNA, 19 nt, Homo sapiens
  misc_RNA (1)...(19): siRNA sense strand
caaacaaacugaaacacuu

SEQ ID NO: 1510935 - RNA, 19 nt, Homo sapiens
  misc_RNA (1)...(19): siRNA sense strand
caaccuggcucucuggauu

SEQ ID NO: 1510936 - RNA, 19 nt, Homo sapiens
  misc_RNA (1)...(19): siRNA sense strand
gacugauucugacaucuua

SEQ ID NO: 1510937 - RNA, 19 nt, Homo sapiens
  misc_RNA (1)...(19): siRNA sense strand
ugaacugcauuucuuguuu

SEQ ID NO: 1510938 - RNA, 19 nt, Homo sapiens
  misc_RNA (1)...(19): siRNA sense strand
caaccacauugaccaguuu

SEQ ID NO: 1510939 - RNA, 19 nt, Homo sapiens
  misc_RNA (1)...(19): siRNA sense strand
agccacagcugaaugcuua

SEQ ID NO: 1510940 - RNA, 19 nt, Homo sapiens
  misc_RNA (1)...(19): siRNA sense strand
gaagggcuuucuccacaug

SEQ ID NO: 1510941 - RNA, 19 nt, Homo sapiens
  misc_RNA (1)...(19): siRNA sense strand
acaggaaacgaaacuauua

SEQ ID NO: 1510942 - RNA, 19 nt, Homo sapiens
  misc_RNA (1)...(19): siRNA sense strand
gaacgcucaugaucuuuua

SEQ ID NO: 1510943 - RNA, 19 nt, Homo sapiens
  misc_RNA (1)...(19): siRNA sense strand
gaacugcauuucuuguuuu

SEQ ID NO: 1510944 - RNA, 19 nt, Homo sapiens
  misc_RNA (1)...(19): siRNA sense strand
gaagauucucuguaucaaa

SEQ ID NO: 1510945 - RNA, 19 nt, Homo sapiens
  misc_RNA (1)...(19): siRNA sense strand
ggaagauucucuguaucaa

SEQ ID NO: 1510946 - RNA, 19 nt, Homo sapiens
  misc_RNA (1)...(19): siRNA sense strand
cacaaacccauguauauuu

SEQ ID NO: 1510947 - RNA, 19 nt, Homo sapiens
  misc_RNA (1)...(19): siRNA sense strand
gcaagaagcaacuaucucu

SEQ ID NO: 1510948 - RNA, 19 nt, Homo sapiens
  misc_RNA (1)...(19): siRNA sense strand
ccacaaacccauguauauu

SEQ ID NO: 1510949 - RNA, 19 nt, Homo sapiens
  misc_RNA (1)...(19): siRNA sense strand
uagggaauaugcugauuau

SEQ ID NO: 1510950 - RNA, 19 nt, Homo sapiens
  misc_RNA (1)...(19): siRNA sense strand
ccugugaucuauaccauga

SEQ ID NO: 1510951 - RNA, 19 nt, Homo sapiens
  misc_RNA (1)...(19): siRNA sense strand
ugacaucccugaacugcau

SEQ ID NO: 1510952 - RNA, 19 nt, Homo sapiens
  misc_RNA (1)...(19): siRNA sense strand
uguauucacugcugucuau

SEQ ID NO: 1510953 - RNA, 19 nt, Homo sapiens
  misc_RNA (1)...(19): siRNA sense strand
ggugacaacucucauucug

SEQ ID NO: 1510954 - RNA, 19 nt, Homo sapiens
  misc_RNA (1)...(19): siRNA sense strand
ggacugauucugacaucuu

SEQ ID NO: 1510955 - RNA, 19 nt, Homo sapiens
  misc_RNA (1)...(19): siRNA sense strand
aaacugaaacacuugauug

SEQ ID NO: 1510956 - RNA, 19 nt, Homo sapiens
  misc_RNA (1)...(19): siRNA sense strand
ggaacaaggaggugcauca

SEQ ID NO: 1510957 - RNA, 19 nt, Homo sapiens
  misc_RNA (1)...(19): siRNA sense strand
aaucuguccuuccuggaua

SEQ ID NO: 1510958 - RNA, 19 nt, Homo sapiens
  misc_RNA (1)...(19): siRNA sense strand
ccaaccacauugaccaguu

SEQ ID NO: 1510959 - RNA, 19 nt, Homo sapiens
  misc_RNA (1)...(19): siRNA sense strand
ugugguagauggacugguu

SEQ ID NO: 1510960 - RNA, 19 nt, Homo sapiens
  misc_RNA (1)...(19): siRNA sense strand
ccacaggaaacgaaacuau

SEQ ID NO: 1510961 - RNA, 19 nt, Homo sapiens
  misc_RNA (1)...(19): siRNA sense strand
caacucucauucugucugu

SEQ ID NO: 1510962 - RNA, 19 nt, Homo sapiens
  misc_RNA (1)...(19): siRNA sense strand
gacaucuuaugccagaauu

SEQ ID NO: 1510963 - RNA, 19 nt, Homo sapiens
  misc_RNA (1)...(19): siRNA sense strand
caaacugaaacacuugauu

SEQ ID NO: 1510964 - RNA, 19 nt, Homo sapiens
  misc_RNA (1)...(19): siRNA sense strand
ucaauccugugaucuauac

SEQ ID NO: 1510965 - RNA, 19 nt, Homo sapiens
  misc_RNA (1)...(19): siRNA sense strand
guagugaccacauucuaug

SEQ ID NO: 1510966 - RNA, 19 nt, Homo sapiens
  misc_RNA (1)...(19): siRNA sense strand
ggaaacgaaacuauuacug

SEQ ID NO: 1510967 - RNA, 19 nt, Homo sapiens
  misc_RNA (1)...(19): siRNA sense strand
aaacaaacugaaacacuug

SEQ ID NO: 1510968 - RNA, 19 nt, Homo sapiens
  misc_RNA (1)...(19): siRNA sense strand
ucacugcugucuaugucuu

SEQ ID NO: 1510969 - RNA, 19 nt, Homo sapiens
  misc_RNA (1)...(19): siRNA sense strand
cagaguggcucaggugaca

SEQ ID NO: 1510970 - RNA, 19 nt, Homo sapiens
  misc_RNA (1)...(19): siRNA sense strand
uacugugacuuuaugcuuu

SEQ ID NO: 1510971 - RNA, 19 nt, Homo sapiens
  misc_RNA (1)...(19): siRNA sense strand
gucuaugucuucaucauca

SEQ ID NO: 1510972 - RNA, 19 nt, Homo sapiens
  misc_RNA (1)...(19): siRNA sense strand
ucccugaacugcauuucuu

SEQ ID NO: 1510973 - RNA, 19 nt, Homo sapiens
  misc_RNA (1)...(19): siRNA sense strand
uagcuguagugaccacauu

SEQ ID NO: 1510974 - RNA, 19 nt, Homo sapiens
  misc_RNA (1)...(19): siRNA sense strand
aagauucucuguaucaaac

SEQ ID NO: 1510975 - RNA, 19 nt, Homo sapiens
  misc_RNA (1)...(19): siRNA sense strand
cggaagauucucuguauca

SEQ ID NO: 1510976 - RNA, 19 nt, Homo sapiens
  misc_RNA (1)...(19): siRNA sense strand
gugaccacauucuauggaa

SEQ ID NO: 1510977 - RNA, 19 nt, Homo sapiens
  misc_RNA (1)...(19): siRNA sense strand
gaaucuguccuuccuggau

SEQ ID NO: 1510978 - RNA, 19 nt, Homo sapiens
  misc_RNA (1)...(19): siRNA sense strand
ccacuacccacuccugaug

SEQ ID NO: 1510979 - RNA, 19 nt, Homo sapiens
  misc_RNA (1)...(19): siRNA sense strand
cacaggaaacgaaacuauu

SEQ ID NO: 1510980 - RNA, 19 nt, Homo sapiens
  misc_RNA (1)...(19): siRNA sense strand
gauucucuguaucaaacaa

SEQ ID NO: 1510981 - RNA, 19 nt, Homo sapiens
  misc_RNA (1)...(19): siRNA sense strand
auagggaauaugcugauua

SEQ ID NO: 1510982 - RNA, 19 nt, Homo sapiens
  misc_RNA (1)...(19): siRNA sense strand
uucggaagauucucuguau

SEQ ID NO: 1510983 - RNA, 19 nt, Homo sapiens
  misc_RNA (1)...(19): siRNA sense strand
cuacaccuccgcagugaug

SEQ ID NO: 1510984 - RNA, 19 nt, Homo sapiens
  misc_RNA (1)...(19): siRNA sense strand
cuucaauccugugaucuau

SEQ ID NO: 1510985 - RNA, 19 nt, Homo sapiens
  misc_RNA (1)...(19): siRNA sense strand
auggaacgcucaugaucuu

SEQ ID NO: 1510986 - RNA, 19 nt, Homo sapiens
  misc_RNA (1)...(19): siRNA sense strand
cuccuuggcuucuaugaca

SEQ ID NO: 1510987 - RNA, 19 nt, Homo sapiens
  misc_RNA (1)...(19): siRNA sense strand
gcucaggugacaacucuca

SEQ ID NO: 1510988 - RNA, 19 nt, Homo sapiens
  misc_RNA (1)...(19): siRNA sense strand
uccacaaacccauguauau

SEQ ID NO: 1510989 - RNA, 19 nt, Homo sapiens
  misc_RNA (1)...(19): siRNA sense strand
ucaaacaaacugaaacacu

SEQ ID NO: 1510990 - RNA, 19 nt, Homo sapiens
  misc_RNA (1)...(19): siRNA sense strand
gaacaaggaggugcaucag

SEQ ID NO: 1510991 - RNA, 19 nt, Homo sapiens
  misc_RNA (1)...(19): siRNA sense strand
ucucuucaauccugugauc

SEQ ID NO: 1510992 - RNA, 19 nt, Homo sapiens
  misc_RNA (1)...(19): siRNA sense strand
ucuguguucugccucacua

SEQ ID NO: 1510993 - RNA, 19 nt, Homo sapiens
  misc_RNA (1)...(19): siRNA sense strand
cacaugcuccucccaccua

SEQ ID NO: 1510994 - RNA, 19 nt, Homo sapiens
  misc_RNA (1)...(19): siRNA sense strand
aagaagcaacuaucucugu

SEQ ID NO: 1510995 - RNA, 19 nt, Homo sapiens
  misc_RNA (1)...(19): siRNA sense strand
ggucaccccucucuucaau

SEQ ID NO: 1510996 - RNA, 19 nt, Homo sapiens
  misc_RNA (1)...(19): siRNA sense strand
caucuuaugccagaauugu

SEQ ID NO: 1510997 - RNA, 19 nt, Homo sapiens
  misc_RNA (1)...(19): siRNA sense strand
uggcucaggugacaacucu

SEQ ID NO: 1510998 - RNA, 19 nt, Homo sapiens
  misc_RNA (1)...(19): siRNA sense strand
ucuaugacaucccugaacu

SEQ ID NO: 1510999 - RNA, 19 nt, Homo sapiens
  misc_RNA (1)...(19): siRNA sense strand
guugcuugcuccaguucuu

SEQ ID NO: 1511000 - RNA, 19 nt, Homo sapiens
  misc_RNA (1)...(19): siRNA sense strand
cucaugaucuuuuauguug

SEQ ID NO: 1511001 - RNA, 19 nt, Homo sapiens
  misc_RNA (1)...(19): siRNA sense strand
ccuccgcagugaugccaaa

SEQ ID NO: 1511002 - RNA, 19 nt, Homo sapiens
  misc_RNA (1)...(19): siRNA sense strand
ucuauaccaugaggaacaa

SEQ ID NO: 1511003 - RNA, 19 nt, Homo sapiens
  misc_RNA (1)...(19): siRNA sense strand
ggaacgcucaugaucuuuu

SEQ ID NO: 1511004 - RNA, 19 nt, Homo sapiens
  misc_RNA (1)...(19): siRNA sense strand
ucaggugacaacucucauu

SEQ ID NO: 1511005 - RNA, 19 nt, Homo sapiens
  misc_RNA (1)...(19): siRNA sense strand
gcucucuggauuuguggua

SEQ ID NO: 1511006 - RNA, 19 nt, Homo sapiens
  misc_RNA (1)...(19): siRNA sense strand
gaccgcuaccuggcaauuu

SEQ ID NO: 1511007 - RNA, 19 nt, Homo sapiens
  misc_RNA (1)...(19): siRNA sense strand
ggagggcuuccugcaagaa

SEQ ID NO: 1511008 - RNA, 19 nt, Homo sapiens
  misc_RNA (1)...(19): siRNA sense strand
uguagugaccacauucuau

SEQ ID NO: 1511009 - RNA, 19 nt, Homo sapiens
  misc_RNA (1)...(19): siRNA sense strand
ugacaucuuaugccagaau

SEQ ID NO: 1511010 - RNA, 19 nt, Homo sapiens
  misc_RNA (1)...(19): siRNA sense strand
accgcuaccuggcaauuug

SEQ ID NO: 1511011 - RNA, 19 nt, Homo sapiens
  misc_RNA (1)...(19): siRNA sense strand
ggucacaaccuggcucucu

SEQ ID NO: 1511012 - RNA, 19 nt, Homo sapiens
  misc_RNA (1)...(19): siRNA sense strand
gcuggagggcuuccugcaa

SEQ ID NO: 1511013 - RNA, 19 nt, Homo sapiens
  misc_RNA (1)...(19): siRNA sense strand
caggugacaacucucauuc

SEQ ID NO: 1511014 - RNA, 19 nt, Homo sapiens
  misc_RNA (1)...(19): siRNA sense strand
gcucuaagaucuucuauuu

SEQ ID NO: 1511015 - RNA, 19 nt, Homo sapiens
  misc_RNA (1)...(19): siRNA sense strand
ggaaagcucuaagaucuuc

SEQ ID NO: 1511016 - RNA, 19 nt, Homo sapiens
  misc_RNA (1)...(19): siRNA sense strand
cgagaaagccuacaucuuc

SEQ ID NO: 1511017 - RNA, 19 nt, Homo sapiens
  misc_RNA (1)...(19): siRNA sense strand
gagaaagccuacaucuuca

SEQ ID NO: 1511018 - RNA, 19 nt, Homo sapiens
  misc_RNA (1)...(19): siRNA sense strand
ccagagaaccaaacagaaa

SEQ ID NO: 1511019 - RNA, 19 nt, Homo sapiens
  misc_RNA (1)...(19): siRNA sense strand
ccuggaggcuuaugugaaa

SEQ ID NO: 1511020 - RNA, 19 nt, Homo sapiens
  misc_RNA (1)...(19): siRNA sense strand
gagagaagauugucauucc

SEQ ID NO: 1511021 - RNA, 19 nt, Homo sapiens
  misc_RNA (1)...(19): siRNA sense strand
gcugagcucucgccucuuc

SEQ ID NO: 1511022 - RNA, 19 nt, Homo sapiens
  misc_RNA (1)...(19): siRNA sense strand
gaagaagaccugggccaaa

SEQ ID NO: 1511023 - RNA, 19 nt, Homo sapiens
  misc_RNA (1)...(19): siRNA sense strand
gcagagggcccaggugauu

SEQ ID NO: 1511024 - RNA, 19 nt, Homo sapiens
  misc_RNA (1)...(19): siRNA sense strand
caauggacacgucaacuuu

SEQ ID NO: 1511025 - RNA, 19 nt, Homo sapiens
  misc_RNA (1)...(19): siRNA sense strand
caucgggccugaggaguuu

SEQ ID NO: 1511026 - RNA, 19 nt, Homo sapiens
  misc_RNA (1)...(19): siRNA sense strand
ugaggauggucuuuauuug

SEQ ID NO: 1511027 - RNA, 19 nt, Homo sapiens
  misc_RNA (1)...(19): siRNA sense strand
gugaggauggucuuuauuu

SEQ ID NO: 1511028 - RNA, 19 nt, Homo sapiens
  misc_RNA (1)...(19): siRNA sense strand
caucaaagacaucuacuuc

SEQ ID NO: 1511029 - RNA, 19 nt, Homo sapiens
  misc_RNA (1)...(19): siRNA sense strand
gaaagugagagcccagaga

SEQ ID NO: 1511030 - RNA, 19 nt, Homo sapiens
  misc_RNA (1)...(19): siRNA sense strand
gggaauuucugcaacuaca

SEQ ID NO: 1511031 - RNA, 19 nt, Homo sapiens
  misc_RNA (1)...(19): siRNA sense strand
gucuuuauuuggcuucuua

SEQ ID NO: 1511032 - RNA, 19 nt, Homo sapiens
  misc_RNA (1)...(19): siRNA sense strand
agaagauugucauuccuuu

SEQ ID NO: 1511033 - RNA, 19 nt, Homo sapiens
  misc_RNA (1)...(19): siRNA sense strand
gggcccaggugauugaguu

SEQ ID NO: 1511034 - RNA, 19 nt, Homo sapiens
  misc_RNA (1)...(19): siRNA sense strand
gagcaagacgccagcauca

SEQ ID NO: 1511035 - RNA, 19 nt, Homo sapiens
  misc_RNA (1)...(19): siRNA sense strand
caacuucaacucccucaug

SEQ ID NO: 1511036 - RNA, 19 nt, Homo sapiens
  misc_RNA (1)...(19): siRNA sense strand
gaaagauggaaagcucuaa

SEQ ID NO: 1511037 - RNA, 19 nt, Homo sapiens
  misc_RNA (1)...(19): siRNA sense strand
gacaucuacuuccugaaug

SEQ ID NO: 1511038 - RNA, 19 nt, Homo sapiens
  misc_RNA (1)...(19): siRNA sense strand
gagaagauugucauuccuu

SEQ ID NO: 1511039 - RNA, 19 nt, Homo sapiens
  misc_RNA (1)...(19): siRNA sense strand
cagugaggauggucuuuau

SEQ ID NO: 1511040 - RNA, 19 nt, Homo sapiens
  misc_RNA (1)...(19): siRNA sense strand
aggcuuaugugaaaugguu

SEQ ID NO: 1511041 - RNA, 19 nt, Homo sapiens
  misc_RNA (1)...(19): siRNA sense strand
gauugucauuccuuucuuc

SEQ ID NO: 1511042 - RNA, 19 nt, Homo sapiens
  misc_RNA (1)...(19): siRNA sense strand
gauggaaagcucuaagauc

SEQ ID NO: 1511043 - RNA, 19 nt, Homo sapiens
  misc_RNA (1)...(19): siRNA sense strand
gcccagagaaccaaacaga

SEQ ID NO: 1511044 - RNA, 19 nt, Homo sapiens
  misc_RNA (1)...(19): siRNA sense strand
ucaaagacaucuacuuccu

SEQ ID NO: 1511045 - RNA, 19 nt, Homo sapiens
  misc_RNA (1)...(19): siRNA sense strand
gggaguucaucaccuggaa

SEQ ID NO: 1511046 - RNA, 19 nt, Homo sapiens
  misc_RNA (1)...(19): siRNA sense strand
ccaauggacacgucaacuu

SEQ ID NO: 1511047 - RNA, 19 nt, Homo sapiens
  misc_RNA (1)...(19): siRNA sense strand
auggaaagcucuaagaucu

SEQ ID NO: 1511048 - RNA, 19 nt, Homo sapiens
  misc_RNA (1)...(19): siRNA sense strand
ucagugaggauggucuuua

SEQ ID NO: 1511049 - RNA, 19 nt, Homo sapiens
  misc_RNA (1)...(19): siRNA sense strand
ccgacaagcccaucuccua

SEQ ID NO: 1511050 - RNA, 19 nt, Homo sapiens
  misc_RNA (1)...(19): siRNA sense strand
gaagauugucauuccuuuc

SEQ ID NO: 1511051 - RNA, 19 nt, Homo sapiens
  misc_RNA (1)...(19): siRNA sense strand
gcagcugacccacguggaa

SEQ ID NO: 1511052 - RNA, 19 nt, Homo sapiens
  misc_RNA (1)...(19): siRNA sense strand
gacgaggcauaccggaaga

SEQ ID NO: 1511053 - RNA, 19 nt, Homo sapiens
  misc_RNA (1)...(19): siRNA sense strand
aaagugagagcccagagaa

SEQ ID NO: 1511054 - RNA, 19 nt, Homo sapiens
  misc_RNA (1)...(19): siRNA sense strand
acaucuacuuccugaauga

SEQ ID NO: 1511055 - RNA, 19 nt, Homo sapiens
  misc_RNA (1)...(19): siRNA sense strand
ucagccugcucaucaaaga

SEQ ID NO: 1511056 - RNA, 19 nt, Homo sapiens
  misc_RNA (1)...(19): siRNA sense strand
gaagaccugggccaaagug

SEQ ID NO: 1511057 - RNA, 19 nt, Homo sapiens
  misc_RNA (1)...(19): siRNA sense strand
gcucucgccucuucaucga

SEQ ID NO: 1511058 - RNA, 19 nt, Homo sapiens
  misc_RNA (1)...(19): siRNA sense strand
gaggauggucuuuauuugg

SEQ ID NO: 1511059 - RNA, 19 nt, Homo sapiens
  misc_RNA (1)...(19): siRNA sense strand
ccaaccgccuucccaaugg

SEQ ID NO: 1511060 - RNA, 19 nt, Homo sapiens
  misc_RNA (1)...(19): siRNA sense strand
aagaagaccugggccaaag

SEQ ID NO: 1511061 - RNA, 19 nt, Homo sapiens
  misc_RNA (1)...(19): siRNA sense strand
caacaucggcaacuucaac

SEQ ID NO: 1511062 - RNA, 19 nt, Homo sapiens
  misc_RNA (1)...(19): siRNA sense strand
ugauugaguucuucaucga

SEQ ID NO: 1511063 - RNA, 19 nt, Homo sapiens
  misc_RNA (1)...(19): siRNA sense strand
gcccacagauggcgaacag

SEQ ID NO: 1511064 - RNA, 19 nt, Homo sapiens
  misc_RNA (1)...(19): siRNA sense strand
agacaucuacuuccugaau

SEQ ID NO: 1511065 - RNA, 19 nt, Homo sapiens
  misc_RNA (1)...(19): siRNA sense strand
gcccacagccgacuacuac

SEQ ID NO: 1511066 - RNA, 19 nt, Homo sapiens
  misc_RNA (1)...(19): siRNA sense strand
gcugagugccuccgacaug

SEQ ID NO: 1511067 - RNA, 19 nt, Homo sapiens
  misc_RNA (1)...(19): siRNA sense strand
caaccgccuucccaaugga

SEQ ID NO: 1511068 - RNA, 19 nt, Homo sapiens
  misc_RNA (1)...(19): siRNA sense strand
gccaaccgccuucccaaug

SEQ ID NO: 1511069 - RNA, 19 nt, Homo sapiens
  misc_RNA (1)...(19): siRNA sense strand
gcuaccugguggcaacuga

SEQ ID NO: 1511070 - RNA, 19 nt, Homo sapiens
  misc_RNA (1)...(19): siRNA sense strand
guucaucaccuggaaacaa

SEQ ID NO: 1511071 - RNA, 19 nt, Homo sapiens
  misc_RNA (1)...(19): siRNA sense strand
ggagugucccuucgagcaa

SEQ ID NO: 1511072 - RNA, 19 nt, Homo sapiens
  misc_RNA (1)...(19): siRNA sense strand
acaagccggugcuggacaa

SEQ ID NO: 1511073 - RNA, 19 nt, Homo sapiens
  misc_RNA (1)...(19): siRNA sense strand
ucgacuaucgggcaccuua

SEQ ID NO: 1511074 - RNA, 19 nt, Homo sapiens
  misc_RNA (1)...(19): siRNA sense strand
aagccuacaucuucaccuu

SEQ ID NO: 1511075 - RNA, 19 nt, Homo sapiens
  misc_RNA (1)...(19): siRNA sense strand
gcaugccagccaagaagaa

SEQ ID NO: 1511076 - RNA, 19 nt, Homo sapiens
  misc_RNA (1)...(19): siRNA sense strand
caggaggagucgacuaucg

SEQ ID NO: 1511077 - RNA, 19 nt, Homo sapiens
  misc_RNA (1)...(19): siRNA sense strand
cgagagaagauugucauuc

SEQ ID NO: 1511078 - RNA, 19 nt, Homo sapiens
  misc_RNA (1)...(19): siRNA sense strand
agaaagauggaaagcucua

SEQ ID NO: 1511079 - RNA, 19 nt, Homo sapiens
  misc_RNA (1)...(19): siRNA sense strand
gcaucacccacuaccugua

SEQ ID NO: 1511080 - RNA, 19 nt, Homo sapiens
  misc_RNA (1)...(19): siRNA sense strand
guccaggccuuugugaaca

SEQ ID NO: 1511081 - RNA, 19 nt, Homo sapiens
  misc_RNA (1)...(19): siRNA sense strand
ggaguucaucaccuggaaa

SEQ ID NO: 1511082 - RNA, 19 nt, Homo sapiens
  misc_RNA (1)...(19): siRNA sense strand
gcucaucaaagacaucuac

SEQ ID NO: 1511083 - RNA, 19 nt, Homo sapiens
  misc_RNA (1)...(19): siRNA sense strand
ccacagcagccgagagaag

SEQ ID NO: 1511084 - RNA, 19 nt, Homo sapiens
  misc_RNA (1)...(19): siRNA sense strand
caaccuggaggcuuaugug

SEQ ID NO: 1511085 - RNA, 19 nt, Homo sapiens
  misc_RNA (1)...(19): siRNA sense strand
ccaggugauugaguucuuc

SEQ ID NO: 1511086 - RNA, 19 nt, Homo sapiens
  misc_RNA (1)...(19): siRNA sense strand
gacaagcccaucuccuaca

SEQ ID NO: 1511087 - RNA, 19 nt, Homo sapiens
  misc_RNA (1)...(19): siRNA sense strand
ggaggcuuaugugaaaugg

SEQ ID NO: 1511088 - RNA, 19 nt, Homo sapiens
  misc_RNA (1)...(19): siRNA sense strand
ggaguuuguccaggccuuu

SEQ ID NO: 1511089 - RNA, 19 nt, Homo sapiens
  misc_RNA (1)...(19): siRNA sense strand
cagccucccuggaaacacu

SEQ ID NO: 1511090 - RNA, 19 nt, Homo sapiens
  misc_RNA (1)...(19): siRNA sense strand
ccgagaaagccuacaucuu

SEQ ID NO: 1511091 - RNA, 19 nt, Homo sapiens
  misc_RNA (1)...(19): siRNA sense strand
cgacuaucgggcaccuuaa

SEQ ID NO: 1511092 - RNA, 19 nt, Homo sapiens
  misc_RNA (1)...(19): siRNA sense strand
ucuccaggcugaagaagac

SEQ ID NO: 1511093 - RNA, 19 nt, Homo sapiens
  misc_RNA (1)...(19): siRNA sense strand
gcaaccuggaggcuuaugu

SEQ ID NO: 1511094 - RNA, 19 nt, Homo sapiens
  misc_RNA (1)...(19): siRNA sense strand
ccacagggagcuccuuggu

SEQ ID NO: 1511095 - RNA, 19 nt, Homo sapiens
  misc_RNA (1)...(19): siRNA sense strand
gcuucaacaucggcaacuu

SEQ ID NO: 1511096 - RNA, 19 nt, Homo sapiens
  misc_RNA (1)...(19): siRNA sense strand
gaacuuaaccaauguuuga

SEQ ID NO: 1511097 - RNA, 19 nt, Homo sapiens
  misc_RNA (1)...(19): siRNA sense strand
agacaaaccuuacaaaugu

SEQ ID NO: 1511098 - RNA, 19 nt, Homo sapiens
  misc_RNA (1)...(19): siRNA sense strand
ggaaagugauguuugagaa

SEQ ID NO: 1511099 - RNA, 19 nt, Homo sapiens
  misc_RNA (1)...(19): siRNA sense strand
ggagagaaauccuacaaau

SEQ ID NO: 1511100 - RNA, 19 nt, Homo sapiens
  misc_RNA (1)...(19): siRNA sense strand
ggagagaaauccuacaaau

SEQ ID NO: 1511101 - RNA, 19 nt, Homo sapiens
  misc_RNA (1)...(19): siRNA sense strand
uaaagaauguggcaaauca

SEQ ID NO: 1511102 - RNA, 19 nt, Homo sapiens
  misc_RNA (1)...(19): siRNA sense strand
gagaauaccuacaaaugug

SEQ ID NO: 1511103 - RNA, 19 nt, Homo sapiens
  misc_RNA (1)...(19): siRNA sense strand
ucucagagcuuauuaaaca

SEQ ID NO: 1511104 - RNA, 19 nt, Homo sapiens
  misc_RNA (1)...(19): siRNA sense strand
gagaaacccuucaaaugug

SEQ ID NO: 1511105 - RNA, 19 nt, Homo sapiens
  misc_RNA (1)...(19): siRNA sense strand
gagaaacccuucaaaugug

SEQ ID NO: 1511106 - RNA, 19 nt, Homo sapiens
  misc_RNA (1)...(19): siRNA sense strand
gcacaacggaauuuauaua

SEQ ID NO: 1511107 - RNA, 19 nt, Homo sapiens
  misc_RNA (1)...(19): siRNA sense strand
cuacaaaugugaagaaugu

SEQ ID NO: 1511108 - RNA, 19 nt, Homo sapiens
  misc_RNA (1)...(19): siRNA sense strand
cuacaaaugugaugaaugu

SEQ ID NO: 1511109 - RNA, 19 nt, Homo sapiens
  misc_RNA (1)...(19): siRNA sense strand
cuacaaaugugaagaaugu

SEQ ID NO: 1511110 - RNA, 19 nt, Homo sapiens
  misc_RNA (1)...(19): siRNA sense strand
cuacaaaugugaagaaugu

SEQ ID NO: 1511111 - RNA, 19 nt, Homo sapiens
  misc_RNA (1)...(19): siRNA sense strand
cuacaaaugugaagaaugu

SEQ ID NO: 1511112 - RNA, 19 nt, Homo sapiens
  misc_RNA (1)...(19): siRNA sense strand
caacggaauuuauauagga

SEQ ID NO: 1511113 - RNA, 19 nt, Homo sapiens
  misc_RNA (1)...(19): siRNA sense strand
gagagaaacccuacaaaug

SEQ ID NO: 1511114 - RNA, 19 nt, Homo sapiens
  misc_RNA (1)...(19): siRNA sense strand
gagagaaacccuacaaaug

SEQ ID NO: 1511115 - RNA, 19 nt, Homo sapiens
  misc_RNA (1)...(19): siRNA sense strand
gagagaaacccuacaaaug

SEQ ID NO: 1511116 - RNA, 19 nt, Homo sapiens
  misc_RNA (1)...(19): siRNA sense strand
gagagaaacccuacaaaug

SEQ ID NO: 1511117 - RNA, 19 nt, Homo sapiens
  misc_RNA (1)...(19): siRNA sense strand
gagagaaacccuucaaaug

SEQ ID NO: 1511118 - RNA, 19 nt, Homo sapiens
  misc_RNA (1)...(19): siRNA sense strand
gagaaacccuacaaaugug

SEQ ID NO: 1511119 - RNA, 19 nt, Homo sapiens
  misc_RNA (1)...(19): siRNA sense strand
gagaaacccuacaaaugug

SEQ ID NO: 1511120 - RNA, 19 nt, Homo sapiens
  misc_RNA (1)...(19): siRNA sense strand
gagaaacccuacaaaugug

SEQ ID NO: 1511121 - RNA, 19 nt, Homo sapiens
  misc_RNA (1)...(19): siRNA sense strand
gagaaacccuacaaaugug

SEQ ID NO: 1511122 - RNA, 19 nt, Homo sapiens
  misc_RNA (1)...(19): siRNA sense strand
gagacaaaccuuacaaaug

SEQ ID NO: 1511123 - RNA, 19 nt, Homo sapiens
  misc_RNA (1)...(19): siRNA sense strand
gagagaauaccuacaaaug

SEQ ID NO: 1511124 - RNA, 19 nt, Homo sapiens
  misc_RNA (1)...(19): siRNA sense strand
aaagagcccuggaauagga

SEQ ID NO: 1511125 - RNA, 19 nt, Homo sapiens
  misc_RNA (1)...(19): siRNA sense strand
auacaguccucaaaccuua

SEQ ID NO: 1511126 - RNA, 19 nt, Homo sapiens
  misc_RNA (1)...(19): siRNA sense strand
ccucaaaccuuacugaaca

SEQ ID NO: 1511127 - RNA, 19 nt, Homo sapiens
  misc_RNA (1)...(19): siRNA sense strand
ggagagaaacccuacaaau

SEQ ID NO: 1511128 - RNA, 19 nt, Homo sapiens
  misc_RNA (1)...(19): siRNA sense strand
uaagagaauucaugcuaga

SEQ ID NO: 1511129 - RNA, 19 nt, Homo sapiens
  misc_RNA (1)...(19): siRNA sense strand
uaagagaauucacacuaga

SEQ ID NO: 1511130 - RNA, 19 nt, Homo sapiens
  misc_RNA (1)...(19): siRNA sense strand
ggagagaaacccuacaaau

SEQ ID NO: 1511131 - RNA, 19 nt, Homo sapiens
  misc_RNA (1)...(19): siRNA sense strand
ggagagaaacccuacaaau

SEQ ID NO: 1511132 - RNA, 19 nt, Homo sapiens
  misc_RNA (1)...(19): siRNA sense strand
ggagagaaacccuucaaau

SEQ ID NO: 1511133 - RNA, 19 nt, Homo sapiens
  misc_RNA (1)...(19): siRNA sense strand
ccucaacccuuauuaaaca

SEQ ID NO: 1511134 - RNA, 19 nt, Homo sapiens
  misc_RNA (1)...(19): siRNA sense strand
ugaggaauguggcaaaguu

SEQ ID NO: 1511135 - RNA, 19 nt, Homo sapiens
  misc_RNA (1)...(19): siRNA sense strand
gaagagacaggagauggua

SEQ ID NO: 1511136 - RNA, 19 nt, Homo sapiens
  misc_RNA (1)...(19): siRNA sense strand
cuacaaaugugaagaaugc

SEQ ID NO: 1511137 - RNA, 19 nt, Homo sapiens
  misc_RNA (1)...(19): siRNA sense strand
gaauguggcaaaguucuua

SEQ ID NO: 1511138 - RNA, 19 nt, Homo sapiens
  misc_RNA (1)...(19): siRNA sense strand
gagagaauucuuacaaaug

SEQ ID NO: 1511139 - RNA, 19 nt, Homo sapiens
  misc_RNA (1)...(19): siRNA sense strand
cauaagagaauucaugcua

SEQ ID NO: 1511140 - RNA, 19 nt, Homo sapiens
  misc_RNA (1)...(19): siRNA sense strand
cauaagagaauucacacua

SEQ ID NO: 1511141 - RNA, 19 nt, Homo sapiens
  misc_RNA (1)...(19): siRNA sense strand
cuacaaaugugaggaaugu

SEQ ID NO: 1511142 - RNA, 19 nt, Homo sapiens
  misc_RNA (1)...(19): siRNA sense strand
gaaaagagcccuggaauag

SEQ ID NO: 1511143 - RNA, 19 nt, Homo sapiens
  misc_RNA (1)...(19): siRNA sense strand
gagaaauccuacaaaugug

SEQ ID NO: 1511144 - RNA, 19 nt, Homo sapiens
  misc_RNA (1)...(19): siRNA sense strand
agagaaauccuacaaaugu

SEQ ID NO: 1511145 - RNA, 19 nt, Homo sapiens
  misc_RNA (1)...(19): siRNA sense strand
gagaaauccuacaaaugug

SEQ ID NO: 1511146 - RNA, 19 nt, Homo sapiens
  misc_RNA (1)...(19): siRNA sense strand
agagaaauccuacaaaugu

SEQ ID NO: 1511147 - RNA, 19 nt, Homo sapiens
  misc_RNA (1)...(19): siRNA sense strand
agucuaagguguucaaaga

SEQ ID NO: 1511148 - RNA, 19 nt, Homo sapiens
  misc_RNA (1)...(19): siRNA sense strand
gagcauagcauaaaagauu

SEQ ID NO: 1511149 - RNA, 19 nt, Homo sapiens
  misc_RNA (1)...(19): siRNA sense strand
gaaaagaaauacuggaaag

SEQ ID NO: 1511150 - RNA, 19 nt, Homo sapiens
  misc_RNA (1)...(19): siRNA sense strand
ucacaucuaacacaacaua

SEQ ID NO: 1511151 - RNA, 19 nt, Homo sapiens
  misc_RNA (1)...(19): siRNA sense strand
gagagaaauccuacaaaug

SEQ ID NO: 1511152 - RNA, 19 nt, Homo sapiens
  misc_RNA (1)...(19): siRNA sense strand
gagagaaauccuacaaaug

SEQ ID NO: 1511153 - RNA, 19 nt, Homo sapiens
  misc_RNA (1)...(19): siRNA sense strand
gcaaaccuuacuagacaua

SEQ ID NO: 1511154 - RNA, 19 nt, Homo sapiens
  misc_RNA (1)...(19): siRNA sense strand
uuacaaaugugaggaaugu

SEQ ID NO: 1511155 - RNA, 19 nt, Homo sapiens
  misc_RNA (1)...(19): siRNA sense strand
agagaaacccuacaaaugu

SEQ ID NO: 1511156 - RNA, 19 nt, Homo sapiens
  misc_RNA (1)...(19): siRNA sense strand
uaacuggccugcaacucuu

SEQ ID NO: 1511157 - RNA, 19 nt, Homo sapiens
  misc_RNA (1)...(19): siRNA sense strand
agagaaacccuacaaaugu

SEQ ID NO: 1511158 - RNA, 19 nt, Homo sapiens
  misc_RNA (1)...(19): siRNA sense strand
agagaaacccuacaaaugu

SEQ ID NO: 1511159 - RNA, 19 nt, Homo sapiens
  misc_RNA (1)...(19): siRNA sense strand
agagaaacccuucaaaugu

SEQ ID NO: 1511160 - RNA, 19 nt, Homo sapiens
  misc_RNA (1)...(19): siRNA sense strand
ggagacaaaccuuacaaau

SEQ ID NO: 1511161 - RNA, 19 nt, Homo sapiens
  misc_RNA (1)...(19): siRNA sense strand
agagaaacccuucaaaugu

SEQ ID NO: 1511162 - RNA, 19 nt, Homo sapiens
  misc_RNA (1)...(19): siRNA sense strand
agagaaacccuacaaaugu

SEQ ID NO: 1511163 - RNA, 19 nt, Homo sapiens
  misc_RNA (1)...(19): siRNA sense strand
gaauucauaugggagagaa

SEQ ID NO: 1511164 - RNA, 19 nt, Homo sapiens
  misc_RNA (1)...(19): siRNA sense strand
gaagaaugcggcaaagcuu

SEQ ID NO: 1511165 - RNA, 19 nt, Homo sapiens
  misc_RNA (1)...(19): siRNA sense strand
gaaaugggaccacugacau

SEQ ID NO: 1511166 - RNA, 19 nt, Homo sapiens
  misc_RNA (1)...(19): siRNA sense strand
aaccaauccucaacccuua

SEQ ID NO: 1511167 - RNA, 19 nt, Homo sapiens
  misc_RNA (1)...(19): siRNA sense strand
auaggaaagugauguuuga

SEQ ID NO: 1511168 - RNA, 19 nt, Homo sapiens
  misc_RNA (1)...(19): siRNA sense strand
ggauguggccauagaauuc

SEQ ID NO: 1511169 - RNA, 19 nt, Homo sapiens
  misc_RNA (1)...(19): siRNA sense strand
gagaggauauggaaaaugu

SEQ ID NO: 1511170 - RNA, 19 nt, Homo sapiens
  misc_RNA (1)...(19): siRNA sense strand
ccucacaccuuacuagaca

SEQ ID NO: 1511171 - RNA, 19 nt, Homo sapiens
  misc_RNA (1)...(19): siRNA sense strand
acacuagagagaauucuua

SEQ ID NO: 1511172 - RNA, 19 nt, Homo sapiens
  misc_RNA (1)...(19): siRNA sense strand
aaugggugcuccagccuua

SEQ ID NO: 1511173 - RNA, 19 nt, Homo sapiens
  misc_RNA (1)...(19): siRNA sense strand
aaaccuuacugaacauaug

SEQ ID NO: 1511174 - RNA, 19 nt, Homo sapiens
  misc_RNA (1)...(19): siRNA sense strand
ggaaaagagcccuggaaua

SEQ ID NO: 1511175 - RNA, 19 nt, Homo sapiens
  misc_RNA (1)...(19): siRNA sense strand
uugcaaaccuuacuagaca

SEQ ID NO: 1511176 - RNA, 19 nt, Homo sapiens
  misc_RNA (1)...(19): siRNA sense strand
cauaagagaauucauacug

SEQ ID NO: 1511177 - RNA, 19 nt, Homo sapiens
  misc_RNA (1)...(19): siRNA sense strand
aagagaaacccuucaaaug

SEQ ID NO: 1511178 - RNA, 19 nt, Homo sapiens
  misc_RNA (1)...(19): siRNA sense strand
ggacaugagaauuuacaau

SEQ ID NO: 1511179 - RNA, 19 nt, Homo sapiens
  misc_RNA (1)...(19): siRNA sense strand
caacucuugcuaaucauaa

SEQ ID NO: 1511180 - RNA, 19 nt, Homo sapiens
  misc_RNA (1)...(19): siRNA sense strand
ugaugaauguggcaauguu

SEQ ID NO: 1511181 - RNA, 19 nt, Homo sapiens
  misc_RNA (1)...(19): siRNA sense strand
gcaaagcuuuuaaccaguu

SEQ ID NO: 1511182 - RNA, 19 nt, Homo sapiens
  misc_RNA (1)...(19): siRNA sense strand
agaaacccuucaaauguga

SEQ ID NO: 1511183 - RNA, 19 nt, Homo sapiens
  misc_RNA (1)...(19): siRNA sense strand
agaaacccuucaaauguga

SEQ ID NO: 1511184 - RNA, 19 nt, Homo sapiens
  misc_RNA (1)...(19): siRNA sense strand
ggccagagcauagcauaaa

SEQ ID NO: 1511185 - RNA, 19 nt, Homo sapiens
  misc_RNA (1)...(19): siRNA sense strand
uagagagaauaccuacaaa

SEQ ID NO: 1511186 - RNA, 19 nt, Homo sapiens
  misc_RNA (1)...(19): siRNA sense strand
cuagagagaauucuuacaa

SEQ ID NO: 1511187 - RNA, 19 nt, Homo sapiens
  misc_RNA (1)...(19): siRNA sense strand
cgacauaagagaauucaca

SEQ ID NO: 1511188 - RNA, 19 nt, Homo sapiens
  misc_RNA (1)...(19): siRNA sense strand
gccuuuaacugguuugcaa

SEQ ID NO: 1511189 - RNA, 19 nt, Homo sapiens
  misc_RNA (1)...(19): siRNA sense strand
ugaagaauguggcaaagcu

SEQ ID NO: 1511190 - RNA, 19 nt, Homo sapiens
  misc_RNA (1)...(19): siRNA sense strand
ugaagaauguggcaaagcu

SEQ ID NO: 1511191 - RNA, 19 nt, Homo sapiens
  misc_RNA (1)...(19): siRNA sense strand
gaaauccuacaaaugugaa

SEQ ID NO: 1511192 - RNA, 19 nt, Homo sapiens
  misc_RNA (1)...(19): siRNA sense strand
ugaagaauguggcaaagcu

SEQ ID NO: 1511193 - RNA, 19 nt, Homo sapiens
  misc_RNA (1)...(19): siRNA sense strand
gauaaccuguuuggagcaa

SEQ ID NO: 1511194 - RNA, 19 nt, Homo sapiens
  misc_RNA (1)...(19): siRNA sense strand
cuagagagaauaccuacaa

SEQ ID NO: 1511195 - RNA, 19 nt, Homo sapiens
  misc_RNA (1)...(19): siRNA sense strand
gaugaauguggcaauguuu

SEQ ID NO: 1511196 - RNA, 19 nt, Homo sapiens
  misc_RNA (1)...(19): siRNA sense strand
gaaggaaugucaccgaaga

SEQ ID NO: 1511197 - RNA, 19 nt, Homo sapiens
  misc_RNA (1)...(19): siRNA sense strand
cagcuccgcuuccugauua

SEQ ID NO: 1511198 - RNA, 19 nt, Homo sapiens
  misc_RNA (1)...(19): siRNA sense strand
ggaggagucugucaaggaa

SEQ ID NO: 1511199 - RNA, 19 nt, Homo sapiens
  misc_RNA (1)...(19): siRNA sense strand
ccgaagaccugguuccuau

SEQ ID NO: 1511200 - RNA, 19 nt, Homo sapiens
  misc_RNA (1)...(19): siRNA sense strand
gagcgcagccuguggguuu

SEQ ID NO: 1511201 - RNA, 19 nt, Homo sapiens
  misc_RNA (1)...(19): siRNA sense strand
gagccuaacugugucagaa

SEQ ID NO: 1511202 - RNA, 19 nt, Homo sapiens
  misc_RNA (1)...(19): siRNA sense strand
agagguggcuaccggcuua

SEQ ID NO: 1511203 - RNA, 19 nt, Homo sapiens
  misc_RNA (1)...(19): siRNA sense strand
gaaguaugccuuuccuguu

SEQ ID NO: 1511204 - RNA, 19 nt, Homo sapiens
  misc_RNA (1)...(19): siRNA sense strand
ccacauccgugcccugguu

SEQ ID NO: 1511205 - RNA, 19 nt, Homo sapiens
  misc_RNA (1)...(19): siRNA sense strand
agaagucucuggccaagga

SEQ ID NO: 1511206 - RNA, 19 nt, Homo sapiens
  misc_RNA (1)...(19): siRNA sense strand
ucacacugcuccugaaagu

SEQ ID NO: 1511207 - RNA, 19 nt, Homo sapiens
  misc_RNA (1)...(19): siRNA sense strand
gagcaaaguuuucaacauc

SEQ ID NO: 1511208 - RNA, 19 nt, Homo sapiens
  misc_RNA (1)...(19): siRNA sense strand
ggcacgagcucuccagcaa

SEQ ID NO: 1511209 - RNA, 19 nt, Homo sapiens
  misc_RNA (1)...(19): siRNA sense strand
ggagagccucguccagaaa

SEQ ID NO: 1511210 - RNA, 19 nt, Homo sapiens
  misc_RNA (1)...(19): siRNA sense strand
aaguaugccuuuccuguug

SEQ ID NO: 1511211 - RNA, 19 nt, Homo sapiens
  misc_RNA (1)...(19): siRNA sense strand
guguggagcugguggugaa

SEQ ID NO: 1511212 - RNA, 19 nt, Homo sapiens
  misc_RNA (1)...(19): siRNA sense strand
cggcaucucguccuacuuu

SEQ ID NO: 1511213 - RNA, 19 nt, Homo sapiens
  misc_RNA (1)...(19): siRNA sense strand
gcaaaguuuucaacaucua

SEQ ID NO: 1511214 - RNA, 19 nt, Homo sapiens
  misc_RNA (1)...(19): siRNA sense strand
gaggcugaccggaugauug

SEQ ID NO: 1511215 - RNA, 19 nt, Homo sapiens
  misc_RNA (1)...(19): siRNA sense strand
cccaguaccugagaaccua

SEQ ID NO: 1511216 - RNA, 19 nt, Homo sapiens
  misc_RNA (1)...(19): siRNA sense strand
gcagcuccgcuuccugauu

SEQ ID NO: 1511217 - RNA, 19 nt, Homo sapiens
  misc_RNA (1)...(19): siRNA sense strand
aggguucucugcuucacua

SEQ ID NO: 1511218 - RNA, 19 nt, Homo sapiens
  misc_RNA (1)...(19): siRNA sense strand
aggagagccucguccagaa

SEQ ID NO: 1511219 - RNA, 19 nt, Homo sapiens
  misc_RNA (1)...(19): siRNA sense strand
ucucgaggguucucugcuu

SEQ ID NO: 1511220 - RNA, 19 nt, Homo sapiens
  misc_RNA (1)...(19): siRNA sense strand
guucucugcuucacuaacu

SEQ ID NO: 1511221 - RNA, 19 nt, Homo sapiens
  misc_RNA (1)...(19): siRNA sense strand
gacacuggccuucgucauc

SEQ ID NO: 1511222 - RNA, 19 nt, Homo sapiens
  misc_RNA (1)...(19): siRNA sense strand
cggcaggugagcaaaguuu

SEQ ID NO: 1511223 - RNA, 19 nt, Homo sapiens
  misc_RNA (1)...(19): siRNA sense strand
gaagauccagcugcucauc

SEQ ID NO: 1511224 - RNA, 19 nt, Homo sapiens
  misc_RNA (1)...(19): siRNA sense strand
guguggacguggcugaguu

SEQ ID NO: 1511225 - RNA, 19 nt, Homo sapiens
  misc_RNA (1)...(19): siRNA sense strand
gaagaccugguuccuaucg

SEQ ID NO: 1511226 - RNA, 19 nt, Homo sapiens
  misc_RNA (1)...(19): siRNA sense strand
aggagucugucaaggaaga

SEQ ID NO: 1511227 - RNA, 19 nt, Homo sapiens
  misc_RNA (1)...(19): siRNA sense strand
ccugcagccucagcucuaa

SEQ ID NO: 1511228 - RNA, 19 nt, Homo sapiens
  misc_RNA (1)...(19): siRNA sense strand
cuaacugugucagaaggaa

SEQ ID NO: 1511229 - RNA, 19 nt, Homo sapiens
  misc_RNA (1)...(19): siRNA sense strand
uggagcugguggugaacua

SEQ ID NO: 1511230 - RNA, 19 nt, Homo sapiens
  misc_RNA (1)...(19): siRNA sense strand
cacacggcaucucguccua

SEQ ID NO: 1511231 - RNA, 19 nt, Homo sapiens
  misc_RNA (1)...(19): siRNA sense strand
gcuuagcgaccucuguguu

SEQ ID NO: 1511232 - RNA, 19 nt, Homo sapiens
  misc_RNA (1)...(19): siRNA sense strand
aggcugaccggaugauuga

SEQ ID NO: 1511233 - RNA, 19 nt, Homo sapiens
  misc_RNA (1)...(19): siRNA sense strand
cuuagcgaccucuguguuu

SEQ ID NO: 1511234 - RNA, 19 nt, Homo sapiens
  misc_RNA (1)...(19): siRNA sense strand
uucacuaacucccgagaga

SEQ ID NO: 1511235 - RNA, 19 nt, Homo sapiens
  misc_RNA (1)...(19): siRNA sense strand
uuagcgaccucuguguuuc

SEQ ID NO: 1511236 - RNA, 19 nt, Homo sapiens
  misc_RNA (1)...(19): siRNA sense strand
uggaggagucugucaagga

SEQ ID NO: 1511237 - RNA, 19 nt, Homo sapiens
  misc_RNA (1)...(19): siRNA sense strand
gaacucccacaggcucuuc

SEQ ID NO: 1511238 - RNA, 19 nt, Homo sapiens
  misc_RNA (1)...(19): siRNA sense strand
caagaaaccuggaauuauu

SEQ ID NO: 1511239 - RNA, 19 nt, Homo sapiens
  misc_RNA (1)...(19): siRNA sense strand
gaaaugaguuccuucuaca

SEQ ID NO: 1511240 - RNA, 19 nt, Homo sapiens
  misc_RNA (1)...(19): siRNA sense strand
gaugcaauauaucgaguua

SEQ ID NO: 1511241 - RNA, 19 nt, Homo sapiens
  misc_RNA (1)...(19): siRNA sense strand
gaaccuauauccagacaca

SEQ ID NO: 1511242 - RNA, 19 nt, Homo sapiens
  misc_RNA (1)...(19): siRNA sense strand
gcacugaauugcuaaguca

SEQ ID NO: 1511243 - RNA, 19 nt, Homo sapiens
  misc_RNA (1)...(19): siRNA sense strand
gaaaagaggucuagaugug

SEQ ID NO: 1511244 - RNA, 19 nt, Homo sapiens
  misc_RNA (1)...(19): siRNA sense strand
cauugaagcuguugagaaa

SEQ ID NO: 1511245 - RNA, 19 nt, Homo sapiens
  misc_RNA (1)...(19): siRNA sense strand
gaagagaagcugaauuugg

SEQ ID NO: 1511246 - RNA, 19 nt, Homo sapiens
  misc_RNA (1)...(19): siRNA sense strand
aagagaagcugaauuugga

SEQ ID NO: 1511247 - RNA, 19 nt, Homo sapiens
  misc_RNA (1)...(19): siRNA sense strand
caaagugugugaacgugaa

SEQ ID NO: 1511248 - RNA, 19 nt, Homo sapiens
  misc_RNA (1)...(19): siRNA sense strand
gacaacaacacaagaauug

SEQ ID NO: 1511249 - RNA, 19 nt, Homo sapiens
  misc_RNA (1)...(19): siRNA sense strand
gcaaacaauacagaaguua

SEQ ID NO: 1511250 - RNA, 19 nt, Homo sapiens
  misc_RNA (1)...(19): siRNA sense strand
gcucucaucugcacaaagu

SEQ ID NO: 1511251 - RNA, 19 nt, Homo sapiens
  misc_RNA (1)...(19): siRNA sense strand
aagaagagaagcugaauuu

SEQ ID NO: 1511252 - RNA, 19 nt, Homo sapiens
  misc_RNA (1)...(19): siRNA sense strand
gcucuucccuuacaguuuc

SEQ ID NO: 1511253 - RNA, 19 nt, Homo sapiens
  misc_RNA (1)...(19): siRNA sense strand
ggaaagaaacuaaggaaaa

SEQ ID NO: 1511254 - RNA, 19 nt, Homo sapiens
  misc_RNA (1)...(19): siRNA sense strand
ucacagugcuuccgauaca

SEQ ID NO: 1511255 - RNA, 19 nt, Homo sapiens
  misc_RNA (1)...(19): siRNA sense strand
ggauucaaguuguccauca

SEQ ID NO: 1511256 - RNA, 19 nt, Homo sapiens
  misc_RNA (1)...(19): siRNA sense strand
cacaagaauugaagcugua

SEQ ID NO: 1511257 - RNA, 19 nt, Homo sapiens
  misc_RNA (1)...(19): siRNA sense strand
ucacaacaguaucaggaaa

SEQ ID NO: 1511258 - RNA, 19 nt, Homo sapiens
  misc_RNA (1)...(19): siRNA sense strand
caacaacacaagaauugaa

SEQ ID NO: 1511259 - RNA, 19 nt, Homo sapiens
  misc_RNA (1)...(19): siRNA sense strand
ugaaaacucugcaagaaaa

SEQ ID NO: 1511260 - RNA, 19 nt, Homo sapiens
  misc_RNA (1)...(19): siRNA sense strand
gccaaaggauucaaguugu

SEQ ID NO: 1511261 - RNA, 19 nt, Homo sapiens
  misc_RNA (1)...(19): siRNA sense strand
acaguuccgugguuuguaa

SEQ ID NO: 1511262 - RNA, 19 nt, Homo sapiens
  misc_RNA (1)...(19): siRNA sense strand
agauguggaugcaauauau

SEQ ID NO: 1511263 - RNA, 19 nt, Homo sapiens
  misc_RNA (1)...(19): siRNA sense strand
aaagaagguuaucugcaaa

SEQ ID NO: 1511264 - RNA, 19 nt, Homo sapiens
  misc_RNA (1)...(19): siRNA sense strand
caaguuguccaucaagaaa

SEQ ID NO: 1511265 - RNA, 19 nt, Homo sapiens
  misc_RNA (1)...(19): siRNA sense strand
cagaaaguguggauuugug

SEQ ID NO: 1511266 - RNA, 19 nt, Homo sapiens
  misc_RNA (1)...(19): siRNA sense strand
caagacaacaacacaagaa

SEQ ID NO: 1511267 - RNA, 19 nt, Homo sapiens
  misc_RNA (1)...(19): siRNA sense strand
gaggaaagaaacuaaggaa

SEQ ID NO: 1511268 - RNA, 19 nt, Homo sapiens
  misc_RNA (1)...(19): siRNA sense strand
gaucuucggcucagaggaa

SEQ ID NO: 1511269 - RNA, 19 nt, Homo sapiens
  misc_RNA (1)...(19): siRNA sense strand
ucaagaaaccuggaauuau

SEQ ID NO: 1511270 - RNA, 19 nt, Homo sapiens
  misc_RNA (1)...(19): siRNA sense strand
gcauugaagcuguugagaa

SEQ ID NO: 1511271 - RNA, 19 nt, Homo sapiens
  misc_RNA (1)...(19): siRNA sense strand
gaaguuuauuacccgaaga

SEQ ID NO: 1511272 - RNA, 19 nt, Homo sapiens
  misc_RNA (1)...(19): siRNA sense strand
gggaggacauccacguugu

SEQ ID NO: 1511273 - RNA, 19 nt, Homo sapiens
  misc_RNA (1)...(19): siRNA sense strand
gcacagaaaaucuuuaaug

SEQ ID NO: 1511274 - RNA, 19 nt, Homo sapiens
  misc_RNA (1)...(19): siRNA sense strand
gggauuguauuuggaccua

SEQ ID NO: 1511275 - RNA, 19 nt, Homo sapiens
  misc_RNA (1)...(19): siRNA sense strand
gcaagacaacaacacaaga

SEQ ID NO: 1511276 - RNA, 19 nt, Homo sapiens
  misc_RNA (1)...(19): siRNA sense strand
uggaaacacugaauucuac

SEQ ID NO: 1511277 - RNA, 19 nt, Homo sapiens
  misc_RNA (1)...(19): siRNA sense strand
ccggagcacugaagauguu

SEQ ID NO: 1511278 - RNA, 19 nt, Homo sapiens
  misc_RNA (1)...(19): siRNA sense strand
agacacagaaggaaucauu

SEQ ID NO: 1511279 - RNA, 19 nt, Homo sapiens
  misc_RNA (1)...(19): siRNA sense strand
guggcaaucugcaaacaau

SEQ ID NO: 1511280 - RNA, 19 nt, Homo sapiens
  misc_RNA (1)...(19): siRNA sense strand
cuacaaauucugauacuuc

SEQ ID NO: 1511281 - RNA, 19 nt, Homo sapiens
  misc_RNA (1)...(19): siRNA sense strand
ccaaaggauucaaguuguc

SEQ ID NO: 1511282 - RNA, 19 nt, Homo sapiens
  misc_RNA (1)...(19): siRNA sense strand
gauggaggaaagaaacuaa

SEQ ID NO: 1511283 - RNA, 19 nt, Homo sapiens
  misc_RNA (1)...(19): siRNA sense strand
aaaagaagguuaucugcaa

SEQ ID NO: 1511284 - RNA, 19 nt, Homo sapiens
  misc_RNA (1)...(19): siRNA sense strand
caggcucuguccaauauga

SEQ ID NO: 1511285 - RNA, 19 nt, Homo sapiens
  misc_RNA (1)...(19): siRNA sense strand
guggaaacacugaauucua

SEQ ID NO: 1511286 - RNA, 19 nt, Homo sapiens
  misc_RNA (1)...(19): siRNA sense strand
gauucaaguuguccaucaa

SEQ ID NO: 1511287 - RNA, 19 nt, Homo sapiens
  misc_RNA (1)...(19): siRNA sense strand
gauuuauugucaaccaaga

SEQ ID NO: 1511288 - RNA, 19 nt, Homo sapiens
  misc_RNA (1)...(19): siRNA sense strand
uuacaaagaauccaagcaa

SEQ ID NO: 1511289 - RNA, 19 nt, Homo sapiens
  misc_RNA (1)...(19): siRNA sense strand
ggaggaaagaaacuaagga

SEQ ID NO: 1511290 - RNA, 19 nt, Homo sapiens
  misc_RNA (1)...(19): siRNA sense strand
ggccaaagccuccaagaac

SEQ ID NO: 1511291 - RNA, 19 nt, Homo sapiens
  misc_RNA (1)...(19): siRNA sense strand
caucaagaaaccuggaauu

SEQ ID NO: 1511292 - RNA, 19 nt, Homo sapiens
  misc_RNA (1)...(19): siRNA sense strand
caagaagagaagcugaauu

SEQ ID NO: 1511293 - RNA, 19 nt, Homo sapiens
  misc_RNA (1)...(19): siRNA sense strand
caucacagugcuuccgaua

SEQ ID NO: 1511294 - RNA, 19 nt, Homo sapiens
  misc_RNA (1)...(19): siRNA sense strand
ugcaauauaucgaguuagu

SEQ ID NO: 1511295 - RNA, 19 nt, Homo sapiens
  misc_RNA (1)...(19): siRNA sense strand
agacaacaacacaagaauu

SEQ ID NO: 1511296 - RNA, 19 nt, Homo sapiens
  misc_RNA (1)...(19): siRNA sense strand
gcagauggaggaaagaaac

SEQ ID NO: 1511297 - RNA, 19 nt, Homo sapiens
  misc_RNA (1)...(19): siRNA sense strand
gaaugucuuucagaucaca

SEQ ID NO: 1511298 - RNA, 19 nt, Homo sapiens
  misc_RNA (1)...(19): siRNA sense strand
ccaaaucgugacaccauga

SEQ ID NO: 1511299 - RNA, 19 nt, Homo sapiens
  misc_RNA (1)...(19): siRNA sense strand
aaaugaaacaggaaacaug

SEQ ID NO: 1511300 - RNA, 19 nt, Homo sapiens
  misc_RNA (1)...(19): siRNA sense strand
ugaguuccuucuacaguca

SEQ ID NO: 1511301 - RNA, 19 nt, Homo sapiens
  misc_RNA (1)...(19): siRNA sense strand
ugcaaacaauacagaaguu

SEQ ID NO: 1511302 - RNA, 19 nt, Homo sapiens
  misc_RNA (1)...(19): siRNA sense strand
gagaaaagaggucuagaug

SEQ ID NO: 1511303 - RNA, 19 nt, Homo sapiens
  misc_RNA (1)...(19): siRNA sense strand
aaccagaaaguguggauuu

SEQ ID NO: 1511304 - RNA, 19 nt, Homo sapiens
  misc_RNA (1)...(19): siRNA sense strand
ggucuaccagaaccagaua

SEQ ID NO: 1511305 - RNA, 19 nt, Homo sapiens
  misc_RNA (1)...(19): siRNA sense strand
uagauguggaugcaauaua

SEQ ID NO: 1511306 - RNA, 19 nt, Homo sapiens
  misc_RNA (1)...(19): siRNA sense strand
gauccucuagcacugaauu

SEQ ID NO: 1511307 - RNA, 19 nt, Homo sapiens
  misc_RNA (1)...(19): siRNA sense strand
ucagaucacaacaguauca

SEQ ID NO: 1511308 - RNA, 19 nt, Homo sapiens
  misc_RNA (1)...(19): siRNA sense strand
uuucagaucacaacaguau

SEQ ID NO: 1511309 - RNA, 19 nt, Homo sapiens
  misc_RNA (1)...(19): siRNA sense strand
cuucuacagucagauauug

SEQ ID NO: 1511310 - RNA, 19 nt, Homo sapiens
  misc_RNA (1)...(19): siRNA sense strand
gagcacagaaaaucuuuaa

SEQ ID NO: 1511311 - RNA, 19 nt, Homo sapiens
  misc_RNA (1)...(19): siRNA sense strand
gaauugcuaagucacuaug

SEQ ID NO: 1511312 - RNA, 19 nt, Homo sapiens
  misc_RNA (1)...(19): siRNA sense strand
acaaagaauccaagcaaca

SEQ ID NO: 1511313 - RNA, 19 nt, Homo sapiens
  misc_RNA (1)...(19): siRNA sense strand
caggaaacauggcgaucca

SEQ ID NO: 1511314 - RNA, 19 nt, Homo sapiens
  misc_RNA (1)...(19): siRNA sense strand
gaaaccagagcacagaaaa

SEQ ID NO: 1511315 - RNA, 19 nt, Homo sapiens
  misc_RNA (1)...(19): siRNA sense strand
ucaaguuguccaucaagaa

SEQ ID NO: 1511316 - RNA, 19 nt, Homo sapiens
  misc_RNA (1)...(19): siRNA sense strand
acaacaguaucaggaaaug

SEQ ID NO: 1511317 - RNA, 19 nt, Homo sapiens
  misc_RNA (1)...(19): siRNA sense strand
ccaugauccucaccgaugu

SEQ ID NO: 1511318 - RNA, 19 nt, Homo sapiens
  misc_RNA (1)...(19): siRNA sense strand
aaaucgagcagaaagaaug

SEQ ID NO: 1511319 - RNA, 19 nt, Homo sapiens
  misc_RNA (1)...(19): siRNA sense strand
ugccaaaggauucaaguug

SEQ ID NO: 1511320 - RNA, 19 nt, Homo sapiens
  misc_RNA (1)...(19): siRNA sense strand
gaaacauggcgauccacau

SEQ ID NO: 1511321 - RNA, 19 nt, Homo sapiens
  misc_RNA (1)...(19): siRNA sense strand
gaauugaagcuguaaaauc

SEQ ID NO: 1511322 - RNA, 19 nt, Homo sapiens
  misc_RNA (1)...(19): siRNA sense strand
gagcugugcaaaugagaau

SEQ ID NO: 1511323 - RNA, 19 nt, Homo sapiens
  misc_RNA (1)...(19): siRNA sense strand
uaugaaaacugggcacaaa

SEQ ID NO: 1511324 - RNA, 19 nt, Homo sapiens
  misc_RNA (1)...(19): siRNA sense strand
caaaucgugacaccaugaa

SEQ ID NO: 1511325 - RNA, 19 nt, Homo sapiens
  misc_RNA (1)...(19): siRNA sense strand
cugaauugcuaagucacua

SEQ ID NO: 1511326 - RNA, 19 nt, Homo sapiens
  misc_RNA (1)...(19): siRNA sense strand
caaagaauccaagcaacag

SEQ ID NO: 1511327 - RNA, 19 nt, Homo sapiens
  misc_RNA (1)...(19): siRNA sense strand
gcaaucugcaaacaauaca

SEQ ID NO: 1511328 - RNA, 19 nt, Homo sapiens
  misc_RNA (1)...(19): siRNA sense strand
guuaguggcaaucugcaaa

SEQ ID NO: 1511329 - RNA, 19 nt, Homo sapiens
  misc_RNA (1)...(19): siRNA sense strand
aucaagaaaccuggaauua

SEQ ID NO: 1511330 - RNA, 19 nt, Homo sapiens
  misc_RNA (1)...(19): siRNA sense strand
gccaacagccaccaugaca

SEQ ID NO: 1511331 - RNA, 19 nt, Homo sapiens
  misc_RNA (1)...(19): siRNA sense strand
caacaguaucaggaaauga

SEQ ID NO: 1511332 - RNA, 19 nt, Homo sapiens
  misc_RNA (1)...(19): siRNA sense strand
aagaugucauuccuccauu

SEQ ID NO: 1511333 - RNA, 19 nt, Homo sapiens
  misc_RNA (1)...(19): siRNA sense strand
cugagugaguacaguaaga

SEQ ID NO: 1511334 - RNA, 19 nt, Homo sapiens
  misc_RNA (1)...(19): siRNA sense strand
auccaaagauccucuagca

SEQ ID NO: 1511335 - RNA, 19 nt, Homo sapiens
  misc_RNA (1)...(19): siRNA sense strand
guaagaucuucggcucaga

SEQ ID NO: 1511336 - RNA, 19 nt, Homo sapiens
  misc_RNA (1)...(19): siRNA sense strand
caggagcugugcaaaugag

SEQ ID NO: 1511337 - RNA, 19 nt, Homo sapiens
  misc_RNA (1)...(19): siRNA sense strand
agaugucauuccuccauug

SEQ ID NO: 1511338 - RNA, 19 nt, Homo sapiens
  misc_RNA (1)...(19): siRNA sense strand
guggagagcugcugguauu

SEQ ID NO: 1511339 - RNA, 19 nt, Homo sapiens
  misc_RNA (1)...(19): siRNA sense strand
gugaauggguccuguguga

SEQ ID NO: 1511340 - RNA, 19 nt, Homo sapiens
  misc_RNA (1)...(19): siRNA sense strand
ggccugcgcugauuucuug

SEQ ID NO: 1511341 - RNA, 19 nt, Homo sapiens
  misc_RNA (1)...(19): siRNA sense strand
guacauaguguuuggcuuu

SEQ ID NO: 1511342 - RNA, 19 nt, Homo sapiens
  misc_RNA (1)...(19): siRNA sense strand
gaauggguccugugugaaa

SEQ ID NO: 1511343 - RNA, 19 nt, Homo sapiens
  misc_RNA (1)...(19): siRNA sense strand
cagcaaccaugaauuuguu

SEQ ID NO: 1511344 - RNA, 19 nt, Homo sapiens
  misc_RNA (1)...(19): siRNA sense strand
uauuauaacucagccauga

SEQ ID NO: 1511345 - RNA, 19 nt, Homo sapiens
  misc_RNA (1)...(19): siRNA sense strand
ggaaaccuccuggugauga

SEQ ID NO: 1511346 - RNA, 19 nt, Homo sapiens
  misc_RNA (1)...(19): siRNA sense strand
gaucccgggugauucugua

SEQ ID NO: 1511347 - RNA, 19 nt, Homo sapiens
  misc_RNA (1)...(19): siRNA sense strand
gcuguuggugugcuuauua

SEQ ID NO: 1511348 - RNA, 19 nt, Homo sapiens
  misc_RNA (1)...(19): siRNA sense strand
acgaugggcuggaggaauu

SEQ ID NO: 1511349 - RNA, 19 nt, Homo sapiens
  misc_RNA (1)...(19): siRNA sense strand
uauuguaacuggucagguu

SEQ ID NO: 1511350 - RNA, 19 nt, Homo sapiens
  misc_RNA (1)...(19): siRNA sense strand
gaaaccuccuggugaugau

SEQ ID NO: 1511351 - RNA, 19 nt, Homo sapiens
  misc_RNA (1)...(19): siRNA sense strand
gggcugugcuggcuguguu

SEQ ID NO: 1511352 - RNA, 19 nt, Homo sapiens
  misc_RNA (1)...(19): siRNA sense strand
guaucugugucaggaauuu

SEQ ID NO: 1511353 - RNA, 19 nt, Homo sapiens
  misc_RNA (1)...(19): siRNA sense strand
acucagccaugaauccuuu

SEQ ID NO: 1511354 - RNA, 19 nt, Homo sapiens
  misc_RNA (1)...(19): siRNA sense strand
ggucuauccuaccaaguuc

SEQ ID NO: 1511355 - RNA, 19 nt, Homo sapiens
  misc_RNA (1)...(19): siRNA sense strand
uuuaugagauuugcuguug

SEQ ID NO: 1511356 - RNA, 19 nt, Homo sapiens
  misc_RNA (1)...(19): siRNA sense strand
gucagaccguuguaaauca

SEQ ID NO: 1511357 - RNA, 19 nt, Homo sapiens
  misc_RNA (1)...(19): siRNA sense strand
gaaucauccucagagaguu

SEQ ID NO: 1511358 - RNA, 19 nt, Homo sapiens
  misc_RNA (1)...(19): siRNA sense strand
ucagaccguuguaaaucaa

SEQ ID NO: 1511359 - RNA, 19 nt, Homo sapiens
  misc_RNA (1)...(19): siRNA sense strand
gaaaauacugguagcaaga

SEQ ID NO: 1511360 - RNA, 19 nt, Homo sapiens
  misc_RNA (1)...(19): siRNA sense strand
gagagcugcugguauuuug

SEQ ID NO: 1511361 - RNA, 19 nt, Homo sapiens
  misc_RNA (1)...(19): siRNA sense strand
acagaaucauccucagaga

SEQ ID NO: 1511362 - RNA, 19 nt, Homo sapiens
  misc_RNA (1)...(19): siRNA sense strand
acucuucucucuuucacuu

SEQ ID NO: 1511363 - RNA, 19 nt, Homo sapiens
  misc_RNA (1)...(19): siRNA sense strand
gugauucuguacauagugu

SEQ ID NO: 1511364 - RNA, 19 nt, Homo sapiens
  misc_RNA (1)...(19): siRNA sense strand
uuguuacucuucucucuuu

SEQ ID NO: 1511365 - RNA, 19 nt, Homo sapiens
  misc_RNA (1)...(19): siRNA sense strand
cugaugcccuaaacuguau

SEQ ID NO: 1511366 - RNA, 19 nt, Homo sapiens
  misc_RNA (1)...(19): siRNA sense strand
aaucauccucagagaguua

SEQ ID NO: 1511367 - RNA, 19 nt, Homo sapiens
  misc_RNA (1)...(19): siRNA sense strand
ucaucuccaucgacaggua

SEQ ID NO: 1511368 - RNA, 19 nt, Homo sapiens
  misc_RNA (1)...(19): siRNA sense strand
gcugugauguggcauuuug

SEQ ID NO: 1511369 - RNA, 19 nt, Homo sapiens
  misc_RNA (1)...(19): siRNA sense strand
cuaccaaguucaccguauc

SEQ ID NO: 1511370 - RNA, 19 nt, Homo sapiens
  misc_RNA (1)...(19): siRNA sense strand
cuggaggaauuaucugaug

SEQ ID NO: 1511371 - RNA, 19 nt, Homo sapiens
  misc_RNA (1)...(19): siRNA sense strand
ugacagauuuucuauccuu

SEQ ID NO: 1511372 - RNA, 19 nt, Homo sapiens
  misc_RNA (1)...(19): siRNA sense strand
ucugaugcccuaaacugua

SEQ ID NO: 1511373 - RNA, 19 nt, Homo sapiens
  misc_RNA (1)...(19): siRNA sense strand
uuucaauccuccauuucaa

SEQ ID NO: 1511374 - RNA, 19 nt, Homo sapiens
  misc_RNA (1)...(19): siRNA sense strand
uaugagauuugcuguuggu

SEQ ID NO: 1511375 - RNA, 19 nt, Homo sapiens
  misc_RNA (1)...(19): siRNA sense strand
uaccauauagcauugauuc

SEQ ID NO: 1511376 - RNA, 19 nt, Homo sapiens
  misc_RNA (1)...(19): siRNA sense strand
ucucuggccugcgcugauu

SEQ ID NO: 1511377 - RNA, 19 nt, Homo sapiens
  misc_RNA (1)...(19): siRNA sense strand
agaaucauccucagagagu

SEQ ID NO: 1511378 - RNA, 19 nt, Homo sapiens
  misc_RNA (1)...(19): siRNA sense strand
guagcaagacagaaucauc

SEQ ID NO: 1511379 - RNA, 19 nt, Homo sapiens
  misc_RNA (1)...(19): siRNA sense strand
acagguacauugcgguuac

SEQ ID NO: 1511380 - RNA, 19 nt, Homo sapiens
  misc_RNA (1)...(19): siRNA sense strand
gcaucagcguguccuggau

SEQ ID NO: 1511381 - RNA, 19 nt, Homo sapiens
  misc_RNA (1)...(19): siRNA sense strand
agacagaaucauccucaga

SEQ ID NO: 1511382 - RNA, 19 nt, Homo sapiens
  misc_RNA (1)...(19): siRNA sense strand
guugucagaccguuguaaa

SEQ ID NO: 1511383 - RNA, 19 nt, Homo sapiens
  misc_RNA (1)...(19): siRNA sense strand
gauucuguacauaguguuu

SEQ ID NO: 1511384 - RNA, 19 nt, Homo sapiens
  misc_RNA (1)...(19): siRNA sense strand
ccaugaauuuguuuucuga

SEQ ID NO: 1511385 - RNA, 19 nt, Homo sapiens
  misc_RNA (1)...(19): siRNA sense strand
ucagcaaccaugaauuugu

SEQ ID NO: 1511386 - RNA, 19 nt, Homo sapiens
  misc_RNA (1)...(19): siRNA sense strand
gggugauucuguacauagu

SEQ ID NO: 1511387 - RNA, 19 nt, Homo sapiens
  misc_RNA (1)...(19): siRNA sense strand
uaucugaugcccuaaacug

SEQ ID NO: 1511388 - RNA, 19 nt, Homo sapiens
  misc_RNA (1)...(19): siRNA sense strand
gacagguacauugcgguua

SEQ ID NO: 1511389 - RNA, 19 nt, Homo sapiens
  misc_RNA (1)...(19): siRNA sense strand
ccuaccaaguucaccguau

SEQ ID NO: 1511390 - RNA, 19 nt, Homo sapiens
  misc_RNA (1)...(19): siRNA sense strand
uaacuggucagguuuuaaa

SEQ ID NO: 1511391 - RNA, 19 nt, Homo sapiens
  misc_RNA (1)...(19): siRNA sense strand
ccauauagcauugauucau

SEQ ID NO: 1511392 - RNA, 19 nt, Homo sapiens
  misc_RNA (1)...(19): siRNA sense strand
aaaacuggguguugacaga

SEQ ID NO: 1511393 - RNA, 19 nt, Homo sapiens
  misc_RNA (1)...(19): siRNA sense strand
ccgggugauucuguacaua

SEQ ID NO: 1511394 - RNA, 19 nt, Homo sapiens
  misc_RNA (1)...(19): siRNA sense strand
uuggaaaccuccuggugau

SEQ ID NO: 1511395 - RNA, 19 nt, Homo sapiens
  misc_RNA (1)...(19): siRNA sense strand
cugcugugauguggcauuu

SEQ ID NO: 1511396 - RNA, 19 nt, Homo sapiens
  misc_RNA (1)...(19): siRNA sense strand
gagguugucagaccguugu

SEQ ID NO: 1511397 - RNA, 19 nt, Homo sapiens
  misc_RNA (1)...(19): siRNA sense strand
ccaaguucaccguaucugu

SEQ ID NO: 1511398 - RNA, 19 nt, Homo sapiens
  misc_RNA (1)...(19): siRNA sense strand
ugcacucuccgaccaauuu

SEQ ID NO: 1511399 - RNA, 19 nt, Homo sapiens
  misc_RNA (1)...(19): siRNA sense strand
uacauaguguuuggcuuug

SEQ ID NO: 1511400 - RNA, 19 nt, Homo sapiens
  misc_RNA (1)...(19): siRNA sense strand
ccucagagaguuacaaagc

SEQ ID NO: 1511401 - RNA, 19 nt, Homo sapiens
  misc_RNA (1)...(19): siRNA sense strand
acuggguguugacagauuu

SEQ ID NO: 1511402 - RNA, 19 nt, Homo sapiens
  misc_RNA (1)...(19): siRNA sense strand
ugucagaccguuguaaauc

SEQ ID NO: 1511403 - RNA, 19 nt, Homo sapiens
  misc_RNA (1)...(19): siRNA sense strand
ggagagcugcugguauuuu

SEQ ID NO: 1511404 - RNA, 19 nt, Homo sapiens
  misc_RNA (1)...(19): siRNA sense strand
ggucagguuuuaaagaaca

SEQ ID NO: 1511405 - RNA, 19 nt, Homo sapiens
  misc_RNA (1)...(19): siRNA sense strand
guuaccauauagcauugau

SEQ ID NO: 1511406 - RNA, 19 nt, Homo sapiens
  misc_RNA (1)...(19): siRNA sense strand
gguacauugcgguuacuga

SEQ ID NO: 1511407 - RNA, 19 nt, Homo sapiens
  misc_RNA (1)...(19): siRNA sense strand
ggacgaggccucccaucaa

SEQ ID NO: 1511408 - RNA, 19 nt, Homo sapiens
  misc_RNA (1)...(19): siRNA sense strand
gacgaggccucccaucaac

SEQ ID NO: 1511409 - RNA, 19 nt, Homo sapiens
  misc_RNA (1)...(19): siRNA sense strand
ugggcuggaugcuguauga

SEQ ID NO: 1511410 - RNA, 19 nt, Homo sapiens
  misc_RNA (1)...(19): siRNA sense strand
gcuuccaccuccaccuuga

SEQ ID NO: 1511411 - RNA, 19 nt, Homo sapiens
  misc_RNA (1)...(19): siRNA sense strand
gaccgagaaacucaacuga

SEQ ID NO: 1511412 - RNA, 19 nt, Homo sapiens
  misc_RNA (1)...(19): siRNA sense strand
ccaacuaccagguguacga

SEQ ID NO: 1511413 - RNA, 19 nt, Homo sapiens
  misc_RNA (1)...(19): siRNA sense strand
ugaagcggcaggugcagaa

SEQ ID NO: 1511414 - RNA, 19 nt, Homo sapiens
  misc_RNA (1)...(19): siRNA sense strand
ggagccagaccgagaaacu

SEQ ID NO: 1511415 - RNA, 19 nt, Homo sapiens
  misc_RNA (1)...(19): siRNA sense strand
gagcaccacuccccacagu

SEQ ID NO: 1511416 - RNA, 19 nt, Homo sapiens
  misc_RNA (1)...(19): siRNA sense strand
guguagaggccaggucuga

SEQ ID NO: 1511417 - RNA, 19 nt, Homo sapiens
  misc_RNA (1)...(19): siRNA sense strand
ggaagaagcuaucaccuua

SEQ ID NO: 1511418 - RNA, 19 nt, Homo sapiens
  misc_RNA (1)...(19): siRNA sense strand
gaacagcucucaaguugua

SEQ ID NO: 1511419 - RNA, 19 nt, Homo sapiens
  misc_RNA (1)...(19): siRNA sense strand
gaacuuagccaccaucuuu

SEQ ID NO: 1511420 - RNA, 19 nt, Homo sapiens
  misc_RNA (1)...(19): siRNA sense strand
gaacauggguggcauccaa

SEQ ID NO: 1511421 - RNA, 19 nt, Homo sapiens
  misc_RNA (1)...(19): siRNA sense strand
gcaaagauguacuaucaga

SEQ ID NO: 1511422 - RNA, 19 nt, Homo sapiens
  misc_RNA (1)...(19): siRNA sense strand
gaagaggcuuugcagauuu

SEQ ID NO: 1511423 - RNA, 19 nt, Homo sapiens
  misc_RNA (1)...(19): siRNA sense strand
acacaaagcugagauauug

SEQ ID NO: 1511424 - RNA, 19 nt, Homo sapiens
  misc_RNA (1)...(19): siRNA sense strand
caaauuggaucgccuagaa

SEQ ID NO: 1511425 - RNA, 19 nt, Homo sapiens
  misc_RNA (1)...(19): siRNA sense strand
cagaacagcucucaaguug

SEQ ID NO: 1511426 - RNA, 19 nt, Homo sapiens
  misc_RNA (1)...(19): siRNA sense strand
gaagaaauauaccaaacug

SEQ ID NO: 1511427 - RNA, 19 nt, Homo sapiens
  misc_RNA (1)...(19): siRNA sense strand
caaauaugguccagaguuu

SEQ ID NO: 1511428 - RNA, 19 nt, Homo sapiens
  misc_RNA (1)...(19): siRNA sense strand
gcacaggccuggaugaaca

SEQ ID NO: 1511429 - RNA, 19 nt, Homo sapiens
  misc_RNA (1)...(19): siRNA sense strand
gaaacagaaugaaauuugg

SEQ ID NO: 1511430 - RNA, 19 nt, Homo sapiens
  misc_RNA (1)...(19): siRNA sense strand
cgaagaggcuuugcagauu

SEQ ID NO: 1511431 - RNA, 19 nt, Homo sapiens
  misc_RNA (1)...(19): siRNA sense strand
gaagcuaucaccuuacuga

SEQ ID NO: 1511432 - RNA, 19 nt, Homo sapiens
  misc_RNA (1)...(19): siRNA sense strand
ccaggaagcugcagcacuu

SEQ ID NO: 1511433 - RNA, 19 nt, Homo sapiens
  misc_RNA (1)...(19): siRNA sense strand
aggcaaagauguacuauca

SEQ ID NO: 1511434 - RNA, 19 nt, Homo sapiens
  misc_RNA (1)...(19): siRNA sense strand
ugaaggauuccaucaaaua

SEQ ID NO: 1511435 - RNA, 19 nt, Homo sapiens
  misc_RNA (1)...(19): siRNA sense strand
ggagagaguccuuuacaug

SEQ ID NO: 1511436 - RNA, 19 nt, Homo sapiens
  misc_RNA (1)...(19): siRNA sense strand
cagcaggccaucaaacuua

SEQ ID NO: 1511437 - RNA, 19 nt, Homo sapiens
  misc_RNA (1)...(19): siRNA sense strand
aaauuuggcugucaagaga

SEQ ID NO: 1511438 - RNA, 19 nt, Homo sapiens
  misc_RNA (1)...(19): siRNA sense strand
aaaagaagcugaaaagaug

SEQ ID NO: 1511439 - RNA, 19 nt, Homo sapiens
  misc_RNA (1)...(19): siRNA sense strand
gaaggauuccaucaaauau

SEQ ID NO: 1511440 - RNA, 19 nt, Homo sapiens
  misc_RNA (1)...(19): siRNA sense strand
gcaagagcuuauuaugaga

SEQ ID NO: 1511441 - RNA, 19 nt, Homo sapiens
  misc_RNA (1)...(19): siRNA sense strand
gcugagauauugucaccuu

SEQ ID NO: 1511442 - RNA, 19 nt, Homo sapiens
  misc_RNA (1)...(19): siRNA sense strand
gaaauauaccaaacuggaa

SEQ ID NO: 1511443 - RNA, 19 nt, Homo sapiens
  misc_RNA (1)...(19): siRNA sense strand
cuacaacuaugccaauuuc

SEQ ID NO: 1511444 - RNA, 19 nt, Homo sapiens
  misc_RNA (1)...(19): siRNA sense strand
gaaggaaaaucuugccaaa

SEQ ID NO: 1511445 - RNA, 19 nt, Homo sapiens
  misc_RNA (1)...(19): siRNA sense strand
gcucagauuuacacaacaa

SEQ ID NO: 1511446 - RNA, 19 nt, Homo sapiens
  misc_RNA (1)...(19): siRNA sense strand
gaagcgaucuaccacuaca

SEQ ID NO: 1511447 - RNA, 19 nt, Homo sapiens
  misc_RNA (1)...(19): siRNA sense strand
gcaaacugcugaaggaaaa

SEQ ID NO: 1511448 - RNA, 19 nt, Homo sapiens
  misc_RNA (1)...(19): siRNA sense strand
ugaaugcuaucgccucuug

SEQ ID NO: 1511449 - RNA, 19 nt, Homo sapiens
  misc_RNA (1)...(19): siRNA sense strand
gagaaaaggaucaaacaua

SEQ ID NO: 1511450 - RNA, 19 nt, Homo sapiens
  misc_RNA (1)...(19): siRNA sense strand
cagcagaggcaaagaugua

SEQ ID NO: 1511451 - RNA, 19 nt, Homo sapiens
  misc_RNA (1)...(19): siRNA sense strand
gaaugaaauuuggcuguca

SEQ ID NO: 1511452 - RNA, 19 nt, Homo sapiens
  misc_RNA (1)...(19): siRNA sense strand
aagaggcuuugcagauuua

SEQ ID NO: 1511453 - RNA, 19 nt, Homo sapiens
  misc_RNA (1)...(19): siRNA sense strand
cagcauaaccgggcucuuu

SEQ ID NO: 1511454 - RNA, 19 nt, Homo sapiens
  misc_RNA (1)...(19): siRNA sense strand
agaugcauauucaagcuua

SEQ ID NO: 1511455 - RNA, 19 nt, Homo sapiens
  misc_RNA (1)...(19): siRNA sense strand
ccagacagcucagauuuac

SEQ ID NO: 1511456 - RNA, 19 nt, Homo sapiens
  misc_RNA (1)...(19): siRNA sense strand
gaaauuuggcugucaagag

SEQ ID NO: 1511457 - RNA, 19 nt, Homo sapiens
  misc_RNA (1)...(19): siRNA sense strand
ccggaugccuugaaugcua

SEQ ID NO: 1511458 - RNA, 19 nt, Homo sapiens
  misc_RNA (1)...(19): siRNA sense strand
gcacuucagccuucucaga

SEQ ID NO: 1511459 - RNA, 19 nt, Homo sapiens
  misc_RNA (1)...(19): siRNA sense strand
ucaagagagucccuauuca

SEQ ID NO: 1511460 - RNA, 19 nt, Homo sapiens
  misc_RNA (1)...(19): siRNA sense strand
auaccaaacuggaauaaag

SEQ ID NO: 1511461 - RNA, 19 nt, Homo sapiens
  misc_RNA (1)...(19): siRNA sense strand
ugcaagagcuuauuaugag

SEQ ID NO: 1511462 - RNA, 19 nt, Homo sapiens
  misc_RNA (1)...(19): siRNA sense strand
aaagaugaccaaucacauu

SEQ ID NO: 1511463 - RNA, 19 nt, Homo sapiens
  misc_RNA (1)...(19): siRNA sense strand
caagugcgcucaacaaccu

SEQ ID NO: 1511464 - RNA, 19 nt, Homo sapiens
  misc_RNA (1)...(19): siRNA sense strand
ggaaaaucuugccaaauug

SEQ ID NO: 1511465 - RNA, 19 nt, Homo sapiens
  misc_RNA (1)...(19): siRNA sense strand
uuacaacacuggccgauac

SEQ ID NO: 1511466 - RNA, 19 nt, Homo sapiens
  misc_RNA (1)...(19): siRNA sense strand
acugaaggauuccaucaaa

SEQ ID NO: 1511467 - RNA, 19 nt, Homo sapiens
  misc_RNA (1)...(19): siRNA sense strand
uuaagagacuggagcacaa

SEQ ID NO: 1511468 - RNA, 19 nt, Homo sapiens
  misc_RNA (1)...(19): siRNA sense strand
gcaacuaaacccagaccaa

SEQ ID NO: 1511469 - RNA, 19 nt, Homo sapiens
  misc_RNA (1)...(19): siRNA sense strand
ucaaauaugguccagaguu

SEQ ID NO: 1511470 - RNA, 19 nt, Homo sapiens
  misc_RNA (1)...(19): siRNA sense strand
aggaagcgaucuaccacua

SEQ ID NO: 1511471 - RNA, 19 nt, Homo sapiens
  misc_RNA (1)...(19): siRNA sense strand
ggaacaaggaagcgaucua

SEQ ID NO: 1511472 - RNA, 19 nt, Homo sapiens
  misc_RNA (1)...(19): siRNA sense strand
aggaaaaucuugccaaauu

SEQ ID NO: 1511473 - RNA, 19 nt, Homo sapiens
  misc_RNA (1)...(19): siRNA sense strand
acaaggcucuccagcugaa

SEQ ID NO: 1511474 - RNA, 19 nt, Homo sapiens
  misc_RNA (1)...(19): siRNA sense strand
aaaaggcaguggcccauua

SEQ ID NO: 1511475 - RNA, 19 nt, Homo sapiens
  misc_RNA (1)...(19): siRNA sense strand
caggagcgguuuaaagaag

SEQ ID NO: 1511476 - RNA, 19 nt, Homo sapiens
  misc_RNA (1)...(19): siRNA sense strand
gcagaugcauauucaagcu

SEQ ID NO: 1511477 - RNA, 19 nt, Homo sapiens
  misc_RNA (1)...(19): siRNA sense strand
gaacaaggaagcgaucuac

SEQ ID NO: 1511478 - RNA, 19 nt, Homo sapiens
  misc_RNA (1)...(19): siRNA sense strand
gcacacaaagcugagauau

SEQ ID NO: 1511479 - RNA, 19 nt, Homo sapiens
  misc_RNA (1)...(19): siRNA sense strand
gcucugcacuuggcugaau

SEQ ID NO: 1511480 - RNA, 19 nt, Homo sapiens
  misc_RNA (1)...(19): siRNA sense strand
gagaccggaugccuugaau

SEQ ID NO: 1511481 - RNA, 19 nt, Homo sapiens
  misc_RNA (1)...(19): siRNA sense strand
aaacuggaauaaagaacug

SEQ ID NO: 1511482 - RNA, 19 nt, Homo sapiens
  misc_RNA (1)...(19): siRNA sense strand
gcaggagcgguuuaaagaa

SEQ ID NO: 1511483 - RNA, 19 nt, Homo sapiens
  misc_RNA (1)...(19): siRNA sense strand
gagcaggagcgguuuaaag

SEQ ID NO: 1511484 - RNA, 19 nt, Homo sapiens
  misc_RNA (1)...(19): siRNA sense strand
gagauauugucaccuuugg

SEQ ID NO: 1511485 - RNA, 19 nt, Homo sapiens
  misc_RNA (1)...(19): siRNA sense strand
cagcucagauuuacacaac

SEQ ID NO: 1511486 - RNA, 19 nt, Homo sapiens
  misc_RNA (1)...(19): siRNA sense strand
ccaagguucacuacaacua

SEQ ID NO: 1511487 - RNA, 19 nt, Homo sapiens
  misc_RNA (1)...(19): siRNA sense strand
gaacuugggaagacucuac

SEQ ID NO: 1511488 - RNA, 19 nt, Homo sapiens
  misc_RNA (1)...(19): siRNA sense strand
guuuaaagaagcugaagaa

SEQ ID NO: 1511489 - RNA, 19 nt, Homo sapiens
  misc_RNA (1)...(19): siRNA sense strand
gucaagagagucccuauuc

SEQ ID NO: 1511490 - RNA, 19 nt, Homo sapiens
  misc_RNA (1)...(19): siRNA sense strand
caaaagaagcugaaaagau

SEQ ID NO: 1511491 - RNA, 19 nt, Homo sapiens
  misc_RNA (1)...(19): siRNA sense strand
caacacuggccgauacgaa

SEQ ID NO: 1511492 - RNA, 19 nt, Homo sapiens
  misc_RNA (1)...(19): siRNA sense strand
cuuaguugauacuggcuua

SEQ ID NO: 1511493 - RNA, 19 nt, Homo sapiens
  misc_RNA (1)...(19): siRNA sense strand
gcaguauuccucugguaga

SEQ ID NO: 1511494 - RNA, 19 nt, Homo sapiens
  misc_RNA (1)...(19): siRNA sense strand
gaaaagaugaccaaucaca

SEQ ID NO: 1511495 - RNA, 19 nt, Homo sapiens
  misc_RNA (1)...(19): siRNA sense strand
gaucuaccacuacagaaca

SEQ ID NO: 1511496 - RNA, 19 nt, Homo sapiens
  misc_RNA (1)...(19): siRNA sense strand
cuacagaacagcucucaag

SEQ ID NO: 1511497 - RNA, 19 nt, Homo sapiens
  misc_RNA (1)...(19): siRNA sense strand
agaaaaggaucaaacauag

SEQ ID NO: 1511498 - RNA, 19 nt, Homo sapiens
  misc_RNA (1)...(19): siRNA sense strand
cugcaagagcuuauuauga

SEQ ID NO: 1511499 - RNA, 19 nt, Homo sapiens
  misc_RNA (1)...(19): siRNA sense strand
ugucagccaucuauagcaa

SEQ ID NO: 1511500 - RNA, 19 nt, Homo sapiens
  misc_RNA (1)...(19): siRNA sense strand
ggagaccggaugccuugaa

SEQ ID NO: 1511501 - RNA, 19 nt, Homo sapiens
  misc_RNA (1)...(19): siRNA sense strand
cagauuuacacaacaacua

SEQ ID NO: 1511502 - RNA, 19 nt, Homo sapiens
  misc_RNA (1)...(19): siRNA sense strand
guccagacagcucagauuu

SEQ ID NO: 1511503 - RNA, 19 nt, Homo sapiens
  misc_RNA (1)...(19): siRNA sense strand
uaaccgggcucuuuucaau

SEQ ID NO: 1511504 - RNA, 19 nt, Homo sapiens
  misc_RNA (1)...(19): siRNA sense strand
gcugaagaaauauaccaaa

SEQ ID NO: 1511505 - RNA, 19 nt, Homo sapiens
  misc_RNA (1)...(19): siRNA sense strand
uuacaagaaguucgagaaa

SEQ ID NO: 1511506 - RNA, 19 nt, Homo sapiens
  misc_RNA (1)...(19): siRNA sense strand
cugaaaagaugaccaauca

SEQ ID NO: 1511507 - RNA, 19 nt, Homo sapiens
  misc_RNA (1)...(19): siRNA sense strand
ccacuguguugcugcuguu

SEQ ID NO: 1511508 - RNA, 19 nt, Homo sapiens
  misc_RNA (1)...(19): siRNA sense strand
aaaggaaaccaauuaagag

SEQ ID NO: 1511509 - RNA, 19 nt, Homo sapiens
  misc_RNA (1)...(19): siRNA sense strand
cacaaaaggaaaccaauua

SEQ ID NO: 1511510 - RNA, 19 nt, Homo sapiens
  misc_RNA (1)...(19): siRNA sense strand
caacuaugggguuuucuua

SEQ ID NO: 1511511 - RNA, 19 nt, Homo sapiens
  misc_RNA (1)...(19): siRNA sense strand
gcucaacaaccuuggaaca

SEQ ID NO: 1511512 - RNA, 19 nt, Homo sapiens
  misc_RNA (1)...(19): siRNA sense strand
caagguucacuacaacuau

SEQ ID NO: 1511513 - RNA, 19 nt, Homo sapiens
  misc_RNA (1)...(19): siRNA sense strand
gcggagagaguccuuuaca

SEQ ID NO: 1511514 - RNA, 19 nt, Homo sapiens
  misc_RNA (1)...(19): siRNA sense strand
uccaacacaucaagggaaa

SEQ ID NO: 1511515 - RNA, 19 nt, Homo sapiens
  misc_RNA (1)...(19): siRNA sense strand
cggcaguauuccucuggua

SEQ ID NO: 1511516 - RNA, 19 nt, Homo sapiens
  misc_RNA (1)...(19): siRNA sense strand
acagaacagcucucaaguu

SEQ ID NO: 1511517 - RNA, 19 nt, Homo sapiens
  misc_RNA (1)...(19): siRNA sense strand
ggaagaagcuaucaccuua

SEQ ID NO: 1511518 - RNA, 19 nt, Homo sapiens
  misc_RNA (1)...(19): siRNA sense strand
gaacagcucucaaguugua

SEQ ID NO: 1511519 - RNA, 19 nt, Homo sapiens
  misc_RNA (1)...(19): siRNA sense strand
gaacuuagccaccaucuuu

SEQ ID NO: 1511520 - RNA, 19 nt, Homo sapiens
  misc_RNA (1)...(19): siRNA sense strand
gaacauggguggcauccaa

SEQ ID NO: 1511521 - RNA, 19 nt, Homo sapiens
  misc_RNA (1)...(19): siRNA sense strand
gcaaagauguacuaucaga

SEQ ID NO: 1511522 - RNA, 19 nt, Homo sapiens
  misc_RNA (1)...(19): siRNA sense strand
gaagaggcuuugcagauuu

SEQ ID NO: 1511523 - RNA, 19 nt, Homo sapiens
  misc_RNA (1)...(19): siRNA sense strand
acacaaagcugagauauug

SEQ ID NO: 1511524 - RNA, 19 nt, Homo sapiens
  misc_RNA (1)...(19): siRNA sense strand
caaauuggaucgccuagaa

SEQ ID NO: 1511525 - RNA, 19 nt, Homo sapiens
  misc_RNA (1)...(19): siRNA sense strand
cagaacagcucucaaguug

SEQ ID NO: 1511526 - RNA, 19 nt, Homo sapiens
  misc_RNA (1)...(19): siRNA sense strand
gaagaaauauaccaaacug

SEQ ID NO: 1511527 - RNA, 19 nt, Homo sapiens
  misc_RNA (1)...(19): siRNA sense strand
caaauaugguccagaguuu

SEQ ID NO: 1511528 - RNA, 19 nt, Homo sapiens
  misc_RNA (1)...(19): siRNA sense strand
gcacaggccuggaugaaca

SEQ ID NO: 1511529 - RNA, 19 nt, Homo sapiens
  misc_RNA (1)...(19): siRNA sense strand
gaaacagaaugaaauuugg

SEQ ID NO: 1511530 - RNA, 19 nt, Homo sapiens
  misc_RNA (1)...(19): siRNA sense strand
cgaagaggcuuugcagauu

SEQ ID NO: 1511531 - RNA, 19 nt, Homo sapiens
  misc_RNA (1)...(19): siRNA sense strand
gaagcuaucaccuuacuga

SEQ ID NO: 1511532 - RNA, 19 nt, Homo sapiens
  misc_RNA (1)...(19): siRNA sense strand
ccaggaagcugcagcacuu

SEQ ID NO: 1511533 - RNA, 19 nt, Homo sapiens
  misc_RNA (1)...(19): siRNA sense strand
aggcaaagauguacuauca

SEQ ID NO: 1511534 - RNA, 19 nt, Homo sapiens
  misc_RNA (1)...(19): siRNA sense strand
ugaaggauuccaucaaaua

SEQ ID NO: 1511535 - RNA, 19 nt, Homo sapiens
  misc_RNA (1)...(19): siRNA sense strand
ggagagaguccuuuacaug

SEQ ID NO: 1511536 - RNA, 19 nt, Homo sapiens
  misc_RNA (1)...(19): siRNA sense strand
cagcaggccaucaaacuua

SEQ ID NO: 1511537 - RNA, 19 nt, Homo sapiens
  misc_RNA (1)...(19): siRNA sense strand
aaauuuggcugucaagaga

SEQ ID NO: 1511538 - RNA, 19 nt, Homo sapiens
  misc_RNA (1)...(19): siRNA sense strand
aaaagaagcugaaaagaug

SEQ ID NO: 1511539 - RNA, 19 nt, Homo sapiens
  misc_RNA (1)...(19): siRNA sense strand
gaaggauuccaucaaauau

SEQ ID NO: 1511540 - RNA, 19 nt, Homo sapiens
  misc_RNA (1)...(19): siRNA sense strand
gcaagagcuuauuaugaga

SEQ ID NO: 1511541 - RNA, 19 nt, Homo sapiens
  misc_RNA (1)...(19): siRNA sense strand
gcugagauauugucaccuu

SEQ ID NO: 1511542 - RNA, 19 nt, Homo sapiens
  misc_RNA (1)...(19): siRNA sense strand
gaaauauaccaaacuggaa

SEQ ID NO: 1511543 - RNA, 19 nt, Homo sapiens
  misc_RNA (1)...(19): siRNA sense strand
cuacaacuaugccaauuuc

SEQ ID NO: 1511544 - RNA, 19 nt, Homo sapiens
  misc_RNA (1)...(19): siRNA sense strand
gaaggaaaaucuugccaaa

SEQ ID NO: 1511545 - RNA, 19 nt, Homo sapiens
  misc_RNA (1)...(19): siRNA sense strand
gcucagauuuacacaacaa

SEQ ID NO: 1511546 - RNA, 19 nt, Homo sapiens
  misc_RNA (1)...(19): siRNA sense strand
gaagcgaucuaccacuaca

SEQ ID NO: 1511547 - RNA, 19 nt, Homo sapiens
  misc_RNA (1)...(19): siRNA sense strand
gcaaacugcugaaggaaaa

SEQ ID NO: 1511548 - RNA, 19 nt, Homo sapiens
  misc_RNA (1)...(19): siRNA sense strand
ugaaugcuaucgccucuug

SEQ ID NO: 1511549 - RNA, 19 nt, Homo sapiens
  misc_RNA (1)...(19): siRNA sense strand
gagaaaaggaucaaacaua

SEQ ID NO: 1511550 - RNA, 19 nt, Homo sapiens
  misc_RNA (1)...(19): siRNA sense strand
cagcagaggcaaagaugua

SEQ ID NO: 1511551 - RNA, 19 nt, Homo sapiens
  misc_RNA (1)...(19): siRNA sense strand
gaaugaaauuuggcuguca

SEQ ID NO: 1511552 - RNA, 19 nt, Homo sapiens
  misc_RNA (1)...(19): siRNA sense strand
aagaggcuuugcagauuua

SEQ ID NO: 1511553 - RNA, 19 nt, Homo sapiens
  misc_RNA (1)...(19): siRNA sense strand
cagcauaaccgggcucuuu

SEQ ID NO: 1511554 - RNA, 19 nt, Homo sapiens
  misc_RNA (1)...(19): siRNA sense strand
agaugcauauucaagcuua

SEQ ID NO: 1511555 - RNA, 19 nt, Homo sapiens
  misc_RNA (1)...(19): siRNA sense strand
ccagacagcucagauuuac

SEQ ID NO: 1511556 - RNA, 19 nt, Homo sapiens
  misc_RNA (1)...(19): siRNA sense strand
gaaauuuggcugucaagag

SEQ ID NO: 1511557 - RNA, 19 nt, Homo sapiens
  misc_RNA (1)...(19): siRNA sense strand
ccggaugccuugaaugcua

SEQ ID NO: 1511558 - RNA, 19 nt, Homo sapiens
  misc_RNA (1)...(19): siRNA sense strand
gcacuucagccuucucaga

SEQ ID NO: 1511559 - RNA, 19 nt, Homo sapiens
  misc_RNA (1)...(19): siRNA sense strand
ucaagagagucccuauuca

SEQ ID NO: 1511560 - RNA, 19 nt, Homo sapiens
  misc_RNA (1)...(19): siRNA sense strand
auaccaaacuggaauaaag

SEQ ID NO: 1511561 - RNA, 19 nt, Homo sapiens
  misc_RNA (1)...(19): siRNA sense strand
ugcaagagcuuauuaugag

SEQ ID NO: 1511562 - RNA, 19 nt, Homo sapiens
  misc_RNA (1)...(19): siRNA sense strand
aaagaugaccaaucacauu

SEQ ID NO: 1511563 - RNA, 19 nt, Homo sapiens
  misc_RNA (1)...(19): siRNA sense strand
caagugcgcucaacaaccu

SEQ ID NO: 1511564 - RNA, 19 nt, Homo sapiens
  misc_RNA (1)...(19): siRNA sense strand
ggaaaaucuugccaaauug

SEQ ID NO: 1511565 - RNA, 19 nt, Homo sapiens
  misc_RNA (1)...(19): siRNA sense strand
uuacaacacuggccgauac

SEQ ID NO: 1511566 - RNA, 19 nt, Homo sapiens
  misc_RNA (1)...(19): siRNA sense strand
acugaaggauuccaucaaa

SEQ ID NO: 1511567 - RNA, 19 nt, Homo sapiens
  misc_RNA (1)...(19): siRNA sense strand
uuaagagacuggagcacaa

SEQ ID NO: 1511568 - RNA, 19 nt, Homo sapiens
  misc_RNA (1)...(19): siRNA sense strand
gcaacuaaacccagaccaa

SEQ ID NO: 1511569 - RNA, 19 nt, Homo sapiens
  misc_RNA (1)...(19): siRNA sense strand
ucaaauaugguccagaguu

SEQ ID NO: 1511570 - RNA, 19 nt, Homo sapiens
  misc_RNA (1)...(19): siRNA sense strand
aggaagcgaucuaccacua

SEQ ID NO: 1511571 - RNA, 19 nt, Homo sapiens
  misc_RNA (1)...(19): siRNA sense strand
ggaacaaggaagcgaucua

SEQ ID NO: 1511572 - RNA, 19 nt, Homo sapiens
  misc_RNA (1)...(19): siRNA sense strand
aggaaaaucuugccaaauu

SEQ ID NO: 1511573 - RNA, 19 nt, Homo sapiens
  misc_RNA (1)...(19): siRNA sense strand
acaaggcucuccagcugaa

SEQ ID NO: 1511574 - RNA, 19 nt, Homo sapiens
  misc_RNA (1)...(19): siRNA sense strand
aaaaggcaguggcccauua

SEQ ID NO: 1511575 - RNA, 19 nt, Homo sapiens
  misc_RNA (1)...(19): siRNA sense strand
caggagcgguuuaaagaag

SEQ ID NO: 1511576 - RNA, 19 nt, Homo sapiens
  misc_RNA (1)...(19): siRNA sense strand
gcagaugcauauucaagcu

SEQ ID NO: 1511577 - RNA, 19 nt, Homo sapiens
  misc_RNA (1)...(19): siRNA sense strand
gaacaaggaagcgaucuac

SEQ ID NO: 1511578 - RNA, 19 nt, Homo sapiens
  misc_RNA (1)...(19): siRNA sense strand
gcacacaaagcugagauau

SEQ ID NO: 1511579 - RNA, 19 nt, Homo sapiens
  misc_RNA (1)...(19): siRNA sense strand
gcucugcacuuggcugaau

SEQ ID NO: 1511580 - RNA, 19 nt, Homo sapiens
  misc_RNA (1)...(19): siRNA sense strand
gagaccggaugccuugaau

SEQ ID NO: 1511581 - RNA, 19 nt, Homo sapiens
  misc_RNA (1)...(19): siRNA sense strand
aaacuggaauaaagaacug

SEQ ID NO: 1511582 - RNA, 19 nt, Homo sapiens
  misc_RNA (1)...(19): siRNA sense strand
gcaggagcgguuuaaagaa

SEQ ID NO: 1511583 - RNA, 19 nt, Homo sapiens
  misc_RNA (1)...(19): siRNA sense strand
gagcaggagcgguuuaaag

SEQ ID NO: 1511584 - RNA, 19 nt, Homo sapiens
  misc_RNA (1)...(19): siRNA sense strand
gagauauugucaccuuugg

SEQ ID NO: 1511585 - RNA, 19 nt, Homo sapiens
  misc_RNA (1)...(19): siRNA sense strand
cagcucagauuuacacaac

SEQ ID NO: 1511586 - RNA, 19 nt, Homo sapiens
  misc_RNA (1)...(19): siRNA sense strand
ccaagguucacuacaacua

SEQ ID NO: 1511587 - RNA, 19 nt, Homo sapiens
  misc_RNA (1)...(19): siRNA sense strand
gaacuugggaagacucuac

SEQ ID NO: 1511588 - RNA, 19 nt, Homo sapiens
  misc_RNA (1)...(19): siRNA sense strand
guuuaaagaagcugaagaa

SEQ ID NO: 1511589 - RNA, 19 nt, Homo sapiens
  misc_RNA (1)...(19): siRNA sense strand
gucaagagagucccuauuc

SEQ ID NO: 1511590 - RNA, 19 nt, Homo sapiens
  misc_RNA (1)...(19): siRNA sense strand
caaaagaagcugaaaagau

SEQ ID NO: 1511591 - RNA, 19 nt, Homo sapiens
  misc_RNA (1)...(19): siRNA sense strand
caacacuggccgauacgaa

SEQ ID NO: 1511592 - RNA, 19 nt, Homo sapiens
  misc_RNA (1)...(19): siRNA sense strand
cuuaguugauacuggcuua

SEQ ID NO: 1511593 - RNA, 19 nt, Homo sapiens
  misc_RNA (1)...(19): siRNA sense strand
gcaguauuccucugguaga

SEQ ID NO: 1511594 - RNA, 19 nt, Homo sapiens
  misc_RNA (1)...(19): siRNA sense strand
gaaaagaugaccaaucaca

SEQ ID NO: 1511595 - RNA, 19 nt, Homo sapiens
  misc_RNA (1)...(19): siRNA sense strand
gaucuaccacuacagaaca

SEQ ID NO: 1511596 - RNA, 19 nt, Homo sapiens
  misc_RNA (1)...(19): siRNA sense strand
cuacagaacagcucucaag

SEQ ID NO: 1511597 - RNA, 19 nt, Homo sapiens
  misc_RNA (1)...(19): siRNA sense strand
agaaaaggaucaaacauag

SEQ ID NO: 1511598 - RNA, 19 nt, Homo sapiens
  misc_RNA (1)...(19): siRNA sense strand
cugcaagagcuuauuauga

SEQ ID NO: 1511599 - RNA, 19 nt, Homo sapiens
  misc_RNA (1)...(19): siRNA sense strand
ugucagccaucuauagcaa

SEQ ID NO: 1511600 - RNA, 19 nt, Homo sapiens
  misc_RNA (1)...(19): siRNA sense strand
ggagaccggaugccuugaa

SEQ ID NO: 1511601 - RNA, 19 nt, Homo sapiens
  misc_RNA (1)...(19): siRNA sense strand
cagauuuacacaacaacua

SEQ ID NO: 1511602 - RNA, 19 nt, Homo sapiens
  misc_RNA (1)...(19): siRNA sense strand
guccagacagcucagauuu

SEQ ID NO: 1511603 - RNA, 19 nt, Homo sapiens
  misc_RNA (1)...(19): siRNA sense strand
uaaccgggcucuuuucaau

SEQ ID NO: 1511604 - RNA, 19 nt, Homo sapiens
  misc_RNA (1)...(19): siRNA sense strand
gcugaagaaauauaccaaa

SEQ ID NO: 1511605 - RNA, 19 nt, Homo sapiens
  misc_RNA (1)...(19): siRNA sense strand
uuacaagaaguucgagaaa

SEQ ID NO: 1511606 - RNA, 19 nt, Homo sapiens
  misc_RNA (1)...(19): siRNA sense strand
cugaaaagaugaccaauca

SEQ ID NO: 1511607 - RNA, 19 nt, Homo sapiens
  misc_RNA (1)...(19): siRNA sense strand
ccacuguguugcugcuguu

SEQ ID NO: 1511608 - RNA, 19 nt, Homo sapiens
  misc_RNA (1)...(19): siRNA sense strand
aaaggaaaccaauuaagag

SEQ ID NO: 1511609 - RNA, 19 nt, Homo sapiens
  misc_RNA (1)...(19): siRNA sense strand
cacaaaaggaaaccaauua

SEQ ID NO: 1511610 - RNA, 19 nt, Homo sapiens
  misc_RNA (1)...(19): siRNA sense strand
caacuaugggguuuucuua

SEQ ID NO: 1511611 - RNA, 19 nt, Homo sapiens
  misc_RNA (1)...(19): siRNA sense strand
gcucaacaaccuuggaaca

SEQ ID NO: 1511612 - RNA, 19 nt, Homo sapiens
  misc_RNA (1)...(19): siRNA sense strand
caagguucacuacaacuau

SEQ ID NO: 1511613 - RNA, 19 nt, Homo sapiens
  misc_RNA (1)...(19): siRNA sense strand
gcggagagaguccuuuaca

SEQ ID NO: 1511614 - RNA, 19 nt, Homo sapiens
  misc_RNA (1)...(19): siRNA sense strand
uccaacacaucaagggaaa

SEQ ID NO: 1511615 - RNA, 19 nt, Homo sapiens
  misc_RNA (1)...(19): siRNA sense strand
cggcaguauuccucuggua

SEQ ID NO: 1511616 - RNA, 19 nt, Homo sapiens
  misc_RNA (1)...(19): siRNA sense strand
acagaacagcucucaaguu

SEQ ID NO: 1511617 - RNA, 19 nt, Homo sapiens
  misc_RNA (1)...(19): siRNA sense strand
gacaagauguuucuaagca

SEQ ID NO: 1511618 - RNA, 19 nt, Homo sapiens
  misc_RNA (1)...(19): siRNA sense strand
ucacugccuuccagaacua

SEQ ID NO: 1511619 - RNA, 19 nt, Homo sapiens
  misc_RNA (1)...(19): siRNA sense strand
ggaguuugcagacuugaug

SEQ ID NO: 1511620 - RNA, 19 nt, Homo sapiens
  misc_RNA (1)...(19): siRNA sense strand
gcucaacguccaaguacaa

SEQ ID NO: 1511621 - RNA, 19 nt, Homo sapiens
  misc_RNA (1)...(19): siRNA sense strand
aaaccaaggcuucggagaa

SEQ ID NO: 1511622 - RNA, 19 nt, Homo sapiens
  misc_RNA (1)...(19): siRNA sense strand
gaacgguuagagaagauug

SEQ ID NO: 1511623 - RNA, 19 nt, Homo sapiens
  misc_RNA (1)...(19): siRNA sense strand
ugccaagcaucggaaauaa

SEQ ID NO: 1511624 - RNA, 19 nt, Homo sapiens
  misc_RNA (1)...(19): siRNA sense strand
gggaacgguuagagaagau

SEQ ID NO: 1511625 - RNA, 19 nt, Homo sapiens
  misc_RNA (1)...(19): siRNA sense strand
uggaggaccugcaggcaau

SEQ ID NO: 1511626 - RNA, 19 nt, Homo sapiens
  misc_RNA (1)...(19): siRNA sense strand
uagagaagauugggcucaa

SEQ ID NO: 1511627 - RNA, 19 nt, Homo sapiens
  misc_RNA (1)...(19): siRNA sense strand
ggaguacagagcugcuuga

SEQ ID NO: 1511628 - RNA, 19 nt, Homo sapiens
  misc_RNA (1)...(19): siRNA sense strand
ucaaggggcuggacaagau

SEQ ID NO: 1511629 - RNA, 19 nt, Homo sapiens
  misc_RNA (1)...(19): siRNA sense strand
cgggaacgguuagagaaga

SEQ ID NO: 1511630 - RNA, 19 nt, Homo sapiens
  misc_RNA (1)...(19): siRNA sense strand
gaccaguccgugaucaaga

SEQ ID NO: 1511631 - RNA, 19 nt, Homo sapiens
  misc_RNA (1)...(19): siRNA sense strand
ggacaagauguuucuaagc

SEQ ID NO: 1511632 - RNA, 19 nt, Homo sapiens
  misc_RNA (1)...(19): siRNA sense strand
uggacaagauguuucuaag

SEQ ID NO: 1511633 - RNA, 19 nt, Homo sapiens
  misc_RNA (1)...(19): siRNA sense strand
caucugugcugcccucacu

SEQ ID NO: 1511634 - RNA, 19 nt, Homo sapiens
  misc_RNA (1)...(19): siRNA sense strand
ucagcucaacguccaagua

SEQ ID NO: 1511635 - RNA, 19 nt, Homo sapiens
  misc_RNA (1)...(19): siRNA sense strand
gagcugcuugacacacuuu

SEQ ID NO: 1511636 - RNA, 19 nt, Homo sapiens
  misc_RNA (1)...(19): siRNA sense strand
caacguccaaguacaaggu

SEQ ID NO: 1511637 - RNA, 19 nt, Homo sapiens
  misc_RNA (1)...(19): siRNA sense strand
gcugcugacuucgcuagug

SEQ ID NO: 1511638 - RNA, 19 nt, Homo sapiens
  misc_RNA (1)...(19): siRNA sense strand
accaguccgugaucaagaa

SEQ ID NO: 1511639 - RNA, 19 nt, Homo sapiens
  misc_RNA (1)...(19): siRNA sense strand
cagagcugcuugacacacu

SEQ ID NO: 1511640 - RNA, 19 nt, Homo sapiens
  misc_RNA (1)...(19): siRNA sense strand
cauccuggagcccggagua

SEQ ID NO: 1511641 - RNA, 19 nt, Homo sapiens
  misc_RNA (1)...(19): siRNA sense strand
gaagcugguuggaagaauu

SEQ ID NO: 1511642 - RNA, 19 nt, Homo sapiens
  misc_RNA (1)...(19): siRNA sense strand
gauaagcagcagaaaguua

SEQ ID NO: 1511643 - RNA, 19 nt, Homo sapiens
  misc_RNA (1)...(19): siRNA sense strand
gaaugcugauggcaagaua

SEQ ID NO: 1511644 - RNA, 19 nt, Homo sapiens
  misc_RNA (1)...(19): siRNA sense strand
gaaauacaccaauaacagu

SEQ ID NO: 1511645 - RNA, 19 nt, Homo sapiens
  misc_RNA (1)...(19): siRNA sense strand
cugcagaaauacaccaaua

SEQ ID NO: 1511646 - RNA, 19 nt, Homo sapiens
  misc_RNA (1)...(19): siRNA sense strand
gaagccaucugggaagaga

SEQ ID NO: 1511647 - RNA, 19 nt, Homo sapiens
  misc_RNA (1)...(19): siRNA sense strand
aagagaaacucagcaagaa

SEQ ID NO: 1511648 - RNA, 19 nt, Homo sapiens
  misc_RNA (1)...(19): siRNA sense strand
gagaagccaucugggaaga

SEQ ID NO: 1511649 - RNA, 19 nt, Homo sapiens
  misc_RNA (1)...(19): siRNA sense strand
gaagugcuacguugagaau

SEQ ID NO: 1511650 - RNA, 19 nt, Homo sapiens
  misc_RNA (1)...(19): siRNA sense strand
aaagagaaacucagcaaga

SEQ ID NO: 1511651 - RNA, 19 nt, Homo sapiens
  misc_RNA (1)...(19): siRNA sense strand
cagcagaaaguuaaugaga

SEQ ID NO: 1511652 - RNA, 19 nt, Homo sapiens
  misc_RNA (1)...(19): siRNA sense strand
gggaagugcuacguugaga

SEQ ID NO: 1511653 - RNA, 19 nt, Homo sapiens
  misc_RNA (1)...(19): siRNA sense strand
gaaaagggcagaggucaaa

SEQ ID NO: 1511654 - RNA, 19 nt, Homo sapiens
  misc_RNA (1)...(19): siRNA sense strand
gcccuccaccgaagaauaa

SEQ ID NO: 1511655 - RNA, 19 nt, Homo sapiens
  misc_RNA (1)...(19): siRNA sense strand
uaaacccagugacaacgaa

SEQ ID NO: 1511656 - RNA, 19 nt, Homo sapiens
  misc_RNA (1)...(19): siRNA sense strand
auaagcagcagaaaguuaa

SEQ ID NO: 1511657 - RNA, 19 nt, Homo sapiens
  misc_RNA (1)...(19): siRNA sense strand
gcagaaauacaccaauaac

SEQ ID NO: 1511658 - RNA, 19 nt, Homo sapiens
  misc_RNA (1)...(19): siRNA sense strand
caagcugcauaccauuguu

SEQ ID NO: 1511659 - RNA, 19 nt, Homo sapiens
  misc_RNA (1)...(19): siRNA sense strand
gagaaacucagcaagaaaa

SEQ ID NO: 1511660 - RNA, 19 nt, Homo sapiens
  misc_RNA (1)...(19): siRNA sense strand
ggaagugcuacguugagaa

SEQ ID NO: 1511661 - RNA, 19 nt, Homo sapiens
  misc_RNA (1)...(19): siRNA sense strand
agaaauacaccaauaacag

SEQ ID NO: 1511662 - RNA, 19 nt, Homo sapiens
  misc_RNA (1)...(19): siRNA sense strand
cagaaauacaccaauaaca

SEQ ID NO: 1511663 - RNA, 19 nt, Homo sapiens
  misc_RNA (1)...(19): siRNA sense strand
gggaagagacaaugcaaaa

SEQ ID NO: 1511664 - RNA, 19 nt, Homo sapiens
  misc_RNA (1)...(19): siRNA sense strand
ccaccgaagaauaagguuu

SEQ ID NO: 1511665 - RNA, 19 nt, Homo sapiens
  misc_RNA (1)...(19): siRNA sense strand
agagaaacucagcaagaaa

SEQ ID NO: 1511666 - RNA, 19 nt, Homo sapiens
  misc_RNA (1)...(19): siRNA sense strand
cugauaagcagcagaaagu

SEQ ID NO: 1511667 - RNA, 19 nt, Homo sapiens
  misc_RNA (1)...(19): siRNA sense strand
gaggucaaaggcaacagaa

SEQ ID NO: 1511668 - RNA, 19 nt, Homo sapiens
  misc_RNA (1)...(19): siRNA sense strand
agauaccucuuggcacuug

SEQ ID NO: 1511669 - RNA, 19 nt, Homo sapiens
  misc_RNA (1)...(19): siRNA sense strand
gaaggcccuccaccgaaga

SEQ ID NO: 1511670 - RNA, 19 nt, Homo sapiens
  misc_RNA (1)...(19): siRNA sense strand
ggcccuccaccgaagaaua

SEQ ID NO: 1511671 - RNA, 19 nt, Homo sapiens
  misc_RNA (1)...(19): siRNA sense strand
gagcauuaagacagacaug

SEQ ID NO: 1511672 - RNA, 19 nt, Homo sapiens
  misc_RNA (1)...(19): siRNA sense strand
ugcagaaauacaccaauaa

SEQ ID NO: 1511673 - RNA, 19 nt, Homo sapiens
  misc_RNA (1)...(19): siRNA sense strand
aagcugguuggaagaauuu

SEQ ID NO: 1511674 - RNA, 19 nt, Homo sapiens
  misc_RNA (1)...(19): siRNA sense strand
cacucaagcugcauaccau

SEQ ID NO: 1511675 - RNA, 19 nt, Homo sapiens
  misc_RNA (1)...(19): siRNA sense strand
augagagcauuaagacaga

SEQ ID NO: 1511676 - RNA, 19 nt, Homo sapiens
  misc_RNA (1)...(19): siRNA sense strand
cagaagcugguuggaagaa

SEQ ID NO: 1511677 - RNA, 19 nt, Homo sapiens
  misc_RNA (1)...(19): siRNA sense strand
ugacagagcuggagaauga

SEQ ID NO: 1511678 - RNA, 19 nt, Homo sapiens
  misc_RNA (1)...(19): siRNA sense strand
gcgaauugcuagauguuua

SEQ ID NO: 1511679 - RNA, 19 nt, Homo sapiens
  misc_RNA (1)...(19): siRNA sense strand
gcgaggagcugcugaagga

SEQ ID NO: 1511680 - RNA, 19 nt, Homo sapiens
  misc_RNA (1)...(19): siRNA sense strand
gcaaugaggagcaguuuga

SEQ ID NO: 1511681 - RNA, 19 nt, Homo sapiens
  misc_RNA (1)...(19): siRNA sense strand
aaaucaaccugcucaauga

SEQ ID NO: 1511682 - RNA, 19 nt, Homo sapiens
  misc_RNA (1)...(19): siRNA sense strand
gagcuuagaacaacaguga

SEQ ID NO: 1511683 - RNA, 19 nt, Homo sapiens
  misc_RNA (1)...(19): siRNA sense strand
acaaugacaucacagagaa

SEQ ID NO: 1511684 - RNA, 19 nt, Homo sapiens
  misc_RNA (1)...(19): siRNA sense strand
ccucagaccuuucuacaca

SEQ ID NO: 1511685 - RNA, 19 nt, Homo sapiens
  misc_RNA (1)...(19): siRNA sense strand
ucaagcaggagaauuauaa

SEQ ID NO: 1511686 - RNA, 19 nt, Homo sapiens
  misc_RNA (1)...(19): siRNA sense strand
aagaugagauggaccugua

SEQ ID NO: 1511687 - RNA, 19 nt, Homo sapiens
  misc_RNA (1)...(19): siRNA sense strand
guacaacagcgaauugcua

SEQ ID NO: 1511688 - RNA, 19 nt, Homo sapiens
  misc_RNA (1)...(19): siRNA sense strand
agagcaagcugaagcaaga

SEQ ID NO: 1511689 - RNA, 19 nt, Homo sapiens
  misc_RNA (1)...(19): siRNA sense strand
ccaccucgcucaucagcaa

SEQ ID NO: 1511690 - RNA, 19 nt, Homo sapiens
  misc_RNA (1)...(19): siRNA sense strand
aaacagagaaacuggauga

SEQ ID NO: 1511691 - RNA, 19 nt, Homo sapiens
  misc_RNA (1)...(19): siRNA sense strand
gauguuuacugcucucaau

SEQ ID NO: 1511692 - RNA, 19 nt, Homo sapiens
  misc_RNA (1)...(19): siRNA sense strand
gaaucaacuucaaggacuu

SEQ ID NO: 1511693 - RNA, 19 nt, Homo sapiens
  misc_RNA (1)...(19): siRNA sense strand
ggagcaguuugaagacuau

SEQ ID NO: 1511694 - RNA, 19 nt, Homo sapiens
  misc_RNA (1)...(19): siRNA sense strand
cgacagaaccgccuugagu

SEQ ID NO: 1511695 - RNA, 19 nt, Homo sapiens
  misc_RNA (1)...(19): siRNA sense strand
uggagcaccugcagaugua

SEQ ID NO: 1511696 - RNA, 19 nt, Homo sapiens
  misc_RNA (1)...(19): siRNA sense strand
ggcaguacauggacaagau

SEQ ID NO: 1511697 - RNA, 19 nt, Homo sapiens
  misc_RNA (1)...(19): siRNA sense strand
uggaggagauggugaagga

SEQ ID NO: 1511698 - RNA, 19 nt, Homo sapiens
  misc_RNA (1)...(19): siRNA sense strand
cgacuugaaugggcagauu

SEQ ID NO: 1511699 - RNA, 19 nt, Homo sapiens
  misc_RNA (1)...(19): siRNA sense strand
gggacagcauugacucuug

SEQ ID NO: 1511700 - RNA, 19 nt, Homo sapiens
  misc_RNA (1)...(19): siRNA sense strand
ggcucaagcaggagaauua

SEQ ID NO: 1511701 - RNA, 19 nt, Homo sapiens
  misc_RNA (1)...(19): siRNA sense strand
gacaaugacaucacagaga

SEQ ID NO: 1511702 - RNA, 19 nt, Homo sapiens
  misc_RNA (1)...(19): siRNA sense strand
gaaaauacagagcuuagaa

SEQ ID NO: 1511703 - RNA, 19 nt, Homo sapiens
  misc_RNA (1)...(19): siRNA sense strand
auacagagcuuagaacaac

SEQ ID NO: 1511704 - RNA, 19 nt, Homo sapiens
  misc_RNA (1)...(19): siRNA sense strand
ucacagagaagguaagcuu

SEQ ID NO: 1511705 - RNA, 19 nt, Homo sapiens
  misc_RNA (1)...(19): siRNA sense strand
gacagaaccgccuugaguu

SEQ ID NO: 1511706 - RNA, 19 nt, Homo sapiens
  misc_RNA (1)...(19): siRNA sense strand
ugacaucacagagaaggua

SEQ ID NO: 1511707 - RNA, 19 nt, Homo sapiens
  misc_RNA (1)...(19): siRNA sense strand
gaucagaacgacgacuuga

SEQ ID NO: 1511708 - RNA, 19 nt, Homo sapiens
  misc_RNA (1)...(19): siRNA sense strand
ggaagaaaauacagagcuu

SEQ ID NO: 1511709 - RNA, 19 nt, Homo sapiens
  misc_RNA (1)...(19): siRNA sense strand
gcaauggcagcaccgaaga

SEQ ID NO: 1511710 - RNA, 19 nt, Homo sapiens
  misc_RNA (1)...(19): siRNA sense strand
caacagcgaauugcuagau

SEQ ID NO: 1511711 - RNA, 19 nt, Homo sapiens
  misc_RNA (1)...(19): siRNA sense strand
ugaaggagcaggaggagau

SEQ ID NO: 1511712 - RNA, 19 nt, Homo sapiens
  misc_RNA (1)...(19): siRNA sense strand
ucagaacgacgacuugaau

SEQ ID NO: 1511713 - RNA, 19 nt, Homo sapiens
  misc_RNA (1)...(19): siRNA sense strand
ugcaugagcuggaggagau

SEQ ID NO: 1511714 - RNA, 19 nt, Homo sapiens
  misc_RNA (1)...(19): siRNA sense strand
gccugcggcucaaagauga

SEQ ID NO: 1511715 - RNA, 19 nt, Homo sapiens
  misc_RNA (1)...(19): siRNA sense strand
cccaggaguuguacacaga

SEQ ID NO: 1511716 - RNA, 19 nt, Homo sapiens
  misc_RNA (1)...(19): siRNA sense strand
gcaguacauggacaagauu

SEQ ID NO: 1511717 - RNA, 19 nt, Homo sapiens
  misc_RNA (1)...(19): siRNA sense strand
ggagaaucaacuucaagga

SEQ ID NO: 1511718 - RNA, 19 nt, Homo sapiens
  misc_RNA (1)...(19): siRNA sense strand
uggacaagcugcgacagaa

SEQ ID NO: 1511719 - RNA, 19 nt, Homo sapiens
  misc_RNA (1)...(19): siRNA sense strand
gaagaaaauacagagcuua

SEQ ID NO: 1511720 - RNA, 19 nt, Homo sapiens
  misc_RNA (1)...(19): siRNA sense strand
cuuggaagcccgacugaaa

SEQ ID NO: 1511721 - RNA, 19 nt, Homo sapiens
  misc_RNA (1)...(19): siRNA sense strand
aaugacagccugaccaaug

SEQ ID NO: 1511722 - RNA, 19 nt, Homo sapiens
  misc_RNA (1)...(19): siRNA sense strand
ucaaccugcucaaugacuu

SEQ ID NO: 1511723 - RNA, 19 nt, Homo sapiens
  misc_RNA (1)...(19): siRNA sense strand
aggagcaguuugaagacua

SEQ ID NO: 1511724 - RNA, 19 nt, Homo sapiens
  misc_RNA (1)...(19): siRNA sense strand
guacauggacaagauuauc

SEQ ID NO: 1511725 - RNA, 19 nt, Homo sapiens
  misc_RNA (1)...(19): siRNA sense strand
gcaggaggagaucaacuuc

SEQ ID NO: 1511726 - RNA, 19 nt, Homo sapiens
  misc_RNA (1)...(19): siRNA sense strand
auuauaagcugcgggauca

SEQ ID NO: 1511727 - RNA, 19 nt, Homo sapiens
  misc_RNA (1)...(19): siRNA sense strand
gaagagcaagcugaagcaa

SEQ ID NO: 1511728 - RNA, 19 nt, Homo sapiens
  misc_RNA (1)...(19): siRNA sense strand
ggaaaaugcggcacgugua

SEQ ID NO: 1511729 - RNA, 19 nt, Homo sapiens
  misc_RNA (1)...(19): siRNA sense strand
uaauggaagcccugaagga

SEQ ID NO: 1511730 - RNA, 19 nt, Homo sapiens
  misc_RNA (1)...(19): siRNA sense strand
gcaagcugaagcaagagaa

SEQ ID NO: 1511731 - RNA, 19 nt, Homo sapiens
  misc_RNA (1)...(19): siRNA sense strand
ucucaaugcugcaagaaaa

SEQ ID NO: 1511732 - RNA, 19 nt, Homo sapiens
  misc_RNA (1)...(19): siRNA sense strand
gcuaauggaagcccugaag

SEQ ID NO: 1511733 - RNA, 19 nt, Homo sapiens
  misc_RNA (1)...(19): siRNA sense strand
caguacauggacaagauua

SEQ ID NO: 1511734 - RNA, 19 nt, Homo sapiens
  misc_RNA (1)...(19): siRNA sense strand
gaggagcaguuugaagacu

SEQ ID NO: 1511735 - RNA, 19 nt, Homo sapiens
  misc_RNA (1)...(19): siRNA sense strand
ggaucagaacgacgacuug

SEQ ID NO: 1511736 - RNA, 19 nt, Homo sapiens
  misc_RNA (1)...(19): siRNA sense strand
acaagcgcaugauggacaa

SEQ ID NO: 1511737 - RNA, 19 nt, Homo sapiens
  misc_RNA (1)...(19): siRNA sense strand
gagccucagccucuacgaa

SEQ ID NO: 1511738 - RNA, 19 nt, Homo sapiens
  misc_RNA (1)...(19): siRNA sense strand
acagcgaauugcuagaugu

SEQ ID NO: 1511739 - RNA, 19 nt, Homo sapiens
  misc_RNA (1)...(19): siRNA sense strand
gaccucagaccuuucuaca

SEQ ID NO: 1511740 - RNA, 19 nt, Homo sapiens
  misc_RNA (1)...(19): siRNA sense strand
gcgacaaugacaucacaga

SEQ ID NO: 1511741 - RNA, 19 nt, Homo sapiens
  misc_RNA (1)...(19): siRNA sense strand
gaaaaucaaccugcucaau

SEQ ID NO: 1511742 - RNA, 19 nt, Homo sapiens
  misc_RNA (1)...(19): siRNA sense strand
gaccaggaccaacgucuac

SEQ ID NO: 1511743 - RNA, 19 nt, Homo sapiens
  misc_RNA (1)...(19): siRNA sense strand
gcucaagcaggagaauuau

SEQ ID NO: 1511744 - RNA, 19 nt, Homo sapiens
  misc_RNA (1)...(19): siRNA sense strand
ucaaacagagaaacuggau

SEQ ID NO: 1511745 - RNA, 19 nt, Homo sapiens
  misc_RNA (1)...(19): siRNA sense strand
gacaucacagagaagguaa

SEQ ID NO: 1511746 - RNA, 19 nt, Homo sapiens
  misc_RNA (1)...(19): siRNA sense strand
caacuucagcagcagcaau

SEQ ID NO: 1511747 - RNA, 19 nt, Homo sapiens
  misc_RNA (1)...(19): siRNA sense strand
aaauacagagcuuagaaca

SEQ ID NO: 1511748 - RNA, 19 nt, Homo sapiens
  misc_RNA (1)...(19): siRNA sense strand
gggaucagaacgacgacuu

SEQ ID NO: 1511749 - RNA, 19 nt, Homo sapiens
  misc_RNA (1)...(19): siRNA sense strand
gggcagacgccuaggaaaa

SEQ ID NO: 1511750 - RNA, 19 nt, Homo sapiens
  misc_RNA (1)...(19): siRNA sense strand
ggacgaggaggaggcuaug

SEQ ID NO: 1511751 - RNA, 19 nt, Homo sapiens
  misc_RNA (1)...(19): siRNA sense strand
cagcaaugaggagcaguuu

SEQ ID NO: 1511752 - RNA, 19 nt, Homo sapiens
  misc_RNA (1)...(19): siRNA sense strand
gacuugaaugggcagauuu

SEQ ID NO: 1511753 - RNA, 19 nt, Homo sapiens
  misc_RNA (1)...(19): siRNA sense strand
caaccugcucaaugacuug

SEQ ID NO: 1511754 - RNA, 19 nt, Homo sapiens
  misc_RNA (1)...(19): siRNA sense strand
cagcgaauugcuagauguu

SEQ ID NO: 1511755 - RNA, 19 nt, Homo sapiens
  misc_RNA (1)...(19): siRNA sense strand
gggugacgauguggacugu

SEQ ID NO: 1511756 - RNA, 19 nt, Homo sapiens
  misc_RNA (1)...(19): siRNA sense strand
gcgcgaugagcuaauggaa

SEQ ID NO: 1511757 - RNA, 19 nt, Homo sapiens
  misc_RNA (1)...(19): siRNA sense strand
ccucuuugcugcccagacu

SEQ ID NO: 1511758 - RNA, 19 nt, Homo sapiens
  misc_RNA (1)...(19): siRNA sense strand
aggagauggugaaggauca

SEQ ID NO: 1511759 - RNA, 19 nt, Homo sapiens
  misc_RNA (1)...(19): siRNA sense strand
ccugcucaaugacuuggaa

SEQ ID NO: 1511760 - RNA, 19 nt, Homo sapiens
  misc_RNA (1)...(19): siRNA sense strand
gcagacgccuaggaaaaug

SEQ ID NO: 1511761 - RNA, 19 nt, Homo sapiens
  misc_RNA (1)...(19): siRNA sense strand
augaggagcaguuugaaga

SEQ ID NO: 1511762 - RNA, 19 nt, Homo sapiens
  misc_RNA (1)...(19): siRNA sense strand
ggccuaggcgaguucaaug

SEQ ID NO: 1511763 - RNA, 19 nt, Homo sapiens
  misc_RNA (1)...(19): siRNA sense strand
ggacaagcugcgacagaac

SEQ ID NO: 1511764 - RNA, 19 nt, Homo sapiens
  misc_RNA (1)...(19): siRNA sense strand
caacagugacucggcucaa

SEQ ID NO: 1511765 - RNA, 19 nt, Homo sapiens
  misc_RNA (1)...(19): siRNA sense strand
gcaguuggaggaagaaaau

SEQ ID NO: 1511766 - RNA, 19 nt, Homo sapiens
  misc_RNA (1)...(19): siRNA sense strand
agaaugacagccugaccaa

SEQ ID NO: 1511767 - RNA, 19 nt, Homo sapiens
  misc_RNA (1)...(19): siRNA sense strand
gggaggagcuggaugaaga

SEQ ID NO: 1511768 - RNA, 19 nt, Homo sapiens
  misc_RNA (1)...(19): siRNA sense strand
gaagagcucuaugacuuga

SEQ ID NO: 1511769 - RNA, 19 nt, Homo sapiens
  misc_RNA (1)...(19): siRNA sense strand
gcagguggccaucgaguuu

SEQ ID NO: 1511770 - RNA, 19 nt, Homo sapiens
  misc_RNA (1)...(19): siRNA sense strand
aggaagagcucuaugacuu

SEQ ID NO: 1511771 - RNA, 19 nt, Homo sapiens
  misc_RNA (1)...(19): siRNA sense strand
gucaagaccuggcguuuca

SEQ ID NO: 1511772 - RNA, 19 nt, Homo sapiens
  misc_RNA (1)...(19): siRNA sense strand
agaccacacuguccuacua

SEQ ID NO: 1511773 - RNA, 19 nt, Homo sapiens
  misc_RNA (1)...(19): siRNA sense strand
ggaagagcucuaugacuug

SEQ ID NO: 1511774 - RNA, 19 nt, Homo sapiens
  misc_RNA (1)...(19): siRNA sense strand
gaauuguacacgaguauau

SEQ ID NO: 1511775 - RNA, 19 nt, Homo sapiens
  misc_RNA (1)...(19): siRNA sense strand
gagaagaagaagaaagaga

SEQ ID NO: 1511776 - RNA, 19 nt, Homo sapiens
  misc_RNA (1)...(19): siRNA sense strand
agaagaaggagaagaagaa

SEQ ID NO: 1511777 - RNA, 19 nt, Homo sapiens
  misc_RNA (1)...(19): siRNA sense strand
agaaggagaagaagaagaa

SEQ ID NO: 1511778 - RNA, 19 nt, Homo sapiens
  misc_RNA (1)...(19): siRNA sense strand
gagaagaaggagaagaaga

SEQ ID NO: 1511779 - RNA, 19 nt, Homo sapiens
  misc_RNA (1)...(19): siRNA sense strand
caaggaccaucuccgaauc

SEQ ID NO: 1511780 - RNA, 19 nt, Homo sapiens
  misc_RNA (1)...(19): siRNA sense strand
acuggacacuggacaagua

SEQ ID NO: 1511781 - RNA, 19 nt, Homo sapiens
  misc_RNA (1)...(19): siRNA sense strand
uacuacagcuucuucgauu

SEQ ID NO: 1511782 - RNA, 19 nt, Homo sapiens
  misc_RNA (1)...(19): siRNA sense strand
cgacgcacgccucuucuuu

SEQ ID NO: 1511783 - RNA, 19 nt, Homo sapiens
  misc_RNA (1)...(19): siRNA sense strand
gaccaucuccgaaucuuuc

SEQ ID NO: 1511784 - RNA, 19 nt, Homo sapiens
  misc_RNA (1)...(19): siRNA sense strand
agaagaagaagaaagagaa

SEQ ID NO: 1511785 - RNA, 19 nt, Homo sapiens
  misc_RNA (1)...(19): siRNA sense strand
agaaggagccagaggaaga

SEQ ID NO: 1511786 - RNA, 19 nt, Homo sapiens
  misc_RNA (1)...(19): siRNA sense strand
ucugccagcugccgaauug

SEQ ID NO: 1511787 - RNA, 19 nt, Homo sapiens
  misc_RNA (1)...(19): siRNA sense strand
gaagaagaagaaagagaag

SEQ ID NO: 1511788 - RNA, 19 nt, Homo sapiens
  misc_RNA (1)...(19): siRNA sense strand
caugggagcugcggguguu

SEQ ID NO: 1511789 - RNA, 19 nt, Homo sapiens
  misc_RNA (1)...(19): siRNA sense strand
gcuauuuggugggaacaga

SEQ ID NO: 1511790 - RNA, 19 nt, Homo sapiens
  misc_RNA (1)...(19): siRNA sense strand
gcaacaugcgccaguggaa

SEQ ID NO: 1511791 - RNA, 19 nt, Homo sapiens
  misc_RNA (1)...(19): siRNA sense strand
ugaggugguucccgauguu

SEQ ID NO: 1511792 - RNA, 19 nt, Homo sapiens
  misc_RNA (1)...(19): siRNA sense strand
aggaggagaugaugguguu

SEQ ID NO: 1511793 - RNA, 19 nt, Homo sapiens
  misc_RNA (1)...(19): siRNA sense strand
acacuguccuacuacaaga

SEQ ID NO: 1511794 - RNA, 19 nt, Homo sapiens
  misc_RNA (1)...(19): siRNA sense strand
caagggcugugaggugguu

SEQ ID NO: 1511795 - RNA, 19 nt, Homo sapiens
  misc_RNA (1)...(19): siRNA sense strand
gcaccgaggaggagaugau

SEQ ID NO: 1511796 - RNA, 19 nt, Homo sapiens
  misc_RNA (1)...(19): siRNA sense strand
cggcaucuccuaugucaug

SEQ ID NO: 1511797 - RNA, 19 nt, Homo sapiens
  misc_RNA (1)...(19): siRNA sense strand
cccggaagcugacccugaa

SEQ ID NO: 1511798 - RNA, 19 nt, Homo sapiens
  misc_RNA (1)...(19): siRNA sense strand
guacuacagcuucuucgau

SEQ ID NO: 1511799 - RNA, 19 nt, Homo sapiens
  misc_RNA (1)...(19): siRNA sense strand
gggcaugagugagaucuac

SEQ ID NO: 1511800 - RNA, 19 nt, Homo sapiens
  misc_RNA (1)...(19): siRNA sense strand
ggaccaucuccgaaucuuu

SEQ ID NO: 1511801 - RNA, 19 nt, Homo sapiens
  misc_RNA (1)...(19): siRNA sense strand
cuacagcuucuucgauuug

SEQ ID NO: 1511802 - RNA, 19 nt, Homo sapiens
  misc_RNA (1)...(19): siRNA sense strand
gaaggagaagaagaagaaa

SEQ ID NO: 1511803 - RNA, 19 nt, Homo sapiens
  misc_RNA (1)...(19): siRNA sense strand
guucugcauuaaacuccua

SEQ ID NO: 1511804 - RNA, 19 nt, Homo sapiens
  misc_RNA (1)...(19): siRNA sense strand
uaacgucuccggccagaag

SEQ ID NO: 1511805 - RNA, 19 nt, Homo sapiens
  misc_RNA (1)...(19): siRNA sense strand
gcaagcaggacuggucaga

SEQ ID NO: 1511806 - RNA, 19 nt, Homo sapiens
  misc_RNA (1)...(19): siRNA sense strand
cguggcaccugcacuguuc

SEQ ID NO: 1511807 - RNA, 19 nt, Homo sapiens
  misc_RNA (1)...(19): siRNA sense strand
gccgaauuguacacgagua

SEQ ID NO: 1511808 - RNA, 19 nt, Homo sapiens
  misc_RNA (1)...(19): siRNA sense strand
gaggugguucccgauguua

SEQ ID NO: 1511809 - RNA, 19 nt, Homo sapiens
  misc_RNA (1)...(19): siRNA sense strand
ucaaggaccaucuccgaau

SEQ ID NO: 1511810 - RNA, 19 nt, Homo sapiens
  misc_RNA (1)...(19): siRNA sense strand
agaagaagaaagagaagga

SEQ ID NO: 1511811 - RNA, 19 nt, Homo sapiens
  misc_RNA (1)...(19): siRNA sense strand
gaaaguucaaggccaagca

SEQ ID NO: 1511812 - RNA, 19 nt, Homo sapiens
  misc_RNA (1)...(19): siRNA sense strand
gaagaaggagaagaagaag

SEQ ID NO: 1511813 - RNA, 19 nt, Homo sapiens
  misc_RNA (1)...(19): siRNA sense strand
ugaagauuguggagcagau

SEQ ID NO: 1511814 - RNA, 19 nt, Homo sapiens
  misc_RNA (1)...(19): siRNA sense strand
cgacuucggcaucuccuau

SEQ ID NO: 1511815 - RNA, 19 nt, Homo sapiens
  misc_RNA (1)...(19): siRNA sense strand
gccaggaugagcagcagua

SEQ ID NO: 1511816 - RNA, 19 nt, Homo sapiens
  misc_RNA (1)...(19): siRNA sense strand
gugaggugguucccgaugu

SEQ ID NO: 1511817 - RNA, 19 nt, Homo sapiens
  misc_RNA (1)...(19): siRNA sense strand
caaguacuacagcuucuuc

SEQ ID NO: 1511818 - RNA, 19 nt, Homo sapiens
  misc_RNA (1)...(19): siRNA sense strand
aggagaagaagaagaaaga

SEQ ID NO: 1511819 - RNA, 19 nt, Homo sapiens
  misc_RNA (1)...(19): siRNA sense strand
cgaauuguacacgaguaua

SEQ ID NO: 1511820 - RNA, 19 nt, Homo sapiens
  misc_RNA (1)...(19): siRNA sense strand
gaggagaugaugguguuug

SEQ ID NO: 1511821 - RNA, 19 nt, Homo sapiens
  misc_RNA (1)...(19): siRNA sense strand
gacgcacgccucuucuuug

SEQ ID NO: 1511822 - RNA, 19 nt, Homo sapiens
  misc_RNA (1)...(19): siRNA sense strand
guucaagggcagcaggaaa

SEQ ID NO: 1511823 - RNA, 19 nt, Homo sapiens
  misc_RNA (1)...(19): siRNA sense strand
cugagaagaaggagaagaa

SEQ ID NO: 1511824 - RNA, 19 nt, Homo sapiens
  misc_RNA (1)...(19): siRNA sense strand
gcccugcaguaccacauca

SEQ ID NO: 1511825 - RNA, 19 nt, Homo sapiens
  misc_RNA (1)...(19): siRNA sense strand
caacaugcgccaguggaau

SEQ ID NO: 1511826 - RNA, 19 nt, Homo sapiens
  misc_RNA (1)...(19): siRNA sense strand
ccuaugucauggucagguu

SEQ ID NO: 1511827 - RNA, 19 nt, Homo sapiens
  misc_RNA (1)...(19): siRNA sense strand
acuacagcuucuucgauuu

SEQ ID NO: 1511828 - RNA, 19 nt, Homo sapiens
  misc_RNA (1)...(19): siRNA sense strand
ccugagggcaugagugaga

SEQ ID NO: 1511829 - RNA, 19 nt, Homo sapiens
  misc_RNA (1)...(19): siRNA sense strand
gaaggagccagaggaagag

SEQ ID NO: 1511830 - RNA, 19 nt, Homo sapiens
  misc_RNA (1)...(19): siRNA sense strand
gcaguaccacaucaacaag

SEQ ID NO: 1511831 - RNA, 19 nt, Homo sapiens
  misc_RNA (1)...(19): siRNA sense strand
agagaaggagccagaggaa

SEQ ID NO: 1511832 - RNA, 19 nt, Homo sapiens
  misc_RNA (1)...(19): siRNA sense strand
ccacacuguccuacuacaa

SEQ ID NO: 1511833 - RNA, 19 nt, Homo sapiens
  misc_RNA (1)...(19): siRNA sense strand
gaggaagagcucuaugacu

SEQ ID NO: 1511834 - RNA, 19 nt, Homo sapiens
  misc_RNA (1)...(19): siRNA sense strand
gcacucuggcugcgcuuca

SEQ ID NO: 1511835 - RNA, 19 nt, Homo sapiens
  misc_RNA (1)...(19): siRNA sense strand
accagaauguggcccaguu

SEQ ID NO: 1511836 - RNA, 19 nt, Homo sapiens
  misc_RNA (1)...(19): siRNA sense strand
uggaagcccaccagaaugu

SEQ ID NO: 1511837 - RNA, 19 nt, Homo sapiens
  misc_RNA (1)...(19): siRNA sense strand
gucagaccaugcuauuugg

SEQ ID NO: 1511838 - RNA, 19 nt, Homo sapiens
  misc_RNA (1)...(19): siRNA sense strand
uggcugcgcuucaaguacu

SEQ ID NO: 1511839 - RNA, 19 nt, Homo sapiens
  misc_RNA (1)...(19): siRNA sense strand
aaagaaagaugauggacua

SEQ ID NO: 1511840 - RNA, 19 nt, Homo sapiens
  misc_RNA (1)...(19): siRNA sense strand
cgagaagcaucuuguauaa

SEQ ID NO: 1511841 - RNA, 19 nt, Homo sapiens
  misc_RNA (1)...(19): siRNA sense strand
gaaagaugauggacuacaa

SEQ ID NO: 1511842 - RNA, 19 nt, Homo sapiens
  misc_RNA (1)...(19): siRNA sense strand
gggcagaaguucacagaaa

SEQ ID NO: 1511843 - RNA, 19 nt, Homo sapiens
  misc_RNA (1)...(19): siRNA sense strand
gagaagauguuuauauugg

SEQ ID NO: 1511844 - RNA, 19 nt, Homo sapiens
  misc_RNA (1)...(19): siRNA sense strand
ggaccaugcuacucugaua

SEQ ID NO: 1511845 - RNA, 19 nt, Homo sapiens
  misc_RNA (1)...(19): siRNA sense strand
gaaagaugcuagugaucaa

SEQ ID NO: 1511846 - RNA, 19 nt, Homo sapiens
  misc_RNA (1)...(19): siRNA sense strand
caucaacugcucagaauua

SEQ ID NO: 1511847 - RNA, 19 nt, Homo sapiens
  misc_RNA (1)...(19): siRNA sense strand
gagggagucugacguaaga

SEQ ID NO: 1511848 - RNA, 19 nt, Homo sapiens
  misc_RNA (1)...(19): siRNA sense strand
ggagaugguuugaaaugug

SEQ ID NO: 1511849 - RNA, 19 nt, Homo sapiens
  misc_RNA (1)...(19): siRNA sense strand
gcaauuguaaugugcauaa

SEQ ID NO: 1511850 - RNA, 19 nt, Homo sapiens
  misc_RNA (1)...(19): siRNA sense strand
uaaagaagauggagauggu

SEQ ID NO: 1511851 - RNA, 19 nt, Homo sapiens
  misc_RNA (1)...(19): siRNA sense strand
ggaggagucuguaaagaag

SEQ ID NO: 1511852 - RNA, 19 nt, Homo sapiens
  misc_RNA (1)...(19): siRNA sense strand
gaugggaguuccuauaaca

SEQ ID NO: 1511853 - RNA, 19 nt, Homo sapiens
  misc_RNA (1)...(19): siRNA sense strand
ccacaugccuugcccugaa

SEQ ID NO: 1511854 - RNA, 19 nt, Homo sapiens
  misc_RNA (1)...(19): siRNA sense strand
ucagauacgucauccagaa

SEQ ID NO: 1511855 - RNA, 19 nt, Homo sapiens
  misc_RNA (1)...(19): siRNA sense strand
uauuggagcuguacagauu

SEQ ID NO: 1511856 - RNA, 19 nt, Homo sapiens
  misc_RNA (1)...(19): siRNA sense strand
agaagcaucuuguauaaag

SEQ ID NO: 1511857 - RNA, 19 nt, Homo sapiens
  misc_RNA (1)...(19): siRNA sense strand
gaucaaagagaagauguuu

SEQ ID NO: 1511858 - RNA, 19 nt, Homo sapiens
  misc_RNA (1)...(19): siRNA sense strand
caacugcucagaauuaaau

SEQ ID NO: 1511859 - RNA, 19 nt, Homo sapiens
  misc_RNA (1)...(19): siRNA sense strand
agauggagaugguuugaaa

SEQ ID NO: 1511860 - RNA, 19 nt, Homo sapiens
  misc_RNA (1)...(19): siRNA sense strand
uaaggcaucuuggucauug

SEQ ID NO: 1511861 - RNA, 19 nt, Homo sapiens
  misc_RNA (1)...(19): siRNA sense strand
guaaugugcauaacaagaa

SEQ ID NO: 1511862 - RNA, 19 nt, Homo sapiens
  misc_RNA (1)...(19): siRNA sense strand
ccagaaagagauaacagua

SEQ ID NO: 1511863 - RNA, 19 nt, Homo sapiens
  misc_RNA (1)...(19): siRNA sense strand
caucauaguagcaauugua

SEQ ID NO: 1511864 - RNA, 19 nt, Homo sapiens
  misc_RNA (1)...(19): siRNA sense strand
cagaagggcugcuuguaag

SEQ ID NO: 1511865 - RNA, 19 nt, Homo sapiens
  misc_RNA (1)...(19): siRNA sense strand
ucagaagggcugcuuguaa

SEQ ID NO: 1511866 - RNA, 19 nt, Homo sapiens
  misc_RNA (1)...(19): siRNA sense strand
cauaguagcaauuguaaug

SEQ ID NO: 1511867 - RNA, 19 nt, Homo sapiens
  misc_RNA (1)...(19): siRNA sense strand
uguggacccugcaaauaua

SEQ ID NO: 1511868 - RNA, 19 nt, Homo sapiens
  misc_RNA (1)...(19): siRNA sense strand
caauuucagugccauacaa

SEQ ID NO: 1511869 - RNA, 19 nt, Homo sapiens
  misc_RNA (1)...(19): siRNA sense strand
caaaaugaaugcuuucuca

SEQ ID NO: 1511870 - RNA, 19 nt, Homo sapiens
  misc_RNA (1)...(19): siRNA sense strand
gcucacucauguucuuauu

SEQ ID NO: 1511871 - RNA, 19 nt, Homo sapiens
  misc_RNA (1)...(19): siRNA sense strand
gaucaaauggggacacuua

SEQ ID NO: 1511872 - RNA, 19 nt, Homo sapiens
  misc_RNA (1)...(19): siRNA sense strand
ggacgucgacagaagcaaa

SEQ ID NO: 1511873 - RNA, 19 nt, Homo sapiens
  misc_RNA (1)...(19): siRNA sense strand
aagacagacuuuaguauuc

SEQ ID NO: 1511874 - RNA, 19 nt, Homo sapiens
  misc_RNA (1)...(19): siRNA sense strand
gaugauggacuacaauauc

SEQ ID NO: 1511875 - RNA, 19 nt, Homo sapiens
  misc_RNA (1)...(19): siRNA sense strand
ucgagaagcaucuuguaua

SEQ ID NO: 1511876 - RNA, 19 nt, Homo sapiens
  misc_RNA (1)...(19): siRNA sense strand
cagaaagagauaacaguaa

SEQ ID NO: 1511877 - RNA, 19 nt, Homo sapiens
  misc_RNA (1)...(19): siRNA sense strand
ggcaaaagcucacucaugu

SEQ ID NO: 1511878 - RNA, 19 nt, Homo sapiens
  misc_RNA (1)...(19): siRNA sense strand
gaagauggagaugguuuga

SEQ ID NO: 1511879 - RNA, 19 nt, Homo sapiens
  misc_RNA (1)...(19): siRNA sense strand
gagauaacaguaauagcaa

SEQ ID NO: 1511880 - RNA, 19 nt, Homo sapiens
  misc_RNA (1)...(19): siRNA sense strand
acagauugccaucauagua

SEQ ID NO: 1511881 - RNA, 19 nt, Homo sapiens
  misc_RNA (1)...(19): siRNA sense strand
ggguguguauguaauauag

SEQ ID NO: 1511882 - RNA, 19 nt, Homo sapiens
  misc_RNA (1)...(19): siRNA sense strand
auacagaugacacuaguuu

SEQ ID NO: 1511883 - RNA, 19 nt, Homo sapiens
  misc_RNA (1)...(19): siRNA sense strand
ucagugccauacaaauuau

SEQ ID NO: 1511884 - RNA, 19 nt, Homo sapiens
  misc_RNA (1)...(19): siRNA sense strand
guacagauugccaucauag

SEQ ID NO: 1511885 - RNA, 19 nt, Homo sapiens
  misc_RNA (1)...(19): siRNA sense strand
cguaagaguuugugaugag

SEQ ID NO: 1511886 - RNA, 19 nt, Homo sapiens
  misc_RNA (1)...(19): siRNA sense strand
aaagcucacucauguucuu

SEQ ID NO: 1511887 - RNA, 19 nt, Homo sapiens
  misc_RNA (1)...(19): siRNA sense strand
gagaagcaucuuguauaaa

SEQ ID NO: 1511888 - RNA, 19 nt, Homo sapiens
  misc_RNA (1)...(19): siRNA sense strand
gauaacaguaauagcaaga

SEQ ID NO: 1511889 - RNA, 19 nt, Homo sapiens
  misc_RNA (1)...(19): siRNA sense strand
caauaucgaccagauguga

SEQ ID NO: 1511890 - RNA, 19 nt, Homo sapiens
  misc_RNA (1)...(19): siRNA sense strand
acacuaguuuguugggaaa

SEQ ID NO: 1511891 - RNA, 19 nt, Homo sapiens
  misc_RNA (1)...(19): siRNA sense strand
aauauaaagcugaguguga

SEQ ID NO: 1511892 - RNA, 19 nt, Homo sapiens
  misc_RNA (1)...(19): siRNA sense strand
gaccaugcuacucugauaa

SEQ ID NO: 1511893 - RNA, 19 nt, Homo sapiens
  misc_RNA (1)...(19): siRNA sense strand
ugaaagaugcuagugauca

SEQ ID NO: 1511894 - RNA, 19 nt, Homo sapiens
  misc_RNA (1)...(19): siRNA sense strand
ugugaaagaugcuagugau

SEQ ID NO: 1511895 - RNA, 19 nt, Homo sapiens
  misc_RNA (1)...(19): siRNA sense strand
agaugacacuaguuuguug

SEQ ID NO: 1511896 - RNA, 19 nt, Homo sapiens
  misc_RNA (1)...(19): siRNA sense strand
uaaaugugagggagucuga

SEQ ID NO: 1511897 - RNA, 19 nt, Homo sapiens
  misc_RNA (1)...(19): siRNA sense strand
ucacucauguucuuauugc

SEQ ID NO: 1511898 - RNA, 19 nt, Homo sapiens
  misc_RNA (1)...(19): siRNA sense strand
gacguaagaguuugugaug

SEQ ID NO: 1511899 - RNA, 19 nt, Homo sapiens
  misc_RNA (1)...(19): siRNA sense strand
gggaguuccuauaacaauc

SEQ ID NO: 1511900 - RNA, 19 nt, Homo sapiens
  misc_RNA (1)...(19): siRNA sense strand
agagauaacaguaauagca

SEQ ID NO: 1511901 - RNA, 19 nt, Homo sapiens
  misc_RNA (1)...(19): siRNA sense strand
ggacacuuaucaaaaugaa

SEQ ID NO: 1511902 - RNA, 19 nt, Homo sapiens
  misc_RNA (1)...(19): siRNA sense strand
gauacgucauccagaaugg

SEQ ID NO: 1511903 - RNA, 19 nt, Homo sapiens
  misc_RNA (1)...(19): siRNA sense strand
uagaggacgucgacagaag

SEQ ID NO: 1511904 - RNA, 19 nt, Homo sapiens
  misc_RNA (1)...(19): siRNA sense strand
acaagaaaaugccccaaaa

SEQ ID NO: 1511905 - RNA, 19 nt, Homo sapiens
  misc_RNA (1)...(19): siRNA sense strand
guuacugcauccauggaaa

SEQ ID NO: 1511906 - RNA, 19 nt, Homo sapiens
  misc_RNA (1)...(19): siRNA sense strand
aauguuggguguguaugua

SEQ ID NO: 1511907 - RNA, 19 nt, Homo sapiens
  misc_RNA (1)...(19): siRNA sense strand
guaagcaccagaaagagau

SEQ ID NO: 1511908 - RNA, 19 nt, Homo sapiens
  misc_RNA (1)...(19): siRNA sense strand
guguggacccugcaaauau

SEQ ID NO: 1511909 - RNA, 19 nt, Homo sapiens
  misc_RNA (1)...(19): siRNA sense strand
uguacagauugccaucaua

SEQ ID NO: 1511910 - RNA, 19 nt, Homo sapiens
  misc_RNA (1)...(19): siRNA sense strand
aaaugaaugcuuucucaga

SEQ ID NO: 1511911 - RNA, 19 nt, Homo sapiens
  misc_RNA (1)...(19): siRNA sense strand
agacagacuuuaguauucu

SEQ ID NO: 1511912 - RNA, 19 nt, Homo sapiens
  misc_RNA (1)...(19): siRNA sense strand
gagucugacguaagaguuu

SEQ ID NO: 1511913 - RNA, 19 nt, Homo sapiens
  misc_RNA (1)...(19): siRNA sense strand
guaagaguuugugaugagu

SEQ ID NO: 1511914 - RNA, 19 nt, Homo sapiens
  misc_RNA (1)...(19): siRNA sense strand
gugagggagucugacguaa

SEQ ID NO: 1511915 - RNA, 19 nt, Homo sapiens
  misc_RNA (1)...(19): siRNA sense strand
ggcagaaguucacagaaaa

SEQ ID NO: 1511916 - RNA, 19 nt, Homo sapiens
  misc_RNA (1)...(19): siRNA sense strand
uucagugccauacaaauua

SEQ ID NO: 1511917 - RNA, 19 nt, Homo sapiens
  misc_RNA (1)...(19): siRNA sense strand
uggaggagucuguaaagaa

SEQ ID NO: 1511918 - RNA, 19 nt, Homo sapiens
  misc_RNA (1)...(19): siRNA sense strand
aagaugauggacuacaaua

SEQ ID NO: 1511919 - RNA, 19 nt, Homo sapiens
  misc_RNA (1)...(19): siRNA sense strand
cugaugggaguuccuauaa

SEQ ID NO: 1511920 - RNA, 19 nt, Homo sapiens
  misc_RNA (1)...(19): siRNA sense strand
gcaagaggaccaugcuacu

SEQ ID NO: 1511921 - RNA, 19 nt, Homo sapiens
  misc_RNA (1)...(19): siRNA sense strand
cuuguaagcaccagaaaga

SEQ ID NO: 1511922 - RNA, 19 nt, Homo sapiens
  misc_RNA (1)...(19): siRNA sense strand
uaguagcaauuguaaugug

SEQ ID NO: 1511923 - RNA, 19 nt, Homo sapiens
  misc_RNA (1)...(19): siRNA sense strand
cacaugccuugcccugaaa

SEQ ID NO: 1511924 - RNA, 19 nt, Homo sapiens
  misc_RNA (1)...(19): siRNA sense strand
agauacagaugacacuagu

SEQ ID NO: 1511925 - RNA, 19 nt, Homo sapiens
  misc_RNA (1)...(19): siRNA sense strand
ggagucugacguaagaguu

SEQ ID NO: 1511926 - RNA, 19 nt, Homo sapiens
  misc_RNA (1)...(19): siRNA sense strand
ugaugaagaugcagaaaau

SEQ ID NO: 1511927 - RNA, 19 nt, Homo sapiens
  misc_RNA (1)...(19): siRNA sense strand
caaauauaaagcugagugu

SEQ ID NO: 1511928 - RNA, 19 nt, Homo sapiens
  misc_RNA (1)...(19): siRNA sense strand
gcaaaggcaagagcaucaa

SEQ ID NO: 1511929 - RNA, 19 nt, Homo sapiens
  misc_RNA (1)...(19): siRNA sense strand
gggaaagaaagaugaugga

SEQ ID NO: 1511930 - RNA, 19 nt, Homo sapiens
  misc_RNA (1)...(19): siRNA sense strand
cuuggucauugcacagaua

SEQ ID NO: 1511931 - RNA, 19 nt, Homo sapiens
  misc_RNA (1)...(19): siRNA sense strand
gaaaauguuggguguguau

SEQ ID NO: 1511932 - RNA, 19 nt, Homo sapiens
  misc_RNA (1)...(19): siRNA sense strand
auauaaagcugagugugau

SEQ ID NO: 1511933 - RNA, 19 nt, Homo sapiens
  misc_RNA (1)...(19): siRNA sense strand
gagucaucauguaaauaug

SEQ ID NO: 1511934 - RNA, 19 nt, Homo sapiens
  misc_RNA (1)...(19): siRNA sense strand
cgucauccagaaugguuua

SEQ ID NO: 1511935 - RNA, 19 nt, Homo sapiens
  misc_RNA (1)...(19): siRNA sense strand
cagauugccaucauaguag

SEQ ID NO: 1511936 - RNA, 19 nt, Homo sapiens
  misc_RNA (1)...(19): siRNA sense strand
ggcaaaggcaagagcauca

SEQ ID NO: 1511937 - RNA, 19 nt, Homo sapiens
  misc_RNA (1)...(19): siRNA sense strand
uauaaggcaucuuggucau

SEQ ID NO: 1511938 - RNA, 19 nt, Homo sapiens
  misc_RNA (1)...(19): siRNA sense strand
gaagcaucuuguauaaagc

SEQ ID NO: 1511939 - RNA, 19 nt, Homo sapiens
  misc_RNA (1)...(19): siRNA sense strand
gaagaaacagcacaagaaa

SEQ ID NO: 1511940 - RNA, 19 nt, Homo sapiens
  misc_RNA (1)...(19): siRNA sense strand
aaaguuacccugaugauaa

SEQ ID NO: 1511941 - RNA, 19 nt, Homo sapiens
  misc_RNA (1)...(19): siRNA sense strand
gggaagaaguaaagaaaca

SEQ ID NO: 1511942 - RNA, 19 nt, Homo sapiens
  misc_RNA (1)...(19): siRNA sense strand
caagaaacauaguaagaag

SEQ ID NO: 1511943 - RNA, 19 nt, Homo sapiens
  misc_RNA (1)...(19): siRNA sense strand
ucaagcaguucuucagauu

SEQ ID NO: 1511944 - RNA, 19 nt, Homo sapiens
  misc_RNA (1)...(19): siRNA sense strand
aaacagcacaagaaacaua

SEQ ID NO: 1511945 - RNA, 19 nt, Homo sapiens
  misc_RNA (1)...(19): siRNA sense strand
aaagaagucuggaucaagu

SEQ ID NO: 1511946 - RNA, 19 nt, Homo sapiens
  misc_RNA (1)...(19): siRNA sense strand
agcauuagcugaauuugaa

SEQ ID NO: 1511947 - RNA, 19 nt, Homo sapiens
  misc_RNA (1)...(19): siRNA sense strand
gaagagaaggugugaagag

SEQ ID NO: 1511948 - RNA, 19 nt, Homo sapiens
  misc_RNA (1)...(19): siRNA sense strand
ccaaagcucuacgcaugaa

SEQ ID NO: 1511949 - RNA, 19 nt, Homo sapiens
  misc_RNA (1)...(19): siRNA sense strand
guaagaagccucagcaaaa

SEQ ID NO: 1511950 - RNA, 19 nt, Homo sapiens
  misc_RNA (1)...(19): siRNA sense strand
gcagagagaaauuauuaag

SEQ ID NO: 1511951 - RNA, 19 nt, Homo sapiens
  misc_RNA (1)...(19): siRNA sense strand
guaaagaagaagaagaaga

SEQ ID NO: 1511952 - RNA, 19 nt, Homo sapiens
  misc_RNA (1)...(19): siRNA sense strand
gauaaucggguagccuaua

SEQ ID NO: 1511953 - RNA, 19 nt, Homo sapiens
  misc_RNA (1)...(19): siRNA sense strand
gaugaaacagagaaagaaa

SEQ ID NO: 1511954 - RNA, 19 nt, Homo sapiens
  misc_RNA (1)...(19): siRNA sense strand
ucauacaaaucaucccaaa

SEQ ID NO: 1511955 - RNA, 19 nt, Homo sapiens
  misc_RNA (1)...(19): siRNA sense strand
agaagaaacagcacaagaa

SEQ ID NO: 1511956 - RNA, 19 nt, Homo sapiens
  misc_RNA (1)...(19): siRNA sense strand
gaagucaaaggaugaaaca

SEQ ID NO: 1511957 - RNA, 19 nt, Homo sapiens
  misc_RNA (1)...(19): siRNA sense strand
gaaagaaaaggauguaaga

SEQ ID NO: 1511958 - RNA, 19 nt, Homo sapiens
  misc_RNA (1)...(19): siRNA sense strand
aagaggaugugcaagcaaa

SEQ ID NO: 1511959 - RNA, 19 nt, Homo sapiens
  misc_RNA (1)...(19): siRNA sense strand
agaaacagcacaagaaaca

SEQ ID NO: 1511960 - RNA, 19 nt, Homo sapiens
  misc_RNA (1)...(19): siRNA sense strand
gcucuacgcaugaaucaga

SEQ ID NO: 1511961 - RNA, 19 nt, Homo sapiens
  misc_RNA (1)...(19): siRNA sense strand
ggaugaaacagagaaagaa

SEQ ID NO: 1511962 - RNA, 19 nt, Homo sapiens
  misc_RNA (1)...(19): siRNA sense strand
gaucaagucacaagucaag

SEQ ID NO: 1511963 - RNA, 19 nt, Homo sapiens
  misc_RNA (1)...(19): siRNA sense strand
uagccuauaugaauccuau

SEQ ID NO: 1511964 - RNA, 19 nt, Homo sapiens
  misc_RNA (1)...(19): siRNA sense strand
gaagagcgagaacaagcaa

SEQ ID NO: 1511965 - RNA, 19 nt, Homo sapiens
  misc_RNA (1)...(19): siRNA sense strand
caaaggaugaaacagagaa

SEQ ID NO: 1511966 - RNA, 19 nt, Homo sapiens
  misc_RNA (1)...(19): siRNA sense strand
caagucacaagucaaggua

SEQ ID NO: 1511967 - RNA, 19 nt, Homo sapiens
  misc_RNA (1)...(19): siRNA sense strand
aaguuacccugaugauaaa

SEQ ID NO: 1511968 - RNA, 19 nt, Homo sapiens
  misc_RNA (1)...(19): siRNA sense strand
cacaagaaacauaguaaga

SEQ ID NO: 1511969 - RNA, 19 nt, Homo sapiens
  misc_RNA (1)...(19): siRNA sense strand
agaagaagaagaagaaaca

SEQ ID NO: 1511970 - RNA, 19 nt, Homo sapiens
  misc_RNA (1)...(19): siRNA sense strand
gcacaagaaacauaguaag

SEQ ID NO: 1511971 - RNA, 19 nt, Homo sapiens
  misc_RNA (1)...(19): siRNA sense strand
ggagaggcccaacucaauc

SEQ ID NO: 1511972 - RNA, 19 nt, Homo sapiens
  misc_RNA (1)...(19): siRNA sense strand
cagcacaagaaacauagua

SEQ ID NO: 1511973 - RNA, 19 nt, Homo sapiens
  misc_RNA (1)...(19): siRNA sense strand
ggaagaaguaaagaaacaa

SEQ ID NO: 1511974 - RNA, 19 nt, Homo sapiens
  misc_RNA (1)...(19): siRNA sense strand
gagagcaaggagucuguaa

SEQ ID NO: 1511975 - RNA, 19 nt, Homo sapiens
  misc_RNA (1)...(19): siRNA sense strand
gaaaucuugucggucuuca

SEQ ID NO: 1511976 - RNA, 19 nt, Homo sapiens
  misc_RNA (1)...(19): siRNA sense strand
caaaagcauuagcugaauu

SEQ ID NO: 1511977 - RNA, 19 nt, Homo sapiens
  misc_RNA (1)...(19): siRNA sense strand
ggaaaagaaacaaggaaaa

SEQ ID NO: 1511978 - RNA, 19 nt, Homo sapiens
  misc_RNA (1)...(19): siRNA sense strand
gaagaggaugugcaagcaa

SEQ ID NO: 1511979 - RNA, 19 nt, Homo sapiens
  misc_RNA (1)...(19): siRNA sense strand
uaugaauccuauagcaaug

SEQ ID NO: 1511980 - RNA, 19 nt, Homo sapiens
  misc_RNA (1)...(19): siRNA sense strand
gagcaaggagucuguaaaa

SEQ ID NO: 1511981 - RNA, 19 nt, Homo sapiens
  misc_RNA (1)...(19): siRNA sense strand
auaaucggguagccuauau

SEQ ID NO: 1511982 - RNA, 19 nt, Homo sapiens
  misc_RNA (1)...(19): siRNA sense strand
gcgagaacaagcaaaggaa

SEQ ID NO: 1511983 - RNA, 19 nt, Homo sapiens
  misc_RNA (1)...(19): siRNA sense strand
ugaagaggaugugcaagca

SEQ ID NO: 1511984 - RNA, 19 nt, Homo sapiens
  misc_RNA (1)...(19): siRNA sense strand
cuauagcaauggccagaug

SEQ ID NO: 1511985 - RNA, 19 nt, Homo sapiens
  misc_RNA (1)...(19): siRNA sense strand
uguaagaagccucagcaaa

SEQ ID NO: 1511986 - RNA, 19 nt, Homo sapiens
  misc_RNA (1)...(19): siRNA sense strand
aagcaguucuucagauucu

SEQ ID NO: 1511987 - RNA, 19 nt, Homo sapiens
  misc_RNA (1)...(19): siRNA sense strand
uggaucaagucacaaguca

SEQ ID NO: 1511988 - RNA, 19 nt, Homo sapiens
  misc_RNA (1)...(19): siRNA sense strand
ucggguagccuauaugaau

SEQ ID NO: 1511989 - RNA, 19 nt, Homo sapiens
  misc_RNA (1)...(19): siRNA sense strand
cgagaacaagcaaaggaaa

SEQ ID NO: 1511990 - RNA, 19 nt, Homo sapiens
  misc_RNA (1)...(19): siRNA sense strand
gaaacauaguaagaagaag

SEQ ID NO: 1511991 - RNA, 19 nt, Homo sapiens
  misc_RNA (1)...(19): siRNA sense strand
agucaaaggaugaaacaga

SEQ ID NO: 1511992 - RNA, 19 nt, Homo sapiens
  misc_RNA (1)...(19): siRNA sense strand
uuaucuaaaucgaccaaga

SEQ ID NO: 1511993 - RNA, 19 nt, Homo sapiens
  misc_RNA (1)...(19): siRNA sense strand
gaagaagaaacagcacaag

SEQ ID NO: 1511994 - RNA, 19 nt, Homo sapiens
  misc_RNA (1)...(19): siRNA sense strand
gucuucaucuucuucauca

SEQ ID NO: 1511995 - RNA, 19 nt, Homo sapiens
  misc_RNA (1)...(19): siRNA sense strand
ggaagaaagaacuugaaaa

SEQ ID NO: 1511996 - RNA, 19 nt, Homo sapiens
  misc_RNA (1)...(19): siRNA sense strand
aagaagaaacagcacaaga

SEQ ID NO: 1511997 - RNA, 19 nt, Homo sapiens
  misc_RNA (1)...(19): siRNA sense strand
uggaagaaagaacuugaaa

SEQ ID NO: 1511998 - RNA, 19 nt, Homo sapiens
  misc_RNA (1)...(19): siRNA sense strand
aagcauuagcugaauuuga

SEQ ID NO: 1511999 - RNA, 19 nt, Homo sapiens
  misc_RNA (1)...(19): siRNA sense strand
uggagaggcccaacucaau

SEQ ID NO: 1512000 - RNA, 19 nt, Homo sapiens
  misc_RNA (1)...(19): siRNA sense strand
gagaggcccaacucaaucu

SEQ ID NO: 1512001 - RNA, 19 nt, Homo sapiens
  misc_RNA (1)...(19): siRNA sense strand
aagaagagaaggugugaag

SEQ ID NO: 1512002 - RNA, 19 nt, Homo sapiens
  misc_RNA (1)...(19): siRNA sense strand
aaaccuuuaucgucugagu

SEQ ID NO: 1512003 - RNA, 19 nt, Homo sapiens
  misc_RNA (1)...(19): siRNA sense strand
cggguagccuauaugaauc

SEQ ID NO: 1512004 - RNA, 19 nt, Homo sapiens
  misc_RNA (1)...(19): siRNA sense strand
agaagaagaaacagcacaa

SEQ ID NO: 1512005 - RNA, 19 nt, Homo sapiens
  misc_RNA (1)...(19): siRNA sense strand
aaucggguagccuauauga

SEQ ID NO: 1512006 - RNA, 19 nt, Homo sapiens
  misc_RNA (1)...(19): siRNA sense strand
gagaacaagcaaaggaaaa

SEQ ID NO: 1512007 - RNA, 19 nt, Homo sapiens
  misc_RNA (1)...(19): siRNA sense strand
aaagaaaaguuacccugau

SEQ ID NO: 1512008 - RNA, 19 nt, Homo sapiens
  misc_RNA (1)...(19): siRNA sense strand
cugggaagaaguaaagaaa

SEQ ID NO: 1512009 - RNA, 19 nt, Homo sapiens
  misc_RNA (1)...(19): siRNA sense strand
auacaaaucaucccaaagc

SEQ ID NO: 1512010 - RNA, 19 nt, Homo sapiens
  misc_RNA (1)...(19): siRNA sense strand
ggucuucaucuucuucauc

SEQ ID NO: 1512011 - RNA, 19 nt, Homo sapiens
  misc_RNA (1)...(19): siRNA sense strand
gaaacagcacaagaaacau

SEQ ID NO: 1512012 - RNA, 19 nt, Homo sapiens
  misc_RNA (1)...(19): siRNA sense strand
cagauuaugaagaggaugu

SEQ ID NO: 1512013 - RNA, 19 nt, Homo sapiens
  misc_RNA (1)...(19): siRNA sense strand
gaaaaguuacccugaugau

SEQ ID NO: 1512014 - RNA, 19 nt, Homo sapiens
  misc_RNA (1)...(19): siRNA sense strand
caagcaguucuucagauuc

SEQ ID NO: 1512015 - RNA, 19 nt, Homo sapiens
  misc_RNA (1)...(19): siRNA sense strand
aaacagagaaagaaaagga

SEQ ID NO: 1512016 - RNA, 19 nt, Homo sapiens
  misc_RNA (1)...(19): siRNA sense strand
ggaacuaacuuacgauuaa

SEQ ID NO: 1512017 - RNA, 19 nt, Homo sapiens
  misc_RNA (1)...(19): siRNA sense strand
caaaggaacuaacuuacga

SEQ ID NO: 1512018 - RNA, 19 nt, Homo sapiens
  misc_RNA (1)...(19): siRNA sense strand
ggagcaaguuuccgagguu

SEQ ID NO: 1512019 - RNA, 19 nt, Homo sapiens
  misc_RNA (1)...(19): siRNA sense strand
guaaaucucccaaguccaa

SEQ ID NO: 1512020 - RNA, 19 nt, Homo sapiens
  misc_RNA (1)...(19): siRNA sense strand
gccaagggcucgaccaagu

SEQ ID NO: 1512021 - RNA, 19 nt, Homo sapiens
  misc_RNA (1)...(19): siRNA sense strand
guccaaaggaacuaacuua

SEQ ID NO: 1512022 - RNA, 19 nt, Homo sapiens
  misc_RNA (1)...(19): siRNA sense strand
guaaaggccaccugacaga

SEQ ID NO: 1512023 - RNA, 19 nt, Homo sapiens
  misc_RNA (1)...(19): siRNA sense strand
aaaggccaccugacagaua

SEQ ID NO: 1512024 - RNA, 19 nt, Homo sapiens
  misc_RNA (1)...(19): siRNA sense strand
gaguaaaggccaccugaca

SEQ ID NO: 1512025 - RNA, 19 nt, Homo sapiens
  misc_RNA (1)...(19): siRNA sense strand
gagcagcaucuccuggaaa

SEQ ID NO: 1512026 - RNA, 19 nt, Homo sapiens
  misc_RNA (1)...(19): siRNA sense strand
ccaagggcucgaccaagua

SEQ ID NO: 1512027 - RNA, 19 nt, Homo sapiens
  misc_RNA (1)...(19): siRNA sense strand
caaagaugaugagcagcau

SEQ ID NO: 1512028 - RNA, 19 nt, Homo sapiens
  misc_RNA (1)...(19): siRNA sense strand
cagggaggcuggugagcau

SEQ ID NO: 1512029 - RNA, 19 nt, Homo sapiens
  misc_RNA (1)...(19): siRNA sense strand
gauguaaaucucccaaguc

SEQ ID NO: 1512030 - RNA, 19 nt, Homo sapiens
  misc_RNA (1)...(19): siRNA sense strand
guugaaggcagagaagaaa

SEQ ID NO: 1512031 - RNA, 19 nt, Homo sapiens
  misc_RNA (1)...(19): siRNA sense strand
ugagcagcaucuccuggaa

SEQ ID NO: 1512032 - RNA, 19 nt, Homo sapiens
  misc_RNA (1)...(19): siRNA sense strand
gggacaauuugguuuuaaa

SEQ ID NO: 1512033 - RNA, 19 nt, Homo sapiens
  misc_RNA (1)...(19): siRNA sense strand
gcaaguuuccgagguugga

SEQ ID NO: 1512034 - RNA, 19 nt, Homo sapiens
  misc_RNA (1)...(19): siRNA sense strand
gaaggcagagaagaaaucu

SEQ ID NO: 1512035 - RNA, 19 nt, Homo sapiens
  misc_RNA (1)...(19): siRNA sense strand
aggaacuaacuuacgauua

SEQ ID NO: 1512036 - RNA, 19 nt, Homo sapiens
  misc_RNA (1)...(19): siRNA sense strand
gcauccgacggcagaguaa

SEQ ID NO: 1512037 - RNA, 19 nt, Homo sapiens
  misc_RNA (1)...(19): siRNA sense strand
ggucaggcugggaggauga

SEQ ID NO: 1512038 - RNA, 19 nt, Homo sapiens
  misc_RNA (1)...(19): siRNA sense strand
ugaaggcagagaagaaauc

SEQ ID NO: 1512039 - RNA, 19 nt, Homo sapiens
  misc_RNA (1)...(19): siRNA sense strand
ucucccaaguccaaaggaa

SEQ ID NO: 1512040 - RNA, 19 nt, Homo sapiens
  misc_RNA (1)...(19): siRNA sense strand
ccaaaggaacuaacuuacg

SEQ ID NO: 1512041 - RNA, 19 nt, Homo sapiens
  misc_RNA (1)...(19): siRNA sense strand
ccaaguccaaaggaacuaa

SEQ ID NO: 1512042 - RNA, 19 nt, Homo sapiens
  misc_RNA (1)...(19): siRNA sense strand
ccagaugaaauugaagguu

SEQ ID NO: 1512043 - RNA, 19 nt, Homo sapiens
  misc_RNA (1)...(19): siRNA sense strand
aaggccaccugacagauag

SEQ ID NO: 1512044 - RNA, 19 nt, Homo sapiens
  misc_RNA (1)...(19): siRNA sense strand
cuccaaaacuugcucuuga

SEQ ID NO: 1512045 - RNA, 19 nt, Homo sapiens
  misc_RNA (1)...(19): siRNA sense strand
ccagaagccuuugaaauuu

SEQ ID NO: 1512046 - RNA, 19 nt, Homo sapiens
  misc_RNA (1)...(19): siRNA sense strand
gccagaagccuuugaaauu

SEQ ID NO: 1512047 - RNA, 19 nt, Homo sapiens
  misc_RNA (1)...(19): siRNA sense strand
gaaauuugcccuuaugauc

SEQ ID NO: 1512048 - RNA, 19 nt, Homo sapiens
  misc_RNA (1)...(19): siRNA sense strand
gaaagucaguccuccuagu

SEQ ID NO: 1512049 - RNA, 19 nt, Homo sapiens
  misc_RNA (1)...(19): siRNA sense strand
cagcauguguuuguccuua

SEQ ID NO: 1512050 - RNA, 19 nt, Homo sapiens
  misc_RNA (1)...(19): siRNA sense strand
gaaugucgauggcgcuaau

SEQ ID NO: 1512051 - RNA, 19 nt, Homo sapiens
  misc_RNA (1)...(19): siRNA sense strand
cagaagccuuugaaauuug

SEQ ID NO: 1512052 - RNA, 19 nt, Homo sapiens
  misc_RNA (1)...(19): siRNA sense strand
caggagcgcuguggaagaa

SEQ ID NO: 1512053 - RNA, 19 nt, Homo sapiens
  misc_RNA (1)...(19): siRNA sense strand
ccucagaccaggacaguaa

SEQ ID NO: 1512054 - RNA, 19 nt, Homo sapiens
  misc_RNA (1)...(19): siRNA sense strand
ggagcgcuguggaagaaga

SEQ ID NO: 1512055 - RNA, 19 nt, Homo sapiens
  misc_RNA (1)...(19): siRNA sense strand
cgaaagagucagcaagaga

SEQ ID NO: 1512056 - RNA, 19 nt, Homo sapiens
  misc_RNA (1)...(19): siRNA sense strand
aaagauggccaccugcaaa

SEQ ID NO: 1512057 - RNA, 19 nt, Homo sapiens
  misc_RNA (1)...(19): siRNA sense strand
cgagaacccucugaaaguc

SEQ ID NO: 1512058 - RNA, 19 nt, Homo sapiens
  misc_RNA (1)...(19): siRNA sense strand
ccuuugaaauuugcccuua

SEQ ID NO: 1512059 - RNA, 19 nt, Homo sapiens
  misc_RNA (1)...(19): siRNA sense strand
ggagaaagaaccccaagaa

SEQ ID NO: 1512060 - RNA, 19 nt, Homo sapiens
  misc_RNA (1)...(19): siRNA sense strand
gcuaauugccagcaugugu

SEQ ID NO: 1512061 - RNA, 19 nt, Homo sapiens
  misc_RNA (1)...(19): siRNA sense strand
gcauguguuuguccuuaag

SEQ ID NO: 1512062 - RNA, 19 nt, Homo sapiens
  misc_RNA (1)...(19): siRNA sense strand
gaaaaugacacgaaagagu

SEQ ID NO: 1512063 - RNA, 19 nt, Homo sapiens
  misc_RNA (1)...(19): siRNA sense strand
gaaagaaccccaagaaagc

SEQ ID NO: 1512064 - RNA, 19 nt, Homo sapiens
  misc_RNA (1)...(19): siRNA sense strand
uguuuguccuuaagacuuu

SEQ ID NO: 1512065 - RNA, 19 nt, Homo sapiens
  misc_RNA (1)...(19): siRNA sense strand
aagaagaggacaccgagaa

SEQ ID NO: 1512066 - RNA, 19 nt, Homo sapiens
  misc_RNA (1)...(19): siRNA sense strand
aaagucaguccuccuaguu

SEQ ID NO: 1512067 - RNA, 19 nt, Homo sapiens
  misc_RNA (1)...(19): siRNA sense strand
ccgagaacccucugaaagu

SEQ ID NO: 1512068 - RNA, 19 nt, Homo sapiens
  misc_RNA (1)...(19): siRNA sense strand
gagccagaagccuuugaaa

SEQ ID NO: 1512069 - RNA, 19 nt, Homo sapiens
  misc_RNA (1)...(19): siRNA sense strand
ggagccagaagccuuugaa

SEQ ID NO: 1512070 - RNA, 19 nt, Homo sapiens
  misc_RNA (1)...(19): siRNA sense strand
uaauugccagcauguguuu

SEQ ID NO: 1512071 - RNA, 19 nt, Homo sapiens
  misc_RNA (1)...(19): siRNA sense strand
gagaaagaaccccaagaaa

SEQ ID NO: 1512072 - RNA, 19 nt, Homo sapiens
  misc_RNA (1)...(19): siRNA sense strand
gagaacccucugaaaguca

SEQ ID NO: 1512073 - RNA, 19 nt, Homo sapiens
  misc_RNA (1)...(19): siRNA sense strand
uuugaaauuugcccuuaug

SEQ ID NO: 1512074 - RNA, 19 nt, Homo sapiens
  misc_RNA (1)...(19): siRNA sense strand
cacgaaagagucagcaaga

SEQ ID NO: 1512075 - RNA, 19 nt, Homo sapiens
  misc_RNA (1)...(19): siRNA sense strand
gauggccaccugcaaauac

SEQ ID NO: 1512076 - RNA, 19 nt, Homo sapiens
  misc_RNA (1)...(19): siRNA sense strand
gcaucgugcaggagaaaga

SEQ ID NO: 1512077 - RNA, 19 nt, Homo sapiens
  misc_RNA (1)...(19): siRNA sense strand
ugaaauuugcccuuaugau

SEQ ID NO: 1512078 - RNA, 19 nt, Homo sapiens
  misc_RNA (1)...(19): siRNA sense strand
cuaauugccagcauguguu

SEQ ID NO: 1512079 - RNA, 19 nt, Homo sapiens
  misc_RNA (1)...(19): siRNA sense strand
agucaguccuccuaguuca

SEQ ID NO: 1512080 - RNA, 19 nt, Homo sapiens
  misc_RNA (1)...(19): siRNA sense strand
ggaaugucgauggcgcuaa

SEQ ID NO: 1512081 - RNA, 19 nt, Homo sapiens
  misc_RNA (1)...(19): siRNA sense strand
caccgagaacccucugaaa

SEQ ID NO: 1512082 - RNA, 19 nt, Homo sapiens
  misc_RNA (1)...(19): siRNA sense strand
gcgcuaauugccagcaugu

SEQ ID NO: 1512083 - RNA, 19 nt, Homo sapiens
  misc_RNA (1)...(19): siRNA sense strand
cuaagagccuggagauuua

SEQ ID NO: 1512084 - RNA, 19 nt, Homo sapiens
  misc_RNA (1)...(19): siRNA sense strand
ccagggucuugcucuauua

SEQ ID NO: 1512085 - RNA, 19 nt, Homo sapiens
  misc_RNA (1)...(19): siRNA sense strand
ccuaagagccuggagauuu

SEQ ID NO: 1512086 - RNA, 19 nt, Homo sapiens
  misc_RNA (1)...(19): siRNA sense strand
ugucucagccucccaagua

SEQ ID NO: 1512087 - RNA, 19 nt, Homo sapiens
  misc_RNA (1)...(19): siRNA sense strand
caccacaccaggcuaauuu

SEQ ID NO: 1512088 - RNA, 19 nt, Homo sapiens
  misc_RNA (1)...(19): siRNA sense strand
ucaaagugcugggauuaca

SEQ ID NO: 1512089 - RNA, 19 nt, Homo sapiens
  misc_RNA (1)...(19): siRNA sense strand
caccucagccucccacuuu

SEQ ID NO: 1512090 - RNA, 19 nt, Homo sapiens
  misc_RNA (1)...(19): siRNA sense strand
guggaguggugccaucuug

SEQ ID NO: 1512091 - RNA, 19 nt, Homo sapiens
  misc_RNA (1)...(19): siRNA sense strand
gcacaaucucggcucacua

SEQ ID NO: 1512092 - RNA, 19 nt, Homo sapiens
  misc_RNA (1)...(19): siRNA sense strand
gccuggagauuuauaaagg

SEQ ID NO: 1512093 - RNA, 19 nt, Homo sapiens
  misc_RNA (1)...(19): siRNA sense strand
cccagggucuugcucuauu

SEQ ID NO: 1512094 - RNA, 19 nt, Homo sapiens
  misc_RNA (1)...(19): siRNA sense strand
ucucaaagugcugggauua

SEQ ID NO: 1512095 - RNA, 19 nt, Homo sapiens
  misc_RNA (1)...(19): siRNA sense strand
gagccuggagauuuauaaa

SEQ ID NO: 1512096 - RNA, 19 nt, Homo sapiens
  misc_RNA (1)...(19): siRNA sense strand
acagccagauggagucuca

SEQ ID NO: 1512097 - RNA, 19 nt, Homo sapiens
  misc_RNA (1)...(19): siRNA sense strand
ccuggagauuuauaaagga

SEQ ID NO: 1512098 - RNA, 19 nt, Homo sapiens
  misc_RNA (1)...(19): siRNA sense strand
cuggagauuuauaaaggaa

SEQ ID NO: 1512099 - RNA, 19 nt, Homo sapiens
  misc_RNA (1)...(19): siRNA sense strand
caaucucggcucacuacaa

SEQ ID NO: 1512100 - RNA, 19 nt, Homo sapiens
  misc_RNA (1)...(19): siRNA sense strand
aaucucggcucacuacaac

SEQ ID NO: 1512101 - RNA, 19 nt, Homo sapiens
  misc_RNA (1)...(19): siRNA sense strand
cucccgagcucaagugauc

SEQ ID NO: 1512102 - RNA, 19 nt, Homo sapiens
  misc_RNA (1)...(19): siRNA sense strand
ccuccuggguucaagcaau

SEQ ID NO: 1512103 - RNA, 19 nt, Homo sapiens
  misc_RNA (1)...(19): siRNA sense strand
uauaaaggaagcuguaacu

SEQ ID NO: 1512104 - RNA, 19 nt, Homo sapiens
  misc_RNA (1)...(19): siRNA sense strand
cuccuggguucaagcaauu

SEQ ID NO: 1512105 - RNA, 19 nt, Homo sapiens
  misc_RNA (1)...(19): siRNA sense strand
ccaccacaccaggcuaauu

SEQ ID NO: 1512106 - RNA, 19 nt, Homo sapiens
  misc_RNA (1)...(19): siRNA sense strand
gaagcuguaacugggaaga

SEQ ID NO: 1512107 - RNA, 19 nt, Homo sapiens
  misc_RNA (1)...(19): siRNA sense strand
gccucagccucucaaagug

SEQ ID NO: 1512108 - RNA, 19 nt, Homo sapiens
  misc_RNA (1)...(19): siRNA sense strand
gaacugccuugguguguuu

SEQ ID NO: 1512109 - RNA, 19 nt, Homo sapiens
  misc_RNA (1)...(19): siRNA sense strand
caaauagugucuggcauua

SEQ ID NO: 1512110 - RNA, 19 nt, Homo sapiens
  misc_RNA (1)...(19): siRNA sense strand
gaagggcagucccagaaga

SEQ ID NO: 1512111 - RNA, 19 nt, Homo sapiens
  misc_RNA (1)...(19): siRNA sense strand
ggaaaucgugcuagagaga

SEQ ID NO: 1512112 - RNA, 19 nt, Homo sapiens
  misc_RNA (1)...(19): siRNA sense strand
ccaaauagugucuggcauu

SEQ ID NO: 1512113 - RNA, 19 nt, Homo sapiens
  misc_RNA (1)...(19): siRNA sense strand
gagauugcuugggauuuga

SEQ ID NO: 1512114 - RNA, 19 nt, Homo sapiens
  misc_RNA (1)...(19): siRNA sense strand
ggaacugccuugguguguu

SEQ ID NO: 1512115 - RNA, 19 nt, Homo sapiens
  misc_RNA (1)...(19): siRNA sense strand
agagauugcuugggauuug

SEQ ID NO: 1512116 - RNA, 19 nt, Homo sapiens
  misc_RNA (1)...(19): siRNA sense strand
gggauuugaugaagagaca

SEQ ID NO: 1512117 - RNA, 19 nt, Homo sapiens
  misc_RNA (1)...(19): siRNA sense strand
aauagugucuggcauuaca

SEQ ID NO: 1512118 - RNA, 19 nt, Homo sapiens
  misc_RNA (1)...(19): siRNA sense strand
uaggaaaucgugcuagaga

SEQ ID NO: 1512119 - RNA, 19 nt, Homo sapiens
  misc_RNA (1)...(19): siRNA sense strand
aguaggaaaucgugcuaga

SEQ ID NO: 1512120 - RNA, 19 nt, Homo sapiens
  misc_RNA (1)...(19): siRNA sense strand
gcuugggauuugaugaaga

SEQ ID NO: 1512121 - RNA, 19 nt, Homo sapiens
  misc_RNA (1)...(19): siRNA sense strand
gccuugguguguuuauuuc

SEQ ID NO: 1512122 - RNA, 19 nt, Homo sapiens
  misc_RNA (1)...(19): siRNA sense strand
ggaagggcagucccagaag

SEQ ID NO: 1512123 - RNA, 19 nt, Homo sapiens
  misc_RNA (1)...(19): siRNA sense strand
aaaucgugcuagagagaga

SEQ ID NO: 1512124 - RNA, 19 nt, Homo sapiens
  misc_RNA (1)...(19): siRNA sense strand
ggaccacgggacacuggaa

SEQ ID NO: 1512125 - RNA, 19 nt, Homo sapiens
  misc_RNA (1)...(19): siRNA sense strand
gcaagccaagaacaucaug

SEQ ID NO: 1512126 - RNA, 19 nt, Homo sapiens
  misc_RNA (1)...(19): siRNA sense strand
cuagagauugcuugggauu

SEQ ID NO: 1512127 - RNA, 19 nt, Homo sapiens
  misc_RNA (1)...(19): siRNA sense strand
gagagagagagcucaagca

SEQ ID NO: 1512128 - RNA, 19 nt, Homo sapiens
  misc_RNA (1)...(19): siRNA sense strand
ggcagucccagaagagaga

SEQ ID NO: 1512129 - RNA, 19 nt, Homo sapiens
  misc_RNA (1)...(19): siRNA sense strand
cagugccucugagcaggua

SEQ ID NO: 1512130 - RNA, 19 nt, Homo sapiens
  misc_RNA (1)...(19): siRNA sense strand
gcaaugaaaucuccaagug

SEQ ID NO: 1512131 - RNA, 19 nt, Homo sapiens
  misc_RNA (1)...(19): siRNA sense strand
gaagauucaucacuuagaa

SEQ ID NO: 1512132 - RNA, 19 nt, Homo sapiens
  misc_RNA (1)...(19): siRNA sense strand
gaaagaagaaagaggauaa

SEQ ID NO: 1512133 - RNA, 19 nt, Homo sapiens
  misc_RNA (1)...(19): siRNA sense strand
gaaaggcccugaaggacuu

SEQ ID NO: 1512134 - RNA, 19 nt, Homo sapiens
  misc_RNA (1)...(19): siRNA sense strand
gauugggccucgaagauua

SEQ ID NO: 1512135 - RNA, 19 nt, Homo sapiens
  misc_RNA (1)...(19): siRNA sense strand
gcaaaugucuuuagaucuc

SEQ ID NO: 1512136 - RNA, 19 nt, Homo sapiens
  misc_RNA (1)...(19): siRNA sense strand
gcaaagaggagaaugaaga

SEQ ID NO: 1512137 - RNA, 19 nt, Homo sapiens
  misc_RNA (1)...(19): siRNA sense strand
gaaugaagauccagaaagg

SEQ ID NO: 1512138 - RNA, 19 nt, Homo sapiens
  misc_RNA (1)...(19): siRNA sense strand
agacagaacuacuaacuuc

SEQ ID NO: 1512139 - RNA, 19 nt, Homo sapiens
  misc_RNA (1)...(19): siRNA sense strand
ccaaggagcucugaauugu

SEQ ID NO: 1512140 - RNA, 19 nt, Homo sapiens
  misc_RNA (1)...(19): siRNA sense strand
caagaacaguggagauuuc

SEQ ID NO: 1512141 - RNA, 19 nt, Homo sapiens
  misc_RNA (1)...(19): siRNA sense strand
cgaaagagaaggagaagaa

SEQ ID NO: 1512142 - RNA, 19 nt, Homo sapiens
  misc_RNA (1)...(19): siRNA sense strand
gcacacaaccuccgcuuug

SEQ ID NO: 1512143 - RNA, 19 nt, Homo sapiens
  misc_RNA (1)...(19): siRNA sense strand
gagcaaggccauccgagua

SEQ ID NO: 1512144 - RNA, 19 nt, Homo sapiens
  misc_RNA (1)...(19): siRNA sense strand
gaacuuggaagacagagaa

SEQ ID NO: 1512145 - RNA, 19 nt, Homo sapiens
  misc_RNA (1)...(19): siRNA sense strand
gaaacaugguggccugaga

SEQ ID NO: 1512146 - RNA, 19 nt, Homo sapiens
  misc_RNA (1)...(19): siRNA sense strand
aaagcaagguucacucauu

SEQ ID NO: 1512147 - RNA, 19 nt, Homo sapiens
  misc_RNA (1)...(19): siRNA sense strand
gaagcuauggaaacacuua

SEQ ID NO: 1512148 - RNA, 19 nt, Homo sapiens
  misc_RNA (1)...(19): siRNA sense strand
cagcaaaugucuuuagauc

SEQ ID NO: 1512149 - RNA, 19 nt, Homo sapiens
  misc_RNA (1)...(19): siRNA sense strand
gcacugaccguauccagaa

SEQ ID NO: 1512150 - RNA, 19 nt, Homo sapiens
  misc_RNA (1)...(19): siRNA sense strand
gcaauuggaucaguguaug

SEQ ID NO: 1512151 - RNA, 19 nt, Homo sapiens
  misc_RNA (1)...(19): siRNA sense strand
guacagacagaacuacuaa

SEQ ID NO: 1512152 - RNA, 19 nt, Homo sapiens
  misc_RNA (1)...(19): siRNA sense strand
gaaagaagagcgugaaagg

SEQ ID NO: 1512153 - RNA, 19 nt, Homo sapiens
  misc_RNA (1)...(19): siRNA sense strand
ccacgaagcuauggaaaca

SEQ ID NO: 1512154 - RNA, 19 nt, Homo sapiens
  misc_RNA (1)...(19): siRNA sense strand
ggauccagaugaugucuug

SEQ ID NO: 1512155 - RNA, 19 nt, Homo sapiens
  misc_RNA (1)...(19): siRNA sense strand
gaaagguacucugaaacau

SEQ ID NO: 1512156 - RNA, 19 nt, Homo sapiens
  misc_RNA (1)...(19): siRNA sense strand
gaugaugucuuggcagaug

SEQ ID NO: 1512157 - RNA, 19 nt, Homo sapiens
  misc_RNA (1)...(19): siRNA sense strand
uguaugauauggaugauga

SEQ ID NO: 1512158 - RNA, 19 nt, Homo sapiens
  misc_RNA (1)...(19): siRNA sense strand
gaaccacuccacaagauug

SEQ ID NO: 1512159 - RNA, 19 nt, Homo sapiens
  misc_RNA (1)...(19): siRNA sense strand
cagauguuguugaagauaa

SEQ ID NO: 1512160 - RNA, 19 nt, Homo sapiens
  misc_RNA (1)...(19): siRNA sense strand
ugauauggaugaugaugaa

SEQ ID NO: 1512161 - RNA, 19 nt, Homo sapiens
  misc_RNA (1)...(19): siRNA sense strand
gggagaaggguccugguua

SEQ ID NO: 1512162 - RNA, 19 nt, Homo sapiens
  misc_RNA (1)...(19): siRNA sense strand
cagccugaaucaauuaauu

SEQ ID NO: 1512163 - RNA, 19 nt, Homo sapiens
  misc_RNA (1)...(19): siRNA sense strand
ggagaaggguccugguuac

SEQ ID NO: 1512164 - RNA, 19 nt, Homo sapiens
  misc_RNA (1)...(19): siRNA sense strand
cuacuaacuucgccaagaa

SEQ ID NO: 1512165 - RNA, 19 nt, Homo sapiens
  misc_RNA (1)...(19): siRNA sense strand
gcccagaccaguacccuua

SEQ ID NO: 1512166 - RNA, 19 nt, Homo sapiens
  misc_RNA (1)...(19): siRNA sense strand
aaggacacauugagugaua

SEQ ID NO: 1512167 - RNA, 19 nt, Homo sapiens
  misc_RNA (1)...(19): siRNA sense strand
gaacuaaggacacauugag

SEQ ID NO: 1512168 - RNA, 19 nt, Homo sapiens
  misc_RNA (1)...(19): siRNA sense strand
gauaaagacaagcugauug

SEQ ID NO: 1512169 - RNA, 19 nt, Homo sapiens
  misc_RNA (1)...(19): siRNA sense strand
aaggagcucugaauuguga

SEQ ID NO: 1512170 - RNA, 19 nt, Homo sapiens
  misc_RNA (1)...(19): siRNA sense strand
ccaacuggcugcauuuaag

SEQ ID NO: 1512171 - RNA, 19 nt, Homo sapiens
  misc_RNA (1)...(19): siRNA sense strand
uaacuucgccaagaacuaa

SEQ ID NO: 1512172 - RNA, 19 nt, Homo sapiens
  misc_RNA (1)...(19): siRNA sense strand
ggaaagaagaaagaggaua

SEQ ID NO: 1512173 - RNA, 19 nt, Homo sapiens
  misc_RNA (1)...(19): siRNA sense strand
caagcugauugcuguguuu

SEQ ID NO: 1512174 - RNA, 19 nt, Homo sapiens
  misc_RNA (1)...(19): siRNA sense strand
ggaggauccugcagagugu

SEQ ID NO: 1512175 - RNA, 19 nt, Homo sapiens
  misc_RNA (1)...(19): siRNA sense strand
gucauuggcucucuuaaca

SEQ ID NO: 1512176 - RNA, 19 nt, Homo sapiens
  misc_RNA (1)...(19): siRNA sense strand
uggcagauguuguugaaga

SEQ ID NO: 1512177 - RNA, 19 nt, Homo sapiens
  misc_RNA (1)...(19): siRNA sense strand
aaagaaaggcccugaagga

SEQ ID NO: 1512178 - RNA, 19 nt, Homo sapiens
  misc_RNA (1)...(19): siRNA sense strand
gagaagaagagcuggagaa

SEQ ID NO: 1512179 - RNA, 19 nt, Homo sapiens
  misc_RNA (1)...(19): siRNA sense strand
uggaaaggcugagcagaaa

SEQ ID NO: 1512180 - RNA, 19 nt, Homo sapiens
  misc_RNA (1)...(19): siRNA sense strand
ccaaagggagcagcaauaa

SEQ ID NO: 1512181 - RNA, 19 nt, Homo sapiens
  misc_RNA (1)...(19): siRNA sense strand
cauuggcucucuuaacauu

SEQ ID NO: 1512182 - RNA, 19 nt, Homo sapiens
  misc_RNA (1)...(19): siRNA sense strand
gaaagagaaggagaagaaa

SEQ ID NO: 1512183 - RNA, 19 nt, Homo sapiens
  misc_RNA (1)...(19): siRNA sense strand
aagcaagguucacucauug

SEQ ID NO: 1512184 - RNA, 19 nt, Homo sapiens
  misc_RNA (1)...(19): siRNA sense strand
gcacaucaacuucagaucu

SEQ ID NO: 1512185 - RNA, 19 nt, Homo sapiens
  misc_RNA (1)...(19): siRNA sense strand
gcugauugcuguguuugaa

SEQ ID NO: 1512186 - RNA, 19 nt, Homo sapiens
  misc_RNA (1)...(19): siRNA sense strand
ggacagaauuuuggaggua

SEQ ID NO: 1512187 - RNA, 19 nt, Homo sapiens
  misc_RNA (1)...(19): siRNA sense strand
ggagguaaaugggagagau

SEQ ID NO: 1512188 - RNA, 19 nt, Homo sapiens
  misc_RNA (1)...(19): siRNA sense strand
ccgcagauccuguagacua

SEQ ID NO: 1512189 - RNA, 19 nt, Homo sapiens
  misc_RNA (1)...(19): siRNA sense strand
gugaaaggauuggagcaaa

SEQ ID NO: 1512190 - RNA, 19 nt, Homo sapiens
  misc_RNA (1)...(19): siRNA sense strand
gaagagcgugaaaggauug

SEQ ID NO: 1512191 - RNA, 19 nt, Homo sapiens
  misc_RNA (1)...(19): siRNA sense strand
aagaagagcuggagaaaau

SEQ ID NO: 1512192 - RNA, 19 nt, Homo sapiens
  misc_RNA (1)...(19): siRNA sense strand
caagaacuaaggacacauu

SEQ ID NO: 1512193 - RNA, 19 nt, Homo sapiens
  misc_RNA (1)...(19): siRNA sense strand
uagaggacauggaaaauaa

SEQ ID NO: 1512194 - RNA, 19 nt, Homo sapiens
  misc_RNA (1)...(19): siRNA sense strand
gacaagaacaguggagauu

SEQ ID NO: 1512195 - RNA, 19 nt, Homo sapiens
  misc_RNA (1)...(19): siRNA sense strand
gcugagauuuggaaagaag

SEQ ID NO: 1512196 - RNA, 19 nt, Homo sapiens
  misc_RNA (1)...(19): siRNA sense strand
gaucagcacaucaacuuca

SEQ ID NO: 1512197 - RNA, 19 nt, Homo sapiens
  misc_RNA (1)...(19): siRNA sense strand
caauguccauggagggaaa

SEQ ID NO: 1512198 - RNA, 19 nt, Homo sapiens
  misc_RNA (1)...(19): siRNA sense strand
caacaauguggaucucgua

SEQ ID NO: 1512199 - RNA, 19 nt, Homo sapiens
  misc_RNA (1)...(19): siRNA sense strand
gggaaucucuuuugggaaa

SEQ ID NO: 1512200 - RNA, 19 nt, Homo sapiens
  misc_RNA (1)...(19): siRNA sense strand
agaagagcgugaaaggauu

SEQ ID NO: 1512201 - RNA, 19 nt, Homo sapiens
  misc_RNA (1)...(19): siRNA sense strand
caagaaccacuccacaaga

SEQ ID NO: 1512202 - RNA, 19 nt, Homo sapiens
  misc_RNA (1)...(19): siRNA sense strand
acacuuaggcggucaaugu

SEQ ID NO: 1512203 - RNA, 19 nt, Homo sapiens
  misc_RNA (1)...(19): siRNA sense strand
gauggucgucugcgaauga

SEQ ID NO: 1512204 - RNA, 19 nt, Homo sapiens
  misc_RNA (1)...(19): siRNA sense strand
gguggcagaucuccgguau

SEQ ID NO: 1512205 - RNA, 19 nt, Homo sapiens
  misc_RNA (1)...(19): siRNA sense strand
gagaaugaagauccagaaa

SEQ ID NO: 1512206 - RNA, 19 nt, Homo sapiens
  misc_RNA (1)...(19): siRNA sense strand
caaacagaaaggucuauug

SEQ ID NO: 1512207 - RNA, 19 nt, Homo sapiens
  misc_RNA (1)...(19): siRNA sense strand
caagcgggagggacuauuu

SEQ ID NO: 1512208 - RNA, 19 nt, Homo sapiens
  misc_RNA (1)...(19): siRNA sense strand
gcaaggccauccgaguaug

SEQ ID NO: 1512209 - RNA, 19 nt, Homo sapiens
  misc_RNA (1)...(19): siRNA sense strand
agaaagagaccacuuagag

SEQ ID NO: 1512210 - RNA, 19 nt, Homo sapiens
  misc_RNA (1)...(19): siRNA sense strand
gcagauguuguugaagaua

SEQ ID NO: 1512211 - RNA, 19 nt, Homo sapiens
  misc_RNA (1)...(19): siRNA sense strand
ggagaaugaagauccagaa

SEQ ID NO: 1512212 - RNA, 19 nt, Homo sapiens
  misc_RNA (1)...(19): siRNA sense strand
caaagggagcagcaauaaa

SEQ ID NO: 1512213 - RNA, 19 nt, Homo sapiens
  misc_RNA (1)...(19): siRNA sense strand
ugaaugguguacagacaga

SEQ ID NO: 1512214 - RNA, 19 nt, Homo sapiens
  misc_RNA (1)...(19): siRNA sense strand
cauccacugucuccagaaa

SEQ ID NO: 1512215 - RNA, 19 nt, Homo sapiens
  misc_RNA (1)...(19): siRNA sense strand
gaaccaugcacaucagcaa

SEQ ID NO: 1512216 - RNA, 19 nt, Homo sapiens
  misc_RNA (1)...(19): siRNA sense strand
gaaauggaccccaauuaug

SEQ ID NO: 1512217 - RNA, 19 nt, Homo sapiens
  misc_RNA (1)...(19): siRNA sense strand
uauggaugaugaugaaaug

SEQ ID NO: 1512218 - RNA, 19 nt, Homo sapiens
  misc_RNA (1)...(19): siRNA sense strand
ggagcuagaggacauggaa

SEQ ID NO: 1512219 - RNA, 19 nt, Homo sapiens
  misc_RNA (1)...(19): siRNA sense strand
cgaagagcauggaccuugu

SEQ ID NO: 1512220 - RNA, 19 nt, Homo sapiens
  misc_RNA (1)...(19): siRNA sense strand
ggauugggccucgaagauu

SEQ ID NO: 1512221 - RNA, 19 nt, Homo sapiens
  misc_RNA (1)...(19): siRNA sense strand
gccaaggagcucugaauug

SEQ ID NO: 1512222 - RNA, 19 nt, Homo sapiens
  misc_RNA (1)...(19): siRNA sense strand
ggaaaagggcaaauugaaa

SEQ ID NO: 1512223 - RNA, 19 nt, Homo sapiens
  misc_RNA (1)...(19): siRNA sense strand
aagaaccacuccacaagau

SEQ ID NO: 1512224 - RNA, 19 nt, Homo sapiens
  misc_RNA (1)...(19): siRNA sense strand
gggaaaguccaaccacgaa

SEQ ID NO: 1512225 - RNA, 19 nt, Homo sapiens
  misc_RNA (1)...(19): siRNA sense strand
gaccagcugauugcaguua

SEQ ID NO: 1512226 - RNA, 19 nt, Homo sapiens
  misc_RNA (1)...(19): siRNA sense strand
uaccaaggcugggaggaaa

SEQ ID NO: 1512227 - RNA, 19 nt, Homo sapiens
  misc_RNA (1)...(19): siRNA sense strand
cuaaagacagcaaaucuca

SEQ ID NO: 1512228 - RNA, 19 nt, Homo sapiens
  misc_RNA (1)...(19): siRNA sense strand
ggacuaaagacagcaaauc

SEQ ID NO: 1512229 - RNA, 19 nt, Homo sapiens
  misc_RNA (1)...(19): siRNA sense strand
ugaagacgacgaaggaaga

SEQ ID NO: 1512230 - RNA, 19 nt, Homo sapiens
  misc_RNA (1)...(19): siRNA sense strand
gcaaugaaaucuccaagug

SEQ ID NO: 1512231 - RNA, 19 nt, Homo sapiens
  misc_RNA (1)...(19): siRNA sense strand
gaagauucaucacuuagaa

SEQ ID NO: 1512232 - RNA, 19 nt, Homo sapiens
  misc_RNA (1)...(19): siRNA sense strand
gaaagaagaaagaggauaa

SEQ ID NO: 1512233 - RNA, 19 nt, Homo sapiens
  misc_RNA (1)...(19): siRNA sense strand
gaaaggcccugaaggacuu

SEQ ID NO: 1512234 - RNA, 19 nt, Homo sapiens
  misc_RNA (1)...(19): siRNA sense strand
gauugggccucgaagauua

SEQ ID NO: 1512235 - RNA, 19 nt, Homo sapiens
  misc_RNA (1)...(19): siRNA sense strand
gcaaaugucuuuagaucuc

SEQ ID NO: 1512236 - RNA, 19 nt, Homo sapiens
  misc_RNA (1)...(19): siRNA sense strand
gcaaagaggagaaugaaga

SEQ ID NO: 1512237 - RNA, 19 nt, Homo sapiens
  misc_RNA (1)...(19): siRNA sense strand
gaaugaagauccagaaagg

SEQ ID NO: 1512238 - RNA, 19 nt, Homo sapiens
  misc_RNA (1)...(19): siRNA sense strand
agacagaacuacuaacuuc

SEQ ID NO: 1512239 - RNA, 19 nt, Homo sapiens
  misc_RNA (1)...(19): siRNA sense strand
ccaaggagcucugaauugu

SEQ ID NO: 1512240 - RNA, 19 nt, Homo sapiens
  misc_RNA (1)...(19): siRNA sense strand
caagaacaguggagauuuc

SEQ ID NO: 1512241 - RNA, 19 nt, Homo sapiens
  misc_RNA (1)...(19): siRNA sense strand
cgaaagagaaggagaagaa

SEQ ID NO: 1512242 - RNA, 19 nt, Homo sapiens
  misc_RNA (1)...(19): siRNA sense strand
gcacacaaccuccgcuuug

SEQ ID NO: 1512243 - RNA, 19 nt, Homo sapiens
  misc_RNA (1)...(19): siRNA sense strand
gagcaaggccauccgagua

SEQ ID NO: 1512244 - RNA, 19 nt, Homo sapiens
  misc_RNA (1)...(19): siRNA sense strand
gaacuuggaagacagagaa

SEQ ID NO: 1512245 - RNA, 19 nt, Homo sapiens
  misc_RNA (1)...(19): siRNA sense strand
gaaacaugguggccugaga

SEQ ID NO: 1512246 - RNA, 19 nt, Homo sapiens
  misc_RNA (1)...(19): siRNA sense strand
aaagcaagguucacucauu

SEQ ID NO: 1512247 - RNA, 19 nt, Homo sapiens
  misc_RNA (1)...(19): siRNA sense strand
gaagcuauggaaacacuua

SEQ ID NO: 1512248 - RNA, 19 nt, Homo sapiens
  misc_RNA (1)...(19): siRNA sense strand
cagcaaaugucuuuagauc

SEQ ID NO: 1512249 - RNA, 19 nt, Homo sapiens
  misc_RNA (1)...(19): siRNA sense strand
gcacugaccguauccagaa

SEQ ID NO: 1512250 - RNA, 19 nt, Homo sapiens
  misc_RNA (1)...(19): siRNA sense strand
gcaauuggaucaguguaug

SEQ ID NO: 1512251 - RNA, 19 nt, Homo sapiens
  misc_RNA (1)...(19): siRNA sense strand
guacagacagaacuacuaa

SEQ ID NO: 1512252 - RNA, 19 nt, Homo sapiens
  misc_RNA (1)...(19): siRNA sense strand
gaaagaagagcgugaaagg

SEQ ID NO: 1512253 - RNA, 19 nt, Homo sapiens
  misc_RNA (1)...(19): siRNA sense strand
ccacgaagcuauggaaaca

SEQ ID NO: 1512254 - RNA, 19 nt, Homo sapiens
  misc_RNA (1)...(19): siRNA sense strand
ggauccagaugaugucuug

SEQ ID NO: 1512255 - RNA, 19 nt, Homo sapiens
  misc_RNA (1)...(19): siRNA sense strand
gaaagguacucugaaacau

SEQ ID NO: 1512256 - RNA, 19 nt, Homo sapiens
  misc_RNA (1)...(19): siRNA sense strand
gaugaugucuuggcagaug

SEQ ID NO: 1512257 - RNA, 19 nt, Homo sapiens
  misc_RNA (1)...(19): siRNA sense strand
uguaugauauggaugauga

SEQ ID NO: 1512258 - RNA, 19 nt, Homo sapiens
  misc_RNA (1)...(19): siRNA sense strand
gaaccacuccacaagauug

SEQ ID NO: 1512259 - RNA, 19 nt, Homo sapiens
  misc_RNA (1)...(19): siRNA sense strand
cagauguuguugaagauaa

SEQ ID NO: 1512260 - RNA, 19 nt, Homo sapiens
  misc_RNA (1)...(19): siRNA sense strand
ugauauggaugaugaugaa

SEQ ID NO: 1512261 - RNA, 19 nt, Homo sapiens
  misc_RNA (1)...(19): siRNA sense strand
gggagaaggguccugguua

SEQ ID NO: 1512262 - RNA, 19 nt, Homo sapiens
  misc_RNA (1)...(19): siRNA sense strand
cagccugaaucaauuaauu

SEQ ID NO: 1512263 - RNA, 19 nt, Homo sapiens
  misc_RNA (1)...(19): siRNA sense strand
ggagaaggguccugguuac

SEQ ID NO: 1512264 - RNA, 19 nt, Homo sapiens
  misc_RNA (1)...(19): siRNA sense strand
cuacuaacuucgccaagaa

SEQ ID NO: 1512265 - RNA, 19 nt, Homo sapiens
  misc_RNA (1)...(19): siRNA sense strand
gcccagaccaguacccuua

SEQ ID NO: 1512266 - RNA, 19 nt, Homo sapiens
  misc_RNA (1)...(19): siRNA sense strand
aaggacacauugagugaua

SEQ ID NO: 1512267 - RNA, 19 nt, Homo sapiens
  misc_RNA (1)...(19): siRNA sense strand
gaacuaaggacacauugag

SEQ ID NO: 1512268 - RNA, 19 nt, Homo sapiens
  misc_RNA (1)...(19): siRNA sense strand
gauaaagacaagcugauug

SEQ ID NO: 1512269 - RNA, 19 nt, Homo sapiens
  misc_RNA (1)...(19): siRNA sense strand
aaggagcucugaauuguga

SEQ ID NO: 1512270 - RNA, 19 nt, Homo sapiens
  misc_RNA (1)...(19): siRNA sense strand
ccaacuggcugcauuuaag

SEQ ID NO: 1512271 - RNA, 19 nt, Homo sapiens
  misc_RNA (1)...(19): siRNA sense strand
uaacuucgccaagaacuaa

SEQ ID NO: 1512272 - RNA, 19 nt, Homo sapiens
  misc_RNA (1)...(19): siRNA sense strand
ggaaagaagaaagaggaua

SEQ ID NO: 1512273 - RNA, 19 nt, Homo sapiens
  misc_RNA (1)...(19): siRNA sense strand
caagcugauugcuguguuu

SEQ ID NO: 1512274 - RNA, 19 nt, Homo sapiens
  misc_RNA (1)...(19): siRNA sense strand
ggaggauccugcagagugu

SEQ ID NO: 1512275 - RNA, 19 nt, Homo sapiens
  misc_RNA (1)...(19): siRNA sense strand
gucauuggcucucuuaaca

SEQ ID NO: 1512276 - RNA, 19 nt, Homo sapiens
  misc_RNA (1)...(19): siRNA sense strand
uggcagauguuguugaaga

SEQ ID NO: 1512277 - RNA, 19 nt, Homo sapiens
  misc_RNA (1)...(19): siRNA sense strand
aaagaaaggcccugaagga

SEQ ID NO: 1512278 - RNA, 19 nt, Homo sapiens
  misc_RNA (1)...(19): siRNA sense strand
gagaagaagagcuggagaa

SEQ ID NO: 1512279 - RNA, 19 nt, Homo sapiens
  misc_RNA (1)...(19): siRNA sense strand
uggaaaggcugagcagaaa

SEQ ID NO: 1512280 - RNA, 19 nt, Homo sapiens
  misc_RNA (1)...(19): siRNA sense strand
ccaaagggagcagcaauaa

SEQ ID NO: 1512281 - RNA, 19 nt, Homo sapiens
  misc_RNA (1)...(19): siRNA sense strand
cauuggcucucuuaacauu

SEQ ID NO: 1512282 - RNA, 19 nt, Homo sapiens
  misc_RNA (1)...(19): siRNA sense strand
gaaagagaaggagaagaaa

SEQ ID NO: 1512283 - RNA, 19 nt, Homo sapiens
  misc_RNA (1)...(19): siRNA sense strand
aagcaagguucacucauug

SEQ ID NO: 1512284 - RNA, 19 nt, Homo sapiens
  misc_RNA (1)...(19): siRNA sense strand
gcacaucaacuucagaucu

SEQ ID NO: 1512285 - RNA, 19 nt, Homo sapiens
  misc_RNA (1)...(19): siRNA sense strand
gcugauugcuguguuugaa

SEQ ID NO: 1512286 - RNA, 19 nt, Homo sapiens
  misc_RNA (1)...(19): siRNA sense strand
ggacagaauuuuggaggua

SEQ ID NO: 1512287 - RNA, 19 nt, Homo sapiens
  misc_RNA (1)...(19): siRNA sense strand
ggagguaaaugggagagau

SEQ ID NO: 1512288 - RNA, 19 nt, Homo sapiens
  misc_RNA (1)...(19): siRNA sense strand
ccgcagauccuguagacua

SEQ ID NO: 1512289 - RNA, 19 nt, Homo sapiens
  misc_RNA (1)...(19): siRNA sense strand
gugaaaggauuggagcaaa

SEQ ID NO: 1512290 - RNA, 19 nt, Homo sapiens
  misc_RNA (1)...(19): siRNA sense strand
gaagagcgugaaaggauug

SEQ ID NO: 1512291 - RNA, 19 nt, Homo sapiens
  misc_RNA (1)...(19): siRNA sense strand
aagaagagcuggagaaaau

SEQ ID NO: 1512292 - RNA, 19 nt, Homo sapiens
  misc_RNA (1)...(19): siRNA sense strand
caagaacuaaggacacauu

SEQ ID NO: 1512293 - RNA, 19 nt, Homo sapiens
  misc_RNA (1)...(19): siRNA sense strand
uagaggacauggaaaauaa

SEQ ID NO: 1512294 - RNA, 19 nt, Homo sapiens
  misc_RNA (1)...(19): siRNA sense strand
gacaagaacaguggagauu

SEQ ID NO: 1512295 - RNA, 19 nt, Homo sapiens
  misc_RNA (1)...(19): siRNA sense strand
gcugagauuuggaaagaag

SEQ ID NO: 1512296 - RNA, 19 nt, Homo sapiens
  misc_RNA (1)...(19): siRNA sense strand
gaucagcacaucaacuuca

SEQ ID NO: 1512297 - RNA, 19 nt, Homo sapiens
  misc_RNA (1)...(19): siRNA sense strand
caauguccauggagggaaa

SEQ ID NO: 1512298 - RNA, 19 nt, Homo sapiens
  misc_RNA (1)...(19): siRNA sense strand
caacaauguggaucucgua

SEQ ID NO: 1512299 - RNA, 19 nt, Homo sapiens
  misc_RNA (1)...(19): siRNA sense strand
gggaaucucuuuugggaaa

SEQ ID NO: 1512300 - RNA, 19 nt, Homo sapiens
  misc_RNA (1)...(19): siRNA sense strand
agaagagcgugaaaggauu

SEQ ID NO: 1512301 - RNA, 19 nt, Homo sapiens
  misc_RNA (1)...(19): siRNA sense strand
caagaaccacuccacaaga

SEQ ID NO: 1512302 - RNA, 19 nt, Homo sapiens
  misc_RNA (1)...(19): siRNA sense strand
acacuuaggcggucaaugu

SEQ ID NO: 1512303 - RNA, 19 nt, Homo sapiens
  misc_RNA (1)...(19): siRNA sense strand
gauggucgucugcgaauga

SEQ ID NO: 1512304 - RNA, 19 nt, Homo sapiens
  misc_RNA (1)...(19): siRNA sense strand
gguggcagaucuccgguau

SEQ ID NO: 1512305 - RNA, 19 nt, Homo sapiens
  misc_RNA (1)...(19): siRNA sense strand
gagaaugaagauccagaaa

SEQ ID NO: 1512306 - RNA, 19 nt, Homo sapiens
  misc_RNA (1)...(19): siRNA sense strand
caaacagaaaggucuauug

SEQ ID NO: 1512307 - RNA, 19 nt, Homo sapiens
  misc_RNA (1)...(19): siRNA sense strand
caagcgggagggacuauuu

SEQ ID NO: 1512308 - RNA, 19 nt, Homo sapiens
  misc_RNA (1)...(19): siRNA sense strand
gcaaggccauccgaguaug

SEQ ID NO: 1512309 - RNA, 19 nt, Homo sapiens
  misc_RNA (1)...(19): siRNA sense strand
agaaagagaccacuuagag

SEQ ID NO: 1512310 - RNA, 19 nt, Homo sapiens
  misc_RNA (1)...(19): siRNA sense strand
gcagauguuguugaagaua

SEQ ID NO: 1512311 - RNA, 19 nt, Homo sapiens
  misc_RNA (1)...(19): siRNA sense strand
ggagaaugaagauccagaa

SEQ ID NO: 1512312 - RNA, 19 nt, Homo sapiens
  misc_RNA (1)...(19): siRNA sense strand
caaagggagcagcaauaaa

SEQ ID NO: 1512313 - RNA, 19 nt, Homo sapiens
  misc_RNA (1)...(19): siRNA sense strand
ugaaugguguacagacaga

SEQ ID NO: 1512314 - RNA, 19 nt, Homo sapiens
  misc_RNA (1)...(19): siRNA sense strand
cauccacugucuccagaaa

SEQ ID NO: 1512315 - RNA, 19 nt, Homo sapiens
  misc_RNA (1)...(19): siRNA sense strand
gaaccaugcacaucagcaa

SEQ ID NO: 1512316 - RNA, 19 nt, Homo sapiens
  misc_RNA (1)...(19): siRNA sense strand
gaaauggaccccaauuaug

SEQ ID NO: 1512317 - RNA, 19 nt, Homo sapiens
  misc_RNA (1)...(19): siRNA sense strand
uauggaugaugaugaaaug

SEQ ID NO: 1512318 - RNA, 19 nt, Homo sapiens
  misc_RNA (1)...(19): siRNA sense strand
ggagcuagaggacauggaa

SEQ ID NO: 1512319 - RNA, 19 nt, Homo sapiens
  misc_RNA (1)...(19): siRNA sense strand
cgaagagcauggaccuugu

SEQ ID NO: 1512320 - RNA, 19 nt, Homo sapiens
  misc_RNA (1)...(19): siRNA sense strand
ggauugggccucgaagauu

SEQ ID NO: 1512321 - RNA, 19 nt, Homo sapiens
  misc_RNA (1)...(19): siRNA sense strand
gccaaggagcucugaauug

SEQ ID NO: 1512322 - RNA, 19 nt, Homo sapiens
  misc_RNA (1)...(19): siRNA sense strand
ggaaaagggcaaauugaaa

SEQ ID NO: 1512323 - RNA, 19 nt, Homo sapiens
  misc_RNA (1)...(19): siRNA sense strand
aagaaccacuccacaagau

SEQ ID NO: 1512324 - RNA, 19 nt, Homo sapiens
  misc_RNA (1)...(19): siRNA sense strand
gggaaaguccaaccacgaa

SEQ ID NO: 1512325 - RNA, 19 nt, Homo sapiens
  misc_RNA (1)...(19): siRNA sense strand
gaccagcugauugcaguua

SEQ ID NO: 1512326 - RNA, 19 nt, Homo sapiens
  misc_RNA (1)...(19): siRNA sense strand
uaccaaggcugggaggaaa

SEQ ID NO: 1512327 - RNA, 19 nt, Homo sapiens
  misc_RNA (1)...(19): siRNA sense strand
cuaaagacagcaaaucuca

SEQ ID NO: 1512328 - RNA, 19 nt, Homo sapiens
  misc_RNA (1)...(19): siRNA sense strand
ggacuaaagacagcaaauc

SEQ ID NO: 1512329 - RNA, 19 nt, Homo sapiens
  misc_RNA (1)...(19): siRNA sense strand
ugaagacgacgaaggaaga

SEQ ID NO: 1512330 - RNA, 19 nt, Homo sapiens
  misc_RNA (1)...(19): siRNA sense strand
gaacugcucucaagucuuu

SEQ ID NO: 1512331 - RNA, 19 nt, Homo sapiens
  misc_RNA (1)...(19): siRNA sense strand
ugaaauggcugcugauaua

SEQ ID NO: 1512332 - RNA, 19 nt, Homo sapiens
  misc_RNA (1)...(19): siRNA sense strand
caagagagaucaacaacaa

SEQ ID NO: 1512333 - RNA, 19 nt, Homo sapiens
  misc_RNA (1)...(19): siRNA sense strand
agaaauaucugcucaaaga

SEQ ID NO: 1512334 - RNA, 19 nt, Homo sapiens
  misc_RNA (1)...(19): siRNA sense strand
caaauaugcugcuuucuug

SEQ ID NO: 1512335 - RNA, 19 nt, Homo sapiens
  misc_RNA (1)...(19): siRNA sense strand
gaugauggcaguauuauaa

SEQ ID NO: 1512336 - RNA, 19 nt, Homo sapiens
  misc_RNA (1)...(19): siRNA sense strand
uaugagaugucccaaguua

SEQ ID NO: 1512337 - RNA, 19 nt, Homo sapiens
  misc_RNA (1)...(19): siRNA sense strand
gaaaggaaaucucauuggu

SEQ ID NO: 1512338 - RNA, 19 nt, Homo sapiens
  misc_RNA (1)...(19): siRNA sense strand
uaacaaauaugcugcuuuc

SEQ ID NO: 1512339 - RNA, 19 nt, Homo sapiens
  misc_RNA (1)...(19): siRNA sense strand
aaacaugccucuuuucuua

SEQ ID NO: 1512340 - RNA, 19 nt, Homo sapiens
  misc_RNA (1)...(19): siRNA sense strand
ccaaugcaacuuugaaaua

SEQ ID NO: 1512341 - RNA, 19 nt, Homo sapiens
  misc_RNA (1)...(19): siRNA sense strand
ccaggacacuauaauguuu

SEQ ID NO: 1512342 - RNA, 19 nt, Homo sapiens
  misc_RNA (1)...(19): siRNA sense strand
gcuaugauguucacaaauc

SEQ ID NO: 1512343 - RNA, 19 nt, Homo sapiens
  misc_RNA (1)...(19): siRNA sense strand
ucaaagugcuguucgauuc

SEQ ID NO: 1512344 - RNA, 19 nt, Homo sapiens
  misc_RNA (1)...(19): siRNA sense strand
gaagacaagaguuaccuaa

SEQ ID NO: 1512345 - RNA, 19 nt, Homo sapiens
  misc_RNA (1)...(19): siRNA sense strand
ccacgacuauaugaaauaa

SEQ ID NO: 1512346 - RNA, 19 nt, Homo sapiens
  misc_RNA (1)...(19): siRNA sense strand
ggaaaucucauuggugaaa

SEQ ID NO: 1512347 - RNA, 19 nt, Homo sapiens
  misc_RNA (1)...(19): siRNA sense strand
guucacaaaucauaugaga

SEQ ID NO: 1512348 - RNA, 19 nt, Homo sapiens
  misc_RNA (1)...(19): siRNA sense strand
ucacaaaucauaugagaug

SEQ ID NO: 1512349 - RNA, 19 nt, Homo sapiens
  misc_RNA (1)...(19): siRNA sense strand
cauaugagaugucccaagu

SEQ ID NO: 1512350 - RNA, 19 nt, Homo sapiens
  misc_RNA (1)...(19): siRNA sense strand
gcauuugguucuucuguuc

SEQ ID NO: 1512351 - RNA, 19 nt, Homo sapiens
  misc_RNA (1)...(19): siRNA sense strand
gaagaguccaaagagauua

SEQ ID NO: 1512352 - RNA, 19 nt, Homo sapiens
  misc_RNA (1)...(19): siRNA sense strand
cagcuaugauguucacaaa

SEQ ID NO: 1512353 - RNA, 19 nt, Homo sapiens
  misc_RNA (1)...(19): siRNA sense strand
uuaccuaacuugacuaaca

SEQ ID NO: 1512354 - RNA, 19 nt, Homo sapiens
  misc_RNA (1)...(19): siRNA sense strand
gcucaaagaaacagaagaa

SEQ ID NO: 1512355 - RNA, 19 nt, Homo sapiens
  misc_RNA (1)...(19): siRNA sense strand
gaaauggcugcugauauaa

SEQ ID NO: 1512356 - RNA, 19 nt, Homo sapiens
  misc_RNA (1)...(19): siRNA sense strand
uaccagaaguguugauguu

SEQ ID NO: 1512357 - RNA, 19 nt, Homo sapiens
  misc_RNA (1)...(19): siRNA sense strand
uaugccaccucguaguuua

SEQ ID NO: 1512358 - RNA, 19 nt, Homo sapiens
  misc_RNA (1)...(19): siRNA sense strand
ugaauuaccuaacuugacu

SEQ ID NO: 1512359 - RNA, 19 nt, Homo sapiens
  misc_RNA (1)...(19): siRNA sense strand
cccauacccuuauuuguga

SEQ ID NO: 1512360 - RNA, 19 nt, Homo sapiens
  misc_RNA (1)...(19): siRNA sense strand
aaauauaugccaccucgua

SEQ ID NO: 1512361 - RNA, 19 nt, Homo sapiens
  misc_RNA (1)...(19): siRNA sense strand
ucaagaucaccuacacuua

SEQ ID NO: 1512362 - RNA, 19 nt, Homo sapiens
  misc_RNA (1)...(19): siRNA sense strand
gaaaucucauuggugaaau

SEQ ID NO: 1512363 - RNA, 19 nt, Homo sapiens
  misc_RNA (1)...(19): siRNA sense strand
gaagaaaagugcauuuggu

SEQ ID NO: 1512364 - RNA, 19 nt, Homo sapiens
  misc_RNA (1)...(19): siRNA sense strand
caaugcaacuuugaaauac

SEQ ID NO: 1512365 - RNA, 19 nt, Homo sapiens
  misc_RNA (1)...(19): siRNA sense strand
guggaaagucauaugguua

SEQ ID NO: 1512366 - RNA, 19 nt, Homo sapiens
  misc_RNA (1)...(19): siRNA sense strand
ugagauaucccaggagaaa

SEQ ID NO: 1512367 - RNA, 19 nt, Homo sapiens
  misc_RNA (1)...(19): siRNA sense strand
gaaauaucugcucaaagaa

SEQ ID NO: 1512368 - RNA, 19 nt, Homo sapiens
  misc_RNA (1)...(19): siRNA sense strand
uaaugaugauggcaguauu

SEQ ID NO: 1512369 - RNA, 19 nt, Homo sapiens
  misc_RNA (1)...(19): siRNA sense strand
gauguuccuucaauuccuu

SEQ ID NO: 1512370 - RNA, 19 nt, Homo sapiens
  misc_RNA (1)...(19): siRNA sense strand
ugaagaguccaaagagauu

SEQ ID NO: 1512371 - RNA, 19 nt, Homo sapiens
  misc_RNA (1)...(19): siRNA sense strand
acaaauaugcugcuuucuu

SEQ ID NO: 1512372 - RNA, 19 nt, Homo sapiens
  misc_RNA (1)...(19): siRNA sense strand
agacaagaguuaccuaaaa

SEQ ID NO: 1512373 - RNA, 19 nt, Homo sapiens
  misc_RNA (1)...(19): siRNA sense strand
caagaucaccuacacuuac

SEQ ID NO: 1512374 - RNA, 19 nt, Homo sapiens
  misc_RNA (1)...(19): siRNA sense strand
ggacuuucuucucgguuca

SEQ ID NO: 1512375 - RNA, 19 nt, Homo sapiens
  misc_RNA (1)...(19): siRNA sense strand
ucauuuaucccacgacuau

SEQ ID NO: 1512376 - RNA, 19 nt, Homo sapiens
  misc_RNA (1)...(19): siRNA sense strand
gaaagucauaugguuauca

SEQ ID NO: 1512377 - RNA, 19 nt, Homo sapiens
  misc_RNA (1)...(19): siRNA sense strand
ggaaagucauaugguuauc

SEQ ID NO: 1512378 - RNA, 19 nt, Homo sapiens
  misc_RNA (1)...(19): siRNA sense strand
ugucccaaguuaagcauaa

SEQ ID NO: 1512379 - RNA, 19 nt, Homo sapiens
  misc_RNA (1)...(19): siRNA sense strand
ccaggcagcuaugauguuc

SEQ ID NO: 1512380 - RNA, 19 nt, Homo sapiens
  misc_RNA (1)...(19): siRNA sense strand
gcuccuggcacauauaaug

SEQ ID NO: 1512381 - RNA, 19 nt, Homo sapiens
  misc_RNA (1)...(19): siRNA sense strand
ggaagacaagaguuaccua

SEQ ID NO: 1512382 - RNA, 19 nt, Homo sapiens
  misc_RNA (1)...(19): siRNA sense strand
ggacaucaggacagaggaa

SEQ ID NO: 1512383 - RNA, 19 nt, Homo sapiens
  misc_RNA (1)...(19): siRNA sense strand
gaugaauuaccuaacuuga

SEQ ID NO: 1512384 - RNA, 19 nt, Homo sapiens
  misc_RNA (1)...(19): siRNA sense strand
uguggaaagucauaugguu

SEQ ID NO: 1512385 - RNA, 19 nt, Homo sapiens
  misc_RNA (1)...(19): siRNA sense strand
ggugaaauggcugcugaua

SEQ ID NO: 1512386 - RNA, 19 nt, Homo sapiens
  misc_RNA (1)...(19): siRNA sense strand
cuaugaaaguaccagauau

SEQ ID NO: 1512387 - RNA, 19 nt, Homo sapiens
  misc_RNA (1)...(19): siRNA sense strand
uaccuaacuugacuaacaa

SEQ ID NO: 1512388 - RNA, 19 nt, Homo sapiens
  misc_RNA (1)...(19): siRNA sense strand
aaggaaaucuugccccaua

SEQ ID NO: 1512389 - RNA, 19 nt, Homo sapiens
  misc_RNA (1)...(19): siRNA sense strand
caccuacacuuaccagaag

SEQ ID NO: 1512390 - RNA, 19 nt, Homo sapiens
  misc_RNA (1)...(19): siRNA sense strand
aaugaugauggcaguauua

SEQ ID NO: 1512391 - RNA, 19 nt, Homo sapiens
  misc_RNA (1)...(19): siRNA sense strand
aguaugauauaguccagaa

SEQ ID NO: 1512392 - RNA, 19 nt, Homo sapiens
  misc_RNA (1)...(19): siRNA sense strand
aauggcugcugauauaaug

SEQ ID NO: 1512393 - RNA, 19 nt, Homo sapiens
  misc_RNA (1)...(19): siRNA sense strand
gugugggaauuucugauga

SEQ ID NO: 1512394 - RNA, 19 nt, Homo sapiens
  misc_RNA (1)...(19): siRNA sense strand
uauaauugccaguguuaga

SEQ ID NO: 1512395 - RNA, 19 nt, Homo sapiens
  misc_RNA (1)...(19): siRNA sense strand
gguccuggauuuuauaaug

SEQ ID NO: 1512396 - RNA, 19 nt, Homo sapiens
  misc_RNA (1)...(19): siRNA sense strand
gugaaauggcugcugauau

SEQ ID NO: 1512397 - RNA, 19 nt, Homo sapiens
  misc_RNA (1)...(19): siRNA sense strand
gauguucacaaaucauaug

SEQ ID NO: 1512398 - RNA, 19 nt, Homo sapiens
  misc_RNA (1)...(19): siRNA sense strand
gcaccauuucuuucuuuga

SEQ ID NO: 1512399 - RNA, 19 nt, Homo sapiens
  misc_RNA (1)...(19): siRNA sense strand
acuaugaaaguaccagaua

SEQ ID NO: 1512400 - RNA, 19 nt, Homo sapiens
  misc_RNA (1)...(19): siRNA sense strand
ucaccuacacuuaccagaa

SEQ ID NO: 1512401 - RNA, 19 nt, Homo sapiens
  misc_RNA (1)...(19): siRNA sense strand
cagaaagaagcuugugcua

SEQ ID NO: 1512402 - RNA, 19 nt, Homo sapiens
  misc_RNA (1)...(19): siRNA sense strand
gacacuauaauguuucaga

SEQ ID NO: 1512403 - RNA, 19 nt, Homo sapiens
  misc_RNA (1)...(19): siRNA sense strand
ugagaugucccaaguuaag

SEQ ID NO: 1512404 - RNA, 19 nt, Homo sapiens
  misc_RNA (1)...(19): siRNA sense strand
accauugccucuagcauug

SEQ ID NO: 1512405 - RNA, 19 nt, Homo sapiens
  misc_RNA (1)...(19): siRNA sense strand
caucaagagagaucaacaa

SEQ ID NO: 1512406 - RNA, 19 nt, Homo sapiens
  misc_RNA (1)...(19): siRNA sense strand
gcagcuaugauguucacaa

SEQ ID NO: 1512407 - RNA, 19 nt, Homo sapiens
  misc_RNA (1)...(19): siRNA sense strand
caaagaaacagaagaaaag

SEQ ID NO: 1512408 - RNA, 19 nt, Homo sapiens
  misc_RNA (1)...(19): siRNA sense strand
acuauaauugccaguguua

SEQ ID NO: 1512409 - RNA, 19 nt, Homo sapiens
  misc_RNA (1)...(19): siRNA sense strand
gaaccucgaacugcucuca

SEQ ID NO: 1512410 - RNA, 19 nt, Homo sapiens
  misc_RNA (1)...(19): siRNA sense strand
ccaccugcuugugacagua

SEQ ID NO: 1512411 - RNA, 19 nt, Homo sapiens
  misc_RNA (1)...(19): siRNA sense strand
cccagcaacauaugagaua

SEQ ID NO: 1512412 - RNA, 19 nt, Homo sapiens
  misc_RNA (1)...(19): siRNA sense strand
guacacuugguccagcaua

SEQ ID NO: 1512413 - RNA, 19 nt, Homo sapiens
  misc_RNA (1)...(19): siRNA sense strand
gcagcauacaauccuguuu

SEQ ID NO: 1512414 - RNA, 19 nt, Homo sapiens
  misc_RNA (1)...(19): siRNA sense strand
ugugggaauuucugaugaa

SEQ ID NO: 1512415 - RNA, 19 nt, Homo sapiens
  misc_RNA (1)...(19): siRNA sense strand
cccuggaccugcugauuau

SEQ ID NO: 1512416 - RNA, 19 nt, Homo sapiens
  misc_RNA (1)...(19): siRNA sense strand
cacaggacaucaggacaga

SEQ ID NO: 1512417 - RNA, 19 nt, Homo sapiens
  misc_RNA (1)...(19): siRNA sense strand
uaacaucaagagagaucaa

SEQ ID NO: 1512418 - RNA, 19 nt, Homo sapiens
  misc_RNA (1)...(19): siRNA sense strand
ccaggacaguaugauauag

SEQ ID NO: 1512419 - RNA, 19 nt, Homo sapiens
  misc_RNA (1)...(19): siRNA sense strand
caaagugcuguucgauuca

SEQ ID NO: 1512420 - RNA, 19 nt, Homo sapiens
  misc_RNA (1)...(19): siRNA sense strand
uaccauugccucuagcauu

SEQ ID NO: 1512421 - RNA, 19 nt, Homo sapiens
  misc_RNA (1)...(19): siRNA sense strand
uauaugccaccucguaguu

SEQ ID NO: 1512422 - RNA, 19 nt, Homo sapiens
  misc_RNA (1)...(19): siRNA sense strand
uaugaaaguaccagauaug

SEQ ID NO: 1512423 - RNA, 19 nt, Homo sapiens
  misc_RNA (1)...(19): siRNA sense strand
caucaggacagaggaaaug

SEQ ID NO: 1512424 - RNA, 19 nt, Homo sapiens
  misc_RNA (1)...(19): siRNA sense strand
uaauugccaguguuagaaa

SEQ ID NO: 1512425 - RNA, 19 nt, Homo sapiens
  misc_RNA (1)...(19): siRNA sense strand
aagaaaggaaaucucauug

SEQ ID NO: 1512426 - RNA, 19 nt, Homo sapiens
  misc_RNA (1)...(19): siRNA sense strand
acuccucggugccuagaaa

SEQ ID NO: 1512427 - RNA, 19 nt, Homo sapiens
  misc_RNA (1)...(19): siRNA sense strand
cccaaguuaagcauaaaua

SEQ ID NO: 1512428 - RNA, 19 nt, Homo sapiens
  misc_RNA (1)...(19): siRNA sense strand
ucugaugaauuaccuaacu

SEQ ID NO: 1512429 - RNA, 19 nt, Homo sapiens
  misc_RNA (1)...(19): siRNA sense strand
gaauuaccuaacuugacua

SEQ ID NO: 1512430 - RNA, 19 nt, Homo sapiens
  misc_RNA (1)...(19): siRNA sense strand
ccaaacaggugcaauuaaa

SEQ ID NO: 1512431 - RNA, 19 nt, Homo sapiens
  misc_RNA (1)...(19): siRNA sense strand
gaagucugguacauuaaua

SEQ ID NO: 1512432 - RNA, 19 nt, Homo sapiens
  misc_RNA (1)...(19): siRNA sense strand
agaaagagauccugaacuu

SEQ ID NO: 1512433 - RNA, 19 nt, Homo sapiens
  misc_RNA (1)...(19): siRNA sense strand
ccggaagucugguacauua

SEQ ID NO: 1512434 - RNA, 19 nt, Homo sapiens
  misc_RNA (1)...(19): siRNA sense strand
gcauaucucuacccacuug

SEQ ID NO: 1512435 - RNA, 19 nt, Homo sapiens
  misc_RNA (1)...(19): siRNA sense strand
gggcugaagcugcuaauuu

SEQ ID NO: 1512436 - RNA, 19 nt, Homo sapiens
  misc_RNA (1)...(19): siRNA sense strand
ggacaaguguaaagugaag

SEQ ID NO: 1512437 - RNA, 19 nt, Homo sapiens
  misc_RNA (1)...(19): siRNA sense strand
ggcugaagcugcuaauuug

SEQ ID NO: 1512438 - RNA, 19 nt, Homo sapiens
  misc_RNA (1)...(19): siRNA sense strand
caggacaaguguaaaguga

SEQ ID NO: 1512439 - RNA, 19 nt, Homo sapiens
  misc_RNA (1)...(19): siRNA sense strand
cuaaaccaaugccaaagaa

SEQ ID NO: 1512440 - RNA, 19 nt, Homo sapiens
  misc_RNA (1)...(19): siRNA sense strand
ggaugcagccgacuaauag

SEQ ID NO: 1512441 - RNA, 19 nt, Homo sapiens
  misc_RNA (1)...(19): siRNA sense strand
gcguacaguuccucuacua

SEQ ID NO: 1512442 - RNA, 19 nt, Homo sapiens
  misc_RNA (1)...(19): siRNA sense strand
gcagaaagaggcacgaaca

SEQ ID NO: 1512443 - RNA, 19 nt, Homo sapiens
  misc_RNA (1)...(19): siRNA sense strand
uagcauuucuagucaguau

SEQ ID NO: 1512444 - RNA, 19 nt, Homo sapiens
  misc_RNA (1)...(19): siRNA sense strand
gaagaaagagauccugaac

SEQ ID NO: 1512445 - RNA, 19 nt, Homo sapiens
  misc_RNA (1)...(19): siRNA sense strand
ggaagucugguacauuaau

SEQ ID NO: 1512446 - RNA, 19 nt, Homo sapiens
  misc_RNA (1)...(19): siRNA sense strand
ugaagcugcuaauuuggaa

SEQ ID NO: 1512447 - RNA, 19 nt, Homo sapiens
  misc_RNA (1)...(19): siRNA sense strand
ucuacccacuuguacauaa

SEQ ID NO: 1512448 - RNA, 19 nt, Homo sapiens
  misc_RNA (1)...(19): siRNA sense strand
gugcagcuguugcucuuuc

SEQ ID NO: 1512449 - RNA, 19 nt, Homo sapiens
  misc_RNA (1)...(19): siRNA sense strand
ucagcauggugcccaaauu

SEQ ID NO: 1512450 - RNA, 19 nt, Homo sapiens
  misc_RNA (1)...(19): siRNA sense strand
guacauaauucagcaucca

SEQ ID NO: 1512451 - RNA, 19 nt, Homo sapiens
  misc_RNA (1)...(19): siRNA sense strand
cggaugcagccgacuaaua

SEQ ID NO: 1512452 - RNA, 19 nt, Homo sapiens
  misc_RNA (1)...(19): siRNA sense strand
guuuauccuucuacaauca

SEQ ID NO: 1512453 - RNA, 19 nt, Homo sapiens
  misc_RNA (1)...(19): siRNA sense strand
cagcgcacccucugcauau

SEQ ID NO: 1512454 - RNA, 19 nt, Homo sapiens
  misc_RNA (1)...(19): siRNA sense strand
ucagaaaguguguuugugu

SEQ ID NO: 1512455 - RNA, 19 nt, Homo sapiens
  misc_RNA (1)...(19): siRNA sense strand
gcauuucuagucaguaugu

SEQ ID NO: 1512456 - RNA, 19 nt, Homo sapiens
  misc_RNA (1)...(19): siRNA sense strand
gaucggucgucgcuucagu

SEQ ID NO: 1512457 - RNA, 19 nt, Homo sapiens
  misc_RNA (1)...(19): siRNA sense strand
ccaaagaacaaacgcaaac

SEQ ID NO: 1512458 - RNA, 19 nt, Homo sapiens
  misc_RNA (1)...(19): siRNA sense strand
gcuaaggacauuuucuaua

SEQ ID NO: 1512459 - RNA, 19 nt, Homo sapiens
  misc_RNA (1)...(19): siRNA sense strand
ccagcgcacccucugcaua

SEQ ID NO: 1512460 - RNA, 19 nt, Homo sapiens
  misc_RNA (1)...(19): siRNA sense strand
caaaguguugcguacaguu

SEQ ID NO: 1512461 - RNA, 19 nt, Homo sapiens
  misc_RNA (1)...(19): siRNA sense strand
ucccaaacaggugcaauua

SEQ ID NO: 1512462 - RNA, 19 nt, Homo sapiens
  misc_RNA (1)...(19): siRNA sense strand
ugaagaaagagauccugaa

SEQ ID NO: 1512463 - RNA, 19 nt, Homo sapiens
  misc_RNA (1)...(19): siRNA sense strand
ucuauaagaacuccuuguu

SEQ ID NO: 1512464 - RNA, 19 nt, Homo sapiens
  misc_RNA (1)...(19): siRNA sense strand
caaacgcaaacucaggaaa

SEQ ID NO: 1512465 - RNA, 19 nt, Homo sapiens
  misc_RNA (1)...(19): siRNA sense strand
aaaccaaugccaaagaaca

SEQ ID NO: 1512466 - RNA, 19 nt, Homo sapiens
  misc_RNA (1)...(19): siRNA sense strand
cagcauggugcccaaauuc

SEQ ID NO: 1512467 - RNA, 19 nt, Homo sapiens
  misc_RNA (1)...(19): siRNA sense strand
caagcuuuaugcuccuuuc

SEQ ID NO: 1512468 - RNA, 19 nt, Homo sapiens
  misc_RNA (1)...(19): siRNA sense strand
gcuuuaugcuccuuucaac

SEQ ID NO: 1512469 - RNA, 19 nt, Homo sapiens
  misc_RNA (1)...(19): siRNA sense strand
ucaggaaaauggaauuguu

SEQ ID NO: 1512470 - RNA, 19 nt, Homo sapiens
  misc_RNA (1)...(19): siRNA sense strand
gcucucagacgccgaacga

SEQ ID NO: 1512471 - RNA, 19 nt, Homo sapiens
  misc_RNA (1)...(19): siRNA sense strand
ccuaaaccaaugccaaaga

SEQ ID NO: 1512472 - RNA, 19 nt, Homo sapiens
  misc_RNA (1)...(19): siRNA sense strand
ccucagaaaguguguuugu

SEQ ID NO: 1512473 - RNA, 19 nt, Homo sapiens
  misc_RNA (1)...(19): siRNA sense strand
ggccucagaaaguguguuu

SEQ ID NO: 1512474 - RNA, 19 nt, Homo sapiens
  misc_RNA (1)...(19): siRNA sense strand
aagaacaaacgcaaacuca

SEQ ID NO: 1512475 - RNA, 19 nt, Homo sapiens
  misc_RNA (1)...(19): siRNA sense strand
gugugcagcuguugcucuu

SEQ ID NO: 1512476 - RNA, 19 nt, Homo sapiens
  misc_RNA (1)...(19): siRNA sense strand
cuacccacuuguacauaau

SEQ ID NO: 1512477 - RNA, 19 nt, Homo sapiens
  misc_RNA (1)...(19): siRNA sense strand
gccaaagaacaaacgcaaa

SEQ ID NO: 1512478 - RNA, 19 nt, Homo sapiens
  misc_RNA (1)...(19): siRNA sense strand
cccaaacaggugcaauuaa

SEQ ID NO: 1512479 - RNA, 19 nt, Homo sapiens
  misc_RNA (1)...(19): siRNA sense strand
gcugcuaauuuggaagaau

SEQ ID NO: 1512480 - RNA, 19 nt, Homo sapiens
  misc_RNA (1)...(19): siRNA sense strand
uacaguuccucuacuagca

SEQ ID NO: 1512481 - RNA, 19 nt, Homo sapiens
  misc_RNA (1)...(19): siRNA sense strand
caggaaaauggaauuguua

SEQ ID NO: 1512482 - RNA, 19 nt, Homo sapiens
  misc_RNA (1)...(19): siRNA sense strand
uuacauacaagagacuuug

SEQ ID NO: 1512483 - RNA, 19 nt, Homo sapiens
  misc_RNA (1)...(19): siRNA sense strand
guuccgacaucccaaacag

SEQ ID NO: 1512484 - RNA, 19 nt, Homo sapiens
  misc_RNA (1)...(19): siRNA sense strand
ucuagucaguauguaauuc

SEQ ID NO: 1512485 - RNA, 19 nt, Homo sapiens
  misc_RNA (1)...(19): siRNA sense strand
ccaggacaaguguaaagug

SEQ ID NO: 1512486 - RNA, 19 nt, Homo sapiens
  misc_RNA (1)...(19): siRNA sense strand
aaauucgccucagcaagga

SEQ ID NO: 1512487 - RNA, 19 nt, Homo sapiens
  misc_RNA (1)...(19): siRNA sense strand
ucaacuguuugccggaagu

SEQ ID NO: 1512488 - RNA, 19 nt, Homo sapiens
  misc_RNA (1)...(19): siRNA sense strand
uuuaugcuccuuucaacuu

SEQ ID NO: 1512489 - RNA, 19 nt, Homo sapiens
  misc_RNA (1)...(19): siRNA sense strand
aaaguguguuuguguccau

SEQ ID NO: 1512490 - RNA, 19 nt, Homo sapiens
  misc_RNA (1)...(19): siRNA sense strand
gaaagaagaaacaaggaaa

SEQ ID NO: 1512491 - RNA, 19 nt, Homo sapiens
  misc_RNA (1)...(19): siRNA sense strand
guagaaaucaggacuugua

SEQ ID NO: 1512492 - RNA, 19 nt, Homo sapiens
  misc_RNA (1)...(19): siRNA sense strand
ggacuucagauacgcuuua

SEQ ID NO: 1512493 - RNA, 19 nt, Homo sapiens
  misc_RNA (1)...(19): siRNA sense strand
gauauuuacuccuauugug

SEQ ID NO: 1512494 - RNA, 19 nt, Homo sapiens
  misc_RNA (1)...(19): siRNA sense strand
aagaaucgcuggcaaagga

SEQ ID NO: 1512495 - RNA, 19 nt, Homo sapiens
  misc_RNA (1)...(19): siRNA sense strand
uaacagauacacaccauug

SEQ ID NO: 1512496 - RNA, 19 nt, Homo sapiens
  misc_RNA (1)...(19): siRNA sense strand
ggaaagaagaaacaaggaa

SEQ ID NO: 1512497 - RNA, 19 nt, Homo sapiens
  misc_RNA (1)...(19): siRNA sense strand
caagguuuauggcaauauu

SEQ ID NO: 1512498 - RNA, 19 nt, Homo sapiens
  misc_RNA (1)...(19): siRNA sense strand
gaaaucaaggaauguagaa

SEQ ID NO: 1512499 - RNA, 19 nt, Homo sapiens
  misc_RNA (1)...(19): siRNA sense strand
aaagaaaacuggaugaaga

SEQ ID NO: 1512500 - RNA, 19 nt, Homo sapiens
  misc_RNA (1)...(19): siRNA sense strand
gaacauuugggacuucaga

SEQ ID NO: 1512501 - RNA, 19 nt, Homo sapiens
  misc_RNA (1)...(19): siRNA sense strand
aaaccaaauucaccauaga

SEQ ID NO: 1512502 - RNA, 19 nt, Homo sapiens
  misc_RNA (1)...(19): siRNA sense strand
gaagaaacaaggaaaauuc

SEQ ID NO: 1512503 - RNA, 19 nt, Homo sapiens
  misc_RNA (1)...(19): siRNA sense strand
uggaugaccucuuccuaga

SEQ ID NO: 1512504 - RNA, 19 nt, Homo sapiens
  misc_RNA (1)...(19): siRNA sense strand
gauacacaccauugaaaga

SEQ ID NO: 1512505 - RNA, 19 nt, Homo sapiens
  misc_RNA (1)...(19): siRNA sense strand
gcuaacagauacacaccau

SEQ ID NO: 1512506 - RNA, 19 nt, Homo sapiens
  misc_RNA (1)...(19): siRNA sense strand
gcaaccuaaucuugggaaa

SEQ ID NO: 1512507 - RNA, 19 nt, Homo sapiens
  misc_RNA (1)...(19): siRNA sense strand
cagauacacaccauugaaa

SEQ ID NO: 1512508 - RNA, 19 nt, Homo sapiens
  misc_RNA (1)...(19): siRNA sense strand
caagaacugccauuugcaa

SEQ ID NO: 1512509 - RNA, 19 nt, Homo sapiens
  misc_RNA (1)...(19): siRNA sense strand
gaagaaacgacaggcugaa

SEQ ID NO: 1512510 - RNA, 19 nt, Homo sapiens
  misc_RNA (1)...(19): siRNA sense strand
acacggacaaggauaguuu

SEQ ID NO: 1512511 - RNA, 19 nt, Homo sapiens
  misc_RNA (1)...(19): siRNA sense strand
ccuagagucuuuugaaauu

SEQ ID NO: 1512512 - RNA, 19 nt, Homo sapiens
  misc_RNA (1)...(19): siRNA sense strand
ccaaauucaccauagagaa

SEQ ID NO: 1512513 - RNA, 19 nt, Homo sapiens
  misc_RNA (1)...(19): siRNA sense strand
gaacugccauuugcaaccu

SEQ ID NO: 1512514 - RNA, 19 nt, Homo sapiens
  misc_RNA (1)...(19): siRNA sense strand
caaggaauguagaaaucag

SEQ ID NO: 1512515 - RNA, 19 nt, Homo sapiens
  misc_RNA (1)...(19): siRNA sense strand
ggaagaaucgcuggcaaag

SEQ ID NO: 1512516 - RNA, 19 nt, Homo sapiens
  misc_RNA (1)...(19): siRNA sense strand
gacuucagauacgcuuuaa

SEQ ID NO: 1512517 - RNA, 19 nt, Homo sapiens
  misc_RNA (1)...(19): siRNA sense strand
uacacaccauugaaagaaa

SEQ ID NO: 1512518 - RNA, 19 nt, Homo sapiens
  misc_RNA (1)...(19): siRNA sense strand
aaccuaaucuugggaaauc

SEQ ID NO: 1512519 - RNA, 19 nt, Homo sapiens
  misc_RNA (1)...(19): siRNA sense strand
gagaaugugacacggacaa

SEQ ID NO: 1512520 - RNA, 19 nt, Homo sapiens
  misc_RNA (1)...(19): siRNA sense strand
aaauuccagucccagcuaa

SEQ ID NO: 1512521 - RNA, 19 nt, Homo sapiens
  misc_RNA (1)...(19): siRNA sense strand
ugaaaucaaggaauguaga

SEQ ID NO: 1512522 - RNA, 19 nt, Homo sapiens
  misc_RNA (1)...(19): siRNA sense strand
gcuccugagugggaaagaa

SEQ ID NO: 1512523 - RNA, 19 nt, Homo sapiens
  misc_RNA (1)...(19): siRNA sense strand
gauguuagugcucugacaa

SEQ ID NO: 1512524 - RNA, 19 nt, Homo sapiens
  misc_RNA (1)...(19): siRNA sense strand
ggauguuagugcucugaca

SEQ ID NO: 1512525 - RNA, 19 nt, Homo sapiens
  misc_RNA (1)...(19): siRNA sense strand
gaaacgacaggcugaacag

SEQ ID NO: 1512526 - RNA, 19 nt, Homo sapiens
  misc_RNA (1)...(19): siRNA sense strand
uagaaaucaggacuuguaa

SEQ ID NO: 1512527 - RNA, 19 nt, Homo sapiens
  misc_RNA (1)...(19): siRNA sense strand
cuaaagggagaccaucuau

SEQ ID NO: 1512528 - RNA, 19 nt, Homo sapiens
  misc_RNA (1)...(19): siRNA sense strand
acagauacacaccauugaa

SEQ ID NO: 1512529 - RNA, 19 nt, Homo sapiens
  misc_RNA (1)...(19): siRNA sense strand
ccuaaagggagaccaucua

SEQ ID NO: 1512530 - RNA, 19 nt, Homo sapiens
  misc_RNA (1)...(19): siRNA sense strand
acauuugggacuucagaua

SEQ ID NO: 1512531 - RNA, 19 nt, Homo sapiens
  misc_RNA (1)...(19): siRNA sense strand
gaaaacuggaugaagauau

SEQ ID NO: 1512532 - RNA, 19 nt, Homo sapiens
  misc_RNA (1)...(19): siRNA sense strand
gggaaagaagaaacaagga

SEQ ID NO: 1512533 - RNA, 19 nt, Homo sapiens
  misc_RNA (1)...(19): siRNA sense strand
ugacaaaagcagcugauuu

SEQ ID NO: 1512534 - RNA, 19 nt, Homo sapiens
  misc_RNA (1)...(19): siRNA sense strand
uuacuccuauuguggaaca

SEQ ID NO: 1512535 - RNA, 19 nt, Homo sapiens
  misc_RNA (1)...(19): siRNA sense strand
cacuugcccucaucagguu

SEQ ID NO: 1512536 - RNA, 19 nt, Homo sapiens
  misc_RNA (1)...(19): siRNA sense strand
auacacaccauugaaagaa

SEQ ID NO: 1512537 - RNA, 19 nt, Homo sapiens
  misc_RNA (1)...(19): siRNA sense strand
cuccuauuguggaacauuu

SEQ ID NO: 1512538 - RNA, 19 nt, Homo sapiens
  misc_RNA (1)...(19): siRNA sense strand
caaccuaaucuugggaaau

SEQ ID NO: 1512539 - RNA, 19 nt, Homo sapiens
  misc_RNA (1)...(19): siRNA sense strand
aaagggagaccaucuaucc

SEQ ID NO: 1512540 - RNA, 19 nt, Homo sapiens
  misc_RNA (1)...(19): siRNA sense strand
ucaaggaauguagaaauca

SEQ ID NO: 1512541 - RNA, 19 nt, Homo sapiens
  misc_RNA (1)...(19): siRNA sense strand
ccaucuauccagggcaaua

SEQ ID NO: 1512542 - RNA, 19 nt, Homo sapiens
  misc_RNA (1)...(19): siRNA sense strand
gaaagaaaacuggaugaag

SEQ ID NO: 1512543 - RNA, 19 nt, Homo sapiens
  misc_RNA (1)...(19): siRNA sense strand
cauuugcaaccuaaucuug

SEQ ID NO: 1512544 - RNA, 19 nt, Homo sapiens
  misc_RNA (1)...(19): siRNA sense strand
gaaaccaaggauguuagug

SEQ ID NO: 1512545 - RNA, 19 nt, Homo sapiens
  misc_RNA (1)...(19): siRNA sense strand
caccauagagaaugugaca

SEQ ID NO: 1512546 - RNA, 19 nt, Homo sapiens
  misc_RNA (1)...(19): siRNA sense strand
gaagaaucgcuggcaaagg

SEQ ID NO: 1512547 - RNA, 19 nt, Homo sapiens
  misc_RNA (1)...(19): siRNA sense strand
aucaaggaauguagaaauc

SEQ ID NO: 1512548 - RNA, 19 nt, Homo sapiens
  misc_RNA (1)...(19): siRNA sense strand
ccagggcaauaggaagaau

SEQ ID NO: 1512549 - RNA, 19 nt, Homo sapiens
  misc_RNA (1)...(19): siRNA sense strand
gcauugaucucaccuauga

SEQ ID NO: 1512550 - RNA, 19 nt, Homo sapiens
  misc_RNA (1)...(19): siRNA sense strand
gacauuagaugcauaagaa

SEQ ID NO: 1512551 - RNA, 19 nt, Homo sapiens
  misc_RNA (1)...(19): siRNA sense strand
gguagaagauugacagauu

SEQ ID NO: 1512552 - RNA, 19 nt, Homo sapiens
  misc_RNA (1)...(19): siRNA sense strand
gcuccaagcuucuuucaaa

SEQ ID NO: 1512553 - RNA, 19 nt, Homo sapiens
  misc_RNA (1)...(19): siRNA sense strand
gcaagugcaucaacagaaa

SEQ ID NO: 1512554 - RNA, 19 nt, Homo sapiens
  misc_RNA (1)...(19): siRNA sense strand
ggaagaauuucguacaaug

SEQ ID NO: 1512555 - RNA, 19 nt, Homo sapiens
  misc_RNA (1)...(19): siRNA sense strand
gaagacaggcccauugauu

SEQ ID NO: 1512556 - RNA, 19 nt, Homo sapiens
  misc_RNA (1)...(19): siRNA sense strand
guagaagauugacagauuu

SEQ ID NO: 1512557 - RNA, 19 nt, Homo sapiens
  misc_RNA (1)...(19): siRNA sense strand
cauacaggcuacugaauuu

SEQ ID NO: 1512558 - RNA, 19 nt, Homo sapiens
  misc_RNA (1)...(19): siRNA sense strand
ggcaagcagugaauaguaa

SEQ ID NO: 1512559 - RNA, 19 nt, Homo sapiens
  misc_RNA (1)...(19): siRNA sense strand
gcaguagcgucaacucuug

SEQ ID NO: 1512560 - RNA, 19 nt, Homo sapiens
  misc_RNA (1)...(19): siRNA sense strand
gcagugcauuuaagaagaa

SEQ ID NO: 1512561 - RNA, 19 nt, Homo sapiens
  misc_RNA (1)...(19): siRNA sense strand
ccuaugauauccagucuuu

SEQ ID NO: 1512562 - RNA, 19 nt, Homo sapiens
  misc_RNA (1)...(19): siRNA sense strand
ggaaauucuucuugguauu

SEQ ID NO: 1512563 - RNA, 19 nt, Homo sapiens
  misc_RNA (1)...(19): siRNA sense strand
cagcagaacuccacauaca

SEQ ID NO: 1512564 - RNA, 19 nt, Homo sapiens
  misc_RNA (1)...(19): siRNA sense strand
guuuggcucuuacagauua

SEQ ID NO: 1512565 - RNA, 19 nt, Homo sapiens
  misc_RNA (1)...(19): siRNA sense strand
ggaggaagugaaagauuua

SEQ ID NO: 1512566 - RNA, 19 nt, Homo sapiens
  misc_RNA (1)...(19): siRNA sense strand
agugauagguaccaucuua

SEQ ID NO: 1512567 - RNA, 19 nt, Homo sapiens
  misc_RNA (1)...(19): siRNA sense strand
gaaagcacacucaacagaa

SEQ ID NO: 1512568 - RNA, 19 nt, Homo sapiens
  misc_RNA (1)...(19): siRNA sense strand
gguaaccgaugaaauuuua

SEQ ID NO: 1512569 - RNA, 19 nt, Homo sapiens
  misc_RNA (1)...(19): siRNA sense strand
caacaaacauaucuaaucc

SEQ ID NO: 1512570 - RNA, 19 nt, Homo sapiens
  misc_RNA (1)...(19): siRNA sense strand
gcaacaaacauaucuaauc

SEQ ID NO: 1512571 - RNA, 19 nt, Homo sapiens
  misc_RNA (1)...(19): siRNA sense strand
gauuagcacuacagacuau

SEQ ID NO: 1512572 - RNA, 19 nt, Homo sapiens
  misc_RNA (1)...(19): siRNA sense strand
caagaaagcacacucaaca

SEQ ID NO: 1512573 - RNA, 19 nt, Homo sapiens
  misc_RNA (1)...(19): siRNA sense strand
gaaauucucagcauugauc

SEQ ID NO: 1512574 - RNA, 19 nt, Homo sapiens
  misc_RNA (1)...(19): siRNA sense strand
gauuuggacuuaagagaug

SEQ ID NO: 1512575 - RNA, 19 nt, Homo sapiens
  misc_RNA (1)...(19): siRNA sense strand
aaacucagcaacaaacaua

SEQ ID NO: 1512576 - RNA, 19 nt, Homo sapiens
  misc_RNA (1)...(19): siRNA sense strand
cuuaagagaugacagucua

SEQ ID NO: 1512577 - RNA, 19 nt, Homo sapiens
  misc_RNA (1)...(19): siRNA sense strand
gagaugacagucuacuuaa

SEQ ID NO: 1512578 - RNA, 19 nt, Homo sapiens
  misc_RNA (1)...(19): siRNA sense strand
agagaugacagucuacuua

SEQ ID NO: 1512579 - RNA, 19 nt, Homo sapiens
  misc_RNA (1)...(19): siRNA sense strand
gaagauugacagauuugaa

SEQ ID NO: 1512580 - RNA, 19 nt, Homo sapiens
  misc_RNA (1)...(19): siRNA sense strand
aggaggaagugaaagauuu

SEQ ID NO: 1512581 - RNA, 19 nt, Homo sapiens
  misc_RNA (1)...(19): siRNA sense strand
ggucaugauugaggaguuu

SEQ ID NO: 1512582 - RNA, 19 nt, Homo sapiens
  misc_RNA (1)...(19): siRNA sense strand
gguaccaucuuaugccuau

SEQ ID NO: 1512583 - RNA, 19 nt, Homo sapiens
  misc_RNA (1)...(19): siRNA sense strand
caacagaagguagaagauu

SEQ ID NO: 1512584 - RNA, 19 nt, Homo sapiens
  misc_RNA (1)...(19): siRNA sense strand
ccacauacaacgugucuau

SEQ ID NO: 1512585 - RNA, 19 nt, Homo sapiens
  misc_RNA (1)...(19): siRNA sense strand
gcauuaaacgaaaguauuc

SEQ ID NO: 1512586 - RNA, 19 nt, Homo sapiens
  misc_RNA (1)...(19): siRNA sense strand
caaagaaaauccugauaug

SEQ ID NO: 1512587 - RNA, 19 nt, Homo sapiens
  misc_RNA (1)...(19): siRNA sense strand
ccaggauggucaugauuga

SEQ ID NO: 1512588 - RNA, 19 nt, Homo sapiens
  misc_RNA (1)...(19): siRNA sense strand
cauacaacgugucuauuuc

SEQ ID NO: 1512589 - RNA, 19 nt, Homo sapiens
  misc_RNA (1)...(19): siRNA sense strand
ucaggaaacucagcaacaa

SEQ ID NO: 1512590 - RNA, 19 nt, Homo sapiens
  misc_RNA (1)...(19): siRNA sense strand
aagacaggcccauugauua

SEQ ID NO: 1512591 - RNA, 19 nt, Homo sapiens
  misc_RNA (1)...(19): siRNA sense strand
cagcauugaucucaccuau

SEQ ID NO: 1512592 - RNA, 19 nt, Homo sapiens
  misc_RNA (1)...(19): siRNA sense strand
gaagaauuucguacaaugu

SEQ ID NO: 1512593 - RNA, 19 nt, Homo sapiens
  misc_RNA (1)...(19): siRNA sense strand
cagaagauuuggacuuaag

SEQ ID NO: 1512594 - RNA, 19 nt, Homo sapiens
  misc_RNA (1)...(19): siRNA sense strand
ggacaagaaagcacacuca

SEQ ID NO: 1512595 - RNA, 19 nt, Homo sapiens
  misc_RNA (1)...(19): siRNA sense strand
gaacggaaucuuaauuugc

SEQ ID NO: 1512596 - RNA, 19 nt, Homo sapiens
  misc_RNA (1)...(19): siRNA sense strand
gaugggauagagauugaua

SEQ ID NO: 1512597 - RNA, 19 nt, Homo sapiens
  misc_RNA (1)...(19): siRNA sense strand
cagcaacaaacauaucuaa

SEQ ID NO: 1512598 - RNA, 19 nt, Homo sapiens
  misc_RNA (1)...(19): siRNA sense strand
cgacagcagcuuugacuug

SEQ ID NO: 1512599 - RNA, 19 nt, Homo sapiens
  misc_RNA (1)...(19): siRNA sense strand
gaaaucagugaaagcaaga

SEQ ID NO: 1512600 - RNA, 19 nt, Homo sapiens
  misc_RNA (1)...(19): siRNA sense strand
gauuaggaguacauacgaa

SEQ ID NO: 1512601 - RNA, 19 nt, Homo sapiens
  misc_RNA (1)...(19): siRNA sense strand
uaacauacaggcuacugaa

SEQ ID NO: 1512602 - RNA, 19 nt, Homo sapiens
  misc_RNA (1)...(19): siRNA sense strand
guugggagcuuggagaaga

SEQ ID NO: 1512603 - RNA, 19 nt, Homo sapiens
  misc_RNA (1)...(19): siRNA sense strand
agaacggaaucuuaauuug

SEQ ID NO: 1512604 - RNA, 19 nt, Homo sapiens
  misc_RNA (1)...(19): siRNA sense strand
cggaaauucuucuugguau

SEQ ID NO: 1512605 - RNA, 19 nt, Homo sapiens
  misc_RNA (1)...(19): siRNA sense strand
gaaaggcgcagauauugac

SEQ ID NO: 1512606 - RNA, 19 nt, Homo sapiens
  misc_RNA (1)...(19): siRNA sense strand
cauaagccauccagaccuu

SEQ ID NO: 1512607 - RNA, 19 nt, Homo sapiens
  misc_RNA (1)...(19): siRNA sense strand
gacagcagcuuugacuugu

SEQ ID NO: 1512608 - RNA, 19 nt, Homo sapiens
  misc_RNA (1)...(19): siRNA sense strand
ccagaagauuuggacuuaa

SEQ ID NO: 1512609 - RNA, 19 nt, Homo sapiens
  misc_RNA (1)...(19): siRNA sense strand
gaauggauacgcgaaauca

SEQ ID NO: 1512610 - RNA, 19 nt, Homo sapiens
  misc_RNA (1)...(19): siRNA sense strand
cuugucagcuuuauccaaa

SEQ ID NO: 1512611 - RNA, 19 nt, Homo sapiens
  misc_RNA (1)...(19): siRNA sense strand
gaacuugucagcuuuaucc

SEQ ID NO: 1512612 - RNA, 19 nt, Homo sapiens
  misc_RNA (1)...(19): siRNA sense strand
ggacuuaagagaugacagu

SEQ ID NO: 1512613 - RNA, 19 nt, Homo sapiens
  misc_RNA (1)...(19): siRNA sense strand
gccaaacauugacaacuuc

SEQ ID NO: 1512614 - RNA, 19 nt, Homo sapiens
  misc_RNA (1)...(19): siRNA sense strand
aacagaagguagaagauug

SEQ ID NO: 1512615 - RNA, 19 nt, Homo sapiens
  misc_RNA (1)...(19): siRNA sense strand
acauacaacgugucuauuu

SEQ ID NO: 1512616 - RNA, 19 nt, Homo sapiens
  misc_RNA (1)...(19): siRNA sense strand
ccaagugccacaauaucua

SEQ ID NO: 1512617 - RNA, 19 nt, Homo sapiens
  misc_RNA (1)...(19): siRNA sense strand
ucaccucauucuaugcuaa

SEQ ID NO: 1512618 - RNA, 19 nt, Homo sapiens
  misc_RNA (1)...(19): siRNA sense strand
gauauggaagaauuucgua

SEQ ID NO: 1512619 - RNA, 19 nt, Homo sapiens
  misc_RNA (1)...(19): siRNA sense strand
cagcauacccacagcagaa

SEQ ID NO: 1512620 - RNA, 19 nt, Homo sapiens
  misc_RNA (1)...(19): siRNA sense strand
ugccaaacauugacaacuu

SEQ ID NO: 1512621 - RNA, 19 nt, Homo sapiens
  misc_RNA (1)...(19): siRNA sense strand
ccggguaaccgaugaaauu

SEQ ID NO: 1512622 - RNA, 19 nt, Homo sapiens
  misc_RNA (1)...(19): siRNA sense strand
cuuaaugguugccggguaa

SEQ ID NO: 1512623 - RNA, 19 nt, Homo sapiens
  misc_RNA (1)...(19): siRNA sense strand
cagcaucuguggcuaacau

SEQ ID NO: 1512624 - RNA, 19 nt, Homo sapiens
  misc_RNA (1)...(19): siRNA sense strand
gcaugucugugccuucauc

SEQ ID NO: 1512625 - RNA, 19 nt, Homo sapiens
  misc_RNA (1)...(19): siRNA sense strand
cgaaaggcgcagauauuga

SEQ ID NO: 1512626 - RNA, 19 nt, Homo sapiens
  misc_RNA (1)...(19): siRNA sense strand
gagauggguaugaaaauua

SEQ ID NO: 1512627 - RNA, 19 nt, Homo sapiens
  misc_RNA (1)...(19): siRNA sense strand
caucuuaugccuaucauca

SEQ ID NO: 1512628 - RNA, 19 nt, Homo sapiens
  misc_RNA (1)...(19): siRNA sense strand
agaugacagucuacuuaaa

SEQ ID NO: 1512629 - RNA, 19 nt, Homo sapiens
  misc_RNA (1)...(19): siRNA sense strand
cagcaugucugugccuuca

SEQ ID NO: 1512630 - RNA, 19 nt, Homo sapiens
  misc_RNA (1)...(19): siRNA sense strand
agaguaaaucccagugaua

SEQ ID NO: 1512631 - RNA, 19 nt, Homo sapiens
  misc_RNA (1)...(19): siRNA sense strand
ggaagugaaagauuuaagg

SEQ ID NO: 1512632 - RNA, 19 nt, Homo sapiens
  misc_RNA (1)...(19): siRNA sense strand
gcagugaauaguaagaugu

SEQ ID NO: 1512633 - RNA, 19 nt, Homo sapiens
  misc_RNA (1)...(19): siRNA sense strand
gaguaaaucccagugauag

SEQ ID NO: 1512634 - RNA, 19 nt, Homo sapiens
  misc_RNA (1)...(19): siRNA sense strand
gggauagagauugauauuu

SEQ ID NO: 1512635 - RNA, 19 nt, Homo sapiens
  misc_RNA (1)...(19): siRNA sense strand
gaaacuacaggaggaagug

SEQ ID NO: 1512636 - RNA, 19 nt, Homo sapiens
  misc_RNA (1)...(19): siRNA sense strand
cgccagaguuguuucuuca

SEQ ID NO: 1512637 - RNA, 19 nt, Homo sapiens
  misc_RNA (1)...(19): siRNA sense strand
guucagggguugcauuaaa

SEQ ID NO: 1512638 - RNA, 19 nt, Homo sapiens
  misc_RNA (1)...(19): siRNA sense strand
agaaagcacacucaacaga

SEQ ID NO: 1512639 - RNA, 19 nt, Homo sapiens
  misc_RNA (1)...(19): siRNA sense strand
uaugauauccagucuuuca

SEQ ID NO: 1512640 - RNA, 19 nt, Homo sapiens
  misc_RNA (1)...(19): siRNA sense strand
gcuuggagaagaaugaauu

SEQ ID NO: 1512641 - RNA, 19 nt, Homo sapiens
  misc_RNA (1)...(19): siRNA sense strand
gaaucuuaauuugccugua

SEQ ID NO: 1512642 - RNA, 19 nt, Homo sapiens
  misc_RNA (1)...(19): siRNA sense strand
uacgaaaggcgcagauauu

SEQ ID NO: 1512643 - RNA, 19 nt, Homo sapiens
  misc_RNA (1)...(19): siRNA sense strand
caacaggugaauaccaaug

SEQ ID NO: 1512644 - RNA, 19 nt, Homo sapiens
  misc_RNA (1)...(19): siRNA sense strand
aaagcacacucaacagaag

SEQ ID NO: 1512645 - RNA, 19 nt, Homo sapiens
  misc_RNA (1)...(19): siRNA sense strand
uaaaucccagugauaggua

SEQ ID NO: 1512646 - RNA, 19 nt, Homo sapiens
  misc_RNA (1)...(19): siRNA sense strand
caaaugcaguagcgucaac

SEQ ID NO: 1512647 - RNA, 19 nt, Homo sapiens
  misc_RNA (1)...(19): siRNA sense strand
caucuagugccaaacauug

SEQ ID NO: 1512648 - RNA, 19 nt, Homo sapiens
  misc_RNA (1)...(19): siRNA sense strand
ucuucaacaugucucauaa

SEQ ID NO: 1512649 - RNA, 19 nt, Homo sapiens
  misc_RNA (1)...(19): siRNA sense strand
gcaaugagacgaccuauga

SEQ ID NO: 1512650 - RNA, 19 nt, Homo sapiens
  misc_RNA (1)...(19): siRNA sense strand
gaaagccaauggaguccua

SEQ ID NO: 1512651 - RNA, 19 nt, Homo sapiens
  misc_RNA (1)...(19): siRNA sense strand
gauccuggcuuucuucuuc

SEQ ID NO: 1512652 - RNA, 19 nt, Homo sapiens
  misc_RNA (1)...(19): siRNA sense strand
gaacgccacagaaguauga

SEQ ID NO: 1512653 - RNA, 19 nt, Homo sapiens
  misc_RNA (1)...(19): siRNA sense strand
gaucuucaaugccuucaug

SEQ ID NO: 1512654 - RNA, 19 nt, Homo sapiens
  misc_RNA (1)...(19): siRNA sense strand
cgagaggccuuacuucaug

SEQ ID NO: 1512655 - RNA, 19 nt, Homo sapiens
  misc_RNA (1)...(19): siRNA sense strand
gcugaaagcugcagagaac

SEQ ID NO: 1512656 - RNA, 19 nt, Homo sapiens
  misc_RNA (1)...(19): siRNA sense strand
uggagaaguucaucaaauu

SEQ ID NO: 1512657 - RNA, 19 nt, Homo sapiens
  misc_RNA (1)...(19): siRNA sense strand
gaacaagaccaacaagaag

SEQ ID NO: 1512658 - RNA, 19 nt, Homo sapiens
  misc_RNA (1)...(19): siRNA sense strand
cuacaaggguguccugaug

SEQ ID NO: 1512659 - RNA, 19 nt, Homo sapiens
  misc_RNA (1)...(19): siRNA sense strand
cgauugcacucaucaaaga

SEQ ID NO: 1512660 - RNA, 19 nt, Homo sapiens
  misc_RNA (1)...(19): siRNA sense strand
caaaggacccauuuacaau

SEQ ID NO: 1512661 - RNA, 19 nt, Homo sapiens
  misc_RNA (1)...(19): siRNA sense strand
gcgcauauuugaagauuac

SEQ ID NO: 1512662 - RNA, 19 nt, Homo sapiens
  misc_RNA (1)...(19): siRNA sense strand
ccaacgaagcggucuauaa

SEQ ID NO: 1512663 - RNA, 19 nt, Homo sapiens
  misc_RNA (1)...(19): siRNA sense strand
caacgaagcggucuauaag

SEQ ID NO: 1512664 - RNA, 19 nt, Homo sapiens
  misc_RNA (1)...(19): siRNA sense strand
ucaaaggacccauuuacaa

SEQ ID NO: 1512665 - RNA, 19 nt, Homo sapiens
  misc_RNA (1)...(19): siRNA sense strand
ugagaaacaucaucagagu

SEQ ID NO: 1512666 - RNA, 19 nt, Homo sapiens
  misc_RNA (1)...(19): siRNA sense strand
gaguauccuugaagucauu

SEQ ID NO: 1512667 - RNA, 19 nt, Homo sapiens
  misc_RNA (1)...(19): siRNA sense strand
gaguggcuguccuggauaa

SEQ ID NO: 1512668 - RNA, 19 nt, Homo sapiens
  misc_RNA (1)...(19): siRNA sense strand
uauaagcaguucuguguuc

SEQ ID NO: 1512669 - RNA, 19 nt, Homo sapiens
  misc_RNA (1)...(19): siRNA sense strand
gaagcggucuauaagaucu

SEQ ID NO: 1512670 - RNA, 19 nt, Homo sapiens
  misc_RNA (1)...(19): siRNA sense strand
aaaggacccauuuacaaua

SEQ ID NO: 1512671 - RNA, 19 nt, Homo sapiens
  misc_RNA (1)...(19): siRNA sense strand
ugaacaagaccaacaagaa

SEQ ID NO: 1512672 - RNA, 19 nt, Homo sapiens
  misc_RNA (1)...(19): siRNA sense strand
gggcugcacggauaucaua

SEQ ID NO: 1512673 - RNA, 19 nt, Homo sapiens
  misc_RNA (1)...(19): siRNA sense strand
gagaacaaacccuaucugu

SEQ ID NO: 1512674 - RNA, 19 nt, Homo sapiens
  misc_RNA (1)...(19): siRNA sense strand
cagaguggcuguccuggau

SEQ ID NO: 1512675 - RNA, 19 nt, Homo sapiens
  misc_RNA (1)...(19): siRNA sense strand
gcgaugagccuccuguuca

SEQ ID NO: 1512676 - RNA, 19 nt, Homo sapiens
  misc_RNA (1)...(19): siRNA sense strand
gggcauggcucccggaaaa

SEQ ID NO: 1512677 - RNA, 19 nt, Homo sapiens
  misc_RNA (1)...(19): siRNA sense strand
gugcagaucauccguguga

SEQ ID NO: 1512678 - RNA, 19 nt, Homo sapiens
  misc_RNA (1)...(19): siRNA sense strand
caccaccccucaauuauua

SEQ ID NO: 1512679 - RNA, 19 nt, Homo sapiens
  misc_RNA (1)...(19): siRNA sense strand
gggcaaacuucugaucguu

SEQ ID NO: 1512680 - RNA, 19 nt, Homo sapiens
  misc_RNA (1)...(19): siRNA sense strand
gagaacaaguuugccaagu

SEQ ID NO: 1512681 - RNA, 19 nt, Homo sapiens
  misc_RNA (1)...(19): siRNA sense strand
uggaggaccuggagaggaa

SEQ ID NO: 1512682 - RNA, 19 nt, Homo sapiens
  misc_RNA (1)...(19): siRNA sense strand
gcucugaugucucuuuggu

SEQ ID NO: 1512683 - RNA, 19 nt, Homo sapiens
  misc_RNA (1)...(19): siRNA sense strand
agaacaaguuugccaagug

SEQ ID NO: 1512684 - RNA, 19 nt, Homo sapiens
  misc_RNA (1)...(19): siRNA sense strand
ugaagucauuaucaucuug

SEQ ID NO: 1512685 - RNA, 19 nt, Homo sapiens
  misc_RNA (1)...(19): siRNA sense strand
gcugggcuacggaauauuu

SEQ ID NO: 1512686 - RNA, 19 nt, Homo sapiens
  misc_RNA (1)...(19): siRNA sense strand
ggccaggaaugccuucuuc

SEQ ID NO: 1512687 - RNA, 19 nt, Homo sapiens
  misc_RNA (1)...(19): siRNA sense strand
aggaaugccuacaucauga

SEQ ID NO: 1512688 - RNA, 19 nt, Homo sapiens
  misc_RNA (1)...(19): siRNA sense strand
ggagaaguucaucaaauuc

SEQ ID NO: 1512689 - RNA, 19 nt, Homo sapiens
  misc_RNA (1)...(19): siRNA sense strand
ccucaugaccugucucaaa

SEQ ID NO: 1512690 - RNA, 19 nt, Homo sapiens
  misc_RNA (1)...(19): siRNA sense strand
gugcugggcuacggaauau

SEQ ID NO: 1512691 - RNA, 19 nt, Homo sapiens
  misc_RNA (1)...(19): siRNA sense strand
ggccuuacuucaugucuuc

SEQ ID NO: 1512692 - RNA, 19 nt, Homo sapiens
  misc_RNA (1)...(19): siRNA sense strand
uaucauaugcuguguguuc

SEQ ID NO: 1512693 - RNA, 19 nt, Homo sapiens
  misc_RNA (1)...(19): siRNA sense strand
gcaacucgccaugcgcaua

SEQ ID NO: 1512694 - RNA, 19 nt, Homo sapiens
  misc_RNA (1)...(19): siRNA sense strand
gaucguuggcuccuacuug

SEQ ID NO: 1512695 - RNA, 19 nt, Homo sapiens
  misc_RNA (1)...(19): siRNA sense strand
uaucauaggccuggucauu

SEQ ID NO: 1512696 - RNA, 19 nt, Homo sapiens
  misc_RNA (1)...(19): siRNA sense strand
acgaagcggucuauaagau

SEQ ID NO: 1512697 - RNA, 19 nt, Homo sapiens
  misc_RNA (1)...(19): siRNA sense strand
cagcgucuauggcaugugu

SEQ ID NO: 1512698 - RNA, 19 nt, Homo sapiens
  misc_RNA (1)...(19): siRNA sense strand
gacagccccugcccauuua

SEQ ID NO: 1512699 - RNA, 19 nt, Homo sapiens
  misc_RNA (1)...(19): siRNA sense strand
gagaggccuuacuucaugu

SEQ ID NO: 1512700 - RNA, 19 nt, Homo sapiens
  misc_RNA (1)...(19): siRNA sense strand
cuggagaaguucaucaaau

SEQ ID NO: 1512701 - RNA, 19 nt, Homo sapiens
  misc_RNA (1)...(19): siRNA sense strand
gguacuggauuaucauagg

SEQ ID NO: 1512702 - RNA, 19 nt, Homo sapiens
  misc_RNA (1)...(19): siRNA sense strand
caucaugauugccaucuac

SEQ ID NO: 1512703 - RNA, 19 nt, Homo sapiens
  misc_RNA (1)...(19): siRNA sense strand
ucaaugccuucauguucuu

SEQ ID NO: 1512704 - RNA, 19 nt, Homo sapiens
  misc_RNA (1)...(19): siRNA sense strand
caacucgccaugcgcauau

SEQ ID NO: 1512705 - RNA, 19 nt, Homo sapiens
  misc_RNA (1)...(19): siRNA sense strand
ucuggugccuggagaaguu

SEQ ID NO: 1512706 - RNA, 19 nt, Homo sapiens
  misc_RNA (1)...(19): siRNA sense strand
cucaugaccugucucaaau

SEQ ID NO: 1512707 - RNA, 19 nt, Homo sapiens
  misc_RNA (1)...(19): siRNA sense strand
ggacuuugaguacuauaag

SEQ ID NO: 1512708 - RNA, 19 nt, Homo sapiens
  misc_RNA (1)...(19): siRNA sense strand
ggugcugggcuacggaaua

SEQ ID NO: 1512709 - RNA, 19 nt, Homo sapiens
  misc_RNA (1)...(19): siRNA sense strand
cuuccuggcugguauuaug

SEQ ID NO: 1512710 - RNA, 19 nt, Homo sapiens
  misc_RNA (1)...(19): siRNA sense strand
gcagcucccgggacuuuga

SEQ ID NO: 1512711 - RNA, 19 nt, Homo sapiens
  misc_RNA (1)...(19): siRNA sense strand
gaaguucaucaaauuccuu

SEQ ID NO: 1512712 - RNA, 19 nt, Homo sapiens
  misc_RNA (1)...(19): siRNA sense strand
agaccugguuggccuuuau

SEQ ID NO: 1512713 - RNA, 19 nt, Homo sapiens
  misc_RNA (1)...(19): siRNA sense strand
gaaugccuacaucaugauu

SEQ ID NO: 1512714 - RNA, 19 nt, Homo sapiens
  misc_RNA (1)...(19): siRNA sense strand
uuacuggguuccuauacug

SEQ ID NO: 1512715 - RNA, 19 nt, Homo sapiens
  misc_RNA (1)...(19): siRNA sense strand
cagcaccaccccucaauua

SEQ ID NO: 1512716 - RNA, 19 nt, Homo sapiens
  misc_RNA (1)...(19): siRNA sense strand
aaggacccauuuacaauag

SEQ ID NO: 1512717 - RNA, 19 nt, Homo sapiens
  misc_RNA (1)...(19): siRNA sense strand
ugaaagcugcagagaacaa

SEQ ID NO: 1512718 - RNA, 19 nt, Homo sapiens
  misc_RNA (1)...(19): siRNA sense strand
aauaggggcugcacggaua

SEQ ID NO: 1512719 - RNA, 19 nt, Homo sapiens
  misc_RNA (1)...(19): siRNA sense strand
acuauaagcaguucugugu

SEQ ID NO: 1512720 - RNA, 19 nt, Homo sapiens
  misc_RNA (1)...(19): siRNA sense strand
ccaucuacggcaccaauuu

SEQ ID NO: 1512721 - RNA, 19 nt, Homo sapiens
  misc_RNA (1)...(19): siRNA sense strand
acggaacgccacagaagua

SEQ ID NO: 1512722 - RNA, 19 nt, Homo sapiens
  misc_RNA (1)...(19): siRNA sense strand
caaugcccguugccaguuc

SEQ ID NO: 1512723 - RNA, 19 nt, Homo sapiens
  misc_RNA (1)...(19): siRNA sense strand
ucauaggccuggucauugc

SEQ ID NO: 1512724 - RNA, 19 nt, Homo sapiens
  misc_RNA (1)...(19): siRNA sense strand
gggacuuugaguacuauaa

SEQ ID NO: 1512725 - RNA, 19 nt, Homo sapiens
  misc_RNA (1)...(19): siRNA sense strand
gccgagaggccuuacuuca

SEQ ID NO: 1512726 - RNA, 19 nt, Homo sapiens
  misc_RNA (1)...(19): siRNA sense strand
gcgcucauccuggccauug

SEQ ID NO: 1512727 - RNA, 19 nt, Homo sapiens
  misc_RNA (1)...(19): siRNA sense strand
ccuguccacuuccaacgaa

SEQ ID NO: 1512728 - RNA, 19 nt, Homo sapiens
  misc_RNA (1)...(19): siRNA sense strand
cccgggacuuugaguacua

SEQ ID NO: 1512729 - RNA, 19 nt, Homo sapiens
  misc_RNA (1)...(19): siRNA sense strand
aaacacggaacgccacaga

SEQ ID NO: 1512730 - RNA, 19 nt, Homo sapiens
  misc_RNA (1)...(19): siRNA sense strand
gcaccaccccucaauuauu

SEQ ID NO: 1512731 - RNA, 19 nt, Homo sapiens
  misc_RNA (1)...(19): siRNA sense strand
ugacuuccucuuccuguug

SEQ ID NO: 1512732 - RNA, 19 nt, Homo sapiens
  misc_RNA (1)...(19): siRNA sense strand
caucaaauuccuuaauagg

SEQ ID NO: 1512733 - RNA, 19 nt, Homo sapiens
  misc_RNA (1)...(19): siRNA sense strand
gcugaggugcuucgagaug

SEQ ID NO: 1512734 - RNA, 19 nt, Homo sapiens
  misc_RNA (1)...(19): siRNA sense strand
caucauagccuggacucau

SEQ ID NO: 1512735 - RNA, 19 nt, Homo sapiens
  misc_RNA (1)...(19): siRNA sense strand
cuucaaugccuucauguuc

SEQ ID NO: 1512736 - RNA, 19 nt, Homo sapiens
  misc_RNA (1)...(19): siRNA sense strand
ccaaugagucccgccaaug

SEQ ID NO: 1512737 - RNA, 19 nt, Homo sapiens
  misc_RNA (1)...(19): siRNA sense strand
ugguuggccuuuaugauca

SEQ ID NO: 1512738 - RNA, 19 nt, Homo sapiens
  misc_RNA (1)...(19): siRNA sense strand
aaacuucugaucguuggua

SEQ ID NO: 1512739 - RNA, 19 nt, Homo sapiens
  misc_RNA (1)...(19): siRNA sense strand
uggcuguccuggauaaagu

SEQ ID NO: 1512740 - RNA, 19 nt, Homo sapiens
  misc_RNA (1)...(19): siRNA sense strand
ggaaugccuacaucaugau

SEQ ID NO: 1512741 - RNA, 19 nt, Homo sapiens
  misc_RNA (1)...(19): siRNA sense strand
caugaccugucucaaaugc

SEQ ID NO: 1512742 - RNA, 19 nt, Homo sapiens
  misc_RNA (1)...(19): siRNA sense strand
ugacagccccugcccauuu

SEQ ID NO: 1512743 - RNA, 19 nt, Homo sapiens
  misc_RNA (1)...(19): siRNA sense strand
aguaugaucccacuuucaa

SEQ ID NO: 1512744 - RNA, 19 nt, Homo sapiens
  misc_RNA (1)...(19): siRNA sense strand
caucuugcugcucaucuuu

SEQ ID NO: 1512745 - RNA, 19 nt, Homo sapiens
  misc_RNA (1)...(19): siRNA sense strand
caucuacggcaccaauuuc

SEQ ID NO: 1512746 - RNA, 19 nt, Homo sapiens
  misc_RNA (1)...(19): siRNA sense strand
aaacgagaacaaacccuau

SEQ ID NO: 1512747 - RNA, 19 nt, Homo sapiens
  misc_RNA (1)...(19): siRNA sense strand
gcuguccuggauaaaguua

SEQ ID NO: 1512748 - RNA, 19 nt, Homo sapiens
  misc_RNA (1)...(19): siRNA sense strand
guaugaucccacuuucaaa

SEQ ID NO: 1512749 - RNA, 19 nt, Homo sapiens
  misc_RNA (1)...(19): siRNA sense strand
uuucauagcugacuacuuu

SEQ ID NO: 1512750 - RNA, 19 nt, Homo sapiens
  misc_RNA (1)...(19): siRNA sense strand
aggaguggguccagaaaua

SEQ ID NO: 1512751 - RNA, 19 nt, Homo sapiens
  misc_RNA (1)...(19): siRNA sense strand
gguccucucugcaccacuu

SEQ ID NO: 1512752 - RNA, 19 nt, Homo sapiens
  misc_RNA (1)...(19): siRNA sense strand
cuacaccucccgacagauu

SEQ ID NO: 1512753 - RNA, 19 nt, Homo sapiens
  misc_RNA (1)...(19): siRNA sense strand
cccgacagauuccacagaa

SEQ ID NO: 1512754 - RNA, 19 nt, Homo sapiens
  misc_RNA (1)...(19): siRNA sense strand
agaauuucauagcugacua

SEQ ID NO: 1512755 - RNA, 19 nt, Homo sapiens
  misc_RNA (1)...(19): siRNA sense strand
caagcccagugucaucuuc

SEQ ID NO: 1512756 - RNA, 19 nt, Homo sapiens
  misc_RNA (1)...(19): siRNA sense strand
gcaccauggcucucugcaa

SEQ ID NO: 1512757 - RNA, 19 nt, Homo sapiens
  misc_RNA (1)...(19): siRNA sense strand
ucauagcugacuacuuuga

SEQ ID NO: 1512758 - RNA, 19 nt, Homo sapiens
  misc_RNA (1)...(19): siRNA sense strand
gaggaguggguccagaaau

SEQ ID NO: 1512759 - RNA, 19 nt, Homo sapiens
  misc_RNA (1)...(19): siRNA sense strand
ggaguggguccagaaauac

SEQ ID NO: 1512760 - RNA, 19 nt, Homo sapiens
  misc_RNA (1)...(19): siRNA sense strand
auagcugacuacuuugaga

SEQ ID NO: 1512761 - RNA, 19 nt, Homo sapiens
  misc_RNA (1)...(19): siRNA sense strand
gaauuucauagcugacuac

SEQ ID NO: 1512762 - RNA, 19 nt, Homo sapiens
  misc_RNA (1)...(19): siRNA sense strand
gugaggaguggguccagaa

SEQ ID NO: 1512763 - RNA, 19 nt, Homo sapiens
  misc_RNA (1)...(19): siRNA sense strand
uuucauagcugacuacuuu

SEQ ID NO: 1512764 - RNA, 19 nt, Homo sapiens
  misc_RNA (1)...(19): siRNA sense strand
aggaguggguccagaaaua

SEQ ID NO: 1512765 - RNA, 19 nt, Homo sapiens
  misc_RNA (1)...(19): siRNA sense strand
agaauuucauagcugacua

SEQ ID NO: 1512766 - RNA, 19 nt, Homo sapiens
  misc_RNA (1)...(19): siRNA sense strand
gcaccauggcucucugcaa

SEQ ID NO: 1512767 - RNA, 19 nt, Homo sapiens
  misc_RNA (1)...(19): siRNA sense strand
ucauagcugacuacuuuga

SEQ ID NO: 1512768 - RNA, 19 nt, Homo sapiens
  misc_RNA (1)...(19): siRNA sense strand
gaggaguggguccagaaau

SEQ ID NO: 1512769 - RNA, 19 nt, Homo sapiens
  misc_RNA (1)...(19): siRNA sense strand
auagcugacuacuuugaga

SEQ ID NO: 1512770 - RNA, 19 nt, Homo sapiens
  misc_RNA (1)...(19): siRNA sense strand
gaauuucauagcugacuac

SEQ ID NO: 1512771 - RNA, 19 nt, Homo sapiens
  misc_RNA (1)...(19): siRNA sense strand
gugaggaguggguccagaa

SEQ ID NO: 1512772 - RNA, 19 nt, Homo sapiens
  misc_RNA (1)...(19): siRNA sense strand
ggagcgagcuguuuguguu

SEQ ID NO: 1512773 - RNA, 19 nt, Homo sapiens
  misc_RNA (1)...(19): siRNA sense strand
guggaaagcuugcaggaaa

SEQ ID NO: 1512774 - RNA, 19 nt, Homo sapiens
  misc_RNA (1)...(19): siRNA sense strand
ccaacaacaucauggguau

SEQ ID NO: 1512775 - RNA, 19 nt, Homo sapiens
  misc_RNA (1)...(19): siRNA sense strand
acucguaccuguccggaua

SEQ ID NO: 1512776 - RNA, 19 nt, Homo sapiens
  misc_RNA (1)...(19): siRNA sense strand
ggccguauauggcaauuca

SEQ ID NO: 1512777 - RNA, 19 nt, Homo sapiens
  misc_RNA (1)...(19): siRNA sense strand
guaccuguccggauauauu

SEQ ID NO: 1512778 - RNA, 19 nt, Homo sapiens
  misc_RNA (1)...(19): siRNA sense strand
ccaaccagccgacgagauu

SEQ ID NO: 1512779 - RNA, 19 nt, Homo sapiens
  misc_RNA (1)...(19): siRNA sense strand
agucauagagcaauuguuu

SEQ ID NO: 1512780 - RNA, 19 nt, Homo sapiens
  misc_RNA (1)...(19): siRNA sense strand
ucagugugcuuuggaagaa

SEQ ID NO: 1512781 - RNA, 19 nt, Homo sapiens
  misc_RNA (1)...(19): siRNA sense strand
ugauguagcccauguggaa

SEQ ID NO: 1512782 - RNA, 19 nt, Homo sapiens
  misc_RNA (1)...(19): siRNA sense strand
ggaggaaccugagcuacac

SEQ ID NO: 1512783 - RNA, 19 nt, Homo sapiens
  misc_RNA (1)...(19): siRNA sense strand
cgagaacauuugcgaacug

SEQ ID NO: 1512784 - RNA, 19 nt, Homo sapiens
  misc_RNA (1)...(19): siRNA sense strand
gcaugcagcccaacaacau

SEQ ID NO: 1512785 - RNA, 19 nt, Homo sapiens
  misc_RNA (1)...(19): siRNA sense strand
caucauggguaucgagaac

SEQ ID NO: 1512786 - RNA, 19 nt, Homo sapiens
  misc_RNA (1)...(19): siRNA sense strand
ccuguggucucucugaugu

SEQ ID NO: 1512787 - RNA, 19 nt, Homo sapiens
  misc_RNA (1)...(19): siRNA sense strand
cgucuccuccucagucaua

SEQ ID NO: 1512788 - RNA, 19 nt, Homo sapiens
  misc_RNA (1)...(19): siRNA sense strand
ccucagucauagagcaauu

SEQ ID NO: 1512789 - RNA, 19 nt, Homo sapiens
  misc_RNA (1)...(19): siRNA sense strand
ucaaggccauaguccuguu

SEQ ID NO: 1512790 - RNA, 19 nt, Homo sapiens
  misc_RNA (1)...(19): siRNA sense strand
cguauauggcaauucaaua

SEQ ID NO: 1512791 - RNA, 19 nt, Homo sapiens
  misc_RNA (1)...(19): siRNA sense strand
gcgagcuguuuguguugaa

SEQ ID NO: 1512792 - RNA, 19 nt, Homo sapiens
  misc_RNA (1)...(19): siRNA sense strand
agugugcuuuggaagaaua

SEQ ID NO: 1512793 - RNA, 19 nt, Homo sapiens
  misc_RNA (1)...(19): siRNA sense strand
ucagaugccuguggucucu

SEQ ID NO: 1512794 - RNA, 19 nt, Homo sapiens
  misc_RNA (1)...(19): siRNA sense strand
gcucaaggcgcugcacguu

SEQ ID NO: 1512795 - RNA, 19 nt, Homo sapiens
  misc_RNA (1)...(19): siRNA sense strand
ccacauacggaucuuccaa

SEQ ID NO: 1512796 - RNA, 19 nt, Homo sapiens
  misc_RNA (1)...(19): siRNA sense strand
ccaguacugccgccucaaa

SEQ ID NO: 1512797 - RNA, 19 nt, Homo sapiens
  misc_RNA (1)...(19): siRNA sense strand
gagcgagcuguuuguguug

SEQ ID NO: 1512798 - RNA, 19 nt, Homo sapiens
  misc_RNA (1)...(19): siRNA sense strand
ucucugauguagcccaugu

SEQ ID NO: 1512799 - RNA, 19 nt, Homo sapiens
  misc_RNA (1)...(19): siRNA sense strand
uaccuguccggauauauuu

SEQ ID NO: 1512800 - RNA, 19 nt, Homo sapiens
  misc_RNA (1)...(19): siRNA sense strand
gacgagauucggaaagcuu

SEQ ID NO: 1512801 - RNA, 19 nt, Homo sapiens
  misc_RNA (1)...(19): siRNA sense strand
ucauggguaucgagaacau

SEQ ID NO: 1512802 - RNA, 19 nt, Homo sapiens
  misc_RNA (1)...(19): siRNA sense strand
gauguagcccauguggaaa

SEQ ID NO: 1512803 - RNA, 19 nt, Homo sapiens
  misc_RNA (1)...(19): siRNA sense strand
gcuuuggaagaauacguua

SEQ ID NO: 1512804 - RNA, 19 nt, Homo sapiens
  misc_RNA (1)...(19): siRNA sense strand
uagcccauguggaaagcuu

SEQ ID NO: 1512805 - RNA, 19 nt, Homo sapiens
  misc_RNA (1)...(19): siRNA sense strand
caagcacuacggccaguuc

SEQ ID NO: 1512806 - RNA, 19 nt, Homo sapiens
  misc_RNA (1)...(19): siRNA sense strand
gauauauuucccugcuguu

SEQ ID NO: 1512807 - RNA, 19 nt, Homo sapiens
  misc_RNA (1)...(19): siRNA sense strand
gaacacugcuugcuugaug

SEQ ID NO: 1512808 - RNA, 19 nt, Homo sapiens
  misc_RNA (1)...(19): siRNA sense strand
caguauagcucguuuguuu

SEQ ID NO: 1512809 - RNA, 19 nt, Homo sapiens
  misc_RNA (1)...(19): siRNA sense strand
ggaagcauaucaagaaaga

SEQ ID NO: 1512810 - RNA, 19 nt, Homo sapiens
  misc_RNA (1)...(19): siRNA sense strand
ggaugacccugcccacuua

SEQ ID NO: 1512811 - RNA, 19 nt, Homo sapiens
  misc_RNA (1)...(19): siRNA sense strand
gagcugaccucacacuuga

SEQ ID NO: 1512812 - RNA, 19 nt, Homo sapiens
  misc_RNA (1)...(19): siRNA sense strand
gaagcacccuggcaugaaa

SEQ ID NO: 1512813 - RNA, 19 nt, Homo sapiens
  misc_RNA (1)...(19): siRNA sense strand
ggaagaagcuuuucaagug

SEQ ID NO: 1512814 - RNA, 19 nt, Homo sapiens
  misc_RNA (1)...(19): siRNA sense strand
ggacaucacuaaucacuac

SEQ ID NO: 1512815 - RNA, 19 nt, Homo sapiens
  misc_RNA (1)...(19): siRNA sense strand
gaaagcacguccaguaugg

SEQ ID NO: 1512816 - RNA, 19 nt, Homo sapiens
  misc_RNA (1)...(19): siRNA sense strand
ggaaacagcuuuugagcaa

SEQ ID NO: 1512817 - RNA, 19 nt, Homo sapiens
  misc_RNA (1)...(19): siRNA sense strand
gaucuucgcuguccucucu

SEQ ID NO: 1512818 - RNA, 19 nt, Homo sapiens
  misc_RNA (1)...(19): siRNA sense strand
uagaagaggugccaaagau

SEQ ID NO: 1512819 - RNA, 19 nt, Homo sapiens
  misc_RNA (1)...(19): siRNA sense strand
gaggaagcauaucaagaaa

SEQ ID NO: 1512820 - RNA, 19 nt, Homo sapiens
  misc_RNA (1)...(19): siRNA sense strand
aaagagggacuucaucaua

SEQ ID NO: 1512821 - RNA, 19 nt, Homo sapiens
  misc_RNA (1)...(19): siRNA sense strand
gaugugauccggcagcaua

SEQ ID NO: 1512822 - RNA, 19 nt, Homo sapiens
  misc_RNA (1)...(19): siRNA sense strand
gagcaugccuacaaguguu

SEQ ID NO: 1512823 - RNA, 19 nt, Homo sapiens
  misc_RNA (1)...(19): siRNA sense strand
gaaagaugcuguggagaag

SEQ ID NO: 1512824 - RNA, 19 nt, Homo sapiens
  misc_RNA (1)...(19): siRNA sense strand
acaccuacauggcuacuaa

SEQ ID NO: 1512825 - RNA, 19 nt, Homo sapiens
  misc_RNA (1)...(19): siRNA sense strand
cuacauggcuacuaaacug

SEQ ID NO: 1512826 - RNA, 19 nt, Homo sapiens
  misc_RNA (1)...(19): siRNA sense strand
caacaugauugaccacauc

SEQ ID NO: 1512827 - RNA, 19 nt, Homo sapiens
  misc_RNA (1)...(19): siRNA sense strand
gaaaguggugggcuacaaa

SEQ ID NO: 1512828 - RNA, 19 nt, Homo sapiens
  misc_RNA (1)...(19): siRNA sense strand
ggaaaguggugggcuacaa

SEQ ID NO: 1512829 - RNA, 19 nt, Homo sapiens
  misc_RNA (1)...(19): siRNA sense strand
gaagaggugccaaagauca

SEQ ID NO: 1512830 - RNA, 19 nt, Homo sapiens
  misc_RNA (1)...(19): siRNA sense strand
gaacaaccucuucaagugu

SEQ ID NO: 1512831 - RNA, 19 nt, Homo sapiens
  misc_RNA (1)...(19): siRNA sense strand
cuagauggcuugauagaag

SEQ ID NO: 1512832 - RNA, 19 nt, Homo sapiens
  misc_RNA (1)...(19): siRNA sense strand
gagcugcugugcaugcauu

SEQ ID NO: 1512833 - RNA, 19 nt, Homo sapiens
  misc_RNA (1)...(19): siRNA sense strand
agugaaggcugcugacuuu

SEQ ID NO: 1512834 - RNA, 19 nt, Homo sapiens
  misc_RNA (1)...(19): siRNA sense strand
gcacugaggaagcauauca

SEQ ID NO: 1512835 - RNA, 19 nt, Homo sapiens
  misc_RNA (1)...(19): siRNA sense strand
caauuuggaucgccauaug

SEQ ID NO: 1512836 - RNA, 19 nt, Homo sapiens
  misc_RNA (1)...(19): siRNA sense strand
gcaaucaccuccgaaagca

SEQ ID NO: 1512837 - RNA, 19 nt, Homo sapiens
  misc_RNA (1)...(19): siRNA sense strand
agaacaaccucuucaagug

SEQ ID NO: 1512838 - RNA, 19 nt, Homo sapiens
  misc_RNA (1)...(19): siRNA sense strand
ugaggaagcauaucaagaa

SEQ ID NO: 1512839 - RNA, 19 nt, Homo sapiens
  misc_RNA (1)...(19): siRNA sense strand
aaguacagcugccaguaua

SEQ ID NO: 1512840 - RNA, 19 nt, Homo sapiens
  misc_RNA (1)...(19): siRNA sense strand
gcaggaauaugcagauggu

SEQ ID NO: 1512841 - RNA, 19 nt, Homo sapiens
  misc_RNA (1)...(19): siRNA sense strand
ggugaccgcugaggacuuu

SEQ ID NO: 1512842 - RNA, 19 nt, Homo sapiens
  misc_RNA (1)...(19): siRNA sense strand
gaacuccaccuaccagugu

SEQ ID NO: 1512843 - RNA, 19 nt, Homo sapiens
  misc_RNA (1)...(19): siRNA sense strand
gcaucaagcacaauaaugu

SEQ ID NO: 1512844 - RNA, 19 nt, Homo sapiens
  misc_RNA (1)...(19): siRNA sense strand
gcugacauaucccagaaug

SEQ ID NO: 1512845 - RNA, 19 nt, Homo sapiens
  misc_RNA (1)...(19): siRNA sense strand
ggugccagcucugcaagua

SEQ ID NO: 1512846 - RNA, 19 nt, Homo sapiens
  misc_RNA (1)...(19): siRNA sense strand
ggaagacuccaaugacuca

SEQ ID NO: 1512847 - RNA, 19 nt, Homo sapiens
  misc_RNA (1)...(19): siRNA sense strand
gagaggcaacuuugagaaa

SEQ ID NO: 1512848 - RNA, 19 nt, Homo sapiens
  misc_RNA (1)...(19): siRNA sense strand
ccacacugauggaagaaga

SEQ ID NO: 1512849 - RNA, 19 nt, Homo sapiens
  misc_RNA (1)...(19): siRNA sense strand
gcacugugauagcaaacug

SEQ ID NO: 1512850 - RNA, 19 nt, Homo sapiens
  misc_RNA (1)...(19): siRNA sense strand
gcacugagcagaaaacuga

SEQ ID NO: 1512851 - RNA, 19 nt, Homo sapiens
  misc_RNA (1)...(19): siRNA sense strand
gcucguuuguuucugcuuu

SEQ ID NO: 1512852 - RNA, 19 nt, Homo sapiens
  misc_RNA (1)...(19): siRNA sense strand
uguaggcagugcucauaua

SEQ ID NO: 1512853 - RNA, 19 nt, Homo sapiens
  misc_RNA (1)...(19): siRNA sense strand
gaggagagaggcaacuuug

SEQ ID NO: 1512854 - RNA, 19 nt, Homo sapiens
  misc_RNA (1)...(19): siRNA sense strand
gaauugugcaaacaguaua

SEQ ID NO: 1512855 - RNA, 19 nt, Homo sapiens
  misc_RNA (1)...(19): siRNA sense strand
acgguuugcuccugcauua

SEQ ID NO: 1512856 - RNA, 19 nt, Homo sapiens
  misc_RNA (1)...(19): siRNA sense strand
gaaggaacacucccucaag

SEQ ID NO: 1512857 - RNA, 19 nt, Homo sapiens
  misc_RNA (1)...(19): siRNA sense strand
uaaauucuguguggaagug

SEQ ID NO: 1512858 - RNA, 19 nt, Homo sapiens
  misc_RNA (1)...(19): siRNA sense strand
gagaggaggaaacagcuuu

SEQ ID NO: 1512859 - RNA, 19 nt, Homo sapiens
  misc_RNA (1)...(19): siRNA sense strand
gaaacuccgagcacucaaa

SEQ ID NO: 1512860 - RNA, 19 nt, Homo sapiens
  misc_RNA (1)...(19): siRNA sense strand
auacggagcccaacgguuu

SEQ ID NO: 1512861 - RNA, 19 nt, Homo sapiens
  misc_RNA (1)...(19): siRNA sense strand
gggugaagcucaggaaauc

SEQ ID NO: 1512862 - RNA, 19 nt, Homo sapiens
  misc_RNA (1)...(19): siRNA sense strand
gcgacaagcccaacaaagu

SEQ ID NO: 1512863 - RNA, 19 nt, Homo sapiens
  misc_RNA (1)...(19): siRNA sense strand
acacggcacuuuggagaaa

SEQ ID NO: 1512864 - RNA, 19 nt, Homo sapiens
  misc_RNA (1)...(19): siRNA sense strand
ggaggcauccagaacacua

SEQ ID NO: 1512865 - RNA, 19 nt, Homo sapiens
  misc_RNA (1)...(19): siRNA sense strand
uaagcacugugauagcaaa

SEQ ID NO: 1512866 - RNA, 19 nt, Homo sapiens
  misc_RNA (1)...(19): siRNA sense strand
gcacuuuggagaaacuaaa

SEQ ID NO: 1512867 - RNA, 19 nt, Homo sapiens
  misc_RNA (1)...(19): siRNA sense strand
guacacacacggcacuuug

SEQ ID NO: 1512868 - RNA, 19 nt, Homo sapiens
  misc_RNA (1)...(19): siRNA sense strand
agaaagaugcuguggagaa

SEQ ID NO: 1512869 - RNA, 19 nt, Homo sapiens
  misc_RNA (1)...(19): siRNA sense strand
caugaauggugaugaguca

SEQ ID NO: 1512870 - RNA, 19 nt, Homo sapiens
  misc_RNA (1)...(19): siRNA sense strand
gccugaauuugaugucuuu

SEQ ID NO: 1512871 - RNA, 19 nt, Homo sapiens
  misc_RNA (1)...(19): siRNA sense strand
caacccaggugccgucuac

SEQ ID NO: 1512872 - RNA, 19 nt, Homo sapiens
  misc_RNA (1)...(19): siRNA sense strand
gcaacaugauugaccacau

SEQ ID NO: 1512873 - RNA, 19 nt, Homo sapiens
  misc_RNA (1)...(19): siRNA sense strand
ccauuccgcugcaucaaau

SEQ ID NO: 1512874 - RNA, 19 nt, Homo sapiens
  misc_RNA (1)...(19): siRNA sense strand
gagagaggcaacuuugaga

SEQ ID NO: 1512875 - RNA, 19 nt, Homo sapiens
  misc_RNA (1)...(19): siRNA sense strand
ccacgacauugaugcguau

SEQ ID NO: 1512876 - RNA, 19 nt, Homo sapiens
  misc_RNA (1)...(19): siRNA sense strand
cgacaagcccaacaaagug

SEQ ID NO: 1512877 - RNA, 19 nt, Homo sapiens
  misc_RNA (1)...(19): siRNA sense strand
gaugcaaacucugcuccuu

SEQ ID NO: 1512878 - RNA, 19 nt, Homo sapiens
  misc_RNA (1)...(19): siRNA sense strand
gagacgagcaggaucuuca

SEQ ID NO: 1512879 - RNA, 19 nt, Homo sapiens
  misc_RNA (1)...(19): siRNA sense strand
aaacucugcuccuucaagu

SEQ ID NO: 1512880 - RNA, 19 nt, Homo sapiens
  misc_RNA (1)...(19): siRNA sense strand
cauaaaccauuccgaugca

SEQ ID NO: 1512881 - RNA, 19 nt, Homo sapiens
  misc_RNA (1)...(19): siRNA sense strand
caugagaagcccacacuga

SEQ ID NO: 1512882 - RNA, 19 nt, Homo sapiens
  misc_RNA (1)...(19): siRNA sense strand
gcagcacgccagcaaguug

SEQ ID NO: 1512883 - RNA, 19 nt, Homo sapiens
  misc_RNA (1)...(19): siRNA sense strand
gcgaugggcauuucuagau

SEQ ID NO: 1512884 - RNA, 19 nt, Homo sapiens
  misc_RNA (1)...(19): siRNA sense strand
aaacacauauacucaaagc

SEQ ID NO: 1512885 - RNA, 19 nt, Homo sapiens
  misc_RNA (1)...(19): siRNA sense strand
ggagagaggcaacuuugag

SEQ ID NO: 1512886 - RNA, 19 nt, Homo sapiens
  misc_RNA (1)...(19): siRNA sense strand
caggugccgucuacaaaug

SEQ ID NO: 1512887 - RNA, 19 nt, Homo sapiens
  misc_RNA (1)...(19): siRNA sense strand
ucugggacaucacuaauca

SEQ ID NO: 1512888 - RNA, 19 nt, Homo sapiens
  misc_RNA (1)...(19): siRNA sense strand
ggacuuugugcacgacgua

SEQ ID NO: 1512889 - RNA, 19 nt, Homo sapiens
  misc_RNA (1)...(19): siRNA sense strand
caaauacaagcgcaacaug

SEQ ID NO: 1512890 - RNA, 19 nt, Homo sapiens
  misc_RNA (1)...(19): siRNA sense strand
caaguacagcugccaguau

SEQ ID NO: 1512891 - RNA, 19 nt, Homo sapiens
  misc_RNA (1)...(19): siRNA sense strand
gggauaccauugcagucaa

SEQ ID NO: 1512892 - RNA, 19 nt, Homo sapiens
  misc_RNA (1)...(19): siRNA sense strand
gacaagcccaacaaaguga

SEQ ID NO: 1512893 - RNA, 19 nt, Homo sapiens
  misc_RNA (1)...(19): siRNA sense strand
cgacauugaugcguauuac

SEQ ID NO: 1512894 - RNA, 19 nt, Homo sapiens
  misc_RNA (1)...(19): siRNA sense strand
uuacacaggcuuuaaaucu

SEQ ID NO: 1512895 - RNA, 19 nt, Homo sapiens
  misc_RNA (1)...(19): siRNA sense strand
gcagauuucaaacaagaga

SEQ ID NO: 1512896 - RNA, 19 nt, Homo sapiens
  misc_RNA (1)...(19): siRNA sense strand
uugcagauuucaaacaaga

SEQ ID NO: 1512897 - RNA, 19 nt, Homo sapiens
  misc_RNA (1)...(19): siRNA sense strand
cgaugggcauuucuagaug

SEQ ID NO: 1512898 - RNA, 19 nt, Homo sapiens
  misc_RNA (1)...(19): siRNA sense strand
cgaaagcacguccaguaug

SEQ ID NO: 1512899 - RNA, 19 nt, Homo sapiens
  misc_RNA (1)...(19): siRNA sense strand
caucgugucccauuacaug

SEQ ID NO: 1512900 - RNA, 19 nt, Homo sapiens
  misc_RNA (1)...(19): siRNA sense strand
ggacaucaucaaggagaaa

SEQ ID NO: 1512901 - RNA, 19 nt, Homo sapiens
  misc_RNA (1)...(19): siRNA sense strand
gauagcaaacugcaaagca

SEQ ID NO: 1512902 - RNA, 19 nt, Homo sapiens
  misc_RNA (1)...(19): siRNA sense strand
aagagggacuucaucauac

SEQ ID NO: 1512903 - RNA, 19 nt, Homo sapiens
  misc_RNA (1)...(19): siRNA sense strand
cuaaagagggacuucauca

SEQ ID NO: 1512904 - RNA, 19 nt, Homo sapiens
  misc_RNA (1)...(19): siRNA sense strand
ccagaagcgccacgacauu

SEQ ID NO: 1512905 - RNA, 19 nt, Homo sapiens
  misc_RNA (1)...(19): siRNA sense strand
cguggaagcugggcacuca

SEQ ID NO: 1512906 - RNA, 19 nt, Homo sapiens
  misc_RNA (1)...(19): siRNA sense strand
aaauacaagcgcaacauga

SEQ ID NO: 1512907 - RNA, 19 nt, Homo sapiens
  misc_RNA (1)...(19): siRNA sense strand
gaaccuaccuucuggauca

SEQ ID NO: 1512908 - RNA, 19 nt, Homo sapiens
  misc_RNA (1)...(19): siRNA sense strand
ggaaauuucuucgaaggua

SEQ ID NO: 1512909 - RNA, 19 nt, Homo sapiens
  misc_RNA (1)...(19): siRNA sense strand
guuaagaccucaaaguaaa

SEQ ID NO: 1512910 - RNA, 19 nt, Homo sapiens
  misc_RNA (1)...(19): siRNA sense strand
aaaggaaccucuucgugua

SEQ ID NO: 1512911 - RNA, 19 nt, Homo sapiens
  misc_RNA (1)...(19): siRNA sense strand
gagaugcacaguuggauua

SEQ ID NO: 1512912 - RNA, 19 nt, Homo sapiens
  misc_RNA (1)...(19): siRNA sense strand
guaaaugaauguggugaaa

SEQ ID NO: 1512913 - RNA, 19 nt, Homo sapiens
  misc_RNA (1)...(19): siRNA sense strand
ggacaaccucuuugaaauu

SEQ ID NO: 1512914 - RNA, 19 nt, Homo sapiens
  misc_RNA (1)...(19): siRNA sense strand
gaaccagcuuccaaaguga

SEQ ID NO: 1512915 - RNA, 19 nt, Homo sapiens
  misc_RNA (1)...(19): siRNA sense strand
gcaagugucuuacagaacu

SEQ ID NO: 1512916 - RNA, 19 nt, Homo sapiens
  misc_RNA (1)...(19): siRNA sense strand
gugaaaguauugacagaaa

SEQ ID NO: 1512917 - RNA, 19 nt, Homo sapiens
  misc_RNA (1)...(19): siRNA sense strand
gacaaccucuuugaaauug

SEQ ID NO: 1512918 - RNA, 19 nt, Homo sapiens
  misc_RNA (1)...(19): siRNA sense strand
caaccucuuugaaauugua

SEQ ID NO: 1512919 - RNA, 19 nt, Homo sapiens
  misc_RNA (1)...(19): siRNA sense strand
ccauuaagcuuaccuacau

SEQ ID NO: 1512920 - RNA, 19 nt, Homo sapiens
  misc_RNA (1)...(19): siRNA sense strand
gggacaaccucuuugaaau

SEQ ID NO: 1512921 - RNA, 19 nt, Homo sapiens
  misc_RNA (1)...(19): siRNA sense strand
ggaauggguaaauguguua

SEQ ID NO: 1512922 - RNA, 19 nt, Homo sapiens
  misc_RNA (1)...(19): siRNA sense strand
gcaaagcgacauaaugaug

SEQ ID NO: 1512923 - RNA, 19 nt, Homo sapiens
  misc_RNA (1)...(19): siRNA sense strand
guaacaacgucucgaacuu

SEQ ID NO: 1512924 - RNA, 19 nt, Homo sapiens
  misc_RNA (1)...(19): siRNA sense strand
cugaagagaugcacaguug

SEQ ID NO: 1512925 - RNA, 19 nt, Homo sapiens
  misc_RNA (1)...(19): siRNA sense strand
uaaagagguucauaaaguc

SEQ ID NO: 1512926 - RNA, 19 nt, Homo sapiens
  misc_RNA (1)...(19): siRNA sense strand
caaagugacugaacaagcu

SEQ ID NO: 1512927 - RNA, 19 nt, Homo sapiens
  misc_RNA (1)...(19): siRNA sense strand
caaaggcggaguucuguuu

SEQ ID NO: 1512928 - RNA, 19 nt, Homo sapiens
  misc_RNA (1)...(19): siRNA sense strand
acaauaggcuacuucaaau

SEQ ID NO: 1512929 - RNA, 19 nt, Homo sapiens
  misc_RNA (1)...(19): siRNA sense strand
cacaauaggcuacuucaaa

SEQ ID NO: 1512930 - RNA, 19 nt, Homo sapiens
  misc_RNA (1)...(19): siRNA sense strand
ggaaccucuucguguaaua

SEQ ID NO: 1512931 - RNA, 19 nt, Homo sapiens
  misc_RNA (1)...(19): siRNA sense strand
cuacuaagcuaaggccaaa

SEQ ID NO: 1512932 - RNA, 19 nt, Homo sapiens
  misc_RNA (1)...(19): siRNA sense strand
aaagcuggauauuguguaa

SEQ ID NO: 1512933 - RNA, 19 nt, Homo sapiens
  misc_RNA (1)...(19): siRNA sense strand
ugaauguggugaaaguauu

SEQ ID NO: 1512934 - RNA, 19 nt, Homo sapiens
  misc_RNA (1)...(19): siRNA sense strand
gaagagaugcacaguugga

SEQ ID NO: 1512935 - RNA, 19 nt, Homo sapiens
  misc_RNA (1)...(19): siRNA sense strand
aagcaaagcgacauaauga

SEQ ID NO: 1512936 - RNA, 19 nt, Homo sapiens
  misc_RNA (1)...(19): siRNA sense strand
ucacaaagccaucuuccuu

SEQ ID NO: 1512937 - RNA, 19 nt, Homo sapiens
  misc_RNA (1)...(19): siRNA sense strand
uaaaccaccucaagauagu

SEQ ID NO: 1512938 - RNA, 19 nt, Homo sapiens
  misc_RNA (1)...(19): siRNA sense strand
agaaccagcuuccaaagug

SEQ ID NO: 1512939 - RNA, 19 nt, Homo sapiens
  misc_RNA (1)...(19): siRNA sense strand
caaagcgacauaaugauga

SEQ ID NO: 1512940 - RNA, 19 nt, Homo sapiens
  misc_RNA (1)...(19): siRNA sense strand
uaacaacgucucgaacuuu

SEQ ID NO: 1512941 - RNA, 19 nt, Homo sapiens
  misc_RNA (1)...(19): siRNA sense strand
ugauagcccugaagagaug

SEQ ID NO: 1512942 - RNA, 19 nt, Homo sapiens
  misc_RNA (1)...(19): siRNA sense strand
caagagaaccagcuuccaa

SEQ ID NO: 1512943 - RNA, 19 nt, Homo sapiens
  misc_RNA (1)...(19): siRNA sense strand
cagcaacucuuuggucuca

SEQ ID NO: 1512944 - RNA, 19 nt, Homo sapiens
  misc_RNA (1)...(19): siRNA sense strand
gcggaguucuguuuuguua

SEQ ID NO: 1512945 - RNA, 19 nt, Homo sapiens
  misc_RNA (1)...(19): siRNA sense strand
cagaaucgcauuugugguu

SEQ ID NO: 1512946 - RNA, 19 nt, Homo sapiens
  misc_RNA (1)...(19): siRNA sense strand
aaagccaucuuccuuacuu

SEQ ID NO: 1512947 - RNA, 19 nt, Homo sapiens
  misc_RNA (1)...(19): siRNA sense strand
aagcaagugucuuacagaa

SEQ ID NO: 1512948 - RNA, 19 nt, Homo sapiens
  misc_RNA (1)...(19): siRNA sense strand
gcugauagcccugaagaga

SEQ ID NO: 1512949 - RNA, 19 nt, Homo sapiens
  misc_RNA (1)...(19): siRNA sense strand
cacaaagccaucuuccuua

SEQ ID NO: 1512950 - RNA, 19 nt, Homo sapiens
  misc_RNA (1)...(19): siRNA sense strand
aaaugaauguggugaaagu

SEQ ID NO: 1512951 - RNA, 19 nt, Homo sapiens
  misc_RNA (1)...(19): siRNA sense strand
ccuaaaccaccucaagaua

SEQ ID NO: 1512952 - RNA, 19 nt, Homo sapiens
  misc_RNA (1)...(19): siRNA sense strand
ucuuuggucucaaccuuua

SEQ ID NO: 1512953 - RNA, 19 nt, Homo sapiens
  misc_RNA (1)...(19): siRNA sense strand
aagcuuaccuacauuucaa

SEQ ID NO: 1512954 - RNA, 19 nt, Homo sapiens
  misc_RNA (1)...(19): siRNA sense strand
acucacagccuaauucuga

SEQ ID NO: 1512955 - RNA, 19 nt, Homo sapiens
  misc_RNA (1)...(19): siRNA sense strand
guccaggaauguaagcaaa

SEQ ID NO: 1512956 - RNA, 19 nt, Homo sapiens
  misc_RNA (1)...(19): siRNA sense strand
aaacacgcuuuccguccua

SEQ ID NO: 1512957 - RNA, 19 nt, Homo sapiens
  misc_RNA (1)...(19): siRNA sense strand
caacgucucgaacuuucua

SEQ ID NO: 1512958 - RNA, 19 nt, Homo sapiens
  misc_RNA (1)...(19): siRNA sense strand
gaauguggugaaaguauug

SEQ ID NO: 1512959 - RNA, 19 nt, Homo sapiens
  misc_RNA (1)...(19): siRNA sense strand
gccuaauucugauaaccua

SEQ ID NO: 1512960 - RNA, 19 nt, Homo sapiens
  misc_RNA (1)...(19): siRNA sense strand
uaagcaaagcgacauaaug

SEQ ID NO: 1512961 - RNA, 19 nt, Homo sapiens
  misc_RNA (1)...(19): siRNA sense strand
acaaggagcagugaugaaa

SEQ ID NO: 1512962 - RNA, 19 nt, Homo sapiens
  misc_RNA (1)...(19): siRNA sense strand
ugaaaacagugggaaauuu

SEQ ID NO: 1512963 - RNA, 19 nt, Homo sapiens
  misc_RNA (1)...(19): siRNA sense strand
gaugcacaguuggauuaaa

SEQ ID NO: 1512964 - RNA, 19 nt, Homo sapiens
  misc_RNA (1)...(19): siRNA sense strand
aagauaguuucguguggua

SEQ ID NO: 1512965 - RNA, 19 nt, Homo sapiens
  misc_RNA (1)...(19): siRNA sense strand
uaaccuaagucgccauggu

SEQ ID NO: 1512966 - RNA, 19 nt, Homo sapiens
  misc_RNA (1)...(19): siRNA sense strand
gaucgucagaaucgcauuu

SEQ ID NO: 1512967 - RNA, 19 nt, Homo sapiens
  misc_RNA (1)...(19): siRNA sense strand
guuggagccauuaagcuua

SEQ ID NO: 1512968 - RNA, 19 nt, Homo sapiens
  misc_RNA (1)...(19): siRNA sense strand
cauaaaguccaggaaugua

SEQ ID NO: 1512969 - RNA, 19 nt, Homo sapiens
  misc_RNA (1)...(19): siRNA sense strand
ccacuuaaagagguucaua

SEQ ID NO: 1512970 - RNA, 19 nt, Homo sapiens
  misc_RNA (1)...(19): siRNA sense strand
aaacaaggagcagugauga

SEQ ID NO: 1512971 - RNA, 19 nt, Homo sapiens
  misc_RNA (1)...(19): siRNA sense strand
ggaguucuguuuuguuaug

SEQ ID NO: 1512972 - RNA, 19 nt, Homo sapiens
  misc_RNA (1)...(19): siRNA sense strand
uggaauggguaaauguguu

SEQ ID NO: 1512973 - RNA, 19 nt, Homo sapiens
  misc_RNA (1)...(19): siRNA sense strand
acaaagccaucuuccuuac

SEQ ID NO: 1512974 - RNA, 19 nt, Homo sapiens
  misc_RNA (1)...(19): siRNA sense strand
aaucugaaacggucacaaa

SEQ ID NO: 1512975 - RNA, 19 nt, Homo sapiens
  misc_RNA (1)...(19): siRNA sense strand
gguggcguacccaucauua

SEQ ID NO: 1512976 - RNA, 19 nt, Homo sapiens
  misc_RNA (1)...(19): siRNA sense strand
uaggcuacuucaaaucuga

SEQ ID NO: 1512977 - RNA, 19 nt, Homo sapiens
  misc_RNA (1)...(19): siRNA sense strand
uguuaagaccucaaaguaa

SEQ ID NO: 1512978 - RNA, 19 nt, Homo sapiens
  misc_RNA (1)...(19): siRNA sense strand
gagaaccagcuuccaaagu

SEQ ID NO: 1512979 - RNA, 19 nt, Homo sapiens
  misc_RNA (1)...(19): siRNA sense strand
cuaaaccaccucaagauag

SEQ ID NO: 1512980 - RNA, 19 nt, Homo sapiens
  misc_RNA (1)...(19): siRNA sense strand
aaaagauugugaccuagua

SEQ ID NO: 1512981 - RNA, 19 nt, Homo sapiens
  misc_RNA (1)...(19): siRNA sense strand
gcaacucuuuggucucaac

SEQ ID NO: 1512982 - RNA, 19 nt, Homo sapiens
  misc_RNA (1)...(19): siRNA sense strand
auaaaguccaggaauguaa

SEQ ID NO: 1512983 - RNA, 19 nt, Homo sapiens
  misc_RNA (1)...(19): siRNA sense strand
agugggaaauuucuucgaa

SEQ ID NO: 1512984 - RNA, 19 nt, Homo sapiens
  misc_RNA (1)...(19): siRNA sense strand
guaagcaaagcgacauaau

SEQ ID NO: 1512985 - RNA, 19 nt, Homo sapiens
  misc_RNA (1)...(19): siRNA sense strand
ucacagccuaauucugaua

SEQ ID NO: 1512986 - RNA, 19 nt, Homo sapiens
  misc_RNA (1)...(19): siRNA sense strand
gaacuucaagguccagacu

SEQ ID NO: 1512987 - RNA, 19 nt, Homo sapiens
  misc_RNA (1)...(19): siRNA sense strand
caaagcuggauauugugua

SEQ ID NO: 1512988 - RNA, 19 nt, Homo sapiens
  misc_RNA (1)...(19): siRNA sense strand
cauuaagcuuaccuacauu

SEQ ID NO: 1512989 - RNA, 19 nt, Homo sapiens
  misc_RNA (1)...(19): siRNA sense strand
cuguuaagaccucaaagua

SEQ ID NO: 1512990 - RNA, 19 nt, Homo sapiens
  misc_RNA (1)...(19): siRNA sense strand
agaaucgcauuugugguuu

SEQ ID NO: 1512991 - RNA, 19 nt, Homo sapiens
  misc_RNA (1)...(19): siRNA sense strand
cuaguggaauggguaaaug

SEQ ID NO: 1512992 - RNA, 19 nt, Homo sapiens
  misc_RNA (1)...(19): siRNA sense strand
aaucugaacuggaaaagga

SEQ ID NO: 1512993 - RNA, 19 nt, Homo sapiens
  misc_RNA (1)...(19): siRNA sense strand
uuauguggaucgucagaau

SEQ ID NO: 1512994 - RNA, 19 nt, Homo sapiens
  misc_RNA (1)...(19): siRNA sense strand
uguaauaccacuuaaagag

SEQ ID NO: 1512995 - RNA, 19 nt, Homo sapiens
  misc_RNA (1)...(19): siRNA sense strand
aagagaaccagcuuccaaa

SEQ ID NO: 1512996 - RNA, 19 nt, Homo sapiens
  misc_RNA (1)...(19): siRNA sense strand
gaagaaguaaaugaaugug

SEQ ID NO: 1512997 - RNA, 19 nt, Homo sapiens
  misc_RNA (1)...(19): siRNA sense strand
guucauaaaguccaggaau

SEQ ID NO: 1512998 - RNA, 19 nt, Homo sapiens
  misc_RNA (1)...(19): siRNA sense strand
cuucguguaauaccacuua

SEQ ID NO: 1512999 - RNA, 19 nt, Homo sapiens
  misc_RNA (1)...(19): siRNA sense strand
ucaauuggaugaaaacaca

SEQ ID NO: 1513000 - RNA, 19 nt, Homo sapiens
  misc_RNA (1)...(19): siRNA sense strand
ggccaaaggcggaguucug

SEQ ID NO: 1513001 - RNA, 19 nt, Homo sapiens
  misc_RNA (1)...(19): siRNA sense strand
aacaacgucucgaacuuuc

SEQ ID NO: 1513002 - RNA, 19 nt, Homo sapiens
  misc_RNA (1)...(19): siRNA sense strand
aaacacaauaggcuacuuc

SEQ ID NO: 1513003 - RNA, 19 nt, Homo sapiens
  misc_RNA (1)...(19): siRNA sense strand
uuccuuacuuuacuccuaa

SEQ ID NO: 1513004 - RNA, 19 nt, Homo sapiens
  misc_RNA (1)...(19): siRNA sense strand
ggugaaaguauugacagaa

SEQ ID NO: 1513005 - RNA, 19 nt, Homo sapiens
  misc_RNA (1)...(19): siRNA sense strand
augcaggaaugaggaagua

SEQ ID NO: 1513006 - RNA, 19 nt, Homo sapiens
  misc_RNA (1)...(19): siRNA sense strand
caaccuuuaccauggagaa

SEQ ID NO: 1513007 - RNA, 19 nt, Homo sapiens
  misc_RNA (1)...(19): siRNA sense strand
cuacauagaucaugacauc

SEQ ID NO: 1513008 - RNA, 19 nt, Homo sapiens
  misc_RNA (1)...(19): siRNA sense strand
caggagcucuguguacuuu

SEQ ID NO: 1513009 - RNA, 19 nt, Homo sapiens
  misc_RNA (1)...(19): siRNA sense strand
gaccugagccauccaucua

SEQ ID NO: 1513010 - RNA, 19 nt, Homo sapiens
  misc_RNA (1)...(19): siRNA sense strand
caucgacauucgugacuga

SEQ ID NO: 1513011 - RNA, 19 nt, Homo sapiens
  misc_RNA (1)...(19): siRNA sense strand
gcaggucacugugcacaag

SEQ ID NO: 1513012 - RNA, 19 nt, Homo sapiens
  misc_RNA (1)...(19): siRNA sense strand
caucauggccaagaucaaa

SEQ ID NO: 1513013 - RNA, 19 nt, Homo sapiens
  misc_RNA (1)...(19): siRNA sense strand
ggaccaggagcucugugua

SEQ ID NO: 1513014 - RNA, 19 nt, Homo sapiens
  misc_RNA (1)...(19): siRNA sense strand
guucaaggcaccagcuuau

SEQ ID NO: 1513015 - RNA, 19 nt, Homo sapiens
  misc_RNA (1)...(19): siRNA sense strand
gcccuggaccuaccacgua

SEQ ID NO: 1513016 - RNA, 19 nt, Homo sapiens
  misc_RNA (1)...(19): siRNA sense strand
gcagaccccugucaucaug

SEQ ID NO: 1513017 - RNA, 19 nt, Homo sapiens
  misc_RNA (1)...(19): siRNA sense strand
guacuacuuugagaagauc

SEQ ID NO: 1513018 - RNA, 19 nt, Homo sapiens
  misc_RNA (1)...(19): siRNA sense strand
cagcuuauacccugcauag

SEQ ID NO: 1513019 - RNA, 19 nt, Homo sapiens
  misc_RNA (1)...(19): siRNA sense strand
ggagcucuguguacuuugc

SEQ ID NO: 1513020 - RNA, 19 nt, Homo sapiens
  misc_RNA (1)...(19): siRNA sense strand
gcacgggcuacauagauca

SEQ ID NO: 1513021 - RNA, 19 nt, Homo sapiens
  misc_RNA (1)...(19): siRNA sense strand
cagaaccgcagcccuacuu

SEQ ID NO: 1513022 - RNA, 19 nt, Homo sapiens
  misc_RNA (1)...(19): siRNA sense strand
cgggcuacauagaucauga

SEQ ID NO: 1513023 - RNA, 19 nt, Homo sapiens
  misc_RNA (1)...(19): siRNA sense strand
ucaaggcaccagcuuauac

SEQ ID NO: 1513024 - RNA, 19 nt, Homo sapiens
  misc_RNA (1)...(19): siRNA sense strand
gaaccgcagcccuacuuac

SEQ ID NO: 1513025 - RNA, 19 nt, Homo sapiens
  misc_RNA (1)...(19): siRNA sense strand
agccauccaucuaucagaa

SEQ ID NO: 1513026 - RNA, 19 nt, Homo sapiens
  misc_RNA (1)...(19): siRNA sense strand
acagagugauggaccucaa

SEQ ID NO: 1513027 - RNA, 19 nt, Homo sapiens
  misc_RNA (1)...(19): siRNA sense strand
auaacucgguuuggaaugu

SEQ ID NO: 1513028 - RNA, 19 nt, Homo sapiens
  misc_RNA (1)...(19): siRNA sense strand
aaauaacucgguuuggaau

SEQ ID NO: 1513029 - RNA, 19 nt, Homo sapiens
  misc_RNA (1)...(19): siRNA sense strand
gaccaggagcucuguguac

SEQ ID NO: 1513030 - RNA, 19 nt, Homo sapiens
  misc_RNA (1)...(19): siRNA sense strand
caaggcaggaggucaagca

SEQ ID NO: 1513031 - RNA, 19 nt, Homo sapiens
  misc_RNA (1)...(19): siRNA sense strand
gagccauccaucuaucaga

SEQ ID NO: 1513032 - RNA, 19 nt, Homo sapiens
  misc_RNA (1)...(19): siRNA sense strand
uaacucgguuuggaauguc

SEQ ID NO: 1513033 - RNA, 19 nt, Homo sapiens
  misc_RNA (1)...(19): siRNA sense strand
ccacuggucaucgacauuc

SEQ ID NO: 1513034 - RNA, 19 nt, Homo sapiens
  misc_RNA (1)...(19): siRNA sense strand
ccugagccauccaucuauc

SEQ ID NO: 1513035 - RNA, 19 nt, Homo sapiens
  misc_RNA (1)...(19): siRNA sense strand
ggcagaggaugaagaaaua

SEQ ID NO: 1513036 - RNA, 19 nt, Homo sapiens
  misc_RNA (1)...(19): siRNA sense strand
ggaaaggucucgcaguaca

SEQ ID NO: 1513037 - RNA, 19 nt, Homo sapiens
  misc_RNA (1)...(19): siRNA sense strand
ccacuuuacugucgacuuu

SEQ ID NO: 1513038 - RNA, 19 nt, Homo sapiens
  misc_RNA (1)...(19): siRNA sense strand
gcacauaccucacgaucac

SEQ ID NO: 1513039 - RNA, 19 nt, Homo sapiens
  misc_RNA (1)...(19): siRNA sense strand
gagaagaaaucaguaccuu

SEQ ID NO: 1513040 - RNA, 19 nt, Homo sapiens
  misc_RNA (1)...(19): siRNA sense strand
aaacgucugugccucuuaa

SEQ ID NO: 1513041 - RNA, 19 nt, Homo sapiens
  misc_RNA (1)...(19): siRNA sense strand
gaaacacacaugcagagaa

SEQ ID NO: 1513042 - RNA, 19 nt, Homo sapiens
  misc_RNA (1)...(19): siRNA sense strand
aagcugccuucgccaauua

SEQ ID NO: 1513043 - RNA, 19 nt, Homo sapiens
  misc_RNA (1)...(19): siRNA sense strand
gaucucaucgcugguauuu

SEQ ID NO: 1513044 - RNA, 19 nt, Homo sapiens
  misc_RNA (1)...(19): siRNA sense strand
aaacacacaugcagagaag

SEQ ID NO: 1513045 - RNA, 19 nt, Homo sapiens
  misc_RNA (1)...(19): siRNA sense strand
ccacguguccugcaugauu

SEQ ID NO: 1513046 - RNA, 19 nt, Homo sapiens
  misc_RNA (1)...(19): siRNA sense strand
ggaacguccuugugguuuc

SEQ ID NO: 1513047 - RNA, 19 nt, Homo sapiens
  misc_RNA (1)...(19): siRNA sense strand
ucucaucgcugguauuugg

SEQ ID NO: 1513048 - RNA, 19 nt, Homo sapiens
  misc_RNA (1)...(19): siRNA sense strand
ccaagagacccuuccagaa

SEQ ID NO: 1513049 - RNA, 19 nt, Homo sapiens
  misc_RNA (1)...(19): siRNA sense strand
auggaaaggucucgcagua

SEQ ID NO: 1513050 - RNA, 19 nt, Homo sapiens
  misc_RNA (1)...(19): siRNA sense strand
gaaagugaaggagagaaga

SEQ ID NO: 1513051 - RNA, 19 nt, Homo sapiens
  misc_RNA (1)...(19): siRNA sense strand
guaccuuucugguccacuu

SEQ ID NO: 1513052 - RNA, 19 nt, Homo sapiens
  misc_RNA (1)...(19): siRNA sense strand
gcucagcacccucuaugga

SEQ ID NO: 1513053 - RNA, 19 nt, Homo sapiens
  misc_RNA (1)...(19): siRNA sense strand
ggaugaagaaauacaaaca

SEQ ID NO: 1513054 - RNA, 19 nt, Homo sapiens
  misc_RNA (1)...(19): siRNA sense strand
uaauucugcugccgcugua

SEQ ID NO: 1513055 - RNA, 19 nt, Homo sapiens
  misc_RNA (1)...(19): siRNA sense strand
ggaaagcguggcaaagaca

SEQ ID NO: 1513056 - RNA, 19 nt, Homo sapiens
  misc_RNA (1)...(19): siRNA sense strand
uacacaagguccuauguca

SEQ ID NO: 1513057 - RNA, 19 nt, Homo sapiens
  misc_RNA (1)...(19): siRNA sense strand
gaggaugaagaaauacaaa

SEQ ID NO: 1513058 - RNA, 19 nt, Homo sapiens
  misc_RNA (1)...(19): siRNA sense strand
gggaaagcguggcaaagac

SEQ ID NO: 1513059 - RNA, 19 nt, Homo sapiens
  misc_RNA (1)...(19): siRNA sense strand
gcaguguucuucguauucu

SEQ ID NO: 1513060 - RNA, 19 nt, Homo sapiens
  misc_RNA (1)...(19): siRNA sense strand
ugucgacuuucaagcuaua

SEQ ID NO: 1513061 - RNA, 19 nt, Homo sapiens
  misc_RNA (1)...(19): siRNA sense strand
ggaaagugaaggagagaag

SEQ ID NO: 1513062 - RNA, 19 nt, Homo sapiens
  misc_RNA (1)...(19): siRNA sense strand
ggcaucuucuuccucauau

SEQ ID NO: 1513063 - RNA, 19 nt, Homo sapiens
  misc_RNA (1)...(19): siRNA sense strand
ggaaacacacaugcagaga

SEQ ID NO: 1513064 - RNA, 19 nt, Homo sapiens
  misc_RNA (1)...(19): siRNA sense strand
gcagggcugugcuguacgu

SEQ ID NO: 1513065 - RNA, 19 nt, Homo sapiens
  misc_RNA (1)...(19): siRNA sense strand
gaauacacaagguccuaug

SEQ ID NO: 1513066 - RNA, 19 nt, Homo sapiens
  misc_RNA (1)...(19): siRNA sense strand
ggagagaagaaaucaguac

SEQ ID NO: 1513067 - RNA, 19 nt, Homo sapiens
  misc_RNA (1)...(19): siRNA sense strand
uguccuggcuguccugaug

SEQ ID NO: 1513068 - RNA, 19 nt, Homo sapiens
  misc_RNA (1)...(19): siRNA sense strand
ucucuacggcguucuguuu

SEQ ID NO: 1513069 - RNA, 19 nt, Homo sapiens
  misc_RNA (1)...(19): siRNA sense strand
ccaggcagaggaugaagaa

SEQ ID NO: 1513070 - RNA, 19 nt, Homo sapiens
  misc_RNA (1)...(19): siRNA sense strand
gcaucuucuuccucauauu

SEQ ID NO: 1513071 - RNA, 19 nt, Homo sapiens
  misc_RNA (1)...(19): siRNA sense strand
gcuacgugaugaucugcuu

SEQ ID NO: 1513072 - RNA, 19 nt, Homo sapiens
  misc_RNA (1)...(19): siRNA sense strand
cgucugugccucuuaauuc

SEQ ID NO: 1513073 - RNA, 19 nt, Homo sapiens
  misc_RNA (1)...(19): siRNA sense strand
gcgaauacacaagguccua

SEQ ID NO: 1513074 - RNA, 19 nt, Homo sapiens
  misc_RNA (1)...(19): siRNA sense strand
gcuccguguuguauggaaa

SEQ ID NO: 1513075 - RNA, 19 nt, Homo sapiens
  misc_RNA (1)...(19): siRNA sense strand
uggcaucuucuuccucaua

SEQ ID NO: 1513076 - RNA, 19 nt, Homo sapiens
  misc_RNA (1)...(19): siRNA sense strand
cacguguccugcaugauug

SEQ ID NO: 1513077 - RNA, 19 nt, Homo sapiens
  misc_RNA (1)...(19): siRNA sense strand
agaagaaaucaguaccuuu

SEQ ID NO: 1513078 - RNA, 19 nt, Homo sapiens
  misc_RNA (1)...(19): siRNA sense strand
caucuucuuccucauauuc

SEQ ID NO: 1513079 - RNA, 19 nt, Homo sapiens
  misc_RNA (1)...(19): siRNA sense strand
ggaccaucauccucuccau

SEQ ID NO: 1513080 - RNA, 19 nt, Homo sapiens
  misc_RNA (1)...(19): siRNA sense strand
caaccaggcagaggaugaa

SEQ ID NO: 1513081 - RNA, 19 nt, Homo sapiens
  misc_RNA (1)...(19): siRNA sense strand
uggcaguguucuucguauu

SEQ ID NO: 1513082 - RNA, 19 nt, Homo sapiens
  misc_RNA (1)...(19): siRNA sense strand
cuuucaagcuauauagaga

SEQ ID NO: 1513083 - RNA, 19 nt, Homo sapiens
  misc_RNA (1)...(19): siRNA sense strand
aaagugaaggagagaagaa

SEQ ID NO: 1513084 - RNA, 19 nt, Homo sapiens
  misc_RNA (1)...(19): siRNA sense strand
gcuccuguccuccauguuc

SEQ ID NO: 1513085 - RNA, 19 nt, Homo sapiens
  misc_RNA (1)...(19): siRNA sense strand
gcgcucagcacccucuaug

SEQ ID NO: 1513086 - RNA, 19 nt, Homo sapiens
  misc_RNA (1)...(19): siRNA sense strand
cgggaaagcguggcaaaga

SEQ ID NO: 1513087 - RNA, 19 nt, Homo sapiens
  misc_RNA (1)...(19): siRNA sense strand
ucuacggcguucuguuuga

SEQ ID NO: 1513088 - RNA, 19 nt, Homo sapiens
  misc_RNA (1)...(19): siRNA sense strand
gcgcugugcuccguguugu

SEQ ID NO: 1513089 - RNA, 19 nt, Homo sapiens
  misc_RNA (1)...(19): siRNA sense strand
ugaaggagagaagaaauca

SEQ ID NO: 1513090 - RNA, 19 nt, Homo sapiens
  misc_RNA (1)...(19): siRNA sense strand
gaacguccuugugguuucc

SEQ ID NO: 1513091 - RNA, 19 nt, Homo sapiens
  misc_RNA (1)...(19): siRNA sense strand
uaaacgucugugccucuua

SEQ ID NO: 1513092 - RNA, 19 nt, Homo sapiens
  misc_RNA (1)...(19): siRNA sense strand
gaaagcguggcaaagacau

SEQ ID NO: 1513093 - RNA, 19 nt, Homo sapiens
  misc_RNA (1)...(19): siRNA sense strand
cgacuuucaagcuauauag

SEQ ID NO: 1513094 - RNA, 19 nt, Homo sapiens
  misc_RNA (1)...(19): siRNA sense strand
acugucgacuuucaagcua

SEQ ID NO: 1513095 - RNA, 19 nt, Homo sapiens
  misc_RNA (1)...(19): siRNA sense strand
gccagcugguacacuuuga

SEQ ID NO: 1513096 - RNA, 19 nt, Homo sapiens
  misc_RNA (1)...(19): siRNA sense strand
ucaaccaggcagaggauga

SEQ ID NO: 1513097 - RNA, 19 nt, Homo sapiens
  misc_RNA (1)...(19): siRNA sense strand
gugaaggagagaagaaauc

SEQ ID NO: 1513098 - RNA, 19 nt, Homo sapiens
  misc_RNA (1)...(19): siRNA sense strand
gauagcugcguuccuccaa

SEQ ID NO: 1513099 - RNA, 19 nt, Homo sapiens
  misc_RNA (1)...(19): siRNA sense strand
aggcagaggaugaagaaau

SEQ ID NO: 1513100 - RNA, 19 nt, Homo sapiens
  misc_RNA (1)...(19): siRNA sense strand
caucauccucuccaugugu

SEQ ID NO: 1513101 - RNA, 19 nt, Homo sapiens
  misc_RNA (1)...(19): siRNA sense strand
gcugugcuccguguuguau

SEQ ID NO: 1513102 - RNA, 19 nt, Homo sapiens
  misc_RNA (1)...(19): siRNA sense strand
ggguuccugcuucucuuua

SEQ ID NO: 1513103 - RNA, 19 nt, Homo sapiens
  misc_RNA (1)...(19): siRNA sense strand
ucgagaggcugggcugcaa

SEQ ID NO: 1513104 - RNA, 19 nt, Homo sapiens
  misc_RNA (1)...(19): siRNA sense strand
caacccauacgagauguuc

SEQ ID NO: 1513105 - RNA, 19 nt, Homo sapiens
  misc_RNA (1)...(19): siRNA sense strand
ggcaguguucuucguauuc

SEQ ID NO: 1513106 - RNA, 19 nt, Homo sapiens
  misc_RNA (1)...(19): siRNA sense strand
aaggagagaagaaaucagu

SEQ ID NO: 1513107 - RNA, 19 nt, Homo sapiens
  misc_RNA (1)...(19): siRNA sense strand
gcagaaacgugauuauaua

SEQ ID NO: 1513108 - RNA, 19 nt, Homo sapiens
  misc_RNA (1)...(19): siRNA sense strand
gaagaggaagaacuaauua

SEQ ID NO: 1513109 - RNA, 19 nt, Homo sapiens
  misc_RNA (1)...(19): siRNA sense strand
acagugaacuugauaacua

SEQ ID NO: 1513110 - RNA, 19 nt, Homo sapiens
  misc_RNA (1)...(19): siRNA sense strand
ggaagaagcaugcaggaaa

SEQ ID NO: 1513111 - RNA, 19 nt, Homo sapiens
  misc_RNA (1)...(19): siRNA sense strand
gcagaaagaggaagaagaa

SEQ ID NO: 1513112 - RNA, 19 nt, Homo sapiens
  misc_RNA (1)...(19): siRNA sense strand
gaaagaggaagaagaagaa

SEQ ID NO: 1513113 - RNA, 19 nt, Homo sapiens
  misc_RNA (1)...(19): siRNA sense strand
gagagaggcugaaagagau

SEQ ID NO: 1513114 - RNA, 19 nt, Homo sapiens
  misc_RNA (1)...(19): siRNA sense strand
gaagaagcaugcaggaaag

SEQ ID NO: 1513115 - RNA, 19 nt, Homo sapiens
  misc_RNA (1)...(19): siRNA sense strand
ggaggaagauguaacugau

SEQ ID NO: 1513116 - RNA, 19 nt, Homo sapiens
  misc_RNA (1)...(19): siRNA sense strand
gaagaaguggcaacaauau

SEQ ID NO: 1513117 - RNA, 19 nt, Homo sapiens
  misc_RNA (1)...(19): siRNA sense strand
ggagagagaggcugaaaga

SEQ ID NO: 1513118 - RNA, 19 nt, Homo sapiens
  misc_RNA (1)...(19): siRNA sense strand
gaagacagugaacuugaua

SEQ ID NO: 1513119 - RNA, 19 nt, Homo sapiens
  misc_RNA (1)...(19): siRNA sense strand
uaaaggcucuugaggacuu

SEQ ID NO: 1513120 - RNA, 19 nt, Homo sapiens
  misc_RNA (1)...(19): siRNA sense strand
cagaagaaguggcaacaau

SEQ ID NO: 1513121 - RNA, 19 nt, Homo sapiens
  misc_RNA (1)...(19): siRNA sense strand
gaggaagaacuaauuagaa

SEQ ID NO: 1513122 - RNA, 19 nt, Homo sapiens
  misc_RNA (1)...(19): siRNA sense strand
guuggaggcucaauuuaug

SEQ ID NO: 1513123 - RNA, 19 nt, Homo sapiens
  misc_RNA (1)...(19): siRNA sense strand
gggagaagaggaagaacua

SEQ ID NO: 1513124 - RNA, 19 nt, Homo sapiens
  misc_RNA (1)...(19): siRNA sense strand
gcaguuggugcaaauaauu

SEQ ID NO: 1513125 - RNA, 19 nt, Homo sapiens
  misc_RNA (1)...(19): siRNA sense strand
ucucugaaguugcuaaaug

SEQ ID NO: 1513126 - RNA, 19 nt, Homo sapiens
  misc_RNA (1)...(19): siRNA sense strand
gccagaagauacugcaguu

SEQ ID NO: 1513127 - RNA, 19 nt, Homo sapiens
  misc_RNA (1)...(19): siRNA sense strand
ggcagaaacgugauuauau

SEQ ID NO: 1513128 - RNA, 19 nt, Homo sapiens
  misc_RNA (1)...(19): siRNA sense strand
ccaguuggaggcucaauuu

SEQ ID NO: 1513129 - RNA, 19 nt, Homo sapiens
  misc_RNA (1)...(19): siRNA sense strand
gaaguggcaacaauauaga

SEQ ID NO: 1513130 - RNA, 19 nt, Homo sapiens
  misc_RNA (1)...(19): siRNA sense strand
agaagaaguggcaacaaua

SEQ ID NO: 1513131 - RNA, 19 nt, Homo sapiens
  misc_RNA (1)...(19): siRNA sense strand
gcugcuacgugaccaauuc

SEQ ID NO: 1513132 - RNA, 19 nt, Homo sapiens
  misc_RNA (1)...(19): siRNA sense strand
aggaagauguaacugauga

SEQ ID NO: 1513133 - RNA, 19 nt, Homo sapiens
  misc_RNA (1)...(19): siRNA sense strand
ccaagaagccagaagauac

SEQ ID NO: 1513134 - RNA, 19 nt, Homo sapiens
  misc_RNA (1)...(19): siRNA sense strand
ucacagacgagcagaaaga

SEQ ID NO: 1513135 - RNA, 19 nt, Homo sapiens
  misc_RNA (1)...(19): siRNA sense strand
gagaagaggaagaacuaau

SEQ ID NO: 1513136 - RNA, 19 nt, Homo sapiens
  misc_RNA (1)...(19): siRNA sense strand
agaagaggaagaacuaauu

SEQ ID NO: 1513137 - RNA, 19 nt, Homo sapiens
  misc_RNA (1)...(19): siRNA sense strand
agagagaggcugaaagaga

SEQ ID NO: 1513138 - RNA, 19 nt, Homo sapiens
  misc_RNA (1)...(19): siRNA sense strand
ugaagacagugaacuugau

SEQ ID NO: 1513139 - RNA, 19 nt, Homo sapiens
  misc_RNA (1)...(19): siRNA sense strand
ugaagaccuuugugacaga

SEQ ID NO: 1513140 - RNA, 19 nt, Homo sapiens
  misc_RNA (1)...(19): siRNA sense strand
gggaggaagauguaacuga

SEQ ID NO: 1513141 - RNA, 19 nt, Homo sapiens
  misc_RNA (1)...(19): siRNA sense strand
uuccuuagcuuccuuagug

SEQ ID NO: 1513142 - RNA, 19 nt, Homo sapiens
  misc_RNA (1)...(19): siRNA sense strand
gcuaaauguccuugaagaa

SEQ ID NO: 1513143 - RNA, 19 nt, Homo sapiens
  misc_RNA (1)...(19): siRNA sense strand
cuugauuguucucuaagua

SEQ ID NO: 1513144 - RNA, 19 nt, Homo sapiens
  misc_RNA (1)...(19): siRNA sense strand
caauauagaaguguuagga

SEQ ID NO: 1513145 - RNA, 19 nt, Homo sapiens
  misc_RNA (1)...(19): siRNA sense strand
ugaugaaugugaggaaaga

SEQ ID NO: 1513146 - RNA, 19 nt, Homo sapiens
  misc_RNA (1)...(19): siRNA sense strand
gaugaagacagugaacuug

SEQ ID NO: 1513147 - RNA, 19 nt, Homo sapiens
  misc_RNA (1)...(19): siRNA sense strand
guugcuaaauguccuugaa

SEQ ID NO: 1513148 - RNA, 19 nt, Homo sapiens
  misc_RNA (1)...(19): siRNA sense strand
aaacaagggaggaagaugu

SEQ ID NO: 1513149 - RNA, 19 nt, Homo sapiens
  misc_RNA (1)...(19): siRNA sense strand
cauauuggcgucucuagug

SEQ ID NO: 1513150 - RNA, 19 nt, Homo sapiens
  misc_RNA (1)...(19): siRNA sense strand
ggacuuugaagaccuuugu

SEQ ID NO: 1513151 - RNA, 19 nt, Homo sapiens
  misc_RNA (1)...(19): siRNA sense strand
agaaagaggaagaagaaga

SEQ ID NO: 1513152 - RNA, 19 nt, Homo sapiens
  misc_RNA (1)...(19): siRNA sense strand
gaaacaagggaggaagaug

SEQ ID NO: 1513153 - RNA, 19 nt, Homo sapiens
  misc_RNA (1)...(19): siRNA sense strand
ggagaagaggaagaacuaa

SEQ ID NO: 1513154 - RNA, 19 nt, Homo sapiens
  misc_RNA (1)...(19): siRNA sense strand
caucacagacgagcagaaa

SEQ ID NO: 1513155 - RNA, 19 nt, Homo sapiens
  misc_RNA (1)...(19): siRNA sense strand
guaggcagaaacgugauua

SEQ ID NO: 1513156 - RNA, 19 nt, Homo sapiens
  misc_RNA (1)...(19): siRNA sense strand
cuaaauguccuugaagaau

SEQ ID NO: 1513157 - RNA, 19 nt, Homo sapiens
  misc_RNA (1)...(19): siRNA sense strand
agauguaacugaugagcau

SEQ ID NO: 1513158 - RNA, 19 nt, Homo sapiens
  misc_RNA (1)...(19): siRNA sense strand
uggcaacaauauagaagug

SEQ ID NO: 1513159 - RNA, 19 nt, Homo sapiens
  misc_RNA (1)...(19): siRNA sense strand
agaggaagaacuaauuaga

SEQ ID NO: 1513160 - RNA, 19 nt, Homo sapiens
  misc_RNA (1)...(19): siRNA sense strand
aagaaguggcaacaauaua

SEQ ID NO: 1513161 - RNA, 19 nt, Homo sapiens
  misc_RNA (1)...(19): siRNA sense strand
agaaguggcaacaauauag

SEQ ID NO: 1513162 - RNA, 19 nt, Homo sapiens
  misc_RNA (1)...(19): siRNA sense strand
uggcgucucuagugaacaa

SEQ ID NO: 1513163 - RNA, 19 nt, Homo sapiens
  misc_RNA (1)...(19): siRNA sense strand
cagugaacuugauaacuag

SEQ ID NO: 1513164 - RNA, 19 nt, Homo sapiens
  misc_RNA (1)...(19): siRNA sense strand
aggcagaaacgugauuaua

SEQ ID NO: 1513165 - RNA, 19 nt, Homo sapiens
  misc_RNA (1)...(19): siRNA sense strand
gaagcaugcaggaaaggau

SEQ ID NO: 1513166 - RNA, 19 nt, Homo sapiens
  misc_RNA (1)...(19): siRNA sense strand
caagaacaacagaagaagu

SEQ ID NO: 1513167 - RNA, 19 nt, Homo sapiens
  misc_RNA (1)...(19): siRNA sense strand
caagaagccagaagauacu

SEQ ID NO: 1513168 - RNA, 19 nt, Homo sapiens
  misc_RNA (1)...(19): siRNA sense strand
cgaugaagacagugaacuu

SEQ ID NO: 1513169 - RNA, 19 nt, Homo sapiens
  misc_RNA (1)...(19): siRNA sense strand
ucuuugcgcucaccagguu

SEQ ID NO: 1513170 - RNA, 19 nt, Homo sapiens
  misc_RNA (1)...(19): siRNA sense strand
aagaacaacagaagaagug

SEQ ID NO: 1513171 - RNA, 19 nt, Homo sapiens
  misc_RNA (1)...(19): siRNA sense strand
uauacauucucugaaguug

SEQ ID NO: 1513172 - RNA, 19 nt, Homo sapiens
  misc_RNA (1)...(19): siRNA sense strand
aaauguccuugaagaauac

SEQ ID NO: 1513173 - RNA, 19 nt, Homo sapiens
  misc_RNA (1)...(19): siRNA sense strand
agaagauacugcaguuggu

SEQ ID NO: 1513174 - RNA, 19 nt, Homo sapiens
  misc_RNA (1)...(19): siRNA sense strand
cagaaacaagggaggaaga

SEQ ID NO: 1513175 - RNA, 19 nt, Homo sapiens
  misc_RNA (1)...(19): siRNA sense strand
gaggaagauguaacugaug

SEQ ID NO: 1513176 - RNA, 19 nt, Homo sapiens
  misc_RNA (1)...(19): siRNA sense strand
ugaggacuuugaagaccuu

SEQ ID NO: 1513177 - RNA, 19 nt, Homo sapiens
  misc_RNA (1)...(19): siRNA sense strand
ugcuaaauguccuugaaga

SEQ ID NO: 1513178 - RNA, 19 nt, Homo sapiens
  misc_RNA (1)...(19): siRNA sense strand
cgugaugaaugugaggaaa

SEQ ID NO: 1513179 - RNA, 19 nt, Homo sapiens
  misc_RNA (1)...(19): siRNA sense strand
guacauauuggcgucucua

SEQ ID NO: 1513180 - RNA, 19 nt, Homo sapiens
  misc_RNA (1)...(19): siRNA sense strand
caguuggaggcucaauuua

SEQ ID NO: 1513181 - RNA, 19 nt, Homo sapiens
  misc_RNA (1)...(19): siRNA sense strand
aacaagggaggaagaugua

SEQ ID NO: 1513182 - RNA, 19 nt, Homo sapiens
  misc_RNA (1)...(19): siRNA sense strand
gggaagaagcaugcaggaa

SEQ ID NO: 1513183 - RNA, 19 nt, Homo sapiens
  misc_RNA (1)...(19): siRNA sense strand
gaaagagaugaagcugcua

SEQ ID NO: 1513184 - RNA, 19 nt, Homo sapiens
  misc_RNA (1)...(19): siRNA sense strand
auauuggcgucucuaguga

SEQ ID NO: 1513185 - RNA, 19 nt, Homo sapiens
  misc_RNA (1)...(19): siRNA sense strand
auagaaguguuaggagaga

SEQ ID NO: 1513186 - RNA, 19 nt, Homo sapiens
  misc_RNA (1)...(19): siRNA sense strand
agaagagggagaagaggaa

SEQ ID NO: 1513187 - RNA, 19 nt, Homo sapiens
  misc_RNA (1)...(19): siRNA sense strand
agaagaagagggagaagag

SEQ ID NO: 1513188 - RNA, 19 nt, Homo sapiens
  misc_RNA (1)...(19): siRNA sense strand
gauccaguccgugaugaau

SEQ ID NO: 1513189 - RNA, 19 nt, Homo sapiens
  misc_RNA (1)...(19): siRNA sense strand
uccaguccgugaugaaugu

SEQ ID NO: 1513190 - RNA, 19 nt, Homo sapiens
  misc_RNA (1)...(19): siRNA sense strand
agaccuuugugacagaguu

SEQ ID NO: 1513191 - RNA, 19 nt, Homo sapiens
  misc_RNA (1)...(19): siRNA sense strand
aagagaaccuuuugcugaa

SEQ ID NO: 1513192 - RNA, 19 nt, Homo sapiens
  misc_RNA (1)...(19): siRNA sense strand
agaagaagaagagggagaa

SEQ ID NO: 1513193 - RNA, 19 nt, Homo sapiens
  misc_RNA (1)...(19): siRNA sense strand
gaaguugcuaaauguccuu

SEQ ID NO: 1513194 - RNA, 19 nt, Homo sapiens
  misc_RNA (1)...(19): siRNA sense strand
cagaaacgugauuauauac

SEQ ID NO: 1513195 - RNA, 19 nt, Homo sapiens
  misc_RNA (1)...(19): siRNA sense strand
ggauccaguccgugaugaa

SEQ ID NO: 1513196 - RNA, 19 nt, Homo sapiens
  misc_RNA (1)...(19): siRNA sense strand
accaagaagccagaagaua

SEQ ID NO: 1513197 - RNA, 19 nt, Homo sapiens
  misc_RNA (1)...(19): siRNA sense strand
uacauucucugaaguugcu

SEQ ID NO: 1513198 - RNA, 19 nt, Homo sapiens
  misc_RNA (1)...(19): siRNA sense strand
ucaagacccucaacaacaa

SEQ ID NO: 1513199 - RNA, 19 nt, Homo sapiens
  misc_RNA (1)...(19): siRNA sense strand
gcagucagcauuucuguga

SEQ ID NO: 1513200 - RNA, 19 nt, Homo sapiens
  misc_RNA (1)...(19): siRNA sense strand
caggaugucuggagaaugu

SEQ ID NO: 1513201 - RNA, 19 nt, Homo sapiens
  misc_RNA (1)...(19): siRNA sense strand
gaacaaguacgaggaugaa

SEQ ID NO: 1513202 - RNA, 19 nt, Homo sapiens
  misc_RNA (1)...(19): siRNA sense strand
guacgaggaugaaaucaac

SEQ ID NO: 1513203 - RNA, 19 nt, Homo sapiens
  misc_RNA (1)...(19): siRNA sense strand
gccgaagccucuauaacuu

SEQ ID NO: 1513204 - RNA, 19 nt, Homo sapiens
  misc_RNA (1)...(19): siRNA sense strand
ggccagaacuuggguguca

SEQ ID NO: 1513205 - RNA, 19 nt, Homo sapiens
  misc_RNA (1)...(19): siRNA sense strand
ucaaggaugcucagaagaa

SEQ ID NO: 1513206 - RNA, 19 nt, Homo sapiens
  misc_RNA (1)...(19): siRNA sense strand
accaggagcugaugaaugu

SEQ ID NO: 1513207 - RNA, 19 nt, Homo sapiens
  misc_RNA (1)...(19): siRNA sense strand
caaguucgccuccuucauc

SEQ ID NO: 1513208 - RNA, 19 nt, Homo sapiens
  misc_RNA (1)...(19): siRNA sense strand
gguaccagaccaaguauga

SEQ ID NO: 1513209 - RNA, 19 nt, Homo sapiens
  misc_RNA (1)...(19): siRNA sense strand
ggagcacgcuggacagacu

SEQ ID NO: 1513210 - RNA, 19 nt, Homo sapiens
  misc_RNA (1)...(19): siRNA sense strand
guggaggacuucaagaaca

SEQ ID NO: 1513211 - RNA, 19 nt, Homo sapiens
  misc_RNA (1)...(19): siRNA sense strand
gaucaagacccucaacaac

SEQ ID NO: 1513212 - RNA, 19 nt, Homo sapiens
  misc_RNA (1)...(19): siRNA sense strand
gcagcaacucuaugaaaug

SEQ ID NO: 1513213 - RNA, 19 nt, Homo sapiens
  misc_RNA (1)...(19): siRNA sense strand
caagaaggauguggaugca

SEQ ID NO: 1513214 - RNA, 19 nt, Homo sapiens
  misc_RNA (1)...(19): siRNA sense strand
gcaaacauacuccacaaaa

SEQ ID NO: 1513215 - RNA, 19 nt, Homo sapiens
  misc_RNA (1)...(19): siRNA sense strand
cagcaacucuaugaaaugg

SEQ ID NO: 1513216 - RNA, 19 nt, Homo sapiens
  misc_RNA (1)...(19): siRNA sense strand
caaguacgaggaugaaauc

SEQ ID NO: 1513217 - RNA, 19 nt, Homo sapiens
  misc_RNA (1)...(19): siRNA sense strand
cggcaaacauacuccacaa

SEQ ID NO: 1513218 - RNA, 19 nt, Homo sapiens
  misc_RNA (1)...(19): siRNA sense strand
caaggaugcucagaagaag

SEQ ID NO: 1513219 - RNA, 19 nt, Homo sapiens
  misc_RNA (1)...(19): siRNA sense strand
ggaucugcauggcaaagug

SEQ ID NO: 1513220 - RNA, 19 nt, Homo sapiens
  misc_RNA (1)...(19): siRNA sense strand
gaacgugcaggaccuugug

SEQ ID NO: 1513221 - RNA, 19 nt, Homo sapiens
  misc_RNA (1)...(19): siRNA sense strand
aaauggagcugagccaagu

SEQ ID NO: 1513222 - RNA, 19 nt, Homo sapiens
  misc_RNA (1)...(19): siRNA sense strand
ggacaccaagaacgagauu

SEQ ID NO: 1513223 - RNA, 19 nt, Homo sapiens
  misc_RNA (1)...(19): siRNA sense strand
acaacaaguucgccuccuu

SEQ ID NO: 1513224 - RNA, 19 nt, Homo sapiens
  misc_RNA (1)...(19): siRNA sense strand
uggaggacuucaagaacaa

SEQ ID NO: 1513225 - RNA, 19 nt, Homo sapiens
  misc_RNA (1)...(19): siRNA sense strand
auaaggugcuggagaccaa

SEQ ID NO: 1513226 - RNA, 19 nt, Homo sapiens
  misc_RNA (1)...(19): siRNA sense strand
ugcagcaacucuaugaaau

SEQ ID NO: 1513227 - RNA, 19 nt, Homo sapiens
  misc_RNA (1)...(19): siRNA sense strand
aggaugaaaucaacaagca

SEQ ID NO: 1513228 - RNA, 19 nt, Homo sapiens
  misc_RNA (1)...(19): siRNA sense strand
gcagccgaagccucuauaa

SEQ ID NO: 1513229 - RNA, 19 nt, Homo sapiens
  misc_RNA (1)...(19): siRNA sense strand
ccaauguggugcuguccau

SEQ ID NO: 1513230 - RNA, 19 nt, Homo sapiens
  misc_RNA (1)...(19): siRNA sense strand
acucaaggaugcucagaag

SEQ ID NO: 1513231 - RNA, 19 nt, Homo sapiens
  misc_RNA (1)...(19): siRNA sense strand
gcugagcucacccgcacua

SEQ ID NO: 1513232 - RNA, 19 nt, Homo sapiens
  misc_RNA (1)...(19): siRNA sense strand
gagcaggaugucuggagaa

SEQ ID NO: 1513233 - RNA, 19 nt, Homo sapiens
  misc_RNA (1)...(19): siRNA sense strand
caagaacaaguacgaggau

SEQ ID NO: 1513234 - RNA, 19 nt, Homo sapiens
  misc_RNA (1)...(19): siRNA sense strand
ccagugcagucagcauuuc

SEQ ID NO: 1513235 - RNA, 19 nt, Homo sapiens
  misc_RNA (1)...(19): siRNA sense strand
acucagagcucaggaacgu

SEQ ID NO: 1513236 - RNA, 19 nt, Homo sapiens
  misc_RNA (1)...(19): siRNA sense strand
ggagcuggcacucaaggau

SEQ ID NO: 1513237 - RNA, 19 nt, Homo sapiens
  misc_RNA (1)...(19): siRNA sense strand
ggaccuggacagcaucauc

SEQ ID NO: 1513238 - RNA, 19 nt, Homo sapiens
  misc_RNA (1)...(19): siRNA sense strand
aaggguggauucagcacaa

SEQ ID NO: 1513239 - RNA, 19 nt, Homo sapiens
  misc_RNA (1)...(19): siRNA sense strand
gagcgggagcagaucaaga

SEQ ID NO: 1513240 - RNA, 19 nt, Homo sapiens
  misc_RNA (1)...(19): siRNA sense strand
caagggagggccagucucu

SEQ ID NO: 1513241 - RNA, 19 nt, Homo sapiens
  misc_RNA (1)...(19): siRNA sense strand
acaaguacgaggaugaaau

SEQ ID NO: 1513242 - RNA, 19 nt, Homo sapiens
  misc_RNA (1)...(19): siRNA sense strand
ggagcagggccagaacuug

SEQ ID NO: 1513243 - RNA, 19 nt, Homo sapiens
  misc_RNA (1)...(19): siRNA sense strand
agaacaaguacgaggauga

SEQ ID NO: 1513244 - RNA, 19 nt, Homo sapiens
  misc_RNA (1)...(19): siRNA sense strand
gaaugucccagugcaguca

SEQ ID NO: 1513245 - RNA, 19 nt, Homo sapiens
  misc_RNA (1)...(19): siRNA sense strand
cugcagcaacucuaugaaa

SEQ ID NO: 1513246 - RNA, 19 nt, Homo sapiens
  misc_RNA (1)...(19): siRNA sense strand
ggaacgugcaggaccuugu

SEQ ID NO: 1513247 - RNA, 19 nt, Homo sapiens
  misc_RNA (1)...(19): siRNA sense strand
gagcucacccgcacuaucc

SEQ ID NO: 1513248 - RNA, 19 nt, Homo sapiens
  misc_RNA (1)...(19): siRNA sense strand
ggucaaggcccaguaugag

SEQ ID NO: 1513249 - RNA, 19 nt, Homo sapiens
  misc_RNA (1)...(19): siRNA sense strand
caucaucgccgaggucaag

SEQ ID NO: 1513250 - RNA, 19 nt, Homo sapiens
  misc_RNA (1)...(19): siRNA sense strand
caaacauacuccacaaaag

SEQ ID NO: 1513251 - RNA, 19 nt, Homo sapiens
  misc_RNA (1)...(19): siRNA sense strand
ccgaagccucuauaacuug

SEQ ID NO: 1513252 - RNA, 19 nt, Homo sapiens
  misc_RNA (1)...(19): siRNA sense strand
gcucaagaaggauguggau

SEQ ID NO: 1513253 - RNA, 19 nt, Homo sapiens
  misc_RNA (1)...(19): siRNA sense strand
cguccagccagagguauua

SEQ ID NO: 1513254 - RNA, 19 nt, Homo sapiens
  misc_RNA (1)...(19): siRNA sense strand
ggcaaacauacuccacaaa

SEQ ID NO: 1513255 - RNA, 19 nt, Homo sapiens
  misc_RNA (1)...(19): siRNA sense strand
uccaggaggucacugucaa

SEQ ID NO: 1513256 - RNA, 19 nt, Homo sapiens
  misc_RNA (1)...(19): siRNA sense strand
gcaccuugacccaggagau

SEQ ID NO: 1513257 - RNA, 19 nt, Homo sapiens
  misc_RNA (1)...(19): siRNA sense strand
cagccaagaagcaguguca

SEQ ID NO: 1513258 - RNA, 19 nt, Homo sapiens
  misc_RNA (1)...(19): siRNA sense strand
cugcagagaacgaguuugu

SEQ ID NO: 1513259 - RNA, 19 nt, Homo sapiens
  misc_RNA (1)...(19): siRNA sense strand
gguggauucagcacaaaug

SEQ ID NO: 1513260 - RNA, 19 nt, Homo sapiens
  misc_RNA (1)...(19): siRNA sense strand
ggcccaguaugagcugauu

SEQ ID NO: 1513261 - RNA, 19 nt, Homo sapiens
  misc_RNA (1)...(19): siRNA sense strand
agacguccagccagaggua

SEQ ID NO: 1513262 - RNA, 19 nt, Homo sapiens
  misc_RNA (1)...(19): siRNA sense strand
gaaaggauauggagaaaua

SEQ ID NO: 1513263 - RNA, 19 nt, Homo sapiens
  misc_RNA (1)...(19): siRNA sense strand
gaaagaauguucaucauca

SEQ ID NO: 1513264 - RNA, 19 nt, Homo sapiens
  misc_RNA (1)...(19): siRNA sense strand
ucaaacaacuccaucaaua

SEQ ID NO: 1513265 - RNA, 19 nt, Homo sapiens
  misc_RNA (1)...(19): siRNA sense strand
gaaacuaccaucagaauga

SEQ ID NO: 1513266 - RNA, 19 nt, Homo sapiens
  misc_RNA (1)...(19): siRNA sense strand
gaacagacacuucucgaaa

SEQ ID NO: 1513267 - RNA, 19 nt, Homo sapiens
  misc_RNA (1)...(19): siRNA sense strand
guauauacccaaaggauua

SEQ ID NO: 1513268 - RNA, 19 nt, Homo sapiens
  misc_RNA (1)...(19): siRNA sense strand
ggagaaauaggaacacuuu

SEQ ID NO: 1513269 - RNA, 19 nt, Homo sapiens
  misc_RNA (1)...(19): siRNA sense strand
uaaacuaguucaaccauug

SEQ ID NO: 1513270 - RNA, 19 nt, Homo sapiens
  misc_RNA (1)...(19): siRNA sense strand
caaaggauaugaacagaca

SEQ ID NO: 1513271 - RNA, 19 nt, Homo sapiens
  misc_RNA (1)...(19): siRNA sense strand
gcgaggacuucaugacuaa

SEQ ID NO: 1513272 - RNA, 19 nt, Homo sapiens
  misc_RNA (1)...(19): siRNA sense strand
ccucaaggaucuagaacua

SEQ ID NO: 1513273 - RNA, 19 nt, Homo sapiens
  misc_RNA (1)...(19): siRNA sense strand
gacaaauggcaucuaauua

SEQ ID NO: 1513274 - RNA, 19 nt, Homo sapiens
  misc_RNA (1)...(19): siRNA sense strand
caaacaacuccaucaauaa

SEQ ID NO: 1513275 - RNA, 19 nt, Homo sapiens
  misc_RNA (1)...(19): siRNA sense strand
aaagacacaugcacacgua

SEQ ID NO: 1513276 - RNA, 19 nt, Homo sapiens
  misc_RNA (1)...(19): siRNA sense strand
gaaagaagacauuuaugca

SEQ ID NO: 1513277 - RNA, 19 nt, Homo sapiens
  misc_RNA (1)...(19): siRNA sense strand
ugacaaauggcaucuaauu

SEQ ID NO: 1513278 - RNA, 19 nt, Homo sapiens
  misc_RNA (1)...(19): siRNA sense strand
ucagagaaaugcaaaucaa

SEQ ID NO: 1513279 - RNA, 19 nt, Homo sapiens
  misc_RNA (1)...(19): siRNA sense strand
gaacaggcaaccuacagaa

SEQ ID NO: 1513280 - RNA, 19 nt, Homo sapiens
  misc_RNA (1)...(19): siRNA sense strand
gcacauguacaccauagaa

SEQ ID NO: 1513281 - RNA, 19 nt, Homo sapiens
  misc_RNA (1)...(19): siRNA sense strand
aaagacacaugaaagaaug

SEQ ID NO: 1513282 - RNA, 19 nt, Homo sapiens
  misc_RNA (1)...(19): siRNA sense strand
gggcuaauauccagaaucu

SEQ ID NO: 1513283 - RNA, 19 nt, Homo sapiens
  misc_RNA (1)...(19): siRNA sense strand
caaaagcaauggcaacaaa

SEQ ID NO: 1513284 - RNA, 19 nt, Homo sapiens
  misc_RNA (1)...(19): siRNA sense strand
ucaaugauagacuggauua

SEQ ID NO: 1513285 - RNA, 19 nt, Homo sapiens
  misc_RNA (1)...(19): siRNA sense strand
guaaacuaguucaaccauu

SEQ ID NO: 1513286 - RNA, 19 nt, Homo sapiens
  misc_RNA (1)...(19): siRNA sense strand
ggcgaggacuucaugacua

SEQ ID NO: 1513287 - RNA, 19 nt, Homo sapiens
  misc_RNA (1)...(19): siRNA sense strand
guucaaccauuguggaaga

SEQ ID NO: 1513288 - RNA, 19 nt, Homo sapiens
  misc_RNA (1)...(19): siRNA sense strand
ggaagacaguguggcgauu

SEQ ID NO: 1513289 - RNA, 19 nt, Homo sapiens
  misc_RNA (1)...(19): siRNA sense strand
gcacuacucacaauagcaa

SEQ ID NO: 1513290 - RNA, 19 nt, Homo sapiens
  misc_RNA (1)...(19): siRNA sense strand
caacccaaauguccaucaa

SEQ ID NO: 1513291 - RNA, 19 nt, Homo sapiens
  misc_RNA (1)...(19): siRNA sense strand
caacaaaagccaaaauuga

SEQ ID NO: 1513292 - RNA, 19 nt, Homo sapiens
  misc_RNA (1)...(19): siRNA sense strand
aaacuaccaucagaaugaa

SEQ ID NO: 1513293 - RNA, 19 nt, Homo sapiens
  misc_RNA (1)...(19): siRNA sense strand
agacauuuaugcagccaaa

SEQ ID NO: 1513294 - RNA, 19 nt, Homo sapiens
  misc_RNA (1)...(19): siRNA sense strand
acagacacuucucgaaaga

SEQ ID NO: 1513295 - RNA, 19 nt, Homo sapiens
  misc_RNA (1)...(19): siRNA sense strand
agaaugaacaggcaaccua

SEQ ID NO: 1513296 - RNA, 19 nt, Homo sapiens
  misc_RNA (1)...(19): siRNA sense strand
gaguucauguccuuuguag

SEQ ID NO: 1513297 - RNA, 19 nt, Homo sapiens
  misc_RNA (1)...(19): siRNA sense strand
aaaagaaacuaccaucaga

SEQ ID NO: 1513298 - RNA, 19 nt, Homo sapiens
  misc_RNA (1)...(19): siRNA sense strand
acauguacaccauagaaua

SEQ ID NO: 1513299 - RNA, 19 nt, Homo sapiens
  misc_RNA (1)...(19): siRNA sense strand
cgaaagaagacauuuaugc

SEQ ID NO: 1513300 - RNA, 19 nt, Homo sapiens
  misc_RNA (1)...(19): siRNA sense strand
gauaugaacagacacuucu

SEQ ID NO: 1513301 - RNA, 19 nt, Homo sapiens
  misc_RNA (1)...(19): siRNA sense strand
augauagacuggauuaaga

SEQ ID NO: 1513302 - RNA, 19 nt, Homo sapiens
  misc_RNA (1)...(19): siRNA sense strand
ggcaaaggauaugaacaga

SEQ ID NO: 1513303 - RNA, 19 nt, Homo sapiens
  misc_RNA (1)...(19): siRNA sense strand
gauagacuggauuaagaaa

SEQ ID NO: 1513304 - RNA, 19 nt, Homo sapiens
  misc_RNA (1)...(19): siRNA sense strand
ggauauggagaaauaggaa

SEQ ID NO: 1513305 - RNA, 19 nt, Homo sapiens
  misc_RNA (1)...(19): siRNA sense strand
aaaccaccgugagauacua

SEQ ID NO: 1513306 - RNA, 19 nt, Homo sapiens
  misc_RNA (1)...(19): siRNA sense strand
aaacaacuccaucaauaag

SEQ ID NO: 1513307 - RNA, 19 nt, Homo sapiens
  misc_RNA (1)...(19): siRNA sense strand
gaaacaacaggugcuggaa

SEQ ID NO: 1513308 - RNA, 19 nt, Homo sapiens
  misc_RNA (1)...(19): siRNA sense strand
ucacuggccaucagagaaa

SEQ ID NO: 1513309 - RNA, 19 nt, Homo sapiens
  misc_RNA (1)...(19): siRNA sense strand
acaacuccaucaauaagug

SEQ ID NO: 1513310 - RNA, 19 nt, Homo sapiens
  misc_RNA (1)...(19): siRNA sense strand
caucaucacuggccaucag

SEQ ID NO: 1513311 - RNA, 19 nt, Homo sapiens
  misc_RNA (1)...(19): siRNA sense strand
auugacaaauggcaucuaa

SEQ ID NO: 1513312 - RNA, 19 nt, Homo sapiens
  misc_RNA (1)...(19): siRNA sense strand
uggaaaggauauggagaaa

SEQ ID NO: 1513313 - RNA, 19 nt, Homo sapiens
  misc_RNA (1)...(19): siRNA sense strand
caacaggugcuggaaagga

SEQ ID NO: 1513314 - RNA, 19 nt, Homo sapiens
  misc_RNA (1)...(19): siRNA sense strand
ucaauaagugggcaaagga

SEQ ID NO: 1513315 - RNA, 19 nt, Homo sapiens
  misc_RNA (1)...(19): siRNA sense strand
acccaaauguccaucaaug

SEQ ID NO: 1513316 - RNA, 19 nt, Homo sapiens
  misc_RNA (1)...(19): siRNA sense strand
aaaucaugcugcuauaaag

SEQ ID NO: 1513317 - RNA, 19 nt, Homo sapiens
  misc_RNA (1)...(19): siRNA sense strand
aaacaacaggugcuggaaa

SEQ ID NO: 1513318 - RNA, 19 nt, Homo sapiens
  misc_RNA (1)...(19): siRNA sense strand
cagagaaaugcaaaucaaa

SEQ ID NO: 1513319 - RNA, 19 nt, Homo sapiens
  misc_RNA (1)...(19): siRNA sense strand
cugcaaagaacuuaaacaa

SEQ ID NO: 1513320 - RNA, 19 nt, Homo sapiens
  misc_RNA (1)...(19): siRNA sense strand
cacaugcacacguaaguuu

SEQ ID NO: 1513321 - RNA, 19 nt, Homo sapiens
  misc_RNA (1)...(19): siRNA sense strand
gaagacaguguggcgauuc

SEQ ID NO: 1513322 - RNA, 19 nt, Homo sapiens
  misc_RNA (1)...(19): siRNA sense strand
ucucgaaagaagacauuua

SEQ ID NO: 1513323 - RNA, 19 nt, Homo sapiens
  misc_RNA (1)...(19): siRNA sense strand
ggauaugaacagacacuuc

SEQ ID NO: 1513324 - RNA, 19 nt, Homo sapiens
  misc_RNA (1)...(19): siRNA sense strand
gggcaaaggauaugaacag

SEQ ID NO: 1513325 - RNA, 19 nt, Homo sapiens
  misc_RNA (1)...(19): siRNA sense strand
aaagaaacuaccaucagaa

SEQ ID NO: 1513326 - RNA, 19 nt, Homo sapiens
  misc_RNA (1)...(19): siRNA sense strand
caggcaaccuacagaaugg

SEQ ID NO: 1513327 - RNA, 19 nt, Homo sapiens
  misc_RNA (1)...(19): siRNA sense strand
caauagcaaagacuuggaa

SEQ ID NO: 1513328 - RNA, 19 nt, Homo sapiens
  misc_RNA (1)...(19): siRNA sense strand
gcaacaaaagccaaaauug

SEQ ID NO: 1513329 - RNA, 19 nt, Homo sapiens
  misc_RNA (1)...(19): siRNA sense strand
gugggacuguaaacuaguu

SEQ ID NO: 1513330 - RNA, 19 nt, Homo sapiens
  misc_RNA (1)...(19): siRNA sense strand
ccaguuagaauggcaauca

SEQ ID NO: 1513331 - RNA, 19 nt, Homo sapiens
  misc_RNA (1)...(19): siRNA sense strand
ugacaaagggcuaauaucc

SEQ ID NO: 1513332 - RNA, 19 nt, Homo sapiens
  misc_RNA (1)...(19): siRNA sense strand
gcaaucuacccaucugaca

SEQ ID NO: 1513333 - RNA, 19 nt, Homo sapiens
  misc_RNA (1)...(19): siRNA sense strand
uacuaucucacaccaguua

SEQ ID NO: 1513334 - RNA, 19 nt, Homo sapiens
  misc_RNA (1)...(19): siRNA sense strand
gcacacguaaguuuauuuu

SEQ ID NO: 1513335 - RNA, 19 nt, Homo sapiens
  misc_RNA (1)...(19): siRNA sense strand
gacaaagggcuaauaucca

SEQ ID NO: 1513336 - RNA, 19 nt, Homo sapiens
  misc_RNA (1)...(19): siRNA sense strand
uguacaccauagaauacua

SEQ ID NO: 1513337 - RNA, 19 nt, Homo sapiens
  misc_RNA (1)...(19): siRNA sense strand
ggacuguaaacuaguucaa

SEQ ID NO: 1513338 - RNA, 19 nt, Homo sapiens
  misc_RNA (1)...(19): siRNA sense strand
ggaaaggauauggagaaau

SEQ ID NO: 1513339 - RNA, 19 nt, Homo sapiens
  misc_RNA (1)...(19): siRNA sense strand
aacaacaggugcuggaaag

SEQ ID NO: 1513340 - RNA, 19 nt, Homo sapiens
  misc_RNA (1)...(19): siRNA sense strand
ccaaaagacacaugaaaga

SEQ ID NO: 1513341 - RNA, 19 nt, Homo sapiens
  misc_RNA (1)...(19): siRNA sense strand
aaucuacccaucugacaaa

SEQ ID NO: 1513342 - RNA, 19 nt, Homo sapiens
  misc_RNA (1)...(19): siRNA sense strand
ugauagacuggauuaagaa

SEQ ID NO: 1513343 - RNA, 19 nt, Homo sapiens
  misc_RNA (1)...(19): siRNA sense strand
ucacaauagcaaagacuug

SEQ ID NO: 1513344 - RNA, 19 nt, Homo sapiens
  misc_RNA (1)...(19): siRNA sense strand
acaugcacacguaaguuua

SEQ ID NO: 1513345 - RNA, 19 nt, Homo sapiens
  misc_RNA (1)...(19): siRNA sense strand
gaaucugcaaagaacuuaa

SEQ ID NO: 1513346 - RNA, 19 nt, Homo sapiens
  misc_RNA (1)...(19): siRNA sense strand
aauaagugggcaaaggaua

SEQ ID NO: 1513347 - RNA, 19 nt, Homo sapiens
  misc_RNA (1)...(19): siRNA sense strand
gaaauaggaacacuuuuac

SEQ ID NO: 1513348 - RNA, 19 nt, Homo sapiens
  misc_RNA (1)...(19): siRNA sense strand
ucaaaaccaccgugagaua

SEQ ID NO: 1513349 - RNA, 19 nt, Homo sapiens
  misc_RNA (1)...(19): siRNA sense strand
acaggcaaccuacagaaug

SEQ ID NO: 1513350 - RNA, 19 nt, Homo sapiens
  misc_RNA (1)...(19): siRNA sense strand
aagaaacuaccaucagaau

SEQ ID NO: 1513351 - RNA, 19 nt, Homo sapiens
  misc_RNA (1)...(19): siRNA sense strand
aacagacacuucucgaaag

SEQ ID NO: 1513352 - RNA, 19 nt, Homo sapiens
  misc_RNA (1)...(19): siRNA sense strand
ugaacagacacuucucgaa

SEQ ID NO: 1513353 - RNA, 19 nt, Homo sapiens
  misc_RNA (1)...(19): siRNA sense strand
uggcacauguacaccauag

SEQ ID NO: 1513354 - RNA, 19 nt, Homo sapiens
  misc_RNA (1)...(19): siRNA sense strand
gcaaaagaaacuaccauca

SEQ ID NO: 1513355 - RNA, 19 nt, Homo sapiens
  misc_RNA (1)...(19): siRNA sense strand
cagaaugggagaaaauuuu

SEQ ID NO: 1513356 - RNA, 19 nt, Homo sapiens
  misc_RNA (1)...(19): siRNA sense strand
caucagagaaaugcaaauc

SEQ ID NO: 1513357 - RNA, 19 nt, Homo sapiens
  misc_RNA (1)...(19): siRNA sense strand
aaucaaacaacuccaucaa

SEQ ID NO: 1513358 - RNA, 19 nt, Homo sapiens
  misc_RNA (1)...(19): siRNA sense strand
caaucuacccaucugacaa

SEQ ID NO: 1513359 - RNA, 19 nt, Homo sapiens
  misc_RNA (1)...(19): siRNA sense strand
ucucacaccaguuagaaug

SEQ ID NO: 1513360 - RNA, 19 nt, Homo sapiens
  misc_RNA (1)...(19): siRNA sense strand
caaaagacacaugaaagaa

SEQ ID NO: 1513361 - RNA, 19 nt, Homo sapiens
  misc_RNA (1)...(19): siRNA sense strand
cauguacaccauagaauac

SEQ ID NO: 1513362 - RNA, 19 nt, Homo sapiens
  misc_RNA (1)...(19): siRNA sense strand
gaaauuaugucuuccacua

SEQ ID NO: 1513363 - RNA, 19 nt, Homo sapiens
  misc_RNA (1)...(19): siRNA sense strand
gcaaagggaaacuuauuua

SEQ ID NO: 1513364 - RNA, 19 nt, Homo sapiens
  misc_RNA (1)...(19): siRNA sense strand
gaacaaagagacagaagaa

SEQ ID NO: 1513365 - RNA, 19 nt, Homo sapiens
  misc_RNA (1)...(19): siRNA sense strand
uauaagagguggauugaaa

SEQ ID NO: 1513366 - RNA, 19 nt, Homo sapiens
  misc_RNA (1)...(19): siRNA sense strand
gaacaauuccuuucucuug

SEQ ID NO: 1513367 - RNA, 19 nt, Homo sapiens
  misc_RNA (1)...(19): siRNA sense strand
gaucaugggucucuggaaa

SEQ ID NO: 1513368 - RNA, 19 nt, Homo sapiens
  misc_RNA (1)...(19): siRNA sense strand
gaacaaaggcacacuacuu

SEQ ID NO: 1513369 - RNA, 19 nt, Homo sapiens
  misc_RNA (1)...(19): siRNA sense strand
aagaguaucugcacaauug

SEQ ID NO: 1513370 - RNA, 19 nt, Homo sapiens
  misc_RNA (1)...(19): siRNA sense strand
ggauugaaauuaugucuuc

SEQ ID NO: 1513371 - RNA, 19 nt, Homo sapiens
  misc_RNA (1)...(19): siRNA sense strand
ucugagagauggauaguaa

SEQ ID NO: 1513372 - RNA, 19 nt, Homo sapiens
  misc_RNA (1)...(19): siRNA sense strand
cuacagauauacaagguuu

SEQ ID NO: 1513373 - RNA, 19 nt, Homo sapiens
  misc_RNA (1)...(19): siRNA sense strand
gaagauaugcccucagugu

SEQ ID NO: 1513374 - RNA, 19 nt, Homo sapiens
  misc_RNA (1)...(19): siRNA sense strand
gcucaaggaggauguauuu

SEQ ID NO: 1513375 - RNA, 19 nt, Homo sapiens
  misc_RNA (1)...(19): siRNA sense strand
gaaauacaggugugucuga

SEQ ID NO: 1513376 - RNA, 19 nt, Homo sapiens
  misc_RNA (1)...(19): siRNA sense strand
gagaauacucgacauguga

SEQ ID NO: 1513377 - RNA, 19 nt, Homo sapiens
  misc_RNA (1)...(19): siRNA sense strand
ggaugaauaucuuaagaag

SEQ ID NO: 1513378 - RNA, 19 nt, Homo sapiens
  misc_RNA (1)...(19): siRNA sense strand
gauguuaucccuucugaga

SEQ ID NO: 1513379 - RNA, 19 nt, Homo sapiens
  misc_RNA (1)...(19): siRNA sense strand
caacuccauuugcaacauu

SEQ ID NO: 1513380 - RNA, 19 nt, Homo sapiens
  misc_RNA (1)...(19): siRNA sense strand
caauucaucuggauaagca

SEQ ID NO: 1513381 - RNA, 19 nt, Homo sapiens
  misc_RNA (1)...(19): siRNA sense strand
gauauucaguuugcuuguu

SEQ ID NO: 1513382 - RNA, 19 nt, Homo sapiens
  misc_RNA (1)...(19): siRNA sense strand
agagguggauugaaauuau

SEQ ID NO: 1513383 - RNA, 19 nt, Homo sapiens
  misc_RNA (1)...(19): siRNA sense strand
cugcacaauugccugauua

SEQ ID NO: 1513384 - RNA, 19 nt, Homo sapiens
  misc_RNA (1)...(19): siRNA sense strand
ccagcaacauauauucuga

SEQ ID NO: 1513385 - RNA, 19 nt, Homo sapiens
  misc_RNA (1)...(19): siRNA sense strand
gaagaguaucugcacaauu

SEQ ID NO: 1513386 - RNA, 19 nt, Homo sapiens
  misc_RNA (1)...(19): siRNA sense strand
gcaguggccagaacaaaga

SEQ ID NO: 1513387 - RNA, 19 nt, Homo sapiens
  misc_RNA (1)...(19): siRNA sense strand
gagguggauugaaauuaug

SEQ ID NO: 1513388 - RNA, 19 nt, Homo sapiens
  misc_RNA (1)...(19): siRNA sense strand
gaaccagaagauuauaaga

SEQ ID NO: 1513389 - RNA, 19 nt, Homo sapiens
  misc_RNA (1)...(19): siRNA sense strand
gugccauacugcagcaaua

SEQ ID NO: 1513390 - RNA, 19 nt, Homo sapiens
  misc_RNA (1)...(19): siRNA sense strand
ggcauggacagauguauuu

SEQ ID NO: 1513391 - RNA, 19 nt, Homo sapiens
  misc_RNA (1)...(19): siRNA sense strand
aaacgggcauggacagaug

SEQ ID NO: 1513392 - RNA, 19 nt, Homo sapiens
  misc_RNA (1)...(19): siRNA sense strand
uaagaagacuagagauggu

SEQ ID NO: 1513393 - RNA, 19 nt, Homo sapiens
  misc_RNA (1)...(19): siRNA sense strand
gauuauaagagguggauug

SEQ ID NO: 1513394 - RNA, 19 nt, Homo sapiens
  misc_RNA (1)...(19): siRNA sense strand
ucacauguccugccagaau

SEQ ID NO: 1513395 - RNA, 19 nt, Homo sapiens
  misc_RNA (1)...(19): siRNA sense strand
gcacaauugccugauuauu

SEQ ID NO: 1513396 - RNA, 19 nt, Homo sapiens
  misc_RNA (1)...(19): siRNA sense strand
ccauacugcagcaauaaua

SEQ ID NO: 1513397 - RNA, 19 nt, Homo sapiens
  misc_RNA (1)...(19): siRNA sense strand
gugaguuccuguacaccua

SEQ ID NO: 1513398 - RNA, 19 nt, Homo sapiens
  misc_RNA (1)...(19): siRNA sense strand
uaauucaacuccauuugca

SEQ ID NO: 1513399 - RNA, 19 nt, Homo sapiens
  misc_RNA (1)...(19): siRNA sense strand
ugagaauacucgacaugug

SEQ ID NO: 1513400 - RNA, 19 nt, Homo sapiens
  misc_RNA (1)...(19): siRNA sense strand
ucaaggaggauguauuuca

SEQ ID NO: 1513401 - RNA, 19 nt, Homo sapiens
  misc_RNA (1)...(19): siRNA sense strand
auacaccacuagcaaauuc

SEQ ID NO: 1513402 - RNA, 19 nt, Homo sapiens
  misc_RNA (1)...(19): siRNA sense strand
aaaccacccucuccugcuu

SEQ ID NO: 1513403 - RNA, 19 nt, Homo sapiens
  misc_RNA (1)...(19): siRNA sense strand
ugacuuugacguggaaaua

SEQ ID NO: 1513404 - RNA, 19 nt, Homo sapiens
  misc_RNA (1)...(19): siRNA sense strand
gaauacucgacaugugaua

SEQ ID NO: 1513405 - RNA, 19 nt, Homo sapiens
  misc_RNA (1)...(19): siRNA sense strand
gaugugcugcuccauuuga

SEQ ID NO: 1513406 - RNA, 19 nt, Homo sapiens
  misc_RNA (1)...(19): siRNA sense strand
caaaauacaccaaaaguca

SEQ ID NO: 1513407 - RNA, 19 nt, Homo sapiens
  misc_RNA (1)...(19): siRNA sense strand
uaagagguggauugaaauu

SEQ ID NO: 1513408 - RNA, 19 nt, Homo sapiens
  misc_RNA (1)...(19): siRNA sense strand
cacauguccugccagaauu

SEQ ID NO: 1513409 - RNA, 19 nt, Homo sapiens
  misc_RNA (1)...(19): siRNA sense strand
cuucuggacuuucucaaug

SEQ ID NO: 1513410 - RNA, 19 nt, Homo sapiens
  misc_RNA (1)...(19): siRNA sense strand
aacaauuccuuucucuuga

SEQ ID NO: 1513411 - RNA, 19 nt, Homo sapiens
  misc_RNA (1)...(19): siRNA sense strand
gggcauggacagauguauu

SEQ ID NO: 1513412 - RNA, 19 nt, Homo sapiens
  misc_RNA (1)...(19): siRNA sense strand
uaagaccauuuaugaugug

SEQ ID NO: 1513413 - RNA, 19 nt, Homo sapiens
  misc_RNA (1)...(19): siRNA sense strand
cagaaugacuuuuccaaau

SEQ ID NO: 1513414 - RNA, 19 nt, Homo sapiens
  misc_RNA (1)...(19): siRNA sense strand
ugagaagguuguaaaugca

SEQ ID NO: 1513415 - RNA, 19 nt, Homo sapiens
  misc_RNA (1)...(19): siRNA sense strand
aagucaaucuuuaccugua

SEQ ID NO: 1513416 - RNA, 19 nt, Homo sapiens
  misc_RNA (1)...(19): siRNA sense strand
agacauacaccacuagcaa

SEQ ID NO: 1513417 - RNA, 19 nt, Homo sapiens
  misc_RNA (1)...(19): siRNA sense strand
gacuagagaugguguuuug

SEQ ID NO: 1513418 - RNA, 19 nt, Homo sapiens
  misc_RNA (1)...(19): siRNA sense strand
augaugugcugcuccauuu

SEQ ID NO: 1513419 - RNA, 19 nt, Homo sapiens
  misc_RNA (1)...(19): siRNA sense strand
ccacuagcaaauucaauga

SEQ ID NO: 1513420 - RNA, 19 nt, Homo sapiens
  misc_RNA (1)...(19): siRNA sense strand
caaggaggauguauuucac

SEQ ID NO: 1513421 - RNA, 19 nt, Homo sapiens
  misc_RNA (1)...(19): siRNA sense strand
gacauacaccacuagcaaa

SEQ ID NO: 1513422 - RNA, 19 nt, Homo sapiens
  misc_RNA (1)...(19): siRNA sense strand
ugaagaguaucugcacaau

SEQ ID NO: 1513423 - RNA, 19 nt, Homo sapiens
  misc_RNA (1)...(19): siRNA sense strand
gggagccuauugcccauuc

SEQ ID NO: 1513424 - RNA, 19 nt, Homo sapiens
  misc_RNA (1)...(19): siRNA sense strand
gagagauggauaguaaauu

SEQ ID NO: 1513425 - RNA, 19 nt, Homo sapiens
  misc_RNA (1)...(19): siRNA sense strand
aaacaucagaggaagauca

SEQ ID NO: 1513426 - RNA, 19 nt, Homo sapiens
  misc_RNA (1)...(19): siRNA sense strand
uguuaucccuucugagaga

SEQ ID NO: 1513427 - RNA, 19 nt, Homo sapiens
  misc_RNA (1)...(19): siRNA sense strand
gcauccagcaacauauauu

SEQ ID NO: 1513428 - RNA, 19 nt, Homo sapiens
  misc_RNA (1)...(19): siRNA sense strand
gcuugaaccagaagauuau

SEQ ID NO: 1513429 - RNA, 19 nt, Homo sapiens
  misc_RNA (1)...(19): siRNA sense strand
uugagaagguuguaaaugc

SEQ ID NO: 1513430 - RNA, 19 nt, Homo sapiens
  misc_RNA (1)...(19): siRNA sense strand
aagauguuaucccuucuga

SEQ ID NO: 1513431 - RNA, 19 nt, Homo sapiens
  misc_RNA (1)...(19): siRNA sense strand
auggacagauguauuucua

SEQ ID NO: 1513432 - RNA, 19 nt, Homo sapiens
  misc_RNA (1)...(19): siRNA sense strand
acuagcaaauucaaugaug

SEQ ID NO: 1513433 - RNA, 19 nt, Homo sapiens
  misc_RNA (1)...(19): siRNA sense strand
gguaauucaacuccauuug

SEQ ID NO: 1513434 - RNA, 19 nt, Homo sapiens
  misc_RNA (1)...(19): siRNA sense strand
aggaagauaugcccucagu

SEQ ID NO: 1513435 - RNA, 19 nt, Homo sapiens
  misc_RNA (1)...(19): siRNA sense strand
ugagagauggauaguaaau

SEQ ID NO: 1513436 - RNA, 19 nt, Homo sapiens
  misc_RNA (1)...(19): siRNA sense strand
ccuuucagauggucuuguu

SEQ ID NO: 1513437 - RNA, 19 nt, Homo sapiens
  misc_RNA (1)...(19): siRNA sense strand
ugaaggaccccauucuuuu

SEQ ID NO: 1513438 - RNA, 19 nt, Homo sapiens
  misc_RNA (1)...(19): siRNA sense strand
ugaggguguuuccaaagga

SEQ ID NO: 1513439 - RNA, 19 nt, Homo sapiens
  misc_RNA (1)...(19): siRNA sense strand
gcaaacgggcauggacaga

SEQ ID NO: 1513440 - RNA, 19 nt, Homo sapiens
  misc_RNA (1)...(19): siRNA sense strand
guaauucaacuccauuugc

SEQ ID NO: 1513441 - RNA, 19 nt, Homo sapiens
  misc_RNA (1)...(19): siRNA sense strand
guggaaguacugccugaaa

SEQ ID NO: 1513442 - RNA, 19 nt, Homo sapiens
  misc_RNA (1)...(19): siRNA sense strand
cuaccaggaugcuaaacca

SEQ ID NO: 1513443 - RNA, 19 nt, Homo sapiens
  misc_RNA (1)...(19): siRNA sense strand
caaagauguuaucccuucu

SEQ ID NO: 1513444 - RNA, 19 nt, Homo sapiens
  misc_RNA (1)...(19): siRNA sense strand
aauuugcacuuggaugaaa

SEQ ID NO: 1513445 - RNA, 19 nt, Homo sapiens
  misc_RNA (1)...(19): siRNA sense strand
cugcaaagggaaacuuauu

SEQ ID NO: 1513446 - RNA, 19 nt, Homo sapiens
  misc_RNA (1)...(19): siRNA sense strand
uugcuuaguuggaugaaca

SEQ ID NO: 1513447 - RNA, 19 nt, Homo sapiens
  misc_RNA (1)...(19): siRNA sense strand
ugcaaagggaaacuuauuu

SEQ ID NO: 1513448 - RNA, 19 nt, Homo sapiens
  misc_RNA (1)...(19): siRNA sense strand
ugaaacaucagaggaagau

SEQ ID NO: 1513449 - RNA, 19 nt, Homo sapiens
  misc_RNA (1)...(19): siRNA sense strand
uaugaacaauuccuuucuc

SEQ ID NO: 1513450 - RNA, 19 nt, Homo sapiens
  misc_RNA (1)...(19): siRNA sense strand
ggccugagaaaggaagaua

SEQ ID NO: 1513451 - RNA, 19 nt, Homo sapiens
  misc_RNA (1)...(19): siRNA sense strand
cauacugcagcaauaauau

SEQ ID NO: 1513452 - RNA, 19 nt, Homo sapiens
  misc_RNA (1)...(19): siRNA sense strand
aagagguggauugaaauua

SEQ ID NO: 1513453 - RNA, 19 nt, Homo sapiens
  misc_RNA (1)...(19): siRNA sense strand
gggaaacuuauuuauugga

SEQ ID NO: 1513454 - RNA, 19 nt, Homo sapiens
  misc_RNA (1)...(19): siRNA sense strand
gcaacauuccucacuucug

SEQ ID NO: 1513455 - RNA, 19 nt, Homo sapiens
  misc_RNA (1)...(19): siRNA sense strand
aaugccaccuggaauuaau

SEQ ID NO: 1513456 - RNA, 19 nt, Homo sapiens
  misc_RNA (1)...(19): siRNA sense strand
gaccugguucagucucuuu

SEQ ID NO: 1513457 - RNA, 19 nt, Homo sapiens
  misc_RNA (1)...(19): siRNA sense strand
gaaguacugccugaaaauu

SEQ ID NO: 1513458 - RNA, 19 nt, Homo sapiens
  misc_RNA (1)...(19): siRNA sense strand
acuaauacgaugccuguga

SEQ ID NO: 1513459 - RNA, 19 nt, Homo sapiens
  misc_RNA (1)...(19): siRNA sense strand
aaaugcaauucuacucauc

SEQ ID NO: 1513460 - RNA, 19 nt, Homo sapiens
  misc_RNA (1)...(19): siRNA sense strand
ccucuccugcuucaauuaa

SEQ ID NO: 1513461 - RNA, 19 nt, Homo sapiens
  misc_RNA (1)...(19): siRNA sense strand
gaagacuagagaugguguu

SEQ ID NO: 1513462 - RNA, 19 nt, Homo sapiens
  misc_RNA (1)...(19): siRNA sense strand
gcagaaggcuuucaaguac

SEQ ID NO: 1513463 - RNA, 19 nt, Homo sapiens
  misc_RNA (1)...(19): siRNA sense strand
caucuaagcuuuccuuuua

SEQ ID NO: 1513464 - RNA, 19 nt, Homo sapiens
  misc_RNA (1)...(19): siRNA sense strand
gagaauggccuuugaauag

SEQ ID NO: 1513465 - RNA, 19 nt, Homo sapiens
  misc_RNA (1)...(19): siRNA sense strand
caaguuagcaucacaaaga

SEQ ID NO: 1513466 - RNA, 19 nt, Homo sapiens
  misc_RNA (1)...(19): siRNA sense strand
gagguuaucucacguguag

SEQ ID NO: 1513467 - RNA, 19 nt, Homo sapiens
  misc_RNA (1)...(19): siRNA sense strand
aaauaaggcugcauuacuu

SEQ ID NO: 1513468 - RNA, 19 nt, Homo sapiens
  misc_RNA (1)...(19): siRNA sense strand
gaaacacgaugcuggaaag

SEQ ID NO: 1513469 - RNA, 19 nt, Homo sapiens
  misc_RNA (1)...(19): siRNA sense strand
gaaauaaggcugcauuacu

SEQ ID NO: 1513470 - RNA, 19 nt, Homo sapiens
  misc_RNA (1)...(19): siRNA sense strand
gaaagaagaaauaguccuu

SEQ ID NO: 1513471 - RNA, 19 nt, Homo sapiens
  misc_RNA (1)...(19): siRNA sense strand
gaaggaagagacucaaguu

SEQ ID NO: 1513472 - RNA, 19 nt, Homo sapiens
  misc_RNA (1)...(19): siRNA sense strand
ggccagagacuccaucuaa

SEQ ID NO: 1513473 - RNA, 19 nt, Homo sapiens
  misc_RNA (1)...(19): siRNA sense strand
gagacuccaucuaagcuuu

SEQ ID NO: 1513474 - RNA, 19 nt, Homo sapiens
  misc_RNA (1)...(19): siRNA sense strand
gagaaauaaggcugcauua

SEQ ID NO: 1513475 - RNA, 19 nt, Homo sapiens
  misc_RNA (1)...(19): siRNA sense strand
gccauucgcugcaauauac

SEQ ID NO: 1513476 - RNA, 19 nt, Homo sapiens
  misc_RNA (1)...(19): siRNA sense strand
ggaagagacucaaguuagc

SEQ ID NO: 1513477 - RNA, 19 nt, Homo sapiens
  misc_RNA (1)...(19): siRNA sense strand
accaucagcuuuauuauug

SEQ ID NO: 1513478 - RNA, 19 nt, Homo sapiens
  misc_RNA (1)...(19): siRNA sense strand
ggagaaauaaggcugcauu

SEQ ID NO: 1513479 - RNA, 19 nt, Homo sapiens
  misc_RNA (1)...(19): siRNA sense strand
gagguugccuuugguuuau

SEQ ID NO: 1513480 - RNA, 19 nt, Homo sapiens
  misc_RNA (1)...(19): siRNA sense strand
uugaagagauggaugaaga

SEQ ID NO: 1513481 - RNA, 19 nt, Homo sapiens
  misc_RNA (1)...(19): siRNA sense strand
cgagaauggccuuugaaua

SEQ ID NO: 1513482 - RNA, 19 nt, Homo sapiens
  misc_RNA (1)...(19): siRNA sense strand
gaugacauuuucccuguua

SEQ ID NO: 1513483 - RNA, 19 nt, Homo sapiens
  misc_RNA (1)...(19): siRNA sense strand
gaagagauggaugaagaaa

SEQ ID NO: 1513484 - RNA, 19 nt, Homo sapiens
  misc_RNA (1)...(19): siRNA sense strand
ggaaagggagauugcauuc

SEQ ID NO: 1513485 - RNA, 19 nt, Homo sapiens
  misc_RNA (1)...(19): siRNA sense strand
gaaagcacaggaggaguuu

SEQ ID NO: 1513486 - RNA, 19 nt, Homo sapiens
  misc_RNA (1)...(19): siRNA sense strand
acaaagacuugaggagaaa

SEQ ID NO: 1513487 - RNA, 19 nt, Homo sapiens
  misc_RNA (1)...(19): siRNA sense strand
ugagguugccuuugguuua

SEQ ID NO: 1513488 - RNA, 19 nt, Homo sapiens
  misc_RNA (1)...(19): siRNA sense strand
gccauagaauccuacacua

SEQ ID NO: 1513489 - RNA, 19 nt, Homo sapiens
  misc_RNA (1)...(19): siRNA sense strand
cugaagagccuacccguuu

SEQ ID NO: 1513490 - RNA, 19 nt, Homo sapiens
  misc_RNA (1)...(19): siRNA sense strand
ucauuuaccaucagcuuua

SEQ ID NO: 1513491 - RNA, 19 nt, Homo sapiens
  misc_RNA (1)...(19): siRNA sense strand
aacaaagacuugaggagaa

SEQ ID NO: 1513492 - RNA, 19 nt, Homo sapiens
  misc_RNA (1)...(19): siRNA sense strand
ucaaguacaugucagugau

SEQ ID NO: 1513493 - RNA, 19 nt, Homo sapiens
  misc_RNA (1)...(19): siRNA sense strand
gcaauauacuggccaucca

SEQ ID NO: 1513494 - RNA, 19 nt, Homo sapiens
  misc_RNA (1)...(19): siRNA sense strand
gagccuacccguuuuguua

SEQ ID NO: 1513495 - RNA, 19 nt, Homo sapiens
  misc_RNA (1)...(19): siRNA sense strand
caggaggaguuucaucuuc

SEQ ID NO: 1513496 - RNA, 19 nt, Homo sapiens
  misc_RNA (1)...(19): siRNA sense strand
agaauggccuuugaauaga

SEQ ID NO: 1513497 - RNA, 19 nt, Homo sapiens
  misc_RNA (1)...(19): siRNA sense strand
ugucagugauucaggcuuu

SEQ ID NO: 1513498 - RNA, 19 nt, Homo sapiens
  misc_RNA (1)...(19): siRNA sense strand
gcacaccauuagaaauuac

SEQ ID NO: 1513499 - RNA, 19 nt, Homo sapiens
  misc_RNA (1)...(19): siRNA sense strand
gacaguguuugaagagaug

SEQ ID NO: 1513500 - RNA, 19 nt, Homo sapiens
  misc_RNA (1)...(19): siRNA sense strand
gaauggccuuugaauagag

SEQ ID NO: 1513501 - RNA, 19 nt, Homo sapiens
  misc_RNA (1)...(19): siRNA sense strand
gcuauaugcugccaucaac

SEQ ID NO: 1513502 - RNA, 19 nt, Homo sapiens
  misc_RNA (1)...(19): siRNA sense strand
acacuacagcuuucaguuu

SEQ ID NO: 1513503 - RNA, 19 nt, Homo sapiens
  misc_RNA (1)...(19): siRNA sense strand
auacgagaauggccuuuga

SEQ ID NO: 1513504 - RNA, 19 nt, Homo sapiens
  misc_RNA (1)...(19): siRNA sense strand
gcaaugaugauacuaccau

SEQ ID NO: 1513505 - RNA, 19 nt, Homo sapiens
  misc_RNA (1)...(19): siRNA sense strand
gagacaguguuugaagaga

SEQ ID NO: 1513506 - RNA, 19 nt, Homo sapiens
  misc_RNA (1)...(19): siRNA sense strand
caauaugguggguacagua

SEQ ID NO: 1513507 - RNA, 19 nt, Homo sapiens
  misc_RNA (1)...(19): siRNA sense strand
ggaggaguuucaucuucga

SEQ ID NO: 1513508 - RNA, 19 nt, Homo sapiens
  misc_RNA (1)...(19): siRNA sense strand
uugcaucucugaaacugaa

SEQ ID NO: 1513509 - RNA, 19 nt, Homo sapiens
  misc_RNA (1)...(19): siRNA sense strand
cauagaauccuacacuaca

SEQ ID NO: 1513510 - RNA, 19 nt, Homo sapiens
  misc_RNA (1)...(19): siRNA sense strand
agagauggaugaagaaagc

SEQ ID NO: 1513511 - RNA, 19 nt, Homo sapiens
  misc_RNA (1)...(19): siRNA sense strand
guggugagguugccuuugg

SEQ ID NO: 1513512 - RNA, 19 nt, Homo sapiens
  misc_RNA (1)...(19): siRNA sense strand
ccauccagaucagcaauga

SEQ ID NO: 1513513 - RNA, 19 nt, Homo sapiens
  misc_RNA (1)...(19): siRNA sense strand
caucagcuuuauuauugug

SEQ ID NO: 1513514 - RNA, 19 nt, Homo sapiens
  misc_RNA (1)...(19): siRNA sense strand
ugcacaccauuagaaauua

SEQ ID NO: 1513515 - RNA, 19 nt, Homo sapiens
  misc_RNA (1)...(19): siRNA sense strand
ggccauucgcugcaauaua

SEQ ID NO: 1513516 - RNA, 19 nt, Homo sapiens
  misc_RNA (1)...(19): siRNA sense strand
ucucaacuguucucuacug

SEQ ID NO: 1513517 - RNA, 19 nt, Homo sapiens
  misc_RNA (1)...(19): siRNA sense strand
acucuggcauuguucauug

SEQ ID NO: 1513518 - RNA, 19 nt, Homo sapiens
  misc_RNA (1)...(19): siRNA sense strand
uguagugacucuggcauug

SEQ ID NO: 1513519 - RNA, 19 nt, Homo sapiens
  misc_RNA (1)...(19): siRNA sense strand
agcauuaucuucucaacug

SEQ ID NO: 1513520 - RNA, 19 nt, Homo sapiens
  misc_RNA (1)...(19): siRNA sense strand
gcauuaucuucucaacugu

SEQ ID NO: 1513521 - RNA, 19 nt, Homo sapiens
  misc_RNA (1)...(19): siRNA sense strand
agacaguguuugaagagau

SEQ ID NO: 1513522 - RNA, 19 nt, Homo sapiens
  misc_RNA (1)...(19): siRNA sense strand
agcagaaggcuuucaagua

SEQ ID NO: 1513523 - RNA, 19 nt, Homo sapiens
  misc_RNA (1)...(19): siRNA sense strand
ucacaaagagaaacacgau

SEQ ID NO: 1513524 - RNA, 19 nt, Homo sapiens
  misc_RNA (1)...(19): siRNA sense strand
aaggaagagacucaaguua

SEQ ID NO: 1513525 - RNA, 19 nt, Homo sapiens
  misc_RNA (1)...(19): siRNA sense strand
gcacauucuucuuuuagga

SEQ ID NO: 1513526 - RNA, 19 nt, Homo sapiens
  misc_RNA (1)...(19): siRNA sense strand
agaaagcacaggaggaguu

SEQ ID NO: 1513527 - RNA, 19 nt, Homo sapiens
  misc_RNA (1)...(19): siRNA sense strand
uagugacucuggcauuguu

SEQ ID NO: 1513528 - RNA, 19 nt, Homo sapiens
  misc_RNA (1)...(19): siRNA sense strand
gccagagacuccaucuaag

SEQ ID NO: 1513529 - RNA, 19 nt, Homo sapiens
  misc_RNA (1)...(19): siRNA sense strand
ggagacaguguuugaagag

SEQ ID NO: 1513530 - RNA, 19 nt, Homo sapiens
  misc_RNA (1)...(19): siRNA sense strand
uuaaacaggagaaggaaga

SEQ ID NO: 1513531 - RNA, 19 nt, Homo sapiens
  misc_RNA (1)...(19): siRNA sense strand
aaagacuugaggagaaaua

SEQ ID NO: 1513532 - RNA, 19 nt, Homo sapiens
  misc_RNA (1)...(19): siRNA sense strand
cagaaggcuuucaaguaca

SEQ ID NO: 1513533 - RNA, 19 nt, Homo sapiens
  misc_RNA (1)...(19): siRNA sense strand
uugcacaccauuagaaauu

SEQ ID NO: 1513534 - RNA, 19 nt, Homo sapiens
  misc_RNA (1)...(19): siRNA sense strand
gcacaggaggaguuucauc

SEQ ID NO: 1513535 - RNA, 19 nt, Homo sapiens
  misc_RNA (1)...(19): siRNA sense strand
ucgguucuguuccacaauu

SEQ ID NO: 1513536 - RNA, 19 nt, Homo sapiens
  misc_RNA (1)...(19): siRNA sense strand
caaguacaugucagugauu

SEQ ID NO: 1513537 - RNA, 19 nt, Homo sapiens
  misc_RNA (1)...(19): siRNA sense strand
guuagcaucacaaagagaa

SEQ ID NO: 1513538 - RNA, 19 nt, Homo sapiens
  misc_RNA (1)...(19): siRNA sense strand
gaagagacucaaguuagca

SEQ ID NO: 1513539 - RNA, 19 nt, Homo sapiens
  misc_RNA (1)...(19): siRNA sense strand
ucucuacuguggugagguu

SEQ ID NO: 1513540 - RNA, 19 nt, Homo sapiens
  misc_RNA (1)...(19): siRNA sense strand
agacagagguggggccaua

SEQ ID NO: 1513541 - RNA, 19 nt, Homo sapiens
  misc_RNA (1)...(19): siRNA sense strand
cuucucaacuguucucuac

SEQ ID NO: 1513542 - RNA, 19 nt, Homo sapiens
  misc_RNA (1)...(19): siRNA sense strand
cgguucuguuccacaauua

SEQ ID NO: 1513543 - RNA, 19 nt, Homo sapiens
  misc_RNA (1)...(19): siRNA sense strand
gagaaacacgaugcuggaa

SEQ ID NO: 1513544 - RNA, 19 nt, Homo sapiens
  misc_RNA (1)...(19): siRNA sense strand
ucaucuuccuggcaacaaa

SEQ ID NO: 1513545 - RNA, 19 nt, Homo sapiens
  misc_RNA (1)...(19): siRNA sense strand
ucaugcagcagaaggcuuu

SEQ ID NO: 1513546 - RNA, 19 nt, Homo sapiens
  misc_RNA (1)...(19): siRNA sense strand
auaauuucaugcagcagaa

SEQ ID NO: 1513547 - RNA, 19 nt, Homo sapiens
  misc_RNA (1)...(19): siRNA sense strand
agaaggcuuucaaguacau

SEQ ID NO: 1513548 - RNA, 19 nt, Homo sapiens
  misc_RNA (1)...(19): siRNA sense strand
ccaauaugguggguacagu

SEQ ID NO: 1513549 - RNA, 19 nt, Homo sapiens
  misc_RNA (1)...(19): siRNA sense strand
ccuguuaucaguuacuuau

SEQ ID NO: 1513550 - RNA, 19 nt, Homo sapiens
  misc_RNA (1)...(19): siRNA sense strand
cacuacagcuuucaguuuu

SEQ ID NO: 1513551 - RNA, 19 nt, Homo sapiens
  misc_RNA (1)...(19): siRNA sense strand
guacugaugcuuuucuuga

SEQ ID NO: 1513552 - RNA, 19 nt, Homo sapiens
  misc_RNA (1)...(19): siRNA sense strand
gccuuugguuuauacaugu

SEQ ID NO: 1513553 - RNA, 19 nt, Homo sapiens
  misc_RNA (1)...(19): siRNA sense strand
aauaaggcugcauuacuuu

SEQ ID NO: 1513554 - RNA, 19 nt, Homo sapiens
  misc_RNA (1)...(19): siRNA sense strand
aauccuacacuacagcuuu

SEQ ID NO: 1513555 - RNA, 19 nt, Homo sapiens
  misc_RNA (1)...(19): siRNA sense strand
ucgaaaagcuaaugacaca

SEQ ID NO: 1513556 - RNA, 19 nt, Homo sapiens
  misc_RNA (1)...(19): siRNA sense strand
ggagguuaucucacgugua

SEQ ID NO: 1513557 - RNA, 19 nt, Homo sapiens
  misc_RNA (1)...(19): siRNA sense strand
uguuaucaguuacuuaugg

SEQ ID NO: 1513558 - RNA, 19 nt, Homo sapiens
  misc_RNA (1)...(19): siRNA sense strand
cagcagaaggcuuucaagu

SEQ ID NO: 1513559 - RNA, 19 nt, Homo sapiens
  misc_RNA (1)...(19): siRNA sense strand
gaaagggagauugcauucu

SEQ ID NO: 1513560 - RNA, 19 nt, Homo sapiens
  misc_RNA (1)...(19): siRNA sense strand
agaaacacgaugcuggaaa

SEQ ID NO: 1513561 - RNA, 19 nt, Homo sapiens
  misc_RNA (1)...(19): siRNA sense strand
caccguggcuggaguuuug

SEQ ID NO: 1513562 - RNA, 19 nt, Homo sapiens
  misc_RNA (1)...(19): siRNA sense strand
ugaaguaucucaacaugua

SEQ ID NO: 1513563 - RNA, 19 nt, Homo sapiens
  misc_RNA (1)...(19): siRNA sense strand
gcaagucucugcugccuuu

SEQ ID NO: 1513564 - RNA, 19 nt, Homo sapiens
  misc_RNA (1)...(19): siRNA sense strand
caaauacacugaaacauuc

SEQ ID NO: 1513565 - RNA, 19 nt, Homo sapiens
  misc_RNA (1)...(19): siRNA sense strand
ugaccuugcucauguauua

SEQ ID NO: 1513566 - RNA, 19 nt, Homo sapiens
  misc_RNA (1)...(19): siRNA sense strand
gcacagacuuaaacaacaa

SEQ ID NO: 1513567 - RNA, 19 nt, Homo sapiens
  misc_RNA (1)...(19): siRNA sense strand
guaaaggaaaccaucauua

SEQ ID NO: 1513568 - RNA, 19 nt, Homo sapiens
  misc_RNA (1)...(19): siRNA sense strand
ggagagugguucaucaaug

SEQ ID NO: 1513569 - RNA, 19 nt, Homo sapiens
  misc_RNA (1)...(19): siRNA sense strand
gcucauguauuaucuuuac

SEQ ID NO: 1513570 - RNA, 19 nt, Homo sapiens
  misc_RNA (1)...(19): siRNA sense strand
gaaaccaucauuagcaguu

SEQ ID NO: 1513571 - RNA, 19 nt, Homo sapiens
  misc_RNA (1)...(19): siRNA sense strand
cuuuauggcuucagaguuu

SEQ ID NO: 1513572 - RNA, 19 nt, Homo sapiens
  misc_RNA (1)...(19): siRNA sense strand
caacaacaaguccugcuuu

SEQ ID NO: 1513573 - RNA, 19 nt, Homo sapiens
  misc_RNA (1)...(19): siRNA sense strand
caaggagagugguucauca

SEQ ID NO: 1513574 - RNA, 19 nt, Homo sapiens
  misc_RNA (1)...(19): siRNA sense strand
caagauggguagcaacagu

SEQ ID NO: 1513575 - RNA, 19 nt, Homo sapiens
  misc_RNA (1)...(19): siRNA sense strand
uaaaggaaaccaucauuag

SEQ ID NO: 1513576 - RNA, 19 nt, Homo sapiens
  misc_RNA (1)...(19): siRNA sense strand
uugcugagcuugcaggauu

SEQ ID NO: 1513577 - RNA, 19 nt, Homo sapiens
  misc_RNA (1)...(19): siRNA sense strand
gauuacaguugcugagcuu

SEQ ID NO: 1513578 - RNA, 19 nt, Homo sapiens
  misc_RNA (1)...(19): siRNA sense strand
uggcugaccuugcucaugu

SEQ ID NO: 1513579 - RNA, 19 nt, Homo sapiens
  misc_RNA (1)...(19): siRNA sense strand
ugacaaauacacugaaaca

SEQ ID NO: 1513580 - RNA, 19 nt, Homo sapiens
  misc_RNA (1)...(19): siRNA sense strand
gagaagcacagacuuaaac

SEQ ID NO: 1513581 - RNA, 19 nt, Homo sapiens
  misc_RNA (1)...(19): siRNA sense strand
gguaaaggaaaccaucauu

SEQ ID NO: 1513582 - RNA, 19 nt, Homo sapiens
  misc_RNA (1)...(19): siRNA sense strand
ccugagaagcacagacuua

SEQ ID NO: 1513583 - RNA, 19 nt, Homo sapiens
  misc_RNA (1)...(19): siRNA sense strand
gaaucgcacuguauuucca

SEQ ID NO: 1513584 - RNA, 19 nt, Homo sapiens
  misc_RNA (1)...(19): siRNA sense strand
caugugugcugcagucuuc

SEQ ID NO: 1513585 - RNA, 19 nt, Homo sapiens
  misc_RNA (1)...(19): siRNA sense strand
gagcuugcaggauuuguga

SEQ ID NO: 1513586 - RNA, 19 nt, Homo sapiens
  misc_RNA (1)...(19): siRNA sense strand
ccugaaguaucucaacaug

SEQ ID NO: 1513587 - RNA, 19 nt, Homo sapiens
  misc_RNA (1)...(19): siRNA sense strand
gugcaucagucuucaaagg

SEQ ID NO: 1513588 - RNA, 19 nt, Homo sapiens
  misc_RNA (1)...(19): siRNA sense strand
uucacucccuaucauauua

SEQ ID NO: 1513589 - RNA, 19 nt, Homo sapiens
  misc_RNA (1)...(19): siRNA sense strand
gcguuggucgggaugauua

SEQ ID NO: 1513590 - RNA, 19 nt, Homo sapiens
  misc_RNA (1)...(19): siRNA sense strand
acuguaaugucacuaaugu

SEQ ID NO: 1513591 - RNA, 19 nt, Homo sapiens
  misc_RNA (1)...(19): siRNA sense strand
gcaaggagagugguucauc

SEQ ID NO: 1513592 - RNA, 19 nt, Homo sapiens
  misc_RNA (1)...(19): siRNA sense strand
gauacaagcaaaugaaugc

SEQ ID NO: 1513593 - RNA, 19 nt, Homo sapiens
  misc_RNA (1)...(19): siRNA sense strand
gaagcacagacuuaaacaa

SEQ ID NO: 1513594 - RNA, 19 nt, Homo sapiens
  misc_RNA (1)...(19): siRNA sense strand
caacaaguccugcuuugcu

SEQ ID NO: 1513595 - RNA, 19 nt, Homo sapiens
  misc_RNA (1)...(19): siRNA sense strand
ggauacaagcaaaugaaug

SEQ ID NO: 1513596 - RNA, 19 nt, Homo sapiens
  misc_RNA (1)...(19): siRNA sense strand
gcacugcugagauuuacug

SEQ ID NO: 1513597 - RNA, 19 nt, Homo sapiens
  misc_RNA (1)...(19): siRNA sense strand
cggauuuacuauuacauca

SEQ ID NO: 1513598 - RNA, 19 nt, Homo sapiens
  misc_RNA (1)...(19): siRNA sense strand
aaccaccuauauccucaua

SEQ ID NO: 1513599 - RNA, 19 nt, Homo sapiens
  misc_RNA (1)...(19): siRNA sense strand
gcugcagucuucuucaucu

SEQ ID NO: 1513600 - RNA, 19 nt, Homo sapiens
  misc_RNA (1)...(19): siRNA sense strand
aacaacaaguccugcuuug

SEQ ID NO: 1513601 - RNA, 19 nt, Homo sapiens
  misc_RNA (1)...(19): siRNA sense strand
gaaguaucucaacauguau

SEQ ID NO: 1513602 - RNA, 19 nt, Homo sapiens
  misc_RNA (1)...(19): siRNA sense strand
cuugacaaauacacugaaa

SEQ ID NO: 1513603 - RNA, 19 nt, Homo sapiens
  misc_RNA (1)...(19): siRNA sense strand
aaacuacuauauccuugag

SEQ ID NO: 1513604 - RNA, 19 nt, Homo sapiens
  misc_RNA (1)...(19): siRNA sense strand
uugcugaucuuggauacaa

SEQ ID NO: 1513605 - RNA, 19 nt, Homo sapiens
  misc_RNA (1)...(19): siRNA sense strand
cccuccggauuuacuauua

SEQ ID NO: 1513606 - RNA, 19 nt, Homo sapiens
  misc_RNA (1)...(19): siRNA sense strand
ggauccaauucuuuauuac

SEQ ID NO: 1513607 - RNA, 19 nt, Homo sapiens
  misc_RNA (1)...(19): siRNA sense strand
ggaaaacuacuauauccuu

SEQ ID NO: 1513608 - RNA, 19 nt, Homo sapiens
  misc_RNA (1)...(19): siRNA sense strand
ugaaugcaguugcguuggu

SEQ ID NO: 1513609 - RNA, 19 nt, Homo sapiens
  misc_RNA (1)...(19): siRNA sense strand
ugagaagcacagacuuaaa

SEQ ID NO: 1513610 - RNA, 19 nt, Homo sapiens
  misc_RNA (1)...(19): siRNA sense strand
ggacugccuguuugccauu

SEQ ID NO: 1513611 - RNA, 19 nt, Homo sapiens
  misc_RNA (1)...(19): siRNA sense strand
cgccauggcaguucuguga

SEQ ID NO: 1513612 - RNA, 19 nt, Homo sapiens
  misc_RNA (1)...(19): siRNA sense strand
gagcaaggagagugguuca

SEQ ID NO: 1513613 - RNA, 19 nt, Homo sapiens
  misc_RNA (1)...(19): siRNA sense strand
cugcuuugcugaucuugga

SEQ ID NO: 1513614 - RNA, 19 nt, Homo sapiens
  misc_RNA (1)...(19): siRNA sense strand
ucaauacucccucuaugca

SEQ ID NO: 1513615 - RNA, 19 nt, Homo sapiens
  misc_RNA (1)...(19): siRNA sense strand
cacuguauuuccacccuuu

SEQ ID NO: 1513616 - RNA, 19 nt, Homo sapiens
  misc_RNA (1)...(19): siRNA sense strand
uuccuggucuucuggcuaa

SEQ ID NO: 1513617 - RNA, 19 nt, Homo sapiens
  misc_RNA (1)...(19): siRNA sense strand
cauauucauuccuggucuu

SEQ ID NO: 1513618 - RNA, 19 nt, Homo sapiens
  misc_RNA (1)...(19): siRNA sense strand
agaaagcacugcggauggu

SEQ ID NO: 1513619 - RNA, 19 nt, Homo sapiens
  misc_RNA (1)...(19): siRNA sense strand
aaaccaucauuagcaguug

SEQ ID NO: 1513620 - RNA, 19 nt, Homo sapiens
  misc_RNA (1)...(19): siRNA sense strand
uaccugaaguaucucaaca

SEQ ID NO: 1513621 - RNA, 19 nt, Homo sapiens
  misc_RNA (1)...(19): siRNA sense strand
ucuaugcaaccaccuauau

SEQ ID NO: 1513622 - RNA, 19 nt, Homo sapiens
  misc_RNA (1)...(19): siRNA sense strand
guucugugccgcuucauca

SEQ ID NO: 1513623 - RNA, 19 nt, Homo sapiens
  misc_RNA (1)...(19): siRNA sense strand
ugacgugcaucagucuuca

SEQ ID NO: 1513624 - RNA, 19 nt, Homo sapiens
  misc_RNA (1)...(19): siRNA sense strand
gagacuggaagcguaggua

SEQ ID NO: 1513625 - RNA, 19 nt, Homo sapiens
  misc_RNA (1)...(19): siRNA sense strand
gauuugugaucccagugau

SEQ ID NO: 1513626 - RNA, 19 nt, Homo sapiens
  misc_RNA (1)...(19): siRNA sense strand
uuucaauacucccucuaug

SEQ ID NO: 1513627 - RNA, 19 nt, Homo sapiens
  misc_RNA (1)...(19): siRNA sense strand
cugagaagcacagacuuaa

SEQ ID NO: 1513628 - RNA, 19 nt, Homo sapiens
  misc_RNA (1)...(19): siRNA sense strand
guccgaaucgcacuguauu

SEQ ID NO: 1513629 - RNA, 19 nt, Homo sapiens
  misc_RNA (1)...(19): siRNA sense strand
gcacugcggaugguguuca

SEQ ID NO: 1513630 - RNA, 19 nt, Homo sapiens
  misc_RNA (1)...(19): siRNA sense strand
aaggaaaccaucauuagca

SEQ ID NO: 1513631 - RNA, 19 nt, Homo sapiens
  misc_RNA (1)...(19): siRNA sense strand
ucacucccuaucauauuaa

SEQ ID NO: 1513632 - RNA, 19 nt, Homo sapiens
  misc_RNA (1)...(19): siRNA sense strand
gugcugcagucuucuucau

SEQ ID NO: 1513633 - RNA, 19 nt, Homo sapiens
  misc_RNA (1)...(19): siRNA sense strand
ggcuaaccuugacaaauac

SEQ ID NO: 1513634 - RNA, 19 nt, Homo sapiens
  misc_RNA (1)...(19): siRNA sense strand
ccgaaucgcacuguauuuc

SEQ ID NO: 1513635 - RNA, 19 nt, Homo sapiens
  misc_RNA (1)...(19): siRNA sense strand
gcuucacucccuaucauau

SEQ ID NO: 1513636 - RNA, 19 nt, Homo sapiens
  misc_RNA (1)...(19): siRNA sense strand
agacuuaaacaacaacaag

SEQ ID NO: 1513637 - RNA, 19 nt, Homo sapiens
  misc_RNA (1)...(19): siRNA sense strand
ggcugaccuugcucaugua

SEQ ID NO: 1513638 - RNA, 19 nt, Homo sapiens
  misc_RNA (1)...(19): siRNA sense strand
gacugccuguuugccauuu

SEQ ID NO: 1513639 - RNA, 19 nt, Homo sapiens
  misc_RNA (1)...(19): siRNA sense strand
gaucagugagaggcagaaa

SEQ ID NO: 1513640 - RNA, 19 nt, Homo sapiens
  misc_RNA (1)...(19): siRNA sense strand
ccauuucccauccugagaa

SEQ ID NO: 1513641 - RNA, 19 nt, Homo sapiens
  misc_RNA (1)...(19): siRNA sense strand
gcuuugcugaucuuggaua

SEQ ID NO: 1513642 - RNA, 19 nt, Homo sapiens
  misc_RNA (1)...(19): siRNA sense strand
caauacucccucuaugcaa

SEQ ID NO: 1513643 - RNA, 19 nt, Homo sapiens
  misc_RNA (1)...(19): siRNA sense strand
aagcacagacuuaaacaac

SEQ ID NO: 1513644 - RNA, 19 nt, Homo sapiens
  misc_RNA (1)...(19): siRNA sense strand
cauucaagauggguagcaa

SEQ ID NO: 1513645 - RNA, 19 nt, Homo sapiens
  misc_RNA (1)...(19): siRNA sense strand
cugcuucacucccuaucau

SEQ ID NO: 1513646 - RNA, 19 nt, Homo sapiens
  misc_RNA (1)...(19): siRNA sense strand
gcggaugguguucaugugu

SEQ ID NO: 1513647 - RNA, 19 nt, Homo sapiens
  misc_RNA (1)...(19): siRNA sense strand
ugaaguaucucaacaugua

SEQ ID NO: 1513648 - RNA, 19 nt, Homo sapiens
  misc_RNA (1)...(19): siRNA sense strand
gcaagucucugcugccuuu

SEQ ID NO: 1513649 - RNA, 19 nt, Homo sapiens
  misc_RNA (1)...(19): siRNA sense strand
caaauacacugaaacauuc

SEQ ID NO: 1513650 - RNA, 19 nt, Homo sapiens
  misc_RNA (1)...(19): siRNA sense strand
ugaccuugcucauguauua

SEQ ID NO: 1513651 - RNA, 19 nt, Homo sapiens
  misc_RNA (1)...(19): siRNA sense strand
gcacagacuuaaacaacaa

SEQ ID NO: 1513652 - RNA, 19 nt, Homo sapiens
  misc_RNA (1)...(19): siRNA sense strand
guaaaggaaaccaucauua

SEQ ID NO: 1513653 - RNA, 19 nt, Homo sapiens
  misc_RNA (1)...(19): siRNA sense strand
ggagagugguucaucaaug

SEQ ID NO: 1513654 - RNA, 19 nt, Homo sapiens
  misc_RNA (1)...(19): siRNA sense strand
gcucauguauuaucuuuac

SEQ ID NO: 1513655 - RNA, 19 nt, Homo sapiens
  misc_RNA (1)...(19): siRNA sense strand
gaaaccaucauuagcaguu

SEQ ID NO: 1513656 - RNA, 19 nt, Homo sapiens
  misc_RNA (1)...(19): siRNA sense strand
cuuuauggcuucagaguuu

SEQ ID NO: 1513657 - RNA, 19 nt, Homo sapiens
  misc_RNA (1)...(19): siRNA sense strand
caacaacaaguccugcuuu

SEQ ID NO: 1513658 - RNA, 19 nt, Homo sapiens
  misc_RNA (1)...(19): siRNA sense strand
caaggagagugguucauca

SEQ ID NO: 1513659 - RNA, 19 nt, Homo sapiens
  misc_RNA (1)...(19): siRNA sense strand
caagauggguagcaacagu

SEQ ID NO: 1513660 - RNA, 19 nt, Homo sapiens
  misc_RNA (1)...(19): siRNA sense strand
uaaaggaaaccaucauuag

SEQ ID NO: 1513661 - RNA, 19 nt, Homo sapiens
  misc_RNA (1)...(19): siRNA sense strand
uugcugagcuugcaggauu

SEQ ID NO: 1513662 - RNA, 19 nt, Homo sapiens
  misc_RNA (1)...(19): siRNA sense strand
gauuacaguugcugagcuu

SEQ ID NO: 1513663 - RNA, 19 nt, Homo sapiens
  misc_RNA (1)...(19): siRNA sense strand
uggcugaccuugcucaugu

SEQ ID NO: 1513664 - RNA, 19 nt, Homo sapiens
  misc_RNA (1)...(19): siRNA sense strand
ugacaaauacacugaaaca

SEQ ID NO: 1513665 - RNA, 19 nt, Homo sapiens
  misc_RNA (1)...(19): siRNA sense strand
gagaagcacagacuuaaac

SEQ ID NO: 1513666 - RNA, 19 nt, Homo sapiens
  misc_RNA (1)...(19): siRNA sense strand
gguaaaggaaaccaucauu

SEQ ID NO: 1513667 - RNA, 19 nt, Homo sapiens
  misc_RNA (1)...(19): siRNA sense strand
ccugagaagcacagacuua

SEQ ID NO: 1513668 - RNA, 19 nt, Homo sapiens
  misc_RNA (1)...(19): siRNA sense strand
gaaucgcacuguauuucca

SEQ ID NO: 1513669 - RNA, 19 nt, Homo sapiens
  misc_RNA (1)...(19): siRNA sense strand
caugugugcugcagucuuc

SEQ ID NO: 1513670 - RNA, 19 nt, Homo sapiens
  misc_RNA (1)...(19): siRNA sense strand
gagcuugcaggauuuguga

SEQ ID NO: 1513671 - RNA, 19 nt, Homo sapiens
  misc_RNA (1)...(19): siRNA sense strand
ccugaaguaucucaacaug

SEQ ID NO: 1513672 - RNA, 19 nt, Homo sapiens
  misc_RNA (1)...(19): siRNA sense strand
gugcaucagucuucaaagg

SEQ ID NO: 1513673 - RNA, 19 nt, Homo sapiens
  misc_RNA (1)...(19): siRNA sense strand
uucacucccuaucauauua

SEQ ID NO: 1513674 - RNA, 19 nt, Homo sapiens
  misc_RNA (1)...(19): siRNA sense strand
gcguuggucgggaugauua

SEQ ID NO: 1513675 - RNA, 19 nt, Homo sapiens
  misc_RNA (1)...(19): siRNA sense strand
acuguaaugucacuaaugu

SEQ ID NO: 1513676 - RNA, 19 nt, Homo sapiens
  misc_RNA (1)...(19): siRNA sense strand
gcaaggagagugguucauc

SEQ ID NO: 1513677 - RNA, 19 nt, Homo sapiens
  misc_RNA (1)...(19): siRNA sense strand
gauacaagcaaaugaaugc

SEQ ID NO: 1513678 - RNA, 19 nt, Homo sapiens
  misc_RNA (1)...(19): siRNA sense strand
gaagcacagacuuaaacaa

SEQ ID NO: 1513679 - RNA, 19 nt, Homo sapiens
  misc_RNA (1)...(19): siRNA sense strand
caacaaguccugcuuugcu

SEQ ID NO: 1513680 - RNA, 19 nt, Homo sapiens
  misc_RNA (1)...(19): siRNA sense strand
ggauacaagcaaaugaaug

SEQ ID NO: 1513681 - RNA, 19 nt, Homo sapiens
  misc_RNA (1)...(19): siRNA sense strand
gcacugcugagauuuacug

SEQ ID NO: 1513682 - RNA, 19 nt, Homo sapiens
  misc_RNA (1)...(19): siRNA sense strand
cggauuuacuauuacauca

SEQ ID NO: 1513683 - RNA, 19 nt, Homo sapiens
  misc_RNA (1)...(19): siRNA sense strand
aaccaccuauauccucaua

SEQ ID NO: 1513684 - RNA, 19 nt, Homo sapiens
  misc_RNA (1)...(19): siRNA sense strand
gcugcagucuucuucaucu

SEQ ID NO: 1513685 - RNA, 19 nt, Homo sapiens
  misc_RNA (1)...(19): siRNA sense strand
aacaacaaguccugcuuug

SEQ ID NO: 1513686 - RNA, 19 nt, Homo sapiens
  misc_RNA (1)...(19): siRNA sense strand
gaaguaucucaacauguau

SEQ ID NO: 1513687 - RNA, 19 nt, Homo sapiens
  misc_RNA (1)...(19): siRNA sense strand
cuugacaaauacacugaaa

SEQ ID NO: 1513688 - RNA, 19 nt, Homo sapiens
  misc_RNA (1)...(19): siRNA sense strand
aaacuacuauauccuugag

SEQ ID NO: 1513689 - RNA, 19 nt, Homo sapiens
  misc_RNA (1)...(19): siRNA sense strand
uugcugaucuuggauacaa

SEQ ID NO: 1513690 - RNA, 19 nt, Homo sapiens
  misc_RNA (1)...(19): siRNA sense strand
cccuccggauuuacuauua

SEQ ID NO: 1513691 - RNA, 19 nt, Homo sapiens
  misc_RNA (1)...(19): siRNA sense strand
ggauccaauucuuuauuac

SEQ ID NO: 1513692 - RNA, 19 nt, Homo sapiens
  misc_RNA (1)...(19): siRNA sense strand
ggaaaacuacuauauccuu

SEQ ID NO: 1513693 - RNA, 19 nt, Homo sapiens
  misc_RNA (1)...(19): siRNA sense strand
ugaaugcaguugcguuggu

SEQ ID NO: 1513694 - RNA, 19 nt, Homo sapiens
  misc_RNA (1)...(19): siRNA sense strand
ugagaagcacagacuuaaa

SEQ ID NO: 1513695 - RNA, 19 nt, Homo sapiens
  misc_RNA (1)...(19): siRNA sense strand
ggacugccuguuugccauu

SEQ ID NO: 1513696 - RNA, 19 nt, Homo sapiens
  misc_RNA (1)...(19): siRNA sense strand
cgccauggcaguucuguga

SEQ ID NO: 1513697 - RNA, 19 nt, Homo sapiens
  misc_RNA (1)...(19): siRNA sense strand
gagcaaggagagugguuca

SEQ ID NO: 1513698 - RNA, 19 nt, Homo sapiens
  misc_RNA (1)...(19): siRNA sense strand
cugcuuugcugaucuugga

SEQ ID NO: 1513699 - RNA, 19 nt, Homo sapiens
  misc_RNA (1)...(19): siRNA sense strand
ucaauacucccucuaugca

SEQ ID NO: 1513700 - RNA, 19 nt, Homo sapiens
  misc_RNA (1)...(19): siRNA sense strand
cacuguauuuccacccuuu

SEQ ID NO: 1513701 - RNA, 19 nt, Homo sapiens
  misc_RNA (1)...(19): siRNA sense strand
uuccuggucuucuggcuaa

SEQ ID NO: 1513702 - RNA, 19 nt, Homo sapiens
  misc_RNA (1)...(19): siRNA sense strand
cauauucauuccuggucuu

SEQ ID NO: 1513703 - RNA, 19 nt, Homo sapiens
  misc_RNA (1)...(19): siRNA sense strand
agaaagcacugcggauggu

SEQ ID NO: 1513704 - RNA, 19 nt, Homo sapiens
  misc_RNA (1)...(19): siRNA sense strand
aaaccaucauuagcaguug

SEQ ID NO: 1513705 - RNA, 19 nt, Homo sapiens
  misc_RNA (1)...(19): siRNA sense strand
uaccugaaguaucucaaca

SEQ ID NO: 1513706 - RNA, 19 nt, Homo sapiens
  misc_RNA (1)...(19): siRNA sense strand
ucuaugcaaccaccuauau

SEQ ID NO: 1513707 - RNA, 19 nt, Homo sapiens
  misc_RNA (1)...(19): siRNA sense strand
guucugugccgcuucauca

SEQ ID NO: 1513708 - RNA, 19 nt, Homo sapiens
  misc_RNA (1)...(19): siRNA sense strand
ugacgugcaucagucuuca

SEQ ID NO: 1513709 - RNA, 19 nt, Homo sapiens
  misc_RNA (1)...(19): siRNA sense strand
gagacuggaagcguaggua

SEQ ID NO: 1513710 - RNA, 19 nt, Homo sapiens
  misc_RNA (1)...(19): siRNA sense strand
gauuugugaucccagugau

SEQ ID NO: 1513711 - RNA, 19 nt, Homo sapiens
  misc_RNA (1)...(19): siRNA sense strand
uuucaauacucccucuaug

SEQ ID NO: 1513712 - RNA, 19 nt, Homo sapiens
  misc_RNA (1)...(19): siRNA sense strand
cugagaagcacagacuuaa

SEQ ID NO: 1513713 - RNA, 19 nt, Homo sapiens
  misc_RNA (1)...(19): siRNA sense strand
guccgaaucgcacuguauu

SEQ ID NO: 1513714 - RNA, 19 nt, Homo sapiens
  misc_RNA (1)...(19): siRNA sense strand
gcacugcggaugguguuca

SEQ ID NO: 1513715 - RNA, 19 nt, Homo sapiens
  misc_RNA (1)...(19): siRNA sense strand
aaggaaaccaucauuagca

SEQ ID NO: 1513716 - RNA, 19 nt, Homo sapiens
  misc_RNA (1)...(19): siRNA sense strand
ucacucccuaucauauuaa

SEQ ID NO: 1513717 - RNA, 19 nt, Homo sapiens
  misc_RNA (1)...(19): siRNA sense strand
gugcugcagucuucuucau

SEQ ID NO: 1513718 - RNA, 19 nt, Homo sapiens
  misc_RNA (1)...(19): siRNA sense strand
ggcuaaccuugacaaauac

SEQ ID NO: 1513719 - RNA, 19 nt, Homo sapiens
  misc_RNA (1)...(19): siRNA sense strand
ccgaaucgcacuguauuuc

SEQ ID NO: 1513720 - RNA, 19 nt, Homo sapiens
  misc_RNA (1)...(19): siRNA sense strand
gcuucacucccuaucauau

SEQ ID NO: 1513721 - RNA, 19 nt, Homo sapiens
  misc_RNA (1)...(19): siRNA sense strand
agacuuaaacaacaacaag

SEQ ID NO: 1513722 - RNA, 19 nt, Homo sapiens
  misc_RNA (1)...(19): siRNA sense strand
ggcugaccuugcucaugua

SEQ ID NO: 1513723 - RNA, 19 nt, Homo sapiens
  misc_RNA (1)...(19): siRNA sense strand
gacugccuguuugccauuu

SEQ ID NO: 1513724 - RNA, 19 nt, Homo sapiens
  misc_RNA (1)...(19): siRNA sense strand
gaucagugagaggcagaaa

SEQ ID NO: 1513725 - RNA, 19 nt, Homo sapiens
  misc_RNA (1)...(19): siRNA sense strand
ccauuucccauccugagaa

SEQ ID NO: 1513726 - RNA, 19 nt, Homo sapiens
  misc_RNA (1)...(19): siRNA sense strand
gcuuugcugaucuuggaua

SEQ ID NO: 1513727 - RNA, 19 nt, Homo sapiens
  misc_RNA (1)...(19): siRNA sense strand
caauacucccucuaugcaa

SEQ ID NO: 1513728 - RNA, 19 nt, Homo sapiens
  misc_RNA (1)...(19): siRNA sense strand
aagcacagacuuaaacaac

SEQ ID NO: 1513729 - RNA, 19 nt, Homo sapiens
  misc_RNA (1)...(19): siRNA sense strand
cauucaagauggguagcaa

SEQ ID NO: 1513730 - RNA, 19 nt, Homo sapiens
  misc_RNA (1)...(19): siRNA sense strand
cugcuucacucccuaucau

SEQ ID NO: 1513731 - RNA, 19 nt, Homo sapiens
  misc_RNA (1)...(19): siRNA sense strand
gcggaugguguucaugugu

SEQ ID NO: 1513732 - RNA, 19 nt, Homo sapiens
  misc_RNA (1)...(19): siRNA sense strand
gcagagcccuagcuguuua

SEQ ID NO: 1513733 - RNA, 19 nt, Homo sapiens
  misc_RNA (1)...(19): siRNA sense strand
gaaaucaccauuccuauga

SEQ ID NO: 1513734 - RNA, 19 nt, Homo sapiens
  misc_RNA (1)...(19): siRNA sense strand
ggagaaaucaccauuccua

SEQ ID NO: 1513735 - RNA, 19 nt, Homo sapiens
  misc_RNA (1)...(19): siRNA sense strand
gcagagguguuugucauug

SEQ ID NO: 1513736 - RNA, 19 nt, Homo sapiens
  misc_RNA (1)...(19): siRNA sense strand
uuugacagcuccacauuaa

SEQ ID NO: 1513737 - RNA, 19 nt, Homo sapiens
  misc_RNA (1)...(19): siRNA sense strand
aaaugaaucuguucgcaau

SEQ ID NO: 1513738 - RNA, 19 nt, Homo sapiens
  misc_RNA (1)...(19): siRNA sense strand
cauuaaugcugcaaagaga

SEQ ID NO: 1513739 - RNA, 19 nt, Homo sapiens
  misc_RNA (1)...(19): siRNA sense strand
ugacagcuccacauuaaau

SEQ ID NO: 1513740 - RNA, 19 nt, Homo sapiens
  misc_RNA (1)...(19): siRNA sense strand
gaaggagaaaucaccauuc

SEQ ID NO: 1513741 - RNA, 19 nt, Homo sapiens
  misc_RNA (1)...(19): siRNA sense strand
ccaucacccucaacucaaa

SEQ ID NO: 1513742 - RNA, 19 nt, Homo sapiens
  misc_RNA (1)...(19): siRNA sense strand
ucuaaaagcuguugggaaa

SEQ ID NO: 1513743 - RNA, 19 nt, Homo sapiens
  misc_RNA (1)...(19): siRNA sense strand
uugcaggccuuucagauau

SEQ ID NO: 1513744 - RNA, 19 nt, Homo sapiens
  misc_RNA (1)...(19): siRNA sense strand
ggaugauucucaccuuuac

SEQ ID NO: 1513745 - RNA, 19 nt, Homo sapiens
  misc_RNA (1)...(19): siRNA sense strand
gcaggccuuucagauauau

SEQ ID NO: 1513746 - RNA, 19 nt, Homo sapiens
  misc_RNA (1)...(19): siRNA sense strand
gagaaaucaccauuccuau

SEQ ID NO: 1513747 - RNA, 19 nt, Homo sapiens
  misc_RNA (1)...(19): siRNA sense strand
ccgcagagcccuagcuguu

SEQ ID NO: 1513748 - RNA, 19 nt, Homo sapiens
  misc_RNA (1)...(19): siRNA sense strand
gauguuugccuggucuaua

SEQ ID NO: 1513749 - RNA, 19 nt, Homo sapiens
  misc_RNA (1)...(19): siRNA sense strand
ccaauuugcagagguguuu

SEQ ID NO: 1513750 - RNA, 19 nt, Homo sapiens
  misc_RNA (1)...(19): siRNA sense strand
uuugagagauugggauuug

SEQ ID NO: 1513751 - RNA, 19 nt, Homo sapiens
  misc_RNA (1)...(19): siRNA sense strand
gcccuuugauccuuugugu

SEQ ID NO: 1513752 - RNA, 19 nt, Homo sapiens
  misc_RNA (1)...(19): siRNA sense strand
uggaugauucucaccuuua

SEQ ID NO: 1513753 - RNA, 19 nt, Homo sapiens
  misc_RNA (1)...(19): siRNA sense strand
ugugcuggguuacuguaua

SEQ ID NO: 1513754 - RNA, 19 nt, Homo sapiens
  misc_RNA (1)...(19): siRNA sense strand
ccuuugauccuuuguguga

SEQ ID NO: 1513755 - RNA, 19 nt, Homo sapiens
  misc_RNA (1)...(19): siRNA sense strand
cagagguguuugucauugu

SEQ ID NO: 1513756 - RNA, 19 nt, Homo sapiens
  misc_RNA (1)...(19): siRNA sense strand
agaaaucaccauuccuaug

SEQ ID NO: 1513757 - RNA, 19 nt, Homo sapiens
  misc_RNA (1)...(19): siRNA sense strand
auauauccaucucacaaga

SEQ ID NO: 1513758 - RNA, 19 nt, Homo sapiens
  misc_RNA (1)...(19): siRNA sense strand
guuugacagcuccacauua

SEQ ID NO: 1513759 - RNA, 19 nt, Homo sapiens
  misc_RNA (1)...(19): siRNA sense strand
gaucucgcauccgggaguu

SEQ ID NO: 1513760 - RNA, 19 nt, Homo sapiens
  misc_RNA (1)...(19): siRNA sense strand
ugcaggccuuucagauaua

SEQ ID NO: 1513761 - RNA, 19 nt, Homo sapiens
  misc_RNA (1)...(19): siRNA sense strand
agaaggagaaaucaccauu

SEQ ID NO: 1513762 - RNA, 19 nt, Homo sapiens
  misc_RNA (1)...(19): siRNA sense strand
gagacucugcagauaguga

SEQ ID NO: 1513763 - RNA, 19 nt, Homo sapiens
  misc_RNA (1)...(19): siRNA sense strand
aaucaccauuccuaugaga

SEQ ID NO: 1513764 - RNA, 19 nt, Homo sapiens
  misc_RNA (1)...(19): siRNA sense strand
gauauauccaucucacaag

SEQ ID NO: 1513765 - RNA, 19 nt, Homo sapiens
  misc_RNA (1)...(19): siRNA sense strand
gugcuggguuacuguauac

SEQ ID NO: 1513766 - RNA, 19 nt, Homo sapiens
  misc_RNA (1)...(19): siRNA sense strand
uaccaucacccucaacuca

SEQ ID NO: 1513767 - RNA, 19 nt, Homo sapiens
  misc_RNA (1)...(19): siRNA sense strand
guuugucauugucugguuu

SEQ ID NO: 1513768 - RNA, 19 nt, Homo sapiens
  misc_RNA (1)...(19): siRNA sense strand
gccucugugugcuggguua

SEQ ID NO: 1513769 - RNA, 19 nt, Homo sapiens
  misc_RNA (1)...(19): siRNA sense strand
guuggaugauucucaccuu

SEQ ID NO: 1513770 - RNA, 19 nt, Homo sapiens
  misc_RNA (1)...(19): siRNA sense strand
cuagcuguuuauccuguuu

SEQ ID NO: 1513771 - RNA, 19 nt, Homo sapiens
  misc_RNA (1)...(19): siRNA sense strand
uugcagagguguuugucau

SEQ ID NO: 1513772 - RNA, 19 nt, Homo sapiens
  misc_RNA (1)...(19): siRNA sense strand
uuggaugauucucaccuuu

SEQ ID NO: 1513773 - RNA, 19 nt, Homo sapiens
  misc_RNA (1)...(19): siRNA sense strand
uuugcaggccuuucagaua

SEQ ID NO: 1513774 - RNA, 19 nt, Homo sapiens
  misc_RNA (1)...(19): siRNA sense strand
ugucugguuuggugcaguu

SEQ ID NO: 1513775 - RNA, 19 nt, Homo sapiens
  misc_RNA (1)...(19): siRNA sense strand
cuggguuacuguauacuuc

SEQ ID NO: 1513776 - RNA, 19 nt, Homo sapiens
  misc_RNA (1)...(19): siRNA sense strand
aaggagaaaucaccauucc

SEQ ID NO: 1513777 - RNA, 19 nt, Homo sapiens
  misc_RNA (1)...(19): siRNA sense strand
uuggagggaacauaucuuu

SEQ ID NO: 1513778 - RNA, 19 nt, Homo sapiens
  misc_RNA (1)...(19): siRNA sense strand
ggauagcaguggagagguu

SEQ ID NO: 1513779 - RNA, 19 nt, Homo sapiens
  misc_RNA (1)...(19): siRNA sense strand
caaguggcccugggaagua

SEQ ID NO: 1513780 - RNA, 19 nt, Homo sapiens
  misc_RNA (1)...(19): siRNA sense strand
ucaaugggguggaaacuuu

SEQ ID NO: 1513781 - RNA, 19 nt, Homo sapiens
  misc_RNA (1)...(19): siRNA sense strand
caaaccagcaagauggaaa

SEQ ID NO: 1513782 - RNA, 19 nt, Homo sapiens
  misc_RNA (1)...(19): siRNA sense strand
gcaaguggcccugggaagu

SEQ ID NO: 1513783 - RNA, 19 nt, Homo sapiens
  misc_RNA (1)...(19): siRNA sense strand
ccacccagaugguacucaa

SEQ ID NO: 1513784 - RNA, 19 nt, Homo sapiens
  misc_RNA (1)...(19): siRNA sense strand
ggaaguacaugccccaucu

SEQ ID NO: 1513785 - RNA, 19 nt, Homo sapiens
  misc_RNA (1)...(19): siRNA sense strand
ucaccaaaccagcaagaug

SEQ ID NO: 1513786 - RNA, 19 nt, Homo sapiens
  misc_RNA (1)...(19): siRNA sense strand
gauagcaguggagagguuu

SEQ ID NO: 1513787 - RNA, 19 nt, Homo sapiens
  misc_RNA (1)...(19): siRNA sense strand
ccccaucucugucaggaua

SEQ ID NO: 1513788 - RNA, 19 nt, Homo sapiens
  misc_RNA (1)...(19): siRNA sense strand
guacaugccccaucucugu

SEQ ID NO: 1513789 - RNA, 19 nt, Homo sapiens
  misc_RNA (1)...(19): siRNA sense strand
acuccaagccugucaaugg

SEQ ID NO: 1513790 - RNA, 19 nt, Homo sapiens
  misc_RNA (1)...(19): siRNA sense strand
ccacagaguuucuuccuuu

SEQ ID NO: 1513791 - RNA, 19 nt, Homo sapiens
  misc_RNA (1)...(19): siRNA sense strand
gaaaugauccgccagauag

SEQ ID NO: 1513792 - RNA, 19 nt, Homo sapiens
  misc_RNA (1)...(19): siRNA sense strand
ggacaaagacgaacugauc

SEQ ID NO: 1513793 - RNA, 19 nt, Homo sapiens
  misc_RNA (1)...(19): siRNA sense strand
ggaaaaccauuguguaaaa

SEQ ID NO: 1513794 - RNA, 19 nt, Homo sapiens
  misc_RNA (1)...(19): siRNA sense strand
ggaauucuaucuccacauc

SEQ ID NO: 1513795 - RNA, 19 nt, Homo sapiens
  misc_RNA (1)...(19): siRNA sense strand
ggacaaaguaacaaagaaa

SEQ ID NO: 1513796 - RNA, 19 nt, Homo sapiens
  misc_RNA (1)...(19): siRNA sense strand
agacagcgaugauucaaga

SEQ ID NO: 1513797 - RNA, 19 nt, Homo sapiens
  misc_RNA (1)...(19): siRNA sense strand
caucagcaaugaccucuug

SEQ ID NO: 1513798 - RNA, 19 nt, Homo sapiens
  misc_RNA (1)...(19): siRNA sense strand
acacaaaggugcugcagau

SEQ ID NO: 1513799 - RNA, 19 nt, Homo sapiens
  misc_RNA (1)...(19): siRNA sense strand
ggaagccgaucuggacaaa

SEQ ID NO: 1513800 - RNA, 19 nt, Homo sapiens
  misc_RNA (1)...(19): siRNA sense strand
gaagaaggauuugauuuug

SEQ ID NO: 1513801 - RNA, 19 nt, Homo sapiens
  misc_RNA (1)...(19): siRNA sense strand
ggaaggggcuggcuaaugu

SEQ ID NO: 1513802 - RNA, 19 nt, Homo sapiens
  misc_RNA (1)...(19): siRNA sense strand
ugaauuacuuggacuagug

SEQ ID NO: 1513803 - RNA, 19 nt, Homo sapiens
  misc_RNA (1)...(19): siRNA sense strand
aaaccuaccuggagaccaa

SEQ ID NO: 1513804 - RNA, 19 nt, Homo sapiens
  misc_RNA (1)...(19): siRNA sense strand
gaagacaccuugaaaacau

SEQ ID NO: 1513805 - RNA, 19 nt, Homo sapiens
  misc_RNA (1)...(19): siRNA sense strand
cagaguuucuuccuuucua

SEQ ID NO: 1513806 - RNA, 19 nt, Homo sapiens
  misc_RNA (1)...(19): siRNA sense strand
cagauagaauucaucauca

SEQ ID NO: 1513807 - RNA, 19 nt, Homo sapiens
  misc_RNA (1)...(19): siRNA sense strand
gaggagcacauuucaaguu

SEQ ID NO: 1513808 - RNA, 19 nt, Homo sapiens
  misc_RNA (1)...(19): siRNA sense strand
gcagcuaaauuccgaagag

SEQ ID NO: 1513809 - RNA, 19 nt, Homo sapiens
  misc_RNA (1)...(19): siRNA sense strand
auugaaggaugucccauua

SEQ ID NO: 1513810 - RNA, 19 nt, Homo sapiens
  misc_RNA (1)...(19): siRNA sense strand
gagaauggacaaaguaaca

SEQ ID NO: 1513811 - RNA, 19 nt, Homo sapiens
  misc_RNA (1)...(19): siRNA sense strand
agaaggcaaugcugaaaug

SEQ ID NO: 1513812 - RNA, 19 nt, Homo sapiens
  misc_RNA (1)...(19): siRNA sense strand
uaaggagaauggacaaagu

SEQ ID NO: 1513813 - RNA, 19 nt, Homo sapiens
  misc_RNA (1)...(19): siRNA sense strand
aagccgaucuggacaaaga

SEQ ID NO: 1513814 - RNA, 19 nt, Homo sapiens
  misc_RNA (1)...(19): siRNA sense strand
caaagaaggcaaugcugaa

SEQ ID NO: 1513815 - RNA, 19 nt, Homo sapiens
  misc_RNA (1)...(19): siRNA sense strand
acaaagaggagcuggauga

SEQ ID NO: 1513816 - RNA, 19 nt, Homo sapiens
  misc_RNA (1)...(19): siRNA sense strand
gaauggacaaaguaacaaa

SEQ ID NO: 1513817 - RNA, 19 nt, Homo sapiens
  misc_RNA (1)...(19): siRNA sense strand
ugaaaugauccgccagaua

SEQ ID NO: 1513818 - RNA, 19 nt, Homo sapiens
  misc_RNA (1)...(19): siRNA sense strand
uuacugcccuccuuggauu

SEQ ID NO: 1513819 - RNA, 19 nt, Homo sapiens
  misc_RNA (1)...(19): siRNA sense strand
cuugaaagccuucuuguug

SEQ ID NO: 1513820 - RNA, 19 nt, Homo sapiens
  misc_RNA (1)...(19): siRNA sense strand
ugaugaagaugaagaugau

SEQ ID NO: 1513821 - RNA, 19 nt, Homo sapiens
  misc_RNA (1)...(19): siRNA sense strand
gcuaaauuccgaagagcua

SEQ ID NO: 1513822 - RNA, 19 nt, Homo sapiens
  misc_RNA (1)...(19): siRNA sense strand
gggacauucuggcucauga

SEQ ID NO: 1513823 - RNA, 19 nt, Homo sapiens
  misc_RNA (1)...(19): siRNA sense strand
gacggcauccaccauguua

SEQ ID NO: 1513824 - RNA, 19 nt, Homo sapiens
  misc_RNA (1)...(19): siRNA sense strand
aaacggguacccaguguaa

SEQ ID NO: 1513825 - RNA, 19 nt, Homo sapiens
  misc_RNA (1)...(19): siRNA sense strand
gaagaggaccaugacauca

SEQ ID NO: 1513826 - RNA, 19 nt, Homo sapiens
  misc_RNA (1)...(19): siRNA sense strand
ccagauagaauucaucauc

SEQ ID NO: 1513827 - RNA, 19 nt, Homo sapiens
  misc_RNA (1)...(19): siRNA sense strand
gggaauggaagacauccua

SEQ ID NO: 1513828 - RNA, 19 nt, Homo sapiens
  misc_RNA (1)...(19): siRNA sense strand
ccaucuaucuuuugaagua

SEQ ID NO: 1513829 - RNA, 19 nt, Homo sapiens
  misc_RNA (1)...(19): siRNA sense strand
ugaaucugaugaugaugaa

SEQ ID NO: 1513830 - RNA, 19 nt, Homo sapiens
  misc_RNA (1)...(19): siRNA sense strand
ggacaaagaggagcuggau

SEQ ID NO: 1513831 - RNA, 19 nt, Homo sapiens
  misc_RNA (1)...(19): siRNA sense strand
caagagcaaugggaaugga

SEQ ID NO: 1513832 - RNA, 19 nt, Homo sapiens
  misc_RNA (1)...(19): siRNA sense strand
cugcagaaguucagucuca

SEQ ID NO: 1513833 - RNA, 19 nt, Homo sapiens
  misc_RNA (1)...(19): siRNA sense strand
ucagagacuccaaaucauu

SEQ ID NO: 1513834 - RNA, 19 nt, Homo sapiens
  misc_RNA (1)...(19): siRNA sense strand
caaaggugcugcagaugcu

SEQ ID NO: 1513835 - RNA, 19 nt, Homo sapiens
  misc_RNA (1)...(19): siRNA sense strand
ggcagaaggucgccucuac

SEQ ID NO: 1513836 - RNA, 19 nt, Homo sapiens
  misc_RNA (1)...(19): siRNA sense strand
gagccagaccacagaguuu

SEQ ID NO: 1513837 - RNA, 19 nt, Homo sapiens
  misc_RNA (1)...(19): siRNA sense strand
aagaggagcuggaugaaaa

SEQ ID NO: 1513838 - RNA, 19 nt, Homo sapiens
  misc_RNA (1)...(19): siRNA sense strand
gggaggagcacauuucaag

SEQ ID NO: 1513839 - RNA, 19 nt, Homo sapiens
  misc_RNA (1)...(19): siRNA sense strand
gaaacggguacccagugua

SEQ ID NO: 1513840 - RNA, 19 nt, Homo sapiens
  misc_RNA (1)...(19): siRNA sense strand
gcucaugaaucugaauuac

SEQ ID NO: 1513841 - RNA, 19 nt, Homo sapiens
  misc_RNA (1)...(19): siRNA sense strand
cagaugguguucuugaauc

SEQ ID NO: 1513842 - RNA, 19 nt, Homo sapiens
  misc_RNA (1)...(19): siRNA sense strand
ggagugugcuucaguugcu

SEQ ID NO: 1513843 - RNA, 19 nt, Homo sapiens
  misc_RNA (1)...(19): siRNA sense strand
augagaaacugaagaagga

SEQ ID NO: 1513844 - RNA, 19 nt, Homo sapiens
  misc_RNA (1)...(19): siRNA sense strand
ugaaggaugucccauuacu

SEQ ID NO: 1513845 - RNA, 19 nt, Homo sapiens
  misc_RNA (1)...(19): siRNA sense strand
caauauauaaggagaaugg

SEQ ID NO: 1513846 - RNA, 19 nt, Homo sapiens
  misc_RNA (1)...(19): siRNA sense strand
gagcacauuucaaguucca

SEQ ID NO: 1513847 - RNA, 19 nt, Homo sapiens
  misc_RNA (1)...(19): siRNA sense strand
gcugguggauucucuagag

SEQ ID NO: 1513848 - RNA, 19 nt, Homo sapiens
  misc_RNA (1)...(19): siRNA sense strand
ggagcuggaugaaaagauu

SEQ ID NO: 1513849 - RNA, 19 nt, Homo sapiens
  misc_RNA (1)...(19): siRNA sense strand
gaaggaggaggacaaggau

SEQ ID NO: 1513850 - RNA, 19 nt, Homo sapiens
  misc_RNA (1)...(19): siRNA sense strand
agaugaagaugaugaagag

SEQ ID NO: 1513851 - RNA, 19 nt, Homo sapiens
  misc_RNA (1)...(19): siRNA sense strand
uuucagagacuccaaauca

SEQ ID NO: 1513852 - RNA, 19 nt, Homo sapiens
  misc_RNA (1)...(19): siRNA sense strand
cuccuuggauuaugagaaa

SEQ ID NO: 1513853 - RNA, 19 nt, Homo sapiens
  misc_RNA (1)...(19): siRNA sense strand
gaauuacuuggacuaguga

SEQ ID NO: 1513854 - RNA, 19 nt, Homo sapiens
  misc_RNA (1)...(19): siRNA sense strand
cagagacuccaaaucauug

SEQ ID NO: 1513855 - RNA, 19 nt, Homo sapiens
  misc_RNA (1)...(19): siRNA sense strand
gaaggcaaugcugaaauga

SEQ ID NO: 1513856 - RNA, 19 nt, Homo sapiens
  misc_RNA (1)...(19): siRNA sense strand
ugaaggaggaggacaagga

SEQ ID NO: 1513857 - RNA, 19 nt, Homo sapiens
  misc_RNA (1)...(19): siRNA sense strand
gccaaagcuuuuaacaaua

SEQ ID NO: 1513858 - RNA, 19 nt, Homo sapiens
  misc_RNA (1)...(19): siRNA sense strand
cgccaaagcuuuuaacaau

SEQ ID NO: 1513859 - RNA, 19 nt, Homo sapiens
  misc_RNA (1)...(19): siRNA sense strand
gaucuugucgcugcauuug

SEQ ID NO: 1513860 - RNA, 19 nt, Homo sapiens
  misc_RNA (1)...(19): siRNA sense strand
ugaugaugaugaagaugaa

SEQ ID NO: 1513861 - RNA, 19 nt, Homo sapiens
  misc_RNA (1)...(19): siRNA sense strand
aggcaaugcugaaaugauc

SEQ ID NO: 1513862 - RNA, 19 nt, Homo sapiens
  misc_RNA (1)...(19): siRNA sense strand
gagaaacugaagaaggauu

SEQ ID NO: 1513863 - RNA, 19 nt, Homo sapiens
  misc_RNA (1)...(19): siRNA sense strand
cucaaacgguacaauaaga

SEQ ID NO: 1513864 - RNA, 19 nt, Homo sapiens
  misc_RNA (1)...(19): siRNA sense strand
uggacaaaguaacaaagaa

SEQ ID NO: 1513865 - RNA, 19 nt, Homo sapiens
  misc_RNA (1)...(19): siRNA sense strand
ggacuccuuugcccagaag

SEQ ID NO: 1513866 - RNA, 19 nt, Homo sapiens
  misc_RNA (1)...(19): siRNA sense strand
uagaauucaucaucaagca

SEQ ID NO: 1513867 - RNA, 19 nt, Homo sapiens
  misc_RNA (1)...(19): siRNA sense strand
aagccuacaucagcaauga

SEQ ID NO: 1513868 - RNA, 19 nt, Homo sapiens
  misc_RNA (1)...(19): siRNA sense strand
ugaaagccuucuuguugca

SEQ ID NO: 1513869 - RNA, 19 nt, Homo sapiens
  misc_RNA (1)...(19): siRNA sense strand
ggacggcauccaccauguu

SEQ ID NO: 1513870 - RNA, 19 nt, Homo sapiens
  misc_RNA (1)...(19): siRNA sense strand
cgacuaccacaaucucauu

SEQ ID NO: 1513871 - RNA, 19 nt, Homo sapiens
  misc_RNA (1)...(19): siRNA sense strand
agaggagugugcuucaguu

SEQ ID NO: 1513872 - RNA, 19 nt, Homo sapiens
  misc_RNA (1)...(19): siRNA sense strand
ucaucaagcagcuaaauuc

SEQ ID NO: 1513873 - RNA, 19 nt, Homo sapiens
  misc_RNA (1)...(19): siRNA sense strand
gaucuucuuggccaugaaa

SEQ ID NO: 1513874 - RNA, 19 nt, Homo sapiens
  misc_RNA (1)...(19): siRNA sense strand
guucuugaaucugaugaug

SEQ ID NO: 1513875 - RNA, 19 nt, Homo sapiens
  misc_RNA (1)...(19): siRNA sense strand
agaaacggguacccagugu

SEQ ID NO: 1513876 - RNA, 19 nt, Homo sapiens
  misc_RNA (1)...(19): siRNA sense strand
acagucagcggcaagauga

SEQ ID NO: 1513877 - RNA, 19 nt, Homo sapiens
  misc_RNA (1)...(19): siRNA sense strand
cuacgcugcuucaucaaag

SEQ ID NO: 1513878 - RNA, 19 nt, Homo sapiens
  misc_RNA (1)...(19): siRNA sense strand
ugaggaagcaagagcaaug

SEQ ID NO: 1513879 - RNA, 19 nt, Homo sapiens
  misc_RNA (1)...(19): siRNA sense strand
gcagacagcgaugauucaa

SEQ ID NO: 1513880 - RNA, 19 nt, Homo sapiens
  misc_RNA (1)...(19): siRNA sense strand
ccaggcucaucaaugcuuu

SEQ ID NO: 1513881 - RNA, 19 nt, Homo sapiens
  misc_RNA (1)...(19): siRNA sense strand
gagggagaccguucugcaa

SEQ ID NO: 1513882 - RNA, 19 nt, Homo sapiens
  misc_RNA (1)...(19): siRNA sense strand
gaaggaugucccauuacug

SEQ ID NO: 1513883 - RNA, 19 nt, Homo sapiens
  misc_RNA (1)...(19): siRNA sense strand
guacauggccaggcucauc

SEQ ID NO: 1513884 - RNA, 19 nt, Homo sapiens
  misc_RNA (1)...(19): siRNA sense strand
ugaagaggaccaugacauc

SEQ ID NO: 1513885 - RNA, 19 nt, Homo sapiens
  misc_RNA (1)...(19): siRNA sense strand
ucuugaaucugaugaugau

SEQ ID NO: 1513886 - RNA, 19 nt, Homo sapiens
  misc_RNA (1)...(19): siRNA sense strand
gauagaauucaucaucaag

SEQ ID NO: 1513887 - RNA, 19 nt, Homo sapiens
  misc_RNA (1)...(19): siRNA sense strand
aaagaaggcaaugcugaaa

SEQ ID NO: 1513888 - RNA, 19 nt, Homo sapiens
  misc_RNA (1)...(19): siRNA sense strand
caaugggaauggaagacau

SEQ ID NO: 1513889 - RNA, 19 nt, Homo sapiens
  misc_RNA (1)...(19): siRNA sense strand
gcugguugauguucugaag

SEQ ID NO: 1513890 - RNA, 19 nt, Homo sapiens
  misc_RNA (1)...(19): siRNA sense strand
gcucaggccuguccagcua

SEQ ID NO: 1513891 - RNA, 19 nt, Homo sapiens
  misc_RNA (1)...(19): siRNA sense strand
caagaaagaagaugaagau

SEQ ID NO: 1513892 - RNA, 19 nt, Homo sapiens
  misc_RNA (1)...(19): siRNA sense strand
agaaugaccucucggacuu

SEQ ID NO: 1513893 - RNA, 19 nt, Homo sapiens
  misc_RNA (1)...(19): siRNA sense strand
gagaagcccuuugcacucu

SEQ ID NO: 1513894 - RNA, 19 nt, Homo sapiens
  misc_RNA (1)...(19): siRNA sense strand
caaacucucgaaauucuuu

SEQ ID NO: 1513895 - RNA, 19 nt, Homo sapiens
  misc_RNA (1)...(19): siRNA sense strand
cgcgcaaacucucgaaauu

SEQ ID NO: 1513896 - RNA, 19 nt, Homo sapiens
  misc_RNA (1)...(19): siRNA sense strand
ccaagaauagccgggaaua

SEQ ID NO: 1513897 - RNA, 19 nt, Homo sapiens
  misc_RNA (1)...(19): siRNA sense strand
aagaauagccgggaauaug

SEQ ID NO: 1513898 - RNA, 19 nt, Homo sapiens
  misc_RNA (1)...(19): siRNA sense strand
ggaggaggaggaagaggaa

SEQ ID NO: 1513899 - RNA, 19 nt, Homo sapiens
  misc_RNA (1)...(19): siRNA sense strand
aaggcuggcuccucaagaa

SEQ ID NO: 1513900 - RNA, 19 nt, Homo sapiens
  misc_RNA (1)...(19): siRNA sense strand
ucacaguggugcccaagag

SEQ ID NO: 1513901 - RNA, 19 nt, Homo sapiens
  misc_RNA (1)...(19): siRNA sense strand
gcuggcuccucaagaaaga

SEQ ID NO: 1513902 - RNA, 19 nt, Homo sapiens
  misc_RNA (1)...(19): siRNA sense strand
cgcaaacucucgaaauucu

SEQ ID NO: 1513903 - RNA, 19 nt, Homo sapiens
  misc_RNA (1)...(19): siRNA sense strand
agccagcccuguauuucua

SEQ ID NO: 1513904 - RNA, 19 nt, Homo sapiens
  misc_RNA (1)...(19): siRNA sense strand
gcgagccagcccuguauuu

SEQ ID NO: 1513905 - RNA, 19 nt, Homo sapiens
  misc_RNA (1)...(19): siRNA sense strand
ggaagaggaagaggaggaa

SEQ ID NO: 1513906 - RNA, 19 nt, Homo sapiens
  misc_RNA (1)...(19): siRNA sense strand
gcgcaaacucucgaaauuc

SEQ ID NO: 1513907 - RNA, 19 nt, Homo sapiens
  misc_RNA (1)...(19): siRNA sense strand
gaauagccgggaauaugug

SEQ ID NO: 1513908 - RNA, 19 nt, Homo sapiens
  misc_RNA (1)...(19): siRNA sense strand
gcagaccacauuugaguac

SEQ ID NO: 1513909 - RNA, 19 nt, Homo sapiens
  misc_RNA (1)...(19): siRNA sense strand
agaauagccgggaauaugu

SEQ ID NO: 1513910 - RNA, 19 nt, Homo sapiens
  misc_RNA (1)...(19): siRNA sense strand
caagaauagccgggaauau

SEQ ID NO: 1513911 - RNA, 19 nt, Homo sapiens
  misc_RNA (1)...(19): siRNA sense strand
ucaagaaagaagaugaaga

SEQ ID NO: 1513912 - RNA, 19 nt, Homo sapiens
  misc_RNA (1)...(19): siRNA sense strand
gcagcaacaccuucacagu

SEQ ID NO: 1513913 - RNA, 19 nt, Homo sapiens
  misc_RNA (1)...(19): siRNA sense strand
gcaaacucucgaaauucuu

SEQ ID NO: 1513914 - RNA, 19 nt, Homo sapiens
  misc_RNA (1)...(19): siRNA sense strand
gagccagcccuguauuucu

SEQ ID NO: 1513915 - RNA, 19 nt, Homo sapiens
  misc_RNA (1)...(19): siRNA sense strand
cauucuguccucucacuuu

SEQ ID NO: 1513916 - RNA, 19 nt, Homo sapiens
  misc_RNA (1)...(19): siRNA sense strand
uggaggccauggugagaug

SEQ ID NO: 1513917 - RNA, 19 nt, Homo sapiens
  misc_RNA (1)...(19): siRNA sense strand
ccucaagaaagaagaugaa

SEQ ID NO: 1513918 - RNA, 19 nt, Homo sapiens
  misc_RNA (1)...(19): siRNA sense strand
ugcaugagaucgaggugau

SEQ ID NO: 1513919 - RNA, 19 nt, Homo sapiens
  misc_RNA (1)...(19): siRNA sense strand
cagcgagccagcccuguau

SEQ ID NO: 1513920 - RNA, 19 nt, Homo sapiens
  misc_RNA (1)...(19): siRNA sense strand
ggaggaggaggaggaggaa

SEQ ID NO: 1513921 - RNA, 19 nt, Homo sapiens
  misc_RNA (1)...(19): siRNA sense strand
gaucuccuucaacgacaaa

SEQ ID NO: 1513922 - RNA, 19 nt, Homo sapiens
  misc_RNA (1)...(19): siRNA sense strand
caugagaucgaggugauug

SEQ ID NO: 1513923 - RNA, 19 nt, Homo sapiens
  misc_RNA (1)...(19): siRNA sense strand
ucuguggccuucagcaagu

SEQ ID NO: 1513924 - RNA, 19 nt, Homo sapiens
  misc_RNA (1)...(19): siRNA sense strand
gcaggaccagcacuucagu

SEQ ID NO: 1513925 - RNA, 19 nt, Homo sapiens
  misc_RNA (1)...(19): siRNA sense strand
gggaggagaagguggugua

SEQ ID NO: 1513926 - RNA, 19 nt, Homo sapiens
  misc_RNA (1)...(19): siRNA sense strand
aggagaaggugguguacuc

SEQ ID NO: 1513927 - RNA, 19 nt, Homo sapiens
  misc_RNA (1)...(19): siRNA sense strand
ggacagaccugaauuggua

SEQ ID NO: 1513928 - RNA, 19 nt, Homo sapiens
  misc_RNA (1)...(19): siRNA sense strand
gaauuuagcuucccagaug

SEQ ID NO: 1513929 - RNA, 19 nt, Homo sapiens
  misc_RNA (1)...(19): siRNA sense strand
uaaaggaucugguaaagga

SEQ ID NO: 1513930 - RNA, 19 nt, Homo sapiens
  misc_RNA (1)...(19): siRNA sense strand
uaagagauuugccacaaua

SEQ ID NO: 1513931 - RNA, 19 nt, Homo sapiens
  misc_RNA (1)...(19): siRNA sense strand
gaaauugcuuccaagauug

SEQ ID NO: 1513932 - RNA, 19 nt, Homo sapiens
  misc_RNA (1)...(19): siRNA sense strand
gaaaugcacugccuucauc

SEQ ID NO: 1513933 - RNA, 19 nt, Homo sapiens
  misc_RNA (1)...(19): siRNA sense strand
gaaaccagcuaucugaaug

SEQ ID NO: 1513934 - RNA, 19 nt, Homo sapiens
  misc_RNA (1)...(19): siRNA sense strand
uaaaggaauugucagauga

SEQ ID NO: 1513935 - RNA, 19 nt, Homo sapiens
  misc_RNA (1)...(19): siRNA sense strand
agaaauugcuuccaagauu

SEQ ID NO: 1513936 - RNA, 19 nt, Homo sapiens
  misc_RNA (1)...(19): siRNA sense strand
ccacuagucugcuugcuuu

SEQ ID NO: 1513937 - RNA, 19 nt, Homo sapiens
  misc_RNA (1)...(19): siRNA sense strand
cuaauaguguugcguauaa

SEQ ID NO: 1513938 - RNA, 19 nt, Homo sapiens
  misc_RNA (1)...(19): siRNA sense strand
guaaaggaauugucagaug

SEQ ID NO: 1513939 - RNA, 19 nt, Homo sapiens
  misc_RNA (1)...(19): siRNA sense strand
ggagguguacuuacuaaua

SEQ ID NO: 1513940 - RNA, 19 nt, Homo sapiens
  misc_RNA (1)...(19): siRNA sense strand
ggaaaacaguuacagauuu

SEQ ID NO: 1513941 - RNA, 19 nt, Homo sapiens
  misc_RNA (1)...(19): siRNA sense strand
acaaguaucugcucuacaa

SEQ ID NO: 1513942 - RNA, 19 nt, Homo sapiens
  misc_RNA (1)...(19): siRNA sense strand
gaaagggagccaaugaauu

SEQ ID NO: 1513943 - RNA, 19 nt, Homo sapiens
  misc_RNA (1)...(19): siRNA sense strand
aaagggagccaaugaauuu

SEQ ID NO: 1513944 - RNA, 19 nt, Homo sapiens
  misc_RNA (1)...(19): siRNA sense strand
ccagcuauauaccuucuua

SEQ ID NO: 1513945 - RNA, 19 nt, Homo sapiens
  misc_RNA (1)...(19): siRNA sense strand
ggaaaagugucaagaauau

SEQ ID NO: 1513946 - RNA, 19 nt, Homo sapiens
  misc_RNA (1)...(19): siRNA sense strand
ugaacuaacuguugacaug

SEQ ID NO: 1513947 - RNA, 19 nt, Homo sapiens
  misc_RNA (1)...(19): siRNA sense strand
gaccugaauugguaguuaa

SEQ ID NO: 1513948 - RNA, 19 nt, Homo sapiens
  misc_RNA (1)...(19): siRNA sense strand
cuaauggccuuccuauuug

SEQ ID NO: 1513949 - RNA, 19 nt, Homo sapiens
  misc_RNA (1)...(19): siRNA sense strand
ucuaauggccuuccuauuu

SEQ ID NO: 1513950 - RNA, 19 nt, Homo sapiens
  misc_RNA (1)...(19): siRNA sense strand
auagugugcuucugauuua

SEQ ID NO: 1513951 - RNA, 19 nt, Homo sapiens
  misc_RNA (1)...(19): siRNA sense strand
ggaagccacuguucaucuu

SEQ ID NO: 1513952 - RNA, 19 nt, Homo sapiens
  misc_RNA (1)...(19): siRNA sense strand
gaauaccauugaugacuau

SEQ ID NO: 1513953 - RNA, 19 nt, Homo sapiens
  misc_RNA (1)...(19): siRNA sense strand
gauaucaacauuucacuga

SEQ ID NO: 1513954 - RNA, 19 nt, Homo sapiens
  misc_RNA (1)...(19): siRNA sense strand
gaaaucagucccacaagga

SEQ ID NO: 1513955 - RNA, 19 nt, Homo sapiens
  misc_RNA (1)...(19): siRNA sense strand
gagguguacuuacuaauag

SEQ ID NO: 1513956 - RNA, 19 nt, Homo sapiens
  misc_RNA (1)...(19): siRNA sense strand
agacugaauuugcucuuaa

SEQ ID NO: 1513957 - RNA, 19 nt, Homo sapiens
  misc_RNA (1)...(19): siRNA sense strand
ucagacagagaucauauua

SEQ ID NO: 1513958 - RNA, 19 nt, Homo sapiens
  misc_RNA (1)...(19): siRNA sense strand
gggcagcuauacuaucauu

SEQ ID NO: 1513959 - RNA, 19 nt, Homo sapiens
  misc_RNA (1)...(19): siRNA sense strand
gauaaucgguauggcuuga

SEQ ID NO: 1513960 - RNA, 19 nt, Homo sapiens
  misc_RNA (1)...(19): siRNA sense strand
cgaaacguguucuuugaga

SEQ ID NO: 1513961 - RNA, 19 nt, Homo sapiens
  misc_RNA (1)...(19): siRNA sense strand
ggauaaaucuaagcaacug

SEQ ID NO: 1513962 - RNA, 19 nt, Homo sapiens
  misc_RNA (1)...(19): siRNA sense strand
ggaaagggagccaaugaau

SEQ ID NO: 1513963 - RNA, 19 nt, Homo sapiens
  misc_RNA (1)...(19): siRNA sense strand
agaaguagcagcuuucauu

SEQ ID NO: 1513964 - RNA, 19 nt, Homo sapiens
  misc_RNA (1)...(19): siRNA sense strand
cuaagcaacuguucaaugg

SEQ ID NO: 1513965 - RNA, 19 nt, Homo sapiens
  misc_RNA (1)...(19): siRNA sense strand
agaauaccauugaugacua

SEQ ID NO: 1513966 - RNA, 19 nt, Homo sapiens
  misc_RNA (1)...(19): siRNA sense strand
caaaauggauguuguaaag

SEQ ID NO: 1513967 - RNA, 19 nt, Homo sapiens
  misc_RNA (1)...(19): siRNA sense strand
guuaagagauuugccacaa

SEQ ID NO: 1513968 - RNA, 19 nt, Homo sapiens
  misc_RNA (1)...(19): siRNA sense strand
gauuauacucaccgauuua

SEQ ID NO: 1513969 - RNA, 19 nt, Homo sapiens
  misc_RNA (1)...(19): siRNA sense strand
gcagcuauacuaucauuau

SEQ ID NO: 1513970 - RNA, 19 nt, Homo sapiens
  misc_RNA (1)...(19): siRNA sense strand
gaaguagcagcuuucauug

SEQ ID NO: 1513971 - RNA, 19 nt, Homo sapiens
  misc_RNA (1)...(19): siRNA sense strand
aaauggauguuguaaagga

SEQ ID NO: 1513972 - RNA, 19 nt, Homo sapiens
  misc_RNA (1)...(19): siRNA sense strand
guuacgauauuaugcaaga

SEQ ID NO: 1513973 - RNA, 19 nt, Homo sapiens
  misc_RNA (1)...(19): siRNA sense strand
uugaagcgcuggcaaauag

SEQ ID NO: 1513974 - RNA, 19 nt, Homo sapiens
  misc_RNA (1)...(19): siRNA sense strand
gauauugcccagcuacuga

SEQ ID NO: 1513975 - RNA, 19 nt, Homo sapiens
  misc_RNA (1)...(19): siRNA sense strand
gcacaucggaaaccagcua

SEQ ID NO: 1513976 - RNA, 19 nt, Homo sapiens
  misc_RNA (1)...(19): siRNA sense strand
ggaagaacuuuugauguuu

SEQ ID NO: 1513977 - RNA, 19 nt, Homo sapiens
  misc_RNA (1)...(19): siRNA sense strand
aaacggagaagcaguauca

SEQ ID NO: 1513978 - RNA, 19 nt, Homo sapiens
  misc_RNA (1)...(19): siRNA sense strand
ggagagaggaaaacaguua

SEQ ID NO: 1513979 - RNA, 19 nt, Homo sapiens
  misc_RNA (1)...(19): siRNA sense strand
gacugaauuugcucuuaaa

SEQ ID NO: 1513980 - RNA, 19 nt, Homo sapiens
  misc_RNA (1)...(19): siRNA sense strand
agaccugaauugguaguua

SEQ ID NO: 1513981 - RNA, 19 nt, Homo sapiens
  misc_RNA (1)...(19): siRNA sense strand
ggaaaccagcuaucugaau

SEQ ID NO: 1513982 - RNA, 19 nt, Homo sapiens
  misc_RNA (1)...(19): siRNA sense strand
ggagaaauugcuuccaaga

SEQ ID NO: 1513983 - RNA, 19 nt, Homo sapiens
  misc_RNA (1)...(19): siRNA sense strand
uaggagaaauugcuuccaa

SEQ ID NO: 1513984 - RNA, 19 nt, Homo sapiens
  misc_RNA (1)...(19): siRNA sense strand
uagcuucccagaugaauaa

SEQ ID NO: 1513985 - RNA, 19 nt, Homo sapiens
  misc_RNA (1)...(19): siRNA sense strand
ucaggcauuucuccaguuu

SEQ ID NO: 1513986 - RNA, 19 nt, Homo sapiens
  misc_RNA (1)...(19): siRNA sense strand
ucaauggguuaagagauuu

SEQ ID NO: 1513987 - RNA, 19 nt, Homo sapiens
  misc_RNA (1)...(19): siRNA sense strand
gaagcacauuuuggaauua

SEQ ID NO: 1513988 - RNA, 19 nt, Homo sapiens
  misc_RNA (1)...(19): siRNA sense strand
ggagcugccugccaauagu

SEQ ID NO: 1513989 - RNA, 19 nt, Homo sapiens
  misc_RNA (1)...(19): siRNA sense strand
gaaguuacgauauuaugca

SEQ ID NO: 1513990 - RNA, 19 nt, Homo sapiens
  misc_RNA (1)...(19): siRNA sense strand
gggaaagauaucaacauuu

SEQ ID NO: 1513991 - RNA, 19 nt, Homo sapiens
  misc_RNA (1)...(19): siRNA sense strand
agauuauacucaccgauuu

SEQ ID NO: 1513992 - RNA, 19 nt, Homo sapiens
  misc_RNA (1)...(19): siRNA sense strand
uucaauagaucaggcauuu

SEQ ID NO: 1513993 - RNA, 19 nt, Homo sapiens
  misc_RNA (1)...(19): siRNA sense strand
gcaacuguucaauggguua

SEQ ID NO: 1513994 - RNA, 19 nt, Homo sapiens
  misc_RNA (1)...(19): siRNA sense strand
ggggaaagauaucaacauu

SEQ ID NO: 1513995 - RNA, 19 nt, Homo sapiens
  misc_RNA (1)...(19): siRNA sense strand
ugaggcggauccuguaaug

SEQ ID NO: 1513996 - RNA, 19 nt, Homo sapiens
  misc_RNA (1)...(19): siRNA sense strand
ggauucgucuaauaguguu

SEQ ID NO: 1513997 - RNA, 19 nt, Homo sapiens
  misc_RNA (1)...(19): siRNA sense strand
guaaccgggauauuauuaa

SEQ ID NO: 1513998 - RNA, 19 nt, Homo sapiens
  misc_RNA (1)...(19): siRNA sense strand
gcaggaaucagcugacaag

SEQ ID NO: 1513999 - RNA, 19 nt, Homo sapiens
  misc_RNA (1)...(19): siRNA sense strand
uucaauggguuaagagauu

SEQ ID NO: 1514000 - RNA, 19 nt, Homo sapiens
  misc_RNA (1)...(19): siRNA sense strand
agaaucauauccacaacug

SEQ ID NO: 1514001 - RNA, 19 nt, Homo sapiens
  misc_RNA (1)...(19): siRNA sense strand
ggaaaugcacugccuucau

SEQ ID NO: 1514002 - RNA, 19 nt, Homo sapiens
  misc_RNA (1)...(19): siRNA sense strand
ccacaggucguucugauag

SEQ ID NO: 1514003 - RNA, 19 nt, Homo sapiens
  misc_RNA (1)...(19): siRNA sense strand
ccaauagugugcuucugau

SEQ ID NO: 1514004 - RNA, 19 nt, Homo sapiens
  misc_RNA (1)...(19): siRNA sense strand
gccaauagugugcuucuga

SEQ ID NO: 1514005 - RNA, 19 nt, Homo sapiens
  misc_RNA (1)...(19): siRNA sense strand
gaacuaacuguugacaugu

SEQ ID NO: 1514006 - RNA, 19 nt, Homo sapiens
  misc_RNA (1)...(19): siRNA sense strand
ggcggauccuguaauggua

SEQ ID NO: 1514007 - RNA, 19 nt, Homo sapiens
  misc_RNA (1)...(19): siRNA sense strand
gaagccacuguucaucuuu

SEQ ID NO: 1514008 - RNA, 19 nt, Homo sapiens
  misc_RNA (1)...(19): siRNA sense strand
gagauuugccacaauaugg

SEQ ID NO: 1514009 - RNA, 19 nt, Homo sapiens
  misc_RNA (1)...(19): siRNA sense strand
caauagaucaggcauuucu

SEQ ID NO: 1514010 - RNA, 19 nt, Homo sapiens
  misc_RNA (1)...(19): siRNA sense strand
uaucugcucuacaaaccaa

SEQ ID NO: 1514011 - RNA, 19 nt, Homo sapiens
  misc_RNA (1)...(19): siRNA sense strand
ccacaaguaucugcucuac

SEQ ID NO: 1514012 - RNA, 19 nt, Homo sapiens
  misc_RNA (1)...(19): siRNA sense strand
gaaucgccuugcugaaaca

SEQ ID NO: 1514013 - RNA, 19 nt, Homo sapiens
  misc_RNA (1)...(19): siRNA sense strand
aagaucaaguggaauggaa

SEQ ID NO: 1514014 - RNA, 19 nt, Homo sapiens
  misc_RNA (1)...(19): siRNA sense strand
gagaaauugcuuccaagau

SEQ ID NO: 1514015 - RNA, 19 nt, Homo sapiens
  misc_RNA (1)...(19): siRNA sense strand
gcagcagcaucgacaaguc

SEQ ID NO: 1514016 - RNA, 19 nt, Homo sapiens
  misc_RNA (1)...(19): siRNA sense strand
ggagaaaccgccucgaaaa

SEQ ID NO: 1514017 - RNA, 19 nt, Homo sapiens
  misc_RNA (1)...(19): siRNA sense strand
guucgaaacguguucuuug

SEQ ID NO: 1514018 - RNA, 19 nt, Homo sapiens
  misc_RNA (1)...(19): siRNA sense strand
acacgaaauuauccagaau

SEQ ID NO: 1514019 - RNA, 19 nt, Homo sapiens
  misc_RNA (1)...(19): siRNA sense strand
gguagccucuucacucucu

SEQ ID NO: 1514020 - RNA, 19 nt, Homo sapiens
  misc_RNA (1)...(19): siRNA sense strand
ugauagcagucauucacaa

SEQ ID NO: 1514021 - RNA, 19 nt, Homo sapiens
  misc_RNA (1)...(19): siRNA sense strand
gauguuacaagcucuggaa

SEQ ID NO: 1514022 - RNA, 19 nt, Homo sapiens
  misc_RNA (1)...(19): siRNA sense strand
uggaagaacuuuugauguu

SEQ ID NO: 1514023 - RNA, 19 nt, Homo sapiens
  misc_RNA (1)...(19): siRNA sense strand
guuacaagcucuggaaagg

SEQ ID NO: 1514024 - RNA, 19 nt, Homo sapiens
  misc_RNA (1)...(19): siRNA sense strand
cugaauugguaguuaagaa

SEQ ID NO: 1514025 - RNA, 19 nt, Homo sapiens
  misc_RNA (1)...(19): siRNA sense strand
caaauaggagaaauugcuu

SEQ ID NO: 1514026 - RNA, 19 nt, Homo sapiens
  misc_RNA (1)...(19): siRNA sense strand
gggaaaagugucaagaaua

SEQ ID NO: 1514027 - RNA, 19 nt, Homo sapiens
  misc_RNA (1)...(19): siRNA sense strand
guacagaccucgauacaua

SEQ ID NO: 1514028 - RNA, 19 nt, Homo sapiens
  misc_RNA (1)...(19): siRNA sense strand
ggaaguagguggacucuca

SEQ ID NO: 1514029 - RNA, 19 nt, Homo sapiens
  misc_RNA (1)...(19): siRNA sense strand
ggaagaagaagacacauau

SEQ ID NO: 1514030 - RNA, 19 nt, Homo sapiens
  misc_RNA (1)...(19): siRNA sense strand
ggacaccgaucuaaugaca

SEQ ID NO: 1514031 - RNA, 19 nt, Homo sapiens
  misc_RNA (1)...(19): siRNA sense strand
gcaguuggucucagcauua

SEQ ID NO: 1514032 - RNA, 19 nt, Homo sapiens
  misc_RNA (1)...(19): siRNA sense strand
gcagaucuuugacuuccuu

SEQ ID NO: 1514033 - RNA, 19 nt, Homo sapiens
  misc_RNA (1)...(19): siRNA sense strand
gaagaagaagacacauauu

SEQ ID NO: 1514034 - RNA, 19 nt, Homo sapiens
  misc_RNA (1)...(19): siRNA sense strand
caugugaucugcaaguaug

SEQ ID NO: 1514035 - RNA, 19 nt, Homo sapiens
  misc_RNA (1)...(19): siRNA sense strand
gacauucaauaucucugua

SEQ ID NO: 1514036 - RNA, 19 nt, Homo sapiens
  misc_RNA (1)...(19): siRNA sense strand
guguaugccuguuauguga

SEQ ID NO: 1514037 - RNA, 19 nt, Homo sapiens
  misc_RNA (1)...(19): siRNA sense strand
gaagaagacacauauucau

SEQ ID NO: 1514038 - RNA, 19 nt, Homo sapiens
  misc_RNA (1)...(19): siRNA sense strand
gaacaugggccugguugug

SEQ ID NO: 1514039 - RNA, 19 nt, Homo sapiens
  misc_RNA (1)...(19): siRNA sense strand
gcaaguaugcaaacaucuu

SEQ ID NO: 1514040 - RNA, 19 nt, Homo sapiens
  misc_RNA (1)...(19): siRNA sense strand
ccuguuaugugaucaguau

SEQ ID NO: 1514041 - RNA, 19 nt, Homo sapiens
  misc_RNA (1)...(19): siRNA sense strand
ggacgcugcucgcucaucu

SEQ ID NO: 1514042 - RNA, 19 nt, Homo sapiens
  misc_RNA (1)...(19): siRNA sense strand
caaguaugcaaacaucuuu

SEQ ID NO: 1514043 - RNA, 19 nt, Homo sapiens
  misc_RNA (1)...(19): siRNA sense strand
caaaggacaccgaucuaau

SEQ ID NO: 1514044 - RNA, 19 nt, Homo sapiens
  misc_RNA (1)...(19): siRNA sense strand
aaaggacaccgaucuaaug

SEQ ID NO: 1514045 - RNA, 19 nt, Homo sapiens
  misc_RNA (1)...(19): siRNA sense strand
uagguggacucucaaagga

SEQ ID NO: 1514046 - RNA, 19 nt, Homo sapiens
  misc_RNA (1)...(19): siRNA sense strand
ucaaaggacaccgaucuaa

SEQ ID NO: 1514047 - RNA, 19 nt, Homo sapiens
  misc_RNA (1)...(19): siRNA sense strand
uagagaggcagaucuuuga

SEQ ID NO: 1514048 - RNA, 19 nt, Homo sapiens
  misc_RNA (1)...(19): siRNA sense strand
agaggcagaucuuugacuu

SEQ ID NO: 1514049 - RNA, 19 nt, Homo sapiens
  misc_RNA (1)...(19): siRNA sense strand
agaagaagacacauauuca

SEQ ID NO: 1514050 - RNA, 19 nt, Homo sapiens
  misc_RNA (1)...(19): siRNA sense strand
uccaaauacuacucucuuu

SEQ ID NO: 1514051 - RNA, 19 nt, Homo sapiens
  misc_RNA (1)...(19): siRNA sense strand
auccagaugcugcaaauua

SEQ ID NO: 1514052 - RNA, 19 nt, Homo sapiens
  misc_RNA (1)...(19): siRNA sense strand
cgccuauucuuggaaauuu

SEQ ID NO: 1514053 - RNA, 19 nt, Homo sapiens
  misc_RNA (1)...(19): siRNA sense strand
aagaagaagacacauauuc

SEQ ID NO: 1514054 - RNA, 19 nt, Homo sapiens
  misc_RNA (1)...(19): siRNA sense strand
uccagaugcugcaaauuau

SEQ ID NO: 1514055 - RNA, 19 nt, Homo sapiens
  misc_RNA (1)...(19): siRNA sense strand
cagaugcugcaaauuauug

SEQ ID NO: 1514056 - RNA, 19 nt, Homo sapiens
  misc_RNA (1)...(19): siRNA sense strand
ugucauauuggguuuguuu

SEQ ID NO: 1514057 - RNA, 19 nt, Homo sapiens
  misc_RNA (1)...(19): siRNA sense strand
uggaagaagaagacacaua

SEQ ID NO: 1514058 - RNA, 19 nt, Homo sapiens
  misc_RNA (1)...(19): siRNA sense strand
guuaugugaucaguauuuc

SEQ ID NO: 1514059 - RNA, 19 nt, Homo sapiens
  misc_RNA (1)...(19): siRNA sense strand
agaccucgauacauaaugg

SEQ ID NO: 1514060 - RNA, 19 nt, Homo sapiens
  misc_RNA (1)...(19): siRNA sense strand
gaaguagguggacucucaa

SEQ ID NO: 1514061 - RNA, 19 nt, Homo sapiens
  misc_RNA (1)...(19): siRNA sense strand
ccagaugcugcaaauuauu

SEQ ID NO: 1514062 - RNA, 19 nt, Homo sapiens
  misc_RNA (1)...(19): siRNA sense strand
uuagagaggcagaucuuug

SEQ ID NO: 1514063 - RNA, 19 nt, Homo sapiens
  misc_RNA (1)...(19): siRNA sense strand
aagaagacacauauucaug

SEQ ID NO: 1514064 - RNA, 19 nt, Homo sapiens
  misc_RNA (1)...(19): siRNA sense strand
acauaaugguguauacagu

SEQ ID NO: 1514065 - RNA, 19 nt, Homo sapiens
  misc_RNA (1)...(19): siRNA sense strand
guagguggacucucaaagg

SEQ ID NO: 1514066 - RNA, 19 nt, Homo sapiens
  misc_RNA (1)...(19): siRNA sense strand
auaaugguguauacagugu

SEQ ID NO: 1514067 - RNA, 19 nt, Homo sapiens
  misc_RNA (1)...(19): siRNA sense strand
guaugccuguuaugugauc

SEQ ID NO: 1514068 - RNA, 19 nt, Homo sapiens
  misc_RNA (1)...(19): siRNA sense strand
ugggucaccuggaaugugu

SEQ ID NO: 1514069 - RNA, 19 nt, Homo sapiens
  misc_RNA (1)...(19): siRNA sense strand
uucaauaucucuguacauc

SEQ ID NO: 1514070 - RNA, 19 nt, Homo sapiens
  misc_RNA (1)...(19): siRNA sense strand
ucuuugacuuccuugguuu

SEQ ID NO: 1514071 - RNA, 19 nt, Homo sapiens
  misc_RNA (1)...(19): siRNA sense strand
ugauggacgauuacacgua

SEQ ID NO: 1514072 - RNA, 19 nt, Homo sapiens
  misc_RNA (1)...(19): siRNA sense strand
gcgccuauucuuggaaauu

SEQ ID NO: 1514073 - RNA, 19 nt, Homo sapiens
  misc_RNA (1)...(19): siRNA sense strand
ugucacaggcugcaucguu

SEQ ID NO: 1514074 - RNA, 19 nt, Homo sapiens
  misc_RNA (1)...(19): siRNA sense strand
gaucuuugacuuccuuggu

SEQ ID NO: 1514075 - RNA, 19 nt, Homo sapiens
  misc_RNA (1)...(19): siRNA sense strand
aaggacaccgaucuaauga

SEQ ID NO: 1514076 - RNA, 19 nt, Homo sapiens
  misc_RNA (1)...(19): siRNA sense strand
cauggaagaagaagacaca

SEQ ID NO: 1514077 - RNA, 19 nt, Homo sapiens
  misc_RNA (1)...(19): siRNA sense strand
gggccugguugugucagaa

SEQ ID NO: 1514078 - RNA, 19 nt, Homo sapiens
  misc_RNA (1)...(19): siRNA sense strand
ugacauucaauaucucugu

SEQ ID NO: 1514079 - RNA, 19 nt, Homo sapiens
  misc_RNA (1)...(19): siRNA sense strand
guccaaauacuacucucuu

SEQ ID NO: 1514080 - RNA, 19 nt, Homo sapiens
  misc_RNA (1)...(19): siRNA sense strand
cauuagagaggcagaucuu

SEQ ID NO: 1514081 - RNA, 19 nt, Homo sapiens
  misc_RNA (1)...(19): siRNA sense strand
guugucauauuggguuugu

SEQ ID NO: 1514082 - RNA, 19 nt, Homo sapiens
  misc_RNA (1)...(19): siRNA sense strand
aaauacuacucucuuuggu

SEQ ID NO: 1514083 - RNA, 19 nt, Homo sapiens
  misc_RNA (1)...(19): siRNA sense strand
cauucaauaucucuguaca

SEQ ID NO: 1514084 - RNA, 19 nt, Homo sapiens
  misc_RNA (1)...(19): siRNA sense strand
ugaucaguauuuccaugga

SEQ ID NO: 1514085 - RNA, 19 nt, Homo sapiens
  misc_RNA (1)...(19): siRNA sense strand
uuauccagaugcugcaaau

SEQ ID NO: 1514086 - RNA, 19 nt, Homo sapiens
  misc_RNA (1)...(19): siRNA sense strand
caguuggucucagcauuag

SEQ ID NO: 1514087 - RNA, 19 nt, Homo sapiens
  misc_RNA (1)...(19): siRNA sense strand
uacagaccucgauacauaa

SEQ ID NO: 1514088 - RNA, 19 nt, Homo sapiens
  misc_RNA (1)...(19): siRNA sense strand
uguguucauuaucugcuuu

SEQ ID NO: 1514089 - RNA, 19 nt, Homo sapiens
  misc_RNA (1)...(19): siRNA sense strand
auggcaugauggacgauua

SEQ ID NO: 1514090 - RNA, 19 nt, Homo sapiens
  misc_RNA (1)...(19): siRNA sense strand
ggaaaucgcucaccaacag

SEQ ID NO: 1514091 - RNA, 19 nt, Homo sapiens
  misc_RNA (1)...(19): siRNA sense strand
ccaaaccagacaaguuaua

SEQ ID NO: 1514092 - RNA, 19 nt, Homo sapiens
  misc_RNA (1)...(19): siRNA sense strand
gcuuuaaggagaagaggaa

SEQ ID NO: 1514093 - RNA, 19 nt, Homo sapiens
  misc_RNA (1)...(19): siRNA sense strand
caccaacagcagaaagaaa

SEQ ID NO: 1514094 - RNA, 19 nt, Homo sapiens
  misc_RNA (1)...(19): siRNA sense strand
ccccaaaccagacaaguua

SEQ ID NO: 1514095 - RNA, 19 nt, Homo sapiens
  misc_RNA (1)...(19): siRNA sense strand
caaaccagacaaguuauac

SEQ ID NO: 1514096 - RNA, 19 nt, Homo sapiens
  misc_RNA (1)...(19): siRNA sense strand
ggacauugcuacggaagug

SEQ ID NO: 1514097 - RNA, 19 nt, Homo sapiens
  misc_RNA (1)...(19): siRNA sense strand
ggaaacagaggccuagaga

SEQ ID NO: 1514098 - RNA, 19 nt, Homo sapiens
  misc_RNA (1)...(19): siRNA sense strand
uagagaggcugcggacuuc

SEQ ID NO: 1514099 - RNA, 19 nt, Homo sapiens
  misc_RNA (1)...(19): siRNA sense strand
uggagguccugaaugguuu

SEQ ID NO: 1514100 - RNA, 19 nt, Homo sapiens
  misc_RNA (1)...(19): siRNA sense strand
ggcuggagauggacagugu

SEQ ID NO: 1514101 - RNA, 19 nt, Homo sapiens
  misc_RNA (1)...(19): siRNA sense strand
gguccugaaugguuucuac

SEQ ID NO: 1514102 - RNA, 19 nt, Homo sapiens
  misc_RNA (1)...(19): siRNA sense strand
cagauucuccggccaguuc

SEQ ID NO: 1514103 - RNA, 19 nt, Homo sapiens
  misc_RNA (1)...(19): siRNA sense strand
cuagagaggcugcggacuu

SEQ ID NO: 1514104 - RNA, 19 nt, Homo sapiens
  misc_RNA (1)...(19): siRNA sense strand
gggcacacguggguucaca

SEQ ID NO: 1514105 - RNA, 19 nt, Homo sapiens
  misc_RNA (1)...(19): siRNA sense strand
ggaggagagacucaucuag

SEQ ID NO: 1514106 - RNA, 19 nt, Homo sapiens
  misc_RNA (1)...(19): siRNA sense strand
gggagcaacucagggaaac

SEQ ID NO: 1514107 - RNA, 19 nt, Homo sapiens
  misc_RNA (1)...(19): siRNA sense strand
ggaggggugucugaaugua

SEQ ID NO: 1514108 - RNA, 19 nt, Homo sapiens
  misc_RNA (1)...(19): siRNA sense strand
gcacacguggguucacagu

SEQ ID NO: 1514109 - RNA, 19 nt, Homo sapiens
  misc_RNA (1)...(19): siRNA sense strand
gauccuggcagcccgaaag

SEQ ID NO: 1514110 - RNA, 19 nt, Homo sapiens
  misc_RNA (1)...(19): siRNA sense strand
uuccagggcucgggacauu

SEQ ID NO: 1514111 - RNA, 19 nt, Homo sapiens
  misc_RNA (1)...(19): siRNA sense strand
guucaggaguguguguauc

SEQ ID NO: 1514112 - RNA, 19 nt, Homo sapiens
  misc_RNA (1)...(19): siRNA sense strand
cggaggagagacucaucua

SEQ ID NO: 1514113 - RNA, 19 nt, Homo sapiens
  misc_RNA (1)...(19): siRNA sense strand
gcaaauaugcucucuauag

SEQ ID NO: 1514114 - RNA, 19 nt, Homo sapiens
  misc_RNA (1)...(19): siRNA sense strand
uggaagaacugcauuauug

SEQ ID NO: 1514115 - RNA, 19 nt, Homo sapiens
  misc_RNA (1)...(19): siRNA sense strand
gcaagguggugacuaagaa

SEQ ID NO: 1514116 - RNA, 19 nt, Homo sapiens
  misc_RNA (1)...(19): siRNA sense strand
caucaacacugcaugcuuu

SEQ ID NO: 1514117 - RNA, 19 nt, Homo sapiens
  misc_RNA (1)...(19): siRNA sense strand
gaaaucaacgacagucuaa

SEQ ID NO: 1514118 - RNA, 19 nt, Homo sapiens
  misc_RNA (1)...(19): siRNA sense strand
gaagaaggccaaugaagug

SEQ ID NO: 1514119 - RNA, 19 nt, Homo sapiens
  misc_RNA (1)...(19): siRNA sense strand
guucagccauguuccuuua

SEQ ID NO: 1514120 - RNA, 19 nt, Homo sapiens
  misc_RNA (1)...(19): siRNA sense strand
ggaagaaggccaaugaagu

SEQ ID NO: 1514121 - RNA, 19 nt, Homo sapiens
  misc_RNA (1)...(19): siRNA sense strand
ggaccuacaugcuucucaa

SEQ ID NO: 1514122 - RNA, 19 nt, Homo sapiens
  misc_RNA (1)...(19): siRNA sense strand
caaccagaguuuaugcuau

SEQ ID NO: 1514123 - RNA, 19 nt, Homo sapiens
  misc_RNA (1)...(19): siRNA sense strand
guaauugacaucuccauga

SEQ ID NO: 1514124 - RNA, 19 nt, Homo sapiens
  misc_RNA (1)...(19): siRNA sense strand
cuacaugcuucucaaauuc

SEQ ID NO: 1514125 - RNA, 19 nt, Homo sapiens
  misc_RNA (1)...(19): siRNA sense strand
gcagaagccauaaggagaa

SEQ ID NO: 1514126 - RNA, 19 nt, Homo sapiens
  misc_RNA (1)...(19): siRNA sense strand
uaggcaagguggugacuaa

SEQ ID NO: 1514127 - RNA, 19 nt, Homo sapiens
  misc_RNA (1)...(19): siRNA sense strand
gccauaaggagaacucaua

SEQ ID NO: 1514128 - RNA, 19 nt, Homo sapiens
  misc_RNA (1)...(19): siRNA sense strand
ccucgcagcugacaaacuu

SEQ ID NO: 1514129 - RNA, 19 nt, Homo sapiens
  misc_RNA (1)...(19): siRNA sense strand
gaauguggacuuugcuuug

SEQ ID NO: 1514130 - RNA, 19 nt, Homo sapiens
  misc_RNA (1)...(19): siRNA sense strand
ccuacaugcuucucaaauu

SEQ ID NO: 1514131 - RNA, 19 nt, Homo sapiens
  misc_RNA (1)...(19): siRNA sense strand
caaauaugcucucuauagc

SEQ ID NO: 1514132 - RNA, 19 nt, Homo sapiens
  misc_RNA (1)...(19): siRNA sense strand
gacaggauaagaaggauaa

SEQ ID NO: 1514133 - RNA, 19 nt, Homo sapiens
  misc_RNA (1)...(19): siRNA sense strand
ucagccauguuccuuuaua

SEQ ID NO: 1514134 - RNA, 19 nt, Homo sapiens
  misc_RNA (1)...(19): siRNA sense strand
ggacuuugcuuugauucau

SEQ ID NO: 1514135 - RNA, 19 nt, Homo sapiens
  misc_RNA (1)...(19): siRNA sense strand
caacuguccugaaguggau

SEQ ID NO: 1514136 - RNA, 19 nt, Homo sapiens
  misc_RNA (1)...(19): siRNA sense strand
gauuaaugccugcaagauu

SEQ ID NO: 1514137 - RNA, 19 nt, Homo sapiens
  misc_RNA (1)...(19): siRNA sense strand
uugcaaauaugcucucuau

SEQ ID NO: 1514138 - RNA, 19 nt, Homo sapiens
  misc_RNA (1)...(19): siRNA sense strand
cagccauguuccuuuauaa

SEQ ID NO: 1514139 - RNA, 19 nt, Homo sapiens
  misc_RNA (1)...(19): siRNA sense strand
ccaauaccauaccucaaga

SEQ ID NO: 1514140 - RNA, 19 nt, Homo sapiens
  misc_RNA (1)...(19): siRNA sense strand
gcaaccagaguuuaugcua

SEQ ID NO: 1514141 - RNA, 19 nt, Homo sapiens
  misc_RNA (1)...(19): siRNA sense strand
gacuuugcuuugauucaua

SEQ ID NO: 1514142 - RNA, 19 nt, Homo sapiens
  misc_RNA (1)...(19): siRNA sense strand
ccaguugaauguggacuuu

SEQ ID NO: 1514143 - RNA, 19 nt, Homo sapiens
  misc_RNA (1)...(19): siRNA sense strand
ccaagcuuguugcaaauau

SEQ ID NO: 1514144 - RNA, 19 nt, Homo sapiens
  misc_RNA (1)...(19): siRNA sense strand
uaucuugacucauggaauc

SEQ ID NO: 1514145 - RNA, 19 nt, Homo sapiens
  misc_RNA (1)...(19): siRNA sense strand
ccaaugaaguggacugcau

SEQ ID NO: 1514146 - RNA, 19 nt, Homo sapiens
  misc_RNA (1)...(19): siRNA sense strand
uaugcuaucuugacucaug

SEQ ID NO: 1514147 - RNA, 19 nt, Homo sapiens
  misc_RNA (1)...(19): siRNA sense strand
ggaagaacugcauuauugu

SEQ ID NO: 1514148 - RNA, 19 nt, Homo sapiens
  misc_RNA (1)...(19): siRNA sense strand
ggacuuaucccagaaaauu

SEQ ID NO: 1514149 - RNA, 19 nt, Homo sapiens
  misc_RNA (1)...(19): siRNA sense strand
uaauugacaucuccaugau

SEQ ID NO: 1514150 - RNA, 19 nt, Homo sapiens
  misc_RNA (1)...(19): siRNA sense strand
cagaguuuaugcuaucuug

SEQ ID NO: 1514151 - RNA, 19 nt, Homo sapiens
  misc_RNA (1)...(19): siRNA sense strand
auuaaugccugcaagauug

SEQ ID NO: 1514152 - RNA, 19 nt, Homo sapiens
  misc_RNA (1)...(19): siRNA sense strand
cgaaaucaacgacagucua

SEQ ID NO: 1514153 - RNA, 19 nt, Homo sapiens
  misc_RNA (1)...(19): siRNA sense strand
caacacugcaugcuuugaa

SEQ ID NO: 1514154 - RNA, 19 nt, Homo sapiens
  misc_RNA (1)...(19): siRNA sense strand
caaugaaguggacugcaua

SEQ ID NO: 1514155 - RNA, 19 nt, Homo sapiens
  misc_RNA (1)...(19): siRNA sense strand
ugaaugaucguguggcuau

SEQ ID NO: 1514156 - RNA, 19 nt, Homo sapiens
  misc_RNA (1)...(19): siRNA sense strand
gaguggaagaacugcauua

SEQ ID NO: 1514157 - RNA, 19 nt, Homo sapiens
  misc_RNA (1)...(19): siRNA sense strand
gauccuugcagaagccaua

SEQ ID NO: 1514158 - RNA, 19 nt, Homo sapiens
  misc_RNA (1)...(19): siRNA sense strand
gaagaacugcauuauuguc

SEQ ID NO: 1514159 - RNA, 19 nt, Homo sapiens
  misc_RNA (1)...(19): siRNA sense strand
uggcuauccuuguagauga

SEQ ID NO: 1514160 - RNA, 19 nt, Homo sapiens
  misc_RNA (1)...(19): siRNA sense strand
caagcuuguugcaaauaug

SEQ ID NO: 1514161 - RNA, 19 nt, Homo sapiens
  misc_RNA (1)...(19): siRNA sense strand
ugacauggcagacacuugu

SEQ ID NO: 1514162 - RNA, 19 nt, Homo sapiens
  misc_RNA (1)...(19): siRNA sense strand
ugaaguggacugcauagug

SEQ ID NO: 1514163 - RNA, 19 nt, Homo sapiens
  misc_RNA (1)...(19): siRNA sense strand
ugaaguggauaagggagaa

SEQ ID NO: 1514164 - RNA, 19 nt, Homo sapiens
  misc_RNA (1)...(19): siRNA sense strand
auaaggagaacucauaaug

SEQ ID NO: 1514165 - RNA, 19 nt, Homo sapiens
  misc_RNA (1)...(19): siRNA sense strand
ccauaaggagaacucauaa

SEQ ID NO: 1514166 - RNA, 19 nt, Homo sapiens
  misc_RNA (1)...(19): siRNA sense strand
aauguggacuuugcuuuga

SEQ ID NO: 1514167 - RNA, 19 nt, Homo sapiens
  misc_RNA (1)...(19): siRNA sense strand
guggaagaacugcauuauu

SEQ ID NO: 1514168 - RNA, 19 nt, Homo sapiens
  misc_RNA (1)...(19): siRNA sense strand
gaacggaagaaggccaaug

SEQ ID NO: 1514169 - RNA, 19 nt, Homo sapiens
  misc_RNA (1)...(19): siRNA sense strand
aaucaacgacagucuaaug

SEQ ID NO: 1514170 - RNA, 19 nt, Homo sapiens
  misc_RNA (1)...(19): siRNA sense strand
uaaggagaacucauaaugg

SEQ ID NO: 1514171 - RNA, 19 nt, Homo sapiens
  misc_RNA (1)...(19): siRNA sense strand
aaccagaguuuaugcuauc

SEQ ID NO: 1514172 - RNA, 19 nt, Homo sapiens
  misc_RNA (1)...(19): siRNA sense strand
ucguguggcuauccuugua

SEQ ID NO: 1514173 - RNA, 19 nt, Homo sapiens
  misc_RNA (1)...(19): siRNA sense strand
cgacaggauaagaaggaua

SEQ ID NO: 1514174 - RNA, 19 nt, Homo sapiens
  misc_RNA (1)...(19): siRNA sense strand
ggagcaaccagaguuuaug

SEQ ID NO: 1514175 - RNA, 19 nt, Homo sapiens
  misc_RNA (1)...(19): siRNA sense strand
ugaauguggacuuugcuuu

SEQ ID NO: 1514176 - RNA, 19 nt, Homo sapiens
  misc_RNA (1)...(19): siRNA sense strand
uagcaggugcggaucauau

SEQ ID NO: 1514177 - RNA, 19 nt, Homo sapiens
  misc_RNA (1)...(19): siRNA sense strand
uaauggagcuuuugaucau

SEQ ID NO: 1514178 - RNA, 19 nt, Homo sapiens
  misc_RNA (1)...(19): siRNA sense strand
cagagugguuguggcgaaa

SEQ ID NO: 1514179 - RNA, 19 nt, Homo sapiens
  misc_RNA (1)...(19): siRNA sense strand
gcuagugggagaugugaau

SEQ ID NO: 1514180 - RNA, 19 nt, Homo sapiens
  misc_RNA (1)...(19): siRNA sense strand
ccuuaugcccgacaggaua

SEQ ID NO: 1514181 - RNA, 19 nt, Homo sapiens
  misc_RNA (1)...(19): siRNA sense strand
uuuaugcuaucuugacuca

SEQ ID NO: 1514182 - RNA, 19 nt, Homo sapiens
  misc_RNA (1)...(19): siRNA sense strand
ggcaagguggugacuaaga

SEQ ID NO: 1514183 - RNA, 19 nt, Homo sapiens
  misc_RNA (1)...(19): siRNA sense strand
auuauugucucgccagaug

SEQ ID NO: 1514184 - RNA, 19 nt, Homo sapiens
  misc_RNA (1)...(19): siRNA sense strand
gcaggugcggaucauauca

SEQ ID NO: 1514185 - RNA, 19 nt, Homo sapiens
  misc_RNA (1)...(19): siRNA sense strand
gccaagcuuguugcaaaua

SEQ ID NO: 1514186 - RNA, 19 nt, Homo sapiens
  misc_RNA (1)...(19): siRNA sense strand
gagugugcguggagaggau

SEQ ID NO: 1514187 - RNA, 19 nt, Homo sapiens
  misc_RNA (1)...(19): siRNA sense strand
gagugguuguggcgaaauc

SEQ ID NO: 1514188 - RNA, 19 nt, Homo sapiens
  misc_RNA (1)...(19): siRNA sense strand
ccgaguuacugcagucauc

SEQ ID NO: 1514189 - RNA, 19 nt, Homo sapiens
  misc_RNA (1)...(19): siRNA sense strand
uugcagaccaguugaaugu

SEQ ID NO: 1514190 - RNA, 19 nt, Homo sapiens
  misc_RNA (1)...(19): siRNA sense strand
agaauaucccugaguggaa

SEQ ID NO: 1514191 - RNA, 19 nt, Homo sapiens
  misc_RNA (1)...(19): siRNA sense strand
uguggacuuugcuuugauu

SEQ ID NO: 1514192 - RNA, 19 nt, Homo sapiens
  misc_RNA (1)...(19): siRNA sense strand
gaccuacaugcuucucaaa

SEQ ID NO: 1514193 - RNA, 19 nt, Homo sapiens
  misc_RNA (1)...(19): siRNA sense strand
ccagccauuucucgcauca

SEQ ID NO: 1514194 - RNA, 19 nt, Homo sapiens
  misc_RNA (1)...(19): siRNA sense strand
cggaucauaucaucaccau

SEQ ID NO: 1514195 - RNA, 19 nt, Homo sapiens
  misc_RNA (1)...(19): siRNA sense strand
cuugacucauggaaucuuu

SEQ ID NO: 1514196 - RNA, 19 nt, Homo sapiens
  misc_RNA (1)...(19): siRNA sense strand
gagcuuuugaucaugauua

SEQ ID NO: 1514197 - RNA, 19 nt, Homo sapiens
  misc_RNA (1)...(19): siRNA sense strand
agagccaacuguccugaag

SEQ ID NO: 1514198 - RNA, 19 nt, Homo sapiens
  misc_RNA (1)...(19): siRNA sense strand
uaucaucaccauggaccua

SEQ ID NO: 1514199 - RNA, 19 nt, Homo sapiens
  misc_RNA (1)...(19): siRNA sense strand
gagcaaccagaguuuaugc

SEQ ID NO: 1514200 - RNA, 19 nt, Homo sapiens
  misc_RNA (1)...(19): siRNA sense strand
cagcucccaccaggacuua

SEQ ID NO: 1514201 - RNA, 19 nt, Homo sapiens
  misc_RNA (1)...(19): siRNA sense strand
ugacaucuccaugauccuu

SEQ ID NO: 1514202 - RNA, 19 nt, Homo sapiens
  misc_RNA (1)...(19): siRNA sense strand
guagaugacauggcagaca

SEQ ID NO: 1514203 - RNA, 19 nt, Homo sapiens
  misc_RNA (1)...(19): siRNA sense strand
gaaugaucguguggcuauc

SEQ ID NO: 1514204 - RNA, 19 nt, Homo sapiens
  misc_RNA (1)...(19): siRNA sense strand
agccaacuguccugaagug

SEQ ID NO: 1514205 - RNA, 19 nt, Homo sapiens
  misc_RNA (1)...(19): siRNA sense strand
cauaaggagaacucauaau

SEQ ID NO: 1514206 - RNA, 19 nt, Homo sapiens
  misc_RNA (1)...(19): siRNA sense strand
aacggaagaaggccaauga

SEQ ID NO: 1514207 - RNA, 19 nt, Homo sapiens
  misc_RNA (1)...(19): siRNA sense strand
gcagcucccaccaggacuu

SEQ ID NO: 1514208 - RNA, 19 nt, Homo sapiens
  misc_RNA (1)...(19): siRNA sense strand
gcaaauaugcucucuauag

SEQ ID NO: 1514209 - RNA, 19 nt, Homo sapiens
  misc_RNA (1)...(19): siRNA sense strand
uggaagaacugcauuauug

SEQ ID NO: 1514210 - RNA, 19 nt, Homo sapiens
  misc_RNA (1)...(19): siRNA sense strand
gcaagguggugacuaagaa

SEQ ID NO: 1514211 - RNA, 19 nt, Homo sapiens
  misc_RNA (1)...(19): siRNA sense strand
caucaacacugcaugcuuu

SEQ ID NO: 1514212 - RNA, 19 nt, Homo sapiens
  misc_RNA (1)...(19): siRNA sense strand
gaaaucaacgacagucuaa

SEQ ID NO: 1514213 - RNA, 19 nt, Homo sapiens
  misc_RNA (1)...(19): siRNA sense strand
gaagaaggccaaugaagug

SEQ ID NO: 1514214 - RNA, 19 nt, Homo sapiens
  misc_RNA (1)...(19): siRNA sense strand
guucagccauguuccuuua

SEQ ID NO: 1514215 - RNA, 19 nt, Homo sapiens
  misc_RNA (1)...(19): siRNA sense strand
ggaagaaggccaaugaagu

SEQ ID NO: 1514216 - RNA, 19 nt, Homo sapiens
  misc_RNA (1)...(19): siRNA sense strand
ggaccuacaugcuucucaa

SEQ ID NO: 1514217 - RNA, 19 nt, Homo sapiens
  misc_RNA (1)...(19): siRNA sense strand
caaccagaguuuaugcuau

SEQ ID NO: 1514218 - RNA, 19 nt, Homo sapiens
  misc_RNA (1)...(19): siRNA sense strand
guaauugacaucuccauga

SEQ ID NO: 1514219 - RNA, 19 nt, Homo sapiens
  misc_RNA (1)...(19): siRNA sense strand
cuacaugcuucucaaauuc

SEQ ID NO: 1514220 - RNA, 19 nt, Homo sapiens
  misc_RNA (1)...(19): siRNA sense strand
gcagaagccauaaggagaa

SEQ ID NO: 1514221 - RNA, 19 nt, Homo sapiens
  misc_RNA (1)...(19): siRNA sense strand
uaggcaagguggugacuaa

SEQ ID NO: 1514222 - RNA, 19 nt, Homo sapiens
  misc_RNA (1)...(19): siRNA sense strand
gccauaaggagaacucaua

SEQ ID NO: 1514223 - RNA, 19 nt, Homo sapiens
  misc_RNA (1)...(19): siRNA sense strand
ccucgcagcugacaaacuu

SEQ ID NO: 1514224 - RNA, 19 nt, Homo sapiens
  misc_RNA (1)...(19): siRNA sense strand
gaauguggacuuugcuuug

SEQ ID NO: 1514225 - RNA, 19 nt, Homo sapiens
  misc_RNA (1)...(19): siRNA sense strand
ccuacaugcuucucaaauu

SEQ ID NO: 1514226 - RNA, 19 nt, Homo sapiens
  misc_RNA (1)...(19): siRNA sense strand
caaauaugcucucuauagc

SEQ ID NO: 1514227 - RNA, 19 nt, Homo sapiens
  misc_RNA (1)...(19): siRNA sense strand
gacaggauaagaaggauaa

SEQ ID NO: 1514228 - RNA, 19 nt, Homo sapiens
  misc_RNA (1)...(19): siRNA sense strand
ucagccauguuccuuuaua

SEQ ID NO: 1514229 - RNA, 19 nt, Homo sapiens
  misc_RNA (1)...(19): siRNA sense strand
ggacuuugcuuugauucau

SEQ ID NO: 1514230 - RNA, 19 nt, Homo sapiens
  misc_RNA (1)...(19): siRNA sense strand
caacuguccugaaguggau

SEQ ID NO: 1514231 - RNA, 19 nt, Homo sapiens
  misc_RNA (1)...(19): siRNA sense strand
gauuaaugccugcaagauu

SEQ ID NO: 1514232 - RNA, 19 nt, Homo sapiens
  misc_RNA (1)...(19): siRNA sense strand
uugcaaauaugcucucuau

SEQ ID NO: 1514233 - RNA, 19 nt, Homo sapiens
  misc_RNA (1)...(19): siRNA sense strand
cagccauguuccuuuauaa

SEQ ID NO: 1514234 - RNA, 19 nt, Homo sapiens
  misc_RNA (1)...(19): siRNA sense strand
ccaagacgccgaauaucaa

SEQ ID NO: 1514235 - RNA, 19 nt, Homo sapiens
  misc_RNA (1)...(19): siRNA sense strand
ccaauaccauaccucaaga

SEQ ID NO: 1514236 - RNA, 19 nt, Homo sapiens
  misc_RNA (1)...(19): siRNA sense strand
gcaaccagaguuuaugcua

SEQ ID NO: 1514237 - RNA, 19 nt, Homo sapiens
  misc_RNA (1)...(19): siRNA sense strand
gacuuugcuuugauucaua

SEQ ID NO: 1514238 - RNA, 19 nt, Homo sapiens
  misc_RNA (1)...(19): siRNA sense strand
ccaguugaauguggacuuu

SEQ ID NO: 1514239 - RNA, 19 nt, Homo sapiens
  misc_RNA (1)...(19): siRNA sense strand
ccaagcuuguugcaaauau

SEQ ID NO: 1514240 - RNA, 19 nt, Homo sapiens
  misc_RNA (1)...(19): siRNA sense strand
uaucuugacucauggaauc

SEQ ID NO: 1514241 - RNA, 19 nt, Homo sapiens
  misc_RNA (1)...(19): siRNA sense strand
ccaaugaaguggacugcau

SEQ ID NO: 1514242 - RNA, 19 nt, Homo sapiens
  misc_RNA (1)...(19): siRNA sense strand
uaugcuaucuugacucaug

SEQ ID NO: 1514243 - RNA, 19 nt, Homo sapiens
  misc_RNA (1)...(19): siRNA sense strand
ggaagaacugcauuauugu

SEQ ID NO: 1514244 - RNA, 19 nt, Homo sapiens
  misc_RNA (1)...(19): siRNA sense strand
ggacuuaucccagaaaauu

SEQ ID NO: 1514245 - RNA, 19 nt, Homo sapiens
  misc_RNA (1)...(19): siRNA sense strand
uaauugacaucuccaugau

SEQ ID NO: 1514246 - RNA, 19 nt, Homo sapiens
  misc_RNA (1)...(19): siRNA sense strand
cagaguuuaugcuaucuug

SEQ ID NO: 1514247 - RNA, 19 nt, Homo sapiens
  misc_RNA (1)...(19): siRNA sense strand
auuaaugccugcaagauug

SEQ ID NO: 1514248 - RNA, 19 nt, Homo sapiens
  misc_RNA (1)...(19): siRNA sense strand
cgaaaucaacgacagucua

SEQ ID NO: 1514249 - RNA, 19 nt, Homo sapiens
  misc_RNA (1)...(19): siRNA sense strand
caacacugcaugcuuugaa

SEQ ID NO: 1514250 - RNA, 19 nt, Homo sapiens
  misc_RNA (1)...(19): siRNA sense strand
gccaagacgccgaauauca

SEQ ID NO: 1514251 - RNA, 19 nt, Homo sapiens
  misc_RNA (1)...(19): siRNA sense strand
caaugaaguggacugcaua

SEQ ID NO: 1514252 - RNA, 19 nt, Homo sapiens
  misc_RNA (1)...(19): siRNA sense strand
ugaaugaucguguggcuau

SEQ ID NO: 1514253 - RNA, 19 nt, Homo sapiens
  misc_RNA (1)...(19): siRNA sense strand
gaguggaagaacugcauua

SEQ ID NO: 1514254 - RNA, 19 nt, Homo sapiens
  misc_RNA (1)...(19): siRNA sense strand
gauccuugcagaagccaua

SEQ ID NO: 1514255 - RNA, 19 nt, Homo sapiens
  misc_RNA (1)...(19): siRNA sense strand
gaagaacugcauuauuguc

SEQ ID NO: 1514256 - RNA, 19 nt, Homo sapiens
  misc_RNA (1)...(19): siRNA sense strand
uggcuauccuuguagauga

SEQ ID NO: 1514257 - RNA, 19 nt, Homo sapiens
  misc_RNA (1)...(19): siRNA sense strand
caagcuuguugcaaauaug

SEQ ID NO: 1514258 - RNA, 19 nt, Homo sapiens
  misc_RNA (1)...(19): siRNA sense strand
ugacauggcagacacuugu

SEQ ID NO: 1514259 - RNA, 19 nt, Homo sapiens
  misc_RNA (1)...(19): siRNA sense strand
ugaaguggacugcauagug

SEQ ID NO: 1514260 - RNA, 19 nt, Homo sapiens
  misc_RNA (1)...(19): siRNA sense strand
ugaaguggauaagggagaa

SEQ ID NO: 1514261 - RNA, 19 nt, Homo sapiens
  misc_RNA (1)...(19): siRNA sense strand
auaaggagaacucauaaug

SEQ ID NO: 1514262 - RNA, 19 nt, Homo sapiens
  misc_RNA (1)...(19): siRNA sense strand
ccauaaggagaacucauaa

SEQ ID NO: 1514263 - RNA, 19 nt, Homo sapiens
  misc_RNA (1)...(19): siRNA sense strand
caagacgccgaauaucaaa

SEQ ID NO: 1514264 - RNA, 19 nt, Homo sapiens
  misc_RNA (1)...(19): siRNA sense strand
aauguggacuuugcuuuga

SEQ ID NO: 1514265 - RNA, 19 nt, Homo sapiens
  misc_RNA (1)...(19): siRNA sense strand
guggaagaacugcauuauu

SEQ ID NO: 1514266 - RNA, 19 nt, Homo sapiens
  misc_RNA (1)...(19): siRNA sense strand
gaacggaagaaggccaaug

SEQ ID NO: 1514267 - RNA, 19 nt, Homo sapiens
  misc_RNA (1)...(19): siRNA sense strand
aaucaacgacagucuaaug

SEQ ID NO: 1514268 - RNA, 19 nt, Homo sapiens
  misc_RNA (1)...(19): siRNA sense strand
uaaggagaacucauaaugg

SEQ ID NO: 1514269 - RNA, 19 nt, Homo sapiens
  misc_RNA (1)...(19): siRNA sense strand
aaccagaguuuaugcuauc

SEQ ID NO: 1514270 - RNA, 19 nt, Homo sapiens
  misc_RNA (1)...(19): siRNA sense strand
ucguguggcuauccuugua

SEQ ID NO: 1514271 - RNA, 19 nt, Homo sapiens
  misc_RNA (1)...(19): siRNA sense strand
cgacaggauaagaaggaua

SEQ ID NO: 1514272 - RNA, 19 nt, Homo sapiens
  misc_RNA (1)...(19): siRNA sense strand
ggagcaaccagaguuuaug

SEQ ID NO: 1514273 - RNA, 19 nt, Homo sapiens
  misc_RNA (1)...(19): siRNA sense strand
ugaauguggacuuugcuuu

SEQ ID NO: 1514274 - RNA, 19 nt, Homo sapiens
  misc_RNA (1)...(19): siRNA sense strand
uagcaggugcggaucauau

SEQ ID NO: 1514275 - RNA, 19 nt, Homo sapiens
  misc_RNA (1)...(19): siRNA sense strand
cagagugguuguggcgaaa

SEQ ID NO: 1514276 - RNA, 19 nt, Homo sapiens
  misc_RNA (1)...(19): siRNA sense strand
gcuagugggagaugugaau

SEQ ID NO: 1514277 - RNA, 19 nt, Homo sapiens
  misc_RNA (1)...(19): siRNA sense strand
uaauggagcuuuugaucau

SEQ ID NO: 1514278 - RNA, 19 nt, Homo sapiens
  misc_RNA (1)...(19): siRNA sense strand
ccuuaugcccgacaggaua

SEQ ID NO: 1514279 - RNA, 19 nt, Homo sapiens
  misc_RNA (1)...(19): siRNA sense strand
uuuaugcuaucuugacuca

SEQ ID NO: 1514280 - RNA, 19 nt, Homo sapiens
  misc_RNA (1)...(19): siRNA sense strand
ggcaagguggugacuaaga

SEQ ID NO: 1514281 - RNA, 19 nt, Homo sapiens
  misc_RNA (1)...(19): siRNA sense strand
auuauugucucgccagaug

SEQ ID NO: 1514282 - RNA, 19 nt, Homo sapiens
  misc_RNA (1)...(19): siRNA sense strand
gcaggugcggaucauauca

SEQ ID NO: 1514283 - RNA, 19 nt, Homo sapiens
  misc_RNA (1)...(19): siRNA sense strand
ccgaguuacugcagucauc

SEQ ID NO: 1514284 - RNA, 19 nt, Homo sapiens
  misc_RNA (1)...(19): siRNA sense strand
gagugugcguggagaggau

SEQ ID NO: 1514285 - RNA, 19 nt, Homo sapiens
  misc_RNA (1)...(19): siRNA sense strand
uggccaagacgccgaauau

SEQ ID NO: 1514286 - RNA, 19 nt, Homo sapiens
  misc_RNA (1)...(19): siRNA sense strand
gagugguuguggcgaaauc

SEQ ID NO: 1514287 - RNA, 19 nt, Homo sapiens
  misc_RNA (1)...(19): siRNA sense strand
uugcagaccaguugaaugu

SEQ ID NO: 1514288 - RNA, 19 nt, Homo sapiens
  misc_RNA (1)...(19): siRNA sense strand
agaauaucccugaguggaa

SEQ ID NO: 1514289 - RNA, 19 nt, Homo sapiens
  misc_RNA (1)...(19): siRNA sense strand
gccaagcuuguugcaaaua

SEQ ID NO: 1514290 - RNA, 19 nt, Homo sapiens
  misc_RNA (1)...(19): siRNA sense strand
uguggacuuugcuuugauu

SEQ ID NO: 1514291 - RNA, 19 nt, Homo sapiens
  misc_RNA (1)...(19): siRNA sense strand
gaccuacaugcuucucaaa

SEQ ID NO: 1514292 - RNA, 19 nt, Homo sapiens
  misc_RNA (1)...(19): siRNA sense strand
ccagccauuucucgcauca

SEQ ID NO: 1514293 - RNA, 19 nt, Homo sapiens
  misc_RNA (1)...(19): siRNA sense strand
cggaucauaucaucaccau

SEQ ID NO: 1514294 - RNA, 19 nt, Homo sapiens
  misc_RNA (1)...(19): siRNA sense strand
cuugacucauggaaucuuu

SEQ ID NO: 1514295 - RNA, 19 nt, Homo sapiens
  misc_RNA (1)...(19): siRNA sense strand
gagcuuuugaucaugauua

SEQ ID NO: 1514296 - RNA, 19 nt, Homo sapiens
  misc_RNA (1)...(19): siRNA sense strand
agagccaacuguccugaag

SEQ ID NO: 1514297 - RNA, 19 nt, Homo sapiens
  misc_RNA (1)...(19): siRNA sense strand
uaucaucaccauggaccua

SEQ ID NO: 1514298 - RNA, 19 nt, Homo sapiens
  misc_RNA (1)...(19): siRNA sense strand
gagcaaccagaguuuaugc

SEQ ID NO: 1514299 - RNA, 19 nt, Homo sapiens
  misc_RNA (1)...(19): siRNA sense strand
cagcucccaccaggacuua

SEQ ID NO: 1514300 - RNA, 19 nt, Homo sapiens
  misc_RNA (1)...(19): siRNA sense strand
ugacaucuccaugauccuu

SEQ ID NO: 1514301 - RNA, 19 nt, Homo sapiens
  misc_RNA (1)...(19): siRNA sense strand
guagaugacauggcagaca

SEQ ID NO: 1514302 - RNA, 19 nt, Homo sapiens
  misc_RNA (1)...(19): siRNA sense strand
gaaugaucguguggcuauc

SEQ ID NO: 1514303 - RNA, 19 nt, Homo sapiens
  misc_RNA (1)...(19): siRNA sense strand
agccaacuguccugaagug

SEQ ID NO: 1514304 - RNA, 19 nt, Homo sapiens
  misc_RNA (1)...(19): siRNA sense strand
cauaaggagaacucauaau

SEQ ID NO: 1514305 - RNA, 19 nt, Homo sapiens
  misc_RNA (1)...(19): siRNA sense strand
aacggaagaaggccaauga

SEQ ID NO: 1514306 - RNA, 19 nt, Homo sapiens
  misc_RNA (1)...(19): siRNA sense strand
gcagcucccaccaggacuu

SEQ ID NO: 1514307 - RNA, 19 nt, Homo sapiens
  misc_RNA (1)...(19): siRNA sense strand
gaagaaacauccacaggaa

SEQ ID NO: 1514308 - RNA, 19 nt, Homo sapiens
  misc_RNA (1)...(19): siRNA sense strand
gacaagcgauuucuguuua

SEQ ID NO: 1514309 - RNA, 19 nt, Homo sapiens
  misc_RNA (1)...(19): siRNA sense strand
caagugauauggcagguua

SEQ ID NO: 1514310 - RNA, 19 nt, Homo sapiens
  misc_RNA (1)...(19): siRNA sense strand
guagauggauauagagaua

SEQ ID NO: 1514311 - RNA, 19 nt, Homo sapiens
  misc_RNA (1)...(19): siRNA sense strand
gcaaagggaucagucgaua

SEQ ID NO: 1514312 - RNA, 19 nt, Homo sapiens
  misc_RNA (1)...(19): siRNA sense strand
ggaacgagcuagccauuau

SEQ ID NO: 1514313 - RNA, 19 nt, Homo sapiens
  misc_RNA (1)...(19): siRNA sense strand
gaaagaagaugagacaauc

SEQ ID NO: 1514314 - RNA, 19 nt, Homo sapiens
  misc_RNA (1)...(19): siRNA sense strand
gcaccaguguuucaacuaa

SEQ ID NO: 1514315 - RNA, 19 nt, Homo sapiens
  misc_RNA (1)...(19): siRNA sense strand
ggaauaugguagauggaua

SEQ ID NO: 1514316 - RNA, 19 nt, Homo sapiens
  misc_RNA (1)...(19): siRNA sense strand
gaagaccuauaaaggaauu

SEQ ID NO: 1514317 - RNA, 19 nt, Homo sapiens
  misc_RNA (1)...(19): siRNA sense strand
cagcgaccauccagauuua

SEQ ID NO: 1514318 - RNA, 19 nt, Homo sapiens
  misc_RNA (1)...(19): siRNA sense strand
gaaaggaaguccguaugga

SEQ ID NO: 1514319 - RNA, 19 nt, Homo sapiens
  misc_RNA (1)...(19): siRNA sense strand
ggagacauuucugggaaua

SEQ ID NO: 1514320 - RNA, 19 nt, Homo sapiens
  misc_RNA (1)...(19): siRNA sense strand
guuggaagcagauuaaaua

SEQ ID NO: 1514321 - RNA, 19 nt, Homo sapiens
  misc_RNA (1)...(19): siRNA sense strand
guggacaccuagugacuua

SEQ ID NO: 1514322 - RNA, 19 nt, Homo sapiens
  misc_RNA (1)...(19): siRNA sense strand
ggaagcagauuaaauaucc

SEQ ID NO: 1514323 - RNA, 19 nt, Homo sapiens
  misc_RNA (1)...(19): siRNA sense strand
gaagacagaauacagcaaa

SEQ ID NO: 1514324 - RNA, 19 nt, Homo sapiens
  misc_RNA (1)...(19): siRNA sense strand
gaaagaagaagaagaaagg

SEQ ID NO: 1514325 - RNA, 19 nt, Homo sapiens
  misc_RNA (1)...(19): siRNA sense strand
gaacacaagugaaguaacc

SEQ ID NO: 1514326 - RNA, 19 nt, Homo sapiens
  misc_RNA (1)...(19): siRNA sense strand
gcucauugguugccagauu

SEQ ID NO: 1514327 - RNA, 19 nt, Homo sapiens
  misc_RNA (1)...(19): siRNA sense strand
aaaguuagaucucaucaca

SEQ ID NO: 1514328 - RNA, 19 nt, Homo sapiens
  misc_RNA (1)...(19): siRNA sense strand
gaccugugcuucugacuau

SEQ ID NO: 1514329 - RNA, 19 nt, Homo sapiens
  misc_RNA (1)...(19): siRNA sense strand
caacuaagaaagaagauga

SEQ ID NO: 1514330 - RNA, 19 nt, Homo sapiens
  misc_RNA (1)...(19): siRNA sense strand
gagaguggcuggagaucga

SEQ ID NO: 1514331 - RNA, 19 nt, Homo sapiens
  misc_RNA (1)...(19): siRNA sense strand
gaaguaaccguccgcuuug

SEQ ID NO: 1514332 - RNA, 19 nt, Homo sapiens
  misc_RNA (1)...(19): siRNA sense strand
gcacaaugacaucuaagaa

SEQ ID NO: 1514333 - RNA, 19 nt, Homo sapiens
  misc_RNA (1)...(19): siRNA sense strand
gaagaaaggaaguccguau

SEQ ID NO: 1514334 - RNA, 19 nt, Homo sapiens
  misc_RNA (1)...(19): siRNA sense strand
gugcaaagcugccauccau

SEQ ID NO: 1514335 - RNA, 19 nt, Homo sapiens
  misc_RNA (1)...(19): siRNA sense strand
uaugguagauggauauaga

SEQ ID NO: 1514336 - RNA, 19 nt, Homo sapiens
  misc_RNA (1)...(19): siRNA sense strand
ugaaguaaccguccgcuuu

SEQ ID NO: 1514337 - RNA, 19 nt, Homo sapiens
  misc_RNA (1)...(19): siRNA sense strand
uggaagaccuauaaaggaa

SEQ ID NO: 1514338 - RNA, 19 nt, Homo sapiens
  misc_RNA (1)...(19): siRNA sense strand
gcagcgaccauccagauuu

SEQ ID NO: 1514339 - RNA, 19 nt, Homo sapiens
  misc_RNA (1)...(19): siRNA sense strand
agaaacauccacaggaaua

SEQ ID NO: 1514340 - RNA, 19 nt, Homo sapiens
  misc_RNA (1)...(19): siRNA sense strand
gaaccugacgggcaaauca

SEQ ID NO: 1514341 - RNA, 19 nt, Homo sapiens
  misc_RNA (1)...(19): siRNA sense strand
cagauuaaauaucccuuug

SEQ ID NO: 1514342 - RNA, 19 nt, Homo sapiens
  misc_RNA (1)...(19): siRNA sense strand
caggguaacucuaacuuuc

SEQ ID NO: 1514343 - RNA, 19 nt, Homo sapiens
  misc_RNA (1)...(19): siRNA sense strand
ggagaugacacaaaaguua

SEQ ID NO: 1514344 - RNA, 19 nt, Homo sapiens
  misc_RNA (1)...(19): siRNA sense strand
guaugacuguucccaaaga

SEQ ID NO: 1514345 - RNA, 19 nt, Homo sapiens
  misc_RNA (1)...(19): siRNA sense strand
gaaacauccacaggaauaa

SEQ ID NO: 1514346 - RNA, 19 nt, Homo sapiens
  misc_RNA (1)...(19): siRNA sense strand
cuaaguggaagaccuauaa

SEQ ID NO: 1514347 - RNA, 19 nt, Homo sapiens
  misc_RNA (1)...(19): siRNA sense strand
ggaauuaggaccacaggau

SEQ ID NO: 1514348 - RNA, 19 nt, Homo sapiens
  misc_RNA (1)...(19): siRNA sense strand
gaccauccagauuuaauaa

SEQ ID NO: 1514349 - RNA, 19 nt, Homo sapiens
  misc_RNA (1)...(19): siRNA sense strand
gagaaggagaugacacaaa

SEQ ID NO: 1514350 - RNA, 19 nt, Homo sapiens
  misc_RNA (1)...(19): siRNA sense strand
gaagaugagacaaucacaa

SEQ ID NO: 1514351 - RNA, 19 nt, Homo sapiens
  misc_RNA (1)...(19): siRNA sense strand
agucaaagcaccaguguuu

SEQ ID NO: 1514352 - RNA, 19 nt, Homo sapiens
  misc_RNA (1)...(19): siRNA sense strand
agacguagcaggagacauu

SEQ ID NO: 1514353 - RNA, 19 nt, Homo sapiens
  misc_RNA (1)...(19): siRNA sense strand
gccauuauuugaagacaga

SEQ ID NO: 1514354 - RNA, 19 nt, Homo sapiens
  misc_RNA (1)...(19): siRNA sense strand
gaacgagcuagccauuauu

SEQ ID NO: 1514355 - RNA, 19 nt, Homo sapiens
  misc_RNA (1)...(19): siRNA sense strand
gagcuagccauuauuugaa

SEQ ID NO: 1514356 - RNA, 19 nt, Homo sapiens
  misc_RNA (1)...(19): siRNA sense strand
cgagcuagccauuauuuga

SEQ ID NO: 1514357 - RNA, 19 nt, Homo sapiens
  misc_RNA (1)...(19): siRNA sense strand
ccacaggaauaaacauuac

SEQ ID NO: 1514358 - RNA, 19 nt, Homo sapiens
  misc_RNA (1)...(19): siRNA sense strand
uaagaaagaagaugagaca

SEQ ID NO: 1514359 - RNA, 19 nt, Homo sapiens
  misc_RNA (1)...(19): siRNA sense strand
caccagcucuucagaucaa

SEQ ID NO: 1514360 - RNA, 19 nt, Homo sapiens
  misc_RNA (1)...(19): siRNA sense strand
gaacuagguggccagauca

SEQ ID NO: 1514361 - RNA, 19 nt, Homo sapiens
  misc_RNA (1)...(19): siRNA sense strand
ugaacuagguggccagauc

SEQ ID NO: 1514362 - RNA, 19 nt, Homo sapiens
  misc_RNA (1)...(19): siRNA sense strand
caggaauaauugcugauga

SEQ ID NO: 1514363 - RNA, 19 nt, Homo sapiens
  misc_RNA (1)...(19): siRNA sense strand
gcagauuaaauaucccuuu

SEQ ID NO: 1514364 - RNA, 19 nt, Homo sapiens
  misc_RNA (1)...(19): siRNA sense strand
cgaccauccagauuuaaua

SEQ ID NO: 1514365 - RNA, 19 nt, Homo sapiens
  misc_RNA (1)...(19): siRNA sense strand
gaucuacacagucgaacuu

SEQ ID NO: 1514366 - RNA, 19 nt, Homo sapiens
  misc_RNA (1)...(19): siRNA sense strand
ugccauccaugcaggaaua

SEQ ID NO: 1514367 - RNA, 19 nt, Homo sapiens
  misc_RNA (1)...(19): siRNA sense strand
agaaggagaugacacaaaa

SEQ ID NO: 1514368 - RNA, 19 nt, Homo sapiens
  misc_RNA (1)...(19): siRNA sense strand
aaagacugauucugagguu

SEQ ID NO: 1514369 - RNA, 19 nt, Homo sapiens
  misc_RNA (1)...(19): siRNA sense strand
gaucuuugcagccuuuaga

SEQ ID NO: 1514370 - RNA, 19 nt, Homo sapiens
  misc_RNA (1)...(19): siRNA sense strand
cucauugguugccagauua

SEQ ID NO: 1514371 - RNA, 19 nt, Homo sapiens
  misc_RNA (1)...(19): siRNA sense strand
ccauccagauuuaauaaca

SEQ ID NO: 1514372 - RNA, 19 nt, Homo sapiens
  misc_RNA (1)...(19): siRNA sense strand
gagcagcgaccauccagau

SEQ ID NO: 1514373 - RNA, 19 nt, Homo sapiens
  misc_RNA (1)...(19): siRNA sense strand
caggauaguggcacaauga

SEQ ID NO: 1514374 - RNA, 19 nt, Homo sapiens
  misc_RNA (1)...(19): siRNA sense strand
aggaauaauugcugaugaa

SEQ ID NO: 1514375 - RNA, 19 nt, Homo sapiens
  misc_RNA (1)...(19): siRNA sense strand
ccuagugacuuaucaggau

SEQ ID NO: 1514376 - RNA, 19 nt, Homo sapiens
  misc_RNA (1)...(19): siRNA sense strand
gcuaugauaaugagaagga

SEQ ID NO: 1514377 - RNA, 19 nt, Homo sapiens
  misc_RNA (1)...(19): siRNA sense strand
caacgguggcuauuccauu

SEQ ID NO: 1514378 - RNA, 19 nt, Homo sapiens
  misc_RNA (1)...(19): siRNA sense strand
gaaaauaacaggaauuagg

SEQ ID NO: 1514379 - RNA, 19 nt, Homo sapiens
  misc_RNA (1)...(19): siRNA sense strand
agacaagcgauuucuguuu

SEQ ID NO: 1514380 - RNA, 19 nt, Homo sapiens
  misc_RNA (1)...(19): siRNA sense strand
gggaaaagacugauucuga

SEQ ID NO: 1514381 - RNA, 19 nt, Homo sapiens
  misc_RNA (1)...(19): siRNA sense strand
aaguaugacuguucccaaa

SEQ ID NO: 1514382 - RNA, 19 nt, Homo sapiens
  misc_RNA (1)...(19): siRNA sense strand
guggcacaaugacaucuaa

SEQ ID NO: 1514383 - RNA, 19 nt, Homo sapiens
  misc_RNA (1)...(19): siRNA sense strand
agacauuucugggaauaug

SEQ ID NO: 1514384 - RNA, 19 nt, Homo sapiens
  misc_RNA (1)...(19): siRNA sense strand
caaugagaguggagaccaa

SEQ ID NO: 1514385 - RNA, 19 nt, Homo sapiens
  misc_RNA (1)...(19): siRNA sense strand
ucaaagcaccaguguuuca

SEQ ID NO: 1514386 - RNA, 19 nt, Homo sapiens
  misc_RNA (1)...(19): siRNA sense strand
ccagauaugugcggguugu

SEQ ID NO: 1514387 - RNA, 19 nt, Homo sapiens
  misc_RNA (1)...(19): siRNA sense strand
gaucagcagaggcucagaa

SEQ ID NO: 1514388 - RNA, 19 nt, Homo sapiens
  misc_RNA (1)...(19): siRNA sense strand
gauaguggcacaaugacau

SEQ ID NO: 1514389 - RNA, 19 nt, Homo sapiens
  misc_RNA (1)...(19): siRNA sense strand
guugaacacaagugaagua

SEQ ID NO: 1514390 - RNA, 19 nt, Homo sapiens
  misc_RNA (1)...(19): siRNA sense strand
gaagaagaagaaaggaagu

SEQ ID NO: 1514391 - RNA, 19 nt, Homo sapiens
  misc_RNA (1)...(19): siRNA sense strand
agaaagaagaugagacaau

SEQ ID NO: 1514392 - RNA, 19 nt, Homo sapiens
  misc_RNA (1)...(19): siRNA sense strand
guggaagaccuauaaagga

SEQ ID NO: 1514393 - RNA, 19 nt, Homo sapiens
  misc_RNA (1)...(19): siRNA sense strand
gcagcagauccuugaguuu

SEQ ID NO: 1514394 - RNA, 19 nt, Homo sapiens
  misc_RNA (1)...(19): siRNA sense strand
aaagggaucagucgauaug

SEQ ID NO: 1514395 - RNA, 19 nt, Homo sapiens
  misc_RNA (1)...(19): siRNA sense strand
gaaaagacaauuacaguac

SEQ ID NO: 1514396 - RNA, 19 nt, Homo sapiens
  misc_RNA (1)...(19): siRNA sense strand
gaagggauucuggccaaug

SEQ ID NO: 1514397 - RNA, 19 nt, Homo sapiens
  misc_RNA (1)...(19): siRNA sense strand
agaauuaucccgggaccua

SEQ ID NO: 1514398 - RNA, 19 nt, Homo sapiens
  misc_RNA (1)...(19): siRNA sense strand
uacacaagguaaugauuca

SEQ ID NO: 1514399 - RNA, 19 nt, Homo sapiens
  misc_RNA (1)...(19): siRNA sense strand
ggacaccuagugacuuauc

SEQ ID NO: 1514400 - RNA, 19 nt, Homo sapiens
  misc_RNA (1)...(19): siRNA sense strand
guugggagauuuggauauc

SEQ ID NO: 1514401 - RNA, 19 nt, Homo sapiens
  misc_RNA (1)...(19): siRNA sense strand
gcaggaauaauugcugaug

SEQ ID NO: 1514402 - RNA, 19 nt, Homo sapiens
  misc_RNA (1)...(19): siRNA sense strand
cauccaugcaggaauaauu

SEQ ID NO: 1514403 - RNA, 19 nt, Homo sapiens
  misc_RNA (1)...(19): siRNA sense strand
cuguuuaccuccaaugguu

SEQ ID NO: 1514404 - RNA, 19 nt, Homo sapiens
  misc_RNA (1)...(19): siRNA sense strand
ucagcugaguuuaccauca

SEQ ID NO: 1514405 - RNA, 19 nt, Homo sapiens
  misc_RNA (1)...(19): siRNA sense strand
gaagguggagcucauuggu

SEQ ID NO: 1514406 - RNA, 19 nt, Homo sapiens
  misc_RNA (1)...(19): siRNA sense strand
guuaagaguuuugugauga

SEQ ID NO: 1514407 - RNA, 19 nt, Homo sapiens
  misc_RNA (1)...(19): siRNA sense strand
gaacaaagcuauguaccua

SEQ ID NO: 1514408 - RNA, 19 nt, Homo sapiens
  misc_RNA (1)...(19): siRNA sense strand
gaacaucucccucgcgaaa

SEQ ID NO: 1514409 - RNA, 19 nt, Homo sapiens
  misc_RNA (1)...(19): siRNA sense strand
gggcaugcguggguucaaa

SEQ ID NO: 1514410 - RNA, 19 nt, Homo sapiens
  misc_RNA (1)...(19): siRNA sense strand
ugacggagcagguguggaa

SEQ ID NO: 1514411 - RNA, 19 nt, Homo sapiens
  misc_RNA (1)...(19): siRNA sense strand
ggagaacaaagcuauguac

SEQ ID NO: 1514412 - RNA, 19 nt, Homo sapiens
  misc_RNA (1)...(19): siRNA sense strand
gaaccugugugaggauggu

SEQ ID NO: 1514413 - RNA, 19 nt, Homo sapiens
  misc_RNA (1)...(19): siRNA sense strand
gugggcaucuucaucuuag

SEQ ID NO: 1514414 - RNA, 19 nt, Homo sapiens
  misc_RNA (1)...(19): siRNA sense strand
cugcuggucuuccugauuc

SEQ ID NO: 1514415 - RNA, 19 nt, Homo sapiens
  misc_RNA (1)...(19): siRNA sense strand
ggagagaaaggagagaaag

SEQ ID NO: 1514416 - RNA, 19 nt, Homo sapiens
  misc_RNA (1)...(19): siRNA sense strand
ggcccugacucgcaaugug

SEQ ID NO: 1514417 - RNA, 19 nt, Homo sapiens
  misc_RNA (1)...(19): siRNA sense strand
gugaaccggcugaaugaga

SEQ ID NO: 1514418 - RNA, 19 nt, Homo sapiens
  misc_RNA (1)...(19): siRNA sense strand
gcccugacucgcaauguga

SEQ ID NO: 1514419 - RNA, 19 nt, Homo sapiens
  misc_RNA (1)...(19): siRNA sense strand
aaugugaaccggcugaaug

SEQ ID NO: 1514420 - RNA, 19 nt, Homo sapiens
  misc_RNA (1)...(19): siRNA sense strand
uggauugccuggacuucga

SEQ ID NO: 1514421 - RNA, 19 nt, Homo sapiens
  misc_RNA (1)...(19): siRNA sense strand
ggaugccaguaaggacauu

SEQ ID NO: 1514422 - RNA, 19 nt, Homo sapiens
  misc_RNA (1)...(19): siRNA sense strand
gagagaaaggagagaaagg

SEQ ID NO: 1514423 - RNA, 19 nt, Homo sapiens
  misc_RNA (1)...(19): siRNA sense strand
agagaaaggagagaaagga

SEQ ID NO: 1514424 - RNA, 19 nt, Homo sapiens
  misc_RNA (1)...(19): siRNA sense strand
ugugggcaucuucaucuua

SEQ ID NO: 1514425 - RNA, 19 nt, Homo sapiens
  misc_RNA (1)...(19): siRNA sense strand
ugacaccagcuccaucugu

SEQ ID NO: 1514426 - RNA, 19 nt, Homo sapiens
  misc_RNA (1)...(19): siRNA sense strand
gccgugggauaugguguug

SEQ ID NO: 1514427 - RNA, 19 nt, Homo sapiens
  misc_RNA (1)...(19): siRNA sense strand
ccaagcugaaccuguguga

SEQ ID NO: 1514428 - RNA, 19 nt, Homo sapiens
  misc_RNA (1)...(19): siRNA sense strand
ucacugauguugagagaca

SEQ ID NO: 1514429 - RNA, 19 nt, Homo sapiens
  misc_RNA (1)...(19): siRNA sense strand
gaagcauccucagccaaug

SEQ ID NO: 1514430 - RNA, 19 nt, Homo sapiens
  misc_RNA (1)...(19): siRNA sense strand
agagacagaugggaaaaua

SEQ ID NO: 1514431 - RNA, 19 nt, Homo sapiens
  misc_RNA (1)...(19): siRNA sense strand
gcucguuuaauaucacuga

SEQ ID NO: 1514432 - RNA, 19 nt, Homo sapiens
  misc_RNA (1)...(19): siRNA sense strand
gccaauggagccacaauac

SEQ ID NO: 1514433 - RNA, 19 nt, Homo sapiens
  misc_RNA (1)...(19): siRNA sense strand
agaagcauccucagccaau

SEQ ID NO: 1514434 - RNA, 19 nt, Homo sapiens
  misc_RNA (1)...(19): siRNA sense strand
caauggagccacaauaccu

SEQ ID NO: 1514435 - RNA, 19 nt, Homo sapiens
  misc_RNA (1)...(19): siRNA sense strand
aacagaagcuucacuauug

SEQ ID NO: 1514436 - RNA, 19 nt, Homo sapiens
  misc_RNA (1)...(19): siRNA sense strand
gaaagaaacagaagcuuca

SEQ ID NO: 1514437 - RNA, 19 nt, Homo sapiens
  misc_RNA (1)...(19): siRNA sense strand
aaacagaagcuucacuauu

SEQ ID NO: 1514438 - RNA, 19 nt, Homo sapiens
  misc_RNA (1)...(19): siRNA sense strand
aaaccaaucagcuucauuu

SEQ ID NO: 1514439 - RNA, 19 nt, Homo sapiens
  misc_RNA (1)...(19): siRNA sense strand
gauauaggaccaagaggaa

SEQ ID NO: 1514440 - RNA, 19 nt, Homo sapiens
  misc_RNA (1)...(19): siRNA sense strand
ggauucacuuugcaucuug

SEQ ID NO: 1514441 - RNA, 19 nt, Homo sapiens
  misc_RNA (1)...(19): siRNA sense strand
caaauuaugcagucgaguu

SEQ ID NO: 1514442 - RNA, 19 nt, Homo sapiens
  misc_RNA (1)...(19): siRNA sense strand
gaaacagaagcuucacuau

SEQ ID NO: 1514443 - RNA, 19 nt, Homo sapiens
  misc_RNA (1)...(19): siRNA sense strand
ccaaucagcuucauuuuca

SEQ ID NO: 1514444 - RNA, 19 nt, Homo sapiens
  misc_RNA (1)...(19): siRNA sense strand
caagaggaaagaaacagaa

SEQ ID NO: 1514445 - RNA, 19 nt, Homo sapiens
  misc_RNA (1)...(19): siRNA sense strand
gaaaccaaucagcuucauu

SEQ ID NO: 1514446 - RNA, 19 nt, Homo sapiens
  misc_RNA (1)...(19): siRNA sense strand
gaaggccggagaacuguau

SEQ ID NO: 1514447 - RNA, 19 nt, Homo sapiens
  misc_RNA (1)...(19): siRNA sense strand
agaaacagaagcuucacua

SEQ ID NO: 1514448 - RNA, 19 nt, Homo sapiens
  misc_RNA (1)...(19): siRNA sense strand
aagcuucacuauugggaaa

SEQ ID NO: 1514449 - RNA, 19 nt, Homo sapiens
  misc_RNA (1)...(19): siRNA sense strand
gcaucagguuggaucaugu

SEQ ID NO: 1514450 - RNA, 19 nt, Homo sapiens
  misc_RNA (1)...(19): siRNA sense strand
gaugauauaggaccaagag

SEQ ID NO: 1514451 - RNA, 19 nt, Homo sapiens
  misc_RNA (1)...(19): siRNA sense strand
ggaccaagaggaaagaaac

SEQ ID NO: 1514452 - RNA, 19 nt, Homo sapiens
  misc_RNA (1)...(19): siRNA sense strand
gagaaaccaaucagcuuca

SEQ ID NO: 1514453 - RNA, 19 nt, Homo sapiens
  misc_RNA (1)...(19): siRNA sense strand
ggcaucagguuggaucaug

SEQ ID NO: 1514454 - RNA, 19 nt, Homo sapiens
  misc_RNA (1)...(19): siRNA sense strand
aaauuaugcagucgaguuu

SEQ ID NO: 1514455 - RNA, 19 nt, Homo sapiens
  misc_RNA (1)...(19): siRNA sense strand
cagguuggaucauguucug

SEQ ID NO: 1514456 - RNA, 19 nt, Homo sapiens
  misc_RNA (1)...(19): siRNA sense strand
ggaaggccggagaacugua

SEQ ID NO: 1514457 - RNA, 19 nt, Homo sapiens
  misc_RNA (1)...(19): siRNA sense strand
ccagaggauucacuuugca

SEQ ID NO: 1514458 - RNA, 19 nt, Homo sapiens
  misc_RNA (1)...(19): siRNA sense strand
ccaagaggaaagaaacaga

SEQ ID NO: 1514459 - RNA, 19 nt, Homo sapiens
  misc_RNA (1)...(19): siRNA sense strand
uagagaaaccaaucagcuu

SEQ ID NO: 1514460 - RNA, 19 nt, Homo sapiens
  misc_RNA (1)...(19): siRNA sense strand
acagaagcuucacuauugg

SEQ ID NO: 1514461 - RNA, 19 nt, Homo sapiens
  misc_RNA (1)...(19): siRNA sense strand
gaggaaagaaacagaagcu

SEQ ID NO: 1514462 - RNA, 19 nt, Homo sapiens
  misc_RNA (1)...(19): siRNA sense strand
cauccggagugcaaucgau

SEQ ID NO: 1514463 - RNA, 19 nt, Homo sapiens
  misc_RNA (1)...(19): siRNA sense strand
ccacuacaacaaauuaugc

SEQ ID NO: 1514464 - RNA, 19 nt, Homo sapiens
  misc_RNA (1)...(19): siRNA sense strand
gaccaagaggaaagaaaca

SEQ ID NO: 1514465 - RNA, 19 nt, Homo sapiens
  misc_RNA (1)...(19): siRNA sense strand
cagcuucuccugguggauu

SEQ ID NO: 1514466 - RNA, 19 nt, Homo sapiens
  misc_RNA (1)...(19): siRNA sense strand
gaggauucacuuugcaucu

SEQ ID NO: 1514467 - RNA, 19 nt, Homo sapiens
  misc_RNA (1)...(19): siRNA sense strand
caucagguuggaucauguu

SEQ ID NO: 1514468 - RNA, 19 nt, Homo sapiens
  misc_RNA (1)...(19): siRNA sense strand
gauucacuuugcaucuugu

SEQ ID NO: 1514469 - RNA, 19 nt, Homo sapiens
  misc_RNA (1)...(19): siRNA sense strand
aggauucacuuugcaucuu

SEQ ID NO: 1514470 - RNA, 19 nt, Homo sapiens
  misc_RNA (1)...(19): siRNA sense strand
gcacuggccucacaacuuu

SEQ ID NO: 1514471 - RNA, 19 nt, Homo sapiens
  misc_RNA (1)...(19): siRNA sense strand
gcacacuucuacuaugcua

SEQ ID NO: 1514472 - RNA, 19 nt, Homo sapiens
  misc_RNA (1)...(19): siRNA sense strand
gggcagggccaccaacuuu

SEQ ID NO: 1514473 - RNA, 19 nt, Homo sapiens
  misc_RNA (1)...(19): siRNA sense strand
uaacaaguacauccagaaa

SEQ ID NO: 1514474 - RNA, 19 nt, Homo sapiens
  misc_RNA (1)...(19): siRNA sense strand
gcgcaaacuugaucagaag

SEQ ID NO: 1514475 - RNA, 19 nt, Homo sapiens
  misc_RNA (1)...(19): siRNA sense strand
gcacaacgaggccgugaau

SEQ ID NO: 1514476 - RNA, 19 nt, Homo sapiens
  misc_RNA (1)...(19): siRNA sense strand
ugcauuggcuccugcuaua

SEQ ID NO: 1514477 - RNA, 19 nt, Homo sapiens
  misc_RNA (1)...(19): siRNA sense strand
caucagaccuggcgcuucu

SEQ ID NO: 1514478 - RNA, 19 nt, Homo sapiens
  misc_RNA (1)...(19): siRNA sense strand
agucugaguucuggcauua

SEQ ID NO: 1514479 - RNA, 19 nt, Homo sapiens
  misc_RNA (1)...(19): siRNA sense strand
ucauuguccuugccucuuu

SEQ ID NO: 1514480 - RNA, 19 nt, Homo sapiens
  misc_RNA (1)...(19): siRNA sense strand
agaccuggcgcuucuauuu

SEQ ID NO: 1514481 - RNA, 19 nt, Homo sapiens
  misc_RNA (1)...(19): siRNA sense strand
gcucuucucuaccacaagu

SEQ ID NO: 1514482 - RNA, 19 nt, Homo sapiens
  misc_RNA (1)...(19): siRNA sense strand
guacagcgcaaacuugauc

SEQ ID NO: 1514483 - RNA, 19 nt, Homo sapiens
  misc_RNA (1)...(19): siRNA sense strand
gcccauggcugccuuucuc

SEQ ID NO: 1514484 - RNA, 19 nt, Homo sapiens
  misc_RNA (1)...(19): siRNA sense strand
gcugcugccuucuucucua

SEQ ID NO: 1514485 - RNA, 19 nt, Homo sapiens
  misc_RNA (1)...(19): siRNA sense strand
ucuggaagccguacaucua

SEQ ID NO: 1514486 - RNA, 19 nt, Homo sapiens
  misc_RNA (1)...(19): siRNA sense strand
gcauuacagcuucuucuuc

SEQ ID NO: 1514487 - RNA, 19 nt, Homo sapiens
  misc_RNA (1)...(19): siRNA sense strand
gcuggcugcugccuucuuc

SEQ ID NO: 1514488 - RNA, 19 nt, Homo sapiens
  misc_RNA (1)...(19): siRNA sense strand
acaacgaggccgugaaugu

SEQ ID NO: 1514489 - RNA, 19 nt, Homo sapiens
  misc_RNA (1)...(19): siRNA sense strand
caacuuuucuggccucuuc

SEQ ID NO: 1514490 - RNA, 19 nt, Homo sapiens
  misc_RNA (1)...(19): siRNA sense strand
ccaggagccucagcuaucu

SEQ ID NO: 1514491 - RNA, 19 nt, Homo sapiens
  misc_RNA (1)...(19): siRNA sense strand
ucaccuaccucuccuucag

SEQ ID NO: 1514492 - RNA, 19 nt, Homo sapiens
  misc_RNA (1)...(19): siRNA sense strand
ccuacgcacuggacauuag

SEQ ID NO: 1514493 - RNA, 19 nt, Homo sapiens
  misc_RNA (1)...(19): siRNA sense strand
caacgaggccgugaauguc

SEQ ID NO: 1514494 - RNA, 19 nt, Homo sapiens
  misc_RNA (1)...(19): siRNA sense strand
cuguggcacuggacuauga

SEQ ID NO: 1514495 - RNA, 19 nt, Homo sapiens
  misc_RNA (1)...(19): siRNA sense strand
cuucuucucuaccuucaug

SEQ ID NO: 1514496 - RNA, 19 nt, Homo sapiens
  misc_RNA (1)...(19): siRNA sense strand
ugauccagcucuucucuac

SEQ ID NO: 1514497 - RNA, 19 nt, Homo sapiens
  misc_RNA (1)...(19): siRNA sense strand
gcauuggcuccugcuauaa

SEQ ID NO: 1514498 - RNA, 19 nt, Homo sapiens
  misc_RNA (1)...(19): siRNA sense strand
acaaguacauccagaaacc

SEQ ID NO: 1514499 - RNA, 19 nt, Homo sapiens
  misc_RNA (1)...(19): siRNA sense strand
cagcucuucucuaccacaa

SEQ ID NO: 1514500 - RNA, 19 nt, Homo sapiens
  misc_RNA (1)...(19): siRNA sense strand
gaccuggcgcuucuauuuc

SEQ ID NO: 1514501 - RNA, 19 nt, Homo sapiens
  misc_RNA (1)...(19): siRNA sense strand
gcagccagagccugucuuc

SEQ ID NO: 1514502 - RNA, 19 nt, Homo sapiens
  misc_RNA (1)...(19): siRNA sense strand
gcuccugcuauaacaagua

SEQ ID NO: 1514503 - RNA, 19 nt, Homo sapiens
  misc_RNA (1)...(19): siRNA sense strand
ggguggccguguaccaguu

SEQ ID NO: 1514504 - RNA, 19 nt, Homo sapiens
  misc_RNA (1)...(19): siRNA sense strand
ucugaguucuggcauuaca

SEQ ID NO: 1514505 - RNA, 19 nt, Homo sapiens
  misc_RNA (1)...(19): siRNA sense strand
cccgacggcccaucuauga

SEQ ID NO: 1514506 - RNA, 19 nt, Homo sapiens
  misc_RNA (1)...(19): siRNA sense strand
gccagguggucuucuuucu

SEQ ID NO: 1514507 - RNA, 19 nt, Homo sapiens
  misc_RNA (1)...(19): siRNA sense strand
guccuguggugcaucguau

SEQ ID NO: 1514508 - RNA, 19 nt, Homo sapiens
  misc_RNA (1)...(19): siRNA sense strand
uguggugcaucguaucuuc

SEQ ID NO: 1514509 - RNA, 19 nt, Homo sapiens
  misc_RNA (1)...(19): siRNA sense strand
gaugauccagcucuucucu

SEQ ID NO: 1514510 - RNA, 19 nt, Homo sapiens
  misc_RNA (1)...(19): siRNA sense strand
agcgcaaacuugaucagaa

SEQ ID NO: 1514511 - RNA, 19 nt, Homo sapiens
  misc_RNA (1)...(19): siRNA sense strand
uggaagccguacaucuaug

SEQ ID NO: 1514512 - RNA, 19 nt, Homo sapiens
  misc_RNA (1)...(19): siRNA sense strand
ggcauuacagcuucuucuu

SEQ ID NO: 1514513 - RNA, 19 nt, Homo sapiens
  misc_RNA (1)...(19): siRNA sense strand
ggccuacgcacuggacauu

SEQ ID NO: 1514514 - RNA, 19 nt, Homo sapiens
  misc_RNA (1)...(19): siRNA sense strand
gcaggccaagucugaguuc

SEQ ID NO: 1514515 - RNA, 19 nt, Homo sapiens
  misc_RNA (1)...(19): siRNA sense strand
ggaagccguacaucuaugc

SEQ ID NO: 1514516 - RNA, 19 nt, Homo sapiens
  misc_RNA (1)...(19): siRNA sense strand
cacacgcacuggccucaca

SEQ ID NO: 1514517 - RNA, 19 nt, Homo sapiens
  misc_RNA (1)...(19): siRNA sense strand
uggcacacuucuacuaugc

SEQ ID NO: 1514518 - RNA, 19 nt, Homo sapiens
  misc_RNA (1)...(19): siRNA sense strand
gaaagaagauguaugcuau

SEQ ID NO: 1514519 - RNA, 19 nt, Homo sapiens
  misc_RNA (1)...(19): siRNA sense strand
gauaguggauauuccuuua

SEQ ID NO: 1514520 - RNA, 19 nt, Homo sapiens
  misc_RNA (1)...(19): siRNA sense strand
ggauauuccuuuacacaua

SEQ ID NO: 1514521 - RNA, 19 nt, Homo sapiens
  misc_RNA (1)...(19): siRNA sense strand
gaauuaugcuguaucauug

SEQ ID NO: 1514522 - RNA, 19 nt, Homo sapiens
  misc_RNA (1)...(19): siRNA sense strand
gaagauguaugcuaugugu

SEQ ID NO: 1514523 - RNA, 19 nt, Homo sapiens
  misc_RNA (1)...(19): siRNA sense strand
gagauaauccuuccgaauu

SEQ ID NO: 1514524 - RNA, 19 nt, Homo sapiens
  misc_RNA (1)...(19): siRNA sense strand
gaauugggauguucagaga

SEQ ID NO: 1514525 - RNA, 19 nt, Homo sapiens
  misc_RNA (1)...(19): siRNA sense strand
gggaacaaauucuucguuu

SEQ ID NO: 1514526 - RNA, 19 nt, Homo sapiens
  misc_RNA (1)...(19): siRNA sense strand
gaaccauacuuuaacuuca

SEQ ID NO: 1514527 - RNA, 19 nt, Homo sapiens
  misc_RNA (1)...(19): siRNA sense strand
ggacauagcgucugugaag

SEQ ID NO: 1514528 - RNA, 19 nt, Homo sapiens
  misc_RNA (1)...(19): siRNA sense strand
gaaguucgaugucuuacuc

SEQ ID NO: 1514529 - RNA, 19 nt, Homo sapiens
  misc_RNA (1)...(19): siRNA sense strand
gauauaggcauucaagaaa

SEQ ID NO: 1514530 - RNA, 19 nt, Homo sapiens
  misc_RNA (1)...(19): siRNA sense strand
caagcaguauuaagaguaa

SEQ ID NO: 1514531 - RNA, 19 nt, Homo sapiens
  misc_RNA (1)...(19): siRNA sense strand
aagagaagauuacgaagaa

SEQ ID NO: 1514532 - RNA, 19 nt, Homo sapiens
  misc_RNA (1)...(19): siRNA sense strand
cagaagcuauugucuauuc

SEQ ID NO: 1514533 - RNA, 19 nt, Homo sapiens
  misc_RNA (1)...(19): siRNA sense strand
ucacugaaccauacuuuaa

SEQ ID NO: 1514534 - RNA, 19 nt, Homo sapiens
  misc_RNA (1)...(19): siRNA sense strand
cgaauuaugcuguaucauu

SEQ ID NO: 1514535 - RNA, 19 nt, Homo sapiens
  misc_RNA (1)...(19): siRNA sense strand
gagaugguguugaguggaa

SEQ ID NO: 1514536 - RNA, 19 nt, Homo sapiens
  misc_RNA (1)...(19): siRNA sense strand
ggauaaaugugggaggaaa

SEQ ID NO: 1514537 - RNA, 19 nt, Homo sapiens
  misc_RNA (1)...(19): siRNA sense strand
gaugaaacacaugugauua

SEQ ID NO: 1514538 - RNA, 19 nt, Homo sapiens
  misc_RNA (1)...(19): siRNA sense strand
gggaagagaugguguugag

SEQ ID NO: 1514539 - RNA, 19 nt, Homo sapiens
  misc_RNA (1)...(19): siRNA sense strand
agagacaaguuugggauua

SEQ ID NO: 1514540 - RNA, 19 nt, Homo sapiens
  misc_RNA (1)...(19): siRNA sense strand
aaaucuaccugaagaaaug

SEQ ID NO: 1514541 - RNA, 19 nt, Homo sapiens
  misc_RNA (1)...(19): siRNA sense strand
ggaaaacucuuaaccaauc

SEQ ID NO: 1514542 - RNA, 19 nt, Homo sapiens
  misc_RNA (1)...(19): siRNA sense strand
ggaugaaacacaugugauu

SEQ ID NO: 1514543 - RNA, 19 nt, Homo sapiens
  misc_RNA (1)...(19): siRNA sense strand
gcagcuacauguuauggau

SEQ ID NO: 1514544 - RNA, 19 nt, Homo sapiens
  misc_RNA (1)...(19): siRNA sense strand
gaaaaugugucgguuauuc

SEQ ID NO: 1514545 - RNA, 19 nt, Homo sapiens
  misc_RNA (1)...(19): siRNA sense strand
gaagauauggugguaacaa

SEQ ID NO: 1514546 - RNA, 19 nt, Homo sapiens
  misc_RNA (1)...(19): siRNA sense strand
gaaaugggaauuccagaag

SEQ ID NO: 1514547 - RNA, 19 nt, Homo sapiens
  misc_RNA (1)...(19): siRNA sense strand
caagagaagauuacgaaga

SEQ ID NO: 1514548 - RNA, 19 nt, Homo sapiens
  misc_RNA (1)...(19): siRNA sense strand
gaggaaaacucuuaaccaa

SEQ ID NO: 1514549 - RNA, 19 nt, Homo sapiens
  misc_RNA (1)...(19): siRNA sense strand
ugaaagaagauguaugcua

SEQ ID NO: 1514550 - RNA, 19 nt, Homo sapiens
  misc_RNA (1)...(19): siRNA sense strand
ucagaaguucgaugucuua

SEQ ID NO: 1514551 - RNA, 19 nt, Homo sapiens
  misc_RNA (1)...(19): siRNA sense strand
uaaccaaucaucuaaagga

SEQ ID NO: 1514552 - RNA, 19 nt, Homo sapiens
  misc_RNA (1)...(19): siRNA sense strand
gggaucggguuuacucaga

SEQ ID NO: 1514553 - RNA, 19 nt, Homo sapiens
  misc_RNA (1)...(19): siRNA sense strand
uccagaagcuauugucuau

SEQ ID NO: 1514554 - RNA, 19 nt, Homo sapiens
  misc_RNA (1)...(19): siRNA sense strand
acauggauauugcaaaguu

SEQ ID NO: 1514555 - RNA, 19 nt, Homo sapiens
  misc_RNA (1)...(19): siRNA sense strand
caaccagauagaugaaaua

SEQ ID NO: 1514556 - RNA, 19 nt, Homo sapiens
  misc_RNA (1)...(19): siRNA sense strand
uagcgucugugaagagaaa

SEQ ID NO: 1514557 - RNA, 19 nt, Homo sapiens
  misc_RNA (1)...(19): siRNA sense strand
cauagguauuuccgagaua

SEQ ID NO: 1514558 - RNA, 19 nt, Homo sapiens
  misc_RNA (1)...(19): siRNA sense strand
cgaccuuagugcuggauaa

SEQ ID NO: 1514559 - RNA, 19 nt, Homo sapiens
  misc_RNA (1)...(19): siRNA sense strand
ccaaccagauagaugaaau

SEQ ID NO: 1514560 - RNA, 19 nt, Homo sapiens
  misc_RNA (1)...(19): siRNA sense strand
cacauauaguuccuuauug

SEQ ID NO: 1514561 - RNA, 19 nt, Homo sapiens
  misc_RNA (1)...(19): siRNA sense strand
agacauggauauugcaaag

SEQ ID NO: 1514562 - RNA, 19 nt, Homo sapiens
  misc_RNA (1)...(19): siRNA sense strand
gaagaauaccaguuucaag

SEQ ID NO: 1514563 - RNA, 19 nt, Homo sapiens
  misc_RNA (1)...(19): siRNA sense strand
ugauauaggcauucaagaa

SEQ ID NO: 1514564 - RNA, 19 nt, Homo sapiens
  misc_RNA (1)...(19): siRNA sense strand
cagcacgucuuaaaacuuu

SEQ ID NO: 1514565 - RNA, 19 nt, Homo sapiens
  misc_RNA (1)...(19): siRNA sense strand
ggaucggguuuacucagaa

SEQ ID NO: 1514566 - RNA, 19 nt, Homo sapiens
  misc_RNA (1)...(19): siRNA sense strand
aaugagagauuugcuguuc

SEQ ID NO: 1514567 - RNA, 19 nt, Homo sapiens
  misc_RNA (1)...(19): siRNA sense strand
acaggcagcuacauguuau

SEQ ID NO: 1514568 - RNA, 19 nt, Homo sapiens
  misc_RNA (1)...(19): siRNA sense strand
agaagcaauuauucggaua

SEQ ID NO: 1514569 - RNA, 19 nt, Homo sapiens
  misc_RNA (1)...(19): siRNA sense strand
ccaguuucaagcaguauua

SEQ ID NO: 1514570 - RNA, 19 nt, Homo sapiens
  misc_RNA (1)...(19): siRNA sense strand
gauguucagagacaaguuu

SEQ ID NO: 1514571 - RNA, 19 nt, Homo sapiens
  misc_RNA (1)...(19): siRNA sense strand
ggauuuagggaucggguuu

SEQ ID NO: 1514572 - RNA, 19 nt, Homo sapiens
  misc_RNA (1)...(19): siRNA sense strand
ucaagcaguauuaagagua

SEQ ID NO: 1514573 - RNA, 19 nt, Homo sapiens
  misc_RNA (1)...(19): siRNA sense strand
gaaacacaugugauuaauc

SEQ ID NO: 1514574 - RNA, 19 nt, Homo sapiens
  misc_RNA (1)...(19): siRNA sense strand
ucaagugaaagaagaugua

SEQ ID NO: 1514575 - RNA, 19 nt, Homo sapiens
  misc_RNA (1)...(19): siRNA sense strand
cugaaaacccuauuacuua

SEQ ID NO: 1514576 - RNA, 19 nt, Homo sapiens
  misc_RNA (1)...(19): siRNA sense strand
gaaaggagaagaaaauaca

SEQ ID NO: 1514577 - RNA, 19 nt, Homo sapiens
  misc_RNA (1)...(19): siRNA sense strand
gagacaaguuugggauuac

SEQ ID NO: 1514578 - RNA, 19 nt, Homo sapiens
  misc_RNA (1)...(19): siRNA sense strand
aagaagauguaugcuaugu

SEQ ID NO: 1514579 - RNA, 19 nt, Homo sapiens
  misc_RNA (1)...(19): siRNA sense strand
uauuaucacugaaccauac

SEQ ID NO: 1514580 - RNA, 19 nt, Homo sapiens
  misc_RNA (1)...(19): siRNA sense strand
ugucgguuauuccuaauug

SEQ ID NO: 1514581 - RNA, 19 nt, Homo sapiens
  misc_RNA (1)...(19): siRNA sense strand
gacauagcgucugugaaga

SEQ ID NO: 1514582 - RNA, 19 nt, Homo sapiens
  misc_RNA (1)...(19): siRNA sense strand
gcuaugugucucaggauuu

SEQ ID NO: 1514583 - RNA, 19 nt, Homo sapiens
  misc_RNA (1)...(19): siRNA sense strand
guuccuuauuguagaagua

SEQ ID NO: 1514584 - RNA, 19 nt, Homo sapiens
  misc_RNA (1)...(19): siRNA sense strand
gaagcuauugucuauucaa

SEQ ID NO: 1514585 - RNA, 19 nt, Homo sapiens
  misc_RNA (1)...(19): siRNA sense strand
ggaaauacucuuuaauccu

SEQ ID NO: 1514586 - RNA, 19 nt, Homo sapiens
  misc_RNA (1)...(19): siRNA sense strand
uacaggcagcuacauguua

SEQ ID NO: 1514587 - RNA, 19 nt, Homo sapiens
  misc_RNA (1)...(19): siRNA sense strand
ggaauuccagaagcuauug

SEQ ID NO: 1514588 - RNA, 19 nt, Homo sapiens
  misc_RNA (1)...(19): siRNA sense strand
agacccuucuggacucuuu

SEQ ID NO: 1514589 - RNA, 19 nt, Homo sapiens
  misc_RNA (1)...(19): siRNA sense strand
ucagugcacauagguauuu

SEQ ID NO: 1514590 - RNA, 19 nt, Homo sapiens
  misc_RNA (1)...(19): siRNA sense strand
auagguauuuccgagauaa

SEQ ID NO: 1514591 - RNA, 19 nt, Homo sapiens
  misc_RNA (1)...(19): siRNA sense strand
cauagcgucugugaagaga

SEQ ID NO: 1514592 - RNA, 19 nt, Homo sapiens
  misc_RNA (1)...(19): siRNA sense strand
gggaauuccagaagcuauu

SEQ ID NO: 1514593 - RNA, 19 nt, Homo sapiens
  misc_RNA (1)...(19): siRNA sense strand
ccggaaauacucuuuaauc

SEQ ID NO: 1514594 - RNA, 19 nt, Homo sapiens
  misc_RNA (1)...(19): siRNA sense strand
ccuuagugcuggauaaugg

SEQ ID NO: 1514595 - RNA, 19 nt, Homo sapiens
  misc_RNA (1)...(19): siRNA sense strand
aaauggacauagcgucugu

SEQ ID NO: 1514596 - RNA, 19 nt, Homo sapiens
  misc_RNA (1)...(19): siRNA sense strand
gacuaugucuugccugacu

SEQ ID NO: 1514597 - RNA, 19 nt, Homo sapiens
  misc_RNA (1)...(19): siRNA sense strand
ggauauugcaaaguugaaa

SEQ ID NO: 1514598 - RNA, 19 nt, Homo sapiens
  misc_RNA (1)...(19): siRNA sense strand
guuucaagcaguauuaaga

SEQ ID NO: 1514599 - RNA, 19 nt, Homo sapiens
  misc_RNA (1)...(19): siRNA sense strand
aacaagagaagauuacgaa

SEQ ID NO: 1514600 - RNA, 19 nt, Homo sapiens
  misc_RNA (1)...(19): siRNA sense strand
gaucggguuuacucagaag

SEQ ID NO: 1514601 - RNA, 19 nt, Homo sapiens
  misc_RNA (1)...(19): siRNA sense strand
cggaaauacucuuuaaucc

SEQ ID NO: 1514602 - RNA, 19 nt, Homo sapiens
  misc_RNA (1)...(19): siRNA sense strand
uuccggaaauacucuuuaa

SEQ ID NO: 1514603 - RNA, 19 nt, Homo sapiens
  misc_RNA (1)...(19): siRNA sense strand
cgagauaauccuuccgaau

SEQ ID NO: 1514604 - RNA, 19 nt, Homo sapiens
  misc_RNA (1)...(19): siRNA sense strand
gauuaugauguuucuguug

SEQ ID NO: 1514605 - RNA, 19 nt, Homo sapiens
  misc_RNA (1)...(19): siRNA sense strand
caagggaagagaugguguu

SEQ ID NO: 1514606 - RNA, 19 nt, Homo sapiens
  misc_RNA (1)...(19): siRNA sense strand
aaaguugaaaggagaagaa

SEQ ID NO: 1514607 - RNA, 19 nt, Homo sapiens
  misc_RNA (1)...(19): siRNA sense strand
auagagacauggauauugc

SEQ ID NO: 1514608 - RNA, 19 nt, Homo sapiens
  misc_RNA (1)...(19): siRNA sense strand
uaguggauauuccuuuaca

SEQ ID NO: 1514609 - RNA, 19 nt, Homo sapiens
  misc_RNA (1)...(19): siRNA sense strand
uaugcuguaucauuguuga

SEQ ID NO: 1514610 - RNA, 19 nt, Homo sapiens
  misc_RNA (1)...(19): siRNA sense strand
auaccaguuucaagcagua

SEQ ID NO: 1514611 - RNA, 19 nt, Homo sapiens
  misc_RNA (1)...(19): siRNA sense strand
uaacaagagaagauuacga

SEQ ID NO: 1514612 - RNA, 19 nt, Homo sapiens
  misc_RNA (1)...(19): siRNA sense strand
gauuuagggaucggguuua

SEQ ID NO: 1514613 - RNA, 19 nt, Homo sapiens
  misc_RNA (1)...(19): siRNA sense strand
cauggauauugcaaaguug

SEQ ID NO: 1514614 - RNA, 19 nt, Homo sapiens
  misc_RNA (1)...(19): siRNA sense strand
uauagagacauggauauug

SEQ ID NO: 1514615 - RNA, 19 nt, Homo sapiens
  misc_RNA (1)...(19): siRNA sense strand
cuuaaccaaucaucuaaag

SEQ ID NO: 1514616 - RNA, 19 nt, Homo sapiens
  misc_RNA (1)...(19): siRNA sense strand
gaaaacucuuaaccaauca

SEQ ID NO: 1514617 - RNA, 19 nt, Homo sapiens
  misc_RNA (1)...(19): siRNA sense strand
agaaaugggaauuccagaa

SEQ ID NO: 1514618 - RNA, 19 nt, Homo sapiens
  misc_RNA (1)...(19): siRNA sense strand
ccaaaggcauccugcagua

SEQ ID NO: 1514619 - RNA, 19 nt, Homo sapiens
  misc_RNA (1)...(19): siRNA sense strand
gugcggaccuugcucaauu

SEQ ID NO: 1514620 - RNA, 19 nt, Homo sapiens
  misc_RNA (1)...(19): siRNA sense strand
gcacaguguugcugagaau

SEQ ID NO: 1514621 - RNA, 19 nt, Homo sapiens
  misc_RNA (1)...(19): siRNA sense strand
gaacaagaacacccugcua

SEQ ID NO: 1514622 - RNA, 19 nt, Homo sapiens
  misc_RNA (1)...(19): siRNA sense strand
gaucaacuaugccaccaau

SEQ ID NO: 1514623 - RNA, 19 nt, Homo sapiens
  misc_RNA (1)...(19): siRNA sense strand
uugagaagaugcucuauga

SEQ ID NO: 1514624 - RNA, 19 nt, Homo sapiens
  misc_RNA (1)...(19): siRNA sense strand
gaagucaccauaccuccua

SEQ ID NO: 1514625 - RNA, 19 nt, Homo sapiens
  misc_RNA (1)...(19): siRNA sense strand
caccauaccuccuacaaca

SEQ ID NO: 1514626 - RNA, 19 nt, Homo sapiens
  misc_RNA (1)...(19): siRNA sense strand
gugaugaauucuacucuga

SEQ ID NO: 1514627 - RNA, 19 nt, Homo sapiens
  misc_RNA (1)...(19): siRNA sense strand
gaaaauagccagcguguca

SEQ ID NO: 1514628 - RNA, 19 nt, Homo sapiens
  misc_RNA (1)...(19): siRNA sense strand
cgagaacaguggaaacaga

SEQ ID NO: 1514629 - RNA, 19 nt, Homo sapiens
  misc_RNA (1)...(19): siRNA sense strand
aagacaggcugaucaacua

SEQ ID NO: 1514630 - RNA, 19 nt, Homo sapiens
  misc_RNA (1)...(19): siRNA sense strand
gaagugcgacggucaguag

SEQ ID NO: 1514631 - RNA, 19 nt, Homo sapiens
  misc_RNA (1)...(19): siRNA sense strand
caagaacacccugcuagaa

SEQ ID NO: 1514632 - RNA, 19 nt, Homo sapiens
  misc_RNA (1)...(19): siRNA sense strand
gcugacugcugcccgcuuu

SEQ ID NO: 1514633 - RNA, 19 nt, Homo sapiens
  misc_RNA (1)...(19): siRNA sense strand
gaugcuggcugccuggaau

SEQ ID NO: 1514634 - RNA, 19 nt, Homo sapiens
  misc_RNA (1)...(19): siRNA sense strand
gagaacaguggaaacagaa

SEQ ID NO: 1514635 - RNA, 19 nt, Homo sapiens
  misc_RNA (1)...(19): siRNA sense strand
cacagaggcugguaacauc

SEQ ID NO: 1514636 - RNA, 19 nt, Homo sapiens
  misc_RNA (1)...(19): siRNA sense strand
gcucucuggugaugaauuc

SEQ ID NO: 1514637 - RNA, 19 nt, Homo sapiens
  misc_RNA (1)...(19): siRNA sense strand
cagcagauggccuugcaua

SEQ ID NO: 1514638 - RNA, 19 nt, Homo sapiens
  misc_RNA (1)...(19): siRNA sense strand
cagcugccuuuccugagua

SEQ ID NO: 1514639 - RNA, 19 nt, Homo sapiens
  misc_RNA (1)...(19): siRNA sense strand
cguccacucugucuacauu

SEQ ID NO: 1514640 - RNA, 19 nt, Homo sapiens
  misc_RNA (1)...(19): siRNA sense strand
acaauccuguggacuggua

SEQ ID NO: 1514641 - RNA, 19 nt, Homo sapiens
  misc_RNA (1)...(19): siRNA sense strand
cuaacaaggugcugauucu

SEQ ID NO: 1514642 - RNA, 19 nt, Homo sapiens
  misc_RNA (1)...(19): siRNA sense strand
aagaacacccugcuagaaa

SEQ ID NO: 1514643 - RNA, 19 nt, Homo sapiens
  misc_RNA (1)...(19): siRNA sense strand
ucacugaucccugcgaauu

SEQ ID NO: 1514644 - RNA, 19 nt, Homo sapiens
  misc_RNA (1)...(19): siRNA sense strand
gcauaugugugugagaauc

SEQ ID NO: 1514645 - RNA, 19 nt, Homo sapiens
  misc_RNA (1)...(19): siRNA sense strand
ugagggcuaugaugaggaa

SEQ ID NO: 1514646 - RNA, 19 nt, Homo sapiens
  misc_RNA (1)...(19): siRNA sense strand
caggccagcuccucaugaa

SEQ ID NO: 1514647 - RNA, 19 nt, Homo sapiens
  misc_RNA (1)...(19): siRNA sense strand
gaacaguggaaacagaaca

SEQ ID NO: 1514648 - RNA, 19 nt, Homo sapiens
  misc_RNA (1)...(19): siRNA sense strand
gacaaggccaggaaggaaa

SEQ ID NO: 1514649 - RNA, 19 nt, Homo sapiens
  misc_RNA (1)...(19): siRNA sense strand
gugaggacuuugugagugu

SEQ ID NO: 1514650 - RNA, 19 nt, Homo sapiens
  misc_RNA (1)...(19): siRNA sense strand
ggaaacagaacaagaacac

SEQ ID NO: 1514651 - RNA, 19 nt, Homo sapiens
  misc_RNA (1)...(19): siRNA sense strand
gcagcuggaugagggcuau

SEQ ID NO: 1514652 - RNA, 19 nt, Homo sapiens
  misc_RNA (1)...(19): siRNA sense strand
ugaagcggcacauguuuga

SEQ ID NO: 1514653 - RNA, 19 nt, Homo sapiens
  misc_RNA (1)...(19): siRNA sense strand
ccuacaacaugccuacaau

SEQ ID NO: 1514654 - RNA, 19 nt, Homo sapiens
  misc_RNA (1)...(19): siRNA sense strand
gcagagcccagcgccaauu

SEQ ID NO: 1514655 - RNA, 19 nt, Homo sapiens
  misc_RNA (1)...(19): siRNA sense strand
ggccuugcauacccugaaa

SEQ ID NO: 1514656 - RNA, 19 nt, Homo sapiens
  misc_RNA (1)...(19): siRNA sense strand
cgacaaggccaggaaggaa

SEQ ID NO: 1514657 - RNA, 19 nt, Homo sapiens
  misc_RNA (1)...(19): siRNA sense strand
ccaggccacugcauaugug

SEQ ID NO: 1514658 - RNA, 19 nt, Homo sapiens
  misc_RNA (1)...(19): siRNA sense strand
gcaccuggacagcaagaug

SEQ ID NO: 1514659 - RNA, 19 nt, Homo sapiens
  misc_RNA (1)...(19): siRNA sense strand
cugcauaugugugugagaa

SEQ ID NO: 1514660 - RNA, 19 nt, Homo sapiens
  misc_RNA (1)...(19): siRNA sense strand
gaaggacgaccaggaugga

SEQ ID NO: 1514661 - RNA, 19 nt, Homo sapiens
  misc_RNA (1)...(19): siRNA sense strand
caagacaggcugaucaacu

SEQ ID NO: 1514662 - RNA, 19 nt, Homo sapiens
  misc_RNA (1)...(19): siRNA sense strand
ggccugacguggacaaggu

SEQ ID NO: 1514663 - RNA, 19 nt, Homo sapiens
  misc_RNA (1)...(19): siRNA sense strand
ugagcuuccuguucuccua

SEQ ID NO: 1514664 - RNA, 19 nt, Homo sapiens
  misc_RNA (1)...(19): siRNA sense strand
ggugccacaugauggaaga

SEQ ID NO: 1514665 - RNA, 19 nt, Homo sapiens
  misc_RNA (1)...(19): siRNA sense strand
ccagcugccuuuccugagu

SEQ ID NO: 1514666 - RNA, 19 nt, Homo sapiens
  misc_RNA (1)...(19): siRNA sense strand
gggcuaugaugaggaauac

SEQ ID NO: 1514667 - RNA, 19 nt, Homo sapiens
  misc_RNA (1)...(19): siRNA sense strand
ucacagaggcugguaacau

SEQ ID NO: 1514668 - RNA, 19 nt, Homo sapiens
  misc_RNA (1)...(19): siRNA sense strand
ccacuggugccacaugaug

SEQ ID NO: 1514669 - RNA, 19 nt, Homo sapiens
  misc_RNA (1)...(19): siRNA sense strand
acaagugugugugccuauu

SEQ ID NO: 1514670 - RNA, 19 nt, Homo sapiens
  misc_RNA (1)...(19): siRNA sense strand
gugcgacggucaguaguuc

SEQ ID NO: 1514671 - RNA, 19 nt, Homo sapiens
  misc_RNA (1)...(19): siRNA sense strand
uggaugagggcuaugauga

SEQ ID NO: 1514672 - RNA, 19 nt, Homo sapiens
  misc_RNA (1)...(19): siRNA sense strand
caagugugugugccuauug

SEQ ID NO: 1514673 - RNA, 19 nt, Homo sapiens
  misc_RNA (1)...(19): siRNA sense strand
gauccugagcuuccuguuc

SEQ ID NO: 1514674 - RNA, 19 nt, Homo sapiens
  misc_RNA (1)...(19): siRNA sense strand
ggacuggauggacaagugu

SEQ ID NO: 1514675 - RNA, 19 nt, Homo sapiens
  misc_RNA (1)...(19): siRNA sense strand
cagcgccaauuccguguca

SEQ ID NO: 1514676 - RNA, 19 nt, Homo sapiens
  misc_RNA (1)...(19): siRNA sense strand
acaagaacacccugcuaga

SEQ ID NO: 1514677 - RNA, 19 nt, Homo sapiens
  misc_RNA (1)...(19): siRNA sense strand
cacugaucccugcgaauua

SEQ ID NO: 1514678 - RNA, 19 nt, Homo sapiens
  misc_RNA (1)...(19): siRNA sense strand
ccauaccuccuacaacaug

SEQ ID NO: 1514679 - RNA, 19 nt, Homo sapiens
  misc_RNA (1)...(19): siRNA sense strand
gaagcacuacggccucaca

SEQ ID NO: 1514680 - RNA, 19 nt, Homo sapiens
  misc_RNA (1)...(19): siRNA sense strand
ggccaagacaggcugauca

SEQ ID NO: 1514681 - RNA, 19 nt, Homo sapiens
  misc_RNA (1)...(19): siRNA sense strand
ccacugcauauguguguga

SEQ ID NO: 1514682 - RNA, 19 nt, Homo sapiens
  misc_RNA (1)...(19): siRNA sense strand
ucaacuaugccaccaaugg

SEQ ID NO: 1514683 - RNA, 19 nt, Homo sapiens
  misc_RNA (1)...(19): siRNA sense strand
gaauacgagaacaguggaa

SEQ ID NO: 1514684 - RNA, 19 nt, Homo sapiens
  misc_RNA (1)...(19): siRNA sense strand
aagugugugugccuauuga

SEQ ID NO: 1514685 - RNA, 19 nt, Homo sapiens
  misc_RNA (1)...(19): siRNA sense strand
gagcugcagggccagaaug

SEQ ID NO: 1514686 - RNA, 19 nt, Homo sapiens
  misc_RNA (1)...(19): siRNA sense strand
agaacacccugcuagaaaa

SEQ ID NO: 1514687 - RNA, 19 nt, Homo sapiens
  misc_RNA (1)...(19): siRNA sense strand
agaccaggccacugcauau

SEQ ID NO: 1514688 - RNA, 19 nt, Homo sapiens
  misc_RNA (1)...(19): siRNA sense strand
gcggcuacuucugcaguga

SEQ ID NO: 1514689 - RNA, 19 nt, Homo sapiens
  misc_RNA (1)...(19): siRNA sense strand
gccaagacaggcugaucaa

SEQ ID NO: 1514690 - RNA, 19 nt, Homo sapiens
  misc_RNA (1)...(19): siRNA sense strand
guggacaagguguacauga

SEQ ID NO: 1514691 - RNA, 19 nt, Homo sapiens
  misc_RNA (1)...(19): siRNA sense strand
ucaauucagggcuggagaa

SEQ ID NO: 1514692 - RNA, 19 nt, Homo sapiens
  misc_RNA (1)...(19): siRNA sense strand
ggaugagggcuaugaugag

SEQ ID NO: 1514693 - RNA, 19 nt, Homo sapiens
  misc_RNA (1)...(19): siRNA sense strand
aguggaaacagaacaagaa

SEQ ID NO: 1514694 - RNA, 19 nt, Homo sapiens
  misc_RNA (1)...(19): siRNA sense strand
caugccugcuggagggaaa

SEQ ID NO: 1514695 - RNA, 19 nt, Homo sapiens
  misc_RNA (1)...(19): siRNA sense strand
gaccaggccacugcauaug

SEQ ID NO: 1514696 - RNA, 19 nt, Homo sapiens
  misc_RNA (1)...(19): siRNA sense strand
aagaccaggccacugcaua

SEQ ID NO: 1514697 - RNA, 19 nt, Homo sapiens
  misc_RNA (1)...(19): siRNA sense strand
aggacuggauggacaagug

SEQ ID NO: 1514698 - RNA, 19 nt, Homo sapiens
  misc_RNA (1)...(19): siRNA sense strand
ccugaagcggcacauguuu

SEQ ID NO: 1514699 - RNA, 19 nt, Homo sapiens
  misc_RNA (1)...(19): siRNA sense strand
uugcauacccugaaaauga

SEQ ID NO: 1514700 - RNA, 19 nt, Homo sapiens
  misc_RNA (1)...(19): siRNA sense strand
auucagggcuggagaagcu

SEQ ID NO: 1514701 - RNA, 19 nt, Homo sapiens
  misc_RNA (1)...(19): siRNA sense strand
gaucggaaguucgcauaua

SEQ ID NO: 1514702 - RNA, 19 nt, Homo sapiens
  misc_RNA (1)...(19): siRNA sense strand
gaacaccacccuucacaau

SEQ ID NO: 1514703 - RNA, 19 nt, Homo sapiens
  misc_RNA (1)...(19): siRNA sense strand
gauaagcauugaucgcuau

SEQ ID NO: 1514704 - RNA, 19 nt, Homo sapiens
  misc_RNA (1)...(19): siRNA sense strand
gaaagaacaccacccuuca

SEQ ID NO: 1514705 - RNA, 19 nt, Homo sapiens
  misc_RNA (1)...(19): siRNA sense strand
gcaucuugcugaaugguuu

SEQ ID NO: 1514706 - RNA, 19 nt, Homo sapiens
  misc_RNA (1)...(19): siRNA sense strand
ccauaucacuugugcagaa

SEQ ID NO: 1514707 - RNA, 19 nt, Homo sapiens
  misc_RNA (1)...(19): siRNA sense strand
acaccacccuucacaauga

SEQ ID NO: 1514708 - RNA, 19 nt, Homo sapiens
  misc_RNA (1)...(19): siRNA sense strand
ccaagagagucacaauuca

SEQ ID NO: 1514709 - RNA, 19 nt, Homo sapiens
  misc_RNA (1)...(19): siRNA sense strand
ccagguacauccacaaauc

SEQ ID NO: 1514710 - RNA, 19 nt, Homo sapiens
  misc_RNA (1)...(19): siRNA sense strand
gaauaaaaccagcuucaua

SEQ ID NO: 1514711 - RNA, 19 nt, Homo sapiens
  misc_RNA (1)...(19): siRNA sense strand
gcaggcaauucauaaguca

SEQ ID NO: 1514712 - RNA, 19 nt, Homo sapiens
  misc_RNA (1)...(19): siRNA sense strand
aaacauaaccagagcauca

SEQ ID NO: 1514713 - RNA, 19 nt, Homo sapiens
  misc_RNA (1)...(19): siRNA sense strand
cggaaguucgcauauauua

SEQ ID NO: 1514714 - RNA, 19 nt, Homo sapiens
  misc_RNA (1)...(19): siRNA sense strand
gcaaacauguauacuucca

SEQ ID NO: 1514715 - RNA, 19 nt, Homo sapiens
  misc_RNA (1)...(19): siRNA sense strand
gaucauggcuguuuugucu

SEQ ID NO: 1514716 - RNA, 19 nt, Homo sapiens
  misc_RNA (1)...(19): siRNA sense strand
gccaagagagucacaauuc

SEQ ID NO: 1514717 - RNA, 19 nt, Homo sapiens
  misc_RNA (1)...(19): siRNA sense strand
ggugcuuuaucucauuaua

SEQ ID NO: 1514718 - RNA, 19 nt, Homo sapiens
  misc_RNA (1)...(19): siRNA sense strand
caaauggucagccaacaga

SEQ ID NO: 1514719 - RNA, 19 nt, Homo sapiens
  misc_RNA (1)...(19): siRNA sense strand
gacauuuccauuucgaaua

SEQ ID NO: 1514720 - RNA, 19 nt, Homo sapiens
  misc_RNA (1)...(19): siRNA sense strand
gugagaagaucggaaguuc

SEQ ID NO: 1514721 - RNA, 19 nt, Homo sapiens
  misc_RNA (1)...(19): siRNA sense strand
ugaagguggucaagccauu

SEQ ID NO: 1514722 - RNA, 19 nt, Homo sapiens
  misc_RNA (1)...(19): siRNA sense strand
gccuggauccaauaauuua

SEQ ID NO: 1514723 - RNA, 19 nt, Homo sapiens
  misc_RNA (1)...(19): siRNA sense strand
aaaccagcuucauauucua

SEQ ID NO: 1514724 - RNA, 19 nt, Homo sapiens
  misc_RNA (1)...(19): siRNA sense strand
caugacugcucaaaacuua

SEQ ID NO: 1514725 - RNA, 19 nt, Homo sapiens
  misc_RNA (1)...(19): siRNA sense strand
caacagaggacaauaucca

SEQ ID NO: 1514726 - RNA, 19 nt, Homo sapiens
  misc_RNA (1)...(19): siRNA sense strand
gcauugaucgcuaucugaa

SEQ ID NO: 1514727 - RNA, 19 nt, Homo sapiens
  misc_RNA (1)...(19): siRNA sense strand
gcagauacacuucaguuuu

SEQ ID NO: 1514728 - RNA, 19 nt, Homo sapiens
  misc_RNA (1)...(19): siRNA sense strand
gcagaauuccuuuuacuuu

SEQ ID NO: 1514729 - RNA, 19 nt, Homo sapiens
  misc_RNA (1)...(19): siRNA sense strand
augcaaacauguauacuuc

SEQ ID NO: 1514730 - RNA, 19 nt, Homo sapiens
  misc_RNA (1)...(19): siRNA sense strand
ggaaguucgcauauauuau

SEQ ID NO: 1514731 - RNA, 19 nt, Homo sapiens
  misc_RNA (1)...(19): siRNA sense strand
ucacgaagguuuuaucugu

SEQ ID NO: 1514732 - RNA, 19 nt, Homo sapiens
  misc_RNA (1)...(19): siRNA sense strand
gaagguggucaagccauuu

SEQ ID NO: 1514733 - RNA, 19 nt, Homo sapiens
  misc_RNA (1)...(19): siRNA sense strand
cagauacacuucaguuuug

SEQ ID NO: 1514734 - RNA, 19 nt, Homo sapiens
  misc_RNA (1)...(19): siRNA sense strand
ggagugaaagcaucagauc

SEQ ID NO: 1514735 - RNA, 19 nt, Homo sapiens
  misc_RNA (1)...(19): siRNA sense strand
cagaggacaauauccauga

SEQ ID NO: 1514736 - RNA, 19 nt, Homo sapiens
  misc_RNA (1)...(19): siRNA sense strand
ccggugcuuuaucucauua

SEQ ID NO: 1514737 - RNA, 19 nt, Homo sapiens
  misc_RNA (1)...(19): siRNA sense strand
acgcugacauuuccauuuc

SEQ ID NO: 1514738 - RNA, 19 nt, Homo sapiens
  misc_RNA (1)...(19): siRNA sense strand
gagcugcacggccaagaga

SEQ ID NO: 1514739 - RNA, 19 nt, Homo sapiens
  misc_RNA (1)...(19): siRNA sense strand
uugccuggauccaauaauu

SEQ ID NO: 1514740 - RNA, 19 nt, Homo sapiens
  misc_RNA (1)...(19): siRNA sense strand
uaucacuugugcagaauuc

SEQ ID NO: 1514741 - RNA, 19 nt, Homo sapiens
  misc_RNA (1)...(19): siRNA sense strand
acauagccauauccaggua

SEQ ID NO: 1514742 - RNA, 19 nt, Homo sapiens
  misc_RNA (1)...(19): siRNA sense strand
gcauacggcagucaccuau

SEQ ID NO: 1514743 - RNA, 19 nt, Homo sapiens
  misc_RNA (1)...(19): siRNA sense strand
acauuuccauuucgaauag

SEQ ID NO: 1514744 - RNA, 19 nt, Homo sapiens
  misc_RNA (1)...(19): siRNA sense strand
uuaccugcuuucuaccaua

SEQ ID NO: 1514745 - RNA, 19 nt, Homo sapiens
  misc_RNA (1)...(19): siRNA sense strand
ugauuauacugauguguag

SEQ ID NO: 1514746 - RNA, 19 nt, Homo sapiens
  misc_RNA (1)...(19): siRNA sense strand
auacggcagucaccuaugu

SEQ ID NO: 1514747 - RNA, 19 nt, Homo sapiens
  misc_RNA (1)...(19): siRNA sense strand
gcugacauuuccauuucga

SEQ ID NO: 1514748 - RNA, 19 nt, Homo sapiens
  misc_RNA (1)...(19): siRNA sense strand
gaaccaggagugaaagcau

SEQ ID NO: 1514749 - RNA, 19 nt, Homo sapiens
  misc_RNA (1)...(19): siRNA sense strand
ugauucugaucggauguua

SEQ ID NO: 1514750 - RNA, 19 nt, Homo sapiens
  misc_RNA (1)...(19): siRNA sense strand
uagacaggcuuuuagauga

SEQ ID NO: 1514751 - RNA, 19 nt, Homo sapiens
  misc_RNA (1)...(19): siRNA sense strand
cacaaugaauuugacacaa

SEQ ID NO: 1514752 - RNA, 19 nt, Homo sapiens
  misc_RNA (1)...(19): siRNA sense strand
gacgcugacauuuccauuu

SEQ ID NO: 1514753 - RNA, 19 nt, Homo sapiens
  misc_RNA (1)...(19): siRNA sense strand
caucagaucacugcaaagu

SEQ ID NO: 1514754 - RNA, 19 nt, Homo sapiens
  misc_RNA (1)...(19): siRNA sense strand
ucaagaaggcuguucaaaa

SEQ ID NO: 1514755 - RNA, 19 nt, Homo sapiens
  misc_RNA (1)...(19): siRNA sense strand
gagcaucaggguuguugug

SEQ ID NO: 1514756 - RNA, 19 nt, Homo sapiens
  misc_RNA (1)...(19): siRNA sense strand
gccggugcuuuaucucauu

SEQ ID NO: 1514757 - RNA, 19 nt, Homo sapiens
  misc_RNA (1)...(19): siRNA sense strand
gguugcagaccucauaaug

SEQ ID NO: 1514758 - RNA, 19 nt, Homo sapiens
  misc_RNA (1)...(19): siRNA sense strand
uuuauucucugcagauaca

SEQ ID NO: 1514759 - RNA, 19 nt, Homo sapiens
  misc_RNA (1)...(19): siRNA sense strand
gaugcaggauuuggaccuu

SEQ ID NO: 1514760 - RNA, 19 nt, Homo sapiens
  misc_RNA (1)...(19): siRNA sense strand
gcaauucauaagucaguca

SEQ ID NO: 1514761 - RNA, 19 nt, Homo sapiens
  misc_RNA (1)...(19): siRNA sense strand
ggccaagagagucacaauu

SEQ ID NO: 1514762 - RNA, 19 nt, Homo sapiens
  misc_RNA (1)...(19): siRNA sense strand
uaccugcuuucuaccauau

SEQ ID NO: 1514763 - RNA, 19 nt, Homo sapiens
  misc_RNA (1)...(19): siRNA sense strand
aguccaugaugcaggauuu

SEQ ID NO: 1514764 - RNA, 19 nt, Homo sapiens
  misc_RNA (1)...(19): siRNA sense strand
caacuugacgcuugcaaaa

SEQ ID NO: 1514765 - RNA, 19 nt, Homo sapiens
  misc_RNA (1)...(19): siRNA sense strand
agcaucagaucacugcaaa

SEQ ID NO: 1514766 - RNA, 19 nt, Homo sapiens
  misc_RNA (1)...(19): siRNA sense strand
gguuuuaucuguuuguguu

SEQ ID NO: 1514767 - RNA, 19 nt, Homo sapiens
  misc_RNA (1)...(19): siRNA sense strand
gggcugauaagcauugauc

SEQ ID NO: 1514768 - RNA, 19 nt, Homo sapiens
  misc_RNA (1)...(19): siRNA sense strand
aaaaccagcuucauauucu

SEQ ID NO: 1514769 - RNA, 19 nt, Homo sapiens
  misc_RNA (1)...(19): siRNA sense strand
ucacaaugaauuugacaca

SEQ ID NO: 1514770 - RNA, 19 nt, Homo sapiens
  misc_RNA (1)...(19): siRNA sense strand
aagcauugaucgcuaucug

SEQ ID NO: 1514771 - RNA, 19 nt, Homo sapiens
  misc_RNA (1)...(19): siRNA sense strand
ugacauuuccauuucgaau

SEQ ID NO: 1514772 - RNA, 19 nt, Homo sapiens
  misc_RNA (1)...(19): siRNA sense strand
gagugaaagcaucagauca

SEQ ID NO: 1514773 - RNA, 19 nt, Homo sapiens
  misc_RNA (1)...(19): siRNA sense strand
uuucauguguaggucauuu

SEQ ID NO: 1514774 - RNA, 19 nt, Homo sapiens
  misc_RNA (1)...(19): siRNA sense strand
gccaacagaggacaauauc

SEQ ID NO: 1514775 - RNA, 19 nt, Homo sapiens
  misc_RNA (1)...(19): siRNA sense strand
cauaucacuugugcagaau

SEQ ID NO: 1514776 - RNA, 19 nt, Homo sapiens
  misc_RNA (1)...(19): siRNA sense strand
cagcaggcaauucauaagu

SEQ ID NO: 1514777 - RNA, 19 nt, Homo sapiens
  misc_RNA (1)...(19): siRNA sense strand
caagagagucacaauucag

SEQ ID NO: 1514778 - RNA, 19 nt, Homo sapiens
  misc_RNA (1)...(19): siRNA sense strand
ucacuuagacaggcuuuua

SEQ ID NO: 1514779 - RNA, 19 nt, Homo sapiens
  misc_RNA (1)...(19): siRNA sense strand
gggacucucggauguacaa

SEQ ID NO: 1514780 - RNA, 19 nt, Homo sapiens
  misc_RNA (1)...(19): siRNA sense strand
gauuuggaccuugguacuu

SEQ ID NO: 1514781 - RNA, 19 nt, Homo sapiens
  misc_RNA (1)...(19): siRNA sense strand
ccuauauuacugcaaagaa

SEQ ID NO: 1514782 - RNA, 19 nt, Homo sapiens
  misc_RNA (1)...(19): siRNA sense strand
gccgaaagcgaaaacauaa

SEQ ID NO: 1514783 - RNA, 19 nt, Homo sapiens
  misc_RNA (1)...(19): siRNA sense strand
caucuugcugaaugguuua

SEQ ID NO: 1514784 - RNA, 19 nt, Homo sapiens
  misc_RNA (1)...(19): siRNA sense strand
cauuucgaauaguccauga

SEQ ID NO: 1514785 - RNA, 19 nt, Homo sapiens
  misc_RNA (1)...(19): siRNA sense strand
uaucagaaccaggagugaa

SEQ ID NO: 1514786 - RNA, 19 nt, Homo sapiens
  misc_RNA (1)...(19): siRNA sense strand
cguguuccuugggcugaua

SEQ ID NO: 1514787 - RNA, 19 nt, Homo sapiens
  misc_RNA (1)...(19): siRNA sense strand
ggaucuucuuccacauuag

SEQ ID NO: 1514788 - RNA, 19 nt, Homo sapiens
  misc_RNA (1)...(19): siRNA sense strand
aucggaaguucgcauauau

SEQ ID NO: 1514789 - RNA, 19 nt, Homo sapiens
  misc_RNA (1)...(19): siRNA sense strand
cugaaugguuuagcagugu

SEQ ID NO: 1514790 - RNA, 19 nt, Homo sapiens
  misc_RNA (1)...(19): siRNA sense strand
ggcauacggcagucaccua

SEQ ID NO: 1514791 - RNA, 19 nt, Homo sapiens
  misc_RNA (1)...(19): siRNA sense strand
uaaaaccagcuucauauuc

SEQ ID NO: 1514792 - RNA, 19 nt, Homo sapiens
  misc_RNA (1)...(19): siRNA sense strand
ucauggcuguuuugucuuu

SEQ ID NO: 1514793 - RNA, 19 nt, Homo sapiens
  misc_RNA (1)...(19): siRNA sense strand
gcaauaagcugguuuguuc

SEQ ID NO: 1514794 - RNA, 19 nt, Homo sapiens
  misc_RNA (1)...(19): siRNA sense strand
caacagcucugacuucuau

SEQ ID NO: 1514795 - RNA, 19 nt, Homo sapiens
  misc_RNA (1)...(19): siRNA sense strand
ggucaagacugaacuguga

SEQ ID NO: 1514796 - RNA, 19 nt, Homo sapiens
  misc_RNA (1)...(19): siRNA sense strand
caacagcagcagcaacuua

SEQ ID NO: 1514797 - RNA, 19 nt, Homo sapiens
  misc_RNA (1)...(19): siRNA sense strand
ucaugaggaucuauaagua

SEQ ID NO: 1514798 - RNA, 19 nt, Homo sapiens
  misc_RNA (1)...(19): siRNA sense strand
gcucugcuguggcccauuu

SEQ ID NO: 1514799 - RNA, 19 nt, Homo sapiens
  misc_RNA (1)...(19): siRNA sense strand
ucaacaagcagcacuauga

SEQ ID NO: 1514800 - RNA, 19 nt, Homo sapiens
  misc_RNA (1)...(19): siRNA sense strand
acgcagcgcuuuauugaug

SEQ ID NO: 1514801 - RNA, 19 nt, Homo sapiens
  misc_RNA (1)...(19): siRNA sense strand
ucacgcagcgcuuuauuga

SEQ ID NO: 1514802 - RNA, 19 nt, Homo sapiens
  misc_RNA (1)...(19): siRNA sense strand
uggaggaggucauggagaa

SEQ ID NO: 1514803 - RNA, 19 nt, Homo sapiens
  misc_RNA (1)...(19): siRNA sense strand
caucugcccugucaacauc

SEQ ID NO: 1514804 - RNA, 19 nt, Homo sapiens
  misc_RNA (1)...(19): siRNA sense strand
ccaacauccuuaccacaga

SEQ ID NO: 1514805 - RNA, 19 nt, Homo sapiens
  misc_RNA (1)...(19): siRNA sense strand
caacauccuuaccacagau

SEQ ID NO: 1514806 - RNA, 19 nt, Homo sapiens
  misc_RNA (1)...(19): siRNA sense strand
cagcagcaacuuaaccuuu

SEQ ID NO: 1514807 - RNA, 19 nt, Homo sapiens
  misc_RNA (1)...(19): siRNA sense strand
gggugcagaucgacgugua

SEQ ID NO: 1514808 - RNA, 19 nt, Homo sapiens
  misc_RNA (1)...(19): siRNA sense strand
gggaguccaccuuuguuaa

SEQ ID NO: 1514809 - RNA, 19 nt, Homo sapiens
  misc_RNA (1)...(19): siRNA sense strand
uguaccagguggcguauga

SEQ ID NO: 1514810 - RNA, 19 nt, Homo sapiens
  misc_RNA (1)...(19): siRNA sense strand
gcucugacuucuaugacau

SEQ ID NO: 1514811 - RNA, 19 nt, Homo sapiens
  misc_RNA (1)...(19): siRNA sense strand
uggaggagacugacuggua

SEQ ID NO: 1514812 - RNA, 19 nt, Homo sapiens
  misc_RNA (1)...(19): siRNA sense strand
guaccaggcccacggcuau

SEQ ID NO: 1514813 - RNA, 19 nt, Homo sapiens
  misc_RNA (1)...(19): siRNA sense strand
ugcacaaggucaagacuga

SEQ ID NO: 1514814 - RNA, 19 nt, Homo sapiens
  misc_RNA (1)...(19): siRNA sense strand
gcaggagccaugucacuag

SEQ ID NO: 1514815 - RNA, 19 nt, Homo sapiens
  misc_RNA (1)...(19): siRNA sense strand
gcaacagcucugacuucua

SEQ ID NO: 1514816 - RNA, 19 nt, Homo sapiens
  misc_RNA (1)...(19): siRNA sense strand
ggcaacagcucugacuucu

SEQ ID NO: 1514817 - RNA, 19 nt, Homo sapiens
  misc_RNA (1)...(19): siRNA sense strand
uggagaaguucaugaggau

SEQ ID NO: 1514818 - RNA, 19 nt, Homo sapiens
  misc_RNA (1)...(19): siRNA sense strand
ccagguggcguaugagaau

SEQ ID NO: 1514819 - RNA, 19 nt, Homo sapiens
  misc_RNA (1)...(19): siRNA sense strand
caacaucugcccugucaac

SEQ ID NO: 1514820 - RNA, 19 nt, Homo sapiens
  misc_RNA (1)...(19): siRNA sense strand
gagaaguucaugaggaucu

SEQ ID NO: 1514821 - RNA, 19 nt, Homo sapiens
  misc_RNA (1)...(19): siRNA sense strand
uaacaugacccagcacucu

SEQ ID NO: 1514822 - RNA, 19 nt, Homo sapiens
  misc_RNA (1)...(19): siRNA sense strand
gaguccaccuuuguuaaca

SEQ ID NO: 1514823 - RNA, 19 nt, Homo sapiens
  misc_RNA (1)...(19): siRNA sense strand
ggcaauaagcugguuuguu

SEQ ID NO: 1514824 - RNA, 19 nt, Homo sapiens
  misc_RNA (1)...(19): siRNA sense strand
gcacaaggucaagacugaa

SEQ ID NO: 1514825 - RNA, 19 nt, Homo sapiens
  misc_RNA (1)...(19): siRNA sense strand
gcugguuuguuccgguuug

SEQ ID NO: 1514826 - RNA, 19 nt, Homo sapiens
  misc_RNA (1)...(19): siRNA sense strand
gacaacagcagcagcaacu

SEQ ID NO: 1514827 - RNA, 19 nt, Homo sapiens
  misc_RNA (1)...(19): siRNA sense strand
ggaccuagacaagauugau

SEQ ID NO: 1514828 - RNA, 19 nt, Homo sapiens
  misc_RNA (1)...(19): siRNA sense strand
agcagcaacuuaaccuuug

SEQ ID NO: 1514829 - RNA, 19 nt, Homo sapiens
  misc_RNA (1)...(19): siRNA sense strand
caacaagcagcacuaugag

SEQ ID NO: 1514830 - RNA, 19 nt, Homo sapiens
  misc_RNA (1)...(19): siRNA sense strand
gaccucgggugcagaucga

SEQ ID NO: 1514831 - RNA, 19 nt, Homo sapiens
  misc_RNA (1)...(19): siRNA sense strand
ggaguccaccuuuguuaac

SEQ ID NO: 1514832 - RNA, 19 nt, Homo sapiens
  misc_RNA (1)...(19): siRNA sense strand
guaccaggaccuagacaag

SEQ ID NO: 1514833 - RNA, 19 nt, Homo sapiens
  misc_RNA (1)...(19): siRNA sense strand
ccucaacucguccuacuuc

SEQ ID NO: 1514834 - RNA, 19 nt, Homo sapiens
  misc_RNA (1)...(19): siRNA sense strand
agaaguucaugaggaucua

SEQ ID NO: 1514835 - RNA, 19 nt, Homo sapiens
  misc_RNA (1)...(19): siRNA sense strand
aagauuugaugcacaaggu

SEQ ID NO: 1514836 - RNA, 19 nt, Homo sapiens
  misc_RNA (1)...(19): siRNA sense strand
uggccuugcuggcuuacaa

SEQ ID NO: 1514837 - RNA, 19 nt, Homo sapiens
  misc_RNA (1)...(19): siRNA sense strand
agaucgacguguacgagaa

SEQ ID NO: 1514838 - RNA, 19 nt, Homo sapiens
  misc_RNA (1)...(19): siRNA sense strand
gcagcgcuuuauugaugau

SEQ ID NO: 1514839 - RNA, 19 nt, Homo sapiens
  misc_RNA (1)...(19): siRNA sense strand
gaggcaauaagcugguuug

SEQ ID NO: 1514840 - RNA, 19 nt, Homo sapiens
  misc_RNA (1)...(19): siRNA sense strand
cagcucuucuaccucaaug

SEQ ID NO: 1514841 - RNA, 19 nt, Homo sapiens
  misc_RNA (1)...(19): siRNA sense strand
ccacagauuuccccagcuu

SEQ ID NO: 1514842 - RNA, 19 nt, Homo sapiens
  misc_RNA (1)...(19): siRNA sense strand
aacagcagcagcaacuuaa

SEQ ID NO: 1514843 - RNA, 19 nt, Homo sapiens
  misc_RNA (1)...(19): siRNA sense strand
caccaaggccaaugugauc

SEQ ID NO: 1514844 - RNA, 19 nt, Homo sapiens
  misc_RNA (1)...(19): siRNA sense strand
guccaccuuuguuaacaug

SEQ ID NO: 1514845 - RNA, 19 nt, Homo sapiens
  misc_RNA (1)...(19): siRNA sense strand
gguaccugcugaaccucuu

SEQ ID NO: 1514846 - RNA, 19 nt, Homo sapiens
  misc_RNA (1)...(19): siRNA sense strand
cuuuauugaugaugucguu

SEQ ID NO: 1514847 - RNA, 19 nt, Homo sapiens
  misc_RNA (1)...(19): siRNA sense strand
ggaggcaauaagcugguuu

SEQ ID NO: 1514848 - RNA, 19 nt, Homo sapiens
  misc_RNA (1)...(19): siRNA sense strand
ccuguggucuguggaagga

SEQ ID NO: 1514849 - RNA, 19 nt, Homo sapiens
  misc_RNA (1)...(19): siRNA sense strand
accaggaccuagacaagau

SEQ ID NO: 1514850 - RNA, 19 nt, Homo sapiens
  misc_RNA (1)...(19): siRNA sense strand
gaucgacguguacgagaag

SEQ ID NO: 1514851 - RNA, 19 nt, Homo sapiens
  misc_RNA (1)...(19): siRNA sense strand
agaaugagguaggcaacag

SEQ ID NO: 1514852 - RNA, 19 nt, Homo sapiens
  misc_RNA (1)...(19): siRNA sense strand
gcgcuuuauugaugauguc

SEQ ID NO: 1514853 - RNA, 19 nt, Homo sapiens
  misc_RNA (1)...(19): siRNA sense strand
gaaguucaugaggaucuau

SEQ ID NO: 1514854 - RNA, 19 nt, Homo sapiens
  misc_RNA (1)...(19): siRNA sense strand
gaccuagacaagauugauc

SEQ ID NO: 1514855 - RNA, 19 nt, Homo sapiens
  misc_RNA (1)...(19): siRNA sense strand
gagaaugagguaggcaaca

SEQ ID NO: 1514856 - RNA, 19 nt, Homo sapiens
  misc_RNA (1)...(19): siRNA sense strand
ccaucucagucaacaagca

SEQ ID NO: 1514857 - RNA, 19 nt, Homo sapiens
  misc_RNA (1)...(19): siRNA sense strand
caacaagaauuaccaauca

SEQ ID NO: 1514858 - RNA, 19 nt, Homo sapiens
  misc_RNA (1)...(19): siRNA sense strand
caaugaagcuggaguugaa

SEQ ID NO: 1514859 - RNA, 19 nt, Homo sapiens
  misc_RNA (1)...(19): siRNA sense strand
gaagaaauuuacaccaaca

SEQ ID NO: 1514860 - RNA, 19 nt, Homo sapiens
  misc_RNA (1)...(19): siRNA sense strand
gcugagggcuucauugaug

SEQ ID NO: 1514861 - RNA, 19 nt, Homo sapiens
  misc_RNA (1)...(19): siRNA sense strand
gagcuuugcugacaucuuc

SEQ ID NO: 1514862 - RNA, 19 nt, Homo sapiens
  misc_RNA (1)...(19): siRNA sense strand
ccaaucagguugaacaaga

SEQ ID NO: 1514863 - RNA, 19 nt, Homo sapiens
  misc_RNA (1)...(19): siRNA sense strand
gaagacaucgccaguccua

SEQ ID NO: 1514864 - RNA, 19 nt, Homo sapiens
  misc_RNA (1)...(19): siRNA sense strand
gaggagggcccuucacaaa

SEQ ID NO: 1514865 - RNA, 19 nt, Homo sapiens
  misc_RNA (1)...(19): siRNA sense strand
gaaauuuacaccaacaaga

SEQ ID NO: 1514866 - RNA, 19 nt, Homo sapiens
  misc_RNA (1)...(19): siRNA sense strand
gaguucagcuuggaagaaa

SEQ ID NO: 1514867 - RNA, 19 nt, Homo sapiens
  misc_RNA (1)...(19): siRNA sense strand
gagcugagcccaugaggau

SEQ ID NO: 1514868 - RNA, 19 nt, Homo sapiens
  misc_RNA (1)...(19): siRNA sense strand
gaacucaggaccacaauac

SEQ ID NO: 1514869 - RNA, 19 nt, Homo sapiens
  misc_RNA (1)...(19): siRNA sense strand
ggagagcuuugcugacauc

SEQ ID NO: 1514870 - RNA, 19 nt, Homo sapiens
  misc_RNA (1)...(19): siRNA sense strand
uggaagaaauuuacaccaa

SEQ ID NO: 1514871 - RNA, 19 nt, Homo sapiens
  misc_RNA (1)...(19): siRNA sense strand
ggacuguuccucccaaugu

SEQ ID NO: 1514872 - RNA, 19 nt, Homo sapiens
  misc_RNA (1)...(19): siRNA sense strand
aaagguuucucgauucaga

SEQ ID NO: 1514873 - RNA, 19 nt, Homo sapiens
  misc_RNA (1)...(19): siRNA sense strand
caaucagguugaacaagaa

SEQ ID NO: 1514874 - RNA, 19 nt, Homo sapiens
  misc_RNA (1)...(19): siRNA sense strand
gaagaugucauggcuguuc

SEQ ID NO: 1514875 - RNA, 19 nt, Homo sapiens
  misc_RNA (1)...(19): siRNA sense strand
gccucugacucgagcauua

SEQ ID NO: 1514876 - RNA, 19 nt, Homo sapiens
  misc_RNA (1)...(19): siRNA sense strand
gcaaugggacucugauuuu

SEQ ID NO: 1514877 - RNA, 19 nt, Homo sapiens
  misc_RNA (1)...(19): siRNA sense strand
cagcuaaaccuuacaccaa

SEQ ID NO: 1514878 - RNA, 19 nt, Homo sapiens
  misc_RNA (1)...(19): siRNA sense strand
gcuaaaccuuacaccaaug

SEQ ID NO: 1514879 - RNA, 19 nt, Homo sapiens
  misc_RNA (1)...(19): siRNA sense strand
caucaucccagcacaaaga

SEQ ID NO: 1514880 - RNA, 19 nt, Homo sapiens
  misc_RNA (1)...(19): siRNA sense strand
ccaccaccguccagccuuu

SEQ ID NO: 1514881 - RNA, 19 nt, Homo sapiens
  misc_RNA (1)...(19): siRNA sense strand
ggaggaagaaacaguagau

SEQ ID NO: 1514882 - RNA, 19 nt, Homo sapiens
  misc_RNA (1)...(19): siRNA sense strand
ggacugccucgaccaauca

SEQ ID NO: 1514883 - RNA, 19 nt, Homo sapiens
  misc_RNA (1)...(19): siRNA sense strand
caaccaggaggaccuuuga

SEQ ID NO: 1514884 - RNA, 19 nt, Homo sapiens
  misc_RNA (1)...(19): siRNA sense strand
gggacugccucgaccaauc

SEQ ID NO: 1514885 - RNA, 19 nt, Homo sapiens
  misc_RNA (1)...(19): siRNA sense strand
cagcagccuuccucgauca

SEQ ID NO: 1514886 - RNA, 19 nt, Homo sapiens
  misc_RNA (1)...(19): siRNA sense strand
ggaguucagcuuggaagaa

SEQ ID NO: 1514887 - RNA, 19 nt, Homo sapiens
  misc_RNA (1)...(19): siRNA sense strand
ccaacaagaauuaccaauc

SEQ ID NO: 1514888 - RNA, 19 nt, Homo sapiens
  misc_RNA (1)...(19): siRNA sense strand
gacagcagccuuccucgau

SEQ ID NO: 1514889 - RNA, 19 nt, Homo sapiens
  misc_RNA (1)...(19): siRNA sense strand
ggagggcccuucacaaaag

SEQ ID NO: 1514890 - RNA, 19 nt, Homo sapiens
  misc_RNA (1)...(19): siRNA sense strand
ggaggaccuuugagaccau

SEQ ID NO: 1514891 - RNA, 19 nt, Homo sapiens
  misc_RNA (1)...(19): siRNA sense strand
gaaggaguucagcuuggaa

SEQ ID NO: 1514892 - RNA, 19 nt, Homo sapiens
  misc_RNA (1)...(19): siRNA sense strand
agaccaagaccaugggaaa

SEQ ID NO: 1514893 - RNA, 19 nt, Homo sapiens
  misc_RNA (1)...(19): siRNA sense strand
ccaaugaagcuggaguuga

SEQ ID NO: 1514894 - RNA, 19 nt, Homo sapiens
  misc_RNA (1)...(19): siRNA sense strand
agacaucgccaguccuaga

SEQ ID NO: 1514895 - RNA, 19 nt, Homo sapiens
  misc_RNA (1)...(19): siRNA sense strand
agaaggaguucagcuugga

SEQ ID NO: 1514896 - RNA, 19 nt, Homo sapiens
  misc_RNA (1)...(19): siRNA sense strand
cuggagagcuuugcugaca

SEQ ID NO: 1514897 - RNA, 19 nt, Homo sapiens
  misc_RNA (1)...(19): siRNA sense strand
guucagcuuggaagaaauu

SEQ ID NO: 1514898 - RNA, 19 nt, Homo sapiens
  misc_RNA (1)...(19): siRNA sense strand
ccacagcuaccaucaggau

SEQ ID NO: 1514899 - RNA, 19 nt, Homo sapiens
  misc_RNA (1)...(19): siRNA sense strand
ggaccaggugcuuucagaa

SEQ ID NO: 1514900 - RNA, 19 nt, Homo sapiens
  misc_RNA (1)...(19): siRNA sense strand
ccgcugagggcuucauuga

SEQ ID NO: 1514901 - RNA, 19 nt, Homo sapiens
  misc_RNA (1)...(19): siRNA sense strand
cgaccaaucagguugaaca

SEQ ID NO: 1514902 - RNA, 19 nt, Homo sapiens
  misc_RNA (1)...(19): siRNA sense strand
acaagaaggaguucagcuu

SEQ ID NO: 1514903 - RNA, 19 nt, Homo sapiens
  misc_RNA (1)...(19): siRNA sense strand
cgcaaugggacucugauuu

SEQ ID NO: 1514904 - RNA, 19 nt, Homo sapiens
  misc_RNA (1)...(19): siRNA sense strand
ccuuugagaccaucuuuga

SEQ ID NO: 1514905 - RNA, 19 nt, Homo sapiens
  misc_RNA (1)...(19): siRNA sense strand
uaccacagcaccacagcua

SEQ ID NO: 1514906 - RNA, 19 nt, Homo sapiens
  misc_RNA (1)...(19): siRNA sense strand
ccaagaccaugggaaaggu

SEQ ID NO: 1514907 - RNA, 19 nt, Homo sapiens
  misc_RNA (1)...(19): siRNA sense strand
ggcccugucuccggaaaga

SEQ ID NO: 1514908 - RNA, 19 nt, Homo sapiens
  misc_RNA (1)...(19): siRNA sense strand
ccucaaagcagaccuccau

SEQ ID NO: 1514909 - RNA, 19 nt, Homo sapiens
  misc_RNA (1)...(19): siRNA sense strand
gcugagcccaugaggauag

SEQ ID NO: 1514910 - RNA, 19 nt, Homo sapiens
  misc_RNA (1)...(19): siRNA sense strand
gagcgcaaugggacucuga

SEQ ID NO: 1514911 - RNA, 19 nt, Homo sapiens
  misc_RNA (1)...(19): siRNA sense strand
gaccuuugagaccaucuuu

SEQ ID NO: 1514912 - RNA, 19 nt, Homo sapiens
  misc_RNA (1)...(19): siRNA sense strand
cguccucagcuaaaccuua

SEQ ID NO: 1514913 - RNA, 19 nt, Homo sapiens
  misc_RNA (1)...(19): siRNA sense strand
gagccaagagccucaaagg

SEQ ID NO: 1514914 - RNA, 19 nt, Homo sapiens
  misc_RNA (1)...(19): siRNA sense strand
cgaacucaggaccacaaua

SEQ ID NO: 1514915 - RNA, 19 nt, Homo sapiens
  misc_RNA (1)...(19): siRNA sense strand
ggugcuagaagaugucaug

SEQ ID NO: 1514916 - RNA, 19 nt, Homo sapiens
  misc_RNA (1)...(19): siRNA sense strand
guccucagcuaaaccuuac

SEQ ID NO: 1514917 - RNA, 19 nt, Homo sapiens
  misc_RNA (1)...(19): siRNA sense strand
gcgcaaugggacucugauu

SEQ ID NO: 1514918 - RNA, 19 nt, Homo sapiens
  misc_RNA (1)...(19): siRNA sense strand
caaagagcugagcccauga

SEQ ID NO: 1514919 - RNA, 19 nt, Homo sapiens
  misc_RNA (1)...(19): siRNA sense strand
gaccaaucagguugaacaa

SEQ ID NO: 1514920 - RNA, 19 nt, Homo sapiens
  misc_RNA (1)...(19): siRNA sense strand
gaagcuggaguugaagauc

SEQ ID NO: 1514921 - RNA, 19 nt, Homo sapiens
  misc_RNA (1)...(19): siRNA sense strand
ccuggaggaagaaacagua

SEQ ID NO: 1514922 - RNA, 19 nt, Homo sapiens
  misc_RNA (1)...(19): siRNA sense strand
gacuguuccucccaaugug

SEQ ID NO: 1514923 - RNA, 19 nt, Homo sapiens
  misc_RNA (1)...(19): siRNA sense strand
cagcuuggaagaaauuuac

SEQ ID NO: 1514924 - RNA, 19 nt, Homo sapiens
  misc_RNA (1)...(19): siRNA sense strand
ucagcuuggaagaaauuua

SEQ ID NO: 1514925 - RNA, 19 nt, Homo sapiens
  misc_RNA (1)...(19): siRNA sense strand
agcuaaaccuuacaccaau

SEQ ID NO: 1514926 - RNA, 19 nt, Homo sapiens
  misc_RNA (1)...(19): siRNA sense strand
aggaccaggugcuuucaga

SEQ ID NO: 1514927 - RNA, 19 nt, Homo sapiens
  misc_RNA (1)...(19): siRNA sense strand
cagaggagggcccuucaca

SEQ ID NO: 1514928 - RNA, 19 nt, Homo sapiens
  misc_RNA (1)...(19): siRNA sense strand
caaagggaaggagccaaga

SEQ ID NO: 1514929 - RNA, 19 nt, Homo sapiens
  misc_RNA (1)...(19): siRNA sense strand
gagcccaugaggauaguuc

SEQ ID NO: 1514930 - RNA, 19 nt, Homo sapiens
  misc_RNA (1)...(19): siRNA sense strand
gguugaacaagaaggaguu

SEQ ID NO: 1514931 - RNA, 19 nt, Homo sapiens
  misc_RNA (1)...(19): siRNA sense strand
gaccaggugcuuucagaac

SEQ ID NO: 1514932 - RNA, 19 nt, Homo sapiens
  misc_RNA (1)...(19): siRNA sense strand
gaacaagacgaauuugaua

SEQ ID NO: 1514933 - RNA, 19 nt, Homo sapiens
  misc_RNA (1)...(19): siRNA sense strand
gacuagcucuggauuauuu

SEQ ID NO: 1514934 - RNA, 19 nt, Homo sapiens
  misc_RNA (1)...(19): siRNA sense strand
ccaacaaccugguccauau

SEQ ID NO: 1514935 - RNA, 19 nt, Homo sapiens
  misc_RNA (1)...(19): siRNA sense strand
gaagaggaguuugaagaug

SEQ ID NO: 1514936 - RNA, 19 nt, Homo sapiens
  misc_RNA (1)...(19): siRNA sense strand
gaagcagauuggaguguuu

SEQ ID NO: 1514937 - RNA, 19 nt, Homo sapiens
  misc_RNA (1)...(19): siRNA sense strand
ugacagaagugcucagaga

SEQ ID NO: 1514938 - RNA, 19 nt, Homo sapiens
  misc_RNA (1)...(19): siRNA sense strand
gcagcaaguugguggcuuu

SEQ ID NO: 1514939 - RNA, 19 nt, Homo sapiens
  misc_RNA (1)...(19): siRNA sense strand
ccacaaagcggguaucaug

SEQ ID NO: 1514940 - RNA, 19 nt, Homo sapiens
  misc_RNA (1)...(19): siRNA sense strand
gaacagcacagaaccuaga

SEQ ID NO: 1514941 - RNA, 19 nt, Homo sapiens
  misc_RNA (1)...(19): siRNA sense strand
gcagagaaccgguuuacug

SEQ ID NO: 1514942 - RNA, 19 nt, Homo sapiens
  misc_RNA (1)...(19): siRNA sense strand
ggagaagucuggaggacau

SEQ ID NO: 1514943 - RNA, 19 nt, Homo sapiens
  misc_RNA (1)...(19): siRNA sense strand
gcgggaggguucaguauug

SEQ ID NO: 1514944 - RNA, 19 nt, Homo sapiens
  misc_RNA (1)...(19): siRNA sense strand
aagaggaguuugaagauga

SEQ ID NO: 1514945 - RNA, 19 nt, Homo sapiens
  misc_RNA (1)...(19): siRNA sense strand
ccaaguuccugguuaagug

SEQ ID NO: 1514946 - RNA, 19 nt, Homo sapiens
  misc_RNA (1)...(19): siRNA sense strand
gaagcuguuugcuguggaa

SEQ ID NO: 1514947 - RNA, 19 nt, Homo sapiens
  misc_RNA (1)...(19): siRNA sense strand
ggaagaggaguuugaagau

SEQ ID NO: 1514948 - RNA, 19 nt, Homo sapiens
  misc_RNA (1)...(19): siRNA sense strand
gaguggaucuugccagaag

SEQ ID NO: 1514949 - RNA, 19 nt, Homo sapiens
  misc_RNA (1)...(19): siRNA sense strand
gcagugaggccauaccaau

SEQ ID NO: 1514950 - RNA, 19 nt, Homo sapiens
  misc_RNA (1)...(19): siRNA sense strand
uggauuauuuccucggaua

SEQ ID NO: 1514951 - RNA, 19 nt, Homo sapiens
  misc_RNA (1)...(19): siRNA sense strand
acaaccugguccauauuua

SEQ ID NO: 1514952 - RNA, 19 nt, Homo sapiens
  misc_RNA (1)...(19): siRNA sense strand
gaagagugacagugacaga

SEQ ID NO: 1514953 - RNA, 19 nt, Homo sapiens
  misc_RNA (1)...(19): siRNA sense strand
gcaaguugguggcuuugag

SEQ ID NO: 1514954 - RNA, 19 nt, Homo sapiens
  misc_RNA (1)...(19): siRNA sense strand
gauccugucauccaaugua

SEQ ID NO: 1514955 - RNA, 19 nt, Homo sapiens
  misc_RNA (1)...(19): siRNA sense strand
ccagggagcucugcagaca

SEQ ID NO: 1514956 - RNA, 19 nt, Homo sapiens
  misc_RNA (1)...(19): siRNA sense strand
gcuccagugucuuccauug

SEQ ID NO: 1514957 - RNA, 19 nt, Homo sapiens
  misc_RNA (1)...(19): siRNA sense strand
cagagaagagugacaguga

SEQ ID NO: 1514958 - RNA, 19 nt, Homo sapiens
  misc_RNA (1)...(19): siRNA sense strand
agacgaauuugauaaaguc

SEQ ID NO: 1514959 - RNA, 19 nt, Homo sapiens
  misc_RNA (1)...(19): siRNA sense strand
caagacgaauuugauaaag

SEQ ID NO: 1514960 - RNA, 19 nt, Homo sapiens
  misc_RNA (1)...(19): siRNA sense strand
ggcccuggcugaccaugaa

SEQ ID NO: 1514961 - RNA, 19 nt, Homo sapiens
  misc_RNA (1)...(19): siRNA sense strand
caacaaccugguccauauu

SEQ ID NO: 1514962 - RNA, 19 nt, Homo sapiens
  misc_RNA (1)...(19): siRNA sense strand
gagcuggaauguggaguca

SEQ ID NO: 1514963 - RNA, 19 nt, Homo sapiens
  misc_RNA (1)...(19): siRNA sense strand
ggaagaacucccagaagca

SEQ ID NO: 1514964 - RNA, 19 nt, Homo sapiens
  misc_RNA (1)...(19): siRNA sense strand
agaagcagaugaccuggau

SEQ ID NO: 1514965 - RNA, 19 nt, Homo sapiens
  misc_RNA (1)...(19): siRNA sense strand
gcucagagagacagcaaga

SEQ ID NO: 1514966 - RNA, 19 nt, Homo sapiens
  misc_RNA (1)...(19): siRNA sense strand
caacauggcggugaugauc

SEQ ID NO: 1514967 - RNA, 19 nt, Homo sapiens
  misc_RNA (1)...(19): siRNA sense strand
ucuccaaguuccugguuaa

SEQ ID NO: 1514968 - RNA, 19 nt, Homo sapiens
  misc_RNA (1)...(19): siRNA sense strand
ugaagcagauuggaguguu

SEQ ID NO: 1514969 - RNA, 19 nt, Homo sapiens
  misc_RNA (1)...(19): siRNA sense strand
uaaggccugucucuacuuc

SEQ ID NO: 1514970 - RNA, 19 nt, Homo sapiens
  misc_RNA (1)...(19): siRNA sense strand
gcacaauggacgccagugu

SEQ ID NO: 1514971 - RNA, 19 nt, Homo sapiens
  misc_RNA (1)...(19): siRNA sense strand
caggaugagucucuagauc

SEQ ID NO: 1514972 - RNA, 19 nt, Homo sapiens
  misc_RNA (1)...(19): siRNA sense strand
gauaaaguccuggcaagca

SEQ ID NO: 1514973 - RNA, 19 nt, Homo sapiens
  misc_RNA (1)...(19): siRNA sense strand
ugaacaagacgaauuugau

SEQ ID NO: 1514974 - RNA, 19 nt, Homo sapiens
  misc_RNA (1)...(19): siRNA sense strand
ccuagcugcuuccucugua

SEQ ID NO: 1514975 - RNA, 19 nt, Homo sapiens
  misc_RNA (1)...(19): siRNA sense strand
cagagauuguugcuaguuc

SEQ ID NO: 1514976 - RNA, 19 nt, Homo sapiens
  misc_RNA (1)...(19): siRNA sense strand
ggacuagcucuggauuauu

SEQ ID NO: 1514977 - RNA, 19 nt, Homo sapiens
  misc_RNA (1)...(19): siRNA sense strand
gcagcgggaggguucagua

SEQ ID NO: 1514978 - RNA, 19 nt, Homo sapiens
  misc_RNA (1)...(19): siRNA sense strand
gcaguuugcagaagcuguu

SEQ ID NO: 1514979 - RNA, 19 nt, Homo sapiens
  misc_RNA (1)...(19): siRNA sense strand
cagaacagcacagaaccua

SEQ ID NO: 1514980 - RNA, 19 nt, Homo sapiens
  misc_RNA (1)...(19): siRNA sense strand
ggaacaagguccccaacau

SEQ ID NO: 1514981 - RNA, 19 nt, Homo sapiens
  misc_RNA (1)...(19): siRNA sense strand
uggcuaaauuccagacaga

SEQ ID NO: 1514982 - RNA, 19 nt, Homo sapiens
  misc_RNA (1)...(19): siRNA sense strand
aggacuagcucuggauuau

SEQ ID NO: 1514983 - RNA, 19 nt, Homo sapiens
  misc_RNA (1)...(19): siRNA sense strand
ucuacucccucaaggacua

SEQ ID NO: 1514984 - RNA, 19 nt, Homo sapiens
  misc_RNA (1)...(19): siRNA sense strand
caacuccacugggaagucu

SEQ ID NO: 1514985 - RNA, 19 nt, Homo sapiens
  misc_RNA (1)...(19): siRNA sense strand
gcuaaauuccagacagaga

SEQ ID NO: 1514986 - RNA, 19 nt, Homo sapiens
  misc_RNA (1)...(19): siRNA sense strand
gaacaagguccccaacaug

SEQ ID NO: 1514987 - RNA, 19 nt, Homo sapiens
  misc_RNA (1)...(19): siRNA sense strand
uaaauuccagacagagauu

SEQ ID NO: 1514988 - RNA, 19 nt, Homo sapiens
  misc_RNA (1)...(19): siRNA sense strand
gagaagagugacagugaca

SEQ ID NO: 1514989 - RNA, 19 nt, Homo sapiens
  misc_RNA (1)...(19): siRNA sense strand
uggaggacaucaugguuuc

SEQ ID NO: 1514990 - RNA, 19 nt, Homo sapiens
  misc_RNA (1)...(19): siRNA sense strand
guuugaagaugaggauuuc

SEQ ID NO: 1514991 - RNA, 19 nt, Homo sapiens
  misc_RNA (1)...(19): siRNA sense strand
uccauugggucuccuguug

SEQ ID NO: 1514992 - RNA, 19 nt, Homo sapiens
  misc_RNA (1)...(19): siRNA sense strand
ccauuccagucuccaaguu

SEQ ID NO: 1514993 - RNA, 19 nt, Homo sapiens
  misc_RNA (1)...(19): siRNA sense strand
uggaagaggaguuugaaga

SEQ ID NO: 1514994 - RNA, 19 nt, Homo sapiens
  misc_RNA (1)...(19): siRNA sense strand
gagugacagugacagaagu

SEQ ID NO: 1514995 - RNA, 19 nt, Homo sapiens
  misc_RNA (1)...(19): siRNA sense strand
ugaggaagaacucccagaa

SEQ ID NO: 1514996 - RNA, 19 nt, Homo sapiens
  misc_RNA (1)...(19): siRNA sense strand
ggccugaacaagacgaauu

SEQ ID NO: 1514997 - RNA, 19 nt, Homo sapiens
  misc_RNA (1)...(19): siRNA sense strand
ccuccaggcugcugcuguu

SEQ ID NO: 1514998 - RNA, 19 nt, Homo sapiens
  misc_RNA (1)...(19): siRNA sense strand
auggugcucuggcuaaauu

SEQ ID NO: 1514999 - RNA, 19 nt, Homo sapiens
  misc_RNA (1)...(19): siRNA sense strand
gcuagagggaccauucaga

SEQ ID NO: 1515000 - RNA, 19 nt, Homo sapiens
  misc_RNA (1)...(19): siRNA sense strand
uagauccugucauccaaug

SEQ ID NO: 1515001 - RNA, 19 nt, Homo sapiens
  misc_RNA (1)...(19): siRNA sense strand
ccaggcugcugcuguuaca

SEQ ID NO: 1515002 - RNA, 19 nt, Homo sapiens
  misc_RNA (1)...(19): siRNA sense strand
cagggagcuuccagcauga

SEQ ID NO: 1515003 - RNA, 19 nt, Homo sapiens
  misc_RNA (1)...(19): siRNA sense strand
caaaaucguuucccuuguc

SEQ ID NO: 1515004 - RNA, 19 nt, Homo sapiens
  misc_RNA (1)...(19): siRNA sense strand
auucagagcagcccucaaa

SEQ ID NO: 1515005 - RNA, 19 nt, Homo sapiens
  misc_RNA (1)...(19): siRNA sense strand
ggcaaucagagaagaguga

SEQ ID NO: 1515006 - RNA, 19 nt, Homo sapiens
  misc_RNA (1)...(19): siRNA sense strand
uggcaagcauggaguugga

SEQ ID NO: 1515007 - RNA, 19 nt, Homo sapiens
  misc_RNA (1)...(19): siRNA sense strand
uaaguggcaaagcucauuu

SEQ ID NO: 1515008 - RNA, 19 nt, Homo sapiens
  misc_RNA (1)...(19): siRNA sense strand
gccugaacaagacgaauuu

SEQ ID NO: 1515009 - RNA, 19 nt, Homo sapiens
  misc_RNA (1)...(19): siRNA sense strand
gaggaagaacucccagaag

SEQ ID NO: 1515010 - RNA, 19 nt, Homo sapiens
  misc_RNA (1)...(19): siRNA sense strand
ccauggugcucuggcuaaa

SEQ ID NO: 1515011 - RNA, 19 nt, Homo sapiens
  misc_RNA (1)...(19): siRNA sense strand
caaggacuagcucuggauu

SEQ ID NO: 1515012 - RNA, 19 nt, Homo sapiens
  misc_RNA (1)...(19): siRNA sense strand
ggaugcagagaaccgguuu

SEQ ID NO: 1515013 - RNA, 19 nt, Homo sapiens
  misc_RNA (1)...(19): siRNA sense strand
agaugaggauuucuugucu

SEQ ID NO: 1515014 - RNA, 19 nt, Homo sapiens
  misc_RNA (1)...(19): siRNA sense strand
gaaaucacuaccucaacgu

SEQ ID NO: 1515015 - RNA, 19 nt, Homo sapiens
  misc_RNA (1)...(19): siRNA sense strand
caucuguggaggaggauuu

SEQ ID NO: 1515016 - RNA, 19 nt, Homo sapiens
  misc_RNA (1)...(19): siRNA sense strand
gacagagauuguugcuagu

SEQ ID NO: 1515017 - RNA, 19 nt, Homo sapiens
  misc_RNA (1)...(19): siRNA sense strand
ccuaaggccugucucuacu

SEQ ID NO: 1515018 - RNA, 19 nt, Homo sapiens
  misc_RNA (1)...(19): siRNA sense strand
agucagcagugaggccaua

SEQ ID NO: 1515019 - RNA, 19 nt, Homo sapiens
  misc_RNA (1)...(19): siRNA sense strand
caaccugguccauauuuac

SEQ ID NO: 1515020 - RNA, 19 nt, Homo sapiens
  misc_RNA (1)...(19): siRNA sense strand
caacgugacacccaacaac

SEQ ID NO: 1515021 - RNA, 19 nt, Homo sapiens
  misc_RNA (1)...(19): siRNA sense strand
ccuuaacaguucccacuca

SEQ ID NO: 1515022 - RNA, 19 nt, Homo sapiens
  misc_RNA (1)...(19): siRNA sense strand
ucuagauccugucauccaa

SEQ ID NO: 1515023 - RNA, 19 nt, Homo sapiens
  misc_RNA (1)...(19): siRNA sense strand
ccggguaguugaucugagu

SEQ ID NO: 1515024 - RNA, 19 nt, Homo sapiens
  misc_RNA (1)...(19): siRNA sense strand
uaucauguccgcccaggau

SEQ ID NO: 1515025 - RNA, 19 nt, Homo sapiens
  misc_RNA (1)...(19): siRNA sense strand
gcuguuugcuguggaagag

SEQ ID NO: 1515026 - RNA, 19 nt, Homo sapiens
  misc_RNA (1)...(19): siRNA sense strand
agcaugauguggcugcaaa

SEQ ID NO: 1515027 - RNA, 19 nt, Homo sapiens
  misc_RNA (1)...(19): siRNA sense strand
auaaaguccuggcaagcau

SEQ ID NO: 1515028 - RNA, 19 nt, Homo sapiens
  misc_RNA (1)...(19): siRNA sense strand
agacacccauagucaccaa

SEQ ID NO: 1515029 - RNA, 19 nt, Homo sapiens
  misc_RNA (1)...(19): siRNA sense strand
ggaguuugaagaugaggau

SEQ ID NO: 1515030 - RNA, 19 nt, Homo sapiens
  misc_RNA (1)...(19): siRNA sense strand
acagaagugcucagagaga

SEQ ID NO: 1515031 - RNA, 19 nt, Homo sapiens
  misc_RNA (1)...(19): siRNA sense strand
gagcuuccagcaugaugug

SEQ ID NO: 1515032 - RNA, 19 nt, Homo sapiens
  misc_RNA (1)...(19): siRNA sense strand
gagcucagaugccauguau

SEQ ID NO: 1515033 - RNA, 19 nt, Homo sapiens
  misc_RNA (1)...(19): siRNA sense strand
caaaugcagucuacucugu

SEQ ID NO: 1515034 - RNA, 19 nt, Homo sapiens
  misc_RNA (1)...(19): siRNA sense strand
gcucagaugccauguaugu

SEQ ID NO: 1515035 - RNA, 19 nt, Homo sapiens
  misc_RNA (1)...(19): siRNA sense strand
ggaggucaaggaaguguuu

SEQ ID NO: 1515036 - RNA, 19 nt, Homo sapiens
  misc_RNA (1)...(19): siRNA sense strand
gagagugcauggaggagau

SEQ ID NO: 1515037 - RNA, 19 nt, Homo sapiens
  misc_RNA (1)...(19): siRNA sense strand
gaaaggguacccaaaugca

SEQ ID NO: 1515038 - RNA, 19 nt, Homo sapiens
  misc_RNA (1)...(19): siRNA sense strand
uggaaaggguacccaaaug

SEQ ID NO: 1515039 - RNA, 19 nt, Homo sapiens
  misc_RNA (1)...(19): siRNA sense strand
guacccaaaugcagucuac

SEQ ID NO: 1515040 - RNA, 19 nt, Homo sapiens
  misc_RNA (1)...(19): siRNA sense strand
ggaaaggguacccaaaugc

SEQ ID NO: 1515041 - RNA, 19 nt, Homo sapiens
  misc_RNA (1)...(19): siRNA sense strand
caaaguacgaggagauagu

SEQ ID NO: 1515042 - RNA, 19 nt, Homo sapiens
  misc_RNA (1)...(19): siRNA sense strand
ggaggugccagcugcagaa

SEQ ID NO: 1515043 - RNA, 19 nt, Homo sapiens
  misc_RNA (1)...(19): siRNA sense strand
uggaggagaucugcagcua

SEQ ID NO: 1515044 - RNA, 19 nt, Homo sapiens
  misc_RNA (1)...(19): siRNA sense strand
ggguggcacugcugauugu

SEQ ID NO: 1515045 - RNA, 19 nt, Homo sapiens
  misc_RNA (1)...(19): siRNA sense strand
ggccaaggaugcccauucg

SEQ ID NO: 1515046 - RNA, 19 nt, Homo sapiens
  misc_RNA (1)...(19): siRNA sense strand
gucaucgccuuguucauca

SEQ ID NO: 1515047 - RNA, 19 nt, Homo sapiens
  misc_RNA (1)...(19): siRNA sense strand
acgaggaggucaaggaagu

SEQ ID NO: 1515048 - RNA, 19 nt, Homo sapiens
  misc_RNA (1)...(19): siRNA sense strand
gcuacgaggaggucaagga

SEQ ID NO: 1515049 - RNA, 19 nt, Homo sapiens
  misc_RNA (1)...(19): siRNA sense strand
ggugccagcugcagaaagc

SEQ ID NO: 1515050 - RNA, 19 nt, Homo sapiens
  misc_RNA (1)...(19): siRNA sense strand
ugccauguaugugguggua

SEQ ID NO: 1515051 - RNA, 19 nt, Homo sapiens
  misc_RNA (1)...(19): siRNA sense strand
cuacgaggaggucaaggaa

SEQ ID NO: 1515052 - RNA, 19 nt, Homo sapiens
  misc_RNA (1)...(19): siRNA sense strand
caaggaaguguuugagaac

SEQ ID NO: 1515053 - RNA, 19 nt, Homo sapiens
  misc_RNA (1)...(19): siRNA sense strand
aaacgauggaguucuggaa

SEQ ID NO: 1515054 - RNA, 19 nt, Homo sapiens
  misc_RNA (1)...(19): siRNA sense strand
cgauggaguucuggaaagg

SEQ ID NO: 1515055 - RNA, 19 nt, Homo sapiens
  misc_RNA (1)...(19): siRNA sense strand
gaggccagcgugucuuaca

SEQ ID NO: 1515056 - RNA, 19 nt, Homo sapiens
  misc_RNA (1)...(19): siRNA sense strand
ugauugucaucgccuuguu

SEQ ID NO: 1515057 - RNA, 19 nt, Homo sapiens
  misc_RNA (1)...(19): siRNA sense strand
cccaaaguacgaggagaua

SEQ ID NO: 1515058 - RNA, 19 nt, Homo sapiens
  misc_RNA (1)...(19): siRNA sense strand
gcacaagacagaccacauu

SEQ ID NO: 1515059 - RNA, 19 nt, Homo sapiens
  misc_RNA (1)...(19): siRNA sense strand
gcuccaaucuccugaaaca

SEQ ID NO: 1515060 - RNA, 19 nt, Homo sapiens
  misc_RNA (1)...(19): siRNA sense strand
cuucgacgcuucauuuaaa

SEQ ID NO: 1515061 - RNA, 19 nt, Homo sapiens
  misc_RNA (1)...(19): siRNA sense strand
gcucugacgucaccaaaca

SEQ ID NO: 1515062 - RNA, 19 nt, Homo sapiens
  misc_RNA (1)...(19): siRNA sense strand
gggagaagcccuacgaaug

SEQ ID NO: 1515063 - RNA, 19 nt, Homo sapiens
  misc_RNA (1)...(19): siRNA sense strand
gagugugggcggaucuuua

SEQ ID NO: 1515064 - RNA, 19 nt, Homo sapiens
  misc_RNA (1)...(19): siRNA sense strand
ggagaagcccuacgaaugc

SEQ ID NO: 1515065 - RNA, 19 nt, Homo sapiens
  misc_RNA (1)...(19): siRNA sense strand
ccaaucuccugaaacauca

SEQ ID NO: 1515066 - RNA, 19 nt, Homo sapiens
  misc_RNA (1)...(19): siRNA sense strand
gacagaaagccaccugaga

SEQ ID NO: 1515067 - RNA, 19 nt, Homo sapiens
  misc_RNA (1)...(19): siRNA sense strand
gagaagcccuacgaaugca

SEQ ID NO: 1515068 - RNA, 19 nt, Homo sapiens
  misc_RNA (1)...(19): siRNA sense strand
ccugaguccugaagacgaa

SEQ ID NO: 1515069 - RNA, 19 nt, Homo sapiens
  misc_RNA (1)...(19): siRNA sense strand
agaggaagaaacccuauga

SEQ ID NO: 1515070 - RNA, 19 nt, Homo sapiens
  misc_RNA (1)...(19): siRNA sense strand
ggacucacacgggagagaa

SEQ ID NO: 1515071 - RNA, 19 nt, Homo sapiens
  misc_RNA (1)...(19): siRNA sense strand
cggcuccaaucuccugaaa

SEQ ID NO: 1515072 - RNA, 19 nt, Homo sapiens
  misc_RNA (1)...(19): siRNA sense strand
gaccacauucgccaucaga

SEQ ID NO: 1515073 - RNA, 19 nt, Homo sapiens
  misc_RNA (1)...(19): siRNA sense strand
ccaaacaccagaggacuca

SEQ ID NO: 1515074 - RNA, 19 nt, Homo sapiens
  misc_RNA (1)...(19): siRNA sense strand
aaacgccacccucggaaga

SEQ ID NO: 1515075 - RNA, 19 nt, Homo sapiens
  misc_RNA (1)...(19): siRNA sense strand
gacgcuucauuuaaagaug

SEQ ID NO: 1515076 - RNA, 19 nt, Homo sapiens
  misc_RNA (1)...(19): siRNA sense strand
ucucauccgccaucagaaa

SEQ ID NO: 1515077 - RNA, 19 nt, Homo sapiens
  misc_RNA (1)...(19): siRNA sense strand
aggcagacgugcagaagag

SEQ ID NO: 1515078 - RNA, 19 nt, Homo sapiens
  misc_RNA (1)...(19): siRNA sense strand
ugccuucgacgcuucauuu

SEQ ID NO: 1515079 - RNA, 19 nt, Homo sapiens
  misc_RNA (1)...(19): siRNA sense strand
agugugggcggaucuuuaa

SEQ ID NO: 1515080 - RNA, 19 nt, Homo sapiens
  misc_RNA (1)...(19): siRNA sense strand
uaacugcggcuccaaucuc

SEQ ID NO: 1515081 - RNA, 19 nt, Homo sapiens
  misc_RNA (1)...(19): siRNA sense strand
gaggcagacgugcagaaga

SEQ ID NO: 1515082 - RNA, 19 nt, Homo sapiens
  misc_RNA (1)...(19): siRNA sense strand
gugggcggaucuuuaagca

SEQ ID NO: 1515083 - RNA, 19 nt, Homo sapiens
  misc_RNA (1)...(19): siRNA sense strand
gccuucgacgcuucauuua

SEQ ID NO: 1515084 - RNA, 19 nt, Homo sapiens
  misc_RNA (1)...(19): siRNA sense strand
ugucucauccgccaucaga

SEQ ID NO: 1515085 - RNA, 19 nt, Homo sapiens
  misc_RNA (1)...(19): siRNA sense strand
ggaggcagacgugcagaag

SEQ ID NO: 1515086 - RNA, 19 nt, Homo sapiens
  misc_RNA (1)...(19): siRNA sense strand
gcaaagggacguuggagaa

SEQ ID NO: 1515087 - RNA, 19 nt, Homo sapiens
  misc_RNA (1)...(19): siRNA sense strand
ccacggcugugucugcaaa

SEQ ID NO: 1515088 - RNA, 19 nt, Homo sapiens
  misc_RNA (1)...(19): siRNA sense strand
aaagggacguuggagaacu

SEQ ID NO: 1515089 - RNA, 19 nt, Homo sapiens
  misc_RNA (1)...(19): siRNA sense strand
ggagagagggcaaggauuc

SEQ ID NO: 1515090 - RNA, 19 nt, Homo sapiens
  misc_RNA (1)...(19): siRNA sense strand
ggaaccaccuucucuacuc

SEQ ID NO: 1515091 - RNA, 19 nt, Homo sapiens
  misc_RNA (1)...(19): siRNA sense strand
gaaccaccuucucuacucu

SEQ ID NO: 1515092 - RNA, 19 nt, Homo sapiens
  misc_RNA (1)...(19): siRNA sense strand
gaaaagccacaccagaauu

SEQ ID NO: 1515093 - RNA, 19 nt, Homo sapiens
  misc_RNA (1)...(19): siRNA sense strand
gggacucacugccaaagac

SEQ ID NO: 1515094 - RNA, 19 nt, Homo sapiens
  misc_RNA (1)...(19): siRNA sense strand
acaccagaauuccugcaau

SEQ ID NO: 1515095 - RNA, 19 nt, Homo sapiens
  misc_RNA (1)...(19): siRNA sense strand
ucagugaggcagcucuuca

SEQ ID NO: 1515096 - RNA, 19 nt, Homo sapiens
  misc_RNA (1)...(19): siRNA sense strand
gggagagagggcaaggauu

SEQ ID NO: 1515097 - RNA, 19 nt, Homo sapiens
  misc_RNA (1)...(19): siRNA sense strand
ugaggcagcucuucaaaac

SEQ ID NO: 1515098 - RNA, 19 nt, Homo sapiens
  misc_RNA (1)...(19): siRNA sense strand
ggaaauggaugguggauga

SEQ ID NO: 1515099 - RNA, 19 nt, Homo sapiens
  misc_RNA (1)...(19): siRNA sense strand
gagaccaucugcucccaua

SEQ ID NO: 1515100 - RNA, 19 nt, Homo sapiens
  misc_RNA (1)...(19): siRNA sense strand
cgacagggaucacuucauc

SEQ ID NO: 1515101 - RNA, 19 nt, Homo sapiens
  misc_RNA (1)...(19): siRNA sense strand
gaagaggcaaugagcacua

SEQ ID NO: 1515102 - RNA, 19 nt, Homo sapiens
  misc_RNA (1)...(19): siRNA sense strand
gaagagugucggcucauca

SEQ ID NO: 1515103 - RNA, 19 nt, Homo sapiens
  misc_RNA (1)...(19): siRNA sense strand
gccagauccugccuacuga

SEQ ID NO: 1515104 - RNA, 19 nt, Homo sapiens
  misc_RNA (1)...(19): siRNA sense strand
ucaagccgcugcucuucga

SEQ ID NO: 1515105 - RNA, 19 nt, Homo sapiens
  misc_RNA (1)...(19): siRNA sense strand
gugcggaacagccaccaua

SEQ ID NO: 1515106 - RNA, 19 nt, Homo sapiens
  misc_RNA (1)...(19): siRNA sense strand
gauccugccuacugaagag

SEQ ID NO: 1515107 - RNA, 19 nt, Homo sapiens
  misc_RNA (1)...(19): siRNA sense strand
gaaccgugaugggcaccuu

SEQ ID NO: 1515108 - RNA, 19 nt, Homo sapiens
  misc_RNA (1)...(19): siRNA sense strand
gcugcagguuguucgauau

SEQ ID NO: 1515109 - RNA, 19 nt, Homo sapiens
  misc_RNA (1)...(19): siRNA sense strand
cagagagcauucaggagau

SEQ ID NO: 1515110 - RNA, 19 nt, Homo sapiens
  misc_RNA (1)...(19): siRNA sense strand
gcagguuguucgauauggu

SEQ ID NO: 1515111 - RNA, 19 nt, Homo sapiens
  misc_RNA (1)...(19): siRNA sense strand
cuacagcaacggcgacgaa

SEQ ID NO: 1515112 - RNA, 19 nt, Homo sapiens
  misc_RNA (1)...(19): siRNA sense strand
gcugguagccaacgagucu

SEQ ID NO: 1515113 - RNA, 19 nt, Homo sapiens
  misc_RNA (1)...(19): siRNA sense strand
cgcugcagguuguucgaua

SEQ ID NO: 1515114 - RNA, 19 nt, Homo sapiens
  misc_RNA (1)...(19): siRNA sense strand
ugaagagugucggcucauc

SEQ ID NO: 1515115 - RNA, 19 nt, Homo sapiens
  misc_RNA (1)...(19): siRNA sense strand
gggccuguguacccagaga

SEQ ID NO: 1515116 - RNA, 19 nt, Homo sapiens
  misc_RNA (1)...(19): siRNA sense strand
aagaggcaaugagcacuau

SEQ ID NO: 1515117 - RNA, 19 nt, Homo sapiens
  misc_RNA (1)...(19): siRNA sense strand
cagacucgccugggaaaug

SEQ ID NO: 1515118 - RNA, 19 nt, Homo sapiens
  misc_RNA (1)...(19): siRNA sense strand
ccugacugaugaagagugu

SEQ ID NO: 1515119 - RNA, 19 nt, Homo sapiens
  misc_RNA (1)...(19): siRNA sense strand
acauggaccuucgggacuu

SEQ ID NO: 1515120 - RNA, 19 nt, Homo sapiens
  misc_RNA (1)...(19): siRNA sense strand
ccggcuuccugacugauga

SEQ ID NO: 1515121 - RNA, 19 nt, Homo sapiens
  misc_RNA (1)...(19): siRNA sense strand
ccaagcugguagccaacga

SEQ ID NO: 1515122 - RNA, 19 nt, Homo sapiens
  misc_RNA (1)...(19): siRNA sense strand
agacucgccugggaaaugg

SEQ ID NO: 1515123 - RNA, 19 nt, Homo sapiens
  misc_RNA (1)...(19): siRNA sense strand
agagagcauucaggagaug

SEQ ID NO: 1515124 - RNA, 19 nt, Homo sapiens
  misc_RNA (1)...(19): siRNA sense strand
acaaggcagaguccaguga

SEQ ID NO: 1515125 - RNA, 19 nt, Homo sapiens
  misc_RNA (1)...(19): siRNA sense strand
ggaaauggaugguggauga

SEQ ID NO: 1515126 - RNA, 19 nt, Homo sapiens
  misc_RNA (1)...(19): siRNA sense strand
gcacagcagucuucuggua

SEQ ID NO: 1515127 - RNA, 19 nt, Homo sapiens
  misc_RNA (1)...(19): siRNA sense strand
uaacagaaccuacgaugaa

SEQ ID NO: 1515128 - RNA, 19 nt, Homo sapiens
  misc_RNA (1)...(19): siRNA sense strand
gccaacaacuggauuaaug

SEQ ID NO: 1515129 - RNA, 19 nt, Homo sapiens
  misc_RNA (1)...(19): siRNA sense strand
gagaccaucugcucccaua

SEQ ID NO: 1515130 - RNA, 19 nt, Homo sapiens
  misc_RNA (1)...(19): siRNA sense strand
ccaaguggauugccaacaa

SEQ ID NO: 1515131 - RNA, 19 nt, Homo sapiens
  misc_RNA (1)...(19): siRNA sense strand
cgacagggaucacuucauc

SEQ ID NO: 1515132 - RNA, 19 nt, Homo sapiens
  misc_RNA (1)...(19): siRNA sense strand
gaagaggcaaugagcacua

SEQ ID NO: 1515133 - RNA, 19 nt, Homo sapiens
  misc_RNA (1)...(19): siRNA sense strand
gaugaaaugagucugauuc

SEQ ID NO: 1515134 - RNA, 19 nt, Homo sapiens
  misc_RNA (1)...(19): siRNA sense strand
gaagagugucggcucauca

SEQ ID NO: 1515135 - RNA, 19 nt, Homo sapiens
  misc_RNA (1)...(19): siRNA sense strand
gccagauccugccuacuga

SEQ ID NO: 1515136 - RNA, 19 nt, Homo sapiens
  misc_RNA (1)...(19): siRNA sense strand
ucaagccgcugcucuucga

SEQ ID NO: 1515137 - RNA, 19 nt, Homo sapiens
  misc_RNA (1)...(19): siRNA sense strand
gugcggaacagccaccaua

SEQ ID NO: 1515138 - RNA, 19 nt, Homo sapiens
  misc_RNA (1)...(19): siRNA sense strand
gauccugccuacugaagag

SEQ ID NO: 1515139 - RNA, 19 nt, Homo sapiens
  misc_RNA (1)...(19): siRNA sense strand
gaaccgugaugggcaccuu

SEQ ID NO: 1515140 - RNA, 19 nt, Homo sapiens
  misc_RNA (1)...(19): siRNA sense strand
gcugcagguuguucgauau

SEQ ID NO: 1515141 - RNA, 19 nt, Homo sapiens
  misc_RNA (1)...(19): siRNA sense strand
gaaccuacgaugaaaugag

SEQ ID NO: 1515142 - RNA, 19 nt, Homo sapiens
  misc_RNA (1)...(19): siRNA sense strand
cagagagcauucaggagau

SEQ ID NO: 1515143 - RNA, 19 nt, Homo sapiens
  misc_RNA (1)...(19): siRNA sense strand
gcagguuguucgauauggu

SEQ ID NO: 1515144 - RNA, 19 nt, Homo sapiens
  misc_RNA (1)...(19): siRNA sense strand
caacaacuggauuaaugug

SEQ ID NO: 1515145 - RNA, 19 nt, Homo sapiens
  misc_RNA (1)...(19): siRNA sense strand
cagaaccuacgaugaaaug

SEQ ID NO: 1515146 - RNA, 19 nt, Homo sapiens
  misc_RNA (1)...(19): siRNA sense strand
aacagaaccuacgaugaaa

SEQ ID NO: 1515147 - RNA, 19 nt, Homo sapiens
  misc_RNA (1)...(19): siRNA sense strand
gcagucuucugguacaacu

SEQ ID NO: 1515148 - RNA, 19 nt, Homo sapiens
  misc_RNA (1)...(19): siRNA sense strand
caacagggcacagcagucu

SEQ ID NO: 1515149 - RNA, 19 nt, Homo sapiens
  misc_RNA (1)...(19): siRNA sense strand
caaguggauugccaacaac

SEQ ID NO: 1515150 - RNA, 19 nt, Homo sapiens
  misc_RNA (1)...(19): siRNA sense strand
cuacagcaacggcgacgaa

SEQ ID NO: 1515151 - RNA, 19 nt, Homo sapiens
  misc_RNA (1)...(19): siRNA sense strand
ccaacaacuggauuaaugu

SEQ ID NO: 1515152 - RNA, 19 nt, Homo sapiens
  misc_RNA (1)...(19): siRNA sense strand
gcugguagccaacgagucu

SEQ ID NO: 1515153 - RNA, 19 nt, Homo sapiens
  misc_RNA (1)...(19): siRNA sense strand
aaccuacgaugaaaugagu

SEQ ID NO: 1515154 - RNA, 19 nt, Homo sapiens
  misc_RNA (1)...(19): siRNA sense strand
cgcugcagguuguucgaua

SEQ ID NO: 1515155 - RNA, 19 nt, Homo sapiens
  misc_RNA (1)...(19): siRNA sense strand
ugaagagugucggcucauc

SEQ ID NO: 1515156 - RNA, 19 nt, Homo sapiens
  misc_RNA (1)...(19): siRNA sense strand
uagcagauaacagaaccua

SEQ ID NO: 1515157 - RNA, 19 nt, Homo sapiens
  misc_RNA (1)...(19): siRNA sense strand
gggccuguguacccagaga

SEQ ID NO: 1515158 - RNA, 19 nt, Homo sapiens
  misc_RNA (1)...(19): siRNA sense strand
aagaggcaaugagcacuau

SEQ ID NO: 1515159 - RNA, 19 nt, Homo sapiens
  misc_RNA (1)...(19): siRNA sense strand
ugggugacguagacgacua

SEQ ID NO: 1515160 - RNA, 19 nt, Homo sapiens
  misc_RNA (1)...(19): siRNA sense strand
cagacucgccugggaaaug

SEQ ID NO: 1515161 - RNA, 19 nt, Homo sapiens
  misc_RNA (1)...(19): siRNA sense strand
aagggaaaccugcguguca

SEQ ID NO: 1515162 - RNA, 19 nt, Homo sapiens
  misc_RNA (1)...(19): siRNA sense strand
ccugacugaugaagagugu

SEQ ID NO: 1515163 - RNA, 19 nt, Homo sapiens
  misc_RNA (1)...(19): siRNA sense strand
acauggaccuucgggacuu

SEQ ID NO: 1515164 - RNA, 19 nt, Homo sapiens
  misc_RNA (1)...(19): siRNA sense strand
agacucgccugggaaaugg

SEQ ID NO: 1515165 - RNA, 19 nt, Homo sapiens
  misc_RNA (1)...(19): siRNA sense strand
acagcagucuucugguaca

SEQ ID NO: 1515166 - RNA, 19 nt, Homo sapiens
  misc_RNA (1)...(19): siRNA sense strand
ccggcuuccugacugauga

SEQ ID NO: 1515167 - RNA, 19 nt, Homo sapiens
  misc_RNA (1)...(19): siRNA sense strand
ccaagcugguagccaacga

SEQ ID NO: 1515168 - RNA, 19 nt, Homo sapiens
  misc_RNA (1)...(19): siRNA sense strand
agagagcauucaggagaug

SEQ ID NO: 1515169 - RNA, 19 nt, Homo sapiens
  misc_RNA (1)...(19): siRNA sense strand
acaaggcagaguccaguga

SEQ ID NO: 1515170 - RNA, 19 nt, Homo sapiens
  misc_RNA (1)...(19): siRNA sense strand
ggaaauggaugguggauga

SEQ ID NO: 1515171 - RNA, 19 nt, Homo sapiens
  misc_RNA (1)...(19): siRNA sense strand
gcacagcagucuucuggua

SEQ ID NO: 1515172 - RNA, 19 nt, Homo sapiens
  misc_RNA (1)...(19): siRNA sense strand
uaacagaaccuacgaugaa

SEQ ID NO: 1515173 - RNA, 19 nt, Homo sapiens
  misc_RNA (1)...(19): siRNA sense strand
gccaacaacuggauuaaug

SEQ ID NO: 1515174 - RNA, 19 nt, Homo sapiens
  misc_RNA (1)...(19): siRNA sense strand
gagaccaucugcucccaua

SEQ ID NO: 1515175 - RNA, 19 nt, Homo sapiens
  misc_RNA (1)...(19): siRNA sense strand
ccaaguggauugccaacaa

SEQ ID NO: 1515176 - RNA, 19 nt, Homo sapiens
  misc_RNA (1)...(19): siRNA sense strand
cgacagggaucacuucauc

SEQ ID NO: 1515177 - RNA, 19 nt, Homo sapiens
  misc_RNA (1)...(19): siRNA sense strand
gaagaggcaaugagcacua

SEQ ID NO: 1515178 - RNA, 19 nt, Homo sapiens
  misc_RNA (1)...(19): siRNA sense strand
gaugaaaugagucugauuc

SEQ ID NO: 1515179 - RNA, 19 nt, Homo sapiens
  misc_RNA (1)...(19): siRNA sense strand
gaagagugucggcucauca

SEQ ID NO: 1515180 - RNA, 19 nt, Homo sapiens
  misc_RNA (1)...(19): siRNA sense strand
gccagauccugccuacuga

SEQ ID NO: 1515181 - RNA, 19 nt, Homo sapiens
  misc_RNA (1)...(19): siRNA sense strand
ucaagccgcugcucuucga

SEQ ID NO: 1515182 - RNA, 19 nt, Homo sapiens
  misc_RNA (1)...(19): siRNA sense strand
gugcggaacagccaccaua

SEQ ID NO: 1515183 - RNA, 19 nt, Homo sapiens
  misc_RNA (1)...(19): siRNA sense strand
gauccugccuacugaagag

SEQ ID NO: 1515184 - RNA, 19 nt, Homo sapiens
  misc_RNA (1)...(19): siRNA sense strand
gaaccgugaugggcaccuu

SEQ ID NO: 1515185 - RNA, 19 nt, Homo sapiens
  misc_RNA (1)...(19): siRNA sense strand
gcugcagguuguucgauau

SEQ ID NO: 1515186 - RNA, 19 nt, Homo sapiens
  misc_RNA (1)...(19): siRNA sense strand
gaaccuacgaugaaaugag

SEQ ID NO: 1515187 - RNA, 19 nt, Homo sapiens
  misc_RNA (1)...(19): siRNA sense strand
cagagagcauucaggagau

SEQ ID NO: 1515188 - RNA, 19 nt, Homo sapiens
  misc_RNA (1)...(19): siRNA sense strand
gcagguuguucgauauggu

SEQ ID NO: 1515189 - RNA, 19 nt, Homo sapiens
  misc_RNA (1)...(19): siRNA sense strand
caacaacuggauuaaugug

SEQ ID NO: 1515190 - RNA, 19 nt, Homo sapiens
  misc_RNA (1)...(19): siRNA sense strand
cagaaccuacgaugaaaug

SEQ ID NO: 1515191 - RNA, 19 nt, Homo sapiens
  misc_RNA (1)...(19): siRNA sense strand
aacagaaccuacgaugaaa

SEQ ID NO: 1515192 - RNA, 19 nt, Homo sapiens
  misc_RNA (1)...(19): siRNA sense strand
gcagucuucugguacaacu

SEQ ID NO: 1515193 - RNA, 19 nt, Homo sapiens
  misc_RNA (1)...(19): siRNA sense strand
caacagggcacagcagucu

SEQ ID NO: 1515194 - RNA, 19 nt, Homo sapiens
  misc_RNA (1)...(19): siRNA sense strand
caaguggauugccaacaac

SEQ ID NO: 1515195 - RNA, 19 nt, Homo sapiens
  misc_RNA (1)...(19): siRNA sense strand
cuacagcaacggcgacgaa

SEQ ID NO: 1515196 - RNA, 19 nt, Homo sapiens
  misc_RNA (1)...(19): siRNA sense strand
ccaacaacuggauuaaugu

SEQ ID NO: 1515197 - RNA, 19 nt, Homo sapiens
  misc_RNA (1)...(19): siRNA sense strand
gcugguagccaacgagucu

SEQ ID NO: 1515198 - RNA, 19 nt, Homo sapiens
  misc_RNA (1)...(19): siRNA sense strand
aaccuacgaugaaaugagu

SEQ ID NO: 1515199 - RNA, 19 nt, Homo sapiens
  misc_RNA (1)...(19): siRNA sense strand
cgcugcagguuguucgaua

SEQ ID NO: 1515200 - RNA, 19 nt, Homo sapiens
  misc_RNA (1)...(19): siRNA sense strand
ugaagagugucggcucauc

SEQ ID NO: 1515201 - RNA, 19 nt, Homo sapiens
  misc_RNA (1)...(19): siRNA sense strand
uagcagauaacagaaccua

SEQ ID NO: 1515202 - RNA, 19 nt, Homo sapiens
  misc_RNA (1)...(19): siRNA sense strand
gggccuguguacccagaga

SEQ ID NO: 1515203 - RNA, 19 nt, Homo sapiens
  misc_RNA (1)...(19): siRNA sense strand
aagaggcaaugagcacuau

SEQ ID NO: 1515204 - RNA, 19 nt, Homo sapiens
  misc_RNA (1)...(19): siRNA sense strand
ugggugacguagacgacua

SEQ ID NO: 1515205 - RNA, 19 nt, Homo sapiens
  misc_RNA (1)...(19): siRNA sense strand
cagacucgccugggaaaug

SEQ ID NO: 1515206 - RNA, 19 nt, Homo sapiens
  misc_RNA (1)...(19): siRNA sense strand
aagggaaaccugcguguca

SEQ ID NO: 1515207 - RNA, 19 nt, Homo sapiens
  misc_RNA (1)...(19): siRNA sense strand
ccugacugaugaagagugu

SEQ ID NO: 1515208 - RNA, 19 nt, Homo sapiens
  misc_RNA (1)...(19): siRNA sense strand
acauggaccuucgggacuu

SEQ ID NO: 1515209 - RNA, 19 nt, Homo sapiens
  misc_RNA (1)...(19): siRNA sense strand
ccggcuuccugacugauga

SEQ ID NO: 1515210 - RNA, 19 nt, Homo sapiens
  misc_RNA (1)...(19): siRNA sense strand
acagcagucuucugguaca

SEQ ID NO: 1515211 - RNA, 19 nt, Homo sapiens
  misc_RNA (1)...(19): siRNA sense strand
ccaagcugguagccaacga

SEQ ID NO: 1515212 - RNA, 19 nt, Homo sapiens
  misc_RNA (1)...(19): siRNA sense strand
agacucgccugggaaaugg

SEQ ID NO: 1515213 - RNA, 19 nt, Homo sapiens
  misc_RNA (1)...(19): siRNA sense strand
agagagcauucaggagaug

SEQ ID NO: 1515214 - RNA, 19 nt, Homo sapiens
  misc_RNA (1)...(19): siRNA sense strand
acaaggcagaguccaguga

SEQ ID NO: 1515215 - RNA, 19 nt, Homo sapiens
  misc_RNA (1)...(19): siRNA sense strand
ggaaagccuucaagcagaa

SEQ ID NO: 1515216 - RNA, 19 nt, Homo sapiens
  misc_RNA (1)...(19): siRNA sense strand
caagagacauugugaucau

SEQ ID NO: 1515217 - RNA, 19 nt, Homo sapiens
  misc_RNA (1)...(19): siRNA sense strand
ggacguggccaucuacuuc

SEQ ID NO: 1515218 - RNA, 19 nt, Homo sapiens
  misc_RNA (1)...(19): siRNA sense strand
ggaagcagcgcgcaguaga

SEQ ID NO: 1515219 - RNA, 19 nt, Homo sapiens
  misc_RNA (1)...(19): siRNA sense strand
ggagugggcgugucuggaa

SEQ ID NO: 1515220 - RNA, 19 nt, Homo sapiens
  misc_RNA (1)...(19): siRNA sense strand
guagagcugucguucaucu

SEQ ID NO: 1515221 - RNA, 19 nt, Homo sapiens
  misc_RNA (1)...(19): siRNA sense strand
ucagggacguggccaucua

SEQ ID NO: 1515222 - RNA, 19 nt, Homo sapiens
  misc_RNA (1)...(19): siRNA sense strand
caguagagcugucguucau

SEQ ID NO: 1515223 - RNA, 19 nt, Homo sapiens
  misc_RNA (1)...(19): siRNA sense strand
gaaagagccagggaaggaa

SEQ ID NO: 1515224 - RNA, 19 nt, Homo sapiens
  misc_RNA (1)...(19): siRNA sense strand
gcaaagccuuccggaccaa

SEQ ID NO: 1515225 - RNA, 19 nt, Homo sapiens
  misc_RNA (1)...(19): siRNA sense strand
ccucgucucucgccuggaa

SEQ ID NO: 1515226 - RNA, 19 nt, Homo sapiens
  misc_RNA (1)...(19): siRNA sense strand
agaaagagccagggaagga

SEQ ID NO: 1515227 - RNA, 19 nt, Homo sapiens
  misc_RNA (1)...(19): siRNA sense strand
ugacgaagagguucuacga

SEQ ID NO: 1515228 - RNA, 19 nt, Homo sapiens
  misc_RNA (1)...(19): siRNA sense strand
gaaccacacgcgcgagaag

SEQ ID NO: 1515229 - RNA, 19 nt, Homo sapiens
  misc_RNA (1)...(19): siRNA sense strand
gcaguagagcugucguuca

SEQ ID NO: 1515230 - RNA, 19 nt, Homo sapiens
  misc_RNA (1)...(19): siRNA sense strand
gggacgugaugcuggacaa

SEQ ID NO: 1515231 - RNA, 19 nt, Homo sapiens
  misc_RNA (1)...(19): siRNA sense strand
aguccaaccuucucagaca

SEQ ID NO: 1515232 - RNA, 19 nt, Homo sapiens
  misc_RNA (1)...(19): siRNA sense strand
gaggagccguggguugaag

SEQ ID NO: 1515233 - RNA, 19 nt, Homo sapiens
  misc_RNA (1)...(19): siRNA sense strand
ccaagagacauugugauca

SEQ ID NO: 1515234 - RNA, 19 nt, Homo sapiens
  misc_RNA (1)...(19): siRNA sense strand
ccacgugcggcgagaaaga

SEQ ID NO: 1515235 - RNA, 19 nt, Homo sapiens
  misc_RNA (1)...(19): siRNA sense strand
cuacucguguggcgacugu

SEQ ID NO: 1515236 - RNA, 19 nt, Homo sapiens
  misc_RNA (1)...(19): siRNA sense strand
ggaggcugcaccugacgaa

SEQ ID NO: 1515237 - RNA, 19 nt, Homo sapiens
  misc_RNA (1)...(19): siRNA sense strand
ggaggagccguggguugaa

SEQ ID NO: 1515238 - RNA, 19 nt, Homo sapiens
  misc_RNA (1)...(19): siRNA sense strand
gaagcagcgcgcaguagag

SEQ ID NO: 1515239 - RNA, 19 nt, Homo sapiens
  misc_RNA (1)...(19): siRNA sense strand
gagacauugugaucaucca

SEQ ID NO: 1515240 - RNA, 19 nt, Homo sapiens
  misc_RNA (1)...(19): siRNA sense strand
ggaaagaacucuccaaccu

SEQ ID NO: 1515241 - RNA, 19 nt, Homo sapiens
  misc_RNA (1)...(19): siRNA sense strand
gggauuucuuggcuauuua

SEQ ID NO: 1515242 - RNA, 19 nt, Homo sapiens
  misc_RNA (1)...(19): siRNA sense strand
gguuggcucugucugcuua

SEQ ID NO: 1515243 - RNA, 19 nt, Homo sapiens
  misc_RNA (1)...(19): siRNA sense strand
cgacuaauuccaucucuuu

SEQ ID NO: 1515244 - RNA, 19 nt, Homo sapiens
  misc_RNA (1)...(19): siRNA sense strand
ggucucagcuuuaccaaaa

SEQ ID NO: 1515245 - RNA, 19 nt, Homo sapiens
  misc_RNA (1)...(19): siRNA sense strand
cagaauugucggccauuua

SEQ ID NO: 1515246 - RNA, 19 nt, Homo sapiens
  misc_RNA (1)...(19): siRNA sense strand
caccaucucugaguuguug

SEQ ID NO: 1515247 - RNA, 19 nt, Homo sapiens
  misc_RNA (1)...(19): siRNA sense strand
cgggauuucuuggcuauuu

SEQ ID NO: 1515248 - RNA, 19 nt, Homo sapiens
  misc_RNA (1)...(19): siRNA sense strand
gagccugucuucacaaagc

SEQ ID NO: 1515249 - RNA, 19 nt, Homo sapiens
  misc_RNA (1)...(19): siRNA sense strand
ugcuaacacugcaaacuuu

SEQ ID NO: 1515250 - RNA, 19 nt, Homo sapiens
  misc_RNA (1)...(19): siRNA sense strand
gcuaagugcagaggcauuu

SEQ ID NO: 1515251 - RNA, 19 nt, Homo sapiens
  misc_RNA (1)...(19): siRNA sense strand
ucugugcgcugucuuagau

SEQ ID NO: 1515252 - RNA, 19 nt, Homo sapiens
  misc_RNA (1)...(19): siRNA sense strand
gcucuccucccacagaauu

SEQ ID NO: 1515253 - RNA, 19 nt, Homo sapiens
  misc_RNA (1)...(19): siRNA sense strand
ucguguaacuggugcuauu

SEQ ID NO: 1515254 - RNA, 19 nt, Homo sapiens
  misc_RNA (1)...(19): siRNA sense strand
gugcuaacacugcaaacuu

SEQ ID NO: 1515255 - RNA, 19 nt, Homo sapiens
  misc_RNA (1)...(19): siRNA sense strand
agaauugucggccauuuau

SEQ ID NO: 1515256 - RNA, 19 nt, Homo sapiens
  misc_RNA (1)...(19): siRNA sense strand
acagaauugucggccauuu

SEQ ID NO: 1515257 - RNA, 19 nt, Homo sapiens
  misc_RNA (1)...(19): siRNA sense strand
ggcucugucugcuuaaaga

SEQ ID NO: 1515258 - RNA, 19 nt, Homo sapiens
  misc_RNA (1)...(19): siRNA sense strand
aauugucggccauuuauuu

SEQ ID NO: 1515259 - RNA, 19 nt, Homo sapiens
  misc_RNA (1)...(19): siRNA sense strand
gaauugucggccauuuauu

SEQ ID NO: 1515260 - RNA, 19 nt, Homo sapiens
  misc_RNA (1)...(19): siRNA sense strand
gcaaugucaccuucacaca

SEQ ID NO: 1515261 - RNA, 19 nt, Homo sapiens
  misc_RNA (1)...(19): siRNA sense strand
ggauuucuuggcuauuuau

SEQ ID NO: 1515262 - RNA, 19 nt, Homo sapiens
  misc_RNA (1)...(19): siRNA sense strand
uucaugcucugguacaaug

SEQ ID NO: 1515263 - RNA, 19 nt, Homo sapiens
  misc_RNA (1)...(19): siRNA sense strand
ggacuccgagccaggaaag

SEQ ID NO: 1515264 - RNA, 19 nt, Homo sapiens
  misc_RNA (1)...(19): siRNA sense strand
gaucguguaacuggugcua

SEQ ID NO: 1515265 - RNA, 19 nt, Homo sapiens
  misc_RNA (1)...(19): siRNA sense strand
aaagugccagaucguguaa

SEQ ID NO: 1515266 - RNA, 19 nt, Homo sapiens
  misc_RNA (1)...(19): siRNA sense strand
cacacaugcugggcccuuu

SEQ ID NO: 1515267 - RNA, 19 nt, Homo sapiens
  misc_RNA (1)...(19): siRNA sense strand
uaagugcagaggcauuugu

SEQ ID NO: 1515268 - RNA, 19 nt, Homo sapiens
  misc_RNA (1)...(19): siRNA sense strand
gaucugagcucuucugguu

SEQ ID NO: 1515269 - RNA, 19 nt, Homo sapiens
  misc_RNA (1)...(19): siRNA sense strand
ugaggaggcuauaggaaua

SEQ ID NO: 1515270 - RNA, 19 nt, Homo sapiens
  misc_RNA (1)...(19): siRNA sense strand
gcccaugguuuguauauug

SEQ ID NO: 1515271 - RNA, 19 nt, Homo sapiens
  misc_RNA (1)...(19): siRNA sense strand
gaaaugcccaugguuugua

SEQ ID NO: 1515272 - RNA, 19 nt, Homo sapiens
  misc_RNA (1)...(19): siRNA sense strand
ccacggugcuuuaucuuca

SEQ ID NO: 1515273 - RNA, 19 nt, Homo sapiens
  misc_RNA (1)...(19): siRNA sense strand
ggaauacuuacaaccauuu

SEQ ID NO: 1515274 - RNA, 19 nt, Homo sapiens
  misc_RNA (1)...(19): siRNA sense strand
gaggcuauaggaauacuua

SEQ ID NO: 1515275 - RNA, 19 nt, Homo sapiens
  misc_RNA (1)...(19): siRNA sense strand
gagaccaauuucaagagaa

SEQ ID NO: 1515276 - RNA, 19 nt, Homo sapiens
  misc_RNA (1)...(19): siRNA sense strand
ggaaaugcccaugguuugu

SEQ ID NO: 1515277 - RNA, 19 nt, Homo sapiens
  misc_RNA (1)...(19): siRNA sense strand
gcuauaggaauacuuacaa

SEQ ID NO: 1515278 - RNA, 19 nt, Homo sapiens
  misc_RNA (1)...(19): siRNA sense strand
uccaggaggucaucucuau

SEQ ID NO: 1515279 - RNA, 19 nt, Homo sapiens
  misc_RNA (1)...(19): siRNA sense strand
ugcuuuaucuucauucuga

SEQ ID NO: 1515280 - RNA, 19 nt, Homo sapiens
  misc_RNA (1)...(19): siRNA sense strand
agagaccaauuucaagaga

SEQ ID NO: 1515281 - RNA, 19 nt, Homo sapiens
  misc_RNA (1)...(19): siRNA sense strand
gagcucuucugguuggaau

SEQ ID NO: 1515282 - RNA, 19 nt, Homo sapiens
  misc_RNA (1)...(19): siRNA sense strand
ugagagaccaauuucaaga

SEQ ID NO: 1515283 - RNA, 19 nt, Homo sapiens
  misc_RNA (1)...(19): siRNA sense strand
aagagaagcugggccuguu

SEQ ID NO: 1515284 - RNA, 19 nt, Homo sapiens
  misc_RNA (1)...(19): siRNA sense strand
gaugaggaggcuauaggaa

SEQ ID NO: 1515285 - RNA, 19 nt, Homo sapiens
  misc_RNA (1)...(19): siRNA sense strand
ccagggagaggacaguuau

SEQ ID NO: 1515286 - RNA, 19 nt, Homo sapiens
  misc_RNA (1)...(19): siRNA sense strand
aggaauacuuacaaccauu

SEQ ID NO: 1515287 - RNA, 19 nt, Homo sapiens
  misc_RNA (1)...(19): siRNA sense strand
aaaugcccaugguuuguau

SEQ ID NO: 1515288 - RNA, 19 nt, Homo sapiens
  misc_RNA (1)...(19): siRNA sense strand
gagaugaggaggcuauagg

SEQ ID NO: 1515289 - RNA, 19 nt, Homo sapiens
  misc_RNA (1)...(19): siRNA sense strand
ccagagaugaggaggcuau

SEQ ID NO: 1515290 - RNA, 19 nt, Homo sapiens
  misc_RNA (1)...(19): siRNA sense strand
uaaaauggacacacacaaa

SEQ ID NO: 1515291 - RNA, 19 nt, Homo sapiens
  misc_RNA (1)...(19): siRNA sense strand
agaccaauuucaagagaag

SEQ ID NO: 1515292 - RNA, 19 nt, Homo sapiens
  misc_RNA (1)...(19): siRNA sense strand
uaggaauacuuacaaccau

SEQ ID NO: 1515293 - RNA, 19 nt, Homo sapiens
  misc_RNA (1)...(19): siRNA sense strand
uggaaaugcccaugguuug

SEQ ID NO: 1515294 - RNA, 19 nt, Homo sapiens
  misc_RNA (1)...(19): siRNA sense strand
caacauuuccagagaugag

SEQ ID NO: 1515295 - RNA, 19 nt, Homo sapiens
  misc_RNA (1)...(19): siRNA sense strand
gagagaccaauuucaagag

SEQ ID NO: 1515296 - RNA, 19 nt, Homo sapiens
  misc_RNA (1)...(19): siRNA sense strand
gagaagcugggccuguugu

SEQ ID NO: 1515297 - RNA, 19 nt, Homo sapiens
  misc_RNA (1)...(19): siRNA sense strand
cuggaaaugcccaugguuu

SEQ ID NO: 1515298 - RNA, 19 nt, Homo sapiens
  misc_RNA (1)...(19): siRNA sense strand
ggaauucuugggucuuugg

SEQ ID NO: 1515299 - RNA, 19 nt, Homo sapiens
  misc_RNA (1)...(19): siRNA sense strand
uuggaauucuugggucuuu

SEQ ID NO: 1515300 - RNA, 19 nt, Homo sapiens
  misc_RNA (1)...(19): siRNA sense strand
caggaggucaucucuaucu

SEQ ID NO: 1515301 - RNA, 19 nt, Homo sapiens
  misc_RNA (1)...(19): siRNA sense strand
cccaugguuuguauauugu

SEQ ID NO: 1515302 - RNA, 19 nt, Homo sapiens
  misc_RNA (1)...(19): siRNA sense strand
agagucaagugccguaaaa

SEQ ID NO: 1515303 - RNA, 19 nt, Homo sapiens
  misc_RNA (1)...(19): siRNA sense strand
acaaccauuuuacagcuua

SEQ ID NO: 1515304 - RNA, 19 nt, Homo sapiens
  misc_RNA (1)...(19): siRNA sense strand
aaaauggacacacacaaaa

SEQ ID NO: 1515305 - RNA, 19 nt, Homo sapiens
  misc_RNA (1)...(19): siRNA sense strand
aaacagcagccaaggcaua

SEQ ID NO: 1515306 - RNA, 19 nt, Homo sapiens
  misc_RNA (1)...(19): siRNA sense strand
gaauucccguucagcucua

SEQ ID NO: 1515307 - RNA, 19 nt, Homo sapiens
  misc_RNA (1)...(19): siRNA sense strand
gaaaacggaacaaacgaaa

SEQ ID NO: 1515308 - RNA, 19 nt, Homo sapiens
  misc_RNA (1)...(19): siRNA sense strand
gaagugcaguggcgcaauc

SEQ ID NO: 1515309 - RNA, 19 nt, Homo sapiens
  misc_RNA (1)...(19): siRNA sense strand
gagacggacucuuguacug

SEQ ID NO: 1515310 - RNA, 19 nt, Homo sapiens
  misc_RNA (1)...(19): siRNA sense strand
caccacacccggcuuauuu

SEQ ID NO: 1515311 - RNA, 19 nt, Homo sapiens
  misc_RNA (1)...(19): siRNA sense strand
agacagggcuucgccaugu

SEQ ID NO: 1515312 - RNA, 19 nt, Homo sapiens
  misc_RNA (1)...(19): siRNA sense strand
guguuucgcuuuauuccuu

SEQ ID NO: 1515313 - RNA, 19 nt, Homo sapiens
  misc_RNA (1)...(19): siRNA sense strand
gcgcaaucuuggcucacua

SEQ ID NO: 1515314 - RNA, 19 nt, Homo sapiens
  misc_RNA (1)...(19): siRNA sense strand
aaucuuggcucacuacaac

SEQ ID NO: 1515315 - RNA, 19 nt, Homo sapiens
  misc_RNA (1)...(19): siRNA sense strand
ccaaguagcagggauuaca

SEQ ID NO: 1515316 - RNA, 19 nt, Homo sapiens
  misc_RNA (1)...(19): siRNA sense strand
gacagggcuucgccauguu

SEQ ID NO: 1515317 - RNA, 19 nt, Homo sapiens
  misc_RNA (1)...(19): siRNA sense strand
acuggaaccuggccuuguu

SEQ ID NO: 1515318 - RNA, 19 nt, Homo sapiens
  misc_RNA (1)...(19): siRNA sense strand
ugccucagccucccaagua

SEQ ID NO: 1515319 - RNA, 19 nt, Homo sapiens
  misc_RNA (1)...(19): siRNA sense strand
uugccuguguuucgcuuua

SEQ ID NO: 1515320 - RNA, 19 nt, Homo sapiens
  misc_RNA (1)...(19): siRNA sense strand
gugcaguggcgcaaucuug

SEQ ID NO: 1515321 - RNA, 19 nt, Homo sapiens
  misc_RNA (1)...(19): siRNA sense strand
gccuguguuucgcuuuauu

SEQ ID NO: 1515322 - RNA, 19 nt, Homo sapiens
  misc_RNA (1)...(19): siRNA sense strand
gguaaaauugccuguguuu

SEQ ID NO: 1515323 - RNA, 19 nt, Homo sapiens
  misc_RNA (1)...(19): siRNA sense strand
cuccuggguucaagugauu

SEQ ID NO: 1515324 - RNA, 19 nt, Homo sapiens
  misc_RNA (1)...(19): siRNA sense strand
ccaccacacccggcuuauu

SEQ ID NO: 1515325 - RNA, 19 nt, Homo sapiens
  misc_RNA (1)...(19): siRNA sense strand
ucucaacuccucugggaau

SEQ ID NO: 1515326 - RNA, 19 nt, Homo sapiens
  misc_RNA (1)...(19): siRNA sense strand
gcuguucaaucuacaauaa

SEQ ID NO: 1515327 - RNA, 19 nt, Homo sapiens
  misc_RNA (1)...(19): siRNA sense strand
gaaagaagaacguccagaa

SEQ ID NO: 1515328 - RNA, 19 nt, Homo sapiens
  misc_RNA (1)...(19): siRNA sense strand
gcaacuaaaccauuaugua

SEQ ID NO: 1515329 - RNA, 19 nt, Homo sapiens
  misc_RNA (1)...(19): siRNA sense strand
ugaaagaacuaaagaagca

SEQ ID NO: 1515330 - RNA, 19 nt, Homo sapiens
  misc_RNA (1)...(19): siRNA sense strand
gaacagaaggaguggauga

SEQ ID NO: 1515331 - RNA, 19 nt, Homo sapiens
  misc_RNA (1)...(19): siRNA sense strand
cagagaagcugacggaaca

SEQ ID NO: 1515332 - RNA, 19 nt, Homo sapiens
  misc_RNA (1)...(19): siRNA sense strand
gaagugaguagugaauaua

SEQ ID NO: 1515333 - RNA, 19 nt, Homo sapiens
  misc_RNA (1)...(19): siRNA sense strand
ggaugaagauauaauugug

SEQ ID NO: 1515334 - RNA, 19 nt, Homo sapiens
  misc_RNA (1)...(19): siRNA sense strand
gaaaugaagaagccaguga

SEQ ID NO: 1515335 - RNA, 19 nt, Homo sapiens
  misc_RNA (1)...(19): siRNA sense strand
gcacuuagaagggcaauug

SEQ ID NO: 1515336 - RNA, 19 nt, Homo sapiens
  misc_RNA (1)...(19): siRNA sense strand
gaagaggacgccauuguuc

SEQ ID NO: 1515337 - RNA, 19 nt, Homo sapiens
  misc_RNA (1)...(19): siRNA sense strand
uguaaaggcuguucaaucu

SEQ ID NO: 1515338 - RNA, 19 nt, Homo sapiens
  misc_RNA (1)...(19): siRNA sense strand
caaaggaggaaaugaagaa

SEQ ID NO: 1515339 - RNA, 19 nt, Homo sapiens
  misc_RNA (1)...(19): siRNA sense strand
ugaagugaguagugaauau

SEQ ID NO: 1515340 - RNA, 19 nt, Homo sapiens
  misc_RNA (1)...(19): siRNA sense strand
ggacguuccaguucaaauu

SEQ ID NO: 1515341 - RNA, 19 nt, Homo sapiens
  misc_RNA (1)...(19): siRNA sense strand
gagcaagaauucugaugca

SEQ ID NO: 1515342 - RNA, 19 nt, Homo sapiens
  misc_RNA (1)...(19): siRNA sense strand
gaugcagacuuucaaaaua

SEQ ID NO: 1515343 - RNA, 19 nt, Homo sapiens
  misc_RNA (1)...(19): siRNA sense strand
gaagggcaauugagaacca

SEQ ID NO: 1515344 - RNA, 19 nt, Homo sapiens
  misc_RNA (1)...(19): siRNA sense strand
aggaguggaugaagauaua

SEQ ID NO: 1515345 - RNA, 19 nt, Homo sapiens
  misc_RNA (1)...(19): siRNA sense strand
acaaggcaaugguugaauu

SEQ ID NO: 1515346 - RNA, 19 nt, Homo sapiens
  misc_RNA (1)...(19): siRNA sense strand
ugagaaccauaacaagaaa

SEQ ID NO: 1515347 - RNA, 19 nt, Homo sapiens
  misc_RNA (1)...(19): siRNA sense strand
cagaaggaguggaugaaga

SEQ ID NO: 1515348 - RNA, 19 nt, Homo sapiens
  misc_RNA (1)...(19): siRNA sense strand
uaaaggcuguucaaucuac

SEQ ID NO: 1515349 - RNA, 19 nt, Homo sapiens
  misc_RNA (1)...(19): siRNA sense strand
caacugguuucaucuccuu

SEQ ID NO: 1515350 - RNA, 19 nt, Homo sapiens
  misc_RNA (1)...(19): siRNA sense strand
agacugaagugaguaguga

SEQ ID NO: 1515351 - RNA, 19 nt, Homo sapiens
  misc_RNA (1)...(19): siRNA sense strand
gaacuaaagaagcaaugug

SEQ ID NO: 1515352 - RNA, 19 nt, Homo sapiens
  misc_RNA (1)...(19): siRNA sense strand
gguugaauuugcuacauug

SEQ ID NO: 1515353 - RNA, 19 nt, Homo sapiens
  misc_RNA (1)...(19): siRNA sense strand
gcaauguggucuucaagcu

SEQ ID NO: 1515354 - RNA, 19 nt, Homo sapiens
  misc_RNA (1)...(19): siRNA sense strand
ggacaaggcaaugguugaa

SEQ ID NO: 1515355 - RNA, 19 nt, Homo sapiens
  misc_RNA (1)...(19): siRNA sense strand
ugaauuugcuacauuggau

SEQ ID NO: 1515356 - RNA, 19 nt, Homo sapiens
  misc_RNA (1)...(19): siRNA sense strand
caauugagaaccauaacaa

SEQ ID NO: 1515357 - RNA, 19 nt, Homo sapiens
  misc_RNA (1)...(19): siRNA sense strand
ccacacggauauaagaaag

SEQ ID NO: 1515358 - RNA, 19 nt, Homo sapiens
  misc_RNA (1)...(19): siRNA sense strand
uuacaaaggaggaaaugaa

SEQ ID NO: 1515359 - RNA, 19 nt, Homo sapiens
  misc_RNA (1)...(19): siRNA sense strand
caaggcaaugguugaauuu

SEQ ID NO: 1515360 - RNA, 19 nt, Homo sapiens
  misc_RNA (1)...(19): siRNA sense strand
gauauaauugugacccaaa

SEQ ID NO: 1515361 - RNA, 19 nt, Homo sapiens
  misc_RNA (1)...(19): siRNA sense strand
uuaaacaacagcugaaaga

SEQ ID NO: 1515362 - RNA, 19 nt, Homo sapiens
  misc_RNA (1)...(19): siRNA sense strand
aaagaagaacguccagaaa

SEQ ID NO: 1515363 - RNA, 19 nt, Homo sapiens
  misc_RNA (1)...(19): siRNA sense strand
gaucggcaacuaaaccauu

SEQ ID NO: 1515364 - RNA, 19 nt, Homo sapiens
  misc_RNA (1)...(19): siRNA sense strand
gauauaagaaagucagauc

SEQ ID NO: 1515365 - RNA, 19 nt, Homo sapiens
  misc_RNA (1)...(19): siRNA sense strand
gaaaagacaucgucauucc

SEQ ID NO: 1515366 - RNA, 19 nt, Homo sapiens
  misc_RNA (1)...(19): siRNA sense strand
gugaguagugaauauagua

SEQ ID NO: 1515367 - RNA, 19 nt, Homo sapiens
  misc_RNA (1)...(19): siRNA sense strand
guaaaggcuguucaaucua

SEQ ID NO: 1515368 - RNA, 19 nt, Homo sapiens
  misc_RNA (1)...(19): siRNA sense strand
caacagcugaaagaacuaa

SEQ ID NO: 1515369 - RNA, 19 nt, Homo sapiens
  misc_RNA (1)...(19): siRNA sense strand
gaaggaguggaugaagaua

SEQ ID NO: 1515370 - RNA, 19 nt, Homo sapiens
  misc_RNA (1)...(19): siRNA sense strand
gcugaaagaacuaaagaag

SEQ ID NO: 1515371 - RNA, 19 nt, Homo sapiens
  misc_RNA (1)...(19): siRNA sense strand
gccaggacguuccaguuca

SEQ ID NO: 1515372 - RNA, 19 nt, Homo sapiens
  misc_RNA (1)...(19): siRNA sense strand
ccaggacguuccaguucaa

SEQ ID NO: 1515373 - RNA, 19 nt, Homo sapiens
  misc_RNA (1)...(19): siRNA sense strand
gggcaauugagaaccauaa

SEQ ID NO: 1515374 - RNA, 19 nt, Homo sapiens
  misc_RNA (1)...(19): siRNA sense strand
ugaagaggacgccauuguu

SEQ ID NO: 1515375 - RNA, 19 nt, Homo sapiens
  misc_RNA (1)...(19): siRNA sense strand
aacaacagcugaaagaacu

SEQ ID NO: 1515376 - RNA, 19 nt, Homo sapiens
  misc_RNA (1)...(19): siRNA sense strand
uacauuggaucggcaacua

SEQ ID NO: 1515377 - RNA, 19 nt, Homo sapiens
  misc_RNA (1)...(19): siRNA sense strand
gcaauugagaaccauaaca

SEQ ID NO: 1515378 - RNA, 19 nt, Homo sapiens
  misc_RNA (1)...(19): siRNA sense strand
ucuucaagcugacagagaa

SEQ ID NO: 1515379 - RNA, 19 nt, Homo sapiens
  misc_RNA (1)...(19): siRNA sense strand
gugaauauaguauggacaa

SEQ ID NO: 1515380 - RNA, 19 nt, Homo sapiens
  misc_RNA (1)...(19): siRNA sense strand
gccuauugcccucaaauug

SEQ ID NO: 1515381 - RNA, 19 nt, Homo sapiens
  misc_RNA (1)...(19): siRNA sense strand
gacaucgucauuccgagua

SEQ ID NO: 1515382 - RNA, 19 nt, Homo sapiens
  misc_RNA (1)...(19): siRNA sense strand
gaaagucagaucuuaucca

SEQ ID NO: 1515383 - RNA, 19 nt, Homo sapiens
  misc_RNA (1)...(19): siRNA sense strand
uaaacaacagcugaaagaa

SEQ ID NO: 1515384 - RNA, 19 nt, Homo sapiens
  misc_RNA (1)...(19): siRNA sense strand
gaagcugacggaacagaag

SEQ ID NO: 1515385 - RNA, 19 nt, Homo sapiens
  misc_RNA (1)...(19): siRNA sense strand
cagcugaaagaacuaaaga

SEQ ID NO: 1515386 - RNA, 19 nt, Homo sapiens
  misc_RNA (1)...(19): siRNA sense strand
gaaagaacuaaagaagcaa

SEQ ID NO: 1515387 - RNA, 19 nt, Homo sapiens
  misc_RNA (1)...(19): siRNA sense strand
cgccauuguucgcaugauu

SEQ ID NO: 1515388 - RNA, 19 nt, Homo sapiens
  misc_RNA (1)...(19): siRNA sense strand
ugguugaauuugcuacauu

SEQ ID NO: 1515389 - RNA, 19 nt, Homo sapiens
  misc_RNA (1)...(19): siRNA sense strand
uugagaaccauaacaagaa

SEQ ID NO: 1515390 - RNA, 19 nt, Homo sapiens
  misc_RNA (1)...(19): siRNA sense strand
caggaugaagcacuuagaa

SEQ ID NO: 1515391 - RNA, 19 nt, Homo sapiens
  misc_RNA (1)...(19): siRNA sense strand
ggaguggaugaagauauaa

SEQ ID NO: 1515392 - RNA, 19 nt, Homo sapiens
  misc_RNA (1)...(19): siRNA sense strand
aaacaacagcugaaagaac

SEQ ID NO: 1515393 - RNA, 19 nt, Homo sapiens
  misc_RNA (1)...(19): siRNA sense strand
cagcuucuaguguugcuuu

SEQ ID NO: 1515394 - RNA, 19 nt, Homo sapiens
  misc_RNA (1)...(19): siRNA sense strand
gaucuuguggaaagucaga

SEQ ID NO: 1515395 - RNA, 19 nt, Homo sapiens
  misc_RNA (1)...(19): siRNA sense strand
acacggauauaagaaaguc

SEQ ID NO: 1515396 - RNA, 19 nt, Homo sapiens
  misc_RNA (1)...(19): siRNA sense strand
gcuguagccacacggauau

SEQ ID NO: 1515397 - RNA, 19 nt, Homo sapiens
  misc_RNA (1)...(19): siRNA sense strand
uguaucaacucugguaugg

SEQ ID NO: 1515398 - RNA, 19 nt, Homo sapiens
  misc_RNA (1)...(19): siRNA sense strand
aucggcaacuaaaccauua

SEQ ID NO: 1515399 - RNA, 19 nt, Homo sapiens
  misc_RNA (1)...(19): siRNA sense strand
guggaugaagauauaauug

SEQ ID NO: 1515400 - RNA, 19 nt, Homo sapiens
  misc_RNA (1)...(19): siRNA sense strand
agucugcucucuccuccuu

SEQ ID NO: 1515401 - RNA, 19 nt, Homo sapiens
  misc_RNA (1)...(19): siRNA sense strand
caguucaaauucagguuca

SEQ ID NO: 1515402 - RNA, 19 nt, Homo sapiens
  misc_RNA (1)...(19): siRNA sense strand
gguauggacacagcuucua

SEQ ID NO: 1515403 - RNA, 19 nt, Homo sapiens
  misc_RNA (1)...(19): siRNA sense strand
uuagaagggcaauugagaa

SEQ ID NO: 1515404 - RNA, 19 nt, Homo sapiens
  misc_RNA (1)...(19): siRNA sense strand
agaaggaguggaugaagau

SEQ ID NO: 1515405 - RNA, 19 nt, Homo sapiens
  misc_RNA (1)...(19): siRNA sense strand
gagaagcugacggaacaga

SEQ ID NO: 1515406 - RNA, 19 nt, Homo sapiens
  misc_RNA (1)...(19): siRNA sense strand
gacguuccaguucaaauuc

SEQ ID NO: 1515407 - RNA, 19 nt, Homo sapiens
  misc_RNA (1)...(19): siRNA sense strand
cauuggaucggcaacuaaa

SEQ ID NO: 1515408 - RNA, 19 nt, Homo sapiens
  misc_RNA (1)...(19): siRNA sense strand
ccaagccuguaucaacucu

SEQ ID NO: 1515409 - RNA, 19 nt, Homo sapiens
  misc_RNA (1)...(19): siRNA sense strand
cuucuaguguugcuuugga

SEQ ID NO: 1515410 - RNA, 19 nt, Homo sapiens
  misc_RNA (1)...(19): siRNA sense strand
gccacacggauauaagaaa

SEQ ID NO: 1515411 - RNA, 19 nt, Homo sapiens
  misc_RNA (1)...(19): siRNA sense strand
ggccuauugcccucaaauu

SEQ ID NO: 1515412 - RNA, 19 nt, Homo sapiens
  misc_RNA (1)...(19): siRNA sense strand
aaaugaagaagccagugaa

SEQ ID NO: 1515413 - RNA, 19 nt, Homo sapiens
  misc_RNA (1)...(19): siRNA sense strand
caacuucaccugccccauu

SEQ ID NO: 1515414 - RNA, 19 nt, Homo sapiens
  misc_RNA (1)...(19): siRNA sense strand
cuuagaagggcaauugaga

SEQ ID NO: 1515415 - RNA, 19 nt, Homo sapiens
  misc_RNA (1)...(19): siRNA sense strand
uagccacacggauauaaga

SEQ ID NO: 1515416 - RNA, 19 nt, Homo sapiens
  misc_RNA (1)...(19): siRNA sense strand
gcccucaaauuggcuguag

SEQ ID NO: 1515417 - RNA, 19 nt, Homo sapiens
  misc_RNA (1)...(19): siRNA sense strand
ucugcucucuccuccuuga

SEQ ID NO: 1515418 - RNA, 19 nt, Homo sapiens
  misc_RNA (1)...(19): siRNA sense strand
gccauuguucgcaugauug

SEQ ID NO: 1515419 - RNA, 19 nt, Homo sapiens
  misc_RNA (1)...(19): siRNA sense strand
gaguagugaauauaguaug

SEQ ID NO: 1515420 - RNA, 19 nt, Homo sapiens
  misc_RNA (1)...(19): siRNA sense strand
aguagugaauauaguaugg

SEQ ID NO: 1515421 - RNA, 19 nt, Homo sapiens
  misc_RNA (1)...(19): siRNA sense strand
acaaaggaggaaaugaaga

SEQ ID NO: 1515422 - RNA, 19 nt, Homo sapiens
  misc_RNA (1)...(19): siRNA sense strand
ccauuguucgcaugauuga

SEQ ID NO: 1515423 - RNA, 19 nt, Homo sapiens
  misc_RNA (1)...(19): siRNA sense strand
guauggacacagcuucuag

SEQ ID NO: 1515424 - RNA, 19 nt, Homo sapiens
  misc_RNA (1)...(19): siRNA sense strand
ccuauugcccucaaauugg

SEQ ID NO: 1515425 - RNA, 19 nt, Homo sapiens
  misc_RNA (1)...(19): siRNA sense strand
aaaggccuauugcccucaa

SEQ ID NO: 1515426 - RNA, 19 nt, Homo sapiens
  misc_RNA (1)...(19): siRNA sense strand
uaacgaagccaaucaaaga

SEQ ID NO: 1515427 - RNA, 19 nt, Homo sapiens
  misc_RNA (1)...(19): siRNA sense strand
gcuccacacuucuuuggua

SEQ ID NO: 1515428 - RNA, 19 nt, Homo sapiens
  misc_RNA (1)...(19): siRNA sense strand
gagcagcgcagccacagua

SEQ ID NO: 1515429 - RNA, 19 nt, Homo sapiens
  misc_RNA (1)...(19): siRNA sense strand
uaacaggcaucgaacugaa

SEQ ID NO: 1515430 - RNA, 19 nt, Homo sapiens
  misc_RNA (1)...(19): siRNA sense strand
gcaucgaacugaaagaauc

SEQ ID NO: 1515431 - RNA, 19 nt, Homo sapiens
  misc_RNA (1)...(19): siRNA sense strand
ccacacuucuuugguagua

SEQ ID NO: 1515432 - RNA, 19 nt, Homo sapiens
  misc_RNA (1)...(19): siRNA sense strand
gcaguuaacaggcaucgaa

SEQ ID NO: 1515433 - RNA, 19 nt, Homo sapiens
  misc_RNA (1)...(19): siRNA sense strand
gaagccaccuccgcuguau

SEQ ID NO: 1515434 - RNA, 19 nt, Homo sapiens
  misc_RNA (1)...(19): siRNA sense strand
caccuccgcuguauuugaa

SEQ ID NO: 1515435 - RNA, 19 nt, Homo sapiens
  misc_RNA (1)...(19): siRNA sense strand
cagccagccucauaggaaa

SEQ ID NO: 1515436 - RNA, 19 nt, Homo sapiens
  misc_RNA (1)...(19): siRNA sense strand
acacuucuuugguaguaaa

SEQ ID NO: 1515437 - RNA, 19 nt, Homo sapiens
  misc_RNA (1)...(19): siRNA sense strand
caccaucaccagcaguuua

SEQ ID NO: 1515438 - RNA, 19 nt, Homo sapiens
  misc_RNA (1)...(19): siRNA sense strand
cuucuuugguaguaaauga

SEQ ID NO: 1515439 - RNA, 19 nt, Homo sapiens
  misc_RNA (1)...(19): siRNA sense strand
cagcgcagccacaguauca

SEQ ID NO: 1515440 - RNA, 19 nt, Homo sapiens
  misc_RNA (1)...(19): siRNA sense strand
ccaccuccgcuguauuuga

SEQ ID NO: 1515441 - RNA, 19 nt, Homo sapiens
  misc_RNA (1)...(19): siRNA sense strand
gcaguuuacacccgcaguu

SEQ ID NO: 1515442 - RNA, 19 nt, Homo sapiens
  misc_RNA (1)...(19): siRNA sense strand
ucagccagccucauaggaa

SEQ ID NO: 1515443 - RNA, 19 nt, Homo sapiens
  misc_RNA (1)...(19): siRNA sense strand
cccaucagccagccucaua

SEQ ID NO: 1515444 - RNA, 19 nt, Homo sapiens
  misc_RNA (1)...(19): siRNA sense strand
caguuuacacccgcaguua

SEQ ID NO: 1515445 - RNA, 19 nt, Homo sapiens
  misc_RNA (1)...(19): siRNA sense strand
guaucacugcacauauaua

SEQ ID NO: 1515446 - RNA, 19 nt, Homo sapiens
  misc_RNA (1)...(19): siRNA sense strand
guuaacaggcaucgaacug

SEQ ID NO: 1515447 - RNA, 19 nt, Homo sapiens
  misc_RNA (1)...(19): siRNA sense strand
agaagccaccuccgcugua

SEQ ID NO: 1515448 - RNA, 19 nt, Homo sapiens
  misc_RNA (1)...(19): siRNA sense strand
guaguaaaugacaccauca

SEQ ID NO: 1515449 - RNA, 19 nt, Homo sapiens
  misc_RNA (1)...(19): siRNA sense strand
caucgaacugaaagaauca

SEQ ID NO: 1515450 - RNA, 19 nt, Homo sapiens
  misc_RNA (1)...(19): siRNA sense strand
agccaccuccgcuguauuu

SEQ ID NO: 1515451 - RNA, 19 nt, Homo sapiens
  misc_RNA (1)...(19): siRNA sense strand
gacaccaucaccagcaguu

SEQ ID NO: 1515452 - RNA, 19 nt, Homo sapiens
  misc_RNA (1)...(19): siRNA sense strand
ccauccugcuccacacuuc

SEQ ID NO: 1515453 - RNA, 19 nt, Homo sapiens
  misc_RNA (1)...(19): siRNA sense strand
cuagagaucucaucaaaua

SEQ ID NO: 1515454 - RNA, 19 nt, Homo sapiens
  misc_RNA (1)...(19): siRNA sense strand
ggacagcuccaagagauua

SEQ ID NO: 1515455 - RNA, 19 nt, Homo sapiens
  misc_RNA (1)...(19): siRNA sense strand
ggaaagaccaaccaacaga

SEQ ID NO: 1515456 - RNA, 19 nt, Homo sapiens
  misc_RNA (1)...(19): siRNA sense strand
cgagugaaauuacugaaca

SEQ ID NO: 1515457 - RNA, 19 nt, Homo sapiens
  misc_RNA (1)...(19): siRNA sense strand
agaagagacuggaaucauc

SEQ ID NO: 1515458 - RNA, 19 nt, Homo sapiens
  misc_RNA (1)...(19): siRNA sense strand
gcuuggccaugaacaguuu

SEQ ID NO: 1515459 - RNA, 19 nt, Homo sapiens
  misc_RNA (1)...(19): siRNA sense strand
cccuagagaucucaucaaa

SEQ ID NO: 1515460 - RNA, 19 nt, Homo sapiens
  misc_RNA (1)...(19): siRNA sense strand
ugucaagaagcaauaguua

SEQ ID NO: 1515461 - RNA, 19 nt, Homo sapiens
  misc_RNA (1)...(19): siRNA sense strand
gaagagacuggaaucaucu

SEQ ID NO: 1515462 - RNA, 19 nt, Homo sapiens
  misc_RNA (1)...(19): siRNA sense strand
gcacgagugaaauuacuga

SEQ ID NO: 1515463 - RNA, 19 nt, Homo sapiens
  misc_RNA (1)...(19): siRNA sense strand
aaggacagcuccaagagau

SEQ ID NO: 1515464 - RNA, 19 nt, Homo sapiens
  misc_RNA (1)...(19): siRNA sense strand
gagugaaauuacugaacaa

SEQ ID NO: 1515465 - RNA, 19 nt, Homo sapiens
  misc_RNA (1)...(19): siRNA sense strand
ggacauccucccuuaccuu

SEQ ID NO: 1515466 - RNA, 19 nt, Homo sapiens
  misc_RNA (1)...(19): siRNA sense strand
gauggauacagcacucuaa

SEQ ID NO: 1515467 - RNA, 19 nt, Homo sapiens
  misc_RNA (1)...(19): siRNA sense strand
gagaagagacuggaaucau

SEQ ID NO: 1515468 - RNA, 19 nt, Homo sapiens
  misc_RNA (1)...(19): siRNA sense strand
ucaagaagcaauaguuagu

SEQ ID NO: 1515469 - RNA, 19 nt, Homo sapiens
  misc_RNA (1)...(19): siRNA sense strand
acaggaagcuugccuugac

SEQ ID NO: 1515470 - RNA, 19 nt, Homo sapiens
  misc_RNA (1)...(19): siRNA sense strand
caggaaagaccaaccaaca

SEQ ID NO: 1515471 - RNA, 19 nt, Homo sapiens
  misc_RNA (1)...(19): siRNA sense strand
ccucaucuuucccuaagug

SEQ ID NO: 1515472 - RNA, 19 nt, Homo sapiens
  misc_RNA (1)...(19): siRNA sense strand
acaagcacgagugaaauua

SEQ ID NO: 1515473 - RNA, 19 nt, Homo sapiens
  misc_RNA (1)...(19): siRNA sense strand
ccaagacucccucccuaga

SEQ ID NO: 1515474 - RNA, 19 nt, Homo sapiens
  misc_RNA (1)...(19): siRNA sense strand
uaagugucaagaagcaaua

SEQ ID NO: 1515475 - RNA, 19 nt, Homo sapiens
  misc_RNA (1)...(19): siRNA sense strand
cacaagcacgagugaaauu

SEQ ID NO: 1515476 - RNA, 19 nt, Homo sapiens
  misc_RNA (1)...(19): siRNA sense strand
aagacucccucccuagaga

SEQ ID NO: 1515477 - RNA, 19 nt, Homo sapiens
  misc_RNA (1)...(19): siRNA sense strand
caucaaauaaccaggaaag

SEQ ID NO: 1515478 - RNA, 19 nt, Homo sapiens
  misc_RNA (1)...(19): siRNA sense strand
uaaggacagcuccaagaga

SEQ ID NO: 1515479 - RNA, 19 nt, Homo sapiens
  misc_RNA (1)...(19): siRNA sense strand
aauaagacaaccuguguuc

SEQ ID NO: 1515480 - RNA, 19 nt, Homo sapiens
  misc_RNA (1)...(19): siRNA sense strand
caucuuucccuaaguguca

SEQ ID NO: 1515481 - RNA, 19 nt, Homo sapiens
  misc_RNA (1)...(19): siRNA sense strand
ucccuuaccuucacauguc

SEQ ID NO: 1515482 - RNA, 19 nt, Homo sapiens
  misc_RNA (1)...(19): siRNA sense strand
gcaauaguuaguccacaag

SEQ ID NO: 1515483 - RNA, 19 nt, Homo sapiens
  misc_RNA (1)...(19): siRNA sense strand
ccacaagcacgagugaaau

SEQ ID NO: 1515484 - RNA, 19 nt, Homo sapiens
  misc_RNA (1)...(19): siRNA sense strand
aaagaccaaccaacagaga

SEQ ID NO: 1515485 - RNA, 19 nt, Homo sapiens
  misc_RNA (1)...(19): siRNA sense strand
gcagcuucaucccucaucu

SEQ ID NO: 1515486 - RNA, 19 nt, Homo sapiens
  misc_RNA (1)...(19): siRNA sense strand
ucaaauaaccaggaaagac

SEQ ID NO: 1515487 - RNA, 19 nt, Homo sapiens
  misc_RNA (1)...(19): siRNA sense strand
ucuaaggacagcuccaaga

SEQ ID NO: 1515488 - RNA, 19 nt, Homo sapiens
  misc_RNA (1)...(19): siRNA sense strand
agcaauaguuaguccacaa

SEQ ID NO: 1515489 - RNA, 19 nt, Homo sapiens
  misc_RNA (1)...(19): siRNA sense strand
cagagaagagacuggaauc

SEQ ID NO: 1515490 - RNA, 19 nt, Homo sapiens
  misc_RNA (1)...(19): siRNA sense strand
caagaagcaauaguuaguc

SEQ ID NO: 1515491 - RNA, 19 nt, Homo sapiens
  misc_RNA (1)...(19): siRNA sense strand
cuucaucccucaucuuucc

SEQ ID NO: 1515492 - RNA, 19 nt, Homo sapiens
  misc_RNA (1)...(19): siRNA sense strand
caagcacgagugaaauuac

SEQ ID NO: 1515493 - RNA, 19 nt, Homo sapiens
  misc_RNA (1)...(19): siRNA sense strand
uccacaagcacgagugaaa

SEQ ID NO: 1515494 - RNA, 19 nt, Homo sapiens
  misc_RNA (1)...(19): siRNA sense strand
gaagauacuuugcauugua

SEQ ID NO: 1515495 - RNA, 19 nt, Homo sapiens
  misc_RNA (1)...(19): siRNA sense strand
gagaagcuccuguuuauua

SEQ ID NO: 1515496 - RNA, 19 nt, Homo sapiens
  misc_RNA (1)...(19): siRNA sense strand
gaaagggacuuggaaauuc

SEQ ID NO: 1515497 - RNA, 19 nt, Homo sapiens
  misc_RNA (1)...(19): siRNA sense strand
caaagguucuccuauguuu

SEQ ID NO: 1515498 - RNA, 19 nt, Homo sapiens
  misc_RNA (1)...(19): siRNA sense strand
gaagggcuguggucuauga

SEQ ID NO: 1515499 - RNA, 19 nt, Homo sapiens
  misc_RNA (1)...(19): siRNA sense strand
cagagaagcuccuguuuau

SEQ ID NO: 1515500 - RNA, 19 nt, Homo sapiens
  misc_RNA (1)...(19): siRNA sense strand
gaaagugccucucuccaau

SEQ ID NO: 1515501 - RNA, 19 nt, Homo sapiens
  misc_RNA (1)...(19): siRNA sense strand
ggaguucucuuucagcaaa

SEQ ID NO: 1515502 - RNA, 19 nt, Homo sapiens
  misc_RNA (1)...(19): siRNA sense strand
gauguugggucguaucuuu

SEQ ID NO: 1515503 - RNA, 19 nt, Homo sapiens
  misc_RNA (1)...(19): siRNA sense strand
caagagaacuggaagauac

SEQ ID NO: 1515504 - RNA, 19 nt, Homo sapiens
  misc_RNA (1)...(19): siRNA sense strand
gaaacuaccuuugcugaau

SEQ ID NO: 1515505 - RNA, 19 nt, Homo sapiens
  misc_RNA (1)...(19): siRNA sense strand
cuacacagcuuguugaaga

SEQ ID NO: 1515506 - RNA, 19 nt, Homo sapiens
  misc_RNA (1)...(19): siRNA sense strand
gaaaccacaucgugcauug

SEQ ID NO: 1515507 - RNA, 19 nt, Homo sapiens
  misc_RNA (1)...(19): siRNA sense strand
ggaagugccuuucauugau

SEQ ID NO: 1515508 - RNA, 19 nt, Homo sapiens
  misc_RNA (1)...(19): siRNA sense strand
gaagugccuuucauugauu

SEQ ID NO: 1515509 - RNA, 19 nt, Homo sapiens
  misc_RNA (1)...(19): siRNA sense strand
gaacaugaaggcugaacua

SEQ ID NO: 1515510 - RNA, 19 nt, Homo sapiens
  misc_RNA (1)...(19): siRNA sense strand
gcuccaagaugauggcaua

SEQ ID NO: 1515511 - RNA, 19 nt, Homo sapiens
  misc_RNA (1)...(19): siRNA sense strand
gagccgagaugaaagagaa

SEQ ID NO: 1515512 - RNA, 19 nt, Homo sapiens
  misc_RNA (1)...(19): siRNA sense strand
gagugaagcuacuguguga

SEQ ID NO: 1515513 - RNA, 19 nt, Homo sapiens
  misc_RNA (1)...(19): siRNA sense strand
ggucguaucuuugaaguug

SEQ ID NO: 1515514 - RNA, 19 nt, Homo sapiens
  misc_RNA (1)...(19): siRNA sense strand
caaaugagaaucugcauga

SEQ ID NO: 1515515 - RNA, 19 nt, Homo sapiens
  misc_RNA (1)...(19): siRNA sense strand
caaauggaguucucuuuca

SEQ ID NO: 1515516 - RNA, 19 nt, Homo sapiens
  misc_RNA (1)...(19): siRNA sense strand
cacaagagaugaagauguu

SEQ ID NO: 1515517 - RNA, 19 nt, Homo sapiens
  misc_RNA (1)...(19): siRNA sense strand
cagcaaagguucuccuaug

SEQ ID NO: 1515518 - RNA, 19 nt, Homo sapiens
  misc_RNA (1)...(19): siRNA sense strand
caacacgucuugcuugaca

SEQ ID NO: 1515519 - RNA, 19 nt, Homo sapiens
  misc_RNA (1)...(19): siRNA sense strand
guaagagccuggucaaucu

SEQ ID NO: 1515520 - RNA, 19 nt, Homo sapiens
  misc_RNA (1)...(19): siRNA sense strand
cagcaucucuucucuguuc

SEQ ID NO: 1515521 - RNA, 19 nt, Homo sapiens
  misc_RNA (1)...(19): siRNA sense strand
cuaaagaccacguauauau

SEQ ID NO: 1515522 - RNA, 19 nt, Homo sapiens
  misc_RNA (1)...(19): siRNA sense strand
acuccaagcuucuucauuu

SEQ ID NO: 1515523 - RNA, 19 nt, Homo sapiens
  misc_RNA (1)...(19): siRNA sense strand
ccagagaagcuccuguuua

SEQ ID NO: 1515524 - RNA, 19 nt, Homo sapiens
  misc_RNA (1)...(19): siRNA sense strand
gaccuagccuuguuucuca

SEQ ID NO: 1515525 - RNA, 19 nt, Homo sapiens
  misc_RNA (1)...(19): siRNA sense strand
gcuaaugcccucagccaua

SEQ ID NO: 1515526 - RNA, 19 nt, Homo sapiens
  misc_RNA (1)...(19): siRNA sense strand
gcucuacguuggucacaaa

SEQ ID NO: 1515527 - RNA, 19 nt, Homo sapiens
  misc_RNA (1)...(19): siRNA sense strand
ggaagcagaccacagaaga

SEQ ID NO: 1515528 - RNA, 19 nt, Homo sapiens
  misc_RNA (1)...(19): siRNA sense strand
aaaaugaucuucaggauga

SEQ ID NO: 1515529 - RNA, 19 nt, Homo sapiens
  misc_RNA (1)...(19): siRNA sense strand
uuaaucggcuccaagauga

SEQ ID NO: 1515530 - RNA, 19 nt, Homo sapiens
  misc_RNA (1)...(19): siRNA sense strand
cuacguuggucacaaauga

SEQ ID NO: 1515531 - RNA, 19 nt, Homo sapiens
  misc_RNA (1)...(19): siRNA sense strand
caugaaggcugaacuacug

SEQ ID NO: 1515532 - RNA, 19 nt, Homo sapiens
  misc_RNA (1)...(19): siRNA sense strand
gcaagagaacuggaagaua

SEQ ID NO: 1515533 - RNA, 19 nt, Homo sapiens
  misc_RNA (1)...(19): siRNA sense strand
ggaagauacuuugcauugu

SEQ ID NO: 1515534 - RNA, 19 nt, Homo sapiens
  misc_RNA (1)...(19): siRNA sense strand
ggacgaacaugaggaacug

SEQ ID NO: 1515535 - RNA, 19 nt, Homo sapiens
  misc_RNA (1)...(19): siRNA sense strand
cuuaaggccucauuaguga

SEQ ID NO: 1515536 - RNA, 19 nt, Homo sapiens
  misc_RNA (1)...(19): siRNA sense strand
aaacuaccuuugcugaauu

SEQ ID NO: 1515537 - RNA, 19 nt, Homo sapiens
  misc_RNA (1)...(19): siRNA sense strand
gcaaauggaguucucuuuc

SEQ ID NO: 1515538 - RNA, 19 nt, Homo sapiens
  misc_RNA (1)...(19): siRNA sense strand
caucaaaggacgaacauga

SEQ ID NO: 1515539 - RNA, 19 nt, Homo sapiens
  misc_RNA (1)...(19): siRNA sense strand
cuaaugcccucagccauaa

SEQ ID NO: 1515540 - RNA, 19 nt, Homo sapiens
  misc_RNA (1)...(19): siRNA sense strand
guggagagcuggcuaaugc

SEQ ID NO: 1515541 - RNA, 19 nt, Homo sapiens
  misc_RNA (1)...(19): siRNA sense strand
gaugauggcauaaagcuau

SEQ ID NO: 1515542 - RNA, 19 nt, Homo sapiens
  misc_RNA (1)...(19): siRNA sense strand
gauugugccugggauuuaa

SEQ ID NO: 1515543 - RNA, 19 nt, Homo sapiens
  misc_RNA (1)...(19): siRNA sense strand
gaagaaacagggaauguac

SEQ ID NO: 1515544 - RNA, 19 nt, Homo sapiens
  misc_RNA (1)...(19): siRNA sense strand
cagaugcucuccugcagaa

SEQ ID NO: 1515545 - RNA, 19 nt, Homo sapiens
  misc_RNA (1)...(19): siRNA sense strand
gagacaagcaaguuugauu

SEQ ID NO: 1515546 - RNA, 19 nt, Homo sapiens
  misc_RNA (1)...(19): siRNA sense strand
ccacaaagccacaagagau

SEQ ID NO: 1515547 - RNA, 19 nt, Homo sapiens
  misc_RNA (1)...(19): siRNA sense strand
agaggaaccuagagaauuc

SEQ ID NO: 1515548 - RNA, 19 nt, Homo sapiens
  misc_RNA (1)...(19): siRNA sense strand
aguaucagcuggaggaauu

SEQ ID NO: 1515549 - RNA, 19 nt, Homo sapiens
  misc_RNA (1)...(19): siRNA sense strand
uagacgagcuagaagaaga

SEQ ID NO: 1515550 - RNA, 19 nt, Homo sapiens
  misc_RNA (1)...(19): siRNA sense strand
gugucaagaugcuauguaa

SEQ ID NO: 1515551 - RNA, 19 nt, Homo sapiens
  misc_RNA (1)...(19): siRNA sense strand
gaacuucagcucuaacaag

SEQ ID NO: 1515552 - RNA, 19 nt, Homo sapiens
  misc_RNA (1)...(19): siRNA sense strand
gcagucacauccuugaaag

SEQ ID NO: 1515553 - RNA, 19 nt, Homo sapiens
  misc_RNA (1)...(19): siRNA sense strand
guauuacgaucuccaguca

SEQ ID NO: 1515554 - RNA, 19 nt, Homo sapiens
  misc_RNA (1)...(19): siRNA sense strand
gcaaagguucuccuauguu

SEQ ID NO: 1515555 - RNA, 19 nt, Homo sapiens
  misc_RNA (1)...(19): siRNA sense strand
uaccuuugcugaauugauu

SEQ ID NO: 1515556 - RNA, 19 nt, Homo sapiens
  misc_RNA (1)...(19): siRNA sense strand
gaaaugcaaucugacaacu

SEQ ID NO: 1515557 - RNA, 19 nt, Homo sapiens
  misc_RNA (1)...(19): siRNA sense strand
gcaagaacagccugagaga

SEQ ID NO: 1515558 - RNA, 19 nt, Homo sapiens
  misc_RNA (1)...(19): siRNA sense strand
ccaagaugauggcauaaag

SEQ ID NO: 1515559 - RNA, 19 nt, Homo sapiens
  misc_RNA (1)...(19): siRNA sense strand
caaugaaucugaccucacu

SEQ ID NO: 1515560 - RNA, 19 nt, Homo sapiens
  misc_RNA (1)...(19): siRNA sense strand
gcccucagccauaaucaua

SEQ ID NO: 1515561 - RNA, 19 nt, Homo sapiens
  misc_RNA (1)...(19): siRNA sense strand
gagucaaguuccuguguga

SEQ ID NO: 1515562 - RNA, 19 nt, Homo sapiens
  misc_RNA (1)...(19): siRNA sense strand
gagcuagaccugaguaaca

SEQ ID NO: 1515563 - RNA, 19 nt, Homo sapiens
  misc_RNA (1)...(19): siRNA sense strand
ugaaagggacuuggaaauu

SEQ ID NO: 1515564 - RNA, 19 nt, Homo sapiens
  misc_RNA (1)...(19): siRNA sense strand
aagaagauguugggucgua

SEQ ID NO: 1515565 - RNA, 19 nt, Homo sapiens
  misc_RNA (1)...(19): siRNA sense strand
ggacuccagugguucuguu

SEQ ID NO: 1515566 - RNA, 19 nt, Homo sapiens
  misc_RNA (1)...(19): siRNA sense strand
ccacguauauauccguaau

SEQ ID NO: 1515567 - RNA, 19 nt, Homo sapiens
  misc_RNA (1)...(19): siRNA sense strand
gaagcagaccacagaagaa

SEQ ID NO: 1515568 - RNA, 19 nt, Homo sapiens
  misc_RNA (1)...(19): siRNA sense strand
aaacauagcaagagaacug

SEQ ID NO: 1515569 - RNA, 19 nt, Homo sapiens
  misc_RNA (1)...(19): siRNA sense strand
agccgaaggugagguauua

SEQ ID NO: 1515570 - RNA, 19 nt, Homo sapiens
  misc_RNA (1)...(19): siRNA sense strand
gcacugggcaaauggaguu

SEQ ID NO: 1515571 - RNA, 19 nt, Homo sapiens
  misc_RNA (1)...(19): siRNA sense strand
uugaaucuguccuuucuuu

SEQ ID NO: 1515572 - RNA, 19 nt, Homo sapiens
  misc_RNA (1)...(19): siRNA sense strand
cuacggguauauuucauga

SEQ ID NO: 1515573 - RNA, 19 nt, Homo sapiens
  misc_RNA (1)...(19): siRNA sense strand
ccacagcagagguagauuu

SEQ ID NO: 1515574 - RNA, 19 nt, Homo sapiens
  misc_RNA (1)...(19): siRNA sense strand
uaucucagcugccauaaaa

SEQ ID NO: 1515575 - RNA, 19 nt, Homo sapiens
  misc_RNA (1)...(19): siRNA sense strand
gccagcaucucuucucugu

SEQ ID NO: 1515576 - RNA, 19 nt, Homo sapiens
  misc_RNA (1)...(19): siRNA sense strand
uaagguacaugaaggaaac

SEQ ID NO: 1515577 - RNA, 19 nt, Homo sapiens
  misc_RNA (1)...(19): siRNA sense strand
ccaagaagaaccagagaug

SEQ ID NO: 1515578 - RNA, 19 nt, Homo sapiens
  misc_RNA (1)...(19): siRNA sense strand
ggagaagaguuagguaagg

SEQ ID NO: 1515579 - RNA, 19 nt, Homo sapiens
  misc_RNA (1)...(19): siRNA sense strand
caagugaaguugagaaaau

SEQ ID NO: 1515580 - RNA, 19 nt, Homo sapiens
  misc_RNA (1)...(19): siRNA sense strand
ucugagagcuuggaugaug

SEQ ID NO: 1515581 - RNA, 19 nt, Homo sapiens
  misc_RNA (1)...(19): siRNA sense strand
ggaaacuaccuuugcugaa

SEQ ID NO: 1515582 - RNA, 19 nt, Homo sapiens
  misc_RNA (1)...(19): siRNA sense strand
caagugugccuuagagaga

SEQ ID NO: 1515583 - RNA, 19 nt, Homo sapiens
  misc_RNA (1)...(19): siRNA sense strand
gccuaaagaccacguauau

SEQ ID NO: 1515584 - RNA, 19 nt, Homo sapiens
  misc_RNA (1)...(19): siRNA sense strand
aagcuccuguuuauuauug

SEQ ID NO: 1515585 - RNA, 19 nt, Homo sapiens
  misc_RNA (1)...(19): siRNA sense strand
gccaagauccaaaccaaga

SEQ ID NO: 1515586 - RNA, 19 nt, Homo sapiens
  misc_RNA (1)...(19): siRNA sense strand
gagacacuuugaugacuca

SEQ ID NO: 1515587 - RNA, 19 nt, Homo sapiens
  misc_RNA (1)...(19): siRNA sense strand
gggacgaccuacggguaua

SEQ ID NO: 1515588 - RNA, 19 nt, Homo sapiens
  misc_RNA (1)...(19): siRNA sense strand
aucaagaccugguuuguga

SEQ ID NO: 1515589 - RNA, 19 nt, Homo sapiens
  misc_RNA (1)...(19): siRNA sense strand
gaagaccaccuuggcaaug

SEQ ID NO: 1515590 - RNA, 19 nt, Homo sapiens
  misc_RNA (1)...(19): siRNA sense strand
gccaagauccaaaccaaga

SEQ ID NO: 1515591 - RNA, 19 nt, Homo sapiens
  misc_RNA (1)...(19): siRNA sense strand
gcccagggaugccaagauc

SEQ ID NO: 1515592 - RNA, 19 nt, Homo sapiens
  misc_RNA (1)...(19): siRNA sense strand
uggaagauacuuugcauug

SEQ ID NO: 1515593 - RNA, 19 nt, Homo sapiens
  misc_RNA (1)...(19): siRNA sense strand
gaugcaaaguccagaaacu

SEQ ID NO: 1515594 - RNA, 19 nt, Homo sapiens
  misc_RNA (1)...(19): siRNA sense strand
gagaaggacuauuaacauu

SEQ ID NO: 1515595 - RNA, 19 nt, Homo sapiens
  misc_RNA (1)...(19): siRNA sense strand
caaugaugcucuuauacua

SEQ ID NO: 1515596 - RNA, 19 nt, Homo sapiens
  misc_RNA (1)...(19): siRNA sense strand
gauaucgaauguuugcaua

SEQ ID NO: 1515597 - RNA, 19 nt, Homo sapiens
  misc_RNA (1)...(19): siRNA sense strand
gaaggacuauuaacauucu

SEQ ID NO: 1515598 - RNA, 19 nt, Homo sapiens
  misc_RNA (1)...(19): siRNA sense strand
gcacuguguugugucuuua

SEQ ID NO: 1515599 - RNA, 19 nt, Homo sapiens
  misc_RNA (1)...(19): siRNA sense strand
guagggaucguguacauuu

SEQ ID NO: 1515600 - RNA, 19 nt, Homo sapiens
  misc_RNA (1)...(19): siRNA sense strand
gacacuugcuugccuguuu

SEQ ID NO: 1515601 - RNA, 19 nt, Homo sapiens
  misc_RNA (1)...(19): siRNA sense strand
ugacguuccuuugguauuu

SEQ ID NO: 1515602 - RNA, 19 nt, Homo sapiens
  misc_RNA (1)...(19): siRNA sense strand
gaucauccauggcggaaca

SEQ ID NO: 1515603 - RNA, 19 nt, Homo sapiens
  misc_RNA (1)...(19): siRNA sense strand
ucuaugaguugcuacagua

SEQ ID NO: 1515604 - RNA, 19 nt, Homo sapiens
  misc_RNA (1)...(19): siRNA sense strand
ucgcaaugaugcucuuaua

SEQ ID NO: 1515605 - RNA, 19 nt, Homo sapiens
  misc_RNA (1)...(19): siRNA sense strand
aggcugagaaggacuauua

SEQ ID NO: 1515606 - RNA, 19 nt, Homo sapiens
  misc_RNA (1)...(19): siRNA sense strand
gcaaugaugcucuuauacu

SEQ ID NO: 1515607 - RNA, 19 nt, Homo sapiens
  misc_RNA (1)...(19): siRNA sense strand
agauugacaugccaagaaa

SEQ ID NO: 1515608 - RNA, 19 nt, Homo sapiens
  misc_RNA (1)...(19): siRNA sense strand
gccauggccuucuggauca

SEQ ID NO: 1515609 - RNA, 19 nt, Homo sapiens
  misc_RNA (1)...(19): siRNA sense strand
gcaguaggcauucgauauc

SEQ ID NO: 1515610 - RNA, 19 nt, Homo sapiens
  misc_RNA (1)...(19): siRNA sense strand
ccucuuugcuuccaucuuc

SEQ ID NO: 1515611 - RNA, 19 nt, Homo sapiens
  misc_RNA (1)...(19): siRNA sense strand
gacaggaggcugagaagga

SEQ ID NO: 1515612 - RNA, 19 nt, Homo sapiens
  misc_RNA (1)...(19): siRNA sense strand
ggagauccucuucaacaug

SEQ ID NO: 1515613 - RNA, 19 nt, Homo sapiens
  misc_RNA (1)...(19): siRNA sense strand
gugcuagccuccuaucaca

SEQ ID NO: 1515614 - RNA, 19 nt, Homo sapiens
  misc_RNA (1)...(19): siRNA sense strand
acaagaagagcaugagcua

SEQ ID NO: 1515615 - RNA, 19 nt, Homo sapiens
  misc_RNA (1)...(19): siRNA sense strand
cagcuugggaugcucauuu

SEQ ID NO: 1515616 - RNA, 19 nt, Homo sapiens
  misc_RNA (1)...(19): siRNA sense strand
caucccgagugaucucuuu

SEQ ID NO: 1515617 - RNA, 19 nt, Homo sapiens
  misc_RNA (1)...(19): siRNA sense strand
guagacaggaggcugagaa

SEQ ID NO: 1515618 - RNA, 19 nt, Homo sapiens
  misc_RNA (1)...(19): siRNA sense strand
gaagggcggacucgauauc

SEQ ID NO: 1515619 - RNA, 19 nt, Homo sapiens
  misc_RNA (1)...(19): siRNA sense strand
ugagaaggacuauuaacau

SEQ ID NO: 1515620 - RNA, 19 nt, Homo sapiens
  misc_RNA (1)...(19): siRNA sense strand
acggaccacuccucuauga

SEQ ID NO: 1515621 - RNA, 19 nt, Homo sapiens
  misc_RNA (1)...(19): siRNA sense strand
agacggaccacuccucuau

SEQ ID NO: 1515622 - RNA, 19 nt, Homo sapiens
  misc_RNA (1)...(19): siRNA sense strand
gaacaacaggaggaucuca

SEQ ID NO: 1515623 - RNA, 19 nt, Homo sapiens
  misc_RNA (1)...(19): siRNA sense strand
gaagagcaugagcuacaga

SEQ ID NO: 1515624 - RNA, 19 nt, Homo sapiens
  misc_RNA (1)...(19): siRNA sense strand
ccacaggaccacgagcuaa

SEQ ID NO: 1515625 - RNA, 19 nt, Homo sapiens
  misc_RNA (1)...(19): siRNA sense strand
acaucaugcuccagaagaa

SEQ ID NO: 1515626 - RNA, 19 nt, Homo sapiens
  misc_RNA (1)...(19): siRNA sense strand
augaguugcuacaguauga

SEQ ID NO: 1515627 - RNA, 19 nt, Homo sapiens
  misc_RNA (1)...(19): siRNA sense strand
aagaagagcaugagcuaca

SEQ ID NO: 1515628 - RNA, 19 nt, Homo sapiens
  misc_RNA (1)...(19): siRNA sense strand
ccuugacguuccuuuggua

SEQ ID NO: 1515629 - RNA, 19 nt, Homo sapiens
  misc_RNA (1)...(19): siRNA sense strand
ggaagggcggacucgauau

SEQ ID NO: 1515630 - RNA, 19 nt, Homo sapiens
  misc_RNA (1)...(19): siRNA sense strand
aggaagggcggacucgaua

SEQ ID NO: 1515631 - RNA, 19 nt, Homo sapiens
  misc_RNA (1)...(19): siRNA sense strand
ggaucgcaaugaugcucuu

SEQ ID NO: 1515632 - RNA, 19 nt, Homo sapiens
  misc_RNA (1)...(19): siRNA sense strand
aagauugacaugccaagaa

SEQ ID NO: 1515633 - RNA, 19 nt, Homo sapiens
  misc_RNA (1)...(19): siRNA sense strand
caucucaucccgagugauc

SEQ ID NO: 1515634 - RNA, 19 nt, Homo sapiens
  misc_RNA (1)...(19): siRNA sense strand
gaucgcaaugaugcucuua

SEQ ID NO: 1515635 - RNA, 19 nt, Homo sapiens
  misc_RNA (1)...(19): siRNA sense strand
uguguugugucuuuauuag

SEQ ID NO: 1515636 - RNA, 19 nt, Homo sapiens
  misc_RNA (1)...(19): siRNA sense strand
augaugcucuuauacuaug

SEQ ID NO: 1515637 - RNA, 19 nt, Homo sapiens
  misc_RNA (1)...(19): siRNA sense strand
cgauagucuugaccgagaa

SEQ ID NO: 1515638 - RNA, 19 nt, Homo sapiens
  misc_RNA (1)...(19): siRNA sense strand
uggcugggaucgcaaugau

SEQ ID NO: 1515639 - RNA, 19 nt, Homo sapiens
  misc_RNA (1)...(19): siRNA sense strand
agaaggacuauuaacauuc

SEQ ID NO: 1515640 - RNA, 19 nt, Homo sapiens
  misc_RNA (1)...(19): siRNA sense strand
ggacuauuaacauucuaca

SEQ ID NO: 1515641 - RNA, 19 nt, Homo sapiens
  misc_RNA (1)...(19): siRNA sense strand
uacauuuucugcugguuua

SEQ ID NO: 1515642 - RNA, 19 nt, Homo sapiens
  misc_RNA (1)...(19): siRNA sense strand
gcuacaguaugagucuuca

SEQ ID NO: 1515643 - RNA, 19 nt, Homo sapiens
  misc_RNA (1)...(19): siRNA sense strand
gagacggaccacuccucua

SEQ ID NO: 1515644 - RNA, 19 nt, Homo sapiens
  misc_RNA (1)...(19): siRNA sense strand
agaaugcugccuugacguu

SEQ ID NO: 1515645 - RNA, 19 nt, Homo sapiens
  misc_RNA (1)...(19): siRNA sense strand
gucccuggcuugggugcua

SEQ ID NO: 1515646 - RNA, 19 nt, Homo sapiens
  misc_RNA (1)...(19): siRNA sense strand
cccugugucuccucuguga

SEQ ID NO: 1515647 - RNA, 19 nt, Homo sapiens
  misc_RNA (1)...(19): siRNA sense strand
ccagcacuguguugugucu

SEQ ID NO: 1515648 - RNA, 19 nt, Homo sapiens
  misc_RNA (1)...(19): siRNA sense strand
gcuagccuccuaucacaag

SEQ ID NO: 1515649 - RNA, 19 nt, Homo sapiens
  misc_RNA (1)...(19): siRNA sense strand
cugagaaggacuauuaaca

SEQ ID NO: 1515650 - RNA, 19 nt, Homo sapiens
  misc_RNA (1)...(19): siRNA sense strand
gugcuacagcucuacauca

SEQ ID NO: 1515651 - RNA, 19 nt, Homo sapiens
  misc_RNA (1)...(19): siRNA sense strand
ccaucuuccagcucuauuu

SEQ ID NO: 1515652 - RNA, 19 nt, Homo sapiens
  misc_RNA (1)...(19): siRNA sense strand
gacgacaagaagagcauga

SEQ ID NO: 1515653 - RNA, 19 nt, Homo sapiens
  misc_RNA (1)...(19): siRNA sense strand
cgcaguaggcauucgauau

SEQ ID NO: 1515654 - RNA, 19 nt, Homo sapiens
  misc_RNA (1)...(19): siRNA sense strand
ucugugacuucccugaugu

SEQ ID NO: 1515655 - RNA, 19 nt, Homo sapiens
  misc_RNA (1)...(19): siRNA sense strand
agcacuguguugugucuuu

SEQ ID NO: 1515656 - RNA, 19 nt, Homo sapiens
  misc_RNA (1)...(19): siRNA sense strand
gagacccggagaccacuga

SEQ ID NO: 1515657 - RNA, 19 nt, Homo sapiens
  misc_RNA (1)...(19): siRNA sense strand
ggaucuucguggugguuca

SEQ ID NO: 1515658 - RNA, 19 nt, Homo sapiens
  misc_RNA (1)...(19): siRNA sense strand
ugccagcacuguguugugu

SEQ ID NO: 1515659 - RNA, 19 nt, Homo sapiens
  misc_RNA (1)...(19): siRNA sense strand
gaagagauguuaagcaaga

SEQ ID NO: 1515660 - RNA, 19 nt, Homo sapiens
  misc_RNA (1)...(19): siRNA sense strand
cgauaaaguugaugaguua

SEQ ID NO: 1515661 - RNA, 19 nt, Homo sapiens
  misc_RNA (1)...(19): siRNA sense strand
gcagaucgacggcacauua

SEQ ID NO: 1515662 - RNA, 19 nt, Homo sapiens
  misc_RNA (1)...(19): siRNA sense strand
ggaauuagaagaacuagaa

SEQ ID NO: 1515663 - RNA, 19 nt, Homo sapiens
  misc_RNA (1)...(19): siRNA sense strand
ggacaucgauaaaguugau

SEQ ID NO: 1515664 - RNA, 19 nt, Homo sapiens
  misc_RNA (1)...(19): siRNA sense strand
gacaagaauuugcuggaaa

SEQ ID NO: 1515665 - RNA, 19 nt, Homo sapiens
  misc_RNA (1)...(19): siRNA sense strand
caacauggacaucgauaaa

SEQ ID NO: 1515666 - RNA, 19 nt, Homo sapiens
  misc_RNA (1)...(19): siRNA sense strand
gcacugaagcguaagaaga

SEQ ID NO: 1515667 - RNA, 19 nt, Homo sapiens
  misc_RNA (1)...(19): siRNA sense strand
cggaagagauguuaagcaa

SEQ ID NO: 1515668 - RNA, 19 nt, Homo sapiens
  misc_RNA (1)...(19): siRNA sense strand
gcucauggcggaauuagaa

SEQ ID NO: 1515669 - RNA, 19 nt, Homo sapiens
  misc_RNA (1)...(19): siRNA sense strand
ggacacggaagagauguua

SEQ ID NO: 1515670 - RNA, 19 nt, Homo sapiens
  misc_RNA (1)...(19): siRNA sense strand
guaagaagagguaugagaa

SEQ ID NO: 1515671 - RNA, 19 nt, Homo sapiens
  misc_RNA (1)...(19): siRNA sense strand
gaggagauuucaacagcaa

SEQ ID NO: 1515672 - RNA, 19 nt, Homo sapiens
  misc_RNA (1)...(19): siRNA sense strand
uaccaaauguucccucuau

SEQ ID NO: 1515673 - RNA, 19 nt, Homo sapiens
  misc_RNA (1)...(19): siRNA sense strand
gaaacagucccucuaccaa

SEQ ID NO: 1515674 - RNA, 19 nt, Homo sapiens
  misc_RNA (1)...(19): siRNA sense strand
gaaaucaguggacccgaaa

SEQ ID NO: 1515675 - RNA, 19 nt, Homo sapiens
  misc_RNA (1)...(19): siRNA sense strand
ucgauaaaguugaugaguu

SEQ ID NO: 1515676 - RNA, 19 nt, Homo sapiens
  misc_RNA (1)...(19): siRNA sense strand
caacagcaauuucgaaacc

SEQ ID NO: 1515677 - RNA, 19 nt, Homo sapiens
  misc_RNA (1)...(19): siRNA sense strand
ggaacuagacaagaauuug

SEQ ID NO: 1515678 - RNA, 19 nt, Homo sapiens
  misc_RNA (1)...(19): siRNA sense strand
agaagcagcuggcgcagau

SEQ ID NO: 1515679 - RNA, 19 nt, Homo sapiens
  misc_RNA (1)...(19): siRNA sense strand
gaucgacggcacauuauca

SEQ ID NO: 1515680 - RNA, 19 nt, Homo sapiens
  misc_RNA (1)...(19): siRNA sense strand
ugaaggaauuggagaacug

SEQ ID NO: 1515681 - RNA, 19 nt, Homo sapiens
  misc_RNA (1)...(19): siRNA sense strand
cuauagcccuaccaucaaa

SEQ ID NO: 1515682 - RNA, 19 nt, Homo sapiens
  misc_RNA (1)...(19): siRNA sense strand
aggaggaacuagacaagaa

SEQ ID NO: 1515683 - RNA, 19 nt, Homo sapiens
  misc_RNA (1)...(19): siRNA sense strand
gaacuugcagaggagauuu

SEQ ID NO: 1515684 - RNA, 19 nt, Homo sapiens
  misc_RNA (1)...(19): siRNA sense strand
agacaagaauuugcuggaa

SEQ ID NO: 1515685 - RNA, 19 nt, Homo sapiens
  misc_RNA (1)...(19): siRNA sense strand
ggagauuucaacagcaauu

SEQ ID NO: 1515686 - RNA, 19 nt, Homo sapiens
  misc_RNA (1)...(19): siRNA sense strand
caagaagcacggcaccaaa

SEQ ID NO: 1515687 - RNA, 19 nt, Homo sapiens
  misc_RNA (1)...(19): siRNA sense strand
aaacagucccucuaccaaa

SEQ ID NO: 1515688 - RNA, 19 nt, Homo sapiens
  misc_RNA (1)...(19): siRNA sense strand
gaacaggaggaacuagaca

SEQ ID NO: 1515689 - RNA, 19 nt, Homo sapiens
  misc_RNA (1)...(19): siRNA sense strand
ccaaauguucccucuauag

SEQ ID NO: 1515690 - RNA, 19 nt, Homo sapiens
  misc_RNA (1)...(19): siRNA sense strand
gaacuagacaagaauuugc

SEQ ID NO: 1515691 - RNA, 19 nt, Homo sapiens
  misc_RNA (1)...(19): siRNA sense strand
acauggacaucgauaaagu

SEQ ID NO: 1515692 - RNA, 19 nt, Homo sapiens
  misc_RNA (1)...(19): siRNA sense strand
ggaggacgacgacaugaag

SEQ ID NO: 1515693 - RNA, 19 nt, Homo sapiens
  misc_RNA (1)...(19): siRNA sense strand
uccaggcacugaagcguaa

SEQ ID NO: 1515694 - RNA, 19 nt, Homo sapiens
  misc_RNA (1)...(19): siRNA sense strand
gacaacauggacaucgaua

SEQ ID NO: 1515695 - RNA, 19 nt, Homo sapiens
  misc_RNA (1)...(19): siRNA sense strand
gaggaacuagacaagaauu

SEQ ID NO: 1515696 - RNA, 19 nt, Homo sapiens
  misc_RNA (1)...(19): siRNA sense strand
ucaagaacaugggcuaugc

SEQ ID NO: 1515697 - RNA, 19 nt, Homo sapiens
  misc_RNA (1)...(19): siRNA sense strand
ggacgacgacaugaaggaa

SEQ ID NO: 1515698 - RNA, 19 nt, Homo sapiens
  misc_RNA (1)...(19): siRNA sense strand
ggaggaacuagacaagaau

SEQ ID NO: 1515699 - RNA, 19 nt, Homo sapiens
  misc_RNA (1)...(19): siRNA sense strand
gagauuucaacagcaauuu

SEQ ID NO: 1515700 - RNA, 19 nt, Homo sapiens
  misc_RNA (1)...(19): siRNA sense strand
gagaaugccaacaccaaca

SEQ ID NO: 1515701 - RNA, 19 nt, Homo sapiens
  misc_RNA (1)...(19): siRNA sense strand
acgacgacaugaaggaauu

SEQ ID NO: 1515702 - RNA, 19 nt, Homo sapiens
  misc_RNA (1)...(19): siRNA sense strand
aacagucccucuaccaaau

SEQ ID NO: 1515703 - RNA, 19 nt, Homo sapiens
  misc_RNA (1)...(19): siRNA sense strand
ccgaggugcucaagaacau

SEQ ID NO: 1515704 - RNA, 19 nt, Homo sapiens
  misc_RNA (1)...(19): siRNA sense strand
ccaagaagcacggcaccaa

SEQ ID NO: 1515705 - RNA, 19 nt, Homo sapiens
  misc_RNA (1)...(19): siRNA sense strand
cguaagaagagguaugaga

SEQ ID NO: 1515706 - RNA, 19 nt, Homo sapiens
  misc_RNA (1)...(19): siRNA sense strand
gacggcacauuaucaacca

SEQ ID NO: 1515707 - RNA, 19 nt, Homo sapiens
  misc_RNA (1)...(19): siRNA sense strand
uaucaaccaucgaguucca

SEQ ID NO: 1515708 - RNA, 19 nt, Homo sapiens
  misc_RNA (1)...(19): siRNA sense strand
agaagaguuugacgaggau

SEQ ID NO: 1515709 - RNA, 19 nt, Homo sapiens
  misc_RNA (1)...(19): siRNA sense strand
accaaauguucccucuaua

SEQ ID NO: 1515710 - RNA, 19 nt, Homo sapiens
  misc_RNA (1)...(19): siRNA sense strand
cgaaacagucccucuacca

SEQ ID NO: 1515711 - RNA, 19 nt, Homo sapiens
  misc_RNA (1)...(19): siRNA sense strand
uaagaagagguaugagaag

SEQ ID NO: 1515712 - RNA, 19 nt, Homo sapiens
  misc_RNA (1)...(19): siRNA sense strand
uaagcaagaaacaggaguu

SEQ ID NO: 1515713 - RNA, 19 nt, Homo sapiens
  misc_RNA (1)...(19): siRNA sense strand
gcagaggagauuucaacag

SEQ ID NO: 1515714 - RNA, 19 nt, Homo sapiens
  misc_RNA (1)...(19): siRNA sense strand
uagaacaggaggaacuaga

SEQ ID NO: 1515715 - RNA, 19 nt, Homo sapiens
  misc_RNA (1)...(19): siRNA sense strand
ugaagcguaagaagaggua

SEQ ID NO: 1515716 - RNA, 19 nt, Homo sapiens
  misc_RNA (1)...(19): siRNA sense strand
cauuaucaaccaucgaguu

SEQ ID NO: 1515717 - RNA, 19 nt, Homo sapiens
  misc_RNA (1)...(19): siRNA sense strand
gaggaggacgacgacauga

SEQ ID NO: 1515718 - RNA, 19 nt, Homo sapiens
  misc_RNA (1)...(19): siRNA sense strand
caaauguucccucuauagc

SEQ ID NO: 1515719 - RNA, 19 nt, Homo sapiens
  misc_RNA (1)...(19): siRNA sense strand
acaacauggacaucgauaa

SEQ ID NO: 1515720 - RNA, 19 nt, Homo sapiens
  misc_RNA (1)...(19): siRNA sense strand
cagaucgacggcacauuau

SEQ ID NO: 1515721 - RNA, 19 nt, Homo sapiens
  misc_RNA (1)...(19): siRNA sense strand
cauggacaucgauaaaguu

SEQ ID NO: 1515722 - RNA, 19 nt, Homo sapiens
  misc_RNA (1)...(19): siRNA sense strand
gcaauuucgaaaccuguag

SEQ ID NO: 1515723 - RNA, 19 nt, Homo sapiens
  misc_RNA (1)...(19): siRNA sense strand
ggcggaauuagaagaacua

SEQ ID NO: 1515724 - RNA, 19 nt, Homo sapiens
  misc_RNA (1)...(19): siRNA sense strand
gcgggacacggaagagaug

SEQ ID NO: 1515725 - RNA, 19 nt, Homo sapiens
  misc_RNA (1)...(19): siRNA sense strand
ucaguggacccgaaacagu

SEQ ID NO: 1515726 - RNA, 19 nt, Homo sapiens
  misc_RNA (1)...(19): siRNA sense strand
ggaguuccuggagaagaaa

SEQ ID NO: 1515727 - RNA, 19 nt, Homo sapiens
  misc_RNA (1)...(19): siRNA sense strand
gagaaggguuugagaagaa

SEQ ID NO: 1515728 - RNA, 19 nt, Homo sapiens
  misc_RNA (1)...(19): siRNA sense strand
gagaagaacccaacaaugu

SEQ ID NO: 1515729 - RNA, 19 nt, Homo sapiens
  misc_RNA (1)...(19): siRNA sense strand
ccaagcagaugcauacauu

SEQ ID NO: 1515730 - RNA, 19 nt, Homo sapiens
  misc_RNA (1)...(19): siRNA sense strand
cgacaggugugcucucuuu

SEQ ID NO: 1515731 - RNA, 19 nt, Homo sapiens
  misc_RNA (1)...(19): siRNA sense strand
ggagaaggguuugagaaga

SEQ ID NO: 1515732 - RNA, 19 nt, Homo sapiens
  misc_RNA (1)...(19): siRNA sense strand
gaacucagacacccagauu

SEQ ID NO: 1515733 - RNA, 19 nt, Homo sapiens
  misc_RNA (1)...(19): siRNA sense strand
gaaagucaaucaggaagag

SEQ ID NO: 1515734 - RNA, 19 nt, Homo sapiens
  misc_RNA (1)...(19): siRNA sense strand
gaagagaauggaaaacuua

SEQ ID NO: 1515735 - RNA, 19 nt, Homo sapiens
  misc_RNA (1)...(19): siRNA sense strand
aaacagaaacagcaagaug

SEQ ID NO: 1515736 - RNA, 19 nt, Homo sapiens
  misc_RNA (1)...(19): siRNA sense strand
ggaagagaauggaaaacuu

SEQ ID NO: 1515737 - RNA, 19 nt, Homo sapiens
  misc_RNA (1)...(19): siRNA sense strand
aagcagaugcauacauuaa

SEQ ID NO: 1515738 - RNA, 19 nt, Homo sapiens
  misc_RNA (1)...(19): siRNA sense strand
ggaaagucaaucaggaaga

SEQ ID NO: 1515739 - RNA, 19 nt, Homo sapiens
  misc_RNA (1)...(19): siRNA sense strand
cuguucagcugcagacuuu

SEQ ID NO: 1515740 - RNA, 19 nt, Homo sapiens
  misc_RNA (1)...(19): siRNA sense strand
caagcagaugcauacauua

SEQ ID NO: 1515741 - RNA, 19 nt, Homo sapiens
  misc_RNA (1)...(19): siRNA sense strand
ggaggcagccagacaccaa

SEQ ID NO: 1515742 - RNA, 19 nt, Homo sapiens
  misc_RNA (1)...(19): siRNA sense strand
acaccaaacugggaacuca

SEQ ID NO: 1515743 - RNA, 19 nt, Homo sapiens
  misc_RNA (1)...(19): siRNA sense strand
gcagaugcauacauuaacc

SEQ ID NO: 1515744 - RNA, 19 nt, Homo sapiens
  misc_RNA (1)...(19): siRNA sense strand
caacaaugugggagugcua

SEQ ID NO: 1515745 - RNA, 19 nt, Homo sapiens
  misc_RNA (1)...(19): siRNA sense strand
ugaaacagaaacagcaaga

SEQ ID NO: 1515746 - RNA, 19 nt, Homo sapiens
  misc_RNA (1)...(19): siRNA sense strand
ugagaagaacccaacaaug

SEQ ID NO: 1515747 - RNA, 19 nt, Homo sapiens
  misc_RNA (1)...(19): siRNA sense strand
gaaccaugaaacagaaaca

SEQ ID NO: 1515748 - RNA, 19 nt, Homo sapiens
  misc_RNA (1)...(19): siRNA sense strand
cagggaaccaugaaacaga

SEQ ID NO: 1515749 - RNA, 19 nt, Homo sapiens
  misc_RNA (1)...(19): siRNA sense strand
cuacagcagggaaccauga

SEQ ID NO: 1515750 - RNA, 19 nt, Homo sapiens
  misc_RNA (1)...(19): siRNA sense strand
agaagaacccaacaaugug

SEQ ID NO: 1515751 - RNA, 19 nt, Homo sapiens
  misc_RNA (1)...(19): siRNA sense strand
gaaacagaaacagcaagau

SEQ ID NO: 1515752 - RNA, 19 nt, Homo sapiens
  misc_RNA (1)...(19): siRNA sense strand
agggaaccaugaaacagaa

SEQ ID NO: 1515753 - RNA, 19 nt, Homo sapiens
  misc_RNA (1)...(19): siRNA sense strand
acucugagccaucuucuuc

SEQ ID NO: 1515754 - RNA, 19 nt, Homo sapiens
  misc_RNA (1)...(19): siRNA sense strand
gaaaacuuauacagcuuca

SEQ ID NO: 1515755 - RNA, 19 nt, Homo sapiens
  misc_RNA (1)...(19): siRNA sense strand
acagaaacagcaagaugga

SEQ ID NO: 1515756 - RNA, 19 nt, Homo sapiens
  misc_RNA (1)...(19): siRNA sense strand
acacccagauucccuccau

SEQ ID NO: 1515757 - RNA, 19 nt, Homo sapiens
  misc_RNA (1)...(19): siRNA sense strand
gggcaaaauccaacucuga

SEQ ID NO: 1515758 - RNA, 19 nt, Homo sapiens
  misc_RNA (1)...(19): siRNA sense strand
caggugugcucucuuucca

SEQ ID NO: 1515759 - RNA, 19 nt, Homo sapiens
  misc_RNA (1)...(19): siRNA sense strand
gcagggaaccaugaaacag

SEQ ID NO: 1515760 - RNA, 19 nt, Homo sapiens
  misc_RNA (1)...(19): siRNA sense strand
gaggcagccagacaccaaa

SEQ ID NO: 1515761 - RNA, 19 nt, Homo sapiens
  misc_RNA (1)...(19): siRNA sense strand
ggaacucagacacccagau

SEQ ID NO: 1515762 - RNA, 19 nt, Homo sapiens
  misc_RNA (1)...(19): siRNA sense strand
ucaaucaggaagagaaugg

SEQ ID NO: 1515763 - RNA, 19 nt, Homo sapiens
  misc_RNA (1)...(19): siRNA sense strand
gcagccagacaccaaacug

SEQ ID NO: 1515764 - RNA, 19 nt, Homo sapiens
  misc_RNA (1)...(19): siRNA sense strand
gaaggaauaucaacugaaa

SEQ ID NO: 1515765 - RNA, 19 nt, Homo sapiens
  misc_RNA (1)...(19): siRNA sense strand
guaaagcccuuaugagauu

SEQ ID NO: 1515766 - RNA, 19 nt, Homo sapiens
  misc_RNA (1)...(19): siRNA sense strand
agaagaaacugacuuguaa

SEQ ID NO: 1515767 - RNA, 19 nt, Homo sapiens
  misc_RNA (1)...(19): siRNA sense strand
gaagauauuugcgaagaaa

SEQ ID NO: 1515768 - RNA, 19 nt, Homo sapiens
  misc_RNA (1)...(19): siRNA sense strand
ggacguuguuggauauaua

SEQ ID NO: 1515769 - RNA, 19 nt, Homo sapiens
  misc_RNA (1)...(19): siRNA sense strand
uauuggagcuucugaauuu

SEQ ID NO: 1515770 - RNA, 19 nt, Homo sapiens
  misc_RNA (1)...(19): siRNA sense strand
gcaggaaugccucuuuaua

SEQ ID NO: 1515771 - RNA, 19 nt, Homo sapiens
  misc_RNA (1)...(19): siRNA sense strand
gcugguaucuauuuaggua

SEQ ID NO: 1515772 - RNA, 19 nt, Homo sapiens
  misc_RNA (1)...(19): siRNA sense strand
gguuguagcuuccuccuuu

SEQ ID NO: 1515773 - RNA, 19 nt, Homo sapiens
  misc_RNA (1)...(19): siRNA sense strand
gguguaagcuaugugauuu

SEQ ID NO: 1515774 - RNA, 19 nt, Homo sapiens
  misc_RNA (1)...(19): siRNA sense strand
acacucagcugguaucuau

SEQ ID NO: 1515775 - RNA, 19 nt, Homo sapiens
  misc_RNA (1)...(19): siRNA sense strand
gaacagggaaguugggaaa

SEQ ID NO: 1515776 - RNA, 19 nt, Homo sapiens
  misc_RNA (1)...(19): siRNA sense strand
ggacuugguggauuaauuu

SEQ ID NO: 1515777 - RNA, 19 nt, Homo sapiens
  misc_RNA (1)...(19): siRNA sense strand
gguaggaauugaagauauu

SEQ ID NO: 1515778 - RNA, 19 nt, Homo sapiens
  misc_RNA (1)...(19): siRNA sense strand
caaugaagauuaugaugga

SEQ ID NO: 1515779 - RNA, 19 nt, Homo sapiens
  misc_RNA (1)...(19): siRNA sense strand
uagcaggaaugccucuuua

SEQ ID NO: 1515780 - RNA, 19 nt, Homo sapiens
  misc_RNA (1)...(19): siRNA sense strand
uggaagagaugauauugaa

SEQ ID NO: 1515781 - RNA, 19 nt, Homo sapiens
  misc_RNA (1)...(19): siRNA sense strand
gcaaagugcuauaaguuac

SEQ ID NO: 1515782 - RNA, 19 nt, Homo sapiens
  misc_RNA (1)...(19): siRNA sense strand
caaaauaccugucuuucuu

SEQ ID NO: 1515783 - RNA, 19 nt, Homo sapiens
  misc_RNA (1)...(19): siRNA sense strand
gauaugcucuggguuaugu

SEQ ID NO: 1515784 - RNA, 19 nt, Homo sapiens
  misc_RNA (1)...(19): siRNA sense strand
gcaauaacauucgcugcuu

SEQ ID NO: 1515785 - RNA, 19 nt, Homo sapiens
  misc_RNA (1)...(19): siRNA sense strand
ggaaaagaguuacgauauu

SEQ ID NO: 1515786 - RNA, 19 nt, Homo sapiens
  misc_RNA (1)...(19): siRNA sense strand
ccagagcagugguauauca

SEQ ID NO: 1515787 - RNA, 19 nt, Homo sapiens
  misc_RNA (1)...(19): siRNA sense strand
auacaaacgucgucuaaau

SEQ ID NO: 1515788 - RNA, 19 nt, Homo sapiens
  misc_RNA (1)...(19): siRNA sense strand
gcuauaaguuaccuuuguu

SEQ ID NO: 1515789 - RNA, 19 nt, Homo sapiens
  misc_RNA (1)...(19): siRNA sense strand
gaauguugcuacacacuca

SEQ ID NO: 1515790 - RNA, 19 nt, Homo sapiens
  misc_RNA (1)...(19): siRNA sense strand
ugucauuguuuccacauua

SEQ ID NO: 1515791 - RNA, 19 nt, Homo sapiens
  misc_RNA (1)...(19): siRNA sense strand
gagcagugguauaucauuc

SEQ ID NO: 1515792 - RNA, 19 nt, Homo sapiens
  misc_RNA (1)...(19): siRNA sense strand
gagcaccacuaguuaaagu

SEQ ID NO: 1515793 - RNA, 19 nt, Homo sapiens
  misc_RNA (1)...(19): siRNA sense strand
cagaaggaauaucaacuga

SEQ ID NO: 1515794 - RNA, 19 nt, Homo sapiens
  misc_RNA (1)...(19): siRNA sense strand
ggacuuggaucacuuuuau

SEQ ID NO: 1515795 - RNA, 19 nt, Homo sapiens
  misc_RNA (1)...(19): siRNA sense strand
gcgaagaaauaaagguugu

SEQ ID NO: 1515796 - RNA, 19 nt, Homo sapiens
  misc_RNA (1)...(19): siRNA sense strand
cacaggacguuguuggaua

SEQ ID NO: 1515797 - RNA, 19 nt, Homo sapiens
  misc_RNA (1)...(19): siRNA sense strand
cagaauggcuauggacuug

SEQ ID NO: 1515798 - RNA, 19 nt, Homo sapiens
  misc_RNA (1)...(19): siRNA sense strand
gaauacuacuucugcaaca

SEQ ID NO: 1515799 - RNA, 19 nt, Homo sapiens
  misc_RNA (1)...(19): siRNA sense strand
gagccaggaugaagucuca

SEQ ID NO: 1515800 - RNA, 19 nt, Homo sapiens
  misc_RNA (1)...(19): siRNA sense strand
gaagaauccagugcucaua

SEQ ID NO: 1515801 - RNA, 19 nt, Homo sapiens
  misc_RNA (1)...(19): siRNA sense strand
caacaaacacuacagucaa

SEQ ID NO: 1515802 - RNA, 19 nt, Homo sapiens
  misc_RNA (1)...(19): siRNA sense strand
gcaacaaacacuacaguca

SEQ ID NO: 1515803 - RNA, 19 nt, Homo sapiens
  misc_RNA (1)...(19): siRNA sense strand
agaaguggaugacaguuug

SEQ ID NO: 1515804 - RNA, 19 nt, Homo sapiens
  misc_RNA (1)...(19): siRNA sense strand
acuaucaucuucacuacua

SEQ ID NO: 1515805 - RNA, 19 nt, Homo sapiens
  misc_RNA (1)...(19): siRNA sense strand
gaugcaaagugcuauaagu

SEQ ID NO: 1515806 - RNA, 19 nt, Homo sapiens
  misc_RNA (1)...(19): siRNA sense strand
cuauggacuugguggauua

SEQ ID NO: 1515807 - RNA, 19 nt, Homo sapiens
  misc_RNA (1)...(19): siRNA sense strand
ggugugguguuuggucuua

SEQ ID NO: 1515808 - RNA, 19 nt, Homo sapiens
  misc_RNA (1)...(19): siRNA sense strand
aacauucgcugcuucauga

SEQ ID NO: 1515809 - RNA, 19 nt, Homo sapiens
  misc_RNA (1)...(19): siRNA sense strand
ggaaaugugaugcaaagug

SEQ ID NO: 1515810 - RNA, 19 nt, Homo sapiens
  misc_RNA (1)...(19): siRNA sense strand
gaucugaaacuuggaacua

SEQ ID NO: 1515811 - RNA, 19 nt, Homo sapiens
  misc_RNA (1)...(19): siRNA sense strand
caaacacuacagucaauaa

SEQ ID NO: 1515812 - RNA, 19 nt, Homo sapiens
  misc_RNA (1)...(19): siRNA sense strand
aaaguaagguaggaauuga

SEQ ID NO: 1515813 - RNA, 19 nt, Homo sapiens
  misc_RNA (1)...(19): siRNA sense strand
gagaaguggaugacaguuu

SEQ ID NO: 1515814 - RNA, 19 nt, Homo sapiens
  misc_RNA (1)...(19): siRNA sense strand
caaaguaagguaggaauug

SEQ ID NO: 1515815 - RNA, 19 nt, Homo sapiens
  misc_RNA (1)...(19): siRNA sense strand
gcacuaucaucuucacuac

SEQ ID NO: 1515816 - RNA, 19 nt, Homo sapiens
  misc_RNA (1)...(19): siRNA sense strand
ggauuuaugugcugcucuu

SEQ ID NO: 1515817 - RNA, 19 nt, Homo sapiens
  misc_RNA (1)...(19): siRNA sense strand
gguuugggcugcuuaguca

SEQ ID NO: 1515818 - RNA, 19 nt, Homo sapiens
  misc_RNA (1)...(19): siRNA sense strand
aagaagaaacugacuugua

SEQ ID NO: 1515819 - RNA, 19 nt, Homo sapiens
  misc_RNA (1)...(19): siRNA sense strand
gguuacaucugugauauca

SEQ ID NO: 1515820 - RNA, 19 nt, Homo sapiens
  misc_RNA (1)...(19): siRNA sense strand
guuaaagucccugagaaua

SEQ ID NO: 1515821 - RNA, 19 nt, Homo sapiens
  misc_RNA (1)...(19): siRNA sense strand
gcagaauguacaucaauga

SEQ ID NO: 1515822 - RNA, 19 nt, Homo sapiens
  misc_RNA (1)...(19): siRNA sense strand
caggaaugccucuuuauau

SEQ ID NO: 1515823 - RNA, 19 nt, Homo sapiens
  misc_RNA (1)...(19): siRNA sense strand
uaaaugagaacacugacuu

SEQ ID NO: 1515824 - RNA, 19 nt, Homo sapiens
  misc_RNA (1)...(19): siRNA sense strand
ccuggaccaucaaucuuua

SEQ ID NO: 1515825 - RNA, 19 nt, Homo sapiens
  misc_RNA (1)...(19): siRNA sense strand
cuacaauuguucuugcauu

SEQ ID NO: 1515826 - RNA, 19 nt, Homo sapiens
  misc_RNA (1)...(19): siRNA sense strand
gcuauggacuugguggauu

SEQ ID NO: 1515827 - RNA, 19 nt, Homo sapiens
  misc_RNA (1)...(19): siRNA sense strand
ucuuauagaugucagcauu

SEQ ID NO: 1515828 - RNA, 19 nt, Homo sapiens
  misc_RNA (1)...(19): siRNA sense strand
aaagccaaguccucaguuu

SEQ ID NO: 1515829 - RNA, 19 nt, Homo sapiens
  misc_RNA (1)...(19): siRNA sense strand
gcuacacacucagcuggua

SEQ ID NO: 1515830 - RNA, 19 nt, Homo sapiens
  misc_RNA (1)...(19): siRNA sense strand
ggacacacaggacguuguu

SEQ ID NO: 1515831 - RNA, 19 nt, Homo sapiens
  misc_RNA (1)...(19): siRNA sense strand
gucaaaagcuacagaauau

SEQ ID NO: 1515832 - RNA, 19 nt, Homo sapiens
  misc_RNA (1)...(19): siRNA sense strand
caauaaugguaguccagaa

SEQ ID NO: 1515833 - RNA, 19 nt, Homo sapiens
  misc_RNA (1)...(19): siRNA sense strand
ccugguagcaauauuuaua

SEQ ID NO: 1515834 - RNA, 19 nt, Homo sapiens
  misc_RNA (1)...(19): siRNA sense strand
gagcagcccugugguuugg

SEQ ID NO: 1515835 - RNA, 19 nt, Homo sapiens
  misc_RNA (1)...(19): siRNA sense strand
aaacguaaacagcuucauu

SEQ ID NO: 1515836 - RNA, 19 nt, Homo sapiens
  misc_RNA (1)...(19): siRNA sense strand
uauuucaucuggccuggua

SEQ ID NO: 1515837 - RNA, 19 nt, Homo sapiens
  misc_RNA (1)...(19): siRNA sense strand
uacgggauguuaauaaaug

SEQ ID NO: 1515838 - RNA, 19 nt, Homo sapiens
  misc_RNA (1)...(19): siRNA sense strand
ggccuuggguguaagcuau

SEQ ID NO: 1515839 - RNA, 19 nt, Homo sapiens
  misc_RNA (1)...(19): siRNA sense strand
gcuguaauccagugcaauu

SEQ ID NO: 1515840 - RNA, 19 nt, Homo sapiens
  misc_RNA (1)...(19): siRNA sense strand
acacuacagucaauaaugg

SEQ ID NO: 1515841 - RNA, 19 nt, Homo sapiens
  misc_RNA (1)...(19): siRNA sense strand
cuauuuagguauugcagaa

SEQ ID NO: 1515842 - RNA, 19 nt, Homo sapiens
  misc_RNA (1)...(19): siRNA sense strand
gaagaaauaaagguuguca

SEQ ID NO: 1515843 - RNA, 19 nt, Homo sapiens
  misc_RNA (1)...(19): siRNA sense strand
gaacacugacuucccagau

SEQ ID NO: 1515844 - RNA, 19 nt, Homo sapiens
  misc_RNA (1)...(19): siRNA sense strand
acaaacgucgucuaaauga

SEQ ID NO: 1515845 - RNA, 19 nt, Homo sapiens
  misc_RNA (1)...(19): siRNA sense strand
gguguuuggucuuauagau

SEQ ID NO: 1515846 - RNA, 19 nt, Homo sapiens
  misc_RNA (1)...(19): siRNA sense strand
gauaucacuuauacugcuu

SEQ ID NO: 1515847 - RNA, 19 nt, Homo sapiens
  misc_RNA (1)...(19): siRNA sense strand
gaauggcuauggacuuggu

SEQ ID NO: 1515848 - RNA, 19 nt, Homo sapiens
  misc_RNA (1)...(19): siRNA sense strand
ugaagauauuugcgaagaa

SEQ ID NO: 1515849 - RNA, 19 nt, Homo sapiens
  misc_RNA (1)...(19): siRNA sense strand
caucuggccugguagcaau

SEQ ID NO: 1515850 - RNA, 19 nt, Homo sapiens
  misc_RNA (1)...(19): siRNA sense strand
uaaacaaaguaagguagga

SEQ ID NO: 1515851 - RNA, 19 nt, Homo sapiens
  misc_RNA (1)...(19): siRNA sense strand
ugcaaagugcuauaaguua

SEQ ID NO: 1515852 - RNA, 19 nt, Homo sapiens
  misc_RNA (1)...(19): siRNA sense strand
ucacuuauacugcuugugu

SEQ ID NO: 1515853 - RNA, 19 nt, Homo sapiens
  misc_RNA (1)...(19): siRNA sense strand
ggaacuaauaucaaggauu

SEQ ID NO: 1515854 - RNA, 19 nt, Homo sapiens
  misc_RNA (1)...(19): siRNA sense strand
ugcaugguguacauuaaua

SEQ ID NO: 1515855 - RNA, 19 nt, Homo sapiens
  misc_RNA (1)...(19): siRNA sense strand
gguauaucauuccaaucaa

SEQ ID NO: 1515856 - RNA, 19 nt, Homo sapiens
  misc_RNA (1)...(19): siRNA sense strand
ugaaaaccauugagaaguu

SEQ ID NO: 1515857 - RNA, 19 nt, Homo sapiens
  misc_RNA (1)...(19): siRNA sense strand
caagaagccgggagaagug

SEQ ID NO: 1515858 - RNA, 19 nt, Homo sapiens
  misc_RNA (1)...(19): siRNA sense strand
ugggaucaaugaagauuau

SEQ ID NO: 1515859 - RNA, 19 nt, Homo sapiens
  misc_RNA (1)...(19): siRNA sense strand
aggaaugccucuuuauauc

SEQ ID NO: 1515860 - RNA, 19 nt, Homo sapiens
  misc_RNA (1)...(19): siRNA sense strand
ggccugguagcaauauuua

SEQ ID NO: 1515861 - RNA, 19 nt, Homo sapiens
  misc_RNA (1)...(19): siRNA sense strand
gaaggugauuuuauugaug

SEQ ID NO: 1515862 - RNA, 19 nt, Homo sapiens
  misc_RNA (1)...(19): siRNA sense strand
acacugacuucccagaugu

SEQ ID NO: 1515863 - RNA, 19 nt, Homo sapiens
  misc_RNA (1)...(19): siRNA sense strand
acaggacguuguuggauau

SEQ ID NO: 1515864 - RNA, 19 nt, Homo sapiens
  misc_RNA (1)...(19): siRNA sense strand
gcacagacguuuaacagua

SEQ ID NO: 1515865 - RNA, 19 nt, Homo sapiens
  misc_RNA (1)...(19): siRNA sense strand
gagcaaagacuuaaacuaa

SEQ ID NO: 1515866 - RNA, 19 nt, Homo sapiens
  misc_RNA (1)...(19): siRNA sense strand
caacaggccugauggaauu

SEQ ID NO: 1515867 - RNA, 19 nt, Homo sapiens
  misc_RNA (1)...(19): siRNA sense strand
gaaagacagugacgaagaa

SEQ ID NO: 1515868 - RNA, 19 nt, Homo sapiens
  misc_RNA (1)...(19): siRNA sense strand
gcucauggauagccaaaua

SEQ ID NO: 1515869 - RNA, 19 nt, Homo sapiens
  misc_RNA (1)...(19): siRNA sense strand
gaacaacucuaugaaaugu

SEQ ID NO: 1515870 - RNA, 19 nt, Homo sapiens
  misc_RNA (1)...(19): siRNA sense strand
gcaaagacuuaaacuaaug

SEQ ID NO: 1515871 - RNA, 19 nt, Homo sapiens
  misc_RNA (1)...(19): siRNA sense strand
ggaauuugcccaccacuua

SEQ ID NO: 1515872 - RNA, 19 nt, Homo sapiens
  misc_RNA (1)...(19): siRNA sense strand
gaaagcagcugcaaaauau

SEQ ID NO: 1515873 - RNA, 19 nt, Homo sapiens
  misc_RNA (1)...(19): siRNA sense strand
gaaaggugguccggaauuu

SEQ ID NO: 1515874 - RNA, 19 nt, Homo sapiens
  misc_RNA (1)...(19): siRNA sense strand
gcagacaccuauauuaugu

SEQ ID NO: 1515875 - RNA, 19 nt, Homo sapiens
  misc_RNA (1)...(19): siRNA sense strand
gaacaagaacugcauuuga

SEQ ID NO: 1515876 - RNA, 19 nt, Homo sapiens
  misc_RNA (1)...(19): siRNA sense strand
gaacaggacagaauauuau

SEQ ID NO: 1515877 - RNA, 19 nt, Homo sapiens
  misc_RNA (1)...(19): siRNA sense strand
guacagcaguuccaugaaa

SEQ ID NO: 1515878 - RNA, 19 nt, Homo sapiens
  misc_RNA (1)...(19): siRNA sense strand
gaacaccagcuccuuuaua

SEQ ID NO: 1515879 - RNA, 19 nt, Homo sapiens
  misc_RNA (1)...(19): siRNA sense strand
cgagaaagcugccuugauc

SEQ ID NO: 1515880 - RNA, 19 nt, Homo sapiens
  misc_RNA (1)...(19): siRNA sense strand
ugucuaagcugucaaggua

SEQ ID NO: 1515881 - RNA, 19 nt, Homo sapiens
  misc_RNA (1)...(19): siRNA sense strand
gugguugacugauagauua

SEQ ID NO: 1515882 - RNA, 19 nt, Homo sapiens
  misc_RNA (1)...(19): siRNA sense strand
acacuagacucaccgaaua

SEQ ID NO: 1515883 - RNA, 19 nt, Homo sapiens
  misc_RNA (1)...(19): siRNA sense strand
gaagaggacuugugcaaac

SEQ ID NO: 1515884 - RNA, 19 nt, Homo sapiens
  misc_RNA (1)...(19): siRNA sense strand
caauauaccuuugcuaugu

SEQ ID NO: 1515885 - RNA, 19 nt, Homo sapiens
  misc_RNA (1)...(19): siRNA sense strand
gcaaacagccaaauagaau

SEQ ID NO: 1515886 - RNA, 19 nt, Homo sapiens
  misc_RNA (1)...(19): siRNA sense strand
ugaagaaaguggucagaaa

SEQ ID NO: 1515887 - RNA, 19 nt, Homo sapiens
  misc_RNA (1)...(19): siRNA sense strand
cagaagaggugaagaaagu

SEQ ID NO: 1515888 - RNA, 19 nt, Homo sapiens
  misc_RNA (1)...(19): siRNA sense strand
gcaaggaacaacucuauga

SEQ ID NO: 1515889 - RNA, 19 nt, Homo sapiens
  misc_RNA (1)...(19): siRNA sense strand
ggacauaggagaugagaau

SEQ ID NO: 1515890 - RNA, 19 nt, Homo sapiens
  misc_RNA (1)...(19): siRNA sense strand
gcaacgcaguucggaguua

SEQ ID NO: 1515891 - RNA, 19 nt, Homo sapiens
  misc_RNA (1)...(19): siRNA sense strand
ugaagacgcucaucaagau

SEQ ID NO: 1515892 - RNA, 19 nt, Homo sapiens
  misc_RNA (1)...(19): siRNA sense strand
guggaugccuucuuuauau

SEQ ID NO: 1515893 - RNA, 19 nt, Homo sapiens
  misc_RNA (1)...(19): siRNA sense strand
cacaaacacuugcaagaaa

SEQ ID NO: 1515894 - RNA, 19 nt, Homo sapiens
  misc_RNA (1)...(19): siRNA sense strand
cuagaaagcuggaagagau

SEQ ID NO: 1515895 - RNA, 19 nt, Homo sapiens
  misc_RNA (1)...(19): siRNA sense strand
caaaucagcugaauuacac

SEQ ID NO: 1515896 - RNA, 19 nt, Homo sapiens
  misc_RNA (1)...(19): siRNA sense strand
uagccaggauucugacuua

SEQ ID NO: 1515897 - RNA, 19 nt, Homo sapiens
  misc_RNA (1)...(19): siRNA sense strand
ccacagauuccuaacauuu

SEQ ID NO: 1515898 - RNA, 19 nt, Homo sapiens
  misc_RNA (1)...(19): siRNA sense strand
gauaagccauuucagauac

SEQ ID NO: 1515899 - RNA, 19 nt, Homo sapiens
  misc_RNA (1)...(19): siRNA sense strand
gaaagaaaauuccccaaau

SEQ ID NO: 1515900 - RNA, 19 nt, Homo sapiens
  misc_RNA (1)...(19): siRNA sense strand
caacagucuucccaaugua

SEQ ID NO: 1515901 - RNA, 19 nt, Homo sapiens
  misc_RNA (1)...(19): siRNA sense strand
agaaagauuugaggagaua

SEQ ID NO: 1515902 - RNA, 19 nt, Homo sapiens
  misc_RNA (1)...(19): siRNA sense strand
ggccacaggucaaucauau

SEQ ID NO: 1515903 - RNA, 19 nt, Homo sapiens
  misc_RNA (1)...(19): siRNA sense strand
ccacaggucaaucauauaa

SEQ ID NO: 1515904 - RNA, 19 nt, Homo sapiens
  misc_RNA (1)...(19): siRNA sense strand
ugggaagggugauauuaua

SEQ ID NO: 1515905 - RNA, 19 nt, Homo sapiens
  misc_RNA (1)...(19): siRNA sense strand
ccgcaagacuccugggaua

SEQ ID NO: 1515906 - RNA, 19 nt, Homo sapiens
  misc_RNA (1)...(19): siRNA sense strand
guaaagaugcagaucguuu

SEQ ID NO: 1515907 - RNA, 19 nt, Homo sapiens
  misc_RNA (1)...(19): siRNA sense strand
aaagaagucugaaccacaa

SEQ ID NO: 1515908 - RNA, 19 nt, Homo sapiens
  misc_RNA (1)...(19): siRNA sense strand
gauaaaccagcacauauga

SEQ ID NO: 1515909 - RNA, 19 nt, Homo sapiens
  misc_RNA (1)...(19): siRNA sense strand
uaacgcagaugaacaagca

SEQ ID NO: 1515910 - RNA, 19 nt, Homo sapiens
  misc_RNA (1)...(19): siRNA sense strand
aacaagaacugcauuugaa

SEQ ID NO: 1515911 - RNA, 19 nt, Homo sapiens
  misc_RNA (1)...(19): siRNA sense strand
uaaagaaggagauacugua

SEQ ID NO: 1515912 - RNA, 19 nt, Homo sapiens
  misc_RNA (1)...(19): siRNA sense strand
gaagucaguugcucccaau

SEQ ID NO: 1515913 - RNA, 19 nt, Homo sapiens
  misc_RNA (1)...(19): siRNA sense strand
gguuguauguucuuuaaug

SEQ ID NO: 1515914 - RNA, 19 nt, Homo sapiens
  misc_RNA (1)...(19): siRNA sense strand
ccaacagucuucccaaugu

SEQ ID NO: 1515915 - RNA, 19 nt, Homo sapiens
  misc_RNA (1)...(19): siRNA sense strand
aagcugccuugaucaauua

SEQ ID NO: 1515916 - RNA, 19 nt, Homo sapiens
  misc_RNA (1)...(19): siRNA sense strand
cccagaaacugaauccuaa

SEQ ID NO: 1515917 - RNA, 19 nt, Homo sapiens
  misc_RNA (1)...(19): siRNA sense strand
aacaccagcuccuuuauaa

SEQ ID NO: 1515918 - RNA, 19 nt, Homo sapiens
  misc_RNA (1)...(19): siRNA sense strand
gaucaaugguacagcaguu

SEQ ID NO: 1515919 - RNA, 19 nt, Homo sapiens
  misc_RNA (1)...(19): siRNA sense strand
caauguagcucuuccaaaa

SEQ ID NO: 1515920 - RNA, 19 nt, Homo sapiens
  misc_RNA (1)...(19): siRNA sense strand
uaaaccaguuccugcaauu

SEQ ID NO: 1515921 - RNA, 19 nt, Homo sapiens
  misc_RNA (1)...(19): siRNA sense strand
ggaggcagcagaagcuuaa

SEQ ID NO: 1515922 - RNA, 19 nt, Homo sapiens
  misc_RNA (1)...(19): siRNA sense strand
gagcaaagagacaguguug

SEQ ID NO: 1515923 - RNA, 19 nt, Homo sapiens
  misc_RNA (1)...(19): siRNA sense strand
gcagaagcuuaacaaacaa

SEQ ID NO: 1515924 - RNA, 19 nt, Homo sapiens
  misc_RNA (1)...(19): siRNA sense strand
gcaaagcaccaaacucugu

SEQ ID NO: 1515925 - RNA, 19 nt, Homo sapiens
  misc_RNA (1)...(19): siRNA sense strand
gcuagaggccugugucaaa

SEQ ID NO: 1515926 - RNA, 19 nt, Homo sapiens
  misc_RNA (1)...(19): siRNA sense strand
ugaacaggacagaauauua

SEQ ID NO: 1515927 - RNA, 19 nt, Homo sapiens
  misc_RNA (1)...(19): siRNA sense strand
gaguugcggucuucaguga

SEQ ID NO: 1515928 - RNA, 19 nt, Homo sapiens
  misc_RNA (1)...(19): siRNA sense strand
aaacuaauggccagugaua

SEQ ID NO: 1515929 - RNA, 19 nt, Homo sapiens
  misc_RNA (1)...(19): siRNA sense strand
agaaggagauacuguaauc

SEQ ID NO: 1515930 - RNA, 19 nt, Homo sapiens
  misc_RNA (1)...(19): siRNA sense strand
ugaauuacaccgaauggua

SEQ ID NO: 1515931 - RNA, 19 nt, Homo sapiens
  misc_RNA (1)...(19): siRNA sense strand
gugcggaguuugccagaaa

SEQ ID NO: 1515932 - RNA, 19 nt, Homo sapiens
  misc_RNA (1)...(19): siRNA sense strand
ucaucaagauugugaagaa

SEQ ID NO: 1515933 - RNA, 19 nt, Homo sapiens
  misc_RNA (1)...(19): siRNA sense strand
aaagcugccuugaucaauu

SEQ ID NO: 1515934 - RNA, 19 nt, Homo sapiens
  misc_RNA (1)...(19): siRNA sense strand
gugguuguauguucuuuaa

SEQ ID NO: 1515935 - RNA, 19 nt, Homo sapiens
  misc_RNA (1)...(19): siRNA sense strand
ggauaaaccagcacauaug

SEQ ID NO: 1515936 - RNA, 19 nt, Homo sapiens
  misc_RNA (1)...(19): siRNA sense strand
gaacaagcagcccagauca

SEQ ID NO: 1515937 - RNA, 19 nt, Homo sapiens
  misc_RNA (1)...(19): siRNA sense strand
ggauaacgcagaugaacaa

SEQ ID NO: 1515938 - RNA, 19 nt, Homo sapiens
  misc_RNA (1)...(19): siRNA sense strand
gagcaaggaacaacucuau

SEQ ID NO: 1515939 - RNA, 19 nt, Homo sapiens
  misc_RNA (1)...(19): siRNA sense strand
ggaacaacucuaugaaaug

SEQ ID NO: 1515940 - RNA, 19 nt, Homo sapiens
  misc_RNA (1)...(19): siRNA sense strand
gagcaacaguaccauucaa

SEQ ID NO: 1515941 - RNA, 19 nt, Homo sapiens
  misc_RNA (1)...(19): siRNA sense strand
ucagaaacaugguauggau

SEQ ID NO: 1515942 - RNA, 19 nt, Homo sapiens
  misc_RNA (1)...(19): siRNA sense strand
cuccaaaucagcugaauua

SEQ ID NO: 1515943 - RNA, 19 nt, Homo sapiens
  misc_RNA (1)...(19): siRNA sense strand
ggacuucagggcauuacua

SEQ ID NO: 1515944 - RNA, 19 nt, Homo sapiens
  misc_RNA (1)...(19): siRNA sense strand
gaaaaugucucgagaaagc

SEQ ID NO: 1515945 - RNA, 19 nt, Homo sapiens
  misc_RNA (1)...(19): siRNA sense strand
uggaaggcguguugucuaa

SEQ ID NO: 1515946 - RNA, 19 nt, Homo sapiens
  misc_RNA (1)...(19): siRNA sense strand
gcaaagagacaguguugag

SEQ ID NO: 1515947 - RNA, 19 nt, Homo sapiens
  misc_RNA (1)...(19): siRNA sense strand
ccaaauagaauggcccuaa

SEQ ID NO: 1515948 - RNA, 19 nt, Homo sapiens
  misc_RNA (1)...(19): siRNA sense strand
guguugagcucauggauag

SEQ ID NO: 1515949 - RNA, 19 nt, Homo sapiens
  misc_RNA (1)...(19): siRNA sense strand
ucuaauagcuccaaaucag

SEQ ID NO: 1515950 - RNA, 19 nt, Homo sapiens
  misc_RNA (1)...(19): siRNA sense strand
ccuuagagauugucauaau

SEQ ID NO: 1515951 - RNA, 19 nt, Homo sapiens
  misc_RNA (1)...(19): siRNA sense strand
caaauagaauggcccuaag

SEQ ID NO: 1515952 - RNA, 19 nt, Homo sapiens
  misc_RNA (1)...(19): siRNA sense strand
cuacagggacuuucgauug

SEQ ID NO: 1515953 - RNA, 19 nt, Homo sapiens
  misc_RNA (1)...(19): siRNA sense strand
uagaacaccagcuccuuua

SEQ ID NO: 1515954 - RNA, 19 nt, Homo sapiens
  misc_RNA (1)...(19): siRNA sense strand
aggaacaacucuaugaaau

SEQ ID NO: 1515955 - RNA, 19 nt, Homo sapiens
  misc_RNA (1)...(19): siRNA sense strand
gcacuggccagaacaggaa

SEQ ID NO: 1515956 - RNA, 19 nt, Homo sapiens
  misc_RNA (1)...(19): siRNA sense strand
cuucguggaugccuucuuu

SEQ ID NO: 1515957 - RNA, 19 nt, Homo sapiens
  misc_RNA (1)...(19): siRNA sense strand
gaauaucgccaacagucuu

SEQ ID NO: 1515958 - RNA, 19 nt, Homo sapiens
  misc_RNA (1)...(19): siRNA sense strand
gcaacaggccugauggaau

SEQ ID NO: 1515959 - RNA, 19 nt, Homo sapiens
  misc_RNA (1)...(19): siRNA sense strand
gaacugggaagggugauau

SEQ ID NO: 1515960 - RNA, 19 nt, Homo sapiens
  misc_RNA (1)...(19): siRNA sense strand
agcagaagcuuaacaaaca

SEQ ID NO: 1515961 - RNA, 19 nt, Homo sapiens
  misc_RNA (1)...(19): siRNA sense strand
cgacaacaguguaaaagaa

SEQ ID NO: 1515962 - RNA, 19 nt, Homo sapiens
  misc_RNA (1)...(19): siRNA sense strand
caucaagauugugaagaaa

SEQ ID NO: 1515963 - RNA, 19 nt, Homo sapiens
  misc_RNA (1)...(19): siRNA sense strand
aaaguuuguuucaguguug

SEQ ID NO: 1515964 - RNA, 19 nt, Homo sapiens
  misc_RNA (1)...(19): siRNA sense strand
ggagaaagauuacaagaua

SEQ ID NO: 1515965 - RNA, 19 nt, Homo sapiens
  misc_RNA (1)...(19): siRNA sense strand
gggaauaacuugcaacuaa

SEQ ID NO: 1515966 - RNA, 19 nt, Homo sapiens
  misc_RNA (1)...(19): siRNA sense strand
gaaaacagauuccaucaua

SEQ ID NO: 1515967 - RNA, 19 nt, Homo sapiens
  misc_RNA (1)...(19): siRNA sense strand
gaagaucagucaauuacuu

SEQ ID NO: 1515968 - RNA, 19 nt, Homo sapiens
  misc_RNA (1)...(19): siRNA sense strand
caucaacacuacaucuuua

SEQ ID NO: 1515969 - RNA, 19 nt, Homo sapiens
  misc_RNA (1)...(19): siRNA sense strand
ggaauaacuugcaacuaaa

SEQ ID NO: 1515970 - RNA, 19 nt, Homo sapiens
  misc_RNA (1)...(19): siRNA sense strand
uaagaaggcucaugccauu

SEQ ID NO: 1515971 - RNA, 19 nt, Homo sapiens
  misc_RNA (1)...(19): siRNA sense strand
gaacugcaccuggacaaua

SEQ ID NO: 1515972 - RNA, 19 nt, Homo sapiens
  misc_RNA (1)...(19): siRNA sense strand
agaaacaacuccagauuau

SEQ ID NO: 1515973 - RNA, 19 nt, Homo sapiens
  misc_RNA (1)...(19): siRNA sense strand
uaugggagauuccaguuua

SEQ ID NO: 1515974 - RNA, 19 nt, Homo sapiens
  misc_RNA (1)...(19): siRNA sense strand
cgagacauuucuucauaua

SEQ ID NO: 1515975 - RNA, 19 nt, Homo sapiens
  misc_RNA (1)...(19): siRNA sense strand
gaaaugggacauaauucua

SEQ ID NO: 1515976 - RNA, 19 nt, Homo sapiens
  misc_RNA (1)...(19): siRNA sense strand
cagauuaugccaauucuua

SEQ ID NO: 1515977 - RNA, 19 nt, Homo sapiens
  misc_RNA (1)...(19): siRNA sense strand
gguagaagaucagucaauu

SEQ ID NO: 1515978 - RNA, 19 nt, Homo sapiens
  misc_RNA (1)...(19): siRNA sense strand
gauggaagcugugaaagug

SEQ ID NO: 1515979 - RNA, 19 nt, Homo sapiens
  misc_RNA (1)...(19): siRNA sense strand
cgacuauguuccuguauuu

SEQ ID NO: 1515980 - RNA, 19 nt, Homo sapiens
  misc_RNA (1)...(19): siRNA sense strand
gaacugucuuugucuucua

SEQ ID NO: 1515981 - RNA, 19 nt, Homo sapiens
  misc_RNA (1)...(19): siRNA sense strand
ucaaauaguuacugacuca

SEQ ID NO: 1515982 - RNA, 19 nt, Homo sapiens
  misc_RNA (1)...(19): siRNA sense strand
cagaaacaacuccagauua

SEQ ID NO: 1515983 - RNA, 19 nt, Homo sapiens
  misc_RNA (1)...(19): siRNA sense strand
ucagaaagguagaagauca

SEQ ID NO: 1515984 - RNA, 19 nt, Homo sapiens
  misc_RNA (1)...(19): siRNA sense strand
aaacaacuccagauuauug

SEQ ID NO: 1515985 - RNA, 19 nt, Homo sapiens
  misc_RNA (1)...(19): siRNA sense strand
agacaaacagugcaaauuu

SEQ ID NO: 1515986 - RNA, 19 nt, Homo sapiens
  misc_RNA (1)...(19): siRNA sense strand
gaagugaucacccgucaga

SEQ ID NO: 1515987 - RNA, 19 nt, Homo sapiens
  misc_RNA (1)...(19): siRNA sense strand
aaacgacuauguuccugua

SEQ ID NO: 1515988 - RNA, 19 nt, Homo sapiens
  misc_RNA (1)...(19): siRNA sense strand
uaucugcaguguaaaguuu

SEQ ID NO: 1515989 - RNA, 19 nt, Homo sapiens
  misc_RNA (1)...(19): siRNA sense strand
guagaagaucagucaauua

SEQ ID NO: 1515990 - RNA, 19 nt, Homo sapiens
  misc_RNA (1)...(19): siRNA sense strand
aacgagacauuucuucaua

SEQ ID NO: 1515991 - RNA, 19 nt, Homo sapiens
  misc_RNA (1)...(19): siRNA sense strand
gacggaaccuccagcaaug

SEQ ID NO: 1515992 - RNA, 19 nt, Homo sapiens
  misc_RNA (1)...(19): siRNA sense strand
caccaacucuggccugauu

SEQ ID NO: 1515993 - RNA, 19 nt, Homo sapiens
  misc_RNA (1)...(19): siRNA sense strand
uaacaucucuauuccaaac

SEQ ID NO: 1515994 - RNA, 19 nt, Homo sapiens
  misc_RNA (1)...(19): siRNA sense strand
ccuaacaucucuauuccaa

SEQ ID NO: 1515995 - RNA, 19 nt, Homo sapiens
  misc_RNA (1)...(19): siRNA sense strand
gcacauacaaguggagaaa

SEQ ID NO: 1515996 - RNA, 19 nt, Homo sapiens
  misc_RNA (1)...(19): siRNA sense strand
gcgguuaccuggauaccuu

SEQ ID NO: 1515997 - RNA, 19 nt, Homo sapiens
  misc_RNA (1)...(19): siRNA sense strand
gggcaagucugcaguaaaa

SEQ ID NO: 1515998 - RNA, 19 nt, Homo sapiens
  misc_RNA (1)...(19): siRNA sense strand
accagaagcugcagaacua

SEQ ID NO: 1515999 - RNA, 19 nt, Homo sapiens
  misc_RNA (1)...(19): siRNA sense strand
gacaggaugagaguuauua

SEQ ID NO: 1516000 - RNA, 19 nt, Homo sapiens
  misc_RNA (1)...(19): siRNA sense strand
cauaacagaagaugaugua

SEQ ID NO: 1516001 - RNA, 19 nt, Homo sapiens
  misc_RNA (1)...(19): siRNA sense strand
caaauuuggugguguuucu

SEQ ID NO: 1516002 - RNA, 19 nt, Homo sapiens
  misc_RNA (1)...(19): siRNA sense strand
caccucagauccaaauuug

SEQ ID NO: 1516003 - RNA, 19 nt, Homo sapiens
  misc_RNA (1)...(19): siRNA sense strand
gcacugggcaaauauaaca

SEQ ID NO: 1516004 - RNA, 19 nt, Homo sapiens
  misc_RNA (1)...(19): siRNA sense strand
ugaaacacaugcggaagaa

SEQ ID NO: 1516005 - RNA, 19 nt, Homo sapiens
  misc_RNA (1)...(19): siRNA sense strand
gaaacaacuccagauuauu

SEQ ID NO: 1516006 - RNA, 19 nt, Homo sapiens
  misc_RNA (1)...(19): siRNA sense strand
gcaaauauaacaccagcau

SEQ ID NO: 1516007 - RNA, 19 nt, Homo sapiens
  misc_RNA (1)...(19): siRNA sense strand
gccauugacccucuuaauu

SEQ ID NO: 1516008 - RNA, 19 nt, Homo sapiens
  misc_RNA (1)...(19): siRNA sense strand
ucaaagagauuuuccuaga

SEQ ID NO: 1516009 - RNA, 19 nt, Homo sapiens
  misc_RNA (1)...(19): siRNA sense strand
agaagcugcagaacuauua

SEQ ID NO: 1516010 - RNA, 19 nt, Homo sapiens
  misc_RNA (1)...(19): siRNA sense strand
ccauugacccucuuaauuc

SEQ ID NO: 1516011 - RNA, 19 nt, Homo sapiens
  misc_RNA (1)...(19): siRNA sense strand
uaauggaugugguacaauc

SEQ ID NO: 1516012 - RNA, 19 nt, Homo sapiens
  misc_RNA (1)...(19): siRNA sense strand
uaaaucaacgggcagacua

SEQ ID NO: 1516013 - RNA, 19 nt, Homo sapiens
  misc_RNA (1)...(19): siRNA sense strand
gaaguaugagcucugugua

SEQ ID NO: 1516014 - RNA, 19 nt, Homo sapiens
  misc_RNA (1)...(19): siRNA sense strand
gcacaccucagauccaaau

SEQ ID NO: 1516015 - RNA, 19 nt, Homo sapiens
  misc_RNA (1)...(19): siRNA sense strand
gacaauagaaagaccagaa

SEQ ID NO: 1516016 - RNA, 19 nt, Homo sapiens
  misc_RNA (1)...(19): siRNA sense strand
gaagcaaacgagacauuuc

SEQ ID NO: 1516017 - RNA, 19 nt, Homo sapiens
  misc_RNA (1)...(19): siRNA sense strand
cuguguaucugcaguguaa

SEQ ID NO: 1516018 - RNA, 19 nt, Homo sapiens
  misc_RNA (1)...(19): siRNA sense strand
aaaaugcacugggcaaaua

SEQ ID NO: 1516019 - RNA, 19 nt, Homo sapiens
  misc_RNA (1)...(19): siRNA sense strand
cuacaguggagauaauaua

SEQ ID NO: 1516020 - RNA, 19 nt, Homo sapiens
  misc_RNA (1)...(19): siRNA sense strand
auccugagcuggcuuauug

SEQ ID NO: 1516021 - RNA, 19 nt, Homo sapiens
  misc_RNA (1)...(19): siRNA sense strand
acauacaaguggagaaaga

SEQ ID NO: 1516022 - RNA, 19 nt, Homo sapiens
  misc_RNA (1)...(19): siRNA sense strand
uuaauucucuccuguuugg

SEQ ID NO: 1516023 - RNA, 19 nt, Homo sapiens
  misc_RNA (1)...(19): siRNA sense strand
aaaccagccuuucaacagu

SEQ ID NO: 1516024 - RNA, 19 nt, Homo sapiens
  misc_RNA (1)...(19): siRNA sense strand
gaucacccgucagaaacaa

SEQ ID NO: 1516025 - RNA, 19 nt, Homo sapiens
  misc_RNA (1)...(19): siRNA sense strand
ccagauggaagcugugaaa

SEQ ID NO: 1516026 - RNA, 19 nt, Homo sapiens
  misc_RNA (1)...(19): siRNA sense strand
gcaaacgagacauuucuuc

SEQ ID NO: 1516027 - RNA, 19 nt, Homo sapiens
  misc_RNA (1)...(19): siRNA sense strand
aauccuaccuagaggcuuu

SEQ ID NO: 1516028 - RNA, 19 nt, Homo sapiens
  misc_RNA (1)...(19): siRNA sense strand
gcagaaaacaucaacacua

SEQ ID NO: 1516029 - RNA, 19 nt, Homo sapiens
  misc_RNA (1)...(19): siRNA sense strand
cagcaagaauucaaagaac

SEQ ID NO: 1516030 - RNA, 19 nt, Homo sapiens
  misc_RNA (1)...(19): siRNA sense strand
gaagcugcagaacuauuaa

SEQ ID NO: 1516031 - RNA, 19 nt, Homo sapiens
  misc_RNA (1)...(19): siRNA sense strand
gcaaguggcaauucaggau

SEQ ID NO: 1516032 - RNA, 19 nt, Homo sapiens
  misc_RNA (1)...(19): siRNA sense strand
ucagaaacaacuccagauu

SEQ ID NO: 1516033 - RNA, 19 nt, Homo sapiens
  misc_RNA (1)...(19): siRNA sense strand
caggaugagaguuauuaua

SEQ ID NO: 1516034 - RNA, 19 nt, Homo sapiens
  misc_RNA (1)...(19): siRNA sense strand
gcaagaauucaaagaacug

SEQ ID NO: 1516035 - RNA, 19 nt, Homo sapiens
  misc_RNA (1)...(19): siRNA sense strand
caaacgagacauuucuuca

SEQ ID NO: 1516036 - RNA, 19 nt, Homo sapiens
  misc_RNA (1)...(19): siRNA sense strand
gagccucucccaccucuga

SEQ ID NO: 1516037 - RNA, 19 nt, Homo sapiens
  misc_RNA (1)...(19): siRNA sense strand
ucuuaauucucuccuguuu

SEQ ID NO: 1516038 - RNA, 19 nt, Homo sapiens
  misc_RNA (1)...(19): siRNA sense strand
gccaugauccugcaacuca

SEQ ID NO: 1516039 - RNA, 19 nt, Homo sapiens
  misc_RNA (1)...(19): siRNA sense strand
ccaccagucucgcugcaau

SEQ ID NO: 1516040 - RNA, 19 nt, Homo sapiens
  misc_RNA (1)...(19): siRNA sense strand
caaagagauuuuccuagaa

SEQ ID NO: 1516041 - RNA, 19 nt, Homo sapiens
  misc_RNA (1)...(19): siRNA sense strand
ccaguacauugacguuuca

SEQ ID NO: 1516042 - RNA, 19 nt, Homo sapiens
  misc_RNA (1)...(19): siRNA sense strand
ggauguagucgagaugaaa

SEQ ID NO: 1516043 - RNA, 19 nt, Homo sapiens
  misc_RNA (1)...(19): siRNA sense strand
caacuccagauuauuguga

SEQ ID NO: 1516044 - RNA, 19 nt, Homo sapiens
  misc_RNA (1)...(19): siRNA sense strand
gagcuggcuuauugugugu

SEQ ID NO: 1516045 - RNA, 19 nt, Homo sapiens
  misc_RNA (1)...(19): siRNA sense strand
gaaaacaaaagcaucagaa

SEQ ID NO: 1516046 - RNA, 19 nt, Homo sapiens
  misc_RNA (1)...(19): siRNA sense strand
aaagguagaagaucaguca

SEQ ID NO: 1516047 - RNA, 19 nt, Homo sapiens
  misc_RNA (1)...(19): siRNA sense strand
ucugacaggaugagaguua

SEQ ID NO: 1516048 - RNA, 19 nt, Homo sapiens
  misc_RNA (1)...(19): siRNA sense strand
cguguugucuacagauuau

SEQ ID NO: 1516049 - RNA, 19 nt, Homo sapiens
  misc_RNA (1)...(19): siRNA sense strand
uacaaguggagaaagauua

SEQ ID NO: 1516050 - RNA, 19 nt, Homo sapiens
  misc_RNA (1)...(19): siRNA sense strand
ugacggaaccuccagcaau

SEQ ID NO: 1516051 - RNA, 19 nt, Homo sapiens
  misc_RNA (1)...(19): siRNA sense strand
ucaacgggcagacuacaaa

SEQ ID NO: 1516052 - RNA, 19 nt, Homo sapiens
  misc_RNA (1)...(19): siRNA sense strand
caaaccagccuuucaacag

SEQ ID NO: 1516053 - RNA, 19 nt, Homo sapiens
  misc_RNA (1)...(19): siRNA sense strand
gucaauuacuuacaccaau

SEQ ID NO: 1516054 - RNA, 19 nt, Homo sapiens
  misc_RNA (1)...(19): siRNA sense strand
uagaagaucagucaauuac

SEQ ID NO: 1516055 - RNA, 19 nt, Homo sapiens
  misc_RNA (1)...(19): siRNA sense strand
cuacagauuaugccaauuc

SEQ ID NO: 1516056 - RNA, 19 nt, Homo sapiens
  misc_RNA (1)...(19): siRNA sense strand
ucagcaagaauucaaagaa

SEQ ID NO: 1516057 - RNA, 19 nt, Homo sapiens
  misc_RNA (1)...(19): siRNA sense strand
cuuccuacaccucaauuua

SEQ ID NO: 1516058 - RNA, 19 nt, Homo sapiens
  misc_RNA (1)...(19): siRNA sense strand
gaugugguacaaucagaaa

SEQ ID NO: 1516059 - RNA, 19 nt, Homo sapiens
  misc_RNA (1)...(19): siRNA sense strand
aagcaaauccuaccuagag

SEQ ID NO: 1516060 - RNA, 19 nt, Homo sapiens
  misc_RNA (1)...(19): siRNA sense strand
gaagugcaaguggcaauuc

SEQ ID NO: 1516061 - RNA, 19 nt, Homo sapiens
  misc_RNA (1)...(19): siRNA sense strand
ggcggaggcugaaggcaau

SEQ ID NO: 1516062 - RNA, 19 nt, Homo sapiens
  misc_RNA (1)...(19): siRNA sense strand
uggaagcugugaaagugaa

SEQ ID NO: 1516063 - RNA, 19 nt, Homo sapiens
  misc_RNA (1)...(19): siRNA sense strand
cuuaauggaugugguacaa

SEQ ID NO: 1516064 - RNA, 19 nt, Homo sapiens
  misc_RNA (1)...(19): siRNA sense strand
ggacagcccuggaaacaua

SEQ ID NO: 1516065 - RNA, 19 nt, Homo sapiens
  misc_RNA (1)...(19): siRNA sense strand
ggaaacauaucuacaggua

SEQ ID NO: 1516066 - RNA, 19 nt, Homo sapiens
  misc_RNA (1)...(19): siRNA sense strand
gcaaggcgcucucucaauu

SEQ ID NO: 1516067 - RNA, 19 nt, Homo sapiens
  misc_RNA (1)...(19): siRNA sense strand
ggaacaaggugacaagugu

SEQ ID NO: 1516068 - RNA, 19 nt, Homo sapiens
  misc_RNA (1)...(19): siRNA sense strand
guacuucacugacaccuau

SEQ ID NO: 1516069 - RNA, 19 nt, Homo sapiens
  misc_RNA (1)...(19): siRNA sense strand
ccagugaacuccuucuuau

SEQ ID NO: 1516070 - RNA, 19 nt, Homo sapiens
  misc_RNA (1)...(19): siRNA sense strand
cuaagcagcugcaggaguu

SEQ ID NO: 1516071 - RNA, 19 nt, Homo sapiens
  misc_RNA (1)...(19): siRNA sense strand
cuaagaaggugcccaagau

SEQ ID NO: 1516072 - RNA, 19 nt, Homo sapiens
  misc_RNA (1)...(19): siRNA sense strand
gaggccaccuguaaccuuu

SEQ ID NO: 1516073 - RNA, 19 nt, Homo sapiens
  misc_RNA (1)...(19): siRNA sense strand
gaacaaggugacaagugua

SEQ ID NO: 1516074 - RNA, 19 nt, Homo sapiens
  misc_RNA (1)...(19): siRNA sense strand
ggagaucaauggaaucaac

SEQ ID NO: 1516075 - RNA, 19 nt, Homo sapiens
  misc_RNA (1)...(19): siRNA sense strand
cuacugaggccaccuguaa

SEQ ID NO: 1516076 - RNA, 19 nt, Homo sapiens
  misc_RNA (1)...(19): siRNA sense strand
gcucugugcucccaagaug

SEQ ID NO: 1516077 - RNA, 19 nt, Homo sapiens
  misc_RNA (1)...(19): siRNA sense strand
gguucaaggucucuaagaa

SEQ ID NO: 1516078 - RNA, 19 nt, Homo sapiens
  misc_RNA (1)...(19): siRNA sense strand
ucaaugagauggacaugag

SEQ ID NO: 1516079 - RNA, 19 nt, Homo sapiens
  misc_RNA (1)...(19): siRNA sense strand
aaacauaucuacagguacu

SEQ ID NO: 1516080 - RNA, 19 nt, Homo sapiens
  misc_RNA (1)...(19): siRNA sense strand
cugcaacgcugauccaguu

SEQ ID NO: 1516081 - RNA, 19 nt, Homo sapiens
  misc_RNA (1)...(19): siRNA sense strand
ggacagagaccgguucaag

SEQ ID NO: 1516082 - RNA, 19 nt, Homo sapiens
  misc_RNA (1)...(19): siRNA sense strand
acaaggugcucuccagguu

SEQ ID NO: 1516083 - RNA, 19 nt, Homo sapiens
  misc_RNA (1)...(19): siRNA sense strand
ccucacagcugcuuguaca

SEQ ID NO: 1516084 - RNA, 19 nt, Homo sapiens
  misc_RNA (1)...(19): siRNA sense strand
caacgcugauccaguuugu

SEQ ID NO: 1516085 - RNA, 19 nt, Homo sapiens
  misc_RNA (1)...(19): siRNA sense strand
ccacgagaaugggaacuug

SEQ ID NO: 1516086 - RNA, 19 nt, Homo sapiens
  misc_RNA (1)...(19): siRNA sense strand
gagaaugggaacuuggaaa

SEQ ID NO: 1516087 - RNA, 19 nt, Homo sapiens
  misc_RNA (1)...(19): siRNA sense strand
ccucauggauggagugaca

SEQ ID NO: 1516088 - RNA, 19 nt, Homo sapiens
  misc_RNA (1)...(19): siRNA sense strand
guaucaaugccuacaauga

SEQ ID NO: 1516089 - RNA, 19 nt, Homo sapiens
  misc_RNA (1)...(19): siRNA sense strand
ugacagugccaaccacaaa

SEQ ID NO: 1516090 - RNA, 19 nt, Homo sapiens
  misc_RNA (1)...(19): siRNA sense strand
ucucagagcuggacaucag

SEQ ID NO: 1516091 - RNA, 19 nt, Homo sapiens
  misc_RNA (1)...(19): siRNA sense strand
agaggcagaugcaggagaa

SEQ ID NO: 1516092 - RNA, 19 nt, Homo sapiens
  misc_RNA (1)...(19): siRNA sense strand
agagcugucuggcaaaguu

SEQ ID NO: 1516093 - RNA, 19 nt, Homo sapiens
  misc_RNA (1)...(19): siRNA sense strand
aaugacaccuugacugcaa

SEQ ID NO: 1516094 - RNA, 19 nt, Homo sapiens
  misc_RNA (1)...(19): siRNA sense strand
aaugauugcugggugagua

SEQ ID NO: 1516095 - RNA, 19 nt, Homo sapiens
  misc_RNA (1)...(19): siRNA sense strand
ggugcagccuuccuacaga

SEQ ID NO: 1516096 - RNA, 19 nt, Homo sapiens
  misc_RNA (1)...(19): siRNA sense strand
ggaccugcuccuccaguuu

SEQ ID NO: 1516097 - RNA, 19 nt, Homo sapiens
  misc_RNA (1)...(19): siRNA sense strand
uggcaaaguugagaguuga

SEQ ID NO: 1516098 - RNA, 19 nt, Homo sapiens
  misc_RNA (1)...(19): siRNA sense strand
ggaaucaacccaggcaaca

SEQ ID NO: 1516099 - RNA, 19 nt, Homo sapiens
  misc_RNA (1)...(19): siRNA sense strand
gcugcaaggcguacaguga

SEQ ID NO: 1516100 - RNA, 19 nt, Homo sapiens
  misc_RNA (1)...(19): siRNA sense strand
gaccugcuccuccaguuug

SEQ ID NO: 1516101 - RNA, 19 nt, Homo sapiens
  misc_RNA (1)...(19): siRNA sense strand
gcugauccaguuugugaaa

SEQ ID NO: 1516102 - RNA, 19 nt, Homo sapiens
  misc_RNA (1)...(19): siRNA sense strand
gcuggaugcauucaggaua

SEQ ID NO: 1516103 - RNA, 19 nt, Homo sapiens
  misc_RNA (1)...(19): siRNA sense strand
agugaacuccuucuuauug

SEQ ID NO: 1516104 - RNA, 19 nt, Homo sapiens
  misc_RNA (1)...(19): siRNA sense strand
ggccagacaggcaaaguug

SEQ ID NO: 1516105 - RNA, 19 nt, Homo sapiens
  misc_RNA (1)...(19): siRNA sense strand
cuacagguacugagcagaa

SEQ ID NO: 1516106 - RNA, 19 nt, Homo sapiens
  misc_RNA (1)...(19): siRNA sense strand
ccuggcggcugcucacuau

SEQ ID NO: 1516107 - RNA, 19 nt, Homo sapiens
  misc_RNA (1)...(19): siRNA sense strand
guaacaucauccucaacug

SEQ ID NO: 1516108 - RNA, 19 nt, Homo sapiens
  misc_RNA (1)...(19): siRNA sense strand
cccagugaacuccuucuua

SEQ ID NO: 1516109 - RNA, 19 nt, Homo sapiens
  misc_RNA (1)...(19): siRNA sense strand
ggacaacaucauccugaca

SEQ ID NO: 1516110 - RNA, 19 nt, Homo sapiens
  misc_RNA (1)...(19): siRNA sense strand
gugaacuccuucuuauugg

SEQ ID NO: 1516111 - RNA, 19 nt, Homo sapiens
  misc_RNA (1)...(19): siRNA sense strand
gagcgggagaggagaauca

SEQ ID NO: 1516112 - RNA, 19 nt, Homo sapiens
  misc_RNA (1)...(19): siRNA sense strand
uggcuucccugguaacauc

SEQ ID NO: 1516113 - RNA, 19 nt, Homo sapiens
  misc_RNA (1)...(19): siRNA sense strand
gggaacaaggugacaagug

SEQ ID NO: 1516114 - RNA, 19 nt, Homo sapiens
  misc_RNA (1)...(19): siRNA sense strand
gcaacgcugauccaguuug

SEQ ID NO: 1516115 - RNA, 19 nt, Homo sapiens
  misc_RNA (1)...(19): siRNA sense strand
cauugcugcugcugcguuu

SEQ ID NO: 1516116 - RNA, 19 nt, Homo sapiens
  misc_RNA (1)...(19): siRNA sense strand
ccucugggaugagaugaug

SEQ ID NO: 1516117 - RNA, 19 nt, Homo sapiens
  misc_RNA (1)...(19): siRNA sense strand
caagaucccacuccauguc

SEQ ID NO: 1516118 - RNA, 19 nt, Homo sapiens
  misc_RNA (1)...(19): siRNA sense strand
ugaacuccuucuuauugga

SEQ ID NO: 1516119 - RNA, 19 nt, Homo sapiens
  misc_RNA (1)...(19): siRNA sense strand
gcacaggucaagccagaac

SEQ ID NO: 1516120 - RNA, 19 nt, Homo sapiens
  misc_RNA (1)...(19): siRNA sense strand
gcugagcccuucccuuucc

SEQ ID NO: 1516121 - RNA, 19 nt, Homo sapiens
  misc_RNA (1)...(19): siRNA sense strand
cauacuacaagcuggguaa

SEQ ID NO: 1516122 - RNA, 19 nt, Homo sapiens
  misc_RNA (1)...(19): siRNA sense strand
gcccugugccugucacuau

SEQ ID NO: 1516123 - RNA, 19 nt, Homo sapiens
  misc_RNA (1)...(19): siRNA sense strand
gaaucaacccaggcaacaa

SEQ ID NO: 1516124 - RNA, 19 nt, Homo sapiens
  misc_RNA (1)...(19): siRNA sense strand
ccguggagaucaauggaau

SEQ ID NO: 1516125 - RNA, 19 nt, Homo sapiens
  misc_RNA (1)...(19): siRNA sense strand
gguaacaucauccucaacu

SEQ ID NO: 1516126 - RNA, 19 nt, Homo sapiens
  misc_RNA (1)...(19): siRNA sense strand
gugcagccuuccuacagau

SEQ ID NO: 1516127 - RNA, 19 nt, Homo sapiens
  misc_RNA (1)...(19): siRNA sense strand
gcaaaguugagaguugaug

SEQ ID NO: 1516128 - RNA, 19 nt, Homo sapiens
  misc_RNA (1)...(19): siRNA sense strand
gaucuguguccucuccuau

SEQ ID NO: 1516129 - RNA, 19 nt, Homo sapiens
  misc_RNA (1)...(19): siRNA sense strand
ccuguaaccuuuggucagu

SEQ ID NO: 1516130 - RNA, 19 nt, Homo sapiens
  misc_RNA (1)...(19): siRNA sense strand
ccuggcaccucuaguaaac

SEQ ID NO: 1516131 - RNA, 19 nt, Homo sapiens
  misc_RNA (1)...(19): siRNA sense strand
uggcuuggcuccauuucuc

SEQ ID NO: 1516132 - RNA, 19 nt, Homo sapiens
  misc_RNA (1)...(19): siRNA sense strand
aaagagcugucuggcaaag

SEQ ID NO: 1516133 - RNA, 19 nt, Homo sapiens
  misc_RNA (1)...(19): siRNA sense strand
uuggcuggcuucccuggua

SEQ ID NO: 1516134 - RNA, 19 nt, Homo sapiens
  misc_RNA (1)...(19): siRNA sense strand
gggcccuucuugcucaaug

SEQ ID NO: 1516135 - RNA, 19 nt, Homo sapiens
  misc_RNA (1)...(19): siRNA sense strand
cugugugacuggaauguau

SEQ ID NO: 1516136 - RNA, 19 nt, Homo sapiens
  misc_RNA (1)...(19): siRNA sense strand
ggccugaggguacagauag

SEQ ID NO: 1516137 - RNA, 19 nt, Homo sapiens
  misc_RNA (1)...(19): siRNA sense strand
cuggcaaaguugagaguug

SEQ ID NO: 1516138 - RNA, 19 nt, Homo sapiens
  misc_RNA (1)...(19): siRNA sense strand
caucauccucaacugcuuu

SEQ ID NO: 1516139 - RNA, 19 nt, Homo sapiens
  misc_RNA (1)...(19): siRNA sense strand
acgcugauccaguuuguga

SEQ ID NO: 1516140 - RNA, 19 nt, Homo sapiens
  misc_RNA (1)...(19): siRNA sense strand
cagguacugagcagaaauu

SEQ ID NO: 1516141 - RNA, 19 nt, Homo sapiens
  misc_RNA (1)...(19): siRNA sense strand
uccaugagcugggccacaa

SEQ ID NO: 1516142 - RNA, 19 nt, Homo sapiens
  misc_RNA (1)...(19): siRNA sense strand
gugaaggagaucaucaaug

SEQ ID NO: 1516143 - RNA, 19 nt, Homo sapiens
  misc_RNA (1)...(19): siRNA sense strand
acagugacaaggaggcuaa

SEQ ID NO: 1516144 - RNA, 19 nt, Homo sapiens
  misc_RNA (1)...(19): siRNA sense strand
ggggugaacacaaaucuaa

SEQ ID NO: 1516145 - RNA, 19 nt, Homo sapiens
  misc_RNA (1)...(19): siRNA sense strand
acagagaccgguucaaggu

SEQ ID NO: 1516146 - RNA, 19 nt, Homo sapiens
  misc_RNA (1)...(19): siRNA sense strand
uacagguacugagcagaaa

SEQ ID NO: 1516147 - RNA, 19 nt, Homo sapiens
  misc_RNA (1)...(19): siRNA sense strand
ccacaccgaugaccuuacc

SEQ ID NO: 1516148 - RNA, 19 nt, Homo sapiens
  misc_RNA (1)...(19): siRNA sense strand
uggcuggcuucccugguaa

SEQ ID NO: 1516149 - RNA, 19 nt, Homo sapiens
  misc_RNA (1)...(19): siRNA sense strand
ucacagcugcuuguacaug

SEQ ID NO: 1516150 - RNA, 19 nt, Homo sapiens
  misc_RNA (1)...(19): siRNA sense strand
guucaaggucucuaagaag

SEQ ID NO: 1516151 - RNA, 19 nt, Homo sapiens
  misc_RNA (1)...(19): siRNA sense strand
ucuaagaaggugcccaaga

SEQ ID NO: 1516152 - RNA, 19 nt, Homo sapiens
  misc_RNA (1)...(19): siRNA sense strand
guauggacagcccuggaaa

SEQ ID NO: 1516153 - RNA, 19 nt, Homo sapiens
  misc_RNA (1)...(19): siRNA sense strand
caacccaggcaacaaugau

SEQ ID NO: 1516154 - RNA, 19 nt, Homo sapiens
  misc_RNA (1)...(19): siRNA sense strand
aaucaacccaggcaacaau

SEQ ID NO: 1516155 - RNA, 19 nt, Homo sapiens
  misc_RNA (1)...(19): siRNA sense strand
uaagaaggugcccaagauc

SEQ ID NO: 1516156 - RNA, 19 nt, Homo sapiens
  misc_RNA (1)...(19): siRNA sense strand
gggugaacacaaaucuaaa

SEQ ID NO: 1516157 - RNA, 19 nt, Homo sapiens
  misc_RNA (1)...(19): siRNA sense strand
gagcugugccugccccaua

SEQ ID NO: 1516158 - RNA, 19 nt, Homo sapiens
  misc_RNA (1)...(19): siRNA sense strand
uggcaccucuaguaaacau

SEQ ID NO: 1516159 - RNA, 19 nt, Homo sapiens
  misc_RNA (1)...(19): siRNA sense strand
aaaauccaguugccaguga

SEQ ID NO: 1516160 - RNA, 19 nt, Homo sapiens
  misc_RNA (1)...(19): siRNA sense strand
ucucucaauuccaggcuau

SEQ ID NO: 1516161 - RNA, 19 nt, Homo sapiens
  misc_RNA (1)...(19): siRNA sense strand
cagugaacuccuucuuauu

SEQ ID NO: 1516162 - RNA, 19 nt, Homo sapiens
  misc_RNA (1)...(19): siRNA sense strand
uggagucugugaaggagau

SEQ ID NO: 1516163 - RNA, 19 nt, Homo sapiens
  misc_RNA (1)...(19): siRNA sense strand
caaggcgcucucucaauuc

SEQ ID NO: 1516164 - RNA, 19 nt, Homo sapiens
  misc_RNA (1)...(19): siRNA sense strand
ucagauagcuggagccaua

SEQ ID NO: 1516165 - RNA, 19 nt, Homo sapiens
  misc_RNA (1)...(19): siRNA sense strand
ugacagacaucaagaauga

SEQ ID NO: 1516166 - RNA, 19 nt, Homo sapiens
  misc_RNA (1)...(19): siRNA sense strand
gcgcacaccuucagcucua

SEQ ID NO: 1516167 - RNA, 19 nt, Homo sapiens
  misc_RNA (1)...(19): siRNA sense strand
gcaccacuuuccaugacua

SEQ ID NO: 1516168 - RNA, 19 nt, Homo sapiens
  misc_RNA (1)...(19): siRNA sense strand
ccuccaagcccuucucuuu

SEQ ID NO: 1516169 - RNA, 19 nt, Homo sapiens
  misc_RNA (1)...(19): siRNA sense strand
uuucucagcugcucuguau

SEQ ID NO: 1516170 - RNA, 19 nt, Homo sapiens
  misc_RNA (1)...(19): siRNA sense strand
ggacuauggugccgucaac

SEQ ID NO: 1516171 - RNA, 19 nt, Homo sapiens
  misc_RNA (1)...(19): siRNA sense strand
ccacgcacaugcagaugga

SEQ ID NO: 1516172 - RNA, 19 nt, Homo sapiens
  misc_RNA (1)...(19): siRNA sense strand
caagccagaauuacauaaa

SEQ ID NO: 1516173 - RNA, 19 nt, Homo sapiens
  misc_RNA (1)...(19): siRNA sense strand
guuugugacugcacuguau

SEQ ID NO: 1516174 - RNA, 19 nt, Homo sapiens
  misc_RNA (1)...(19): siRNA sense strand
acaagacucugaggaagga

SEQ ID NO: 1516175 - RNA, 19 nt, Homo sapiens
  misc_RNA (1)...(19): siRNA sense strand
gcucagccauugccuacuc

SEQ ID NO: 1516176 - RNA, 19 nt, Homo sapiens
  misc_RNA (1)...(19): siRNA sense strand
ucagcucuauguccaagaa

SEQ ID NO: 1516177 - RNA, 19 nt, Homo sapiens
  misc_RNA (1)...(19): siRNA sense strand
gcgcucaugugcaccacuu

SEQ ID NO: 1516178 - RNA, 19 nt, Homo sapiens
  misc_RNA (1)...(19): siRNA sense strand
ccacuuuccaugacuacua

SEQ ID NO: 1516179 - RNA, 19 nt, Homo sapiens
  misc_RNA (1)...(19): siRNA sense strand
ugacugcacuguauaugac

SEQ ID NO: 1516180 - RNA, 19 nt, Homo sapiens
  misc_RNA (1)...(19): siRNA sense strand
gcuacuuccuggacuaugg

SEQ ID NO: 1516181 - RNA, 19 nt, Homo sapiens
  misc_RNA (1)...(19): siRNA sense strand
ugacccuccuggccucuuu

SEQ ID NO: 1516182 - RNA, 19 nt, Homo sapiens
  misc_RNA (1)...(19): siRNA sense strand
caacauuuggacucacuug

SEQ ID NO: 1516183 - RNA, 19 nt, Homo sapiens
  misc_RNA (1)...(19): siRNA sense strand
gagccauacuucugugcau

SEQ ID NO: 1516184 - RNA, 19 nt, Homo sapiens
  misc_RNA (1)...(19): siRNA sense strand
ccaaaugaccaaugagacu

SEQ ID NO: 1516185 - RNA, 19 nt, Homo sapiens
  misc_RNA (1)...(19): siRNA sense strand
ccuccuggccucuuucuug

SEQ ID NO: 1516186 - RNA, 19 nt, Homo sapiens
  misc_RNA (1)...(19): siRNA sense strand
gugacugcacuguauauga

SEQ ID NO: 1516187 - RNA, 19 nt, Homo sapiens
  misc_RNA (1)...(19): siRNA sense strand
guauaugacagacaucaag

SEQ ID NO: 1516188 - RNA, 19 nt, Homo sapiens
  misc_RNA (1)...(19): siRNA sense strand
ccaagccagaauuacauaa

SEQ ID NO: 1516189 - RNA, 19 nt, Homo sapiens
  misc_RNA (1)...(19): siRNA sense strand
ggcccaugcuuguguacau

SEQ ID NO: 1516190 - RNA, 19 nt, Homo sapiens
  misc_RNA (1)...(19): siRNA sense strand
uccaagcccuucucuuucu

SEQ ID NO: 1516191 - RNA, 19 nt, Homo sapiens
  misc_RNA (1)...(19): siRNA sense strand
ggcccuggcuguacugaac

SEQ ID NO: 1516192 - RNA, 19 nt, Homo sapiens
  misc_RNA (1)...(19): siRNA sense strand
cuacguggcccuggcugua

SEQ ID NO: 1516193 - RNA, 19 nt, Homo sapiens
  misc_RNA (1)...(19): siRNA sense strand
aaaaugaagccaccucgua

SEQ ID NO: 1516194 - RNA, 19 nt, Homo sapiens
  misc_RNA (1)...(19): siRNA sense strand
auacuucugugcaucaucu

SEQ ID NO: 1516195 - RNA, 19 nt, Homo sapiens
  misc_RNA (1)...(19): siRNA sense strand
uaugacagacaucaagaau

SEQ ID NO: 1516196 - RNA, 19 nt, Homo sapiens
  misc_RNA (1)...(19): siRNA sense strand
caccagaagcacaugauca

SEQ ID NO: 1516197 - RNA, 19 nt, Homo sapiens
  misc_RNA (1)...(19): siRNA sense strand
ggagagugcacaaaaugaa

SEQ ID NO: 1516198 - RNA, 19 nt, Homo sapiens
  misc_RNA (1)...(19): siRNA sense strand
gugcaccacuuuccaugac

SEQ ID NO: 1516199 - RNA, 19 nt, Homo sapiens
  misc_RNA (1)...(19): siRNA sense strand
gccauugccuacucugcau

SEQ ID NO: 1516200 - RNA, 19 nt, Homo sapiens
  misc_RNA (1)...(19): siRNA sense strand
ccagcuguuucacgugugu

SEQ ID NO: 1516201 - RNA, 19 nt, Homo sapiens
  misc_RNA (1)...(19): siRNA sense strand
uauaugacagacaucaaga

SEQ ID NO: 1516202 - RNA, 19 nt, Homo sapiens
  misc_RNA (1)...(19): siRNA sense strand
cccaggcuguuuagcauag

SEQ ID NO: 1516203 - RNA, 19 nt, Homo sapiens
  misc_RNA (1)...(19): siRNA sense strand
gcugcucuguaucggauuc

SEQ ID NO: 1516204 - RNA, 19 nt, Homo sapiens
  misc_RNA (1)...(19): siRNA sense strand
agccucagcaacauaauuu

SEQ ID NO: 1516205 - RNA, 19 nt, Homo sapiens
  misc_RNA (1)...(19): siRNA sense strand
cagccucagcaacauaauu

SEQ ID NO: 1516206 - RNA, 19 nt, Homo sapiens
  misc_RNA (1)...(19): siRNA sense strand
gcuggagccauacuucugu

SEQ ID NO: 1516207 - RNA, 19 nt, Homo sapiens
  misc_RNA (1)...(19): siRNA sense strand
uggacaagacucugaggaa

SEQ ID NO: 1516208 - RNA, 19 nt, Homo sapiens
  misc_RNA (1)...(19): siRNA sense strand
gcucaugugcaccacuuuc

SEQ ID NO: 1516209 - RNA, 19 nt, Homo sapiens
  misc_RNA (1)...(19): siRNA sense strand
gcacaccuucagcucuaug

SEQ ID NO: 1516210 - RNA, 19 nt, Homo sapiens
  misc_RNA (1)...(19): siRNA sense strand
gagcugggcuggugaugaa

SEQ ID NO: 1516211 - RNA, 19 nt, Homo sapiens
  misc_RNA (1)...(19): siRNA sense strand
ggacaaggagaacaucuuu

SEQ ID NO: 1516212 - RNA, 19 nt, Homo sapiens
  misc_RNA (1)...(19): siRNA sense strand
cggcgagggucacuuugua

SEQ ID NO: 1516213 - RNA, 19 nt, Homo sapiens
  misc_RNA (1)...(19): siRNA sense strand
gcaagagcuucagccagaa

SEQ ID NO: 1516214 - RNA, 19 nt, Homo sapiens
  misc_RNA (1)...(19): siRNA sense strand
ggucgucgcugaacaucca

SEQ ID NO: 1516215 - RNA, 19 nt, Homo sapiens
  misc_RNA (1)...(19): siRNA sense strand
acaaggagaacaucuuuca

SEQ ID NO: 1516216 - RNA, 19 nt, Homo sapiens
  misc_RNA (1)...(19): siRNA sense strand
ggucgucccugaagaucca

SEQ ID NO: 1516217 - RNA, 19 nt, Homo sapiens
  misc_RNA (1)...(19): siRNA sense strand
gcaagugcggcaagagcuu

SEQ ID NO: 1516218 - RNA, 19 nt, Homo sapiens
  misc_RNA (1)...(19): siRNA sense strand
ggagcugggcuggugauga

SEQ ID NO: 1516219 - RNA, 19 nt, Homo sapiens
  misc_RNA (1)...(19): siRNA sense strand
gcgagggucacuuuguaug

SEQ ID NO: 1516220 - RNA, 19 nt, Homo sapiens
  misc_RNA (1)...(19): siRNA sense strand
gccagaagcccaacuugac

SEQ ID NO: 1516221 - RNA, 19 nt, Homo sapiens
  misc_RNA (1)...(19): siRNA sense strand
uggagaaggacaaggagaa

SEQ ID NO: 1516222 - RNA, 19 nt, Homo sapiens
  misc_RNA (1)...(19): siRNA sense strand
gaaggacaaggagaacauc

SEQ ID NO: 1516223 - RNA, 19 nt, Homo sapiens
  misc_RNA (1)...(19): siRNA sense strand
aggccaugcuuguggagaa

SEQ ID NO: 1516224 - RNA, 19 nt, Homo sapiens
  misc_RNA (1)...(19): siRNA sense strand
gagaaggacaaggagaaca

SEQ ID NO: 1516225 - RNA, 19 nt, Homo sapiens
  misc_RNA (1)...(19): siRNA sense strand
gcucacaacucccuauuaa

SEQ ID NO: 1516226 - RNA, 19 nt, Homo sapiens
  misc_RNA (1)...(19): siRNA sense strand
caaagacacuggucaaguu

SEQ ID NO: 1516227 - RNA, 19 nt, Homo sapiens
  misc_RNA (1)...(19): siRNA sense strand
gcaacauacugcuuucauu

SEQ ID NO: 1516228 - RNA, 19 nt, Homo sapiens
  misc_RNA (1)...(19): siRNA sense strand
ggaaugaaauauccaagag

SEQ ID NO: 1516229 - RNA, 19 nt, Homo sapiens
  misc_RNA (1)...(19): siRNA sense strand
cauacugcuuucauucuua

SEQ ID NO: 1516230 - RNA, 19 nt, Homo sapiens
  misc_RNA (1)...(19): siRNA sense strand
caacauacugcuuucauuc

SEQ ID NO: 1516231 - RNA, 19 nt, Homo sapiens
  misc_RNA (1)...(19): siRNA sense strand
gaaugaaauauccaagaga

SEQ ID NO: 1516232 - RNA, 19 nt, Homo sapiens
  misc_RNA (1)...(19): siRNA sense strand
gaggaggcauucaaacacu

SEQ ID NO: 1516233 - RNA, 19 nt, Homo sapiens
  misc_RNA (1)...(19): siRNA sense strand
guacuuugucagcaacaua

SEQ ID NO: 1516234 - RNA, 19 nt, Homo sapiens
  misc_RNA (1)...(19): siRNA sense strand
ucacaacucccuauuaagg

SEQ ID NO: 1516235 - RNA, 19 nt, Homo sapiens
  misc_RNA (1)...(19): siRNA sense strand
aaagacacuggucaaguuu

SEQ ID NO: 1516236 - RNA, 19 nt, Homo sapiens
  misc_RNA (1)...(19): siRNA sense strand
cagaggaggcauucaaaca

SEQ ID NO: 1516237 - RNA, 19 nt, Homo sapiens
  misc_RNA (1)...(19): siRNA sense strand
acauacugcuuucauucuu

SEQ ID NO: 1516238 - RNA, 19 nt, Homo sapiens
  misc_RNA (1)...(19): siRNA sense strand
ccaaagacacuggucaagu

SEQ ID NO: 1516239 - RNA, 19 nt, Homo sapiens
  misc_RNA (1)...(19): siRNA sense strand
agacacuggucaaguuuac

SEQ ID NO: 1516240 - RNA, 19 nt, Homo sapiens
  misc_RNA (1)...(19): siRNA sense strand
aagguuucauuggcuguua

SEQ ID NO: 1516241 - RNA, 19 nt, Homo sapiens
  misc_RNA (1)...(19): siRNA sense strand
ucuagcagguugucuacuc

SEQ ID NO: 1516242 - RNA, 19 nt, Homo sapiens
  misc_RNA (1)...(19): siRNA sense strand
ccuauuaagggaaaucaau

SEQ ID NO: 1516243 - RNA, 19 nt, Homo sapiens
  misc_RNA (1)...(19): siRNA sense strand
ggaggcauucaaacacuuc

SEQ ID NO: 1516244 - RNA, 19 nt, Homo sapiens
  misc_RNA (1)...(19): siRNA sense strand
ccugguacuuugucagcaa

SEQ ID NO: 1516245 - RNA, 19 nt, Homo sapiens
  misc_RNA (1)...(19): siRNA sense strand
uaugaaggccgagggaaug

SEQ ID NO: 1516246 - RNA, 19 nt, Homo sapiens
  misc_RNA (1)...(19): siRNA sense strand
cuggucaaguuuacucuca

SEQ ID NO: 1516247 - RNA, 19 nt, Homo sapiens
  misc_RNA (1)...(19): siRNA sense strand
ggauuacaauguucucuuu

SEQ ID NO: 1516248 - RNA, 19 nt, Homo sapiens
  misc_RNA (1)...(19): siRNA sense strand
ucaccaagaucuacagcua

SEQ ID NO: 1516249 - RNA, 19 nt, Homo sapiens
  misc_RNA (1)...(19): siRNA sense strand
ggaagacacugggauguac

SEQ ID NO: 1516250 - RNA, 19 nt, Homo sapiens
  misc_RNA (1)...(19): siRNA sense strand
ccacagugcucucccuauc

SEQ ID NO: 1516251 - RNA, 19 nt, Homo sapiens
  misc_RNA (1)...(19): siRNA sense strand
cagcugggacaauuuauuu

SEQ ID NO: 1516252 - RNA, 19 nt, Homo sapiens
  misc_RNA (1)...(19): siRNA sense strand
gaaccuggacaguuucuuc

SEQ ID NO: 1516253 - RNA, 19 nt, Homo sapiens
  misc_RNA (1)...(19): siRNA sense strand
gggaagacacugggaugua

SEQ ID NO: 1516254 - RNA, 19 nt, Homo sapiens
  misc_RNA (1)...(19): siRNA sense strand
ggaauggcuuugccugcau

SEQ ID NO: 1516255 - RNA, 19 nt, Homo sapiens
  misc_RNA (1)...(19): siRNA sense strand
ucugcaaccucuucagcua

SEQ ID NO: 1516256 - RNA, 19 nt, Homo sapiens
  misc_RNA (1)...(19): siRNA sense strand
gaagggaagggaagacacu

SEQ ID NO: 1516257 - RNA, 19 nt, Homo sapiens
  misc_RNA (1)...(19): siRNA sense strand
ggaucuccaucuucucucu

SEQ ID NO: 1516258 - RNA, 19 nt, Homo sapiens
  misc_RNA (1)...(19): siRNA sense strand
gaggaucuccaucuucucu

SEQ ID NO: 1516259 - RNA, 19 nt, Homo sapiens
  misc_RNA (1)...(19): siRNA sense strand
gcggguaggcccuuugauc

SEQ ID NO: 1516260 - RNA, 19 nt, Homo sapiens
  misc_RNA (1)...(19): siRNA sense strand
gcccuuugaucccugaaca

SEQ ID NO: 1516261 - RNA, 19 nt, Homo sapiens
  misc_RNA (1)...(19): siRNA sense strand
augcguggauuacaauguu

SEQ ID NO: 1516262 - RNA, 19 nt, Homo sapiens
  misc_RNA (1)...(19): siRNA sense strand
ccagcugggacaauuuauu

SEQ ID NO: 1516263 - RNA, 19 nt, Homo sapiens
  misc_RNA (1)...(19): siRNA sense strand
ggcucaaccugcaaugaca

SEQ ID NO: 1516264 - RNA, 19 nt, Homo sapiens
  misc_RNA (1)...(19): siRNA sense strand
uggcuuugccugcaucuug

SEQ ID NO: 1516265 - RNA, 19 nt, Homo sapiens
  misc_RNA (1)...(19): siRNA sense strand
gauuacaauguucucuuug

SEQ ID NO: 1516266 - RNA, 19 nt, Homo sapiens
  misc_RNA (1)...(19): siRNA sense strand
gacaggggcuucucagucu

SEQ ID NO: 1516267 - RNA, 19 nt, Homo sapiens
  misc_RNA (1)...(19): siRNA sense strand
caaccaaccaaguaaccau

SEQ ID NO: 1516268 - RNA, 19 nt, Homo sapiens
  misc_RNA (1)...(19): siRNA sense strand
cgaggcuccuggcaucaca

SEQ ID NO: 1516269 - RNA, 19 nt, Homo sapiens
  misc_RNA (1)...(19): siRNA sense strand
gcuucuggcugguccaacu

SEQ ID NO: 1516270 - RNA, 19 nt, Homo sapiens
  misc_RNA (1)...(19): siRNA sense strand
aaccaaccaaguaaccaua

SEQ ID NO: 1516271 - RNA, 19 nt, Homo sapiens
  misc_RNA (1)...(19): siRNA sense strand
cuucacaaccuuccuccuu

SEQ ID NO: 1516272 - RNA, 19 nt, Homo sapiens
  misc_RNA (1)...(19): siRNA sense strand
gcacagauauccucgugua

SEQ ID NO: 1516273 - RNA, 19 nt, Homo sapiens
  misc_RNA (1)...(19): siRNA sense strand
gaaacaggcugagucuaga

SEQ ID NO: 1516274 - RNA, 19 nt, Homo sapiens
  misc_RNA (1)...(19): siRNA sense strand
gcaagaccacgcuccuuua

SEQ ID NO: 1516275 - RNA, 19 nt, Homo sapiens
  misc_RNA (1)...(19): siRNA sense strand
ucacagaaguccugaacga

SEQ ID NO: 1516276 - RNA, 19 nt, Homo sapiens
  misc_RNA (1)...(19): siRNA sense strand
ggaggcaccugaugcacuu

SEQ ID NO: 1516277 - RNA, 19 nt, Homo sapiens
  misc_RNA (1)...(19): siRNA sense strand
gcacuuccgcugcuuaaga

SEQ ID NO: 1516278 - RNA, 19 nt, Homo sapiens
  misc_RNA (1)...(19): siRNA sense strand
agaccacgcuccuuuacaa

SEQ ID NO: 1516279 - RNA, 19 nt, Homo sapiens
  misc_RNA (1)...(19): siRNA sense strand
cggcugagcucacagaagu

SEQ ID NO: 1516280 - RNA, 19 nt, Homo sapiens
  misc_RNA (1)...(19): siRNA sense strand
caacguggagccucugaaa

SEQ ID NO: 1516281 - RNA, 19 nt, Homo sapiens
  misc_RNA (1)...(19): siRNA sense strand
ggcaagaccacgcuccuuu

SEQ ID NO: 1516282 - RNA, 19 nt, Homo sapiens
  misc_RNA (1)...(19): siRNA sense strand
agaaacaggcugagucuag

SEQ ID NO: 1516283 - RNA, 19 nt, Homo sapiens
  misc_RNA (1)...(19): siRNA sense strand
gcgcggagacagcaagaga

SEQ ID NO: 1516284 - RNA, 19 nt, Homo sapiens
  misc_RNA (1)...(19): siRNA sense strand
ggcugagucuagagagauu

SEQ ID NO: 1516285 - RNA, 19 nt, Homo sapiens
  misc_RNA (1)...(19): siRNA sense strand
uggagacccugcccacugu

SEQ ID NO: 1516286 - RNA, 19 nt, Homo sapiens
  misc_RNA (1)...(19): siRNA sense strand
gaugcacuuccgcugcuua

SEQ ID NO: 1516287 - RNA, 19 nt, Homo sapiens
  misc_RNA (1)...(19): siRNA sense strand
cagauauccucguguacgu

SEQ ID NO: 1516288 - RNA, 19 nt, Homo sapiens
  misc_RNA (1)...(19): siRNA sense strand
caggcugagucuagagaga

SEQ ID NO: 1516289 - RNA, 19 nt, Homo sapiens
  misc_RNA (1)...(19): siRNA sense strand
cacuuccgcugcuuaagau

SEQ ID NO: 1516290 - RNA, 19 nt, Homo sapiens
  misc_RNA (1)...(19): siRNA sense strand
caagaccacgcuccuuuac

SEQ ID NO: 1516291 - RNA, 19 nt, Homo sapiens
  misc_RNA (1)...(19): siRNA sense strand
ccacgcuccuuuacaagcu

SEQ ID NO: 1516292 - RNA, 19 nt, Homo sapiens
  misc_RNA (1)...(19): siRNA sense strand
gcggagacagcaagagauc

SEQ ID NO: 1516293 - RNA, 19 nt, Homo sapiens
  misc_RNA (1)...(19): siRNA sense strand
gcucacagaaguccugaac

SEQ ID NO: 1516294 - RNA, 19 nt, Homo sapiens
  misc_RNA (1)...(19): siRNA sense strand
gagacccugcccacuguug

SEQ ID NO: 1516295 - RNA, 19 nt, Homo sapiens
  misc_RNA (1)...(19): siRNA sense strand
gccaugggcucaagacaga

SEQ ID NO: 1516296 - RNA, 19 nt, Homo sapiens
  misc_RNA (1)...(19): siRNA sense strand
caccaggaguguccaguuc

SEQ ID NO: 1516297 - RNA, 19 nt, Homo sapiens
  misc_RNA (1)...(19): siRNA sense strand
ccaggaguguccaguucuu

SEQ ID NO: 1516298 - RNA, 19 nt, Homo sapiens
  misc_RNA (1)...(19): siRNA sense strand
gagcaacggcaggagugua

SEQ ID NO: 1516299 - RNA, 19 nt, Homo sapiens
  misc_RNA (1)...(19): siRNA sense strand
ggagcgacgucggacuugu

SEQ ID NO: 1516300 - RNA, 19 nt, Homo sapiens
  misc_RNA (1)...(19): siRNA sense strand
gcagccuggugccaucugu

SEQ ID NO: 1516301 - RNA, 19 nt, Homo sapiens
  misc_RNA (1)...(19): siRNA sense strand
ggcccaagacacuguauuc

SEQ ID NO: 1516302 - RNA, 19 nt, Homo sapiens
  misc_RNA (1)...(19): siRNA sense strand
gagcgacgucggacuugug

SEQ ID NO: 1516303 - RNA, 19 nt, Homo sapiens
  misc_RNA (1)...(19): siRNA sense strand
aaacugcaccugugucaac

SEQ ID NO: 1516304 - RNA, 19 nt, Homo sapiens
  misc_RNA (1)...(19): siRNA sense strand
gccaaccagugcccacaca

SEQ ID NO: 1516305 - RNA, 19 nt, Homo sapiens
  misc_RNA (1)...(19): siRNA sense strand
gugugccgaucuccucuug

SEQ ID NO: 1516306 - RNA, 19 nt, Homo sapiens
  misc_RNA (1)...(19): siRNA sense strand
ccagugccaaugccucuug

SEQ ID NO: 1516307 - RNA, 19 nt, Homo sapiens
  misc_RNA (1)...(19): siRNA sense strand
gaucugcaguuucuuaauu

SEQ ID NO: 1516308 - RNA, 19 nt, Homo sapiens
  misc_RNA (1)...(19): siRNA sense strand
ggacaaagauauuauugag

SEQ ID NO: 1516309 - RNA, 19 nt, Homo sapiens
  misc_RNA (1)...(19): siRNA sense strand
gaggaaagaugaauugcuu

SEQ ID NO: 1516310 - RNA, 19 nt, Homo sapiens
  misc_RNA (1)...(19): siRNA sense strand
ccgaguaacuucauaauug

SEQ ID NO: 1516311 - RNA, 19 nt, Homo sapiens
  misc_RNA (1)...(19): siRNA sense strand
gaaauaaucaggucacuca

SEQ ID NO: 1516312 - RNA, 19 nt, Homo sapiens
  misc_RNA (1)...(19): siRNA sense strand
aaucagaagucacuguuua

SEQ ID NO: 1516313 - RNA, 19 nt, Homo sapiens
  misc_RNA (1)...(19): siRNA sense strand
gaacaucgggucagaaguu

SEQ ID NO: 1516314 - RNA, 19 nt, Homo sapiens
  misc_RNA (1)...(19): siRNA sense strand
caaauuagaaggugaacua

SEQ ID NO: 1516315 - RNA, 19 nt, Homo sapiens
  misc_RNA (1)...(19): siRNA sense strand
ggucagaaguugagauuuc

SEQ ID NO: 1516316 - RNA, 19 nt, Homo sapiens
  misc_RNA (1)...(19): siRNA sense strand
ggaguccucuuccaauaaa

SEQ ID NO: 1516317 - RNA, 19 nt, Homo sapiens
  misc_RNA (1)...(19): siRNA sense strand
ugaaggcacuuaagauuga

SEQ ID NO: 1516318 - RNA, 19 nt, Homo sapiens
  misc_RNA (1)...(19): siRNA sense strand
gcuacaagcucgagaacaa

SEQ ID NO: 1516319 - RNA, 19 nt, Homo sapiens
  misc_RNA (1)...(19): siRNA sense strand
ccacaaauauuucucaucu

SEQ ID NO: 1516320 - RNA, 19 nt, Homo sapiens
  misc_RNA (1)...(19): siRNA sense strand
ggaagaggaucggcagaaa

SEQ ID NO: 1516321 - RNA, 19 nt, Homo sapiens
  misc_RNA (1)...(19): siRNA sense strand
ggaaagguccgaaaucuca

SEQ ID NO: 1516322 - RNA, 19 nt, Homo sapiens
  misc_RNA (1)...(19): siRNA sense strand
ggaaggagcugcaguugcu

SEQ ID NO: 1516323 - RNA, 19 nt, Homo sapiens
  misc_RNA (1)...(19): siRNA sense strand
ggaacuuucugcccaggua

SEQ ID NO: 1516324 - RNA, 19 nt, Homo sapiens
  misc_RNA (1)...(19): siRNA sense strand
gcaaagagaagaaacaaca

SEQ ID NO: 1516325 - RNA, 19 nt, Homo sapiens
  misc_RNA (1)...(19): siRNA sense strand
ggaaagaugaauugcuuaa

SEQ ID NO: 1516326 - RNA, 19 nt, Homo sapiens
  misc_RNA (1)...(19): siRNA sense strand
gagaagcaguggcaugaug

SEQ ID NO: 1516327 - RNA, 19 nt, Homo sapiens
  misc_RNA (1)...(19): siRNA sense strand
cgaguaacuucauaauuga

SEQ ID NO: 1516328 - RNA, 19 nt, Homo sapiens
  misc_RNA (1)...(19): siRNA sense strand
gagauaaagagcucaauga

SEQ ID NO: 1516329 - RNA, 19 nt, Homo sapiens
  misc_RNA (1)...(19): siRNA sense strand
gcagaaagcagacaccaau

SEQ ID NO: 1516330 - RNA, 19 nt, Homo sapiens
  misc_RNA (1)...(19): siRNA sense strand
auaaagagcucaaugacau

SEQ ID NO: 1516331 - RNA, 19 nt, Homo sapiens
  misc_RNA (1)...(19): siRNA sense strand
ccaaagacuuaguagagaa

SEQ ID NO: 1516332 - RNA, 19 nt, Homo sapiens
  misc_RNA (1)...(19): siRNA sense strand
gcagagacauguguuuauc

SEQ ID NO: 1516333 - RNA, 19 nt, Homo sapiens
  misc_RNA (1)...(19): siRNA sense strand
aaaguugccugcacgauga

SEQ ID NO: 1516334 - RNA, 19 nt, Homo sapiens
  misc_RNA (1)...(19): siRNA sense strand
gcggagacuuguauuguga

SEQ ID NO: 1516335 - RNA, 19 nt, Homo sapiens
  misc_RNA (1)...(19): siRNA sense strand
ugauaaagcuaaaggacaa

SEQ ID NO: 1516336 - RNA, 19 nt, Homo sapiens
  misc_RNA (1)...(19): siRNA sense strand
agaagucacuguuuaagga

SEQ ID NO: 1516337 - RNA, 19 nt, Homo sapiens
  misc_RNA (1)...(19): siRNA sense strand
cauauucaccaaagacuua

SEQ ID NO: 1516338 - RNA, 19 nt, Homo sapiens
  misc_RNA (1)...(19): siRNA sense strand
gaaauuugaagccauguug

SEQ ID NO: 1516339 - RNA, 19 nt, Homo sapiens
  misc_RNA (1)...(19): siRNA sense strand
cgacaaugauaaagcuaaa

SEQ ID NO: 1516340 - RNA, 19 nt, Homo sapiens
  misc_RNA (1)...(19): siRNA sense strand
ucaggucacucacgaagaa

SEQ ID NO: 1516341 - RNA, 19 nt, Homo sapiens
  misc_RNA (1)...(19): siRNA sense strand
ggcaugaugucaguguuua

SEQ ID NO: 1516342 - RNA, 19 nt, Homo sapiens
  misc_RNA (1)...(19): siRNA sense strand
agacuuguauugugaaaga

SEQ ID NO: 1516343 - RNA, 19 nt, Homo sapiens
  misc_RNA (1)...(19): siRNA sense strand
gaaacgaaacucucagcaa

SEQ ID NO: 1516344 - RNA, 19 nt, Homo sapiens
  misc_RNA (1)...(19): siRNA sense strand
gaaaagacgacagaaaaua

SEQ ID NO: 1516345 - RNA, 19 nt, Homo sapiens
  misc_RNA (1)...(19): siRNA sense strand
gaacaagcucuuacgacaa

SEQ ID NO: 1516346 - RNA, 19 nt, Homo sapiens
  misc_RNA (1)...(19): siRNA sense strand
gcucuuacgacaaugauaa

SEQ ID NO: 1516347 - RNA, 19 nt, Homo sapiens
  misc_RNA (1)...(19): siRNA sense strand
gagcaugcccuacgugaug

SEQ ID NO: 1516348 - RNA, 19 nt, Homo sapiens
  misc_RNA (1)...(19): siRNA sense strand
gcuaaaggacaaagauauu

SEQ ID NO: 1516349 - RNA, 19 nt, Homo sapiens
  misc_RNA (1)...(19): siRNA sense strand
caaaauaggucagacaaga

SEQ ID NO: 1516350 - RNA, 19 nt, Homo sapiens
  misc_RNA (1)...(19): siRNA sense strand
gggcgaaaguggcaugugu

SEQ ID NO: 1516351 - RNA, 19 nt, Homo sapiens
  misc_RNA (1)...(19): siRNA sense strand
gaaguugagauuuccacua

SEQ ID NO: 1516352 - RNA, 19 nt, Homo sapiens
  misc_RNA (1)...(19): siRNA sense strand
gcaagaacgcacaaauuca

SEQ ID NO: 1516353 - RNA, 19 nt, Homo sapiens
  misc_RNA (1)...(19): siRNA sense strand
gcaacgcauucuucucuuc

SEQ ID NO: 1516354 - RNA, 19 nt, Homo sapiens
  misc_RNA (1)...(19): siRNA sense strand
gaaaguggcaugugugacu

SEQ ID NO: 1516355 - RNA, 19 nt, Homo sapiens
  misc_RNA (1)...(19): siRNA sense strand
gauguagaaugucaagauc

SEQ ID NO: 1516356 - RNA, 19 nt, Homo sapiens
  misc_RNA (1)...(19): siRNA sense strand
ggagacuuguauugugaaa

SEQ ID NO: 1516357 - RNA, 19 nt, Homo sapiens
  misc_RNA (1)...(19): siRNA sense strand
guugcucauuggagaauua

SEQ ID NO: 1516358 - RNA, 19 nt, Homo sapiens
  misc_RNA (1)...(19): siRNA sense strand
agacaccaauacugaauga

SEQ ID NO: 1516359 - RNA, 19 nt, Homo sapiens
  misc_RNA (1)...(19): siRNA sense strand
gaaaaggcuucaauugugu

SEQ ID NO: 1516360 - RNA, 19 nt, Homo sapiens
  misc_RNA (1)...(19): siRNA sense strand
gacguggaguggaugagua

SEQ ID NO: 1516361 - RNA, 19 nt, Homo sapiens
  misc_RNA (1)...(19): siRNA sense strand
aaagcuggauguagaaugu

SEQ ID NO: 1516362 - RNA, 19 nt, Homo sapiens
  misc_RNA (1)...(19): siRNA sense strand
cagaaaagcuggauguaga

SEQ ID NO: 1516363 - RNA, 19 nt, Homo sapiens
  misc_RNA (1)...(19): siRNA sense strand
gaaaauaaccacccaaaag

SEQ ID NO: 1516364 - RNA, 19 nt, Homo sapiens
  misc_RNA (1)...(19): siRNA sense strand
gcaagauuauaagcagaaa

SEQ ID NO: 1516365 - RNA, 19 nt, Homo sapiens
  misc_RNA (1)...(19): siRNA sense strand
caaauggaaugccaaacag

SEQ ID NO: 1516366 - RNA, 19 nt, Homo sapiens
  misc_RNA (1)...(19): siRNA sense strand
gggugcaccuguucagaaa

SEQ ID NO: 1516367 - RNA, 19 nt, Homo sapiens
  misc_RNA (1)...(19): siRNA sense strand
gcaguggcaugaugucagu

SEQ ID NO: 1516368 - RNA, 19 nt, Homo sapiens
  misc_RNA (1)...(19): siRNA sense strand
cagcagagacauguguuua

SEQ ID NO: 1516369 - RNA, 19 nt, Homo sapiens
  misc_RNA (1)...(19): siRNA sense strand
gcagauuguucggguaaau

SEQ ID NO: 1516370 - RNA, 19 nt, Homo sapiens
  misc_RNA (1)...(19): siRNA sense strand
ccaaacagcucuccaaaag

SEQ ID NO: 1516371 - RNA, 19 nt, Homo sapiens
  misc_RNA (1)...(19): siRNA sense strand
uaaaagcucuugaauccaa

SEQ ID NO: 1516372 - RNA, 19 nt, Homo sapiens
  misc_RNA (1)...(19): siRNA sense strand
ucucaggaauuaauacaga

SEQ ID NO: 1516373 - RNA, 19 nt, Homo sapiens
  misc_RNA (1)...(19): siRNA sense strand
caacuacagcuucaggaaa

SEQ ID NO: 1516374 - RNA, 19 nt, Homo sapiens
  misc_RNA (1)...(19): siRNA sense strand
gauaaagagcucaaugaca

SEQ ID NO: 1516375 - RNA, 19 nt, Homo sapiens
  misc_RNA (1)...(19): siRNA sense strand
cuacgaguuuguuaaucua

SEQ ID NO: 1516376 - RNA, 19 nt, Homo sapiens
  misc_RNA (1)...(19): siRNA sense strand
ucagaaacacccacuuuau

SEQ ID NO: 1516377 - RNA, 19 nt, Homo sapiens
  misc_RNA (1)...(19): siRNA sense strand
uaauuacgcugucauccau

SEQ ID NO: 1516378 - RNA, 19 nt, Homo sapiens
  misc_RNA (1)...(19): siRNA sense strand
acucaaagauggaggaauc

SEQ ID NO: 1516379 - RNA, 19 nt, Homo sapiens
  misc_RNA (1)...(19): siRNA sense strand
gaaauugaaggcacuuaag

SEQ ID NO: 1516380 - RNA, 19 nt, Homo sapiens
  misc_RNA (1)...(19): siRNA sense strand
uuaaggaccagaaauuuga

SEQ ID NO: 1516381 - RNA, 19 nt, Homo sapiens
  misc_RNA (1)...(19): siRNA sense strand
gcaacgagaagagaucauu

SEQ ID NO: 1516382 - RNA, 19 nt, Homo sapiens
  misc_RNA (1)...(19): siRNA sense strand
agcaacagcuucuuucaug

SEQ ID NO: 1516383 - RNA, 19 nt, Homo sapiens
  misc_RNA (1)...(19): siRNA sense strand
ggauguagaaugucaagau

SEQ ID NO: 1516384 - RNA, 19 nt, Homo sapiens
  misc_RNA (1)...(19): siRNA sense strand
aaguugagauuuccacuau

SEQ ID NO: 1516385 - RNA, 19 nt, Homo sapiens
  misc_RNA (1)...(19): siRNA sense strand
caaagauggaggaaucaaa

SEQ ID NO: 1516386 - RNA, 19 nt, Homo sapiens
  misc_RNA (1)...(19): siRNA sense strand
agagugaucugcaguuucu

SEQ ID NO: 1516387 - RNA, 19 nt, Homo sapiens
  misc_RNA (1)...(19): siRNA sense strand
gguaaaagcucuugaaucc

SEQ ID NO: 1516388 - RNA, 19 nt, Homo sapiens
  misc_RNA (1)...(19): siRNA sense strand
uaauugccauccaagauuc

SEQ ID NO: 1516389 - RNA, 19 nt, Homo sapiens
  misc_RNA (1)...(19): siRNA sense strand
gagaauuguccgccucaaa

SEQ ID NO: 1516390 - RNA, 19 nt, Homo sapiens
  misc_RNA (1)...(19): siRNA sense strand
aaagaggaaagaugaauug

SEQ ID NO: 1516391 - RNA, 19 nt, Homo sapiens
  misc_RNA (1)...(19): siRNA sense strand
gagaaaagaggaaagauga

SEQ ID NO: 1516392 - RNA, 19 nt, Homo sapiens
  misc_RNA (1)...(19): siRNA sense strand
aacaagcucuuacgacaau

SEQ ID NO: 1516393 - RNA, 19 nt, Homo sapiens
  misc_RNA (1)...(19): siRNA sense strand
gcacacugcugcccaucag

SEQ ID NO: 1516394 - RNA, 19 nt, Homo sapiens
  misc_RNA (1)...(19): siRNA sense strand
aaacacccacuuuaucuga

SEQ ID NO: 1516395 - RNA, 19 nt, Homo sapiens
  misc_RNA (1)...(19): siRNA sense strand
gaaggugaacuacauaaaa

SEQ ID NO: 1516396 - RNA, 19 nt, Homo sapiens
  misc_RNA (1)...(19): siRNA sense strand
gaaggcacuuaagauugaa

SEQ ID NO: 1516397 - RNA, 19 nt, Homo sapiens
  misc_RNA (1)...(19): siRNA sense strand
gauauuauugaggcaguua

SEQ ID NO: 1516398 - RNA, 19 nt, Homo sapiens
  misc_RNA (1)...(19): siRNA sense strand
ugaggcaguuaaucacauu

SEQ ID NO: 1516399 - RNA, 19 nt, Homo sapiens
  misc_RNA (1)...(19): siRNA sense strand
gcagacaccaauacugaau

SEQ ID NO: 1516400 - RNA, 19 nt, Homo sapiens
  misc_RNA (1)...(19): siRNA sense strand
aagcagacaccaauacuga

SEQ ID NO: 1516401 - RNA, 19 nt, Homo sapiens
  misc_RNA (1)...(19): siRNA sense strand
cauccaagauucccacucu

SEQ ID NO: 1516402 - RNA, 19 nt, Homo sapiens
  misc_RNA (1)...(19): siRNA sense strand
ccacccgaguaacuucaua

SEQ ID NO: 1516403 - RNA, 19 nt, Homo sapiens
  misc_RNA (1)...(19): siRNA sense strand
caaagacuuaguagagaaa

SEQ ID NO: 1516404 - RNA, 19 nt, Homo sapiens
  misc_RNA (1)...(19): siRNA sense strand
gaagaaacaacagaucgau

SEQ ID NO: 1516405 - RNA, 19 nt, Homo sapiens
  misc_RNA (1)...(19): siRNA sense strand
auucagaacugcacaaucu

SEQ ID NO: 1516406 - RNA, 19 nt, Homo sapiens
  misc_RNA (1)...(19): siRNA sense strand
gaaagcagacaccaauacu

SEQ ID NO: 1516407 - RNA, 19 nt, Homo sapiens
  misc_RNA (1)...(19): siRNA sense strand
gcaccagucucuccacuug

SEQ ID NO: 1516408 - RNA, 19 nt, Homo sapiens
  misc_RNA (1)...(19): siRNA sense strand
ggaaguguacugccagaua

SEQ ID NO: 1516409 - RNA, 19 nt, Homo sapiens
  misc_RNA (1)...(19): siRNA sense strand
gaaguguacugccagauag

SEQ ID NO: 1516410 - RNA, 19 nt, Homo sapiens
  misc_RNA (1)...(19): siRNA sense strand
gcugaaugcuguuuaucuu

SEQ ID NO: 1516411 - RNA, 19 nt, Homo sapiens
  misc_RNA (1)...(19): siRNA sense strand
gcagacacuugaauucaca

SEQ ID NO: 1516412 - RNA, 19 nt, Homo sapiens
  misc_RNA (1)...(19): siRNA sense strand
ggagagcccugcugaagac

SEQ ID NO: 1516413 - RNA, 19 nt, Homo sapiens
  misc_RNA (1)...(19): siRNA sense strand
caaacugggugaauaaggu

SEQ ID NO: 1516414 - RNA, 19 nt, Homo sapiens
  misc_RNA (1)...(19): siRNA sense strand
ccacacaaccucacaagga

SEQ ID NO: 1516415 - RNA, 19 nt, Homo sapiens
  misc_RNA (1)...(19): siRNA sense strand
ccagaucccuacacucuca

SEQ ID NO: 1516416 - RNA, 19 nt, Homo sapiens
  misc_RNA (1)...(19): siRNA sense strand
ccaaggaggagcucauuga

SEQ ID NO: 1516417 - RNA, 19 nt, Homo sapiens
  misc_RNA (1)...(19): siRNA sense strand
caacuccacuuucucuaag

SEQ ID NO: 1516418 - RNA, 19 nt, Homo sapiens
  misc_RNA (1)...(19): siRNA sense strand
gacucaaacugggugaaua

SEQ ID NO: 1516419 - RNA, 19 nt, Homo sapiens
  misc_RNA (1)...(19): siRNA sense strand
ccacuggccucuucaacuc

SEQ ID NO: 1516420 - RNA, 19 nt, Homo sapiens
  misc_RNA (1)...(19): siRNA sense strand
cagcaagccuuauguaacg

SEQ ID NO: 1516421 - RNA, 19 nt, Homo sapiens
  misc_RNA (1)...(19): siRNA sense strand
guacgaggaugcaguuuug

SEQ ID NO: 1516422 - RNA, 19 nt, Homo sapiens
  misc_RNA (1)...(19): siRNA sense strand
gagcccugcugaagacuca

SEQ ID NO: 1516423 - RNA, 19 nt, Homo sapiens
  misc_RNA (1)...(19): siRNA sense strand
gaacucgcccuuggcaaug

SEQ ID NO: 1516424 - RNA, 19 nt, Homo sapiens
  misc_RNA (1)...(19): siRNA sense strand
ggaacuaggccaagaacag

SEQ ID NO: 1516425 - RNA, 19 nt, Homo sapiens
  misc_RNA (1)...(19): siRNA sense strand
gcaugccaccuguaucauu

SEQ ID NO: 1516426 - RNA, 19 nt, Homo sapiens
  misc_RNA (1)...(19): siRNA sense strand
ggaaggagccacacaaccu

SEQ ID NO: 1516427 - RNA, 19 nt, Homo sapiens
  misc_RNA (1)...(19): siRNA sense strand
gaaaaggcuucccaagaca

SEQ ID NO: 1516428 - RNA, 19 nt, Homo sapiens
  misc_RNA (1)...(19): siRNA sense strand
ggaggaacuaggccaagaa

SEQ ID NO: 1516429 - RNA, 19 nt, Homo sapiens
  misc_RNA (1)...(19): siRNA sense strand
ucaacuccacuuucucuaa

SEQ ID NO: 1516430 - RNA, 19 nt, Homo sapiens
  misc_RNA (1)...(19): siRNA sense strand
caggaugacccacgcauug

SEQ ID NO: 1516431 - RNA, 19 nt, Homo sapiens
  misc_RNA (1)...(19): siRNA sense strand
caugccaccuguaucauuc

SEQ ID NO: 1516432 - RNA, 19 nt, Homo sapiens
  misc_RNA (1)...(19): siRNA sense strand
gcggcugaaugcuguuuau

SEQ ID NO: 1516433 - RNA, 19 nt, Homo sapiens
  misc_RNA (1)...(19): siRNA sense strand
uggugauccugcacgauua

SEQ ID NO: 1516434 - RNA, 19 nt, Homo sapiens
  misc_RNA (1)...(19): siRNA sense strand
uuucagaguucacguccaa

SEQ ID NO: 1516435 - RNA, 19 nt, Homo sapiens
  misc_RNA (1)...(19): siRNA sense strand
ugaauucacaugcgaguca

SEQ ID NO: 1516436 - RNA, 19 nt, Homo sapiens
  misc_RNA (1)...(19): siRNA sense strand
ugaaggaaaccgucagcaa

SEQ ID NO: 1516437 - RNA, 19 nt, Homo sapiens
  misc_RNA (1)...(19): siRNA sense strand
gguacaaccgucuggauca

SEQ ID NO: 1516438 - RNA, 19 nt, Homo sapiens
  misc_RNA (1)...(19): siRNA sense strand
acucaaacugggugaauaa

SEQ ID NO: 1516439 - RNA, 19 nt, Homo sapiens
  misc_RNA (1)...(19): siRNA sense strand
gguguacuguggccucauc

SEQ ID NO: 1516440 - RNA, 19 nt, Homo sapiens
  misc_RNA (1)...(19): siRNA sense strand
cuccacaccugguucauca

SEQ ID NO: 1516441 - RNA, 19 nt, Homo sapiens
  misc_RNA (1)...(19): siRNA sense strand
cugaaugcuguuuaucuua

SEQ ID NO: 1516442 - RNA, 19 nt, Homo sapiens
  misc_RNA (1)...(19): siRNA sense strand
ggaugacccacgcauuguu

SEQ ID NO: 1516443 - RNA, 19 nt, Homo sapiens
  misc_RNA (1)...(19): siRNA sense strand
uagcucuucuugucucuuc

SEQ ID NO: 1516444 - RNA, 19 nt, Homo sapiens
  misc_RNA (1)...(19): siRNA sense strand
agacaaguggcaccagaaa

SEQ ID NO: 1516445 - RNA, 19 nt, Homo sapiens
  misc_RNA (1)...(19): siRNA sense strand
gucagcaagccuuauguaa

SEQ ID NO: 1516446 - RNA, 19 nt, Homo sapiens
  misc_RNA (1)...(19): siRNA sense strand
ugaugaggcaguuucugua

SEQ ID NO: 1516447 - RNA, 19 nt, Homo sapiens
  misc_RNA (1)...(19): siRNA sense strand
gaugacccacgcauuguuc

SEQ ID NO: 1516448 - RNA, 19 nt, Homo sapiens
  misc_RNA (1)...(19): siRNA sense strand
cgucagcaagccuuaugua

SEQ ID NO: 1516449 - RNA, 19 nt, Homo sapiens
  misc_RNA (1)...(19): siRNA sense strand
caaccugugcagacacuug

SEQ ID NO: 1516450 - RNA, 19 nt, Homo sapiens
  misc_RNA (1)...(19): siRNA sense strand
uggagaacaucgccaggau

SEQ ID NO: 1516451 - RNA, 19 nt, Homo sapiens
  misc_RNA (1)...(19): siRNA sense strand
acaugcgagucaccuguuu

SEQ ID NO: 1516452 - RNA, 19 nt, Homo sapiens
  misc_RNA (1)...(19): siRNA sense strand
gugcagacacuugaauuca

SEQ ID NO: 1516453 - RNA, 19 nt, Homo sapiens
  misc_RNA (1)...(19): siRNA sense strand
ggaccgacgccaucaccau

SEQ ID NO: 1516454 - RNA, 19 nt, Homo sapiens
  misc_RNA (1)...(19): siRNA sense strand
ucaagaagaacaagcaaaa

SEQ ID NO: 1516455 - RNA, 19 nt, Homo sapiens
  misc_RNA (1)...(19): siRNA sense strand
uggaggaacuaggccaaga

SEQ ID NO: 1516456 - RNA, 19 nt, Homo sapiens
  misc_RNA (1)...(19): siRNA sense strand
aaaauguggugguuucaga

SEQ ID NO: 1516457 - RNA, 19 nt, Homo sapiens
  misc_RNA (1)...(19): siRNA sense strand
cagaaaaggcuucccaaga

SEQ ID NO: 1516458 - RNA, 19 nt, Homo sapiens
  misc_RNA (1)...(19): siRNA sense strand
ucauugaggcccuauacug

SEQ ID NO: 1516459 - RNA, 19 nt, Homo sapiens
  misc_RNA (1)...(19): siRNA sense strand
agaaaaggcuucccaagac

SEQ ID NO: 1516460 - RNA, 19 nt, Homo sapiens
  misc_RNA (1)...(19): siRNA sense strand
gaugaggcaguuucuguac

SEQ ID NO: 1516461 - RNA, 19 nt, Homo sapiens
  misc_RNA (1)...(19): siRNA sense strand
gcagaugaugaggcaguuu

SEQ ID NO: 1516462 - RNA, 19 nt, Homo sapiens
  misc_RNA (1)...(19): siRNA sense strand
uguggugguuucagaguuc

SEQ ID NO: 1516463 - RNA, 19 nt, Homo sapiens
  misc_RNA (1)...(19): siRNA sense strand
ccacgacuuccgcauguuc

SEQ ID NO: 1516464 - RNA, 19 nt, Homo sapiens
  misc_RNA (1)...(19): siRNA sense strand
cggagagcccugcugaaga

SEQ ID NO: 1516465 - RNA, 19 nt, Homo sapiens
  misc_RNA (1)...(19): siRNA sense strand
ccagccagaucccuacacu

SEQ ID NO: 1516466 - RNA, 19 nt, Homo sapiens
  misc_RNA (1)...(19): siRNA sense strand
gauccugcacgauuacuac

SEQ ID NO: 1516467 - RNA, 19 nt, Homo sapiens
  misc_RNA (1)...(19): siRNA sense strand
cagaugaugaggcaguuuc

SEQ ID NO: 1516468 - RNA, 19 nt, Homo sapiens
  misc_RNA (1)...(19): siRNA sense strand
ucagcaagccuuauguaac

SEQ ID NO: 1516469 - RNA, 19 nt, Homo sapiens
  misc_RNA (1)...(19): siRNA sense strand
ccuggacugucaccucugu

SEQ ID NO: 1516470 - RNA, 19 nt, Homo sapiens
  misc_RNA (1)...(19): siRNA sense strand
ccugaacgcagucaaccaa

SEQ ID NO: 1516471 - RNA, 19 nt, Homo sapiens
  misc_RNA (1)...(19): siRNA sense strand
agaacucgcccuuggcaau

SEQ ID NO: 1516472 - RNA, 19 nt, Homo sapiens
  misc_RNA (1)...(19): siRNA sense strand
ccaggaugacccacgcauu

SEQ ID NO: 1516473 - RNA, 19 nt, Homo sapiens
  misc_RNA (1)...(19): siRNA sense strand
gaagaacaagcaaaagaca

SEQ ID NO: 1516474 - RNA, 19 nt, Homo sapiens
  misc_RNA (1)...(19): siRNA sense strand
aaaccgucagcaagccuua

SEQ ID NO: 1516475 - RNA, 19 nt, Homo sapiens
  misc_RNA (1)...(19): siRNA sense strand
guacaaccgucuggaucac

SEQ ID NO: 1516476 - RNA, 19 nt, Homo sapiens
  misc_RNA (1)...(19): siRNA sense strand
guagaaggcugcacagaga

SEQ ID NO: 1516477 - RNA, 19 nt, Homo sapiens
  misc_RNA (1)...(19): siRNA sense strand
gcagagaccggaaggauca

SEQ ID NO: 1516478 - RNA, 19 nt, Homo sapiens
  misc_RNA (1)...(19): siRNA sense strand
gcacagagaaguucaagac

SEQ ID NO: 1516479 - RNA, 19 nt, Homo sapiens
  misc_RNA (1)...(19): siRNA sense strand
aggcggaucuacagacaua

SEQ ID NO: 1516480 - RNA, 19 nt, Homo sapiens
  misc_RNA (1)...(19): siRNA sense strand
ggaaauguuugcuccuuuu

SEQ ID NO: 1516481 - RNA, 19 nt, Homo sapiens
  misc_RNA (1)...(19): siRNA sense strand
gggugccgcucgaggauuu

SEQ ID NO: 1516482 - RNA, 19 nt, Homo sapiens
  misc_RNA (1)...(19): siRNA sense strand
agaauacccucuaccaucu

SEQ ID NO: 1516483 - RNA, 19 nt, Homo sapiens
  misc_RNA (1)...(19): siRNA sense strand
cggaaauguuugcuccuuu

SEQ ID NO: 1516484 - RNA, 19 nt, Homo sapiens
  misc_RNA (1)...(19): siRNA sense strand
ccauggaaaucugcucuga

SEQ ID NO: 1516485 - RNA, 19 nt, Homo sapiens
  misc_RNA (1)...(19): siRNA sense strand
ucgaugcccuggacgacua

SEQ ID NO: 1516486 - RNA, 19 nt, Homo sapiens
  misc_RNA (1)...(19): siRNA sense strand
gaagaaaaccaaacaaugc

SEQ ID NO: 1516487 - RNA, 19 nt, Homo sapiens
  misc_RNA (1)...(19): siRNA sense strand
acgauucgcucuuccagau

SEQ ID NO: 1516488 - RNA, 19 nt, Homo sapiens
  misc_RNA (1)...(19): siRNA sense strand
uaucagugcuugguagaag

SEQ ID NO: 1516489 - RNA, 19 nt, Homo sapiens
  misc_RNA (1)...(19): siRNA sense strand
ggacuuccgguuugauaag

SEQ ID NO: 1516490 - RNA, 19 nt, Homo sapiens
  misc_RNA (1)...(19): siRNA sense strand
gggaggccauggaaaucug

SEQ ID NO: 1516491 - RNA, 19 nt, Homo sapiens
  misc_RNA (1)...(19): siRNA sense strand
ggugagaggcggaucuaca

SEQ ID NO: 1516492 - RNA, 19 nt, Homo sapiens
  misc_RNA (1)...(19): siRNA sense strand
gcucgaggauuuaaaagca

SEQ ID NO: 1516493 - RNA, 19 nt, Homo sapiens
  misc_RNA (1)...(19): siRNA sense strand
cugagaggcaggacaugua

SEQ ID NO: 1516494 - RNA, 19 nt, Homo sapiens
  misc_RNA (1)...(19): siRNA sense strand
ugagaggcaggacauguau

SEQ ID NO: 1516495 - RNA, 19 nt, Homo sapiens
  misc_RNA (1)...(19): siRNA sense strand
cggagccacugccuguaga

SEQ ID NO: 1516496 - RNA, 19 nt, Homo sapiens
  misc_RNA (1)...(19): siRNA sense strand
cagcagagaccggaaggau

SEQ ID NO: 1516497 - RNA, 19 nt, Homo sapiens
  misc_RNA (1)...(19): siRNA sense strand
uggccgacgugccugagaa

SEQ ID NO: 1516498 - RNA, 19 nt, Homo sapiens
  misc_RNA (1)...(19): siRNA sense strand
agaggcggaucuacagaca

SEQ ID NO: 1516499 - RNA, 19 nt, Homo sapiens
  misc_RNA (1)...(19): siRNA sense strand
acgcugcacggaaauguuu

SEQ ID NO: 1516500 - RNA, 19 nt, Homo sapiens
  misc_RNA (1)...(19): siRNA sense strand
gcaacaagaagaaaaccaa

SEQ ID NO: 1516501 - RNA, 19 nt, Homo sapiens
  misc_RNA (1)...(19): siRNA sense strand
cgacuacgagcaccacuac

SEQ ID NO: 1516502 - RNA, 19 nt, Homo sapiens
  misc_RNA (1)...(19): siRNA sense strand
agaggcaggacauguauca

SEQ ID NO: 1516503 - RNA, 19 nt, Homo sapiens
  misc_RNA (1)...(19): siRNA sense strand
gcaccaguucuucgaggau

SEQ ID NO: 1516504 - RNA, 19 nt, Homo sapiens
  misc_RNA (1)...(19): siRNA sense strand
accacacgcugcacggaaa

SEQ ID NO: 1516505 - RNA, 19 nt, Homo sapiens
  misc_RNA (1)...(19): siRNA sense strand
caaaguauuuacccuguug

SEQ ID NO: 1516506 - RNA, 19 nt, Homo sapiens
  misc_RNA (1)...(19): siRNA sense strand
guauuuacccuguugcuua

SEQ ID NO: 1516507 - RNA, 19 nt, Homo sapiens
  misc_RNA (1)...(19): siRNA sense strand
gcagaggugugaagaaggu

SEQ ID NO: 1516508 - RNA, 19 nt, Homo sapiens
  misc_RNA (1)...(19): siRNA sense strand
gcuaagacauucacugacu

SEQ ID NO: 1516509 - RNA, 19 nt, Homo sapiens
  misc_RNA (1)...(19): siRNA sense strand
cuacagccuuucacacaaa

SEQ ID NO: 1516510 - RNA, 19 nt, Homo sapiens
  misc_RNA (1)...(19): siRNA sense strand
ccaguccucuugcaaguga

SEQ ID NO: 1516511 - RNA, 19 nt, Homo sapiens
  misc_RNA (1)...(19): siRNA sense strand
uauuuacccuguugcuuaa

SEQ ID NO: 1516512 - RNA, 19 nt, Homo sapiens
  misc_RNA (1)...(19): siRNA sense strand
cagccgugcuuccuguuaa

SEQ ID NO: 1516513 - RNA, 19 nt, Homo sapiens
  misc_RNA (1)...(19): siRNA sense strand
gauguguccuuguucuuuc

SEQ ID NO: 1516514 - RNA, 19 nt, Homo sapiens
  misc_RNA (1)...(19): siRNA sense strand
caggugauguguccuuguu

SEQ ID NO: 1516515 - RNA, 19 nt, Homo sapiens
  misc_RNA (1)...(19): siRNA sense strand
ucucuuccaucucuuauuc

SEQ ID NO: 1516516 - RNA, 19 nt, Homo sapiens
  misc_RNA (1)...(19): siRNA sense strand
gcaucucuuccaucucuua

SEQ ID NO: 1516517 - RNA, 19 nt, Homo sapiens
  misc_RNA (1)...(19): siRNA sense strand
cugaguggcuuggcuaaga

SEQ ID NO: 1516518 - RNA, 19 nt, Homo sapiens
  misc_RNA (1)...(19): siRNA sense strand
ccacucccuuggaugagaa

SEQ ID NO: 1516519 - RNA, 19 nt, Homo sapiens
  misc_RNA (1)...(19): siRNA sense strand
cugcaucucuuccaucucu

SEQ ID NO: 1516520 - RNA, 19 nt, Homo sapiens
  misc_RNA (1)...(19): siRNA sense strand
gcccaguccucuugcaagu

SEQ ID NO: 1516521 - RNA, 19 nt, Homo sapiens
  misc_RNA (1)...(19): siRNA sense strand
ggugauguguccuuguucu

SEQ ID NO: 1516522 - RNA, 19 nt, Homo sapiens
  misc_RNA (1)...(19): siRNA sense strand
cacaaugccugccuucacu

SEQ ID NO: 1516523 - RNA, 19 nt, Homo sapiens
  misc_RNA (1)...(19): siRNA sense strand
cugccaugauucuaaguuu

SEQ ID NO: 1516524 - RNA, 19 nt, Homo sapiens
  misc_RNA (1)...(19): siRNA sense strand
acaaaguauuuacccuguu

SEQ ID NO: 1516525 - RNA, 19 nt, Homo sapiens
  misc_RNA (1)...(19): siRNA sense strand
uggcuaagacauucacuga

SEQ ID NO: 1516526 - RNA, 19 nt, Homo sapiens
  misc_RNA (1)...(19): siRNA sense strand
gcacaaugccugccuucac

SEQ ID NO: 1516527 - RNA, 19 nt, Homo sapiens
  misc_RNA (1)...(19): siRNA sense strand
ugccuucacuacagccuuu

SEQ ID NO: 1516528 - RNA, 19 nt, Homo sapiens
  misc_RNA (1)...(19): siRNA sense strand
ugauguguccuuguucuuu

SEQ ID NO: 1516529 - RNA, 19 nt, Homo sapiens
  misc_RNA (1)...(19): siRNA sense strand
uggcuuggcuaagacauuc

SEQ ID NO: 1516530 - RNA, 19 nt, Homo sapiens
  misc_RNA (1)...(19): siRNA sense strand
ccagccgugcuuccuguua

SEQ ID NO: 1516531 - RNA, 19 nt, Homo sapiens
  misc_RNA (1)...(19): siRNA sense strand
gcaggcagaggugugaaga

SEQ ID NO: 1516532 - RNA, 19 nt, Homo sapiens
  misc_RNA (1)...(19): siRNA sense strand
aggcagaggugugaagaag

SEQ ID NO: 1516533 - RNA, 19 nt, Homo sapiens
  misc_RNA (1)...(19): siRNA sense strand
uuacccuguugcuuaauug

SEQ ID NO: 1516534 - RNA, 19 nt, Homo sapiens
  misc_RNA (1)...(19): siRNA sense strand
gggaaacuucaccuacaga

SEQ ID NO: 1516535 - RNA, 19 nt, Homo sapiens
  misc_RNA (1)...(19): siRNA sense strand
gacgugcccaguccucuug

SEQ ID NO: 1516536 - RNA, 19 nt, Homo sapiens
  misc_RNA (1)...(19): siRNA sense strand
acuacagccuuucacacaa

SEQ ID NO: 1516537 - RNA, 19 nt, Homo sapiens
  misc_RNA (1)...(19): siRNA sense strand
uuuacccuguugcuuaauu

SEQ ID NO: 1516538 - RNA, 19 nt, Homo sapiens
  misc_RNA (1)...(19): siRNA sense strand
gggcaggugauguguccuu

SEQ ID NO: 1516539 - RNA, 19 nt, Homo sapiens
  misc_RNA (1)...(19): siRNA sense strand
ggagauauauaguggauua

SEQ ID NO: 1516540 - RNA, 19 nt, Homo sapiens
  misc_RNA (1)...(19): siRNA sense strand
acacagagguggauaauaa

SEQ ID NO: 1516541 - RNA, 19 nt, Homo sapiens
  misc_RNA (1)...(19): siRNA sense strand
gcacuuggcuuaccgauuc

SEQ ID NO: 1516542 - RNA, 19 nt, Homo sapiens
  misc_RNA (1)...(19): siRNA sense strand
gcaaagccaccuacaguua

SEQ ID NO: 1516543 - RNA, 19 nt, Homo sapiens
  misc_RNA (1)...(19): siRNA sense strand
gcacugauuuguucuauuc

SEQ ID NO: 1516544 - RNA, 19 nt, Homo sapiens
  misc_RNA (1)...(19): siRNA sense strand
caaagggugugaaauuuau

SEQ ID NO: 1516545 - RNA, 19 nt, Homo sapiens
  misc_RNA (1)...(19): siRNA sense strand
gaaaggaaacccggugaua

SEQ ID NO: 1516546 - RNA, 19 nt, Homo sapiens
  misc_RNA (1)...(19): siRNA sense strand
ggucaaagggugugaaauu

SEQ ID NO: 1516547 - RNA, 19 nt, Homo sapiens
  misc_RNA (1)...(19): siRNA sense strand
ugacagcgcuugggacgua

SEQ ID NO: 1516548 - RNA, 19 nt, Homo sapiens
  misc_RNA (1)...(19): siRNA sense strand
caagaaaccuacagaaacu

SEQ ID NO: 1516549 - RNA, 19 nt, Homo sapiens
  misc_RNA (1)...(19): siRNA sense strand
gaauacaccucugauuuua

SEQ ID NO: 1516550 - RNA, 19 nt, Homo sapiens
  misc_RNA (1)...(19): siRNA sense strand
caacuuaccuuguggaaaa

SEQ ID NO: 1516551 - RNA, 19 nt, Homo sapiens
  misc_RNA (1)...(19): siRNA sense strand
ggaagacagugugauaaga

SEQ ID NO: 1516552 - RNA, 19 nt, Homo sapiens
  misc_RNA (1)...(19): siRNA sense strand
gcauuuagccucuugauuc

SEQ ID NO: 1516553 - RNA, 19 nt, Homo sapiens
  misc_RNA (1)...(19): siRNA sense strand
acucaagacuguagguuua

SEQ ID NO: 1516554 - RNA, 19 nt, Homo sapiens
  misc_RNA (1)...(19): siRNA sense strand
ccaauuugcugguucuuug

SEQ ID NO: 1516555 - RNA, 19 nt, Homo sapiens
  misc_RNA (1)...(19): siRNA sense strand
ggucaagcauucuucuauu

SEQ ID NO: 1516556 - RNA, 19 nt, Homo sapiens
  misc_RNA (1)...(19): siRNA sense strand
aagagaaugugccgucaua

SEQ ID NO: 1516557 - RNA, 19 nt, Homo sapiens
  misc_RNA (1)...(19): siRNA sense strand
ccaaagacuuacuuaaauc

SEQ ID NO: 1516558 - RNA, 19 nt, Homo sapiens
  misc_RNA (1)...(19): siRNA sense strand
ucaaagggugugaaauuua

SEQ ID NO: 1516559 - RNA, 19 nt, Homo sapiens
  misc_RNA (1)...(19): siRNA sense strand
ugacaucucugcguuauca

SEQ ID NO: 1516560 - RNA, 19 nt, Homo sapiens
  misc_RNA (1)...(19): siRNA sense strand
gagcuagaccuucuuauuc

SEQ ID NO: 1516561 - RNA, 19 nt, Homo sapiens
  misc_RNA (1)...(19): siRNA sense strand
uuaguaaacuguugcaaga

SEQ ID NO: 1516562 - RNA, 19 nt, Homo sapiens
  misc_RNA (1)...(19): siRNA sense strand
gucaaagggugugaaauuu

SEQ ID NO: 1516563 - RNA, 19 nt, Homo sapiens
  misc_RNA (1)...(19): siRNA sense strand
ugacuaaauucaucuggaa

SEQ ID NO: 1516564 - RNA, 19 nt, Homo sapiens
  misc_RNA (1)...(19): siRNA sense strand
ggaacuggaucagacugua

SEQ ID NO: 1516565 - RNA, 19 nt, Homo sapiens
  misc_RNA (1)...(19): siRNA sense strand
ugagagagcaguugagauu

SEQ ID NO: 1516566 - RNA, 19 nt, Homo sapiens
  misc_RNA (1)...(19): siRNA sense strand
ggcgauagcacuuggcuua

SEQ ID NO: 1516567 - RNA, 19 nt, Homo sapiens
  misc_RNA (1)...(19): siRNA sense strand
gugaauacaccucugauuu

SEQ ID NO: 1516568 - RNA, 19 nt, Homo sapiens
  misc_RNA (1)...(19): siRNA sense strand
caccaccucucuucaguaa

SEQ ID NO: 1516569 - RNA, 19 nt, Homo sapiens
  misc_RNA (1)...(19): siRNA sense strand
gucaagcauucuucuauuu

SEQ ID NO: 1516570 - RNA, 19 nt, Homo sapiens
  misc_RNA (1)...(19): siRNA sense strand
caccaaagacuuacuuaaa

SEQ ID NO: 1516571 - RNA, 19 nt, Homo sapiens
  misc_RNA (1)...(19): siRNA sense strand
caccagcucugaccacaaa

SEQ ID NO: 1516572 - RNA, 19 nt, Homo sapiens
  misc_RNA (1)...(19): siRNA sense strand
ucacgaggcauuuggauaa

SEQ ID NO: 1516573 - RNA, 19 nt, Homo sapiens
  misc_RNA (1)...(19): siRNA sense strand
agauuacugugaugcauua

SEQ ID NO: 1516574 - RNA, 19 nt, Homo sapiens
  misc_RNA (1)...(19): siRNA sense strand
cagaaaggcugagcuggaa

SEQ ID NO: 1516575 - RNA, 19 nt, Homo sapiens
  misc_RNA (1)...(19): siRNA sense strand
aagaggagauugggacaua

SEQ ID NO: 1516576 - RNA, 19 nt, Homo sapiens
  misc_RNA (1)...(19): siRNA sense strand
uuacugugaugcauuauug

SEQ ID NO: 1516577 - RNA, 19 nt, Homo sapiens
  misc_RNA (1)...(19): siRNA sense strand
gcaccaaagacuuacuuaa

SEQ ID NO: 1516578 - RNA, 19 nt, Homo sapiens
  misc_RNA (1)...(19): siRNA sense strand
ggaccacauuggccacauu

SEQ ID NO: 1516579 - RNA, 19 nt, Homo sapiens
  misc_RNA (1)...(19): siRNA sense strand
gugcacaaguggcccagua

SEQ ID NO: 1516580 - RNA, 19 nt, Homo sapiens
  misc_RNA (1)...(19): siRNA sense strand
ggaaggaagaccaaugaga

SEQ ID NO: 1516581 - RNA, 19 nt, Homo sapiens
  misc_RNA (1)...(19): siRNA sense strand
gcuacgcacugauuuguuc

SEQ ID NO: 1516582 - RNA, 19 nt, Homo sapiens
  misc_RNA (1)...(19): siRNA sense strand
ucugauagaugccuugaga

SEQ ID NO: 1516583 - RNA, 19 nt, Homo sapiens
  misc_RNA (1)...(19): siRNA sense strand
ggagagagagacgccuuua

SEQ ID NO: 1516584 - RNA, 19 nt, Homo sapiens
  misc_RNA (1)...(19): siRNA sense strand
ccaccucucuucaguaaag

SEQ ID NO: 1516585 - RNA, 19 nt, Homo sapiens
  misc_RNA (1)...(19): siRNA sense strand
guaaacuguugcaagagaa

SEQ ID NO: 1516586 - RNA, 19 nt, Homo sapiens
  misc_RNA (1)...(19): siRNA sense strand
gcuggaagacagugugaua

SEQ ID NO: 1516587 - RNA, 19 nt, Homo sapiens
  misc_RNA (1)...(19): siRNA sense strand
gccaagaaaccuacagaaa

SEQ ID NO: 1516588 - RNA, 19 nt, Homo sapiens
  misc_RNA (1)...(19): siRNA sense strand
cagcugagauuacugugau

SEQ ID NO: 1516589 - RNA, 19 nt, Homo sapiens
  misc_RNA (1)...(19): siRNA sense strand
gagagaugauuuuguguuu

SEQ ID NO: 1516590 - RNA, 19 nt, Homo sapiens
  misc_RNA (1)...(19): siRNA sense strand
ggagauugggacauauuaa

SEQ ID NO: 1516591 - RNA, 19 nt, Homo sapiens
  misc_RNA (1)...(19): siRNA sense strand
ggugauauccgacauccaa

SEQ ID NO: 1516592 - RNA, 19 nt, Homo sapiens
  misc_RNA (1)...(19): siRNA sense strand
gggcaacuccaacaacauu

SEQ ID NO: 1516593 - RNA, 19 nt, Homo sapiens
  misc_RNA (1)...(19): siRNA sense strand
ccaagguucucaggcagua

SEQ ID NO: 1516594 - RNA, 19 nt, Homo sapiens
  misc_RNA (1)...(19): siRNA sense strand
agaaugugccgucauauga

SEQ ID NO: 1516595 - RNA, 19 nt, Homo sapiens
  misc_RNA (1)...(19): siRNA sense strand
gagaaugugccgucauaug

SEQ ID NO: 1516596 - RNA, 19 nt, Homo sapiens
  misc_RNA (1)...(19): siRNA sense strand
gagacgccuuuacccaauu

SEQ ID NO: 1516597 - RNA, 19 nt, Homo sapiens
  misc_RNA (1)...(19): siRNA sense strand
ggaucagacuguacuugga

SEQ ID NO: 1516598 - RNA, 19 nt, Homo sapiens
  misc_RNA (1)...(19): siRNA sense strand
gaaugugccgucauaugaa

SEQ ID NO: 1516599 - RNA, 19 nt, Homo sapiens
  misc_RNA (1)...(19): siRNA sense strand
ugugaugcauuauugguuu

SEQ ID NO: 1516600 - RNA, 19 nt, Homo sapiens
  misc_RNA (1)...(19): siRNA sense strand
aaaggagcaucucacaguu

SEQ ID NO: 1516601 - RNA, 19 nt, Homo sapiens
  misc_RNA (1)...(19): siRNA sense strand
ggugacaucucugcguuau

SEQ ID NO: 1516602 - RNA, 19 nt, Homo sapiens
  misc_RNA (1)...(19): siRNA sense strand
auagaugccuugagagaug

SEQ ID NO: 1516603 - RNA, 19 nt, Homo sapiens
  misc_RNA (1)...(19): siRNA sense strand
cacauaaucuuccggucuu

SEQ ID NO: 1516604 - RNA, 19 nt, Homo sapiens
  misc_RNA (1)...(19): siRNA sense strand
guaccuggaugcucugaag

SEQ ID NO: 1516605 - RNA, 19 nt, Homo sapiens
  misc_RNA (1)...(19): siRNA sense strand
ccaaagcacguccaacaga

SEQ ID NO: 1516606 - RNA, 19 nt, Homo sapiens
  misc_RNA (1)...(19): siRNA sense strand
guucugcguuugaaaggaa

SEQ ID NO: 1516607 - RNA, 19 nt, Homo sapiens
  misc_RNA (1)...(19): siRNA sense strand
gagauugggacauauuaau

SEQ ID NO: 1516608 - RNA, 19 nt, Homo sapiens
  misc_RNA (1)...(19): siRNA sense strand
ggaaaagcauucagaaguc

SEQ ID NO: 1516609 - RNA, 19 nt, Homo sapiens
  misc_RNA (1)...(19): siRNA sense strand
gcugcagacuucaaacuca

SEQ ID NO: 1516610 - RNA, 19 nt, Homo sapiens
  misc_RNA (1)...(19): siRNA sense strand
gguuuucucugcucuuuua

SEQ ID NO: 1516611 - RNA, 19 nt, Homo sapiens
  misc_RNA (1)...(19): siRNA sense strand
uuuaaucaguucugcguuu

SEQ ID NO: 1516612 - RNA, 19 nt, Homo sapiens
  misc_RNA (1)...(19): siRNA sense strand
ccaagaaaccuacagaaac

SEQ ID NO: 1516613 - RNA, 19 nt, Homo sapiens
  misc_RNA (1)...(19): siRNA sense strand
ggacuuucgcuaccuguug

SEQ ID NO: 1516614 - RNA, 19 nt, Homo sapiens
  misc_RNA (1)...(19): siRNA sense strand
gaggagauugggacauauu

SEQ ID NO: 1516615 - RNA, 19 nt, Homo sapiens
  misc_RNA (1)...(19): siRNA sense strand
cauuuagccucuugauuca

SEQ ID NO: 1516616 - RNA, 19 nt, Homo sapiens
  misc_RNA (1)...(19): siRNA sense strand
uauaguggauuaguucuuc

SEQ ID NO: 1516617 - RNA, 19 nt, Homo sapiens
  misc_RNA (1)...(19): siRNA sense strand
ccacaaagccgagcucucu

SEQ ID NO: 1516618 - RNA, 19 nt, Homo sapiens
  misc_RNA (1)...(19): siRNA sense strand
gcauucagaaguccuauuc

SEQ ID NO: 1516619 - RNA, 19 nt, Homo sapiens
  misc_RNA (1)...(19): siRNA sense strand
ggcagaagcugagcgagau

SEQ ID NO: 1516620 - RNA, 19 nt, Homo sapiens
  misc_RNA (1)...(19): siRNA sense strand
acaccucacugcagucgaa

SEQ ID NO: 1516621 - RNA, 19 nt, Homo sapiens
  misc_RNA (1)...(19): siRNA sense strand
ugaauacagugcagcuuag

SEQ ID NO: 1516622 - RNA, 19 nt, Homo sapiens
  misc_RNA (1)...(19): siRNA sense strand
gcagcuuaguaaacuguug

SEQ ID NO: 1516623 - RNA, 19 nt, Homo sapiens
  misc_RNA (1)...(19): siRNA sense strand
gauuuguucuauuccaguu

SEQ ID NO: 1516624 - RNA, 19 nt, Homo sapiens
  misc_RNA (1)...(19): siRNA sense strand
gagauuacugugaugcauu

SEQ ID NO: 1516625 - RNA, 19 nt, Homo sapiens
  misc_RNA (1)...(19): siRNA sense strand
caaaaugucagaaagauug

SEQ ID NO: 1516626 - RNA, 19 nt, Homo sapiens
  misc_RNA (1)...(19): siRNA sense strand
ccacauuggccacauuuca

SEQ ID NO: 1516627 - RNA, 19 nt, Homo sapiens
  misc_RNA (1)...(19): siRNA sense strand
ucagaaacacgcagugguu

SEQ ID NO: 1516628 - RNA, 19 nt, Homo sapiens
  misc_RNA (1)...(19): siRNA sense strand
cuuccggucuuagcauuua

SEQ ID NO: 1516629 - RNA, 19 nt, Homo sapiens
  misc_RNA (1)...(19): siRNA sense strand
gcgcugcugugugugauug

SEQ ID NO: 1516630 - RNA, 19 nt, Homo sapiens
  misc_RNA (1)...(19): siRNA sense strand
aguaaacuguugcaagaga

SEQ ID NO: 1516631 - RNA, 19 nt, Homo sapiens
  misc_RNA (1)...(19): siRNA sense strand
auacagugcagcuuaguaa

SEQ ID NO: 1516632 - RNA, 19 nt, Homo sapiens
  misc_RNA (1)...(19): siRNA sense strand
ccaaugagagagcaguuga

SEQ ID NO: 1516633 - RNA, 19 nt, Homo sapiens
  misc_RNA (1)...(19): siRNA sense strand
ucagagcuagaccuucuua

SEQ ID NO: 1516634 - RNA, 19 nt, Homo sapiens
  misc_RNA (1)...(19): siRNA sense strand
ggaaacaccccaaggaaga

SEQ ID NO: 1516635 - RNA, 19 nt, Homo sapiens
  misc_RNA (1)...(19): siRNA sense strand
gugauugugucuguucuga

SEQ ID NO: 1516636 - RNA, 19 nt, Homo sapiens
  misc_RNA (1)...(19): siRNA sense strand
gcaccucagcugaaaguuc

SEQ ID NO: 1516637 - RNA, 19 nt, Homo sapiens
  misc_RNA (1)...(19): siRNA sense strand
gaaaggcugagcuggaagu

SEQ ID NO: 1516638 - RNA, 19 nt, Homo sapiens
  misc_RNA (1)...(19): siRNA sense strand
cagggcaacuccaacaaca

SEQ ID NO: 1516639 - RNA, 19 nt, Homo sapiens
  misc_RNA (1)...(19): siRNA sense strand
ggacaaauuacaaugcauu

SEQ ID NO: 1516640 - RNA, 19 nt, Homo sapiens
  misc_RNA (1)...(19): siRNA sense strand
guugaucgcugccuggauu

SEQ ID NO: 1516641 - RNA, 19 nt, Homo sapiens
  misc_RNA (1)...(19): siRNA sense strand
gaaaaugccagacuauauu

SEQ ID NO: 1516642 - RNA, 19 nt, Homo sapiens
  misc_RNA (1)...(19): siRNA sense strand
ucacuagcacuuaauauug

SEQ ID NO: 1516643 - RNA, 19 nt, Homo sapiens
  misc_RNA (1)...(19): siRNA sense strand
caaaggcuguuagggaaga

SEQ ID NO: 1516644 - RNA, 19 nt, Homo sapiens
  misc_RNA (1)...(19): siRNA sense strand
caucuucuuuccucucaaa

SEQ ID NO: 1516645 - RNA, 19 nt, Homo sapiens
  misc_RNA (1)...(19): siRNA sense strand
gaaccaggguccucaaacc

SEQ ID NO: 1516646 - RNA, 19 nt, Homo sapiens
  misc_RNA (1)...(19): siRNA sense strand
ugggauugcuggaucauau

SEQ ID NO: 1516647 - RNA, 19 nt, Homo sapiens
  misc_RNA (1)...(19): siRNA sense strand
gacuauauuucaucagcaa

SEQ ID NO: 1516648 - RNA, 19 nt, Homo sapiens
  misc_RNA (1)...(19): siRNA sense strand
gccaagaucccacugugaa

SEQ ID NO: 1516649 - RNA, 19 nt, Homo sapiens
  misc_RNA (1)...(19): siRNA sense strand
uggaaugaguaaauaccua

SEQ ID NO: 1516650 - RNA, 19 nt, Homo sapiens
  misc_RNA (1)...(19): siRNA sense strand
ucagaaagagggacccaaa

SEQ ID NO: 1516651 - RNA, 19 nt, Homo sapiens
  misc_RNA (1)...(19): siRNA sense strand
cacuagcacuuaauauugu

SEQ ID NO: 1516652 - RNA, 19 nt, Homo sapiens
  misc_RNA (1)...(19): siRNA sense strand
caucggagaguuccaguug

SEQ ID NO: 1516653 - RNA, 19 nt, Homo sapiens
  misc_RNA (1)...(19): siRNA sense strand
gaugcugugucucccaaug

SEQ ID NO: 1516654 - RNA, 19 nt, Homo sapiens
  misc_RNA (1)...(19): siRNA sense strand
gaaggacaaauuacaaugc

SEQ ID NO: 1516655 - RNA, 19 nt, Homo sapiens
  misc_RNA (1)...(19): siRNA sense strand
gccagacuauauuucauca

SEQ ID NO: 1516656 - RNA, 19 nt, Homo sapiens
  misc_RNA (1)...(19): siRNA sense strand
ggacguuguuacagauuuu

SEQ ID NO: 1516657 - RNA, 19 nt, Homo sapiens
  misc_RNA (1)...(19): siRNA sense strand
gagaaccaggguccucaaa

SEQ ID NO: 1516658 - RNA, 19 nt, Homo sapiens
  misc_RNA (1)...(19): siRNA sense strand
cacccucacuagcacuuaa

SEQ ID NO: 1516659 - RNA, 19 nt, Homo sapiens
  misc_RNA (1)...(19): siRNA sense strand
ggauugcuggaucauauga

SEQ ID NO: 1516660 - RNA, 19 nt, Homo sapiens
  misc_RNA (1)...(19): siRNA sense strand
gccagugccuuuguuuauc

SEQ ID NO: 1516661 - RNA, 19 nt, Homo sapiens
  misc_RNA (1)...(19): siRNA sense strand
cagaaggacaaauuacaau

SEQ ID NO: 1516662 - RNA, 19 nt, Homo sapiens
  misc_RNA (1)...(19): siRNA sense strand
acagaaggacaaauuacaa

SEQ ID NO: 1516663 - RNA, 19 nt, Homo sapiens
  misc_RNA (1)...(19): siRNA sense strand
gcacuuaauauuguugauc

SEQ ID NO: 1516664 - RNA, 19 nt, Homo sapiens
  misc_RNA (1)...(19): siRNA sense strand
aauuggacguuguuacaga

SEQ ID NO: 1516665 - RNA, 19 nt, Homo sapiens
  misc_RNA (1)...(19): siRNA sense strand
ucaaagacaauuggacguu

SEQ ID NO: 1516666 - RNA, 19 nt, Homo sapiens
  misc_RNA (1)...(19): siRNA sense strand
uggacguuguuacagauuu

SEQ ID NO: 1516667 - RNA, 19 nt, Homo sapiens
  misc_RNA (1)...(19): siRNA sense strand
ucagcaacaucggagaguu

SEQ ID NO: 1516668 - RNA, 19 nt, Homo sapiens
  misc_RNA (1)...(19): siRNA sense strand
aaggacaaauuacaaugca

SEQ ID NO: 1516669 - RNA, 19 nt, Homo sapiens
  misc_RNA (1)...(19): siRNA sense strand
ucacagaaggacaaauuac

SEQ ID NO: 1516670 - RNA, 19 nt, Homo sapiens
  misc_RNA (1)...(19): siRNA sense strand
ugaaaaugccagacuauau

SEQ ID NO: 1516671 - RNA, 19 nt, Homo sapiens
  misc_RNA (1)...(19): siRNA sense strand
agaaggacaaauuacaaug

SEQ ID NO: 1516672 - RNA, 19 nt, Homo sapiens
  misc_RNA (1)...(19): siRNA sense strand
cacagaaggacaaauuaca

SEQ ID NO: 1516673 - RNA, 19 nt, Homo sapiens
  misc_RNA (1)...(19): siRNA sense strand
auucacagaaggacaaauu

SEQ ID NO: 1516674 - RNA, 19 nt, Homo sapiens
  misc_RNA (1)...(19): siRNA sense strand
caagaucccacugugaagu

SEQ ID NO: 1516675 - RNA, 19 nt, Homo sapiens
  misc_RNA (1)...(19): siRNA sense strand
ugccagugccuuuguuuau

SEQ ID NO: 1516676 - RNA, 19 nt, Homo sapiens
  misc_RNA (1)...(19): siRNA sense strand
cucacuagcacuuaauauu

SEQ ID NO: 1516677 - RNA, 19 nt, Homo sapiens
  misc_RNA (1)...(19): siRNA sense strand
cagcaacaucggagaguuc

SEQ ID NO: 1516678 - RNA, 19 nt, Homo sapiens
  misc_RNA (1)...(19): siRNA sense strand
gucaucuucuuuccucuca

SEQ ID NO: 1516679 - RNA, 19 nt, Homo sapiens
  misc_RNA (1)...(19): siRNA sense strand
ccaaugucaucuucuuucc

SEQ ID NO: 1516680 - RNA, 19 nt, Homo sapiens
  misc_RNA (1)...(19): siRNA sense strand
auugcuggaucauaugaaa

SEQ ID NO: 1516681 - RNA, 19 nt, Homo sapiens
  misc_RNA (1)...(19): siRNA sense strand
ccagugccuuuguuuaucc

SEQ ID NO: 1516682 - RNA, 19 nt, Homo sapiens
  misc_RNA (1)...(19): siRNA sense strand
agaaagagggacccaaagg

SEQ ID NO: 1516683 - RNA, 19 nt, Homo sapiens
  misc_RNA (1)...(19): siRNA sense strand
ggaaagaauugagguuguu

SEQ ID NO: 1516684 - RNA, 19 nt, Homo sapiens
  misc_RNA (1)...(19): siRNA sense strand
uguagcagcuggauuuauu

SEQ ID NO: 1516685 - RNA, 19 nt, Homo sapiens
  misc_RNA (1)...(19): siRNA sense strand
gucaauggcugguaagcaa

SEQ ID NO: 1516686 - RNA, 19 nt, Homo sapiens
  misc_RNA (1)...(19): siRNA sense strand
cagaguguccugaaacuuu

SEQ ID NO: 1516687 - RNA, 19 nt, Homo sapiens
  misc_RNA (1)...(19): siRNA sense strand
aaucaugacuguucuucuu

SEQ ID NO: 1516688 - RNA, 19 nt, Homo sapiens
  misc_RNA (1)...(19): siRNA sense strand
ugacuacaaucaugacugu

SEQ ID NO: 1516689 - RNA, 19 nt, Homo sapiens
  misc_RNA (1)...(19): siRNA sense strand
gcacggccauggagauucu

SEQ ID NO: 1516690 - RNA, 19 nt, Homo sapiens
  misc_RNA (1)...(19): siRNA sense strand
gaaagaauugagguuguuu

SEQ ID NO: 1516691 - RNA, 19 nt, Homo sapiens
  misc_RNA (1)...(19): siRNA sense strand
gcagcuggauuuauuacca

SEQ ID NO: 1516692 - RNA, 19 nt, Homo sapiens
  misc_RNA (1)...(19): siRNA sense strand
ucaggucaauggcugguaa

SEQ ID NO: 1516693 - RNA, 19 nt, Homo sapiens
  misc_RNA (1)...(19): siRNA sense strand
gcaguucauuucaggucaa

SEQ ID NO: 1516694 - RNA, 19 nt, Homo sapiens
  misc_RNA (1)...(19): siRNA sense strand
guagcagcuggauuuauua

SEQ ID NO: 1516695 - RNA, 19 nt, Homo sapiens
  misc_RNA (1)...(19): siRNA sense strand
gaucccagaggaaagaauu

SEQ ID NO: 1516696 - RNA, 19 nt, Homo sapiens
  misc_RNA (1)...(19): siRNA sense strand
cuaaggcacauacuucaaa

SEQ ID NO: 1516697 - RNA, 19 nt, Homo sapiens
  misc_RNA (1)...(19): siRNA sense strand
ccaaagugaugggauuaca

SEQ ID NO: 1516698 - RNA, 19 nt, Homo sapiens
  misc_RNA (1)...(19): siRNA sense strand
guuguuugcucccuuguag

SEQ ID NO: 1516699 - RNA, 19 nt, Homo sapiens
  misc_RNA (1)...(19): siRNA sense strand
agaacacguugaagcaguu

SEQ ID NO: 1516700 - RNA, 19 nt, Homo sapiens
  misc_RNA (1)...(19): siRNA sense strand
ggcacauacuucaaagaga

SEQ ID NO: 1516701 - RNA, 19 nt, Homo sapiens
  misc_RNA (1)...(19): siRNA sense strand
gugccagaguguccugaaa

SEQ ID NO: 1516702 - RNA, 19 nt, Homo sapiens
  misc_RNA (1)...(19): siRNA sense strand
uaaggcacauacuucaaag

SEQ ID NO: 1516703 - RNA, 19 nt, Homo sapiens
  misc_RNA (1)...(19): siRNA sense strand
acagaucccuucccagacu

SEQ ID NO: 1516704 - RNA, 19 nt, Homo sapiens
  misc_RNA (1)...(19): siRNA sense strand
aggaaagaauugagguugu

SEQ ID NO: 1516705 - RNA, 19 nt, Homo sapiens
  misc_RNA (1)...(19): siRNA sense strand
gggauuccuuuguuuuaaa

SEQ ID NO: 1516706 - RNA, 19 nt, Homo sapiens
  misc_RNA (1)...(19): siRNA sense strand
cuacaaucaugacuguucu

SEQ ID NO: 1516707 - RNA, 19 nt, Homo sapiens
  misc_RNA (1)...(19): siRNA sense strand
cagaucccuucccagacua

SEQ ID NO: 1516708 - RNA, 19 nt, Homo sapiens
  misc_RNA (1)...(19): siRNA sense strand
ucaugacuguucuucuugu

SEQ ID NO: 1516709 - RNA, 19 nt, Homo sapiens
  misc_RNA (1)...(19): siRNA sense strand
ggggauuccuuuguuuuaa

SEQ ID NO: 1516710 - RNA, 19 nt, Homo sapiens
  misc_RNA (1)...(19): siRNA sense strand
gccagaguguccugaaacu

SEQ ID NO: 1516711 - RNA, 19 nt, Homo sapiens
  misc_RNA (1)...(19): siRNA sense strand
cagcuggauuuauuaccau

SEQ ID NO: 1516712 - RNA, 19 nt, Homo sapiens
  misc_RNA (1)...(19): siRNA sense strand
gacgggaucccagaggaaa

SEQ ID NO: 1516713 - RNA, 19 nt, Homo sapiens
  misc_RNA (1)...(19): siRNA sense strand
gacuguucuucuugucauu

SEQ ID NO: 1516714 - RNA, 19 nt, Homo sapiens
  misc_RNA (1)...(19): siRNA sense strand
ggauuuauuaccaucucuu

SEQ ID NO: 1516715 - RNA, 19 nt, Homo sapiens
  misc_RNA (1)...(19): siRNA sense strand
aaagaauugagguuguuug

SEQ ID NO: 1516716 - RNA, 19 nt, Homo sapiens
  misc_RNA (1)...(19): siRNA sense strand
gaugggauuacaggcauga

SEQ ID NO: 1516717 - RNA, 19 nt, Homo sapiens
  misc_RNA (1)...(19): siRNA sense strand
cuucuaaggcacauacuuc

SEQ ID NO: 1516718 - RNA, 19 nt, Homo sapiens
  misc_RNA (1)...(19): siRNA sense strand
aaagaaagcucacauacug

SEQ ID NO: 1516719 - RNA, 19 nt, Homo sapiens
  misc_RNA (1)...(19): siRNA sense strand
gaaagaaacagaccaacaa

SEQ ID NO: 1516720 - RNA, 19 nt, Homo sapiens
  misc_RNA (1)...(19): siRNA sense strand
agaauuaccuucaguacuu

SEQ ID NO: 1516721 - RNA, 19 nt, Homo sapiens
  misc_RNA (1)...(19): siRNA sense strand
ccaccagugugacaaauaa

SEQ ID NO: 1516722 - RNA, 19 nt, Homo sapiens
  misc_RNA (1)...(19): siRNA sense strand
aaauaaaccuggacucuca

SEQ ID NO: 1516723 - RNA, 19 nt, Homo sapiens
  misc_RNA (1)...(19): siRNA sense strand
gagggaagaaucaagguua

SEQ ID NO: 1516724 - RNA, 19 nt, Homo sapiens
  misc_RNA (1)...(19): siRNA sense strand
gaagaaucaagguuaugua

SEQ ID NO: 1516725 - RNA, 19 nt, Homo sapiens
  misc_RNA (1)...(19): siRNA sense strand
ggacauggagaaccuuuau

SEQ ID NO: 1516726 - RNA, 19 nt, Homo sapiens
  misc_RNA (1)...(19): siRNA sense strand
gaaagaaagcucacauacu

SEQ ID NO: 1516727 - RNA, 19 nt, Homo sapiens
  misc_RNA (1)...(19): siRNA sense strand
cuuuaaccgugaagaauua

SEQ ID NO: 1516728 - RNA, 19 nt, Homo sapiens
  misc_RNA (1)...(19): siRNA sense strand
ggaaagaaacagaccaaca

SEQ ID NO: 1516729 - RNA, 19 nt, Homo sapiens
  misc_RNA (1)...(19): siRNA sense strand
gaccaagcccucagucaaa

SEQ ID NO: 1516730 - RNA, 19 nt, Homo sapiens
  misc_RNA (1)...(19): siRNA sense strand
ggaaagaaagcucacauac

SEQ ID NO: 1516731 - RNA, 19 nt, Homo sapiens
  misc_RNA (1)...(19): siRNA sense strand
agaaacagaccaacaaguu

SEQ ID NO: 1516732 - RNA, 19 nt, Homo sapiens
  misc_RNA (1)...(19): siRNA sense strand
gggaaagaaagcucacaua

SEQ ID NO: 1516733 - RNA, 19 nt, Homo sapiens
  misc_RNA (1)...(19): siRNA sense strand
auacugcggugaccaggua

SEQ ID NO: 1516734 - RNA, 19 nt, Homo sapiens
  misc_RNA (1)...(19): siRNA sense strand
ggaagaaucaagguuaugu

SEQ ID NO: 1516735 - RNA, 19 nt, Homo sapiens
  misc_RNA (1)...(19): siRNA sense strand
ccagguaacucuguucaca

SEQ ID NO: 1516736 - RNA, 19 nt, Homo sapiens
  misc_RNA (1)...(19): siRNA sense strand
gucaaauacuaucuucuga

SEQ ID NO: 1516737 - RNA, 19 nt, Homo sapiens
  misc_RNA (1)...(19): siRNA sense strand
cagcugggcuccugagucu

SEQ ID NO: 1516738 - RNA, 19 nt, Homo sapiens
  misc_RNA (1)...(19): siRNA sense strand
gaauuaccuucaguacuuc

SEQ ID NO: 1516739 - RNA, 19 nt, Homo sapiens
  misc_RNA (1)...(19): siRNA sense strand
gcuuuaaccgugaagaauu

SEQ ID NO: 1516740 - RNA, 19 nt, Homo sapiens
  misc_RNA (1)...(19): siRNA sense strand
ucagucaaauacuaucuuc

SEQ ID NO: 1516741 - RNA, 19 nt, Homo sapiens
  misc_RNA (1)...(19): siRNA sense strand
gaggaaagaaacagaccaa

SEQ ID NO: 1516742 - RNA, 19 nt, Homo sapiens
  misc_RNA (1)...(19): siRNA sense strand
ccuggacucucagcaauga

SEQ ID NO: 1516743 - RNA, 19 nt, Homo sapiens
  misc_RNA (1)...(19): siRNA sense strand
ggagggaagaaucaagguu

SEQ ID NO: 1516744 - RNA, 19 nt, Homo sapiens
  misc_RNA (1)...(19): siRNA sense strand
cguaggcacuugcuuuaac

SEQ ID NO: 1516745 - RNA, 19 nt, Homo sapiens
  misc_RNA (1)...(19): siRNA sense strand
ccaagcccucagucaaaua

SEQ ID NO: 1516746 - RNA, 19 nt, Homo sapiens
  misc_RNA (1)...(19): siRNA sense strand
gaggacauggagaaccuuu

SEQ ID NO: 1516747 - RNA, 19 nt, Homo sapiens
  misc_RNA (1)...(19): siRNA sense strand
gccaccagugugacaaaua

SEQ ID NO: 1516748 - RNA, 19 nt, Homo sapiens
  misc_RNA (1)...(19): siRNA sense strand
gagccaccagugugacaaa

SEQ ID NO: 1516749 - RNA, 19 nt, Homo sapiens
  misc_RNA (1)...(19): siRNA sense strand
agaccaagcccucagucaa

SEQ ID NO: 1516750 - RNA, 19 nt, Homo sapiens
  misc_RNA (1)...(19): siRNA sense strand
agggaagaaucaagguuau

SEQ ID NO: 1516751 - RNA, 19 nt, Homo sapiens
  misc_RNA (1)...(19): siRNA sense strand
ucagcaaugaggaaagaaa

SEQ ID NO: 1516752 - RNA, 19 nt, Homo sapiens
  misc_RNA (1)...(19): siRNA sense strand
guccguaggcacuugcuuu

SEQ ID NO: 1516753 - RNA, 19 nt, Homo sapiens
  misc_RNA (1)...(19): siRNA sense strand
aaaccuggacucucagcaa

SEQ ID NO: 1516754 - RNA, 19 nt, Homo sapiens
  misc_RNA (1)...(19): siRNA sense strand
aaccuggacucucagcaau

SEQ ID NO: 1516755 - RNA, 19 nt, Homo sapiens
  misc_RNA (1)...(19): siRNA sense strand
gugaccagguaacucuguu

SEQ ID NO: 1516756 - RNA, 19 nt, Homo sapiens
  misc_RNA (1)...(19): siRNA sense strand
caaugaggaaagaaacaga

SEQ ID NO: 1516757 - RNA, 19 nt, Homo sapiens
  misc_RNA (1)...(19): siRNA sense strand
gcaaugaggaaagaaacag

SEQ ID NO: 1516758 - RNA, 19 nt, Homo sapiens
  misc_RNA (1)...(19): siRNA sense strand
gugaggacauggagaaccu

SEQ ID NO: 1516759 - RNA, 19 nt, Homo sapiens
  misc_RNA (1)...(19): siRNA sense strand
gaccagguaacucuguuca

SEQ ID NO: 1516760 - RNA, 19 nt, Homo sapiens
  misc_RNA (1)...(19): siRNA sense strand
acaaauaaaccuggacucu

SEQ ID NO: 1516761 - RNA, 19 nt, Homo sapiens
  misc_RNA (1)...(19): siRNA sense strand
uccguaggcacuugcuuua

SEQ ID NO: 1516762 - RNA, 19 nt, Homo sapiens
  misc_RNA (1)...(19): siRNA sense strand
gggaagaaucaagguuaug

SEQ ID NO: 1516763 - RNA, 19 nt, Homo sapiens
  misc_RNA (1)...(19): siRNA sense strand
aaagaaacagaccaacaag

SEQ ID NO: 1516764 - RNA, 19 nt, Homo sapiens
  misc_RNA (1)...(19): siRNA sense strand
aagaaucaagguuauguag

SEQ ID NO: 1516765 - RNA, 19 nt, Homo sapiens
  misc_RNA (1)...(19): siRNA sense strand
gcccucagucaaauacuau

SEQ ID NO: 1516766 - RNA, 19 nt, Homo sapiens
  misc_RNA (1)...(19): siRNA sense strand
gcggugaccagguaacucu

SEQ ID NO: 1516767 - RNA, 19 nt, Homo sapiens
  misc_RNA (1)...(19): siRNA sense strand
cagaaucccugccuacaaa

SEQ ID NO: 1516768 - RNA, 19 nt, Homo sapiens
  misc_RNA (1)...(19): siRNA sense strand
ggaccuggcuggcuacaca

SEQ ID NO: 1516769 - RNA, 19 nt, Homo sapiens
  misc_RNA (1)...(19): siRNA sense strand
gaaagcuggucuccuauac

SEQ ID NO: 1516770 - RNA, 19 nt, Homo sapiens
  misc_RNA (1)...(19): siRNA sense strand
uccgaaagcuggucuccua

SEQ ID NO: 1516771 - RNA, 19 nt, Homo sapiens
  misc_RNA (1)...(19): siRNA sense strand
cgaaagcuggucuccuaua

SEQ ID NO: 1516772 - RNA, 19 nt, Homo sapiens
  misc_RNA (1)...(19): siRNA sense strand
aagcuggucuccuauacaa

SEQ ID NO: 1516773 - RNA, 19 nt, Homo sapiens
  misc_RNA (1)...(19): siRNA sense strand
gcgaacagcccuucuggau

SEQ ID NO: 1516774 - RNA, 19 nt, Homo sapiens
  misc_RNA (1)...(19): siRNA sense strand
gguccacaauccagagaag

SEQ ID NO: 1516775 - RNA, 19 nt, Homo sapiens
  misc_RNA (1)...(19): siRNA sense strand
gcuggucuccuauacaaag

SEQ ID NO: 1516776 - RNA, 19 nt, Homo sapiens
  misc_RNA (1)...(19): siRNA sense strand
cagagcaagaccacgagua

SEQ ID NO: 1516777 - RNA, 19 nt, Homo sapiens
  misc_RNA (1)...(19): siRNA sense strand
gauccaaccaacccaccaa

SEQ ID NO: 1516778 - RNA, 19 nt, Homo sapiens
  misc_RNA (1)...(19): siRNA sense strand
gaacagaagugcuuaaaca

SEQ ID NO: 1516779 - RNA, 19 nt, Homo sapiens
  misc_RNA (1)...(19): siRNA sense strand
gcaagcaacuccuuaucua

SEQ ID NO: 1516780 - RNA, 19 nt, Homo sapiens
  misc_RNA (1)...(19): siRNA sense strand
cugagaaucugaagaauaa

SEQ ID NO: 1516781 - RNA, 19 nt, Homo sapiens
  misc_RNA (1)...(19): siRNA sense strand
gcauaagacuacauuacaa

SEQ ID NO: 1516782 - RNA, 19 nt, Homo sapiens
  misc_RNA (1)...(19): siRNA sense strand
gaauaaucauccauccaaa

SEQ ID NO: 1516783 - RNA, 19 nt, Homo sapiens
  misc_RNA (1)...(19): siRNA sense strand
cagaauggcuggauacaag

SEQ ID NO: 1516784 - RNA, 19 nt, Homo sapiens
  misc_RNA (1)...(19): siRNA sense strand
gaauuugcauggcaucaau

SEQ ID NO: 1516785 - RNA, 19 nt, Homo sapiens
  misc_RNA (1)...(19): siRNA sense strand
gaaagaccaauacauaugu

SEQ ID NO: 1516786 - RNA, 19 nt, Homo sapiens
  misc_RNA (1)...(19): siRNA sense strand
gggauauaguugacauuaa

SEQ ID NO: 1516787 - RNA, 19 nt, Homo sapiens
  misc_RNA (1)...(19): siRNA sense strand
gaauauucuuccucuguga

SEQ ID NO: 1516788 - RNA, 19 nt, Homo sapiens
  misc_RNA (1)...(19): siRNA sense strand
gauuuaugguccaacauuu

SEQ ID NO: 1516789 - RNA, 19 nt, Homo sapiens
  misc_RNA (1)...(19): siRNA sense strand
caagcaugauuucguguuu

SEQ ID NO: 1516790 - RNA, 19 nt, Homo sapiens
  misc_RNA (1)...(19): siRNA sense strand
gauaauggagagucgauuu

SEQ ID NO: 1516791 - RNA, 19 nt, Homo sapiens
  misc_RNA (1)...(19): siRNA sense strand
uaagagacaccaagcauga

SEQ ID NO: 1516792 - RNA, 19 nt, Homo sapiens
  misc_RNA (1)...(19): siRNA sense strand
gcugagaaucugaagaaua

SEQ ID NO: 1516793 - RNA, 19 nt, Homo sapiens
  misc_RNA (1)...(19): siRNA sense strand
aaucauccauccaaauuug

SEQ ID NO: 1516794 - RNA, 19 nt, Homo sapiens
  misc_RNA (1)...(19): siRNA sense strand
aaugaaaccugggaauauu

SEQ ID NO: 1516795 - RNA, 19 nt, Homo sapiens
  misc_RNA (1)...(19): siRNA sense strand
ggacauuuguauugauucu

SEQ ID NO: 1516796 - RNA, 19 nt, Homo sapiens
  misc_RNA (1)...(19): siRNA sense strand
caacgggucacaauucuau

SEQ ID NO: 1516797 - RNA, 19 nt, Homo sapiens
  misc_RNA (1)...(19): siRNA sense strand
gcuauacugugaugugugu

SEQ ID NO: 1516798 - RNA, 19 nt, Homo sapiens
  misc_RNA (1)...(19): siRNA sense strand
gaagauccuauauuaguuc

SEQ ID NO: 1516799 - RNA, 19 nt, Homo sapiens
  misc_RNA (1)...(19): siRNA sense strand
gaaggaacagaagugcuua

SEQ ID NO: 1516800 - RNA, 19 nt, Homo sapiens
  misc_RNA (1)...(19): siRNA sense strand
cagaagugcuuaaacaacu

SEQ ID NO: 1516801 - RNA, 19 nt, Homo sapiens
  misc_RNA (1)...(19): siRNA sense strand
gggauauaguguauggaaa

SEQ ID NO: 1516802 - RNA, 19 nt, Homo sapiens
  misc_RNA (1)...(19): siRNA sense strand
ugaaagaccaauacauaug

SEQ ID NO: 1516803 - RNA, 19 nt, Homo sapiens
  misc_RNA (1)...(19): siRNA sense strand
gcaacugauugaaggaaca

SEQ ID NO: 1516804 - RNA, 19 nt, Homo sapiens
  misc_RNA (1)...(19): siRNA sense strand
gagcuauacugugaugugu

SEQ ID NO: 1516805 - RNA, 19 nt, Homo sapiens
  misc_RNA (1)...(19): siRNA sense strand
caacguggcauaagacuac

SEQ ID NO: 1516806 - RNA, 19 nt, Homo sapiens
  misc_RNA (1)...(19): siRNA sense strand
guccaacauuugaagauga

SEQ ID NO: 1516807 - RNA, 19 nt, Homo sapiens
  misc_RNA (1)...(19): siRNA sense strand
agaagugcuuaaacaacua

SEQ ID NO: 1516808 - RNA, 19 nt, Homo sapiens
  misc_RNA (1)...(19): siRNA sense strand
gguccaacauuugaagaug

SEQ ID NO: 1516809 - RNA, 19 nt, Homo sapiens
  misc_RNA (1)...(19): siRNA sense strand
gaaugaaagaccaauacau

SEQ ID NO: 1516810 - RNA, 19 nt, Homo sapiens
  misc_RNA (1)...(19): siRNA sense strand
ggcauaagacuacauuaca

SEQ ID NO: 1516811 - RNA, 19 nt, Homo sapiens
  misc_RNA (1)...(19): siRNA sense strand
gaauuaguuccaacacaga

SEQ ID NO: 1516812 - RNA, 19 nt, Homo sapiens
  misc_RNA (1)...(19): siRNA sense strand
aaaugaaaccugggaauau

SEQ ID NO: 1516813 - RNA, 19 nt, Homo sapiens
  misc_RNA (1)...(19): siRNA sense strand
gagaaucugaagaauaauc

SEQ ID NO: 1516814 - RNA, 19 nt, Homo sapiens
  misc_RNA (1)...(19): siRNA sense strand
cagcaacgggucacaauuc

SEQ ID NO: 1516815 - RNA, 19 nt, Homo sapiens
  misc_RNA (1)...(19): siRNA sense strand
agaauaaucauccauccaa

SEQ ID NO: 1516816 - RNA, 19 nt, Homo sapiens
  misc_RNA (1)...(19): siRNA sense strand
gagacaccaagcaugauuu

SEQ ID NO: 1516817 - RNA, 19 nt, Homo sapiens
  misc_RNA (1)...(19): siRNA sense strand
auuaaacccucugcacuuu

SEQ ID NO: 1516818 - RNA, 19 nt, Homo sapiens
  misc_RNA (1)...(19): siRNA sense strand
ugaaggaacagaagugcuu

SEQ ID NO: 1516819 - RNA, 19 nt, Homo sapiens
  misc_RNA (1)...(19): siRNA sense strand
aaagaggaguacuuggaau

SEQ ID NO: 1516820 - RNA, 19 nt, Homo sapiens
  misc_RNA (1)...(19): siRNA sense strand
cuuccucugugauuucuuu

SEQ ID NO: 1516821 - RNA, 19 nt, Homo sapiens
  misc_RNA (1)...(19): siRNA sense strand
uagaauuaguuccaacaca

SEQ ID NO: 1516822 - RNA, 19 nt, Homo sapiens
  misc_RNA (1)...(19): siRNA sense strand
gggucacaauucuauauca

SEQ ID NO: 1516823 - RNA, 19 nt, Homo sapiens
  misc_RNA (1)...(19): siRNA sense strand
auaauggagagucgauuua

SEQ ID NO: 1516824 - RNA, 19 nt, Homo sapiens
  misc_RNA (1)...(19): siRNA sense strand
ccgcugagaaucugaagaa

SEQ ID NO: 1516825 - RNA, 19 nt, Homo sapiens
  misc_RNA (1)...(19): siRNA sense strand
caucgaauaguacagaaug

SEQ ID NO: 1516826 - RNA, 19 nt, Homo sapiens
  misc_RNA (1)...(19): siRNA sense strand
gcaacgggucacaauucua

SEQ ID NO: 1516827 - RNA, 19 nt, Homo sapiens
  misc_RNA (1)...(19): siRNA sense strand
cauuaaacccucugcacuu

SEQ ID NO: 1516828 - RNA, 19 nt, Homo sapiens
  misc_RNA (1)...(19): siRNA sense strand
uggagauccuuaugcuuga

SEQ ID NO: 1516829 - RNA, 19 nt, Homo sapiens
  misc_RNA (1)...(19): siRNA sense strand
aucaauaucuacaggagaa

SEQ ID NO: 1516830 - RNA, 19 nt, Homo sapiens
  misc_RNA (1)...(19): siRNA sense strand
aaagaccaauacauaugug

SEQ ID NO: 1516831 - RNA, 19 nt, Homo sapiens
  misc_RNA (1)...(19): siRNA sense strand
aagcaacuccuuaucuaga

SEQ ID NO: 1516832 - RNA, 19 nt, Homo sapiens
  misc_RNA (1)...(19): siRNA sense strand
cgauuuaugguccaacauu

SEQ ID NO: 1516833 - RNA, 19 nt, Homo sapiens
  misc_RNA (1)...(19): siRNA sense strand
ugggauauaguugacauua

SEQ ID NO: 1516834 - RNA, 19 nt, Homo sapiens
  misc_RNA (1)...(19): siRNA sense strand
guacagaauggcuggauac

SEQ ID NO: 1516835 - RNA, 19 nt, Homo sapiens
  misc_RNA (1)...(19): siRNA sense strand
guuucugggugaugcauug

SEQ ID NO: 1516836 - RNA, 19 nt, Homo sapiens
  misc_RNA (1)...(19): siRNA sense strand
ugcauggcaucaauaucua

SEQ ID NO: 1516837 - RNA, 19 nt, Homo sapiens
  misc_RNA (1)...(19): siRNA sense strand
aauggagagucgauuuaug

SEQ ID NO: 1516838 - RNA, 19 nt, Homo sapiens
  misc_RNA (1)...(19): siRNA sense strand
ggauauaguguauggaaaa

SEQ ID NO: 1516839 - RNA, 19 nt, Homo sapiens
  misc_RNA (1)...(19): siRNA sense strand
aguacagaauggcuggaua

SEQ ID NO: 1516840 - RNA, 19 nt, Homo sapiens
  misc_RNA (1)...(19): siRNA sense strand
uccaacauuugaagaugaa

SEQ ID NO: 1516841 - RNA, 19 nt, Homo sapiens
  misc_RNA (1)...(19): siRNA sense strand
uaauggagagucgauuuau

SEQ ID NO: 1516842 - RNA, 19 nt, Homo sapiens
  misc_RNA (1)...(19): siRNA sense strand
cagaaugaaagaccaauac

SEQ ID NO: 1516843 - RNA, 19 nt, Homo sapiens
  misc_RNA (1)...(19): siRNA sense strand
acagaaugaaagaccaaua

SEQ ID NO: 1516844 - RNA, 19 nt, Homo sapiens
  misc_RNA (1)...(19): siRNA sense strand
gugcuuaaacaacuagaau

SEQ ID NO: 1516845 - RNA, 19 nt, Homo sapiens
  misc_RNA (1)...(19): siRNA sense strand
caagcaacuccuuaucuag

SEQ ID NO: 1516846 - RNA, 19 nt, Homo sapiens
  misc_RNA (1)...(19): siRNA sense strand
cgaggugugggauauaguu

SEQ ID NO: 1516847 - RNA, 19 nt, Homo sapiens
  misc_RNA (1)...(19): siRNA sense strand
gaagugcuuaaacaacuag

SEQ ID NO: 1516848 - RNA, 19 nt, Homo sapiens
  misc_RNA (1)...(19): siRNA sense strand
gauugaaggaacagaagug

SEQ ID NO: 1516849 - RNA, 19 nt, Homo sapiens
  misc_RNA (1)...(19): siRNA sense strand
ggucacaauucuauaucac

SEQ ID NO: 1516850 - RNA, 19 nt, Homo sapiens
  misc_RNA (1)...(19): siRNA sense strand
gagauaauggagagucgau

SEQ ID NO: 1516851 - RNA, 19 nt, Homo sapiens
  misc_RNA (1)...(19): siRNA sense strand
uaaaagaggaguacuugga

SEQ ID NO: 1516852 - RNA, 19 nt, Homo sapiens
  misc_RNA (1)...(19): siRNA sense strand
guuccaacacagaaugaaa

SEQ ID NO: 1516853 - RNA, 19 nt, Homo sapiens
  misc_RNA (1)...(19): siRNA sense strand
ggaacagaagugcuuaaac

SEQ ID NO: 1516854 - RNA, 19 nt, Homo sapiens
  misc_RNA (1)...(19): siRNA sense strand
acaaaggccgucacagcaa

SEQ ID NO: 1516855 - RNA, 19 nt, Homo sapiens
  misc_RNA (1)...(19): siRNA sense strand
agagacaccaagcaugauu

SEQ ID NO: 1516856 - RNA, 19 nt, Homo sapiens
  misc_RNA (1)...(19): siRNA sense strand
ugacaguggagauccuuau

SEQ ID NO: 1516857 - RNA, 19 nt, Homo sapiens
  misc_RNA (1)...(19): siRNA sense strand
gaauggcuggauacaagga

SEQ ID NO: 1516858 - RNA, 19 nt, Homo sapiens
  misc_RNA (1)...(19): siRNA sense strand
uguauugauucuucuccaa

SEQ ID NO: 1516859 - RNA, 19 nt, Homo sapiens
  misc_RNA (1)...(19): siRNA sense strand
gcauuggaucugcagaaau

SEQ ID NO: 1516860 - RNA, 19 nt, Homo sapiens
  misc_RNA (1)...(19): siRNA sense strand
cuauauuaguuccucuuca

SEQ ID NO: 1516861 - RNA, 19 nt, Homo sapiens
  misc_RNA (1)...(19): siRNA sense strand
aaaaugaaaccugggaaua

SEQ ID NO: 1516862 - RNA, 19 nt, Homo sapiens
  misc_RNA (1)...(19): siRNA sense strand
ccaagcaugauuucguguu

SEQ ID NO: 1516863 - RNA, 19 nt, Homo sapiens
  misc_RNA (1)...(19): siRNA sense strand
cacgaggugugggauauag

SEQ ID NO: 1516864 - RNA, 19 nt, Homo sapiens
  misc_RNA (1)...(19): siRNA sense strand
gacaguggagauccuuaug

SEQ ID NO: 1516865 - RNA, 19 nt, Homo sapiens
  misc_RNA (1)...(19): siRNA sense strand
caguggagauccuuaugcu

SEQ ID NO: 1516866 - RNA, 19 nt, Homo sapiens
  misc_RNA (1)...(19): siRNA sense strand
gaggugugggauauaguug

SEQ ID NO: 1516867 - RNA, 19 nt, Homo sapiens
  misc_RNA (1)...(19): siRNA sense strand
gggcaacugauugaaggaa

SEQ ID NO: 1516868 - RNA, 19 nt, Homo sapiens
  misc_RNA (1)...(19): siRNA sense strand
uauaucacacugcaagcaa

SEQ ID NO: 1516869 - RNA, 19 nt, Homo sapiens
  misc_RNA (1)...(19): siRNA sense strand
gaggggauauaguguaugg

SEQ ID NO: 1516870 - RNA, 19 nt, Homo sapiens
  misc_RNA (1)...(19): siRNA sense strand
ccaaauuugaagauccuau

SEQ ID NO: 1516871 - RNA, 19 nt, Homo sapiens
  misc_RNA (1)...(19): siRNA sense strand
uugcauggcaucaauaucu

SEQ ID NO: 1516872 - RNA, 19 nt, Homo sapiens
  misc_RNA (1)...(19): siRNA sense strand
ggugugggauauaguugac

SEQ ID NO: 1516873 - RNA, 19 nt, Homo sapiens
  misc_RNA (1)...(19): siRNA sense strand
gaacgugucgcaccuggua

SEQ ID NO: 1516874 - RNA, 19 nt, Homo sapiens
  misc_RNA (1)...(19): siRNA sense strand
gaagugcggcuacguggaa

SEQ ID NO: 1516875 - RNA, 19 nt, Homo sapiens
  misc_RNA (1)...(19): siRNA sense strand
gacaucugcugcuuugaca

SEQ ID NO: 1516876 - RNA, 19 nt, Homo sapiens
  misc_RNA (1)...(19): siRNA sense strand
uacgacaucugcugcuuug

SEQ ID NO: 1516877 - RNA, 19 nt, Homo sapiens
  misc_RNA (1)...(19): siRNA sense strand
ggaaugcucggccaaguac

SEQ ID NO: 1516878 - RNA, 19 nt, Homo sapiens
  misc_RNA (1)...(19): siRNA sense strand
ucagagacgcccaucauca

SEQ ID NO: 1516879 - RNA, 19 nt, Homo sapiens
  misc_RNA (1)...(19): siRNA sense strand
gcuuugacagcuuugagua

SEQ ID NO: 1516880 - RNA, 19 nt, Homo sapiens
  misc_RNA (1)...(19): siRNA sense strand
ccgcugcgccaucauguga

SEQ ID NO: 1516881 - RNA, 19 nt, Homo sapiens
  misc_RNA (1)...(19): siRNA sense strand
cagagacgcccaucaucau

SEQ ID NO: 1516882 - RNA, 19 nt, Homo sapiens
  misc_RNA (1)...(19): siRNA sense strand
caaccgcugcgccaucaug

SEQ ID NO: 1516883 - RNA, 19 nt, Homo sapiens
  misc_RNA (1)...(19): siRNA sense strand
uggaaugcucggccaagua

SEQ ID NO: 1516884 - RNA, 19 nt, Homo sapiens
  misc_RNA (1)...(19): siRNA sense strand
cuacgacaucugcugcuuu

SEQ ID NO: 1516885 - RNA, 19 nt, Homo sapiens
  misc_RNA (1)...(19): siRNA sense strand
gcacauccugcugcucuuc

SEQ ID NO: 1516886 - RNA, 19 nt, Homo sapiens
  misc_RNA (1)...(19): siRNA sense strand
ccucagagacgcccaucau

SEQ ID NO: 1516887 - RNA, 19 nt, Homo sapiens
  misc_RNA (1)...(19): siRNA sense strand
guggaaugcucggccaagu

SEQ ID NO: 1516888 - RNA, 19 nt, Homo sapiens
  misc_RNA (1)...(19): siRNA sense strand
guacacagcuccagaaaga

SEQ ID NO: 1516889 - RNA, 19 nt, Homo sapiens
  misc_RNA (1)...(19): siRNA sense strand
caagggagcuguccugcua

SEQ ID NO: 1516890 - RNA, 19 nt, Homo sapiens
  misc_RNA (1)...(19): siRNA sense strand
gcaaacaacuuauuuccau

SEQ ID NO: 1516891 - RNA, 19 nt, Homo sapiens
  misc_RNA (1)...(19): siRNA sense strand
guagacagauauucuccua

SEQ ID NO: 1516892 - RNA, 19 nt, Homo sapiens
  misc_RNA (1)...(19): siRNA sense strand
gaaccaggaugacuacuac

SEQ ID NO: 1516893 - RNA, 19 nt, Homo sapiens
  misc_RNA (1)...(19): siRNA sense strand
caaaggaagccauucuuaa

SEQ ID NO: 1516894 - RNA, 19 nt, Homo sapiens
  misc_RNA (1)...(19): siRNA sense strand
ucucugagguggaugauaa

SEQ ID NO: 1516895 - RNA, 19 nt, Homo sapiens
  misc_RNA (1)...(19): siRNA sense strand
gccauuacauugagaaaga

SEQ ID NO: 1516896 - RNA, 19 nt, Homo sapiens
  misc_RNA (1)...(19): siRNA sense strand
caacuuauuuccaucaaca

SEQ ID NO: 1516897 - RNA, 19 nt, Homo sapiens
  misc_RNA (1)...(19): siRNA sense strand
gacaauagcaauacauuug

SEQ ID NO: 1516898 - RNA, 19 nt, Homo sapiens
  misc_RNA (1)...(19): siRNA sense strand
gaggaagccuugagugauc

SEQ ID NO: 1516899 - RNA, 19 nt, Homo sapiens
  misc_RNA (1)...(19): siRNA sense strand
acacuuagcucggcucuau

SEQ ID NO: 1516900 - RNA, 19 nt, Homo sapiens
  misc_RNA (1)...(19): siRNA sense strand
gauuugcugugcuguauga

SEQ ID NO: 1516901 - RNA, 19 nt, Homo sapiens
  misc_RNA (1)...(19): siRNA sense strand
ggacaauagcaauacauuu

SEQ ID NO: 1516902 - RNA, 19 nt, Homo sapiens
  misc_RNA (1)...(19): siRNA sense strand
uagcucggcucuauaaaga

SEQ ID NO: 1516903 - RNA, 19 nt, Homo sapiens
  misc_RNA (1)...(19): siRNA sense strand
gaaacaaggccaagacucu

SEQ ID NO: 1516904 - RNA, 19 nt, Homo sapiens
  misc_RNA (1)...(19): siRNA sense strand
gccagcuucuugacaguua

SEQ ID NO: 1516905 - RNA, 19 nt, Homo sapiens
  misc_RNA (1)...(19): siRNA sense strand
ccagccaccuccuguguuu

SEQ ID NO: 1516906 - RNA, 19 nt, Homo sapiens
  misc_RNA (1)...(19): siRNA sense strand
ucugaggccuguucacuuu

SEQ ID NO: 1516907 - RNA, 19 nt, Homo sapiens
  misc_RNA (1)...(19): siRNA sense strand
ccugaggccugguacagua

SEQ ID NO: 1516908 - RNA, 19 nt, Homo sapiens
  misc_RNA (1)...(19): siRNA sense strand
acaaaggaagccauucuua

SEQ ID NO: 1516909 - RNA, 19 nt, Homo sapiens
  misc_RNA (1)...(19): siRNA sense strand
gcucggcucuauaaagaau

SEQ ID NO: 1516910 - RNA, 19 nt, Homo sapiens
  misc_RNA (1)...(19): siRNA sense strand
ccaaagcccuagagcaucu

SEQ ID NO: 1516911 - RNA, 19 nt, Homo sapiens
  misc_RNA (1)...(19): siRNA sense strand
gguggaugauaaccaaauu

SEQ ID NO: 1516912 - RNA, 19 nt, Homo sapiens
  misc_RNA (1)...(19): siRNA sense strand
gagaggaucaucuggacaa

SEQ ID NO: 1516913 - RNA, 19 nt, Homo sapiens
  misc_RNA (1)...(19): siRNA sense strand
uugaagaguuccaucugua

SEQ ID NO: 1516914 - RNA, 19 nt, Homo sapiens
  misc_RNA (1)...(19): siRNA sense strand
caauagcaauacauuugga

SEQ ID NO: 1516915 - RNA, 19 nt, Homo sapiens
  misc_RNA (1)...(19): siRNA sense strand
ugagguggaugauaaccaa

SEQ ID NO: 1516916 - RNA, 19 nt, Homo sapiens
  misc_RNA (1)...(19): siRNA sense strand
cagauuugcugugcuguau

SEQ ID NO: 1516917 - RNA, 19 nt, Homo sapiens
  misc_RNA (1)...(19): siRNA sense strand
ucucuuuccuaucucuuua

SEQ ID NO: 1516918 - RNA, 19 nt, Homo sapiens
  misc_RNA (1)...(19): siRNA sense strand
cagcagguguacuucuauu

SEQ ID NO: 1516919 - RNA, 19 nt, Homo sapiens
  misc_RNA (1)...(19): siRNA sense strand
ggagcuguccugcuaaugu

SEQ ID NO: 1516920 - RNA, 19 nt, Homo sapiens
  misc_RNA (1)...(19): siRNA sense strand
gagcuguccugcuaauguc

SEQ ID NO: 1516921 - RNA, 19 nt, Homo sapiens
  misc_RNA (1)...(19): siRNA sense strand
ccacagcguccaauucaug

SEQ ID NO: 1516922 - RNA, 19 nt, Homo sapiens
  misc_RNA (1)...(19): siRNA sense strand
ccaaacuucuggaacucuu

SEQ ID NO: 1516923 - RNA, 19 nt, Homo sapiens
  misc_RNA (1)...(19): siRNA sense strand
caucuggacaauagcaaua

SEQ ID NO: 1516924 - RNA, 19 nt, Homo sapiens
  misc_RNA (1)...(19): siRNA sense strand
aggaucaucuggacaauag

SEQ ID NO: 1516925 - RNA, 19 nt, Homo sapiens
  misc_RNA (1)...(19): siRNA sense strand
gaaagaaaggggucacaaa

SEQ ID NO: 1516926 - RNA, 19 nt, Homo sapiens
  misc_RNA (1)...(19): siRNA sense strand
augcagauguggacagauu

SEQ ID NO: 1516927 - RNA, 19 nt, Homo sapiens
  misc_RNA (1)...(19): siRNA sense strand
augccaagcugcucagaaa

SEQ ID NO: 1516928 - RNA, 19 nt, Homo sapiens
  misc_RNA (1)...(19): siRNA sense strand
agacagauauucuccuacu

SEQ ID NO: 1516929 - RNA, 19 nt, Homo sapiens
  misc_RNA (1)...(19): siRNA sense strand
agauaggccugcuggcauu

SEQ ID NO: 1516930 - RNA, 19 nt, Homo sapiens
  misc_RNA (1)...(19): siRNA sense strand
gcagauguggacagauuug

SEQ ID NO: 1516931 - RNA, 19 nt, Homo sapiens
  misc_RNA (1)...(19): siRNA sense strand
ggagauggguuuugaagag

SEQ ID NO: 1516932 - RNA, 19 nt, Homo sapiens
  misc_RNA (1)...(19): siRNA sense strand
gaguauguccagaggcuuu

SEQ ID NO: 1516933 - RNA, 19 nt, Homo sapiens
  misc_RNA (1)...(19): siRNA sense strand
gaggaucaucuggacaaua

SEQ ID NO: 1516934 - RNA, 19 nt, Homo sapiens
  misc_RNA (1)...(19): siRNA sense strand
aaaggaagccauucuuaag

SEQ ID NO: 1516935 - RNA, 19 nt, Homo sapiens
  misc_RNA (1)...(19): siRNA sense strand
ggacuuccccuuaauauag

SEQ ID NO: 1516936 - RNA, 19 nt, Homo sapiens
  misc_RNA (1)...(19): siRNA sense strand
gaagaguuccaucuguauc

SEQ ID NO: 1516937 - RNA, 19 nt, Homo sapiens
  misc_RNA (1)...(19): siRNA sense strand
gcucuugucuuagccaucu

SEQ ID NO: 1516938 - RNA, 19 nt, Homo sapiens
  misc_RNA (1)...(19): siRNA sense strand
ugaggccuguucacuuuga

SEQ ID NO: 1516939 - RNA, 19 nt, Homo sapiens
  misc_RNA (1)...(19): siRNA sense strand
guggucggguagacagaua

SEQ ID NO: 1516940 - RNA, 19 nt, Homo sapiens
  misc_RNA (1)...(19): siRNA sense strand
gccaccggcugauagaaau

SEQ ID NO: 1516941 - RNA, 19 nt, Homo sapiens
  misc_RNA (1)...(19): siRNA sense strand
uccuacugcucuugucuua

SEQ ID NO: 1516942 - RNA, 19 nt, Homo sapiens
  misc_RNA (1)...(19): siRNA sense strand
ggacaguggucggguagac

SEQ ID NO: 1516943 - RNA, 19 nt, Homo sapiens
  misc_RNA (1)...(19): siRNA sense strand
ucauuaaggccuaccaaga

SEQ ID NO: 1516944 - RNA, 19 nt, Homo sapiens
  misc_RNA (1)...(19): siRNA sense strand
uaccuuagcacaagugaug

SEQ ID NO: 1516945 - RNA, 19 nt, Homo sapiens
  misc_RNA (1)...(19): siRNA sense strand
cagccugcaugacagagaa

SEQ ID NO: 1516946 - RNA, 19 nt, Homo sapiens
  misc_RNA (1)...(19): siRNA sense strand
aaagaucuguuuucagcua

SEQ ID NO: 1516947 - RNA, 19 nt, Homo sapiens
  misc_RNA (1)...(19): siRNA sense strand
gaacgucagcgggaguaug

SEQ ID NO: 1516948 - RNA, 19 nt, Homo sapiens
  misc_RNA (1)...(19): siRNA sense strand
uuucuuccuuuccuuguuu

SEQ ID NO: 1516949 - RNA, 19 nt, Homo sapiens
  misc_RNA (1)...(19): siRNA sense strand
uccagcagguguacuucua

SEQ ID NO: 1516950 - RNA, 19 nt, Homo sapiens
  misc_RNA (1)...(19): siRNA sense strand
ccaccuccuguguuuauaa

SEQ ID NO: 1516951 - RNA, 19 nt, Homo sapiens
  misc_RNA (1)...(19): siRNA sense strand
gcacagaagcuggcugcau

SEQ ID NO: 1516952 - RNA, 19 nt, Homo sapiens
  misc_RNA (1)...(19): siRNA sense strand
gugcugcucuuggagaugu

SEQ ID NO: 1516953 - RNA, 19 nt, Homo sapiens
  misc_RNA (1)...(19): siRNA sense strand
aagcagcucuucuggaaaa

SEQ ID NO: 1516954 - RNA, 19 nt, Homo sapiens
  misc_RNA (1)...(19): siRNA sense strand
cuacugcucuugucuuagc

SEQ ID NO: 1516955 - RNA, 19 nt, Homo sapiens
  misc_RNA (1)...(19): siRNA sense strand
ccauuacauugagaaagaa

SEQ ID NO: 1516956 - RNA, 19 nt, Homo sapiens
  misc_RNA (1)...(19): siRNA sense strand
caucaccuccaccagcuaa

SEQ ID NO: 1516957 - RNA, 19 nt, Homo sapiens
  misc_RNA (1)...(19): siRNA sense strand
ggagaaccaggaugacuac

SEQ ID NO: 1516958 - RNA, 19 nt, Homo sapiens
  misc_RNA (1)...(19): siRNA sense strand
ccaugcagauguggacaga

SEQ ID NO: 1516959 - RNA, 19 nt, Homo sapiens
  misc_RNA (1)...(19): siRNA sense strand
ucauggaguucucggaagu

SEQ ID NO: 1516960 - RNA, 19 nt, Homo sapiens
  misc_RNA (1)...(19): siRNA sense strand
agaaaggggucacaaagug

SEQ ID NO: 1516961 - RNA, 19 nt, Homo sapiens
  misc_RNA (1)...(19): siRNA sense strand
ccuacuuucucuuuccuau

SEQ ID NO: 1516962 - RNA, 19 nt, Homo sapiens
  misc_RNA (1)...(19): siRNA sense strand
ggaaguggagaaccaggau

SEQ ID NO: 1516963 - RNA, 19 nt, Homo sapiens
  misc_RNA (1)...(19): siRNA sense strand
ugaagaguuccaucuguau

SEQ ID NO: 1516964 - RNA, 19 nt, Homo sapiens
  misc_RNA (1)...(19): siRNA sense strand
acgcaggcuugaaggauga

SEQ ID NO: 1516965 - RNA, 19 nt, Homo sapiens
  misc_RNA (1)...(19): siRNA sense strand
uggagaaccaggaugacua

SEQ ID NO: 1516966 - RNA, 19 nt, Homo sapiens
  misc_RNA (1)...(19): siRNA sense strand
cucuuuaucuuccuuacuu

SEQ ID NO: 1516967 - RNA, 19 nt, Homo sapiens
  misc_RNA (1)...(19): siRNA sense strand
gcuagccauuacauugaga

SEQ ID NO: 1516968 - RNA, 19 nt, Homo sapiens
  misc_RNA (1)...(19): siRNA sense strand
gaccagccaccuccugugu

SEQ ID NO: 1516969 - RNA, 19 nt, Homo sapiens
  misc_RNA (1)...(19): siRNA sense strand
guccacagcguccaauuca

SEQ ID NO: 1516970 - RNA, 19 nt, Homo sapiens
  misc_RNA (1)...(19): siRNA sense strand
cauuaaggccuaccaagag

SEQ ID NO: 1516971 - RNA, 19 nt, Homo sapiens
  misc_RNA (1)...(19): siRNA sense strand
gcagguguacuucuauugc

SEQ ID NO: 1516972 - RNA, 19 nt, Homo sapiens
  misc_RNA (1)...(19): siRNA sense strand
agaaccaggaugacuacua

SEQ ID NO: 1516973 - RNA, 19 nt, Homo sapiens
  misc_RNA (1)...(19): siRNA sense strand
gaucaucuggacaauagca

SEQ ID NO: 1516974 - RNA, 19 nt, Homo sapiens
  misc_RNA (1)...(19): siRNA sense strand
acacagcuccagaaagauc

SEQ ID NO: 1516975 - RNA, 19 nt, Homo sapiens
  misc_RNA (1)...(19): siRNA sense strand
gacagauauucuccuacug

SEQ ID NO: 1516976 - RNA, 19 nt, Homo sapiens
  misc_RNA (1)...(19): siRNA sense strand
ucacuuugaauuugcauca

SEQ ID NO: 1516977 - RNA, 19 nt, Homo sapiens
  misc_RNA (1)...(19): siRNA sense strand
agcaauacauuuggacuuc

SEQ ID NO: 1516978 - RNA, 19 nt, Homo sapiens
  misc_RNA (1)...(19): siRNA sense strand
uacuuucucuuuccuaucu

SEQ ID NO: 1516979 - RNA, 19 nt, Homo sapiens
  misc_RNA (1)...(19): siRNA sense strand
cagguguacuucuauugca

SEQ ID NO: 1516980 - RNA, 19 nt, Homo sapiens
  misc_RNA (1)...(19): siRNA sense strand
uuacacaaaggaagccauu

SEQ ID NO: 1516981 - RNA, 19 nt, Homo sapiens
  misc_RNA (1)...(19): siRNA sense strand
cacaagugaugacggacau

SEQ ID NO: 1516982 - RNA, 19 nt, Homo sapiens
  misc_RNA (1)...(19): siRNA sense strand
ugacuacuacagcacagaa

SEQ ID NO: 1516983 - RNA, 19 nt, Homo sapiens
  misc_RNA (1)...(19): siRNA sense strand
gccaccuccuguguuuaua

SEQ ID NO: 1516984 - RNA, 19 nt, Homo sapiens
  misc_RNA (1)...(19): siRNA sense strand
uggcaugggagauggguuu

SEQ ID NO: 1516985 - RNA, 19 nt, Homo sapiens
  misc_RNA (1)...(19): siRNA sense strand
gguccacagcguccaauuc

SEQ ID NO: 1516986 - RNA, 19 nt, Homo sapiens
  misc_RNA (1)...(19): siRNA sense strand
gugggcagccagccaaaga

SEQ ID NO: 1516987 - RNA, 19 nt, Homo sapiens
  misc_RNA (1)...(19): siRNA sense strand
gcuugaaggaugaaugcaa

SEQ ID NO: 1516988 - RNA, 19 nt, Homo sapiens
  misc_RNA (1)...(19): siRNA sense strand
gaaagaauggccuugaauu

SEQ ID NO: 1516989 - RNA, 19 nt, Homo sapiens
  misc_RNA (1)...(19): siRNA sense strand
caacaccuaugaacaccua

SEQ ID NO: 1516990 - RNA, 19 nt, Homo sapiens
  misc_RNA (1)...(19): siRNA sense strand
agaauggccuugaauuuga

SEQ ID NO: 1516991 - RNA, 19 nt, Homo sapiens
  misc_RNA (1)...(19): siRNA sense strand
gaacacaucccucuucucu

SEQ ID NO: 1516992 - RNA, 19 nt, Homo sapiens
  misc_RNA (1)...(19): siRNA sense strand
gaagcuggaugugguggua

SEQ ID NO: 1516993 - RNA, 19 nt, Homo sapiens
  misc_RNA (1)...(19): siRNA sense strand
acacaucccucuucucuuc

SEQ ID NO: 1516994 - RNA, 19 nt, Homo sapiens
  misc_RNA (1)...(19): siRNA sense strand
ggaggaagcuaucauugac

SEQ ID NO: 1516995 - RNA, 19 nt, Homo sapiens
  misc_RNA (1)...(19): siRNA sense strand
ggcaugagcuggugaacau

SEQ ID NO: 1516996 - RNA, 19 nt, Homo sapiens
  misc_RNA (1)...(19): siRNA sense strand
gggcugcugucauaccuuu

SEQ ID NO: 1516997 - RNA, 19 nt, Homo sapiens
  misc_RNA (1)...(19): siRNA sense strand
aaagaauggccuugaauuu

SEQ ID NO: 1516998 - RNA, 19 nt, Homo sapiens
  misc_RNA (1)...(19): siRNA sense strand
gaaagccuguggugucagu

SEQ ID NO: 1516999 - RNA, 19 nt, Homo sapiens
  misc_RNA (1)...(19): siRNA sense strand
gaacuuguacucagaccuu

SEQ ID NO: 1517000 - RNA, 19 nt, Homo sapiens
  misc_RNA (1)...(19): siRNA sense strand
ggagagaaagccuacauuc

SEQ ID NO: 1517001 - RNA, 19 nt, Homo sapiens
  misc_RNA (1)...(19): siRNA sense strand
acucagaccuuaagaaucu

SEQ ID NO: 1517002 - RNA, 19 nt, Homo sapiens
  misc_RNA (1)...(19): siRNA sense strand
gagagaaagccuacauuca

SEQ ID NO: 1517003 - RNA, 19 nt, Homo sapiens
  misc_RNA (1)...(19): siRNA sense strand
ggaaagaauggccuugaau

SEQ ID NO: 1517004 - RNA, 19 nt, Homo sapiens
  misc_RNA (1)...(19): siRNA sense strand
guacucagaccuuaagaau

SEQ ID NO: 1517005 - RNA, 19 nt, Homo sapiens
  misc_RNA (1)...(19): siRNA sense strand
ggucaaccacuacaugaaa

SEQ ID NO: 1517006 - RNA, 19 nt, Homo sapiens
  misc_RNA (1)...(19): siRNA sense strand
auauaaagcugguuaaggu

SEQ ID NO: 1517007 - RNA, 19 nt, Homo sapiens
  misc_RNA (1)...(19): siRNA sense strand
gggaaagccugugguguca

SEQ ID NO: 1517008 - RNA, 19 nt, Homo sapiens
  misc_RNA (1)...(19): siRNA sense strand
aggcggagcugaagggaaa

SEQ ID NO: 1517009 - RNA, 19 nt, Homo sapiens
  misc_RNA (1)...(19): siRNA sense strand
cauguacaguggagagaaa

SEQ ID NO: 1517010 - RNA, 19 nt, Homo sapiens
  misc_RNA (1)...(19): siRNA sense strand
aagcuaucauugacaagua

SEQ ID NO: 1517011 - RNA, 19 nt, Homo sapiens
  misc_RNA (1)...(19): siRNA sense strand
acacaggaauccauuacau

SEQ ID NO: 1517012 - RNA, 19 nt, Homo sapiens
  misc_RNA (1)...(19): siRNA sense strand
cuucuucgcuuucccauca

SEQ ID NO: 1517013 - RNA, 19 nt, Homo sapiens
  misc_RNA (1)...(19): siRNA sense strand
gccguccucugcaaaguuu

SEQ ID NO: 1517014 - RNA, 19 nt, Homo sapiens
  misc_RNA (1)...(19): siRNA sense strand
gggaagaggcugcggaaca

SEQ ID NO: 1517015 - RNA, 19 nt, Homo sapiens
  misc_RNA (1)...(19): siRNA sense strand
ggaagaggcugcggaacac

SEQ ID NO: 1517016 - RNA, 19 nt, Homo sapiens
  misc_RNA (1)...(19): siRNA sense strand
uggaaagaauggccuugaa

SEQ ID NO: 1517017 - RNA, 19 nt, Homo sapiens
  misc_RNA (1)...(19): siRNA sense strand
ccaccaacuacuauguuua

SEQ ID NO: 1517018 - RNA, 19 nt, Homo sapiens
  misc_RNA (1)...(19): siRNA sense strand
ccaaccaagugccggagaa

SEQ ID NO: 1517019 - RNA, 19 nt, Homo sapiens
  misc_RNA (1)...(19): siRNA sense strand
gaaaggaguaccccaugua

SEQ ID NO: 1517020 - RNA, 19 nt, Homo sapiens
  misc_RNA (1)...(19): siRNA sense strand
aagaauggccuugaauuug

SEQ ID NO: 1517021 - RNA, 19 nt, Homo sapiens
  misc_RNA (1)...(19): siRNA sense strand
acaggaauccauuacauug

SEQ ID NO: 1517022 - RNA, 19 nt, Homo sapiens
  misc_RNA (1)...(19): siRNA sense strand
guaauuggcaguggcuuug

SEQ ID NO: 1517023 - RNA, 19 nt, Homo sapiens
  misc_RNA (1)...(19): siRNA sense strand
ccaacuacuauguuuacua

SEQ ID NO: 1517024 - RNA, 19 nt, Homo sapiens
  misc_RNA (1)...(19): siRNA sense strand
cgaauccuuucuccgaaga

SEQ ID NO: 1517025 - RNA, 19 nt, Homo sapiens
  misc_RNA (1)...(19): siRNA sense strand
ccaauggccgaaaggagua

SEQ ID NO: 1517026 - RNA, 19 nt, Homo sapiens
  misc_RNA (1)...(19): siRNA sense strand
gcuuaggcaugaccucugu

SEQ ID NO: 1517027 - RNA, 19 nt, Homo sapiens
  misc_RNA (1)...(19): siRNA sense strand
gguaauuggcaguggcuuu

SEQ ID NO: 1517028 - RNA, 19 nt, Homo sapiens
  misc_RNA (1)...(19): siRNA sense strand
ccagugaaauugccuucca

SEQ ID NO: 1517029 - RNA, 19 nt, Homo sapiens
  misc_RNA (1)...(19): siRNA sense strand
gaagcuaucauugacaagu

SEQ ID NO: 1517030 - RNA, 19 nt, Homo sapiens
  misc_RNA (1)...(19): siRNA sense strand
guugaaauuccucccauug

SEQ ID NO: 1517031 - RNA, 19 nt, Homo sapiens
  misc_RNA (1)...(19): siRNA sense strand
gcaguacucagcuacaucu

SEQ ID NO: 1517032 - RNA, 19 nt, Homo sapiens
  misc_RNA (1)...(19): siRNA sense strand
acaaggaggccaggaagaa

SEQ ID NO: 1517033 - RNA, 19 nt, Homo sapiens
  misc_RNA (1)...(19): siRNA sense strand
gauccgggcacagaagaaa

SEQ ID NO: 1517034 - RNA, 19 nt, Homo sapiens
  misc_RNA (1)...(19): siRNA sense strand
uguggaagccucuauguca

SEQ ID NO: 1517035 - RNA, 19 nt, Homo sapiens
  misc_RNA (1)...(19): siRNA sense strand
ugacucguuucucuccauu

SEQ ID NO: 1517036 - RNA, 19 nt, Homo sapiens
  misc_RNA (1)...(19): siRNA sense strand
gugggcugcugacucguuu

SEQ ID NO: 1517037 - RNA, 19 nt, Homo sapiens
  misc_RNA (1)...(19): siRNA sense strand
aggaagcuaucauugacaa

SEQ ID NO: 1517038 - RNA, 19 nt, Homo sapiens
  misc_RNA (1)...(19): siRNA sense strand
agagaaagccuacauucag

SEQ ID NO: 1517039 - RNA, 19 nt, Homo sapiens
  misc_RNA (1)...(19): siRNA sense strand
ugacaggccaggauaucuu

SEQ ID NO: 1517040 - RNA, 19 nt, Homo sapiens
  misc_RNA (1)...(19): siRNA sense strand
gaauggccuugaauuugac

SEQ ID NO: 1517041 - RNA, 19 nt, Homo sapiens
  misc_RNA (1)...(19): siRNA sense strand
uccaccaacuacuauguuu

SEQ ID NO: 1517042 - RNA, 19 nt, Homo sapiens
  misc_RNA (1)...(19): siRNA sense strand
gcugcugacucguuucucu

SEQ ID NO: 1517043 - RNA, 19 nt, Homo sapiens
  misc_RNA (1)...(19): siRNA sense strand
gcugucauaccuuuggaaa

SEQ ID NO: 1517044 - RNA, 19 nt, Homo sapiens
  misc_RNA (1)...(19): siRNA sense strand
gcggaacacaucccucuuc

SEQ ID NO: 1517045 - RNA, 19 nt, Homo sapiens
  misc_RNA (1)...(19): siRNA sense strand
cacaggaauccauuacauu

SEQ ID NO: 1517046 - RNA, 19 nt, Homo sapiens
  misc_RNA (1)...(19): siRNA sense strand
gcagugacuaugagaccuu

SEQ ID NO: 1517047 - RNA, 19 nt, Homo sapiens
  misc_RNA (1)...(19): siRNA sense strand
ucaccaaccaguucuaucu

SEQ ID NO: 1517048 - RNA, 19 nt, Homo sapiens
  misc_RNA (1)...(19): siRNA sense strand
guacuggaagggcccaaug

SEQ ID NO: 1517049 - RNA, 19 nt, Homo sapiens
  misc_RNA (1)...(19): siRNA sense strand
gaagcggaacuuguacuca

SEQ ID NO: 1517050 - RNA, 19 nt, Homo sapiens
  misc_RNA (1)...(19): siRNA sense strand
ccucaugccauccuguuga

SEQ ID NO: 1517051 - RNA, 19 nt, Homo sapiens
  misc_RNA (1)...(19): siRNA sense strand
gacaaggaggccaggaaga

SEQ ID NO: 1517052 - RNA, 19 nt, Homo sapiens
  misc_RNA (1)...(19): siRNA sense strand
caggaggaagcuaucauug

SEQ ID NO: 1517053 - RNA, 19 nt, Homo sapiens
  misc_RNA (1)...(19): siRNA sense strand
cagcagcgccauccugaag

SEQ ID NO: 1517054 - RNA, 19 nt, Homo sapiens
  misc_RNA (1)...(19): siRNA sense strand
gggaagguggagaguguga

SEQ ID NO: 1517055 - RNA, 19 nt, Homo sapiens
  misc_RNA (1)...(19): siRNA sense strand
gcuaucauugacaaguaua

SEQ ID NO: 1517056 - RNA, 19 nt, Homo sapiens
  misc_RNA (1)...(19): siRNA sense strand
aggaggaagcuaucauuga

SEQ ID NO: 1517057 - RNA, 19 nt, Homo sapiens
  misc_RNA (1)...(19): siRNA sense strand
ugacaucaugguacuggaa

SEQ ID NO: 1517058 - RNA, 19 nt, Homo sapiens
  misc_RNA (1)...(19): siRNA sense strand
ccugcacccuugugugaug

SEQ ID NO: 1517059 - RNA, 19 nt, Homo sapiens
  misc_RNA (1)...(19): siRNA sense strand
caaggaagaccugcaucug

SEQ ID NO: 1517060 - RNA, 19 nt, Homo sapiens
  misc_RNA (1)...(19): siRNA sense strand
gagcuggugaacaucuauu

SEQ ID NO: 1517061 - RNA, 19 nt, Homo sapiens
  misc_RNA (1)...(19): siRNA sense strand
acaggaggaagcuaucauu

SEQ ID NO: 1517062 - RNA, 19 nt, Homo sapiens
  misc_RNA (1)...(19): siRNA sense strand
gucaaccacuacaugaaag

SEQ ID NO: 1517063 - RNA, 19 nt, Homo sapiens
  misc_RNA (1)...(19): siRNA sense strand
gaccugggaggaccgauuc

SEQ ID NO: 1517064 - RNA, 19 nt, Homo sapiens
  misc_RNA (1)...(19): siRNA sense strand
cggaacacaucccucuucu

SEQ ID NO: 1517065 - RNA, 19 nt, Homo sapiens
  misc_RNA (1)...(19): siRNA sense strand
uauggaagagggcagcauu

SEQ ID NO: 1517066 - RNA, 19 nt, Homo sapiens
  misc_RNA (1)...(19): siRNA sense strand
ccaaggaagaccugcaucu

SEQ ID NO: 1517067 - RNA, 19 nt, Homo sapiens
  misc_RNA (1)...(19): siRNA sense strand
aaagcugguuaagguggua

SEQ ID NO: 1517068 - RNA, 19 nt, Homo sapiens
  misc_RNA (1)...(19): siRNA sense strand
gggcagcauuggccguuuu

SEQ ID NO: 1517069 - RNA, 19 nt, Homo sapiens
  misc_RNA (1)...(19): siRNA sense strand
ugacuaugagaccuucaaa

SEQ ID NO: 1517070 - RNA, 19 nt, Homo sapiens
  misc_RNA (1)...(19): siRNA sense strand
augccauccuguugaaauu

SEQ ID NO: 1517071 - RNA, 19 nt, Homo sapiens
  misc_RNA (1)...(19): siRNA sense strand
gacaggccaggauaucuuc

SEQ ID NO: 1517072 - RNA, 19 nt, Homo sapiens
  misc_RNA (1)...(19): siRNA sense strand
gaagguggagagugugacu

SEQ ID NO: 1517073 - RNA, 19 nt, Homo sapiens
  misc_RNA (1)...(19): siRNA sense strand
caucugccguccaccaacu

SEQ ID NO: 1517074 - RNA, 19 nt, Homo sapiens
  misc_RNA (1)...(19): siRNA sense strand
ugacacaggaauccauuac

SEQ ID NO: 1517075 - RNA, 19 nt, Homo sapiens
  misc_RNA (1)...(19): siRNA sense strand
caccaacuacuauguuuac

SEQ ID NO: 1517076 - RNA, 19 nt, Homo sapiens
  misc_RNA (1)...(19): siRNA sense strand
ucguuucucuccauuccuu

SEQ ID NO: 1517077 - RNA, 19 nt, Homo sapiens
  misc_RNA (1)...(19): siRNA sense strand
uguugaaauuccucccauu

SEQ ID NO: 1517078 - RNA, 19 nt, Homo sapiens
  misc_RNA (1)...(19): siRNA sense strand
uuacauugggcguauggaa

SEQ ID NO: 1517079 - RNA, 19 nt, Homo sapiens
  misc_RNA (1)...(19): siRNA sense strand
cgaaagaguuugaguggaa

SEQ ID NO: 1517080 - RNA, 19 nt, Homo sapiens
  misc_RNA (1)...(19): siRNA sense strand
gauagcaacucuccuggaa

SEQ ID NO: 1517081 - RNA, 19 nt, Homo sapiens
  misc_RNA (1)...(19): siRNA sense strand
gcacacaaccuccaucuuc

SEQ ID NO: 1517082 - RNA, 19 nt, Homo sapiens
  misc_RNA (1)...(19): siRNA sense strand
uuaaggauguacccaauaa

SEQ ID NO: 1517083 - RNA, 19 nt, Homo sapiens
  misc_RNA (1)...(19): siRNA sense strand
ggauacaguucaugacaau

SEQ ID NO: 1517084 - RNA, 19 nt, Homo sapiens
  misc_RNA (1)...(19): siRNA sense strand
ggaaacguccagccuaauu

SEQ ID NO: 1517085 - RNA, 19 nt, Homo sapiens
  misc_RNA (1)...(19): siRNA sense strand
gaacaugccaguuucaaag

SEQ ID NO: 1517086 - RNA, 19 nt, Homo sapiens
  misc_RNA (1)...(19): siRNA sense strand
gcacagagcacggcaacaa

SEQ ID NO: 1517087 - RNA, 19 nt, Homo sapiens
  misc_RNA (1)...(19): siRNA sense strand
acaucaggcuggagaauaa

SEQ ID NO: 1517088 - RNA, 19 nt, Homo sapiens
  misc_RNA (1)...(19): siRNA sense strand
gaguuugaguggaaucuga

SEQ ID NO: 1517089 - RNA, 19 nt, Homo sapiens
  misc_RNA (1)...(19): siRNA sense strand
gacauccaccgcuccauua

SEQ ID NO: 1517090 - RNA, 19 nt, Homo sapiens
  misc_RNA (1)...(19): siRNA sense strand
gaacaaaaggacaagauaa

SEQ ID NO: 1517091 - RNA, 19 nt, Homo sapiens
  misc_RNA (1)...(19): siRNA sense strand
ggagaauaacgacaacaaa

SEQ ID NO: 1517092 - RNA, 19 nt, Homo sapiens
  misc_RNA (1)...(19): siRNA sense strand
gaaagaguuugaguggaau

SEQ ID NO: 1517093 - RNA, 19 nt, Homo sapiens
  misc_RNA (1)...(19): siRNA sense strand
gacauuggcaccugggaua

SEQ ID NO: 1517094 - RNA, 19 nt, Homo sapiens
  misc_RNA (1)...(19): siRNA sense strand
gggcguguguucaucauca

SEQ ID NO: 1517095 - RNA, 19 nt, Homo sapiens
  misc_RNA (1)...(19): siRNA sense strand
caacaaaccggucacaaac

SEQ ID NO: 1517096 - RNA, 19 nt, Homo sapiens
  misc_RNA (1)...(19): siRNA sense strand
gaaacguccagccuaauuc

SEQ ID NO: 1517097 - RNA, 19 nt, Homo sapiens
  misc_RNA (1)...(19): siRNA sense strand
gaacggcagagucgaaaca

SEQ ID NO: 1517098 - RNA, 19 nt, Homo sapiens
  misc_RNA (1)...(19): siRNA sense strand
uaacggagaccaucauuuu

SEQ ID NO: 1517099 - RNA, 19 nt, Homo sapiens
  misc_RNA (1)...(19): siRNA sense strand
acaacaaaccggucacaaa

SEQ ID NO: 1517100 - RNA, 19 nt, Homo sapiens
  misc_RNA (1)...(19): siRNA sense strand
gcuacaacccgaaagaguu

SEQ ID NO: 1517101 - RNA, 19 nt, Homo sapiens
  misc_RNA (1)...(19): siRNA sense strand
ggacagucaaaucagagua

SEQ ID NO: 1517102 - RNA, 19 nt, Homo sapiens
  misc_RNA (1)...(19): siRNA sense strand
cuacaacccgaaagaguuu

SEQ ID NO: 1517103 - RNA, 19 nt, Homo sapiens
  misc_RNA (1)...(19): siRNA sense strand
uuccauaccucaccaccua

SEQ ID NO: 1517104 - RNA, 19 nt, Homo sapiens
  misc_RNA (1)...(19): siRNA sense strand
gacagucaaaucagaguaa

SEQ ID NO: 1517105 - RNA, 19 nt, Homo sapiens
  misc_RNA (1)...(19): siRNA sense strand
uaucagcacagguucaauu

SEQ ID NO: 1517106 - RNA, 19 nt, Homo sapiens
  misc_RNA (1)...(19): siRNA sense strand
gagaauaacgacaacaaac

SEQ ID NO: 1517107 - RNA, 19 nt, Homo sapiens
  misc_RNA (1)...(19): siRNA sense strand
gggcaugguuggccugaag

SEQ ID NO: 1517108 - RNA, 19 nt, Homo sapiens
  misc_RNA (1)...(19): siRNA sense strand
caaaaugguucguuacauc

SEQ ID NO: 1517109 - RNA, 19 nt, Homo sapiens
  misc_RNA (1)...(19): siRNA sense strand
uagcaacucuccuggaaac

SEQ ID NO: 1517110 - RNA, 19 nt, Homo sapiens
  misc_RNA (1)...(19): siRNA sense strand
cgacauccaccgcuccauu

SEQ ID NO: 1517111 - RNA, 19 nt, Homo sapiens
  misc_RNA (1)...(19): siRNA sense strand
agaaggauacaguucauga

SEQ ID NO: 1517112 - RNA, 19 nt, Homo sapiens
  misc_RNA (1)...(19): siRNA sense strand
cccaggaggugcccuuaga

SEQ ID NO: 1517113 - RNA, 19 nt, Homo sapiens
  misc_RNA (1)...(19): siRNA sense strand
guaacggagaccaucauuu

SEQ ID NO: 1517114 - RNA, 19 nt, Homo sapiens
  misc_RNA (1)...(19): siRNA sense strand
ucaaaucagaguaacaguu

SEQ ID NO: 1517115 - RNA, 19 nt, Homo sapiens
  misc_RNA (1)...(19): siRNA sense strand
guuaaggauguacccaaua

SEQ ID NO: 1517116 - RNA, 19 nt, Homo sapiens
  misc_RNA (1)...(19): siRNA sense strand
ucagaaggauacaguucau

SEQ ID NO: 1517117 - RNA, 19 nt, Homo sapiens
  misc_RNA (1)...(19): siRNA sense strand
acaaaccggucacaaacuc

SEQ ID NO: 1517118 - RNA, 19 nt, Homo sapiens
  misc_RNA (1)...(19): siRNA sense strand
gcaaaaccacagccuaaaa

SEQ ID NO: 1517119 - RNA, 19 nt, Homo sapiens
  misc_RNA (1)...(19): siRNA sense strand
ucaagacggugggcucugu

SEQ ID NO: 1517120 - RNA, 19 nt, Homo sapiens
  misc_RNA (1)...(19): siRNA sense strand
gcacugacugguguccuuu

SEQ ID NO: 1517121 - RNA, 19 nt, Homo sapiens
  misc_RNA (1)...(19): siRNA sense strand
gcaacggugggacaaaugu

SEQ ID NO: 1517122 - RNA, 19 nt, Homo sapiens
  misc_RNA (1)...(19): siRNA sense strand
gagucgaaacaaacaauga

SEQ ID NO: 1517123 - RNA, 19 nt, Homo sapiens
  misc_RNA (1)...(19): siRNA sense strand
cgacgacuuugcucacuac

SEQ ID NO: 1517124 - RNA, 19 nt, Homo sapiens
  misc_RNA (1)...(19): siRNA sense strand
ggucuggucucaggacaag

SEQ ID NO: 1517125 - RNA, 19 nt, Homo sapiens
  misc_RNA (1)...(19): siRNA sense strand
aagcauaacauggacauug

SEQ ID NO: 1517126 - RNA, 19 nt, Homo sapiens
  misc_RNA (1)...(19): siRNA sense strand
gacuuugagcccuaccuua

SEQ ID NO: 1517127 - RNA, 19 nt, Homo sapiens
  misc_RNA (1)...(19): siRNA sense strand
ggucucaggacaaguggaa

SEQ ID NO: 1517128 - RNA, 19 nt, Homo sapiens
  misc_RNA (1)...(19): siRNA sense strand
ggcacugacugguguccuu

SEQ ID NO: 1517129 - RNA, 19 nt, Homo sapiens
  misc_RNA (1)...(19): siRNA sense strand
caggaggugcccuuagaaa

SEQ ID NO: 1517130 - RNA, 19 nt, Homo sapiens
  misc_RNA (1)...(19): siRNA sense strand
gcacaucaggcuggagaau

SEQ ID NO: 1517131 - RNA, 19 nt, Homo sapiens
  misc_RNA (1)...(19): siRNA sense strand
ggacaagauaauaaaguac

SEQ ID NO: 1517132 - RNA, 19 nt, Homo sapiens
  misc_RNA (1)...(19): siRNA sense strand
gggacccuccgauuccaua

SEQ ID NO: 1517133 - RNA, 19 nt, Homo sapiens
  misc_RNA (1)...(19): siRNA sense strand
caucagaaggauacaguuc

SEQ ID NO: 1517134 - RNA, 19 nt, Homo sapiens
  misc_RNA (1)...(19): siRNA sense strand
gcucaaccgcaguaucaga

SEQ ID NO: 1517135 - RNA, 19 nt, Homo sapiens
  misc_RNA (1)...(19): siRNA sense strand
ucacagcuacaacccgaaa

SEQ ID NO: 1517136 - RNA, 19 nt, Homo sapiens
  misc_RNA (1)...(19): siRNA sense strand
cacaucaggcuggagaaua

SEQ ID NO: 1517137 - RNA, 19 nt, Homo sapiens
  misc_RNA (1)...(19): siRNA sense strand
ggagguggugcgcaaggaa

SEQ ID NO: 1517138 - RNA, 19 nt, Homo sapiens
  misc_RNA (1)...(19): siRNA sense strand
gaggcuccguggucuacug

SEQ ID NO: 1517139 - RNA, 19 nt, Homo sapiens
  misc_RNA (1)...(19): siRNA sense strand
uggcaacggugggacaaau

SEQ ID NO: 1517140 - RNA, 19 nt, Homo sapiens
  misc_RNA (1)...(19): siRNA sense strand
uguuaaggauguacccaau

SEQ ID NO: 1517141 - RNA, 19 nt, Homo sapiens
  misc_RNA (1)...(19): siRNA sense strand
ucgacgacuuugcucacua

SEQ ID NO: 1517142 - RNA, 19 nt, Homo sapiens
  misc_RNA (1)...(19): siRNA sense strand
uggcucaaccgcaguauca

SEQ ID NO: 1517143 - RNA, 19 nt, Homo sapiens
  misc_RNA (1)...(19): siRNA sense strand
aggauacaguucaugacaa

SEQ ID NO: 1517144 - RNA, 19 nt, Homo sapiens
  misc_RNA (1)...(19): siRNA sense strand
gcagagucgaaacaaacaa

SEQ ID NO: 1517145 - RNA, 19 nt, Homo sapiens
  misc_RNA (1)...(19): siRNA sense strand
ugaaaacccugcguucuca

SEQ ID NO: 1517146 - RNA, 19 nt, Homo sapiens
  misc_RNA (1)...(19): siRNA sense strand
uggcagcgauagcaacucu

SEQ ID NO: 1517147 - RNA, 19 nt, Homo sapiens
  misc_RNA (1)...(19): siRNA sense strand
caaaaccacagccuaaaau

SEQ ID NO: 1517148 - RNA, 19 nt, Homo sapiens
  misc_RNA (1)...(19): siRNA sense strand
acccagagcuccgcguaug

SEQ ID NO: 1517149 - RNA, 19 nt, Homo sapiens
  misc_RNA (1)...(19): siRNA sense strand
ccuacggacagcucaguaa

SEQ ID NO: 1517150 - RNA, 19 nt, Homo sapiens
  misc_RNA (1)...(19): siRNA sense strand
aauuaucaguuccuacaag

SEQ ID NO: 1517151 - RNA, 19 nt, Homo sapiens
  misc_RNA (1)...(19): siRNA sense strand
ccaggaggugcccuuagaa

SEQ ID NO: 1517152 - RNA, 19 nt, Homo sapiens
  misc_RNA (1)...(19): siRNA sense strand
aguacaaaaugguucguua

SEQ ID NO: 1517153 - RNA, 19 nt, Homo sapiens
  misc_RNA (1)...(19): siRNA sense strand
cuccacccauaaagcauaa

SEQ ID NO: 1517154 - RNA, 19 nt, Homo sapiens
  misc_RNA (1)...(19): siRNA sense strand
ccuccacccauaaagcaua

SEQ ID NO: 1517155 - RNA, 19 nt, Homo sapiens
  misc_RNA (1)...(19): siRNA sense strand
uaaagcauaacauggacau

SEQ ID NO: 1517156 - RNA, 19 nt, Homo sapiens
  misc_RNA (1)...(19): siRNA sense strand
gaaggauacaguucaugac

SEQ ID NO: 1517157 - RNA, 19 nt, Homo sapiens
  misc_RNA (1)...(19): siRNA sense strand
guggacacccagagaacaa

SEQ ID NO: 1517158 - RNA, 19 nt, Homo sapiens
  misc_RNA (1)...(19): siRNA sense strand
aaugguucguuacaucaga

SEQ ID NO: 1517159 - RNA, 19 nt, Homo sapiens
  misc_RNA (1)...(19): siRNA sense strand
gacaacaaaccggucacaa

SEQ ID NO: 1517160 - RNA, 19 nt, Homo sapiens
  misc_RNA (1)...(19): siRNA sense strand
gauuuauccugaacucuua

SEQ ID NO: 1517161 - RNA, 19 nt, Homo sapiens
  misc_RNA (1)...(19): siRNA sense strand
gagaaacucaucaggauuu

SEQ ID NO: 1517162 - RNA, 19 nt, Homo sapiens
  misc_RNA (1)...(19): siRNA sense strand
gaggaggauucgaagauga

SEQ ID NO: 1517163 - RNA, 19 nt, Homo sapiens
  misc_RNA (1)...(19): siRNA sense strand
cagagaaacucaucaggau

SEQ ID NO: 1517164 - RNA, 19 nt, Homo sapiens
  misc_RNA (1)...(19): siRNA sense strand
ucaggaaccucuccaagau

SEQ ID NO: 1517165 - RNA, 19 nt, Homo sapiens
  misc_RNA (1)...(19): siRNA sense strand
ggaggaggauucgaagaug

SEQ ID NO: 1517166 - RNA, 19 nt, Homo sapiens
  misc_RNA (1)...(19): siRNA sense strand
gcccugagguguuucugaa

SEQ ID NO: 1517167 - RNA, 19 nt, Homo sapiens
  misc_RNA (1)...(19): siRNA sense strand
gaagaugacgcgacugauc

SEQ ID NO: 1517168 - RNA, 19 nt, Homo sapiens
  misc_RNA (1)...(19): siRNA sense strand
caugacggauccagagaaa

SEQ ID NO: 1517169 - RNA, 19 nt, Homo sapiens
  misc_RNA (1)...(19): siRNA sense strand
ucaccuggcugcagugugu

SEQ ID NO: 1517170 - RNA, 19 nt, Homo sapiens
  misc_RNA (1)...(19): siRNA sense strand
gcucagcgacuguuugaug

SEQ ID NO: 1517171 - RNA, 19 nt, Homo sapiens
  misc_RNA (1)...(19): siRNA sense strand
ugacgcgacugaucucaug

SEQ ID NO: 1517172 - RNA, 19 nt, Homo sapiens
  misc_RNA (1)...(19): siRNA sense strand
agaaacucaucaggauuua

SEQ ID NO: 1517173 - RNA, 19 nt, Homo sapiens
  misc_RNA (1)...(19): siRNA sense strand
gcaaaauccuacuaucaga

SEQ ID NO: 1517174 - RNA, 19 nt, Homo sapiens
  misc_RNA (1)...(19): siRNA sense strand
gaaggacaagcuggacuuu

SEQ ID NO: 1517175 - RNA, 19 nt, Homo sapiens
  misc_RNA (1)...(19): siRNA sense strand
uagaugacguguccaacga

SEQ ID NO: 1517176 - RNA, 19 nt, Homo sapiens
  misc_RNA (1)...(19): siRNA sense strand
guccaaaguuguaccagau

SEQ ID NO: 1517177 - RNA, 19 nt, Homo sapiens
  misc_RNA (1)...(19): siRNA sense strand
uaucgacgcugaagaagac

SEQ ID NO: 1517178 - RNA, 19 nt, Homo sapiens
  misc_RNA (1)...(19): siRNA sense strand
caggcgcagugauccauuu

SEQ ID NO: 1517179 - RNA, 19 nt, Homo sapiens
  misc_RNA (1)...(19): siRNA sense strand
cugaucucaugccguauua

SEQ ID NO: 1517180 - RNA, 19 nt, Homo sapiens
  misc_RNA (1)...(19): siRNA sense strand
ucgagacggugacaaagga

SEQ ID NO: 1517181 - RNA, 19 nt, Homo sapiens
  misc_RNA (1)...(19): siRNA sense strand
aggaggaccugaaggacaa

SEQ ID NO: 1517182 - RNA, 19 nt, Homo sapiens
  misc_RNA (1)...(19): siRNA sense strand
gaucucaugccguauuauc

SEQ ID NO: 1517183 - RNA, 19 nt, Homo sapiens
  misc_RNA (1)...(19): siRNA sense strand
acgacgugcuuucccauuu

SEQ ID NO: 1517184 - RNA, 19 nt, Homo sapiens
  misc_RNA (1)...(19): siRNA sense strand
ucagagcaguguccaguac

SEQ ID NO: 1517185 - RNA, 19 nt, Homo sapiens
  misc_RNA (1)...(19): siRNA sense strand
cccauuacccuccacauga

SEQ ID NO: 1517186 - RNA, 19 nt, Homo sapiens
  misc_RNA (1)...(19): siRNA sense strand
gcaguguccaguaccugua

SEQ ID NO: 1517187 - RNA, 19 nt, Homo sapiens
  misc_RNA (1)...(19): siRNA sense strand
aaacucaucaggauuuauc

SEQ ID NO: 1517188 - RNA, 19 nt, Homo sapiens
  misc_RNA (1)...(19): siRNA sense strand
gccugaagcuguucuccau

SEQ ID NO: 1517189 - RNA, 19 nt, Homo sapiens
  misc_RNA (1)...(19): siRNA sense strand
ggacgugcugcugacaaua

SEQ ID NO: 1517190 - RNA, 19 nt, Homo sapiens
  misc_RNA (1)...(19): siRNA sense strand
cagccgugguccaaaguug

SEQ ID NO: 1517191 - RNA, 19 nt, Homo sapiens
  misc_RNA (1)...(19): siRNA sense strand
ccaaaguuguaccagaucu

SEQ ID NO: 1517192 - RNA, 19 nt, Homo sapiens
  misc_RNA (1)...(19): siRNA sense strand
gcaugacggauccagagaa

SEQ ID NO: 1517193 - RNA, 19 nt, Homo sapiens
  misc_RNA (1)...(19): siRNA sense strand
gaaugaggaggaccugaag

SEQ ID NO: 1517194 - RNA, 19 nt, Homo sapiens
  misc_RNA (1)...(19): siRNA sense strand
ccauuacccuccacaugag

SEQ ID NO: 1517195 - RNA, 19 nt, Homo sapiens
  misc_RNA (1)...(19): siRNA sense strand
cgacgugcuuucccauuuu

SEQ ID NO: 1517196 - RNA, 19 nt, Homo sapiens
  misc_RNA (1)...(19): siRNA sense strand
agaaugaggaggaccugaa

SEQ ID NO: 1517197 - RNA, 19 nt, Homo sapiens
  misc_RNA (1)...(19): siRNA sense strand
ucaagggugccaacgcaaa

SEQ ID NO: 1517198 - RNA, 19 nt, Homo sapiens
  misc_RNA (1)...(19): siRNA sense strand
gaaacucaucaggauuuau

SEQ ID NO: 1517199 - RNA, 19 nt, Homo sapiens
  misc_RNA (1)...(19): siRNA sense strand
ugacggauccagagaaacu

SEQ ID NO: 1517200 - RNA, 19 nt, Homo sapiens
  misc_RNA (1)...(19): siRNA sense strand
ccacggacaccaucaacuc

SEQ ID NO: 1517201 - RNA, 19 nt, Homo sapiens
  misc_RNA (1)...(19): siRNA sense strand
gggagcucgucuucaggaa

SEQ ID NO: 1517202 - RNA, 19 nt, Homo sapiens
  misc_RNA (1)...(19): siRNA sense strand
gccguauuaucaacacguu

SEQ ID NO: 1517203 - RNA, 19 nt, Homo sapiens
  misc_RNA (1)...(19): siRNA sense strand
cucagcgacuguuugauga

SEQ ID NO: 1517204 - RNA, 19 nt, Homo sapiens
  misc_RNA (1)...(19): siRNA sense strand
ucgaagaugacgcgacuga

SEQ ID NO: 1517205 - RNA, 19 nt, Homo sapiens
  misc_RNA (1)...(19): siRNA sense strand
aggacaagcuggacuuugc

SEQ ID NO: 1517206 - RNA, 19 nt, Homo sapiens
  misc_RNA (1)...(19): siRNA sense strand
guaccgagaguugcugguu

SEQ ID NO: 1517207 - RNA, 19 nt, Homo sapiens
  misc_RNA (1)...(19): siRNA sense strand
ugaaggacaagcuggacuu

SEQ ID NO: 1517208 - RNA, 19 nt, Homo sapiens
  misc_RNA (1)...(19): siRNA sense strand
gcagcugccaggaccucua

SEQ ID NO: 1517209 - RNA, 19 nt, Homo sapiens
  misc_RNA (1)...(19): siRNA sense strand
gacgugcugcugacaauag

SEQ ID NO: 1517210 - RNA, 19 nt, Homo sapiens
  misc_RNA (1)...(19): siRNA sense strand
gccgugguccaaaguugua

SEQ ID NO: 1517211 - RNA, 19 nt, Homo sapiens
  misc_RNA (1)...(19): siRNA sense strand
ugcaggcucuggugucugu

SEQ ID NO: 1517212 - RNA, 19 nt, Homo sapiens
  misc_RNA (1)...(19): siRNA sense strand
cggaggccgucauccacaa

SEQ ID NO: 1517213 - RNA, 19 nt, Homo sapiens
  misc_RNA (1)...(19): siRNA sense strand
uggacgugcugcugacaau

SEQ ID NO: 1517214 - RNA, 19 nt, Homo sapiens
  misc_RNA (1)...(19): siRNA sense strand
gcagucggagucucugauc

SEQ ID NO: 1517215 - RNA, 19 nt, Homo sapiens
  misc_RNA (1)...(19): siRNA sense strand
ucucaugccguauuaucaa

SEQ ID NO: 1517216 - RNA, 19 nt, Homo sapiens
  misc_RNA (1)...(19): siRNA sense strand
gauacgggacgugcaggaa

SEQ ID NO: 1517217 - RNA, 19 nt, Homo sapiens
  misc_RNA (1)...(19): siRNA sense strand
gaucuuaucgacgcugaag

SEQ ID NO: 1517218 - RNA, 19 nt, Homo sapiens
  misc_RNA (1)...(19): siRNA sense strand
ugacguguccaacgaugug

SEQ ID NO: 1517219 - RNA, 19 nt, Homo sapiens
  misc_RNA (1)...(19): siRNA sense strand
cagugcaccugcuggaucu

SEQ ID NO: 1517220 - RNA, 19 nt, Homo sapiens
  misc_RNA (1)...(19): siRNA sense strand
agagaaacucaucaggauu

SEQ ID NO: 1517221 - RNA, 19 nt, Homo sapiens
  misc_RNA (1)...(19): siRNA sense strand
uucugaagcugaucuuauc

SEQ ID NO: 1517222 - RNA, 19 nt, Homo sapiens
  misc_RNA (1)...(19): siRNA sense strand
guuacuccuucuuccacaa

SEQ ID NO: 1517223 - RNA, 19 nt, Homo sapiens
  misc_RNA (1)...(19): siRNA sense strand
gggaagaccugaccagaca

SEQ ID NO: 1517224 - RNA, 19 nt, Homo sapiens
  misc_RNA (1)...(19): siRNA sense strand
gcacagcccuggacaagac

SEQ ID NO: 1517225 - RNA, 19 nt, Homo sapiens
  misc_RNA (1)...(19): siRNA sense strand
gaacuggaccgaccaugug

SEQ ID NO: 1517226 - RNA, 19 nt, Homo sapiens
  misc_RNA (1)...(19): siRNA sense strand
ucaaggacguugccagaca

SEQ ID NO: 1517227 - RNA, 19 nt, Homo sapiens
  misc_RNA (1)...(19): siRNA sense strand
ccagggacaugaugaagca

SEQ ID NO: 1517228 - RNA, 19 nt, Homo sapiens
  misc_RNA (1)...(19): siRNA sense strand
gagggcagguucagagaag

SEQ ID NO: 1517229 - RNA, 19 nt, Homo sapiens
  misc_RNA (1)...(19): siRNA sense strand
ggccaaggcugugcucaag

SEQ ID NO: 1517230 - RNA, 19 nt, Homo sapiens
  misc_RNA (1)...(19): siRNA sense strand
agucggagcuuggcguuga

SEQ ID NO: 1517231 - RNA, 19 nt, Homo sapiens
  misc_RNA (1)...(19): siRNA sense strand
ggacguugccagacaguac

SEQ ID NO: 1517232 - RNA, 19 nt, Homo sapiens
  misc_RNA (1)...(19): siRNA sense strand
acucgaggcuggaggugaa

SEQ ID NO: 1517233 - RNA, 19 nt, Homo sapiens
  misc_RNA (1)...(19): siRNA sense strand
ucauguggcucagcaguca

SEQ ID NO: 1517234 - RNA, 19 nt, Homo sapiens
  misc_RNA (1)...(19): siRNA sense strand
ggacaugaaggaccguuac

SEQ ID NO: 1517235 - RNA, 19 nt, Homo sapiens
  misc_RNA (1)...(19): siRNA sense strand
gcacgcaugcugggcaaug

SEQ ID NO: 1517236 - RNA, 19 nt, Homo sapiens
  misc_RNA (1)...(19): siRNA sense strand
ugaaggaccguuacuacca

SEQ ID NO: 1517237 - RNA, 19 nt, Homo sapiens
  misc_RNA (1)...(19): siRNA sense strand
acgaggagcaggucaucua

SEQ ID NO: 1517238 - RNA, 19 nt, Homo sapiens
  misc_RNA (1)...(19): siRNA sense strand
caugaaggaccguuacuac

SEQ ID NO: 1517239 - RNA, 19 nt, Homo sapiens
  misc_RNA (1)...(19): siRNA sense strand
cggucaaaguccucacuga

SEQ ID NO: 1517240 - RNA, 19 nt, Homo sapiens
  misc_RNA (1)...(19): siRNA sense strand
ggaggugaaggacaugaag

SEQ ID NO: 1517241 - RNA, 19 nt, Homo sapiens
  misc_RNA (1)...(19): siRNA sense strand
uguggugugugacaacaug

SEQ ID NO: 1517242 - RNA, 19 nt, Homo sapiens
  misc_RNA (1)...(19): siRNA sense strand
gcugggcaauggugaagac

SEQ ID NO: 1517243 - RNA, 19 nt, Homo sapiens
  misc_RNA (1)...(19): siRNA sense strand
ggcuggaggugaaggacau

SEQ ID NO: 1517244 - RNA, 19 nt, Homo sapiens
  misc_RNA (1)...(19): siRNA sense strand
caaccuaccugcacaugug

SEQ ID NO: 1517245 - RNA, 19 nt, Homo sapiens
  misc_RNA (1)...(19): siRNA sense strand
gcaugcuucuggacuauuu

SEQ ID NO: 1517246 - RNA, 19 nt, Homo sapiens
  misc_RNA (1)...(19): siRNA sense strand
acacaaagauagucgguau

SEQ ID NO: 1517247 - RNA, 19 nt, Homo sapiens
  misc_RNA (1)...(19): siRNA sense strand
ccaagccacuggagacuga

SEQ ID NO: 1517248 - RNA, 19 nt, Homo sapiens
  misc_RNA (1)...(19): siRNA sense strand
agaaaucaauuccauguca

SEQ ID NO: 1517249 - RNA, 19 nt, Homo sapiens
  misc_RNA (1)...(19): siRNA sense strand
acaaaggcauggcgauauu

SEQ ID NO: 1517250 - RNA, 19 nt, Homo sapiens
  misc_RNA (1)...(19): siRNA sense strand
gcacuggccuguguuugug

SEQ ID NO: 1517251 - RNA, 19 nt, Homo sapiens
  misc_RNA (1)...(19): siRNA sense strand
guacaaaggcauggcgaua

SEQ ID NO: 1517252 - RNA, 19 nt, Homo sapiens
  misc_RNA (1)...(19): siRNA sense strand
gugaagauccugaaguuug

SEQ ID NO: 1517253 - RNA, 19 nt, Homo sapiens
  misc_RNA (1)...(19): siRNA sense strand
gauggucuguauagugauu

SEQ ID NO: 1517254 - RNA, 19 nt, Homo sapiens
  misc_RNA (1)...(19): siRNA sense strand
ugccaacacuggacaaauu

SEQ ID NO: 1517255 - RNA, 19 nt, Homo sapiens
  misc_RNA (1)...(19): siRNA sense strand
gcaaucugguggccauuca

SEQ ID NO: 1517256 - RNA, 19 nt, Homo sapiens
  misc_RNA (1)...(19): siRNA sense strand
gagggucagucagucauaa

SEQ ID NO: 1517257 - RNA, 19 nt, Homo sapiens
  misc_RNA (1)...(19): siRNA sense strand
ggucaacccagacaacauu

SEQ ID NO: 1517258 - RNA, 19 nt, Homo sapiens
  misc_RNA (1)...(19): siRNA sense strand
guuagcagcuucuucuaca

SEQ ID NO: 1517259 - RNA, 19 nt, Homo sapiens
  misc_RNA (1)...(19): siRNA sense strand
cugauggucuguauaguga

SEQ ID NO: 1517260 - RNA, 19 nt, Homo sapiens
  misc_RNA (1)...(19): siRNA sense strand
aaaggcauggcgauauuua

SEQ ID NO: 1517261 - RNA, 19 nt, Homo sapiens
  misc_RNA (1)...(19): siRNA sense strand
cgucagaaaucaauuccau

SEQ ID NO: 1517262 - RNA, 19 nt, Homo sapiens
  misc_RNA (1)...(19): siRNA sense strand
gcacgucagaaaucaauuc

SEQ ID NO: 1517263 - RNA, 19 nt, Homo sapiens
  misc_RNA (1)...(19): siRNA sense strand
gcagcaaccuggcccucau

SEQ ID NO: 1517264 - RNA, 19 nt, Homo sapiens
  misc_RNA (1)...(19): siRNA sense strand
ugaagauccugaaguuugg

SEQ ID NO: 1517265 - RNA, 19 nt, Homo sapiens
  misc_RNA (1)...(19): siRNA sense strand
ucgugaagauccugaaguu

SEQ ID NO: 1517266 - RNA, 19 nt, Homo sapiens
  misc_RNA (1)...(19): siRNA sense strand
cgucauaugugguguuggu

SEQ ID NO: 1517267 - RNA, 19 nt, Homo sapiens
  misc_RNA (1)...(19): siRNA sense strand
guaccuggcagaagugaug

SEQ ID NO: 1517268 - RNA, 19 nt, Homo sapiens
  misc_RNA (1)...(19): siRNA sense strand
ggagaccucaucacacugu

SEQ ID NO: 1517269 - RNA, 19 nt, Homo sapiens
  misc_RNA (1)...(19): siRNA sense strand
ggagggucagucagucaua

SEQ ID NO: 1517270 - RNA, 19 nt, Homo sapiens
  misc_RNA (1)...(19): siRNA sense strand
ucagaaaucaauuccaugu

SEQ ID NO: 1517271 - RNA, 19 nt, Homo sapiens
  misc_RNA (1)...(19): siRNA sense strand
cuaaacagcaguacaaagg

SEQ ID NO: 1517272 - RNA, 19 nt, Homo sapiens
  misc_RNA (1)...(19): siRNA sense strand
caacccguguucuacuuuc

SEQ ID NO: 1517273 - RNA, 19 nt, Homo sapiens
  misc_RNA (1)...(19): siRNA sense strand
cguggugucucgagaggaa

SEQ ID NO: 1517274 - RNA, 19 nt, Homo sapiens
  misc_RNA (1)...(19): siRNA sense strand
caaaggcauggcgauauuu

SEQ ID NO: 1517275 - RNA, 19 nt, Homo sapiens
  misc_RNA (1)...(19): siRNA sense strand
gagcagcacagagucauca

SEQ ID NO: 1517276 - RNA, 19 nt, Homo sapiens
  misc_RNA (1)...(19): siRNA sense strand
auaaacagccagaccuuug

SEQ ID NO: 1517277 - RNA, 19 nt, Homo sapiens
  misc_RNA (1)...(19): siRNA sense strand
caacauugccacgcccauu

SEQ ID NO: 1517278 - RNA, 19 nt, Homo sapiens
  misc_RNA (1)...(19): siRNA sense strand
gcugauggucuguauagug

SEQ ID NO: 1517279 - RNA, 19 nt, Homo sapiens
  misc_RNA (1)...(19): siRNA sense strand
ggucccaggccaucugauu

SEQ ID NO: 1517280 - RNA, 19 nt, Homo sapiens
  misc_RNA (1)...(19): siRNA sense strand
gcccacccaucgugaagau

SEQ ID NO: 1517281 - RNA, 19 nt, Homo sapiens
  misc_RNA (1)...(19): siRNA sense strand
cauaaacagccagaccuuu

SEQ ID NO: 1517282 - RNA, 19 nt, Homo sapiens
  misc_RNA (1)...(19): siRNA sense strand
acacuggacaaauugauga

SEQ ID NO: 1517283 - RNA, 19 nt, Homo sapiens
  misc_RNA (1)...(19): siRNA sense strand
ggucccauuugcucauuag

SEQ ID NO: 1517284 - RNA, 19 nt, Homo sapiens
  misc_RNA (1)...(19): siRNA sense strand
ugacaauccugcuguaccu

SEQ ID NO: 1517285 - RNA, 19 nt, Homo sapiens
  misc_RNA (1)...(19): siRNA sense strand
ugggagaccucaucacacu

SEQ ID NO: 1517286 - RNA, 19 nt, Homo sapiens
  misc_RNA (1)...(19): siRNA sense strand
cuacagacacaaagauagu

SEQ ID NO: 1517287 - RNA, 19 nt, Homo sapiens
  misc_RNA (1)...(19): siRNA sense strand
uaaacagccagaccuuugu

SEQ ID NO: 1517288 - RNA, 19 nt, Homo sapiens
  misc_RNA (1)...(19): siRNA sense strand
ccagccgaaucucaaccua

SEQ ID NO: 1517289 - RNA, 19 nt, Homo sapiens
  misc_RNA (1)...(19): siRNA sense strand
gccaacacuggacaaauug

SEQ ID NO: 1517290 - RNA, 19 nt, Homo sapiens
  misc_RNA (1)...(19): siRNA sense strand
uucacugacuggcuacuaa

SEQ ID NO: 1517291 - RNA, 19 nt, Homo sapiens
  misc_RNA (1)...(19): siRNA sense strand
gugcugauggucuguauag

SEQ ID NO: 1517292 - RNA, 19 nt, Homo sapiens
  misc_RNA (1)...(19): siRNA sense strand
agagcuggguggcaucuca

SEQ ID NO: 1517293 - RNA, 19 nt, Homo sapiens
  misc_RNA (1)...(19): siRNA sense strand
ccggcaugcuucuggacua

SEQ ID NO: 1517294 - RNA, 19 nt, Homo sapiens
  misc_RNA (1)...(19): siRNA sense strand
caacacuggacaaauugau

SEQ ID NO: 1517295 - RNA, 19 nt, Homo sapiens
  misc_RNA (1)...(19): siRNA sense strand
cacuguccauucuggcuuu

SEQ ID NO: 1517296 - RNA, 19 nt, Homo sapiens
  misc_RNA (1)...(19): siRNA sense strand
ccauggucaucagcaguuu

SEQ ID NO: 1517297 - RNA, 19 nt, Homo sapiens
  misc_RNA (1)...(19): siRNA sense strand
gcagcuucuucuacagaca

SEQ ID NO: 1517298 - RNA, 19 nt, Homo sapiens
  misc_RNA (1)...(19): siRNA sense strand
ccuguagccucagaagaug

SEQ ID NO: 1517299 - RNA, 19 nt, Homo sapiens
  misc_RNA (1)...(19): siRNA sense strand
cccuccagaugaagaaauu

SEQ ID NO: 1517300 - RNA, 19 nt, Homo sapiens
  misc_RNA (1)...(19): siRNA sense strand
uagcagcuucuucuacaga

SEQ ID NO: 1517301 - RNA, 19 nt, Homo sapiens
  misc_RNA (1)...(19): siRNA sense strand
ggucagucagucauaaaca

SEQ ID NO: 1517302 - RNA, 19 nt, Homo sapiens
  misc_RNA (1)...(19): siRNA sense strand
gucccaggccaucugauuu

SEQ ID NO: 1517303 - RNA, 19 nt, Homo sapiens
  misc_RNA (1)...(19): siRNA sense strand
cggcaugcuucuggacuau

SEQ ID NO: 1517304 - RNA, 19 nt, Homo sapiens
  misc_RNA (1)...(19): siRNA sense strand
gccauggucaucagcaguu

SEQ ID NO: 1517305 - RNA, 19 nt, Homo sapiens
  misc_RNA (1)...(19): siRNA sense strand
uguccucacugccuuccuu

SEQ ID NO: 1517306 - RNA, 19 nt, Homo sapiens
  misc_RNA (1)...(19): siRNA sense strand
caucuggaccucccuaacu

SEQ ID NO: 1517307 - RNA, 19 nt, Homo sapiens
  misc_RNA (1)...(19): siRNA sense strand
ccaacccguguucuacuuu

SEQ ID NO: 1517308 - RNA, 19 nt, Homo sapiens
  misc_RNA (1)...(19): siRNA sense strand
cccaacccguguucuacuu

SEQ ID NO: 1517309 - RNA, 19 nt, Homo sapiens
  misc_RNA (1)...(19): siRNA sense strand
uuucuaaacagcaguacaa

SEQ ID NO: 1517310 - RNA, 19 nt, Homo sapiens
  misc_RNA (1)...(19): siRNA sense strand
ucaucacacuguccauucu

SEQ ID NO: 1517311 - RNA, 19 nt, Homo sapiens
  misc_RNA (1)...(19): siRNA sense strand
gggugcugauggucuguau

SEQ ID NO: 1517312 - RNA, 19 nt, Homo sapiens
  misc_RNA (1)...(19): siRNA sense strand
uacaaaggcauggcgauau

SEQ ID NO: 1517313 - RNA, 19 nt, Homo sapiens
  misc_RNA (1)...(19): siRNA sense strand
ccuccuggcacucugcuuu

SEQ ID NO: 1517314 - RNA, 19 nt, Homo sapiens
  misc_RNA (1)...(19): siRNA sense strand
cagaccagccgaaucucaa

SEQ ID NO: 1517315 - RNA, 19 nt, Homo sapiens
  misc_RNA (1)...(19): siRNA sense strand
cuccacagcugccaacacu

SEQ ID NO: 1517316 - RNA, 19 nt, Homo sapiens
  misc_RNA (1)...(19): siRNA sense strand
gcagacauaugaagaaguu

SEQ ID NO: 1517317 - RNA, 19 nt, Homo sapiens
  misc_RNA (1)...(19): siRNA sense strand
gcugagaaguguuugcaua

SEQ ID NO: 1517318 - RNA, 19 nt, Homo sapiens
  misc_RNA (1)...(19): siRNA sense strand
cagaugaacuggaacagaa

SEQ ID NO: 1517319 - RNA, 19 nt, Homo sapiens
  misc_RNA (1)...(19): siRNA sense strand
auagucagauguacaguua

SEQ ID NO: 1517320 - RNA, 19 nt, Homo sapiens
  misc_RNA (1)...(19): siRNA sense strand
gauaacagcccugaguauu

SEQ ID NO: 1517321 - RNA, 19 nt, Homo sapiens
  misc_RNA (1)...(19): siRNA sense strand
caacaaggaguucauggaa

SEQ ID NO: 1517322 - RNA, 19 nt, Homo sapiens
  misc_RNA (1)...(19): siRNA sense strand
agucagauguacaguuaua

SEQ ID NO: 1517323 - RNA, 19 nt, Homo sapiens
  misc_RNA (1)...(19): siRNA sense strand
uaaagccaguggaauauag

SEQ ID NO: 1517324 - RNA, 19 nt, Homo sapiens
  misc_RNA (1)...(19): siRNA sense strand
gcaccaugcagacauauga

SEQ ID NO: 1517325 - RNA, 19 nt, Homo sapiens
  misc_RNA (1)...(19): siRNA sense strand
ugaagaaguuggagaugau

SEQ ID NO: 1517326 - RNA, 19 nt, Homo sapiens
  misc_RNA (1)...(19): siRNA sense strand
guguaaagccaguggaaua

SEQ ID NO: 1517327 - RNA, 19 nt, Homo sapiens
  misc_RNA (1)...(19): siRNA sense strand
cuacauggaugagaacuuc

SEQ ID NO: 1517328 - RNA, 19 nt, Homo sapiens
  misc_RNA (1)...(19): siRNA sense strand
agagaucccugccaugaug

SEQ ID NO: 1517329 - RNA, 19 nt, Homo sapiens
  misc_RNA (1)...(19): siRNA sense strand
ugagaaguguuugcauaaa

SEQ ID NO: 1517330 - RNA, 19 nt, Homo sapiens
  misc_RNA (1)...(19): siRNA sense strand
ccacagcugagaaguguuu

SEQ ID NO: 1517331 - RNA, 19 nt, Homo sapiens
  misc_RNA (1)...(19): siRNA sense strand
guaaagccaguggaauaua

SEQ ID NO: 1517332 - RNA, 19 nt, Homo sapiens
  misc_RNA (1)...(19): siRNA sense strand
gagaaguguuugcauaaaa

SEQ ID NO: 1517333 - RNA, 19 nt, Homo sapiens
  misc_RNA (1)...(19): siRNA sense strand
ggccacagcugagaagugu

SEQ ID NO: 1517334 - RNA, 19 nt, Homo sapiens
  misc_RNA (1)...(19): siRNA sense strand
uguagaauuugcagauuug

SEQ ID NO: 1517335 - RNA, 19 nt, Homo sapiens
  misc_RNA (1)...(19): siRNA sense strand
ugacugaggccaacaagga

SEQ ID NO: 1517336 - RNA, 19 nt, Homo sapiens
  misc_RNA (1)...(19): siRNA sense strand
gcuacaaccaguauuauca

SEQ ID NO: 1517337 - RNA, 19 nt, Homo sapiens
  misc_RNA (1)...(19): siRNA sense strand
ggaaacaaccagauaacag

SEQ ID NO: 1517338 - RNA, 19 nt, Homo sapiens
  misc_RNA (1)...(19): siRNA sense strand
aaacugaacuaugccacuu

SEQ ID NO: 1517339 - RNA, 19 nt, Homo sapiens
  misc_RNA (1)...(19): siRNA sense strand
gaugauggcaugcuguaug

SEQ ID NO: 1517340 - RNA, 19 nt, Homo sapiens
  misc_RNA (1)...(19): siRNA sense strand
gagaugaugcauuggaaga

SEQ ID NO: 1517341 - RNA, 19 nt, Homo sapiens
  misc_RNA (1)...(19): siRNA sense strand
gaauauagucagauguaca

SEQ ID NO: 1517342 - RNA, 19 nt, Homo sapiens
  misc_RNA (1)...(19): siRNA sense strand
ccagcuggcuacugcuuug

SEQ ID NO: 1517343 - RNA, 19 nt, Homo sapiens
  misc_RNA (1)...(19): siRNA sense strand
ucagagaucccugccauga

SEQ ID NO: 1517344 - RNA, 19 nt, Homo sapiens
  misc_RNA (1)...(19): siRNA sense strand
agagcaccaugcagacaua

SEQ ID NO: 1517345 - RNA, 19 nt, Homo sapiens
  misc_RNA (1)...(19): siRNA sense strand
ccaguggaauauagucaga

SEQ ID NO: 1517346 - RNA, 19 nt, Homo sapiens
  misc_RNA (1)...(19): siRNA sense strand
uggaauauagucagaugua

SEQ ID NO: 1517347 - RNA, 19 nt, Homo sapiens
  misc_RNA (1)...(19): siRNA sense strand
ggaauauagucagauguac

SEQ ID NO: 1517348 - RNA, 19 nt, Homo sapiens
  misc_RNA (1)...(19): siRNA sense strand
cagauaacagcccugagua

SEQ ID NO: 1517349 - RNA, 19 nt, Homo sapiens
  misc_RNA (1)...(19): siRNA sense strand
cacagugucuucagagauc

SEQ ID NO: 1517350 - RNA, 19 nt, Homo sapiens
  misc_RNA (1)...(19): siRNA sense strand
agagugaggagcuguauga

SEQ ID NO: 1517351 - RNA, 19 nt, Homo sapiens
  misc_RNA (1)...(19): siRNA sense strand
gagcguggcaaucccuaaa

SEQ ID NO: 1517352 - RNA, 19 nt, Homo sapiens
  misc_RNA (1)...(19): siRNA sense strand
guaugaauucuucgucaaa

SEQ ID NO: 1517353 - RNA, 19 nt, Homo sapiens
  misc_RNA (1)...(19): siRNA sense strand
ccacaccugcgaaacguuu

SEQ ID NO: 1517354 - RNA, 19 nt, Homo sapiens
  misc_RNA (1)...(19): siRNA sense strand
ccagauaacagcccugagu

SEQ ID NO: 1517355 - RNA, 19 nt, Homo sapiens
  misc_RNA (1)...(19): siRNA sense strand
aguuggagaugaugcauug

SEQ ID NO: 1517356 - RNA, 19 nt, Homo sapiens
  misc_RNA (1)...(19): siRNA sense strand
ugucuaaggguuaugguuu

SEQ ID NO: 1517357 - RNA, 19 nt, Homo sapiens
  misc_RNA (1)...(19): siRNA sense strand
uaacagcccugaguauucc

SEQ ID NO: 1517358 - RNA, 19 nt, Homo sapiens
  misc_RNA (1)...(19): siRNA sense strand
guacaguuauagcuacaac

SEQ ID NO: 1517359 - RNA, 19 nt, Homo sapiens
  misc_RNA (1)...(19): siRNA sense strand
auagcuacaaccaguauua

SEQ ID NO: 1517360 - RNA, 19 nt, Homo sapiens
  misc_RNA (1)...(19): siRNA sense strand
caugcuguaugaauucuuc

SEQ ID NO: 1517361 - RNA, 19 nt, Homo sapiens
  misc_RNA (1)...(19): siRNA sense strand
gauggcaugcuguaugaau

SEQ ID NO: 1517362 - RNA, 19 nt, Homo sapiens
  misc_RNA (1)...(19): siRNA sense strand
augaagaaguuggagauga

SEQ ID NO: 1517363 - RNA, 19 nt, Homo sapiens
  misc_RNA (1)...(19): siRNA sense strand
uggagaugaugcauuggaa

SEQ ID NO: 1517364 - RNA, 19 nt, Homo sapiens
  misc_RNA (1)...(19): siRNA sense strand
gaagaaguuggagaugaug

SEQ ID NO: 1517365 - RNA, 19 nt, Homo sapiens
  misc_RNA (1)...(19): siRNA sense strand
augauggcaugcuguauga

SEQ ID NO: 1517366 - RNA, 19 nt, Homo sapiens
  misc_RNA (1)...(19): siRNA sense strand
ccaacaaggaguucaugga

SEQ ID NO: 1517367 - RNA, 19 nt, Homo sapiens
  misc_RNA (1)...(19): siRNA sense strand
cugagaaguguuugcauaa

SEQ ID NO: 1517368 - RNA, 19 nt, Homo sapiens
  misc_RNA (1)...(19): siRNA sense strand
cuaugccacuuacgggaaa

SEQ ID NO: 1517369 - RNA, 19 nt, Homo sapiens
  misc_RNA (1)...(19): siRNA sense strand
ccuaaagcgagccguguaa

SEQ ID NO: 1517370 - RNA, 19 nt, Homo sapiens
  misc_RNA (1)...(19): siRNA sense strand
gggaaacaaccagauaaca

SEQ ID NO: 1517371 - RNA, 19 nt, Homo sapiens
  misc_RNA (1)...(19): siRNA sense strand
uguaugaauucuucgucaa

SEQ ID NO: 1517372 - RNA, 19 nt, Homo sapiens
  misc_RNA (1)...(19): siRNA sense strand
aacccuacauggaugagaa

SEQ ID NO: 1517373 - RNA, 19 nt, Homo sapiens
  misc_RNA (1)...(19): siRNA sense strand
ucacagaugaacuggaaca

SEQ ID NO: 1517374 - RNA, 19 nt, Homo sapiens
  misc_RNA (1)...(19): siRNA sense strand
ccagagccuuugccaccau

SEQ ID NO: 1517375 - RNA, 19 nt, Homo sapiens
  misc_RNA (1)...(19): siRNA sense strand
guggaugggcgaccuggaa

SEQ ID NO: 1517376 - RNA, 19 nt, Homo sapiens
  misc_RNA (1)...(19): siRNA sense strand
cuucaucuccagagccuuu

SEQ ID NO: 1517377 - RNA, 19 nt, Homo sapiens
  misc_RNA (1)...(19): siRNA sense strand
caugcagacauaugaagaa

SEQ ID NO: 1517378 - RNA, 19 nt, Homo sapiens
  misc_RNA (1)...(19): siRNA sense strand
uaaagcgagccguguaaag

SEQ ID NO: 1517379 - RNA, 19 nt, Homo sapiens
  misc_RNA (1)...(19): siRNA sense strand
auaacagcccugaguauuc

SEQ ID NO: 1517380 - RNA, 19 nt, Homo sapiens
  misc_RNA (1)...(19): siRNA sense strand
aguggaauauagucagaug

SEQ ID NO: 1517381 - RNA, 19 nt, Homo sapiens
  misc_RNA (1)...(19): siRNA sense strand
uguaaagccaguggaauau

SEQ ID NO: 1517382 - RNA, 19 nt, Homo sapiens
  misc_RNA (1)...(19): siRNA sense strand
gaggcaaggugguuuugga

SEQ ID NO: 1517383 - RNA, 19 nt, Homo sapiens
  misc_RNA (1)...(19): siRNA sense strand
uaugaauucuucgucaaag

SEQ ID NO: 1517384 - RNA, 19 nt, Homo sapiens
  misc_RNA (1)...(19): siRNA sense strand
cccugaguauucccucuuu

SEQ ID NO: 1517385 - RNA, 19 nt, Homo sapiens
  misc_RNA (1)...(19): siRNA sense strand
uacgggaaacaaccagaua

SEQ ID NO: 1517386 - RNA, 19 nt, Homo sapiens
  misc_RNA (1)...(19): siRNA sense strand
ccaugcagacauaugaaga

SEQ ID NO: 1517387 - RNA, 19 nt, Homo sapiens
  misc_RNA (1)...(19): siRNA sense strand
guuauagcuacaaccagua

SEQ ID NO: 1517388 - RNA, 19 nt, Homo sapiens
  misc_RNA (1)...(19): siRNA sense strand
gaccguaaugagcgucaaa

SEQ ID NO: 1517389 - RNA, 19 nt, Homo sapiens
  misc_RNA (1)...(19): siRNA sense strand
cuaaagcgagccguguaaa

SEQ ID NO: 1517390 - RNA, 19 nt, Homo sapiens
  misc_RNA (1)...(19): siRNA sense strand
uaucagcaguaccagaacu

SEQ ID NO: 1517391 - RNA, 19 nt, Homo sapiens
  misc_RNA (1)...(19): siRNA sense strand
agauguacaguuauagcua

SEQ ID NO: 1517392 - RNA, 19 nt, Homo sapiens
  misc_RNA (1)...(19): siRNA sense strand
cgaccuggaacccuacaug

SEQ ID NO: 1517393 - RNA, 19 nt, Homo sapiens
  misc_RNA (1)...(19): siRNA sense strand
agauaacagcccugaguau

SEQ ID NO: 1517394 - RNA, 19 nt, Homo sapiens
  misc_RNA (1)...(19): siRNA sense strand
gcuguaugacgcucugaug

SEQ ID NO: 1517395 - RNA, 19 nt, Homo sapiens
  misc_RNA (1)...(19): siRNA sense strand
gacauaugaagaaguugga

SEQ ID NO: 1517396 - RNA, 19 nt, Homo sapiens
  misc_RNA (1)...(19): siRNA sense strand
uauagucagauguacaguu

SEQ ID NO: 1517397 - RNA, 19 nt, Homo sapiens
  misc_RNA (1)...(19): siRNA sense strand
ugaauucuucgucaaaguc

SEQ ID NO: 1517398 - RNA, 19 nt, Homo sapiens
  misc_RNA (1)...(19): siRNA sense strand
caaguggcauccuacaaua

SEQ ID NO: 1517399 - RNA, 19 nt, Homo sapiens
  misc_RNA (1)...(19): siRNA sense strand
aaacgaaacuccaucuaug

SEQ ID NO: 1517400 - RNA, 19 nt, Homo sapiens
  misc_RNA (1)...(19): siRNA sense strand
gaaacgaaacuccaucuau

SEQ ID NO: 1517401 - RNA, 19 nt, Homo sapiens
  misc_RNA (1)...(19): siRNA sense strand
ugaaaccacucuacgcuaa

SEQ ID NO: 1517402 - RNA, 19 nt, Homo sapiens
  misc_RNA (1)...(19): siRNA sense strand
uacaauaccuacuaccaua

SEQ ID NO: 1517403 - RNA, 19 nt, Homo sapiens
  misc_RNA (1)...(19): siRNA sense strand
ccacgaggguuaugaggaa

SEQ ID NO: 1517404 - RNA, 19 nt, Homo sapiens
  misc_RNA (1)...(19): siRNA sense strand
gcuuaugacuuucagcauu

SEQ ID NO: 1517405 - RNA, 19 nt, Homo sapiens
  misc_RNA (1)...(19): siRNA sense strand
ccucuggacuuucugauga

SEQ ID NO: 1517406 - RNA, 19 nt, Homo sapiens
  misc_RNA (1)...(19): siRNA sense strand
gcuaaccggugccauuaug

SEQ ID NO: 1517407 - RNA, 19 nt, Homo sapiens
  misc_RNA (1)...(19): siRNA sense strand
gcugugaccucuacaacug

SEQ ID NO: 1517408 - RNA, 19 nt, Homo sapiens
  misc_RNA (1)...(19): siRNA sense strand
ccaggcagcuagagagguu

SEQ ID NO: 1517409 - RNA, 19 nt, Homo sapiens
  misc_RNA (1)...(19): siRNA sense strand
gucagcaguugccaagaua

SEQ ID NO: 1517410 - RNA, 19 nt, Homo sapiens
  misc_RNA (1)...(19): siRNA sense strand
ggaaacgaaacuccaucua

SEQ ID NO: 1517411 - RNA, 19 nt, Homo sapiens
  misc_RNA (1)...(19): siRNA sense strand
cugaggaggucauaaguuc

SEQ ID NO: 1517412 - RNA, 19 nt, Homo sapiens
  misc_RNA (1)...(19): siRNA sense strand
ccaaguggcauccuacaau

SEQ ID NO: 1517413 - RNA, 19 nt, Homo sapiens
  misc_RNA (1)...(19): siRNA sense strand
caccgugacuuugcuuauu

SEQ ID NO: 1517414 - RNA, 19 nt, Homo sapiens
  misc_RNA (1)...(19): siRNA sense strand
uccaacaguuucuuacuau

SEQ ID NO: 1517415 - RNA, 19 nt, Homo sapiens
  misc_RNA (1)...(19): siRNA sense strand
ccaccauccucaacauugu

SEQ ID NO: 1517416 - RNA, 19 nt, Homo sapiens
  misc_RNA (1)...(19): siRNA sense strand
cauaaguuccucaaccaaa

SEQ ID NO: 1517417 - RNA, 19 nt, Homo sapiens
  misc_RNA (1)...(19): siRNA sense strand
caaaccuuauugagaacaa

SEQ ID NO: 1517418 - RNA, 19 nt, Homo sapiens
  misc_RNA (1)...(19): siRNA sense strand
aucauuggaucaaaccuua

SEQ ID NO: 1517419 - RNA, 19 nt, Homo sapiens
  misc_RNA (1)...(19): siRNA sense strand
uuuaucagcuuugguguga

SEQ ID NO: 1517420 - RNA, 19 nt, Homo sapiens
  misc_RNA (1)...(19): siRNA sense strand
uggcuucuaucguguuuau

SEQ ID NO: 1517421 - RNA, 19 nt, Homo sapiens
  misc_RNA (1)...(19): siRNA sense strand
gguggcuucuaucguguuu

SEQ ID NO: 1517422 - RNA, 19 nt, Homo sapiens
  misc_RNA (1)...(19): siRNA sense strand
aaauacccauccaacaguu

SEQ ID NO: 1517423 - RNA, 19 nt, Homo sapiens
  misc_RNA (1)...(19): siRNA sense strand
guacuacgaauacaucgau

SEQ ID NO: 1517424 - RNA, 19 nt, Homo sapiens
  misc_RNA (1)...(19): siRNA sense strand
caagacaucacagaaggaa

SEQ ID NO: 1517425 - RNA, 19 nt, Homo sapiens
  misc_RNA (1)...(19): siRNA sense strand
ggacccagaaugugacugu

SEQ ID NO: 1517426 - RNA, 19 nt, Homo sapiens
  misc_RNA (1)...(19): siRNA sense strand
ccaacaguuucuuacuaug

SEQ ID NO: 1517427 - RNA, 19 nt, Homo sapiens
  misc_RNA (1)...(19): siRNA sense strand
gccauuauguucccaagac

SEQ ID NO: 1517428 - RNA, 19 nt, Homo sapiens
  misc_RNA (1)...(19): siRNA sense strand
uaucguguuuaucagcuuu

SEQ ID NO: 1517429 - RNA, 19 nt, Homo sapiens
  misc_RNA (1)...(19): siRNA sense strand
ugucagcaguugccaagau

SEQ ID NO: 1517430 - RNA, 19 nt, Homo sapiens
  misc_RNA (1)...(19): siRNA sense strand
gaaaauacccauccaacag

SEQ ID NO: 1517431 - RNA, 19 nt, Homo sapiens
  misc_RNA (1)...(19): siRNA sense strand
cauccuacaauaccuacua

SEQ ID NO: 1517432 - RNA, 19 nt, Homo sapiens
  misc_RNA (1)...(19): siRNA sense strand
cuuaugacuuucagcauuc

SEQ ID NO: 1517433 - RNA, 19 nt, Homo sapiens
  misc_RNA (1)...(19): siRNA sense strand
ccaccaggacccagaaugu

SEQ ID NO: 1517434 - RNA, 19 nt, Homo sapiens
  misc_RNA (1)...(19): siRNA sense strand
cuccucaccugccaccaua

SEQ ID NO: 1517435 - RNA, 19 nt, Homo sapiens
  misc_RNA (1)...(19): siRNA sense strand
gcugaggaggucauaaguu

SEQ ID NO: 1517436 - RNA, 19 nt, Homo sapiens
  misc_RNA (1)...(19): siRNA sense strand
gccaccauauucugcuuau

SEQ ID NO: 1517437 - RNA, 19 nt, Homo sapiens
  misc_RNA (1)...(19): siRNA sense strand
gacccagaaugugacugua

SEQ ID NO: 1517438 - RNA, 19 nt, Homo sapiens
  misc_RNA (1)...(19): siRNA sense strand
auccaacaguuucuuacua

SEQ ID NO: 1517439 - RNA, 19 nt, Homo sapiens
  misc_RNA (1)...(19): siRNA sense strand
gcuuauuguguccguguua

SEQ ID NO: 1517440 - RNA, 19 nt, Homo sapiens
  misc_RNA (1)...(19): siRNA sense strand
ggaagcugaggaggucaua

SEQ ID NO: 1517441 - RNA, 19 nt, Homo sapiens
  misc_RNA (1)...(19): siRNA sense strand
ggaguuauucucggcuuug

SEQ ID NO: 1517442 - RNA, 19 nt, Homo sapiens
  misc_RNA (1)...(19): siRNA sense strand
gcuucuaucguguuuauca

SEQ ID NO: 1517443 - RNA, 19 nt, Homo sapiens
  misc_RNA (1)...(19): siRNA sense strand
acaugucccugcccgauuc

SEQ ID NO: 1517444 - RNA, 19 nt, Homo sapiens
  misc_RNA (1)...(19): siRNA sense strand
gucauaaguuccucaacca

SEQ ID NO: 1517445 - RNA, 19 nt, Homo sapiens
  misc_RNA (1)...(19): siRNA sense strand
uaaccggugccauuauguu

SEQ ID NO: 1517446 - RNA, 19 nt, Homo sapiens
  misc_RNA (1)...(19): siRNA sense strand
gaucacugguggguacuac

SEQ ID NO: 1517447 - RNA, 19 nt, Homo sapiens
  misc_RNA (1)...(19): siRNA sense strand
gccaccauccucaacauug

SEQ ID NO: 1517448 - RNA, 19 nt, Homo sapiens
  misc_RNA (1)...(19): siRNA sense strand
caacaguuucuuacuaugc

SEQ ID NO: 1517449 - RNA, 19 nt, Homo sapiens
  misc_RNA (1)...(19): siRNA sense strand
cgaaacuccaucuauguca

SEQ ID NO: 1517450 - RNA, 19 nt, Homo sapiens
  misc_RNA (1)...(19): siRNA sense strand
gcauuccggugucuuucca

SEQ ID NO: 1517451 - RNA, 19 nt, Homo sapiens
  misc_RNA (1)...(19): siRNA sense strand
acgcuaaccggugccauua

SEQ ID NO: 1517452 - RNA, 19 nt, Homo sapiens
  misc_RNA (1)...(19): siRNA sense strand
uacaugugguccucaagug

SEQ ID NO: 1517453 - RNA, 19 nt, Homo sapiens
  misc_RNA (1)...(19): siRNA sense strand
cuuauuguguccguguuaa

SEQ ID NO: 1517454 - RNA, 19 nt, Homo sapiens
  misc_RNA (1)...(19): siRNA sense strand
ccaacucucccagcacuga

SEQ ID NO: 1517455 - RNA, 19 nt, Homo sapiens
  misc_RNA (1)...(19): siRNA sense strand
cauuggaucaaaccuuauu

SEQ ID NO: 1517456 - RNA, 19 nt, Homo sapiens
  misc_RNA (1)...(19): siRNA sense strand
gacaugucccugcccgauu

SEQ ID NO: 1517457 - RNA, 19 nt, Homo sapiens
  misc_RNA (1)...(19): siRNA sense strand
acacauugaucugaaacca

SEQ ID NO: 1517458 - RNA, 19 nt, Homo sapiens
  misc_RNA (1)...(19): siRNA sense strand
ucaaucggaggaaacgaaa

SEQ ID NO: 1517459 - RNA, 19 nt, Homo sapiens
  misc_RNA (1)...(19): siRNA sense strand
cggaguuauucucggcuuu

SEQ ID NO: 1517460 - RNA, 19 nt, Homo sapiens
  misc_RNA (1)...(19): siRNA sense strand
guuacucuccacccuacua

SEQ ID NO: 1517461 - RNA, 19 nt, Homo sapiens
  misc_RNA (1)...(19): siRNA sense strand
ucagcauuccggugucuuu

SEQ ID NO: 1517462 - RNA, 19 nt, Homo sapiens
  misc_RNA (1)...(19): siRNA sense strand
accgugacuuugcuuauug

SEQ ID NO: 1517463 - RNA, 19 nt, Homo sapiens
  misc_RNA (1)...(19): siRNA sense strand
aagauaucauccaccucua

SEQ ID NO: 1517464 - RNA, 19 nt, Homo sapiens
  misc_RNA (1)...(19): siRNA sense strand
gaagcugaggaggucauaa

SEQ ID NO: 1517465 - RNA, 19 nt, Homo sapiens
  misc_RNA (1)...(19): siRNA sense strand
uugaaaagccacaaccuua

SEQ ID NO: 1517466 - RNA, 19 nt, Homo sapiens
  misc_RNA (1)...(19): siRNA sense strand
ugacuguaggagguuauua

SEQ ID NO: 1517467 - RNA, 19 nt, Homo sapiens
  misc_RNA (1)...(19): siRNA sense strand
gaaaagccacaaccuuaca

SEQ ID NO: 1517468 - RNA, 19 nt, Homo sapiens
  misc_RNA (1)...(19): siRNA sense strand
cuacaauaccuacuaccau

SEQ ID NO: 1517469 - RNA, 19 nt, Homo sapiens
  misc_RNA (1)...(19): siRNA sense strand
caaccaccaggacccagaa

SEQ ID NO: 1517470 - RNA, 19 nt, Homo sapiens
  misc_RNA (1)...(19): siRNA sense strand
ccgauuccaugggagcauu

SEQ ID NO: 1517471 - RNA, 19 nt, Homo sapiens
  misc_RNA (1)...(19): siRNA sense strand
gcaguugccaagauaucau

SEQ ID NO: 1517472 - RNA, 19 nt, Homo sapiens
  misc_RNA (1)...(19): siRNA sense strand
ccauuauguucccaagaca

SEQ ID NO: 1517473 - RNA, 19 nt, Homo sapiens
  misc_RNA (1)...(19): siRNA sense strand
uauuguguccguguuaauu

SEQ ID NO: 1517474 - RNA, 19 nt, Homo sapiens
  misc_RNA (1)...(19): siRNA sense strand
caucacugccgcuguccuu

SEQ ID NO: 1517475 - RNA, 19 nt, Homo sapiens
  misc_RNA (1)...(19): siRNA sense strand
gcaaccggguggagaucac

SEQ ID NO: 1517476 - RNA, 19 nt, Homo sapiens
  misc_RNA (1)...(19): siRNA sense strand
gaacaaaucuccaaacuga

SEQ ID NO: 1517477 - RNA, 19 nt, Homo sapiens
  misc_RNA (1)...(19): siRNA sense strand
gaaguuaccucuccuaaga

SEQ ID NO: 1517478 - RNA, 19 nt, Homo sapiens
  misc_RNA (1)...(19): siRNA sense strand
gaacacaagcugaagauaa

SEQ ID NO: 1517479 - RNA, 19 nt, Homo sapiens
  misc_RNA (1)...(19): siRNA sense strand
gaagauaaccugaacauuc

SEQ ID NO: 1517480 - RNA, 19 nt, Homo sapiens
  misc_RNA (1)...(19): siRNA sense strand
gaagacagcuacccuaaag

SEQ ID NO: 1517481 - RNA, 19 nt, Homo sapiens
  misc_RNA (1)...(19): siRNA sense strand
ccaaauagccaagcucuua

SEQ ID NO: 1517482 - RNA, 19 nt, Homo sapiens
  misc_RNA (1)...(19): siRNA sense strand
gaaggaaacugaaagucau

SEQ ID NO: 1517483 - RNA, 19 nt, Homo sapiens
  misc_RNA (1)...(19): siRNA sense strand
ucauaaaccuccagaaaga

SEQ ID NO: 1517484 - RNA, 19 nt, Homo sapiens
  misc_RNA (1)...(19): siRNA sense strand
caaaugaaauugagaagag

SEQ ID NO: 1517485 - RNA, 19 nt, Homo sapiens
  misc_RNA (1)...(19): siRNA sense strand
aaagaguguuucagacuua

SEQ ID NO: 1517486 - RNA, 19 nt, Homo sapiens
  misc_RNA (1)...(19): siRNA sense strand
gaagaagcaucaagacagu

SEQ ID NO: 1517487 - RNA, 19 nt, Homo sapiens
  misc_RNA (1)...(19): siRNA sense strand
gaacaucagcguaagcuau

SEQ ID NO: 1517488 - RNA, 19 nt, Homo sapiens
  misc_RNA (1)...(19): siRNA sense strand
cuaaagcacuccaaggaaa

SEQ ID NO: 1517489 - RNA, 19 nt, Homo sapiens
  misc_RNA (1)...(19): siRNA sense strand
guaggaagcuaucauaaac

SEQ ID NO: 1517490 - RNA, 19 nt, Homo sapiens
  misc_RNA (1)...(19): siRNA sense strand
gaacaugauccuagaacaa

SEQ ID NO: 1517491 - RNA, 19 nt, Homo sapiens
  misc_RNA (1)...(19): siRNA sense strand
cagcagcuuucauccaaua

SEQ ID NO: 1517492 - RNA, 19 nt, Homo sapiens
  misc_RNA (1)...(19): siRNA sense strand
gaacuacugaaacaaauga

SEQ ID NO: 1517493 - RNA, 19 nt, Homo sapiens
  misc_RNA (1)...(19): siRNA sense strand
gagaagcagcacaguauaa

SEQ ID NO: 1517494 - RNA, 19 nt, Homo sapiens
  misc_RNA (1)...(19): siRNA sense strand
agaugaagcuguaugcaaa

SEQ ID NO: 1517495 - RNA, 19 nt, Homo sapiens
  misc_RNA (1)...(19): siRNA sense strand
gcaccaagaacuacugaaa

SEQ ID NO: 1517496 - RNA, 19 nt, Homo sapiens
  misc_RNA (1)...(19): siRNA sense strand
aagaugagcuggaccaaau

SEQ ID NO: 1517497 - RNA, 19 nt, Homo sapiens
  misc_RNA (1)...(19): siRNA sense strand
gaacaacuuccugguguaa

SEQ ID NO: 1517498 - RNA, 19 nt, Homo sapiens
  misc_RNA (1)...(19): siRNA sense strand
uagccaagcucuuauuuua

SEQ ID NO: 1517499 - RNA, 19 nt, Homo sapiens
  misc_RNA (1)...(19): siRNA sense strand
caagaacuacugaaacaaa

SEQ ID NO: 1517500 - RNA, 19 nt, Homo sapiens
  misc_RNA (1)...(19): siRNA sense strand
gagaagcaacuagaauaua

SEQ ID NO: 1517501 - RNA, 19 nt, Homo sapiens
  misc_RNA (1)...(19): siRNA sense strand
ggagagaacacaagcugaa

SEQ ID NO: 1517502 - RNA, 19 nt, Homo sapiens
  misc_RNA (1)...(19): siRNA sense strand
guucaaaacucaaagauga

SEQ ID NO: 1517503 - RNA, 19 nt, Homo sapiens
  misc_RNA (1)...(19): siRNA sense strand
aaugugaacuagaguguuu

SEQ ID NO: 1517504 - RNA, 19 nt, Homo sapiens
  misc_RNA (1)...(19): siRNA sense strand
uagagaagcaacuagaaua

SEQ ID NO: 1517505 - RNA, 19 nt, Homo sapiens
  misc_RNA (1)...(19): siRNA sense strand
gaaugguucucaacguaga

SEQ ID NO: 1517506 - RNA, 19 nt, Homo sapiens
  misc_RNA (1)...(19): siRNA sense strand
gaaugaaccaucucagaau

SEQ ID NO: 1517507 - RNA, 19 nt, Homo sapiens
  misc_RNA (1)...(19): siRNA sense strand
cgaccaccuuggcaaauuu

SEQ ID NO: 1517508 - RNA, 19 nt, Homo sapiens
  misc_RNA (1)...(19): siRNA sense strand
gagcauggagcaccaagaa

SEQ ID NO: 1517509 - RNA, 19 nt, Homo sapiens
  misc_RNA (1)...(19): siRNA sense strand
gaaugaaacaaaugagaga

SEQ ID NO: 1517510 - RNA, 19 nt, Homo sapiens
  misc_RNA (1)...(19): siRNA sense strand
ccagaaagaguauuuguuc

SEQ ID NO: 1517511 - RNA, 19 nt, Homo sapiens
  misc_RNA (1)...(19): siRNA sense strand
uaucauaaaccuccagaaa

SEQ ID NO: 1517512 - RNA, 19 nt, Homo sapiens
  misc_RNA (1)...(19): siRNA sense strand
caaaugaaggaaacugaaa

SEQ ID NO: 1517513 - RNA, 19 nt, Homo sapiens
  misc_RNA (1)...(19): siRNA sense strand
ccuaaaggaucaaagaaca

SEQ ID NO: 1517514 - RNA, 19 nt, Homo sapiens
  misc_RNA (1)...(19): siRNA sense strand
aagaucagaugaagcugua

SEQ ID NO: 1517515 - RNA, 19 nt, Homo sapiens
  misc_RNA (1)...(19): siRNA sense strand
cauagaaugugaacuagag

SEQ ID NO: 1517516 - RNA, 19 nt, Homo sapiens
  misc_RNA (1)...(19): siRNA sense strand
ccacauauccuucagaaac

SEQ ID NO: 1517517 - RNA, 19 nt, Homo sapiens
  misc_RNA (1)...(19): siRNA sense strand
caacaucgugacccacaua

SEQ ID NO: 1517518 - RNA, 19 nt, Homo sapiens
  misc_RNA (1)...(19): siRNA sense strand
gaguauuuguucccucauu

SEQ ID NO: 1517519 - RNA, 19 nt, Homo sapiens
  misc_RNA (1)...(19): siRNA sense strand
uaacgugacugagacuaga

SEQ ID NO: 1517520 - RNA, 19 nt, Homo sapiens
  misc_RNA (1)...(19): siRNA sense strand
ugaaaagcuugaugucuua

SEQ ID NO: 1517521 - RNA, 19 nt, Homo sapiens
  misc_RNA (1)...(19): siRNA sense strand
gcaacuagaauauacaaag

SEQ ID NO: 1517522 - RNA, 19 nt, Homo sapiens
  misc_RNA (1)...(19): siRNA sense strand
gagaaugaaacaaaugaga

SEQ ID NO: 1517523 - RNA, 19 nt, Homo sapiens
  misc_RNA (1)...(19): siRNA sense strand
cagagaagcagcacaguau

SEQ ID NO: 1517524 - RNA, 19 nt, Homo sapiens
  misc_RNA (1)...(19): siRNA sense strand
aagauaaccugaacauucu

SEQ ID NO: 1517525 - RNA, 19 nt, Homo sapiens
  misc_RNA (1)...(19): siRNA sense strand
agaagcaacuagaauauac

SEQ ID NO: 1517526 - RNA, 19 nt, Homo sapiens
  misc_RNA (1)...(19): siRNA sense strand
ugaaacaaaugaaggaaac

SEQ ID NO: 1517527 - RNA, 19 nt, Homo sapiens
  misc_RNA (1)...(19): siRNA sense strand
caacaggcccagcuucaga

SEQ ID NO: 1517528 - RNA, 19 nt, Homo sapiens
  misc_RNA (1)...(19): siRNA sense strand
aaugaaccaucucagaauu

SEQ ID NO: 1517529 - RNA, 19 nt, Homo sapiens
  misc_RNA (1)...(19): siRNA sense strand
ggaaauuaaaggagaacaa

SEQ ID NO: 1517530 - RNA, 19 nt, Homo sapiens
  misc_RNA (1)...(19): siRNA sense strand
aagaagaacaucagcguaa

SEQ ID NO: 1517531 - RNA, 19 nt, Homo sapiens
  misc_RNA (1)...(19): siRNA sense strand
gaggacaagauuaaacauu

SEQ ID NO: 1517532 - RNA, 19 nt, Homo sapiens
  misc_RNA (1)...(19): siRNA sense strand
gaauauacaaagagaaugg

SEQ ID NO: 1517533 - RNA, 19 nt, Homo sapiens
  misc_RNA (1)...(19): siRNA sense strand
caauacgaguucauaaucu

SEQ ID NO: 1517534 - RNA, 19 nt, Homo sapiens
  misc_RNA (1)...(19): siRNA sense strand
aaagcuugaugucuuagaa

SEQ ID NO: 1517535 - RNA, 19 nt, Homo sapiens
  misc_RNA (1)...(19): siRNA sense strand
cagcuacccuaaaggauca

SEQ ID NO: 1517536 - RNA, 19 nt, Homo sapiens
  misc_RNA (1)...(19): siRNA sense strand
guuuagagcuggagagaac

SEQ ID NO: 1517537 - RNA, 19 nt, Homo sapiens
  misc_RNA (1)...(19): siRNA sense strand
ugaaggaaacugaaaguca

SEQ ID NO: 1517538 - RNA, 19 nt, Homo sapiens
  misc_RNA (1)...(19): siRNA sense strand
ccagagaagcagcacagua

SEQ ID NO: 1517539 - RNA, 19 nt, Homo sapiens
  misc_RNA (1)...(19): siRNA sense strand
ugaacauucuuuccagaga

SEQ ID NO: 1517540 - RNA, 19 nt, Homo sapiens
  misc_RNA (1)...(19): siRNA sense strand
cguaagcuauuucaagaca

SEQ ID NO: 1517541 - RNA, 19 nt, Homo sapiens
  misc_RNA (1)...(19): siRNA sense strand
aaacuggacuugaaaucag

SEQ ID NO: 1517542 - RNA, 19 nt, Homo sapiens
  misc_RNA (1)...(19): siRNA sense strand
gauaaccugaacauucuuu

SEQ ID NO: 1517543 - RNA, 19 nt, Homo sapiens
  misc_RNA (1)...(19): siRNA sense strand
ccaauacgaguucauaauc

SEQ ID NO: 1517544 - RNA, 19 nt, Homo sapiens
  misc_RNA (1)...(19): siRNA sense strand
gcacaccaggagcugauaa

SEQ ID NO: 1517545 - RNA, 19 nt, Homo sapiens
  misc_RNA (1)...(19): siRNA sense strand
gaagcagcacaguauaaga

SEQ ID NO: 1517546 - RNA, 19 nt, Homo sapiens
  misc_RNA (1)...(19): siRNA sense strand
agaaugaaccaucucagaa

SEQ ID NO: 1517547 - RNA, 19 nt, Homo sapiens
  misc_RNA (1)...(19): siRNA sense strand
ugauggcaaugcaagauga

SEQ ID NO: 1517548 - RNA, 19 nt, Homo sapiens
  misc_RNA (1)...(19): siRNA sense strand
aagaaggccuuagagaaug

SEQ ID NO: 1517549 - RNA, 19 nt, Homo sapiens
  misc_RNA (1)...(19): siRNA sense strand
agaacaacuuccuggugua

SEQ ID NO: 1517550 - RNA, 19 nt, Homo sapiens
  misc_RNA (1)...(19): siRNA sense strand
caaacuggacuugaaauca

SEQ ID NO: 1517551 - RNA, 19 nt, Homo sapiens
  misc_RNA (1)...(19): siRNA sense strand
gaaacaaaugagagaaauc

SEQ ID NO: 1517552 - RNA, 19 nt, Homo sapiens
  misc_RNA (1)...(19): siRNA sense strand
agaaggccuuagagaauga

SEQ ID NO: 1517553 - RNA, 19 nt, Homo sapiens
  misc_RNA (1)...(19): siRNA sense strand
gagaacacaagcugaagau

SEQ ID NO: 1517554 - RNA, 19 nt, Homo sapiens
  misc_RNA (1)...(19): siRNA sense strand
uaucaugugggaacaguaa

SEQ ID NO: 1517555 - RNA, 19 nt, Homo sapiens
  misc_RNA (1)...(19): siRNA sense strand
gauaucaugugggaacagu

SEQ ID NO: 1517556 - RNA, 19 nt, Homo sapiens
  misc_RNA (1)...(19): siRNA sense strand
aacagcagcuuucauccaa

SEQ ID NO: 1517557 - RNA, 19 nt, Homo sapiens
  misc_RNA (1)...(19): siRNA sense strand
aguuaccucuccuaagaua

SEQ ID NO: 1517558 - RNA, 19 nt, Homo sapiens
  misc_RNA (1)...(19): siRNA sense strand
gaaauugagaagagaugau

SEQ ID NO: 1517559 - RNA, 19 nt, Homo sapiens
  misc_RNA (1)...(19): siRNA sense strand
caaauagccaagcucuuau

SEQ ID NO: 1517560 - RNA, 19 nt, Homo sapiens
  misc_RNA (1)...(19): siRNA sense strand
cuucagguauucagcaaga

SEQ ID NO: 1517561 - RNA, 19 nt, Homo sapiens
  misc_RNA (1)...(19): siRNA sense strand
cagaaugaaccaucucaga

SEQ ID NO: 1517562 - RNA, 19 nt, Homo sapiens
  misc_RNA (1)...(19): siRNA sense strand
gaugagcuggaccaaauga

SEQ ID NO: 1517563 - RNA, 19 nt, Homo sapiens
  misc_RNA (1)...(19): siRNA sense strand
accaagaacuacugaaaca

SEQ ID NO: 1517564 - RNA, 19 nt, Homo sapiens
  misc_RNA (1)...(19): siRNA sense strand
aagcagcacaguauaagaa

SEQ ID NO: 1517565 - RNA, 19 nt, Homo sapiens
  misc_RNA (1)...(19): siRNA sense strand
ucuccaaacugaagaagca

SEQ ID NO: 1517566 - RNA, 19 nt, Homo sapiens
  misc_RNA (1)...(19): siRNA sense strand
gaucagaugaagcuguaug

SEQ ID NO: 1517567 - RNA, 19 nt, Homo sapiens
  misc_RNA (1)...(19): siRNA sense strand
accaggagcugauaaagca

SEQ ID NO: 1517568 - RNA, 19 nt, Homo sapiens
  misc_RNA (1)...(19): siRNA sense strand
gaagcuguaugcaaaacuu

SEQ ID NO: 1517569 - RNA, 19 nt, Homo sapiens
  misc_RNA (1)...(19): siRNA sense strand
cauccaauacgaguucaua

SEQ ID NO: 1517570 - RNA, 19 nt, Homo sapiens
  misc_RNA (1)...(19): siRNA sense strand
aaaaguccauuuccauuug

SEQ ID NO: 1517571 - RNA, 19 nt, Homo sapiens
  misc_RNA (1)...(19): siRNA sense strand
auaaagagacgaccaccuu

SEQ ID NO: 1517572 - RNA, 19 nt, Homo sapiens
  misc_RNA (1)...(19): siRNA sense strand
ccuuagagaaugaaacaaa

SEQ ID NO: 1517573 - RNA, 19 nt, Homo sapiens
  misc_RNA (1)...(19): siRNA sense strand
aagaagacagcuacccuaa

SEQ ID NO: 1517574 - RNA, 19 nt, Homo sapiens
  misc_RNA (1)...(19): siRNA sense strand
ggacuugaaaucaguaaaa

SEQ ID NO: 1517575 - RNA, 19 nt, Homo sapiens
  misc_RNA (1)...(19): siRNA sense strand
ugucuucaguuucaaaucu

SEQ ID NO: 1517576 - RNA, 19 nt, Homo sapiens
  misc_RNA (1)...(19): siRNA sense strand
gaagaaguuucaagagauu

SEQ ID NO: 1517577 - RNA, 19 nt, Homo sapiens
  misc_RNA (1)...(19): siRNA sense strand
ggaggaaguugcuauuaaa

SEQ ID NO: 1517578 - RNA, 19 nt, Homo sapiens
  misc_RNA (1)...(19): siRNA sense strand
gaaaacagcuugaagaaga

SEQ ID NO: 1517579 - RNA, 19 nt, Homo sapiens
  misc_RNA (1)...(19): siRNA sense strand
ggaagaaguuucaagagau

SEQ ID NO: 1517580 - RNA, 19 nt, Homo sapiens
  misc_RNA (1)...(19): siRNA sense strand
gaauuacgcuuaccugaag

SEQ ID NO: 1517581 - RNA, 19 nt, Homo sapiens
  misc_RNA (1)...(19): siRNA sense strand
aauggagacuuucagauua

SEQ ID NO: 1517582 - RNA, 19 nt, Homo sapiens
  misc_RNA (1)...(19): siRNA sense strand
uaacagaagucuuggaucu

SEQ ID NO: 1517583 - RNA, 19 nt, Homo sapiens
  misc_RNA (1)...(19): siRNA sense strand
gcagucaguugaauacgaa

SEQ ID NO: 1517584 - RNA, 19 nt, Homo sapiens
  misc_RNA (1)...(19): siRNA sense strand
cagaggaccuuaugacuca

SEQ ID NO: 1517585 - RNA, 19 nt, Homo sapiens
  misc_RNA (1)...(19): siRNA sense strand
gaaaccagauaacagaagu

SEQ ID NO: 1517586 - RNA, 19 nt, Homo sapiens
  misc_RNA (1)...(19): siRNA sense strand
uguaguaaauggagacuuu

SEQ ID NO: 1517587 - RNA, 19 nt, Homo sapiens
  misc_RNA (1)...(19): siRNA sense strand
caucaggccucaucucaug

SEQ ID NO: 1517588 - RNA, 19 nt, Homo sapiens
  misc_RNA (1)...(19): siRNA sense strand
ccaguugaauuaccagaaa

SEQ ID NO: 1517589 - RNA, 19 nt, Homo sapiens
  misc_RNA (1)...(19): siRNA sense strand
agagagagcuggaggaagu

SEQ ID NO: 1517590 - RNA, 19 nt, Homo sapiens
  misc_RNA (1)...(19): siRNA sense strand
uggaggaaguugcuauuaa

SEQ ID NO: 1517591 - RNA, 19 nt, Homo sapiens
  misc_RNA (1)...(19): siRNA sense strand
gauuguacauaaagcguuu

SEQ ID NO: 1517592 - RNA, 19 nt, Homo sapiens
  misc_RNA (1)...(19): siRNA sense strand
ccagauaacagaagucuug

SEQ ID NO: 1517593 - RNA, 19 nt, Homo sapiens
  misc_RNA (1)...(19): siRNA sense strand
uaucaaacuuguaggagaa

SEQ ID NO: 1517594 - RNA, 19 nt, Homo sapiens
  misc_RNA (1)...(19): siRNA sense strand
ggucaacuauaacaagaug

SEQ ID NO: 1517595 - RNA, 19 nt, Homo sapiens
  misc_RNA (1)...(19): siRNA sense strand
caagaugauugugaagauu

SEQ ID NO: 1517596 - RNA, 19 nt, Homo sapiens
  misc_RNA (1)...(19): siRNA sense strand
ccucgaagaugcuguggaa

SEQ ID NO: 1517597 - RNA, 19 nt, Homo sapiens
  misc_RNA (1)...(19): siRNA sense strand
gaugcaauccugaguaaga

SEQ ID NO: 1517598 - RNA, 19 nt, Homo sapiens
  misc_RNA (1)...(19): siRNA sense strand
gagaaacucaagaugauug

SEQ ID NO: 1517599 - RNA, 19 nt, Homo sapiens
  misc_RNA (1)...(19): siRNA sense strand
caaguccaauguaaaugaa

SEQ ID NO: 1517600 - RNA, 19 nt, Homo sapiens
  misc_RNA (1)...(19): siRNA sense strand
gagaugaggaaguuaagaa

SEQ ID NO: 1517601 - RNA, 19 nt, Homo sapiens
  misc_RNA (1)...(19): siRNA sense strand
guaaaggagauuguacaua

SEQ ID NO: 1517602 - RNA, 19 nt, Homo sapiens
  misc_RNA (1)...(19): siRNA sense strand
ucaagaugauugugaagau

SEQ ID NO: 1517603 - RNA, 19 nt, Homo sapiens
  misc_RNA (1)...(19): siRNA sense strand
gaaacuaaaggacauuaag

SEQ ID NO: 1517604 - RNA, 19 nt, Homo sapiens
  misc_RNA (1)...(19): siRNA sense strand
ugacaaguccaauguaaau

SEQ ID NO: 1517605 - RNA, 19 nt, Homo sapiens
  misc_RNA (1)...(19): siRNA sense strand
aggaagaaguuucaagaga

SEQ ID NO: 1517606 - RNA, 19 nt, Homo sapiens
  misc_RNA (1)...(19): siRNA sense strand
gaagagaguaaaggagauu

SEQ ID NO: 1517607 - RNA, 19 nt, Homo sapiens
  misc_RNA (1)...(19): siRNA sense strand
ugagaaaccagauaacaga

SEQ ID NO: 1517608 - RNA, 19 nt, Homo sapiens
  misc_RNA (1)...(19): siRNA sense strand
aaauggagacuuucagauu

SEQ ID NO: 1517609 - RNA, 19 nt, Homo sapiens
  misc_RNA (1)...(19): siRNA sense strand
cccaugaaauuguaguaaa

SEQ ID NO: 1517610 - RNA, 19 nt, Homo sapiens
  misc_RNA (1)...(19): siRNA sense strand
guaaauggagacuuucaga

SEQ ID NO: 1517611 - RNA, 19 nt, Homo sapiens
  misc_RNA (1)...(19): siRNA sense strand
gagaguaaaggagauugua

SEQ ID NO: 1517612 - RNA, 19 nt, Homo sapiens
  misc_RNA (1)...(19): siRNA sense strand
gaucauggaaucucgaauc

SEQ ID NO: 1517613 - RNA, 19 nt, Homo sapiens
  misc_RNA (1)...(19): siRNA sense strand
ggacauuaaggaaauagug

SEQ ID NO: 1517614 - RNA, 19 nt, Homo sapiens
  misc_RNA (1)...(19): siRNA sense strand
cuaaaggacauuaaggaaa

SEQ ID NO: 1517615 - RNA, 19 nt, Homo sapiens
  misc_RNA (1)...(19): siRNA sense strand
gauaacagaagucuuggau

SEQ ID NO: 1517616 - RNA, 19 nt, Homo sapiens
  misc_RNA (1)...(19): siRNA sense strand
agacugagaaaccagauaa

SEQ ID NO: 1517617 - RNA, 19 nt, Homo sapiens
  misc_RNA (1)...(19): siRNA sense strand
aaaggaagaaguuucaaga

SEQ ID NO: 1517618 - RNA, 19 nt, Homo sapiens
  misc_RNA (1)...(19): siRNA sense strand
ugaccaugcuaucaaacuu

SEQ ID NO: 1517619 - RNA, 19 nt, Homo sapiens
  misc_RNA (1)...(19): siRNA sense strand
acgaugcaauccugaguaa

SEQ ID NO: 1517620 - RNA, 19 nt, Homo sapiens
  misc_RNA (1)...(19): siRNA sense strand
cuguugcuguccagaauua

SEQ ID NO: 1517621 - RNA, 19 nt, Homo sapiens
  misc_RNA (1)...(19): siRNA sense strand
uguggaaggugcugaugaa

SEQ ID NO: 1517622 - RNA, 19 nt, Homo sapiens
  misc_RNA (1)...(19): siRNA sense strand
uaaaccaguugaauuacca

SEQ ID NO: 1517623 - RNA, 19 nt, Homo sapiens
  misc_RNA (1)...(19): siRNA sense strand
ggacauggccaacuuugcu

SEQ ID NO: 1517624 - RNA, 19 nt, Homo sapiens
  misc_RNA (1)...(19): siRNA sense strand
aaacucaagaugauuguga

SEQ ID NO: 1517625 - RNA, 19 nt, Homo sapiens
  misc_RNA (1)...(19): siRNA sense strand
ggucuucugucccuacuac

SEQ ID NO: 1517626 - RNA, 19 nt, Homo sapiens
  misc_RNA (1)...(19): siRNA sense strand
cgagaggcgucaccaacau

SEQ ID NO: 1517627 - RNA, 19 nt, Homo sapiens
  misc_RNA (1)...(19): siRNA sense strand
gagaaaccagauaacagaa

SEQ ID NO: 1517628 - RNA, 19 nt, Homo sapiens
  misc_RNA (1)...(19): siRNA sense strand
ugaagaagagaguaaagga

SEQ ID NO: 1517629 - RNA, 19 nt, Homo sapiens
  misc_RNA (1)...(19): siRNA sense strand
ggccgacuuugcugagaaa

SEQ ID NO: 1517630 - RNA, 19 nt, Homo sapiens
  misc_RNA (1)...(19): siRNA sense strand
acaaguccaauguaaauga

SEQ ID NO: 1517631 - RNA, 19 nt, Homo sapiens
  misc_RNA (1)...(19): siRNA sense strand
ggucauacuagacugagaa

SEQ ID NO: 1517632 - RNA, 19 nt, Homo sapiens
  misc_RNA (1)...(19): siRNA sense strand
cauaugaccaugcuaucaa

SEQ ID NO: 1517633 - RNA, 19 nt, Homo sapiens
  misc_RNA (1)...(19): siRNA sense strand
ucuagcccaugaaauugua

SEQ ID NO: 1517634 - RNA, 19 nt, Homo sapiens
  misc_RNA (1)...(19): siRNA sense strand
ugacucagaaguauaaaca

SEQ ID NO: 1517635 - RNA, 19 nt, Homo sapiens
  misc_RNA (1)...(19): siRNA sense strand
gcuggcagaauucauuauu

SEQ ID NO: 1517636 - RNA, 19 nt, Homo sapiens
  misc_RNA (1)...(19): siRNA sense strand
cgaagaugcuguggaaggu

SEQ ID NO: 1517637 - RNA, 19 nt, Homo sapiens
  misc_RNA (1)...(19): siRNA sense strand
auggagacuuucagauuaa

SEQ ID NO: 1517638 - RNA, 19 nt, Homo sapiens
  misc_RNA (1)...(19): siRNA sense strand
uggcagaauucauuauugg

SEQ ID NO: 1517639 - RNA, 19 nt, Homo sapiens
  misc_RNA (1)...(19): siRNA sense strand
gaggaaguugcuauuaaau

SEQ ID NO: 1517640 - RNA, 19 nt, Homo sapiens
  misc_RNA (1)...(19): siRNA sense strand
gcugaugaagccuuacaaa

SEQ ID NO: 1517641 - RNA, 19 nt, Homo sapiens
  misc_RNA (1)...(19): siRNA sense strand
cgacuuugcugagaaacuc

SEQ ID NO: 1517642 - RNA, 19 nt, Homo sapiens
  misc_RNA (1)...(19): siRNA sense strand
gcucuagcccaugaaauug

SEQ ID NO: 1517643 - RNA, 19 nt, Homo sapiens
  misc_RNA (1)...(19): siRNA sense strand
agaauuacgcuuaccugaa

SEQ ID NO: 1517644 - RNA, 19 nt, Homo sapiens
  misc_RNA (1)...(19): siRNA sense strand
ccuuaugacucagaaguau

SEQ ID NO: 1517645 - RNA, 19 nt, Homo sapiens
  misc_RNA (1)...(19): siRNA sense strand
gaguaaaggagauuguaca

SEQ ID NO: 1517646 - RNA, 19 nt, Homo sapiens
  misc_RNA (1)...(19): siRNA sense strand
gaccaugcuaucaaacuug

SEQ ID NO: 1517647 - RNA, 19 nt, Homo sapiens
  misc_RNA (1)...(19): siRNA sense strand
ucaguccaguucagagaga

SEQ ID NO: 1517648 - RNA, 19 nt, Homo sapiens
  misc_RNA (1)...(19): siRNA sense strand
gcagcagucaguugaauac

SEQ ID NO: 1517649 - RNA, 19 nt, Homo sapiens
  misc_RNA (1)...(19): siRNA sense strand
ggccaacuuugcuaucagu

SEQ ID NO: 1517650 - RNA, 19 nt, Homo sapiens
  misc_RNA (1)...(19): siRNA sense strand
uaaagcaggaagcagagaa

SEQ ID NO: 1517651 - RNA, 19 nt, Homo sapiens
  misc_RNA (1)...(19): siRNA sense strand
guaggagaaaucaaagaga

SEQ ID NO: 1517652 - RNA, 19 nt, Homo sapiens
  misc_RNA (1)...(19): siRNA sense strand
cauaaagcguuuugggauu

SEQ ID NO: 1517653 - RNA, 19 nt, Homo sapiens
  misc_RNA (1)...(19): siRNA sense strand
auaugaccaugcuaucaaa

SEQ ID NO: 1517654 - RNA, 19 nt, Homo sapiens
  misc_RNA (1)...(19): siRNA sense strand
agaagagaguaaaggagau

SEQ ID NO: 1517655 - RNA, 19 nt, Homo sapiens
  misc_RNA (1)...(19): siRNA sense strand
gcccaugaaauuguaguaa

SEQ ID NO: 1517656 - RNA, 19 nt, Homo sapiens
  misc_RNA (1)...(19): siRNA sense strand
gcgagaggcgucaccaaca

SEQ ID NO: 1517657 - RNA, 19 nt, Homo sapiens
  misc_RNA (1)...(19): siRNA sense strand
ugagugugcagcuaaguga

SEQ ID NO: 1517658 - RNA, 19 nt, Homo sapiens
  misc_RNA (1)...(19): siRNA sense strand
cagauuaaaccaguugaau

SEQ ID NO: 1517659 - RNA, 19 nt, Homo sapiens
  misc_RNA (1)...(19): siRNA sense strand
uugcucgccuggucaacua

SEQ ID NO: 1517660 - RNA, 19 nt, Homo sapiens
  misc_RNA (1)...(19): siRNA sense strand
gacauggccaacuuugcua

SEQ ID NO: 1517661 - RNA, 19 nt, Homo sapiens
  misc_RNA (1)...(19): siRNA sense strand
cuggcagaauucauuauug

SEQ ID NO: 1517662 - RNA, 19 nt, Homo sapiens
  misc_RNA (1)...(19): siRNA sense strand
uaaauggagacuuucagau

SEQ ID NO: 1517663 - RNA, 19 nt, Homo sapiens
  misc_RNA (1)...(19): siRNA sense strand
gaauacgaaaggaagaagu

SEQ ID NO: 1517664 - RNA, 19 nt, Homo sapiens
  misc_RNA (1)...(19): siRNA sense strand
cuggucaacuauaacaaga

SEQ ID NO: 1517665 - RNA, 19 nt, Homo sapiens
  misc_RNA (1)...(19): siRNA sense strand
acaaggagaccgugcucaa

SEQ ID NO: 1517666 - RNA, 19 nt, Homo sapiens
  misc_RNA (1)...(19): siRNA sense strand
gcaccugcccuccuuccau

SEQ ID NO: 1517667 - RNA, 19 nt, Homo sapiens
  misc_RNA (1)...(19): siRNA sense strand
gcaggaaaaucaaaaucca

SEQ ID NO: 1517668 - RNA, 19 nt, Homo sapiens
  misc_RNA (1)...(19): siRNA sense strand
uguguuggaccuaaugaaa

SEQ ID NO: 1517669 - RNA, 19 nt, Homo sapiens
  misc_RNA (1)...(19): siRNA sense strand
gagaggcgucaccaacaug

SEQ ID NO: 1517670 - RNA, 19 nt, Homo sapiens
  misc_RNA (1)...(19): siRNA sense strand
gaccuuaugacucagaagu

SEQ ID NO: 1517671 - RNA, 19 nt, Homo sapiens
  misc_RNA (1)...(19): siRNA sense strand
uguuggaccuaaugaaagu

SEQ ID NO: 1517672 - RNA, 19 nt, Homo sapiens
  misc_RNA (1)...(19): siRNA sense strand
ucagagagagcuggaggaa

SEQ ID NO: 1517673 - RNA, 19 nt, Homo sapiens
  misc_RNA (1)...(19): siRNA sense strand
gcuggaggaaguugcuauu

SEQ ID NO: 1517674 - RNA, 19 nt, Homo sapiens
  misc_RNA (1)...(19): siRNA sense strand
ucaugcagcagucaguuga

SEQ ID NO: 1517675 - RNA, 19 nt, Homo sapiens
  misc_RNA (1)...(19): siRNA sense strand
ucaguugaauacgaaagga

SEQ ID NO: 1517676 - RNA, 19 nt, Homo sapiens
  misc_RNA (1)...(19): siRNA sense strand
ucagaacuuucaaggauaa

SEQ ID NO: 1517677 - RNA, 19 nt, Homo sapiens
  misc_RNA (1)...(19): siRNA sense strand
ccucagaacuuucaaggau

SEQ ID NO: 1517678 - RNA, 19 nt, Homo sapiens
  misc_RNA (1)...(19): siRNA sense strand
gaccagaacccucccaguu

SEQ ID NO: 1517679 - RNA, 19 nt, Homo sapiens
  misc_RNA (1)...(19): siRNA sense strand
aaggauaacuuccaaacau

SEQ ID NO: 1517680 - RNA, 19 nt, Homo sapiens
  misc_RNA (1)...(19): siRNA sense strand
gugcuacugcuacaaauaa

SEQ ID NO: 1517681 - RNA, 19 nt, Homo sapiens
  misc_RNA (1)...(19): siRNA sense strand
gcacccagcgaacuucaaa

SEQ ID NO: 1517682 - RNA, 19 nt, Homo sapiens
  misc_RNA (1)...(19): siRNA sense strand
ccaaacaugcaaaguagaa

SEQ ID NO: 1517683 - RNA, 19 nt, Homo sapiens
  misc_RNA (1)...(19): siRNA sense strand
gaacuuucaaggauaacuu

SEQ ID NO: 1517684 - RNA, 19 nt, Homo sapiens
  misc_RNA (1)...(19): siRNA sense strand
cuacaaauaaggcaaguau

SEQ ID NO: 1517685 - RNA, 19 nt, Homo sapiens
  misc_RNA (1)...(19): siRNA sense strand
ccuggccacucauagauaa

SEQ ID NO: 1517686 - RNA, 19 nt, Homo sapiens
  misc_RNA (1)...(19): siRNA sense strand
ggccacucauagauaauaa

SEQ ID NO: 1517687 - RNA, 19 nt, Homo sapiens
  misc_RNA (1)...(19): siRNA sense strand
gaaaugcaccacggacuuc

SEQ ID NO: 1517688 - RNA, 19 nt, Homo sapiens
  misc_RNA (1)...(19): siRNA sense strand
ccagaacccucccaguuac

SEQ ID NO: 1517689 - RNA, 19 nt, Homo sapiens
  misc_RNA (1)...(19): siRNA sense strand
ccaugauccuugcaacuau

SEQ ID NO: 1517690 - RNA, 19 nt, Homo sapiens
  misc_RNA (1)...(19): siRNA sense strand
gaagugacccaugauccuu

SEQ ID NO: 1517691 - RNA, 19 nt, Homo sapiens
  misc_RNA (1)...(19): siRNA sense strand
aggcaaguauaccuucuuu

SEQ ID NO: 1517692 - RNA, 19 nt, Homo sapiens
  misc_RNA (1)...(19): siRNA sense strand
gauccucaccucagaacuu

SEQ ID NO: 1517693 - RNA, 19 nt, Homo sapiens
  misc_RNA (1)...(19): siRNA sense strand
ggguaucagugaccucaug

SEQ ID NO: 1517694 - RNA, 19 nt, Homo sapiens
  misc_RNA (1)...(19): siRNA sense strand
ggacccacauccucuacca

SEQ ID NO: 1517695 - RNA, 19 nt, Homo sapiens
  misc_RNA (1)...(19): siRNA sense strand
acaaauaaggcaaguauac

SEQ ID NO: 1517696 - RNA, 19 nt, Homo sapiens
  misc_RNA (1)...(19): siRNA sense strand
accagaacccucccaguua

SEQ ID NO: 1517697 - RNA, 19 nt, Homo sapiens
  misc_RNA (1)...(19): siRNA sense strand
cucagaacuuucaaggaua

SEQ ID NO: 1517698 - RNA, 19 nt, Homo sapiens
  misc_RNA (1)...(19): siRNA sense strand
gccaacagccagcccaaug

SEQ ID NO: 1517699 - RNA, 19 nt, Homo sapiens
  misc_RNA (1)...(19): siRNA sense strand
cuuccaaacaugcaaagua

SEQ ID NO: 1517700 - RNA, 19 nt, Homo sapiens
  misc_RNA (1)...(19): siRNA sense strand
aggauaacuuccaaacaug

SEQ ID NO: 1517701 - RNA, 19 nt, Homo sapiens
  misc_RNA (1)...(19): siRNA sense strand
ggagauccucaccucagaa

SEQ ID NO: 1517702 - RNA, 19 nt, Homo sapiens
  misc_RNA (1)...(19): siRNA sense strand
uuccaaacaugcaaaguag

SEQ ID NO: 1517703 - RNA, 19 nt, Homo sapiens
  misc_RNA (1)...(19): siRNA sense strand
uuucaaggauaacuuccaa

SEQ ID NO: 1517704 - RNA, 19 nt, Homo sapiens
  misc_RNA (1)...(19): siRNA sense strand
caaugucgaauccagaaau

SEQ ID NO: 1517705 - RNA, 19 nt, Homo sapiens
  misc_RNA (1)...(19): siRNA sense strand
uaacuuccaaacaugcaaa

SEQ ID NO: 1517706 - RNA, 19 nt, Homo sapiens
  misc_RNA (1)...(19): siRNA sense strand
caaggauaacuuccaaaca

SEQ ID NO: 1517707 - RNA, 19 nt, Homo sapiens
  misc_RNA (1)...(19): siRNA sense strand
auaccauucugccguguug

SEQ ID NO: 1517708 - RNA, 19 nt, Homo sapiens
  misc_RNA (1)...(19): siRNA sense strand
uggagauccucaccucaga

SEQ ID NO: 1517709 - RNA, 19 nt, Homo sapiens
  misc_RNA (1)...(19): siRNA sense strand
aaugucgaauccagaaaug

SEQ ID NO: 1517710 - RNA, 19 nt, Homo sapiens
  misc_RNA (1)...(19): siRNA sense strand
cccaugauccuugcaacua

SEQ ID NO: 1517711 - RNA, 19 nt, Homo sapiens
  misc_RNA (1)...(19): siRNA sense strand
ccaacagccagcccaaugu

SEQ ID NO: 1517712 - RNA, 19 nt, Homo sapiens
  misc_RNA (1)...(19): siRNA sense strand
caugauccuugcaacuauc

SEQ ID NO: 1517713 - RNA, 19 nt, Homo sapiens
  misc_RNA (1)...(19): siRNA sense strand
caacagccagcccaauguc

SEQ ID NO: 1517714 - RNA, 19 nt, Homo sapiens
  misc_RNA (1)...(19): siRNA sense strand
agaaaugcaccacggacuu

SEQ ID NO: 1517715 - RNA, 19 nt, Homo sapiens
  misc_RNA (1)...(19): siRNA sense strand
gguaucagugaccucauga

SEQ ID NO: 1517716 - RNA, 19 nt, Homo sapiens
  misc_RNA (1)...(19): siRNA sense strand
cucaugagccagaggaauu

SEQ ID NO: 1517717 - RNA, 19 nt, Homo sapiens
  misc_RNA (1)...(19): siRNA sense strand
ucgugucccugacuucuca

SEQ ID NO: 1517718 - RNA, 19 nt, Homo sapiens
  misc_RNA (1)...(19): siRNA sense strand
gccuggccacucauagaua

SEQ ID NO: 1517719 - RNA, 19 nt, Homo sapiens
  misc_RNA (1)...(19): siRNA sense strand
gauaacuuccaaacaugca

SEQ ID NO: 1517720 - RNA, 19 nt, Homo sapiens
  misc_RNA (1)...(19): siRNA sense strand
ucaaggauaacuuccaaac

SEQ ID NO: 1517721 - RNA, 19 nt, Homo sapiens
  misc_RNA (1)...(19): siRNA sense strand
gaacugagauggaauacua

SEQ ID NO: 1517722 - RNA, 19 nt, Homo sapiens
  misc_RNA (1)...(19): siRNA sense strand
gaagagugaugcugaauuu

SEQ ID NO: 1517723 - RNA, 19 nt, Homo sapiens
  misc_RNA (1)...(19): siRNA sense strand
caaauaauguggcuucaaa

SEQ ID NO: 1517724 - RNA, 19 nt, Homo sapiens
  misc_RNA (1)...(19): siRNA sense strand
gaagauggaucacauaaag

SEQ ID NO: 1517725 - RNA, 19 nt, Homo sapiens
  misc_RNA (1)...(19): siRNA sense strand
ccagagagguuguaaauau

SEQ ID NO: 1517726 - RNA, 19 nt, Homo sapiens
  misc_RNA (1)...(19): siRNA sense strand
gaaagauucucaaggaaga

SEQ ID NO: 1517727 - RNA, 19 nt, Homo sapiens
  misc_RNA (1)...(19): siRNA sense strand
caaagaauguugcuacaga

SEQ ID NO: 1517728 - RNA, 19 nt, Homo sapiens
  misc_RNA (1)...(19): siRNA sense strand
ccacacaaauuccaaagaa

SEQ ID NO: 1517729 - RNA, 19 nt, Homo sapiens
  misc_RNA (1)...(19): siRNA sense strand
gaagaaaugcguaagaaga

SEQ ID NO: 1517730 - RNA, 19 nt, Homo sapiens
  misc_RNA (1)...(19): siRNA sense strand
gaagaaaugacaagaaaga

SEQ ID NO: 1517731 - RNA, 19 nt, Homo sapiens
  misc_RNA (1)...(19): siRNA sense strand
gaagaaaccauucgagaug

SEQ ID NO: 1517732 - RNA, 19 nt, Homo sapiens
  misc_RNA (1)...(19): siRNA sense strand
uaauguggcuucaaagauu

SEQ ID NO: 1517733 - RNA, 19 nt, Homo sapiens
  misc_RNA (1)...(19): siRNA sense strand
aaccaaagauccauaauga

SEQ ID NO: 1517734 - RNA, 19 nt, Homo sapiens
  misc_RNA (1)...(19): siRNA sense strand
ccuguuaagucuucaaaua

SEQ ID NO: 1517735 - RNA, 19 nt, Homo sapiens
  misc_RNA (1)...(19): siRNA sense strand
gaaaugacaagaaagauuc

SEQ ID NO: 1517736 - RNA, 19 nt, Homo sapiens
  misc_RNA (1)...(19): siRNA sense strand
gaaaauaaguuccucuguu

SEQ ID NO: 1517737 - RNA, 19 nt, Homo sapiens
  misc_RNA (1)...(19): siRNA sense strand
gaacaaagucauuucuuca

SEQ ID NO: 1517738 - RNA, 19 nt, Homo sapiens
  misc_RNA (1)...(19): siRNA sense strand
caggaaaccaguucaguua

SEQ ID NO: 1517739 - RNA, 19 nt, Homo sapiens
  misc_RNA (1)...(19): siRNA sense strand
gaauucaaaugcagcuuau

SEQ ID NO: 1517740 - RNA, 19 nt, Homo sapiens
  misc_RNA (1)...(19): siRNA sense strand
gagugaugcugaauuuaaa

SEQ ID NO: 1517741 - RNA, 19 nt, Homo sapiens
  misc_RNA (1)...(19): siRNA sense strand
aaagagaacugagauggaa

SEQ ID NO: 1517742 - RNA, 19 nt, Homo sapiens
  misc_RNA (1)...(19): siRNA sense strand
ucacagaaauauccagaga

SEQ ID NO: 1517743 - RNA, 19 nt, Homo sapiens
  misc_RNA (1)...(19): siRNA sense strand
gaagauauuuucccaguga

SEQ ID NO: 1517744 - RNA, 19 nt, Homo sapiens
  misc_RNA (1)...(19): siRNA sense strand
gaguaagacuuuauucaca

SEQ ID NO: 1517745 - RNA, 19 nt, Homo sapiens
  misc_RNA (1)...(19): siRNA sense strand
ccaaagauccauaaugaga

SEQ ID NO: 1517746 - RNA, 19 nt, Homo sapiens
  misc_RNA (1)...(19): siRNA sense strand
gaaccaaagauccauaaug

SEQ ID NO: 1517747 - RNA, 19 nt, Homo sapiens
  misc_RNA (1)...(19): siRNA sense strand
gaaagggaauccaggaaac

SEQ ID NO: 1517748 - RNA, 19 nt, Homo sapiens
  misc_RNA (1)...(19): siRNA sense strand
guaagaagaugcaccaaaa

SEQ ID NO: 1517749 - RNA, 19 nt, Homo sapiens
  misc_RNA (1)...(19): siRNA sense strand
aaaugcagcuuaugaacaa

SEQ ID NO: 1517750 - RNA, 19 nt, Homo sapiens
  misc_RNA (1)...(19): siRNA sense strand
ccacaaauccacauaugaa

SEQ ID NO: 1517751 - RNA, 19 nt, Homo sapiens
  misc_RNA (1)...(19): siRNA sense strand
gaaauagcaaagccaguaa

SEQ ID NO: 1517752 - RNA, 19 nt, Homo sapiens
  misc_RNA (1)...(19): siRNA sense strand
agacagaguuuauggugaa

SEQ ID NO: 1517753 - RNA, 19 nt, Homo sapiens
  misc_RNA (1)...(19): siRNA sense strand
cauuacaucugaagaguga

SEQ ID NO: 1517754 - RNA, 19 nt, Homo sapiens
  misc_RNA (1)...(19): siRNA sense strand
cuaaauaccacacaaauuc

SEQ ID NO: 1517755 - RNA, 19 nt, Homo sapiens
  misc_RNA (1)...(19): siRNA sense strand
ucaguucaauugcccauuu

SEQ ID NO: 1517756 - RNA, 19 nt, Homo sapiens
  misc_RNA (1)...(19): siRNA sense strand
ggaguuagaagaaaccauu

SEQ ID NO: 1517757 - RNA, 19 nt, Homo sapiens
  misc_RNA (1)...(19): siRNA sense strand
gaagaaguaauaaggcauu

SEQ ID NO: 1517758 - RNA, 19 nt, Homo sapiens
  misc_RNA (1)...(19): siRNA sense strand
cagagagguuguaaauauu

SEQ ID NO: 1517759 - RNA, 19 nt, Homo sapiens
  misc_RNA (1)...(19): siRNA sense strand
aggaagaaaugacaagaaa

SEQ ID NO: 1517760 - RNA, 19 nt, Homo sapiens
  misc_RNA (1)...(19): siRNA sense strand
guucugccaucacaaauug

SEQ ID NO: 1517761 - RNA, 19 nt, Homo sapiens
  misc_RNA (1)...(19): siRNA sense strand
ugaacaaagucauuucuuc

SEQ ID NO: 1517762 - RNA, 19 nt, Homo sapiens
  misc_RNA (1)...(19): siRNA sense strand
aauaaggcauuacaucuga

SEQ ID NO: 1517763 - RNA, 19 nt, Homo sapiens
  misc_RNA (1)...(19): siRNA sense strand
uaacagccgucauuuaugc

SEQ ID NO: 1517764 - RNA, 19 nt, Homo sapiens
  misc_RNA (1)...(19): siRNA sense strand
caaaaucacuuuccaauac

SEQ ID NO: 1517765 - RNA, 19 nt, Homo sapiens
  misc_RNA (1)...(19): siRNA sense strand
aaucuucagucaugucuaa

SEQ ID NO: 1517766 - RNA, 19 nt, Homo sapiens
  misc_RNA (1)...(19): siRNA sense strand
gauuugagagugugccuua

SEQ ID NO: 1517767 - RNA, 19 nt, Homo sapiens
  misc_RNA (1)...(19): siRNA sense strand
gggcaucauuuacagauuc

SEQ ID NO: 1517768 - RNA, 19 nt, Homo sapiens
  misc_RNA (1)...(19): siRNA sense strand
ccaaguaguucagacgauu

SEQ ID NO: 1517769 - RNA, 19 nt, Homo sapiens
  misc_RNA (1)...(19): siRNA sense strand
cauaugaaccaauccagua

SEQ ID NO: 1517770 - RNA, 19 nt, Homo sapiens
  misc_RNA (1)...(19): siRNA sense strand
gaauguugcuacagagaca

SEQ ID NO: 1517771 - RNA, 19 nt, Homo sapiens
  misc_RNA (1)...(19): siRNA sense strand
aaagagugguacuuacaaa

SEQ ID NO: 1517772 - RNA, 19 nt, Homo sapiens
  misc_RNA (1)...(19): siRNA sense strand
gaaccaauccaguaacuac

SEQ ID NO: 1517773 - RNA, 19 nt, Homo sapiens
  misc_RNA (1)...(19): siRNA sense strand
cuauaaauaugccaccauu

SEQ ID NO: 1517774 - RNA, 19 nt, Homo sapiens
  misc_RNA (1)...(19): siRNA sense strand
ucaagcugcuccagugaaa

SEQ ID NO: 1517775 - RNA, 19 nt, Homo sapiens
  misc_RNA (1)...(19): siRNA sense strand
agauaaaggugcccaagga

SEQ ID NO: 1517776 - RNA, 19 nt, Homo sapiens
  misc_RNA (1)...(19): siRNA sense strand
caucacaaauugaccaaca

SEQ ID NO: 1517777 - RNA, 19 nt, Homo sapiens
  misc_RNA (1)...(19): siRNA sense strand
acaaagagacagaguuuau

SEQ ID NO: 1517778 - RNA, 19 nt, Homo sapiens
  misc_RNA (1)...(19): siRNA sense strand
ucucaaggaagaaguaaua

SEQ ID NO: 1517779 - RNA, 19 nt, Homo sapiens
  misc_RNA (1)...(19): siRNA sense strand
gggcagagaagaauaaagu

SEQ ID NO: 1517780 - RNA, 19 nt, Homo sapiens
  misc_RNA (1)...(19): siRNA sense strand
caacuccuaagcaguauuu

SEQ ID NO: 1517781 - RNA, 19 nt, Homo sapiens
  misc_RNA (1)...(19): siRNA sense strand
guuccucccucaacacaaa

SEQ ID NO: 1517782 - RNA, 19 nt, Homo sapiens
  misc_RNA (1)...(19): siRNA sense strand
uuacaaagagacagaguuu

SEQ ID NO: 1517783 - RNA, 19 nt, Homo sapiens
  misc_RNA (1)...(19): siRNA sense strand
aaagauccauaaugagaug

SEQ ID NO: 1517784 - RNA, 19 nt, Homo sapiens
  misc_RNA (1)...(19): siRNA sense strand
gaaguguccuccagagcau

SEQ ID NO: 1517785 - RNA, 19 nt, Homo sapiens
  misc_RNA (1)...(19): siRNA sense strand
cuacagagacacaauugaa

SEQ ID NO: 1517786 - RNA, 19 nt, Homo sapiens
  misc_RNA (1)...(19): siRNA sense strand
agaaauauccagagagguu

SEQ ID NO: 1517787 - RNA, 19 nt, Homo sapiens
  misc_RNA (1)...(19): siRNA sense strand
gaaagguggucagcauucu

SEQ ID NO: 1517788 - RNA, 19 nt, Homo sapiens
  misc_RNA (1)...(19): siRNA sense strand
agagugaugcugaauuuaa

SEQ ID NO: 1517789 - RNA, 19 nt, Homo sapiens
  misc_RNA (1)...(19): siRNA sense strand
ugaauucaaaugcagcuua

SEQ ID NO: 1517790 - RNA, 19 nt, Homo sapiens
  misc_RNA (1)...(19): siRNA sense strand
ucagagucauggugugaaa

SEQ ID NO: 1517791 - RNA, 19 nt, Homo sapiens
  misc_RNA (1)...(19): siRNA sense strand
ggaauacuauacccaugag

SEQ ID NO: 1517792 - RNA, 19 nt, Homo sapiens
  misc_RNA (1)...(19): siRNA sense strand
uaagaagauggaucacaua

SEQ ID NO: 1517793 - RNA, 19 nt, Homo sapiens
  misc_RNA (1)...(19): siRNA sense strand
ucgaauuccugaccauuug

SEQ ID NO: 1517794 - RNA, 19 nt, Homo sapiens
  misc_RNA (1)...(19): siRNA sense strand
uaaaggugcccaaggaaga

SEQ ID NO: 1517795 - RNA, 19 nt, Homo sapiens
  misc_RNA (1)...(19): siRNA sense strand
aaaauaaguuccucuguug

SEQ ID NO: 1517796 - RNA, 19 nt, Homo sapiens
  misc_RNA (1)...(19): siRNA sense strand
uaagggcagagaagaauaa

SEQ ID NO: 1517797 - RNA, 19 nt, Homo sapiens
  misc_RNA (1)...(19): siRNA sense strand
auaaauaugccaccauuga

SEQ ID NO: 1517798 - RNA, 19 nt, Homo sapiens
  misc_RNA (1)...(19): siRNA sense strand
gccaaccguuauuuaugua

SEQ ID NO: 1517799 - RNA, 19 nt, Homo sapiens
  misc_RNA (1)...(19): siRNA sense strand
agaaauagcaaagccagua

SEQ ID NO: 1517800 - RNA, 19 nt, Homo sapiens
  misc_RNA (1)...(19): siRNA sense strand
cgaaagggaauccaggaaa

SEQ ID NO: 1517801 - RNA, 19 nt, Homo sapiens
  misc_RNA (1)...(19): siRNA sense strand
guuaauacccagagucuuc

SEQ ID NO: 1517802 - RNA, 19 nt, Homo sapiens
  misc_RNA (1)...(19): siRNA sense strand
ggaaaucuuauaccacuag

SEQ ID NO: 1517803 - RNA, 19 nt, Homo sapiens
  misc_RNA (1)...(19): siRNA sense strand
caaguccagucacagaaau

SEQ ID NO: 1517804 - RNA, 19 nt, Homo sapiens
  misc_RNA (1)...(19): siRNA sense strand
ccaaaugccaaccguuauu

SEQ ID NO: 1517805 - RNA, 19 nt, Homo sapiens
  misc_RNA (1)...(19): siRNA sense strand
gagagguuguaaauauugu

SEQ ID NO: 1517806 - RNA, 19 nt, Homo sapiens
  misc_RNA (1)...(19): siRNA sense strand
cuaauaagaagauggauca

SEQ ID NO: 1517807 - RNA, 19 nt, Homo sapiens
  misc_RNA (1)...(19): siRNA sense strand
ggacucaccaugcaaacau

SEQ ID NO: 1517808 - RNA, 19 nt, Homo sapiens
  misc_RNA (1)...(19): siRNA sense strand
caaaugcagcuuaugaaca

SEQ ID NO: 1517809 - RNA, 19 nt, Homo sapiens
  misc_RNA (1)...(19): siRNA sense strand
auaagaagauggaucacau

SEQ ID NO: 1517810 - RNA, 19 nt, Homo sapiens
  misc_RNA (1)...(19): siRNA sense strand
caaggaagaaguaauaagg

SEQ ID NO: 1517811 - RNA, 19 nt, Homo sapiens
  misc_RNA (1)...(19): siRNA sense strand
gauaaaggugcccaaggaa

SEQ ID NO: 1517812 - RNA, 19 nt, Homo sapiens
  misc_RNA (1)...(19): siRNA sense strand
caagaaccaaagauccaua

SEQ ID NO: 1517813 - RNA, 19 nt, Homo sapiens
  misc_RNA (1)...(19): siRNA sense strand
gaaaccaguucaguuacca

SEQ ID NO: 1517814 - RNA, 19 nt, Homo sapiens
  misc_RNA (1)...(19): siRNA sense strand
ccaguuggauuuaguacag

SEQ ID NO: 1517815 - RNA, 19 nt, Homo sapiens
  misc_RNA (1)...(19): siRNA sense strand
gauaaucuacagccuuuua

SEQ ID NO: 1517816 - RNA, 19 nt, Homo sapiens
  misc_RNA (1)...(19): siRNA sense strand
cuaguucaaucuucaguca

SEQ ID NO: 1517817 - RNA, 19 nt, Homo sapiens
  misc_RNA (1)...(19): siRNA sense strand
aguaacagccgucauuuau

SEQ ID NO: 1517818 - RNA, 19 nt, Homo sapiens
  misc_RNA (1)...(19): siRNA sense strand
uaccacaaauccacauaug

SEQ ID NO: 1517819 - RNA, 19 nt, Homo sapiens
  misc_RNA (1)...(19): siRNA sense strand
gaucacauaaagaagagaa

SEQ ID NO: 1517820 - RNA, 19 nt, Homo sapiens
  misc_RNA (1)...(19): siRNA sense strand
aagaaaccauucgagauga

SEQ ID NO: 1517821 - RNA, 19 nt, Homo sapiens
  misc_RNA (1)...(19): siRNA sense strand
ucacuuugcuuaccuguug

SEQ ID NO: 1517822 - RNA, 19 nt, Homo sapiens
  misc_RNA (1)...(19): siRNA sense strand
gaagaugcguucacuuugc

SEQ ID NO: 1517823 - RNA, 19 nt, Homo sapiens
  misc_RNA (1)...(19): siRNA sense strand
ggaagaugcguucacuuug

SEQ ID NO: 1517824 - RNA, 19 nt, Homo sapiens
  misc_RNA (1)...(19): siRNA sense strand
uaauggaggccaccaauau

SEQ ID NO: 1517825 - RNA, 19 nt, Homo sapiens
  misc_RNA (1)...(19): siRNA sense strand
ggaggaugcucucggaacu

SEQ ID NO: 1517826 - RNA, 19 nt, Homo sapiens
  misc_RNA (1)...(19): siRNA sense strand
gaacuugggagaggaagga

SEQ ID NO: 1517827 - RNA, 19 nt, Homo sapiens
  misc_RNA (1)...(19): siRNA sense strand
ugaugucugugcuuuaaug

SEQ ID NO: 1517828 - RNA, 19 nt, Homo sapiens
  misc_RNA (1)...(19): siRNA sense strand
ccaccaauauugagaagac

SEQ ID NO: 1517829 - RNA, 19 nt, Homo sapiens
  misc_RNA (1)...(19): siRNA sense strand
gaggaaggagggaagagaa

SEQ ID NO: 1517830 - RNA, 19 nt, Homo sapiens
  misc_RNA (1)...(19): siRNA sense strand
caaacgaguugcgcaccuu

SEQ ID NO: 1517831 - RNA, 19 nt, Homo sapiens
  misc_RNA (1)...(19): siRNA sense strand
ggcaagagggacauacaaa

SEQ ID NO: 1517832 - RNA, 19 nt, Homo sapiens
  misc_RNA (1)...(19): siRNA sense strand
aggaagaugcguucacuuu

SEQ ID NO: 1517833 - RNA, 19 nt, Homo sapiens
  misc_RNA (1)...(19): siRNA sense strand
uuugaugucugugcuuuaa

SEQ ID NO: 1517834 - RNA, 19 nt, Homo sapiens
  misc_RNA (1)...(19): siRNA sense strand
gcaccgggacacagaauag

SEQ ID NO: 1517835 - RNA, 19 nt, Homo sapiens
  misc_RNA (1)...(19): siRNA sense strand
guaggaagaugcguucacu

SEQ ID NO: 1517836 - RNA, 19 nt, Homo sapiens
  misc_RNA (1)...(19): siRNA sense strand
ggaaggagggaagagaaga

SEQ ID NO: 1517837 - RNA, 19 nt, Homo sapiens
  misc_RNA (1)...(19): siRNA sense strand
gaugcguucacuuugcuua

SEQ ID NO: 1517838 - RNA, 19 nt, Homo sapiens
  misc_RNA (1)...(19): siRNA sense strand
gcggacacuugguuuagca

SEQ ID NO: 1517839 - RNA, 19 nt, Homo sapiens
  misc_RNA (1)...(19): siRNA sense strand
gcaagagggacauacaaaa

SEQ ID NO: 1517840 - RNA, 19 nt, Homo sapiens
  misc_RNA (1)...(19): siRNA sense strand
uuaauggaggccaccaaua

SEQ ID NO: 1517841 - RNA, 19 nt, Homo sapiens
  misc_RNA (1)...(19): siRNA sense strand
gaaggagggaagagaagag

SEQ ID NO: 1517842 - RNA, 19 nt, Homo sapiens
  misc_RNA (1)...(19): siRNA sense strand
aggaugcucucggaacuug

SEQ ID NO: 1517843 - RNA, 19 nt, Homo sapiens
  misc_RNA (1)...(19): siRNA sense strand
ggagaggaaggagggaaga

SEQ ID NO: 1517844 - RNA, 19 nt, Homo sapiens
  misc_RNA (1)...(19): siRNA sense strand
aauggaggccaccaauauu

SEQ ID NO: 1517845 - RNA, 19 nt, Homo sapiens
  misc_RNA (1)...(19): siRNA sense strand
ggccaccaauauugagaag

SEQ ID NO: 1517846 - RNA, 19 nt, Homo sapiens
  misc_RNA (1)...(19): siRNA sense strand
gggcggacacuugguuuag

SEQ ID NO: 1517847 - RNA, 19 nt, Homo sapiens
  misc_RNA (1)...(19): siRNA sense strand
gaagaaagcauuaagacuu

SEQ ID NO: 1517848 - RNA, 19 nt, Homo sapiens
  misc_RNA (1)...(19): siRNA sense strand
gguacaaacuuaugaagaa

SEQ ID NO: 1517849 - RNA, 19 nt, Homo sapiens
  misc_RNA (1)...(19): siRNA sense strand
ugacauagcuggaagauac

SEQ ID NO: 1517850 - RNA, 19 nt, Homo sapiens
  misc_RNA (1)...(19): siRNA sense strand
ucacuuggguacaaacuua

SEQ ID NO: 1517851 - RNA, 19 nt, Homo sapiens
  misc_RNA (1)...(19): siRNA sense strand
gaagauacucuaacagauu

SEQ ID NO: 1517852 - RNA, 19 nt, Homo sapiens
  misc_RNA (1)...(19): siRNA sense strand
ucaauacucucaagcacua

SEQ ID NO: 1517853 - RNA, 19 nt, Homo sapiens
  misc_RNA (1)...(19): siRNA sense strand
caagaaauggcucagaaua

SEQ ID NO: 1517854 - RNA, 19 nt, Homo sapiens
  misc_RNA (1)...(19): siRNA sense strand
ggaagauacucuaacagau

SEQ ID NO: 1517855 - RNA, 19 nt, Homo sapiens
  misc_RNA (1)...(19): siRNA sense strand
ugaaaccacugauaagaau

SEQ ID NO: 1517856 - RNA, 19 nt, Homo sapiens
  misc_RNA (1)...(19): siRNA sense strand
ugacaucacuuggguacaa

SEQ ID NO: 1517857 - RNA, 19 nt, Homo sapiens
  misc_RNA (1)...(19): siRNA sense strand
cauaugagccucgggauuu

SEQ ID NO: 1517858 - RNA, 19 nt, Homo sapiens
  misc_RNA (1)...(19): siRNA sense strand
gcuggaagauacucuaaca

SEQ ID NO: 1517859 - RNA, 19 nt, Homo sapiens
  misc_RNA (1)...(19): siRNA sense strand
uacaagaaauggcucagaa

SEQ ID NO: 1517860 - RNA, 19 nt, Homo sapiens
  misc_RNA (1)...(19): siRNA sense strand
gaagaaauacaagaaaugg

SEQ ID NO: 1517861 - RNA, 19 nt, Homo sapiens
  misc_RNA (1)...(19): siRNA sense strand
cuaacagauuguacacaua

SEQ ID NO: 1517862 - RNA, 19 nt, Homo sapiens
  misc_RNA (1)...(19): siRNA sense strand
agaaauggcucagaauaag

SEQ ID NO: 1517863 - RNA, 19 nt, Homo sapiens
  misc_RNA (1)...(19): siRNA sense strand
aagauacucuaacagauug

SEQ ID NO: 1517864 - RNA, 19 nt, Homo sapiens
  misc_RNA (1)...(19): siRNA sense strand
aagaaauggcucagaauaa

SEQ ID NO: 1517865 - RNA, 19 nt, Homo sapiens
  misc_RNA (1)...(19): siRNA sense strand
ggauuuaccccuauugaua

SEQ ID NO: 1517866 - RNA, 19 nt, Homo sapiens
  misc_RNA (1)...(19): siRNA sense strand
guuuguagacccuucuuua

SEQ ID NO: 1517867 - RNA, 19 nt, Homo sapiens
  misc_RNA (1)...(19): siRNA sense strand
ugcuaaaccuuaugcauga

SEQ ID NO: 1517868 - RNA, 19 nt, Homo sapiens
  misc_RNA (1)...(19): siRNA sense strand
uguagacccuucuuuaaca

SEQ ID NO: 1517869 - RNA, 19 nt, Homo sapiens
  misc_RNA (1)...(19): siRNA sense strand
caauaugugccuagaauca

SEQ ID NO: 1517870 - RNA, 19 nt, Homo sapiens
  misc_RNA (1)...(19): siRNA sense strand
guacaaacuuaugaagaag

SEQ ID NO: 1517871 - RNA, 19 nt, Homo sapiens
  misc_RNA (1)...(19): siRNA sense strand
gaauaaguucaucaugcua

SEQ ID NO: 1517872 - RNA, 19 nt, Homo sapiens
  misc_RNA (1)...(19): siRNA sense strand
gcacuaaagaaaguauuug

SEQ ID NO: 1517873 - RNA, 19 nt, Homo sapiens
  misc_RNA (1)...(19): siRNA sense strand
gaaauggcucagaauaagu

SEQ ID NO: 1517874 - RNA, 19 nt, Homo sapiens
  misc_RNA (1)...(19): siRNA sense strand
ucuaacagauuguacacau

SEQ ID NO: 1517875 - RNA, 19 nt, Homo sapiens
  misc_RNA (1)...(19): siRNA sense strand
gacaucacuuggguacaaa

SEQ ID NO: 1517876 - RNA, 19 nt, Homo sapiens
  misc_RNA (1)...(19): siRNA sense strand
gaaaccacugauaagaauu

SEQ ID NO: 1517877 - RNA, 19 nt, Homo sapiens
  misc_RNA (1)...(19): siRNA sense strand
caugaaaccacugauaaga

SEQ ID NO: 1517878 - RNA, 19 nt, Homo sapiens
  misc_RNA (1)...(19): siRNA sense strand
gcaugaaaccacugauaag

SEQ ID NO: 1517879 - RNA, 19 nt, Homo sapiens
  misc_RNA (1)...(19): siRNA sense strand
auaugagccucgggauuua

SEQ ID NO: 1517880 - RNA, 19 nt, Homo sapiens
  misc_RNA (1)...(19): siRNA sense strand
uggaagauacucuaacaga

SEQ ID NO: 1517881 - RNA, 19 nt, Homo sapiens
  misc_RNA (1)...(19): siRNA sense strand
agaauaaguucaucaugcu

SEQ ID NO: 1517882 - RNA, 19 nt, Homo sapiens
  misc_RNA (1)...(19): siRNA sense strand
cuagaaucauguuuguaga

SEQ ID NO: 1517883 - RNA, 19 nt, Homo sapiens
  misc_RNA (1)...(19): siRNA sense strand
gcuaaaccuuaugcaugaa

SEQ ID NO: 1517884 - RNA, 19 nt, Homo sapiens
  misc_RNA (1)...(19): siRNA sense strand
gaugcuacacucagcuuug

SEQ ID NO: 1517885 - RNA, 19 nt, Homo sapiens
  misc_RNA (1)...(19): siRNA sense strand
caugaagaaagcauuaaga

SEQ ID NO: 1517886 - RNA, 19 nt, Homo sapiens
  misc_RNA (1)...(19): siRNA sense strand
ccuagaaucauguuuguag

SEQ ID NO: 1517887 - RNA, 19 nt, Homo sapiens
  misc_RNA (1)...(19): siRNA sense strand
ugcaugaaaccacugauaa

SEQ ID NO: 1517888 - RNA, 19 nt, Homo sapiens
  misc_RNA (1)...(19): siRNA sense strand
ggguacaaacuuaugaaga

SEQ ID NO: 1517889 - RNA, 19 nt, Homo sapiens
  misc_RNA (1)...(19): siRNA sense strand
cacaguuucuuccaaccuu

SEQ ID NO: 1517890 - RNA, 19 nt, Homo sapiens
  misc_RNA (1)...(19): siRNA sense strand
aaauggcucagaauaaguu

SEQ ID NO: 1517891 - RNA, 19 nt, Homo sapiens
  misc_RNA (1)...(19): siRNA sense strand
gcucagaauaaguucauca

SEQ ID NO: 1517892 - RNA, 19 nt, Homo sapiens
  misc_RNA (1)...(19): siRNA sense strand
acaaacuuaugaagaaggu

SEQ ID NO: 1517893 - RNA, 19 nt, Homo sapiens
  misc_RNA (1)...(19): siRNA sense strand
gauacucuaacagauugua

SEQ ID NO: 1517894 - RNA, 19 nt, Homo sapiens
  misc_RNA (1)...(19): siRNA sense strand
agacccuucuuuaacaguu

SEQ ID NO: 1517895 - RNA, 19 nt, Homo sapiens
  misc_RNA (1)...(19): siRNA sense strand
gcaauaugugccuagaauc

SEQ ID NO: 1517896 - RNA, 19 nt, Homo sapiens
  misc_RNA (1)...(19): siRNA sense strand
cucaagcacuaaagaaagu

SEQ ID NO: 1517897 - RNA, 19 nt, Homo sapiens
  misc_RNA (1)...(19): siRNA sense strand
uucaucaccuggaggauug

SEQ ID NO: 1517898 - RNA, 19 nt, Homo sapiens
  misc_RNA (1)...(19): siRNA sense strand
guagacccuucuuuaacag

SEQ ID NO: 1517899 - RNA, 19 nt, Homo sapiens
  misc_RNA (1)...(19): siRNA sense strand
gugccuagaaucauguuug

SEQ ID NO: 1517900 - RNA, 19 nt, Homo sapiens
  misc_RNA (1)...(19): siRNA sense strand
acagauuguacacauauga

SEQ ID NO: 1517901 - RNA, 19 nt, Homo sapiens
  misc_RNA (1)...(19): siRNA sense strand
uuuguagacccuucuuuaa

SEQ ID NO: 1517902 - RNA, 19 nt, Homo sapiens
  misc_RNA (1)...(19): siRNA sense strand
ucaucaugcuaaaccuuau

SEQ ID NO: 1517903 - RNA, 19 nt, Homo sapiens
  misc_RNA (1)...(19): siRNA sense strand
ugcccaaaaugaagaaaua

SEQ ID NO: 1517904 - RNA, 19 nt, Homo sapiens
  misc_RNA (1)...(19): siRNA sense strand
ugccuagaaucauguuugu

SEQ ID NO: 1517905 - RNA, 19 nt, Homo sapiens
  misc_RNA (1)...(19): siRNA sense strand
cuaaaccuuaugcaugaaa

SEQ ID NO: 1517906 - RNA, 19 nt, Homo sapiens
  misc_RNA (1)...(19): siRNA sense strand
uagcuggaagauacucuaa

SEQ ID NO: 1517907 - RNA, 19 nt, Homo sapiens
  misc_RNA (1)...(19): siRNA sense strand
caccugaugggcaauaugu

SEQ ID NO: 1517908 - RNA, 19 nt, Homo sapiens
  misc_RNA (1)...(19): siRNA sense strand
auaugugccuagaaucaug

SEQ ID NO: 1517909 - RNA, 19 nt, Homo sapiens
  misc_RNA (1)...(19): siRNA sense strand
caagcacuaaagaaaguau

SEQ ID NO: 1517910 - RNA, 19 nt, Homo sapiens
  misc_RNA (1)...(19): siRNA sense strand
ugaagaaagcauuaagacu

SEQ ID NO: 1517911 - RNA, 19 nt, Homo sapiens
  misc_RNA (1)...(19): siRNA sense strand
ccucuuacucgucacaguu

SEQ ID NO: 1517912 - RNA, 19 nt, Homo sapiens
  misc_RNA (1)...(19): siRNA sense strand
gaugucagcaguacaagua

SEQ ID NO: 1517913 - RNA, 19 nt, Homo sapiens
  misc_RNA (1)...(19): siRNA sense strand
gaagauagcgaugaagaga

SEQ ID NO: 1517914 - RNA, 19 nt, Homo sapiens
  misc_RNA (1)...(19): siRNA sense strand
gaauaaauugcaggcauua

SEQ ID NO: 1517915 - RNA, 19 nt, Homo sapiens
  misc_RNA (1)...(19): siRNA sense strand
ugaauaaauugcaggcauu

SEQ ID NO: 1517916 - RNA, 19 nt, Homo sapiens
  misc_RNA (1)...(19): siRNA sense strand
gagaaugaagaacugaaua

SEQ ID NO: 1517917 - RNA, 19 nt, Homo sapiens
  misc_RNA (1)...(19): siRNA sense strand
ugaagagaaugaagaacug

SEQ ID NO: 1517918 - RNA, 19 nt, Homo sapiens
  misc_RNA (1)...(19): siRNA sense strand
guacaaguagugaagauag

SEQ ID NO: 1517919 - RNA, 19 nt, Homo sapiens
  misc_RNA (1)...(19): siRNA sense strand
agauagcgaugaagagaau

SEQ ID NO: 1517920 - RNA, 19 nt, Homo sapiens
  misc_RNA (1)...(19): siRNA sense strand
gaagagaaugaagaacuga

SEQ ID NO: 1517921 - RNA, 19 nt, Homo sapiens
  misc_RNA (1)...(19): siRNA sense strand
ugucagagcaggcuguaaa

SEQ ID NO: 1517922 - RNA, 19 nt, Homo sapiens
  misc_RNA (1)...(19): siRNA sense strand
ggaaaagcauucuucuaca

SEQ ID NO: 1517923 - RNA, 19 nt, Homo sapiens
  misc_RNA (1)...(19): siRNA sense strand
gcgaugaagagaaugaaga

SEQ ID NO: 1517924 - RNA, 19 nt, Homo sapiens
  misc_RNA (1)...(19): siRNA sense strand
ccuaauaguucugaauucu

SEQ ID NO: 1517925 - RNA, 19 nt, Homo sapiens
  misc_RNA (1)...(19): siRNA sense strand
gugaagauagcgaugaaga

SEQ ID NO: 1517926 - RNA, 19 nt, Homo sapiens
  misc_RNA (1)...(19): siRNA sense strand
uagugaagauagcgaugaa

SEQ ID NO: 1517927 - RNA, 19 nt, Homo sapiens
  misc_RNA (1)...(19): siRNA sense strand
gaggacacuucaaaacaaa

SEQ ID NO: 1517928 - RNA, 19 nt, Homo sapiens
  misc_RNA (1)...(19): siRNA sense strand
caccuaauaguucugaauu

SEQ ID NO: 1517929 - RNA, 19 nt, Homo sapiens
  misc_RNA (1)...(19): siRNA sense strand
cgaugaagagaaugaagaa

SEQ ID NO: 1517930 - RNA, 19 nt, Homo sapiens
  misc_RNA (1)...(19): siRNA sense strand
gaagaacugaauaaauugc

SEQ ID NO: 1517931 - RNA, 19 nt, Homo sapiens
  misc_RNA (1)...(19): siRNA sense strand
uugcaggcauuacaggaaa

SEQ ID NO: 1517932 - RNA, 19 nt, Homo sapiens
  misc_RNA (1)...(19): siRNA sense strand
guagugaagauagcgauga

SEQ ID NO: 1517933 - RNA, 19 nt, Homo sapiens
  misc_RNA (1)...(19): siRNA sense strand
gaaaagcauucuucuacac

SEQ ID NO: 1517934 - RNA, 19 nt, Homo sapiens
  misc_RNA (1)...(19): siRNA sense strand
aagcauucuucuacaccua

SEQ ID NO: 1517935 - RNA, 19 nt, Homo sapiens
  misc_RNA (1)...(19): siRNA sense strand
caguacaaguagugaagau

SEQ ID NO: 1517936 - RNA, 19 nt, Homo sapiens
  misc_RNA (1)...(19): siRNA sense strand
gcauucuucuacaccuaau

SEQ ID NO: 1517937 - RNA, 19 nt, Homo sapiens
  misc_RNA (1)...(19): siRNA sense strand
gcaguacaaguagugaaga

SEQ ID NO: 1517938 - RNA, 19 nt, Homo sapiens
  misc_RNA (1)...(19): siRNA sense strand
ggaaaaggucuuacucauc

SEQ ID NO: 1517939 - RNA, 19 nt, Homo sapiens
  misc_RNA (1)...(19): siRNA sense strand
ggucuuacucauccaguuc

SEQ ID NO: 1517940 - RNA, 19 nt, Homo sapiens
  misc_RNA (1)...(19): siRNA sense strand
cuucuacaccuaauaguuc

SEQ ID NO: 1517941 - RNA, 19 nt, Homo sapiens
  misc_RNA (1)...(19): siRNA sense strand
gcaauuuucuccgaguaga

SEQ ID NO: 1517942 - RNA, 19 nt, Homo sapiens
  misc_RNA (1)...(19): siRNA sense strand
agaggacacuucaaaacaa

SEQ ID NO: 1517943 - RNA, 19 nt, Homo sapiens
  misc_RNA (1)...(19): siRNA sense strand
auaaauugcaggcauuaca

SEQ ID NO: 1517944 - RNA, 19 nt, Homo sapiens
  misc_RNA (1)...(19): siRNA sense strand
gaacaaacaugcauuacuc

SEQ ID NO: 1517945 - RNA, 19 nt, Homo sapiens
  misc_RNA (1)...(19): siRNA sense strand
gcagaacaaacaugcauua

SEQ ID NO: 1517946 - RNA, 19 nt, Homo sapiens
  misc_RNA (1)...(19): siRNA sense strand
cuuccaaccuccucaauua

SEQ ID NO: 1517947 - RNA, 19 nt, Homo sapiens
  misc_RNA (1)...(19): siRNA sense strand
aaacaugcauuacuccaaa

SEQ ID NO: 1517948 - RNA, 19 nt, Homo sapiens
  misc_RNA (1)...(19): siRNA sense strand
gcacugcgauagagacaga

SEQ ID NO: 1517949 - RNA, 19 nt, Homo sapiens
  misc_RNA (1)...(19): siRNA sense strand
agacagaguucaagcagaa

SEQ ID NO: 1517950 - RNA, 19 nt, Homo sapiens
  misc_RNA (1)...(19): siRNA sense strand
uuacuucccuucaaucaaa

SEQ ID NO: 1517951 - RNA, 19 nt, Homo sapiens
  misc_RNA (1)...(19): siRNA sense strand
gaacggagcagagagacaa

SEQ ID NO: 1517952 - RNA, 19 nt, Homo sapiens
  misc_RNA (1)...(19): siRNA sense strand
gaucugaccgcugaaguuu

SEQ ID NO: 1517953 - RNA, 19 nt, Homo sapiens
  misc_RNA (1)...(19): siRNA sense strand
aauguuagcugacuguguu

SEQ ID NO: 1517954 - RNA, 19 nt, Homo sapiens
  misc_RNA (1)...(19): siRNA sense strand
gagcagagagacaaauaga

SEQ ID NO: 1517955 - RNA, 19 nt, Homo sapiens
  misc_RNA (1)...(19): siRNA sense strand
caaccaugauguucucaau

SEQ ID NO: 1517956 - RNA, 19 nt, Homo sapiens
  misc_RNA (1)...(19): siRNA sense strand
cugcguaacuuguucagaa

SEQ ID NO: 1517957 - RNA, 19 nt, Homo sapiens
  misc_RNA (1)...(19): siRNA sense strand
gagaauauggacccaagaa

SEQ ID NO: 1517958 - RNA, 19 nt, Homo sapiens
  misc_RNA (1)...(19): siRNA sense strand
caugauguucucaauguua

SEQ ID NO: 1517959 - RNA, 19 nt, Homo sapiens
  misc_RNA (1)...(19): siRNA sense strand
acaaauagaggaacggaaa

SEQ ID NO: 1517960 - RNA, 19 nt, Homo sapiens
  misc_RNA (1)...(19): siRNA sense strand
gcuggcaccacucuucuua

SEQ ID NO: 1517961 - RNA, 19 nt, Homo sapiens
  misc_RNA (1)...(19): siRNA sense strand
gcaccacucuucuuaugcu

SEQ ID NO: 1517962 - RNA, 19 nt, Homo sapiens
  misc_RNA (1)...(19): siRNA sense strand
caaaauguguaggagaaua

SEQ ID NO: 1517963 - RNA, 19 nt, Homo sapiens
  misc_RNA (1)...(19): siRNA sense strand
caagaacggagcagagaga

SEQ ID NO: 1517964 - RNA, 19 nt, Homo sapiens
  misc_RNA (1)...(19): siRNA sense strand
ucagaaaacucauuagcuu

SEQ ID NO: 1517965 - RNA, 19 nt, Homo sapiens
  misc_RNA (1)...(19): siRNA sense strand
caauuaggcagaacaaaca

SEQ ID NO: 1517966 - RNA, 19 nt, Homo sapiens
  misc_RNA (1)...(19): siRNA sense strand
uggcaccacucuucuuaug

SEQ ID NO: 1517967 - RNA, 19 nt, Homo sapiens
  misc_RNA (1)...(19): siRNA sense strand
ggaucugaccgcugaaguu

SEQ ID NO: 1517968 - RNA, 19 nt, Homo sapiens
  misc_RNA (1)...(19): siRNA sense strand
cuacaaccaugauguucuc

SEQ ID NO: 1517969 - RNA, 19 nt, Homo sapiens
  misc_RNA (1)...(19): siRNA sense strand
caaacaugcauuacuccaa

SEQ ID NO: 1517970 - RNA, 19 nt, Homo sapiens
  misc_RNA (1)...(19): siRNA sense strand
accaugauguucucaaugu

SEQ ID NO: 1517971 - RNA, 19 nt, Homo sapiens
  misc_RNA (1)...(19): siRNA sense strand
cggagcagagagacaaaua

SEQ ID NO: 1517972 - RNA, 19 nt, Homo sapiens
  misc_RNA (1)...(19): siRNA sense strand
uuugggaguugcuauguga

SEQ ID NO: 1517973 - RNA, 19 nt, Homo sapiens
  misc_RNA (1)...(19): siRNA sense strand
cgauagagacagaguucaa

SEQ ID NO: 1517974 - RNA, 19 nt, Homo sapiens
  misc_RNA (1)...(19): siRNA sense strand
auagaggaacggaaaguuu

SEQ ID NO: 1517975 - RNA, 19 nt, Homo sapiens
  misc_RNA (1)...(19): siRNA sense strand
ucacaucuuccugcaguuu

SEQ ID NO: 1517976 - RNA, 19 nt, Homo sapiens
  misc_RNA (1)...(19): siRNA sense strand
ccacuccaauucccauuuu

SEQ ID NO: 1517977 - RNA, 19 nt, Homo sapiens
  misc_RNA (1)...(19): siRNA sense strand
ccaugauguucucaauguu

SEQ ID NO: 1517978 - RNA, 19 nt, Homo sapiens
  misc_RNA (1)...(19): siRNA sense strand
ucugaccgcugaaguuuac

SEQ ID NO: 1517979 - RNA, 19 nt, Homo sapiens
  misc_RNA (1)...(19): siRNA sense strand
ucaauuaggcagaacaaac

SEQ ID NO: 1517980 - RNA, 19 nt, Homo sapiens
  misc_RNA (1)...(19): siRNA sense strand
ggagcagagagacaaauag

SEQ ID NO: 1517981 - RNA, 19 nt, Homo sapiens
  misc_RNA (1)...(19): siRNA sense strand
ugcguaacuuguucagaaa

SEQ ID NO: 1517982 - RNA, 19 nt, Homo sapiens
  misc_RNA (1)...(19): siRNA sense strand
gaguucaagcagaauguug

SEQ ID NO: 1517983 - RNA, 19 nt, Homo sapiens
  misc_RNA (1)...(19): siRNA sense strand
ggagaauauggacccaaga

SEQ ID NO: 1517984 - RNA, 19 nt, Homo sapiens
  misc_RNA (1)...(19): siRNA sense strand
ucaaucaaaucgagaucac

SEQ ID NO: 1517985 - RNA, 19 nt, Homo sapiens
  misc_RNA (1)...(19): siRNA sense strand
gauagagacagaguucaag

SEQ ID NO: 1517986 - RNA, 19 nt, Homo sapiens
  misc_RNA (1)...(19): siRNA sense strand
gcuuccaaccuccucaauu

SEQ ID NO: 1517987 - RNA, 19 nt, Homo sapiens
  misc_RNA (1)...(19): siRNA sense strand
agagagacaaauagaggaa

SEQ ID NO: 1517988 - RNA, 19 nt, Homo sapiens
  misc_RNA (1)...(19): siRNA sense strand
guucuaaaauccacuccaa

SEQ ID NO: 1517989 - RNA, 19 nt, Homo sapiens
  misc_RNA (1)...(19): siRNA sense strand
gcaguuuucuauaaucagu

SEQ ID NO: 1517990 - RNA, 19 nt, Homo sapiens
  misc_RNA (1)...(19): siRNA sense strand
uaugcugucugcguaacuu

SEQ ID NO: 1517991 - RNA, 19 nt, Homo sapiens
  misc_RNA (1)...(19): siRNA sense strand
caaauagaggaacggaaag

SEQ ID NO: 1517992 - RNA, 19 nt, Homo sapiens
  misc_RNA (1)...(19): siRNA sense strand
gaacugcccugaagauauu

SEQ ID NO: 1517993 - RNA, 19 nt, Homo sapiens
  misc_RNA (1)...(19): siRNA sense strand
gaugauugcuugugugaua

SEQ ID NO: 1517994 - RNA, 19 nt, Homo sapiens
  misc_RNA (1)...(19): siRNA sense strand
aagaauaucucccguauaa

SEQ ID NO: 1517995 - RNA, 19 nt, Homo sapiens
  misc_RNA (1)...(19): siRNA sense strand
ggaaauaguugcucuuuua

SEQ ID NO: 1517996 - RNA, 19 nt, Homo sapiens
  misc_RNA (1)...(19): siRNA sense strand
ggaaggcuuucuacaagua

SEQ ID NO: 1517997 - RNA, 19 nt, Homo sapiens
  misc_RNA (1)...(19): siRNA sense strand
caagaaggcucaagaaucu

SEQ ID NO: 1517998 - RNA, 19 nt, Homo sapiens
  misc_RNA (1)...(19): siRNA sense strand
gauggccacuguucaauaa

SEQ ID NO: 1517999 - RNA, 19 nt, Homo sapiens
  misc_RNA (1)...(19): siRNA sense strand
gaugagaaauccauguuug

SEQ ID NO: 1518000 - RNA, 19 nt, Homo sapiens
  misc_RNA (1)...(19): siRNA sense strand
gaauaucucccguauaaug

SEQ ID NO: 1518001 - RNA, 19 nt, Homo sapiens
  misc_RNA (1)...(19): siRNA sense strand
gaagcgaccuuguccuuuc

SEQ ID NO: 1518002 - RNA, 19 nt, Homo sapiens
  misc_RNA (1)...(19): siRNA sense strand
gcucaauugucgaucuuua

SEQ ID NO: 1518003 - RNA, 19 nt, Homo sapiens
  misc_RNA (1)...(19): siRNA sense strand
acacauggcuagaagguuu

SEQ ID NO: 1518004 - RNA, 19 nt, Homo sapiens
  misc_RNA (1)...(19): siRNA sense strand
ugucaaagguggcuccaua

SEQ ID NO: 1518005 - RNA, 19 nt, Homo sapiens
  misc_RNA (1)...(19): siRNA sense strand
gaauuccgauuacauuuca

SEQ ID NO: 1518006 - RNA, 19 nt, Homo sapiens
  misc_RNA (1)...(19): siRNA sense strand
ggcaagauaugaugauuca

SEQ ID NO: 1518007 - RNA, 19 nt, Homo sapiens
  misc_RNA (1)...(19): siRNA sense strand
ggaacagcaucuaugaaga

SEQ ID NO: 1518008 - RNA, 19 nt, Homo sapiens
  misc_RNA (1)...(19): siRNA sense strand
caaagguggcuccauauuu

SEQ ID NO: 1518009 - RNA, 19 nt, Homo sapiens
  misc_RNA (1)...(19): siRNA sense strand
gaagauggccacuguucaa

SEQ ID NO: 1518010 - RNA, 19 nt, Homo sapiens
  misc_RNA (1)...(19): siRNA sense strand
ucaagaauaucucccguau

SEQ ID NO: 1518011 - RNA, 19 nt, Homo sapiens
  misc_RNA (1)...(19): siRNA sense strand
gagaauaguccaucuaaag

SEQ ID NO: 1518012 - RNA, 19 nt, Homo sapiens
  misc_RNA (1)...(19): siRNA sense strand
gauauugacagcaucgaua

SEQ ID NO: 1518013 - RNA, 19 nt, Homo sapiens
  misc_RNA (1)...(19): siRNA sense strand
ucuaaaggcuuccaacuca

SEQ ID NO: 1518014 - RNA, 19 nt, Homo sapiens
  misc_RNA (1)...(19): siRNA sense strand
ucacuggaguucuggauga

SEQ ID NO: 1518015 - RNA, 19 nt, Homo sapiens
  misc_RNA (1)...(19): siRNA sense strand
agaagaagaugcugacaca

SEQ ID NO: 1518016 - RNA, 19 nt, Homo sapiens
  misc_RNA (1)...(19): siRNA sense strand
ggaacugcccugaagauau

SEQ ID NO: 1518017 - RNA, 19 nt, Homo sapiens
  misc_RNA (1)...(19): siRNA sense strand
cagcaucgauaacuucaau

SEQ ID NO: 1518018 - RNA, 19 nt, Homo sapiens
  misc_RNA (1)...(19): siRNA sense strand
gcguuacacuggcuauaaa

SEQ ID NO: 1518019 - RNA, 19 nt, Homo sapiens
  misc_RNA (1)...(19): siRNA sense strand
ggcaaacaauaccaaagaa

SEQ ID NO: 1518020 - RNA, 19 nt, Homo sapiens
  misc_RNA (1)...(19): siRNA sense strand
caacucacccgacaggaaa

SEQ ID NO: 1518021 - RNA, 19 nt, Homo sapiens
  misc_RNA (1)...(19): siRNA sense strand
aaaggaggaauuccgauua

SEQ ID NO: 1518022 - RNA, 19 nt, Homo sapiens
  misc_RNA (1)...(19): siRNA sense strand
gcaggucacuggaguucug

SEQ ID NO: 1518023 - RNA, 19 nt, Homo sapiens
  misc_RNA (1)...(19): siRNA sense strand
ggcagaagauggccacugu

SEQ ID NO: 1518024 - RNA, 19 nt, Homo sapiens
  misc_RNA (1)...(19): siRNA sense strand
ccgauuacauuucaagaau

SEQ ID NO: 1518025 - RNA, 19 nt, Homo sapiens
  misc_RNA (1)...(19): siRNA sense strand
gaggaauuccgauuacauu

SEQ ID NO: 1518026 - RNA, 19 nt, Homo sapiens
  misc_RNA (1)...(19): siRNA sense strand
uuacaucuaugcgcaaauu

SEQ ID NO: 1518027 - RNA, 19 nt, Homo sapiens
  misc_RNA (1)...(19): siRNA sense strand
gaacagcaucuaugaagag

SEQ ID NO: 1518028 - RNA, 19 nt, Homo sapiens
  misc_RNA (1)...(19): siRNA sense strand
aagcugggcauucuaauaa

SEQ ID NO: 1518029 - RNA, 19 nt, Homo sapiens
  misc_RNA (1)...(19): siRNA sense strand
aaagguggcuccauauuuu

SEQ ID NO: 1518030 - RNA, 19 nt, Homo sapiens
  misc_RNA (1)...(19): siRNA sense strand
ugagcaagcuaauaaacug

SEQ ID NO: 1518031 - RNA, 19 nt, Homo sapiens
  misc_RNA (1)...(19): siRNA sense strand
uuugugaacuugaugauga

SEQ ID NO: 1518032 - RNA, 19 nt, Homo sapiens
  misc_RNA (1)...(19): siRNA sense strand
ccaagaaggcucaagaauc

SEQ ID NO: 1518033 - RNA, 19 nt, Homo sapiens
  misc_RNA (1)...(19): siRNA sense strand
cagagaauaguccaucuaa

SEQ ID NO: 1518034 - RNA, 19 nt, Homo sapiens
  misc_RNA (1)...(19): siRNA sense strand
cuaauaaacugggagcaau

SEQ ID NO: 1518035 - RNA, 19 nt, Homo sapiens
  misc_RNA (1)...(19): siRNA sense strand
ggaauuccgauuacauuuc

SEQ ID NO: 1518036 - RNA, 19 nt, Homo sapiens
  misc_RNA (1)...(19): siRNA sense strand
gcaaacaauaccaaagaau

SEQ ID NO: 1518037 - RNA, 19 nt, Homo sapiens
  misc_RNA (1)...(19): siRNA sense strand
caaaaucuuccccaaaaua

SEQ ID NO: 1518038 - RNA, 19 nt, Homo sapiens
  misc_RNA (1)...(19): siRNA sense strand
aggcgaagaugauggagaa

SEQ ID NO: 1518039 - RNA, 19 nt, Homo sapiens
  misc_RNA (1)...(19): siRNA sense strand
ucgauaacuucaauaccua

SEQ ID NO: 1518040 - RNA, 19 nt, Homo sapiens
  misc_RNA (1)...(19): siRNA sense strand
aagaagaugcugacacaaa

SEQ ID NO: 1518041 - RNA, 19 nt, Homo sapiens
  misc_RNA (1)...(19): siRNA sense strand
caagggagaagguccaaga

SEQ ID NO: 1518042 - RNA, 19 nt, Homo sapiens
  misc_RNA (1)...(19): siRNA sense strand
uacaaaaucuuccccaaaa

SEQ ID NO: 1518043 - RNA, 19 nt, Homo sapiens
  misc_RNA (1)...(19): siRNA sense strand
uaaaggaggaauuccgauu

SEQ ID NO: 1518044 - RNA, 19 nt, Homo sapiens
  misc_RNA (1)...(19): siRNA sense strand
ugaacuugaugaugagaga

SEQ ID NO: 1518045 - RNA, 19 nt, Homo sapiens
  misc_RNA (1)...(19): siRNA sense strand
aaagcugggcauucuaaua

SEQ ID NO: 1518046 - RNA, 19 nt, Homo sapiens
  misc_RNA (1)...(19): siRNA sense strand
ugugacaaaugcagauuau

SEQ ID NO: 1518047 - RNA, 19 nt, Homo sapiens
  misc_RNA (1)...(19): siRNA sense strand
aaagggaccucugcaugga

SEQ ID NO: 1518048 - RNA, 19 nt, Homo sapiens
  misc_RNA (1)...(19): siRNA sense strand
ugacaaaugcagauuaugg

SEQ ID NO: 1518049 - RNA, 19 nt, Homo sapiens
  misc_RNA (1)...(19): siRNA sense strand
agagucuucuauaagcuua

SEQ ID NO: 1518050 - RNA, 19 nt, Homo sapiens
  misc_RNA (1)...(19): siRNA sense strand
gaucuccagcugcucagua

SEQ ID NO: 1518051 - RNA, 19 nt, Homo sapiens
  misc_RNA (1)...(19): siRNA sense strand
agagaauaguccaucuaaa

SEQ ID NO: 1518052 - RNA, 19 nt, Homo sapiens
  misc_RNA (1)...(19): siRNA sense strand
caagaauaucucccguaua

SEQ ID NO: 1518053 - RNA, 19 nt, Homo sapiens
  misc_RNA (1)...(19): siRNA sense strand
cagcaucuaugaagagaac

SEQ ID NO: 1518054 - RNA, 19 nt, Homo sapiens
  misc_RNA (1)...(19): siRNA sense strand
aauaaacugggagcaauua

SEQ ID NO: 1518055 - RNA, 19 nt, Homo sapiens
  misc_RNA (1)...(19): siRNA sense strand
ucaaagguggcuccauauu

SEQ ID NO: 1518056 - RNA, 19 nt, Homo sapiens
  misc_RNA (1)...(19): siRNA sense strand
cagauuauggggaaaauua

SEQ ID NO: 1518057 - RNA, 19 nt, Homo sapiens
  misc_RNA (1)...(19): siRNA sense strand
gagagagacuauuuucguu

SEQ ID NO: 1518058 - RNA, 19 nt, Homo sapiens
  misc_RNA (1)...(19): siRNA sense strand
gcacuuugaugagaaaucc

SEQ ID NO: 1518059 - RNA, 19 nt, Homo sapiens
  misc_RNA (1)...(19): siRNA sense strand
cacuggaaaugcagaagaa

SEQ ID NO: 1518060 - RNA, 19 nt, Homo sapiens
  misc_RNA (1)...(19): siRNA sense strand
aaacugggagcaauuaaca

SEQ ID NO: 1518061 - RNA, 19 nt, Homo sapiens
  misc_RNA (1)...(19): siRNA sense strand
uauaauggacuguguugga

SEQ ID NO: 1518062 - RNA, 19 nt, Homo sapiens
  misc_RNA (1)...(19): siRNA sense strand
ggaggaauuccgauuacau

SEQ ID NO: 1518063 - RNA, 19 nt, Homo sapiens
  misc_RNA (1)...(19): siRNA sense strand
ugcaagagagagacuauuu

SEQ ID NO: 1518064 - RNA, 19 nt, Homo sapiens
  misc_RNA (1)...(19): siRNA sense strand
gcgcucaauugucgaucuu

SEQ ID NO: 1518065 - RNA, 19 nt, Homo sapiens
  misc_RNA (1)...(19): siRNA sense strand
gaagaaaccugggguaagc

SEQ ID NO: 1518066 - RNA, 19 nt, Homo sapiens
  misc_RNA (1)...(19): siRNA sense strand
gcaucaauuuacaucuaug

SEQ ID NO: 1518067 - RNA, 19 nt, Homo sapiens
  misc_RNA (1)...(19): siRNA sense strand
gagagacuauuuucguuau

SEQ ID NO: 1518068 - RNA, 19 nt, Homo sapiens
  misc_RNA (1)...(19): siRNA sense strand
uaauaaacugggagcaauu

SEQ ID NO: 1518069 - RNA, 19 nt, Homo sapiens
  misc_RNA (1)...(19): siRNA sense strand
gcugggcauucuaauaagu

SEQ ID NO: 1518070 - RNA, 19 nt, Homo sapiens
  misc_RNA (1)...(19): siRNA sense strand
ccagagaauaguccaucua

SEQ ID NO: 1518071 - RNA, 19 nt, Homo sapiens
  misc_RNA (1)...(19): siRNA sense strand
uuucaagccucgaucuguu

SEQ ID NO: 1518072 - RNA, 19 nt, Homo sapiens
  misc_RNA (1)...(19): siRNA sense strand
ucuaugaagagaacuguuu

SEQ ID NO: 1518073 - RNA, 19 nt, Homo sapiens
  misc_RNA (1)...(19): siRNA sense strand
uuacaagguuaaucugaag

SEQ ID NO: 1518074 - RNA, 19 nt, Homo sapiens
  misc_RNA (1)...(19): siRNA sense strand
gcuaauaaacugggagcaa

SEQ ID NO: 1518075 - RNA, 19 nt, Homo sapiens
  misc_RNA (1)...(19): siRNA sense strand
uggcaaacaauaccaaaga

SEQ ID NO: 1518076 - RNA, 19 nt, Homo sapiens
  misc_RNA (1)...(19): siRNA sense strand
caggaaauaguugcucuuu

SEQ ID NO: 1518077 - RNA, 19 nt, Homo sapiens
  misc_RNA (1)...(19): siRNA sense strand
agaagaugcugacacaaaa

SEQ ID NO: 1518078 - RNA, 19 nt, Homo sapiens
  misc_RNA (1)...(19): siRNA sense strand
cagaagauggccacuguuc

SEQ ID NO: 1518079 - RNA, 19 nt, Homo sapiens
  misc_RNA (1)...(19): siRNA sense strand
gcauggagaguguggaaca

SEQ ID NO: 1518080 - RNA, 19 nt, Homo sapiens
  misc_RNA (1)...(19): siRNA sense strand
uuugugagcaagcuaauaa

SEQ ID NO: 1518081 - RNA, 19 nt, Homo sapiens
  misc_RNA (1)...(19): siRNA sense strand
uuggaaggcuuucuacaag

SEQ ID NO: 1518082 - RNA, 19 nt, Homo sapiens
  misc_RNA (1)...(19): siRNA sense strand
ccaacucacccgacaggaa

SEQ ID NO: 1518083 - RNA, 19 nt, Homo sapiens
  misc_RNA (1)...(19): siRNA sense strand
uccaaaagcuuccagagaa

SEQ ID NO: 1518084 - RNA, 19 nt, Homo sapiens
  misc_RNA (1)...(19): siRNA sense strand
cuggaguucuggaugauug

SEQ ID NO: 1518085 - RNA, 19 nt, Homo sapiens
  misc_RNA (1)...(19): siRNA sense strand
ccaugcacuuugaugagaa

SEQ ID NO: 1518086 - RNA, 19 nt, Homo sapiens
  misc_RNA (1)...(19): siRNA sense strand
ucaagccucgaucuguuua

SEQ ID NO: 1518087 - RNA, 19 nt, Homo sapiens
  misc_RNA (1)...(19): siRNA sense strand
aagcuuauaucgggacuuc

SEQ ID NO: 1518088 - RNA, 19 nt, Homo sapiens
  misc_RNA (1)...(19): siRNA sense strand
caugcacuuugaugagaaa

SEQ ID NO: 1518089 - RNA, 19 nt, Homo sapiens
  misc_RNA (1)...(19): siRNA sense strand
ugacagcaucgauaacuuc

SEQ ID NO: 1518090 - RNA, 19 nt, Homo sapiens
  misc_RNA (1)...(19): siRNA sense strand
gguccaagaaggcucaaga

SEQ ID NO: 1518091 - RNA, 19 nt, Homo sapiens
  misc_RNA (1)...(19): siRNA sense strand
uuuaggaacugcccugaag

SEQ ID NO: 1518092 - RNA, 19 nt, Homo sapiens
  misc_RNA (1)...(19): siRNA sense strand
caacaugggcuauauaugc

SEQ ID NO: 1518093 - RNA, 19 nt, Homo sapiens
  misc_RNA (1)...(19): siRNA sense strand
gcuauggacugcacgaaca

SEQ ID NO: 1518094 - RNA, 19 nt, Homo sapiens
  misc_RNA (1)...(19): siRNA sense strand
ugaggacgaugacaugaau

SEQ ID NO: 1518095 - RNA, 19 nt, Homo sapiens
  misc_RNA (1)...(19): siRNA sense strand
gccacgugcucaagaagaa

SEQ ID NO: 1518096 - RNA, 19 nt, Homo sapiens
  misc_RNA (1)...(19): siRNA sense strand
cagugcagcuguccagugu

SEQ ID NO: 1518097 - RNA, 19 nt, Homo sapiens
  misc_RNA (1)...(19): siRNA sense strand
ugacaugaaugaggacaca

SEQ ID NO: 1518098 - RNA, 19 nt, Homo sapiens
  misc_RNA (1)...(19): siRNA sense strand
caagcaaaccagacacuuc

SEQ ID NO: 1518099 - RNA, 19 nt, Homo sapiens
  misc_RNA (1)...(19): siRNA sense strand
ugaaugaggacacaguaga

SEQ ID NO: 1518100 - RNA, 19 nt, Homo sapiens
  misc_RNA (1)...(19): siRNA sense strand
ggacacaguagagaggauu

SEQ ID NO: 1518101 - RNA, 19 nt, Homo sapiens
  misc_RNA (1)...(19): siRNA sense strand
ccacagggagcagggagua

SEQ ID NO: 1518102 - RNA, 19 nt, Homo sapiens
  misc_RNA (1)...(19): siRNA sense strand
gagccaagcaaaccagaca

SEQ ID NO: 1518103 - RNA, 19 nt, Homo sapiens
  misc_RNA (1)...(19): siRNA sense strand
gaaugaggacacaguagag

SEQ ID NO: 1518104 - RNA, 19 nt, Homo sapiens
  misc_RNA (1)...(19): siRNA sense strand
caugaaugaggacacagua

SEQ ID NO: 1518105 - RNA, 19 nt, Homo sapiens
  misc_RNA (1)...(19): siRNA sense strand
gaagggaaccccagagcuu

SEQ ID NO: 1518106 - RNA, 19 nt, Homo sapiens
  misc_RNA (1)...(19): siRNA sense strand
agaccacuguguucucugu

SEQ ID NO: 1518107 - RNA, 19 nt, Homo sapiens
  misc_RNA (1)...(19): siRNA sense strand
cauccagaaugaagccaau

SEQ ID NO: 1518108 - RNA, 19 nt, Homo sapiens
  misc_RNA (1)...(19): siRNA sense strand
cugguaggcuucaugaucu

SEQ ID NO: 1518109 - RNA, 19 nt, Homo sapiens
  misc_RNA (1)...(19): siRNA sense strand
gggagcagggaguauguga

SEQ ID NO: 1518110 - RNA, 19 nt, Homo sapiens
  misc_RNA (1)...(19): siRNA sense strand
guacagaauggaggacuca

SEQ ID NO: 1518111 - RNA, 19 nt, Homo sapiens
  misc_RNA (1)...(19): siRNA sense strand
ucagggacgcuccaaggaa

SEQ ID NO: 1518112 - RNA, 19 nt, Homo sapiens
  misc_RNA (1)...(19): siRNA sense strand
ccaaugcugaggccuugaa

SEQ ID NO: 1518113 - RNA, 19 nt, Homo sapiens
  misc_RNA (1)...(19): siRNA sense strand
ccacucaagaggcaaaugg

SEQ ID NO: 1518114 - RNA, 19 nt, Homo sapiens
  misc_RNA (1)...(19): siRNA sense strand
ccugguaggcuucaugauc

SEQ ID NO: 1518115 - RNA, 19 nt, Homo sapiens
  misc_RNA (1)...(19): siRNA sense strand
gaggagagcuguggauuga

SEQ ID NO: 1518116 - RNA, 19 nt, Homo sapiens
  misc_RNA (1)...(19): siRNA sense strand
gagcagaucucagcuuucu

SEQ ID NO: 1518117 - RNA, 19 nt, Homo sapiens
  misc_RNA (1)...(19): siRNA sense strand
uggagcagaucucagcuuu

SEQ ID NO: 1518118 - RNA, 19 nt, Homo sapiens
  misc_RNA (1)...(19): siRNA sense strand
ggaggagagcuguggauug

SEQ ID NO: 1518119 - RNA, 19 nt, Homo sapiens
  misc_RNA (1)...(19): siRNA sense strand
gaggccagcguccaguuug

SEQ ID NO: 1518120 - RNA, 19 nt, Homo sapiens
  misc_RNA (1)...(19): siRNA sense strand
ccucaccaccgcuguguug

SEQ ID NO: 1518121 - RNA, 19 nt, Homo sapiens
  misc_RNA (1)...(19): siRNA sense strand
gugaaggccggaccagugu

SEQ ID NO: 1518122 - RNA, 19 nt, Homo sapiens
  misc_RNA (1)...(19): siRNA sense strand
gcucugaggacugguaugg

SEQ ID NO: 1518123 - RNA, 19 nt, Homo sapiens
  misc_RNA (1)...(19): siRNA sense strand
gagauacaguccgaaauua

SEQ ID NO: 1518124 - RNA, 19 nt, Homo sapiens
  misc_RNA (1)...(19): siRNA sense strand
gcucauggauaucaaagua

SEQ ID NO: 1518125 - RNA, 19 nt, Homo sapiens
  misc_RNA (1)...(19): siRNA sense strand
gaagauaauuccucuaugg

SEQ ID NO: 1518126 - RNA, 19 nt, Homo sapiens
  misc_RNA (1)...(19): siRNA sense strand
ugaccuacauuguuuguua

SEQ ID NO: 1518127 - RNA, 19 nt, Homo sapiens
  misc_RNA (1)...(19): siRNA sense strand
gagcagaucuucagugaca

SEQ ID NO: 1518128 - RNA, 19 nt, Homo sapiens
  misc_RNA (1)...(19): siRNA sense strand
agaauaaacuguuggcuaa

SEQ ID NO: 1518129 - RNA, 19 nt, Homo sapiens
  misc_RNA (1)...(19): siRNA sense strand
uguaauagcucauggauau

SEQ ID NO: 1518130 - RNA, 19 nt, Homo sapiens
  misc_RNA (1)...(19): siRNA sense strand
ggacgucucuucauucugu

SEQ ID NO: 1518131 - RNA, 19 nt, Homo sapiens
  misc_RNA (1)...(19): siRNA sense strand
ggauugggaugaugaauau

SEQ ID NO: 1518132 - RNA, 19 nt, Homo sapiens
  misc_RNA (1)...(19): siRNA sense strand
uaaagaaacuuaccuggau

SEQ ID NO: 1518133 - RNA, 19 nt, Homo sapiens
  misc_RNA (1)...(19): siRNA sense strand
aaacuuaccuggauacugu

SEQ ID NO: 1518134 - RNA, 19 nt, Homo sapiens
  misc_RNA (1)...(19): siRNA sense strand
gagcugcaguucagagaaa

SEQ ID NO: 1518135 - RNA, 19 nt, Homo sapiens
  misc_RNA (1)...(19): siRNA sense strand
aaagaaacuuaccuggaua

SEQ ID NO: 1518136 - RNA, 19 nt, Homo sapiens
  misc_RNA (1)...(19): siRNA sense strand
caagauuuguugaagaaug

SEQ ID NO: 1518137 - RNA, 19 nt, Homo sapiens
  misc_RNA (1)...(19): siRNA sense strand
ucaaaacacugcaagauuu

SEQ ID NO: 1518138 - RNA, 19 nt, Homo sapiens
  misc_RNA (1)...(19): siRNA sense strand
gaccuacauuguuuguuaa

SEQ ID NO: 1518139 - RNA, 19 nt, Homo sapiens
  misc_RNA (1)...(19): siRNA sense strand
uugaauggcuaacuaacua

SEQ ID NO: 1518140 - RNA, 19 nt, Homo sapiens
  misc_RNA (1)...(19): siRNA sense strand
gaucuucagugacauugau

SEQ ID NO: 1518141 - RNA, 19 nt, Homo sapiens
  misc_RNA (1)...(19): siRNA sense strand
gaacugcuuuccuucuuac

SEQ ID NO: 1518142 - RNA, 19 nt, Homo sapiens
  misc_RNA (1)...(19): siRNA sense strand
uggcuaaucuucuguggaa

SEQ ID NO: 1518143 - RNA, 19 nt, Homo sapiens
  misc_RNA (1)...(19): siRNA sense strand
uaugugggaugauauaaga

SEQ ID NO: 1518144 - RNA, 19 nt, Homo sapiens
  misc_RNA (1)...(19): siRNA sense strand
gacauuggauuuacuuugg

SEQ ID NO: 1518145 - RNA, 19 nt, Homo sapiens
  misc_RNA (1)...(19): siRNA sense strand
aacaacaacugacugcuuu

SEQ ID NO: 1518146 - RNA, 19 nt, Homo sapiens
  misc_RNA (1)...(19): siRNA sense strand
cagaagaaauggcaaaauu

SEQ ID NO: 1518147 - RNA, 19 nt, Homo sapiens
  misc_RNA (1)...(19): siRNA sense strand
cuucgacgcuucuuaguga

SEQ ID NO: 1518148 - RNA, 19 nt, Homo sapiens
  misc_RNA (1)...(19): siRNA sense strand
gaauggcuaacuaacuaua

SEQ ID NO: 1518149 - RNA, 19 nt, Homo sapiens
  misc_RNA (1)...(19): siRNA sense strand
guacaucugaaucaucuuu

SEQ ID NO: 1518150 - RNA, 19 nt, Homo sapiens
  misc_RNA (1)...(19): siRNA sense strand
gaacaucuuuccauuuccu

SEQ ID NO: 1518151 - RNA, 19 nt, Homo sapiens
  misc_RNA (1)...(19): siRNA sense strand
caaaguacaaugcuuaagu

SEQ ID NO: 1518152 - RNA, 19 nt, Homo sapiens
  misc_RNA (1)...(19): siRNA sense strand
ucuaggacgucucuucauu

SEQ ID NO: 1518153 - RNA, 19 nt, Homo sapiens
  misc_RNA (1)...(19): siRNA sense strand
gcaaauuacaaagccauaa

SEQ ID NO: 1518154 - RNA, 19 nt, Homo sapiens
  misc_RNA (1)...(19): siRNA sense strand
uauccagaaucagaaguua

SEQ ID NO: 1518155 - RNA, 19 nt, Homo sapiens
  misc_RNA (1)...(19): siRNA sense strand
acaacugacugcuuugaau

SEQ ID NO: 1518156 - RNA, 19 nt, Homo sapiens
  misc_RNA (1)...(19): siRNA sense strand
ucaagucuaugugggauga

SEQ ID NO: 1518157 - RNA, 19 nt, Homo sapiens
  misc_RNA (1)...(19): siRNA sense strand
cuauggaugucaagucuau

SEQ ID NO: 1518158 - RNA, 19 nt, Homo sapiens
  misc_RNA (1)...(19): siRNA sense strand
ugcaagauuuguugaagaa

SEQ ID NO: 1518159 - RNA, 19 nt, Homo sapiens
  misc_RNA (1)...(19): siRNA sense strand
agagauacaguccgaaauu

SEQ ID NO: 1518160 - RNA, 19 nt, Homo sapiens
  misc_RNA (1)...(19): siRNA sense strand
caacucuuguuucuuuauc

SEQ ID NO: 1518161 - RNA, 19 nt, Homo sapiens
  misc_RNA (1)...(19): siRNA sense strand
gcagaucuucagugacauu

SEQ ID NO: 1518162 - RNA, 19 nt, Homo sapiens
  misc_RNA (1)...(19): siRNA sense strand
ccacagcagcguuucauuc

SEQ ID NO: 1518163 - RNA, 19 nt, Homo sapiens
  misc_RNA (1)...(19): siRNA sense strand
caacugacugcuuugaaug

SEQ ID NO: 1518164 - RNA, 19 nt, Homo sapiens
  misc_RNA (1)...(19): siRNA sense strand
caguacaucugaaucaucu

SEQ ID NO: 1518165 - RNA, 19 nt, Homo sapiens
  misc_RNA (1)...(19): siRNA sense strand
caacaacugacugcuuuga

SEQ ID NO: 1518166 - RNA, 19 nt, Homo sapiens
  misc_RNA (1)...(19): siRNA sense strand
uugagcagaucuucaguga

SEQ ID NO: 1518167 - RNA, 19 nt, Homo sapiens
  misc_RNA (1)...(19): siRNA sense strand
aaagagauacaguccgaaa

SEQ ID NO: 1518168 - RNA, 19 nt, Homo sapiens
  misc_RNA (1)...(19): siRNA sense strand
uccagaaucagaaguuaua

SEQ ID NO: 1518169 - RNA, 19 nt, Homo sapiens
  misc_RNA (1)...(19): siRNA sense strand
cuucuuagugagcaaauua

SEQ ID NO: 1518170 - RNA, 19 nt, Homo sapiens
  misc_RNA (1)...(19): siRNA sense strand
ugaagauaauuccucuaug

SEQ ID NO: 1518171 - RNA, 19 nt, Homo sapiens
  misc_RNA (1)...(19): siRNA sense strand
aaacaacaacugacugcuu

SEQ ID NO: 1518172 - RNA, 19 nt, Homo sapiens
  misc_RNA (1)...(19): siRNA sense strand
ucagugacauugaugaaaa

SEQ ID NO: 1518173 - RNA, 19 nt, Homo sapiens
  misc_RNA (1)...(19): siRNA sense strand
agauacaguccgaaauuaa

SEQ ID NO: 1518174 - RNA, 19 nt, Homo sapiens
  misc_RNA (1)...(19): siRNA sense strand
ugacauuggauuuacuuug

SEQ ID NO: 1518175 - RNA, 19 nt, Homo sapiens
  misc_RNA (1)...(19): siRNA sense strand
cuggagacuuggaguuuga

SEQ ID NO: 1518176 - RNA, 19 nt, Homo sapiens
  misc_RNA (1)...(19): siRNA sense strand
ucauggauaucaaaguaca

SEQ ID NO: 1518177 - RNA, 19 nt, Homo sapiens
  misc_RNA (1)...(19): siRNA sense strand
aauaaacuguuggcuaauc

SEQ ID NO: 1518178 - RNA, 19 nt, Homo sapiens
  misc_RNA (1)...(19): siRNA sense strand
gugcuuacaacaacucuug

SEQ ID NO: 1518179 - RNA, 19 nt, Homo sapiens
  misc_RNA (1)...(19): siRNA sense strand
cugcaagauuuguugaaga

SEQ ID NO: 1518180 - RNA, 19 nt, Homo sapiens
  misc_RNA (1)...(19): siRNA sense strand
aguccgaaauuaacaaaca

SEQ ID NO: 1518181 - RNA, 19 nt, Homo sapiens
  misc_RNA (1)...(19): siRNA sense strand
gcauagaggagcagugcau

SEQ ID NO: 1518182 - RNA, 19 nt, Homo sapiens
  misc_RNA (1)...(19): siRNA sense strand
gauguaauagcucauggau

SEQ ID NO: 1518183 - RNA, 19 nt, Homo sapiens
  misc_RNA (1)...(19): siRNA sense strand
ucauucccaucaacccuaa

SEQ ID NO: 1518184 - RNA, 19 nt, Homo sapiens
  misc_RNA (1)...(19): siRNA sense strand
guccgaaauuaacaaacaa

SEQ ID NO: 1518185 - RNA, 19 nt, Homo sapiens
  misc_RNA (1)...(19): siRNA sense strand
uuacaguacaucugaauca

SEQ ID NO: 1518186 - RNA, 19 nt, Homo sapiens
  misc_RNA (1)...(19): siRNA sense strand
gaaacuuaccuggauacug

SEQ ID NO: 1518187 - RNA, 19 nt, Homo sapiens
  misc_RNA (1)...(19): siRNA sense strand
gauacaguccgaaauuaac

SEQ ID NO: 1518188 - RNA, 19 nt, Homo sapiens
  misc_RNA (1)...(19): siRNA sense strand
ccaucaacccuaaguggaa

SEQ ID NO: 1518189 - RNA, 19 nt, Homo sapiens
  misc_RNA (1)...(19): siRNA sense strand
cauggagacuugauaaaau

SEQ ID NO: 1518190 - RNA, 19 nt, Homo sapiens
  misc_RNA (1)...(19): siRNA sense strand
uaauagcucauggauauca

SEQ ID NO: 1518191 - RNA, 19 nt, Homo sapiens
  misc_RNA (1)...(19): siRNA sense strand
gggaugaugaauauucuca

SEQ ID NO: 1518192 - RNA, 19 nt, Homo sapiens
  misc_RNA (1)...(19): siRNA sense strand
uaggacgucucuucauucu

SEQ ID NO: 1518193 - RNA, 19 nt, Homo sapiens
  misc_RNA (1)...(19): siRNA sense strand
gcuuugaauggcuaacuaa

SEQ ID NO: 1518194 - RNA, 19 nt, Homo sapiens
  misc_RNA (1)...(19): siRNA sense strand
caagcaagagcuccagcaa

SEQ ID NO: 1518195 - RNA, 19 nt, Homo sapiens
  misc_RNA (1)...(19): siRNA sense strand
ggauaucaaaguacaaugc

SEQ ID NO: 1518196 - RNA, 19 nt, Homo sapiens
  misc_RNA (1)...(19): siRNA sense strand
uuacagaagaaauggcaaa

SEQ ID NO: 1518197 - RNA, 19 nt, Homo sapiens
  misc_RNA (1)...(19): siRNA sense strand
gcaucuucgacgcuucuua

SEQ ID NO: 1518198 - RNA, 19 nt, Homo sapiens
  misc_RNA (1)...(19): siRNA sense strand
cagugcaugcuuuggguua

SEQ ID NO: 1518199 - RNA, 19 nt, Homo sapiens
  misc_RNA (1)...(19): siRNA sense strand
gaauaaacuguuggcuaau

SEQ ID NO: 1518200 - RNA, 19 nt, Homo sapiens
  misc_RNA (1)...(19): siRNA sense strand
caucuucgacgcuucuuag

SEQ ID NO: 1518201 - RNA, 19 nt, Homo sapiens
  misc_RNA (1)...(19): siRNA sense strand
caagagcuccagcaagcau

SEQ ID NO: 1518202 - RNA, 19 nt, Homo sapiens
  misc_RNA (1)...(19): siRNA sense strand
ccuggagacuuggaguuug

SEQ ID NO: 1518203 - RNA, 19 nt, Homo sapiens
  misc_RNA (1)...(19): siRNA sense strand
uuaccuggauacuguuaca

SEQ ID NO: 1518204 - RNA, 19 nt, Homo sapiens
  misc_RNA (1)...(19): siRNA sense strand
aagucuaugugggaugaua

SEQ ID NO: 1518205 - RNA, 19 nt, Homo sapiens
  misc_RNA (1)...(19): siRNA sense strand
cucauuuccuggagacuug

SEQ ID NO: 1518206 - RNA, 19 nt, Homo sapiens
  misc_RNA (1)...(19): siRNA sense strand
ccagaaucagaaguuauaa

SEQ ID NO: 1518207 - RNA, 19 nt, Homo sapiens
  misc_RNA (1)...(19): siRNA sense strand
auaaacuguuggcuaaucu

SEQ ID NO: 1518208 - RNA, 19 nt, Homo sapiens
  misc_RNA (1)...(19): siRNA sense strand
gaucaucucccugguaauu

SEQ ID NO: 1518209 - RNA, 19 nt, Homo sapiens
  misc_RNA (1)...(19): siRNA sense strand
uaacugggccuacggcuuu

SEQ ID NO: 1518210 - RNA, 19 nt, Homo sapiens
  misc_RNA (1)...(19): siRNA sense strand
ucaucucccugguaauuua

SEQ ID NO: 1518211 - RNA, 19 nt, Homo sapiens
  misc_RNA (1)...(19): siRNA sense strand
ucacuuacaucuauaacug

SEQ ID NO: 1518212 - RNA, 19 nt, Homo sapiens
  misc_RNA (1)...(19): siRNA sense strand
gucagagccucauggagua

SEQ ID NO: 1518213 - RNA, 19 nt, Homo sapiens
  misc_RNA (1)...(19): siRNA sense strand
gcaaugccaagcccaggua

SEQ ID NO: 1518214 - RNA, 19 nt, Homo sapiens
  misc_RNA (1)...(19): siRNA sense strand
gcucuucuguggcuucauc

SEQ ID NO: 1518215 - RNA, 19 nt, Homo sapiens
  misc_RNA (1)...(19): siRNA sense strand
gcugucacuuacaucuaua

SEQ ID NO: 1518216 - RNA, 19 nt, Homo sapiens
  misc_RNA (1)...(19): siRNA sense strand
ccagguacuucuacacauc

SEQ ID NO: 1518217 - RNA, 19 nt, Homo sapiens
  misc_RNA (1)...(19): siRNA sense strand
caacuacgaagaugaccuu

SEQ ID NO: 1518218 - RNA, 19 nt, Homo sapiens
  misc_RNA (1)...(19): siRNA sense strand
gauuggcugugccuucuuc

SEQ ID NO: 1518219 - RNA, 19 nt, Homo sapiens
  misc_RNA (1)...(19): siRNA sense strand
ccaacccugcugucacuua

SEQ ID NO: 1518220 - RNA, 19 nt, Homo sapiens
  misc_RNA (1)...(19): siRNA sense strand
ugccuuggcugcuguguuc

SEQ ID NO: 1518221 - RNA, 19 nt, Homo sapiens
  misc_RNA (1)...(19): siRNA sense strand
uaauuuaccccgugaagua

SEQ ID NO: 1518222 - RNA, 19 nt, Homo sapiens
  misc_RNA (1)...(19): siRNA sense strand
ccacgauuauccugauugg

SEQ ID NO: 1518223 - RNA, 19 nt, Homo sapiens
  misc_RNA (1)...(19): siRNA sense strand
ugaaguacacccagaccuu

SEQ ID NO: 1518224 - RNA, 19 nt, Homo sapiens
  misc_RNA (1)...(19): siRNA sense strand
caacccugcugucacuuac

SEQ ID NO: 1518225 - RNA, 19 nt, Homo sapiens
  misc_RNA (1)...(19): siRNA sense strand
gcugcuguguuccagauca

SEQ ID NO: 1518226 - RNA, 19 nt, Homo sapiens
  misc_RNA (1)...(19): siRNA sense strand
cagccacgauuauccugau

SEQ ID NO: 1518227 - RNA, 19 nt, Homo sapiens
  misc_RNA (1)...(19): siRNA sense strand
cguccucgcugugguggaa

SEQ ID NO: 1518228 - RNA, 19 nt, Homo sapiens
  misc_RNA (1)...(19): siRNA sense strand
ucauccuggugaucuguuu

SEQ ID NO: 1518229 - RNA, 19 nt, Homo sapiens
  misc_RNA (1)...(19): siRNA sense strand
gccaucgccuucgacauca

SEQ ID NO: 1518230 - RNA, 19 nt, Homo sapiens
  misc_RNA (1)...(19): siRNA sense strand
gcggcugguugcagucuag

SEQ ID NO: 1518231 - RNA, 19 nt, Homo sapiens
  misc_RNA (1)...(19): siRNA sense strand
ugcugucacuuacaucuau

SEQ ID NO: 1518232 - RNA, 19 nt, Homo sapiens
  misc_RNA (1)...(19): siRNA sense strand
cgccaucgccuucgacauc

SEQ ID NO: 1518233 - RNA, 19 nt, Homo sapiens
  misc_RNA (1)...(19): siRNA sense strand
cuucuacacaucugccuaa

SEQ ID NO: 1518234 - RNA, 19 nt, Homo sapiens
  misc_RNA (1)...(19): siRNA sense strand
gcccagguacuucuacaca

SEQ ID NO: 1518235 - RNA, 19 nt, Homo sapiens
  misc_RNA (1)...(19): siRNA sense strand
guggaaaugcucccaagag

SEQ ID NO: 1518236 - RNA, 19 nt, Homo sapiens
  misc_RNA (1)...(19): siRNA sense strand
acaagcugcuggacaagga

SEQ ID NO: 1518237 - RNA, 19 nt, Homo sapiens
  misc_RNA (1)...(19): siRNA sense strand
ucuggaaacugcucuugga

SEQ ID NO: 1518238 - RNA, 19 nt, Homo sapiens
  misc_RNA (1)...(19): siRNA sense strand
ggucuacaggcuaucgaua

SEQ ID NO: 1518239 - RNA, 19 nt, Homo sapiens
  misc_RNA (1)...(19): siRNA sense strand
uggaugugcugguguuugu

SEQ ID NO: 1518240 - RNA, 19 nt, Homo sapiens
  misc_RNA (1)...(19): siRNA sense strand
ugcacaagcugcuggacaa

SEQ ID NO: 1518241 - RNA, 19 nt, Homo sapiens
  misc_RNA (1)...(19): siRNA sense strand
ugagcgaggccaugaguau

SEQ ID NO: 1518242 - RNA, 19 nt, Homo sapiens
  misc_RNA (1)...(19): siRNA sense strand
gcaggacccaccuuugaag

SEQ ID NO: 1518243 - RNA, 19 nt, Homo sapiens
  misc_RNA (1)...(19): siRNA sense strand
gaccugagcgaggccauga

SEQ ID NO: 1518244 - RNA, 19 nt, Homo sapiens
  misc_RNA (1)...(19): siRNA sense strand
gucuacaggcuaucgauaa

SEQ ID NO: 1518245 - RNA, 19 nt, Homo sapiens
  misc_RNA (1)...(19): siRNA sense strand
cugcaggacccaccuuuga

SEQ ID NO: 1518246 - RNA, 19 nt, Homo sapiens
  misc_RNA (1)...(19): siRNA sense strand
gagcgaggccaugaguaug

SEQ ID NO: 1518247 - RNA, 19 nt, Homo sapiens
  misc_RNA (1)...(19): siRNA sense strand
gcucggugcucuucauccu

SEQ ID NO: 1518248 - RNA, 19 nt, Homo sapiens
  misc_RNA (1)...(19): siRNA sense strand
gguggaccugcuagaaauu

SEQ ID NO: 1518249 - RNA, 19 nt, Homo sapiens
  misc_RNA (1)...(19): siRNA sense strand
ggaauguccugaaauguug

SEQ ID NO: 1518250 - RNA, 19 nt, Homo sapiens
  misc_RNA (1)...(19): siRNA sense strand
ccagaaagcccaagaagaa

SEQ ID NO: 1518251 - RNA, 19 nt, Homo sapiens
  misc_RNA (1)...(19): siRNA sense strand
ggacaaagacacagagaga

SEQ ID NO: 1518252 - RNA, 19 nt, Homo sapiens
  misc_RNA (1)...(19): siRNA sense strand
ccacagaaguucacaugau

SEQ ID NO: 1518253 - RNA, 19 nt, Homo sapiens
  misc_RNA (1)...(19): siRNA sense strand
uucaggagcuguccaguua

SEQ ID NO: 1518254 - RNA, 19 nt, Homo sapiens
  misc_RNA (1)...(19): siRNA sense strand
gguggaauguccugaaaug

SEQ ID NO: 1518255 - RNA, 19 nt, Homo sapiens
  misc_RNA (1)...(19): siRNA sense strand
agagagacauugagaugaa

SEQ ID NO: 1518256 - RNA, 19 nt, Homo sapiens
  misc_RNA (1)...(19): siRNA sense strand
uacgggagcuccaccuaua

SEQ ID NO: 1518257 - RNA, 19 nt, Homo sapiens
  misc_RNA (1)...(19): siRNA sense strand
gaagacauccuugggaguu

SEQ ID NO: 1518258 - RNA, 19 nt, Homo sapiens
  misc_RNA (1)...(19): siRNA sense strand
gaagacauccuugggaguu

SEQ ID NO: 1518259 - RNA, 19 nt, Homo sapiens
  misc_RNA (1)...(19): siRNA sense strand
cagaggaggugaagacauc

SEQ ID NO: 1518260 - RNA, 19 nt, Homo sapiens
  misc_RNA (1)...(19): siRNA sense strand
gaucagggauguacuucag

SEQ ID NO: 1518261 - RNA, 19 nt, Homo sapiens
  misc_RNA (1)...(19): siRNA sense strand
gcagaagaagcaacagaaa

SEQ ID NO: 1518262 - RNA, 19 nt, Homo sapiens
  misc_RNA (1)...(19): siRNA sense strand
gagagacauugagaugaaa

SEQ ID NO: 1518263 - RNA, 19 nt, Homo sapiens
  misc_RNA (1)...(19): siRNA sense strand
cacagaaguucacaugaug

SEQ ID NO: 1518264 - RNA, 19 nt, Homo sapiens
  misc_RNA (1)...(19): siRNA sense strand
gcaaagcaauuggaagacu

SEQ ID NO: 1518265 - RNA, 19 nt, Homo sapiens
  misc_RNA (1)...(19): siRNA sense strand
ggcaaagagugaccuggaa

SEQ ID NO: 1518266 - RNA, 19 nt, Homo sapiens
  misc_RNA (1)...(19): siRNA sense strand
gguaugcuuuccaucagaa

SEQ ID NO: 1518267 - RNA, 19 nt, Homo sapiens
  misc_RNA (1)...(19): siRNA sense strand
ugaggaagccacagaaguu

SEQ ID NO: 1518268 - RNA, 19 nt, Homo sapiens
  misc_RNA (1)...(19): siRNA sense strand
gaacaucucccugaagcau

SEQ ID NO: 1518269 - RNA, 19 nt, Homo sapiens
  misc_RNA (1)...(19): siRNA sense strand
ccaggaagcccagcaagaa

SEQ ID NO: 1518270 - RNA, 19 nt, Homo sapiens
  misc_RNA (1)...(19): siRNA sense strand
gcacauggaagaaguacca

SEQ ID NO: 1518271 - RNA, 19 nt, Homo sapiens
  misc_RNA (1)...(19): siRNA sense strand
gccaggcucugugaagaaa

SEQ ID NO: 1518272 - RNA, 19 nt, Homo sapiens
  misc_RNA (1)...(19): siRNA sense strand
ggaagacuccaccauuaca

SEQ ID NO: 1518273 - RNA, 19 nt, Homo sapiens
  misc_RNA (1)...(19): siRNA sense strand
acacagagagagacauuga

SEQ ID NO: 1518274 - RNA, 19 nt, Homo sapiens
  misc_RNA (1)...(19): siRNA sense strand
gaccaaaguggaagaggaa

SEQ ID NO: 1518275 - RNA, 19 nt, Homo sapiens
  misc_RNA (1)...(19): siRNA sense strand
gagaugaaacggcaacuac

SEQ ID NO: 1518276 - RNA, 19 nt, Homo sapiens
  misc_RNA (1)...(19): siRNA sense strand
cagagucuccucacuguug

SEQ ID NO: 1518277 - RNA, 19 nt, Homo sapiens
  misc_RNA (1)...(19): siRNA sense strand
gaucaucuagaggaguuua

SEQ ID NO: 1518278 - RNA, 19 nt, Homo sapiens
  misc_RNA (1)...(19): siRNA sense strand
gagagagacauugagauga

SEQ ID NO: 1518279 - RNA, 19 nt, Homo sapiens
  misc_RNA (1)...(19): siRNA sense strand
cagcagaugucagcaaguc

SEQ ID NO: 1518280 - RNA, 19 nt, Homo sapiens
  misc_RNA (1)...(19): siRNA sense strand
aaccaacggugaccuggaa

SEQ ID NO: 1518281 - RNA, 19 nt, Homo sapiens
  misc_RNA (1)...(19): siRNA sense strand
caaagagugaccuggaaga

SEQ ID NO: 1518282 - RNA, 19 nt, Homo sapiens
  misc_RNA (1)...(19): siRNA sense strand
agagagagacauugagaug

SEQ ID NO: 1518283 - RNA, 19 nt, Homo sapiens
  misc_RNA (1)...(19): siRNA sense strand
uggaauguccugaaauguu

SEQ ID NO: 1518284 - RNA, 19 nt, Homo sapiens
  misc_RNA (1)...(19): siRNA sense strand
acaaagacacagagagaga

SEQ ID NO: 1518285 - RNA, 19 nt, Homo sapiens
  misc_RNA (1)...(19): siRNA sense strand
ggguaugcuuuccaucaga

SEQ ID NO: 1518286 - RNA, 19 nt, Homo sapiens
  misc_RNA (1)...(19): siRNA sense strand
uggcaaagcaauuggaaga

SEQ ID NO: 1518287 - RNA, 19 nt, Homo sapiens
  misc_RNA (1)...(19): siRNA sense strand
caggagcuguccaguuaca

SEQ ID NO: 1518288 - RNA, 19 nt, Homo sapiens
  misc_RNA (1)...(19): siRNA sense strand
ccgguggaauguccugaaa

SEQ ID NO: 1518289 - RNA, 19 nt, Homo sapiens
  misc_RNA (1)...(19): siRNA sense strand
cauggaagaaguaccaaga

SEQ ID NO: 1518290 - RNA, 19 nt, Homo sapiens
  misc_RNA (1)...(19): siRNA sense strand
cagaaagcccaagaagaaa

SEQ ID NO: 1518291 - RNA, 19 nt, Homo sapiens
  misc_RNA (1)...(19): siRNA sense strand
agacacagagagagacauu

SEQ ID NO: 1518292 - RNA, 19 nt, Homo sapiens
  misc_RNA (1)...(19): siRNA sense strand
caggaagcccagcaagaaa

SEQ ID NO: 1518293 - RNA, 19 nt, Homo sapiens
  misc_RNA (1)...(19): siRNA sense strand
cuauacagcacauggaaga

SEQ ID NO: 1518294 - RNA, 19 nt, Homo sapiens
  misc_RNA (1)...(19): siRNA sense strand
caaaguggaagaggaagug

SEQ ID NO: 1518295 - RNA, 19 nt, Homo sapiens
  misc_RNA (1)...(19): siRNA sense strand
gcagaacaucucccugaag

SEQ ID NO: 1518296 - RNA, 19 nt, Homo sapiens
  misc_RNA (1)...(19): siRNA sense strand
acagagagagacauugaga

SEQ ID NO: 1518297 - RNA, 19 nt, Homo sapiens
  misc_RNA (1)...(19): siRNA sense strand
ccacagggguucacaugau

SEQ ID NO: 1518298 - RNA, 19 nt, Homo sapiens
  misc_RNA (1)...(19): siRNA sense strand
ccacagggguucacaugau

SEQ ID NO: 1518299 - RNA, 19 nt, Homo sapiens
  misc_RNA (1)...(19): siRNA sense strand
acaacguggugaccuggaa

SEQ ID NO: 1518300 - RNA, 19 nt, Homo sapiens
  misc_RNA (1)...(19): siRNA sense strand
ccacacuggcaaagcaauu

SEQ ID NO: 1518301 - RNA, 19 nt, Homo sapiens
  misc_RNA (1)...(19): siRNA sense strand
gaggaagccacagaaguuc

SEQ ID NO: 1518302 - RNA, 19 nt, Homo sapiens
  misc_RNA (1)...(19): siRNA sense strand
gcagacgcaggcacccaaa

SEQ ID NO: 1518303 - RNA, 19 nt, Homo sapiens
  misc_RNA (1)...(19): siRNA sense strand
caacagaaaagaccaaagu

SEQ ID NO: 1518304 - RNA, 19 nt, Homo sapiens
  misc_RNA (1)...(19): siRNA sense strand
ucaucuagaggaguuuaua

SEQ ID NO: 1518305 - RNA, 19 nt, Homo sapiens
  misc_RNA (1)...(19): siRNA sense strand
ugaagcauccaaucagagu

SEQ ID NO: 1518306 - RNA, 19 nt, Homo sapiens
  misc_RNA (1)...(19): siRNA sense strand
agaggaguuuauagcagaa

SEQ ID NO: 1518307 - RNA, 19 nt, Homo sapiens
  misc_RNA (1)...(19): siRNA sense strand
aaaccagaaagcccaagaa

SEQ ID NO: 1518308 - RNA, 19 nt, Homo sapiens
  misc_RNA (1)...(19): siRNA sense strand
gaagacuccaccauuacag

SEQ ID NO: 1518309 - RNA, 19 nt, Homo sapiens
  misc_RNA (1)...(19): siRNA sense strand
cagaaguucacaugaugga

SEQ ID NO: 1518310 - RNA, 19 nt, Homo sapiens
  misc_RNA (1)...(19): siRNA sense strand
aagaaaagccgguggaaug

SEQ ID NO: 1518311 - RNA, 19 nt, Homo sapiens
  misc_RNA (1)...(19): siRNA sense strand
uacagcacauggaagaagu

SEQ ID NO: 1518312 - RNA, 19 nt, Homo sapiens
  misc_RNA (1)...(19): siRNA sense strand
acacuggccgaacuucuga

SEQ ID NO: 1518313 - RNA, 19 nt, Homo sapiens
  misc_RNA (1)...(19): siRNA sense strand
cagacacacuggccgaacu

SEQ ID NO: 1518314 - RNA, 19 nt, Homo sapiens
  misc_RNA (1)...(19): siRNA sense strand
ugagaugaaacggcaacua

SEQ ID NO: 1518315 - RNA, 19 nt, Homo sapiens
  misc_RNA (1)...(19): siRNA sense strand
gaagaagcaacagaaaaga

SEQ ID NO: 1518316 - RNA, 19 nt, Homo sapiens
  misc_RNA (1)...(19): siRNA sense strand
cuacauggcuuccacuaua

SEQ ID NO: 1518317 - RNA, 19 nt, Homo sapiens
  misc_RNA (1)...(19): siRNA sense strand
gcaaagagaaaguugauuu

SEQ ID NO: 1518318 - RNA, 19 nt, Homo sapiens
  misc_RNA (1)...(19): siRNA sense strand
gaagaagggcucauugaaa

SEQ ID NO: 1518319 - RNA, 19 nt, Homo sapiens
  misc_RNA (1)...(19): siRNA sense strand
ugaagaggaugaucaguaa

SEQ ID NO: 1518320 - RNA, 19 nt, Homo sapiens
  misc_RNA (1)...(19): siRNA sense strand
gggauguucuccguuauua

SEQ ID NO: 1518321 - RNA, 19 nt, Homo sapiens
  misc_RNA (1)...(19): siRNA sense strand
gaaaacaccuaccagcuuu

SEQ ID NO: 1518322 - RNA, 19 nt, Homo sapiens
  misc_RNA (1)...(19): siRNA sense strand
gcgaucauguuuacaaugu

SEQ ID NO: 1518323 - RNA, 19 nt, Homo sapiens
  misc_RNA (1)...(19): siRNA sense strand
uggauuggcuucguuauuu

SEQ ID NO: 1518324 - RNA, 19 nt, Homo sapiens
  misc_RNA (1)...(19): siRNA sense strand
ccuaccagcuuuccuguaa

SEQ ID NO: 1518325 - RNA, 19 nt, Homo sapiens
  misc_RNA (1)...(19): siRNA sense strand
aaacucagcuaugcauuug

SEQ ID NO: 1518326 - RNA, 19 nt, Homo sapiens
  misc_RNA (1)...(19): siRNA sense strand
ggagagacuuugccgagau

SEQ ID NO: 1518327 - RNA, 19 nt, Homo sapiens
  misc_RNA (1)...(19): siRNA sense strand
gacaauaucugugcagucu

SEQ ID NO: 1518328 - RNA, 19 nt, Homo sapiens
  misc_RNA (1)...(19): siRNA sense strand
ggcauuaacuauucacuag

SEQ ID NO: 1518329 - RNA, 19 nt, Homo sapiens
  misc_RNA (1)...(19): siRNA sense strand
gaucauguuuacaaugugu

SEQ ID NO: 1518330 - RNA, 19 nt, Homo sapiens
  misc_RNA (1)...(19): siRNA sense strand
caaacucagcuaugcauuu

SEQ ID NO: 1518331 - RNA, 19 nt, Homo sapiens
  misc_RNA (1)...(19): siRNA sense strand
gcagcucucucauacaaag

SEQ ID NO: 1518332 - RNA, 19 nt, Homo sapiens
  misc_RNA (1)...(19): siRNA sense strand
caauaucugugcagucugu

SEQ ID NO: 1518333 - RNA, 19 nt, Homo sapiens
  misc_RNA (1)...(19): siRNA sense strand
gaagaucauuguggagcuu

SEQ ID NO: 1518334 - RNA, 19 nt, Homo sapiens
  misc_RNA (1)...(19): siRNA sense strand
agagaaaguugauuugaag

SEQ ID NO: 1518335 - RNA, 19 nt, Homo sapiens
  misc_RNA (1)...(19): siRNA sense strand
gagcuuaucggacaauauc

SEQ ID NO: 1518336 - RNA, 19 nt, Homo sapiens
  misc_RNA (1)...(19): siRNA sense strand
guucaaggcauuaacuauu

SEQ ID NO: 1518337 - RNA, 19 nt, Homo sapiens
  misc_RNA (1)...(19): siRNA sense strand
cauuugguguuguggguua

SEQ ID NO: 1518338 - RNA, 19 nt, Homo sapiens
  misc_RNA (1)...(19): siRNA sense strand
ggaauaguucaaggcauua

SEQ ID NO: 1518339 - RNA, 19 nt, Homo sapiens
  misc_RNA (1)...(19): siRNA sense strand
cagcuuuccuguaaucaug

SEQ ID NO: 1518340 - RNA, 19 nt, Homo sapiens
  misc_RNA (1)...(19): siRNA sense strand
gcuagagauuccauggauu

SEQ ID NO: 1518341 - RNA, 19 nt, Homo sapiens
  misc_RNA (1)...(19): siRNA sense strand
ggaaggacaccacgauugg

SEQ ID NO: 1518342 - RNA, 19 nt, Homo sapiens
  misc_RNA (1)...(19): siRNA sense strand
cuagagauuccauggauuu

SEQ ID NO: 1518343 - RNA, 19 nt, Homo sapiens
  misc_RNA (1)...(19): siRNA sense strand
gucuacaaaugguuucuuu

SEQ ID NO: 1518344 - RNA, 19 nt, Homo sapiens
  misc_RNA (1)...(19): siRNA sense strand
aagaagggcucauugaaaa

SEQ ID NO: 1518345 - RNA, 19 nt, Homo sapiens
  misc_RNA (1)...(19): siRNA sense strand
ugaagaagggcucauugaa

SEQ ID NO: 1518346 - RNA, 19 nt, Homo sapiens
  misc_RNA (1)...(19): siRNA sense strand
ccuacaaucuggugaccuu

SEQ ID NO: 1518347 - RNA, 19 nt, Homo sapiens
  misc_RNA (1)...(19): siRNA sense strand
gagagacuuugccgagauc

SEQ ID NO: 1518348 - RNA, 19 nt, Homo sapiens
  misc_RNA (1)...(19): siRNA sense strand
uacaauguguggauucaau

SEQ ID NO: 1518349 - RNA, 19 nt, Homo sapiens
  misc_RNA (1)...(19): siRNA sense strand
cacgauuggucuacaaaug

SEQ ID NO: 1518350 - RNA, 19 nt, Homo sapiens
  misc_RNA (1)...(19): siRNA sense strand
uuacuuggcgaucauguuu

SEQ ID NO: 1518351 - RNA, 19 nt, Homo sapiens
  misc_RNA (1)...(19): siRNA sense strand
gcacacauuuucuguaugg

SEQ ID NO: 1518352 - RNA, 19 nt, Homo sapiens
  misc_RNA (1)...(19): siRNA sense strand
ccugggagcgcacacauuu

SEQ ID NO: 1518353 - RNA, 19 nt, Homo sapiens
  misc_RNA (1)...(19): siRNA sense strand
ucuccguuauuaccaguua

SEQ ID NO: 1518354 - RNA, 19 nt, Homo sapiens
  misc_RNA (1)...(19): siRNA sense strand
gauguggguuguccccuua

SEQ ID NO: 1518355 - RNA, 19 nt, Homo sapiens
  misc_RNA (1)...(19): siRNA sense strand
gaauaguucaaggcauuaa

SEQ ID NO: 1518356 - RNA, 19 nt, Homo sapiens
  misc_RNA (1)...(19): siRNA sense strand
caggagaggauguacaaga

SEQ ID NO: 1518357 - RNA, 19 nt, Homo sapiens
  misc_RNA (1)...(19): siRNA sense strand
gcgcacacauuuucuguau

SEQ ID NO: 1518358 - RNA, 19 nt, Homo sapiens
  misc_RNA (1)...(19): siRNA sense strand
ucaaggcauuaacuauuca

SEQ ID NO: 1518359 - RNA, 19 nt, Homo sapiens
  misc_RNA (1)...(19): siRNA sense strand
gaucuacaaacucagcuau

SEQ ID NO: 1518360 - RNA, 19 nt, Homo sapiens
  misc_RNA (1)...(19): siRNA sense strand
uugaagaggaugaucagua

SEQ ID NO: 1518361 - RNA, 19 nt, Homo sapiens
  misc_RNA (1)...(19): siRNA sense strand
uuguggagcuugaugaaga

SEQ ID NO: 1518362 - RNA, 19 nt, Homo sapiens
  misc_RNA (1)...(19): siRNA sense strand
gguggcgguuucugucuau

SEQ ID NO: 1518363 - RNA, 19 nt, Homo sapiens
  misc_RNA (1)...(19): siRNA sense strand
ggagaggauguacaagaug

SEQ ID NO: 1518364 - RNA, 19 nt, Homo sapiens
  misc_RNA (1)...(19): siRNA sense strand
cuauaggguucuacagugu

SEQ ID NO: 1518365 - RNA, 19 nt, Homo sapiens
  misc_RNA (1)...(19): siRNA sense strand
guucuacggccucuacuau

SEQ ID NO: 1518366 - RNA, 19 nt, Homo sapiens
  misc_RNA (1)...(19): siRNA sense strand
gcacguggaaaugaucuug

SEQ ID NO: 1518367 - RNA, 19 nt, Homo sapiens
  misc_RNA (1)...(19): siRNA sense strand
ccaguuacauccucuucag

SEQ ID NO: 1518368 - RNA, 19 nt, Homo sapiens
  misc_RNA (1)...(19): siRNA sense strand
aggagaggauguacaagau

SEQ ID NO: 1518369 - RNA, 19 nt, Homo sapiens
  misc_RNA (1)...(19): siRNA sense strand
uucaaggcauuaacuauuc

SEQ ID NO: 1518370 - RNA, 19 nt, Homo sapiens
  misc_RNA (1)...(19): siRNA sense strand
ggucauugcccagauagug

SEQ ID NO: 1518371 - RNA, 19 nt, Homo sapiens
  misc_RNA (1)...(19): siRNA sense strand
gagaaaguugauuugaaga

SEQ ID NO: 1518372 - RNA, 19 nt, Homo sapiens
  misc_RNA (1)...(19): siRNA sense strand
cuucagagcuacccgaaaa

SEQ ID NO: 1518373 - RNA, 19 nt, Homo sapiens
  misc_RNA (1)...(19): siRNA sense strand
gcauugugucuuuguucua

SEQ ID NO: 1518374 - RNA, 19 nt, Homo sapiens
  misc_RNA (1)...(19): siRNA sense strand
gaauucugcauccgagguu

SEQ ID NO: 1518375 - RNA, 19 nt, Homo sapiens
  misc_RNA (1)...(19): siRNA sense strand
caaggagcuuaucggacaa

SEQ ID NO: 1518376 - RNA, 19 nt, Homo sapiens
  misc_RNA (1)...(19): siRNA sense strand
uaccagcuuuccuguaauc

SEQ ID NO: 1518377 - RNA, 19 nt, Homo sapiens
  misc_RNA (1)...(19): siRNA sense strand
gauuugaagaggaugauca

SEQ ID NO: 1518378 - RNA, 19 nt, Homo sapiens
  misc_RNA (1)...(19): siRNA sense strand
gaagaggaugaucaguaau

SEQ ID NO: 1518379 - RNA, 19 nt, Homo sapiens
  misc_RNA (1)...(19): siRNA sense strand
ccucugcguucuggucauu

SEQ ID NO: 1518380 - RNA, 19 nt, Homo sapiens
  misc_RNA (1)...(19): siRNA sense strand
ccaugcacguggaaaugau

SEQ ID NO: 1518381 - RNA, 19 nt, Homo sapiens
  misc_RNA (1)...(19): siRNA sense strand
aaagcagacuugcccuuac

SEQ ID NO: 1518382 - RNA, 19 nt, Homo sapiens
  misc_RNA (1)...(19): siRNA sense strand
ccuguaaucaugucuuuca

SEQ ID NO: 1518383 - RNA, 19 nt, Homo sapiens
  misc_RNA (1)...(19): siRNA sense strand
cauggccgauccuacaauc

SEQ ID NO: 1518384 - RNA, 19 nt, Homo sapiens
  misc_RNA (1)...(19): siRNA sense strand
ggcauugugucuuuguucu

SEQ ID NO: 1518385 - RNA, 19 nt, Homo sapiens
  misc_RNA (1)...(19): siRNA sense strand
ucuacggccucuacuaugg

SEQ ID NO: 1518386 - RNA, 19 nt, Homo sapiens
  misc_RNA (1)...(19): siRNA sense strand
uacauggcuuccacuauag

SEQ ID NO: 1518387 - RNA, 19 nt, Homo sapiens
  misc_RNA (1)...(19): siRNA sense strand
cgauuggucuacaaauggu

SEQ ID NO: 1518388 - RNA, 19 nt, Homo sapiens
  misc_RNA (1)...(19): siRNA sense strand
ccccuuauauuucacgaua

SEQ ID NO: 1518389 - RNA, 19 nt, Homo sapiens
  misc_RNA (1)...(19): siRNA sense strand
ggagcuuaucggacaauau

SEQ ID NO: 1518390 - RNA, 19 nt, Homo sapiens
  misc_RNA (1)...(19): siRNA sense strand
gucagccgguugccuacaa

SEQ ID NO: 1518391 - RNA, 19 nt, Homo sapiens
  misc_RNA (1)...(19): siRNA sense strand
cgaaaaccccucucaggaa

SEQ ID NO: 1518392 - RNA, 19 nt, Homo sapiens
  misc_RNA (1)...(19): siRNA sense strand
cauccgagguugguguauc

SEQ ID NO: 1518393 - RNA, 19 nt, Homo sapiens
  misc_RNA (1)...(19): siRNA sense strand
uguggagcuugaugaagaa

SEQ ID NO: 1518394 - RNA, 19 nt, Homo sapiens
  misc_RNA (1)...(19): siRNA sense strand
gagauuccauggauuuugg

SEQ ID NO: 1518395 - RNA, 19 nt, Homo sapiens
  misc_RNA (1)...(19): siRNA sense strand
ggcgguuucugucuaugug

SEQ ID NO: 1518396 - RNA, 19 nt, Homo sapiens
  misc_RNA (1)...(19): siRNA sense strand
caggaaggacaccacgauu

SEQ ID NO: 1518397 - RNA, 19 nt, Homo sapiens
  misc_RNA (1)...(19): siRNA sense strand
gcuaugcauuugguguugu

SEQ ID NO: 1518398 - RNA, 19 nt, Homo sapiens
  misc_RNA (1)...(19): siRNA sense strand
cagcuaugcauuugguguu

SEQ ID NO: 1518399 - RNA, 19 nt, Homo sapiens
  misc_RNA (1)...(19): siRNA sense strand
aagcagacuugcccuuacu

SEQ ID NO: 1518400 - RNA, 19 nt, Homo sapiens
  misc_RNA (1)...(19): siRNA sense strand
ucuacaaacucagcuaugc

SEQ ID NO: 1518401 - RNA, 19 nt, Homo sapiens
  misc_RNA (1)...(19): siRNA sense strand
cauugugucuuuguucuac

SEQ ID NO: 1518402 - RNA, 19 nt, Homo sapiens
  misc_RNA (1)...(19): siRNA sense strand
uggcgaucauguuuacaau

SEQ ID NO: 1518403 - RNA, 19 nt, Homo sapiens
  misc_RNA (1)...(19): siRNA sense strand
aggaaggacaccacgauug

SEQ ID NO: 1518404 - RNA, 19 nt, Homo sapiens
  misc_RNA (1)...(19): siRNA sense strand
ugaccuuguugcagaugug

SEQ ID NO: 1518405 - RNA, 19 nt, Homo sapiens
  misc_RNA (1)...(19): siRNA sense strand
aagaggaugaucaguaauc

SEQ ID NO: 1518406 - RNA, 19 nt, Homo sapiens
  misc_RNA (1)...(19): siRNA sense strand
uuccuguaaucaugucuuu

SEQ ID NO: 1518407 - RNA, 19 nt, Homo sapiens
  misc_RNA (1)...(19): siRNA sense strand
cgacauaggcucacaagua

SEQ ID NO: 1518408 - RNA, 19 nt, Homo sapiens
  misc_RNA (1)...(19): siRNA sense strand
gacauaggcucacaaguag

SEQ ID NO: 1518409 - RNA, 19 nt, Homo sapiens
  misc_RNA (1)...(19): siRNA sense strand
gcaccugcacuucuaguua

SEQ ID NO: 1518410 - RNA, 19 nt, Homo sapiens
  misc_RNA (1)...(19): siRNA sense strand
cuucgucuguuuauacuua

SEQ ID NO: 1518411 - RNA, 19 nt, Homo sapiens
  misc_RNA (1)...(19): siRNA sense strand
gagcugcuguuuucuuuua

SEQ ID NO: 1518412 - RNA, 19 nt, Homo sapiens
  misc_RNA (1)...(19): siRNA sense strand
gcaacuuccuggugagaau

SEQ ID NO: 1518413 - RNA, 19 nt, Homo sapiens
  misc_RNA (1)...(19): siRNA sense strand
gagaaucccuugggcaucu

SEQ ID NO: 1518414 - RNA, 19 nt, Homo sapiens
  misc_RNA (1)...(19): siRNA sense strand
guagagcucuucgucuguu

SEQ ID NO: 1518415 - RNA, 19 nt, Homo sapiens
  misc_RNA (1)...(19): siRNA sense strand
gcacagacacacacacaca

SEQ ID NO: 1518416 - RNA, 19 nt, Homo sapiens
  misc_RNA (1)...(19): siRNA sense strand
acacagagucagcgacaua

SEQ ID NO: 1518417 - RNA, 19 nt, Homo sapiens
  misc_RNA (1)...(19): siRNA sense strand
gcacagacacacacacaca

SEQ ID NO: 1518418 - RNA, 19 nt, Homo sapiens
  misc_RNA (1)...(19): siRNA sense strand
gcaauuacugauacaucua

SEQ ID NO: 1518419 - RNA, 19 nt, Homo sapiens
  misc_RNA (1)...(19): siRNA sense strand
caccugcacuucuaguuau

SEQ ID NO: 1518420 - RNA, 19 nt, Homo sapiens
  misc_RNA (1)...(19): siRNA sense strand
acugauacaucuaaguuug

SEQ ID NO: 1518421 - RNA, 19 nt, Homo sapiens
  misc_RNA (1)...(19): siRNA sense strand
gugcagacuucuugguuca

SEQ ID NO: 1518422 - RNA, 19 nt, Homo sapiens
  misc_RNA (1)...(19): siRNA sense strand
acacacacaugcacagaca

SEQ ID NO: 1518423 - RNA, 19 nt, Homo sapiens
  misc_RNA (1)...(19): siRNA sense strand
acacacacaugcacagaca

SEQ ID NO: 1518424 - RNA, 19 nt, Homo sapiens
  misc_RNA (1)...(19): siRNA sense strand
ccagguaacugcauuugcu

SEQ ID NO: 1518425 - RNA, 19 nt, Homo sapiens
  misc_RNA (1)...(19): siRNA sense strand
gcagacuucuugguucauc

SEQ ID NO: 1518426 - RNA, 19 nt, Homo sapiens
  misc_RNA (1)...(19): siRNA sense strand
ggacagcuccagguaacug

SEQ ID NO: 1518427 - RNA, 19 nt, Homo sapiens
  misc_RNA (1)...(19): siRNA sense strand
gcaccugcacucccagaug

SEQ ID NO: 1518428 - RNA, 19 nt, Homo sapiens
  misc_RNA (1)...(19): siRNA sense strand
gcucuucgucuguuuauac

SEQ ID NO: 1518429 - RNA, 19 nt, Homo sapiens
  misc_RNA (1)...(19): siRNA sense strand
acacacacacacagacaaa

SEQ ID NO: 1518430 - RNA, 19 nt, Homo sapiens
  misc_RNA (1)...(19): siRNA sense strand
ugauacaucuaaguuugga

SEQ ID NO: 1518431 - RNA, 19 nt, Homo sapiens
  misc_RNA (1)...(19): siRNA sense strand
uacguauacuguuuguuug

SEQ ID NO: 1518432 - RNA, 19 nt, Homo sapiens
  misc_RNA (1)...(19): siRNA sense strand
gagcucuucgucuguuuau

SEQ ID NO: 1518433 - RNA, 19 nt, Homo sapiens
  misc_RNA (1)...(19): siRNA sense strand
cauauagacaaauccauca

SEQ ID NO: 1518434 - RNA, 19 nt, Homo sapiens
  misc_RNA (1)...(19): siRNA sense strand
cagaggaugcuggguauca

SEQ ID NO: 1518435 - RNA, 19 nt, Homo sapiens
  misc_RNA (1)...(19): siRNA sense strand
ugcaauuacugauacaucu

SEQ ID NO: 1518436 - RNA, 19 nt, Homo sapiens
  misc_RNA (1)...(19): siRNA sense strand
gacaaauccaucacacaca

SEQ ID NO: 1518437 - RNA, 19 nt, Homo sapiens
  misc_RNA (1)...(19): siRNA sense strand
gacaaauccaucacacaca

SEQ ID NO: 1518438 - RNA, 19 nt, Homo sapiens
  misc_RNA (1)...(19): siRNA sense strand
cuucuugguucaucugcaa

SEQ ID NO: 1518439 - RNA, 19 nt, Homo sapiens
  misc_RNA (1)...(19): siRNA sense strand
uagagcucuucgucuguuu

SEQ ID NO: 1518440 - RNA, 19 nt, Homo sapiens
  misc_RNA (1)...(19): siRNA sense strand
acacacacacagacaaauc

SEQ ID NO: 1518441 - RNA, 19 nt, Homo sapiens
  misc_RNA (1)...(19): siRNA sense strand
ugcagaggaugcuggguau

SEQ ID NO: 1518442 - RNA, 19 nt, Homo sapiens
  misc_RNA (1)...(19): siRNA sense strand
acacacacacacacacaga

SEQ ID NO: 1518443 - RNA, 19 nt, Homo sapiens
  misc_RNA (1)...(19): siRNA sense strand
guuuggagcugcuguuuuc

SEQ ID NO: 1518444 - RNA, 19 nt, Homo sapiens
  misc_RNA (1)...(19): siRNA sense strand
acacacacacacagaguca

SEQ ID NO: 1518445 - RNA, 19 nt, Homo sapiens
  misc_RNA (1)...(19): siRNA sense strand
acucccagaugcagacuuc

SEQ ID NO: 1518446 - RNA, 19 nt, Homo sapiens
  misc_RNA (1)...(19): siRNA sense strand
gcuguuuucuuuuacguau

SEQ ID NO: 1518447 - RNA, 19 nt, Homo sapiens
  misc_RNA (1)...(19): siRNA sense strand
gaacuugacuaaacacauc

SEQ ID NO: 1518448 - RNA, 19 nt, Homo sapiens
  misc_RNA (1)...(19): siRNA sense strand
aaacagaacuugacuaaac

SEQ ID NO: 1518449 - RNA, 19 nt, Homo sapiens
  misc_RNA (1)...(19): siRNA sense strand
caauuuaacugcaugcaaa

SEQ ID NO: 1518450 - RNA, 19 nt, Homo sapiens
  misc_RNA (1)...(19): siRNA sense strand
gaaaauaacagccaguuua

SEQ ID NO: 1518451 - RNA, 19 nt, Homo sapiens
  misc_RNA (1)...(19): siRNA sense strand
ggacaaacgagaauauauu

SEQ ID NO: 1518452 - RNA, 19 nt, Homo sapiens
  misc_RNA (1)...(19): siRNA sense strand
gcacacagauggaaauaac

SEQ ID NO: 1518453 - RNA, 19 nt, Homo sapiens
  misc_RNA (1)...(19): siRNA sense strand
gaaagaauccaaaccaauc

SEQ ID NO: 1518454 - RNA, 19 nt, Homo sapiens
  misc_RNA (1)...(19): siRNA sense strand
agacuuaccuugaacauca

SEQ ID NO: 1518455 - RNA, 19 nt, Homo sapiens
  misc_RNA (1)...(19): siRNA sense strand
ugacgucgguauugaagua

SEQ ID NO: 1518456 - RNA, 19 nt, Homo sapiens
  misc_RNA (1)...(19): siRNA sense strand
cauaaaugaucuccuagaa

SEQ ID NO: 1518457 - RNA, 19 nt, Homo sapiens
  misc_RNA (1)...(19): siRNA sense strand
aaacaaagccaagccauaa

SEQ ID NO: 1518458 - RNA, 19 nt, Homo sapiens
  misc_RNA (1)...(19): siRNA sense strand
gggaacaaaucauucaaau

SEQ ID NO: 1518459 - RNA, 19 nt, Homo sapiens
  misc_RNA (1)...(19): siRNA sense strand
ggacugauaauccuauuga

SEQ ID NO: 1518460 - RNA, 19 nt, Homo sapiens
  misc_RNA (1)...(19): siRNA sense strand
ccaaacagaacuugacuaa

SEQ ID NO: 1518461 - RNA, 19 nt, Homo sapiens
  misc_RNA (1)...(19): siRNA sense strand
gaggaaauauaguucacaa

SEQ ID NO: 1518462 - RNA, 19 nt, Homo sapiens
  misc_RNA (1)...(19): siRNA sense strand
gaacuaaacaacuuaagca

SEQ ID NO: 1518463 - RNA, 19 nt, Homo sapiens
  misc_RNA (1)...(19): siRNA sense strand
gccaacaguucagaaauaa

SEQ ID NO: 1518464 - RNA, 19 nt, Homo sapiens
  misc_RNA (1)...(19): siRNA sense strand
cuaaggagggauucaauua

SEQ ID NO: 1518465 - RNA, 19 nt, Homo sapiens
  misc_RNA (1)...(19): siRNA sense strand
ugacaaccuuccugaugua

SEQ ID NO: 1518466 - RNA, 19 nt, Homo sapiens
  misc_RNA (1)...(19): siRNA sense strand
ucggaaacgugaugugaua

SEQ ID NO: 1518467 - RNA, 19 nt, Homo sapiens
  misc_RNA (1)...(19): siRNA sense strand
ggaaacuucugacaauucu

SEQ ID NO: 1518468 - RNA, 19 nt, Homo sapiens
  misc_RNA (1)...(19): siRNA sense strand
caaccuuccugauguaaau

SEQ ID NO: 1518469 - RNA, 19 nt, Homo sapiens
  misc_RNA (1)...(19): siRNA sense strand
caguugauauguugucuuu

SEQ ID NO: 1518470 - RNA, 19 nt, Homo sapiens
  misc_RNA (1)...(19): siRNA sense strand
ggcaaaugcuuccaauuca

SEQ ID NO: 1518471 - RNA, 19 nt, Homo sapiens
  misc_RNA (1)...(19): siRNA sense strand
ucagaggauuaccaaauuu

SEQ ID NO: 1518472 - RNA, 19 nt, Homo sapiens
  misc_RNA (1)...(19): siRNA sense strand
ugccaacaguucagaaaua

SEQ ID NO: 1518473 - RNA, 19 nt, Homo sapiens
  misc_RNA (1)...(19): siRNA sense strand
ccagauggaugacaaccuu

SEQ ID NO: 1518474 - RNA, 19 nt, Homo sapiens
  misc_RNA (1)...(19): siRNA sense strand
uaaaagauguggacacuau

SEQ ID NO: 1518475 - RNA, 19 nt, Homo sapiens
  misc_RNA (1)...(19): siRNA sense strand
ucagcuggcuuugacuuua

SEQ ID NO: 1518476 - RNA, 19 nt, Homo sapiens
  misc_RNA (1)...(19): siRNA sense strand
guugauauguugucuuugu

SEQ ID NO: 1518477 - RNA, 19 nt, Homo sapiens
  misc_RNA (1)...(19): siRNA sense strand
uaaacaaagccaagccaua

SEQ ID NO: 1518478 - RNA, 19 nt, Homo sapiens
  misc_RNA (1)...(19): siRNA sense strand
cuucacagaugcaauaaau

SEQ ID NO: 1518479 - RNA, 19 nt, Homo sapiens
  misc_RNA (1)...(19): siRNA sense strand
aaagucaucucguuaucuu

SEQ ID NO: 1518480 - RNA, 19 nt, Homo sapiens
  misc_RNA (1)...(19): siRNA sense strand
gaagccauauauccaagug

SEQ ID NO: 1518481 - RNA, 19 nt, Homo sapiens
  misc_RNA (1)...(19): siRNA sense strand
caaaggcugaauacaauuu

SEQ ID NO: 1518482 - RNA, 19 nt, Homo sapiens
  misc_RNA (1)...(19): siRNA sense strand
gaugacaaccuuccugaug

SEQ ID NO: 1518483 - RNA, 19 nt, Homo sapiens
  misc_RNA (1)...(19): siRNA sense strand
cagcuggcuuugacuuuaa

SEQ ID NO: 1518484 - RNA, 19 nt, Homo sapiens
  misc_RNA (1)...(19): siRNA sense strand
ccaaaccaauccucuaaag

SEQ ID NO: 1518485 - RNA, 19 nt, Homo sapiens
  misc_RNA (1)...(19): siRNA sense strand
ggucaccaguugauauguu

SEQ ID NO: 1518486 - RNA, 19 nt, Homo sapiens
  misc_RNA (1)...(19): siRNA sense strand
gauauguugucuuuguaga

SEQ ID NO: 1518487 - RNA, 19 nt, Homo sapiens
  misc_RNA (1)...(19): siRNA sense strand
gcugugaaccaguuuauau

SEQ ID NO: 1518488 - RNA, 19 nt, Homo sapiens
  misc_RNA (1)...(19): siRNA sense strand
gaauuaaagggaacaaauc

SEQ ID NO: 1518489 - RNA, 19 nt, Homo sapiens
  misc_RNA (1)...(19): siRNA sense strand
ggaguuguccaguauguug

SEQ ID NO: 1518490 - RNA, 19 nt, Homo sapiens
  misc_RNA (1)...(19): siRNA sense strand
cagaggauuaccaaauuua

SEQ ID NO: 1518491 - RNA, 19 nt, Homo sapiens
  misc_RNA (1)...(19): siRNA sense strand
caaaucugguauucaacaa

SEQ ID NO: 1518492 - RNA, 19 nt, Homo sapiens
  misc_RNA (1)...(19): siRNA sense strand
ucacagaugcaauaaaugu

SEQ ID NO: 1518493 - RNA, 19 nt, Homo sapiens
  misc_RNA (1)...(19): siRNA sense strand
gaaguucagauacaggaaa

SEQ ID NO: 1518494 - RNA, 19 nt, Homo sapiens
  misc_RNA (1)...(19): siRNA sense strand
uagaacccauagaaacuaa

SEQ ID NO: 1518495 - RNA, 19 nt, Homo sapiens
  misc_RNA (1)...(19): siRNA sense strand
gaaacgugaugugauacga

SEQ ID NO: 1518496 - RNA, 19 nt, Homo sapiens
  misc_RNA (1)...(19): siRNA sense strand
aaaccgaaguucagauaca

SEQ ID NO: 1518497 - RNA, 19 nt, Homo sapiens
  misc_RNA (1)...(19): siRNA sense strand
uuaugaaacucgucggaaa

SEQ ID NO: 1518498 - RNA, 19 nt, Homo sapiens
  misc_RNA (1)...(19): siRNA sense strand
ugacuaaacacaucgaguu

SEQ ID NO: 1518499 - RNA, 19 nt, Homo sapiens
  misc_RNA (1)...(19): siRNA sense strand
gcaagaggaaauauaguuc

SEQ ID NO: 1518500 - RNA, 19 nt, Homo sapiens
  misc_RNA (1)...(19): siRNA sense strand
uggauucuauuucuccuaa

SEQ ID NO: 1518501 - RNA, 19 nt, Homo sapiens
  misc_RNA (1)...(19): siRNA sense strand
guucauagaggacuaagga

SEQ ID NO: 1518502 - RNA, 19 nt, Homo sapiens
  misc_RNA (1)...(19): siRNA sense strand
ccuugaacaucauaagaaa

SEQ ID NO: 1518503 - RNA, 19 nt, Homo sapiens
  misc_RNA (1)...(19): siRNA sense strand
uuagagaucagagcuauaa

SEQ ID NO: 1518504 - RNA, 19 nt, Homo sapiens
  misc_RNA (1)...(19): siRNA sense strand
acaaaccgaaguucagaua

SEQ ID NO: 1518505 - RNA, 19 nt, Homo sapiens
  misc_RNA (1)...(19): siRNA sense strand
uaaggcaaaugcuuccaau

SEQ ID NO: 1518506 - RNA, 19 nt, Homo sapiens
  misc_RNA (1)...(19): siRNA sense strand
ugaaagcccuaaaucaacu

SEQ ID NO: 1518507 - RNA, 19 nt, Homo sapiens
  misc_RNA (1)...(19): siRNA sense strand
caaccuuuguuccuggauu

SEQ ID NO: 1518508 - RNA, 19 nt, Homo sapiens
  misc_RNA (1)...(19): siRNA sense strand
uccaguauguuguaaauca

SEQ ID NO: 1518509 - RNA, 19 nt, Homo sapiens
  misc_RNA (1)...(19): siRNA sense strand
cuaguuccauuaaguagga

SEQ ID NO: 1518510 - RNA, 19 nt, Homo sapiens
  misc_RNA (1)...(19): siRNA sense strand
agccauaaaugaucuccua

SEQ ID NO: 1518511 - RNA, 19 nt, Homo sapiens
  misc_RNA (1)...(19): siRNA sense strand
aaacaguaccgguuacaga

SEQ ID NO: 1518512 - RNA, 19 nt, Homo sapiens
  misc_RNA (1)...(19): siRNA sense strand
acaggaaacuagcacugaa

SEQ ID NO: 1518513 - RNA, 19 nt, Homo sapiens
  misc_RNA (1)...(19): siRNA sense strand
aagcaguacuccugaacaa

SEQ ID NO: 1518514 - RNA, 19 nt, Homo sapiens
  misc_RNA (1)...(19): siRNA sense strand
uaagcuagaacccauagaa

SEQ ID NO: 1518515 - RNA, 19 nt, Homo sapiens
  misc_RNA (1)...(19): siRNA sense strand
cuuggaaacuucugacaau

SEQ ID NO: 1518516 - RNA, 19 nt, Homo sapiens
  misc_RNA (1)...(19): siRNA sense strand
gcaaaugcuuccaauucac

SEQ ID NO: 1518517 - RNA, 19 nt, Homo sapiens
  misc_RNA (1)...(19): siRNA sense strand
uagcugacgucgguauuga

SEQ ID NO: 1518518 - RNA, 19 nt, Homo sapiens
  misc_RNA (1)...(19): siRNA sense strand
cgaaagaauccaaaccaau

SEQ ID NO: 1518519 - RNA, 19 nt, Homo sapiens
  misc_RNA (1)...(19): siRNA sense strand
aaagauguggacacuauuu

SEQ ID NO: 1518520 - RNA, 19 nt, Homo sapiens
  misc_RNA (1)...(19): siRNA sense strand
aguaggaguuguccaguau

SEQ ID NO: 1518521 - RNA, 19 nt, Homo sapiens
  misc_RNA (1)...(19): siRNA sense strand
acuucuaacucuccuagua

SEQ ID NO: 1518522 - RNA, 19 nt, Homo sapiens
  misc_RNA (1)...(19): siRNA sense strand
cuaaacacaucgaguugca

SEQ ID NO: 1518523 - RNA, 19 nt, Homo sapiens
  misc_RNA (1)...(19): siRNA sense strand
ucugaaagcccuaaaucaa

SEQ ID NO: 1518524 - RNA, 19 nt, Homo sapiens
  misc_RNA (1)...(19): siRNA sense strand
ggacuaaggagggauucaa

SEQ ID NO: 1518525 - RNA, 19 nt, Homo sapiens
  misc_RNA (1)...(19): siRNA sense strand
aaacuucugacaauucuga

SEQ ID NO: 1518526 - RNA, 19 nt, Homo sapiens
  misc_RNA (1)...(19): siRNA sense strand
guuuagagaucagagcuau

SEQ ID NO: 1518527 - RNA, 19 nt, Homo sapiens
  misc_RNA (1)...(19): siRNA sense strand
gaaguucauagaggacuaa

SEQ ID NO: 1518528 - RNA, 19 nt, Homo sapiens
  misc_RNA (1)...(19): siRNA sense strand
guucuaguuccauuaagua

SEQ ID NO: 1518529 - RNA, 19 nt, Homo sapiens
  misc_RNA (1)...(19): siRNA sense strand
uaaaggacgcaguaagaau

SEQ ID NO: 1518530 - RNA, 19 nt, Homo sapiens
  misc_RNA (1)...(19): siRNA sense strand
uucagaggauuaccaaauu

SEQ ID NO: 1518531 - RNA, 19 nt, Homo sapiens
  misc_RNA (1)...(19): siRNA sense strand
gaaacacgaaagaauccaa

SEQ ID NO: 1518532 - RNA, 19 nt, Homo sapiens
  misc_RNA (1)...(19): siRNA sense strand
gguguucgccgucacauuc

SEQ ID NO: 1518533 - RNA, 19 nt, Homo sapiens
  misc_RNA (1)...(19): siRNA sense strand
ucuaaaggacgcaguaaga

SEQ ID NO: 1518534 - RNA, 19 nt, Homo sapiens
  misc_RNA (1)...(19): siRNA sense strand
gcaguacuccugaacaaac

SEQ ID NO: 1518535 - RNA, 19 nt, Homo sapiens
  misc_RNA (1)...(19): siRNA sense strand
gaaagcccuaaaucaacua

SEQ ID NO: 1518536 - RNA, 19 nt, Homo sapiens
  misc_RNA (1)...(19): siRNA sense strand
gaaaacaaaagucuucuuc

SEQ ID NO: 1518537 - RNA, 19 nt, Homo sapiens
  misc_RNA (1)...(19): siRNA sense strand
aaaggacgcaguaagaaug

SEQ ID NO: 1518538 - RNA, 19 nt, Homo sapiens
  misc_RNA (1)...(19): siRNA sense strand
gaaguugcaccuacaucug

SEQ ID NO: 1518539 - RNA, 19 nt, Homo sapiens
  misc_RNA (1)...(19): siRNA sense strand
gaacccauagaaacuaauc

SEQ ID NO: 1518540 - RNA, 19 nt, Homo sapiens
  misc_RNA (1)...(19): siRNA sense strand
ucucuucacagaugcaaua

SEQ ID NO: 1518541 - RNA, 19 nt, Homo sapiens
  misc_RNA (1)...(19): siRNA sense strand
gagauccuccuuuguuaca

SEQ ID NO: 1518542 - RNA, 19 nt, Homo sapiens
  misc_RNA (1)...(19): siRNA sense strand
uaaagggaacaaaucauuc

SEQ ID NO: 1518543 - RNA, 19 nt, Homo sapiens
  misc_RNA (1)...(19): siRNA sense strand
caagaggaaauauaguuca

SEQ ID NO: 1518544 - RNA, 19 nt, Homo sapiens
  misc_RNA (1)...(19): siRNA sense strand
gaucaggaacuaaacaacu

SEQ ID NO: 1518545 - RNA, 19 nt, Homo sapiens
  misc_RNA (1)...(19): siRNA sense strand
aaguaggaguuguccagua

SEQ ID NO: 1518546 - RNA, 19 nt, Homo sapiens
  misc_RNA (1)...(19): siRNA sense strand
ucaggaacuaaacaacuua

SEQ ID NO: 1518547 - RNA, 19 nt, Homo sapiens
  misc_RNA (1)...(19): siRNA sense strand
gcacagauccugaagaugu

SEQ ID NO: 1518548 - RNA, 19 nt, Homo sapiens
  misc_RNA (1)...(19): siRNA sense strand
gaaguuaaauggcacagau

SEQ ID NO: 1518549 - RNA, 19 nt, Homo sapiens
  misc_RNA (1)...(19): siRNA sense strand
aaagaggccuucaacauga

SEQ ID NO: 1518550 - RNA, 19 nt, Homo sapiens
  misc_RNA (1)...(19): siRNA sense strand
ucaggaagauuaccuaaga

SEQ ID NO: 1518551 - RNA, 19 nt, Homo sapiens
  misc_RNA (1)...(19): siRNA sense strand
uaagagagcugcugacaac

SEQ ID NO: 1518552 - RNA, 19 nt, Homo sapiens
  misc_RNA (1)...(19): siRNA sense strand
caaagaggccuucaacaug

SEQ ID NO: 1518553 - RNA, 19 nt, Homo sapiens
  misc_RNA (1)...(19): siRNA sense strand
guacagagaagcaccuauu

SEQ ID NO: 1518554 - RNA, 19 nt, Homo sapiens
  misc_RNA (1)...(19): siRNA sense strand
gagaagcaccuauugacaa

SEQ ID NO: 1518555 - RNA, 19 nt, Homo sapiens
  misc_RNA (1)...(19): siRNA sense strand
agaagcaccuauugacaaa

SEQ ID NO: 1518556 - RNA, 19 nt, Homo sapiens
  misc_RNA (1)...(19): siRNA sense strand
caauguguuugccauguuu

SEQ ID NO: 1518557 - RNA, 19 nt, Homo sapiens
  misc_RNA (1)...(19): siRNA sense strand
caaggaagauuugcaugau

SEQ ID NO: 1518558 - RNA, 19 nt, Homo sapiens
  misc_RNA (1)...(19): siRNA sense strand
gaaacgccuuugcuugcuu

SEQ ID NO: 1518559 - RNA, 19 nt, Homo sapiens
  misc_RNA (1)...(19): siRNA sense strand
cauguuuggugagaaguua

SEQ ID NO: 1518560 - RNA, 19 nt, Homo sapiens
  misc_RNA (1)...(19): siRNA sense strand
gggaucgguuuacagauga

SEQ ID NO: 1518561 - RNA, 19 nt, Homo sapiens
  misc_RNA (1)...(19): siRNA sense strand
guaccauucaggaagauua

SEQ ID NO: 1518562 - RNA, 19 nt, Homo sapiens
  misc_RNA (1)...(19): siRNA sense strand
aaggaagauuugcaugaua

SEQ ID NO: 1518563 - RNA, 19 nt, Homo sapiens
  misc_RNA (1)...(19): siRNA sense strand
caaagacaaagaugacuga

SEQ ID NO: 1518564 - RNA, 19 nt, Homo sapiens
  misc_RNA (1)...(19): siRNA sense strand
ucaaagaggccuucaacau

SEQ ID NO: 1518565 - RNA, 19 nt, Homo sapiens
  misc_RNA (1)...(19): siRNA sense strand
ccugaaacauggagccaaa

SEQ ID NO: 1518566 - RNA, 19 nt, Homo sapiens
  misc_RNA (1)...(19): siRNA sense strand
gaugaagaagcaacaggua

SEQ ID NO: 1518567 - RNA, 19 nt, Homo sapiens
  misc_RNA (1)...(19): siRNA sense strand
aggaagauuugcaugauau

SEQ ID NO: 1518568 - RNA, 19 nt, Homo sapiens
  misc_RNA (1)...(19): siRNA sense strand
ccaauguguuugccauguu

SEQ ID NO: 1518569 - RNA, 19 nt, Homo sapiens
  misc_RNA (1)...(19): siRNA sense strand
ucacacgcauccugaaaca

SEQ ID NO: 1518570 - RNA, 19 nt, Homo sapiens
  misc_RNA (1)...(19): siRNA sense strand
agucacagauucaggaguu

SEQ ID NO: 1518571 - RNA, 19 nt, Homo sapiens
  misc_RNA (1)...(19): siRNA sense strand
uggcacagauccugaagau

SEQ ID NO: 1518572 - RNA, 19 nt, Homo sapiens
  misc_RNA (1)...(19): siRNA sense strand
gagccaaagacaaagauga

SEQ ID NO: 1518573 - RNA, 19 nt, Homo sapiens
  misc_RNA (1)...(19): siRNA sense strand
gaagcaacagguaccauuc

SEQ ID NO: 1518574 - RNA, 19 nt, Homo sapiens
  misc_RNA (1)...(19): siRNA sense strand
aaacgccuuugcuugcuuu

SEQ ID NO: 1518575 - RNA, 19 nt, Homo sapiens
  misc_RNA (1)...(19): siRNA sense strand
uugaugccaugaugaauga

SEQ ID NO: 1518576 - RNA, 19 nt, Homo sapiens
  misc_RNA (1)...(19): siRNA sense strand
acaaggaagauuugcauga

SEQ ID NO: 1518577 - RNA, 19 nt, Homo sapiens
  misc_RNA (1)...(19): siRNA sense strand
gagagcugcugacaaccau

SEQ ID NO: 1518578 - RNA, 19 nt, Homo sapiens
  misc_RNA (1)...(19): siRNA sense strand
cagguaccauucaggaaga

SEQ ID NO: 1518579 - RNA, 19 nt, Homo sapiens
  misc_RNA (1)...(19): siRNA sense strand
aaacauggagccaaagaca

SEQ ID NO: 1518580 - RNA, 19 nt, Homo sapiens
  misc_RNA (1)...(19): siRNA sense strand
acauggagccaaagacaaa

SEQ ID NO: 1518581 - RNA, 19 nt, Homo sapiens
  misc_RNA (1)...(19): siRNA sense strand
acacgcauccugaaacaug

SEQ ID NO: 1518582 - RNA, 19 nt, Homo sapiens
  misc_RNA (1)...(19): siRNA sense strand
gaagaaucccacugaugca

SEQ ID NO: 1518583 - RNA, 19 nt, Homo sapiens
  misc_RNA (1)...(19): siRNA sense strand
ucaauuacaucgaguucac

SEQ ID NO: 1518584 - RNA, 19 nt, Homo sapiens
  misc_RNA (1)...(19): siRNA sense strand
acagagaagcaccuauuga

SEQ ID NO: 1518585 - RNA, 19 nt, Homo sapiens
  misc_RNA (1)...(19): siRNA sense strand
ugauaugcuugcuucucua

SEQ ID NO: 1518586 - RNA, 19 nt, Homo sapiens
  misc_RNA (1)...(19): siRNA sense strand
cgacaaggaagauuugcau

SEQ ID NO: 1518587 - RNA, 19 nt, Homo sapiens
  misc_RNA (1)...(19): siRNA sense strand
caaagaccaagaccaccaa

SEQ ID NO: 1518588 - RNA, 19 nt, Homo sapiens
  misc_RNA (1)...(19): siRNA sense strand
ugaaacauggagccaaaga

SEQ ID NO: 1518589 - RNA, 19 nt, Homo sapiens
  misc_RNA (1)...(19): siRNA sense strand
guuuacagaugaggaagug

SEQ ID NO: 1518590 - RNA, 19 nt, Homo sapiens
  misc_RNA (1)...(19): siRNA sense strand
agaagcaacagguaccauu

SEQ ID NO: 1518591 - RNA, 19 nt, Homo sapiens
  misc_RNA (1)...(19): siRNA sense strand
ggggaucgguuuacagaug

SEQ ID NO: 1518592 - RNA, 19 nt, Homo sapiens
  misc_RNA (1)...(19): siRNA sense strand
ggaagauuugcaugauaug

SEQ ID NO: 1518593 - RNA, 19 nt, Homo sapiens
  misc_RNA (1)...(19): siRNA sense strand
caucgacaaggaagauuug

SEQ ID NO: 1518594 - RNA, 19 nt, Homo sapiens
  misc_RNA (1)...(19): siRNA sense strand
agaaucccacugaugcaua

SEQ ID NO: 1518595 - RNA, 19 nt, Homo sapiens
  misc_RNA (1)...(19): siRNA sense strand
gauaugcuugcuucucuag

SEQ ID NO: 1518596 - RNA, 19 nt, Homo sapiens
  misc_RNA (1)...(19): siRNA sense strand
guucaaagaggccuucaac

SEQ ID NO: 1518597 - RNA, 19 nt, Homo sapiens
  misc_RNA (1)...(19): siRNA sense strand
cgccuuugcuugcuuugau

SEQ ID NO: 1518598 - RNA, 19 nt, Homo sapiens
  misc_RNA (1)...(19): siRNA sense strand
cagagaagcaccuauugac

SEQ ID NO: 1518599 - RNA, 19 nt, Homo sapiens
  misc_RNA (1)...(19): siRNA sense strand
gaagaagcaacagguacca

SEQ ID NO: 1518600 - RNA, 19 nt, Homo sapiens
  misc_RNA (1)...(19): siRNA sense strand
ucaucgacaaggaagauuu

SEQ ID NO: 1518601 - RNA, 19 nt, Homo sapiens
  misc_RNA (1)...(19): siRNA sense strand
cacagauccugaagauguc

SEQ ID NO: 1518602 - RNA, 19 nt, Homo sapiens
  misc_RNA (1)...(19): siRNA sense strand
gaaacauggagccaaagac

SEQ ID NO: 1518603 - RNA, 19 nt, Homo sapiens
  misc_RNA (1)...(19): siRNA sense strand
caggaagauuaccuaagag

SEQ ID NO: 1518604 - RNA, 19 nt, Homo sapiens
  misc_RNA (1)...(19): siRNA sense strand
gcccucagcgugcaacauc

SEQ ID NO: 1518605 - RNA, 19 nt, Homo sapiens
  misc_RNA (1)...(19): siRNA sense strand
cuaagagagcugcugacaa

SEQ ID NO: 1518606 - RNA, 19 nt, Homo sapiens
  misc_RNA (1)...(19): siRNA sense strand
ggauucagcuuccaaugug

SEQ ID NO: 1518607 - RNA, 19 nt, Homo sapiens
  misc_RNA (1)...(19): siRNA sense strand
agacauauuugcugccuuu

SEQ ID NO: 1518608 - RNA, 19 nt, Homo sapiens
  misc_RNA (1)...(19): siRNA sense strand
ccacuuggauucugccuau

SEQ ID NO: 1518609 - RNA, 19 nt, Homo sapiens
  misc_RNA (1)...(19): siRNA sense strand
cagaaacuccuuauaaaga

SEQ ID NO: 1518610 - RNA, 19 nt, Homo sapiens
  misc_RNA (1)...(19): siRNA sense strand
caagucagauucagaaacu

SEQ ID NO: 1518611 - RNA, 19 nt, Homo sapiens
  misc_RNA (1)...(19): siRNA sense strand
cauauuugcugccuuuaau

SEQ ID NO: 1518612 - RNA, 19 nt, Homo sapiens
  misc_RNA (1)...(19): siRNA sense strand
gagaugccaggcucacuua

SEQ ID NO: 1518613 - RNA, 19 nt, Homo sapiens
  misc_RNA (1)...(19): siRNA sense strand
ugaggaggcuaauuucaga

SEQ ID NO: 1518614 - RNA, 19 nt, Homo sapiens
  misc_RNA (1)...(19): siRNA sense strand
aauaugaggaggcuaauuu

SEQ ID NO: 1518615 - RNA, 19 nt, Homo sapiens
  misc_RNA (1)...(19): siRNA sense strand
gaggcuaauuucagagcua

SEQ ID NO: 1518616 - RNA, 19 nt, Homo sapiens
  misc_RNA (1)...(19): siRNA sense strand
gaaacuccuuauaaagaca

SEQ ID NO: 1518617 - RNA, 19 nt, Homo sapiens
  misc_RNA (1)...(19): siRNA sense strand
caauuguucucuacugguu

SEQ ID NO: 1518618 - RNA, 19 nt, Homo sapiens
  misc_RNA (1)...(19): siRNA sense strand
caaagccacuguguugguu

SEQ ID NO: 1518619 - RNA, 19 nt, Homo sapiens
  misc_RNA (1)...(19): siRNA sense strand
aaauuggaaugucucguuu

SEQ ID NO: 1518620 - RNA, 19 nt, Homo sapiens
  misc_RNA (1)...(19): siRNA sense strand
ccucaucaauuguucucua

SEQ ID NO: 1518621 - RNA, 19 nt, Homo sapiens
  misc_RNA (1)...(19): siRNA sense strand
uaacugccacccuuucaaa

SEQ ID NO: 1518622 - RNA, 19 nt, Homo sapiens
  misc_RNA (1)...(19): siRNA sense strand
caaugucgguguugaugau

SEQ ID NO: 1518623 - RNA, 19 nt, Homo sapiens
  misc_RNA (1)...(19): siRNA sense strand
cgaauaccaucgaccaagu

SEQ ID NO: 1518624 - RNA, 19 nt, Homo sapiens
  misc_RNA (1)...(19): siRNA sense strand
gaccaagucagauucagaa

SEQ ID NO: 1518625 - RNA, 19 nt, Homo sapiens
  misc_RNA (1)...(19): siRNA sense strand
uaaccaagaaguugcaguu

SEQ ID NO: 1518626 - RNA, 19 nt, Homo sapiens
  misc_RNA (1)...(19): siRNA sense strand
gcugcguucuccuggauuu

SEQ ID NO: 1518627 - RNA, 19 nt, Homo sapiens
  misc_RNA (1)...(19): siRNA sense strand
caauguggaucuucauguc

SEQ ID NO: 1518628 - RNA, 19 nt, Homo sapiens
  misc_RNA (1)...(19): siRNA sense strand
gcucacuuaucuaaagaau

SEQ ID NO: 1518629 - RNA, 19 nt, Homo sapiens
  misc_RNA (1)...(19): siRNA sense strand
ccaagaaguugcaguucgu

SEQ ID NO: 1518630 - RNA, 19 nt, Homo sapiens
  misc_RNA (1)...(19): siRNA sense strand
gcaccagucucugcaguac

SEQ ID NO: 1518631 - RNA, 19 nt, Homo sapiens
  misc_RNA (1)...(19): siRNA sense strand
gagauaacugccacccuuu

SEQ ID NO: 1518632 - RNA, 19 nt, Homo sapiens
  misc_RNA (1)...(19): siRNA sense strand
acgguacccucaucaauug

SEQ ID NO: 1518633 - RNA, 19 nt, Homo sapiens
  misc_RNA (1)...(19): siRNA sense strand
caucaauuguucucuacug

SEQ ID NO: 1518634 - RNA, 19 nt, Homo sapiens
  misc_RNA (1)...(19): siRNA sense strand
gccaggcucacuuaucuaa

SEQ ID NO: 1518635 - RNA, 19 nt, Homo sapiens
  misc_RNA (1)...(19): siRNA sense strand
caacgguacccucaucaau

SEQ ID NO: 1518636 - RNA, 19 nt, Homo sapiens
  misc_RNA (1)...(19): siRNA sense strand
gcaaugucgguguugauga

SEQ ID NO: 1518637 - RNA, 19 nt, Homo sapiens
  misc_RNA (1)...(19): siRNA sense strand
guuagcuacugguggaauu

SEQ ID NO: 1518638 - RNA, 19 nt, Homo sapiens
  misc_RNA (1)...(19): siRNA sense strand
uuucaaagccacuguguug

SEQ ID NO: 1518639 - RNA, 19 nt, Homo sapiens
  misc_RNA (1)...(19): siRNA sense strand
caacuuugccgaauaccau

SEQ ID NO: 1518640 - RNA, 19 nt, Homo sapiens
  misc_RNA (1)...(19): siRNA sense strand
ucgccaacuuugccgaaua

SEQ ID NO: 1518641 - RNA, 19 nt, Homo sapiens
  misc_RNA (1)...(19): siRNA sense strand
caggcucacuuaucuaaag

SEQ ID NO: 1518642 - RNA, 19 nt, Homo sapiens
  misc_RNA (1)...(19): siRNA sense strand
aagaauaugaggaggcuaa

SEQ ID NO: 1518643 - RNA, 19 nt, Homo sapiens
  misc_RNA (1)...(19): siRNA sense strand
gaauaugaggaggcuaauu

SEQ ID NO: 1518644 - RNA, 19 nt, Homo sapiens
  misc_RNA (1)...(19): siRNA sense strand
ucagaaacuccuuauaaag

SEQ ID NO: 1518645 - RNA, 19 nt, Homo sapiens
  misc_RNA (1)...(19): siRNA sense strand
gauaacugccacccuuuca

SEQ ID NO: 1518646 - RNA, 19 nt, Homo sapiens
  misc_RNA (1)...(19): siRNA sense strand
gcuaauuucagagcuauau

SEQ ID NO: 1518647 - RNA, 19 nt, Homo sapiens
  misc_RNA (1)...(19): siRNA sense strand
ccacuguguugguuuggau

SEQ ID NO: 1518648 - RNA, 19 nt, Homo sapiens
  misc_RNA (1)...(19): siRNA sense strand
gagcuauaugugcgagaua

SEQ ID NO: 1518649 - RNA, 19 nt, Homo sapiens
  misc_RNA (1)...(19): siRNA sense strand
gcaacgguacccucaucaa

SEQ ID NO: 1518650 - RNA, 19 nt, Homo sapiens
  misc_RNA (1)...(19): siRNA sense strand
agaaacuccuuauaaagac

SEQ ID NO: 1518651 - RNA, 19 nt, Homo sapiens
  misc_RNA (1)...(19): siRNA sense strand
cagauucagaaacuccuua

SEQ ID NO: 1518652 - RNA, 19 nt, Homo sapiens
  misc_RNA (1)...(19): siRNA sense strand
uggccaagguggaaaauuu

SEQ ID NO: 1518653 - RNA, 19 nt, Homo sapiens
  misc_RNA (1)...(19): siRNA sense strand
cuguuggcgucaucaauuu

SEQ ID NO: 1518654 - RNA, 19 nt, Homo sapiens
  misc_RNA (1)...(19): siRNA sense strand
auaccaaguucauuucaag

SEQ ID NO: 1518655 - RNA, 19 nt, Homo sapiens
  misc_RNA (1)...(19): siRNA sense strand
guacccucaucaauuguuc

SEQ ID NO: 1518656 - RNA, 19 nt, Homo sapiens
  misc_RNA (1)...(19): siRNA sense strand
ggcagcacauucagaaggu

SEQ ID NO: 1518657 - RNA, 19 nt, Homo sapiens
  misc_RNA (1)...(19): siRNA sense strand
gauucagaaacuccuuaua

SEQ ID NO: 1518658 - RNA, 19 nt, Homo sapiens
  misc_RNA (1)...(19): siRNA sense strand
gauucugccuaucucuguu

SEQ ID NO: 1518659 - RNA, 19 nt, Homo sapiens
  misc_RNA (1)...(19): siRNA sense strand
gcagcacauucagaagguu

SEQ ID NO: 1518660 - RNA, 19 nt, Homo sapiens
  misc_RNA (1)...(19): siRNA sense strand
ggauucugccuaucucugu

SEQ ID NO: 1518661 - RNA, 19 nt, Homo sapiens
  misc_RNA (1)...(19): siRNA sense strand
gaaaauuugcagccagaaa

SEQ ID NO: 1518662 - RNA, 19 nt, Homo sapiens
  misc_RNA (1)...(19): siRNA sense strand
guacuuuguccgugcaaug

SEQ ID NO: 1518663 - RNA, 19 nt, Homo sapiens
  misc_RNA (1)...(19): siRNA sense strand
uaccaucgaccaagucaga

SEQ ID NO: 1518664 - RNA, 19 nt, Homo sapiens
  misc_RNA (1)...(19): siRNA sense strand
cgaccaagucagauucaga

SEQ ID NO: 1518665 - RNA, 19 nt, Homo sapiens
  misc_RNA (1)...(19): siRNA sense strand
gcaguucgugcaaaucagu

SEQ ID NO: 1518666 - RNA, 19 nt, Homo sapiens
  misc_RNA (1)...(19): siRNA sense strand
aacgguacccucaucaauu

SEQ ID NO: 1518667 - RNA, 19 nt, Homo sapiens
  misc_RNA (1)...(19): siRNA sense strand
cagcacauucagaagguuu

SEQ ID NO: 1518668 - RNA, 19 nt, Homo sapiens
  misc_RNA (1)...(19): siRNA sense strand
ccaauguggaucuucaugu

SEQ ID NO: 1518669 - RNA, 19 nt, Homo sapiens
  misc_RNA (1)...(19): siRNA sense strand
guguugaugauaccaauug

SEQ ID NO: 1518670 - RNA, 19 nt, Homo sapiens
  misc_RNA (1)...(19): siRNA sense strand
ucuguuggcgucaucaauu

SEQ ID NO: 1518671 - RNA, 19 nt, Homo sapiens
  misc_RNA (1)...(19): siRNA sense strand
uguuaauaguggagauuug

SEQ ID NO: 1518672 - RNA, 19 nt, Homo sapiens
  misc_RNA (1)...(19): siRNA sense strand
acauauuugcugccuuuaa

SEQ ID NO: 1518673 - RNA, 19 nt, Homo sapiens
  misc_RNA (1)...(19): siRNA sense strand
gaauaccaucgaccaaguc

SEQ ID NO: 1518674 - RNA, 19 nt, Homo sapiens
  misc_RNA (1)...(19): siRNA sense strand
guuaauaguggagauuugu

SEQ ID NO: 1518675 - RNA, 19 nt, Homo sapiens
  misc_RNA (1)...(19): siRNA sense strand
aagccacuguguugguuug

SEQ ID NO: 1518676 - RNA, 19 nt, Homo sapiens
  misc_RNA (1)...(19): siRNA sense strand
uggcgucaucaauuuguua

SEQ ID NO: 1518677 - RNA, 19 nt, Homo sapiens
  misc_RNA (1)...(19): siRNA sense strand
gaugccaggcucacuuauc

SEQ ID NO: 1518678 - RNA, 19 nt, Homo sapiens
  misc_RNA (1)...(19): siRNA sense strand
ucgugggccuuucacagaa

SEQ ID NO: 1518679 - RNA, 19 nt, Homo sapiens
  misc_RNA (1)...(19): siRNA sense strand
agcuauaugugcgagauaa

SEQ ID NO: 1518680 - RNA, 19 nt, Homo sapiens
  misc_RNA (1)...(19): siRNA sense strand
gugggccuuucacagaauu

SEQ ID NO: 1518681 - RNA, 19 nt, Homo sapiens
  misc_RNA (1)...(19): siRNA sense strand
cugcaacgguacccucauc

SEQ ID NO: 1518682 - RNA, 19 nt, Homo sapiens
  misc_RNA (1)...(19): siRNA sense strand
ggcgucaucaauuuguuaa

SEQ ID NO: 1518683 - RNA, 19 nt, Homo sapiens
  misc_RNA (1)...(19): siRNA sense strand
uguggaucuucaugucuuu

SEQ ID NO: 1518684 - RNA, 19 nt, Homo sapiens
  misc_RNA (1)...(19): siRNA sense strand
ucaaagccacuguguuggu

SEQ ID NO: 1518685 - RNA, 19 nt, Homo sapiens
  misc_RNA (1)...(19): siRNA sense strand
gguggaauucugugguuuc

SEQ ID NO: 1518686 - RNA, 19 nt, Homo sapiens
  misc_RNA (1)...(19): siRNA sense strand
cgccaacuuugccgaauac

SEQ ID NO: 1518687 - RNA, 19 nt, Homo sapiens
  misc_RNA (1)...(19): siRNA sense strand
gcggguugcggaggaagua

SEQ ID NO: 1518688 - RNA, 19 nt, Homo sapiens
  misc_RNA (1)...(19): siRNA sense strand
cagaagagcuaugugaaua

SEQ ID NO: 1518689 - RNA, 19 nt, Homo sapiens
  misc_RNA (1)...(19): siRNA sense strand
uacagaagcuuucaaauga

SEQ ID NO: 1518690 - RNA, 19 nt, Homo sapiens
  misc_RNA (1)...(19): siRNA sense strand
gaaguaauguggauuucuu

SEQ ID NO: 1518691 - RNA, 19 nt, Homo sapiens
  misc_RNA (1)...(19): siRNA sense strand
gaagagcuaugugaauauu

SEQ ID NO: 1518692 - RNA, 19 nt, Homo sapiens
  misc_RNA (1)...(19): siRNA sense strand
gagcaaacccgucaagaaa

SEQ ID NO: 1518693 - RNA, 19 nt, Homo sapiens
  misc_RNA (1)...(19): siRNA sense strand
cuaauaaucuugacacaga

SEQ ID NO: 1518694 - RNA, 19 nt, Homo sapiens
  misc_RNA (1)...(19): siRNA sense strand
ccaagaagccuccaauuug

SEQ ID NO: 1518695 - RNA, 19 nt, Homo sapiens
  misc_RNA (1)...(19): siRNA sense strand
gaacucacaucuacaaugc

SEQ ID NO: 1518696 - RNA, 19 nt, Homo sapiens
  misc_RNA (1)...(19): siRNA sense strand
gaagacaaccaguggauga

SEQ ID NO: 1518697 - RNA, 19 nt, Homo sapiens
  misc_RNA (1)...(19): siRNA sense strand
aaagaaagacuaccaagaa

SEQ ID NO: 1518698 - RNA, 19 nt, Homo sapiens
  misc_RNA (1)...(19): siRNA sense strand
gaacaauucguaacuagau

SEQ ID NO: 1518699 - RNA, 19 nt, Homo sapiens
  misc_RNA (1)...(19): siRNA sense strand
aagaggaccuggaagaauu

SEQ ID NO: 1518700 - RNA, 19 nt, Homo sapiens
  misc_RNA (1)...(19): siRNA sense strand
gaaguccugucgauucaau

SEQ ID NO: 1518701 - RNA, 19 nt, Homo sapiens
  misc_RNA (1)...(19): siRNA sense strand
ccaaagaaguaauguggau

SEQ ID NO: 1518702 - RNA, 19 nt, Homo sapiens
  misc_RNA (1)...(19): siRNA sense strand
aaaugaaucucgcuacaug

SEQ ID NO: 1518703 - RNA, 19 nt, Homo sapiens
  misc_RNA (1)...(19): siRNA sense strand
ugucagcgguccaggcuua

SEQ ID NO: 1518704 - RNA, 19 nt, Homo sapiens
  misc_RNA (1)...(19): siRNA sense strand
ggagcaaacccgucaagaa

SEQ ID NO: 1518705 - RNA, 19 nt, Homo sapiens
  misc_RNA (1)...(19): siRNA sense strand
uaauguggauuucuuggaa

SEQ ID NO: 1518706 - RNA, 19 nt, Homo sapiens
  misc_RNA (1)...(19): siRNA sense strand
ugaaucagcugcagucucu

SEQ ID NO: 1518707 - RNA, 19 nt, Homo sapiens
  misc_RNA (1)...(19): siRNA sense strand
gcaaacccgucaagaaagg

SEQ ID NO: 1518708 - RNA, 19 nt, Homo sapiens
  misc_RNA (1)...(19): siRNA sense strand
gaauaguaguguauggaau

SEQ ID NO: 1518709 - RNA, 19 nt, Homo sapiens
  misc_RNA (1)...(19): siRNA sense strand
gcaagacauuccaaagaag

SEQ ID NO: 1518710 - RNA, 19 nt, Homo sapiens
  misc_RNA (1)...(19): siRNA sense strand
gauagaagaggaccuggaa

SEQ ID NO: 1518711 - RNA, 19 nt, Homo sapiens
  misc_RNA (1)...(19): siRNA sense strand
gguggauccugaacaacua

SEQ ID NO: 1518712 - RNA, 19 nt, Homo sapiens
  misc_RNA (1)...(19): siRNA sense strand
caaagaaagacuaccaaga

SEQ ID NO: 1518713 - RNA, 19 nt, Homo sapiens
  misc_RNA (1)...(19): siRNA sense strand
gaagaggaccuggaagaau

SEQ ID NO: 1518714 - RNA, 19 nt, Homo sapiens
  misc_RNA (1)...(19): siRNA sense strand
gguccaggcuuauuagaag

SEQ ID NO: 1518715 - RNA, 19 nt, Homo sapiens
  misc_RNA (1)...(19): siRNA sense strand
uggaugacccagauaaaua

SEQ ID NO: 1518716 - RNA, 19 nt, Homo sapiens
  misc_RNA (1)...(19): siRNA sense strand
gaaucucgcuacaugaucu

SEQ ID NO: 1518717 - RNA, 19 nt, Homo sapiens
  misc_RNA (1)...(19): siRNA sense strand
aaagaaggaucucaaacuc

SEQ ID NO: 1518718 - RNA, 19 nt, Homo sapiens
  misc_RNA (1)...(19): siRNA sense strand
cagaaguccugucgauuca

SEQ ID NO: 1518719 - RNA, 19 nt, Homo sapiens
  misc_RNA (1)...(19): siRNA sense strand
gagagugcuuccucccaaa

SEQ ID NO: 1518720 - RNA, 19 nt, Homo sapiens
  misc_RNA (1)...(19): siRNA sense strand
gggcgaguaugagaaugua

SEQ ID NO: 1518721 - RNA, 19 nt, Homo sapiens
  misc_RNA (1)...(19): siRNA sense strand
ggagaauaguaguguaugg

SEQ ID NO: 1518722 - RNA, 19 nt, Homo sapiens
  misc_RNA (1)...(19): siRNA sense strand
uacuaaaucucacaucaug

SEQ ID NO: 1518723 - RNA, 19 nt, Homo sapiens
  misc_RNA (1)...(19): siRNA sense strand
ugaaggaaacccugaauca

SEQ ID NO: 1518724 - RNA, 19 nt, Homo sapiens
  misc_RNA (1)...(19): siRNA sense strand
ucaaaugaaucucgcuaca

SEQ ID NO: 1518725 - RNA, 19 nt, Homo sapiens
  misc_RNA (1)...(19): siRNA sense strand
ggaaacuacugaggagcaa

SEQ ID NO: 1518726 - RNA, 19 nt, Homo sapiens
  misc_RNA (1)...(19): siRNA sense strand
aguggaugcuugcguauuu

SEQ ID NO: 1518727 - RNA, 19 nt, Homo sapiens
  misc_RNA (1)...(19): siRNA sense strand
auacagaagcuuucaaaug

SEQ ID NO: 1518728 - RNA, 19 nt, Homo sapiens
  misc_RNA (1)...(19): siRNA sense strand
agcaagacauuccaaagaa

SEQ ID NO: 1518729 - RNA, 19 nt, Homo sapiens
  misc_RNA (1)...(19): siRNA sense strand
gcuacaugaucuaugaguu

SEQ ID NO: 1518730 - RNA, 19 nt, Homo sapiens
  misc_RNA (1)...(19): siRNA sense strand
ccagaaguccugucgauuc

SEQ ID NO: 1518731 - RNA, 19 nt, Homo sapiens
  misc_RNA (1)...(19): siRNA sense strand
ccaagggcaugucgaucuu

SEQ ID NO: 1518732 - RNA, 19 nt, Homo sapiens
  misc_RNA (1)...(19): siRNA sense strand
gauaaauagacuccagaaa

SEQ ID NO: 1518733 - RNA, 19 nt, Homo sapiens
  misc_RNA (1)...(19): siRNA sense strand
cagcgguccaggcuuauua

SEQ ID NO: 1518734 - RNA, 19 nt, Homo sapiens
  misc_RNA (1)...(19): siRNA sense strand
acucacaucuacaaugcua

SEQ ID NO: 1518735 - RNA, 19 nt, Homo sapiens
  misc_RNA (1)...(19): siRNA sense strand
ggaacaauucguaacuaga

SEQ ID NO: 1518736 - RNA, 19 nt, Homo sapiens
  misc_RNA (1)...(19): siRNA sense strand
uagcaagacauuccaaaga

SEQ ID NO: 1518737 - RNA, 19 nt, Homo sapiens
  misc_RNA (1)...(19): siRNA sense strand
gaaugugccauggaaacua

SEQ ID NO: 1518738 - RNA, 19 nt, Homo sapiens
  misc_RNA (1)...(19): siRNA sense strand
gauggaaaauuauccuuug

SEQ ID NO: 1518739 - RNA, 19 nt, Homo sapiens
  misc_RNA (1)...(19): siRNA sense strand
ccagaacucacaucuacaa

SEQ ID NO: 1518740 - RNA, 19 nt, Homo sapiens
  misc_RNA (1)...(19): siRNA sense strand
gaauagccaccuucagaca

SEQ ID NO: 1518741 - RNA, 19 nt, Homo sapiens
  misc_RNA (1)...(19): siRNA sense strand
ugaagggaauacuaaaucu

SEQ ID NO: 1518742 - RNA, 19 nt, Homo sapiens
  misc_RNA (1)...(19): siRNA sense strand
ggaugacccagauaaauag

SEQ ID NO: 1518743 - RNA, 19 nt, Homo sapiens
  misc_RNA (1)...(19): siRNA sense strand
ccagaagaagaaauuauug

SEQ ID NO: 1518744 - RNA, 19 nt, Homo sapiens
  misc_RNA (1)...(19): siRNA sense strand
uggaauagccaccuucaga

SEQ ID NO: 1518745 - RNA, 19 nt, Homo sapiens
  misc_RNA (1)...(19): siRNA sense strand
guaugagaauguacuagca

SEQ ID NO: 1518746 - RNA, 19 nt, Homo sapiens
  misc_RNA (1)...(19): siRNA sense strand
agacaucgccguccuccaa

SEQ ID NO: 1518747 - RNA, 19 nt, Homo sapiens
  misc_RNA (1)...(19): siRNA sense strand
gcugcagucucuccagaau

SEQ ID NO: 1518748 - RNA, 19 nt, Homo sapiens
  misc_RNA (1)...(19): siRNA sense strand
uagaagaggaccuggaaga

SEQ ID NO: 1518749 - RNA, 19 nt, Homo sapiens
  misc_RNA (1)...(19): siRNA sense strand
aagaaagacuaccaagaag

SEQ ID NO: 1518750 - RNA, 19 nt, Homo sapiens
  misc_RNA (1)...(19): siRNA sense strand
gacaaauuauagcaagaca

SEQ ID NO: 1518751 - RNA, 19 nt, Homo sapiens
  misc_RNA (1)...(19): siRNA sense strand
ccuggaaugugccauggaa

SEQ ID NO: 1518752 - RNA, 19 nt, Homo sapiens
  misc_RNA (1)...(19): siRNA sense strand
ugcagucucuccagaauuc

SEQ ID NO: 1518753 - RNA, 19 nt, Homo sapiens
  misc_RNA (1)...(19): siRNA sense strand
gagaauaguaguguaugga

SEQ ID NO: 1518754 - RNA, 19 nt, Homo sapiens
  misc_RNA (1)...(19): siRNA sense strand
gaagaauuacacgagcuuu

SEQ ID NO: 1518755 - RNA, 19 nt, Homo sapiens
  misc_RNA (1)...(19): siRNA sense strand
cagacaaauuauagcaaga

SEQ ID NO: 1518756 - RNA, 19 nt, Homo sapiens
  misc_RNA (1)...(19): siRNA sense strand
ggaaaauuauccuuugaag

SEQ ID NO: 1518757 - RNA, 19 nt, Homo sapiens
  misc_RNA (1)...(19): siRNA sense strand
cgugguggauccugaacaa

SEQ ID NO: 1518758 - RNA, 19 nt, Homo sapiens
  misc_RNA (1)...(19): siRNA sense strand
cuccagaacucacaucuac

SEQ ID NO: 1518759 - RNA, 19 nt, Homo sapiens
  misc_RNA (1)...(19): siRNA sense strand
cgaaccaccagaagaagaa

SEQ ID NO: 1518760 - RNA, 19 nt, Homo sapiens
  misc_RNA (1)...(19): siRNA sense strand
caaacucgaaccaccagaa

SEQ ID NO: 1518761 - RNA, 19 nt, Homo sapiens
  misc_RNA (1)...(19): siRNA sense strand
accaagaagccuccaauuu

SEQ ID NO: 1518762 - RNA, 19 nt, Homo sapiens
  misc_RNA (1)...(19): siRNA sense strand
ggaaaagaaggaucucaaa

SEQ ID NO: 1518763 - RNA, 19 nt, Homo sapiens
  misc_RNA (1)...(19): siRNA sense strand
auagccaccuucagacaaa

SEQ ID NO: 1518764 - RNA, 19 nt, Homo sapiens
  misc_RNA (1)...(19): siRNA sense strand
gcaaaacaaagaaagacua

SEQ ID NO: 1518765 - RNA, 19 nt, Homo sapiens
  misc_RNA (1)...(19): siRNA sense strand
aaacaaagaaagacuacca

SEQ ID NO: 1518766 - RNA, 19 nt, Homo sapiens
  misc_RNA (1)...(19): siRNA sense strand
gcaaugggcaaaacaaaga

SEQ ID NO: 1518767 - RNA, 19 nt, Homo sapiens
  misc_RNA (1)...(19): siRNA sense strand
caccuucagacaaauuaua

SEQ ID NO: 1518768 - RNA, 19 nt, Homo sapiens
  misc_RNA (1)...(19): siRNA sense strand
gaugcuugcguauuucuau

SEQ ID NO: 1518769 - RNA, 19 nt, Homo sapiens
  misc_RNA (1)...(19): siRNA sense strand
uggaacaauucguaacuag

SEQ ID NO: 1518770 - RNA, 19 nt, Homo sapiens
  misc_RNA (1)...(19): siRNA sense strand
ucgauucaauggccuggaa

SEQ ID NO: 1518771 - RNA, 19 nt, Homo sapiens
  misc_RNA (1)...(19): siRNA sense strand
ggaaacuccagaacucaca

SEQ ID NO: 1518772 - RNA, 19 nt, Homo sapiens
  misc_RNA (1)...(19): siRNA sense strand
caagacauuccaaagaagu

SEQ ID NO: 1518773 - RNA, 19 nt, Homo sapiens
  misc_RNA (1)...(19): siRNA sense strand
cuauacagaagcuuucaaa

SEQ ID NO: 1518774 - RNA, 19 nt, Homo sapiens
  misc_RNA (1)...(19): siRNA sense strand
agaugucugugauagaaga

SEQ ID NO: 1518775 - RNA, 19 nt, Homo sapiens
  misc_RNA (1)...(19): siRNA sense strand
ccaccagaagaagaaauua

SEQ ID NO: 1518776 - RNA, 19 nt, Homo sapiens
  misc_RNA (1)...(19): siRNA sense strand
caaagaaguaauguggauu

SEQ ID NO: 1518777 - RNA, 19 nt, Homo sapiens
  misc_RNA (1)...(19): siRNA sense strand
cuacaugaucuaugaguuc

SEQ ID NO: 1518778 - RNA, 19 nt, Homo sapiens
  misc_RNA (1)...(19): siRNA sense strand
gaauguacuagcagcacuu

SEQ ID NO: 1518779 - RNA, 19 nt, Homo sapiens
  misc_RNA (1)...(19): siRNA sense strand
ugacacagaagagcuaugu

SEQ ID NO: 1518780 - RNA, 19 nt, Homo sapiens
  misc_RNA (1)...(19): siRNA sense strand
gaagggaauacuaaaucuc

SEQ ID NO: 1518781 - RNA, 19 nt, Homo sapiens
  misc_RNA (1)...(19): siRNA sense strand
guaauguggauuucuugga

SEQ ID NO: 1518782 - RNA, 19 nt, Homo sapiens
  misc_RNA (1)...(19): siRNA sense strand
aaucucacaucaugcuugu

SEQ ID NO: 1518783 - RNA, 19 nt, Homo sapiens
  misc_RNA (1)...(19): siRNA sense strand
gaaccaccagaagaagaaa

SEQ ID NO: 1518784 - RNA, 19 nt, Homo sapiens
  misc_RNA (1)...(19): siRNA sense strand
caccagaagaagaaauuau

SEQ ID NO: 1518785 - RNA, 19 nt, Homo sapiens
  misc_RNA (1)...(19): siRNA sense strand
gccaccuucagacaaauua

SEQ ID NO: 1518786 - RNA, 19 nt, Homo sapiens
  misc_RNA (1)...(19): siRNA sense strand
caaaugaaucucgcuacau

SEQ ID NO: 1518787 - RNA, 19 nt, Homo sapiens
  misc_RNA (1)...(19): siRNA sense strand
gcacuugaagaccugaauc

SEQ ID NO: 1518788 - RNA, 19 nt, Homo sapiens
  misc_RNA (1)...(19): siRNA sense strand
caggagagcugacguuguu

SEQ ID NO: 1518789 - RNA, 19 nt, Homo sapiens
  misc_RNA (1)...(19): siRNA sense strand
ggaugaagcccuccucaga

SEQ ID NO: 1518790 - RNA, 19 nt, Homo sapiens
  misc_RNA (1)...(19): siRNA sense strand
cuagucgccuccagaagua

SEQ ID NO: 1518791 - RNA, 19 nt, Homo sapiens
  misc_RNA (1)...(19): siRNA sense strand
gaacaagccacagggucua

SEQ ID NO: 1518792 - RNA, 19 nt, Homo sapiens
  misc_RNA (1)...(19): siRNA sense strand
ccacagggucuaccaguga

SEQ ID NO: 1518793 - RNA, 19 nt, Homo sapiens
  misc_RNA (1)...(19): siRNA sense strand
gaaacuggaacacauugau

SEQ ID NO: 1518794 - RNA, 19 nt, Homo sapiens
  misc_RNA (1)...(19): siRNA sense strand
cggaaaggaccucuaguga

SEQ ID NO: 1518795 - RNA, 19 nt, Homo sapiens
  misc_RNA (1)...(19): siRNA sense strand
ccgagcaucugggaaagaa

SEQ ID NO: 1518796 - RNA, 19 nt, Homo sapiens
  misc_RNA (1)...(19): siRNA sense strand
gcuagucgccuccagaagu

SEQ ID NO: 1518797 - RNA, 19 nt, Homo sapiens
  misc_RNA (1)...(19): siRNA sense strand
gaacaacaagccccaaaga

SEQ ID NO: 1518798 - RNA, 19 nt, Homo sapiens
  misc_RNA (1)...(19): siRNA sense strand
cuacugugcugucacugau

SEQ ID NO: 1518799 - RNA, 19 nt, Homo sapiens
  misc_RNA (1)...(19): siRNA sense strand
ccuggaaggugucaagaag

SEQ ID NO: 1518800 - RNA, 19 nt, Homo sapiens
  misc_RNA (1)...(19): siRNA sense strand
agcaggagcuucagguugu

SEQ ID NO: 1518801 - RNA, 19 nt, Homo sapiens
  misc_RNA (1)...(19): siRNA sense strand
gagcaucugggaaagaaag

SEQ ID NO: 1518802 - RNA, 19 nt, Homo sapiens
  misc_RNA (1)...(19): siRNA sense strand
ggaccucuagugacguuga

SEQ ID NO: 1518803 - RNA, 19 nt, Homo sapiens
  misc_RNA (1)...(19): siRNA sense strand
ucagggagcaggagcuuca

SEQ ID NO: 1518804 - RNA, 19 nt, Homo sapiens
  misc_RNA (1)...(19): siRNA sense strand
ccaccuacaucggcuccuu

SEQ ID NO: 1518805 - RNA, 19 nt, Homo sapiens
  misc_RNA (1)...(19): siRNA sense strand
gaccucuagugacguugaa

SEQ ID NO: 1518806 - RNA, 19 nt, Homo sapiens
  misc_RNA (1)...(19): siRNA sense strand
ggagcaggagcuucagguu

SEQ ID NO: 1518807 - RNA, 19 nt, Homo sapiens
  misc_RNA (1)...(19): siRNA sense strand
aaacuggaacacauugaug

SEQ ID NO: 1518808 - RNA, 19 nt, Homo sapiens
  misc_RNA (1)...(19): siRNA sense strand
gaccggaaaggaccucuag

SEQ ID NO: 1518809 - RNA, 19 nt, Homo sapiens
  misc_RNA (1)...(19): siRNA sense strand
cagcuagucgccuccagaa

SEQ ID NO: 1518810 - RNA, 19 nt, Homo sapiens
  misc_RNA (1)...(19): siRNA sense strand
ggucuaccagugacaggaa

SEQ ID NO: 1518811 - RNA, 19 nt, Homo sapiens
  misc_RNA (1)...(19): siRNA sense strand
ggaccggaaaggaccucua

SEQ ID NO: 1518812 - RNA, 19 nt, Homo sapiens
  misc_RNA (1)...(19): siRNA sense strand
aaggaccucuagugacguu

SEQ ID NO: 1518813 - RNA, 19 nt, Homo sapiens
  misc_RNA (1)...(19): siRNA sense strand
ccggaaaggaccucuagug

SEQ ID NO: 1518814 - RNA, 19 nt, Homo sapiens
  misc_RNA (1)...(19): siRNA sense strand
uggaaggugucaagaagac

SEQ ID NO: 1518815 - RNA, 19 nt, Homo sapiens
  misc_RNA (1)...(19): siRNA sense strand
ggagagcugacguuguucu

SEQ ID NO: 1518816 - RNA, 19 nt, Homo sapiens
  misc_RNA (1)...(19): siRNA sense strand
ccugaaacuggaacacauu

SEQ ID NO: 1518817 - RNA, 19 nt, Homo sapiens
  misc_RNA (1)...(19): siRNA sense strand
uguccgagcaucugggaaa

SEQ ID NO: 1518818 - RNA, 19 nt, Homo sapiens
  misc_RNA (1)...(19): siRNA sense strand
gcaggagcuucagguuguc

SEQ ID NO: 1518819 - RNA, 19 nt, Homo sapiens
  misc_RNA (1)...(19): siRNA sense strand
cagucacuuucguguggua

SEQ ID NO: 1518820 - RNA, 19 nt, Homo sapiens
  misc_RNA (1)...(19): siRNA sense strand
gcaaguaccucaagaguga

SEQ ID NO: 1518821 - RNA, 19 nt, Homo sapiens
  misc_RNA (1)...(19): siRNA sense strand
gagcgcaaguaccucaaga

SEQ ID NO: 1518822 - RNA, 19 nt, Homo sapiens
  misc_RNA (1)...(19): siRNA sense strand
aagagugacuggugcaaga

SEQ ID NO: 1518823 - RNA, 19 nt, Homo sapiens
  misc_RNA (1)...(19): siRNA sense strand
gacccacccuuccgacuca

SEQ ID NO: 1518824 - RNA, 19 nt, Homo sapiens
  misc_RNA (1)...(19): siRNA sense strand
gcaacaacucggagagaug

SEQ ID NO: 1518825 - RNA, 19 nt, Homo sapiens
  misc_RNA (1)...(19): siRNA sense strand
gauggcagcaccagaucaa

SEQ ID NO: 1518826 - RNA, 19 nt, Homo sapiens
  misc_RNA (1)...(19): siRNA sense strand
gugcaacuccuucuacauc

SEQ ID NO: 1518827 - RNA, 19 nt, Homo sapiens
  misc_RNA (1)...(19): siRNA sense strand
gccauccacucgccuuaca

SEQ ID NO: 1518828 - RNA, 19 nt, Homo sapiens
  misc_RNA (1)...(19): siRNA sense strand
gcgcaaguaccucaagagu

SEQ ID NO: 1518829 - RNA, 19 nt, Homo sapiens
  misc_RNA (1)...(19): siRNA sense strand
ucaagaaaauccagaaggu

SEQ ID NO: 1518830 - RNA, 19 nt, Homo sapiens
  misc_RNA (1)...(19): siRNA sense strand
cagugcaacuccuucuaca

SEQ ID NO: 1518831 - RNA, 19 nt, Homo sapiens
  misc_RNA (1)...(19): siRNA sense strand
gcgccauccacucgccuua

SEQ ID NO: 1518832 - RNA, 19 nt, Homo sapiens
  misc_RNA (1)...(19): siRNA sense strand
agagauggcagcaccagau

SEQ ID NO: 1518833 - RNA, 19 nt, Homo sapiens
  misc_RNA (1)...(19): siRNA sense strand
gagauggcagcaccagauc

SEQ ID NO: 1518834 - RNA, 19 nt, Homo sapiens
  misc_RNA (1)...(19): siRNA sense strand
aagcagugccggugcaugu

SEQ ID NO: 1518835 - RNA, 19 nt, Homo sapiens
  misc_RNA (1)...(19): siRNA sense strand
ggcagcaccagaucaagga

SEQ ID NO: 1518836 - RNA, 19 nt, Homo sapiens
  misc_RNA (1)...(19): siRNA sense strand
uggcggugcuggugaaggu

SEQ ID NO: 1518837 - RNA, 19 nt, Homo sapiens
  misc_RNA (1)...(19): siRNA sense strand
gccggugcauguccgugaa

SEQ ID NO: 1518838 - RNA, 19 nt, Homo sapiens
  misc_RNA (1)...(19): siRNA sense strand
caacucagcuuacauuuua

SEQ ID NO: 1518839 - RNA, 19 nt, Homo sapiens
  misc_RNA (1)...(19): siRNA sense strand
gaacauauccaaagcuuga

SEQ ID NO: 1518840 - RNA, 19 nt, Homo sapiens
  misc_RNA (1)...(19): siRNA sense strand
gaaaagaacuagaucguuu

SEQ ID NO: 1518841 - RNA, 19 nt, Homo sapiens
  misc_RNA (1)...(19): siRNA sense strand
gaauauuacucucuucuug

SEQ ID NO: 1518842 - RNA, 19 nt, Homo sapiens
  misc_RNA (1)...(19): siRNA sense strand
gcaaaucuccagugguuua

SEQ ID NO: 1518843 - RNA, 19 nt, Homo sapiens
  misc_RNA (1)...(19): siRNA sense strand
cagcaaaucuccagugguu

SEQ ID NO: 1518844 - RNA, 19 nt, Homo sapiens
  misc_RNA (1)...(19): siRNA sense strand
gaaaagaaaggaagaguua

SEQ ID NO: 1518845 - RNA, 19 nt, Homo sapiens
  misc_RNA (1)...(19): siRNA sense strand
aagaacaguuugccacuua

SEQ ID NO: 1518846 - RNA, 19 nt, Homo sapiens
  misc_RNA (1)...(19): siRNA sense strand
ugaacugucucaucaauug

SEQ ID NO: 1518847 - RNA, 19 nt, Homo sapiens
  misc_RNA (1)...(19): siRNA sense strand
guaagagacuucuagaaca

SEQ ID NO: 1518848 - RNA, 19 nt, Homo sapiens
  misc_RNA (1)...(19): siRNA sense strand
ucaaaugggacaagucuua

SEQ ID NO: 1518849 - RNA, 19 nt, Homo sapiens
  misc_RNA (1)...(19): siRNA sense strand
gaaagggaaaucaaugaaa

SEQ ID NO: 1518850 - RNA, 19 nt, Homo sapiens
  misc_RNA (1)...(19): siRNA sense strand
uaagagacuucuagaacaa

SEQ ID NO: 1518851 - RNA, 19 nt, Homo sapiens
  misc_RNA (1)...(19): siRNA sense strand
gagaagauauuuccacacu

SEQ ID NO: 1518852 - RNA, 19 nt, Homo sapiens
  misc_RNA (1)...(19): siRNA sense strand
gcaaaaggguguacaauca

SEQ ID NO: 1518853 - RNA, 19 nt, Homo sapiens
  misc_RNA (1)...(19): siRNA sense strand
gaccaaauaagcuaucuuu

SEQ ID NO: 1518854 - RNA, 19 nt, Homo sapiens
  misc_RNA (1)...(19): siRNA sense strand
guauacaaaugguggauug

SEQ ID NO: 1518855 - RNA, 19 nt, Homo sapiens
  misc_RNA (1)...(19): siRNA sense strand
gaaagauugccaaguuauu

SEQ ID NO: 1518856 - RNA, 19 nt, Homo sapiens
  misc_RNA (1)...(19): siRNA sense strand
auccaaagcuugaauacua

SEQ ID NO: 1518857 - RNA, 19 nt, Homo sapiens
  misc_RNA (1)...(19): siRNA sense strand
gaaaccaacucagcuuaca

SEQ ID NO: 1518858 - RNA, 19 nt, Homo sapiens
  misc_RNA (1)...(19): siRNA sense strand
gagcccagcauuucuagua

SEQ ID NO: 1518859 - RNA, 19 nt, Homo sapiens
  misc_RNA (1)...(19): siRNA sense strand
aaggaagaguuaaagguua

SEQ ID NO: 1518860 - RNA, 19 nt, Homo sapiens
  misc_RNA (1)...(19): siRNA sense strand
cagaggaggcugaugauuu

SEQ ID NO: 1518861 - RNA, 19 nt, Homo sapiens
  misc_RNA (1)...(19): siRNA sense strand
gagagaacaugaaaagaaa

SEQ ID NO: 1518862 - RNA, 19 nt, Homo sapiens
  misc_RNA (1)...(19): siRNA sense strand
gaaaggaagaguuaaaggu

SEQ ID NO: 1518863 - RNA, 19 nt, Homo sapiens
  misc_RNA (1)...(19): siRNA sense strand
gagguuaugucuagagaag

SEQ ID NO: 1518864 - RNA, 19 nt, Homo sapiens
  misc_RNA (1)...(19): siRNA sense strand
gcccagcauuucuaguaua

SEQ ID NO: 1518865 - RNA, 19 nt, Homo sapiens
  misc_RNA (1)...(19): siRNA sense strand
guggccagcugcauaguuu

SEQ ID NO: 1518866 - RNA, 19 nt, Homo sapiens
  misc_RNA (1)...(19): siRNA sense strand
gauggagaccuuuguauuc

SEQ ID NO: 1518867 - RNA, 19 nt, Homo sapiens
  misc_RNA (1)...(19): siRNA sense strand
uuugaaagauugccaaguu

SEQ ID NO: 1518868 - RNA, 19 nt, Homo sapiens
  misc_RNA (1)...(19): siRNA sense strand
gcacaguguuauauauucu

SEQ ID NO: 1518869 - RNA, 19 nt, Homo sapiens
  misc_RNA (1)...(19): siRNA sense strand
auacaggcaucaacaaaga

SEQ ID NO: 1518870 - RNA, 19 nt, Homo sapiens
  misc_RNA (1)...(19): siRNA sense strand
gcuccaagcuugcaugaac

SEQ ID NO: 1518871 - RNA, 19 nt, Homo sapiens
  misc_RNA (1)...(19): siRNA sense strand
ucaaggacccugaugaaga

SEQ ID NO: 1518872 - RNA, 19 nt, Homo sapiens
  misc_RNA (1)...(19): siRNA sense strand
uggagaagccauuaaguaa

SEQ ID NO: 1518873 - RNA, 19 nt, Homo sapiens
  misc_RNA (1)...(19): siRNA sense strand
cagcauuucuaguauacaa

SEQ ID NO: 1518874 - RNA, 19 nt, Homo sapiens
  misc_RNA (1)...(19): siRNA sense strand
uugaaagauugccaaguua

SEQ ID NO: 1518875 - RNA, 19 nt, Homo sapiens
  misc_RNA (1)...(19): siRNA sense strand
aaaccaggcuucaagucuu

SEQ ID NO: 1518876 - RNA, 19 nt, Homo sapiens
  misc_RNA (1)...(19): siRNA sense strand
caauugcaacucucagaua

SEQ ID NO: 1518877 - RNA, 19 nt, Homo sapiens
  misc_RNA (1)...(19): siRNA sense strand
caagucuuauuacuccuuu

SEQ ID NO: 1518878 - RNA, 19 nt, Homo sapiens
  misc_RNA (1)...(19): siRNA sense strand
ggguguacaaucauauuua

SEQ ID NO: 1518879 - RNA, 19 nt, Homo sapiens
  misc_RNA (1)...(19): siRNA sense strand
caagauggagaccuuugua

SEQ ID NO: 1518880 - RNA, 19 nt, Homo sapiens
  misc_RNA (1)...(19): siRNA sense strand
aaaugauccuuaacaguga

SEQ ID NO: 1518881 - RNA, 19 nt, Homo sapiens
  misc_RNA (1)...(19): siRNA sense strand
guagaaagggaaaucaaug

SEQ ID NO: 1518882 - RNA, 19 nt, Homo sapiens
  misc_RNA (1)...(19): siRNA sense strand
ggagaccuuuguauuccuu

SEQ ID NO: 1518883 - RNA, 19 nt, Homo sapiens
  misc_RNA (1)...(19): siRNA sense strand
gaacucgggcauuuuaaua

SEQ ID NO: 1518884 - RNA, 19 nt, Homo sapiens
  misc_RNA (1)...(19): siRNA sense strand
gcuuagcacagcagaauuu

SEQ ID NO: 1518885 - RNA, 19 nt, Homo sapiens
  misc_RNA (1)...(19): siRNA sense strand
gaaaccaggcuucaagucu

SEQ ID NO: 1518886 - RNA, 19 nt, Homo sapiens
  misc_RNA (1)...(19): siRNA sense strand
uauaaagagcccagcauuu

SEQ ID NO: 1518887 - RNA, 19 nt, Homo sapiens
  misc_RNA (1)...(19): siRNA sense strand
gaagaauuacagccaguau

SEQ ID NO: 1518888 - RNA, 19 nt, Homo sapiens
  misc_RNA (1)...(19): siRNA sense strand
caaggacccugaugaagac

SEQ ID NO: 1518889 - RNA, 19 nt, Homo sapiens
  misc_RNA (1)...(19): siRNA sense strand
aaugggacaagucuuauua

SEQ ID NO: 1518890 - RNA, 19 nt, Homo sapiens
  misc_RNA (1)...(19): siRNA sense strand
gguuaugucuagagaagau

SEQ ID NO: 1518891 - RNA, 19 nt, Homo sapiens
  misc_RNA (1)...(19): siRNA sense strand
gcuaagcacaguguuauau

SEQ ID NO: 1518892 - RNA, 19 nt, Homo sapiens
  misc_RNA (1)...(19): siRNA sense strand
ccucgaaguuugcgugguu

SEQ ID NO: 1518893 - RNA, 19 nt, Homo sapiens
  misc_RNA (1)...(19): siRNA sense strand
agaauuacagccaguauug

SEQ ID NO: 1518894 - RNA, 19 nt, Homo sapiens
  misc_RNA (1)...(19): siRNA sense strand
gauauuuccacacugguuu

SEQ ID NO: 1518895 - RNA, 19 nt, Homo sapiens
  misc_RNA (1)...(19): siRNA sense strand
gcacagcagaauuuggaaa

SEQ ID NO: 1518896 - RNA, 19 nt, Homo sapiens
  misc_RNA (1)...(19): siRNA sense strand
aaaggaagaguuaaagguu

SEQ ID NO: 1518897 - RNA, 19 nt, Homo sapiens
  misc_RNA (1)...(19): siRNA sense strand
ccuugaggccuuucuauuu

SEQ ID NO: 1518898 - RNA, 19 nt, Homo sapiens
  misc_RNA (1)...(19): siRNA sense strand
caaaugguggauuguugua

SEQ ID NO: 1518899 - RNA, 19 nt, Homo sapiens
  misc_RNA (1)...(19): siRNA sense strand
ggcaagagagaacaugaaa

SEQ ID NO: 1518900 - RNA, 19 nt, Homo sapiens
  misc_RNA (1)...(19): siRNA sense strand
cagccaguauugacacuug

SEQ ID NO: 1518901 - RNA, 19 nt, Homo sapiens
  misc_RNA (1)...(19): siRNA sense strand
uagaagaccaaauaagcua

SEQ ID NO: 1518902 - RNA, 19 nt, Homo sapiens
  misc_RNA (1)...(19): siRNA sense strand
gguguacaaucauauuuac

SEQ ID NO: 1518903 - RNA, 19 nt, Homo sapiens
  misc_RNA (1)...(19): siRNA sense strand
uccaaagcuugaauacuaa

SEQ ID NO: 1518904 - RNA, 19 nt, Homo sapiens
  misc_RNA (1)...(19): siRNA sense strand
cuaagcacaguguuauaua

SEQ ID NO: 1518905 - RNA, 19 nt, Homo sapiens
  misc_RNA (1)...(19): siRNA sense strand
gaacaguuugccacuuaga

SEQ ID NO: 1518906 - RNA, 19 nt, Homo sapiens
  misc_RNA (1)...(19): siRNA sense strand
uagaaagggaaaucaauga

SEQ ID NO: 1518907 - RNA, 19 nt, Homo sapiens
  misc_RNA (1)...(19): siRNA sense strand
ugcaugaacucgggcauuu

SEQ ID NO: 1518908 - RNA, 19 nt, Homo sapiens
  misc_RNA (1)...(19): siRNA sense strand
gaauuacagccaguauuga

SEQ ID NO: 1518909 - RNA, 19 nt, Homo sapiens
  misc_RNA (1)...(19): siRNA sense strand
ucacauccugguuagauaa

SEQ ID NO: 1518910 - RNA, 19 nt, Homo sapiens
  misc_RNA (1)...(19): siRNA sense strand
gagcagucaaauuuacuuu

SEQ ID NO: 1518911 - RNA, 19 nt, Homo sapiens
  misc_RNA (1)...(19): siRNA sense strand
gagaaacagaccagaguuc

SEQ ID NO: 1518912 - RNA, 19 nt, Homo sapiens
  misc_RNA (1)...(19): siRNA sense strand
agaggaggcugaugauuuu

SEQ ID NO: 1518913 - RNA, 19 nt, Homo sapiens
  misc_RNA (1)...(19): siRNA sense strand
aaagagcccagcauuucua

SEQ ID NO: 1518914 - RNA, 19 nt, Homo sapiens
  misc_RNA (1)...(19): siRNA sense strand
uugcgugguuuacaaauga

SEQ ID NO: 1518915 - RNA, 19 nt, Homo sapiens
  misc_RNA (1)...(19): siRNA sense strand
auaaagagcccagcauuuc

SEQ ID NO: 1518916 - RNA, 19 nt, Homo sapiens
  misc_RNA (1)...(19): siRNA sense strand
aaccaggcuucaagucuuu

SEQ ID NO: 1518917 - RNA, 19 nt, Homo sapiens
  misc_RNA (1)...(19): siRNA sense strand
aggaagaguuaaagguuau

SEQ ID NO: 1518918 - RNA, 19 nt, Homo sapiens
  misc_RNA (1)...(19): siRNA sense strand
cagaauuuggaaacacuua

SEQ ID NO: 1518919 - RNA, 19 nt, Homo sapiens
  misc_RNA (1)...(19): siRNA sense strand
aauugcaacucucagauau

SEQ ID NO: 1518920 - RNA, 19 nt, Homo sapiens
  misc_RNA (1)...(19): siRNA sense strand
ggacccugaugaagaccuu

SEQ ID NO: 1518921 - RNA, 19 nt, Homo sapiens
  misc_RNA (1)...(19): siRNA sense strand
uacccagccucucaaagaa

SEQ ID NO: 1518922 - RNA, 19 nt, Homo sapiens
  misc_RNA (1)...(19): siRNA sense strand
gguggauuguuguaagaga

SEQ ID NO: 1518923 - RNA, 19 nt, Homo sapiens
  misc_RNA (1)...(19): siRNA sense strand
gaagaguuaaagguuauug

SEQ ID NO: 1518924 - RNA, 19 nt, Homo sapiens
  misc_RNA (1)...(19): siRNA sense strand
ccuuaacagugacagauau

SEQ ID NO: 1518925 - RNA, 19 nt, Homo sapiens
  misc_RNA (1)...(19): siRNA sense strand
guacauccagauuucuuug

SEQ ID NO: 1518926 - RNA, 19 nt, Homo sapiens
  misc_RNA (1)...(19): siRNA sense strand
aaaaggguguacaaucaua

SEQ ID NO: 1518927 - RNA, 19 nt, Homo sapiens
  misc_RNA (1)...(19): siRNA sense strand
ugaugaagaccuugaacaa

SEQ ID NO: 1518928 - RNA, 19 nt, Homo sapiens
  misc_RNA (1)...(19): siRNA sense strand
ccagaaaccaggcuucaag

SEQ ID NO: 1518929 - RNA, 19 nt, Homo sapiens
  misc_RNA (1)...(19): siRNA sense strand
gcaagauggagaccuuugu

SEQ ID NO: 1518930 - RNA, 19 nt, Homo sapiens
  misc_RNA (1)...(19): siRNA sense strand
uaugcaagauggagaccuu

SEQ ID NO: 1518931 - RNA, 19 nt, Homo sapiens
  misc_RNA (1)...(19): siRNA sense strand
gauacaggcaucaacaaag

SEQ ID NO: 1518932 - RNA, 19 nt, Homo sapiens
  misc_RNA (1)...(19): siRNA sense strand
ugaaagauugccaaguuau

SEQ ID NO: 1518933 - RNA, 19 nt, Homo sapiens
  misc_RNA (1)...(19): siRNA sense strand
uagcacagcagaauuugga

SEQ ID NO: 1518934 - RNA, 19 nt, Homo sapiens
  misc_RNA (1)...(19): siRNA sense strand
uugcaacucucagauauca

SEQ ID NO: 1518935 - RNA, 19 nt, Homo sapiens
  misc_RNA (1)...(19): siRNA sense strand
aaagaacaguuugccacuu

SEQ ID NO: 1518936 - RNA, 19 nt, Homo sapiens
  misc_RNA (1)...(19): siRNA sense strand
ggccagcugcauaguuuaa

SEQ ID NO: 1518937 - RNA, 19 nt, Homo sapiens
  misc_RNA (1)...(19): siRNA sense strand
aaucuccagugguuuauuc

SEQ ID NO: 1518938 - RNA, 19 nt, Homo sapiens
  misc_RNA (1)...(19): siRNA sense strand
caacauugcuuacaucaug

SEQ ID NO: 1518939 - RNA, 19 nt, Homo sapiens
  misc_RNA (1)...(19): siRNA sense strand
ccaaacaggucuugucaaa

SEQ ID NO: 1518940 - RNA, 19 nt, Homo sapiens
  misc_RNA (1)...(19): siRNA sense strand
ggaagcagcucuguugaug

SEQ ID NO: 1518941 - RNA, 19 nt, Homo sapiens
  misc_RNA (1)...(19): siRNA sense strand
aaacaggucuugucaaaca

SEQ ID NO: 1518942 - RNA, 19 nt, Homo sapiens
  misc_RNA (1)...(19): siRNA sense strand
ccacacaacuaccugaauu

SEQ ID NO: 1518943 - RNA, 19 nt, Homo sapiens
  misc_RNA (1)...(19): siRNA sense strand
gaaauccucuggcucuuca

SEQ ID NO: 1518944 - RNA, 19 nt, Homo sapiens
  misc_RNA (1)...(19): siRNA sense strand
gcagggugcuuuacuccua

SEQ ID NO: 1518945 - RNA, 19 nt, Homo sapiens
  misc_RNA (1)...(19): siRNA sense strand
caaagccucuucuguagga

SEQ ID NO: 1518946 - RNA, 19 nt, Homo sapiens
  misc_RNA (1)...(19): siRNA sense strand
gaaaucagcucgggaugag

SEQ ID NO: 1518947 - RNA, 19 nt, Homo sapiens
  misc_RNA (1)...(19): siRNA sense strand
ggacaaagagagagagaga

SEQ ID NO: 1518948 - RNA, 19 nt, Homo sapiens
  misc_RNA (1)...(19): siRNA sense strand
gaaagcauccagcucagaa

SEQ ID NO: 1518949 - RNA, 19 nt, Homo sapiens
  misc_RNA (1)...(19): siRNA sense strand
gcuugaaccuauucuggua

SEQ ID NO: 1518950 - RNA, 19 nt, Homo sapiens
  misc_RNA (1)...(19): siRNA sense strand
gcaggaaacugaggguaug

SEQ ID NO: 1518951 - RNA, 19 nt, Homo sapiens
  misc_RNA (1)...(19): siRNA sense strand
gugcuaaccuugaucuuuc

SEQ ID NO: 1518952 - RNA, 19 nt, Homo sapiens
  misc_RNA (1)...(19): siRNA sense strand
acaacuaccugaauugaau

SEQ ID NO: 1518953 - RNA, 19 nt, Homo sapiens
  misc_RNA (1)...(19): siRNA sense strand
agacagagcccauugaugu

SEQ ID NO: 1518954 - RNA, 19 nt, Homo sapiens
  misc_RNA (1)...(19): siRNA sense strand
ugaaaccucucuaugugaa

SEQ ID NO: 1518955 - RNA, 19 nt, Homo sapiens
  misc_RNA (1)...(19): siRNA sense strand
gaagagaaggacaaagaga

SEQ ID NO: 1518956 - RNA, 19 nt, Homo sapiens
  misc_RNA (1)...(19): siRNA sense strand
ggucuugucaaacacauua

SEQ ID NO: 1518957 - RNA, 19 nt, Homo sapiens
  misc_RNA (1)...(19): siRNA sense strand
caauaucccucccaacaag

SEQ ID NO: 1518958 - RNA, 19 nt, Homo sapiens
  misc_RNA (1)...(19): siRNA sense strand
ggagaagcauaaagagaag

SEQ ID NO: 1518959 - RNA, 19 nt, Homo sapiens
  misc_RNA (1)...(19): siRNA sense strand
aaugaaaccucucuaugug

SEQ ID NO: 1518960 - RNA, 19 nt, Homo sapiens
  misc_RNA (1)...(19): siRNA sense strand
gggaguuagugauagauga

SEQ ID NO: 1518961 - RNA, 19 nt, Homo sapiens
  misc_RNA (1)...(19): siRNA sense strand
uggaagcaauuaccagaaa

SEQ ID NO: 1518962 - RNA, 19 nt, Homo sapiens
  misc_RNA (1)...(19): siRNA sense strand
ccacagugcuaaccuugau

SEQ ID NO: 1518963 - RNA, 19 nt, Homo sapiens
  misc_RNA (1)...(19): siRNA sense strand
agucaaagccucuucugua

SEQ ID NO: 1518964 - RNA, 19 nt, Homo sapiens
  misc_RNA (1)...(19): siRNA sense strand
ccuaccagguguucuguaa

SEQ ID NO: 1518965 - RNA, 19 nt, Homo sapiens
  misc_RNA (1)...(19): siRNA sense strand
ucgggagccugaugguuua

SEQ ID NO: 1518966 - RNA, 19 nt, Homo sapiens
  misc_RNA (1)...(19): siRNA sense strand
gucaaagccucuucuguag

SEQ ID NO: 1518967 - RNA, 19 nt, Homo sapiens
  misc_RNA (1)...(19): siRNA sense strand
gaguaucgcgugaccauug

SEQ ID NO: 1518968 - RNA, 19 nt, Homo sapiens
  misc_RNA (1)...(19): siRNA sense strand
gaagaaagacaaggagaag

SEQ ID NO: 1518969 - RNA, 19 nt, Homo sapiens
  misc_RNA (1)...(19): siRNA sense strand
aaaugaaaccucucuaugu

SEQ ID NO: 1518970 - RNA, 19 nt, Homo sapiens
  misc_RNA (1)...(19): siRNA sense strand
ugucagugcuucuggauuc

SEQ ID NO: 1518971 - RNA, 19 nt, Homo sapiens
  misc_RNA (1)...(19): siRNA sense strand
gcacaaacagaacaaagca

SEQ ID NO: 1518972 - RNA, 19 nt, Homo sapiens
  misc_RNA (1)...(19): siRNA sense strand
acaaggagaagcauaaaga

SEQ ID NO: 1518973 - RNA, 19 nt, Homo sapiens
  misc_RNA (1)...(19): siRNA sense strand
gacaugaguuacagagcuu

SEQ ID NO: 1518974 - RNA, 19 nt, Homo sapiens
  misc_RNA (1)...(19): siRNA sense strand
ccaacaagcgacugugaaa

SEQ ID NO: 1518975 - RNA, 19 nt, Homo sapiens
  misc_RNA (1)...(19): siRNA sense strand
cucagaagguuccaugaaa

SEQ ID NO: 1518976 - RNA, 19 nt, Homo sapiens
  misc_RNA (1)...(19): siRNA sense strand
gcauccagcucagaagguu

SEQ ID NO: 1518977 - RNA, 19 nt, Homo sapiens
  misc_RNA (1)...(19): siRNA sense strand
ccacacagaugggcauagu

SEQ ID NO: 1518978 - RNA, 19 nt, Homo sapiens
  misc_RNA (1)...(19): siRNA sense strand
cauuagacaacauugcuua

SEQ ID NO: 1518979 - RNA, 19 nt, Homo sapiens
  misc_RNA (1)...(19): siRNA sense strand
ggacaccgucugcaggaaa

SEQ ID NO: 1518980 - RNA, 19 nt, Homo sapiens
  misc_RNA (1)...(19): siRNA sense strand
aagaagagaaggacaaaga

SEQ ID NO: 1518981 - RNA, 19 nt, Homo sapiens
  misc_RNA (1)...(19): siRNA sense strand
gguguucuguaaagaguau

SEQ ID NO: 1518982 - RNA, 19 nt, Homo sapiens
  misc_RNA (1)...(19): siRNA sense strand
ucaaacacauuagacaaca

SEQ ID NO: 1518983 - RNA, 19 nt, Homo sapiens
  misc_RNA (1)...(19): siRNA sense strand
gaagguuccaugaaaguca

SEQ ID NO: 1518984 - RNA, 19 nt, Homo sapiens
  misc_RNA (1)...(19): siRNA sense strand
gcucagaagguuccaugaa

SEQ ID NO: 1518985 - RNA, 19 nt, Homo sapiens
  misc_RNA (1)...(19): siRNA sense strand
gaagggaagcagcucuguu

SEQ ID NO: 1518986 - RNA, 19 nt, Homo sapiens
  misc_RNA (1)...(19): siRNA sense strand
ucagaagguuccaugaaag

SEQ ID NO: 1518987 - RNA, 19 nt, Homo sapiens
  misc_RNA (1)...(19): siRNA sense strand
acacagaugggcauaguga

SEQ ID NO: 1518988 - RNA, 19 nt, Homo sapiens
  misc_RNA (1)...(19): siRNA sense strand
gaagcagcucuguugauga

SEQ ID NO: 1518989 - RNA, 19 nt, Homo sapiens
  misc_RNA (1)...(19): siRNA sense strand
agacaacauugcuuacauc

SEQ ID NO: 1518990 - RNA, 19 nt, Homo sapiens
  misc_RNA (1)...(19): siRNA sense strand
gaccauccagguauagauu

SEQ ID NO: 1518991 - RNA, 19 nt, Homo sapiens
  misc_RNA (1)...(19): siRNA sense strand
ugaggagucuuuucaauau

SEQ ID NO: 1518992 - RNA, 19 nt, Homo sapiens
  misc_RNA (1)...(19): siRNA sense strand
caucaugccgggacuguga

SEQ ID NO: 1518993 - RNA, 19 nt, Homo sapiens
  misc_RNA (1)...(19): siRNA sense strand
gcugagguguggaagcaau

SEQ ID NO: 1518994 - RNA, 19 nt, Homo sapiens
  misc_RNA (1)...(19): siRNA sense strand
gagaaauccucuggcucuu

SEQ ID NO: 1518995 - RNA, 19 nt, Homo sapiens
  misc_RNA (1)...(19): siRNA sense strand
gcagagucccacagugcua

SEQ ID NO: 1518996 - RNA, 19 nt, Homo sapiens
  misc_RNA (1)...(19): siRNA sense strand
uggcaugucucaccacaca

SEQ ID NO: 1518997 - RNA, 19 nt, Homo sapiens
  misc_RNA (1)...(19): siRNA sense strand
accgagaaaucaagaagaa

SEQ ID NO: 1518998 - RNA, 19 nt, Homo sapiens
  misc_RNA (1)...(19): siRNA sense strand
uagacaacauugcuuacau

SEQ ID NO: 1518999 - RNA, 19 nt, Homo sapiens
  misc_RNA (1)...(19): siRNA sense strand
agugauagaugauucuuac

SEQ ID NO: 1519000 - RNA, 19 nt, Homo sapiens
  misc_RNA (1)...(19): siRNA sense strand
aaacuuauucugucaccaa

SEQ ID NO: 1519001 - RNA, 19 nt, Homo sapiens
  misc_RNA (1)...(19): siRNA sense strand
uaccagguguucuguaaag

SEQ ID NO: 1519002 - RNA, 19 nt, Homo sapiens
  misc_RNA (1)...(19): siRNA sense strand
gagaagcgacacuccaagu

SEQ ID NO: 1519003 - RNA, 19 nt, Homo sapiens
  misc_RNA (1)...(19): siRNA sense strand
aagcagcucuguugaugag

SEQ ID NO: 1519004 - RNA, 19 nt, Homo sapiens
  misc_RNA (1)...(19): siRNA sense strand
gaaagucaaagccucuucu

SEQ ID NO: 1519005 - RNA, 19 nt, Homo sapiens
  misc_RNA (1)...(19): siRNA sense strand
ggaaagcauccagcucaga

SEQ ID NO: 1519006 - RNA, 19 nt, Homo sapiens
  misc_RNA (1)...(19): siRNA sense strand
ggaagcaauuaccagaaaa

SEQ ID NO: 1519007 - RNA, 19 nt, Homo sapiens
  misc_RNA (1)...(19): siRNA sense strand
ggucugacgccucccaguu

SEQ ID NO: 1519008 - RNA, 19 nt, Homo sapiens
  misc_RNA (1)...(19): siRNA sense strand
aagacaaggagaagcauaa

SEQ ID NO: 1519009 - RNA, 19 nt, Homo sapiens
  misc_RNA (1)...(19): siRNA sense strand
aggagaagcauaaagagaa

SEQ ID NO: 1519010 - RNA, 19 nt, Homo sapiens
  misc_RNA (1)...(19): siRNA sense strand
gaugaggagucuuuucaau

SEQ ID NO: 1519011 - RNA, 19 nt, Homo sapiens
  misc_RNA (1)...(19): siRNA sense strand
caaacacauuagacaacau

SEQ ID NO: 1519012 - RNA, 19 nt, Homo sapiens
  misc_RNA (1)...(19): siRNA sense strand
acagaugggcauagugaaa

SEQ ID NO: 1519013 - RNA, 19 nt, Homo sapiens
  misc_RNA (1)...(19): siRNA sense strand
ucaauaucccucccaacaa

SEQ ID NO: 1519014 - RNA, 19 nt, Homo sapiens
  misc_RNA (1)...(19): siRNA sense strand
caagccauucggagaguaa

SEQ ID NO: 1519015 - RNA, 19 nt, Homo sapiens
  misc_RNA (1)...(19): siRNA sense strand
gacagagcccauugauguu

SEQ ID NO: 1519016 - RNA, 19 nt, Homo sapiens
  misc_RNA (1)...(19): siRNA sense strand
caaacagaacaaagcagaa

SEQ ID NO: 1519017 - RNA, 19 nt, Homo sapiens
  misc_RNA (1)...(19): siRNA sense strand
cucaguaucugcagcacaa

SEQ ID NO: 1519018 - RNA, 19 nt, Homo sapiens
  misc_RNA (1)...(19): siRNA sense strand
ggcugaccauccagguaua

SEQ ID NO: 1519019 - RNA, 19 nt, Homo sapiens
  misc_RNA (1)...(19): siRNA sense strand
caaguccaagagaaguuua

SEQ ID NO: 1519020 - RNA, 19 nt, Homo sapiens
  misc_RNA (1)...(19): siRNA sense strand
agaagaaagacaaggagaa

SEQ ID NO: 1519021 - RNA, 19 nt, Homo sapiens
  misc_RNA (1)...(19): siRNA sense strand
ggaguuagugauagaugau

SEQ ID NO: 1519022 - RNA, 19 nt, Homo sapiens
  misc_RNA (1)...(19): siRNA sense strand
uugaauggcugucccaaac

SEQ ID NO: 1519023 - RNA, 19 nt, Homo sapiens
  misc_RNA (1)...(19): siRNA sense strand
acacaacuaccugaauuga

SEQ ID NO: 1519024 - RNA, 19 nt, Homo sapiens
  misc_RNA (1)...(19): siRNA sense strand
cugcucaucuucagcuguu

SEQ ID NO: 1519025 - RNA, 19 nt, Homo sapiens
  misc_RNA (1)...(19): siRNA sense strand
aagggaagcagcucuguug

SEQ ID NO: 1519026 - RNA, 19 nt, Homo sapiens
  misc_RNA (1)...(19): siRNA sense strand
aaagacaaggagaagcaua

SEQ ID NO: 1519027 - RNA, 19 nt, Homo sapiens
  misc_RNA (1)...(19): siRNA sense strand
ccaaguccaagagaaguuu

SEQ ID NO: 1519028 - RNA, 19 nt, Homo sapiens
  misc_RNA (1)...(19): siRNA sense strand
ggcugugucuggcaguuug

SEQ ID NO: 1519029 - RNA, 19 nt, Homo sapiens
  misc_RNA (1)...(19): siRNA sense strand
cagguguucuguaaagagu

SEQ ID NO: 1519030 - RNA, 19 nt, Homo sapiens
  misc_RNA (1)...(19): siRNA sense strand
aagcagaagccacaacugu

SEQ ID NO: 1519031 - RNA, 19 nt, Homo sapiens
  misc_RNA (1)...(19): siRNA sense strand
gagacagagcccauugaug

SEQ ID NO: 1519032 - RNA, 19 nt, Homo sapiens
  misc_RNA (1)...(19): siRNA sense strand
gagcaccacaggaagaaag

SEQ ID NO: 1519033 - RNA, 19 nt, Homo sapiens
  misc_RNA (1)...(19): siRNA sense strand
agaaagacaaggagaagca

SEQ ID NO: 1519034 - RNA, 19 nt, Homo sapiens
  misc_RNA (1)...(19): siRNA sense strand
gacaacauugcuuacauca

SEQ ID NO: 1519035 - RNA, 19 nt, Homo sapiens
  misc_RNA (1)...(19): siRNA sense strand
gggaagcagcucuguugau

SEQ ID NO: 1519036 - RNA, 19 nt, Homo sapiens
  misc_RNA (1)...(19): siRNA sense strand
agagaaggacaaagagaga

SEQ ID NO: 1519037 - RNA, 19 nt, Homo sapiens
  misc_RNA (1)...(19): siRNA sense strand
ucaagccauucggagagua

SEQ ID NO: 1519038 - RNA, 19 nt, Homo sapiens
  misc_RNA (1)...(19): siRNA sense strand
gagaaacccuauaaaugua

SEQ ID NO: 1519039 - RNA, 19 nt, Homo sapiens
  misc_RNA (1)...(19): siRNA sense strand
gagaaacccuauaaaugua

SEQ ID NO: 1519040 - RNA, 19 nt, Homo sapiens
  misc_RNA (1)...(19): siRNA sense strand
ggagaaacccuauaaaugu

SEQ ID NO: 1519041 - RNA, 19 nt, Homo sapiens
  misc_RNA (1)...(19): siRNA sense strand
gagaaacccuauaagugua

SEQ ID NO: 1519042 - RNA, 19 nt, Homo sapiens
  misc_RNA (1)...(19): siRNA sense strand
agagaaaccuuacaaaugu

SEQ ID NO: 1519043 - RNA, 19 nt, Homo sapiens
  misc_RNA (1)...(19): siRNA sense strand
gagagaagccuuaugaaug

SEQ ID NO: 1519044 - RNA, 19 nt, Homo sapiens
  misc_RNA (1)...(19): siRNA sense strand
ggagaaagacaagaaauuu

SEQ ID NO: 1519045 - RNA, 19 nt, Homo sapiens
  misc_RNA (1)...(19): siRNA sense strand
gagagaaacccuauaaaug

SEQ ID NO: 1519046 - RNA, 19 nt, Homo sapiens
  misc_RNA (1)...(19): siRNA sense strand
gagagaaaccuuacaaaug

SEQ ID NO: 1519047 - RNA, 19 nt, Homo sapiens
  misc_RNA (1)...(19): siRNA sense strand
ggagaaaacuuaugaaugu

SEQ ID NO: 1519048 - RNA, 19 nt, Homo sapiens
  misc_RNA (1)...(19): siRNA sense strand
gggaaugccuuuagucaga

SEQ ID NO: 1519049 - RNA, 19 nt, Homo sapiens
  misc_RNA (1)...(19): siRNA sense strand
gggaaagccuaucgguaua

SEQ ID NO: 1519050 - RNA, 19 nt, Homo sapiens
  misc_RNA (1)...(19): siRNA sense strand
ggagaaagaaaccucauaa

SEQ ID NO: 1519051 - RNA, 19 nt, Homo sapiens
  misc_RNA (1)...(19): siRNA sense strand
ggagagaaacccuauaaau

SEQ ID NO: 1519052 - RNA, 19 nt, Homo sapiens
  misc_RNA (1)...(19): siRNA sense strand
gcucuaaccuuguuguuca

SEQ ID NO: 1519053 - RNA, 19 nt, Homo sapiens
  misc_RNA (1)...(19): siRNA sense strand
guucaaaccuuacucaaca

SEQ ID NO: 1519054 - RNA, 19 nt, Homo sapiens
  misc_RNA (1)...(19): siRNA sense strand
guucacagcuuauucaaca

SEQ ID NO: 1519055 - RNA, 19 nt, Homo sapiens
  misc_RNA (1)...(19): siRNA sense strand
gagagaaacccuauaagug

SEQ ID NO: 1519056 - RNA, 19 nt, Homo sapiens
  misc_RNA (1)...(19): siRNA sense strand
agagaagccuuaugaaugu

SEQ ID NO: 1519057 - RNA, 19 nt, Homo sapiens
  misc_RNA (1)...(19): siRNA sense strand
ggagagaaacccuauaagu

SEQ ID NO: 1519058 - RNA, 19 nt, Homo sapiens
  misc_RNA (1)...(19): siRNA sense strand
ggaaaacucuuaaugaaca

SEQ ID NO: 1519059 - RNA, 19 nt, Homo sapiens
  misc_RNA (1)...(19): siRNA sense strand
ggagagaagccuuaugaau

SEQ ID NO: 1519060 - RNA, 19 nt, Homo sapiens
  misc_RNA (1)...(19): siRNA sense strand
gaaaagagacaguauguau

SEQ ID NO: 1519061 - RNA, 19 nt, Homo sapiens
  misc_RNA (1)...(19): siRNA sense strand
gaaacauaaugaggagaaa

SEQ ID NO: 1519062 - RNA, 19 nt, Homo sapiens
  misc_RNA (1)...(19): siRNA sense strand
cgguauaguucacagcuua

SEQ ID NO: 1519063 - RNA, 19 nt, Homo sapiens
  misc_RNA (1)...(19): siRNA sense strand
ggaaacauaaugaggagaa

SEQ ID NO: 1519064 - RNA, 19 nt, Homo sapiens
  misc_RNA (1)...(19): siRNA sense strand
aguggaaagucacaucuua

SEQ ID NO: 1519065 - RNA, 19 nt, Homo sapiens
  misc_RNA (1)...(19): siRNA sense strand
agagaaacccuauaaaugu

SEQ ID NO: 1519066 - RNA, 19 nt, Homo sapiens
  misc_RNA (1)...(19): siRNA sense strand
gugcaaaccucacaguaca

SEQ ID NO: 1519067 - RNA, 19 nt, Homo sapiens
  misc_RNA (1)...(19): siRNA sense strand
gaagcccuauucuuguauu

SEQ ID NO: 1519068 - RNA, 19 nt, Homo sapiens
  misc_RNA (1)...(19): siRNA sense strand
gaaaacaugugguucuaau

SEQ ID NO: 1519069 - RNA, 19 nt, Homo sapiens
  misc_RNA (1)...(19): siRNA sense strand
caccagagacuucaucgua

SEQ ID NO: 1519070 - RNA, 19 nt, Homo sapiens
  misc_RNA (1)...(19): siRNA sense strand
ggagugaccaagaaucuga

SEQ ID NO: 1519071 - RNA, 19 nt, Homo sapiens
  misc_RNA (1)...(19): siRNA sense strand
caacaccagaggaaacaua

SEQ ID NO: 1519072 - RNA, 19 nt, Homo sapiens
  misc_RNA (1)...(19): siRNA sense strand
acaauaaaguacucacaga

SEQ ID NO: 1519073 - RNA, 19 nt, Homo sapiens
  misc_RNA (1)...(19): siRNA sense strand
cuaaggagaaacccuauaa

SEQ ID NO: 1519074 - RNA, 19 nt, Homo sapiens
  misc_RNA (1)...(19): siRNA sense strand
gcugugacccugcaacaaa

SEQ ID NO: 1519075 - RNA, 19 nt, Homo sapiens
  misc_RNA (1)...(19): siRNA sense strand
gaacccacacuaaggagaa

SEQ ID NO: 1519076 - RNA, 19 nt, Homo sapiens
  misc_RNA (1)...(19): siRNA sense strand
ccagagacuucaucguaga

SEQ ID NO: 1519077 - RNA, 19 nt, Homo sapiens
  misc_RNA (1)...(19): siRNA sense strand
ggacugaagcccuauacau

SEQ ID NO: 1519078 - RNA, 19 nt, Homo sapiens
  misc_RNA (1)...(19): siRNA sense strand
ggaaagucacaucuuauuc

SEQ ID NO: 1519079 - RNA, 19 nt, Homo sapiens
  misc_RNA (1)...(19): siRNA sense strand
agaagggagugaccaagaa

SEQ ID NO: 1519080 - RNA, 19 nt, Homo sapiens
  misc_RNA (1)...(19): siRNA sense strand
gaaagucacaucuuauucg

SEQ ID NO: 1519081 - RNA, 19 nt, Homo sapiens
  misc_RNA (1)...(19): siRNA sense strand
agagaaacccuauaagugu

SEQ ID NO: 1519082 - RNA, 19 nt, Homo sapiens
  misc_RNA (1)...(19): siRNA sense strand
uauaucacaucacagaguu

SEQ ID NO: 1519083 - RNA, 19 nt, Homo sapiens
  misc_RNA (1)...(19): siRNA sense strand
ggccuuauaucacaucaca

SEQ ID NO: 1519084 - RNA, 19 nt, Homo sapiens
  misc_RNA (1)...(19): siRNA sense strand
guagagagaaaccuuacaa

SEQ ID NO: 1519085 - RNA, 19 nt, Homo sapiens
  misc_RNA (1)...(19): siRNA sense strand
aaagagacaguauguaugu

SEQ ID NO: 1519086 - RNA, 19 nt, Homo sapiens
  misc_RNA (1)...(19): siRNA sense strand
caauaaaguacucacagaa

SEQ ID NO: 1519087 - RNA, 19 nt, Homo sapiens
  misc_RNA (1)...(19): siRNA sense strand
agccguaguucaaaccuua

SEQ ID NO: 1519088 - RNA, 19 nt, Homo sapiens
  misc_RNA (1)...(19): siRNA sense strand
ucauagcucuaaccuuguu

SEQ ID NO: 1519089 - RNA, 19 nt, Homo sapiens
  misc_RNA (1)...(19): siRNA sense strand
guauguauguacugagugu

SEQ ID NO: 1519090 - RNA, 19 nt, Homo sapiens
  misc_RNA (1)...(19): siRNA sense strand
guucgggccuuauaucaca

SEQ ID NO: 1519091 - RNA, 19 nt, Homo sapiens
  misc_RNA (1)...(19): siRNA sense strand
gacugaagcccuauacaug

SEQ ID NO: 1519092 - RNA, 19 nt, Homo sapiens
  misc_RNA (1)...(19): siRNA sense strand
gugaaugugggaaaucuuu

SEQ ID NO: 1519093 - RNA, 19 nt, Homo sapiens
  misc_RNA (1)...(19): siRNA sense strand
gaacaccagagacuucauc

SEQ ID NO: 1519094 - RNA, 19 nt, Homo sapiens
  misc_RNA (1)...(19): siRNA sense strand
gaaacccuauaaauguagu

SEQ ID NO: 1519095 - RNA, 19 nt, Homo sapiens
  misc_RNA (1)...(19): siRNA sense strand
cuauaaauguagugagugu

SEQ ID NO: 1519096 - RNA, 19 nt, Homo sapiens
  misc_RNA (1)...(19): siRNA sense strand
gaagggagugaccaagaau

SEQ ID NO: 1519097 - RNA, 19 nt, Homo sapiens
  misc_RNA (1)...(19): siRNA sense strand
cgggagagaaacccuauaa

SEQ ID NO: 1519098 - RNA, 19 nt, Homo sapiens
  misc_RNA (1)...(19): siRNA sense strand
ugggaaagccuaucgguau

SEQ ID NO: 1519099 - RNA, 19 nt, Homo sapiens
  misc_RNA (1)...(19): siRNA sense strand
aggagaaacccuauaaaug

SEQ ID NO: 1519100 - RNA, 19 nt, Homo sapiens
  misc_RNA (1)...(19): siRNA sense strand
agagagaaaccuuacaaau

SEQ ID NO: 1519101 - RNA, 19 nt, Homo sapiens
  misc_RNA (1)...(19): siRNA sense strand
gcaaaccucacaguacaug

SEQ ID NO: 1519102 - RNA, 19 nt, Homo sapiens
  misc_RNA (1)...(19): siRNA sense strand
caacaaaugagagaguuca

SEQ ID NO: 1519103 - RNA, 19 nt, Homo sapiens
  misc_RNA (1)...(19): siRNA sense strand
cauaagacaguuaaagaca

SEQ ID NO: 1519104 - RNA, 19 nt, Homo sapiens
  misc_RNA (1)...(19): siRNA sense strand
aaacaugugguucuaauac

SEQ ID NO: 1519105 - RNA, 19 nt, Homo sapiens
  misc_RNA (1)...(19): siRNA sense strand
uggaaagucacaucuuauu

SEQ ID NO: 1519106 - RNA, 19 nt, Homo sapiens
  misc_RNA (1)...(19): siRNA sense strand
gaggagaaagacaagaaau

SEQ ID NO: 1519107 - RNA, 19 nt, Homo sapiens
  misc_RNA (1)...(19): siRNA sense strand
uaaggagaaacccuauaaa

SEQ ID NO: 1519108 - RNA, 19 nt, Homo sapiens
  misc_RNA (1)...(19): siRNA sense strand
uuaugaaugugaugagugu

SEQ ID NO: 1519109 - RNA, 19 nt, Homo sapiens
  misc_RNA (1)...(19): siRNA sense strand
gagugcaaaccucacagua

SEQ ID NO: 1519110 - RNA, 19 nt, Homo sapiens
  misc_RNA (1)...(19): siRNA sense strand
aaggagaaacccuauaaau

SEQ ID NO: 1519111 - RNA, 19 nt, Homo sapiens
  misc_RNA (1)...(19): siRNA sense strand
ggaguucgggccuuauauc

SEQ ID NO: 1519112 - RNA, 19 nt, Homo sapiens
  misc_RNA (1)...(19): siRNA sense strand
caccagaggaaacauaaug

SEQ ID NO: 1519113 - RNA, 19 nt, Homo sapiens
  misc_RNA (1)...(19): siRNA sense strand
cagaagggagugaccaaga

SEQ ID NO: 1519114 - RNA, 19 nt, Homo sapiens
  misc_RNA (1)...(19): siRNA sense strand
acaugugguucuaauacaa

SEQ ID NO: 1519115 - RNA, 19 nt, Homo sapiens
  misc_RNA (1)...(19): siRNA sense strand
agucggaguucgggccuua

SEQ ID NO: 1519116 - RNA, 19 nt, Homo sapiens
  misc_RNA (1)...(19): siRNA sense strand
cauaaugaggagaaagaaa

SEQ ID NO: 1519117 - RNA, 19 nt, Homo sapiens
  misc_RNA (1)...(19): siRNA sense strand
ugagaacccacacuaagga

SEQ ID NO: 1519118 - RNA, 19 nt, Homo sapiens
  misc_RNA (1)...(19): siRNA sense strand
acacuggagagaagccuua

SEQ ID NO: 1519119 - RNA, 19 nt, Homo sapiens
  misc_RNA (1)...(19): siRNA sense strand
gggaaaacaugugguucua

SEQ ID NO: 1519120 - RNA, 19 nt, Homo sapiens
  misc_RNA (1)...(19): siRNA sense strand
gaauucacacuggagagaa

SEQ ID NO: 1519121 - RNA, 19 nt, Homo sapiens
  misc_RNA (1)...(19): siRNA sense strand
gagaagccuuaugaaugug

SEQ ID NO: 1519122 - RNA, 19 nt, Homo sapiens
  misc_RNA (1)...(19): siRNA sense strand
cuggagagaagccuuauga

SEQ ID NO: 1519123 - RNA, 19 nt, Homo sapiens
  misc_RNA (1)...(19): siRNA sense strand
cuggagagaaacccuauaa

SEQ ID NO: 1519124 - RNA, 19 nt, Homo sapiens
  misc_RNA (1)...(19): siRNA sense strand
aucgaaaccuuguugauca

SEQ ID NO: 1519125 - RNA, 19 nt, Homo sapiens
  misc_RNA (1)...(19): siRNA sense strand
ccggagagaagcccuauuc

SEQ ID NO: 1519126 - RNA, 19 nt, Homo sapiens
  misc_RNA (1)...(19): siRNA sense strand
guaguucaaaccuuacuca

SEQ ID NO: 1519127 - RNA, 19 nt, Homo sapiens
  misc_RNA (1)...(19): siRNA sense strand
gccuuuagccguaguucaa

SEQ ID NO: 1519128 - RNA, 19 nt, Homo sapiens
  misc_RNA (1)...(19): siRNA sense strand
gaguucgggccuuauauca

SEQ ID NO: 1519129 - RNA, 19 nt, Homo sapiens
  misc_RNA (1)...(19): siRNA sense strand
gcaacaaaugagagaguuc

SEQ ID NO: 1519130 - RNA, 19 nt, Homo sapiens
  misc_RNA (1)...(19): siRNA sense strand
aggagaaagacaagaaauu

SEQ ID NO: 1519131 - RNA, 19 nt, Homo sapiens
  misc_RNA (1)...(19): siRNA sense strand
gaagccuuaugaaugugau

SEQ ID NO: 1519132 - RNA, 19 nt, Homo sapiens
  misc_RNA (1)...(19): siRNA sense strand
aagagacaguauguaugua

SEQ ID NO: 1519133 - RNA, 19 nt, Homo sapiens
  misc_RNA (1)...(19): siRNA sense strand
gcccuauucuuguauugag

SEQ ID NO: 1519134 - RNA, 19 nt, Homo sapiens
  misc_RNA (1)...(19): siRNA sense strand
ccuuauaucacaucacaga

SEQ ID NO: 1519135 - RNA, 19 nt, Homo sapiens
  misc_RNA (1)...(19): siRNA sense strand
cccuauacaugcagugaau

SEQ ID NO: 1519136 - RNA, 19 nt, Homo sapiens
  misc_RNA (1)...(19): siRNA sense strand
uagagagaaaccuuacaaa

SEQ ID NO: 1519137 - RNA, 19 nt, Homo sapiens
  misc_RNA (1)...(19): siRNA sense strand
agaaacccuauaaguguaa

SEQ ID NO: 1519138 - RNA, 19 nt, Homo sapiens
  misc_RNA (1)...(19): siRNA sense strand
gaaaugagggagaggacua

SEQ ID NO: 1519139 - RNA, 19 nt, Homo sapiens
  misc_RNA (1)...(19): siRNA sense strand
aaagauggcaggcuaccua

SEQ ID NO: 1519140 - RNA, 19 nt, Homo sapiens
  misc_RNA (1)...(19): siRNA sense strand
cgaggagacuaccguaaag

SEQ ID NO: 1519141 - RNA, 19 nt, Homo sapiens
  misc_RNA (1)...(19): siRNA sense strand
ggagacuaccguaaagaug

SEQ ID NO: 1519142 - RNA, 19 nt, Homo sapiens
  misc_RNA (1)...(19): siRNA sense strand
ugagggagaggacuacgaa

SEQ ID NO: 1519143 - RNA, 19 nt, Homo sapiens
  misc_RNA (1)...(19): siRNA sense strand
gcucccgucuaucaucuca

SEQ ID NO: 1519144 - RNA, 19 nt, Homo sapiens
  misc_RNA (1)...(19): siRNA sense strand
gacgaggagacuaccguaa

SEQ ID NO: 1519145 - RNA, 19 nt, Homo sapiens
  misc_RNA (1)...(19): siRNA sense strand
gaggagacuaccguaaaga

SEQ ID NO: 1519146 - RNA, 19 nt, Homo sapiens
  misc_RNA (1)...(19): siRNA sense strand
ucucccggcucccgucuau

SEQ ID NO: 1519147 - RNA, 19 nt, Homo sapiens
  misc_RNA (1)...(19): siRNA sense strand
acgaggagacuaccguaaa

SEQ ID NO: 1519148 - RNA, 19 nt, Homo sapiens
  misc_RNA (1)...(19): siRNA sense strand
ucaagucgagacaauggaa

SEQ ID NO: 1519149 - RNA, 19 nt, Homo sapiens
  misc_RNA (1)...(19): siRNA sense strand
gcacacaucucauuacaaa

SEQ ID NO: 1519150 - RNA, 19 nt, Homo sapiens
  misc_RNA (1)...(19): siRNA sense strand
ggagaaaccuuaugaaugu

SEQ ID NO: 1519151 - RNA, 19 nt, Homo sapiens
  misc_RNA (1)...(19): siRNA sense strand
ggacaagccuucagucaaa

SEQ ID NO: 1519152 - RNA, 19 nt, Homo sapiens
  misc_RNA (1)...(19): siRNA sense strand
gagaagcccuuuaaaugua

SEQ ID NO: 1519153 - RNA, 19 nt, Homo sapiens
  misc_RNA (1)...(19): siRNA sense strand
ggagaaaccuuaugagugu

SEQ ID NO: 1519154 - RNA, 19 nt, Homo sapiens
  misc_RNA (1)...(19): siRNA sense strand
ggaagaaacucaucaaugg

SEQ ID NO: 1519155 - RNA, 19 nt, Homo sapiens
  misc_RNA (1)...(19): siRNA sense strand
gggaaagccuucaguugua

SEQ ID NO: 1519156 - RNA, 19 nt, Homo sapiens
  misc_RNA (1)...(19): siRNA sense strand
gggaacaacucuacaaaug

SEQ ID NO: 1519157 - RNA, 19 nt, Homo sapiens
  misc_RNA (1)...(19): siRNA sense strand
gggaagacauucagucaaa

SEQ ID NO: 1519158 - RNA, 19 nt, Homo sapiens
  misc_RNA (1)...(19): siRNA sense strand
gguaaaaccuucaguuaua

SEQ ID NO: 1519159 - RNA, 19 nt, Homo sapiens
  misc_RNA (1)...(19): siRNA sense strand
caucagaaguggcauacua

SEQ ID NO: 1519160 - RNA, 19 nt, Homo sapiens
  misc_RNA (1)...(19): siRNA sense strand
gggaagaguuugaguucua

SEQ ID NO: 1519161 - RNA, 19 nt, Homo sapiens
  misc_RNA (1)...(19): siRNA sense strand
gggaaaaccuucagauaua

SEQ ID NO: 1519162 - RNA, 19 nt, Homo sapiens
  misc_RNA (1)...(19): siRNA sense strand
ggacagaggcccuaugaau

SEQ ID NO: 1519163 - RNA, 19 nt, Homo sapiens
  misc_RNA (1)...(19): siRNA sense strand
ggagauagccaggaaauug

SEQ ID NO: 1519164 - RNA, 19 nt, Homo sapiens
  misc_RNA (1)...(19): siRNA sense strand
caacccacauucagacuuu

SEQ ID NO: 1519165 - RNA, 19 nt, Homo sapiens
  misc_RNA (1)...(19): siRNA sense strand
gggagaagcccuuuaaaug

SEQ ID NO: 1519166 - RNA, 19 nt, Homo sapiens
  misc_RNA (1)...(19): siRNA sense strand
ggagaagcccuuuaaaugu

SEQ ID NO: 1519167 - RNA, 19 nt, Homo sapiens
  misc_RNA (1)...(19): siRNA sense strand
gagaagcccuaugaaugua

SEQ ID NO: 1519168 - RNA, 19 nt, Homo sapiens
  misc_RNA (1)...(19): siRNA sense strand
ggaagaguuugaguucuaa

SEQ ID NO: 1519169 - RNA, 19 nt, Homo sapiens
  misc_RNA (1)...(19): siRNA sense strand
ggagaagcccuaugaaugu

SEQ ID NO: 1519170 - RNA, 19 nt, Homo sapiens
  misc_RNA (1)...(19): siRNA sense strand
ggagaaacccuaugaaugc

SEQ ID NO: 1519171 - RNA, 19 nt, Homo sapiens
  misc_RNA (1)...(19): siRNA sense strand
gggaaagccuucagaugga

SEQ ID NO: 1519172 - RNA, 19 nt, Homo sapiens
  misc_RNA (1)...(19): siRNA sense strand
caaaccagaucugauauuc

SEQ ID NO: 1519173 - RNA, 19 nt, Homo sapiens
  misc_RNA (1)...(19): siRNA sense strand
gggagaagcccuaugaaug

SEQ ID NO: 1519174 - RNA, 19 nt, Homo sapiens
  misc_RNA (1)...(19): siRNA sense strand
aaaccaagacugagaauga

SEQ ID NO: 1519175 - RNA, 19 nt, Homo sapiens
  misc_RNA (1)...(19): siRNA sense strand
ggagaauuaugcaaaugug

SEQ ID NO: 1519176 - RNA, 19 nt, Homo sapiens
  misc_RNA (1)...(19): siRNA sense strand
gggagaaaccuuaugaaug

SEQ ID NO: 1519177 - RNA, 19 nt, Homo sapiens
  misc_RNA (1)...(19): siRNA sense strand
gggaggagauagccaggaa

SEQ ID NO: 1519178 - RNA, 19 nt, Homo sapiens
  misc_RNA (1)...(19): siRNA sense strand
ggaaagccuucagauggaa

SEQ ID NO: 1519179 - RNA, 19 nt, Homo sapiens
  misc_RNA (1)...(19): siRNA sense strand
gcaguucgguauuucuuca

SEQ ID NO: 1519180 - RNA, 19 nt, Homo sapiens
  misc_RNA (1)...(19): siRNA sense strand
gagagaaaccauacucaug

SEQ ID NO: 1519181 - RNA, 19 nt, Homo sapiens
  misc_RNA (1)...(19): siRNA sense strand
ggaaaaccuucagauauaa

SEQ ID NO: 1519182 - RNA, 19 nt, Homo sapiens
  misc_RNA (1)...(19): siRNA sense strand
gggagaaacccuaugaaug

SEQ ID NO: 1519183 - RNA, 19 nt, Homo sapiens
  misc_RNA (1)...(19): siRNA sense strand
gagaaaccuuaugaaugua

SEQ ID NO: 1519184 - RNA, 19 nt, Homo sapiens
  misc_RNA (1)...(19): siRNA sense strand
gagaaaccauacucaugug

SEQ ID NO: 1519185 - RNA, 19 nt, Homo sapiens
  misc_RNA (1)...(19): siRNA sense strand
ucagagaguucacacuaau

SEQ ID NO: 1519186 - RNA, 19 nt, Homo sapiens
  misc_RNA (1)...(19): siRNA sense strand
caucagagaguucacacua

SEQ ID NO: 1519187 - RNA, 19 nt, Homo sapiens
  misc_RNA (1)...(19): siRNA sense strand
ggaaagccuucaguuguag

SEQ ID NO: 1519188 - RNA, 19 nt, Homo sapiens
  misc_RNA (1)...(19): siRNA sense strand
gaaauuggaagaaaguagu

SEQ ID NO: 1519189 - RNA, 19 nt, Homo sapiens
  misc_RNA (1)...(19): siRNA sense strand
ggaacaacucuacaaaugu

SEQ ID NO: 1519190 - RNA, 19 nt, Homo sapiens
  misc_RNA (1)...(19): siRNA sense strand
gagaagcccuacacaugca

SEQ ID NO: 1519191 - RNA, 19 nt, Homo sapiens
  misc_RNA (1)...(19): siRNA sense strand
gaagaaacucaucaaugga

SEQ ID NO: 1519192 - RNA, 19 nt, Homo sapiens
  misc_RNA (1)...(19): siRNA sense strand
ggagugcaauggcgugauc

SEQ ID NO: 1519193 - RNA, 19 nt, Homo sapiens
  misc_RNA (1)...(19): siRNA sense strand
gaguuugaguucuaauuca

SEQ ID NO: 1519194 - RNA, 19 nt, Homo sapiens
  misc_RNA (1)...(19): siRNA sense strand
gcacagcuaaacauuucua

SEQ ID NO: 1519195 - RNA, 19 nt, Homo sapiens
  misc_RNA (1)...(19): siRNA sense strand
gccaggaaauuggaagaaa

SEQ ID NO: 1519196 - RNA, 19 nt, Homo sapiens
  misc_RNA (1)...(19): siRNA sense strand
ucagauggaaugcaaguuu

SEQ ID NO: 1519197 - RNA, 19 nt, Homo sapiens
  misc_RNA (1)...(19): siRNA sense strand
gacagaggcccuaugaaug

SEQ ID NO: 1519198 - RNA, 19 nt, Homo sapiens
  misc_RNA (1)...(19): siRNA sense strand
cagcacacaucucauuaca

SEQ ID NO: 1519199 - RNA, 19 nt, Homo sapiens
  misc_RNA (1)...(19): siRNA sense strand
caucagagaauccacaaug

SEQ ID NO: 1519200 - RNA, 19 nt, Homo sapiens
  misc_RNA (1)...(19): siRNA sense strand
aggugaugcuggagaauua

SEQ ID NO: 1519201 - RNA, 19 nt, Homo sapiens
  misc_RNA (1)...(19): siRNA sense strand
cugcacagcuaaacauuuc

SEQ ID NO: 1519202 - RNA, 19 nt, Homo sapiens
  misc_RNA (1)...(19): siRNA sense strand
gcuggagaauuaugcaaau

SEQ ID NO: 1519203 - RNA, 19 nt, Homo sapiens
  misc_RNA (1)...(19): siRNA sense strand
agaagcccuuuaaauguaa

SEQ ID NO: 1519204 - RNA, 19 nt, Homo sapiens
  misc_RNA (1)...(19): siRNA sense strand
gagaaaccuuaugagugua

SEQ ID NO: 1519205 - RNA, 19 nt, Homo sapiens
  misc_RNA (1)...(19): siRNA sense strand
caaguuucauccagcauca

SEQ ID NO: 1519206 - RNA, 19 nt, Homo sapiens
  misc_RNA (1)...(19): siRNA sense strand
gggaggugaugcuggagaa

SEQ ID NO: 1519207 - RNA, 19 nt, Homo sapiens
  misc_RNA (1)...(19): siRNA sense strand
cugcuucccucaucugaaa

SEQ ID NO: 1519208 - RNA, 19 nt, Homo sapiens
  misc_RNA (1)...(19): siRNA sense strand
cagcuaaacauuucuaaag

SEQ ID NO: 1519209 - RNA, 19 nt, Homo sapiens
  misc_RNA (1)...(19): siRNA sense strand
cccuucaccuguccaaaua

SEQ ID NO: 1519210 - RNA, 19 nt, Homo sapiens
  misc_RNA (1)...(19): siRNA sense strand
gcaaaugugacuuccuugu

SEQ ID NO: 1519211 - RNA, 19 nt, Homo sapiens
  misc_RNA (1)...(19): siRNA sense strand
uuauaaauguggugagugu

SEQ ID NO: 1519212 - RNA, 19 nt, Homo sapiens
  misc_RNA (1)...(19): siRNA sense strand
ugacuucaaggacagguua

SEQ ID NO: 1519213 - RNA, 19 nt, Homo sapiens
  misc_RNA (1)...(19): siRNA sense strand
gggccucccuuaucuucuu

SEQ ID NO: 1519214 - RNA, 19 nt, Homo sapiens
  misc_RNA (1)...(19): siRNA sense strand
cagaggcccuaugaaugua

SEQ ID NO: 1519215 - RNA, 19 nt, Homo sapiens
  misc_RNA (1)...(19): siRNA sense strand
ccaggaaauuggaagaaag

SEQ ID NO: 1519216 - RNA, 19 nt, Homo sapiens
  misc_RNA (1)...(19): siRNA sense strand
acagggcuauccgcaguua

SEQ ID NO: 1519217 - RNA, 19 nt, Homo sapiens
  misc_RNA (1)...(19): siRNA sense strand
cagauggaaugcaaguuuc

SEQ ID NO: 1519218 - RNA, 19 nt, Homo sapiens
  misc_RNA (1)...(19): siRNA sense strand
ggaaauuggaagaaaguag

SEQ ID NO: 1519219 - RNA, 19 nt, Homo sapiens
  misc_RNA (1)...(19): siRNA sense strand
gcccgaauccuuugucuca

SEQ ID NO: 1519220 - RNA, 19 nt, Homo sapiens
  misc_RNA (1)...(19): siRNA sense strand
caucagagaauccauacug

SEQ ID NO: 1519221 - RNA, 19 nt, Homo sapiens
  misc_RNA (1)...(19): siRNA sense strand
ggagagaaaccauacucau

SEQ ID NO: 1519222 - RNA, 19 nt, Homo sapiens
  misc_RNA (1)...(19): siRNA sense strand
gaggagauagccaggaaau

SEQ ID NO: 1519223 - RNA, 19 nt, Homo sapiens
  misc_RNA (1)...(19): siRNA sense strand
agagaaaccauacucaugu

SEQ ID NO: 1519224 - RNA, 19 nt, Homo sapiens
  misc_RNA (1)...(19): siRNA sense strand
agaaguggcauacuaggaa

SEQ ID NO: 1519225 - RNA, 19 nt, Homo sapiens
  misc_RNA (1)...(19): siRNA sense strand
gaauguacugacuguggua

SEQ ID NO: 1519226 - RNA, 19 nt, Homo sapiens
  misc_RNA (1)...(19): siRNA sense strand
acagaggcccuaugaaugu

SEQ ID NO: 1519227 - RNA, 19 nt, Homo sapiens
  misc_RNA (1)...(19): siRNA sense strand
gagaauuaugcaaauguga

SEQ ID NO: 1519228 - RNA, 19 nt, Homo sapiens
  misc_RNA (1)...(19): siRNA sense strand
agaagucacagcuacauga

SEQ ID NO: 1519229 - RNA, 19 nt, Homo sapiens
  misc_RNA (1)...(19): siRNA sense strand
gaagcccuaugaauguaag

SEQ ID NO: 1519230 - RNA, 19 nt, Homo sapiens
  misc_RNA (1)...(19): siRNA sense strand
ccaaaccagaucugauauu

SEQ ID NO: 1519231 - RNA, 19 nt, Homo sapiens
  misc_RNA (1)...(19): siRNA sense strand
aaacaaagauaggggauug

SEQ ID NO: 1519232 - RNA, 19 nt, Homo sapiens
  misc_RNA (1)...(19): siRNA sense strand
ucaaggacagguuagagaa

SEQ ID NO: 1519233 - RNA, 19 nt, Homo sapiens
  misc_RNA (1)...(19): siRNA sense strand
cuucagagcccgaauccuu

SEQ ID NO: 1519234 - RNA, 19 nt, Homo sapiens
  misc_RNA (1)...(19): siRNA sense strand
gaggugaugcuggagaauu

SEQ ID NO: 1519235 - RNA, 19 nt, Homo sapiens
  misc_RNA (1)...(19): siRNA sense strand
aaccagaucugauauucca

SEQ ID NO: 1519236 - RNA, 19 nt, Homo sapiens
  misc_RNA (1)...(19): siRNA sense strand
ugacaguccaggaucauga

SEQ ID NO: 1519237 - RNA, 19 nt, Homo sapiens
  misc_RNA (1)...(19): siRNA sense strand
agucacagcuacaugauac

SEQ ID NO: 1519238 - RNA, 19 nt, Homo sapiens
  misc_RNA (1)...(19): siRNA sense strand
gaagucacagcuacaugau

SEQ ID NO: 1519239 - RNA, 19 nt, Homo sapiens
  misc_RNA (1)...(19): siRNA sense strand
ucacucugguucagcauca

SEQ ID NO: 1519240 - RNA, 19 nt, Homo sapiens
  misc_RNA (1)...(19): siRNA sense strand
gagauagccaggaaauugg

SEQ ID NO: 1519241 - RNA, 19 nt, Homo sapiens
  misc_RNA (1)...(19): siRNA sense strand
aagaaacucaucaauggaa

SEQ ID NO: 1519242 - RNA, 19 nt, Homo sapiens
  misc_RNA (1)...(19): siRNA sense strand
agagaguucacacuaauga

SEQ ID NO: 1519243 - RNA, 19 nt, Homo sapiens
  misc_RNA (1)...(19): siRNA sense strand
ccagcacccugacuucaag

SEQ ID NO: 1519244 - RNA, 19 nt, Homo sapiens
  misc_RNA (1)...(19): siRNA sense strand
ccaggaaugugggaagaca

SEQ ID NO: 1519245 - RNA, 19 nt, Homo sapiens
  misc_RNA (1)...(19): siRNA sense strand
gcccuacacaugcaaagaa

SEQ ID NO: 1519246 - RNA, 19 nt, Homo sapiens
  misc_RNA (1)...(19): siRNA sense strand
gaaucuuccaccacugaaa

SEQ ID NO: 1519247 - RNA, 19 nt, Homo sapiens
  misc_RNA (1)...(19): siRNA sense strand
ugggaaagccuucaguugu

SEQ ID NO: 1519248 - RNA, 19 nt, Homo sapiens
  misc_RNA (1)...(19): siRNA sense strand
guggacagaggcccuauga

SEQ ID NO: 1519249 - RNA, 19 nt, Homo sapiens
  misc_RNA (1)...(19): siRNA sense strand
gcaggaugcucaugaauuu

SEQ ID NO: 1519250 - RNA, 19 nt, Homo sapiens
  misc_RNA (1)...(19): siRNA sense strand
ggaaacacaugcuacugua

SEQ ID NO: 1519251 - RNA, 19 nt, Homo sapiens
  misc_RNA (1)...(19): siRNA sense strand
ccaaagaaguucauuucaa

SEQ ID NO: 1519252 - RNA, 19 nt, Homo sapiens
  misc_RNA (1)...(19): siRNA sense strand
gggagaauguguuggcaua

SEQ ID NO: 1519253 - RNA, 19 nt, Homo sapiens
  misc_RNA (1)...(19): siRNA sense strand
caaagaaguucauuucaag

SEQ ID NO: 1519254 - RNA, 19 nt, Homo sapiens
  misc_RNA (1)...(19): siRNA sense strand
gagcagaauacauccauua

SEQ ID NO: 1519255 - RNA, 19 nt, Homo sapiens
  misc_RNA (1)...(19): siRNA sense strand
gaagaagguuggcgucauc

SEQ ID NO: 1519256 - RNA, 19 nt, Homo sapiens
  misc_RNA (1)...(19): siRNA sense strand
uggagcagcugcacagaua

SEQ ID NO: 1519257 - RNA, 19 nt, Homo sapiens
  misc_RNA (1)...(19): siRNA sense strand
gaaaauagaugcucaagcu

SEQ ID NO: 1519258 - RNA, 19 nt, Homo sapiens
  misc_RNA (1)...(19): siRNA sense strand
gaaacucgaugcuugaacu

SEQ ID NO: 1519259 - RNA, 19 nt, Homo sapiens
  misc_RNA (1)...(19): siRNA sense strand
ccagagcaguuuccaauca

SEQ ID NO: 1519260 - RNA, 19 nt, Homo sapiens
  misc_RNA (1)...(19): siRNA sense strand
agggaacgcuuaccaauga

SEQ ID NO: 1519261 - RNA, 19 nt, Homo sapiens
  misc_RNA (1)...(19): siRNA sense strand
gaaccuggaccgcauguau

SEQ ID NO: 1519262 - RNA, 19 nt, Homo sapiens
  misc_RNA (1)...(19): siRNA sense strand
gaacgaaccugcggaaaau

SEQ ID NO: 1519263 - RNA, 19 nt, Homo sapiens
  misc_RNA (1)...(19): siRNA sense strand
ggcauuauaucacuauugu

SEQ ID NO: 1519264 - RNA, 19 nt, Homo sapiens
  misc_RNA (1)...(19): siRNA sense strand
aaacaucgccuccaucugu

SEQ ID NO: 1519265 - RNA, 19 nt, Homo sapiens
  misc_RNA (1)...(19): siRNA sense strand
caaacaagaagcccagaaa

SEQ ID NO: 1519266 - RNA, 19 nt, Homo sapiens
  misc_RNA (1)...(19): siRNA sense strand
gaaacacaugcuacuguaa

SEQ ID NO: 1519267 - RNA, 19 nt, Homo sapiens
  misc_RNA (1)...(19): siRNA sense strand
ugaacacuauuucggauug

SEQ ID NO: 1519268 - RNA, 19 nt, Homo sapiens
  misc_RNA (1)...(19): siRNA sense strand
cuaagagacuucagcaaca

SEQ ID NO: 1519269 - RNA, 19 nt, Homo sapiens
  misc_RNA (1)...(19): siRNA sense strand
cuaaagcgguucaaguaca

SEQ ID NO: 1519270 - RNA, 19 nt, Homo sapiens
  misc_RNA (1)...(19): siRNA sense strand
gauacaccaagcugucuua

SEQ ID NO: 1519271 - RNA, 19 nt, Homo sapiens
  misc_RNA (1)...(19): siRNA sense strand
gagaauguguuggcauaca

SEQ ID NO: 1519272 - RNA, 19 nt, Homo sapiens
  misc_RNA (1)...(19): siRNA sense strand
gaacuccggcucuucaaca

SEQ ID NO: 1519273 - RNA, 19 nt, Homo sapiens
  misc_RNA (1)...(19): siRNA sense strand
agucacggcuucuggcuuu

SEQ ID NO: 1519274 - RNA, 19 nt, Homo sapiens
  misc_RNA (1)...(19): siRNA sense strand
guagcaaagaugaagauuu

SEQ ID NO: 1519275 - RNA, 19 nt, Homo sapiens
  misc_RNA (1)...(19): siRNA sense strand
ccgcauguaugacuugguu

SEQ ID NO: 1519276 - RNA, 19 nt, Homo sapiens
  misc_RNA (1)...(19): siRNA sense strand
gaucuuggcccugcaccua

SEQ ID NO: 1519277 - RNA, 19 nt, Homo sapiens
  misc_RNA (1)...(19): siRNA sense strand
ggagcagaauacauccauu

SEQ ID NO: 1519278 - RNA, 19 nt, Homo sapiens
  misc_RNA (1)...(19): siRNA sense strand
caaugccucugcucuggaa

SEQ ID NO: 1519279 - RNA, 19 nt, Homo sapiens
  misc_RNA (1)...(19): siRNA sense strand
gcaaacaagaagcccagaa

SEQ ID NO: 1519280 - RNA, 19 nt, Homo sapiens
  misc_RNA (1)...(19): siRNA sense strand
uaaagcgguucaaguacau

SEQ ID NO: 1519281 - RNA, 19 nt, Homo sapiens
  misc_RNA (1)...(19): siRNA sense strand
cagagcaguuuccaaucaa

SEQ ID NO: 1519282 - RNA, 19 nt, Homo sapiens
  misc_RNA (1)...(19): siRNA sense strand
uccaaucaaugaacacuau

SEQ ID NO: 1519283 - RNA, 19 nt, Homo sapiens
  misc_RNA (1)...(19): siRNA sense strand
caccaaagaaguucauuuc

SEQ ID NO: 1519284 - RNA, 19 nt, Homo sapiens
  misc_RNA (1)...(19): siRNA sense strand
guuugaugaugacauugua

SEQ ID NO: 1519285 - RNA, 19 nt, Homo sapiens
  misc_RNA (1)...(19): siRNA sense strand
guacuucugccguccauuc

SEQ ID NO: 1519286 - RNA, 19 nt, Homo sapiens
  misc_RNA (1)...(19): siRNA sense strand
ugaugacauuguagagaaa

SEQ ID NO: 1519287 - RNA, 19 nt, Homo sapiens
  misc_RNA (1)...(19): siRNA sense strand
agaauguguuggcauacaa

SEQ ID NO: 1519288 - RNA, 19 nt, Homo sapiens
  misc_RNA (1)...(19): siRNA sense strand
ugacgucagauauaucaaa

SEQ ID NO: 1519289 - RNA, 19 nt, Homo sapiens
  misc_RNA (1)...(19): siRNA sense strand
gaugaugacauuguagaga

SEQ ID NO: 1519290 - RNA, 19 nt, Homo sapiens
  misc_RNA (1)...(19): siRNA sense strand
gaggagaagaaacaggaaa

SEQ ID NO: 1519291 - RNA, 19 nt, Homo sapiens
  misc_RNA (1)...(19): siRNA sense strand
ccaccaaagaaguucauuu

SEQ ID NO: 1519292 - RNA, 19 nt, Homo sapiens
  misc_RNA (1)...(19): siRNA sense strand
uaaacacuauugcggacau

SEQ ID NO: 1519293 - RNA, 19 nt, Homo sapiens
  misc_RNA (1)...(19): siRNA sense strand
gugaaacuguuaguagcaa

SEQ ID NO: 1519294 - RNA, 19 nt, Homo sapiens
  misc_RNA (1)...(19): siRNA sense strand
ccacacagaagaagaaggu

SEQ ID NO: 1519295 - RNA, 19 nt, Homo sapiens
  misc_RNA (1)...(19): siRNA sense strand
ugaaacuguuaguagcaaa

SEQ ID NO: 1519296 - RNA, 19 nt, Homo sapiens
  misc_RNA (1)...(19): siRNA sense strand
ucaccuggguccaugagau

SEQ ID NO: 1519297 - RNA, 19 nt, Homo sapiens
  misc_RNA (1)...(19): siRNA sense strand
gaacacuauuucggauugg

SEQ ID NO: 1519298 - RNA, 19 nt, Homo sapiens
  misc_RNA (1)...(19): siRNA sense strand
ggaacgcuuaccaaugaaa

SEQ ID NO: 1519299 - RNA, 19 nt, Homo sapiens
  misc_RNA (1)...(19): siRNA sense strand
augaugacauuguagagaa

SEQ ID NO: 1519300 - RNA, 19 nt, Homo sapiens
  misc_RNA (1)...(19): siRNA sense strand
ugaccuuucuguugaugug

SEQ ID NO: 1519301 - RNA, 19 nt, Homo sapiens
  misc_RNA (1)...(19): siRNA sense strand
cgaaacaucgccuccaucu

SEQ ID NO: 1519302 - RNA, 19 nt, Homo sapiens
  misc_RNA (1)...(19): siRNA sense strand
gaacugugaaacuguuagu

SEQ ID NO: 1519303 - RNA, 19 nt, Homo sapiens
  misc_RNA (1)...(19): siRNA sense strand
gcauacaaggcccagcaaa

SEQ ID NO: 1519304 - RNA, 19 nt, Homo sapiens
  misc_RNA (1)...(19): siRNA sense strand
guccagagcaguuuccaau

SEQ ID NO: 1519305 - RNA, 19 nt, Homo sapiens
  misc_RNA (1)...(19): siRNA sense strand
gagcaguuuccaaucaaug

SEQ ID NO: 1519306 - RNA, 19 nt, Homo sapiens
  misc_RNA (1)...(19): siRNA sense strand
gggaacgcuuaccaaugaa

SEQ ID NO: 1519307 - RNA, 19 nt, Homo sapiens
  misc_RNA (1)...(19): siRNA sense strand
gcauugccacacagaagaa

SEQ ID NO: 1519308 - RNA, 19 nt, Homo sapiens
  misc_RNA (1)...(19): siRNA sense strand
gggcauuauaucacuauug

SEQ ID NO: 1519309 - RNA, 19 nt, Homo sapiens
  misc_RNA (1)...(19): siRNA sense strand
gaaccugcggaaaauaaua

SEQ ID NO: 1519310 - RNA, 19 nt, Homo sapiens
  misc_RNA (1)...(19): siRNA sense strand
uccauuacccacugucuaa

SEQ ID NO: 1519311 - RNA, 19 nt, Homo sapiens
  misc_RNA (1)...(19): siRNA sense strand
gcaguuuccaaucaaugaa

SEQ ID NO: 1519312 - RNA, 19 nt, Homo sapiens
  misc_RNA (1)...(19): siRNA sense strand
ccaaugaaacucgaugcuu

SEQ ID NO: 1519313 - RNA, 19 nt, Homo sapiens
  misc_RNA (1)...(19): siRNA sense strand
ggaccgcauguaugacuug

SEQ ID NO: 1519314 - RNA, 19 nt, Homo sapiens
  misc_RNA (1)...(19): siRNA sense strand
uucaacaccuccagugaug

SEQ ID NO: 1519315 - RNA, 19 nt, Homo sapiens
  misc_RNA (1)...(19): siRNA sense strand
ggcgucaucccaccaaaga

SEQ ID NO: 1519316 - RNA, 19 nt, Homo sapiens
  misc_RNA (1)...(19): siRNA sense strand
gacgucagauauaucaaaa

SEQ ID NO: 1519317 - RNA, 19 nt, Homo sapiens
  misc_RNA (1)...(19): siRNA sense strand
gagcagcugcacagauaca

SEQ ID NO: 1519318 - RNA, 19 nt, Homo sapiens
  misc_RNA (1)...(19): siRNA sense strand
accuaaagcgguucaagua

SEQ ID NO: 1519319 - RNA, 19 nt, Homo sapiens
  misc_RNA (1)...(19): siRNA sense strand
gaaacuguuaguagcaaag

SEQ ID NO: 1519320 - RNA, 19 nt, Homo sapiens
  misc_RNA (1)...(19): siRNA sense strand
aacaucgccuccaucugua

SEQ ID NO: 1519321 - RNA, 19 nt, Homo sapiens
  misc_RNA (1)...(19): siRNA sense strand
ucucuuugauaacuacaug

SEQ ID NO: 1519322 - RNA, 19 nt, Homo sapiens
  misc_RNA (1)...(19): siRNA sense strand
ggaggagaagaaacaggaa

SEQ ID NO: 1519323 - RNA, 19 nt, Homo sapiens
  misc_RNA (1)...(19): siRNA sense strand
cagggaacgcuuaccaaug

SEQ ID NO: 1519324 - RNA, 19 nt, Homo sapiens
  misc_RNA (1)...(19): siRNA sense strand
caacaccuccagugaugca

SEQ ID NO: 1519325 - RNA, 19 nt, Homo sapiens
  misc_RNA (1)...(19): siRNA sense strand
cagaaaaggaugaggguaa

SEQ ID NO: 1519326 - RNA, 19 nt, Homo sapiens
  misc_RNA (1)...(19): siRNA sense strand
cuugaacugugaaacuguu

SEQ ID NO: 1519327 - RNA, 19 nt, Homo sapiens
  misc_RNA (1)...(19): siRNA sense strand
ucagggaacgcuuaccaau

SEQ ID NO: 1519328 - RNA, 19 nt, Homo sapiens
  misc_RNA (1)...(19): siRNA sense strand
gcuucuggcuuuuguuuga

SEQ ID NO: 1519329 - RNA, 19 nt, Homo sapiens
  misc_RNA (1)...(19): siRNA sense strand
gacuucagcaacacagaaa

SEQ ID NO: 1519330 - RNA, 19 nt, Homo sapiens
  misc_RNA (1)...(19): siRNA sense strand
guugauguggagcagaaua

SEQ ID NO: 1519331 - RNA, 19 nt, Homo sapiens
  misc_RNA (1)...(19): siRNA sense strand
uuucuugaccuuucuguug

SEQ ID NO: 1519332 - RNA, 19 nt, Homo sapiens
  misc_RNA (1)...(19): siRNA sense strand
uguaauaugggcaccaaug

SEQ ID NO: 1519333 - RNA, 19 nt, Homo sapiens
  misc_RNA (1)...(19): siRNA sense strand
agaagaagguuggcgucau

SEQ ID NO: 1519334 - RNA, 19 nt, Homo sapiens
  misc_RNA (1)...(19): siRNA sense strand
aaucgugggcauuauauca

SEQ ID NO: 1519335 - RNA, 19 nt, Homo sapiens
  misc_RNA (1)...(19): siRNA sense strand
gaacgcuuaccaaugaaac

SEQ ID NO: 1519336 - RNA, 19 nt, Homo sapiens
  misc_RNA (1)...(19): siRNA sense strand
uaagagacuucagcaacac

SEQ ID NO: 1519337 - RNA, 19 nt, Homo sapiens
  misc_RNA (1)...(19): siRNA sense strand
aaacacaugcuacuguaac

SEQ ID NO: 1519338 - RNA, 19 nt, Homo sapiens
  misc_RNA (1)...(19): siRNA sense strand
uggaaacacaugcuacugu

SEQ ID NO: 1519339 - RNA, 19 nt, Homo sapiens
  misc_RNA (1)...(19): siRNA sense strand
agaaaaggaugaggguaaa

SEQ ID NO: 1519340 - RNA, 19 nt, Homo sapiens
  misc_RNA (1)...(19): siRNA sense strand
aaugaaacucgaugcuuga

SEQ ID NO: 1519341 - RNA, 19 nt, Homo sapiens
  misc_RNA (1)...(19): siRNA sense strand
gaaacaucgccuccaucug

SEQ ID NO: 1519342 - RNA, 19 nt, Homo sapiens
  misc_RNA (1)...(19): siRNA sense strand
ucuuggcccugcaccuaaa

SEQ ID NO: 1519343 - RNA, 19 nt, Homo sapiens
  misc_RNA (1)...(19): siRNA sense strand
cagcauugccacacagaag

SEQ ID NO: 1519344 - RNA, 19 nt, Homo sapiens
  misc_RNA (1)...(19): siRNA sense strand
guaauaugggcaccaaugc

SEQ ID NO: 1519345 - RNA, 19 nt, Homo sapiens
  misc_RNA (1)...(19): siRNA sense strand
acuccgugcuucaggcauu

SEQ ID NO: 1519346 - RNA, 19 nt, Homo sapiens
  misc_RNA (1)...(19): siRNA sense strand
cuguugauguggagcagaa

SEQ ID NO: 1519347 - RNA, 19 nt, Homo sapiens
  misc_RNA (1)...(19): siRNA sense strand
uucuugaccuuucuguuga

SEQ ID NO: 1519348 - RNA, 19 nt, Homo sapiens
  misc_RNA (1)...(19): siRNA sense strand
caccuggguccaugagauu

SEQ ID NO: 1519349 - RNA, 19 nt, Homo sapiens
  misc_RNA (1)...(19): siRNA sense strand
gaacaacugcuccuuaaua

SEQ ID NO: 1519350 - RNA, 19 nt, Homo sapiens
  misc_RNA (1)...(19): siRNA sense strand
gcuaaaaccuucccaauua

SEQ ID NO: 1519351 - RNA, 19 nt, Homo sapiens
  misc_RNA (1)...(19): siRNA sense strand
uaaacuacguggacgauua

SEQ ID NO: 1519352 - RNA, 19 nt, Homo sapiens
  misc_RNA (1)...(19): siRNA sense strand
ggccauagcuggaauaaug

SEQ ID NO: 1519353 - RNA, 19 nt, Homo sapiens
  misc_RNA (1)...(19): siRNA sense strand
uaaguuggcuggaguagaa

SEQ ID NO: 1519354 - RNA, 19 nt, Homo sapiens
  misc_RNA (1)...(19): siRNA sense strand
gagaaugguuuagaaauug

SEQ ID NO: 1519355 - RNA, 19 nt, Homo sapiens
  misc_RNA (1)...(19): siRNA sense strand
cgacugacaucaaaauuua

SEQ ID NO: 1519356 - RNA, 19 nt, Homo sapiens
  misc_RNA (1)...(19): siRNA sense strand
gggaaggcaugguuacaaa

SEQ ID NO: 1519357 - RNA, 19 nt, Homo sapiens
  misc_RNA (1)...(19): siRNA sense strand
gagaagaggccuuggcaaa

SEQ ID NO: 1519358 - RNA, 19 nt, Homo sapiens
  misc_RNA (1)...(19): siRNA sense strand
ggaaagacaacaugaacaa

SEQ ID NO: 1519359 - RNA, 19 nt, Homo sapiens
  misc_RNA (1)...(19): siRNA sense strand
gcaaaacuguucuuguuaa

SEQ ID NO: 1519360 - RNA, 19 nt, Homo sapiens
  misc_RNA (1)...(19): siRNA sense strand
gcauucgacugacaucaaa

SEQ ID NO: 1519361 - RNA, 19 nt, Homo sapiens
  misc_RNA (1)...(19): siRNA sense strand
aaagauuccuggagagaaa

SEQ ID NO: 1519362 - RNA, 19 nt, Homo sapiens
  misc_RNA (1)...(19): siRNA sense strand
cacagaaacuuacuuaaag

SEQ ID NO: 1519363 - RNA, 19 nt, Homo sapiens
  misc_RNA (1)...(19): siRNA sense strand
cgcauaaacuuucguagaa

SEQ ID NO: 1519364 - RNA, 19 nt, Homo sapiens
  misc_RNA (1)...(19): siRNA sense strand
ggacgauuacgccgaauaa

SEQ ID NO: 1519365 - RNA, 19 nt, Homo sapiens
  misc_RNA (1)...(19): siRNA sense strand
gcgugaaucugaaugaaga

SEQ ID NO: 1519366 - RNA, 19 nt, Homo sapiens
  misc_RNA (1)...(19): siRNA sense strand
gugcuuugcugguuaaguu

SEQ ID NO: 1519367 - RNA, 19 nt, Homo sapiens
  misc_RNA (1)...(19): siRNA sense strand
ggagaauucagcacucuuu

SEQ ID NO: 1519368 - RNA, 19 nt, Homo sapiens
  misc_RNA (1)...(19): siRNA sense strand
uuuacaagcucuucggaua

SEQ ID NO: 1519369 - RNA, 19 nt, Homo sapiens
  misc_RNA (1)...(19): siRNA sense strand
gaauaacugagaaugguuu

SEQ ID NO: 1519370 - RNA, 19 nt, Homo sapiens
  misc_RNA (1)...(19): siRNA sense strand
guucacagaaacuuacuua

SEQ ID NO: 1519371 - RNA, 19 nt, Homo sapiens
  misc_RNA (1)...(19): siRNA sense strand
ggacuuaugaaauauggaa

SEQ ID NO: 1519372 - RNA, 19 nt, Homo sapiens
  misc_RNA (1)...(19): siRNA sense strand
gagaagcauucgacugaca

SEQ ID NO: 1519373 - RNA, 19 nt, Homo sapiens
  misc_RNA (1)...(19): siRNA sense strand
caacugcuccuuaauacug

SEQ ID NO: 1519374 - RNA, 19 nt, Homo sapiens
  misc_RNA (1)...(19): siRNA sense strand
gggcuuaaauaugauucua

SEQ ID NO: 1519375 - RNA, 19 nt, Homo sapiens
  misc_RNA (1)...(19): siRNA sense strand
gaagaaauuuugagaagag

SEQ ID NO: 1519376 - RNA, 19 nt, Homo sapiens
  misc_RNA (1)...(19): siRNA sense strand
gagaaggaauauggaagga

SEQ ID NO: 1519377 - RNA, 19 nt, Homo sapiens
  misc_RNA (1)...(19): siRNA sense strand
gcuggaauaauguuacuuu

SEQ ID NO: 1519378 - RNA, 19 nt, Homo sapiens
  misc_RNA (1)...(19): siRNA sense strand
aaacuguucuuguuaaagg

SEQ ID NO: 1519379 - RNA, 19 nt, Homo sapiens
  misc_RNA (1)...(19): siRNA sense strand
caugaacaacugcuccuua

SEQ ID NO: 1519380 - RNA, 19 nt, Homo sapiens
  misc_RNA (1)...(19): siRNA sense strand
augaacaacugcuccuuaa

SEQ ID NO: 1519381 - RNA, 19 nt, Homo sapiens
  misc_RNA (1)...(19): siRNA sense strand
uacaagcucuucggauauu

SEQ ID NO: 1519382 - RNA, 19 nt, Homo sapiens
  misc_RNA (1)...(19): siRNA sense strand
aaacaacaggaucagauuu

SEQ ID NO: 1519383 - RNA, 19 nt, Homo sapiens
  misc_RNA (1)...(19): siRNA sense strand
uaacugagaaugguuuaga

SEQ ID NO: 1519384 - RNA, 19 nt, Homo sapiens
  misc_RNA (1)...(19): siRNA sense strand
uuacuaugguuccaacuuc

SEQ ID NO: 1519385 - RNA, 19 nt, Homo sapiens
  misc_RNA (1)...(19): siRNA sense strand
ccgaauaacugagaauggu

SEQ ID NO: 1519386 - RNA, 19 nt, Homo sapiens
  misc_RNA (1)...(19): siRNA sense strand
ggaucagauuucagcuuga

SEQ ID NO: 1519387 - RNA, 19 nt, Homo sapiens
  misc_RNA (1)...(19): siRNA sense strand
cguggugcuuugcugguua

SEQ ID NO: 1519388 - RNA, 19 nt, Homo sapiens
  misc_RNA (1)...(19): siRNA sense strand
cagcgugaaucugaaugaa

SEQ ID NO: 1519389 - RNA, 19 nt, Homo sapiens
  misc_RNA (1)...(19): siRNA sense strand
uggcaaaacuguucuuguu

SEQ ID NO: 1519390 - RNA, 19 nt, Homo sapiens
  misc_RNA (1)...(19): siRNA sense strand
cuucggauauuccaguaga

SEQ ID NO: 1519391 - RNA, 19 nt, Homo sapiens
  misc_RNA (1)...(19): siRNA sense strand
caaagauuccuggagagaa

SEQ ID NO: 1519392 - RNA, 19 nt, Homo sapiens
  misc_RNA (1)...(19): siRNA sense strand
uugagaagcauucgacuga

SEQ ID NO: 1519393 - RNA, 19 nt, Homo sapiens
  misc_RNA (1)...(19): siRNA sense strand
gcuccuuaauacugaaguu

SEQ ID NO: 1519394 - RNA, 19 nt, Homo sapiens
  misc_RNA (1)...(19): siRNA sense strand
ggaaggaagacucugaaaa

SEQ ID NO: 1519395 - RNA, 19 nt, Homo sapiens
  misc_RNA (1)...(19): siRNA sense strand
guggugcuuugcugguuaa

SEQ ID NO: 1519396 - RNA, 19 nt, Homo sapiens
  misc_RNA (1)...(19): siRNA sense strand
aagacaacaugaacaacug

SEQ ID NO: 1519397 - RNA, 19 nt, Homo sapiens
  misc_RNA (1)...(19): siRNA sense strand
acaacaggaucagauuuca

SEQ ID NO: 1519398 - RNA, 19 nt, Homo sapiens
  misc_RNA (1)...(19): siRNA sense strand
gaagaggccuuggcaaaac

SEQ ID NO: 1519399 - RNA, 19 nt, Homo sapiens
  misc_RNA (1)...(19): siRNA sense strand
cgauuacgccgaauaacug

SEQ ID NO: 1519400 - RNA, 19 nt, Homo sapiens
  misc_RNA (1)...(19): siRNA sense strand
aaacugggaaggcaugguu

SEQ ID NO: 1519401 - RNA, 19 nt, Homo sapiens
  misc_RNA (1)...(19): siRNA sense strand
aacaacugcuccuuaauac

SEQ ID NO: 1519402 - RNA, 19 nt, Homo sapiens
  misc_RNA (1)...(19): siRNA sense strand
ucgcauaaacuuucguaga

SEQ ID NO: 1519403 - RNA, 19 nt, Homo sapiens
  misc_RNA (1)...(19): siRNA sense strand
ucaaagauuccuggagaga

SEQ ID NO: 1519404 - RNA, 19 nt, Homo sapiens
  misc_RNA (1)...(19): siRNA sense strand
cauagcuggaauaauguua

SEQ ID NO: 1519405 - RNA, 19 nt, Homo sapiens
  misc_RNA (1)...(19): siRNA sense strand
uuacaagcucuucggauau

SEQ ID NO: 1519406 - RNA, 19 nt, Homo sapiens
  misc_RNA (1)...(19): siRNA sense strand
cgaauaacugagaaugguu

SEQ ID NO: 1519407 - RNA, 19 nt, Homo sapiens
  misc_RNA (1)...(19): siRNA sense strand
acagaaacuuacuuaaagc

SEQ ID NO: 1519408 - RNA, 19 nt, Homo sapiens
  misc_RNA (1)...(19): siRNA sense strand
gauuacgccgaauaacuga

SEQ ID NO: 1519409 - RNA, 19 nt, Homo sapiens
  misc_RNA (1)...(19): siRNA sense strand
ggcaaaacuguucuuguua

SEQ ID NO: 1519410 - RNA, 19 nt, Homo sapiens
  misc_RNA (1)...(19): siRNA sense strand
gaaagacaacaugaacaac

SEQ ID NO: 1519411 - RNA, 19 nt, Homo sapiens
  misc_RNA (1)...(19): siRNA sense strand
gaaauauggaaagacaaca

SEQ ID NO: 1519412 - RNA, 19 nt, Homo sapiens
  misc_RNA (1)...(19): siRNA sense strand
aaagacaacaugaacaacu

SEQ ID NO: 1519413 - RNA, 19 nt, Homo sapiens
  misc_RNA (1)...(19): siRNA sense strand
guagaacucgcugaaacug

SEQ ID NO: 1519414 - RNA, 19 nt, Homo sapiens
  misc_RNA (1)...(19): siRNA sense strand
uauggaaggaagacucuga

SEQ ID NO: 1519415 - RNA, 19 nt, Homo sapiens
  misc_RNA (1)...(19): siRNA sense strand
aaaccuucccaauuacuau

SEQ ID NO: 1519416 - RNA, 19 nt, Homo sapiens
  misc_RNA (1)...(19): siRNA sense strand
ugaaauauggaaagacaac

SEQ ID NO: 1519417 - RNA, 19 nt, Homo sapiens
  misc_RNA (1)...(19): siRNA sense strand
uauggaaagacaacaugaa

SEQ ID NO: 1519418 - RNA, 19 nt, Homo sapiens
  misc_RNA (1)...(19): siRNA sense strand
aacugagaaugguuuagaa

SEQ ID NO: 1519419 - RNA, 19 nt, Homo sapiens
  misc_RNA (1)...(19): siRNA sense strand
gaacaagacuucagaaaug

SEQ ID NO: 1519420 - RNA, 19 nt, Homo sapiens
  misc_RNA (1)...(19): siRNA sense strand
gaacaucccuaauggaauu

SEQ ID NO: 1519421 - RNA, 19 nt, Homo sapiens
  misc_RNA (1)...(19): siRNA sense strand
ggaauaaccuuaccaaauc

SEQ ID NO: 1519422 - RNA, 19 nt, Homo sapiens
  misc_RNA (1)...(19): siRNA sense strand
gaaauucagagguugauua

SEQ ID NO: 1519423 - RNA, 19 nt, Homo sapiens
  misc_RNA (1)...(19): siRNA sense strand
cgaaggcaguugagaauuu

SEQ ID NO: 1519424 - RNA, 19 nt, Homo sapiens
  misc_RNA (1)...(19): siRNA sense strand
acacacagcuccucaagaa

SEQ ID NO: 1519425 - RNA, 19 nt, Homo sapiens
  misc_RNA (1)...(19): siRNA sense strand
gagccacuuucuacaauua

SEQ ID NO: 1519426 - RNA, 19 nt, Homo sapiens
  misc_RNA (1)...(19): siRNA sense strand
caacacagcuagucagcaa

SEQ ID NO: 1519427 - RNA, 19 nt, Homo sapiens
  misc_RNA (1)...(19): siRNA sense strand
caaagaacaucccuaaugg

SEQ ID NO: 1519428 - RNA, 19 nt, Homo sapiens
  misc_RNA (1)...(19): siRNA sense strand
acaagaggauucagaaauu

SEQ ID NO: 1519429 - RNA, 19 nt, Homo sapiens
  misc_RNA (1)...(19): siRNA sense strand
agaaacagauaccuaauga

SEQ ID NO: 1519430 - RNA, 19 nt, Homo sapiens
  misc_RNA (1)...(19): siRNA sense strand
ggaauuauuucugcccuuu

SEQ ID NO: 1519431 - RNA, 19 nt, Homo sapiens
  misc_RNA (1)...(19): siRNA sense strand
gugaaaagcucccaguuua

SEQ ID NO: 1519432 - RNA, 19 nt, Homo sapiens
  misc_RNA (1)...(19): siRNA sense strand
ccaaaucacucuugaacau

SEQ ID NO: 1519433 - RNA, 19 nt, Homo sapiens
  misc_RNA (1)...(19): siRNA sense strand
uaaugaagcuucugcuaga

SEQ ID NO: 1519434 - RNA, 19 nt, Homo sapiens
  misc_RNA (1)...(19): siRNA sense strand
gaaaggcaauacugucugu

SEQ ID NO: 1519435 - RNA, 19 nt, Homo sapiens
  misc_RNA (1)...(19): siRNA sense strand
gcucacacuuccauaauga

SEQ ID NO: 1519436 - RNA, 19 nt, Homo sapiens
  misc_RNA (1)...(19): siRNA sense strand
gaaagaagggauuuaaaca

SEQ ID NO: 1519437 - RNA, 19 nt, Homo sapiens
  misc_RNA (1)...(19): siRNA sense strand
gaaauggaggcauguauau

SEQ ID NO: 1519438 - RNA, 19 nt, Homo sapiens
  misc_RNA (1)...(19): siRNA sense strand
ggaggaagcccuagucaau

SEQ ID NO: 1519439 - RNA, 19 nt, Homo sapiens
  misc_RNA (1)...(19): siRNA sense strand
gggaauaaccuuaccaaau

SEQ ID NO: 1519440 - RNA, 19 nt, Homo sapiens
  misc_RNA (1)...(19): siRNA sense strand
gaauaaccuuaccaaauca

SEQ ID NO: 1519441 - RNA, 19 nt, Homo sapiens
  misc_RNA (1)...(19): siRNA sense strand
ggagugaaacuauggcuuu

SEQ ID NO: 1519442 - RNA, 19 nt, Homo sapiens
  misc_RNA (1)...(19): siRNA sense strand
gaacaagaggauucagaaa

SEQ ID NO: 1519443 - RNA, 19 nt, Homo sapiens
  misc_RNA (1)...(19): siRNA sense strand
gagugaaacuauggcuuua

SEQ ID NO: 1519444 - RNA, 19 nt, Homo sapiens
  misc_RNA (1)...(19): siRNA sense strand
gaagagcuguuaaaaguga

SEQ ID NO: 1519445 - RNA, 19 nt, Homo sapiens
  misc_RNA (1)...(19): siRNA sense strand
ucaaagaacaucccuaaug

SEQ ID NO: 1519446 - RNA, 19 nt, Homo sapiens
  misc_RNA (1)...(19): siRNA sense strand
gcuagaagcacuccugaaa

SEQ ID NO: 1519447 - RNA, 19 nt, Homo sapiens
  misc_RNA (1)...(19): siRNA sense strand
gaagggauuuaaacauaca

SEQ ID NO: 1519448 - RNA, 19 nt, Homo sapiens
  misc_RNA (1)...(19): siRNA sense strand
uaucagcuauuccaacauu

SEQ ID NO: 1519449 - RNA, 19 nt, Homo sapiens
  misc_RNA (1)...(19): siRNA sense strand
ggucauugcaagaucauua

SEQ ID NO: 1519450 - RNA, 19 nt, Homo sapiens
  misc_RNA (1)...(19): siRNA sense strand
ggaacaaacugcaugucau

SEQ ID NO: 1519451 - RNA, 19 nt, Homo sapiens
  misc_RNA (1)...(19): siRNA sense strand
ccagaaagaugaaaacaaa

SEQ ID NO: 1519452 - RNA, 19 nt, Homo sapiens
  misc_RNA (1)...(19): siRNA sense strand
ccacaacaaggaauucaua

SEQ ID NO: 1519453 - RNA, 19 nt, Homo sapiens
  misc_RNA (1)...(19): siRNA sense strand
ggaggcauguauaucugua

SEQ ID NO: 1519454 - RNA, 19 nt, Homo sapiens
  misc_RNA (1)...(19): siRNA sense strand
ugaggugacucgacuaaga

SEQ ID NO: 1519455 - RNA, 19 nt, Homo sapiens
  misc_RNA (1)...(19): siRNA sense strand
gauaaacaacuucaacaug

SEQ ID NO: 1519456 - RNA, 19 nt, Homo sapiens
  misc_RNA (1)...(19): siRNA sense strand
uaaggaaacagaccuacua

SEQ ID NO: 1519457 - RNA, 19 nt, Homo sapiens
  misc_RNA (1)...(19): siRNA sense strand
ggaagcaauugguaagauc

SEQ ID NO: 1519458 - RNA, 19 nt, Homo sapiens
  misc_RNA (1)...(19): siRNA sense strand
ggaaacagaccuacuaaaa

SEQ ID NO: 1519459 - RNA, 19 nt, Homo sapiens
  misc_RNA (1)...(19): siRNA sense strand
caacugggccuuguuaaug

SEQ ID NO: 1519460 - RNA, 19 nt, Homo sapiens
  misc_RNA (1)...(19): siRNA sense strand
caacaaaggaagcagaaga

SEQ ID NO: 1519461 - RNA, 19 nt, Homo sapiens
  misc_RNA (1)...(19): siRNA sense strand
aagcuucucuccgaucuua

SEQ ID NO: 1519462 - RNA, 19 nt, Homo sapiens
  misc_RNA (1)...(19): siRNA sense strand
agaugucacugaugaauga

SEQ ID NO: 1519463 - RNA, 19 nt, Homo sapiens
  misc_RNA (1)...(19): siRNA sense strand
cuccaaagguucauucuga

SEQ ID NO: 1519464 - RNA, 19 nt, Homo sapiens
  misc_RNA (1)...(19): siRNA sense strand
uaaaggaagcaauugguaa

SEQ ID NO: 1519465 - RNA, 19 nt, Homo sapiens
  misc_RNA (1)...(19): siRNA sense strand
cuaagagaauuaaccagaa

SEQ ID NO: 1519466 - RNA, 19 nt, Homo sapiens
  misc_RNA (1)...(19): siRNA sense strand
gcauguauaucuguacuuc

SEQ ID NO: 1519467 - RNA, 19 nt, Homo sapiens
  misc_RNA (1)...(19): siRNA sense strand
aaacagaccuacuaaaaug

SEQ ID NO: 1519468 - RNA, 19 nt, Homo sapiens
  misc_RNA (1)...(19): siRNA sense strand
cauaucagcuauuccaaca

SEQ ID NO: 1519469 - RNA, 19 nt, Homo sapiens
  misc_RNA (1)...(19): siRNA sense strand
gugaaacuauggcuuuaau

SEQ ID NO: 1519470 - RNA, 19 nt, Homo sapiens
  misc_RNA (1)...(19): siRNA sense strand
guaaguggaaacacagaua

SEQ ID NO: 1519471 - RNA, 19 nt, Homo sapiens
  misc_RNA (1)...(19): siRNA sense strand
acaaggaauucauaaggaa

SEQ ID NO: 1519472 - RNA, 19 nt, Homo sapiens
  misc_RNA (1)...(19): siRNA sense strand
caagaggauucagaaauuc

SEQ ID NO: 1519473 - RNA, 19 nt, Homo sapiens
  misc_RNA (1)...(19): siRNA sense strand
ccagagagcaaauuagaga

SEQ ID NO: 1519474 - RNA, 19 nt, Homo sapiens
  misc_RNA (1)...(19): siRNA sense strand
gaauuaaccagaacuuuac

SEQ ID NO: 1519475 - RNA, 19 nt, Homo sapiens
  misc_RNA (1)...(19): siRNA sense strand
uaauggaauuccugcugua

SEQ ID NO: 1519476 - RNA, 19 nt, Homo sapiens
  misc_RNA (1)...(19): siRNA sense strand
ggauugcaaccuugaauug

SEQ ID NO: 1519477 - RNA, 19 nt, Homo sapiens
  misc_RNA (1)...(19): siRNA sense strand
gcccaaaacugacauauca

SEQ ID NO: 1519478 - RNA, 19 nt, Homo sapiens
  misc_RNA (1)...(19): siRNA sense strand
caacaaggaauucauaagg

SEQ ID NO: 1519479 - RNA, 19 nt, Homo sapiens
  misc_RNA (1)...(19): siRNA sense strand
aaacagauaccuaaugaag

SEQ ID NO: 1519480 - RNA, 19 nt, Homo sapiens
  misc_RNA (1)...(19): siRNA sense strand
gcugcaagccugggaauaa

SEQ ID NO: 1519481 - RNA, 19 nt, Homo sapiens
  misc_RNA (1)...(19): siRNA sense strand
agaaauggaggcauguaua

SEQ ID NO: 1519482 - RNA, 19 nt, Homo sapiens
  misc_RNA (1)...(19): siRNA sense strand
cagcaacugggccuuguua

SEQ ID NO: 1519483 - RNA, 19 nt, Homo sapiens
  misc_RNA (1)...(19): siRNA sense strand
caaauaagagcagcuacaa

SEQ ID NO: 1519484 - RNA, 19 nt, Homo sapiens
  misc_RNA (1)...(19): siRNA sense strand
uugaauaugucacugcaaa

SEQ ID NO: 1519485 - RNA, 19 nt, Homo sapiens
  misc_RNA (1)...(19): siRNA sense strand
gcaacugggccuuguuaau

SEQ ID NO: 1519486 - RNA, 19 nt, Homo sapiens
  misc_RNA (1)...(19): siRNA sense strand
gaagaugagcauaauuugg

SEQ ID NO: 1519487 - RNA, 19 nt, Homo sapiens
  misc_RNA (1)...(19): siRNA sense strand
cagagccacuuucuacaau

SEQ ID NO: 1519488 - RNA, 19 nt, Homo sapiens
  misc_RNA (1)...(19): siRNA sense strand
gagaauuaaccagaacuuu

SEQ ID NO: 1519489 - RNA, 19 nt, Homo sapiens
  misc_RNA (1)...(19): siRNA sense strand
gcucccaguuuaaguuaga

SEQ ID NO: 1519490 - RNA, 19 nt, Homo sapiens
  misc_RNA (1)...(19): siRNA sense strand
gagguugauuacagaaaug

SEQ ID NO: 1519491 - RNA, 19 nt, Homo sapiens
  misc_RNA (1)...(19): siRNA sense strand
uuagagaggccacaaguga

SEQ ID NO: 1519492 - RNA, 19 nt, Homo sapiens
  misc_RNA (1)...(19): siRNA sense strand
guucuacggaauucauuua

SEQ ID NO: 1519493 - RNA, 19 nt, Homo sapiens
  misc_RNA (1)...(19): siRNA sense strand
caucagaccuagagcaaaa

SEQ ID NO: 1519494 - RNA, 19 nt, Homo sapiens
  misc_RNA (1)...(19): siRNA sense strand
gagcaucugauaugaagga

SEQ ID NO: 1519495 - RNA, 19 nt, Homo sapiens
  misc_RNA (1)...(19): siRNA sense strand
ugaagggagugaaacuaug

SEQ ID NO: 1519496 - RNA, 19 nt, Homo sapiens
  misc_RNA (1)...(19): siRNA sense strand
gaaggcaguugagaauuuu

SEQ ID NO: 1519497 - RNA, 19 nt, Homo sapiens
  misc_RNA (1)...(19): siRNA sense strand
gaauucauaaggaaacaga

SEQ ID NO: 1519498 - RNA, 19 nt, Homo sapiens
  misc_RNA (1)...(19): siRNA sense strand
ccaaggagccagaggaaca

SEQ ID NO: 1519499 - RNA, 19 nt, Homo sapiens
  misc_RNA (1)...(19): siRNA sense strand
acacuuccauaaugagcua

SEQ ID NO: 1519500 - RNA, 19 nt, Homo sapiens
  misc_RNA (1)...(19): siRNA sense strand
aaaucacucuugaacauuc

SEQ ID NO: 1519501 - RNA, 19 nt, Homo sapiens
  misc_RNA (1)...(19): siRNA sense strand
caguuugcaucacaaggua

SEQ ID NO: 1519502 - RNA, 19 nt, Homo sapiens
  misc_RNA (1)...(19): siRNA sense strand
gcagaagaugcaccugaaa

SEQ ID NO: 1519503 - RNA, 19 nt, Homo sapiens
  misc_RNA (1)...(19): siRNA sense strand
gaaccagcaacucagagaa

SEQ ID NO: 1519504 - RNA, 19 nt, Homo sapiens
  misc_RNA (1)...(19): siRNA sense strand
gaaacagaccuacuaaaau

SEQ ID NO: 1519505 - RNA, 19 nt, Homo sapiens
  misc_RNA (1)...(19): siRNA sense strand
ggaauucugccacaacaag

SEQ ID NO: 1519506 - RNA, 19 nt, Homo sapiens
  misc_RNA (1)...(19): siRNA sense strand
aacaaggaauucauaagga

SEQ ID NO: 1519507 - RNA, 19 nt, Homo sapiens
  misc_RNA (1)...(19): siRNA sense strand
aauaagagcagcuacaaca

SEQ ID NO: 1519508 - RNA, 19 nt, Homo sapiens
  misc_RNA (1)...(19): siRNA sense strand
gaagggagugaaacuaugg

SEQ ID NO: 1519509 - RNA, 19 nt, Homo sapiens
  misc_RNA (1)...(19): siRNA sense strand
gaugaagggagugaaacua

SEQ ID NO: 1519510 - RNA, 19 nt, Homo sapiens
  misc_RNA (1)...(19): siRNA sense strand
gacaaaaccuaugaaaaug

SEQ ID NO: 1519511 - RNA, 19 nt, Homo sapiens
  misc_RNA (1)...(19): siRNA sense strand
caaagcuucucuccgaucu

SEQ ID NO: 1519512 - RNA, 19 nt, Homo sapiens
  misc_RNA (1)...(19): siRNA sense strand
gaaacagauaccuaaugaa

SEQ ID NO: 1519513 - RNA, 19 nt, Homo sapiens
  misc_RNA (1)...(19): siRNA sense strand
uugcaaccuugaauuguuu

SEQ ID NO: 1519514 - RNA, 19 nt, Homo sapiens
  misc_RNA (1)...(19): siRNA sense strand
auucagaaauucagagguu

SEQ ID NO: 1519515 - RNA, 19 nt, Homo sapiens
  misc_RNA (1)...(19): siRNA sense strand
acagauaccuaaugaagcu

SEQ ID NO: 1519516 - RNA, 19 nt, Homo sapiens
  misc_RNA (1)...(19): siRNA sense strand
gcaucugcaccuggaauua

SEQ ID NO: 1519517 - RNA, 19 nt, Homo sapiens
  misc_RNA (1)...(19): siRNA sense strand
ccuguaaucuguuccucuu

SEQ ID NO: 1519518 - RNA, 19 nt, Homo sapiens
  misc_RNA (1)...(19): siRNA sense strand
gaagugaaagagacacauc

SEQ ID NO: 1519519 - RNA, 19 nt, Homo sapiens
  misc_RNA (1)...(19): siRNA sense strand
guacacgacuuaacaaaua

SEQ ID NO: 1519520 - RNA, 19 nt, Homo sapiens
  misc_RNA (1)...(19): siRNA sense strand
gagaagaccugcuacauag

SEQ ID NO: 1519521 - RNA, 19 nt, Homo sapiens
  misc_RNA (1)...(19): siRNA sense strand
caagaacaguuugcugaua

SEQ ID NO: 1519522 - RNA, 19 nt, Homo sapiens
  misc_RNA (1)...(19): siRNA sense strand
guacuuagcugcagguucu

SEQ ID NO: 1519523 - RNA, 19 nt, Homo sapiens
  misc_RNA (1)...(19): siRNA sense strand
uuaaagagccuucauuaug

SEQ ID NO: 1519524 - RNA, 19 nt, Homo sapiens
  misc_RNA (1)...(19): siRNA sense strand
aagaacaguuugcugauaa

SEQ ID NO: 1519525 - RNA, 19 nt, Homo sapiens
  misc_RNA (1)...(19): siRNA sense strand
cauuaaagagccuucauua

SEQ ID NO: 1519526 - RNA, 19 nt, Homo sapiens
  misc_RNA (1)...(19): siRNA sense strand
gaagaccugcuacauagaa

SEQ ID NO: 1519527 - RNA, 19 nt, Homo sapiens
  misc_RNA (1)...(19): siRNA sense strand
caagagcaguauucuacaa

SEQ ID NO: 1519528 - RNA, 19 nt, Homo sapiens
  misc_RNA (1)...(19): siRNA sense strand
gaccugcuacauagaauua

SEQ ID NO: 1519529 - RNA, 19 nt, Homo sapiens
  misc_RNA (1)...(19): siRNA sense strand
aauaagaaguccucccaaa

SEQ ID NO: 1519530 - RNA, 19 nt, Homo sapiens
  misc_RNA (1)...(19): siRNA sense strand
gcacaagagcaguauucua

SEQ ID NO: 1519531 - RNA, 19 nt, Homo sapiens
  misc_RNA (1)...(19): siRNA sense strand
gcacaaauccacgguacuu

SEQ ID NO: 1519532 - RNA, 19 nt, Homo sapiens
  misc_RNA (1)...(19): siRNA sense strand
agagaagaccugcuacaua

SEQ ID NO: 1519533 - RNA, 19 nt, Homo sapiens
  misc_RNA (1)...(19): siRNA sense strand
aaacaaagcgccaugaagu

SEQ ID NO: 1519534 - RNA, 19 nt, Homo sapiens
  misc_RNA (1)...(19): siRNA sense strand
agacucagguguugggaaa

SEQ ID NO: 1519535 - RNA, 19 nt, Homo sapiens
  misc_RNA (1)...(19): siRNA sense strand
ggaccagauucaugaaaca

SEQ ID NO: 1519536 - RNA, 19 nt, Homo sapiens
  misc_RNA (1)...(19): siRNA sense strand
cagaguucaugauuacaaa

SEQ ID NO: 1519537 - RNA, 19 nt, Homo sapiens
  misc_RNA (1)...(19): siRNA sense strand
gaaacaaagcgccaugaag

SEQ ID NO: 1519538 - RNA, 19 nt, Homo sapiens
  misc_RNA (1)...(19): siRNA sense strand
cagaagagaagaccugcua

SEQ ID NO: 1519539 - RNA, 19 nt, Homo sapiens
  misc_RNA (1)...(19): siRNA sense strand
uugauaaggucauagagaa

SEQ ID NO: 1519540 - RNA, 19 nt, Homo sapiens
  misc_RNA (1)...(19): siRNA sense strand
gaugucagaguucaugauu

SEQ ID NO: 1519541 - RNA, 19 nt, Homo sapiens
  misc_RNA (1)...(19): siRNA sense strand
ggugccaacuggagucuug

SEQ ID NO: 1519542 - RNA, 19 nt, Homo sapiens
  misc_RNA (1)...(19): siRNA sense strand
gaagagaagaccugcuaca

SEQ ID NO: 1519543 - RNA, 19 nt, Homo sapiens
  misc_RNA (1)...(19): siRNA sense strand
gauaaggucauagagaaga

SEQ ID NO: 1519544 - RNA, 19 nt, Homo sapiens
  misc_RNA (1)...(19): siRNA sense strand
ugucagaguucaugauuac

SEQ ID NO: 1519545 - RNA, 19 nt, Homo sapiens
  misc_RNA (1)...(19): siRNA sense strand
acaaagcgccaugaaguuu

SEQ ID NO: 1519546 - RNA, 19 nt, Homo sapiens
  misc_RNA (1)...(19): siRNA sense strand
gaaaagcacaagagcagua

SEQ ID NO: 1519547 - RNA, 19 nt, Homo sapiens
  misc_RNA (1)...(19): siRNA sense strand
acaguuugcugauaaccaa

SEQ ID NO: 1519548 - RNA, 19 nt, Homo sapiens
  misc_RNA (1)...(19): siRNA sense strand
cuccguaaaugguauuauu

SEQ ID NO: 1519549 - RNA, 19 nt, Homo sapiens
  misc_RNA (1)...(19): siRNA sense strand
ccagauucaugaaacaaag

SEQ ID NO: 1519550 - RNA, 19 nt, Homo sapiens
  misc_RNA (1)...(19): siRNA sense strand
cacaagagcaguauucuac

SEQ ID NO: 1519551 - RNA, 19 nt, Homo sapiens
  misc_RNA (1)...(19): siRNA sense strand
uaagagaagguaaucagau

SEQ ID NO: 1519552 - RNA, 19 nt, Homo sapiens
  misc_RNA (1)...(19): siRNA sense strand
gguaauagggacuaaacug

SEQ ID NO: 1519553 - RNA, 19 nt, Homo sapiens
  misc_RNA (1)...(19): siRNA sense strand
ggauuaugaucaagaacag

SEQ ID NO: 1519554 - RNA, 19 nt, Homo sapiens
  misc_RNA (1)...(19): siRNA sense strand
gagcaguauucuacaacuc

SEQ ID NO: 1519555 - RNA, 19 nt, Homo sapiens
  misc_RNA (1)...(19): siRNA sense strand
guugggaaaucuucguuag

SEQ ID NO: 1519556 - RNA, 19 nt, Homo sapiens
  misc_RNA (1)...(19): siRNA sense strand
ugggaaaucuucguuaguc

SEQ ID NO: 1519557 - RNA, 19 nt, Homo sapiens
  misc_RNA (1)...(19): siRNA sense strand
gggugaagguacugguguu

SEQ ID NO: 1519558 - RNA, 19 nt, Homo sapiens
  misc_RNA (1)...(19): siRNA sense strand
gauaaccaaauaccacugu

SEQ ID NO: 1519559 - RNA, 19 nt, Homo sapiens
  misc_RNA (1)...(19): siRNA sense strand
gaagcucucaacagggauu

SEQ ID NO: 1519560 - RNA, 19 nt, Homo sapiens
  misc_RNA (1)...(19): siRNA sense strand
gggauuaugaucaagaaca

SEQ ID NO: 1519561 - RNA, 19 nt, Homo sapiens
  misc_RNA (1)...(19): siRNA sense strand
guccaucuccuaugccaaa

SEQ ID NO: 1519562 - RNA, 19 nt, Homo sapiens
  misc_RNA (1)...(19): siRNA sense strand
ugaaacaaagcgccaugaa

SEQ ID NO: 1519563 - RNA, 19 nt, Homo sapiens
  misc_RNA (1)...(19): siRNA sense strand
uaaccaaauaccacuguug

SEQ ID NO: 1519564 - RNA, 19 nt, Homo sapiens
  misc_RNA (1)...(19): siRNA sense strand
guuaguccaucuccuaugc

SEQ ID NO: 1519565 - RNA, 19 nt, Homo sapiens
  misc_RNA (1)...(19): siRNA sense strand
gcugcagguucuuccaaug

SEQ ID NO: 1519566 - RNA, 19 nt, Homo sapiens
  misc_RNA (1)...(19): siRNA sense strand
aaagcgccaugaaguuuua

SEQ ID NO: 1519567 - RNA, 19 nt, Homo sapiens
  misc_RNA (1)...(19): siRNA sense strand
gaguucaugauuacaaaga

SEQ ID NO: 1519568 - RNA, 19 nt, Homo sapiens
  misc_RNA (1)...(19): siRNA sense strand
gaacauuaaagagccuuca

SEQ ID NO: 1519569 - RNA, 19 nt, Homo sapiens
  misc_RNA (1)...(19): siRNA sense strand
cauagagaagagauacuuu

SEQ ID NO: 1519570 - RNA, 19 nt, Homo sapiens
  misc_RNA (1)...(19): siRNA sense strand
cuacaacuccguaaauggu

SEQ ID NO: 1519571 - RNA, 19 nt, Homo sapiens
  misc_RNA (1)...(19): siRNA sense strand
guucaugauuacaaagaag

SEQ ID NO: 1519572 - RNA, 19 nt, Homo sapiens
  misc_RNA (1)...(19): siRNA sense strand
gaaaucuucguuaguccau

SEQ ID NO: 1519573 - RNA, 19 nt, Homo sapiens
  misc_RNA (1)...(19): siRNA sense strand
ugacaaauggggauuauga

SEQ ID NO: 1519574 - RNA, 19 nt, Homo sapiens
  misc_RNA (1)...(19): siRNA sense strand
ucagaguucaugauuacaa

SEQ ID NO: 1519575 - RNA, 19 nt, Homo sapiens
  misc_RNA (1)...(19): siRNA sense strand
aaaaucaagugcugggaaa

SEQ ID NO: 1519576 - RNA, 19 nt, Homo sapiens
  misc_RNA (1)...(19): siRNA sense strand
cacaaauccacgguacuua

SEQ ID NO: 1519577 - RNA, 19 nt, Homo sapiens
  misc_RNA (1)...(19): siRNA sense strand
gaaggaaccccagaagaga

SEQ ID NO: 1519578 - RNA, 19 nt, Homo sapiens
  misc_RNA (1)...(19): siRNA sense strand
gagucuuggugacaaaugg

SEQ ID NO: 1519579 - RNA, 19 nt, Homo sapiens
  misc_RNA (1)...(19): siRNA sense strand
cucaguggaugucagaguu

SEQ ID NO: 1519580 - RNA, 19 nt, Homo sapiens
  misc_RNA (1)...(19): siRNA sense strand
acaacuccguaaaugguau

SEQ ID NO: 1519581 - RNA, 19 nt, Homo sapiens
  misc_RNA (1)...(19): siRNA sense strand
agaauuaugggauguugga

SEQ ID NO: 1519582 - RNA, 19 nt, Homo sapiens
  misc_RNA (1)...(19): siRNA sense strand
acaaauccacgguacuuag

SEQ ID NO: 1519583 - RNA, 19 nt, Homo sapiens
  misc_RNA (1)...(19): siRNA sense strand
guacugguguugggagacu

SEQ ID NO: 1519584 - RNA, 19 nt, Homo sapiens
  misc_RNA (1)...(19): siRNA sense strand
ucauagagaagagauacuu

SEQ ID NO: 1519585 - RNA, 19 nt, Homo sapiens
  misc_RNA (1)...(19): siRNA sense strand
guugggagacucagguguu

SEQ ID NO: 1519586 - RNA, 19 nt, Homo sapiens
  misc_RNA (1)...(19): siRNA sense strand
gaccagauucaugaaacaa

SEQ ID NO: 1519587 - RNA, 19 nt, Homo sapiens
  misc_RNA (1)...(19): siRNA sense strand
auagaauuaugggauguug

SEQ ID NO: 1519588 - RNA, 19 nt, Homo sapiens
  misc_RNA (1)...(19): siRNA sense strand
acauuaaagagccuucauu

SEQ ID NO: 1519589 - RNA, 19 nt, Homo sapiens
  misc_RNA (1)...(19): siRNA sense strand
gggcaggaacauuaaagag

SEQ ID NO: 1519590 - RNA, 19 nt, Homo sapiens
  misc_RNA (1)...(19): siRNA sense strand
ggucauagagaagagauac

SEQ ID NO: 1519591 - RNA, 19 nt, Homo sapiens
  misc_RNA (1)...(19): siRNA sense strand
aagcacaagagcaguauuc

SEQ ID NO: 1519592 - RNA, 19 nt, Homo sapiens
  misc_RNA (1)...(19): siRNA sense strand
caacuccguaaaugguauu

SEQ ID NO: 1519593 - RNA, 19 nt, Homo sapiens
  misc_RNA (1)...(19): siRNA sense strand
uuaagagaagguaaucaga

SEQ ID NO: 1519594 - RNA, 19 nt, Homo sapiens
  misc_RNA (1)...(19): siRNA sense strand
aacaaagcgccaugaaguu

SEQ ID NO: 1519595 - RNA, 19 nt, Homo sapiens
  misc_RNA (1)...(19): siRNA sense strand
ucaagaacaguuugcugau

SEQ ID NO: 1519596 - RNA, 19 nt, Homo sapiens
  misc_RNA (1)...(19): siRNA sense strand
cguacacgacuuaacaaau

SEQ ID NO: 1519597 - RNA, 19 nt, Homo sapiens
  misc_RNA (1)...(19): siRNA sense strand
caaauggggauuaugauca

SEQ ID NO: 1519598 - RNA, 19 nt, Homo sapiens
  misc_RNA (1)...(19): siRNA sense strand
ggagucuuggugacaaaug

SEQ ID NO: 1519599 - RNA, 19 nt, Homo sapiens
  misc_RNA (1)...(19): siRNA sense strand
ucccaaaacuugcgucguu

SEQ ID NO: 1519600 - RNA, 19 nt, Homo sapiens
  misc_RNA (1)...(19): siRNA sense strand
ggacugggcugauauguac

SEQ ID NO: 1519601 - RNA, 19 nt, Homo sapiens
  misc_RNA (1)...(19): siRNA sense strand
gaaggccgcugcuuguuug

SEQ ID NO: 1519602 - RNA, 19 nt, Homo sapiens
  misc_RNA (1)...(19): siRNA sense strand
ggaggaagaauaaaucuga

SEQ ID NO: 1519603 - RNA, 19 nt, Homo sapiens
  misc_RNA (1)...(19): siRNA sense strand
gauaagaaccaaugcagaa

SEQ ID NO: 1519604 - RNA, 19 nt, Homo sapiens
  misc_RNA (1)...(19): siRNA sense strand
gaaacggccuacacacugu

SEQ ID NO: 1519605 - RNA, 19 nt, Homo sapiens
  misc_RNA (1)...(19): siRNA sense strand
caaaggcccucucucaagu

SEQ ID NO: 1519606 - RNA, 19 nt, Homo sapiens
  misc_RNA (1)...(19): siRNA sense strand
ggaaggccgcugcuuguuu

SEQ ID NO: 1519607 - RNA, 19 nt, Homo sapiens
  misc_RNA (1)...(19): siRNA sense strand
gaaggaggaugaauaucgu

SEQ ID NO: 1519608 - RNA, 19 nt, Homo sapiens
  misc_RNA (1)...(19): siRNA sense strand
ccacggagaugcaguuucu

SEQ ID NO: 1519609 - RNA, 19 nt, Homo sapiens
  misc_RNA (1)...(19): siRNA sense strand
cuucaaagcucccaacaca

SEQ ID NO: 1519610 - RNA, 19 nt, Homo sapiens
  misc_RNA (1)...(19): siRNA sense strand
ccaggaaggaggaugaaua

SEQ ID NO: 1519611 - RNA, 19 nt, Homo sapiens
  misc_RNA (1)...(19): siRNA sense strand
gacacuugcuggucaaaga

SEQ ID NO: 1519612 - RNA, 19 nt, Homo sapiens
  misc_RNA (1)...(19): siRNA sense strand
agauagggcucgagcugua

SEQ ID NO: 1519613 - RNA, 19 nt, Homo sapiens
  misc_RNA (1)...(19): siRNA sense strand
gaagaaggcccaggagaca

SEQ ID NO: 1519614 - RNA, 19 nt, Homo sapiens
  misc_RNA (1)...(19): siRNA sense strand
ggaaggaggaugaauaucg

SEQ ID NO: 1519615 - RNA, 19 nt, Homo sapiens
  misc_RNA (1)...(19): siRNA sense strand
ucaaagcucccaacacaga

SEQ ID NO: 1519616 - RNA, 19 nt, Homo sapiens
  misc_RNA (1)...(19): siRNA sense strand
gaaccaaugcagaagauag

SEQ ID NO: 1519617 - RNA, 19 nt, Homo sapiens
  misc_RNA (1)...(19): siRNA sense strand
agaaggagguucgaaagga

SEQ ID NO: 1519618 - RNA, 19 nt, Homo sapiens
  misc_RNA (1)...(19): siRNA sense strand
gauauguacucggucaaug

SEQ ID NO: 1519619 - RNA, 19 nt, Homo sapiens
  misc_RNA (1)...(19): siRNA sense strand
agugugacguggugaauuu

SEQ ID NO: 1519620 - RNA, 19 nt, Homo sapiens
  misc_RNA (1)...(19): siRNA sense strand
gcucaucacuguggucauc

SEQ ID NO: 1519621 - RNA, 19 nt, Homo sapiens
  misc_RNA (1)...(19): siRNA sense strand
ggccaaaggcugugaggaa

SEQ ID NO: 1519622 - RNA, 19 nt, Homo sapiens
  misc_RNA (1)...(19): siRNA sense strand
ccucuucaauccuggguuu

SEQ ID NO: 1519623 - RNA, 19 nt, Homo sapiens
  misc_RNA (1)...(19): siRNA sense strand
gccaaaggcugugaggaau

SEQ ID NO: 1519624 - RNA, 19 nt, Homo sapiens
  misc_RNA (1)...(19): siRNA sense strand
acagugcccuggaacauca

SEQ ID NO: 1519625 - RNA, 19 nt, Homo sapiens
  misc_RNA (1)...(19): siRNA sense strand
gaauaucgucggaacaucu

SEQ ID NO: 1519626 - RNA, 19 nt, Homo sapiens
  misc_RNA (1)...(19): siRNA sense strand
caggaaggaggaugaauau

SEQ ID NO: 1519627 - RNA, 19 nt, Homo sapiens
  misc_RNA (1)...(19): siRNA sense strand
ggucaucgccuucuucacu

SEQ ID NO: 1519628 - RNA, 19 nt, Homo sapiens
  misc_RNA (1)...(19): siRNA sense strand
ccaaaggcccucucucaag

SEQ ID NO: 1519629 - RNA, 19 nt, Homo sapiens
  misc_RNA (1)...(19): siRNA sense strand
acagucggcugcuccuuug

SEQ ID NO: 1519630 - RNA, 19 nt, Homo sapiens
  misc_RNA (1)...(19): siRNA sense strand
gccaugaugcuucccauug

SEQ ID NO: 1519631 - RNA, 19 nt, Homo sapiens
  misc_RNA (1)...(19): siRNA sense strand
gagaaacggccuacacacu

SEQ ID NO: 1519632 - RNA, 19 nt, Homo sapiens
  misc_RNA (1)...(19): siRNA sense strand
uaagaaccaaugcagaaga

SEQ ID NO: 1519633 - RNA, 19 nt, Homo sapiens
  misc_RNA (1)...(19): siRNA sense strand
gagcuguaauucgggaaga

SEQ ID NO: 1519634 - RNA, 19 nt, Homo sapiens
  misc_RNA (1)...(19): siRNA sense strand
uuggccagcucaagaguuu

SEQ ID NO: 1519635 - RNA, 19 nt, Homo sapiens
  misc_RNA (1)...(19): siRNA sense strand
caaaggcugugaggaaucg

SEQ ID NO: 1519636 - RNA, 19 nt, Homo sapiens
  misc_RNA (1)...(19): siRNA sense strand
ggccgcugcuuguuuguca

SEQ ID NO: 1519637 - RNA, 19 nt, Homo sapiens
  misc_RNA (1)...(19): siRNA sense strand
ccacccaccuuggccaaug

SEQ ID NO: 1519638 - RNA, 19 nt, Homo sapiens
  misc_RNA (1)...(19): siRNA sense strand
gccaggagagugaagagaa

SEQ ID NO: 1519639 - RNA, 19 nt, Homo sapiens
  misc_RNA (1)...(19): siRNA sense strand
aagaaccaaugcagaagau

SEQ ID NO: 1519640 - RNA, 19 nt, Homo sapiens
  misc_RNA (1)...(19): siRNA sense strand
gccagaaggagguucgaaa

SEQ ID NO: 1519641 - RNA, 19 nt, Homo sapiens
  misc_RNA (1)...(19): siRNA sense strand
caacacggcgaccaucauc

SEQ ID NO: 1519642 - RNA, 19 nt, Homo sapiens
  misc_RNA (1)...(19): siRNA sense strand
cgacaccaacuuccucuuc

SEQ ID NO: 1519643 - RNA, 19 nt, Homo sapiens
  misc_RNA (1)...(19): siRNA sense strand
ucucucaaguggugguuug

SEQ ID NO: 1519644 - RNA, 19 nt, Homo sapiens
  misc_RNA (1)...(19): siRNA sense strand
gugaccaccucguucuugu

SEQ ID NO: 1519645 - RNA, 19 nt, Homo sapiens
  misc_RNA (1)...(19): siRNA sense strand
augaauaccugggcacaga

SEQ ID NO: 1519646 - RNA, 19 nt, Homo sapiens
  misc_RNA (1)...(19): siRNA sense strand
ccaucaaguuugccgaaca

SEQ ID NO: 1519647 - RNA, 19 nt, Homo sapiens
  misc_RNA (1)...(19): siRNA sense strand
gauagggcucgagcuguaa

SEQ ID NO: 1519648 - RNA, 19 nt, Homo sapiens
  misc_RNA (1)...(19): siRNA sense strand
gcaucuugcccuccaacaa

SEQ ID NO: 1519649 - RNA, 19 nt, Homo sapiens
  misc_RNA (1)...(19): siRNA sense strand
cuucgccucuggacacuug

SEQ ID NO: 1519650 - RNA, 19 nt, Homo sapiens
  misc_RNA (1)...(19): siRNA sense strand
gcuauugucaccaucuugu

SEQ ID NO: 1519651 - RNA, 19 nt, Homo sapiens
  misc_RNA (1)...(19): siRNA sense strand
ucaccggcguggcuauugu

SEQ ID NO: 1519652 - RNA, 19 nt, Homo sapiens
  misc_RNA (1)...(19): siRNA sense strand
ccaggagagugaagagaac

SEQ ID NO: 1519653 - RNA, 19 nt, Homo sapiens
  misc_RNA (1)...(19): siRNA sense strand
caucaaguuugccgaacag

SEQ ID NO: 1519654 - RNA, 19 nt, Homo sapiens
  misc_RNA (1)...(19): siRNA sense strand
gcuggaggaagaauaaauc

SEQ ID NO: 1519655 - RNA, 19 nt, Homo sapiens
  misc_RNA (1)...(19): siRNA sense strand
gcaacacggcgaccaucau

SEQ ID NO: 1519656 - RNA, 19 nt, Homo sapiens
  misc_RNA (1)...(19): siRNA sense strand
cugcucaguuuggcuauga

SEQ ID NO: 1519657 - RNA, 19 nt, Homo sapiens
  misc_RNA (1)...(19): siRNA sense strand
cacagucggcugcuccuuu

SEQ ID NO: 1519658 - RNA, 19 nt, Homo sapiens
  misc_RNA (1)...(19): siRNA sense strand
cggcgaccaucaucaucuu

SEQ ID NO: 1519659 - RNA, 19 nt, Homo sapiens
  misc_RNA (1)...(19): siRNA sense strand
ccaugaugcuucccauugc

SEQ ID NO: 1519660 - RNA, 19 nt, Homo sapiens
  misc_RNA (1)...(19): siRNA sense strand
gggccagccucuucaaucc

SEQ ID NO: 1519661 - RNA, 19 nt, Homo sapiens
  misc_RNA (1)...(19): siRNA sense strand
gaaucgcccucaagauccu

SEQ ID NO: 1519662 - RNA, 19 nt, Homo sapiens
  misc_RNA (1)...(19): siRNA sense strand
ccaccucguucuuguccau

SEQ ID NO: 1519663 - RNA, 19 nt, Homo sapiens
  misc_RNA (1)...(19): siRNA sense strand
caacuuccucuuccucagu

SEQ ID NO: 1519664 - RNA, 19 nt, Homo sapiens
  misc_RNA (1)...(19): siRNA sense strand
ccagaaggagguucgaaag

SEQ ID NO: 1519665 - RNA, 19 nt, Homo sapiens
  misc_RNA (1)...(19): siRNA sense strand
cacccaccuuggccaauga

SEQ ID NO: 1519666 - RNA, 19 nt, Homo sapiens
  misc_RNA (1)...(19): siRNA sense strand
cagcagcggccaagaaggu

SEQ ID NO: 1519667 - RNA, 19 nt, Homo sapiens
  misc_RNA (1)...(19): siRNA sense strand
cggacugggcugauaugua

SEQ ID NO: 1519668 - RNA, 19 nt, Homo sapiens
  misc_RNA (1)...(19): siRNA sense strand
gggcacagaccaucuucca

SEQ ID NO: 1519669 - RNA, 19 nt, Homo sapiens
  misc_RNA (1)...(19): siRNA sense strand
ccaaugccauccugaaaag

SEQ ID NO: 1519670 - RNA, 19 nt, Homo sapiens
  misc_RNA (1)...(19): siRNA sense strand
guguccugcugcucaguuu

SEQ ID NO: 1519671 - RNA, 19 nt, Homo sapiens
  misc_RNA (1)...(19): siRNA sense strand
gggcuucgccauggccaaa

SEQ ID NO: 1519672 - RNA, 19 nt, Homo sapiens
  misc_RNA (1)...(19): siRNA sense strand
ucccaaaggcccucucuca

SEQ ID NO: 1519673 - RNA, 19 nt, Homo sapiens
  misc_RNA (1)...(19): siRNA sense strand
aauccuggguuucuuucug

SEQ ID NO: 1519674 - RNA, 19 nt, Homo sapiens
  misc_RNA (1)...(19): siRNA sense strand
ucaguuuggcuaugaauac

SEQ ID NO: 1519675 - RNA, 19 nt, Homo sapiens
  misc_RNA (1)...(19): siRNA sense strand
ccuggaacaucauccuucu

SEQ ID NO: 1519676 - RNA, 19 nt, Homo sapiens
  misc_RNA (1)...(19): siRNA sense strand
cgccuccacugccaugaug

SEQ ID NO: 1519677 - RNA, 19 nt, Homo sapiens
  misc_RNA (1)...(19): siRNA sense strand
cagcauugccacccaccuu

SEQ ID NO: 1519678 - RNA, 19 nt, Homo sapiens
  misc_RNA (1)...(19): siRNA sense strand
ucaucgccuucuucacuga

SEQ ID NO: 1519679 - RNA, 19 nt, Homo sapiens
  misc_RNA (1)...(19): siRNA sense strand
aggagacagugcccuggaa

SEQ ID NO: 1519680 - RNA, 19 nt, Homo sapiens
  misc_RNA (1)...(19): siRNA sense strand
gaaccugcaccggcgaauc

SEQ ID NO: 1519681 - RNA, 19 nt, Homo sapiens
  misc_RNA (1)...(19): siRNA sense strand
gcagugugacguggugaau

SEQ ID NO: 1519682 - RNA, 19 nt, Homo sapiens
  misc_RNA (1)...(19): siRNA sense strand
caacugaaauugaaggaaa

SEQ ID NO: 1519683 - RNA, 19 nt, Homo sapiens
  misc_RNA (1)...(19): siRNA sense strand
caaccuagauucacaugga

SEQ ID NO: 1519684 - RNA, 19 nt, Homo sapiens
  misc_RNA (1)...(19): siRNA sense strand
ggacuaccauggagcagaa

SEQ ID NO: 1519685 - RNA, 19 nt, Homo sapiens
  misc_RNA (1)...(19): siRNA sense strand
gaagaauucugucauuggu

SEQ ID NO: 1519686 - RNA, 19 nt, Homo sapiens
  misc_RNA (1)...(19): siRNA sense strand
ccaccgagaaguuauauuu

SEQ ID NO: 1519687 - RNA, 19 nt, Homo sapiens
  misc_RNA (1)...(19): siRNA sense strand
ccaaugaaguacgacauaa

SEQ ID NO: 1519688 - RNA, 19 nt, Homo sapiens
  misc_RNA (1)...(19): siRNA sense strand
ggacugaaaugugcaucuu

SEQ ID NO: 1519689 - RNA, 19 nt, Homo sapiens
  misc_RNA (1)...(19): siRNA sense strand
ggacucagcuuuucagaga

SEQ ID NO: 1519690 - RNA, 19 nt, Homo sapiens
  misc_RNA (1)...(19): siRNA sense strand
ggacauccaccuauuucaa

SEQ ID NO: 1519691 - RNA, 19 nt, Homo sapiens
  misc_RNA (1)...(19): siRNA sense strand
cagaggacauccaccuauu

SEQ ID NO: 1519692 - RNA, 19 nt, Homo sapiens
  misc_RNA (1)...(19): siRNA sense strand
gagaauacuuggaaaauca

SEQ ID NO: 1519693 - RNA, 19 nt, Homo sapiens
  misc_RNA (1)...(19): siRNA sense strand
gaaacgccagagccaguua

SEQ ID NO: 1519694 - RNA, 19 nt, Homo sapiens
  misc_RNA (1)...(19): siRNA sense strand
ggacaacgacgagaucaug

SEQ ID NO: 1519695 - RNA, 19 nt, Homo sapiens
  misc_RNA (1)...(19): siRNA sense strand
aaccacaacugaaauugaa

SEQ ID NO: 1519696 - RNA, 19 nt, Homo sapiens
  misc_RNA (1)...(19): siRNA sense strand
ccaagaugcuguucaugca

SEQ ID NO: 1519697 - RNA, 19 nt, Homo sapiens
  misc_RNA (1)...(19): siRNA sense strand
uuaccgaaaccaucuguua

SEQ ID NO: 1519698 - RNA, 19 nt, Homo sapiens
  misc_RNA (1)...(19): siRNA sense strand
caaccacaacugaaauuga

SEQ ID NO: 1519699 - RNA, 19 nt, Homo sapiens
  misc_RNA (1)...(19): siRNA sense strand
gcaggugaaagaagauaaa

SEQ ID NO: 1519700 - RNA, 19 nt, Homo sapiens
  misc_RNA (1)...(19): siRNA sense strand
cgaaaccaucuguuaaauu

SEQ ID NO: 1519701 - RNA, 19 nt, Homo sapiens
  misc_RNA (1)...(19): siRNA sense strand
ugaacaaagugaucuagag

SEQ ID NO: 1519702 - RNA, 19 nt, Homo sapiens
  misc_RNA (1)...(19): siRNA sense strand
ggcaugaugugaagcuuag

SEQ ID NO: 1519703 - RNA, 19 nt, Homo sapiens
  misc_RNA (1)...(19): siRNA sense strand
gaggacauccaccuauuuc

SEQ ID NO: 1519704 - RNA, 19 nt, Homo sapiens
  misc_RNA (1)...(19): siRNA sense strand
caccgagaaguuauauuua

SEQ ID NO: 1519705 - RNA, 19 nt, Homo sapiens
  misc_RNA (1)...(19): siRNA sense strand
guaaucacuguauguggua

SEQ ID NO: 1519706 - RNA, 19 nt, Homo sapiens
  misc_RNA (1)...(19): siRNA sense strand
gaaaucgugagccuucguu

SEQ ID NO: 1519707 - RNA, 19 nt, Homo sapiens
  misc_RNA (1)...(19): siRNA sense strand
cgccagagccaguuacaaa

SEQ ID NO: 1519708 - RNA, 19 nt, Homo sapiens
  misc_RNA (1)...(19): siRNA sense strand
uaaccuacuuggccuacug

SEQ ID NO: 1519709 - RNA, 19 nt, Homo sapiens
  misc_RNA (1)...(19): siRNA sense strand
cagcacuucuggcaugaug

SEQ ID NO: 1519710 - RNA, 19 nt, Homo sapiens
  misc_RNA (1)...(19): siRNA sense strand
ccgaaaccaucuguuaaau

SEQ ID NO: 1519711 - RNA, 19 nt, Homo sapiens
  misc_RNA (1)...(19): siRNA sense strand
aaagcaaccacaacugaaa

SEQ ID NO: 1519712 - RNA, 19 nt, Homo sapiens
  misc_RNA (1)...(19): siRNA sense strand
uacaacacaucagaacaaa

SEQ ID NO: 1519713 - RNA, 19 nt, Homo sapiens
  misc_RNA (1)...(19): siRNA sense strand
ucuuuggacuucuuaauuc

SEQ ID NO: 1519714 - RNA, 19 nt, Homo sapiens
  misc_RNA (1)...(19): siRNA sense strand
ggagggcugccguaaccua

SEQ ID NO: 1519715 - RNA, 19 nt, Homo sapiens
  misc_RNA (1)...(19): siRNA sense strand
cagucaaagugcagaagaa

SEQ ID NO: 1519716 - RNA, 19 nt, Homo sapiens
  misc_RNA (1)...(19): siRNA sense strand
cuagaggccuuuuauaaug

SEQ ID NO: 1519717 - RNA, 19 nt, Homo sapiens
  misc_RNA (1)...(19): siRNA sense strand
uuacaacacaucagaacaa

SEQ ID NO: 1519718 - RNA, 19 nt, Homo sapiens
  misc_RNA (1)...(19): siRNA sense strand
aaaguccaccgagaaguua

SEQ ID NO: 1519719 - RNA, 19 nt, Homo sapiens
  misc_RNA (1)...(19): siRNA sense strand
uuaaguacuuggcaacaca

SEQ ID NO: 1519720 - RNA, 19 nt, Homo sapiens
  misc_RNA (1)...(19): siRNA sense strand
cguuugcugucacuaguaa

SEQ ID NO: 1519721 - RNA, 19 nt, Homo sapiens
  misc_RNA (1)...(19): siRNA sense strand
gcaaaagauuacuggcaaa

SEQ ID NO: 1519722 - RNA, 19 nt, Homo sapiens
  misc_RNA (1)...(19): siRNA sense strand
ccgagaaguuauauuuaag

SEQ ID NO: 1519723 - RNA, 19 nt, Homo sapiens
  misc_RNA (1)...(19): siRNA sense strand
caacacaucagaacaaaau

SEQ ID NO: 1519724 - RNA, 19 nt, Homo sapiens
  misc_RNA (1)...(19): siRNA sense strand
aacagcaggugaaagaaga

SEQ ID NO: 1519725 - RNA, 19 nt, Homo sapiens
  misc_RNA (1)...(19): siRNA sense strand
ccagagccaguuacaaaga

SEQ ID NO: 1519726 - RNA, 19 nt, Homo sapiens
  misc_RNA (1)...(19): siRNA sense strand
gggcugccguaaccuacuu

SEQ ID NO: 1519727 - RNA, 19 nt, Homo sapiens
  misc_RNA (1)...(19): siRNA sense strand
gcaaccacaacugaaauug

SEQ ID NO: 1519728 - RNA, 19 nt, Homo sapiens
  misc_RNA (1)...(19): siRNA sense strand
caacagcaggugaaagaag

SEQ ID NO: 1519729 - RNA, 19 nt, Homo sapiens
  misc_RNA (1)...(19): siRNA sense strand
caaaagcaaccacaacuga

SEQ ID NO: 1519730 - RNA, 19 nt, Homo sapiens
  misc_RNA (1)...(19): siRNA sense strand
uaccgaaaccaucuguuaa

SEQ ID NO: 1519731 - RNA, 19 nt, Homo sapiens
  misc_RNA (1)...(19): siRNA sense strand
gcacuucuggcaugaugug

SEQ ID NO: 1519732 - RNA, 19 nt, Homo sapiens
  misc_RNA (1)...(19): siRNA sense strand
ccuugcuccuggaacauua

SEQ ID NO: 1519733 - RNA, 19 nt, Homo sapiens
  misc_RNA (1)...(19): siRNA sense strand
ggaaacgccagagccaguu

SEQ ID NO: 1519734 - RNA, 19 nt, Homo sapiens
  misc_RNA (1)...(19): siRNA sense strand
caaugaaguacgacauaau

SEQ ID NO: 1519735 - RNA, 19 nt, Homo sapiens
  misc_RNA (1)...(19): siRNA sense strand
gacagaggacauccaccua

SEQ ID NO: 1519736 - RNA, 19 nt, Homo sapiens
  misc_RNA (1)...(19): siRNA sense strand
ggacuucuuaauucucaga

SEQ ID NO: 1519737 - RNA, 19 nt, Homo sapiens
  misc_RNA (1)...(19): siRNA sense strand
ggagaauacuuggaaaauc

SEQ ID NO: 1519738 - RNA, 19 nt, Homo sapiens
  misc_RNA (1)...(19): siRNA sense strand
ugcuguucaugcaauauua

SEQ ID NO: 1519739 - RNA, 19 nt, Homo sapiens
  misc_RNA (1)...(19): siRNA sense strand
ccucaggaccgccaagaug

SEQ ID NO: 1519740 - RNA, 19 nt, Homo sapiens
  misc_RNA (1)...(19): siRNA sense strand
aaugaaguacgacauaaug

SEQ ID NO: 1519741 - RNA, 19 nt, Homo sapiens
  misc_RNA (1)...(19): siRNA sense strand
aagaugcuguucaugcaau

SEQ ID NO: 1519742 - RNA, 19 nt, Homo sapiens
  misc_RNA (1)...(19): siRNA sense strand
uaggaccaccucaagauga

SEQ ID NO: 1519743 - RNA, 19 nt, Homo sapiens
  misc_RNA (1)...(19): siRNA sense strand
agaggacauccaccuauuu

SEQ ID NO: 1519744 - RNA, 19 nt, Homo sapiens
  misc_RNA (1)...(19): siRNA sense strand
ccgccaagaugcuguucau

SEQ ID NO: 1519745 - RNA, 19 nt, Homo sapiens
  misc_RNA (1)...(19): siRNA sense strand
gaucuagaggccuuuuaua

SEQ ID NO: 1519746 - RNA, 19 nt, Homo sapiens
  misc_RNA (1)...(19): siRNA sense strand
gaugugaagcuuagguuuu

SEQ ID NO: 1519747 - RNA, 19 nt, Homo sapiens
  misc_RNA (1)...(19): siRNA sense strand
aggaccaccucaagaugaa

SEQ ID NO: 1519748 - RNA, 19 nt, Homo sapiens
  misc_RNA (1)...(19): siRNA sense strand
agaugcuguucaugcaaua

SEQ ID NO: 1519749 - RNA, 19 nt, Homo sapiens
  misc_RNA (1)...(19): siRNA sense strand
caagaugcuguucaugcaa

SEQ ID NO: 1519750 - RNA, 19 nt, Homo sapiens
  misc_RNA (1)...(19): siRNA sense strand
uuacaaagacagaggacau

SEQ ID NO: 1519751 - RNA, 19 nt, Homo sapiens
  misc_RNA (1)...(19): siRNA sense strand
gacgagaucauggcccuau

SEQ ID NO: 1519752 - RNA, 19 nt, Homo sapiens
  misc_RNA (1)...(19): siRNA sense strand
uguaugugguaccaaugaa

SEQ ID NO: 1519753 - RNA, 19 nt, Homo sapiens
  misc_RNA (1)...(19): siRNA sense strand
uggcaugaugugaagcuua

SEQ ID NO: 1519754 - RNA, 19 nt, Homo sapiens
  misc_RNA (1)...(19): siRNA sense strand
acagaggacauccaccuau

SEQ ID NO: 1519755 - RNA, 19 nt, Homo sapiens
  misc_RNA (1)...(19): siRNA sense strand
ccuggaacauuaccgaaac

SEQ ID NO: 1519756 - RNA, 19 nt, Homo sapiens
  misc_RNA (1)...(19): siRNA sense strand
cagcaggugaaagaagaua

SEQ ID NO: 1519757 - RNA, 19 nt, Homo sapiens
  misc_RNA (1)...(19): siRNA sense strand
acugaaaugugcaucuucu

SEQ ID NO: 1519758 - RNA, 19 nt, Homo sapiens
  misc_RNA (1)...(19): siRNA sense strand
gaccaccucaagaugaaug

SEQ ID NO: 1519759 - RNA, 19 nt, Homo sapiens
  misc_RNA (1)...(19): siRNA sense strand
caauauuagcauacaguca

SEQ ID NO: 1519760 - RNA, 19 nt, Homo sapiens
  misc_RNA (1)...(19): siRNA sense strand
cacuguaugugguaccaau

SEQ ID NO: 1519761 - RNA, 19 nt, Homo sapiens
  misc_RNA (1)...(19): siRNA sense strand
gagccuucguuugcuguca

SEQ ID NO: 1519762 - RNA, 19 nt, Homo sapiens
  misc_RNA (1)...(19): siRNA sense strand
ucuaggaccaccucaagau

SEQ ID NO: 1519763 - RNA, 19 nt, Homo sapiens
  misc_RNA (1)...(19): siRNA sense strand
ggaccgccaagaugcuguu

SEQ ID NO: 1519764 - RNA, 19 nt, Homo sapiens
  misc_RNA (1)...(19): siRNA sense strand
accgaaaccaucuguuaaa

SEQ ID NO: 1519765 - RNA, 19 nt, Homo sapiens
  misc_RNA (1)...(19): siRNA sense strand
uguggagaauacuuggaaa

SEQ ID NO: 1519766 - RNA, 19 nt, Homo sapiens
  misc_RNA (1)...(19): siRNA sense strand
ggaggaaucucucaaagua

SEQ ID NO: 1519767 - RNA, 19 nt, Homo sapiens
  misc_RNA (1)...(19): siRNA sense strand
gaaagacaguaucgcaaua

SEQ ID NO: 1519768 - RNA, 19 nt, Homo sapiens
  misc_RNA (1)...(19): siRNA sense strand
gaucucggcucacugcaaa

SEQ ID NO: 1519769 - RNA, 19 nt, Homo sapiens
  misc_RNA (1)...(19): siRNA sense strand
guacaacacaggagaaaga

SEQ ID NO: 1519770 - RNA, 19 nt, Homo sapiens
  misc_RNA (1)...(19): siRNA sense strand
ggaggaggaaucucucaaa

SEQ ID NO: 1519771 - RNA, 19 nt, Homo sapiens
  misc_RNA (1)...(19): siRNA sense strand
gaggaggaaucucucaaag

SEQ ID NO: 1519772 - RNA, 19 nt, Homo sapiens
  misc_RNA (1)...(19): siRNA sense strand
aggaaucucucaaaguaca

SEQ ID NO: 1519773 - RNA, 19 nt, Homo sapiens
  misc_RNA (1)...(19): siRNA sense strand
agaaagacaguaucgcaau

SEQ ID NO: 1519774 - RNA, 19 nt, Homo sapiens
  misc_RNA (1)...(19): siRNA sense strand
cuaauuugcaauacggaaa

SEQ ID NO: 1519775 - RNA, 19 nt, Homo sapiens
  misc_RNA (1)...(19): siRNA sense strand
ggacuucagggaggguuau

SEQ ID NO: 1519776 - RNA, 19 nt, Homo sapiens
  misc_RNA (1)...(19): siRNA sense strand
cacaggagaaagacaguau

SEQ ID NO: 1519777 - RNA, 19 nt, Homo sapiens
  misc_RNA (1)...(19): siRNA sense strand
aaaguacaacacaggagaa

SEQ ID NO: 1519778 - RNA, 19 nt, Homo sapiens
  misc_RNA (1)...(19): siRNA sense strand
gcacaacaauuuccaugua

SEQ ID NO: 1519779 - RNA, 19 nt, Homo sapiens
  misc_RNA (1)...(19): siRNA sense strand
gcacuuagguucauuguag

SEQ ID NO: 1519780 - RNA, 19 nt, Homo sapiens
  misc_RNA (1)...(19): siRNA sense strand
gcaaguccaucccucauaa

SEQ ID NO: 1519781 - RNA, 19 nt, Homo sapiens
  misc_RNA (1)...(19): siRNA sense strand
ggagagggcugcucacaau

SEQ ID NO: 1519782 - RNA, 19 nt, Homo sapiens
  misc_RNA (1)...(19): siRNA sense strand
gagggcugcucacaauuua

SEQ ID NO: 1519783 - RNA, 19 nt, Homo sapiens
  misc_RNA (1)...(19): siRNA sense strand
ggaaauuuguggauucaau

SEQ ID NO: 1519784 - RNA, 19 nt, Homo sapiens
  misc_RNA (1)...(19): siRNA sense strand
gaggaaccaucacaacauu

SEQ ID NO: 1519785 - RNA, 19 nt, Homo sapiens
  misc_RNA (1)...(19): siRNA sense strand
ccgaaucccuucugcauuu

SEQ ID NO: 1519786 - RNA, 19 nt, Homo sapiens
  misc_RNA (1)...(19): siRNA sense strand
uaaggaagauacuuggaaa

SEQ ID NO: 1519787 - RNA, 19 nt, Homo sapiens
  misc_RNA (1)...(19): siRNA sense strand
gaagaaauucacacacauu

SEQ ID NO: 1519788 - RNA, 19 nt, Homo sapiens
  misc_RNA (1)...(19): siRNA sense strand
cuaaacacuuucaggauuu

SEQ ID NO: 1519789 - RNA, 19 nt, Homo sapiens
  misc_RNA (1)...(19): siRNA sense strand
gcauuuaggcaucuguuua

SEQ ID NO: 1519790 - RNA, 19 nt, Homo sapiens
  misc_RNA (1)...(19): siRNA sense strand
gaagauacuuggaaaauuc

SEQ ID NO: 1519791 - RNA, 19 nt, Homo sapiens
  misc_RNA (1)...(19): siRNA sense strand
cauuaaagguuucaucaga

SEQ ID NO: 1519792 - RNA, 19 nt, Homo sapiens
  misc_RNA (1)...(19): siRNA sense strand
caauuuauauggccaacuu

SEQ ID NO: 1519793 - RNA, 19 nt, Homo sapiens
  misc_RNA (1)...(19): siRNA sense strand
cagaauggguguagcaaga

SEQ ID NO: 1519794 - RNA, 19 nt, Homo sapiens
  misc_RNA (1)...(19): siRNA sense strand
ggaaccaucacaacauuaa

SEQ ID NO: 1519795 - RNA, 19 nt, Homo sapiens
  misc_RNA (1)...(19): siRNA sense strand
ccaggcagcugucauggaa

SEQ ID NO: 1519796 - RNA, 19 nt, Homo sapiens
  misc_RNA (1)...(19): siRNA sense strand
aaacauggaccaaggcaua

SEQ ID NO: 1519797 - RNA, 19 nt, Homo sapiens
  misc_RNA (1)...(19): siRNA sense strand
gaaauucacacacauucuu

SEQ ID NO: 1519798 - RNA, 19 nt, Homo sapiens
  misc_RNA (1)...(19): siRNA sense strand
acaauccgcuucauuucua

SEQ ID NO: 1519799 - RNA, 19 nt, Homo sapiens
  misc_RNA (1)...(19): siRNA sense strand
caucacagcugccauguac

SEQ ID NO: 1519800 - RNA, 19 nt, Homo sapiens
  misc_RNA (1)...(19): siRNA sense strand
caaauuugcugucaugaac

SEQ ID NO: 1519801 - RNA, 19 nt, Homo sapiens
  misc_RNA (1)...(19): siRNA sense strand
ggaagaaauucacacacau

SEQ ID NO: 1519802 - RNA, 19 nt, Homo sapiens
  misc_RNA (1)...(19): siRNA sense strand
gaucuaugcuccucuguac

SEQ ID NO: 1519803 - RNA, 19 nt, Homo sapiens
  misc_RNA (1)...(19): siRNA sense strand
ucuaaacacuuucaggauu

SEQ ID NO: 1519804 - RNA, 19 nt, Homo sapiens
  misc_RNA (1)...(19): siRNA sense strand
gaauaugauuggucuaguc

SEQ ID NO: 1519805 - RNA, 19 nt, Homo sapiens
  misc_RNA (1)...(19): siRNA sense strand
ucagaaacuuagaugauga

SEQ ID NO: 1519806 - RNA, 19 nt, Homo sapiens
  misc_RNA (1)...(19): siRNA sense strand
gaugaacuacaugcuauua

SEQ ID NO: 1519807 - RNA, 19 nt, Homo sapiens
  misc_RNA (1)...(19): siRNA sense strand
gauccaagauacacaacug

SEQ ID NO: 1519808 - RNA, 19 nt, Homo sapiens
  misc_RNA (1)...(19): siRNA sense strand
gggcugcucacaauuuaua

SEQ ID NO: 1519809 - RNA, 19 nt, Homo sapiens
  misc_RNA (1)...(19): siRNA sense strand
ccagaagaaugaauaugau

SEQ ID NO: 1519810 - RNA, 19 nt, Homo sapiens
  misc_RNA (1)...(19): siRNA sense strand
gaaacggaaauuagacuau

SEQ ID NO: 1519811 - RNA, 19 nt, Homo sapiens
  misc_RNA (1)...(19): siRNA sense strand
caacuuggccacagaaaca

SEQ ID NO: 1519812 - RNA, 19 nt, Homo sapiens
  misc_RNA (1)...(19): siRNA sense strand
gauucaauaugcaaacaug

SEQ ID NO: 1519813 - RNA, 19 nt, Homo sapiens
  misc_RNA (1)...(19): siRNA sense strand
gaugaugaacuacaugcua

SEQ ID NO: 1519814 - RNA, 19 nt, Homo sapiens
  misc_RNA (1)...(19): siRNA sense strand
ggaaacggaaauuagacua

SEQ ID NO: 1519815 - RNA, 19 nt, Homo sapiens
  misc_RNA (1)...(19): siRNA sense strand
gagacaauguauuucaaag

SEQ ID NO: 1519816 - RNA, 19 nt, Homo sapiens
  misc_RNA (1)...(19): siRNA sense strand
ggaccaaggcauagauguu

SEQ ID NO: 1519817 - RNA, 19 nt, Homo sapiens
  misc_RNA (1)...(19): siRNA sense strand
gaaggaagaaauucacaca

SEQ ID NO: 1519818 - RNA, 19 nt, Homo sapiens
  misc_RNA (1)...(19): siRNA sense strand
gagaaguccuuuuguuuug

SEQ ID NO: 1519819 - RNA, 19 nt, Homo sapiens
  misc_RNA (1)...(19): siRNA sense strand
cgaaucccuucugcauuua

SEQ ID NO: 1519820 - RNA, 19 nt, Homo sapiens
  misc_RNA (1)...(19): siRNA sense strand
caccagaguugcccacaga

SEQ ID NO: 1519821 - RNA, 19 nt, Homo sapiens
  misc_RNA (1)...(19): siRNA sense strand
guagagacaauguauuuca

SEQ ID NO: 1519822 - RNA, 19 nt, Homo sapiens
  misc_RNA (1)...(19): siRNA sense strand
aaacccagaagaaugaaua

SEQ ID NO: 1519823 - RNA, 19 nt, Homo sapiens
  misc_RNA (1)...(19): siRNA sense strand
ucaggaaauuuguggauuc

SEQ ID NO: 1519824 - RNA, 19 nt, Homo sapiens
  misc_RNA (1)...(19): siRNA sense strand
ggaagauacuuggaaaauu

SEQ ID NO: 1519825 - RNA, 19 nt, Homo sapiens
  misc_RNA (1)...(19): siRNA sense strand
cacaacaauuuccauguau

SEQ ID NO: 1519826 - RNA, 19 nt, Homo sapiens
  misc_RNA (1)...(19): siRNA sense strand
gaagaaugaauaugauugg

SEQ ID NO: 1519827 - RNA, 19 nt, Homo sapiens
  misc_RNA (1)...(19): siRNA sense strand
ccuacaauccgcuucauuu

SEQ ID NO: 1519828 - RNA, 19 nt, Homo sapiens
  misc_RNA (1)...(19): siRNA sense strand
aaggauggcuugaaaggau

SEQ ID NO: 1519829 - RNA, 19 nt, Homo sapiens
  misc_RNA (1)...(19): siRNA sense strand
gcaagaggaaccaucacaa

SEQ ID NO: 1519830 - RNA, 19 nt, Homo sapiens
  misc_RNA (1)...(19): siRNA sense strand
caucuuauguggccauucu

SEQ ID NO: 1519831 - RNA, 19 nt, Homo sapiens
  misc_RNA (1)...(19): siRNA sense strand
ggagaaguccuuuuguuuu

SEQ ID NO: 1519832 - RNA, 19 nt, Homo sapiens
  misc_RNA (1)...(19): siRNA sense strand
ggucuagucaggaaauuug

SEQ ID NO: 1519833 - RNA, 19 nt, Homo sapiens
  misc_RNA (1)...(19): siRNA sense strand
acagaaacacuauucagaa

SEQ ID NO: 1519834 - RNA, 19 nt, Homo sapiens
  misc_RNA (1)...(19): siRNA sense strand
uaucaucuauuccaucucu

SEQ ID NO: 1519835 - RNA, 19 nt, Homo sapiens
  misc_RNA (1)...(19): siRNA sense strand
gguuucaucagaauguuua

SEQ ID NO: 1519836 - RNA, 19 nt, Homo sapiens
  misc_RNA (1)...(19): siRNA sense strand
gaccaaggcauagauguug

SEQ ID NO: 1519837 - RNA, 19 nt, Homo sapiens
  misc_RNA (1)...(19): siRNA sense strand
uuucuuggcucuuuuguua

SEQ ID NO: 1519838 - RNA, 19 nt, Homo sapiens
  misc_RNA (1)...(19): siRNA sense strand
cuucauuucuaacugcuaa

SEQ ID NO: 1519839 - RNA, 19 nt, Homo sapiens
  misc_RNA (1)...(19): siRNA sense strand
aggaagaaauucacacaca

SEQ ID NO: 1519840 - RNA, 19 nt, Homo sapiens
  misc_RNA (1)...(19): siRNA sense strand
gcuccucuguacuugauug

SEQ ID NO: 1519841 - RNA, 19 nt, Homo sapiens
  misc_RNA (1)...(19): siRNA sense strand
cccagaagaaugaauauga

SEQ ID NO: 1519842 - RNA, 19 nt, Homo sapiens
  misc_RNA (1)...(19): siRNA sense strand
aggagucccugaagaucua

SEQ ID NO: 1519843 - RNA, 19 nt, Homo sapiens
  misc_RNA (1)...(19): siRNA sense strand
ugguagagacaauguauuu

SEQ ID NO: 1519844 - RNA, 19 nt, Homo sapiens
  misc_RNA (1)...(19): siRNA sense strand
gcgcuggaucagaaacuua

SEQ ID NO: 1519845 - RNA, 19 nt, Homo sapiens
  misc_RNA (1)...(19): siRNA sense strand
uuaggcaucuguuuacaca

SEQ ID NO: 1519846 - RNA, 19 nt, Homo sapiens
  misc_RNA (1)...(19): siRNA sense strand
ggaaaauucuacucaugga

SEQ ID NO: 1519847 - RNA, 19 nt, Homo sapiens
  misc_RNA (1)...(19): siRNA sense strand
aggcauagauguugcaaac

SEQ ID NO: 1519848 - RNA, 19 nt, Homo sapiens
  misc_RNA (1)...(19): siRNA sense strand
caggaaauuuguggauuca

SEQ ID NO: 1519849 - RNA, 19 nt, Homo sapiens
  misc_RNA (1)...(19): siRNA sense strand
guucagacuuugagaccau

SEQ ID NO: 1519850 - RNA, 19 nt, Homo sapiens
  misc_RNA (1)...(19): siRNA sense strand
caauccgcuucauuucuaa

SEQ ID NO: 1519851 - RNA, 19 nt, Homo sapiens
  misc_RNA (1)...(19): siRNA sense strand
cacagaaacacuauucaga

SEQ ID NO: 1519852 - RNA, 19 nt, Homo sapiens
  misc_RNA (1)...(19): siRNA sense strand
cuuucucucuucuacaaua

SEQ ID NO: 1519853 - RNA, 19 nt, Homo sapiens
  misc_RNA (1)...(19): siRNA sense strand
ugauuggucuagucaggaa

SEQ ID NO: 1519854 - RNA, 19 nt, Homo sapiens
  misc_RNA (1)...(19): siRNA sense strand
agagggcugcucacaauuu

SEQ ID NO: 1519855 - RNA, 19 nt, Homo sapiens
  misc_RNA (1)...(19): siRNA sense strand
gcuacuuucucucuucuac

SEQ ID NO: 1519856 - RNA, 19 nt, Homo sapiens
  misc_RNA (1)...(19): siRNA sense strand
auuaagaaauggagaaguc

SEQ ID NO: 1519857 - RNA, 19 nt, Homo sapiens
  misc_RNA (1)...(19): siRNA sense strand
uauacaaggguacuaguug

SEQ ID NO: 1519858 - RNA, 19 nt, Homo sapiens
  misc_RNA (1)...(19): siRNA sense strand
caucucggcuacuuucucu

SEQ ID NO: 1519859 - RNA, 19 nt, Homo sapiens
  misc_RNA (1)...(19): siRNA sense strand
gucaggaaauuuguggauu

SEQ ID NO: 1519860 - RNA, 19 nt, Homo sapiens
  misc_RNA (1)...(19): siRNA sense strand
gagagagcaacaugaggaa

SEQ ID NO: 1519861 - RNA, 19 nt, Homo sapiens
  misc_RNA (1)...(19): siRNA sense strand
guagcaagaggaaccauca

SEQ ID NO: 1519862 - RNA, 19 nt, Homo sapiens
  misc_RNA (1)...(19): siRNA sense strand
uggugcaucuaaacacuuu

SEQ ID NO: 1519863 - RNA, 19 nt, Homo sapiens
  misc_RNA (1)...(19): siRNA sense strand
agacuuugagaccaucuua

SEQ ID NO: 1519864 - RNA, 19 nt, Homo sapiens
  misc_RNA (1)...(19): siRNA sense strand
ucccugagauccuacaauc

SEQ ID NO: 1519865 - RNA, 19 nt, Homo sapiens
  misc_RNA (1)...(19): siRNA sense strand
acaaacuacucccugagau

SEQ ID NO: 1519866 - RNA, 19 nt, Homo sapiens
  misc_RNA (1)...(19): siRNA sense strand
cucauggacuccuggcuuu

SEQ ID NO: 1519867 - RNA, 19 nt, Homo sapiens
  misc_RNA (1)...(19): siRNA sense strand
cagaguugcccacagaguu

SEQ ID NO: 1519868 - RNA, 19 nt, Homo sapiens
  misc_RNA (1)...(19): siRNA sense strand
uaaacacuuucaggauuuc

SEQ ID NO: 1519869 - RNA, 19 nt, Homo sapiens
  misc_RNA (1)...(19): siRNA sense strand
guacuggugcaucuaaaca

SEQ ID NO: 1519870 - RNA, 19 nt, Homo sapiens
  misc_RNA (1)...(19): siRNA sense strand
gcaucacagcugccaugua

SEQ ID NO: 1519871 - RNA, 19 nt, Homo sapiens
  misc_RNA (1)...(19): siRNA sense strand
cgaaaaguccuugauguuu

SEQ ID NO: 1519872 - RNA, 19 nt, Homo sapiens
  misc_RNA (1)...(19): siRNA sense strand
uuccaucucuacagcaauu

SEQ ID NO: 1519873 - RNA, 19 nt, Homo sapiens
  misc_RNA (1)...(19): siRNA sense strand
caauuuccauguauuuagc

SEQ ID NO: 1519874 - RNA, 19 nt, Homo sapiens
  misc_RNA (1)...(19): siRNA sense strand
augaugaacuacaugcuau

SEQ ID NO: 1519875 - RNA, 19 nt, Homo sapiens
  misc_RNA (1)...(19): siRNA sense strand
uacuuucucucuucuacaa

SEQ ID NO: 1519876 - RNA, 19 nt, Homo sapiens
  misc_RNA (1)...(19): siRNA sense strand
uuaaggaagauacuuggaa

SEQ ID NO: 1519877 - RNA, 19 nt, Homo sapiens
  misc_RNA (1)...(19): siRNA sense strand
agaguugcccacagaguuu

SEQ ID NO: 1519878 - RNA, 19 nt, Homo sapiens
  misc_RNA (1)...(19): siRNA sense strand
ggacauauaucgucaacuu

SEQ ID NO: 1519879 - RNA, 19 nt, Homo sapiens
  misc_RNA (1)...(19): siRNA sense strand
ggaauaccauugauacuaa

SEQ ID NO: 1519880 - RNA, 19 nt, Homo sapiens
  misc_RNA (1)...(19): siRNA sense strand
ccacaaaucucugagguua

SEQ ID NO: 1519881 - RNA, 19 nt, Homo sapiens
  misc_RNA (1)...(19): siRNA sense strand
ggaaguggcugagaaauug

SEQ ID NO: 1519882 - RNA, 19 nt, Homo sapiens
  misc_RNA (1)...(19): siRNA sense strand
uaacagagcaguuucauaa

SEQ ID NO: 1519883 - RNA, 19 nt, Homo sapiens
  misc_RNA (1)...(19): siRNA sense strand
ggaaagagaauucuaugua

SEQ ID NO: 1519884 - RNA, 19 nt, Homo sapiens
  misc_RNA (1)...(19): siRNA sense strand
gcaaagcacagcagcauua

SEQ ID NO: 1519885 - RNA, 19 nt, Homo sapiens
  misc_RNA (1)...(19): siRNA sense strand
gcaaguaauucgagcauga

SEQ ID NO: 1519886 - RNA, 19 nt, Homo sapiens
  misc_RNA (1)...(19): siRNA sense strand
gaaagcaucgggacauaua

SEQ ID NO: 1519887 - RNA, 19 nt, Homo sapiens
  misc_RNA (1)...(19): siRNA sense strand
uaaaucaucuccucacuga

SEQ ID NO: 1519888 - RNA, 19 nt, Homo sapiens
  misc_RNA (1)...(19): siRNA sense strand
gagguuaaaugcuaaagaa

SEQ ID NO: 1519889 - RNA, 19 nt, Homo sapiens
  misc_RNA (1)...(19): siRNA sense strand
ucacuaagaucaguaauga

SEQ ID NO: 1519890 - RNA, 19 nt, Homo sapiens
  misc_RNA (1)...(19): siRNA sense strand
ugaaagauauuguggagaa

SEQ ID NO: 1519891 - RNA, 19 nt, Homo sapiens
  misc_RNA (1)...(19): siRNA sense strand
gcaaggcuguggacaaaga

SEQ ID NO: 1519892 - RNA, 19 nt, Homo sapiens
  misc_RNA (1)...(19): siRNA sense strand
ggacaaauccacugguauu

SEQ ID NO: 1519893 - RNA, 19 nt, Homo sapiens
  misc_RNA (1)...(19): siRNA sense strand
gaacauucuuucuuucugu

SEQ ID NO: 1519894 - RNA, 19 nt, Homo sapiens
  misc_RNA (1)...(19): siRNA sense strand
gcagauugcuaaacaagau

SEQ ID NO: 1519895 - RNA, 19 nt, Homo sapiens
  misc_RNA (1)...(19): siRNA sense strand
gaagcagagucaaggaauu

SEQ ID NO: 1519896 - RNA, 19 nt, Homo sapiens
  misc_RNA (1)...(19): siRNA sense strand
gcugagaaauugaaacaga

SEQ ID NO: 1519897 - RNA, 19 nt, Homo sapiens
  misc_RNA (1)...(19): siRNA sense strand
gaaguuacacaauugauga

SEQ ID NO: 1519898 - RNA, 19 nt, Homo sapiens
  misc_RNA (1)...(19): siRNA sense strand
gcacagcagcauuaacuuu

SEQ ID NO: 1519899 - RNA, 19 nt, Homo sapiens
  misc_RNA (1)...(19): siRNA sense strand
ggguauacaugaaguaguu

SEQ ID NO: 1519900 - RNA, 19 nt, Homo sapiens
  misc_RNA (1)...(19): siRNA sense strand
gaaaucagcuuuugcuuag

SEQ ID NO: 1519901 - RNA, 19 nt, Homo sapiens
  misc_RNA (1)...(19): siRNA sense strand
guuaacagauccaucaguu

SEQ ID NO: 1519902 - RNA, 19 nt, Homo sapiens
  misc_RNA (1)...(19): siRNA sense strand
aaagaggucacucaaauaa

SEQ ID NO: 1519903 - RNA, 19 nt, Homo sapiens
  misc_RNA (1)...(19): siRNA sense strand
gauuaaggcuguuagucuu

SEQ ID NO: 1519904 - RNA, 19 nt, Homo sapiens
  misc_RNA (1)...(19): siRNA sense strand
acaaaucucugagguuaaa

SEQ ID NO: 1519905 - RNA, 19 nt, Homo sapiens
  misc_RNA (1)...(19): siRNA sense strand
caacaucaguuaauucacu

SEQ ID NO: 1519906 - RNA, 19 nt, Homo sapiens
  misc_RNA (1)...(19): siRNA sense strand
ccauugauacuaaggauua

SEQ ID NO: 1519907 - RNA, 19 nt, Homo sapiens
  misc_RNA (1)...(19): siRNA sense strand
gagaaugcccaguuauuga

SEQ ID NO: 1519908 - RNA, 19 nt, Homo sapiens
  misc_RNA (1)...(19): siRNA sense strand
ccagugagauuaugaaacu

SEQ ID NO: 1519909 - RNA, 19 nt, Homo sapiens
  misc_RNA (1)...(19): siRNA sense strand
ucucugagguuaaaugcua

SEQ ID NO: 1519910 - RNA, 19 nt, Homo sapiens
  misc_RNA (1)...(19): siRNA sense strand
gagagaaugcccaguuauu

SEQ ID NO: 1519911 - RNA, 19 nt, Homo sapiens
  misc_RNA (1)...(19): siRNA sense strand
aagagagaaugcccaguua

SEQ ID NO: 1519912 - RNA, 19 nt, Homo sapiens
  misc_RNA (1)...(19): siRNA sense strand
auacagacaccaucuauuu

SEQ ID NO: 1519913 - RNA, 19 nt, Homo sapiens
  misc_RNA (1)...(19): siRNA sense strand
aaaguaacaugaugcucua

SEQ ID NO: 1519914 - RNA, 19 nt, Homo sapiens
  misc_RNA (1)...(19): siRNA sense strand
gaggagagacgacuagaga

SEQ ID NO: 1519915 - RNA, 19 nt, Homo sapiens
  misc_RNA (1)...(19): siRNA sense strand
gagcaugaagucaaguaua

SEQ ID NO: 1519916 - RNA, 19 nt, Homo sapiens
  misc_RNA (1)...(19): siRNA sense strand
ggaguuaacagagcaguuu

SEQ ID NO: 1519917 - RNA, 19 nt, Homo sapiens
  misc_RNA (1)...(19): siRNA sense strand
uaacagauccaucaguuuc

SEQ ID NO: 1519918 - RNA, 19 nt, Homo sapiens
  misc_RNA (1)...(19): siRNA sense strand
caagaucaguuggcaguau

SEQ ID NO: 1519919 - RNA, 19 nt, Homo sapiens
  misc_RNA (1)...(19): siRNA sense strand
ggagggagagaauaagaaa

SEQ ID NO: 1519920 - RNA, 19 nt, Homo sapiens
  misc_RNA (1)...(19): siRNA sense strand
agcaugaagucaaguauaa

SEQ ID NO: 1519921 - RNA, 19 nt, Homo sapiens
  misc_RNA (1)...(19): siRNA sense strand
ggaaaucagcuuuugcuua

SEQ ID NO: 1519922 - RNA, 19 nt, Homo sapiens
  misc_RNA (1)...(19): siRNA sense strand
cagauaaauccaaggaaua

SEQ ID NO: 1519923 - RNA, 19 nt, Homo sapiens
  misc_RNA (1)...(19): siRNA sense strand
ugaugaaguuacacaauug

SEQ ID NO: 1519924 - RNA, 19 nt, Homo sapiens
  misc_RNA (1)...(19): siRNA sense strand
gcuuagugaucaggaguua

SEQ ID NO: 1519925 - RNA, 19 nt, Homo sapiens
  misc_RNA (1)...(19): siRNA sense strand
ggacaugcuuugugauacu

SEQ ID NO: 1519926 - RNA, 19 nt, Homo sapiens
  misc_RNA (1)...(19): siRNA sense strand
guaacaugaugcucuacaa

SEQ ID NO: 1519927 - RNA, 19 nt, Homo sapiens
  misc_RNA (1)...(19): siRNA sense strand
gcaagacaagaguuaguuu

SEQ ID NO: 1519928 - RNA, 19 nt, Homo sapiens
  misc_RNA (1)...(19): siRNA sense strand
caccaucuauuugugauaa

SEQ ID NO: 1519929 - RNA, 19 nt, Homo sapiens
  misc_RNA (1)...(19): siRNA sense strand
cugaugaaguuacacaauu

SEQ ID NO: 1519930 - RNA, 19 nt, Homo sapiens
  misc_RNA (1)...(19): siRNA sense strand
ccaaggaauaccauugaua

SEQ ID NO: 1519931 - RNA, 19 nt, Homo sapiens
  misc_RNA (1)...(19): siRNA sense strand
acagauaaauccaaggaau

SEQ ID NO: 1519932 - RNA, 19 nt, Homo sapiens
  misc_RNA (1)...(19): siRNA sense strand
cagcagcauuaacuuugua

SEQ ID NO: 1519933 - RNA, 19 nt, Homo sapiens
  misc_RNA (1)...(19): siRNA sense strand
caacagauaaauccaagga

SEQ ID NO: 1519934 - RNA, 19 nt, Homo sapiens
  misc_RNA (1)...(19): siRNA sense strand
uaagagagaaugcccaguu

SEQ ID NO: 1519935 - RNA, 19 nt, Homo sapiens
  misc_RNA (1)...(19): siRNA sense strand
ggagagacgacuagagaug

SEQ ID NO: 1519936 - RNA, 19 nt, Homo sapiens
  misc_RNA (1)...(19): siRNA sense strand
gaaagauauuguggagaau

SEQ ID NO: 1519937 - RNA, 19 nt, Homo sapiens
  misc_RNA (1)...(19): siRNA sense strand
gcauuaacuuuguauacca

SEQ ID NO: 1519938 - RNA, 19 nt, Homo sapiens
  misc_RNA (1)...(19): siRNA sense strand
cagagcaguuucauaaagu

SEQ ID NO: 1519939 - RNA, 19 nt, Homo sapiens
  misc_RNA (1)...(19): siRNA sense strand
aagaaagcaucgggacaua

SEQ ID NO: 1519940 - RNA, 19 nt, Homo sapiens
  misc_RNA (1)...(19): siRNA sense strand
cauaggcuuuaccaaguuu

SEQ ID NO: 1519941 - RNA, 19 nt, Homo sapiens
  misc_RNA (1)...(19): siRNA sense strand
gaacuucaggcucuuacug

SEQ ID NO: 1519942 - RNA, 19 nt, Homo sapiens
  misc_RNA (1)...(19): siRNA sense strand
acagagcaguuucauaaag

SEQ ID NO: 1519943 - RNA, 19 nt, Homo sapiens
  misc_RNA (1)...(19): siRNA sense strand
gguuaaaugcuaaagaaga

SEQ ID NO: 1519944 - RNA, 19 nt, Homo sapiens
  misc_RNA (1)...(19): siRNA sense strand
ucaaggaauucuaaaugca

SEQ ID NO: 1519945 - RNA, 19 nt, Homo sapiens
  misc_RNA (1)...(19): siRNA sense strand
ggcaucauuugaacuucua

SEQ ID NO: 1519946 - RNA, 19 nt, Homo sapiens
  misc_RNA (1)...(19): siRNA sense strand
ucaaauggaaagagaauuc

SEQ ID NO: 1519947 - RNA, 19 nt, Homo sapiens
  misc_RNA (1)...(19): siRNA sense strand
uugcugaugugaagacaaa

SEQ ID NO: 1519948 - RNA, 19 nt, Homo sapiens
  misc_RNA (1)...(19): siRNA sense strand
guggacaugcuuugugaua

SEQ ID NO: 1519949 - RNA, 19 nt, Homo sapiens
  misc_RNA (1)...(19): siRNA sense strand
caaggaauaccauugauac

SEQ ID NO: 1519950 - RNA, 19 nt, Homo sapiens
  misc_RNA (1)...(19): siRNA sense strand
cacaauugaugauguucuu

SEQ ID NO: 1519951 - RNA, 19 nt, Homo sapiens
  misc_RNA (1)...(19): siRNA sense strand
ucauaggcuuuaccaaguu

SEQ ID NO: 1519952 - RNA, 19 nt, Homo sapiens
  misc_RNA (1)...(19): siRNA sense strand
gaauaccauugauacuaag

SEQ ID NO: 1519953 - RNA, 19 nt, Homo sapiens
  misc_RNA (1)...(19): siRNA sense strand
ggaauucuaaaugcaauga

SEQ ID NO: 1519954 - RNA, 19 nt, Homo sapiens
  misc_RNA (1)...(19): siRNA sense strand
gauauacagacaccaucua

SEQ ID NO: 1519955 - RNA, 19 nt, Homo sapiens
  misc_RNA (1)...(19): siRNA sense strand
gcagcucgcauacauuugu

SEQ ID NO: 1519956 - RNA, 19 nt, Homo sapiens
  misc_RNA (1)...(19): siRNA sense strand
caaggaauucuaaaugcaa

SEQ ID NO: 1519957 - RNA, 19 nt, Homo sapiens
  misc_RNA (1)...(19): siRNA sense strand
gaagaagaagccacuaaaa

SEQ ID NO: 1519958 - RNA, 19 nt, Homo sapiens
  misc_RNA (1)...(19): siRNA sense strand
gugagauuaugaaacuuga

SEQ ID NO: 1519959 - RNA, 19 nt, Homo sapiens
  misc_RNA (1)...(19): siRNA sense strand
agaagaagaagccacuaaa

SEQ ID NO: 1519960 - RNA, 19 nt, Homo sapiens
  misc_RNA (1)...(19): siRNA sense strand
gaugaaguuacacaauuga

SEQ ID NO: 1519961 - RNA, 19 nt, Homo sapiens
  misc_RNA (1)...(19): siRNA sense strand
cuacaagcaauuagaaaug

SEQ ID NO: 1519962 - RNA, 19 nt, Homo sapiens
  misc_RNA (1)...(19): siRNA sense strand
caaagcacagcagcauuaa

SEQ ID NO: 1519963 - RNA, 19 nt, Homo sapiens
  misc_RNA (1)...(19): siRNA sense strand
ucaaagauuaaggcuguua

SEQ ID NO: 1519964 - RNA, 19 nt, Homo sapiens
  misc_RNA (1)...(19): siRNA sense strand
uacaucaaauggaaagaga

SEQ ID NO: 1519965 - RNA, 19 nt, Homo sapiens
  misc_RNA (1)...(19): siRNA sense strand
cagagucaaggaauucuaa

SEQ ID NO: 1519966 - RNA, 19 nt, Homo sapiens
  misc_RNA (1)...(19): siRNA sense strand
gacugcagcucgcauacau

SEQ ID NO: 1519967 - RNA, 19 nt, Homo sapiens
  misc_RNA (1)...(19): siRNA sense strand
guaauucgagcaugaaguc

SEQ ID NO: 1519968 - RNA, 19 nt, Homo sapiens
  misc_RNA (1)...(19): siRNA sense strand
guuacacaauugaugaugu

SEQ ID NO: 1519969 - RNA, 19 nt, Homo sapiens
  misc_RNA (1)...(19): siRNA sense strand
cugagaaauugaaacagaa

SEQ ID NO: 1519970 - RNA, 19 nt, Homo sapiens
  misc_RNA (1)...(19): siRNA sense strand
cuaaaugcaaugaucacua

SEQ ID NO: 1519971 - RNA, 19 nt, Homo sapiens
  misc_RNA (1)...(19): siRNA sense strand
agaggucacucaaauaaaa

SEQ ID NO: 1519972 - RNA, 19 nt, Homo sapiens
  misc_RNA (1)...(19): siRNA sense strand
gagcaaagcacagcagcau

SEQ ID NO: 1519973 - RNA, 19 nt, Homo sapiens
  misc_RNA (1)...(19): siRNA sense strand
caaggaggaaaucagcuuu

SEQ ID NO: 1519974 - RNA, 19 nt, Homo sapiens
  misc_RNA (1)...(19): siRNA sense strand
gaauaugccagugguaaag

SEQ ID NO: 1519975 - RNA, 19 nt, Homo sapiens
  misc_RNA (1)...(19): siRNA sense strand
gaagucaaguauaaaaugg

SEQ ID NO: 1519976 - RNA, 19 nt, Homo sapiens
  misc_RNA (1)...(19): siRNA sense strand
gcagagucaaggaauucua

SEQ ID NO: 1519977 - RNA, 19 nt, Homo sapiens
  misc_RNA (1)...(19): siRNA sense strand
agggacaaauccacuggua

SEQ ID NO: 1519978 - RNA, 19 nt, Homo sapiens
  misc_RNA (1)...(19): siRNA sense strand
gaacugagccgaguaauua

SEQ ID NO: 1519979 - RNA, 19 nt, Homo sapiens
  misc_RNA (1)...(19): siRNA sense strand
agacaaaguuggcaauaua

SEQ ID NO: 1519980 - RNA, 19 nt, Homo sapiens
  misc_RNA (1)...(19): siRNA sense strand
cagcacaaaugaagaguua

SEQ ID NO: 1519981 - RNA, 19 nt, Homo sapiens
  misc_RNA (1)...(19): siRNA sense strand
gcaguggucuguaugauga

SEQ ID NO: 1519982 - RNA, 19 nt, Homo sapiens
  misc_RNA (1)...(19): siRNA sense strand
gaagaaaggacacaauuau

SEQ ID NO: 1519983 - RNA, 19 nt, Homo sapiens
  misc_RNA (1)...(19): siRNA sense strand
ggaagaaaggacacaauua

SEQ ID NO: 1519984 - RNA, 19 nt, Homo sapiens
  misc_RNA (1)...(19): siRNA sense strand
gcaguuaaauggagaagga

SEQ ID NO: 1519985 - RNA, 19 nt, Homo sapiens
  misc_RNA (1)...(19): siRNA sense strand
gaaggaagcuauugaaucc

SEQ ID NO: 1519986 - RNA, 19 nt, Homo sapiens
  misc_RNA (1)...(19): siRNA sense strand
cagaagagauucccguuug

SEQ ID NO: 1519987 - RNA, 19 nt, Homo sapiens
  misc_RNA (1)...(19): siRNA sense strand
gaaagaagggacuacauga

SEQ ID NO: 1519988 - RNA, 19 nt, Homo sapiens
  misc_RNA (1)...(19): siRNA sense strand
aaauuugccuuuccucaua

SEQ ID NO: 1519989 - RNA, 19 nt, Homo sapiens
  misc_RNA (1)...(19): siRNA sense strand
ggaggagccugaucugguu

SEQ ID NO: 1519990 - RNA, 19 nt, Homo sapiens
  misc_RNA (1)...(19): siRNA sense strand
gaagugugccaguauauga

SEQ ID NO: 1519991 - RNA, 19 nt, Homo sapiens
  misc_RNA (1)...(19): siRNA sense strand
gauccaguguaauugcuua

SEQ ID NO: 1519992 - RNA, 19 nt, Homo sapiens
  misc_RNA (1)...(19): siRNA sense strand
gauaaugacagcacaaaug

SEQ ID NO: 1519993 - RNA, 19 nt, Homo sapiens
  misc_RNA (1)...(19): siRNA sense strand
gaaaagaaguagcaggaaa

SEQ ID NO: 1519994 - RNA, 19 nt, Homo sapiens
  misc_RNA (1)...(19): siRNA sense strand
gaugcugucugcaacuuaa

SEQ ID NO: 1519995 - RNA, 19 nt, Homo sapiens
  misc_RNA (1)...(19): siRNA sense strand
auagagaacugggcaauuu

SEQ ID NO: 1519996 - RNA, 19 nt, Homo sapiens
  misc_RNA (1)...(19): siRNA sense strand
ggaaagaagggacuacaug

SEQ ID NO: 1519997 - RNA, 19 nt, Homo sapiens
  misc_RNA (1)...(19): siRNA sense strand
gagacaaaguuggcaauau

SEQ ID NO: 1519998 - RNA, 19 nt, Homo sapiens
  misc_RNA (1)...(19): siRNA sense strand
gaaaggacacaauuauauc

SEQ ID NO: 1519999 - RNA, 19 nt, Homo sapiens
  misc_RNA (1)...(19): siRNA sense strand
agaguuagcuauugcuuau

SEQ ID NO: 1520000 - RNA, 19 nt, Homo sapiens
  misc_RNA (1)...(19): siRNA sense strand
uacaggagcugauuugugu

SEQ ID NO: 1520001 - RNA, 19 nt, Homo sapiens
  misc_RNA (1)...(19): siRNA sense strand
guacauggaccaacucgaa

SEQ ID NO: 1520002 - RNA, 19 nt, Homo sapiens
  misc_RNA (1)...(19): siRNA sense strand
ugggaucccugaugcaaua

SEQ ID NO: 1520003 - RNA, 19 nt, Homo sapiens
  misc_RNA (1)...(19): siRNA sense strand
ggaucugccuggaagcuuu

SEQ ID NO: 1520004 - RNA, 19 nt, Homo sapiens
  misc_RNA (1)...(19): siRNA sense strand
acacagagcuauggguuug

SEQ ID NO: 1520005 - RNA, 19 nt, Homo sapiens
  misc_RNA (1)...(19): siRNA sense strand
caacaugagauaccuagaa

SEQ ID NO: 1520006 - RNA, 19 nt, Homo sapiens
  misc_RNA (1)...(19): siRNA sense strand
ugaaugaccucacuaaagc

SEQ ID NO: 1520007 - RNA, 19 nt, Homo sapiens
  misc_RNA (1)...(19): siRNA sense strand
gaucccugaugcaauauga

SEQ ID NO: 1520008 - RNA, 19 nt, Homo sapiens
  misc_RNA (1)...(19): siRNA sense strand
caugagauaccuagaauau

SEQ ID NO: 1520009 - RNA, 19 nt, Homo sapiens
  misc_RNA (1)...(19): siRNA sense strand
ucucgaggauccaguguaa

SEQ ID NO: 1520010 - RNA, 19 nt, Homo sapiens
  misc_RNA (1)...(19): siRNA sense strand
ggccaagucuauugcagaa

SEQ ID NO: 1520011 - RNA, 19 nt, Homo sapiens
  misc_RNA (1)...(19): siRNA sense strand
caaaaguuaugcugaauga

SEQ ID NO: 1520012 - RNA, 19 nt, Homo sapiens
  misc_RNA (1)...(19): siRNA sense strand
gaagggacuacaugacauu

SEQ ID NO: 1520013 - RNA, 19 nt, Homo sapiens
  misc_RNA (1)...(19): siRNA sense strand
caaaugaagaguuagcuau

SEQ ID NO: 1520014 - RNA, 19 nt, Homo sapiens
  misc_RNA (1)...(19): siRNA sense strand
ccaagucuauugcagaaca

SEQ ID NO: 1520015 - RNA, 19 nt, Homo sapiens
  misc_RNA (1)...(19): siRNA sense strand
gcaacuuaaucuuauccuu

SEQ ID NO: 1520016 - RNA, 19 nt, Homo sapiens
  misc_RNA (1)...(19): siRNA sense strand
gaaguacaggagcugauuu

SEQ ID NO: 1520017 - RNA, 19 nt, Homo sapiens
  misc_RNA (1)...(19): siRNA sense strand
ggagacaaaguuggcaaua

SEQ ID NO: 1520018 - RNA, 19 nt, Homo sapiens
  misc_RNA (1)...(19): siRNA sense strand
ggaaggaauaugauggauu

SEQ ID NO: 1520019 - RNA, 19 nt, Homo sapiens
  misc_RNA (1)...(19): siRNA sense strand
gcuaugcuauacaaagguu

SEQ ID NO: 1520020 - RNA, 19 nt, Homo sapiens
  misc_RNA (1)...(19): siRNA sense strand
aaugaagugugccaguaua

SEQ ID NO: 1520021 - RNA, 19 nt, Homo sapiens
  misc_RNA (1)...(19): siRNA sense strand
gcacggcuguacagacauc

SEQ ID NO: 1520022 - RNA, 19 nt, Homo sapiens
  misc_RNA (1)...(19): siRNA sense strand
aaagcuggaugaacuugaa

SEQ ID NO: 1520023 - RNA, 19 nt, Homo sapiens
  misc_RNA (1)...(19): siRNA sense strand
gcaguggagagacauguuu

SEQ ID NO: 1520024 - RNA, 19 nt, Homo sapiens
  misc_RNA (1)...(19): siRNA sense strand
caacagcccaugaagacuu

SEQ ID NO: 1520025 - RNA, 19 nt, Homo sapiens
  misc_RNA (1)...(19): siRNA sense strand
ggaacccuguacuucauau

SEQ ID NO: 1520026 - RNA, 19 nt, Homo sapiens
  misc_RNA (1)...(19): siRNA sense strand
gaucaaaugccagcacgaa

SEQ ID NO: 1520027 - RNA, 19 nt, Homo sapiens
  misc_RNA (1)...(19): siRNA sense strand
gauuggcaguggucuguau

SEQ ID NO: 1520028 - RNA, 19 nt, Homo sapiens
  misc_RNA (1)...(19): siRNA sense strand
gagaauacacagagcuaug

SEQ ID NO: 1520029 - RNA, 19 nt, Homo sapiens
  misc_RNA (1)...(19): siRNA sense strand
aggaagcccuuaagaacuu

SEQ ID NO: 1520030 - RNA, 19 nt, Homo sapiens
  misc_RNA (1)...(19): siRNA sense strand
gcaggcauauagagaacug

SEQ ID NO: 1520031 - RNA, 19 nt, Homo sapiens
  misc_RNA (1)...(19): siRNA sense strand
ucuguaugaugaagcaaua

SEQ ID NO: 1520032 - RNA, 19 nt, Homo sapiens
  misc_RNA (1)...(19): siRNA sense strand
gggacuacaugacauuaag

SEQ ID NO: 1520033 - RNA, 19 nt, Homo sapiens
  misc_RNA (1)...(19): siRNA sense strand
ugucugcaacuuaaucuua

SEQ ID NO: 1520034 - RNA, 19 nt, Homo sapiens
  misc_RNA (1)...(19): siRNA sense strand
auaaugaagugugccagua

SEQ ID NO: 1520035 - RNA, 19 nt, Homo sapiens
  misc_RNA (1)...(19): siRNA sense strand
ggaagcccuuaagaacuuu

SEQ ID NO: 1520036 - RNA, 19 nt, Homo sapiens
  misc_RNA (1)...(19): siRNA sense strand
guucagaggccuuuagcaa

SEQ ID NO: 1520037 - RNA, 19 nt, Homo sapiens
  misc_RNA (1)...(19): siRNA sense strand
gauuacaggagacaaaguu

SEQ ID NO: 1520038 - RNA, 19 nt, Homo sapiens
  misc_RNA (1)...(19): siRNA sense strand
ggaaaagguacacaaagua

SEQ ID NO: 1520039 - RNA, 19 nt, Homo sapiens
  misc_RNA (1)...(19): siRNA sense strand
guuauaagccugaaguaca

SEQ ID NO: 1520040 - RNA, 19 nt, Homo sapiens
  misc_RNA (1)...(19): siRNA sense strand
gcagcuagagccauauaau

SEQ ID NO: 1520041 - RNA, 19 nt, Homo sapiens
  misc_RNA (1)...(19): siRNA sense strand
uuaaugaagcagugaauga

SEQ ID NO: 1520042 - RNA, 19 nt, Homo sapiens
  misc_RNA (1)...(19): siRNA sense strand
guacaggagcugauuugug

SEQ ID NO: 1520043 - RNA, 19 nt, Homo sapiens
  misc_RNA (1)...(19): siRNA sense strand
gaucugccuggaagcuuua

SEQ ID NO: 1520044 - RNA, 19 nt, Homo sapiens
  misc_RNA (1)...(19): siRNA sense strand
gcuagagccauauaaugaa

SEQ ID NO: 1520045 - RNA, 19 nt, Homo sapiens
  misc_RNA (1)...(19): siRNA sense strand
cacuaaagcuauccaacug

SEQ ID NO: 1520046 - RNA, 19 nt, Homo sapiens
  misc_RNA (1)...(19): siRNA sense strand
aaugaagaguuagcuauug

SEQ ID NO: 1520047 - RNA, 19 nt, Homo sapiens
  misc_RNA (1)...(19): siRNA sense strand
gacaaaguuggcaauauau

SEQ ID NO: 1520048 - RNA, 19 nt, Homo sapiens
  misc_RNA (1)...(19): siRNA sense strand
ggucaggugaucaacauga

SEQ ID NO: 1520049 - RNA, 19 nt, Homo sapiens
  misc_RNA (1)...(19): siRNA sense strand
ccucauagaagacuacgaa

SEQ ID NO: 1520050 - RNA, 19 nt, Homo sapiens
  misc_RNA (1)...(19): siRNA sense strand
gagcagcgagcagaaauuc

SEQ ID NO: 1520051 - RNA, 19 nt, Homo sapiens
  misc_RNA (1)...(19): siRNA sense strand
gaccuucuuccgauuauga

SEQ ID NO: 1520052 - RNA, 19 nt, Homo sapiens
  misc_RNA (1)...(19): siRNA sense strand
aaagguacacaaaguagaa

SEQ ID NO: 1520053 - RNA, 19 nt, Homo sapiens
  misc_RNA (1)...(19): siRNA sense strand
gaagaguuagcuauugcuu

SEQ ID NO: 1520054 - RNA, 19 nt, Homo sapiens
  misc_RNA (1)...(19): siRNA sense strand
acguuaagaucgaugauug

SEQ ID NO: 1520055 - RNA, 19 nt, Homo sapiens
  misc_RNA (1)...(19): siRNA sense strand
gagcuaauaauccuaaagg

SEQ ID NO: 1520056 - RNA, 19 nt, Homo sapiens
  misc_RNA (1)...(19): siRNA sense strand
uguuugacauugcaguuaa

SEQ ID NO: 1520057 - RNA, 19 nt, Homo sapiens
  misc_RNA (1)...(19): siRNA sense strand
cauagaagacuacgaagag

SEQ ID NO: 1520058 - RNA, 19 nt, Homo sapiens
  misc_RNA (1)...(19): siRNA sense strand
ugaaggaagcuauugaauc

SEQ ID NO: 1520059 - RNA, 19 nt, Homo sapiens
  misc_RNA (1)...(19): siRNA sense strand
cgaacugagccgaguaauu

SEQ ID NO: 1520060 - RNA, 19 nt, Homo sapiens
  misc_RNA (1)...(19): siRNA sense strand
ggacuacaugacauuaaga

SEQ ID NO: 1520061 - RNA, 19 nt, Homo sapiens
  misc_RNA (1)...(19): siRNA sense strand
ucgaggauccaguguaauu

SEQ ID NO: 1520062 - RNA, 19 nt, Homo sapiens
  misc_RNA (1)...(19): siRNA sense strand
cggaagaaaggacacaauu

SEQ ID NO: 1520063 - RNA, 19 nt, Homo sapiens
  misc_RNA (1)...(19): siRNA sense strand
aaaccagccuauagcuaug

SEQ ID NO: 1520064 - RNA, 19 nt, Homo sapiens
  misc_RNA (1)...(19): siRNA sense strand
auaaugacagcacaaauga

SEQ ID NO: 1520065 - RNA, 19 nt, Homo sapiens
  misc_RNA (1)...(19): siRNA sense strand
gguuuaacuuucuuucaca

SEQ ID NO: 1520066 - RNA, 19 nt, Homo sapiens
  misc_RNA (1)...(19): siRNA sense strand
cuaaaggauugcuggaagu

SEQ ID NO: 1520067 - RNA, 19 nt, Homo sapiens
  misc_RNA (1)...(19): siRNA sense strand
uaucauggagcuaauaauc

SEQ ID NO: 1520068 - RNA, 19 nt, Homo sapiens
  misc_RNA (1)...(19): siRNA sense strand
aacaugagauaccuagaau

SEQ ID NO: 1520069 - RNA, 19 nt, Homo sapiens
  misc_RNA (1)...(19): siRNA sense strand
ggaagacacgguugaugca

SEQ ID NO: 1520070 - RNA, 19 nt, Homo sapiens
  misc_RNA (1)...(19): siRNA sense strand
gaugaagcaauacggcauu

SEQ ID NO: 1520071 - RNA, 19 nt, Homo sapiens
  misc_RNA (1)...(19): siRNA sense strand
aaacucaaaccacggaaga

SEQ ID NO: 1520072 - RNA, 19 nt, Homo sapiens
  misc_RNA (1)...(19): siRNA sense strand
aaaguuaugcugaaugauc

SEQ ID NO: 1520073 - RNA, 19 nt, Homo sapiens
  misc_RNA (1)...(19): siRNA sense strand
cagcuagagccauauaaug

SEQ ID NO: 1520074 - RNA, 19 nt, Homo sapiens
  misc_RNA (1)...(19): siRNA sense strand
gaauuaaugaagcagugaa

SEQ ID NO: 1520075 - RNA, 19 nt, Homo sapiens
  misc_RNA (1)...(19): siRNA sense strand
gaucugguuagugcaauuu

SEQ ID NO: 1520076 - RNA, 19 nt, Homo sapiens
  misc_RNA (1)...(19): siRNA sense strand
gugcugugguuagaucaaa

SEQ ID NO: 1520077 - RNA, 19 nt, Homo sapiens
  misc_RNA (1)...(19): siRNA sense strand
cagcguacauggaccaacu

SEQ ID NO: 1520078 - RNA, 19 nt, Homo sapiens
  misc_RNA (1)...(19): siRNA sense strand
ugagaaagcuggacuauua

SEQ ID NO: 1520079 - RNA, 19 nt, Homo sapiens
  misc_RNA (1)...(19): siRNA sense strand
gaacaguugucgauuauga

SEQ ID NO: 1520080 - RNA, 19 nt, Homo sapiens
  misc_RNA (1)...(19): siRNA sense strand
gaagugaaaucaauacaga

SEQ ID NO: 1520081 - RNA, 19 nt, Homo sapiens
  misc_RNA (1)...(19): siRNA sense strand
gaugauaaccacagucuua

SEQ ID NO: 1520082 - RNA, 19 nt, Homo sapiens
  misc_RNA (1)...(19): siRNA sense strand
ggagaaaugcaaacgauua

SEQ ID NO: 1520083 - RNA, 19 nt, Homo sapiens
  misc_RNA (1)...(19): siRNA sense strand
cugcuuaacugaugaaaua

SEQ ID NO: 1520084 - RNA, 19 nt, Homo sapiens
  misc_RNA (1)...(19): siRNA sense strand
gaaauaaggagauuacgaa

SEQ ID NO: 1520085 - RNA, 19 nt, Homo sapiens
  misc_RNA (1)...(19): siRNA sense strand
agaagaagcuuucagauuc

SEQ ID NO: 1520086 - RNA, 19 nt, Homo sapiens
  misc_RNA (1)...(19): siRNA sense strand
gaugagaagugaaaucaau

SEQ ID NO: 1520087 - RNA, 19 nt, Homo sapiens
  misc_RNA (1)...(19): siRNA sense strand
gcagaaacaaucagacaua

SEQ ID NO: 1520088 - RNA, 19 nt, Homo sapiens
  misc_RNA (1)...(19): siRNA sense strand
ucaagcaacuucagagaaa

SEQ ID NO: 1520089 - RNA, 19 nt, Homo sapiens
  misc_RNA (1)...(19): siRNA sense strand
gaaauuagccagacacaag

SEQ ID NO: 1520090 - RNA, 19 nt, Homo sapiens
  misc_RNA (1)...(19): siRNA sense strand
gacaagagauagcaaacuu

SEQ ID NO: 1520091 - RNA, 19 nt, Homo sapiens
  misc_RNA (1)...(19): siRNA sense strand
gaacauggugaauggaaua

SEQ ID NO: 1520092 - RNA, 19 nt, Homo sapiens
  misc_RNA (1)...(19): siRNA sense strand
gguaaggucucuacagguu

SEQ ID NO: 1520093 - RNA, 19 nt, Homo sapiens
  misc_RNA (1)...(19): siRNA sense strand
uaaccacagucuuacauuu

SEQ ID NO: 1520094 - RNA, 19 nt, Homo sapiens
  misc_RNA (1)...(19): siRNA sense strand
gaaaccauaucucaagcaa

SEQ ID NO: 1520095 - RNA, 19 nt, Homo sapiens
  misc_RNA (1)...(19): siRNA sense strand
gacguugcuucguguauua

SEQ ID NO: 1520096 - RNA, 19 nt, Homo sapiens
  misc_RNA (1)...(19): siRNA sense strand
gacagggacuacagaaauu

SEQ ID NO: 1520097 - RNA, 19 nt, Homo sapiens
  misc_RNA (1)...(19): siRNA sense strand
gaaacaaucagacauaaag

SEQ ID NO: 1520098 - RNA, 19 nt, Homo sapiens
  misc_RNA (1)...(19): siRNA sense strand
ugaaaucaauacagaggua

SEQ ID NO: 1520099 - RNA, 19 nt, Homo sapiens
  misc_RNA (1)...(19): siRNA sense strand
gaucaguuauuugcgguua

SEQ ID NO: 1520100 - RNA, 19 nt, Homo sapiens
  misc_RNA (1)...(19): siRNA sense strand
aagcugauauucacacuuu

SEQ ID NO: 1520101 - RNA, 19 nt, Homo sapiens
  misc_RNA (1)...(19): siRNA sense strand
cuacaacccucaagccaaa

SEQ ID NO: 1520102 - RNA, 19 nt, Homo sapiens
  misc_RNA (1)...(19): siRNA sense strand
ggacagggacuacagaaau

SEQ ID NO: 1520103 - RNA, 19 nt, Homo sapiens
  misc_RNA (1)...(19): siRNA sense strand
gcacagcucuacagcaucu

SEQ ID NO: 1520104 - RNA, 19 nt, Homo sapiens
  misc_RNA (1)...(19): siRNA sense strand
uaaaggaacuaguacaucu

SEQ ID NO: 1520105 - RNA, 19 nt, Homo sapiens
  misc_RNA (1)...(19): siRNA sense strand
ggaauuccauugacacagu

SEQ ID NO: 1520106 - RNA, 19 nt, Homo sapiens
  misc_RNA (1)...(19): siRNA sense strand
acacuuugauucuggauaa

SEQ ID NO: 1520107 - RNA, 19 nt, Homo sapiens
  misc_RNA (1)...(19): siRNA sense strand
caaaguugcccuucagaaa

SEQ ID NO: 1520108 - RNA, 19 nt, Homo sapiens
  misc_RNA (1)...(19): siRNA sense strand
cagaaacaaucagacauaa

SEQ ID NO: 1520109 - RNA, 19 nt, Homo sapiens
  misc_RNA (1)...(19): siRNA sense strand
ugagaauucuguucaaaug

SEQ ID NO: 1520110 - RNA, 19 nt, Homo sapiens
  misc_RNA (1)...(19): siRNA sense strand
caaaugaugagaagugaaa

SEQ ID NO: 1520111 - RNA, 19 nt, Homo sapiens
  misc_RNA (1)...(19): siRNA sense strand
gagaaaucauuaccagaau

SEQ ID NO: 1520112 - RNA, 19 nt, Homo sapiens
  misc_RNA (1)...(19): siRNA sense strand
caacugagcagaaacaauc

SEQ ID NO: 1520113 - RNA, 19 nt, Homo sapiens
  misc_RNA (1)...(19): siRNA sense strand
gagaaaugcaaacgauuaa

SEQ ID NO: 1520114 - RNA, 19 nt, Homo sapiens
  misc_RNA (1)...(19): siRNA sense strand
ggauaaacaguaaugauga

SEQ ID NO: 1520115 - RNA, 19 nt, Homo sapiens
  misc_RNA (1)...(19): siRNA sense strand
gagaaacuucccaugauuu

SEQ ID NO: 1520116 - RNA, 19 nt, Homo sapiens
  misc_RNA (1)...(19): siRNA sense strand
uggcauaucuccuccuuug

SEQ ID NO: 1520117 - RNA, 19 nt, Homo sapiens
  misc_RNA (1)...(19): siRNA sense strand
gcaaacgauuaauacaguu

SEQ ID NO: 1520118 - RNA, 19 nt, Homo sapiens
  misc_RNA (1)...(19): siRNA sense strand
ugaagaacauggugaaugg

SEQ ID NO: 1520119 - RNA, 19 nt, Homo sapiens
  misc_RNA (1)...(19): siRNA sense strand
guuuauugcuucugaugua

SEQ ID NO: 1520120 - RNA, 19 nt, Homo sapiens
  misc_RNA (1)...(19): siRNA sense strand
cgucuaaguuccuggcaua

SEQ ID NO: 1520121 - RNA, 19 nt, Homo sapiens
  misc_RNA (1)...(19): siRNA sense strand
agaaagagaugaagaacgu

SEQ ID NO: 1520122 - RNA, 19 nt, Homo sapiens
  misc_RNA (1)...(19): siRNA sense strand
cagagaaacuucccaugau

SEQ ID NO: 1520123 - RNA, 19 nt, Homo sapiens
  misc_RNA (1)...(19): siRNA sense strand
auacagagguaaaugagaa

SEQ ID NO: 1520124 - RNA, 19 nt, Homo sapiens
  misc_RNA (1)...(19): siRNA sense strand
aaagccagguguuggauaa

SEQ ID NO: 1520125 - RNA, 19 nt, Homo sapiens
  misc_RNA (1)...(19): siRNA sense strand
caucaccucucuuagaaug

SEQ ID NO: 1520126 - RNA, 19 nt, Homo sapiens
  misc_RNA (1)...(19): siRNA sense strand
cugaauggcucuauaguca

SEQ ID NO: 1520127 - RNA, 19 nt, Homo sapiens
  misc_RNA (1)...(19): siRNA sense strand
ggaguccucuugugaucaa

SEQ ID NO: 1520128 - RNA, 19 nt, Homo sapiens
  misc_RNA (1)...(19): siRNA sense strand
gaaauccggcuacgcagaa

SEQ ID NO: 1520129 - RNA, 19 nt, Homo sapiens
  misc_RNA (1)...(19): siRNA sense strand
aauaaucagugcuaucuug

SEQ ID NO: 1520130 - RNA, 19 nt, Homo sapiens
  misc_RNA (1)...(19): siRNA sense strand
caaaugagaauucuguuca

SEQ ID NO: 1520131 - RNA, 19 nt, Homo sapiens
  misc_RNA (1)...(19): siRNA sense strand
ggacaauagucugcuugaa

SEQ ID NO: 1520132 - RNA, 19 nt, Homo sapiens
  misc_RNA (1)...(19): siRNA sense strand
agucagauauggcaaagaa

SEQ ID NO: 1520133 - RNA, 19 nt, Homo sapiens
  misc_RNA (1)...(19): siRNA sense strand
agagaaacuucccaugauu

SEQ ID NO: 1520134 - RNA, 19 nt, Homo sapiens
  misc_RNA (1)...(19): siRNA sense strand
caucuggaauggcugaauu

SEQ ID NO: 1520135 - RNA, 19 nt, Homo sapiens
  misc_RNA (1)...(19): siRNA sense strand
gauagcaaacuucacauug

SEQ ID NO: 1520136 - RNA, 19 nt, Homo sapiens
  misc_RNA (1)...(19): siRNA sense strand
gaagaggaacagccuuuau

SEQ ID NO: 1520137 - RNA, 19 nt, Homo sapiens
  misc_RNA (1)...(19): siRNA sense strand
ggaagaggaacagccuuua

SEQ ID NO: 1520138 - RNA, 19 nt, Homo sapiens
  misc_RNA (1)...(19): siRNA sense strand
acauccagcuuguccaaua

SEQ ID NO: 1520139 - RNA, 19 nt, Homo sapiens
  misc_RNA (1)...(19): siRNA sense strand
gaauggcucuauagucaag

SEQ ID NO: 1520140 - RNA, 19 nt, Homo sapiens
  misc_RNA (1)...(19): siRNA sense strand
gaaggaaaguuugaaagcu

SEQ ID NO: 1520141 - RNA, 19 nt, Homo sapiens
  misc_RNA (1)...(19): siRNA sense strand
ccaaagaugugcguuacga

SEQ ID NO: 1520142 - RNA, 19 nt, Homo sapiens
  misc_RNA (1)...(19): siRNA sense strand
gaaaauacacaaccagaaa

SEQ ID NO: 1520143 - RNA, 19 nt, Homo sapiens
  misc_RNA (1)...(19): siRNA sense strand
ggaaagugaacccgucauu

SEQ ID NO: 1520144 - RNA, 19 nt, Homo sapiens
  misc_RNA (1)...(19): siRNA sense strand
gaaauccgagacuuaaaug

SEQ ID NO: 1520145 - RNA, 19 nt, Homo sapiens
  misc_RNA (1)...(19): siRNA sense strand
ugacggugcuucuguagau

SEQ ID NO: 1520146 - RNA, 19 nt, Homo sapiens
  misc_RNA (1)...(19): siRNA sense strand
gauauucacacuuugauuc

SEQ ID NO: 1520147 - RNA, 19 nt, Homo sapiens
  misc_RNA (1)...(19): siRNA sense strand
caucgaaacauccauuauu

SEQ ID NO: 1520148 - RNA, 19 nt, Homo sapiens
  misc_RNA (1)...(19): siRNA sense strand
uaaggucucuacagguuug

SEQ ID NO: 1520149 - RNA, 19 nt, Homo sapiens
  misc_RNA (1)...(19): siRNA sense strand
gaaagccagguguuggaua

SEQ ID NO: 1520150 - RNA, 19 nt, Homo sapiens
  misc_RNA (1)...(19): siRNA sense strand
ccuagaagaugaugguguu

SEQ ID NO: 1520151 - RNA, 19 nt, Homo sapiens
  misc_RNA (1)...(19): siRNA sense strand
ucagaguccuagauggaua

SEQ ID NO: 1520152 - RNA, 19 nt, Homo sapiens
  misc_RNA (1)...(19): siRNA sense strand
acaauagucugcuugaaca

SEQ ID NO: 1520153 - RNA, 19 nt, Homo sapiens
  misc_RNA (1)...(19): siRNA sense strand
caacaauaaucagugcuau

SEQ ID NO: 1520154 - RNA, 19 nt, Homo sapiens
  misc_RNA (1)...(19): siRNA sense strand
gggauaaacaguaaugaug

SEQ ID NO: 1520155 - RNA, 19 nt, Homo sapiens
  misc_RNA (1)...(19): siRNA sense strand
cuagauggauaugugauuu

SEQ ID NO: 1520156 - RNA, 19 nt, Homo sapiens
  misc_RNA (1)...(19): siRNA sense strand
ggguugggauaaacaguaa

SEQ ID NO: 1520157 - RNA, 19 nt, Homo sapiens
  misc_RNA (1)...(19): siRNA sense strand
gaacaguauuuaacuucag

SEQ ID NO: 1520158 - RNA, 19 nt, Homo sapiens
  misc_RNA (1)...(19): siRNA sense strand
ggaauaaggaaagcucaaa

SEQ ID NO: 1520159 - RNA, 19 nt, Homo sapiens
  misc_RNA (1)...(19): siRNA sense strand
ugauguagcuccucaagag

SEQ ID NO: 1520160 - RNA, 19 nt, Homo sapiens
  misc_RNA (1)...(19): siRNA sense strand
ucaaaaugcugauugguuu

SEQ ID NO: 1520161 - RNA, 19 nt, Homo sapiens
  misc_RNA (1)...(19): siRNA sense strand
ucagagaaacuucccauga

SEQ ID NO: 1520162 - RNA, 19 nt, Homo sapiens
  misc_RNA (1)...(19): siRNA sense strand
gaaggaugauaaccacagu

SEQ ID NO: 1520163 - RNA, 19 nt, Homo sapiens
  misc_RNA (1)...(19): siRNA sense strand
ucuacagcaucucgauuua

SEQ ID NO: 1520164 - RNA, 19 nt, Homo sapiens
  misc_RNA (1)...(19): siRNA sense strand
aaggaaagcucaaauaacg

SEQ ID NO: 1520165 - RNA, 19 nt, Homo sapiens
  misc_RNA (1)...(19): siRNA sense strand
gaacccgucauucaaguga

SEQ ID NO: 1520166 - RNA, 19 nt, Homo sapiens
  misc_RNA (1)...(19): siRNA sense strand
guucaagauugccagauau

SEQ ID NO: 1520167 - RNA, 19 nt, Homo sapiens
  misc_RNA (1)...(19): siRNA sense strand
uuggaacaguugucgauua

SEQ ID NO: 1520168 - RNA, 19 nt, Homo sapiens
  misc_RNA (1)...(19): siRNA sense strand
ccagaagucuugcuauacu

SEQ ID NO: 1520169 - RNA, 19 nt, Homo sapiens
  misc_RNA (1)...(19): siRNA sense strand
ggugaucuaucuaaauugg

SEQ ID NO: 1520170 - RNA, 19 nt, Homo sapiens
  misc_RNA (1)...(19): siRNA sense strand
gcuauugcauguugguguu

SEQ ID NO: 1520171 - RNA, 19 nt, Homo sapiens
  misc_RNA (1)...(19): siRNA sense strand
gauucuacauuucagcuau

SEQ ID NO: 1520172 - RNA, 19 nt, Homo sapiens
  misc_RNA (1)...(19): siRNA sense strand
gcugauugguuuauugcuu

SEQ ID NO: 1520173 - RNA, 19 nt, Homo sapiens
  misc_RNA (1)...(19): siRNA sense strand
aaggaucaguggucaauug

SEQ ID NO: 1520174 - RNA, 19 nt, Homo sapiens
  misc_RNA (1)...(19): siRNA sense strand
cuacagaaauuagguccaa

SEQ ID NO: 1520175 - RNA, 19 nt, Homo sapiens
  misc_RNA (1)...(19): siRNA sense strand
aaagcugaauggcucuaua

SEQ ID NO: 1520176 - RNA, 19 nt, Homo sapiens
  misc_RNA (1)...(19): siRNA sense strand
caucaucaccucucuuaga

SEQ ID NO: 1520177 - RNA, 19 nt, Homo sapiens
  misc_RNA (1)...(19): siRNA sense strand
ugagucaacugagcagaaa

SEQ ID NO: 1520178 - RNA, 19 nt, Homo sapiens
  misc_RNA (1)...(19): siRNA sense strand
ccaaagaacuaacuacaua

SEQ ID NO: 1520179 - RNA, 19 nt, Homo sapiens
  misc_RNA (1)...(19): siRNA sense strand
gaagauuccuccuggcuua

SEQ ID NO: 1520180 - RNA, 19 nt, Homo sapiens
  misc_RNA (1)...(19): siRNA sense strand
gcacaacuauuuaagaauc

SEQ ID NO: 1520181 - RNA, 19 nt, Homo sapiens
  misc_RNA (1)...(19): siRNA sense strand
caaaacagcugaagacaaa

SEQ ID NO: 1520182 - RNA, 19 nt, Homo sapiens
  misc_RNA (1)...(19): siRNA sense strand
gaagaagguggaaaugaua

SEQ ID NO: 1520183 - RNA, 19 nt, Homo sapiens
  misc_RNA (1)...(19): siRNA sense strand
cagcacaacuauuuaagaa

SEQ ID NO: 1520184 - RNA, 19 nt, Homo sapiens
  misc_RNA (1)...(19): siRNA sense strand
gaaauacagaggacaguaa

SEQ ID NO: 1520185 - RNA, 19 nt, Homo sapiens
  misc_RNA (1)...(19): siRNA sense strand
ccagggauuuguacaagua

SEQ ID NO: 1520186 - RNA, 19 nt, Homo sapiens
  misc_RNA (1)...(19): siRNA sense strand
gcuguuaacuggcaggaaa

SEQ ID NO: 1520187 - RNA, 19 nt, Homo sapiens
  misc_RNA (1)...(19): siRNA sense strand
cgaagaagguggaaaugau

SEQ ID NO: 1520188 - RNA, 19 nt, Homo sapiens
  misc_RNA (1)...(19): siRNA sense strand
gaacaugaauucucaaccu

SEQ ID NO: 1520189 - RNA, 19 nt, Homo sapiens
  misc_RNA (1)...(19): siRNA sense strand
uacccaaacuucaaagaua

SEQ ID NO: 1520190 - RNA, 19 nt, Homo sapiens
  misc_RNA (1)...(19): siRNA sense strand
caaccacacuuacauucaa

SEQ ID NO: 1520191 - RNA, 19 nt, Homo sapiens
  misc_RNA (1)...(19): siRNA sense strand
gaaaugauaaccaagacaa

SEQ ID NO: 1520192 - RNA, 19 nt, Homo sapiens
  misc_RNA (1)...(19): siRNA sense strand
cuccucagcuguucauuua

SEQ ID NO: 1520193 - RNA, 19 nt, Homo sapiens
  misc_RNA (1)...(19): siRNA sense strand
cagaugguguuuacauuga

SEQ ID NO: 1520194 - RNA, 19 nt, Homo sapiens
  misc_RNA (1)...(19): siRNA sense strand
gcacaaccacacuuacauu

SEQ ID NO: 1520195 - RNA, 19 nt, Homo sapiens
  misc_RNA (1)...(19): siRNA sense strand
guaaauggaaaggagauua

SEQ ID NO: 1520196 - RNA, 19 nt, Homo sapiens
  misc_RNA (1)...(19): siRNA sense strand
ccucagcuguucauuuaaa

SEQ ID NO: 1520197 - RNA, 19 nt, Homo sapiens
  misc_RNA (1)...(19): siRNA sense strand
gagcuuggauaugaaaguu

SEQ ID NO: 1520198 - RNA, 19 nt, Homo sapiens
  misc_RNA (1)...(19): siRNA sense strand
ggaauaaaacugacugaua

SEQ ID NO: 1520199 - RNA, 19 nt, Homo sapiens
  misc_RNA (1)...(19): siRNA sense strand
caaaagagccuguggaaga

SEQ ID NO: 1520200 - RNA, 19 nt, Homo sapiens
  misc_RNA (1)...(19): siRNA sense strand
gaaauacaaauugccauga

SEQ ID NO: 1520201 - RNA, 19 nt, Homo sapiens
  misc_RNA (1)...(19): siRNA sense strand
gcccagagcccagcaauga

SEQ ID NO: 1520202 - RNA, 19 nt, Homo sapiens
  misc_RNA (1)...(19): siRNA sense strand
caaaaugacuugagcaauc

SEQ ID NO: 1520203 - RNA, 19 nt, Homo sapiens
  misc_RNA (1)...(19): siRNA sense strand
aaauugccaugauguugua

SEQ ID NO: 1520204 - RNA, 19 nt, Homo sapiens
  misc_RNA (1)...(19): siRNA sense strand
ccucucgccuccagucaua

SEQ ID NO: 1520205 - RNA, 19 nt, Homo sapiens
  misc_RNA (1)...(19): siRNA sense strand
uaacgaagaagguggaaau

SEQ ID NO: 1520206 - RNA, 19 nt, Homo sapiens
  misc_RNA (1)...(19): siRNA sense strand
ggacaguaaugcugagaac

SEQ ID NO: 1520207 - RNA, 19 nt, Homo sapiens
  misc_RNA (1)...(19): siRNA sense strand
gccagaugguguuuacauu

SEQ ID NO: 1520208 - RNA, 19 nt, Homo sapiens
  misc_RNA (1)...(19): siRNA sense strand
ccaugauguuguacuagua

SEQ ID NO: 1520209 - RNA, 19 nt, Homo sapiens
  misc_RNA (1)...(19): siRNA sense strand
uaacuggcaggaaagauuu

SEQ ID NO: 1520210 - RNA, 19 nt, Homo sapiens
  misc_RNA (1)...(19): siRNA sense strand
gaaguucuaaguaaaugga

SEQ ID NO: 1520211 - RNA, 19 nt, Homo sapiens
  misc_RNA (1)...(19): siRNA sense strand
ugaagcaacugccaaacca

SEQ ID NO: 1520212 - RNA, 19 nt, Homo sapiens
  misc_RNA (1)...(19): siRNA sense strand
uuggugagcuuggauauga

SEQ ID NO: 1520213 - RNA, 19 nt, Homo sapiens
  misc_RNA (1)...(19): siRNA sense strand
gauuccuccuggcuuauaa

SEQ ID NO: 1520214 - RNA, 19 nt, Homo sapiens
  misc_RNA (1)...(19): siRNA sense strand
caagccagaugguguuuac

SEQ ID NO: 1520215 - RNA, 19 nt, Homo sapiens
  misc_RNA (1)...(19): siRNA sense strand
caaauugccaugauguugu

SEQ ID NO: 1520216 - RNA, 19 nt, Homo sapiens
  misc_RNA (1)...(19): siRNA sense strand
gagcacaaccacacuuaca

SEQ ID NO: 1520217 - RNA, 19 nt, Homo sapiens
  misc_RNA (1)...(19): siRNA sense strand
gcaacugccaaaccaaaga

SEQ ID NO: 1520218 - RNA, 19 nt, Homo sapiens
  misc_RNA (1)...(19): siRNA sense strand
ccagaugguguuuacauug

SEQ ID NO: 1520219 - RNA, 19 nt, Homo sapiens
  misc_RNA (1)...(19): siRNA sense strand
gccaugauguuguacuagu

SEQ ID NO: 1520220 - RNA, 19 nt, Homo sapiens
  misc_RNA (1)...(19): siRNA sense strand
gcugccaagccaagaaaua

SEQ ID NO: 1520221 - RNA, 19 nt, Homo sapiens
  misc_RNA (1)...(19): siRNA sense strand
acaaguaccgacaccagua

SEQ ID NO: 1520222 - RNA, 19 nt, Homo sapiens
  misc_RNA (1)...(19): siRNA sense strand
gauaaccaagacaaugaaa

SEQ ID NO: 1520223 - RNA, 19 nt, Homo sapiens
  misc_RNA (1)...(19): siRNA sense strand
guaaugcugagaacaugaa

SEQ ID NO: 1520224 - RNA, 19 nt, Homo sapiens
  misc_RNA (1)...(19): siRNA sense strand
gaagcugccaagccaagaa

SEQ ID NO: 1520225 - RNA, 19 nt, Homo sapiens
  misc_RNA (1)...(19): siRNA sense strand
ucaaacuucuaugcacaaa

SEQ ID NO: 1520226 - RNA, 19 nt, Homo sapiens
  misc_RNA (1)...(19): siRNA sense strand
ggaaaggagauuaugaaaa

SEQ ID NO: 1520227 - RNA, 19 nt, Homo sapiens
  misc_RNA (1)...(19): siRNA sense strand
gcuguucauuuaaauagca

SEQ ID NO: 1520228 - RNA, 19 nt, Homo sapiens
  misc_RNA (1)...(19): siRNA sense strand
cauaacagucaaacuucua

SEQ ID NO: 1520229 - RNA, 19 nt, Homo sapiens
  misc_RNA (1)...(19): siRNA sense strand
gggaagcaaagcccagaaa

SEQ ID NO: 1520230 - RNA, 19 nt, Homo sapiens
  misc_RNA (1)...(19): siRNA sense strand
gacagaagagaaaggagaa

SEQ ID NO: 1520231 - RNA, 19 nt, Homo sapiens
  misc_RNA (1)...(19): siRNA sense strand
augaagcucuuguggagaa

SEQ ID NO: 1520232 - RNA, 19 nt, Homo sapiens
  misc_RNA (1)...(19): siRNA sense strand
acccaaacuucaaagauau

SEQ ID NO: 1520233 - RNA, 19 nt, Homo sapiens
  misc_RNA (1)...(19): siRNA sense strand
gcucuagaguauuuuguuu

SEQ ID NO: 1520234 - RNA, 19 nt, Homo sapiens
  misc_RNA (1)...(19): siRNA sense strand
ugaaugagucccagcacaa

SEQ ID NO: 1520235 - RNA, 19 nt, Homo sapiens
  misc_RNA (1)...(19): siRNA sense strand
agucauaacagucaaacuu

SEQ ID NO: 1520236 - RNA, 19 nt, Homo sapiens
  misc_RNA (1)...(19): siRNA sense strand
cuacacgccuucagagaac

SEQ ID NO: 1520237 - RNA, 19 nt, Homo sapiens
  misc_RNA (1)...(19): siRNA sense strand
guguuuacauugaagaagu

SEQ ID NO: 1520238 - RNA, 19 nt, Homo sapiens
  misc_RNA (1)...(19): siRNA sense strand
aauacaaauugccaugaug

SEQ ID NO: 1520239 - RNA, 19 nt, Homo sapiens
  misc_RNA (1)...(19): siRNA sense strand
guacccaaacuucaaagau

SEQ ID NO: 1520240 - RNA, 19 nt, Homo sapiens
  misc_RNA (1)...(19): siRNA sense strand
caguaaugcugagaacaug

SEQ ID NO: 1520241 - RNA, 19 nt, Homo sapiens
  misc_RNA (1)...(19): siRNA sense strand
agaagcaauuagaagauuc

SEQ ID NO: 1520242 - RNA, 19 nt, Homo sapiens
  misc_RNA (1)...(19): siRNA sense strand
uuaacuggcaggaaagauu

SEQ ID NO: 1520243 - RNA, 19 nt, Homo sapiens
  misc_RNA (1)...(19): siRNA sense strand
gaagagaaaggagaaagcu

SEQ ID NO: 1520244 - RNA, 19 nt, Homo sapiens
  misc_RNA (1)...(19): siRNA sense strand
ccagcacaacuauuuaaga

SEQ ID NO: 1520245 - RNA, 19 nt, Homo sapiens
  misc_RNA (1)...(19): siRNA sense strand
gaagcucuuguggagaaua

SEQ ID NO: 1520246 - RNA, 19 nt, Homo sapiens
  misc_RNA (1)...(19): siRNA sense strand
caaugaaaauccuggaaau

SEQ ID NO: 1520247 - RNA, 19 nt, Homo sapiens
  misc_RNA (1)...(19): siRNA sense strand
guggaaaugauaaccaaga

SEQ ID NO: 1520248 - RNA, 19 nt, Homo sapiens
  misc_RNA (1)...(19): siRNA sense strand
ccaguacccaaacuucaaa

SEQ ID NO: 1520249 - RNA, 19 nt, Homo sapiens
  misc_RNA (1)...(19): siRNA sense strand
gcuuggauaugaaaguuuu

SEQ ID NO: 1520250 - RNA, 19 nt, Homo sapiens
  misc_RNA (1)...(19): siRNA sense strand
gaaaauccuggaaauacaa

SEQ ID NO: 1520251 - RNA, 19 nt, Homo sapiens
  misc_RNA (1)...(19): siRNA sense strand
ggaaaugauaaccaagaca

SEQ ID NO: 1520252 - RNA, 19 nt, Homo sapiens
  misc_RNA (1)...(19): siRNA sense strand
gaugguguuuacauugaag

SEQ ID NO: 1520253 - RNA, 19 nt, Homo sapiens
  misc_RNA (1)...(19): siRNA sense strand
gauaaaacuggaaauguug

SEQ ID NO: 1520254 - RNA, 19 nt, Homo sapiens
  misc_RNA (1)...(19): siRNA sense strand
acaaauugccaugauguug

SEQ ID NO: 1520255 - RNA, 19 nt, Homo sapiens
  misc_RNA (1)...(19): siRNA sense strand
gaagcaacugccaaaccaa

SEQ ID NO: 1520256 - RNA, 19 nt, Homo sapiens
  misc_RNA (1)...(19): siRNA sense strand
cagcuguucauuuaaauag

SEQ ID NO: 1520257 - RNA, 19 nt, Homo sapiens
  misc_RNA (1)...(19): siRNA sense strand
ucauaacagucaaacuucu

SEQ ID NO: 1520258 - RNA, 19 nt, Homo sapiens
  misc_RNA (1)...(19): siRNA sense strand
gcucuuguggagaauacua

SEQ ID NO: 1520259 - RNA, 19 nt, Homo sapiens
  misc_RNA (1)...(19): siRNA sense strand
agucccagcacaacuauuu

SEQ ID NO: 1520260 - RNA, 19 nt, Homo sapiens
  misc_RNA (1)...(19): siRNA sense strand
cgacaccaguacccaaacu

SEQ ID NO: 1520261 - RNA, 19 nt, Homo sapiens
  misc_RNA (1)...(19): siRNA sense strand
gacuugagcaaucuucguu

SEQ ID NO: 1520262 - RNA, 19 nt, Homo sapiens
  misc_RNA (1)...(19): siRNA sense strand
uggagcacaaccacacuua

SEQ ID NO: 1520263 - RNA, 19 nt, Homo sapiens
  misc_RNA (1)...(19): siRNA sense strand
aagaagguggaaaugauaa

SEQ ID NO: 1520264 - RNA, 19 nt, Homo sapiens
  misc_RNA (1)...(19): siRNA sense strand
agaaauacagaggacagua

SEQ ID NO: 1520265 - RNA, 19 nt, Homo sapiens
  misc_RNA (1)...(19): siRNA sense strand
gcaaaacagcugaagacaa

SEQ ID NO: 1520266 - RNA, 19 nt, Homo sapiens
  misc_RNA (1)...(19): siRNA sense strand
gaagcaaagcccagaaaau

SEQ ID NO: 1520267 - RNA, 19 nt, Homo sapiens
  misc_RNA (1)...(19): siRNA sense strand
ggugagcuuggauaugaaa

SEQ ID NO: 1520268 - RNA, 19 nt, Homo sapiens
  misc_RNA (1)...(19): siRNA sense strand
uggaaaggagauuaugaaa

SEQ ID NO: 1520269 - RNA, 19 nt, Homo sapiens
  misc_RNA (1)...(19): siRNA sense strand
ccuccuggcuuauaaaaug

SEQ ID NO: 1520270 - RNA, 19 nt, Homo sapiens
  misc_RNA (1)...(19): siRNA sense strand
gccaaagaacuaacuacau

SEQ ID NO: 1520271 - RNA, 19 nt, Homo sapiens
  misc_RNA (1)...(19): siRNA sense strand
aagcaacugccaaaccaaa

SEQ ID NO: 1520272 - RNA, 19 nt, Homo sapiens
  misc_RNA (1)...(19): siRNA sense strand
ugaaaauccuggaaauaca

SEQ ID NO: 1520273 - RNA, 19 nt, Homo sapiens
  misc_RNA (1)...(19): siRNA sense strand
guuacuacucccacagaaa

SEQ ID NO: 1520274 - RNA, 19 nt, Homo sapiens
  misc_RNA (1)...(19): siRNA sense strand
gccagggauuuguacaagu

SEQ ID NO: 1520275 - RNA, 19 nt, Homo sapiens
  misc_RNA (1)...(19): siRNA sense strand
aauuagagacagaagagaa

SEQ ID NO: 1520276 - RNA, 19 nt, Homo sapiens
  misc_RNA (1)...(19): siRNA sense strand
uugccaugauguuguacua

SEQ ID NO: 1520277 - RNA, 19 nt, Homo sapiens
  misc_RNA (1)...(19): siRNA sense strand
ccagagcccagcaaugaag

SEQ ID NO: 1520278 - RNA, 19 nt, Homo sapiens
  misc_RNA (1)...(19): siRNA sense strand
gaacacagcucggaauuau

SEQ ID NO: 1520279 - RNA, 19 nt, Homo sapiens
  misc_RNA (1)...(19): siRNA sense strand
gugaaacacuuaacaaaug

SEQ ID NO: 1520280 - RNA, 19 nt, Homo sapiens
  misc_RNA (1)...(19): siRNA sense strand
gaaccuggcuggcuagaag

SEQ ID NO: 1520281 - RNA, 19 nt, Homo sapiens
  misc_RNA (1)...(19): siRNA sense strand
gaagugaagacaauaacaa

SEQ ID NO: 1520282 - RNA, 19 nt, Homo sapiens
  misc_RNA (1)...(19): siRNA sense strand
ggagaauucugcagauugg

SEQ ID NO: 1520283 - RNA, 19 nt, Homo sapiens
  misc_RNA (1)...(19): siRNA sense strand
gcuggaagauggugacaau

SEQ ID NO: 1520284 - RNA, 19 nt, Homo sapiens
  misc_RNA (1)...(19): siRNA sense strand
gaagagacaaggccagaga

SEQ ID NO: 1520285 - RNA, 19 nt, Homo sapiens
  misc_RNA (1)...(19): siRNA sense strand
ugaguuacauggagauuuc

SEQ ID NO: 1520286 - RNA, 19 nt, Homo sapiens
  misc_RNA (1)...(19): siRNA sense strand
ggagggagcuuuggagacu

SEQ ID NO: 1520287 - RNA, 19 nt, Homo sapiens
  misc_RNA (1)...(19): siRNA sense strand
acauggagauuucauuguu

SEQ ID NO: 1520288 - RNA, 19 nt, Homo sapiens
  misc_RNA (1)...(19): siRNA sense strand
gaauauuguuguggaaauc

SEQ ID NO: 1520289 - RNA, 19 nt, Homo sapiens
  misc_RNA (1)...(19): siRNA sense strand
guacacaaacugccagaga

SEQ ID NO: 1520290 - RNA, 19 nt, Homo sapiens
  misc_RNA (1)...(19): siRNA sense strand
ggugaaacacuuaacaaau

SEQ ID NO: 1520291 - RNA, 19 nt, Homo sapiens
  misc_RNA (1)...(19): siRNA sense strand
cccagaaucucguguuaau

SEQ ID NO: 1520292 - RNA, 19 nt, Homo sapiens
  misc_RNA (1)...(19): siRNA sense strand
gcagauggagggagcuuug

SEQ ID NO: 1520293 - RNA, 19 nt, Homo sapiens
  misc_RNA (1)...(19): siRNA sense strand
uacacaaacugccagagaa

SEQ ID NO: 1520294 - RNA, 19 nt, Homo sapiens
  misc_RNA (1)...(19): siRNA sense strand
agagaagaauaaagagaug

SEQ ID NO: 1520295 - RNA, 19 nt, Homo sapiens
  misc_RNA (1)...(19): siRNA sense strand
gaagaauaaagagauguug

SEQ ID NO: 1520296 - RNA, 19 nt, Homo sapiens
  misc_RNA (1)...(19): siRNA sense strand
gcagaacacagcucggaau

SEQ ID NO: 1520297 - RNA, 19 nt, Homo sapiens
  misc_RNA (1)...(19): siRNA sense strand
caaaucacuccaagcagaa

SEQ ID NO: 1520298 - RNA, 19 nt, Homo sapiens
  misc_RNA (1)...(19): siRNA sense strand
gaugacuguggcaaacuua

SEQ ID NO: 1520299 - RNA, 19 nt, Homo sapiens
  misc_RNA (1)...(19): siRNA sense strand
ggacaagccaccugaaagc

SEQ ID NO: 1520300 - RNA, 19 nt, Homo sapiens
  misc_RNA (1)...(19): siRNA sense strand
ggaagugaagacaauaaca

SEQ ID NO: 1520301 - RNA, 19 nt, Homo sapiens
  misc_RNA (1)...(19): siRNA sense strand
gaagauggugacaauccuu

SEQ ID NO: 1520302 - RNA, 19 nt, Homo sapiens
  misc_RNA (1)...(19): siRNA sense strand
ucagaauauuguuguggaa

SEQ ID NO: 1520303 - RNA, 19 nt, Homo sapiens
  misc_RNA (1)...(19): siRNA sense strand
gugaagacaauaacaagug

SEQ ID NO: 1520304 - RNA, 19 nt, Homo sapiens
  misc_RNA (1)...(19): siRNA sense strand
aaacugccagagaagaaua

SEQ ID NO: 1520305 - RNA, 19 nt, Homo sapiens
  misc_RNA (1)...(19): siRNA sense strand
cagagaagaauaaagagau

SEQ ID NO: 1520306 - RNA, 19 nt, Homo sapiens
  misc_RNA (1)...(19): siRNA sense strand
gaauaaagagauguuggau

SEQ ID NO: 1520307 - RNA, 19 nt, Homo sapiens
  misc_RNA (1)...(19): siRNA sense strand
cauggagauuucauuguuc

SEQ ID NO: 1520308 - RNA, 19 nt, Homo sapiens
  misc_RNA (1)...(19): siRNA sense strand
gcggacaagccaccugaaa

SEQ ID NO: 1520309 - RNA, 19 nt, Homo sapiens
  misc_RNA (1)...(19): siRNA sense strand
ggaagauggugacaauccu

SEQ ID NO: 1520310 - RNA, 19 nt, Homo sapiens
  misc_RNA (1)...(19): siRNA sense strand
ccagagaagaauaaagaga

SEQ ID NO: 1520311 - RNA, 19 nt, Homo sapiens
  misc_RNA (1)...(19): siRNA sense strand
ugcgauccauuucuuggua

SEQ ID NO: 1520312 - RNA, 19 nt, Homo sapiens
  misc_RNA (1)...(19): siRNA sense strand
uuacauggagauuucauug

SEQ ID NO: 1520313 - RNA, 19 nt, Homo sapiens
  misc_RNA (1)...(19): siRNA sense strand
gaugaggccacaggaagaa

SEQ ID NO: 1520314 - RNA, 19 nt, Homo sapiens
  misc_RNA (1)...(19): siRNA sense strand
cuuguuugcuugcucacua

SEQ ID NO: 1520315 - RNA, 19 nt, Homo sapiens
  misc_RNA (1)...(19): siRNA sense strand
ugccagagaagaauaaaga

SEQ ID NO: 1520316 - RNA, 19 nt, Homo sapiens
  misc_RNA (1)...(19): siRNA sense strand
agaacacagcucggaauua

SEQ ID NO: 1520317 - RNA, 19 nt, Homo sapiens
  misc_RNA (1)...(19): siRNA sense strand
cagaacacagcucggaauu

SEQ ID NO: 1520318 - RNA, 19 nt, Homo sapiens
  misc_RNA (1)...(19): siRNA sense strand
ugaugacuguggcaaacuu

SEQ ID NO: 1520319 - RNA, 19 nt, Homo sapiens
  misc_RNA (1)...(19): siRNA sense strand
agcagaaccugaugacugu

SEQ ID NO: 1520320 - RNA, 19 nt, Homo sapiens
  misc_RNA (1)...(19): siRNA sense strand
acacagcucggaauuaucu

SEQ ID NO: 1520321 - RNA, 19 nt, Homo sapiens
  misc_RNA (1)...(19): siRNA sense strand
cagaaucucguguuaaugc

SEQ ID NO: 1520322 - RNA, 19 nt, Homo sapiens
  misc_RNA (1)...(19): siRNA sense strand
ucuaugguccaguggcuua

SEQ ID NO: 1520323 - RNA, 19 nt, Homo sapiens
  misc_RNA (1)...(19): siRNA sense strand
gagacugggcauccacuau

SEQ ID NO: 1520324 - RNA, 19 nt, Homo sapiens
  misc_RNA (1)...(19): siRNA sense strand
gcccguggccgucuacaau

SEQ ID NO: 1520325 - RNA, 19 nt, Homo sapiens
  misc_RNA (1)...(19): siRNA sense strand
ccaccaaggcagucgaaga

SEQ ID NO: 1520326 - RNA, 19 nt, Homo sapiens
  misc_RNA (1)...(19): siRNA sense strand
acaaacugccagagaagaa

SEQ ID NO: 1520327 - RNA, 19 nt, Homo sapiens
  misc_RNA (1)...(19): siRNA sense strand
agcccagaaucucguguua

SEQ ID NO: 1520328 - RNA, 19 nt, Homo sapiens
  misc_RNA (1)...(19): siRNA sense strand
ggagacugggcauccacua

SEQ ID NO: 1520329 - RNA, 19 nt, Homo sapiens
  misc_RNA (1)...(19): siRNA sense strand
aagauggugacaauccuua

SEQ ID NO: 1520330 - RNA, 19 nt, Homo sapiens
  misc_RNA (1)...(19): siRNA sense strand
ucgcugcccucauggacuu

SEQ ID NO: 1520331 - RNA, 19 nt, Homo sapiens
  misc_RNA (1)...(19): siRNA sense strand
agaauaaagagauguugga

SEQ ID NO: 1520332 - RNA, 19 nt, Homo sapiens
  misc_RNA (1)...(19): siRNA sense strand
guggccgucuacaaucuuu

SEQ ID NO: 1520333 - RNA, 19 nt, Homo sapiens
  misc_RNA (1)...(19): siRNA sense strand
guuguggaaaucuuaauug

SEQ ID NO: 1520334 - RNA, 19 nt, Homo sapiens
  misc_RNA (1)...(19): siRNA sense strand
gcucggaauuaucuuuuga

SEQ ID NO: 1520335 - RNA, 19 nt, Homo sapiens
  misc_RNA (1)...(19): siRNA sense strand
gcccagaaucucguguuaa

SEQ ID NO: 1520336 - RNA, 19 nt, Homo sapiens
  misc_RNA (1)...(19): siRNA sense strand
caaggcagucgaagagaca

SEQ ID NO: 1520337 - RNA, 19 nt, Homo sapiens
  misc_RNA (1)...(19): siRNA sense strand
gagaagaauaaagagaugu

SEQ ID NO: 1520338 - RNA, 19 nt, Homo sapiens
  misc_RNA (1)...(19): siRNA sense strand
cacaacaagcuccaacuca

SEQ ID NO: 1520339 - RNA, 19 nt, Homo sapiens
  misc_RNA (1)...(19): siRNA sense strand
gagccucucaugaccuaug

SEQ ID NO: 1520340 - RNA, 19 nt, Homo sapiens
  misc_RNA (1)...(19): siRNA sense strand
agacaaggccagagaacca

SEQ ID NO: 1520341 - RNA, 19 nt, Homo sapiens
  misc_RNA (1)...(19): siRNA sense strand
cagaauauuguuguggaaa

SEQ ID NO: 1520342 - RNA, 19 nt, Homo sapiens
  misc_RNA (1)...(19): siRNA sense strand
cuggagaauucugcagauu

SEQ ID NO: 1520343 - RNA, 19 nt, Homo sapiens
  misc_RNA (1)...(19): siRNA sense strand
guauccgugugaagcagaa

SEQ ID NO: 1520344 - RNA, 19 nt, Homo sapiens
  misc_RNA (1)...(19): siRNA sense strand
uuucauuguuccagccaaa

SEQ ID NO: 1520345 - RNA, 19 nt, Homo sapiens
  misc_RNA (1)...(19): siRNA sense strand
uggagaauucugcagauug

SEQ ID NO: 1520346 - RNA, 19 nt, Homo sapiens
  misc_RNA (1)...(19): siRNA sense strand
caaacugccagagaagaau

SEQ ID NO: 1520347 - RNA, 19 nt, Homo sapiens
  misc_RNA (1)...(19): siRNA sense strand
uggugaaacacuuaacaaa

SEQ ID NO: 1520348 - RNA, 19 nt, Homo sapiens
  misc_RNA (1)...(19): siRNA sense strand
ugaugaggccacaggaaga

SEQ ID NO: 1520349 - RNA, 19 nt, Homo sapiens
  misc_RNA (1)...(19): siRNA sense strand
ccacaacaagcuccaacuc

SEQ ID NO: 1520350 - RNA, 19 nt, Homo sapiens
  misc_RNA (1)...(19): siRNA sense strand
ccuggagaauucugcagau

SEQ ID NO: 1520351 - RNA, 19 nt, Homo sapiens
  misc_RNA (1)...(19): siRNA sense strand
caccaaggcagucgaagag

SEQ ID NO: 1520352 - RNA, 19 nt, Homo sapiens
  misc_RNA (1)...(19): siRNA sense strand
gcaccugacucaaauguua

SEQ ID NO: 1520353 - RNA, 19 nt, Homo sapiens
  misc_RNA (1)...(19): siRNA sense strand
gagagaagcccuacaaaua

SEQ ID NO: 1520354 - RNA, 19 nt, Homo sapiens
  misc_RNA (1)...(19): siRNA sense strand
gaauaucgcuggccucauu

SEQ ID NO: 1520355 - RNA, 19 nt, Homo sapiens
  misc_RNA (1)...(19): siRNA sense strand
gagaacaucuuuacucuga

SEQ ID NO: 1520356 - RNA, 19 nt, Homo sapiens
  misc_RNA (1)...(19): siRNA sense strand
caaccgaaauucauccuua

SEQ ID NO: 1520357 - RNA, 19 nt, Homo sapiens
  misc_RNA (1)...(19): siRNA sense strand
ggaaauccuucaacagaaa

SEQ ID NO: 1520358 - RNA, 19 nt, Homo sapiens
  misc_RNA (1)...(19): siRNA sense strand
aaacggaacucuucucuug

SEQ ID NO: 1520359 - RNA, 19 nt, Homo sapiens
  misc_RNA (1)...(19): siRNA sense strand
gagagaagccuuauacuug

SEQ ID NO: 1520360 - RNA, 19 nt, Homo sapiens
  misc_RNA (1)...(19): siRNA sense strand
ggaagcaauuugugaauau

SEQ ID NO: 1520361 - RNA, 19 nt, Homo sapiens
  misc_RNA (1)...(19): siRNA sense strand
uaagagaacuggugacaau

SEQ ID NO: 1520362 - RNA, 19 nt, Homo sapiens
  misc_RNA (1)...(19): siRNA sense strand
ggaaaguccuucuccaaga

SEQ ID NO: 1520363 - RNA, 19 nt, Homo sapiens
  misc_RNA (1)...(19): siRNA sense strand
ggagaaacccuaugaaugu

SEQ ID NO: 1520364 - RNA, 19 nt, Homo sapiens
  misc_RNA (1)...(19): siRNA sense strand
gaagaaauccagugagaga

SEQ ID NO: 1520365 - RNA, 19 nt, Homo sapiens
  misc_RNA (1)...(19): siRNA sense strand
caaauacccugaaaguguu

SEQ ID NO: 1520366 - RNA, 19 nt, Homo sapiens
  misc_RNA (1)...(19): siRNA sense strand
cagaaacucucaccucauu

SEQ ID NO: 1520367 - RNA, 19 nt, Homo sapiens
  misc_RNA (1)...(19): siRNA sense strand
acucugagcucaucgcuua

SEQ ID NO: 1520368 - RNA, 19 nt, Homo sapiens
  misc_RNA (1)...(19): siRNA sense strand
ggaaaaggcuucaaccauu

SEQ ID NO: 1520369 - RNA, 19 nt, Homo sapiens
  misc_RNA (1)...(19): siRNA sense strand
gagaaacccuaugaaugua

SEQ ID NO: 1520370 - RNA, 19 nt, Homo sapiens
  misc_RNA (1)...(19): siRNA sense strand
gagagaagcccuaugaaug

SEQ ID NO: 1520371 - RNA, 19 nt, Homo sapiens
  misc_RNA (1)...(19): siRNA sense strand
cgagaaaccuuaugaaugc

SEQ ID NO: 1520372 - RNA, 19 nt, Homo sapiens
  misc_RNA (1)...(19): siRNA sense strand
gaaacccuaugaauguaaa

SEQ ID NO: 1520373 - RNA, 19 nt, Homo sapiens
  misc_RNA (1)...(19): siRNA sense strand
gagaagccuuauacuugua

SEQ ID NO: 1520374 - RNA, 19 nt, Homo sapiens
  misc_RNA (1)...(19): siRNA sense strand
gaaguacccugugauguag

SEQ ID NO: 1520375 - RNA, 19 nt, Homo sapiens
  misc_RNA (1)...(19): siRNA sense strand
ggagagaagccuuauacuu

SEQ ID NO: 1520376 - RNA, 19 nt, Homo sapiens
  misc_RNA (1)...(19): siRNA sense strand
gggaaauccuucaacagaa

SEQ ID NO: 1520377 - RNA, 19 nt, Homo sapiens
  misc_RNA (1)...(19): siRNA sense strand
ccauauagauguaacgaau

SEQ ID NO: 1520378 - RNA, 19 nt, Homo sapiens
  misc_RNA (1)...(19): siRNA sense strand
gggaaacccuucacugaca

SEQ ID NO: 1520379 - RNA, 19 nt, Homo sapiens
  misc_RNA (1)...(19): siRNA sense strand
gagaagcccuaugagugua

SEQ ID NO: 1520380 - RNA, 19 nt, Homo sapiens
  misc_RNA (1)...(19): siRNA sense strand
gagaagcccuaugagugua

SEQ ID NO: 1520381 - RNA, 19 nt, Homo sapiens
  misc_RNA (1)...(19): siRNA sense strand
gaaauccagugagagagaa

SEQ ID NO: 1520382 - RNA, 19 nt, Homo sapiens
  misc_RNA (1)...(19): siRNA sense strand
gaaaucguaugaagguaag

SEQ ID NO: 1520383 - RNA, 19 nt, Homo sapiens
  misc_RNA (1)...(19): siRNA sense strand
agaaguacccugugaugua

SEQ ID NO: 1520384 - RNA, 19 nt, Homo sapiens
  misc_RNA (1)...(19): siRNA sense strand
gcgagaaaccuuaugaaug

SEQ ID NO: 1520385 - RNA, 19 nt, Homo sapiens
  misc_RNA (1)...(19): siRNA sense strand
ggagagaagcccuaugaau

SEQ ID NO: 1520386 - RNA, 19 nt, Homo sapiens
  misc_RNA (1)...(19): siRNA sense strand
ggaaguuauucauggaaga

SEQ ID NO: 1520387 - RNA, 19 nt, Homo sapiens
  misc_RNA (1)...(19): siRNA sense strand
ggagagaaacaauauagau

SEQ ID NO: 1520388 - RNA, 19 nt, Homo sapiens
  misc_RNA (1)...(19): siRNA sense strand
acaaauacccugaaagugu

SEQ ID NO: 1520389 - RNA, 19 nt, Homo sapiens
  misc_RNA (1)...(19): siRNA sense strand
gggagaaacccuaugaaug

SEQ ID NO: 1520390 - RNA, 19 nt, Homo sapiens
  misc_RNA (1)...(19): siRNA sense strand
ggcaagaaaucguaugaag

SEQ ID NO: 1520391 - RNA, 19 nt, Homo sapiens
  misc_RNA (1)...(19): siRNA sense strand
uaaagaauguggcaagacu

SEQ ID NO: 1520392 - RNA, 19 nt, Homo sapiens
  misc_RNA (1)...(19): siRNA sense strand
acugacaucucccaccuua

SEQ ID NO: 1520393 - RNA, 19 nt, Homo sapiens
  misc_RNA (1)...(19): siRNA sense strand
guaaaugugggaaagcuuu

SEQ ID NO: 1520394 - RNA, 19 nt, Homo sapiens
  misc_RNA (1)...(19): siRNA sense strand
caagaaaucguaugaaggu

SEQ ID NO: 1520395 - RNA, 19 nt, Homo sapiens
  misc_RNA (1)...(19): siRNA sense strand
gagagaaacaauauagaug

SEQ ID NO: 1520396 - RNA, 19 nt, Homo sapiens
  misc_RNA (1)...(19): siRNA sense strand
gaaccaggagggacacuug

SEQ ID NO: 1520397 - RNA, 19 nt, Homo sapiens
  misc_RNA (1)...(19): siRNA sense strand
agagaguucuggcaacaaa

SEQ ID NO: 1520398 - RNA, 19 nt, Homo sapiens
  misc_RNA (1)...(19): siRNA sense strand
gagggacacuugaggcaau

SEQ ID NO: 1520399 - RNA, 19 nt, Homo sapiens
  misc_RNA (1)...(19): siRNA sense strand
guacaucagaggcuccaua

SEQ ID NO: 1520400 - RNA, 19 nt, Homo sapiens
  misc_RNA (1)...(19): siRNA sense strand
gaaacucucaccucauugu

SEQ ID NO: 1520401 - RNA, 19 nt, Homo sapiens
  misc_RNA (1)...(19): siRNA sense strand
gaaaaggcuucaaccauuc

SEQ ID NO: 1520402 - RNA, 19 nt, Homo sapiens
  misc_RNA (1)...(19): siRNA sense strand
agagagaaguacccuguga

SEQ ID NO: 1520403 - RNA, 19 nt, Homo sapiens
  misc_RNA (1)...(19): siRNA sense strand
gaacucuucucuuguuuug

SEQ ID NO: 1520404 - RNA, 19 nt, Homo sapiens
  misc_RNA (1)...(19): siRNA sense strand
ggagagcaacccauggaaa

SEQ ID NO: 1520405 - RNA, 19 nt, Homo sapiens
  misc_RNA (1)...(19): siRNA sense strand
agagaagccuuauacuugu

SEQ ID NO: 1520406 - RNA, 19 nt, Homo sapiens
  misc_RNA (1)...(19): siRNA sense strand
gaagcaauuugugaauauc

SEQ ID NO: 1520407 - RNA, 19 nt, Homo sapiens
  misc_RNA (1)...(19): siRNA sense strand
cguaugaagguaagaauuu

SEQ ID NO: 1520408 - RNA, 19 nt, Homo sapiens
  misc_RNA (1)...(19): siRNA sense strand
ggacucaggaagcaauuug

SEQ ID NO: 1520409 - RNA, 19 nt, Homo sapiens
  misc_RNA (1)...(19): siRNA sense strand
caggagagaagcccuauga

SEQ ID NO: 1520410 - RNA, 19 nt, Homo sapiens
  misc_RNA (1)...(19): siRNA sense strand
gagaacuggugacaaugau

SEQ ID NO: 1520411 - RNA, 19 nt, Homo sapiens
  misc_RNA (1)...(19): siRNA sense strand
caagaacuacaaccugauu

SEQ ID NO: 1520412 - RNA, 19 nt, Homo sapiens
  misc_RNA (1)...(19): siRNA sense strand
gagagugcguaccucauca

SEQ ID NO: 1520413 - RNA, 19 nt, Homo sapiens
  misc_RNA (1)...(19): siRNA sense strand
cuacaaauacccugaaagu

SEQ ID NO: 1520414 - RNA, 19 nt, Homo sapiens
  misc_RNA (1)...(19): siRNA sense strand
aggaagcaauuugugaaua

SEQ ID NO: 1520415 - RNA, 19 nt, Homo sapiens
  misc_RNA (1)...(19): siRNA sense strand
ccauaucaguguccagaau

SEQ ID NO: 1520416 - RNA, 19 nt, Homo sapiens
  misc_RNA (1)...(19): siRNA sense strand
ugacacagcaccagagaau

SEQ ID NO: 1520417 - RNA, 19 nt, Homo sapiens
  misc_RNA (1)...(19): siRNA sense strand
gaaguuauucauggaagaa

SEQ ID NO: 1520418 - RNA, 19 nt, Homo sapiens
  misc_RNA (1)...(19): siRNA sense strand
ccaugcaccugacucaaau

SEQ ID NO: 1520419 - RNA, 19 nt, Homo sapiens
  misc_RNA (1)...(19): siRNA sense strand
gaacucacaccggagagaa

SEQ ID NO: 1520420 - RNA, 19 nt, Homo sapiens
  misc_RNA (1)...(19): siRNA sense strand
gaauguggcaagacuuuca

SEQ ID NO: 1520421 - RNA, 19 nt, Homo sapiens
  misc_RNA (1)...(19): siRNA sense strand
ggaaacccuucacugacau

SEQ ID NO: 1520422 - RNA, 19 nt, Homo sapiens
  misc_RNA (1)...(19): siRNA sense strand
caucagaggcuccauagca

SEQ ID NO: 1520423 - RNA, 19 nt, Homo sapiens
  misc_RNA (1)...(19): siRNA sense strand
ccagagaauucacacuaag

SEQ ID NO: 1520424 - RNA, 19 nt, Homo sapiens
  misc_RNA (1)...(19): siRNA sense strand
gaaguggaaagauucacaa

SEQ ID NO: 1520425 - RNA, 19 nt, Homo sapiens
  misc_RNA (1)...(19): siRNA sense strand
caaccagugucagaaacuu

SEQ ID NO: 1520426 - RNA, 19 nt, Homo sapiens
  misc_RNA (1)...(19): siRNA sense strand
caccagagaauucacacua

SEQ ID NO: 1520427 - RNA, 19 nt, Homo sapiens
  misc_RNA (1)...(19): siRNA sense strand
gauaagagaacuggugaca

SEQ ID NO: 1520428 - RNA, 19 nt, Homo sapiens
  misc_RNA (1)...(19): siRNA sense strand
caucagaggauucauacug

SEQ ID NO: 1520429 - RNA, 19 nt, Homo sapiens
  misc_RNA (1)...(19): siRNA sense strand
cgggaaauccuucaacaga

SEQ ID NO: 1520430 - RNA, 19 nt, Homo sapiens
  misc_RNA (1)...(19): siRNA sense strand
gugggaaacccuucacuga

SEQ ID NO: 1520431 - RNA, 19 nt, Homo sapiens
  misc_RNA (1)...(19): siRNA sense strand
acacaggcgagaaaccuua

SEQ ID NO: 1520432 - RNA, 19 nt, Homo sapiens
  misc_RNA (1)...(19): siRNA sense strand
gagaagcccuaugaaugca

SEQ ID NO: 1520433 - RNA, 19 nt, Homo sapiens
  misc_RNA (1)...(19): siRNA sense strand
gaggcaagaaaucguauga

SEQ ID NO: 1520434 - RNA, 19 nt, Homo sapiens
  misc_RNA (1)...(19): siRNA sense strand
gagagagaagcccuacaaa

SEQ ID NO: 1520435 - RNA, 19 nt, Homo sapiens
  misc_RNA (1)...(19): siRNA sense strand
ccagcuauccuaaaaguua

SEQ ID NO: 1520436 - RNA, 19 nt, Homo sapiens
  misc_RNA (1)...(19): siRNA sense strand
gcuccugucugaccaagca

SEQ ID NO: 1520437 - RNA, 19 nt, Homo sapiens
  misc_RNA (1)...(19): siRNA sense strand
caucaggcaucagaggauu

SEQ ID NO: 1520438 - RNA, 19 nt, Homo sapiens
  misc_RNA (1)...(19): siRNA sense strand
ugacaucucccaccuuaca

SEQ ID NO: 1520439 - RNA, 19 nt, Homo sapiens
  misc_RNA (1)...(19): siRNA sense strand
aaccgaaauucauccuuaa

SEQ ID NO: 1520440 - RNA, 19 nt, Homo sapiens
  misc_RNA (1)...(19): siRNA sense strand
agaaaucguaugaagguaa

SEQ ID NO: 1520441 - RNA, 19 nt, Homo sapiens
  misc_RNA (1)...(19): siRNA sense strand
aaagaggcaagaaaucgua

SEQ ID NO: 1520442 - RNA, 19 nt, Homo sapiens
  misc_RNA (1)...(19): siRNA sense strand
ugagagagaagcccuacaa

SEQ ID NO: 1520443 - RNA, 19 nt, Homo sapiens
  misc_RNA (1)...(19): siRNA sense strand
acacagcaccagagaauuc

SEQ ID NO: 1520444 - RNA, 19 nt, Homo sapiens
  misc_RNA (1)...(19): siRNA sense strand
gaaaccagggacucaggaa

SEQ ID NO: 1520445 - RNA, 19 nt, Homo sapiens
  misc_RNA (1)...(19): siRNA sense strand
gaguguagcaaauguggaa

SEQ ID NO: 1520446 - RNA, 19 nt, Homo sapiens
  misc_RNA (1)...(19): siRNA sense strand
gaauguggcaaaugcuuca

SEQ ID NO: 1520447 - RNA, 19 nt, Homo sapiens
  misc_RNA (1)...(19): siRNA sense strand
ugagaagcccuaugagugu

SEQ ID NO: 1520448 - RNA, 19 nt, Homo sapiens
  misc_RNA (1)...(19): siRNA sense strand
ugagaagcccuaugagugu

SEQ ID NO: 1520449 - RNA, 19 nt, Homo sapiens
  misc_RNA (1)...(19): siRNA sense strand
acggaacucuucucuuguu

SEQ ID NO: 1520450 - RNA, 19 nt, Homo sapiens
  misc_RNA (1)...(19): siRNA sense strand
ugaccaagcaccagagaau

SEQ ID NO: 1520451 - RNA, 19 nt, Homo sapiens
  misc_RNA (1)...(19): siRNA sense strand
gagcucaucccuuguucga

SEQ ID NO: 1520452 - RNA, 19 nt, Homo sapiens
  misc_RNA (1)...(19): siRNA sense strand
gaagagaagaaaccacuua

SEQ ID NO: 1520453 - RNA, 19 nt, Homo sapiens
  misc_RNA (1)...(19): siRNA sense strand
gaagaaaccacuuacagaa

SEQ ID NO: 1520454 - RNA, 19 nt, Homo sapiens
  misc_RNA (1)...(19): siRNA sense strand
ggaauauacuggucaauag

SEQ ID NO: 1520455 - RNA, 19 nt, Homo sapiens
  misc_RNA (1)...(19): siRNA sense strand
caacugaccucuuccaaac

SEQ ID NO: 1520456 - RNA, 19 nt, Homo sapiens
  misc_RNA (1)...(19): siRNA sense strand
ccacauggaucggcaaaga

SEQ ID NO: 1520457 - RNA, 19 nt, Homo sapiens
  misc_RNA (1)...(19): siRNA sense strand
aaacaucauucgccuagaa

SEQ ID NO: 1520458 - RNA, 19 nt, Homo sapiens
  misc_RNA (1)...(19): siRNA sense strand
aaacuguacuggcuuaaug

SEQ ID NO: 1520459 - RNA, 19 nt, Homo sapiens
  misc_RNA (1)...(19): siRNA sense strand
gaucccaguugccauuaaa

SEQ ID NO: 1520460 - RNA, 19 nt, Homo sapiens
  misc_RNA (1)...(19): siRNA sense strand
gaagagauuuucuaagaga

SEQ ID NO: 1520461 - RNA, 19 nt, Homo sapiens
  misc_RNA (1)...(19): siRNA sense strand
aagagaagcuaguaucaug

SEQ ID NO: 1520462 - RNA, 19 nt, Homo sapiens
  misc_RNA (1)...(19): siRNA sense strand
gagaauggaucccuagacu

SEQ ID NO: 1520463 - RNA, 19 nt, Homo sapiens
  misc_RNA (1)...(19): siRNA sense strand
agaaaccacuuacagaaug

SEQ ID NO: 1520464 - RNA, 19 nt, Homo sapiens
  misc_RNA (1)...(19): siRNA sense strand
ccucugcuauucugcauaa

SEQ ID NO: 1520465 - RNA, 19 nt, Homo sapiens
  misc_RNA (1)...(19): siRNA sense strand
cauccucacuuuauucuuc

SEQ ID NO: 1520466 - RNA, 19 nt, Homo sapiens
  misc_RNA (1)...(19): siRNA sense strand
uaaugauugugguggaaua

SEQ ID NO: 1520467 - RNA, 19 nt, Homo sapiens
  misc_RNA (1)...(19): siRNA sense strand
uggaauauauggagaaugg

SEQ ID NO: 1520468 - RNA, 19 nt, Homo sapiens
  misc_RNA (1)...(19): siRNA sense strand
caucaggcaugaaguaucu

SEQ ID NO: 1520469 - RNA, 19 nt, Homo sapiens
  misc_RNA (1)...(19): siRNA sense strand
uacaacaacugaccucuuc

SEQ ID NO: 1520470 - RNA, 19 nt, Homo sapiens
  misc_RNA (1)...(19): siRNA sense strand
gaaaccacuuacagaaugg

SEQ ID NO: 1520471 - RNA, 19 nt, Homo sapiens
  misc_RNA (1)...(19): siRNA sense strand
acacuuaaccucugcuauu

SEQ ID NO: 1520472 - RNA, 19 nt, Homo sapiens
  misc_RNA (1)...(19): siRNA sense strand
gauggccacuucacaguca

SEQ ID NO: 1520473 - RNA, 19 nt, Homo sapiens
  misc_RNA (1)...(19): siRNA sense strand
gcagaccaguaaugauugu

SEQ ID NO: 1520474 - RNA, 19 nt, Homo sapiens
  misc_RNA (1)...(19): siRNA sense strand
ugacauggcagcagaacaa

SEQ ID NO: 1520475 - RNA, 19 nt, Homo sapiens
  misc_RNA (1)...(19): siRNA sense strand
ggaagaugauccagaagcu

SEQ ID NO: 1520476 - RNA, 19 nt, Homo sapiens
  misc_RNA (1)...(19): siRNA sense strand
gcaugaaguaucuuucuga

SEQ ID NO: 1520477 - RNA, 19 nt, Homo sapiens
  misc_RNA (1)...(19): siRNA sense strand
gaauucguauugagagagu

SEQ ID NO: 1520478 - RNA, 19 nt, Homo sapiens
  misc_RNA (1)...(19): siRNA sense strand
ccuagcggcucggaauaua

SEQ ID NO: 1520479 - RNA, 19 nt, Homo sapiens
  misc_RNA (1)...(19): siRNA sense strand
aagccaagaugaagucaga

SEQ ID NO: 1520480 - RNA, 19 nt, Homo sapiens
  misc_RNA (1)...(19): siRNA sense strand
uccaaacucuaacacuuaa

SEQ ID NO: 1520481 - RNA, 19 nt, Homo sapiens
  misc_RNA (1)...(19): siRNA sense strand
cggaauauacuggucaaua

SEQ ID NO: 1520482 - RNA, 19 nt, Homo sapiens
  misc_RNA (1)...(19): siRNA sense strand
ugauugugguggaauauau

SEQ ID NO: 1520483 - RNA, 19 nt, Homo sapiens
  misc_RNA (1)...(19): siRNA sense strand
gagaagaaaccacuuacag

SEQ ID NO: 1520484 - RNA, 19 nt, Homo sapiens
  misc_RNA (1)...(19): siRNA sense strand
gcagaacaaggacagauuc

SEQ ID NO: 1520485 - RNA, 19 nt, Homo sapiens
  misc_RNA (1)...(19): siRNA sense strand
gucaauagcaacuuaguau

SEQ ID NO: 1520486 - RNA, 19 nt, Homo sapiens
  misc_RNA (1)...(19): siRNA sense strand
gaaagguggccacauggau

SEQ ID NO: 1520487 - RNA, 19 nt, Homo sapiens
  misc_RNA (1)...(19): siRNA sense strand
cagaagagaagagaagaaa

SEQ ID NO: 1520488 - RNA, 19 nt, Homo sapiens
  misc_RNA (1)...(19): siRNA sense strand
ggacagauucucgugauag

SEQ ID NO: 1520489 - RNA, 19 nt, Homo sapiens
  misc_RNA (1)...(19): siRNA sense strand
uuacauugauccagauaca

SEQ ID NO: 1520490 - RNA, 19 nt, Homo sapiens
  misc_RNA (1)...(19): siRNA sense strand
ggucaauagcaacuuagua

SEQ ID NO: 1520491 - RNA, 19 nt, Homo sapiens
  misc_RNA (1)...(19): siRNA sense strand
acauugauccagauacaua

SEQ ID NO: 1520492 - RNA, 19 nt, Homo sapiens
  misc_RNA (1)...(19): siRNA sense strand
gaagucagaagagaagaga

SEQ ID NO: 1520493 - RNA, 19 nt, Homo sapiens
  misc_RNA (1)...(19): siRNA sense strand
gaucggcaaagaagagauu

SEQ ID NO: 1520494 - RNA, 19 nt, Homo sapiens
  misc_RNA (1)...(19): siRNA sense strand
gaaaagagagaucccaguu

SEQ ID NO: 1520495 - RNA, 19 nt, Homo sapiens
  misc_RNA (1)...(19): siRNA sense strand
agaagaaaccacuuacaga

SEQ ID NO: 1520496 - RNA, 19 nt, Homo sapiens
  misc_RNA (1)...(19): siRNA sense strand
ccuagcaguccaugaauuu

SEQ ID NO: 1520497 - RNA, 19 nt, Homo sapiens
  misc_RNA (1)...(19): siRNA sense strand
gaauauauggagaauggau

SEQ ID NO: 1520498 - RNA, 19 nt, Homo sapiens
  misc_RNA (1)...(19): siRNA sense strand
uggcagaccaguaaugauu

SEQ ID NO: 1520499 - RNA, 19 nt, Homo sapiens
  misc_RNA (1)...(19): siRNA sense strand
gcaggugaauuuggagaag

SEQ ID NO: 1520500 - RNA, 19 nt, Homo sapiens
  misc_RNA (1)...(19): siRNA sense strand
ugauauggguuauguucau

SEQ ID NO: 1520501 - RNA, 19 nt, Homo sapiens
  misc_RNA (1)...(19): siRNA sense strand
uuugaaagguggccacaug

SEQ ID NO: 1520502 - RNA, 19 nt, Homo sapiens
  misc_RNA (1)...(19): siRNA sense strand
gaagagaagagaagaaacc

SEQ ID NO: 1520503 - RNA, 19 nt, Homo sapiens
  misc_RNA (1)...(19): siRNA sense strand
caugaaguaucuuucugau

SEQ ID NO: 1520504 - RNA, 19 nt, Homo sapiens
  misc_RNA (1)...(19): siRNA sense strand
gaugaagucagaagagaag

SEQ ID NO: 1520505 - RNA, 19 nt, Homo sapiens
  misc_RNA (1)...(19): siRNA sense strand
cuuccaaacucuaacacuu

SEQ ID NO: 1520506 - RNA, 19 nt, Homo sapiens
  misc_RNA (1)...(19): siRNA sense strand
acuggucaauagcaacuua

SEQ ID NO: 1520507 - RNA, 19 nt, Homo sapiens
  misc_RNA (1)...(19): siRNA sense strand
aagaugaagucagaagaga

SEQ ID NO: 1520508 - RNA, 19 nt, Homo sapiens
  misc_RNA (1)...(19): siRNA sense strand
gauauggguuauguucauc

SEQ ID NO: 1520509 - RNA, 19 nt, Homo sapiens
  misc_RNA (1)...(19): siRNA sense strand
gaccuagcggcucggaaua

SEQ ID NO: 1520510 - RNA, 19 nt, Homo sapiens
  misc_RNA (1)...(19): siRNA sense strand
acaaaacuguacuggcuua

SEQ ID NO: 1520511 - RNA, 19 nt, Homo sapiens
  misc_RNA (1)...(19): siRNA sense strand
gagaucccaguugccauua

SEQ ID NO: 1520512 - RNA, 19 nt, Homo sapiens
  misc_RNA (1)...(19): siRNA sense strand
cacuuaaccucugcuauuc

SEQ ID NO: 1520513 - RNA, 19 nt, Homo sapiens
  misc_RNA (1)...(19): siRNA sense strand
gacucuccauuucaaguga

SEQ ID NO: 1520514 - RNA, 19 nt, Homo sapiens
  misc_RNA (1)...(19): siRNA sense strand
ggcauugcaucaggcauga

SEQ ID NO: 1520515 - RNA, 19 nt, Homo sapiens
  misc_RNA (1)...(19): siRNA sense strand
gguggaauauauggagaau

SEQ ID NO: 1520516 - RNA, 19 nt, Homo sapiens
  misc_RNA (1)...(19): siRNA sense strand
uuccaaacucuaacacuua

SEQ ID NO: 1520517 - RNA, 19 nt, Homo sapiens
  misc_RNA (1)...(19): siRNA sense strand
ggcaugaaguaucuuucug

SEQ ID NO: 1520518 - RNA, 19 nt, Homo sapiens
  misc_RNA (1)...(19): siRNA sense strand
caauagcaacuuaguaugc

SEQ ID NO: 1520519 - RNA, 19 nt, Homo sapiens
  misc_RNA (1)...(19): siRNA sense strand
caagaugaagucagaagag

SEQ ID NO: 1520520 - RNA, 19 nt, Homo sapiens
  misc_RNA (1)...(19): siRNA sense strand
guaugcaaaguuucugauu

SEQ ID NO: 1520521 - RNA, 19 nt, Homo sapiens
  misc_RNA (1)...(19): siRNA sense strand
ccaagaugaagucagaaga

SEQ ID NO: 1520522 - RNA, 19 nt, Homo sapiens
  misc_RNA (1)...(19): siRNA sense strand
acaacugaccucuuccaaa

SEQ ID NO: 1520523 - RNA, 19 nt, Homo sapiens
  misc_RNA (1)...(19): siRNA sense strand
cuaagagaagcuaguauca

SEQ ID NO: 1520524 - RNA, 19 nt, Homo sapiens
  misc_RNA (1)...(19): siRNA sense strand
gaauuuggagaagucugua

SEQ ID NO: 1520525 - RNA, 19 nt, Homo sapiens
  misc_RNA (1)...(19): siRNA sense strand
aagaauucguauugagaga

SEQ ID NO: 1520526 - RNA, 19 nt, Homo sapiens
  misc_RNA (1)...(19): siRNA sense strand
uccaugaauuugcaaagga

SEQ ID NO: 1520527 - RNA, 19 nt, Homo sapiens
  misc_RNA (1)...(19): siRNA sense strand
ugauccagauacauaugaa

SEQ ID NO: 1520528 - RNA, 19 nt, Homo sapiens
  misc_RNA (1)...(19): siRNA sense strand
aaggacagauucucgugau

SEQ ID NO: 1520529 - RNA, 19 nt, Homo sapiens
  misc_RNA (1)...(19): siRNA sense strand
gaccucuuccaaacucuaa

SEQ ID NO: 1520530 - RNA, 19 nt, Homo sapiens
  misc_RNA (1)...(19): siRNA sense strand
uuucugauauggguuaugu

SEQ ID NO: 1520531 - RNA, 19 nt, Homo sapiens
  misc_RNA (1)...(19): siRNA sense strand
ucacagucauccaguuggu

SEQ ID NO: 1520532 - RNA, 19 nt, Homo sapiens
  misc_RNA (1)...(19): siRNA sense strand
cauggcagcagaacaagga

SEQ ID NO: 1520533 - RNA, 19 nt, Homo sapiens
  misc_RNA (1)...(19): siRNA sense strand
aagaaaccacuuacagaau

SEQ ID NO: 1520534 - RNA, 19 nt, Homo sapiens
  misc_RNA (1)...(19): siRNA sense strand
ccucgucauccucacuuua

SEQ ID NO: 1520535 - RNA, 19 nt, Homo sapiens
  misc_RNA (1)...(19): siRNA sense strand
uguacuggcuuaaugaaaa

SEQ ID NO: 1520536 - RNA, 19 nt, Homo sapiens
  misc_RNA (1)...(19): siRNA sense strand
aggacagauucucgugaua

SEQ ID NO: 1520537 - RNA, 19 nt, Homo sapiens
  misc_RNA (1)...(19): siRNA sense strand
gcuccgaggcauugcauca

SEQ ID NO: 1520538 - RNA, 19 nt, Homo sapiens
  misc_RNA (1)...(19): siRNA sense strand
agagaucccaguugccauu

SEQ ID NO: 1520539 - RNA, 19 nt, Homo sapiens
  misc_RNA (1)...(19): siRNA sense strand
gacagauucucgugauagc

SEQ ID NO: 1520540 - RNA, 19 nt, Homo sapiens
  misc_RNA (1)...(19): siRNA sense strand
guacauaaaagccaagaug

SEQ ID NO: 1520541 - RNA, 19 nt, Homo sapiens
  misc_RNA (1)...(19): siRNA sense strand
guagugggcguuugaagac

SEQ ID NO: 1520542 - RNA, 19 nt, Homo sapiens
  misc_RNA (1)...(19): siRNA sense strand
cuuaaccucugcuauucug

SEQ ID NO: 1520543 - RNA, 19 nt, Homo sapiens
  misc_RNA (1)...(19): siRNA sense strand
uaacacuuaaccucugcua

SEQ ID NO: 1520544 - RNA, 19 nt, Homo sapiens
  misc_RNA (1)...(19): siRNA sense strand
gaauauacuggucaauagc

SEQ ID NO: 1520545 - RNA, 19 nt, Homo sapiens
  misc_RNA (1)...(19): siRNA sense strand
caaacaucauucgccuaga

SEQ ID NO: 1520546 - RNA, 19 nt, Homo sapiens
  misc_RNA (1)...(19): siRNA sense strand
uaagagaagcuaguaucau

SEQ ID NO: 1520547 - RNA, 19 nt, Homo sapiens
  misc_RNA (1)...(19): siRNA sense strand
gaagacaccagggaaaaga

SEQ ID NO: 1520548 - RNA, 19 nt, Homo sapiens
  misc_RNA (1)...(19): siRNA sense strand
cccuagcaguccaugaauu

SEQ ID NO: 1520549 - RNA, 19 nt, Homo sapiens
  misc_RNA (1)...(19): siRNA sense strand
aauagcaacuuaguaugca

SEQ ID NO: 1520550 - RNA, 19 nt, Homo sapiens
  misc_RNA (1)...(19): siRNA sense strand
gaccauccaaacaucauuc

SEQ ID NO: 1520551 - RNA, 19 nt, Homo sapiens
  misc_RNA (1)...(19): siRNA sense strand
ucagaagagaagagaagaa

SEQ ID NO: 1520552 - RNA, 19 nt, Homo sapiens
  misc_RNA (1)...(19): siRNA sense strand
gaaccuggcuuuacaccua

SEQ ID NO: 1520553 - RNA, 19 nt, Homo sapiens
  misc_RNA (1)...(19): siRNA sense strand
gaaaguacgcugggucuga

SEQ ID NO: 1520554 - RNA, 19 nt, Homo sapiens
  misc_RNA (1)...(19): siRNA sense strand
caugagggccacagagaaa

SEQ ID NO: 1520555 - RNA, 19 nt, Homo sapiens
  misc_RNA (1)...(19): siRNA sense strand
gccugaaccuggcuuuaca

SEQ ID NO: 1520556 - RNA, 19 nt, Homo sapiens
  misc_RNA (1)...(19): siRNA sense strand
ccacuagggucaggcaucu

SEQ ID NO: 1520557 - RNA, 19 nt, Homo sapiens
  misc_RNA (1)...(19): siRNA sense strand
ggccaaggcuggacaaaag

SEQ ID NO: 1520558 - RNA, 19 nt, Homo sapiens
  misc_RNA (1)...(19): siRNA sense strand
gagaaacugaggcccuguu

SEQ ID NO: 1520559 - RNA, 19 nt, Homo sapiens
  misc_RNA (1)...(19): siRNA sense strand
acugaggcccuguuuacua

SEQ ID NO: 1520560 - RNA, 19 nt, Homo sapiens
  misc_RNA (1)...(19): siRNA sense strand
gagggccacagagaaagua

SEQ ID NO: 1520561 - RNA, 19 nt, Homo sapiens
  misc_RNA (1)...(19): siRNA sense strand
cugaggcccuguuuacuac

SEQ ID NO: 1520562 - RNA, 19 nt, Homo sapiens
  misc_RNA (1)...(19): siRNA sense strand
cacaugagggccacagaga

SEQ ID NO: 1520563 - RNA, 19 nt, Homo sapiens
  misc_RNA (1)...(19): siRNA sense strand
gaggcccuguuuacuacug

SEQ ID NO: 1520564 - RNA, 19 nt, Homo sapiens
  misc_RNA (1)...(19): siRNA sense strand
gagauuuacaagggagaaa

SEQ ID NO: 1520565 - RNA, 19 nt, Homo sapiens
  misc_RNA (1)...(19): siRNA sense strand
ugagaggugucaggugucu

SEQ ID NO: 1520566 - RNA, 19 nt, Homo sapiens
  misc_RNA (1)...(19): siRNA sense strand
ggaaucaucuuucucauuu

SEQ ID NO: 1520567 - RNA, 19 nt, Homo sapiens
  misc_RNA (1)...(19): siRNA sense strand
guuagugucuuaccucauu

SEQ ID NO: 1520568 - RNA, 19 nt, Homo sapiens
  misc_RNA (1)...(19): siRNA sense strand
caagaaugauggugucagu

SEQ ID NO: 1520569 - RNA, 19 nt, Homo sapiens
  misc_RNA (1)...(19): siRNA sense strand
ucaaagcucuccguacugu

SEQ ID NO: 1520570 - RNA, 19 nt, Homo sapiens
  misc_RNA (1)...(19): siRNA sense strand
caucauugcuacuaacaca

SEQ ID NO: 1520571 - RNA, 19 nt, Homo sapiens
  misc_RNA (1)...(19): siRNA sense strand
acagguaccuugccaucaa

SEQ ID NO: 1520572 - RNA, 19 nt, Homo sapiens
  misc_RNA (1)...(19): siRNA sense strand
ccagagaggcccagggaaa

SEQ ID NO: 1520573 - RNA, 19 nt, Homo sapiens
  misc_RNA (1)...(19): siRNA sense strand
gcucaacccacucaucuau

SEQ ID NO: 1520574 - RNA, 19 nt, Homo sapiens
  misc_RNA (1)...(19): siRNA sense strand
gaaucaucuuucucauuug

SEQ ID NO: 1520575 - RNA, 19 nt, Homo sapiens
  misc_RNA (1)...(19): siRNA sense strand
ccacucaucuaugccuauu

SEQ ID NO: 1520576 - RNA, 19 nt, Homo sapiens
  misc_RNA (1)...(19): siRNA sense strand
ggauggcauuugucacuuc

SEQ ID NO: 1520577 - RNA, 19 nt, Homo sapiens
  misc_RNA (1)...(19): siRNA sense strand
ggcugugguuagugucuua

SEQ ID NO: 1520578 - RNA, 19 nt, Homo sapiens
  misc_RNA (1)...(19): siRNA sense strand
cuucaaagcucuccguacu

SEQ ID NO: 1520579 - RNA, 19 nt, Homo sapiens
  misc_RNA (1)...(19): siRNA sense strand
cagccaugcuccucuuugu

SEQ ID NO: 1520580 - RNA, 19 nt, Homo sapiens
  misc_RNA (1)...(19): siRNA sense strand
gggcagugcagcuucuuug

SEQ ID NO: 1520581 - RNA, 19 nt, Homo sapiens
  misc_RNA (1)...(19): siRNA sense strand
gcuccucuuugucuucuuc

SEQ ID NO: 1520582 - RNA, 19 nt, Homo sapiens
  misc_RNA (1)...(19): siRNA sense strand
uacugugucuguucucauu

SEQ ID NO: 1520583 - RNA, 19 nt, Homo sapiens
  misc_RNA (1)...(19): siRNA sense strand
gccagcagauucgaaagau

SEQ ID NO: 1520584 - RNA, 19 nt, Homo sapiens
  misc_RNA (1)...(19): siRNA sense strand
guccuggccucccucauca

SEQ ID NO: 1520585 - RNA, 19 nt, Homo sapiens
  misc_RNA (1)...(19): siRNA sense strand
ccugucacaucgucacuau

SEQ ID NO: 1520586 - RNA, 19 nt, Homo sapiens
  misc_RNA (1)...(19): siRNA sense strand
gacugcagcucuaccacau

SEQ ID NO: 1520587 - RNA, 19 nt, Homo sapiens
  misc_RNA (1)...(19): siRNA sense strand
ggagugucaccucuaccua

SEQ ID NO: 1520588 - RNA, 19 nt, Homo sapiens
  misc_RNA (1)...(19): siRNA sense strand
ccuuaucacuggcauugug

SEQ ID NO: 1520589 - RNA, 19 nt, Homo sapiens
  misc_RNA (1)...(19): siRNA sense strand
ccucauuccuccucuuucu

SEQ ID NO: 1520590 - RNA, 19 nt, Homo sapiens
  misc_RNA (1)...(19): siRNA sense strand
ccaggagugucaccucuac

SEQ ID NO: 1520591 - RNA, 19 nt, Homo sapiens
  misc_RNA (1)...(19): siRNA sense strand
aaucaucuuucucauuugg

SEQ ID NO: 1520592 - RNA, 19 nt, Homo sapiens
  misc_RNA (1)...(19): siRNA sense strand
gcgacaugcucaagauugc

SEQ ID NO: 1520593 - RNA, 19 nt, Homo sapiens
  misc_RNA (1)...(19): siRNA sense strand
ucaacccacucaucuaugc

SEQ ID NO: 1520594 - RNA, 19 nt, Homo sapiens
  misc_RNA (1)...(19): siRNA sense strand
gagaggcccagggaaaguu

SEQ ID NO: 1520595 - RNA, 19 nt, Homo sapiens
  misc_RNA (1)...(19): siRNA sense strand
ccagcagauucgaaagaug

SEQ ID NO: 1520596 - RNA, 19 nt, Homo sapiens
  misc_RNA (1)...(19): siRNA sense strand
ucaugcugaucaccuuuga

SEQ ID NO: 1520597 - RNA, 19 nt, Homo sapiens
  misc_RNA (1)...(19): siRNA sense strand
acucaucuaugccuauugg

SEQ ID NO: 1520598 - RNA, 19 nt, Homo sapiens
  misc_RNA (1)...(19): siRNA sense strand
uaucuccagcucagaguuu

SEQ ID NO: 1520599 - RNA, 19 nt, Homo sapiens
  misc_RNA (1)...(19): siRNA sense strand
uggcugugcugcuguugau

SEQ ID NO: 1520600 - RNA, 19 nt, Homo sapiens
  misc_RNA (1)...(19): siRNA sense strand
agucucugcuucaccuuga

SEQ ID NO: 1520601 - RNA, 19 nt, Homo sapiens
  misc_RNA (1)...(19): siRNA sense strand
gcggauggcauuugucacu

SEQ ID NO: 1520602 - RNA, 19 nt, Homo sapiens
  misc_RNA (1)...(19): siRNA sense strand
ggucaugcugaucaccuuu

SEQ ID NO: 1520603 - RNA, 19 nt, Homo sapiens
  misc_RNA (1)...(19): siRNA sense strand
aaagcucuccguacugugu

SEQ ID NO: 1520604 - RNA, 19 nt, Homo sapiens
  misc_RNA (1)...(19): siRNA sense strand
aaagggcagugcagcuucu

SEQ ID NO: 1520605 - RNA, 19 nt, Homo sapiens
  misc_RNA (1)...(19): siRNA sense strand
caccucauuccuccucuuu

SEQ ID NO: 1520606 - RNA, 19 nt, Homo sapiens
  misc_RNA (1)...(19): siRNA sense strand
ggacucccagcgacuucaa

SEQ ID NO: 1520607 - RNA, 19 nt, Homo sapiens
  misc_RNA (1)...(19): siRNA sense strand
aagcagcccuuccgcuacu

SEQ ID NO: 1520608 - RNA, 19 nt, Homo sapiens
  misc_RNA (1)...(19): siRNA sense strand
ugucacaucgucacuaucu

SEQ ID NO: 1520609 - RNA, 19 nt, Homo sapiens
  misc_RNA (1)...(19): siRNA sense strand
gccaugcuccucuuugucu

SEQ ID NO: 1520610 - RNA, 19 nt, Homo sapiens
  misc_RNA (1)...(19): siRNA sense strand
gaagucagauuguucuuua

SEQ ID NO: 1520611 - RNA, 19 nt, Homo sapiens
  misc_RNA (1)...(19): siRNA sense strand
gauauaaguugcuguugaa

SEQ ID NO: 1520612 - RNA, 19 nt, Homo sapiens
  misc_RNA (1)...(19): siRNA sense strand
gaagauuacagaagacuaa

SEQ ID NO: 1520613 - RNA, 19 nt, Homo sapiens
  misc_RNA (1)...(19): siRNA sense strand
gaacaccacggauugaauu

SEQ ID NO: 1520614 - RNA, 19 nt, Homo sapiens
  misc_RNA (1)...(19): siRNA sense strand
ggugaugauuucaauguaa

SEQ ID NO: 1520615 - RNA, 19 nt, Homo sapiens
  misc_RNA (1)...(19): siRNA sense strand
ugacacaaguacuuaaaga

SEQ ID NO: 1520616 - RNA, 19 nt, Homo sapiens
  misc_RNA (1)...(19): siRNA sense strand
gaagauauaaguugcuguu

SEQ ID NO: 1520617 - RNA, 19 nt, Homo sapiens
  misc_RNA (1)...(19): siRNA sense strand
gauaggacccucauugaau

SEQ ID NO: 1520618 - RNA, 19 nt, Homo sapiens
  misc_RNA (1)...(19): siRNA sense strand
ucaaagaagucagauuguu

SEQ ID NO: 1520619 - RNA, 19 nt, Homo sapiens
  misc_RNA (1)...(19): siRNA sense strand
gcacugaaugggaagauuu

SEQ ID NO: 1520620 - RNA, 19 nt, Homo sapiens
  misc_RNA (1)...(19): siRNA sense strand
auaagaagcggccaaauaa

SEQ ID NO: 1520621 - RNA, 19 nt, Homo sapiens
  misc_RNA (1)...(19): siRNA sense strand
aauaagaagcggccaaaua

SEQ ID NO: 1520622 - RNA, 19 nt, Homo sapiens
  misc_RNA (1)...(19): siRNA sense strand
gggaagauuuacuuucgaa

SEQ ID NO: 1520623 - RNA, 19 nt, Homo sapiens
  misc_RNA (1)...(19): siRNA sense strand
gaagauuuacuuucgaaga

SEQ ID NO: 1520624 - RNA, 19 nt, Homo sapiens
  misc_RNA (1)...(19): siRNA sense strand
gagauaggacccucauuga

SEQ ID NO: 1520625 - RNA, 19 nt, Homo sapiens
  misc_RNA (1)...(19): siRNA sense strand
caaaagcucucaagccaaa

SEQ ID NO: 1520626 - RNA, 19 nt, Homo sapiens
  misc_RNA (1)...(19): siRNA sense strand
auaaguugcuguugaagaa

SEQ ID NO: 1520627 - RNA, 19 nt, Homo sapiens
  misc_RNA (1)...(19): siRNA sense strand
gaacaaaacccaugcuaau

SEQ ID NO: 1520628 - RNA, 19 nt, Homo sapiens
  misc_RNA (1)...(19): siRNA sense strand
agauauaaguugcuguuga

SEQ ID NO: 1520629 - RNA, 19 nt, Homo sapiens
  misc_RNA (1)...(19): siRNA sense strand
aacagaagauuacagaaga

SEQ ID NO: 1520630 - RNA, 19 nt, Homo sapiens
  misc_RNA (1)...(19): siRNA sense strand
caaagaagucagauuguuc

SEQ ID NO: 1520631 - RNA, 19 nt, Homo sapiens
  misc_RNA (1)...(19): siRNA sense strand
gcuaauauuugcuggugau

SEQ ID NO: 1520632 - RNA, 19 nt, Homo sapiens
  misc_RNA (1)...(19): siRNA sense strand
ggauaugauugaauuaggu

SEQ ID NO: 1520633 - RNA, 19 nt, Homo sapiens
  misc_RNA (1)...(19): siRNA sense strand
ggauugaauuggaagagau

SEQ ID NO: 1520634 - RNA, 19 nt, Homo sapiens
  misc_RNA (1)...(19): siRNA sense strand
cacaaguacuuaaagaugu

SEQ ID NO: 1520635 - RNA, 19 nt, Homo sapiens
  misc_RNA (1)...(19): siRNA sense strand
aaagaugugugugcacuga

SEQ ID NO: 1520636 - RNA, 19 nt, Homo sapiens
  misc_RNA (1)...(19): siRNA sense strand
auguuuggcuccuauaaua

SEQ ID NO: 1520637 - RNA, 19 nt, Homo sapiens
  misc_RNA (1)...(19): siRNA sense strand
caaaacccaugcuaauauu

SEQ ID NO: 1520638 - RNA, 19 nt, Homo sapiens
  misc_RNA (1)...(19): siRNA sense strand
gaaccaaaacucaaugaaa

SEQ ID NO: 1520639 - RNA, 19 nt, Homo sapiens
  misc_RNA (1)...(19): siRNA sense strand
gaaugggaagauuuacuuu

SEQ ID NO: 1520640 - RNA, 19 nt, Homo sapiens
  misc_RNA (1)...(19): siRNA sense strand
uaacagaagauuacagaag

SEQ ID NO: 1520641 - RNA, 19 nt, Homo sapiens
  misc_RNA (1)...(19): siRNA sense strand
gcggccaaauaaucuagua

SEQ ID NO: 1520642 - RNA, 19 nt, Homo sapiens
  misc_RNA (1)...(19): siRNA sense strand
gaaaugcaaacgcaacagu

SEQ ID NO: 1520643 - RNA, 19 nt, Homo sapiens
  misc_RNA (1)...(19): siRNA sense strand
gcagaacaccacggauuga

SEQ ID NO: 1520644 - RNA, 19 nt, Homo sapiens
  misc_RNA (1)...(19): siRNA sense strand
gauugaauuggaagagaua

SEQ ID NO: 1520645 - RNA, 19 nt, Homo sapiens
  misc_RNA (1)...(19): siRNA sense strand
gagauuccuugagaagaga

SEQ ID NO: 1520646 - RNA, 19 nt, Homo sapiens
  misc_RNA (1)...(19): siRNA sense strand
auggaaggauucauaugua

SEQ ID NO: 1520647 - RNA, 19 nt, Homo sapiens
  misc_RNA (1)...(19): siRNA sense strand
acacaaguacuuaaagaug

SEQ ID NO: 1520648 - RNA, 19 nt, Homo sapiens
  misc_RNA (1)...(19): siRNA sense strand
agagauaggacccucauug

SEQ ID NO: 1520649 - RNA, 19 nt, Homo sapiens
  misc_RNA (1)...(19): siRNA sense strand
cugccuggcuggauuagaa

SEQ ID NO: 1520650 - RNA, 19 nt, Homo sapiens
  misc_RNA (1)...(19): siRNA sense strand
gaagcggccaaauaaucua

SEQ ID NO: 1520651 - RNA, 19 nt, Homo sapiens
  misc_RNA (1)...(19): siRNA sense strand
aauauuugcuggugaugau

SEQ ID NO: 1520652 - RNA, 19 nt, Homo sapiens
  misc_RNA (1)...(19): siRNA sense strand
gaauauguucugcacuuca

SEQ ID NO: 1520653 - RNA, 19 nt, Homo sapiens
  misc_RNA (1)...(19): siRNA sense strand
ugaaugggaagauuuacuu

SEQ ID NO: 1520654 - RNA, 19 nt, Homo sapiens
  misc_RNA (1)...(19): siRNA sense strand
gaagagauaggacccucau

SEQ ID NO: 1520655 - RNA, 19 nt, Homo sapiens
  misc_RNA (1)...(19): siRNA sense strand
uaaauguccugagggaaca

SEQ ID NO: 1520656 - RNA, 19 nt, Homo sapiens
  misc_RNA (1)...(19): siRNA sense strand
caccacggauugaauugga

SEQ ID NO: 1520657 - RNA, 19 nt, Homo sapiens
  misc_RNA (1)...(19): siRNA sense strand
aaacccaugcuaauauuug

SEQ ID NO: 1520658 - RNA, 19 nt, Homo sapiens
  misc_RNA (1)...(19): siRNA sense strand
acaaguacuuaaagaugug

SEQ ID NO: 1520659 - RNA, 19 nt, Homo sapiens
  misc_RNA (1)...(19): siRNA sense strand
agaugugugugcacugaaa

SEQ ID NO: 1520660 - RNA, 19 nt, Homo sapiens
  misc_RNA (1)...(19): siRNA sense strand
gcucucaagccaaagaaga

SEQ ID NO: 1520661 - RNA, 19 nt, Homo sapiens
  misc_RNA (1)...(19): siRNA sense strand
agagauuccuugagaagag

SEQ ID NO: 1520662 - RNA, 19 nt, Homo sapiens
  misc_RNA (1)...(19): siRNA sense strand
gucagauuguucuuuauuc

SEQ ID NO: 1520663 - RNA, 19 nt, Homo sapiens
  misc_RNA (1)...(19): siRNA sense strand
uuucaaagaagucagauug

SEQ ID NO: 1520664 - RNA, 19 nt, Homo sapiens
  misc_RNA (1)...(19): siRNA sense strand
aagaagcggccaaauaauc

SEQ ID NO: 1520665 - RNA, 19 nt, Homo sapiens
  misc_RNA (1)...(19): siRNA sense strand
uggaaggauucauauguag

SEQ ID NO: 1520666 - RNA, 19 nt, Homo sapiens
  misc_RNA (1)...(19): siRNA sense strand
ggaacaaaacccaugcuaa

SEQ ID NO: 1520667 - RNA, 19 nt, Homo sapiens
  misc_RNA (1)...(19): siRNA sense strand
cuaguaauaggucauaugu

SEQ ID NO: 1520668 - RNA, 19 nt, Homo sapiens
  misc_RNA (1)...(19): siRNA sense strand
acagugacacaaguacuua

SEQ ID NO: 1520669 - RNA, 19 nt, Homo sapiens
  misc_RNA (1)...(19): siRNA sense strand
uaagaagcggccaaauaau

SEQ ID NO: 1520670 - RNA, 19 nt, Homo sapiens
  misc_RNA (1)...(19): siRNA sense strand
auaggacccucauugaauc

SEQ ID NO: 1520671 - RNA, 19 nt, Homo sapiens
  misc_RNA (1)...(19): siRNA sense strand
ggccaaauaaucuaguaau

SEQ ID NO: 1520672 - RNA, 19 nt, Homo sapiens
  misc_RNA (1)...(19): siRNA sense strand
gaaaagagucaagagauuc

SEQ ID NO: 1520673 - RNA, 19 nt, Homo sapiens
  misc_RNA (1)...(19): siRNA sense strand
cacugaaugggaagauuua

SEQ ID NO: 1520674 - RNA, 19 nt, Homo sapiens
  misc_RNA (1)...(19): siRNA sense strand
uggugaugauuucaaugua

SEQ ID NO: 1520675 - RNA, 19 nt, Homo sapiens
  misc_RNA (1)...(19): siRNA sense strand
gaagagagaaccaaaacuc

SEQ ID NO: 1520676 - RNA, 19 nt, Homo sapiens
  misc_RNA (1)...(19): siRNA sense strand
ugcuggauaugauugaauu

SEQ ID NO: 1520677 - RNA, 19 nt, Homo sapiens
  misc_RNA (1)...(19): siRNA sense strand
agauaggacccucauugaa

SEQ ID NO: 1520678 - RNA, 19 nt, Homo sapiens
  misc_RNA (1)...(19): siRNA sense strand
cggauugaauuggaagaga

SEQ ID NO: 1520679 - RNA, 19 nt, Homo sapiens
  misc_RNA (1)...(19): siRNA sense strand
gacacaaguacuuaaagau

SEQ ID NO: 1520680 - RNA, 19 nt, Homo sapiens
  misc_RNA (1)...(19): siRNA sense strand
gugaugauuucaauguaac

SEQ ID NO: 1520681 - RNA, 19 nt, Homo sapiens
  misc_RNA (1)...(19): siRNA sense strand
uaucugccuggcuggauua

SEQ ID NO: 1520682 - RNA, 19 nt, Homo sapiens
  misc_RNA (1)...(19): siRNA sense strand
caacuuauggaaggauuca

SEQ ID NO: 1520683 - RNA, 19 nt, Homo sapiens
  misc_RNA (1)...(19): siRNA sense strand
augcaaugcugauuaaagg

SEQ ID NO: 1520684 - RNA, 19 nt, Homo sapiens
  misc_RNA (1)...(19): siRNA sense strand
uauaaguugcuguugaaga

SEQ ID NO: 1520685 - RNA, 19 nt, Homo sapiens
  misc_RNA (1)...(19): siRNA sense strand
gcuggauaugauugaauua

SEQ ID NO: 1520686 - RNA, 19 nt, Homo sapiens
  misc_RNA (1)...(19): siRNA sense strand
ugacuaccaugugcuggau

SEQ ID NO: 1520687 - RNA, 19 nt, Homo sapiens
  misc_RNA (1)...(19): siRNA sense strand
uacaagaccuuuugaggau

SEQ ID NO: 1520688 - RNA, 19 nt, Homo sapiens
  misc_RNA (1)...(19): siRNA sense strand
uacaacuuauggaaggauu

SEQ ID NO: 1520689 - RNA, 19 nt, Homo sapiens
  misc_RNA (1)...(19): siRNA sense strand
gguacaacuuauggaagga

SEQ ID NO: 1520690 - RNA, 19 nt, Homo sapiens
  misc_RNA (1)...(19): siRNA sense strand
ucaagccaaagaagaagaa

SEQ ID NO: 1520691 - RNA, 19 nt, Homo sapiens
  misc_RNA (1)...(19): siRNA sense strand
gggaaaugcaaacgcaaca

SEQ ID NO: 1520692 - RNA, 19 nt, Homo sapiens
  misc_RNA (1)...(19): siRNA sense strand
gcaacagugacacaaguac

SEQ ID NO: 1520693 - RNA, 19 nt, Homo sapiens
  misc_RNA (1)...(19): siRNA sense strand
ugaauuggaagagauagga

SEQ ID NO: 1520694 - RNA, 19 nt, Homo sapiens
  misc_RNA (1)...(19): siRNA sense strand
cagaacaccacggauugaa

SEQ ID NO: 1520695 - RNA, 19 nt, Homo sapiens
  misc_RNA (1)...(19): siRNA sense strand
acgcaacagugacacaagu

SEQ ID NO: 1520696 - RNA, 19 nt, Homo sapiens
  misc_RNA (1)...(19): siRNA sense strand
acaaaacccaugcuaauau

SEQ ID NO: 1520697 - RNA, 19 nt, Homo sapiens
  misc_RNA (1)...(19): siRNA sense strand
agaagcggccaaauaaucu

SEQ ID NO: 1520698 - RNA, 19 nt, Homo sapiens
  misc_RNA (1)...(19): siRNA sense strand
uugcagaacaccacggauu

SEQ ID NO: 1520699 - RNA, 19 nt, Homo sapiens
  misc_RNA (1)...(19): siRNA sense strand
uggcuggauuagaauaugu

SEQ ID NO: 1520700 - RNA, 19 nt, Homo sapiens
  misc_RNA (1)...(19): siRNA sense strand
uaccaugugcuggauauga

SEQ ID NO: 1520701 - RNA, 19 nt, Homo sapiens
  misc_RNA (1)...(19): siRNA sense strand
acuaccaugugcuggauau

SEQ ID NO: 1520702 - RNA, 19 nt, Homo sapiens
  misc_RNA (1)...(19): siRNA sense strand
uggauaugauugaauuagg

SEQ ID NO: 1520703 - RNA, 19 nt, Homo sapiens
  misc_RNA (1)...(19): siRNA sense strand
aaguugcuguugaagaaau

SEQ ID NO: 1520704 - RNA, 19 nt, Homo sapiens
  misc_RNA (1)...(19): siRNA sense strand
guucuuuauucauguuugg

SEQ ID NO: 1520705 - RNA, 19 nt, Homo sapiens
  misc_RNA (1)...(19): siRNA sense strand
aaugcaaacgcaacaguga

SEQ ID NO: 1520706 - RNA, 19 nt, Homo sapiens
  misc_RNA (1)...(19): siRNA sense strand
agacuuggcucagauguuu

SEQ ID NO: 1520707 - RNA, 19 nt, Homo sapiens
  misc_RNA (1)...(19): siRNA sense strand
cggaggagcucaacaagga

SEQ ID NO: 1520708 - RNA, 19 nt, Homo sapiens
  misc_RNA (1)...(19): siRNA sense strand
ccucaguuguccuugguua

SEQ ID NO: 1520709 - RNA, 19 nt, Homo sapiens
  misc_RNA (1)...(19): siRNA sense strand
gcauucggauuccugauca

SEQ ID NO: 1520710 - RNA, 19 nt, Homo sapiens
  misc_RNA (1)...(19): siRNA sense strand
cggaaaguuuggcaucauu

SEQ ID NO: 1520711 - RNA, 19 nt, Homo sapiens
  misc_RNA (1)...(19): siRNA sense strand
uggccgacgucuacagaua

SEQ ID NO: 1520712 - RNA, 19 nt, Homo sapiens
  misc_RNA (1)...(19): siRNA sense strand
cuacagccauccuccaaca

SEQ ID NO: 1520713 - RNA, 19 nt, Homo sapiens
  misc_RNA (1)...(19): siRNA sense strand
caggaucucuggccucagu

SEQ ID NO: 1520714 - RNA, 19 nt, Homo sapiens
  misc_RNA (1)...(19): siRNA sense strand
ccaagccucuggccguaug

SEQ ID NO: 1520715 - RNA, 19 nt, Homo sapiens
  misc_RNA (1)...(19): siRNA sense strand
gcugugcccuggaaaguac

SEQ ID NO: 1520716 - RNA, 19 nt, Homo sapiens
  misc_RNA (1)...(19): siRNA sense strand
uacagauacugccguguga

SEQ ID NO: 1520717 - RNA, 19 nt, Homo sapiens
  misc_RNA (1)...(19): siRNA sense strand
ggaaaguuuggcaucauuc

SEQ ID NO: 1520718 - RNA, 19 nt, Homo sapiens
  misc_RNA (1)...(19): siRNA sense strand
cagccauccuccaacagaa

SEQ ID NO: 1520719 - RNA, 19 nt, Homo sapiens
  misc_RNA (1)...(19): siRNA sense strand
ccaggccaguucucugaau

SEQ ID NO: 1520720 - RNA, 19 nt, Homo sapiens
  misc_RNA (1)...(19): siRNA sense strand
ucaguuguccuugguuauu

SEQ ID NO: 1520721 - RNA, 19 nt, Homo sapiens
  misc_RNA (1)...(19): siRNA sense strand
caguuguccuugguuauug

SEQ ID NO: 1520722 - RNA, 19 nt, Homo sapiens
  misc_RNA (1)...(19): siRNA sense strand
gagcucaacaaggaccuaa

SEQ ID NO: 1520723 - RNA, 19 nt, Homo sapiens
  misc_RNA (1)...(19): siRNA sense strand
cagugacccuggugaugga

SEQ ID NO: 1520724 - RNA, 19 nt, Homo sapiens
  misc_RNA (1)...(19): siRNA sense strand
ucgaggaguuccaggaucu

SEQ ID NO: 1520725 - RNA, 19 nt, Homo sapiens
  misc_RNA (1)...(19): siRNA sense strand
ggauuccugaucaugcuuu

SEQ ID NO: 1520726 - RNA, 19 nt, Homo sapiens
  misc_RNA (1)...(19): siRNA sense strand
caggccaguucucugaaug

SEQ ID NO: 1520727 - RNA, 19 nt, Homo sapiens
  misc_RNA (1)...(19): siRNA sense strand
cagauacugccgugugaga

SEQ ID NO: 1520728 - RNA, 19 nt, Homo sapiens
  misc_RNA (1)...(19): siRNA sense strand
gaaaguuuggcaucauucg

SEQ ID NO: 1520729 - RNA, 19 nt, Homo sapiens
  misc_RNA (1)...(19): siRNA sense strand
ggacugcuccccucacaug

SEQ ID NO: 1520730 - RNA, 19 nt, Homo sapiens
  misc_RNA (1)...(19): siRNA sense strand
gcucaacaaggaccuaaac

SEQ ID NO: 1520731 - RNA, 19 nt, Homo sapiens
  misc_RNA (1)...(19): siRNA sense strand
gauacugccgugugagagu

SEQ ID NO: 1520732 - RNA, 19 nt, Homo sapiens
  misc_RNA (1)...(19): siRNA sense strand
ggccucaguuguccuuggu

SEQ ID NO: 1520733 - RNA, 19 nt, Homo sapiens
  misc_RNA (1)...(19): siRNA sense strand
gaaacaagcuagaauauac

SEQ ID NO: 1520734 - RNA, 19 nt, Homo sapiens
  misc_RNA (1)...(19): siRNA sense strand
caacagaugucaaagauac

SEQ ID NO: 1520735 - RNA, 19 nt, Homo sapiens
  misc_RNA (1)...(19): siRNA sense strand
ggaaucaaguaucuucaaa

SEQ ID NO: 1520736 - RNA, 19 nt, Homo sapiens
  misc_RNA (1)...(19): siRNA sense strand
gaggcuggcugcagaaauu

SEQ ID NO: 1520737 - RNA, 19 nt, Homo sapiens
  misc_RNA (1)...(19): siRNA sense strand
gaaggagagugugaauauu

SEQ ID NO: 1520738 - RNA, 19 nt, Homo sapiens
  misc_RNA (1)...(19): siRNA sense strand
ucaaguaucuucaaaucug

SEQ ID NO: 1520739 - RNA, 19 nt, Homo sapiens
  misc_RNA (1)...(19): siRNA sense strand
augaagaacugaacuuuga

SEQ ID NO: 1520740 - RNA, 19 nt, Homo sapiens
  misc_RNA (1)...(19): siRNA sense strand
uuacagugcugaugaaaca

SEQ ID NO: 1520741 - RNA, 19 nt, Homo sapiens
  misc_RNA (1)...(19): siRNA sense strand
caacaacagaugucaaaga

SEQ ID NO: 1520742 - RNA, 19 nt, Homo sapiens
  misc_RNA (1)...(19): siRNA sense strand
ugaaggagagugugaauau

SEQ ID NO: 1520743 - RNA, 19 nt, Homo sapiens
  misc_RNA (1)...(19): siRNA sense strand
aaaguuaacuguucuugag

SEQ ID NO: 1520744 - RNA, 19 nt, Homo sapiens
  misc_RNA (1)...(19): siRNA sense strand
ggugcuauguuccuagaaa

SEQ ID NO: 1520745 - RNA, 19 nt, Homo sapiens
  misc_RNA (1)...(19): siRNA sense strand
ugaauggguucgacaacaa

SEQ ID NO: 1520746 - RNA, 19 nt, Homo sapiens
  misc_RNA (1)...(19): siRNA sense strand
ugaugaauuugcuaaggua

SEQ ID NO: 1520747 - RNA, 19 nt, Homo sapiens
  misc_RNA (1)...(19): siRNA sense strand
gaauauaccaugaagaacu

SEQ ID NO: 1520748 - RNA, 19 nt, Homo sapiens
  misc_RNA (1)...(19): siRNA sense strand
ugucaaagauacuaagcaa

SEQ ID NO: 1520749 - RNA, 19 nt, Homo sapiens
  misc_RNA (1)...(19): siRNA sense strand
caagaaagcaucaguaacg

SEQ ID NO: 1520750 - RNA, 19 nt, Homo sapiens
  misc_RNA (1)...(19): siRNA sense strand
gcuagaauauaccaugaag

SEQ ID NO: 1520751 - RNA, 19 nt, Homo sapiens
  misc_RNA (1)...(19): siRNA sense strand
gaacuuugaaggagagugu

SEQ ID NO: 1520752 - RNA, 19 nt, Homo sapiens
  misc_RNA (1)...(19): siRNA sense strand
gcaggcacacacaagauaa

SEQ ID NO: 1520753 - RNA, 19 nt, Homo sapiens
  misc_RNA (1)...(19): siRNA sense strand
gaaaaggcuucuccugaug

SEQ ID NO: 1520754 - RNA, 19 nt, Homo sapiens
  misc_RNA (1)...(19): siRNA sense strand
gaugaugaagcuacugaaa

SEQ ID NO: 1520755 - RNA, 19 nt, Homo sapiens
  misc_RNA (1)...(19): siRNA sense strand
cacaagaaagcaucaguaa

SEQ ID NO: 1520756 - RNA, 19 nt, Homo sapiens
  misc_RNA (1)...(19): siRNA sense strand
gugcauaauuuaccuguac

SEQ ID NO: 1520757 - RNA, 19 nt, Homo sapiens
  misc_RNA (1)...(19): siRNA sense strand
uugcuaagguaauaucuga

SEQ ID NO: 1520758 - RNA, 19 nt, Homo sapiens
  misc_RNA (1)...(19): siRNA sense strand
aacaacagaugucaaagau

SEQ ID NO: 1520759 - RNA, 19 nt, Homo sapiens
  misc_RNA (1)...(19): siRNA sense strand
cgugaaacaagcuagaaua

SEQ ID NO: 1520760 - RNA, 19 nt, Homo sapiens
  misc_RNA (1)...(19): siRNA sense strand
ucaguaacgggaaaucuuu

SEQ ID NO: 1520761 - RNA, 19 nt, Homo sapiens
  misc_RNA (1)...(19): siRNA sense strand
gaauggguucgacaacaaa

SEQ ID NO: 1520762 - RNA, 19 nt, Homo sapiens
  misc_RNA (1)...(19): siRNA sense strand
gcacacacaagauaaaauu

SEQ ID NO: 1520763 - RNA, 19 nt, Homo sapiens
  misc_RNA (1)...(19): siRNA sense strand
gugaaacaagcuagaauau

SEQ ID NO: 1520764 - RNA, 19 nt, Homo sapiens
  misc_RNA (1)...(19): siRNA sense strand
caaguaucuucaaaucugu

SEQ ID NO: 1520765 - RNA, 19 nt, Homo sapiens
  misc_RNA (1)...(19): siRNA sense strand
aagcuagaauauaccauga

SEQ ID NO: 1520766 - RNA, 19 nt, Homo sapiens
  misc_RNA (1)...(19): siRNA sense strand
acacaagaaagcaucagua

SEQ ID NO: 1520767 - RNA, 19 nt, Homo sapiens
  misc_RNA (1)...(19): siRNA sense strand
gacccuguguugauugaau

SEQ ID NO: 1520768 - RNA, 19 nt, Homo sapiens
  misc_RNA (1)...(19): siRNA sense strand
cuaagguaauaucugauga

SEQ ID NO: 1520769 - RNA, 19 nt, Homo sapiens
  misc_RNA (1)...(19): siRNA sense strand
gcuaagguaauaucugaug

SEQ ID NO: 1520770 - RNA, 19 nt, Homo sapiens
  misc_RNA (1)...(19): siRNA sense strand
cgacaacaaagaaguaaag

SEQ ID NO: 1520771 - RNA, 19 nt, Homo sapiens
  misc_RNA (1)...(19): siRNA sense strand
gaagaacugaacuuugaag

SEQ ID NO: 1520772 - RNA, 19 nt, Homo sapiens
  misc_RNA (1)...(19): siRNA sense strand
guucuugagugugcuaaug

SEQ ID NO: 1520773 - RNA, 19 nt, Homo sapiens
  misc_RNA (1)...(19): siRNA sense strand
uccuagcccugaacaaauu

SEQ ID NO: 1520774 - RNA, 19 nt, Homo sapiens
  misc_RNA (1)...(19): siRNA sense strand
guucgacaacaaagaagua

SEQ ID NO: 1520775 - RNA, 19 nt, Homo sapiens
  misc_RNA (1)...(19): siRNA sense strand
aauauaccaugaagaacug

SEQ ID NO: 1520776 - RNA, 19 nt, Homo sapiens
  misc_RNA (1)...(19): siRNA sense strand
aagcaucaguaacgggaaa

SEQ ID NO: 1520777 - RNA, 19 nt, Homo sapiens
  misc_RNA (1)...(19): siRNA sense strand
ccaugaagaacugaacuuu

SEQ ID NO: 1520778 - RNA, 19 nt, Homo sapiens
  misc_RNA (1)...(19): siRNA sense strand
caugaagaacugaacuuug

SEQ ID NO: 1520779 - RNA, 19 nt, Homo sapiens
  misc_RNA (1)...(19): siRNA sense strand
aaauuuacagugcugauga

SEQ ID NO: 1520780 - RNA, 19 nt, Homo sapiens
  misc_RNA (1)...(19): siRNA sense strand
ugaaaaggcuucuccugau

SEQ ID NO: 1520781 - RNA, 19 nt, Homo sapiens
  misc_RNA (1)...(19): siRNA sense strand
ugaugaagcuacugaaaau

SEQ ID NO: 1520782 - RNA, 19 nt, Homo sapiens
  misc_RNA (1)...(19): siRNA sense strand
gcuggcugcagaaauuuaa

SEQ ID NO: 1520783 - RNA, 19 nt, Homo sapiens
  misc_RNA (1)...(19): siRNA sense strand
guuaacuguucuugagugu

SEQ ID NO: 1520784 - RNA, 19 nt, Homo sapiens
  misc_RNA (1)...(19): siRNA sense strand
gaugaauuugcuaagguaa

SEQ ID NO: 1520785 - RNA, 19 nt, Homo sapiens
  misc_RNA (1)...(19): siRNA sense strand
guacauuguuaugcacaca

SEQ ID NO: 1520786 - RNA, 19 nt, Homo sapiens
  misc_RNA (1)...(19): siRNA sense strand
aagcaaaaguuaacuguuc

SEQ ID NO: 1520787 - RNA, 19 nt, Homo sapiens
  misc_RNA (1)...(19): siRNA sense strand
gagcaacaacagaugucaa

SEQ ID NO: 1520788 - RNA, 19 nt, Homo sapiens
  misc_RNA (1)...(19): siRNA sense strand
caaaagagcaacaacagau

SEQ ID NO: 1520789 - RNA, 19 nt, Homo sapiens
  misc_RNA (1)...(19): siRNA sense strand
aauccuagcccugaacaaa

SEQ ID NO: 1520790 - RNA, 19 nt, Homo sapiens
  misc_RNA (1)...(19): siRNA sense strand
ucaaaucuguggugaaaag

SEQ ID NO: 1520791 - RNA, 19 nt, Homo sapiens
  misc_RNA (1)...(19): siRNA sense strand
cuauauccaagguguuuaa

SEQ ID NO: 1520792 - RNA, 19 nt, Homo sapiens
  misc_RNA (1)...(19): siRNA sense strand
aaggagagugugaauauuc

SEQ ID NO: 1520793 - RNA, 19 nt, Homo sapiens
  misc_RNA (1)...(19): siRNA sense strand
uggcagugauuggaaauag

SEQ ID NO: 1520794 - RNA, 19 nt, Homo sapiens
  misc_RNA (1)...(19): siRNA sense strand
gauaaaauuggcagugauu

SEQ ID NO: 1520795 - RNA, 19 nt, Homo sapiens
  misc_RNA (1)...(19): siRNA sense strand
gaccuugacccuguguuga

SEQ ID NO: 1520796 - RNA, 19 nt, Homo sapiens
  misc_RNA (1)...(19): siRNA sense strand
gccuauauccaagguguuu

SEQ ID NO: 1520797 - RNA, 19 nt, Homo sapiens
  misc_RNA (1)...(19): siRNA sense strand
aacaauggcuaacaaaaga

SEQ ID NO: 1520798 - RNA, 19 nt, Homo sapiens
  misc_RNA (1)...(19): siRNA sense strand
gcuuuguacuggugcuaug

SEQ ID NO: 1520799 - RNA, 19 nt, Homo sapiens
  misc_RNA (1)...(19): siRNA sense strand
caaauuuacagugcugaug

SEQ ID NO: 1520800 - RNA, 19 nt, Homo sapiens
  misc_RNA (1)...(19): siRNA sense strand
cuuuaacaauggcuaacaa

SEQ ID NO: 1520801 - RNA, 19 nt, Homo sapiens
  misc_RNA (1)...(19): siRNA sense strand
aggcuucuccugaugauga

SEQ ID NO: 1520802 - RNA, 19 nt, Homo sapiens
  misc_RNA (1)...(19): siRNA sense strand
aaagagcaacaacagaugu

SEQ ID NO: 1520803 - RNA, 19 nt, Homo sapiens
  misc_RNA (1)...(19): siRNA sense strand
aaaggcuucuccugaugau

SEQ ID NO: 1520804 - RNA, 19 nt, Homo sapiens
  misc_RNA (1)...(19): siRNA sense strand
gacaacaaagaaguaaaga

SEQ ID NO: 1520805 - RNA, 19 nt, Homo sapiens
  misc_RNA (1)...(19): siRNA sense strand
gaugaaacagcuuuguacu

SEQ ID NO: 1520806 - RNA, 19 nt, Homo sapiens
  misc_RNA (1)...(19): siRNA sense strand
cugaugaaacagcuuugua

SEQ ID NO: 1520807 - RNA, 19 nt, Homo sapiens
  misc_RNA (1)...(19): siRNA sense strand
aauuuacagugcugaugaa

SEQ ID NO: 1520808 - RNA, 19 nt, Homo sapiens
  misc_RNA (1)...(19): siRNA sense strand
ccuugacccuguguugauu

SEQ ID NO: 1520809 - RNA, 19 nt, Homo sapiens
  misc_RNA (1)...(19): siRNA sense strand
uauccaagguguuuaaaag

SEQ ID NO: 1520810 - RNA, 19 nt, Homo sapiens
  misc_RNA (1)...(19): siRNA sense strand
gauugaauggguucgacaa

SEQ ID NO: 1520811 - RNA, 19 nt, Homo sapiens
  misc_RNA (1)...(19): siRNA sense strand
acaacagaugucaaagaua

SEQ ID NO: 1520812 - RNA, 19 nt, Homo sapiens
  misc_RNA (1)...(19): siRNA sense strand
gcugcaggcacacacaaga

SEQ ID NO: 1520813 - RNA, 19 nt, Homo sapiens
  misc_RNA (1)...(19): siRNA sense strand
ugaagaacugaacuuugaa

SEQ ID NO: 1520814 - RNA, 19 nt, Homo sapiens
  misc_RNA (1)...(19): siRNA sense strand
aauuggcagugauuggaaa

SEQ ID NO: 1520815 - RNA, 19 nt, Homo sapiens
  misc_RNA (1)...(19): siRNA sense strand
agaacugaacuuugaagga

SEQ ID NO: 1520816 - RNA, 19 nt, Homo sapiens
  misc_RNA (1)...(19): siRNA sense strand
ugcaggcacacacaagaua

SEQ ID NO: 1520817 - RNA, 19 nt, Homo sapiens
  misc_RNA (1)...(19): siRNA sense strand
ggaggcuggcugcagaaau

SEQ ID NO: 1520818 - RNA, 19 nt, Homo sapiens
  misc_RNA (1)...(19): siRNA sense strand
acagaugucaaagauacua

SEQ ID NO: 1520819 - RNA, 19 nt, Homo sapiens
  misc_RNA (1)...(19): siRNA sense strand
uugaugaauuugcuaaggu

SEQ ID NO: 1520820 - RNA, 19 nt, Homo sapiens
  misc_RNA (1)...(19): siRNA sense strand
caggcacacacaagauaaa

SEQ ID NO: 1520821 - RNA, 19 nt, Homo sapiens
  misc_RNA (1)...(19): siRNA sense strand
aaaagugucuuggaaucaa

SEQ ID NO: 1520822 - RNA, 19 nt, Homo sapiens
  misc_RNA (1)...(19): siRNA sense strand
aacauugcauagagccaaa

SEQ ID NO: 1520823 - RNA, 19 nt, Homo sapiens
  misc_RNA (1)...(19): siRNA sense strand
ugaugaaacagcuuuguac

SEQ ID NO: 1520824 - RNA, 19 nt, Homo sapiens
  misc_RNA (1)...(19): siRNA sense strand
caagaugacccaccuauua

SEQ ID NO: 1520825 - RNA, 19 nt, Homo sapiens
  misc_RNA (1)...(19): siRNA sense strand
gcaagcaccuacaggacuu

SEQ ID NO: 1520826 - RNA, 19 nt, Homo sapiens
  misc_RNA (1)...(19): siRNA sense strand
cgacauugcuggcuauuac

SEQ ID NO: 1520827 - RNA, 19 nt, Homo sapiens
  misc_RNA (1)...(19): siRNA sense strand
ugacccaccuauuaucuuu

SEQ ID NO: 1520828 - RNA, 19 nt, Homo sapiens
  misc_RNA (1)...(19): siRNA sense strand
ggacuucaccgauuuccaa

SEQ ID NO: 1520829 - RNA, 19 nt, Homo sapiens
  misc_RNA (1)...(19): siRNA sense strand
ugagaucucccgcuacuuu

SEQ ID NO: 1520830 - RNA, 19 nt, Homo sapiens
  misc_RNA (1)...(19): siRNA sense strand
gacagcagcuugguucaug

SEQ ID NO: 1520831 - RNA, 19 nt, Homo sapiens
  misc_RNA (1)...(19): siRNA sense strand
guaccgagcucagcagauc

SEQ ID NO: 1520832 - RNA, 19 nt, Homo sapiens
  misc_RNA (1)...(19): siRNA sense strand
gcuauuacccucuggaugu

SEQ ID NO: 1520833 - RNA, 19 nt, Homo sapiens
  misc_RNA (1)...(19): siRNA sense strand
gcucccaucuccaugaaga

SEQ ID NO: 1520834 - RNA, 19 nt, Homo sapiens
  misc_RNA (1)...(19): siRNA sense strand
acgcugaacuugccacuga

SEQ ID NO: 1520835 - RNA, 19 nt, Homo sapiens
  misc_RNA (1)...(19): siRNA sense strand
gcuuggaccucaucagugu

SEQ ID NO: 1520836 - RNA, 19 nt, Homo sapiens
  misc_RNA (1)...(19): siRNA sense strand
gcacacuggcccaagauga

SEQ ID NO: 1520837 - RNA, 19 nt, Homo sapiens
  misc_RNA (1)...(19): siRNA sense strand
gagcucccaucuccaugaa

SEQ ID NO: 1520838 - RNA, 19 nt, Homo sapiens
  misc_RNA (1)...(19): siRNA sense strand
ggaccuacauuugccagau

SEQ ID NO: 1520839 - RNA, 19 nt, Homo sapiens
  misc_RNA (1)...(19): siRNA sense strand
cgacugagcuuggcaaacg

SEQ ID NO: 1520840 - RNA, 19 nt, Homo sapiens
  misc_RNA (1)...(19): siRNA sense strand
gcaggcaccuacagcaucu

SEQ ID NO: 1520841 - RNA, 19 nt, Homo sapiens
  misc_RNA (1)...(19): siRNA sense strand
uggaggacuucaccgauuu

SEQ ID NO: 1520842 - RNA, 19 nt, Homo sapiens
  misc_RNA (1)...(19): siRNA sense strand
gcucugcaggugccacuua

SEQ ID NO: 1520843 - RNA, 19 nt, Homo sapiens
  misc_RNA (1)...(19): siRNA sense strand
agagaccacuguuaagaca

SEQ ID NO: 1520844 - RNA, 19 nt, Homo sapiens
  misc_RNA (1)...(19): siRNA sense strand
gggccucccuugugcugaa

SEQ ID NO: 1520845 - RNA, 19 nt, Homo sapiens
  misc_RNA (1)...(19): siRNA sense strand
gaucaccaccucucuguac

SEQ ID NO: 1520846 - RNA, 19 nt, Homo sapiens
  misc_RNA (1)...(19): siRNA sense strand
gaacagccuugggagucau

SEQ ID NO: 1520847 - RNA, 19 nt, Homo sapiens
  misc_RNA (1)...(19): siRNA sense strand
cauccaagcuuccccuaaa

SEQ ID NO: 1520848 - RNA, 19 nt, Homo sapiens
  misc_RNA (1)...(19): siRNA sense strand
gaccuacauuugccagauc

SEQ ID NO: 1520849 - RNA, 19 nt, Homo sapiens
  misc_RNA (1)...(19): siRNA sense strand
cuggaggacuucaccgauu

SEQ ID NO: 1520850 - RNA, 19 nt, Homo sapiens
  misc_RNA (1)...(19): siRNA sense strand
gaucauccagcucaacauc

SEQ ID NO: 1520851 - RNA, 19 nt, Homo sapiens
  misc_RNA (1)...(19): siRNA sense strand
aagaugacccaccuauuau

SEQ ID NO: 1520852 - RNA, 19 nt, Homo sapiens
  misc_RNA (1)...(19): siRNA sense strand
agcagucucuuccuucuug

SEQ ID NO: 1520853 - RNA, 19 nt, Homo sapiens
  misc_RNA (1)...(19): siRNA sense strand
ccaagaugacccaccuauu

SEQ ID NO: 1520854 - RNA, 19 nt, Homo sapiens
  misc_RNA (1)...(19): siRNA sense strand
gcacccaacgcugaacuug

SEQ ID NO: 1520855 - RNA, 19 nt, Homo sapiens
  misc_RNA (1)...(19): siRNA sense strand
gaccuagcaucuccuuggu

SEQ ID NO: 1520856 - RNA, 19 nt, Homo sapiens
  misc_RNA (1)...(19): siRNA sense strand
gaugacccaccuauuaucu

SEQ ID NO: 1520857 - RNA, 19 nt, Homo sapiens
  misc_RNA (1)...(19): siRNA sense strand
gaccgcacagcgcguguaa

SEQ ID NO: 1520858 - RNA, 19 nt, Homo sapiens
  misc_RNA (1)...(19): siRNA sense strand
gagcucagcagaucaucca

SEQ ID NO: 1520859 - RNA, 19 nt, Homo sapiens
  misc_RNA (1)...(19): siRNA sense strand
gcgacauugcuggcuauua

SEQ ID NO: 1520860 - RNA, 19 nt, Homo sapiens
  misc_RNA (1)...(19): siRNA sense strand
gggcuuggaccucaucagu

SEQ ID NO: 1520861 - RNA, 19 nt, Homo sapiens
  misc_RNA (1)...(19): siRNA sense strand
ccagcagucucuuccuucu

SEQ ID NO: 1520862 - RNA, 19 nt, Homo sapiens
  misc_RNA (1)...(19): siRNA sense strand
ccgcuacuuucuccagaug

SEQ ID NO: 1520863 - RNA, 19 nt, Homo sapiens
  misc_RNA (1)...(19): siRNA sense strand
agaacagccuugggaguca

SEQ ID NO: 1520864 - RNA, 19 nt, Homo sapiens
  misc_RNA (1)...(19): siRNA sense strand
acccaccuauuaucuuuga

SEQ ID NO: 1520865 - RNA, 19 nt, Homo sapiens
  misc_RNA (1)...(19): siRNA sense strand
ccagggucgccaagaauga

SEQ ID NO: 1520866 - RNA, 19 nt, Homo sapiens
  misc_RNA (1)...(19): siRNA sense strand
ccuggagccugcacaacug

SEQ ID NO: 1520867 - RNA, 19 nt, Homo sapiens
  misc_RNA (1)...(19): siRNA sense strand
ugugagaucucccgcuacu

SEQ ID NO: 1520868 - RNA, 19 nt, Homo sapiens
  misc_RNA (1)...(19): siRNA sense strand
gagaucucccgcuacuuuc

SEQ ID NO: 1520869 - RNA, 19 nt, Homo sapiens
  misc_RNA (1)...(19): siRNA sense strand
ggaggacuucaccgauuuc

SEQ ID NO: 1520870 - RNA, 19 nt, Homo sapiens
  misc_RNA (1)...(19): siRNA sense strand
cagaucauccagcucaaca

SEQ ID NO: 1520871 - RNA, 19 nt, Homo sapiens
  misc_RNA (1)...(19): siRNA sense strand
gcuagcagauucaaagaua

SEQ ID NO: 1520872 - RNA, 19 nt, Homo sapiens
  misc_RNA (1)...(19): siRNA sense strand
ucaaagauaugccuaacuu

SEQ ID NO: 1520873 - RNA, 19 nt, Homo sapiens
  misc_RNA (1)...(19): siRNA sense strand
cacaaugucucaucuaaga

SEQ ID NO: 1520874 - RNA, 19 nt, Homo sapiens
  misc_RNA (1)...(19): siRNA sense strand
caaggaagauuugagcuau

SEQ ID NO: 1520875 - RNA, 19 nt, Homo sapiens
  misc_RNA (1)...(19): siRNA sense strand
ugagagugcugaucugcua

SEQ ID NO: 1520876 - RNA, 19 nt, Homo sapiens
  misc_RNA (1)...(19): siRNA sense strand
gaccuaugauucuuaacaa

SEQ ID NO: 1520877 - RNA, 19 nt, Homo sapiens
  misc_RNA (1)...(19): siRNA sense strand
gcaagaggucuaauacugu

SEQ ID NO: 1520878 - RNA, 19 nt, Homo sapiens
  misc_RNA (1)...(19): siRNA sense strand
ggaaugagaacgaggaaag

SEQ ID NO: 1520879 - RNA, 19 nt, Homo sapiens
  misc_RNA (1)...(19): siRNA sense strand
caccagcagucuucaaguu

SEQ ID NO: 1520880 - RNA, 19 nt, Homo sapiens
  misc_RNA (1)...(19): siRNA sense strand
gaauuaagucggaaccaau

SEQ ID NO: 1520881 - RNA, 19 nt, Homo sapiens
  misc_RNA (1)...(19): siRNA sense strand
caaugucucaucuaagaaa

SEQ ID NO: 1520882 - RNA, 19 nt, Homo sapiens
  misc_RNA (1)...(19): siRNA sense strand
gcuagacccagcacauaaa

SEQ ID NO: 1520883 - RNA, 19 nt, Homo sapiens
  misc_RNA (1)...(19): siRNA sense strand
cccaggagaugacgcaaug

SEQ ID NO: 1520884 - RNA, 19 nt, Homo sapiens
  misc_RNA (1)...(19): siRNA sense strand
caaugcagaaucagccaua

SEQ ID NO: 1520885 - RNA, 19 nt, Homo sapiens
  misc_RNA (1)...(19): siRNA sense strand
ccagcagucuucaaguuca

SEQ ID NO: 1520886 - RNA, 19 nt, Homo sapiens
  misc_RNA (1)...(19): siRNA sense strand
gugagcaagaggucuaaua

SEQ ID NO: 1520887 - RNA, 19 nt, Homo sapiens
  misc_RNA (1)...(19): siRNA sense strand
cuugagaagucaucaguuc

SEQ ID NO: 1520888 - RNA, 19 nt, Homo sapiens
  misc_RNA (1)...(19): siRNA sense strand
agaauuaagucggaaccaa

SEQ ID NO: 1520889 - RNA, 19 nt, Homo sapiens
  misc_RNA (1)...(19): siRNA sense strand
agcaagaggucuaauacug

SEQ ID NO: 1520890 - RNA, 19 nt, Homo sapiens
  misc_RNA (1)...(19): siRNA sense strand
gauaugccuaacuuuauug

SEQ ID NO: 1520891 - RNA, 19 nt, Homo sapiens
  misc_RNA (1)...(19): siRNA sense strand
gcaucuauuggaagacuuu

SEQ ID NO: 1520892 - RNA, 19 nt, Homo sapiens
  misc_RNA (1)...(19): siRNA sense strand
guuggagaauuaauguuca

SEQ ID NO: 1520893 - RNA, 19 nt, Homo sapiens
  misc_RNA (1)...(19): siRNA sense strand
auacugugguugggaauga

SEQ ID NO: 1520894 - RNA, 19 nt, Homo sapiens
  misc_RNA (1)...(19): siRNA sense strand
gguuggagaauuaauguuc

SEQ ID NO: 1520895 - RNA, 19 nt, Homo sapiens
  misc_RNA (1)...(19): siRNA sense strand
gcagaaucagccauagguu

SEQ ID NO: 1520896 - RNA, 19 nt, Homo sapiens
  misc_RNA (1)...(19): siRNA sense strand
gauucaaagauaugccuaa

SEQ ID NO: 1520897 - RNA, 19 nt, Homo sapiens
  misc_RNA (1)...(19): siRNA sense strand
ggugugagcaagaggucua

SEQ ID NO: 1520898 - RNA, 19 nt, Homo sapiens
  misc_RNA (1)...(19): siRNA sense strand
cuagcagauucaaagauau

SEQ ID NO: 1520899 - RNA, 19 nt, Homo sapiens
  misc_RNA (1)...(19): siRNA sense strand
ccacugcugugaccuuuug

SEQ ID NO: 1520900 - RNA, 19 nt, Homo sapiens
  misc_RNA (1)...(19): siRNA sense strand
caaguucagagacgauuca

SEQ ID NO: 1520901 - RNA, 19 nt, Homo sapiens
  misc_RNA (1)...(19): siRNA sense strand
uagcagauucaaagauaug

SEQ ID NO: 1520902 - RNA, 19 nt, Homo sapiens
  misc_RNA (1)...(19): siRNA sense strand
uuauuggccuugagaaguc

SEQ ID NO: 1520903 - RNA, 19 nt, Homo sapiens
  misc_RNA (1)...(19): siRNA sense strand
ugugacagaucuuacaaaa

SEQ ID NO: 1520904 - RNA, 19 nt, Homo sapiens
  misc_RNA (1)...(19): siRNA sense strand
uggaagacuuucacauggu

SEQ ID NO: 1520905 - RNA, 19 nt, Homo sapiens
  misc_RNA (1)...(19): siRNA sense strand
gagcaagaggucuaauacu

SEQ ID NO: 1520906 - RNA, 19 nt, Homo sapiens
  misc_RNA (1)...(19): siRNA sense strand
uaacuuuauuggccuugag

SEQ ID NO: 1520907 - RNA, 19 nt, Homo sapiens
  misc_RNA (1)...(19): siRNA sense strand
ugucucaucuaagaaagga

SEQ ID NO: 1520908 - RNA, 19 nt, Homo sapiens
  misc_RNA (1)...(19): siRNA sense strand
uggguuacaccaggcauua

SEQ ID NO: 1520909 - RNA, 19 nt, Homo sapiens
  misc_RNA (1)...(19): siRNA sense strand
aagcuacgcaagucaaguu

SEQ ID NO: 1520910 - RNA, 19 nt, Homo sapiens
  misc_RNA (1)...(19): siRNA sense strand
cuacacaagcuacgcaagu

SEQ ID NO: 1520911 - RNA, 19 nt, Homo sapiens
  misc_RNA (1)...(19): siRNA sense strand
gaggucuaauacugugguu

SEQ ID NO: 1520912 - RNA, 19 nt, Homo sapiens
  misc_RNA (1)...(19): siRNA sense strand
gagagugcugaucugcuaa

SEQ ID NO: 1520913 - RNA, 19 nt, Homo sapiens
  misc_RNA (1)...(19): siRNA sense strand
agacccagcacauaaaucu

SEQ ID NO: 1520914 - RNA, 19 nt, Homo sapiens
  misc_RNA (1)...(19): siRNA sense strand
guuaauucucacagucuuu

SEQ ID NO: 1520915 - RNA, 19 nt, Homo sapiens
  misc_RNA (1)...(19): siRNA sense strand
agaccuaugauucuuaaca

SEQ ID NO: 1520916 - RNA, 19 nt, Homo sapiens
  misc_RNA (1)...(19): siRNA sense strand
ugagcaagaggucuaauac

SEQ ID NO: 1520917 - RNA, 19 nt, Homo sapiens
  misc_RNA (1)...(19): siRNA sense strand
cgccacugcugugaccuuu

SEQ ID NO: 1520918 - RNA, 19 nt, Homo sapiens
  misc_RNA (1)...(19): siRNA sense strand
gcaccagcagucuucaagu

SEQ ID NO: 1520919 - RNA, 19 nt, Homo sapiens
  misc_RNA (1)...(19): siRNA sense strand
gaccccaaguuuaguauuc

SEQ ID NO: 1520920 - RNA, 19 nt, Homo sapiens
  misc_RNA (1)...(19): siRNA sense strand
cugcuaaucagcugcaaug

SEQ ID NO: 1520921 - RNA, 19 nt, Homo sapiens
  misc_RNA (1)...(19): siRNA sense strand
uuacaccaggcauuacuga

SEQ ID NO: 1520922 - RNA, 19 nt, Homo sapiens
  misc_RNA (1)...(19): siRNA sense strand
gaggugaucucucaaauaa

SEQ ID NO: 1520923 - RNA, 19 nt, Homo sapiens
  misc_RNA (1)...(19): siRNA sense strand
gaaagggucucacgagcua

SEQ ID NO: 1520924 - RNA, 19 nt, Homo sapiens
  misc_RNA (1)...(19): siRNA sense strand
ccacacauguugaaauuaa

SEQ ID NO: 1520925 - RNA, 19 nt, Homo sapiens
  misc_RNA (1)...(19): siRNA sense strand
ugacaaagaucuucuacuu

SEQ ID NO: 1520926 - RNA, 19 nt, Homo sapiens
  misc_RNA (1)...(19): siRNA sense strand
acaaagaucuucuacuuga

SEQ ID NO: 1520927 - RNA, 19 nt, Homo sapiens
  misc_RNA (1)...(19): siRNA sense strand
gauuuaaggucgcaaguaa

SEQ ID NO: 1520928 - RNA, 19 nt, Homo sapiens
  misc_RNA (1)...(19): siRNA sense strand
gcaaauuccuuggaguaua

SEQ ID NO: 1520929 - RNA, 19 nt, Homo sapiens
  misc_RNA (1)...(19): siRNA sense strand
gaucugggcuugcaagaga

SEQ ID NO: 1520930 - RNA, 19 nt, Homo sapiens
  misc_RNA (1)...(19): siRNA sense strand
gcagaaugguaacuacuuu

SEQ ID NO: 1520931 - RNA, 19 nt, Homo sapiens
  misc_RNA (1)...(19): siRNA sense strand
agagggagauuguauuuaa

SEQ ID NO: 1520932 - RNA, 19 nt, Homo sapiens
  misc_RNA (1)...(19): siRNA sense strand
ggugaucucucaaauaaau

SEQ ID NO: 1520933 - RNA, 19 nt, Homo sapiens
  misc_RNA (1)...(19): siRNA sense strand
ucacugaucuucucuagga

SEQ ID NO: 1520934 - RNA, 19 nt, Homo sapiens
  misc_RNA (1)...(19): siRNA sense strand
caaauuccuuggaguauau

SEQ ID NO: 1520935 - RNA, 19 nt, Homo sapiens
  misc_RNA (1)...(19): siRNA sense strand
gguaacuacuuucugauuu

SEQ ID NO: 1520936 - RNA, 19 nt, Homo sapiens
  misc_RNA (1)...(19): siRNA sense strand
gaauaggacuagauuugga

SEQ ID NO: 1520937 - RNA, 19 nt, Homo sapiens
  misc_RNA (1)...(19): siRNA sense strand
ggaaauacuugcugaaagc

SEQ ID NO: 1520938 - RNA, 19 nt, Homo sapiens
  misc_RNA (1)...(19): siRNA sense strand
ugaaggacuuaagcaauua

SEQ ID NO: 1520939 - RNA, 19 nt, Homo sapiens
  misc_RNA (1)...(19): siRNA sense strand
gaacuugaucggaaagaaa

SEQ ID NO: 1520940 - RNA, 19 nt, Homo sapiens
  misc_RNA (1)...(19): siRNA sense strand
aaacugcccuaaccuuaaa

SEQ ID NO: 1520941 - RNA, 19 nt, Homo sapiens
  misc_RNA (1)...(19): siRNA sense strand
uaaggucgcaaguaauuua

SEQ ID NO: 1520942 - RNA, 19 nt, Homo sapiens
  misc_RNA (1)...(19): siRNA sense strand
gugaagaaauggacucugu

SEQ ID NO: 1520943 - RNA, 19 nt, Homo sapiens
  misc_RNA (1)...(19): siRNA sense strand
uaaaggcuauucuacacaa

SEQ ID NO: 1520944 - RNA, 19 nt, Homo sapiens
  misc_RNA (1)...(19): siRNA sense strand
agaaagggcucacugaucu

SEQ ID NO: 1520945 - RNA, 19 nt, Homo sapiens
  misc_RNA (1)...(19): siRNA sense strand
gcacuggaguuccucaaag

SEQ ID NO: 1520946 - RNA, 19 nt, Homo sapiens
  misc_RNA (1)...(19): siRNA sense strand
gaaccaaaauuuuccaguu

SEQ ID NO: 1520947 - RNA, 19 nt, Homo sapiens
  misc_RNA (1)...(19): siRNA sense strand
gugcaucacuucuguaugg

SEQ ID NO: 1520948 - RNA, 19 nt, Homo sapiens
  misc_RNA (1)...(19): siRNA sense strand
ugaccucgaugacuuagaa

SEQ ID NO: 1520949 - RNA, 19 nt, Homo sapiens
  misc_RNA (1)...(19): siRNA sense strand
ggauauuuguucauugguu

SEQ ID NO: 1520950 - RNA, 19 nt, Homo sapiens
  misc_RNA (1)...(19): siRNA sense strand
gaggauauuuguucauugg

SEQ ID NO: 1520951 - RNA, 19 nt, Homo sapiens
  misc_RNA (1)...(19): siRNA sense strand
ggauaugucugugcacuca

SEQ ID NO: 1520952 - RNA, 19 nt, Homo sapiens
  misc_RNA (1)...(19): siRNA sense strand
gaaggauuguaaacugaga

SEQ ID NO: 1520953 - RNA, 19 nt, Homo sapiens
  misc_RNA (1)...(19): siRNA sense strand
caaacugcccuaaccuuaa

SEQ ID NO: 1520954 - RNA, 19 nt, Homo sapiens
  misc_RNA (1)...(19): siRNA sense strand
gauaacguauacuccagaa

SEQ ID NO: 1520955 - RNA, 19 nt, Homo sapiens
  misc_RNA (1)...(19): siRNA sense strand
aggcugaaauugagaauga

SEQ ID NO: 1520956 - RNA, 19 nt, Homo sapiens
  misc_RNA (1)...(19): siRNA sense strand
gugaugcucuucugauuuc

SEQ ID NO: 1520957 - RNA, 19 nt, Homo sapiens
  misc_RNA (1)...(19): siRNA sense strand
ugagugaccucgaugacuu

SEQ ID NO: 1520958 - RNA, 19 nt, Homo sapiens
  misc_RNA (1)...(19): siRNA sense strand
ggaggauauuuguucauug

SEQ ID NO: 1520959 - RNA, 19 nt, Homo sapiens
  misc_RNA (1)...(19): siRNA sense strand
gaagaaauggacucuguca

SEQ ID NO: 1520960 - RNA, 19 nt, Homo sapiens
  misc_RNA (1)...(19): siRNA sense strand
uaauuuacccugaauccua

SEQ ID NO: 1520961 - RNA, 19 nt, Homo sapiens
  misc_RNA (1)...(19): siRNA sense strand
aaugguaacuacuuucuga

SEQ ID NO: 1520962 - RNA, 19 nt, Homo sapiens
  misc_RNA (1)...(19): siRNA sense strand
gcugugcaguguuugcuaa

SEQ ID NO: 1520963 - RNA, 19 nt, Homo sapiens
  misc_RNA (1)...(19): siRNA sense strand
uggaguauaugauaaagga

SEQ ID NO: 1520964 - RNA, 19 nt, Homo sapiens
  misc_RNA (1)...(19): siRNA sense strand
gguauagauugcuuucaga

SEQ ID NO: 1520965 - RNA, 19 nt, Homo sapiens
  misc_RNA (1)...(19): siRNA sense strand
acaaacugcccuaaccuua

SEQ ID NO: 1520966 - RNA, 19 nt, Homo sapiens
  misc_RNA (1)...(19): siRNA sense strand
gguacaggaugaggaguuu

SEQ ID NO: 1520967 - RNA, 19 nt, Homo sapiens
  misc_RNA (1)...(19): siRNA sense strand
gaaagauaaccgugugaug

SEQ ID NO: 1520968 - RNA, 19 nt, Homo sapiens
  misc_RNA (1)...(19): siRNA sense strand
gauggaggauauuuguuca

SEQ ID NO: 1520969 - RNA, 19 nt, Homo sapiens
  misc_RNA (1)...(19): siRNA sense strand
auagauugcuuucagaaga

SEQ ID NO: 1520970 - RNA, 19 nt, Homo sapiens
  misc_RNA (1)...(19): siRNA sense strand
ggaagucuuuguggauaug

SEQ ID NO: 1520971 - RNA, 19 nt, Homo sapiens
  misc_RNA (1)...(19): siRNA sense strand
gauucucccucaauauguu

SEQ ID NO: 1520972 - RNA, 19 nt, Homo sapiens
  misc_RNA (1)...(19): siRNA sense strand
gauggaauaggacuagauu

SEQ ID NO: 1520973 - RNA, 19 nt, Homo sapiens
  misc_RNA (1)...(19): siRNA sense strand
augaaggacuuaagcaauu

SEQ ID NO: 1520974 - RNA, 19 nt, Homo sapiens
  misc_RNA (1)...(19): siRNA sense strand
ucaggaaggauaacguaua

SEQ ID NO: 1520975 - RNA, 19 nt, Homo sapiens
  misc_RNA (1)...(19): siRNA sense strand
gugcaguguuugcuaaaga

SEQ ID NO: 1520976 - RNA, 19 nt, Homo sapiens
  misc_RNA (1)...(19): siRNA sense strand
gagaaugaagacuauaguu

SEQ ID NO: 1520977 - RNA, 19 nt, Homo sapiens
  misc_RNA (1)...(19): siRNA sense strand
ccuggcaugugaaagauaa

SEQ ID NO: 1520978 - RNA, 19 nt, Homo sapiens
  misc_RNA (1)...(19): siRNA sense strand
aaggaagucuuuguggaua

SEQ ID NO: 1520979 - RNA, 19 nt, Homo sapiens
  misc_RNA (1)...(19): siRNA sense strand
guauuuaagaccagaauug

SEQ ID NO: 1520980 - RNA, 19 nt, Homo sapiens
  misc_RNA (1)...(19): siRNA sense strand
uagauugcuuucagaagaa

SEQ ID NO: 1520981 - RNA, 19 nt, Homo sapiens
  misc_RNA (1)...(19): siRNA sense strand
caauauguuucugcauuug

SEQ ID NO: 1520982 - RNA, 19 nt, Homo sapiens
  misc_RNA (1)...(19): siRNA sense strand
ggaaggaauggauccaguu

SEQ ID NO: 1520983 - RNA, 19 nt, Homo sapiens
  misc_RNA (1)...(19): siRNA sense strand
caagcugccaguaugauuu

SEQ ID NO: 1520984 - RNA, 19 nt, Homo sapiens
  misc_RNA (1)...(19): siRNA sense strand
gcaagagaaccacaaaguc

SEQ ID NO: 1520985 - RNA, 19 nt, Homo sapiens
  misc_RNA (1)...(19): siRNA sense strand
gcucacugaucuucucuag

SEQ ID NO: 1520986 - RNA, 19 nt, Homo sapiens
  misc_RNA (1)...(19): siRNA sense strand
ggagagaacaguaggaaaa

SEQ ID NO: 1520987 - RNA, 19 nt, Homo sapiens
  misc_RNA (1)...(19): siRNA sense strand
gaaggaaauacuugcugaa

SEQ ID NO: 1520988 - RNA, 19 nt, Homo sapiens
  misc_RNA (1)...(19): siRNA sense strand
gacaaagaucuucuacuug

SEQ ID NO: 1520989 - RNA, 19 nt, Homo sapiens
  misc_RNA (1)...(19): siRNA sense strand
cagaaaaccuuugcagaaa

SEQ ID NO: 1520990 - RNA, 19 nt, Homo sapiens
  misc_RNA (1)...(19): siRNA sense strand
caggaaggauaacguauac

SEQ ID NO: 1520991 - RNA, 19 nt, Homo sapiens
  misc_RNA (1)...(19): siRNA sense strand
gaaggaauggauccaguuc

SEQ ID NO: 1520992 - RNA, 19 nt, Homo sapiens
  misc_RNA (1)...(19): siRNA sense strand
aaugaaggauuguaaacug

SEQ ID NO: 1520993 - RNA, 19 nt, Homo sapiens
  misc_RNA (1)...(19): siRNA sense strand
cucaauauguuucugcauu

SEQ ID NO: 1520994 - RNA, 19 nt, Homo sapiens
  misc_RNA (1)...(19): siRNA sense strand
cuagagggagauuguauuu

SEQ ID NO: 1520995 - RNA, 19 nt, Homo sapiens
  misc_RNA (1)...(19): siRNA sense strand
uaaagcagaagcuggcaaa

SEQ ID NO: 1520996 - RNA, 19 nt, Homo sapiens
  misc_RNA (1)...(19): siRNA sense strand
uggaauaggacuagauuug

SEQ ID NO: 1520997 - RNA, 19 nt, Homo sapiens
  misc_RNA (1)...(19): siRNA sense strand
ggaaggauaacguauacuc

SEQ ID NO: 1520998 - RNA, 19 nt, Homo sapiens
  misc_RNA (1)...(19): siRNA sense strand
ccugauuccuggcauguga

SEQ ID NO: 1520999 - RNA, 19 nt, Homo sapiens
  misc_RNA (1)...(19): siRNA sense strand
uggaggauauuuguucauu

SEQ ID NO: 1521000 - RNA, 19 nt, Homo sapiens
  misc_RNA (1)...(19): siRNA sense strand
cgaguugguucuagaugug

SEQ ID NO: 1521001 - RNA, 19 nt, Homo sapiens
  misc_RNA (1)...(19): siRNA sense strand
aaauacugauggaggauau

SEQ ID NO: 1521002 - RNA, 19 nt, Homo sapiens
  misc_RNA (1)...(19): siRNA sense strand
ccagauaaucgguauagau

SEQ ID NO: 1521003 - RNA, 19 nt, Homo sapiens
  misc_RNA (1)...(19): siRNA sense strand
ggaauaggacuagauuugg

SEQ ID NO: 1521004 - RNA, 19 nt, Homo sapiens
  misc_RNA (1)...(19): siRNA sense strand
ugugugcucugcucaauuc

SEQ ID NO: 1521005 - RNA, 19 nt, Homo sapiens
  misc_RNA (1)...(19): siRNA sense strand
gugaagucauggagcuuga

SEQ ID NO: 1521006 - RNA, 19 nt, Homo sapiens
  misc_RNA (1)...(19): siRNA sense strand
gcuuucagaagaaugauaa

SEQ ID NO: 1521007 - RNA, 19 nt, Homo sapiens
  misc_RNA (1)...(19): siRNA sense strand
gaauuaugccgaguugguu

SEQ ID NO: 1521008 - RNA, 19 nt, Homo sapiens
  misc_RNA (1)...(19): siRNA sense strand
gguggaggcugaaccaaaa

SEQ ID NO: 1521009 - RNA, 19 nt, Homo sapiens
  misc_RNA (1)...(19): siRNA sense strand
gagugaccucgaugacuua

SEQ ID NO: 1521010 - RNA, 19 nt, Homo sapiens
  misc_RNA (1)...(19): siRNA sense strand
caaauacugauggaggaua

SEQ ID NO: 1521011 - RNA, 19 nt, Homo sapiens
  misc_RNA (1)...(19): siRNA sense strand
ggagugaucaaggcugaaa

SEQ ID NO: 1521012 - RNA, 19 nt, Homo sapiens
  misc_RNA (1)...(19): siRNA sense strand
gagggagauuguauuuaag

SEQ ID NO: 1521013 - RNA, 19 nt, Homo sapiens
  misc_RNA (1)...(19): siRNA sense strand
ugacuuagaaagagaaauc

SEQ ID NO: 1521014 - RNA, 19 nt, Homo sapiens
  misc_RNA (1)...(19): siRNA sense strand
gaguuuaaaggcuauucua

SEQ ID NO: 1521015 - RNA, 19 nt, Homo sapiens
  misc_RNA (1)...(19): siRNA sense strand
gaaccacaaaguccucugu

SEQ ID NO: 1521016 - RNA, 19 nt, Homo sapiens
  misc_RNA (1)...(19): siRNA sense strand
gagcuggucuguggaucug

SEQ ID NO: 1521017 - RNA, 19 nt, Homo sapiens
  misc_RNA (1)...(19): siRNA sense strand
uggagaagaagaagauaaa

SEQ ID NO: 1521018 - RNA, 19 nt, Homo sapiens
  misc_RNA (1)...(19): siRNA sense strand
uacaaaagauggaauagga

SEQ ID NO: 1521019 - RNA, 19 nt, Homo sapiens
  misc_RNA (1)...(19): siRNA sense strand
guauggagaagaagaagau

SEQ ID NO: 1521020 - RNA, 19 nt, Homo sapiens
  misc_RNA (1)...(19): siRNA sense strand
aagcugccaguaugauuua

SEQ ID NO: 1521021 - RNA, 19 nt, Homo sapiens
  misc_RNA (1)...(19): siRNA sense strand
ugacaagcugccaguauga

SEQ ID NO: 1521022 - RNA, 19 nt, Homo sapiens
  misc_RNA (1)...(19): siRNA sense strand
caacagagaagaugaagaa

SEQ ID NO: 1521023 - RNA, 19 nt, Homo sapiens
  misc_RNA (1)...(19): siRNA sense strand
gaagaugaagaaaggguua

SEQ ID NO: 1521024 - RNA, 19 nt, Homo sapiens
  misc_RNA (1)...(19): siRNA sense strand
gagcugaacucggauagug

SEQ ID NO: 1521025 - RNA, 19 nt, Homo sapiens
  misc_RNA (1)...(19): siRNA sense strand
gcagauggcacuuuccaaa

SEQ ID NO: 1521026 - RNA, 19 nt, Homo sapiens
  misc_RNA (1)...(19): siRNA sense strand
gcacagcugagcccuauga

SEQ ID NO: 1521027 - RNA, 19 nt, Homo sapiens
  misc_RNA (1)...(19): siRNA sense strand
cagagaagaugaagaaagg

SEQ ID NO: 1521028 - RNA, 19 nt, Homo sapiens
  misc_RNA (1)...(19): siRNA sense strand
gcaucgguauuucuauaaa

SEQ ID NO: 1521029 - RNA, 19 nt, Homo sapiens
  misc_RNA (1)...(19): siRNA sense strand
aagagaaucuggugacuuc

SEQ ID NO: 1521030 - RNA, 19 nt, Homo sapiens
  misc_RNA (1)...(19): siRNA sense strand
ccagcaaccuacuguaaug

SEQ ID NO: 1521031 - RNA, 19 nt, Homo sapiens
  misc_RNA (1)...(19): siRNA sense strand
uggcaucgguauuucuaua

SEQ ID NO: 1521032 - RNA, 19 nt, Homo sapiens
  misc_RNA (1)...(19): siRNA sense strand
ggaaagaaaggcucaagca

SEQ ID NO: 1521033 - RNA, 19 nt, Homo sapiens
  misc_RNA (1)...(19): siRNA sense strand
gaucucagagcuccuugua

SEQ ID NO: 1521034 - RNA, 19 nt, Homo sapiens
  misc_RNA (1)...(19): siRNA sense strand
ucuauaaaguccaucaguu

SEQ ID NO: 1521035 - RNA, 19 nt, Homo sapiens
  misc_RNA (1)...(19): siRNA sense strand
ucugaagccuuggaguuua

SEQ ID NO: 1521036 - RNA, 19 nt, Homo sapiens
  misc_RNA (1)...(19): siRNA sense strand
gagcaucucccucgugaca

SEQ ID NO: 1521037 - RNA, 19 nt, Homo sapiens
  misc_RNA (1)...(19): siRNA sense strand
ugaagaaaggguuaucuga

SEQ ID NO: 1521038 - RNA, 19 nt, Homo sapiens
  misc_RNA (1)...(19): siRNA sense strand
gagggaagcgagccuaaug

SEQ ID NO: 1521039 - RNA, 19 nt, Homo sapiens
  misc_RNA (1)...(19): siRNA sense strand
gaaaggguuaucugacuuc

SEQ ID NO: 1521040 - RNA, 19 nt, Homo sapiens
  misc_RNA (1)...(19): siRNA sense strand
aggguuaucugacuuccua

SEQ ID NO: 1521041 - RNA, 19 nt, Homo sapiens
  misc_RNA (1)...(19): siRNA sense strand
gagcaacagagaagaugaa

SEQ ID NO: 1521042 - RNA, 19 nt, Homo sapiens
  misc_RNA (1)...(19): siRNA sense strand
uacauucccugaaggagaa

SEQ ID NO: 1521043 - RNA, 19 nt, Homo sapiens
  misc_RNA (1)...(19): siRNA sense strand
gaagagaaucuggugacuu

SEQ ID NO: 1521044 - RNA, 19 nt, Homo sapiens
  misc_RNA (1)...(19): siRNA sense strand
gacuuugacuuggacauga

SEQ ID NO: 1521045 - RNA, 19 nt, Homo sapiens
  misc_RNA (1)...(19): siRNA sense strand
agaaaggguuaucugacuu

SEQ ID NO: 1521046 - RNA, 19 nt, Homo sapiens
  misc_RNA (1)...(19): siRNA sense strand
ggucccugcuccugucuga

SEQ ID NO: 1521047 - RNA, 19 nt, Homo sapiens
  misc_RNA (1)...(19): siRNA sense strand
gagcuaccaagcagucaaa

SEQ ID NO: 1521048 - RNA, 19 nt, Homo sapiens
  misc_RNA (1)...(19): siRNA sense strand
gcaucucccucgugacaca

SEQ ID NO: 1521049 - RNA, 19 nt, Homo sapiens
  misc_RNA (1)...(19): siRNA sense strand
gaggagcucaugggcauuu

SEQ ID NO: 1521050 - RNA, 19 nt, Homo sapiens
  misc_RNA (1)...(19): siRNA sense strand
cuauaaaguccaucaguug

SEQ ID NO: 1521051 - RNA, 19 nt, Homo sapiens
  misc_RNA (1)...(19): siRNA sense strand
ucaaggagaagcuggcuau

SEQ ID NO: 1521052 - RNA, 19 nt, Homo sapiens
  misc_RNA (1)...(19): siRNA sense strand
aagaaaggguuaucugacu

SEQ ID NO: 1521053 - RNA, 19 nt, Homo sapiens
  misc_RNA (1)...(19): siRNA sense strand
uggcacagcugagcccuau

SEQ ID NO: 1521054 - RNA, 19 nt, Homo sapiens
  misc_RNA (1)...(19): siRNA sense strand
gcaaccuacuguaaugaac

SEQ ID NO: 1521055 - RNA, 19 nt, Homo sapiens
  misc_RNA (1)...(19): siRNA sense strand
aggagaagcuggcuauugc

SEQ ID NO: 1521056 - RNA, 19 nt, Homo sapiens
  misc_RNA (1)...(19): siRNA sense strand
ggaggaagaggagcucaug

SEQ ID NO: 1521057 - RNA, 19 nt, Homo sapiens
  misc_RNA (1)...(19): siRNA sense strand
ggagcaacagagaagauga

SEQ ID NO: 1521058 - RNA, 19 nt, Homo sapiens
  misc_RNA (1)...(19): siRNA sense strand
ggacccagcaaccuacugu

SEQ ID NO: 1521059 - RNA, 19 nt, Homo sapiens
  misc_RNA (1)...(19): siRNA sense strand
gaggugacuccaucagaga

SEQ ID NO: 1521060 - RNA, 19 nt, Homo sapiens
  misc_RNA (1)...(19): siRNA sense strand
ggaagucuacacccuccaa

SEQ ID NO: 1521061 - RNA, 19 nt, Homo sapiens
  misc_RNA (1)...(19): siRNA sense strand
ucuacacccuccaacaaug

SEQ ID NO: 1521062 - RNA, 19 nt, Homo sapiens
  misc_RNA (1)...(19): siRNA sense strand
caagcacggacaucaguga

SEQ ID NO: 1521063 - RNA, 19 nt, Homo sapiens
  misc_RNA (1)...(19): siRNA sense strand
cugaagccuuggaguuuau

SEQ ID NO: 1521064 - RNA, 19 nt, Homo sapiens
  misc_RNA (1)...(19): siRNA sense strand
ccacagacuuacggguguu

SEQ ID NO: 1521065 - RNA, 19 nt, Homo sapiens
  misc_RNA (1)...(19): siRNA sense strand
ggcaucgguauuucuauaa

SEQ ID NO: 1521066 - RNA, 19 nt, Homo sapiens
  misc_RNA (1)...(19): siRNA sense strand
caucgguauuucuauaaag

SEQ ID NO: 1521067 - RNA, 19 nt, Homo sapiens
  misc_RNA (1)...(19): siRNA sense strand
ccagcguggucaaggagaa

SEQ ID NO: 1521068 - RNA, 19 nt, Homo sapiens
  misc_RNA (1)...(19): siRNA sense strand
cuacuguaaugaaccagau

SEQ ID NO: 1521069 - RNA, 19 nt, Homo sapiens
  misc_RNA (1)...(19): siRNA sense strand
cacgagugcuacccaagga

SEQ ID NO: 1521070 - RNA, 19 nt, Homo sapiens
  misc_RNA (1)...(19): siRNA sense strand
aaagguuccuguggccaaa

SEQ ID NO: 1521071 - RNA, 19 nt, Homo sapiens
  misc_RNA (1)...(19): siRNA sense strand
ccucugcccguucucuaua

SEQ ID NO: 1521072 - RNA, 19 nt, Homo sapiens
  misc_RNA (1)...(19): siRNA sense strand
gcugggaggaggaggaaga

SEQ ID NO: 1521073 - RNA, 19 nt, Homo sapiens
  misc_RNA (1)...(19): siRNA sense strand
cuaaugguccuggguguga

SEQ ID NO: 1521074 - RNA, 19 nt, Homo sapiens
  misc_RNA (1)...(19): siRNA sense strand
ggccaaaauuucuacauuc

SEQ ID NO: 1521075 - RNA, 19 nt, Homo sapiens
  misc_RNA (1)...(19): siRNA sense strand
gcaacagagaagaugaaga

SEQ ID NO: 1521076 - RNA, 19 nt, Homo sapiens
  misc_RNA (1)...(19): siRNA sense strand
accaagcagucaaagagaa

SEQ ID NO: 1521077 - RNA, 19 nt, Homo sapiens
  misc_RNA (1)...(19): siRNA sense strand
cuaccaagcagucaaagag

SEQ ID NO: 1521078 - RNA, 19 nt, Homo sapiens
  misc_RNA (1)...(19): siRNA sense strand
gggcauuucacccauaucu

SEQ ID NO: 1521079 - RNA, 19 nt, Homo sapiens
  misc_RNA (1)...(19): siRNA sense strand
ccucugaagccuuggaguu

SEQ ID NO: 1521080 - RNA, 19 nt, Homo sapiens
  misc_RNA (1)...(19): siRNA sense strand
cccagguggugcagcauga

SEQ ID NO: 1521081 - RNA, 19 nt, Homo sapiens
  misc_RNA (1)...(19): siRNA sense strand
agaaucuggugacuucagu

SEQ ID NO: 1521082 - RNA, 19 nt, Homo sapiens
  misc_RNA (1)...(19): siRNA sense strand
aaggagaagcuggcuauug

SEQ ID NO: 1521083 - RNA, 19 nt, Homo sapiens
  misc_RNA (1)...(19): siRNA sense strand
cagaggugacuccaucaga

SEQ ID NO: 1521084 - RNA, 19 nt, Homo sapiens
  misc_RNA (1)...(19): siRNA sense strand
gaauucuggcaucgguauu

SEQ ID NO: 1521085 - RNA, 19 nt, Homo sapiens
  misc_RNA (1)...(19): siRNA sense strand
cagagggaagcgagccuaa

SEQ ID NO: 1521086 - RNA, 19 nt, Homo sapiens
  misc_RNA (1)...(19): siRNA sense strand
acuuggacaugacugaaga

SEQ ID NO: 1521087 - RNA, 19 nt, Homo sapiens
  misc_RNA (1)...(19): siRNA sense strand
acagagaagaugaagaaag

SEQ ID NO: 1521088 - RNA, 19 nt, Homo sapiens
  misc_RNA (1)...(19): siRNA sense strand
cagcaugacacggccugua

SEQ ID NO: 1521089 - RNA, 19 nt, Homo sapiens
  misc_RNA (1)...(19): siRNA sense strand
gcuaccaagcagucaaaga

SEQ ID NO: 1521090 - RNA, 19 nt, Homo sapiens
  misc_RNA (1)...(19): siRNA sense strand
cagcaaccuacuguaauga

SEQ ID NO: 1521091 - RNA, 19 nt, Homo sapiens
  misc_RNA (1)...(19): siRNA sense strand
gggaagcgagccuaauggu

SEQ ID NO: 1521092 - RNA, 19 nt, Homo sapiens
  misc_RNA (1)...(19): siRNA sense strand
gugaggacugggagaaaga

SEQ ID NO: 1521093 - RNA, 19 nt, Homo sapiens
  misc_RNA (1)...(19): siRNA sense strand
gcagcagagcuaccaagca

SEQ ID NO: 1521094 - RNA, 19 nt, Homo sapiens
  misc_RNA (1)...(19): siRNA sense strand
gcagaaagauugcaaacaa

SEQ ID NO: 1521095 - RNA, 19 nt, Homo sapiens
  misc_RNA (1)...(19): siRNA sense strand
gcaaagaaaguucauagua

SEQ ID NO: 1521096 - RNA, 19 nt, Homo sapiens
  misc_RNA (1)...(19): siRNA sense strand
gagaacagcugaagaaagu

SEQ ID NO: 1521097 - RNA, 19 nt, Homo sapiens
  misc_RNA (1)...(19): siRNA sense strand
caacaucauucgucucuuu

SEQ ID NO: 1521098 - RNA, 19 nt, Homo sapiens
  misc_RNA (1)...(19): siRNA sense strand
gaagagacauguuuguauc

SEQ ID NO: 1521099 - RNA, 19 nt, Homo sapiens
  misc_RNA (1)...(19): siRNA sense strand
cagcaaagccagcaacuua

SEQ ID NO: 1521100 - RNA, 19 nt, Homo sapiens
  misc_RNA (1)...(19): siRNA sense strand
ggaaacagaagcuuacuuu

SEQ ID NO: 1521101 - RNA, 19 nt, Homo sapiens
  misc_RNA (1)...(19): siRNA sense strand
ggacaguguuguagaagaa

SEQ ID NO: 1521102 - RNA, 19 nt, Homo sapiens
  misc_RNA (1)...(19): siRNA sense strand
gcugaaaguugaagaagaa

SEQ ID NO: 1521103 - RNA, 19 nt, Homo sapiens
  misc_RNA (1)...(19): siRNA sense strand
ugaagaagaugacaaggaa

SEQ ID NO: 1521104 - RNA, 19 nt, Homo sapiens
  misc_RNA (1)...(19): siRNA sense strand
gagaaggaaucaguaauga

SEQ ID NO: 1521105 - RNA, 19 nt, Homo sapiens
  misc_RNA (1)...(19): siRNA sense strand
uaagaaacauucaccauca

SEQ ID NO: 1521106 - RNA, 19 nt, Homo sapiens
  misc_RNA (1)...(19): siRNA sense strand
gaaauaggagugcagcaua

SEQ ID NO: 1521107 - RNA, 19 nt, Homo sapiens
  misc_RNA (1)...(19): siRNA sense strand
gacgaugacuuuacauuug

SEQ ID NO: 1521108 - RNA, 19 nt, Homo sapiens
  misc_RNA (1)...(19): siRNA sense strand
caaagaaaguucauaguac

SEQ ID NO: 1521109 - RNA, 19 nt, Homo sapiens
  misc_RNA (1)...(19): siRNA sense strand
gcuauaauuucuccuacua

SEQ ID NO: 1521110 - RNA, 19 nt, Homo sapiens
  misc_RNA (1)...(19): siRNA sense strand
uaacacaauucccuucauu

SEQ ID NO: 1521111 - RNA, 19 nt, Homo sapiens
  misc_RNA (1)...(19): siRNA sense strand
gcacaguagugauuggaaa

SEQ ID NO: 1521112 - RNA, 19 nt, Homo sapiens
  misc_RNA (1)...(19): siRNA sense strand
ggaccaaacuuguauucau

SEQ ID NO: 1521113 - RNA, 19 nt, Homo sapiens
  misc_RNA (1)...(19): siRNA sense strand
gcaagaaggaagagaauga

SEQ ID NO: 1521114 - RNA, 19 nt, Homo sapiens
  misc_RNA (1)...(19): siRNA sense strand
gagcaucaaucuacagugu

SEQ ID NO: 1521115 - RNA, 19 nt, Homo sapiens
  misc_RNA (1)...(19): siRNA sense strand
uuacuuugcugaccugaua

SEQ ID NO: 1521116 - RNA, 19 nt, Homo sapiens
  misc_RNA (1)...(19): siRNA sense strand
gcaauuaaccguggagaaa

SEQ ID NO: 1521117 - RNA, 19 nt, Homo sapiens
  misc_RNA (1)...(19): siRNA sense strand
gcaaaugccaauaguacua

SEQ ID NO: 1521118 - RNA, 19 nt, Homo sapiens
  misc_RNA (1)...(19): siRNA sense strand
ggaaaugaauugggacaug

SEQ ID NO: 1521119 - RNA, 19 nt, Homo sapiens
  misc_RNA (1)...(19): siRNA sense strand
gaaugacgaugacuuuaca

SEQ ID NO: 1521120 - RNA, 19 nt, Homo sapiens
  misc_RNA (1)...(19): siRNA sense strand
ugagaaagauguugauaag

SEQ ID NO: 1521121 - RNA, 19 nt, Homo sapiens
  misc_RNA (1)...(19): siRNA sense strand
agaagaaugugucagcuuu

SEQ ID NO: 1521122 - RNA, 19 nt, Homo sapiens
  misc_RNA (1)...(19): siRNA sense strand
gagccaaacuaacaucaga

SEQ ID NO: 1521123 - RNA, 19 nt, Homo sapiens
  misc_RNA (1)...(19): siRNA sense strand
ucaguccgcuuuaaagaaa

SEQ ID NO: 1521124 - RNA, 19 nt, Homo sapiens
  misc_RNA (1)...(19): siRNA sense strand
aaacaugguugcaaauuag

SEQ ID NO: 1521125 - RNA, 19 nt, Homo sapiens
  misc_RNA (1)...(19): siRNA sense strand
gaauucagagccaaacuaa

SEQ ID NO: 1521126 - RNA, 19 nt, Homo sapiens
  misc_RNA (1)...(19): siRNA sense strand
gagaagugcaguuuccaua

SEQ ID NO: 1521127 - RNA, 19 nt, Homo sapiens
  misc_RNA (1)...(19): siRNA sense strand
gcagggaaacagaagcuua

SEQ ID NO: 1521128 - RNA, 19 nt, Homo sapiens
  misc_RNA (1)...(19): siRNA sense strand
gaagaugacaaggaagaua

SEQ ID NO: 1521129 - RNA, 19 nt, Homo sapiens
  misc_RNA (1)...(19): siRNA sense strand
gcagagaaggaaucaguaa

SEQ ID NO: 1521130 - RNA, 19 nt, Homo sapiens
  misc_RNA (1)...(19): siRNA sense strand
gcucagaagucguuguugu

SEQ ID NO: 1521131 - RNA, 19 nt, Homo sapiens
  misc_RNA (1)...(19): siRNA sense strand
gaacagcugaagaaaguga

SEQ ID NO: 1521132 - RNA, 19 nt, Homo sapiens
  misc_RNA (1)...(19): siRNA sense strand
acaauucccuucauuauac

SEQ ID NO: 1521133 - RNA, 19 nt, Homo sapiens
  misc_RNA (1)...(19): siRNA sense strand
ggaccucauucggguguua

SEQ ID NO: 1521134 - RNA, 19 nt, Homo sapiens
  misc_RNA (1)...(19): siRNA sense strand
ugauaaaccugauuucaag

SEQ ID NO: 1521135 - RNA, 19 nt, Homo sapiens
  misc_RNA (1)...(19): siRNA sense strand
gaccaaacuuguauucauc

SEQ ID NO: 1521136 - RNA, 19 nt, Homo sapiens
  misc_RNA (1)...(19): siRNA sense strand
gagcaaaacugcagugaau

SEQ ID NO: 1521137 - RNA, 19 nt, Homo sapiens
  misc_RNA (1)...(19): siRNA sense strand
cagauaugauugcuaaaga

SEQ ID NO: 1521138 - RNA, 19 nt, Homo sapiens
  misc_RNA (1)...(19): siRNA sense strand
gaaaguucauaguacaauc

SEQ ID NO: 1521139 - RNA, 19 nt, Homo sapiens
  misc_RNA (1)...(19): siRNA sense strand
ugaagguacugacgguuaa

SEQ ID NO: 1521140 - RNA, 19 nt, Homo sapiens
  misc_RNA (1)...(19): siRNA sense strand
acacgugucugcuccauau

SEQ ID NO: 1521141 - RNA, 19 nt, Homo sapiens
  misc_RNA (1)...(19): siRNA sense strand
ugacguaucccagacuuua

SEQ ID NO: 1521142 - RNA, 19 nt, Homo sapiens
  misc_RNA (1)...(19): siRNA sense strand
uuucaacgcuucaggauau

SEQ ID NO: 1521143 - RNA, 19 nt, Homo sapiens
  misc_RNA (1)...(19): siRNA sense strand
cauuaggccugacguuaaa

SEQ ID NO: 1521144 - RNA, 19 nt, Homo sapiens
  misc_RNA (1)...(19): siRNA sense strand
cauacgaaauguaacagaa

SEQ ID NO: 1521145 - RNA, 19 nt, Homo sapiens
  misc_RNA (1)...(19): siRNA sense strand
gaaugccacucucuuugga

SEQ ID NO: 1521146 - RNA, 19 nt, Homo sapiens
  misc_RNA (1)...(19): siRNA sense strand
cagaagucguuguuguuaa

SEQ ID NO: 1521147 - RNA, 19 nt, Homo sapiens
  misc_RNA (1)...(19): siRNA sense strand
ggagaaaauugcagaaaga

SEQ ID NO: 1521148 - RNA, 19 nt, Homo sapiens
  misc_RNA (1)...(19): siRNA sense strand
gggaguggauccugguuau

SEQ ID NO: 1521149 - RNA, 19 nt, Homo sapiens
  misc_RNA (1)...(19): siRNA sense strand
agucugcuaucguacauua

SEQ ID NO: 1521150 - RNA, 19 nt, Homo sapiens
  misc_RNA (1)...(19): siRNA sense strand
aagaggagguggaaaugaa

SEQ ID NO: 1521151 - RNA, 19 nt, Homo sapiens
  misc_RNA (1)...(19): siRNA sense strand
uaaaagccaugcugaauug

SEQ ID NO: 1521152 - RNA, 19 nt, Homo sapiens
  misc_RNA (1)...(19): siRNA sense strand
gaguggauccugguuauaa

SEQ ID NO: 1521153 - RNA, 19 nt, Homo sapiens
  misc_RNA (1)...(19): siRNA sense strand
ccagggcacugcuugagaa

SEQ ID NO: 1521154 - RNA, 19 nt, Homo sapiens
  misc_RNA (1)...(19): siRNA sense strand
gaaaauugcagaaagauug

SEQ ID NO: 1521155 - RNA, 19 nt, Homo sapiens
  misc_RNA (1)...(19): siRNA sense strand
gcaaagccagcaacuuaga

SEQ ID NO: 1521156 - RNA, 19 nt, Homo sapiens
  misc_RNA (1)...(19): siRNA sense strand
gccacucucuuuggaauuu

SEQ ID NO: 1521157 - RNA, 19 nt, Homo sapiens
  misc_RNA (1)...(19): siRNA sense strand
gaaaguacagguccaggau

SEQ ID NO: 1521158 - RNA, 19 nt, Homo sapiens
  misc_RNA (1)...(19): siRNA sense strand
ccagagagcaagacaguug

SEQ ID NO: 1521159 - RNA, 19 nt, Homo sapiens
  misc_RNA (1)...(19): siRNA sense strand
gagaaugacgaugacuuua

SEQ ID NO: 1521160 - RNA, 19 nt, Homo sapiens
  misc_RNA (1)...(19): siRNA sense strand
aagccaugcugaauuguaa

SEQ ID NO: 1521161 - RNA, 19 nt, Homo sapiens
  misc_RNA (1)...(19): siRNA sense strand
cagccagccugaaagcuuu

SEQ ID NO: 1521162 - RNA, 19 nt, Homo sapiens
  misc_RNA (1)...(19): siRNA sense strand
ucaaggaguugcugugaca

SEQ ID NO: 1521163 - RNA, 19 nt, Homo sapiens
  misc_RNA (1)...(19): siRNA sense strand
aaucaagacugagacauau

SEQ ID NO: 1521164 - RNA, 19 nt, Homo sapiens
  misc_RNA (1)...(19): siRNA sense strand
guuaucaucugccucugaa

SEQ ID NO: 1521165 - RNA, 19 nt, Homo sapiens
  misc_RNA (1)...(19): siRNA sense strand
auacugaugugguuuacuu

SEQ ID NO: 1521166 - RNA, 19 nt, Homo sapiens
  misc_RNA (1)...(19): siRNA sense strand
gguugcaaauuagcuauaa

SEQ ID NO: 1521167 - RNA, 19 nt, Homo sapiens
  misc_RNA (1)...(19): siRNA sense strand
ggccagaguuaaugaagau

SEQ ID NO: 1521168 - RNA, 19 nt, Homo sapiens
  misc_RNA (1)...(19): siRNA sense strand
aaauaggagugcagcauau

SEQ ID NO: 1521169 - RNA, 19 nt, Homo sapiens
  misc_RNA (1)...(19): siRNA sense strand
caagacaguugggcuuaga

SEQ ID NO: 1521170 - RNA, 19 nt, Homo sapiens
  misc_RNA (1)...(19): siRNA sense strand
ucagaagucguuguuguua

SEQ ID NO: 1521171 - RNA, 19 nt, Homo sapiens
  misc_RNA (1)...(19): siRNA sense strand
gaaguuuuguuaaggcaua

SEQ ID NO: 1521172 - RNA, 19 nt, Homo sapiens
  misc_RNA (1)...(19): siRNA sense strand
gggcuggacccuaauuuga

SEQ ID NO: 1521173 - RNA, 19 nt, Homo sapiens
  misc_RNA (1)...(19): siRNA sense strand
cacaauucccuucauuaua

SEQ ID NO: 1521174 - RNA, 19 nt, Homo sapiens
  misc_RNA (1)...(19): siRNA sense strand
aaaucaagacugagacaua

SEQ ID NO: 1521175 - RNA, 19 nt, Homo sapiens
  misc_RNA (1)...(19): siRNA sense strand
ugacgaugacuuuacauuu

SEQ ID NO: 1521176 - RNA, 19 nt, Homo sapiens
  misc_RNA (1)...(19): siRNA sense strand
uaaauuggauacuguacag

SEQ ID NO: 1521177 - RNA, 19 nt, Homo sapiens
  misc_RNA (1)...(19): siRNA sense strand
gaaauguaacagaagcaaa

SEQ ID NO: 1521178 - RNA, 19 nt, Homo sapiens
  misc_RNA (1)...(19): siRNA sense strand
aaacaacaguacacaccuu

SEQ ID NO: 1521179 - RNA, 19 nt, Homo sapiens
  misc_RNA (1)...(19): siRNA sense strand
ugacauagcaaugagguuu

SEQ ID NO: 1521180 - RNA, 19 nt, Homo sapiens
  misc_RNA (1)...(19): siRNA sense strand
gggaguggauauuaacauc

SEQ ID NO: 1521181 - RNA, 19 nt, Homo sapiens
  misc_RNA (1)...(19): siRNA sense strand
gcaggagcaucaaucuaca

SEQ ID NO: 1521182 - RNA, 19 nt, Homo sapiens
  misc_RNA (1)...(19): siRNA sense strand
gaccugauaaugaagaauu

SEQ ID NO: 1521183 - RNA, 19 nt, Homo sapiens
  misc_RNA (1)...(19): siRNA sense strand
gaaacagaagcuuacuuug

SEQ ID NO: 1521184 - RNA, 19 nt, Homo sapiens
  misc_RNA (1)...(19): siRNA sense strand
gcaaggccagaguuaauga

SEQ ID NO: 1521185 - RNA, 19 nt, Homo sapiens
  misc_RNA (1)...(19): siRNA sense strand
caaagacacgcuugacuuc

SEQ ID NO: 1521186 - RNA, 19 nt, Homo sapiens
  misc_RNA (1)...(19): siRNA sense strand
ccacauacaguucgaagga

SEQ ID NO: 1521187 - RNA, 19 nt, Homo sapiens
  misc_RNA (1)...(19): siRNA sense strand
gcuacgggcuguugcaaag

SEQ ID NO: 1521188 - RNA, 19 nt, Homo sapiens
  misc_RNA (1)...(19): siRNA sense strand
uggaaagccugaaaugcaa

SEQ ID NO: 1521189 - RNA, 19 nt, Homo sapiens
  misc_RNA (1)...(19): siRNA sense strand
gaagugcaguuuccauagc

SEQ ID NO: 1521190 - RNA, 19 nt, Homo sapiens
  misc_RNA (1)...(19): siRNA sense strand
gcuggacccuaauuugaga

SEQ ID NO: 1521191 - RNA, 19 nt, Homo sapiens
  misc_RNA (1)...(19): siRNA sense strand
uugcugaccugauaaugaa

SEQ ID NO: 1521192 - RNA, 19 nt, Homo sapiens
  misc_RNA (1)...(19): siRNA sense strand
gauccugguuauaaacaug

SEQ ID NO: 1521193 - RNA, 19 nt, Homo sapiens
  misc_RNA (1)...(19): siRNA sense strand
gaacuugugccagaagaga

SEQ ID NO: 1521194 - RNA, 19 nt, Homo sapiens
  misc_RNA (1)...(19): siRNA sense strand
gauguugggaucauuauua

SEQ ID NO: 1521195 - RNA, 19 nt, Homo sapiens
  misc_RNA (1)...(19): siRNA sense strand
gcaagaacggugggauuua

SEQ ID NO: 1521196 - RNA, 19 nt, Homo sapiens
  misc_RNA (1)...(19): siRNA sense strand
gcacacagaggaguacuuu

SEQ ID NO: 1521197 - RNA, 19 nt, Homo sapiens
  misc_RNA (1)...(19): siRNA sense strand
ggaggaagcagcagggaaa

SEQ ID NO: 1521198 - RNA, 19 nt, Homo sapiens
  misc_RNA (1)...(19): siRNA sense strand
ccacaucagucucaacauc

SEQ ID NO: 1521199 - RNA, 19 nt, Homo sapiens
  misc_RNA (1)...(19): siRNA sense strand
ggacuucgagggcaauuug

SEQ ID NO: 1521200 - RNA, 19 nt, Homo sapiens
  misc_RNA (1)...(19): siRNA sense strand
ggguggaucucgugacuau

SEQ ID NO: 1521201 - RNA, 19 nt, Homo sapiens
  misc_RNA (1)...(19): siRNA sense strand
gcacucguuucaaguccua

SEQ ID NO: 1521202 - RNA, 19 nt, Homo sapiens
  misc_RNA (1)...(19): siRNA sense strand
gguccucgccuaucuguuu

SEQ ID NO: 1521203 - RNA, 19 nt, Homo sapiens
  misc_RNA (1)...(19): siRNA sense strand
ucaggaagguggccaagau

SEQ ID NO: 1521204 - RNA, 19 nt, Homo sapiens
  misc_RNA (1)...(19): siRNA sense strand
cgagacaggucgcugacaa

SEQ ID NO: 1521205 - RNA, 19 nt, Homo sapiens
  misc_RNA (1)...(19): siRNA sense strand
acaggucgcugacaaagug

SEQ ID NO: 1521206 - RNA, 19 nt, Homo sapiens
  misc_RNA (1)...(19): siRNA sense strand
gcagagugauauuccucaa

SEQ ID NO: 1521207 - RNA, 19 nt, Homo sapiens
  misc_RNA (1)...(19): siRNA sense strand
gaucugcgaccauuucugu

SEQ ID NO: 1521208 - RNA, 19 nt, Homo sapiens
  misc_RNA (1)...(19): siRNA sense strand
ugggcuaccugaccaagua

SEQ ID NO: 1521209 - RNA, 19 nt, Homo sapiens
  misc_RNA (1)...(19): siRNA sense strand
caagaacggugggauuuac

SEQ ID NO: 1521210 - RNA, 19 nt, Homo sapiens
  misc_RNA (1)...(19): siRNA sense strand
gaacggugggauuuacuug

SEQ ID NO: 1521211 - RNA, 19 nt, Homo sapiens
  misc_RNA (1)...(19): siRNA sense strand
gcucaaggaucccaguuuu

SEQ ID NO: 1521212 - RNA, 19 nt, Homo sapiens
  misc_RNA (1)...(19): siRNA sense strand
gcguggagaucaucaccaa

SEQ ID NO: 1521213 - RNA, 19 nt, Homo sapiens
  misc_RNA (1)...(19): siRNA sense strand
ggaagcgucuuugcucaag

SEQ ID NO: 1521214 - RNA, 19 nt, Homo sapiens
  misc_RNA (1)...(19): siRNA sense strand
cuacaacugcagagugaua

SEQ ID NO: 1521215 - RNA, 19 nt, Homo sapiens
  misc_RNA (1)...(19): siRNA sense strand
gaagauccugcucaucaga

SEQ ID NO: 1521216 - RNA, 19 nt, Homo sapiens
  misc_RNA (1)...(19): siRNA sense strand
agagugauauuccucaaca

SEQ ID NO: 1521217 - RNA, 19 nt, Homo sapiens
  misc_RNA (1)...(19): siRNA sense strand
aaacagaggagcaagauac

SEQ ID NO: 1521218 - RNA, 19 nt, Homo sapiens
  misc_RNA (1)...(19): siRNA sense strand
ggaagauccugcucaucag

SEQ ID NO: 1521219 - RNA, 19 nt, Homo sapiens
  misc_RNA (1)...(19): siRNA sense strand
gagugaagguggacuuugc

SEQ ID NO: 1521220 - RNA, 19 nt, Homo sapiens
  misc_RNA (1)...(19): siRNA sense strand
gguuugaucugcgaccauu

SEQ ID NO: 1521221 - RNA, 19 nt, Homo sapiens
  misc_RNA (1)...(19): siRNA sense strand
gaacggaagcgucuuugcu

SEQ ID NO: 1521222 - RNA, 19 nt, Homo sapiens
  misc_RNA (1)...(19): siRNA sense strand
gcaaacuccucggcaugug

SEQ ID NO: 1521223 - RNA, 19 nt, Homo sapiens
  misc_RNA (1)...(19): siRNA sense strand
agaccucuguggacgcaua

SEQ ID NO: 1521224 - RNA, 19 nt, Homo sapiens
  misc_RNA (1)...(19): siRNA sense strand
ugggacaccugcauuggaa

SEQ ID NO: 1521225 - RNA, 19 nt, Homo sapiens
  misc_RNA (1)...(19): siRNA sense strand
aagcuggccuuggcaguuu

SEQ ID NO: 1521226 - RNA, 19 nt, Homo sapiens
  misc_RNA (1)...(19): siRNA sense strand
ggaugguccucgccuaucu

SEQ ID NO: 1521227 - RNA, 19 nt, Homo sapiens
  misc_RNA (1)...(19): siRNA sense strand
cgacggcugugccaugauc

SEQ ID NO: 1521228 - RNA, 19 nt, Homo sapiens
  misc_RNA (1)...(19): siRNA sense strand
gaguggaaaugaggaagug

SEQ ID NO: 1521229 - RNA, 19 nt, Homo sapiens
  misc_RNA (1)...(19): siRNA sense strand
ggacaacagguuugaucug

SEQ ID NO: 1521230 - RNA, 19 nt, Homo sapiens
  misc_RNA (1)...(19): siRNA sense strand
gaggacaacagguuugauc

SEQ ID NO: 1521231 - RNA, 19 nt, Homo sapiens
  misc_RNA (1)...(19): siRNA sense strand
gaccauuucuguacaacac

SEQ ID NO: 1521232 - RNA, 19 nt, Homo sapiens
  misc_RNA (1)...(19): siRNA sense strand
gcaccaucgugaaccagau

SEQ ID NO: 1521233 - RNA, 19 nt, Homo sapiens
  misc_RNA (1)...(19): siRNA sense strand
gagacaggucgcugacaaa

SEQ ID NO: 1521234 - RNA, 19 nt, Homo sapiens
  misc_RNA (1)...(19): siRNA sense strand
aggaagugcuggcugaugu

SEQ ID NO: 1521235 - RNA, 19 nt, Homo sapiens
  misc_RNA (1)...(19): siRNA sense strand
augcggagcucucggucua

SEQ ID NO: 1521236 - RNA, 19 nt, Homo sapiens
  misc_RNA (1)...(19): siRNA sense strand
cgcuacaacugcagaguga

SEQ ID NO: 1521237 - RNA, 19 nt, Homo sapiens
  misc_RNA (1)...(19): siRNA sense strand
gcggagcucucggucuaug

SEQ ID NO: 1521238 - RNA, 19 nt, Homo sapiens
  misc_RNA (1)...(19): siRNA sense strand
ccugcuggcucugggauuu

SEQ ID NO: 1521239 - RNA, 19 nt, Homo sapiens
  misc_RNA (1)...(19): siRNA sense strand
acacagaggaguacuuucu

SEQ ID NO: 1521240 - RNA, 19 nt, Homo sapiens
  misc_RNA (1)...(19): siRNA sense strand
cagcaagaacggugggauu

SEQ ID NO: 1521241 - RNA, 19 nt, Homo sapiens
  misc_RNA (1)...(19): siRNA sense strand
gaaacguccgcuacaacug

SEQ ID NO: 1521242 - RNA, 19 nt, Homo sapiens
  misc_RNA (1)...(19): siRNA sense strand
gcaguuucggugcauagaa

SEQ ID NO: 1521243 - RNA, 19 nt, Homo sapiens
  misc_RNA (1)...(19): siRNA sense strand
caacugcagagugauauuc

SEQ ID NO: 1521244 - RNA, 19 nt, Homo sapiens
  misc_RNA (1)...(19): siRNA sense strand
caugaacggaagcgucuuu

SEQ ID NO: 1521245 - RNA, 19 nt, Homo sapiens
  misc_RNA (1)...(19): siRNA sense strand
gcauacugaccaccugcua

SEQ ID NO: 1521246 - RNA, 19 nt, Homo sapiens
  misc_RNA (1)...(19): siRNA sense strand
gggaccgccuguacuacga

SEQ ID NO: 1521247 - RNA, 19 nt, Homo sapiens
  misc_RNA (1)...(19): siRNA sense strand
gaccgacgaggaagauaug

SEQ ID NO: 1521248 - RNA, 19 nt, Homo sapiens
  misc_RNA (1)...(19): siRNA sense strand
gaagccaccacaucagucu

SEQ ID NO: 1521249 - RNA, 19 nt, Homo sapiens
  misc_RNA (1)...(19): siRNA sense strand
gacaugggacaccugcauu

SEQ ID NO: 1521250 - RNA, 19 nt, Homo sapiens
  misc_RNA (1)...(19): siRNA sense strand
ccauuucuguacaacacaa

SEQ ID NO: 1521251 - RNA, 19 nt, Homo sapiens
  misc_RNA (1)...(19): siRNA sense strand
caaguacuccaugaacaga

SEQ ID NO: 1521252 - RNA, 19 nt, Homo sapiens
  misc_RNA (1)...(19): siRNA sense strand
guugggaucauuauuacga

SEQ ID NO: 1521253 - RNA, 19 nt, Homo sapiens
  misc_RNA (1)...(19): siRNA sense strand
cuacagcccugaggacaac

SEQ ID NO: 1521254 - RNA, 19 nt, Homo sapiens
  misc_RNA (1)...(19): siRNA sense strand
cuacagggcggagauuuca

SEQ ID NO: 1521255 - RNA, 19 nt, Homo sapiens
  misc_RNA (1)...(19): siRNA sense strand
uacgacggcugugccauga

SEQ ID NO: 1521256 - RNA, 19 nt, Homo sapiens
  misc_RNA (1)...(19): siRNA sense strand
acaccugcauuggaaguga

SEQ ID NO: 1521257 - RNA, 19 nt, Homo sapiens
  misc_RNA (1)...(19): siRNA sense strand
ggacaccugcauuggaagu

SEQ ID NO: 1521258 - RNA, 19 nt, Homo sapiens
  misc_RNA (1)...(19): siRNA sense strand
gcuacagggcggagauuuc

SEQ ID NO: 1521259 - RNA, 19 nt, Homo sapiens
  misc_RNA (1)...(19): siRNA sense strand
ugacaaagugaagcgguuu

SEQ ID NO: 1521260 - RNA, 19 nt, Homo sapiens
  misc_RNA (1)...(19): siRNA sense strand
ucagggccuucguccaguu

SEQ ID NO: 1521261 - RNA, 19 nt, Homo sapiens
  misc_RNA (1)...(19): siRNA sense strand
aaaugugcaggcucgaaua

SEQ ID NO: 1521262 - RNA, 19 nt, Homo sapiens
  misc_RNA (1)...(19): siRNA sense strand
gaguuggcccagcagauug

SEQ ID NO: 1521263 - RNA, 19 nt, Homo sapiens
  misc_RNA (1)...(19): siRNA sense strand
aagcgucuuugcucaagga

SEQ ID NO: 1521264 - RNA, 19 nt, Homo sapiens
  misc_RNA (1)...(19): siRNA sense strand
agaguuggcccagcagauu

SEQ ID NO: 1521265 - RNA, 19 nt, Homo sapiens
  misc_RNA (1)...(19): siRNA sense strand
ggaguggaaaugaggaagu

SEQ ID NO: 1521266 - RNA, 19 nt, Homo sapiens
  misc_RNA (1)...(19): siRNA sense strand
cgaggagucggcacacaga

SEQ ID NO: 1521267 - RNA, 19 nt, Homo sapiens
  misc_RNA (1)...(19): siRNA sense strand
gauuggaagccaccacauc

SEQ ID NO: 1521268 - RNA, 19 nt, Homo sapiens
  misc_RNA (1)...(19): siRNA sense strand
cuacauggccagcaagaac

SEQ ID NO: 1521269 - RNA, 19 nt, Homo sapiens
  misc_RNA (1)...(19): siRNA sense strand
ggauguugggaucauuauu

SEQ ID NO: 1521270 - RNA, 19 nt, Homo sapiens
  misc_RNA (1)...(19): siRNA sense strand
cgaaacguccgcuacaacu

SEQ ID NO: 1521271 - RNA, 19 nt, Homo sapiens
  misc_RNA (1)...(19): siRNA sense strand
cauuggaagugagaucugu

SEQ ID NO: 1521272 - RNA, 19 nt, Homo sapiens
  misc_RNA (1)...(19): siRNA sense strand
cuacggauguugggaucau

SEQ ID NO: 1521273 - RNA, 19 nt, Homo sapiens
  misc_RNA (1)...(19): siRNA sense strand
uccaaguacuccaugaaca

SEQ ID NO: 1521274 - RNA, 19 nt, Homo sapiens
  misc_RNA (1)...(19): siRNA sense strand
gagaguuggcccagcagau

SEQ ID NO: 1521275 - RNA, 19 nt, Homo sapiens
  misc_RNA (1)...(19): siRNA sense strand
caggguggaucucgugacu

SEQ ID NO: 1521276 - RNA, 19 nt, Homo sapiens
  misc_RNA (1)...(19): siRNA sense strand
cauagaaaaucaggugcua

SEQ ID NO: 1521277 - RNA, 19 nt, Homo sapiens
  misc_RNA (1)...(19): siRNA sense strand
gcucucggucuaugggaaa

SEQ ID NO: 1521278 - RNA, 19 nt, Homo sapiens
  misc_RNA (1)...(19): siRNA sense strand
gaggaagugcuggcugaug

SEQ ID NO: 1521279 - RNA, 19 nt, Homo sapiens
  misc_RNA (1)...(19): siRNA sense strand
uggaggacguccggagcua

SEQ ID NO: 1521280 - RNA, 19 nt, Homo sapiens
  misc_RNA (1)...(19): siRNA sense strand
gaggaguggaaaugaggaa

SEQ ID NO: 1521281 - RNA, 19 nt, Homo sapiens
  misc_RNA (1)...(19): siRNA sense strand
guaccacgccgagaacuac

SEQ ID NO: 1521282 - RNA, 19 nt, Homo sapiens
  misc_RNA (1)...(19): siRNA sense strand
caagaugaccacgcucaca

SEQ ID NO: 1521283 - RNA, 19 nt, Homo sapiens
  misc_RNA (1)...(19): siRNA sense strand
caugaacagacacaagaug

SEQ ID NO: 1521284 - RNA, 19 nt, Homo sapiens
  misc_RNA (1)...(19): siRNA sense strand
ccaaguacuccaugaacag

SEQ ID NO: 1521285 - RNA, 19 nt, Homo sapiens
  misc_RNA (1)...(19): siRNA sense strand
gaguauugaaauugccaaa

SEQ ID NO: 1521286 - RNA, 19 nt, Homo sapiens
  misc_RNA (1)...(19): siRNA sense strand
aauaugcggcuacggaugu

SEQ ID NO: 1521287 - RNA, 19 nt, Homo sapiens
  misc_RNA (1)...(19): siRNA sense strand
guccucgccuaucuguuug

SEQ ID NO: 1521288 - RNA, 19 nt, Homo sapiens
  misc_RNA (1)...(19): siRNA sense strand
gagcuacagggcggagauu

SEQ ID NO: 1521289 - RNA, 19 nt, Homo sapiens
  misc_RNA (1)...(19): siRNA sense strand
guggaucucgugacuaugg

SEQ ID NO: 1521290 - RNA, 19 nt, Homo sapiens
  misc_RNA (1)...(19): siRNA sense strand
gcauucacgucaaauauaa

SEQ ID NO: 1521291 - RNA, 19 nt, Homo sapiens
  misc_RNA (1)...(19): siRNA sense strand
ucagaagcgucuaugauuc

SEQ ID NO: 1521292 - RNA, 19 nt, Homo sapiens
  misc_RNA (1)...(19): siRNA sense strand
uaauaugccugcuguucau

SEQ ID NO: 1521293 - RNA, 19 nt, Homo sapiens
  misc_RNA (1)...(19): siRNA sense strand
gcugcuagcacauauguau

SEQ ID NO: 1521294 - RNA, 19 nt, Homo sapiens
  misc_RNA (1)...(19): siRNA sense strand
guagcauucacgucaaaua

SEQ ID NO: 1521295 - RNA, 19 nt, Homo sapiens
  misc_RNA (1)...(19): siRNA sense strand
cgucuaugauuccuucaga

SEQ ID NO: 1521296 - RNA, 19 nt, Homo sapiens
  misc_RNA (1)...(19): siRNA sense strand
ucuaugauuccuucagaua

SEQ ID NO: 1521297 - RNA, 19 nt, Homo sapiens
  misc_RNA (1)...(19): siRNA sense strand
guccuggaguucagauuug

SEQ ID NO: 1521298 - RNA, 19 nt, Homo sapiens
  misc_RNA (1)...(19): siRNA sense strand
uugaauaccuguggccauu

SEQ ID NO: 1521299 - RNA, 19 nt, Homo sapiens
  misc_RNA (1)...(19): siRNA sense strand
gaacgccgacugcaguaag

SEQ ID NO: 1521300 - RNA, 19 nt, Homo sapiens
  misc_RNA (1)...(19): siRNA sense strand
uagcauucacgucaaauau

SEQ ID NO: 1521301 - RNA, 19 nt, Homo sapiens
  misc_RNA (1)...(19): siRNA sense strand
guguagcauucacgucaaa

SEQ ID NO: 1521302 - RNA, 19 nt, Homo sapiens
  misc_RNA (1)...(19): siRNA sense strand
gcauuuacggcaguacauu

SEQ ID NO: 1521303 - RNA, 19 nt, Homo sapiens
  misc_RNA (1)...(19): siRNA sense strand
uguauggguucaguacgua

SEQ ID NO: 1521304 - RNA, 19 nt, Homo sapiens
  misc_RNA (1)...(19): siRNA sense strand
uauaauaugccugcuguuc

SEQ ID NO: 1521305 - RNA, 19 nt, Homo sapiens
  misc_RNA (1)...(19): siRNA sense strand
gagggcauuuacggcagua

SEQ ID NO: 1521306 - RNA, 19 nt, Homo sapiens
  misc_RNA (1)...(19): siRNA sense strand
cauuuacggcaguacauuu

SEQ ID NO: 1521307 - RNA, 19 nt, Homo sapiens
  misc_RNA (1)...(19): siRNA sense strand
gaucaccgagggcauuuac

SEQ ID NO: 1521308 - RNA, 19 nt, Homo sapiens
  misc_RNA (1)...(19): siRNA sense strand
ggaacgccgacugcaguaa

SEQ ID NO: 1521309 - RNA, 19 nt, Homo sapiens
  misc_RNA (1)...(19): siRNA sense strand
agcauucacgucaaauaua

SEQ ID NO: 1521310 - RNA, 19 nt, Homo sapiens
  misc_RNA (1)...(19): siRNA sense strand
gugggcacuuguccuccua

SEQ ID NO: 1521311 - RNA, 19 nt, Homo sapiens
  misc_RNA (1)...(19): siRNA sense strand
ggaucaccgagggcauuua

SEQ ID NO: 1521312 - RNA, 19 nt, Homo sapiens
  misc_RNA (1)...(19): siRNA sense strand
cuaaagcggaaccggauca

SEQ ID NO: 1521313 - RNA, 19 nt, Homo sapiens
  misc_RNA (1)...(19): siRNA sense strand
gcauucacgucaaauauaa

SEQ ID NO: 1521314 - RNA, 19 nt, Homo sapiens
  misc_RNA (1)...(19): siRNA sense strand
ucagaagcgucuaugauuc

SEQ ID NO: 1521315 - RNA, 19 nt, Homo sapiens
  misc_RNA (1)...(19): siRNA sense strand
uaauaugccugcuguucau

SEQ ID NO: 1521316 - RNA, 19 nt, Homo sapiens
  misc_RNA (1)...(19): siRNA sense strand
gcugcuagcacauauguau

SEQ ID NO: 1521317 - RNA, 19 nt, Homo sapiens
  misc_RNA (1)...(19): siRNA sense strand
guagcauucacgucaaaua

SEQ ID NO: 1521318 - RNA, 19 nt, Homo sapiens
  misc_RNA (1)...(19): siRNA sense strand
cgucuaugauuccuucaga

SEQ ID NO: 1521319 - RNA, 19 nt, Homo sapiens
  misc_RNA (1)...(19): siRNA sense strand
ucuaugauuccuucagaua

SEQ ID NO: 1521320 - RNA, 19 nt, Homo sapiens
  misc_RNA (1)...(19): siRNA sense strand
guccuggaguucagauuug

SEQ ID NO: 1521321 - RNA, 19 nt, Homo sapiens
  misc_RNA (1)...(19): siRNA sense strand
uugaauaccuguggccauu

SEQ ID NO: 1521322 - RNA, 19 nt, Homo sapiens
  misc_RNA (1)...(19): siRNA sense strand
gaacgccgacugcaguaag

SEQ ID NO: 1521323 - RNA, 19 nt, Homo sapiens
  misc_RNA (1)...(19): siRNA sense strand
uagcauucacgucaaauau

SEQ ID NO: 1521324 - RNA, 19 nt, Homo sapiens
  misc_RNA (1)...(19): siRNA sense strand
guguagcauucacgucaaa

SEQ ID NO: 1521325 - RNA, 19 nt, Homo sapiens
  misc_RNA (1)...(19): siRNA sense strand
gcauuuacggcaguacauu

SEQ ID NO: 1521326 - RNA, 19 nt, Homo sapiens
  misc_RNA (1)...(19): siRNA sense strand
uguauggguucaguacgua

SEQ ID NO: 1521327 - RNA, 19 nt, Homo sapiens
  misc_RNA (1)...(19): siRNA sense strand
uauaauaugccugcuguuc

SEQ ID NO: 1521328 - RNA, 19 nt, Homo sapiens
  misc_RNA (1)...(19): siRNA sense strand
gagggcauuuacggcagua

SEQ ID NO: 1521329 - RNA, 19 nt, Homo sapiens
  misc_RNA (1)...(19): siRNA sense strand
cauuuacggcaguacauuu

SEQ ID NO: 1521330 - RNA, 19 nt, Homo sapiens
  misc_RNA (1)...(19): siRNA sense strand
gaucaccgagggcauuuac

SEQ ID NO: 1521331 - RNA, 19 nt, Homo sapiens
  misc_RNA (1)...(19): siRNA sense strand
ggaacgccgacugcaguaa

SEQ ID NO: 1521332 - RNA, 19 nt, Homo sapiens
  misc_RNA (1)...(19): siRNA sense strand
agcauucacgucaaauaua

SEQ ID NO: 1521333 - RNA, 19 nt, Homo sapiens
  misc_RNA (1)...(19): siRNA sense strand
gugggcacuuguccuccua

SEQ ID NO: 1521334 - RNA, 19 nt, Homo sapiens
  misc_RNA (1)...(19): siRNA sense strand
ggaucaccgagggcauuua

SEQ ID NO: 1521335 - RNA, 19 nt, Homo sapiens
  misc_RNA (1)...(19): siRNA sense strand
cuaaagcggaaccggauca

SEQ ID NO: 1521336 - RNA, 19 nt, Homo sapiens
  misc_RNA (1)...(19): siRNA sense strand
caaaugauguuuaccacua

SEQ ID NO: 1521337 - RNA, 19 nt, Homo sapiens
  misc_RNA (1)...(19): siRNA sense strand
gagagacagucaaggguua

SEQ ID NO: 1521338 - RNA, 19 nt, Homo sapiens
  misc_RNA (1)...(19): siRNA sense strand
gagagaguguguugaauga

SEQ ID NO: 1521339 - RNA, 19 nt, Homo sapiens
  misc_RNA (1)...(19): siRNA sense strand
caacucugcugguuaauau

SEQ ID NO: 1521340 - RNA, 19 nt, Homo sapiens
  misc_RNA (1)...(19): siRNA sense strand
caucaacucugcugguuaa

SEQ ID NO: 1521341 - RNA, 19 nt, Homo sapiens
  misc_RNA (1)...(19): siRNA sense strand
uaauaucacugaccaaguu

SEQ ID NO: 1521342 - RNA, 19 nt, Homo sapiens
  misc_RNA (1)...(19): siRNA sense strand
gauguggaaugcauuguaa

SEQ ID NO: 1521343 - RNA, 19 nt, Homo sapiens
  misc_RNA (1)...(19): siRNA sense strand
gauaguugcuguucucuuc

SEQ ID NO: 1521344 - RNA, 19 nt, Homo sapiens
  misc_RNA (1)...(19): siRNA sense strand
caacaucaauccucaucaa

SEQ ID NO: 1521345 - RNA, 19 nt, Homo sapiens
  misc_RNA (1)...(19): siRNA sense strand
aaucuucgcuggcucauuu

SEQ ID NO: 1521346 - RNA, 19 nt, Homo sapiens
  misc_RNA (1)...(19): siRNA sense strand
ucauuucacugacuguuua

SEQ ID NO: 1521347 - RNA, 19 nt, Homo sapiens
  misc_RNA (1)...(19): siRNA sense strand
ucaaggaaaugcuauacuu

SEQ ID NO: 1521348 - RNA, 19 nt, Homo sapiens
  misc_RNA (1)...(19): siRNA sense strand
gcaaugguguauggccuua

SEQ ID NO: 1521349 - RNA, 19 nt, Homo sapiens
  misc_RNA (1)...(19): siRNA sense strand
gagaguguguugaaugaug

SEQ ID NO: 1521350 - RNA, 19 nt, Homo sapiens
  misc_RNA (1)...(19): siRNA sense strand
gcucggcucuucagaaugu

SEQ ID NO: 1521351 - RNA, 19 nt, Homo sapiens
  misc_RNA (1)...(19): siRNA sense strand
ggauauagucuaaagaaga

SEQ ID NO: 1521352 - RNA, 19 nt, Homo sapiens
  misc_RNA (1)...(19): siRNA sense strand
gauauagucuaaagaagag

SEQ ID NO: 1521353 - RNA, 19 nt, Homo sapiens
  misc_RNA (1)...(19): siRNA sense strand
gcacuguugaccaaauuua

SEQ ID NO: 1521354 - RNA, 19 nt, Homo sapiens
  misc_RNA (1)...(19): siRNA sense strand
gaugacauuugauccagaa

SEQ ID NO: 1521355 - RNA, 19 nt, Homo sapiens
  misc_RNA (1)...(19): siRNA sense strand
gcauuugccuuagcuauuc

SEQ ID NO: 1521356 - RNA, 19 nt, Homo sapiens
  misc_RNA (1)...(19): siRNA sense strand
gaacugccaucuccugcau

SEQ ID NO: 1521357 - RNA, 19 nt, Homo sapiens
  misc_RNA (1)...(19): siRNA sense strand
gaaauaagucagcacaaca

SEQ ID NO: 1521358 - RNA, 19 nt, Homo sapiens
  misc_RNA (1)...(19): siRNA sense strand
ggaaaugcuauacuugaaa

SEQ ID NO: 1521359 - RNA, 19 nt, Homo sapiens
  misc_RNA (1)...(19): siRNA sense strand
ccauaguccuuacauauuc

SEQ ID NO: 1521360 - RNA, 19 nt, Homo sapiens
  misc_RNA (1)...(19): siRNA sense strand
ggaagcaaauaacuuggau

SEQ ID NO: 1521361 - RNA, 19 nt, Homo sapiens
  misc_RNA (1)...(19): siRNA sense strand
gaggagcaaugguguaugg

SEQ ID NO: 1521362 - RNA, 19 nt, Homo sapiens
  misc_RNA (1)...(19): siRNA sense strand
gaugaacuagccauaaauu

SEQ ID NO: 1521363 - RNA, 19 nt, Homo sapiens
  misc_RNA (1)...(19): siRNA sense strand
ggagagaguguguugaaug

SEQ ID NO: 1521364 - RNA, 19 nt, Homo sapiens
  misc_RNA (1)...(19): siRNA sense strand
gccagagccugcaacauau

SEQ ID NO: 1521365 - RNA, 19 nt, Homo sapiens
  misc_RNA (1)...(19): siRNA sense strand
ugccagagccugcaacaua

SEQ ID NO: 1521366 - RNA, 19 nt, Homo sapiens
  misc_RNA (1)...(19): siRNA sense strand
guuccagaaucauaucuuu

SEQ ID NO: 1521367 - RNA, 19 nt, Homo sapiens
  misc_RNA (1)...(19): siRNA sense strand
ucacugaccaaguuuauga

SEQ ID NO: 1521368 - RNA, 19 nt, Homo sapiens
  misc_RNA (1)...(19): siRNA sense strand
ggacuaauuuuacgauaug

SEQ ID NO: 1521369 - RNA, 19 nt, Homo sapiens
  misc_RNA (1)...(19): siRNA sense strand
ccaggaagcaaauaacuug

SEQ ID NO: 1521370 - RNA, 19 nt, Homo sapiens
  misc_RNA (1)...(19): siRNA sense strand
gaguaucaguuucaacauc

SEQ ID NO: 1521371 - RNA, 19 nt, Homo sapiens
  misc_RNA (1)...(19): siRNA sense strand
cauuauaccuacaacaauc

SEQ ID NO: 1521372 - RNA, 19 nt, Homo sapiens
  misc_RNA (1)...(19): siRNA sense strand
ugaauggugugguccgauu

SEQ ID NO: 1521373 - RNA, 19 nt, Homo sapiens
  misc_RNA (1)...(19): siRNA sense strand
ggccauaguccuuacauau

SEQ ID NO: 1521374 - RNA, 19 nt, Homo sapiens
  misc_RNA (1)...(19): siRNA sense strand
aggaugaacuagccauaaa

SEQ ID NO: 1521375 - RNA, 19 nt, Homo sapiens
  misc_RNA (1)...(19): siRNA sense strand
aaugguguauggccuuaua

SEQ ID NO: 1521376 - RNA, 19 nt, Homo sapiens
  misc_RNA (1)...(19): siRNA sense strand
gaggagcgaucgcauuugc

SEQ ID NO: 1521377 - RNA, 19 nt, Homo sapiens
  misc_RNA (1)...(19): siRNA sense strand
uuaccaagcugugugaguu

SEQ ID NO: 1521378 - RNA, 19 nt, Homo sapiens
  misc_RNA (1)...(19): siRNA sense strand
cagcacuguugaccaaauu

SEQ ID NO: 1521379 - RNA, 19 nt, Homo sapiens
  misc_RNA (1)...(19): siRNA sense strand
gcaguggccauaguccuua

SEQ ID NO: 1521380 - RNA, 19 nt, Homo sapiens
  misc_RNA (1)...(19): siRNA sense strand
ugacagugcuggccauuuu

SEQ ID NO: 1521381 - RNA, 19 nt, Homo sapiens
  misc_RNA (1)...(19): siRNA sense strand
caugcaggauauagucuaa

SEQ ID NO: 1521382 - RNA, 19 nt, Homo sapiens
  misc_RNA (1)...(19): siRNA sense strand
gccauaguccuuacauauu

SEQ ID NO: 1521383 - RNA, 19 nt, Homo sapiens
  misc_RNA (1)...(19): siRNA sense strand
gcaaggaaaacauuuauga

SEQ ID NO: 1521384 - RNA, 19 nt, Homo sapiens
  misc_RNA (1)...(19): siRNA sense strand
agucaaggguuaugucaga

SEQ ID NO: 1521385 - RNA, 19 nt, Homo sapiens
  misc_RNA (1)...(19): siRNA sense strand
caggauauagucuaaagaa

SEQ ID NO: 1521386 - RNA, 19 nt, Homo sapiens
  misc_RNA (1)...(19): siRNA sense strand
gugcucggcucuucagaau

SEQ ID NO: 1521387 - RNA, 19 nt, Homo sapiens
  misc_RNA (1)...(19): siRNA sense strand
ugacuuggcuucagaucag

SEQ ID NO: 1521388 - RNA, 19 nt, Homo sapiens
  misc_RNA (1)...(19): siRNA sense strand
aaaguggaacugucuauga

SEQ ID NO: 1521389 - RNA, 19 nt, Homo sapiens
  misc_RNA (1)...(19): siRNA sense strand
gaagcaaauaacuuggaua

SEQ ID NO: 1521390 - RNA, 19 nt, Homo sapiens
  misc_RNA (1)...(19): siRNA sense strand
cacagaaucucagcccaaa

SEQ ID NO: 1521391 - RNA, 19 nt, Homo sapiens
  misc_RNA (1)...(19): siRNA sense strand
caaggagaauccaaaugca

SEQ ID NO: 1521392 - RNA, 19 nt, Homo sapiens
  misc_RNA (1)...(19): siRNA sense strand
aaacuaacuuucaguccau

SEQ ID NO: 1521393 - RNA, 19 nt, Homo sapiens
  misc_RNA (1)...(19): siRNA sense strand
cugaccaaguuuaugaaua

SEQ ID NO: 1521394 - RNA, 19 nt, Homo sapiens
  misc_RNA (1)...(19): siRNA sense strand
gaacuuucagcacaugaug

SEQ ID NO: 1521395 - RNA, 19 nt, Homo sapiens
  misc_RNA (1)...(19): siRNA sense strand
gaaaguggaacugucuaug

SEQ ID NO: 1521396 - RNA, 19 nt, Homo sapiens
  misc_RNA (1)...(19): siRNA sense strand
gaaucucagcccaaacaaa

SEQ ID NO: 1521397 - RNA, 19 nt, Homo sapiens
  misc_RNA (1)...(19): siRNA sense strand
gcuacagcaccaacugaua

SEQ ID NO: 1521398 - RNA, 19 nt, Homo sapiens
  misc_RNA (1)...(19): siRNA sense strand
gaaaagaugacauuugauc

SEQ ID NO: 1521399 - RNA, 19 nt, Homo sapiens
  misc_RNA (1)...(19): siRNA sense strand
cuacagcaccaacugauau

SEQ ID NO: 1521400 - RNA, 19 nt, Homo sapiens
  misc_RNA (1)...(19): siRNA sense strand
uaagucagcacaacaucaa

SEQ ID NO: 1521401 - RNA, 19 nt, Homo sapiens
  misc_RNA (1)...(19): siRNA sense strand
gggaggcuaugaacucaag

SEQ ID NO: 1521402 - RNA, 19 nt, Homo sapiens
  misc_RNA (1)...(19): siRNA sense strand
gaagauccccuggaacuuu

SEQ ID NO: 1521403 - RNA, 19 nt, Homo sapiens
  misc_RNA (1)...(19): siRNA sense strand
ggagcugcuugucuucaau

SEQ ID NO: 1521404 - RNA, 19 nt, Homo sapiens
  misc_RNA (1)...(19): siRNA sense strand
aggaaaugcuauacuugaa

SEQ ID NO: 1521405 - RNA, 19 nt, Homo sapiens
  misc_RNA (1)...(19): siRNA sense strand
ggaugaguaucaguuucaa

SEQ ID NO: 1521406 - RNA, 19 nt, Homo sapiens
  misc_RNA (1)...(19): siRNA sense strand
ugaacuagccauaaauuac

SEQ ID NO: 1521407 - RNA, 19 nt, Homo sapiens
  misc_RNA (1)...(19): siRNA sense strand
gaaugaugcaguggccaua

SEQ ID NO: 1521408 - RNA, 19 nt, Homo sapiens
  misc_RNA (1)...(19): siRNA sense strand
gcaccaacugauauugaaa

SEQ ID NO: 1521409 - RNA, 19 nt, Homo sapiens
  misc_RNA (1)...(19): siRNA sense strand
uuacugccaccaauuauau

SEQ ID NO: 1521410 - RNA, 19 nt, Homo sapiens
  misc_RNA (1)...(19): siRNA sense strand
aaaagaggaugauguggaa

SEQ ID NO: 1521411 - RNA, 19 nt, Homo sapiens
  misc_RNA (1)...(19): siRNA sense strand
caacaccaggaagcaaaua

SEQ ID NO: 1521412 - RNA, 19 nt, Homo sapiens
  misc_RNA (1)...(19): siRNA sense strand
gaacgucaucuucuguuac

SEQ ID NO: 1521413 - RNA, 19 nt, Homo sapiens
  misc_RNA (1)...(19): siRNA sense strand
cacaagcacauuauaccua

SEQ ID NO: 1521414 - RNA, 19 nt, Homo sapiens
  misc_RNA (1)...(19): siRNA sense strand
ccaaggagaauccaaaugc

SEQ ID NO: 1521415 - RNA, 19 nt, Homo sapiens
  misc_RNA (1)...(19): siRNA sense strand
agaaauaagucagcacaac

SEQ ID NO: 1521416 - RNA, 19 nt, Homo sapiens
  misc_RNA (1)...(19): siRNA sense strand
aaucucagcccaaacaaau

SEQ ID NO: 1521417 - RNA, 19 nt, Homo sapiens
  misc_RNA (1)...(19): siRNA sense strand
ccagagccugcaacauaua

SEQ ID NO: 1521418 - RNA, 19 nt, Homo sapiens
  misc_RNA (1)...(19): siRNA sense strand
cacauuauaccuacaacaa

SEQ ID NO: 1521419 - RNA, 19 nt, Homo sapiens
  misc_RNA (1)...(19): siRNA sense strand
gagacuuucauuucacuga

SEQ ID NO: 1521420 - RNA, 19 nt, Homo sapiens
  misc_RNA (1)...(19): siRNA sense strand
cagcaccaacugauauuga

SEQ ID NO: 1521421 - RNA, 19 nt, Homo sapiens
  misc_RNA (1)...(19): siRNA sense strand
gaacuagccauaaauuacc

SEQ ID NO: 1521422 - RNA, 19 nt, Homo sapiens
  misc_RNA (1)...(19): siRNA sense strand
gaauggugugguccgauuu

SEQ ID NO: 1521423 - RNA, 19 nt, Homo sapiens
  misc_RNA (1)...(19): siRNA sense strand
aaaggaugaguaucaguuu

SEQ ID NO: 1521424 - RNA, 19 nt, Homo sapiens
  misc_RNA (1)...(19): siRNA sense strand
cagaaucucagcccaaaca

SEQ ID NO: 1521425 - RNA, 19 nt, Homo sapiens
  misc_RNA (1)...(19): siRNA sense strand
cuacagauccagugacagu

SEQ ID NO: 1521426 - RNA, 19 nt, Homo sapiens
  misc_RNA (1)...(19): siRNA sense strand
ucaacucugcugguuaaua

SEQ ID NO: 1521427 - RNA, 19 nt, Homo sapiens
  misc_RNA (1)...(19): siRNA sense strand
aaggaaaugcuauacuuga

SEQ ID NO: 1521428 - RNA, 19 nt, Homo sapiens
  misc_RNA (1)...(19): siRNA sense strand
ggaugaacuagccauaaau

SEQ ID NO: 1521429 - RNA, 19 nt, Homo sapiens
  misc_RNA (1)...(19): siRNA sense strand
gaugauguggaaugcauug

SEQ ID NO: 1521430 - RNA, 19 nt, Homo sapiens
  misc_RNA (1)...(19): siRNA sense strand
gagcugcuugucuucaauu

SEQ ID NO: 1521431 - RNA, 19 nt, Homo sapiens
  misc_RNA (1)...(19): siRNA sense strand
aguaucaguuucaacauca

SEQ ID NO: 1521432 - RNA, 19 nt, Homo sapiens
  misc_RNA (1)...(19): siRNA sense strand
guguauggccuuauaaugg

SEQ ID NO: 1521433 - RNA, 19 nt, Homo sapiens
  misc_RNA (1)...(19): siRNA sense strand
uaccaguccucaagccuau

SEQ ID NO: 1521434 - RNA, 19 nt, Homo sapiens
  misc_RNA (1)...(19): siRNA sense strand
gaucgcauuugccuuagcu

SEQ ID NO: 1521435 - RNA, 19 nt, Homo sapiens
  misc_RNA (1)...(19): siRNA sense strand
gagucacacaagcacauua

SEQ ID NO: 1521436 - RNA, 19 nt, Homo sapiens
  misc_RNA (1)...(19): siRNA sense strand
ggaacgagcucaaguccaa

SEQ ID NO: 1521437 - RNA, 19 nt, Homo sapiens
  misc_RNA (1)...(19): siRNA sense strand
ggaaagcccugaucgaaca

SEQ ID NO: 1521438 - RNA, 19 nt, Homo sapiens
  misc_RNA (1)...(19): siRNA sense strand
aggaggagcuggcuuacua

SEQ ID NO: 1521439 - RNA, 19 nt, Homo sapiens
  misc_RNA (1)...(19): siRNA sense strand
ugaaggaggugguggacaa

SEQ ID NO: 1521440 - RNA, 19 nt, Homo sapiens
  misc_RNA (1)...(19): siRNA sense strand
agacacggcugaugaagau

SEQ ID NO: 1521441 - RNA, 19 nt, Homo sapiens
  misc_RNA (1)...(19): siRNA sense strand
gaagaucaaccaugaccuu

SEQ ID NO: 1521442 - RNA, 19 nt, Homo sapiens
  misc_RNA (1)...(19): siRNA sense strand
gagcagagcuggggaaguu

SEQ ID NO: 1521443 - RNA, 19 nt, Homo sapiens
  misc_RNA (1)...(19): siRNA sense strand
cagagaagguggccaugga

SEQ ID NO: 1521444 - RNA, 19 nt, Homo sapiens
  misc_RNA (1)...(19): siRNA sense strand
cuauaagagugaagaaaug

SEQ ID NO: 1521445 - RNA, 19 nt, Homo sapiens
  misc_RNA (1)...(19): siRNA sense strand
gaagaaauggaagaggaaa

SEQ ID NO: 1521446 - RNA, 19 nt, Homo sapiens
  misc_RNA (1)...(19): siRNA sense strand
ugaggacguugaggcuuua

SEQ ID NO: 1521447 - RNA, 19 nt, Homo sapiens
  misc_RNA (1)...(19): siRNA sense strand
gaggagcuggcuuacuaua

SEQ ID NO: 1521448 - RNA, 19 nt, Homo sapiens
  misc_RNA (1)...(19): siRNA sense strand
uaagagugaagaaauggaa

SEQ ID NO: 1521449 - RNA, 19 nt, Homo sapiens
  misc_RNA (1)...(19): siRNA sense strand
caaacaacgcgacgagauc

SEQ ID NO: 1521450 - RNA, 19 nt, Homo sapiens
  misc_RNA (1)...(19): siRNA sense strand
gaaggaggugguggacaaa

SEQ ID NO: 1521451 - RNA, 19 nt, Homo sapiens
  misc_RNA (1)...(19): siRNA sense strand
ggaggugguggacaaacaa

SEQ ID NO: 1521452 - RNA, 19 nt, Homo sapiens
  misc_RNA (1)...(19): siRNA sense strand
gagcgacaggugaugaaga

SEQ ID NO: 1521453 - RNA, 19 nt, Homo sapiens
  misc_RNA (1)...(19): siRNA sense strand
ggaagaggaaaaccgaaua

SEQ ID NO: 1521454 - RNA, 19 nt, Homo sapiens
  misc_RNA (1)...(19): siRNA sense strand
gagaggaacgagcucaagu

SEQ ID NO: 1521455 - RNA, 19 nt, Homo sapiens
  misc_RNA (1)...(19): siRNA sense strand
augaggacguugaggcuuu

SEQ ID NO: 1521456 - RNA, 19 nt, Homo sapiens
  misc_RNA (1)...(19): siRNA sense strand
agcgacaggugaugaagaa

SEQ ID NO: 1521457 - RNA, 19 nt, Homo sapiens
  misc_RNA (1)...(19): siRNA sense strand
ugaagaaauggaagaggaa

SEQ ID NO: 1521458 - RNA, 19 nt, Homo sapiens
  misc_RNA (1)...(19): siRNA sense strand
gacaggugaugaagaagcu

SEQ ID NO: 1521459 - RNA, 19 nt, Homo sapiens
  misc_RNA (1)...(19): siRNA sense strand
ggaggagcuggcuuacuau

SEQ ID NO: 1521460 - RNA, 19 nt, Homo sapiens
  misc_RNA (1)...(19): siRNA sense strand
gcucaaguccaagguguuc

SEQ ID NO: 1521461 - RNA, 19 nt, Homo sapiens
  misc_RNA (1)...(19): siRNA sense strand
ugaugaagaagcugaagga

SEQ ID NO: 1521462 - RNA, 19 nt, Homo sapiens
  misc_RNA (1)...(19): siRNA sense strand
acaaacaacgcgacgagau

SEQ ID NO: 1521463 - RNA, 19 nt, Homo sapiens
  misc_RNA (1)...(19): siRNA sense strand
cagacacggcugaugaaga

SEQ ID NO: 1521464 - RNA, 19 nt, Homo sapiens
  misc_RNA (1)...(19): siRNA sense strand
ugcaggaggagcuggcuua

SEQ ID NO: 1521465 - RNA, 19 nt, Homo sapiens
  misc_RNA (1)...(19): siRNA sense strand
gaccaaggagcaggagaug

SEQ ID NO: 1521466 - RNA, 19 nt, Homo sapiens
  misc_RNA (1)...(19): siRNA sense strand
ggacguugaggcuuuacag

SEQ ID NO: 1521467 - RNA, 19 nt, Homo sapiens
  misc_RNA (1)...(19): siRNA sense strand
gaagguggccauggaucuc

SEQ ID NO: 1521468 - RNA, 19 nt, Homo sapiens
  misc_RNA (1)...(19): siRNA sense strand
gggagcgacaggugaugaa

SEQ ID NO: 1521469 - RNA, 19 nt, Homo sapiens
  misc_RNA (1)...(19): siRNA sense strand
ggaacgagcucaaguccaa

SEQ ID NO: 1521470 - RNA, 19 nt, Homo sapiens
  misc_RNA (1)...(19): siRNA sense strand
ggaaagcccugaucgaaca

SEQ ID NO: 1521471 - RNA, 19 nt, Homo sapiens
  misc_RNA (1)...(19): siRNA sense strand
aggaggagcuggcuuacua

SEQ ID NO: 1521472 - RNA, 19 nt, Homo sapiens
  misc_RNA (1)...(19): siRNA sense strand
ugaaggaggugguggacaa

SEQ ID NO: 1521473 - RNA, 19 nt, Homo sapiens
  misc_RNA (1)...(19): siRNA sense strand
agacacggcugaugaagau

SEQ ID NO: 1521474 - RNA, 19 nt, Homo sapiens
  misc_RNA (1)...(19): siRNA sense strand
gaagaucaaccaugaccuu

SEQ ID NO: 1521475 - RNA, 19 nt, Homo sapiens
  misc_RNA (1)...(19): siRNA sense strand
gagcagagcuggggaaguu

SEQ ID NO: 1521476 - RNA, 19 nt, Homo sapiens
  misc_RNA (1)...(19): siRNA sense strand
cagagaagguggccaugga

SEQ ID NO: 1521477 - RNA, 19 nt, Homo sapiens
  misc_RNA (1)...(19): siRNA sense strand
cuauaagagugaagaaaug

SEQ ID NO: 1521478 - RNA, 19 nt, Homo sapiens
  misc_RNA (1)...(19): siRNA sense strand
gaagaaauggaagaggaaa

SEQ ID NO: 1521479 - RNA, 19 nt, Homo sapiens
  misc_RNA (1)...(19): siRNA sense strand
ugaggacguugaggcuuua

SEQ ID NO: 1521480 - RNA, 19 nt, Homo sapiens
  misc_RNA (1)...(19): siRNA sense strand
gaggagcuggcuuacuaua

SEQ ID NO: 1521481 - RNA, 19 nt, Homo sapiens
  misc_RNA (1)...(19): siRNA sense strand
uaagagugaagaaauggaa

SEQ ID NO: 1521482 - RNA, 19 nt, Homo sapiens
  misc_RNA (1)...(19): siRNA sense strand
caaacaacgcgacgagauc

SEQ ID NO: 1521483 - RNA, 19 nt, Homo sapiens
  misc_RNA (1)...(19): siRNA sense strand
gaaggaggugguggacaaa

SEQ ID NO: 1521484 - RNA, 19 nt, Homo sapiens
  misc_RNA (1)...(19): siRNA sense strand
ggaggugguggacaaacaa

SEQ ID NO: 1521485 - RNA, 19 nt, Homo sapiens
  misc_RNA (1)...(19): siRNA sense strand
gagcgacaggugaugaaga

SEQ ID NO: 1521486 - RNA, 19 nt, Homo sapiens
  misc_RNA (1)...(19): siRNA sense strand
ggaagaggaaaaccgaaua

SEQ ID NO: 1521487 - RNA, 19 nt, Homo sapiens
  misc_RNA (1)...(19): siRNA sense strand
gagaggaacgagcucaagu

SEQ ID NO: 1521488 - RNA, 19 nt, Homo sapiens
  misc_RNA (1)...(19): siRNA sense strand
augaggacguugaggcuuu

SEQ ID NO: 1521489 - RNA, 19 nt, Homo sapiens
  misc_RNA (1)...(19): siRNA sense strand
agcgacaggugaugaagaa

SEQ ID NO: 1521490 - RNA, 19 nt, Homo sapiens
  misc_RNA (1)...(19): siRNA sense strand
ugaagaaauggaagaggaa

SEQ ID NO: 1521491 - RNA, 19 nt, Homo sapiens
  misc_RNA (1)...(19): siRNA sense strand
gacaggugaugaagaagcu

SEQ ID NO: 1521492 - RNA, 19 nt, Homo sapiens
  misc_RNA (1)...(19): siRNA sense strand
ggaggagcuggcuuacuau

SEQ ID NO: 1521493 - RNA, 19 nt, Homo sapiens
  misc_RNA (1)...(19): siRNA sense strand
gcucaaguccaagguguuc

SEQ ID NO: 1521494 - RNA, 19 nt, Homo sapiens
  misc_RNA (1)...(19): siRNA sense strand
ugaugaagaagcugaagga

SEQ ID NO: 1521495 - RNA, 19 nt, Homo sapiens
  misc_RNA (1)...(19): siRNA sense strand
acaaacaacgcgacgagau

SEQ ID NO: 1521496 - RNA, 19 nt, Homo sapiens
  misc_RNA (1)...(19): siRNA sense strand
cagacacggcugaugaaga

SEQ ID NO: 1521497 - RNA, 19 nt, Homo sapiens
  misc_RNA (1)...(19): siRNA sense strand
ugcaggaggagcuggcuua

SEQ ID NO: 1521498 - RNA, 19 nt, Homo sapiens
  misc_RNA (1)...(19): siRNA sense strand
gaccaaggagcaggagaug

SEQ ID NO: 1521499 - RNA, 19 nt, Homo sapiens
  misc_RNA (1)...(19): siRNA sense strand
ggacguugaggcuuuacag

SEQ ID NO: 1521500 - RNA, 19 nt, Homo sapiens
  misc_RNA (1)...(19): siRNA sense strand
gaagguggccauggaucuc

SEQ ID NO: 1521501 - RNA, 19 nt, Homo sapiens
  misc_RNA (1)...(19): siRNA sense strand
gggagcgacaggugaugaa

SEQ ID NO: 1521502 - RNA, 19 nt, Homo sapiens
  misc_RNA (1)...(19): siRNA sense strand
ggaaaucgcugauaaagau

SEQ ID NO: 1521503 - RNA, 19 nt, Homo sapiens
  misc_RNA (1)...(19): siRNA sense strand
gcacuucuguuaggaauuu

SEQ ID NO: 1521504 - RNA, 19 nt, Homo sapiens
  misc_RNA (1)...(19): siRNA sense strand
gaagaaugguuaucagaau

SEQ ID NO: 1521505 - RNA, 19 nt, Homo sapiens
  misc_RNA (1)...(19): siRNA sense strand
acacucagaucaccaguua

SEQ ID NO: 1521506 - RNA, 19 nt, Homo sapiens
  misc_RNA (1)...(19): siRNA sense strand
ugagggagguacuaauuua

SEQ ID NO: 1521507 - RNA, 19 nt, Homo sapiens
  misc_RNA (1)...(19): siRNA sense strand
gcucagagguucgacuuaa

SEQ ID NO: 1521508 - RNA, 19 nt, Homo sapiens
  misc_RNA (1)...(19): siRNA sense strand
gaauugauguggguuuauu

SEQ ID NO: 1521509 - RNA, 19 nt, Homo sapiens
  misc_RNA (1)...(19): siRNA sense strand
caacugaucuuaguguaga

SEQ ID NO: 1521510 - RNA, 19 nt, Homo sapiens
  misc_RNA (1)...(19): siRNA sense strand
gaaaguccuuaaaguugaa

SEQ ID NO: 1521511 - RNA, 19 nt, Homo sapiens
  misc_RNA (1)...(19): siRNA sense strand
gcacagaaccgguuugaag

SEQ ID NO: 1521512 - RNA, 19 nt, Homo sapiens
  misc_RNA (1)...(19): siRNA sense strand
caacaaugcuaaucgauac

SEQ ID NO: 1521513 - RNA, 19 nt, Homo sapiens
  misc_RNA (1)...(19): siRNA sense strand
uauccaagccuucaauaua

SEQ ID NO: 1521514 - RNA, 19 nt, Homo sapiens
  misc_RNA (1)...(19): siRNA sense strand
gcaaccaacugaucuuagu

SEQ ID NO: 1521515 - RNA, 19 nt, Homo sapiens
  misc_RNA (1)...(19): siRNA sense strand
caucagaguuguuuauagu

SEQ ID NO: 1521516 - RNA, 19 nt, Homo sapiens
  misc_RNA (1)...(19): siRNA sense strand
gaaacagccucugccauca

SEQ ID NO: 1521517 - RNA, 19 nt, Homo sapiens
  misc_RNA (1)...(19): siRNA sense strand
aguauuggauccugaauuu

SEQ ID NO: 1521518 - RNA, 19 nt, Homo sapiens
  misc_RNA (1)...(19): siRNA sense strand
ggaagaaugguuaucagaa

SEQ ID NO: 1521519 - RNA, 19 nt, Homo sapiens
  misc_RNA (1)...(19): siRNA sense strand
gccaggaaguucuugauga

SEQ ID NO: 1521520 - RNA, 19 nt, Homo sapiens
  misc_RNA (1)...(19): siRNA sense strand
gguuugaaguccugaguuu

SEQ ID NO: 1521521 - RNA, 19 nt, Homo sapiens
  misc_RNA (1)...(19): siRNA sense strand
cagaauugauguggguuua

SEQ ID NO: 1521522 - RNA, 19 nt, Homo sapiens
  misc_RNA (1)...(19): siRNA sense strand
agaaaguccuuaaaguuga

SEQ ID NO: 1521523 - RNA, 19 nt, Homo sapiens
  misc_RNA (1)...(19): siRNA sense strand
gauaaagaugggaacaaua

SEQ ID NO: 1521524 - RNA, 19 nt, Homo sapiens
  misc_RNA (1)...(19): siRNA sense strand
ugaugcagaugaaggauuu

SEQ ID NO: 1521525 - RNA, 19 nt, Homo sapiens
  misc_RNA (1)...(19): siRNA sense strand
cagaaaguccuuaaaguug

SEQ ID NO: 1521526 - RNA, 19 nt, Homo sapiens
  misc_RNA (1)...(19): siRNA sense strand
ccagaaaguccuuaaaguu

SEQ ID NO: 1521527 - RNA, 19 nt, Homo sapiens
  misc_RNA (1)...(19): siRNA sense strand
ggaacugaccguuguguug

SEQ ID NO: 1521528 - RNA, 19 nt, Homo sapiens
  misc_RNA (1)...(19): siRNA sense strand
guaaauggcagucaagcaa

SEQ ID NO: 1521529 - RNA, 19 nt, Homo sapiens
  misc_RNA (1)...(19): siRNA sense strand
uaucagaauucaaggcauu

SEQ ID NO: 1521530 - RNA, 19 nt, Homo sapiens
  misc_RNA (1)...(19): siRNA sense strand
ccagcccucuauaaaguua

SEQ ID NO: 1521531 - RNA, 19 nt, Homo sapiens
  misc_RNA (1)...(19): siRNA sense strand
gcuaaucgauacucaacug

SEQ ID NO: 1521532 - RNA, 19 nt, Homo sapiens
  misc_RNA (1)...(19): siRNA sense strand
cgucauagauggagaagag

SEQ ID NO: 1521533 - RNA, 19 nt, Homo sapiens
  misc_RNA (1)...(19): siRNA sense strand
ugagagcccucgagauuca

SEQ ID NO: 1521534 - RNA, 19 nt, Homo sapiens
  misc_RNA (1)...(19): siRNA sense strand
ucagaguuguuuauaguga

SEQ ID NO: 1521535 - RNA, 19 nt, Homo sapiens
  misc_RNA (1)...(19): siRNA sense strand
ccaacaaugcuaaucgaua

SEQ ID NO: 1521536 - RNA, 19 nt, Homo sapiens
  misc_RNA (1)...(19): siRNA sense strand
agaacucuguggucgaaua

SEQ ID NO: 1521537 - RNA, 19 nt, Homo sapiens
  misc_RNA (1)...(19): siRNA sense strand
gagcugacaccaaugaaga

SEQ ID NO: 1521538 - RNA, 19 nt, Homo sapiens
  misc_RNA (1)...(19): siRNA sense strand
aaagaacucuguggucgaa

SEQ ID NO: 1521539 - RNA, 19 nt, Homo sapiens
  misc_RNA (1)...(19): siRNA sense strand
gaggagaggagucuguaaa

SEQ ID NO: 1521540 - RNA, 19 nt, Homo sapiens
  misc_RNA (1)...(19): siRNA sense strand
gccagaaaguccuuaaagu

SEQ ID NO: 1521541 - RNA, 19 nt, Homo sapiens
  misc_RNA (1)...(19): siRNA sense strand
ugacaccaaugaagaaaca

SEQ ID NO: 1521542 - RNA, 19 nt, Homo sapiens
  misc_RNA (1)...(19): siRNA sense strand
gcugggaacugaccguugu

SEQ ID NO: 1521543 - RNA, 19 nt, Homo sapiens
  misc_RNA (1)...(19): siRNA sense strand
gcacugagggagguacuaa

SEQ ID NO: 1521544 - RNA, 19 nt, Homo sapiens
  misc_RNA (1)...(19): siRNA sense strand
ccaggaaguucuugaugau

SEQ ID NO: 1521545 - RNA, 19 nt, Homo sapiens
  misc_RNA (1)...(19): siRNA sense strand
gaauuuauggugcaacuuc

SEQ ID NO: 1521546 - RNA, 19 nt, Homo sapiens
  misc_RNA (1)...(19): siRNA sense strand
gaacugaccguuguguugu

SEQ ID NO: 1521547 - RNA, 19 nt, Homo sapiens
  misc_RNA (1)...(19): siRNA sense strand
gaucucaucagaguuguuu

SEQ ID NO: 1521548 - RNA, 19 nt, Homo sapiens
  misc_RNA (1)...(19): siRNA sense strand
ugauaaagaugggaacaau

SEQ ID NO: 1521549 - RNA, 19 nt, Homo sapiens
  misc_RNA (1)...(19): siRNA sense strand
ggaaguucuugaugauauc

SEQ ID NO: 1521550 - RNA, 19 nt, Homo sapiens
  misc_RNA (1)...(19): siRNA sense strand
gccagugcuuccucaagua

SEQ ID NO: 1521551 - RNA, 19 nt, Homo sapiens
  misc_RNA (1)...(19): siRNA sense strand
caguugagcugacaccaau

SEQ ID NO: 1521552 - RNA, 19 nt, Homo sapiens
  misc_RNA (1)...(19): siRNA sense strand
uaccagcccucuauaaagu

SEQ ID NO: 1521553 - RNA, 19 nt, Homo sapiens
  misc_RNA (1)...(19): siRNA sense strand
uaauuuagcagccaacaau

SEQ ID NO: 1521554 - RNA, 19 nt, Homo sapiens
  misc_RNA (1)...(19): siRNA sense strand
gcuaauaucccagguguag

SEQ ID NO: 1521555 - RNA, 19 nt, Homo sapiens
  misc_RNA (1)...(19): siRNA sense strand
gaaugaugcagaugaagga

SEQ ID NO: 1521556 - RNA, 19 nt, Homo sapiens
  misc_RNA (1)...(19): siRNA sense strand
uauuuacggcuuacaguua

SEQ ID NO: 1521557 - RNA, 19 nt, Homo sapiens
  misc_RNA (1)...(19): siRNA sense strand
gccaucaaauccagugaga

SEQ ID NO: 1521558 - RNA, 19 nt, Homo sapiens
  misc_RNA (1)...(19): siRNA sense strand
gcuucaauccgucgucaua

SEQ ID NO: 1521559 - RNA, 19 nt, Homo sapiens
  misc_RNA (1)...(19): siRNA sense strand
aggaaguucuugaugauau

SEQ ID NO: 1521560 - RNA, 19 nt, Homo sapiens
  misc_RNA (1)...(19): siRNA sense strand
caacagugccgaggauuuc

SEQ ID NO: 1521561 - RNA, 19 nt, Homo sapiens
  misc_RNA (1)...(19): siRNA sense strand
caagcaguauguacagcaa

SEQ ID NO: 1521562 - RNA, 19 nt, Homo sapiens
  misc_RNA (1)...(19): siRNA sense strand
cgagacagacagaguaaug

SEQ ID NO: 1521563 - RNA, 19 nt, Homo sapiens
  misc_RNA (1)...(19): siRNA sense strand
ucaagcaaguaccagcauu

SEQ ID NO: 1521564 - RNA, 19 nt, Homo sapiens
  misc_RNA (1)...(19): siRNA sense strand
guacagcaaccaacugauc

SEQ ID NO: 1521565 - RNA, 19 nt, Homo sapiens
  misc_RNA (1)...(19): siRNA sense strand
acucuguggucgaauagua

SEQ ID NO: 1521566 - RNA, 19 nt, Homo sapiens
  misc_RNA (1)...(19): siRNA sense strand
gggcuucccucagcaguca

SEQ ID NO: 1521567 - RNA, 19 nt, Homo sapiens
  misc_RNA (1)...(19): siRNA sense strand
cggauggguuccaggguuu

SEQ ID NO: 1521568 - RNA, 19 nt, Homo sapiens
  misc_RNA (1)...(19): siRNA sense strand
cagcaaccaacugaucuua

SEQ ID NO: 1521569 - RNA, 19 nt, Homo sapiens
  misc_RNA (1)...(19): siRNA sense strand
agugagagcccucgagauu

SEQ ID NO: 1521570 - RNA, 19 nt, Homo sapiens
  misc_RNA (1)...(19): siRNA sense strand
cagcaacuuuacaccgaaa

SEQ ID NO: 1521571 - RNA, 19 nt, Homo sapiens
  misc_RNA (1)...(19): siRNA sense strand
cucaugcuguguuauaauu

SEQ ID NO: 1521572 - RNA, 19 nt, Homo sapiens
  misc_RNA (1)...(19): siRNA sense strand
guaccagcccucuauaaag

SEQ ID NO: 1521573 - RNA, 19 nt, Homo sapiens
  misc_RNA (1)...(19): siRNA sense strand
ccugaaugaugcagaugaa

SEQ ID NO: 1521574 - RNA, 19 nt, Homo sapiens
  misc_RNA (1)...(19): siRNA sense strand
agaaggugcugagggugua

SEQ ID NO: 1521575 - RNA, 19 nt, Homo sapiens
  misc_RNA (1)...(19): siRNA sense strand
gcaauuacaacagcuucaa

SEQ ID NO: 1521576 - RNA, 19 nt, Homo sapiens
  misc_RNA (1)...(19): siRNA sense strand
ccaacagugccgaggauuu

SEQ ID NO: 1521577 - RNA, 19 nt, Homo sapiens
  misc_RNA (1)...(19): siRNA sense strand
aaucgauacucaacuguca

SEQ ID NO: 1521578 - RNA, 19 nt, Homo sapiens
  misc_RNA (1)...(19): siRNA sense strand
aaaccugaaugaugcagau

SEQ ID NO: 1521579 - RNA, 19 nt, Homo sapiens
  misc_RNA (1)...(19): siRNA sense strand
ggaggagaggagucuguaa

SEQ ID NO: 1521580 - RNA, 19 nt, Homo sapiens
  misc_RNA (1)...(19): siRNA sense strand
aaacauucacugcacagaa

SEQ ID NO: 1521581 - RNA, 19 nt, Homo sapiens
  misc_RNA (1)...(19): siRNA sense strand
caagcaaguaccagcauug

SEQ ID NO: 1521582 - RNA, 19 nt, Homo sapiens
  misc_RNA (1)...(19): siRNA sense strand
ccucagcagucagccaauu

SEQ ID NO: 1521583 - RNA, 19 nt, Homo sapiens
  misc_RNA (1)...(19): siRNA sense strand
gguuuauuaugccauguau

SEQ ID NO: 1521584 - RNA, 19 nt, Homo sapiens
  misc_RNA (1)...(19): siRNA sense strand
caucuuaccaaucucuuug

SEQ ID NO: 1521585 - RNA, 19 nt, Homo sapiens
  misc_RNA (1)...(19): siRNA sense strand
ccagugcuuccucaaguaa

SEQ ID NO: 1521586 - RNA, 19 nt, Homo sapiens
  misc_RNA (1)...(19): siRNA sense strand
ucaucagaguuguuuauag

SEQ ID NO: 1521587 - RNA, 19 nt, Homo sapiens
  misc_RNA (1)...(19): siRNA sense strand
gaacucuguggucgaauag

SEQ ID NO: 1521588 - RNA, 19 nt, Homo sapiens
  misc_RNA (1)...(19): siRNA sense strand
guauuggauccugaauuua

SEQ ID NO: 1521589 - RNA, 19 nt, Homo sapiens
  misc_RNA (1)...(19): siRNA sense strand
guucagccaaggauaaaga

SEQ ID NO: 1521590 - RNA, 19 nt, Homo sapiens
  misc_RNA (1)...(19): siRNA sense strand
gguugccaaugccaugaaa

SEQ ID NO: 1521591 - RNA, 19 nt, Homo sapiens
  misc_RNA (1)...(19): siRNA sense strand
ucagagguucgacuuaaga

SEQ ID NO: 1521592 - RNA, 19 nt, Homo sapiens
  misc_RNA (1)...(19): siRNA sense strand
uguaccagcccucuauaaa

SEQ ID NO: 1521593 - RNA, 19 nt, Homo sapiens
  misc_RNA (1)...(19): siRNA sense strand
aacagccucugccaucaaa

SEQ ID NO: 1521594 - RNA, 19 nt, Homo sapiens
  misc_RNA (1)...(19): siRNA sense strand
ucuguaaaccugaaugaug

SEQ ID NO: 1521595 - RNA, 19 nt, Homo sapiens
  misc_RNA (1)...(19): siRNA sense strand
gauccauggcuuugacaga

SEQ ID NO: 1521596 - RNA, 19 nt, Homo sapiens
  misc_RNA (1)...(19): siRNA sense strand
gcaggaagaccggcuaggu

SEQ ID NO: 1521597 - RNA, 19 nt, Homo sapiens
  misc_RNA (1)...(19): siRNA sense strand
cuauguaaauggcagucaa

SEQ ID NO: 1521598 - RNA, 19 nt, Homo sapiens
  misc_RNA (1)...(19): siRNA sense strand
ugucugccaucagcuguuu

SEQ ID NO: 1521599 - RNA, 19 nt, Homo sapiens
  misc_RNA (1)...(19): siRNA sense strand
ggccagaaaguccuuaaag

SEQ ID NO: 1521600 - RNA, 19 nt, Homo sapiens
  misc_RNA (1)...(19): siRNA sense strand
gaaacauucacugcacaga

SEQ ID NO: 1521601 - RNA, 19 nt, Homo sapiens
  misc_RNA (1)...(19): siRNA sense strand
caaugcuaaucgauacuca

SEQ ID NO: 1521602 - RNA, 19 nt, Homo sapiens
  misc_RNA (1)...(19): siRNA sense strand
cggaagagaucgccaauua

SEQ ID NO: 1521603 - RNA, 19 nt, Homo sapiens
  misc_RNA (1)...(19): siRNA sense strand
gaagaaaucugccaaggau

SEQ ID NO: 1521604 - RNA, 19 nt, Homo sapiens
  misc_RNA (1)...(19): siRNA sense strand
ggacaugucuuacgaugaa

SEQ ID NO: 1521605 - RNA, 19 nt, Homo sapiens
  misc_RNA (1)...(19): siRNA sense strand
caacagggaucuacagaaa

SEQ ID NO: 1521606 - RNA, 19 nt, Homo sapiens
  misc_RNA (1)...(19): siRNA sense strand
ggaaagaaaugaucgacaa

SEQ ID NO: 1521607 - RNA, 19 nt, Homo sapiens
  misc_RNA (1)...(19): siRNA sense strand
gaacaaaccaucaucauuc

SEQ ID NO: 1521608 - RNA, 19 nt, Homo sapiens
  misc_RNA (1)...(19): siRNA sense strand
ccaaagagauccaucaguu

SEQ ID NO: 1521609 - RNA, 19 nt, Homo sapiens
  misc_RNA (1)...(19): siRNA sense strand
ggagaaaccacccaaauuu

SEQ ID NO: 1521610 - RNA, 19 nt, Homo sapiens
  misc_RNA (1)...(19): siRNA sense strand
ggaacgagcuccacaagau

SEQ ID NO: 1521611 - RNA, 19 nt, Homo sapiens
  misc_RNA (1)...(19): siRNA sense strand
gaugagaaguccauaauca

SEQ ID NO: 1521612 - RNA, 19 nt, Homo sapiens
  misc_RNA (1)...(19): siRNA sense strand
ugaaagaccuugcugaaga

SEQ ID NO: 1521613 - RNA, 19 nt, Homo sapiens
  misc_RNA (1)...(19): siRNA sense strand
gagaaaccacccaaauuua

SEQ ID NO: 1521614 - RNA, 19 nt, Homo sapiens
  misc_RNA (1)...(19): siRNA sense strand
ggccugaccugauagauuu

SEQ ID NO: 1521615 - RNA, 19 nt, Homo sapiens
  misc_RNA (1)...(19): siRNA sense strand
gaaaggugcuugacaaugc

SEQ ID NO: 1521616 - RNA, 19 nt, Homo sapiens
  misc_RNA (1)...(19): siRNA sense strand
gaagcaagccgaagccuuu

SEQ ID NO: 1521617 - RNA, 19 nt, Homo sapiens
  misc_RNA (1)...(19): siRNA sense strand
gaagagcaccgacgaggua

SEQ ID NO: 1521618 - RNA, 19 nt, Homo sapiens
  misc_RNA (1)...(19): siRNA sense strand
guaaaugguugaagcauca

SEQ ID NO: 1521619 - RNA, 19 nt, Homo sapiens
  misc_RNA (1)...(19): siRNA sense strand
agacagacauugccgcaua

SEQ ID NO: 1521620 - RNA, 19 nt, Homo sapiens
  misc_RNA (1)...(19): siRNA sense strand
gaacuugcauccaacaaag

SEQ ID NO: 1521621 - RNA, 19 nt, Homo sapiens
  misc_RNA (1)...(19): siRNA sense strand
gaaaugaaggugcuaguau

SEQ ID NO: 1521622 - RNA, 19 nt, Homo sapiens
  misc_RNA (1)...(19): siRNA sense strand
gugcagaucuagacaaaug

SEQ ID NO: 1521623 - RNA, 19 nt, Homo sapiens
  misc_RNA (1)...(19): siRNA sense strand
ucaaucaccuggcagauga

SEQ ID NO: 1521624 - RNA, 19 nt, Homo sapiens
  misc_RNA (1)...(19): siRNA sense strand
uggaaaggcugacuacauu

SEQ ID NO: 1521625 - RNA, 19 nt, Homo sapiens
  misc_RNA (1)...(19): siRNA sense strand
gaacuggcuuugcggaaug

SEQ ID NO: 1521626 - RNA, 19 nt, Homo sapiens
  misc_RNA (1)...(19): siRNA sense strand
gaagagaucgccaauuaca

SEQ ID NO: 1521627 - RNA, 19 nt, Homo sapiens
  misc_RNA (1)...(19): siRNA sense strand
caucaacucuggacauuca

SEQ ID NO: 1521628 - RNA, 19 nt, Homo sapiens
  misc_RNA (1)...(19): siRNA sense strand
gagcagagaguccaucuug

SEQ ID NO: 1521629 - RNA, 19 nt, Homo sapiens
  misc_RNA (1)...(19): siRNA sense strand
ggaaggauggccucaauga

SEQ ID NO: 1521630 - RNA, 19 nt, Homo sapiens
  misc_RNA (1)...(19): siRNA sense strand
acagggaucuacagaaauu

SEQ ID NO: 1521631 - RNA, 19 nt, Homo sapiens
  misc_RNA (1)...(19): siRNA sense strand
guggagaccuuacagagaa

SEQ ID NO: 1521632 - RNA, 19 nt, Homo sapiens
  misc_RNA (1)...(19): siRNA sense strand
gaacacaguggagaccuua

SEQ ID NO: 1521633 - RNA, 19 nt, Homo sapiens
  misc_RNA (1)...(19): siRNA sense strand
cuuauguggugacuuauua

SEQ ID NO: 1521634 - RNA, 19 nt, Homo sapiens
  misc_RNA (1)...(19): siRNA sense strand
gugcagcuguuaauaaaga

SEQ ID NO: 1521635 - RNA, 19 nt, Homo sapiens
  misc_RNA (1)...(19): siRNA sense strand
ggaagaaggagaucgaaga

SEQ ID NO: 1521636 - RNA, 19 nt, Homo sapiens
  misc_RNA (1)...(19): siRNA sense strand
agaaauuccugcaagauug

SEQ ID NO: 1521637 - RNA, 19 nt, Homo sapiens
  misc_RNA (1)...(19): siRNA sense strand
caacaaggccugggaaaga

SEQ ID NO: 1521638 - RNA, 19 nt, Homo sapiens
  misc_RNA (1)...(19): siRNA sense strand
gcauugaacuugggaaauc

SEQ ID NO: 1521639 - RNA, 19 nt, Homo sapiens
  misc_RNA (1)...(19): siRNA sense strand
ggagauggcagaagaggaa

SEQ ID NO: 1521640 - RNA, 19 nt, Homo sapiens
  misc_RNA (1)...(19): siRNA sense strand
cagagaagcuggaggaucu

SEQ ID NO: 1521641 - RNA, 19 nt, Homo sapiens
  misc_RNA (1)...(19): siRNA sense strand
ggccuucaaugcacugaua

SEQ ID NO: 1521642 - RNA, 19 nt, Homo sapiens
  misc_RNA (1)...(19): siRNA sense strand
gaaagaccuugcugaagag

SEQ ID NO: 1521643 - RNA, 19 nt, Homo sapiens
  misc_RNA (1)...(19): siRNA sense strand
caaagaauggcuugacaaa

SEQ ID NO: 1521644 - RNA, 19 nt, Homo sapiens
  misc_RNA (1)...(19): siRNA sense strand
ugagugaccugcagaagga

SEQ ID NO: 1521645 - RNA, 19 nt, Homo sapiens
  misc_RNA (1)...(19): siRNA sense strand
aaaugaaggugcuaguauu

SEQ ID NO: 1521646 - RNA, 19 nt, Homo sapiens
  misc_RNA (1)...(19): siRNA sense strand
ucaaugcacugauacacaa

SEQ ID NO: 1521647 - RNA, 19 nt, Homo sapiens
  misc_RNA (1)...(19): siRNA sense strand
ucugaacaaucgcaaauuu

SEQ ID NO: 1521648 - RNA, 19 nt, Homo sapiens
  misc_RNA (1)...(19): siRNA sense strand
gagguucucugcccuggaa

SEQ ID NO: 1521649 - RNA, 19 nt, Homo sapiens
  misc_RNA (1)...(19): siRNA sense strand
caaaguggauaaacuguac

SEQ ID NO: 1521650 - RNA, 19 nt, Homo sapiens
  misc_RNA (1)...(19): siRNA sense strand
ggagaucuuugggcguaua

SEQ ID NO: 1521651 - RNA, 19 nt, Homo sapiens
  misc_RNA (1)...(19): siRNA sense strand
ggcagaugcugaugacauu

SEQ ID NO: 1521652 - RNA, 19 nt, Homo sapiens
  misc_RNA (1)...(19): siRNA sense strand
cgacagccauccugaaagu

SEQ ID NO: 1521653 - RNA, 19 nt, Homo sapiens
  misc_RNA (1)...(19): siRNA sense strand
gagaacugguugacaggaa

SEQ ID NO: 1521654 - RNA, 19 nt, Homo sapiens
  misc_RNA (1)...(19): siRNA sense strand
ggaguucuguuaucaagag

SEQ ID NO: 1521655 - RNA, 19 nt, Homo sapiens
  misc_RNA (1)...(19): siRNA sense strand
gaagaggcaagcuggauga

SEQ ID NO: 1521656 - RNA, 19 nt, Homo sapiens
  misc_RNA (1)...(19): siRNA sense strand
ccagagcugugcagaucua

SEQ ID NO: 1521657 - RNA, 19 nt, Homo sapiens
  misc_RNA (1)...(19): siRNA sense strand
acaccggccugaccugaua

SEQ ID NO: 1521658 - RNA, 19 nt, Homo sapiens
  misc_RNA (1)...(19): siRNA sense strand
gcagcaaccugggaugaga

SEQ ID NO: 1521659 - RNA, 19 nt, Homo sapiens
  misc_RNA (1)...(19): siRNA sense strand
gaaauugaugcacguaaug

SEQ ID NO: 1521660 - RNA, 19 nt, Homo sapiens
  misc_RNA (1)...(19): siRNA sense strand
gagcaggagcuguacauga

SEQ ID NO: 1521661 - RNA, 19 nt, Homo sapiens
  misc_RNA (1)...(19): siRNA sense strand
gacagcggcucgagaugaa

SEQ ID NO: 1521662 - RNA, 19 nt, Homo sapiens
  misc_RNA (1)...(19): siRNA sense strand
gcucaucucugacaucaac

SEQ ID NO: 1521663 - RNA, 19 nt, Homo sapiens
  misc_RNA (1)...(19): siRNA sense strand
gaugaaggccuuagcuguu

SEQ ID NO: 1521664 - RNA, 19 nt, Homo sapiens
  misc_RNA (1)...(19): siRNA sense strand
cacagucucuggucaagaa

SEQ ID NO: 1521665 - RNA, 19 nt, Homo sapiens
  misc_RNA (1)...(19): siRNA sense strand
gagccgagcacgaagguuu

SEQ ID NO: 1521666 - RNA, 19 nt, Homo sapiens
  misc_RNA (1)...(19): siRNA sense strand
ggagagaucagaacacagu

SEQ ID NO: 1521667 - RNA, 19 nt, Homo sapiens
  misc_RNA (1)...(19): siRNA sense strand
uggcagaacuugcauccaa

SEQ ID NO: 1521668 - RNA, 19 nt, Homo sapiens
  misc_RNA (1)...(19): siRNA sense strand
gugaagccgugcagaagaa

SEQ ID NO: 1521669 - RNA, 19 nt, Homo sapiens
  misc_RNA (1)...(19): siRNA sense strand
gggaauaccuacuggaacu

SEQ ID NO: 1521670 - RNA, 19 nt, Homo sapiens
  misc_RNA (1)...(19): siRNA sense strand
gaagguggacucuauugau

SEQ ID NO: 1521671 - RNA, 19 nt, Homo sapiens
  misc_RNA (1)...(19): siRNA sense strand
caaggaaggcgaagacaug

SEQ ID NO: 1521672 - RNA, 19 nt, Homo sapiens
  misc_RNA (1)...(19): siRNA sense strand
cgagugcaaugaaaccaaa

SEQ ID NO: 1521673 - RNA, 19 nt, Homo sapiens
  misc_RNA (1)...(19): siRNA sense strand
gagaacaaguuucccaaaa

SEQ ID NO: 1521674 - RNA, 19 nt, Homo sapiens
  misc_RNA (1)...(19): siRNA sense strand
ugaaauugaugcacguaau

SEQ ID NO: 1521675 - RNA, 19 nt, Homo sapiens
  misc_RNA (1)...(19): siRNA sense strand
gaaagugagcgcauuagca

SEQ ID NO: 1521676 - RNA, 19 nt, Homo sapiens
  misc_RNA (1)...(19): siRNA sense strand
gccgaagccuuucuuaaca

SEQ ID NO: 1521677 - RNA, 19 nt, Homo sapiens
  misc_RNA (1)...(19): siRNA sense strand
caaaccaucaucauucuga

SEQ ID NO: 1521678 - RNA, 19 nt, Homo sapiens
  misc_RNA (1)...(19): siRNA sense strand
gcagacagcaagaggaaga

SEQ ID NO: 1521679 - RNA, 19 nt, Homo sapiens
  misc_RNA (1)...(19): siRNA sense strand
ggacaggagccguaccuau

SEQ ID NO: 1521680 - RNA, 19 nt, Homo sapiens
  misc_RNA (1)...(19): siRNA sense strand
gcaaacaaggccgaacuuu

SEQ ID NO: 1521681 - RNA, 19 nt, Homo sapiens
  misc_RNA (1)...(19): siRNA sense strand
gcagaccgaugcccaguac

SEQ ID NO: 1521682 - RNA, 19 nt, Homo sapiens
  misc_RNA (1)...(19): siRNA sense strand
ggaaacugaagacaacaaa

SEQ ID NO: 1521683 - RNA, 19 nt, Homo sapiens
  misc_RNA (1)...(19): siRNA sense strand
ccacccaaauuuacugaga

SEQ ID NO: 1521684 - RNA, 19 nt, Homo sapiens
  misc_RNA (1)...(19): siRNA sense strand
gaugagagacacagguuau

SEQ ID NO: 1521685 - RNA, 19 nt, Homo sapiens
  misc_RNA (1)...(19): siRNA sense strand
gaugaagaccacccugaaa

SEQ ID NO: 1521686 - RNA, 19 nt, Homo sapiens
  misc_RNA (1)...(19): siRNA sense strand
gugcugcucuucaccauuc

SEQ ID NO: 1521687 - RNA, 19 nt, Homo sapiens
  misc_RNA (1)...(19): siRNA sense strand
aaacugaagacaacaaaga

SEQ ID NO: 1521688 - RNA, 19 nt, Homo sapiens
  misc_RNA (1)...(19): siRNA sense strand
gaaggauggccucaaugaa

SEQ ID NO: 1521689 - RNA, 19 nt, Homo sapiens
  misc_RNA (1)...(19): siRNA sense strand
gcacgaggccauugagaca

SEQ ID NO: 1521690 - RNA, 19 nt, Homo sapiens
  misc_RNA (1)...(19): siRNA sense strand
ggagaacaaguuucccaaa

SEQ ID NO: 1521691 - RNA, 19 nt, Homo sapiens
  misc_RNA (1)...(19): siRNA sense strand
ggacaaguuccgcuucuuc

SEQ ID NO: 1521692 - RNA, 19 nt, Homo sapiens
  misc_RNA (1)...(19): siRNA sense strand
acacuacauuugagcauga

SEQ ID NO: 1521693 - RNA, 19 nt, Homo sapiens
  misc_RNA (1)...(19): siRNA sense strand
ugaacgagaggaagcauaa

SEQ ID NO: 1521694 - RNA, 19 nt, Homo sapiens
  misc_RNA (1)...(19): siRNA sense strand
gaacgagcuccacaagaug

SEQ ID NO: 1521695 - RNA, 19 nt, Homo sapiens
  misc_RNA (1)...(19): siRNA sense strand
gagccuagaaccagaaaug

SEQ ID NO: 1521696 - RNA, 19 nt, Homo sapiens
  misc_RNA (1)...(19): siRNA sense strand
ggacguggcggaagagauc

SEQ ID NO: 1521697 - RNA, 19 nt, Homo sapiens
  misc_RNA (1)...(19): siRNA sense strand
acaaggacguggcggaaga

SEQ ID NO: 1521698 - RNA, 19 nt, Homo sapiens
  misc_RNA (1)...(19): siRNA sense strand
gaaaucugcacaguaaaug

SEQ ID NO: 1521699 - RNA, 19 nt, Homo sapiens
  misc_RNA (1)...(19): siRNA sense strand
gaaaagaggaaagaaauga

SEQ ID NO: 1521700 - RNA, 19 nt, Homo sapiens
  misc_RNA (1)...(19): siRNA sense strand
ugacaaggccgacgauauc

SEQ ID NO: 1521701 - RNA, 19 nt, Homo sapiens
  misc_RNA (1)...(19): siRNA sense strand
uuacagagaaugcacacua

SEQ ID NO: 1521702 - RNA, 19 nt, Homo sapiens
  misc_RNA (1)...(19): siRNA sense strand
cggaagagaucgccaauua

SEQ ID NO: 1521703 - RNA, 19 nt, Homo sapiens
  misc_RNA (1)...(19): siRNA sense strand
gaagaaaucugccaaggau

SEQ ID NO: 1521704 - RNA, 19 nt, Homo sapiens
  misc_RNA (1)...(19): siRNA sense strand
ggacaugucuuacgaugaa

SEQ ID NO: 1521705 - RNA, 19 nt, Homo sapiens
  misc_RNA (1)...(19): siRNA sense strand
caacagggaucuacagaaa

SEQ ID NO: 1521706 - RNA, 19 nt, Homo sapiens
  misc_RNA (1)...(19): siRNA sense strand
ggaaagaaaugaucgacaa

SEQ ID NO: 1521707 - RNA, 19 nt, Homo sapiens
  misc_RNA (1)...(19): siRNA sense strand
gaacaaaccaucaucauuc

SEQ ID NO: 1521708 - RNA, 19 nt, Homo sapiens
  misc_RNA (1)...(19): siRNA sense strand
ccaaagagauccaucaguu

SEQ ID NO: 1521709 - RNA, 19 nt, Homo sapiens
  misc_RNA (1)...(19): siRNA sense strand
ggagaaaccacccaaauuu

SEQ ID NO: 1521710 - RNA, 19 nt, Homo sapiens
  misc_RNA (1)...(19): siRNA sense strand
ggaacgagcuccacaagau

SEQ ID NO: 1521711 - RNA, 19 nt, Homo sapiens
  misc_RNA (1)...(19): siRNA sense strand
gaugagaaguccauaauca

SEQ ID NO: 1521712 - RNA, 19 nt, Homo sapiens
  misc_RNA (1)...(19): siRNA sense strand
ugaaagaccuugcugaaga

SEQ ID NO: 1521713 - RNA, 19 nt, Homo sapiens
  misc_RNA (1)...(19): siRNA sense strand
gagaaaccacccaaauuua

SEQ ID NO: 1521714 - RNA, 19 nt, Homo sapiens
  misc_RNA (1)...(19): siRNA sense strand
ggccugaccugauagauuu

SEQ ID NO: 1521715 - RNA, 19 nt, Homo sapiens
  misc_RNA (1)...(19): siRNA sense strand
gaaaggugcuugacaaugc

SEQ ID NO: 1521716 - RNA, 19 nt, Homo sapiens
  misc_RNA (1)...(19): siRNA sense strand
gaagcaagccgaagccuuu

SEQ ID NO: 1521717 - RNA, 19 nt, Homo sapiens
  misc_RNA (1)...(19): siRNA sense strand
gaagagcaccgacgaggua

SEQ ID NO: 1521718 - RNA, 19 nt, Homo sapiens
  misc_RNA (1)...(19): siRNA sense strand
guaaaugguugaagcauca

SEQ ID NO: 1521719 - RNA, 19 nt, Homo sapiens
  misc_RNA (1)...(19): siRNA sense strand
agacagacauugccgcaua

SEQ ID NO: 1521720 - RNA, 19 nt, Homo sapiens
  misc_RNA (1)...(19): siRNA sense strand
gaacuugcauccaacaaag

SEQ ID NO: 1521721 - RNA, 19 nt, Homo sapiens
  misc_RNA (1)...(19): siRNA sense strand
gaaaugaaggugcuaguau

SEQ ID NO: 1521722 - RNA, 19 nt, Homo sapiens
  misc_RNA (1)...(19): siRNA sense strand
gugcagaucuagacaaaug

SEQ ID NO: 1521723 - RNA, 19 nt, Homo sapiens
  misc_RNA (1)...(19): siRNA sense strand
ucaaucaccuggcagauga

SEQ ID NO: 1521724 - RNA, 19 nt, Homo sapiens
  misc_RNA (1)...(19): siRNA sense strand
uggaaaggcugacuacauu

SEQ ID NO: 1521725 - RNA, 19 nt, Homo sapiens
  misc_RNA (1)...(19): siRNA sense strand
gaacuggcuuugcggaaug

SEQ ID NO: 1521726 - RNA, 19 nt, Homo sapiens
  misc_RNA (1)...(19): siRNA sense strand
gaagagaucgccaauuaca

SEQ ID NO: 1521727 - RNA, 19 nt, Homo sapiens
  misc_RNA (1)...(19): siRNA sense strand
caucaacucuggacauuca

SEQ ID NO: 1521728 - RNA, 19 nt, Homo sapiens
  misc_RNA (1)...(19): siRNA sense strand
gagcagagaguccaucuug

SEQ ID NO: 1521729 - RNA, 19 nt, Homo sapiens
  misc_RNA (1)...(19): siRNA sense strand
ggaaggauggccucaauga

SEQ ID NO: 1521730 - RNA, 19 nt, Homo sapiens
  misc_RNA (1)...(19): siRNA sense strand
acagggaucuacagaaauu

SEQ ID NO: 1521731 - RNA, 19 nt, Homo sapiens
  misc_RNA (1)...(19): siRNA sense strand
guggagaccuuacagagaa

SEQ ID NO: 1521732 - RNA, 19 nt, Homo sapiens
  misc_RNA (1)...(19): siRNA sense strand
gaacacaguggagaccuua

SEQ ID NO: 1521733 - RNA, 19 nt, Homo sapiens
  misc_RNA (1)...(19): siRNA sense strand
cuuauguggugacuuauua

SEQ ID NO: 1521734 - RNA, 19 nt, Homo sapiens
  misc_RNA (1)...(19): siRNA sense strand
gugcagcuguuaauaaaga

SEQ ID NO: 1521735 - RNA, 19 nt, Homo sapiens
  misc_RNA (1)...(19): siRNA sense strand
ggaagaaggagaucgaaga

SEQ ID NO: 1521736 - RNA, 19 nt, Homo sapiens
  misc_RNA (1)...(19): siRNA sense strand
agaaauuccugcaagauug

SEQ ID NO: 1521737 - RNA, 19 nt, Homo sapiens
  misc_RNA (1)...(19): siRNA sense strand
caacaaggccugggaaaga

SEQ ID NO: 1521738 - RNA, 19 nt, Homo sapiens
  misc_RNA (1)...(19): siRNA sense strand
gcauugaacuugggaaauc

SEQ ID NO: 1521739 - RNA, 19 nt, Homo sapiens
  misc_RNA (1)...(19): siRNA sense strand
ggagauggcagaagaggaa

SEQ ID NO: 1521740 - RNA, 19 nt, Homo sapiens
  misc_RNA (1)...(19): siRNA sense strand
cagagaagcuggaggaucu

SEQ ID NO: 1521741 - RNA, 19 nt, Homo sapiens
  misc_RNA (1)...(19): siRNA sense strand
ggccuucaaugcacugaua

SEQ ID NO: 1521742 - RNA, 19 nt, Homo sapiens
  misc_RNA (1)...(19): siRNA sense strand
gaaagaccuugcugaagag

SEQ ID NO: 1521743 - RNA, 19 nt, Homo sapiens
  misc_RNA (1)...(19): siRNA sense strand
caaagaauggcuugacaaa

SEQ ID NO: 1521744 - RNA, 19 nt, Homo sapiens
  misc_RNA (1)...(19): siRNA sense strand
ugagugaccugcagaagga

SEQ ID NO: 1521745 - RNA, 19 nt, Homo sapiens
  misc_RNA (1)...(19): siRNA sense strand
aaaugaaggugcuaguauu

SEQ ID NO: 1521746 - RNA, 19 nt, Homo sapiens
  misc_RNA (1)...(19): siRNA sense strand
ucaaugcacugauacacaa

SEQ ID NO: 1521747 - RNA, 19 nt, Homo sapiens
  misc_RNA (1)...(19): siRNA sense strand
ucugaacaaucgcaaauuu

SEQ ID NO: 1521748 - RNA, 19 nt, Homo sapiens
  misc_RNA (1)...(19): siRNA sense strand
gagguucucugcccuggaa

SEQ ID NO: 1521749 - RNA, 19 nt, Homo sapiens
  misc_RNA (1)...(19): siRNA sense strand
caaaguggauaaacuguac

SEQ ID NO: 1521750 - RNA, 19 nt, Homo sapiens
  misc_RNA (1)...(19): siRNA sense strand
ggagaucuuugggcguaua

SEQ ID NO: 1521751 - RNA, 19 nt, Homo sapiens
  misc_RNA (1)...(19): siRNA sense strand
ggcagaugcugaugacauu

SEQ ID NO: 1521752 - RNA, 19 nt, Homo sapiens
  misc_RNA (1)...(19): siRNA sense strand
cgacagccauccugaaagu

SEQ ID NO: 1521753 - RNA, 19 nt, Homo sapiens
  misc_RNA (1)...(19): siRNA sense strand
gagaacugguugacaggaa

SEQ ID NO: 1521754 - RNA, 19 nt, Homo sapiens
  misc_RNA (1)...(19): siRNA sense strand
ggaguucuguuaucaagag

SEQ ID NO: 1521755 - RNA, 19 nt, Homo sapiens
  misc_RNA (1)...(19): siRNA sense strand
gaagaggcaagcuggauga

SEQ ID NO: 1521756 - RNA, 19 nt, Homo sapiens
  misc_RNA (1)...(19): siRNA sense strand
ccagagcugugcagaucua

SEQ ID NO: 1521757 - RNA, 19 nt, Homo sapiens
  misc_RNA (1)...(19): siRNA sense strand
acaccggccugaccugaua

SEQ ID NO: 1521758 - RNA, 19 nt, Homo sapiens
  misc_RNA (1)...(19): siRNA sense strand
gcagcaaccugggaugaga

SEQ ID NO: 1521759 - RNA, 19 nt, Homo sapiens
  misc_RNA (1)...(19): siRNA sense strand
gaaauugaugcacguaaug

SEQ ID NO: 1521760 - RNA, 19 nt, Homo sapiens
  misc_RNA (1)...(19): siRNA sense strand
gagcaggagcuguacauga

SEQ ID NO: 1521761 - RNA, 19 nt, Homo sapiens
  misc_RNA (1)...(19): siRNA sense strand
gacagcggcucgagaugaa

SEQ ID NO: 1521762 - RNA, 19 nt, Homo sapiens
  misc_RNA (1)...(19): siRNA sense strand
gcucaucucugacaucaac

SEQ ID NO: 1521763 - RNA, 19 nt, Homo sapiens
  misc_RNA (1)...(19): siRNA sense strand
gaugaaggccuuagcuguu

SEQ ID NO: 1521764 - RNA, 19 nt, Homo sapiens
  misc_RNA (1)...(19): siRNA sense strand
cacagucucuggucaagaa

SEQ ID NO: 1521765 - RNA, 19 nt, Homo sapiens
  misc_RNA (1)...(19): siRNA sense strand
gagccgagcacgaagguuu

SEQ ID NO: 1521766 - RNA, 19 nt, Homo sapiens
  misc_RNA (1)...(19): siRNA sense strand
ggagagaucagaacacagu

SEQ ID NO: 1521767 - RNA, 19 nt, Homo sapiens
  misc_RNA (1)...(19): siRNA sense strand
uggcagaacuugcauccaa

SEQ ID NO: 1521768 - RNA, 19 nt, Homo sapiens
  misc_RNA (1)...(19): siRNA sense strand
gugaagccgugcagaagaa

SEQ ID NO: 1521769 - RNA, 19 nt, Homo sapiens
  misc_RNA (1)...(19): siRNA sense strand
gggaauaccuacuggaacu

SEQ ID NO: 1521770 - RNA, 19 nt, Homo sapiens
  misc_RNA (1)...(19): siRNA sense strand
gaagguggacucuauugau

SEQ ID NO: 1521771 - RNA, 19 nt, Homo sapiens
  misc_RNA (1)...(19): siRNA sense strand
caaggaaggcgaagacaug

SEQ ID NO: 1521772 - RNA, 19 nt, Homo sapiens
  misc_RNA (1)...(19): siRNA sense strand
cgagugcaaugaaaccaaa

SEQ ID NO: 1521773 - RNA, 19 nt, Homo sapiens
  misc_RNA (1)...(19): siRNA sense strand
gagaacaaguuucccaaaa

SEQ ID NO: 1521774 - RNA, 19 nt, Homo sapiens
  misc_RNA (1)...(19): siRNA sense strand
ugaaauugaugcacguaau

SEQ ID NO: 1521775 - RNA, 19 nt, Homo sapiens
  misc_RNA (1)...(19): siRNA sense strand
gaaagugagcgcauuagca

SEQ ID NO: 1521776 - RNA, 19 nt, Homo sapiens
  misc_RNA (1)...(19): siRNA sense strand
gccgaagccuuucuuaaca

SEQ ID NO: 1521777 - RNA, 19 nt, Homo sapiens
  misc_RNA (1)...(19): siRNA sense strand
caaaccaucaucauucuga

SEQ ID NO: 1521778 - RNA, 19 nt, Homo sapiens
  misc_RNA (1)...(19): siRNA sense strand
gcagacagcaagaggaaga

SEQ ID NO: 1521779 - RNA, 19 nt, Homo sapiens
  misc_RNA (1)...(19): siRNA sense strand
ggacaggagccguaccuau

SEQ ID NO: 1521780 - RNA, 19 nt, Homo sapiens
  misc_RNA (1)...(19): siRNA sense strand
gcaaacaaggccgaacuuu

SEQ ID NO: 1521781 - RNA, 19 nt, Homo sapiens
  misc_RNA (1)...(19): siRNA sense strand
gcagaccgaugcccaguac

SEQ ID NO: 1521782 - RNA, 19 nt, Homo sapiens
  misc_RNA (1)...(19): siRNA sense strand
ggaaacugaagacaacaaa

SEQ ID NO: 1521783 - RNA, 19 nt, Homo sapiens
  misc_RNA (1)...(19): siRNA sense strand
ccacccaaauuuacugaga

SEQ ID NO: 1521784 - RNA, 19 nt, Homo sapiens
  misc_RNA (1)...(19): siRNA sense strand
gaugagagacacagguuau

SEQ ID NO: 1521785 - RNA, 19 nt, Homo sapiens
  misc_RNA (1)...(19): siRNA sense strand
gaugaagaccacccugaaa

SEQ ID NO: 1521786 - RNA, 19 nt, Homo sapiens
  misc_RNA (1)...(19): siRNA sense strand
gugcugcucuucaccauuc

SEQ ID NO: 1521787 - RNA, 19 nt, Homo sapiens
  misc_RNA (1)...(19): siRNA sense strand
aaacugaagacaacaaaga

SEQ ID NO: 1521788 - RNA, 19 nt, Homo sapiens
  misc_RNA (1)...(19): siRNA sense strand
gaaggauggccucaaugaa

SEQ ID NO: 1521789 - RNA, 19 nt, Homo sapiens
  misc_RNA (1)...(19): siRNA sense strand
gcacgaggccauugagaca

SEQ ID NO: 1521790 - RNA, 19 nt, Homo sapiens
  misc_RNA (1)...(19): siRNA sense strand
ggagaacaaguuucccaaa

SEQ ID NO: 1521791 - RNA, 19 nt, Homo sapiens
  misc_RNA (1)...(19): siRNA sense strand
ggacaaguuccgcuucuuc

SEQ ID NO: 1521792 - RNA, 19 nt, Homo sapiens
  misc_RNA (1)...(19): siRNA sense strand
acacuacauuugagcauga

SEQ ID NO: 1521793 - RNA, 19 nt, Homo sapiens
  misc_RNA (1)...(19): siRNA sense strand
ugaacgagaggaagcauaa

SEQ ID NO: 1521794 - RNA, 19 nt, Homo sapiens
  misc_RNA (1)...(19): siRNA sense strand
gaacgagcuccacaagaug

SEQ ID NO: 1521795 - RNA, 19 nt, Homo sapiens
  misc_RNA (1)...(19): siRNA sense strand
gagccuagaaccagaaaug

SEQ ID NO: 1521796 - RNA, 19 nt, Homo sapiens
  misc_RNA (1)...(19): siRNA sense strand
ggacguggcggaagagauc

SEQ ID NO: 1521797 - RNA, 19 nt, Homo sapiens
  misc_RNA (1)...(19): siRNA sense strand
acaaggacguggcggaaga

SEQ ID NO: 1521798 - RNA, 19 nt, Homo sapiens
  misc_RNA (1)...(19): siRNA sense strand
gaaaucugcacaguaaaug

SEQ ID NO: 1521799 - RNA, 19 nt, Homo sapiens
  misc_RNA (1)...(19): siRNA sense strand
gaaaagaggaaagaaauga

SEQ ID NO: 1521800 - RNA, 19 nt, Homo sapiens
  misc_RNA (1)...(19): siRNA sense strand
ugacaaggccgacgauauc

SEQ ID NO: 1521801 - RNA, 19 nt, Homo sapiens
  misc_RNA (1)...(19): siRNA sense strand
uuacagagaaugcacacua

SEQ ID NO: 1521802 - RNA, 19 nt, Homo sapiens
  misc_RNA (1)...(19): siRNA sense strand
ggaaacagguuaguauuug

SEQ ID NO: 1521803 - RNA, 19 nt, Homo sapiens
  misc_RNA (1)...(19): siRNA sense strand
gaaacagguuaguauuugu

SEQ ID NO: 1521804 - RNA, 19 nt, Homo sapiens
  misc_RNA (1)...(19): siRNA sense strand
gcuagcagcagaagcaaua

SEQ ID NO: 1521805 - RNA, 19 nt, Homo sapiens
  misc_RNA (1)...(19): siRNA sense strand
ggagaucugcuguggauga

SEQ ID NO: 1521806 - RNA, 19 nt, Homo sapiens
  misc_RNA (1)...(19): siRNA sense strand
cuaaauaaacucccaguau

SEQ ID NO: 1521807 - RNA, 19 nt, Homo sapiens
  misc_RNA (1)...(19): siRNA sense strand
gaacagaaccucaaaaguc

SEQ ID NO: 1521808 - RNA, 19 nt, Homo sapiens
  misc_RNA (1)...(19): siRNA sense strand
cauaccauuugcucuauuu

SEQ ID NO: 1521809 - RNA, 19 nt, Homo sapiens
  misc_RNA (1)...(19): siRNA sense strand
gaucugcuguggaugaauc

SEQ ID NO: 1521810 - RNA, 19 nt, Homo sapiens
  misc_RNA (1)...(19): siRNA sense strand
caacagauuacauaccauu

SEQ ID NO: 1521811 - RNA, 19 nt, Homo sapiens
  misc_RNA (1)...(19): siRNA sense strand
gagguaggguuggaacaga

SEQ ID NO: 1521812 - RNA, 19 nt, Homo sapiens
  misc_RNA (1)...(19): siRNA sense strand
gagaucugcuguggaugaa

SEQ ID NO: 1521813 - RNA, 19 nt, Homo sapiens
  misc_RNA (1)...(19): siRNA sense strand
uuacauaccauuugcucua

SEQ ID NO: 1521814 - RNA, 19 nt, Homo sapiens
  misc_RNA (1)...(19): siRNA sense strand
gaucuagcagugaccagua

SEQ ID NO: 1521815 - RNA, 19 nt, Homo sapiens
  misc_RNA (1)...(19): siRNA sense strand
cagaagcaauagaaaugga

SEQ ID NO: 1521816 - RNA, 19 nt, Homo sapiens
  misc_RNA (1)...(19): siRNA sense strand
ucaagcgacuaacuaggaa

SEQ ID NO: 1521817 - RNA, 19 nt, Homo sapiens
  misc_RNA (1)...(19): siRNA sense strand
gaagcaauagaaauggaaa

SEQ ID NO: 1521818 - RNA, 19 nt, Homo sapiens
  misc_RNA (1)...(19): siRNA sense strand
uaaacucccaguauucuug

SEQ ID NO: 1521819 - RNA, 19 nt, Homo sapiens
  misc_RNA (1)...(19): siRNA sense strand
ccaguauucuugaccaaca

SEQ ID NO: 1521820 - RNA, 19 nt, Homo sapiens
  misc_RNA (1)...(19): siRNA sense strand
ccagaagaaagauuacuga

SEQ ID NO: 1521821 - RNA, 19 nt, Homo sapiens
  misc_RNA (1)...(19): siRNA sense strand
ugggagaucugcuguggau

SEQ ID NO: 1521822 - RNA, 19 nt, Homo sapiens
  misc_RNA (1)...(19): siRNA sense strand
cuaggaaacagguuaguau

SEQ ID NO: 1521823 - RNA, 19 nt, Homo sapiens
  misc_RNA (1)...(19): siRNA sense strand
cagcagaagcaauagaaau

SEQ ID NO: 1521824 - RNA, 19 nt, Homo sapiens
  misc_RNA (1)...(19): siRNA sense strand
uaauagggcauuggaaguu

SEQ ID NO: 1521825 - RNA, 19 nt, Homo sapiens
  misc_RNA (1)...(19): siRNA sense strand
gacccucuuuggacuaaau

SEQ ID NO: 1521826 - RNA, 19 nt, Homo sapiens
  misc_RNA (1)...(19): siRNA sense strand
gcagcagaagcaauagaaa

SEQ ID NO: 1521827 - RNA, 19 nt, Homo sapiens
  misc_RNA (1)...(19): siRNA sense strand
cucauuaucuucuuucucu

SEQ ID NO: 1521828 - RNA, 19 nt, Homo sapiens
  misc_RNA (1)...(19): siRNA sense strand
uagauucccagaagaaaga

SEQ ID NO: 1521829 - RNA, 19 nt, Homo sapiens
  misc_RNA (1)...(19): siRNA sense strand
cagauuacauaccauuugc

SEQ ID NO: 1521830 - RNA, 19 nt, Homo sapiens
  misc_RNA (1)...(19): siRNA sense strand
aggaaacagguuaguauuu

SEQ ID NO: 1521831 - RNA, 19 nt, Homo sapiens
  misc_RNA (1)...(19): siRNA sense strand
gcaacagauuacauaccau

SEQ ID NO: 1521832 - RNA, 19 nt, Homo sapiens
  misc_RNA (1)...(19): siRNA sense strand
gaaauggaaacugggagau

SEQ ID NO: 1521833 - RNA, 19 nt, Homo sapiens
  misc_RNA (1)...(19): siRNA sense strand
uaggcuagauucccagaag

SEQ ID NO: 1521834 - RNA, 19 nt, Homo sapiens
  misc_RNA (1)...(19): siRNA sense strand
uaggaaacagguuaguauu

SEQ ID NO: 1521835 - RNA, 19 nt, Homo sapiens
  misc_RNA (1)...(19): siRNA sense strand
gcagaagcaauagaaaugg

SEQ ID NO: 1521836 - RNA, 19 nt, Homo sapiens
  misc_RNA (1)...(19): siRNA sense strand
gcuagauucccagaagaaa

SEQ ID NO: 1521837 - RNA, 19 nt, Homo sapiens
  misc_RNA (1)...(19): siRNA sense strand
acagauuacauaccauuug

SEQ ID NO: 1521838 - RNA, 19 nt, Homo sapiens
  misc_RNA (1)...(19): siRNA sense strand
ugcaacagauuacauacca

SEQ ID NO: 1521839 - RNA, 19 nt, Homo sapiens
  misc_RNA (1)...(19): siRNA sense strand
ccaggcccauguucaguag

SEQ ID NO: 1521840 - RNA, 19 nt, Homo sapiens
  misc_RNA (1)...(19): siRNA sense strand
gcaauagaaauggaaacug

SEQ ID NO: 1521841 - RNA, 19 nt, Homo sapiens
  misc_RNA (1)...(19): siRNA sense strand
uacauaccauuugcucuau

SEQ ID NO: 1521842 - RNA, 19 nt, Homo sapiens
  misc_RNA (1)...(19): siRNA sense strand
cuucaaaggacucuuguag

SEQ ID NO: 1521843 - RNA, 19 nt, Homo sapiens
  misc_RNA (1)...(19): siRNA sense strand
cauuaucuucuuucucuga

SEQ ID NO: 1521844 - RNA, 19 nt, Homo sapiens
  misc_RNA (1)...(19): siRNA sense strand
cuacuaauagggcauugga

SEQ ID NO: 1521845 - RNA, 19 nt, Homo sapiens
  misc_RNA (1)...(19): siRNA sense strand
aauggaaacugggagaucu

SEQ ID NO: 1521846 - RNA, 19 nt, Homo sapiens
  misc_RNA (1)...(19): siRNA sense strand
gcgacuaacuaggaaacag

SEQ ID NO: 1521847 - RNA, 19 nt, Homo sapiens
  misc_RNA (1)...(19): siRNA sense strand
ccucuuuggacuaaauaaa

SEQ ID NO: 1521848 - RNA, 19 nt, Homo sapiens
  misc_RNA (1)...(19): siRNA sense strand
ggcuagauucccagaagaa

SEQ ID NO: 1521849 - RNA, 19 nt, Homo sapiens
  misc_RNA (1)...(19): siRNA sense strand
acauaccauuugcucuauu

SEQ ID NO: 1521850 - RNA, 19 nt, Homo sapiens
  misc_RNA (1)...(19): siRNA sense strand
aauagggcauuggaaguuc

SEQ ID NO: 1521851 - RNA, 19 nt, Homo sapiens
  misc_RNA (1)...(19): siRNA sense strand
aaacucccaguauucuuga

SEQ ID NO: 1521852 - RNA, 19 nt, Homo sapiens
  misc_RNA (1)...(19): siRNA sense strand
uauuuggcauccuuuccuu

SEQ ID NO: 1521853 - RNA, 19 nt, Homo sapiens
  misc_RNA (1)...(19): siRNA sense strand
gaacaacgccuauuccuaa

SEQ ID NO: 1521854 - RNA, 19 nt, Homo sapiens
  misc_RNA (1)...(19): siRNA sense strand
gaaacaagaucuucuagag

SEQ ID NO: 1521855 - RNA, 19 nt, Homo sapiens
  misc_RNA (1)...(19): siRNA sense strand
aaagagauguuacuucuga

SEQ ID NO: 1521856 - RNA, 19 nt, Homo sapiens
  misc_RNA (1)...(19): siRNA sense strand
gaagaggaauggaagacaa

SEQ ID NO: 1521857 - RNA, 19 nt, Homo sapiens
  misc_RNA (1)...(19): siRNA sense strand
ugacaaggauggcagaaga

SEQ ID NO: 1521858 - RNA, 19 nt, Homo sapiens
  misc_RNA (1)...(19): siRNA sense strand
gagaagagaggauagaaga

SEQ ID NO: 1521859 - RNA, 19 nt, Homo sapiens
  misc_RNA (1)...(19): siRNA sense strand
gaagaacaacagcauagaa

SEQ ID NO: 1521860 - RNA, 19 nt, Homo sapiens
  misc_RNA (1)...(19): siRNA sense strand
gaacaacagcauagaaaca

SEQ ID NO: 1521861 - RNA, 19 nt, Homo sapiens
  misc_RNA (1)...(19): siRNA sense strand
aggcauagauauuuggaua

SEQ ID NO: 1521862 - RNA, 19 nt, Homo sapiens
  misc_RNA (1)...(19): siRNA sense strand
gagaagagagugacaggaa

SEQ ID NO: 1521863 - RNA, 19 nt, Homo sapiens
  misc_RNA (1)...(19): siRNA sense strand
ccuaauggauagagaagaa

SEQ ID NO: 1521864 - RNA, 19 nt, Homo sapiens
  misc_RNA (1)...(19): siRNA sense strand
auacagaggucaagaugga

SEQ ID NO: 1521865 - RNA, 19 nt, Homo sapiens
  misc_RNA (1)...(19): siRNA sense strand
uggaacacauggugaauga

SEQ ID NO: 1521866 - RNA, 19 nt, Homo sapiens
  misc_RNA (1)...(19): siRNA sense strand
gcaagauacuggcuuuaac

SEQ ID NO: 1521867 - RNA, 19 nt, Homo sapiens
  misc_RNA (1)...(19): siRNA sense strand
uaacggagaagauauagga

SEQ ID NO: 1521868 - RNA, 19 nt, Homo sapiens
  misc_RNA (1)...(19): siRNA sense strand
gaagagagugacaggaaga

SEQ ID NO: 1521869 - RNA, 19 nt, Homo sapiens
  misc_RNA (1)...(19): siRNA sense strand
caacgccuauuccuaaugg

SEQ ID NO: 1521870 - RNA, 19 nt, Homo sapiens
  misc_RNA (1)...(19): siRNA sense strand
caaaagagauguuacuucu

SEQ ID NO: 1521871 - RNA, 19 nt, Homo sapiens
  misc_RNA (1)...(19): siRNA sense strand
aaacuuacucuucguagaa

SEQ ID NO: 1521872 - RNA, 19 nt, Homo sapiens
  misc_RNA (1)...(19): siRNA sense strand
gauggcagaagauguuaaa

SEQ ID NO: 1521873 - RNA, 19 nt, Homo sapiens
  misc_RNA (1)...(19): siRNA sense strand
ggcagaagauguuaaaaga

SEQ ID NO: 1521874 - RNA, 19 nt, Homo sapiens
  misc_RNA (1)...(19): siRNA sense strand
cagaagauguuaaaagaga

SEQ ID NO: 1521875 - RNA, 19 nt, Homo sapiens
  misc_RNA (1)...(19): siRNA sense strand
gaagagaggauagaagaac

SEQ ID NO: 1521876 - RNA, 19 nt, Homo sapiens
  misc_RNA (1)...(19): siRNA sense strand
gaaacagagaagagaguga

SEQ ID NO: 1521877 - RNA, 19 nt, Homo sapiens
  misc_RNA (1)...(19): siRNA sense strand
gauagaagaacaacagcau

SEQ ID NO: 1521878 - RNA, 19 nt, Homo sapiens
  misc_RNA (1)...(19): siRNA sense strand
aaacaagaucuucuagaga

SEQ ID NO: 1521879 - RNA, 19 nt, Homo sapiens
  misc_RNA (1)...(19): siRNA sense strand
gaagacaaaagagauguua

SEQ ID NO: 1521880 - RNA, 19 nt, Homo sapiens
  misc_RNA (1)...(19): siRNA sense strand
aagaacaacagcauagaaa

SEQ ID NO: 1521881 - RNA, 19 nt, Homo sapiens
  misc_RNA (1)...(19): siRNA sense strand
gcagaagaacaacgccuau

SEQ ID NO: 1521882 - RNA, 19 nt, Homo sapiens
  misc_RNA (1)...(19): siRNA sense strand
gaggauagaagaacaacag

SEQ ID NO: 1521883 - RNA, 19 nt, Homo sapiens
  misc_RNA (1)...(19): siRNA sense strand
aaugcaagauacuggcuuu

SEQ ID NO: 1521884 - RNA, 19 nt, Homo sapiens
  misc_RNA (1)...(19): siRNA sense strand
gcauagaaacagagaagag

SEQ ID NO: 1521885 - RNA, 19 nt, Homo sapiens
  misc_RNA (1)...(19): siRNA sense strand
gaagaacaacgccuauucc

SEQ ID NO: 1521886 - RNA, 19 nt, Homo sapiens
  misc_RNA (1)...(19): siRNA sense strand
uaaauacagaggucaagau

SEQ ID NO: 1521887 - RNA, 19 nt, Homo sapiens
  misc_RNA (1)...(19): siRNA sense strand
agaagaacaacgccuauuc

SEQ ID NO: 1521888 - RNA, 19 nt, Homo sapiens
  misc_RNA (1)...(19): siRNA sense strand
aaauagaagaggaauggaa

SEQ ID NO: 1521889 - RNA, 19 nt, Homo sapiens
  misc_RNA (1)...(19): siRNA sense strand
uagaagaacaacagcauag

SEQ ID NO: 1521890 - RNA, 19 nt, Homo sapiens
  misc_RNA (1)...(19): siRNA sense strand
uaaaagagaagagaggaua

SEQ ID NO: 1521891 - RNA, 19 nt, Homo sapiens
  misc_RNA (1)...(19): siRNA sense strand
cauagaaacagagaagaga

SEQ ID NO: 1521892 - RNA, 19 nt, Homo sapiens
  misc_RNA (1)...(19): siRNA sense strand
guagaaaacuagaacaacu

SEQ ID NO: 1521893 - RNA, 19 nt, Homo sapiens
  misc_RNA (1)...(19): siRNA sense strand
agaacaacgccuauuccua

SEQ ID NO: 1521894 - RNA, 19 nt, Homo sapiens
  misc_RNA (1)...(19): siRNA sense strand
gagauguuacuucugacaa

SEQ ID NO: 1521895 - RNA, 19 nt, Homo sapiens
  misc_RNA (1)...(19): siRNA sense strand
cggagaagauauaggaaaa

SEQ ID NO: 1521896 - RNA, 19 nt, Homo sapiens
  misc_RNA (1)...(19): siRNA sense strand
acaacagcauagaaacaga

SEQ ID NO: 1521897 - RNA, 19 nt, Homo sapiens
  misc_RNA (1)...(19): siRNA sense strand
aagagaggauagaagaaca

SEQ ID NO: 1521898 - RNA, 19 nt, Homo sapiens
  misc_RNA (1)...(19): siRNA sense strand
ugaacgcacagcagaagaa

SEQ ID NO: 1521899 - RNA, 19 nt, Homo sapiens
  misc_RNA (1)...(19): siRNA sense strand
aaauacagaggucaagaug

SEQ ID NO: 1521900 - RNA, 19 nt, Homo sapiens
  misc_RNA (1)...(19): siRNA sense strand
gggaacacacaagaagaaa

SEQ ID NO: 1521901 - RNA, 19 nt, Homo sapiens
  misc_RNA (1)...(19): siRNA sense strand
cagcauagaaacagagaag

SEQ ID NO: 1521902 - RNA, 19 nt, Homo sapiens
  misc_RNA (1)...(19): siRNA sense strand
cgggaacacacaagaagaa

SEQ ID NO: 1521903 - RNA, 19 nt, Homo sapiens
  misc_RNA (1)...(19): siRNA sense strand
aaggauggcagaagauguu

SEQ ID NO: 1521904 - RNA, 19 nt, Homo sapiens
  misc_RNA (1)...(19): siRNA sense strand
gagagugacaggaagaaac

SEQ ID NO: 1521905 - RNA, 19 nt, Homo sapiens
  misc_RNA (1)...(19): siRNA sense strand
cagaagaacaacgccuauu

SEQ ID NO: 1521906 - RNA, 19 nt, Homo sapiens
  misc_RNA (1)...(19): siRNA sense strand
ggucaagauggaacacaug

SEQ ID NO: 1521907 - RNA, 19 nt, Homo sapiens
  misc_RNA (1)...(19): siRNA sense strand
acgcacagcagaagaacaa

SEQ ID NO: 1521908 - RNA, 19 nt, Homo sapiens
  misc_RNA (1)...(19): siRNA sense strand
ggcuuuaacggagaagaua

SEQ ID NO: 1521909 - RNA, 19 nt, Homo sapiens
  misc_RNA (1)...(19): siRNA sense strand
ugcaagauacuggcuuuaa

SEQ ID NO: 1521910 - RNA, 19 nt, Homo sapiens
  misc_RNA (1)...(19): siRNA sense strand
aaagagaagagaggauaga

SEQ ID NO: 1521911 - RNA, 19 nt, Homo sapiens
  misc_RNA (1)...(19): siRNA sense strand
ggauggcagaagauguuaa

SEQ ID NO: 1521912 - RNA, 19 nt, Homo sapiens
  misc_RNA (1)...(19): siRNA sense strand
gaacacacaagaagaaaac

SEQ ID NO: 1521913 - RNA, 19 nt, Homo sapiens
  misc_RNA (1)...(19): siRNA sense strand
gcgggaacacacaagaaga

SEQ ID NO: 1521914 - RNA, 19 nt, Homo sapiens
  misc_RNA (1)...(19): siRNA sense strand
cgacagcgggaacacacaa

SEQ ID NO: 1521915 - RNA, 19 nt, Homo sapiens
  misc_RNA (1)...(19): siRNA sense strand
auagaagaacaacagcaua

SEQ ID NO: 1521916 - RNA, 19 nt, Homo sapiens
  misc_RNA (1)...(19): siRNA sense strand
cuuuaacggagaagauaua

SEQ ID NO: 1521917 - RNA, 19 nt, Homo sapiens
  misc_RNA (1)...(19): siRNA sense strand
cgccuauuccuaauggaua

SEQ ID NO: 1521918 - RNA, 19 nt, Homo sapiens
  misc_RNA (1)...(19): siRNA sense strand
caagauacuggcuuuaacg

SEQ ID NO: 1521919 - RNA, 19 nt, Homo sapiens
  misc_RNA (1)...(19): siRNA sense strand
ugacaggaagaaacaagau

SEQ ID NO: 1521920 - RNA, 19 nt, Homo sapiens
  misc_RNA (1)...(19): siRNA sense strand
cagcgggaacacacaagaa

SEQ ID NO: 1521921 - RNA, 19 nt, Homo sapiens
  misc_RNA (1)...(19): siRNA sense strand
caaggauggcagaagaugu

SEQ ID NO: 1521922 - RNA, 19 nt, Homo sapiens
  misc_RNA (1)...(19): siRNA sense strand
gaauggaagacaaaagaga

SEQ ID NO: 1521923 - RNA, 19 nt, Homo sapiens
  misc_RNA (1)...(19): siRNA sense strand
cacacaagaagaaaacuua

SEQ ID NO: 1521924 - RNA, 19 nt, Homo sapiens
  misc_RNA (1)...(19): siRNA sense strand
aagaggaauggaagacaaa

SEQ ID NO: 1521925 - RNA, 19 nt, Homo sapiens
  misc_RNA (1)...(19): siRNA sense strand
agauguuacuucugacaag

SEQ ID NO: 1521926 - RNA, 19 nt, Homo sapiens
  misc_RNA (1)...(19): siRNA sense strand
gaaaucagcucgagacaug

SEQ ID NO: 1521927 - RNA, 19 nt, Homo sapiens
  misc_RNA (1)...(19): siRNA sense strand
agaaaucgcuuguguuuga

SEQ ID NO: 1521928 - RNA, 19 nt, Homo sapiens
  misc_RNA (1)...(19): siRNA sense strand
gcagaaaucgcuuguguuu

SEQ ID NO: 1521929 - RNA, 19 nt, Homo sapiens
  misc_RNA (1)...(19): siRNA sense strand
gugaagaguuuguaccauu

SEQ ID NO: 1521930 - RNA, 19 nt, Homo sapiens
  misc_RNA (1)...(19): siRNA sense strand
aggcagagguucagaugua

SEQ ID NO: 1521931 - RNA, 19 nt, Homo sapiens
  misc_RNA (1)...(19): siRNA sense strand
gacgaggucuucaugauca

SEQ ID NO: 1521932 - RNA, 19 nt, Homo sapiens
  misc_RNA (1)...(19): siRNA sense strand
ggacugggaccucaucuau

SEQ ID NO: 1521933 - RNA, 19 nt, Homo sapiens
  misc_RNA (1)...(19): siRNA sense strand
gcgcacaccugccuacauc

SEQ ID NO: 1521934 - RNA, 19 nt, Homo sapiens
  misc_RNA (1)...(19): siRNA sense strand
gacuacaccugguccuuug

SEQ ID NO: 1521935 - RNA, 19 nt, Homo sapiens
  misc_RNA (1)...(19): siRNA sense strand
ggaggaguacggauucuug

SEQ ID NO: 1521936 - RNA, 19 nt, Homo sapiens
  misc_RNA (1)...(19): siRNA sense strand
gaacaaugagcacgucaag

SEQ ID NO: 1521937 - RNA, 19 nt, Homo sapiens
  misc_RNA (1)...(19): siRNA sense strand
ugaagaguuuguaccauuc

SEQ ID NO: 1521938 - RNA, 19 nt, Homo sapiens
  misc_RNA (1)...(19): siRNA sense strand
cgagacaugugggcugauu

SEQ ID NO: 1521939 - RNA, 19 nt, Homo sapiens
  misc_RNA (1)...(19): siRNA sense strand
caagacaccggacaagaug

SEQ ID NO: 1521940 - RNA, 19 nt, Homo sapiens
  misc_RNA (1)...(19): siRNA sense strand
ggacgaggaaggcccgaaa

SEQ ID NO: 1521941 - RNA, 19 nt, Homo sapiens
  misc_RNA (1)...(19): siRNA sense strand
caagagacgucugaugaac

SEQ ID NO: 1521942 - RNA, 19 nt, Homo sapiens
  misc_RNA (1)...(19): siRNA sense strand
cugcagaaaucgcuugugu

SEQ ID NO: 1521943 - RNA, 19 nt, Homo sapiens
  misc_RNA (1)...(19): siRNA sense strand
gaaacacuggucugacuca

SEQ ID NO: 1521944 - RNA, 19 nt, Homo sapiens
  misc_RNA (1)...(19): siRNA sense strand
acugggaccucaucuaugu

SEQ ID NO: 1521945 - RNA, 19 nt, Homo sapiens
  misc_RNA (1)...(19): siRNA sense strand
ccaagacaccggacaagau

SEQ ID NO: 1521946 - RNA, 19 nt, Homo sapiens
  misc_RNA (1)...(19): siRNA sense strand
gcacucgaccuuccugauc

SEQ ID NO: 1521947 - RNA, 19 nt, Homo sapiens
  misc_RNA (1)...(19): siRNA sense strand
cugauuacauccuguuugu

SEQ ID NO: 1521948 - RNA, 19 nt, Homo sapiens
  misc_RNA (1)...(19): siRNA sense strand
caaccugcaugccuucucu

SEQ ID NO: 1521949 - RNA, 19 nt, Homo sapiens
  misc_RNA (1)...(19): siRNA sense strand
gcaggcagagguucagaug

SEQ ID NO: 1521950 - RNA, 19 nt, Homo sapiens
  misc_RNA (1)...(19): siRNA sense strand
acagcacccuccaggauga

SEQ ID NO: 1521951 - RNA, 19 nt, Homo sapiens
  misc_RNA (1)...(19): siRNA sense strand
gaggaaggcccgaaacacu

SEQ ID NO: 1521952 - RNA, 19 nt, Homo sapiens
  misc_RNA (1)...(19): siRNA sense strand
ccacagcacccuccaggau

SEQ ID NO: 1521953 - RNA, 19 nt, Homo sapiens
  misc_RNA (1)...(19): siRNA sense strand
gcaagcaggcagagguuca

SEQ ID NO: 1521954 - RNA, 19 nt, Homo sapiens
  misc_RNA (1)...(19): siRNA sense strand
caacuucugguguggaaug

SEQ ID NO: 1521955 - RNA, 19 nt, Homo sapiens
  misc_RNA (1)...(19): siRNA sense strand
gagacaugugggcugauua

SEQ ID NO: 1521956 - RNA, 19 nt, Homo sapiens
  misc_RNA (1)...(19): siRNA sense strand
ucaagagacgucugaugaa

SEQ ID NO: 1521957 - RNA, 19 nt, Homo sapiens
  misc_RNA (1)...(19): siRNA sense strand
ccgaaacacuggucugacu

SEQ ID NO: 1521958 - RNA, 19 nt, Homo sapiens
  misc_RNA (1)...(19): siRNA sense strand
caaggaggaguacggauuc

SEQ ID NO: 1521959 - RNA, 19 nt, Homo sapiens
  misc_RNA (1)...(19): siRNA sense strand
ugacuacaccugguccuuu

SEQ ID NO: 1521960 - RNA, 19 nt, Homo sapiens
  misc_RNA (1)...(19): siRNA sense strand
ucagucguauggaacaaug

SEQ ID NO: 1521961 - RNA, 19 nt, Homo sapiens
  misc_RNA (1)...(19): siRNA sense strand
agaccucagucguauggaa

SEQ ID NO: 1521962 - RNA, 19 nt, Homo sapiens
  misc_RNA (1)...(19): siRNA sense strand
acaaggaggaguacggauu

SEQ ID NO: 1521963 - RNA, 19 nt, Homo sapiens
  misc_RNA (1)...(19): siRNA sense strand
cggacaaccugauccucaa

SEQ ID NO: 1521964 - RNA, 19 nt, Homo sapiens
  misc_RNA (1)...(19): siRNA sense strand
caccgagaccucagucgua

SEQ ID NO: 1521965 - RNA, 19 nt, Homo sapiens
  misc_RNA (1)...(19): siRNA sense strand
ggcagagguucagauguau

SEQ ID NO: 1521966 - RNA, 19 nt, Homo sapiens
  misc_RNA (1)...(19): siRNA sense strand
gaaaucgcuuguguuugag

SEQ ID NO: 1521967 - RNA, 19 nt, Homo sapiens
  misc_RNA (1)...(19): siRNA sense strand
cacaggagacgauggcuau

SEQ ID NO: 1521968 - RNA, 19 nt, Homo sapiens
  misc_RNA (1)...(19): siRNA sense strand
ggaacaaugagcacgucaa

SEQ ID NO: 1521969 - RNA, 19 nt, Homo sapiens
  misc_RNA (1)...(19): siRNA sense strand
ggagacgauggcuauguga

SEQ ID NO: 1521970 - RNA, 19 nt, Homo sapiens
  misc_RNA (1)...(19): siRNA sense strand
ucgacgaggucuucaugau

SEQ ID NO: 1521971 - RNA, 19 nt, Homo sapiens
  misc_RNA (1)...(19): siRNA sense strand
gaccacaacauggauaaca

SEQ ID NO: 1521972 - RNA, 19 nt, Homo sapiens
  misc_RNA (1)...(19): siRNA sense strand
cuacggaccacaacaugga

SEQ ID NO: 1521973 - RNA, 19 nt, Homo sapiens
  misc_RNA (1)...(19): siRNA sense strand
uucaagagacgucugauga

SEQ ID NO: 1521974 - RNA, 19 nt, Homo sapiens
  misc_RNA (1)...(19): siRNA sense strand
acaaugagcacgucaagac

SEQ ID NO: 1521975 - RNA, 19 nt, Homo sapiens
  misc_RNA (1)...(19): siRNA sense strand
gcugauuacauccuguuug

SEQ ID NO: 1521976 - RNA, 19 nt, Homo sapiens
  misc_RNA (1)...(19): siRNA sense strand
cgacgaggucuucaugauc

SEQ ID NO: 1521977 - RNA, 19 nt, Homo sapiens
  misc_RNA (1)...(19): siRNA sense strand
agauguaugugugcaacaa

SEQ ID NO: 1521978 - RNA, 19 nt, Homo sapiens
  misc_RNA (1)...(19): siRNA sense strand
gcagagguucagauguaug

SEQ ID NO: 1521979 - RNA, 19 nt, Homo sapiens
  misc_RNA (1)...(19): siRNA sense strand
gacccuggccuacgugauc

SEQ ID NO: 1521980 - RNA, 19 nt, Homo sapiens
  misc_RNA (1)...(19): siRNA sense strand
gaggaugaccugcguuuug

SEQ ID NO: 1521981 - RNA, 19 nt, Homo sapiens
  misc_RNA (1)...(19): siRNA sense strand
ugacuucccagggcuacua

SEQ ID NO: 1521982 - RNA, 19 nt, Homo sapiens
  misc_RNA (1)...(19): siRNA sense strand
gagguucagauguaugugu

SEQ ID NO: 1521983 - RNA, 19 nt, Homo sapiens
  misc_RNA (1)...(19): siRNA sense strand
gcccgaaacacuggucuga

SEQ ID NO: 1521984 - RNA, 19 nt, Homo sapiens
  misc_RNA (1)...(19): siRNA sense strand
gcgccaagucccagaagau

SEQ ID NO: 1521985 - RNA, 19 nt, Homo sapiens
  misc_RNA (1)...(19): siRNA sense strand
aggagacgauggcuaugug

SEQ ID NO: 1521986 - RNA, 19 nt, Homo sapiens
  misc_RNA (1)...(19): siRNA sense strand
ccaccaagacaccggacaa

SEQ ID NO: 1521987 - RNA, 19 nt, Homo sapiens
  misc_RNA (1)...(19): siRNA sense strand
cagagguucagauguaugu

SEQ ID NO: 1521988 - RNA, 19 nt, Homo sapiens
  misc_RNA (1)...(19): siRNA sense strand
ugguggccgugaagaguuu

SEQ ID NO: 1521989 - RNA, 19 nt, Homo sapiens
  misc_RNA (1)...(19): siRNA sense strand
ccgagagcuucaugcaugu

SEQ ID NO: 1521990 - RNA, 19 nt, Homo sapiens
  misc_RNA (1)...(19): siRNA sense strand
uggauaacacgucaacugu

SEQ ID NO: 1521991 - RNA, 19 nt, Homo sapiens
  misc_RNA (1)...(19): siRNA sense strand
gauccucaacccugacaca

SEQ ID NO: 1521992 - RNA, 19 nt, Homo sapiens
  misc_RNA (1)...(19): siRNA sense strand
gaugaggccgagagcuuca

SEQ ID NO: 1521993 - RNA, 19 nt, Homo sapiens
  misc_RNA (1)...(19): siRNA sense strand
gggcuucgacgaggucuuc

SEQ ID NO: 1521994 - RNA, 19 nt, Homo sapiens
  misc_RNA (1)...(19): siRNA sense strand
cgagaccucagucguaugg

SEQ ID NO: 1521995 - RNA, 19 nt, Homo sapiens
  misc_RNA (1)...(19): siRNA sense strand
ggacggcaaagccaugaac

SEQ ID NO: 1521996 - RNA, 19 nt, Homo sapiens
  misc_RNA (1)...(19): siRNA sense strand
caacgcagcucaugccaua

SEQ ID NO: 1521997 - RNA, 19 nt, Homo sapiens
  misc_RNA (1)...(19): siRNA sense strand
gcagaaauauucaaagaga

SEQ ID NO: 1521998 - RNA, 19 nt, Homo sapiens
  misc_RNA (1)...(19): siRNA sense strand
cagcagaaauauucaaaga

SEQ ID NO: 1521999 - RNA, 19 nt, Homo sapiens
  misc_RNA (1)...(19): siRNA sense strand
guacucugcucacuuguug

SEQ ID NO: 1522000 - RNA, 19 nt, Homo sapiens
  misc_RNA (1)...(19): siRNA sense strand
gaaaauaucagcagaaugu

SEQ ID NO: 1522001 - RNA, 19 nt, Homo sapiens
  misc_RNA (1)...(19): siRNA sense strand
cuacagccauuccgcauug

SEQ ID NO: 1522002 - RNA, 19 nt, Homo sapiens
  misc_RNA (1)...(19): siRNA sense strand
gggaauauaucuguaugau

SEQ ID NO: 1522003 - RNA, 19 nt, Homo sapiens
  misc_RNA (1)...(19): siRNA sense strand
cgacaagaauccagggaau

SEQ ID NO: 1522004 - RNA, 19 nt, Homo sapiens
  misc_RNA (1)...(19): siRNA sense strand
ucaagcagcagaaauauuc

SEQ ID NO: 1522005 - RNA, 19 nt, Homo sapiens
  misc_RNA (1)...(19): siRNA sense strand
gguaucaucccgacaagaa

SEQ ID NO: 1522006 - RNA, 19 nt, Homo sapiens
  misc_RNA (1)...(19): siRNA sense strand
gaagaaggcgucagauacu

SEQ ID NO: 1522007 - RNA, 19 nt, Homo sapiens
  misc_RNA (1)...(19): siRNA sense strand
gaaaauagcgaagaugauu

SEQ ID NO: 1522008 - RNA, 19 nt, Homo sapiens
  misc_RNA (1)...(19): siRNA sense strand
gaaacuggccuugcgguau

SEQ ID NO: 1522009 - RNA, 19 nt, Homo sapiens
  misc_RNA (1)...(19): siRNA sense strand
gugaagaaggcgucagaua

SEQ ID NO: 1522010 - RNA, 19 nt, Homo sapiens
  misc_RNA (1)...(19): siRNA sense strand
cuaagaagcggaaaauuua

SEQ ID NO: 1522011 - RNA, 19 nt, Homo sapiens
  misc_RNA (1)...(19): siRNA sense strand
aaagugagaugagccucua

SEQ ID NO: 1522012 - RNA, 19 nt, Homo sapiens
  misc_RNA (1)...(19): siRNA sense strand
cgaccagcauggcucauug

SEQ ID NO: 1522013 - RNA, 19 nt, Homo sapiens
  misc_RNA (1)...(19): siRNA sense strand
ggucaggagccaaauguga

SEQ ID NO: 1522014 - RNA, 19 nt, Homo sapiens
  misc_RNA (1)...(19): siRNA sense strand
gaaggcgucagauacuauu

SEQ ID NO: 1522015 - RNA, 19 nt, Homo sapiens
  misc_RNA (1)...(19): siRNA sense strand
aaacuggccuugcgguauc

SEQ ID NO: 1522016 - RNA, 19 nt, Homo sapiens
  misc_RNA (1)...(19): siRNA sense strand
uguguacucugcucacuug

SEQ ID NO: 1522017 - RNA, 19 nt, Homo sapiens
  misc_RNA (1)...(19): siRNA sense strand
aagaaggcgucagauacua

SEQ ID NO: 1522018 - RNA, 19 nt, Homo sapiens
  misc_RNA (1)...(19): siRNA sense strand
gagaaaauaucagcagaau

SEQ ID NO: 1522019 - RNA, 19 nt, Homo sapiens
  misc_RNA (1)...(19): siRNA sense strand
augcagugcuggaucuuaa

SEQ ID NO: 1522020 - RNA, 19 nt, Homo sapiens
  misc_RNA (1)...(19): siRNA sense strand
gcauggcucauugggaaua

SEQ ID NO: 1522021 - RNA, 19 nt, Homo sapiens
  misc_RNA (1)...(19): siRNA sense strand
gaauaguuguugguucaag

SEQ ID NO: 1522022 - RNA, 19 nt, Homo sapiens
  misc_RNA (1)...(19): siRNA sense strand
ugaagaaggcgucagauac

SEQ ID NO: 1522023 - RNA, 19 nt, Homo sapiens
  misc_RNA (1)...(19): siRNA sense strand
auacugagcgacucuaaga

SEQ ID NO: 1522024 - RNA, 19 nt, Homo sapiens
  misc_RNA (1)...(19): siRNA sense strand
ggaauauaucuguaugauc

SEQ ID NO: 1522025 - RNA, 19 nt, Homo sapiens
  misc_RNA (1)...(19): siRNA sense strand
ggcgucagauacuauuuua

SEQ ID NO: 1522026 - RNA, 19 nt, Homo sapiens
  misc_RNA (1)...(19): siRNA sense strand
gcagugcuggaucuuaaga

SEQ ID NO: 1522027 - RNA, 19 nt, Homo sapiens
  misc_RNA (1)...(19): siRNA sense strand
gcucaagcagcagaaauau

SEQ ID NO: 1522028 - RNA, 19 nt, Homo sapiens
  misc_RNA (1)...(19): siRNA sense strand
cauugggaauauaucugua

SEQ ID NO: 1522029 - RNA, 19 nt, Homo sapiens
  misc_RNA (1)...(19): siRNA sense strand
aauaguuguugguucaaga

SEQ ID NO: 1522030 - RNA, 19 nt, Homo sapiens
  misc_RNA (1)...(19): siRNA sense strand
gcacaccggcuguccaaaa

SEQ ID NO: 1522031 - RNA, 19 nt, Homo sapiens
  misc_RNA (1)...(19): siRNA sense strand
gagaucaacgcagcucaug

SEQ ID NO: 1522032 - RNA, 19 nt, Homo sapiens
  misc_RNA (1)...(19): siRNA sense strand
ucuaagaagcggaaaauuu

SEQ ID NO: 1522033 - RNA, 19 nt, Homo sapiens
  misc_RNA (1)...(19): siRNA sense strand
gaguaucaccuggguagga

SEQ ID NO: 1522034 - RNA, 19 nt, Homo sapiens
  misc_RNA (1)...(19): siRNA sense strand
gacaagaauccagggaaug

SEQ ID NO: 1522035 - RNA, 19 nt, Homo sapiens
  misc_RNA (1)...(19): siRNA sense strand
agcagaauguccagaguca

SEQ ID NO: 1522036 - RNA, 19 nt, Homo sapiens
  misc_RNA (1)...(19): siRNA sense strand
aguaucaccuggguaggaa

SEQ ID NO: 1522037 - RNA, 19 nt, Homo sapiens
  misc_RNA (1)...(19): siRNA sense strand
ucaggagccaaaugugauu

SEQ ID NO: 1522038 - RNA, 19 nt, Homo sapiens
  misc_RNA (1)...(19): siRNA sense strand
gcagcucaugccauacuga

SEQ ID NO: 1522039 - RNA, 19 nt, Homo sapiens
  misc_RNA (1)...(19): siRNA sense strand
caaggucaggagccaaaug

SEQ ID NO: 1522040 - RNA, 19 nt, Homo sapiens
  misc_RNA (1)...(19): siRNA sense strand
gcgccucaccugaagacuu

SEQ ID NO: 1522041 - RNA, 19 nt, Homo sapiens
  misc_RNA (1)...(19): siRNA sense strand
gcagcagaaauauucaaag

SEQ ID NO: 1522042 - RNA, 19 nt, Homo sapiens
  misc_RNA (1)...(19): siRNA sense strand
ucagcagaauguccagagu

SEQ ID NO: 1522043 - RNA, 19 nt, Homo sapiens
  misc_RNA (1)...(19): siRNA sense strand
ggagaaaauaucagcagaa

SEQ ID NO: 1522044 - RNA, 19 nt, Homo sapiens
  misc_RNA (1)...(19): siRNA sense strand
gcucauugggaauauaucu

SEQ ID NO: 1522045 - RNA, 19 nt, Homo sapiens
  misc_RNA (1)...(19): siRNA sense strand
ccauacugagcgacucuaa

SEQ ID NO: 1522046 - RNA, 19 nt, Homo sapiens
  misc_RNA (1)...(19): siRNA sense strand
agaaggcgucagauacuau

SEQ ID NO: 1522047 - RNA, 19 nt, Homo sapiens
  misc_RNA (1)...(19): siRNA sense strand
gagaagagcuggcauguua

SEQ ID NO: 1522048 - RNA, 19 nt, Homo sapiens
  misc_RNA (1)...(19): siRNA sense strand
caacaucccugccaucaaa

SEQ ID NO: 1522049 - RNA, 19 nt, Homo sapiens
  misc_RNA (1)...(19): siRNA sense strand
ccacauacauuuccuguca

SEQ ID NO: 1522050 - RNA, 19 nt, Homo sapiens
  misc_RNA (1)...(19): siRNA sense strand
gaaggugccugcccugaga

SEQ ID NO: 1522051 - RNA, 19 nt, Homo sapiens
  misc_RNA (1)...(19): siRNA sense strand
gaaagcgcauuguguuuua

SEQ ID NO: 1522052 - RNA, 19 nt, Homo sapiens
  misc_RNA (1)...(19): siRNA sense strand
agagauaccuugucuguca

SEQ ID NO: 1522053 - RNA, 19 nt, Homo sapiens
  misc_RNA (1)...(19): siRNA sense strand
gaauauccaugccaacauc

SEQ ID NO: 1522054 - RNA, 19 nt, Homo sapiens
  misc_RNA (1)...(19): siRNA sense strand
caagaaagcgcauuguguu

SEQ ID NO: 1522055 - RNA, 19 nt, Homo sapiens
  misc_RNA (1)...(19): siRNA sense strand
uuucaggguuccaauguua

SEQ ID NO: 1522056 - RNA, 19 nt, Homo sapiens
  misc_RNA (1)...(19): siRNA sense strand
ccaucaaacucaauccauu

SEQ ID NO: 1522057 - RNA, 19 nt, Homo sapiens
  misc_RNA (1)...(19): siRNA sense strand
caucaaacucaauccauuu

SEQ ID NO: 1522058 - RNA, 19 nt, Homo sapiens
  misc_RNA (1)...(19): siRNA sense strand
ugaaagggcugccaaucac

SEQ ID NO: 1522059 - RNA, 19 nt, Homo sapiens
  misc_RNA (1)...(19): siRNA sense strand
ucacuuauccuccuuuguc

SEQ ID NO: 1522060 - RNA, 19 nt, Homo sapiens
  misc_RNA (1)...(19): siRNA sense strand
ucaagaaagcgcauugugu

SEQ ID NO: 1522061 - RNA, 19 nt, Homo sapiens
  misc_RNA (1)...(19): siRNA sense strand
ucaccagccuccaacuuca

SEQ ID NO: 1522062 - RNA, 19 nt, Homo sapiens
  misc_RNA (1)...(19): siRNA sense strand
cuucagagauaccuugucu

SEQ ID NO: 1522063 - RNA, 19 nt, Homo sapiens
  misc_RNA (1)...(19): siRNA sense strand
gaaauuuugcucuggagua

SEQ ID NO: 1522064 - RNA, 19 nt, Homo sapiens
  misc_RNA (1)...(19): siRNA sense strand
ggaauauccaugccaacau

SEQ ID NO: 1522065 - RNA, 19 nt, Homo sapiens
  misc_RNA (1)...(19): siRNA sense strand
gacccaagguaaaaugaaa

SEQ ID NO: 1522066 - RNA, 19 nt, Homo sapiens
  misc_RNA (1)...(19): siRNA sense strand
aagaaagcgcauuguguuu

SEQ ID NO: 1522067 - RNA, 19 nt, Homo sapiens
  misc_RNA (1)...(19): siRNA sense strand
uuaccucccacauacauuu

SEQ ID NO: 1522068 - RNA, 19 nt, Homo sapiens
  misc_RNA (1)...(19): siRNA sense strand
acauacauuuccugucauc

SEQ ID NO: 1522069 - RNA, 19 nt, Homo sapiens
  misc_RNA (1)...(19): siRNA sense strand
gccaacaucccugccauca

SEQ ID NO: 1522070 - RNA, 19 nt, Homo sapiens
  misc_RNA (1)...(19): siRNA sense strand
ucaggguuccaauguuauu

SEQ ID NO: 1522071 - RNA, 19 nt, Homo sapiens
  misc_RNA (1)...(19): siRNA sense strand
gaaagggcugccaaucacu

SEQ ID NO: 1522072 - RNA, 19 nt, Homo sapiens
  misc_RNA (1)...(19): siRNA sense strand
caaacucaauccauuuucu

SEQ ID NO: 1522073 - RNA, 19 nt, Homo sapiens
  misc_RNA (1)...(19): siRNA sense strand
ugacaucacugaaggcaaa

SEQ ID NO: 1522074 - RNA, 19 nt, Homo sapiens
  misc_RNA (1)...(19): siRNA sense strand
ccaaggcuauuaccagaag

SEQ ID NO: 1522075 - RNA, 19 nt, Homo sapiens
  misc_RNA (1)...(19): siRNA sense strand
gcucaagggcuuccucuuc

SEQ ID NO: 1522076 - RNA, 19 nt, Homo sapiens
  misc_RNA (1)...(19): siRNA sense strand
ggacgucuggguucugcua

SEQ ID NO: 1522077 - RNA, 19 nt, Homo sapiens
  misc_RNA (1)...(19): siRNA sense strand
gcagcagcauccagaccuu

SEQ ID NO: 1522078 - RNA, 19 nt, Homo sapiens
  misc_RNA (1)...(19): siRNA sense strand
caaccguguucuacugugu

SEQ ID NO: 1522079 - RNA, 19 nt, Homo sapiens
  misc_RNA (1)...(19): siRNA sense strand
ucacugaaggcaaagagaa

SEQ ID NO: 1522080 - RNA, 19 nt, Homo sapiens
  misc_RNA (1)...(19): siRNA sense strand
agucuucgaugucauaaag

SEQ ID NO: 1522081 - RNA, 19 nt, Homo sapiens
  misc_RNA (1)...(19): siRNA sense strand
caagggcuuccucuucaaa

SEQ ID NO: 1522082 - RNA, 19 nt, Homo sapiens
  misc_RNA (1)...(19): siRNA sense strand
cucaagggcuuccucuuca

SEQ ID NO: 1522083 - RNA, 19 nt, Homo sapiens
  misc_RNA (1)...(19): siRNA sense strand
ucaagggcuuccucuucaa

SEQ ID NO: 1522084 - RNA, 19 nt, Homo sapiens
  misc_RNA (1)...(19): siRNA sense strand
ucaccagcaucuucaccaa

SEQ ID NO: 1522085 - RNA, 19 nt, Homo sapiens
  misc_RNA (1)...(19): siRNA sense strand
ggaucuacccgcagcaagu

SEQ ID NO: 1522086 - RNA, 19 nt, Homo sapiens
  misc_RNA (1)...(19): siRNA sense strand
uacgaggacuucuggaucu

SEQ ID NO: 1522087 - RNA, 19 nt, Homo sapiens
  misc_RNA (1)...(19): siRNA sense strand
gcaggcuggucuugcacau

SEQ ID NO: 1522088 - RNA, 19 nt, Homo sapiens
  misc_RNA (1)...(19): siRNA sense strand
uggcaaggguggcguuguc

SEQ ID NO: 1522089 - RNA, 19 nt, Homo sapiens
  misc_RNA (1)...(19): siRNA sense strand
gaucuacccgcagcaagug

SEQ ID NO: 1522090 - RNA, 19 nt, Homo sapiens
  misc_RNA (1)...(19): siRNA sense strand
ggagcgccaacgccacaaa

SEQ ID NO: 1522091 - RNA, 19 nt, Homo sapiens
  misc_RNA (1)...(19): siRNA sense strand
cgccaaccguguucuacug

SEQ ID NO: 1522092 - RNA, 19 nt, Homo sapiens
  misc_RNA (1)...(19): siRNA sense strand
gcccuguggccacuaaaga

SEQ ID NO: 1522093 - RNA, 19 nt, Homo sapiens
  misc_RNA (1)...(19): siRNA sense strand
ggaucuggguguccaugac

SEQ ID NO: 1522094 - RNA, 19 nt, Homo sapiens
  misc_RNA (1)...(19): siRNA sense strand
caaggguggcguugucauc

SEQ ID NO: 1522095 - RNA, 19 nt, Homo sapiens
  misc_RNA (1)...(19): siRNA sense strand
ggacaaaucucgaagucuu

SEQ ID NO: 1522096 - RNA, 19 nt, Homo sapiens
  misc_RNA (1)...(19): siRNA sense strand
gagaagaggcuauaauaaa

SEQ ID NO: 1522097 - RNA, 19 nt, Homo sapiens
  misc_RNA (1)...(19): siRNA sense strand
gaagauacagaauuccuua

SEQ ID NO: 1522098 - RNA, 19 nt, Homo sapiens
  misc_RNA (1)...(19): siRNA sense strand
ggacaaacuucacguucuu

SEQ ID NO: 1522099 - RNA, 19 nt, Homo sapiens
  misc_RNA (1)...(19): siRNA sense strand
gcuaacacaugcaaugaaa

SEQ ID NO: 1522100 - RNA, 19 nt, Homo sapiens
  misc_RNA (1)...(19): siRNA sense strand
gcacagaaagucuuaauca

SEQ ID NO: 1522101 - RNA, 19 nt, Homo sapiens
  misc_RNA (1)...(19): siRNA sense strand
uaagaaagcacuggaauuu

SEQ ID NO: 1522102 - RNA, 19 nt, Homo sapiens
  misc_RNA (1)...(19): siRNA sense strand
gaucacagguuacagaaag

SEQ ID NO: 1522103 - RNA, 19 nt, Homo sapiens
  misc_RNA (1)...(19): siRNA sense strand
ggaguacaaucacaagcua

SEQ ID NO: 1522104 - RNA, 19 nt, Homo sapiens
  misc_RNA (1)...(19): siRNA sense strand
cauuugagcagucuuauua

SEQ ID NO: 1522105 - RNA, 19 nt, Homo sapiens
  misc_RNA (1)...(19): siRNA sense strand
guacacaguugcccacaug

SEQ ID NO: 1522106 - RNA, 19 nt, Homo sapiens
  misc_RNA (1)...(19): siRNA sense strand
cagaaagucuuaaucaagu

SEQ ID NO: 1522107 - RNA, 19 nt, Homo sapiens
  misc_RNA (1)...(19): siRNA sense strand
caugaugcccuuucaauuu

SEQ ID NO: 1522108 - RNA, 19 nt, Homo sapiens
  misc_RNA (1)...(19): siRNA sense strand
gaagagaagaggcuauaau

SEQ ID NO: 1522109 - RNA, 19 nt, Homo sapiens
  misc_RNA (1)...(19): siRNA sense strand
ggaugaugaugucuuaaug

SEQ ID NO: 1522110 - RNA, 19 nt, Homo sapiens
  misc_RNA (1)...(19): siRNA sense strand
gaacuaagggccuccacuu

SEQ ID NO: 1522111 - RNA, 19 nt, Homo sapiens
  misc_RNA (1)...(19): siRNA sense strand
aaaugaagcuguuguuaag

SEQ ID NO: 1522112 - RNA, 19 nt, Homo sapiens
  misc_RNA (1)...(19): siRNA sense strand
cagaauuccuuaaagauca

SEQ ID NO: 1522113 - RNA, 19 nt, Homo sapiens
  misc_RNA (1)...(19): siRNA sense strand
uauggaugaugaugucuua

SEQ ID NO: 1522114 - RNA, 19 nt, Homo sapiens
  misc_RNA (1)...(19): siRNA sense strand
ggacuccguuuaugucaug

SEQ ID NO: 1522115 - RNA, 19 nt, Homo sapiens
  misc_RNA (1)...(19): siRNA sense strand
gcauauugaugauaaaguc

SEQ ID NO: 1522116 - RNA, 19 nt, Homo sapiens
  misc_RNA (1)...(19): siRNA sense strand
gaucauuugagcagucuua

SEQ ID NO: 1522117 - RNA, 19 nt, Homo sapiens
  misc_RNA (1)...(19): siRNA sense strand
agaagaggcuauaauaaag

SEQ ID NO: 1522118 - RNA, 19 nt, Homo sapiens
  misc_RNA (1)...(19): siRNA sense strand
augaugcccuuucaauuua

SEQ ID NO: 1522119 - RNA, 19 nt, Homo sapiens
  misc_RNA (1)...(19): siRNA sense strand
aagagaagaggcuauaaua

SEQ ID NO: 1522120 - RNA, 19 nt, Homo sapiens
  misc_RNA (1)...(19): siRNA sense strand
gaugcuauaugauuuccaa

SEQ ID NO: 1522121 - RNA, 19 nt, Homo sapiens
  misc_RNA (1)...(19): siRNA sense strand
gaacagcuaacacaugcaa

SEQ ID NO: 1522122 - RNA, 19 nt, Homo sapiens
  misc_RNA (1)...(19): siRNA sense strand
gauacagaauuccuuaaag

SEQ ID NO: 1522123 - RNA, 19 nt, Homo sapiens
  misc_RNA (1)...(19): siRNA sense strand
uaucagaaguucaagaagu

SEQ ID NO: 1522124 - RNA, 19 nt, Homo sapiens
  misc_RNA (1)...(19): siRNA sense strand
gcuauaugauuuccaagau

SEQ ID NO: 1522125 - RNA, 19 nt, Homo sapiens
  misc_RNA (1)...(19): siRNA sense strand
uacuaaagcucaagcaguu

SEQ ID NO: 1522126 - RNA, 19 nt, Homo sapiens
  misc_RNA (1)...(19): siRNA sense strand
gaacaugaagauacagaau

SEQ ID NO: 1522127 - RNA, 19 nt, Homo sapiens
  misc_RNA (1)...(19): siRNA sense strand
gaugucgaaucaagcauga

SEQ ID NO: 1522128 - RNA, 19 nt, Homo sapiens
  misc_RNA (1)...(19): siRNA sense strand
ccacaauaccagaucauuu

SEQ ID NO: 1522129 - RNA, 19 nt, Homo sapiens
  misc_RNA (1)...(19): siRNA sense strand
ccacauccuuccagaaaca

SEQ ID NO: 1522130 - RNA, 19 nt, Homo sapiens
  misc_RNA (1)...(19): siRNA sense strand
aaacucguguccuuucuga

SEQ ID NO: 1522131 - RNA, 19 nt, Homo sapiens
  misc_RNA (1)...(19): siRNA sense strand
gaagagcccauaucagaag

SEQ ID NO: 1522132 - RNA, 19 nt, Homo sapiens
  misc_RNA (1)...(19): siRNA sense strand
aaaauuggcugcagcauug

SEQ ID NO: 1522133 - RNA, 19 nt, Homo sapiens
  misc_RNA (1)...(19): siRNA sense strand
acuaagggccuccacuuua

SEQ ID NO: 1522134 - RNA, 19 nt, Homo sapiens
  misc_RNA (1)...(19): siRNA sense strand
ggcaagaugucgaaucaag

SEQ ID NO: 1522135 - RNA, 19 nt, Homo sapiens
  misc_RNA (1)...(19): siRNA sense strand
cuaaggauccugacuugaa

SEQ ID NO: 1522136 - RNA, 19 nt, Homo sapiens
  misc_RNA (1)...(19): siRNA sense strand
cacaauaccagaucauuug

SEQ ID NO: 1522137 - RNA, 19 nt, Homo sapiens
  misc_RNA (1)...(19): siRNA sense strand
gaaaaugaagcuguuguua

SEQ ID NO: 1522138 - RNA, 19 nt, Homo sapiens
  misc_RNA (1)...(19): siRNA sense strand
acaugaagauacagaauuc

SEQ ID NO: 1522139 - RNA, 19 nt, Homo sapiens
  misc_RNA (1)...(19): siRNA sense strand
cacagaaagucuuaaucaa

SEQ ID NO: 1522140 - RNA, 19 nt, Homo sapiens
  misc_RNA (1)...(19): siRNA sense strand
ugagcagucuuauuauugu

SEQ ID NO: 1522141 - RNA, 19 nt, Homo sapiens
  misc_RNA (1)...(19): siRNA sense strand
gaagaggcuauaauaaagu

SEQ ID NO: 1522142 - RNA, 19 nt, Homo sapiens
  misc_RNA (1)...(19): siRNA sense strand
agucaaaucuguauugcau

SEQ ID NO: 1522143 - RNA, 19 nt, Homo sapiens
  misc_RNA (1)...(19): siRNA sense strand
agagaagaggcuauaauaa

SEQ ID NO: 1522144 - RNA, 19 nt, Homo sapiens
  misc_RNA (1)...(19): siRNA sense strand
gcugcuaccucguuguuca

SEQ ID NO: 1522145 - RNA, 19 nt, Homo sapiens
  misc_RNA (1)...(19): siRNA sense strand
aucaaaggaucacagguua

SEQ ID NO: 1522146 - RNA, 19 nt, Homo sapiens
  misc_RNA (1)...(19): siRNA sense strand
aaauauggaugaugauguc

SEQ ID NO: 1522147 - RNA, 19 nt, Homo sapiens
  misc_RNA (1)...(19): siRNA sense strand
cagaaacaguuaggaaaca

SEQ ID NO: 1522148 - RNA, 19 nt, Homo sapiens
  misc_RNA (1)...(19): siRNA sense strand
cauaucagaaguucaagaa

SEQ ID NO: 1522149 - RNA, 19 nt, Homo sapiens
  misc_RNA (1)...(19): siRNA sense strand
ugaagcuguuguuaagaaa

SEQ ID NO: 1522150 - RNA, 19 nt, Homo sapiens
  misc_RNA (1)...(19): siRNA sense strand
ggacuggguguuaguaauc

SEQ ID NO: 1522151 - RNA, 19 nt, Homo sapiens
  misc_RNA (1)...(19): siRNA sense strand
guaccacaauaccagauca

SEQ ID NO: 1522152 - RNA, 19 nt, Homo sapiens
  misc_RNA (1)...(19): siRNA sense strand
gaucaucucccaacucacu

SEQ ID NO: 1522153 - RNA, 19 nt, Homo sapiens
  misc_RNA (1)...(19): siRNA sense strand
cuaagggccuccacuuuac

SEQ ID NO: 1522154 - RNA, 19 nt, Homo sapiens
  misc_RNA (1)...(19): siRNA sense strand
uaaugaagagcccauauca

SEQ ID NO: 1522155 - RNA, 19 nt, Homo sapiens
  misc_RNA (1)...(19): siRNA sense strand
gauaaugaagagcccauau

SEQ ID NO: 1522156 - RNA, 19 nt, Homo sapiens
  misc_RNA (1)...(19): siRNA sense strand
uaaggauccugacuugaag

SEQ ID NO: 1522157 - RNA, 19 nt, Homo sapiens
  misc_RNA (1)...(19): siRNA sense strand
gcccugaagaaguuuauaa

SEQ ID NO: 1522158 - RNA, 19 nt, Homo sapiens
  misc_RNA (1)...(19): siRNA sense strand
gcccauaucagaaguucaa

SEQ ID NO: 1522159 - RNA, 19 nt, Homo sapiens
  misc_RNA (1)...(19): siRNA sense strand
ccuuaaagaucacucucaa

SEQ ID NO: 1522160 - RNA, 19 nt, Homo sapiens
  misc_RNA (1)...(19): siRNA sense strand
gcccacaugucaauuuuaa

SEQ ID NO: 1522161 - RNA, 19 nt, Homo sapiens
  misc_RNA (1)...(19): siRNA sense strand
ccuuucagcguuugucuua

SEQ ID NO: 1522162 - RNA, 19 nt, Homo sapiens
  misc_RNA (1)...(19): siRNA sense strand
aucagaaguucaagaagua

SEQ ID NO: 1522163 - RNA, 19 nt, Homo sapiens
  misc_RNA (1)...(19): siRNA sense strand
uaccacauccuuccagaaa

SEQ ID NO: 1522164 - RNA, 19 nt, Homo sapiens
  misc_RNA (1)...(19): siRNA sense strand
gcgggacccuucugagaca

SEQ ID NO: 1522165 - RNA, 19 nt, Homo sapiens
  misc_RNA (1)...(19): siRNA sense strand
ucaauacagguucauggua

SEQ ID NO: 1522166 - RNA, 19 nt, Homo sapiens
  misc_RNA (1)...(19): siRNA sense strand
caggacaaaucucgaaguc

SEQ ID NO: 1522167 - RNA, 19 nt, Homo sapiens
  misc_RNA (1)...(19): siRNA sense strand
agcuguaucuucccaagua

SEQ ID NO: 1522168 - RNA, 19 nt, Homo sapiens
  misc_RNA (1)...(19): siRNA sense strand
augaagcuguuguuaagaa

SEQ ID NO: 1522169 - RNA, 19 nt, Homo sapiens
  misc_RNA (1)...(19): siRNA sense strand
guuguuuacugcacauguu

SEQ ID NO: 1522170 - RNA, 19 nt, Homo sapiens
  misc_RNA (1)...(19): siRNA sense strand
aaucaaaggaucacagguu

SEQ ID NO: 1522171 - RNA, 19 nt, Homo sapiens
  misc_RNA (1)...(19): siRNA sense strand
gagcagucuuauuauugug

SEQ ID NO: 1522172 - RNA, 19 nt, Homo sapiens
  misc_RNA (1)...(19): siRNA sense strand
caaaggaucacagguuaca

SEQ ID NO: 1522173 - RNA, 19 nt, Homo sapiens
  misc_RNA (1)...(19): siRNA sense strand
gagcccauaucagaaguuc

SEQ ID NO: 1522174 - RNA, 19 nt, Homo sapiens
  misc_RNA (1)...(19): siRNA sense strand
augaagagcccauaucaga

SEQ ID NO: 1522175 - RNA, 19 nt, Homo sapiens
  misc_RNA (1)...(19): siRNA sense strand
acucguguccuuucugaua

SEQ ID NO: 1522176 - RNA, 19 nt, Homo sapiens
  misc_RNA (1)...(19): siRNA sense strand
aaucaaguaugggaaugaa

SEQ ID NO: 1522177 - RNA, 19 nt, Homo sapiens
  misc_RNA (1)...(19): siRNA sense strand
ugaagagcccauaucagaa

SEQ ID NO: 1522178 - RNA, 19 nt, Homo sapiens
  misc_RNA (1)...(19): siRNA sense strand
ggccuccacuuuaccacuu

SEQ ID NO: 1522179 - RNA, 19 nt, Homo sapiens
  misc_RNA (1)...(19): siRNA sense strand
uuaagaaagcacuggaauu

SEQ ID NO: 1522180 - RNA, 19 nt, Homo sapiens
  misc_RNA (1)...(19): siRNA sense strand
cacaugcaaugaaauuuac

SEQ ID NO: 1522181 - RNA, 19 nt, Homo sapiens
  misc_RNA (1)...(19): siRNA sense strand
guucaggacuggguguuag

SEQ ID NO: 1522182 - RNA, 19 nt, Homo sapiens
  misc_RNA (1)...(19): siRNA sense strand
gcagucuuauuauugugau

SEQ ID NO: 1522183 - RNA, 19 nt, Homo sapiens
  misc_RNA (1)...(19): siRNA sense strand
uaaagaucacucucaagga

SEQ ID NO: 1522184 - RNA, 19 nt, Homo sapiens
  misc_RNA (1)...(19): siRNA sense strand
uuucagcguuugucuuaug

SEQ ID NO: 1522185 - RNA, 19 nt, Homo sapiens
  misc_RNA (1)...(19): siRNA sense strand
cuuaugagcuggcuuucag

SEQ ID NO: 1522186 - RNA, 19 nt, Homo sapiens
  misc_RNA (1)...(19): siRNA sense strand
caagaugucgaaucaagca

SEQ ID NO: 1522187 - RNA, 19 nt, Homo sapiens
  misc_RNA (1)...(19): siRNA sense strand
acagaaagucuuaaucaag

SEQ ID NO: 1522188 - RNA, 19 nt, Homo sapiens
  misc_RNA (1)...(19): siRNA sense strand
acagcaguaugaacagcua

SEQ ID NO: 1522189 - RNA, 19 nt, Homo sapiens
  misc_RNA (1)...(19): siRNA sense strand
gaagucuugcuguccauuc

SEQ ID NO: 1522190 - RNA, 19 nt, Homo sapiens
  misc_RNA (1)...(19): siRNA sense strand
cagcgggacccuucugaga

SEQ ID NO: 1522191 - RNA, 19 nt, Homo sapiens
  misc_RNA (1)...(19): siRNA sense strand
cagcuaacacaugcaauga

SEQ ID NO: 1522192 - RNA, 19 nt, Homo sapiens
  misc_RNA (1)...(19): siRNA sense strand
gcaucucaguggacaaacu

SEQ ID NO: 1522193 - RNA, 19 nt, Homo sapiens
  misc_RNA (1)...(19): siRNA sense strand
gacaaaucucgaagucuug

SEQ ID NO: 1522194 - RNA, 19 nt, Homo sapiens
  misc_RNA (1)...(19): siRNA sense strand
guuaagaaagcacuggaau

SEQ ID NO: 1522195 - RNA, 19 nt, Homo sapiens
  misc_RNA (1)...(19): siRNA sense strand
uaaaugaucuuccgcagua

SEQ ID NO: 1522196 - RNA, 19 nt, Homo sapiens
  misc_RNA (1)...(19): siRNA sense strand
guucaaagauucccaacaa

SEQ ID NO: 1522197 - RNA, 19 nt, Homo sapiens
  misc_RNA (1)...(19): siRNA sense strand
ccuauuaaauccagugaua

SEQ ID NO: 1522198 - RNA, 19 nt, Homo sapiens
  misc_RNA (1)...(19): siRNA sense strand
gcucaacaguucaaagauu

SEQ ID NO: 1522199 - RNA, 19 nt, Homo sapiens
  misc_RNA (1)...(19): siRNA sense strand
gaaggaugguggagaauag

SEQ ID NO: 1522200 - RNA, 19 nt, Homo sapiens
  misc_RNA (1)...(19): siRNA sense strand
gagaauagcauuaacagau

SEQ ID NO: 1522201 - RNA, 19 nt, Homo sapiens
  misc_RNA (1)...(19): siRNA sense strand
gaagaaucccuauuaaauc

SEQ ID NO: 1522202 - RNA, 19 nt, Homo sapiens
  misc_RNA (1)...(19): siRNA sense strand
gcacacuaguugacaaaga

SEQ ID NO: 1522203 - RNA, 19 nt, Homo sapiens
  misc_RNA (1)...(19): siRNA sense strand
gaaacaauccaguccuaaa

SEQ ID NO: 1522204 - RNA, 19 nt, Homo sapiens
  misc_RNA (1)...(19): siRNA sense strand
guauuucgcucaacaguuc

SEQ ID NO: 1522205 - RNA, 19 nt, Homo sapiens
  misc_RNA (1)...(19): siRNA sense strand
guauaugccuccugacuuc

SEQ ID NO: 1522206 - RNA, 19 nt, Homo sapiens
  misc_RNA (1)...(19): siRNA sense strand
agagaaggaugguggagaa

SEQ ID NO: 1522207 - RNA, 19 nt, Homo sapiens
  misc_RNA (1)...(19): siRNA sense strand
acaauccaguccuaaauga

SEQ ID NO: 1522208 - RNA, 19 nt, Homo sapiens
  misc_RNA (1)...(19): siRNA sense strand
aagaaacaauccaguccua

SEQ ID NO: 1522209 - RNA, 19 nt, Homo sapiens
  misc_RNA (1)...(19): siRNA sense strand
gaauagcauuaacagauac

SEQ ID NO: 1522210 - RNA, 19 nt, Homo sapiens
  misc_RNA (1)...(19): siRNA sense strand
ugauagcaaccuacaauuu

SEQ ID NO: 1522211 - RNA, 19 nt, Homo sapiens
  misc_RNA (1)...(19): siRNA sense strand
cugcaccaguucccaaaua

SEQ ID NO: 1522212 - RNA, 19 nt, Homo sapiens
  misc_RNA (1)...(19): siRNA sense strand
gaucagucacuucagcuuu

SEQ ID NO: 1522213 - RNA, 19 nt, Homo sapiens
  misc_RNA (1)...(19): siRNA sense strand
caucacagcuucgaaacca

SEQ ID NO: 1522214 - RNA, 19 nt, Homo sapiens
  misc_RNA (1)...(19): siRNA sense strand
gauagcaaccuacaauuuu

SEQ ID NO: 1522215 - RNA, 19 nt, Homo sapiens
  misc_RNA (1)...(19): siRNA sense strand
acaaagaucagucacuuca

SEQ ID NO: 1522216 - RNA, 19 nt, Homo sapiens
  misc_RNA (1)...(19): siRNA sense strand
ccaacaaccuauuuuauuc

SEQ ID NO: 1522217 - RNA, 19 nt, Homo sapiens
  misc_RNA (1)...(19): siRNA sense strand
aaacaauccaguccuaaau

SEQ ID NO: 1522218 - RNA, 19 nt, Homo sapiens
  misc_RNA (1)...(19): siRNA sense strand
aaagccaccucuugugcaa

SEQ ID NO: 1522219 - RNA, 19 nt, Homo sapiens
  misc_RNA (1)...(19): siRNA sense strand
cacacuaguugacaaagau

SEQ ID NO: 1522220 - RNA, 19 nt, Homo sapiens
  misc_RNA (1)...(19): siRNA sense strand
gcuacuuacucauucaaag

SEQ ID NO: 1522221 - RNA, 19 nt, Homo sapiens
  misc_RNA (1)...(19): siRNA sense strand
ccugguggguggagaauca

SEQ ID NO: 1522222 - RNA, 19 nt, Homo sapiens
  misc_RNA (1)...(19): siRNA sense strand
ggagaauagcauuaacaga

SEQ ID NO: 1522223 - RNA, 19 nt, Homo sapiens
  misc_RNA (1)...(19): siRNA sense strand
ugacuuccuggaccuguua

SEQ ID NO: 1522224 - RNA, 19 nt, Homo sapiens
  misc_RNA (1)...(19): siRNA sense strand
gcauuaacagauacuccua

SEQ ID NO: 1522225 - RNA, 19 nt, Homo sapiens
  misc_RNA (1)...(19): siRNA sense strand
uccaggagcuguguauuuc

SEQ ID NO: 1522226 - RNA, 19 nt, Homo sapiens
  misc_RNA (1)...(19): siRNA sense strand
uccuggaccuguuaaagaa

SEQ ID NO: 1522227 - RNA, 19 nt, Homo sapiens
  misc_RNA (1)...(19): siRNA sense strand
cuacuuacucauucaaaga

SEQ ID NO: 1522228 - RNA, 19 nt, Homo sapiens
  misc_RNA (1)...(19): siRNA sense strand
ccagcacacuaguugacaa

SEQ ID NO: 1522229 - RNA, 19 nt, Homo sapiens
  misc_RNA (1)...(19): siRNA sense strand
aagaaucccuauuaaaucc

SEQ ID NO: 1522230 - RNA, 19 nt, Homo sapiens
  misc_RNA (1)...(19): siRNA sense strand
gcaccaguucccaaauaug

SEQ ID NO: 1522231 - RNA, 19 nt, Homo sapiens
  misc_RNA (1)...(19): siRNA sense strand
agaaggaugguggagaaua

SEQ ID NO: 1522232 - RNA, 19 nt, Homo sapiens
  misc_RNA (1)...(19): siRNA sense strand
cucaacaguucaaagauuc

SEQ ID NO: 1522233 - RNA, 19 nt, Homo sapiens
  misc_RNA (1)...(19): siRNA sense strand
aaagauucccaacaaccua

SEQ ID NO: 1522234 - RNA, 19 nt, Homo sapiens
  misc_RNA (1)...(19): siRNA sense strand
uaacagauacuccuauacc

SEQ ID NO: 1522235 - RNA, 19 nt, Homo sapiens
  misc_RNA (1)...(19): siRNA sense strand
gaugguggagaauagcauu

SEQ ID NO: 1522236 - RNA, 19 nt, Homo sapiens
  misc_RNA (1)...(19): siRNA sense strand
cagcacacuaguugacaaa

SEQ ID NO: 1522237 - RNA, 19 nt, Homo sapiens
  misc_RNA (1)...(19): siRNA sense strand
gcacuuaccacuugaaaac

SEQ ID NO: 1522238 - RNA, 19 nt, Homo sapiens
  misc_RNA (1)...(19): siRNA sense strand
gugauagcaaccuacaauu

SEQ ID NO: 1522239 - RNA, 19 nt, Homo sapiens
  misc_RNA (1)...(19): siRNA sense strand
gacaaagaucagucacuuc

SEQ ID NO: 1522240 - RNA, 19 nt, Homo sapiens
  misc_RNA (1)...(19): siRNA sense strand
ucccguaaguauaauguag

SEQ ID NO: 1522241 - RNA, 19 nt, Homo sapiens
  misc_RNA (1)...(19): siRNA sense strand
ucgcucaacaguucaaaga

SEQ ID NO: 1522242 - RNA, 19 nt, Homo sapiens
  misc_RNA (1)...(19): siRNA sense strand
agaaacaauccaguccuaa

SEQ ID NO: 1522243 - RNA, 19 nt, Homo sapiens
  misc_RNA (1)...(19): siRNA sense strand
ugcaccaguucccaaauau

SEQ ID NO: 1522244 - RNA, 19 nt, Homo sapiens
  misc_RNA (1)...(19): siRNA sense strand
ccaccucaauaagggaaga

SEQ ID NO: 1522245 - RNA, 19 nt, Homo sapiens
  misc_RNA (1)...(19): siRNA sense strand
uuaaauccagugauagcaa

SEQ ID NO: 1522246 - RNA, 19 nt, Homo sapiens
  misc_RNA (1)...(19): siRNA sense strand
gaucuuccgcaguauaugc

SEQ ID NO: 1522247 - RNA, 19 nt, Homo sapiens
  misc_RNA (1)...(19): siRNA sense strand
gaaaccagcccaaaagacu

SEQ ID NO: 1522248 - RNA, 19 nt, Homo sapiens
  misc_RNA (1)...(19): siRNA sense strand
caaagauucccaacaaccu

SEQ ID NO: 1522249 - RNA, 19 nt, Homo sapiens
  misc_RNA (1)...(19): siRNA sense strand
uuccaggagcuguguauuu

SEQ ID NO: 1522250 - RNA, 19 nt, Homo sapiens
  misc_RNA (1)...(19): siRNA sense strand
aaugaucuuccgcaguaua

SEQ ID NO: 1522251 - RNA, 19 nt, Homo sapiens
  misc_RNA (1)...(19): siRNA sense strand
gguggagaauagcauuaac

SEQ ID NO: 1522252 - RNA, 19 nt, Homo sapiens
  misc_RNA (1)...(19): siRNA sense strand
gaacaaagaugcauuggaa

SEQ ID NO: 1522253 - RNA, 19 nt, Homo sapiens
  misc_RNA (1)...(19): siRNA sense strand
gaaacaggcuaacugauua

SEQ ID NO: 1522254 - RNA, 19 nt, Homo sapiens
  misc_RNA (1)...(19): siRNA sense strand
gguaauggcucaauacaaa

SEQ ID NO: 1522255 - RNA, 19 nt, Homo sapiens
  misc_RNA (1)...(19): siRNA sense strand
gaucauagcuggucuugug

SEQ ID NO: 1522256 - RNA, 19 nt, Homo sapiens
  misc_RNA (1)...(19): siRNA sense strand
gauaauagcuaaugcacuu

SEQ ID NO: 1522257 - RNA, 19 nt, Homo sapiens
  misc_RNA (1)...(19): siRNA sense strand
gcucauaucuagugugaaa

SEQ ID NO: 1522258 - RNA, 19 nt, Homo sapiens
  misc_RNA (1)...(19): siRNA sense strand
ggaagcauguuaccaguga

SEQ ID NO: 1522259 - RNA, 19 nt, Homo sapiens
  misc_RNA (1)...(19): siRNA sense strand
gguaaucacuguuaagaga

SEQ ID NO: 1522260 - RNA, 19 nt, Homo sapiens
  misc_RNA (1)...(19): siRNA sense strand
gaaacaaccagauuuaguu

SEQ ID NO: 1522261 - RNA, 19 nt, Homo sapiens
  misc_RNA (1)...(19): siRNA sense strand
gagagaacauuguguagga

SEQ ID NO: 1522262 - RNA, 19 nt, Homo sapiens
  misc_RNA (1)...(19): siRNA sense strand
ggaagagugggaagaaaua

SEQ ID NO: 1522263 - RNA, 19 nt, Homo sapiens
  misc_RNA (1)...(19): siRNA sense strand
gaaagaaacaggcuaacug

SEQ ID NO: 1522264 - RNA, 19 nt, Homo sapiens
  misc_RNA (1)...(19): siRNA sense strand
ggaucagaguuuauucuaa

SEQ ID NO: 1522265 - RNA, 19 nt, Homo sapiens
  misc_RNA (1)...(19): siRNA sense strand
aaguacagcuuuccacaua

SEQ ID NO: 1522266 - RNA, 19 nt, Homo sapiens
  misc_RNA (1)...(19): siRNA sense strand
ugaaacaucuacauaguca

SEQ ID NO: 1522267 - RNA, 19 nt, Homo sapiens
  misc_RNA (1)...(19): siRNA sense strand
guaaaccucuuauccuuag

SEQ ID NO: 1522268 - RNA, 19 nt, Homo sapiens
  misc_RNA (1)...(19): siRNA sense strand
uauaagagcuguccaugca

SEQ ID NO: 1522269 - RNA, 19 nt, Homo sapiens
  misc_RNA (1)...(19): siRNA sense strand
gcucuuagaagcauacuuu

SEQ ID NO: 1522270 - RNA, 19 nt, Homo sapiens
  misc_RNA (1)...(19): siRNA sense strand
ccacauacauauauaagag

SEQ ID NO: 1522271 - RNA, 19 nt, Homo sapiens
  misc_RNA (1)...(19): siRNA sense strand
uaucagugguugaguguuu

SEQ ID NO: 1522272 - RNA, 19 nt, Homo sapiens
  misc_RNA (1)...(19): siRNA sense strand
gauaguaacagaaaccauu

SEQ ID NO: 1522273 - RNA, 19 nt, Homo sapiens
  misc_RNA (1)...(19): siRNA sense strand
uaacacugcuuuggugaaa

SEQ ID NO: 1522274 - RNA, 19 nt, Homo sapiens
  misc_RNA (1)...(19): siRNA sense strand
guugaugugugacuacuuu

SEQ ID NO: 1522275 - RNA, 19 nt, Homo sapiens
  misc_RNA (1)...(19): siRNA sense strand
ucagaaaguucacaaucaa

SEQ ID NO: 1522276 - RNA, 19 nt, Homo sapiens
  misc_RNA (1)...(19): siRNA sense strand
caggcuaacugauuauuau

SEQ ID NO: 1522277 - RNA, 19 nt, Homo sapiens
  misc_RNA (1)...(19): siRNA sense strand
uaagaacaguggagaaagu

SEQ ID NO: 1522278 - RNA, 19 nt, Homo sapiens
  misc_RNA (1)...(19): siRNA sense strand
gaacaauuccacugcuuau

SEQ ID NO: 1522279 - RNA, 19 nt, Homo sapiens
  misc_RNA (1)...(19): siRNA sense strand
ggacacaguugcagagaac

SEQ ID NO: 1522280 - RNA, 19 nt, Homo sapiens
  misc_RNA (1)...(19): siRNA sense strand
gaacaguggagaaaguuau

SEQ ID NO: 1522281 - RNA, 19 nt, Homo sapiens
  misc_RNA (1)...(19): siRNA sense strand
uaagagacacccucagaaa

SEQ ID NO: 1522282 - RNA, 19 nt, Homo sapiens
  misc_RNA (1)...(19): siRNA sense strand
aaagagagaacauugugua

SEQ ID NO: 1522283 - RNA, 19 nt, Homo sapiens
  misc_RNA (1)...(19): siRNA sense strand
gaauggugauaguaacaga

SEQ ID NO: 1522284 - RNA, 19 nt, Homo sapiens
  misc_RNA (1)...(19): siRNA sense strand
acacugacaccaacagaua

SEQ ID NO: 1522285 - RNA, 19 nt, Homo sapiens
  misc_RNA (1)...(19): siRNA sense strand
gagacacccucagaaaguu

SEQ ID NO: 1522286 - RNA, 19 nt, Homo sapiens
  misc_RNA (1)...(19): siRNA sense strand
ggucacaaauauuacuaga

SEQ ID NO: 1522287 - RNA, 19 nt, Homo sapiens
  misc_RNA (1)...(19): siRNA sense strand
agaaacaggcuaacugauu

SEQ ID NO: 1522288 - RNA, 19 nt, Homo sapiens
  misc_RNA (1)...(19): siRNA sense strand
gacaugguaaucacuguua

SEQ ID NO: 1522289 - RNA, 19 nt, Homo sapiens
  misc_RNA (1)...(19): siRNA sense strand
cuucaguucuucaguguuu

SEQ ID NO: 1522290 - RNA, 19 nt, Homo sapiens
  misc_RNA (1)...(19): siRNA sense strand
guacagcuuuccacauaca

SEQ ID NO: 1522291 - RNA, 19 nt, Homo sapiens
  misc_RNA (1)...(19): siRNA sense strand
acacugcuuuggugaaauu

SEQ ID NO: 1522292 - RNA, 19 nt, Homo sapiens
  misc_RNA (1)...(19): siRNA sense strand
ucagacagguuuggaauca

SEQ ID NO: 1522293 - RNA, 19 nt, Homo sapiens
  misc_RNA (1)...(19): siRNA sense strand
agaguuaccuuuccucauc

SEQ ID NO: 1522294 - RNA, 19 nt, Homo sapiens
  misc_RNA (1)...(19): siRNA sense strand
gaagagugggaagaaauaa

SEQ ID NO: 1522295 - RNA, 19 nt, Homo sapiens
  misc_RNA (1)...(19): siRNA sense strand
caauuccacugcuuauuca

SEQ ID NO: 1522296 - RNA, 19 nt, Homo sapiens
  misc_RNA (1)...(19): siRNA sense strand
uaaaaugcuucggcaauua

SEQ ID NO: 1522297 - RNA, 19 nt, Homo sapiens
  misc_RNA (1)...(19): siRNA sense strand
ucacuggccuuccuguuuc

SEQ ID NO: 1522298 - RNA, 19 nt, Homo sapiens
  misc_RNA (1)...(19): siRNA sense strand
ggauugguguauuugaguu

SEQ ID NO: 1522299 - RNA, 19 nt, Homo sapiens
  misc_RNA (1)...(19): siRNA sense strand
uaugaaccauuacucaaga

SEQ ID NO: 1522300 - RNA, 19 nt, Homo sapiens
  misc_RNA (1)...(19): siRNA sense strand
ggaaaagacaaaagcaaua

SEQ ID NO: 1522301 - RNA, 19 nt, Homo sapiens
  misc_RNA (1)...(19): siRNA sense strand
uagaaagggaagcauguua

SEQ ID NO: 1522302 - RNA, 19 nt, Homo sapiens
  misc_RNA (1)...(19): siRNA sense strand
aaagaaacaggcuaacuga

SEQ ID NO: 1522303 - RNA, 19 nt, Homo sapiens
  misc_RNA (1)...(19): siRNA sense strand
ucauuggucuuucuccauu

SEQ ID NO: 1522304 - RNA, 19 nt, Homo sapiens
  misc_RNA (1)...(19): siRNA sense strand
gaaaccauucagccucuuu

SEQ ID NO: 1522305 - RNA, 19 nt, Homo sapiens
  misc_RNA (1)...(19): siRNA sense strand
gccaguaggugguaauuuu

SEQ ID NO: 1522306 - RNA, 19 nt, Homo sapiens
  misc_RNA (1)...(19): siRNA sense strand
gcauuuauaccacacucua

SEQ ID NO: 1522307 - RNA, 19 nt, Homo sapiens
  misc_RNA (1)...(19): siRNA sense strand
gaagcacaguuucagacau

SEQ ID NO: 1522308 - RNA, 19 nt, Homo sapiens
  misc_RNA (1)...(19): siRNA sense strand
caaccagauuuaguuaguu

SEQ ID NO: 1522309 - RNA, 19 nt, Homo sapiens
  misc_RNA (1)...(19): siRNA sense strand
ugaggaugcuuuacaugga

SEQ ID NO: 1522310 - RNA, 19 nt, Homo sapiens
  misc_RNA (1)...(19): siRNA sense strand
ugugaaacaaccagauuua

SEQ ID NO: 1522311 - RNA, 19 nt, Homo sapiens
  misc_RNA (1)...(19): siRNA sense strand
uuagaggacuucaugcaau

SEQ ID NO: 1522312 - RNA, 19 nt, Homo sapiens
  misc_RNA (1)...(19): siRNA sense strand
gguaauuccagauguagaa

SEQ ID NO: 1522313 - RNA, 19 nt, Homo sapiens
  misc_RNA (1)...(19): siRNA sense strand
gcaaucacagacagagaaa

SEQ ID NO: 1522314 - RNA, 19 nt, Homo sapiens
  misc_RNA (1)...(19): siRNA sense strand
aaagugggauugguguauu

SEQ ID NO: 1522315 - RNA, 19 nt, Homo sapiens
  misc_RNA (1)...(19): siRNA sense strand
gaaaguucacaaucaagau

SEQ ID NO: 1522316 - RNA, 19 nt, Homo sapiens
  misc_RNA (1)...(19): siRNA sense strand
guaaauaccagcuacuaac

SEQ ID NO: 1522317 - RNA, 19 nt, Homo sapiens
  misc_RNA (1)...(19): siRNA sense strand
uggaaucaguaauggguaa

SEQ ID NO: 1522318 - RNA, 19 nt, Homo sapiens
  misc_RNA (1)...(19): siRNA sense strand
guucaucuaggcuugauaa

SEQ ID NO: 1522319 - RNA, 19 nt, Homo sapiens
  misc_RNA (1)...(19): siRNA sense strand
uagcuggucuugugcuuca

SEQ ID NO: 1522320 - RNA, 19 nt, Homo sapiens
  misc_RNA (1)...(19): siRNA sense strand
guucuucaguguuugacaa

SEQ ID NO: 1522321 - RNA, 19 nt, Homo sapiens
  misc_RNA (1)...(19): siRNA sense strand
acagauacauuccaaacag

SEQ ID NO: 1522322 - RNA, 19 nt, Homo sapiens
  misc_RNA (1)...(19): siRNA sense strand
caacagauacauuccaaac

SEQ ID NO: 1522323 - RNA, 19 nt, Homo sapiens
  misc_RNA (1)...(19): siRNA sense strand
uauaagaacaguggagaaa

SEQ ID NO: 1522324 - RNA, 19 nt, Homo sapiens
  misc_RNA (1)...(19): siRNA sense strand
gaggaucauuggucuuucu

SEQ ID NO: 1522325 - RNA, 19 nt, Homo sapiens
  misc_RNA (1)...(19): siRNA sense strand
gcaauaaugaaacaucuac

SEQ ID NO: 1522326 - RNA, 19 nt, Homo sapiens
  misc_RNA (1)...(19): siRNA sense strand
gugggaagaaauaaucaua

SEQ ID NO: 1522327 - RNA, 19 nt, Homo sapiens
  misc_RNA (1)...(19): siRNA sense strand
guuaagagacacccucaga

SEQ ID NO: 1522328 - RNA, 19 nt, Homo sapiens
  misc_RNA (1)...(19): siRNA sense strand
uguucucgguggaaauuua

SEQ ID NO: 1522329 - RNA, 19 nt, Homo sapiens
  misc_RNA (1)...(19): siRNA sense strand
aaacaucuacauagucaga

SEQ ID NO: 1522330 - RNA, 19 nt, Homo sapiens
  misc_RNA (1)...(19): siRNA sense strand
gguugaguguuuaucauca

SEQ ID NO: 1522331 - RNA, 19 nt, Homo sapiens
  misc_RNA (1)...(19): siRNA sense strand
acaaccagauuuaguuagu

SEQ ID NO: 1522332 - RNA, 19 nt, Homo sapiens
  misc_RNA (1)...(19): siRNA sense strand
guuaguggaugaccauuuu

SEQ ID NO: 1522333 - RNA, 19 nt, Homo sapiens
  misc_RNA (1)...(19): siRNA sense strand
aauaccagcuacuaacuuc

SEQ ID NO: 1522334 - RNA, 19 nt, Homo sapiens
  misc_RNA (1)...(19): siRNA sense strand
agaacaauuccacugcuua

SEQ ID NO: 1522335 - RNA, 19 nt, Homo sapiens
  misc_RNA (1)...(19): siRNA sense strand
aaccauuacucaagaacaa

SEQ ID NO: 1522336 - RNA, 19 nt, Homo sapiens
  misc_RNA (1)...(19): siRNA sense strand
uggagaaaguuaucaagca

SEQ ID NO: 1522337 - RNA, 19 nt, Homo sapiens
  misc_RNA (1)...(19): siRNA sense strand
auaccacacucuauaguuc

SEQ ID NO: 1522338 - RNA, 19 nt, Homo sapiens
  misc_RNA (1)...(19): siRNA sense strand
uauuugaguuaguggauga

SEQ ID NO: 1522339 - RNA, 19 nt, Homo sapiens
  misc_RNA (1)...(19): siRNA sense strand
cucagaaaguucacaauca

SEQ ID NO: 1522340 - RNA, 19 nt, Homo sapiens
  misc_RNA (1)...(19): siRNA sense strand
caauacaaaggccuuauca

SEQ ID NO: 1522341 - RNA, 19 nt, Homo sapiens
  misc_RNA (1)...(19): siRNA sense strand
uguaaaccucuuauccuua

SEQ ID NO: 1522342 - RNA, 19 nt, Homo sapiens
  misc_RNA (1)...(19): siRNA sense strand
gaagcauacuuuuguggaa

SEQ ID NO: 1522343 - RNA, 19 nt, Homo sapiens
  misc_RNA (1)...(19): siRNA sense strand
ugaaacaaccagauuuagu

SEQ ID NO: 1522344 - RNA, 19 nt, Homo sapiens
  misc_RNA (1)...(19): siRNA sense strand
aagcacaguuucagacauc

SEQ ID NO: 1522345 - RNA, 19 nt, Homo sapiens
  misc_RNA (1)...(19): siRNA sense strand
gauugguguauuugaguua

SEQ ID NO: 1522346 - RNA, 19 nt, Homo sapiens
  misc_RNA (1)...(19): siRNA sense strand
acaauuccacugcuuauuc

SEQ ID NO: 1522347 - RNA, 19 nt, Homo sapiens
  misc_RNA (1)...(19): siRNA sense strand
uagaggacuucaugcaauc

SEQ ID NO: 1522348 - RNA, 19 nt, Homo sapiens
  misc_RNA (1)...(19): siRNA sense strand
gaaccauuacucaagaaca

SEQ ID NO: 1522349 - RNA, 19 nt, Homo sapiens
  misc_RNA (1)...(19): siRNA sense strand
ggaaagaaacaggcuaacu

SEQ ID NO: 1522350 - RNA, 19 nt, Homo sapiens
  misc_RNA (1)...(19): siRNA sense strand
ggaccaguaccuaaguaga

SEQ ID NO: 1522351 - RNA, 19 nt, Homo sapiens
  misc_RNA (1)...(19): siRNA sense strand
aaauucagaagcacaguuu

SEQ ID NO: 1522352 - RNA, 19 nt, Homo sapiens
  misc_RNA (1)...(19): siRNA sense strand
gauaagaaauggugacaaa

SEQ ID NO: 1522353 - RNA, 19 nt, Homo sapiens
  misc_RNA (1)...(19): siRNA sense strand
gaaggugccugauguugaa

SEQ ID NO: 1522354 - RNA, 19 nt, Homo sapiens
  misc_RNA (1)...(19): siRNA sense strand
gaagaaacuuggccaaaca

SEQ ID NO: 1522355 - RNA, 19 nt, Homo sapiens
  misc_RNA (1)...(19): siRNA sense strand
gaagauaaagcauuacuug

SEQ ID NO: 1522356 - RNA, 19 nt, Homo sapiens
  misc_RNA (1)...(19): siRNA sense strand
caaaguggcuucauauugg

SEQ ID NO: 1522357 - RNA, 19 nt, Homo sapiens
  misc_RNA (1)...(19): siRNA sense strand
gaucuuuccugcugaauau

SEQ ID NO: 1522358 - RNA, 19 nt, Homo sapiens
  misc_RNA (1)...(19): siRNA sense strand
ggaaagaagaguugaaaga

SEQ ID NO: 1522359 - RNA, 19 nt, Homo sapiens
  misc_RNA (1)...(19): siRNA sense strand
aaaccaaaguggcuucaua

SEQ ID NO: 1522360 - RNA, 19 nt, Homo sapiens
  misc_RNA (1)...(19): siRNA sense strand
ggaugaaacugagaacaaa

SEQ ID NO: 1522361 - RNA, 19 nt, Homo sapiens
  misc_RNA (1)...(19): siRNA sense strand
guaaagacccugauuguag

SEQ ID NO: 1522362 - RNA, 19 nt, Homo sapiens
  misc_RNA (1)...(19): siRNA sense strand
gaauuuauccuccugaaga

SEQ ID NO: 1522363 - RNA, 19 nt, Homo sapiens
  misc_RNA (1)...(19): siRNA sense strand
uuucagagcugcaaaauua

SEQ ID NO: 1522364 - RNA, 19 nt, Homo sapiens
  misc_RNA (1)...(19): siRNA sense strand
gaccaaagccucuguguuc

SEQ ID NO: 1522365 - RNA, 19 nt, Homo sapiens
  misc_RNA (1)...(19): siRNA sense strand
agaaguacauuccaccuaa

SEQ ID NO: 1522366 - RNA, 19 nt, Homo sapiens
  misc_RNA (1)...(19): siRNA sense strand
aauggaagguuacaaguuu

SEQ ID NO: 1522367 - RNA, 19 nt, Homo sapiens
  misc_RNA (1)...(19): siRNA sense strand
caacagcccagcuccauaa

SEQ ID NO: 1522368 - RNA, 19 nt, Homo sapiens
  misc_RNA (1)...(19): siRNA sense strand
gaacaagcauaaugagcau

SEQ ID NO: 1522369 - RNA, 19 nt, Homo sapiens
  misc_RNA (1)...(19): siRNA sense strand
ugagauuguucguuuagua

SEQ ID NO: 1522370 - RNA, 19 nt, Homo sapiens
  misc_RNA (1)...(19): siRNA sense strand
aaagucagaugcagaauca

SEQ ID NO: 1522371 - RNA, 19 nt, Homo sapiens
  misc_RNA (1)...(19): siRNA sense strand
caugggauuucuuugauaa

SEQ ID NO: 1522372 - RNA, 19 nt, Homo sapiens
  misc_RNA (1)...(19): siRNA sense strand
uaacaagucagaccuuauu

SEQ ID NO: 1522373 - RNA, 19 nt, Homo sapiens
  misc_RNA (1)...(19): siRNA sense strand
gagacucgcucaaguacga

SEQ ID NO: 1522374 - RNA, 19 nt, Homo sapiens
  misc_RNA (1)...(19): siRNA sense strand
aaagaagaguugaaagaga

SEQ ID NO: 1522375 - RNA, 19 nt, Homo sapiens
  misc_RNA (1)...(19): siRNA sense strand
caaaugguuuacagaauuc

SEQ ID NO: 1522376 - RNA, 19 nt, Homo sapiens
  misc_RNA (1)...(19): siRNA sense strand
agucagaccuuauuuguuc

SEQ ID NO: 1522377 - RNA, 19 nt, Homo sapiens
  misc_RNA (1)...(19): siRNA sense strand
caacaaaugauaucugugu

SEQ ID NO: 1522378 - RNA, 19 nt, Homo sapiens
  misc_RNA (1)...(19): siRNA sense strand
cagaauuccuucaagcaaa

SEQ ID NO: 1522379 - RNA, 19 nt, Homo sapiens
  misc_RNA (1)...(19): siRNA sense strand
ccuaaugaguccaauuuga

SEQ ID NO: 1522380 - RNA, 19 nt, Homo sapiens
  misc_RNA (1)...(19): siRNA sense strand
cagcagcucuucagaaucu

SEQ ID NO: 1522381 - RNA, 19 nt, Homo sapiens
  misc_RNA (1)...(19): siRNA sense strand
ccaaaguggcuucauauug

SEQ ID NO: 1522382 - RNA, 19 nt, Homo sapiens
  misc_RNA (1)...(19): siRNA sense strand
ggaaggugccugauguuga

SEQ ID NO: 1522383 - RNA, 19 nt, Homo sapiens
  misc_RNA (1)...(19): siRNA sense strand
gaaguacauuccaccuaau

SEQ ID NO: 1522384 - RNA, 19 nt, Homo sapiens
  misc_RNA (1)...(19): siRNA sense strand
gagaaaagcaaguuacaua

SEQ ID NO: 1522385 - RNA, 19 nt, Homo sapiens
  misc_RNA (1)...(19): siRNA sense strand
caaagccucuguguucuau

SEQ ID NO: 1522386 - RNA, 19 nt, Homo sapiens
  misc_RNA (1)...(19): siRNA sense strand
gagauuguucguuuaguaa

SEQ ID NO: 1522387 - RNA, 19 nt, Homo sapiens
  misc_RNA (1)...(19): siRNA sense strand
agaauuaccuuaucaaagc

SEQ ID NO: 1522388 - RNA, 19 nt, Homo sapiens
  misc_RNA (1)...(19): siRNA sense strand
gaugaaggaagaagauauu

SEQ ID NO: 1522389 - RNA, 19 nt, Homo sapiens
  misc_RNA (1)...(19): siRNA sense strand
gcaaacgguccaucaaaug

SEQ ID NO: 1522390 - RNA, 19 nt, Homo sapiens
  misc_RNA (1)...(19): siRNA sense strand
ccaauuugacccaguuaua

SEQ ID NO: 1522391 - RNA, 19 nt, Homo sapiens
  misc_RNA (1)...(19): siRNA sense strand
aaaggaaagucagaaagaa

SEQ ID NO: 1522392 - RNA, 19 nt, Homo sapiens
  misc_RNA (1)...(19): siRNA sense strand
uuuguuagcuguugccuuu

SEQ ID NO: 1522393 - RNA, 19 nt, Homo sapiens
  misc_RNA (1)...(19): siRNA sense strand
gugacaaacuuccaucuca

SEQ ID NO: 1522394 - RNA, 19 nt, Homo sapiens
  misc_RNA (1)...(19): siRNA sense strand
gaaguccugggauuugaua

SEQ ID NO: 1522395 - RNA, 19 nt, Homo sapiens
  misc_RNA (1)...(19): siRNA sense strand
gaaagaagaguugaaagag

SEQ ID NO: 1522396 - RNA, 19 nt, Homo sapiens
  misc_RNA (1)...(19): siRNA sense strand
ggucaugggauuucuuuga

SEQ ID NO: 1522397 - RNA, 19 nt, Homo sapiens
  misc_RNA (1)...(19): siRNA sense strand
ugacagcaguuaugauagu

SEQ ID NO: 1522398 - RNA, 19 nt, Homo sapiens
  misc_RNA (1)...(19): siRNA sense strand
guccugggauuugauauuu

SEQ ID NO: 1522399 - RNA, 19 nt, Homo sapiens
  misc_RNA (1)...(19): siRNA sense strand
gguaaagacccugauugua

SEQ ID NO: 1522400 - RNA, 19 nt, Homo sapiens
  misc_RNA (1)...(19): siRNA sense strand
acaugcaucugacaaacua

SEQ ID NO: 1522401 - RNA, 19 nt, Homo sapiens
  misc_RNA (1)...(19): siRNA sense strand
gaauggguacagagaagua

SEQ ID NO: 1522402 - RNA, 19 nt, Homo sapiens
  misc_RNA (1)...(19): siRNA sense strand
gaacugaucagaaaauaga

SEQ ID NO: 1522403 - RNA, 19 nt, Homo sapiens
  misc_RNA (1)...(19): siRNA sense strand
gacagcaguuaugauagua

SEQ ID NO: 1522404 - RNA, 19 nt, Homo sapiens
  misc_RNA (1)...(19): siRNA sense strand
ggaagaagauauuuuggau

SEQ ID NO: 1522405 - RNA, 19 nt, Homo sapiens
  misc_RNA (1)...(19): siRNA sense strand
ucuaacaagucagaccuua

SEQ ID NO: 1522406 - RNA, 19 nt, Homo sapiens
  misc_RNA (1)...(19): siRNA sense strand
gauaguagcagcagcucuu

SEQ ID NO: 1522407 - RNA, 19 nt, Homo sapiens
  misc_RNA (1)...(19): siRNA sense strand
ucaugggauuucuuugaua

SEQ ID NO: 1522408 - RNA, 19 nt, Homo sapiens
  misc_RNA (1)...(19): siRNA sense strand
caagucagaccuuauuugu

SEQ ID NO: 1522409 - RNA, 19 nt, Homo sapiens
  misc_RNA (1)...(19): siRNA sense strand
gcgaauggguacagagaag

SEQ ID NO: 1522410 - RNA, 19 nt, Homo sapiens
  misc_RNA (1)...(19): siRNA sense strand
gaaagucagaugcagaauc

SEQ ID NO: 1522411 - RNA, 19 nt, Homo sapiens
  misc_RNA (1)...(19): siRNA sense strand
gaaggaagaagauauuuug

SEQ ID NO: 1522412 - RNA, 19 nt, Homo sapiens
  misc_RNA (1)...(19): siRNA sense strand
gaaaauuuguuagcuguug

SEQ ID NO: 1522413 - RNA, 19 nt, Homo sapiens
  misc_RNA (1)...(19): siRNA sense strand
caucaaaugguuuacagaa

SEQ ID NO: 1522414 - RNA, 19 nt, Homo sapiens
  misc_RNA (1)...(19): siRNA sense strand
gggaugaaacugagaacaa

SEQ ID NO: 1522415 - RNA, 19 nt, Homo sapiens
  misc_RNA (1)...(19): siRNA sense strand
gagaaguacauuccaccua

SEQ ID NO: 1522416 - RNA, 19 nt, Homo sapiens
  misc_RNA (1)...(19): siRNA sense strand
uaggaaggauuucuuagca

SEQ ID NO: 1522417 - RNA, 19 nt, Homo sapiens
  misc_RNA (1)...(19): siRNA sense strand
caagggcuguggaacuguu

SEQ ID NO: 1522418 - RNA, 19 nt, Homo sapiens
  misc_RNA (1)...(19): siRNA sense strand
gcagugacagcaguuauga

SEQ ID NO: 1522419 - RNA, 19 nt, Homo sapiens
  misc_RNA (1)...(19): siRNA sense strand
ugagaguacugagauaaug

SEQ ID NO: 1522420 - RNA, 19 nt, Homo sapiens
  misc_RNA (1)...(19): siRNA sense strand
cauaaggaccagugacaaa

SEQ ID NO: 1522421 - RNA, 19 nt, Homo sapiens
  misc_RNA (1)...(19): siRNA sense strand
aagaaauggugacaaacuu

SEQ ID NO: 1522422 - RNA, 19 nt, Homo sapiens
  misc_RNA (1)...(19): siRNA sense strand
gcuuugaaguccugggauu

SEQ ID NO: 1522423 - RNA, 19 nt, Homo sapiens
  misc_RNA (1)...(19): siRNA sense strand
ucagucagcugcccucgau

SEQ ID NO: 1522424 - RNA, 19 nt, Homo sapiens
  misc_RNA (1)...(19): siRNA sense strand
gagaguacugagauaauga

SEQ ID NO: 1522425 - RNA, 19 nt, Homo sapiens
  misc_RNA (1)...(19): siRNA sense strand
uccugaagauaaagcauua

SEQ ID NO: 1522426 - RNA, 19 nt, Homo sapiens
  misc_RNA (1)...(19): siRNA sense strand
gaacaugaaaaucgacaua

SEQ ID NO: 1522427 - RNA, 19 nt, Homo sapiens
  misc_RNA (1)...(19): siRNA sense strand
uaucagaggaucaaccauu

SEQ ID NO: 1522428 - RNA, 19 nt, Homo sapiens
  misc_RNA (1)...(19): siRNA sense strand
aaacaaguauucguacagu

SEQ ID NO: 1522429 - RNA, 19 nt, Homo sapiens
  misc_RNA (1)...(19): siRNA sense strand
guacugagauaaugaaaag

SEQ ID NO: 1522430 - RNA, 19 nt, Homo sapiens
  misc_RNA (1)...(19): siRNA sense strand
cagcaaacgguccaucaaa

SEQ ID NO: 1522431 - RNA, 19 nt, Homo sapiens
  misc_RNA (1)...(19): siRNA sense strand
ggaucuuuccugcugaaua

SEQ ID NO: 1522432 - RNA, 19 nt, Homo sapiens
  misc_RNA (1)...(19): siRNA sense strand
gaacuguuucugugauuca

SEQ ID NO: 1522433 - RNA, 19 nt, Homo sapiens
  misc_RNA (1)...(19): siRNA sense strand
ucuaccaacucucaaguga

SEQ ID NO: 1522434 - RNA, 19 nt, Homo sapiens
  misc_RNA (1)...(19): siRNA sense strand
gcaucugccucacaguaau

SEQ ID NO: 1522435 - RNA, 19 nt, Homo sapiens
  misc_RNA (1)...(19): siRNA sense strand
ggaugaaggaagaagauau

SEQ ID NO: 1522436 - RNA, 19 nt, Homo sapiens
  misc_RNA (1)...(19): siRNA sense strand
ugaaaaggaugaaggaaga

SEQ ID NO: 1522437 - RNA, 19 nt, Homo sapiens
  misc_RNA (1)...(19): siRNA sense strand
cuuuggaacugaucagaaa

SEQ ID NO: 1522438 - RNA, 19 nt, Homo sapiens
  misc_RNA (1)...(19): siRNA sense strand
cauggcuucuggagauuaa

SEQ ID NO: 1522439 - RNA, 19 nt, Homo sapiens
  misc_RNA (1)...(19): siRNA sense strand
gaauuaccuuaucaaagca

SEQ ID NO: 1522440 - RNA, 19 nt, Homo sapiens
  misc_RNA (1)...(19): siRNA sense strand
caccuaaugaguccaauuu

SEQ ID NO: 1522441 - RNA, 19 nt, Homo sapiens
  misc_RNA (1)...(19): siRNA sense strand
ggaaagucagaaagaagaa

SEQ ID NO: 1522442 - RNA, 19 nt, Homo sapiens
  misc_RNA (1)...(19): siRNA sense strand
gaaagucagaaagaagaaa

SEQ ID NO: 1522443 - RNA, 19 nt, Homo sapiens
  misc_RNA (1)...(19): siRNA sense strand
aguuugagauuguucguuu

SEQ ID NO: 1522444 - RNA, 19 nt, Homo sapiens
  misc_RNA (1)...(19): siRNA sense strand
uccaaccacuacaaauuaa

SEQ ID NO: 1522445 - RNA, 19 nt, Homo sapiens
  misc_RNA (1)...(19): siRNA sense strand
cuccaaccacuacaaauua

SEQ ID NO: 1522446 - RNA, 19 nt, Homo sapiens
  misc_RNA (1)...(19): siRNA sense strand
ggaccaaagccucuguguu

SEQ ID NO: 1522447 - RNA, 19 nt, Homo sapiens
  misc_RNA (1)...(19): siRNA sense strand
agagagacucgcucaagua

SEQ ID NO: 1522448 - RNA, 19 nt, Homo sapiens
  misc_RNA (1)...(19): siRNA sense strand
gcucaaaggaggcucuaug

SEQ ID NO: 1522449 - RNA, 19 nt, Homo sapiens
  misc_RNA (1)...(19): siRNA sense strand
gccaagggcuguggaacug

SEQ ID NO: 1522450 - RNA, 19 nt, Homo sapiens
  misc_RNA (1)...(19): siRNA sense strand
ggaacuguuucugugauuc

SEQ ID NO: 1522451 - RNA, 19 nt, Homo sapiens
  misc_RNA (1)...(19): siRNA sense strand
guuugagauuguucguuua

SEQ ID NO: 1522452 - RNA, 19 nt, Homo sapiens
  misc_RNA (1)...(19): siRNA sense strand
ccaaagaacuuccuucaga

SEQ ID NO: 1522453 - RNA, 19 nt, Homo sapiens
  misc_RNA (1)...(19): siRNA sense strand
caacaacgaggaaauauuu

SEQ ID NO: 1522454 - RNA, 19 nt, Homo sapiens
  misc_RNA (1)...(19): siRNA sense strand
aggaugaucucaaguauaa

SEQ ID NO: 1522455 - RNA, 19 nt, Homo sapiens
  misc_RNA (1)...(19): siRNA sense strand
gcuacaaacacuucuauua

SEQ ID NO: 1522456 - RNA, 19 nt, Homo sapiens
  misc_RNA (1)...(19): siRNA sense strand
gcaggaugaucucaaguau

SEQ ID NO: 1522457 - RNA, 19 nt, Homo sapiens
  misc_RNA (1)...(19): siRNA sense strand
gaaggcggcugugcaguug

SEQ ID NO: 1522458 - RNA, 19 nt, Homo sapiens
  misc_RNA (1)...(19): siRNA sense strand
gaucaacaacgaggaaaua

SEQ ID NO: 1522459 - RNA, 19 nt, Homo sapiens
  misc_RNA (1)...(19): siRNA sense strand
ggaucaaccucaucuaugg

SEQ ID NO: 1522460 - RNA, 19 nt, Homo sapiens
  misc_RNA (1)...(19): siRNA sense strand
caaagaacuuccuucagau

SEQ ID NO: 1522461 - RNA, 19 nt, Homo sapiens
  misc_RNA (1)...(19): siRNA sense strand
gguguucccuucccaaaga

SEQ ID NO: 1522462 - RNA, 19 nt, Homo sapiens
  misc_RNA (1)...(19): siRNA sense strand
gaaaugacgagcaggaugu

SEQ ID NO: 1522463 - RNA, 19 nt, Homo sapiens
  misc_RNA (1)...(19): siRNA sense strand
guacaugaaccuucuuaug

SEQ ID NO: 1522464 - RNA, 19 nt, Homo sapiens
  misc_RNA (1)...(19): siRNA sense strand
ggagcuagagccuuugaaa

SEQ ID NO: 1522465 - RNA, 19 nt, Homo sapiens
  misc_RNA (1)...(19): siRNA sense strand
gaugaucucaaguauaaga

SEQ ID NO: 1522466 - RNA, 19 nt, Homo sapiens
  misc_RNA (1)...(19): siRNA sense strand
gagcaggaugugucacuaa

SEQ ID NO: 1522467 - RNA, 19 nt, Homo sapiens
  misc_RNA (1)...(19): siRNA sense strand
acaugaaccuucuuaugga

SEQ ID NO: 1522468 - RNA, 19 nt, Homo sapiens
  misc_RNA (1)...(19): siRNA sense strand
gacccaagaggaaauuuga

SEQ ID NO: 1522469 - RNA, 19 nt, Homo sapiens
  misc_RNA (1)...(19): siRNA sense strand
ggcaggaugaucucaagua

SEQ ID NO: 1522470 - RNA, 19 nt, Homo sapiens
  misc_RNA (1)...(19): siRNA sense strand
ucuauuacuuugucacaga

SEQ ID NO: 1522471 - RNA, 19 nt, Homo sapiens
  misc_RNA (1)...(19): siRNA sense strand
cuacaaacacuucuauuac

SEQ ID NO: 1522472 - RNA, 19 nt, Homo sapiens
  misc_RNA (1)...(19): siRNA sense strand
ugaaccuucuuauggauug

SEQ ID NO: 1522473 - RNA, 19 nt, Homo sapiens
  misc_RNA (1)...(19): siRNA sense strand
ugucaacaccugcuacaaa

SEQ ID NO: 1522474 - RNA, 19 nt, Homo sapiens
  misc_RNA (1)...(19): siRNA sense strand
acacuucuauuacuuuguc

SEQ ID NO: 1522475 - RNA, 19 nt, Homo sapiens
  misc_RNA (1)...(19): siRNA sense strand
gcucaggcaucccucaacu

SEQ ID NO: 1522476 - RNA, 19 nt, Homo sapiens
  misc_RNA (1)...(19): siRNA sense strand
uggauuggauugagguuca

SEQ ID NO: 1522477 - RNA, 19 nt, Homo sapiens
  misc_RNA (1)...(19): siRNA sense strand
ucaacaacgaggaaauauu

SEQ ID NO: 1522478 - RNA, 19 nt, Homo sapiens
  misc_RNA (1)...(19): siRNA sense strand
caggaugaucucaaguaua

SEQ ID NO: 1522479 - RNA, 19 nt, Homo sapiens
  misc_RNA (1)...(19): siRNA sense strand
cgagcaggaugugucacua

SEQ ID NO: 1522480 - RNA, 19 nt, Homo sapiens
  misc_RNA (1)...(19): siRNA sense strand
gucaacaccugcuacaaac

SEQ ID NO: 1522481 - RNA, 19 nt, Homo sapiens
  misc_RNA (1)...(19): siRNA sense strand
uacaugaaccuucuuaugg

SEQ ID NO: 1522482 - RNA, 19 nt, Homo sapiens
  misc_RNA (1)...(19): siRNA sense strand
caugaaccuucuuauggau

SEQ ID NO: 1522483 - RNA, 19 nt, Homo sapiens
  misc_RNA (1)...(19): siRNA sense strand
ugaaggcggcugugcaguu

SEQ ID NO: 1522484 - RNA, 19 nt, Homo sapiens
  misc_RNA (1)...(19): siRNA sense strand
gaccuguccugugauguca

SEQ ID NO: 1522485 - RNA, 19 nt, Homo sapiens
  misc_RNA (1)...(19): siRNA sense strand
gugcagaggcccaugucaa

SEQ ID NO: 1522486 - RNA, 19 nt, Homo sapiens
  misc_RNA (1)...(19): siRNA sense strand
caguacaugaaccuucuua

SEQ ID NO: 1522487 - RNA, 19 nt, Homo sapiens
  misc_RNA (1)...(19): siRNA sense strand
ucaaucggaucaaccucau

SEQ ID NO: 1522488 - RNA, 19 nt, Homo sapiens
  misc_RNA (1)...(19): siRNA sense strand
aagauccugugccgccuuu

SEQ ID NO: 1522489 - RNA, 19 nt, Homo sapiens
  misc_RNA (1)...(19): siRNA sense strand
gaagcagguauucaacaag

SEQ ID NO: 1522490 - RNA, 19 nt, Homo sapiens
  misc_RNA (1)...(19): siRNA sense strand
ggucuuuguccacgucuau

SEQ ID NO: 1522491 - RNA, 19 nt, Homo sapiens
  misc_RNA (1)...(19): siRNA sense strand
gcagaggcccaugucaaca

SEQ ID NO: 1522492 - RNA, 19 nt, Homo sapiens
  misc_RNA (1)...(19): siRNA sense strand
ucagaucaacaacgaggaa

SEQ ID NO: 1522493 - RNA, 19 nt, Homo sapiens
  misc_RNA (1)...(19): siRNA sense strand
cgacccaagaggaaauuug

SEQ ID NO: 1522494 - RNA, 19 nt, Homo sapiens
  misc_RNA (1)...(19): siRNA sense strand
cggaucaaccucaucuaug

SEQ ID NO: 1522495 - RNA, 19 nt, Homo sapiens
  misc_RNA (1)...(19): siRNA sense strand
aaagaacuuccuucagauc

SEQ ID NO: 1522496 - RNA, 19 nt, Homo sapiens
  misc_RNA (1)...(19): siRNA sense strand
agaacuuccuucagaucug

SEQ ID NO: 1522497 - RNA, 19 nt, Homo sapiens
  misc_RNA (1)...(19): siRNA sense strand
guggcaggaugaucucaag

SEQ ID NO: 1522498 - RNA, 19 nt, Homo sapiens
  misc_RNA (1)...(19): siRNA sense strand
gaaaggaucugcucaacuu

SEQ ID NO: 1522499 - RNA, 19 nt, Homo sapiens
  misc_RNA (1)...(19): siRNA sense strand
ccaaagagcuucaaaauaa

SEQ ID NO: 1522500 - RNA, 19 nt, Homo sapiens
  misc_RNA (1)...(19): siRNA sense strand
gauggaaucuucuucagua

SEQ ID NO: 1522501 - RNA, 19 nt, Homo sapiens
  misc_RNA (1)...(19): siRNA sense strand
caugaacacugaugucuua

SEQ ID NO: 1522502 - RNA, 19 nt, Homo sapiens
  misc_RNA (1)...(19): siRNA sense strand
guacacaaauucaaaguga

SEQ ID NO: 1522503 - RNA, 19 nt, Homo sapiens
  misc_RNA (1)...(19): siRNA sense strand
caaagaguauuacagcaua

SEQ ID NO: 1522504 - RNA, 19 nt, Homo sapiens
  misc_RNA (1)...(19): siRNA sense strand
gcaagccauucuucaaaua

SEQ ID NO: 1522505 - RNA, 19 nt, Homo sapiens
  misc_RNA (1)...(19): siRNA sense strand
gaacacugaugucuuacaa

SEQ ID NO: 1522506 - RNA, 19 nt, Homo sapiens
  misc_RNA (1)...(19): siRNA sense strand
accaagagcuuuauacaua

SEQ ID NO: 1522507 - RNA, 19 nt, Homo sapiens
  misc_RNA (1)...(19): siRNA sense strand
cgacaaugcucaagaguau

SEQ ID NO: 1522508 - RNA, 19 nt, Homo sapiens
  misc_RNA (1)...(19): siRNA sense strand
ccagaagacugcuauuauu

SEQ ID NO: 1522509 - RNA, 19 nt, Homo sapiens
  misc_RNA (1)...(19): siRNA sense strand
caaaggaugugauuagugu

SEQ ID NO: 1522510 - RNA, 19 nt, Homo sapiens
  misc_RNA (1)...(19): siRNA sense strand
aaacuuaucugcagcaaau

SEQ ID NO: 1522511 - RNA, 19 nt, Homo sapiens
  misc_RNA (1)...(19): siRNA sense strand
gaacagcuuucaauuugug

SEQ ID NO: 1522512 - RNA, 19 nt, Homo sapiens
  misc_RNA (1)...(19): siRNA sense strand
cgaaacagauugagggaaa

SEQ ID NO: 1522513 - RNA, 19 nt, Homo sapiens
  misc_RNA (1)...(19): siRNA sense strand
aagaacagcuuucaauuug

SEQ ID NO: 1522514 - RNA, 19 nt, Homo sapiens
  misc_RNA (1)...(19): siRNA sense strand
gcucaagaguauugucaua

SEQ ID NO: 1522515 - RNA, 19 nt, Homo sapiens
  misc_RNA (1)...(19): siRNA sense strand
ccaaaccacuuauaucugu

SEQ ID NO: 1522516 - RNA, 19 nt, Homo sapiens
  misc_RNA (1)...(19): siRNA sense strand
cagcagaauucaagaaaga

SEQ ID NO: 1522517 - RNA, 19 nt, Homo sapiens
  misc_RNA (1)...(19): siRNA sense strand
ggaagagagucauuugcaa

SEQ ID NO: 1522518 - RNA, 19 nt, Homo sapiens
  misc_RNA (1)...(19): siRNA sense strand
ccacggaacuucuaauugg

SEQ ID NO: 1522519 - RNA, 19 nt, Homo sapiens
  misc_RNA (1)...(19): siRNA sense strand
gaaaugagagcaaaagaua

SEQ ID NO: 1522520 - RNA, 19 nt, Homo sapiens
  misc_RNA (1)...(19): siRNA sense strand
gauacaguuucuucaguaa

SEQ ID NO: 1522521 - RNA, 19 nt, Homo sapiens
  misc_RNA (1)...(19): siRNA sense strand
gcaagaaacauauaucaca

SEQ ID NO: 1522522 - RNA, 19 nt, Homo sapiens
  misc_RNA (1)...(19): siRNA sense strand
gauguggcauucuguuauu

SEQ ID NO: 1522523 - RNA, 19 nt, Homo sapiens
  misc_RNA (1)...(19): siRNA sense strand
aaagauacgacuccaguua

SEQ ID NO: 1522524 - RNA, 19 nt, Homo sapiens
  misc_RNA (1)...(19): siRNA sense strand
gaucguacauuacuaucug

SEQ ID NO: 1522525 - RNA, 19 nt, Homo sapiens
  misc_RNA (1)...(19): siRNA sense strand
gaacugcugugagaacugu

SEQ ID NO: 1522526 - RNA, 19 nt, Homo sapiens
  misc_RNA (1)...(19): siRNA sense strand
cgaaacauuuauaggcuaa

SEQ ID NO: 1522527 - RNA, 19 nt, Homo sapiens
  misc_RNA (1)...(19): siRNA sense strand
caagaaagaagaaccaaga

SEQ ID NO: 1522528 - RNA, 19 nt, Homo sapiens
  misc_RNA (1)...(19): siRNA sense strand
uaugauagcaccacuaauu

SEQ ID NO: 1522529 - RNA, 19 nt, Homo sapiens
  misc_RNA (1)...(19): siRNA sense strand
ggaaucuucuucaguaagu

SEQ ID NO: 1522530 - RNA, 19 nt, Homo sapiens
  misc_RNA (1)...(19): siRNA sense strand
gcccucagaugaaaugauu

SEQ ID NO: 1522531 - RNA, 19 nt, Homo sapiens
  misc_RNA (1)...(19): siRNA sense strand
uaccaugcaucacugaaua

SEQ ID NO: 1522532 - RNA, 19 nt, Homo sapiens
  misc_RNA (1)...(19): siRNA sense strand
gaaguuauagcaagccauu

SEQ ID NO: 1522533 - RNA, 19 nt, Homo sapiens
  misc_RNA (1)...(19): siRNA sense strand
guaaugcuguugcuaguag

SEQ ID NO: 1522534 - RNA, 19 nt, Homo sapiens
  misc_RNA (1)...(19): siRNA sense strand
cauaaucuuugcaguaaug

SEQ ID NO: 1522535 - RNA, 19 nt, Homo sapiens
  misc_RNA (1)...(19): siRNA sense strand
agagagugcuucacaguug

SEQ ID NO: 1522536 - RNA, 19 nt, Homo sapiens
  misc_RNA (1)...(19): siRNA sense strand
gaaccaagagcuuuauaca

SEQ ID NO: 1522537 - RNA, 19 nt, Homo sapiens
  misc_RNA (1)...(19): siRNA sense strand
caucaaaggcuaucuuaau

SEQ ID NO: 1522538 - RNA, 19 nt, Homo sapiens
  misc_RNA (1)...(19): siRNA sense strand
cagccuaucuugucuuuca

SEQ ID NO: 1522539 - RNA, 19 nt, Homo sapiens
  misc_RNA (1)...(19): siRNA sense strand
ccacagcuauucagguuuc

SEQ ID NO: 1522540 - RNA, 19 nt, Homo sapiens
  misc_RNA (1)...(19): siRNA sense strand
gauagcaccacuaauuuga

SEQ ID NO: 1522541 - RNA, 19 nt, Homo sapiens
  misc_RNA (1)...(19): siRNA sense strand
aaagcaguguuuacccuua

SEQ ID NO: 1522542 - RNA, 19 nt, Homo sapiens
  misc_RNA (1)...(19): siRNA sense strand
guucaccaguuccuucuaa

SEQ ID NO: 1522543 - RNA, 19 nt, Homo sapiens
  misc_RNA (1)...(19): siRNA sense strand
gacagucucauuacuuuaa

SEQ ID NO: 1522544 - RNA, 19 nt, Homo sapiens
  misc_RNA (1)...(19): siRNA sense strand
agauacgacuccaguuaua

SEQ ID NO: 1522545 - RNA, 19 nt, Homo sapiens
  misc_RNA (1)...(19): siRNA sense strand
ccacauacuucagauggaa

SEQ ID NO: 1522546 - RNA, 19 nt, Homo sapiens
  misc_RNA (1)...(19): siRNA sense strand
gaaggacagucucauuacu

SEQ ID NO: 1522547 - RNA, 19 nt, Homo sapiens
  misc_RNA (1)...(19): siRNA sense strand
gcaauugguuccaguacag

SEQ ID NO: 1522548 - RNA, 19 nt, Homo sapiens
  misc_RNA (1)...(19): siRNA sense strand
gagagugcuucacaguuga

SEQ ID NO: 1522549 - RNA, 19 nt, Homo sapiens
  misc_RNA (1)...(19): siRNA sense strand
guucaacacuauuuguaug

SEQ ID NO: 1522550 - RNA, 19 nt, Homo sapiens
  misc_RNA (1)...(19): siRNA sense strand
ccagaacucaggagaauga

SEQ ID NO: 1522551 - RNA, 19 nt, Homo sapiens
  misc_RNA (1)...(19): siRNA sense strand
gcaaauuggaguugauaug

SEQ ID NO: 1522552 - RNA, 19 nt, Homo sapiens
  misc_RNA (1)...(19): siRNA sense strand
agauacaguuucuucagua

SEQ ID NO: 1522553 - RNA, 19 nt, Homo sapiens
  misc_RNA (1)...(19): siRNA sense strand
ggacagucucauuacuuua

SEQ ID NO: 1522554 - RNA, 19 nt, Homo sapiens
  misc_RNA (1)...(19): siRNA sense strand
uaaaauagcagcagaauuc

SEQ ID NO: 1522555 - RNA, 19 nt, Homo sapiens
  misc_RNA (1)...(19): siRNA sense strand
acugaaauguugcaggaua

SEQ ID NO: 1522556 - RNA, 19 nt, Homo sapiens
  misc_RNA (1)...(19): siRNA sense strand
ucuaagaguucaccuagug

SEQ ID NO: 1522557 - RNA, 19 nt, Homo sapiens
  misc_RNA (1)...(19): siRNA sense strand
ccacuuauaucuguuccuu

SEQ ID NO: 1522558 - RNA, 19 nt, Homo sapiens
  misc_RNA (1)...(19): siRNA sense strand
ugcaggauauugugaauga

SEQ ID NO: 1522559 - RNA, 19 nt, Homo sapiens
  misc_RNA (1)...(19): siRNA sense strand
caucaucuggcgugaauaa

SEQ ID NO: 1522560 - RNA, 19 nt, Homo sapiens
  misc_RNA (1)...(19): siRNA sense strand
gaacuccgaagugcucuaa

SEQ ID NO: 1522561 - RNA, 19 nt, Homo sapiens
  misc_RNA (1)...(19): siRNA sense strand
gaagacugcuauuauucag

SEQ ID NO: 1522562 - RNA, 19 nt, Homo sapiens
  misc_RNA (1)...(19): siRNA sense strand
guacauuacuaucugugau

SEQ ID NO: 1522563 - RNA, 19 nt, Homo sapiens
  misc_RNA (1)...(19): siRNA sense strand
agaagaaccaagagcuuua

SEQ ID NO: 1522564 - RNA, 19 nt, Homo sapiens
  misc_RNA (1)...(19): siRNA sense strand
gcugcuagaugaaauuaag

SEQ ID NO: 1522565 - RNA, 19 nt, Homo sapiens
  misc_RNA (1)...(19): siRNA sense strand
gaugagacaaucaauagug

SEQ ID NO: 1522566 - RNA, 19 nt, Homo sapiens
  misc_RNA (1)...(19): siRNA sense strand
caguaaagcuaagauggaa

SEQ ID NO: 1522567 - RNA, 19 nt, Homo sapiens
  misc_RNA (1)...(19): siRNA sense strand
uggaaggacagucucauua

SEQ ID NO: 1522568 - RNA, 19 nt, Homo sapiens
  misc_RNA (1)...(19): siRNA sense strand
caaaguuucacucugcuaa

SEQ ID NO: 1522569 - RNA, 19 nt, Homo sapiens
  misc_RNA (1)...(19): siRNA sense strand
augcaucacugaauacauu

SEQ ID NO: 1522570 - RNA, 19 nt, Homo sapiens
  misc_RNA (1)...(19): siRNA sense strand
gaaacagauugagggaaau

SEQ ID NO: 1522571 - RNA, 19 nt, Homo sapiens
  misc_RNA (1)...(19): siRNA sense strand
gccagaagacugcuauuau

SEQ ID NO: 1522572 - RNA, 19 nt, Homo sapiens
  misc_RNA (1)...(19): siRNA sense strand
ggcaucaucuggcgugaau

SEQ ID NO: 1522573 - RNA, 19 nt, Homo sapiens
  misc_RNA (1)...(19): siRNA sense strand
uaucgagugcugaguguua

SEQ ID NO: 1522574 - RNA, 19 nt, Homo sapiens
  misc_RNA (1)...(19): siRNA sense strand
cauugaagcccucagauga

SEQ ID NO: 1522575 - RNA, 19 nt, Homo sapiens
  misc_RNA (1)...(19): siRNA sense strand
gcagcaaauuggaguugau

SEQ ID NO: 1522576 - RNA, 19 nt, Homo sapiens
  misc_RNA (1)...(19): siRNA sense strand
gcagcagaauucaagaaag

SEQ ID NO: 1522577 - RNA, 19 nt, Homo sapiens
  misc_RNA (1)...(19): siRNA sense strand
aggacagucucauuacuuu

SEQ ID NO: 1522578 - RNA, 19 nt, Homo sapiens
  misc_RNA (1)...(19): siRNA sense strand
ugacagucuuccagagauu

SEQ ID NO: 1522579 - RNA, 19 nt, Homo sapiens
  misc_RNA (1)...(19): siRNA sense strand
caagagcuuuauacauaca

SEQ ID NO: 1522580 - RNA, 19 nt, Homo sapiens
  misc_RNA (1)...(19): siRNA sense strand
gaagaaccaagagcuuuau

SEQ ID NO: 1522581 - RNA, 19 nt, Homo sapiens
  misc_RNA (1)...(19): siRNA sense strand
aaucaauagugccaugaaa

SEQ ID NO: 1522582 - RNA, 19 nt, Homo sapiens
  misc_RNA (1)...(19): siRNA sense strand
cagugacgauuuaucuauu

SEQ ID NO: 1522583 - RNA, 19 nt, Homo sapiens
  misc_RNA (1)...(19): siRNA sense strand
gauacgacuccaguuauaa

SEQ ID NO: 1522584 - RNA, 19 nt, Homo sapiens
  misc_RNA (1)...(19): siRNA sense strand
gaacuguggcacuuacugu

SEQ ID NO: 1522585 - RNA, 19 nt, Homo sapiens
  misc_RNA (1)...(19): siRNA sense strand
cuuaugaauucacaaguug

SEQ ID NO: 1522586 - RNA, 19 nt, Homo sapiens
  misc_RNA (1)...(19): siRNA sense strand
cauuucgacuuaugaauuc

SEQ ID NO: 1522587 - RNA, 19 nt, Homo sapiens
  misc_RNA (1)...(19): siRNA sense strand
gaacucaggagaaugaacu

SEQ ID NO: 1522588 - RNA, 19 nt, Homo sapiens
  misc_RNA (1)...(19): siRNA sense strand
gaaagauacgacuccaguu

SEQ ID NO: 1522589 - RNA, 19 nt, Homo sapiens
  misc_RNA (1)...(19): siRNA sense strand
gcucuagucugucccacau

SEQ ID NO: 1522590 - RNA, 19 nt, Homo sapiens
  misc_RNA (1)...(19): siRNA sense strand
gaaaugauugagacuacga

SEQ ID NO: 1522591 - RNA, 19 nt, Homo sapiens
  misc_RNA (1)...(19): siRNA sense strand
uagcaagccauucuucaaa

SEQ ID NO: 1522592 - RNA, 19 nt, Homo sapiens
  misc_RNA (1)...(19): siRNA sense strand
ccaagagcuuuauacauac

SEQ ID NO: 1522593 - RNA, 19 nt, Homo sapiens
  misc_RNA (1)...(19): siRNA sense strand
ucaauagugccaugaaaga

SEQ ID NO: 1522594 - RNA, 19 nt, Homo sapiens
  misc_RNA (1)...(19): siRNA sense strand
gaaauguugcaggauauug

SEQ ID NO: 1522595 - RNA, 19 nt, Homo sapiens
  misc_RNA (1)...(19): siRNA sense strand
guccagaacucaggagaau

SEQ ID NO: 1522596 - RNA, 19 nt, Homo sapiens
  misc_RNA (1)...(19): siRNA sense strand
caacagcagaugucauugu

SEQ ID NO: 1522597 - RNA, 19 nt, Homo sapiens
  misc_RNA (1)...(19): siRNA sense strand
cgacuccaguuauaagcaa

SEQ ID NO: 1522598 - RNA, 19 nt, Homo sapiens
  misc_RNA (1)...(19): siRNA sense strand
gauaaagaauguugccuua

SEQ ID NO: 1522599 - RNA, 19 nt, Homo sapiens
  misc_RNA (1)...(19): siRNA sense strand
caacugaccuagacaaauu

SEQ ID NO: 1522600 - RNA, 19 nt, Homo sapiens
  misc_RNA (1)...(19): siRNA sense strand
gaagaagaauuaucuggaa

SEQ ID NO: 1522601 - RNA, 19 nt, Homo sapiens
  misc_RNA (1)...(19): siRNA sense strand
ggagaaugcuguugaaaga

SEQ ID NO: 1522602 - RNA, 19 nt, Homo sapiens
  misc_RNA (1)...(19): siRNA sense strand
ggaaugcucaucaaauuua

SEQ ID NO: 1522603 - RNA, 19 nt, Homo sapiens
  misc_RNA (1)...(19): siRNA sense strand
ugaauaaugucacgacuuu

SEQ ID NO: 1522604 - RNA, 19 nt, Homo sapiens
  misc_RNA (1)...(19): siRNA sense strand
acacagagauuuguaguaa

SEQ ID NO: 1522605 - RNA, 19 nt, Homo sapiens
  misc_RNA (1)...(19): siRNA sense strand
caagauuccagaucaauua

SEQ ID NO: 1522606 - RNA, 19 nt, Homo sapiens
  misc_RNA (1)...(19): siRNA sense strand
caggaaugcucaucaaauu

SEQ ID NO: 1522607 - RNA, 19 nt, Homo sapiens
  misc_RNA (1)...(19): siRNA sense strand
ggacgaggcgggaauauug

SEQ ID NO: 1522608 - RNA, 19 nt, Homo sapiens
  misc_RNA (1)...(19): siRNA sense strand
gauguuaaaugcguuacua

SEQ ID NO: 1522609 - RNA, 19 nt, Homo sapiens
  misc_RNA (1)...(19): siRNA sense strand
caacagaaaugaggugugu

SEQ ID NO: 1522610 - RNA, 19 nt, Homo sapiens
  misc_RNA (1)...(19): siRNA sense strand
uaaaauuccugcacaguua

SEQ ID NO: 1522611 - RNA, 19 nt, Homo sapiens
  misc_RNA (1)...(19): siRNA sense strand
uggcauuucuucacaauuu

SEQ ID NO: 1522612 - RNA, 19 nt, Homo sapiens
  misc_RNA (1)...(19): siRNA sense strand
gaguaugacugcaacagaa

SEQ ID NO: 1522613 - RNA, 19 nt, Homo sapiens
  misc_RNA (1)...(19): siRNA sense strand
gaaauaauacguguagaug

SEQ ID NO: 1522614 - RNA, 19 nt, Homo sapiens
  misc_RNA (1)...(19): siRNA sense strand
guggagugcugaacaauga

SEQ ID NO: 1522615 - RNA, 19 nt, Homo sapiens
  misc_RNA (1)...(19): siRNA sense strand
guacucagcucagggagaa

SEQ ID NO: 1522616 - RNA, 19 nt, Homo sapiens
  misc_RNA (1)...(19): siRNA sense strand
acaaggagaucccauuaug

SEQ ID NO: 1522617 - RNA, 19 nt, Homo sapiens
  misc_RNA (1)...(19): siRNA sense strand
ggaagcaacugaccuagac

SEQ ID NO: 1522618 - RNA, 19 nt, Homo sapiens
  misc_RNA (1)...(19): siRNA sense strand
ggaaauuuaugccaacucu

SEQ ID NO: 1522619 - RNA, 19 nt, Homo sapiens
  misc_RNA (1)...(19): siRNA sense strand
gaagaauuaucuggaaauc

SEQ ID NO: 1522620 - RNA, 19 nt, Homo sapiens
  misc_RNA (1)...(19): siRNA sense strand
aaacaaggagaucccauua

SEQ ID NO: 1522621 - RNA, 19 nt, Homo sapiens
  misc_RNA (1)...(19): siRNA sense strand
gauaaugacacagagauuu

SEQ ID NO: 1522622 - RNA, 19 nt, Homo sapiens
  misc_RNA (1)...(19): siRNA sense strand
ucaacaggaugaauaaugu

SEQ ID NO: 1522623 - RNA, 19 nt, Homo sapiens
  misc_RNA (1)...(19): siRNA sense strand
ggacugguguuccuccaau

SEQ ID NO: 1522624 - RNA, 19 nt, Homo sapiens
  misc_RNA (1)...(19): siRNA sense strand
caagaacgagaugguauua

SEQ ID NO: 1522625 - RNA, 19 nt, Homo sapiens
  misc_RNA (1)...(19): siRNA sense strand
gagaugguauuaucaaugc

SEQ ID NO: 1522626 - RNA, 19 nt, Homo sapiens
  misc_RNA (1)...(19): siRNA sense strand
cagcacaucuacucauuca

SEQ ID NO: 1522627 - RNA, 19 nt, Homo sapiens
  misc_RNA (1)...(19): siRNA sense strand
gacaaauucaucaccaaua

SEQ ID NO: 1522628 - RNA, 19 nt, Homo sapiens
  misc_RNA (1)...(19): siRNA sense strand
uaaagaauguugccuuagg

SEQ ID NO: 1522629 - RNA, 19 nt, Homo sapiens
  misc_RNA (1)...(19): siRNA sense strand
gaagucgggauuaaugaaa

SEQ ID NO: 1522630 - RNA, 19 nt, Homo sapiens
  misc_RNA (1)...(19): siRNA sense strand
gaacgagaugguauuauca

SEQ ID NO: 1522631 - RNA, 19 nt, Homo sapiens
  misc_RNA (1)...(19): siRNA sense strand
gcacaucuacucauucaag

SEQ ID NO: 1522632 - RNA, 19 nt, Homo sapiens
  misc_RNA (1)...(19): siRNA sense strand
cuaaauaucaacaggauga

SEQ ID NO: 1522633 - RNA, 19 nt, Homo sapiens
  misc_RNA (1)...(19): siRNA sense strand
acucuucucugacccauaa

SEQ ID NO: 1522634 - RNA, 19 nt, Homo sapiens
  misc_RNA (1)...(19): siRNA sense strand
gcgaagguguuggaaguga

SEQ ID NO: 1522635 - RNA, 19 nt, Homo sapiens
  misc_RNA (1)...(19): siRNA sense strand
gugcauccguccaguuuau

SEQ ID NO: 1522636 - RNA, 19 nt, Homo sapiens
  misc_RNA (1)...(19): siRNA sense strand
gauacucgguguagagaca

SEQ ID NO: 1522637 - RNA, 19 nt, Homo sapiens
  misc_RNA (1)...(19): siRNA sense strand
gaccaggaaugcucaucaa

SEQ ID NO: 1522638 - RNA, 19 nt, Homo sapiens
  misc_RNA (1)...(19): siRNA sense strand
gagaucccauuaugacugu

SEQ ID NO: 1522639 - RNA, 19 nt, Homo sapiens
  misc_RNA (1)...(19): siRNA sense strand
caauacagaaacuccuuua

SEQ ID NO: 1522640 - RNA, 19 nt, Homo sapiens
  misc_RNA (1)...(19): siRNA sense strand
acacacccuuccuugguua

SEQ ID NO: 1522641 - RNA, 19 nt, Homo sapiens
  misc_RNA (1)...(19): siRNA sense strand
acaagguucuccucaguga

SEQ ID NO: 1522642 - RNA, 19 nt, Homo sapiens
  misc_RNA (1)...(19): siRNA sense strand
cgauuacgcugaucuuagu

SEQ ID NO: 1522643 - RNA, 19 nt, Homo sapiens
  misc_RNA (1)...(19): siRNA sense strand
gauuaaugcccaccagaaa

SEQ ID NO: 1522644 - RNA, 19 nt, Homo sapiens
  misc_RNA (1)...(19): siRNA sense strand
gaaacuccuuuaaauaacg

SEQ ID NO: 1522645 - RNA, 19 nt, Homo sapiens
  misc_RNA (1)...(19): siRNA sense strand
agaacgagaugguauuauc

SEQ ID NO: 1522646 - RNA, 19 nt, Homo sapiens
  misc_RNA (1)...(19): siRNA sense strand
ggaacuauaccaagaacga

SEQ ID NO: 1522647 - RNA, 19 nt, Homo sapiens
  misc_RNA (1)...(19): siRNA sense strand
caaacaaggagaucccauu

SEQ ID NO: 1522648 - RNA, 19 nt, Homo sapiens
  misc_RNA (1)...(19): siRNA sense strand
gcauccguccaguuuauua

SEQ ID NO: 1522649 - RNA, 19 nt, Homo sapiens
  misc_RNA (1)...(19): siRNA sense strand
agaaagggauaaugacaca

SEQ ID NO: 1522650 - RNA, 19 nt, Homo sapiens
  misc_RNA (1)...(19): siRNA sense strand
gugcgaagguguuggaagu

SEQ ID NO: 1522651 - RNA, 19 nt, Homo sapiens
  misc_RNA (1)...(19): siRNA sense strand
ugacaagauuccagaucaa

SEQ ID NO: 1522652 - RNA, 19 nt, Homo sapiens
  misc_RNA (1)...(19): siRNA sense strand
ggagcugcauucucagugu

SEQ ID NO: 1522653 - RNA, 19 nt, Homo sapiens
  misc_RNA (1)...(19): siRNA sense strand
gauuccagaucaauuauac

SEQ ID NO: 1522654 - RNA, 19 nt, Homo sapiens
  misc_RNA (1)...(19): siRNA sense strand
cauuaugacuguaaagaag

SEQ ID NO: 1522655 - RNA, 19 nt, Homo sapiens
  misc_RNA (1)...(19): siRNA sense strand
caacuccgauuacgcugau

SEQ ID NO: 1522656 - RNA, 19 nt, Homo sapiens
  misc_RNA (1)...(19): siRNA sense strand
uguccgagcucuaaauauc

SEQ ID NO: 1522657 - RNA, 19 nt, Homo sapiens
  misc_RNA (1)...(19): siRNA sense strand
aaagaauguugccuuagga

SEQ ID NO: 1522658 - RNA, 19 nt, Homo sapiens
  misc_RNA (1)...(19): siRNA sense strand
gcgaagauaaagaauguug

SEQ ID NO: 1522659 - RNA, 19 nt, Homo sapiens
  misc_RNA (1)...(19): siRNA sense strand
ucaaugcgaagauaaagaa

SEQ ID NO: 1522660 - RNA, 19 nt, Homo sapiens
  misc_RNA (1)...(19): siRNA sense strand
caaggagaucccauuauga

SEQ ID NO: 1522661 - RNA, 19 nt, Homo sapiens
  misc_RNA (1)...(19): siRNA sense strand
uaugcaaagccuauaguua

SEQ ID NO: 1522662 - RNA, 19 nt, Homo sapiens
  misc_RNA (1)...(19): siRNA sense strand
ugagaggcaacuccgauua

SEQ ID NO: 1522663 - RNA, 19 nt, Homo sapiens
  misc_RNA (1)...(19): siRNA sense strand
caacacacccuuccuuggu

SEQ ID NO: 1522664 - RNA, 19 nt, Homo sapiens
  misc_RNA (1)...(19): siRNA sense strand
caccagaaagggauaauga

SEQ ID NO: 1522665 - RNA, 19 nt, Homo sapiens
  misc_RNA (1)...(19): siRNA sense strand
acaaauucaucaccaauac

SEQ ID NO: 1522666 - RNA, 19 nt, Homo sapiens
  misc_RNA (1)...(19): siRNA sense strand
caccaaaagugaucuauga

SEQ ID NO: 1522667 - RNA, 19 nt, Homo sapiens
  misc_RNA (1)...(19): siRNA sense strand
uaugccaacucuucucuga

SEQ ID NO: 1522668 - RNA, 19 nt, Homo sapiens
  misc_RNA (1)...(19): siRNA sense strand
agugauggcuggcucgaaa

SEQ ID NO: 1522669 - RNA, 19 nt, Homo sapiens
  misc_RNA (1)...(19): siRNA sense strand
gcccuuguccuuguaauuu

SEQ ID NO: 1522670 - RNA, 19 nt, Homo sapiens
  misc_RNA (1)...(19): siRNA sense strand
ccaaugagacagauuccuu

SEQ ID NO: 1522671 - RNA, 19 nt, Homo sapiens
  misc_RNA (1)...(19): siRNA sense strand
agugugggcuuaccuguga

SEQ ID NO: 1522672 - RNA, 19 nt, Homo sapiens
  misc_RNA (1)...(19): siRNA sense strand
cgaaauaauacguguagau

SEQ ID NO: 1522673 - RNA, 19 nt, Homo sapiens
  misc_RNA (1)...(19): siRNA sense strand
gucacgacuuuacaucuuu

SEQ ID NO: 1522674 - RNA, 19 nt, Homo sapiens
  misc_RNA (1)...(19): siRNA sense strand
ucucauaauucauccuguu

SEQ ID NO: 1522675 - RNA, 19 nt, Homo sapiens
  misc_RNA (1)...(19): siRNA sense strand
ggauaaugacacagagauu

SEQ ID NO: 1522676 - RNA, 19 nt, Homo sapiens
  misc_RNA (1)...(19): siRNA sense strand
agacaagguucuccucagu

SEQ ID NO: 1522677 - RNA, 19 nt, Homo sapiens
  misc_RNA (1)...(19): siRNA sense strand
gcaacuuucaaacccauuu

SEQ ID NO: 1522678 - RNA, 19 nt, Homo sapiens
  misc_RNA (1)...(19): siRNA sense strand
ccaguggcauuucuucaca

SEQ ID NO: 1522679 - RNA, 19 nt, Homo sapiens
  misc_RNA (1)...(19): siRNA sense strand
gaauaugcaaagccuauag

SEQ ID NO: 1522680 - RNA, 19 nt, Homo sapiens
  misc_RNA (1)...(19): siRNA sense strand
ggagauacucgguguagag

SEQ ID NO: 1522681 - RNA, 19 nt, Homo sapiens
  misc_RNA (1)...(19): siRNA sense strand
gaauaaugucacgacuuua

SEQ ID NO: 1522682 - RNA, 19 nt, Homo sapiens
  misc_RNA (1)...(19): siRNA sense strand
ccaagaacgagaugguauu

SEQ ID NO: 1522683 - RNA, 19 nt, Homo sapiens
  misc_RNA (1)...(19): siRNA sense strand
gcaggacgaggcgggaaua

SEQ ID NO: 1522684 - RNA, 19 nt, Homo sapiens
  misc_RNA (1)...(19): siRNA sense strand
cccuuguccuuguaauuua

SEQ ID NO: 1522685 - RNA, 19 nt, Homo sapiens
  misc_RNA (1)...(19): siRNA sense strand
cagaauaugcaaagccuau

SEQ ID NO: 1522686 - RNA, 19 nt, Homo sapiens
  misc_RNA (1)...(19): siRNA sense strand
auccauggacucaguauua

SEQ ID NO: 1522687 - RNA, 19 nt, Homo sapiens
  misc_RNA (1)...(19): siRNA sense strand
ggccgcagcuucuauaucc

SEQ ID NO: 1522688 - RNA, 19 nt, Homo sapiens
  misc_RNA (1)...(19): siRNA sense strand
cugacaagauuccagauca

SEQ ID NO: 1522689 - RNA, 19 nt, Homo sapiens
  misc_RNA (1)...(19): siRNA sense strand
gacuggagcgugacuguga

SEQ ID NO: 1522690 - RNA, 19 nt, Homo sapiens
  misc_RNA (1)...(19): siRNA sense strand
gaaugcuguugaaagacuu

SEQ ID NO: 1522691 - RNA, 19 nt, Homo sapiens
  misc_RNA (1)...(19): siRNA sense strand
cagggagaaugcuguugaa

SEQ ID NO: 1522692 - RNA, 19 nt, Homo sapiens
  misc_RNA (1)...(19): siRNA sense strand
guacaucagcaacuuucaa

SEQ ID NO: 1522693 - RNA, 19 nt, Homo sapiens
  misc_RNA (1)...(19): siRNA sense strand
ugucacgacuuuacaucuu

SEQ ID NO: 1522694 - RNA, 19 nt, Homo sapiens
  misc_RNA (1)...(19): siRNA sense strand
ggaauaauaauaccaucag

SEQ ID NO: 1522695 - RNA, 19 nt, Homo sapiens
  misc_RNA (1)...(19): siRNA sense strand
gcaacugaccuagacaaau

SEQ ID NO: 1522696 - RNA, 19 nt, Homo sapiens
  misc_RNA (1)...(19): siRNA sense strand
ccaggaaugcucaucaaau

SEQ ID NO: 1522697 - RNA, 19 nt, Homo sapiens
  misc_RNA (1)...(19): siRNA sense strand
agacagauuccuucucaga

SEQ ID NO: 1522698 - RNA, 19 nt, Homo sapiens
  misc_RNA (1)...(19): siRNA sense strand
ggagaaacauguagauuug

SEQ ID NO: 1522699 - RNA, 19 nt, Homo sapiens
  misc_RNA (1)...(19): siRNA sense strand
gaacuacaaggaucaauua

SEQ ID NO: 1522700 - RNA, 19 nt, Homo sapiens
  misc_RNA (1)...(19): siRNA sense strand
uaaagaagcucagaaugaa

SEQ ID NO: 1522701 - RNA, 19 nt, Homo sapiens
  misc_RNA (1)...(19): siRNA sense strand
gcagagaccugaccuugga

SEQ ID NO: 1522702 - RNA, 19 nt, Homo sapiens
  misc_RNA (1)...(19): siRNA sense strand
aaacggagcugaugaugga

SEQ ID NO: 1522703 - RNA, 19 nt, Homo sapiens
  misc_RNA (1)...(19): siRNA sense strand
gaacuugaaugccugaauc

SEQ ID NO: 1522704 - RNA, 19 nt, Homo sapiens
  misc_RNA (1)...(19): siRNA sense strand
gaaaugcuccuccaagaga

SEQ ID NO: 1522705 - RNA, 19 nt, Homo sapiens
  misc_RNA (1)...(19): siRNA sense strand
caaagugagucuugaggaa

SEQ ID NO: 1522706 - RNA, 19 nt, Homo sapiens
  misc_RNA (1)...(19): siRNA sense strand
ggaaauugcggcacugaaa

SEQ ID NO: 1522707 - RNA, 19 nt, Homo sapiens
  misc_RNA (1)...(19): siRNA sense strand
uaaaggagcauuaccaaga

SEQ ID NO: 1522708 - RNA, 19 nt, Homo sapiens
  misc_RNA (1)...(19): siRNA sense strand
gaaaaggccugcucugaga

SEQ ID NO: 1522709 - RNA, 19 nt, Homo sapiens
  misc_RNA (1)...(19): siRNA sense strand
ggacccagcuggagaccaa

SEQ ID NO: 1522710 - RNA, 19 nt, Homo sapiens
  misc_RNA (1)...(19): siRNA sense strand
cuaaagaagcucagaauga

SEQ ID NO: 1522711 - RNA, 19 nt, Homo sapiens
  misc_RNA (1)...(19): siRNA sense strand
gaaacaaagccgccucuug

SEQ ID NO: 1522712 - RNA, 19 nt, Homo sapiens
  misc_RNA (1)...(19): siRNA sense strand
ggaaggaaauugagguuuu

SEQ ID NO: 1522713 - RNA, 19 nt, Homo sapiens
  misc_RNA (1)...(19): siRNA sense strand
gaagagaaccacuaugucu

SEQ ID NO: 1522714 - RNA, 19 nt, Homo sapiens
  misc_RNA (1)...(19): siRNA sense strand
aaauagcgcuggagagaga

SEQ ID NO: 1522715 - RNA, 19 nt, Homo sapiens
  misc_RNA (1)...(19): siRNA sense strand
gaaccuggaguuugugaaa

SEQ ID NO: 1522716 - RNA, 19 nt, Homo sapiens
  misc_RNA (1)...(19): siRNA sense strand
agaaggaccuggaguuugu

SEQ ID NO: 1522717 - RNA, 19 nt, Homo sapiens
  misc_RNA (1)...(19): siRNA sense strand
ucaacaaacucgucaguag

SEQ ID NO: 1522718 - RNA, 19 nt, Homo sapiens
  misc_RNA (1)...(19): siRNA sense strand
gaaggaaauugagguuuua

SEQ ID NO: 1522719 - RNA, 19 nt, Homo sapiens
  misc_RNA (1)...(19): siRNA sense strand
uuaacaaacuggaucaaga

SEQ ID NO: 1522720 - RNA, 19 nt, Homo sapiens
  misc_RNA (1)...(19): siRNA sense strand
gcacagaggaaggaaauug

SEQ ID NO: 1522721 - RNA, 19 nt, Homo sapiens
  misc_RNA (1)...(19): siRNA sense strand
aaaccaaacuucuacaucu

SEQ ID NO: 1522722 - RNA, 19 nt, Homo sapiens
  misc_RNA (1)...(19): siRNA sense strand
gaagaggaaccuggaguuu

SEQ ID NO: 1522723 - RNA, 19 nt, Homo sapiens
  misc_RNA (1)...(19): siRNA sense strand
gacaguaguucuuuggaau

SEQ ID NO: 1522724 - RNA, 19 nt, Homo sapiens
  misc_RNA (1)...(19): siRNA sense strand
gaaaguggauaagcugaag

SEQ ID NO: 1522725 - RNA, 19 nt, Homo sapiens
  misc_RNA (1)...(19): siRNA sense strand
gcagaaggaccuggaguuu

SEQ ID NO: 1522726 - RNA, 19 nt, Homo sapiens
  misc_RNA (1)...(19): siRNA sense strand
agagaaggaugacauggaa

SEQ ID NO: 1522727 - RNA, 19 nt, Homo sapiens
  misc_RNA (1)...(19): siRNA sense strand
ggaacucgaagaccuguuu

SEQ ID NO: 1522728 - RNA, 19 nt, Homo sapiens
  misc_RNA (1)...(19): siRNA sense strand
gggaagaacaugagaaaca

SEQ ID NO: 1522729 - RNA, 19 nt, Homo sapiens
  misc_RNA (1)...(19): siRNA sense strand
gcauuucauuccuggguaa

SEQ ID NO: 1522730 - RNA, 19 nt, Homo sapiens
  misc_RNA (1)...(19): siRNA sense strand
agaaggagauuguggaagu

SEQ ID NO: 1522731 - RNA, 19 nt, Homo sapiens
  misc_RNA (1)...(19): siRNA sense strand
acaacgagcucaugacagu

SEQ ID NO: 1522732 - RNA, 19 nt, Homo sapiens
  misc_RNA (1)...(19): siRNA sense strand
ggaagaggcggagaugauu

SEQ ID NO: 1522733 - RNA, 19 nt, Homo sapiens
  misc_RNA (1)...(19): siRNA sense strand
ggaagaacaugagaaacag

SEQ ID NO: 1522734 - RNA, 19 nt, Homo sapiens
  misc_RNA (1)...(19): siRNA sense strand
gaacucgaagaccuguuua

SEQ ID NO: 1522735 - RNA, 19 nt, Homo sapiens
  misc_RNA (1)...(19): siRNA sense strand
ccgcagcccucucugugua

SEQ ID NO: 1522736 - RNA, 19 nt, Homo sapiens
  misc_RNA (1)...(19): siRNA sense strand
cagaagagcggguggaaga

SEQ ID NO: 1522737 - RNA, 19 nt, Homo sapiens
  misc_RNA (1)...(19): siRNA sense strand
agaggaaccuggaguuugu

SEQ ID NO: 1522738 - RNA, 19 nt, Homo sapiens
  misc_RNA (1)...(19): siRNA sense strand
gaagaggccgagagcacua

SEQ ID NO: 1522739 - RNA, 19 nt, Homo sapiens
  misc_RNA (1)...(19): siRNA sense strand
gacagaaucagaacuacaa

SEQ ID NO: 1522740 - RNA, 19 nt, Homo sapiens
  misc_RNA (1)...(19): siRNA sense strand
gaaaccaaacuucuacauc

SEQ ID NO: 1522741 - RNA, 19 nt, Homo sapiens
  misc_RNA (1)...(19): siRNA sense strand
ugacccagcucugccuuaa

SEQ ID NO: 1522742 - RNA, 19 nt, Homo sapiens
  misc_RNA (1)...(19): siRNA sense strand
gcagcagagugaccaaauc

SEQ ID NO: 1522743 - RNA, 19 nt, Homo sapiens
  misc_RNA (1)...(19): siRNA sense strand
gaaggagauuguggaagug

SEQ ID NO: 1522744 - RNA, 19 nt, Homo sapiens
  misc_RNA (1)...(19): siRNA sense strand
ggguuaacuuugaggaauu

SEQ ID NO: 1522745 - RNA, 19 nt, Homo sapiens
  misc_RNA (1)...(19): siRNA sense strand
gguuaacuuugaggaauuu

SEQ ID NO: 1522746 - RNA, 19 nt, Homo sapiens
  misc_RNA (1)...(19): siRNA sense strand
gcacuaaagaagcucagaa

SEQ ID NO: 1522747 - RNA, 19 nt, Homo sapiens
  misc_RNA (1)...(19): siRNA sense strand
agacaguaguucuuuggaa

SEQ ID NO: 1522748 - RNA, 19 nt, Homo sapiens
  misc_RNA (1)...(19): siRNA sense strand
uggagaaacauguagauuu

SEQ ID NO: 1522749 - RNA, 19 nt, Homo sapiens
  misc_RNA (1)...(19): siRNA sense strand
gagagaaggaugacaugga

SEQ ID NO: 1522750 - RNA, 19 nt, Homo sapiens
  misc_RNA (1)...(19): siRNA sense strand
gaccauuucgccaggguua

SEQ ID NO: 1522751 - RNA, 19 nt, Homo sapiens
  misc_RNA (1)...(19): siRNA sense strand
ccauucagauguuaacaca

SEQ ID NO: 1522752 - RNA, 19 nt, Homo sapiens
  misc_RNA (1)...(19): siRNA sense strand
ccagugccaucccuccaaa

SEQ ID NO: 1522753 - RNA, 19 nt, Homo sapiens
  misc_RNA (1)...(19): siRNA sense strand
gcgggaagaacaugagaaa

SEQ ID NO: 1522754 - RNA, 19 nt, Homo sapiens
  misc_RNA (1)...(19): siRNA sense strand
gcagagugaccaaauccaa

SEQ ID NO: 1522755 - RNA, 19 nt, Homo sapiens
  misc_RNA (1)...(19): siRNA sense strand
ggaguuccauagacuuucu

SEQ ID NO: 1522756 - RNA, 19 nt, Homo sapiens
  misc_RNA (1)...(19): siRNA sense strand
gaaagaggaacucgaagac

SEQ ID NO: 1522757 - RNA, 19 nt, Homo sapiens
  misc_RNA (1)...(19): siRNA sense strand
ugccaucccuccaaaguau

SEQ ID NO: 1522758 - RNA, 19 nt, Homo sapiens
  misc_RNA (1)...(19): siRNA sense strand
gcuguguugucuucaaaug

SEQ ID NO: 1522759 - RNA, 19 nt, Homo sapiens
  misc_RNA (1)...(19): siRNA sense strand
ugaagaauauggaaaugcu

SEQ ID NO: 1522760 - RNA, 19 nt, Homo sapiens
  misc_RNA (1)...(19): siRNA sense strand
auucagauguuaacacaga

SEQ ID NO: 1522761 - RNA, 19 nt, Homo sapiens
  misc_RNA (1)...(19): siRNA sense strand
aagaagagaaccacuaugu

SEQ ID NO: 1522762 - RNA, 19 nt, Homo sapiens
  misc_RNA (1)...(19): siRNA sense strand
gcugaaagccacagaagag

SEQ ID NO: 1522763 - RNA, 19 nt, Homo sapiens
  misc_RNA (1)...(19): siRNA sense strand
gcucagaaugaauuauuug

SEQ ID NO: 1522764 - RNA, 19 nt, Homo sapiens
  misc_RNA (1)...(19): siRNA sense strand
ugaagaagagaaccacuau

SEQ ID NO: 1522765 - RNA, 19 nt, Homo sapiens
  misc_RNA (1)...(19): siRNA sense strand
acagacagaaucagaacua

SEQ ID NO: 1522766 - RNA, 19 nt, Homo sapiens
  misc_RNA (1)...(19): siRNA sense strand
gagagagacgccucgcaaa

SEQ ID NO: 1522767 - RNA, 19 nt, Homo sapiens
  misc_RNA (1)...(19): siRNA sense strand
gaaugguucuaagugguau

SEQ ID NO: 1522768 - RNA, 19 nt, Homo sapiens
  misc_RNA (1)...(19): siRNA sense strand
gaagaggcggagaugauuc

SEQ ID NO: 1522769 - RNA, 19 nt, Homo sapiens
  misc_RNA (1)...(19): siRNA sense strand
gagcaucgugugaccauuc

SEQ ID NO: 1522770 - RNA, 19 nt, Homo sapiens
  misc_RNA (1)...(19): siRNA sense strand
ucaauuaucccagcucaau

SEQ ID NO: 1522771 - RNA, 19 nt, Homo sapiens
  misc_RNA (1)...(19): siRNA sense strand
uccauagacuuucugaaga

SEQ ID NO: 1522772 - RNA, 19 nt, Homo sapiens
  misc_RNA (1)...(19): siRNA sense strand
gaaacauguagauuugaga

SEQ ID NO: 1522773 - RNA, 19 nt, Homo sapiens
  misc_RNA (1)...(19): siRNA sense strand
cauggaaaccaaacuucua

SEQ ID NO: 1522774 - RNA, 19 nt, Homo sapiens
  misc_RNA (1)...(19): siRNA sense strand
uggagaccaagguaaauua

SEQ ID NO: 1522775 - RNA, 19 nt, Homo sapiens
  misc_RNA (1)...(19): siRNA sense strand
gaaaacagucgccuacaga

SEQ ID NO: 1522776 - RNA, 19 nt, Homo sapiens
  misc_RNA (1)...(19): siRNA sense strand
ugcagacgcuucucggaaa

SEQ ID NO: 1522777 - RNA, 19 nt, Homo sapiens
  misc_RNA (1)...(19): siRNA sense strand
aagaagcucagaaugaauu

SEQ ID NO: 1522778 - RNA, 19 nt, Homo sapiens
  misc_RNA (1)...(19): siRNA sense strand
ugaaugguucuaaguggua

SEQ ID NO: 1522779 - RNA, 19 nt, Homo sapiens
  misc_RNA (1)...(19): siRNA sense strand
ggaaaugcuccuccaagag

SEQ ID NO: 1522780 - RNA, 19 nt, Homo sapiens
  misc_RNA (1)...(19): siRNA sense strand
aggcggagaugauucugaa

SEQ ID NO: 1522781 - RNA, 19 nt, Homo sapiens
  misc_RNA (1)...(19): siRNA sense strand
agaaaguacucacgaugca

SEQ ID NO: 1522782 - RNA, 19 nt, Homo sapiens
  misc_RNA (1)...(19): siRNA sense strand
gaaggaauacgagcucaag

SEQ ID NO: 1522783 - RNA, 19 nt, Homo sapiens
  misc_RNA (1)...(19): siRNA sense strand
aagugagucuugaggaauu

SEQ ID NO: 1522784 - RNA, 19 nt, Homo sapiens
  misc_RNA (1)...(19): siRNA sense strand
cgagagcacuaaagaagcu

SEQ ID NO: 1522785 - RNA, 19 nt, Homo sapiens
  misc_RNA (1)...(19): siRNA sense strand
gaagaagagaaccacuaug

SEQ ID NO: 1522786 - RNA, 19 nt, Homo sapiens
  misc_RNA (1)...(19): siRNA sense strand
ucgccaggguuaacuuuga

SEQ ID NO: 1522787 - RNA, 19 nt, Homo sapiens
  misc_RNA (1)...(19): siRNA sense strand
agacggagacggcaaagug

SEQ ID NO: 1522788 - RNA, 19 nt, Homo sapiens
  misc_RNA (1)...(19): siRNA sense strand
uccagggacucgagaaaga

SEQ ID NO: 1522789 - RNA, 19 nt, Homo sapiens
  misc_RNA (1)...(19): siRNA sense strand
gcggagaugauucugaaga

SEQ ID NO: 1522790 - RNA, 19 nt, Homo sapiens
  misc_RNA (1)...(19): siRNA sense strand
cauguagauuugagagaga

SEQ ID NO: 1522791 - RNA, 19 nt, Homo sapiens
  misc_RNA (1)...(19): siRNA sense strand
ggaaaccaaacuucuacau

SEQ ID NO: 1522792 - RNA, 19 nt, Homo sapiens
  misc_RNA (1)...(19): siRNA sense strand
gaagagcgagcacgaagcu

SEQ ID NO: 1522793 - RNA, 19 nt, Homo sapiens
  misc_RNA (1)...(19): siRNA sense strand
agaaagaggaacucgaaga

SEQ ID NO: 1522794 - RNA, 19 nt, Homo sapiens
  misc_RNA (1)...(19): siRNA sense strand
cccugaagcugcagaagga

SEQ ID NO: 1522795 - RNA, 19 nt, Homo sapiens
  misc_RNA (1)...(19): siRNA sense strand
gaggaaggaaauugagguu

SEQ ID NO: 1522796 - RNA, 19 nt, Homo sapiens
  misc_RNA (1)...(19): siRNA sense strand
gagaaacauguagauuuga

SEQ ID NO: 1522797 - RNA, 19 nt, Homo sapiens
  misc_RNA (1)...(19): siRNA sense strand
aaacucgucaguaggauug

SEQ ID NO: 1522798 - RNA, 19 nt, Homo sapiens
  misc_RNA (1)...(19): siRNA sense strand
gcagauaaauccacuagua

SEQ ID NO: 1522799 - RNA, 19 nt, Homo sapiens
  misc_RNA (1)...(19): siRNA sense strand
ggagagaaaucuauacuuu

SEQ ID NO: 1522800 - RNA, 19 nt, Homo sapiens
  misc_RNA (1)...(19): siRNA sense strand
gaacauggaucagguacua

SEQ ID NO: 1522801 - RNA, 19 nt, Homo sapiens
  misc_RNA (1)...(19): siRNA sense strand
gaaguacuuugccauauuu

SEQ ID NO: 1522802 - RNA, 19 nt, Homo sapiens
  misc_RNA (1)...(19): siRNA sense strand
gcaagaaacugaacaugga

SEQ ID NO: 1522803 - RNA, 19 nt, Homo sapiens
  misc_RNA (1)...(19): siRNA sense strand
caagaagucuggauuccua

SEQ ID NO: 1522804 - RNA, 19 nt, Homo sapiens
  misc_RNA (1)...(19): siRNA sense strand
gaagaaagcacuaucuaug

SEQ ID NO: 1522805 - RNA, 19 nt, Homo sapiens
  misc_RNA (1)...(19): siRNA sense strand
uaaagaagaugccagaugu

SEQ ID NO: 1522806 - RNA, 19 nt, Homo sapiens
  misc_RNA (1)...(19): siRNA sense strand
ccacaaauuccuugaaaua

SEQ ID NO: 1522807 - RNA, 19 nt, Homo sapiens
  misc_RNA (1)...(19): siRNA sense strand
ccaaguggcuuuacagaug

SEQ ID NO: 1522808 - RNA, 19 nt, Homo sapiens
  misc_RNA (1)...(19): siRNA sense strand
gaaauaugucccuuuagua

SEQ ID NO: 1522809 - RNA, 19 nt, Homo sapiens
  misc_RNA (1)...(19): siRNA sense strand
ucacagaucuagugcuaaa

SEQ ID NO: 1522810 - RNA, 19 nt, Homo sapiens
  misc_RNA (1)...(19): siRNA sense strand
ugaagaagauagucuagaa

SEQ ID NO: 1522811 - RNA, 19 nt, Homo sapiens
  misc_RNA (1)...(19): siRNA sense strand
gaacuuucgucaugaggaa

SEQ ID NO: 1522812 - RNA, 19 nt, Homo sapiens
  misc_RNA (1)...(19): siRNA sense strand
gaugaaagcagucaaugaa

SEQ ID NO: 1522813 - RNA, 19 nt, Homo sapiens
  misc_RNA (1)...(19): siRNA sense strand
gagagaaaccgcaucauau

SEQ ID NO: 1522814 - RNA, 19 nt, Homo sapiens
  misc_RNA (1)...(19): siRNA sense strand
gauaauaaugcccagaaua

SEQ ID NO: 1522815 - RNA, 19 nt, Homo sapiens
  misc_RNA (1)...(19): siRNA sense strand
ggaaauuucguaaucguaa

SEQ ID NO: 1522816 - RNA, 19 nt, Homo sapiens
  misc_RNA (1)...(19): siRNA sense strand
uaaaugagauggaagacau

SEQ ID NO: 1522817 - RNA, 19 nt, Homo sapiens
  misc_RNA (1)...(19): siRNA sense strand
guuugcagcugacgcauua

SEQ ID NO: 1522818 - RNA, 19 nt, Homo sapiens
  misc_RNA (1)...(19): siRNA sense strand
gaauaacaaugccaacauc

SEQ ID NO: 1522819 - RNA, 19 nt, Homo sapiens
  misc_RNA (1)...(19): siRNA sense strand
uagcaaacaucaaucaaga

SEQ ID NO: 1522820 - RNA, 19 nt, Homo sapiens
  misc_RNA (1)...(19): siRNA sense strand
gaagaaggguguauuucag

SEQ ID NO: 1522821 - RNA, 19 nt, Homo sapiens
  misc_RNA (1)...(19): siRNA sense strand
gagaggaaauuucagagau

SEQ ID NO: 1522822 - RNA, 19 nt, Homo sapiens
  misc_RNA (1)...(19): siRNA sense strand
gaaacaaaggacuauauga

SEQ ID NO: 1522823 - RNA, 19 nt, Homo sapiens
  misc_RNA (1)...(19): siRNA sense strand
gcucacagccaggcaauua

SEQ ID NO: 1522824 - RNA, 19 nt, Homo sapiens
  misc_RNA (1)...(19): siRNA sense strand
gaucagauguuucgugaac

SEQ ID NO: 1522825 - RNA, 19 nt, Homo sapiens
  misc_RNA (1)...(19): siRNA sense strand
ugaaauaugucccuuuagu

SEQ ID NO: 1522826 - RNA, 19 nt, Homo sapiens
  misc_RNA (1)...(19): siRNA sense strand
gcaggcaugcccaaacuua

SEQ ID NO: 1522827 - RNA, 19 nt, Homo sapiens
  misc_RNA (1)...(19): siRNA sense strand
gaagaugccagauguugaa

SEQ ID NO: 1522828 - RNA, 19 nt, Homo sapiens
  misc_RNA (1)...(19): siRNA sense strand
ugaaguacuuugccauauu

SEQ ID NO: 1522829 - RNA, 19 nt, Homo sapiens
  misc_RNA (1)...(19): siRNA sense strand
cgagagaaaccgcaucaua

SEQ ID NO: 1522830 - RNA, 19 nt, Homo sapiens
  misc_RNA (1)...(19): siRNA sense strand
gaaauuugcacacuauugu

SEQ ID NO: 1522831 - RNA, 19 nt, Homo sapiens
  misc_RNA (1)...(19): siRNA sense strand
cuugaaauaugucccuuua

SEQ ID NO: 1522832 - RNA, 19 nt, Homo sapiens
  misc_RNA (1)...(19): siRNA sense strand
cauauuccaugauuucuga

SEQ ID NO: 1522833 - RNA, 19 nt, Homo sapiens
  misc_RNA (1)...(19): siRNA sense strand
gagcagaagcuauuuagug

SEQ ID NO: 1522834 - RNA, 19 nt, Homo sapiens
  misc_RNA (1)...(19): siRNA sense strand
cuuaagaacuuucgucaug

SEQ ID NO: 1522835 - RNA, 19 nt, Homo sapiens
  misc_RNA (1)...(19): siRNA sense strand
gcagcuggauggacacuau

SEQ ID NO: 1522836 - RNA, 19 nt, Homo sapiens
  misc_RNA (1)...(19): siRNA sense strand
guacuagaccagauacuaa

SEQ ID NO: 1522837 - RNA, 19 nt, Homo sapiens
  misc_RNA (1)...(19): siRNA sense strand
caucagcucuuguuagcaa

SEQ ID NO: 1522838 - RNA, 19 nt, Homo sapiens
  misc_RNA (1)...(19): siRNA sense strand
gaaagcagucaaugaaguu

SEQ ID NO: 1522839 - RNA, 19 nt, Homo sapiens
  misc_RNA (1)...(19): siRNA sense strand
aaaccaaccucaauuacug

SEQ ID NO: 1522840 - RNA, 19 nt, Homo sapiens
  misc_RNA (1)...(19): siRNA sense strand
gaaaugacagcagaugaaa

SEQ ID NO: 1522841 - RNA, 19 nt, Homo sapiens
  misc_RNA (1)...(19): siRNA sense strand
gaaaaugcaccaauuguaa

SEQ ID NO: 1522842 - RNA, 19 nt, Homo sapiens
  misc_RNA (1)...(19): siRNA sense strand
gauaucauguguauggaau

SEQ ID NO: 1522843 - RNA, 19 nt, Homo sapiens
  misc_RNA (1)...(19): siRNA sense strand
aaucacagaucuagugcua

SEQ ID NO: 1522844 - RNA, 19 nt, Homo sapiens
  misc_RNA (1)...(19): siRNA sense strand
gaucgaggaugaccaugug

SEQ ID NO: 1522845 - RNA, 19 nt, Homo sapiens
  misc_RNA (1)...(19): siRNA sense strand
ggugaauguuccugaaauu

SEQ ID NO: 1522846 - RNA, 19 nt, Homo sapiens
  misc_RNA (1)...(19): siRNA sense strand
gagagccaguugaagauga

SEQ ID NO: 1522847 - RNA, 19 nt, Homo sapiens
  misc_RNA (1)...(19): siRNA sense strand
gaugaagaaggguguauuu

SEQ ID NO: 1522848 - RNA, 19 nt, Homo sapiens
  misc_RNA (1)...(19): siRNA sense strand
agagaaaccgcaucauaua

SEQ ID NO: 1522849 - RNA, 19 nt, Homo sapiens
  misc_RNA (1)...(19): siRNA sense strand
uguaucagcuuaagaacuu

SEQ ID NO: 1522850 - RNA, 19 nt, Homo sapiens
  misc_RNA (1)...(19): siRNA sense strand
ggacucgauugguugauau

SEQ ID NO: 1522851 - RNA, 19 nt, Homo sapiens
  misc_RNA (1)...(19): siRNA sense strand
gcacaggaauugguguuuc

SEQ ID NO: 1522852 - RNA, 19 nt, Homo sapiens
  misc_RNA (1)...(19): siRNA sense strand
ugaaguagaucuugguuac

SEQ ID NO: 1522853 - RNA, 19 nt, Homo sapiens
  misc_RNA (1)...(19): siRNA sense strand
ccaacaaugacgauaauaa

SEQ ID NO: 1522854 - RNA, 19 nt, Homo sapiens
  misc_RNA (1)...(19): siRNA sense strand
cuacacaacccauacaauu

SEQ ID NO: 1522855 - RNA, 19 nt, Homo sapiens
  misc_RNA (1)...(19): siRNA sense strand
uguggaaacuucucauuug

SEQ ID NO: 1522856 - RNA, 19 nt, Homo sapiens
  misc_RNA (1)...(19): siRNA sense strand
gguggacacucuaacuuug

SEQ ID NO: 1522857 - RNA, 19 nt, Homo sapiens
  misc_RNA (1)...(19): siRNA sense strand
gaagacaguuggagaucag

SEQ ID NO: 1522858 - RNA, 19 nt, Homo sapiens
  misc_RNA (1)...(19): siRNA sense strand
caagagcucauuaaauaug

SEQ ID NO: 1522859 - RNA, 19 nt, Homo sapiens
  misc_RNA (1)...(19): siRNA sense strand
caauuacuguucaugauuc

SEQ ID NO: 1522860 - RNA, 19 nt, Homo sapiens
  misc_RNA (1)...(19): siRNA sense strand
aaccagaacuccaacaaug

SEQ ID NO: 1522861 - RNA, 19 nt, Homo sapiens
  misc_RNA (1)...(19): siRNA sense strand
cuuugaagcuggacucuuu

SEQ ID NO: 1522862 - RNA, 19 nt, Homo sapiens
  misc_RNA (1)...(19): siRNA sense strand
acaaaggacuauaugaauc

SEQ ID NO: 1522863 - RNA, 19 nt, Homo sapiens
  misc_RNA (1)...(19): siRNA sense strand
gagccaaaauucaaacuuu

SEQ ID NO: 1522864 - RNA, 19 nt, Homo sapiens
  misc_RNA (1)...(19): siRNA sense strand
agagagugaugaugaagaa

SEQ ID NO: 1522865 - RNA, 19 nt, Homo sapiens
  misc_RNA (1)...(19): siRNA sense strand
gaagacaucguccaagaag

SEQ ID NO: 1522866 - RNA, 19 nt, Homo sapiens
  misc_RNA (1)...(19): siRNA sense strand
ugaaagcagucaaugaagu

SEQ ID NO: 1522867 - RNA, 19 nt, Homo sapiens
  misc_RNA (1)...(19): siRNA sense strand
gaucuugguuaccucauca

SEQ ID NO: 1522868 - RNA, 19 nt, Homo sapiens
  misc_RNA (1)...(19): siRNA sense strand
gacagcagaugaaacaaag

SEQ ID NO: 1522869 - RNA, 19 nt, Homo sapiens
  misc_RNA (1)...(19): siRNA sense strand
augcggaucuggugaagua

SEQ ID NO: 1522870 - RNA, 19 nt, Homo sapiens
  misc_RNA (1)...(19): siRNA sense strand
guaaaccgauuugacuaug

SEQ ID NO: 1522871 - RNA, 19 nt, Homo sapiens
  misc_RNA (1)...(19): siRNA sense strand
ggaagcggacagcagauaa

SEQ ID NO: 1522872 - RNA, 19 nt, Homo sapiens
  misc_RNA (1)...(19): siRNA sense strand
caaccucaauuacuguuca

SEQ ID NO: 1522873 - RNA, 19 nt, Homo sapiens
  misc_RNA (1)...(19): siRNA sense strand
gccgagaguggaaauaaua

SEQ ID NO: 1522874 - RNA, 19 nt, Homo sapiens
  misc_RNA (1)...(19): siRNA sense strand
caacauccacgacaacaau

SEQ ID NO: 1522875 - RNA, 19 nt, Homo sapiens
  misc_RNA (1)...(19): siRNA sense strand
gaucucagaccacucaaga

SEQ ID NO: 1522876 - RNA, 19 nt, Homo sapiens
  misc_RNA (1)...(19): siRNA sense strand
caaaggacuauaugaauca

SEQ ID NO: 1522877 - RNA, 19 nt, Homo sapiens
  misc_RNA (1)...(19): siRNA sense strand
ggagcuccauauuccauga

SEQ ID NO: 1522878 - RNA, 19 nt, Homo sapiens
  misc_RNA (1)...(19): siRNA sense strand
gaaauuccagaagaaauga

SEQ ID NO: 1522879 - RNA, 19 nt, Homo sapiens
  misc_RNA (1)...(19): siRNA sense strand
ggaugaaagcagucaauga

SEQ ID NO: 1522880 - RNA, 19 nt, Homo sapiens
  misc_RNA (1)...(19): siRNA sense strand
gaagaaaugacagcagaug

SEQ ID NO: 1522881 - RNA, 19 nt, Homo sapiens
  misc_RNA (1)...(19): siRNA sense strand
gaagcggacagcagauaaa

SEQ ID NO: 1522882 - RNA, 19 nt, Homo sapiens
  misc_RNA (1)...(19): siRNA sense strand
ccagagaauugucagaagu

SEQ ID NO: 1522883 - RNA, 19 nt, Homo sapiens
  misc_RNA (1)...(19): siRNA sense strand
ggaagacaucguccaagaa

SEQ ID NO: 1522884 - RNA, 19 nt, Homo sapiens
  misc_RNA (1)...(19): siRNA sense strand
gcccguagguuacaugaag

SEQ ID NO: 1522885 - RNA, 19 nt, Homo sapiens
  misc_RNA (1)...(19): siRNA sense strand
ugugcagguucuuguauua

SEQ ID NO: 1522886 - RNA, 19 nt, Homo sapiens
  misc_RNA (1)...(19): siRNA sense strand
gauaaauccacuaguacaa

SEQ ID NO: 1522887 - RNA, 19 nt, Homo sapiens
  misc_RNA (1)...(19): siRNA sense strand
guaaaaccaaccucaauua

SEQ ID NO: 1522888 - RNA, 19 nt, Homo sapiens
  misc_RNA (1)...(19): siRNA sense strand
cgacaacaaucaccaucau

SEQ ID NO: 1522889 - RNA, 19 nt, Homo sapiens
  misc_RNA (1)...(19): siRNA sense strand
ccacagccauuuaaagacu

SEQ ID NO: 1522890 - RNA, 19 nt, Homo sapiens
  misc_RNA (1)...(19): siRNA sense strand
ucagagaugcgucagauga

SEQ ID NO: 1522891 - RNA, 19 nt, Homo sapiens
  misc_RNA (1)...(19): siRNA sense strand
gugaagaagacuuaaagaa

SEQ ID NO: 1522892 - RNA, 19 nt, Homo sapiens
  misc_RNA (1)...(19): siRNA sense strand
ggauggacacuauagcaaa

SEQ ID NO: 1522893 - RNA, 19 nt, Homo sapiens
  misc_RNA (1)...(19): siRNA sense strand
uaucacaucuguauuaucc

SEQ ID NO: 1522894 - RNA, 19 nt, Homo sapiens
  misc_RNA (1)...(19): siRNA sense strand
guacucggcguuacucuga

SEQ ID NO: 1522895 - RNA, 19 nt, Homo sapiens
  misc_RNA (1)...(19): siRNA sense strand
uaggauauguagaugaguu

SEQ ID NO: 1522896 - RNA, 19 nt, Homo sapiens
  misc_RNA (1)...(19): siRNA sense strand
aaacuuggaacacuuagaa

SEQ ID NO: 1522897 - RNA, 19 nt, Homo sapiens
  misc_RNA (1)...(19): siRNA sense strand
ggagaggaaauuucagaga

SEQ ID NO: 1522898 - RNA, 19 nt, Homo sapiens
  misc_RNA (1)...(19): siRNA sense strand
caagagagcuggaguuugu

SEQ ID NO: 1522899 - RNA, 19 nt, Homo sapiens
  misc_RNA (1)...(19): siRNA sense strand
ggacagaaauauauugaga

SEQ ID NO: 1522900 - RNA, 19 nt, Homo sapiens
  misc_RNA (1)...(19): siRNA sense strand
gaaagaaucagaggaguua

SEQ ID NO: 1522901 - RNA, 19 nt, Homo sapiens
  misc_RNA (1)...(19): siRNA sense strand
gcacuuauaugguuuggaa

SEQ ID NO: 1522902 - RNA, 19 nt, Homo sapiens
  misc_RNA (1)...(19): siRNA sense strand
gaagaaggacagaaauaua

SEQ ID NO: 1522903 - RNA, 19 nt, Homo sapiens
  misc_RNA (1)...(19): siRNA sense strand
ugaaggcgcuuaaauauca

SEQ ID NO: 1522904 - RNA, 19 nt, Homo sapiens
  misc_RNA (1)...(19): siRNA sense strand
gcaauugaaugaugagguu

SEQ ID NO: 1522905 - RNA, 19 nt, Homo sapiens
  misc_RNA (1)...(19): siRNA sense strand
gcucagcacuuauaugguu

SEQ ID NO: 1522906 - RNA, 19 nt, Homo sapiens
  misc_RNA (1)...(19): siRNA sense strand
gcucaaagacucauucaaa

SEQ ID NO: 1522907 - RNA, 19 nt, Homo sapiens
  misc_RNA (1)...(19): siRNA sense strand
aaagacuucucacaacuua

SEQ ID NO: 1522908 - RNA, 19 nt, Homo sapiens
  misc_RNA (1)...(19): siRNA sense strand
gcucuaauguuucugcaaa

SEQ ID NO: 1522909 - RNA, 19 nt, Homo sapiens
  misc_RNA (1)...(19): siRNA sense strand
gggcuugaguuccuuaauu

SEQ ID NO: 1522910 - RNA, 19 nt, Homo sapiens
  misc_RNA (1)...(19): siRNA sense strand
gcgcuuaaauaucaaauuc

SEQ ID NO: 1522911 - RNA, 19 nt, Homo sapiens
  misc_RNA (1)...(19): siRNA sense strand
ucacagagcucgaagaaaa

SEQ ID NO: 1522912 - RNA, 19 nt, Homo sapiens
  misc_RNA (1)...(19): siRNA sense strand
cgagauaaaugagcucaaa

SEQ ID NO: 1522913 - RNA, 19 nt, Homo sapiens
  misc_RNA (1)...(19): siRNA sense strand
gagaagcaguggcagcuau

SEQ ID NO: 1522914 - RNA, 19 nt, Homo sapiens
  misc_RNA (1)...(19): siRNA sense strand
ggaagaaggacagaaauau

SEQ ID NO: 1522915 - RNA, 19 nt, Homo sapiens
  misc_RNA (1)...(19): siRNA sense strand
gagguucaguacauuauga

SEQ ID NO: 1522916 - RNA, 19 nt, Homo sapiens
  misc_RNA (1)...(19): siRNA sense strand
ggcuugaguuccuuaauuu

SEQ ID NO: 1522917 - RNA, 19 nt, Homo sapiens
  misc_RNA (1)...(19): siRNA sense strand
ccucacugcucuaauguuu

SEQ ID NO: 1522918 - RNA, 19 nt, Homo sapiens
  misc_RNA (1)...(19): siRNA sense strand
gcugggacgucucaucaaa

SEQ ID NO: 1522919 - RNA, 19 nt, Homo sapiens
  misc_RNA (1)...(19): siRNA sense strand
gaaguguaccucaugaaga

SEQ ID NO: 1522920 - RNA, 19 nt, Homo sapiens
  misc_RNA (1)...(19): siRNA sense strand
gaaggacagaaauauauug

SEQ ID NO: 1522921 - RNA, 19 nt, Homo sapiens
  misc_RNA (1)...(19): siRNA sense strand
aaaccgaaaucccucagaa

SEQ ID NO: 1522922 - RNA, 19 nt, Homo sapiens
  misc_RNA (1)...(19): siRNA sense strand
ggaagaacuuagccuccuu

SEQ ID NO: 1522923 - RNA, 19 nt, Homo sapiens
  misc_RNA (1)...(19): siRNA sense strand
cuuauucacuuccaucaaa

SEQ ID NO: 1522924 - RNA, 19 nt, Homo sapiens
  misc_RNA (1)...(19): siRNA sense strand
ccacagagugcaagacaaa

SEQ ID NO: 1522925 - RNA, 19 nt, Homo sapiens
  misc_RNA (1)...(19): siRNA sense strand
gcaagugccacaguuguaa

SEQ ID NO: 1522926 - RNA, 19 nt, Homo sapiens
  misc_RNA (1)...(19): siRNA sense strand
ggaccugacugagcauuuc

SEQ ID NO: 1522927 - RNA, 19 nt, Homo sapiens
  misc_RNA (1)...(19): siRNA sense strand
gaaagcagaacgggaagaa

SEQ ID NO: 1522928 - RNA, 19 nt, Homo sapiens
  misc_RNA (1)...(19): siRNA sense strand
ucagcaaguugauauguau

SEQ ID NO: 1522929 - RNA, 19 nt, Homo sapiens
  misc_RNA (1)...(19): siRNA sense strand
gaugagguucaguacauua

SEQ ID NO: 1522930 - RNA, 19 nt, Homo sapiens
  misc_RNA (1)...(19): siRNA sense strand
gcagaacgggaagaacuua

SEQ ID NO: 1522931 - RNA, 19 nt, Homo sapiens
  misc_RNA (1)...(19): siRNA sense strand
cagacuggcccuuuccuua

SEQ ID NO: 1522932 - RNA, 19 nt, Homo sapiens
  misc_RNA (1)...(19): siRNA sense strand
caaagacucauucaaagau

SEQ ID NO: 1522933 - RNA, 19 nt, Homo sapiens
  misc_RNA (1)...(19): siRNA sense strand
ugagagacgagauaaauga

SEQ ID NO: 1522934 - RNA, 19 nt, Homo sapiens
  misc_RNA (1)...(19): siRNA sense strand
ggacgucucaucaaaucaa

SEQ ID NO: 1522935 - RNA, 19 nt, Homo sapiens
  misc_RNA (1)...(19): siRNA sense strand
aaaggaagcugugaaaauu

SEQ ID NO: 1522936 - RNA, 19 nt, Homo sapiens
  misc_RNA (1)...(19): siRNA sense strand
gacaaaggaagcugugaaa

SEQ ID NO: 1522937 - RNA, 19 nt, Homo sapiens
  misc_RNA (1)...(19): siRNA sense strand
aaguguaccucaugaagaa

SEQ ID NO: 1522938 - RNA, 19 nt, Homo sapiens
  misc_RNA (1)...(19): siRNA sense strand
agaacgagauauuagaugu

SEQ ID NO: 1522939 - RNA, 19 nt, Homo sapiens
  misc_RNA (1)...(19): siRNA sense strand
ugccaaagcugaggaguau

SEQ ID NO: 1522940 - RNA, 19 nt, Homo sapiens
  misc_RNA (1)...(19): siRNA sense strand
caaaagagaacgagauauu

SEQ ID NO: 1522941 - RNA, 19 nt, Homo sapiens
  misc_RNA (1)...(19): siRNA sense strand
gcagcaagaagaaaggauu

SEQ ID NO: 1522942 - RNA, 19 nt, Homo sapiens
  misc_RNA (1)...(19): siRNA sense strand
caaauucagcaaguugaua

SEQ ID NO: 1522943 - RNA, 19 nt, Homo sapiens
  misc_RNA (1)...(19): siRNA sense strand
gcauucaaagagcaacuua

SEQ ID NO: 1522944 - RNA, 19 nt, Homo sapiens
  misc_RNA (1)...(19): siRNA sense strand
caccagcaguuuaauaagu

SEQ ID NO: 1522945 - RNA, 19 nt, Homo sapiens
  misc_RNA (1)...(19): siRNA sense strand
ugacagauuacaagaagaa

SEQ ID NO: 1522946 - RNA, 19 nt, Homo sapiens
  misc_RNA (1)...(19): siRNA sense strand
uggaagucaugaaggauuu

SEQ ID NO: 1522947 - RNA, 19 nt, Homo sapiens
  misc_RNA (1)...(19): siRNA sense strand
cgagauauuagaugugaaa

SEQ ID NO: 1522948 - RNA, 19 nt, Homo sapiens
  misc_RNA (1)...(19): siRNA sense strand
ucaaagacucauucaaaga

SEQ ID NO: 1522949 - RNA, 19 nt, Homo sapiens
  misc_RNA (1)...(19): siRNA sense strand
gaagagcugggacgucuca

SEQ ID NO: 1522950 - RNA, 19 nt, Homo sapiens
  misc_RNA (1)...(19): siRNA sense strand
gagcugggacgucucauca

SEQ ID NO: 1522951 - RNA, 19 nt, Homo sapiens
  misc_RNA (1)...(19): siRNA sense strand
gauagaagagugucauuuu

SEQ ID NO: 1522952 - RNA, 19 nt, Homo sapiens
  misc_RNA (1)...(19): siRNA sense strand
guugauauguaugcugaaa

SEQ ID NO: 1522953 - RNA, 19 nt, Homo sapiens
  misc_RNA (1)...(19): siRNA sense strand
ucacugcucuaauguuucu

SEQ ID NO: 1522954 - RNA, 19 nt, Homo sapiens
  misc_RNA (1)...(19): siRNA sense strand
uugaaucugugacugaauu

SEQ ID NO: 1522955 - RNA, 19 nt, Homo sapiens
  misc_RNA (1)...(19): siRNA sense strand
aaccucugauucuuucuua

SEQ ID NO: 1522956 - RNA, 19 nt, Homo sapiens
  misc_RNA (1)...(19): siRNA sense strand
agacuucucacaacuuaaa

SEQ ID NO: 1522957 - RNA, 19 nt, Homo sapiens
  misc_RNA (1)...(19): siRNA sense strand
uggaagaaggacagaaaua

SEQ ID NO: 1522958 - RNA, 19 nt, Homo sapiens
  misc_RNA (1)...(19): siRNA sense strand
ccagcaguuuaauaaguuu

SEQ ID NO: 1522959 - RNA, 19 nt, Homo sapiens
  misc_RNA (1)...(19): siRNA sense strand
uccaggaggugauagaaga

SEQ ID NO: 1522960 - RNA, 19 nt, Homo sapiens
  misc_RNA (1)...(19): siRNA sense strand
gaacgagauauuagaugug

SEQ ID NO: 1522961 - RNA, 19 nt, Homo sapiens
  misc_RNA (1)...(19): siRNA sense strand
gaaggcgcuuaaauaucaa

SEQ ID NO: 1522962 - RNA, 19 nt, Homo sapiens
  misc_RNA (1)...(19): siRNA sense strand
uguacaaggugguccaguu

SEQ ID NO: 1522963 - RNA, 19 nt, Homo sapiens
  misc_RNA (1)...(19): siRNA sense strand
aaagagaacgagauauuag

SEQ ID NO: 1522964 - RNA, 19 nt, Homo sapiens
  misc_RNA (1)...(19): siRNA sense strand
caugagagacgagauaaau

SEQ ID NO: 1522965 - RNA, 19 nt, Homo sapiens
  misc_RNA (1)...(19): siRNA sense strand
cggccucacugcucuaaug

SEQ ID NO: 1522966 - RNA, 19 nt, Homo sapiens
  misc_RNA (1)...(19): siRNA sense strand
gaagcaguggcagcuauuu

SEQ ID NO: 1522967 - RNA, 19 nt, Homo sapiens
  misc_RNA (1)...(19): siRNA sense strand
ucugaaggcgcuuaaauau

SEQ ID NO: 1522968 - RNA, 19 nt, Homo sapiens
  misc_RNA (1)...(19): siRNA sense strand
gcuugaguuccuuaauuua

SEQ ID NO: 1522969 - RNA, 19 nt, Homo sapiens
  misc_RNA (1)...(19): siRNA sense strand
ggaguacugcgccaugaga

SEQ ID NO: 1522970 - RNA, 19 nt, Homo sapiens
  misc_RNA (1)...(19): siRNA sense strand
guacaaggugguccaguuc

SEQ ID NO: 1522971 - RNA, 19 nt, Homo sapiens
  misc_RNA (1)...(19): siRNA sense strand
uaaaaccucugauucuuuc

SEQ ID NO: 1522972 - RNA, 19 nt, Homo sapiens
  misc_RNA (1)...(19): siRNA sense strand
gcaagcccguguagaccau

SEQ ID NO: 1522973 - RNA, 19 nt, Homo sapiens
  misc_RNA (1)...(19): siRNA sense strand
ccaguuccaucaagucaag

SEQ ID NO: 1522974 - RNA, 19 nt, Homo sapiens
  misc_RNA (1)...(19): siRNA sense strand
cagaggagccccuguaaaa

SEQ ID NO: 1522975 - RNA, 19 nt, Homo sapiens
  misc_RNA (1)...(19): siRNA sense strand
gagaacgagauauuagaug

SEQ ID NO: 1522976 - RNA, 19 nt, Homo sapiens
  misc_RNA (1)...(19): siRNA sense strand
ggaaucugaaggcgcuuaa

SEQ ID NO: 1522977 - RNA, 19 nt, Homo sapiens
  misc_RNA (1)...(19): siRNA sense strand
aacgagauauuagauguga

SEQ ID NO: 1522978 - RNA, 19 nt, Homo sapiens
  misc_RNA (1)...(19): siRNA sense strand
gcuaaagccaagcauuguu

SEQ ID NO: 1522979 - RNA, 19 nt, Homo sapiens
  misc_RNA (1)...(19): siRNA sense strand
ugugacagauuacaagaag

SEQ ID NO: 1522980 - RNA, 19 nt, Homo sapiens
  misc_RNA (1)...(19): siRNA sense strand
gagucgacaucaucucauc

SEQ ID NO: 1522981 - RNA, 19 nt, Homo sapiens
  misc_RNA (1)...(19): siRNA sense strand
cccaugaugugcagauuca

SEQ ID NO: 1522982 - RNA, 19 nt, Homo sapiens
  misc_RNA (1)...(19): siRNA sense strand
ugaaagaaucagaggaguu

SEQ ID NO: 1522983 - RNA, 19 nt, Homo sapiens
  misc_RNA (1)...(19): siRNA sense strand
ccucugauucuuucuuaaa

SEQ ID NO: 1522984 - RNA, 19 nt, Homo sapiens
  misc_RNA (1)...(19): siRNA sense strand
uaucaaauucagcaaguug

SEQ ID NO: 1522985 - RNA, 19 nt, Homo sapiens
  misc_RNA (1)...(19): siRNA sense strand
caaaggaagcugugaaaau

SEQ ID NO: 1522986 - RNA, 19 nt, Homo sapiens
  misc_RNA (1)...(19): siRNA sense strand
uguagaccaucuccacaga

SEQ ID NO: 1522987 - RNA, 19 nt, Homo sapiens
  misc_RNA (1)...(19): siRNA sense strand
ccucacagagcucgaagaa

SEQ ID NO: 1522988 - RNA, 19 nt, Homo sapiens
  misc_RNA (1)...(19): siRNA sense strand
ugccacaguuguaagaguu

SEQ ID NO: 1522989 - RNA, 19 nt, Homo sapiens
  misc_RNA (1)...(19): siRNA sense strand
gaaaccgaaaucccucaga

SEQ ID NO: 1522990 - RNA, 19 nt, Homo sapiens
  misc_RNA (1)...(19): siRNA sense strand
cucaaagacucauucaaag

SEQ ID NO: 1522991 - RNA, 19 nt, Homo sapiens
  misc_RNA (1)...(19): siRNA sense strand
ucuaauguuucugcaaaga

SEQ ID NO: 1522992 - RNA, 19 nt, Homo sapiens
  misc_RNA (1)...(19): siRNA sense strand
agaaaagucucaacaacug

SEQ ID NO: 1522993 - RNA, 19 nt, Homo sapiens
  misc_RNA (1)...(19): siRNA sense strand
agauaaaugagcucaaaga

SEQ ID NO: 1522994 - RNA, 19 nt, Homo sapiens
  misc_RNA (1)...(19): siRNA sense strand
gugccaaagcugaggagua

SEQ ID NO: 1522995 - RNA, 19 nt, Homo sapiens
  misc_RNA (1)...(19): siRNA sense strand
gaggaggacagcaugaagu

SEQ ID NO: 1522996 - RNA, 19 nt, Homo sapiens
  misc_RNA (1)...(19): siRNA sense strand
ugggacgucucaucaaauc

SEQ ID NO: 1522997 - RNA, 19 nt, Homo sapiens
  misc_RNA (1)...(19): siRNA sense strand
accagcaguuuaauaaguu

SEQ ID NO: 1522998 - RNA, 19 nt, Homo sapiens
  misc_RNA (1)...(19): siRNA sense strand
caagagagcuggaguuugu

SEQ ID NO: 1522999 - RNA, 19 nt, Homo sapiens
  misc_RNA (1)...(19): siRNA sense strand
ggacagaaauauauugaga

SEQ ID NO: 1523000 - RNA, 19 nt, Homo sapiens
  misc_RNA (1)...(19): siRNA sense strand
gaaagaaucagaggaguua

SEQ ID NO: 1523001 - RNA, 19 nt, Homo sapiens
  misc_RNA (1)...(19): siRNA sense strand
gcacuuauaugguuuggaa

SEQ ID NO: 1523002 - RNA, 19 nt, Homo sapiens
  misc_RNA (1)...(19): siRNA sense strand
gaagaaggacagaaauaua

SEQ ID NO: 1523003 - RNA, 19 nt, Homo sapiens
  misc_RNA (1)...(19): siRNA sense strand
ugaaggcgcuuaaauauca

SEQ ID NO: 1523004 - RNA, 19 nt, Homo sapiens
  misc_RNA (1)...(19): siRNA sense strand
gcaauugaaugaugagguu

SEQ ID NO: 1523005 - RNA, 19 nt, Homo sapiens
  misc_RNA (1)...(19): siRNA sense strand
gcucagcacuuauaugguu

SEQ ID NO: 1523006 - RNA, 19 nt, Homo sapiens
  misc_RNA (1)...(19): siRNA sense strand
gcucaaagacucauucaaa

SEQ ID NO: 1523007 - RNA, 19 nt, Homo sapiens
  misc_RNA (1)...(19): siRNA sense strand
aaagacuucucacaacuua

SEQ ID NO: 1523008 - RNA, 19 nt, Homo sapiens
  misc_RNA (1)...(19): siRNA sense strand
gcucuaauguuucugcaaa

SEQ ID NO: 1523009 - RNA, 19 nt, Homo sapiens
  misc_RNA (1)...(19): siRNA sense strand
gggcuugaguuccuuaauu

SEQ ID NO: 1523010 - RNA, 19 nt, Homo sapiens
  misc_RNA (1)...(19): siRNA sense strand
gcgcuuaaauaucaaauuc

SEQ ID NO: 1523011 - RNA, 19 nt, Homo sapiens
  misc_RNA (1)...(19): siRNA sense strand
ucacagagcucgaagaaaa

SEQ ID NO: 1523012 - RNA, 19 nt, Homo sapiens
  misc_RNA (1)...(19): siRNA sense strand
cgagauaaaugagcucaaa

SEQ ID NO: 1523013 - RNA, 19 nt, Homo sapiens
  misc_RNA (1)...(19): siRNA sense strand
gagaagcaguggcagcuau

SEQ ID NO: 1523014 - RNA, 19 nt, Homo sapiens
  misc_RNA (1)...(19): siRNA sense strand
ggaagaaggacagaaauau

SEQ ID NO: 1523015 - RNA, 19 nt, Homo sapiens
  misc_RNA (1)...(19): siRNA sense strand
gagguucaguacauuauga

SEQ ID NO: 1523016 - RNA, 19 nt, Homo sapiens
  misc_RNA (1)...(19): siRNA sense strand
ggcuugaguuccuuaauuu

SEQ ID NO: 1523017 - RNA, 19 nt, Homo sapiens
  misc_RNA (1)...(19): siRNA sense strand
ccucacugcucuaauguuu

SEQ ID NO: 1523018 - RNA, 19 nt, Homo sapiens
  misc_RNA (1)...(19): siRNA sense strand
gcugggacgucucaucaaa

SEQ ID NO: 1523019 - RNA, 19 nt, Homo sapiens
  misc_RNA (1)...(19): siRNA sense strand
aaaccgaaaucccucagaa

SEQ ID NO: 1523020 - RNA, 19 nt, Homo sapiens
  misc_RNA (1)...(19): siRNA sense strand
gaaggacagaaauauauug

SEQ ID NO: 1523021 - RNA, 19 nt, Homo sapiens
  misc_RNA (1)...(19): siRNA sense strand
ggaagaacuuagccuccuu

SEQ ID NO: 1523022 - RNA, 19 nt, Homo sapiens
  misc_RNA (1)...(19): siRNA sense strand
gaaguguaccucaugaaga

SEQ ID NO: 1523023 - RNA, 19 nt, Homo sapiens
  misc_RNA (1)...(19): siRNA sense strand
aaacuuacguggcauuucu

SEQ ID NO: 1523024 - RNA, 19 nt, Homo sapiens
  misc_RNA (1)...(19): siRNA sense strand
ccacagagugcaagacaaa

SEQ ID NO: 1523025 - RNA, 19 nt, Homo sapiens
  misc_RNA (1)...(19): siRNA sense strand
gcaagugccacaguuguaa

SEQ ID NO: 1523026 - RNA, 19 nt, Homo sapiens
  misc_RNA (1)...(19): siRNA sense strand
ggaccugacugagcauuuc

SEQ ID NO: 1523027 - RNA, 19 nt, Homo sapiens
  misc_RNA (1)...(19): siRNA sense strand
cuuauucacuuccaucaaa

SEQ ID NO: 1523028 - RNA, 19 nt, Homo sapiens
  misc_RNA (1)...(19): siRNA sense strand
gaaagcagaacgggaagaa

SEQ ID NO: 1523029 - RNA, 19 nt, Homo sapiens
  misc_RNA (1)...(19): siRNA sense strand
ucagcaaguugauauguau

SEQ ID NO: 1523030 - RNA, 19 nt, Homo sapiens
  misc_RNA (1)...(19): siRNA sense strand
gaugagguucaguacauua

SEQ ID NO: 1523031 - RNA, 19 nt, Homo sapiens
  misc_RNA (1)...(19): siRNA sense strand
gcagaacgggaagaacuua

SEQ ID NO: 1523032 - RNA, 19 nt, Homo sapiens
  misc_RNA (1)...(19): siRNA sense strand
cagacuggcccuuuccuua

SEQ ID NO: 1523033 - RNA, 19 nt, Homo sapiens
  misc_RNA (1)...(19): siRNA sense strand
caaagacucauucaaagau

SEQ ID NO: 1523034 - RNA, 19 nt, Homo sapiens
  misc_RNA (1)...(19): siRNA sense strand
gaagucaucagaggaggua

SEQ ID NO: 1523035 - RNA, 19 nt, Homo sapiens
  misc_RNA (1)...(19): siRNA sense strand
ugagagacgagauaaauga

SEQ ID NO: 1523036 - RNA, 19 nt, Homo sapiens
  misc_RNA (1)...(19): siRNA sense strand
ggacgucucaucaaaucaa

SEQ ID NO: 1523037 - RNA, 19 nt, Homo sapiens
  misc_RNA (1)...(19): siRNA sense strand
aaaggaagcugugaaaauu

SEQ ID NO: 1523038 - RNA, 19 nt, Homo sapiens
  misc_RNA (1)...(19): siRNA sense strand
gacaaaggaagcugugaaa

SEQ ID NO: 1523039 - RNA, 19 nt, Homo sapiens
  misc_RNA (1)...(19): siRNA sense strand
aaguguaccucaugaagaa

SEQ ID NO: 1523040 - RNA, 19 nt, Homo sapiens
  misc_RNA (1)...(19): siRNA sense strand
agaacgagauauuagaugu

SEQ ID NO: 1523041 - RNA, 19 nt, Homo sapiens
  misc_RNA (1)...(19): siRNA sense strand
ugccaaagcugaggaguau

SEQ ID NO: 1523042 - RNA, 19 nt, Homo sapiens
  misc_RNA (1)...(19): siRNA sense strand
caaaagagaacgagauauu

SEQ ID NO: 1523043 - RNA, 19 nt, Homo sapiens
  misc_RNA (1)...(19): siRNA sense strand
gcagcaagaagaaaggauu

SEQ ID NO: 1523044 - RNA, 19 nt, Homo sapiens
  misc_RNA (1)...(19): siRNA sense strand
caaauucagcaaguugaua

SEQ ID NO: 1523045 - RNA, 19 nt, Homo sapiens
  misc_RNA (1)...(19): siRNA sense strand
gcauucaaagagcaacuua

SEQ ID NO: 1523046 - RNA, 19 nt, Homo sapiens
  misc_RNA (1)...(19): siRNA sense strand
caccagcaguuuaauaagu

SEQ ID NO: 1523047 - RNA, 19 nt, Homo sapiens
  misc_RNA (1)...(19): siRNA sense strand
ugacagauuacaagaagaa

SEQ ID NO: 1523048 - RNA, 19 nt, Homo sapiens
  misc_RNA (1)...(19): siRNA sense strand
uggaagucaugaaggauuu

SEQ ID NO: 1523049 - RNA, 19 nt, Homo sapiens
  misc_RNA (1)...(19): siRNA sense strand
cgagauauuagaugugaaa

SEQ ID NO: 1523050 - RNA, 19 nt, Homo sapiens
  misc_RNA (1)...(19): siRNA sense strand
ucaaagacucauucaaaga

SEQ ID NO: 1523051 - RNA, 19 nt, Homo sapiens
  misc_RNA (1)...(19): siRNA sense strand
gaagagcugggacgucuca

SEQ ID NO: 1523052 - RNA, 19 nt, Homo sapiens
  misc_RNA (1)...(19): siRNA sense strand
guagagaugcaguuucaga

SEQ ID NO: 1523053 - RNA, 19 nt, Homo sapiens
  misc_RNA (1)...(19): siRNA sense strand
gagcugggacgucucauca

SEQ ID NO: 1523054 - RNA, 19 nt, Homo sapiens
  misc_RNA (1)...(19): siRNA sense strand
ggagguagagaugcaguuu

SEQ ID NO: 1523055 - RNA, 19 nt, Homo sapiens
  misc_RNA (1)...(19): siRNA sense strand
gauagaagagugucauuuu

SEQ ID NO: 1523056 - RNA, 19 nt, Homo sapiens
  misc_RNA (1)...(19): siRNA sense strand
guugauauguaugcugaaa

SEQ ID NO: 1523057 - RNA, 19 nt, Homo sapiens
  misc_RNA (1)...(19): siRNA sense strand
ucacugcucuaauguuucu

SEQ ID NO: 1523058 - RNA, 19 nt, Homo sapiens
  misc_RNA (1)...(19): siRNA sense strand
uugaaucugugacugaauu

SEQ ID NO: 1523059 - RNA, 19 nt, Homo sapiens
  misc_RNA (1)...(19): siRNA sense strand
aaccucugauucuuucuua

SEQ ID NO: 1523060 - RNA, 19 nt, Homo sapiens
  misc_RNA (1)...(19): siRNA sense strand
gaacgagauauuagaugug

SEQ ID NO: 1523061 - RNA, 19 nt, Homo sapiens
  misc_RNA (1)...(19): siRNA sense strand
gaucgcaaguccugcaaac

SEQ ID NO: 1523062 - RNA, 19 nt, Homo sapiens
  misc_RNA (1)...(19): siRNA sense strand
uggaagaaggacagaaaua

SEQ ID NO: 1523063 - RNA, 19 nt, Homo sapiens
  misc_RNA (1)...(19): siRNA sense strand
ccagcaguuuaauaaguuu

SEQ ID NO: 1523064 - RNA, 19 nt, Homo sapiens
  misc_RNA (1)...(19): siRNA sense strand
uccaggaggugauagaaga

SEQ ID NO: 1523065 - RNA, 19 nt, Homo sapiens
  misc_RNA (1)...(19): siRNA sense strand
gaaggcgcuuaaauaucaa

SEQ ID NO: 1523066 - RNA, 19 nt, Homo sapiens
  misc_RNA (1)...(19): siRNA sense strand
gaugcaguuucagagcuua

SEQ ID NO: 1523067 - RNA, 19 nt, Homo sapiens
  misc_RNA (1)...(19): siRNA sense strand
agacuucucacaacuuaaa

SEQ ID NO: 1523068 - RNA, 19 nt, Homo sapiens
  misc_RNA (1)...(19): siRNA sense strand
aaagagaacgagauauuag

SEQ ID NO: 1523069 - RNA, 19 nt, Homo sapiens
  misc_RNA (1)...(19): siRNA sense strand
gcaaacuuacguggcauuu

SEQ ID NO: 1523070 - RNA, 19 nt, Homo sapiens
  misc_RNA (1)...(19): siRNA sense strand
caugagagacgagauaaau

SEQ ID NO: 1523071 - RNA, 19 nt, Homo sapiens
  misc_RNA (1)...(19): siRNA sense strand
uguacaaggugguccaguu

SEQ ID NO: 1523072 - RNA, 19 nt, Homo sapiens
  misc_RNA (1)...(19): siRNA sense strand
gcuugaguuccuuaauuua

SEQ ID NO: 1523073 - RNA, 19 nt, Homo sapiens
  misc_RNA (1)...(19): siRNA sense strand
ucugaaggcgcuuaaauau

SEQ ID NO: 1523074 - RNA, 19 nt, Homo sapiens
  misc_RNA (1)...(19): siRNA sense strand
ggaguacugcgccaugaga

SEQ ID NO: 1523075 - RNA, 19 nt, Homo sapiens
  misc_RNA (1)...(19): siRNA sense strand
cggccucacugcucuaaug

SEQ ID NO: 1523076 - RNA, 19 nt, Homo sapiens
  misc_RNA (1)...(19): siRNA sense strand
gaagcaguggcagcuauuu

SEQ ID NO: 1523077 - RNA, 19 nt, Homo sapiens
  misc_RNA (1)...(19): siRNA sense strand
guacaaggugguccaguuc

SEQ ID NO: 1523078 - RNA, 19 nt, Homo sapiens
  misc_RNA (1)...(19): siRNA sense strand
uaaaaccucugauucuuuc

SEQ ID NO: 1523079 - RNA, 19 nt, Homo sapiens
  misc_RNA (1)...(19): siRNA sense strand
gcaagcccguguagaccau

SEQ ID NO: 1523080 - RNA, 19 nt, Homo sapiens
  misc_RNA (1)...(19): siRNA sense strand
ccaguuccaucaagucaag

SEQ ID NO: 1523081 - RNA, 19 nt, Homo sapiens
  misc_RNA (1)...(19): siRNA sense strand
cagaggagguagagaugca

SEQ ID NO: 1523082 - RNA, 19 nt, Homo sapiens
  misc_RNA (1)...(19): siRNA sense strand
gagaacgagauauuagaug

SEQ ID NO: 1523083 - RNA, 19 nt, Homo sapiens
  misc_RNA (1)...(19): siRNA sense strand
ggaaucugaaggcgcuuaa

SEQ ID NO: 1523084 - RNA, 19 nt, Homo sapiens
  misc_RNA (1)...(19): siRNA sense strand
cagaggagccccuguaaaa

SEQ ID NO: 1523085 - RNA, 19 nt, Homo sapiens
  misc_RNA (1)...(19): siRNA sense strand
aacgagauauuagauguga

SEQ ID NO: 1523086 - RNA, 19 nt, Homo sapiens
  misc_RNA (1)...(19): siRNA sense strand
gcuaaagccaagcauuguu

SEQ ID NO: 1523087 - RNA, 19 nt, Homo sapiens
  misc_RNA (1)...(19): siRNA sense strand
ugugacagauuacaagaag

SEQ ID NO: 1523088 - RNA, 19 nt, Homo sapiens
  misc_RNA (1)...(19): siRNA sense strand
gagucgacaucaucucauc

SEQ ID NO: 1523089 - RNA, 19 nt, Homo sapiens
  misc_RNA (1)...(19): siRNA sense strand
cccaugaugugcagauuca

SEQ ID NO: 1523090 - RNA, 19 nt, Homo sapiens
  misc_RNA (1)...(19): siRNA sense strand
ugaaagaaucagaggaguu

SEQ ID NO: 1523091 - RNA, 19 nt, Homo sapiens
  misc_RNA (1)...(19): siRNA sense strand
caucagaggagguagagau

SEQ ID NO: 1523092 - RNA, 19 nt, Homo sapiens
  misc_RNA (1)...(19): siRNA sense strand
agguagagaugcaguuuca

SEQ ID NO: 1523093 - RNA, 19 nt, Homo sapiens
  misc_RNA (1)...(19): siRNA sense strand
ccucugauucuuucuuaaa

SEQ ID NO: 1523094 - RNA, 19 nt, Homo sapiens
  misc_RNA (1)...(19): siRNA sense strand
uaucaaauucagcaaguug

SEQ ID NO: 1523095 - RNA, 19 nt, Homo sapiens
  misc_RNA (1)...(19): siRNA sense strand
uggcauuucugaagucauc

SEQ ID NO: 1523096 - RNA, 19 nt, Homo sapiens
  misc_RNA (1)...(19): siRNA sense strand
caaaggaagcugugaaaau

SEQ ID NO: 1523097 - RNA, 19 nt, Homo sapiens
  misc_RNA (1)...(19): siRNA sense strand
ccucacagagcucgaagaa

SEQ ID NO: 1523098 - RNA, 19 nt, Homo sapiens
  misc_RNA (1)...(19): siRNA sense strand
gaaagagacuccagggaaa

SEQ ID NO: 1523099 - RNA, 19 nt, Homo sapiens
  misc_RNA (1)...(19): siRNA sense strand
ugacagugauggccuuuga

SEQ ID NO: 1523100 - RNA, 19 nt, Homo sapiens
  misc_RNA (1)...(19): siRNA sense strand
caaagaagaccaucagcuu

SEQ ID NO: 1523101 - RNA, 19 nt, Homo sapiens
  misc_RNA (1)...(19): siRNA sense strand
gaaauccaguuggcugugu

SEQ ID NO: 1523102 - RNA, 19 nt, Homo sapiens
  misc_RNA (1)...(19): siRNA sense strand
ucacuuaacccucucguau

SEQ ID NO: 1523103 - RNA, 19 nt, Homo sapiens
  misc_RNA (1)...(19): siRNA sense strand
gagauaccuccuacaauga

SEQ ID NO: 1523104 - RNA, 19 nt, Homo sapiens
  misc_RNA (1)...(19): siRNA sense strand
caaguucuuuggucucuuc

SEQ ID NO: 1523105 - RNA, 19 nt, Homo sapiens
  misc_RNA (1)...(19): siRNA sense strand
guucuuuggucucuucuau

SEQ ID NO: 1523106 - RNA, 19 nt, Homo sapiens
  misc_RNA (1)...(19): siRNA sense strand
gagucugguucaaucgaua

SEQ ID NO: 1523107 - RNA, 19 nt, Homo sapiens
  misc_RNA (1)...(19): siRNA sense strand
gcucagucauugcugucua

SEQ ID NO: 1523108 - RNA, 19 nt, Homo sapiens
  misc_RNA (1)...(19): siRNA sense strand
gcacucaggagguuacuag

SEQ ID NO: 1523109 - RNA, 19 nt, Homo sapiens
  misc_RNA (1)...(19): siRNA sense strand
ucucugaccucuccuucuu

SEQ ID NO: 1523110 - RNA, 19 nt, Homo sapiens
  misc_RNA (1)...(19): siRNA sense strand
gaccucugcuuuaccacaa

SEQ ID NO: 1523111 - RNA, 19 nt, Homo sapiens
  misc_RNA (1)...(19): siRNA sense strand
gauaccuccuacaaugaaa

SEQ ID NO: 1523112 - RNA, 19 nt, Homo sapiens
  misc_RNA (1)...(19): siRNA sense strand
gcuccacucuccaauguac

SEQ ID NO: 1523113 - RNA, 19 nt, Homo sapiens
  misc_RNA (1)...(19): siRNA sense strand
gaggucccaucucugauuc

SEQ ID NO: 1523114 - RNA, 19 nt, Homo sapiens
  misc_RNA (1)...(19): siRNA sense strand
aggcagugcugaggauuaa

SEQ ID NO: 1523115 - RNA, 19 nt, Homo sapiens
  misc_RNA (1)...(19): siRNA sense strand
gcaacacacucaucauccu

SEQ ID NO: 1523116 - RNA, 19 nt, Homo sapiens
  misc_RNA (1)...(19): siRNA sense strand
uaugugaggucccaucucu

SEQ ID NO: 1523117 - RNA, 19 nt, Homo sapiens
  misc_RNA (1)...(19): siRNA sense strand
gagauaaagcgagcacuca

SEQ ID NO: 1523118 - RNA, 19 nt, Homo sapiens
  misc_RNA (1)...(19): siRNA sense strand
ggagguuacuagggaagga

SEQ ID NO: 1523119 - RNA, 19 nt, Homo sapiens
  misc_RNA (1)...(19): siRNA sense strand
gccucauccuugccucuua

SEQ ID NO: 1523120 - RNA, 19 nt, Homo sapiens
  misc_RNA (1)...(19): siRNA sense strand
ugaggaacaaggagauaaa

SEQ ID NO: 1523121 - RNA, 19 nt, Homo sapiens
  misc_RNA (1)...(19): siRNA sense strand
gggcaacacacucaucauc

SEQ ID NO: 1523122 - RNA, 19 nt, Homo sapiens
  misc_RNA (1)...(19): siRNA sense strand
guauacacccugaggaaca

SEQ ID NO: 1523123 - RNA, 19 nt, Homo sapiens
  misc_RNA (1)...(19): siRNA sense strand
ugauggccuuugaccgaua

SEQ ID NO: 1523124 - RNA, 19 nt, Homo sapiens
  misc_RNA (1)...(19): siRNA sense strand
cacuuaacccucucguaua

SEQ ID NO: 1523125 - RNA, 19 nt, Homo sapiens
  misc_RNA (1)...(19): siRNA sense strand
ccucauccuugccucuuau

SEQ ID NO: 1523126 - RNA, 19 nt, Homo sapiens
  misc_RNA (1)...(19): siRNA sense strand
ucuguggccuggguuauga

SEQ ID NO: 1523127 - RNA, 19 nt, Homo sapiens
  misc_RNA (1)...(19): siRNA sense strand
uuaugagucugguucaauc

SEQ ID NO: 1523128 - RNA, 19 nt, Homo sapiens
  misc_RNA (1)...(19): siRNA sense strand
ggacucucuuugugguugu

SEQ ID NO: 1523129 - RNA, 19 nt, Homo sapiens
  misc_RNA (1)...(19): siRNA sense strand
caggcagugcugaggauua

SEQ ID NO: 1523130 - RNA, 19 nt, Homo sapiens
  misc_RNA (1)...(19): siRNA sense strand
ugaggucccaucucugauu

SEQ ID NO: 1523131 - RNA, 19 nt, Homo sapiens
  misc_RNA (1)...(19): siRNA sense strand
ucacuguggucacccucuu

SEQ ID NO: 1523132 - RNA, 19 nt, Homo sapiens
  misc_RNA (1)...(19): siRNA sense strand
uauacacccugaggaacaa

SEQ ID NO: 1523133 - RNA, 19 nt, Homo sapiens
  misc_RNA (1)...(19): siRNA sense strand
gggcacuccuucacuuaac

SEQ ID NO: 1523134 - RNA, 19 nt, Homo sapiens
  misc_RNA (1)...(19): siRNA sense strand
gcaucuguggccuggguua

SEQ ID NO: 1523135 - RNA, 19 nt, Homo sapiens
  misc_RNA (1)...(19): siRNA sense strand
gcacuggaaaggacucucu

SEQ ID NO: 1523136 - RNA, 19 nt, Homo sapiens
  misc_RNA (1)...(19): siRNA sense strand
ugugaggucccaucucuga

SEQ ID NO: 1523137 - RNA, 19 nt, Homo sapiens
  misc_RNA (1)...(19): siRNA sense strand
cuucugggcuucucugaac

SEQ ID NO: 1523138 - RNA, 19 nt, Homo sapiens
  misc_RNA (1)...(19): siRNA sense strand
gugggcacuccuucacuua

SEQ ID NO: 1523139 - RNA, 19 nt, Homo sapiens
  misc_RNA (1)...(19): siRNA sense strand
aggcuccacucuccaaugu

SEQ ID NO: 1523140 - RNA, 19 nt, Homo sapiens
  misc_RNA (1)...(19): siRNA sense strand
gaugcucuguccagcucuu

SEQ ID NO: 1523141 - RNA, 19 nt, Homo sapiens
  misc_RNA (1)...(19): siRNA sense strand
ccacuaugccaccaucauc

SEQ ID NO: 1523142 - RNA, 19 nt, Homo sapiens
  misc_RNA (1)...(19): siRNA sense strand
acuuaacccucucguauac

SEQ ID NO: 1523143 - RNA, 19 nt, Homo sapiens
  misc_RNA (1)...(19): siRNA sense strand
gcaaguucuuuggucucuu

SEQ ID NO: 1523144 - RNA, 19 nt, Homo sapiens
  misc_RNA (1)...(19): siRNA sense strand
cuacaaugaaauccaguug

SEQ ID NO: 1523145 - RNA, 19 nt, Homo sapiens
  misc_RNA (1)...(19): siRNA sense strand
gguuaugagucugguucaa

SEQ ID NO: 1523146 - RNA, 19 nt, Homo sapiens
  misc_RNA (1)...(19): siRNA sense strand
cuucuuggaccucugcuuu

SEQ ID NO: 1523147 - RNA, 19 nt, Homo sapiens
  misc_RNA (1)...(19): siRNA sense strand
ggcaaguucuuuggucucu

SEQ ID NO: 1523148 - RNA, 19 nt, Homo sapiens
  misc_RNA (1)...(19): siRNA sense strand
ggucccaucucugauucga

SEQ ID NO: 1523149 - RNA, 19 nt, Homo sapiens
  misc_RNA (1)...(19): siRNA sense strand
gcagugcugaggauuaacu

SEQ ID NO: 1523150 - RNA, 19 nt, Homo sapiens
  misc_RNA (1)...(19): siRNA sense strand
gauggccuuugaccgauac

SEQ ID NO: 1523151 - RNA, 19 nt, Homo sapiens
  misc_RNA (1)...(19): siRNA sense strand
agauaccuccuacaaugaa

SEQ ID NO: 1523152 - RNA, 19 nt, Homo sapiens
  misc_RNA (1)...(19): siRNA sense strand
ugagucugguucaaucgau

SEQ ID NO: 1523153 - RNA, 19 nt, Homo sapiens
  misc_RNA (1)...(19): siRNA sense strand
guuaugagucugguucaau

SEQ ID NO: 1523154 - RNA, 19 nt, Homo sapiens
  misc_RNA (1)...(19): siRNA sense strand
gaagcagucuacccagaua

SEQ ID NO: 1523155 - RNA, 19 nt, Homo sapiens
  misc_RNA (1)...(19): siRNA sense strand
gaagaaagacaucguagug

SEQ ID NO: 1523156 - RNA, 19 nt, Homo sapiens
  misc_RNA (1)...(19): siRNA sense strand
gggagaagcugcccucugu

SEQ ID NO: 1523157 - RNA, 19 nt, Homo sapiens
  misc_RNA (1)...(19): siRNA sense strand
gcaguggccuaaccuguga

SEQ ID NO: 1523158 - RNA, 19 nt, Homo sapiens
  misc_RNA (1)...(19): siRNA sense strand
gaugggaaguacauaguga

SEQ ID NO: 1523159 - RNA, 19 nt, Homo sapiens
  misc_RNA (1)...(19): siRNA sense strand
ggcaguaccuucugugugu

SEQ ID NO: 1523160 - RNA, 19 nt, Homo sapiens
  misc_RNA (1)...(19): siRNA sense strand
gaacagcaguggccuaacc

SEQ ID NO: 1523161 - RNA, 19 nt, Homo sapiens
  misc_RNA (1)...(19): siRNA sense strand
ucaaggacaucaauagagu

SEQ ID NO: 1523162 - RNA, 19 nt, Homo sapiens
  misc_RNA (1)...(19): siRNA sense strand
gccaggagcucaucuucug

SEQ ID NO: 1523163 - RNA, 19 nt, Homo sapiens
  misc_RNA (1)...(19): siRNA sense strand
gaaggugcuuggcaucaca

SEQ ID NO: 1523164 - RNA, 19 nt, Homo sapiens
  misc_RNA (1)...(19): siRNA sense strand
gcacaacaacaucuucugu

SEQ ID NO: 1523165 - RNA, 19 nt, Homo sapiens
  misc_RNA (1)...(19): siRNA sense strand
agaagagggugcuggagaa

SEQ ID NO: 1523166 - RNA, 19 nt, Homo sapiens
  misc_RNA (1)...(19): siRNA sense strand
agaaguggaucaaccugaa

SEQ ID NO: 1523167 - RNA, 19 nt, Homo sapiens
  misc_RNA (1)...(19): siRNA sense strand
gaagcugcccucugucaug

SEQ ID NO: 1523168 - RNA, 19 nt, Homo sapiens
  misc_RNA (1)...(19): siRNA sense strand
gaugcuaggccacaaguau

SEQ ID NO: 1523169 - RNA, 19 nt, Homo sapiens
  misc_RNA (1)...(19): siRNA sense strand
uuccacagcuccuacguuu

SEQ ID NO: 1523170 - RNA, 19 nt, Homo sapiens
  misc_RNA (1)...(19): siRNA sense strand
gagaagcugcccucuguca

SEQ ID NO: 1523171 - RNA, 19 nt, Homo sapiens
  misc_RNA (1)...(19): siRNA sense strand
ccacagcuccuacguuugg

SEQ ID NO: 1523172 - RNA, 19 nt, Homo sapiens
  misc_RNA (1)...(19): siRNA sense strand
agaaucagguggcggagau

SEQ ID NO: 1523173 - RNA, 19 nt, Homo sapiens
  misc_RNA (1)...(19): siRNA sense strand
gaccacagcaucuacaucu

SEQ ID NO: 1523174 - RNA, 19 nt, Homo sapiens
  misc_RNA (1)...(19): siRNA sense strand
ggaagcagucuacccagau

SEQ ID NO: 1523175 - RNA, 19 nt, Homo sapiens
  misc_RNA (1)...(19): siRNA sense strand
ggaagaaagacaucguagu

SEQ ID NO: 1523176 - RNA, 19 nt, Homo sapiens
  misc_RNA (1)...(19): siRNA sense strand
cagcagcacaucuuuaaca

SEQ ID NO: 1523177 - RNA, 19 nt, Homo sapiens
  misc_RNA (1)...(19): siRNA sense strand
caugugagguucugguucu

SEQ ID NO: 1523178 - RNA, 19 nt, Homo sapiens
  misc_RNA (1)...(19): siRNA sense strand
guugggaaccgccauguga

SEQ ID NO: 1523179 - RNA, 19 nt, Homo sapiens
  misc_RNA (1)...(19): siRNA sense strand
cagaacagcaguggccuaa

SEQ ID NO: 1523180 - RNA, 19 nt, Homo sapiens
  misc_RNA (1)...(19): siRNA sense strand
agagggugcuggagaagug

SEQ ID NO: 1523181 - RNA, 19 nt, Homo sapiens
  misc_RNA (1)...(19): siRNA sense strand
ugggcgagcugcacaacaa

SEQ ID NO: 1523182 - RNA, 19 nt, Homo sapiens
  misc_RNA (1)...(19): siRNA sense strand
gaacaagcagcagcacauc

SEQ ID NO: 1523183 - RNA, 19 nt, Homo sapiens
  misc_RNA (1)...(19): siRNA sense strand
cagaggacagcagcuauuu

SEQ ID NO: 1523184 - RNA, 19 nt, Homo sapiens
  misc_RNA (1)...(19): siRNA sense strand
gguaucuuguagagucauu

SEQ ID NO: 1523185 - RNA, 19 nt, Homo sapiens
  misc_RNA (1)...(19): siRNA sense strand
ggaaggcggaagcagucua

SEQ ID NO: 1523186 - RNA, 19 nt, Homo sapiens
  misc_RNA (1)...(19): siRNA sense strand
caagcagcagcacaucuuu

SEQ ID NO: 1523187 - RNA, 19 nt, Homo sapiens
  misc_RNA (1)...(19): siRNA sense strand
gagaaggugcuuggcauca

SEQ ID NO: 1523188 - RNA, 19 nt, Homo sapiens
  misc_RNA (1)...(19): siRNA sense strand
ugaagcacaucguguccau

SEQ ID NO: 1523189 - RNA, 19 nt, Homo sapiens
  misc_RNA (1)...(19): siRNA sense strand
aagcagcagcacaucuuua

SEQ ID NO: 1523190 - RNA, 19 nt, Homo sapiens
  misc_RNA (1)...(19): siRNA sense strand
ucugggauguggaggagaa

SEQ ID NO: 1523191 - RNA, 19 nt, Homo sapiens
  misc_RNA (1)...(19): siRNA sense strand
ucagaggacagcagcuauu

SEQ ID NO: 1523192 - RNA, 19 nt, Homo sapiens
  misc_RNA (1)...(19): siRNA sense strand
gggugucacucgagaaggu

SEQ ID NO: 1523193 - RNA, 19 nt, Homo sapiens
  misc_RNA (1)...(19): siRNA sense strand
ccgaggagacggugcagaa

SEQ ID NO: 1523194 - RNA, 19 nt, Homo sapiens
  misc_RNA (1)...(19): siRNA sense strand
gaggacagcagcuauuuug

SEQ ID NO: 1523195 - RNA, 19 nt, Homo sapiens
  misc_RNA (1)...(19): siRNA sense strand
cugaaggucucccugucuu

SEQ ID NO: 1523196 - RNA, 19 nt, Homo sapiens
  misc_RNA (1)...(19): siRNA sense strand
acaagcagcagcacaucuu

SEQ ID NO: 1523197 - RNA, 19 nt, Homo sapiens
  misc_RNA (1)...(19): siRNA sense strand
ggccuccucugccaguuca

SEQ ID NO: 1523198 - RNA, 19 nt, Homo sapiens
  misc_RNA (1)...(19): siRNA sense strand
gagguucugguucuuggaa

SEQ ID NO: 1523199 - RNA, 19 nt, Homo sapiens
  misc_RNA (1)...(19): siRNA sense strand
ggacuggaagaaagacauc

SEQ ID NO: 1523200 - RNA, 19 nt, Homo sapiens
  misc_RNA (1)...(19): siRNA sense strand
guggccuucucacccaaua

SEQ ID NO: 1523201 - RNA, 19 nt, Homo sapiens
  misc_RNA (1)...(19): siRNA sense strand
gggauguggaggagaagaa

SEQ ID NO: 1523202 - RNA, 19 nt, Homo sapiens
  misc_RNA (1)...(19): siRNA sense strand
gaaggcggaagcagucuac

SEQ ID NO: 1523203 - RNA, 19 nt, Homo sapiens
  misc_RNA (1)...(19): siRNA sense strand
ucagugcucuggccuucuc

SEQ ID NO: 1523204 - RNA, 19 nt, Homo sapiens
  misc_RNA (1)...(19): siRNA sense strand
ucaauagagugggcaaggu

SEQ ID NO: 1523205 - RNA, 19 nt, Homo sapiens
  misc_RNA (1)...(19): siRNA sense strand
gcagcuauuuugucacugu

SEQ ID NO: 1523206 - RNA, 19 nt, Homo sapiens
  misc_RNA (1)...(19): siRNA sense strand
gcugugugguggugauuuu

SEQ ID NO: 1523207 - RNA, 19 nt, Homo sapiens
  misc_RNA (1)...(19): siRNA sense strand
cguaguggccuccaacaag

SEQ ID NO: 1523208 - RNA, 19 nt, Homo sapiens
  misc_RNA (1)...(19): siRNA sense strand
agcagcagcacaucuuuaa

SEQ ID NO: 1523209 - RNA, 19 nt, Homo sapiens
  misc_RNA (1)...(19): siRNA sense strand
uggcuguccugcguguaua

SEQ ID NO: 1523210 - RNA, 19 nt, Homo sapiens
  misc_RNA (1)...(19): siRNA sense strand
gaaguggaucaaccugaag

SEQ ID NO: 1523211 - RNA, 19 nt, Homo sapiens
  misc_RNA (1)...(19): siRNA sense strand
ggccuucucacccaauaug

SEQ ID NO: 1523212 - RNA, 19 nt, Homo sapiens
  misc_RNA (1)...(19): siRNA sense strand
ggaccacagcaucuacauc

SEQ ID NO: 1523213 - RNA, 19 nt, Homo sapiens
  misc_RNA (1)...(19): siRNA sense strand
uggcugcacagaugggaua

SEQ ID NO: 1523214 - RNA, 19 nt, Homo sapiens
  misc_RNA (1)...(19): siRNA sense strand
gaagagggugcuggagaag

SEQ ID NO: 1523215 - RNA, 19 nt, Homo sapiens
  misc_RNA (1)...(19): siRNA sense strand
gagcugcacaacaacaucu

SEQ ID NO: 1523216 - RNA, 19 nt, Homo sapiens
  misc_RNA (1)...(19): siRNA sense strand
cacccaauaugaagcacau

SEQ ID NO: 1523217 - RNA, 19 nt, Homo sapiens
  misc_RNA (1)...(19): siRNA sense strand
gagaugcuaggccacaagu

SEQ ID NO: 1523218 - RNA, 19 nt, Homo sapiens
  misc_RNA (1)...(19): siRNA sense strand
gcccaagccacacuaccuu

SEQ ID NO: 1523219 - RNA, 19 nt, Homo sapiens
  misc_RNA (1)...(19): siRNA sense strand
cugcacagaugggauaguc

SEQ ID NO: 1523220 - RNA, 19 nt, Homo sapiens
  misc_RNA (1)...(19): siRNA sense strand
uauaaggaccacagcaucu

SEQ ID NO: 1523221 - RNA, 19 nt, Homo sapiens
  misc_RNA (1)...(19): siRNA sense strand
ucacaaggcuucaaucaag

SEQ ID NO: 1523222 - RNA, 19 nt, Homo sapiens
  misc_RNA (1)...(19): siRNA sense strand
ccauuuagaucaccuguug

SEQ ID NO: 1523223 - RNA, 19 nt, Homo sapiens
  misc_RNA (1)...(19): siRNA sense strand
acgcaacacugucaacaua

SEQ ID NO: 1523224 - RNA, 19 nt, Homo sapiens
  misc_RNA (1)...(19): siRNA sense strand
gccaggacccgaccauuua

SEQ ID NO: 1523225 - RNA, 19 nt, Homo sapiens
  misc_RNA (1)...(19): siRNA sense strand
ccaagugacuguaguugug

SEQ ID NO: 1523226 - RNA, 19 nt, Homo sapiens
  misc_RNA (1)...(19): siRNA sense strand
uagaucaccuguuguuaga

SEQ ID NO: 1523227 - RNA, 19 nt, Homo sapiens
  misc_RNA (1)...(19): siRNA sense strand
gagcugcccucagauccua

SEQ ID NO: 1523228 - RNA, 19 nt, Homo sapiens
  misc_RNA (1)...(19): siRNA sense strand
ucaccuagguuguuugcaa

SEQ ID NO: 1523229 - RNA, 19 nt, Homo sapiens
  misc_RNA (1)...(19): siRNA sense strand
gaucaccuguuguuagaca

SEQ ID NO: 1523230 - RNA, 19 nt, Homo sapiens
  misc_RNA (1)...(19): siRNA sense strand
gcaacacugucaacauagu

SEQ ID NO: 1523231 - RNA, 19 nt, Homo sapiens
  misc_RNA (1)...(19): siRNA sense strand
caccuagguuguuugcaaa

SEQ ID NO: 1523232 - RNA, 19 nt, Homo sapiens
  misc_RNA (1)...(19): siRNA sense strand
cacaaggcuucaaucaaga

SEQ ID NO: 1523233 - RNA, 19 nt, Homo sapiens
  misc_RNA (1)...(19): siRNA sense strand
aagcucaccuagguuguuu

SEQ ID NO: 1523234 - RNA, 19 nt, Homo sapiens
  misc_RNA (1)...(19): siRNA sense strand
cuuccaagcucaccuaggu

SEQ ID NO: 1523235 - RNA, 19 nt, Homo sapiens
  misc_RNA (1)...(19): siRNA sense strand
gacccgaccauuuagauca

SEQ ID NO: 1523236 - RNA, 19 nt, Homo sapiens
  misc_RNA (1)...(19): siRNA sense strand
caacacugucaacauaguu

SEQ ID NO: 1523237 - RNA, 19 nt, Homo sapiens
  misc_RNA (1)...(19): siRNA sense strand
gaucucacaaggcuucaau

SEQ ID NO: 1523238 - RNA, 19 nt, Homo sapiens
  misc_RNA (1)...(19): siRNA sense strand
caguuuauuucuagcuaug

SEQ ID NO: 1523239 - RNA, 19 nt, Homo sapiens
  misc_RNA (1)...(19): siRNA sense strand
uuagaucaccuguuguuag

SEQ ID NO: 1523240 - RNA, 19 nt, Homo sapiens
  misc_RNA (1)...(19): siRNA sense strand
cuuugcagcuguagaaugg

SEQ ID NO: 1523241 - RNA, 19 nt, Homo sapiens
  misc_RNA (1)...(19): siRNA sense strand
guuagacacgcaacacugu

SEQ ID NO: 1523242 - RNA, 19 nt, Homo sapiens
  misc_RNA (1)...(19): siRNA sense strand
ggacccgaccauuuagauc

SEQ ID NO: 1523243 - RNA, 19 nt, Homo sapiens
  misc_RNA (1)...(19): siRNA sense strand
caagcucaccuagguuguu

SEQ ID NO: 1523244 - RNA, 19 nt, Homo sapiens
  misc_RNA (1)...(19): siRNA sense strand
ccaaugcccaagugacugu

SEQ ID NO: 1523245 - RNA, 19 nt, Homo sapiens
  misc_RNA (1)...(19): siRNA sense strand
agccaggacccgaccauuu

SEQ ID NO: 1523246 - RNA, 19 nt, Homo sapiens
  misc_RNA (1)...(19): siRNA sense strand
ucucacaaggcuucaauca

SEQ ID NO: 1523247 - RNA, 19 nt, Homo sapiens
  misc_RNA (1)...(19): siRNA sense strand
gaucuuggcucgcaacuuu

SEQ ID NO: 1523248 - RNA, 19 nt, Homo sapiens
  misc_RNA (1)...(19): siRNA sense strand
gagaggagcucaugaagau

SEQ ID NO: 1523249 - RNA, 19 nt, Homo sapiens
  misc_RNA (1)...(19): siRNA sense strand
gaggagaaccuguguaaga

SEQ ID NO: 1523250 - RNA, 19 nt, Homo sapiens
  misc_RNA (1)...(19): siRNA sense strand
ugacaucucuaccgaaaug

SEQ ID NO: 1523251 - RNA, 19 nt, Homo sapiens
  misc_RNA (1)...(19): siRNA sense strand
caugacaucucuaccgaaa

SEQ ID NO: 1523252 - RNA, 19 nt, Homo sapiens
  misc_RNA (1)...(19): siRNA sense strand
gcaagcgcaugaaugaaug

SEQ ID NO: 1523253 - RNA, 19 nt, Homo sapiens
  misc_RNA (1)...(19): siRNA sense strand
uacaagggcugcugugaga

SEQ ID NO: 1523254 - RNA, 19 nt, Homo sapiens
  misc_RNA (1)...(19): siRNA sense strand
cagaguaccugcugaggau

SEQ ID NO: 1523255 - RNA, 19 nt, Homo sapiens
  misc_RNA (1)...(19): siRNA sense strand
ugacugaccuggaggacau

SEQ ID NO: 1523256 - RNA, 19 nt, Homo sapiens
  misc_RNA (1)...(19): siRNA sense strand
gagaaccuguguaagaucu

SEQ ID NO: 1523257 - RNA, 19 nt, Homo sapiens
  misc_RNA (1)...(19): siRNA sense strand
ggacucacccauugacugu

SEQ ID NO: 1523258 - RNA, 19 nt, Homo sapiens
  misc_RNA (1)...(19): siRNA sense strand
ggagagcguggccagagua

SEQ ID NO: 1523259 - RNA, 19 nt, Homo sapiens
  misc_RNA (1)...(19): siRNA sense strand
gaagggccucucugucuga

SEQ ID NO: 1523260 - RNA, 19 nt, Homo sapiens
  misc_RNA (1)...(19): siRNA sense strand
caucaggcuuggaggagaa

SEQ ID NO: 1523261 - RNA, 19 nt, Homo sapiens
  misc_RNA (1)...(19): siRNA sense strand
auacaaggaucagaaagga

SEQ ID NO: 1523262 - RNA, 19 nt, Homo sapiens
  misc_RNA (1)...(19): siRNA sense strand
guuucgagcuacagccuuu

SEQ ID NO: 1523263 - RNA, 19 nt, Homo sapiens
  misc_RNA (1)...(19): siRNA sense strand
gaaaugugccgggagaaag

SEQ ID NO: 1523264 - RNA, 19 nt, Homo sapiens
  misc_RNA (1)...(19): siRNA sense strand
agaugaaggugaaggacuu

SEQ ID NO: 1523265 - RNA, 19 nt, Homo sapiens
  misc_RNA (1)...(19): siRNA sense strand
cagcccagguucaggagaa

SEQ ID NO: 1523266 - RNA, 19 nt, Homo sapiens
  misc_RNA (1)...(19): siRNA sense strand
ugaaggacuugagggacua

SEQ ID NO: 1523267 - RNA, 19 nt, Homo sapiens
  misc_RNA (1)...(19): siRNA sense strand
ugccaacgguuucgagcua

SEQ ID NO: 1523268 - RNA, 19 nt, Homo sapiens
  misc_RNA (1)...(19): siRNA sense strand
ggcaagcgcaugaaugaau

SEQ ID NO: 1523269 - RNA, 19 nt, Homo sapiens
  misc_RNA (1)...(19): siRNA sense strand
gcuauacaaggaucagaaa

SEQ ID NO: 1523270 - RNA, 19 nt, Homo sapiens
  misc_RNA (1)...(19): siRNA sense strand
gagcugauggagagaguga

SEQ ID NO: 1523271 - RNA, 19 nt, Homo sapiens
  misc_RNA (1)...(19): siRNA sense strand
agaccugcuuggacuguaa

SEQ ID NO: 1523272 - RNA, 19 nt, Homo sapiens
  misc_RNA (1)...(19): siRNA sense strand
guggcaagcgcaugaauga

SEQ ID NO: 1523273 - RNA, 19 nt, Homo sapiens
  misc_RNA (1)...(19): siRNA sense strand
ugacucagaggacagcuuu

SEQ ID NO: 1523274 - RNA, 19 nt, Homo sapiens
  misc_RNA (1)...(19): siRNA sense strand
ggacauugaaggccugaca

SEQ ID NO: 1523275 - RNA, 19 nt, Homo sapiens
  misc_RNA (1)...(19): siRNA sense strand
ugacccggcuauacaagga

SEQ ID NO: 1523276 - RNA, 19 nt, Homo sapiens
  misc_RNA (1)...(19): siRNA sense strand
uggaggagaaccuguguaa

SEQ ID NO: 1523277 - RNA, 19 nt, Homo sapiens
  misc_RNA (1)...(19): siRNA sense strand
cgagaggagcucaugaaga

SEQ ID NO: 1523278 - RNA, 19 nt, Homo sapiens
  misc_RNA (1)...(19): siRNA sense strand
ccaauggccaugugucuca

SEQ ID NO: 1523279 - RNA, 19 nt, Homo sapiens
  misc_RNA (1)...(19): siRNA sense strand
cgaaaugugccgggagaaa

SEQ ID NO: 1523280 - RNA, 19 nt, Homo sapiens
  misc_RNA (1)...(19): siRNA sense strand
ggaugcaggccuauuccaa

SEQ ID NO: 1523281 - RNA, 19 nt, Homo sapiens
  misc_RNA (1)...(19): siRNA sense strand
uaucucagccuccaugaca

SEQ ID NO: 1523282 - RNA, 19 nt, Homo sapiens
  misc_RNA (1)...(19): siRNA sense strand
ggucaguggugccgaagac

SEQ ID NO: 1523283 - RNA, 19 nt, Homo sapiens
  misc_RNA (1)...(19): siRNA sense strand
gcucgcaacuuugucaacu

SEQ ID NO: 1523284 - RNA, 19 nt, Homo sapiens
  misc_RNA (1)...(19): siRNA sense strand
aggagaaccuguguaagau

SEQ ID NO: 1523285 - RNA, 19 nt, Homo sapiens
  misc_RNA (1)...(19): siRNA sense strand
agaaucagcaggccaaugg

SEQ ID NO: 1523286 - RNA, 19 nt, Homo sapiens
  misc_RNA (1)...(19): siRNA sense strand
gagagugacccggcuauac

SEQ ID NO: 1523287 - RNA, 19 nt, Homo sapiens
  misc_RNA (1)...(19): siRNA sense strand
ccaugugucucaggaucaa

SEQ ID NO: 1523288 - RNA, 19 nt, Homo sapiens
  misc_RNA (1)...(19): siRNA sense strand
ccaggaugcaggccuauuc

SEQ ID NO: 1523289 - RNA, 19 nt, Homo sapiens
  misc_RNA (1)...(19): siRNA sense strand
ggagaaccuguguaagauc

SEQ ID NO: 1523290 - RNA, 19 nt, Homo sapiens
  misc_RNA (1)...(19): siRNA sense strand
cugcuuggacuguaagaaa

SEQ ID NO: 1523291 - RNA, 19 nt, Homo sapiens
  misc_RNA (1)...(19): siRNA sense strand
gaccuguucgagccaagua

SEQ ID NO: 1523292 - RNA, 19 nt, Homo sapiens
  misc_RNA (1)...(19): siRNA sense strand
gaguaccugcugaggauga

SEQ ID NO: 1523293 - RNA, 19 nt, Homo sapiens
  misc_RNA (1)...(19): siRNA sense strand
ggacucgugccuccaccuu

SEQ ID NO: 1523294 - RNA, 19 nt, Homo sapiens
  misc_RNA (1)...(19): siRNA sense strand
ugacagugcggcagcugaa

SEQ ID NO: 1523295 - RNA, 19 nt, Homo sapiens
  misc_RNA (1)...(19): siRNA sense strand
ccgaagggccucucugucu

SEQ ID NO: 1523296 - RNA, 19 nt, Homo sapiens
  misc_RNA (1)...(19): siRNA sense strand
agagugacccggcuauaca

SEQ ID NO: 1523297 - RNA, 19 nt, Homo sapiens
  misc_RNA (1)...(19): siRNA sense strand
ggccacaugguaaccugua

SEQ ID NO: 1523298 - RNA, 19 nt, Homo sapiens
  misc_RNA (1)...(19): siRNA sense strand
cccauugacuguguucuuc

SEQ ID NO: 1523299 - RNA, 19 nt, Homo sapiens
  misc_RNA (1)...(19): siRNA sense strand
uguguaagaucugcaugga

SEQ ID NO: 1523300 - RNA, 19 nt, Homo sapiens
  misc_RNA (1)...(19): siRNA sense strand
aaaugugccgggagaaaga

SEQ ID NO: 1523301 - RNA, 19 nt, Homo sapiens
  misc_RNA (1)...(19): siRNA sense strand
gagugacccggcuauacaa

SEQ ID NO: 1523302 - RNA, 19 nt, Homo sapiens
  misc_RNA (1)...(19): siRNA sense strand
gagagagugacccggcuau

SEQ ID NO: 1523303 - RNA, 19 nt, Homo sapiens
  misc_RNA (1)...(19): siRNA sense strand
gggagcugauggagagagu

SEQ ID NO: 1523304 - RNA, 19 nt, Homo sapiens
  misc_RNA (1)...(19): siRNA sense strand
gagaaucagcaggccaaug

SEQ ID NO: 1523305 - RNA, 19 nt, Homo sapiens
  misc_RNA (1)...(19): siRNA sense strand
caacugguucugccuggau

SEQ ID NO: 1523306 - RNA, 19 nt, Homo sapiens
  misc_RNA (1)...(19): siRNA sense strand
ucgcaacuuugucaacuac

SEQ ID NO: 1523307 - RNA, 19 nt, Homo sapiens
  misc_RNA (1)...(19): siRNA sense strand
ugaagaugaaggugaagga

SEQ ID NO: 1523308 - RNA, 19 nt, Homo sapiens
  misc_RNA (1)...(19): siRNA sense strand
aauccgagcugugcauguc

SEQ ID NO: 1523309 - RNA, 19 nt, Homo sapiens
  misc_RNA (1)...(19): siRNA sense strand
cagccuccaugacaucucu

SEQ ID NO: 1523310 - RNA, 19 nt, Homo sapiens
  misc_RNA (1)...(19): siRNA sense strand
caagggcugcugugagaag

SEQ ID NO: 1523311 - RNA, 19 nt, Homo sapiens
  misc_RNA (1)...(19): siRNA sense strand
cagaccugcuuggacugua

SEQ ID NO: 1523312 - RNA, 19 nt, Homo sapiens
  misc_RNA (1)...(19): siRNA sense strand
ugaccuggaggacauugaa

SEQ ID NO: 1523313 - RNA, 19 nt, Homo sapiens
  misc_RNA (1)...(19): siRNA sense strand
ggacuugagggacuaucuc

SEQ ID NO: 1523314 - RNA, 19 nt, Homo sapiens
  misc_RNA (1)...(19): siRNA sense strand
acucacccauugacugugu

SEQ ID NO: 1523315 - RNA, 19 nt, Homo sapiens
  misc_RNA (1)...(19): siRNA sense strand
ugcggcagcugaaagagau

SEQ ID NO: 1523316 - RNA, 19 nt, Homo sapiens
  misc_RNA (1)...(19): siRNA sense strand
acucgugccuccaccuugu

SEQ ID NO: 1523317 - RNA, 19 nt, Homo sapiens
  misc_RNA (1)...(19): siRNA sense strand
acagagcgcucaagaacua

SEQ ID NO: 1523318 - RNA, 19 nt, Homo sapiens
  misc_RNA (1)...(19): siRNA sense strand
gggaugaccuaauaauguu

SEQ ID NO: 1523319 - RNA, 19 nt, Homo sapiens
  misc_RNA (1)...(19): siRNA sense strand
uagggaaucuuuagagaaa

SEQ ID NO: 1523320 - RNA, 19 nt, Homo sapiens
  misc_RNA (1)...(19): siRNA sense strand
cuucacagcucaaaucuga

SEQ ID NO: 1523321 - RNA, 19 nt, Homo sapiens
  misc_RNA (1)...(19): siRNA sense strand
gaucaacaguggagguaga

SEQ ID NO: 1523322 - RNA, 19 nt, Homo sapiens
  misc_RNA (1)...(19): siRNA sense strand
acugagggaugaccuaaua

SEQ ID NO: 1523323 - RNA, 19 nt, Homo sapiens
  misc_RNA (1)...(19): siRNA sense strand
caaaggaugagaauaguug

SEQ ID NO: 1523324 - RNA, 19 nt, Homo sapiens
  misc_RNA (1)...(19): siRNA sense strand
cuaaggaccugaagcuguu

SEQ ID NO: 1523325 - RNA, 19 nt, Homo sapiens
  misc_RNA (1)...(19): siRNA sense strand
gaacaucuuucggcugcaa

SEQ ID NO: 1523326 - RNA, 19 nt, Homo sapiens
  misc_RNA (1)...(19): siRNA sense strand
aagaugaggugcaaagguu

SEQ ID NO: 1523327 - RNA, 19 nt, Homo sapiens
  misc_RNA (1)...(19): siRNA sense strand
gaaagucauuaguccuauc

SEQ ID NO: 1523328 - RNA, 19 nt, Homo sapiens
  misc_RNA (1)...(19): siRNA sense strand
cagcucaaaucugaucuaa

SEQ ID NO: 1523329 - RNA, 19 nt, Homo sapiens
  misc_RNA (1)...(19): siRNA sense strand
gaagacaaggcacaagaug

SEQ ID NO: 1523330 - RNA, 19 nt, Homo sapiens
  misc_RNA (1)...(19): siRNA sense strand
ucugaaagaucgacugaau

SEQ ID NO: 1523331 - RNA, 19 nt, Homo sapiens
  misc_RNA (1)...(19): siRNA sense strand
cgaaugugccgucuugaaa

SEQ ID NO: 1523332 - RNA, 19 nt, Homo sapiens
  misc_RNA (1)...(19): siRNA sense strand
gaagcaauuugugcaggaa

SEQ ID NO: 1523333 - RNA, 19 nt, Homo sapiens
  misc_RNA (1)...(19): siRNA sense strand
cagcaaaggaugagaauag

SEQ ID NO: 1523334 - RNA, 19 nt, Homo sapiens
  misc_RNA (1)...(19): siRNA sense strand
gcuguugcaucucgaaguu

SEQ ID NO: 1523335 - RNA, 19 nt, Homo sapiens
  misc_RNA (1)...(19): siRNA sense strand
gagaauaguugaggaacag

SEQ ID NO: 1523336 - RNA, 19 nt, Homo sapiens
  misc_RNA (1)...(19): siRNA sense strand
aaucgaaugugccgucuug

SEQ ID NO: 1523337 - RNA, 19 nt, Homo sapiens
  misc_RNA (1)...(19): siRNA sense strand
aaagaagaguuggagauug

SEQ ID NO: 1523338 - RNA, 19 nt, Homo sapiens
  misc_RNA (1)...(19): siRNA sense strand
ucacaguacuucagcaaag

SEQ ID NO: 1523339 - RNA, 19 nt, Homo sapiens
  misc_RNA (1)...(19): siRNA sense strand
ggaagcuccagacuguuua

SEQ ID NO: 1523340 - RNA, 19 nt, Homo sapiens
  misc_RNA (1)...(19): siRNA sense strand
ggacagccagaaagucauu

SEQ ID NO: 1523341 - RNA, 19 nt, Homo sapiens
  misc_RNA (1)...(19): siRNA sense strand
cagaaagucauuaguccua

SEQ ID NO: 1523342 - RNA, 19 nt, Homo sapiens
  misc_RNA (1)...(19): siRNA sense strand
gggaaucuuuagagaaauc

SEQ ID NO: 1523343 - RNA, 19 nt, Homo sapiens
  misc_RNA (1)...(19): siRNA sense strand
ugaaugcaauacaggaaga

SEQ ID NO: 1523344 - RNA, 19 nt, Homo sapiens
  misc_RNA (1)...(19): siRNA sense strand
agaaguaccuuagggaauc

SEQ ID NO: 1523345 - RNA, 19 nt, Homo sapiens
  misc_RNA (1)...(19): siRNA sense strand
caucaacgcuacagcuucu

SEQ ID NO: 1523346 - RNA, 19 nt, Homo sapiens
  misc_RNA (1)...(19): siRNA sense strand
gcaaaggaugagaauaguu

SEQ ID NO: 1523347 - RNA, 19 nt, Homo sapiens
  misc_RNA (1)...(19): siRNA sense strand
gcuccagacuguuuagaag

SEQ ID NO: 1523348 - RNA, 19 nt, Homo sapiens
  misc_RNA (1)...(19): siRNA sense strand
gaagauugccucgcagaca

SEQ ID NO: 1523349 - RNA, 19 nt, Homo sapiens
  misc_RNA (1)...(19): siRNA sense strand
cuacgugauucuauacaga

SEQ ID NO: 1523350 - RNA, 19 nt, Homo sapiens
  misc_RNA (1)...(19): siRNA sense strand
guacuucagcaaaggauga

SEQ ID NO: 1523351 - RNA, 19 nt, Homo sapiens
  misc_RNA (1)...(19): siRNA sense strand
gagaaguaccuuagggaau

SEQ ID NO: 1523352 - RNA, 19 nt, Homo sapiens
  misc_RNA (1)...(19): siRNA sense strand
gaccuaauaauguuggauu

SEQ ID NO: 1523353 - RNA, 19 nt, Homo sapiens
  misc_RNA (1)...(19): siRNA sense strand
gaugagaauaguugaggaa

SEQ ID NO: 1523354 - RNA, 19 nt, Homo sapiens
  misc_RNA (1)...(19): siRNA sense strand
gcucaggagaaguaccuua

SEQ ID NO: 1523355 - RNA, 19 nt, Homo sapiens
  misc_RNA (1)...(19): siRNA sense strand
ggaagaagacaaggcacaa

SEQ ID NO: 1523356 - RNA, 19 nt, Homo sapiens
  misc_RNA (1)...(19): siRNA sense strand
aaagaucgacugaaugcaa

SEQ ID NO: 1523357 - RNA, 19 nt, Homo sapiens
  misc_RNA (1)...(19): siRNA sense strand
gagggaugaccuaauaaug

SEQ ID NO: 1523358 - RNA, 19 nt, Homo sapiens
  misc_RNA (1)...(19): siRNA sense strand
gcauugcucuacgugauuc

SEQ ID NO: 1523359 - RNA, 19 nt, Homo sapiens
  misc_RNA (1)...(19): siRNA sense strand
aggaagagcauucuaagga

SEQ ID NO: 1523360 - RNA, 19 nt, Homo sapiens
  misc_RNA (1)...(19): siRNA sense strand
aagauugccucgcagacaa

SEQ ID NO: 1523361 - RNA, 19 nt, Homo sapiens
  misc_RNA (1)...(19): siRNA sense strand
caguggagguagaacgaaa

SEQ ID NO: 1523362 - RNA, 19 nt, Homo sapiens
  misc_RNA (1)...(19): siRNA sense strand
caucagccaugcuccucaa

SEQ ID NO: 1523363 - RNA, 19 nt, Homo sapiens
  misc_RNA (1)...(19): siRNA sense strand
cuacagcuucugaaacauu

SEQ ID NO: 1523364 - RNA, 19 nt, Homo sapiens
  misc_RNA (1)...(19): siRNA sense strand
gaagaguuggagauugcua

SEQ ID NO: 1523365 - RNA, 19 nt, Homo sapiens
  misc_RNA (1)...(19): siRNA sense strand
aagaagaguuggagauugc

SEQ ID NO: 1523366 - RNA, 19 nt, Homo sapiens
  misc_RNA (1)...(19): siRNA sense strand
ccacaaaacguaaaaugaa

SEQ ID NO: 1523367 - RNA, 19 nt, Homo sapiens
  misc_RNA (1)...(19): siRNA sense strand
cgcuacagcuucugaaaca

SEQ ID NO: 1523368 - RNA, 19 nt, Homo sapiens
  misc_RNA (1)...(19): siRNA sense strand
ugagaauaguugaggaaca

SEQ ID NO: 1523369 - RNA, 19 nt, Homo sapiens
  misc_RNA (1)...(19): siRNA sense strand
gaaguaccuuagggaaucu

SEQ ID NO: 1523370 - RNA, 19 nt, Homo sapiens
  misc_RNA (1)...(19): siRNA sense strand
gaaugugccgucuugaaag

SEQ ID NO: 1523371 - RNA, 19 nt, Homo sapiens
  misc_RNA (1)...(19): siRNA sense strand
ugaaagaucgacugaaugc

SEQ ID NO: 1523372 - RNA, 19 nt, Homo sapiens
  misc_RNA (1)...(19): siRNA sense strand
cuuagggaaucuuuagaga

SEQ ID NO: 1523373 - RNA, 19 nt, Homo sapiens
  misc_RNA (1)...(19): siRNA sense strand
guaccuuagggaaucuuua

SEQ ID NO: 1523374 - RNA, 19 nt, Homo sapiens
  misc_RNA (1)...(19): siRNA sense strand
acugugaguuucugguaaa

SEQ ID NO: 1523375 - RNA, 19 nt, Homo sapiens
  misc_RNA (1)...(19): siRNA sense strand
caagaaaugggaucaacag

SEQ ID NO: 1523376 - RNA, 19 nt, Homo sapiens
  misc_RNA (1)...(19): siRNA sense strand
gaugaggugcaaagguuga

SEQ ID NO: 1523377 - RNA, 19 nt, Homo sapiens
  misc_RNA (1)...(19): siRNA sense strand
gugaguuucugguaaaucg

SEQ ID NO: 1523378 - RNA, 19 nt, Homo sapiens
  misc_RNA (1)...(19): siRNA sense strand
gaaacauucacaguacuuc

SEQ ID NO: 1523379 - RNA, 19 nt, Homo sapiens
  misc_RNA (1)...(19): siRNA sense strand
ucucgaaguuaugaauuug

SEQ ID NO: 1523380 - RNA, 19 nt, Homo sapiens
  misc_RNA (1)...(19): siRNA sense strand
augcaguccuugaagauga

SEQ ID NO: 1523381 - RNA, 19 nt, Homo sapiens
  misc_RNA (1)...(19): siRNA sense strand
uaagguacauauggaaacu

SEQ ID NO: 1523382 - RNA, 19 nt, Homo sapiens
  misc_RNA (1)...(19): siRNA sense strand
uacaggaagagcauucuaa

SEQ ID NO: 1523383 - RNA, 19 nt, Homo sapiens
  misc_RNA (1)...(19): siRNA sense strand
ucuuucggcugcaaacuga

SEQ ID NO: 1523384 - RNA, 19 nt, Homo sapiens
  misc_RNA (1)...(19): siRNA sense strand
agaaagucauuaguccuau

SEQ ID NO: 1523385 - RNA, 19 nt, Homo sapiens
  misc_RNA (1)...(19): siRNA sense strand
gucauuaguccuauccaaa

SEQ ID NO: 1523386 - RNA, 19 nt, Homo sapiens
  misc_RNA (1)...(19): siRNA sense strand
cuacuucacagcucaaauc

SEQ ID NO: 1523387 - RNA, 19 nt, Homo sapiens
  misc_RNA (1)...(19): siRNA sense strand
gggaucaacaguggaggua

SEQ ID NO: 1523388 - RNA, 19 nt, Homo sapiens
  misc_RNA (1)...(19): siRNA sense strand
guacauauggaaacuacag

SEQ ID NO: 1523389 - RNA, 19 nt, Homo sapiens
  misc_RNA (1)...(19): siRNA sense strand
aagaucgacugaaugcaau

SEQ ID NO: 1523390 - RNA, 19 nt, Homo sapiens
  misc_RNA (1)...(19): siRNA sense strand
augcagccauuauugaaga

SEQ ID NO: 1523391 - RNA, 19 nt, Homo sapiens
  misc_RNA (1)...(19): siRNA sense strand
aguuggagauugcuacuuc

SEQ ID NO: 1523392 - RNA, 19 nt, Homo sapiens
  misc_RNA (1)...(19): siRNA sense strand
caauacaggaagagcauuc

SEQ ID NO: 1523393 - RNA, 19 nt, Homo sapiens
  misc_RNA (1)...(19): siRNA sense strand
aaacugcauugcucuacgu

SEQ ID NO: 1523394 - RNA, 19 nt, Homo sapiens
  misc_RNA (1)...(19): siRNA sense strand
gaagaagacaaggcacaag

SEQ ID NO: 1523395 - RNA, 19 nt, Homo sapiens
  misc_RNA (1)...(19): siRNA sense strand
aagaagacaaggcacaaga

SEQ ID NO: 1523396 - RNA, 19 nt, Homo sapiens
  misc_RNA (1)...(19): siRNA sense strand
caagaugaggugcaaaggu

SEQ ID NO: 1523397 - RNA, 19 nt, Homo sapiens
  misc_RNA (1)...(19): siRNA sense strand
agggaugaccuaauaaugu

SEQ ID NO: 1523398 - RNA, 19 nt, Homo sapiens
  misc_RNA (1)...(19): siRNA sense strand
ucacagcucaaaucugauc

SEQ ID NO: 1523399 - RNA, 19 nt, Homo sapiens
  misc_RNA (1)...(19): siRNA sense strand
auacagagcgcucaagaac

SEQ ID NO: 1523400 - RNA, 19 nt, Homo sapiens
  misc_RNA (1)...(19): siRNA sense strand
cugcauugcucuacgugau

SEQ ID NO: 1523401 - RNA, 19 nt, Homo sapiens
  misc_RNA (1)...(19): siRNA sense strand
acaacuggcucaggagaag

SEQ ID NO: 1523402 - RNA, 19 nt, Homo sapiens
  misc_RNA (1)...(19): siRNA sense strand
gacugccacucugaagauu

SEQ ID NO: 1523403 - RNA, 19 nt, Homo sapiens
  misc_RNA (1)...(19): siRNA sense strand
ugacugccacucugaagau

SEQ ID NO: 1523404 - RNA, 19 nt, Homo sapiens
  misc_RNA (1)...(19): siRNA sense strand
agacaaggcacaagaugag

SEQ ID NO: 1523405 - RNA, 19 nt, Homo sapiens
  misc_RNA (1)...(19): siRNA sense strand
gcaucucgaaguuaugaau

SEQ ID NO: 1523406 - RNA, 19 nt, Homo sapiens
  misc_RNA (1)...(19): siRNA sense strand
uguugcaucucgaaguuau

SEQ ID NO: 1523407 - RNA, 19 nt, Homo sapiens
  misc_RNA (1)...(19): siRNA sense strand
gaagcuguugcaucucgaa

SEQ ID NO: 1523408 - RNA, 19 nt, Homo sapiens
  misc_RNA (1)...(19): siRNA sense strand
ucacugagggaugaccuaa

SEQ ID NO: 1523409 - RNA, 19 nt, Homo sapiens
  misc_RNA (1)...(19): siRNA sense strand
gacaacuggcucaggagaa

SEQ ID NO: 1523410 - RNA, 19 nt, Homo sapiens
  misc_RNA (1)...(19): siRNA sense strand
ccucgcagacaaagaagaa

SEQ ID NO: 1523411 - RNA, 19 nt, Homo sapiens
  misc_RNA (1)...(19): siRNA sense strand
ugagggaugaccuaauaau

SEQ ID NO: 1523412 - RNA, 19 nt, Homo sapiens
  misc_RNA (1)...(19): siRNA sense strand
uacagcuucugaaacauuc

SEQ ID NO: 1523413 - RNA, 19 nt, Homo sapiens
  misc_RNA (1)...(19): siRNA sense strand
aagacaaggcacaagauga

SEQ ID NO: 1523414 - RNA, 19 nt, Homo sapiens
  misc_RNA (1)...(19): siRNA sense strand
caucucgaaguuaugaauu

SEQ ID NO: 1523415 - RNA, 19 nt, Homo sapiens
  misc_RNA (1)...(19): siRNA sense strand
gaacugaagaccacaaaac

SEQ ID NO: 1523416 - RNA, 19 nt, Homo sapiens
  misc_RNA (1)...(19): siRNA sense strand
cgaaaacaggugcacauuu

SEQ ID NO: 1523417 - RNA, 19 nt, Homo sapiens
  misc_RNA (1)...(19): siRNA sense strand
ccacuaaucuacacccuua

SEQ ID NO: 1523418 - RNA, 19 nt, Homo sapiens
  misc_RNA (1)...(19): siRNA sense strand
ggaaauggaucuauauugg

SEQ ID NO: 1523419 - RNA, 19 nt, Homo sapiens
  misc_RNA (1)...(19): siRNA sense strand
guaauuggcuuccuucugu

SEQ ID NO: 1523420 - RNA, 19 nt, Homo sapiens
  misc_RNA (1)...(19): siRNA sense strand
guaggaaguuguuuaaaga

SEQ ID NO: 1523421 - RNA, 19 nt, Homo sapiens
  misc_RNA (1)...(19): siRNA sense strand
gaugauggcucugaagaaa

SEQ ID NO: 1523422 - RNA, 19 nt, Homo sapiens
  misc_RNA (1)...(19): siRNA sense strand
gaaacucaaucacuucuuc

SEQ ID NO: 1523423 - RNA, 19 nt, Homo sapiens
  misc_RNA (1)...(19): siRNA sense strand
gauuggaaauggaucuaua

SEQ ID NO: 1523424 - RNA, 19 nt, Homo sapiens
  misc_RNA (1)...(19): siRNA sense strand
gagaaugucacuacaauga

SEQ ID NO: 1523425 - RNA, 19 nt, Homo sapiens
  misc_RNA (1)...(19): siRNA sense strand
gaacaaagaagugaugaug

SEQ ID NO: 1523426 - RNA, 19 nt, Homo sapiens
  misc_RNA (1)...(19): siRNA sense strand
gauaauggccaucauguau

SEQ ID NO: 1523427 - RNA, 19 nt, Homo sapiens
  misc_RNA (1)...(19): siRNA sense strand
ucaagccgcucuuagaauu

SEQ ID NO: 1523428 - RNA, 19 nt, Homo sapiens
  misc_RNA (1)...(19): siRNA sense strand
gaaugucacuacaaugaau

SEQ ID NO: 1523429 - RNA, 19 nt, Homo sapiens
  misc_RNA (1)...(19): siRNA sense strand
gguaggaaguuguuuaaag

SEQ ID NO: 1523430 - RNA, 19 nt, Homo sapiens
  misc_RNA (1)...(19): siRNA sense strand
gaauuggccuguagugaca

SEQ ID NO: 1523431 - RNA, 19 nt, Homo sapiens
  misc_RNA (1)...(19): siRNA sense strand
gaaugaguuucuucuacuu

SEQ ID NO: 1523432 - RNA, 19 nt, Homo sapiens
  misc_RNA (1)...(19): siRNA sense strand
gcugcagccuuucuucuuu

SEQ ID NO: 1523433 - RNA, 19 nt, Homo sapiens
  misc_RNA (1)...(19): siRNA sense strand
cugauaaacuugauuggaa

SEQ ID NO: 1523434 - RNA, 19 nt, Homo sapiens
  misc_RNA (1)...(19): siRNA sense strand
ucacuacaaugaaugaguu

SEQ ID NO: 1523435 - RNA, 19 nt, Homo sapiens
  misc_RNA (1)...(19): siRNA sense strand
ggccuguagugacacauua

SEQ ID NO: 1523436 - RNA, 19 nt, Homo sapiens
  misc_RNA (1)...(19): siRNA sense strand
gcauauccaugggagcuuu

SEQ ID NO: 1523437 - RNA, 19 nt, Homo sapiens
  misc_RNA (1)...(19): siRNA sense strand
caugggagcuuucuuucug

SEQ ID NO: 1523438 - RNA, 19 nt, Homo sapiens
  misc_RNA (1)...(19): siRNA sense strand
ggauaauggccaucaugua

SEQ ID NO: 1523439 - RNA, 19 nt, Homo sapiens
  misc_RNA (1)...(19): siRNA sense strand
uaauggccaucauguauag

SEQ ID NO: 1523440 - RNA, 19 nt, Homo sapiens
  misc_RNA (1)...(19): siRNA sense strand
ccacuugugccucccauuu

SEQ ID NO: 1523441 - RNA, 19 nt, Homo sapiens
  misc_RNA (1)...(19): siRNA sense strand
gaagugaugauggcucuga

SEQ ID NO: 1523442 - RNA, 19 nt, Homo sapiens
  misc_RNA (1)...(19): siRNA sense strand
aaacuugauuggaaaugga

SEQ ID NO: 1523443 - RNA, 19 nt, Homo sapiens
  misc_RNA (1)...(19): siRNA sense strand
ugacugcacaccugaguuu

SEQ ID NO: 1523444 - RNA, 19 nt, Homo sapiens
  misc_RNA (1)...(19): siRNA sense strand
ccagguguguauucuguug

SEQ ID NO: 1523445 - RNA, 19 nt, Homo sapiens
  misc_RNA (1)...(19): siRNA sense strand
ccucuucgcuacacuguca

SEQ ID NO: 1523446 - RNA, 19 nt, Homo sapiens
  misc_RNA (1)...(19): siRNA sense strand
uucaggagcugcagccuuu

SEQ ID NO: 1523447 - RNA, 19 nt, Homo sapiens
  misc_RNA (1)...(19): siRNA sense strand
cucaaucaauggcuucuuu

SEQ ID NO: 1523448 - RNA, 19 nt, Homo sapiens
  misc_RNA (1)...(19): siRNA sense strand
gaaauggaucuauauuggu

SEQ ID NO: 1523449 - RNA, 19 nt, Homo sapiens
  misc_RNA (1)...(19): siRNA sense strand
ucgcuacacugucaucaug

SEQ ID NO: 1523450 - RNA, 19 nt, Homo sapiens
  misc_RNA (1)...(19): siRNA sense strand
guacugaauccacuaaucu

SEQ ID NO: 1523451 - RNA, 19 nt, Homo sapiens
  misc_RNA (1)...(19): siRNA sense strand
ugaaugaguuucuucuacu

SEQ ID NO: 1523452 - RNA, 19 nt, Homo sapiens
  misc_RNA (1)...(19): siRNA sense strand
ucaaucacuucuucuacga

SEQ ID NO: 1523453 - RNA, 19 nt, Homo sapiens
  misc_RNA (1)...(19): siRNA sense strand
uuucuugucuggauauuuc

SEQ ID NO: 1523454 - RNA, 19 nt, Homo sapiens
  misc_RNA (1)...(19): siRNA sense strand
ucagccaccuccaugauuc

SEQ ID NO: 1523455 - RNA, 19 nt, Homo sapiens
  misc_RNA (1)...(19): siRNA sense strand
gucuggauauuucuuauuc

SEQ ID NO: 1523456 - RNA, 19 nt, Homo sapiens
  misc_RNA (1)...(19): siRNA sense strand
cucagaaacucaaucacuu

SEQ ID NO: 1523457 - RNA, 19 nt, Homo sapiens
  misc_RNA (1)...(19): siRNA sense strand
uaaacuugauuggaaaugg

SEQ ID NO: 1523458 - RNA, 19 nt, Homo sapiens
  misc_RNA (1)...(19): siRNA sense strand
aaaccuuucuugucuggau

SEQ ID NO: 1523459 - RNA, 19 nt, Homo sapiens
  misc_RNA (1)...(19): siRNA sense strand
caacuccacuccccuaugu

SEQ ID NO: 1523460 - RNA, 19 nt, Homo sapiens
  misc_RNA (1)...(19): siRNA sense strand
ucugaugcauucugucaug

SEQ ID NO: 1523461 - RNA, 19 nt, Homo sapiens
  misc_RNA (1)...(19): siRNA sense strand
auaauggccaucauguaua

SEQ ID NO: 1523462 - RNA, 19 nt, Homo sapiens
  misc_RNA (1)...(19): siRNA sense strand
ggugguaugucuuuucuau

SEQ ID NO: 1523463 - RNA, 19 nt, Homo sapiens
  misc_RNA (1)...(19): siRNA sense strand
gcucugaugcauucuguca

SEQ ID NO: 1523464 - RNA, 19 nt, Homo sapiens
  misc_RNA (1)...(19): siRNA sense strand
ggagaaugucacuacaaug

SEQ ID NO: 1523465 - RNA, 19 nt, Homo sapiens
  misc_RNA (1)...(19): siRNA sense strand
cggccuggcucaucagcuu

SEQ ID NO: 1523466 - RNA, 19 nt, Homo sapiens
  misc_RNA (1)...(19): siRNA sense strand
gcucucagaaacucaauca

SEQ ID NO: 1523467 - RNA, 19 nt, Homo sapiens
  misc_RNA (1)...(19): siRNA sense strand
gcuacacuucuuccacuuu

SEQ ID NO: 1523468 - RNA, 19 nt, Homo sapiens
  misc_RNA (1)...(19): siRNA sense strand
ugacucuucucuccugcuu

SEQ ID NO: 1523469 - RNA, 19 nt, Homo sapiens
  misc_RNA (1)...(19): siRNA sense strand
gagcuuucuuucugacucu

SEQ ID NO: 1523470 - RNA, 19 nt, Homo sapiens
  misc_RNA (1)...(19): siRNA sense strand
gcaauccucuucgcuacac

SEQ ID NO: 1523471 - RNA, 19 nt, Homo sapiens
  misc_RNA (1)...(19): siRNA sense strand
ggaagcacagaggccauuu

SEQ ID NO: 1523472 - RNA, 19 nt, Homo sapiens
  misc_RNA (1)...(19): siRNA sense strand
uggaaauggaucuauauug

SEQ ID NO: 1523473 - RNA, 19 nt, Homo sapiens
  misc_RNA (1)...(19): siRNA sense strand
ugucaagccgcucuuagaa

SEQ ID NO: 1523474 - RNA, 19 nt, Homo sapiens
  misc_RNA (1)...(19): siRNA sense strand
gcacagaggccauuuuacu

SEQ ID NO: 1523475 - RNA, 19 nt, Homo sapiens
  misc_RNA (1)...(19): siRNA sense strand
uaauuggcuuccuucuguu

SEQ ID NO: 1523476 - RNA, 19 nt, Homo sapiens
  misc_RNA (1)...(19): siRNA sense strand
gaucuauauuggugauggu

SEQ ID NO: 1523477 - RNA, 19 nt, Homo sapiens
  misc_RNA (1)...(19): siRNA sense strand
ucauggccuuugaccguuu

SEQ ID NO: 1523478 - RNA, 19 nt, Homo sapiens
  misc_RNA (1)...(19): siRNA sense strand
ucgcagggcuauaucuuuu

SEQ ID NO: 1523479 - RNA, 19 nt, Homo sapiens
  misc_RNA (1)...(19): siRNA sense strand
ggaacaaagaagugaugau

SEQ ID NO: 1523480 - RNA, 19 nt, Homo sapiens
  misc_RNA (1)...(19): siRNA sense strand
cuauauuggugaugguugu

SEQ ID NO: 1523481 - RNA, 19 nt, Homo sapiens
  misc_RNA (1)...(19): siRNA sense strand
ucagaaacucaaucacuuc

SEQ ID NO: 1523482 - RNA, 19 nt, Homo sapiens
  misc_RNA (1)...(19): siRNA sense strand
uaaucuacacccuuaggaa

SEQ ID NO: 1523483 - RNA, 19 nt, Homo sapiens
  misc_RNA (1)...(19): siRNA sense strand
ggugaugguuguuuuggaa

SEQ ID NO: 1523484 - RNA, 19 nt, Homo sapiens
  misc_RNA (1)...(19): siRNA sense strand
cuauguaauuggcuuccuu

SEQ ID NO: 1523485 - RNA, 19 nt, Homo sapiens
  misc_RNA (1)...(19): siRNA sense strand
uggcuaucauggccuuuga

SEQ ID NO: 1523486 - RNA, 19 nt, Homo sapiens
  misc_RNA (1)...(19): siRNA sense strand
gugaugauggcucugaaga

SEQ ID NO: 1523487 - RNA, 19 nt, Homo sapiens
  misc_RNA (1)...(19): siRNA sense strand
uguacugaauccacuaauc

SEQ ID NO: 1523488 - RNA, 19 nt, Homo sapiens
  misc_RNA (1)...(19): siRNA sense strand
guagugacacauuacucaa

SEQ ID NO: 1523489 - RNA, 19 nt, Homo sapiens
  misc_RNA (1)...(19): siRNA sense strand
gaugcauucugucaugacu

SEQ ID NO: 1523490 - RNA, 19 nt, Homo sapiens
  misc_RNA (1)...(19): siRNA sense strand
cugcagccuuucuucuuug

SEQ ID NO: 1523491 - RNA, 19 nt, Homo sapiens
  misc_RNA (1)...(19): siRNA sense strand
cuacacuucuuccacuuuu

SEQ ID NO: 1523492 - RNA, 19 nt, Homo sapiens
  misc_RNA (1)...(19): siRNA sense strand
uggcuucuuuccauuguca

SEQ ID NO: 1523493 - RNA, 19 nt, Homo sapiens
  misc_RNA (1)...(19): siRNA sense strand
gugacacauuacucaauca

SEQ ID NO: 1523494 - RNA, 19 nt, Homo sapiens
  misc_RNA (1)...(19): siRNA sense strand
agugacacauuacucaauc

SEQ ID NO: 1523495 - RNA, 19 nt, Homo sapiens
  misc_RNA (1)...(19): siRNA sense strand
uuuacgcucugaugcauuc

SEQ ID NO: 1523496 - RNA, 19 nt, Homo sapiens
  misc_RNA (1)...(19): siRNA sense strand
gggaagcacagaggccauu

SEQ ID NO: 1523497 - RNA, 19 nt, Homo sapiens
  misc_RNA (1)...(19): siRNA sense strand
ucuuagaauuggccuguag

SEQ ID NO: 1523498 - RNA, 19 nt, Homo sapiens
  misc_RNA (1)...(19): siRNA sense strand
ugaauccacuaaucuacac

SEQ ID NO: 1523499 - RNA, 19 nt, Homo sapiens
  misc_RNA (1)...(19): siRNA sense strand
cauugucacaggcagcaua

SEQ ID NO: 1523500 - RNA, 19 nt, Homo sapiens
  misc_RNA (1)...(19): siRNA sense strand
ugacacauuacucaaucaa

SEQ ID NO: 1523501 - RNA, 19 nt, Homo sapiens
  misc_RNA (1)...(19): siRNA sense strand
uagaauuggccuguaguga

SEQ ID NO: 1523502 - RNA, 19 nt, Homo sapiens
  misc_RNA (1)...(19): siRNA sense strand
gaugucaagccgcucuuag

SEQ ID NO: 1523503 - RNA, 19 nt, Homo sapiens
  misc_RNA (1)...(19): siRNA sense strand
augaaugaguuucuucuac

SEQ ID NO: 1523504 - RNA, 19 nt, Homo sapiens
  misc_RNA (1)...(19): siRNA sense strand
ucuacacccuuaggaacaa

SEQ ID NO: 1523505 - RNA, 19 nt, Homo sapiens
  misc_RNA (1)...(19): siRNA sense strand
agaaugucacuacaaugaa

SEQ ID NO: 1523506 - RNA, 19 nt, Homo sapiens
  misc_RNA (1)...(19): siRNA sense strand
caagccgcucuuagaauug

SEQ ID NO: 1523507 - RNA, 19 nt, Homo sapiens
  misc_RNA (1)...(19): siRNA sense strand
ggagcugcagccuuucuuc

SEQ ID NO: 1523508 - RNA, 19 nt, Homo sapiens
  misc_RNA (1)...(19): siRNA sense strand
ugauggcucugaagaaaau

SEQ ID NO: 1523509 - RNA, 19 nt, Homo sapiens
  misc_RNA (1)...(19): siRNA sense strand
cuacacccuuaggaacaaa

SEQ ID NO: 1523510 - RNA, 19 nt, Homo sapiens
  misc_RNA (1)...(19): siRNA sense strand
gagcugcagccuuucuucu

SEQ ID NO: 1523511 - RNA, 19 nt, Homo sapiens
  misc_RNA (1)...(19): siRNA sense strand
uuggcuuccuucuguuuaa

SEQ ID NO: 1523512 - RNA, 19 nt, Homo sapiens
  misc_RNA (1)...(19): siRNA sense strand
ggaagaagaucaaagaaga

SEQ ID NO: 1523513 - RNA, 19 nt, Homo sapiens
  misc_RNA (1)...(19): siRNA sense strand
ucagaaaccucaaagagaa

SEQ ID NO: 1523514 - RNA, 19 nt, Homo sapiens
  misc_RNA (1)...(19): siRNA sense strand
ggaggaugcuguacacauu

SEQ ID NO: 1523515 - RNA, 19 nt, Homo sapiens
  misc_RNA (1)...(19): siRNA sense strand
cagcacauuucacucauua

SEQ ID NO: 1523516 - RNA, 19 nt, Homo sapiens
  misc_RNA (1)...(19): siRNA sense strand
ugacauggaugaaauugaa

SEQ ID NO: 1523517 - RNA, 19 nt, Homo sapiens
  misc_RNA (1)...(19): siRNA sense strand
cugcauggcuguugacaua

SEQ ID NO: 1523518 - RNA, 19 nt, Homo sapiens
  misc_RNA (1)...(19): siRNA sense strand
gcagugcuguuuacucauu

SEQ ID NO: 1523519 - RNA, 19 nt, Homo sapiens
  misc_RNA (1)...(19): siRNA sense strand
gagaugaacauucuagaaa

SEQ ID NO: 1523520 - RNA, 19 nt, Homo sapiens
  misc_RNA (1)...(19): siRNA sense strand
ugacaacgaugacgaugaa

SEQ ID NO: 1523521 - RNA, 19 nt, Homo sapiens
  misc_RNA (1)...(19): siRNA sense strand
gccaucacuuguucaaaua

SEQ ID NO: 1523522 - RNA, 19 nt, Homo sapiens
  misc_RNA (1)...(19): siRNA sense strand
ggagucauauucccacaau

SEQ ID NO: 1523523 - RNA, 19 nt, Homo sapiens
  misc_RNA (1)...(19): siRNA sense strand
gugcaaagaucucauaaaa

SEQ ID NO: 1523524 - RNA, 19 nt, Homo sapiens
  misc_RNA (1)...(19): siRNA sense strand
ggauagauguuauucaacu

SEQ ID NO: 1523525 - RNA, 19 nt, Homo sapiens
  misc_RNA (1)...(19): siRNA sense strand
ggauagauguuauucaacu

SEQ ID NO: 1523526 - RNA, 19 nt, Homo sapiens
  misc_RNA (1)...(19): siRNA sense strand
ugaaagugaugaugaggaa

SEQ ID NO: 1523527 - RNA, 19 nt, Homo sapiens
  misc_RNA (1)...(19): siRNA sense strand
gaugaacauucuagaaauc

SEQ ID NO: 1523528 - RNA, 19 nt, Homo sapiens
  misc_RNA (1)...(19): siRNA sense strand
gaggagcucaggcaauaua

SEQ ID NO: 1523529 - RNA, 19 nt, Homo sapiens
  misc_RNA (1)...(19): siRNA sense strand
ggaaugagcgacaguucaa

SEQ ID NO: 1523530 - RNA, 19 nt, Homo sapiens
  misc_RNA (1)...(19): siRNA sense strand
gaagaagaucaaagaagaa

SEQ ID NO: 1523531 - RNA, 19 nt, Homo sapiens
  misc_RNA (1)...(19): siRNA sense strand
gcagaaggcugaagaaaag

SEQ ID NO: 1523532 - RNA, 19 nt, Homo sapiens
  misc_RNA (1)...(19): siRNA sense strand
agaaacagcaguucagaaa

SEQ ID NO: 1523533 - RNA, 19 nt, Homo sapiens
  misc_RNA (1)...(19): siRNA sense strand
gcacauuucacucauuaga

SEQ ID NO: 1523534 - RNA, 19 nt, Homo sapiens
  misc_RNA (1)...(19): siRNA sense strand
gcagcacauuucacucauu

SEQ ID NO: 1523535 - RNA, 19 nt, Homo sapiens
  misc_RNA (1)...(19): siRNA sense strand
gaagaaacagcaguucaga

SEQ ID NO: 1523536 - RNA, 19 nt, Homo sapiens
  misc_RNA (1)...(19): siRNA sense strand
gaggaugcuguacacauua

SEQ ID NO: 1523537 - RNA, 19 nt, Homo sapiens
  misc_RNA (1)...(19): siRNA sense strand
ggaggaaugugccaucacu

SEQ ID NO: 1523538 - RNA, 19 nt, Homo sapiens
  misc_RNA (1)...(19): siRNA sense strand
gaaaagaaggggaagauga

SEQ ID NO: 1523539 - RNA, 19 nt, Homo sapiens
  misc_RNA (1)...(19): siRNA sense strand
caaauagccauggcccuua

SEQ ID NO: 1523540 - RNA, 19 nt, Homo sapiens
  misc_RNA (1)...(19): siRNA sense strand
aacgagagcugacccaguu

SEQ ID NO: 1523541 - RNA, 19 nt, Homo sapiens
  misc_RNA (1)...(19): siRNA sense strand
uugcaggacucacuggaua

SEQ ID NO: 1523542 - RNA, 19 nt, Homo sapiens
  misc_RNA (1)...(19): siRNA sense strand
ggcaggaccuccaagaaca

SEQ ID NO: 1523543 - RNA, 19 nt, Homo sapiens
  misc_RNA (1)...(19): siRNA sense strand
cgaugacgaugaagauguu

SEQ ID NO: 1523544 - RNA, 19 nt, Homo sapiens
  misc_RNA (1)...(19): siRNA sense strand
cuggauagauguuauucaa

SEQ ID NO: 1523545 - RNA, 19 nt, Homo sapiens
  misc_RNA (1)...(19): siRNA sense strand
cuggauagauguuauucaa

SEQ ID NO: 1523546 - RNA, 19 nt, Homo sapiens
  misc_RNA (1)...(19): siRNA sense strand
cuggauagauguuauucaa

SEQ ID NO: 1523547 - RNA, 19 nt, Homo sapiens
  misc_RNA (1)...(19): siRNA sense strand
caaccagccacauaagaaa

SEQ ID NO: 1523548 - RNA, 19 nt, Homo sapiens
  misc_RNA (1)...(19): siRNA sense strand
gaaugugccaucacuuguu

SEQ ID NO: 1523549 - RNA, 19 nt, Homo sapiens
  misc_RNA (1)...(19): siRNA sense strand
ggaaucugcaggagucuga

SEQ ID NO: 1523550 - RNA, 19 nt, Homo sapiens
  misc_RNA (1)...(19): siRNA sense strand
aaagucgacucaacucuca

SEQ ID NO: 1523551 - RNA, 19 nt, Homo sapiens
  misc_RNA (1)...(19): siRNA sense strand
ccaaccgacagaagaaaua

SEQ ID NO: 1523552 - RNA, 19 nt, Homo sapiens
  misc_RNA (1)...(19): siRNA sense strand
ggaccaagaagaggaagaa

SEQ ID NO: 1523553 - RNA, 19 nt, Homo sapiens
  misc_RNA (1)...(19): siRNA sense strand
gagaagaaacagcaguuca

SEQ ID NO: 1523554 - RNA, 19 nt, Homo sapiens
  misc_RNA (1)...(19): siRNA sense strand
aauauaaaguccugguuca

SEQ ID NO: 1523555 - RNA, 19 nt, Homo sapiens
  misc_RNA (1)...(19): siRNA sense strand
gaaguguguuuuacucauu

SEQ ID NO: 1523556 - RNA, 19 nt, Homo sapiens
  misc_RNA (1)...(19): siRNA sense strand
gaaaagaaggggaagaaga

SEQ ID NO: 1523557 - RNA, 19 nt, Homo sapiens
  misc_RNA (1)...(19): siRNA sense strand
ccaaccagccacauaagaa

SEQ ID NO: 1523558 - RNA, 19 nt, Homo sapiens
  misc_RNA (1)...(19): siRNA sense strand
ugagguggcugagaaagug

SEQ ID NO: 1523559 - RNA, 19 nt, Homo sapiens
  misc_RNA (1)...(19): siRNA sense strand
gcagagaugaacauucuag

SEQ ID NO: 1523560 - RNA, 19 nt, Homo sapiens
  misc_RNA (1)...(19): siRNA sense strand
ccagaugggagucauauuc

SEQ ID NO: 1523561 - RNA, 19 nt, Homo sapiens
  misc_RNA (1)...(19): siRNA sense strand
aguagagccugaagucuug

SEQ ID NO: 1523562 - RNA, 19 nt, Homo sapiens
  misc_RNA (1)...(19): siRNA sense strand
ugccaucacuuguucaaau

SEQ ID NO: 1523563 - RNA, 19 nt, Homo sapiens
  misc_RNA (1)...(19): siRNA sense strand
cuauugacauggaugaaau

SEQ ID NO: 1523564 - RNA, 19 nt, Homo sapiens
  misc_RNA (1)...(19): siRNA sense strand
aggcagagaugaacauucu

SEQ ID NO: 1523565 - RNA, 19 nt, Homo sapiens
  misc_RNA (1)...(19): siRNA sense strand
ggaagacaaagucgacuca

SEQ ID NO: 1523566 - RNA, 19 nt, Homo sapiens
  misc_RNA (1)...(19): siRNA sense strand
cgacagaagaaauacaaau

SEQ ID NO: 1523567 - RNA, 19 nt, Homo sapiens
  misc_RNA (1)...(19): siRNA sense strand
gaaguuccuuuuaugcauu

SEQ ID NO: 1523568 - RNA, 19 nt, Homo sapiens
  misc_RNA (1)...(19): siRNA sense strand
uggcuuggcuauugacaug

SEQ ID NO: 1523569 - RNA, 19 nt, Homo sapiens
  misc_RNA (1)...(19): siRNA sense strand
gaagguuauucgacucucu

SEQ ID NO: 1523570 - RNA, 19 nt, Homo sapiens
  misc_RNA (1)...(19): siRNA sense strand
caacgaugacgaugaagau

SEQ ID NO: 1523571 - RNA, 19 nt, Homo sapiens
  misc_RNA (1)...(19): siRNA sense strand
gagcucaggcaauauaaag

SEQ ID NO: 1523572 - RNA, 19 nt, Homo sapiens
  misc_RNA (1)...(19): siRNA sense strand
gcgagaaggcagagaugaa

SEQ ID NO: 1523573 - RNA, 19 nt, Homo sapiens
  misc_RNA (1)...(19): siRNA sense strand
aaauagccauggcccuuau

SEQ ID NO: 1523574 - RNA, 19 nt, Homo sapiens
  misc_RNA (1)...(19): siRNA sense strand
ggaaugugccaucacuugu

SEQ ID NO: 1523575 - RNA, 19 nt, Homo sapiens
  misc_RNA (1)...(19): siRNA sense strand
cugagaaagugcagaaauc

SEQ ID NO: 1523576 - RNA, 19 nt, Homo sapiens
  misc_RNA (1)...(19): siRNA sense strand
uaccuuggcuuggcucuug

SEQ ID NO: 1523577 - RNA, 19 nt, Homo sapiens
  misc_RNA (1)...(19): siRNA sense strand
ucggugggaucaagugaaa

SEQ ID NO: 1523578 - RNA, 19 nt, Homo sapiens
  misc_RNA (1)...(19): siRNA sense strand
uaugaagagugcaaagauc

SEQ ID NO: 1523579 - RNA, 19 nt, Homo sapiens
  misc_RNA (1)...(19): siRNA sense strand
gaaggcagagaugaacauu

SEQ ID NO: 1523580 - RNA, 19 nt, Homo sapiens
  misc_RNA (1)...(19): siRNA sense strand
cauguuggcuuuucucuug

SEQ ID NO: 1523581 - RNA, 19 nt, Homo sapiens
  misc_RNA (1)...(19): siRNA sense strand
gccagugucucccaggaau

SEQ ID NO: 1523582 - RNA, 19 nt, Homo sapiens
  misc_RNA (1)...(19): siRNA sense strand
gcaauauaaaguccugguu

SEQ ID NO: 1523583 - RNA, 19 nt, Homo sapiens
  misc_RNA (1)...(19): siRNA sense strand
accaagaaguggaagaaga

SEQ ID NO: 1523584 - RNA, 19 nt, Homo sapiens
  misc_RNA (1)...(19): siRNA sense strand
guaccaagaaguggaagaa

SEQ ID NO: 1523585 - RNA, 19 nt, Homo sapiens
  misc_RNA (1)...(19): siRNA sense strand
gaagagugcaaagaucuca

SEQ ID NO: 1523586 - RNA, 19 nt, Homo sapiens
  misc_RNA (1)...(19): siRNA sense strand
guccugggaugaagguuau

SEQ ID NO: 1523587 - RNA, 19 nt, Homo sapiens
  misc_RNA (1)...(19): siRNA sense strand
uuauucgacucucucaauu

SEQ ID NO: 1523588 - RNA, 19 nt, Homo sapiens
  misc_RNA (1)...(19): siRNA sense strand
gggaagaagaucaaagaag

SEQ ID NO: 1523589 - RNA, 19 nt, Homo sapiens
  misc_RNA (1)...(19): siRNA sense strand
aaacagcaguucagaaacc

SEQ ID NO: 1523590 - RNA, 19 nt, Homo sapiens
  misc_RNA (1)...(19): siRNA sense strand
cagcagcacauuucacuca

SEQ ID NO: 1523591 - RNA, 19 nt, Homo sapiens
  misc_RNA (1)...(19): siRNA sense strand
ggagcucaggcaauauaaa

SEQ ID NO: 1523592 - RNA, 19 nt, Homo sapiens
  misc_RNA (1)...(19): siRNA sense strand
gaagaugacaacccaccau

SEQ ID NO: 1523593 - RNA, 19 nt, Homo sapiens
  misc_RNA (1)...(19): siRNA sense strand
gguaguagagccugaaguc

SEQ ID NO: 1523594 - RNA, 19 nt, Homo sapiens
  misc_RNA (1)...(19): siRNA sense strand
gcuauugacauggaugaaa

SEQ ID NO: 1523595 - RNA, 19 nt, Homo sapiens
  misc_RNA (1)...(19): siRNA sense strand
gcaguucagaaaccucaaa

SEQ ID NO: 1523596 - RNA, 19 nt, Homo sapiens
  misc_RNA (1)...(19): siRNA sense strand
aaaugaaagugaugaugag

SEQ ID NO: 1523597 - RNA, 19 nt, Homo sapiens
  misc_RNA (1)...(19): siRNA sense strand
ugaaugggaggaugcugua

SEQ ID NO: 1523598 - RNA, 19 nt, Homo sapiens
  misc_RNA (1)...(19): siRNA sense strand
gcugagaaagugcagaaau

SEQ ID NO: 1523599 - RNA, 19 nt, Homo sapiens
  misc_RNA (1)...(19): siRNA sense strand
aaguugagguggcugagaa

SEQ ID NO: 1523600 - RNA, 19 nt, Homo sapiens
  misc_RNA (1)...(19): siRNA sense strand
gcugagggguguagacuga

SEQ ID NO: 1523601 - RNA, 19 nt, Homo sapiens
  misc_RNA (1)...(19): siRNA sense strand
gauagauguuauucaacuc

SEQ ID NO: 1523602 - RNA, 19 nt, Homo sapiens
  misc_RNA (1)...(19): siRNA sense strand
guucagaaaccucaaagag

SEQ ID NO: 1523603 - RNA, 19 nt, Homo sapiens
  misc_RNA (1)...(19): siRNA sense strand
ugagaaagagccugaaguc

SEQ ID NO: 1523604 - RNA, 19 nt, Homo sapiens
  misc_RNA (1)...(19): siRNA sense strand
gauagauguuauucaacuc

SEQ ID NO: 1523605 - RNA, 19 nt, Homo sapiens
  misc_RNA (1)...(19): siRNA sense strand
ugagaaagagccugaaguc

SEQ ID NO: 1523606 - RNA, 19 nt, Homo sapiens
  misc_RNA (1)...(19): siRNA sense strand
gcagacaucggugggauca

SEQ ID NO: 1523607 - RNA, 19 nt, Homo sapiens
  misc_RNA (1)...(19): siRNA sense strand
cugaaauguuggccucgua

SEQ ID NO: 1523608 - RNA, 19 nt, Homo sapiens
  misc_RNA (1)...(19): siRNA sense strand
guuauucgacucucucaau

SEQ ID NO: 1523609 - RNA, 19 nt, Homo sapiens
  misc_RNA (1)...(19): siRNA sense strand
gcucauccucucauguuga

SEQ ID NO: 1523610 - RNA, 19 nt, Homo sapiens
  misc_RNA (1)...(19): siRNA sense strand
gcauggcuguugacauagg

SEQ ID NO: 1523611 - RNA, 19 nt, Homo sapiens
  misc_RNA (1)...(19): siRNA sense strand
agacaucggugggaucaag

SEQ ID NO: 1523612 - RNA, 19 nt, Homo sapiens
  misc_RNA (1)...(19): siRNA sense strand
gaauaugccugacagcuuu

SEQ ID NO: 1523613 - RNA, 19 nt, Homo sapiens
  misc_RNA (1)...(19): siRNA sense strand
cgacacaucuggacaagca

SEQ ID NO: 1523614 - RNA, 19 nt, Homo sapiens
  misc_RNA (1)...(19): siRNA sense strand
ggacacuuccuaagaauau

SEQ ID NO: 1523615 - RNA, 19 nt, Homo sapiens
  misc_RNA (1)...(19): siRNA sense strand
gccagaaagcggauaauuu

SEQ ID NO: 1523616 - RNA, 19 nt, Homo sapiens
  misc_RNA (1)...(19): siRNA sense strand
ggaguggacaggauuaguu

SEQ ID NO: 1523617 - RNA, 19 nt, Homo sapiens
  misc_RNA (1)...(19): siRNA sense strand
ccagaaagcggauaauuuu

SEQ ID NO: 1523618 - RNA, 19 nt, Homo sapiens
  misc_RNA (1)...(19): siRNA sense strand
caucuucaggccacaaaua

SEQ ID NO: 1523619 - RNA, 19 nt, Homo sapiens
  misc_RNA (1)...(19): siRNA sense strand
aaacuaaaccacaucuuca

SEQ ID NO: 1523620 - RNA, 19 nt, Homo sapiens
  misc_RNA (1)...(19): siRNA sense strand
ggccacaaauagaacaaau

SEQ ID NO: 1523621 - RNA, 19 nt, Homo sapiens
  misc_RNA (1)...(19): siRNA sense strand
ggacaagcaggaauggaau

SEQ ID NO: 1523622 - RNA, 19 nt, Homo sapiens
  misc_RNA (1)...(19): siRNA sense strand
gccacaaauagaacaaaua

SEQ ID NO: 1523623 - RNA, 19 nt, Homo sapiens
  misc_RNA (1)...(19): siRNA sense strand
gaaagcggauaauuuugug

SEQ ID NO: 1523624 - RNA, 19 nt, Homo sapiens
  misc_RNA (1)...(19): siRNA sense strand
ggaauccuccagcaaacga

SEQ ID NO: 1523625 - RNA, 19 nt, Homo sapiens
  misc_RNA (1)...(19): siRNA sense strand
ggugguggauccaaaacua

SEQ ID NO: 1523626 - RNA, 19 nt, Homo sapiens
  misc_RNA (1)...(19): siRNA sense strand
acccucagcucaucgcuau

SEQ ID NO: 1523627 - RNA, 19 nt, Homo sapiens
  misc_RNA (1)...(19): siRNA sense strand
gcuggaguggacaggauua

SEQ ID NO: 1523628 - RNA, 19 nt, Homo sapiens
  misc_RNA (1)...(19): siRNA sense strand
caacugcacgauggucuga

SEQ ID NO: 1523629 - RNA, 19 nt, Homo sapiens
  misc_RNA (1)...(19): siRNA sense strand
gcagagugugguucaguca

SEQ ID NO: 1523630 - RNA, 19 nt, Homo sapiens
  misc_RNA (1)...(19): siRNA sense strand
agaauaugccugacagcuu

SEQ ID NO: 1523631 - RNA, 19 nt, Homo sapiens
  misc_RNA (1)...(19): siRNA sense strand
cuucaggccacaaauagaa

SEQ ID NO: 1523632 - RNA, 19 nt, Homo sapiens
  misc_RNA (1)...(19): siRNA sense strand
gaguggacaggauuaguuc

SEQ ID NO: 1523633 - RNA, 19 nt, Homo sapiens
  misc_RNA (1)...(19): siRNA sense strand
uggacaagcaggaauggaa

SEQ ID NO: 1523634 - RNA, 19 nt, Homo sapiens
  misc_RNA (1)...(19): siRNA sense strand
aggcugacguggacaccaa

SEQ ID NO: 1523635 - RNA, 19 nt, Homo sapiens
  misc_RNA (1)...(19): siRNA sense strand
gacacuuccuaagaauaug

SEQ ID NO: 1523636 - RNA, 19 nt, Homo sapiens
  misc_RNA (1)...(19): siRNA sense strand
aagcuggaguggacaggau

SEQ ID NO: 1523637 - RNA, 19 nt, Homo sapiens
  misc_RNA (1)...(19): siRNA sense strand
gcaauccuguacccugaaa

SEQ ID NO: 1523638 - RNA, 19 nt, Homo sapiens
  misc_RNA (1)...(19): siRNA sense strand
ccacccagaugcccugaaa

SEQ ID NO: 1523639 - RNA, 19 nt, Homo sapiens
  misc_RNA (1)...(19): siRNA sense strand
gaguuugucuggugaaugc

SEQ ID NO: 1523640 - RNA, 19 nt, Homo sapiens
  misc_RNA (1)...(19): siRNA sense strand
ccugaaaccagcuagauga

SEQ ID NO: 1523641 - RNA, 19 nt, Homo sapiens
  misc_RNA (1)...(19): siRNA sense strand
ggaugucagugccaauuuu

SEQ ID NO: 1523642 - RNA, 19 nt, Homo sapiens
  misc_RNA (1)...(19): siRNA sense strand
ucaggcaccuucaggaucu

SEQ ID NO: 1523643 - RNA, 19 nt, Homo sapiens
  misc_RNA (1)...(19): siRNA sense strand
ggucaaggcacgcugcaau

SEQ ID NO: 1523644 - RNA, 19 nt, Homo sapiens
  misc_RNA (1)...(19): siRNA sense strand
gcaauacgcagaguuuguc

SEQ ID NO: 1523645 - RNA, 19 nt, Homo sapiens
  misc_RNA (1)...(19): siRNA sense strand
gccgucagcuugucaacuc

SEQ ID NO: 1523646 - RNA, 19 nt, Homo sapiens
  misc_RNA (1)...(19): siRNA sense strand
gagcagccgucagcuuguc

SEQ ID NO: 1523647 - RNA, 19 nt, Homo sapiens
  misc_RNA (1)...(19): siRNA sense strand
gcaccuucaggaucuggua

SEQ ID NO: 1523648 - RNA, 19 nt, Homo sapiens
  misc_RNA (1)...(19): siRNA sense strand
ggcaauacgcagaguuugu

SEQ ID NO: 1523649 - RNA, 19 nt, Homo sapiens
  misc_RNA (1)...(19): siRNA sense strand
uucaggaucugguacuguu

SEQ ID NO: 1523650 - RNA, 19 nt, Homo sapiens
  misc_RNA (1)...(19): siRNA sense strand
gaagcuaugugagauauaa

SEQ ID NO: 1523651 - RNA, 19 nt, Homo sapiens
  misc_RNA (1)...(19): siRNA sense strand
ccagagaaccugagaguga

SEQ ID NO: 1523652 - RNA, 19 nt, Homo sapiens
  misc_RNA (1)...(19): siRNA sense strand
gccaagaggagcuccauua

SEQ ID NO: 1523653 - RNA, 19 nt, Homo sapiens
  misc_RNA (1)...(19): siRNA sense strand
gaugggagauucuggauac

SEQ ID NO: 1523654 - RNA, 19 nt, Homo sapiens
  misc_RNA (1)...(19): siRNA sense strand
uaacugggccuuugaggaa

SEQ ID NO: 1523655 - RNA, 19 nt, Homo sapiens
  misc_RNA (1)...(19): siRNA sense strand
ggaccucucugugcaguau

SEQ ID NO: 1523656 - RNA, 19 nt, Homo sapiens
  misc_RNA (1)...(19): siRNA sense strand
gagaggaagcuaugugaga

SEQ ID NO: 1523657 - RNA, 19 nt, Homo sapiens
  misc_RNA (1)...(19): siRNA sense strand
aagaggagcuccauuaugc

SEQ ID NO: 1523658 - RNA, 19 nt, Homo sapiens
  misc_RNA (1)...(19): siRNA sense strand
ccagagaccuuguuaucag

SEQ ID NO: 1523659 - RNA, 19 nt, Homo sapiens
  misc_RNA (1)...(19): siRNA sense strand
aacgauggguucuuucuaa

SEQ ID NO: 1523660 - RNA, 19 nt, Homo sapiens
  misc_RNA (1)...(19): siRNA sense strand
gagagaggaagcuauguga

SEQ ID NO: 1523661 - RNA, 19 nt, Homo sapiens
  misc_RNA (1)...(19): siRNA sense strand
gcucagaagcggaaucaga

SEQ ID NO: 1523662 - RNA, 19 nt, Homo sapiens
  misc_RNA (1)...(19): siRNA sense strand
gcacgucucucccaguacu

SEQ ID NO: 1523663 - RNA, 19 nt, Homo sapiens
  misc_RNA (1)...(19): siRNA sense strand
gaucagagacgcgcagaug

SEQ ID NO: 1523664 - RNA, 19 nt, Homo sapiens
  misc_RNA (1)...(19): siRNA sense strand
cggcacgucucucccagua

SEQ ID NO: 1523665 - RNA, 19 nt, Homo sapiens
  misc_RNA (1)...(19): siRNA sense strand
gaacugcuccuuggugauc

SEQ ID NO: 1523666 - RNA, 19 nt, Homo sapiens
  misc_RNA (1)...(19): siRNA sense strand
gagacggacucagacagaa

SEQ ID NO: 1523667 - RNA, 19 nt, Homo sapiens
  misc_RNA (1)...(19): siRNA sense strand
gcuuauggcuacugguuca

SEQ ID NO: 1523668 - RNA, 19 nt, Homo sapiens
  misc_RNA (1)...(19): siRNA sense strand
ccaggcggauuaugcagaa

SEQ ID NO: 1523669 - RNA, 19 nt, Homo sapiens
  misc_RNA (1)...(19): siRNA sense strand
gaggaagcuaugugagaua

SEQ ID NO: 1523670 - RNA, 19 nt, Homo sapiens
  misc_RNA (1)...(19): siRNA sense strand
caagaggagcuccauuaug

SEQ ID NO: 1523671 - RNA, 19 nt, Homo sapiens
  misc_RNA (1)...(19): siRNA sense strand
gauaagaagggacucaucu

SEQ ID NO: 1523672 - RNA, 19 nt, Homo sapiens
  misc_RNA (1)...(19): siRNA sense strand
ggagagaggaagcuaugug

SEQ ID NO: 1523673 - RNA, 19 nt, Homo sapiens
  misc_RNA (1)...(19): siRNA sense strand
caacuucccaggcgucaga

SEQ ID NO: 1523674 - RNA, 19 nt, Homo sapiens
  misc_RNA (1)...(19): siRNA sense strand
aaucaaagaagaaccagaa

SEQ ID NO: 1523675 - RNA, 19 nt, Homo sapiens
  misc_RNA (1)...(19): siRNA sense strand
gaaagccacaccaaacagu

SEQ ID NO: 1523676 - RNA, 19 nt, Homo sapiens
  misc_RNA (1)...(19): siRNA sense strand
gcaguauccuccagagaac

SEQ ID NO: 1523677 - RNA, 19 nt, Homo sapiens
  misc_RNA (1)...(19): siRNA sense strand
ccaacgaccucccacuucu

SEQ ID NO: 1523678 - RNA, 19 nt, Homo sapiens
  misc_RNA (1)...(19): siRNA sense strand
ccgaagagacggacucaga

SEQ ID NO: 1523679 - RNA, 19 nt, Homo sapiens
  misc_RNA (1)...(19): siRNA sense strand
aguaucaguugcccaguuu

SEQ ID NO: 1523680 - RNA, 19 nt, Homo sapiens
  misc_RNA (1)...(19): siRNA sense strand
gaagagacggacucagaca

SEQ ID NO: 1523681 - RNA, 19 nt, Homo sapiens
  misc_RNA (1)...(19): siRNA sense strand
gcagaugcaggaugaguca

SEQ ID NO: 1523682 - RNA, 19 nt, Homo sapiens
  misc_RNA (1)...(19): siRNA sense strand
ccaagaggagcuccauuau

SEQ ID NO: 1523683 - RNA, 19 nt, Homo sapiens
  misc_RNA (1)...(19): siRNA sense strand
uaagaagggacucaucuca

SEQ ID NO: 1523684 - RNA, 19 nt, Homo sapiens
  misc_RNA (1)...(19): siRNA sense strand
gcuccuuggugaucagaga

SEQ ID NO: 1523685 - RNA, 19 nt, Homo sapiens
  misc_RNA (1)...(19): siRNA sense strand
agaagggacucaucucaac

SEQ ID NO: 1523686 - RNA, 19 nt, Homo sapiens
  misc_RNA (1)...(19): siRNA sense strand
gcagaagucaaguuccaau

SEQ ID NO: 1523687 - RNA, 19 nt, Homo sapiens
  misc_RNA (1)...(19): siRNA sense strand
acgcgcagaugcaggauga

SEQ ID NO: 1523688 - RNA, 19 nt, Homo sapiens
  misc_RNA (1)...(19): siRNA sense strand
agaagucaaguuccaauga

SEQ ID NO: 1523689 - RNA, 19 nt, Homo sapiens
  misc_RNA (1)...(19): siRNA sense strand
caguaucaguugcccaguu

SEQ ID NO: 1523690 - RNA, 19 nt, Homo sapiens
  misc_RNA (1)...(19): siRNA sense strand
cagagaaccugagagugau

SEQ ID NO: 1523691 - RNA, 19 nt, Homo sapiens
  misc_RNA (1)...(19): siRNA sense strand
ggaugggagauucuggaua

SEQ ID NO: 1523692 - RNA, 19 nt, Homo sapiens
  misc_RNA (1)...(19): siRNA sense strand
ggaagcuaugugagauaua

SEQ ID NO: 1523693 - RNA, 19 nt, Homo sapiens
  misc_RNA (1)...(19): siRNA sense strand
cagaaagccacaccaaaca

SEQ ID NO: 1523694 - RNA, 19 nt, Homo sapiens
  misc_RNA (1)...(19): siRNA sense strand
ugagcuggguccugcagaa

SEQ ID NO: 1523695 - RNA, 19 nt, Homo sapiens
  misc_RNA (1)...(19): siRNA sense strand
agaggaagcuaugugagau

SEQ ID NO: 1523696 - RNA, 19 nt, Homo sapiens
  misc_RNA (1)...(19): siRNA sense strand
uccugcagcugccagauaa

SEQ ID NO: 1523697 - RNA, 19 nt, Homo sapiens
  misc_RNA (1)...(19): siRNA sense strand
ggagcugccucggguucaa

SEQ ID NO: 1523698 - RNA, 19 nt, Homo sapiens
  misc_RNA (1)...(19): siRNA sense strand
acggucaucuguguguuua

SEQ ID NO: 1523699 - RNA, 19 nt, Homo sapiens
  misc_RNA (1)...(19): siRNA sense strand
ugagucacaguacuucuuu

SEQ ID NO: 1523700 - RNA, 19 nt, Homo sapiens
  misc_RNA (1)...(19): siRNA sense strand
ucagaaagccacaccaaac

SEQ ID NO: 1523701 - RNA, 19 nt, Homo sapiens
  misc_RNA (1)...(19): siRNA sense strand
caucacggcucuucuuuuc

SEQ ID NO: 1523702 - RNA, 19 nt, Homo sapiens
  misc_RNA (1)...(19): siRNA sense strand
gaccuuguuaucagcauuu

SEQ ID NO: 1523703 - RNA, 19 nt, Homo sapiens
  misc_RNA (1)...(19): siRNA sense strand
caaggaaccaaaccaacga

SEQ ID NO: 1523704 - RNA, 19 nt, Homo sapiens
  misc_RNA (1)...(19): siRNA sense strand
ggucaucuguguguuuaac

SEQ ID NO: 1523705 - RNA, 19 nt, Homo sapiens
  misc_RNA (1)...(19): siRNA sense strand
gcacccaggcggauuaugc

SEQ ID NO: 1523706 - RNA, 19 nt, Homo sapiens
  misc_RNA (1)...(19): siRNA sense strand
acgauggguucuuucuaaa

SEQ ID NO: 1523707 - RNA, 19 nt, Homo sapiens
  misc_RNA (1)...(19): siRNA sense strand
gucgagagguggaaaugag

SEQ ID NO: 1523708 - RNA, 19 nt, Homo sapiens
  misc_RNA (1)...(19): siRNA sense strand
ugaagauucuaccgaagag

SEQ ID NO: 1523709 - RNA, 19 nt, Homo sapiens
  misc_RNA (1)...(19): siRNA sense strand
guguuuaacugggccuuug

SEQ ID NO: 1523710 - RNA, 19 nt, Homo sapiens
  misc_RNA (1)...(19): siRNA sense strand
ucaaguggagcacgaagga

SEQ ID NO: 1523711 - RNA, 19 nt, Homo sapiens
  misc_RNA (1)...(19): siRNA sense strand
cagcuuauggcuacugguu

SEQ ID NO: 1523712 - RNA, 19 nt, Homo sapiens
  misc_RNA (1)...(19): siRNA sense strand
aggaagcuaugugagauau

SEQ ID NO: 1523713 - RNA, 19 nt, Homo sapiens
  misc_RNA (1)...(19): siRNA sense strand
ggagcacgaaggagaguuc

SEQ ID NO: 1523714 - RNA, 19 nt, Homo sapiens
  misc_RNA (1)...(19): siRNA sense strand
gacggucaucuguguguuu

SEQ ID NO: 1523715 - RNA, 19 nt, Homo sapiens
  misc_RNA (1)...(19): siRNA sense strand
gugaugguuucccaagcaa

SEQ ID NO: 1523716 - RNA, 19 nt, Homo sapiens
  misc_RNA (1)...(19): siRNA sense strand
ggcaucacggcucuucuuu

SEQ ID NO: 1523717 - RNA, 19 nt, Homo sapiens
  misc_RNA (1)...(19): siRNA sense strand
ggauuaugcagaagucaag

SEQ ID NO: 1523718 - RNA, 19 nt, Homo sapiens
  misc_RNA (1)...(19): siRNA sense strand
ggcuauggaugggagauuc

SEQ ID NO: 1523719 - RNA, 19 nt, Homo sapiens
  misc_RNA (1)...(19): siRNA sense strand
guggagagaggaagcuaug

SEQ ID NO: 1523720 - RNA, 19 nt, Homo sapiens
  misc_RNA (1)...(19): siRNA sense strand
ucccagaacccaaaucauc

SEQ ID NO: 1523721 - RNA, 19 nt, Homo sapiens
  misc_RNA (1)...(19): siRNA sense strand
gccugugccuggucugugu

SEQ ID NO: 1523722 - RNA, 19 nt, Homo sapiens
  misc_RNA (1)...(19): siRNA sense strand
ugcaguauccuccagagaa

SEQ ID NO: 1523723 - RNA, 19 nt, Homo sapiens
  misc_RNA (1)...(19): siRNA sense strand
gcagcugccagauaagaag

SEQ ID NO: 1523724 - RNA, 19 nt, Homo sapiens
  misc_RNA (1)...(19): siRNA sense strand
cgaccucaccugccaugug

SEQ ID NO: 1523725 - RNA, 19 nt, Homo sapiens
  misc_RNA (1)...(19): siRNA sense strand
ucagaagcggaaucagaaa

SEQ ID NO: 1523726 - RNA, 19 nt, Homo sapiens
  misc_RNA (1)...(19): siRNA sense strand
agacggacucagacagaaa

SEQ ID NO: 1523727 - RNA, 19 nt, Homo sapiens
  misc_RNA (1)...(19): siRNA sense strand
ggaugagucacaguacuuc

SEQ ID NO: 1523728 - RNA, 19 nt, Homo sapiens
  misc_RNA (1)...(19): siRNA sense strand
aagaagggacucaucucaa

SEQ ID NO: 1523729 - RNA, 19 nt, Homo sapiens
  misc_RNA (1)...(19): siRNA sense strand
aaucagaaagccacaccaa

SEQ ID NO: 1523730 - RNA, 19 nt, Homo sapiens
  misc_RNA (1)...(19): siRNA sense strand
cucagaagcggaaucagaa

SEQ ID NO: 1523731 - RNA, 19 nt, Homo sapiens
  misc_RNA (1)...(19): siRNA sense strand
agagacggacucagacaga

SEQ ID NO: 1523732 - RNA, 19 nt, Homo sapiens
  misc_RNA (1)...(19): siRNA sense strand
caggaugagucacaguacu

SEQ ID NO: 1523733 - RNA, 19 nt, Homo sapiens
  misc_RNA (1)...(19): siRNA sense strand
gaagauucuaccgaagaga

SEQ ID NO: 1523734 - RNA, 19 nt, Homo sapiens
  misc_RNA (1)...(19): siRNA sense strand
gcaggaugagucacaguac

SEQ ID NO: 1523735 - RNA, 19 nt, Homo sapiens
  misc_RNA (1)...(19): siRNA sense strand
aaaugucccauaccuggaa

SEQ ID NO: 1523736 - RNA, 19 nt, Homo sapiens
  misc_RNA (1)...(19): siRNA sense strand
ucaucuguguguuuaacug

SEQ ID NO: 1523737 - RNA, 19 nt, Homo sapiens
  misc_RNA (1)...(19): siRNA sense strand
cagcuccgcccucagaauu

SEQ ID NO: 1523738 - RNA, 19 nt, Homo sapiens
  misc_RNA (1)...(19): siRNA sense strand
caggugugcucugcuguug

SEQ ID NO: 1523739 - RNA, 19 nt, Homo sapiens
  misc_RNA (1)...(19): siRNA sense strand
ggugugcucugcuguugcu

SEQ ID NO: 1523740 - RNA, 19 nt, Homo sapiens
  misc_RNA (1)...(19): siRNA sense strand
gcugaugguccugauguug

SEQ ID NO: 1523741 - RNA, 19 nt, Homo sapiens
  misc_RNA (1)...(19): siRNA sense strand
gcucgcgcauuguccuauc

SEQ ID NO: 1523742 - RNA, 19 nt, Homo sapiens
  misc_RNA (1)...(19): siRNA sense strand
ccaucggccucuugcagau

SEQ ID NO: 1523743 - RNA, 19 nt, Homo sapiens
  misc_RNA (1)...(19): siRNA sense strand
gcuccgcccucagaauucu

SEQ ID NO: 1523744 - RNA, 19 nt, Homo sapiens
  misc_RNA (1)...(19): siRNA sense strand
gugcucugcuguugcugau

SEQ ID NO: 1523745 - RNA, 19 nt, Homo sapiens
  misc_RNA (1)...(19): siRNA sense strand
ggaaaucguuggcguagua

SEQ ID NO: 1523746 - RNA, 19 nt, Homo sapiens
  misc_RNA (1)...(19): siRNA sense strand
gcagagagccugucgguaa

SEQ ID NO: 1523747 - RNA, 19 nt, Homo sapiens
  misc_RNA (1)...(19): siRNA sense strand
agaccaagcugauccauuu

SEQ ID NO: 1523748 - RNA, 19 nt, Homo sapiens
  misc_RNA (1)...(19): siRNA sense strand
caaccaagcuucaaacucu

SEQ ID NO: 1523749 - RNA, 19 nt, Homo sapiens
  misc_RNA (1)...(19): siRNA sense strand
gaaauggagcguuuauaaa

SEQ ID NO: 1523750 - RNA, 19 nt, Homo sapiens
  misc_RNA (1)...(19): siRNA sense strand
gaaagaggcuaaacugacu

SEQ ID NO: 1523751 - RNA, 19 nt, Homo sapiens
  misc_RNA (1)...(19): siRNA sense strand
gacagaguguuucacauuu

SEQ ID NO: 1523752 - RNA, 19 nt, Homo sapiens
  misc_RNA (1)...(19): siRNA sense strand
gaucuguuacccaauauua

SEQ ID NO: 1523753 - RNA, 19 nt, Homo sapiens
  misc_RNA (1)...(19): siRNA sense strand
ggacagcauuccucacaga

SEQ ID NO: 1523754 - RNA, 19 nt, Homo sapiens
  misc_RNA (1)...(19): siRNA sense strand
gcucugcuauguuauuuau

SEQ ID NO: 1523755 - RNA, 19 nt, Homo sapiens
  misc_RNA (1)...(19): siRNA sense strand
agaaauggagcguuuauaa

SEQ ID NO: 1523756 - RNA, 19 nt, Homo sapiens
  misc_RNA (1)...(19): siRNA sense strand
gaaaggaugccacacuuca

SEQ ID NO: 1523757 - RNA, 19 nt, Homo sapiens
  misc_RNA (1)...(19): siRNA sense strand
uacaagaaauggagcguuu

SEQ ID NO: 1523758 - RNA, 19 nt, Homo sapiens
  misc_RNA (1)...(19): siRNA sense strand
aagaggaggucgacaggua

SEQ ID NO: 1523759 - RNA, 19 nt, Homo sapiens
  misc_RNA (1)...(19): siRNA sense strand
gggaaaggaugccacacuu

SEQ ID NO: 1523760 - RNA, 19 nt, Homo sapiens
  misc_RNA (1)...(19): siRNA sense strand
gguguuauccuaucucuug

SEQ ID NO: 1523761 - RNA, 19 nt, Homo sapiens
  misc_RNA (1)...(19): siRNA sense strand
caacuggaguggugcuguu

SEQ ID NO: 1523762 - RNA, 19 nt, Homo sapiens
  misc_RNA (1)...(19): siRNA sense strand
cuggugcucugcuauguua

SEQ ID NO: 1523763 - RNA, 19 nt, Homo sapiens
  misc_RNA (1)...(19): siRNA sense strand
gcacaagcacauauguuug

SEQ ID NO: 1523764 - RNA, 19 nt, Homo sapiens
  misc_RNA (1)...(19): siRNA sense strand
gaucaccuuugucuugaau

SEQ ID NO: 1523765 - RNA, 19 nt, Homo sapiens
  misc_RNA (1)...(19): siRNA sense strand
gcagagccuuugcuucauc

SEQ ID NO: 1523766 - RNA, 19 nt, Homo sapiens
  misc_RNA (1)...(19): siRNA sense strand
ugacagaguguuucacauu

SEQ ID NO: 1523767 - RNA, 19 nt, Homo sapiens
  misc_RNA (1)...(19): siRNA sense strand
ugaagugccugauccuaau

SEQ ID NO: 1523768 - RNA, 19 nt, Homo sapiens
  misc_RNA (1)...(19): siRNA sense strand
ggcacaagcacauauguuu

SEQ ID NO: 1523769 - RNA, 19 nt, Homo sapiens
  misc_RNA (1)...(19): siRNA sense strand
cuuccugucuccagaauaa

SEQ ID NO: 1523770 - RNA, 19 nt, Homo sapiens
  misc_RNA (1)...(19): siRNA sense strand
ugacagaaggcgagcgaua

SEQ ID NO: 1523771 - RNA, 19 nt, Homo sapiens
  misc_RNA (1)...(19): siRNA sense strand
guauugaacuuuggugauc

SEQ ID NO: 1523772 - RNA, 19 nt, Homo sapiens
  misc_RNA (1)...(19): siRNA sense strand
gacuaacgcugcuuuacuc

SEQ ID NO: 1523773 - RNA, 19 nt, Homo sapiens
  misc_RNA (1)...(19): siRNA sense strand
gaaggcgagcgauauguga

SEQ ID NO: 1523774 - RNA, 19 nt, Homo sapiens
  misc_RNA (1)...(19): siRNA sense strand
gaaucaaccaagcuucaaa

SEQ ID NO: 1523775 - RNA, 19 nt, Homo sapiens
  misc_RNA (1)...(19): siRNA sense strand
ugaaacagauuuugacaga

SEQ ID NO: 1523776 - RNA, 19 nt, Homo sapiens
  misc_RNA (1)...(19): siRNA sense strand
ggccugaccaucacuguuu

SEQ ID NO: 1523777 - RNA, 19 nt, Homo sapiens
  misc_RNA (1)...(19): siRNA sense strand
caagaaauggagcguuuau

SEQ ID NO: 1523778 - RNA, 19 nt, Homo sapiens
  misc_RNA (1)...(19): siRNA sense strand
caucuuggccaacugcuuu

SEQ ID NO: 1523779 - RNA, 19 nt, Homo sapiens
  misc_RNA (1)...(19): siRNA sense strand
guugaucaccuuugucuug

SEQ ID NO: 1523780 - RNA, 19 nt, Homo sapiens
  misc_RNA (1)...(19): siRNA sense strand
cagagagccugucgguaau

SEQ ID NO: 1523781 - RNA, 19 nt, Homo sapiens
  misc_RNA (1)...(19): siRNA sense strand
acagaguguuucacauuug

SEQ ID NO: 1523782 - RNA, 19 nt, Homo sapiens
  misc_RNA (1)...(19): siRNA sense strand
guaagacuaacgcugcuuu

SEQ ID NO: 1523783 - RNA, 19 nt, Homo sapiens
  misc_RNA (1)...(19): siRNA sense strand
gguugcagcugcuugaagu

SEQ ID NO: 1523784 - RNA, 19 nt, Homo sapiens
  misc_RNA (1)...(19): siRNA sense strand
uaacgcugcuuuacucaac

SEQ ID NO: 1523785 - RNA, 19 nt, Homo sapiens
  misc_RNA (1)...(19): siRNA sense strand
gugcucugcuauguuauuu

SEQ ID NO: 1523786 - RNA, 19 nt, Homo sapiens
  misc_RNA (1)...(19): siRNA sense strand
cuaauguugucccucacua

SEQ ID NO: 1523787 - RNA, 19 nt, Homo sapiens
  misc_RNA (1)...(19): siRNA sense strand
ucacagagaccaagcugau

SEQ ID NO: 1523788 - RNA, 19 nt, Homo sapiens
  misc_RNA (1)...(19): siRNA sense strand
ggaaaggaugccacacuuc

SEQ ID NO: 1523789 - RNA, 19 nt, Homo sapiens
  misc_RNA (1)...(19): siRNA sense strand
gagagccugucgguaauuc

SEQ ID NO: 1523790 - RNA, 19 nt, Homo sapiens
  misc_RNA (1)...(19): siRNA sense strand
uaagacuaacgcugcuuua

SEQ ID NO: 1523791 - RNA, 19 nt, Homo sapiens
  misc_RNA (1)...(19): siRNA sense strand
gugaucaggguguguauga

SEQ ID NO: 1523792 - RNA, 19 nt, Homo sapiens
  misc_RNA (1)...(19): siRNA sense strand
ggguguguaugauauagug

SEQ ID NO: 1523793 - RNA, 19 nt, Homo sapiens
  misc_RNA (1)...(19): siRNA sense strand
gacagaaggcgagcgauau

SEQ ID NO: 1523794 - RNA, 19 nt, Homo sapiens
  misc_RNA (1)...(19): siRNA sense strand
cagcgugggcuucaucuug

SEQ ID NO: 1523795 - RNA, 19 nt, Homo sapiens
  misc_RNA (1)...(19): siRNA sense strand
ccucauuccugguguuauc

SEQ ID NO: 1523796 - RNA, 19 nt, Homo sapiens
  misc_RNA (1)...(19): siRNA sense strand
gaaaucguuggcguaguaa

SEQ ID NO: 1523797 - RNA, 19 nt, Homo sapiens
  misc_RNA (1)...(19): siRNA sense strand
gccugucgguaauucuuaa

SEQ ID NO: 1523798 - RNA, 19 nt, Homo sapiens
  misc_RNA (1)...(19): siRNA sense strand
ggagugacagaguguuuca

SEQ ID NO: 1523799 - RNA, 19 nt, Homo sapiens
  misc_RNA (1)...(19): siRNA sense strand
ggcgagcgauaugugauga

SEQ ID NO: 1523800 - RNA, 19 nt, Homo sapiens
  misc_RNA (1)...(19): siRNA sense strand
gcccagacgcacugacaaa

SEQ ID NO: 1523801 - RNA, 19 nt, Homo sapiens
  misc_RNA (1)...(19): siRNA sense strand
acgcagagccuuugcuuca

SEQ ID NO: 1523802 - RNA, 19 nt, Homo sapiens
  misc_RNA (1)...(19): siRNA sense strand
ccgcagagcaugucucagu

SEQ ID NO: 1523803 - RNA, 19 nt, Homo sapiens
  misc_RNA (1)...(19): siRNA sense strand
gagaccaagcugauccauu

SEQ ID NO: 1523804 - RNA, 19 nt, Homo sapiens
  misc_RNA (1)...(19): siRNA sense strand
ggccaacugcuuuaacaug

SEQ ID NO: 1523805 - RNA, 19 nt, Homo sapiens
  misc_RNA (1)...(19): siRNA sense strand
gaggucgacagguacaauu

SEQ ID NO: 1523806 - RNA, 19 nt, Homo sapiens
  misc_RNA (1)...(19): siRNA sense strand
uaaacuggaaagaggcuaa

SEQ ID NO: 1523807 - RNA, 19 nt, Homo sapiens
  misc_RNA (1)...(19): siRNA sense strand
gaagugccugauccuaaug

SEQ ID NO: 1523808 - RNA, 19 nt, Homo sapiens
  misc_RNA (1)...(19): siRNA sense strand
ggagggaccaugcuuagcu

SEQ ID NO: 1523809 - RNA, 19 nt, Homo sapiens
  misc_RNA (1)...(19): siRNA sense strand
agagcguucugacagcuuu

SEQ ID NO: 1523810 - RNA, 19 nt, Homo sapiens
  misc_RNA (1)...(19): siRNA sense strand
cagaaucaaccaagcuuca

SEQ ID NO: 1523811 - RNA, 19 nt, Homo sapiens
  misc_RNA (1)...(19): siRNA sense strand
ccucaggacucaguuaggu

SEQ ID NO: 1523812 - RNA, 19 nt, Homo sapiens
  misc_RNA (1)...(19): siRNA sense strand
cagaucuguuacccaauau

SEQ ID NO: 1523813 - RNA, 19 nt, Homo sapiens
  misc_RNA (1)...(19): siRNA sense strand
aaacagauuuugacagaag

SEQ ID NO: 1523814 - RNA, 19 nt, Homo sapiens
  misc_RNA (1)...(19): siRNA sense strand
uugaagugccugauccuaa

SEQ ID NO: 1523815 - RNA, 19 nt, Homo sapiens
  misc_RNA (1)...(19): siRNA sense strand
gaggcuaaacugacuugga

SEQ ID NO: 1523816 - RNA, 19 nt, Homo sapiens
  misc_RNA (1)...(19): siRNA sense strand
gagccugucgguaauucuu

SEQ ID NO: 1523817 - RNA, 19 nt, Homo sapiens
  misc_RNA (1)...(19): siRNA sense strand
cuuguggccagauuaauuu

SEQ ID NO: 1523818 - RNA, 19 nt, Homo sapiens
  misc_RNA (1)...(19): siRNA sense strand
ugaauguauugaacuuugg

SEQ ID NO: 1523819 - RNA, 19 nt, Homo sapiens
  misc_RNA (1)...(19): siRNA sense strand
uuucaaacagucuuucuug

SEQ ID NO: 1523820 - RNA, 19 nt, Homo sapiens
  misc_RNA (1)...(19): siRNA sense strand
cagguguuguuucgguuga

SEQ ID NO: 1523821 - RNA, 19 nt, Homo sapiens
  misc_RNA (1)...(19): siRNA sense strand
acaagaaauggagcguuua

SEQ ID NO: 1523822 - RNA, 19 nt, Homo sapiens
  misc_RNA (1)...(19): siRNA sense strand
ucagcuggcucuggauauc

SEQ ID NO: 1523823 - RNA, 19 nt, Homo sapiens
  misc_RNA (1)...(19): siRNA sense strand
ccuuguggccagauuaauu

SEQ ID NO: 1523824 - RNA, 19 nt, Homo sapiens
  misc_RNA (1)...(19): siRNA sense strand
cgagcgauaugugaugaca

SEQ ID NO: 1523825 - RNA, 19 nt, Homo sapiens
  misc_RNA (1)...(19): siRNA sense strand
gaaacagauuuugacagaa

SEQ ID NO: 1523826 - RNA, 19 nt, Homo sapiens
  misc_RNA (1)...(19): siRNA sense strand
gccaauagaggaaaguuuu

SEQ ID NO: 1523827 - RNA, 19 nt, Homo sapiens
  misc_RNA (1)...(19): siRNA sense strand
ggugcucugcuauguuauu

SEQ ID NO: 1523828 - RNA, 19 nt, Homo sapiens
  misc_RNA (1)...(19): siRNA sense strand
uugaucaccuuugucuuga

SEQ ID NO: 1523829 - RNA, 19 nt, Homo sapiens
  misc_RNA (1)...(19): siRNA sense strand
ucaggguguguaugauaua

SEQ ID NO: 1523830 - RNA, 19 nt, Homo sapiens
  misc_RNA (1)...(19): siRNA sense strand
auucuucgcuuccugucaa

SEQ ID NO: 1523831 - RNA, 19 nt, Homo sapiens
  misc_RNA (1)...(19): siRNA sense strand
cccaauauuacaagaaaug

SEQ ID NO: 1523832 - RNA, 19 nt, Homo sapiens
  misc_RNA (1)...(19): siRNA sense strand
uggaaagaggcuaaacuga

SEQ ID NO: 1523833 - RNA, 19 nt, Homo sapiens
  misc_RNA (1)...(19): siRNA sense strand
cagacgcacugacaaaaug

SEQ ID NO: 1523834 - RNA, 19 nt, Homo sapiens
  misc_RNA (1)...(19): siRNA sense strand
cagaguguuucacauuugc

SEQ ID NO: 1523835 - RNA, 19 nt, Homo sapiens
  misc_RNA (1)...(19): siRNA sense strand
ccuacugucucuauguucu

SEQ ID NO: 1523836 - RNA, 19 nt, Homo sapiens
  misc_RNA (1)...(19): siRNA sense strand
guuacccaauauuacaaga

SEQ ID NO: 1523837 - RNA, 19 nt, Homo sapiens
  misc_RNA (1)...(19): siRNA sense strand
gcaacucucgggacagcau

SEQ ID NO: 1523838 - RNA, 19 nt, Homo sapiens
  misc_RNA (1)...(19): siRNA sense strand
ggaggucgacagguacaau

SEQ ID NO: 1523839 - RNA, 19 nt, Homo sapiens
  misc_RNA (1)...(19): siRNA sense strand
acagaaggcgagcgauaug

SEQ ID NO: 1523840 - RNA, 19 nt, Homo sapiens
  misc_RNA (1)...(19): siRNA sense strand
aagaaauggagcguuuaua

SEQ ID NO: 1523841 - RNA, 19 nt, Homo sapiens
  misc_RNA (1)...(19): siRNA sense strand
ucacgcagagccuuugcuu

SEQ ID NO: 1523842 - RNA, 19 nt, Homo sapiens
  misc_RNA (1)...(19): siRNA sense strand
gcucccuuguggccagauu

SEQ ID NO: 1523843 - RNA, 19 nt, Homo sapiens
  misc_RNA (1)...(19): siRNA sense strand
ucucagcuggcucuggaua

SEQ ID NO: 1523844 - RNA, 19 nt, Homo sapiens
  misc_RNA (1)...(19): siRNA sense strand
guguuauccuaucucuuga

SEQ ID NO: 1523845 - RNA, 19 nt, Homo sapiens
  misc_RNA (1)...(19): siRNA sense strand
gaacaugacagccaagaaa

SEQ ID NO: 1523846 - RNA, 19 nt, Homo sapiens
  misc_RNA (1)...(19): siRNA sense strand
gcagaacggugcuaaggaa

SEQ ID NO: 1523847 - RNA, 19 nt, Homo sapiens
  misc_RNA (1)...(19): siRNA sense strand
ggagggagcugcagugaag

SEQ ID NO: 1523848 - RNA, 19 nt, Homo sapiens
  misc_RNA (1)...(19): siRNA sense strand
gaaggaaaccggccuguuc

SEQ ID NO: 1523849 - RNA, 19 nt, Homo sapiens
  misc_RNA (1)...(19): siRNA sense strand
gagccagccuccuaaauuc

SEQ ID NO: 1523850 - RNA, 19 nt, Homo sapiens
  misc_RNA (1)...(19): siRNA sense strand
guggagaacuuggagauuu

SEQ ID NO: 1523851 - RNA, 19 nt, Homo sapiens
  misc_RNA (1)...(19): siRNA sense strand
ggacagggccacagaggaa

SEQ ID NO: 1523852 - RNA, 19 nt, Homo sapiens
  misc_RNA (1)...(19): siRNA sense strand
ggagaaaucaccacccaau

SEQ ID NO: 1523853 - RNA, 19 nt, Homo sapiens
  misc_RNA (1)...(19): siRNA sense strand
gcucgccucugauugagaa

SEQ ID NO: 1523854 - RNA, 19 nt, Homo sapiens
  misc_RNA (1)...(19): siRNA sense strand
ggagacaccagccaguaaa

SEQ ID NO: 1523855 - RNA, 19 nt, Homo sapiens
  misc_RNA (1)...(19): siRNA sense strand
aaagccagcuggagaggaa

SEQ ID NO: 1523856 - RNA, 19 nt, Homo sapiens
  misc_RNA (1)...(19): siRNA sense strand
gaacggugcuaaggaagag

SEQ ID NO: 1523857 - RNA, 19 nt, Homo sapiens
  misc_RNA (1)...(19): siRNA sense strand
ccacagaggaagccaagaa

SEQ ID NO: 1523858 - RNA, 19 nt, Homo sapiens
  misc_RNA (1)...(19): siRNA sense strand
cgagccagccuccuaaauu

SEQ ID NO: 1523859 - RNA, 19 nt, Homo sapiens
  misc_RNA (1)...(19): siRNA sense strand
gaagcuucaggccaauuua

SEQ ID NO: 1523860 - RNA, 19 nt, Homo sapiens
  misc_RNA (1)...(19): siRNA sense strand
ccagaauggugaggagaaa

SEQ ID NO: 1523861 - RNA, 19 nt, Homo sapiens
  misc_RNA (1)...(19): siRNA sense strand
ucaggccaauuuaaccuuu

SEQ ID NO: 1523862 - RNA, 19 nt, Homo sapiens
  misc_RNA (1)...(19): siRNA sense strand
uaaaccaacccgaaggaaa

SEQ ID NO: 1523863 - RNA, 19 nt, Homo sapiens
  misc_RNA (1)...(19): siRNA sense strand
gggagagggugcaaaauga

SEQ ID NO: 1523864 - RNA, 19 nt, Homo sapiens
  misc_RNA (1)...(19): siRNA sense strand
gaggaaagaccggcagaga

SEQ ID NO: 1523865 - RNA, 19 nt, Homo sapiens
  misc_RNA (1)...(19): siRNA sense strand
gaaguguugccauccaaga

SEQ ID NO: 1523866 - RNA, 19 nt, Homo sapiens
  misc_RNA (1)...(19): siRNA sense strand
ggagucaucucagcagaac

SEQ ID NO: 1523867 - RNA, 19 nt, Homo sapiens
  misc_RNA (1)...(19): siRNA sense strand
aagaggaggucccggaauc

SEQ ID NO: 1523868 - RNA, 19 nt, Homo sapiens
  misc_RNA (1)...(19): siRNA sense strand
gagaaaucaccacccaaug

SEQ ID NO: 1523869 - RNA, 19 nt, Homo sapiens
  misc_RNA (1)...(19): siRNA sense strand
gcagagaccaaugccaaug

SEQ ID NO: 1523870 - RNA, 19 nt, Homo sapiens
  misc_RNA (1)...(19): siRNA sense strand
ggauggggaugaaguguug

SEQ ID NO: 1523871 - RNA, 19 nt, Homo sapiens
  misc_RNA (1)...(19): siRNA sense strand
ggugggaccugaacaugac

SEQ ID NO: 1523872 - RNA, 19 nt, Homo sapiens
  misc_RNA (1)...(19): siRNA sense strand
gcagaggaggugccuguca

SEQ ID NO: 1523873 - RNA, 19 nt, Homo sapiens
  misc_RNA (1)...(19): siRNA sense strand
gaaaaggccaggcggaguu

SEQ ID NO: 1523874 - RNA, 19 nt, Homo sapiens
  misc_RNA (1)...(19): siRNA sense strand
ucagggcgguggagucauc

SEQ ID NO: 1523875 - RNA, 19 nt, Homo sapiens
  misc_RNA (1)...(19): siRNA sense strand
uggagaacuuggagauuuc

SEQ ID NO: 1523876 - RNA, 19 nt, Homo sapiens
  misc_RNA (1)...(19): siRNA sense strand
ggaagaggauggggaugaa

SEQ ID NO: 1523877 - RNA, 19 nt, Homo sapiens
  misc_RNA (1)...(19): siRNA sense strand
gagaggaagcagagaugga

SEQ ID NO: 1523878 - RNA, 19 nt, Homo sapiens
  misc_RNA (1)...(19): siRNA sense strand
uuucacagcccaccuucua

SEQ ID NO: 1523879 - RNA, 19 nt, Homo sapiens
  misc_RNA (1)...(19): siRNA sense strand
gucagacuguggagaacuu

SEQ ID NO: 1523880 - RNA, 19 nt, Homo sapiens
  misc_RNA (1)...(19): siRNA sense strand
ccaggacacuaaaauguga

SEQ ID NO: 1523881 - RNA, 19 nt, Homo sapiens
  misc_RNA (1)...(19): siRNA sense strand
gaggagggagcugcaguga

SEQ ID NO: 1523882 - RNA, 19 nt, Homo sapiens
  misc_RNA (1)...(19): siRNA sense strand
agaagcuucaggccaauuu

SEQ ID NO: 1523883 - RNA, 19 nt, Homo sapiens
  misc_RNA (1)...(19): siRNA sense strand
caugacagccaagaaacaa

SEQ ID NO: 1523884 - RNA, 19 nt, Homo sapiens
  misc_RNA (1)...(19): siRNA sense strand
agagaccaaugccaaugug

SEQ ID NO: 1523885 - RNA, 19 nt, Homo sapiens
  misc_RNA (1)...(19): siRNA sense strand
aaaccaacccgaaggaaac

SEQ ID NO: 1523886 - RNA, 19 nt, Homo sapiens
  misc_RNA (1)...(19): siRNA sense strand
ucacccagcaggacagaga

SEQ ID NO: 1523887 - RNA, 19 nt, Homo sapiens
  misc_RNA (1)...(19): siRNA sense strand
guaaaccaacccgaaggaa

SEQ ID NO: 1523888 - RNA, 19 nt, Homo sapiens
  misc_RNA (1)...(19): siRNA sense strand
ggacgaggggcucaauaaa

SEQ ID NO: 1523889 - RNA, 19 nt, Homo sapiens
  misc_RNA (1)...(19): siRNA sense strand
gagcucgccucugauugag

SEQ ID NO: 1523890 - RNA, 19 nt, Homo sapiens
  misc_RNA (1)...(19): siRNA sense strand
gaggaagcagagauggaaa

SEQ ID NO: 1523891 - RNA, 19 nt, Homo sapiens
  misc_RNA (1)...(19): siRNA sense strand
gaauggugaggagaaauca

SEQ ID NO: 1523892 - RNA, 19 nt, Homo sapiens
  misc_RNA (1)...(19): siRNA sense strand
aagcuucaggccaauuuaa

SEQ ID NO: 1523893 - RNA, 19 nt, Homo sapiens
  misc_RNA (1)...(19): siRNA sense strand
gacgaggggcucaauaaaa

SEQ ID NO: 1523894 - RNA, 19 nt, Homo sapiens
  misc_RNA (1)...(19): siRNA sense strand
agaggaagcagagauggaa

SEQ ID NO: 1523895 - RNA, 19 nt, Homo sapiens
  misc_RNA (1)...(19): siRNA sense strand
gccagaauggugaggagaa

SEQ ID NO: 1523896 - RNA, 19 nt, Homo sapiens
  misc_RNA (1)...(19): siRNA sense strand
gagaagcuucaggccaauu

SEQ ID NO: 1523897 - RNA, 19 nt, Homo sapiens
  misc_RNA (1)...(19): siRNA sense strand
ggagugaagggcggagaug

SEQ ID NO: 1523898 - RNA, 19 nt, Homo sapiens
  misc_RNA (1)...(19): siRNA sense strand
agaaaucaccacccaaugc

SEQ ID NO: 1523899 - RNA, 19 nt, Homo sapiens
  misc_RNA (1)...(19): siRNA sense strand
caggccaauuuaaccuuug

SEQ ID NO: 1523900 - RNA, 19 nt, Homo sapiens
  misc_RNA (1)...(19): siRNA sense strand
ugacagccaagaaacaaag

SEQ ID NO: 1523901 - RNA, 19 nt, Homo sapiens
  misc_RNA (1)...(19): siRNA sense strand
ggagaacuuggagauuuca

SEQ ID NO: 1523902 - RNA, 19 nt, Homo sapiens
  misc_RNA (1)...(19): siRNA sense strand
ccaaugccaauguggacaa

SEQ ID NO: 1523903 - RNA, 19 nt, Homo sapiens
  misc_RNA (1)...(19): siRNA sense strand
cagagaccaaugccaaugu

SEQ ID NO: 1523904 - RNA, 19 nt, Homo sapiens
  misc_RNA (1)...(19): siRNA sense strand
caagaggaggucccggaau

SEQ ID NO: 1523905 - RNA, 19 nt, Homo sapiens
  misc_RNA (1)...(19): siRNA sense strand
cgaaggaaaccggccuguu

SEQ ID NO: 1523906 - RNA, 19 nt, Homo sapiens
  misc_RNA (1)...(19): siRNA sense strand
gcgagccagccuccuaaau

SEQ ID NO: 1523907 - RNA, 19 nt, Homo sapiens
  misc_RNA (1)...(19): siRNA sense strand
gauaagacguuacugauua

SEQ ID NO: 1523908 - RNA, 19 nt, Homo sapiens
  misc_RNA (1)...(19): siRNA sense strand
gaucuaagcugaaaccaau

SEQ ID NO: 1523909 - RNA, 19 nt, Homo sapiens
  misc_RNA (1)...(19): siRNA sense strand
aaaccaaucuucccuuuga

SEQ ID NO: 1523910 - RNA, 19 nt, Homo sapiens
  misc_RNA (1)...(19): siRNA sense strand
uagagaaccuucggcauua

SEQ ID NO: 1523911 - RNA, 19 nt, Homo sapiens
  misc_RNA (1)...(19): siRNA sense strand
gaacaaugguuuagguuuu

SEQ ID NO: 1523912 - RNA, 19 nt, Homo sapiens
  misc_RNA (1)...(19): siRNA sense strand
guuaagaucuaagcugaaa

SEQ ID NO: 1523913 - RNA, 19 nt, Homo sapiens
  misc_RNA (1)...(19): siRNA sense strand
ugaaaccaaucuucccuuu

SEQ ID NO: 1523914 - RNA, 19 nt, Homo sapiens
  misc_RNA (1)...(19): siRNA sense strand
gcaaaucaaagacuucaga

SEQ ID NO: 1523915 - RNA, 19 nt, Homo sapiens
  misc_RNA (1)...(19): siRNA sense strand
gaagacaugcccaccagaa

SEQ ID NO: 1523916 - RNA, 19 nt, Homo sapiens
  misc_RNA (1)...(19): siRNA sense strand
ggauaagacguuacugauu

SEQ ID NO: 1523917 - RNA, 19 nt, Homo sapiens
  misc_RNA (1)...(19): siRNA sense strand
ccaccucccugcucaauca

SEQ ID NO: 1523918 - RNA, 19 nt, Homo sapiens
  misc_RNA (1)...(19): siRNA sense strand
gaaaggaaugguugucaau

SEQ ID NO: 1523919 - RNA, 19 nt, Homo sapiens
  misc_RNA (1)...(19): siRNA sense strand
caaauuuggcccaguacua

SEQ ID NO: 1523920 - RNA, 19 nt, Homo sapiens
  misc_RNA (1)...(19): siRNA sense strand
gcgaagggaaguauucaaa

SEQ ID NO: 1523921 - RNA, 19 nt, Homo sapiens
  misc_RNA (1)...(19): siRNA sense strand
agagagauaugaggaaaga

SEQ ID NO: 1523922 - RNA, 19 nt, Homo sapiens
  misc_RNA (1)...(19): siRNA sense strand
gcacaaacccacugagaac

SEQ ID NO: 1523923 - RNA, 19 nt, Homo sapiens
  misc_RNA (1)...(19): siRNA sense strand
ugagagagauaugaggaaa

SEQ ID NO: 1523924 - RNA, 19 nt, Homo sapiens
  misc_RNA (1)...(19): siRNA sense strand
gaaugguugucaauagcaa

SEQ ID NO: 1523925 - RNA, 19 nt, Homo sapiens
  misc_RNA (1)...(19): siRNA sense strand
cgagaacaaugguuuaggu

SEQ ID NO: 1523926 - RNA, 19 nt, Homo sapiens
  misc_RNA (1)...(19): siRNA sense strand
cuagagaaccuucggcauu

SEQ ID NO: 1523927 - RNA, 19 nt, Homo sapiens
  misc_RNA (1)...(19): siRNA sense strand
caagcgagaacaaugguuu

SEQ ID NO: 1523928 - RNA, 19 nt, Homo sapiens
  misc_RNA (1)...(19): siRNA sense strand
acacaguccauccaaauuu

SEQ ID NO: 1523929 - RNA, 19 nt, Homo sapiens
  misc_RNA (1)...(19): siRNA sense strand
caaagagauuucugaugca

SEQ ID NO: 1523930 - RNA, 19 nt, Homo sapiens
  misc_RNA (1)...(19): siRNA sense strand
ggacacagaagaaaaugua

SEQ ID NO: 1523931 - RNA, 19 nt, Homo sapiens
  misc_RNA (1)...(19): siRNA sense strand
cacaguccauccaaauuug

SEQ ID NO: 1523932 - RNA, 19 nt, Homo sapiens
  misc_RNA (1)...(19): siRNA sense strand
gagagugcaucaaaauauu

SEQ ID NO: 1523933 - RNA, 19 nt, Homo sapiens
  misc_RNA (1)...(19): siRNA sense strand
acaaggagagugcaucaaa

SEQ ID NO: 1523934 - RNA, 19 nt, Homo sapiens
  misc_RNA (1)...(19): siRNA sense strand
ugaccaggauaagacguua

SEQ ID NO: 1523935 - RNA, 19 nt, Homo sapiens
  misc_RNA (1)...(19): siRNA sense strand
agaaaggaaugguugucaa

SEQ ID NO: 1523936 - RNA, 19 nt, Homo sapiens
  misc_RNA (1)...(19): siRNA sense strand
gcgagugaaaggccaauuu

SEQ ID NO: 1523937 - RNA, 19 nt, Homo sapiens
  misc_RNA (1)...(19): siRNA sense strand
gaaaccaaucuucccuuug

SEQ ID NO: 1523938 - RNA, 19 nt, Homo sapiens
  misc_RNA (1)...(19): siRNA sense strand
ccaaggaguuacugcucaa

SEQ ID NO: 1523939 - RNA, 19 nt, Homo sapiens
  misc_RNA (1)...(19): siRNA sense strand
gaagggaaguauucaaaag

SEQ ID NO: 1523940 - RNA, 19 nt, Homo sapiens
  misc_RNA (1)...(19): siRNA sense strand
ccaagaagucagcgaguga

SEQ ID NO: 1523941 - RNA, 19 nt, Homo sapiens
  misc_RNA (1)...(19): siRNA sense strand
gaagucagcgagugaaagg

SEQ ID NO: 1523942 - RNA, 19 nt, Homo sapiens
  misc_RNA (1)...(19): siRNA sense strand
gucaauagcaaagagauuu

SEQ ID NO: 1523943 - RNA, 19 nt, Homo sapiens
  misc_RNA (1)...(19): siRNA sense strand
caaaauggcaaaucaaaga

SEQ ID NO: 1523944 - RNA, 19 nt, Homo sapiens
  misc_RNA (1)...(19): siRNA sense strand
aaggaaugguugucaauag

SEQ ID NO: 1523945 - RNA, 19 nt, Homo sapiens
  misc_RNA (1)...(19): siRNA sense strand
gagaacaaugguuuagguu

SEQ ID NO: 1523946 - RNA, 19 nt, Homo sapiens
  misc_RNA (1)...(19): siRNA sense strand
ucaaggucauggaaaguca

SEQ ID NO: 1523947 - RNA, 19 nt, Homo sapiens
  misc_RNA (1)...(19): siRNA sense strand
caggauaagacguuacuga

SEQ ID NO: 1523948 - RNA, 19 nt, Homo sapiens
  misc_RNA (1)...(19): siRNA sense strand
aaaggaaugguugucaaua

SEQ ID NO: 1523949 - RNA, 19 nt, Homo sapiens
  misc_RNA (1)...(19): siRNA sense strand
gagaaaggaaugguuguca

SEQ ID NO: 1523950 - RNA, 19 nt, Homo sapiens
  misc_RNA (1)...(19): siRNA sense strand
caaaucaaagacuucagaa

SEQ ID NO: 1523951 - RNA, 19 nt, Homo sapiens
  misc_RNA (1)...(19): siRNA sense strand
ccacugacaaugauuucaa

SEQ ID NO: 1523952 - RNA, 19 nt, Homo sapiens
  misc_RNA (1)...(19): siRNA sense strand
acaccagcuucauguuaaa

SEQ ID NO: 1523953 - RNA, 19 nt, Homo sapiens
  misc_RNA (1)...(19): siRNA sense strand
ggagagugcaucaaaauau

SEQ ID NO: 1523954 - RNA, 19 nt, Homo sapiens
  misc_RNA (1)...(19): siRNA sense strand
caaggagagugcaucaaaa

SEQ ID NO: 1523955 - RNA, 19 nt, Homo sapiens
  misc_RNA (1)...(19): siRNA sense strand
cacaguaugaccaggauaa

SEQ ID NO: 1523956 - RNA, 19 nt, Homo sapiens
  misc_RNA (1)...(19): siRNA sense strand
aaaggccaauuuccaaagu

SEQ ID NO: 1523957 - RNA, 19 nt, Homo sapiens
  misc_RNA (1)...(19): siRNA sense strand
caagagcgaagggaaguau

SEQ ID NO: 1523958 - RNA, 19 nt, Homo sapiens
  misc_RNA (1)...(19): siRNA sense strand
agaaauuccuggcucaaaa

SEQ ID NO: 1523959 - RNA, 19 nt, Homo sapiens
  misc_RNA (1)...(19): siRNA sense strand
gccaauuuccaaagugauu

SEQ ID NO: 1523960 - RNA, 19 nt, Homo sapiens
  misc_RNA (1)...(19): siRNA sense strand
cagcacaaacccacugaga

SEQ ID NO: 1523961 - RNA, 19 nt, Homo sapiens
  misc_RNA (1)...(19): siRNA sense strand
agaacaaugguuuagguuu

SEQ ID NO: 1523962 - RNA, 19 nt, Homo sapiens
  misc_RNA (1)...(19): siRNA sense strand
agagauaugaggaaagaug

SEQ ID NO: 1523963 - RNA, 19 nt, Homo sapiens
  misc_RNA (1)...(19): siRNA sense strand
cagaaauuccuggcucaaa

SEQ ID NO: 1523964 - RNA, 19 nt, Homo sapiens
  misc_RNA (1)...(19): siRNA sense strand
cagcuaaacgugagaaagg

SEQ ID NO: 1523965 - RNA, 19 nt, Homo sapiens
  misc_RNA (1)...(19): siRNA sense strand
ggaaugguugucaauagca

SEQ ID NO: 1523966 - RNA, 19 nt, Homo sapiens
  misc_RNA (1)...(19): siRNA sense strand
uuacacaguccauccaaau

SEQ ID NO: 1523967 - RNA, 19 nt, Homo sapiens
  misc_RNA (1)...(19): siRNA sense strand
cauccaagcgagaacaaug

SEQ ID NO: 1523968 - RNA, 19 nt, Homo sapiens
  misc_RNA (1)...(19): siRNA sense strand
aaucuucccuuugauacug

SEQ ID NO: 1523969 - RNA, 19 nt, Homo sapiens
  misc_RNA (1)...(19): siRNA sense strand
aaauuuggcccaguacuau

SEQ ID NO: 1523970 - RNA, 19 nt, Homo sapiens
  misc_RNA (1)...(19): siRNA sense strand
caaaagagacaaaccaagu

SEQ ID NO: 1523971 - RNA, 19 nt, Homo sapiens
  misc_RNA (1)...(19): siRNA sense strand
gcuaaacgugagaaaggaa

SEQ ID NO: 1523972 - RNA, 19 nt, Homo sapiens
  misc_RNA (1)...(19): siRNA sense strand
gcucaaucacccagcaaga

SEQ ID NO: 1523973 - RNA, 19 nt, Homo sapiens
  misc_RNA (1)...(19): siRNA sense strand
ccaguacuauaagccuuug

SEQ ID NO: 1523974 - RNA, 19 nt, Homo sapiens
  misc_RNA (1)...(19): siRNA sense strand
aggccaauuuccaaaguga

SEQ ID NO: 1523975 - RNA, 19 nt, Homo sapiens
  misc_RNA (1)...(19): siRNA sense strand
aauggcaaaucaaagacuu

SEQ ID NO: 1523976 - RNA, 19 nt, Homo sapiens
  misc_RNA (1)...(19): siRNA sense strand
caagaagucagcgagugaa

SEQ ID NO: 1523977 - RNA, 19 nt, Homo sapiens
  misc_RNA (1)...(19): siRNA sense strand
gauaugaggaaagaugcuu

SEQ ID NO: 1523978 - RNA, 19 nt, Homo sapiens
  misc_RNA (1)...(19): siRNA sense strand
gcuuugaggacacagaaga

SEQ ID NO: 1523979 - RNA, 19 nt, Homo sapiens
  misc_RNA (1)...(19): siRNA sense strand
gagcgaagggaaguauuca

SEQ ID NO: 1523980 - RNA, 19 nt, Homo sapiens
  misc_RNA (1)...(19): siRNA sense strand
aagcgagaacaaugguuua

SEQ ID NO: 1523981 - RNA, 19 nt, Homo sapiens
  misc_RNA (1)...(19): siRNA sense strand
cauggaaagucaucaucag

SEQ ID NO: 1523982 - RNA, 19 nt, Homo sapiens
  misc_RNA (1)...(19): siRNA sense strand
gcagaaauuccuggcucaa

SEQ ID NO: 1523983 - RNA, 19 nt, Homo sapiens
  misc_RNA (1)...(19): siRNA sense strand
caaagugauucgggaacca

SEQ ID NO: 1523984 - RNA, 19 nt, Homo sapiens
  misc_RNA (1)...(19): siRNA sense strand
aaagucaucaucagcacaa

SEQ ID NO: 1523985 - RNA, 19 nt, Homo sapiens
  misc_RNA (1)...(19): siRNA sense strand
agacguuacugauuaugac

SEQ ID NO: 1523986 - RNA, 19 nt, Homo sapiens
  misc_RNA (1)...(19): siRNA sense strand
caccuuugcuccaguccau

SEQ ID NO: 1523987 - RNA, 19 nt, Homo sapiens
  misc_RNA (1)...(19): siRNA sense strand
ucaaucacccagcaagaca

SEQ ID NO: 1523988 - RNA, 19 nt, Homo sapiens
  misc_RNA (1)...(19): siRNA sense strand
agacaaggagagugcauca

SEQ ID NO: 1523989 - RNA, 19 nt, Homo sapiens
  misc_RNA (1)...(19): siRNA sense strand
gagaaccuucggcauuaca

SEQ ID NO: 1523990 - RNA, 19 nt, Homo sapiens
  misc_RNA (1)...(19): siRNA sense strand
gaaccuucggcauuacaca

SEQ ID NO: 1523991 - RNA, 19 nt, Homo sapiens
  misc_RNA (1)...(19): siRNA sense strand
uagcaaagagauuucugau

SEQ ID NO: 1523992 - RNA, 19 nt, Homo sapiens
  misc_RNA (1)...(19): siRNA sense strand
gacacucgcaucgcucuug

SEQ ID NO: 1523993 - RNA, 19 nt, Homo sapiens
  misc_RNA (1)...(19): siRNA sense strand
aaagaaaucugagcaguua

SEQ ID NO: 1523994 - RNA, 19 nt, Homo sapiens
  misc_RNA (1)...(19): siRNA sense strand
ugacauggcuagcaacaua

SEQ ID NO: 1523995 - RNA, 19 nt, Homo sapiens
  misc_RNA (1)...(19): siRNA sense strand
uaucuuggcucacguauuu

SEQ ID NO: 1523996 - RNA, 19 nt, Homo sapiens
  misc_RNA (1)...(19): siRNA sense strand
ggacucugguggugacuua

SEQ ID NO: 1523997 - RNA, 19 nt, Homo sapiens
  misc_RNA (1)...(19): siRNA sense strand
ggaagcagcugagaaggaa

SEQ ID NO: 1523998 - RNA, 19 nt, Homo sapiens
  misc_RNA (1)...(19): siRNA sense strand
gacaacuucuguucuuaua

SEQ ID NO: 1523999 - RNA, 19 nt, Homo sapiens
  misc_RNA (1)...(19): siRNA sense strand
ggaagugcuuugucuuuga

SEQ ID NO: 1524000 - RNA, 19 nt, Homo sapiens
  misc_RNA (1)...(19): siRNA sense strand
gauggaggcucaagagaga

SEQ ID NO: 1524001 - RNA, 19 nt, Homo sapiens
  misc_RNA (1)...(19): siRNA sense strand
gcagcagcuuugucuauaa

SEQ ID NO: 1524002 - RNA, 19 nt, Homo sapiens
  misc_RNA (1)...(19): siRNA sense strand
gaagagcagcugacaguga

SEQ ID NO: 1524003 - RNA, 19 nt, Homo sapiens
  misc_RNA (1)...(19): siRNA sense strand
gaagguacaagaagaaaug

SEQ ID NO: 1524004 - RNA, 19 nt, Homo sapiens
  misc_RNA (1)...(19): siRNA sense strand
caucaacaguggagcagua

SEQ ID NO: 1524005 - RNA, 19 nt, Homo sapiens
  misc_RNA (1)...(19): siRNA sense strand
caacuucuguucuuauauc

SEQ ID NO: 1524006 - RNA, 19 nt, Homo sapiens
  misc_RNA (1)...(19): siRNA sense strand
gaaucugaauccaucauga

SEQ ID NO: 1524007 - RNA, 19 nt, Homo sapiens
  misc_RNA (1)...(19): siRNA sense strand
gaaaaggaguuaaggcaaa

SEQ ID NO: 1524008 - RNA, 19 nt, Homo sapiens
  misc_RNA (1)...(19): siRNA sense strand
gagaguguaucaggcauuu

SEQ ID NO: 1524009 - RNA, 19 nt, Homo sapiens
  misc_RNA (1)...(19): siRNA sense strand
cuacaaaugacaagcaaua

SEQ ID NO: 1524010 - RNA, 19 nt, Homo sapiens
  misc_RNA (1)...(19): siRNA sense strand
aagaagaaaugcuuaagga

SEQ ID NO: 1524011 - RNA, 19 nt, Homo sapiens
  misc_RNA (1)...(19): siRNA sense strand
aaacaugccuagagagugu

SEQ ID NO: 1524012 - RNA, 19 nt, Homo sapiens
  misc_RNA (1)...(19): siRNA sense strand
gaaggaagcagcugagaag

SEQ ID NO: 1524013 - RNA, 19 nt, Homo sapiens
  misc_RNA (1)...(19): siRNA sense strand
aagaaaugcuuaaggaaga

SEQ ID NO: 1524014 - RNA, 19 nt, Homo sapiens
  misc_RNA (1)...(19): siRNA sense strand
cauuagagauucuugacaa

SEQ ID NO: 1524015 - RNA, 19 nt, Homo sapiens
  misc_RNA (1)...(19): siRNA sense strand
guacaagaagaaaugcuua

SEQ ID NO: 1524016 - RNA, 19 nt, Homo sapiens
  misc_RNA (1)...(19): siRNA sense strand
ggacgaagugccagaagaa

SEQ ID NO: 1524017 - RNA, 19 nt, Homo sapiens
  misc_RNA (1)...(19): siRNA sense strand
ccagcgaguuugcgaguuu

SEQ ID NO: 1524018 - RNA, 19 nt, Homo sapiens
  misc_RNA (1)...(19): siRNA sense strand
agaguaacccuaagaauga

SEQ ID NO: 1524019 - RNA, 19 nt, Homo sapiens
  misc_RNA (1)...(19): siRNA sense strand
uaaaucauauggacgaagu

SEQ ID NO: 1524020 - RNA, 19 nt, Homo sapiens
  misc_RNA (1)...(19): siRNA sense strand
gguggugacuuauguagau

SEQ ID NO: 1524021 - RNA, 19 nt, Homo sapiens
  misc_RNA (1)...(19): siRNA sense strand
gaacaggagcugcuaagag

SEQ ID NO: 1524022 - RNA, 19 nt, Homo sapiens
  misc_RNA (1)...(19): siRNA sense strand
ugaaucgucuugcaggaaa

SEQ ID NO: 1524023 - RNA, 19 nt, Homo sapiens
  misc_RNA (1)...(19): siRNA sense strand
aacaggagcugcuaagaga

SEQ ID NO: 1524024 - RNA, 19 nt, Homo sapiens
  misc_RNA (1)...(19): siRNA sense strand
gaguuucuuuccagacuuu

SEQ ID NO: 1524025 - RNA, 19 nt, Homo sapiens
  misc_RNA (1)...(19): siRNA sense strand
ggaaaauccuaucucauga

SEQ ID NO: 1524026 - RNA, 19 nt, Homo sapiens
  misc_RNA (1)...(19): siRNA sense strand
aaacggaagugcuuugucu

SEQ ID NO: 1524027 - RNA, 19 nt, Homo sapiens
  misc_RNA (1)...(19): siRNA sense strand
gcuccacggugcagucuga

SEQ ID NO: 1524028 - RNA, 19 nt, Homo sapiens
  misc_RNA (1)...(19): siRNA sense strand
cauaaugauugucacucua

SEQ ID NO: 1524029 - RNA, 19 nt, Homo sapiens
  misc_RNA (1)...(19): siRNA sense strand
uggagcagcugcacuaugu

SEQ ID NO: 1524030 - RNA, 19 nt, Homo sapiens
  misc_RNA (1)...(19): siRNA sense strand
ucaaaggcauuagagauuc

SEQ ID NO: 1524031 - RNA, 19 nt, Homo sapiens
  misc_RNA (1)...(19): siRNA sense strand
gcuagcaacauaaugauug

SEQ ID NO: 1524032 - RNA, 19 nt, Homo sapiens
  misc_RNA (1)...(19): siRNA sense strand
gagggcagccgaccacuau

SEQ ID NO: 1524033 - RNA, 19 nt, Homo sapiens
  misc_RNA (1)...(19): siRNA sense strand
aagagcagcugacagugaa

SEQ ID NO: 1524034 - RNA, 19 nt, Homo sapiens
  misc_RNA (1)...(19): siRNA sense strand
gaaagcauuuugagaggaa

SEQ ID NO: 1524035 - RNA, 19 nt, Homo sapiens
  misc_RNA (1)...(19): siRNA sense strand
gaaugacucguggaucuuu

SEQ ID NO: 1524036 - RNA, 19 nt, Homo sapiens
  misc_RNA (1)...(19): siRNA sense strand
gaaucauugucacuggaaa

SEQ ID NO: 1524037 - RNA, 19 nt, Homo sapiens
  misc_RNA (1)...(19): siRNA sense strand
gagcagcugcacuauguga

SEQ ID NO: 1524038 - RNA, 19 nt, Homo sapiens
  misc_RNA (1)...(19): siRNA sense strand
aggacacaaucucuacuua

SEQ ID NO: 1524039 - RNA, 19 nt, Homo sapiens
  misc_RNA (1)...(19): siRNA sense strand
gggaagccauugcagucuu

SEQ ID NO: 1524040 - RNA, 19 nt, Homo sapiens
  misc_RNA (1)...(19): siRNA sense strand
ggacacaaucucuacuuag

SEQ ID NO: 1524041 - RNA, 19 nt, Homo sapiens
  misc_RNA (1)...(19): siRNA sense strand
gcaccugacagaaagcauu

SEQ ID NO: 1524042 - RNA, 19 nt, Homo sapiens
  misc_RNA (1)...(19): siRNA sense strand
cagagcaccugacagaaag

SEQ ID NO: 1524043 - RNA, 19 nt, Homo sapiens
  misc_RNA (1)...(19): siRNA sense strand
aagaaugacucguggaucu

SEQ ID NO: 1524044 - RNA, 19 nt, Homo sapiens
  misc_RNA (1)...(19): siRNA sense strand
gaaaagaguaacccuaaga

SEQ ID NO: 1524045 - RNA, 19 nt, Homo sapiens
  misc_RNA (1)...(19): siRNA sense strand
gcagauggcccagcaacug

SEQ ID NO: 1524046 - RNA, 19 nt, Homo sapiens
  misc_RNA (1)...(19): siRNA sense strand
aagaguaacccuaagaaug

SEQ ID NO: 1524047 - RNA, 19 nt, Homo sapiens
  misc_RNA (1)...(19): siRNA sense strand
agaaggagcagcagcaaau

SEQ ID NO: 1524048 - RNA, 19 nt, Homo sapiens
  misc_RNA (1)...(19): siRNA sense strand
gaaggaacaggagcugcua

SEQ ID NO: 1524049 - RNA, 19 nt, Homo sapiens
  misc_RNA (1)...(19): siRNA sense strand
gaagugcuuugucuuugac

SEQ ID NO: 1524050 - RNA, 19 nt, Homo sapiens
  misc_RNA (1)...(19): siRNA sense strand
gacuuuauuuggacuguuc

SEQ ID NO: 1524051 - RNA, 19 nt, Homo sapiens
  misc_RNA (1)...(19): siRNA sense strand
gagacuuugugcugcagaa

SEQ ID NO: 1524052 - RNA, 19 nt, Homo sapiens
  misc_RNA (1)...(19): siRNA sense strand
cggaagugcuuugucuuug

SEQ ID NO: 1524053 - RNA, 19 nt, Homo sapiens
  misc_RNA (1)...(19): siRNA sense strand
auucaaacaugccuagaga

SEQ ID NO: 1524054 - RNA, 19 nt, Homo sapiens
  misc_RNA (1)...(19): siRNA sense strand
ggaaucauugucacuggaa

SEQ ID NO: 1524055 - RNA, 19 nt, Homo sapiens
  misc_RNA (1)...(19): siRNA sense strand
aauccuaucucaugaaucg

SEQ ID NO: 1524056 - RNA, 19 nt, Homo sapiens
  misc_RNA (1)...(19): siRNA sense strand
agaaaucugagcaguuaaa

SEQ ID NO: 1524057 - RNA, 19 nt, Homo sapiens
  misc_RNA (1)...(19): siRNA sense strand
ugagugggacuauaagcua

SEQ ID NO: 1524058 - RNA, 19 nt, Homo sapiens
  misc_RNA (1)...(19): siRNA sense strand
aaccaugaauuccagaaga

SEQ ID NO: 1524059 - RNA, 19 nt, Homo sapiens
  misc_RNA (1)...(19): siRNA sense strand
caaaggcauuagagauucu

SEQ ID NO: 1524060 - RNA, 19 nt, Homo sapiens
  misc_RNA (1)...(19): siRNA sense strand
gcagugcccacaccagguu

SEQ ID NO: 1524061 - RNA, 19 nt, Homo sapiens
  misc_RNA (1)...(19): siRNA sense strand
aaacuaagggcaucuggau

SEQ ID NO: 1524062 - RNA, 19 nt, Homo sapiens
  misc_RNA (1)...(19): siRNA sense strand
ucugagcaguuaaauaaag

SEQ ID NO: 1524063 - RNA, 19 nt, Homo sapiens
  misc_RNA (1)...(19): siRNA sense strand
gaaaucugagcaguuaaau

SEQ ID NO: 1524064 - RNA, 19 nt, Homo sapiens
  misc_RNA (1)...(19): siRNA sense strand
acaggugguuguagaggaa

SEQ ID NO: 1524065 - RNA, 19 nt, Homo sapiens
  misc_RNA (1)...(19): siRNA sense strand
agucacaggugguuguaga

SEQ ID NO: 1524066 - RNA, 19 nt, Homo sapiens
  misc_RNA (1)...(19): siRNA sense strand
ccugagagagggaaucauu

SEQ ID NO: 1524067 - RNA, 19 nt, Homo sapiens
  misc_RNA (1)...(19): siRNA sense strand
cacaccagguuauccagaa

SEQ ID NO: 1524068 - RNA, 19 nt, Homo sapiens
  misc_RNA (1)...(19): siRNA sense strand
cgaguuugcgaguuucuuu

SEQ ID NO: 1524069 - RNA, 19 nt, Homo sapiens
  misc_RNA (1)...(19): siRNA sense strand
gcugaagguacaagaagaa

SEQ ID NO: 1524070 - RNA, 19 nt, Homo sapiens
  misc_RNA (1)...(19): siRNA sense strand
gaggacacaaucucuacuu

SEQ ID NO: 1524071 - RNA, 19 nt, Homo sapiens
  misc_RNA (1)...(19): siRNA sense strand
cuucuguucuuauaucuuc

SEQ ID NO: 1524072 - RNA, 19 nt, Homo sapiens
  misc_RNA (1)...(19): siRNA sense strand
agcagcagcuuugucuaua

SEQ ID NO: 1524073 - RNA, 19 nt, Homo sapiens
  misc_RNA (1)...(19): siRNA sense strand
agaaaugcuuaaggaagaa

SEQ ID NO: 1524074 - RNA, 19 nt, Homo sapiens
  misc_RNA (1)...(19): siRNA sense strand
caggagcugcuaagagaaa

SEQ ID NO: 1524075 - RNA, 19 nt, Homo sapiens
  misc_RNA (1)...(19): siRNA sense strand
cagguugagugggacuaua

SEQ ID NO: 1524076 - RNA, 19 nt, Homo sapiens
  misc_RNA (1)...(19): siRNA sense strand
gcgaguuucuuuccagacu

SEQ ID NO: 1524077 - RNA, 19 nt, Homo sapiens
  misc_RNA (1)...(19): siRNA sense strand
cugagcaguuaaauaaaga

SEQ ID NO: 1524078 - RNA, 19 nt, Homo sapiens
  misc_RNA (1)...(19): siRNA sense strand
gguacaagaagaaaugcuu

SEQ ID NO: 1524079 - RNA, 19 nt, Homo sapiens
  misc_RNA (1)...(19): siRNA sense strand
gaaggagcagcagcaaaug

SEQ ID NO: 1524080 - RNA, 19 nt, Homo sapiens
  misc_RNA (1)...(19): siRNA sense strand
gagcagcugacagugaauu

SEQ ID NO: 1524081 - RNA, 19 nt, Homo sapiens
  misc_RNA (1)...(19): siRNA sense strand
ggaacaggagcugcuaaga

SEQ ID NO: 1524082 - RNA, 19 nt, Homo sapiens
  misc_RNA (1)...(19): siRNA sense strand
gaagcuuguggacaccaua

SEQ ID NO: 1524083 - RNA, 19 nt, Homo sapiens
  misc_RNA (1)...(19): siRNA sense strand
acuuugugcugcagaauga

SEQ ID NO: 1524084 - RNA, 19 nt, Homo sapiens
  misc_RNA (1)...(19): siRNA sense strand
cuagcaacauaaugauugu

SEQ ID NO: 1524085 - RNA, 19 nt, Homo sapiens
  misc_RNA (1)...(19): siRNA sense strand
gagauuaaucaacugaaag

SEQ ID NO: 1524086 - RNA, 19 nt, Homo sapiens
  misc_RNA (1)...(19): siRNA sense strand
caagaagaaaugcuuaagg

SEQ ID NO: 1524087 - RNA, 19 nt, Homo sapiens
  misc_RNA (1)...(19): siRNA sense strand
gggccugggcgauguagaa

SEQ ID NO: 1524088 - RNA, 19 nt, Homo sapiens
  misc_RNA (1)...(19): siRNA sense strand
gacauggcuagcaacauaa

SEQ ID NO: 1524089 - RNA, 19 nt, Homo sapiens
  misc_RNA (1)...(19): siRNA sense strand
aacacaagcugaagguaca

SEQ ID NO: 1524090 - RNA, 19 nt, Homo sapiens
  misc_RNA (1)...(19): siRNA sense strand
ugaaggaagcagcugagaa

SEQ ID NO: 1524091 - RNA, 19 nt, Homo sapiens
  misc_RNA (1)...(19): siRNA sense strand
agaccaagacccugagaga

SEQ ID NO: 1524092 - RNA, 19 nt, Homo sapiens
  misc_RNA (1)...(19): siRNA sense strand
ucaaacaugccuagagagu

SEQ ID NO: 1524093 - RNA, 19 nt, Homo sapiens
  misc_RNA (1)...(19): siRNA sense strand
ggaaauagaugggcaacuu

SEQ ID NO: 1524094 - RNA, 19 nt, Homo sapiens
  misc_RNA (1)...(19): siRNA sense strand
gaaagaggcacaagugaaa

SEQ ID NO: 1524095 - RNA, 19 nt, Homo sapiens
  misc_RNA (1)...(19): siRNA sense strand
cagaagaacugaaggcaaa

SEQ ID NO: 1524096 - RNA, 19 nt, Homo sapiens
  misc_RNA (1)...(19): siRNA sense strand
cauaaucucuucauucaga

SEQ ID NO: 1524097 - RNA, 19 nt, Homo sapiens
  misc_RNA (1)...(19): siRNA sense strand
ucugagagauuucugcuua

SEQ ID NO: 1524098 - RNA, 19 nt, Homo sapiens
  misc_RNA (1)...(19): siRNA sense strand
gaagaaagaggcacaagug

SEQ ID NO: 1524099 - RNA, 19 nt, Homo sapiens
  misc_RNA (1)...(19): siRNA sense strand
guacaauacugugaacaaa

SEQ ID NO: 1524100 - RNA, 19 nt, Homo sapiens
  misc_RNA (1)...(19): siRNA sense strand
gcaagguagugaucaaaga

SEQ ID NO: 1524101 - RNA, 19 nt, Homo sapiens
  misc_RNA (1)...(19): siRNA sense strand
ugacagaacugacagaucu

SEQ ID NO: 1524102 - RNA, 19 nt, Homo sapiens
  misc_RNA (1)...(19): siRNA sense strand
gccauaaucucuucauuca

SEQ ID NO: 1524103 - RNA, 19 nt, Homo sapiens
  misc_RNA (1)...(19): siRNA sense strand
gucaauggaucucgucuaa

SEQ ID NO: 1524104 - RNA, 19 nt, Homo sapiens
  misc_RNA (1)...(19): siRNA sense strand
caauggaucucgucuaaag

SEQ ID NO: 1524105 - RNA, 19 nt, Homo sapiens
  misc_RNA (1)...(19): siRNA sense strand
ugacuuaccugcucaccaa

SEQ ID NO: 1524106 - RNA, 19 nt, Homo sapiens
  misc_RNA (1)...(19): siRNA sense strand
uaauaacgaugauccaugu

SEQ ID NO: 1524107 - RNA, 19 nt, Homo sapiens
  misc_RNA (1)...(19): siRNA sense strand
gagauccugucugccauua

SEQ ID NO: 1524108 - RNA, 19 nt, Homo sapiens
  misc_RNA (1)...(19): siRNA sense strand
gaaacucacccgaccuuga

SEQ ID NO: 1524109 - RNA, 19 nt, Homo sapiens
  misc_RNA (1)...(19): siRNA sense strand
gaacaagugagacaaaugg

SEQ ID NO: 1524110 - RNA, 19 nt, Homo sapiens
  misc_RNA (1)...(19): siRNA sense strand
ugugagucaugcaauauua

SEQ ID NO: 1524111 - RNA, 19 nt, Homo sapiens
  misc_RNA (1)...(19): siRNA sense strand
gcacuggcacucuuacuga

SEQ ID NO: 1524112 - RNA, 19 nt, Homo sapiens
  misc_RNA (1)...(19): siRNA sense strand
gcuagagccugaauuugug

SEQ ID NO: 1524113 - RNA, 19 nt, Homo sapiens
  misc_RNA (1)...(19): siRNA sense strand
gagcuucuucccagacuua

SEQ ID NO: 1524114 - RNA, 19 nt, Homo sapiens
  misc_RNA (1)...(19): siRNA sense strand
aauacaggcugaagaaguu

SEQ ID NO: 1524115 - RNA, 19 nt, Homo sapiens
  misc_RNA (1)...(19): siRNA sense strand
agaaugauauccagaucuu

SEQ ID NO: 1524116 - RNA, 19 nt, Homo sapiens
  misc_RNA (1)...(19): siRNA sense strand
gcuuaggccuggaaauaga

SEQ ID NO: 1524117 - RNA, 19 nt, Homo sapiens
  misc_RNA (1)...(19): siRNA sense strand
ccaaaucacacauuaguuc

SEQ ID NO: 1524118 - RNA, 19 nt, Homo sapiens
  misc_RNA (1)...(19): siRNA sense strand
uaacgaugauccauguguu

SEQ ID NO: 1524119 - RNA, 19 nt, Homo sapiens
  misc_RNA (1)...(19): siRNA sense strand
gcagaacgagcaaaugaug

SEQ ID NO: 1524120 - RNA, 19 nt, Homo sapiens
  misc_RNA (1)...(19): siRNA sense strand
gaucugccuugcauagaga

SEQ ID NO: 1524121 - RNA, 19 nt, Homo sapiens
  misc_RNA (1)...(19): siRNA sense strand
gaaauagaugggcaacuug

SEQ ID NO: 1524122 - RNA, 19 nt, Homo sapiens
  misc_RNA (1)...(19): siRNA sense strand
agagaaggcugacaacaag

SEQ ID NO: 1524123 - RNA, 19 nt, Homo sapiens
  misc_RNA (1)...(19): siRNA sense strand
gcaaaugggccagaaagug

SEQ ID NO: 1524124 - RNA, 19 nt, Homo sapiens
  misc_RNA (1)...(19): siRNA sense strand
gaauacaggcugaagaagu

SEQ ID NO: 1524125 - RNA, 19 nt, Homo sapiens
  misc_RNA (1)...(19): siRNA sense strand
caucuacggugcagucuca

SEQ ID NO: 1524126 - RNA, 19 nt, Homo sapiens
  misc_RNA (1)...(19): siRNA sense strand
gcccagaggacuguuaaua

SEQ ID NO: 1524127 - RNA, 19 nt, Homo sapiens
  misc_RNA (1)...(19): siRNA sense strand
aauccuaccugaugaacaa

SEQ ID NO: 1524128 - RNA, 19 nt, Homo sapiens
  misc_RNA (1)...(19): siRNA sense strand
ggagauagccaaacaaaau

SEQ ID NO: 1524129 - RNA, 19 nt, Homo sapiens
  misc_RNA (1)...(19): siRNA sense strand
ucaggaagcuuuggagauc

SEQ ID NO: 1524130 - RNA, 19 nt, Homo sapiens
  misc_RNA (1)...(19): siRNA sense strand
uugaaacacugccugauga

SEQ ID NO: 1524131 - RNA, 19 nt, Homo sapiens
  misc_RNA (1)...(19): siRNA sense strand
caagaaugauauccagauc

SEQ ID NO: 1524132 - RNA, 19 nt, Homo sapiens
  misc_RNA (1)...(19): siRNA sense strand
gggcuucucuguugcaucu

SEQ ID NO: 1524133 - RNA, 19 nt, Homo sapiens
  misc_RNA (1)...(19): siRNA sense strand
gcagugaagcagggaauuu

SEQ ID NO: 1524134 - RNA, 19 nt, Homo sapiens
  misc_RNA (1)...(19): siRNA sense strand
ggauguagaccaaaguuuc

SEQ ID NO: 1524135 - RNA, 19 nt, Homo sapiens
  misc_RNA (1)...(19): siRNA sense strand
aaacacugccugaugauga

SEQ ID NO: 1524136 - RNA, 19 nt, Homo sapiens
  misc_RNA (1)...(19): siRNA sense strand
gcugacaacaagaaugaua

SEQ ID NO: 1524137 - RNA, 19 nt, Homo sapiens
  misc_RNA (1)...(19): siRNA sense strand
gaauuuggauauggugugu

SEQ ID NO: 1524138 - RNA, 19 nt, Homo sapiens
  misc_RNA (1)...(19): siRNA sense strand
ggcaaauccuaccugauga

SEQ ID NO: 1524139 - RNA, 19 nt, Homo sapiens
  misc_RNA (1)...(19): siRNA sense strand
gcacagcucagcacaacau

SEQ ID NO: 1524140 - RNA, 19 nt, Homo sapiens
  misc_RNA (1)...(19): siRNA sense strand
gagcagcaccuuuguguac

SEQ ID NO: 1524141 - RNA, 19 nt, Homo sapiens
  misc_RNA (1)...(19): siRNA sense strand
ccaugugccucaucgagaa

SEQ ID NO: 1524142 - RNA, 19 nt, Homo sapiens
  misc_RNA (1)...(19): siRNA sense strand
caacuugucacaccagaug

SEQ ID NO: 1524143 - RNA, 19 nt, Homo sapiens
  misc_RNA (1)...(19): siRNA sense strand
acacauuaguucugcuuga

SEQ ID NO: 1524144 - RNA, 19 nt, Homo sapiens
  misc_RNA (1)...(19): siRNA sense strand
aaauggagauagccaaaca

SEQ ID NO: 1524145 - RNA, 19 nt, Homo sapiens
  misc_RNA (1)...(19): siRNA sense strand
cggcuuuacuuaaggauau

SEQ ID NO: 1524146 - RNA, 19 nt, Homo sapiens
  misc_RNA (1)...(19): siRNA sense strand
agaaagaauuggagacucu

SEQ ID NO: 1524147 - RNA, 19 nt, Homo sapiens
  misc_RNA (1)...(19): siRNA sense strand
gcaaauccuaccugaugaa

SEQ ID NO: 1524148 - RNA, 19 nt, Homo sapiens
  misc_RNA (1)...(19): siRNA sense strand
ugagcuagagccugaauuu

SEQ ID NO: 1524149 - RNA, 19 nt, Homo sapiens
  misc_RNA (1)...(19): siRNA sense strand
gaaaugcuuuaucuuugac

SEQ ID NO: 1524150 - RNA, 19 nt, Homo sapiens
  misc_RNA (1)...(19): siRNA sense strand
augagcagcugaagguuaa

SEQ ID NO: 1524151 - RNA, 19 nt, Homo sapiens
  misc_RNA (1)...(19): siRNA sense strand
caagggaauuuggauaugg

SEQ ID NO: 1524152 - RNA, 19 nt, Homo sapiens
  misc_RNA (1)...(19): siRNA sense strand
ggaacaagugagacaaaug

SEQ ID NO: 1524153 - RNA, 19 nt, Homo sapiens
  misc_RNA (1)...(19): siRNA sense strand
ccaaggagucugugaguca

SEQ ID NO: 1524154 - RNA, 19 nt, Homo sapiens
  misc_RNA (1)...(19): siRNA sense strand
gcaacaagugacagaauuc

SEQ ID NO: 1524155 - RNA, 19 nt, Homo sapiens
  misc_RNA (1)...(19): siRNA sense strand
caucccaacuggccaaauc

SEQ ID NO: 1524156 - RNA, 19 nt, Homo sapiens
  misc_RNA (1)...(19): siRNA sense strand
uagagaaggcugacaacaa

SEQ ID NO: 1524157 - RNA, 19 nt, Homo sapiens
  misc_RNA (1)...(19): siRNA sense strand
cagugaagcagggaauuua

SEQ ID NO: 1524158 - RNA, 19 nt, Homo sapiens
  misc_RNA (1)...(19): siRNA sense strand
gaaagaauuggagacucua

SEQ ID NO: 1524159 - RNA, 19 nt, Homo sapiens
  misc_RNA (1)...(19): siRNA sense strand
ucaaggauguagaccaaag

SEQ ID NO: 1524160 - RNA, 19 nt, Homo sapiens
  misc_RNA (1)...(19): siRNA sense strand
agaauucuguuccuacauc

SEQ ID NO: 1524161 - RNA, 19 nt, Homo sapiens
  misc_RNA (1)...(19): siRNA sense strand
gcucaaggcaagaaacuca

SEQ ID NO: 1524162 - RNA, 19 nt, Homo sapiens
  misc_RNA (1)...(19): siRNA sense strand
uggcaaauccuaccugaug

SEQ ID NO: 1524163 - RNA, 19 nt, Homo sapiens
  misc_RNA (1)...(19): siRNA sense strand
cccagaggacuguuaauaa

SEQ ID NO: 1524164 - RNA, 19 nt, Homo sapiens
  misc_RNA (1)...(19): siRNA sense strand
ggaucugccuugcauagag

SEQ ID NO: 1524165 - RNA, 19 nt, Homo sapiens
  misc_RNA (1)...(19): siRNA sense strand
ugcaacaagugacagaauu

SEQ ID NO: 1524166 - RNA, 19 nt, Homo sapiens
  misc_RNA (1)...(19): siRNA sense strand
aaagcaagguagugaucaa

SEQ ID NO: 1524167 - RNA, 19 nt, Homo sapiens
  misc_RNA (1)...(19): siRNA sense strand
gacuuaguguggacucuga

SEQ ID NO: 1524168 - RNA, 19 nt, Homo sapiens
  misc_RNA (1)...(19): siRNA sense strand
uuacugagcagcaccuuug

SEQ ID NO: 1524169 - RNA, 19 nt, Homo sapiens
  misc_RNA (1)...(19): siRNA sense strand
ucagggugcuaucgaccua

SEQ ID NO: 1524170 - RNA, 19 nt, Homo sapiens
  misc_RNA (1)...(19): siRNA sense strand
gaugaauaccuggagaauu

SEQ ID NO: 1524171 - RNA, 19 nt, Homo sapiens
  misc_RNA (1)...(19): siRNA sense strand
gaacugaaggcaaaguacu

SEQ ID NO: 1524172 - RNA, 19 nt, Homo sapiens
  misc_RNA (1)...(19): siRNA sense strand
agaaagaggcacaagugaa

SEQ ID NO: 1524173 - RNA, 19 nt, Homo sapiens
  misc_RNA (1)...(19): siRNA sense strand
uuucaaggauguagaccaa

SEQ ID NO: 1524174 - RNA, 19 nt, Homo sapiens
  misc_RNA (1)...(19): siRNA sense strand
gagacuccaucaggaacaa

SEQ ID NO: 1524175 - RNA, 19 nt, Homo sapiens
  misc_RNA (1)...(19): siRNA sense strand
gauuauugcucggcuuuac

SEQ ID NO: 1524176 - RNA, 19 nt, Homo sapiens
  misc_RNA (1)...(19): siRNA sense strand
cuggccaaaucacacauua

SEQ ID NO: 1524177 - RNA, 19 nt, Homo sapiens
  misc_RNA (1)...(19): siRNA sense strand
ggccauaaucucuucauuc

SEQ ID NO: 1524178 - RNA, 19 nt, Homo sapiens
  misc_RNA (1)...(19): siRNA sense strand
gggaggccauugaagucuu

SEQ ID NO: 1524179 - RNA, 19 nt, Homo sapiens
  misc_RNA (1)...(19): siRNA sense strand
gaaacacugccugaugaug

SEQ ID NO: 1524180 - RNA, 19 nt, Homo sapiens
  misc_RNA (1)...(19): siRNA sense strand
cugcuuaggccuggaaaua

SEQ ID NO: 1524181 - RNA, 19 nt, Homo sapiens
  misc_RNA (1)...(19): siRNA sense strand
ugaagauccugcugacucu

SEQ ID NO: 1524182 - RNA, 19 nt, Homo sapiens
  misc_RNA (1)...(19): siRNA sense strand
ccugggagauguagagaag

SEQ ID NO: 1524183 - RNA, 19 nt, Homo sapiens
  misc_RNA (1)...(19): siRNA sense strand
ggccaaaucacacauuagu

SEQ ID NO: 1524184 - RNA, 19 nt, Homo sapiens
  misc_RNA (1)...(19): siRNA sense strand
aaugagcagcugaagguua

SEQ ID NO: 1524185 - RNA, 19 nt, Homo sapiens
  misc_RNA (1)...(19): siRNA sense strand
aacaacagaugcaggaaca

SEQ ID NO: 1524186 - RNA, 19 nt, Homo sapiens
  misc_RNA (1)...(19): siRNA sense strand
gaaaggaauacaggcugaa

SEQ ID NO: 1524187 - RNA, 19 nt, Homo sapiens
  misc_RNA (1)...(19): siRNA sense strand
gcucggcuuuacuuaagga

SEQ ID NO: 1524188 - RNA, 19 nt, Homo sapiens
  misc_RNA (1)...(19): siRNA sense strand
ggccaaagcaagguaguga

SEQ ID NO: 1524189 - RNA, 19 nt, Homo sapiens
  misc_RNA (1)...(19): siRNA sense strand
gucugugagucaugcaaua

SEQ ID NO: 1524190 - RNA, 19 nt, Homo sapiens
  misc_RNA (1)...(19): siRNA sense strand
gaaaacagaagaacugaag

SEQ ID NO: 1524191 - RNA, 19 nt, Homo sapiens
  misc_RNA (1)...(19): siRNA sense strand
gugaagcagggaauuuauu

SEQ ID NO: 1524192 - RNA, 19 nt, Homo sapiens
  misc_RNA (1)...(19): siRNA sense strand
gagcuagagccugaauuug

SEQ ID NO: 1524193 - RNA, 19 nt, Homo sapiens
  misc_RNA (1)...(19): siRNA sense strand
gaggccugcuucagccaua

SEQ ID NO: 1524194 - RNA, 19 nt, Homo sapiens
  misc_RNA (1)...(19): siRNA sense strand
gcucugcucugaagucaac

SEQ ID NO: 1524195 - RNA, 19 nt, Homo sapiens
  misc_RNA (1)...(19): siRNA sense strand
gagccaggccugugccaaa

SEQ ID NO: 1524196 - RNA, 19 nt, Homo sapiens
  misc_RNA (1)...(19): siRNA sense strand
gggagaaugccaacaggaa

SEQ ID NO: 1524197 - RNA, 19 nt, Homo sapiens
  misc_RNA (1)...(19): siRNA sense strand
gacaugaacaagugcauca

SEQ ID NO: 1524198 - RNA, 19 nt, Homo sapiens
  misc_RNA (1)...(19): siRNA sense strand
gcaagaucgagcacuguga

SEQ ID NO: 1524199 - RNA, 19 nt, Homo sapiens
  misc_RNA (1)...(19): siRNA sense strand
gucaacggcugccucaagu

SEQ ID NO: 1524200 - RNA, 19 nt, Homo sapiens
  misc_RNA (1)...(19): siRNA sense strand
ugaacaagugcaucaaaug

SEQ ID NO: 1524201 - RNA, 19 nt, Homo sapiens
  misc_RNA (1)...(19): siRNA sense strand
acccggaggugcacaguga

SEQ ID NO: 1524202 - RNA, 19 nt, Homo sapiens
  misc_RNA (1)...(19): siRNA sense strand
caugaacaagugcaucaaa

SEQ ID NO: 1524203 - RNA, 19 nt, Homo sapiens
  misc_RNA (1)...(19): siRNA sense strand
ggugcuggcucucgaagac

SEQ ID NO: 1524204 - RNA, 19 nt, Homo sapiens
  misc_RNA (1)...(19): siRNA sense strand
guaguccugcgcaauguga

SEQ ID NO: 1524205 - RNA, 19 nt, Homo sapiens
  misc_RNA (1)...(19): siRNA sense strand
augaacaagugcaucaaau

SEQ ID NO: 1524206 - RNA, 19 nt, Homo sapiens
  misc_RNA (1)...(19): siRNA sense strand
agcagcagcucugugguuu

SEQ ID NO: 1524207 - RNA, 19 nt, Homo sapiens
  misc_RNA (1)...(19): siRNA sense strand
caugcugccugcucugaca

SEQ ID NO: 1524208 - RNA, 19 nt, Homo sapiens
  misc_RNA (1)...(19): siRNA sense strand
gccauaacuucugcaccaa

SEQ ID NO: 1524209 - RNA, 19 nt, Homo sapiens
  misc_RNA (1)...(19): siRNA sense strand
guaaggagggcuuguaccu

SEQ ID NO: 1524210 - RNA, 19 nt, Homo sapiens
  misc_RNA (1)...(19): siRNA sense strand
cugcccaccuggauacuuc

SEQ ID NO: 1524211 - RNA, 19 nt, Homo sapiens
  misc_RNA (1)...(19): siRNA sense strand
caguaguccugcgcaaugu

SEQ ID NO: 1524212 - RNA, 19 nt, Homo sapiens
  misc_RNA (1)...(19): siRNA sense strand
cacccaagcuguucauccu

SEQ ID NO: 1524213 - RNA, 19 nt, Homo sapiens
  misc_RNA (1)...(19): siRNA sense strand
ccaggaaggagagcaagga

SEQ ID NO: 1524214 - RNA, 19 nt, Homo sapiens
  misc_RNA (1)...(19): siRNA sense strand
ggucugagguuacuacuaa

SEQ ID NO: 1524215 - RNA, 19 nt, Homo sapiens
  misc_RNA (1)...(19): siRNA sense strand
caaaggaguuuccaaguug

SEQ ID NO: 1524216 - RNA, 19 nt, Homo sapiens
  misc_RNA (1)...(19): siRNA sense strand
caaacucucuguccuuaaa

SEQ ID NO: 1524217 - RNA, 19 nt, Homo sapiens
  misc_RNA (1)...(19): siRNA sense strand
ccaaaggaguuuccaaguu

SEQ ID NO: 1524218 - RNA, 19 nt, Homo sapiens
  misc_RNA (1)...(19): siRNA sense strand
cuacagagcugggucguuu

SEQ ID NO: 1524219 - RNA, 19 nt, Homo sapiens
  misc_RNA (1)...(19): siRNA sense strand
uaaagauucugauggugua

SEQ ID NO: 1524220 - RNA, 19 nt, Homo sapiens
  misc_RNA (1)...(19): siRNA sense strand
ggacauggguacguucuug

SEQ ID NO: 1524221 - RNA, 19 nt, Homo sapiens
  misc_RNA (1)...(19): siRNA sense strand
caaaucuacucaucaguug

SEQ ID NO: 1524222 - RNA, 19 nt, Homo sapiens
  misc_RNA (1)...(19): siRNA sense strand
gagcccauccaaagaauua

SEQ ID NO: 1524223 - RNA, 19 nt, Homo sapiens
  misc_RNA (1)...(19): siRNA sense strand
gcaaaggucuuaguaucau

SEQ ID NO: 1524224 - RNA, 19 nt, Homo sapiens
  misc_RNA (1)...(19): siRNA sense strand
gcaaacaacccauucaaag

SEQ ID NO: 1524225 - RNA, 19 nt, Homo sapiens
  misc_RNA (1)...(19): siRNA sense strand
ccacaagucauccauguuu

SEQ ID NO: 1524226 - RNA, 19 nt, Homo sapiens
  misc_RNA (1)...(19): siRNA sense strand
cugagucucuucauaagua

SEQ ID NO: 1524227 - RNA, 19 nt, Homo sapiens
  misc_RNA (1)...(19): siRNA sense strand
gcacgaagaggcagugaga

SEQ ID NO: 1524228 - RNA, 19 nt, Homo sapiens
  misc_RNA (1)...(19): siRNA sense strand
gacccugagucucuucaua

SEQ ID NO: 1524229 - RNA, 19 nt, Homo sapiens
  misc_RNA (1)...(19): siRNA sense strand
cccaaaggaugaagcagua

SEQ ID NO: 1524230 - RNA, 19 nt, Homo sapiens
  misc_RNA (1)...(19): siRNA sense strand
ggaugucucugaggaaaug

SEQ ID NO: 1524231 - RNA, 19 nt, Homo sapiens
  misc_RNA (1)...(19): siRNA sense strand
cuccagagcccaucuauaa

SEQ ID NO: 1524232 - RNA, 19 nt, Homo sapiens
  misc_RNA (1)...(19): siRNA sense strand
caaagaauuacgacuacua

SEQ ID NO: 1524233 - RNA, 19 nt, Homo sapiens
  misc_RNA (1)...(19): siRNA sense strand
ccagaagaauaacuuacaa

SEQ ID NO: 1524234 - RNA, 19 nt, Homo sapiens
  misc_RNA (1)...(19): siRNA sense strand
gcugaauccugaaguugaa

SEQ ID NO: 1524235 - RNA, 19 nt, Homo sapiens
  misc_RNA (1)...(19): siRNA sense strand
gcagggacauggguacguu

SEQ ID NO: 1524236 - RNA, 19 nt, Homo sapiens
  misc_RNA (1)...(19): siRNA sense strand
ggugaggaguggcaucuau

SEQ ID NO: 1524237 - RNA, 19 nt, Homo sapiens
  misc_RNA (1)...(19): siRNA sense strand
aaacugagcccauccaaag

SEQ ID NO: 1524238 - RNA, 19 nt, Homo sapiens
  misc_RNA (1)...(19): siRNA sense strand
ccaaaucuacucaucaguu

SEQ ID NO: 1524239 - RNA, 19 nt, Homo sapiens
  misc_RNA (1)...(19): siRNA sense strand
ccgcaaaggucuuaguauc

SEQ ID NO: 1524240 - RNA, 19 nt, Homo sapiens
  misc_RNA (1)...(19): siRNA sense strand
aaaccaagcccuccgcaaa

SEQ ID NO: 1524241 - RNA, 19 nt, Homo sapiens
  misc_RNA (1)...(19): siRNA sense strand
ggaccugacuccucauggu

SEQ ID NO: 1524242 - RNA, 19 nt, Homo sapiens
  misc_RNA (1)...(19): siRNA sense strand
ggaguggcaucuauguauc

SEQ ID NO: 1524243 - RNA, 19 nt, Homo sapiens
  misc_RNA (1)...(19): siRNA sense strand
cgugucaucugguggcuaa

SEQ ID NO: 1524244 - RNA, 19 nt, Homo sapiens
  misc_RNA (1)...(19): siRNA sense strand
agcagacaauggaaaguua

SEQ ID NO: 1524245 - RNA, 19 nt, Homo sapiens
  misc_RNA (1)...(19): siRNA sense strand
gaaauguacaaucguguca

SEQ ID NO: 1524246 - RNA, 19 nt, Homo sapiens
  misc_RNA (1)...(19): siRNA sense strand
ucauaaguauucugccuau

SEQ ID NO: 1524247 - RNA, 19 nt, Homo sapiens
  misc_RNA (1)...(19): siRNA sense strand
ggaugaagcaguacaaacu

SEQ ID NO: 1524248 - RNA, 19 nt, Homo sapiens
  misc_RNA (1)...(19): siRNA sense strand
gaagaggcagugagagcaa

SEQ ID NO: 1524249 - RNA, 19 nt, Homo sapiens
  misc_RNA (1)...(19): siRNA sense strand
auucaaagguuuacugcuu

SEQ ID NO: 1524250 - RNA, 19 nt, Homo sapiens
  misc_RNA (1)...(19): siRNA sense strand
cucaaacucucuguccuua

SEQ ID NO: 1524251 - RNA, 19 nt, Homo sapiens
  misc_RNA (1)...(19): siRNA sense strand
uaaagagccagaagacuca

SEQ ID NO: 1524252 - RNA, 19 nt, Homo sapiens
  misc_RNA (1)...(19): siRNA sense strand
guauaggaauaugaacuug

SEQ ID NO: 1524253 - RNA, 19 nt, Homo sapiens
  misc_RNA (1)...(19): siRNA sense strand
gaauaugaacuuggacuca

SEQ ID NO: 1524254 - RNA, 19 nt, Homo sapiens
  misc_RNA (1)...(19): siRNA sense strand
gcaagccuaucaccaccau

SEQ ID NO: 1524255 - RNA, 19 nt, Homo sapiens
  misc_RNA (1)...(19): siRNA sense strand
gugaggaucugaaguucca

SEQ ID NO: 1524256 - RNA, 19 nt, Homo sapiens
  misc_RNA (1)...(19): siRNA sense strand
uucaagaccagaagaauaa

SEQ ID NO: 1524257 - RNA, 19 nt, Homo sapiens
  misc_RNA (1)...(19): siRNA sense strand
ggucggccaucaugcuuca

SEQ ID NO: 1524258 - RNA, 19 nt, Homo sapiens
  misc_RNA (1)...(19): siRNA sense strand
gaggaguggcaucuaugua

SEQ ID NO: 1524259 - RNA, 19 nt, Homo sapiens
  misc_RNA (1)...(19): siRNA sense strand
caaacaacccauucaaagg

SEQ ID NO: 1524260 - RNA, 19 nt, Homo sapiens
  misc_RNA (1)...(19): siRNA sense strand
gcccaucuauaaacagcaa

SEQ ID NO: 1524261 - RNA, 19 nt, Homo sapiens
  misc_RNA (1)...(19): siRNA sense strand
aaacaacccauucaaaggu

SEQ ID NO: 1524262 - RNA, 19 nt, Homo sapiens
  misc_RNA (1)...(19): siRNA sense strand
caagcacaccugcaaacaa

SEQ ID NO: 1524263 - RNA, 19 nt, Homo sapiens
  misc_RNA (1)...(19): siRNA sense strand
auaggaauaugaacuugga

SEQ ID NO: 1524264 - RNA, 19 nt, Homo sapiens
  misc_RNA (1)...(19): siRNA sense strand
cagagcccaucuauaaaca

SEQ ID NO: 1524265 - RNA, 19 nt, Homo sapiens
  misc_RNA (1)...(19): siRNA sense strand
uuucaagaccagaagaaua

SEQ ID NO: 1524266 - RNA, 19 nt, Homo sapiens
  misc_RNA (1)...(19): siRNA sense strand
ccuuaaagauucugauggu

SEQ ID NO: 1524267 - RNA, 19 nt, Homo sapiens
  misc_RNA (1)...(19): siRNA sense strand
ucucuguccuuaaagauuc

SEQ ID NO: 1524268 - RNA, 19 nt, Homo sapiens
  misc_RNA (1)...(19): siRNA sense strand
gggccaagguagcgguuuc

SEQ ID NO: 1524269 - RNA, 19 nt, Homo sapiens
  misc_RNA (1)...(19): siRNA sense strand
gcucaaacucucuguccuu

SEQ ID NO: 1524270 - RNA, 19 nt, Homo sapiens
  misc_RNA (1)...(19): siRNA sense strand
caaacugagcccauccaaa

SEQ ID NO: 1524271 - RNA, 19 nt, Homo sapiens
  misc_RNA (1)...(19): siRNA sense strand
agaggaagcagcacgaaga

SEQ ID NO: 1524272 - RNA, 19 nt, Homo sapiens
  misc_RNA (1)...(19): siRNA sense strand
aagcacaccugcaaacaac

SEQ ID NO: 1524273 - RNA, 19 nt, Homo sapiens
  misc_RNA (1)...(19): siRNA sense strand
ccuccucgguccuuaccua

SEQ ID NO: 1524274 - RNA, 19 nt, Homo sapiens
  misc_RNA (1)...(19): siRNA sense strand
ccagaaauuacuuacaugu

SEQ ID NO: 1524275 - RNA, 19 nt, Homo sapiens
  misc_RNA (1)...(19): siRNA sense strand
cacaagucauccauguuug

SEQ ID NO: 1524276 - RNA, 19 nt, Homo sapiens
  misc_RNA (1)...(19): siRNA sense strand
ucugagggcucccacaagu

SEQ ID NO: 1524277 - RNA, 19 nt, Homo sapiens
  misc_RNA (1)...(19): siRNA sense strand
guagaagaaucagaaacag

SEQ ID NO: 1524278 - RNA, 19 nt, Homo sapiens
  misc_RNA (1)...(19): siRNA sense strand
gagagggucugagguuacu

SEQ ID NO: 1524279 - RNA, 19 nt, Homo sapiens
  misc_RNA (1)...(19): siRNA sense strand
ugucuuacccaaaggauga

SEQ ID NO: 1524280 - RNA, 19 nt, Homo sapiens
  misc_RNA (1)...(19): siRNA sense strand
ccaucaugcuucaucaauc

SEQ ID NO: 1524281 - RNA, 19 nt, Homo sapiens
  misc_RNA (1)...(19): siRNA sense strand
agagcugggucguuuagga

SEQ ID NO: 1524282 - RNA, 19 nt, Homo sapiens
  misc_RNA (1)...(19): siRNA sense strand
aaccgagacuggaccaaga

SEQ ID NO: 1524283 - RNA, 19 nt, Homo sapiens
  misc_RNA (1)...(19): siRNA sense strand
caaaggucuuaguaucauc

SEQ ID NO: 1524284 - RNA, 19 nt, Homo sapiens
  misc_RNA (1)...(19): siRNA sense strand
caucuaaagagccagaaga

SEQ ID NO: 1524285 - RNA, 19 nt, Homo sapiens
  misc_RNA (1)...(19): siRNA sense strand
aaucagaaacagguccuua

SEQ ID NO: 1524286 - RNA, 19 nt, Homo sapiens
  misc_RNA (1)...(19): siRNA sense strand
uaucagacagcccagagaa

SEQ ID NO: 1524287 - RNA, 19 nt, Homo sapiens
  misc_RNA (1)...(19): siRNA sense strand
gcaucagacuacccucgau

SEQ ID NO: 1524288 - RNA, 19 nt, Homo sapiens
  misc_RNA (1)...(19): siRNA sense strand
acagaaucaucccgccauu

SEQ ID NO: 1524289 - RNA, 19 nt, Homo sapiens
  misc_RNA (1)...(19): siRNA sense strand
gugcugcagucucccugaa

SEQ ID NO: 1524290 - RNA, 19 nt, Homo sapiens
  misc_RNA (1)...(19): siRNA sense strand
aagguuuacugcuuucuuc

SEQ ID NO: 1524291 - RNA, 19 nt, Homo sapiens
  misc_RNA (1)...(19): siRNA sense strand
ucaccaccaucaccaccaa

SEQ ID NO: 1524292 - RNA, 19 nt, Homo sapiens
  misc_RNA (1)...(19): siRNA sense strand
caucaugcuucaucaaucc

SEQ ID NO: 1524293 - RNA, 19 nt, Homo sapiens
  misc_RNA (1)...(19): siRNA sense strand
gacacuggcuucccaugcu

SEQ ID NO: 1524294 - RNA, 19 nt, Homo sapiens
  misc_RNA (1)...(19): siRNA sense strand
ugacaacaccggauuuuga

SEQ ID NO: 1524295 - RNA, 19 nt, Homo sapiens
  misc_RNA (1)...(19): siRNA sense strand
caagucauccauguuuguu

SEQ ID NO: 1524296 - RNA, 19 nt, Homo sapiens
  misc_RNA (1)...(19): siRNA sense strand
uguagaagaaucagaaaca

SEQ ID NO: 1524297 - RNA, 19 nt, Homo sapiens
  misc_RNA (1)...(19): siRNA sense strand
agaccagaagaauaacuua

SEQ ID NO: 1524298 - RNA, 19 nt, Homo sapiens
  misc_RNA (1)...(19): siRNA sense strand
gcagacaauggaaaguuag

SEQ ID NO: 1524299 - RNA, 19 nt, Homo sapiens
  misc_RNA (1)...(19): siRNA sense strand
cugaggaaauguacaaucg

SEQ ID NO: 1524300 - RNA, 19 nt, Homo sapiens
  misc_RNA (1)...(19): siRNA sense strand
uauaaacagcaaacccaaa

SEQ ID NO: 1524301 - RNA, 19 nt, Homo sapiens
  misc_RNA (1)...(19): siRNA sense strand
ccagagcccaucuauaaac

SEQ ID NO: 1524302 - RNA, 19 nt, Homo sapiens
  misc_RNA (1)...(19): siRNA sense strand
caugguggcccuugcugaa

SEQ ID NO: 1524303 - RNA, 19 nt, Homo sapiens
  misc_RNA (1)...(19): siRNA sense strand
cccguaggauuuugucuua

SEQ ID NO: 1524304 - RNA, 19 nt, Homo sapiens
  misc_RNA (1)...(19): siRNA sense strand
caucaccaccaaaggaguu

SEQ ID NO: 1524305 - RNA, 19 nt, Homo sapiens
  misc_RNA (1)...(19): siRNA sense strand
gaccaagaacagaaucauc

SEQ ID NO: 1524306 - RNA, 19 nt, Homo sapiens
  misc_RNA (1)...(19): siRNA sense strand
ucccacaagucauccaugu

SEQ ID NO: 1524307 - RNA, 19 nt, Homo sapiens
  misc_RNA (1)...(19): siRNA sense strand
ugagggcucccacaaguca

SEQ ID NO: 1524308 - RNA, 19 nt, Homo sapiens
  misc_RNA (1)...(19): siRNA sense strand
agagccaacucaccaugug

SEQ ID NO: 1524309 - RNA, 19 nt, Homo sapiens
  misc_RNA (1)...(19): siRNA sense strand
aaagaauuacgacuacuag

SEQ ID NO: 1524310 - RNA, 19 nt, Homo sapiens
  misc_RNA (1)...(19): siRNA sense strand
cccagaaauuacuuacaug

SEQ ID NO: 1524311 - RNA, 19 nt, Homo sapiens
  misc_RNA (1)...(19): siRNA sense strand
cuggaugucucugaggaaa

SEQ ID NO: 1524312 - RNA, 19 nt, Homo sapiens
  misc_RNA (1)...(19): siRNA sense strand
acucuagcccuuucuguga

SEQ ID NO: 1524313 - RNA, 19 nt, Homo sapiens
  misc_RNA (1)...(19): siRNA sense strand
cagcugacaacaccggauu

SEQ ID NO: 1524314 - RNA, 19 nt, Homo sapiens
  misc_RNA (1)...(19): siRNA sense strand
ggacugcacugccaaguaa

SEQ ID NO: 1524315 - RNA, 19 nt, Homo sapiens
  misc_RNA (1)...(19): siRNA sense strand
agaugaagcugaacacaga

SEQ ID NO: 1524316 - RNA, 19 nt, Homo sapiens
  misc_RNA (1)...(19): siRNA sense strand
ucuacuaccuggaaacuga

SEQ ID NO: 1524317 - RNA, 19 nt, Homo sapiens
  misc_RNA (1)...(19): siRNA sense strand
gcugcagacuggcuggaua

SEQ ID NO: 1524318 - RNA, 19 nt, Homo sapiens
  misc_RNA (1)...(19): siRNA sense strand
caacgucuacuaccuggaa

SEQ ID NO: 1524319 - RNA, 19 nt, Homo sapiens
  misc_RNA (1)...(19): siRNA sense strand
acacagaggugcgcgagau

SEQ ID NO: 1524320 - RNA, 19 nt, Homo sapiens
  misc_RNA (1)...(19): siRNA sense strand
cugcgaagguauccaguug

SEQ ID NO: 1524321 - RNA, 19 nt, Homo sapiens
  misc_RNA (1)...(19): siRNA sense strand
gaucagcggcguggaugaa

SEQ ID NO: 1524322 - RNA, 19 nt, Homo sapiens
  misc_RNA (1)...(19): siRNA sense strand
ccaggagcguggugacuuc

SEQ ID NO: 1524323 - RNA, 19 nt, Homo sapiens
  misc_RNA (1)...(19): siRNA sense strand
ggagaucagcggcguggau

SEQ ID NO: 1524324 - RNA, 19 nt, Homo sapiens
  misc_RNA (1)...(19): siRNA sense strand
guaccaagugugcaaugug

SEQ ID NO: 1524325 - RNA, 19 nt, Homo sapiens
  misc_RNA (1)...(19): siRNA sense strand
ggaccgccgaggaaguuau

SEQ ID NO: 1524326 - RNA, 19 nt, Homo sapiens
  misc_RNA (1)...(19): siRNA sense strand
ugggugagcgcaagaugaa

SEQ ID NO: 1524327 - RNA, 19 nt, Homo sapiens
  misc_RNA (1)...(19): siRNA sense strand
gaccuucaacgucuacuac

SEQ ID NO: 1524328 - RNA, 19 nt, Homo sapiens
  misc_RNA (1)...(19): siRNA sense strand
guaaugggugggaggagau

SEQ ID NO: 1524329 - RNA, 19 nt, Homo sapiens
  misc_RNA (1)...(19): siRNA sense strand
guuuccaccuggccuuuca

SEQ ID NO: 1524330 - RNA, 19 nt, Homo sapiens
  misc_RNA (1)...(19): siRNA sense strand
gcagcgcaucuucguggaa

SEQ ID NO: 1524331 - RNA, 19 nt, Homo sapiens
  misc_RNA (1)...(19): siRNA sense strand
cugcagacuggcuggauaa

SEQ ID NO: 1524332 - RNA, 19 nt, Homo sapiens
  misc_RNA (1)...(19): siRNA sense strand
gagcuggucucaucaagug

SEQ ID NO: 1524333 - RNA, 19 nt, Homo sapiens
  misc_RNA (1)...(19): siRNA sense strand
gcauccaucucugaaagga

SEQ ID NO: 1524334 - RNA, 19 nt, Homo sapiens
  misc_RNA (1)...(19): siRNA sense strand
caacccagccgaggcacua

SEQ ID NO: 1524335 - RNA, 19 nt, Homo sapiens
  misc_RNA (1)...(19): siRNA sense strand
ggcaggaggagaaagaaga

SEQ ID NO: 1524336 - RNA, 19 nt, Homo sapiens
  misc_RNA (1)...(19): siRNA sense strand
ggcaggaggagaaggaaga

SEQ ID NO: 1524337 - RNA, 19 nt, Homo sapiens
  misc_RNA (1)...(19): siRNA sense strand
ucaaguggcguccaacaag

SEQ ID NO: 1524338 - RNA, 19 nt, Homo sapiens
  misc_RNA (1)...(19): siRNA sense strand
uggcauccaucucugaaag

SEQ ID NO: 1524339 - RNA, 19 nt, Homo sapiens
  misc_RNA (1)...(19): siRNA sense strand
gaacccaagaagccuggaa

SEQ ID NO: 1524340 - RNA, 19 nt, Homo sapiens
  misc_RNA (1)...(19): siRNA sense strand
gaaccuguggcauccaucu

SEQ ID NO: 1524341 - RNA, 19 nt, Homo sapiens
  misc_RNA (1)...(19): siRNA sense strand
caacagcgcgaggcgacuu

SEQ ID NO: 1524342 - RNA, 19 nt, Homo sapiens
  misc_RNA (1)...(19): siRNA sense strand
gcaggaggagaaagaagag

SEQ ID NO: 1524343 - RNA, 19 nt, Homo sapiens
  misc_RNA (1)...(19): siRNA sense strand
ggacuuaccuccucuguug

SEQ ID NO: 1524344 - RNA, 19 nt, Homo sapiens
  misc_RNA (1)...(19): siRNA sense strand
agaaggagcuggcaucuuu

SEQ ID NO: 1524345 - RNA, 19 nt, Homo sapiens
  misc_RNA (1)...(19): siRNA sense strand
gaaccaguccugaauccua

SEQ ID NO: 1524346 - RNA, 19 nt, Homo sapiens
  misc_RNA (1)...(19): siRNA sense strand
gaagcugacugcacagauc

SEQ ID NO: 1524347 - RNA, 19 nt, Homo sapiens
  misc_RNA (1)...(19): siRNA sense strand
gggcagagcucagcaguac

SEQ ID NO: 1524348 - RNA, 19 nt, Homo sapiens
  misc_RNA (1)...(19): siRNA sense strand
gcucuuuccuccucucuug

SEQ ID NO: 1524349 - RNA, 19 nt, Homo sapiens
  misc_RNA (1)...(19): siRNA sense strand
ucaauagccuggagagcuu

SEQ ID NO: 1524350 - RNA, 19 nt, Homo sapiens
  misc_RNA (1)...(19): siRNA sense strand
ugaguaugcugguuuagug

SEQ ID NO: 1524351 - RNA, 19 nt, Homo sapiens
  misc_RNA (1)...(19): siRNA sense strand
gcagagcucagcaguacuu

SEQ ID NO: 1524352 - RNA, 19 nt, Homo sapiens
  misc_RNA (1)...(19): siRNA sense strand
ucagggaguugcuggaaga

SEQ ID NO: 1524353 - RNA, 19 nt, Homo sapiens
  misc_RNA (1)...(19): siRNA sense strand
gcuccugccugaagaguca

SEQ ID NO: 1524354 - RNA, 19 nt, Homo sapiens
  misc_RNA (1)...(19): siRNA sense strand
aaacaagccaugcaagguu

SEQ ID NO: 1524355 - RNA, 19 nt, Homo sapiens
  misc_RNA (1)...(19): siRNA sense strand
uagugaguaugcugguuua

SEQ ID NO: 1524356 - RNA, 19 nt, Homo sapiens
  misc_RNA (1)...(19): siRNA sense strand
agacugcgccuaccaccua

SEQ ID NO: 1524357 - RNA, 19 nt, Homo sapiens
  misc_RNA (1)...(19): siRNA sense strand
gcaugaggcagaagcuuug

SEQ ID NO: 1524358 - RNA, 19 nt, Homo sapiens
  misc_RNA (1)...(19): siRNA sense strand
gaggagcagugggagagaa

SEQ ID NO: 1524359 - RNA, 19 nt, Homo sapiens
  misc_RNA (1)...(19): siRNA sense strand
aacaagccaugcaagguuu

SEQ ID NO: 1524360 - RNA, 19 nt, Homo sapiens
  misc_RNA (1)...(19): siRNA sense strand
aaccaguccugaauccuaa

SEQ ID NO: 1524361 - RNA, 19 nt, Homo sapiens
  misc_RNA (1)...(19): siRNA sense strand
gcagcucaaacaagacuuu

SEQ ID NO: 1524362 - RNA, 19 nt, Homo sapiens
  misc_RNA (1)...(19): siRNA sense strand
uguauagccuggccucaga

SEQ ID NO: 1524363 - RNA, 19 nt, Homo sapiens
  misc_RNA (1)...(19): siRNA sense strand
uggcuugaccacauucuua

SEQ ID NO: 1524364 - RNA, 19 nt, Homo sapiens
  misc_RNA (1)...(19): siRNA sense strand
ggagcuggcaucuuugugu

SEQ ID NO: 1524365 - RNA, 19 nt, Homo sapiens
  misc_RNA (1)...(19): siRNA sense strand
ccagacaggucagcugcaa

SEQ ID NO: 1524366 - RNA, 19 nt, Homo sapiens
  misc_RNA (1)...(19): siRNA sense strand
gagcugggaccaagguuuc

SEQ ID NO: 1524367 - RNA, 19 nt, Homo sapiens
  misc_RNA (1)...(19): siRNA sense strand
gagccuguguugcaaggau

SEQ ID NO: 1524368 - RNA, 19 nt, Homo sapiens
  misc_RNA (1)...(19): siRNA sense strand
uaccuccucuguugcauga

SEQ ID NO: 1524369 - RNA, 19 nt, Homo sapiens
  misc_RNA (1)...(19): siRNA sense strand
ucucaagaaugucauaaac

SEQ ID NO: 1524370 - RNA, 19 nt, Homo sapiens
  misc_RNA (1)...(19): siRNA sense strand
gaaccucccagugcuccua

SEQ ID NO: 1524371 - RNA, 19 nt, Homo sapiens
  misc_RNA (1)...(19): siRNA sense strand
ggagcugggaccaagguuu

SEQ ID NO: 1524372 - RNA, 19 nt, Homo sapiens
  misc_RNA (1)...(19): siRNA sense strand
ggcagaagcuuuguauagc

SEQ ID NO: 1524373 - RNA, 19 nt, Homo sapiens
  misc_RNA (1)...(19): siRNA sense strand
uagccugccuccacucguu

SEQ ID NO: 1524374 - RNA, 19 nt, Homo sapiens
  misc_RNA (1)...(19): siRNA sense strand
ccagugcuccuagugagua

SEQ ID NO: 1524375 - RNA, 19 nt, Homo sapiens
  misc_RNA (1)...(19): siRNA sense strand
gcugugcgacucaugaaga

SEQ ID NO: 1524376 - RNA, 19 nt, Homo sapiens
  misc_RNA (1)...(19): siRNA sense strand
gaaggagcuggcaucuuug

SEQ ID NO: 1524377 - RNA, 19 nt, Homo sapiens
  misc_RNA (1)...(19): siRNA sense strand
caaagcacacuaggaggaa

SEQ ID NO: 1524378 - RNA, 19 nt, Homo sapiens
  misc_RNA (1)...(19): siRNA sense strand
cuucaucagucgcuuaucu

SEQ ID NO: 1524379 - RNA, 19 nt, Homo sapiens
  misc_RNA (1)...(19): siRNA sense strand
aggcagaagcuuuguauag

SEQ ID NO: 1524380 - RNA, 19 nt, Homo sapiens
  misc_RNA (1)...(19): siRNA sense strand
gaggcagaagcuuuguaua

SEQ ID NO: 1524381 - RNA, 19 nt, Homo sapiens
  misc_RNA (1)...(19): siRNA sense strand
gugccuggcuugaccacau

SEQ ID NO: 1524382 - RNA, 19 nt, Homo sapiens
  misc_RNA (1)...(19): siRNA sense strand
cuagugaguaugcugguuu

SEQ ID NO: 1524383 - RNA, 19 nt, Homo sapiens
  misc_RNA (1)...(19): siRNA sense strand
cuacuucaucagucgcuua

SEQ ID NO: 1524384 - RNA, 19 nt, Homo sapiens
  misc_RNA (1)...(19): siRNA sense strand
cgcugcagcucaaacaaga

SEQ ID NO: 1524385 - RNA, 19 nt, Homo sapiens
  misc_RNA (1)...(19): siRNA sense strand
ugaggcagaagcuuuguau

SEQ ID NO: 1524386 - RNA, 19 nt, Homo sapiens
  misc_RNA (1)...(19): siRNA sense strand
uaaacaagccaugcaaggu

SEQ ID NO: 1524387 - RNA, 19 nt, Homo sapiens
  misc_RNA (1)...(19): siRNA sense strand
gggaaccaguccugaaucc

SEQ ID NO: 1524388 - RNA, 19 nt, Homo sapiens
  misc_RNA (1)...(19): siRNA sense strand
gagaaggagcuggcaucuu

SEQ ID NO: 1524389 - RNA, 19 nt, Homo sapiens
  misc_RNA (1)...(19): siRNA sense strand
gucacagacuacuucauca

SEQ ID NO: 1524390 - RNA, 19 nt, Homo sapiens
  misc_RNA (1)...(19): siRNA sense strand
ugucacagacuacuucauc

SEQ ID NO: 1524391 - RNA, 19 nt, Homo sapiens
  misc_RNA (1)...(19): siRNA sense strand
cagagcagccuucccacau

SEQ ID NO: 1524392 - RNA, 19 nt, Homo sapiens
  misc_RNA (1)...(19): siRNA sense strand
ggucagggaguugcuggaa

SEQ ID NO: 1524393 - RNA, 19 nt, Homo sapiens
  misc_RNA (1)...(19): siRNA sense strand
ucucuuggaugcccuucga

SEQ ID NO: 1524394 - RNA, 19 nt, Homo sapiens
  misc_RNA (1)...(19): siRNA sense strand
agagcagccuucccacauc

SEQ ID NO: 1524395 - RNA, 19 nt, Homo sapiens
  misc_RNA (1)...(19): siRNA sense strand
agggcuaccuggugggaaa

SEQ ID NO: 1524396 - RNA, 19 nt, Homo sapiens
  misc_RNA (1)...(19): siRNA sense strand
cuaagugucuuuucucaag

SEQ ID NO: 1524397 - RNA, 19 nt, Homo sapiens
  misc_RNA (1)...(19): siRNA sense strand
uaccacacacuacagagaa

SEQ ID NO: 1524398 - RNA, 19 nt, Homo sapiens
  misc_RNA (1)...(19): siRNA sense strand
caagaaugucauaaacaag

SEQ ID NO: 1524399 - RNA, 19 nt, Homo sapiens
  misc_RNA (1)...(19): siRNA sense strand
ggacuacgaggcugaugcu

SEQ ID NO: 1524400 - RNA, 19 nt, Homo sapiens
  misc_RNA (1)...(19): siRNA sense strand
agacaggucagcugcaaag

SEQ ID NO: 1524401 - RNA, 19 nt, Homo sapiens
  misc_RNA (1)...(19): siRNA sense strand
ucauaaacaagccaugcaa

SEQ ID NO: 1524402 - RNA, 19 nt, Homo sapiens
  misc_RNA (1)...(19): siRNA sense strand
gccuugggaucagcucuug

SEQ ID NO: 1524403 - RNA, 19 nt, Homo sapiens
  misc_RNA (1)...(19): siRNA sense strand
ugcaagguuucaagcucua

SEQ ID NO: 1524404 - RNA, 19 nt, Homo sapiens
  misc_RNA (1)...(19): siRNA sense strand
ggaguuggagccacaaaua

SEQ ID NO: 1524405 - RNA, 19 nt, Homo sapiens
  misc_RNA (1)...(19): siRNA sense strand
gcacccaucucugauauca

SEQ ID NO: 1524406 - RNA, 19 nt, Homo sapiens
  misc_RNA (1)...(19): siRNA sense strand
gcagauggcucagaacaac

SEQ ID NO: 1524407 - RNA, 19 nt, Homo sapiens
  misc_RNA (1)...(19): siRNA sense strand
caacgccucugucauccuu

SEQ ID NO: 1524408 - RNA, 19 nt, Homo sapiens
  misc_RNA (1)...(19): siRNA sense strand
gcaauucaagccagagauu

SEQ ID NO: 1524409 - RNA, 19 nt, Homo sapiens
  misc_RNA (1)...(19): siRNA sense strand
gaaaagagaagaaaaccaa

SEQ ID NO: 1524410 - RNA, 19 nt, Homo sapiens
  misc_RNA (1)...(19): siRNA sense strand
ggcuauaucuaucgagugu

SEQ ID NO: 1524411 - RNA, 19 nt, Homo sapiens
  misc_RNA (1)...(19): siRNA sense strand
ccuccugguuguccuguuu

SEQ ID NO: 1524412 - RNA, 19 nt, Homo sapiens
  misc_RNA (1)...(19): siRNA sense strand
gugcugggcuauaucuauc

SEQ ID NO: 1524413 - RNA, 19 nt, Homo sapiens
  misc_RNA (1)...(19): siRNA sense strand
caucucugauaucaaguga

SEQ ID NO: 1524414 - RNA, 19 nt, Homo sapiens
  misc_RNA (1)...(19): siRNA sense strand
cggcacccaucucugauau

SEQ ID NO: 1524415 - RNA, 19 nt, Homo sapiens
  misc_RNA (1)...(19): siRNA sense strand
gcaccagcaccuucacugu

SEQ ID NO: 1524416 - RNA, 19 nt, Homo sapiens
  misc_RNA (1)...(19): siRNA sense strand
cguccaaccuucagcucaa

SEQ ID NO: 1524417 - RNA, 19 nt, Homo sapiens
  misc_RNA (1)...(19): siRNA sense strand
gaucagccaacgccucugu

SEQ ID NO: 1524418 - RNA, 19 nt, Homo sapiens
  misc_RNA (1)...(19): siRNA sense strand
ccucugucauccuuaaugu

SEQ ID NO: 1524419 - RNA, 19 nt, Homo sapiens
  misc_RNA (1)...(19): siRNA sense strand
gggcacuucgggagaauga

SEQ ID NO: 1524420 - RNA, 19 nt, Homo sapiens
  misc_RNA (1)...(19): siRNA sense strand
ccacugcugggcauuguug

SEQ ID NO: 1524421 - RNA, 19 nt, Homo sapiens
  misc_RNA (1)...(19): siRNA sense strand
ggaggcaccagcaccuuca

SEQ ID NO: 1524422 - RNA, 19 nt, Homo sapiens
  misc_RNA (1)...(19): siRNA sense strand
agccagagauugcccaagu

SEQ ID NO: 1524423 - RNA, 19 nt, Homo sapiens
  misc_RNA (1)...(19): siRNA sense strand
ucucugauaucaagugacu

SEQ ID NO: 1524424 - RNA, 19 nt, Homo sapiens
  misc_RNA (1)...(19): siRNA sense strand
cgugagcagugaugagauc

SEQ ID NO: 1524425 - RNA, 19 nt, Homo sapiens
  misc_RNA (1)...(19): siRNA sense strand
gaguuggagccacaaauag

SEQ ID NO: 1524426 - RNA, 19 nt, Homo sapiens
  misc_RNA (1)...(19): siRNA sense strand
acccaucucugauaucaag

SEQ ID NO: 1524427 - RNA, 19 nt, Homo sapiens
  misc_RNA (1)...(19): siRNA sense strand
ccacaaauagauggucaga

SEQ ID NO: 1524428 - RNA, 19 nt, Homo sapiens
  misc_RNA (1)...(19): siRNA sense strand
uaucaagugacuccaacaa

SEQ ID NO: 1524429 - RNA, 19 nt, Homo sapiens
  misc_RNA (1)...(19): siRNA sense strand
acaugucccucccguccaa

SEQ ID NO: 1524430 - RNA, 19 nt, Homo sapiens
  misc_RNA (1)...(19): siRNA sense strand
gcacuucgggagaaugaac

SEQ ID NO: 1524431 - RNA, 19 nt, Homo sapiens
  misc_RNA (1)...(19): siRNA sense strand
acgccucugucauccuuaa

SEQ ID NO: 1524432 - RNA, 19 nt, Homo sapiens
  misc_RNA (1)...(19): siRNA sense strand
gcugggcuauaucuaucga

SEQ ID NO: 1524433 - RNA, 19 nt, Homo sapiens
  misc_RNA (1)...(19): siRNA sense strand
accagcaccuucacuguca

SEQ ID NO: 1524434 - RNA, 19 nt, Homo sapiens
  misc_RNA (1)...(19): siRNA sense strand
gaccaggaugggccaguga

SEQ ID NO: 1524435 - RNA, 19 nt, Homo sapiens
  misc_RNA (1)...(19): siRNA sense strand
cggccaaugucaccuggau

SEQ ID NO: 1524436 - RNA, 19 nt, Homo sapiens
  misc_RNA (1)...(19): siRNA sense strand
cauccuuaaugugcaauuc

SEQ ID NO: 1524437 - RNA, 19 nt, Homo sapiens
  misc_RNA (1)...(19): siRNA sense strand
gccagagauugcccaaguc

SEQ ID NO: 1524438 - RNA, 19 nt, Homo sapiens
  misc_RNA (1)...(19): siRNA sense strand
ugaccucacuccagauucc

SEQ ID NO: 1524439 - RNA, 19 nt, Homo sapiens
  misc_RNA (1)...(19): siRNA sense strand
ccaaccuucagcucaauga

SEQ ID NO: 1524440 - RNA, 19 nt, Homo sapiens
  misc_RNA (1)...(19): siRNA sense strand
ugucauccuuaaugugcaa

SEQ ID NO: 1524441 - RNA, 19 nt, Homo sapiens
  misc_RNA (1)...(19): siRNA sense strand
ccaacaaccuaaaacucaa

SEQ ID NO: 1524442 - RNA, 19 nt, Homo sapiens
  misc_RNA (1)...(19): siRNA sense strand
gaagcaggcugucgauuua

SEQ ID NO: 1524443 - RNA, 19 nt, Homo sapiens
  misc_RNA (1)...(19): siRNA sense strand
gaaugaaguuguugguuua

SEQ ID NO: 1524444 - RNA, 19 nt, Homo sapiens
  misc_RNA (1)...(19): siRNA sense strand
ggaaugaaguuguugguuu

SEQ ID NO: 1524445 - RNA, 19 nt, Homo sapiens
  misc_RNA (1)...(19): siRNA sense strand
gaugaaagcucaguuuaug

SEQ ID NO: 1524446 - RNA, 19 nt, Homo sapiens
  misc_RNA (1)...(19): siRNA sense strand
gaagaaugccuacaagauu

SEQ ID NO: 1524447 - RNA, 19 nt, Homo sapiens
  misc_RNA (1)...(19): siRNA sense strand
gcagugacauacuuuacua

SEQ ID NO: 1524448 - RNA, 19 nt, Homo sapiens
  misc_RNA (1)...(19): siRNA sense strand
gaagcaaauuggagugaaa

SEQ ID NO: 1524449 - RNA, 19 nt, Homo sapiens
  misc_RNA (1)...(19): siRNA sense strand
ggagugauauagcagguuu

SEQ ID NO: 1524450 - RNA, 19 nt, Homo sapiens
  misc_RNA (1)...(19): siRNA sense strand
gaccuugacucggcuauaa

SEQ ID NO: 1524451 - RNA, 19 nt, Homo sapiens
  misc_RNA (1)...(19): siRNA sense strand
gaugguagaugcaauugau

SEQ ID NO: 1524452 - RNA, 19 nt, Homo sapiens
  misc_RNA (1)...(19): siRNA sense strand
gaagcaauccugaaacuca

SEQ ID NO: 1524453 - RNA, 19 nt, Homo sapiens
  misc_RNA (1)...(19): siRNA sense strand
aagaaugccuacaagauuu

SEQ ID NO: 1524454 - RNA, 19 nt, Homo sapiens
  misc_RNA (1)...(19): siRNA sense strand
aaagagaugugucgagaug

SEQ ID NO: 1524455 - RNA, 19 nt, Homo sapiens
  misc_RNA (1)...(19): siRNA sense strand
gagagaagcaauccugaaa

SEQ ID NO: 1524456 - RNA, 19 nt, Homo sapiens
  misc_RNA (1)...(19): siRNA sense strand
cauguuacuuggagugaua

SEQ ID NO: 1524457 - RNA, 19 nt, Homo sapiens
  misc_RNA (1)...(19): siRNA sense strand
ccuacaagauuucauauca

SEQ ID NO: 1524458 - RNA, 19 nt, Homo sapiens
  misc_RNA (1)...(19): siRNA sense strand
gcuagaaguugcccaggaa

SEQ ID NO: 1524459 - RNA, 19 nt, Homo sapiens
  misc_RNA (1)...(19): siRNA sense strand
gagaagcaauccugaaacu

SEQ ID NO: 1524460 - RNA, 19 nt, Homo sapiens
  misc_RNA (1)...(19): siRNA sense strand
gguacaugcugaagccuuu

SEQ ID NO: 1524461 - RNA, 19 nt, Homo sapiens
  misc_RNA (1)...(19): siRNA sense strand
acagucaucuuaccuauca

SEQ ID NO: 1524462 - RNA, 19 nt, Homo sapiens
  misc_RNA (1)...(19): siRNA sense strand
cuacgaaaccguucaaguu

SEQ ID NO: 1524463 - RNA, 19 nt, Homo sapiens
  misc_RNA (1)...(19): siRNA sense strand
gcaggcugucgauuuauua

SEQ ID NO: 1524464 - RNA, 19 nt, Homo sapiens
  misc_RNA (1)...(19): siRNA sense strand
gaguauugcugcucaucuu

SEQ ID NO: 1524465 - RNA, 19 nt, Homo sapiens
  misc_RNA (1)...(19): siRNA sense strand
ugacucggcuauaaugaga

SEQ ID NO: 1524466 - RNA, 19 nt, Homo sapiens
  misc_RNA (1)...(19): siRNA sense strand
cuucgacacugaccgauaa

SEQ ID NO: 1524467 - RNA, 19 nt, Homo sapiens
  misc_RNA (1)...(19): siRNA sense strand
gggauggauuggauacuga

SEQ ID NO: 1524468 - RNA, 19 nt, Homo sapiens
  misc_RNA (1)...(19): siRNA sense strand
gaagcuacagccaugauga

SEQ ID NO: 1524469 - RNA, 19 nt, Homo sapiens
  misc_RNA (1)...(19): siRNA sense strand
caauugauccaaccagaaa

SEQ ID NO: 1524470 - RNA, 19 nt, Homo sapiens
  misc_RNA (1)...(19): siRNA sense strand
caaccagccugcuuuaaaa

SEQ ID NO: 1524471 - RNA, 19 nt, Homo sapiens
  misc_RNA (1)...(19): siRNA sense strand
gaagcucucagaauaugaa

SEQ ID NO: 1524472 - RNA, 19 nt, Homo sapiens
  misc_RNA (1)...(19): siRNA sense strand
agaaagccaugacgaagau

SEQ ID NO: 1524473 - RNA, 19 nt, Homo sapiens
  misc_RNA (1)...(19): siRNA sense strand
augugaagcucucagaaua

SEQ ID NO: 1524474 - RNA, 19 nt, Homo sapiens
  misc_RNA (1)...(19): siRNA sense strand
ucaaccagccugcuuuaaa

SEQ ID NO: 1524475 - RNA, 19 nt, Homo sapiens
  misc_RNA (1)...(19): siRNA sense strand
uaagugguauggagaaucu

SEQ ID NO: 1524476 - RNA, 19 nt, Homo sapiens
  misc_RNA (1)...(19): siRNA sense strand
gugaagcucucagaauaug

SEQ ID NO: 1524477 - RNA, 19 nt, Homo sapiens
  misc_RNA (1)...(19): siRNA sense strand
gauccaaccagaaagcaaa

SEQ ID NO: 1524478 - RNA, 19 nt, Homo sapiens
  misc_RNA (1)...(19): siRNA sense strand
gaagugaccuaaaagagau

SEQ ID NO: 1524479 - RNA, 19 nt, Homo sapiens
  misc_RNA (1)...(19): siRNA sense strand
caaccauccaucaucuuua

SEQ ID NO: 1524480 - RNA, 19 nt, Homo sapiens
  misc_RNA (1)...(19): siRNA sense strand
gcaauugauccaaccagaa

SEQ ID NO: 1524481 - RNA, 19 nt, Homo sapiens
  misc_RNA (1)...(19): siRNA sense strand
ggaccugcaucgggcaauu

SEQ ID NO: 1524482 - RNA, 19 nt, Homo sapiens
  misc_RNA (1)...(19): siRNA sense strand
gagaagaaugccuacaaga

SEQ ID NO: 1524483 - RNA, 19 nt, Homo sapiens
  misc_RNA (1)...(19): siRNA sense strand
uguagacccucuuaauaug

SEQ ID NO: 1524484 - RNA, 19 nt, Homo sapiens
  misc_RNA (1)...(19): siRNA sense strand
gcucucagaauaugaaaug

SEQ ID NO: 1524485 - RNA, 19 nt, Homo sapiens
  misc_RNA (1)...(19): siRNA sense strand
gcauguagaccugcuagaa

SEQ ID NO: 1524486 - RNA, 19 nt, Homo sapiens
  misc_RNA (1)...(19): siRNA sense strand
agaagcaggcugucgauuu

SEQ ID NO: 1524487 - RNA, 19 nt, Homo sapiens
  misc_RNA (1)...(19): siRNA sense strand
uauagcagguuuagaugau

SEQ ID NO: 1524488 - RNA, 19 nt, Homo sapiens
  misc_RNA (1)...(19): siRNA sense strand
ugauauagcagguuuagau

SEQ ID NO: 1524489 - RNA, 19 nt, Homo sapiens
  misc_RNA (1)...(19): siRNA sense strand
gugacauacuuuacuauca

SEQ ID NO: 1524490 - RNA, 19 nt, Homo sapiens
  misc_RNA (1)...(19): siRNA sense strand
caaaagguguucuucucua

SEQ ID NO: 1524491 - RNA, 19 nt, Homo sapiens
  misc_RNA (1)...(19): siRNA sense strand
ccucuuaauaugcauguua

SEQ ID NO: 1524492 - RNA, 19 nt, Homo sapiens
  misc_RNA (1)...(19): siRNA sense strand
cuacaaccauccaucaucu

SEQ ID NO: 1524493 - RNA, 19 nt, Homo sapiens
  misc_RNA (1)...(19): siRNA sense strand
gauaagugguauggagaau

SEQ ID NO: 1524494 - RNA, 19 nt, Homo sapiens
  misc_RNA (1)...(19): siRNA sense strand
gaugaaauucggccuguuc

SEQ ID NO: 1524495 - RNA, 19 nt, Homo sapiens
  misc_RNA (1)...(19): siRNA sense strand
acacagucaucuuaccuau

SEQ ID NO: 1524496 - RNA, 19 nt, Homo sapiens
  misc_RNA (1)...(19): siRNA sense strand
ugagaagaaugccuacaag

SEQ ID NO: 1524497 - RNA, 19 nt, Homo sapiens
  misc_RNA (1)...(19): siRNA sense strand
aaccauccaucaucuuuau

SEQ ID NO: 1524498 - RNA, 19 nt, Homo sapiens
  misc_RNA (1)...(19): siRNA sense strand
uagaugaaauagacuccuu

SEQ ID NO: 1524499 - RNA, 19 nt, Homo sapiens
  misc_RNA (1)...(19): siRNA sense strand
cuuguagacccucuuaaua

SEQ ID NO: 1524500 - RNA, 19 nt, Homo sapiens
  misc_RNA (1)...(19): siRNA sense strand
uaucaaccagccugcuuua

SEQ ID NO: 1524501 - RNA, 19 nt, Homo sapiens
  misc_RNA (1)...(19): siRNA sense strand
cgaaaccguucaaguucug

SEQ ID NO: 1524502 - RNA, 19 nt, Homo sapiens
  misc_RNA (1)...(19): siRNA sense strand
gauauagcagguuuagaug

SEQ ID NO: 1524503 - RNA, 19 nt, Homo sapiens
  misc_RNA (1)...(19): siRNA sense strand
gaagaaaucaaaggaugca

SEQ ID NO: 1524504 - RNA, 19 nt, Homo sapiens
  misc_RNA (1)...(19): siRNA sense strand
ucacagcugccaggucaua

SEQ ID NO: 1524505 - RNA, 19 nt, Homo sapiens
  misc_RNA (1)...(19): siRNA sense strand
gaaauucggccuguucaac

SEQ ID NO: 1524506 - RNA, 19 nt, Homo sapiens
  misc_RNA (1)...(19): siRNA sense strand
agaagaaagccaugacgaa

SEQ ID NO: 1524507 - RNA, 19 nt, Homo sapiens
  misc_RNA (1)...(19): siRNA sense strand
caugaugaaagcucaguuu

SEQ ID NO: 1524508 - RNA, 19 nt, Homo sapiens
  misc_RNA (1)...(19): siRNA sense strand
ccaugacgaagaugaaauu

SEQ ID NO: 1524509 - RNA, 19 nt, Homo sapiens
  misc_RNA (1)...(19): siRNA sense strand
ggaagugaccuaaaagaga

SEQ ID NO: 1524510 - RNA, 19 nt, Homo sapiens
  misc_RNA (1)...(19): siRNA sense strand
caucuuguagacccucuua

SEQ ID NO: 1524511 - RNA, 19 nt, Homo sapiens
  misc_RNA (1)...(19): siRNA sense strand
agaagaaugccuacaagau

SEQ ID NO: 1524512 - RNA, 19 nt, Homo sapiens
  misc_RNA (1)...(19): siRNA sense strand
cuacagccaugaugaaagc

SEQ ID NO: 1524513 - RNA, 19 nt, Homo sapiens
  misc_RNA (1)...(19): siRNA sense strand
gaucugaaagacacaguca

SEQ ID NO: 1524514 - RNA, 19 nt, Homo sapiens
  misc_RNA (1)...(19): siRNA sense strand
gcucagaaacaggcagaaa

SEQ ID NO: 1524515 - RNA, 19 nt, Homo sapiens
  misc_RNA (1)...(19): siRNA sense strand
gcugcccuccucuguguua

SEQ ID NO: 1524516 - RNA, 19 nt, Homo sapiens
  misc_RNA (1)...(19): siRNA sense strand
guaaugggagcuaccaauc

SEQ ID NO: 1524517 - RNA, 19 nt, Homo sapiens
  misc_RNA (1)...(19): siRNA sense strand
gagucggaaugaaguuguu

SEQ ID NO: 1524518 - RNA, 19 nt, Homo sapiens
  misc_RNA (1)...(19): siRNA sense strand
uauugcugcucaucuugua

SEQ ID NO: 1524519 - RNA, 19 nt, Homo sapiens
  misc_RNA (1)...(19): siRNA sense strand
ugaagcaaauuggagugaa

SEQ ID NO: 1524520 - RNA, 19 nt, Homo sapiens
  misc_RNA (1)...(19): siRNA sense strand
ugucuucucccuugccaua

SEQ ID NO: 1524521 - RNA, 19 nt, Homo sapiens
  misc_RNA (1)...(19): siRNA sense strand
aaauguggauaggcaugua

SEQ ID NO: 1524522 - RNA, 19 nt, Homo sapiens
  misc_RNA (1)...(19): siRNA sense strand
acaaccauccaucaucuuu

SEQ ID NO: 1524523 - RNA, 19 nt, Homo sapiens
  misc_RNA (1)...(19): siRNA sense strand
caaggccacagccaaagaa

SEQ ID NO: 1524524 - RNA, 19 nt, Homo sapiens
  misc_RNA (1)...(19): siRNA sense strand
gcugccaggucauaguaau

SEQ ID NO: 1524525 - RNA, 19 nt, Homo sapiens
  misc_RNA (1)...(19): siRNA sense strand
cagcugccaggucauagua

SEQ ID NO: 1524526 - RNA, 19 nt, Homo sapiens
  misc_RNA (1)...(19): siRNA sense strand
ugaugaaagcucaguuuau

SEQ ID NO: 1524527 - RNA, 19 nt, Homo sapiens
  misc_RNA (1)...(19): siRNA sense strand
guucaaguucugaccauga

SEQ ID NO: 1524528 - RNA, 19 nt, Homo sapiens
  misc_RNA (1)...(19): siRNA sense strand
cauccaucaucuuuauaga

SEQ ID NO: 1524529 - RNA, 19 nt, Homo sapiens
  misc_RNA (1)...(19): siRNA sense strand
ggaccuugacucggcuaua

SEQ ID NO: 1524530 - RNA, 19 nt, Homo sapiens
  misc_RNA (1)...(19): siRNA sense strand
gaugaagaaaucaaaggau

SEQ ID NO: 1524531 - RNA, 19 nt, Homo sapiens
  misc_RNA (1)...(19): siRNA sense strand
uagcagguuuagaugaugu

SEQ ID NO: 1524532 - RNA, 19 nt, Homo sapiens
  misc_RNA (1)...(19): siRNA sense strand
gcuauaaugagaagaaugc

SEQ ID NO: 1524533 - RNA, 19 nt, Homo sapiens
  misc_RNA (1)...(19): siRNA sense strand
gacacagucaucuuaccua

SEQ ID NO: 1524534 - RNA, 19 nt, Homo sapiens
  misc_RNA (1)...(19): siRNA sense strand
uuguagacccucuuaauau

SEQ ID NO: 1524535 - RNA, 19 nt, Homo sapiens
  misc_RNA (1)...(19): siRNA sense strand
uccugaaacucaucuugaa

SEQ ID NO: 1524536 - RNA, 19 nt, Homo sapiens
  misc_RNA (1)...(19): siRNA sense strand
ucucugggauggauuggau

SEQ ID NO: 1524537 - RNA, 19 nt, Homo sapiens
  misc_RNA (1)...(19): siRNA sense strand
gcuacaaccauccaucauc

SEQ ID NO: 1524538 - RNA, 19 nt, Homo sapiens
  misc_RNA (1)...(19): siRNA sense strand
caagauuucauaucaacca

SEQ ID NO: 1524539 - RNA, 19 nt, Homo sapiens
  misc_RNA (1)...(19): siRNA sense strand
aauauuuggugcagugaca

SEQ ID NO: 1524540 - RNA, 19 nt, Homo sapiens
  misc_RNA (1)...(19): siRNA sense strand
aagaaagccaugacgaaga

SEQ ID NO: 1524541 - RNA, 19 nt, Homo sapiens
  misc_RNA (1)...(19): siRNA sense strand
aaaaguagaagcucagaaa

SEQ ID NO: 1524542 - RNA, 19 nt, Homo sapiens
  misc_RNA (1)...(19): siRNA sense strand
ucauccagcuucucucuga

SEQ ID NO: 1524543 - RNA, 19 nt, Homo sapiens
  misc_RNA (1)...(19): siRNA sense strand
gcaguacucacucaaguuc

SEQ ID NO: 1524544 - RNA, 19 nt, Homo sapiens
  misc_RNA (1)...(19): siRNA sense strand
gcaugagguucaccaccaa

SEQ ID NO: 1524545 - RNA, 19 nt, Homo sapiens
  misc_RNA (1)...(19): siRNA sense strand
ucagcgcccugcagaguga

SEQ ID NO: 1524546 - RNA, 19 nt, Homo sapiens
  misc_RNA (1)...(19): siRNA sense strand
gcuuccagguguacuguga

SEQ ID NO: 1524547 - RNA, 19 nt, Homo sapiens
  misc_RNA (1)...(19): siRNA sense strand
ggcuagggcucaagaggau

SEQ ID NO: 1524548 - RNA, 19 nt, Homo sapiens
  misc_RNA (1)...(19): siRNA sense strand
caacugugccgccuucuac

SEQ ID NO: 1524549 - RNA, 19 nt, Homo sapiens
  misc_RNA (1)...(19): siRNA sense strand
gcgacucccuccugaagca

SEQ ID NO: 1524550 - RNA, 19 nt, Homo sapiens
  misc_RNA (1)...(19): siRNA sense strand
gcaccucagcauccucauu

SEQ ID NO: 1524551 - RNA, 19 nt, Homo sapiens
  misc_RNA (1)...(19): siRNA sense strand
gagaauggcacggccuaug

SEQ ID NO: 1524552 - RNA, 19 nt, Homo sapiens
  misc_RNA (1)...(19): siRNA sense strand
caccucagcauccucauug

SEQ ID NO: 1524553 - RNA, 19 nt, Homo sapiens
  misc_RNA (1)...(19): siRNA sense strand
gcaacugccacacguccaa

SEQ ID NO: 1524554 - RNA, 19 nt, Homo sapiens
  misc_RNA (1)...(19): siRNA sense strand
caacagcgccguggucacu

SEQ ID NO: 1524555 - RNA, 19 nt, Homo sapiens
  misc_RNA (1)...(19): siRNA sense strand
gauggcgucuacucugucu

SEQ ID NO: 1524556 - RNA, 19 nt, Homo sapiens
  misc_RNA (1)...(19): siRNA sense strand
ccacacguccaaccucaau

SEQ ID NO: 1524557 - RNA, 19 nt, Homo sapiens
  misc_RNA (1)...(19): siRNA sense strand
uggaggacuuugagaaugg

SEQ ID NO: 1524558 - RNA, 19 nt, Homo sapiens
  misc_RNA (1)...(19): siRNA sense strand
gugccgugcucuuccugaa

SEQ ID NO: 1524559 - RNA, 19 nt, Homo sapiens
  misc_RNA (1)...(19): siRNA sense strand
uggcaguacucacucaagu

SEQ ID NO: 1524560 - RNA, 19 nt, Homo sapiens
  misc_RNA (1)...(19): siRNA sense strand
gaacuccgucagcgacauc

SEQ ID NO: 1524561 - RNA, 19 nt, Homo sapiens
  misc_RNA (1)...(19): siRNA sense strand
caaccucaaugggcaguac

SEQ ID NO: 1524562 - RNA, 19 nt, Homo sapiens
  misc_RNA (1)...(19): siRNA sense strand
ccagguguacugugacaug

SEQ ID NO: 1524563 - RNA, 19 nt, Homo sapiens
  misc_RNA (1)...(19): siRNA sense strand
cagcgaccauucagagaac

SEQ ID NO: 1524564 - RNA, 19 nt, Homo sapiens
  misc_RNA (1)...(19): siRNA sense strand
uggcgucuacucugucuuu

SEQ ID NO: 1524565 - RNA, 19 nt, Homo sapiens
  misc_RNA (1)...(19): siRNA sense strand
cuggaggacuuugagaaug

SEQ ID NO: 1524566 - RNA, 19 nt, Homo sapiens
  misc_RNA (1)...(19): siRNA sense strand
caccguggcugacuauucc

SEQ ID NO: 1524567 - RNA, 19 nt, Homo sapiens
  misc_RNA (1)...(19): siRNA sense strand
gcucaccguggcugacuau

SEQ ID NO: 1524568 - RNA, 19 nt, Homo sapiens
  misc_RNA (1)...(19): siRNA sense strand
ggcaguacucacucaaguu

SEQ ID NO: 1524569 - RNA, 19 nt, Homo sapiens
  misc_RNA (1)...(19): siRNA sense strand
gacagcgaccauucagaga

SEQ ID NO: 1524570 - RNA, 19 nt, Homo sapiens
  misc_RNA (1)...(19): siRNA sense strand
ugucuggacguccuccuaa

SEQ ID NO: 1524571 - RNA, 19 nt, Homo sapiens
  misc_RNA (1)...(19): siRNA sense strand
ucaccguggcugacuauuc

SEQ ID NO: 1524572 - RNA, 19 nt, Homo sapiens
  misc_RNA (1)...(19): siRNA sense strand
ggaccuggaggacuuugag

SEQ ID NO: 1524573 - RNA, 19 nt, Homo sapiens
  misc_RNA (1)...(19): siRNA sense strand
gaagagagcuccaguuuau

SEQ ID NO: 1524574 - RNA, 19 nt, Homo sapiens
  misc_RNA (1)...(19): siRNA sense strand
gaaagucagugccacauua

SEQ ID NO: 1524575 - RNA, 19 nt, Homo sapiens
  misc_RNA (1)...(19): siRNA sense strand
ucaaagaaccucuguauua

SEQ ID NO: 1524576 - RNA, 19 nt, Homo sapiens
  misc_RNA (1)...(19): siRNA sense strand
gaagaugauuugacaguaa

SEQ ID NO: 1524577 - RNA, 19 nt, Homo sapiens
  misc_RNA (1)...(19): siRNA sense strand
ggaaauagcgcuucugaaa

SEQ ID NO: 1524578 - RNA, 19 nt, Homo sapiens
  misc_RNA (1)...(19): siRNA sense strand
ggaagugguuucuauguuu

SEQ ID NO: 1524579 - RNA, 19 nt, Homo sapiens
  misc_RNA (1)...(19): siRNA sense strand
cuacaagucuuucacauuu

SEQ ID NO: 1524580 - RNA, 19 nt, Homo sapiens
  misc_RNA (1)...(19): siRNA sense strand
gaaauggucuaaugauugu

SEQ ID NO: 1524581 - RNA, 19 nt, Homo sapiens
  misc_RNA (1)...(19): siRNA sense strand
gaaaugcccugcuucuguu

SEQ ID NO: 1524582 - RNA, 19 nt, Homo sapiens
  misc_RNA (1)...(19): siRNA sense strand
gagauuuccuugauuaaga

SEQ ID NO: 1524583 - RNA, 19 nt, Homo sapiens
  misc_RNA (1)...(19): siRNA sense strand
ggaaauggucuaaugauug

SEQ ID NO: 1524584 - RNA, 19 nt, Homo sapiens
  misc_RNA (1)...(19): siRNA sense strand
gaaagcaguacauggauaa

SEQ ID NO: 1524585 - RNA, 19 nt, Homo sapiens
  misc_RNA (1)...(19): siRNA sense strand
aguaauagcuuggagauuu

SEQ ID NO: 1524586 - RNA, 19 nt, Homo sapiens
  misc_RNA (1)...(19): siRNA sense strand
aaauauggaugaagacgua

SEQ ID NO: 1524587 - RNA, 19 nt, Homo sapiens
  misc_RNA (1)...(19): siRNA sense strand
gcaaguagcaagccuagaa

SEQ ID NO: 1524588 - RNA, 19 nt, Homo sapiens
  misc_RNA (1)...(19): siRNA sense strand
gcuaguaauuggagauaaa

SEQ ID NO: 1524589 - RNA, 19 nt, Homo sapiens
  misc_RNA (1)...(19): siRNA sense strand
gcacugugauucaugguau

SEQ ID NO: 1524590 - RNA, 19 nt, Homo sapiens
  misc_RNA (1)...(19): siRNA sense strand
cauaguggauccuaaagaa

SEQ ID NO: 1524591 - RNA, 19 nt, Homo sapiens
  misc_RNA (1)...(19): siRNA sense strand
auaauuaccugcacuguga

SEQ ID NO: 1524592 - RNA, 19 nt, Homo sapiens
  misc_RNA (1)...(19): siRNA sense strand
ggcaacaaaugagagauua

SEQ ID NO: 1524593 - RNA, 19 nt, Homo sapiens
  misc_RNA (1)...(19): siRNA sense strand
caaagaaccucuguauuac

SEQ ID NO: 1524594 - RNA, 19 nt, Homo sapiens
  misc_RNA (1)...(19): siRNA sense strand
uugcaaugcucaagaguua

SEQ ID NO: 1524595 - RNA, 19 nt, Homo sapiens
  misc_RNA (1)...(19): siRNA sense strand
gaauccaaauccagauaaa

SEQ ID NO: 1524596 - RNA, 19 nt, Homo sapiens
  misc_RNA (1)...(19): siRNA sense strand
gaauagagaaagaggaauu

SEQ ID NO: 1524597 - RNA, 19 nt, Homo sapiens
  misc_RNA (1)...(19): siRNA sense strand
gcuaaaugcugaagaacau

SEQ ID NO: 1524598 - RNA, 19 nt, Homo sapiens
  misc_RNA (1)...(19): siRNA sense strand
agcaguacauggauaauua

SEQ ID NO: 1524599 - RNA, 19 nt, Homo sapiens
  misc_RNA (1)...(19): siRNA sense strand
ugaaagcaguacauggaua

SEQ ID NO: 1524600 - RNA, 19 nt, Homo sapiens
  misc_RNA (1)...(19): siRNA sense strand
gcaacagacugaagaugau

SEQ ID NO: 1524601 - RNA, 19 nt, Homo sapiens
  misc_RNA (1)...(19): siRNA sense strand
ggaauuggauaugaaagga

SEQ ID NO: 1524602 - RNA, 19 nt, Homo sapiens
  misc_RNA (1)...(19): siRNA sense strand
gggagcacaucgcaacuuu

SEQ ID NO: 1524603 - RNA, 19 nt, Homo sapiens
  misc_RNA (1)...(19): siRNA sense strand
cugaagaacugaauccaaa

SEQ ID NO: 1524604 - RNA, 19 nt, Homo sapiens
  misc_RNA (1)...(19): siRNA sense strand
ggaaaacucuauucaucua

SEQ ID NO: 1524605 - RNA, 19 nt, Homo sapiens
  misc_RNA (1)...(19): siRNA sense strand
ugcaauagcugaacguuug

SEQ ID NO: 1524606 - RNA, 19 nt, Homo sapiens
  misc_RNA (1)...(19): siRNA sense strand
gaagugguuucuauguuuc

SEQ ID NO: 1524607 - RNA, 19 nt, Homo sapiens
  misc_RNA (1)...(19): siRNA sense strand
uaaggaggacauucaaaua

SEQ ID NO: 1524608 - RNA, 19 nt, Homo sapiens
  misc_RNA (1)...(19): siRNA sense strand
aaagaggaauuggauauga

SEQ ID NO: 1524609 - RNA, 19 nt, Homo sapiens
  misc_RNA (1)...(19): siRNA sense strand
gcacaucgcaacuuucaau

SEQ ID NO: 1524610 - RNA, 19 nt, Homo sapiens
  misc_RNA (1)...(19): siRNA sense strand
ggaagcaaccaguaccuuu

SEQ ID NO: 1524611 - RNA, 19 nt, Homo sapiens
  misc_RNA (1)...(19): siRNA sense strand
cuaaagaaaugcccugcuu

SEQ ID NO: 1524612 - RNA, 19 nt, Homo sapiens
  misc_RNA (1)...(19): siRNA sense strand
ggccagagcuaguaauugg

SEQ ID NO: 1524613 - RNA, 19 nt, Homo sapiens
  misc_RNA (1)...(19): siRNA sense strand
agauggaacuggaagauug

SEQ ID NO: 1524614 - RNA, 19 nt, Homo sapiens
  misc_RNA (1)...(19): siRNA sense strand
gcugaacguuugaugcauu

SEQ ID NO: 1524615 - RNA, 19 nt, Homo sapiens
  misc_RNA (1)...(19): siRNA sense strand
guaauagcuuggagauuuc

SEQ ID NO: 1524616 - RNA, 19 nt, Homo sapiens
  misc_RNA (1)...(19): siRNA sense strand
gcauuugaccucugaagaa

SEQ ID NO: 1524617 - RNA, 19 nt, Homo sapiens
  misc_RNA (1)...(19): siRNA sense strand
uuggagauuuccuugauua

SEQ ID NO: 1524618 - RNA, 19 nt, Homo sapiens
  misc_RNA (1)...(19): siRNA sense strand
cgagagguguuucgacuuc

SEQ ID NO: 1524619 - RNA, 19 nt, Homo sapiens
  misc_RNA (1)...(19): siRNA sense strand
ugauggaaauggucuaaug

SEQ ID NO: 1524620 - RNA, 19 nt, Homo sapiens
  misc_RNA (1)...(19): siRNA sense strand
ugaagaugauuugacagua

SEQ ID NO: 1524621 - RNA, 19 nt, Homo sapiens
  misc_RNA (1)...(19): siRNA sense strand
gaacguuugaugcauuuga

SEQ ID NO: 1524622 - RNA, 19 nt, Homo sapiens
  misc_RNA (1)...(19): siRNA sense strand
guacuaaggaggacauuca

SEQ ID NO: 1524623 - RNA, 19 nt, Homo sapiens
  misc_RNA (1)...(19): siRNA sense strand
gcuggacacugccuuagga

SEQ ID NO: 1524624 - RNA, 19 nt, Homo sapiens
  misc_RNA (1)...(19): siRNA sense strand
uugagccgcugccuuguua

SEQ ID NO: 1524625 - RNA, 19 nt, Homo sapiens
  misc_RNA (1)...(19): siRNA sense strand
gaaaccaaugauccuauuu

SEQ ID NO: 1524626 - RNA, 19 nt, Homo sapiens
  misc_RNA (1)...(19): siRNA sense strand
gagcacaucgcaacuuuca

SEQ ID NO: 1524627 - RNA, 19 nt, Homo sapiens
  misc_RNA (1)...(19): siRNA sense strand
ggacauucaaauacaguuu

SEQ ID NO: 1524628 - RNA, 19 nt, Homo sapiens
  misc_RNA (1)...(19): siRNA sense strand
uggaaauggucuaaugauu

SEQ ID NO: 1524629 - RNA, 19 nt, Homo sapiens
  misc_RNA (1)...(19): siRNA sense strand
gaaagaggaauuggauaug

SEQ ID NO: 1524630 - RNA, 19 nt, Homo sapiens
  misc_RNA (1)...(19): siRNA sense strand
gaacuggaagauuguaugu

SEQ ID NO: 1524631 - RNA, 19 nt, Homo sapiens
  misc_RNA (1)...(19): siRNA sense strand
gauaugaaaggaagugguu

SEQ ID NO: 1524632 - RNA, 19 nt, Homo sapiens
  misc_RNA (1)...(19): siRNA sense strand
gcaaacaagaugauaugug

SEQ ID NO: 1524633 - RNA, 19 nt, Homo sapiens
  misc_RNA (1)...(19): siRNA sense strand
ugaagagagcuccaguuua

SEQ ID NO: 1524634 - RNA, 19 nt, Homo sapiens
  misc_RNA (1)...(19): siRNA sense strand
gacugaagaugauuugaca

SEQ ID NO: 1524635 - RNA, 19 nt, Homo sapiens
  misc_RNA (1)...(19): siRNA sense strand
uggaacacaugcaugcuuu

SEQ ID NO: 1524636 - RNA, 19 nt, Homo sapiens
  misc_RNA (1)...(19): siRNA sense strand
agaaaccaaugauccuauu

SEQ ID NO: 1524637 - RNA, 19 nt, Homo sapiens
  misc_RNA (1)...(19): siRNA sense strand
gcucaagaguuagaagaau

SEQ ID NO: 1524638 - RNA, 19 nt, Homo sapiens
  misc_RNA (1)...(19): siRNA sense strand
gcaguacauggauaauuaa

SEQ ID NO: 1524639 - RNA, 19 nt, Homo sapiens
  misc_RNA (1)...(19): siRNA sense strand
ggcaacagacugaagauga

SEQ ID NO: 1524640 - RNA, 19 nt, Homo sapiens
  misc_RNA (1)...(19): siRNA sense strand
gaugaagacguaucagaga

SEQ ID NO: 1524641 - RNA, 19 nt, Homo sapiens
  misc_RNA (1)...(19): siRNA sense strand
gagaaagaggaauuggaua

SEQ ID NO: 1524642 - RNA, 19 nt, Homo sapiens
  misc_RNA (1)...(19): siRNA sense strand
ggaagauuguaugucauug

SEQ ID NO: 1524643 - RNA, 19 nt, Homo sapiens
  misc_RNA (1)...(19): siRNA sense strand
gaacuuggggauccuuuua

SEQ ID NO: 1524644 - RNA, 19 nt, Homo sapiens
  misc_RNA (1)...(19): siRNA sense strand
gcaaugcucaagaguuaga

SEQ ID NO: 1524645 - RNA, 19 nt, Homo sapiens
  misc_RNA (1)...(19): siRNA sense strand
gauggaaauggucuaauga

SEQ ID NO: 1524646 - RNA, 19 nt, Homo sapiens
  misc_RNA (1)...(19): siRNA sense strand
ggaaagucagugccacauu

SEQ ID NO: 1524647 - RNA, 19 nt, Homo sapiens
  misc_RNA (1)...(19): siRNA sense strand
gaagaacugaauccaaauc

SEQ ID NO: 1524648 - RNA, 19 nt, Homo sapiens
  misc_RNA (1)...(19): siRNA sense strand
gcuuggagauuuccuugau

SEQ ID NO: 1524649 - RNA, 19 nt, Homo sapiens
  misc_RNA (1)...(19): siRNA sense strand
caaccacacuccagcaaac

SEQ ID NO: 1524650 - RNA, 19 nt, Homo sapiens
  misc_RNA (1)...(19): siRNA sense strand
uagcaagccuagaaaccaa

SEQ ID NO: 1524651 - RNA, 19 nt, Homo sapiens
  misc_RNA (1)...(19): siRNA sense strand
uggguuaccuugucagaug

SEQ ID NO: 1524652 - RNA, 19 nt, Homo sapiens
  misc_RNA (1)...(19): siRNA sense strand
aaucaaagaaccucuguau

SEQ ID NO: 1524653 - RNA, 19 nt, Homo sapiens
  misc_RNA (1)...(19): siRNA sense strand
agaaagaggaauuggauau

SEQ ID NO: 1524654 - RNA, 19 nt, Homo sapiens
  misc_RNA (1)...(19): siRNA sense strand
gaaauagcgcuucugaaaa

SEQ ID NO: 1524655 - RNA, 19 nt, Homo sapiens
  misc_RNA (1)...(19): siRNA sense strand
ucgcaacuuucaaugcuuu

SEQ ID NO: 1524656 - RNA, 19 nt, Homo sapiens
  misc_RNA (1)...(19): siRNA sense strand
ccaaauccagauaaagaaa

SEQ ID NO: 1524657 - RNA, 19 nt, Homo sapiens
  misc_RNA (1)...(19): siRNA sense strand
aagaggaauuggauaugaa

SEQ ID NO: 1524658 - RNA, 19 nt, Homo sapiens
  misc_RNA (1)...(19): siRNA sense strand
uacccuacuucuucgaaua

SEQ ID NO: 1524659 - RNA, 19 nt, Homo sapiens
  misc_RNA (1)...(19): siRNA sense strand
cuauugagccugauggaaa

SEQ ID NO: 1524660 - RNA, 19 nt, Homo sapiens
  misc_RNA (1)...(19): siRNA sense strand
uuucaaugcuuuaggcuau

SEQ ID NO: 1524661 - RNA, 19 nt, Homo sapiens
  misc_RNA (1)...(19): siRNA sense strand
cuacucauguggugaaucu

SEQ ID NO: 1524662 - RNA, 19 nt, Homo sapiens
  misc_RNA (1)...(19): siRNA sense strand
gagcuaguaauuggagaua

SEQ ID NO: 1524663 - RNA, 19 nt, Homo sapiens
  misc_RNA (1)...(19): siRNA sense strand
acuggaagauuguauguca

SEQ ID NO: 1524664 - RNA, 19 nt, Homo sapiens
  misc_RNA (1)...(19): siRNA sense strand
cagcaaacaagaugauaug

SEQ ID NO: 1524665 - RNA, 19 nt, Homo sapiens
  misc_RNA (1)...(19): siRNA sense strand
gauuugauggcaauacauu

SEQ ID NO: 1524666 - RNA, 19 nt, Homo sapiens
  misc_RNA (1)...(19): siRNA sense strand
caucaacauuguacugaag

SEQ ID NO: 1524667 - RNA, 19 nt, Homo sapiens
  misc_RNA (1)...(19): siRNA sense strand
cagaagacaguacuaagga

SEQ ID NO: 1524668 - RNA, 19 nt, Homo sapiens
  misc_RNA (1)...(19): siRNA sense strand
gauacccuuggaagaauua

SEQ ID NO: 1524669 - RNA, 19 nt, Homo sapiens
  misc_RNA (1)...(19): siRNA sense strand
aagaaccucuguauuacug

SEQ ID NO: 1524670 - RNA, 19 nt, Homo sapiens
  misc_RNA (1)...(19): siRNA sense strand
cagauuugauggcaauaca

SEQ ID NO: 1524671 - RNA, 19 nt, Homo sapiens
  misc_RNA (1)...(19): siRNA sense strand
ugagugccuucgucgagua

SEQ ID NO: 1524672 - RNA, 19 nt, Homo sapiens
  misc_RNA (1)...(19): siRNA sense strand
gcaaccacacuccagcaaa

SEQ ID NO: 1524673 - RNA, 19 nt, Homo sapiens
  misc_RNA (1)...(19): siRNA sense strand
gagagaaagucuaugauug

SEQ ID NO: 1524674 - RNA, 19 nt, Homo sapiens
  misc_RNA (1)...(19): siRNA sense strand
gagaaagucuaugauugua

SEQ ID NO: 1524675 - RNA, 19 nt, Homo sapiens
  misc_RNA (1)...(19): siRNA sense strand
gagaaagccuugaagaagu

SEQ ID NO: 1524676 - RNA, 19 nt, Homo sapiens
  misc_RNA (1)...(19): siRNA sense strand
gaaggaaucuugccucacu

SEQ ID NO: 1524677 - RNA, 19 nt, Homo sapiens
  misc_RNA (1)...(19): siRNA sense strand
gaaagucuaugauuguaag

SEQ ID NO: 1524678 - RNA, 19 nt, Homo sapiens
  misc_RNA (1)...(19): siRNA sense strand
uaagaaaugugggaaauuc

SEQ ID NO: 1524679 - RNA, 19 nt, Homo sapiens
  misc_RNA (1)...(19): siRNA sense strand
ggagagaaagucuaugauu

SEQ ID NO: 1524680 - RNA, 19 nt, Homo sapiens
  misc_RNA (1)...(19): siRNA sense strand
gaaaugugggaaauucuuu

SEQ ID NO: 1524681 - RNA, 19 nt, Homo sapiens
  misc_RNA (1)...(19): siRNA sense strand
gaaguuauaccauacucaa

SEQ ID NO: 1524682 - RNA, 19 nt, Homo sapiens
  misc_RNA (1)...(19): siRNA sense strand
gcaaguguaaugauaguga

SEQ ID NO: 1524683 - RNA, 19 nt, Homo sapiens
  misc_RNA (1)...(19): siRNA sense strand
agaaagccuugaagaaguu

SEQ ID NO: 1524684 - RNA, 19 nt, Homo sapiens
  misc_RNA (1)...(19): siRNA sense strand
ccugaugaguguaaagaaa

SEQ ID NO: 1524685 - RNA, 19 nt, Homo sapiens
  misc_RNA (1)...(19): siRNA sense strand
gguaauaaaugugagaaac

SEQ ID NO: 1524686 - RNA, 19 nt, Homo sapiens
  misc_RNA (1)...(19): siRNA sense strand
ugaagaaguuauaccauac

SEQ ID NO: 1524687 - RNA, 19 nt, Homo sapiens
  misc_RNA (1)...(19): siRNA sense strand
cccagcaaguguaaugaua

SEQ ID NO: 1524688 - RNA, 19 nt, Homo sapiens
  misc_RNA (1)...(19): siRNA sense strand
aagcaugccuuacucaaca

SEQ ID NO: 1524689 - RNA, 19 nt, Homo sapiens
  misc_RNA (1)...(19): siRNA sense strand
caaguguaaugauagugaa

SEQ ID NO: 1524690 - RNA, 19 nt, Homo sapiens
  misc_RNA (1)...(19): siRNA sense strand
caggagagaaagucuauga

SEQ ID NO: 1524691 - RNA, 19 nt, Homo sapiens
  misc_RNA (1)...(19): siRNA sense strand
ucagagaacccacacaaca

SEQ ID NO: 1524692 - RNA, 19 nt, Homo sapiens
  misc_RNA (1)...(19): siRNA sense strand
guaaugauagugaaagagu

SEQ ID NO: 1524693 - RNA, 19 nt, Homo sapiens
  misc_RNA (1)...(19): siRNA sense strand
guaagaaaugugggaaauu

SEQ ID NO: 1524694 - RNA, 19 nt, Homo sapiens
  misc_RNA (1)...(19): siRNA sense strand
gaacccacacaacaggaaa

SEQ ID NO: 1524695 - RNA, 19 nt, Homo sapiens
  misc_RNA (1)...(19): siRNA sense strand
uguaagaaaugugggaaau

SEQ ID NO: 1524696 - RNA, 19 nt, Homo sapiens
  misc_RNA (1)...(19): siRNA sense strand
agagaaagucuaugauugu

SEQ ID NO: 1524697 - RNA, 19 nt, Homo sapiens
  misc_RNA (1)...(19): siRNA sense strand
ugagaaagccuugaagaag

SEQ ID NO: 1524698 - RNA, 19 nt, Homo sapiens
  misc_RNA (1)...(19): siRNA sense strand
cagcaaguguaaugauagu

SEQ ID NO: 1524699 - RNA, 19 nt, Homo sapiens
  misc_RNA (1)...(19): siRNA sense strand
gaaagccuugaagaaguua

SEQ ID NO: 1524700 - RNA, 19 nt, Homo sapiens
  misc_RNA (1)...(19): siRNA sense strand
caucagagaacccacacaa

SEQ ID NO: 1524701 - RNA, 19 nt, Homo sapiens
  misc_RNA (1)...(19): siRNA sense strand
gaacucaugcaggagagaa

SEQ ID NO: 1524702 - RNA, 19 nt, Homo sapiens
  misc_RNA (1)...(19): siRNA sense strand
gaaaacccagcaaguguaa

SEQ ID NO: 1524703 - RNA, 19 nt, Homo sapiens
  misc_RNA (1)...(19): siRNA sense strand
ggaaaacccagcaagugua

SEQ ID NO: 1524704 - RNA, 19 nt, Homo sapiens
  misc_RNA (1)...(19): siRNA sense strand
guguaaugauagugaaaga

SEQ ID NO: 1524705 - RNA, 19 nt, Homo sapiens
  misc_RNA (1)...(19): siRNA sense strand
aaacccagcaaguguaaug

SEQ ID NO: 1524706 - RNA, 19 nt, Homo sapiens
  misc_RNA (1)...(19): siRNA sense strand
gaagaaguuauaccauacu

SEQ ID NO: 1524707 - RNA, 19 nt, Homo sapiens
  misc_RNA (1)...(19): siRNA sense strand
aaugagaaagccuugaaga

SEQ ID NO: 1524708 - RNA, 19 nt, Homo sapiens
  misc_RNA (1)...(19): siRNA sense strand
ccagcaaguguaaugauag

SEQ ID NO: 1524709 - RNA, 19 nt, Homo sapiens
  misc_RNA (1)...(19): siRNA sense strand
caaauaaacccuuggauug

SEQ ID NO: 1524710 - RNA, 19 nt, Homo sapiens
  misc_RNA (1)...(19): siRNA sense strand
gcaaaguucugcaccaaau

SEQ ID NO: 1524711 - RNA, 19 nt, Homo sapiens
  misc_RNA (1)...(19): siRNA sense strand
uaaaggcucugcaaaguuc

SEQ ID NO: 1524712 - RNA, 19 nt, Homo sapiens
  misc_RNA (1)...(19): siRNA sense strand
caagagagcugggaaacuc

SEQ ID NO: 1524713 - RNA, 19 nt, Homo sapiens
  misc_RNA (1)...(19): siRNA sense strand
ccaaugccauguuuccaaa

SEQ ID NO: 1524714 - RNA, 19 nt, Homo sapiens
  misc_RNA (1)...(19): siRNA sense strand
caacacagacaguacaaug

SEQ ID NO: 1524715 - RNA, 19 nt, Homo sapiens
  misc_RNA (1)...(19): siRNA sense strand
gacaguacaaugacaaauu

SEQ ID NO: 1524716 - RNA, 19 nt, Homo sapiens
  misc_RNA (1)...(19): siRNA sense strand
ggaaacucuuggacaguca

SEQ ID NO: 1524717 - RNA, 19 nt, Homo sapiens
  misc_RNA (1)...(19): siRNA sense strand
gccacaggcugaaguguca

SEQ ID NO: 1524718 - RNA, 19 nt, Homo sapiens
  misc_RNA (1)...(19): siRNA sense strand
caaaguucugcaccaaaua

SEQ ID NO: 1524719 - RNA, 19 nt, Homo sapiens
  misc_RNA (1)...(19): siRNA sense strand
ucaaacaacacagacagua

SEQ ID NO: 1524720 - RNA, 19 nt, Homo sapiens
  misc_RNA (1)...(19): siRNA sense strand
aaaguucugcaccaaauaa

SEQ ID NO: 1524721 - RNA, 19 nt, Homo sapiens
  misc_RNA (1)...(19): siRNA sense strand
ccaaggggcugaagauaga

SEQ ID NO: 1524722 - RNA, 19 nt, Homo sapiens
  misc_RNA (1)...(19): siRNA sense strand
aauuggagaucagcucuaa

SEQ ID NO: 1524723 - RNA, 19 nt, Homo sapiens
  misc_RNA (1)...(19): siRNA sense strand
ugucaacacuucaaacaac

SEQ ID NO: 1524724 - RNA, 19 nt, Homo sapiens
  misc_RNA (1)...(19): siRNA sense strand
aaacaacacagacaguaca

SEQ ID NO: 1524725 - RNA, 19 nt, Homo sapiens
  misc_RNA (1)...(19): siRNA sense strand
gguauuaaaggcucugcaa

SEQ ID NO: 1524726 - RNA, 19 nt, Homo sapiens
  misc_RNA (1)...(19): siRNA sense strand
guauuaaaggcucugcaaa

SEQ ID NO: 1524727 - RNA, 19 nt, Homo sapiens
  misc_RNA (1)...(19): siRNA sense strand
auuaaaggcucugcaaagu

SEQ ID NO: 1524728 - RNA, 19 nt, Homo sapiens
  misc_RNA (1)...(19): siRNA sense strand
uuaaaggcucugcaaaguu

SEQ ID NO: 1524729 - RNA, 19 nt, Homo sapiens
  misc_RNA (1)...(19): siRNA sense strand
gucaacacuucaaacaaca

SEQ ID NO: 1524730 - RNA, 19 nt, Homo sapiens
  misc_RNA (1)...(19): siRNA sense strand
uugauccaaugccauguuu

SEQ ID NO: 1524731 - RNA, 19 nt, Homo sapiens
  misc_RNA (1)...(19): siRNA sense strand
caaacaacacagacaguac

SEQ ID NO: 1524732 - RNA, 19 nt, Homo sapiens
  misc_RNA (1)...(19): siRNA sense strand
aaugacaaauuggagauca

SEQ ID NO: 1524733 - RNA, 19 nt, Homo sapiens
  misc_RNA (1)...(19): siRNA sense strand
augcauugcugaauauucu

SEQ ID NO: 1524734 - RNA, 19 nt, Homo sapiens
  misc_RNA (1)...(19): siRNA sense strand
uauuaaaggcucugcaaag

SEQ ID NO: 1524735 - RNA, 19 nt, Homo sapiens
  misc_RNA (1)...(19): siRNA sense strand
aaauaaacccuuggauugg

SEQ ID NO: 1524736 - RNA, 19 nt, Homo sapiens
  misc_RNA (1)...(19): siRNA sense strand
gagcugggaaacucuugga

SEQ ID NO: 1524737 - RNA, 19 nt, Homo sapiens
  misc_RNA (1)...(19): siRNA sense strand
acacuucaaacaacacaga

SEQ ID NO: 1524738 - RNA, 19 nt, Homo sapiens
  misc_RNA (1)...(19): siRNA sense strand
cacagacaguacaaugaca

SEQ ID NO: 1524739 - RNA, 19 nt, Homo sapiens
  misc_RNA (1)...(19): siRNA sense strand
caacacuucaaacaacaca

SEQ ID NO: 1524740 - RNA, 19 nt, Homo sapiens
  misc_RNA (1)...(19): siRNA sense strand
gcugaauauucuucugaac

SEQ ID NO: 1524741 - RNA, 19 nt, Homo sapiens
  misc_RNA (1)...(19): siRNA sense strand
gcauugcugaauauucuuc

SEQ ID NO: 1524742 - RNA, 19 nt, Homo sapiens
  misc_RNA (1)...(19): siRNA sense strand
cagacaguacaaugacaaa

SEQ ID NO: 1524743 - RNA, 19 nt, Homo sapiens
  misc_RNA (1)...(19): siRNA sense strand
gagagaagguugcagagaa

SEQ ID NO: 1524744 - RNA, 19 nt, Homo sapiens
  misc_RNA (1)...(19): siRNA sense strand
gaggagcgguucaagauga

SEQ ID NO: 1524745 - RNA, 19 nt, Homo sapiens
  misc_RNA (1)...(19): siRNA sense strand
uaagaggguuauagcaaua

SEQ ID NO: 1524746 - RNA, 19 nt, Homo sapiens
  misc_RNA (1)...(19): siRNA sense strand
caacaccacugcuaccauu

SEQ ID NO: 1524747 - RNA, 19 nt, Homo sapiens
  misc_RNA (1)...(19): siRNA sense strand
gaugguggcuuuacuguca

SEQ ID NO: 1524748 - RNA, 19 nt, Homo sapiens
  misc_RNA (1)...(19): siRNA sense strand
gcagagaacacaucuuaga

SEQ ID NO: 1524749 - RNA, 19 nt, Homo sapiens
  misc_RNA (1)...(19): siRNA sense strand
ggagguaucucagcguuug

SEQ ID NO: 1524750 - RNA, 19 nt, Homo sapiens
  misc_RNA (1)...(19): siRNA sense strand
gagaagccauaucccauug

SEQ ID NO: 1524751 - RNA, 19 nt, Homo sapiens
  misc_RNA (1)...(19): siRNA sense strand
gaacaagcaacaaagagaa

SEQ ID NO: 1524752 - RNA, 19 nt, Homo sapiens
  misc_RNA (1)...(19): siRNA sense strand
caaauaugcaguacaauug

SEQ ID NO: 1524753 - RNA, 19 nt, Homo sapiens
  misc_RNA (1)...(19): siRNA sense strand
ccaagcagcuggaacaaca

SEQ ID NO: 1524754 - RNA, 19 nt, Homo sapiens
  misc_RNA (1)...(19): siRNA sense strand
gcugguacguucagaugua

SEQ ID NO: 1524755 - RNA, 19 nt, Homo sapiens
  misc_RNA (1)...(19): siRNA sense strand
aaagagaaacuccagauuu

SEQ ID NO: 1524756 - RNA, 19 nt, Homo sapiens
  misc_RNA (1)...(19): siRNA sense strand
acacauaucucagguacuu

SEQ ID NO: 1524757 - RNA, 19 nt, Homo sapiens
  misc_RNA (1)...(19): siRNA sense strand
ccacuacacucuguugauu

SEQ ID NO: 1524758 - RNA, 19 nt, Homo sapiens
  misc_RNA (1)...(19): siRNA sense strand
ggauucuucuggauaauga

SEQ ID NO: 1524759 - RNA, 19 nt, Homo sapiens
  misc_RNA (1)...(19): siRNA sense strand
gcaguacaauugguugaaa

SEQ ID NO: 1524760 - RNA, 19 nt, Homo sapiens
  misc_RNA (1)...(19): siRNA sense strand
ucauucagguuccagguua

SEQ ID NO: 1524761 - RNA, 19 nt, Homo sapiens
  misc_RNA (1)...(19): siRNA sense strand
caagcaagaugaugauaag

SEQ ID NO: 1524762 - RNA, 19 nt, Homo sapiens
  misc_RNA (1)...(19): siRNA sense strand
caacccaguguuccuauua

SEQ ID NO: 1524763 - RNA, 19 nt, Homo sapiens
  misc_RNA (1)...(19): siRNA sense strand
aauaugcucugacuagaaa

SEQ ID NO: 1524764 - RNA, 19 nt, Homo sapiens
  misc_RNA (1)...(19): siRNA sense strand
acaauugguugaaauguug

SEQ ID NO: 1524765 - RNA, 19 nt, Homo sapiens
  misc_RNA (1)...(19): siRNA sense strand
gaagaucaguggccaagac

SEQ ID NO: 1524766 - RNA, 19 nt, Homo sapiens
  misc_RNA (1)...(19): siRNA sense strand
ggaccgacuugaggaguuu

SEQ ID NO: 1524767 - RNA, 19 nt, Homo sapiens
  misc_RNA (1)...(19): siRNA sense strand
caacguacgacaggauuua

SEQ ID NO: 1524768 - RNA, 19 nt, Homo sapiens
  misc_RNA (1)...(19): siRNA sense strand
ucaaagagauaaagagacu

SEQ ID NO: 1524769 - RNA, 19 nt, Homo sapiens
  misc_RNA (1)...(19): siRNA sense strand
gagcgggacugaagcaagu

SEQ ID NO: 1524770 - RNA, 19 nt, Homo sapiens
  misc_RNA (1)...(19): siRNA sense strand
ccaauccuaugcuuuguug

SEQ ID NO: 1524771 - RNA, 19 nt, Homo sapiens
  misc_RNA (1)...(19): siRNA sense strand
uaucucagguacuuuagaa

SEQ ID NO: 1524772 - RNA, 19 nt, Homo sapiens
  misc_RNA (1)...(19): siRNA sense strand
gaacuuaugguagaacuuc

SEQ ID NO: 1524773 - RNA, 19 nt, Homo sapiens
  misc_RNA (1)...(19): siRNA sense strand
gaauaugcucugacuagaa

SEQ ID NO: 1524774 - RNA, 19 nt, Homo sapiens
  misc_RNA (1)...(19): siRNA sense strand
gaagaugaagaugaagaua

SEQ ID NO: 1524775 - RNA, 19 nt, Homo sapiens
  misc_RNA (1)...(19): siRNA sense strand
agaugaagaugaagaugaa

SEQ ID NO: 1524776 - RNA, 19 nt, Homo sapiens
  misc_RNA (1)...(19): siRNA sense strand
ggacacaggcgcaccuaug

SEQ ID NO: 1524777 - RNA, 19 nt, Homo sapiens
  misc_RNA (1)...(19): siRNA sense strand
uaaagucugugucaaagag

SEQ ID NO: 1524778 - RNA, 19 nt, Homo sapiens
  misc_RNA (1)...(19): siRNA sense strand
agauagagauugcccauag

SEQ ID NO: 1524779 - RNA, 19 nt, Homo sapiens
  misc_RNA (1)...(19): siRNA sense strand
gaagaugaagauaaugaug

SEQ ID NO: 1524780 - RNA, 19 nt, Homo sapiens
  misc_RNA (1)...(19): siRNA sense strand
gcagcaacgcaaagaagua

SEQ ID NO: 1524781 - RNA, 19 nt, Homo sapiens
  misc_RNA (1)...(19): siRNA sense strand
gcaauagguuuggcuugga

SEQ ID NO: 1524782 - RNA, 19 nt, Homo sapiens
  misc_RNA (1)...(19): siRNA sense strand
aaccauaacuucacagauc

SEQ ID NO: 1524783 - RNA, 19 nt, Homo sapiens
  misc_RNA (1)...(19): siRNA sense strand
uagaugagguugacaaacu

SEQ ID NO: 1524784 - RNA, 19 nt, Homo sapiens
  misc_RNA (1)...(19): siRNA sense strand
guugaaauguuggauaugu

SEQ ID NO: 1524785 - RNA, 19 nt, Homo sapiens
  misc_RNA (1)...(19): siRNA sense strand
gaacaaaaccauaacuuca

SEQ ID NO: 1524786 - RNA, 19 nt, Homo sapiens
  misc_RNA (1)...(19): siRNA sense strand
ccauaaagucugugucaaa

SEQ ID NO: 1524787 - RNA, 19 nt, Homo sapiens
  misc_RNA (1)...(19): siRNA sense strand
ggagcuaggagaacuauca

SEQ ID NO: 1524788 - RNA, 19 nt, Homo sapiens
  misc_RNA (1)...(19): siRNA sense strand
agccaugacuggagaaauu

SEQ ID NO: 1524789 - RNA, 19 nt, Homo sapiens
  misc_RNA (1)...(19): siRNA sense strand
uugcagagaacacaucuua

SEQ ID NO: 1524790 - RNA, 19 nt, Homo sapiens
  misc_RNA (1)...(19): siRNA sense strand
gcauaaggaagccaaguug

SEQ ID NO: 1524791 - RNA, 19 nt, Homo sapiens
  misc_RNA (1)...(19): siRNA sense strand
ucaauuauccgaacaagca

SEQ ID NO: 1524792 - RNA, 19 nt, Homo sapiens
  misc_RNA (1)...(19): siRNA sense strand
cagagcaguuuuacaaaua

SEQ ID NO: 1524793 - RNA, 19 nt, Homo sapiens
  misc_RNA (1)...(19): siRNA sense strand
gagggccaguuaacucuga

SEQ ID NO: 1524794 - RNA, 19 nt, Homo sapiens
  misc_RNA (1)...(19): siRNA sense strand
ccaagcaagaugaugauaa

SEQ ID NO: 1524795 - RNA, 19 nt, Homo sapiens
  misc_RNA (1)...(19): siRNA sense strand
caaagagaaacuccagauu

SEQ ID NO: 1524796 - RNA, 19 nt, Homo sapiens
  misc_RNA (1)...(19): siRNA sense strand
cauaaagucugugucaaag

SEQ ID NO: 1524797 - RNA, 19 nt, Homo sapiens
  misc_RNA (1)...(19): siRNA sense strand
gacaucaucaccagguaua

SEQ ID NO: 1524798 - RNA, 19 nt, Homo sapiens
  misc_RNA (1)...(19): siRNA sense strand
ccacaggauugcacuugga

SEQ ID NO: 1524799 - RNA, 19 nt, Homo sapiens
  misc_RNA (1)...(19): siRNA sense strand
gcacacagagcgggacuga

SEQ ID NO: 1524800 - RNA, 19 nt, Homo sapiens
  misc_RNA (1)...(19): siRNA sense strand
aagagaaacuccagauuuu

SEQ ID NO: 1524801 - RNA, 19 nt, Homo sapiens
  misc_RNA (1)...(19): siRNA sense strand
gauugcacuuggaggagua

SEQ ID NO: 1524802 - RNA, 19 nt, Homo sapiens
  misc_RNA (1)...(19): siRNA sense strand
ccuaugccguuuccagauu

SEQ ID NO: 1524803 - RNA, 19 nt, Homo sapiens
  misc_RNA (1)...(19): siRNA sense strand
uaccagacaucuugacauc

SEQ ID NO: 1524804 - RNA, 19 nt, Homo sapiens
  misc_RNA (1)...(19): siRNA sense strand
uggaugagguucuuaaugc

SEQ ID NO: 1524805 - RNA, 19 nt, Homo sapiens
  misc_RNA (1)...(19): siRNA sense strand
cgaacaagcaacaaagaga

SEQ ID NO: 1524806 - RNA, 19 nt, Homo sapiens
  misc_RNA (1)...(19): siRNA sense strand
cauuccagcugccuuguug

SEQ ID NO: 1524807 - RNA, 19 nt, Homo sapiens
  misc_RNA (1)...(19): siRNA sense strand
acauaucucagguacuuua

SEQ ID NO: 1524808 - RNA, 19 nt, Homo sapiens
  misc_RNA (1)...(19): siRNA sense strand
aaacaagugugggaagauc

SEQ ID NO: 1524809 - RNA, 19 nt, Homo sapiens
  misc_RNA (1)...(19): siRNA sense strand
ggaugagguucuuaaugca

SEQ ID NO: 1524810 - RNA, 19 nt, Homo sapiens
  misc_RNA (1)...(19): siRNA sense strand
gcuaaauugagacgucuuu

SEQ ID NO: 1524811 - RNA, 19 nt, Homo sapiens
  misc_RNA (1)...(19): siRNA sense strand
cagagaacacaucuuagaa

SEQ ID NO: 1524812 - RNA, 19 nt, Homo sapiens
  misc_RNA (1)...(19): siRNA sense strand
cagcugcacuggccguuca

SEQ ID NO: 1524813 - RNA, 19 nt, Homo sapiens
  misc_RNA (1)...(19): siRNA sense strand
uuacaggccuaugccguuu

SEQ ID NO: 1524814 - RNA, 19 nt, Homo sapiens
  misc_RNA (1)...(19): siRNA sense strand
ggagugaacaacccagugu

SEQ ID NO: 1524815 - RNA, 19 nt, Homo sapiens
  misc_RNA (1)...(19): siRNA sense strand
gcucugacuagaaauuauu

SEQ ID NO: 1524816 - RNA, 19 nt, Homo sapiens
  misc_RNA (1)...(19): siRNA sense strand
caaauugaaggccugaaau

SEQ ID NO: 1524817 - RNA, 19 nt, Homo sapiens
  misc_RNA (1)...(19): siRNA sense strand
ggguggaauuaaagacaaa

SEQ ID NO: 1524818 - RNA, 19 nt, Homo sapiens
  misc_RNA (1)...(19): siRNA sense strand
acugagaggucuuguucuu

SEQ ID NO: 1524819 - RNA, 19 nt, Homo sapiens
  misc_RNA (1)...(19): siRNA sense strand
ucccuuagguggagaaauc

SEQ ID NO: 1524820 - RNA, 19 nt, Homo sapiens
  misc_RNA (1)...(19): siRNA sense strand
gaggagaagauagagauug

SEQ ID NO: 1524821 - RNA, 19 nt, Homo sapiens
  misc_RNA (1)...(19): siRNA sense strand
ggaggaguaugugaucagu

SEQ ID NO: 1524822 - RNA, 19 nt, Homo sapiens
  misc_RNA (1)...(19): siRNA sense strand
ugccagagcaggcccauaa

SEQ ID NO: 1524823 - RNA, 19 nt, Homo sapiens
  misc_RNA (1)...(19): siRNA sense strand
uagaggagcgguucaagau

SEQ ID NO: 1524824 - RNA, 19 nt, Homo sapiens
  misc_RNA (1)...(19): siRNA sense strand
acacagagcgggacugaag

SEQ ID NO: 1524825 - RNA, 19 nt, Homo sapiens
  misc_RNA (1)...(19): siRNA sense strand
ggaccguucugaugugacu

SEQ ID NO: 1524826 - RNA, 19 nt, Homo sapiens
  misc_RNA (1)...(19): siRNA sense strand
cagaaggacagcauaagga

SEQ ID NO: 1524827 - RNA, 19 nt, Homo sapiens
  misc_RNA (1)...(19): siRNA sense strand
gcagaaggacagcauaagg

SEQ ID NO: 1524828 - RNA, 19 nt, Homo sapiens
  misc_RNA (1)...(19): siRNA sense strand
gaagaaaagaguacuggaa

SEQ ID NO: 1524829 - RNA, 19 nt, Homo sapiens
  misc_RNA (1)...(19): siRNA sense strand
gaugaugauaagaggguua

SEQ ID NO: 1524830 - RNA, 19 nt, Homo sapiens
  misc_RNA (1)...(19): siRNA sense strand
gcaggcccauaaagucugu

SEQ ID NO: 1524831 - RNA, 19 nt, Homo sapiens
  misc_RNA (1)...(19): siRNA sense strand
cgacaggauuuaaguuuug

SEQ ID NO: 1524832 - RNA, 19 nt, Homo sapiens
  misc_RNA (1)...(19): siRNA sense strand
agacauccaucugcacuuc

SEQ ID NO: 1524833 - RNA, 19 nt, Homo sapiens
  misc_RNA (1)...(19): siRNA sense strand
ggaggcgagucgaauggau

SEQ ID NO: 1524834 - RNA, 19 nt, Homo sapiens
  misc_RNA (1)...(19): siRNA sense strand
gcaccuauguuggcagcau

SEQ ID NO: 1524835 - RNA, 19 nt, Homo sapiens
  misc_RNA (1)...(19): siRNA sense strand
agaaaagaguacuggaaua

SEQ ID NO: 1524836 - RNA, 19 nt, Homo sapiens
  misc_RNA (1)...(19): siRNA sense strand
agaauaugcucugacuaga

SEQ ID NO: 1524837 - RNA, 19 nt, Homo sapiens
  misc_RNA (1)...(19): siRNA sense strand
cucagucaaugccagaaua

SEQ ID NO: 1524838 - RNA, 19 nt, Homo sapiens
  misc_RNA (1)...(19): siRNA sense strand
ggaauacuuggcugucaga

SEQ ID NO: 1524839 - RNA, 19 nt, Homo sapiens
  misc_RNA (1)...(19): siRNA sense strand
gcaacguacgacaggauuu

SEQ ID NO: 1524840 - RNA, 19 nt, Homo sapiens
  misc_RNA (1)...(19): siRNA sense strand
gccaugacuggagaaauua

SEQ ID NO: 1524841 - RNA, 19 nt, Homo sapiens
  misc_RNA (1)...(19): siRNA sense strand
uaaccugucucgccucacu

SEQ ID NO: 1524842 - RNA, 19 nt, Homo sapiens
  misc_RNA (1)...(19): siRNA sense strand
ugaccuuucucaaguucuu

SEQ ID NO: 1524843 - RNA, 19 nt, Homo sapiens
  misc_RNA (1)...(19): siRNA sense strand
caucauuccuuucccuuua

SEQ ID NO: 1524844 - RNA, 19 nt, Homo sapiens
  misc_RNA (1)...(19): siRNA sense strand
ggaggauccuguaauuauu

SEQ ID NO: 1524845 - RNA, 19 nt, Homo sapiens
  misc_RNA (1)...(19): siRNA sense strand
cuaaauaaccugaguguga

SEQ ID NO: 1524846 - RNA, 19 nt, Homo sapiens
  misc_RNA (1)...(19): siRNA sense strand
ccaaguggauucaucauuc

SEQ ID NO: 1524847 - RNA, 19 nt, Homo sapiens
  misc_RNA (1)...(19): siRNA sense strand
agagaaagcuuuaaaugca

SEQ ID NO: 1524848 - RNA, 19 nt, Homo sapiens
  misc_RNA (1)...(19): siRNA sense strand
uaaauaaccugagugugaa

SEQ ID NO: 1524849 - RNA, 19 nt, Homo sapiens
  misc_RNA (1)...(19): siRNA sense strand
ggagauucuucuucgagua

SEQ ID NO: 1524850 - RNA, 19 nt, Homo sapiens
  misc_RNA (1)...(19): siRNA sense strand
uaacugaugguucauauga

SEQ ID NO: 1524851 - RNA, 19 nt, Homo sapiens
  misc_RNA (1)...(19): siRNA sense strand
agaagaaugugcccagaaa

SEQ ID NO: 1524852 - RNA, 19 nt, Homo sapiens
  misc_RNA (1)...(19): siRNA sense strand
agacuuaacugaugguuca

SEQ ID NO: 1524853 - RNA, 19 nt, Homo sapiens
  misc_RNA (1)...(19): siRNA sense strand
gggauacgcucuucgaagu

SEQ ID NO: 1524854 - RNA, 19 nt, Homo sapiens
  misc_RNA (1)...(19): siRNA sense strand
ucaguuaaccaagcuauua

SEQ ID NO: 1524855 - RNA, 19 nt, Homo sapiens
  misc_RNA (1)...(19): siRNA sense strand
guacuuacgcuauuucaga

SEQ ID NO: 1524856 - RNA, 19 nt, Homo sapiens
  misc_RNA (1)...(19): siRNA sense strand
ucuaaaugcugaacaacuu

SEQ ID NO: 1524857 - RNA, 19 nt, Homo sapiens
  misc_RNA (1)...(19): siRNA sense strand
gcaaaggagauucuucuuc

SEQ ID NO: 1524858 - RNA, 19 nt, Homo sapiens
  misc_RNA (1)...(19): siRNA sense strand
gcacaugcuucacaguuac

SEQ ID NO: 1524859 - RNA, 19 nt, Homo sapiens
  misc_RNA (1)...(19): siRNA sense strand
ccugaagacuuaacugaug

SEQ ID NO: 1524860 - RNA, 19 nt, Homo sapiens
  misc_RNA (1)...(19): siRNA sense strand
uaaccaagcuauuauucgu

SEQ ID NO: 1524861 - RNA, 19 nt, Homo sapiens
  misc_RNA (1)...(19): siRNA sense strand
ggguaacaaugcagccuuu

SEQ ID NO: 1524862 - RNA, 19 nt, Homo sapiens
  misc_RNA (1)...(19): siRNA sense strand
ccuguuacauggagaagaa

SEQ ID NO: 1524863 - RNA, 19 nt, Homo sapiens
  misc_RNA (1)...(19): siRNA sense strand
gauauacaucagucaagua

SEQ ID NO: 1524864 - RNA, 19 nt, Homo sapiens
  misc_RNA (1)...(19): siRNA sense strand
auaaagaacugccucaaaa

SEQ ID NO: 1524865 - RNA, 19 nt, Homo sapiens
  misc_RNA (1)...(19): siRNA sense strand
uaagagcuuuaguugauca

SEQ ID NO: 1524866 - RNA, 19 nt, Homo sapiens
  misc_RNA (1)...(19): siRNA sense strand
cggaggauccuguaauuau

SEQ ID NO: 1524867 - RNA, 19 nt, Homo sapiens
  misc_RNA (1)...(19): siRNA sense strand
acaugacuguuaccaauga

SEQ ID NO: 1524868 - RNA, 19 nt, Homo sapiens
  misc_RNA (1)...(19): siRNA sense strand
caacggaggauccuguaau

SEQ ID NO: 1524869 - RNA, 19 nt, Homo sapiens
  misc_RNA (1)...(19): siRNA sense strand
gagaagaaugugcccagaa

SEQ ID NO: 1524870 - RNA, 19 nt, Homo sapiens
  misc_RNA (1)...(19): siRNA sense strand
uauaaagaacugccucaaa

SEQ ID NO: 1524871 - RNA, 19 nt, Homo sapiens
  misc_RNA (1)...(19): siRNA sense strand
gaaauggaaacacgaaggu

SEQ ID NO: 1524872 - RNA, 19 nt, Homo sapiens
  misc_RNA (1)...(19): siRNA sense strand
gaggauccuguaauuauug

SEQ ID NO: 1524873 - RNA, 19 nt, Homo sapiens
  misc_RNA (1)...(19): siRNA sense strand
caaacaaaaucaaccauuc

SEQ ID NO: 1524874 - RNA, 19 nt, Homo sapiens
  misc_RNA (1)...(19): siRNA sense strand
guggauucaucauuccuuu

SEQ ID NO: 1524875 - RNA, 19 nt, Homo sapiens
  misc_RNA (1)...(19): siRNA sense strand
guauuccaauuguugcaaa

SEQ ID NO: 1524876 - RNA, 19 nt, Homo sapiens
  misc_RNA (1)...(19): siRNA sense strand
ccaaccagaguauuaaaga

SEQ ID NO: 1524877 - RNA, 19 nt, Homo sapiens
  misc_RNA (1)...(19): siRNA sense strand
acacgaaggugcaaguuuu

SEQ ID NO: 1524878 - RNA, 19 nt, Homo sapiens
  misc_RNA (1)...(19): siRNA sense strand
uggcuggacugacauuguu

SEQ ID NO: 1524879 - RNA, 19 nt, Homo sapiens
  misc_RNA (1)...(19): siRNA sense strand
ccagaguauuaaagagaaa

SEQ ID NO: 1524880 - RNA, 19 nt, Homo sapiens
  misc_RNA (1)...(19): siRNA sense strand
caaccagaguauuaaagag

SEQ ID NO: 1524881 - RNA, 19 nt, Homo sapiens
  misc_RNA (1)...(19): siRNA sense strand
ccacguagcaaaggagauu

SEQ ID NO: 1524882 - RNA, 19 nt, Homo sapiens
  misc_RNA (1)...(19): siRNA sense strand
gaaacacgaaggugcaagu

SEQ ID NO: 1524883 - RNA, 19 nt, Homo sapiens
  misc_RNA (1)...(19): siRNA sense strand
caacuucagaaacuccuuu

SEQ ID NO: 1524884 - RNA, 19 nt, Homo sapiens
  misc_RNA (1)...(19): siRNA sense strand
gaaugugcccagaaaauaa

SEQ ID NO: 1524885 - RNA, 19 nt, Homo sapiens
  misc_RNA (1)...(19): siRNA sense strand
aacggaggauccuguaauu

SEQ ID NO: 1524886 - RNA, 19 nt, Homo sapiens
  misc_RNA (1)...(19): siRNA sense strand
uaaccugagugugaauguu

SEQ ID NO: 1524887 - RNA, 19 nt, Homo sapiens
  misc_RNA (1)...(19): siRNA sense strand
gguguuacuuacuggaaau

SEQ ID NO: 1524888 - RNA, 19 nt, Homo sapiens
  misc_RNA (1)...(19): siRNA sense strand
ggugguauuccaauuguug

SEQ ID NO: 1524889 - RNA, 19 nt, Homo sapiens
  misc_RNA (1)...(19): siRNA sense strand
cauuccaaccagaguauua

SEQ ID NO: 1524890 - RNA, 19 nt, Homo sapiens
  misc_RNA (1)...(19): siRNA sense strand
cuuaacugaugguucauau

SEQ ID NO: 1524891 - RNA, 19 nt, Homo sapiens
  misc_RNA (1)...(19): siRNA sense strand
aaagaacugccucaaaaua

SEQ ID NO: 1524892 - RNA, 19 nt, Homo sapiens
  misc_RNA (1)...(19): siRNA sense strand
ucaaguaugugaggauguc

SEQ ID NO: 1524893 - RNA, 19 nt, Homo sapiens
  misc_RNA (1)...(19): siRNA sense strand
ucgaguacuuacgcuauuu

SEQ ID NO: 1524894 - RNA, 19 nt, Homo sapiens
  misc_RNA (1)...(19): siRNA sense strand
cucgcagccugaagacuua

SEQ ID NO: 1524895 - RNA, 19 nt, Homo sapiens
  misc_RNA (1)...(19): siRNA sense strand
uacuuacgcuauuucagaa

SEQ ID NO: 1524896 - RNA, 19 nt, Homo sapiens
  misc_RNA (1)...(19): siRNA sense strand
gaaacugcuuuugaauuug

SEQ ID NO: 1524897 - RNA, 19 nt, Homo sapiens
  misc_RNA (1)...(19): siRNA sense strand
guuacuuacuggaaaugga

SEQ ID NO: 1524898 - RNA, 19 nt, Homo sapiens
  misc_RNA (1)...(19): siRNA sense strand
gagucacagugguccaaga

SEQ ID NO: 1524899 - RNA, 19 nt, Homo sapiens
  misc_RNA (1)...(19): siRNA sense strand
acugaugguucauaugaug

SEQ ID NO: 1524900 - RNA, 19 nt, Homo sapiens
  misc_RNA (1)...(19): siRNA sense strand
gcaaacaaaaucaaccauu

SEQ ID NO: 1524901 - RNA, 19 nt, Homo sapiens
  misc_RNA (1)...(19): siRNA sense strand
augcuucacaguuacauua

SEQ ID NO: 1524902 - RNA, 19 nt, Homo sapiens
  misc_RNA (1)...(19): siRNA sense strand
ccaaugaccaccagcacau

SEQ ID NO: 1524903 - RNA, 19 nt, Homo sapiens
  misc_RNA (1)...(19): siRNA sense strand
guuaaccaagcuauuauuc

SEQ ID NO: 1524904 - RNA, 19 nt, Homo sapiens
  misc_RNA (1)...(19): siRNA sense strand
gaaggaaaagguuguaaca

SEQ ID NO: 1524905 - RNA, 19 nt, Homo sapiens
  misc_RNA (1)...(19): siRNA sense strand
agauauacaucagucaagu

SEQ ID NO: 1524906 - RNA, 19 nt, Homo sapiens
  misc_RNA (1)...(19): siRNA sense strand
aaaggagauucuucuucga

SEQ ID NO: 1524907 - RNA, 19 nt, Homo sapiens
  misc_RNA (1)...(19): siRNA sense strand
aaugcagccuuuucaguua

SEQ ID NO: 1524908 - RNA, 19 nt, Homo sapiens
  misc_RNA (1)...(19): siRNA sense strand
gacgucagagggucaguug

SEQ ID NO: 1524909 - RNA, 19 nt, Homo sapiens
  misc_RNA (1)...(19): siRNA sense strand
gagauucuucuucgaguac

SEQ ID NO: 1524910 - RNA, 19 nt, Homo sapiens
  misc_RNA (1)...(19): siRNA sense strand
gaaggugcaaguuuugaaa

SEQ ID NO: 1524911 - RNA, 19 nt, Homo sapiens
  misc_RNA (1)...(19): siRNA sense strand
ccucgcagccugaagacuu

SEQ ID NO: 1524912 - RNA, 19 nt, Homo sapiens
  misc_RNA (1)...(19): siRNA sense strand
accagaguauuaaagagaa

SEQ ID NO: 1524913 - RNA, 19 nt, Homo sapiens
  misc_RNA (1)...(19): siRNA sense strand
uagcaaaggagauucuucu

SEQ ID NO: 1524914 - RNA, 19 nt, Homo sapiens
  misc_RNA (1)...(19): siRNA sense strand
ugacagccacguagcaaag

SEQ ID NO: 1524915 - RNA, 19 nt, Homo sapiens
  misc_RNA (1)...(19): siRNA sense strand
cgucagagggucaguugug

SEQ ID NO: 1524916 - RNA, 19 nt, Homo sapiens
  misc_RNA (1)...(19): siRNA sense strand
gagugugaauguugaaaau

SEQ ID NO: 1524917 - RNA, 19 nt, Homo sapiens
  misc_RNA (1)...(19): siRNA sense strand
gaacugccucaaaauagaa

SEQ ID NO: 1524918 - RNA, 19 nt, Homo sapiens
  misc_RNA (1)...(19): siRNA sense strand
caaguggauucaucauucc

SEQ ID NO: 1524919 - RNA, 19 nt, Homo sapiens
  misc_RNA (1)...(19): siRNA sense strand
ggacgucagagggucaguu

SEQ ID NO: 1524920 - RNA, 19 nt, Homo sapiens
  misc_RNA (1)...(19): siRNA sense strand
gaaagcuuuaaaugcacua

SEQ ID NO: 1524921 - RNA, 19 nt, Homo sapiens
  misc_RNA (1)...(19): siRNA sense strand
aagagaaagcuuuaaaugc

SEQ ID NO: 1524922 - RNA, 19 nt, Homo sapiens
  misc_RNA (1)...(19): siRNA sense strand
aaccagaguauuaaagaga

SEQ ID NO: 1524923 - RNA, 19 nt, Homo sapiens
  misc_RNA (1)...(19): siRNA sense strand
augaugauguucuaaaugc

SEQ ID NO: 1524924 - RNA, 19 nt, Homo sapiens
  misc_RNA (1)...(19): siRNA sense strand
caguuaaccaagcuauuau

SEQ ID NO: 1524925 - RNA, 19 nt, Homo sapiens
  misc_RNA (1)...(19): siRNA sense strand
gugcccaaguggauucauc

SEQ ID NO: 1524926 - RNA, 19 nt, Homo sapiens
  misc_RNA (1)...(19): siRNA sense strand
uuacuuacuggaaauggaa

SEQ ID NO: 1524927 - RNA, 19 nt, Homo sapiens
  misc_RNA (1)...(19): siRNA sense strand
gcuucacaguuacauuaca

SEQ ID NO: 1524928 - RNA, 19 nt, Homo sapiens
  misc_RNA (1)...(19): siRNA sense strand
ugggugguauuccaauugu

SEQ ID NO: 1524929 - RNA, 19 nt, Homo sapiens
  misc_RNA (1)...(19): siRNA sense strand
aggauccuguaauuauuga

SEQ ID NO: 1524930 - RNA, 19 nt, Homo sapiens
  misc_RNA (1)...(19): siRNA sense strand
augcagaggugaaggaaaa

SEQ ID NO: 1524931 - RNA, 19 nt, Homo sapiens
  misc_RNA (1)...(19): siRNA sense strand
gaagacuuaacugaugguu

SEQ ID NO: 1524932 - RNA, 19 nt, Homo sapiens
  misc_RNA (1)...(19): siRNA sense strand
agaccucgcagccugaaga

SEQ ID NO: 1524933 - RNA, 19 nt, Homo sapiens
  misc_RNA (1)...(19): siRNA sense strand
gaagaaugugcccagaaaa

SEQ ID NO: 1524934 - RNA, 19 nt, Homo sapiens
  misc_RNA (1)...(19): siRNA sense strand
aauagaaggccauuuagcu

SEQ ID NO: 1524935 - RNA, 19 nt, Homo sapiens
  misc_RNA (1)...(19): siRNA sense strand
agaacugccucaaaauaga

SEQ ID NO: 1524936 - RNA, 19 nt, Homo sapiens
  misc_RNA (1)...(19): siRNA sense strand
ggcgccugcuacugcauuu

SEQ ID NO: 1524937 - RNA, 19 nt, Homo sapiens
  misc_RNA (1)...(19): siRNA sense strand
uggaagaagggacgucaga

SEQ ID NO: 1524938 - RNA, 19 nt, Homo sapiens
  misc_RNA (1)...(19): siRNA sense strand
caaugcagccuuuucaguu

SEQ ID NO: 1524939 - RNA, 19 nt, Homo sapiens
  misc_RNA (1)...(19): siRNA sense strand
caacagaaguaacaacaaa

SEQ ID NO: 1524940 - RNA, 19 nt, Homo sapiens
  misc_RNA (1)...(19): siRNA sense strand
gaagauugcugaagucugu

SEQ ID NO: 1524941 - RNA, 19 nt, Homo sapiens
  misc_RNA (1)...(19): siRNA sense strand
gaagagaugucaggagaaa

SEQ ID NO: 1524942 - RNA, 19 nt, Homo sapiens
  misc_RNA (1)...(19): siRNA sense strand
gaaggguccuguucauaaa

SEQ ID NO: 1524943 - RNA, 19 nt, Homo sapiens
  misc_RNA (1)...(19): siRNA sense strand
ggaaggguccuguucauaa

SEQ ID NO: 1524944 - RNA, 19 nt, Homo sapiens
  misc_RNA (1)...(19): siRNA sense strand
gaggagacccugaacauuu

SEQ ID NO: 1524945 - RNA, 19 nt, Homo sapiens
  misc_RNA (1)...(19): siRNA sense strand
ccaaauacgugaagcugaa

SEQ ID NO: 1524946 - RNA, 19 nt, Homo sapiens
  misc_RNA (1)...(19): siRNA sense strand
gaagcacuuugguacgaua

SEQ ID NO: 1524947 - RNA, 19 nt, Homo sapiens
  misc_RNA (1)...(19): siRNA sense strand
caaauaagccagccgugaa

SEQ ID NO: 1524948 - RNA, 19 nt, Homo sapiens
  misc_RNA (1)...(19): siRNA sense strand
gcaauucugacgacaauau

SEQ ID NO: 1524949 - RNA, 19 nt, Homo sapiens
  misc_RNA (1)...(19): siRNA sense strand
cagcaauucugacgacaau

SEQ ID NO: 1524950 - RNA, 19 nt, Homo sapiens
  misc_RNA (1)...(19): siRNA sense strand
uagcagaagccaaguacua

SEQ ID NO: 1524951 - RNA, 19 nt, Homo sapiens
  misc_RNA (1)...(19): siRNA sense strand
gggaagcacuuugguacga

SEQ ID NO: 1524952 - RNA, 19 nt, Homo sapiens
  misc_RNA (1)...(19): siRNA sense strand
guggagcccucuacuauac

SEQ ID NO: 1524953 - RNA, 19 nt, Homo sapiens
  misc_RNA (1)...(19): siRNA sense strand
gguggagcccucuacuaua

SEQ ID NO: 1524954 - RNA, 19 nt, Homo sapiens
  misc_RNA (1)...(19): siRNA sense strand
ggguggagcccucuacuau

SEQ ID NO: 1524955 - RNA, 19 nt, Homo sapiens
  misc_RNA (1)...(19): siRNA sense strand
gaucaccucauccaaggaa

SEQ ID NO: 1524956 - RNA, 19 nt, Homo sapiens
  misc_RNA (1)...(19): siRNA sense strand
ugacgacaauauguugaaa

SEQ ID NO: 1524957 - RNA, 19 nt, Homo sapiens
  misc_RNA (1)...(19): siRNA sense strand
ccgaagcccggauuuauga

SEQ ID NO: 1524958 - RNA, 19 nt, Homo sapiens
  misc_RNA (1)...(19): siRNA sense strand
gccggaagauugcugaagu

SEQ ID NO: 1524959 - RNA, 19 nt, Homo sapiens
  misc_RNA (1)...(19): siRNA sense strand
caacaaauacucauauacc

SEQ ID NO: 1524960 - RNA, 19 nt, Homo sapiens
  misc_RNA (1)...(19): siRNA sense strand
ggaagcacuuugguacgau

SEQ ID NO: 1524961 - RNA, 19 nt, Homo sapiens
  misc_RNA (1)...(19): siRNA sense strand
gcugaagucuguuguaccu

SEQ ID NO: 1524962 - RNA, 19 nt, Homo sapiens
  misc_RNA (1)...(19): siRNA sense strand
uauagcgacuucaaauaag

SEQ ID NO: 1524963 - RNA, 19 nt, Homo sapiens
  misc_RNA (1)...(19): siRNA sense strand
ggagaucgaggagcugcua

SEQ ID NO: 1524964 - RNA, 19 nt, Homo sapiens
  misc_RNA (1)...(19): siRNA sense strand
guaccuccaucgucuaugc

SEQ ID NO: 1524965 - RNA, 19 nt, Homo sapiens
  misc_RNA (1)...(19): siRNA sense strand
uaacggaaggguccuguuc

SEQ ID NO: 1524966 - RNA, 19 nt, Homo sapiens
  misc_RNA (1)...(19): siRNA sense strand
guacgauacucaacuaccu

SEQ ID NO: 1524967 - RNA, 19 nt, Homo sapiens
  misc_RNA (1)...(19): siRNA sense strand
ggaagagaugucaggagaa

SEQ ID NO: 1524968 - RNA, 19 nt, Homo sapiens
  misc_RNA (1)...(19): siRNA sense strand
aaacuuauagcgacuucaa

SEQ ID NO: 1524969 - RNA, 19 nt, Homo sapiens
  misc_RNA (1)...(19): siRNA sense strand
cuuaugagccuuucugcaa

SEQ ID NO: 1524970 - RNA, 19 nt, Homo sapiens
  misc_RNA (1)...(19): siRNA sense strand
gaaggcuggauccucauug

SEQ ID NO: 1524971 - RNA, 19 nt, Homo sapiens
  misc_RNA (1)...(19): siRNA sense strand
cauauaccagcaauucuga

SEQ ID NO: 1524972 - RNA, 19 nt, Homo sapiens
  misc_RNA (1)...(19): siRNA sense strand
aaggcuggauccucauuga

SEQ ID NO: 1524973 - RNA, 19 nt, Homo sapiens
  misc_RNA (1)...(19): siRNA sense strand
cuuauagcgacuucaaaua

SEQ ID NO: 1524974 - RNA, 19 nt, Homo sapiens
  misc_RNA (1)...(19): siRNA sense strand
ccgcaccacuuccuucaag

SEQ ID NO: 1524975 - RNA, 19 nt, Homo sapiens
  misc_RNA (1)...(19): siRNA sense strand
gcacuuugguacgauacuc

SEQ ID NO: 1524976 - RNA, 19 nt, Homo sapiens
  misc_RNA (1)...(19): siRNA sense strand
ccgugaaguugcucuacaa

SEQ ID NO: 1524977 - RNA, 19 nt, Homo sapiens
  misc_RNA (1)...(19): siRNA sense strand
uaagccagccgugaaguug

SEQ ID NO: 1524978 - RNA, 19 nt, Homo sapiens
  misc_RNA (1)...(19): siRNA sense strand
agaagaaacagaccaaggu

SEQ ID NO: 1524979 - RNA, 19 nt, Homo sapiens
  misc_RNA (1)...(19): siRNA sense strand
ugcagacgcugaccaagca

SEQ ID NO: 1524980 - RNA, 19 nt, Homo sapiens
  misc_RNA (1)...(19): siRNA sense strand
cggaaggguccuguucaua

SEQ ID NO: 1524981 - RNA, 19 nt, Homo sapiens
  misc_RNA (1)...(19): siRNA sense strand
gccgugaaguugcucuaca

SEQ ID NO: 1524982 - RNA, 19 nt, Homo sapiens
  misc_RNA (1)...(19): siRNA sense strand
uugguacgauacucaacua

SEQ ID NO: 1524983 - RNA, 19 nt, Homo sapiens
  misc_RNA (1)...(19): siRNA sense strand
ggagcccucuacuauacca

SEQ ID NO: 1524984 - RNA, 19 nt, Homo sapiens
  misc_RNA (1)...(19): siRNA sense strand
gugcggaggauccacauca

SEQ ID NO: 1524985 - RNA, 19 nt, Homo sapiens
  misc_RNA (1)...(19): siRNA sense strand
agagaugucaggagaaagu

SEQ ID NO: 1524986 - RNA, 19 nt, Homo sapiens
  misc_RNA (1)...(19): siRNA sense strand
ugaggagacccugaacauu

SEQ ID NO: 1524987 - RNA, 19 nt, Homo sapiens
  misc_RNA (1)...(19): siRNA sense strand
ucauauaccagcaauucug

SEQ ID NO: 1524988 - RNA, 19 nt, Homo sapiens
  misc_RNA (1)...(19): siRNA sense strand
cuaugccacugagaagaaa

SEQ ID NO: 1524989 - RNA, 19 nt, Homo sapiens
  misc_RNA (1)...(19): siRNA sense strand
agaccaagguggaguuucc

SEQ ID NO: 1524990 - RNA, 19 nt, Homo sapiens
  misc_RNA (1)...(19): siRNA sense strand
gauacucaacuaccuucga

SEQ ID NO: 1524991 - RNA, 19 nt, Homo sapiens
  misc_RNA (1)...(19): siRNA sense strand
ucuaugccacugagaagaa

SEQ ID NO: 1524992 - RNA, 19 nt, Homo sapiens
  misc_RNA (1)...(19): siRNA sense strand
acucauauaccagcaauuc

SEQ ID NO: 1524993 - RNA, 19 nt, Homo sapiens
  misc_RNA (1)...(19): siRNA sense strand
gcuagcagaagccaaguac

SEQ ID NO: 1524994 - RNA, 19 nt, Homo sapiens
  misc_RNA (1)...(19): siRNA sense strand
aggagacccugaacauuuu

SEQ ID NO: 1524995 - RNA, 19 nt, Homo sapiens
  misc_RNA (1)...(19): siRNA sense strand
gcugcuacccgcaccacuu

SEQ ID NO: 1524996 - RNA, 19 nt, Homo sapiens
  misc_RNA (1)...(19): siRNA sense strand
auacucauauaccagcaau

SEQ ID NO: 1524997 - RNA, 19 nt, Homo sapiens
  misc_RNA (1)...(19): siRNA sense strand
ugaccaagcaggacaccau

SEQ ID NO: 1524998 - RNA, 19 nt, Homo sapiens
  misc_RNA (1)...(19): siRNA sense strand
gaacugaugucaauauuag

SEQ ID NO: 1524999 - RNA, 19 nt, Homo sapiens
  misc_RNA (1)...(19): siRNA sense strand
caagcaagcugaugaagaa

SEQ ID NO: 1525000 - RNA, 19 nt, Homo sapiens
  misc_RNA (1)...(19): siRNA sense strand
ugaaggcucugauguauuu

SEQ ID NO: 1525001 - RNA, 19 nt, Homo sapiens
  misc_RNA (1)...(19): siRNA sense strand
ggucaaauguggaaccaua

SEQ ID NO: 1525002 - RNA, 19 nt, Homo sapiens
  misc_RNA (1)...(19): siRNA sense strand
caaaagaccuguaauaaga

SEQ ID NO: 1525003 - RNA, 19 nt, Homo sapiens
  misc_RNA (1)...(19): siRNA sense strand
gaauucagcuccaacuuuc

SEQ ID NO: 1525004 - RNA, 19 nt, Homo sapiens
  misc_RNA (1)...(19): siRNA sense strand
ccauacagcuuucugauga

SEQ ID NO: 1525005 - RNA, 19 nt, Homo sapiens
  misc_RNA (1)...(19): siRNA sense strand
gaugaaggcucugauguau

SEQ ID NO: 1525006 - RNA, 19 nt, Homo sapiens
  misc_RNA (1)...(19): siRNA sense strand
gcaagcugaugaagaauuc

SEQ ID NO: 1525007 - RNA, 19 nt, Homo sapiens
  misc_RNA (1)...(19): siRNA sense strand
ggaguuaccuuaggaaugg

SEQ ID NO: 1525008 - RNA, 19 nt, Homo sapiens
  misc_RNA (1)...(19): siRNA sense strand
gaaagaaggagaugguguu

SEQ ID NO: 1525009 - RNA, 19 nt, Homo sapiens
  misc_RNA (1)...(19): siRNA sense strand
ggacuuguguaucuucgaa

SEQ ID NO: 1525010 - RNA, 19 nt, Homo sapiens
  misc_RNA (1)...(19): siRNA sense strand
acacauuguucuucuguuu

SEQ ID NO: 1525011 - RNA, 19 nt, Homo sapiens
  misc_RNA (1)...(19): siRNA sense strand
guauuggacuuguuguauu

SEQ ID NO: 1525012 - RNA, 19 nt, Homo sapiens
  misc_RNA (1)...(19): siRNA sense strand
acacgggacaugugaauua

SEQ ID NO: 1525013 - RNA, 19 nt, Homo sapiens
  misc_RNA (1)...(19): siRNA sense strand
ggaaagcgaaagauaaugu

SEQ ID NO: 1525014 - RNA, 19 nt, Homo sapiens
  misc_RNA (1)...(19): siRNA sense strand
gcucaucguuugcgacguu

SEQ ID NO: 1525015 - RNA, 19 nt, Homo sapiens
  misc_RNA (1)...(19): siRNA sense strand
agaaggagaugguguuauc

SEQ ID NO: 1525016 - RNA, 19 nt, Homo sapiens
  misc_RNA (1)...(19): siRNA sense strand
ucaguuggaugcucucuau

SEQ ID NO: 1525017 - RNA, 19 nt, Homo sapiens
  misc_RNA (1)...(19): siRNA sense strand
ggaauggacuaacaaaaga

SEQ ID NO: 1525018 - RNA, 19 nt, Homo sapiens
  misc_RNA (1)...(19): siRNA sense strand
cagaacugaugucaauauu

SEQ ID NO: 1525019 - RNA, 19 nt, Homo sapiens
  misc_RNA (1)...(19): siRNA sense strand
acagcuuucugaugaguua

SEQ ID NO: 1525020 - RNA, 19 nt, Homo sapiens
  misc_RNA (1)...(19): siRNA sense strand
uuagucagcugauggaaug

SEQ ID NO: 1525021 - RNA, 19 nt, Homo sapiens
  misc_RNA (1)...(19): siRNA sense strand
gaauggugcuuuuauguga

SEQ ID NO: 1525022 - RNA, 19 nt, Homo sapiens
  misc_RNA (1)...(19): siRNA sense strand
cgggacaugugaauuauau

SEQ ID NO: 1525023 - RNA, 19 nt, Homo sapiens
  misc_RNA (1)...(19): siRNA sense strand
gcaagcaagcugaugaaga

SEQ ID NO: 1525024 - RNA, 19 nt, Homo sapiens
  misc_RNA (1)...(19): siRNA sense strand
caaauguggaaccauauaa

SEQ ID NO: 1525025 - RNA, 19 nt, Homo sapiens
  misc_RNA (1)...(19): siRNA sense strand
ugacauggauauuggaaag

SEQ ID NO: 1525026 - RNA, 19 nt, Homo sapiens
  misc_RNA (1)...(19): siRNA sense strand
ccgagaaauuacuccguua

SEQ ID NO: 1525027 - RNA, 19 nt, Homo sapiens
  misc_RNA (1)...(19): siRNA sense strand
ugaauucagcuccaacuuu

SEQ ID NO: 1525028 - RNA, 19 nt, Homo sapiens
  misc_RNA (1)...(19): siRNA sense strand
ucgaagaaguaauauggaa

SEQ ID NO: 1525029 - RNA, 19 nt, Homo sapiens
  misc_RNA (1)...(19): siRNA sense strand
uauaagaggaccaccauau

SEQ ID NO: 1525030 - RNA, 19 nt, Homo sapiens
  misc_RNA (1)...(19): siRNA sense strand
gaaugaauggagacaaguu

SEQ ID NO: 1525031 - RNA, 19 nt, Homo sapiens
  misc_RNA (1)...(19): siRNA sense strand
gcaaacuccuggcgauacu

SEQ ID NO: 1525032 - RNA, 19 nt, Homo sapiens
  misc_RNA (1)...(19): siRNA sense strand
gauauuggaaagcgaaaga

SEQ ID NO: 1525033 - RNA, 19 nt, Homo sapiens
  misc_RNA (1)...(19): siRNA sense strand
ucaaauguggaaccauaua

SEQ ID NO: 1525034 - RNA, 19 nt, Homo sapiens
  misc_RNA (1)...(19): siRNA sense strand
ugaugaaggcucugaugua

SEQ ID NO: 1525035 - RNA, 19 nt, Homo sapiens
  misc_RNA (1)...(19): siRNA sense strand
guauuauucuucaguugga

SEQ ID NO: 1525036 - RNA, 19 nt, Homo sapiens
  misc_RNA (1)...(19): siRNA sense strand
gaaauuacuccguuaucgu

SEQ ID NO: 1525037 - RNA, 19 nt, Homo sapiens
  misc_RNA (1)...(19): siRNA sense strand
cauguucacugcucuccaa

SEQ ID NO: 1525038 - RNA, 19 nt, Homo sapiens
  misc_RNA (1)...(19): siRNA sense strand
gguguuaucugaaaagguu

SEQ ID NO: 1525039 - RNA, 19 nt, Homo sapiens
  misc_RNA (1)...(19): siRNA sense strand
gaaagcgaaagauaaugug

SEQ ID NO: 1525040 - RNA, 19 nt, Homo sapiens
  misc_RNA (1)...(19): siRNA sense strand
gauggaauggacuaacaaa

SEQ ID NO: 1525041 - RNA, 19 nt, Homo sapiens
  misc_RNA (1)...(19): siRNA sense strand
uaauguguguggcugguau

SEQ ID NO: 1525042 - RNA, 19 nt, Homo sapiens
  misc_RNA (1)...(19): siRNA sense strand
caaacggggugauacauau

SEQ ID NO: 1525043 - RNA, 19 nt, Homo sapiens
  misc_RNA (1)...(19): siRNA sense strand
aaagaaggagaugguguua

SEQ ID NO: 1525044 - RNA, 19 nt, Homo sapiens
  misc_RNA (1)...(19): siRNA sense strand
guucacugcucuccaacug

SEQ ID NO: 1525045 - RNA, 19 nt, Homo sapiens
  misc_RNA (1)...(19): siRNA sense strand
gguauuggacuuguuguau

SEQ ID NO: 1525046 - RNA, 19 nt, Homo sapiens
  misc_RNA (1)...(19): siRNA sense strand
ccucugacauggauauugg

SEQ ID NO: 1525047 - RNA, 19 nt, Homo sapiens
  misc_RNA (1)...(19): siRNA sense strand
aagaaugaauggagacaag

SEQ ID NO: 1525048 - RNA, 19 nt, Homo sapiens
  misc_RNA (1)...(19): siRNA sense strand
gcagucaagcccaguuugu

SEQ ID NO: 1525049 - RNA, 19 nt, Homo sapiens
  misc_RNA (1)...(19): siRNA sense strand
gagaaauuacuccguuauc

SEQ ID NO: 1525050 - RNA, 19 nt, Homo sapiens
  misc_RNA (1)...(19): siRNA sense strand
gugaagcugcuaccucuga

SEQ ID NO: 1525051 - RNA, 19 nt, Homo sapiens
  misc_RNA (1)...(19): siRNA sense strand
gggugauacauaugaguua

SEQ ID NO: 1525052 - RNA, 19 nt, Homo sapiens
  misc_RNA (1)...(19): siRNA sense strand
uuucagaugcuaaacauga

SEQ ID NO: 1525053 - RNA, 19 nt, Homo sapiens
  misc_RNA (1)...(19): siRNA sense strand
guguguggcugguauugga

SEQ ID NO: 1525054 - RNA, 19 nt, Homo sapiens
  misc_RNA (1)...(19): siRNA sense strand
cacauuguucuucuguuua

SEQ ID NO: 1525055 - RNA, 19 nt, Homo sapiens
  misc_RNA (1)...(19): siRNA sense strand
acagaacugaugucaauau

SEQ ID NO: 1525056 - RNA, 19 nt, Homo sapiens
  misc_RNA (1)...(19): siRNA sense strand
gaugucaauauuagaguga

SEQ ID NO: 1525057 - RNA, 19 nt, Homo sapiens
  misc_RNA (1)...(19): siRNA sense strand
gcgauacuccagugcauuc

SEQ ID NO: 1525058 - RNA, 19 nt, Homo sapiens
  misc_RNA (1)...(19): siRNA sense strand
uaaugguggaguuaccuua

SEQ ID NO: 1525059 - RNA, 19 nt, Homo sapiens
  misc_RNA (1)...(19): siRNA sense strand
caacuuucaucaacuuucc

SEQ ID NO: 1525060 - RNA, 19 nt, Homo sapiens
  misc_RNA (1)...(19): siRNA sense strand
gcauucaccaacaggauau

SEQ ID NO: 1525061 - RNA, 19 nt, Homo sapiens
  misc_RNA (1)...(19): siRNA sense strand
cgagaaauuacuccguuau

SEQ ID NO: 1525062 - RNA, 19 nt, Homo sapiens
  misc_RNA (1)...(19): siRNA sense strand
ggacuuguuguauuauucu

SEQ ID NO: 1525063 - RNA, 19 nt, Homo sapiens
  misc_RNA (1)...(19): siRNA sense strand
gaagcagucaagcccaguu

SEQ ID NO: 1525064 - RNA, 19 nt, Homo sapiens
  misc_RNA (1)...(19): siRNA sense strand
aaagaaagaaggagauggu

SEQ ID NO: 1525065 - RNA, 19 nt, Homo sapiens
  misc_RNA (1)...(19): siRNA sense strand
ugauguauuucagaugcua

SEQ ID NO: 1525066 - RNA, 19 nt, Homo sapiens
  misc_RNA (1)...(19): siRNA sense strand
agaaauuacuccguuaucg

SEQ ID NO: 1525067 - RNA, 19 nt, Homo sapiens
  misc_RNA (1)...(19): siRNA sense strand
guuggaugcucucuauuuu

SEQ ID NO: 1525068 - RNA, 19 nt, Homo sapiens
  misc_RNA (1)...(19): siRNA sense strand
uauuggaaagcgaaagaua

SEQ ID NO: 1525069 - RNA, 19 nt, Homo sapiens
  misc_RNA (1)...(19): siRNA sense strand
ucaucaacuuuccugcaaa

SEQ ID NO: 1525070 - RNA, 19 nt, Homo sapiens
  misc_RNA (1)...(19): siRNA sense strand
cacgggacaugugaauuau

SEQ ID NO: 1525071 - RNA, 19 nt, Homo sapiens
  misc_RNA (1)...(19): siRNA sense strand
uaagaggaccaccauaugc

SEQ ID NO: 1525072 - RNA, 19 nt, Homo sapiens
  misc_RNA (1)...(19): siRNA sense strand
gcuccaacuuucaucaacu

SEQ ID NO: 1525073 - RNA, 19 nt, Homo sapiens
  misc_RNA (1)...(19): siRNA sense strand
agaccuguaauaagaauga

SEQ ID NO: 1525074 - RNA, 19 nt, Homo sapiens
  misc_RNA (1)...(19): siRNA sense strand
cugauggaauggacuaaca

SEQ ID NO: 1525075 - RNA, 19 nt, Homo sapiens
  misc_RNA (1)...(19): siRNA sense strand
ggacaugugaauuauaucc

SEQ ID NO: 1525076 - RNA, 19 nt, Homo sapiens
  misc_RNA (1)...(19): siRNA sense strand
ggugauacauaugaguuac

SEQ ID NO: 1525077 - RNA, 19 nt, Homo sapiens
  misc_RNA (1)...(19): siRNA sense strand
caucaacuuuccugcaaaa

SEQ ID NO: 1525078 - RNA, 19 nt, Homo sapiens
  misc_RNA (1)...(19): siRNA sense strand
ggauugcuuuuggcuguua

SEQ ID NO: 1525079 - RNA, 19 nt, Homo sapiens
  misc_RNA (1)...(19): siRNA sense strand
agcgaaagauaaugugugu

SEQ ID NO: 1525080 - RNA, 19 nt, Homo sapiens
  misc_RNA (1)...(19): siRNA sense strand
cgaagaaguaauauggaau

SEQ ID NO: 1525081 - RNA, 19 nt, Homo sapiens
  misc_RNA (1)...(19): siRNA sense strand
ccaaagaaagaaggagaug

SEQ ID NO: 1525082 - RNA, 19 nt, Homo sapiens
  misc_RNA (1)...(19): siRNA sense strand
gcugguauuggacuuguug

SEQ ID NO: 1525083 - RNA, 19 nt, Homo sapiens
  misc_RNA (1)...(19): siRNA sense strand
cagucaagcccaguuugua

SEQ ID NO: 1525084 - RNA, 19 nt, Homo sapiens
  misc_RNA (1)...(19): siRNA sense strand
cauauaagaggaccaccau

SEQ ID NO: 1525085 - RNA, 19 nt, Homo sapiens
  misc_RNA (1)...(19): siRNA sense strand
uggacuuguuguauuauuc

SEQ ID NO: 1525086 - RNA, 19 nt, Homo sapiens
  misc_RNA (1)...(19): siRNA sense strand
gaccuguaauaagaaugaa

SEQ ID NO: 1525087 - RNA, 19 nt, Homo sapiens
  misc_RNA (1)...(19): siRNA sense strand
guagcugaaacacacauug

SEQ ID NO: 1525088 - RNA, 19 nt, Homo sapiens
  misc_RNA (1)...(19): siRNA sense strand
auaagaggaccaccauaug

SEQ ID NO: 1525089 - RNA, 19 nt, Homo sapiens
  misc_RNA (1)...(19): siRNA sense strand
caugguggauuuugaugaa

SEQ ID NO: 1525090 - RNA, 19 nt, Homo sapiens
  misc_RNA (1)...(19): siRNA sense strand
aguuggaugcucucuauuu

SEQ ID NO: 1525091 - RNA, 19 nt, Homo sapiens
  misc_RNA (1)...(19): siRNA sense strand
uggcgcugcucaucguuug

SEQ ID NO: 1525092 - RNA, 19 nt, Homo sapiens
  misc_RNA (1)...(19): siRNA sense strand
caucuggucaaauguggaa

SEQ ID NO: 1525093 - RNA, 19 nt, Homo sapiens
  misc_RNA (1)...(19): siRNA sense strand
cagcugauggaauggacua

SEQ ID NO: 1525094 - RNA, 19 nt, Homo sapiens
  misc_RNA (1)...(19): siRNA sense strand
ccaaacggggugauacaua

SEQ ID NO: 1525095 - RNA, 19 nt, Homo sapiens
  misc_RNA (1)...(19): siRNA sense strand
cagaugcuaaacaugaauu

SEQ ID NO: 1525096 - RNA, 19 nt, Homo sapiens
  misc_RNA (1)...(19): siRNA sense strand
aauguggaaccauauaaga

SEQ ID NO: 1525097 - RNA, 19 nt, Homo sapiens
  misc_RNA (1)...(19): siRNA sense strand
uagcugaaacacacauugu

SEQ ID NO: 1525098 - RNA, 19 nt, Homo sapiens
  misc_RNA (1)...(19): siRNA sense strand
gaaacaugcuuggaaauaa

SEQ ID NO: 1525099 - RNA, 19 nt, Homo sapiens
  misc_RNA (1)...(19): siRNA sense strand
gugaagaccugcaaacuaa

SEQ ID NO: 1525100 - RNA, 19 nt, Homo sapiens
  misc_RNA (1)...(19): siRNA sense strand
ucagcaaacuuacuucuua

SEQ ID NO: 1525101 - RNA, 19 nt, Homo sapiens
  misc_RNA (1)...(19): siRNA sense strand
caagaaauguucaaaggaa

SEQ ID NO: 1525102 - RNA, 19 nt, Homo sapiens
  misc_RNA (1)...(19): siRNA sense strand
caaaggugcuguggaaaua

SEQ ID NO: 1525103 - RNA, 19 nt, Homo sapiens
  misc_RNA (1)...(19): siRNA sense strand
cuuaaugucugcaaacuua

SEQ ID NO: 1525104 - RNA, 19 nt, Homo sapiens
  misc_RNA (1)...(19): siRNA sense strand
gcacggcaauggaacagua

SEQ ID NO: 1525105 - RNA, 19 nt, Homo sapiens
  misc_RNA (1)...(19): siRNA sense strand
gaaguaaguuccuaaacau

SEQ ID NO: 1525106 - RNA, 19 nt, Homo sapiens
  misc_RNA (1)...(19): siRNA sense strand
aaacuaacauggaagcuuu

SEQ ID NO: 1525107 - RNA, 19 nt, Homo sapiens
  misc_RNA (1)...(19): siRNA sense strand
ggaaacaugcuuggaaaua

SEQ ID NO: 1525108 - RNA, 19 nt, Homo sapiens
  misc_RNA (1)...(19): siRNA sense strand
gugcagaaaucauaaguga

SEQ ID NO: 1525109 - RNA, 19 nt, Homo sapiens
  misc_RNA (1)...(19): siRNA sense strand
cagcgacaaucaacaauuu

SEQ ID NO: 1525110 - RNA, 19 nt, Homo sapiens
  misc_RNA (1)...(19): siRNA sense strand
agaaggagguggcauuaaa

SEQ ID NO: 1525111 - RNA, 19 nt, Homo sapiens
  misc_RNA (1)...(19): siRNA sense strand
gaaagaaggagguggcauu

SEQ ID NO: 1525112 - RNA, 19 nt, Homo sapiens
  misc_RNA (1)...(19): siRNA sense strand
ggacgucuguaccaauauu

SEQ ID NO: 1525113 - RNA, 19 nt, Homo sapiens
  misc_RNA (1)...(19): siRNA sense strand
uaaagcuucuugucaguaa

SEQ ID NO: 1525114 - RNA, 19 nt, Homo sapiens
  misc_RNA (1)...(19): siRNA sense strand
gaagaccagugcagaaauc

SEQ ID NO: 1525115 - RNA, 19 nt, Homo sapiens
  misc_RNA (1)...(19): siRNA sense strand
gaaggaaacaugcuuggaa

SEQ ID NO: 1525116 - RNA, 19 nt, Homo sapiens
  misc_RNA (1)...(19): siRNA sense strand
gaaauaaaggagcaagaaa

SEQ ID NO: 1525117 - RNA, 19 nt, Homo sapiens
  misc_RNA (1)...(19): siRNA sense strand
uaaccaggcucgugaacaa

SEQ ID NO: 1525118 - RNA, 19 nt, Homo sapiens
  misc_RNA (1)...(19): siRNA sense strand
caaagaaacaguuaugaug

SEQ ID NO: 1525119 - RNA, 19 nt, Homo sapiens
  misc_RNA (1)...(19): siRNA sense strand
ggaccugcauccucaagaa

SEQ ID NO: 1525120 - RNA, 19 nt, Homo sapiens
  misc_RNA (1)...(19): siRNA sense strand
gcacagccuuggccagcua

SEQ ID NO: 1525121 - RNA, 19 nt, Homo sapiens
  misc_RNA (1)...(19): siRNA sense strand
gaaacuugguugauucauc

SEQ ID NO: 1525122 - RNA, 19 nt, Homo sapiens
  misc_RNA (1)...(19): siRNA sense strand
uaaaugaggacaucaagaa

SEQ ID NO: 1525123 - RNA, 19 nt, Homo sapiens
  misc_RNA (1)...(19): siRNA sense strand
ccaggugacugcuacauug

SEQ ID NO: 1525124 - RNA, 19 nt, Homo sapiens
  misc_RNA (1)...(19): siRNA sense strand
aaacucugcugucauuauu

SEQ ID NO: 1525125 - RNA, 19 nt, Homo sapiens
  misc_RNA (1)...(19): siRNA sense strand
ggacgcagaaauagaagua

SEQ ID NO: 1525126 - RNA, 19 nt, Homo sapiens
  misc_RNA (1)...(19): siRNA sense strand
gugaggagcuggugaucaa

SEQ ID NO: 1525127 - RNA, 19 nt, Homo sapiens
  misc_RNA (1)...(19): siRNA sense strand
cagauguuaugccuuauuu

SEQ ID NO: 1525128 - RNA, 19 nt, Homo sapiens
  misc_RNA (1)...(19): siRNA sense strand
guaccaauauugccagaau

SEQ ID NO: 1525129 - RNA, 19 nt, Homo sapiens
  misc_RNA (1)...(19): siRNA sense strand
gcaggaaugagaagaauga

SEQ ID NO: 1525130 - RNA, 19 nt, Homo sapiens
  misc_RNA (1)...(19): siRNA sense strand
aaucauaagugaagcaaga

SEQ ID NO: 1525131 - RNA, 19 nt, Homo sapiens
  misc_RNA (1)...(19): siRNA sense strand
gcaagaagaggacgcagaa

SEQ ID NO: 1525132 - RNA, 19 nt, Homo sapiens
  misc_RNA (1)...(19): siRNA sense strand
gcaagaaaugcauuaagaa

SEQ ID NO: 1525133 - RNA, 19 nt, Homo sapiens
  misc_RNA (1)...(19): siRNA sense strand
gcagaaaucauaagugaag

SEQ ID NO: 1525134 - RNA, 19 nt, Homo sapiens
  misc_RNA (1)...(19): siRNA sense strand
agaaguaaguuccuaaaca

SEQ ID NO: 1525135 - RNA, 19 nt, Homo sapiens
  misc_RNA (1)...(19): siRNA sense strand
ggaacaacaucuuuaccau

SEQ ID NO: 1525136 - RNA, 19 nt, Homo sapiens
  misc_RNA (1)...(19): siRNA sense strand
agaagaggacgcagaaaua

SEQ ID NO: 1525137 - RNA, 19 nt, Homo sapiens
  misc_RNA (1)...(19): siRNA sense strand
ugaccacgcuggaauacaa

SEQ ID NO: 1525138 - RNA, 19 nt, Homo sapiens
  misc_RNA (1)...(19): siRNA sense strand
gaccagugcagaaaucaua

SEQ ID NO: 1525139 - RNA, 19 nt, Homo sapiens
  misc_RNA (1)...(19): siRNA sense strand
caacaucuuuaccaucuca

SEQ ID NO: 1525140 - RNA, 19 nt, Homo sapiens
  misc_RNA (1)...(19): siRNA sense strand
cagcuggccugcuugguuu

SEQ ID NO: 1525141 - RNA, 19 nt, Homo sapiens
  misc_RNA (1)...(19): siRNA sense strand
uaaaggagcaagaaauguu

SEQ ID NO: 1525142 - RNA, 19 nt, Homo sapiens
  misc_RNA (1)...(19): siRNA sense strand
caucucaucucaagaaugg

SEQ ID NO: 1525143 - RNA, 19 nt, Homo sapiens
  misc_RNA (1)...(19): siRNA sense strand
gaaguauucuccugaagac

SEQ ID NO: 1525144 - RNA, 19 nt, Homo sapiens
  misc_RNA (1)...(19): siRNA sense strand
guaacaacauggauggaau

SEQ ID NO: 1525145 - RNA, 19 nt, Homo sapiens
  misc_RNA (1)...(19): siRNA sense strand
ugagaaacuugguugauuc

SEQ ID NO: 1525146 - RNA, 19 nt, Homo sapiens
  misc_RNA (1)...(19): siRNA sense strand
gcaaaggugcuguggaaau

SEQ ID NO: 1525147 - RNA, 19 nt, Homo sapiens
  misc_RNA (1)...(19): siRNA sense strand
aagcugaccugcaagaaga

SEQ ID NO: 1525148 - RNA, 19 nt, Homo sapiens
  misc_RNA (1)...(19): siRNA sense strand
gacgaagucuuuuggaaua

SEQ ID NO: 1525149 - RNA, 19 nt, Homo sapiens
  misc_RNA (1)...(19): siRNA sense strand
gcgaagauuagaagaguaa

SEQ ID NO: 1525150 - RNA, 19 nt, Homo sapiens
  misc_RNA (1)...(19): siRNA sense strand
caacacacucuuacucuug

SEQ ID NO: 1525151 - RNA, 19 nt, Homo sapiens
  misc_RNA (1)...(19): siRNA sense strand
gcuauauauugcugaauug

SEQ ID NO: 1525152 - RNA, 19 nt, Homo sapiens
  misc_RNA (1)...(19): siRNA sense strand
aaggacgucuguaccaaua

SEQ ID NO: 1525153 - RNA, 19 nt, Homo sapiens
  misc_RNA (1)...(19): siRNA sense strand
cgccagggcucgcuuauuc

SEQ ID NO: 1525154 - RNA, 19 nt, Homo sapiens
  misc_RNA (1)...(19): siRNA sense strand
gagcugaaaccgaaaguuc

SEQ ID NO: 1525155 - RNA, 19 nt, Homo sapiens
  misc_RNA (1)...(19): siRNA sense strand
aaaguuaguggacuguuua

SEQ ID NO: 1525156 - RNA, 19 nt, Homo sapiens
  misc_RNA (1)...(19): siRNA sense strand
gcaucaggauaucugcuuu

SEQ ID NO: 1525157 - RNA, 19 nt, Homo sapiens
  misc_RNA (1)...(19): siRNA sense strand
uuccagauguuaugccuua

SEQ ID NO: 1525158 - RNA, 19 nt, Homo sapiens
  misc_RNA (1)...(19): siRNA sense strand
agaaauagaaguagacgaa

SEQ ID NO: 1525159 - RNA, 19 nt, Homo sapiens
  misc_RNA (1)...(19): siRNA sense strand
gaagaggacgcagaaauag

SEQ ID NO: 1525160 - RNA, 19 nt, Homo sapiens
  misc_RNA (1)...(19): siRNA sense strand
gcaagaaauguucaaagga

SEQ ID NO: 1525161 - RNA, 19 nt, Homo sapiens
  misc_RNA (1)...(19): siRNA sense strand
gcagaagaccagugcagaa

SEQ ID NO: 1525162 - RNA, 19 nt, Homo sapiens
  misc_RNA (1)...(19): siRNA sense strand
caagugaagaauuccauaa

SEQ ID NO: 1525163 - RNA, 19 nt, Homo sapiens
  misc_RNA (1)...(19): siRNA sense strand
gagaaagggagcauccaaa

SEQ ID NO: 1525164 - RNA, 19 nt, Homo sapiens
  misc_RNA (1)...(19): siRNA sense strand
caaagaagacaguggaauc

SEQ ID NO: 1525165 - RNA, 19 nt, Homo sapiens
  misc_RNA (1)...(19): siRNA sense strand
gaagcaagaaaugcauuaa

SEQ ID NO: 1525166 - RNA, 19 nt, Homo sapiens
  misc_RNA (1)...(19): siRNA sense strand
aaggaaacaugcuuggaaa

SEQ ID NO: 1525167 - RNA, 19 nt, Homo sapiens
  misc_RNA (1)...(19): siRNA sense strand
agcaagaaaugcauuaaga

SEQ ID NO: 1525168 - RNA, 19 nt, Homo sapiens
  misc_RNA (1)...(19): siRNA sense strand
uccaaacucugcugucauu

SEQ ID NO: 1525169 - RNA, 19 nt, Homo sapiens
  misc_RNA (1)...(19): siRNA sense strand
uguuaugccuuauuucuga

SEQ ID NO: 1525170 - RNA, 19 nt, Homo sapiens
  misc_RNA (1)...(19): siRNA sense strand
guaagaaguaaguuccuaa

SEQ ID NO: 1525171 - RNA, 19 nt, Homo sapiens
  misc_RNA (1)...(19): siRNA sense strand
acaaauaaaugaggacauc

SEQ ID NO: 1525172 - RNA, 19 nt, Homo sapiens
  misc_RNA (1)...(19): siRNA sense strand
uaaacuaguugauguuggu

SEQ ID NO: 1525173 - RNA, 19 nt, Homo sapiens
  misc_RNA (1)...(19): siRNA sense strand
gaagaagcaggauuuaguc

SEQ ID NO: 1525174 - RNA, 19 nt, Homo sapiens
  misc_RNA (1)...(19): siRNA sense strand
gcagaggacgugcucauca

SEQ ID NO: 1525175 - RNA, 19 nt, Homo sapiens
  misc_RNA (1)...(19): siRNA sense strand
gaauccaaagaaacaguua

SEQ ID NO: 1525176 - RNA, 19 nt, Homo sapiens
  misc_RNA (1)...(19): siRNA sense strand
acaacuucaucaugcuuua

SEQ ID NO: 1525177 - RNA, 19 nt, Homo sapiens
  misc_RNA (1)...(19): siRNA sense strand
gcauuaagaacaguuagaa

SEQ ID NO: 1525178 - RNA, 19 nt, Homo sapiens
  misc_RNA (1)...(19): siRNA sense strand
ccaacacacucuuacucuu

SEQ ID NO: 1525179 - RNA, 19 nt, Homo sapiens
  misc_RNA (1)...(19): siRNA sense strand
aaagaaggagguggcauua

SEQ ID NO: 1525180 - RNA, 19 nt, Homo sapiens
  misc_RNA (1)...(19): siRNA sense strand
agaacaauguccacagguu

SEQ ID NO: 1525181 - RNA, 19 nt, Homo sapiens
  misc_RNA (1)...(19): siRNA sense strand
cagaggacgugcucaucaa

SEQ ID NO: 1525182 - RNA, 19 nt, Homo sapiens
  misc_RNA (1)...(19): siRNA sense strand
gaacaauuuuccaaagaga

SEQ ID NO: 1525183 - RNA, 19 nt, Homo sapiens
  misc_RNA (1)...(19): siRNA sense strand
cagacucgcucagccuuaa

SEQ ID NO: 1525184 - RNA, 19 nt, Homo sapiens
  misc_RNA (1)...(19): siRNA sense strand
gaagacccuguguaaacua

SEQ ID NO: 1525185 - RNA, 19 nt, Homo sapiens
  misc_RNA (1)...(19): siRNA sense strand
gcuauuugccacuuaaaga

SEQ ID NO: 1525186 - RNA, 19 nt, Homo sapiens
  misc_RNA (1)...(19): siRNA sense strand
gcccauucccucuuucuaa

SEQ ID NO: 1525187 - RNA, 19 nt, Homo sapiens
  misc_RNA (1)...(19): siRNA sense strand
guuaguggacuguuuaaga

SEQ ID NO: 1525188 - RNA, 19 nt, Homo sapiens
  misc_RNA (1)...(19): siRNA sense strand
caaucucacuguggauaaa

SEQ ID NO: 1525189 - RNA, 19 nt, Homo sapiens
  misc_RNA (1)...(19): siRNA sense strand
gcgauuucauugugcagaa

SEQ ID NO: 1525190 - RNA, 19 nt, Homo sapiens
  misc_RNA (1)...(19): siRNA sense strand
gaaaugcauuaagaacagu

SEQ ID NO: 1525191 - RNA, 19 nt, Homo sapiens
  misc_RNA (1)...(19): siRNA sense strand
ccaggcucgugaacaauuu

SEQ ID NO: 1525192 - RNA, 19 nt, Homo sapiens
  misc_RNA (1)...(19): siRNA sense strand
ggccagcuauuccagaugu

SEQ ID NO: 1525193 - RNA, 19 nt, Homo sapiens
  misc_RNA (1)...(19): siRNA sense strand
ugaagcaagaaaugcauua

SEQ ID NO: 1525194 - RNA, 19 nt, Homo sapiens
  misc_RNA (1)...(19): siRNA sense strand
caugaugucugcgauuuca

SEQ ID NO: 1525195 - RNA, 19 nt, Homo sapiens
  misc_RNA (1)...(19): siRNA sense strand
caaacucugcugucauuau

SEQ ID NO: 1525196 - RNA, 19 nt, Homo sapiens
  misc_RNA (1)...(19): siRNA sense strand
agaaaugcauuaagaacag

SEQ ID NO: 1525197 - RNA, 19 nt, Homo sapiens
  misc_RNA (1)...(19): siRNA sense strand
ucacuaaugcuucgucaug

SEQ ID NO: 1525198 - RNA, 19 nt, Homo sapiens
  misc_RNA (1)...(19): siRNA sense strand
ggaagcauguggugaagga

SEQ ID NO: 1525199 - RNA, 19 nt, Homo sapiens
  misc_RNA (1)...(19): siRNA sense strand
gcaagaacaucuggaucaa

SEQ ID NO: 1525200 - RNA, 19 nt, Homo sapiens
  misc_RNA (1)...(19): siRNA sense strand
cagacaaacucaaccagaa

SEQ ID NO: 1525201 - RNA, 19 nt, Homo sapiens
  misc_RNA (1)...(19): siRNA sense strand
aagaacaucuggaucaaga

SEQ ID NO: 1525202 - RNA, 19 nt, Homo sapiens
  misc_RNA (1)...(19): siRNA sense strand
gauucugaccuguuuguua

SEQ ID NO: 1525203 - RNA, 19 nt, Homo sapiens
  misc_RNA (1)...(19): siRNA sense strand
gacaguaucaugagaguga

SEQ ID NO: 1525204 - RNA, 19 nt, Homo sapiens
  misc_RNA (1)...(19): siRNA sense strand
gagcaugcccuccaaauac

SEQ ID NO: 1525205 - RNA, 19 nt, Homo sapiens
  misc_RNA (1)...(19): siRNA sense strand
gaacaucuggaucaagaga

SEQ ID NO: 1525206 - RNA, 19 nt, Homo sapiens
  misc_RNA (1)...(19): siRNA sense strand
auucugaccuguuuguuaa

SEQ ID NO: 1525207 - RNA, 19 nt, Homo sapiens
  misc_RNA (1)...(19): siRNA sense strand
ccaaauaccgcaagaacau

SEQ ID NO: 1525208 - RNA, 19 nt, Homo sapiens
  misc_RNA (1)...(19): siRNA sense strand
gaacagacaaacucaacca

SEQ ID NO: 1525209 - RNA, 19 nt, Homo sapiens
  misc_RNA (1)...(19): siRNA sense strand
gggacuuucucauuguuga

SEQ ID NO: 1525210 - RNA, 19 nt, Homo sapiens
  misc_RNA (1)...(19): siRNA sense strand
ugagcaugcccuccaaaua

SEQ ID NO: 1525211 - RNA, 19 nt, Homo sapiens
  misc_RNA (1)...(19): siRNA sense strand
agaugauucugaccuguuu

SEQ ID NO: 1525212 - RNA, 19 nt, Homo sapiens
  misc_RNA (1)...(19): siRNA sense strand
acacaaaccgcagacagua

SEQ ID NO: 1525213 - RNA, 19 nt, Homo sapiens
  misc_RNA (1)...(19): siRNA sense strand
cagcugagccacaguuauc

SEQ ID NO: 1525214 - RNA, 19 nt, Homo sapiens
  misc_RNA (1)...(19): siRNA sense strand
gaguccagcucagaagaug

SEQ ID NO: 1525215 - RNA, 19 nt, Homo sapiens
  misc_RNA (1)...(19): siRNA sense strand
gaggaagcauguggugaag

SEQ ID NO: 1525216 - RNA, 19 nt, Homo sapiens
  misc_RNA (1)...(19): siRNA sense strand
aggcugaaaucucguuugu

SEQ ID NO: 1525217 - RNA, 19 nt, Homo sapiens
  misc_RNA (1)...(19): siRNA sense strand
caacaggaacagacaaacu

SEQ ID NO: 1525218 - RNA, 19 nt, Homo sapiens
  misc_RNA (1)...(19): siRNA sense strand
gagaggaguccagcucaga

SEQ ID NO: 1525219 - RNA, 19 nt, Homo sapiens
  misc_RNA (1)...(19): siRNA sense strand
ccaccaagaggaagcaugu

SEQ ID NO: 1525220 - RNA, 19 nt, Homo sapiens
  misc_RNA (1)...(19): siRNA sense strand
caacaacaggaacagacaa

SEQ ID NO: 1525221 - RNA, 19 nt, Homo sapiens
  misc_RNA (1)...(19): siRNA sense strand
ugaaguggcugagaaacac

SEQ ID NO: 1525222 - RNA, 19 nt, Homo sapiens
  misc_RNA (1)...(19): siRNA sense strand
agagugaggaggagaguga

SEQ ID NO: 1525223 - RNA, 19 nt, Homo sapiens
  misc_RNA (1)...(19): siRNA sense strand
agaggaagcauguggugaa

SEQ ID NO: 1525224 - RNA, 19 nt, Homo sapiens
  misc_RNA (1)...(19): siRNA sense strand
gaaggcugaaaucucguuu

SEQ ID NO: 1525225 - RNA, 19 nt, Homo sapiens
  misc_RNA (1)...(19): siRNA sense strand
aaacacaacaacaggaaca

SEQ ID NO: 1525226 - RNA, 19 nt, Homo sapiens
  misc_RNA (1)...(19): siRNA sense strand
agaaacacaacaacaggaa

SEQ ID NO: 1525227 - RNA, 19 nt, Homo sapiens
  misc_RNA (1)...(19): siRNA sense strand
gcugagaaacacaacaaca

SEQ ID NO: 1525228 - RNA, 19 nt, Homo sapiens
  misc_RNA (1)...(19): siRNA sense strand
cagacaguaucaugagagu

SEQ ID NO: 1525229 - RNA, 19 nt, Homo sapiens
  misc_RNA (1)...(19): siRNA sense strand
cgcaagaacaucuggauca

SEQ ID NO: 1525230 - RNA, 19 nt, Homo sapiens
  misc_RNA (1)...(19): siRNA sense strand
cagggaacaaucugcauga

SEQ ID NO: 1525231 - RNA, 19 nt, Homo sapiens
  misc_RNA (1)...(19): siRNA sense strand
ggaguccagcucagaagau

SEQ ID NO: 1525232 - RNA, 19 nt, Homo sapiens
  misc_RNA (1)...(19): siRNA sense strand
gaccagcagcagauuguca

SEQ ID NO: 1525233 - RNA, 19 nt, Homo sapiens
  misc_RNA (1)...(19): siRNA sense strand
agaggggacuuucucauug

SEQ ID NO: 1525234 - RNA, 19 nt, Homo sapiens
  misc_RNA (1)...(19): siRNA sense strand
gaggggacuuucucauugu

SEQ ID NO: 1525235 - RNA, 19 nt, Homo sapiens
  misc_RNA (1)...(19): siRNA sense strand
gaacaagucuuacguagug

SEQ ID NO: 1525236 - RNA, 19 nt, Homo sapiens
  misc_RNA (1)...(19): siRNA sense strand
gcaaagaccucaacaccuu

SEQ ID NO: 1525237 - RNA, 19 nt, Homo sapiens
  misc_RNA (1)...(19): siRNA sense strand
caaaauagccugcaagaau

SEQ ID NO: 1525238 - RNA, 19 nt, Homo sapiens
  misc_RNA (1)...(19): siRNA sense strand
aaaggacucucagcaauuc

SEQ ID NO: 1525239 - RNA, 19 nt, Homo sapiens
  misc_RNA (1)...(19): siRNA sense strand
cugcaagaauggcgauaaa

SEQ ID NO: 1525240 - RNA, 19 nt, Homo sapiens
  misc_RNA (1)...(19): siRNA sense strand
gaacugcagguacaaagag

SEQ ID NO: 1525241 - RNA, 19 nt, Homo sapiens
  misc_RNA (1)...(19): siRNA sense strand
ucacagugguuuaaaauuc

SEQ ID NO: 1525242 - RNA, 19 nt, Homo sapiens
  misc_RNA (1)...(19): siRNA sense strand
gagaagcgacagaacaagu

SEQ ID NO: 1525243 - RNA, 19 nt, Homo sapiens
  misc_RNA (1)...(19): siRNA sense strand
aaaauagccugcaagaaug

SEQ ID NO: 1525244 - RNA, 19 nt, Homo sapiens
  misc_RNA (1)...(19): siRNA sense strand
aaagagaagcgacagaaca

SEQ ID NO: 1525245 - RNA, 19 nt, Homo sapiens
  misc_RNA (1)...(19): siRNA sense strand
acagaacaagucuuacgua

SEQ ID NO: 1525246 - RNA, 19 nt, Homo sapiens
  misc_RNA (1)...(19): siRNA sense strand
ccugguuccuguacacuug

SEQ ID NO: 1525247 - RNA, 19 nt, Homo sapiens
  misc_RNA (1)...(19): siRNA sense strand
acaaagagaagcgacagaa

SEQ ID NO: 1525248 - RNA, 19 nt, Homo sapiens
  misc_RNA (1)...(19): siRNA sense strand
ccucaucacagugguuuaa

SEQ ID NO: 1525249 - RNA, 19 nt, Homo sapiens
  misc_RNA (1)...(19): siRNA sense strand
aagagaagcgacagaacaa

SEQ ID NO: 1525250 - RNA, 19 nt, Homo sapiens
  misc_RNA (1)...(19): siRNA sense strand
gaccucaucacagugguuu

SEQ ID NO: 1525251 - RNA, 19 nt, Homo sapiens
  misc_RNA (1)...(19): siRNA sense strand
cgaacugcagguacaaaga

SEQ ID NO: 1525252 - RNA, 19 nt, Homo sapiens
  misc_RNA (1)...(19): siRNA sense strand
acauuaacaagcacacaaa

SEQ ID NO: 1525253 - RNA, 19 nt, Homo sapiens
  misc_RNA (1)...(19): siRNA sense strand
agcgacagaacaagucuua

SEQ ID NO: 1525254 - RNA, 19 nt, Homo sapiens
  misc_RNA (1)...(19): siRNA sense strand
gaagcgacagaacaagucu

SEQ ID NO: 1525255 - RNA, 19 nt, Homo sapiens
  misc_RNA (1)...(19): siRNA sense strand
cgacagaacaagucuuacg

SEQ ID NO: 1525256 - RNA, 19 nt, Homo sapiens
  misc_RNA (1)...(19): siRNA sense strand
caaagagaagcgacagaac

SEQ ID NO: 1525257 - RNA, 19 nt, Homo sapiens
  misc_RNA (1)...(19): siRNA sense strand
gauagagaaucaagcauua

SEQ ID NO: 1525258 - RNA, 19 nt, Homo sapiens
  misc_RNA (1)...(19): siRNA sense strand
gaacacaaugcacaucuua

SEQ ID NO: 1525259 - RNA, 19 nt, Homo sapiens
  misc_RNA (1)...(19): siRNA sense strand
agaaauggauuacugaaga

SEQ ID NO: 1525260 - RNA, 19 nt, Homo sapiens
  misc_RNA (1)...(19): siRNA sense strand
cagcagaugucauucagaa

SEQ ID NO: 1525261 - RNA, 19 nt, Homo sapiens
  misc_RNA (1)...(19): siRNA sense strand
caacuacuaccacagaaua

SEQ ID NO: 1525262 - RNA, 19 nt, Homo sapiens
  misc_RNA (1)...(19): siRNA sense strand
cuaaacgacuaucuaauug

SEQ ID NO: 1525263 - RNA, 19 nt, Homo sapiens
  misc_RNA (1)...(19): siRNA sense strand
acaacaaacuugaaggaaa

SEQ ID NO: 1525264 - RNA, 19 nt, Homo sapiens
  misc_RNA (1)...(19): siRNA sense strand
ggaauauagugacucaaau

SEQ ID NO: 1525265 - RNA, 19 nt, Homo sapiens
  misc_RNA (1)...(19): siRNA sense strand
caccagaaauguaggauug

SEQ ID NO: 1525266 - RNA, 19 nt, Homo sapiens
  misc_RNA (1)...(19): siRNA sense strand
gcccuuauauuaacaacaa

SEQ ID NO: 1525267 - RNA, 19 nt, Homo sapiens
  misc_RNA (1)...(19): siRNA sense strand
gcaugaggcugacgugcuu

SEQ ID NO: 1525268 - RNA, 19 nt, Homo sapiens
  misc_RNA (1)...(19): siRNA sense strand
caacgaagugaaugaagua

SEQ ID NO: 1525269 - RNA, 19 nt, Homo sapiens
  misc_RNA (1)...(19): siRNA sense strand
acucaaauguacaagcuua

SEQ ID NO: 1525270 - RNA, 19 nt, Homo sapiens
  misc_RNA (1)...(19): siRNA sense strand
ggaaccugauauuaacuuu

SEQ ID NO: 1525271 - RNA, 19 nt, Homo sapiens
  misc_RNA (1)...(19): siRNA sense strand
caacaaacuugaaggaaaa

SEQ ID NO: 1525272 - RNA, 19 nt, Homo sapiens
  misc_RNA (1)...(19): siRNA sense strand
auacuaggcuucuaagaga

SEQ ID NO: 1525273 - RNA, 19 nt, Homo sapiens
  misc_RNA (1)...(19): siRNA sense strand
uaggauugcugcucauuga

SEQ ID NO: 1525274 - RNA, 19 nt, Homo sapiens
  misc_RNA (1)...(19): siRNA sense strand
gaauauagugacucaaaug

SEQ ID NO: 1525275 - RNA, 19 nt, Homo sapiens
  misc_RNA (1)...(19): siRNA sense strand
gggaauauagugacucaaa

SEQ ID NO: 1525276 - RNA, 19 nt, Homo sapiens
  misc_RNA (1)...(19): siRNA sense strand
gguaaaugcuguuaauucg

SEQ ID NO: 1525277 - RNA, 19 nt, Homo sapiens
  misc_RNA (1)...(19): siRNA sense strand
gaaauggauuacugaagag

SEQ ID NO: 1525278 - RNA, 19 nt, Homo sapiens
  misc_RNA (1)...(19): siRNA sense strand
gcagaugucauucagaaau

SEQ ID NO: 1525279 - RNA, 19 nt, Homo sapiens
  misc_RNA (1)...(19): siRNA sense strand
cagauauucuucaaggaaa

SEQ ID NO: 1525280 - RNA, 19 nt, Homo sapiens
  misc_RNA (1)...(19): siRNA sense strand
ggcacaagaugcagaguau

SEQ ID NO: 1525281 - RNA, 19 nt, Homo sapiens
  misc_RNA (1)...(19): siRNA sense strand
ggauugcugcucauugaua

SEQ ID NO: 1525282 - RNA, 19 nt, Homo sapiens
  misc_RNA (1)...(19): siRNA sense strand
ugaaucagcccgcaucuau

SEQ ID NO: 1525283 - RNA, 19 nt, Homo sapiens
  misc_RNA (1)...(19): siRNA sense strand
uugaaagccuugaagauga

SEQ ID NO: 1525284 - RNA, 19 nt, Homo sapiens
  misc_RNA (1)...(19): siRNA sense strand
gaaauucaggaacggauug

SEQ ID NO: 1525285 - RNA, 19 nt, Homo sapiens
  misc_RNA (1)...(19): siRNA sense strand
gcaagcacagguaagcuaa

SEQ ID NO: 1525286 - RNA, 19 nt, Homo sapiens
  misc_RNA (1)...(19): siRNA sense strand
gaaucaagcauuaagcaau

SEQ ID NO: 1525287 - RNA, 19 nt, Homo sapiens
  misc_RNA (1)...(19): siRNA sense strand
cacaagaugcagaguauaa

SEQ ID NO: 1525288 - RNA, 19 nt, Homo sapiens
  misc_RNA (1)...(19): siRNA sense strand
ccugaagacuuugcuguuu

SEQ ID NO: 1525289 - RNA, 19 nt, Homo sapiens
  misc_RNA (1)...(19): siRNA sense strand
ucacagaacuaauguugac

SEQ ID NO: 1525290 - RNA, 19 nt, Homo sapiens
  misc_RNA (1)...(19): siRNA sense strand
ucaccagcccuuauauuaa

SEQ ID NO: 1525291 - RNA, 19 nt, Homo sapiens
  misc_RNA (1)...(19): siRNA sense strand
uacaagcucuuaaacuuca

SEQ ID NO: 1525292 - RNA, 19 nt, Homo sapiens
  misc_RNA (1)...(19): siRNA sense strand
uguacaagcuuauggaaca

SEQ ID NO: 1525293 - RNA, 19 nt, Homo sapiens
  misc_RNA (1)...(19): siRNA sense strand
uauagugacucaaauguac

SEQ ID NO: 1525294 - RNA, 19 nt, Homo sapiens
  misc_RNA (1)...(19): siRNA sense strand
cgaagugaaugaaguaaaa

SEQ ID NO: 1525295 - RNA, 19 nt, Homo sapiens
  misc_RNA (1)...(19): siRNA sense strand
ugaaccaucucacugacaa

SEQ ID NO: 1525296 - RNA, 19 nt, Homo sapiens
  misc_RNA (1)...(19): siRNA sense strand
gaauuaaacaacgaaguga

SEQ ID NO: 1525297 - RNA, 19 nt, Homo sapiens
  misc_RNA (1)...(19): siRNA sense strand
gcauuuggguagugaucuu

SEQ ID NO: 1525298 - RNA, 19 nt, Homo sapiens
  misc_RNA (1)...(19): siRNA sense strand
augcacaucuuaacgguaa

SEQ ID NO: 1525299 - RNA, 19 nt, Homo sapiens
  misc_RNA (1)...(19): siRNA sense strand
acaagcuuauggaacaaua

SEQ ID NO: 1525300 - RNA, 19 nt, Homo sapiens
  misc_RNA (1)...(19): siRNA sense strand
uaacaacaaacuugaagga

SEQ ID NO: 1525301 - RNA, 19 nt, Homo sapiens
  misc_RNA (1)...(19): siRNA sense strand
caaauaaaggaaaccauuc

SEQ ID NO: 1525302 - RNA, 19 nt, Homo sapiens
  misc_RNA (1)...(19): siRNA sense strand
gaugcagaguauaaacuug

SEQ ID NO: 1525303 - RNA, 19 nt, Homo sapiens
  misc_RNA (1)...(19): siRNA sense strand
gcucagacccaccagaaau

SEQ ID NO: 1525304 - RNA, 19 nt, Homo sapiens
  misc_RNA (1)...(19): siRNA sense strand
aaguuuagcagcaguauuu

SEQ ID NO: 1525305 - RNA, 19 nt, Homo sapiens
  misc_RNA (1)...(19): siRNA sense strand
ccagauauucuucaaggaa

SEQ ID NO: 1525306 - RNA, 19 nt, Homo sapiens
  misc_RNA (1)...(19): siRNA sense strand
cagcaguauuugaggauga

SEQ ID NO: 1525307 - RNA, 19 nt, Homo sapiens
  misc_RNA (1)...(19): siRNA sense strand
uggaugccauuaucuuuga

SEQ ID NO: 1525308 - RNA, 19 nt, Homo sapiens
  misc_RNA (1)...(19): siRNA sense strand
gauacuaggcuucuaagag

SEQ ID NO: 1525309 - RNA, 19 nt, Homo sapiens
  misc_RNA (1)...(19): siRNA sense strand
ccaucucacugacaagcua

SEQ ID NO: 1525310 - RNA, 19 nt, Homo sapiens
  misc_RNA (1)...(19): siRNA sense strand
aaacgacuaucuaauugag

SEQ ID NO: 1525311 - RNA, 19 nt, Homo sapiens
  misc_RNA (1)...(19): siRNA sense strand
cgucuaaacgacuaucuaa

SEQ ID NO: 1525312 - RNA, 19 nt, Homo sapiens
  misc_RNA (1)...(19): siRNA sense strand
uaaacaacgaagugaauga

SEQ ID NO: 1525313 - RNA, 19 nt, Homo sapiens
  misc_RNA (1)...(19): siRNA sense strand
gcacaagaugcagaguaua

SEQ ID NO: 1525314 - RNA, 19 nt, Homo sapiens
  misc_RNA (1)...(19): siRNA sense strand
ucaggcagcauuugaauca

SEQ ID NO: 1525315 - RNA, 19 nt, Homo sapiens
  misc_RNA (1)...(19): siRNA sense strand
guacaagcuuauggaacaa

SEQ ID NO: 1525316 - RNA, 19 nt, Homo sapiens
  misc_RNA (1)...(19): siRNA sense strand
aggcugacgugcuuuauuc

SEQ ID NO: 1525317 - RNA, 19 nt, Homo sapiens
  misc_RNA (1)...(19): siRNA sense strand
caccagcccuuauauuaac

SEQ ID NO: 1525318 - RNA, 19 nt, Homo sapiens
  misc_RNA (1)...(19): siRNA sense strand
gagaaucaagcauuaagca

SEQ ID NO: 1525319 - RNA, 19 nt, Homo sapiens
  misc_RNA (1)...(19): siRNA sense strand
ggauugaaagccuugaaga

SEQ ID NO: 1525320 - RNA, 19 nt, Homo sapiens
  misc_RNA (1)...(19): siRNA sense strand
cuaugcagcuaccuuugaa

SEQ ID NO: 1525321 - RNA, 19 nt, Homo sapiens
  misc_RNA (1)...(19): siRNA sense strand
agccugaagucccugauaa

SEQ ID NO: 1525322 - RNA, 19 nt, Homo sapiens
  misc_RNA (1)...(19): siRNA sense strand
acaacgaagugaaugaagu

SEQ ID NO: 1525323 - RNA, 19 nt, Homo sapiens
  misc_RNA (1)...(19): siRNA sense strand
ucucgugccugauucguau

SEQ ID NO: 1525324 - RNA, 19 nt, Homo sapiens
  misc_RNA (1)...(19): siRNA sense strand
guuaaucacugucaaaaca

SEQ ID NO: 1525325 - RNA, 19 nt, Homo sapiens
  misc_RNA (1)...(19): siRNA sense strand
uucaccagcccuuauauua

SEQ ID NO: 1525326 - RNA, 19 nt, Homo sapiens
  misc_RNA (1)...(19): siRNA sense strand
gaacaccuucagcagaugu

SEQ ID NO: 1525327 - RNA, 19 nt, Homo sapiens
  misc_RNA (1)...(19): siRNA sense strand
ccacaccuccugaagacuu

SEQ ID NO: 1525328 - RNA, 19 nt, Homo sapiens
  misc_RNA (1)...(19): siRNA sense strand
gcccacaccuccugaagac

SEQ ID NO: 1525329 - RNA, 19 nt, Homo sapiens
  misc_RNA (1)...(19): siRNA sense strand
ugacucaaauguacaagcu

SEQ ID NO: 1525330 - RNA, 19 nt, Homo sapiens
  misc_RNA (1)...(19): siRNA sense strand
gauugaaagccuugaagau

SEQ ID NO: 1525331 - RNA, 19 nt, Homo sapiens
  misc_RNA (1)...(19): siRNA sense strand
caucuaugcagcuaccuuu

SEQ ID NO: 1525332 - RNA, 19 nt, Homo sapiens
  misc_RNA (1)...(19): siRNA sense strand
acgacuaucuaauugagaa

SEQ ID NO: 1525333 - RNA, 19 nt, Homo sapiens
  misc_RNA (1)...(19): siRNA sense strand
gcgcucagacccaccagaa

SEQ ID NO: 1525334 - RNA, 19 nt, Homo sapiens
  misc_RNA (1)...(19): siRNA sense strand
aaacugcaagcacagguaa

SEQ ID NO: 1525335 - RNA, 19 nt, Homo sapiens
  misc_RNA (1)...(19): siRNA sense strand
aaacaacgaagugaaugaa

SEQ ID NO: 1525336 - RNA, 19 nt, Homo sapiens
  misc_RNA (1)...(19): siRNA sense strand
auucagaaauggauuacug

SEQ ID NO: 1525337 - RNA, 19 nt, Homo sapiens
  misc_RNA (1)...(19): siRNA sense strand
ugaaagccuugaagaugag

SEQ ID NO: 1525338 - RNA, 19 nt, Homo sapiens
  misc_RNA (1)...(19): siRNA sense strand
gauugcugcucauugauac

SEQ ID NO: 1525339 - RNA, 19 nt, Homo sapiens
  misc_RNA (1)...(19): siRNA sense strand
acgaacaccuucagcagau

SEQ ID NO: 1525340 - RNA, 19 nt, Homo sapiens
  misc_RNA (1)...(19): siRNA sense strand
gcuuucaccagcccuuaua

SEQ ID NO: 1525341 - RNA, 19 nt, Homo sapiens
  misc_RNA (1)...(19): siRNA sense strand
aaagcaagaagaagaugaa

SEQ ID NO: 1525342 - RNA, 19 nt, Homo sapiens
  misc_RNA (1)...(19): siRNA sense strand
agaauuaaacaacgaagug

SEQ ID NO: 1525343 - RNA, 19 nt, Homo sapiens
  misc_RNA (1)...(19): siRNA sense strand
gaaucagcccgcaucuaug

SEQ ID NO: 1525344 - RNA, 19 nt, Homo sapiens
  misc_RNA (1)...(19): siRNA sense strand
ucucacagaacuaauguug

SEQ ID NO: 1525345 - RNA, 19 nt, Homo sapiens
  misc_RNA (1)...(19): siRNA sense strand
gagaacacaaugcacaucu

SEQ ID NO: 1525346 - RNA, 19 nt, Homo sapiens
  misc_RNA (1)...(19): siRNA sense strand
augaagccauccauuguug

SEQ ID NO: 1525347 - RNA, 19 nt, Homo sapiens
  misc_RNA (1)...(19): siRNA sense strand
gaggcugacgugcuuuauu

SEQ ID NO: 1525348 - RNA, 19 nt, Homo sapiens
  misc_RNA (1)...(19): siRNA sense strand
ggaagacuuucuggauggu

SEQ ID NO: 1525349 - RNA, 19 nt, Homo sapiens
  misc_RNA (1)...(19): siRNA sense strand
agaacacaaugcacaucuu

SEQ ID NO: 1525350 - RNA, 19 nt, Homo sapiens
  misc_RNA (1)...(19): siRNA sense strand
caaggaaaaugaaagucuu

SEQ ID NO: 1525351 - RNA, 19 nt, Homo sapiens
  misc_RNA (1)...(19): siRNA sense strand
cgguaaaugcuguuaauuc

SEQ ID NO: 1525352 - RNA, 19 nt, Homo sapiens
  misc_RNA (1)...(19): siRNA sense strand
gaagacuuucuggauggua

SEQ ID NO: 1525353 - RNA, 19 nt, Homo sapiens
  misc_RNA (1)...(19): siRNA sense strand
cauuguugcuguucggaau

SEQ ID NO: 1525354 - RNA, 19 nt, Homo sapiens
  misc_RNA (1)...(19): siRNA sense strand
aacgguaaaugcuguuaau

SEQ ID NO: 1525355 - RNA, 19 nt, Homo sapiens
  misc_RNA (1)...(19): siRNA sense strand
gcuguuaauucgcuuuuga

SEQ ID NO: 1525356 - RNA, 19 nt, Homo sapiens
  misc_RNA (1)...(19): siRNA sense strand
cacaccuccugaagacuuu

SEQ ID NO: 1525357 - RNA, 19 nt, Homo sapiens
  misc_RNA (1)...(19): siRNA sense strand
gcagugaucuccaacuuug

SEQ ID NO: 1525358 - RNA, 19 nt, Homo sapiens
  misc_RNA (1)...(19): siRNA sense strand
gauaauuaccucugcgauu

SEQ ID NO: 1525359 - RNA, 19 nt, Homo sapiens
  misc_RNA (1)...(19): siRNA sense strand
gggauucuguaccuaaaga

SEQ ID NO: 1525360 - RNA, 19 nt, Homo sapiens
  misc_RNA (1)...(19): siRNA sense strand
gcggcuugcucauauggaa

SEQ ID NO: 1525361 - RNA, 19 nt, Homo sapiens
  misc_RNA (1)...(19): siRNA sense strand
ggucagggauucuguaccu

SEQ ID NO: 1525362 - RNA, 19 nt, Homo sapiens
  misc_RNA (1)...(19): siRNA sense strand
ccaggaugcucaggcugua

SEQ ID NO: 1525363 - RNA, 19 nt, Homo sapiens
  misc_RNA (1)...(19): siRNA sense strand
cagggauucuguaccuaaa

SEQ ID NO: 1525364 - RNA, 19 nt, Homo sapiens
  misc_RNA (1)...(19): siRNA sense strand
gcacaccggcugcagauac

SEQ ID NO: 1525365 - RNA, 19 nt, Homo sapiens
  misc_RNA (1)...(19): siRNA sense strand
gugaacacuucgacuuugu

SEQ ID NO: 1525366 - RNA, 19 nt, Homo sapiens
  misc_RNA (1)...(19): siRNA sense strand
gcgugaacacuucgacuuu

SEQ ID NO: 1525367 - RNA, 19 nt, Homo sapiens
  misc_RNA (1)...(19): siRNA sense strand
uggcagugaucuccaacuu

SEQ ID NO: 1525368 - RNA, 19 nt, Homo sapiens
  misc_RNA (1)...(19): siRNA sense strand
cgugaacacuucgacuuug

SEQ ID NO: 1525369 - RNA, 19 nt, Homo sapiens
  misc_RNA (1)...(19): siRNA sense strand
ucagggauucuguaccuaa

SEQ ID NO: 1525370 - RNA, 19 nt, Homo sapiens
  misc_RNA (1)...(19): siRNA sense strand
gcucauauggaaccaguag

SEQ ID NO: 1525371 - RNA, 19 nt, Homo sapiens
  misc_RNA (1)...(19): siRNA sense strand
gcacagcuuccuggugguu

SEQ ID NO: 1525372 - RNA, 19 nt, Homo sapiens
  misc_RNA (1)...(19): siRNA sense strand
ccuugcggcuugcucauau

SEQ ID NO: 1525373 - RNA, 19 nt, Homo sapiens
  misc_RNA (1)...(19): siRNA sense strand
ggcagugaucuccaacuuu

SEQ ID NO: 1525374 - RNA, 19 nt, Homo sapiens
  misc_RNA (1)...(19): siRNA sense strand
ugacgugggaugugaagga

SEQ ID NO: 1525375 - RNA, 19 nt, Homo sapiens
  misc_RNA (1)...(19): siRNA sense strand
guaguggcagcccauguug

SEQ ID NO: 1525376 - RNA, 19 nt, Homo sapiens
  misc_RNA (1)...(19): siRNA sense strand
cugcugacgugggauguga

SEQ ID NO: 1525377 - RNA, 19 nt, Homo sapiens
  misc_RNA (1)...(19): siRNA sense strand
ucauauggaaccaguagug

SEQ ID NO: 1525378 - RNA, 19 nt, Homo sapiens
  misc_RNA (1)...(19): siRNA sense strand
gcucaacuccagggcuuug

SEQ ID NO: 1525379 - RNA, 19 nt, Homo sapiens
  misc_RNA (1)...(19): siRNA sense strand
gcccucagcccuggaacaa

SEQ ID NO: 1525380 - RNA, 19 nt, Homo sapiens
  misc_RNA (1)...(19): siRNA sense strand
gaaccuggcuacaacauua

SEQ ID NO: 1525381 - RNA, 19 nt, Homo sapiens
  misc_RNA (1)...(19): siRNA sense strand
ccacagagcaucuuaaauu

SEQ ID NO: 1525382 - RNA, 19 nt, Homo sapiens
  misc_RNA (1)...(19): siRNA sense strand
caggauugcuucugaguua

SEQ ID NO: 1525383 - RNA, 19 nt, Homo sapiens
  misc_RNA (1)...(19): siRNA sense strand
gcaagcaguuggcuauuca

SEQ ID NO: 1525384 - RNA, 19 nt, Homo sapiens
  misc_RNA (1)...(19): siRNA sense strand
agaaggcccucaccacuuu

SEQ ID NO: 1525385 - RNA, 19 nt, Homo sapiens
  misc_RNA (1)...(19): siRNA sense strand
ggacuucuguggcauugau

SEQ ID NO: 1525386 - RNA, 19 nt, Homo sapiens
  misc_RNA (1)...(19): siRNA sense strand
caaauaggcagacuggaaa

SEQ ID NO: 1525387 - RNA, 19 nt, Homo sapiens
  misc_RNA (1)...(19): siRNA sense strand
ccagacaccuucuccuaug

SEQ ID NO: 1525388 - RNA, 19 nt, Homo sapiens
  misc_RNA (1)...(19): siRNA sense strand
gcagagagcgucuauacca

SEQ ID NO: 1525389 - RNA, 19 nt, Homo sapiens
  misc_RNA (1)...(19): siRNA sense strand
cacagagcaucuuaaauug

SEQ ID NO: 1525390 - RNA, 19 nt, Homo sapiens
  misc_RNA (1)...(19): siRNA sense strand
ccaaauaggcagacuggaa

SEQ ID NO: 1525391 - RNA, 19 nt, Homo sapiens
  misc_RNA (1)...(19): siRNA sense strand
ugaccaggcaugcaacuua

SEQ ID NO: 1525392 - RNA, 19 nt, Homo sapiens
  misc_RNA (1)...(19): siRNA sense strand
acaacaggauugcuucuga

SEQ ID NO: 1525393 - RNA, 19 nt, Homo sapiens
  misc_RNA (1)...(19): siRNA sense strand
cauggacgauggcuccuuu

SEQ ID NO: 1525394 - RNA, 19 nt, Homo sapiens
  misc_RNA (1)...(19): siRNA sense strand
gagagcgucuauaccauca

SEQ ID NO: 1525395 - RNA, 19 nt, Homo sapiens
  misc_RNA (1)...(19): siRNA sense strand
ucugacaucugccaucuga

SEQ ID NO: 1525396 - RNA, 19 nt, Homo sapiens
  misc_RNA (1)...(19): siRNA sense strand
gaaggagucccauggaaag

SEQ ID NO: 1525397 - RNA, 19 nt, Homo sapiens
  misc_RNA (1)...(19): siRNA sense strand
cagagcaucuuaaauugca

SEQ ID NO: 1525398 - RNA, 19 nt, Homo sapiens
  misc_RNA (1)...(19): siRNA sense strand
gugaaggagucccauggaa

SEQ ID NO: 1525399 - RNA, 19 nt, Homo sapiens
  misc_RNA (1)...(19): siRNA sense strand
caucuuaaauugcaucaac

SEQ ID NO: 1525400 - RNA, 19 nt, Homo sapiens
  misc_RNA (1)...(19): siRNA sense strand
aaacaucaccucucugaca

SEQ ID NO: 1525401 - RNA, 19 nt, Homo sapiens
  misc_RNA (1)...(19): siRNA sense strand
gaccaggcaugcaacuuag

SEQ ID NO: 1525402 - RNA, 19 nt, Homo sapiens
  misc_RNA (1)...(19): siRNA sense strand
ugaggcaaaugcuaauguu

SEQ ID NO: 1525403 - RNA, 19 nt, Homo sapiens
  misc_RNA (1)...(19): siRNA sense strand
gcuacaacauuaacaacag

SEQ ID NO: 1525404 - RNA, 19 nt, Homo sapiens
  misc_RNA (1)...(19): siRNA sense strand
ugaaggagucccauggaaa

SEQ ID NO: 1525405 - RNA, 19 nt, Homo sapiens
  misc_RNA (1)...(19): siRNA sense strand
ggcaagcaguuggcuauuc

SEQ ID NO: 1525406 - RNA, 19 nt, Homo sapiens
  misc_RNA (1)...(19): siRNA sense strand
caacauuaacaacaggauu

SEQ ID NO: 1525407 - RNA, 19 nt, Homo sapiens
  misc_RNA (1)...(19): siRNA sense strand
gcccacagagcaucuuaaa

SEQ ID NO: 1525408 - RNA, 19 nt, Homo sapiens
  misc_RNA (1)...(19): siRNA sense strand
gcccgaaccuggcuacaac

SEQ ID NO: 1525409 - RNA, 19 nt, Homo sapiens
  misc_RNA (1)...(19): siRNA sense strand
agauaaacaucaccucucu

SEQ ID NO: 1525410 - RNA, 19 nt, Homo sapiens
  misc_RNA (1)...(19): siRNA sense strand
ggauugcuucugaguuaaa

SEQ ID NO: 1525411 - RNA, 19 nt, Homo sapiens
  misc_RNA (1)...(19): siRNA sense strand
auaaacaucaccucucuga

SEQ ID NO: 1525412 - RNA, 19 nt, Homo sapiens
  misc_RNA (1)...(19): siRNA sense strand
ggacgauggcuccuuugug

SEQ ID NO: 1525413 - RNA, 19 nt, Homo sapiens
  misc_RNA (1)...(19): siRNA sense strand
gcuccuuugugguguguga

SEQ ID NO: 1525414 - RNA, 19 nt, Homo sapiens
  misc_RNA (1)...(19): siRNA sense strand
gagcgucuauaccaucaac

SEQ ID NO: 1525415 - RNA, 19 nt, Homo sapiens
  misc_RNA (1)...(19): siRNA sense strand
cagaaggcccucaccacuu

SEQ ID NO: 1525416 - RNA, 19 nt, Homo sapiens
  misc_RNA (1)...(19): siRNA sense strand
ucaacaaauucuggacguu

SEQ ID NO: 1525417 - RNA, 19 nt, Homo sapiens
  misc_RNA (1)...(19): siRNA sense strand
uaggcagacuggaaagaug

SEQ ID NO: 1525418 - RNA, 19 nt, Homo sapiens
  misc_RNA (1)...(19): siRNA sense strand
uguccuugcugccaaauag

SEQ ID NO: 1525419 - RNA, 19 nt, Homo sapiens
  misc_RNA (1)...(19): siRNA sense strand
ggcaagagauaaacaucac

SEQ ID NO: 1525420 - RNA, 19 nt, Homo sapiens
  misc_RNA (1)...(19): siRNA sense strand
ugacaucugccaucugauc

SEQ ID NO: 1525421 - RNA, 19 nt, Homo sapiens
  misc_RNA (1)...(19): siRNA sense strand
uggcauugaucuccuuauc

SEQ ID NO: 1525422 - RNA, 19 nt, Homo sapiens
  misc_RNA (1)...(19): siRNA sense strand
ugcccuaccuguuccagaa

SEQ ID NO: 1525423 - RNA, 19 nt, Homo sapiens
  misc_RNA (1)...(19): siRNA sense strand
gaugugggugggaucauug

SEQ ID NO: 1525424 - RNA, 19 nt, Homo sapiens
  misc_RNA (1)...(19): siRNA sense strand
gccagacaccuucuccuau

SEQ ID NO: 1525425 - RNA, 19 nt, Homo sapiens
  misc_RNA (1)...(19): siRNA sense strand
aacagugggucuaccucua

SEQ ID NO: 1525426 - RNA, 19 nt, Homo sapiens
  misc_RNA (1)...(19): siRNA sense strand
cagagagcgucuauaccau

SEQ ID NO: 1525427 - RNA, 19 nt, Homo sapiens
  misc_RNA (1)...(19): siRNA sense strand
caucaccucucugacaucu

SEQ ID NO: 1525428 - RNA, 19 nt, Homo sapiens
  misc_RNA (1)...(19): siRNA sense strand
cuauucagguguccaacau

SEQ ID NO: 1525429 - RNA, 19 nt, Homo sapiens
  misc_RNA (1)...(19): siRNA sense strand
ugggaucauugcagacuau

SEQ ID NO: 1525430 - RNA, 19 nt, Homo sapiens
  misc_RNA (1)...(19): siRNA sense strand
ggacggaugcagagcaacu

SEQ ID NO: 1525431 - RNA, 19 nt, Homo sapiens
  misc_RNA (1)...(19): siRNA sense strand
ccauguccuugcugccaaa

SEQ ID NO: 1525432 - RNA, 19 nt, Homo sapiens
  misc_RNA (1)...(19): siRNA sense strand
gaggcaaaugcuaauguug

SEQ ID NO: 1525433 - RNA, 19 nt, Homo sapiens
  misc_RNA (1)...(19): siRNA sense strand
ucagguguccaacauccua

SEQ ID NO: 1525434 - RNA, 19 nt, Homo sapiens
  misc_RNA (1)...(19): siRNA sense strand
cagaacaaggcaagcaguu

SEQ ID NO: 1525435 - RNA, 19 nt, Homo sapiens
  misc_RNA (1)...(19): siRNA sense strand
uggugggcaugaagacuuu

SEQ ID NO: 1525436 - RNA, 19 nt, Homo sapiens
  misc_RNA (1)...(19): siRNA sense strand
caccucggccuccagcuaa

SEQ ID NO: 1525437 - RNA, 19 nt, Homo sapiens
  misc_RNA (1)...(19): siRNA sense strand
gugggaucauugcagacua

SEQ ID NO: 1525438 - RNA, 19 nt, Homo sapiens
  misc_RNA (1)...(19): siRNA sense strand
agaugugggugggaucauu

SEQ ID NO: 1525439 - RNA, 19 nt, Homo sapiens
  misc_RNA (1)...(19): siRNA sense strand
cgaugugcccuaccuguuc

SEQ ID NO: 1525440 - RNA, 19 nt, Homo sapiens
  misc_RNA (1)...(19): siRNA sense strand
ucaccacuuucccggaugu

SEQ ID NO: 1525441 - RNA, 19 nt, Homo sapiens
  misc_RNA (1)...(19): siRNA sense strand
gcucagggaguugcagaga

SEQ ID NO: 1525442 - RNA, 19 nt, Homo sapiens
  misc_RNA (1)...(19): siRNA sense strand
ugugugaggcaaaugcuaa

SEQ ID NO: 1525443 - RNA, 19 nt, Homo sapiens
  misc_RNA (1)...(19): siRNA sense strand
ccuaccuguuccagaagua

SEQ ID NO: 1525444 - RNA, 19 nt, Homo sapiens
  misc_RNA (1)...(19): siRNA sense strand
cagacuauaccauguccuu

SEQ ID NO: 1525445 - RNA, 19 nt, Homo sapiens
  misc_RNA (1)...(19): siRNA sense strand
gccuccagcuaaaccagaa

SEQ ID NO: 1525446 - RNA, 19 nt, Homo sapiens
  misc_RNA (1)...(19): siRNA sense strand
aacauuaacaacaggauug

SEQ ID NO: 1525447 - RNA, 19 nt, Homo sapiens
  misc_RNA (1)...(19): siRNA sense strand
gcuacccagucguggugaa

SEQ ID NO: 1525448 - RNA, 19 nt, Homo sapiens
  misc_RNA (1)...(19): siRNA sense strand
cagacaccuucuccuaugg

SEQ ID NO: 1525449 - RNA, 19 nt, Homo sapiens
  misc_RNA (1)...(19): siRNA sense strand
cacccucagugcagucaga

SEQ ID NO: 1525450 - RNA, 19 nt, Homo sapiens
  misc_RNA (1)...(19): siRNA sense strand
ugccagacaccuucuccua

SEQ ID NO: 1525451 - RNA, 19 nt, Homo sapiens
  misc_RNA (1)...(19): siRNA sense strand
aacaucaccucucugacau

SEQ ID NO: 1525452 - RNA, 19 nt, Homo sapiens
  misc_RNA (1)...(19): siRNA sense strand
cgaaccuggcuacaacauu

SEQ ID NO: 1525453 - RNA, 19 nt, Homo sapiens
  misc_RNA (1)...(19): siRNA sense strand
caagaacuggcuggacaug

SEQ ID NO: 1525454 - RNA, 19 nt, Homo sapiens
  misc_RNA (1)...(19): siRNA sense strand
gugaggcaaaugcuaaugu

SEQ ID NO: 1525455 - RNA, 19 nt, Homo sapiens
  misc_RNA (1)...(19): siRNA sense strand
caggcuaccucaucaguua

SEQ ID NO: 1525456 - RNA, 19 nt, Homo sapiens
  misc_RNA (1)...(19): siRNA sense strand
gcacacugcugcugcucua

SEQ ID NO: 1525457 - RNA, 19 nt, Homo sapiens
  misc_RNA (1)...(19): siRNA sense strand
caagggcucuacuuucuga

SEQ ID NO: 1525458 - RNA, 19 nt, Homo sapiens
  misc_RNA (1)...(19): siRNA sense strand
cauaaugucucuaaacaag

SEQ ID NO: 1525459 - RNA, 19 nt, Homo sapiens
  misc_RNA (1)...(19): siRNA sense strand
cagcaugguugugccuuua

SEQ ID NO: 1525460 - RNA, 19 nt, Homo sapiens
  misc_RNA (1)...(19): siRNA sense strand
gaaagacccaugugcuguu

SEQ ID NO: 1525461 - RNA, 19 nt, Homo sapiens
  misc_RNA (1)...(19): siRNA sense strand
aacaguugcuggaauagua

SEQ ID NO: 1525462 - RNA, 19 nt, Homo sapiens
  misc_RNA (1)...(19): siRNA sense strand
ugaauuagaggauggguuu

SEQ ID NO: 1525463 - RNA, 19 nt, Homo sapiens
  misc_RNA (1)...(19): siRNA sense strand
ccaccaauguguuucuguu

SEQ ID NO: 1525464 - RNA, 19 nt, Homo sapiens
  misc_RNA (1)...(19): siRNA sense strand
gcaugguugugccuuuauu

SEQ ID NO: 1525465 - RNA, 19 nt, Homo sapiens
  misc_RNA (1)...(19): siRNA sense strand
ucucaaugcuggucucguu

SEQ ID NO: 1525466 - RNA, 19 nt, Homo sapiens
  misc_RNA (1)...(19): siRNA sense strand
ccaauguguuucuguuugu

SEQ ID NO: 1525467 - RNA, 19 nt, Homo sapiens
  misc_RNA (1)...(19): siRNA sense strand
gagaagggccugccauugc

SEQ ID NO: 1525468 - RNA, 19 nt, Homo sapiens
  misc_RNA (1)...(19): siRNA sense strand
ggccugccauugcgaaaga

SEQ ID NO: 1525469 - RNA, 19 nt, Homo sapiens
  misc_RNA (1)...(19): siRNA sense strand
gaggauggguuuuaucuca

SEQ ID NO: 1525470 - RNA, 19 nt, Homo sapiens
  misc_RNA (1)...(19): siRNA sense strand
ucacagccuucaucugcuu

SEQ ID NO: 1525471 - RNA, 19 nt, Homo sapiens
  misc_RNA (1)...(19): siRNA sense strand
gaaggagccaugacacagu

SEQ ID NO: 1525472 - RNA, 19 nt, Homo sapiens
  misc_RNA (1)...(19): siRNA sense strand
ggaaacaggagcagaagac

SEQ ID NO: 1525473 - RNA, 19 nt, Homo sapiens
  misc_RNA (1)...(19): siRNA sense strand
uaaacaagcgacacucuag

SEQ ID NO: 1525474 - RNA, 19 nt, Homo sapiens
  misc_RNA (1)...(19): siRNA sense strand
gagcagccaccaauguguu

SEQ ID NO: 1525475 - RNA, 19 nt, Homo sapiens
  misc_RNA (1)...(19): siRNA sense strand
gggcucuacuuucugaugu

SEQ ID NO: 1525476 - RNA, 19 nt, Homo sapiens
  misc_RNA (1)...(19): siRNA sense strand
gugacaggcuaccucauca

SEQ ID NO: 1525477 - RNA, 19 nt, Homo sapiens
  misc_RNA (1)...(19): siRNA sense strand
uggcagucaugcuguacua

SEQ ID NO: 1525478 - RNA, 19 nt, Homo sapiens
  misc_RNA (1)...(19): siRNA sense strand
uuauugagccuucauguca

SEQ ID NO: 1525479 - RNA, 19 nt, Homo sapiens
  misc_RNA (1)...(19): siRNA sense strand
ucagcaugguugugccuuu

SEQ ID NO: 1525480 - RNA, 19 nt, Homo sapiens
  misc_RNA (1)...(19): siRNA sense strand
uggcuaucccacugaauua

SEQ ID NO: 1525481 - RNA, 19 nt, Homo sapiens
  misc_RNA (1)...(19): siRNA sense strand
guggugaugggaauaguaa

SEQ ID NO: 1525482 - RNA, 19 nt, Homo sapiens
  misc_RNA (1)...(19): siRNA sense strand
cuaaacaagcgacacucua

SEQ ID NO: 1525483 - RNA, 19 nt, Homo sapiens
  misc_RNA (1)...(19): siRNA sense strand
aaagacccaugugcuguug

SEQ ID NO: 1525484 - RNA, 19 nt, Homo sapiens
  misc_RNA (1)...(19): siRNA sense strand
gcuagagucccggcaggua

SEQ ID NO: 1525485 - RNA, 19 nt, Homo sapiens
  misc_RNA (1)...(19): siRNA sense strand
gggcuucuuggauuuguuu

SEQ ID NO: 1525486 - RNA, 19 nt, Homo sapiens
  misc_RNA (1)...(19): siRNA sense strand
uuggugggcuucuuggauu

SEQ ID NO: 1525487 - RNA, 19 nt, Homo sapiens
  misc_RNA (1)...(19): siRNA sense strand
ggugaugggaauaguaaau

SEQ ID NO: 1525488 - RNA, 19 nt, Homo sapiens
  misc_RNA (1)...(19): siRNA sense strand
cagagaagggccugccauu

SEQ ID NO: 1525489 - RNA, 19 nt, Homo sapiens
  misc_RNA (1)...(19): siRNA sense strand
cucaagggcucuacuuucu

SEQ ID NO: 1525490 - RNA, 19 nt, Homo sapiens
  misc_RNA (1)...(19): siRNA sense strand
aaaccgggcaguacagaga

SEQ ID NO: 1525491 - RNA, 19 nt, Homo sapiens
  misc_RNA (1)...(19): siRNA sense strand
ugaggaaccugcuguuuuc

SEQ ID NO: 1525492 - RNA, 19 nt, Homo sapiens
  misc_RNA (1)...(19): siRNA sense strand
ggugacaggcuaccucauc

SEQ ID NO: 1525493 - RNA, 19 nt, Homo sapiens
  misc_RNA (1)...(19): siRNA sense strand
gugaugggaauaguaaauu

SEQ ID NO: 1525494 - RNA, 19 nt, Homo sapiens
  misc_RNA (1)...(19): siRNA sense strand
ucagugcucugggcuaucu

SEQ ID NO: 1525495 - RNA, 19 nt, Homo sapiens
  misc_RNA (1)...(19): siRNA sense strand
gccagcggcacccuuauug

SEQ ID NO: 1525496 - RNA, 19 nt, Homo sapiens
  misc_RNA (1)...(19): siRNA sense strand
accaauguguuucuguuug

SEQ ID NO: 1525497 - RNA, 19 nt, Homo sapiens
  misc_RNA (1)...(19): siRNA sense strand
gaaacaggagcagaagaca

SEQ ID NO: 1525498 - RNA, 19 nt, Homo sapiens
  misc_RNA (1)...(19): siRNA sense strand
gggaaggagccaugacaca

SEQ ID NO: 1525499 - RNA, 19 nt, Homo sapiens
  misc_RNA (1)...(19): siRNA sense strand
ggagcagccaccaaugugu

SEQ ID NO: 1525500 - RNA, 19 nt, Homo sapiens
  misc_RNA (1)...(19): siRNA sense strand
ggccagcggcacccuuauu

SEQ ID NO: 1525501 - RNA, 19 nt, Homo sapiens
  misc_RNA (1)...(19): siRNA sense strand
ggucucguuugguucuuuc

SEQ ID NO: 1525502 - RNA, 19 nt, Homo sapiens
  misc_RNA (1)...(19): siRNA sense strand
gcuaucccacugaauuaga

SEQ ID NO: 1525503 - RNA, 19 nt, Homo sapiens
  misc_RNA (1)...(19): siRNA sense strand
ucuacuuucugaugugguu

SEQ ID NO: 1525504 - RNA, 19 nt, Homo sapiens
  misc_RNA (1)...(19): siRNA sense strand
ccuccacucuccuguccuu

SEQ ID NO: 1525505 - RNA, 19 nt, Homo sapiens
  misc_RNA (1)...(19): siRNA sense strand
caugaggaaccugcuguuu

SEQ ID NO: 1525506 - RNA, 19 nt, Homo sapiens
  misc_RNA (1)...(19): siRNA sense strand
cugaugugguuccagagaa

SEQ ID NO: 1525507 - RNA, 19 nt, Homo sapiens
  misc_RNA (1)...(19): siRNA sense strand
aggcacugcugcugcauuc

SEQ ID NO: 1525508 - RNA, 19 nt, Homo sapiens
  misc_RNA (1)...(19): siRNA sense strand
gagccagggccagcaagaa

SEQ ID NO: 1525509 - RNA, 19 nt, Homo sapiens
  misc_RNA (1)...(19): siRNA sense strand
augcuggucucguuugguu

SEQ ID NO: 1525510 - RNA, 19 nt, Homo sapiens
  misc_RNA (1)...(19): siRNA sense strand
guaaucggacacuucaaca

SEQ ID NO: 1525511 - RNA, 19 nt, Homo sapiens
  misc_RNA (1)...(19): siRNA sense strand
ggcaugcauucuacucagu

SEQ ID NO: 1525512 - RNA, 19 nt, Homo sapiens
  misc_RNA (1)...(19): siRNA sense strand
gcacugcugcugcauucca

SEQ ID NO: 1525513 - RNA, 19 nt, Homo sapiens
  misc_RNA (1)...(19): siRNA sense strand
ggccaauccuacggcugua

SEQ ID NO: 1525514 - RNA, 19 nt, Homo sapiens
  misc_RNA (1)...(19): siRNA sense strand
ccugcucugucucuacuug

SEQ ID NO: 1525515 - RNA, 19 nt, Homo sapiens
  misc_RNA (1)...(19): siRNA sense strand
cacacucucuccaucucaa

SEQ ID NO: 1525516 - RNA, 19 nt, Homo sapiens
  misc_RNA (1)...(19): siRNA sense strand
caccaauguguuucuguuu

SEQ ID NO: 1525517 - RNA, 19 nt, Homo sapiens
  misc_RNA (1)...(19): siRNA sense strand
aaacacacucucuccaucu

SEQ ID NO: 1525518 - RNA, 19 nt, Homo sapiens
  misc_RNA (1)...(19): siRNA sense strand
caugugcuguugggaagga

SEQ ID NO: 1525519 - RNA, 19 nt, Homo sapiens
  misc_RNA (1)...(19): siRNA sense strand
ucaaugcuggucucguuug

SEQ ID NO: 1525520 - RNA, 19 nt, Homo sapiens
  misc_RNA (1)...(19): siRNA sense strand
cuacuuggugggcuucuug

SEQ ID NO: 1525521 - RNA, 19 nt, Homo sapiens
  misc_RNA (1)...(19): siRNA sense strand
ucucaagggcucuacuuuc

SEQ ID NO: 1525522 - RNA, 19 nt, Homo sapiens
  misc_RNA (1)...(19): siRNA sense strand
acucagugcucugggcuau

SEQ ID NO: 1525523 - RNA, 19 nt, Homo sapiens
  misc_RNA (1)...(19): siRNA sense strand
ugaugugguuccagagaag

SEQ ID NO: 1525524 - RNA, 19 nt, Homo sapiens
  misc_RNA (1)...(19): siRNA sense strand
caaugcuggucucguuugg

SEQ ID NO: 1525525 - RNA, 19 nt, Homo sapiens
  misc_RNA (1)...(19): siRNA sense strand
agagaagggccugccauug

SEQ ID NO: 1525526 - RNA, 19 nt, Homo sapiens
  misc_RNA (1)...(19): siRNA sense strand
guuugguucuuuccaugga

SEQ ID NO: 1525527 - RNA, 19 nt, Homo sapiens
  misc_RNA (1)...(19): siRNA sense strand
caagauugcuccugaguau

SEQ ID NO: 1525528 - RNA, 19 nt, Homo sapiens
  misc_RNA (1)...(19): siRNA sense strand
gcaccgaccuggcugucua

SEQ ID NO: 1525529 - RNA, 19 nt, Homo sapiens
  misc_RNA (1)...(19): siRNA sense strand
gaauuacuucuguggaaua

SEQ ID NO: 1525530 - RNA, 19 nt, Homo sapiens
  misc_RNA (1)...(19): siRNA sense strand
guacgaagccaugaagaaa

SEQ ID NO: 1525531 - RNA, 19 nt, Homo sapiens
  misc_RNA (1)...(19): siRNA sense strand
gcaucaacgugcucaagau

SEQ ID NO: 1525532 - RNA, 19 nt, Homo sapiens
  misc_RNA (1)...(19): siRNA sense strand
gaagaaaacccugggcaua

SEQ ID NO: 1525533 - RNA, 19 nt, Homo sapiens
  misc_RNA (1)...(19): siRNA sense strand
uuacuucuguggaauacaa

SEQ ID NO: 1525534 - RNA, 19 nt, Homo sapiens
  misc_RNA (1)...(19): siRNA sense strand
cgaccuggcugucuaugag

SEQ ID NO: 1525535 - RNA, 19 nt, Homo sapiens
  misc_RNA (1)...(19): siRNA sense strand
gcagguggcaucagcuaug

SEQ ID NO: 1525536 - RNA, 19 nt, Homo sapiens
  misc_RNA (1)...(19): siRNA sense strand
gccaucaaguucuccguau

SEQ ID NO: 1525537 - RNA, 19 nt, Homo sapiens
  misc_RNA (1)...(19): siRNA sense strand
ccaucaaguucuccguauu

SEQ ID NO: 1525538 - RNA, 19 nt, Homo sapiens
  misc_RNA (1)...(19): siRNA sense strand
ucgagcagugcaagaauua

SEQ ID NO: 1525539 - RNA, 19 nt, Homo sapiens
  misc_RNA (1)...(19): siRNA sense strand
agaaaacccugggcauaua

SEQ ID NO: 1525540 - RNA, 19 nt, Homo sapiens
  misc_RNA (1)...(19): siRNA sense strand
gucagucugucgucuguga

SEQ ID NO: 1525541 - RNA, 19 nt, Homo sapiens
  misc_RNA (1)...(19): siRNA sense strand
caucaacgugcucaagauu

SEQ ID NO: 1525542 - RNA, 19 nt, Homo sapiens
  misc_RNA (1)...(19): siRNA sense strand
caucaaguucuccguauuc

SEQ ID NO: 1525543 - RNA, 19 nt, Homo sapiens
  misc_RNA (1)...(19): siRNA sense strand
ucagcuaugugguguacga

SEQ ID NO: 1525544 - RNA, 19 nt, Homo sapiens
  misc_RNA (1)...(19): siRNA sense strand
ccauggaggugcugaagac

SEQ ID NO: 1525545 - RNA, 19 nt, Homo sapiens
  misc_RNA (1)...(19): siRNA sense strand
gaagucaggcagggauaug

SEQ ID NO: 1525546 - RNA, 19 nt, Homo sapiens
  misc_RNA (1)...(19): siRNA sense strand
ucaagauugcuccugagua

SEQ ID NO: 1525547 - RNA, 19 nt, Homo sapiens
  misc_RNA (1)...(19): siRNA sense strand
gcaccaggcagaucuugca

SEQ ID NO: 1525548 - RNA, 19 nt, Homo sapiens
  misc_RNA (1)...(19): siRNA sense strand
ugaagacgcgguugaccuu

SEQ ID NO: 1525549 - RNA, 19 nt, Homo sapiens
  misc_RNA (1)...(19): siRNA sense strand
ucaacgugcucaagauugc

SEQ ID NO: 1525550 - RNA, 19 nt, Homo sapiens
  misc_RNA (1)...(19): siRNA sense strand
caucagcuaugugguguac

SEQ ID NO: 1525551 - RNA, 19 nt, Homo sapiens
  misc_RNA (1)...(19): siRNA sense strand
gcagugcaagaauuacuuc

SEQ ID NO: 1525552 - RNA, 19 nt, Homo sapiens
  misc_RNA (1)...(19): siRNA sense strand
ccacgcuacugaaggucuu

SEQ ID NO: 1525553 - RNA, 19 nt, Homo sapiens
  misc_RNA (1)...(19): siRNA sense strand
cugaguaugccaucaaguu

SEQ ID NO: 1525554 - RNA, 19 nt, Homo sapiens
  misc_RNA (1)...(19): siRNA sense strand
ggaugcaggcccaagauac

SEQ ID NO: 1525555 - RNA, 19 nt, Homo sapiens
  misc_RNA (1)...(19): siRNA sense strand
cagcagguggcaucagcua

SEQ ID NO: 1525556 - RNA, 19 nt, Homo sapiens
  misc_RNA (1)...(19): siRNA sense strand
ggcaucaacgugcucaaga

SEQ ID NO: 1525557 - RNA, 19 nt, Homo sapiens
  misc_RNA (1)...(19): siRNA sense strand
cagguggcaucagcuaugu

SEQ ID NO: 1525558 - RNA, 19 nt, Homo sapiens
  misc_RNA (1)...(19): siRNA sense strand
ugaguaugccaucaaguuc

SEQ ID NO: 1525559 - RNA, 19 nt, Homo sapiens
  misc_RNA (1)...(19): siRNA sense strand
gagcagugcaagaauuacu

SEQ ID NO: 1525560 - RNA, 19 nt, Homo sapiens
  misc_RNA (1)...(19): siRNA sense strand
uguacgaagccaugaagaa

SEQ ID NO: 1525561 - RNA, 19 nt, Homo sapiens
  misc_RNA (1)...(19): siRNA sense strand
gagaugcuccagugcuucu

SEQ ID NO: 1525562 - RNA, 19 nt, Homo sapiens
  misc_RNA (1)...(19): siRNA sense strand
ccaggaugcaggcccaaga

SEQ ID NO: 1525563 - RNA, 19 nt, Homo sapiens
  misc_RNA (1)...(19): siRNA sense strand
gagccaagauggaugauau

SEQ ID NO: 1525564 - RNA, 19 nt, Homo sapiens
  misc_RNA (1)...(19): siRNA sense strand
caagauggaugauauugug

SEQ ID NO: 1525565 - RNA, 19 nt, Homo sapiens
  misc_RNA (1)...(19): siRNA sense strand
gagcagauccagaaaguga

SEQ ID NO: 1525566 - RNA, 19 nt, Homo sapiens
  misc_RNA (1)...(19): siRNA sense strand
gaaacucuguucagcuuca

SEQ ID NO: 1525567 - RNA, 19 nt, Homo sapiens
  misc_RNA (1)...(19): siRNA sense strand
ccagaaugcuuugguuaaa

SEQ ID NO: 1525568 - RNA, 19 nt, Homo sapiens
  misc_RNA (1)...(19): siRNA sense strand
uagaaacucuguucagcuu

SEQ ID NO: 1525569 - RNA, 19 nt, Homo sapiens
  misc_RNA (1)...(19): siRNA sense strand
cccaacaaaugccaaauug

SEQ ID NO: 1525570 - RNA, 19 nt, Homo sapiens
  misc_RNA (1)...(19): siRNA sense strand
gugcagaggccguugcuuu

SEQ ID NO: 1525571 - RNA, 19 nt, Homo sapiens
  misc_RNA (1)...(19): siRNA sense strand
gauggaugauauugugguu

SEQ ID NO: 1525572 - RNA, 19 nt, Homo sapiens
  misc_RNA (1)...(19): siRNA sense strand
caagaucaccugcaucagu

SEQ ID NO: 1525573 - RNA, 19 nt, Homo sapiens
  misc_RNA (1)...(19): siRNA sense strand
ugcaagagauuccaaccuu

SEQ ID NO: 1525574 - RNA, 19 nt, Homo sapiens
  misc_RNA (1)...(19): siRNA sense strand
ggaucugucuguagaaacu

SEQ ID NO: 1525575 - RNA, 19 nt, Homo sapiens
  misc_RNA (1)...(19): siRNA sense strand
cagcaacgaucccgauguc

SEQ ID NO: 1525576 - RNA, 19 nt, Homo sapiens
  misc_RNA (1)...(19): siRNA sense strand
guuaaacgaaucaaagaga

SEQ ID NO: 1525577 - RNA, 19 nt, Homo sapiens
  misc_RNA (1)...(19): siRNA sense strand
ccgagcagauccagaaagu

SEQ ID NO: 1525578 - RNA, 19 nt, Homo sapiens
  misc_RNA (1)...(19): siRNA sense strand
cuggagcccuucagcauga

SEQ ID NO: 1525579 - RNA, 19 nt, Homo sapiens
  misc_RNA (1)...(19): siRNA sense strand
gcauagagccaagauggau

SEQ ID NO: 1525580 - RNA, 19 nt, Homo sapiens
  misc_RNA (1)...(19): siRNA sense strand
uggaugauauugugguugu

SEQ ID NO: 1525581 - RNA, 19 nt, Homo sapiens
  misc_RNA (1)...(19): siRNA sense strand
gcaacgaucccgaugucau

SEQ ID NO: 1525582 - RNA, 19 nt, Homo sapiens
  misc_RNA (1)...(19): siRNA sense strand
gucaucaaguugcaagaga

SEQ ID NO: 1525583 - RNA, 19 nt, Homo sapiens
  misc_RNA (1)...(19): siRNA sense strand
ggaugauauugugguugua

SEQ ID NO: 1525584 - RNA, 19 nt, Homo sapiens
  misc_RNA (1)...(19): siRNA sense strand
ccaaguaugccgagcagau

SEQ ID NO: 1525585 - RNA, 19 nt, Homo sapiens
  misc_RNA (1)...(19): siRNA sense strand
gcuauugaguggccagacu

SEQ ID NO: 1525586 - RNA, 19 nt, Homo sapiens
  misc_RNA (1)...(19): siRNA sense strand
caucaaguugcaagagauu

SEQ ID NO: 1525587 - RNA, 19 nt, Homo sapiens
  misc_RNA (1)...(19): siRNA sense strand
ccagaaagugaacgagaug

SEQ ID NO: 1525588 - RNA, 19 nt, Homo sapiens
  misc_RNA (1)...(19): siRNA sense strand
uaaacgaaucaaagagaug

SEQ ID NO: 1525589 - RNA, 19 nt, Homo sapiens
  misc_RNA (1)...(19): siRNA sense strand
ccaagauggaugauauugu

SEQ ID NO: 1525590 - RNA, 19 nt, Homo sapiens
  misc_RNA (1)...(19): siRNA sense strand
ucaucaaguugcaagagau

SEQ ID NO: 1525591 - RNA, 19 nt, Homo sapiens
  misc_RNA (1)...(19): siRNA sense strand
gccaagauggaugauauug

SEQ ID NO: 1525592 - RNA, 19 nt, Homo sapiens
  misc_RNA (1)...(19): siRNA sense strand
cagaaugcuuugguuaaac

SEQ ID NO: 1525593 - RNA, 19 nt, Homo sapiens
  misc_RNA (1)...(19): siRNA sense strand
gaugauauugugguuguag

SEQ ID NO: 1525594 - RNA, 19 nt, Homo sapiens
  misc_RNA (1)...(19): siRNA sense strand
uccagaaagugaacgagau

SEQ ID NO: 1525595 - RNA, 19 nt, Homo sapiens
  misc_RNA (1)...(19): siRNA sense strand
agaaugcuuugguuaaacg

SEQ ID NO: 1525596 - RNA, 19 nt, Homo sapiens
  misc_RNA (1)...(19): siRNA sense strand
uggacaggcucaacagcau

SEQ ID NO: 1525597 - RNA, 19 nt, Homo sapiens
  misc_RNA (1)...(19): siRNA sense strand
caaguaugccgagcagauc

SEQ ID NO: 1525598 - RNA, 19 nt, Homo sapiens
  misc_RNA (1)...(19): siRNA sense strand
cagaggccguugcuuuuga

SEQ ID NO: 1525599 - RNA, 19 nt, Homo sapiens
  misc_RNA (1)...(19): siRNA sense strand
gagccgacccaacgaucug

SEQ ID NO: 1525600 - RNA, 19 nt, Homo sapiens
  misc_RNA (1)...(19): siRNA sense strand
ugaaagacaucaaagcuua

SEQ ID NO: 1525601 - RNA, 19 nt, Homo sapiens
  misc_RNA (1)...(19): siRNA sense strand
ucauagagcucgucacaaa

SEQ ID NO: 1525602 - RNA, 19 nt, Homo sapiens
  misc_RNA (1)...(19): siRNA sense strand
ggagauauauagcuggauu

SEQ ID NO: 1525603 - RNA, 19 nt, Homo sapiens
  misc_RNA (1)...(19): siRNA sense strand
caucagaccuggaaucuuc

SEQ ID NO: 1525604 - RNA, 19 nt, Homo sapiens
  misc_RNA (1)...(19): siRNA sense strand
gcaccaacagcuucaguua

SEQ ID NO: 1525605 - RNA, 19 nt, Homo sapiens
  misc_RNA (1)...(19): siRNA sense strand
caaguacgccuucagcuuu

SEQ ID NO: 1525606 - RNA, 19 nt, Homo sapiens
  misc_RNA (1)...(19): siRNA sense strand
caaaucagagggaguugua

SEQ ID NO: 1525607 - RNA, 19 nt, Homo sapiens
  misc_RNA (1)...(19): siRNA sense strand
gaaaaccaguccauucuug

SEQ ID NO: 1525608 - RNA, 19 nt, Homo sapiens
  misc_RNA (1)...(19): siRNA sense strand
aagcuuaucuggagucuca

SEQ ID NO: 1525609 - RNA, 19 nt, Homo sapiens
  misc_RNA (1)...(19): siRNA sense strand
gaagaacaaguccaucaga

SEQ ID NO: 1525610 - RNA, 19 nt, Homo sapiens
  misc_RNA (1)...(19): siRNA sense strand
gcuuacagcaucaugauaa

SEQ ID NO: 1525611 - RNA, 19 nt, Homo sapiens
  misc_RNA (1)...(19): siRNA sense strand
gcguggaucucaacaggaa

SEQ ID NO: 1525612 - RNA, 19 nt, Homo sapiens
  misc_RNA (1)...(19): siRNA sense strand
auauauagcuggauugaca

SEQ ID NO: 1525613 - RNA, 19 nt, Homo sapiens
  misc_RNA (1)...(19): siRNA sense strand
gcaucuggacugccaauaa

SEQ ID NO: 1525614 - RNA, 19 nt, Homo sapiens
  misc_RNA (1)...(19): siRNA sense strand
ccauggacaucuucauaga

SEQ ID NO: 1525615 - RNA, 19 nt, Homo sapiens
  misc_RNA (1)...(19): siRNA sense strand
gaaaugguucuaacagcaa

SEQ ID NO: 1525616 - RNA, 19 nt, Homo sapiens
  misc_RNA (1)...(19): siRNA sense strand
ugacagacauacugaaugc

SEQ ID NO: 1525617 - RNA, 19 nt, Homo sapiens
  misc_RNA (1)...(19): siRNA sense strand
acucucagaugcuuaugua

SEQ ID NO: 1525618 - RNA, 19 nt, Homo sapiens
  misc_RNA (1)...(19): siRNA sense strand
uagcuggauugacaacuuu

SEQ ID NO: 1525619 - RNA, 19 nt, Homo sapiens
  misc_RNA (1)...(19): siRNA sense strand
gaacugaaagacaucaaag

SEQ ID NO: 1525620 - RNA, 19 nt, Homo sapiens
  misc_RNA (1)...(19): siRNA sense strand
cagcuucaguuacucauca

SEQ ID NO: 1525621 - RNA, 19 nt, Homo sapiens
  misc_RNA (1)...(19): siRNA sense strand
gauaugagaguuccuuucu

SEQ ID NO: 1525622 - RNA, 19 nt, Homo sapiens
  misc_RNA (1)...(19): siRNA sense strand
ggaacuggaagucggguuu

SEQ ID NO: 1525623 - RNA, 19 nt, Homo sapiens
  misc_RNA (1)...(19): siRNA sense strand
caucuggacugccaauaag

SEQ ID NO: 1525624 - RNA, 19 nt, Homo sapiens
  misc_RNA (1)...(19): siRNA sense strand
gaaagacaucaaagcuuau

SEQ ID NO: 1525625 - RNA, 19 nt, Homo sapiens
  misc_RNA (1)...(19): siRNA sense strand
cuccuggucuucagcuuua

SEQ ID NO: 1525626 - RNA, 19 nt, Homo sapiens
  misc_RNA (1)...(19): siRNA sense strand
gacaggccauggcgaaauc

SEQ ID NO: 1525627 - RNA, 19 nt, Homo sapiens
  misc_RNA (1)...(19): siRNA sense strand
ugaaugccauggacaucuu

SEQ ID NO: 1525628 - RNA, 19 nt, Homo sapiens
  misc_RNA (1)...(19): siRNA sense strand
gcauuccgauauugucuca

SEQ ID NO: 1525629 - RNA, 19 nt, Homo sapiens
  misc_RNA (1)...(19): siRNA sense strand
ugucagugauuauggcaaa

SEQ ID NO: 1525630 - RNA, 19 nt, Homo sapiens
  misc_RNA (1)...(19): siRNA sense strand
ucaaggcucugaucuccau

SEQ ID NO: 1525631 - RNA, 19 nt, Homo sapiens
  misc_RNA (1)...(19): siRNA sense strand
ccacagcuacucucagaug

SEQ ID NO: 1525632 - RNA, 19 nt, Homo sapiens
  misc_RNA (1)...(19): siRNA sense strand
ucucugaacugaaagacau

SEQ ID NO: 1525633 - RNA, 19 nt, Homo sapiens
  misc_RNA (1)...(19): siRNA sense strand
guucagcacuggagguucu

SEQ ID NO: 1525634 - RNA, 19 nt, Homo sapiens
  misc_RNA (1)...(19): siRNA sense strand
ggacacuccuggucuucag

SEQ ID NO: 1525635 - RNA, 19 nt, Homo sapiens
  misc_RNA (1)...(19): siRNA sense strand
caugggaucgaguacauuu

SEQ ID NO: 1525636 - RNA, 19 nt, Homo sapiens
  misc_RNA (1)...(19): siRNA sense strand
ggaggaaaugguucuaaca

SEQ ID NO: 1525637 - RNA, 19 nt, Homo sapiens
  misc_RNA (1)...(19): siRNA sense strand
cgguggaggccuuguauaa

SEQ ID NO: 1525638 - RNA, 19 nt, Homo sapiens
  misc_RNA (1)...(19): siRNA sense strand
caacagcuucaguuacuca

SEQ ID NO: 1525639 - RNA, 19 nt, Homo sapiens
  misc_RNA (1)...(19): siRNA sense strand
caucagcaccacccucuau

SEQ ID NO: 1525640 - RNA, 19 nt, Homo sapiens
  misc_RNA (1)...(19): siRNA sense strand
gaucccguuucaaaucaga

SEQ ID NO: 1525641 - RNA, 19 nt, Homo sapiens
  misc_RNA (1)...(19): siRNA sense strand
cagcuacucucagaugcuu

SEQ ID NO: 1525642 - RNA, 19 nt, Homo sapiens
  misc_RNA (1)...(19): siRNA sense strand
gcuuauggcggaagaacaa

SEQ ID NO: 1525643 - RNA, 19 nt, Homo sapiens
  misc_RNA (1)...(19): siRNA sense strand
gcugcuggaugaggaaaga

SEQ ID NO: 1525644 - RNA, 19 nt, Homo sapiens
  misc_RNA (1)...(19): siRNA sense strand
gaccuggaaucuucugcau

SEQ ID NO: 1525645 - RNA, 19 nt, Homo sapiens
  misc_RNA (1)...(19): siRNA sense strand
ccacagcaugaaccgcuua

SEQ ID NO: 1525646 - RNA, 19 nt, Homo sapiens
  misc_RNA (1)...(19): siRNA sense strand
ucaaguacgccuucagcuu

SEQ ID NO: 1525647 - RNA, 19 nt, Homo sapiens
  misc_RNA (1)...(19): siRNA sense strand
agagggaguuguacgaucu

SEQ ID NO: 1525648 - RNA, 19 nt, Homo sapiens
  misc_RNA (1)...(19): siRNA sense strand
cuuacagcaucaugauaaa

SEQ ID NO: 1525649 - RNA, 19 nt, Homo sapiens
  misc_RNA (1)...(19): siRNA sense strand
cuacgacaguggcaucaag

SEQ ID NO: 1525650 - RNA, 19 nt, Homo sapiens
  misc_RNA (1)...(19): siRNA sense strand
ggauugacacuggaauuca

SEQ ID NO: 1525651 - RNA, 19 nt, Homo sapiens
  misc_RNA (1)...(19): siRNA sense strand
auuccgauauugucucaaa

SEQ ID NO: 1525652 - RNA, 19 nt, Homo sapiens
  misc_RNA (1)...(19): siRNA sense strand
caacuucaaggcucugauc

SEQ ID NO: 1525653 - RNA, 19 nt, Homo sapiens
  misc_RNA (1)...(19): siRNA sense strand
gaggaaaugguucuaacag

SEQ ID NO: 1525654 - RNA, 19 nt, Homo sapiens
  misc_RNA (1)...(19): siRNA sense strand
ggauaugagaguuccuuuc

SEQ ID NO: 1525655 - RNA, 19 nt, Homo sapiens
  misc_RNA (1)...(19): siRNA sense strand
uggaucccguuucaaauca

SEQ ID NO: 1525656 - RNA, 19 nt, Homo sapiens
  misc_RNA (1)...(19): siRNA sense strand
ggaagaacaaguccaucag

SEQ ID NO: 1525657 - RNA, 19 nt, Homo sapiens
  misc_RNA (1)...(19): siRNA sense strand
cagcaugaaccgcuuaugg

SEQ ID NO: 1525658 - RNA, 19 nt, Homo sapiens
  misc_RNA (1)...(19): siRNA sense strand
ccugauggguuugcuuuua

SEQ ID NO: 1525659 - RNA, 19 nt, Homo sapiens
  misc_RNA (1)...(19): siRNA sense strand
ugccauggacaucuucaua

SEQ ID NO: 1525660 - RNA, 19 nt, Homo sapiens
  misc_RNA (1)...(19): siRNA sense strand
auagcuggauugacaacuu

SEQ ID NO: 1525661 - RNA, 19 nt, Homo sapiens
  misc_RNA (1)...(19): siRNA sense strand
cggaagaacaaguccauca

SEQ ID NO: 1525662 - RNA, 19 nt, Homo sapiens
  misc_RNA (1)...(19): siRNA sense strand
cagauuggcaacagcuuug

SEQ ID NO: 1525663 - RNA, 19 nt, Homo sapiens
  misc_RNA (1)...(19): siRNA sense strand
ucagauuggcaacagcuuu

SEQ ID NO: 1525664 - RNA, 19 nt, Homo sapiens
  misc_RNA (1)...(19): siRNA sense strand
agaugcuuauguacccuua

SEQ ID NO: 1525665 - RNA, 19 nt, Homo sapiens
  misc_RNA (1)...(19): siRNA sense strand
ugaacugaaagacaucaaa

SEQ ID NO: 1525666 - RNA, 19 nt, Homo sapiens
  misc_RNA (1)...(19): siRNA sense strand
accaacagcuucaguuacu

SEQ ID NO: 1525667 - RNA, 19 nt, Homo sapiens
  misc_RNA (1)...(19): siRNA sense strand
ggaucuggagggccugaaa

SEQ ID NO: 1525668 - RNA, 19 nt, Homo sapiens
  misc_RNA (1)...(19): siRNA sense strand
cagccucccuguggauaug

SEQ ID NO: 1525669 - RNA, 19 nt, Homo sapiens
  misc_RNA (1)...(19): siRNA sense strand
gauugacacuggaauucac

SEQ ID NO: 1525670 - RNA, 19 nt, Homo sapiens
  misc_RNA (1)...(19): siRNA sense strand
gagauauauagcuggauug

SEQ ID NO: 1525671 - RNA, 19 nt, Homo sapiens
  misc_RNA (1)...(19): siRNA sense strand
gcuacucucagaugcuuau

SEQ ID NO: 1525672 - RNA, 19 nt, Homo sapiens
  misc_RNA (1)...(19): siRNA sense strand
ugaucuccauccacagcua

SEQ ID NO: 1525673 - RNA, 19 nt, Homo sapiens
  misc_RNA (1)...(19): siRNA sense strand
ccauucuuguccugaaguu

SEQ ID NO: 1525674 - RNA, 19 nt, Homo sapiens
  misc_RNA (1)...(19): siRNA sense strand
gcaucggcguggaucucaa

SEQ ID NO: 1525675 - RNA, 19 nt, Homo sapiens
  misc_RNA (1)...(19): siRNA sense strand
ucauggagcacacccugaa

SEQ ID NO: 1525676 - RNA, 19 nt, Homo sapiens
  misc_RNA (1)...(19): siRNA sense strand
aaguacgccuucagcuuug

SEQ ID NO: 1525677 - RNA, 19 nt, Homo sapiens
  misc_RNA (1)...(19): siRNA sense strand
gccauggacaucuucauag

SEQ ID NO: 1525678 - RNA, 19 nt, Homo sapiens
  misc_RNA (1)...(19): siRNA sense strand
cagcaccacccucuaugug

SEQ ID NO: 1525679 - RNA, 19 nt, Homo sapiens
  misc_RNA (1)...(19): siRNA sense strand
ggcggacacuccuggucuu

SEQ ID NO: 1525680 - RNA, 19 nt, Homo sapiens
  misc_RNA (1)...(19): siRNA sense strand
auccacagcuacucucaga

SEQ ID NO: 1525681 - RNA, 19 nt, Homo sapiens
  misc_RNA (1)...(19): siRNA sense strand
gagcauuccgauauugucu

SEQ ID NO: 1525682 - RNA, 19 nt, Homo sapiens
  misc_RNA (1)...(19): siRNA sense strand
gcgguggaggccuuguaua

SEQ ID NO: 1525683 - RNA, 19 nt, Homo sapiens
  misc_RNA (1)...(19): siRNA sense strand
ucacagcccauggcaacuu

SEQ ID NO: 1525684 - RNA, 19 nt, Homo sapiens
  misc_RNA (1)...(19): siRNA sense strand
gcuggaucccguuucaaau

SEQ ID NO: 1525685 - RNA, 19 nt, Homo sapiens
  misc_RNA (1)...(19): siRNA sense strand
acagcaucaugauaaagga

SEQ ID NO: 1525686 - RNA, 19 nt, Homo sapiens
  misc_RNA (1)...(19): siRNA sense strand
cacagcccauggcaacuuc

SEQ ID NO: 1525687 - RNA, 19 nt, Homo sapiens
  misc_RNA (1)...(19): siRNA sense strand
uggaggaaaugguucuaac

SEQ ID NO: 1525688 - RNA, 19 nt, Homo sapiens
  misc_RNA (1)...(19): siRNA sense strand
gaacaaaccucauuuacca

SEQ ID NO: 1525689 - RNA, 19 nt, Homo sapiens
  misc_RNA (1)...(19): siRNA sense strand
aaaccaacauccugucuua

SEQ ID NO: 1525690 - RNA, 19 nt, Homo sapiens
  misc_RNA (1)...(19): siRNA sense strand
caauaagugugacagaaua

SEQ ID NO: 1525691 - RNA, 19 nt, Homo sapiens
  misc_RNA (1)...(19): siRNA sense strand
agaauaaggugacucauau

SEQ ID NO: 1525692 - RNA, 19 nt, Homo sapiens
  misc_RNA (1)...(19): siRNA sense strand
guaauagguuuccugauga

SEQ ID NO: 1525693 - RNA, 19 nt, Homo sapiens
  misc_RNA (1)...(19): siRNA sense strand
ggaauaaucucaggaagca

SEQ ID NO: 1525694 - RNA, 19 nt, Homo sapiens
  misc_RNA (1)...(19): siRNA sense strand
ugacaacgcuaacuggaaa

SEQ ID NO: 1525695 - RNA, 19 nt, Homo sapiens
  misc_RNA (1)...(19): siRNA sense strand
ccaacauccugucuuauuu

SEQ ID NO: 1525696 - RNA, 19 nt, Homo sapiens
  misc_RNA (1)...(19): siRNA sense strand
gaauucauguuguggaaga

SEQ ID NO: 1525697 - RNA, 19 nt, Homo sapiens
  misc_RNA (1)...(19): siRNA sense strand
gcaaagaaagcaauaagug

SEQ ID NO: 1525698 - RNA, 19 nt, Homo sapiens
  misc_RNA (1)...(19): siRNA sense strand
uguaauagguuuccugaug

SEQ ID NO: 1525699 - RNA, 19 nt, Homo sapiens
  misc_RNA (1)...(19): siRNA sense strand
uaaggugacucauauucuu

SEQ ID NO: 1525700 - RNA, 19 nt, Homo sapiens
  misc_RNA (1)...(19): siRNA sense strand
ggaaagaugccagaauuca

SEQ ID NO: 1525701 - RNA, 19 nt, Homo sapiens
  misc_RNA (1)...(19): siRNA sense strand
gagcauuucuauauuggau

SEQ ID NO: 1525702 - RNA, 19 nt, Homo sapiens
  misc_RNA (1)...(19): siRNA sense strand
ugcaagaccuuccauaugu

SEQ ID NO: 1525703 - RNA, 19 nt, Homo sapiens
  misc_RNA (1)...(19): siRNA sense strand
gcaauaagugugacagaau

SEQ ID NO: 1525704 - RNA, 19 nt, Homo sapiens
  misc_RNA (1)...(19): siRNA sense strand
uggagcagcuucguacaua

SEQ ID NO: 1525705 - RNA, 19 nt, Homo sapiens
  misc_RNA (1)...(19): siRNA sense strand
cucagugacuuuacauaua

SEQ ID NO: 1525706 - RNA, 19 nt, Homo sapiens
  misc_RNA (1)...(19): siRNA sense strand
gagugguucuuguucauug

SEQ ID NO: 1525707 - RNA, 19 nt, Homo sapiens
  misc_RNA (1)...(19): siRNA sense strand
auagaaacauggaaagaug

SEQ ID NO: 1525708 - RNA, 19 nt, Homo sapiens
  misc_RNA (1)...(19): siRNA sense strand
caaagaaagcaauaagugu

SEQ ID NO: 1525709 - RNA, 19 nt, Homo sapiens
  misc_RNA (1)...(19): siRNA sense strand
aagaauaaggugacucaua

SEQ ID NO: 1525710 - RNA, 19 nt, Homo sapiens
  misc_RNA (1)...(19): siRNA sense strand
cagaauucauguuguggaa

SEQ ID NO: 1525711 - RNA, 19 nt, Homo sapiens
  misc_RNA (1)...(19): siRNA sense strand
gcaagaccuuccauauguc

SEQ ID NO: 1525712 - RNA, 19 nt, Homo sapiens
  misc_RNA (1)...(19): siRNA sense strand
uaauagguuuccugaugaa

SEQ ID NO: 1525713 - RNA, 19 nt, Homo sapiens
  misc_RNA (1)...(19): siRNA sense strand
ggagcagcuucguacauau

SEQ ID NO: 1525714 - RNA, 19 nt, Homo sapiens
  misc_RNA (1)...(19): siRNA sense strand
gaaagaugccagaauucau

SEQ ID NO: 1525715 - RNA, 19 nt, Homo sapiens
  misc_RNA (1)...(19): siRNA sense strand
ugauuuggauacacugaaa

SEQ ID NO: 1525716 - RNA, 19 nt, Homo sapiens
  misc_RNA (1)...(19): siRNA sense strand
auggaaagaugccagaauu

SEQ ID NO: 1525717 - RNA, 19 nt, Homo sapiens
  misc_RNA (1)...(19): siRNA sense strand
ccaggaaauuaaagcauuc

SEQ ID NO: 1525718 - RNA, 19 nt, Homo sapiens
  misc_RNA (1)...(19): siRNA sense strand
ccugaugaauucugaacaa

SEQ ID NO: 1525719 - RNA, 19 nt, Homo sapiens
  misc_RNA (1)...(19): siRNA sense strand
cacaagaugcugcucauga

SEQ ID NO: 1525720 - RNA, 19 nt, Homo sapiens
  misc_RNA (1)...(19): siRNA sense strand
cagggcugcugcaauugua

SEQ ID NO: 1525721 - RNA, 19 nt, Homo sapiens
  misc_RNA (1)...(19): siRNA sense strand
acaagaugcugcucaugau

SEQ ID NO: 1525722 - RNA, 19 nt, Homo sapiens
  misc_RNA (1)...(19): siRNA sense strand
uagguuuccugaugaauuc

SEQ ID NO: 1525723 - RNA, 19 nt, Homo sapiens
  misc_RNA (1)...(19): siRNA sense strand
gcaaguuggcguuauuaag

SEQ ID NO: 1525724 - RNA, 19 nt, Homo sapiens
  misc_RNA (1)...(19): siRNA sense strand
uuccagggcugcugcaauu

SEQ ID NO: 1525725 - RNA, 19 nt, Homo sapiens
  misc_RNA (1)...(19): siRNA sense strand
gaaaccaacauccugucuu

SEQ ID NO: 1525726 - RNA, 19 nt, Homo sapiens
  misc_RNA (1)...(19): siRNA sense strand
aaagaugccagaauucaug

SEQ ID NO: 1525727 - RNA, 19 nt, Homo sapiens
  misc_RNA (1)...(19): siRNA sense strand
gaugaauucugaacaaacc

SEQ ID NO: 1525728 - RNA, 19 nt, Homo sapiens
  misc_RNA (1)...(19): siRNA sense strand
gcauuucuauauuggaucu

SEQ ID NO: 1525729 - RNA, 19 nt, Homo sapiens
  misc_RNA (1)...(19): siRNA sense strand
aacgcuaacuggaaagaaa

SEQ ID NO: 1525730 - RNA, 19 nt, Homo sapiens
  misc_RNA (1)...(19): siRNA sense strand
caagaugcugcucaugauu

SEQ ID NO: 1525731 - RNA, 19 nt, Homo sapiens
  misc_RNA (1)...(19): siRNA sense strand
aagaaaagauggagugguu

SEQ ID NO: 1525732 - RNA, 19 nt, Homo sapiens
  misc_RNA (1)...(19): siRNA sense strand
gagggcaaagaaagcaaua

SEQ ID NO: 1525733 - RNA, 19 nt, Homo sapiens
  misc_RNA (1)...(19): siRNA sense strand
ccugcaaguuggcguuauu

SEQ ID NO: 1525734 - RNA, 19 nt, Homo sapiens
  misc_RNA (1)...(19): siRNA sense strand
ucugaacaaaccucauuua

SEQ ID NO: 1525735 - RNA, 19 nt, Homo sapiens
  misc_RNA (1)...(19): siRNA sense strand
ucccuuaaccaggaaauua

SEQ ID NO: 1525736 - RNA, 19 nt, Homo sapiens
  misc_RNA (1)...(19): siRNA sense strand
caaguuggcguuauuaagc

SEQ ID NO: 1525737 - RNA, 19 nt, Homo sapiens
  misc_RNA (1)...(19): siRNA sense strand
gaugccagaauucauguug

SEQ ID NO: 1525738 - RNA, 19 nt, Homo sapiens
  misc_RNA (1)...(19): siRNA sense strand
gggcaaagaaagcaauaag

SEQ ID NO: 1525739 - RNA, 19 nt, Homo sapiens
  misc_RNA (1)...(19): siRNA sense strand
caaauucuggcuucaugga

SEQ ID NO: 1525740 - RNA, 19 nt, Homo sapiens
  misc_RNA (1)...(19): siRNA sense strand
accaggaaauuaaagcauu

SEQ ID NO: 1525741 - RNA, 19 nt, Homo sapiens
  misc_RNA (1)...(19): siRNA sense strand
uauauuggaucugccugaa

SEQ ID NO: 1525742 - RNA, 19 nt, Homo sapiens
  misc_RNA (1)...(19): siRNA sense strand
aagaugcugcucaugauuu

SEQ ID NO: 1525743 - RNA, 19 nt, Homo sapiens
  misc_RNA (1)...(19): siRNA sense strand
uaucaagagggcaaagaaa

SEQ ID NO: 1525744 - RNA, 19 nt, Homo sapiens
  misc_RNA (1)...(19): siRNA sense strand
gagcagcuucguacauauc

SEQ ID NO: 1525745 - RNA, 19 nt, Homo sapiens
  misc_RNA (1)...(19): siRNA sense strand
ccucagugacuuuacauau

SEQ ID NO: 1525746 - RNA, 19 nt, Homo sapiens
  misc_RNA (1)...(19): siRNA sense strand
agaugcugcucaugauuug

SEQ ID NO: 1525747 - RNA, 19 nt, Homo sapiens
  misc_RNA (1)...(19): siRNA sense strand
guacucccuuaaccaggaa

SEQ ID NO: 1525748 - RNA, 19 nt, Homo sapiens
  misc_RNA (1)...(19): siRNA sense strand
gaccuuccauauguccaaa

SEQ ID NO: 1525749 - RNA, 19 nt, Homo sapiens
  misc_RNA (1)...(19): siRNA sense strand
uccaaauucuggcuucaug

SEQ ID NO: 1525750 - RNA, 19 nt, Homo sapiens
  misc_RNA (1)...(19): siRNA sense strand
aaggugacucauauucuua

SEQ ID NO: 1525751 - RNA, 19 nt, Homo sapiens
  misc_RNA (1)...(19): siRNA sense strand
gaaagcaauaagugugaca

SEQ ID NO: 1525752 - RNA, 19 nt, Homo sapiens
  misc_RNA (1)...(19): siRNA sense strand
aagaaagcaauaaguguga

SEQ ID NO: 1525753 - RNA, 19 nt, Homo sapiens
  misc_RNA (1)...(19): siRNA sense strand
cugaugaauucugaacaaa

SEQ ID NO: 1525754 - RNA, 19 nt, Homo sapiens
  misc_RNA (1)...(19): siRNA sense strand
ggagugguucuuguucauu

SEQ ID NO: 1525755 - RNA, 19 nt, Homo sapiens
  misc_RNA (1)...(19): siRNA sense strand
cugcaauuguaauagguuu

SEQ ID NO: 1525756 - RNA, 19 nt, Homo sapiens
  misc_RNA (1)...(19): siRNA sense strand
gcuccuagggucacaagau

SEQ ID NO: 1525757 - RNA, 19 nt, Homo sapiens
  misc_RNA (1)...(19): siRNA sense strand
ccuuccauauguccaaauu

SEQ ID NO: 1525758 - RNA, 19 nt, Homo sapiens
  misc_RNA (1)...(19): siRNA sense strand
uauuggaucugccugaaac

SEQ ID NO: 1525759 - RNA, 19 nt, Homo sapiens
  misc_RNA (1)...(19): siRNA sense strand
uaauguugcauauggaguu

SEQ ID NO: 1525760 - RNA, 19 nt, Homo sapiens
  misc_RNA (1)...(19): siRNA sense strand
caacauccugucuuauuuu

SEQ ID NO: 1525761 - RNA, 19 nt, Homo sapiens
  misc_RNA (1)...(19): siRNA sense strand
gcagcuucguacauaucaa

SEQ ID NO: 1525762 - RNA, 19 nt, Homo sapiens
  misc_RNA (1)...(19): siRNA sense strand
aaaaugcuuuccucaguga

SEQ ID NO: 1525763 - RNA, 19 nt, Homo sapiens
  misc_RNA (1)...(19): siRNA sense strand
gugacagaauacaggagaa

SEQ ID NO: 1525764 - RNA, 19 nt, Homo sapiens
  misc_RNA (1)...(19): siRNA sense strand
agcaauaagugugacagaa

SEQ ID NO: 1525765 - RNA, 19 nt, Homo sapiens
  misc_RNA (1)...(19): siRNA sense strand
gauggagugguucuuguuc

SEQ ID NO: 1525766 - RNA, 19 nt, Homo sapiens
  misc_RNA (1)...(19): siRNA sense strand
ugccagaauucauguugug

SEQ ID NO: 1525767 - RNA, 19 nt, Homo sapiens
  misc_RNA (1)...(19): siRNA sense strand
accaacauccugucuuauu

SEQ ID NO: 1525768 - RNA, 19 nt, Homo sapiens
  misc_RNA (1)...(19): siRNA sense strand
ggugacucauauucuuaau

SEQ ID NO: 1525769 - RNA, 19 nt, Homo sapiens
  misc_RNA (1)...(19): siRNA sense strand
ggcaaagaaagcaauaagu

SEQ ID NO: 1525770 - RNA, 19 nt, Homo sapiens
  misc_RNA (1)...(19): siRNA sense strand
gaccugcaaguuggcguua

SEQ ID NO: 1525771 - RNA, 19 nt, Homo sapiens
  misc_RNA (1)...(19): siRNA sense strand
aaugcaagaccuuccauau

SEQ ID NO: 1525772 - RNA, 19 nt, Homo sapiens
  misc_RNA (1)...(19): siRNA sense strand
caagagggcaaagaaagca

SEQ ID NO: 1525773 - RNA, 19 nt, Homo sapiens
  misc_RNA (1)...(19): siRNA sense strand
uuccauauguccaaauucu

SEQ ID NO: 1525774 - RNA, 19 nt, Homo sapiens
  misc_RNA (1)...(19): siRNA sense strand
gugacaacgcuaacuggaa

SEQ ID NO: 1525775 - RNA, 19 nt, Homo sapiens
  misc_RNA (1)...(19): siRNA sense strand
aagagcauuucuauauugg

SEQ ID NO: 1525776 - RNA, 19 nt, Homo sapiens
  misc_RNA (1)...(19): siRNA sense strand
aauaaucucaggaagcaau

SEQ ID NO: 1525777 - RNA, 19 nt, Homo sapiens
  misc_RNA (1)...(19): siRNA sense strand
cuccuagggucacaagaug

SEQ ID NO: 1525778 - RNA, 19 nt, Homo sapiens
  misc_RNA (1)...(19): siRNA sense strand
aaaugcaagaccuuccaua

SEQ ID NO: 1525779 - RNA, 19 nt, Homo sapiens
  misc_RNA (1)...(19): siRNA sense strand
gaagaugacuuacaguuaa

SEQ ID NO: 1525780 - RNA, 19 nt, Homo sapiens
  misc_RNA (1)...(19): siRNA sense strand
gaagaaagcagaagagaaa

SEQ ID NO: 1525781 - RNA, 19 nt, Homo sapiens
  misc_RNA (1)...(19): siRNA sense strand
agaaggaacugauucauuu

SEQ ID NO: 1525782 - RNA, 19 nt, Homo sapiens
  misc_RNA (1)...(19): siRNA sense strand
caaguuugcucaccuuaua

SEQ ID NO: 1525783 - RNA, 19 nt, Homo sapiens
  misc_RNA (1)...(19): siRNA sense strand
gaccuaagcuaucaagaaa

SEQ ID NO: 1525784 - RNA, 19 nt, Homo sapiens
  misc_RNA (1)...(19): siRNA sense strand
uaacaaagaugaagaggau

SEQ ID NO: 1525785 - RNA, 19 nt, Homo sapiens
  misc_RNA (1)...(19): siRNA sense strand
gaagaacauuugauugaga

SEQ ID NO: 1525786 - RNA, 19 nt, Homo sapiens
  misc_RNA (1)...(19): siRNA sense strand
gggcagaaauuacgaaguu

SEQ ID NO: 1525787 - RNA, 19 nt, Homo sapiens
  misc_RNA (1)...(19): siRNA sense strand
caacaaagcacucucaaga

SEQ ID NO: 1525788 - RNA, 19 nt, Homo sapiens
  misc_RNA (1)...(19): siRNA sense strand
caaugaagguguugagauu

SEQ ID NO: 1525789 - RNA, 19 nt, Homo sapiens
  misc_RNA (1)...(19): siRNA sense strand
aaacagaucuacugcuuga

SEQ ID NO: 1525790 - RNA, 19 nt, Homo sapiens
  misc_RNA (1)...(19): siRNA sense strand
gcaacuaccagaauauuaa

SEQ ID NO: 1525791 - RNA, 19 nt, Homo sapiens
  misc_RNA (1)...(19): siRNA sense strand
ggaagaagaggaagaagaa

SEQ ID NO: 1525792 - RNA, 19 nt, Homo sapiens
  misc_RNA (1)...(19): siRNA sense strand
ggaacaagauccugaugug

SEQ ID NO: 1525793 - RNA, 19 nt, Homo sapiens
  misc_RNA (1)...(19): siRNA sense strand
ugaagaggaucaagaagaa

SEQ ID NO: 1525794 - RNA, 19 nt, Homo sapiens
  misc_RNA (1)...(19): siRNA sense strand
gaauuacguucuauguuga

SEQ ID NO: 1525795 - RNA, 19 nt, Homo sapiens
  misc_RNA (1)...(19): siRNA sense strand
gagaagaagaugcauauug

SEQ ID NO: 1525796 - RNA, 19 nt, Homo sapiens
  misc_RNA (1)...(19): siRNA sense strand
ugaaagaugcugugucuaa

SEQ ID NO: 1525797 - RNA, 19 nt, Homo sapiens
  misc_RNA (1)...(19): siRNA sense strand
aaagcacucucaagaagua

SEQ ID NO: 1525798 - RNA, 19 nt, Homo sapiens
  misc_RNA (1)...(19): siRNA sense strand
gaaggaacugauucauuua

SEQ ID NO: 1525799 - RNA, 19 nt, Homo sapiens
  misc_RNA (1)...(19): siRNA sense strand
cuacacacaucucuacaaa

SEQ ID NO: 1525800 - RNA, 19 nt, Homo sapiens
  misc_RNA (1)...(19): siRNA sense strand
caugaacgcauuauagaua

SEQ ID NO: 1525801 - RNA, 19 nt, Homo sapiens
  misc_RNA (1)...(19): siRNA sense strand
uaucaagaaugcagagaaa

SEQ ID NO: 1525802 - RNA, 19 nt, Homo sapiens
  misc_RNA (1)...(19): siRNA sense strand
uaagaaacccauuccauug

SEQ ID NO: 1525803 - RNA, 19 nt, Homo sapiens
  misc_RNA (1)...(19): siRNA sense strand
gaaagcagaagagaaacua

SEQ ID NO: 1525804 - RNA, 19 nt, Homo sapiens
  misc_RNA (1)...(19): siRNA sense strand
gaccauagaagaacauuug

SEQ ID NO: 1525805 - RNA, 19 nt, Homo sapiens
  misc_RNA (1)...(19): siRNA sense strand
gguauaaucccacagacua

SEQ ID NO: 1525806 - RNA, 19 nt, Homo sapiens
  misc_RNA (1)...(19): siRNA sense strand
gagaaggaacugauucauu

SEQ ID NO: 1525807 - RNA, 19 nt, Homo sapiens
  misc_RNA (1)...(19): siRNA sense strand
ggauuuaggacaaagagua

SEQ ID NO: 1525808 - RNA, 19 nt, Homo sapiens
  misc_RNA (1)...(19): siRNA sense strand
ugaagaugacuuacaguua

SEQ ID NO: 1525809 - RNA, 19 nt, Homo sapiens
  misc_RNA (1)...(19): siRNA sense strand
ggcagaagcuucagagagu

SEQ ID NO: 1525810 - RNA, 19 nt, Homo sapiens
  misc_RNA (1)...(19): siRNA sense strand
gaaaagaaacccagaaguu

SEQ ID NO: 1525811 - RNA, 19 nt, Homo sapiens
  misc_RNA (1)...(19): siRNA sense strand
gaacugauucauuuacuuc

SEQ ID NO: 1525812 - RNA, 19 nt, Homo sapiens
  misc_RNA (1)...(19): siRNA sense strand
ggaacugauucauuuacuu

SEQ ID NO: 1525813 - RNA, 19 nt, Homo sapiens
  misc_RNA (1)...(19): siRNA sense strand
gaaagaugcugugucuaag

SEQ ID NO: 1525814 - RNA, 19 nt, Homo sapiens
  misc_RNA (1)...(19): siRNA sense strand
gcauauagcauggcagaaa

SEQ ID NO: 1525815 - RNA, 19 nt, Homo sapiens
  misc_RNA (1)...(19): siRNA sense strand
gcagaagcuucagagagua

SEQ ID NO: 1525816 - RNA, 19 nt, Homo sapiens
  misc_RNA (1)...(19): siRNA sense strand
aaagaaacccagaaguuaa

SEQ ID NO: 1525817 - RNA, 19 nt, Homo sapiens
  misc_RNA (1)...(19): siRNA sense strand
aggaagagaucauugaaga

SEQ ID NO: 1525818 - RNA, 19 nt, Homo sapiens
  misc_RNA (1)...(19): siRNA sense strand
ggaugaagaugacuuacag

SEQ ID NO: 1525819 - RNA, 19 nt, Homo sapiens
  misc_RNA (1)...(19): siRNA sense strand
cgaagaaacggaagcauga

SEQ ID NO: 1525820 - RNA, 19 nt, Homo sapiens
  misc_RNA (1)...(19): siRNA sense strand
agagggaacuugaggaaga

SEQ ID NO: 1525821 - RNA, 19 nt, Homo sapiens
  misc_RNA (1)...(19): siRNA sense strand
ucgaagaucugcuacugaa

SEQ ID NO: 1525822 - RNA, 19 nt, Homo sapiens
  misc_RNA (1)...(19): siRNA sense strand
gugauguucugaauauuga

SEQ ID NO: 1525823 - RNA, 19 nt, Homo sapiens
  misc_RNA (1)...(19): siRNA sense strand
guaaccuacuucagaauau

SEQ ID NO: 1525824 - RNA, 19 nt, Homo sapiens
  misc_RNA (1)...(19): siRNA sense strand
cgaaagcugguaauuguuu

SEQ ID NO: 1525825 - RNA, 19 nt, Homo sapiens
  misc_RNA (1)...(19): siRNA sense strand
ggaagaaagcagaagagaa

SEQ ID NO: 1525826 - RNA, 19 nt, Homo sapiens
  misc_RNA (1)...(19): siRNA sense strand
gguaauuguuucucugaug

SEQ ID NO: 1525827 - RNA, 19 nt, Homo sapiens
  misc_RNA (1)...(19): siRNA sense strand
acaaagcacucucaagaag

SEQ ID NO: 1525828 - RNA, 19 nt, Homo sapiens
  misc_RNA (1)...(19): siRNA sense strand
uggaacaaaugguuaaaga

SEQ ID NO: 1525829 - RNA, 19 nt, Homo sapiens
  misc_RNA (1)...(19): siRNA sense strand
gaaguuaggccagagaugu

SEQ ID NO: 1525830 - RNA, 19 nt, Homo sapiens
  misc_RNA (1)...(19): siRNA sense strand
gaaacuagagcgagagcuu

SEQ ID NO: 1525831 - RNA, 19 nt, Homo sapiens
  misc_RNA (1)...(19): siRNA sense strand
cuaagaaacccauuccauu

SEQ ID NO: 1525832 - RNA, 19 nt, Homo sapiens
  misc_RNA (1)...(19): siRNA sense strand
aaggugauguucugaauau

SEQ ID NO: 1525833 - RNA, 19 nt, Homo sapiens
  misc_RNA (1)...(19): siRNA sense strand
gaugaucuguuaguaguuc

SEQ ID NO: 1525834 - RNA, 19 nt, Homo sapiens
  misc_RNA (1)...(19): siRNA sense strand
gauugucccucucaugaau

SEQ ID NO: 1525835 - RNA, 19 nt, Homo sapiens
  misc_RNA (1)...(19): siRNA sense strand
caacaacaucaucguauug

SEQ ID NO: 1525836 - RNA, 19 nt, Homo sapiens
  misc_RNA (1)...(19): siRNA sense strand
gauggaugaagaugacuua

SEQ ID NO: 1525837 - RNA, 19 nt, Homo sapiens
  misc_RNA (1)...(19): siRNA sense strand
uaucugaaauguguuguga

SEQ ID NO: 1525838 - RNA, 19 nt, Homo sapiens
  misc_RNA (1)...(19): siRNA sense strand
acaaaggacuggcagaagu

SEQ ID NO: 1525839 - RNA, 19 nt, Homo sapiens
  misc_RNA (1)...(19): siRNA sense strand
gaagcaugaacgcauuaua

SEQ ID NO: 1525840 - RNA, 19 nt, Homo sapiens
  misc_RNA (1)...(19): siRNA sense strand
uucaagagcugaccauaga

SEQ ID NO: 1525841 - RNA, 19 nt, Homo sapiens
  misc_RNA (1)...(19): siRNA sense strand
caaggaaguagaagugaaa

SEQ ID NO: 1525842 - RNA, 19 nt, Homo sapiens
  misc_RNA (1)...(19): siRNA sense strand
acaacaacaucaucguauu

SEQ ID NO: 1525843 - RNA, 19 nt, Homo sapiens
  misc_RNA (1)...(19): siRNA sense strand
agaagaagaugcauauugc

SEQ ID NO: 1525844 - RNA, 19 nt, Homo sapiens
  misc_RNA (1)...(19): siRNA sense strand
ggcagaaauuacgaaguua

SEQ ID NO: 1525845 - RNA, 19 nt, Homo sapiens
  misc_RNA (1)...(19): siRNA sense strand
caaaacagaucuacugcuu

SEQ ID NO: 1525846 - RNA, 19 nt, Homo sapiens
  misc_RNA (1)...(19): siRNA sense strand
gcagagaaaguggaagaaa

SEQ ID NO: 1525847 - RNA, 19 nt, Homo sapiens
  misc_RNA (1)...(19): siRNA sense strand
gaaaagcgaccagguaaaa

SEQ ID NO: 1525848 - RNA, 19 nt, Homo sapiens
  misc_RNA (1)...(19): siRNA sense strand
cagagaaaguggaagaaag

SEQ ID NO: 1525849 - RNA, 19 nt, Homo sapiens
  misc_RNA (1)...(19): siRNA sense strand
ucaaggaaguagaagugaa

SEQ ID NO: 1525850 - RNA, 19 nt, Homo sapiens
  misc_RNA (1)...(19): siRNA sense strand
cauauuaucagauccagaa

SEQ ID NO: 1525851 - RNA, 19 nt, Homo sapiens
  misc_RNA (1)...(19): siRNA sense strand
ccuaagcuaucaagaaagu

SEQ ID NO: 1525852 - RNA, 19 nt, Homo sapiens
  misc_RNA (1)...(19): siRNA sense strand
cauauagcauggcagaaau

SEQ ID NO: 1525853 - RNA, 19 nt, Homo sapiens
  misc_RNA (1)...(19): siRNA sense strand
uccaagcuuucgcaaguua

SEQ ID NO: 1525854 - RNA, 19 nt, Homo sapiens
  misc_RNA (1)...(19): siRNA sense strand
gacauucaauccuccuguu

SEQ ID NO: 1525855 - RNA, 19 nt, Homo sapiens
  misc_RNA (1)...(19): siRNA sense strand
uuuagcaacuaccagaaua

SEQ ID NO: 1525856 - RNA, 19 nt, Homo sapiens
  misc_RNA (1)...(19): siRNA sense strand
gcucuugccuucaucaaac

SEQ ID NO: 1525857 - RNA, 19 nt, Homo sapiens
  misc_RNA (1)...(19): siRNA sense strand
guacuccagugccuugaug

SEQ ID NO: 1525858 - RNA, 19 nt, Homo sapiens
  misc_RNA (1)...(19): siRNA sense strand
cagaagacauuaauaaacc

SEQ ID NO: 1525859 - RNA, 19 nt, Homo sapiens
  misc_RNA (1)...(19): siRNA sense strand
ugauguggcuguuacuguu

SEQ ID NO: 1525860 - RNA, 19 nt, Homo sapiens
  misc_RNA (1)...(19): siRNA sense strand
ggauugagagggaagaaga

SEQ ID NO: 1525861 - RNA, 19 nt, Homo sapiens
  misc_RNA (1)...(19): siRNA sense strand
aagaugcugugucuaagaa

SEQ ID NO: 1525862 - RNA, 19 nt, Homo sapiens
  misc_RNA (1)...(19): siRNA sense strand
aaagaacagaggaaacuaa

SEQ ID NO: 1525863 - RNA, 19 nt, Homo sapiens
  misc_RNA (1)...(19): siRNA sense strand
uagauaugauggaugaaga

SEQ ID NO: 1525864 - RNA, 19 nt, Homo sapiens
  misc_RNA (1)...(19): siRNA sense strand
aaugaaggauuuaggacaa

SEQ ID NO: 1525865 - RNA, 19 nt, Homo sapiens
  misc_RNA (1)...(19): siRNA sense strand
aaaccagaguugagucgaa

SEQ ID NO: 1525866 - RNA, 19 nt, Homo sapiens
  misc_RNA (1)...(19): siRNA sense strand
gaggcauuaucaucccaua

SEQ ID NO: 1525867 - RNA, 19 nt, Homo sapiens
  misc_RNA (1)...(19): siRNA sense strand
ucacaacaacaucaucgua

SEQ ID NO: 1525868 - RNA, 19 nt, Homo sapiens
  misc_RNA (1)...(19): siRNA sense strand
cuuuagauaugauggauga

SEQ ID NO: 1525869 - RNA, 19 nt, Homo sapiens
  misc_RNA (1)...(19): siRNA sense strand
gaagaucugcuacugaacu

SEQ ID NO: 1525870 - RNA, 19 nt, Homo sapiens
  misc_RNA (1)...(19): siRNA sense strand
gcauuaucaucccauagug

SEQ ID NO: 1525871 - RNA, 19 nt, Homo sapiens
  misc_RNA (1)...(19): siRNA sense strand
ggugauguucugaauauug

SEQ ID NO: 1525872 - RNA, 19 nt, Homo sapiens
  misc_RNA (1)...(19): siRNA sense strand
uaaauuaggccaagcuucu

SEQ ID NO: 1525873 - RNA, 19 nt, Homo sapiens
  misc_RNA (1)...(19): siRNA sense strand
ugaaauguguugugaagcu

SEQ ID NO: 1525874 - RNA, 19 nt, Homo sapiens
  misc_RNA (1)...(19): siRNA sense strand
ggaagcagaggaagcugaa

SEQ ID NO: 1525875 - RNA, 19 nt, Homo sapiens
  misc_RNA (1)...(19): siRNA sense strand
gaaauuacaggagaagaag

SEQ ID NO: 1525876 - RNA, 19 nt, Homo sapiens
  misc_RNA (1)...(19): siRNA sense strand
gggaagaagaggaagaaga

SEQ ID NO: 1525877 - RNA, 19 nt, Homo sapiens
  misc_RNA (1)...(19): siRNA sense strand
agaagaaauuacaggagaa

SEQ ID NO: 1525878 - RNA, 19 nt, Homo sapiens
  misc_RNA (1)...(19): siRNA sense strand
gaagaagagagggaacuug

SEQ ID NO: 1525879 - RNA, 19 nt, Homo sapiens
  misc_RNA (1)...(19): siRNA sense strand
ggaauacagugacgacaaa

SEQ ID NO: 1525880 - RNA, 19 nt, Homo sapiens
  misc_RNA (1)...(19): siRNA sense strand
gaugguggauaaacacauu

SEQ ID NO: 1525881 - RNA, 19 nt, Homo sapiens
  misc_RNA (1)...(19): siRNA sense strand
ggaagacacaccaaagaaa

SEQ ID NO: 1525882 - RNA, 19 nt, Homo sapiens
  misc_RNA (1)...(19): siRNA sense strand
ccuacgagaugguggauaa

SEQ ID NO: 1525883 - RNA, 19 nt, Homo sapiens
  misc_RNA (1)...(19): siRNA sense strand
aagcagaucugaaggacaa

SEQ ID NO: 1525884 - RNA, 19 nt, Homo sapiens
  misc_RNA (1)...(19): siRNA sense strand
ccacgaaacccaaaggaaa

SEQ ID NO: 1525885 - RNA, 19 nt, Homo sapiens
  misc_RNA (1)...(19): siRNA sense strand
caaaggagggucugaguuc

SEQ ID NO: 1525886 - RNA, 19 nt, Homo sapiens
  misc_RNA (1)...(19): siRNA sense strand
gauaagaaagcagagauug

SEQ ID NO: 1525887 - RNA, 19 nt, Homo sapiens
  misc_RNA (1)...(19): siRNA sense strand
gaggaagacacaccaaaga

SEQ ID NO: 1525888 - RNA, 19 nt, Homo sapiens
  misc_RNA (1)...(19): siRNA sense strand
gaccagaggacggaagaua

SEQ ID NO: 1525889 - RNA, 19 nt, Homo sapiens
  misc_RNA (1)...(19): siRNA sense strand
aauccagacuguccaauug

SEQ ID NO: 1525890 - RNA, 19 nt, Homo sapiens
  misc_RNA (1)...(19): siRNA sense strand
gaaagcagagauugacauc

SEQ ID NO: 1525891 - RNA, 19 nt, Homo sapiens
  misc_RNA (1)...(19): siRNA sense strand
caaacgaacccacguacug

SEQ ID NO: 1525892 - RNA, 19 nt, Homo sapiens
  misc_RNA (1)...(19): siRNA sense strand
gaaccuucccugcgaacuu

SEQ ID NO: 1525893 - RNA, 19 nt, Homo sapiens
  misc_RNA (1)...(19): siRNA sense strand
gaagauaagaaagcagaga

SEQ ID NO: 1525894 - RNA, 19 nt, Homo sapiens
  misc_RNA (1)...(19): siRNA sense strand
ccauguacuuggagcacua

SEQ ID NO: 1525895 - RNA, 19 nt, Homo sapiens
  misc_RNA (1)...(19): siRNA sense strand
gaagacacaccaaagaaaa

SEQ ID NO: 1525896 - RNA, 19 nt, Homo sapiens
  misc_RNA (1)...(19): siRNA sense strand
gaggacggaagauaagaaa

SEQ ID NO: 1525897 - RNA, 19 nt, Homo sapiens
  misc_RNA (1)...(19): siRNA sense strand
gggagaugauuggcuguga

SEQ ID NO: 1525898 - RNA, 19 nt, Homo sapiens
  misc_RNA (1)...(19): siRNA sense strand
cauccuggcugcagaguac

SEQ ID NO: 1525899 - RNA, 19 nt, Homo sapiens
  misc_RNA (1)...(19): siRNA sense strand
ccugcgaacuucagaggaa

SEQ ID NO: 1525900 - RNA, 19 nt, Homo sapiens
  misc_RNA (1)...(19): siRNA sense strand
ggacggaagauaagaaagc

SEQ ID NO: 1525901 - RNA, 19 nt, Homo sapiens
  misc_RNA (1)...(19): siRNA sense strand
guggagcgccugcagaaga

SEQ ID NO: 1525902 - RNA, 19 nt, Homo sapiens
  misc_RNA (1)...(19): siRNA sense strand
caauccagacuguccaauu

SEQ ID NO: 1525903 - RNA, 19 nt, Homo sapiens
  misc_RNA (1)...(19): siRNA sense strand
cgaccgccauguacuugga

SEQ ID NO: 1525904 - RNA, 19 nt, Homo sapiens
  misc_RNA (1)...(19): siRNA sense strand
gaaaagaggaagaagaagu

SEQ ID NO: 1525905 - RNA, 19 nt, Homo sapiens
  misc_RNA (1)...(19): siRNA sense strand
gacggaagauaagaaagca

SEQ ID NO: 1525906 - RNA, 19 nt, Homo sapiens
  misc_RNA (1)...(19): siRNA sense strand
ggagggcagugauuuugaa

SEQ ID NO: 1525907 - RNA, 19 nt, Homo sapiens
  misc_RNA (1)...(19): siRNA sense strand
agcacuaucuggacaguau

SEQ ID NO: 1525908 - RNA, 19 nt, Homo sapiens
  misc_RNA (1)...(19): siRNA sense strand
cagaacgccuacagcaagu

SEQ ID NO: 1525909 - RNA, 19 nt, Homo sapiens
  misc_RNA (1)...(19): siRNA sense strand
aagcagagauugacauccu

SEQ ID NO: 1525910 - RNA, 19 nt, Homo sapiens
  misc_RNA (1)...(19): siRNA sense strand
gccaccaggucuccuaugg

SEQ ID NO: 1525911 - RNA, 19 nt, Homo sapiens
  misc_RNA (1)...(19): siRNA sense strand
gagggucugaguucacuga

SEQ ID NO: 1525912 - RNA, 19 nt, Homo sapiens
  misc_RNA (1)...(19): siRNA sense strand
aaaggagggucugaguuca

SEQ ID NO: 1525913 - RNA, 19 nt, Homo sapiens
  misc_RNA (1)...(19): siRNA sense strand
guggauaaacacauucgaa

SEQ ID NO: 1525914 - RNA, 19 nt, Homo sapiens
  misc_RNA (1)...(19): siRNA sense strand
auaagaaagcagagauuga

SEQ ID NO: 1525915 - RNA, 19 nt, Homo sapiens
  misc_RNA (1)...(19): siRNA sense strand
cagaggaagacacaccaaa

SEQ ID NO: 1525916 - RNA, 19 nt, Homo sapiens
  misc_RNA (1)...(19): siRNA sense strand
acagcaagugcaaggaaua

SEQ ID NO: 1525917 - RNA, 19 nt, Homo sapiens
  misc_RNA (1)...(19): siRNA sense strand
aaaagaggaagaagaagua

SEQ ID NO: 1525918 - RNA, 19 nt, Homo sapiens
  misc_RNA (1)...(19): siRNA sense strand
guacuuggagcacuaucug

SEQ ID NO: 1525919 - RNA, 19 nt, Homo sapiens
  misc_RNA (1)...(19): siRNA sense strand
uaagaaagcagagauugac

SEQ ID NO: 1525920 - RNA, 19 nt, Homo sapiens
  misc_RNA (1)...(19): siRNA sense strand
gagaugauuggcugugaca

SEQ ID NO: 1525921 - RNA, 19 nt, Homo sapiens
  misc_RNA (1)...(19): siRNA sense strand
caggaggacaucagaggaa

SEQ ID NO: 1525922 - RNA, 19 nt, Homo sapiens
  misc_RNA (1)...(19): siRNA sense strand
cuacagcaagugcaaggaa

SEQ ID NO: 1525923 - RNA, 19 nt, Homo sapiens
  misc_RNA (1)...(19): siRNA sense strand
gcaagugcaaggaauacag

SEQ ID NO: 1525924 - RNA, 19 nt, Homo sapiens
  misc_RNA (1)...(19): siRNA sense strand
ccagaggacggaagauaag

SEQ ID NO: 1525925 - RNA, 19 nt, Homo sapiens
  misc_RNA (1)...(19): siRNA sense strand
ggagcacuaucuggacagu

SEQ ID NO: 1525926 - RNA, 19 nt, Homo sapiens
  misc_RNA (1)...(19): siRNA sense strand
caagauggagggcagugau

SEQ ID NO: 1525927 - RNA, 19 nt, Homo sapiens
  misc_RNA (1)...(19): siRNA sense strand
gacaucagaggaagacaca

SEQ ID NO: 1525928 - RNA, 19 nt, Homo sapiens
  misc_RNA (1)...(19): siRNA sense strand
gcccguggacccaaacgaa

SEQ ID NO: 1525929 - RNA, 19 nt, Homo sapiens
  misc_RNA (1)...(19): siRNA sense strand
aggaagacacaccaaagaa

SEQ ID NO: 1525930 - RNA, 19 nt, Homo sapiens
  misc_RNA (1)...(19): siRNA sense strand
acaaaggagggucugaguu

SEQ ID NO: 1525931 - RNA, 19 nt, Homo sapiens
  misc_RNA (1)...(19): siRNA sense strand
guacaucuccacggugaag

SEQ ID NO: 1525932 - RNA, 19 nt, Homo sapiens
  misc_RNA (1)...(19): siRNA sense strand
ggaggacaucagaggaaga

SEQ ID NO: 1525933 - RNA, 19 nt, Homo sapiens
  misc_RNA (1)...(19): siRNA sense strand
acgagaugguggauaaaca

SEQ ID NO: 1525934 - RNA, 19 nt, Homo sapiens
  misc_RNA (1)...(19): siRNA sense strand
uggagcgccugcagaagau

SEQ ID NO: 1525935 - RNA, 19 nt, Homo sapiens
  misc_RNA (1)...(19): siRNA sense strand
caagugcaaggaauacagu

SEQ ID NO: 1525936 - RNA, 19 nt, Homo sapiens
  misc_RNA (1)...(19): siRNA sense strand
uacagcaagugcaaggaau

SEQ ID NO: 1525937 - RNA, 19 nt, Homo sapiens
  misc_RNA (1)...(19): siRNA sense strand
auacagugacgacaaagug

SEQ ID NO: 1525938 - RNA, 19 nt, Homo sapiens
  misc_RNA (1)...(19): siRNA sense strand
agauaagaaagcagagauu

SEQ ID NO: 1525939 - RNA, 19 nt, Homo sapiens
  misc_RNA (1)...(19): siRNA sense strand
gaggcaggaggacaucaga

SEQ ID NO: 1525940 - RNA, 19 nt, Homo sapiens
  misc_RNA (1)...(19): siRNA sense strand
gcagaucugaaggacaaga

SEQ ID NO: 1525941 - RNA, 19 nt, Homo sapiens
  misc_RNA (1)...(19): siRNA sense strand
caagaagacccuagaauua

SEQ ID NO: 1525942 - RNA, 19 nt, Homo sapiens
  misc_RNA (1)...(19): siRNA sense strand
gcaagaagacccuagaauu

SEQ ID NO: 1525943 - RNA, 19 nt, Homo sapiens
  misc_RNA (1)...(19): siRNA sense strand
gaaaagaguuuacugaaug

SEQ ID NO: 1525944 - RNA, 19 nt, Homo sapiens
  misc_RNA (1)...(19): siRNA sense strand
guagugaccucaaauaaag

SEQ ID NO: 1525945 - RNA, 19 nt, Homo sapiens
  misc_RNA (1)...(19): siRNA sense strand
gaggugaacuggauauugu

SEQ ID NO: 1525946 - RNA, 19 nt, Homo sapiens
  misc_RNA (1)...(19): siRNA sense strand
ggaaccacaucagccauua

SEQ ID NO: 1525947 - RNA, 19 nt, Homo sapiens
  misc_RNA (1)...(19): siRNA sense strand
guagaaagcaugauuacaa

SEQ ID NO: 1525948 - RNA, 19 nt, Homo sapiens
  misc_RNA (1)...(19): siRNA sense strand
ugaagucugugcuugauaa

SEQ ID NO: 1525949 - RNA, 19 nt, Homo sapiens
  misc_RNA (1)...(19): siRNA sense strand
gcauucaucuagaaacauu

SEQ ID NO: 1525950 - RNA, 19 nt, Homo sapiens
  misc_RNA (1)...(19): siRNA sense strand
uaucaaaucuggaggugaa

SEQ ID NO: 1525951 - RNA, 19 nt, Homo sapiens
  misc_RNA (1)...(19): siRNA sense strand
gaccucaaauaaagaagua

SEQ ID NO: 1525952 - RNA, 19 nt, Homo sapiens
  misc_RNA (1)...(19): siRNA sense strand
gaagagaguggaauagaga

SEQ ID NO: 1525953 - RNA, 19 nt, Homo sapiens
  misc_RNA (1)...(19): siRNA sense strand
auagauagcuugcgucgaa

SEQ ID NO: 1525954 - RNA, 19 nt, Homo sapiens
  misc_RNA (1)...(19): siRNA sense strand
aaacuucauugcagaauug

SEQ ID NO: 1525955 - RNA, 19 nt, Homo sapiens
  misc_RNA (1)...(19): siRNA sense strand
gaacuggggugauccauga

SEQ ID NO: 1525956 - RNA, 19 nt, Homo sapiens
  misc_RNA (1)...(19): siRNA sense strand
ccacaucagccauuacuuu

SEQ ID NO: 1525957 - RNA, 19 nt, Homo sapiens
  misc_RNA (1)...(19): siRNA sense strand
ggaagagaguggaauagag

SEQ ID NO: 1525958 - RNA, 19 nt, Homo sapiens
  misc_RNA (1)...(19): siRNA sense strand
gcucaggaacggauagaua

SEQ ID NO: 1525959 - RNA, 19 nt, Homo sapiens
  misc_RNA (1)...(19): siRNA sense strand
uggcuuagcugugguugua

SEQ ID NO: 1525960 - RNA, 19 nt, Homo sapiens
  misc_RNA (1)...(19): siRNA sense strand
cagaauugcugccugacaa

SEQ ID NO: 1525961 - RNA, 19 nt, Homo sapiens
  misc_RNA (1)...(19): siRNA sense strand
gauggaagagaguggaaua

SEQ ID NO: 1525962 - RNA, 19 nt, Homo sapiens
  misc_RNA (1)...(19): siRNA sense strand
gacaaaacauucaguagaa

SEQ ID NO: 1525963 - RNA, 19 nt, Homo sapiens
  misc_RNA (1)...(19): siRNA sense strand
ggaauccuauggugaaguc

SEQ ID NO: 1525964 - RNA, 19 nt, Homo sapiens
  misc_RNA (1)...(19): siRNA sense strand
ggaaaagaguuuacugaau

SEQ ID NO: 1525965 - RNA, 19 nt, Homo sapiens
  misc_RNA (1)...(19): siRNA sense strand
cuagaaacauuuacacaag

SEQ ID NO: 1525966 - RNA, 19 nt, Homo sapiens
  misc_RNA (1)...(19): siRNA sense strand
gggcuaugcagcuggauua

SEQ ID NO: 1525967 - RNA, 19 nt, Homo sapiens
  misc_RNA (1)...(19): siRNA sense strand
gguuugacauugguuguuu

SEQ ID NO: 1525968 - RNA, 19 nt, Homo sapiens
  misc_RNA (1)...(19): siRNA sense strand
gaagacccuagaauuacua

SEQ ID NO: 1525969 - RNA, 19 nt, Homo sapiens
  misc_RNA (1)...(19): siRNA sense strand
uggcauggcucccuauauc

SEQ ID NO: 1525970 - RNA, 19 nt, Homo sapiens
  misc_RNA (1)...(19): siRNA sense strand
accaguaccuuuggaauuu

SEQ ID NO: 1525971 - RNA, 19 nt, Homo sapiens
  misc_RNA (1)...(19): siRNA sense strand
ucaguagaaagcaugauua

SEQ ID NO: 1525972 - RNA, 19 nt, Homo sapiens
  misc_RNA (1)...(19): siRNA sense strand
caacuuaugacauuacaag

SEQ ID NO: 1525973 - RNA, 19 nt, Homo sapiens
  misc_RNA (1)...(19): siRNA sense strand
gguggaaucugggguuuua

SEQ ID NO: 1525974 - RNA, 19 nt, Homo sapiens
  misc_RNA (1)...(19): siRNA sense strand
guaauccuccuguaucuca

SEQ ID NO: 1525975 - RNA, 19 nt, Homo sapiens
  misc_RNA (1)...(19): siRNA sense strand
ccaggaggucuuuggcuua

SEQ ID NO: 1525976 - RNA, 19 nt, Homo sapiens
  misc_RNA (1)...(19): siRNA sense strand
ugaacuggauauuguagug

SEQ ID NO: 1525977 - RNA, 19 nt, Homo sapiens
  misc_RNA (1)...(19): siRNA sense strand
ggaggugaacuggauauug

SEQ ID NO: 1525978 - RNA, 19 nt, Homo sapiens
  misc_RNA (1)...(19): siRNA sense strand
gaacuggauauuguaguga

SEQ ID NO: 1525979 - RNA, 19 nt, Homo sapiens
  misc_RNA (1)...(19): siRNA sense strand
acagcaggcucaaagucua

SEQ ID NO: 1525980 - RNA, 19 nt, Homo sapiens
  misc_RNA (1)...(19): siRNA sense strand
ugguucaacuuaugacauu

SEQ ID NO: 1525981 - RNA, 19 nt, Homo sapiens
  misc_RNA (1)...(19): siRNA sense strand
ccauggcauucaucuagaa

SEQ ID NO: 1525982 - RNA, 19 nt, Homo sapiens
  misc_RNA (1)...(19): siRNA sense strand
uagaaagcaugauuacaac

SEQ ID NO: 1525983 - RNA, 19 nt, Homo sapiens
  misc_RNA (1)...(19): siRNA sense strand
ggugaagucugugcuugau

SEQ ID NO: 1525984 - RNA, 19 nt, Homo sapiens
  misc_RNA (1)...(19): siRNA sense strand
gagcaagaagacccuagaa

SEQ ID NO: 1525985 - RNA, 19 nt, Homo sapiens
  misc_RNA (1)...(19): siRNA sense strand
gcauggcucccuauaucaa

SEQ ID NO: 1525986 - RNA, 19 nt, Homo sapiens
  misc_RNA (1)...(19): siRNA sense strand
gauuggcacauggcauuua

SEQ ID NO: 1525987 - RNA, 19 nt, Homo sapiens
  misc_RNA (1)...(19): siRNA sense strand
cuacugcuaugucuucuac

SEQ ID NO: 1525988 - RNA, 19 nt, Homo sapiens
  misc_RNA (1)...(19): siRNA sense strand
uguagugaccucaaauaaa

SEQ ID NO: 1525989 - RNA, 19 nt, Homo sapiens
  misc_RNA (1)...(19): siRNA sense strand
ggaaucugggguuuuauua

SEQ ID NO: 1525990 - RNA, 19 nt, Homo sapiens
  misc_RNA (1)...(19): siRNA sense strand
gguugaagauccuguccau

SEQ ID NO: 1525991 - RNA, 19 nt, Homo sapiens
  misc_RNA (1)...(19): siRNA sense strand
guaucucacuucccaccuu

SEQ ID NO: 1525992 - RNA, 19 nt, Homo sapiens
  misc_RNA (1)...(19): siRNA sense strand
cuaugcagcuggauuaaaa

SEQ ID NO: 1525993 - RNA, 19 nt, Homo sapiens
  misc_RNA (1)...(19): siRNA sense strand
uuacucagcaagccaguuu

SEQ ID NO: 1525994 - RNA, 19 nt, Homo sapiens
  misc_RNA (1)...(19): siRNA sense strand
gguucaacuuaugacauua

SEQ ID NO: 1525995 - RNA, 19 nt, Homo sapiens
  misc_RNA (1)...(19): siRNA sense strand
ccacaccaguaccuuugga

SEQ ID NO: 1525996 - RNA, 19 nt, Homo sapiens
  misc_RNA (1)...(19): siRNA sense strand
guuguuuggugguugaaga

SEQ ID NO: 1525997 - RNA, 19 nt, Homo sapiens
  misc_RNA (1)...(19): siRNA sense strand
ggagcaagaagacccuaga

SEQ ID NO: 1525998 - RNA, 19 nt, Homo sapiens
  misc_RNA (1)...(19): siRNA sense strand
gcaagccaguuugacaucu

SEQ ID NO: 1525999 - RNA, 19 nt, Homo sapiens
  misc_RNA (1)...(19): siRNA sense strand
ccaguaccuuuggaauuug

SEQ ID NO: 1526000 - RNA, 19 nt, Homo sapiens
  misc_RNA (1)...(19): siRNA sense strand
caccaguaccuuuggaauu

SEQ ID NO: 1526001 - RNA, 19 nt, Homo sapiens
  misc_RNA (1)...(19): siRNA sense strand
ggaggucuuuggcuuagcu

SEQ ID NO: 1526002 - RNA, 19 nt, Homo sapiens
  misc_RNA (1)...(19): siRNA sense strand
caccacuuguuacuucuau

SEQ ID NO: 1526003 - RNA, 19 nt, Homo sapiens
  misc_RNA (1)...(19): siRNA sense strand
guacagcaggcucaaaguc

SEQ ID NO: 1526004 - RNA, 19 nt, Homo sapiens
  misc_RNA (1)...(19): siRNA sense strand
uacacaagccacaccagua

SEQ ID NO: 1526005 - RNA, 19 nt, Homo sapiens
  misc_RNA (1)...(19): siRNA sense strand
uggcauucaucuagaaaca

SEQ ID NO: 1526006 - RNA, 19 nt, Homo sapiens
  misc_RNA (1)...(19): siRNA sense strand
ucccaccacuuguuacuuc

SEQ ID NO: 1526007 - RNA, 19 nt, Homo sapiens
  misc_RNA (1)...(19): siRNA sense strand
cagcaggcucaaagucuaa

SEQ ID NO: 1526008 - RNA, 19 nt, Homo sapiens
  misc_RNA (1)...(19): siRNA sense strand
caggaggucuuuggcuuag

SEQ ID NO: 1526009 - RNA, 19 nt, Homo sapiens
  misc_RNA (1)...(19): siRNA sense strand
agaagacccuagaauuacu

SEQ ID NO: 1526010 - RNA, 19 nt, Homo sapiens
  misc_RNA (1)...(19): siRNA sense strand
gcuaugcagcuggauuaaa

SEQ ID NO: 1526011 - RNA, 19 nt, Homo sapiens
  misc_RNA (1)...(19): siRNA sense strand
guccauggcauucaucuag

SEQ ID NO: 1526012 - RNA, 19 nt, Homo sapiens
  misc_RNA (1)...(19): siRNA sense strand
uacuagaggucaggaugaa

SEQ ID NO: 1526013 - RNA, 19 nt, Homo sapiens
  misc_RNA (1)...(19): siRNA sense strand
cuucagcaccauuaccuuu

SEQ ID NO: 1526014 - RNA, 19 nt, Homo sapiens
  misc_RNA (1)...(19): siRNA sense strand
gaauugcugccugacaaau

SEQ ID NO: 1526015 - RNA, 19 nt, Homo sapiens
  misc_RNA (1)...(19): siRNA sense strand
gauauuguagugaccucaa

SEQ ID NO: 1526016 - RNA, 19 nt, Homo sapiens
  misc_RNA (1)...(19): siRNA sense strand
ucuaugccaccuccuguuu

SEQ ID NO: 1526017 - RNA, 19 nt, Homo sapiens
  misc_RNA (1)...(19): siRNA sense strand
gaggccuucagcaccauua

SEQ ID NO: 1526018 - RNA, 19 nt, Homo sapiens
  misc_RNA (1)...(19): siRNA sense strand
gaaucugggguuuuauuaa

SEQ ID NO: 1526019 - RNA, 19 nt, Homo sapiens
  misc_RNA (1)...(19): siRNA sense strand
gagaguggaauagagacaa

SEQ ID NO: 1526020 - RNA, 19 nt, Homo sapiens
  misc_RNA (1)...(19): siRNA sense strand
gcacagggaacuggaacca

SEQ ID NO: 1526021 - RNA, 19 nt, Homo sapiens
  misc_RNA (1)...(19): siRNA sense strand
caagccaguuugacaucuc

SEQ ID NO: 1526022 - RNA, 19 nt, Homo sapiens
  misc_RNA (1)...(19): siRNA sense strand
gcugcugccuucgguaauc

SEQ ID NO: 1526023 - RNA, 19 nt, Homo sapiens
  misc_RNA (1)...(19): siRNA sense strand
ccaccacucgcauacucua

SEQ ID NO: 1526024 - RNA, 19 nt, Homo sapiens
  misc_RNA (1)...(19): siRNA sense strand
cagugcagccagagcgaua

SEQ ID NO: 1526025 - RNA, 19 nt, Homo sapiens
  misc_RNA (1)...(19): siRNA sense strand
aagaagacccuagaauuac

SEQ ID NO: 1526026 - RNA, 19 nt, Homo sapiens
  misc_RNA (1)...(19): siRNA sense strand
ucagcaagccaguuugaca

SEQ ID NO: 1526027 - RNA, 19 nt, Homo sapiens
  misc_RNA (1)...(19): siRNA sense strand
ugccaacuccuauuacuca

SEQ ID NO: 1526028 - RNA, 19 nt, Homo sapiens
  misc_RNA (1)...(19): siRNA sense strand
uaacuccccaggacuauaa

SEQ ID NO: 1526029 - RNA, 19 nt, Homo sapiens
  misc_RNA (1)...(19): siRNA sense strand
cacaucagccauuacuuuc

SEQ ID NO: 1526030 - RNA, 19 nt, Homo sapiens
  misc_RNA (1)...(19): siRNA sense strand
uuacuagaggucaggauga

SEQ ID NO: 1526031 - RNA, 19 nt, Homo sapiens
  misc_RNA (1)...(19): siRNA sense strand
gugaagucugugcuugaua

SEQ ID NO: 1526032 - RNA, 19 nt, Homo sapiens
  misc_RNA (1)...(19): siRNA sense strand
cgguaauccuccuguaucu

SEQ ID NO: 1526033 - RNA, 19 nt, Homo sapiens
  misc_RNA (1)...(19): siRNA sense strand
acacaagccacaccaguac

SEQ ID NO: 1526034 - RNA, 19 nt, Homo sapiens
  misc_RNA (1)...(19): siRNA sense strand
guuugacauugguuguuug

SEQ ID NO: 1526035 - RNA, 19 nt, Homo sapiens
  misc_RNA (1)...(19): siRNA sense strand
acagcugugucaguagaaa

SEQ ID NO: 1526036 - RNA, 19 nt, Homo sapiens
  misc_RNA (1)...(19): siRNA sense strand
caaauguauccuccaugga

SEQ ID NO: 1526037 - RNA, 19 nt, Homo sapiens
  misc_RNA (1)...(19): siRNA sense strand
gaaccacaucagccauuac

SEQ ID NO: 1526038 - RNA, 19 nt, Homo sapiens
  misc_RNA (1)...(19): siRNA sense strand
gaugucccgucggcagaug

SEQ ID NO: 1526039 - RNA, 19 nt, Homo sapiens
  misc_RNA (1)...(19): siRNA sense strand
uggaagagaguggaauaga

SEQ ID NO: 1526040 - RNA, 19 nt, Homo sapiens
  misc_RNA (1)...(19): siRNA sense strand
gcuggcugcuacugcuaug

SEQ ID NO: 1526041 - RNA, 19 nt, Homo sapiens
  misc_RNA (1)...(19): siRNA sense strand
ucucagagcucuccuaucu

SEQ ID NO: 1526042 - RNA, 19 nt, Homo sapiens
  misc_RNA (1)...(19): siRNA sense strand
ccagaacgcuauagcuaug

SEQ ID NO: 1526043 - RNA, 19 nt, Homo sapiens
  misc_RNA (1)...(19): siRNA sense strand
gaccugggcuccgugguuu

SEQ ID NO: 1526044 - RNA, 19 nt, Homo sapiens
  misc_RNA (1)...(19): siRNA sense strand
ggaugaggcugacuaugag

SEQ ID NO: 1526045 - RNA, 19 nt, Homo sapiens
  misc_RNA (1)...(19): siRNA sense strand
caaagugaccugugacauc

SEQ ID NO: 1526046 - RNA, 19 nt, Homo sapiens
  misc_RNA (1)...(19): siRNA sense strand
uggaugaggcugacuauga

SEQ ID NO: 1526047 - RNA, 19 nt, Homo sapiens
  misc_RNA (1)...(19): siRNA sense strand
gcaccuccagcucuucaaa

SEQ ID NO: 1526048 - RNA, 19 nt, Homo sapiens
  misc_RNA (1)...(19): siRNA sense strand
augagugccuggacuacua

SEQ ID NO: 1526049 - RNA, 19 nt, Homo sapiens
  misc_RNA (1)...(19): siRNA sense strand
aaggcaaagugaccuguga

SEQ ID NO: 1526050 - RNA, 19 nt, Homo sapiens
  misc_RNA (1)...(19): siRNA sense strand
cgucggcagucaagcaguu

SEQ ID NO: 1526051 - RNA, 19 nt, Homo sapiens
  misc_RNA (1)...(19): siRNA sense strand
gcaaagugaccugugacau

SEQ ID NO: 1526052 - RNA, 19 nt, Homo sapiens
  misc_RNA (1)...(19): siRNA sense strand
uggccuuucugcuggauga

SEQ ID NO: 1526053 - RNA, 19 nt, Homo sapiens
  misc_RNA (1)...(19): siRNA sense strand
uauggcaccuccagcucuu

SEQ ID NO: 1526054 - RNA, 19 nt, Homo sapiens
  misc_RNA (1)...(19): siRNA sense strand
cuccagaacgcuauagcua

SEQ ID NO: 1526055 - RNA, 19 nt, Homo sapiens
  misc_RNA (1)...(19): siRNA sense strand
guucucagagcucuccuau

SEQ ID NO: 1526056 - RNA, 19 nt, Homo sapiens
  misc_RNA (1)...(19): siRNA sense strand
ucuaacagcuucaugauau

SEQ ID NO: 1526057 - RNA, 19 nt, Homo sapiens
  misc_RNA (1)...(19): siRNA sense strand
gaaaugguggcuaugaguu

SEQ ID NO: 1526058 - RNA, 19 nt, Homo sapiens
  misc_RNA (1)...(19): siRNA sense strand
gggcccaccugcauucaaa

SEQ ID NO: 1526059 - RNA, 19 nt, Homo sapiens
  misc_RNA (1)...(19): siRNA sense strand
ucagagcucuuuggcaauu

SEQ ID NO: 1526060 - RNA, 19 nt, Homo sapiens
  misc_RNA (1)...(19): siRNA sense strand
ucacaauucucuccuacug

SEQ ID NO: 1526061 - RNA, 19 nt, Homo sapiens
  misc_RNA (1)...(19): siRNA sense strand
caagaaaugguggcuauga

SEQ ID NO: 1526062 - RNA, 19 nt, Homo sapiens
  misc_RNA (1)...(19): siRNA sense strand
caauucaacugacccuugu

SEQ ID NO: 1526063 - RNA, 19 nt, Homo sapiens
  misc_RNA (1)...(19): siRNA sense strand
gcagcuguuugcaagacua

SEQ ID NO: 1526064 - RNA, 19 nt, Homo sapiens
  misc_RNA (1)...(19): siRNA sense strand
caagacgagugucccuuca

SEQ ID NO: 1526065 - RNA, 19 nt, Homo sapiens
  misc_RNA (1)...(19): siRNA sense strand
gggcauaguagauauucaa

SEQ ID NO: 1526066 - RNA, 19 nt, Homo sapiens
  misc_RNA (1)...(19): siRNA sense strand
ggacaguacaugcaauuuu

SEQ ID NO: 1526067 - RNA, 19 nt, Homo sapiens
  misc_RNA (1)...(19): siRNA sense strand
gcuaugaguuuuaucacaa

SEQ ID NO: 1526068 - RNA, 19 nt, Homo sapiens
  misc_RNA (1)...(19): siRNA sense strand
gacaguacaugcaauuuuc

SEQ ID NO: 1526069 - RNA, 19 nt, Homo sapiens
  misc_RNA (1)...(19): siRNA sense strand
gagcagcuguuugcaagac

SEQ ID NO: 1526070 - RNA, 19 nt, Homo sapiens
  misc_RNA (1)...(19): siRNA sense strand
gcauaguagauauucaaga

SEQ ID NO: 1526071 - RNA, 19 nt, Homo sapiens
  misc_RNA (1)...(19): siRNA sense strand
uucaagaaaugguggcuau

SEQ ID NO: 1526072 - RNA, 19 nt, Homo sapiens
  misc_RNA (1)...(19): siRNA sense strand
aaaugguggcuaugaguuu

SEQ ID NO: 1526073 - RNA, 19 nt, Homo sapiens
  misc_RNA (1)...(19): siRNA sense strand
guccuucaguccagacaau

SEQ ID NO: 1526074 - RNA, 19 nt, Homo sapiens
  misc_RNA (1)...(19): siRNA sense strand
uguguuuccuucgcaaauu

SEQ ID NO: 1526075 - RNA, 19 nt, Homo sapiens
  misc_RNA (1)...(19): siRNA sense strand
ggugagcagcuguuugcaa

SEQ ID NO: 1526076 - RNA, 19 nt, Homo sapiens
  misc_RNA (1)...(19): siRNA sense strand
guguuuccuucgcaaauuc

SEQ ID NO: 1526077 - RNA, 19 nt, Homo sapiens
  misc_RNA (1)...(19): siRNA sense strand
cuaacagcuucaugauauc

SEQ ID NO: 1526078 - RNA, 19 nt, Homo sapiens
  misc_RNA (1)...(19): siRNA sense strand
caucuaacagcuucaugau

SEQ ID NO: 1526079 - RNA, 19 nt, Homo sapiens
  misc_RNA (1)...(19): siRNA sense strand
ucaacugacccuuguccuu

SEQ ID NO: 1526080 - RNA, 19 nt, Homo sapiens
  misc_RNA (1)...(19): siRNA sense strand
aagaaaugguggcuaugag

SEQ ID NO: 1526081 - RNA, 19 nt, Homo sapiens
  misc_RNA (1)...(19): siRNA sense strand
guagauauucaagaaaugg

SEQ ID NO: 1526082 - RNA, 19 nt, Homo sapiens
  misc_RNA (1)...(19): siRNA sense strand
uuaucacaauucucuccua

SEQ ID NO: 1526083 - RNA, 19 nt, Homo sapiens
  misc_RNA (1)...(19): siRNA sense strand
ucaacuuuauggacaguac

SEQ ID NO: 1526084 - RNA, 19 nt, Homo sapiens
  misc_RNA (1)...(19): siRNA sense strand
gccagucucagagcucuuu

SEQ ID NO: 1526085 - RNA, 19 nt, Homo sapiens
  misc_RNA (1)...(19): siRNA sense strand
acaucuaacagcuucauga

SEQ ID NO: 1526086 - RNA, 19 nt, Homo sapiens
  misc_RNA (1)...(19): siRNA sense strand
cauucaaacucggacuguu

SEQ ID NO: 1526087 - RNA, 19 nt, Homo sapiens
  misc_RNA (1)...(19): siRNA sense strand
gcacugcccucuacaaugg

SEQ ID NO: 1526088 - RNA, 19 nt, Homo sapiens
  misc_RNA (1)...(19): siRNA sense strand
ggaccagccucauguaugu

SEQ ID NO: 1526089 - RNA, 19 nt, Homo sapiens
  misc_RNA (1)...(19): siRNA sense strand
ucaacacgcucucggcaaa

SEQ ID NO: 1526090 - RNA, 19 nt, Homo sapiens
  misc_RNA (1)...(19): siRNA sense strand
cauauucacuggccuguuc

SEQ ID NO: 1526091 - RNA, 19 nt, Homo sapiens
  misc_RNA (1)...(19): siRNA sense strand
ggagaaguucgucuacaaa

SEQ ID NO: 1526092 - RNA, 19 nt, Homo sapiens
  misc_RNA (1)...(19): siRNA sense strand
gcauugccuucuucaacuu

SEQ ID NO: 1526093 - RNA, 19 nt, Homo sapiens
  misc_RNA (1)...(19): siRNA sense strand
gauccuuggcuuccucaua

SEQ ID NO: 1526094 - RNA, 19 nt, Homo sapiens
  misc_RNA (1)...(19): siRNA sense strand
gcauguuccugggagaauu

SEQ ID NO: 1526095 - RNA, 19 nt, Homo sapiens
  misc_RNA (1)...(19): siRNA sense strand
gaggagaaguucgucuaca

SEQ ID NO: 1526096 - RNA, 19 nt, Homo sapiens
  misc_RNA (1)...(19): siRNA sense strand
cagcagcauugccuucuuc

SEQ ID NO: 1526097 - RNA, 19 nt, Homo sapiens
  misc_RNA (1)...(19): siRNA sense strand
gcacgacagucagcacaag

SEQ ID NO: 1526098 - RNA, 19 nt, Homo sapiens
  misc_RNA (1)...(19): siRNA sense strand
uggcugaccuccugagcaa

SEQ ID NO: 1526099 - RNA, 19 nt, Homo sapiens
  misc_RNA (1)...(19): siRNA sense strand
ucauguauguggcucugaa

SEQ ID NO: 1526100 - RNA, 19 nt, Homo sapiens
  misc_RNA (1)...(19): siRNA sense strand
gcaucagcgucaccaagga

SEQ ID NO: 1526101 - RNA, 19 nt, Homo sapiens
  misc_RNA (1)...(19): siRNA sense strand
ggcaacaucagcagcauug

SEQ ID NO: 1526102 - RNA, 19 nt, Homo sapiens
  misc_RNA (1)...(19): siRNA sense strand
aggagaaguucgucuacaa

SEQ ID NO: 1526103 - RNA, 19 nt, Homo sapiens
  misc_RNA (1)...(19): siRNA sense strand
ccagcgcucugugacauga

SEQ ID NO: 1526104 - RNA, 19 nt, Homo sapiens
  misc_RNA (1)...(19): siRNA sense strand
gcacugcugggcaacauca

SEQ ID NO: 1526105 - RNA, 19 nt, Homo sapiens
  misc_RNA (1)...(19): siRNA sense strand
guugucaucugggcacuga

SEQ ID NO: 1526106 - RNA, 19 nt, Homo sapiens
  misc_RNA (1)...(19): siRNA sense strand
gcacaagcucagcgaagug

SEQ ID NO: 1526107 - RNA, 19 nt, Homo sapiens
  misc_RNA (1)...(19): siRNA sense strand
ggacacuggaggaugcauu

SEQ ID NO: 1526108 - RNA, 19 nt, Homo sapiens
  misc_RNA (1)...(19): siRNA sense strand
agaaguucgucuacaaaca

SEQ ID NO: 1526109 - RNA, 19 nt, Homo sapiens
  misc_RNA (1)...(19): siRNA sense strand
ggaccaaguaccagcuguu

SEQ ID NO: 1526110 - RNA, 19 nt, Homo sapiens
  misc_RNA (1)...(19): siRNA sense strand
gggaccagccucauguaug

SEQ ID NO: 1526111 - RNA, 19 nt, Homo sapiens
  misc_RNA (1)...(19): siRNA sense strand
ggagagcgagcaggagaga

SEQ ID NO: 1526112 - RNA, 19 nt, Homo sapiens
  misc_RNA (1)...(19): siRNA sense strand
ggagcaaggagcacagcuu

SEQ ID NO: 1526113 - RNA, 19 nt, Homo sapiens
  misc_RNA (1)...(19): siRNA sense strand
gcaaggagcacagcuucca

SEQ ID NO: 1526114 - RNA, 19 nt, Homo sapiens
  misc_RNA (1)...(19): siRNA sense strand
gcaugguguuggacagcuu

SEQ ID NO: 1526115 - RNA, 19 nt, Homo sapiens
  misc_RNA (1)...(19): siRNA sense strand
gaaguucgucuacaaacac

SEQ ID NO: 1526116 - RNA, 19 nt, Homo sapiens
  misc_RNA (1)...(19): siRNA sense strand
guuaccggcuccaucaaca

SEQ ID NO: 1526117 - RNA, 19 nt, Homo sapiens
  misc_RNA (1)...(19): siRNA sense strand
caucauggcccagaucauc

SEQ ID NO: 1526118 - RNA, 19 nt, Homo sapiens
  misc_RNA (1)...(19): siRNA sense strand
gagcugcagggcaaucaga

SEQ ID NO: 1526119 - RNA, 19 nt, Homo sapiens
  misc_RNA (1)...(19): siRNA sense strand
ugagcaagcacgacaguca

SEQ ID NO: 1526120 - RNA, 19 nt, Homo sapiens
  misc_RNA (1)...(19): siRNA sense strand
gagaaguucgucuacaaac

SEQ ID NO: 1526121 - RNA, 19 nt, Homo sapiens
  misc_RNA (1)...(19): siRNA sense strand
cacccgcacucccaucaau

SEQ ID NO: 1526122 - RNA, 19 nt, Homo sapiens
  misc_RNA (1)...(19): siRNA sense strand
gacacuggaggaugcauug

SEQ ID NO: 1526123 - RNA, 19 nt, Homo sapiens
  misc_RNA (1)...(19): siRNA sense strand
cagcauugccuucuucaac

SEQ ID NO: 1526124 - RNA, 19 nt, Homo sapiens
  misc_RNA (1)...(19): siRNA sense strand
gacagggaccagccucaug

SEQ ID NO: 1526125 - RNA, 19 nt, Homo sapiens
  misc_RNA (1)...(19): siRNA sense strand
agauggugcuagaggagaa

SEQ ID NO: 1526126 - RNA, 19 nt, Homo sapiens
  misc_RNA (1)...(19): siRNA sense strand
gaccaaguaccagcuguuc

SEQ ID NO: 1526127 - RNA, 19 nt, Homo sapiens
  misc_RNA (1)...(19): siRNA sense strand
caucagcgucaccaaggaa

SEQ ID NO: 1526128 - RNA, 19 nt, Homo sapiens
  misc_RNA (1)...(19): siRNA sense strand
ucagcagcauugccuucuu

SEQ ID NO: 1526129 - RNA, 19 nt, Homo sapiens
  misc_RNA (1)...(19): siRNA sense strand
gggccucuuuggcuuugug

SEQ ID NO: 1526130 - RNA, 19 nt, Homo sapiens
  misc_RNA (1)...(19): siRNA sense strand
ggggugcagugaucauauu

SEQ ID NO: 1526131 - RNA, 19 nt, Homo sapiens
  misc_RNA (1)...(19): siRNA sense strand
gggcaacaucagcagcauu

SEQ ID NO: 1526132 - RNA, 19 nt, Homo sapiens
  misc_RNA (1)...(19): siRNA sense strand
cgaaagagcuugucacgau

SEQ ID NO: 1526133 - RNA, 19 nt, Homo sapiens
  misc_RNA (1)...(19): siRNA sense strand
gaugauuccuaccaccuua

SEQ ID NO: 1526134 - RNA, 19 nt, Homo sapiens
  misc_RNA (1)...(19): siRNA sense strand
gaacacuggagguagauuu

SEQ ID NO: 1526135 - RNA, 19 nt, Homo sapiens
  misc_RNA (1)...(19): siRNA sense strand
gcacuguuacugggaauua

SEQ ID NO: 1526136 - RNA, 19 nt, Homo sapiens
  misc_RNA (1)...(19): siRNA sense strand
gaaaagagacaacgacuga

SEQ ID NO: 1526137 - RNA, 19 nt, Homo sapiens
  misc_RNA (1)...(19): siRNA sense strand
cauccaaagugaauuaugu

SEQ ID NO: 1526138 - RNA, 19 nt, Homo sapiens
  misc_RNA (1)...(19): siRNA sense strand
ggaauuagaagaccugagu

SEQ ID NO: 1526139 - RNA, 19 nt, Homo sapiens
  misc_RNA (1)...(19): siRNA sense strand
caggaacacuggagguaga

SEQ ID NO: 1526140 - RNA, 19 nt, Homo sapiens
  misc_RNA (1)...(19): siRNA sense strand
ccuaccaccuuacuacuga

SEQ ID NO: 1526141 - RNA, 19 nt, Homo sapiens
  misc_RNA (1)...(19): siRNA sense strand
ggaccuggaacccgaaaga

SEQ ID NO: 1526142 - RNA, 19 nt, Homo sapiens
  misc_RNA (1)...(19): siRNA sense strand
gacuccagauuuccagauu

SEQ ID NO: 1526143 - RNA, 19 nt, Homo sapiens
  misc_RNA (1)...(19): siRNA sense strand
ccaccuuacuacugacgaa

SEQ ID NO: 1526144 - RNA, 19 nt, Homo sapiens
  misc_RNA (1)...(19): siRNA sense strand
gacaacgacugagcaagca

SEQ ID NO: 1526145 - RNA, 19 nt, Homo sapiens
  misc_RNA (1)...(19): siRNA sense strand
uaccuucccugugcuauuc

SEQ ID NO: 1526146 - RNA, 19 nt, Homo sapiens
  misc_RNA (1)...(19): siRNA sense strand
gaauuagaagaccugaguu

SEQ ID NO: 1526147 - RNA, 19 nt, Homo sapiens
  misc_RNA (1)...(19): siRNA sense strand
guccagacccucagugcaa

SEQ ID NO: 1526148 - RNA, 19 nt, Homo sapiens
  misc_RNA (1)...(19): siRNA sense strand
gcacuaccaccagcacugu

SEQ ID NO: 1526149 - RNA, 19 nt, Homo sapiens
  misc_RNA (1)...(19): siRNA sense strand
ggcaggaacacuggaggua

SEQ ID NO: 1526150 - RNA, 19 nt, Homo sapiens
  misc_RNA (1)...(19): siRNA sense strand
aauuagaagaccugaguuu

SEQ ID NO: 1526151 - RNA, 19 nt, Homo sapiens
  misc_RNA (1)...(19): siRNA sense strand
acuccagauuuccagauuu

SEQ ID NO: 1526152 - RNA, 19 nt, Homo sapiens
  misc_RNA (1)...(19): siRNA sense strand
ccugauugcugaguguuca

SEQ ID NO: 1526153 - RNA, 19 nt, Homo sapiens
  misc_RNA (1)...(19): siRNA sense strand
gcuauuccaucagccuaca

SEQ ID NO: 1526154 - RNA, 19 nt, Homo sapiens
  misc_RNA (1)...(19): siRNA sense strand
ggacuccagauuuccagau

SEQ ID NO: 1526155 - RNA, 19 nt, Homo sapiens
  misc_RNA (1)...(19): siRNA sense strand
cuccauccaaagugaauua

SEQ ID NO: 1526156 - RNA, 19 nt, Homo sapiens
  misc_RNA (1)...(19): siRNA sense strand
acuaccaccagcacuguua

SEQ ID NO: 1526157 - RNA, 19 nt, Homo sapiens
  misc_RNA (1)...(19): siRNA sense strand
guccugugccuccugauug

SEQ ID NO: 1526158 - RNA, 19 nt, Homo sapiens
  misc_RNA (1)...(19): siRNA sense strand
gcagagaacuguuagauaa

SEQ ID NO: 1526159 - RNA, 19 nt, Homo sapiens
  misc_RNA (1)...(19): siRNA sense strand
gaauaggacucaguuuaua

SEQ ID NO: 1526160 - RNA, 19 nt, Homo sapiens
  misc_RNA (1)...(19): siRNA sense strand
gaagaacucucacgcuaug

SEQ ID NO: 1526161 - RNA, 19 nt, Homo sapiens
  misc_RNA (1)...(19): siRNA sense strand
gaacaaaggauaccugaau

SEQ ID NO: 1526162 - RNA, 19 nt, Homo sapiens
  misc_RNA (1)...(19): siRNA sense strand
gaugaagucuuacuacaga

SEQ ID NO: 1526163 - RNA, 19 nt, Homo sapiens
  misc_RNA (1)...(19): siRNA sense strand
aggaagcgaugaucaauua

SEQ ID NO: 1526164 - RNA, 19 nt, Homo sapiens
  misc_RNA (1)...(19): siRNA sense strand
ggacucaguuuauaugaug

SEQ ID NO: 1526165 - RNA, 19 nt, Homo sapiens
  misc_RNA (1)...(19): siRNA sense strand
gacaagauccuguuucauu

SEQ ID NO: 1526166 - RNA, 19 nt, Homo sapiens
  misc_RNA (1)...(19): siRNA sense strand
caacaccuguccaaacaaa

SEQ ID NO: 1526167 - RNA, 19 nt, Homo sapiens
  misc_RNA (1)...(19): siRNA sense strand
gcaugcagcuuccuagaug

SEQ ID NO: 1526168 - RNA, 19 nt, Homo sapiens
  misc_RNA (1)...(19): siRNA sense strand
ugucaaggaugaaaucuuu

SEQ ID NO: 1526169 - RNA, 19 nt, Homo sapiens
  misc_RNA (1)...(19): siRNA sense strand
acaauuagauggucuggaa

SEQ ID NO: 1526170 - RNA, 19 nt, Homo sapiens
  misc_RNA (1)...(19): siRNA sense strand
ugaaaucuuugacauggua

SEQ ID NO: 1526171 - RNA, 19 nt, Homo sapiens
  misc_RNA (1)...(19): siRNA sense strand
gaauuuccaucaugcaguu

SEQ ID NO: 1526172 - RNA, 19 nt, Homo sapiens
  misc_RNA (1)...(19): siRNA sense strand
caugaccaaugucuucuua

SEQ ID NO: 1526173 - RNA, 19 nt, Homo sapiens
  misc_RNA (1)...(19): siRNA sense strand
acaagauccuguuucauuu

SEQ ID NO: 1526174 - RNA, 19 nt, Homo sapiens
  misc_RNA (1)...(19): siRNA sense strand
gaaaaucucucuucaggau

SEQ ID NO: 1526175 - RNA, 19 nt, Homo sapiens
  misc_RNA (1)...(19): siRNA sense strand
guacagcaguuaggaaguu

SEQ ID NO: 1526176 - RNA, 19 nt, Homo sapiens
  misc_RNA (1)...(19): siRNA sense strand
gaacagcuaccaugaccaa

SEQ ID NO: 1526177 - RNA, 19 nt, Homo sapiens
  misc_RNA (1)...(19): siRNA sense strand
gaaauuaagagaggaauca

SEQ ID NO: 1526178 - RNA, 19 nt, Homo sapiens
  misc_RNA (1)...(19): siRNA sense strand
aaaggaaccugcagcucua

SEQ ID NO: 1526179 - RNA, 19 nt, Homo sapiens
  misc_RNA (1)...(19): siRNA sense strand
gagcaaagugcaagcaauu

SEQ ID NO: 1526180 - RNA, 19 nt, Homo sapiens
  misc_RNA (1)...(19): siRNA sense strand
gagaacuguuagauaauga

SEQ ID NO: 1526181 - RNA, 19 nt, Homo sapiens
  misc_RNA (1)...(19): siRNA sense strand
acaauggcaugcucaguaa

SEQ ID NO: 1526182 - RNA, 19 nt, Homo sapiens
  misc_RNA (1)...(19): siRNA sense strand
gaaaauccauggacaagau

SEQ ID NO: 1526183 - RNA, 19 nt, Homo sapiens
  misc_RNA (1)...(19): siRNA sense strand
aagaauaggacucaguuua

SEQ ID NO: 1526184 - RNA, 19 nt, Homo sapiens
  misc_RNA (1)...(19): siRNA sense strand
cuuccuagaugauuuauug

SEQ ID NO: 1526185 - RNA, 19 nt, Homo sapiens
  misc_RNA (1)...(19): siRNA sense strand
gcagcuuccuagaugauuu

SEQ ID NO: 1526186 - RNA, 19 nt, Homo sapiens
  misc_RNA (1)...(19): siRNA sense strand
caaggagagucaagaaaca

SEQ ID NO: 1526187 - RNA, 19 nt, Homo sapiens
  misc_RNA (1)...(19): siRNA sense strand
ggagaaauggacuauaaga

SEQ ID NO: 1526188 - RNA, 19 nt, Homo sapiens
  misc_RNA (1)...(19): siRNA sense strand
ggccaguacuugaaucuug

SEQ ID NO: 1526189 - RNA, 19 nt, Homo sapiens
  misc_RNA (1)...(19): siRNA sense strand
ugaccaaugucuucuuaga

SEQ ID NO: 1526190 - RNA, 19 nt, Homo sapiens
  misc_RNA (1)...(19): siRNA sense strand
ccaccauucuaaucgauuu

SEQ ID NO: 1526191 - RNA, 19 nt, Homo sapiens
  misc_RNA (1)...(19): siRNA sense strand
ggacuuacgagaacagaga

SEQ ID NO: 1526192 - RNA, 19 nt, Homo sapiens
  misc_RNA (1)...(19): siRNA sense strand
ggagcaaagugcaagcaau

SEQ ID NO: 1526193 - RNA, 19 nt, Homo sapiens
  misc_RNA (1)...(19): siRNA sense strand
ugaauggcuucuggacuua

SEQ ID NO: 1526194 - RNA, 19 nt, Homo sapiens
  misc_RNA (1)...(19): siRNA sense strand
auggagaaauggacuauaa

SEQ ID NO: 1526195 - RNA, 19 nt, Homo sapiens
  misc_RNA (1)...(19): siRNA sense strand
gaugauuuauuggagcuaa

SEQ ID NO: 1526196 - RNA, 19 nt, Homo sapiens
  misc_RNA (1)...(19): siRNA sense strand
gcagcucuacaauauauuu

SEQ ID NO: 1526197 - RNA, 19 nt, Homo sapiens
  misc_RNA (1)...(19): siRNA sense strand
cugcagcucuacaauauau

SEQ ID NO: 1526198 - RNA, 19 nt, Homo sapiens
  misc_RNA (1)...(19): siRNA sense strand
agagcugucuuucuacaaa

SEQ ID NO: 1526199 - RNA, 19 nt, Homo sapiens
  misc_RNA (1)...(19): siRNA sense strand
cagcuaccaugaccaaugu

SEQ ID NO: 1526200 - RNA, 19 nt, Homo sapiens
  misc_RNA (1)...(19): siRNA sense strand
cuaaacuccuucauacaga

SEQ ID NO: 1526201 - RNA, 19 nt, Homo sapiens
  misc_RNA (1)...(19): siRNA sense strand
gccaguacuugaaucuuga

SEQ ID NO: 1526202 - RNA, 19 nt, Homo sapiens
  misc_RNA (1)...(19): siRNA sense strand
acaguaaccaccauucuaa

SEQ ID NO: 1526203 - RNA, 19 nt, Homo sapiens
  misc_RNA (1)...(19): siRNA sense strand
cacaauggcaugcucagua

SEQ ID NO: 1526204 - RNA, 19 nt, Homo sapiens
  misc_RNA (1)...(19): siRNA sense strand
caccagacaccaccuauga

SEQ ID NO: 1526205 - RNA, 19 nt, Homo sapiens
  misc_RNA (1)...(19): siRNA sense strand
cugcagaccuugaugauac

SEQ ID NO: 1526206 - RNA, 19 nt, Homo sapiens
  misc_RNA (1)...(19): siRNA sense strand
aaggauaccugaaugucuu

SEQ ID NO: 1526207 - RNA, 19 nt, Homo sapiens
  misc_RNA (1)...(19): siRNA sense strand
gcuaagggaugaggaacug

SEQ ID NO: 1526208 - RNA, 19 nt, Homo sapiens
  misc_RNA (1)...(19): siRNA sense strand
ccagacaccaccuaugauu

SEQ ID NO: 1526209 - RNA, 19 nt, Homo sapiens
  misc_RNA (1)...(19): siRNA sense strand
gagagucaagaaacaaauu

SEQ ID NO: 1526210 - RNA, 19 nt, Homo sapiens
  misc_RNA (1)...(19): siRNA sense strand
gagaggaagcgaugaucaa

SEQ ID NO: 1526211 - RNA, 19 nt, Homo sapiens
  misc_RNA (1)...(19): siRNA sense strand
agagaacuguuagauaaug

SEQ ID NO: 1526212 - RNA, 19 nt, Homo sapiens
  misc_RNA (1)...(19): siRNA sense strand
agaccuugaugauacauga

SEQ ID NO: 1526213 - RNA, 19 nt, Homo sapiens
  misc_RNA (1)...(19): siRNA sense strand
uugaauggcuucuggacuu

SEQ ID NO: 1526214 - RNA, 19 nt, Homo sapiens
  misc_RNA (1)...(19): siRNA sense strand
agaauaggacucaguuuau

SEQ ID NO: 1526215 - RNA, 19 nt, Homo sapiens
  misc_RNA (1)...(19): siRNA sense strand
gcgaugaucaauuacgaaa

SEQ ID NO: 1526216 - RNA, 19 nt, Homo sapiens
  misc_RNA (1)...(19): siRNA sense strand
gaggaagcgaugaucaauu

SEQ ID NO: 1526217 - RNA, 19 nt, Homo sapiens
  misc_RNA (1)...(19): siRNA sense strand
uucaagaugucaaggauga

SEQ ID NO: 1526218 - RNA, 19 nt, Homo sapiens
  misc_RNA (1)...(19): siRNA sense strand
cccaacaccuguccaaaca

SEQ ID NO: 1526219 - RNA, 19 nt, Homo sapiens
  misc_RNA (1)...(19): siRNA sense strand
uggacaagauccuguuuca

SEQ ID NO: 1526220 - RNA, 19 nt, Homo sapiens
  misc_RNA (1)...(19): siRNA sense strand
aaucaacaguaaucaagga

SEQ ID NO: 1526221 - RNA, 19 nt, Homo sapiens
  misc_RNA (1)...(19): siRNA sense strand
ggaugaaaucuuugacaug

SEQ ID NO: 1526222 - RNA, 19 nt, Homo sapiens
  misc_RNA (1)...(19): siRNA sense strand
ggagaggaagcgaugauca

SEQ ID NO: 1526223 - RNA, 19 nt, Homo sapiens
  misc_RNA (1)...(19): siRNA sense strand
uaaccaccauucuaaucga

SEQ ID NO: 1526224 - RNA, 19 nt, Homo sapiens
  misc_RNA (1)...(19): siRNA sense strand
ggccauacaggaacuaaug

SEQ ID NO: 1526225 - RNA, 19 nt, Homo sapiens
  misc_RNA (1)...(19): siRNA sense strand
gaauggaaaggagguagaa

SEQ ID NO: 1526226 - RNA, 19 nt, Homo sapiens
  misc_RNA (1)...(19): siRNA sense strand
gcuaaacuccuucauacag

SEQ ID NO: 1526227 - RNA, 19 nt, Homo sapiens
  misc_RNA (1)...(19): siRNA sense strand
gaacucucacgcuauggaa

SEQ ID NO: 1526228 - RNA, 19 nt, Homo sapiens
  misc_RNA (1)...(19): siRNA sense strand
gcaguucuuuaauuauguc

SEQ ID NO: 1526229 - RNA, 19 nt, Homo sapiens
  misc_RNA (1)...(19): siRNA sense strand
cagcuuccuagaugauuua

SEQ ID NO: 1526230 - RNA, 19 nt, Homo sapiens
  misc_RNA (1)...(19): siRNA sense strand
gauccuguuucauuucaag

SEQ ID NO: 1526231 - RNA, 19 nt, Homo sapiens
  misc_RNA (1)...(19): siRNA sense strand
gaaccugcagcucuacaau

SEQ ID NO: 1526232 - RNA, 19 nt, Homo sapiens
  misc_RNA (1)...(19): siRNA sense strand
uauuggagcuaagggauga

SEQ ID NO: 1526233 - RNA, 19 nt, Homo sapiens
  misc_RNA (1)...(19): siRNA sense strand
ugaaaaggcuggagcaaag

SEQ ID NO: 1526234 - RNA, 19 nt, Homo sapiens
  misc_RNA (1)...(19): siRNA sense strand
uaaucaaggagacacagua

SEQ ID NO: 1526235 - RNA, 19 nt, Homo sapiens
  misc_RNA (1)...(19): siRNA sense strand
uaaacuccuucauacagau

SEQ ID NO: 1526236 - RNA, 19 nt, Homo sapiens
  misc_RNA (1)...(19): siRNA sense strand
uugcuaaacuccuucauac

SEQ ID NO: 1526237 - RNA, 19 nt, Homo sapiens
  misc_RNA (1)...(19): siRNA sense strand
gcaaagugcaagcaauuuu

SEQ ID NO: 1526238 - RNA, 19 nt, Homo sapiens
  misc_RNA (1)...(19): siRNA sense strand
caaacaagaauaggacuca

SEQ ID NO: 1526239 - RNA, 19 nt, Homo sapiens
  misc_RNA (1)...(19): siRNA sense strand
caagaugucaaggaugaaa

SEQ ID NO: 1526240 - RNA, 19 nt, Homo sapiens
  misc_RNA (1)...(19): siRNA sense strand
aacaaaggauaccugaaug

SEQ ID NO: 1526241 - RNA, 19 nt, Homo sapiens
  misc_RNA (1)...(19): siRNA sense strand
augaggaacuguccaagga

SEQ ID NO: 1526242 - RNA, 19 nt, Homo sapiens
  misc_RNA (1)...(19): siRNA sense strand
gaagucuuacuacagaaau

SEQ ID NO: 1526243 - RNA, 19 nt, Homo sapiens
  misc_RNA (1)...(19): siRNA sense strand
caagaauaggacucaguuu

SEQ ID NO: 1526244 - RNA, 19 nt, Homo sapiens
  misc_RNA (1)...(19): siRNA sense strand
ugaaaacucugcagaccuu

SEQ ID NO: 1526245 - RNA, 19 nt, Homo sapiens
  misc_RNA (1)...(19): siRNA sense strand
cacaguaaccaccauucua

SEQ ID NO: 1526246 - RNA, 19 nt, Homo sapiens
  misc_RNA (1)...(19): siRNA sense strand
caaacugcuugauauugag

SEQ ID NO: 1526247 - RNA, 19 nt, Homo sapiens
  misc_RNA (1)...(19): siRNA sense strand
cuucugcccuaagaguuua

SEQ ID NO: 1526248 - RNA, 19 nt, Homo sapiens
  misc_RNA (1)...(19): siRNA sense strand
ggagcuaagggaugaggaa

SEQ ID NO: 1526249 - RNA, 19 nt, Homo sapiens
  misc_RNA (1)...(19): siRNA sense strand
ggagagucaagaaacaaau

SEQ ID NO: 1526250 - RNA, 19 nt, Homo sapiens
  misc_RNA (1)...(19): siRNA sense strand
aaucaaggagacacaguaa

SEQ ID NO: 1526251 - RNA, 19 nt, Homo sapiens
  misc_RNA (1)...(19): siRNA sense strand
caagauccuguuucauuuc

SEQ ID NO: 1526252 - RNA, 19 nt, Homo sapiens
  misc_RNA (1)...(19): siRNA sense strand
cauacaggaacuaaugaaa

SEQ ID NO: 1526253 - RNA, 19 nt, Homo sapiens
  misc_RNA (1)...(19): siRNA sense strand
agaccuacuuggacuuugu

SEQ ID NO: 1526254 - RNA, 19 nt, Homo sapiens
  misc_RNA (1)...(19): siRNA sense strand
uaagaccuacuuggacuuu

SEQ ID NO: 1526255 - RNA, 19 nt, Homo sapiens
  misc_RNA (1)...(19): siRNA sense strand
acaagaauaggacucaguu

SEQ ID NO: 1526256 - RNA, 19 nt, Homo sapiens
  misc_RNA (1)...(19): siRNA sense strand
ggacuauaagaccuacuug

SEQ ID NO: 1526257 - RNA, 19 nt, Homo sapiens
  misc_RNA (1)...(19): siRNA sense strand
caguaaagaagaacucuca

SEQ ID NO: 1526258 - RNA, 19 nt, Homo sapiens
  misc_RNA (1)...(19): siRNA sense strand
gaaagcaucuucauacaga

SEQ ID NO: 1526259 - RNA, 19 nt, Homo sapiens
  misc_RNA (1)...(19): siRNA sense strand
ggaaggaauucucugauuu

SEQ ID NO: 1526260 - RNA, 19 nt, Homo sapiens
  misc_RNA (1)...(19): siRNA sense strand
ggaauucucugauuucaug

SEQ ID NO: 1526261 - RNA, 19 nt, Homo sapiens
  misc_RNA (1)...(19): siRNA sense strand
gcuguuaucuucucaaauu

SEQ ID NO: 1526262 - RNA, 19 nt, Homo sapiens
  misc_RNA (1)...(19): siRNA sense strand
gaaguauucugccaaugaa

SEQ ID NO: 1526263 - RNA, 19 nt, Homo sapiens
  misc_RNA (1)...(19): siRNA sense strand
guccuucucucuauauuua

SEQ ID NO: 1526264 - RNA, 19 nt, Homo sapiens
  misc_RNA (1)...(19): siRNA sense strand
gaagaacuagaaagacuua

SEQ ID NO: 1526265 - RNA, 19 nt, Homo sapiens
  misc_RNA (1)...(19): siRNA sense strand
gggcuucccuccugacuuu

SEQ ID NO: 1526266 - RNA, 19 nt, Homo sapiens
  misc_RNA (1)...(19): siRNA sense strand
gaaagaucaucaaaguaga

SEQ ID NO: 1526267 - RNA, 19 nt, Homo sapiens
  misc_RNA (1)...(19): siRNA sense strand
ggaaccagcucacugaaag

SEQ ID NO: 1526268 - RNA, 19 nt, Homo sapiens
  misc_RNA (1)...(19): siRNA sense strand
gagaagaacuagaaagacu

SEQ ID NO: 1526269 - RNA, 19 nt, Homo sapiens
  misc_RNA (1)...(19): siRNA sense strand
gaacagcaaacucuauuuc

SEQ ID NO: 1526270 - RNA, 19 nt, Homo sapiens
  misc_RNA (1)...(19): siRNA sense strand
aacaacagcucuucuauuc

SEQ ID NO: 1526271 - RNA, 19 nt, Homo sapiens
  misc_RNA (1)...(19): siRNA sense strand
gaucuaaguggcaaucuuu

SEQ ID NO: 1526272 - RNA, 19 nt, Homo sapiens
  misc_RNA (1)...(19): siRNA sense strand
caacagcucuucuauucag

SEQ ID NO: 1526273 - RNA, 19 nt, Homo sapiens
  misc_RNA (1)...(19): siRNA sense strand
gaagugagugucccagaaa

SEQ ID NO: 1526274 - RNA, 19 nt, Homo sapiens
  misc_RNA (1)...(19): siRNA sense strand
guaauaugcuccuugucaa

SEQ ID NO: 1526275 - RNA, 19 nt, Homo sapiens
  misc_RNA (1)...(19): siRNA sense strand
aagcucaagucgcaucuua

SEQ ID NO: 1526276 - RNA, 19 nt, Homo sapiens
  misc_RNA (1)...(19): siRNA sense strand
gaguaaccgugaucagauu

SEQ ID NO: 1526277 - RNA, 19 nt, Homo sapiens
  misc_RNA (1)...(19): siRNA sense strand
gcucagaacuggugaagcu

SEQ ID NO: 1526278 - RNA, 19 nt, Homo sapiens
  misc_RNA (1)...(19): siRNA sense strand
caucaguccuucucucuau

SEQ ID NO: 1526279 - RNA, 19 nt, Homo sapiens
  misc_RNA (1)...(19): siRNA sense strand
gaaggaauucucugauuuc

SEQ ID NO: 1526280 - RNA, 19 nt, Homo sapiens
  misc_RNA (1)...(19): siRNA sense strand
cagcaaacucuauuucuuu

SEQ ID NO: 1526281 - RNA, 19 nt, Homo sapiens
  misc_RNA (1)...(19): siRNA sense strand
gaacaccacagccagaguu

SEQ ID NO: 1526282 - RNA, 19 nt, Homo sapiens
  misc_RNA (1)...(19): siRNA sense strand
uaacaacagcucuucuauu

SEQ ID NO: 1526283 - RNA, 19 nt, Homo sapiens
  misc_RNA (1)...(19): siRNA sense strand
ggauggagaagaacuagaa

SEQ ID NO: 1526284 - RNA, 19 nt, Homo sapiens
  misc_RNA (1)...(19): siRNA sense strand
gauuaagaacuguggauuu

SEQ ID NO: 1526285 - RNA, 19 nt, Homo sapiens
  misc_RNA (1)...(19): siRNA sense strand
gggccauguucuuauuaua

SEQ ID NO: 1526286 - RNA, 19 nt, Homo sapiens
  misc_RNA (1)...(19): siRNA sense strand
ugaaguauucugccaauga

SEQ ID NO: 1526287 - RNA, 19 nt, Homo sapiens
  misc_RNA (1)...(19): siRNA sense strand
uggaaggaauucucugauu

SEQ ID NO: 1526288 - RNA, 19 nt, Homo sapiens
  misc_RNA (1)...(19): siRNA sense strand
agaaagaucaucaaaguag

SEQ ID NO: 1526289 - RNA, 19 nt, Homo sapiens
  misc_RNA (1)...(19): siRNA sense strand
gugaucagauuaagaacug

SEQ ID NO: 1526290 - RNA, 19 nt, Homo sapiens
  misc_RNA (1)...(19): siRNA sense strand
guagucauccuguaauaug

SEQ ID NO: 1526291 - RNA, 19 nt, Homo sapiens
  misc_RNA (1)...(19): siRNA sense strand
agucgcaucuuacuaguga

SEQ ID NO: 1526292 - RNA, 19 nt, Homo sapiens
  misc_RNA (1)...(19): siRNA sense strand
ggaguaaccgugaucagau

SEQ ID NO: 1526293 - RNA, 19 nt, Homo sapiens
  misc_RNA (1)...(19): siRNA sense strand
acagcaaacucuauuucuu

SEQ ID NO: 1526294 - RNA, 19 nt, Homo sapiens
  misc_RNA (1)...(19): siRNA sense strand
aaagacaauuguacagcaa

SEQ ID NO: 1526295 - RNA, 19 nt, Homo sapiens
  misc_RNA (1)...(19): siRNA sense strand
uccaauuccugccuucuuu

SEQ ID NO: 1526296 - RNA, 19 nt, Homo sapiens
  misc_RNA (1)...(19): siRNA sense strand
cagguuaccacugucauua

SEQ ID NO: 1526297 - RNA, 19 nt, Homo sapiens
  misc_RNA (1)...(19): siRNA sense strand
agaagugagugucccagaa

SEQ ID NO: 1526298 - RNA, 19 nt, Homo sapiens
  misc_RNA (1)...(19): siRNA sense strand
ugaaguuccuggauaacau

SEQ ID NO: 1526299 - RNA, 19 nt, Homo sapiens
  misc_RNA (1)...(19): siRNA sense strand
cuggauaacuugauugucu

SEQ ID NO: 1526300 - RNA, 19 nt, Homo sapiens
  misc_RNA (1)...(19): siRNA sense strand
gaacuagaaagacuuacca

SEQ ID NO: 1526301 - RNA, 19 nt, Homo sapiens
  misc_RNA (1)...(19): siRNA sense strand
ccugcuaggugccauauuc

SEQ ID NO: 1526302 - RNA, 19 nt, Homo sapiens
  misc_RNA (1)...(19): siRNA sense strand
uauaacaacagcucuucua

SEQ ID NO: 1526303 - RNA, 19 nt, Homo sapiens
  misc_RNA (1)...(19): siRNA sense strand
gcuaggugccauauucauu

SEQ ID NO: 1526304 - RNA, 19 nt, Homo sapiens
  misc_RNA (1)...(19): siRNA sense strand
uuaccaaacccaagaguga

SEQ ID NO: 1526305 - RNA, 19 nt, Homo sapiens
  misc_RNA (1)...(19): siRNA sense strand
ucaagucgcaucuuacuag

SEQ ID NO: 1526306 - RNA, 19 nt, Homo sapiens
  misc_RNA (1)...(19): siRNA sense strand
auucugaaguuccuggaua

SEQ ID NO: 1526307 - RNA, 19 nt, Homo sapiens
  misc_RNA (1)...(19): siRNA sense strand
cagaacagcaaacucuauu

SEQ ID NO: 1526308 - RNA, 19 nt, Homo sapiens
  misc_RNA (1)...(19): siRNA sense strand
caaguaugauuaucuucca

SEQ ID NO: 1526309 - RNA, 19 nt, Homo sapiens
  misc_RNA (1)...(19): siRNA sense strand
cagaugaagauacuuucua

SEQ ID NO: 1526310 - RNA, 19 nt, Homo sapiens
  misc_RNA (1)...(19): siRNA sense strand
caagagugaugagucagau

SEQ ID NO: 1526311 - RNA, 19 nt, Homo sapiens
  misc_RNA (1)...(19): siRNA sense strand
gccauguucuuauuauagu

SEQ ID NO: 1526312 - RNA, 19 nt, Homo sapiens
  misc_RNA (1)...(19): siRNA sense strand
ucugugugcuugugucauu

SEQ ID NO: 1526313 - RNA, 19 nt, Homo sapiens
  misc_RNA (1)...(19): siRNA sense strand
gguuaccacugucauuauc

SEQ ID NO: 1526314 - RNA, 19 nt, Homo sapiens
  misc_RNA (1)...(19): siRNA sense strand
ucucugauuucaugaagug

SEQ ID NO: 1526315 - RNA, 19 nt, Homo sapiens
  misc_RNA (1)...(19): siRNA sense strand
uagaaagacuuaccaaacc

SEQ ID NO: 1526316 - RNA, 19 nt, Homo sapiens
  misc_RNA (1)...(19): siRNA sense strand
gaaguuccuggauaacaug

SEQ ID NO: 1526317 - RNA, 19 nt, Homo sapiens
  misc_RNA (1)...(19): siRNA sense strand
cuugugucauucuguguua

SEQ ID NO: 1526318 - RNA, 19 nt, Homo sapiens
  misc_RNA (1)...(19): siRNA sense strand
ugucuguccuggucuuuga

SEQ ID NO: 1526319 - RNA, 19 nt, Homo sapiens
  misc_RNA (1)...(19): siRNA sense strand
gucauucuguguuauaaag

SEQ ID NO: 1526320 - RNA, 19 nt, Homo sapiens
  misc_RNA (1)...(19): siRNA sense strand
gggaaccagcucacugaaa

SEQ ID NO: 1526321 - RNA, 19 nt, Homo sapiens
  misc_RNA (1)...(19): siRNA sense strand
ugagucagaugaagauacu

SEQ ID NO: 1526322 - RNA, 19 nt, Homo sapiens
  misc_RNA (1)...(19): siRNA sense strand
gaaugugugcucagaacug

SEQ ID NO: 1526323 - RNA, 19 nt, Homo sapiens
  misc_RNA (1)...(19): siRNA sense strand
uggagaagaacuagaaaga

SEQ ID NO: 1526324 - RNA, 19 nt, Homo sapiens
  misc_RNA (1)...(19): siRNA sense strand
gcaccuaggcaagaaagga

SEQ ID NO: 1526325 - RNA, 19 nt, Homo sapiens
  misc_RNA (1)...(19): siRNA sense strand
ucuuuggcauucuguuuaa

SEQ ID NO: 1526326 - RNA, 19 nt, Homo sapiens
  misc_RNA (1)...(19): siRNA sense strand
uguaauaugcuccuuguca

SEQ ID NO: 1526327 - RNA, 19 nt, Homo sapiens
  misc_RNA (1)...(19): siRNA sense strand
ugaagaggcgucuaaacug

SEQ ID NO: 1526328 - RNA, 19 nt, Homo sapiens
  misc_RNA (1)...(19): siRNA sense strand
gugcugaagaggcgucuaa

SEQ ID NO: 1526329 - RNA, 19 nt, Homo sapiens
  misc_RNA (1)...(19): siRNA sense strand
cuguagucauccuguaaua

SEQ ID NO: 1526330 - RNA, 19 nt, Homo sapiens
  misc_RNA (1)...(19): siRNA sense strand
cuagaaagacuuaccaaac

SEQ ID NO: 1526331 - RNA, 19 nt, Homo sapiens
  misc_RNA (1)...(19): siRNA sense strand
gcaagaaaggauccgagau

SEQ ID NO: 1526332 - RNA, 19 nt, Homo sapiens
  misc_RNA (1)...(19): siRNA sense strand
guuccuggauaacauguuc

SEQ ID NO: 1526333 - RNA, 19 nt, Homo sapiens
  misc_RNA (1)...(19): siRNA sense strand
augauuaucuuccaacuac

SEQ ID NO: 1526334 - RNA, 19 nt, Homo sapiens
  misc_RNA (1)...(19): siRNA sense strand
gugcuguagucauccugua

SEQ ID NO: 1526335 - RNA, 19 nt, Homo sapiens
  misc_RNA (1)...(19): siRNA sense strand
ccuguaauaugcuccuugu

SEQ ID NO: 1526336 - RNA, 19 nt, Homo sapiens
  misc_RNA (1)...(19): siRNA sense strand
gugaaugugugcucagaac

SEQ ID NO: 1526337 - RNA, 19 nt, Homo sapiens
  misc_RNA (1)...(19): siRNA sense strand
uggcuguuaucuucucaaa

SEQ ID NO: 1526338 - RNA, 19 nt, Homo sapiens
  misc_RNA (1)...(19): siRNA sense strand
agccucaaguuccggaaua

SEQ ID NO: 1526339 - RNA, 19 nt, Homo sapiens
  misc_RNA (1)...(19): siRNA sense strand
ccauauucauugcuuuaag

SEQ ID NO: 1526340 - RNA, 19 nt, Homo sapiens
  misc_RNA (1)...(19): siRNA sense strand
ggccauguucuuauuauag

SEQ ID NO: 1526341 - RNA, 19 nt, Homo sapiens
  misc_RNA (1)...(19): siRNA sense strand
ggacuuuuccugaagcuaa

SEQ ID NO: 1526342 - RNA, 19 nt, Homo sapiens
  misc_RNA (1)...(19): siRNA sense strand
caagucgcaucuuacuagu

SEQ ID NO: 1526343 - RNA, 19 nt, Homo sapiens
  misc_RNA (1)...(19): siRNA sense strand
ggcaggacguggauuucau

SEQ ID NO: 1526344 - RNA, 19 nt, Homo sapiens
  misc_RNA (1)...(19): siRNA sense strand
guccauuccugccuuucuu

SEQ ID NO: 1526345 - RNA, 19 nt, Homo sapiens
  misc_RNA (1)...(19): siRNA sense strand
guaaccgugaucagauuaa

SEQ ID NO: 1526346 - RNA, 19 nt, Homo sapiens
  misc_RNA (1)...(19): siRNA sense strand
ggugccauauucauugcuu

SEQ ID NO: 1526347 - RNA, 19 nt, Homo sapiens
  misc_RNA (1)...(19): siRNA sense strand
aaacuuuacagcacaacuu

SEQ ID NO: 1526348 - RNA, 19 nt, Homo sapiens
  misc_RNA (1)...(19): siRNA sense strand
agacuuaccaaacccaaga

SEQ ID NO: 1526349 - RNA, 19 nt, Homo sapiens
  misc_RNA (1)...(19): siRNA sense strand
ccacugucauuaucacaac

SEQ ID NO: 1526350 - RNA, 19 nt, Homo sapiens
  misc_RNA (1)...(19): siRNA sense strand
cuaggugccauauucauug

SEQ ID NO: 1526351 - RNA, 19 nt, Homo sapiens
  misc_RNA (1)...(19): siRNA sense strand
ccauuccugccuuucuuua

SEQ ID NO: 1526352 - RNA, 19 nt, Homo sapiens
  misc_RNA (1)...(19): siRNA sense strand
ccaagagugaugagucaga

SEQ ID NO: 1526353 - RNA, 19 nt, Homo sapiens
  misc_RNA (1)...(19): siRNA sense strand
gauggagaagaacuagaaa

SEQ ID NO: 1526354 - RNA, 19 nt, Homo sapiens
  misc_RNA (1)...(19): siRNA sense strand
uuccugccuuucuuuauuu

SEQ ID NO: 1526355 - RNA, 19 nt, Homo sapiens
  misc_RNA (1)...(19): siRNA sense strand
auuccugccuuucuuuauu

SEQ ID NO: 1526356 - RNA, 19 nt, Homo sapiens
  misc_RNA (1)...(19): siRNA sense strand
gucauuaucacaacagugu

SEQ ID NO: 1526357 - RNA, 19 nt, Homo sapiens
  misc_RNA (1)...(19): siRNA sense strand
agagugaugagucagauga

SEQ ID NO: 1526358 - RNA, 19 nt, Homo sapiens
  misc_RNA (1)...(19): siRNA sense strand
gggauuaugucucuguuua

SEQ ID NO: 1526359 - RNA, 19 nt, Homo sapiens
  misc_RNA (1)...(19): siRNA sense strand
aggcaaagcuggagaaauu

SEQ ID NO: 1526360 - RNA, 19 nt, Homo sapiens
  misc_RNA (1)...(19): siRNA sense strand
gcucaaaccucucggauag

SEQ ID NO: 1526361 - RNA, 19 nt, Homo sapiens
  misc_RNA (1)...(19): siRNA sense strand
gcaugaagaucgaagaaga

SEQ ID NO: 1526362 - RNA, 19 nt, Homo sapiens
  misc_RNA (1)...(19): siRNA sense strand
aaacguuccuggagaauuu

SEQ ID NO: 1526363 - RNA, 19 nt, Homo sapiens
  misc_RNA (1)...(19): siRNA sense strand
uaacuuuacuucccaaaug

SEQ ID NO: 1526364 - RNA, 19 nt, Homo sapiens
  misc_RNA (1)...(19): siRNA sense strand
aaagagaaaucacuaaugg

SEQ ID NO: 1526365 - RNA, 19 nt, Homo sapiens
  misc_RNA (1)...(19): siRNA sense strand
uggagacgcugaaggauaa

SEQ ID NO: 1526366 - RNA, 19 nt, Homo sapiens
  misc_RNA (1)...(19): siRNA sense strand
gagcugcuauugcuuagga

SEQ ID NO: 1526367 - RNA, 19 nt, Homo sapiens
  misc_RNA (1)...(19): siRNA sense strand
ggagggaccuugaccuucu

SEQ ID NO: 1526368 - RNA, 19 nt, Homo sapiens
  misc_RNA (1)...(19): siRNA sense strand
cuaauggacucuacugguu

SEQ ID NO: 1526369 - RNA, 19 nt, Homo sapiens
  misc_RNA (1)...(19): siRNA sense strand
guacgugccuugaaauguc

SEQ ID NO: 1526370 - RNA, 19 nt, Homo sapiens
  misc_RNA (1)...(19): siRNA sense strand
uggaggaguugcagaauga

SEQ ID NO: 1526371 - RNA, 19 nt, Homo sapiens
  misc_RNA (1)...(19): siRNA sense strand
ugaacccagugcagaguua

SEQ ID NO: 1526372 - RNA, 19 nt, Homo sapiens
  misc_RNA (1)...(19): siRNA sense strand
ggccauggcugagaaguuc

SEQ ID NO: 1526373 - RNA, 19 nt, Homo sapiens
  misc_RNA (1)...(19): siRNA sense strand
gcuugcuucuccuaaguua

SEQ ID NO: 1526374 - RNA, 19 nt, Homo sapiens
  misc_RNA (1)...(19): siRNA sense strand
gcacucagggccauuugaa

SEQ ID NO: 1526375 - RNA, 19 nt, Homo sapiens
  misc_RNA (1)...(19): siRNA sense strand
uaauuuaacuccaguagcu

SEQ ID NO: 1526376 - RNA, 19 nt, Homo sapiens
  misc_RNA (1)...(19): siRNA sense strand
caacagguuugaguccuau

SEQ ID NO: 1526377 - RNA, 19 nt, Homo sapiens
  misc_RNA (1)...(19): siRNA sense strand
ggauggagacgcugaagga

SEQ ID NO: 1526378 - RNA, 19 nt, Homo sapiens
  misc_RNA (1)...(19): siRNA sense strand
gccaagggaugcagcuguu

SEQ ID NO: 1526379 - RNA, 19 nt, Homo sapiens
  misc_RNA (1)...(19): siRNA sense strand
gaugaguguuaacuugguu

SEQ ID NO: 1526380 - RNA, 19 nt, Homo sapiens
  misc_RNA (1)...(19): siRNA sense strand
ugcaggagcuggaggaguu

SEQ ID NO: 1526381 - RNA, 19 nt, Homo sapiens
  misc_RNA (1)...(19): siRNA sense strand
gaaacguuccuggagaauu

SEQ ID NO: 1526382 - RNA, 19 nt, Homo sapiens
  misc_RNA (1)...(19): siRNA sense strand
ugugaugaguguuaacuug

SEQ ID NO: 1526383 - RNA, 19 nt, Homo sapiens
  misc_RNA (1)...(19): siRNA sense strand
ggauuaugucucuguuuaa

SEQ ID NO: 1526384 - RNA, 19 nt, Homo sapiens
  misc_RNA (1)...(19): siRNA sense strand
aaacaccaucacuacauua

SEQ ID NO: 1526385 - RNA, 19 nt, Homo sapiens
  misc_RNA (1)...(19): siRNA sense strand
uguccuauguccuauuuga

SEQ ID NO: 1526386 - RNA, 19 nt, Homo sapiens
  misc_RNA (1)...(19): siRNA sense strand
ucaaaccucucggauagau

SEQ ID NO: 1526387 - RNA, 19 nt, Homo sapiens
  misc_RNA (1)...(19): siRNA sense strand
gcagccagggaccuuguua

SEQ ID NO: 1526388 - RNA, 19 nt, Homo sapiens
  misc_RNA (1)...(19): siRNA sense strand
ggagggagagaacagaguu

SEQ ID NO: 1526389 - RNA, 19 nt, Homo sapiens
  misc_RNA (1)...(19): siRNA sense strand
acaccucccugucuucaga

SEQ ID NO: 1526390 - RNA, 19 nt, Homo sapiens
  misc_RNA (1)...(19): siRNA sense strand
gcauccauccacuccuuua

SEQ ID NO: 1526391 - RNA, 19 nt, Homo sapiens
  misc_RNA (1)...(19): siRNA sense strand
gcgcauuuaugagcaucua

SEQ ID NO: 1526392 - RNA, 19 nt, Homo sapiens
  misc_RNA (1)...(19): siRNA sense strand
gccaggagcagaaggcaaa

SEQ ID NO: 1526393 - RNA, 19 nt, Homo sapiens
  misc_RNA (1)...(19): siRNA sense strand
acaacagguuugaguccua

SEQ ID NO: 1526394 - RNA, 19 nt, Homo sapiens
  misc_RNA (1)...(19): siRNA sense strand
cacccacgcucaaccuuug

SEQ ID NO: 1526395 - RNA, 19 nt, Homo sapiens
  misc_RNA (1)...(19): siRNA sense strand
gaccuugcuugcagugguu

SEQ ID NO: 1526396 - RNA, 19 nt, Homo sapiens
  misc_RNA (1)...(19): siRNA sense strand
ccuguauguuuguguaauu

SEQ ID NO: 1526397 - RNA, 19 nt, Homo sapiens
  misc_RNA (1)...(19): siRNA sense strand
gaaguuguacgugccuuga

SEQ ID NO: 1526398 - RNA, 19 nt, Homo sapiens
  misc_RNA (1)...(19): siRNA sense strand
aaaccucccuacccaauac

SEQ ID NO: 1526399 - RNA, 19 nt, Homo sapiens
  misc_RNA (1)...(19): siRNA sense strand
gaugaccgaccgccuguau

SEQ ID NO: 1526400 - RNA, 19 nt, Homo sapiens
  misc_RNA (1)...(19): siRNA sense strand
ugaauacaauagacaaagg

SEQ ID NO: 1526401 - RNA, 19 nt, Homo sapiens
  misc_RNA (1)...(19): siRNA sense strand
ugaguccuauaaagccaua

SEQ ID NO: 1526402 - RNA, 19 nt, Homo sapiens
  misc_RNA (1)...(19): siRNA sense strand
gaaggcaaagcuggagaaa

SEQ ID NO: 1526403 - RNA, 19 nt, Homo sapiens
  misc_RNA (1)...(19): siRNA sense strand
uaacuccaguagcugaugu

SEQ ID NO: 1526404 - RNA, 19 nt, Homo sapiens
  misc_RNA (1)...(19): siRNA sense strand
uuuagugccuugaaucuca

SEQ ID NO: 1526405 - RNA, 19 nt, Homo sapiens
  misc_RNA (1)...(19): siRNA sense strand
cagcgcugccgguucuuua

SEQ ID NO: 1526406 - RNA, 19 nt, Homo sapiens
  misc_RNA (1)...(19): siRNA sense strand
cuuguccuauguccuauuu

SEQ ID NO: 1526407 - RNA, 19 nt, Homo sapiens
  misc_RNA (1)...(19): siRNA sense strand
uaauggacucuacugguuu

SEQ ID NO: 1526408 - RNA, 19 nt, Homo sapiens
  misc_RNA (1)...(19): siRNA sense strand
gagauucgagggucaacug

SEQ ID NO: 1526409 - RNA, 19 nt, Homo sapiens
  misc_RNA (1)...(19): siRNA sense strand
aagcuuguccuauguccua

SEQ ID NO: 1526410 - RNA, 19 nt, Homo sapiens
  misc_RNA (1)...(19): siRNA sense strand
ccgccuguauguuugugua

SEQ ID NO: 1526411 - RNA, 19 nt, Homo sapiens
  misc_RNA (1)...(19): siRNA sense strand
ucacucuguugauguaauc

SEQ ID NO: 1526412 - RNA, 19 nt, Homo sapiens
  misc_RNA (1)...(19): siRNA sense strand
gcucuagcccuggagauug

SEQ ID NO: 1526413 - RNA, 19 nt, Homo sapiens
  misc_RNA (1)...(19): siRNA sense strand
gcagccgcagccaccauua

SEQ ID NO: 1526414 - RNA, 19 nt, Homo sapiens
  misc_RNA (1)...(19): siRNA sense strand
gaaggauggagacgcugaa

SEQ ID NO: 1526415 - RNA, 19 nt, Homo sapiens
  misc_RNA (1)...(19): siRNA sense strand
ccgaggccauggcugagaa

SEQ ID NO: 1526416 - RNA, 19 nt, Homo sapiens
  misc_RNA (1)...(19): siRNA sense strand
gcaaagcuggagaaauuuu

SEQ ID NO: 1526417 - RNA, 19 nt, Homo sapiens
  misc_RNA (1)...(19): siRNA sense strand
ugaccgaccgccuguaugu

SEQ ID NO: 1526418 - RNA, 19 nt, Homo sapiens
  misc_RNA (1)...(19): siRNA sense strand
gcuauugcuuaggaaguug

SEQ ID NO: 1526419 - RNA, 19 nt, Homo sapiens
  misc_RNA (1)...(19): siRNA sense strand
aguguuaacuugguuguuc

SEQ ID NO: 1526420 - RNA, 19 nt, Homo sapiens
  misc_RNA (1)...(19): siRNA sense strand
gcauguucaguaauaagaa

SEQ ID NO: 1526421 - RNA, 19 nt, Homo sapiens
  misc_RNA (1)...(19): siRNA sense strand
gagaucagccgcucaaacc

SEQ ID NO: 1526422 - RNA, 19 nt, Homo sapiens
  misc_RNA (1)...(19): siRNA sense strand
ggugcucccuguggacuug

SEQ ID NO: 1526423 - RNA, 19 nt, Homo sapiens
  misc_RNA (1)...(19): siRNA sense strand
uggcagagcggaacuugga

SEQ ID NO: 1526424 - RNA, 19 nt, Homo sapiens
  misc_RNA (1)...(19): siRNA sense strand
uccaggaaguggugaggaa

SEQ ID NO: 1526425 - RNA, 19 nt, Homo sapiens
  misc_RNA (1)...(19): siRNA sense strand
aauggacucuacugguuug

SEQ ID NO: 1526426 - RNA, 19 nt, Homo sapiens
  misc_RNA (1)...(19): siRNA sense strand
gugcuugcuucuccuaagu

SEQ ID NO: 1526427 - RNA, 19 nt, Homo sapiens
  misc_RNA (1)...(19): siRNA sense strand
ggagaucagccgcucaaac

SEQ ID NO: 1526428 - RNA, 19 nt, Homo sapiens
  misc_RNA (1)...(19): siRNA sense strand
gaaaaccucccuacccaau

SEQ ID NO: 1526429 - RNA, 19 nt, Homo sapiens
  misc_RNA (1)...(19): siRNA sense strand
gcagguggaaggcaugaag

SEQ ID NO: 1526430 - RNA, 19 nt, Homo sapiens
  misc_RNA (1)...(19): siRNA sense strand
gaaugacucggaggcgauu

SEQ ID NO: 1526431 - RNA, 19 nt, Homo sapiens
  misc_RNA (1)...(19): siRNA sense strand
ccacccacgcucaaccuuu

SEQ ID NO: 1526432 - RNA, 19 nt, Homo sapiens
  misc_RNA (1)...(19): siRNA sense strand
cugccuggccuggguauua

SEQ ID NO: 1526433 - RNA, 19 nt, Homo sapiens
  misc_RNA (1)...(19): siRNA sense strand
ggcauguucaguaauaaga

SEQ ID NO: 1526434 - RNA, 19 nt, Homo sapiens
  misc_RNA (1)...(19): siRNA sense strand
aguuguacgugccuugaaa

SEQ ID NO: 1526435 - RNA, 19 nt, Homo sapiens
  misc_RNA (1)...(19): siRNA sense strand
gaagagccuggagcugcua

SEQ ID NO: 1526436 - RNA, 19 nt, Homo sapiens
  misc_RNA (1)...(19): siRNA sense strand
ggaagccccuccuuucagu

SEQ ID NO: 1526437 - RNA, 19 nt, Homo sapiens
  misc_RNA (1)...(19): siRNA sense strand
aaacuuugaugagucacau

SEQ ID NO: 1526438 - RNA, 19 nt, Homo sapiens
  misc_RNA (1)...(19): siRNA sense strand
uugcuucuccuaaguuauu

SEQ ID NO: 1526439 - RNA, 19 nt, Homo sapiens
  misc_RNA (1)...(19): siRNA sense strand
cuggagcugcuauugcuua

SEQ ID NO: 1526440 - RNA, 19 nt, Homo sapiens
  misc_RNA (1)...(19): siRNA sense strand
gagccuggagcugcuauug

SEQ ID NO: 1526441 - RNA, 19 nt, Homo sapiens
  misc_RNA (1)...(19): siRNA sense strand
aaccaggucucagggaaga

SEQ ID NO: 1526442 - RNA, 19 nt, Homo sapiens
  misc_RNA (1)...(19): siRNA sense strand
uggaaggcaugaagaucga

SEQ ID NO: 1526443 - RNA, 19 nt, Homo sapiens
  misc_RNA (1)...(19): siRNA sense strand
aaaacaccaucacuacauu

SEQ ID NO: 1526444 - RNA, 19 nt, Homo sapiens
  misc_RNA (1)...(19): siRNA sense strand
cagccacccucccuucucu

SEQ ID NO: 1526445 - RNA, 19 nt, Homo sapiens
  misc_RNA (1)...(19): siRNA sense strand
uuucacaccucccugucuu

SEQ ID NO: 1526446 - RNA, 19 nt, Homo sapiens
  misc_RNA (1)...(19): siRNA sense strand
gccuugaaauguccacuac

SEQ ID NO: 1526447 - RNA, 19 nt, Homo sapiens
  misc_RNA (1)...(19): siRNA sense strand
auucgagggucaacuggaa

SEQ ID NO: 1526448 - RNA, 19 nt, Homo sapiens
  misc_RNA (1)...(19): siRNA sense strand
gccauaauaaacuuugaug

SEQ ID NO: 1526449 - RNA, 19 nt, Homo sapiens
  misc_RNA (1)...(19): siRNA sense strand
caaaccucucggauagaua

SEQ ID NO: 1526450 - RNA, 19 nt, Homo sapiens
  misc_RNA (1)...(19): siRNA sense strand
cuggaggaguugcagaaug

SEQ ID NO: 1526451 - RNA, 19 nt, Homo sapiens
  misc_RNA (1)...(19): siRNA sense strand
gagggaccuugaccuucug

SEQ ID NO: 1526452 - RNA, 19 nt, Homo sapiens
  misc_RNA (1)...(19): siRNA sense strand
gaacccagugcagaguuau

SEQ ID NO: 1526453 - RNA, 19 nt, Homo sapiens
  misc_RNA (1)...(19): siRNA sense strand
ggcaaagcuggagaaauuu

SEQ ID NO: 1526454 - RNA, 19 nt, Homo sapiens
  misc_RNA (1)...(19): siRNA sense strand
ccgaccgccuguauguuug

SEQ ID NO: 1526455 - RNA, 19 nt, Homo sapiens
  misc_RNA (1)...(19): siRNA sense strand
gccuggagcugcuauugcu

SEQ ID NO: 1526456 - RNA, 19 nt, Homo sapiens
  misc_RNA (1)...(19): siRNA sense strand
acgcauccauccacuccuu

SEQ ID NO: 1526457 - RNA, 19 nt, Homo sapiens
  misc_RNA (1)...(19): siRNA sense strand
ggguuuggcauauuugaca

SEQ ID NO: 1526458 - RNA, 19 nt, Homo sapiens
  misc_RNA (1)...(19): siRNA sense strand
gaacuaaagccggguauaa

SEQ ID NO: 1526459 - RNA, 19 nt, Homo sapiens
  misc_RNA (1)...(19): siRNA sense strand
gaacaacagaagagaauaa

SEQ ID NO: 1526460 - RNA, 19 nt, Homo sapiens
  misc_RNA (1)...(19): siRNA sense strand
gaacaucuguacccucuca

SEQ ID NO: 1526461 - RNA, 19 nt, Homo sapiens
  misc_RNA (1)...(19): siRNA sense strand
gagaaugaguuuccuccua

SEQ ID NO: 1526462 - RNA, 19 nt, Homo sapiens
  misc_RNA (1)...(19): siRNA sense strand
gaacguguaucacuucaag

SEQ ID NO: 1526463 - RNA, 19 nt, Homo sapiens
  misc_RNA (1)...(19): siRNA sense strand
cuagaagaguccauuuaua

SEQ ID NO: 1526464 - RNA, 19 nt, Homo sapiens
  misc_RNA (1)...(19): siRNA sense strand
caacagaagagaauaaaga

SEQ ID NO: 1526465 - RNA, 19 nt, Homo sapiens
  misc_RNA (1)...(19): siRNA sense strand
guggacaccuuuauaugua

SEQ ID NO: 1526466 - RNA, 19 nt, Homo sapiens
  misc_RNA (1)...(19): siRNA sense strand
gaaugaguuuccuccuaua

SEQ ID NO: 1526467 - RNA, 19 nt, Homo sapiens
  misc_RNA (1)...(19): siRNA sense strand
gcacaucccuagcaauugg

SEQ ID NO: 1526468 - RNA, 19 nt, Homo sapiens
  misc_RNA (1)...(19): siRNA sense strand
gaagaguccauuuauauuc

SEQ ID NO: 1526469 - RNA, 19 nt, Homo sapiens
  misc_RNA (1)...(19): siRNA sense strand
ugaagacccuccuggauau

SEQ ID NO: 1526470 - RNA, 19 nt, Homo sapiens
  misc_RNA (1)...(19): siRNA sense strand
acaaucagcucucuagugu

SEQ ID NO: 1526471 - RNA, 19 nt, Homo sapiens
  misc_RNA (1)...(19): siRNA sense strand
ggagagggaugaaaaggua

SEQ ID NO: 1526472 - RNA, 19 nt, Homo sapiens
  misc_RNA (1)...(19): siRNA sense strand
gagagugugucuuaaucaa

SEQ ID NO: 1526473 - RNA, 19 nt, Homo sapiens
  misc_RNA (1)...(19): siRNA sense strand
uuaaagacaugaagcuguu

SEQ ID NO: 1526474 - RNA, 19 nt, Homo sapiens
  misc_RNA (1)...(19): siRNA sense strand
ggaccagugugucuugaug

SEQ ID NO: 1526475 - RNA, 19 nt, Homo sapiens
  misc_RNA (1)...(19): siRNA sense strand
gggagauugugcuuuauga

SEQ ID NO: 1526476 - RNA, 19 nt, Homo sapiens
  misc_RNA (1)...(19): siRNA sense strand
caguauggauucacaauuc

SEQ ID NO: 1526477 - RNA, 19 nt, Homo sapiens
  misc_RNA (1)...(19): siRNA sense strand
ucucaacgauccagaaguu

SEQ ID NO: 1526478 - RNA, 19 nt, Homo sapiens
  misc_RNA (1)...(19): siRNA sense strand
ggaggagagugugucuuaa

SEQ ID NO: 1526479 - RNA, 19 nt, Homo sapiens
  misc_RNA (1)...(19): siRNA sense strand
agaaugaguuuccuccuau

SEQ ID NO: 1526480 - RNA, 19 nt, Homo sapiens
  misc_RNA (1)...(19): siRNA sense strand
aaucagcucucuaguguuc

SEQ ID NO: 1526481 - RNA, 19 nt, Homo sapiens
  misc_RNA (1)...(19): siRNA sense strand
gagaaguuauuccugaaca

SEQ ID NO: 1526482 - RNA, 19 nt, Homo sapiens
  misc_RNA (1)...(19): siRNA sense strand
agcaacaucuuguccauaa

SEQ ID NO: 1526483 - RNA, 19 nt, Homo sapiens
  misc_RNA (1)...(19): siRNA sense strand
ggcaaaagcucuaugaguu

SEQ ID NO: 1526484 - RNA, 19 nt, Homo sapiens
  misc_RNA (1)...(19): siRNA sense strand
gauggaaacucccugaaaa

SEQ ID NO: 1526485 - RNA, 19 nt, Homo sapiens
  misc_RNA (1)...(19): siRNA sense strand
gcgcucagcugcuucucuu

SEQ ID NO: 1526486 - RNA, 19 nt, Homo sapiens
  misc_RNA (1)...(19): siRNA sense strand
cagugugucuugaugauga

SEQ ID NO: 1526487 - RNA, 19 nt, Homo sapiens
  misc_RNA (1)...(19): siRNA sense strand
gagauugugcuuuaugaug

SEQ ID NO: 1526488 - RNA, 19 nt, Homo sapiens
  misc_RNA (1)...(19): siRNA sense strand
gguauaagcuguuuucucu

SEQ ID NO: 1526489 - RNA, 19 nt, Homo sapiens
  misc_RNA (1)...(19): siRNA sense strand
uaaagaaaaugaccucaga

SEQ ID NO: 1526490 - RNA, 19 nt, Homo sapiens
  misc_RNA (1)...(19): siRNA sense strand
uggaggagagugugucuua

SEQ ID NO: 1526491 - RNA, 19 nt, Homo sapiens
  misc_RNA (1)...(19): siRNA sense strand
ucacaacauuaaagacaug

SEQ ID NO: 1526492 - RNA, 19 nt, Homo sapiens
  misc_RNA (1)...(19): siRNA sense strand
cggcaaaggcugcugguuu

SEQ ID NO: 1526493 - RNA, 19 nt, Homo sapiens
  misc_RNA (1)...(19): siRNA sense strand
caagaaaggcacagagauc

SEQ ID NO: 1526494 - RNA, 19 nt, Homo sapiens
  misc_RNA (1)...(19): siRNA sense strand
gacaugaagcuguugaaga

SEQ ID NO: 1526495 - RNA, 19 nt, Homo sapiens
  misc_RNA (1)...(19): siRNA sense strand
ccuccacggugccagguua

SEQ ID NO: 1526496 - RNA, 19 nt, Homo sapiens
  misc_RNA (1)...(19): siRNA sense strand
gcacuauugcugcccauga

SEQ ID NO: 1526497 - RNA, 19 nt, Homo sapiens
  misc_RNA (1)...(19): siRNA sense strand
ugaguuuccuccuauaauc

SEQ ID NO: 1526498 - RNA, 19 nt, Homo sapiens
  misc_RNA (1)...(19): siRNA sense strand
gaaguuauuccugaacaug

SEQ ID NO: 1526499 - RNA, 19 nt, Homo sapiens
  misc_RNA (1)...(19): siRNA sense strand
gaaaaugaccucagaccuu

SEQ ID NO: 1526500 - RNA, 19 nt, Homo sapiens
  misc_RNA (1)...(19): siRNA sense strand
gaccuggaguggcuacaug

SEQ ID NO: 1526501 - RNA, 19 nt, Homo sapiens
  misc_RNA (1)...(19): siRNA sense strand
ucaaccauuccaauucuua

SEQ ID NO: 1526502 - RNA, 19 nt, Homo sapiens
  misc_RNA (1)...(19): siRNA sense strand
caggggagauugugcuuua

SEQ ID NO: 1526503 - RNA, 19 nt, Homo sapiens
  misc_RNA (1)...(19): siRNA sense strand
uaucaaccauuccaauucu

SEQ ID NO: 1526504 - RNA, 19 nt, Homo sapiens
  misc_RNA (1)...(19): siRNA sense strand
ggaacaacagaagagaaua

SEQ ID NO: 1526505 - RNA, 19 nt, Homo sapiens
  misc_RNA (1)...(19): siRNA sense strand
ccaguggacaccuuuauau

SEQ ID NO: 1526506 - RNA, 19 nt, Homo sapiens
  misc_RNA (1)...(19): siRNA sense strand
gaaaacagucugcacuauu

SEQ ID NO: 1526507 - RNA, 19 nt, Homo sapiens
  misc_RNA (1)...(19): siRNA sense strand
gaaacucccugaaaacagu

SEQ ID NO: 1526508 - RNA, 19 nt, Homo sapiens
  misc_RNA (1)...(19): siRNA sense strand
gaaaagguaugugacaauc

SEQ ID NO: 1526509 - RNA, 19 nt, Homo sapiens
  misc_RNA (1)...(19): siRNA sense strand
gaggagagugugucuuaau

SEQ ID NO: 1526510 - RNA, 19 nt, Homo sapiens
  misc_RNA (1)...(19): siRNA sense strand
caccaacagucgaccagaa

SEQ ID NO: 1526511 - RNA, 19 nt, Homo sapiens
  misc_RNA (1)...(19): siRNA sense strand
gccuagaagaguccauuua

SEQ ID NO: 1526512 - RNA, 19 nt, Homo sapiens
  misc_RNA (1)...(19): siRNA sense strand
ggacaccuuuauauguaca

SEQ ID NO: 1526513 - RNA, 19 nt, Homo sapiens
  misc_RNA (1)...(19): siRNA sense strand
aaaacagucugcacuauug

SEQ ID NO: 1526514 - RNA, 19 nt, Homo sapiens
  misc_RNA (1)...(19): siRNA sense strand
uaugugcucucucuaucaa

SEQ ID NO: 1526515 - RNA, 19 nt, Homo sapiens
  misc_RNA (1)...(19): siRNA sense strand
uugaagacccuccuggaua

SEQ ID NO: 1526516 - RNA, 19 nt, Homo sapiens
  misc_RNA (1)...(19): siRNA sense strand
acaugaagcuguugaagac

SEQ ID NO: 1526517 - RNA, 19 nt, Homo sapiens
  misc_RNA (1)...(19): siRNA sense strand
ggacugcacaucccuagca

SEQ ID NO: 1526518 - RNA, 19 nt, Homo sapiens
  misc_RNA (1)...(19): siRNA sense strand
gagugugucuuaaucaaaa

SEQ ID NO: 1526519 - RNA, 19 nt, Homo sapiens
  misc_RNA (1)...(19): siRNA sense strand
ggagagugugucuuaauca

SEQ ID NO: 1526520 - RNA, 19 nt, Homo sapiens
  misc_RNA (1)...(19): siRNA sense strand
ggaacuaaagccggguaua

SEQ ID NO: 1526521 - RNA, 19 nt, Homo sapiens
  misc_RNA (1)...(19): siRNA sense strand
gacaaucagcucucuagug

SEQ ID NO: 1526522 - RNA, 19 nt, Homo sapiens
  misc_RNA (1)...(19): siRNA sense strand
gcacagucauccggguguu

SEQ ID NO: 1526523 - RNA, 19 nt, Homo sapiens
  misc_RNA (1)...(19): siRNA sense strand
guguaucacuucaagaaag

SEQ ID NO: 1526524 - RNA, 19 nt, Homo sapiens
  misc_RNA (1)...(19): siRNA sense strand
gcgcugcgaggagaaguua

SEQ ID NO: 1526525 - RNA, 19 nt, Homo sapiens
  misc_RNA (1)...(19): siRNA sense strand
gcugcugguuugccuagaa

SEQ ID NO: 1526526 - RNA, 19 nt, Homo sapiens
  misc_RNA (1)...(19): siRNA sense strand
ccuagaagaguccauuuau

SEQ ID NO: 1526527 - RNA, 19 nt, Homo sapiens
  misc_RNA (1)...(19): siRNA sense strand
ccucagaccuuccuuaccu

SEQ ID NO: 1526528 - RNA, 19 nt, Homo sapiens
  misc_RNA (1)...(19): siRNA sense strand
uggagcagcuggaucaagu

SEQ ID NO: 1526529 - RNA, 19 nt, Homo sapiens
  misc_RNA (1)...(19): siRNA sense strand
gaaguugccacggcugcua

SEQ ID NO: 1526530 - RNA, 19 nt, Homo sapiens
  misc_RNA (1)...(19): siRNA sense strand
gaugaacguguaucacuuc

SEQ ID NO: 1526531 - RNA, 19 nt, Homo sapiens
  misc_RNA (1)...(19): siRNA sense strand
gcucucuaguguucaguau

SEQ ID NO: 1526532 - RNA, 19 nt, Homo sapiens
  misc_RNA (1)...(19): siRNA sense strand
gguguucucugucccugau

SEQ ID NO: 1526533 - RNA, 19 nt, Homo sapiens
  misc_RNA (1)...(19): siRNA sense strand
gaccguagccagaccaagu

SEQ ID NO: 1526534 - RNA, 19 nt, Homo sapiens
  misc_RNA (1)...(19): siRNA sense strand
ccacggaagcaaugaaauc

SEQ ID NO: 1526535 - RNA, 19 nt, Homo sapiens
  misc_RNA (1)...(19): siRNA sense strand
ccacugcacgcuugaacuu

SEQ ID NO: 1526536 - RNA, 19 nt, Homo sapiens
  misc_RNA (1)...(19): siRNA sense strand
aaagguaugugacaaucag

SEQ ID NO: 1526537 - RNA, 19 nt, Homo sapiens
  misc_RNA (1)...(19): siRNA sense strand
ccuagcaauuggaacuaaa

SEQ ID NO: 1526538 - RNA, 19 nt, Homo sapiens
  misc_RNA (1)...(19): siRNA sense strand
agaugaacguguaucacuu

SEQ ID NO: 1526539 - RNA, 19 nt, Homo sapiens
  misc_RNA (1)...(19): siRNA sense strand
uauaagcuguuuucucuga

SEQ ID NO: 1526540 - RNA, 19 nt, Homo sapiens
  misc_RNA (1)...(19): siRNA sense strand
gauugugcuuuaugaugga

SEQ ID NO: 1526541 - RNA, 19 nt, Homo sapiens
  misc_RNA (1)...(19): siRNA sense strand
gguagucagucacacaaaa

SEQ ID NO: 1526542 - RNA, 19 nt, Homo sapiens
  misc_RNA (1)...(19): siRNA sense strand
cugcacaucccuagcaauu

SEQ ID NO: 1526543 - RNA, 19 nt, Homo sapiens
  misc_RNA (1)...(19): siRNA sense strand
gcucaggaacaacagaaga

SEQ ID NO: 1526544 - RNA, 19 nt, Homo sapiens
  misc_RNA (1)...(19): siRNA sense strand
gcaacaucuuguccauaag

SEQ ID NO: 1526545 - RNA, 19 nt, Homo sapiens
  misc_RNA (1)...(19): siRNA sense strand
gcucagcugcuucucuuuc

SEQ ID NO: 1526546 - RNA, 19 nt, Homo sapiens
  misc_RNA (1)...(19): siRNA sense strand
uagcugccaucaccuucaa

SEQ ID NO: 1526547 - RNA, 19 nt, Homo sapiens
  misc_RNA (1)...(19): siRNA sense strand
ugauggaaacucccugaaa

SEQ ID NO: 1526548 - RNA, 19 nt, Homo sapiens
  misc_RNA (1)...(19): siRNA sense strand
gaagacccuccuggauauu

SEQ ID NO: 1526549 - RNA, 19 nt, Homo sapiens
  misc_RNA (1)...(19): siRNA sense strand
ccagcaacaucuuguccau

SEQ ID NO: 1526550 - RNA, 19 nt, Homo sapiens
  misc_RNA (1)...(19): siRNA sense strand
gcugcgaggagaaguuauu

SEQ ID NO: 1526551 - RNA, 19 nt, Homo sapiens
  misc_RNA (1)...(19): siRNA sense strand
ucucuaguguucaguaugg

SEQ ID NO: 1526552 - RNA, 19 nt, Homo sapiens
  misc_RNA (1)...(19): siRNA sense strand
caacauuaaagacaugaag

SEQ ID NO: 1526553 - RNA, 19 nt, Homo sapiens
  misc_RNA (1)...(19): siRNA sense strand
gcaaacccaacaggucuau

SEQ ID NO: 1526554 - RNA, 19 nt, Homo sapiens
  misc_RNA (1)...(19): siRNA sense strand
gcaaaacgaagcagucaug

SEQ ID NO: 1526555 - RNA, 19 nt, Homo sapiens
  misc_RNA (1)...(19): siRNA sense strand
aaacccaacaggucuaugu

SEQ ID NO: 1526556 - RNA, 19 nt, Homo sapiens
  misc_RNA (1)...(19): siRNA sense strand
caacaucuuguccauaagg

SEQ ID NO: 1526557 - RNA, 19 nt, Homo sapiens
  misc_RNA (1)...(19): siRNA sense strand
ugaccucagaccuuccuua

SEQ ID NO: 1526558 - RNA, 19 nt, Homo sapiens
  misc_RNA (1)...(19): siRNA sense strand
gggcagaccuagcaaauug

SEQ ID NO: 1526559 - RNA, 19 nt, Homo sapiens
  misc_RNA (1)...(19): siRNA sense strand
gaagguggcuuuggcugaa

SEQ ID NO: 1526560 - RNA, 19 nt, Homo sapiens
  misc_RNA (1)...(19): siRNA sense strand
gcagaggauuggaauacuu

SEQ ID NO: 1526561 - RNA, 19 nt, Homo sapiens
  misc_RNA (1)...(19): siRNA sense strand
gauuuggacuuguguguau

SEQ ID NO: 1526562 - RNA, 19 nt, Homo sapiens
  misc_RNA (1)...(19): siRNA sense strand
caaaauacgcccaagauua

SEQ ID NO: 1526563 - RNA, 19 nt, Homo sapiens
  misc_RNA (1)...(19): siRNA sense strand
ucaagcaucucacaaacga

SEQ ID NO: 1526564 - RNA, 19 nt, Homo sapiens
  misc_RNA (1)...(19): siRNA sense strand
uacaagaucuucacaacug

SEQ ID NO: 1526565 - RNA, 19 nt, Homo sapiens
  misc_RNA (1)...(19): siRNA sense strand
ccagagaugccaacacaaa

SEQ ID NO: 1526566 - RNA, 19 nt, Homo sapiens
  misc_RNA (1)...(19): siRNA sense strand
gagauaaacaucaccuuca

SEQ ID NO: 1526567 - RNA, 19 nt, Homo sapiens
  misc_RNA (1)...(19): siRNA sense strand
gaauaucucagucucaauc

SEQ ID NO: 1526568 - RNA, 19 nt, Homo sapiens
  misc_RNA (1)...(19): siRNA sense strand
gugaauaucucagucucaa

SEQ ID NO: 1526569 - RNA, 19 nt, Homo sapiens
  misc_RNA (1)...(19): siRNA sense strand
ucaaugauuuggacuugug

SEQ ID NO: 1526570 - RNA, 19 nt, Homo sapiens
  misc_RNA (1)...(19): siRNA sense strand
ggaaaagucuaucaugcuu

SEQ ID NO: 1526571 - RNA, 19 nt, Homo sapiens
  misc_RNA (1)...(19): siRNA sense strand
gaaugaaacccucaagcau

SEQ ID NO: 1526572 - RNA, 19 nt, Homo sapiens
  misc_RNA (1)...(19): siRNA sense strand
gguacaagaucuucacaac

SEQ ID NO: 1526573 - RNA, 19 nt, Homo sapiens
  misc_RNA (1)...(19): siRNA sense strand
ccaguuacuuccucuuugu

SEQ ID NO: 1526574 - RNA, 19 nt, Homo sapiens
  misc_RNA (1)...(19): siRNA sense strand
aauccuuucugguguuaua

SEQ ID NO: 1526575 - RNA, 19 nt, Homo sapiens
  misc_RNA (1)...(19): siRNA sense strand
guucaaugauuuggacuug

SEQ ID NO: 1526576 - RNA, 19 nt, Homo sapiens
  misc_RNA (1)...(19): siRNA sense strand
cugcuacgguucaaugauu

SEQ ID NO: 1526577 - RNA, 19 nt, Homo sapiens
  misc_RNA (1)...(19): siRNA sense strand
gcaacgccacgcucuggua

SEQ ID NO: 1526578 - RNA, 19 nt, Homo sapiens
  misc_RNA (1)...(19): siRNA sense strand
ccacaacuccggaaaguac

SEQ ID NO: 1526579 - RNA, 19 nt, Homo sapiens
  misc_RNA (1)...(19): siRNA sense strand
caacgucacccaucuguac

SEQ ID NO: 1526580 - RNA, 19 nt, Homo sapiens
  misc_RNA (1)...(19): siRNA sense strand
acaauccuuucugguguua

SEQ ID NO: 1526581 - RNA, 19 nt, Homo sapiens
  misc_RNA (1)...(19): siRNA sense strand
gagcaauccugaauuuugu

SEQ ID NO: 1526582 - RNA, 19 nt, Homo sapiens
  misc_RNA (1)...(19): siRNA sense strand
cagaggauuggaauacuuu

SEQ ID NO: 1526583 - RNA, 19 nt, Homo sapiens
  misc_RNA (1)...(19): siRNA sense strand
gccacgcucugguacaaga

SEQ ID NO: 1526584 - RNA, 19 nt, Homo sapiens
  misc_RNA (1)...(19): siRNA sense strand
ggaagcccacgaggagaua

SEQ ID NO: 1526585 - RNA, 19 nt, Homo sapiens
  misc_RNA (1)...(19): siRNA sense strand
ugccagagaugccaacaca

SEQ ID NO: 1526586 - RNA, 19 nt, Homo sapiens
  misc_RNA (1)...(19): siRNA sense strand
caucuguacucaaccaucu

SEQ ID NO: 1526587 - RNA, 19 nt, Homo sapiens
  misc_RNA (1)...(19): siRNA sense strand
cuucacaacugccagagau

SEQ ID NO: 1526588 - RNA, 19 nt, Homo sapiens
  misc_RNA (1)...(19): siRNA sense strand
gcaucagauuggacuuuca

SEQ ID NO: 1526589 - RNA, 19 nt, Homo sapiens
  misc_RNA (1)...(19): siRNA sense strand
caccacaacuccggaaagu

SEQ ID NO: 1526590 - RNA, 19 nt, Homo sapiens
  misc_RNA (1)...(19): siRNA sense strand
ucacccaucuguacucaac

SEQ ID NO: 1526591 - RNA, 19 nt, Homo sapiens
  misc_RNA (1)...(19): siRNA sense strand
gggcaucagauuggacuuu

SEQ ID NO: 1526592 - RNA, 19 nt, Homo sapiens
  misc_RNA (1)...(19): siRNA sense strand
gagaugccaacacaaaaua

SEQ ID NO: 1526593 - RNA, 19 nt, Homo sapiens
  misc_RNA (1)...(19): siRNA sense strand
gaaacccucaagcaucuca

SEQ ID NO: 1526594 - RNA, 19 nt, Homo sapiens
  misc_RNA (1)...(19): siRNA sense strand
ggcaucagauuggacuuuc

SEQ ID NO: 1526595 - RNA, 19 nt, Homo sapiens
  misc_RNA (1)...(19): siRNA sense strand
gcaacgucacccaucugua

SEQ ID NO: 1526596 - RNA, 19 nt, Homo sapiens
  misc_RNA (1)...(19): siRNA sense strand
cagcguggagcucagauga

SEQ ID NO: 1526597 - RNA, 19 nt, Homo sapiens
  misc_RNA (1)...(19): siRNA sense strand
agaaugaaacccucaagca

SEQ ID NO: 1526598 - RNA, 19 nt, Homo sapiens
  misc_RNA (1)...(19): siRNA sense strand
caccaguuacuuccucuuu

SEQ ID NO: 1526599 - RNA, 19 nt, Homo sapiens
  misc_RNA (1)...(19): siRNA sense strand
cugguggucuucaugauca

SEQ ID NO: 1526600 - RNA, 19 nt, Homo sapiens
  misc_RNA (1)...(19): siRNA sense strand
cagaaauggcagaggauug

SEQ ID NO: 1526601 - RNA, 19 nt, Homo sapiens
  misc_RNA (1)...(19): siRNA sense strand
ccucaagcaucucacaaac

SEQ ID NO: 1526602 - RNA, 19 nt, Homo sapiens
  misc_RNA (1)...(19): siRNA sense strand
cguaagcgccauggccaua

SEQ ID NO: 1526603 - RNA, 19 nt, Homo sapiens
  misc_RNA (1)...(19): siRNA sense strand
guacaagaucuucacaacu

SEQ ID NO: 1526604 - RNA, 19 nt, Homo sapiens
  misc_RNA (1)...(19): siRNA sense strand
cagugauuguuccagauga

SEQ ID NO: 1526605 - RNA, 19 nt, Homo sapiens
  misc_RNA (1)...(19): siRNA sense strand
uacaauccuuucugguguu

SEQ ID NO: 1526606 - RNA, 19 nt, Homo sapiens
  misc_RNA (1)...(19): siRNA sense strand
ucuguacucaaccaucuua

SEQ ID NO: 1526607 - RNA, 19 nt, Homo sapiens
  misc_RNA (1)...(19): siRNA sense strand
caagggcagaccuagcaaa

SEQ ID NO: 1526608 - RNA, 19 nt, Homo sapiens
  misc_RNA (1)...(19): siRNA sense strand
gcguggagcucagaugacu

SEQ ID NO: 1526609 - RNA, 19 nt, Homo sapiens
  misc_RNA (1)...(19): siRNA sense strand
gggaagcccacgaggagau

SEQ ID NO: 1526610 - RNA, 19 nt, Homo sapiens
  misc_RNA (1)...(19): siRNA sense strand
ccagaaauggcagaggauu

SEQ ID NO: 1526611 - RNA, 19 nt, Homo sapiens
  misc_RNA (1)...(19): siRNA sense strand
gacccugggcuacuucuuc

SEQ ID NO: 1526612 - RNA, 19 nt, Homo sapiens
  misc_RNA (1)...(19): siRNA sense strand
augaaacccucaagcaucu

SEQ ID NO: 1526613 - RNA, 19 nt, Homo sapiens
  misc_RNA (1)...(19): siRNA sense strand
uugcuaugcuguuaucaag

SEQ ID NO: 1526614 - RNA, 19 nt, Homo sapiens
  misc_RNA (1)...(19): siRNA sense strand
guauucacagccugcauga

SEQ ID NO: 1526615 - RNA, 19 nt, Homo sapiens
  misc_RNA (1)...(19): siRNA sense strand
gugauggugauaacaaugu

SEQ ID NO: 1526616 - RNA, 19 nt, Homo sapiens
  misc_RNA (1)...(19): siRNA sense strand
gaaauggcagaggauugga

SEQ ID NO: 1526617 - RNA, 19 nt, Homo sapiens
  misc_RNA (1)...(19): siRNA sense strand
aagcuuacagugauuguuc

SEQ ID NO: 1526618 - RNA, 19 nt, Homo sapiens
  misc_RNA (1)...(19): siRNA sense strand
gcgccauggccauagcuuu

SEQ ID NO: 1526619 - RNA, 19 nt, Homo sapiens
  misc_RNA (1)...(19): siRNA sense strand
gaagcccacgaggagauaa

SEQ ID NO: 1526620 - RNA, 19 nt, Homo sapiens
  misc_RNA (1)...(19): siRNA sense strand
ucacaaacgacaccacaac

SEQ ID NO: 1526621 - RNA, 19 nt, Homo sapiens
  misc_RNA (1)...(19): siRNA sense strand
ccacgaggagauaaacauc

SEQ ID NO: 1526622 - RNA, 19 nt, Homo sapiens
  misc_RNA (1)...(19): siRNA sense strand
ugcuacgguucaaugauuu

SEQ ID NO: 1526623 - RNA, 19 nt, Homo sapiens
  misc_RNA (1)...(19): siRNA sense strand
guuacuuccucuuugugau

SEQ ID NO: 1526624 - RNA, 19 nt, Homo sapiens
  misc_RNA (1)...(19): siRNA sense strand
gaaagaagcaggcgaagaa

SEQ ID NO: 1526625 - RNA, 19 nt, Homo sapiens
  misc_RNA (1)...(19): siRNA sense strand
gaaaugggcaugagacuuc

SEQ ID NO: 1526626 - RNA, 19 nt, Homo sapiens
  misc_RNA (1)...(19): siRNA sense strand
cuacugaugucaagaaaga

SEQ ID NO: 1526627 - RNA, 19 nt, Homo sapiens
  misc_RNA (1)...(19): siRNA sense strand
gauccagggugcuaucuau

SEQ ID NO: 1526628 - RNA, 19 nt, Homo sapiens
  misc_RNA (1)...(19): siRNA sense strand
aaagagcucuaaagucaga

SEQ ID NO: 1526629 - RNA, 19 nt, Homo sapiens
  misc_RNA (1)...(19): siRNA sense strand
gauggcagccuccaaguga

SEQ ID NO: 1526630 - RNA, 19 nt, Homo sapiens
  misc_RNA (1)...(19): siRNA sense strand
aaacggaacccaugcuuug

SEQ ID NO: 1526631 - RNA, 19 nt, Homo sapiens
  misc_RNA (1)...(19): siRNA sense strand
gcuuugagcauccuacuga

SEQ ID NO: 1526632 - RNA, 19 nt, Homo sapiens
  misc_RNA (1)...(19): siRNA sense strand
uaacugaagagccagaaau

SEQ ID NO: 1526633 - RNA, 19 nt, Homo sapiens
  misc_RNA (1)...(19): siRNA sense strand
cugcuaagcugcucaacuc

SEQ ID NO: 1526634 - RNA, 19 nt, Homo sapiens
  misc_RNA (1)...(19): siRNA sense strand
uaucuaugcgggaauugua

SEQ ID NO: 1526635 - RNA, 19 nt, Homo sapiens
  misc_RNA (1)...(19): siRNA sense strand
ccucucauagugaaacaua

SEQ ID NO: 1526636 - RNA, 19 nt, Homo sapiens
  misc_RNA (1)...(19): siRNA sense strand
ccuccucccucucauagug

SEQ ID NO: 1526637 - RNA, 19 nt, Homo sapiens
  misc_RNA (1)...(19): siRNA sense strand
gagagccggauauuggaaa

SEQ ID NO: 1526638 - RNA, 19 nt, Homo sapiens
  misc_RNA (1)...(19): siRNA sense strand
gaaagcugcagcgaucaga

SEQ ID NO: 1526639 - RNA, 19 nt, Homo sapiens
  misc_RNA (1)...(19): siRNA sense strand
agucagagcaagccaagaa

SEQ ID NO: 1526640 - RNA, 19 nt, Homo sapiens
  misc_RNA (1)...(19): siRNA sense strand
gugcagcuguuccuuccau

SEQ ID NO: 1526641 - RNA, 19 nt, Homo sapiens
  misc_RNA (1)...(19): siRNA sense strand
gcccaggccuucgugaaag

SEQ ID NO: 1526642 - RNA, 19 nt, Homo sapiens
  misc_RNA (1)...(19): siRNA sense strand
ucugagagccggauauugg

SEQ ID NO: 1526643 - RNA, 19 nt, Homo sapiens
  misc_RNA (1)...(19): siRNA sense strand
gugaaacauaucagaaaga

SEQ ID NO: 1526644 - RNA, 19 nt, Homo sapiens
  misc_RNA (1)...(19): siRNA sense strand
ggguguggauggcauggau

SEQ ID NO: 1526645 - RNA, 19 nt, Homo sapiens
  misc_RNA (1)...(19): siRNA sense strand
cugcagcgaucagagcaaa

SEQ ID NO: 1526646 - RNA, 19 nt, Homo sapiens
  misc_RNA (1)...(19): siRNA sense strand
cauagugaaacauaucaga

SEQ ID NO: 1526647 - RNA, 19 nt, Homo sapiens
  misc_RNA (1)...(19): siRNA sense strand
cuacagcugguaccugcua

SEQ ID NO: 1526648 - RNA, 19 nt, Homo sapiens
  misc_RNA (1)...(19): siRNA sense strand
gggcugauccagggugcua

SEQ ID NO: 1526649 - RNA, 19 nt, Homo sapiens
  misc_RNA (1)...(19): siRNA sense strand
agauaaacgagccagcuaa

SEQ ID NO: 1526650 - RNA, 19 nt, Homo sapiens
  misc_RNA (1)...(19): siRNA sense strand
cagagcaagccaagaacuu

SEQ ID NO: 1526651 - RNA, 19 nt, Homo sapiens
  misc_RNA (1)...(19): siRNA sense strand
uaauugcgcugcucuuccu

SEQ ID NO: 1526652 - RNA, 19 nt, Homo sapiens
  misc_RNA (1)...(19): siRNA sense strand
ggauggcagccuccaagug

SEQ ID NO: 1526653 - RNA, 19 nt, Homo sapiens
  misc_RNA (1)...(19): siRNA sense strand
agugaaacauaucagaaag

SEQ ID NO: 1526654 - RNA, 19 nt, Homo sapiens
  misc_RNA (1)...(19): siRNA sense strand
aagauaaacgagccagcua

SEQ ID NO: 1526655 - RNA, 19 nt, Homo sapiens
  misc_RNA (1)...(19): siRNA sense strand
ggaaaagcaagauaaacga

SEQ ID NO: 1526656 - RNA, 19 nt, Homo sapiens
  misc_RNA (1)...(19): siRNA sense strand
aaagaagcaggcgaagaaa

SEQ ID NO: 1526657 - RNA, 19 nt, Homo sapiens
  misc_RNA (1)...(19): siRNA sense strand
ggcaggaguucgucagcua

SEQ ID NO: 1526658 - RNA, 19 nt, Homo sapiens
  misc_RNA (1)...(19): siRNA sense strand
caacgacuaccgaaauuuc

SEQ ID NO: 1526659 - RNA, 19 nt, Homo sapiens
  misc_RNA (1)...(19): siRNA sense strand
ccagagcgauggccgaagu

SEQ ID NO: 1526660 - RNA, 19 nt, Homo sapiens
  misc_RNA (1)...(19): siRNA sense strand
cuaccgaaauuucaacaag

SEQ ID NO: 1526661 - RNA, 19 nt, Homo sapiens
  misc_RNA (1)...(19): siRNA sense strand
uaccgaaauuucaacaaga

SEQ ID NO: 1526662 - RNA, 19 nt, Homo sapiens
  misc_RNA (1)...(19): siRNA sense strand
cccaacgacuaccgaaauu

SEQ ID NO: 1526663 - RNA, 19 nt, Homo sapiens
  misc_RNA (1)...(19): siRNA sense strand
ggaacuccuccgucucaga

SEQ ID NO: 1526664 - RNA, 19 nt, Homo sapiens
  misc_RNA (1)...(19): siRNA sense strand
ggucccuccucuuccagaa

SEQ ID NO: 1526665 - RNA, 19 nt, Homo sapiens
  misc_RNA (1)...(19): siRNA sense strand
ccaacgacuaccgaaauuu

SEQ ID NO: 1526666 - RNA, 19 nt, Homo sapiens
  misc_RNA (1)...(19): siRNA sense strand
gaugauggaggagcuguca

SEQ ID NO: 1526667 - RNA, 19 nt, Homo sapiens
  misc_RNA (1)...(19): siRNA sense strand
gauggaggagcugucacua

SEQ ID NO: 1526668 - RNA, 19 nt, Homo sapiens
  misc_RNA (1)...(19): siRNA sense strand
gagcagaaggggccaguga

SEQ ID NO: 1526669 - RNA, 19 nt, Homo sapiens
  misc_RNA (1)...(19): siRNA sense strand
gaaguugccugucuacaug

SEQ ID NO: 1526670 - RNA, 19 nt, Homo sapiens
  misc_RNA (1)...(19): siRNA sense strand
gauugcagcuggaguauga

SEQ ID NO: 1526671 - RNA, 19 nt, Homo sapiens
  misc_RNA (1)...(19): siRNA sense strand
ccacacaacuuauaaaaug

SEQ ID NO: 1526672 - RNA, 19 nt, Homo sapiens
  misc_RNA (1)...(19): siRNA sense strand
agaacauccuccucuauuu

SEQ ID NO: 1526673 - RNA, 19 nt, Homo sapiens
  misc_RNA (1)...(19): siRNA sense strand
gcugucaggugguaucaga

SEQ ID NO: 1526674 - RNA, 19 nt, Homo sapiens
  misc_RNA (1)...(19): siRNA sense strand
cuacgaggcggaauucuuu

SEQ ID NO: 1526675 - RNA, 19 nt, Homo sapiens
  misc_RNA (1)...(19): siRNA sense strand
cuucuccgcugaugaguuu

SEQ ID NO: 1526676 - RNA, 19 nt, Homo sapiens
  misc_RNA (1)...(19): siRNA sense strand
gcaacgagagugugaagau

SEQ ID NO: 1526677 - RNA, 19 nt, Homo sapiens
  misc_RNA (1)...(19): siRNA sense strand
gccaagugcugucagaaca

SEQ ID NO: 1526678 - RNA, 19 nt, Homo sapiens
  misc_RNA (1)...(19): siRNA sense strand
ccgcucaggugauggauug

SEQ ID NO: 1526679 - RNA, 19 nt, Homo sapiens
  misc_RNA (1)...(19): siRNA sense strand
cagaacauccuccucuauu

SEQ ID NO: 1526680 - RNA, 19 nt, Homo sapiens
  misc_RNA (1)...(19): siRNA sense strand
gaacauccuccucuauuuu

SEQ ID NO: 1526681 - RNA, 19 nt, Homo sapiens
  misc_RNA (1)...(19): siRNA sense strand
cuuccucucuuguuacuuu

SEQ ID NO: 1526682 - RNA, 19 nt, Homo sapiens
  misc_RNA (1)...(19): siRNA sense strand
gcccauggcguguuucuga

SEQ ID NO: 1526683 - RNA, 19 nt, Homo sapiens
  misc_RNA (1)...(19): siRNA sense strand
gaacaaccaggucaucaac

SEQ ID NO: 1526684 - RNA, 19 nt, Homo sapiens
  misc_RNA (1)...(19): siRNA sense strand
caacgagagugugaagauc

SEQ ID NO: 1526685 - RNA, 19 nt, Homo sapiens
  misc_RNA (1)...(19): siRNA sense strand
gcgacucggugcccaacuu

SEQ ID NO: 1526686 - RNA, 19 nt, Homo sapiens
  misc_RNA (1)...(19): siRNA sense strand
uuuguuuccucucggauua

SEQ ID NO: 1526687 - RNA, 19 nt, Homo sapiens
  misc_RNA (1)...(19): siRNA sense strand
ggguguuccugacaagauu

SEQ ID NO: 1526688 - RNA, 19 nt, Homo sapiens
  misc_RNA (1)...(19): siRNA sense strand
gguccugagccuccuauuu

SEQ ID NO: 1526689 - RNA, 19 nt, Homo sapiens
  misc_RNA (1)...(19): siRNA sense strand
gucagaacauccuccucua

SEQ ID NO: 1526690 - RNA, 19 nt, Homo sapiens
  misc_RNA (1)...(19): siRNA sense strand
gaggccaagugcugucaga

SEQ ID NO: 1526691 - RNA, 19 nt, Homo sapiens
  misc_RNA (1)...(19): siRNA sense strand
cgucagcggccaacaagaa

SEQ ID NO: 1526692 - RNA, 19 nt, Homo sapiens
  misc_RNA (1)...(19): siRNA sense strand
gagccaauccgcugacaag

SEQ ID NO: 1526693 - RNA, 19 nt, Homo sapiens
  misc_RNA (1)...(19): siRNA sense strand
gagaacaaccaggucauca

SEQ ID NO: 1526694 - RNA, 19 nt, Homo sapiens
  misc_RNA (1)...(19): siRNA sense strand
cugcgacacuuuccugaga

SEQ ID NO: 1526695 - RNA, 19 nt, Homo sapiens
  misc_RNA (1)...(19): siRNA sense strand
caaccucaccacccaguau

SEQ ID NO: 1526696 - RNA, 19 nt, Homo sapiens
  misc_RNA (1)...(19): siRNA sense strand
caagugcugucagaacauc

SEQ ID NO: 1526697 - RNA, 19 nt, Homo sapiens
  misc_RNA (1)...(19): siRNA sense strand
cgacuggacuuccguuucc

SEQ ID NO: 1526698 - RNA, 19 nt, Homo sapiens
  misc_RNA (1)...(19): siRNA sense strand
guucugcuaugcugugcuu

SEQ ID NO: 1526699 - RNA, 19 nt, Homo sapiens
  misc_RNA (1)...(19): siRNA sense strand
uguacacgcucacccaugu

SEQ ID NO: 1526700 - RNA, 19 nt, Homo sapiens
  misc_RNA (1)...(19): siRNA sense strand
cgacacuucuccgcugaug

SEQ ID NO: 1526701 - RNA, 19 nt, Homo sapiens
  misc_RNA (1)...(19): siRNA sense strand
uauacccucugguucuuug

SEQ ID NO: 1526702 - RNA, 19 nt, Homo sapiens
  misc_RNA (1)...(19): siRNA sense strand
gcagcuggaguaugagaug

SEQ ID NO: 1526703 - RNA, 19 nt, Homo sapiens
  misc_RNA (1)...(19): siRNA sense strand
ucuucuuccucucuuguua

SEQ ID NO: 1526704 - RNA, 19 nt, Homo sapiens
  misc_RNA (1)...(19): siRNA sense strand
caacuucacggagcucuuc

SEQ ID NO: 1526705 - RNA, 19 nt, Homo sapiens
  misc_RNA (1)...(19): siRNA sense strand
ugaccuuccuccucaucuu

SEQ ID NO: 1526706 - RNA, 19 nt, Homo sapiens
  misc_RNA (1)...(19): siRNA sense strand
ugaaguugccugucuacau

SEQ ID NO: 1526707 - RNA, 19 nt, Homo sapiens
  misc_RNA (1)...(19): siRNA sense strand
ggacuggguguuccugaca

SEQ ID NO: 1526708 - RNA, 19 nt, Homo sapiens
  misc_RNA (1)...(19): siRNA sense strand
acaagaacuucccguacca

SEQ ID NO: 1526709 - RNA, 19 nt, Homo sapiens
  misc_RNA (1)...(19): siRNA sense strand
ggagaacaaccaggucauc

SEQ ID NO: 1526710 - RNA, 19 nt, Homo sapiens
  misc_RNA (1)...(19): siRNA sense strand
gcccuucuuugcugccuau

SEQ ID NO: 1526711 - RNA, 19 nt, Homo sapiens
  misc_RNA (1)...(19): siRNA sense strand
gcuccacacaacuuauaaa

SEQ ID NO: 1526712 - RNA, 19 nt, Homo sapiens
  misc_RNA (1)...(19): siRNA sense strand
agacagaugugaccuuccu

SEQ ID NO: 1526713 - RNA, 19 nt, Homo sapiens
  misc_RNA (1)...(19): siRNA sense strand
ucagaacauccuccucuau

SEQ ID NO: 1526714 - RNA, 19 nt, Homo sapiens
  misc_RNA (1)...(19): siRNA sense strand
cauggcguguuucugauca

SEQ ID NO: 1526715 - RNA, 19 nt, Homo sapiens
  misc_RNA (1)...(19): siRNA sense strand
ccuauacccucugguucuu

SEQ ID NO: 1526716 - RNA, 19 nt, Homo sapiens
  misc_RNA (1)...(19): siRNA sense strand
caaggaggacuggguguuc

SEQ ID NO: 1526717 - RNA, 19 nt, Homo sapiens
  misc_RNA (1)...(19): siRNA sense strand
guccugagccuccuauuuu

SEQ ID NO: 1526718 - RNA, 19 nt, Homo sapiens
  misc_RNA (1)...(19): siRNA sense strand
gacuggguguuccugacaa

SEQ ID NO: 1526719 - RNA, 19 nt, Homo sapiens
  misc_RNA (1)...(19): siRNA sense strand
ccgugaaguugccugucua

SEQ ID NO: 1526720 - RNA, 19 nt, Homo sapiens
  misc_RNA (1)...(19): siRNA sense strand
uggccaagcugcucuucuc

SEQ ID NO: 1526721 - RNA, 19 nt, Homo sapiens
  misc_RNA (1)...(19): siRNA sense strand
agaacaaccaggucaucaa

SEQ ID NO: 1526722 - RNA, 19 nt, Homo sapiens
  misc_RNA (1)...(19): siRNA sense strand
cauggccgcagcaggagua

SEQ ID NO: 1526723 - RNA, 19 nt, Homo sapiens
  misc_RNA (1)...(19): siRNA sense strand
caucuucauccucaucuuc

SEQ ID NO: 1526724 - RNA, 19 nt, Homo sapiens
  misc_RNA (1)...(19): siRNA sense strand
auucugggcucccgcuguu

SEQ ID NO: 1526725 - RNA, 19 nt, Homo sapiens
  misc_RNA (1)...(19): siRNA sense strand
gcgacacuuuccugagaag

SEQ ID NO: 1526726 - RNA, 19 nt, Homo sapiens
  misc_RNA (1)...(19): siRNA sense strand
cuuuggauauuugcugaaa

SEQ ID NO: 1526727 - RNA, 19 nt, Homo sapiens
  misc_RNA (1)...(19): siRNA sense strand
guccggcugucagguggua

SEQ ID NO: 1526728 - RNA, 19 nt, Homo sapiens
  misc_RNA (1)...(19): siRNA sense strand
ccaaggaggacuggguguu

SEQ ID NO: 1526729 - RNA, 19 nt, Homo sapiens
  misc_RNA (1)...(19): siRNA sense strand
acgagagugugaagaucuu

SEQ ID NO: 1526730 - RNA, 19 nt, Homo sapiens
  misc_RNA (1)...(19): siRNA sense strand
ggccaaggagucagugauc

SEQ ID NO: 1526731 - RNA, 19 nt, Homo sapiens
  misc_RNA (1)...(19): siRNA sense strand
gaccuuccuccucaucuuc

SEQ ID NO: 1526732 - RNA, 19 nt, Homo sapiens
  misc_RNA (1)...(19): siRNA sense strand
ggagagaaaucguacagaa

SEQ ID NO: 1526733 - RNA, 19 nt, Homo sapiens
  misc_RNA (1)...(19): siRNA sense strand
agaaagaccuuaugaaugu

SEQ ID NO: 1526734 - RNA, 19 nt, Homo sapiens
  misc_RNA (1)...(19): siRNA sense strand
ggaaaucguuuaaucacaa

SEQ ID NO: 1526735 - RNA, 19 nt, Homo sapiens
  misc_RNA (1)...(19): siRNA sense strand
gaacacaacacaaucagaa

SEQ ID NO: 1526736 - RNA, 19 nt, Homo sapiens
  misc_RNA (1)...(19): siRNA sense strand
agaaagaccuuaugagugu

SEQ ID NO: 1526737 - RNA, 19 nt, Homo sapiens
  misc_RNA (1)...(19): siRNA sense strand
agaaagaccuuaucagugu

SEQ ID NO: 1526738 - RNA, 19 nt, Homo sapiens
  misc_RNA (1)...(19): siRNA sense strand
ggagaaagaccuuaugaau

SEQ ID NO: 1526739 - RNA, 19 nt, Homo sapiens
  misc_RNA (1)...(19): siRNA sense strand
gaaagacccuaugagugua

SEQ ID NO: 1526740 - RNA, 19 nt, Homo sapiens
  misc_RNA (1)...(19): siRNA sense strand
guaaagaacuguaaauucc

SEQ ID NO: 1526741 - RNA, 19 nt, Homo sapiens
  misc_RNA (1)...(19): siRNA sense strand
gagaaagaccuuaugaaug

SEQ ID NO: 1526742 - RNA, 19 nt, Homo sapiens
  misc_RNA (1)...(19): siRNA sense strand
ggagaaagaccuuaugagu

SEQ ID NO: 1526743 - RNA, 19 nt, Homo sapiens
  misc_RNA (1)...(19): siRNA sense strand
ggagaaagaccuuaucagu

SEQ ID NO: 1526744 - RNA, 19 nt, Homo sapiens
  misc_RNA (1)...(19): siRNA sense strand
ggagaaagacaucaugaau

SEQ ID NO: 1526745 - RNA, 19 nt, Homo sapiens
  misc_RNA (1)...(19): siRNA sense strand
gaaaggccauaugagugua

SEQ ID NO: 1526746 - RNA, 19 nt, Homo sapiens
  misc_RNA (1)...(19): siRNA sense strand
ggagaaagacccuaugagu

SEQ ID NO: 1526747 - RNA, 19 nt, Homo sapiens
  misc_RNA (1)...(19): siRNA sense strand
gagaaugugggaaauguuu

SEQ ID NO: 1526748 - RNA, 19 nt, Homo sapiens
  misc_RNA (1)...(19): siRNA sense strand
gagaaugugggaaauguuu

SEQ ID NO: 1526749 - RNA, 19 nt, Homo sapiens
  misc_RNA (1)...(19): siRNA sense strand
ggagaaaggccauaugagu

SEQ ID NO: 1526750 - RNA, 19 nt, Homo sapiens
  misc_RNA (1)...(19): siRNA sense strand
acacuuauaucuucucuag

SEQ ID NO: 1526751 - RNA, 19 nt, Homo sapiens
  misc_RNA (1)...(19): siRNA sense strand
ggagaaaggccacaugagu

SEQ ID NO: 1526752 - RNA, 19 nt, Homo sapiens
  misc_RNA (1)...(19): siRNA sense strand
gagaaagacaucaugaaug

SEQ ID NO: 1526753 - RNA, 19 nt, Homo sapiens
  misc_RNA (1)...(19): siRNA sense strand
ggagaaaggccacaugagu

SEQ ID NO: 1526754 - RNA, 19 nt, Homo sapiens
  misc_RNA (1)...(19): siRNA sense strand
gcagacccuuucuauacaa

SEQ ID NO: 1526755 - RNA, 19 nt, Homo sapiens
  misc_RNA (1)...(19): siRNA sense strand
cauuaaacaucaacgaguu

SEQ ID NO: 1526756 - RNA, 19 nt, Homo sapiens
  misc_RNA (1)...(19): siRNA sense strand
gaaaccucauuaaacauca

SEQ ID NO: 1526757 - RNA, 19 nt, Homo sapiens
  misc_RNA (1)...(19): siRNA sense strand
gaaugugggaaaucguuua

SEQ ID NO: 1526758 - RNA, 19 nt, Homo sapiens
  misc_RNA (1)...(19): siRNA sense strand
gaaauucacuagcaaaagu

SEQ ID NO: 1526759 - RNA, 19 nt, Homo sapiens
  misc_RNA (1)...(19): siRNA sense strand
ugagauuacuccaacaaga

SEQ ID NO: 1526760 - RNA, 19 nt, Homo sapiens
  misc_RNA (1)...(19): siRNA sense strand
gagcaacucccaccuaaag

SEQ ID NO: 1526761 - RNA, 19 nt, Homo sapiens
  misc_RNA (1)...(19): siRNA sense strand
cuggagaaccugacacuua

SEQ ID NO: 1526762 - RNA, 19 nt, Homo sapiens
  misc_RNA (1)...(19): siRNA sense strand
agaaagacccuaugagugu

SEQ ID NO: 1526763 - RNA, 19 nt, Homo sapiens
  misc_RNA (1)...(19): siRNA sense strand
gcaugugggaaguuauuua

SEQ ID NO: 1526764 - RNA, 19 nt, Homo sapiens
  misc_RNA (1)...(19): siRNA sense strand
gaaccugacacuuauaucu

SEQ ID NO: 1526765 - RNA, 19 nt, Homo sapiens
  misc_RNA (1)...(19): siRNA sense strand
gcagcacauuggagagaaa

SEQ ID NO: 1526766 - RNA, 19 nt, Homo sapiens
  misc_RNA (1)...(19): siRNA sense strand
ggaaaccucauuaaacauc

SEQ ID NO: 1526767 - RNA, 19 nt, Homo sapiens
  misc_RNA (1)...(19): siRNA sense strand
gagaauguggaaaguguuu

SEQ ID NO: 1526768 - RNA, 19 nt, Homo sapiens
  misc_RNA (1)...(19): siRNA sense strand
uggagaaccugacacuuau

SEQ ID NO: 1526769 - RNA, 19 nt, Homo sapiens
  misc_RNA (1)...(19): siRNA sense strand
agggaaaccucauuaaaca

SEQ ID NO: 1526770 - RNA, 19 nt, Homo sapiens
  misc_RNA (1)...(19): siRNA sense strand
ggacagguguauguaccaa

SEQ ID NO: 1526771 - RNA, 19 nt, Homo sapiens
  misc_RNA (1)...(19): siRNA sense strand
aaagggaaaccucauuaaa

SEQ ID NO: 1526772 - RNA, 19 nt, Homo sapiens
  misc_RNA (1)...(19): siRNA sense strand
gaaaucguuuaaucacaag

SEQ ID NO: 1526773 - RNA, 19 nt, Homo sapiens
  misc_RNA (1)...(19): siRNA sense strand
ggaaaucuuuuagccauaa

SEQ ID NO: 1526774 - RNA, 19 nt, Homo sapiens
  misc_RNA (1)...(19): siRNA sense strand
gaccuuauguaugcaguga

SEQ ID NO: 1526775 - RNA, 19 nt, Homo sapiens
  misc_RNA (1)...(19): siRNA sense strand
ccauaugaguguagagaau

SEQ ID NO: 1526776 - RNA, 19 nt, Homo sapiens
  misc_RNA (1)...(19): siRNA sense strand
gaacuguaaauuccauaug

SEQ ID NO: 1526777 - RNA, 19 nt, Homo sapiens
  misc_RNA (1)...(19): siRNA sense strand
gggaaaucguuuaaucaca

SEQ ID NO: 1526778 - RNA, 19 nt, Homo sapiens
  misc_RNA (1)...(19): siRNA sense strand
uaagcagacccuuucuaua

SEQ ID NO: 1526779 - RNA, 19 nt, Homo sapiens
  misc_RNA (1)...(19): siRNA sense strand
cauaagcacagucuuguug

SEQ ID NO: 1526780 - RNA, 19 nt, Homo sapiens
  misc_RNA (1)...(19): siRNA sense strand
aagaggacauucacacuuc

SEQ ID NO: 1526781 - RNA, 19 nt, Homo sapiens
  misc_RNA (1)...(19): siRNA sense strand
gagaaccugacacuuauau

SEQ ID NO: 1526782 - RNA, 19 nt, Homo sapiens
  misc_RNA (1)...(19): siRNA sense strand
gcagugauucugggaaauu

SEQ ID NO: 1526783 - RNA, 19 nt, Homo sapiens
  misc_RNA (1)...(19): siRNA sense strand
ggaugacgaugcaaaccau

SEQ ID NO: 1526784 - RNA, 19 nt, Homo sapiens
  misc_RNA (1)...(19): siRNA sense strand
gagaaugugggaaaucguu

SEQ ID NO: 1526785 - RNA, 19 nt, Homo sapiens
  misc_RNA (1)...(19): siRNA sense strand
gaaagaccuuaugaaugug

SEQ ID NO: 1526786 - RNA, 19 nt, Homo sapiens
  misc_RNA (1)...(19): siRNA sense strand
caugagccauuuaucuuuc

SEQ ID NO: 1526787 - RNA, 19 nt, Homo sapiens
  misc_RNA (1)...(19): siRNA sense strand
ggagaaccugacacuuaua

SEQ ID NO: 1526788 - RNA, 19 nt, Homo sapiens
  misc_RNA (1)...(19): siRNA sense strand
uagagaaugugggaaaugu

SEQ ID NO: 1526789 - RNA, 19 nt, Homo sapiens
  misc_RNA (1)...(19): siRNA sense strand
uggagaaugugauaaaucu

SEQ ID NO: 1526790 - RNA, 19 nt, Homo sapiens
  misc_RNA (1)...(19): siRNA sense strand
gaccagaagcagcacauug

SEQ ID NO: 1526791 - RNA, 19 nt, Homo sapiens
  misc_RNA (1)...(19): siRNA sense strand
caagaggacauucacacuu

SEQ ID NO: 1526792 - RNA, 19 nt, Homo sapiens
  misc_RNA (1)...(19): siRNA sense strand
caaaagggaaaccucauua

SEQ ID NO: 1526793 - RNA, 19 nt, Homo sapiens
  misc_RNA (1)...(19): siRNA sense strand
gcagucucauucaacauca

SEQ ID NO: 1526794 - RNA, 19 nt, Homo sapiens
  misc_RNA (1)...(19): siRNA sense strand
uaaaggaacaccagagagu

SEQ ID NO: 1526795 - RNA, 19 nt, Homo sapiens
  misc_RNA (1)...(19): siRNA sense strand
cauaagcgcagccuuguuc

SEQ ID NO: 1526796 - RNA, 19 nt, Homo sapiens
  misc_RNA (1)...(19): siRNA sense strand
gagaaaucguacagaagca

SEQ ID NO: 1526797 - RNA, 19 nt, Homo sapiens
  misc_RNA (1)...(19): siRNA sense strand
gcaacucccaccuaaagga

SEQ ID NO: 1526798 - RNA, 19 nt, Homo sapiens
  misc_RNA (1)...(19): siRNA sense strand
aagcagacccuuucuauac

SEQ ID NO: 1526799 - RNA, 19 nt, Homo sapiens
  misc_RNA (1)...(19): siRNA sense strand
ugacgaaugugggaaaucu

SEQ ID NO: 1526800 - RNA, 19 nt, Homo sapiens
  misc_RNA (1)...(19): siRNA sense strand
uuaugaaugugacgaaugu

SEQ ID NO: 1526801 - RNA, 19 nt, Homo sapiens
  misc_RNA (1)...(19): siRNA sense strand
ccacaauaccguuuagcaa

SEQ ID NO: 1526802 - RNA, 19 nt, Homo sapiens
  misc_RNA (1)...(19): siRNA sense strand
uggagaauguggaaagugu

SEQ ID NO: 1526803 - RNA, 19 nt, Homo sapiens
  misc_RNA (1)...(19): siRNA sense strand
gcacagucuuguugaccau

SEQ ID NO: 1526804 - RNA, 19 nt, Homo sapiens
  misc_RNA (1)...(19): siRNA sense strand
cuaagcagacccuuucuau

SEQ ID NO: 1526805 - RNA, 19 nt, Homo sapiens
  misc_RNA (1)...(19): siRNA sense strand
acaauaccguuuagcaaca

SEQ ID NO: 1526806 - RNA, 19 nt, Homo sapiens
  misc_RNA (1)...(19): siRNA sense strand
guaaauuccauaugucaca

SEQ ID NO: 1526807 - RNA, 19 nt, Homo sapiens
  misc_RNA (1)...(19): siRNA sense strand
ugugggaaguuauuuagga

SEQ ID NO: 1526808 - RNA, 19 nt, Homo sapiens
  misc_RNA (1)...(19): siRNA sense strand
ccuuauguaugcagugauu

SEQ ID NO: 1526809 - RNA, 19 nt, Homo sapiens
  misc_RNA (1)...(19): siRNA sense strand
uaucuucucuagguuguug

SEQ ID NO: 1526810 - RNA, 19 nt, Homo sapiens
  misc_RNA (1)...(19): siRNA sense strand
acagguguauguaccaaga

SEQ ID NO: 1526811 - RNA, 19 nt, Homo sapiens
  misc_RNA (1)...(19): siRNA sense strand
aaagggcagucucauucaa

SEQ ID NO: 1526812 - RNA, 19 nt, Homo sapiens
  misc_RNA (1)...(19): siRNA sense strand
ucacaugagccauuuaucu

SEQ ID NO: 1526813 - RNA, 19 nt, Homo sapiens
  misc_RNA (1)...(19): siRNA sense strand
gggagaaagacaucaugaa

SEQ ID NO: 1526814 - RNA, 19 nt, Homo sapiens
  misc_RNA (1)...(19): siRNA sense strand
gcaaccucauucagcauca

SEQ ID NO: 1526815 - RNA, 19 nt, Homo sapiens
  misc_RNA (1)...(19): siRNA sense strand
ugugggaaaucguuuaauc

SEQ ID NO: 1526816 - RNA, 19 nt, Homo sapiens
  misc_RNA (1)...(19): siRNA sense strand
cacaacacaaucagaaauu

SEQ ID NO: 1526817 - RNA, 19 nt, Homo sapiens
  misc_RNA (1)...(19): siRNA sense strand
ccagggaacacaacacaau

SEQ ID NO: 1526818 - RNA, 19 nt, Homo sapiens
  misc_RNA (1)...(19): siRNA sense strand
ucacaagugcaaccucauu

SEQ ID NO: 1526819 - RNA, 19 nt, Homo sapiens
  misc_RNA (1)...(19): siRNA sense strand
gagagaaaucguacagaag

SEQ ID NO: 1526820 - RNA, 19 nt, Homo sapiens
  misc_RNA (1)...(19): siRNA sense strand
agucacaccucacugaaca

SEQ ID NO: 1526821 - RNA, 19 nt, Homo sapiens
  misc_RNA (1)...(19): siRNA sense strand
guaaagaauguaggaaauc

SEQ ID NO: 1526822 - RNA, 19 nt, Homo sapiens
  misc_RNA (1)...(19): siRNA sense strand
caacucccaccuaaaggaa

SEQ ID NO: 1526823 - RNA, 19 nt, Homo sapiens
  misc_RNA (1)...(19): siRNA sense strand
ggaaguuauuuaggagcaa

SEQ ID NO: 1526824 - RNA, 19 nt, Homo sapiens
  misc_RNA (1)...(19): siRNA sense strand
caauaccguuuagcaacaa

SEQ ID NO: 1526825 - RNA, 19 nt, Homo sapiens
  misc_RNA (1)...(19): siRNA sense strand
gagauuacuccaacaagag

SEQ ID NO: 1526826 - RNA, 19 nt, Homo sapiens
  misc_RNA (1)...(19): siRNA sense strand
ggaacacaacacaaucaga

SEQ ID NO: 1526827 - RNA, 19 nt, Homo sapiens
  misc_RNA (1)...(19): siRNA sense strand
gaaaucguacagaagcaau

SEQ ID NO: 1526828 - RNA, 19 nt, Homo sapiens
  misc_RNA (1)...(19): siRNA sense strand
caagggaacaucuuuugua

SEQ ID NO: 1526829 - RNA, 19 nt, Homo sapiens
  misc_RNA (1)...(19): siRNA sense strand
acuuauaucuucucuaggu

SEQ ID NO: 1526830 - RNA, 19 nt, Homo sapiens
  misc_RNA (1)...(19): siRNA sense strand
gaguguggagaaugugaua

SEQ ID NO: 1526831 - RNA, 19 nt, Homo sapiens
  misc_RNA (1)...(19): siRNA sense strand
cacaugagccauuuaucuu

SEQ ID NO: 1526832 - RNA, 19 nt, Homo sapiens
  misc_RNA (1)...(19): siRNA sense strand
gaaaggaacugcugaggaa

SEQ ID NO: 1526833 - RNA, 19 nt, Homo sapiens
  misc_RNA (1)...(19): siRNA sense strand
gagaagcuguuugcuguua

SEQ ID NO: 1526834 - RNA, 19 nt, Homo sapiens
  misc_RNA (1)...(19): siRNA sense strand
ucagaagggugaugaguuu

SEQ ID NO: 1526835 - RNA, 19 nt, Homo sapiens
  misc_RNA (1)...(19): siRNA sense strand
acaagaagcuguacugcaa

SEQ ID NO: 1526836 - RNA, 19 nt, Homo sapiens
  misc_RNA (1)...(19): siRNA sense strand
gcagaauucuuacuucaca

SEQ ID NO: 1526837 - RNA, 19 nt, Homo sapiens
  misc_RNA (1)...(19): siRNA sense strand
gacgacaccucccucagua

SEQ ID NO: 1526838 - RNA, 19 nt, Homo sapiens
  misc_RNA (1)...(19): siRNA sense strand
gagaccacaugcacccuua

SEQ ID NO: 1526839 - RNA, 19 nt, Homo sapiens
  misc_RNA (1)...(19): siRNA sense strand
gaagcuguuugcuguuaaa

SEQ ID NO: 1526840 - RNA, 19 nt, Homo sapiens
  misc_RNA (1)...(19): siRNA sense strand
gaagaaagucucugcaagu

SEQ ID NO: 1526841 - RNA, 19 nt, Homo sapiens
  misc_RNA (1)...(19): siRNA sense strand
gcuguuugcuguuaaaugu

SEQ ID NO: 1526842 - RNA, 19 nt, Homo sapiens
  misc_RNA (1)...(19): siRNA sense strand
gagcgaagaugaagaagcu

SEQ ID NO: 1526843 - RNA, 19 nt, Homo sapiens
  misc_RNA (1)...(19): siRNA sense strand
gcaaguaugacuacgagaa

SEQ ID NO: 1526844 - RNA, 19 nt, Homo sapiens
  misc_RNA (1)...(19): siRNA sense strand
ucaguaaccugggugauug

SEQ ID NO: 1526845 - RNA, 19 nt, Homo sapiens
  misc_RNA (1)...(19): siRNA sense strand
gccuaaagauggaggagaa

SEQ ID NO: 1526846 - RNA, 19 nt, Homo sapiens
  misc_RNA (1)...(19): siRNA sense strand
caacagaggcgagcauuca

SEQ ID NO: 1526847 - RNA, 19 nt, Homo sapiens
  misc_RNA (1)...(19): siRNA sense strand
uaaccugggugauuguuuc

SEQ ID NO: 1526848 - RNA, 19 nt, Homo sapiens
  misc_RNA (1)...(19): siRNA sense strand
gaaccaucuugacaacuca

SEQ ID NO: 1526849 - RNA, 19 nt, Homo sapiens
  misc_RNA (1)...(19): siRNA sense strand
gugaugaguuuguccugaa

SEQ ID NO: 1526850 - RNA, 19 nt, Homo sapiens
  misc_RNA (1)...(19): siRNA sense strand
caaggccucauuugaagua

SEQ ID NO: 1526851 - RNA, 19 nt, Homo sapiens
  misc_RNA (1)...(19): siRNA sense strand
ggccaucgcucccaaugag

SEQ ID NO: 1526852 - RNA, 19 nt, Homo sapiens
  misc_RNA (1)...(19): siRNA sense strand
gaagggugaugaguuuguc

SEQ ID NO: 1526853 - RNA, 19 nt, Homo sapiens
  misc_RNA (1)...(19): siRNA sense strand
cgagaaccaucuugacaac

SEQ ID NO: 1526854 - RNA, 19 nt, Homo sapiens
  misc_RNA (1)...(19): siRNA sense strand
guccaggugugguuccaaa

SEQ ID NO: 1526855 - RNA, 19 nt, Homo sapiens
  misc_RNA (1)...(19): siRNA sense strand
ggugauuguuuccuagcaa

SEQ ID NO: 1526856 - RNA, 19 nt, Homo sapiens
  misc_RNA (1)...(19): siRNA sense strand
gugcugggauggaaggaau

SEQ ID NO: 1526857 - RNA, 19 nt, Homo sapiens
  misc_RNA (1)...(19): siRNA sense strand
gcagcaagaucagcagaac

SEQ ID NO: 1526858 - RNA, 19 nt, Homo sapiens
  misc_RNA (1)...(19): siRNA sense strand
ggagaccaccugcuucuac

SEQ ID NO: 1526859 - RNA, 19 nt, Homo sapiens
  misc_RNA (1)...(19): siRNA sense strand
gaggaaggcaaggaccaua

SEQ ID NO: 1526860 - RNA, 19 nt, Homo sapiens
  misc_RNA (1)...(19): siRNA sense strand
gagcauucaaggccucauu

SEQ ID NO: 1526861 - RNA, 19 nt, Homo sapiens
  misc_RNA (1)...(19): siRNA sense strand
agaagcuguuugcuguuaa

SEQ ID NO: 1526862 - RNA, 19 nt, Homo sapiens
  misc_RNA (1)...(19): siRNA sense strand
caugcagaauucuuacuuc

SEQ ID NO: 1526863 - RNA, 19 nt, Homo sapiens
  misc_RNA (1)...(19): siRNA sense strand
gggauggaaggaaucauga

SEQ ID NO: 1526864 - RNA, 19 nt, Homo sapiens
  misc_RNA (1)...(19): siRNA sense strand
agagagcgaagaugaagaa

SEQ ID NO: 1526865 - RNA, 19 nt, Homo sapiens
  misc_RNA (1)...(19): siRNA sense strand
aagaaagucucugcaaguc

SEQ ID NO: 1526866 - RNA, 19 nt, Homo sapiens
  misc_RNA (1)...(19): siRNA sense strand
agaaccaucuugacaacuc

SEQ ID NO: 1526867 - RNA, 19 nt, Homo sapiens
  misc_RNA (1)...(19): siRNA sense strand
ggucaucuuggacagguuu

SEQ ID NO: 1526868 - RNA, 19 nt, Homo sapiens
  misc_RNA (1)...(19): siRNA sense strand
gcauucaaggccucauuug

SEQ ID NO: 1526869 - RNA, 19 nt, Homo sapiens
  misc_RNA (1)...(19): siRNA sense strand
gcaaaggggacuaugagaa

SEQ ID NO: 1526870 - RNA, 19 nt, Homo sapiens
  misc_RNA (1)...(19): siRNA sense strand
auucuuacuucacaucuug

SEQ ID NO: 1526871 - RNA, 19 nt, Homo sapiens
  misc_RNA (1)...(19): siRNA sense strand
ccugggugauuguuuccua

SEQ ID NO: 1526872 - RNA, 19 nt, Homo sapiens
  misc_RNA (1)...(19): siRNA sense strand
uaaagauggaggagaacuu

SEQ ID NO: 1526873 - RNA, 19 nt, Homo sapiens
  misc_RNA (1)...(19): siRNA sense strand
aaccagagagcgaagauga

SEQ ID NO: 1526874 - RNA, 19 nt, Homo sapiens
  misc_RNA (1)...(19): siRNA sense strand
ggaaggcaaggaccauaag

SEQ ID NO: 1526875 - RNA, 19 nt, Homo sapiens
  misc_RNA (1)...(19): siRNA sense strand
uguacuccaugcagaauuc

SEQ ID NO: 1526876 - RNA, 19 nt, Homo sapiens
  misc_RNA (1)...(19): siRNA sense strand
gcuggacggccuaaagaug

SEQ ID NO: 1526877 - RNA, 19 nt, Homo sapiens
  misc_RNA (1)...(19): siRNA sense strand
cgacgacaccucccucagu

SEQ ID NO: 1526878 - RNA, 19 nt, Homo sapiens
  misc_RNA (1)...(19): siRNA sense strand
ggauggaaggaaucaugaa

SEQ ID NO: 1526879 - RNA, 19 nt, Homo sapiens
  misc_RNA (1)...(19): siRNA sense strand
cauuugaaguauccuccaa

SEQ ID NO: 1526880 - RNA, 19 nt, Homo sapiens
  misc_RNA (1)...(19): siRNA sense strand
caaguaugacuacgagaag

SEQ ID NO: 1526881 - RNA, 19 nt, Homo sapiens
  misc_RNA (1)...(19): siRNA sense strand
gaccacaugcacccuuaug

SEQ ID NO: 1526882 - RNA, 19 nt, Homo sapiens
  misc_RNA (1)...(19): siRNA sense strand
guaaccugggugauuguuu

SEQ ID NO: 1526883 - RNA, 19 nt, Homo sapiens
  misc_RNA (1)...(19): siRNA sense strand
ccgagaaccaucuugacaa

SEQ ID NO: 1526884 - RNA, 19 nt, Homo sapiens
  misc_RNA (1)...(19): siRNA sense strand
acuccaugcagaauucuua

SEQ ID NO: 1526885 - RNA, 19 nt, Homo sapiens
  misc_RNA (1)...(19): siRNA sense strand
ccacaugcacccuuauggu

SEQ ID NO: 1526886 - RNA, 19 nt, Homo sapiens
  misc_RNA (1)...(19): siRNA sense strand
ggaggagaacuuccaaagc

SEQ ID NO: 1526887 - RNA, 19 nt, Homo sapiens
  misc_RNA (1)...(19): siRNA sense strand
augcagaauucuuacuuca

SEQ ID NO: 1526888 - RNA, 19 nt, Homo sapiens
  misc_RNA (1)...(19): siRNA sense strand
ccaugcagaauucuuacuu

SEQ ID NO: 1526889 - RNA, 19 nt, Homo sapiens
  misc_RNA (1)...(19): siRNA sense strand
aagaagcuguacugcaagu

SEQ ID NO: 1526890 - RNA, 19 nt, Homo sapiens
  misc_RNA (1)...(19): siRNA sense strand
gggacaagaagcuguacug

SEQ ID NO: 1526891 - RNA, 19 nt, Homo sapiens
  misc_RNA (1)...(19): siRNA sense strand
aaagugaugaugaagaaag

SEQ ID NO: 1526892 - RNA, 19 nt, Homo sapiens
  misc_RNA (1)...(19): siRNA sense strand
gcucccaaugaguuuguua

SEQ ID NO: 1526893 - RNA, 19 nt, Homo sapiens
  misc_RNA (1)...(19): siRNA sense strand
ugacuacgagaagcuguuu

SEQ ID NO: 1526894 - RNA, 19 nt, Homo sapiens
  misc_RNA (1)...(19): siRNA sense strand
ccagagagcgaagaugaag

SEQ ID NO: 1526895 - RNA, 19 nt, Homo sapiens
  misc_RNA (1)...(19): siRNA sense strand
aaagauggaggagaacuuc

SEQ ID NO: 1526896 - RNA, 19 nt, Homo sapiens
  misc_RNA (1)...(19): siRNA sense strand
gcgagcgacagcuucagaa

SEQ ID NO: 1526897 - RNA, 19 nt, Homo sapiens
  misc_RNA (1)...(19): siRNA sense strand
guaaaagugaugaugaaga

SEQ ID NO: 1526898 - RNA, 19 nt, Homo sapiens
  misc_RNA (1)...(19): siRNA sense strand
gauggaaggaaucaugaac

SEQ ID NO: 1526899 - RNA, 19 nt, Homo sapiens
  misc_RNA (1)...(19): siRNA sense strand
ugggagugcugggauggaa

SEQ ID NO: 1526900 - RNA, 19 nt, Homo sapiens
  misc_RNA (1)...(19): siRNA sense strand
ggaaagaggccuuaugguu

SEQ ID NO: 1526901 - RNA, 19 nt, Homo sapiens
  misc_RNA (1)...(19): siRNA sense strand
gggaaauucuuuagguaua

SEQ ID NO: 1526902 - RNA, 19 nt, Homo sapiens
  misc_RNA (1)...(19): siRNA sense strand
ccaaagcccugucuaucua

SEQ ID NO: 1526903 - RNA, 19 nt, Homo sapiens
  misc_RNA (1)...(19): siRNA sense strand
gcaaagcagugcagugaau

SEQ ID NO: 1526904 - RNA, 19 nt, Homo sapiens
  misc_RNA (1)...(19): siRNA sense strand
gaaagguccacacucaaua

SEQ ID NO: 1526905 - RNA, 19 nt, Homo sapiens
  misc_RNA (1)...(19): siRNA sense strand
ggaaaggucuacacucagu

SEQ ID NO: 1526906 - RNA, 19 nt, Homo sapiens
  misc_RNA (1)...(19): siRNA sense strand
gggaaauucuuuauggaaa

SEQ ID NO: 1526907 - RNA, 19 nt, Homo sapiens
  misc_RNA (1)...(19): siRNA sense strand
acauguagcucacuucuga

SEQ ID NO: 1526908 - RNA, 19 nt, Homo sapiens
  misc_RNA (1)...(19): siRNA sense strand
cagcaaaugugggauauug

SEQ ID NO: 1526909 - RNA, 19 nt, Homo sapiens
  misc_RNA (1)...(19): siRNA sense strand
ggaggaagaccgacauuug

SEQ ID NO: 1526910 - RNA, 19 nt, Homo sapiens
  misc_RNA (1)...(19): siRNA sense strand
ucaaaccucuuuaggcauu

SEQ ID NO: 1526911 - RNA, 19 nt, Homo sapiens
  misc_RNA (1)...(19): siRNA sense strand
gggaaauucuucagcuuga

SEQ ID NO: 1526912 - RNA, 19 nt, Homo sapiens
  misc_RNA (1)...(19): siRNA sense strand
ggagaaaggccuuaugagu

SEQ ID NO: 1526913 - RNA, 19 nt, Homo sapiens
  misc_RNA (1)...(19): siRNA sense strand
ggagaaaggccuuaugagu

SEQ ID NO: 1526914 - RNA, 19 nt, Homo sapiens
  misc_RNA (1)...(19): siRNA sense strand
ggagaaaggccuuaugagu

SEQ ID NO: 1526915 - RNA, 19 nt, Homo sapiens
  misc_RNA (1)...(19): siRNA sense strand
ccacaaacauaaacuuucu

SEQ ID NO: 1526916 - RNA, 19 nt, Homo sapiens
  misc_RNA (1)...(19): siRNA sense strand
gagaacggccuuaugaaug

SEQ ID NO: 1526917 - RNA, 19 nt, Homo sapiens
  misc_RNA (1)...(19): siRNA sense strand
gaaugugggaaauuguuua

SEQ ID NO: 1526918 - RNA, 19 nt, Homo sapiens
  misc_RNA (1)...(19): siRNA sense strand
uugaagacguggccauaua

SEQ ID NO: 1526919 - RNA, 19 nt, Homo sapiens
  misc_RNA (1)...(19): siRNA sense strand
ggagaacggccuuaugaau

SEQ ID NO: 1526920 - RNA, 19 nt, Homo sapiens
  misc_RNA (1)...(19): siRNA sense strand
ggaaagguccacacucaau

SEQ ID NO: 1526921 - RNA, 19 nt, Homo sapiens
  misc_RNA (1)...(19): siRNA sense strand
gcaaaugugggauauuguu

SEQ ID NO: 1526922 - RNA, 19 nt, Homo sapiens
  misc_RNA (1)...(19): siRNA sense strand
gaaugugggaaguucuuua

SEQ ID NO: 1526923 - RNA, 19 nt, Homo sapiens
  misc_RNA (1)...(19): siRNA sense strand
gaccgacauuugugaagaa

SEQ ID NO: 1526924 - RNA, 19 nt, Homo sapiens
  misc_RNA (1)...(19): siRNA sense strand
gugggaaauucuuuaggua

SEQ ID NO: 1526925 - RNA, 19 nt, Homo sapiens
  misc_RNA (1)...(19): siRNA sense strand
ggaagaccgacauuuguga

SEQ ID NO: 1526926 - RNA, 19 nt, Homo sapiens
  misc_RNA (1)...(19): siRNA sense strand
gggauauuguuuauggaaa

SEQ ID NO: 1526927 - RNA, 19 nt, Homo sapiens
  misc_RNA (1)...(19): siRNA sense strand
cagauuagagagaaacuuu

SEQ ID NO: 1526928 - RNA, 19 nt, Homo sapiens
  misc_RNA (1)...(19): siRNA sense strand
gaagacguggccauauauu

SEQ ID NO: 1526929 - RNA, 19 nt, Homo sapiens
  misc_RNA (1)...(19): siRNA sense strand
ggaaguucuuuaagugcaa

SEQ ID NO: 1526930 - RNA, 19 nt, Homo sapiens
  misc_RNA (1)...(19): siRNA sense strand
ggaugaggaggcaccuuua

SEQ ID NO: 1526931 - RNA, 19 nt, Homo sapiens
  misc_RNA (1)...(19): siRNA sense strand
gcaaugaaugugggaaauu

SEQ ID NO: 1526932 - RNA, 19 nt, Homo sapiens
  misc_RNA (1)...(19): siRNA sense strand
gaggaagaccgacauuugu

SEQ ID NO: 1526933 - RNA, 19 nt, Homo sapiens
  misc_RNA (1)...(19): siRNA sense strand
ggauauuguuuauggaaag

SEQ ID NO: 1526934 - RNA, 19 nt, Homo sapiens
  misc_RNA (1)...(19): siRNA sense strand
gugggaaguucuuuaagug

SEQ ID NO: 1526935 - RNA, 19 nt, Homo sapiens
  misc_RNA (1)...(19): siRNA sense strand
cagcaaagcagugcaguga

SEQ ID NO: 1526936 - RNA, 19 nt, Homo sapiens
  misc_RNA (1)...(19): siRNA sense strand
gaagaccgacauuugugaa

SEQ ID NO: 1526937 - RNA, 19 nt, Homo sapiens
  misc_RNA (1)...(19): siRNA sense strand
gaaauccguccucauucaa

SEQ ID NO: 1526938 - RNA, 19 nt, Homo sapiens
  misc_RNA (1)...(19): siRNA sense strand
gguccacacucaauagaca

SEQ ID NO: 1526939 - RNA, 19 nt, Homo sapiens
  misc_RNA (1)...(19): siRNA sense strand
caaaugugggauauuguuu

SEQ ID NO: 1526940 - RNA, 19 nt, Homo sapiens
  misc_RNA (1)...(19): siRNA sense strand
gccuuuagccacaaacaua

SEQ ID NO: 1526941 - RNA, 19 nt, Homo sapiens
  misc_RNA (1)...(19): siRNA sense strand
ugugggaaauuguuuaugu

SEQ ID NO: 1526942 - RNA, 19 nt, Homo sapiens
  misc_RNA (1)...(19): siRNA sense strand
ggagcagauuagagagaaa

SEQ ID NO: 1526943 - RNA, 19 nt, Homo sapiens
  misc_RNA (1)...(19): siRNA sense strand
gaaaggucuacacucagua

SEQ ID NO: 1526944 - RNA, 19 nt, Homo sapiens
  misc_RNA (1)...(19): siRNA sense strand
ccacacucauuacacauca

SEQ ID NO: 1526945 - RNA, 19 nt, Homo sapiens
  misc_RNA (1)...(19): siRNA sense strand
gcuguaccgugaugugaug

SEQ ID NO: 1526946 - RNA, 19 nt, Homo sapiens
  misc_RNA (1)...(19): siRNA sense strand
agguauaacucuacacuuc

SEQ ID NO: 1526947 - RNA, 19 nt, Homo sapiens
  misc_RNA (1)...(19): siRNA sense strand
cgacauuugugaagaacca

SEQ ID NO: 1526948 - RNA, 19 nt, Homo sapiens
  misc_RNA (1)...(19): siRNA sense strand
cagugaaugugggaaauug

SEQ ID NO: 1526949 - RNA, 19 nt, Homo sapiens
  misc_RNA (1)...(19): siRNA sense strand
gugaugugaugcuggagaa

SEQ ID NO: 1526950 - RNA, 19 nt, Homo sapiens
  misc_RNA (1)...(19): siRNA sense strand
gaugugaugcuggagaauu

SEQ ID NO: 1526951 - RNA, 19 nt, Homo sapiens
  misc_RNA (1)...(19): siRNA sense strand
caaaccucuuuaggcauua

SEQ ID NO: 1526952 - RNA, 19 nt, Homo sapiens
  misc_RNA (1)...(19): siRNA sense strand
gugcaacucaaaccucuuu

SEQ ID NO: 1526953 - RNA, 19 nt, Homo sapiens
  misc_RNA (1)...(19): siRNA sense strand
guacacguguccagcacau

SEQ ID NO: 1526954 - RNA, 19 nt, Homo sapiens
  misc_RNA (1)...(19): siRNA sense strand
gcagugaaugugggaaauu

SEQ ID NO: 1526955 - RNA, 19 nt, Homo sapiens
  misc_RNA (1)...(19): siRNA sense strand
agagccagguguuucugua

SEQ ID NO: 1526956 - RNA, 19 nt, Homo sapiens
  misc_RNA (1)...(19): siRNA sense strand
uacaaagucccaccucauu

SEQ ID NO: 1526957 - RNA, 19 nt, Homo sapiens
  misc_RNA (1)...(19): siRNA sense strand
cuugaaauccguccucauu

SEQ ID NO: 1526958 - RNA, 19 nt, Homo sapiens
  misc_RNA (1)...(19): siRNA sense strand
gcagugaaugugggaaauu

SEQ ID NO: 1526959 - RNA, 19 nt, Homo sapiens
  misc_RNA (1)...(19): siRNA sense strand
guuccacacucauuacaca

SEQ ID NO: 1526960 - RNA, 19 nt, Homo sapiens
  misc_RNA (1)...(19): siRNA sense strand
gcagugaaugugggaaauu

SEQ ID NO: 1526961 - RNA, 19 nt, Homo sapiens
  misc_RNA (1)...(19): siRNA sense strand
caauagacaucagagaacu

SEQ ID NO: 1526962 - RNA, 19 nt, Homo sapiens
  misc_RNA (1)...(19): siRNA sense strand
acaaagucccaccucauuu

SEQ ID NO: 1526963 - RNA, 19 nt, Homo sapiens
  misc_RNA (1)...(19): siRNA sense strand
ugugggauauuguuuaugg

SEQ ID NO: 1526964 - RNA, 19 nt, Homo sapiens
  misc_RNA (1)...(19): siRNA sense strand
guauaacucuacacuucuc

SEQ ID NO: 1526965 - RNA, 19 nt, Homo sapiens
  misc_RNA (1)...(19): siRNA sense strand
ugugggaaauucuuuaugg

SEQ ID NO: 1526966 - RNA, 19 nt, Homo sapiens
  misc_RNA (1)...(19): siRNA sense strand
gaacucacacuggagaaag

SEQ ID NO: 1526967 - RNA, 19 nt, Homo sapiens
  misc_RNA (1)...(19): siRNA sense strand
agacguggccauauauuuc

SEQ ID NO: 1526968 - RNA, 19 nt, Homo sapiens
  misc_RNA (1)...(19): siRNA sense strand
ugugggaaguucuuuaagu

SEQ ID NO: 1526969 - RNA, 19 nt, Homo sapiens
  misc_RNA (1)...(19): siRNA sense strand
caguagacaucagagaguu

SEQ ID NO: 1526970 - RNA, 19 nt, Homo sapiens
  misc_RNA (1)...(19): siRNA sense strand
auggaaaggucuacacuca

SEQ ID NO: 1526971 - RNA, 19 nt, Homo sapiens
  misc_RNA (1)...(19): siRNA sense strand
gugggaaauucuuuaugga

SEQ ID NO: 1526972 - RNA, 19 nt, Homo sapiens
  misc_RNA (1)...(19): siRNA sense strand
gcuccaaagcccugucuau

SEQ ID NO: 1526973 - RNA, 19 nt, Homo sapiens
  misc_RNA (1)...(19): siRNA sense strand
ugaagacguggccauauau

SEQ ID NO: 1526974 - RNA, 19 nt, Homo sapiens
  misc_RNA (1)...(19): siRNA sense strand
agaacggccuuaugaaugc

SEQ ID NO: 1526975 - RNA, 19 nt, Homo sapiens
  misc_RNA (1)...(19): siRNA sense strand
gugggaaauuguuuaugug

SEQ ID NO: 1526976 - RNA, 19 nt, Homo sapiens
  misc_RNA (1)...(19): siRNA sense strand
agaccgacauuugugaaga

SEQ ID NO: 1526977 - RNA, 19 nt, Homo sapiens
  misc_RNA (1)...(19): siRNA sense strand
gugcagcaaaugugggaua

SEQ ID NO: 1526978 - RNA, 19 nt, Homo sapiens
  misc_RNA (1)...(19): siRNA sense strand
gcaacucaaaccucuuuag

SEQ ID NO: 1526979 - RNA, 19 nt, Homo sapiens
  misc_RNA (1)...(19): siRNA sense strand
cuggagaacggccuuauga

SEQ ID NO: 1526980 - RNA, 19 nt, Homo sapiens
  misc_RNA (1)...(19): siRNA sense strand
cuuuaggcauuacagaauu

SEQ ID NO: 1526981 - RNA, 19 nt, Homo sapiens
  misc_RNA (1)...(19): siRNA sense strand
agaauacccagcccuguga

SEQ ID NO: 1526982 - RNA, 19 nt, Homo sapiens
  misc_RNA (1)...(19): siRNA sense strand
ucucagacaucagaaaguc

SEQ ID NO: 1526983 - RNA, 19 nt, Homo sapiens
  misc_RNA (1)...(19): siRNA sense strand
acucuacacuucucagaca

SEQ ID NO: 1526984 - RNA, 19 nt, Homo sapiens
  misc_RNA (1)...(19): siRNA sense strand
caccucauuugucaucaga

SEQ ID NO: 1526985 - RNA, 19 nt, Homo sapiens
  misc_RNA (1)...(19): siRNA sense strand
gaacggccuuaugaaugca

SEQ ID NO: 1526986 - RNA, 19 nt, Homo sapiens
  misc_RNA (1)...(19): siRNA sense strand
gugggaaauucuucagcuu

SEQ ID NO: 1526987 - RNA, 19 nt, Homo sapiens
  misc_RNA (1)...(19): siRNA sense strand
caacucaaaccucuuuagg

SEQ ID NO: 1526988 - RNA, 19 nt, Homo sapiens
  misc_RNA (1)...(19): siRNA sense strand
ccauggagcugaggaugag

SEQ ID NO: 1526989 - RNA, 19 nt, Homo sapiens
  misc_RNA (1)...(19): siRNA sense strand
ugaaugugggaaauuguuu

SEQ ID NO: 1526990 - RNA, 19 nt, Homo sapiens
  misc_RNA (1)...(19): siRNA sense strand
aaaaggagcagauuagaga

SEQ ID NO: 1526991 - RNA, 19 nt, Homo sapiens
  misc_RNA (1)...(19): siRNA sense strand
acacuucucagacaucaga

SEQ ID NO: 1526992 - RNA, 19 nt, Homo sapiens
  misc_RNA (1)...(19): siRNA sense strand
cuacacuucucagacauca

SEQ ID NO: 1526993 - RNA, 19 nt, Homo sapiens
  misc_RNA (1)...(19): siRNA sense strand
ccuuaugagugcaaugaau

SEQ ID NO: 1526994 - RNA, 19 nt, Homo sapiens
  misc_RNA (1)...(19): siRNA sense strand
ggucuuaugguugcaguga

SEQ ID NO: 1526995 - RNA, 19 nt, Homo sapiens
  misc_RNA (1)...(19): siRNA sense strand
aggcauuacagaauucaua

SEQ ID NO: 1526996 - RNA, 19 nt, Homo sapiens
  misc_RNA (1)...(19): siRNA sense strand
ccuuaugagugcaaugaau

SEQ ID NO: 1526997 - RNA, 19 nt, Homo sapiens
  misc_RNA (1)...(19): siRNA sense strand
augugaugcuggagaauuu

SEQ ID NO: 1526998 - RNA, 19 nt, Homo sapiens
  misc_RNA (1)...(19): siRNA sense strand
ugugggaaauucuuuaggu

SEQ ID NO: 1526999 - RNA, 19 nt, Homo sapiens
  misc_RNA (1)...(19): siRNA sense strand
gccagguguuucuguagga

SEQ ID NO: 1527000 - RNA, 19 nt, Homo sapiens
  misc_RNA (1)...(19): siRNA sense strand
aaagggcgcuugauaguaa

SEQ ID NO: 1527001 - RNA, 19 nt, Homo sapiens
  misc_RNA (1)...(19): siRNA sense strand
gcggagaccugguuuguga

SEQ ID NO: 1527002 - RNA, 19 nt, Homo sapiens
  misc_RNA (1)...(19): siRNA sense strand
caucugacaucaacuauuc

SEQ ID NO: 1527003 - RNA, 19 nt, Homo sapiens
  misc_RNA (1)...(19): siRNA sense strand
gaaccgauuuguugguguu

SEQ ID NO: 1527004 - RNA, 19 nt, Homo sapiens
  misc_RNA (1)...(19): siRNA sense strand
ugaaaucucuuggcuguga

SEQ ID NO: 1527005 - RNA, 19 nt, Homo sapiens
  misc_RNA (1)...(19): siRNA sense strand
cagccaaacugcucaagaa

SEQ ID NO: 1527006 - RNA, 19 nt, Homo sapiens
  misc_RNA (1)...(19): siRNA sense strand
ccaaacugcucaagaaauc

SEQ ID NO: 1527007 - RNA, 19 nt, Homo sapiens
  misc_RNA (1)...(19): siRNA sense strand
gaaagggcgcuugauagua

SEQ ID NO: 1527008 - RNA, 19 nt, Homo sapiens
  misc_RNA (1)...(19): siRNA sense strand
accauuaccuuucuaagua

SEQ ID NO: 1527009 - RNA, 19 nt, Homo sapiens
  misc_RNA (1)...(19): siRNA sense strand
gcaaagugccauguaauug

SEQ ID NO: 1527010 - RNA, 19 nt, Homo sapiens
  misc_RNA (1)...(19): siRNA sense strand
ggaaccugcucuucugaug

SEQ ID NO: 1527011 - RNA, 19 nt, Homo sapiens
  misc_RNA (1)...(19): siRNA sense strand
uaacgcaucugacaucaac

SEQ ID NO: 1527012 - RNA, 19 nt, Homo sapiens
  misc_RNA (1)...(19): siRNA sense strand
gaacauugccagccaaacu

SEQ ID NO: 1527013 - RNA, 19 nt, Homo sapiens
  misc_RNA (1)...(19): siRNA sense strand
gugaaacccgaguaucuua

SEQ ID NO: 1527014 - RNA, 19 nt, Homo sapiens
  misc_RNA (1)...(19): siRNA sense strand
gcuucuuccugaaccauua

SEQ ID NO: 1527015 - RNA, 19 nt, Homo sapiens
  misc_RNA (1)...(19): siRNA sense strand
gaaccugcucuucugauga

SEQ ID NO: 1527016 - RNA, 19 nt, Homo sapiens
  misc_RNA (1)...(19): siRNA sense strand
caguuaagccucccuuuga

SEQ ID NO: 1527017 - RNA, 19 nt, Homo sapiens
  misc_RNA (1)...(19): siRNA sense strand
cauauuccgugcugucaau

SEQ ID NO: 1527018 - RNA, 19 nt, Homo sapiens
  misc_RNA (1)...(19): siRNA sense strand
aaagugccauguaauugga

SEQ ID NO: 1527019 - RNA, 19 nt, Homo sapiens
  misc_RNA (1)...(19): siRNA sense strand
ugugaaagcaggaacauug

SEQ ID NO: 1527020 - RNA, 19 nt, Homo sapiens
  misc_RNA (1)...(19): siRNA sense strand
cgaaagggcgcuugauagu

SEQ ID NO: 1527021 - RNA, 19 nt, Homo sapiens
  misc_RNA (1)...(19): siRNA sense strand
ccauuaccuuucuaaguau

SEQ ID NO: 1527022 - RNA, 19 nt, Homo sapiens
  misc_RNA (1)...(19): siRNA sense strand
caaagugccauguaauugg

SEQ ID NO: 1527023 - RNA, 19 nt, Homo sapiens
  misc_RNA (1)...(19): siRNA sense strand
guuuaucucuggcuaccaa

SEQ ID NO: 1527024 - RNA, 19 nt, Homo sapiens
  misc_RNA (1)...(19): siRNA sense strand
gaucguccuaucaacuaua

SEQ ID NO: 1527025 - RNA, 19 nt, Homo sapiens
  misc_RNA (1)...(19): siRNA sense strand
gcccuaggccucucugcua

SEQ ID NO: 1527026 - RNA, 19 nt, Homo sapiens
  misc_RNA (1)...(19): siRNA sense strand
guaguugaauuaccucacu

SEQ ID NO: 1527027 - RNA, 19 nt, Homo sapiens
  misc_RNA (1)...(19): siRNA sense strand
guccggaaccgauuuguug

SEQ ID NO: 1527028 - RNA, 19 nt, Homo sapiens
  misc_RNA (1)...(19): siRNA sense strand
uacgaaagggcgcuugaua

SEQ ID NO: 1527029 - RNA, 19 nt, Homo sapiens
  misc_RNA (1)...(19): siRNA sense strand
gugucgauguggucuauga

SEQ ID NO: 1527030 - RNA, 19 nt, Homo sapiens
  misc_RNA (1)...(19): siRNA sense strand
caacuccagugcccucagu

SEQ ID NO: 1527031 - RNA, 19 nt, Homo sapiens
  misc_RNA (1)...(19): siRNA sense strand
aaccugcucuucugaugaa

SEQ ID NO: 1527032 - RNA, 19 nt, Homo sapiens
  misc_RNA (1)...(19): siRNA sense strand
gagcggagaccugguuugu

SEQ ID NO: 1527033 - RNA, 19 nt, Homo sapiens
  misc_RNA (1)...(19): siRNA sense strand
uagacgcccuggcuacgaa

SEQ ID NO: 1527034 - RNA, 19 nt, Homo sapiens
  misc_RNA (1)...(19): siRNA sense strand
ccagagggcagguuuacug

SEQ ID NO: 1527035 - RNA, 19 nt, Homo sapiens
  misc_RNA (1)...(19): siRNA sense strand
gaaaucucuuggcugugau

SEQ ID NO: 1527036 - RNA, 19 nt, Homo sapiens
  misc_RNA (1)...(19): siRNA sense strand
gcuaugaccccucaguuaa

SEQ ID NO: 1527037 - RNA, 19 nt, Homo sapiens
  misc_RNA (1)...(19): siRNA sense strand
ucaguuaagccucccuuug

SEQ ID NO: 1527038 - RNA, 19 nt, Homo sapiens
  misc_RNA (1)...(19): siRNA sense strand
gguguuaacgcaucugaca

SEQ ID NO: 1527039 - RNA, 19 nt, Homo sapiens
  misc_RNA (1)...(19): siRNA sense strand
gccaaacugcucaagaaau

SEQ ID NO: 1527040 - RNA, 19 nt, Homo sapiens
  misc_RNA (1)...(19): siRNA sense strand
gcaucugacaucaacuauu

SEQ ID NO: 1527041 - RNA, 19 nt, Homo sapiens
  misc_RNA (1)...(19): siRNA sense strand
guaauuggaaccugcucuu

SEQ ID NO: 1527042 - RNA, 19 nt, Homo sapiens
  misc_RNA (1)...(19): siRNA sense strand
uaagccucccuuugacaua

SEQ ID NO: 1527043 - RNA, 19 nt, Homo sapiens
  misc_RNA (1)...(19): siRNA sense strand
gauguggucuaugaaucug

SEQ ID NO: 1527044 - RNA, 19 nt, Homo sapiens
  misc_RNA (1)...(19): siRNA sense strand
guuaacgcaucugacauca

SEQ ID NO: 1527045 - RNA, 19 nt, Homo sapiens
  misc_RNA (1)...(19): siRNA sense strand
uccgugcugucaauuauau

SEQ ID NO: 1527046 - RNA, 19 nt, Homo sapiens
  misc_RNA (1)...(19): siRNA sense strand
gccacuugcucgagaugug

SEQ ID NO: 1527047 - RNA, 19 nt, Homo sapiens
  misc_RNA (1)...(19): siRNA sense strand
ccugaaccauuaccuuucu

SEQ ID NO: 1527048 - RNA, 19 nt, Homo sapiens
  misc_RNA (1)...(19): siRNA sense strand
gaaaucugccagcguacag

SEQ ID NO: 1527049 - RNA, 19 nt, Homo sapiens
  misc_RNA (1)...(19): siRNA sense strand
gaaccauuaccuuucuaag

SEQ ID NO: 1527050 - RNA, 19 nt, Homo sapiens
  misc_RNA (1)...(19): siRNA sense strand
guagguaccguccuuaagc

SEQ ID NO: 1527051 - RNA, 19 nt, Homo sapiens
  misc_RNA (1)...(19): siRNA sense strand
cauggcaccugguucuuuu

SEQ ID NO: 1527052 - RNA, 19 nt, Homo sapiens
  misc_RNA (1)...(19): siRNA sense strand
gaauuaccucacucuguca

SEQ ID NO: 1527053 - RNA, 19 nt, Homo sapiens
  misc_RNA (1)...(19): siRNA sense strand
ugaaccauuaccuuucuaa

SEQ ID NO: 1527054 - RNA, 19 nt, Homo sapiens
  misc_RNA (1)...(19): siRNA sense strand
uuucaaagaaggcaaagug

SEQ ID NO: 1527055 - RNA, 19 nt, Homo sapiens
  misc_RNA (1)...(19): siRNA sense strand
cagugaaacccgaguaucu

SEQ ID NO: 1527056 - RNA, 19 nt, Homo sapiens
  misc_RNA (1)...(19): siRNA sense strand
ucgauguggucuaugaauc

SEQ ID NO: 1527057 - RNA, 19 nt, Homo sapiens
  misc_RNA (1)...(19): siRNA sense strand
uagguaccguccuuaagca

SEQ ID NO: 1527058 - RNA, 19 nt, Homo sapiens
  misc_RNA (1)...(19): siRNA sense strand
cagcguacagggcuucuuc

SEQ ID NO: 1527059 - RNA, 19 nt, Homo sapiens
  misc_RNA (1)...(19): siRNA sense strand
ccagugcccucagugaaac

SEQ ID NO: 1527060 - RNA, 19 nt, Homo sapiens
  misc_RNA (1)...(19): siRNA sense strand
aguaauaggguuuaucucu

SEQ ID NO: 1527061 - RNA, 19 nt, Homo sapiens
  misc_RNA (1)...(19): siRNA sense strand
uguggucuaugaaucuguu

SEQ ID NO: 1527062 - RNA, 19 nt, Homo sapiens
  misc_RNA (1)...(19): siRNA sense strand
auacacaguuggccaagcu

SEQ ID NO: 1527063 - RNA, 19 nt, Homo sapiens
  misc_RNA (1)...(19): siRNA sense strand
gugcugucaauuauaugua

SEQ ID NO: 1527064 - RNA, 19 nt, Homo sapiens
  misc_RNA (1)...(19): siRNA sense strand
gcuacgaaagggcgcuuga

SEQ ID NO: 1527065 - RNA, 19 nt, Homo sapiens
  misc_RNA (1)...(19): siRNA sense strand
auuccgugcugucaauuau

SEQ ID NO: 1527066 - RNA, 19 nt, Homo sapiens
  misc_RNA (1)...(19): siRNA sense strand
uuaccucacucugucaaca

SEQ ID NO: 1527067 - RNA, 19 nt, Homo sapiens
  misc_RNA (1)...(19): siRNA sense strand
gcugucaauuauauguaca

SEQ ID NO: 1527068 - RNA, 19 nt, Homo sapiens
  misc_RNA (1)...(19): siRNA sense strand
aaacacaggugaggagaga

SEQ ID NO: 1527069 - RNA, 19 nt, Homo sapiens
  misc_RNA (1)...(19): siRNA sense strand
gaagagaagcagaggaaca

SEQ ID NO: 1527070 - RNA, 19 nt, Homo sapiens
  misc_RNA (1)...(19): siRNA sense strand
gugcccaucucauguaaga

SEQ ID NO: 1527071 - RNA, 19 nt, Homo sapiens
  misc_RNA (1)...(19): siRNA sense strand
ggacauucauggacuuucg

SEQ ID NO: 1527072 - RNA, 19 nt, Homo sapiens
  misc_RNA (1)...(19): siRNA sense strand
ggagacggaccgaguugaa

SEQ ID NO: 1527073 - RNA, 19 nt, Homo sapiens
  misc_RNA (1)...(19): siRNA sense strand
uagcugcccuggacauuca

SEQ ID NO: 1527074 - RNA, 19 nt, Homo sapiens
  misc_RNA (1)...(19): siRNA sense strand
uacgaggcauguuuccuuu

SEQ ID NO: 1527075 - RNA, 19 nt, Homo sapiens
  misc_RNA (1)...(19): siRNA sense strand
acacaaagcaugaggacau

SEQ ID NO: 1527076 - RNA, 19 nt, Homo sapiens
  misc_RNA (1)...(19): siRNA sense strand
cagggaagcuuuuguuuca

SEQ ID NO: 1527077 - RNA, 19 nt, Homo sapiens
  misc_RNA (1)...(19): siRNA sense strand
gagagguaccacgccauua

SEQ ID NO: 1527078 - RNA, 19 nt, Homo sapiens
  misc_RNA (1)...(19): siRNA sense strand
aagaggagguucgggaaga

SEQ ID NO: 1527079 - RNA, 19 nt, Homo sapiens
  misc_RNA (1)...(19): siRNA sense strand
ggaaggaaguguguuuugu

SEQ ID NO: 1527080 - RNA, 19 nt, Homo sapiens
  misc_RNA (1)...(19): siRNA sense strand
ggugugcccaucucaugua

SEQ ID NO: 1527081 - RNA, 19 nt, Homo sapiens
  misc_RNA (1)...(19): siRNA sense strand
ucacucagauuuugugguu

SEQ ID NO: 1527082 - RNA, 19 nt, Homo sapiens
  misc_RNA (1)...(19): siRNA sense strand
ggacuuucguuuucacuca

SEQ ID NO: 1527083 - RNA, 19 nt, Homo sapiens
  misc_RNA (1)...(19): siRNA sense strand
ggacagggugugcccaucu

SEQ ID NO: 1527084 - RNA, 19 nt, Homo sapiens
  misc_RNA (1)...(19): siRNA sense strand
cagaggaacacgucaugga

SEQ ID NO: 1527085 - RNA, 19 nt, Homo sapiens
  misc_RNA (1)...(19): siRNA sense strand
gugugcccaucucauguaa

SEQ ID NO: 1527086 - RNA, 19 nt, Homo sapiens
  misc_RNA (1)...(19): siRNA sense strand
guccuuacgaggcauguuu

SEQ ID NO: 1527087 - RNA, 19 nt, Homo sapiens
  misc_RNA (1)...(19): siRNA sense strand
uuacgaggcauguuuccuu

SEQ ID NO: 1527088 - RNA, 19 nt, Homo sapiens
  misc_RNA (1)...(19): siRNA sense strand
gcccaucucauguaagaca

SEQ ID NO: 1527089 - RNA, 19 nt, Homo sapiens
  misc_RNA (1)...(19): siRNA sense strand
aggaagagaagcagaggaa

SEQ ID NO: 1527090 - RNA, 19 nt, Homo sapiens
  misc_RNA (1)...(19): siRNA sense strand
gugguucacgugacacaaa

SEQ ID NO: 1527091 - RNA, 19 nt, Homo sapiens
  misc_RNA (1)...(19): siRNA sense strand
gggaagcuuuuguuucaug

SEQ ID NO: 1527092 - RNA, 19 nt, Homo sapiens
  misc_RNA (1)...(19): siRNA sense strand
agaggagguucgggaagaa

SEQ ID NO: 1527093 - RNA, 19 nt, Homo sapiens
  misc_RNA (1)...(19): siRNA sense strand
ggaagcuuuuguuucauga

SEQ ID NO: 1527094 - RNA, 19 nt, Homo sapiens
  misc_RNA (1)...(19): siRNA sense strand
cacaaagcaugaggacauc

SEQ ID NO: 1527095 - RNA, 19 nt, Homo sapiens
  misc_RNA (1)...(19): siRNA sense strand
gaggagguucgggaagaaa

SEQ ID NO: 1527096 - RNA, 19 nt, Homo sapiens
  misc_RNA (1)...(19): siRNA sense strand
gugacaagcggaaggaagu

SEQ ID NO: 1527097 - RNA, 19 nt, Homo sapiens
  misc_RNA (1)...(19): siRNA sense strand
acacaggugaggagagaga

SEQ ID NO: 1527098 - RNA, 19 nt, Homo sapiens
  misc_RNA (1)...(19): siRNA sense strand
agagguaccacgccauuag

SEQ ID NO: 1527099 - RNA, 19 nt, Homo sapiens
  misc_RNA (1)...(19): siRNA sense strand
agagagguaccacgccauu

SEQ ID NO: 1527100 - RNA, 19 nt, Homo sapiens
  misc_RNA (1)...(19): siRNA sense strand
gacagggugugcccaucuc

SEQ ID NO: 1527101 - RNA, 19 nt, Homo sapiens
  misc_RNA (1)...(19): siRNA sense strand
gagguaccacgccauuagu

SEQ ID NO: 1527102 - RNA, 19 nt, Homo sapiens
  misc_RNA (1)...(19): siRNA sense strand
ucaaauagauugcagauga

SEQ ID NO: 1527103 - RNA, 19 nt, Homo sapiens
  misc_RNA (1)...(19): siRNA sense strand
gaaaccaaccuuugcauua

SEQ ID NO: 1527104 - RNA, 19 nt, Homo sapiens
  misc_RNA (1)...(19): siRNA sense strand
gaaaucaggccuugguuua

SEQ ID NO: 1527105 - RNA, 19 nt, Homo sapiens
  misc_RNA (1)...(19): siRNA sense strand
gaaaucagcauacacagua

SEQ ID NO: 1527106 - RNA, 19 nt, Homo sapiens
  misc_RNA (1)...(19): siRNA sense strand
guacaucacugaaaguaaa

SEQ ID NO: 1527107 - RNA, 19 nt, Homo sapiens
  misc_RNA (1)...(19): siRNA sense strand
gcaauaugcuacacuuaaa

SEQ ID NO: 1527108 - RNA, 19 nt, Homo sapiens
  misc_RNA (1)...(19): siRNA sense strand
ucacagaaauaccagauaa

SEQ ID NO: 1527109 - RNA, 19 nt, Homo sapiens
  misc_RNA (1)...(19): siRNA sense strand
gaaauuugucucccucuua

SEQ ID NO: 1527110 - RNA, 19 nt, Homo sapiens
  misc_RNA (1)...(19): siRNA sense strand
aacaauggcucuuugaaua

SEQ ID NO: 1527111 - RNA, 19 nt, Homo sapiens
  misc_RNA (1)...(19): siRNA sense strand
guauaaaccucacagaaau

SEQ ID NO: 1527112 - RNA, 19 nt, Homo sapiens
  misc_RNA (1)...(19): siRNA sense strand
gagcugauuuccaucgaua

SEQ ID NO: 1527113 - RNA, 19 nt, Homo sapiens
  misc_RNA (1)...(19): siRNA sense strand
ggagccagauucacuguuu

SEQ ID NO: 1527114 - RNA, 19 nt, Homo sapiens
  misc_RNA (1)...(19): siRNA sense strand
gcaaagugcucgaauacca

SEQ ID NO: 1527115 - RNA, 19 nt, Homo sapiens
  misc_RNA (1)...(19): siRNA sense strand
ccugagagcuuuccuucua

SEQ ID NO: 1527116 - RNA, 19 nt, Homo sapiens
  misc_RNA (1)...(19): siRNA sense strand
caacuugcuuucuacaauu

SEQ ID NO: 1527117 - RNA, 19 nt, Homo sapiens
  misc_RNA (1)...(19): siRNA sense strand
gauaacaccuucuggucaa

SEQ ID NO: 1527118 - RNA, 19 nt, Homo sapiens
  misc_RNA (1)...(19): siRNA sense strand
gagcuuuccuucuaaucua

SEQ ID NO: 1527119 - RNA, 19 nt, Homo sapiens
  misc_RNA (1)...(19): siRNA sense strand
ccugaaaucuacuggauaa

SEQ ID NO: 1527120 - RNA, 19 nt, Homo sapiens
  misc_RNA (1)...(19): siRNA sense strand
ccacagacuuuccaguaaa

SEQ ID NO: 1527121 - RNA, 19 nt, Homo sapiens
  misc_RNA (1)...(19): siRNA sense strand
uggauaaccugccagauuu

SEQ ID NO: 1527122 - RNA, 19 nt, Homo sapiens
  misc_RNA (1)...(19): siRNA sense strand
gguauaaaccucacagaaa

SEQ ID NO: 1527123 - RNA, 19 nt, Homo sapiens
  misc_RNA (1)...(19): siRNA sense strand
ggacaugccacuccgaauu

SEQ ID NO: 1527124 - RNA, 19 nt, Homo sapiens
  misc_RNA (1)...(19): siRNA sense strand
acacccagauccauuuaua

SEQ ID NO: 1527125 - RNA, 19 nt, Homo sapiens
  misc_RNA (1)...(19): siRNA sense strand
ggagcuauguuuccuuuca

SEQ ID NO: 1527126 - RNA, 19 nt, Homo sapiens
  misc_RNA (1)...(19): siRNA sense strand
aaucacaacuugcuuucua

SEQ ID NO: 1527127 - RNA, 19 nt, Homo sapiens
  misc_RNA (1)...(19): siRNA sense strand
gaacugagcaacuuacaag

SEQ ID NO: 1527128 - RNA, 19 nt, Homo sapiens
  misc_RNA (1)...(19): siRNA sense strand
ggacccaccugaauuccaa

SEQ ID NO: 1527129 - RNA, 19 nt, Homo sapiens
  misc_RNA (1)...(19): siRNA sense strand
ggaagcaucuacaguggau

SEQ ID NO: 1527130 - RNA, 19 nt, Homo sapiens
  misc_RNA (1)...(19): siRNA sense strand
gacuucaucucaauucaaa

SEQ ID NO: 1527131 - RNA, 19 nt, Homo sapiens
  misc_RNA (1)...(19): siRNA sense strand
uggcguaacucccaaagaa

SEQ ID NO: 1527132 - RNA, 19 nt, Homo sapiens
  misc_RNA (1)...(19): siRNA sense strand
caacuuacaagaacucuau

SEQ ID NO: 1527133 - RNA, 19 nt, Homo sapiens
  misc_RNA (1)...(19): siRNA sense strand
gaucaacaguaagugguuu

SEQ ID NO: 1527134 - RNA, 19 nt, Homo sapiens
  misc_RNA (1)...(19): siRNA sense strand
uaucuucagucaccaauau

SEQ ID NO: 1527135 - RNA, 19 nt, Homo sapiens
  misc_RNA (1)...(19): siRNA sense strand
aagcaacuguuauagguuu

SEQ ID NO: 1527136 - RNA, 19 nt, Homo sapiens
  misc_RNA (1)...(19): siRNA sense strand
acagcuaugugaggaauua

SEQ ID NO: 1527137 - RNA, 19 nt, Homo sapiens
  misc_RNA (1)...(19): siRNA sense strand
caauggcucuuugaauauu

SEQ ID NO: 1527138 - RNA, 19 nt, Homo sapiens
  misc_RNA (1)...(19): siRNA sense strand
uaauaugccugagcugauu

SEQ ID NO: 1527139 - RNA, 19 nt, Homo sapiens
  misc_RNA (1)...(19): siRNA sense strand
gagggaacacuagauauaa

SEQ ID NO: 1527140 - RNA, 19 nt, Homo sapiens
  misc_RNA (1)...(19): siRNA sense strand
ugagggaacacuagauaua

SEQ ID NO: 1527141 - RNA, 19 nt, Homo sapiens
  misc_RNA (1)...(19): siRNA sense strand
ggaaauuugucucccucuu

SEQ ID NO: 1527142 - RNA, 19 nt, Homo sapiens
  misc_RNA (1)...(19): siRNA sense strand
caaauagauugcagaugau

SEQ ID NO: 1527143 - RNA, 19 nt, Homo sapiens
  misc_RNA (1)...(19): siRNA sense strand
cuaauacccugacagacaa

SEQ ID NO: 1527144 - RNA, 19 nt, Homo sapiens
  misc_RNA (1)...(19): siRNA sense strand
aaacaaacuuacugaacug

SEQ ID NO: 1527145 - RNA, 19 nt, Homo sapiens
  misc_RNA (1)...(19): siRNA sense strand
ggauaaccugccagauuua

SEQ ID NO: 1527146 - RNA, 19 nt, Homo sapiens
  misc_RNA (1)...(19): siRNA sense strand
guuauagguuuaccaacaa

SEQ ID NO: 1527147 - RNA, 19 nt, Homo sapiens
  misc_RNA (1)...(19): siRNA sense strand
ugaagucuguuaugaucaa

SEQ ID NO: 1527148 - RNA, 19 nt, Homo sapiens
  misc_RNA (1)...(19): siRNA sense strand
ugaauacuccacagacuuu

SEQ ID NO: 1527149 - RNA, 19 nt, Homo sapiens
  misc_RNA (1)...(19): siRNA sense strand
aaaccaaccuuugcauuag

SEQ ID NO: 1527150 - RNA, 19 nt, Homo sapiens
  misc_RNA (1)...(19): siRNA sense strand
gaaaucuacuggauaacac

SEQ ID NO: 1527151 - RNA, 19 nt, Homo sapiens
  misc_RNA (1)...(19): siRNA sense strand
ucagggacaugauggaaau

SEQ ID NO: 1527152 - RNA, 19 nt, Homo sapiens
  misc_RNA (1)...(19): siRNA sense strand
guggauaaccugccagauu

SEQ ID NO: 1527153 - RNA, 19 nt, Homo sapiens
  misc_RNA (1)...(19): siRNA sense strand
ugccaaaccucaaggaaau

SEQ ID NO: 1527154 - RNA, 19 nt, Homo sapiens
  misc_RNA (1)...(19): siRNA sense strand
caaguucuauguccauucu

SEQ ID NO: 1527155 - RNA, 19 nt, Homo sapiens
  misc_RNA (1)...(19): siRNA sense strand
aaauuugucucccucuuau

SEQ ID NO: 1527156 - RNA, 19 nt, Homo sapiens
  misc_RNA (1)...(19): siRNA sense strand
gggacaugauggaaauuug

SEQ ID NO: 1527157 - RNA, 19 nt, Homo sapiens
  misc_RNA (1)...(19): siRNA sense strand
ccaauuaucagaaucaaag

SEQ ID NO: 1527158 - RNA, 19 nt, Homo sapiens
  misc_RNA (1)...(19): siRNA sense strand
caaaucuaguguuaaaugg

SEQ ID NO: 1527159 - RNA, 19 nt, Homo sapiens
  misc_RNA (1)...(19): siRNA sense strand
uaacaauggcucuuugaau

SEQ ID NO: 1527160 - RNA, 19 nt, Homo sapiens
  misc_RNA (1)...(19): siRNA sense strand
ugacagacaaguucuaugu

SEQ ID NO: 1527161 - RNA, 19 nt, Homo sapiens
  misc_RNA (1)...(19): siRNA sense strand
uuacuagccuggauuuauc

SEQ ID NO: 1527162 - RNA, 19 nt, Homo sapiens
  misc_RNA (1)...(19): siRNA sense strand
uggaaucacucaugcugaa

SEQ ID NO: 1527163 - RNA, 19 nt, Homo sapiens
  misc_RNA (1)...(19): siRNA sense strand
acaacuugcuuucuacaau

SEQ ID NO: 1527164 - RNA, 19 nt, Homo sapiens
  misc_RNA (1)...(19): siRNA sense strand
gaggaauuacuuacagaaa

SEQ ID NO: 1527165 - RNA, 19 nt, Homo sapiens
  misc_RNA (1)...(19): siRNA sense strand
cuccagaaaugaacuguga

SEQ ID NO: 1527166 - RNA, 19 nt, Homo sapiens
  misc_RNA (1)...(19): siRNA sense strand
gauuauuggugugauaugu

SEQ ID NO: 1527167 - RNA, 19 nt, Homo sapiens
  misc_RNA (1)...(19): siRNA sense strand
gauaacaauggcucuuuga

SEQ ID NO: 1527168 - RNA, 19 nt, Homo sapiens
  misc_RNA (1)...(19): siRNA sense strand
gcagaaccacagccugaaa

SEQ ID NO: 1527169 - RNA, 19 nt, Homo sapiens
  misc_RNA (1)...(19): siRNA sense strand
uaaaagaguuggggauaaa

SEQ ID NO: 1527170 - RNA, 19 nt, Homo sapiens
  misc_RNA (1)...(19): siRNA sense strand
gauaaccugccagauuuaa

SEQ ID NO: 1527171 - RNA, 19 nt, Homo sapiens
  misc_RNA (1)...(19): siRNA sense strand
ggacaugauggaaauuugu

SEQ ID NO: 1527172 - RNA, 19 nt, Homo sapiens
  misc_RNA (1)...(19): siRNA sense strand
ccagccagauugccagcua

SEQ ID NO: 1527173 - RNA, 19 nt, Homo sapiens
  misc_RNA (1)...(19): siRNA sense strand
aauagaagcuacuaacaac

SEQ ID NO: 1527174 - RNA, 19 nt, Homo sapiens
  misc_RNA (1)...(19): siRNA sense strand
gagauauucaugccaauuc

SEQ ID NO: 1527175 - RNA, 19 nt, Homo sapiens
  misc_RNA (1)...(19): siRNA sense strand
guaaaugucaccaccaaag

SEQ ID NO: 1527176 - RNA, 19 nt, Homo sapiens
  misc_RNA (1)...(19): siRNA sense strand
ccuacagacuaacaauauu

SEQ ID NO: 1527177 - RNA, 19 nt, Homo sapiens
  misc_RNA (1)...(19): siRNA sense strand
uuacagaaaccaaccuuug

SEQ ID NO: 1527178 - RNA, 19 nt, Homo sapiens
  misc_RNA (1)...(19): siRNA sense strand
gaacacuagauauaaaugg

SEQ ID NO: 1527179 - RNA, 19 nt, Homo sapiens
  misc_RNA (1)...(19): siRNA sense strand
uauguuuccuuucacugua

SEQ ID NO: 1527180 - RNA, 19 nt, Homo sapiens
  misc_RNA (1)...(19): siRNA sense strand
ggaaaucagcauacacagu

SEQ ID NO: 1527181 - RNA, 19 nt, Homo sapiens
  misc_RNA (1)...(19): siRNA sense strand
uaaccugccagauuuaaga

SEQ ID NO: 1527182 - RNA, 19 nt, Homo sapiens
  misc_RNA (1)...(19): siRNA sense strand
aaucuucgcagccugguua

SEQ ID NO: 1527183 - RNA, 19 nt, Homo sapiens
  misc_RNA (1)...(19): siRNA sense strand
uuacugaacugccugaaaa

SEQ ID NO: 1527184 - RNA, 19 nt, Homo sapiens
  misc_RNA (1)...(19): siRNA sense strand
ggaauuacuuacagaaacc

SEQ ID NO: 1527185 - RNA, 19 nt, Homo sapiens
  misc_RNA (1)...(19): siRNA sense strand
gaacaaaaccaacauucga

SEQ ID NO: 1527186 - RNA, 19 nt, Homo sapiens
  misc_RNA (1)...(19): siRNA sense strand
ucaaggaaaucagcauaca

SEQ ID NO: 1527187 - RNA, 19 nt, Homo sapiens
  misc_RNA (1)...(19): siRNA sense strand
aaagaugccucagcuccuu

SEQ ID NO: 1527188 - RNA, 19 nt, Homo sapiens
  misc_RNA (1)...(19): siRNA sense strand
gaauaauaccacaacacuu

SEQ ID NO: 1527189 - RNA, 19 nt, Homo sapiens
  misc_RNA (1)...(19): siRNA sense strand
guauugauauucccaccau

SEQ ID NO: 1527190 - RNA, 19 nt, Homo sapiens
  misc_RNA (1)...(19): siRNA sense strand
gaagucuguuaugaucaaa

SEQ ID NO: 1527191 - RNA, 19 nt, Homo sapiens
  misc_RNA (1)...(19): siRNA sense strand
agggaacacuagauauaaa

SEQ ID NO: 1527192 - RNA, 19 nt, Homo sapiens
  misc_RNA (1)...(19): siRNA sense strand
ugggagcuauguuuccuuu

SEQ ID NO: 1527193 - RNA, 19 nt, Homo sapiens
  misc_RNA (1)...(19): siRNA sense strand
gaaucaaagacaugaacuu

SEQ ID NO: 1527194 - RNA, 19 nt, Homo sapiens
  misc_RNA (1)...(19): siRNA sense strand
acaguggauuguaaugauu

SEQ ID NO: 1527195 - RNA, 19 nt, Homo sapiens
  misc_RNA (1)...(19): siRNA sense strand
cuagagauucugaugauug

SEQ ID NO: 1527196 - RNA, 19 nt, Homo sapiens
  misc_RNA (1)...(19): siRNA sense strand
gugaggaauuacuuacaga

SEQ ID NO: 1527197 - RNA, 19 nt, Homo sapiens
  misc_RNA (1)...(19): siRNA sense strand
ugaaaucaggccuugguuu

SEQ ID NO: 1527198 - RNA, 19 nt, Homo sapiens
  misc_RNA (1)...(19): siRNA sense strand
ggauuguaaugauuuaggu

SEQ ID NO: 1527199 - RNA, 19 nt, Homo sapiens
  misc_RNA (1)...(19): siRNA sense strand
ccuaauacccugacagaca

SEQ ID NO: 1527200 - RNA, 19 nt, Homo sapiens
  misc_RNA (1)...(19): siRNA sense strand
agauaacaauggcucuuug

SEQ ID NO: 1527201 - RNA, 19 nt, Homo sapiens
  misc_RNA (1)...(19): siRNA sense strand
guguaaaugucaccaccaa

SEQ ID NO: 1527202 - RNA, 19 nt, Homo sapiens
  misc_RNA (1)...(19): siRNA sense strand
caagaagacugcauuaauu

SEQ ID NO: 1527203 - RNA, 19 nt, Homo sapiens
  misc_RNA (1)...(19): siRNA sense strand
gaagggagcuugacuuaca

SEQ ID NO: 1527204 - RNA, 19 nt, Homo sapiens
  misc_RNA (1)...(19): siRNA sense strand
ggacaaagcauguaacuug

SEQ ID NO: 1527205 - RNA, 19 nt, Homo sapiens
  misc_RNA (1)...(19): siRNA sense strand
caaaaggacuuaugaguua

SEQ ID NO: 1527206 - RNA, 19 nt, Homo sapiens
  misc_RNA (1)...(19): siRNA sense strand
acagaaaucuccaaccuaa

SEQ ID NO: 1527207 - RNA, 19 nt, Homo sapiens
  misc_RNA (1)...(19): siRNA sense strand
gaggaagccuguccauuga

SEQ ID NO: 1527208 - RNA, 19 nt, Homo sapiens
  misc_RNA (1)...(19): siRNA sense strand
gagcuugacuuacacuuug

SEQ ID NO: 1527209 - RNA, 19 nt, Homo sapiens
  misc_RNA (1)...(19): siRNA sense strand
gagaagggagcuugacuua

SEQ ID NO: 1527210 - RNA, 19 nt, Homo sapiens
  misc_RNA (1)...(19): siRNA sense strand
uagaagauguugucauuga

SEQ ID NO: 1527211 - RNA, 19 nt, Homo sapiens
  misc_RNA (1)...(19): siRNA sense strand
acucaagacuggauuauuu

SEQ ID NO: 1527212 - RNA, 19 nt, Homo sapiens
  misc_RNA (1)...(19): siRNA sense strand
gcaguugcuucuccacaua

SEQ ID NO: 1527213 - RNA, 19 nt, Homo sapiens
  misc_RNA (1)...(19): siRNA sense strand
gcauguaacuugaugaucu

SEQ ID NO: 1527214 - RNA, 19 nt, Homo sapiens
  misc_RNA (1)...(19): siRNA sense strand
ggaagccuguccauugaaa

SEQ ID NO: 1527215 - RNA, 19 nt, Homo sapiens
  misc_RNA (1)...(19): siRNA sense strand
gacaaagcauguaacuuga

SEQ ID NO: 1527216 - RNA, 19 nt, Homo sapiens
  misc_RNA (1)...(19): siRNA sense strand
ucucuuacauggccaauuu

SEQ ID NO: 1527217 - RNA, 19 nt, Homo sapiens
  misc_RNA (1)...(19): siRNA sense strand
ucuagaagauguugucauu

SEQ ID NO: 1527218 - RNA, 19 nt, Homo sapiens
  misc_RNA (1)...(19): siRNA sense strand
ucacacagauuauucaaag

SEQ ID NO: 1527219 - RNA, 19 nt, Homo sapiens
  misc_RNA (1)...(19): siRNA sense strand
gugcccagcuccuugcuua

SEQ ID NO: 1527220 - RNA, 19 nt, Homo sapiens
  misc_RNA (1)...(19): siRNA sense strand
caacccaacugcuaccuau

SEQ ID NO: 1527221 - RNA, 19 nt, Homo sapiens
  misc_RNA (1)...(19): siRNA sense strand
caacagcaguucugacuac

SEQ ID NO: 1527222 - RNA, 19 nt, Homo sapiens
  misc_RNA (1)...(19): siRNA sense strand
uaagauggaugaagcaagu

SEQ ID NO: 1527223 - RNA, 19 nt, Homo sapiens
  misc_RNA (1)...(19): siRNA sense strand
caaagcauguaacuugaug

SEQ ID NO: 1527224 - RNA, 19 nt, Homo sapiens
  misc_RNA (1)...(19): siRNA sense strand
caggaaacguuacucaaga

SEQ ID NO: 1527225 - RNA, 19 nt, Homo sapiens
  misc_RNA (1)...(19): siRNA sense strand
cgaggaagccuguccauug

SEQ ID NO: 1527226 - RNA, 19 nt, Homo sapiens
  misc_RNA (1)...(19): siRNA sense strand
caaccuaacuuugaacaca

SEQ ID NO: 1527227 - RNA, 19 nt, Homo sapiens
  misc_RNA (1)...(19): siRNA sense strand
gacauccagucaucucuuu

SEQ ID NO: 1527228 - RNA, 19 nt, Homo sapiens
  misc_RNA (1)...(19): siRNA sense strand
ccacgacccucauuucuac

SEQ ID NO: 1527229 - RNA, 19 nt, Homo sapiens
  misc_RNA (1)...(19): siRNA sense strand
ucaagaagacugcauuaau

SEQ ID NO: 1527230 - RNA, 19 nt, Homo sapiens
  misc_RNA (1)...(19): siRNA sense strand
ggagaaacuauuuaagaug

SEQ ID NO: 1527231 - RNA, 19 nt, Homo sapiens
  misc_RNA (1)...(19): siRNA sense strand
ugucaaauguggagucuuc

SEQ ID NO: 1527232 - RNA, 19 nt, Homo sapiens
  misc_RNA (1)...(19): siRNA sense strand
guagaauccucucggaauc

SEQ ID NO: 1527233 - RNA, 19 nt, Homo sapiens
  misc_RNA (1)...(19): siRNA sense strand
guacggccuuccauuugaa

SEQ ID NO: 1527234 - RNA, 19 nt, Homo sapiens
  misc_RNA (1)...(19): siRNA sense strand
ucacuuggagaaacuauuu

SEQ ID NO: 1527235 - RNA, 19 nt, Homo sapiens
  misc_RNA (1)...(19): siRNA sense strand
uaaccacugucacuucuca

SEQ ID NO: 1527236 - RNA, 19 nt, Homo sapiens
  misc_RNA (1)...(19): siRNA sense strand
gaaauuugccaagccaaga

SEQ ID NO: 1527237 - RNA, 19 nt, Homo sapiens
  misc_RNA (1)...(19): siRNA sense strand
acacuaaggcugucugcua

SEQ ID NO: 1527238 - RNA, 19 nt, Homo sapiens
  misc_RNA (1)...(19): siRNA sense strand
ggagcuugacuuacacuuu

SEQ ID NO: 1527239 - RNA, 19 nt, Homo sapiens
  misc_RNA (1)...(19): siRNA sense strand
gcaggaaacguuacucaag

SEQ ID NO: 1527240 - RNA, 19 nt, Homo sapiens
  misc_RNA (1)...(19): siRNA sense strand
gcucuuugguguccuguuc

SEQ ID NO: 1527241 - RNA, 19 nt, Homo sapiens
  misc_RNA (1)...(19): siRNA sense strand
guauaacccuacugcacuu

SEQ ID NO: 1527242 - RNA, 19 nt, Homo sapiens
  misc_RNA (1)...(19): siRNA sense strand
gcucaucugcugccugaaa

SEQ ID NO: 1527243 - RNA, 19 nt, Homo sapiens
  misc_RNA (1)...(19): siRNA sense strand
gcaaaaggacuuaugaguu

SEQ ID NO: 1527244 - RNA, 19 nt, Homo sapiens
  misc_RNA (1)...(19): siRNA sense strand
gguagaauccucucggaau

SEQ ID NO: 1527245 - RNA, 19 nt, Homo sapiens
  misc_RNA (1)...(19): siRNA sense strand
cuacugcacuuucuauguc

SEQ ID NO: 1527246 - RNA, 19 nt, Homo sapiens
  misc_RNA (1)...(19): siRNA sense strand
ccagucaucucuuucuaag

SEQ ID NO: 1527247 - RNA, 19 nt, Homo sapiens
  misc_RNA (1)...(19): siRNA sense strand
caccaaugcuucagugaca

SEQ ID NO: 1527248 - RNA, 19 nt, Homo sapiens
  misc_RNA (1)...(19): siRNA sense strand
ucaguacggccuuccauuu

SEQ ID NO: 1527249 - RNA, 19 nt, Homo sapiens
  misc_RNA (1)...(19): siRNA sense strand
ccagggcaguguuccagaa

SEQ ID NO: 1527250 - RNA, 19 nt, Homo sapiens
  misc_RNA (1)...(19): siRNA sense strand
ggagaagggagcuugacuu

SEQ ID NO: 1527251 - RNA, 19 nt, Homo sapiens
  misc_RNA (1)...(19): siRNA sense strand
gcccagcuccuugcuuaua

SEQ ID NO: 1527252 - RNA, 19 nt, Homo sapiens
  misc_RNA (1)...(19): siRNA sense strand
cuagacaacccaacugcua

SEQ ID NO: 1527253 - RNA, 19 nt, Homo sapiens
  misc_RNA (1)...(19): siRNA sense strand
ggaaucacuccgcaggaaa

SEQ ID NO: 1527254 - RNA, 19 nt, Homo sapiens
  misc_RNA (1)...(19): siRNA sense strand
guuacaggauaauuacaga

SEQ ID NO: 1527255 - RNA, 19 nt, Homo sapiens
  misc_RNA (1)...(19): siRNA sense strand
cauguaacuugaugaucuu

SEQ ID NO: 1527256 - RNA, 19 nt, Homo sapiens
  misc_RNA (1)...(19): siRNA sense strand
ucucagaguucacaauuuu

SEQ ID NO: 1527257 - RNA, 19 nt, Homo sapiens
  misc_RNA (1)...(19): siRNA sense strand
ccucagaucacuuggagaa

SEQ ID NO: 1527258 - RNA, 19 nt, Homo sapiens
  misc_RNA (1)...(19): siRNA sense strand
guaacuugaugaucuucga

SEQ ID NO: 1527259 - RNA, 19 nt, Homo sapiens
  misc_RNA (1)...(19): siRNA sense strand
auucaaagcccaccgauau

SEQ ID NO: 1527260 - RNA, 19 nt, Homo sapiens
  misc_RNA (1)...(19): siRNA sense strand
caucuuugaccagaaauuu

SEQ ID NO: 1527261 - RNA, 19 nt, Homo sapiens
  misc_RNA (1)...(19): siRNA sense strand
uggauuauuugaucaaugg

SEQ ID NO: 1527262 - RNA, 19 nt, Homo sapiens
  misc_RNA (1)...(19): siRNA sense strand
ucuccaaccuaacuuugaa

SEQ ID NO: 1527263 - RNA, 19 nt, Homo sapiens
  misc_RNA (1)...(19): siRNA sense strand
ccauaccguuuacagaaau

SEQ ID NO: 1527264 - RNA, 19 nt, Homo sapiens
  misc_RNA (1)...(19): siRNA sense strand
cccaucaucacacagauua

SEQ ID NO: 1527265 - RNA, 19 nt, Homo sapiens
  misc_RNA (1)...(19): siRNA sense strand
caucaucacacagauuauu

SEQ ID NO: 1527266 - RNA, 19 nt, Homo sapiens
  misc_RNA (1)...(19): siRNA sense strand
aaaggcagcuuagaaacca

SEQ ID NO: 1527267 - RNA, 19 nt, Homo sapiens
  misc_RNA (1)...(19): siRNA sense strand
cccagcuccuugcuuauaa

SEQ ID NO: 1527268 - RNA, 19 nt, Homo sapiens
  misc_RNA (1)...(19): siRNA sense strand
cggcuacacuccaagcaau

SEQ ID NO: 1527269 - RNA, 19 nt, Homo sapiens
  misc_RNA (1)...(19): siRNA sense strand
cauuaauucuugcuguuca

SEQ ID NO: 1527270 - RNA, 19 nt, Homo sapiens
  misc_RNA (1)...(19): siRNA sense strand
uuacagaaaucuccaaccu

SEQ ID NO: 1527271 - RNA, 19 nt, Homo sapiens
  misc_RNA (1)...(19): siRNA sense strand
acuuaugaguuacaggaua

SEQ ID NO: 1527272 - RNA, 19 nt, Homo sapiens
  misc_RNA (1)...(19): siRNA sense strand
agucuuccacuaugaauaa

SEQ ID NO: 1527273 - RNA, 19 nt, Homo sapiens
  misc_RNA (1)...(19): siRNA sense strand
gaaaucuccaaccuaacuu

SEQ ID NO: 1527274 - RNA, 19 nt, Homo sapiens
  misc_RNA (1)...(19): siRNA sense strand
gacccucauuucuacaguu

SEQ ID NO: 1527275 - RNA, 19 nt, Homo sapiens
  misc_RNA (1)...(19): siRNA sense strand
gcacuuucuaugucaaaug

SEQ ID NO: 1527276 - RNA, 19 nt, Homo sapiens
  misc_RNA (1)...(19): siRNA sense strand
aagacuggauuauuugauc

SEQ ID NO: 1527277 - RNA, 19 nt, Homo sapiens
  misc_RNA (1)...(19): siRNA sense strand
gaaguuuggauccucagau

SEQ ID NO: 1527278 - RNA, 19 nt, Homo sapiens
  misc_RNA (1)...(19): siRNA sense strand
aguacggccuuccauuuga

SEQ ID NO: 1527279 - RNA, 19 nt, Homo sapiens
  misc_RNA (1)...(19): siRNA sense strand
ucagaucacuuggagaaac

SEQ ID NO: 1527280 - RNA, 19 nt, Homo sapiens
  misc_RNA (1)...(19): siRNA sense strand
agacuggauuauuugauca

SEQ ID NO: 1527281 - RNA, 19 nt, Homo sapiens
  misc_RNA (1)...(19): siRNA sense strand
aaccauaccguuuacagaa

SEQ ID NO: 1527282 - RNA, 19 nt, Homo sapiens
  misc_RNA (1)...(19): siRNA sense strand
ggcaguugcuucuccacau

SEQ ID NO: 1527283 - RNA, 19 nt, Homo sapiens
  misc_RNA (1)...(19): siRNA sense strand
gaauguguauaacccuacu

SEQ ID NO: 1527284 - RNA, 19 nt, Homo sapiens
  misc_RNA (1)...(19): siRNA sense strand
ccaccucggcuacuccaaa

SEQ ID NO: 1527285 - RNA, 19 nt, Homo sapiens
  misc_RNA (1)...(19): siRNA sense strand
cacuuucuaugucaaaugu

SEQ ID NO: 1527286 - RNA, 19 nt, Homo sapiens
  misc_RNA (1)...(19): siRNA sense strand
caguacggccuuccauuug

SEQ ID NO: 1527287 - RNA, 19 nt, Homo sapiens
  misc_RNA (1)...(19): siRNA sense strand
aagaagacugcauuaauuc

SEQ ID NO: 1527288 - RNA, 19 nt, Homo sapiens
  misc_RNA (1)...(19): siRNA sense strand
ucauggagagacacacuuu

SEQ ID NO: 1527289 - RNA, 19 nt, Homo sapiens
  misc_RNA (1)...(19): siRNA sense strand
uuccucugaucaagaaaua

SEQ ID NO: 1527290 - RNA, 19 nt, Homo sapiens
  misc_RNA (1)...(19): siRNA sense strand
accauaccguuuacagaaa

SEQ ID NO: 1527291 - RNA, 19 nt, Homo sapiens
  misc_RNA (1)...(19): siRNA sense strand
ucacuccgcaggaaacguu

SEQ ID NO: 1527292 - RNA, 19 nt, Homo sapiens
  misc_RNA (1)...(19): siRNA sense strand
cagaucacuuggagaaacu

SEQ ID NO: 1527293 - RNA, 19 nt, Homo sapiens
  misc_RNA (1)...(19): siRNA sense strand
gcauuaauucuugcuguuc

SEQ ID NO: 1527294 - RNA, 19 nt, Homo sapiens
  misc_RNA (1)...(19): siRNA sense strand
uaucgggucccugcucuuu

SEQ ID NO: 1527295 - RNA, 19 nt, Homo sapiens
  misc_RNA (1)...(19): siRNA sense strand
gagucuuccacuaugaaua

SEQ ID NO: 1527296 - RNA, 19 nt, Homo sapiens
  misc_RNA (1)...(19): siRNA sense strand
aaaggccauucucagaguu

SEQ ID NO: 1527297 - RNA, 19 nt, Homo sapiens
  misc_RNA (1)...(19): siRNA sense strand
acucaagaagacugcauua

SEQ ID NO: 1527298 - RNA, 19 nt, Homo sapiens
  misc_RNA (1)...(19): siRNA sense strand
acccaacugcuaccuauuu

SEQ ID NO: 1527299 - RNA, 19 nt, Homo sapiens
  misc_RNA (1)...(19): siRNA sense strand
uaacccuacugcacuuucu

SEQ ID NO: 1527300 - RNA, 19 nt, Homo sapiens
  misc_RNA (1)...(19): siRNA sense strand
agaaaucuccaaccuaacu

SEQ ID NO: 1527301 - RNA, 19 nt, Homo sapiens
  misc_RNA (1)...(19): siRNA sense strand
gaucaagaaauagcucauc

SEQ ID NO: 1527302 - RNA, 19 nt, Homo sapiens
  misc_RNA (1)...(19): siRNA sense strand
gcagaaagauacaaaguga

SEQ ID NO: 1527303 - RNA, 19 nt, Homo sapiens
  misc_RNA (1)...(19): siRNA sense strand
cuucagagcuuuaucaauu

SEQ ID NO: 1527304 - RNA, 19 nt, Homo sapiens
  misc_RNA (1)...(19): siRNA sense strand
gaacaauuaucagugguau

SEQ ID NO: 1527305 - RNA, 19 nt, Homo sapiens
  misc_RNA (1)...(19): siRNA sense strand
guauacagcuauugauugu

SEQ ID NO: 1527306 - RNA, 19 nt, Homo sapiens
  misc_RNA (1)...(19): siRNA sense strand
ggucagauguuguccuugu

SEQ ID NO: 1527307 - RNA, 19 nt, Homo sapiens
  misc_RNA (1)...(19): siRNA sense strand
ugaagaagcugagcagaca

SEQ ID NO: 1527308 - RNA, 19 nt, Homo sapiens
  misc_RNA (1)...(19): siRNA sense strand
ggagugauguauugauugg

SEQ ID NO: 1527309 - RNA, 19 nt, Homo sapiens
  misc_RNA (1)...(19): siRNA sense strand
gauauugccagcauucauu

SEQ ID NO: 1527310 - RNA, 19 nt, Homo sapiens
  misc_RNA (1)...(19): siRNA sense strand
aggaauacaucgugaagaa

SEQ ID NO: 1527311 - RNA, 19 nt, Homo sapiens
  misc_RNA (1)...(19): siRNA sense strand
gacccacucugcugucuug

SEQ ID NO: 1527312 - RNA, 19 nt, Homo sapiens
  misc_RNA (1)...(19): siRNA sense strand
caugguuggugcagacaua

SEQ ID NO: 1527313 - RNA, 19 nt, Homo sapiens
  misc_RNA (1)...(19): siRNA sense strand
ggaacaauuaucaguggua

SEQ ID NO: 1527314 - RNA, 19 nt, Homo sapiens
  misc_RNA (1)...(19): siRNA sense strand
gcucugucaugguuuauuc

SEQ ID NO: 1527315 - RNA, 19 nt, Homo sapiens
  misc_RNA (1)...(19): siRNA sense strand
ggcugaagcuggaggagaa

SEQ ID NO: 1527316 - RNA, 19 nt, Homo sapiens
  misc_RNA (1)...(19): siRNA sense strand
gcaaacucuucaccuggaa

SEQ ID NO: 1527317 - RNA, 19 nt, Homo sapiens
  misc_RNA (1)...(19): siRNA sense strand
ggaagcuaauuaugugauc

SEQ ID NO: 1527318 - RNA, 19 nt, Homo sapiens
  misc_RNA (1)...(19): siRNA sense strand
ccacucugcugucuuguag

SEQ ID NO: 1527319 - RNA, 19 nt, Homo sapiens
  misc_RNA (1)...(19): siRNA sense strand
guuggacucuuucuguuug

SEQ ID NO: 1527320 - RNA, 19 nt, Homo sapiens
  misc_RNA (1)...(19): siRNA sense strand
gcauuugcccuguguaugu

SEQ ID NO: 1527321 - RNA, 19 nt, Homo sapiens
  misc_RNA (1)...(19): siRNA sense strand
caugcaagauacagaguga

SEQ ID NO: 1527322 - RNA, 19 nt, Homo sapiens
  misc_RNA (1)...(19): siRNA sense strand
gauguuguccuuguguaua

SEQ ID NO: 1527323 - RNA, 19 nt, Homo sapiens
  misc_RNA (1)...(19): siRNA sense strand
gguauacagcuauugauug

SEQ ID NO: 1527324 - RNA, 19 nt, Homo sapiens
  misc_RNA (1)...(19): siRNA sense strand
gcggaccucuacagccuuu

SEQ ID NO: 1527325 - RNA, 19 nt, Homo sapiens
  misc_RNA (1)...(19): siRNA sense strand
uaucagugguauacagcua

SEQ ID NO: 1527326 - RNA, 19 nt, Homo sapiens
  misc_RNA (1)...(19): siRNA sense strand
gggacuagcagauguggaa

SEQ ID NO: 1527327 - RNA, 19 nt, Homo sapiens
  misc_RNA (1)...(19): siRNA sense strand
guccuucacugucaucaug

SEQ ID NO: 1527328 - RNA, 19 nt, Homo sapiens
  misc_RNA (1)...(19): siRNA sense strand
gcuugcuguuccuaauuua

SEQ ID NO: 1527329 - RNA, 19 nt, Homo sapiens
  misc_RNA (1)...(19): siRNA sense strand
ugauggcucugucaugguu

SEQ ID NO: 1527330 - RNA, 19 nt, Homo sapiens
  misc_RNA (1)...(19): siRNA sense strand
uguggaagcuaauuaugug

SEQ ID NO: 1527331 - RNA, 19 nt, Homo sapiens
  misc_RNA (1)...(19): siRNA sense strand
cagauguuguccuugugua

SEQ ID NO: 1527332 - RNA, 19 nt, Homo sapiens
  misc_RNA (1)...(19): siRNA sense strand
cgucagagccuaccaguac

SEQ ID NO: 1527333 - RNA, 19 nt, Homo sapiens
  misc_RNA (1)...(19): siRNA sense strand
cagauguggaagcuaauua

SEQ ID NO: 1527334 - RNA, 19 nt, Homo sapiens
  misc_RNA (1)...(19): siRNA sense strand
ugucaugguuuauucuuca

SEQ ID NO: 1527335 - RNA, 19 nt, Homo sapiens
  misc_RNA (1)...(19): siRNA sense strand
ggaauggugggccuguuug

SEQ ID NO: 1527336 - RNA, 19 nt, Homo sapiens
  misc_RNA (1)...(19): siRNA sense strand
gcuuugggauuccuguguu

SEQ ID NO: 1527337 - RNA, 19 nt, Homo sapiens
  misc_RNA (1)...(19): siRNA sense strand
ucagugguauacagcuauu

SEQ ID NO: 1527338 - RNA, 19 nt, Homo sapiens
  misc_RNA (1)...(19): siRNA sense strand
gcauugggauugacaaccu

SEQ ID NO: 1527339 - RNA, 19 nt, Homo sapiens
  misc_RNA (1)...(19): siRNA sense strand
gcagauguggaagcuaauu

SEQ ID NO: 1527340 - RNA, 19 nt, Homo sapiens
  misc_RNA (1)...(19): siRNA sense strand
cucuucaccuggaauauuu

SEQ ID NO: 1527341 - RNA, 19 nt, Homo sapiens
  misc_RNA (1)...(19): siRNA sense strand
aaacucuucaccuggaaua

SEQ ID NO: 1527342 - RNA, 19 nt, Homo sapiens
  misc_RNA (1)...(19): siRNA sense strand
gauaaaaggcaaacucuuc

SEQ ID NO: 1527343 - RNA, 19 nt, Homo sapiens
  misc_RNA (1)...(19): siRNA sense strand
gcagggagggaagacaauu

SEQ ID NO: 1527344 - RNA, 19 nt, Homo sapiens
  misc_RNA (1)...(19): siRNA sense strand
uaaggauauugccagcauu

SEQ ID NO: 1527345 - RNA, 19 nt, Homo sapiens
  misc_RNA (1)...(19): siRNA sense strand
agggagugauguauugauu

SEQ ID NO: 1527346 - RNA, 19 nt, Homo sapiens
  misc_RNA (1)...(19): siRNA sense strand
ccuaauuuauacagugaug

SEQ ID NO: 1527347 - RNA, 19 nt, Homo sapiens
  misc_RNA (1)...(19): siRNA sense strand
gaaaauugcccugcuguuc

SEQ ID NO: 1527348 - RNA, 19 nt, Homo sapiens
  misc_RNA (1)...(19): siRNA sense strand
ucaccagcauugggauuga

SEQ ID NO: 1527349 - RNA, 19 nt, Homo sapiens
  misc_RNA (1)...(19): siRNA sense strand
gauguggaagcuaauuaug

SEQ ID NO: 1527350 - RNA, 19 nt, Homo sapiens
  misc_RNA (1)...(19): siRNA sense strand
ucaugccauuggugauuaa

SEQ ID NO: 1527351 - RNA, 19 nt, Homo sapiens
  misc_RNA (1)...(19): siRNA sense strand
auaaggauauugccagcau

SEQ ID NO: 1527352 - RNA, 19 nt, Homo sapiens
  misc_RNA (1)...(19): siRNA sense strand
caauucagggagugaugua

SEQ ID NO: 1527353 - RNA, 19 nt, Homo sapiens
  misc_RNA (1)...(19): siRNA sense strand
aaaagaaaaugguggaagu

SEQ ID NO: 1527354 - RNA, 19 nt, Homo sapiens
  misc_RNA (1)...(19): siRNA sense strand
caauugcccugggucagau

SEQ ID NO: 1527355 - RNA, 19 nt, Homo sapiens
  misc_RNA (1)...(19): siRNA sense strand
ggcagaaagauacaaagug

SEQ ID NO: 1527356 - RNA, 19 nt, Homo sapiens
  misc_RNA (1)...(19): siRNA sense strand
ugccauuggugauuaaagu

SEQ ID NO: 1527357 - RNA, 19 nt, Homo sapiens
  misc_RNA (1)...(19): siRNA sense strand
uaccaguacacaacucuaa

SEQ ID NO: 1527358 - RNA, 19 nt, Homo sapiens
  misc_RNA (1)...(19): siRNA sense strand
ugcuugcuguuccuaauuu

SEQ ID NO: 1527359 - RNA, 19 nt, Homo sapiens
  misc_RNA (1)...(19): siRNA sense strand
gaaagauacaaagugaaca

SEQ ID NO: 1527360 - RNA, 19 nt, Homo sapiens
  misc_RNA (1)...(19): siRNA sense strand
cauuugcccuguguauguu

SEQ ID NO: 1527361 - RNA, 19 nt, Homo sapiens
  misc_RNA (1)...(19): siRNA sense strand
acaauuaucagugguauac

SEQ ID NO: 1527362 - RNA, 19 nt, Homo sapiens
  misc_RNA (1)...(19): siRNA sense strand
gggagugauguauugauug

SEQ ID NO: 1527363 - RNA, 19 nt, Homo sapiens
  misc_RNA (1)...(19): siRNA sense strand
uaaccaguguccagcuuuu

SEQ ID NO: 1527364 - RNA, 19 nt, Homo sapiens
  misc_RNA (1)...(19): siRNA sense strand
gacucuacauccuguccuu

SEQ ID NO: 1527365 - RNA, 19 nt, Homo sapiens
  misc_RNA (1)...(19): siRNA sense strand
uucaugccauuggugauua

SEQ ID NO: 1527366 - RNA, 19 nt, Homo sapiens
  misc_RNA (1)...(19): siRNA sense strand
uucagggagugauguauug

SEQ ID NO: 1527367 - RNA, 19 nt, Homo sapiens
  misc_RNA (1)...(19): siRNA sense strand
gaaaaugguggaaguacau

SEQ ID NO: 1527368 - RNA, 19 nt, Homo sapiens
  misc_RNA (1)...(19): siRNA sense strand
cauugggacuggaaaauug

SEQ ID NO: 1527369 - RNA, 19 nt, Homo sapiens
  misc_RNA (1)...(19): siRNA sense strand
ggauauugccagcauucau

SEQ ID NO: 1527370 - RNA, 19 nt, Homo sapiens
  misc_RNA (1)...(19): siRNA sense strand
gguuggugcagacauacua

SEQ ID NO: 1527371 - RNA, 19 nt, Homo sapiens
  misc_RNA (1)...(19): siRNA sense strand
ugggucagauguuguccuu

SEQ ID NO: 1527372 - RNA, 19 nt, Homo sapiens
  misc_RNA (1)...(19): siRNA sense strand
gagccuaccaguacacaac

SEQ ID NO: 1527373 - RNA, 19 nt, Homo sapiens
  misc_RNA (1)...(19): siRNA sense strand
agaaagauacaaagugaac

SEQ ID NO: 1527374 - RNA, 19 nt, Homo sapiens
  misc_RNA (1)...(19): siRNA sense strand
auugauuggugacaucuug

SEQ ID NO: 1527375 - RNA, 19 nt, Homo sapiens
  misc_RNA (1)...(19): siRNA sense strand
gauuguggaauauaaggau

SEQ ID NO: 1527376 - RNA, 19 nt, Homo sapiens
  misc_RNA (1)...(19): siRNA sense strand
ucuguuuggcuauaaguuu

SEQ ID NO: 1527377 - RNA, 19 nt, Homo sapiens
  misc_RNA (1)...(19): siRNA sense strand
guacagcuucaugccauug

SEQ ID NO: 1527378 - RNA, 19 nt, Homo sapiens
  misc_RNA (1)...(19): siRNA sense strand
gccaucaccagccaguauu

SEQ ID NO: 1527379 - RNA, 19 nt, Homo sapiens
  misc_RNA (1)...(19): siRNA sense strand
ggaauacaucgugaagaag

SEQ ID NO: 1527380 - RNA, 19 nt, Homo sapiens
  misc_RNA (1)...(19): siRNA sense strand
gaggaauacaucgugaaga

SEQ ID NO: 1527381 - RNA, 19 nt, Homo sapiens
  misc_RNA (1)...(19): siRNA sense strand
ucuaaccaguguccagcuu

SEQ ID NO: 1527382 - RNA, 19 nt, Homo sapiens
  misc_RNA (1)...(19): siRNA sense strand
uguauugauuggugacauc

SEQ ID NO: 1527383 - RNA, 19 nt, Homo sapiens
  misc_RNA (1)...(19): siRNA sense strand
gcugagcagacaggaguuu

SEQ ID NO: 1527384 - RNA, 19 nt, Homo sapiens
  misc_RNA (1)...(19): siRNA sense strand
uagcagggagggaagacaa

SEQ ID NO: 1527385 - RNA, 19 nt, Homo sapiens
  misc_RNA (1)...(19): siRNA sense strand
ccaucaccagccaguauuu

SEQ ID NO: 1527386 - RNA, 19 nt, Homo sapiens
  misc_RNA (1)...(19): siRNA sense strand
caaccugggcauccugaca

SEQ ID NO: 1527387 - RNA, 19 nt, Homo sapiens
  misc_RNA (1)...(19): siRNA sense strand
cagaaagauacaaagugaa

SEQ ID NO: 1527388 - RNA, 19 nt, Homo sapiens
  misc_RNA (1)...(19): siRNA sense strand
aaauugcccugcuguucgu

SEQ ID NO: 1527389 - RNA, 19 nt, Homo sapiens
  misc_RNA (1)...(19): siRNA sense strand
gacaauucagggagugaug

SEQ ID NO: 1527390 - RNA, 19 nt, Homo sapiens
  misc_RNA (1)...(19): siRNA sense strand
ggaaugugcugcugaauaa

SEQ ID NO: 1527391 - RNA, 19 nt, Homo sapiens
  misc_RNA (1)...(19): siRNA sense strand
uaacagcggugaagaguuu

SEQ ID NO: 1527392 - RNA, 19 nt, Homo sapiens
  misc_RNA (1)...(19): siRNA sense strand
ggaaaggccuccauucgaa

SEQ ID NO: 1527393 - RNA, 19 nt, Homo sapiens
  misc_RNA (1)...(19): siRNA sense strand
uaagaaagauggcgugugu

SEQ ID NO: 1527394 - RNA, 19 nt, Homo sapiens
  misc_RNA (1)...(19): siRNA sense strand
gaagaugacccauuauuuc

SEQ ID NO: 1527395 - RNA, 19 nt, Homo sapiens
  misc_RNA (1)...(19): siRNA sense strand
gcacaggagggaauauaua

SEQ ID NO: 1527396 - RNA, 19 nt, Homo sapiens
  misc_RNA (1)...(19): siRNA sense strand
cgaaugauguggacaacaa

SEQ ID NO: 1527397 - RNA, 19 nt, Homo sapiens
  misc_RNA (1)...(19): siRNA sense strand
ggaauaaacgucagccaaa

SEQ ID NO: 1527398 - RNA, 19 nt, Homo sapiens
  misc_RNA (1)...(19): siRNA sense strand
ggaagguaaugacgaaaga

SEQ ID NO: 1527399 - RNA, 19 nt, Homo sapiens
  misc_RNA (1)...(19): siRNA sense strand
agaaauagcucaugcaacu

SEQ ID NO: 1527400 - RNA, 19 nt, Homo sapiens
  misc_RNA (1)...(19): siRNA sense strand
ccagagggauuuguuauug

SEQ ID NO: 1527401 - RNA, 19 nt, Homo sapiens
  misc_RNA (1)...(19): siRNA sense strand
gagaagaugaagguuauua

SEQ ID NO: 1527402 - RNA, 19 nt, Homo sapiens
  misc_RNA (1)...(19): siRNA sense strand
gcaucgugcugaaguauga

SEQ ID NO: 1527403 - RNA, 19 nt, Homo sapiens
  misc_RNA (1)...(19): siRNA sense strand
cauagcaucuuuacuggaa

SEQ ID NO: 1527404 - RNA, 19 nt, Homo sapiens
  misc_RNA (1)...(19): siRNA sense strand
ucaaagaccacacaguuaa

SEQ ID NO: 1527405 - RNA, 19 nt, Homo sapiens
  misc_RNA (1)...(19): siRNA sense strand
gugagaagaugaagguuau

SEQ ID NO: 1527406 - RNA, 19 nt, Homo sapiens
  misc_RNA (1)...(19): siRNA sense strand
caacugaggauuuagagaa

SEQ ID NO: 1527407 - RNA, 19 nt, Homo sapiens
  misc_RNA (1)...(19): siRNA sense strand
aaagucugguguagaaaua

SEQ ID NO: 1527408 - RNA, 19 nt, Homo sapiens
  misc_RNA (1)...(19): siRNA sense strand
gcucaaagaccacacaguu

SEQ ID NO: 1527409 - RNA, 19 nt, Homo sapiens
  misc_RNA (1)...(19): siRNA sense strand
gaauaacagugagaagaug

SEQ ID NO: 1527410 - RNA, 19 nt, Homo sapiens
  misc_RNA (1)...(19): siRNA sense strand
agccaaagcuucaggguaa

SEQ ID NO: 1527411 - RNA, 19 nt, Homo sapiens
  misc_RNA (1)...(19): siRNA sense strand
ccacacaguuaauugaaau

SEQ ID NO: 1527412 - RNA, 19 nt, Homo sapiens
  misc_RNA (1)...(19): siRNA sense strand
gcagugagaccuacaguca

SEQ ID NO: 1527413 - RNA, 19 nt, Homo sapiens
  misc_RNA (1)...(19): siRNA sense strand
gauccgaccuaccauguuc

SEQ ID NO: 1527414 - RNA, 19 nt, Homo sapiens
  misc_RNA (1)...(19): siRNA sense strand
ucagaauacuggaggguuu

SEQ ID NO: 1527415 - RNA, 19 nt, Homo sapiens
  misc_RNA (1)...(19): siRNA sense strand
gagggaauauauacauugu

SEQ ID NO: 1527416 - RNA, 19 nt, Homo sapiens
  misc_RNA (1)...(19): siRNA sense strand
gaauaaacgucagccaaag

SEQ ID NO: 1527417 - RNA, 19 nt, Homo sapiens
  misc_RNA (1)...(19): siRNA sense strand
guggaaggaugguguauuc

SEQ ID NO: 1527418 - RNA, 19 nt, Homo sapiens
  misc_RNA (1)...(19): siRNA sense strand
ucaugcaacugaggauuua

SEQ ID NO: 1527419 - RNA, 19 nt, Homo sapiens
  misc_RNA (1)...(19): siRNA sense strand
gagaauaauggcaguaaga

SEQ ID NO: 1527420 - RNA, 19 nt, Homo sapiens
  misc_RNA (1)...(19): siRNA sense strand
ugaagaugacccauuauuu

SEQ ID NO: 1527421 - RNA, 19 nt, Homo sapiens
  misc_RNA (1)...(19): siRNA sense strand
ggagguggacggucagaaa

SEQ ID NO: 1527422 - RNA, 19 nt, Homo sapiens
  misc_RNA (1)...(19): siRNA sense strand
gcagugucccaucgucuua

SEQ ID NO: 1527423 - RNA, 19 nt, Homo sapiens
  misc_RNA (1)...(19): siRNA sense strand
gauuuguuauugcgaauga

SEQ ID NO: 1527424 - RNA, 19 nt, Homo sapiens
  misc_RNA (1)...(19): siRNA sense strand
gaguugguauccugaagaa

SEQ ID NO: 1527425 - RNA, 19 nt, Homo sapiens
  misc_RNA (1)...(19): siRNA sense strand
caacagcccagaugcagaa

SEQ ID NO: 1527426 - RNA, 19 nt, Homo sapiens
  misc_RNA (1)...(19): siRNA sense strand
gaauaauggcaguaagaaa

SEQ ID NO: 1527427 - RNA, 19 nt, Homo sapiens
  misc_RNA (1)...(19): siRNA sense strand
gcgaugccuuaggauauua

SEQ ID NO: 1527428 - RNA, 19 nt, Homo sapiens
  misc_RNA (1)...(19): siRNA sense strand
gagcgaugccuuaggauau

SEQ ID NO: 1527429 - RNA, 19 nt, Homo sapiens
  misc_RNA (1)...(19): siRNA sense strand
ggagcgaugccuuaggaua

SEQ ID NO: 1527430 - RNA, 19 nt, Homo sapiens
  misc_RNA (1)...(19): siRNA sense strand
gaaauaacagcggugaaga

SEQ ID NO: 1527431 - RNA, 19 nt, Homo sapiens
  misc_RNA (1)...(19): siRNA sense strand
gaagggaaacccacagauc

SEQ ID NO: 1527432 - RNA, 19 nt, Homo sapiens
  misc_RNA (1)...(19): siRNA sense strand
ggagacggcacuaugagaa

SEQ ID NO: 1527433 - RNA, 19 nt, Homo sapiens
  misc_RNA (1)...(19): siRNA sense strand
ggguuauccucacaaauga

SEQ ID NO: 1527434 - RNA, 19 nt, Homo sapiens
  misc_RNA (1)...(19): siRNA sense strand
aaagaugggcagugguuua

SEQ ID NO: 1527435 - RNA, 19 nt, Homo sapiens
  misc_RNA (1)...(19): siRNA sense strand
uaaacccuauugaggauga

SEQ ID NO: 1527436 - RNA, 19 nt, Homo sapiens
  misc_RNA (1)...(19): siRNA sense strand
ccucuucuaugaucgaauu

SEQ ID NO: 1527437 - RNA, 19 nt, Homo sapiens
  misc_RNA (1)...(19): siRNA sense strand
gaacuggugacacagaaau

SEQ ID NO: 1527438 - RNA, 19 nt, Homo sapiens
  misc_RNA (1)...(19): siRNA sense strand
uugcugaugugucuaauga

SEQ ID NO: 1527439 - RNA, 19 nt, Homo sapiens
  misc_RNA (1)...(19): siRNA sense strand
uccugaagaugacccauua

SEQ ID NO: 1527440 - RNA, 19 nt, Homo sapiens
  misc_RNA (1)...(19): siRNA sense strand
ggagggaauauauacauug

SEQ ID NO: 1527441 - RNA, 19 nt, Homo sapiens
  misc_RNA (1)...(19): siRNA sense strand
ggaaauauuagucgucaag

SEQ ID NO: 1527442 - RNA, 19 nt, Homo sapiens
  misc_RNA (1)...(19): siRNA sense strand
ugaaguggaugccuggaau

SEQ ID NO: 1527443 - RNA, 19 nt, Homo sapiens
  misc_RNA (1)...(19): siRNA sense strand
gaaguuccacagccacuga

SEQ ID NO: 1527444 - RNA, 19 nt, Homo sapiens
  misc_RNA (1)...(19): siRNA sense strand
gaacuuuugugcccaagaa

SEQ ID NO: 1527445 - RNA, 19 nt, Homo sapiens
  misc_RNA (1)...(19): siRNA sense strand
cugaggauuuagagaauaa

SEQ ID NO: 1527446 - RNA, 19 nt, Homo sapiens
  misc_RNA (1)...(19): siRNA sense strand
ggagcuugcugaugugucu

SEQ ID NO: 1527447 - RNA, 19 nt, Homo sapiens
  misc_RNA (1)...(19): siRNA sense strand
gcugaaguaugaaccagau

SEQ ID NO: 1527448 - RNA, 19 nt, Homo sapiens
  misc_RNA (1)...(19): siRNA sense strand
aaaggcagcucuacauggu

SEQ ID NO: 1527449 - RNA, 19 nt, Homo sapiens
  misc_RNA (1)...(19): siRNA sense strand
cacaggaacuggugacaca

SEQ ID NO: 1527450 - RNA, 19 nt, Homo sapiens
  misc_RNA (1)...(19): siRNA sense strand
gauguuaagauacuguuga

SEQ ID NO: 1527451 - RNA, 19 nt, Homo sapiens
  misc_RNA (1)...(19): siRNA sense strand
ccggccacuuuaagaauua

SEQ ID NO: 1527452 - RNA, 19 nt, Homo sapiens
  misc_RNA (1)...(19): siRNA sense strand
cggaaugugcugcugaaua

SEQ ID NO: 1527453 - RNA, 19 nt, Homo sapiens
  misc_RNA (1)...(19): siRNA sense strand
cuaaggaguugcggaaugu

SEQ ID NO: 1527454 - RNA, 19 nt, Homo sapiens
  misc_RNA (1)...(19): siRNA sense strand
ccaaggaugaauuuguuaa

SEQ ID NO: 1527455 - RNA, 19 nt, Homo sapiens
  misc_RNA (1)...(19): siRNA sense strand
ccacagaucccucuaagcu

SEQ ID NO: 1527456 - RNA, 19 nt, Homo sapiens
  misc_RNA (1)...(19): siRNA sense strand
cgaaagaugggcagugguu

SEQ ID NO: 1527457 - RNA, 19 nt, Homo sapiens
  misc_RNA (1)...(19): siRNA sense strand
gcagcuacauggcuuacag

SEQ ID NO: 1527458 - RNA, 19 nt, Homo sapiens
  misc_RNA (1)...(19): siRNA sense strand
gaacggcuucauuaucuca

SEQ ID NO: 1527459 - RNA, 19 nt, Homo sapiens
  misc_RNA (1)...(19): siRNA sense strand
gggaaaggccuccauucga

SEQ ID NO: 1527460 - RNA, 19 nt, Homo sapiens
  misc_RNA (1)...(19): siRNA sense strand
gguggacggucagaaaguu

SEQ ID NO: 1527461 - RNA, 19 nt, Homo sapiens
  misc_RNA (1)...(19): siRNA sense strand
gaucaaagucugguguaga

SEQ ID NO: 1527462 - RNA, 19 nt, Homo sapiens
  misc_RNA (1)...(19): siRNA sense strand
ucccaaggaugaauuuguu

SEQ ID NO: 1527463 - RNA, 19 nt, Homo sapiens
  misc_RNA (1)...(19): siRNA sense strand
ggaaaguccgucauucaca

SEQ ID NO: 1527464 - RNA, 19 nt, Homo sapiens
  misc_RNA (1)...(19): siRNA sense strand
ucagaaaguugaaguucca

SEQ ID NO: 1527465 - RNA, 19 nt, Homo sapiens
  misc_RNA (1)...(19): siRNA sense strand
gaaaaucgccacacuugga

SEQ ID NO: 1527466 - RNA, 19 nt, Homo sapiens
  misc_RNA (1)...(19): siRNA sense strand
gaaagaugggcagugguuu

SEQ ID NO: 1527467 - RNA, 19 nt, Homo sapiens
  misc_RNA (1)...(19): siRNA sense strand
guggaugccuggaaucaca

SEQ ID NO: 1527468 - RNA, 19 nt, Homo sapiens
  misc_RNA (1)...(19): siRNA sense strand
gaucgaauuuuaugugaug

SEQ ID NO: 1527469 - RNA, 19 nt, Homo sapiens
  misc_RNA (1)...(19): siRNA sense strand
gcaaaggaccuggcaaagg

SEQ ID NO: 1527470 - RNA, 19 nt, Homo sapiens
  misc_RNA (1)...(19): siRNA sense strand
gaccuacagucaagcaaag

SEQ ID NO: 1527471 - RNA, 19 nt, Homo sapiens
  misc_RNA (1)...(19): siRNA sense strand
aggcagcucuacaugguuu

SEQ ID NO: 1527472 - RNA, 19 nt, Homo sapiens
  misc_RNA (1)...(19): siRNA sense strand
ucaaugccguggaauaaac

SEQ ID NO: 1527473 - RNA, 19 nt, Homo sapiens
  misc_RNA (1)...(19): siRNA sense strand
gagaaaaucgccacacuug

SEQ ID NO: 1527474 - RNA, 19 nt, Homo sapiens
  misc_RNA (1)...(19): siRNA sense strand
caagaagcuguuagcauga

SEQ ID NO: 1527475 - RNA, 19 nt, Homo sapiens
  misc_RNA (1)...(19): siRNA sense strand
caaagucugguguagaaau

SEQ ID NO: 1527476 - RNA, 19 nt, Homo sapiens
  misc_RNA (1)...(19): siRNA sense strand
ucuaaggaguugcggaaug

SEQ ID NO: 1527477 - RNA, 19 nt, Homo sapiens
  misc_RNA (1)...(19): siRNA sense strand
gcagagaccagagaaagca

SEQ ID NO: 1527478 - RNA, 19 nt, Homo sapiens
  misc_RNA (1)...(19): siRNA sense strand
gcugaugugucuaaugaac

SEQ ID NO: 1527479 - RNA, 19 nt, Homo sapiens
  misc_RNA (1)...(19): siRNA sense strand
gagacggcacuaugagaaa

SEQ ID NO: 1527480 - RNA, 19 nt, Homo sapiens
  misc_RNA (1)...(19): siRNA sense strand
gaccacacaguuaauugaa

SEQ ID NO: 1527481 - RNA, 19 nt, Homo sapiens
  misc_RNA (1)...(19): siRNA sense strand
gaagauguuaagauacugu

SEQ ID NO: 1527482 - RNA, 19 nt, Homo sapiens
  misc_RNA (1)...(19): siRNA sense strand
uggaagauguuaagauacu

SEQ ID NO: 1527483 - RNA, 19 nt, Homo sapiens
  misc_RNA (1)...(19): siRNA sense strand
aaauagcucaugcaacuga

SEQ ID NO: 1527484 - RNA, 19 nt, Homo sapiens
  misc_RNA (1)...(19): siRNA sense strand
gcuggaaaguccgucauuc

SEQ ID NO: 1527485 - RNA, 19 nt, Homo sapiens
  misc_RNA (1)...(19): siRNA sense strand
aagcagucauagcaucuuu

SEQ ID NO: 1527486 - RNA, 19 nt, Homo sapiens
  misc_RNA (1)...(19): siRNA sense strand
ggaccaccuuaaauagcuu

SEQ ID NO: 1527487 - RNA, 19 nt, Homo sapiens
  misc_RNA (1)...(19): siRNA sense strand
aaucuucaaugccguggaa

SEQ ID NO: 1527488 - RNA, 19 nt, Homo sapiens
  misc_RNA (1)...(19): siRNA sense strand
ccggacagccagacaauga

SEQ ID NO: 1527489 - RNA, 19 nt, Homo sapiens
  misc_RNA (1)...(19): siRNA sense strand
ugaauaacagugagaagau

SEQ ID NO: 1527490 - RNA, 19 nt, Homo sapiens
  misc_RNA (1)...(19): siRNA sense strand
gagaggagcugcagaaucu

SEQ ID NO: 1527491 - RNA, 19 nt, Homo sapiens
  misc_RNA (1)...(19): siRNA sense strand
ugacaagauugcugcauua

SEQ ID NO: 1527492 - RNA, 19 nt, Homo sapiens
  misc_RNA (1)...(19): siRNA sense strand
caagauugcugcauuacga

SEQ ID NO: 1527493 - RNA, 19 nt, Homo sapiens
  misc_RNA (1)...(19): siRNA sense strand
aaacuuaccugaugaagag

SEQ ID NO: 1527494 - RNA, 19 nt, Homo sapiens
  misc_RNA (1)...(19): siRNA sense strand
gaauucacuucaucaagaa

SEQ ID NO: 1527495 - RNA, 19 nt, Homo sapiens
  misc_RNA (1)...(19): siRNA sense strand
ucaaagccauaguugguaa

SEQ ID NO: 1527496 - RNA, 19 nt, Homo sapiens
  misc_RNA (1)...(19): siRNA sense strand
gaagaauggaugcacguuu

SEQ ID NO: 1527497 - RNA, 19 nt, Homo sapiens
  misc_RNA (1)...(19): siRNA sense strand
cugcacagcuacaggauuu

SEQ ID NO: 1527498 - RNA, 19 nt, Homo sapiens
  misc_RNA (1)...(19): siRNA sense strand
ggaaagaugaaaucaaaca

SEQ ID NO: 1527499 - RNA, 19 nt, Homo sapiens
  misc_RNA (1)...(19): siRNA sense strand
guaccaagauuaucacacu

SEQ ID NO: 1527500 - RNA, 19 nt, Homo sapiens
  misc_RNA (1)...(19): siRNA sense strand
gugacaagauugcugcauu

SEQ ID NO: 1527501 - RNA, 19 nt, Homo sapiens
  misc_RNA (1)...(19): siRNA sense strand
gcaguugaaucaguugaau

SEQ ID NO: 1527502 - RNA, 19 nt, Homo sapiens
  misc_RNA (1)...(19): siRNA sense strand
gcccgcagcuucuucacaa

SEQ ID NO: 1527503 - RNA, 19 nt, Homo sapiens
  misc_RNA (1)...(19): siRNA sense strand
guagagaggagcugcagaa

SEQ ID NO: 1527504 - RNA, 19 nt, Homo sapiens
  misc_RNA (1)...(19): siRNA sense strand
gagcuuauccuguguacca

SEQ ID NO: 1527505 - RNA, 19 nt, Homo sapiens
  misc_RNA (1)...(19): siRNA sense strand
gaggagcugcagaaucuaa

SEQ ID NO: 1527506 - RNA, 19 nt, Homo sapiens
  misc_RNA (1)...(19): siRNA sense strand
ccaagauuaucacacuguu

SEQ ID NO: 1527507 - RNA, 19 nt, Homo sapiens
  misc_RNA (1)...(19): siRNA sense strand
caucaagaaacuaucauga

SEQ ID NO: 1527508 - RNA, 19 nt, Homo sapiens
  misc_RNA (1)...(19): siRNA sense strand
agagauauuucagcaguug

SEQ ID NO: 1527509 - RNA, 19 nt, Homo sapiens
  misc_RNA (1)...(19): siRNA sense strand
ggagcugcagaaucuaaua

SEQ ID NO: 1527510 - RNA, 19 nt, Homo sapiens
  misc_RNA (1)...(19): siRNA sense strand
gcagguaaagcuugcacuu

SEQ ID NO: 1527511 - RNA, 19 nt, Homo sapiens
  misc_RNA (1)...(19): siRNA sense strand
caagauuaucacacuguuu

SEQ ID NO: 1527512 - RNA, 19 nt, Homo sapiens
  misc_RNA (1)...(19): siRNA sense strand
guaggaaagaugaaaucaa

SEQ ID NO: 1527513 - RNA, 19 nt, Homo sapiens
  misc_RNA (1)...(19): siRNA sense strand
aagauuaucacacuguuug

SEQ ID NO: 1527514 - RNA, 19 nt, Homo sapiens
  misc_RNA (1)...(19): siRNA sense strand
uaucaugaaaugcgugaaa

SEQ ID NO: 1527515 - RNA, 19 nt, Homo sapiens
  misc_RNA (1)...(19): siRNA sense strand
cuauugaaaugaguagaga

SEQ ID NO: 1527516 - RNA, 19 nt, Homo sapiens
  misc_RNA (1)...(19): siRNA sense strand
aagaauggaugcacguuuu

SEQ ID NO: 1527517 - RNA, 19 nt, Homo sapiens
  misc_RNA (1)...(19): siRNA sense strand
uauccuguguaccaagauu

SEQ ID NO: 1527518 - RNA, 19 nt, Homo sapiens
  misc_RNA (1)...(19): siRNA sense strand
gcagcuucuucacaaaaua

SEQ ID NO: 1527519 - RNA, 19 nt, Homo sapiens
  misc_RNA (1)...(19): siRNA sense strand
gcauuuguggucgagcuua

SEQ ID NO: 1527520 - RNA, 19 nt, Homo sapiens
  misc_RNA (1)...(19): siRNA sense strand
gaaagaugaaaucaaacag

SEQ ID NO: 1527521 - RNA, 19 nt, Homo sapiens
  misc_RNA (1)...(19): siRNA sense strand
ugaaaugcgugaaaaguag

SEQ ID NO: 1527522 - RNA, 19 nt, Homo sapiens
  misc_RNA (1)...(19): siRNA sense strand
ucacacuguuugggaauca

SEQ ID NO: 1527523 - RNA, 19 nt, Homo sapiens
  misc_RNA (1)...(19): siRNA sense strand
auaaggugguccugcaguu

SEQ ID NO: 1527524 - RNA, 19 nt, Homo sapiens
  misc_RNA (1)...(19): siRNA sense strand
ucuaauacaguccuuggaa

SEQ ID NO: 1527525 - RNA, 19 nt, Homo sapiens
  misc_RNA (1)...(19): siRNA sense strand
uauuuccucugcacagcua

SEQ ID NO: 1527526 - RNA, 19 nt, Homo sapiens
  misc_RNA (1)...(19): siRNA sense strand
ggucgagcuuauccugugu

SEQ ID NO: 1527527 - RNA, 19 nt, Homo sapiens
  misc_RNA (1)...(19): siRNA sense strand
ggaugcacguuuuagaaga

SEQ ID NO: 1527528 - RNA, 19 nt, Homo sapiens
  misc_RNA (1)...(19): siRNA sense strand
cuuaccugaugaagagaua

SEQ ID NO: 1527529 - RNA, 19 nt, Homo sapiens
  misc_RNA (1)...(19): siRNA sense strand
gguccugcaguugaaauaa

SEQ ID NO: 1527530 - RNA, 19 nt, Homo sapiens
  misc_RNA (1)...(19): siRNA sense strand
cauuuguggucgagcuuau

SEQ ID NO: 1527531 - RNA, 19 nt, Homo sapiens
  misc_RNA (1)...(19): siRNA sense strand
caaagccauaguugguaaa

SEQ ID NO: 1527532 - RNA, 19 nt, Homo sapiens
  misc_RNA (1)...(19): siRNA sense strand
gagcugcagaaucuaauac

SEQ ID NO: 1527533 - RNA, 19 nt, Homo sapiens
  misc_RNA (1)...(19): siRNA sense strand
aagagauauuucagcaguu

SEQ ID NO: 1527534 - RNA, 19 nt, Homo sapiens
  misc_RNA (1)...(19): siRNA sense strand
ccuuggaagcagcgaauaa

SEQ ID NO: 1527535 - RNA, 19 nt, Homo sapiens
  misc_RNA (1)...(19): siRNA sense strand
gcugcagaaucuaauacag

SEQ ID NO: 1527536 - RNA, 19 nt, Homo sapiens
  misc_RNA (1)...(19): siRNA sense strand
uuacgaaugccacuuuuaa

SEQ ID NO: 1527537 - RNA, 19 nt, Homo sapiens
  misc_RNA (1)...(19): siRNA sense strand
cuuauccuguguaccaaga

SEQ ID NO: 1527538 - RNA, 19 nt, Homo sapiens
  misc_RNA (1)...(19): siRNA sense strand
ucaagagaaauaguugcua

SEQ ID NO: 1527539 - RNA, 19 nt, Homo sapiens
  misc_RNA (1)...(19): siRNA sense strand
uaaggugguccugcaguug

SEQ ID NO: 1527540 - RNA, 19 nt, Homo sapiens
  misc_RNA (1)...(19): siRNA sense strand
ggauuuugauuggcaggua

SEQ ID NO: 1527541 - RNA, 19 nt, Homo sapiens
  misc_RNA (1)...(19): siRNA sense strand
gcaaggcucuucagaugga

SEQ ID NO: 1527542 - RNA, 19 nt, Homo sapiens
  misc_RNA (1)...(19): siRNA sense strand
guccauggauuuacuuuga

SEQ ID NO: 1527543 - RNA, 19 nt, Homo sapiens
  misc_RNA (1)...(19): siRNA sense strand
ggagauugcugggaugguu

SEQ ID NO: 1527544 - RNA, 19 nt, Homo sapiens
  misc_RNA (1)...(19): siRNA sense strand
aagcaaggcucuucagaug

SEQ ID NO: 1527545 - RNA, 19 nt, Homo sapiens
  misc_RNA (1)...(19): siRNA sense strand
gaaauaagcaaggcucuuc

SEQ ID NO: 1527546 - RNA, 19 nt, Homo sapiens
  misc_RNA (1)...(19): siRNA sense strand
gcgcauugaucaaggaaga

SEQ ID NO: 1527547 - RNA, 19 nt, Homo sapiens
  misc_RNA (1)...(19): siRNA sense strand
gcaaugaguguaauaaugg

SEQ ID NO: 1527548 - RNA, 19 nt, Homo sapiens
  misc_RNA (1)...(19): siRNA sense strand
cuaaaucccuggagcuuca

SEQ ID NO: 1527549 - RNA, 19 nt, Homo sapiens
  misc_RNA (1)...(19): siRNA sense strand
ggagaagaaccacuuacaa

SEQ ID NO: 1527550 - RNA, 19 nt, Homo sapiens
  misc_RNA (1)...(19): siRNA sense strand
gagaagaaccacuuacaag

SEQ ID NO: 1527551 - RNA, 19 nt, Homo sapiens
  misc_RNA (1)...(19): siRNA sense strand
gcauugcuguccauggauu

SEQ ID NO: 1527552 - RNA, 19 nt, Homo sapiens
  misc_RNA (1)...(19): siRNA sense strand
gaagaaccacuuacaagag

SEQ ID NO: 1527553 - RNA, 19 nt, Homo sapiens
  misc_RNA (1)...(19): siRNA sense strand
gccaugagcuagacaccuu

SEQ ID NO: 1527554 - RNA, 19 nt, Homo sapiens
  misc_RNA (1)...(19): siRNA sense strand
gaacagacugguagaggau

SEQ ID NO: 1527555 - RNA, 19 nt, Homo sapiens
  misc_RNA (1)...(19): siRNA sense strand
ccagguaaauggaaacagu

SEQ ID NO: 1527556 - RNA, 19 nt, Homo sapiens
  misc_RNA (1)...(19): siRNA sense strand
cagauggaguuucuaaauc

SEQ ID NO: 1527557 - RNA, 19 nt, Homo sapiens
  misc_RNA (1)...(19): siRNA sense strand
gcaugcaagugguuucugu

SEQ ID NO: 1527558 - RNA, 19 nt, Homo sapiens
  misc_RNA (1)...(19): siRNA sense strand
ugaauaauagggagaagaa

SEQ ID NO: 1527559 - RNA, 19 nt, Homo sapiens
  misc_RNA (1)...(19): siRNA sense strand
uuccagagcaagcuaauua

SEQ ID NO: 1527560 - RNA, 19 nt, Homo sapiens
  misc_RNA (1)...(19): siRNA sense strand
gcucccagguaaauggaaa

SEQ ID NO: 1527561 - RNA, 19 nt, Homo sapiens
  misc_RNA (1)...(19): siRNA sense strand
agaagaaccacuuacaaga

SEQ ID NO: 1527562 - RNA, 19 nt, Homo sapiens
  misc_RNA (1)...(19): siRNA sense strand
gaagagaagagugaucauc

SEQ ID NO: 1527563 - RNA, 19 nt, Homo sapiens
  misc_RNA (1)...(19): siRNA sense strand
uggaaacaguggcgcauug

SEQ ID NO: 1527564 - RNA, 19 nt, Homo sapiens
  misc_RNA (1)...(19): siRNA sense strand
ugaaccagaucgacuccaa

SEQ ID NO: 1527565 - RNA, 19 nt, Homo sapiens
  misc_RNA (1)...(19): siRNA sense strand
ucaaggaagagaagaguga

SEQ ID NO: 1527566 - RNA, 19 nt, Homo sapiens
  misc_RNA (1)...(19): siRNA sense strand
ggaaacaguggcgcauuga

SEQ ID NO: 1527567 - RNA, 19 nt, Homo sapiens
  misc_RNA (1)...(19): siRNA sense strand
ucagauggaguuucuaaau

SEQ ID NO: 1527568 - RNA, 19 nt, Homo sapiens
  misc_RNA (1)...(19): siRNA sense strand
cagcucuguuugcuaauga

SEQ ID NO: 1527569 - RNA, 19 nt, Homo sapiens
  misc_RNA (1)...(19): siRNA sense strand
ccagagcaagcuaauuaaa

SEQ ID NO: 1527570 - RNA, 19 nt, Homo sapiens
  misc_RNA (1)...(19): siRNA sense strand
gcaagcuguuccagagcaa

SEQ ID NO: 1527571 - RNA, 19 nt, Homo sapiens
  misc_RNA (1)...(19): siRNA sense strand
gagacagcaaugaguguaa

SEQ ID NO: 1527572 - RNA, 19 nt, Homo sapiens
  misc_RNA (1)...(19): siRNA sense strand
gcgaguaucucugguugag

SEQ ID NO: 1527573 - RNA, 19 nt, Homo sapiens
  misc_RNA (1)...(19): siRNA sense strand
agcaaugaguguaauaaug

SEQ ID NO: 1527574 - RNA, 19 nt, Homo sapiens
  misc_RNA (1)...(19): siRNA sense strand
gcuaccucccuaugaauaa

SEQ ID NO: 1527575 - RNA, 19 nt, Homo sapiens
  misc_RNA (1)...(19): siRNA sense strand
ccauggauuuacuuugaug

SEQ ID NO: 1527576 - RNA, 19 nt, Homo sapiens
  misc_RNA (1)...(19): siRNA sense strand
gggagaagaaccacuuaca

SEQ ID NO: 1527577 - RNA, 19 nt, Homo sapiens
  misc_RNA (1)...(19): siRNA sense strand
ggaaauaagcaaggcucuu

SEQ ID NO: 1527578 - RNA, 19 nt, Homo sapiens
  misc_RNA (1)...(19): siRNA sense strand
gaggaaaacuggagauugc

SEQ ID NO: 1527579 - RNA, 19 nt, Homo sapiens
  misc_RNA (1)...(19): siRNA sense strand
agagcaagcuaauuaaagc

SEQ ID NO: 1527580 - RNA, 19 nt, Homo sapiens
  misc_RNA (1)...(19): siRNA sense strand
gacagcaaugaguguaaua

SEQ ID NO: 1527581 - RNA, 19 nt, Homo sapiens
  misc_RNA (1)...(19): siRNA sense strand
ggaaaagaacagacuggua

SEQ ID NO: 1527582 - RNA, 19 nt, Homo sapiens
  misc_RNA (1)...(19): siRNA sense strand
gaaaggggcauggaaaaga

SEQ ID NO: 1527583 - RNA, 19 nt, Homo sapiens
  misc_RNA (1)...(19): siRNA sense strand
uaagcaaggcucuucagau

SEQ ID NO: 1527584 - RNA, 19 nt, Homo sapiens
  misc_RNA (1)...(19): siRNA sense strand
agacagcaaugaguguaau

SEQ ID NO: 1527585 - RNA, 19 nt, Homo sapiens
  misc_RNA (1)...(19): siRNA sense strand
ggcagugucuacccagcuu

SEQ ID NO: 1527586 - RNA, 19 nt, Homo sapiens
  misc_RNA (1)...(19): siRNA sense strand
ugucuacccagcuuuauga

SEQ ID NO: 1527587 - RNA, 19 nt, Homo sapiens
  misc_RNA (1)...(19): siRNA sense strand
gaaacaguggcgcauugau

SEQ ID NO: 1527588 - RNA, 19 nt, Homo sapiens
  misc_RNA (1)...(19): siRNA sense strand
aaacaguggcgcauugauc

SEQ ID NO: 1527589 - RNA, 19 nt, Homo sapiens
  misc_RNA (1)...(19): siRNA sense strand
cagagcaagcuaauuaaag

SEQ ID NO: 1527590 - RNA, 19 nt, Homo sapiens
  misc_RNA (1)...(19): siRNA sense strand
gaaccacuuacaagagcaa

SEQ ID NO: 1527591 - RNA, 19 nt, Homo sapiens
  misc_RNA (1)...(19): siRNA sense strand
gaucaaggaagagaagagu

SEQ ID NO: 1527592 - RNA, 19 nt, Homo sapiens
  misc_RNA (1)...(19): siRNA sense strand
cggucucgcucccagguaa

SEQ ID NO: 1527593 - RNA, 19 nt, Homo sapiens
  misc_RNA (1)...(19): siRNA sense strand
cagaucgacuccaagaacu

SEQ ID NO: 1527594 - RNA, 19 nt, Homo sapiens
  misc_RNA (1)...(19): siRNA sense strand
gaucgacuccaagaacuca

SEQ ID NO: 1527595 - RNA, 19 nt, Homo sapiens
  misc_RNA (1)...(19): siRNA sense strand
caaugaguguaauaauggu

SEQ ID NO: 1527596 - RNA, 19 nt, Homo sapiens
  misc_RNA (1)...(19): siRNA sense strand
cagcaaugaguguaauaau

SEQ ID NO: 1527597 - RNA, 19 nt, Homo sapiens
  misc_RNA (1)...(19): siRNA sense strand
cuucagauggaguuucuaa

SEQ ID NO: 1527598 - RNA, 19 nt, Homo sapiens
  misc_RNA (1)...(19): siRNA sense strand
gcuagacaccuuccuugca

SEQ ID NO: 1527599 - RNA, 19 nt, Homo sapiens
  misc_RNA (1)...(19): siRNA sense strand
ccagaucgacuccaagaac

SEQ ID NO: 1527600 - RNA, 19 nt, Homo sapiens
  misc_RNA (1)...(19): siRNA sense strand
cagugucuacccagcuuua

SEQ ID NO: 1527601 - RNA, 19 nt, Homo sapiens
  misc_RNA (1)...(19): siRNA sense strand
gcauugaucaaggaagaga

SEQ ID NO: 1527602 - RNA, 19 nt, Homo sapiens
  misc_RNA (1)...(19): siRNA sense strand
aaaggggcauggaaaagaa

SEQ ID NO: 1527603 - RNA, 19 nt, Homo sapiens
  misc_RNA (1)...(19): siRNA sense strand
cuaccucccuaugaauaau

SEQ ID NO: 1527604 - RNA, 19 nt, Homo sapiens
  misc_RNA (1)...(19): siRNA sense strand
agauggaguuucuaaaucc

SEQ ID NO: 1527605 - RNA, 19 nt, Homo sapiens
  misc_RNA (1)...(19): siRNA sense strand
acagcaaugaguguaauaa

SEQ ID NO: 1527606 - RNA, 19 nt, Homo sapiens
  misc_RNA (1)...(19): siRNA sense strand
agagaagagugaucaucgu

SEQ ID NO: 1527607 - RNA, 19 nt, Homo sapiens
  misc_RNA (1)...(19): siRNA sense strand
uagggagaagaaccacuua

SEQ ID NO: 1527608 - RNA, 19 nt, Homo sapiens
  misc_RNA (1)...(19): siRNA sense strand
gagcaagcuaauuaaagca

SEQ ID NO: 1527609 - RNA, 19 nt, Homo sapiens
  misc_RNA (1)...(19): siRNA sense strand
caagauugagaaacuggau

SEQ ID NO: 1527610 - RNA, 19 nt, Homo sapiens
  misc_RNA (1)...(19): siRNA sense strand
gcaaggcucuucagaugga

SEQ ID NO: 1527611 - RNA, 19 nt, Homo sapiens
  misc_RNA (1)...(19): siRNA sense strand
guccauggauuuacuuuga

SEQ ID NO: 1527612 - RNA, 19 nt, Homo sapiens
  misc_RNA (1)...(19): siRNA sense strand
ggagauugcugggaugguu

SEQ ID NO: 1527613 - RNA, 19 nt, Homo sapiens
  misc_RNA (1)...(19): siRNA sense strand
aagcaaggcucuucagaug

SEQ ID NO: 1527614 - RNA, 19 nt, Homo sapiens
  misc_RNA (1)...(19): siRNA sense strand
gaaauaagcaaggcucuuc

SEQ ID NO: 1527615 - RNA, 19 nt, Homo sapiens
  misc_RNA (1)...(19): siRNA sense strand
gcgcauugaucaaggaaga

SEQ ID NO: 1527616 - RNA, 19 nt, Homo sapiens
  misc_RNA (1)...(19): siRNA sense strand
gcaaugaguguaauaaugg

SEQ ID NO: 1527617 - RNA, 19 nt, Homo sapiens
  misc_RNA (1)...(19): siRNA sense strand
cuaaaucccuggagcuuca

SEQ ID NO: 1527618 - RNA, 19 nt, Homo sapiens
  misc_RNA (1)...(19): siRNA sense strand
ggagaagaaccacuuacaa

SEQ ID NO: 1527619 - RNA, 19 nt, Homo sapiens
  misc_RNA (1)...(19): siRNA sense strand
gagaagaaccacuuacaag

SEQ ID NO: 1527620 - RNA, 19 nt, Homo sapiens
  misc_RNA (1)...(19): siRNA sense strand
gcauugcuguccauggauu

SEQ ID NO: 1527621 - RNA, 19 nt, Homo sapiens
  misc_RNA (1)...(19): siRNA sense strand
gaagaaccacuuacaagag

SEQ ID NO: 1527622 - RNA, 19 nt, Homo sapiens
  misc_RNA (1)...(19): siRNA sense strand
gccaugagcuagacaccuu

SEQ ID NO: 1527623 - RNA, 19 nt, Homo sapiens
  misc_RNA (1)...(19): siRNA sense strand
gaacagacugguagaggau

SEQ ID NO: 1527624 - RNA, 19 nt, Homo sapiens
  misc_RNA (1)...(19): siRNA sense strand
ccagguaaauggaaacagu

SEQ ID NO: 1527625 - RNA, 19 nt, Homo sapiens
  misc_RNA (1)...(19): siRNA sense strand
cagauggaguuucuaaauc

SEQ ID NO: 1527626 - RNA, 19 nt, Homo sapiens
  misc_RNA (1)...(19): siRNA sense strand
gcaugcaagugguuucugu

SEQ ID NO: 1527627 - RNA, 19 nt, Homo sapiens
  misc_RNA (1)...(19): siRNA sense strand
ugaauaauagggagaagaa

SEQ ID NO: 1527628 - RNA, 19 nt, Homo sapiens
  misc_RNA (1)...(19): siRNA sense strand
uuccagagcaagcuaauua

SEQ ID NO: 1527629 - RNA, 19 nt, Homo sapiens
  misc_RNA (1)...(19): siRNA sense strand
gcucccagguaaauggaaa

SEQ ID NO: 1527630 - RNA, 19 nt, Homo sapiens
  misc_RNA (1)...(19): siRNA sense strand
agaagaaccacuuacaaga

SEQ ID NO: 1527631 - RNA, 19 nt, Homo sapiens
  misc_RNA (1)...(19): siRNA sense strand
gaagagaagagugaucauc

SEQ ID NO: 1527632 - RNA, 19 nt, Homo sapiens
  misc_RNA (1)...(19): siRNA sense strand
uggaaacaguggcgcauug

SEQ ID NO: 1527633 - RNA, 19 nt, Homo sapiens
  misc_RNA (1)...(19): siRNA sense strand
ugaaccagaucgacuccaa

SEQ ID NO: 1527634 - RNA, 19 nt, Homo sapiens
  misc_RNA (1)...(19): siRNA sense strand
ucaaggaagagaagaguga

SEQ ID NO: 1527635 - RNA, 19 nt, Homo sapiens
  misc_RNA (1)...(19): siRNA sense strand
ggaaacaguggcgcauuga

SEQ ID NO: 1527636 - RNA, 19 nt, Homo sapiens
  misc_RNA (1)...(19): siRNA sense strand
ucagauggaguuucuaaau

SEQ ID NO: 1527637 - RNA, 19 nt, Homo sapiens
  misc_RNA (1)...(19): siRNA sense strand
cagcucuguuugcuaauga

SEQ ID NO: 1527638 - RNA, 19 nt, Homo sapiens
  misc_RNA (1)...(19): siRNA sense strand
ccagagcaagcuaauuaaa

SEQ ID NO: 1527639 - RNA, 19 nt, Homo sapiens
  misc_RNA (1)...(19): siRNA sense strand
gcaagcuguuccagagcaa

SEQ ID NO: 1527640 - RNA, 19 nt, Homo sapiens
  misc_RNA (1)...(19): siRNA sense strand
gagacagcaaugaguguaa

SEQ ID NO: 1527641 - RNA, 19 nt, Homo sapiens
  misc_RNA (1)...(19): siRNA sense strand
gcgaguaucucugguugag

SEQ ID NO: 1527642 - RNA, 19 nt, Homo sapiens
  misc_RNA (1)...(19): siRNA sense strand
agcaaugaguguaauaaug

SEQ ID NO: 1527643 - RNA, 19 nt, Homo sapiens
  misc_RNA (1)...(19): siRNA sense strand
gcuaccucccuaugaauaa

SEQ ID NO: 1527644 - RNA, 19 nt, Homo sapiens
  misc_RNA (1)...(19): siRNA sense strand
ccauggauuuacuuugaug

SEQ ID NO: 1527645 - RNA, 19 nt, Homo sapiens
  misc_RNA (1)...(19): siRNA sense strand
gggagaagaaccacuuaca

SEQ ID NO: 1527646 - RNA, 19 nt, Homo sapiens
  misc_RNA (1)...(19): siRNA sense strand
ggaaauaagcaaggcucuu

SEQ ID NO: 1527647 - RNA, 19 nt, Homo sapiens
  misc_RNA (1)...(19): siRNA sense strand
gaggaaaacuggagauugc

SEQ ID NO: 1527648 - RNA, 19 nt, Homo sapiens
  misc_RNA (1)...(19): siRNA sense strand
agagcaagcuaauuaaagc

SEQ ID NO: 1527649 - RNA, 19 nt, Homo sapiens
  misc_RNA (1)...(19): siRNA sense strand
gacagcaaugaguguaaua

SEQ ID NO: 1527650 - RNA, 19 nt, Homo sapiens
  misc_RNA (1)...(19): siRNA sense strand
ggaaaagaacagacuggua

SEQ ID NO: 1527651 - RNA, 19 nt, Homo sapiens
  misc_RNA (1)...(19): siRNA sense strand
gaaaggggcauggaaaaga

SEQ ID NO: 1527652 - RNA, 19 nt, Homo sapiens
  misc_RNA (1)...(19): siRNA sense strand
uaagcaaggcucuucagau

SEQ ID NO: 1527653 - RNA, 19 nt, Homo sapiens
  misc_RNA (1)...(19): siRNA sense strand
agacagcaaugaguguaau

SEQ ID NO: 1527654 - RNA, 19 nt, Homo sapiens
  misc_RNA (1)...(19): siRNA sense strand
ggcagugucuacccagcuu

SEQ ID NO: 1527655 - RNA, 19 nt, Homo sapiens
  misc_RNA (1)...(19): siRNA sense strand
ugucuacccagcuuuauga

SEQ ID NO: 1527656 - RNA, 19 nt, Homo sapiens
  misc_RNA (1)...(19): siRNA sense strand
gaaacaguggcgcauugau

SEQ ID NO: 1527657 - RNA, 19 nt, Homo sapiens
  misc_RNA (1)...(19): siRNA sense strand
aaacaguggcgcauugauc

SEQ ID NO: 1527658 - RNA, 19 nt, Homo sapiens
  misc_RNA (1)...(19): siRNA sense strand
cagagcaagcuaauuaaag

SEQ ID NO: 1527659 - RNA, 19 nt, Homo sapiens
  misc_RNA (1)...(19): siRNA sense strand
gaaccacuuacaagagcaa

SEQ ID NO: 1527660 - RNA, 19 nt, Homo sapiens
  misc_RNA (1)...(19): siRNA sense strand
gaucaaggaagagaagagu

SEQ ID NO: 1527661 - RNA, 19 nt, Homo sapiens
  misc_RNA (1)...(19): siRNA sense strand
cggucucgcucccagguaa

SEQ ID NO: 1527662 - RNA, 19 nt, Homo sapiens
  misc_RNA (1)...(19): siRNA sense strand
cagaucgacuccaagaacu

SEQ ID NO: 1527663 - RNA, 19 nt, Homo sapiens
  misc_RNA (1)...(19): siRNA sense strand
gaucgacuccaagaacuca

SEQ ID NO: 1527664 - RNA, 19 nt, Homo sapiens
  misc_RNA (1)...(19): siRNA sense strand
caaugaguguaauaauggu

SEQ ID NO: 1527665 - RNA, 19 nt, Homo sapiens
  misc_RNA (1)...(19): siRNA sense strand
cagcaaugaguguaauaau

SEQ ID NO: 1527666 - RNA, 19 nt, Homo sapiens
  misc_RNA (1)...(19): siRNA sense strand
cuucagauggaguuucuaa

SEQ ID NO: 1527667 - RNA, 19 nt, Homo sapiens
  misc_RNA (1)...(19): siRNA sense strand
gcuagacaccuuccuugca

SEQ ID NO: 1527668 - RNA, 19 nt, Homo sapiens
  misc_RNA (1)...(19): siRNA sense strand
ccagaucgacuccaagaac

SEQ ID NO: 1527669 - RNA, 19 nt, Homo sapiens
  misc_RNA (1)...(19): siRNA sense strand
cagugucuacccagcuuua

SEQ ID NO: 1527670 - RNA, 19 nt, Homo sapiens
  misc_RNA (1)...(19): siRNA sense strand
gcauugaucaaggaagaga

SEQ ID NO: 1527671 - RNA, 19 nt, Homo sapiens
  misc_RNA (1)...(19): siRNA sense strand
aaaggggcauggaaaagaa

SEQ ID NO: 1527672 - RNA, 19 nt, Homo sapiens
  misc_RNA (1)...(19): siRNA sense strand
cuaccucccuaugaauaau

SEQ ID NO: 1527673 - RNA, 19 nt, Homo sapiens
  misc_RNA (1)...(19): siRNA sense strand
agauggaguuucuaaaucc

SEQ ID NO: 1527674 - RNA, 19 nt, Homo sapiens
  misc_RNA (1)...(19): siRNA sense strand
acagcaaugaguguaauaa

SEQ ID NO: 1527675 - RNA, 19 nt, Homo sapiens
  misc_RNA (1)...(19): siRNA sense strand
agagaagagugaucaucgu

SEQ ID NO: 1527676 - RNA, 19 nt, Homo sapiens
  misc_RNA (1)...(19): siRNA sense strand
uagggagaagaaccacuua

SEQ ID NO: 1527677 - RNA, 19 nt, Homo sapiens
  misc_RNA (1)...(19): siRNA sense strand
gagcaagcuaauuaaagca

SEQ ID NO: 1527678 - RNA, 19 nt, Homo sapiens
  misc_RNA (1)...(19): siRNA sense strand
caagauugagaaacuggau

SEQ ID NO: 1527679 - RNA, 19 nt, Homo sapiens
  misc_RNA (1)...(19): siRNA sense strand
gaagacagaucccaaggua

SEQ ID NO: 1527680 - RNA, 19 nt, Homo sapiens
  misc_RNA (1)...(19): siRNA sense strand
gaagaaagauuccaagucu

SEQ ID NO: 1527681 - RNA, 19 nt, Homo sapiens
  misc_RNA (1)...(19): siRNA sense strand
gaagagugcagaagaaaua

SEQ ID NO: 1527682 - RNA, 19 nt, Homo sapiens
  misc_RNA (1)...(19): siRNA sense strand
gauccugacugaaaugaua

SEQ ID NO: 1527683 - RNA, 19 nt, Homo sapiens
  misc_RNA (1)...(19): siRNA sense strand
gaaaagagacuacugcuua

SEQ ID NO: 1527684 - RNA, 19 nt, Homo sapiens
  misc_RNA (1)...(19): siRNA sense strand
ggagaaggaugcaaaggaa

SEQ ID NO: 1527685 - RNA, 19 nt, Homo sapiens
  misc_RNA (1)...(19): siRNA sense strand
gacaagagcugcugguguu

SEQ ID NO: 1527686 - RNA, 19 nt, Homo sapiens
  misc_RNA (1)...(19): siRNA sense strand
gagcagucaucuccaauuu

SEQ ID NO: 1527687 - RNA, 19 nt, Homo sapiens
  misc_RNA (1)...(19): siRNA sense strand
gcacagaacaaacuuuauu

SEQ ID NO: 1527688 - RNA, 19 nt, Homo sapiens
  misc_RNA (1)...(19): siRNA sense strand
gagcaggagugguaaagaa

SEQ ID NO: 1527689 - RNA, 19 nt, Homo sapiens
  misc_RNA (1)...(19): siRNA sense strand
ucaaguagaucuucaggaa

SEQ ID NO: 1527690 - RNA, 19 nt, Homo sapiens
  misc_RNA (1)...(19): siRNA sense strand
gaaguaauaagacuggaua

SEQ ID NO: 1527691 - RNA, 19 nt, Homo sapiens
  misc_RNA (1)...(19): siRNA sense strand
gaacaagacuaugaucagu

SEQ ID NO: 1527692 - RNA, 19 nt, Homo sapiens
  misc_RNA (1)...(19): siRNA sense strand
cuagcuaucugcacgaaua

SEQ ID NO: 1527693 - RNA, 19 nt, Homo sapiens
  misc_RNA (1)...(19): siRNA sense strand
gcacgaauaguuaucauga

SEQ ID NO: 1527694 - RNA, 19 nt, Homo sapiens
  misc_RNA (1)...(19): siRNA sense strand
cacaauggauuuaguauca

SEQ ID NO: 1527695 - RNA, 19 nt, Homo sapiens
  misc_RNA (1)...(19): siRNA sense strand
gaaaugaugcaguugaaga

SEQ ID NO: 1527696 - RNA, 19 nt, Homo sapiens
  misc_RNA (1)...(19): siRNA sense strand
cagaagaaauaaacucaga

SEQ ID NO: 1527697 - RNA, 19 nt, Homo sapiens
  misc_RNA (1)...(19): siRNA sense strand
agagaaagauuugcagaaa

SEQ ID NO: 1527698 - RNA, 19 nt, Homo sapiens
  misc_RNA (1)...(19): siRNA sense strand
ugaaagugcuguacaccaa

SEQ ID NO: 1527699 - RNA, 19 nt, Homo sapiens
  misc_RNA (1)...(19): siRNA sense strand
gaaggugccugucuuuacu

SEQ ID NO: 1527700 - RNA, 19 nt, Homo sapiens
  misc_RNA (1)...(19): siRNA sense strand
uggaagcgcuggugucauu

SEQ ID NO: 1527701 - RNA, 19 nt, Homo sapiens
  misc_RNA (1)...(19): siRNA sense strand
gaagaaauggucugugugu

SEQ ID NO: 1527702 - RNA, 19 nt, Homo sapiens
  misc_RNA (1)...(19): siRNA sense strand
gaacuacagugugucuaga

SEQ ID NO: 1527703 - RNA, 19 nt, Homo sapiens
  misc_RNA (1)...(19): siRNA sense strand
gauuuaguaucaucaguga

SEQ ID NO: 1527704 - RNA, 19 nt, Homo sapiens
  misc_RNA (1)...(19): siRNA sense strand
gaacgagccaagagaagaa

SEQ ID NO: 1527705 - RNA, 19 nt, Homo sapiens
  misc_RNA (1)...(19): siRNA sense strand
agaaggcacugguggauug

SEQ ID NO: 1527706 - RNA, 19 nt, Homo sapiens
  misc_RNA (1)...(19): siRNA sense strand
gcgcuggugucauuucuug

SEQ ID NO: 1527707 - RNA, 19 nt, Homo sapiens
  misc_RNA (1)...(19): siRNA sense strand
ugaaggcaauuaugaaaca

SEQ ID NO: 1527708 - RNA, 19 nt, Homo sapiens
  misc_RNA (1)...(19): siRNA sense strand
agacuuggcucuggaagaa

SEQ ID NO: 1527709 - RNA, 19 nt, Homo sapiens
  misc_RNA (1)...(19): siRNA sense strand
gaucaguccuccacaaacu

SEQ ID NO: 1527710 - RNA, 19 nt, Homo sapiens
  misc_RNA (1)...(19): siRNA sense strand
gugcacagaacaaacuuua

SEQ ID NO: 1527711 - RNA, 19 nt, Homo sapiens
  misc_RNA (1)...(19): siRNA sense strand
ucaugaagcucgggaagaa

SEQ ID NO: 1527712 - RNA, 19 nt, Homo sapiens
  misc_RNA (1)...(19): siRNA sense strand
guucugagccggacccuuu

SEQ ID NO: 1527713 - RNA, 19 nt, Homo sapiens
  misc_RNA (1)...(19): siRNA sense strand
gcagaaggugccugucuuu

SEQ ID NO: 1527714 - RNA, 19 nt, Homo sapiens
  misc_RNA (1)...(19): siRNA sense strand
gaauucugaugacccaguu

SEQ ID NO: 1527715 - RNA, 19 nt, Homo sapiens
  misc_RNA (1)...(19): siRNA sense strand
gagacugcaucacguuaug

SEQ ID NO: 1527716 - RNA, 19 nt, Homo sapiens
  misc_RNA (1)...(19): siRNA sense strand
ggagaugaauucugaugac

SEQ ID NO: 1527717 - RNA, 19 nt, Homo sapiens
  misc_RNA (1)...(19): siRNA sense strand
gcaauuaugaaacagcuau

SEQ ID NO: 1527718 - RNA, 19 nt, Homo sapiens
  misc_RNA (1)...(19): siRNA sense strand
gcucucaagugugaugaaa

SEQ ID NO: 1527719 - RNA, 19 nt, Homo sapiens
  misc_RNA (1)...(19): siRNA sense strand
gcugaaggcaauuaugaaa

SEQ ID NO: 1527720 - RNA, 19 nt, Homo sapiens
  misc_RNA (1)...(19): siRNA sense strand
gggaagaaguaauaagacu

SEQ ID NO: 1527721 - RNA, 19 nt, Homo sapiens
  misc_RNA (1)...(19): siRNA sense strand
auaugaaacuugaggacua

SEQ ID NO: 1527722 - RNA, 19 nt, Homo sapiens
  misc_RNA (1)...(19): siRNA sense strand
ucuagagaguguuauaaga

SEQ ID NO: 1527723 - RNA, 19 nt, Homo sapiens
  misc_RNA (1)...(19): siRNA sense strand
gaauaguuaucaugaagcu

SEQ ID NO: 1527724 - RNA, 19 nt, Homo sapiens
  misc_RNA (1)...(19): siRNA sense strand
ucagagagguuaucuacac

SEQ ID NO: 1527725 - RNA, 19 nt, Homo sapiens
  misc_RNA (1)...(19): siRNA sense strand
ggaacgagccaagagaaga

SEQ ID NO: 1527726 - RNA, 19 nt, Homo sapiens
  misc_RNA (1)...(19): siRNA sense strand
gcauggaggugcccaacgu

SEQ ID NO: 1527727 - RNA, 19 nt, Homo sapiens
  misc_RNA (1)...(19): siRNA sense strand
gauaaaugagugcacagaa

SEQ ID NO: 1527728 - RNA, 19 nt, Homo sapiens
  misc_RNA (1)...(19): siRNA sense strand
cugaagaacuacagugugu

SEQ ID NO: 1527729 - RNA, 19 nt, Homo sapiens
  misc_RNA (1)...(19): siRNA sense strand
aggcuuauaugaaacuuga

SEQ ID NO: 1527730 - RNA, 19 nt, Homo sapiens
  misc_RNA (1)...(19): siRNA sense strand
acaacgaggucauaagaag

SEQ ID NO: 1527731 - RNA, 19 nt, Homo sapiens
  misc_RNA (1)...(19): siRNA sense strand
aagcagaccuucaagaaaa

SEQ ID NO: 1527732 - RNA, 19 nt, Homo sapiens
  misc_RNA (1)...(19): siRNA sense strand
gcaaaggaacgagccaaga

SEQ ID NO: 1527733 - RNA, 19 nt, Homo sapiens
  misc_RNA (1)...(19): siRNA sense strand
cagaaugcacaauggauuu

SEQ ID NO: 1527734 - RNA, 19 nt, Homo sapiens
  misc_RNA (1)...(19): siRNA sense strand
aaaggaagcccacgaacug

SEQ ID NO: 1527735 - RNA, 19 nt, Homo sapiens
  misc_RNA (1)...(19): siRNA sense strand
cuagagaguguuauaagaa

SEQ ID NO: 1527736 - RNA, 19 nt, Homo sapiens
  misc_RNA (1)...(19): siRNA sense strand
gaagcugaaggacaugaaa

SEQ ID NO: 1527737 - RNA, 19 nt, Homo sapiens
  misc_RNA (1)...(19): siRNA sense strand
uggagaagcugaaggacau

SEQ ID NO: 1527738 - RNA, 19 nt, Homo sapiens
  misc_RNA (1)...(19): siRNA sense strand
gccaagagaagaagggaaa

SEQ ID NO: 1527739 - RNA, 19 nt, Homo sapiens
  misc_RNA (1)...(19): siRNA sense strand
ggaugcugauaaagagaaa

SEQ ID NO: 1527740 - RNA, 19 nt, Homo sapiens
  misc_RNA (1)...(19): siRNA sense strand
ugaugcaguugaagaaaug

SEQ ID NO: 1527741 - RNA, 19 nt, Homo sapiens
  misc_RNA (1)...(19): siRNA sense strand
gaacugcuggauucaggaa

SEQ ID NO: 1527742 - RNA, 19 nt, Homo sapiens
  misc_RNA (1)...(19): siRNA sense strand
gcugauaaagagaaagauu

SEQ ID NO: 1527743 - RNA, 19 nt, Homo sapiens
  misc_RNA (1)...(19): siRNA sense strand
gcaggaccaccuugaacaa

SEQ ID NO: 1527744 - RNA, 19 nt, Homo sapiens
  misc_RNA (1)...(19): siRNA sense strand
ggugucauuucuugauuuc

SEQ ID NO: 1527745 - RNA, 19 nt, Homo sapiens
  misc_RNA (1)...(19): siRNA sense strand
uugaagaaauggucugugu

SEQ ID NO: 1527746 - RNA, 19 nt, Homo sapiens
  misc_RNA (1)...(19): siRNA sense strand
gaagaacuacagugugucu

SEQ ID NO: 1527747 - RNA, 19 nt, Homo sapiens
  misc_RNA (1)...(19): siRNA sense strand
aaacucagaggccuucuug

SEQ ID NO: 1527748 - RNA, 19 nt, Homo sapiens
  misc_RNA (1)...(19): siRNA sense strand
gcacaauggauuuaguauc

SEQ ID NO: 1527749 - RNA, 19 nt, Homo sapiens
  misc_RNA (1)...(19): siRNA sense strand
gaaugcaggaccaccuuga

SEQ ID NO: 1527750 - RNA, 19 nt, Homo sapiens
  misc_RNA (1)...(19): siRNA sense strand
ccacaaacugcucugaaga

SEQ ID NO: 1527751 - RNA, 19 nt, Homo sapiens
  misc_RNA (1)...(19): siRNA sense strand
caauggauuuaguaucauc

SEQ ID NO: 1527752 - RNA, 19 nt, Homo sapiens
  misc_RNA (1)...(19): siRNA sense strand
acacagccgugaccaccaa

SEQ ID NO: 1527753 - RNA, 19 nt, Homo sapiens
  misc_RNA (1)...(19): siRNA sense strand
uaugaaacuugaggacuau

SEQ ID NO: 1527754 - RNA, 19 nt, Homo sapiens
  misc_RNA (1)...(19): siRNA sense strand
gcaggugaacgcaggcauu

SEQ ID NO: 1527755 - RNA, 19 nt, Homo sapiens
  misc_RNA (1)...(19): siRNA sense strand
gcugcccucugccuuggua

SEQ ID NO: 1527756 - RNA, 19 nt, Homo sapiens
  misc_RNA (1)...(19): siRNA sense strand
gaagacaggaggugagacu

SEQ ID NO: 1527757 - RNA, 19 nt, Homo sapiens
  misc_RNA (1)...(19): siRNA sense strand
cagaaggugccugucuuua

SEQ ID NO: 1527758 - RNA, 19 nt, Homo sapiens
  misc_RNA (1)...(19): siRNA sense strand
uaaaugagugcacagaaca

SEQ ID NO: 1527759 - RNA, 19 nt, Homo sapiens
  misc_RNA (1)...(19): siRNA sense strand
aaagcagaccuucaagaaa

SEQ ID NO: 1527760 - RNA, 19 nt, Homo sapiens
  misc_RNA (1)...(19): siRNA sense strand
uagagaguguuauaagaag

SEQ ID NO: 1527761 - RNA, 19 nt, Homo sapiens
  misc_RNA (1)...(19): siRNA sense strand
ugaccugaccagauuauug

SEQ ID NO: 1527762 - RNA, 19 nt, Homo sapiens
  misc_RNA (1)...(19): siRNA sense strand
uggcaucuguggagaagga

SEQ ID NO: 1527763 - RNA, 19 nt, Homo sapiens
  misc_RNA (1)...(19): siRNA sense strand
ucacaggcguucugaagac

SEQ ID NO: 1527764 - RNA, 19 nt, Homo sapiens
  misc_RNA (1)...(19): siRNA sense strand
uaugaucaguccuccacaa

SEQ ID NO: 1527765 - RNA, 19 nt, Homo sapiens
  misc_RNA (1)...(19): siRNA sense strand
ccagugcauugccaucaug

SEQ ID NO: 1527766 - RNA, 19 nt, Homo sapiens
  misc_RNA (1)...(19): siRNA sense strand
agacagaucccaagguaag

SEQ ID NO: 1527767 - RNA, 19 nt, Homo sapiens
  misc_RNA (1)...(19): siRNA sense strand
aggaaaugaugcaguugaa

SEQ ID NO: 1527768 - RNA, 19 nt, Homo sapiens
  misc_RNA (1)...(19): siRNA sense strand
gagaagaagggaaaacaaa

SEQ ID NO: 1527769 - RNA, 19 nt, Homo sapiens
  misc_RNA (1)...(19): siRNA sense strand
guucagagagguuaucuac

SEQ ID NO: 1527770 - RNA, 19 nt, Homo sapiens
  misc_RNA (1)...(19): siRNA sense strand
caaaggaacgagccaagag

SEQ ID NO: 1527771 - RNA, 19 nt, Homo sapiens
  misc_RNA (1)...(19): siRNA sense strand
ucagaaugcacaauggauu

SEQ ID NO: 1527772 - RNA, 19 nt, Homo sapiens
  misc_RNA (1)...(19): siRNA sense strand
caaguagaucuucaggaaa

SEQ ID NO: 1527773 - RNA, 19 nt, Homo sapiens
  misc_RNA (1)...(19): siRNA sense strand
agaaugcacaauggauuua

SEQ ID NO: 1527774 - RNA, 19 nt, Homo sapiens
  misc_RNA (1)...(19): siRNA sense strand
augaugaaauuccugaaga

SEQ ID NO: 1527775 - RNA, 19 nt, Homo sapiens
  misc_RNA (1)...(19): siRNA sense strand
gagcagaaggugccugucu

SEQ ID NO: 1527776 - RNA, 19 nt, Homo sapiens
  misc_RNA (1)...(19): siRNA sense strand
gaccugaccagauuauugg

SEQ ID NO: 1527777 - RNA, 19 nt, Homo sapiens
  misc_RNA (1)...(19): siRNA sense strand
cacgaauaguuaucaugaa

SEQ ID NO: 1527778 - RNA, 19 nt, Homo sapiens
  misc_RNA (1)...(19): siRNA sense strand
gaagcucgggaagaaguaa

SEQ ID NO: 1527779 - RNA, 19 nt, Homo sapiens
  misc_RNA (1)...(19): siRNA sense strand
gagcaggacuucaccuuug

SEQ ID NO: 1527780 - RNA, 19 nt, Homo sapiens
  misc_RNA (1)...(19): siRNA sense strand
gcaggugcuuugcaagaua

SEQ ID NO: 1527781 - RNA, 19 nt, Homo sapiens
  misc_RNA (1)...(19): siRNA sense strand
ggaugacucugacaacuuc

SEQ ID NO: 1527782 - RNA, 19 nt, Homo sapiens
  misc_RNA (1)...(19): siRNA sense strand
cgagagggcugcugaggau

SEQ ID NO: 1527783 - RNA, 19 nt, Homo sapiens
  misc_RNA (1)...(19): siRNA sense strand
ccaaacaggaggaauucua

SEQ ID NO: 1527784 - RNA, 19 nt, Homo sapiens
  misc_RNA (1)...(19): siRNA sense strand
ggagcaggacuucaccuuu

SEQ ID NO: 1527785 - RNA, 19 nt, Homo sapiens
  misc_RNA (1)...(19): siRNA sense strand
ccaccaaacaggaggaauu

SEQ ID NO: 1527786 - RNA, 19 nt, Homo sapiens
  misc_RNA (1)...(19): siRNA sense strand
caaacaggaggaauucuau

SEQ ID NO: 1527787 - RNA, 19 nt, Homo sapiens
  misc_RNA (1)...(19): siRNA sense strand
gggcucaucuuugcugugu

SEQ ID NO: 1527788 - RNA, 19 nt, Homo sapiens
  misc_RNA (1)...(19): siRNA sense strand
cgcaaauuguggcuacuaa

SEQ ID NO: 1527789 - RNA, 19 nt, Homo sapiens
  misc_RNA (1)...(19): siRNA sense strand
ggagaauacggcuguagug

SEQ ID NO: 1527790 - RNA, 19 nt, Homo sapiens
  misc_RNA (1)...(19): siRNA sense strand
caggugcuuugcaagauau

SEQ ID NO: 1527791 - RNA, 19 nt, Homo sapiens
  misc_RNA (1)...(19): siRNA sense strand
gcaaauuguggcuacuaau

SEQ ID NO: 1527792 - RNA, 19 nt, Homo sapiens
  misc_RNA (1)...(19): siRNA sense strand
gggaugacucugacaacuu

SEQ ID NO: 1527793 - RNA, 19 nt, Homo sapiens
  misc_RNA (1)...(19): siRNA sense strand
gggagaauacggcuguagu

SEQ ID NO: 1527794 - RNA, 19 nt, Homo sapiens
  misc_RNA (1)...(19): siRNA sense strand
agcaggacuucaccuuuga

SEQ ID NO: 1527795 - RNA, 19 nt, Homo sapiens
  misc_RNA (1)...(19): siRNA sense strand
gagggcugcugaggaugga

SEQ ID NO: 1527796 - RNA, 19 nt, Homo sapiens
  misc_RNA (1)...(19): siRNA sense strand
gcuguaguccugccagaag

SEQ ID NO: 1527797 - RNA, 19 nt, Homo sapiens
  misc_RNA (1)...(19): siRNA sense strand
aaacaggaggaauucuaug

SEQ ID NO: 1527798 - RNA, 19 nt, Homo sapiens
  misc_RNA (1)...(19): siRNA sense strand
accagaagcccaccaaaca

SEQ ID NO: 1527799 - RNA, 19 nt, Homo sapiens
  misc_RNA (1)...(19): siRNA sense strand
uguaccgcaugaagaagaa

SEQ ID NO: 1527800 - RNA, 19 nt, Homo sapiens
  misc_RNA (1)...(19): siRNA sense strand
cugugugccugguggguuu

SEQ ID NO: 1527801 - RNA, 19 nt, Homo sapiens
  misc_RNA (1)...(19): siRNA sense strand
gggagcaggacuucaccuu

SEQ ID NO: 1527802 - RNA, 19 nt, Homo sapiens
  misc_RNA (1)...(19): siRNA sense strand
gcaauuggaguacuuauaa

SEQ ID NO: 1527803 - RNA, 19 nt, Homo sapiens
  misc_RNA (1)...(19): siRNA sense strand
caaaugauauaaccaguga

SEQ ID NO: 1527804 - RNA, 19 nt, Homo sapiens
  misc_RNA (1)...(19): siRNA sense strand
gagagaagcuugugauacu

SEQ ID NO: 1527805 - RNA, 19 nt, Homo sapiens
  misc_RNA (1)...(19): siRNA sense strand
gcucaagaauggacagaaa

SEQ ID NO: 1527806 - RNA, 19 nt, Homo sapiens
  misc_RNA (1)...(19): siRNA sense strand
ugaugucucucccaacuua

SEQ ID NO: 1527807 - RNA, 19 nt, Homo sapiens
  misc_RNA (1)...(19): siRNA sense strand
caagaugucuacagucaga

SEQ ID NO: 1527808 - RNA, 19 nt, Homo sapiens
  misc_RNA (1)...(19): siRNA sense strand
aaagggcaaugaacaaauu

SEQ ID NO: 1527809 - RNA, 19 nt, Homo sapiens
  misc_RNA (1)...(19): siRNA sense strand
gaccaccacuucaacugua

SEQ ID NO: 1527810 - RNA, 19 nt, Homo sapiens
  misc_RNA (1)...(19): siRNA sense strand
ucucuuagccugugugaua

SEQ ID NO: 1527811 - RNA, 19 nt, Homo sapiens
  misc_RNA (1)...(19): siRNA sense strand
cuuccuggcuugucucuua

SEQ ID NO: 1527812 - RNA, 19 nt, Homo sapiens
  misc_RNA (1)...(19): siRNA sense strand
ggaacacccucuccugcuu

SEQ ID NO: 1527813 - RNA, 19 nt, Homo sapiens
  misc_RNA (1)...(19): siRNA sense strand
gcuggugucuaccuucaaa

SEQ ID NO: 1527814 - RNA, 19 nt, Homo sapiens
  misc_RNA (1)...(19): siRNA sense strand
gauaaugacagcaauugga

SEQ ID NO: 1527815 - RNA, 19 nt, Homo sapiens
  misc_RNA (1)...(19): siRNA sense strand
gauacuggcagcucaagaa

SEQ ID NO: 1527816 - RNA, 19 nt, Homo sapiens
  misc_RNA (1)...(19): siRNA sense strand
gcaccuaccgaucauuuau

SEQ ID NO: 1527817 - RNA, 19 nt, Homo sapiens
  misc_RNA (1)...(19): siRNA sense strand
gcaaguacagccacugaau

SEQ ID NO: 1527818 - RNA, 19 nt, Homo sapiens
  misc_RNA (1)...(19): siRNA sense strand
cgcaaugacuggucuaugu

SEQ ID NO: 1527819 - RNA, 19 nt, Homo sapiens
  misc_RNA (1)...(19): siRNA sense strand
ugucuaccuucaaaugaua

SEQ ID NO: 1527820 - RNA, 19 nt, Homo sapiens
  misc_RNA (1)...(19): siRNA sense strand
acacacagguaaaagaaua

SEQ ID NO: 1527821 - RNA, 19 nt, Homo sapiens
  misc_RNA (1)...(19): siRNA sense strand
gacagcaauuggaguacuu

SEQ ID NO: 1527822 - RNA, 19 nt, Homo sapiens
  misc_RNA (1)...(19): siRNA sense strand
gaacguugagcacucugaa

SEQ ID NO: 1527823 - RNA, 19 nt, Homo sapiens
  misc_RNA (1)...(19): siRNA sense strand
ggacagaaagcauggaaaa

SEQ ID NO: 1527824 - RNA, 19 nt, Homo sapiens
  misc_RNA (1)...(19): siRNA sense strand
cacaaaugauggagagugu

SEQ ID NO: 1527825 - RNA, 19 nt, Homo sapiens
  misc_RNA (1)...(19): siRNA sense strand
ccacugaaucuacaacuuc

SEQ ID NO: 1527826 - RNA, 19 nt, Homo sapiens
  misc_RNA (1)...(19): siRNA sense strand
ugacuggucuauguggaaa

SEQ ID NO: 1527827 - RNA, 19 nt, Homo sapiens
  misc_RNA (1)...(19): siRNA sense strand
caaucacacauccaaauga

SEQ ID NO: 1527828 - RNA, 19 nt, Homo sapiens
  misc_RNA (1)...(19): siRNA sense strand
guacagccacugaaucuac

SEQ ID NO: 1527829 - RNA, 19 nt, Homo sapiens
  misc_RNA (1)...(19): siRNA sense strand
gcaaugacuggucuaugug

SEQ ID NO: 1527830 - RNA, 19 nt, Homo sapiens
  misc_RNA (1)...(19): siRNA sense strand
ggagagaagcuugugauac

SEQ ID NO: 1527831 - RNA, 19 nt, Homo sapiens
  misc_RNA (1)...(19): siRNA sense strand
caaaugauggagagugugu

SEQ ID NO: 1527832 - RNA, 19 nt, Homo sapiens
  misc_RNA (1)...(19): siRNA sense strand
ccaaucacacauccaaaug

SEQ ID NO: 1527833 - RNA, 19 nt, Homo sapiens
  misc_RNA (1)...(19): siRNA sense strand
uauaaagggcaaugaacaa

SEQ ID NO: 1527834 - RNA, 19 nt, Homo sapiens
  misc_RNA (1)...(19): siRNA sense strand
gcucacaguuccauaugcu

SEQ ID NO: 1527835 - RNA, 19 nt, Homo sapiens
  misc_RNA (1)...(19): siRNA sense strand
gccacugaaucuacaacuu

SEQ ID NO: 1527836 - RNA, 19 nt, Homo sapiens
  misc_RNA (1)...(19): siRNA sense strand
aacaaaggaucggccaauu

SEQ ID NO: 1527837 - RNA, 19 nt, Homo sapiens
  misc_RNA (1)...(19): siRNA sense strand
uaacaaaggaucggccaau

SEQ ID NO: 1527838 - RNA, 19 nt, Homo sapiens
  misc_RNA (1)...(19): siRNA sense strand
gauauaaccagugaugucu

SEQ ID NO: 1527839 - RNA, 19 nt, Homo sapiens
  misc_RNA (1)...(19): siRNA sense strand
uaaagggcaaugaacaaau

SEQ ID NO: 1527840 - RNA, 19 nt, Homo sapiens
  misc_RNA (1)...(19): siRNA sense strand
gccaaucacacauccaaau

SEQ ID NO: 1527841 - RNA, 19 nt, Homo sapiens
  misc_RNA (1)...(19): siRNA sense strand
accuaccgaucauuuauaa

SEQ ID NO: 1527842 - RNA, 19 nt, Homo sapiens
  misc_RNA (1)...(19): siRNA sense strand
uuauccagcuauccacaaa

SEQ ID NO: 1527843 - RNA, 19 nt, Homo sapiens
  misc_RNA (1)...(19): siRNA sense strand
gauauaaagggcaaugaac

SEQ ID NO: 1527844 - RNA, 19 nt, Homo sapiens
  misc_RNA (1)...(19): siRNA sense strand
uucaagaugucuacaguca

SEQ ID NO: 1527845 - RNA, 19 nt, Homo sapiens
  misc_RNA (1)...(19): siRNA sense strand
cauucaagaugucuacagu

SEQ ID NO: 1527846 - RNA, 19 nt, Homo sapiens
  misc_RNA (1)...(19): siRNA sense strand
acagaaagcauggaaaaua

SEQ ID NO: 1527847 - RNA, 19 nt, Homo sapiens
  misc_RNA (1)...(19): siRNA sense strand
ggugucuaccuucaaauga

SEQ ID NO: 1527848 - RNA, 19 nt, Homo sapiens
  misc_RNA (1)...(19): siRNA sense strand
ucuacaacuucaacagcua

SEQ ID NO: 1527849 - RNA, 19 nt, Homo sapiens
  misc_RNA (1)...(19): siRNA sense strand
acaaugaccaccacuucaa

SEQ ID NO: 1527850 - RNA, 19 nt, Homo sapiens
  misc_RNA (1)...(19): siRNA sense strand
aaugacagcaauuggagua

SEQ ID NO: 1527851 - RNA, 19 nt, Homo sapiens
  misc_RNA (1)...(19): siRNA sense strand
gcagauauaaagggcaaug

SEQ ID NO: 1527852 - RNA, 19 nt, Homo sapiens
  misc_RNA (1)...(19): siRNA sense strand
uauaaccagugaugucucu

SEQ ID NO: 1527853 - RNA, 19 nt, Homo sapiens
  misc_RNA (1)...(19): siRNA sense strand
cuacaaugaccaccacuuc

SEQ ID NO: 1527854 - RNA, 19 nt, Homo sapiens
  misc_RNA (1)...(19): siRNA sense strand
acuggcagcucaagaaugg

SEQ ID NO: 1527855 - RNA, 19 nt, Homo sapiens
  misc_RNA (1)...(19): siRNA sense strand
gugucuaccuucaaaugau

SEQ ID NO: 1527856 - RNA, 19 nt, Homo sapiens
  misc_RNA (1)...(19): siRNA sense strand
caccuaccgaucauuuaua

SEQ ID NO: 1527857 - RNA, 19 nt, Homo sapiens
  misc_RNA (1)...(19): siRNA sense strand
caaguacagccacugaauc

SEQ ID NO: 1527858 - RNA, 19 nt, Homo sapiens
  misc_RNA (1)...(19): siRNA sense strand
gaaaaccagccgccaauca

SEQ ID NO: 1527859 - RNA, 19 nt, Homo sapiens
  misc_RNA (1)...(19): siRNA sense strand
gaccaagaggcucacaguu

SEQ ID NO: 1527860 - RNA, 19 nt, Homo sapiens
  misc_RNA (1)...(19): siRNA sense strand
caaaggaucggccaauucc

SEQ ID NO: 1527861 - RNA, 19 nt, Homo sapiens
  misc_RNA (1)...(19): siRNA sense strand
acaaaggaucggccaauuc

SEQ ID NO: 1527862 - RNA, 19 nt, Homo sapiens
  misc_RNA (1)...(19): siRNA sense strand
gugauaaugacagcaauug

SEQ ID NO: 1527863 - RNA, 19 nt, Homo sapiens
  misc_RNA (1)...(19): siRNA sense strand
gucagaauccuguaacaca

SEQ ID NO: 1527864 - RNA, 19 nt, Homo sapiens
  misc_RNA (1)...(19): siRNA sense strand
gaggcucacaguuccauau

SEQ ID NO: 1527865 - RNA, 19 nt, Homo sapiens
  misc_RNA (1)...(19): siRNA sense strand
cuacagcugccaccacuuc

SEQ ID NO: 1527866 - RNA, 19 nt, Homo sapiens
  misc_RNA (1)...(19): siRNA sense strand
ugccaccacuuccacagaa

SEQ ID NO: 1527867 - RNA, 19 nt, Homo sapiens
  misc_RNA (1)...(19): siRNA sense strand
gaaagucuuccuggcuugu

SEQ ID NO: 1527868 - RNA, 19 nt, Homo sapiens
  misc_RNA (1)...(19): siRNA sense strand
uaugcuuggugaauaacaa

SEQ ID NO: 1527869 - RNA, 19 nt, Homo sapiens
  misc_RNA (1)...(19): siRNA sense strand
ucaacuguaccugcaagua

SEQ ID NO: 1527870 - RNA, 19 nt, Homo sapiens
  misc_RNA (1)...(19): siRNA sense strand
cagaaagcauggaaaauac

SEQ ID NO: 1527871 - RNA, 19 nt, Homo sapiens
  misc_RNA (1)...(19): siRNA sense strand
agauauaaagggcaaugaa

SEQ ID NO: 1527872 - RNA, 19 nt, Homo sapiens
  misc_RNA (1)...(19): siRNA sense strand
aaugauauaaccagugaug

SEQ ID NO: 1527873 - RNA, 19 nt, Homo sapiens
  misc_RNA (1)...(19): siRNA sense strand
uggagagaagcuugugaua

SEQ ID NO: 1527874 - RNA, 19 nt, Homo sapiens
  misc_RNA (1)...(19): siRNA sense strand
ccacuuccacagaaccuau

SEQ ID NO: 1527875 - RNA, 19 nt, Homo sapiens
  misc_RNA (1)...(19): siRNA sense strand
auaaagggcaaugaacaaa

SEQ ID NO: 1527876 - RNA, 19 nt, Homo sapiens
  misc_RNA (1)...(19): siRNA sense strand
uaacacacagguaaaagaa

SEQ ID NO: 1527877 - RNA, 19 nt, Homo sapiens
  misc_RNA (1)...(19): siRNA sense strand
ugauauaaccagugauguc

SEQ ID NO: 1527878 - RNA, 19 nt, Homo sapiens
  misc_RNA (1)...(19): siRNA sense strand
aaucacacauccaaaugac

SEQ ID NO: 1527879 - RNA, 19 nt, Homo sapiens
  misc_RNA (1)...(19): siRNA sense strand
ccagcuauccacaaaugau

SEQ ID NO: 1527880 - RNA, 19 nt, Homo sapiens
  misc_RNA (1)...(19): siRNA sense strand
gaaucuacaacuucaacag

SEQ ID NO: 1527881 - RNA, 19 nt, Homo sapiens
  misc_RNA (1)...(19): siRNA sense strand
uggaguacuuauaauaugc

SEQ ID NO: 1527882 - RNA, 19 nt, Homo sapiens
  misc_RNA (1)...(19): siRNA sense strand
auccagcuauccacaaaug

SEQ ID NO: 1527883 - RNA, 19 nt, Homo sapiens
  misc_RNA (1)...(19): siRNA sense strand
ugacagcaauuggaguacu

SEQ ID NO: 1527884 - RNA, 19 nt, Homo sapiens
  misc_RNA (1)...(19): siRNA sense strand
accaagaggcucacaguuc

SEQ ID NO: 1527885 - RNA, 19 nt, Homo sapiens
  misc_RNA (1)...(19): siRNA sense strand
cagcuauccacaaaugaug

SEQ ID NO: 1527886 - RNA, 19 nt, Homo sapiens
  misc_RNA (1)...(19): siRNA sense strand
gcacaaacccucgaacuug

SEQ ID NO: 1527887 - RNA, 19 nt, Homo sapiens
  misc_RNA (1)...(19): siRNA sense strand
ucacgcggcugcucaagaa

SEQ ID NO: 1527888 - RNA, 19 nt, Homo sapiens
  misc_RNA (1)...(19): siRNA sense strand
caacauggccgagaugaag

SEQ ID NO: 1527889 - RNA, 19 nt, Homo sapiens
  misc_RNA (1)...(19): siRNA sense strand
gaucuucgcgcuggagaaa

SEQ ID NO: 1527890 - RNA, 19 nt, Homo sapiens
  misc_RNA (1)...(19): siRNA sense strand
ggaggacgacgacgaauac

SEQ ID NO: 1527891 - RNA, 19 nt, Homo sapiens
  misc_RNA (1)...(19): siRNA sense strand
gacaaggacgggaagaaga

SEQ ID NO: 1527892 - RNA, 19 nt, Homo sapiens
  misc_RNA (1)...(19): siRNA sense strand
ggacgacgacgaauacaac

SEQ ID NO: 1527893 - RNA, 19 nt, Homo sapiens
  misc_RNA (1)...(19): siRNA sense strand
ggacaaggacgggaagaag

SEQ ID NO: 1527894 - RNA, 19 nt, Homo sapiens
  misc_RNA (1)...(19): siRNA sense strand
gcacaacauggccgagaug

SEQ ID NO: 1527895 - RNA, 19 nt, Homo sapiens
  misc_RNA (1)...(19): siRNA sense strand
acaaggacgggaagaagaa

SEQ ID NO: 1527896 - RNA, 19 nt, Homo sapiens
  misc_RNA (1)...(19): siRNA sense strand
cggaggacgacgacgaaua

SEQ ID NO: 1527897 - RNA, 19 nt, Homo sapiens
  misc_RNA (1)...(19): siRNA sense strand
gaugaagacgucgcuguuc

SEQ ID NO: 1527898 - RNA, 19 nt, Homo sapiens
  misc_RNA (1)...(19): siRNA sense strand
ccuucgagcagaccaagua

SEQ ID NO: 1527899 - RNA, 19 nt, Homo sapiens
  misc_RNA (1)...(19): siRNA sense strand
ugagagaagucaaguauuu

SEQ ID NO: 1527900 - RNA, 19 nt, Homo sapiens
  misc_RNA (1)...(19): siRNA sense strand
gaccaggacugccacuuua

SEQ ID NO: 1527901 - RNA, 19 nt, Homo sapiens
  misc_RNA (1)...(19): siRNA sense strand
gaaaggacaauaagaaaga

SEQ ID NO: 1527902 - RNA, 19 nt, Homo sapiens
  misc_RNA (1)...(19): siRNA sense strand
uaagaaagaggcccuguua

SEQ ID NO: 1527903 - RNA, 19 nt, Homo sapiens
  misc_RNA (1)...(19): siRNA sense strand
gcgaagguguguuucagua

SEQ ID NO: 1527904 - RNA, 19 nt, Homo sapiens
  misc_RNA (1)...(19): siRNA sense strand
ggaauucccuucuucucuu

SEQ ID NO: 1527905 - RNA, 19 nt, Homo sapiens
  misc_RNA (1)...(19): siRNA sense strand
gcaaagcuccuguacaugu

SEQ ID NO: 1527906 - RNA, 19 nt, Homo sapiens
  misc_RNA (1)...(19): siRNA sense strand
gaaagaaaggacaauaaga

SEQ ID NO: 1527907 - RNA, 19 nt, Homo sapiens
  misc_RNA (1)...(19): siRNA sense strand
agacuuggauggaagaauu

SEQ ID NO: 1527908 - RNA, 19 nt, Homo sapiens
  misc_RNA (1)...(19): siRNA sense strand
gaaagagauuccagacagu

SEQ ID NO: 1527909 - RNA, 19 nt, Homo sapiens
  misc_RNA (1)...(19): siRNA sense strand
ccgcaaagcuccuguacau

SEQ ID NO: 1527910 - RNA, 19 nt, Homo sapiens
  misc_RNA (1)...(19): siRNA sense strand
gauaaagacuauagugaac

SEQ ID NO: 1527911 - RNA, 19 nt, Homo sapiens
  misc_RNA (1)...(19): siRNA sense strand
gagauaaagacuauaguga

SEQ ID NO: 1527912 - RNA, 19 nt, Homo sapiens
  misc_RNA (1)...(19): siRNA sense strand
gaagguguguuucaguaca

SEQ ID NO: 1527913 - RNA, 19 nt, Homo sapiens
  misc_RNA (1)...(19): siRNA sense strand
gcaaauaugaucccuugga

SEQ ID NO: 1527914 - RNA, 19 nt, Homo sapiens
  misc_RNA (1)...(19): siRNA sense strand
ggaccaggacugccacuuu

SEQ ID NO: 1527915 - RNA, 19 nt, Homo sapiens
  misc_RNA (1)...(19): siRNA sense strand
gcucaucguuggcugguau

SEQ ID NO: 1527916 - RNA, 19 nt, Homo sapiens
  misc_RNA (1)...(19): siRNA sense strand
gaauggcgaagguguguuu

SEQ ID NO: 1527917 - RNA, 19 nt, Homo sapiens
  misc_RNA (1)...(19): siRNA sense strand
gaacuggaagcaauugaug

SEQ ID NO: 1527918 - RNA, 19 nt, Homo sapiens
  misc_RNA (1)...(19): siRNA sense strand
gcaaccaaaucaucgagau

SEQ ID NO: 1527919 - RNA, 19 nt, Homo sapiens
  misc_RNA (1)...(19): siRNA sense strand
gaacaugaagcuuuucuuu

SEQ ID NO: 1527920 - RNA, 19 nt, Homo sapiens
  misc_RNA (1)...(19): siRNA sense strand
gcgcugaaacgacauuauu

SEQ ID NO: 1527921 - RNA, 19 nt, Homo sapiens
  misc_RNA (1)...(19): siRNA sense strand
ucagaaguaugacgagaug

SEQ ID NO: 1527922 - RNA, 19 nt, Homo sapiens
  misc_RNA (1)...(19): siRNA sense strand
ugaccuaucagaaguauga

SEQ ID NO: 1527923 - RNA, 19 nt, Homo sapiens
  misc_RNA (1)...(19): siRNA sense strand
gaauucccuucuucucuug

SEQ ID NO: 1527924 - RNA, 19 nt, Homo sapiens
  misc_RNA (1)...(19): siRNA sense strand
gcaucucccuggcuguaaa

SEQ ID NO: 1527925 - RNA, 19 nt, Homo sapiens
  misc_RNA (1)...(19): siRNA sense strand
gaagauccaagccaugguu

SEQ ID NO: 1527926 - RNA, 19 nt, Homo sapiens
  misc_RNA (1)...(19): siRNA sense strand
agaaagaggcccuguuaga

SEQ ID NO: 1527927 - RNA, 19 nt, Homo sapiens
  misc_RNA (1)...(19): siRNA sense strand
gcuagacaaugcuaagauc

SEQ ID NO: 1527928 - RNA, 19 nt, Homo sapiens
  misc_RNA (1)...(19): siRNA sense strand
ggcuagagguguccaugaa

SEQ ID NO: 1527929 - RNA, 19 nt, Homo sapiens
  misc_RNA (1)...(19): siRNA sense strand
gcccagguauucagucaug

SEQ ID NO: 1527930 - RNA, 19 nt, Homo sapiens
  misc_RNA (1)...(19): siRNA sense strand
agacaaugcuaagaucuug

SEQ ID NO: 1527931 - RNA, 19 nt, Homo sapiens
  misc_RNA (1)...(19): siRNA sense strand
aggccaagcugaccuauca

SEQ ID NO: 1527932 - RNA, 19 nt, Homo sapiens
  misc_RNA (1)...(19): siRNA sense strand
gaauuucccaggcuaugaa

SEQ ID NO: 1527933 - RNA, 19 nt, Homo sapiens
  misc_RNA (1)...(19): siRNA sense strand
agucagaacuggaagcaau

SEQ ID NO: 1527934 - RNA, 19 nt, Homo sapiens
  misc_RNA (1)...(19): siRNA sense strand
caaagcuccuguacaugug

SEQ ID NO: 1527935 - RNA, 19 nt, Homo sapiens
  misc_RNA (1)...(19): siRNA sense strand
gaaagaggcccuguuagac

SEQ ID NO: 1527936 - RNA, 19 nt, Homo sapiens
  misc_RNA (1)...(19): siRNA sense strand
caggaguucugcaaccaaa

SEQ ID NO: 1527937 - RNA, 19 nt, Homo sapiens
  misc_RNA (1)...(19): siRNA sense strand
ccauugaggaacucuauaa

SEQ ID NO: 1527938 - RNA, 19 nt, Homo sapiens
  misc_RNA (1)...(19): siRNA sense strand
guauuugaauuuccagcaa

SEQ ID NO: 1527939 - RNA, 19 nt, Homo sapiens
  misc_RNA (1)...(19): siRNA sense strand
uaucuaugaugaggucuuu

SEQ ID NO: 1527940 - RNA, 19 nt, Homo sapiens
  misc_RNA (1)...(19): siRNA sense strand
uggcugguauaaugagaua

SEQ ID NO: 1527941 - RNA, 19 nt, Homo sapiens
  misc_RNA (1)...(19): siRNA sense strand
caauugaguuucugaagcu

SEQ ID NO: 1527942 - RNA, 19 nt, Homo sapiens
  misc_RNA (1)...(19): siRNA sense strand
ccaacccgcuguuugaaag

SEQ ID NO: 1527943 - RNA, 19 nt, Homo sapiens
  misc_RNA (1)...(19): siRNA sense strand
gacugcagcuguaucaagu

SEQ ID NO: 1527944 - RNA, 19 nt, Homo sapiens
  misc_RNA (1)...(19): siRNA sense strand
gcugguauaaugagauaaa

SEQ ID NO: 1527945 - RNA, 19 nt, Homo sapiens
  misc_RNA (1)...(19): siRNA sense strand
gcaaaaggcaaaacaaaau

SEQ ID NO: 1527946 - RNA, 19 nt, Homo sapiens
  misc_RNA (1)...(19): siRNA sense strand
aaacgacauuauucuggaa

SEQ ID NO: 1527947 - RNA, 19 nt, Homo sapiens
  misc_RNA (1)...(19): siRNA sense strand
agugaacgcaguagaauuu

SEQ ID NO: 1527948 - RNA, 19 nt, Homo sapiens
  misc_RNA (1)...(19): siRNA sense strand
ccaccucugaguacuauaa

SEQ ID NO: 1527949 - RNA, 19 nt, Homo sapiens
  misc_RNA (1)...(19): siRNA sense strand
ugacccguaucuaugauga

SEQ ID NO: 1527950 - RNA, 19 nt, Homo sapiens
  misc_RNA (1)...(19): siRNA sense strand
gacaccaucugcuucaucu

SEQ ID NO: 1527951 - RNA, 19 nt, Homo sapiens
  misc_RNA (1)...(19): siRNA sense strand
gagagaagucaaguauuug

SEQ ID NO: 1527952 - RNA, 19 nt, Homo sapiens
  misc_RNA (1)...(19): siRNA sense strand
uuugaugacugcagcugua

SEQ ID NO: 1527953 - RNA, 19 nt, Homo sapiens
  misc_RNA (1)...(19): siRNA sense strand
gaagaauugccaaccucaa

SEQ ID NO: 1527954 - RNA, 19 nt, Homo sapiens
  misc_RNA (1)...(19): siRNA sense strand
ugaaagaaaggacaauaag

SEQ ID NO: 1527955 - RNA, 19 nt, Homo sapiens
  misc_RNA (1)...(19): siRNA sense strand
ggccaccucugaguacuau

SEQ ID NO: 1527956 - RNA, 19 nt, Homo sapiens
  misc_RNA (1)...(19): siRNA sense strand
ccacgucaacuucagcaaa

SEQ ID NO: 1527957 - RNA, 19 nt, Homo sapiens
  misc_RNA (1)...(19): siRNA sense strand
gaaguaugacgagaugaug

SEQ ID NO: 1527958 - RNA, 19 nt, Homo sapiens
  misc_RNA (1)...(19): siRNA sense strand
gcccgugccuugggaauuc

SEQ ID NO: 1527959 - RNA, 19 nt, Homo sapiens
  misc_RNA (1)...(19): siRNA sense strand
aagaggcccuguuagacuu

SEQ ID NO: 1527960 - RNA, 19 nt, Homo sapiens
  misc_RNA (1)...(19): siRNA sense strand
caagaggugcgagaaauuc

SEQ ID NO: 1527961 - RNA, 19 nt, Homo sapiens
  misc_RNA (1)...(19): siRNA sense strand
ucaagaggugcgagaaauu

SEQ ID NO: 1527962 - RNA, 19 nt, Homo sapiens
  misc_RNA (1)...(19): siRNA sense strand
gaugacugcagcuguauca

SEQ ID NO: 1527963 - RNA, 19 nt, Homo sapiens
  misc_RNA (1)...(19): siRNA sense strand
gaauugccaaccucaacaa

SEQ ID NO: 1527964 - RNA, 19 nt, Homo sapiens
  misc_RNA (1)...(19): siRNA sense strand
gaccauugaggaacucuau

SEQ ID NO: 1527965 - RNA, 19 nt, Homo sapiens
  misc_RNA (1)...(19): siRNA sense strand
gcgcccagguauucaguca

SEQ ID NO: 1527966 - RNA, 19 nt, Homo sapiens
  misc_RNA (1)...(19): siRNA sense strand
aauaaagucagaacuggaa

SEQ ID NO: 1527967 - RNA, 19 nt, Homo sapiens
  misc_RNA (1)...(19): siRNA sense strand
ucuuugagcuggugaaggu

SEQ ID NO: 1527968 - RNA, 19 nt, Homo sapiens
  misc_RNA (1)...(19): siRNA sense strand
uauagugaacgcaguagaa

SEQ ID NO: 1527969 - RNA, 19 nt, Homo sapiens
  misc_RNA (1)...(19): siRNA sense strand
caaccuggagcucaucguu

SEQ ID NO: 1527970 - RNA, 19 nt, Homo sapiens
  misc_RNA (1)...(19): siRNA sense strand
gcuagagguguccaugaaa

SEQ ID NO: 1527971 - RNA, 19 nt, Homo sapiens
  misc_RNA (1)...(19): siRNA sense strand
augcuaagaucuuguacga

SEQ ID NO: 1527972 - RNA, 19 nt, Homo sapiens
  misc_RNA (1)...(19): siRNA sense strand
ggaguucugcaaccaaauc

SEQ ID NO: 1527973 - RNA, 19 nt, Homo sapiens
  misc_RNA (1)...(19): siRNA sense strand
acgcugagcuagacaaugc

SEQ ID NO: 1527974 - RNA, 19 nt, Homo sapiens
  misc_RNA (1)...(19): siRNA sense strand
cuguaaaugugcugaagga

SEQ ID NO: 1527975 - RNA, 19 nt, Homo sapiens
  misc_RNA (1)...(19): siRNA sense strand
gcaaggugaaaucgaggaa

SEQ ID NO: 1527976 - RNA, 19 nt, Homo sapiens
  misc_RNA (1)...(19): siRNA sense strand
ugagauaaagacuauagug

SEQ ID NO: 1527977 - RNA, 19 nt, Homo sapiens
  misc_RNA (1)...(19): siRNA sense strand
ucugagagaagucaaguau

SEQ ID NO: 1527978 - RNA, 19 nt, Homo sapiens
  misc_RNA (1)...(19): siRNA sense strand
ggacaccaucugcuucauc

SEQ ID NO: 1527979 - RNA, 19 nt, Homo sapiens
  misc_RNA (1)...(19): siRNA sense strand
gagcuagacaaugcuaaga

SEQ ID NO: 1527980 - RNA, 19 nt, Homo sapiens
  misc_RNA (1)...(19): siRNA sense strand
cagggaugcuggagugaag

SEQ ID NO: 1527981 - RNA, 19 nt, Homo sapiens
  misc_RNA (1)...(19): siRNA sense strand
cagcgcauccagaccauug

SEQ ID NO: 1527982 - RNA, 19 nt, Homo sapiens
  misc_RNA (1)...(19): siRNA sense strand
cacgucaacuucagcaaag

SEQ ID NO: 1527983 - RNA, 19 nt, Homo sapiens
  misc_RNA (1)...(19): siRNA sense strand
uaucaaguccuccgcaaag

SEQ ID NO: 1527984 - RNA, 19 nt, Homo sapiens
  misc_RNA (1)...(19): siRNA sense strand
ggagccuggugacccguau

SEQ ID NO: 1527985 - RNA, 19 nt, Homo sapiens
  misc_RNA (1)...(19): siRNA sense strand
cggccaacccgcuguuuga

SEQ ID NO: 1527986 - RNA, 19 nt, Homo sapiens
  misc_RNA (1)...(19): siRNA sense strand
gcugaaacgacauuauucu

SEQ ID NO: 1527987 - RNA, 19 nt, Homo sapiens
  misc_RNA (1)...(19): siRNA sense strand
gacuauagugaacgcagua

SEQ ID NO: 1527988 - RNA, 19 nt, Homo sapiens
  misc_RNA (1)...(19): siRNA sense strand
aaggugaaaucgaggaagu

SEQ ID NO: 1527989 - RNA, 19 nt, Homo sapiens
  misc_RNA (1)...(19): siRNA sense strand
cuagagguguccaugaaac

SEQ ID NO: 1527990 - RNA, 19 nt, Homo sapiens
  misc_RNA (1)...(19): siRNA sense strand
auaggaggcuggccacgau

SEQ ID NO: 1527991 - RNA, 19 nt, Homo sapiens
  misc_RNA (1)...(19): siRNA sense strand
ggauaaauuccuucuucca

SEQ ID NO: 1527992 - RNA, 19 nt, Homo sapiens
  misc_RNA (1)...(19): siRNA sense strand
gguauaaugagauaaagac

SEQ ID NO: 1527993 - RNA, 19 nt, Homo sapiens
  misc_RNA (1)...(19): siRNA sense strand
ugaauuuccagcaacagaa

SEQ ID NO: 1527994 - RNA, 19 nt, Homo sapiens
  misc_RNA (1)...(19): siRNA sense strand
gaggcuggccacgaucuuu

SEQ ID NO: 1527995 - RNA, 19 nt, Homo sapiens
  misc_RNA (1)...(19): siRNA sense strand
gaccgugauuaugcugauu

SEQ ID NO: 1527996 - RNA, 19 nt, Homo sapiens
  misc_RNA (1)...(19): siRNA sense strand
ucuaugaugaggucuuuga

SEQ ID NO: 1527997 - RNA, 19 nt, Homo sapiens
  misc_RNA (1)...(19): siRNA sense strand
gccaacccgcuguuugaaa

SEQ ID NO: 1527998 - RNA, 19 nt, Homo sapiens
  misc_RNA (1)...(19): siRNA sense strand
aucguuggcugguauaaug

SEQ ID NO: 1527999 - RNA, 19 nt, Homo sapiens
  misc_RNA (1)...(19): siRNA sense strand
ucaccgaccuggagucuuu

SEQ ID NO: 1528000 - RNA, 19 nt, Homo sapiens
  misc_RNA (1)...(19): siRNA sense strand
gagagaaagauauuccuua

SEQ ID NO: 1528001 - RNA, 19 nt, Homo sapiens
  misc_RNA (1)...(19): siRNA sense strand
guagggcucugucgaggua

SEQ ID NO: 1528002 - RNA, 19 nt, Homo sapiens
  misc_RNA (1)...(19): siRNA sense strand
gcucaaggcugguguagag

SEQ ID NO: 1528003 - RNA, 19 nt, Homo sapiens
  misc_RNA (1)...(19): siRNA sense strand
uaccagagcaucuuagaaa

SEQ ID NO: 1528004 - RNA, 19 nt, Homo sapiens
  misc_RNA (1)...(19): siRNA sense strand
gaaaaucaccucacagaau

SEQ ID NO: 1528005 - RNA, 19 nt, Homo sapiens
  misc_RNA (1)...(19): siRNA sense strand
ugaagucagugccaagaau

SEQ ID NO: 1528006 - RNA, 19 nt, Homo sapiens
  misc_RNA (1)...(19): siRNA sense strand
agagaaagauauuccuuac

SEQ ID NO: 1528007 - RNA, 19 nt, Homo sapiens
  misc_RNA (1)...(19): siRNA sense strand
gaagucagugccaagaaug

SEQ ID NO: 1528008 - RNA, 19 nt, Homo sapiens
  misc_RNA (1)...(19): siRNA sense strand
agcauccucuccaagauua

SEQ ID NO: 1528009 - RNA, 19 nt, Homo sapiens
  misc_RNA (1)...(19): siRNA sense strand
gaagguaccccaggaagua

SEQ ID NO: 1528010 - RNA, 19 nt, Homo sapiens
  misc_RNA (1)...(19): siRNA sense strand
caaggcugguguagagaga

SEQ ID NO: 1528011 - RNA, 19 nt, Homo sapiens
  misc_RNA (1)...(19): siRNA sense strand
gauauuccuuacuuugaag

SEQ ID NO: 1528012 - RNA, 19 nt, Homo sapiens
  misc_RNA (1)...(19): siRNA sense strand
gagguaccagagcaucuua

SEQ ID NO: 1528013 - RNA, 19 nt, Homo sapiens
  misc_RNA (1)...(19): siRNA sense strand
cauauugggugacacaacu

SEQ ID NO: 1528014 - RNA, 19 nt, Homo sapiens
  misc_RNA (1)...(19): siRNA sense strand
ggugcaagcguuugagaug

SEQ ID NO: 1528015 - RNA, 19 nt, Homo sapiens
  misc_RNA (1)...(19): siRNA sense strand
gcuccaugguguccacguu

SEQ ID NO: 1528016 - RNA, 19 nt, Homo sapiens
  misc_RNA (1)...(19): siRNA sense strand
gugauguccuggccaagau

SEQ ID NO: 1528017 - RNA, 19 nt, Homo sapiens
  misc_RNA (1)...(19): siRNA sense strand
gaccugaaacucauuaucg

SEQ ID NO: 1528018 - RNA, 19 nt, Homo sapiens
  misc_RNA (1)...(19): siRNA sense strand
cagcauccucuccaagauu

SEQ ID NO: 1528019 - RNA, 19 nt, Homo sapiens
  misc_RNA (1)...(19): siRNA sense strand
ugccaagaaugacaucaau

SEQ ID NO: 1528020 - RNA, 19 nt, Homo sapiens
  misc_RNA (1)...(19): siRNA sense strand
aaaaucaccucacagaauc

SEQ ID NO: 1528021 - RNA, 19 nt, Homo sapiens
  misc_RNA (1)...(19): siRNA sense strand
guaccagagcaucuuagaa

SEQ ID NO: 1528022 - RNA, 19 nt, Homo sapiens
  misc_RNA (1)...(19): siRNA sense strand
gccagcauccucuccaaga

SEQ ID NO: 1528023 - RNA, 19 nt, Homo sapiens
  misc_RNA (1)...(19): siRNA sense strand
ccagcauccucuccaagau

SEQ ID NO: 1528024 - RNA, 19 nt, Homo sapiens
  misc_RNA (1)...(19): siRNA sense strand
gggccagcauccucuccaa

SEQ ID NO: 1528025 - RNA, 19 nt, Homo sapiens
  misc_RNA (1)...(19): siRNA sense strand
ucaccaauaugugcacaag

SEQ ID NO: 1528026 - RNA, 19 nt, Homo sapiens
  misc_RNA (1)...(19): siRNA sense strand
guguagagagaaagauauu

SEQ ID NO: 1528027 - RNA, 19 nt, Homo sapiens
  misc_RNA (1)...(19): siRNA sense strand
ggaccugaaacucauuauc

SEQ ID NO: 1528028 - RNA, 19 nt, Homo sapiens
  misc_RNA (1)...(19): siRNA sense strand
cuccaagauuaucauauug

SEQ ID NO: 1528029 - RNA, 19 nt, Homo sapiens
  misc_RNA (1)...(19): siRNA sense strand
ggugauguccuggccaaga

SEQ ID NO: 1528030 - RNA, 19 nt, Homo sapiens
  misc_RNA (1)...(19): siRNA sense strand
caauguggugcaagcguuu

SEQ ID NO: 1528031 - RNA, 19 nt, Homo sapiens
  misc_RNA (1)...(19): siRNA sense strand
gguguagagagaaagauau

SEQ ID NO: 1528032 - RNA, 19 nt, Homo sapiens
  misc_RNA (1)...(19): siRNA sense strand
uugaagcccuggauaucug

SEQ ID NO: 1528033 - RNA, 19 nt, Homo sapiens
  misc_RNA (1)...(19): siRNA sense strand
gguaccagagcaucuuaga

SEQ ID NO: 1528034 - RNA, 19 nt, Homo sapiens
  misc_RNA (1)...(19): siRNA sense strand
cucccucccucaccaauau

SEQ ID NO: 1528035 - RNA, 19 nt, Homo sapiens
  misc_RNA (1)...(19): siRNA sense strand
ucacagaauccaucaagcu

SEQ ID NO: 1528036 - RNA, 19 nt, Homo sapiens
  misc_RNA (1)...(19): siRNA sense strand
aggcugguguagagagaaa

SEQ ID NO: 1528037 - RNA, 19 nt, Homo sapiens
  misc_RNA (1)...(19): siRNA sense strand
caagacguuuuaugaggaa

SEQ ID NO: 1528038 - RNA, 19 nt, Homo sapiens
  misc_RNA (1)...(19): siRNA sense strand
uugagaugcuggccaguag

SEQ ID NO: 1528039 - RNA, 19 nt, Homo sapiens
  misc_RNA (1)...(19): siRNA sense strand
guggaccugaaacucauua

SEQ ID NO: 1528040 - RNA, 19 nt, Homo sapiens
  misc_RNA (1)...(19): siRNA sense strand
gagaaagauauuccuuacu

SEQ ID NO: 1528041 - RNA, 19 nt, Homo sapiens
  misc_RNA (1)...(19): siRNA sense strand
guagagagaaagauauucc

SEQ ID NO: 1528042 - RNA, 19 nt, Homo sapiens
  misc_RNA (1)...(19): siRNA sense strand
gauguccuggccaagauug

SEQ ID NO: 1528043 - RNA, 19 nt, Homo sapiens
  misc_RNA (1)...(19): siRNA sense strand
gcacaugacuaaucacuug

SEQ ID NO: 1528044 - RNA, 19 nt, Homo sapiens
  misc_RNA (1)...(19): siRNA sense strand
gggacuugcuucacauuua

SEQ ID NO: 1528045 - RNA, 19 nt, Homo sapiens
  misc_RNA (1)...(19): siRNA sense strand
ggacuugcuucacauuuau

SEQ ID NO: 1528046 - RNA, 19 nt, Homo sapiens
  misc_RNA (1)...(19): siRNA sense strand
gaacaacaaguacauaaag

SEQ ID NO: 1528047 - RNA, 19 nt, Homo sapiens
  misc_RNA (1)...(19): siRNA sense strand
guacauaaaguuugucaug

SEQ ID NO: 1528048 - RNA, 19 nt, Homo sapiens
  misc_RNA (1)...(19): siRNA sense strand
gaagggaucaagaaccaaa

SEQ ID NO: 1528049 - RNA, 19 nt, Homo sapiens
  misc_RNA (1)...(19): siRNA sense strand
ggaacaacaaguacauaaa

SEQ ID NO: 1528050 - RNA, 19 nt, Homo sapiens
  misc_RNA (1)...(19): siRNA sense strand
ggugagacauacuagaaau

SEQ ID NO: 1528051 - RNA, 19 nt, Homo sapiens
  misc_RNA (1)...(19): siRNA sense strand
gagacauacuagaaauuug

SEQ ID NO: 1528052 - RNA, 19 nt, Homo sapiens
  misc_RNA (1)...(19): siRNA sense strand
gaaauuugaagcucaguuc

SEQ ID NO: 1528053 - RNA, 19 nt, Homo sapiens
  misc_RNA (1)...(19): siRNA sense strand
uggcugagguggaggauga

SEQ ID NO: 1528054 - RNA, 19 nt, Homo sapiens
  misc_RNA (1)...(19): siRNA sense strand
ccacucauuuauucucauu

SEQ ID NO: 1528055 - RNA, 19 nt, Homo sapiens
  misc_RNA (1)...(19): siRNA sense strand
gaggaugaacggaaugauu

SEQ ID NO: 1528056 - RNA, 19 nt, Homo sapiens
  misc_RNA (1)...(19): siRNA sense strand
cuucucagcuuaaccaguu

SEQ ID NO: 1528057 - RNA, 19 nt, Homo sapiens
  misc_RNA (1)...(19): siRNA sense strand
ggcaauagcagaauucauc

SEQ ID NO: 1528058 - RNA, 19 nt, Homo sapiens
  misc_RNA (1)...(19): siRNA sense strand
aggcuacuguggcaucuua

SEQ ID NO: 1528059 - RNA, 19 nt, Homo sapiens
  misc_RNA (1)...(19): siRNA sense strand
gaacggaaugauuguuaug

SEQ ID NO: 1528060 - RNA, 19 nt, Homo sapiens
  misc_RNA (1)...(19): siRNA sense strand
caccaaaugcuuuaccuuu

SEQ ID NO: 1528061 - RNA, 19 nt, Homo sapiens
  misc_RNA (1)...(19): siRNA sense strand
ugaaaauggugaugucuuu

SEQ ID NO: 1528062 - RNA, 19 nt, Homo sapiens
  misc_RNA (1)...(19): siRNA sense strand
acaaguggccaaugggaua

SEQ ID NO: 1528063 - RNA, 19 nt, Homo sapiens
  misc_RNA (1)...(19): siRNA sense strand
ccacauauagacuaggaaa

SEQ ID NO: 1528064 - RNA, 19 nt, Homo sapiens
  misc_RNA (1)...(19): siRNA sense strand
ugaacggaaugauuguuau

SEQ ID NO: 1528065 - RNA, 19 nt, Homo sapiens
  misc_RNA (1)...(19): siRNA sense strand
gcucugaagggaucaagaa

SEQ ID NO: 1528066 - RNA, 19 nt, Homo sapiens
  misc_RNA (1)...(19): siRNA sense strand
caguuuagugcuagaaaua

SEQ ID NO: 1528067 - RNA, 19 nt, Homo sapiens
  misc_RNA (1)...(19): siRNA sense strand
gguggaggaugaacggaau

SEQ ID NO: 1528068 - RNA, 19 nt, Homo sapiens
  misc_RNA (1)...(19): siRNA sense strand
cuucucagcugacuucauc

SEQ ID NO: 1528069 - RNA, 19 nt, Homo sapiens
  misc_RNA (1)...(19): siRNA sense strand
uuggcuaucuccacaauug

SEQ ID NO: 1528070 - RNA, 19 nt, Homo sapiens
  misc_RNA (1)...(19): siRNA sense strand
gcaauagcagaauucauca

SEQ ID NO: 1528071 - RNA, 19 nt, Homo sapiens
  misc_RNA (1)...(19): siRNA sense strand
gaaugauuguuaugcuucu

SEQ ID NO: 1528072 - RNA, 19 nt, Homo sapiens
  misc_RNA (1)...(19): siRNA sense strand
ucauuggacugguaaacug

SEQ ID NO: 1528073 - RNA, 19 nt, Homo sapiens
  misc_RNA (1)...(19): siRNA sense strand
cggaaugauuguuaugcuu

SEQ ID NO: 1528074 - RNA, 19 nt, Homo sapiens
  misc_RNA (1)...(19): siRNA sense strand
caucuuaggaacuauacaa

SEQ ID NO: 1528075 - RNA, 19 nt, Homo sapiens
  misc_RNA (1)...(19): siRNA sense strand
ggugaugucuuuccuuuuc

SEQ ID NO: 1528076 - RNA, 19 nt, Homo sapiens
  misc_RNA (1)...(19): siRNA sense strand
uggaacaacaaguacauaa

SEQ ID NO: 1528077 - RNA, 19 nt, Homo sapiens
  misc_RNA (1)...(19): siRNA sense strand
uaccacauauagacuagga

SEQ ID NO: 1528078 - RNA, 19 nt, Homo sapiens
  misc_RNA (1)...(19): siRNA sense strand
ggucuucucagcugacuuc

SEQ ID NO: 1528079 - RNA, 19 nt, Homo sapiens
  misc_RNA (1)...(19): siRNA sense strand
uguggcaucuuaggaacua

SEQ ID NO: 1528080 - RNA, 19 nt, Homo sapiens
  misc_RNA (1)...(19): siRNA sense strand
gaaaguaaaacucucuaug

SEQ ID NO: 1528081 - RNA, 19 nt, Homo sapiens
  misc_RNA (1)...(19): siRNA sense strand
gcuuggcuaucuccacaau

SEQ ID NO: 1528082 - RNA, 19 nt, Homo sapiens
  misc_RNA (1)...(19): siRNA sense strand
cagaauucaucaucagcau

SEQ ID NO: 1528083 - RNA, 19 nt, Homo sapiens
  misc_RNA (1)...(19): siRNA sense strand
gccuaagcauuuucuauuu

SEQ ID NO: 1528084 - RNA, 19 nt, Homo sapiens
  misc_RNA (1)...(19): siRNA sense strand
ugacuaaucacuugacaac

SEQ ID NO: 1528085 - RNA, 19 nt, Homo sapiens
  misc_RNA (1)...(19): siRNA sense strand
ggugauacuguuugauuca

SEQ ID NO: 1528086 - RNA, 19 nt, Homo sapiens
  misc_RNA (1)...(19): siRNA sense strand
uagcagaauucaucaucag

SEQ ID NO: 1528087 - RNA, 19 nt, Homo sapiens
  misc_RNA (1)...(19): siRNA sense strand
uaaaguuugucauguuagc

SEQ ID NO: 1528088 - RNA, 19 nt, Homo sapiens
  misc_RNA (1)...(19): siRNA sense strand
cugguaaacugcucugaag

SEQ ID NO: 1528089 - RNA, 19 nt, Homo sapiens
  misc_RNA (1)...(19): siRNA sense strand
aggaugaacggaaugauug

SEQ ID NO: 1528090 - RNA, 19 nt, Homo sapiens
  misc_RNA (1)...(19): siRNA sense strand
auggugaugucuuuccuuu

SEQ ID NO: 1528091 - RNA, 19 nt, Homo sapiens
  misc_RNA (1)...(19): siRNA sense strand
cugaagggaucaagaacca

SEQ ID NO: 1528092 - RNA, 19 nt, Homo sapiens
  misc_RNA (1)...(19): siRNA sense strand
cgaauuggacaaaaucuuu

SEQ ID NO: 1528093 - RNA, 19 nt, Homo sapiens
  misc_RNA (1)...(19): siRNA sense strand
uguguucauuggacuggua

SEQ ID NO: 1528094 - RNA, 19 nt, Homo sapiens
  misc_RNA (1)...(19): siRNA sense strand
acaguuuagugcuagaaau

SEQ ID NO: 1528095 - RNA, 19 nt, Homo sapiens
  misc_RNA (1)...(19): siRNA sense strand
augaacggaaugauuguua

SEQ ID NO: 1528096 - RNA, 19 nt, Homo sapiens
  misc_RNA (1)...(19): siRNA sense strand
gugagacauacuagaaauu

SEQ ID NO: 1528097 - RNA, 19 nt, Homo sapiens
  misc_RNA (1)...(19): siRNA sense strand
ggaugaacggaaugauugu

SEQ ID NO: 1528098 - RNA, 19 nt, Homo sapiens
  misc_RNA (1)...(19): siRNA sense strand
gacaguuuagugcuagaaa

SEQ ID NO: 1528099 - RNA, 19 nt, Homo sapiens
  misc_RNA (1)...(19): siRNA sense strand
uagugggacuugcuucaca

SEQ ID NO: 1528100 - RNA, 19 nt, Homo sapiens
  misc_RNA (1)...(19): siRNA sense strand
gaaccaaaaggucuucuca

SEQ ID NO: 1528101 - RNA, 19 nt, Homo sapiens
  misc_RNA (1)...(19): siRNA sense strand
acuaaucacuugacaaccu

SEQ ID NO: 1528102 - RNA, 19 nt, Homo sapiens
  misc_RNA (1)...(19): siRNA sense strand
uuuggcacaugacuaauca

SEQ ID NO: 1528103 - RNA, 19 nt, Homo sapiens
  misc_RNA (1)...(19): siRNA sense strand
ucgugccacucauuuauuc

SEQ ID NO: 1528104 - RNA, 19 nt, Homo sapiens
  misc_RNA (1)...(19): siRNA sense strand
ccucgugccacucauuuau

SEQ ID NO: 1528105 - RNA, 19 nt, Homo sapiens
  misc_RNA (1)...(19): siRNA sense strand
ccauaggagggccaugaaa

SEQ ID NO: 1528106 - RNA, 19 nt, Homo sapiens
  misc_RNA (1)...(19): siRNA sense strand
gaugaacggaaugauuguu

SEQ ID NO: 1528107 - RNA, 19 nt, Homo sapiens
  misc_RNA (1)...(19): siRNA sense strand
ccaccgaauuggacaaaau

SEQ ID NO: 1528108 - RNA, 19 nt, Homo sapiens
  misc_RNA (1)...(19): siRNA sense strand
guggaacaacaaguacaua

SEQ ID NO: 1528109 - RNA, 19 nt, Homo sapiens
  misc_RNA (1)...(19): siRNA sense strand
ccuuacaaguggccaaugg

SEQ ID NO: 1528110 - RNA, 19 nt, Homo sapiens
  misc_RNA (1)...(19): siRNA sense strand
auagcagaauucaucauca

SEQ ID NO: 1528111 - RNA, 19 nt, Homo sapiens
  misc_RNA (1)...(19): siRNA sense strand
gccaccugccuaagcauuu

SEQ ID NO: 1528112 - RNA, 19 nt, Homo sapiens
  misc_RNA (1)...(19): siRNA sense strand
caugacuaaucacuugaca

SEQ ID NO: 1528113 - RNA, 19 nt, Homo sapiens
  misc_RNA (1)...(19): siRNA sense strand
gacuugcuucacauuuaua

SEQ ID NO: 1528114 - RNA, 19 nt, Homo sapiens
  misc_RNA (1)...(19): siRNA sense strand
gauccuaccucaccuauga

SEQ ID NO: 1528115 - RNA, 19 nt, Homo sapiens
  misc_RNA (1)...(19): siRNA sense strand
gcaccucccuucaucagaa

SEQ ID NO: 1528116 - RNA, 19 nt, Homo sapiens
  misc_RNA (1)...(19): siRNA sense strand
gagagucugugggcuauga

SEQ ID NO: 1528117 - RNA, 19 nt, Homo sapiens
  misc_RNA (1)...(19): siRNA sense strand
ccaauuccauccucacugu

SEQ ID NO: 1528118 - RNA, 19 nt, Homo sapiens
  misc_RNA (1)...(19): siRNA sense strand
ggucuucccauuucaguuu

SEQ ID NO: 1528119 - RNA, 19 nt, Homo sapiens
  misc_RNA (1)...(19): siRNA sense strand
cuccguagcuuuaagagaa

SEQ ID NO: 1528120 - RNA, 19 nt, Homo sapiens
  misc_RNA (1)...(19): siRNA sense strand
ucagaagugucagcucaaa

SEQ ID NO: 1528121 - RNA, 19 nt, Homo sapiens
  misc_RNA (1)...(19): siRNA sense strand
gggagagucugugggcuau

SEQ ID NO: 1528122 - RNA, 19 nt, Homo sapiens
  misc_RNA (1)...(19): siRNA sense strand
caccuaugaugcccaauuc

SEQ ID NO: 1528123 - RNA, 19 nt, Homo sapiens
  misc_RNA (1)...(19): siRNA sense strand
cgucagccauucccaguca

SEQ ID NO: 1528124 - RNA, 19 nt, Homo sapiens
  misc_RNA (1)...(19): siRNA sense strand
ccauuucaguuuagaagca

SEQ ID NO: 1528125 - RNA, 19 nt, Homo sapiens
  misc_RNA (1)...(19): siRNA sense strand
gcagauccuaccucaccua

SEQ ID NO: 1528126 - RNA, 19 nt, Homo sapiens
  misc_RNA (1)...(19): siRNA sense strand
cuaagggcaguuucuguuu

SEQ ID NO: 1528127 - RNA, 19 nt, Homo sapiens
  misc_RNA (1)...(19): siRNA sense strand
gaccagcgggugugcaguu

SEQ ID NO: 1528128 - RNA, 19 nt, Homo sapiens
  misc_RNA (1)...(19): siRNA sense strand
ccuaagggcaguuucuguu

SEQ ID NO: 1528129 - RNA, 19 nt, Homo sapiens
  misc_RNA (1)...(19): siRNA sense strand
uaagggcaguuucuguuuu

SEQ ID NO: 1528130 - RNA, 19 nt, Homo sapiens
  misc_RNA (1)...(19): siRNA sense strand
ucaccuaugaugcccaauu

SEQ ID NO: 1528131 - RNA, 19 nt, Homo sapiens
  misc_RNA (1)...(19): siRNA sense strand
auucuucuccguagcuuua

SEQ ID NO: 1528132 - RNA, 19 nt, Homo sapiens
  misc_RNA (1)...(19): siRNA sense strand
gucuucccauuucaguuua

SEQ ID NO: 1528133 - RNA, 19 nt, Homo sapiens
  misc_RNA (1)...(19): siRNA sense strand
ccucccaggugagaagaaa

SEQ ID NO: 1528134 - RNA, 19 nt, Homo sapiens
  misc_RNA (1)...(19): siRNA sense strand
caaaccaagaggcucauuc

SEQ ID NO: 1528135 - RNA, 19 nt, Homo sapiens
  misc_RNA (1)...(19): siRNA sense strand
gccaucugcuggacaaagg

SEQ ID NO: 1528136 - RNA, 19 nt, Homo sapiens
  misc_RNA (1)...(19): siRNA sense strand
cuugagccauggcagaaga

SEQ ID NO: 1528137 - RNA, 19 nt, Homo sapiens
  misc_RNA (1)...(19): siRNA sense strand
ggcaguuucuguuuucauu

SEQ ID NO: 1528138 - RNA, 19 nt, Homo sapiens
  misc_RNA (1)...(19): siRNA sense strand
aaaccaagaggcucauucu

SEQ ID NO: 1528139 - RNA, 19 nt, Homo sapiens
  misc_RNA (1)...(19): siRNA sense strand
gagucugugggcuaugaua

SEQ ID NO: 1528140 - RNA, 19 nt, Homo sapiens
  misc_RNA (1)...(19): siRNA sense strand
cagcgggugugcaguuugc

SEQ ID NO: 1528141 - RNA, 19 nt, Homo sapiens
  misc_RNA (1)...(19): siRNA sense strand
ugaccucacuguucuacua

SEQ ID NO: 1528142 - RNA, 19 nt, Homo sapiens
  misc_RNA (1)...(19): siRNA sense strand
guacuucucuacccuggaa

SEQ ID NO: 1528143 - RNA, 19 nt, Homo sapiens
  misc_RNA (1)...(19): siRNA sense strand
ucgcaucucagaauaauua

SEQ ID NO: 1528144 - RNA, 19 nt, Homo sapiens
  misc_RNA (1)...(19): siRNA sense strand
ccaaagccuucgcaucuca

SEQ ID NO: 1528145 - RNA, 19 nt, Homo sapiens
  misc_RNA (1)...(19): siRNA sense strand
caucagagaagacuccauu

SEQ ID NO: 1528146 - RNA, 19 nt, Homo sapiens
  misc_RNA (1)...(19): siRNA sense strand
ccucuacucugccuucaug

SEQ ID NO: 1528147 - RNA, 19 nt, Homo sapiens
  misc_RNA (1)...(19): siRNA sense strand
ggacccagcccuacaacau

SEQ ID NO: 1528148 - RNA, 19 nt, Homo sapiens
  misc_RNA (1)...(19): siRNA sense strand
ggccaaagccuucgcaucu

SEQ ID NO: 1528149 - RNA, 19 nt, Homo sapiens
  misc_RNA (1)...(19): siRNA sense strand
auaccagccuuucauccua

SEQ ID NO: 1528150 - RNA, 19 nt, Homo sapiens
  misc_RNA (1)...(19): siRNA sense strand
uaccagccuuucauccuaa

SEQ ID NO: 1528151 - RNA, 19 nt, Homo sapiens
  misc_RNA (1)...(19): siRNA sense strand
agaagcaccugaggcagaa

SEQ ID NO: 1528152 - RNA, 19 nt, Homo sapiens
  misc_RNA (1)...(19): siRNA sense strand
ccuucgaggugacuggaua

SEQ ID NO: 1528153 - RNA, 19 nt, Homo sapiens
  misc_RNA (1)...(19): siRNA sense strand
gcauugcgguggccaaagc

SEQ ID NO: 1528154 - RNA, 19 nt, Homo sapiens
  misc_RNA (1)...(19): siRNA sense strand
gcuguccgcugaccugaag

SEQ ID NO: 1528155 - RNA, 19 nt, Homo sapiens
  misc_RNA (1)...(19): siRNA sense strand
gaauaauuaccgcaucgau

SEQ ID NO: 1528156 - RNA, 19 nt, Homo sapiens
  misc_RNA (1)...(19): siRNA sense strand
ugcaguggcugaagaugga

SEQ ID NO: 1528157 - RNA, 19 nt, Homo sapiens
  misc_RNA (1)...(19): siRNA sense strand
gccuucgcaucucagaaua

SEQ ID NO: 1528158 - RNA, 19 nt, Homo sapiens
  misc_RNA (1)...(19): siRNA sense strand
gagcauugcgguggccaaa

SEQ ID NO: 1528159 - RNA, 19 nt, Homo sapiens
  misc_RNA (1)...(19): siRNA sense strand
uaccugaccucacuguucu

SEQ ID NO: 1528160 - RNA, 19 nt, Homo sapiens
  misc_RNA (1)...(19): siRNA sense strand
gcuggccuaugcugaagug

SEQ ID NO: 1528161 - RNA, 19 nt, Homo sapiens
  misc_RNA (1)...(19): siRNA sense strand
ggucacaggcagcuuugga

SEQ ID NO: 1528162 - RNA, 19 nt, Homo sapiens
  misc_RNA (1)...(19): siRNA sense strand
gcuuuggacagaucaagaa

SEQ ID NO: 1528163 - RNA, 19 nt, Homo sapiens
  misc_RNA (1)...(19): siRNA sense strand
ccuacaacaucagagaaga

SEQ ID NO: 1528164 - RNA, 19 nt, Homo sapiens
  misc_RNA (1)...(19): siRNA sense strand
ugaccuuccugcugugcuu

SEQ ID NO: 1528165 - RNA, 19 nt, Homo sapiens
  misc_RNA (1)...(19): siRNA sense strand
caucggcuuuggacagauc

SEQ ID NO: 1528166 - RNA, 19 nt, Homo sapiens
  misc_RNA (1)...(19): siRNA sense strand
cuucgcaucucagaauaau

SEQ ID NO: 1528167 - RNA, 19 nt, Homo sapiens
  misc_RNA (1)...(19): siRNA sense strand
ccaucggucucaccaacau

SEQ ID NO: 1528168 - RNA, 19 nt, Homo sapiens
  misc_RNA (1)...(19): siRNA sense strand
cuaccugaccucacuguuc

SEQ ID NO: 1528169 - RNA, 19 nt, Homo sapiens
  misc_RNA (1)...(19): siRNA sense strand
gcacccaugucugcagcau

SEQ ID NO: 1528170 - RNA, 19 nt, Homo sapiens
  misc_RNA (1)...(19): siRNA sense strand
ccaacgggacgaucuccuu

SEQ ID NO: 1528171 - RNA, 19 nt, Homo sapiens
  misc_RNA (1)...(19): siRNA sense strand
ugggcugcuucguguauuu

SEQ ID NO: 1528172 - RNA, 19 nt, Homo sapiens
  misc_RNA (1)...(19): siRNA sense strand
cagccaggccugagaccaa

SEQ ID NO: 1528173 - RNA, 19 nt, Homo sapiens
  misc_RNA (1)...(19): siRNA sense strand
gccaaagccuucgcaucuc

SEQ ID NO: 1528174 - RNA, 19 nt, Homo sapiens
  misc_RNA (1)...(19): siRNA sense strand
ccuggugucucugcucaug

SEQ ID NO: 1528175 - RNA, 19 nt, Homo sapiens
  misc_RNA (1)...(19): siRNA sense strand
gcgcuggccuaugcugaag

SEQ ID NO: 1528176 - RNA, 19 nt, Homo sapiens
  misc_RNA (1)...(19): siRNA sense strand
ggcugaagauggauuucgu

SEQ ID NO: 1528177 - RNA, 19 nt, Homo sapiens
  misc_RNA (1)...(19): siRNA sense strand
acccagcccuacaacauca

SEQ ID NO: 1528178 - RNA, 19 nt, Homo sapiens
  misc_RNA (1)...(19): siRNA sense strand
gacccagcccuacaacauc

SEQ ID NO: 1528179 - RNA, 19 nt, Homo sapiens
  misc_RNA (1)...(19): siRNA sense strand
uggacuaccugaccucacu

SEQ ID NO: 1528180 - RNA, 19 nt, Homo sapiens
  misc_RNA (1)...(19): siRNA sense strand
gcucagaucuuugcaaaua

SEQ ID NO: 1528181 - RNA, 19 nt, Homo sapiens
  misc_RNA (1)...(19): siRNA sense strand
gaagaaccaugaagaggaa

SEQ ID NO: 1528182 - RNA, 19 nt, Homo sapiens
  misc_RNA (1)...(19): siRNA sense strand
ggaaguaaagggccuauaa

SEQ ID NO: 1528183 - RNA, 19 nt, Homo sapiens
  misc_RNA (1)...(19): siRNA sense strand
agauuuaccuucagcuuua

SEQ ID NO: 1528184 - RNA, 19 nt, Homo sapiens
  misc_RNA (1)...(19): siRNA sense strand
agacagagcuggccaugug

SEQ ID NO: 1528185 - RNA, 19 nt, Homo sapiens
  misc_RNA (1)...(19): siRNA sense strand
ccaguuagauuuaccuuca

SEQ ID NO: 1528186 - RNA, 19 nt, Homo sapiens
  misc_RNA (1)...(19): siRNA sense strand
ggacagugcccacauuguu

SEQ ID NO: 1528187 - RNA, 19 nt, Homo sapiens
  misc_RNA (1)...(19): siRNA sense strand
ggucuuagccaguuagauu

SEQ ID NO: 1528188 - RNA, 19 nt, Homo sapiens
  misc_RNA (1)...(19): siRNA sense strand
gggcucagaucuuugcaaa

SEQ ID NO: 1528189 - RNA, 19 nt, Homo sapiens
  misc_RNA (1)...(19): siRNA sense strand
gaaugggagucauccagaa

SEQ ID NO: 1528190 - RNA, 19 nt, Homo sapiens
  misc_RNA (1)...(19): siRNA sense strand
gaagaagaaccaugaagag

SEQ ID NO: 1528191 - RNA, 19 nt, Homo sapiens
  misc_RNA (1)...(19): siRNA sense strand
ugaagaagaaccaugaaga

SEQ ID NO: 1528192 - RNA, 19 nt, Homo sapiens
  misc_RNA (1)...(19): siRNA sense strand
gagaaggaaaccaugcaaa

SEQ ID NO: 1528193 - RNA, 19 nt, Homo sapiens
  misc_RNA (1)...(19): siRNA sense strand
gccagucuguggagaguga

SEQ ID NO: 1528194 - RNA, 19 nt, Homo sapiens
  misc_RNA (1)...(19): siRNA sense strand
gaaccaugaagaggaagua

SEQ ID NO: 1528195 - RNA, 19 nt, Homo sapiens
  misc_RNA (1)...(19): siRNA sense strand
gauuuaccuucagcuuuaa

SEQ ID NO: 1528196 - RNA, 19 nt, Homo sapiens
  misc_RNA (1)...(19): siRNA sense strand
aggagcaccuggagaagaa

SEQ ID NO: 1528197 - RNA, 19 nt, Homo sapiens
  misc_RNA (1)...(19): siRNA sense strand
gcuccacccucuccaccaa

SEQ ID NO: 1528198 - RNA, 19 nt, Homo sapiens
  misc_RNA (1)...(19): siRNA sense strand
ccugaguccuguccucuug

SEQ ID NO: 1528199 - RNA, 19 nt, Homo sapiens
  misc_RNA (1)...(19): siRNA sense strand
agaguuaggagccuggaua

SEQ ID NO: 1528200 - RNA, 19 nt, Homo sapiens
  misc_RNA (1)...(19): siRNA sense strand
uagauuuaccuucagcuuu

SEQ ID NO: 1528201 - RNA, 19 nt, Homo sapiens
  misc_RNA (1)...(19): siRNA sense strand
uuaggagccuggauaccaa

SEQ ID NO: 1528202 - RNA, 19 nt, Homo sapiens
  misc_RNA (1)...(19): siRNA sense strand
ggaucuccauguccugcuu

SEQ ID NO: 1528203 - RNA, 19 nt, Homo sapiens
  misc_RNA (1)...(19): siRNA sense strand
ccuccuaccuggacagagu

SEQ ID NO: 1528204 - RNA, 19 nt, Homo sapiens
  misc_RNA (1)...(19): siRNA sense strand
gaaggaaaccaugcaaagc

SEQ ID NO: 1528205 - RNA, 19 nt, Homo sapiens
  misc_RNA (1)...(19): siRNA sense strand
ccacauuguucugcagauc

SEQ ID NO: 1528206 - RNA, 19 nt, Homo sapiens
  misc_RNA (1)...(19): siRNA sense strand
gagccuggauaccaagaac

SEQ ID NO: 1528207 - RNA, 19 nt, Homo sapiens
  misc_RNA (1)...(19): siRNA sense strand
gacagugcccacauuguuc

SEQ ID NO: 1528208 - RNA, 19 nt, Homo sapiens
  misc_RNA (1)...(19): siRNA sense strand
ucagaucuuugcaaauacu

SEQ ID NO: 1528209 - RNA, 19 nt, Homo sapiens
  misc_RNA (1)...(19): siRNA sense strand
ccaugaagaggaaguaaag

SEQ ID NO: 1528210 - RNA, 19 nt, Homo sapiens
  misc_RNA (1)...(19): siRNA sense strand
agaaggaaaccaugcaaag

SEQ ID NO: 1528211 - RNA, 19 nt, Homo sapiens
  misc_RNA (1)...(19): siRNA sense strand
gccaugacuucaagaccau

SEQ ID NO: 1528212 - RNA, 19 nt, Homo sapiens
  misc_RNA (1)...(19): siRNA sense strand
cauccagaaugagaaggaa

SEQ ID NO: 1528213 - RNA, 19 nt, Homo sapiens
  misc_RNA (1)...(19): siRNA sense strand
ucaaggagaagcugcucuu

SEQ ID NO: 1528214 - RNA, 19 nt, Homo sapiens
  misc_RNA (1)...(19): siRNA sense strand
ucuuagccaguuagauuua

SEQ ID NO: 1528215 - RNA, 19 nt, Homo sapiens
  misc_RNA (1)...(19): siRNA sense strand
uaccuucagcuuuaacaaa

SEQ ID NO: 1528216 - RNA, 19 nt, Homo sapiens
  misc_RNA (1)...(19): siRNA sense strand
uccaugggcuccacaaggu

SEQ ID NO: 1528217 - RNA, 19 nt, Homo sapiens
  misc_RNA (1)...(19): siRNA sense strand
agaaugagaaggaaaccau

SEQ ID NO: 1528218 - RNA, 19 nt, Homo sapiens
  misc_RNA (1)...(19): siRNA sense strand
ucaagaccaucgagaaccu

SEQ ID NO: 1528219 - RNA, 19 nt, Homo sapiens
  misc_RNA (1)...(19): siRNA sense strand
gagacuggagccaugacuu

SEQ ID NO: 1528220 - RNA, 19 nt, Homo sapiens
  misc_RNA (1)...(19): siRNA sense strand
ucagcaguguggccagugu

SEQ ID NO: 1528221 - RNA, 19 nt, Homo sapiens
  misc_RNA (1)...(19): siRNA sense strand
acgaccaccuggccuccua

SEQ ID NO: 1528222 - RNA, 19 nt, Homo sapiens
  misc_RNA (1)...(19): siRNA sense strand
gcagcuggaagcagagauc

SEQ ID NO: 1528223 - RNA, 19 nt, Homo sapiens
  misc_RNA (1)...(19): siRNA sense strand
agacuggagccaugacuuc

SEQ ID NO: 1528224 - RNA, 19 nt, Homo sapiens
  misc_RNA (1)...(19): siRNA sense strand
guuaggagccuggauacca

SEQ ID NO: 1528225 - RNA, 19 nt, Homo sapiens
  misc_RNA (1)...(19): siRNA sense strand
gcuggaagcagagaucaag

SEQ ID NO: 1528226 - RNA, 19 nt, Homo sapiens
  misc_RNA (1)...(19): siRNA sense strand
ugcuuaauuucgggucuua

SEQ ID NO: 1528227 - RNA, 19 nt, Homo sapiens
  misc_RNA (1)...(19): siRNA sense strand
gaagcagccucucgauaua

SEQ ID NO: 1528228 - RNA, 19 nt, Homo sapiens
  misc_RNA (1)...(19): siRNA sense strand
ggaagcagccucucgauau

SEQ ID NO: 1528229 - RNA, 19 nt, Homo sapiens
  misc_RNA (1)...(19): siRNA sense strand
gaucuguggugguacaauu

SEQ ID NO: 1528230 - RNA, 19 nt, Homo sapiens
  misc_RNA (1)...(19): siRNA sense strand
gauauaaccugacgaucuc

SEQ ID NO: 1528231 - RNA, 19 nt, Homo sapiens
  misc_RNA (1)...(19): siRNA sense strand
ucacagugcuuacaguugu

SEQ ID NO: 1528232 - RNA, 19 nt, Homo sapiens
  misc_RNA (1)...(19): siRNA sense strand
gagaagguaccaucaaugu

SEQ ID NO: 1528233 - RNA, 19 nt, Homo sapiens
  misc_RNA (1)...(19): siRNA sense strand
gccaggaucugugguggua

SEQ ID NO: 1528234 - RNA, 19 nt, Homo sapiens
  misc_RNA (1)...(19): siRNA sense strand
gccauugucuaucucauug

SEQ ID NO: 1528235 - RNA, 19 nt, Homo sapiens
  misc_RNA (1)...(19): siRNA sense strand
accaagagcugcagagaga

SEQ ID NO: 1528236 - RNA, 19 nt, Homo sapiens
  misc_RNA (1)...(19): siRNA sense strand
cugggccucuccaauauua

SEQ ID NO: 1528237 - RNA, 19 nt, Homo sapiens
  misc_RNA (1)...(19): siRNA sense strand
gugcccagcucuacugaga

SEQ ID NO: 1528238 - RNA, 19 nt, Homo sapiens
  misc_RNA (1)...(19): siRNA sense strand
ccacuucugccaacuugua

SEQ ID NO: 1528239 - RNA, 19 nt, Homo sapiens
  misc_RNA (1)...(19): siRNA sense strand
ccgagaagguaccaucaau

SEQ ID NO: 1528240 - RNA, 19 nt, Homo sapiens
  misc_RNA (1)...(19): siRNA sense strand
gaugugccauuuccuuucu

SEQ ID NO: 1528241 - RNA, 19 nt, Homo sapiens
  misc_RNA (1)...(19): siRNA sense strand
gcuggucuguguucugguu

SEQ ID NO: 1528242 - RNA, 19 nt, Homo sapiens
  misc_RNA (1)...(19): siRNA sense strand
gaucguagccccuaugaga

SEQ ID NO: 1528243 - RNA, 19 nt, Homo sapiens
  misc_RNA (1)...(19): siRNA sense strand
cgauauaaccugacgaucu

SEQ ID NO: 1528244 - RNA, 19 nt, Homo sapiens
  misc_RNA (1)...(19): siRNA sense strand
uuucugggccucuccaaua

SEQ ID NO: 1528245 - RNA, 19 nt, Homo sapiens
  misc_RNA (1)...(19): siRNA sense strand
gcccagcucuacugagaag

SEQ ID NO: 1528246 - RNA, 19 nt, Homo sapiens
  misc_RNA (1)...(19): siRNA sense strand
cacccagucuccuuucuuc

SEQ ID NO: 1528247 - RNA, 19 nt, Homo sapiens
  misc_RNA (1)...(19): siRNA sense strand
gcagcagccucucuuacac

SEQ ID NO: 1528248 - RNA, 19 nt, Homo sapiens
  misc_RNA (1)...(19): siRNA sense strand
cgugagugaugugccauuu

SEQ ID NO: 1528249 - RNA, 19 nt, Homo sapiens
  misc_RNA (1)...(19): siRNA sense strand
gcaccgacuacuaccaaga

SEQ ID NO: 1528250 - RNA, 19 nt, Homo sapiens
  misc_RNA (1)...(19): siRNA sense strand
cggaagcagccucucgaua

SEQ ID NO: 1528251 - RNA, 19 nt, Homo sapiens
  misc_RNA (1)...(19): siRNA sense strand
gagcugcagagagacauuu

SEQ ID NO: 1528252 - RNA, 19 nt, Homo sapiens
  misc_RNA (1)...(19): siRNA sense strand
gcacccagucuccuuucuu

SEQ ID NO: 1528253 - RNA, 19 nt, Homo sapiens
  misc_RNA (1)...(19): siRNA sense strand
gugaugugccauuuccuuu

SEQ ID NO: 1528254 - RNA, 19 nt, Homo sapiens
  misc_RNA (1)...(19): siRNA sense strand
gacgucagcgugagugaug

SEQ ID NO: 1528255 - RNA, 19 nt, Homo sapiens
  misc_RNA (1)...(19): siRNA sense strand
cagccucucuuacacaaac

SEQ ID NO: 1528256 - RNA, 19 nt, Homo sapiens
  misc_RNA (1)...(19): siRNA sense strand
ggccauugucuaucucauu

SEQ ID NO: 1528257 - RNA, 19 nt, Homo sapiens
  misc_RNA (1)...(19): siRNA sense strand
ggcagcagccucucuuaca

SEQ ID NO: 1528258 - RNA, 19 nt, Homo sapiens
  misc_RNA (1)...(19): siRNA sense strand
gacuucggcuacccagaga

SEQ ID NO: 1528259 - RNA, 19 nt, Homo sapiens
  misc_RNA (1)...(19): siRNA sense strand
ccacacccaugggcgcuau

SEQ ID NO: 1528260 - RNA, 19 nt, Homo sapiens
  misc_RNA (1)...(19): siRNA sense strand
gauaccuaccauccuauga

SEQ ID NO: 1528261 - RNA, 19 nt, Homo sapiens
  misc_RNA (1)...(19): siRNA sense strand
cgagaagguaccaucaaug

SEQ ID NO: 1528262 - RNA, 19 nt, Homo sapiens
  misc_RNA (1)...(19): siRNA sense strand
caggaucuguggugguaca

SEQ ID NO: 1528263 - RNA, 19 nt, Homo sapiens
  misc_RNA (1)...(19): siRNA sense strand
ccagcucuacugagaagaa

SEQ ID NO: 1528264 - RNA, 19 nt, Homo sapiens
  misc_RNA (1)...(19): siRNA sense strand
cagcaccgacuacuaccaa

SEQ ID NO: 1528265 - RNA, 19 nt, Homo sapiens
  misc_RNA (1)...(19): siRNA sense strand
ugagugaugugccauuucc

SEQ ID NO: 1528266 - RNA, 19 nt, Homo sapiens
  misc_RNA (1)...(19): siRNA sense strand
caagagcugcagagagaca

SEQ ID NO: 1528267 - RNA, 19 nt, Homo sapiens
  misc_RNA (1)...(19): siRNA sense strand
ccucuccaauauuaaguuc

SEQ ID NO: 1528268 - RNA, 19 nt, Homo sapiens
  misc_RNA (1)...(19): siRNA sense strand
ugguugcgcuggccauugu

SEQ ID NO: 1528269 - RNA, 19 nt, Homo sapiens
  misc_RNA (1)...(19): siRNA sense strand
acgggcagcuggacaucuu

SEQ ID NO: 1528270 - RNA, 19 nt, Homo sapiens
  misc_RNA (1)...(19): siRNA sense strand
aagcagccucucgauauaa

SEQ ID NO: 1528271 - RNA, 19 nt, Homo sapiens
  misc_RNA (1)...(19): siRNA sense strand
cagcucuacugagaagaau

SEQ ID NO: 1528272 - RNA, 19 nt, Homo sapiens
  misc_RNA (1)...(19): siRNA sense strand
gaagcagccucucgauaua

SEQ ID NO: 1528273 - RNA, 19 nt, Homo sapiens
  misc_RNA (1)...(19): siRNA sense strand
ggaagcagccucucgauau

SEQ ID NO: 1528274 - RNA, 19 nt, Homo sapiens
  misc_RNA (1)...(19): siRNA sense strand
gaucuguggugguacaauu

SEQ ID NO: 1528275 - RNA, 19 nt, Homo sapiens
  misc_RNA (1)...(19): siRNA sense strand
gauauaaccugacgaucuc

SEQ ID NO: 1528276 - RNA, 19 nt, Homo sapiens
  misc_RNA (1)...(19): siRNA sense strand
ucacagugcuuacaguugu

SEQ ID NO: 1528277 - RNA, 19 nt, Homo sapiens
  misc_RNA (1)...(19): siRNA sense strand
gagaagguaccaucaaugu

SEQ ID NO: 1528278 - RNA, 19 nt, Homo sapiens
  misc_RNA (1)...(19): siRNA sense strand
gccaggaucugugguggua

SEQ ID NO: 1528279 - RNA, 19 nt, Homo sapiens
  misc_RNA (1)...(19): siRNA sense strand
gccauugucuaucucauug

SEQ ID NO: 1528280 - RNA, 19 nt, Homo sapiens
  misc_RNA (1)...(19): siRNA sense strand
accaagagcugcagagaga

SEQ ID NO: 1528281 - RNA, 19 nt, Homo sapiens
  misc_RNA (1)...(19): siRNA sense strand
cugggccucuccaauauua

SEQ ID NO: 1528282 - RNA, 19 nt, Homo sapiens
  misc_RNA (1)...(19): siRNA sense strand
gugcccagcucuacugaga

SEQ ID NO: 1528283 - RNA, 19 nt, Homo sapiens
  misc_RNA (1)...(19): siRNA sense strand
ccacuucugccaacuugua

SEQ ID NO: 1528284 - RNA, 19 nt, Homo sapiens
  misc_RNA (1)...(19): siRNA sense strand
ccgagaagguaccaucaau

SEQ ID NO: 1528285 - RNA, 19 nt, Homo sapiens
  misc_RNA (1)...(19): siRNA sense strand
gaugugccauuuccuuucu

SEQ ID NO: 1528286 - RNA, 19 nt, Homo sapiens
  misc_RNA (1)...(19): siRNA sense strand
gcuggucuguguucugguu

SEQ ID NO: 1528287 - RNA, 19 nt, Homo sapiens
  misc_RNA (1)...(19): siRNA sense strand
gaucguagccccuaugaga

SEQ ID NO: 1528288 - RNA, 19 nt, Homo sapiens
  misc_RNA (1)...(19): siRNA sense strand
cgauauaaccugacgaucu

SEQ ID NO: 1528289 - RNA, 19 nt, Homo sapiens
  misc_RNA (1)...(19): siRNA sense strand
uuucugggccucuccaaua

SEQ ID NO: 1528290 - RNA, 19 nt, Homo sapiens
  misc_RNA (1)...(19): siRNA sense strand
gcccagcucuacugagaag

SEQ ID NO: 1528291 - RNA, 19 nt, Homo sapiens
  misc_RNA (1)...(19): siRNA sense strand
cacccagucuccuuucuuc

SEQ ID NO: 1528292 - RNA, 19 nt, Homo sapiens
  misc_RNA (1)...(19): siRNA sense strand
gcagcagccucucuuacac

SEQ ID NO: 1528293 - RNA, 19 nt, Homo sapiens
  misc_RNA (1)...(19): siRNA sense strand
cgugagugaugugccauuu

SEQ ID NO: 1528294 - RNA, 19 nt, Homo sapiens
  misc_RNA (1)...(19): siRNA sense strand
gcaccgacuacuaccaaga

SEQ ID NO: 1528295 - RNA, 19 nt, Homo sapiens
  misc_RNA (1)...(19): siRNA sense strand
cggaagcagccucucgaua

SEQ ID NO: 1528296 - RNA, 19 nt, Homo sapiens
  misc_RNA (1)...(19): siRNA sense strand
gagcugcagagagacauuu

SEQ ID NO: 1528297 - RNA, 19 nt, Homo sapiens
  misc_RNA (1)...(19): siRNA sense strand
gcacccagucuccuuucuu

SEQ ID NO: 1528298 - RNA, 19 nt, Homo sapiens
  misc_RNA (1)...(19): siRNA sense strand
gugaugugccauuuccuuu

SEQ ID NO: 1528299 - RNA, 19 nt, Homo sapiens
  misc_RNA (1)...(19): siRNA sense strand
gacgucagcgugagugaug

SEQ ID NO: 1528300 - RNA, 19 nt, Homo sapiens
  misc_RNA (1)...(19): siRNA sense strand
cagccucucuuacacaaac

SEQ ID NO: 1528301 - RNA, 19 nt, Homo sapiens
  misc_RNA (1)...(19): siRNA sense strand
ggccauugucuaucucauu

SEQ ID NO: 1528302 - RNA, 19 nt, Homo sapiens
  misc_RNA (1)...(19): siRNA sense strand
ggcagcagccucucuuaca

SEQ ID NO: 1528303 - RNA, 19 nt, Homo sapiens
  misc_RNA (1)...(19): siRNA sense strand
gacuucggcuacccagaga

SEQ ID NO: 1528304 - RNA, 19 nt, Homo sapiens
  misc_RNA (1)...(19): siRNA sense strand
ccacacccaugggcgcuau

SEQ ID NO: 1528305 - RNA, 19 nt, Homo sapiens
  misc_RNA (1)...(19): siRNA sense strand
gauaccuaccauccuauga

SEQ ID NO: 1528306 - RNA, 19 nt, Homo sapiens
  misc_RNA (1)...(19): siRNA sense strand
cgagaagguaccaucaaug

SEQ ID NO: 1528307 - RNA, 19 nt, Homo sapiens
  misc_RNA (1)...(19): siRNA sense strand
caggaucuguggugguaca

SEQ ID NO: 1528308 - RNA, 19 nt, Homo sapiens
  misc_RNA (1)...(19): siRNA sense strand
ccagcucuacugagaagaa

SEQ ID NO: 1528309 - RNA, 19 nt, Homo sapiens
  misc_RNA (1)...(19): siRNA sense strand
cagcaccgacuacuaccaa

SEQ ID NO: 1528310 - RNA, 19 nt, Homo sapiens
  misc_RNA (1)...(19): siRNA sense strand
ugagugaugugccauuucc

SEQ ID NO: 1528311 - RNA, 19 nt, Homo sapiens
  misc_RNA (1)...(19): siRNA sense strand
caagagcugcagagagaca

SEQ ID NO: 1528312 - RNA, 19 nt, Homo sapiens
  misc_RNA (1)...(19): siRNA sense strand
ccucuccaauauuaaguuc

SEQ ID NO: 1528313 - RNA, 19 nt, Homo sapiens
  misc_RNA (1)...(19): siRNA sense strand
ugguugcgcuggccauugu

SEQ ID NO: 1528314 - RNA, 19 nt, Homo sapiens
  misc_RNA (1)...(19): siRNA sense strand
acgggcagcuggacaucuu

SEQ ID NO: 1528315 - RNA, 19 nt, Homo sapiens
  misc_RNA (1)...(19): siRNA sense strand
aagcagccucucgauauaa

SEQ ID NO: 1528316 - RNA, 19 nt, Homo sapiens
  misc_RNA (1)...(19): siRNA sense strand
cagcucuacugagaagaau

SEQ ID NO: 1528317 - RNA, 19 nt, Homo sapiens
  misc_RNA (1)...(19): siRNA sense strand
gcacacaccuucuuuguag

SEQ ID NO: 1528318 - RNA, 19 nt, Homo sapiens
  misc_RNA (1)...(19): siRNA sense strand
gggaggacauggcuaagua

SEQ ID NO: 1528319 - RNA, 19 nt, Homo sapiens
  misc_RNA (1)...(19): siRNA sense strand
ggacauggcuaaguacaga

SEQ ID NO: 1528320 - RNA, 19 nt, Homo sapiens
  misc_RNA (1)...(19): siRNA sense strand
gaagaggccuugggaccau

SEQ ID NO: 1528321 - RNA, 19 nt, Homo sapiens
  misc_RNA (1)...(19): siRNA sense strand
ggaggaagaggaagaggaa

SEQ ID NO: 1528322 - RNA, 19 nt, Homo sapiens
  misc_RNA (1)...(19): siRNA sense strand
gagcugccgugcugacugu

SEQ ID NO: 1528323 - RNA, 19 nt, Homo sapiens
  misc_RNA (1)...(19): siRNA sense strand
gagggccuauuaccaguug

SEQ ID NO: 1528324 - RNA, 19 nt, Homo sapiens
  misc_RNA (1)...(19): siRNA sense strand
ccaaagcccuugaccuacu

SEQ ID NO: 1528325 - RNA, 19 nt, Homo sapiens
  misc_RNA (1)...(19): siRNA sense strand
cagagaggaucaagagaag

SEQ ID NO: 1528326 - RNA, 19 nt, Homo sapiens
  misc_RNA (1)...(19): siRNA sense strand
ggaagaggaagaggaagaa

SEQ ID NO: 1528327 - RNA, 19 nt, Homo sapiens
  misc_RNA (1)...(19): siRNA sense strand
ccuauuaccaguugaagaa

SEQ ID NO: 1528328 - RNA, 19 nt, Homo sapiens
  misc_RNA (1)...(19): siRNA sense strand
ucagagaggaucaagagaa

SEQ ID NO: 1528329 - RNA, 19 nt, Homo sapiens
  misc_RNA (1)...(19): siRNA sense strand
ugaguguccugcucuucua

SEQ ID NO: 1528330 - RNA, 19 nt, Homo sapiens
  misc_RNA (1)...(19): siRNA sense strand
gcucagagaggaucaagag

SEQ ID NO: 1528331 - RNA, 19 nt, Homo sapiens
  misc_RNA (1)...(19): siRNA sense strand
ggaggaggaggaagaggaa

SEQ ID NO: 1528332 - RNA, 19 nt, Homo sapiens
  misc_RNA (1)...(19): siRNA sense strand
ggacauccagcgcuucauc

SEQ ID NO: 1528333 - RNA, 19 nt, Homo sapiens
  misc_RNA (1)...(19): siRNA sense strand
gucgggagcccuacaacua

SEQ ID NO: 1528334 - RNA, 19 nt, Homo sapiens
  misc_RNA (1)...(19): siRNA sense strand
gcuaaguacagacgaaugu

SEQ ID NO: 1528335 - RNA, 19 nt, Homo sapiens
  misc_RNA (1)...(19): siRNA sense strand
gaagaggaagaggaagaaa

SEQ ID NO: 1528336 - RNA, 19 nt, Homo sapiens
  misc_RNA (1)...(19): siRNA sense strand
cagcugaggcggcuacaug

SEQ ID NO: 1528337 - RNA, 19 nt, Homo sapiens
  misc_RNA (1)...(19): siRNA sense strand
agacgaaugucgggaguuc

SEQ ID NO: 1528338 - RNA, 19 nt, Homo sapiens
  misc_RNA (1)...(19): siRNA sense strand
agccaaagcccuugaccua

SEQ ID NO: 1528339 - RNA, 19 nt, Homo sapiens
  misc_RNA (1)...(19): siRNA sense strand
cagcuccggugucgagaau

SEQ ID NO: 1528340 - RNA, 19 nt, Homo sapiens
  misc_RNA (1)...(19): siRNA sense strand
caaagcccuugaccuacug

SEQ ID NO: 1528341 - RNA, 19 nt, Homo sapiens
  misc_RNA (1)...(19): siRNA sense strand
gagaggaucaagagaagag

SEQ ID NO: 1528342 - RNA, 19 nt, Homo sapiens
  misc_RNA (1)...(19): siRNA sense strand
gcagcacacaccuucuuug

SEQ ID NO: 1528343 - RNA, 19 nt, Homo sapiens
  misc_RNA (1)...(19): siRNA sense strand
cagcacacaccuucuuugu

SEQ ID NO: 1528344 - RNA, 19 nt, Homo sapiens
  misc_RNA (1)...(19): siRNA sense strand
uagaaaauguccugagugu

SEQ ID NO: 1528345 - RNA, 19 nt, Homo sapiens
  misc_RNA (1)...(19): siRNA sense strand
gaggacauccagcgcuuca

SEQ ID NO: 1528346 - RNA, 19 nt, Homo sapiens
  misc_RNA (1)...(19): siRNA sense strand
ccgcagcgccauagaagga

SEQ ID NO: 1528347 - RNA, 19 nt, Homo sapiens
  misc_RNA (1)...(19): siRNA sense strand
gcagcuggcuaaggaugca

SEQ ID NO: 1528348 - RNA, 19 nt, Homo sapiens
  misc_RNA (1)...(19): siRNA sense strand
ccugaggcacuuagagaaa

SEQ ID NO: 1528349 - RNA, 19 nt, Homo sapiens
  misc_RNA (1)...(19): siRNA sense strand
gcucaggugggcaaucugu

SEQ ID NO: 1528350 - RNA, 19 nt, Homo sapiens
  misc_RNA (1)...(19): siRNA sense strand
gcaaucugucccaggcuau

SEQ ID NO: 1528351 - RNA, 19 nt, Homo sapiens
  misc_RNA (1)...(19): siRNA sense strand
ggcagcacacaccuucuuu

SEQ ID NO: 1528352 - RNA, 19 nt, Homo sapiens
  misc_RNA (1)...(19): siRNA sense strand
caaucugucccaggcuaua

SEQ ID NO: 1528353 - RNA, 19 nt, Homo sapiens
  misc_RNA (1)...(19): siRNA sense strand
gcggacuccucuaccucaa

SEQ ID NO: 1528354 - RNA, 19 nt, Homo sapiens
  misc_RNA (1)...(19): siRNA sense strand
acacuggccuggagcuacu

SEQ ID NO: 1528355 - RNA, 19 nt, Homo sapiens
  misc_RNA (1)...(19): siRNA sense strand
caccagaggguccaagaca

SEQ ID NO: 1528356 - RNA, 19 nt, Homo sapiens
  misc_RNA (1)...(19): siRNA sense strand
cacaggaggaggaggaaga

SEQ ID NO: 1528357 - RNA, 19 nt, Homo sapiens
  misc_RNA (1)...(19): siRNA sense strand
uccucuaccucaacgauga

SEQ ID NO: 1528358 - RNA, 19 nt, Homo sapiens
  misc_RNA (1)...(19): siRNA sense strand
gcagaugcgggaggacaug

SEQ ID NO: 1528359 - RNA, 19 nt, Homo sapiens
  misc_RNA (1)...(19): siRNA sense strand
ccagaggguccaagacaag

SEQ ID NO: 1528360 - RNA, 19 nt, Homo sapiens
  misc_RNA (1)...(19): siRNA sense strand
gcagucagggugcuaagcu

SEQ ID NO: 1528361 - RNA, 19 nt, Homo sapiens
  misc_RNA (1)...(19): siRNA sense strand
ccauagaaggagagcaaga

SEQ ID NO: 1528362 - RNA, 19 nt, Homo sapiens
  misc_RNA (1)...(19): siRNA sense strand
caagaaggaugaagaaaga

SEQ ID NO: 1528363 - RNA, 19 nt, Homo sapiens
  misc_RNA (1)...(19): siRNA sense strand
gaagaaggacucacagaaa

SEQ ID NO: 1528364 - RNA, 19 nt, Homo sapiens
  misc_RNA (1)...(19): siRNA sense strand
gaaagacccugggcaucaa

SEQ ID NO: 1528365 - RNA, 19 nt, Homo sapiens
  misc_RNA (1)...(19): siRNA sense strand
gaaagaagaaggacucaca

SEQ ID NO: 1528366 - RNA, 19 nt, Homo sapiens
  misc_RNA (1)...(19): siRNA sense strand
ggaaagacccugggcauca

SEQ ID NO: 1528367 - RNA, 19 nt, Homo sapiens
  misc_RNA (1)...(19): siRNA sense strand
gaauccacguuaucaaugu

SEQ ID NO: 1528368 - RNA, 19 nt, Homo sapiens
  misc_RNA (1)...(19): siRNA sense strand
gcaagaaggaugaagaaag

SEQ ID NO: 1528369 - RNA, 19 nt, Homo sapiens
  misc_RNA (1)...(19): siRNA sense strand
gggcaucaaggcagaauaa

SEQ ID NO: 1528370 - RNA, 19 nt, Homo sapiens
  misc_RNA (1)...(19): siRNA sense strand
cuagagaacuggaaugcau

SEQ ID NO: 1528371 - RNA, 19 nt, Homo sapiens
  misc_RNA (1)...(19): siRNA sense strand
gcaagccuaugaugaggau

SEQ ID NO: 1528372 - RNA, 19 nt, Homo sapiens
  misc_RNA (1)...(19): siRNA sense strand
gaaggaugaagaaagaaga

SEQ ID NO: 1528373 - RNA, 19 nt, Homo sapiens
  misc_RNA (1)...(19): siRNA sense strand
gcugucagaauccacguua

SEQ ID NO: 1528374 - RNA, 19 nt, Homo sapiens
  misc_RNA (1)...(19): siRNA sense strand
cccagaacccacacacuua

SEQ ID NO: 1528375 - RNA, 19 nt, Homo sapiens
  misc_RNA (1)...(19): siRNA sense strand
gaugaagaaagaagaagga

SEQ ID NO: 1528376 - RNA, 19 nt, Homo sapiens
  misc_RNA (1)...(19): siRNA sense strand
cagagacuguccaacugaa

SEQ ID NO: 1528377 - RNA, 19 nt, Homo sapiens
  misc_RNA (1)...(19): siRNA sense strand
gaacccacacacuuacaug

SEQ ID NO: 1528378 - RNA, 19 nt, Homo sapiens
  misc_RNA (1)...(19): siRNA sense strand
gaugcaagaaggaugaaga

SEQ ID NO: 1528379 - RNA, 19 nt, Homo sapiens
  misc_RNA (1)...(19): siRNA sense strand
agaagaaggacucacagaa

SEQ ID NO: 1528380 - RNA, 19 nt, Homo sapiens
  misc_RNA (1)...(19): siRNA sense strand
cagaauccacguuaucaau

SEQ ID NO: 1528381 - RNA, 19 nt, Homo sapiens
  misc_RNA (1)...(19): siRNA sense strand
ugaggaugcucccuacagu

SEQ ID NO: 1528382 - RNA, 19 nt, Homo sapiens
  misc_RNA (1)...(19): siRNA sense strand
aagaaggacucacagaaaa

SEQ ID NO: 1528383 - RNA, 19 nt, Homo sapiens
  misc_RNA (1)...(19): siRNA sense strand
ccagagacuguccaacuga

SEQ ID NO: 1528384 - RNA, 19 nt, Homo sapiens
  misc_RNA (1)...(19): siRNA sense strand
uuccaagucuucuggcaaa

SEQ ID NO: 1528385 - RNA, 19 nt, Homo sapiens
  misc_RNA (1)...(19): siRNA sense strand
cggccuaugucaccuauac

SEQ ID NO: 1528386 - RNA, 19 nt, Homo sapiens
  misc_RNA (1)...(19): siRNA sense strand
gaggaugcucccuacaguu

SEQ ID NO: 1528387 - RNA, 19 nt, Homo sapiens
  misc_RNA (1)...(19): siRNA sense strand
gaaaagcaaaacuagagaa

SEQ ID NO: 1528388 - RNA, 19 nt, Homo sapiens
  misc_RNA (1)...(19): siRNA sense strand
gagaaaagcaaaacuagag

SEQ ID NO: 1528389 - RNA, 19 nt, Homo sapiens
  misc_RNA (1)...(19): siRNA sense strand
gggcgcuuauucgguauug

SEQ ID NO: 1528390 - RNA, 19 nt, Homo sapiens
  misc_RNA (1)...(19): siRNA sense strand
caagucuucuggcaaagcu

SEQ ID NO: 1528391 - RNA, 19 nt, Homo sapiens
  misc_RNA (1)...(19): siRNA sense strand
gcccgcaagccuaugauga

SEQ ID NO: 1528392 - RNA, 19 nt, Homo sapiens
  misc_RNA (1)...(19): siRNA sense strand
gcaucaaggcagaauaaac

SEQ ID NO: 1528393 - RNA, 19 nt, Homo sapiens
  misc_RNA (1)...(19): siRNA sense strand
caucaaggcagaauaaacc

SEQ ID NO: 1528394 - RNA, 19 nt, Homo sapiens
  misc_RNA (1)...(19): siRNA sense strand
agaauccacguuaucaaug

SEQ ID NO: 1528395 - RNA, 19 nt, Homo sapiens
  misc_RNA (1)...(19): siRNA sense strand
uccagagacuguccaacug

SEQ ID NO: 1528396 - RNA, 19 nt, Homo sapiens
  misc_RNA (1)...(19): siRNA sense strand
aagcaaaacuagagaacug

SEQ ID NO: 1528397 - RNA, 19 nt, Homo sapiens
  misc_RNA (1)...(19): siRNA sense strand
ucccagaacccacacacuu

SEQ ID NO: 1528398 - RNA, 19 nt, Homo sapiens
  misc_RNA (1)...(19): siRNA sense strand
ccucagagcuauaauguua

SEQ ID NO: 1528399 - RNA, 19 nt, Homo sapiens
  misc_RNA (1)...(19): siRNA sense strand
gaacaagccacauuugaua

SEQ ID NO: 1528400 - RNA, 19 nt, Homo sapiens
  misc_RNA (1)...(19): siRNA sense strand
gagcagauauggagggaua

SEQ ID NO: 1528401 - RNA, 19 nt, Homo sapiens
  misc_RNA (1)...(19): siRNA sense strand
gcacuuaaccuccguagaa

SEQ ID NO: 1528402 - RNA, 19 nt, Homo sapiens
  misc_RNA (1)...(19): siRNA sense strand
ggagaaguaugagaaguuu

SEQ ID NO: 1528403 - RNA, 19 nt, Homo sapiens
  misc_RNA (1)...(19): siRNA sense strand
ggaaagcugugacaagaag

SEQ ID NO: 1528404 - RNA, 19 nt, Homo sapiens
  misc_RNA (1)...(19): siRNA sense strand
gaaagauggucugcuguau

SEQ ID NO: 1528405 - RNA, 19 nt, Homo sapiens
  misc_RNA (1)...(19): siRNA sense strand
ugucagaggugaaaggaaa

SEQ ID NO: 1528406 - RNA, 19 nt, Homo sapiens
  misc_RNA (1)...(19): siRNA sense strand
aagauggucugcuguauga

SEQ ID NO: 1528407 - RNA, 19 nt, Homo sapiens
  misc_RNA (1)...(19): siRNA sense strand
gcagaccccuccacacuua

SEQ ID NO: 1528408 - RNA, 19 nt, Homo sapiens
  misc_RNA (1)...(19): siRNA sense strand
ggacaacaacucccucuuc

SEQ ID NO: 1528409 - RNA, 19 nt, Homo sapiens
  misc_RNA (1)...(19): siRNA sense strand
caagaagcauacagccauu

SEQ ID NO: 1528410 - RNA, 19 nt, Homo sapiens
  misc_RNA (1)...(19): siRNA sense strand
ggacagggugguauccuuu

SEQ ID NO: 1528411 - RNA, 19 nt, Homo sapiens
  misc_RNA (1)...(19): siRNA sense strand
ugaauaaccugucacaaaa

SEQ ID NO: 1528412 - RNA, 19 nt, Homo sapiens
  misc_RNA (1)...(19): siRNA sense strand
gaagaagaagguagagaug

SEQ ID NO: 1528413 - RNA, 19 nt, Homo sapiens
  misc_RNA (1)...(19): siRNA sense strand
aaacccaacuucagcauca

SEQ ID NO: 1528414 - RNA, 19 nt, Homo sapiens
  misc_RNA (1)...(19): siRNA sense strand
ggaggguuccgacugauuu

SEQ ID NO: 1528415 - RNA, 19 nt, Homo sapiens
  misc_RNA (1)...(19): siRNA sense strand
gaaguuggagcccaguaaa

SEQ ID NO: 1528416 - RNA, 19 nt, Homo sapiens
  misc_RNA (1)...(19): siRNA sense strand
aaacugaaacguaugagaa

SEQ ID NO: 1528417 - RNA, 19 nt, Homo sapiens
  misc_RNA (1)...(19): siRNA sense strand
ugacagcucuggcgagaag

SEQ ID NO: 1528418 - RNA, 19 nt, Homo sapiens
  misc_RNA (1)...(19): siRNA sense strand
gaggaggccagcucuguuu

SEQ ID NO: 1528419 - RNA, 19 nt, Homo sapiens
  misc_RNA (1)...(19): siRNA sense strand
caacagcgccugcuuugag

SEQ ID NO: 1528420 - RNA, 19 nt, Homo sapiens
  misc_RNA (1)...(19): siRNA sense strand
gcagaguccucagagcuau

SEQ ID NO: 1528421 - RNA, 19 nt, Homo sapiens
  misc_RNA (1)...(19): siRNA sense strand
ugaauucggagaaguauga

SEQ ID NO: 1528422 - RNA, 19 nt, Homo sapiens
  misc_RNA (1)...(19): siRNA sense strand
gggagaguccgaacacaaa

SEQ ID NO: 1528423 - RNA, 19 nt, Homo sapiens
  misc_RNA (1)...(19): siRNA sense strand
gauaaagaggugaaagaug

SEQ ID NO: 1528424 - RNA, 19 nt, Homo sapiens
  misc_RNA (1)...(19): siRNA sense strand
gauccugggcuuugacauu

SEQ ID NO: 1528425 - RNA, 19 nt, Homo sapiens
  misc_RNA (1)...(19): siRNA sense strand
gcuaaagagugacaugaac

SEQ ID NO: 1528426 - RNA, 19 nt, Homo sapiens
  misc_RNA (1)...(19): siRNA sense strand
agaaacaacagcagaaaga

SEQ ID NO: 1528427 - RNA, 19 nt, Homo sapiens
  misc_RNA (1)...(19): siRNA sense strand
ugaaagauggucugcugua

SEQ ID NO: 1528428 - RNA, 19 nt, Homo sapiens
  misc_RNA (1)...(19): siRNA sense strand
gcgagcaagugagaaagaa

SEQ ID NO: 1528429 - RNA, 19 nt, Homo sapiens
  misc_RNA (1)...(19): siRNA sense strand
acaacucccucuuccagaa

SEQ ID NO: 1528430 - RNA, 19 nt, Homo sapiens
  misc_RNA (1)...(19): siRNA sense strand
acaccugacuugcucuuga

SEQ ID NO: 1528431 - RNA, 19 nt, Homo sapiens
  misc_RNA (1)...(19): siRNA sense strand
cuggaaagcugugacaaga

SEQ ID NO: 1528432 - RNA, 19 nt, Homo sapiens
  misc_RNA (1)...(19): siRNA sense strand
acacuuaacccagaagaaa

SEQ ID NO: 1528433 - RNA, 19 nt, Homo sapiens
  misc_RNA (1)...(19): siRNA sense strand
gacuugcucuugaguguca

SEQ ID NO: 1528434 - RNA, 19 nt, Homo sapiens
  misc_RNA (1)...(19): siRNA sense strand
uauccgagcuacucaccaa

SEQ ID NO: 1528435 - RNA, 19 nt, Homo sapiens
  misc_RNA (1)...(19): siRNA sense strand
gacaugaacaagccacauu

SEQ ID NO: 1528436 - RNA, 19 nt, Homo sapiens
  misc_RNA (1)...(19): siRNA sense strand
caccuucagugcauacuug

SEQ ID NO: 1528437 - RNA, 19 nt, Homo sapiens
  misc_RNA (1)...(19): siRNA sense strand
gcuaugagggacccaugua

SEQ ID NO: 1528438 - RNA, 19 nt, Homo sapiens
  misc_RNA (1)...(19): siRNA sense strand
ggauaaagaggugaaagau

SEQ ID NO: 1528439 - RNA, 19 nt, Homo sapiens
  misc_RNA (1)...(19): siRNA sense strand
gacagggugguauccuuua

SEQ ID NO: 1528440 - RNA, 19 nt, Homo sapiens
  misc_RNA (1)...(19): siRNA sense strand
gaucugaggaauaucaauc

SEQ ID NO: 1528441 - RNA, 19 nt, Homo sapiens
  misc_RNA (1)...(19): siRNA sense strand
ugaaacguaugagaaggaa

SEQ ID NO: 1528442 - RNA, 19 nt, Homo sapiens
  misc_RNA (1)...(19): siRNA sense strand
augaauaaccugucacaaa

SEQ ID NO: 1528443 - RNA, 19 nt, Homo sapiens
  misc_RNA (1)...(19): siRNA sense strand
ggugguauccuuuaaaugc

SEQ ID NO: 1528444 - RNA, 19 nt, Homo sapiens
  misc_RNA (1)...(19): siRNA sense strand
agaagaagguagagaugca

SEQ ID NO: 1528445 - RNA, 19 nt, Homo sapiens
  misc_RNA (1)...(19): siRNA sense strand
gcuacaacguggagcagau

SEQ ID NO: 1528446 - RNA, 19 nt, Homo sapiens
  misc_RNA (1)...(19): siRNA sense strand
ugagggaccugcuggugau

SEQ ID NO: 1528447 - RNA, 19 nt, Homo sapiens
  misc_RNA (1)...(19): siRNA sense strand
gaggguuccgacugauuua

SEQ ID NO: 1528448 - RNA, 19 nt, Homo sapiens
  misc_RNA (1)...(19): siRNA sense strand
uaaagagugacaugaacaa

SEQ ID NO: 1528449 - RNA, 19 nt, Homo sapiens
  misc_RNA (1)...(19): siRNA sense strand
acagggugguauccuuuaa

SEQ ID NO: 1528450 - RNA, 19 nt, Homo sapiens
  misc_RNA (1)...(19): siRNA sense strand
uacccgaucugaggaauau

SEQ ID NO: 1528451 - RNA, 19 nt, Homo sapiens
  misc_RNA (1)...(19): siRNA sense strand
ggaggaggccagcucuguu

SEQ ID NO: 1528452 - RNA, 19 nt, Homo sapiens
  misc_RNA (1)...(19): siRNA sense strand
ggaaucggcaggcgagcaa

SEQ ID NO: 1528453 - RNA, 19 nt, Homo sapiens
  misc_RNA (1)...(19): siRNA sense strand
uccaggagcugagacuaaa

SEQ ID NO: 1528454 - RNA, 19 nt, Homo sapiens
  misc_RNA (1)...(19): siRNA sense strand
ccucugcagugaacguauu

SEQ ID NO: 1528455 - RNA, 19 nt, Homo sapiens
  misc_RNA (1)...(19): siRNA sense strand
ugaagaagaagguagagau

SEQ ID NO: 1528456 - RNA, 19 nt, Homo sapiens
  misc_RNA (1)...(19): siRNA sense strand
cgaaguuggagcccaguaa

SEQ ID NO: 1528457 - RNA, 19 nt, Homo sapiens
  misc_RNA (1)...(19): siRNA sense strand
aacaguacauccagccauu

SEQ ID NO: 1528458 - RNA, 19 nt, Homo sapiens
  misc_RNA (1)...(19): siRNA sense strand
ggagaugaggauugaggaa

SEQ ID NO: 1528459 - RNA, 19 nt, Homo sapiens
  misc_RNA (1)...(19): siRNA sense strand
ugaacaagccacauuugau

SEQ ID NO: 1528460 - RNA, 19 nt, Homo sapiens
  misc_RNA (1)...(19): siRNA sense strand
gaggacgucaucaucaaga

SEQ ID NO: 1528461 - RNA, 19 nt, Homo sapiens
  misc_RNA (1)...(19): siRNA sense strand
cacuuaaccuccguagaaa

SEQ ID NO: 1528462 - RNA, 19 nt, Homo sapiens
  misc_RNA (1)...(19): siRNA sense strand
ggguagcaguacuaaggaa

SEQ ID NO: 1528463 - RNA, 19 nt, Homo sapiens
  misc_RNA (1)...(19): siRNA sense strand
uguggaggguuccgacuga

SEQ ID NO: 1528464 - RNA, 19 nt, Homo sapiens
  misc_RNA (1)...(19): siRNA sense strand
ucugcuguaugacaccuua

SEQ ID NO: 1528465 - RNA, 19 nt, Homo sapiens
  misc_RNA (1)...(19): siRNA sense strand
guacauccagccauugaca

SEQ ID NO: 1528466 - RNA, 19 nt, Homo sapiens
  misc_RNA (1)...(19): siRNA sense strand
auacagccauugccugauc

SEQ ID NO: 1528467 - RNA, 19 nt, Homo sapiens
  misc_RNA (1)...(19): siRNA sense strand
ccacccaacucucaaucuc

SEQ ID NO: 1528468 - RNA, 19 nt, Homo sapiens
  misc_RNA (1)...(19): siRNA sense strand
cauccagccauugacauua

SEQ ID NO: 1528469 - RNA, 19 nt, Homo sapiens
  misc_RNA (1)...(19): siRNA sense strand
gacauuaguauccuacaca

SEQ ID NO: 1528470 - RNA, 19 nt, Homo sapiens
  misc_RNA (1)...(19): siRNA sense strand
ccaaaugaagaagaaggua

SEQ ID NO: 1528471 - RNA, 19 nt, Homo sapiens
  misc_RNA (1)...(19): siRNA sense strand
ggaugaauaaccugucaca

SEQ ID NO: 1528472 - RNA, 19 nt, Homo sapiens
  misc_RNA (1)...(19): siRNA sense strand
ucaguucucuacccgaucu

SEQ ID NO: 1528473 - RNA, 19 nt, Homo sapiens
  misc_RNA (1)...(19): siRNA sense strand
cuacaacguggagcagaua

SEQ ID NO: 1528474 - RNA, 19 nt, Homo sapiens
  misc_RNA (1)...(19): siRNA sense strand
agaagaggcagcuggaugu

SEQ ID NO: 1528475 - RNA, 19 nt, Homo sapiens
  misc_RNA (1)...(19): siRNA sense strand
cggagaaguaugagaaguu

SEQ ID NO: 1528476 - RNA, 19 nt, Homo sapiens
  misc_RNA (1)...(19): siRNA sense strand
aaagauggucugcuguaug

SEQ ID NO: 1528477 - RNA, 19 nt, Homo sapiens
  misc_RNA (1)...(19): siRNA sense strand
ucagagcuauaauguuacu

SEQ ID NO: 1528478 - RNA, 19 nt, Homo sapiens
  misc_RNA (1)...(19): siRNA sense strand
caugaacaagccacauuug

SEQ ID NO: 1528479 - RNA, 19 nt, Homo sapiens
  misc_RNA (1)...(19): siRNA sense strand
aaacaacagcagaaagaca

SEQ ID NO: 1528480 - RNA, 19 nt, Homo sapiens
  misc_RNA (1)...(19): siRNA sense strand
gggccgugcaguuaaagaa

SEQ ID NO: 1528481 - RNA, 19 nt, Homo sapiens
  misc_RNA (1)...(19): siRNA sense strand
aaaugaagaagaagguaga

SEQ ID NO: 1528482 - RNA, 19 nt, Homo sapiens
  misc_RNA (1)...(19): siRNA sense strand
gaggucaaccacucuccaa

SEQ ID NO: 1528483 - RNA, 19 nt, Homo sapiens
  misc_RNA (1)...(19): siRNA sense strand
ugccugaucucuggccaaa

SEQ ID NO: 1528484 - RNA, 19 nt, Homo sapiens
  misc_RNA (1)...(19): siRNA sense strand
acaugaacaagccacauuu

SEQ ID NO: 1528485 - RNA, 19 nt, Homo sapiens
  misc_RNA (1)...(19): siRNA sense strand
caacguggagcagauaugg

SEQ ID NO: 1528486 - RNA, 19 nt, Homo sapiens
  misc_RNA (1)...(19): siRNA sense strand
ccaguaaacccaacuucag

SEQ ID NO: 1528487 - RNA, 19 nt, Homo sapiens
  misc_RNA (1)...(19): siRNA sense strand
auccugggcuuugacauuu

SEQ ID NO: 1528488 - RNA, 19 nt, Homo sapiens
  misc_RNA (1)...(19): siRNA sense strand
gcugugacaagaagaaagu

SEQ ID NO: 1528489 - RNA, 19 nt, Homo sapiens
  misc_RNA (1)...(19): siRNA sense strand
gauggucugcuguaugaca

SEQ ID NO: 1528490 - RNA, 19 nt, Homo sapiens
  misc_RNA (1)...(19): siRNA sense strand
uggauaaagaggugaaaga

SEQ ID NO: 1528491 - RNA, 19 nt, Homo sapiens
  misc_RNA (1)...(19): siRNA sense strand
acucucgguuggauaaaga

SEQ ID NO: 1528492 - RNA, 19 nt, Homo sapiens
  misc_RNA (1)...(19): siRNA sense strand
uaugcaggaucaagaagca

SEQ ID NO: 1528493 - RNA, 19 nt, Homo sapiens
  misc_RNA (1)...(19): siRNA sense strand
gaagaggcagcuggaugug

SEQ ID NO: 1528494 - RNA, 19 nt, Homo sapiens
  misc_RNA (1)...(19): siRNA sense strand
caccaagcuucaacugagu

SEQ ID NO: 1528495 - RNA, 19 nt, Homo sapiens
  misc_RNA (1)...(19): siRNA sense strand
agggugguauccuuuaaau

SEQ ID NO: 1528496 - RNA, 19 nt, Homo sapiens
  misc_RNA (1)...(19): siRNA sense strand
caguacauccagccauuga

SEQ ID NO: 1528497 - RNA, 19 nt, Homo sapiens
  misc_RNA (1)...(19): siRNA sense strand
ggacccauguaugcaggau

SEQ ID NO: 1528498 - RNA, 19 nt, Homo sapiens
  misc_RNA (1)...(19): siRNA sense strand
uuucagagguggcucauuu

SEQ ID NO: 1528499 - RNA, 19 nt, Homo sapiens
  misc_RNA (1)...(19): siRNA sense strand
gccaugagcucgcgaucaa

SEQ ID NO: 1528500 - RNA, 19 nt, Homo sapiens
  misc_RNA (1)...(19): siRNA sense strand
ucaccaaagguaucaauaa

SEQ ID NO: 1528501 - RNA, 19 nt, Homo sapiens
  misc_RNA (1)...(19): siRNA sense strand
caagaaugaagccgaguuu

SEQ ID NO: 1528502 - RNA, 19 nt, Homo sapiens
  misc_RNA (1)...(19): siRNA sense strand
caccaaagguaucaauaag

SEQ ID NO: 1528503 - RNA, 19 nt, Homo sapiens
  misc_RNA (1)...(19): siRNA sense strand
gacaauuccuucugaugca

SEQ ID NO: 1528504 - RNA, 19 nt, Homo sapiens
  misc_RNA (1)...(19): siRNA sense strand
caugagcucgcgaucaauu

SEQ ID NO: 1528505 - RNA, 19 nt, Homo sapiens
  misc_RNA (1)...(19): siRNA sense strand
cugggacaauuccuucuga

SEQ ID NO: 1528506 - RNA, 19 nt, Homo sapiens
  misc_RNA (1)...(19): siRNA sense strand
gggacaauuccuucugaug

SEQ ID NO: 1528507 - RNA, 19 nt, Homo sapiens
  misc_RNA (1)...(19): siRNA sense strand
ggucaccaaagguaucaau

SEQ ID NO: 1528508 - RNA, 19 nt, Homo sapiens
  misc_RNA (1)...(19): siRNA sense strand
gguggcucauuugcuguuu

SEQ ID NO: 1528509 - RNA, 19 nt, Homo sapiens
  misc_RNA (1)...(19): siRNA sense strand
ugagcucgcgaucaauuug

SEQ ID NO: 1528510 - RNA, 19 nt, Homo sapiens
  misc_RNA (1)...(19): siRNA sense strand
gaacugggcacauucuuga

SEQ ID NO: 1528511 - RNA, 19 nt, Homo sapiens
  misc_RNA (1)...(19): siRNA sense strand
gcccugagcuccugcaaag

SEQ ID NO: 1528512 - RNA, 19 nt, Homo sapiens
  misc_RNA (1)...(19): siRNA sense strand
gugaugcucugauccgauu

SEQ ID NO: 1528513 - RNA, 19 nt, Homo sapiens
  misc_RNA (1)...(19): siRNA sense strand
gaucugcccucgcgccaau

SEQ ID NO: 1528514 - RNA, 19 nt, Homo sapiens
  misc_RNA (1)...(19): siRNA sense strand
ggccacagcugaggcacua

SEQ ID NO: 1528515 - RNA, 19 nt, Homo sapiens
  misc_RNA (1)...(19): siRNA sense strand
ugucagaacugggcacauu

SEQ ID NO: 1528516 - RNA, 19 nt, Homo sapiens
  misc_RNA (1)...(19): siRNA sense strand
caacauuuguggccaacau

SEQ ID NO: 1528517 - RNA, 19 nt, Homo sapiens
  misc_RNA (1)...(19): siRNA sense strand
agucagugaugcagucaua

SEQ ID NO: 1528518 - RNA, 19 nt, Homo sapiens
  misc_RNA (1)...(19): siRNA sense strand
uugaggagcuucagugaug

SEQ ID NO: 1528519 - RNA, 19 nt, Homo sapiens
  misc_RNA (1)...(19): siRNA sense strand
gggcaugucccaggccuua

SEQ ID NO: 1528520 - RNA, 19 nt, Homo sapiens
  misc_RNA (1)...(19): siRNA sense strand
ggacucagcagccaaggau

SEQ ID NO: 1528521 - RNA, 19 nt, Homo sapiens
  misc_RNA (1)...(19): siRNA sense strand
aagcugcgcuggacgaguu

SEQ ID NO: 1528522 - RNA, 19 nt, Homo sapiens
  misc_RNA (1)...(19): siRNA sense strand
gcagcuggaggcaacauuu

SEQ ID NO: 1528523 - RNA, 19 nt, Homo sapiens
  misc_RNA (1)...(19): siRNA sense strand
gguggagacuggacgaaca

SEQ ID NO: 1528524 - RNA, 19 nt, Homo sapiens
  misc_RNA (1)...(19): siRNA sense strand
ugagggagcugcuaaaccu

SEQ ID NO: 1528525 - RNA, 19 nt, Homo sapiens
  misc_RNA (1)...(19): siRNA sense strand
gcauggcacugucagaacu

SEQ ID NO: 1528526 - RNA, 19 nt, Homo sapiens
  misc_RNA (1)...(19): siRNA sense strand
guacaacgugguccagcua

SEQ ID NO: 1528527 - RNA, 19 nt, Homo sapiens
  misc_RNA (1)...(19): siRNA sense strand
gagcagcugcgagaggaua

SEQ ID NO: 1528528 - RNA, 19 nt, Homo sapiens
  misc_RNA (1)...(19): siRNA sense strand
gcacauucuugaggagcuu

SEQ ID NO: 1528529 - RNA, 19 nt, Homo sapiens
  misc_RNA (1)...(19): siRNA sense strand
ggaaucgcgccucaaguca

SEQ ID NO: 1528530 - RNA, 19 nt, Homo sapiens
  misc_RNA (1)...(19): siRNA sense strand
gcacugggcacugcaugug

SEQ ID NO: 1528531 - RNA, 19 nt, Homo sapiens
  misc_RNA (1)...(19): siRNA sense strand
gaucuaccgcuugguguug

SEQ ID NO: 1528532 - RNA, 19 nt, Homo sapiens
  misc_RNA (1)...(19): siRNA sense strand
gugccguggugcuccagua

SEQ ID NO: 1528533 - RNA, 19 nt, Homo sapiens
  misc_RNA (1)...(19): siRNA sense strand
guuugggccuggaggagaa

SEQ ID NO: 1528534 - RNA, 19 nt, Homo sapiens
  misc_RNA (1)...(19): siRNA sense strand
acugggcacugcaugugua

SEQ ID NO: 1528535 - RNA, 19 nt, Homo sapiens
  misc_RNA (1)...(19): siRNA sense strand
ggcuggaccuucuguucga

SEQ ID NO: 1528536 - RNA, 19 nt, Homo sapiens
  misc_RNA (1)...(19): siRNA sense strand
ggaucuaccgcuugguguu

SEQ ID NO: 1528537 - RNA, 19 nt, Homo sapiens
  misc_RNA (1)...(19): siRNA sense strand
gauccuggaagagaacauu

SEQ ID NO: 1528538 - RNA, 19 nt, Homo sapiens
  misc_RNA (1)...(19): siRNA sense strand
gaugcagucauaccuggaa

SEQ ID NO: 1528539 - RNA, 19 nt, Homo sapiens
  misc_RNA (1)...(19): siRNA sense strand
ccugagcuccugcaaagug

SEQ ID NO: 1528540 - RNA, 19 nt, Homo sapiens
  misc_RNA (1)...(19): siRNA sense strand
gcccacacgcugcauagug

SEQ ID NO: 1528541 - RNA, 19 nt, Homo sapiens
  misc_RNA (1)...(19): siRNA sense strand
caacgugguccagcuaugg

SEQ ID NO: 1528542 - RNA, 19 nt, Homo sapiens
  misc_RNA (1)...(19): siRNA sense strand
cagcuggaggcaacauuug

SEQ ID NO: 1528543 - RNA, 19 nt, Homo sapiens
  misc_RNA (1)...(19): siRNA sense strand
gauugauggccaacaguuc

SEQ ID NO: 1528544 - RNA, 19 nt, Homo sapiens
  misc_RNA (1)...(19): siRNA sense strand
ugcagauccuggaagagaa

SEQ ID NO: 1528545 - RNA, 19 nt, Homo sapiens
  misc_RNA (1)...(19): siRNA sense strand
gcaugucccaggccuuaca

SEQ ID NO: 1528546 - RNA, 19 nt, Homo sapiens
  misc_RNA (1)...(19): siRNA sense strand
cugcagauccuggaagaga

SEQ ID NO: 1528547 - RNA, 19 nt, Homo sapiens
  misc_RNA (1)...(19): siRNA sense strand
cucaguggcugcagaaugc

SEQ ID NO: 1528548 - RNA, 19 nt, Homo sapiens
  misc_RNA (1)...(19): siRNA sense strand
aaucgcgccucaagucagu

SEQ ID NO: 1528549 - RNA, 19 nt, Homo sapiens
  misc_RNA (1)...(19): siRNA sense strand
acaacgugguccagcuaug

SEQ ID NO: 1528550 - RNA, 19 nt, Homo sapiens
  misc_RNA (1)...(19): siRNA sense strand
uuacgugcccuaccuacug

SEQ ID NO: 1528551 - RNA, 19 nt, Homo sapiens
  misc_RNA (1)...(19): siRNA sense strand
gcaggaggcuugacuguaa

SEQ ID NO: 1528552 - RNA, 19 nt, Homo sapiens
  misc_RNA (1)...(19): siRNA sense strand
agucaucaauguacaguaa

SEQ ID NO: 1528553 - RNA, 19 nt, Homo sapiens
  misc_RNA (1)...(19): siRNA sense strand
gaaggcacucugucucuuu

SEQ ID NO: 1528554 - RNA, 19 nt, Homo sapiens
  misc_RNA (1)...(19): siRNA sense strand
gcagaaagcaucucaaucc

SEQ ID NO: 1528555 - RNA, 19 nt, Homo sapiens
  misc_RNA (1)...(19): siRNA sense strand
gcaggucccucccuuucug

SEQ ID NO: 1528556 - RNA, 19 nt, Homo sapiens
  misc_RNA (1)...(19): siRNA sense strand
gcaccgcgguagcagaaag

SEQ ID NO: 1528557 - RNA, 19 nt, Homo sapiens
  misc_RNA (1)...(19): siRNA sense strand
aaucuauaguuguggauga

SEQ ID NO: 1528558 - RNA, 19 nt, Homo sapiens
  misc_RNA (1)...(19): siRNA sense strand
agagugucuucaaggaaua

SEQ ID NO: 1528559 - RNA, 19 nt, Homo sapiens
  misc_RNA (1)...(19): siRNA sense strand
acgcgucaaucuauaguug

SEQ ID NO: 1528560 - RNA, 19 nt, Homo sapiens
  misc_RNA (1)...(19): siRNA sense strand
uagcagaaagcaucucaau

SEQ ID NO: 1528561 - RNA, 19 nt, Homo sapiens
  misc_RNA (1)...(19): siRNA sense strand
ugaaggcacucugucucuu

SEQ ID NO: 1528562 - RNA, 19 nt, Homo sapiens
  misc_RNA (1)...(19): siRNA sense strand
gcgucaaucuauaguugug

SEQ ID NO: 1528563 - RNA, 19 nt, Homo sapiens
  misc_RNA (1)...(19): siRNA sense strand
gacgagcccuccuuuaccu

SEQ ID NO: 1528564 - RNA, 19 nt, Homo sapiens
  misc_RNA (1)...(19): siRNA sense strand
gagaggucccggguucaaa

SEQ ID NO: 1528565 - RNA, 19 nt, Homo sapiens
  misc_RNA (1)...(19): siRNA sense strand
cagccugguuucgcuuuga

SEQ ID NO: 1528566 - RNA, 19 nt, Homo sapiens
  misc_RNA (1)...(19): siRNA sense strand
caggaacugucaaaacuug

SEQ ID NO: 1528567 - RNA, 19 nt, Homo sapiens
  misc_RNA (1)...(19): siRNA sense strand
gagcccaggaacugucaaa

SEQ ID NO: 1528568 - RNA, 19 nt, Homo sapiens
  misc_RNA (1)...(19): siRNA sense strand
agacccgccuggcauguca

SEQ ID NO: 1528569 - RNA, 19 nt, Homo sapiens
  misc_RNA (1)...(19): siRNA sense strand
cgagcccuccuuuaccuuu

SEQ ID NO: 1528570 - RNA, 19 nt, Homo sapiens
  misc_RNA (1)...(19): siRNA sense strand
aauguacaguaagcucuuu

SEQ ID NO: 1528571 - RNA, 19 nt, Homo sapiens
  misc_RNA (1)...(19): siRNA sense strand
gguagcagaaagcaucuca

SEQ ID NO: 1528572 - RNA, 19 nt, Homo sapiens
  misc_RNA (1)...(19): siRNA sense strand
ggacgagcccuccuuuacc

SEQ ID NO: 1528573 - RNA, 19 nt, Homo sapiens
  misc_RNA (1)...(19): siRNA sense strand
caauguacaguaagcucuu

SEQ ID NO: 1528574 - RNA, 19 nt, Homo sapiens
  misc_RNA (1)...(19): siRNA sense strand
gguagcggcuccuggaagu

SEQ ID NO: 1528575 - RNA, 19 nt, Homo sapiens
  misc_RNA (1)...(19): siRNA sense strand
gguagcggcuccuggaagu

SEQ ID NO: 1528576 - RNA, 19 nt, Homo sapiens
  misc_RNA (1)...(19): siRNA sense strand
agcaaugucugugcaggua

SEQ ID NO: 1528577 - RNA, 19 nt, Homo sapiens
  misc_RNA (1)...(19): siRNA sense strand
gaagaaaguuauggaagua

SEQ ID NO: 1528578 - RNA, 19 nt, Homo sapiens
  misc_RNA (1)...(19): siRNA sense strand
ugacacagcuuguuucaaa

SEQ ID NO: 1528579 - RNA, 19 nt, Homo sapiens
  misc_RNA (1)...(19): siRNA sense strand
gaaggaagcucagaaacuu

SEQ ID NO: 1528580 - RNA, 19 nt, Homo sapiens
  misc_RNA (1)...(19): siRNA sense strand
gaagauauaccaacauuug

SEQ ID NO: 1528581 - RNA, 19 nt, Homo sapiens
  misc_RNA (1)...(19): siRNA sense strand
ggauuaagcuggguacuuu

SEQ ID NO: 1528582 - RNA, 19 nt, Homo sapiens
  misc_RNA (1)...(19): siRNA sense strand
guacauggaucaaaccaaa

SEQ ID NO: 1528583 - RNA, 19 nt, Homo sapiens
  misc_RNA (1)...(19): siRNA sense strand
gcaaagaaguagacccaaa

SEQ ID NO: 1528584 - RNA, 19 nt, Homo sapiens
  misc_RNA (1)...(19): siRNA sense strand
gaaccaagccauucucaaa

SEQ ID NO: 1528585 - RNA, 19 nt, Homo sapiens
  misc_RNA (1)...(19): siRNA sense strand
gcaaguccaucuacaguga

SEQ ID NO: 1528586 - RNA, 19 nt, Homo sapiens
  misc_RNA (1)...(19): siRNA sense strand
guacagaguuucccuuuag

SEQ ID NO: 1528587 - RNA, 19 nt, Homo sapiens
  misc_RNA (1)...(19): siRNA sense strand
gaaaccaucuauuaccuau

SEQ ID NO: 1528588 - RNA, 19 nt, Homo sapiens
  misc_RNA (1)...(19): siRNA sense strand
gaaguagacccaaaugauu

SEQ ID NO: 1528589 - RNA, 19 nt, Homo sapiens
  misc_RNA (1)...(19): siRNA sense strand
aaugagagcucugauuaua

SEQ ID NO: 1528590 - RNA, 19 nt, Homo sapiens
  misc_RNA (1)...(19): siRNA sense strand
ucacaaagcugucugaaac

SEQ ID NO: 1528591 - RNA, 19 nt, Homo sapiens
  misc_RNA (1)...(19): siRNA sense strand
ugacagauauccaacaaau

SEQ ID NO: 1528592 - RNA, 19 nt, Homo sapiens
  misc_RNA (1)...(19): siRNA sense strand
ucugagagcuuuaguucua

SEQ ID NO: 1528593 - RNA, 19 nt, Homo sapiens
  misc_RNA (1)...(19): siRNA sense strand
aaagcugucugaaacaaua

SEQ ID NO: 1528594 - RNA, 19 nt, Homo sapiens
  misc_RNA (1)...(19): siRNA sense strand
cagaagauauaccaacauu

SEQ ID NO: 1528595 - RNA, 19 nt, Homo sapiens
  misc_RNA (1)...(19): siRNA sense strand
gaaguuaacaugucucuca

SEQ ID NO: 1528596 - RNA, 19 nt, Homo sapiens
  misc_RNA (1)...(19): siRNA sense strand
gaagaacagucuccagaag

SEQ ID NO: 1528597 - RNA, 19 nt, Homo sapiens
  misc_RNA (1)...(19): siRNA sense strand
agaaaucacuccaaucuca

SEQ ID NO: 1528598 - RNA, 19 nt, Homo sapiens
  misc_RNA (1)...(19): siRNA sense strand
cagaauacuucaagaauag

SEQ ID NO: 1528599 - RNA, 19 nt, Homo sapiens
  misc_RNA (1)...(19): siRNA sense strand
gaauggaagaagaaaguua

SEQ ID NO: 1528600 - RNA, 19 nt, Homo sapiens
  misc_RNA (1)...(19): siRNA sense strand
gaagagggcuuuaaaacga

SEQ ID NO: 1528601 - RNA, 19 nt, Homo sapiens
  misc_RNA (1)...(19): siRNA sense strand
uaaaugguguucaguuaga

SEQ ID NO: 1528602 - RNA, 19 nt, Homo sapiens
  misc_RNA (1)...(19): siRNA sense strand
ccaaagauccagaagauau

SEQ ID NO: 1528603 - RNA, 19 nt, Homo sapiens
  misc_RNA (1)...(19): siRNA sense strand
caaccacccuuacuacuuc

SEQ ID NO: 1528604 - RNA, 19 nt, Homo sapiens
  misc_RNA (1)...(19): siRNA sense strand
gccaggaacuauuugauga

SEQ ID NO: 1528605 - RNA, 19 nt, Homo sapiens
  misc_RNA (1)...(19): siRNA sense strand
caagagaguucuguugaga

SEQ ID NO: 1528606 - RNA, 19 nt, Homo sapiens
  misc_RNA (1)...(19): siRNA sense strand
gcacaucugcuauucuuau

SEQ ID NO: 1528607 - RNA, 19 nt, Homo sapiens
  misc_RNA (1)...(19): siRNA sense strand
gggcagcggugaacaggaa

SEQ ID NO: 1528608 - RNA, 19 nt, Homo sapiens
  misc_RNA (1)...(19): siRNA sense strand
gaagaagaaaguuauggaa

SEQ ID NO: 1528609 - RNA, 19 nt, Homo sapiens
  misc_RNA (1)...(19): siRNA sense strand
gcaugcaucuucuaaugga

SEQ ID NO: 1528610 - RNA, 19 nt, Homo sapiens
  misc_RNA (1)...(19): siRNA sense strand
caaagauccagaagauaua

SEQ ID NO: 1528611 - RNA, 19 nt, Homo sapiens
  misc_RNA (1)...(19): siRNA sense strand
caaaaggagucaguauuua

SEQ ID NO: 1528612 - RNA, 19 nt, Homo sapiens
  misc_RNA (1)...(19): siRNA sense strand
gaguuucccuuuagaugaa

SEQ ID NO: 1528613 - RNA, 19 nt, Homo sapiens
  misc_RNA (1)...(19): siRNA sense strand
gaaacugauugugauguug

SEQ ID NO: 1528614 - RNA, 19 nt, Homo sapiens
  misc_RNA (1)...(19): siRNA sense strand
gaucgauaaugaaacagaa

SEQ ID NO: 1528615 - RNA, 19 nt, Homo sapiens
  misc_RNA (1)...(19): siRNA sense strand
gaucuaggauaugcuaaug

SEQ ID NO: 1528616 - RNA, 19 nt, Homo sapiens
  misc_RNA (1)...(19): siRNA sense strand
ugagagcucugauuauaca

SEQ ID NO: 1528617 - RNA, 19 nt, Homo sapiens
  misc_RNA (1)...(19): siRNA sense strand
guauguaaccacugaagua

SEQ ID NO: 1528618 - RNA, 19 nt, Homo sapiens
  misc_RNA (1)...(19): siRNA sense strand
uaucugagucuguugaaua

SEQ ID NO: 1528619 - RNA, 19 nt, Homo sapiens
  misc_RNA (1)...(19): siRNA sense strand
gcacagcugaccaacauga

SEQ ID NO: 1528620 - RNA, 19 nt, Homo sapiens
  misc_RNA (1)...(19): siRNA sense strand
gaggacagcuacagauuuu

SEQ ID NO: 1528621 - RNA, 19 nt, Homo sapiens
  misc_RNA (1)...(19): siRNA sense strand
ugagaucgauaaugaaaca

SEQ ID NO: 1528622 - RNA, 19 nt, Homo sapiens
  misc_RNA (1)...(19): siRNA sense strand
aaagcuaucuugucauauc

SEQ ID NO: 1528623 - RNA, 19 nt, Homo sapiens
  misc_RNA (1)...(19): siRNA sense strand
uguggauucuucuucauua

SEQ ID NO: 1528624 - RNA, 19 nt, Homo sapiens
  misc_RNA (1)...(19): siRNA sense strand
gaacagauguaugcaaaau

SEQ ID NO: 1528625 - RNA, 19 nt, Homo sapiens
  misc_RNA (1)...(19): siRNA sense strand
gggagaaguuuaucacucu

SEQ ID NO: 1528626 - RNA, 19 nt, Homo sapiens
  misc_RNA (1)...(19): siRNA sense strand
aaccaucuauuaccuauga

SEQ ID NO: 1528627 - RNA, 19 nt, Homo sapiens
  misc_RNA (1)...(19): siRNA sense strand
caguagauguuucaguauu

SEQ ID NO: 1528628 - RNA, 19 nt, Homo sapiens
  misc_RNA (1)...(19): siRNA sense strand
acaaauaaguggauuaagc

SEQ ID NO: 1528629 - RNA, 19 nt, Homo sapiens
  misc_RNA (1)...(19): siRNA sense strand
aaacgaagacgaucuaaag

SEQ ID NO: 1528630 - RNA, 19 nt, Homo sapiens
  misc_RNA (1)...(19): siRNA sense strand
uaaagguccuccaucugaa

SEQ ID NO: 1528631 - RNA, 19 nt, Homo sapiens
  misc_RNA (1)...(19): siRNA sense strand
cauaaagccugaagaacca

SEQ ID NO: 1528632 - RNA, 19 nt, Homo sapiens
  misc_RNA (1)...(19): siRNA sense strand
auccaagucucuacaguua

SEQ ID NO: 1528633 - RNA, 19 nt, Homo sapiens
  misc_RNA (1)...(19): siRNA sense strand
gcuaucuugucauaucuuu

SEQ ID NO: 1528634 - RNA, 19 nt, Homo sapiens
  misc_RNA (1)...(19): siRNA sense strand
cagcaacaguagcagaauu

SEQ ID NO: 1528635 - RNA, 19 nt, Homo sapiens
  misc_RNA (1)...(19): siRNA sense strand
ugaaacugauugugauguu

SEQ ID NO: 1528636 - RNA, 19 nt, Homo sapiens
  misc_RNA (1)...(19): siRNA sense strand
gaccauaaagccugaagaa

SEQ ID NO: 1528637 - RNA, 19 nt, Homo sapiens
  misc_RNA (1)...(19): siRNA sense strand
ggacugaugcuuuguaugc

SEQ ID NO: 1528638 - RNA, 19 nt, Homo sapiens
  misc_RNA (1)...(19): siRNA sense strand
gaugacaacugcgcacuag

SEQ ID NO: 1528639 - RNA, 19 nt, Homo sapiens
  misc_RNA (1)...(19): siRNA sense strand
agaagaaaguuauggaagu

SEQ ID NO: 1528640 - RNA, 19 nt, Homo sapiens
  misc_RNA (1)...(19): siRNA sense strand
ggaagaagaaaguuaugga

SEQ ID NO: 1528641 - RNA, 19 nt, Homo sapiens
  misc_RNA (1)...(19): siRNA sense strand
gaaauaauuaugccucagu

SEQ ID NO: 1528642 - RNA, 19 nt, Homo sapiens
  misc_RNA (1)...(19): siRNA sense strand
aagggaagcugaaacuguu

SEQ ID NO: 1528643 - RNA, 19 nt, Homo sapiens
  misc_RNA (1)...(19): siRNA sense strand
gaacagggcgguggugauc

SEQ ID NO: 1528644 - RNA, 19 nt, Homo sapiens
  misc_RNA (1)...(19): siRNA sense strand
gagccugcaugacauaauc

SEQ ID NO: 1528645 - RNA, 19 nt, Homo sapiens
  misc_RNA (1)...(19): siRNA sense strand
gcaaaauucuacagaucua

SEQ ID NO: 1528646 - RNA, 19 nt, Homo sapiens
  misc_RNA (1)...(19): siRNA sense strand
acaauagugccaccaauaa

SEQ ID NO: 1528647 - RNA, 19 nt, Homo sapiens
  misc_RNA (1)...(19): siRNA sense strand
gaaucacacuguagaugca

SEQ ID NO: 1528648 - RNA, 19 nt, Homo sapiens
  misc_RNA (1)...(19): siRNA sense strand
ccucagaaaucacuccaau

SEQ ID NO: 1528649 - RNA, 19 nt, Homo sapiens
  misc_RNA (1)...(19): siRNA sense strand
agaagaagcgcugcaagua

SEQ ID NO: 1528650 - RNA, 19 nt, Homo sapiens
  misc_RNA (1)...(19): siRNA sense strand
gaacuucauucccacucau

SEQ ID NO: 1528651 - RNA, 19 nt, Homo sapiens
  misc_RNA (1)...(19): siRNA sense strand
gaaacaauagugccaccaa

SEQ ID NO: 1528652 - RNA, 19 nt, Homo sapiens
  misc_RNA (1)...(19): siRNA sense strand
gagaaaccaucuauuaccu

SEQ ID NO: 1528653 - RNA, 19 nt, Homo sapiens
  misc_RNA (1)...(19): siRNA sense strand
ugagagcuuuaguucuaua

SEQ ID NO: 1528654 - RNA, 19 nt, Homo sapiens
  misc_RNA (1)...(19): siRNA sense strand
agaaguaucugagucuguu

SEQ ID NO: 1528655 - RNA, 19 nt, Homo sapiens
  misc_RNA (1)...(19): siRNA sense strand
gaaguacacacacaugaca

SEQ ID NO: 1528656 - RNA, 19 nt, Homo sapiens
  misc_RNA (1)...(19): siRNA sense strand
gguggaagaauaugaagaa

SEQ ID NO: 1528657 - RNA, 19 nt, Homo sapiens
  misc_RNA (1)...(19): siRNA sense strand
gagaugagcggaauguaca

SEQ ID NO: 1528658 - RNA, 19 nt, Homo sapiens
  misc_RNA (1)...(19): siRNA sense strand
cacaucugcuauucuuaua

SEQ ID NO: 1528659 - RNA, 19 nt, Homo sapiens
  misc_RNA (1)...(19): siRNA sense strand
cagcucaucuaccucagaa

SEQ ID NO: 1528660 - RNA, 19 nt, Homo sapiens
  misc_RNA (1)...(19): siRNA sense strand
caaagaaguagacccaaau

SEQ ID NO: 1528661 - RNA, 19 nt, Homo sapiens
  misc_RNA (1)...(19): siRNA sense strand
augcagcguugucgaaaua

SEQ ID NO: 1528662 - RNA, 19 nt, Homo sapiens
  misc_RNA (1)...(19): siRNA sense strand
cuguugagaucgauaauga

SEQ ID NO: 1528663 - RNA, 19 nt, Homo sapiens
  misc_RNA (1)...(19): siRNA sense strand
ccacugaaguacacacaca

SEQ ID NO: 1528664 - RNA, 19 nt, Homo sapiens
  misc_RNA (1)...(19): siRNA sense strand
ucauauuacucucaagaug

SEQ ID NO: 1528665 - RNA, 19 nt, Homo sapiens
  misc_RNA (1)...(19): siRNA sense strand
gagacacucccuacaguug

SEQ ID NO: 1528666 - RNA, 19 nt, Homo sapiens
  misc_RNA (1)...(19): siRNA sense strand
gcucagaaacuucaucaca

SEQ ID NO: 1528667 - RNA, 19 nt, Homo sapiens
  misc_RNA (1)...(19): siRNA sense strand
gaagaagcgcugcaaguac

SEQ ID NO: 1528668 - RNA, 19 nt, Homo sapiens
  misc_RNA (1)...(19): siRNA sense strand
ugucauaucuuugguucuu

SEQ ID NO: 1528669 - RNA, 19 nt, Homo sapiens
  misc_RNA (1)...(19): siRNA sense strand
ccacuguacccgacaauga

SEQ ID NO: 1528670 - RNA, 19 nt, Homo sapiens
  misc_RNA (1)...(19): siRNA sense strand
cugagucuguugaauauga

SEQ ID NO: 1528671 - RNA, 19 nt, Homo sapiens
  misc_RNA (1)...(19): siRNA sense strand
ggaaucaguagauguuuca

SEQ ID NO: 1528672 - RNA, 19 nt, Homo sapiens
  misc_RNA (1)...(19): siRNA sense strand
uaaaacagcuugauauugc

SEQ ID NO: 1528673 - RNA, 19 nt, Homo sapiens
  misc_RNA (1)...(19): siRNA sense strand
gaaaguuauggaaguagaa

SEQ ID NO: 1528674 - RNA, 19 nt, Homo sapiens
  misc_RNA (1)...(19): siRNA sense strand
ucccaaagauccagaagau

SEQ ID NO: 1528675 - RNA, 19 nt, Homo sapiens
  misc_RNA (1)...(19): siRNA sense strand
aagaagcgcugcaaguaca

SEQ ID NO: 1528676 - RNA, 19 nt, Homo sapiens
  misc_RNA (1)...(19): siRNA sense strand
ucagaaacuucaucacagu

SEQ ID NO: 1528677 - RNA, 19 nt, Homo sapiens
  misc_RNA (1)...(19): siRNA sense strand
gaagaaaguuauggaagua

SEQ ID NO: 1528678 - RNA, 19 nt, Homo sapiens
  misc_RNA (1)...(19): siRNA sense strand
ugacacagcuuguuucaaa

SEQ ID NO: 1528679 - RNA, 19 nt, Homo sapiens
  misc_RNA (1)...(19): siRNA sense strand
gaaggaagcucagaaacuu

SEQ ID NO: 1528680 - RNA, 19 nt, Homo sapiens
  misc_RNA (1)...(19): siRNA sense strand
gaagauauaccaacauuug

SEQ ID NO: 1528681 - RNA, 19 nt, Homo sapiens
  misc_RNA (1)...(19): siRNA sense strand
ggauuaagcuggguacuuu

SEQ ID NO: 1528682 - RNA, 19 nt, Homo sapiens
  misc_RNA (1)...(19): siRNA sense strand
guacauggaucaaaccaaa

SEQ ID NO: 1528683 - RNA, 19 nt, Homo sapiens
  misc_RNA (1)...(19): siRNA sense strand
gcaaagaaguagacccaaa

SEQ ID NO: 1528684 - RNA, 19 nt, Homo sapiens
  misc_RNA (1)...(19): siRNA sense strand
gaaccaagccauucucaaa

SEQ ID NO: 1528685 - RNA, 19 nt, Homo sapiens
  misc_RNA (1)...(19): siRNA sense strand
gcaaguccaucuacaguga

SEQ ID NO: 1528686 - RNA, 19 nt, Homo sapiens
  misc_RNA (1)...(19): siRNA sense strand
guacagaguuucccuuuag

SEQ ID NO: 1528687 - RNA, 19 nt, Homo sapiens
  misc_RNA (1)...(19): siRNA sense strand
gaaaccaucuauuaccuau

SEQ ID NO: 1528688 - RNA, 19 nt, Homo sapiens
  misc_RNA (1)...(19): siRNA sense strand
gaaguagacccaaaugauu

SEQ ID NO: 1528689 - RNA, 19 nt, Homo sapiens
  misc_RNA (1)...(19): siRNA sense strand
aaugagagcucugauuaua

SEQ ID NO: 1528690 - RNA, 19 nt, Homo sapiens
  misc_RNA (1)...(19): siRNA sense strand
ucacaaagcugucugaaac

SEQ ID NO: 1528691 - RNA, 19 nt, Homo sapiens
  misc_RNA (1)...(19): siRNA sense strand
ugacagauauccaacaaau

SEQ ID NO: 1528692 - RNA, 19 nt, Homo sapiens
  misc_RNA (1)...(19): siRNA sense strand
ucugagagcuuuaguucua

SEQ ID NO: 1528693 - RNA, 19 nt, Homo sapiens
  misc_RNA (1)...(19): siRNA sense strand
aaagcugucugaaacaaua

SEQ ID NO: 1528694 - RNA, 19 nt, Homo sapiens
  misc_RNA (1)...(19): siRNA sense strand
cagaagauauaccaacauu

SEQ ID NO: 1528695 - RNA, 19 nt, Homo sapiens
  misc_RNA (1)...(19): siRNA sense strand
gaaguuaacaugucucuca

SEQ ID NO: 1528696 - RNA, 19 nt, Homo sapiens
  misc_RNA (1)...(19): siRNA sense strand
gaagaacagucuccagaag

SEQ ID NO: 1528697 - RNA, 19 nt, Homo sapiens
  misc_RNA (1)...(19): siRNA sense strand
agaaaucacuccaaucuca

SEQ ID NO: 1528698 - RNA, 19 nt, Homo sapiens
  misc_RNA (1)...(19): siRNA sense strand
cagaauacuucaagaauag

SEQ ID NO: 1528699 - RNA, 19 nt, Homo sapiens
  misc_RNA (1)...(19): siRNA sense strand
gaauggaagaagaaaguua

SEQ ID NO: 1528700 - RNA, 19 nt, Homo sapiens
  misc_RNA (1)...(19): siRNA sense strand
gaagagggcuuuaaaacga

SEQ ID NO: 1528701 - RNA, 19 nt, Homo sapiens
  misc_RNA (1)...(19): siRNA sense strand
uaaaugguguucaguuaga

SEQ ID NO: 1528702 - RNA, 19 nt, Homo sapiens
  misc_RNA (1)...(19): siRNA sense strand
ccaaagauccagaagauau

SEQ ID NO: 1528703 - RNA, 19 nt, Homo sapiens
  misc_RNA (1)...(19): siRNA sense strand
caaccacccuuacuacuuc

SEQ ID NO: 1528704 - RNA, 19 nt, Homo sapiens
  misc_RNA (1)...(19): siRNA sense strand
gccaggaacuauuugauga

SEQ ID NO: 1528705 - RNA, 19 nt, Homo sapiens
  misc_RNA (1)...(19): siRNA sense strand
caagagaguucuguugaga

SEQ ID NO: 1528706 - RNA, 19 nt, Homo sapiens
  misc_RNA (1)...(19): siRNA sense strand
gcacaucugcuauucuuau

SEQ ID NO: 1528707 - RNA, 19 nt, Homo sapiens
  misc_RNA (1)...(19): siRNA sense strand
gggcagcggugaacaggaa

SEQ ID NO: 1528708 - RNA, 19 nt, Homo sapiens
  misc_RNA (1)...(19): siRNA sense strand
gaagaagaaaguuauggaa

SEQ ID NO: 1528709 - RNA, 19 nt, Homo sapiens
  misc_RNA (1)...(19): siRNA sense strand
gcaugcaucuucuaaugga

SEQ ID NO: 1528710 - RNA, 19 nt, Homo sapiens
  misc_RNA (1)...(19): siRNA sense strand
caaagauccagaagauaua

SEQ ID NO: 1528711 - RNA, 19 nt, Homo sapiens
  misc_RNA (1)...(19): siRNA sense strand
caaaaggagucaguauuua

SEQ ID NO: 1528712 - RNA, 19 nt, Homo sapiens
  misc_RNA (1)...(19): siRNA sense strand
gaguuucccuuuagaugaa

SEQ ID NO: 1528713 - RNA, 19 nt, Homo sapiens
  misc_RNA (1)...(19): siRNA sense strand
gaaacugauugugauguug

SEQ ID NO: 1528714 - RNA, 19 nt, Homo sapiens
  misc_RNA (1)...(19): siRNA sense strand
gaucgauaaugaaacagaa

SEQ ID NO: 1528715 - RNA, 19 nt, Homo sapiens
  misc_RNA (1)...(19): siRNA sense strand
ggaagaaggaggagaagau

SEQ ID NO: 1528716 - RNA, 19 nt, Homo sapiens
  misc_RNA (1)...(19): siRNA sense strand
gaucuaggauaugcuaaug

SEQ ID NO: 1528717 - RNA, 19 nt, Homo sapiens
  misc_RNA (1)...(19): siRNA sense strand
ugagagcucugauuauaca

SEQ ID NO: 1528718 - RNA, 19 nt, Homo sapiens
  misc_RNA (1)...(19): siRNA sense strand
guauguaaccacugaagua

SEQ ID NO: 1528719 - RNA, 19 nt, Homo sapiens
  misc_RNA (1)...(19): siRNA sense strand
uaucugagucuguugaaua

SEQ ID NO: 1528720 - RNA, 19 nt, Homo sapiens
  misc_RNA (1)...(19): siRNA sense strand
gcacagcugaccaacauga

SEQ ID NO: 1528721 - RNA, 19 nt, Homo sapiens
  misc_RNA (1)...(19): siRNA sense strand
gaggacagcuacagauuuu

SEQ ID NO: 1528722 - RNA, 19 nt, Homo sapiens
  misc_RNA (1)...(19): siRNA sense strand
ugagaucgauaaugaaaca

SEQ ID NO: 1528723 - RNA, 19 nt, Homo sapiens
  misc_RNA (1)...(19): siRNA sense strand
aaagcuaucuugucauauc

SEQ ID NO: 1528724 - RNA, 19 nt, Homo sapiens
  misc_RNA (1)...(19): siRNA sense strand
uguggauucuucuucauua

SEQ ID NO: 1528725 - RNA, 19 nt, Homo sapiens
  misc_RNA (1)...(19): siRNA sense strand
gaacagauguaugcaaaau

SEQ ID NO: 1528726 - RNA, 19 nt, Homo sapiens
  misc_RNA (1)...(19): siRNA sense strand
gggagaaguuuaucacucu

SEQ ID NO: 1528727 - RNA, 19 nt, Homo sapiens
  misc_RNA (1)...(19): siRNA sense strand
aaccaucuauuaccuauga

SEQ ID NO: 1528728 - RNA, 19 nt, Homo sapiens
  misc_RNA (1)...(19): siRNA sense strand
caguagauguuucaguauu

SEQ ID NO: 1528729 - RNA, 19 nt, Homo sapiens
  misc_RNA (1)...(19): siRNA sense strand
acaaauaaguggauuaagc

SEQ ID NO: 1528730 - RNA, 19 nt, Homo sapiens
  misc_RNA (1)...(19): siRNA sense strand
aaacgaagacgaucuaaag

SEQ ID NO: 1528731 - RNA, 19 nt, Homo sapiens
  misc_RNA (1)...(19): siRNA sense strand
uaaagguccuccaucugaa

SEQ ID NO: 1528732 - RNA, 19 nt, Homo sapiens
  misc_RNA (1)...(19): siRNA sense strand
cauaaagccugaagaacca

SEQ ID NO: 1528733 - RNA, 19 nt, Homo sapiens
  misc_RNA (1)...(19): siRNA sense strand
auccaagucucuacaguua

SEQ ID NO: 1528734 - RNA, 19 nt, Homo sapiens
  misc_RNA (1)...(19): siRNA sense strand
gcuaucuugucauaucuuu

SEQ ID NO: 1528735 - RNA, 19 nt, Homo sapiens
  misc_RNA (1)...(19): siRNA sense strand
cagcaacaguagcagaauu

SEQ ID NO: 1528736 - RNA, 19 nt, Homo sapiens
  misc_RNA (1)...(19): siRNA sense strand
gaugacaacugcgcacuag

SEQ ID NO: 1528737 - RNA, 19 nt, Homo sapiens
  misc_RNA (1)...(19): siRNA sense strand
gaccauaaagccugaagaa

SEQ ID NO: 1528738 - RNA, 19 nt, Homo sapiens
  misc_RNA (1)...(19): siRNA sense strand
ggacugaugcuuuguaugc

SEQ ID NO: 1528739 - RNA, 19 nt, Homo sapiens
  misc_RNA (1)...(19): siRNA sense strand
agaagaaaguuauggaagu

SEQ ID NO: 1528740 - RNA, 19 nt, Homo sapiens
  misc_RNA (1)...(19): siRNA sense strand
ggaagaagaaaguuaugga

SEQ ID NO: 1528741 - RNA, 19 nt, Homo sapiens
  misc_RNA (1)...(19): siRNA sense strand
ugaaacugauugugauguu

SEQ ID NO: 1528742 - RNA, 19 nt, Homo sapiens
  misc_RNA (1)...(19): siRNA sense strand
gaaauaauuaugccucagu

SEQ ID NO: 1528743 - RNA, 19 nt, Homo sapiens
  misc_RNA (1)...(19): siRNA sense strand
aagggaagcugaaacuguu

SEQ ID NO: 1528744 - RNA, 19 nt, Homo sapiens
  misc_RNA (1)...(19): siRNA sense strand
gaacagggcgguggugauc

SEQ ID NO: 1528745 - RNA, 19 nt, Homo sapiens
  misc_RNA (1)...(19): siRNA sense strand
gagccugcaugacauaauc

SEQ ID NO: 1528746 - RNA, 19 nt, Homo sapiens
  misc_RNA (1)...(19): siRNA sense strand
gcaaaauucuacagaucua

SEQ ID NO: 1528747 - RNA, 19 nt, Homo sapiens
  misc_RNA (1)...(19): siRNA sense strand
acaauagugccaccaauaa

SEQ ID NO: 1528748 - RNA, 19 nt, Homo sapiens
  misc_RNA (1)...(19): siRNA sense strand
gaaucacacuguagaugca

SEQ ID NO: 1528749 - RNA, 19 nt, Homo sapiens
  misc_RNA (1)...(19): siRNA sense strand
ccucagaaaucacuccaau

SEQ ID NO: 1528750 - RNA, 19 nt, Homo sapiens
  misc_RNA (1)...(19): siRNA sense strand
agaagaagcgcugcaagua

SEQ ID NO: 1528751 - RNA, 19 nt, Homo sapiens
  misc_RNA (1)...(19): siRNA sense strand
gaacuucauucccacucau

SEQ ID NO: 1528752 - RNA, 19 nt, Homo sapiens
  misc_RNA (1)...(19): siRNA sense strand
gaaacaauagugccaccaa

SEQ ID NO: 1528753 - RNA, 19 nt, Homo sapiens
  misc_RNA (1)...(19): siRNA sense strand
gagaaaccaucuauuaccu

SEQ ID NO: 1528754 - RNA, 19 nt, Homo sapiens
  misc_RNA (1)...(19): siRNA sense strand
ugagagcuuuaguucuaua

SEQ ID NO: 1528755 - RNA, 19 nt, Homo sapiens
  misc_RNA (1)...(19): siRNA sense strand
agaaguaucugagucuguu

SEQ ID NO: 1528756 - RNA, 19 nt, Homo sapiens
  misc_RNA (1)...(19): siRNA sense strand
gaaguacacacacaugaca

SEQ ID NO: 1528757 - RNA, 19 nt, Homo sapiens
  misc_RNA (1)...(19): siRNA sense strand
gguggaagaauaugaagaa

SEQ ID NO: 1528758 - RNA, 19 nt, Homo sapiens
  misc_RNA (1)...(19): siRNA sense strand
gagaugagcggaauguaca

SEQ ID NO: 1528759 - RNA, 19 nt, Homo sapiens
  misc_RNA (1)...(19): siRNA sense strand
cacaucugcuauucuuaua

SEQ ID NO: 1528760 - RNA, 19 nt, Homo sapiens
  misc_RNA (1)...(19): siRNA sense strand
cagcucaucuaccucagaa

SEQ ID NO: 1528761 - RNA, 19 nt, Homo sapiens
  misc_RNA (1)...(19): siRNA sense strand
caaagaaguagacccaaau

SEQ ID NO: 1528762 - RNA, 19 nt, Homo sapiens
  misc_RNA (1)...(19): siRNA sense strand
augcagcguugucgaaaua

SEQ ID NO: 1528763 - RNA, 19 nt, Homo sapiens
  misc_RNA (1)...(19): siRNA sense strand
cuguugagaucgauaauga

SEQ ID NO: 1528764 - RNA, 19 nt, Homo sapiens
  misc_RNA (1)...(19): siRNA sense strand
ccacugaaguacacacaca

SEQ ID NO: 1528765 - RNA, 19 nt, Homo sapiens
  misc_RNA (1)...(19): siRNA sense strand
ucccaaagauccagaagau

SEQ ID NO: 1528766 - RNA, 19 nt, Homo sapiens
  misc_RNA (1)...(19): siRNA sense strand
gcucagaaacuucaucaca

SEQ ID NO: 1528767 - RNA, 19 nt, Homo sapiens
  misc_RNA (1)...(19): siRNA sense strand
gaagaagcgcugcaaguac

SEQ ID NO: 1528768 - RNA, 19 nt, Homo sapiens
  misc_RNA (1)...(19): siRNA sense strand
gagacacucccuacaguug

SEQ ID NO: 1528769 - RNA, 19 nt, Homo sapiens
  misc_RNA (1)...(19): siRNA sense strand
ucauauuacucucaagaug

SEQ ID NO: 1528770 - RNA, 19 nt, Homo sapiens
  misc_RNA (1)...(19): siRNA sense strand
ugucauaucuuugguucuu

SEQ ID NO: 1528771 - RNA, 19 nt, Homo sapiens
  misc_RNA (1)...(19): siRNA sense strand
ccacuguacccgacaauga

SEQ ID NO: 1528772 - RNA, 19 nt, Homo sapiens
  misc_RNA (1)...(19): siRNA sense strand
gaagaaggaggagaagaug

SEQ ID NO: 1528773 - RNA, 19 nt, Homo sapiens
  misc_RNA (1)...(19): siRNA sense strand
cugagucuguugaauauga

SEQ ID NO: 1528774 - RNA, 19 nt, Homo sapiens
  misc_RNA (1)...(19): siRNA sense strand
ggaaucaguagauguuuca

SEQ ID NO: 1528775 - RNA, 19 nt, Homo sapiens
  misc_RNA (1)...(19): siRNA sense strand
uaaaacagcuugauauugc

SEQ ID NO: 1528776 - RNA, 19 nt, Homo sapiens
  misc_RNA (1)...(19): siRNA sense strand
gaaaguuauggaaguagaa

SEQ ID NO: 1528777 - RNA, 19 nt, Homo sapiens
  misc_RNA (1)...(19): siRNA sense strand
ccaaauggccugggcaaua

SEQ ID NO: 1528778 - RNA, 19 nt, Homo sapiens
  misc_RNA (1)...(19): siRNA sense strand
ggugugaugaggucuauua

SEQ ID NO: 1528779 - RNA, 19 nt, Homo sapiens
  misc_RNA (1)...(19): siRNA sense strand
gcucugcacugccaaaugg

SEQ ID NO: 1528780 - RNA, 19 nt, Homo sapiens
  misc_RNA (1)...(19): siRNA sense strand
caaauggccugggcaauac

SEQ ID NO: 1528781 - RNA, 19 nt, Homo sapiens
  misc_RNA (1)...(19): siRNA sense strand
gcaagguccuccucaugca

SEQ ID NO: 1528782 - RNA, 19 nt, Homo sapiens
  misc_RNA (1)...(19): siRNA sense strand
gcacagggagacccgcuuu

SEQ ID NO: 1528783 - RNA, 19 nt, Homo sapiens
  misc_RNA (1)...(19): siRNA sense strand
caacauccuugcccuuguc

SEQ ID NO: 1528784 - RNA, 19 nt, Homo sapiens
  misc_RNA (1)...(19): siRNA sense strand
gcggaggauuugaugaaga

SEQ ID NO: 1528785 - RNA, 19 nt, Homo sapiens
  misc_RNA (1)...(19): siRNA sense strand
cggccgaccuggaugugua

SEQ ID NO: 1528786 - RNA, 19 nt, Homo sapiens
  misc_RNA (1)...(19): siRNA sense strand
cggaggauuugaugaagau

SEQ ID NO: 1528787 - RNA, 19 nt, Homo sapiens
  misc_RNA (1)...(19): siRNA sense strand
gccgguggcuacagcaaga

SEQ ID NO: 1528788 - RNA, 19 nt, Homo sapiens
  misc_RNA (1)...(19): siRNA sense strand
ggucaugguucagcacauc

SEQ ID NO: 1528789 - RNA, 19 nt, Homo sapiens
  misc_RNA (1)...(19): siRNA sense strand
ugaagauguuaaagcgaaa

SEQ ID NO: 1528790 - RNA, 19 nt, Homo sapiens
  misc_RNA (1)...(19): siRNA sense strand
gcagagguacgaccacuac

SEQ ID NO: 1528791 - RNA, 19 nt, Homo sapiens
  misc_RNA (1)...(19): siRNA sense strand
gagggcaacagguauguca

SEQ ID NO: 1528792 - RNA, 19 nt, Homo sapiens
  misc_RNA (1)...(19): siRNA sense strand
gguacgaccacuacucugu

SEQ ID NO: 1528793 - RNA, 19 nt, Homo sapiens
  misc_RNA (1)...(19): siRNA sense strand
aggauuugaugaagauguu

SEQ ID NO: 1528794 - RNA, 19 nt, Homo sapiens
  misc_RNA (1)...(19): siRNA sense strand
agggagacccgcuuuguga

SEQ ID NO: 1528795 - RNA, 19 nt, Homo sapiens
  misc_RNA (1)...(19): siRNA sense strand
gagguacgaccacuacucu

SEQ ID NO: 1528796 - RNA, 19 nt, Homo sapiens
  misc_RNA (1)...(19): siRNA sense strand
gaacagcacggggaaguug

SEQ ID NO: 1528797 - RNA, 19 nt, Homo sapiens
  misc_RNA (1)...(19): siRNA sense strand
cccugcagcuggcuuucua

SEQ ID NO: 1528798 - RNA, 19 nt, Homo sapiens
  misc_RNA (1)...(19): siRNA sense strand
gcuucuacgcggaggauuu

SEQ ID NO: 1528799 - RNA, 19 nt, Homo sapiens
  misc_RNA (1)...(19): siRNA sense strand
ggauuugaugaagauguua

SEQ ID NO: 1528800 - RNA, 19 nt, Homo sapiens
  misc_RNA (1)...(19): siRNA sense strand
cuacacggccgaccuggau

SEQ ID NO: 1528801 - RNA, 19 nt, Homo sapiens
  misc_RNA (1)...(19): siRNA sense strand
gaggauuugaugaagaugu

SEQ ID NO: 1528802 - RNA, 19 nt, Homo sapiens
  misc_RNA (1)...(19): siRNA sense strand
uuaaagcgaaaguggagaa

SEQ ID NO: 1528803 - RNA, 19 nt, Homo sapiens
  misc_RNA (1)...(19): siRNA sense strand
gaggaguggcuggaggaaa

SEQ ID NO: 1528804 - RNA, 19 nt, Homo sapiens
  misc_RNA (1)...(19): siRNA sense strand
caacagauaucaucgugua

SEQ ID NO: 1528805 - RNA, 19 nt, Homo sapiens
  misc_RNA (1)...(19): siRNA sense strand
ggaggacucugaugaacaa

SEQ ID NO: 1528806 - RNA, 19 nt, Homo sapiens
  misc_RNA (1)...(19): siRNA sense strand
ggaaacccuucaaauaguu

SEQ ID NO: 1528807 - RNA, 19 nt, Homo sapiens
  misc_RNA (1)...(19): siRNA sense strand
gcacagagaagggaaguuu

SEQ ID NO: 1528808 - RNA, 19 nt, Homo sapiens
  misc_RNA (1)...(19): siRNA sense strand
acaggaaacccuucaaaua

SEQ ID NO: 1528809 - RNA, 19 nt, Homo sapiens
  misc_RNA (1)...(19): siRNA sense strand
gcagggaacagaacaguga

SEQ ID NO: 1528810 - RNA, 19 nt, Homo sapiens
  misc_RNA (1)...(19): siRNA sense strand
ggugacauaugcacaguug

SEQ ID NO: 1528811 - RNA, 19 nt, Homo sapiens
  misc_RNA (1)...(19): siRNA sense strand
gagaagggaaguuuaagga

SEQ ID NO: 1528812 - RNA, 19 nt, Homo sapiens
  misc_RNA (1)...(19): siRNA sense strand
caggaaacccuucaaauag

SEQ ID NO: 1528813 - RNA, 19 nt, Homo sapiens
  misc_RNA (1)...(19): siRNA sense strand
gaacagggaggacucugau

SEQ ID NO: 1528814 - RNA, 19 nt, Homo sapiens
  misc_RNA (1)...(19): siRNA sense strand
acagagaagggaaguuuaa

SEQ ID NO: 1528815 - RNA, 19 nt, Homo sapiens
  misc_RNA (1)...(19): siRNA sense strand
ugacauaugcacaguugaa

SEQ ID NO: 1528816 - RNA, 19 nt, Homo sapiens
  misc_RNA (1)...(19): siRNA sense strand
gcagggaccuacagaugcu

SEQ ID NO: 1528817 - RNA, 19 nt, Homo sapiens
  misc_RNA (1)...(19): siRNA sense strand
acaccugcauguucugauu

SEQ ID NO: 1528818 - RNA, 19 nt, Homo sapiens
  misc_RNA (1)...(19): siRNA sense strand
ggugaaaucagaagagaca

SEQ ID NO: 1528819 - RNA, 19 nt, Homo sapiens
  misc_RNA (1)...(19): siRNA sense strand
ggacucugaugaacaagac

SEQ ID NO: 1528820 - RNA, 19 nt, Homo sapiens
  misc_RNA (1)...(19): siRNA sense strand
agacagucauccugcaaug

SEQ ID NO: 1528821 - RNA, 19 nt, Homo sapiens
  misc_RNA (1)...(19): siRNA sense strand
aggaaacccuucaaauagu

SEQ ID NO: 1528822 - RNA, 19 nt, Homo sapiens
  misc_RNA (1)...(19): siRNA sense strand
ucacaggaaacccuucaaa

SEQ ID NO: 1528823 - RNA, 19 nt, Homo sapiens
  misc_RNA (1)...(19): siRNA sense strand
gaaacccuucaaauaguug

SEQ ID NO: 1528824 - RNA, 19 nt, Homo sapiens
  misc_RNA (1)...(19): siRNA sense strand
caauguuggucagauguca

SEQ ID NO: 1528825 - RNA, 19 nt, Homo sapiens
  misc_RNA (1)...(19): siRNA sense strand
acagggaggacucugauga

SEQ ID NO: 1528826 - RNA, 19 nt, Homo sapiens
  misc_RNA (1)...(19): siRNA sense strand
uuggucagaugucagguuu

SEQ ID NO: 1528827 - RNA, 19 nt, Homo sapiens
  misc_RNA (1)...(19): siRNA sense strand
cacagagaagggaaguuua

SEQ ID NO: 1528828 - RNA, 19 nt, Homo sapiens
  misc_RNA (1)...(19): siRNA sense strand
gaggugacauaugcacagu

SEQ ID NO: 1528829 - RNA, 19 nt, Homo sapiens
  misc_RNA (1)...(19): siRNA sense strand
acagucauccugcaauguu

SEQ ID NO: 1528830 - RNA, 19 nt, Homo sapiens
  misc_RNA (1)...(19): siRNA sense strand
cacaggaaacccuucaaau

SEQ ID NO: 1528831 - RNA, 19 nt, Homo sapiens
  misc_RNA (1)...(19): siRNA sense strand
ggucaucauccucuucauc

SEQ ID NO: 1528832 - RNA, 19 nt, Homo sapiens
  misc_RNA (1)...(19): siRNA sense strand
caugagggaguccacagaa

SEQ ID NO: 1528833 - RNA, 19 nt, Homo sapiens
  misc_RNA (1)...(19): siRNA sense strand
cuacagaugcuacgguucu

SEQ ID NO: 1528834 - RNA, 19 nt, Homo sapiens
  misc_RNA (1)...(19): siRNA sense strand
cagggaggacucugaugaa

SEQ ID NO: 1528835 - RNA, 19 nt, Homo sapiens
  misc_RNA (1)...(19): siRNA sense strand
ugaacagggaggacucuga

SEQ ID NO: 1528836 - RNA, 19 nt, Homo sapiens
  misc_RNA (1)...(19): siRNA sense strand
aaaaugcuguuguaaugga

SEQ ID NO: 1528837 - RNA, 19 nt, Homo sapiens
  misc_RNA (1)...(19): siRNA sense strand
cagucauccugcaauguug

SEQ ID NO: 1528838 - RNA, 19 nt, Homo sapiens
  misc_RNA (1)...(19): siRNA sense strand
gggaggacucugaugaaca

SEQ ID NO: 1528839 - RNA, 19 nt, Homo sapiens
  misc_RNA (1)...(19): siRNA sense strand
gagacagucauccugcaau

SEQ ID NO: 1528840 - RNA, 19 nt, Homo sapiens
  misc_RNA (1)...(19): siRNA sense strand
gugacccacugcuuguuuc

SEQ ID NO: 1528841 - RNA, 19 nt, Homo sapiens
  misc_RNA (1)...(19): siRNA sense strand
cucaggaggugacauaugc

SEQ ID NO: 1528842 - RNA, 19 nt, Homo sapiens
  misc_RNA (1)...(19): siRNA sense strand
cugcaauguuggucagaug

SEQ ID NO: 1528843 - RNA, 19 nt, Homo sapiens
  misc_RNA (1)...(19): siRNA sense strand
cauccuccuccucuucuuu

SEQ ID NO: 1528844 - RNA, 19 nt, Homo sapiens
  misc_RNA (1)...(19): siRNA sense strand
augagggaguccacagaaa

SEQ ID NO: 1528845 - RNA, 19 nt, Homo sapiens
  misc_RNA (1)...(19): siRNA sense strand
gggaacagaacagugaaca

SEQ ID NO: 1528846 - RNA, 19 nt, Homo sapiens
  misc_RNA (1)...(19): siRNA sense strand
caacagauaucaucgugua

SEQ ID NO: 1528847 - RNA, 19 nt, Homo sapiens
  misc_RNA (1)...(19): siRNA sense strand
ggaggacucugaugaacaa

SEQ ID NO: 1528848 - RNA, 19 nt, Homo sapiens
  misc_RNA (1)...(19): siRNA sense strand
ggaaacccuucaaauaguu

SEQ ID NO: 1528849 - RNA, 19 nt, Homo sapiens
  misc_RNA (1)...(19): siRNA sense strand
gcacagagaagggaaguuu

SEQ ID NO: 1528850 - RNA, 19 nt, Homo sapiens
  misc_RNA (1)...(19): siRNA sense strand
acaggaaacccuucaaaua

SEQ ID NO: 1528851 - RNA, 19 nt, Homo sapiens
  misc_RNA (1)...(19): siRNA sense strand
gcagggaacagaacaguga

SEQ ID NO: 1528852 - RNA, 19 nt, Homo sapiens
  misc_RNA (1)...(19): siRNA sense strand
ggugacauaugcacaguug

SEQ ID NO: 1528853 - RNA, 19 nt, Homo sapiens
  misc_RNA (1)...(19): siRNA sense strand
gagaagggaaguuuaagga

SEQ ID NO: 1528854 - RNA, 19 nt, Homo sapiens
  misc_RNA (1)...(19): siRNA sense strand
caggaaacccuucaaauag

SEQ ID NO: 1528855 - RNA, 19 nt, Homo sapiens
  misc_RNA (1)...(19): siRNA sense strand
gaacagggaggacucugau

SEQ ID NO: 1528856 - RNA, 19 nt, Homo sapiens
  misc_RNA (1)...(19): siRNA sense strand
acagagaagggaaguuuaa

SEQ ID NO: 1528857 - RNA, 19 nt, Homo sapiens
  misc_RNA (1)...(19): siRNA sense strand
ugacauaugcacaguugaa

SEQ ID NO: 1528858 - RNA, 19 nt, Homo sapiens
  misc_RNA (1)...(19): siRNA sense strand
gcagggaccuacagaugcu

SEQ ID NO: 1528859 - RNA, 19 nt, Homo sapiens
  misc_RNA (1)...(19): siRNA sense strand
acaccugcauguucugauu

SEQ ID NO: 1528860 - RNA, 19 nt, Homo sapiens
  misc_RNA (1)...(19): siRNA sense strand
ggugaaaucagaagagaca

SEQ ID NO: 1528861 - RNA, 19 nt, Homo sapiens
  misc_RNA (1)...(19): siRNA sense strand
ggacucugaugaacaagac

SEQ ID NO: 1528862 - RNA, 19 nt, Homo sapiens
  misc_RNA (1)...(19): siRNA sense strand
agacagucauccugcaaug

SEQ ID NO: 1528863 - RNA, 19 nt, Homo sapiens
  misc_RNA (1)...(19): siRNA sense strand
aggaaacccuucaaauagu

SEQ ID NO: 1528864 - RNA, 19 nt, Homo sapiens
  misc_RNA (1)...(19): siRNA sense strand
ucacaggaaacccuucaaa

SEQ ID NO: 1528865 - RNA, 19 nt, Homo sapiens
  misc_RNA (1)...(19): siRNA sense strand
gaaacccuucaaauaguug

SEQ ID NO: 1528866 - RNA, 19 nt, Homo sapiens
  misc_RNA (1)...(19): siRNA sense strand
caauguuggucagauguca

SEQ ID NO: 1528867 - RNA, 19 nt, Homo sapiens
  misc_RNA (1)...(19): siRNA sense strand
acagggaggacucugauga

SEQ ID NO: 1528868 - RNA, 19 nt, Homo sapiens
  misc_RNA (1)...(19): siRNA sense strand
uuggucagaugucagguuu

SEQ ID NO: 1528869 - RNA, 19 nt, Homo sapiens
  misc_RNA (1)...(19): siRNA sense strand
acagucauccugcaauguu

SEQ ID NO: 1528870 - RNA, 19 nt, Homo sapiens
  misc_RNA (1)...(19): siRNA sense strand
gaggugacauaugcacagu

SEQ ID NO: 1528871 - RNA, 19 nt, Homo sapiens
  misc_RNA (1)...(19): siRNA sense strand
cacagagaagggaaguuua

SEQ ID NO: 1528872 - RNA, 19 nt, Homo sapiens
  misc_RNA (1)...(19): siRNA sense strand
cacaggaaacccuucaaau

SEQ ID NO: 1528873 - RNA, 19 nt, Homo sapiens
  misc_RNA (1)...(19): siRNA sense strand
ggucaucauccucuucauc

SEQ ID NO: 1528874 - RNA, 19 nt, Homo sapiens
  misc_RNA (1)...(19): siRNA sense strand
caugagggaguccacagaa

SEQ ID NO: 1528875 - RNA, 19 nt, Homo sapiens
  misc_RNA (1)...(19): siRNA sense strand
cuacagaugcuacgguucu

SEQ ID NO: 1528876 - RNA, 19 nt, Homo sapiens
  misc_RNA (1)...(19): siRNA sense strand
cagggaggacucugaugaa

SEQ ID NO: 1528877 - RNA, 19 nt, Homo sapiens
  misc_RNA (1)...(19): siRNA sense strand
ugaacagggaggacucuga

SEQ ID NO: 1528878 - RNA, 19 nt, Homo sapiens
  misc_RNA (1)...(19): siRNA sense strand
gagacagucauccugcaau

SEQ ID NO: 1528879 - RNA, 19 nt, Homo sapiens
  misc_RNA (1)...(19): siRNA sense strand
gggaggacucugaugaaca

SEQ ID NO: 1528880 - RNA, 19 nt, Homo sapiens
  misc_RNA (1)...(19): siRNA sense strand
cagucauccugcaauguug

SEQ ID NO: 1528881 - RNA, 19 nt, Homo sapiens
  misc_RNA (1)...(19): siRNA sense strand
aaaaugcuguuguaaugga

SEQ ID NO: 1528882 - RNA, 19 nt, Homo sapiens
  misc_RNA (1)...(19): siRNA sense strand
gugacccacugcuuguuuc

SEQ ID NO: 1528883 - RNA, 19 nt, Homo sapiens
  misc_RNA (1)...(19): siRNA sense strand
cucaggaggugacauaugc

SEQ ID NO: 1528884 - RNA, 19 nt, Homo sapiens
  misc_RNA (1)...(19): siRNA sense strand
cugcaauguuggucagaug

SEQ ID NO: 1528885 - RNA, 19 nt, Homo sapiens
  misc_RNA (1)...(19): siRNA sense strand
cauccuccuccucuucuuu

SEQ ID NO: 1528886 - RNA, 19 nt, Homo sapiens
  misc_RNA (1)...(19): siRNA sense strand
augagggaguccacagaaa

SEQ ID NO: 1528887 - RNA, 19 nt, Homo sapiens
  misc_RNA (1)...(19): siRNA sense strand
gggaacagaacagugaaca

SEQ ID NO: 1528888 - RNA, 19 nt, Homo sapiens
  misc_RNA (1)...(19): siRNA sense strand
gacaaaggcuguuagagaa

SEQ ID NO: 1528889 - RNA, 19 nt, Homo sapiens
  misc_RNA (1)...(19): siRNA sense strand
ggacaaaggcuguuagaga

SEQ ID NO: 1528890 - RNA, 19 nt, Homo sapiens
  misc_RNA (1)...(19): siRNA sense strand
ggaguaaucccucaguuug

SEQ ID NO: 1528891 - RNA, 19 nt, Homo sapiens
  misc_RNA (1)...(19): siRNA sense strand
cagcaucaauggaaacaga

SEQ ID NO: 1528892 - RNA, 19 nt, Homo sapiens
  misc_RNA (1)...(19): siRNA sense strand
gcaagccaguggaaugaau

SEQ ID NO: 1528893 - RNA, 19 nt, Homo sapiens
  misc_RNA (1)...(19): siRNA sense strand
ggauugcggucauggacaa

SEQ ID NO: 1528894 - RNA, 19 nt, Homo sapiens
  misc_RNA (1)...(19): siRNA sense strand
ccagggucauuguggauuu

SEQ ID NO: 1528895 - RNA, 19 nt, Homo sapiens
  misc_RNA (1)...(19): siRNA sense strand
caacagaagaaacagaaau

SEQ ID NO: 1528896 - RNA, 19 nt, Homo sapiens
  misc_RNA (1)...(19): siRNA sense strand
ccaguggaaugaaugucua

SEQ ID NO: 1528897 - RNA, 19 nt, Homo sapiens
  misc_RNA (1)...(19): siRNA sense strand
guaagccacuagaaagauc

SEQ ID NO: 1528898 - RNA, 19 nt, Homo sapiens
  misc_RNA (1)...(19): siRNA sense strand
ucaacuuucuuaggaguaa

SEQ ID NO: 1528899 - RNA, 19 nt, Homo sapiens
  misc_RNA (1)...(19): siRNA sense strand
ucaacagcaucaauggaaa

SEQ ID NO: 1528900 - RNA, 19 nt, Homo sapiens
  misc_RNA (1)...(19): siRNA sense strand
gccacuagaaagaucauua

SEQ ID NO: 1528901 - RNA, 19 nt, Homo sapiens
  misc_RNA (1)...(19): siRNA sense strand
gaaacgcuagcauccagaa

SEQ ID NO: 1528902 - RNA, 19 nt, Homo sapiens
  misc_RNA (1)...(19): siRNA sense strand
gaugaaguauggccugacu

SEQ ID NO: 1528903 - RNA, 19 nt, Homo sapiens
  misc_RNA (1)...(19): siRNA sense strand
ucaauggaaacagaaguua

SEQ ID NO: 1528904 - RNA, 19 nt, Homo sapiens
  misc_RNA (1)...(19): siRNA sense strand
cgaagucuugaauccauua

SEQ ID NO: 1528905 - RNA, 19 nt, Homo sapiens
  misc_RNA (1)...(19): siRNA sense strand
ugacuggcccuuggauuaa

SEQ ID NO: 1528906 - RNA, 19 nt, Homo sapiens
  misc_RNA (1)...(19): siRNA sense strand
cugacuggcccuuggauua

SEQ ID NO: 1528907 - RNA, 19 nt, Homo sapiens
  misc_RNA (1)...(19): siRNA sense strand
cagaauugcugggacaaag

SEQ ID NO: 1528908 - RNA, 19 nt, Homo sapiens
  misc_RNA (1)...(19): siRNA sense strand
gacuggcccuuggauuaaa

SEQ ID NO: 1528909 - RNA, 19 nt, Homo sapiens
  misc_RNA (1)...(19): siRNA sense strand
caaaggcuguuagagaaac

SEQ ID NO: 1528910 - RNA, 19 nt, Homo sapiens
  misc_RNA (1)...(19): siRNA sense strand
acucuuaccugugaucuuc

SEQ ID NO: 1528911 - RNA, 19 nt, Homo sapiens
  misc_RNA (1)...(19): siRNA sense strand
gcuagcauccagaauagug

SEQ ID NO: 1528912 - RNA, 19 nt, Homo sapiens
  misc_RNA (1)...(19): siRNA sense strand
ccagaauagugcuguuugg

SEQ ID NO: 1528913 - RNA, 19 nt, Homo sapiens
  misc_RNA (1)...(19): siRNA sense strand
ggacccaguauuucaggaa

SEQ ID NO: 1528914 - RNA, 19 nt, Homo sapiens
  misc_RNA (1)...(19): siRNA sense strand
uuaaaaggacccaguauuu

SEQ ID NO: 1528915 - RNA, 19 nt, Homo sapiens
  misc_RNA (1)...(19): siRNA sense strand
gaagucuugaauccauuaa

SEQ ID NO: 1528916 - RNA, 19 nt, Homo sapiens
  misc_RNA (1)...(19): siRNA sense strand
cuacaugucccgaagucuu

SEQ ID NO: 1528917 - RNA, 19 nt, Homo sapiens
  misc_RNA (1)...(19): siRNA sense strand
uaggaguaaucccucaguu

SEQ ID NO: 1528918 - RNA, 19 nt, Homo sapiens
  misc_RNA (1)...(19): siRNA sense strand
ucaaugacgccacugaaag

SEQ ID NO: 1528919 - RNA, 19 nt, Homo sapiens
  misc_RNA (1)...(19): siRNA sense strand
gugcaagccaguggaauga

SEQ ID NO: 1528920 - RNA, 19 nt, Homo sapiens
  misc_RNA (1)...(19): siRNA sense strand
gaguaaucccucaguuugu

SEQ ID NO: 1528921 - RNA, 19 nt, Homo sapiens
  misc_RNA (1)...(19): siRNA sense strand
cgggagccguugcuucuuc

SEQ ID NO: 1528922 - RNA, 19 nt, Homo sapiens
  misc_RNA (1)...(19): siRNA sense strand
ccacugaaagggaucaagu

SEQ ID NO: 1528923 - RNA, 19 nt, Homo sapiens
  misc_RNA (1)...(19): siRNA sense strand
gggagccguugcuucuuca

SEQ ID NO: 1528924 - RNA, 19 nt, Homo sapiens
  misc_RNA (1)...(19): siRNA sense strand
ccgaagucuugaauccauu

SEQ ID NO: 1528925 - RNA, 19 nt, Homo sapiens
  misc_RNA (1)...(19): siRNA sense strand
ccacagauuggacagauac

SEQ ID NO: 1528926 - RNA, 19 nt, Homo sapiens
  misc_RNA (1)...(19): siRNA sense strand
acgcuagcauccagaauag

SEQ ID NO: 1528927 - RNA, 19 nt, Homo sapiens
  misc_RNA (1)...(19): siRNA sense strand
acaaaggcuguuagagaaa

SEQ ID NO: 1528928 - RNA, 19 nt, Homo sapiens
  misc_RNA (1)...(19): siRNA sense strand
aacgcuagcauccagaaua

SEQ ID NO: 1528929 - RNA, 19 nt, Homo sapiens
  misc_RNA (1)...(19): siRNA sense strand
uugaaacugucuuguacug

SEQ ID NO: 1528930 - RNA, 19 nt, Homo sapiens
  misc_RNA (1)...(19): siRNA sense strand
agauuggacagauacagua

SEQ ID NO: 1528931 - RNA, 19 nt, Homo sapiens
  misc_RNA (1)...(19): siRNA sense strand
gcugggacaaaggcuguua

SEQ ID NO: 1528932 - RNA, 19 nt, Homo sapiens
  misc_RNA (1)...(19): siRNA sense strand
caaugacgccacugaaagg

SEQ ID NO: 1528933 - RNA, 19 nt, Homo sapiens
  misc_RNA (1)...(19): siRNA sense strand
ccacuagaaagaucauuac

SEQ ID NO: 1528934 - RNA, 19 nt, Homo sapiens
  misc_RNA (1)...(19): siRNA sense strand
aauucagucuccaacagaa

SEQ ID NO: 1528935 - RNA, 19 nt, Homo sapiens
  misc_RNA (1)...(19): siRNA sense strand
cagcucugauuccugaagu

SEQ ID NO: 1528936 - RNA, 19 nt, Homo sapiens
  misc_RNA (1)...(19): siRNA sense strand
aggaguaaucccucaguuu

SEQ ID NO: 1528937 - RNA, 19 nt, Homo sapiens
  misc_RNA (1)...(19): siRNA sense strand
cccgaagucuugaauccau

SEQ ID NO: 1528938 - RNA, 19 nt, Homo sapiens
  misc_RNA (1)...(19): siRNA sense strand
ccaacagaagaaacagaaa

SEQ ID NO: 1528939 - RNA, 19 nt, Homo sapiens
  misc_RNA (1)...(19): siRNA sense strand
cauccagaauagugcuguu

SEQ ID NO: 1528940 - RNA, 19 nt, Homo sapiens
  misc_RNA (1)...(19): siRNA sense strand
agucuugaauccauuaagg

SEQ ID NO: 1528941 - RNA, 19 nt, Homo sapiens
  misc_RNA (1)...(19): siRNA sense strand
aaauucagucuccaacaga

SEQ ID NO: 1528942 - RNA, 19 nt, Homo sapiens
  misc_RNA (1)...(19): siRNA sense strand
caacagcaucaauggaaac

SEQ ID NO: 1528943 - RNA, 19 nt, Homo sapiens
  misc_RNA (1)...(19): siRNA sense strand
gauagaagccuuugucugu

SEQ ID NO: 1528944 - RNA, 19 nt, Homo sapiens
  misc_RNA (1)...(19): siRNA sense strand
gagccaggaugaaauguca

SEQ ID NO: 1528945 - RNA, 19 nt, Homo sapiens
  misc_RNA (1)...(19): siRNA sense strand
cgacggagacugcuucaug

SEQ ID NO: 1528946 - RNA, 19 nt, Homo sapiens
  misc_RNA (1)...(19): siRNA sense strand
cagaggcagacaccuauua

SEQ ID NO: 1528947 - RNA, 19 nt, Homo sapiens
  misc_RNA (1)...(19): siRNA sense strand
uuacagagccaggaugaaa

SEQ ID NO: 1528948 - RNA, 19 nt, Homo sapiens
  misc_RNA (1)...(19): siRNA sense strand
gcaagugggcuggaacaug

SEQ ID NO: 1528949 - RNA, 19 nt, Homo sapiens
  misc_RNA (1)...(19): siRNA sense strand
gggcuuggcguccuuuguu

SEQ ID NO: 1528950 - RNA, 19 nt, Homo sapiens
  misc_RNA (1)...(19): siRNA sense strand
gaacaggaaggagaguuuc

SEQ ID NO: 1528951 - RNA, 19 nt, Homo sapiens
  misc_RNA (1)...(19): siRNA sense strand
ccauggacgucucaacauc

SEQ ID NO: 1528952 - RNA, 19 nt, Homo sapiens
  misc_RNA (1)...(19): siRNA sense strand
ggaaggagaguuucuugcu

SEQ ID NO: 1528953 - RNA, 19 nt, Homo sapiens
  misc_RNA (1)...(19): siRNA sense strand
ggcagacaccuauuacaga

SEQ ID NO: 1528954 - RNA, 19 nt, Homo sapiens
  misc_RNA (1)...(19): siRNA sense strand
ugaacaggaaggagaguuu

SEQ ID NO: 1528955 - RNA, 19 nt, Homo sapiens
  misc_RNA (1)...(19): siRNA sense strand
ggagugcucgugcgucugu

SEQ ID NO: 1528956 - RNA, 19 nt, Homo sapiens
  misc_RNA (1)...(19): siRNA sense strand
gaaguggucagccuauggu

SEQ ID NO: 1528957 - RNA, 19 nt, Homo sapiens
  misc_RNA (1)...(19): siRNA sense strand
guggucagccuaugguuug

SEQ ID NO: 1528958 - RNA, 19 nt, Homo sapiens
  misc_RNA (1)...(19): siRNA sense strand
agacaaucguccccuauaa

SEQ ID NO: 1528959 - RNA, 19 nt, Homo sapiens
  misc_RNA (1)...(19): siRNA sense strand
gaggucaacgggaagacaa

SEQ ID NO: 1528960 - RNA, 19 nt, Homo sapiens
  misc_RNA (1)...(19): siRNA sense strand
ugucucaggcugcuucaaa

SEQ ID NO: 1528961 - RNA, 19 nt, Homo sapiens
  misc_RNA (1)...(19): siRNA sense strand
ggcuuggcguccuuuguug

SEQ ID NO: 1528962 - RNA, 19 nt, Homo sapiens
  misc_RNA (1)...(19): siRNA sense strand
cuucagaggcagacaccua

SEQ ID NO: 1528963 - RNA, 19 nt, Homo sapiens
  misc_RNA (1)...(19): siRNA sense strand
caggaaggagaguuucuug

SEQ ID NO: 1528964 - RNA, 19 nt, Homo sapiens
  misc_RNA (1)...(19): siRNA sense strand
gcuucauggugucuucaga

SEQ ID NO: 1528965 - RNA, 19 nt, Homo sapiens
  misc_RNA (1)...(19): siRNA sense strand
uauuacagagccaggauga

SEQ ID NO: 1528966 - RNA, 19 nt, Homo sapiens
  misc_RNA (1)...(19): siRNA sense strand
aggcuggacuggagugaca

SEQ ID NO: 1528967 - RNA, 19 nt, Homo sapiens
  misc_RNA (1)...(19): siRNA sense strand
acagagccaggaugaaaug

SEQ ID NO: 1528968 - RNA, 19 nt, Homo sapiens
  misc_RNA (1)...(19): siRNA sense strand
caacugagcuccauagauu

SEQ ID NO: 1528969 - RNA, 19 nt, Homo sapiens
  misc_RNA (1)...(19): siRNA sense strand
gaaauuggcuuccagaaau

SEQ ID NO: 1528970 - RNA, 19 nt, Homo sapiens
  misc_RNA (1)...(19): siRNA sense strand
gaacaucucucuccaagga

SEQ ID NO: 1528971 - RNA, 19 nt, Homo sapiens
  misc_RNA (1)...(19): siRNA sense strand
ggaccuagcugggaacuua

SEQ ID NO: 1528972 - RNA, 19 nt, Homo sapiens
  misc_RNA (1)...(19): siRNA sense strand
gaacugaaguccaucuguu

SEQ ID NO: 1528973 - RNA, 19 nt, Homo sapiens
  misc_RNA (1)...(19): siRNA sense strand
ggaauaaucuggcccacuu

SEQ ID NO: 1528974 - RNA, 19 nt, Homo sapiens
  misc_RNA (1)...(19): siRNA sense strand
gaaaucgacuccuucaugu

SEQ ID NO: 1528975 - RNA, 19 nt, Homo sapiens
  misc_RNA (1)...(19): siRNA sense strand
ccacgaagaucgacagugu

SEQ ID NO: 1528976 - RNA, 19 nt, Homo sapiens
  misc_RNA (1)...(19): siRNA sense strand
gaugagaucacggauauaa

SEQ ID NO: 1528977 - RNA, 19 nt, Homo sapiens
  misc_RNA (1)...(19): siRNA sense strand
gaagauggaccacgucaug

SEQ ID NO: 1528978 - RNA, 19 nt, Homo sapiens
  misc_RNA (1)...(19): siRNA sense strand
ucacaaccuugcucuauga

SEQ ID NO: 1528979 - RNA, 19 nt, Homo sapiens
  misc_RNA (1)...(19): siRNA sense strand
gcagauguaugaccugauc

SEQ ID NO: 1528980 - RNA, 19 nt, Homo sapiens
  misc_RNA (1)...(19): siRNA sense strand
uaccagaauucuacaagua

SEQ ID NO: 1528981 - RNA, 19 nt, Homo sapiens
  misc_RNA (1)...(19): siRNA sense strand
cagcuguucuccauuauga

SEQ ID NO: 1528982 - RNA, 19 nt, Homo sapiens
  misc_RNA (1)...(19): siRNA sense strand
gcucaggaaguaucucuua

SEQ ID NO: 1528983 - RNA, 19 nt, Homo sapiens
  misc_RNA (1)...(19): siRNA sense strand
guccaucuguuguauaauu

SEQ ID NO: 1528984 - RNA, 19 nt, Homo sapiens
  misc_RNA (1)...(19): siRNA sense strand
agaaaaggcugucugauuu

SEQ ID NO: 1528985 - RNA, 19 nt, Homo sapiens
  misc_RNA (1)...(19): siRNA sense strand
uaaauaauaccacccaguu

SEQ ID NO: 1528986 - RNA, 19 nt, Homo sapiens
  misc_RNA (1)...(19): siRNA sense strand
ccaaucacagcaagcauua

SEQ ID NO: 1528987 - RNA, 19 nt, Homo sapiens
  misc_RNA (1)...(19): siRNA sense strand
cgaaauacaagcaccauug

SEQ ID NO: 1528988 - RNA, 19 nt, Homo sapiens
  misc_RNA (1)...(19): siRNA sense strand
cgaugcaucugaacgcuuu

SEQ ID NO: 1528989 - RNA, 19 nt, Homo sapiens
  misc_RNA (1)...(19): siRNA sense strand
gagaucacggauauaaaua

SEQ ID NO: 1528990 - RNA, 19 nt, Homo sapiens
  misc_RNA (1)...(19): siRNA sense strand
ucgaugagaucacggauau

SEQ ID NO: 1528991 - RNA, 19 nt, Homo sapiens
  misc_RNA (1)...(19): siRNA sense strand
caaggacacucccaaaucg

SEQ ID NO: 1528992 - RNA, 19 nt, Homo sapiens
  misc_RNA (1)...(19): siRNA sense strand
ugggagaaguuacgugaaa

SEQ ID NO: 1528993 - RNA, 19 nt, Homo sapiens
  misc_RNA (1)...(19): siRNA sense strand
gaugagaauuucgaugugu

SEQ ID NO: 1528994 - RNA, 19 nt, Homo sapiens
  misc_RNA (1)...(19): siRNA sense strand
gcgauggccugaacuacau

SEQ ID NO: 1528995 - RNA, 19 nt, Homo sapiens
  misc_RNA (1)...(19): siRNA sense strand
aaagcgaacugacucuguu

SEQ ID NO: 1528996 - RNA, 19 nt, Homo sapiens
  misc_RNA (1)...(19): siRNA sense strand
gaaguccaucuguuguaua

SEQ ID NO: 1528997 - RNA, 19 nt, Homo sapiens
  misc_RNA (1)...(19): siRNA sense strand
gcaagcauuaugaccagua

SEQ ID NO: 1528998 - RNA, 19 nt, Homo sapiens
  misc_RNA (1)...(19): siRNA sense strand
ugaaauuggcuuccagaaa

SEQ ID NO: 1528999 - RNA, 19 nt, Homo sapiens
  misc_RNA (1)...(19): siRNA sense strand
ccacccaguuggccauauu

SEQ ID NO: 1529000 - RNA, 19 nt, Homo sapiens
  misc_RNA (1)...(19): siRNA sense strand
gaaagcgaacugacucugu

SEQ ID NO: 1529001 - RNA, 19 nt, Homo sapiens
  misc_RNA (1)...(19): siRNA sense strand
guagcuacccgaaauacaa

SEQ ID NO: 1529002 - RNA, 19 nt, Homo sapiens
  misc_RNA (1)...(19): siRNA sense strand
gcaacacgguccugaagac

SEQ ID NO: 1529003 - RNA, 19 nt, Homo sapiens
  misc_RNA (1)...(19): siRNA sense strand
ugaaagcgauggccugaac

SEQ ID NO: 1529004 - RNA, 19 nt, Homo sapiens
  misc_RNA (1)...(19): siRNA sense strand
cuaagacgccacuaucaaa

SEQ ID NO: 1529005 - RNA, 19 nt, Homo sapiens
  misc_RNA (1)...(19): siRNA sense strand
gcaccuacaucugcgaaca

SEQ ID NO: 1529006 - RNA, 19 nt, Homo sapiens
  misc_RNA (1)...(19): siRNA sense strand
aaguccaucuguuguauaa

SEQ ID NO: 1529007 - RNA, 19 nt, Homo sapiens
  misc_RNA (1)...(19): siRNA sense strand
caagaccgaauuccagaaa

SEQ ID NO: 1529008 - RNA, 19 nt, Homo sapiens
  misc_RNA (1)...(19): siRNA sense strand
gaacuacauucccaaaauc

SEQ ID NO: 1529009 - RNA, 19 nt, Homo sapiens
  misc_RNA (1)...(19): siRNA sense strand
uggaagaaaucgacuccuu

SEQ ID NO: 1529010 - RNA, 19 nt, Homo sapiens
  misc_RNA (1)...(19): siRNA sense strand
ugagaucacggauauaaau

SEQ ID NO: 1529011 - RNA, 19 nt, Homo sapiens
  misc_RNA (1)...(19): siRNA sense strand
gcacgaggagcuccagaug

SEQ ID NO: 1529012 - RNA, 19 nt, Homo sapiens
  misc_RNA (1)...(19): siRNA sense strand
guccaaagaauauaaccua

SEQ ID NO: 1529013 - RNA, 19 nt, Homo sapiens
  misc_RNA (1)...(19): siRNA sense strand
agaaaucgacuccuucaug

SEQ ID NO: 1529014 - RNA, 19 nt, Homo sapiens
  misc_RNA (1)...(19): siRNA sense strand
ugaaguccaucuguuguau

SEQ ID NO: 1529015 - RNA, 19 nt, Homo sapiens
  misc_RNA (1)...(19): siRNA sense strand
gaugguggaugccaauaac

SEQ ID NO: 1529016 - RNA, 19 nt, Homo sapiens
  misc_RNA (1)...(19): siRNA sense strand
gugcggaacugaaguccau

SEQ ID NO: 1529017 - RNA, 19 nt, Homo sapiens
  misc_RNA (1)...(19): siRNA sense strand
caagcauuaugaccaguau

SEQ ID NO: 1529018 - RNA, 19 nt, Homo sapiens
  misc_RNA (1)...(19): siRNA sense strand
ccaaggacacucccaaauc

SEQ ID NO: 1529019 - RNA, 19 nt, Homo sapiens
  misc_RNA (1)...(19): siRNA sense strand
gccaauaacgggcuuguca

SEQ ID NO: 1529020 - RNA, 19 nt, Homo sapiens
  misc_RNA (1)...(19): siRNA sense strand
gacaugacgaugcaucuga

SEQ ID NO: 1529021 - RNA, 19 nt, Homo sapiens
  misc_RNA (1)...(19): siRNA sense strand
gcaagggugcggaacugaa

SEQ ID NO: 1529022 - RNA, 19 nt, Homo sapiens
  misc_RNA (1)...(19): siRNA sense strand
ccagugggauucuguacuc

SEQ ID NO: 1529023 - RNA, 19 nt, Homo sapiens
  misc_RNA (1)...(19): siRNA sense strand
gcuguucuccauuaugaaa

SEQ ID NO: 1529024 - RNA, 19 nt, Homo sapiens
  misc_RNA (1)...(19): siRNA sense strand
acacgguccugaagacgaa

SEQ ID NO: 1529025 - RNA, 19 nt, Homo sapiens
  misc_RNA (1)...(19): siRNA sense strand
cauauucuaucgcaaucga

SEQ ID NO: 1529026 - RNA, 19 nt, Homo sapiens
  misc_RNA (1)...(19): siRNA sense strand
aaggcugucugauuucaaa

SEQ ID NO: 1529027 - RNA, 19 nt, Homo sapiens
  misc_RNA (1)...(19): siRNA sense strand
ugaaguccgugaacuggau

SEQ ID NO: 1529028 - RNA, 19 nt, Homo sapiens
  misc_RNA (1)...(19): siRNA sense strand
agacucauuugacgaggaa

SEQ ID NO: 1529029 - RNA, 19 nt, Homo sapiens
  misc_RNA (1)...(19): siRNA sense strand
gaaauacaagcaccauugc

SEQ ID NO: 1529030 - RNA, 19 nt, Homo sapiens
  misc_RNA (1)...(19): siRNA sense strand
ugucugauuucaaacucua

SEQ ID NO: 1529031 - RNA, 19 nt, Homo sapiens
  misc_RNA (1)...(19): siRNA sense strand
gaauaaucuggcccacuuu

SEQ ID NO: 1529032 - RNA, 19 nt, Homo sapiens
  misc_RNA (1)...(19): siRNA sense strand
aaagaaugcgugacgagaa

SEQ ID NO: 1529033 - RNA, 19 nt, Homo sapiens
  misc_RNA (1)...(19): siRNA sense strand
gcaccauugcgcaaagauu

SEQ ID NO: 1529034 - RNA, 19 nt, Homo sapiens
  misc_RNA (1)...(19): siRNA sense strand
aaauuggcuuccagaaaug

SEQ ID NO: 1529035 - RNA, 19 nt, Homo sapiens
  misc_RNA (1)...(19): siRNA sense strand
uaaccuaagacgccacuau

SEQ ID NO: 1529036 - RNA, 19 nt, Homo sapiens
  misc_RNA (1)...(19): siRNA sense strand
caucugaacgcuuugaaca

SEQ ID NO: 1529037 - RNA, 19 nt, Homo sapiens
  misc_RNA (1)...(19): siRNA sense strand
gaaguccgugaacuggaua

SEQ ID NO: 1529038 - RNA, 19 nt, Homo sapiens
  misc_RNA (1)...(19): siRNA sense strand
ucauggacgugguagugaa

SEQ ID NO: 1529039 - RNA, 19 nt, Homo sapiens
  misc_RNA (1)...(19): siRNA sense strand
cgaugagaauuucgaugug

SEQ ID NO: 1529040 - RNA, 19 nt, Homo sapiens
  misc_RNA (1)...(19): siRNA sense strand
gaagacgaaauacgacaag

SEQ ID NO: 1529041 - RNA, 19 nt, Homo sapiens
  misc_RNA (1)...(19): siRNA sense strand
caaaucgucacgcagaugu

SEQ ID NO: 1529042 - RNA, 19 nt, Homo sapiens
  misc_RNA (1)...(19): siRNA sense strand
guucacaaccuugcucuau

SEQ ID NO: 1529043 - RNA, 19 nt, Homo sapiens
  misc_RNA (1)...(19): siRNA sense strand
ucugaacgcuuugaacauc

SEQ ID NO: 1529044 - RNA, 19 nt, Homo sapiens
  misc_RNA (1)...(19): siRNA sense strand
gcucccaguuaaaggauuc

SEQ ID NO: 1529045 - RNA, 19 nt, Homo sapiens
  misc_RNA (1)...(19): siRNA sense strand
caagcaccauugcgcaaag

SEQ ID NO: 1529046 - RNA, 19 nt, Homo sapiens
  misc_RNA (1)...(19): siRNA sense strand
ccaguuggccauauucauc

SEQ ID NO: 1529047 - RNA, 19 nt, Homo sapiens
  misc_RNA (1)...(19): siRNA sense strand
ucgaauccuuggaagaaau

SEQ ID NO: 1529048 - RNA, 19 nt, Homo sapiens
  misc_RNA (1)...(19): siRNA sense strand
ggaacugaaguccaucugu

SEQ ID NO: 1529049 - RNA, 19 nt, Homo sapiens
  misc_RNA (1)...(19): siRNA sense strand
aagaaugcgugacgagaag

SEQ ID NO: 1529050 - RNA, 19 nt, Homo sapiens
  misc_RNA (1)...(19): siRNA sense strand
acaugacgaugcaucugaa

SEQ ID NO: 1529051 - RNA, 19 nt, Homo sapiens
  misc_RNA (1)...(19): siRNA sense strand
agaccuggccuucuugguu

SEQ ID NO: 1529052 - RNA, 19 nt, Homo sapiens
  misc_RNA (1)...(19): siRNA sense strand
accaguauauggaaagaau

SEQ ID NO: 1529053 - RNA, 19 nt, Homo sapiens
  misc_RNA (1)...(19): siRNA sense strand
ggaacucaagaccgaauuc

SEQ ID NO: 1529054 - RNA, 19 nt, Homo sapiens
  misc_RNA (1)...(19): siRNA sense strand
ugaacuacauucccaaaau

SEQ ID NO: 1529055 - RNA, 19 nt, Homo sapiens
  misc_RNA (1)...(19): siRNA sense strand
ccuaagacgccacuaucaa

SEQ ID NO: 1529056 - RNA, 19 nt, Homo sapiens
  misc_RNA (1)...(19): siRNA sense strand
cgauguguccgaagaacuu

SEQ ID NO: 1529057 - RNA, 19 nt, Homo sapiens
  misc_RNA (1)...(19): siRNA sense strand
ccaaagaauauaaccuaag

SEQ ID NO: 1529058 - RNA, 19 nt, Homo sapiens
  misc_RNA (1)...(19): siRNA sense strand
uaugaccaguauauggaaa

SEQ ID NO: 1529059 - RNA, 19 nt, Homo sapiens
  misc_RNA (1)...(19): siRNA sense strand
guagugaaguccgugaacu

SEQ ID NO: 1529060 - RNA, 19 nt, Homo sapiens
  misc_RNA (1)...(19): siRNA sense strand
ggcauauucuaucgcaauc

SEQ ID NO: 1529061 - RNA, 19 nt, Homo sapiens
  misc_RNA (1)...(19): siRNA sense strand
caaggugggaauaccagaa

SEQ ID NO: 1529062 - RNA, 19 nt, Homo sapiens
  misc_RNA (1)...(19): siRNA sense strand
ugaccaguauauggaaaga

SEQ ID NO: 1529063 - RNA, 19 nt, Homo sapiens
  misc_RNA (1)...(19): siRNA sense strand
aaucacagcaagcauuaug

SEQ ID NO: 1529064 - RNA, 19 nt, Homo sapiens
  misc_RNA (1)...(19): siRNA sense strand
uccgagaccuggccuucuu

SEQ ID NO: 1529065 - RNA, 19 nt, Homo sapiens
  misc_RNA (1)...(19): siRNA sense strand
caauaacgggcuugucaca

SEQ ID NO: 1529066 - RNA, 19 nt, Homo sapiens
  misc_RNA (1)...(19): siRNA sense strand
augguagccuccuguacua

SEQ ID NO: 1529067 - RNA, 19 nt, Homo sapiens
  misc_RNA (1)...(19): siRNA sense strand
aaucgacuccuucauguca

SEQ ID NO: 1529068 - RNA, 19 nt, Homo sapiens
  misc_RNA (1)...(19): siRNA sense strand
caacugagcuccauagauu

SEQ ID NO: 1529069 - RNA, 19 nt, Homo sapiens
  misc_RNA (1)...(19): siRNA sense strand
gaaauuggcuuccagaaau

SEQ ID NO: 1529070 - RNA, 19 nt, Homo sapiens
  misc_RNA (1)...(19): siRNA sense strand
gaacaucucucuccaagga

SEQ ID NO: 1529071 - RNA, 19 nt, Homo sapiens
  misc_RNA (1)...(19): siRNA sense strand
ggaccuagcugggaacuua

SEQ ID NO: 1529072 - RNA, 19 nt, Homo sapiens
  misc_RNA (1)...(19): siRNA sense strand
gaacugaaguccaucuguu

SEQ ID NO: 1529073 - RNA, 19 nt, Homo sapiens
  misc_RNA (1)...(19): siRNA sense strand
ggaauaaucuggcccacuu

SEQ ID NO: 1529074 - RNA, 19 nt, Homo sapiens
  misc_RNA (1)...(19): siRNA sense strand
gaaagauuaucaagcauug

SEQ ID NO: 1529075 - RNA, 19 nt, Homo sapiens
  misc_RNA (1)...(19): siRNA sense strand
caacaugucucauaugcaa

SEQ ID NO: 1529076 - RNA, 19 nt, Homo sapiens
  misc_RNA (1)...(19): siRNA sense strand
gaaaucgacuccuucaugu

SEQ ID NO: 1529077 - RNA, 19 nt, Homo sapiens
  misc_RNA (1)...(19): siRNA sense strand
ggagagagcguauuucuuc

SEQ ID NO: 1529078 - RNA, 19 nt, Homo sapiens
  misc_RNA (1)...(19): siRNA sense strand
ccacgaagaucgacagugu

SEQ ID NO: 1529079 - RNA, 19 nt, Homo sapiens
  misc_RNA (1)...(19): siRNA sense strand
gaugagaucacggauauaa

SEQ ID NO: 1529080 - RNA, 19 nt, Homo sapiens
  misc_RNA (1)...(19): siRNA sense strand
gaagauggaccacgucaug

SEQ ID NO: 1529081 - RNA, 19 nt, Homo sapiens
  misc_RNA (1)...(19): siRNA sense strand
ucacaaccuugcucuauga

SEQ ID NO: 1529082 - RNA, 19 nt, Homo sapiens
  misc_RNA (1)...(19): siRNA sense strand
aaacaaagcaugucugugu

SEQ ID NO: 1529083 - RNA, 19 nt, Homo sapiens
  misc_RNA (1)...(19): siRNA sense strand
uaccagaauucuacaagua

SEQ ID NO: 1529084 - RNA, 19 nt, Homo sapiens
  misc_RNA (1)...(19): siRNA sense strand
gcagauguaugaccugauc

SEQ ID NO: 1529085 - RNA, 19 nt, Homo sapiens
  misc_RNA (1)...(19): siRNA sense strand
cagcuguucuccauuauga

SEQ ID NO: 1529086 - RNA, 19 nt, Homo sapiens
  misc_RNA (1)...(19): siRNA sense strand
ggaaagauuaucaagcauu

SEQ ID NO: 1529087 - RNA, 19 nt, Homo sapiens
  misc_RNA (1)...(19): siRNA sense strand
guccaucuguuguauaauu

SEQ ID NO: 1529088 - RNA, 19 nt, Homo sapiens
  misc_RNA (1)...(19): siRNA sense strand
gcucaggaaguaucucuua

SEQ ID NO: 1529089 - RNA, 19 nt, Homo sapiens
  misc_RNA (1)...(19): siRNA sense strand
gcaugucuguguccaaaga

SEQ ID NO: 1529090 - RNA, 19 nt, Homo sapiens
  misc_RNA (1)...(19): siRNA sense strand
agaaaaggcugucugauuu

SEQ ID NO: 1529091 - RNA, 19 nt, Homo sapiens
  misc_RNA (1)...(19): siRNA sense strand
cagcuaagagaacaaguua

SEQ ID NO: 1529092 - RNA, 19 nt, Homo sapiens
  misc_RNA (1)...(19): siRNA sense strand
uaaauaauaccacccaguu

SEQ ID NO: 1529093 - RNA, 19 nt, Homo sapiens
  misc_RNA (1)...(19): siRNA sense strand
gcuaagagaacaaguuaau

SEQ ID NO: 1529094 - RNA, 19 nt, Homo sapiens
  misc_RNA (1)...(19): siRNA sense strand
cgaaauacaagcaccauug

SEQ ID NO: 1529095 - RNA, 19 nt, Homo sapiens
  misc_RNA (1)...(19): siRNA sense strand
cgaugcaucugaacgcuuu

SEQ ID NO: 1529096 - RNA, 19 nt, Homo sapiens
  misc_RNA (1)...(19): siRNA sense strand
gagaucacggauauaaaua

SEQ ID NO: 1529097 - RNA, 19 nt, Homo sapiens
  misc_RNA (1)...(19): siRNA sense strand
ucgaugagaucacggauau

SEQ ID NO: 1529098 - RNA, 19 nt, Homo sapiens
  misc_RNA (1)...(19): siRNA sense strand
ccaaucacagcaagcauua

SEQ ID NO: 1529099 - RNA, 19 nt, Homo sapiens
  misc_RNA (1)...(19): siRNA sense strand
acaaguuaaugaccucuuu

SEQ ID NO: 1529100 - RNA, 19 nt, Homo sapiens
  misc_RNA (1)...(19): siRNA sense strand
aaggaaagauuaucaagca

SEQ ID NO: 1529101 - RNA, 19 nt, Homo sapiens
  misc_RNA (1)...(19): siRNA sense strand
gcaaacaaagcaugucugu

SEQ ID NO: 1529102 - RNA, 19 nt, Homo sapiens
  misc_RNA (1)...(19): siRNA sense strand
caaggacacucccaaaucg

SEQ ID NO: 1529103 - RNA, 19 nt, Homo sapiens
  misc_RNA (1)...(19): siRNA sense strand
ugggagaaguuacgugaaa

SEQ ID NO: 1529104 - RNA, 19 nt, Homo sapiens
  misc_RNA (1)...(19): siRNA sense strand
gaugagaauuucgaugugu

SEQ ID NO: 1529105 - RNA, 19 nt, Homo sapiens
  misc_RNA (1)...(19): siRNA sense strand
gcgauggccugaacuacau

SEQ ID NO: 1529106 - RNA, 19 nt, Homo sapiens
  misc_RNA (1)...(19): siRNA sense strand
aaagcgaacugacucuguu

SEQ ID NO: 1529107 - RNA, 19 nt, Homo sapiens
  misc_RNA (1)...(19): siRNA sense strand
gaaguccaucuguuguaua

SEQ ID NO: 1529108 - RNA, 19 nt, Homo sapiens
  misc_RNA (1)...(19): siRNA sense strand
uacagaauauuccaacaug

SEQ ID NO: 1529109 - RNA, 19 nt, Homo sapiens
  misc_RNA (1)...(19): siRNA sense strand
ugaaauuggcuuccagaaa

SEQ ID NO: 1529110 - RNA, 19 nt, Homo sapiens
  misc_RNA (1)...(19): siRNA sense strand
ccacccaguuggccauauu

SEQ ID NO: 1529111 - RNA, 19 nt, Homo sapiens
  misc_RNA (1)...(19): siRNA sense strand
gcaagcauuaugaccagua

SEQ ID NO: 1529112 - RNA, 19 nt, Homo sapiens
  misc_RNA (1)...(19): siRNA sense strand
ugucucauaugcaaacaaa

SEQ ID NO: 1529113 - RNA, 19 nt, Homo sapiens
  misc_RNA (1)...(19): siRNA sense strand
guagcuacccgaaauacaa

SEQ ID NO: 1529114 - RNA, 19 nt, Homo sapiens
  misc_RNA (1)...(19): siRNA sense strand
gcaacacgguccugaagac

SEQ ID NO: 1529115 - RNA, 19 nt, Homo sapiens
  misc_RNA (1)...(19): siRNA sense strand
gaaagcgaacugacucugu

SEQ ID NO: 1529116 - RNA, 19 nt, Homo sapiens
  misc_RNA (1)...(19): siRNA sense strand
cuaagacgccacuaucaaa

SEQ ID NO: 1529117 - RNA, 19 nt, Homo sapiens
  misc_RNA (1)...(19): siRNA sense strand
gcaccuacaucugcgaaca

SEQ ID NO: 1529118 - RNA, 19 nt, Homo sapiens
  misc_RNA (1)...(19): siRNA sense strand
caaguuaaugaccucuuua

SEQ ID NO: 1529119 - RNA, 19 nt, Homo sapiens
  misc_RNA (1)...(19): siRNA sense strand
ugaaagcgauggccugaac

SEQ ID NO: 1529120 - RNA, 19 nt, Homo sapiens
  misc_RNA (1)...(19): siRNA sense strand
aaguccaucuguuguauaa

SEQ ID NO: 1529121 - RNA, 19 nt, Homo sapiens
  misc_RNA (1)...(19): siRNA sense strand
caagaccgaauuccagaaa

SEQ ID NO: 1529122 - RNA, 19 nt, Homo sapiens
  misc_RNA (1)...(19): siRNA sense strand
gaacuacauucccaaaauc

SEQ ID NO: 1529123 - RNA, 19 nt, Homo sapiens
  misc_RNA (1)...(19): siRNA sense strand
uggaagaaaucgacuccuu

SEQ ID NO: 1529124 - RNA, 19 nt, Homo sapiens
  misc_RNA (1)...(19): siRNA sense strand
guccaaagaauauaaccua

SEQ ID NO: 1529125 - RNA, 19 nt, Homo sapiens
  misc_RNA (1)...(19): siRNA sense strand
gcacgaggagcuccagaug

SEQ ID NO: 1529126 - RNA, 19 nt, Homo sapiens
  misc_RNA (1)...(19): siRNA sense strand
ggcuugagcucaguaaugu

SEQ ID NO: 1529127 - RNA, 19 nt, Homo sapiens
  misc_RNA (1)...(19): siRNA sense strand
agaaaucgacuccuucaug

SEQ ID NO: 1529128 - RNA, 19 nt, Homo sapiens
  misc_RNA (1)...(19): siRNA sense strand
ugaaguccaucuguuguau

SEQ ID NO: 1529129 - RNA, 19 nt, Homo sapiens
  misc_RNA (1)...(19): siRNA sense strand
gaugguggaugccaauaac

SEQ ID NO: 1529130 - RNA, 19 nt, Homo sapiens
  misc_RNA (1)...(19): siRNA sense strand
ugagaucacggauauaaau

SEQ ID NO: 1529131 - RNA, 19 nt, Homo sapiens
  misc_RNA (1)...(19): siRNA sense strand
gauuaaacagcuaagagaa

SEQ ID NO: 1529132 - RNA, 19 nt, Homo sapiens
  misc_RNA (1)...(19): siRNA sense strand
caagcauuaugaccaguau

SEQ ID NO: 1529133 - RNA, 19 nt, Homo sapiens
  misc_RNA (1)...(19): siRNA sense strand
uuaaacagcuaagagaaca

SEQ ID NO: 1529134 - RNA, 19 nt, Homo sapiens
  misc_RNA (1)...(19): siRNA sense strand
gagaaggaaagauuaucaa

SEQ ID NO: 1529135 - RNA, 19 nt, Homo sapiens
  misc_RNA (1)...(19): siRNA sense strand
ccaaggacacucccaaauc

SEQ ID NO: 1529136 - RNA, 19 nt, Homo sapiens
  misc_RNA (1)...(19): siRNA sense strand
gugcggaacugaaguccau

SEQ ID NO: 1529137 - RNA, 19 nt, Homo sapiens
  misc_RNA (1)...(19): siRNA sense strand
aagcaugucuguguccaaa

SEQ ID NO: 1529138 - RNA, 19 nt, Homo sapiens
  misc_RNA (1)...(19): siRNA sense strand
ccaggagggccguguguuu

SEQ ID NO: 1529139 - RNA, 19 nt, Homo sapiens
  misc_RNA (1)...(19): siRNA sense strand
gccaauaacgggcuuguca

SEQ ID NO: 1529140 - RNA, 19 nt, Homo sapiens
  misc_RNA (1)...(19): siRNA sense strand
gacaugacgaugcaucuga

SEQ ID NO: 1529141 - RNA, 19 nt, Homo sapiens
  misc_RNA (1)...(19): siRNA sense strand
gcaagggugcggaacugaa

SEQ ID NO: 1529142 - RNA, 19 nt, Homo sapiens
  misc_RNA (1)...(19): siRNA sense strand
ccagugggauucuguacuc

SEQ ID NO: 1529143 - RNA, 19 nt, Homo sapiens
  misc_RNA (1)...(19): siRNA sense strand
gcuguucuccauuaugaaa

SEQ ID NO: 1529144 - RNA, 19 nt, Homo sapiens
  misc_RNA (1)...(19): siRNA sense strand
acacgguccugaagacgaa

SEQ ID NO: 1529145 - RNA, 19 nt, Homo sapiens
  misc_RNA (1)...(19): siRNA sense strand
guacagaauauuccaacau

SEQ ID NO: 1529146 - RNA, 19 nt, Homo sapiens
  misc_RNA (1)...(19): siRNA sense strand
aaggcugucugauuucaaa

SEQ ID NO: 1529147 - RNA, 19 nt, Homo sapiens
  misc_RNA (1)...(19): siRNA sense strand
ugacuguuccagauaauga

SEQ ID NO: 1529148 - RNA, 19 nt, Homo sapiens
  misc_RNA (1)...(19): siRNA sense strand
ugaaguccgugaacuggau

SEQ ID NO: 1529149 - RNA, 19 nt, Homo sapiens
  misc_RNA (1)...(19): siRNA sense strand
cauauucuaucgcaaucga

SEQ ID NO: 1529150 - RNA, 19 nt, Homo sapiens
  misc_RNA (1)...(19): siRNA sense strand
agacucauuugacgaggaa

SEQ ID NO: 1529151 - RNA, 19 nt, Homo sapiens
  misc_RNA (1)...(19): siRNA sense strand
gaaauacaagcaccauugc

SEQ ID NO: 1529152 - RNA, 19 nt, Homo sapiens
  misc_RNA (1)...(19): siRNA sense strand
ugucugauuucaaacucua

SEQ ID NO: 1529153 - RNA, 19 nt, Homo sapiens
  misc_RNA (1)...(19): siRNA sense strand
gggcuugagcucaguaaug

SEQ ID NO: 1529154 - RNA, 19 nt, Homo sapiens
  misc_RNA (1)...(19): siRNA sense strand
gaauaaucuggcccacuuu

SEQ ID NO: 1529155 - RNA, 19 nt, Homo sapiens
  misc_RNA (1)...(19): siRNA sense strand
gaaguacagaauauuccaa

SEQ ID NO: 1529156 - RNA, 19 nt, Homo sapiens
  misc_RNA (1)...(19): siRNA sense strand
gcaccauugcgcaaagauu

SEQ ID NO: 1529157 - RNA, 19 nt, Homo sapiens
  misc_RNA (1)...(19): siRNA sense strand
aaauuggcuuccagaaaug

SEQ ID NO: 1529158 - RNA, 19 nt, Homo sapiens
  misc_RNA (1)...(19): siRNA sense strand
aaagaaugcgugacgagaa

SEQ ID NO: 1529159 - RNA, 19 nt, Homo sapiens
  misc_RNA (1)...(19): siRNA sense strand
ggagggccguguguuucaa

SEQ ID NO: 1529160 - RNA, 19 nt, Homo sapiens
  misc_RNA (1)...(19): siRNA sense strand
uaaccuaagacgccacuau

SEQ ID NO: 1529161 - RNA, 19 nt, Homo sapiens
  misc_RNA (1)...(19): siRNA sense strand
caucugaacgcuuugaaca

SEQ ID NO: 1529162 - RNA, 19 nt, Homo sapiens
  misc_RNA (1)...(19): siRNA sense strand
gaaguccgugaacuggaua

SEQ ID NO: 1529163 - RNA, 19 nt, Homo sapiens
  misc_RNA (1)...(19): siRNA sense strand
ucauggacgugguagugaa

SEQ ID NO: 1529164 - RNA, 19 nt, Homo sapiens
  misc_RNA (1)...(19): siRNA sense strand
guucacaaccuugcucuau

SEQ ID NO: 1529165 - RNA, 19 nt, Homo sapiens
  misc_RNA (1)...(19): siRNA sense strand
ugagaaggaaagauuauca

SEQ ID NO: 1529166 - RNA, 19 nt, Homo sapiens
  misc_RNA (1)...(19): siRNA sense strand
gaagacgaaauacgacaag

SEQ ID NO: 1529167 - RNA, 19 nt, Homo sapiens
  misc_RNA (1)...(19): siRNA sense strand
caaaucgucacgcagaugu

SEQ ID NO: 1529168 - RNA, 19 nt, Homo sapiens
  misc_RNA (1)...(19): siRNA sense strand
ggacaagaguuuccuccua

SEQ ID NO: 1529169 - RNA, 19 nt, Homo sapiens
  misc_RNA (1)...(19): siRNA sense strand
gaacguggaugaagacucu

SEQ ID NO: 1529170 - RNA, 19 nt, Homo sapiens
  misc_RNA (1)...(19): siRNA sense strand
gaggaaagcgcaaaggaaa

SEQ ID NO: 1529171 - RNA, 19 nt, Homo sapiens
  misc_RNA (1)...(19): siRNA sense strand
ggaaagcgcaaaggaaauu

SEQ ID NO: 1529172 - RNA, 19 nt, Homo sapiens
  misc_RNA (1)...(19): siRNA sense strand
gaaagcgcaaaggaaauua

SEQ ID NO: 1529173 - RNA, 19 nt, Homo sapiens
  misc_RNA (1)...(19): siRNA sense strand
gcgcaaaggaaauuacuga

SEQ ID NO: 1529174 - RNA, 19 nt, Homo sapiens
  misc_RNA (1)...(19): siRNA sense strand
gccacugcaucaucagaua

SEQ ID NO: 1529175 - RNA, 19 nt, Homo sapiens
  misc_RNA (1)...(19): siRNA sense strand
gcaaaggaaauuacugaag

SEQ ID NO: 1529176 - RNA, 19 nt, Homo sapiens
  misc_RNA (1)...(19): siRNA sense strand
ucaaguuccucaucuacga

SEQ ID NO: 1529177 - RNA, 19 nt, Homo sapiens
  misc_RNA (1)...(19): siRNA sense strand
uagaccgacuucugcagua

SEQ ID NO: 1529178 - RNA, 19 nt, Homo sapiens
  misc_RNA (1)...(19): siRNA sense strand
acgagaacguggaugaaga

SEQ ID NO: 1529179 - RNA, 19 nt, Homo sapiens
  misc_RNA (1)...(19): siRNA sense strand
ccacugcaucaucagauaa

SEQ ID NO: 1529180 - RNA, 19 nt, Homo sapiens
  misc_RNA (1)...(19): siRNA sense strand
ggacgaugccuuggaugga

SEQ ID NO: 1529181 - RNA, 19 nt, Homo sapiens
  misc_RNA (1)...(19): siRNA sense strand
ugaggaaagcgcaaaggaa

SEQ ID NO: 1529182 - RNA, 19 nt, Homo sapiens
  misc_RNA (1)...(19): siRNA sense strand
aaaggaaauuacugaaggu

SEQ ID NO: 1529183 - RNA, 19 nt, Homo sapiens
  misc_RNA (1)...(19): siRNA sense strand
acaagaguuuccuccuaga

SEQ ID NO: 1529184 - RNA, 19 nt, Homo sapiens
  misc_RNA (1)...(19): siRNA sense strand
gaagcggaagcucaaguuc

SEQ ID NO: 1529185 - RNA, 19 nt, Homo sapiens
  misc_RNA (1)...(19): siRNA sense strand
gaagcucaaguuccucauc

SEQ ID NO: 1529186 - RNA, 19 nt, Homo sapiens
  misc_RNA (1)...(19): siRNA sense strand
guacgagaacguggaugaa

SEQ ID NO: 1529187 - RNA, 19 nt, Homo sapiens
  misc_RNA (1)...(19): siRNA sense strand
gagcugaggaaagcgcaaa

SEQ ID NO: 1529188 - RNA, 19 nt, Homo sapiens
  misc_RNA (1)...(19): siRNA sense strand
cccauucccuucugacuac

SEQ ID NO: 1529189 - RNA, 19 nt, Homo sapiens
  misc_RNA (1)...(19): siRNA sense strand
ugaagcggaagcucaaguu

SEQ ID NO: 1529190 - RNA, 19 nt, Homo sapiens
  misc_RNA (1)...(19): siRNA sense strand
cggcgaaguggacuacaaa

SEQ ID NO: 1529191 - RNA, 19 nt, Homo sapiens
  misc_RNA (1)...(19): siRNA sense strand
aagcucaaguuccucaucu

SEQ ID NO: 1529192 - RNA, 19 nt, Homo sapiens
  misc_RNA (1)...(19): siRNA sense strand
gcucaaguuccucaucuac

SEQ ID NO: 1529193 - RNA, 19 nt, Homo sapiens
  misc_RNA (1)...(19): siRNA sense strand
gcaguacgagaacguggau

SEQ ID NO: 1529194 - RNA, 19 nt, Homo sapiens
  misc_RNA (1)...(19): siRNA sense strand
gaucgacaucccggaguga

SEQ ID NO: 1529195 - RNA, 19 nt, Homo sapiens
  misc_RNA (1)...(19): siRNA sense strand
ggaaauagcacaaauaguu

SEQ ID NO: 1529196 - RNA, 19 nt, Homo sapiens
  misc_RNA (1)...(19): siRNA sense strand
gaagaauccucauacagua

SEQ ID NO: 1529197 - RNA, 19 nt, Homo sapiens
  misc_RNA (1)...(19): siRNA sense strand
caaugaagcuugaggauuu

SEQ ID NO: 1529198 - RNA, 19 nt, Homo sapiens
  misc_RNA (1)...(19): siRNA sense strand
uagcauaccuugcagauuu

SEQ ID NO: 1529199 - RNA, 19 nt, Homo sapiens
  misc_RNA (1)...(19): siRNA sense strand
caaaugggaugaugacuau

SEQ ID NO: 1529200 - RNA, 19 nt, Homo sapiens
  misc_RNA (1)...(19): siRNA sense strand
uaagauagcacuugaugua

SEQ ID NO: 1529201 - RNA, 19 nt, Homo sapiens
  misc_RNA (1)...(19): siRNA sense strand
aaagagagaucguagaaga

SEQ ID NO: 1529202 - RNA, 19 nt, Homo sapiens
  misc_RNA (1)...(19): siRNA sense strand
gcaaguaaauggauauugg

SEQ ID NO: 1529203 - RNA, 19 nt, Homo sapiens
  misc_RNA (1)...(19): siRNA sense strand
aaagacagcucuagaaauc

SEQ ID NO: 1529204 - RNA, 19 nt, Homo sapiens
  misc_RNA (1)...(19): siRNA sense strand
gagagaaguuaucugcuuu

SEQ ID NO: 1529205 - RNA, 19 nt, Homo sapiens
  misc_RNA (1)...(19): siRNA sense strand
gcaaagacagcucuagaaa

SEQ ID NO: 1529206 - RNA, 19 nt, Homo sapiens
  misc_RNA (1)...(19): siRNA sense strand
gauauuggauccauuucuu

SEQ ID NO: 1529207 - RNA, 19 nt, Homo sapiens
  misc_RNA (1)...(19): siRNA sense strand
ccaaauacuuacucacauu

SEQ ID NO: 1529208 - RNA, 19 nt, Homo sapiens
  misc_RNA (1)...(19): siRNA sense strand
gaaguuaucugcuuuuguu

SEQ ID NO: 1529209 - RNA, 19 nt, Homo sapiens
  misc_RNA (1)...(19): siRNA sense strand
ucaauagccugaagcauau

SEQ ID NO: 1529210 - RNA, 19 nt, Homo sapiens
  misc_RNA (1)...(19): siRNA sense strand
caagagcaguaauuuaguu

SEQ ID NO: 1529211 - RNA, 19 nt, Homo sapiens
  misc_RNA (1)...(19): siRNA sense strand
gcaaaugggaugaugacua

SEQ ID NO: 1529212 - RNA, 19 nt, Homo sapiens
  misc_RNA (1)...(19): siRNA sense strand
ugaagaaauuggcauagaa

SEQ ID NO: 1529213 - RNA, 19 nt, Homo sapiens
  misc_RNA (1)...(19): siRNA sense strand
cuacauaccuuugugaguu

SEQ ID NO: 1529214 - RNA, 19 nt, Homo sapiens
  misc_RNA (1)...(19): siRNA sense strand
ggagaagaauccucauaca

SEQ ID NO: 1529215 - RNA, 19 nt, Homo sapiens
  misc_RNA (1)...(19): siRNA sense strand
gaauauaguguccuccuuu

SEQ ID NO: 1529216 - RNA, 19 nt, Homo sapiens
  misc_RNA (1)...(19): siRNA sense strand
uaaagacauugccuacaaa

SEQ ID NO: 1529217 - RNA, 19 nt, Homo sapiens
  misc_RNA (1)...(19): siRNA sense strand
ccacaagagcaguaauuua

SEQ ID NO: 1529218 - RNA, 19 nt, Homo sapiens
  misc_RNA (1)...(19): siRNA sense strand
gaaaugagccaggauaucu

SEQ ID NO: 1529219 - RNA, 19 nt, Homo sapiens
  misc_RNA (1)...(19): siRNA sense strand
caaagccaguccucuuaaa

SEQ ID NO: 1529220 - RNA, 19 nt, Homo sapiens
  misc_RNA (1)...(19): siRNA sense strand
uacaguagcugaaaaguua

SEQ ID NO: 1529221 - RNA, 19 nt, Homo sapiens
  misc_RNA (1)...(19): siRNA sense strand
gaggauacuuuauuacaag

SEQ ID NO: 1529222 - RNA, 19 nt, Homo sapiens
  misc_RNA (1)...(19): siRNA sense strand
gggaugcucuguuuacugu

SEQ ID NO: 1529223 - RNA, 19 nt, Homo sapiens
  misc_RNA (1)...(19): siRNA sense strand
guauguggcucuguuugua

SEQ ID NO: 1529224 - RNA, 19 nt, Homo sapiens
  misc_RNA (1)...(19): siRNA sense strand
gauagcacuugauguaugu

SEQ ID NO: 1529225 - RNA, 19 nt, Homo sapiens
  misc_RNA (1)...(19): siRNA sense strand
gaauuucucuucugugaac

SEQ ID NO: 1529226 - RNA, 19 nt, Homo sapiens
  misc_RNA (1)...(19): siRNA sense strand
gcauuugugcgcuauauaa

SEQ ID NO: 1529227 - RNA, 19 nt, Homo sapiens
  misc_RNA (1)...(19): siRNA sense strand
cagaugaugugauccauuc

SEQ ID NO: 1529228 - RNA, 19 nt, Homo sapiens
  misc_RNA (1)...(19): siRNA sense strand
auaaagacauugccuacaa

SEQ ID NO: 1529229 - RNA, 19 nt, Homo sapiens
  misc_RNA (1)...(19): siRNA sense strand
gaaagcauuuggaguugca

SEQ ID NO: 1529230 - RNA, 19 nt, Homo sapiens
  misc_RNA (1)...(19): siRNA sense strand
gaagaaauuggcauagaau

SEQ ID NO: 1529231 - RNA, 19 nt, Homo sapiens
  misc_RNA (1)...(19): siRNA sense strand
gaaaggaauagauguguuc

SEQ ID NO: 1529232 - RNA, 19 nt, Homo sapiens
  misc_RNA (1)...(19): siRNA sense strand
gaugugauccauucuagaa

SEQ ID NO: 1529233 - RNA, 19 nt, Homo sapiens
  misc_RNA (1)...(19): siRNA sense strand
cguaucaauuugcguauuu

SEQ ID NO: 1529234 - RNA, 19 nt, Homo sapiens
  misc_RNA (1)...(19): siRNA sense strand
gcaacuacauaccuuugug

SEQ ID NO: 1529235 - RNA, 19 nt, Homo sapiens
  misc_RNA (1)...(19): siRNA sense strand
gaugaaaugagccaggaua

SEQ ID NO: 1529236 - RNA, 19 nt, Homo sapiens
  misc_RNA (1)...(19): siRNA sense strand
gaacacaguaucagcuaga

SEQ ID NO: 1529237 - RNA, 19 nt, Homo sapiens
  misc_RNA (1)...(19): siRNA sense strand
gcuuuaaucugagugauga

SEQ ID NO: 1529238 - RNA, 19 nt, Homo sapiens
  misc_RNA (1)...(19): siRNA sense strand
acaagcaucguaucaauuu

SEQ ID NO: 1529239 - RNA, 19 nt, Homo sapiens
  misc_RNA (1)...(19): siRNA sense strand
uagaaauccuuaugccauu

SEQ ID NO: 1529240 - RNA, 19 nt, Homo sapiens
  misc_RNA (1)...(19): siRNA sense strand
gagcaguaauuuaguugau

SEQ ID NO: 1529241 - RNA, 19 nt, Homo sapiens
  misc_RNA (1)...(19): siRNA sense strand
uaaaguggguauucagcuu

SEQ ID NO: 1529242 - RNA, 19 nt, Homo sapiens
  misc_RNA (1)...(19): siRNA sense strand
gcagguacccuuaucagau

SEQ ID NO: 1529243 - RNA, 19 nt, Homo sapiens
  misc_RNA (1)...(19): siRNA sense strand
gcaacuucuuccauggaua

SEQ ID NO: 1529244 - RNA, 19 nt, Homo sapiens
  misc_RNA (1)...(19): siRNA sense strand
ugagacaacugacauggau

SEQ ID NO: 1529245 - RNA, 19 nt, Homo sapiens
  misc_RNA (1)...(19): siRNA sense strand
acacuuaaaugaacucagu

SEQ ID NO: 1529246 - RNA, 19 nt, Homo sapiens
  misc_RNA (1)...(19): siRNA sense strand
gccaaauccuaauggaauu

SEQ ID NO: 1529247 - RNA, 19 nt, Homo sapiens
  misc_RNA (1)...(19): siRNA sense strand
gcuaguggccaaauccuaa

SEQ ID NO: 1529248 - RNA, 19 nt, Homo sapiens
  misc_RNA (1)...(19): siRNA sense strand
cauugcagcugaaauaaca

SEQ ID NO: 1529249 - RNA, 19 nt, Homo sapiens
  misc_RNA (1)...(19): siRNA sense strand
agagagaaguuaucugcuu

SEQ ID NO: 1529250 - RNA, 19 nt, Homo sapiens
  misc_RNA (1)...(19): siRNA sense strand
uuacaagcaucguaucaau

SEQ ID NO: 1529251 - RNA, 19 nt, Homo sapiens
  misc_RNA (1)...(19): siRNA sense strand
gagagaucguagaagaauu

SEQ ID NO: 1529252 - RNA, 19 nt, Homo sapiens
  misc_RNA (1)...(19): siRNA sense strand
cucaauagccugaagcaua

SEQ ID NO: 1529253 - RNA, 19 nt, Homo sapiens
  misc_RNA (1)...(19): siRNA sense strand
guugauggcuuugaaaaua

SEQ ID NO: 1529254 - RNA, 19 nt, Homo sapiens
  misc_RNA (1)...(19): siRNA sense strand
cagguacccuuaucagaug

SEQ ID NO: 1529255 - RNA, 19 nt, Homo sapiens
  misc_RNA (1)...(19): siRNA sense strand
gcagauuuauucaaacacu

SEQ ID NO: 1529256 - RNA, 19 nt, Homo sapiens
  misc_RNA (1)...(19): siRNA sense strand
ugaaaggaauagauguguu

SEQ ID NO: 1529257 - RNA, 19 nt, Homo sapiens
  misc_RNA (1)...(19): siRNA sense strand
gaaaccuugugcacuggaa

SEQ ID NO: 1529258 - RNA, 19 nt, Homo sapiens
  misc_RNA (1)...(19): siRNA sense strand
ugaggcaaguaaauggaua

SEQ ID NO: 1529259 - RNA, 19 nt, Homo sapiens
  misc_RNA (1)...(19): siRNA sense strand
cacaagagcaguaauuuag

SEQ ID NO: 1529260 - RNA, 19 nt, Homo sapiens
  misc_RNA (1)...(19): siRNA sense strand
gauggugccuccucuaugc

SEQ ID NO: 1529261 - RNA, 19 nt, Homo sapiens
  misc_RNA (1)...(19): siRNA sense strand
gugaaaccuugaaagcauu

SEQ ID NO: 1529262 - RNA, 19 nt, Homo sapiens
  misc_RNA (1)...(19): siRNA sense strand
caaagacagcucuagaaau

SEQ ID NO: 1529263 - RNA, 19 nt, Homo sapiens
  misc_RNA (1)...(19): siRNA sense strand
acugagggaugcucuguuu

SEQ ID NO: 1529264 - RNA, 19 nt, Homo sapiens
  misc_RNA (1)...(19): siRNA sense strand
gaucagagugaaaccuuga

SEQ ID NO: 1529265 - RNA, 19 nt, Homo sapiens
  misc_RNA (1)...(19): siRNA sense strand
ggccaaauccuaauggaau

SEQ ID NO: 1529266 - RNA, 19 nt, Homo sapiens
  misc_RNA (1)...(19): siRNA sense strand
agaaagagagaucguagaa

SEQ ID NO: 1529267 - RNA, 19 nt, Homo sapiens
  misc_RNA (1)...(19): siRNA sense strand
ccuugcagauuuauucaaa

SEQ ID NO: 1529268 - RNA, 19 nt, Homo sapiens
  misc_RNA (1)...(19): siRNA sense strand
caacuucuuccauggauau

SEQ ID NO: 1529269 - RNA, 19 nt, Homo sapiens
  misc_RNA (1)...(19): siRNA sense strand
gcagaggacugggaugaac

SEQ ID NO: 1529270 - RNA, 19 nt, Homo sapiens
  misc_RNA (1)...(19): siRNA sense strand
uaucguaguuacacauugu

SEQ ID NO: 1529271 - RNA, 19 nt, Homo sapiens
  misc_RNA (1)...(19): siRNA sense strand
guggugaggguaauaaauu

SEQ ID NO: 1529272 - RNA, 19 nt, Homo sapiens
  misc_RNA (1)...(19): siRNA sense strand
agagaucguagaagaauuu

SEQ ID NO: 1529273 - RNA, 19 nt, Homo sapiens
  misc_RNA (1)...(19): siRNA sense strand
agauagcacuugauguaug

SEQ ID NO: 1529274 - RNA, 19 nt, Homo sapiens
  misc_RNA (1)...(19): siRNA sense strand
cauaagauagcacuugaug

SEQ ID NO: 1529275 - RNA, 19 nt, Homo sapiens
  misc_RNA (1)...(19): siRNA sense strand
aggaauagauguguucaau

SEQ ID NO: 1529276 - RNA, 19 nt, Homo sapiens
  misc_RNA (1)...(19): siRNA sense strand
gaugaugugauccauucua

SEQ ID NO: 1529277 - RNA, 19 nt, Homo sapiens
  misc_RNA (1)...(19): siRNA sense strand
ggacaucauugaacaaaag

SEQ ID NO: 1529278 - RNA, 19 nt, Homo sapiens
  misc_RNA (1)...(19): siRNA sense strand
agaagaauccucauacagu

SEQ ID NO: 1529279 - RNA, 19 nt, Homo sapiens
  misc_RNA (1)...(19): siRNA sense strand
caacuacauaccuuuguga

SEQ ID NO: 1529280 - RNA, 19 nt, Homo sapiens
  misc_RNA (1)...(19): siRNA sense strand
ggcaaagacagcucuagaa

SEQ ID NO: 1529281 - RNA, 19 nt, Homo sapiens
  misc_RNA (1)...(19): siRNA sense strand
cauugcagcuauccaugaa

SEQ ID NO: 1529282 - RNA, 19 nt, Homo sapiens
  misc_RNA (1)...(19): siRNA sense strand
ucucuucugugaaccauug

SEQ ID NO: 1529283 - RNA, 19 nt, Homo sapiens
  misc_RNA (1)...(19): siRNA sense strand
ucaaagccaguccucuuaa

SEQ ID NO: 1529284 - RNA, 19 nt, Homo sapiens
  misc_RNA (1)...(19): siRNA sense strand
aaacgcaaaugggaugaug

SEQ ID NO: 1529285 - RNA, 19 nt, Homo sapiens
  misc_RNA (1)...(19): siRNA sense strand
uggugaggguaauaaauuu

SEQ ID NO: 1529286 - RNA, 19 nt, Homo sapiens
  misc_RNA (1)...(19): siRNA sense strand
cucaugcacuugucauaaa

SEQ ID NO: 1529287 - RNA, 19 nt, Homo sapiens
  misc_RNA (1)...(19): siRNA sense strand
gcacuggaaauagcacaaa

SEQ ID NO: 1529288 - RNA, 19 nt, Homo sapiens
  misc_RNA (1)...(19): siRNA sense strand
gccaaauacuuacucacau

SEQ ID NO: 1529289 - RNA, 19 nt, Homo sapiens
  misc_RNA (1)...(19): siRNA sense strand
caauuugcguauuuaugug

SEQ ID NO: 1529290 - RNA, 19 nt, Homo sapiens
  misc_RNA (1)...(19): siRNA sense strand
acagcaaguucuagaagau

SEQ ID NO: 1529291 - RNA, 19 nt, Homo sapiens
  misc_RNA (1)...(19): siRNA sense strand
cagacagcaugguggugua

SEQ ID NO: 1529292 - RNA, 19 nt, Homo sapiens
  misc_RNA (1)...(19): siRNA sense strand
ggccaaauacuuacucaca

SEQ ID NO: 1529293 - RNA, 19 nt, Homo sapiens
  misc_RNA (1)...(19): siRNA sense strand
ugauguauguggcucuguu

SEQ ID NO: 1529294 - RNA, 19 nt, Homo sapiens
  misc_RNA (1)...(19): siRNA sense strand
uaucaaagccaguccucuu

SEQ ID NO: 1529295 - RNA, 19 nt, Homo sapiens
  misc_RNA (1)...(19): siRNA sense strand
gcucaugccugcccuggua

SEQ ID NO: 1529296 - RNA, 19 nt, Homo sapiens
  misc_RNA (1)...(19): siRNA sense strand
cugggaagcugauccauuc

SEQ ID NO: 1529297 - RNA, 19 nt, Homo sapiens
  misc_RNA (1)...(19): siRNA sense strand
gcugggaagcugauccauu

SEQ ID NO: 1529298 - RNA, 19 nt, Homo sapiens
  misc_RNA (1)...(19): siRNA sense strand
ggucuacaaucggaugaca

SEQ ID NO: 1529299 - RNA, 19 nt, Homo sapiens
  misc_RNA (1)...(19): siRNA sense strand
gugacuuccuguuggucua

SEQ ID NO: 1529300 - RNA, 19 nt, Homo sapiens
  misc_RNA (1)...(19): siRNA sense strand
gccaggcguugcugcugaa

SEQ ID NO: 1529301 - RNA, 19 nt, Homo sapiens
  misc_RNA (1)...(19): siRNA sense strand
acaaucggaugacagaacu

SEQ ID NO: 1529302 - RNA, 19 nt, Homo sapiens
  misc_RNA (1)...(19): siRNA sense strand
caacagcaacugcgaaacc

SEQ ID NO: 1529303 - RNA, 19 nt, Homo sapiens
  misc_RNA (1)...(19): siRNA sense strand
gcagaaaugucuauuacug

SEQ ID NO: 1529304 - RNA, 19 nt, Homo sapiens
  misc_RNA (1)...(19): siRNA sense strand
gaagacacauuucgauucu

SEQ ID NO: 1529305 - RNA, 19 nt, Homo sapiens
  misc_RNA (1)...(19): siRNA sense strand
uguaagaggugcagaaaug

SEQ ID NO: 1529306 - RNA, 19 nt, Homo sapiens
  misc_RNA (1)...(19): siRNA sense strand
gaggauggaagacacauuu

SEQ ID NO: 1529307 - RNA, 19 nt, Homo sapiens
  misc_RNA (1)...(19): siRNA sense strand
ccaacaagcagccaguaua

SEQ ID NO: 1529308 - RNA, 19 nt, Homo sapiens
  misc_RNA (1)...(19): siRNA sense strand
ucacagagcaccucaacuu

SEQ ID NO: 1529309 - RNA, 19 nt, Homo sapiens
  misc_RNA (1)...(19): siRNA sense strand
ggaagacacauuucgauuc

SEQ ID NO: 1529310 - RNA, 19 nt, Homo sapiens
  misc_RNA (1)...(19): siRNA sense strand
gugcagaaaugucuauuac

SEQ ID NO: 1529311 - RNA, 19 nt, Homo sapiens
  misc_RNA (1)...(19): siRNA sense strand
ccuggaaccuggcacaauu

SEQ ID NO: 1529312 - RNA, 19 nt, Homo sapiens
  misc_RNA (1)...(19): siRNA sense strand
gcaauuagaagagaaagug

SEQ ID NO: 1529313 - RNA, 19 nt, Homo sapiens
  misc_RNA (1)...(19): siRNA sense strand
ggaacuggauacacacauc

SEQ ID NO: 1529314 - RNA, 19 nt, Homo sapiens
  misc_RNA (1)...(19): siRNA sense strand
ccugucagcuggauaauag

SEQ ID NO: 1529315 - RNA, 19 nt, Homo sapiens
  misc_RNA (1)...(19): siRNA sense strand
ggauuucgauguccucaag

SEQ ID NO: 1529316 - RNA, 19 nt, Homo sapiens
  misc_RNA (1)...(19): siRNA sense strand
agacacaccauccagauuu

SEQ ID NO: 1529317 - RNA, 19 nt, Homo sapiens
  misc_RNA (1)...(19): siRNA sense strand
gguauccucuuugcagauu

SEQ ID NO: 1529318 - RNA, 19 nt, Homo sapiens
  misc_RNA (1)...(19): siRNA sense strand
gacacaccauccagauuug

SEQ ID NO: 1529319 - RNA, 19 nt, Homo sapiens
  misc_RNA (1)...(19): siRNA sense strand
agacacauuucgauucugu

SEQ ID NO: 1529320 - RNA, 19 nt, Homo sapiens
  misc_RNA (1)...(19): siRNA sense strand
gaacuggauacacacauca

SEQ ID NO: 1529321 - RNA, 19 nt, Homo sapiens
  misc_RNA (1)...(19): siRNA sense strand
cguaucaggcuuuggauuu

SEQ ID NO: 1529322 - RNA, 19 nt, Homo sapiens
  misc_RNA (1)...(19): siRNA sense strand
ggucuaauccuuucauguc

SEQ ID NO: 1529323 - RNA, 19 nt, Homo sapiens
  misc_RNA (1)...(19): siRNA sense strand
ggugcagaaaugucuauua

SEQ ID NO: 1529324 - RNA, 19 nt, Homo sapiens
  misc_RNA (1)...(19): siRNA sense strand
cuauaagauuccuacauug

SEQ ID NO: 1529325 - RNA, 19 nt, Homo sapiens
  misc_RNA (1)...(19): siRNA sense strand
caacaagcagccaguauac

SEQ ID NO: 1529326 - RNA, 19 nt, Homo sapiens
  misc_RNA (1)...(19): siRNA sense strand
guaucaggcuuuggauuuc

SEQ ID NO: 1529327 - RNA, 19 nt, Homo sapiens
  misc_RNA (1)...(19): siRNA sense strand
ucacugccuuugggucuaa

SEQ ID NO: 1529328 - RNA, 19 nt, Homo sapiens
  misc_RNA (1)...(19): siRNA sense strand
cagauuugguggcggcauu

SEQ ID NO: 1529329 - RNA, 19 nt, Homo sapiens
  misc_RNA (1)...(19): siRNA sense strand
gcagacacaccauccagau

SEQ ID NO: 1529330 - RNA, 19 nt, Homo sapiens
  misc_RNA (1)...(19): siRNA sense strand
uuacagccaucaggaguug

SEQ ID NO: 1529331 - RNA, 19 nt, Homo sapiens
  misc_RNA (1)...(19): siRNA sense strand
gcugcuacuucgugacuau

SEQ ID NO: 1529332 - RNA, 19 nt, Homo sapiens
  misc_RNA (1)...(19): siRNA sense strand
ucgauguccucaagaaaug

SEQ ID NO: 1529333 - RNA, 19 nt, Homo sapiens
  misc_RNA (1)...(19): siRNA sense strand
ggaauggcuucuggucaca

SEQ ID NO: 1529334 - RNA, 19 nt, Homo sapiens
  misc_RNA (1)...(19): siRNA sense strand
gcuccugucagcuggauaa

SEQ ID NO: 1529335 - RNA, 19 nt, Homo sapiens
  misc_RNA (1)...(19): siRNA sense strand
ggaguugguauccucuuug

SEQ ID NO: 1529336 - RNA, 19 nt, Homo sapiens
  misc_RNA (1)...(19): siRNA sense strand
gaggguuugucaagagcuu

SEQ ID NO: 1529337 - RNA, 19 nt, Homo sapiens
  misc_RNA (1)...(19): siRNA sense strand
cuucgugacuauaagauuc

SEQ ID NO: 1529338 - RNA, 19 nt, Homo sapiens
  misc_RNA (1)...(19): siRNA sense strand
caggaggguuugucaagag

SEQ ID NO: 1529339 - RNA, 19 nt, Homo sapiens
  misc_RNA (1)...(19): siRNA sense strand
gauggaagacacauuucga

SEQ ID NO: 1529340 - RNA, 19 nt, Homo sapiens
  misc_RNA (1)...(19): siRNA sense strand
acaggaggguuugucaaga

SEQ ID NO: 1529341 - RNA, 19 nt, Homo sapiens
  misc_RNA (1)...(19): siRNA sense strand
gugcauacuauaucauguu

SEQ ID NO: 1529342 - RNA, 19 nt, Homo sapiens
  misc_RNA (1)...(19): siRNA sense strand
cagaaaugucuauuacugu

SEQ ID NO: 1529343 - RNA, 19 nt, Homo sapiens
  misc_RNA (1)...(19): siRNA sense strand
aauaggcaauuagaagaga

SEQ ID NO: 1529344 - RNA, 19 nt, Homo sapiens
  misc_RNA (1)...(19): siRNA sense strand
ucgauucugugcucacugu

SEQ ID NO: 1529345 - RNA, 19 nt, Homo sapiens
  misc_RNA (1)...(19): siRNA sense strand
gguccagagugccagaagu

SEQ ID NO: 1529346 - RNA, 19 nt, Homo sapiens
  misc_RNA (1)...(19): siRNA sense strand
gccuuugggucuaauccuu

SEQ ID NO: 1529347 - RNA, 19 nt, Homo sapiens
  misc_RNA (1)...(19): siRNA sense strand
acagagcaccucaacuuca

SEQ ID NO: 1529348 - RNA, 19 nt, Homo sapiens
  misc_RNA (1)...(19): siRNA sense strand
cagagugccagaagucaga

SEQ ID NO: 1529349 - RNA, 19 nt, Homo sapiens
  misc_RNA (1)...(19): siRNA sense strand
gcacacaggaggguuuguc

SEQ ID NO: 1529350 - RNA, 19 nt, Homo sapiens
  misc_RNA (1)...(19): siRNA sense strand
ugguggaacuggauacaca

SEQ ID NO: 1529351 - RNA, 19 nt, Homo sapiens
  misc_RNA (1)...(19): siRNA sense strand
gaguugguauccucuuugc

SEQ ID NO: 1529352 - RNA, 19 nt, Homo sapiens
  misc_RNA (1)...(19): siRNA sense strand
uggaagacacauuucgauu

SEQ ID NO: 1529353 - RNA, 19 nt, Homo sapiens
  misc_RNA (1)...(19): siRNA sense strand
guaagaggugcagaaaugu

SEQ ID NO: 1529354 - RNA, 19 nt, Homo sapiens
  misc_RNA (1)...(19): siRNA sense strand
gcuuucagacuccaagguu

SEQ ID NO: 1529355 - RNA, 19 nt, Homo sapiens
  misc_RNA (1)...(19): siRNA sense strand
aagaaauguuccagaggau

SEQ ID NO: 1529356 - RNA, 19 nt, Homo sapiens
  misc_RNA (1)...(19): siRNA sense strand
cagacacaccauccagauu

SEQ ID NO: 1529357 - RNA, 19 nt, Homo sapiens
  misc_RNA (1)...(19): siRNA sense strand
cagagcaccucaacuucac

SEQ ID NO: 1529358 - RNA, 19 nt, Homo sapiens
  misc_RNA (1)...(19): siRNA sense strand
gcuacuucgugacuauaag

SEQ ID NO: 1529359 - RNA, 19 nt, Homo sapiens
  misc_RNA (1)...(19): siRNA sense strand
gaggugcagaaaugucuau

SEQ ID NO: 1529360 - RNA, 19 nt, Homo sapiens
  misc_RNA (1)...(19): siRNA sense strand
gauguccucaagaaauguu

SEQ ID NO: 1529361 - RNA, 19 nt, Homo sapiens
  misc_RNA (1)...(19): siRNA sense strand
gacuauaagauuccuacau

SEQ ID NO: 1529362 - RNA, 19 nt, Homo sapiens
  misc_RNA (1)...(19): siRNA sense strand
cuacuucgugacuauaaga

SEQ ID NO: 1529363 - RNA, 19 nt, Homo sapiens
  misc_RNA (1)...(19): siRNA sense strand
cggcauuccauccagguuu

SEQ ID NO: 1529364 - RNA, 19 nt, Homo sapiens
  misc_RNA (1)...(19): siRNA sense strand
uguggaccgucucauggaa

SEQ ID NO: 1529365 - RNA, 19 nt, Homo sapiens
  misc_RNA (1)...(19): siRNA sense strand
ggucacagagcaccucaac

SEQ ID NO: 1529366 - RNA, 19 nt, Homo sapiens
  misc_RNA (1)...(19): siRNA sense strand
acacacaucacugccuuug

SEQ ID NO: 1529367 - RNA, 19 nt, Homo sapiens
  misc_RNA (1)...(19): siRNA sense strand
ccuggcacaauucagcuua

SEQ ID NO: 1529368 - RNA, 19 nt, Homo sapiens
  misc_RNA (1)...(19): siRNA sense strand
ggcuuuggauuucgauguc

SEQ ID NO: 1529369 - RNA, 19 nt, Homo sapiens
  misc_RNA (1)...(19): siRNA sense strand
cacaucagcucccucaaca

SEQ ID NO: 1529370 - RNA, 19 nt, Homo sapiens
  misc_RNA (1)...(19): siRNA sense strand
gcacaucagcucccucaac

SEQ ID NO: 1529371 - RNA, 19 nt, Homo sapiens
  misc_RNA (1)...(19): siRNA sense strand
gcagaucgcacccaaucag

SEQ ID NO: 1529372 - RNA, 19 nt, Homo sapiens
  misc_RNA (1)...(19): siRNA sense strand
gcucuccagcugccacuga

SEQ ID NO: 1529373 - RNA, 19 nt, Homo sapiens
  misc_RNA (1)...(19): siRNA sense strand
ccugggaccugugaguuca

SEQ ID NO: 1529374 - RNA, 19 nt, Homo sapiens
  misc_RNA (1)...(19): siRNA sense strand
gggcgcagcugcaggaauu

SEQ ID NO: 1529375 - RNA, 19 nt, Homo sapiens
  misc_RNA (1)...(19): siRNA sense strand
ggacggcacugaacugcaa

SEQ ID NO: 1529376 - RNA, 19 nt, Homo sapiens
  misc_RNA (1)...(19): siRNA sense strand
gaacggagagcgaagaaag

SEQ ID NO: 1529377 - RNA, 19 nt, Homo sapiens
  misc_RNA (1)...(19): siRNA sense strand
gcgaagaaaguuccaagga

SEQ ID NO: 1529378 - RNA, 19 nt, Homo sapiens
  misc_RNA (1)...(19): siRNA sense strand
gauguggcaggauugcuua

SEQ ID NO: 1529379 - RNA, 19 nt, Homo sapiens
  misc_RNA (1)...(19): siRNA sense strand
ggacuuugucuucucuuug

SEQ ID NO: 1529380 - RNA, 19 nt, Homo sapiens
  misc_RNA (1)...(19): siRNA sense strand
gcucaaagcgcgcauacca

SEQ ID NO: 1529381 - RNA, 19 nt, Homo sapiens
  misc_RNA (1)...(19): siRNA sense strand
cgggagauguggcaggauu

SEQ ID NO: 1529382 - RNA, 19 nt, Homo sapiens
  misc_RNA (1)...(19): siRNA sense strand
ucacggacaucgacuucug

SEQ ID NO: 1529383 - RNA, 19 nt, Homo sapiens
  misc_RNA (1)...(19): siRNA sense strand
ggaauugacccagcugauc

SEQ ID NO: 1529384 - RNA, 19 nt, Homo sapiens
  misc_RNA (1)...(19): siRNA sense strand
ggccaaggacuuugucuuc

SEQ ID NO: 1529385 - RNA, 19 nt, Homo sapiens
  misc_RNA (1)...(19): siRNA sense strand
ugagucggcuuccuucuac

SEQ ID NO: 1529386 - RNA, 19 nt, Homo sapiens
  misc_RNA (1)...(19): siRNA sense strand
ccgagucgccucagcauga

SEQ ID NO: 1529387 - RNA, 19 nt, Homo sapiens
  misc_RNA (1)...(19): siRNA sense strand
caaggacuuugucuucucu

SEQ ID NO: 1529388 - RNA, 19 nt, Homo sapiens
  misc_RNA (1)...(19): siRNA sense strand
ccaaggacuuugucuucuc

SEQ ID NO: 1529389 - RNA, 19 nt, Homo sapiens
  misc_RNA (1)...(19): siRNA sense strand
ggacuggcaaagcucugua

SEQ ID NO: 1529390 - RNA, 19 nt, Homo sapiens
  misc_RNA (1)...(19): siRNA sense strand
guggcaggauugcuuagga

SEQ ID NO: 1529391 - RNA, 19 nt, Homo sapiens
  misc_RNA (1)...(19): siRNA sense strand
cgaaagcccagucccaaag

SEQ ID NO: 1529392 - RNA, 19 nt, Homo sapiens
  misc_RNA (1)...(19): siRNA sense strand
caaggcagccgucgaaagc

SEQ ID NO: 1529393 - RNA, 19 nt, Homo sapiens
  misc_RNA (1)...(19): siRNA sense strand
gacuuugucuucucuuugc

SEQ ID NO: 1529394 - RNA, 19 nt, Homo sapiens
  misc_RNA (1)...(19): siRNA sense strand
ugaaaacaaugaguaguga

SEQ ID NO: 1529395 - RNA, 19 nt, Homo sapiens
  misc_RNA (1)...(19): siRNA sense strand
gccaaggacuuugucuucu

SEQ ID NO: 1529396 - RNA, 19 nt, Homo sapiens
  misc_RNA (1)...(19): siRNA sense strand
guggcugccugguucuuug

SEQ ID NO: 1529397 - RNA, 19 nt, Homo sapiens
  misc_RNA (1)...(19): siRNA sense strand
uagaccagccgcacagcua

SEQ ID NO: 1529398 - RNA, 19 nt, Homo sapiens
  misc_RNA (1)...(19): siRNA sense strand
caccaaggcagccgucgaa

SEQ ID NO: 1529399 - RNA, 19 nt, Homo sapiens
  misc_RNA (1)...(19): siRNA sense strand
gcucacggacaucgacuuc

SEQ ID NO: 1529400 - RNA, 19 nt, Homo sapiens
  misc_RNA (1)...(19): siRNA sense strand
ccgccuggcagcucuguuu

SEQ ID NO: 1529401 - RNA, 19 nt, Homo sapiens
  misc_RNA (1)...(19): siRNA sense strand
gcugccugguucuuugcua

SEQ ID NO: 1529402 - RNA, 19 nt, Homo sapiens
  misc_RNA (1)...(19): siRNA sense strand
ggaccuggaauccuguuac

SEQ ID NO: 1529403 - RNA, 19 nt, Homo sapiens
  misc_RNA (1)...(19): siRNA sense strand
aggacuuugucuucucuuu

SEQ ID NO: 1529404 - RNA, 19 nt, Homo sapiens
  misc_RNA (1)...(19): siRNA sense strand
gaccuggaauccuguuacg

SEQ ID NO: 1529405 - RNA, 19 nt, Homo sapiens
  misc_RNA (1)...(19): siRNA sense strand
gcucuaccgcaccuuugaa

SEQ ID NO: 1529406 - RNA, 19 nt, Homo sapiens
  misc_RNA (1)...(19): siRNA sense strand
cuacgaugccggcuucaca

SEQ ID NO: 1529407 - RNA, 19 nt, Homo sapiens
  misc_RNA (1)...(19): siRNA sense strand
ucaauuggcucuugccuua

SEQ ID NO: 1529408 - RNA, 19 nt, Homo sapiens
  misc_RNA (1)...(19): siRNA sense strand
gcacacagauccugguaaa

SEQ ID NO: 1529409 - RNA, 19 nt, Homo sapiens
  misc_RNA (1)...(19): siRNA sense strand
gcucuugccuuauaauauc

SEQ ID NO: 1529410 - RNA, 19 nt, Homo sapiens
  misc_RNA (1)...(19): siRNA sense strand
ucaacaaccuggaauucaa

SEQ ID NO: 1529411 - RNA, 19 nt, Homo sapiens
  misc_RNA (1)...(19): siRNA sense strand
gaucccagaugacccuuug

SEQ ID NO: 1529412 - RNA, 19 nt, Homo sapiens
  misc_RNA (1)...(19): siRNA sense strand
gaaaguggccaagaagguu

SEQ ID NO: 1529413 - RNA, 19 nt, Homo sapiens
  misc_RNA (1)...(19): siRNA sense strand
ucaaugagcaugacuggaa

SEQ ID NO: 1529414 - RNA, 19 nt, Homo sapiens
  misc_RNA (1)...(19): siRNA sense strand
gaagacacccauccaaguc

SEQ ID NO: 1529415 - RNA, 19 nt, Homo sapiens
  misc_RNA (1)...(19): siRNA sense strand
gaacgggaacgucuagcaa

SEQ ID NO: 1529416 - RNA, 19 nt, Homo sapiens
  misc_RNA (1)...(19): siRNA sense strand
gaaaguggugcugguguuu

SEQ ID NO: 1529417 - RNA, 19 nt, Homo sapiens
  misc_RNA (1)...(19): siRNA sense strand
guacgagggcucugacuug

SEQ ID NO: 1529418 - RNA, 19 nt, Homo sapiens
  misc_RNA (1)...(19): siRNA sense strand
gcaacuacaucugcuccuu

SEQ ID NO: 1529419 - RNA, 19 nt, Homo sapiens
  misc_RNA (1)...(19): siRNA sense strand
ggaagacacccauccaagu

SEQ ID NO: 1529420 - RNA, 19 nt, Homo sapiens
  misc_RNA (1)...(19): siRNA sense strand
aggaguaccuggacaaugu

SEQ ID NO: 1529421 - RNA, 19 nt, Homo sapiens
  misc_RNA (1)...(19): siRNA sense strand
ggaaaucuuggaaguacuu

SEQ ID NO: 1529422 - RNA, 19 nt, Homo sapiens
  misc_RNA (1)...(19): siRNA sense strand
aauuggcucuugccuuaua

SEQ ID NO: 1529423 - RNA, 19 nt, Homo sapiens
  misc_RNA (1)...(19): siRNA sense strand
gagagacccggaagagauu

SEQ ID NO: 1529424 - RNA, 19 nt, Homo sapiens
  misc_RNA (1)...(19): siRNA sense strand
cuuauaauaucaccaagga

SEQ ID NO: 1529425 - RNA, 19 nt, Homo sapiens
  misc_RNA (1)...(19): siRNA sense strand
caacaaggaugaaaaguac

SEQ ID NO: 1529426 - RNA, 19 nt, Homo sapiens
  misc_RNA (1)...(19): siRNA sense strand
ugagauuccuccaacugaa

SEQ ID NO: 1529427 - RNA, 19 nt, Homo sapiens
  misc_RNA (1)...(19): siRNA sense strand
gaaaccguaugauggacau

SEQ ID NO: 1529428 - RNA, 19 nt, Homo sapiens
  misc_RNA (1)...(19): siRNA sense strand
ucagagaugcuaccaccua

SEQ ID NO: 1529429 - RNA, 19 nt, Homo sapiens
  misc_RNA (1)...(19): siRNA sense strand
gcacaggcucggcaucuuc

SEQ ID NO: 1529430 - RNA, 19 nt, Homo sapiens
  misc_RNA (1)...(19): siRNA sense strand
ccggagcccuggaaaggaa

SEQ ID NO: 1529431 - RNA, 19 nt, Homo sapiens
  misc_RNA (1)...(19): siRNA sense strand
agaaaguggugcugguguu

SEQ ID NO: 1529432 - RNA, 19 nt, Homo sapiens
  misc_RNA (1)...(19): siRNA sense strand
acuggaagaugcuacgaaa

SEQ ID NO: 1529433 - RNA, 19 nt, Homo sapiens
  misc_RNA (1)...(19): siRNA sense strand
cuagguauccucagguuug

SEQ ID NO: 1529434 - RNA, 19 nt, Homo sapiens
  misc_RNA (1)...(19): siRNA sense strand
ggagacccaggaaauguga

SEQ ID NO: 1529435 - RNA, 19 nt, Homo sapiens
  misc_RNA (1)...(19): siRNA sense strand
gucuguaccugaacgugua

SEQ ID NO: 1529436 - RNA, 19 nt, Homo sapiens
  misc_RNA (1)...(19): siRNA sense strand
caacaaccuggaauucaau

SEQ ID NO: 1529437 - RNA, 19 nt, Homo sapiens
  misc_RNA (1)...(19): siRNA sense strand
ugauggacauaguucaaga

SEQ ID NO: 1529438 - RNA, 19 nt, Homo sapiens
  misc_RNA (1)...(19): siRNA sense strand
acucuaggaggaacaaaua

SEQ ID NO: 1529439 - RNA, 19 nt, Homo sapiens
  misc_RNA (1)...(19): siRNA sense strand
gaugagauuccuccaacug

SEQ ID NO: 1529440 - RNA, 19 nt, Homo sapiens
  misc_RNA (1)...(19): siRNA sense strand
uauggaacccugcaaggaa

SEQ ID NO: 1529441 - RNA, 19 nt, Homo sapiens
  misc_RNA (1)...(19): siRNA sense strand
gccacuggguucacucuag

SEQ ID NO: 1529442 - RNA, 19 nt, Homo sapiens
  misc_RNA (1)...(19): siRNA sense strand
caagaugagauuccuccaa

SEQ ID NO: 1529443 - RNA, 19 nt, Homo sapiens
  misc_RNA (1)...(19): siRNA sense strand
ccagaguggcaccgcguua

SEQ ID NO: 1529444 - RNA, 19 nt, Homo sapiens
  misc_RNA (1)...(19): siRNA sense strand
aaaggaaucagagaugcua

SEQ ID NO: 1529445 - RNA, 19 nt, Homo sapiens
  misc_RNA (1)...(19): siRNA sense strand
agaugccacuuucguguau

SEQ ID NO: 1529446 - RNA, 19 nt, Homo sapiens
  misc_RNA (1)...(19): siRNA sense strand
agagagacccggaagagau

SEQ ID NO: 1529447 - RNA, 19 nt, Homo sapiens
  misc_RNA (1)...(19): siRNA sense strand
gcaccgcguuauucagacu

SEQ ID NO: 1529448 - RNA, 19 nt, Homo sapiens
  misc_RNA (1)...(19): siRNA sense strand
acacagauccugguaaacu

SEQ ID NO: 1529449 - RNA, 19 nt, Homo sapiens
  misc_RNA (1)...(19): siRNA sense strand
gaaaggaaucagagaugcu

SEQ ID NO: 1529450 - RNA, 19 nt, Homo sapiens
  misc_RNA (1)...(19): siRNA sense strand
ggaacgggaacgucuagca

SEQ ID NO: 1529451 - RNA, 19 nt, Homo sapiens
  misc_RNA (1)...(19): siRNA sense strand
ccaacugaacuuccagaga

SEQ ID NO: 1529452 - RNA, 19 nt, Homo sapiens
  misc_RNA (1)...(19): siRNA sense strand
cacagauccugguaaacug

SEQ ID NO: 1529453 - RNA, 19 nt, Homo sapiens
  misc_RNA (1)...(19): siRNA sense strand
cuaguaacccacugaaagu

SEQ ID NO: 1529454 - RNA, 19 nt, Homo sapiens
  misc_RNA (1)...(19): siRNA sense strand
caugagcccugugguggau

SEQ ID NO: 1529455 - RNA, 19 nt, Homo sapiens
  misc_RNA (1)...(19): siRNA sense strand
auggaacccugcaaggaaa

SEQ ID NO: 1529456 - RNA, 19 nt, Homo sapiens
  misc_RNA (1)...(19): siRNA sense strand
guguggugaucccagauga

SEQ ID NO: 1529457 - RNA, 19 nt, Homo sapiens
  misc_RNA (1)...(19): siRNA sense strand
ugaaaguggccaagaaggu

SEQ ID NO: 1529458 - RNA, 19 nt, Homo sapiens
  misc_RNA (1)...(19): siRNA sense strand
gcucacuaccaccgagaaa

SEQ ID NO: 1529459 - RNA, 19 nt, Homo sapiens
  misc_RNA (1)...(19): siRNA sense strand
ggaaccgggcucuuuggau

SEQ ID NO: 1529460 - RNA, 19 nt, Homo sapiens
  misc_RNA (1)...(19): siRNA sense strand
cagcacacagauccuggua

SEQ ID NO: 1529461 - RNA, 19 nt, Homo sapiens
  misc_RNA (1)...(19): siRNA sense strand
ccacaacagcacacagauc

SEQ ID NO: 1529462 - RNA, 19 nt, Homo sapiens
  misc_RNA (1)...(19): siRNA sense strand
cuacaucugcuccuucaag

SEQ ID NO: 1529463 - RNA, 19 nt, Homo sapiens
  misc_RNA (1)...(19): siRNA sense strand
gaggaguaccuggacaaug

SEQ ID NO: 1529464 - RNA, 19 nt, Homo sapiens
  misc_RNA (1)...(19): siRNA sense strand
uggaaaggaaucagagaug

SEQ ID NO: 1529465 - RNA, 19 nt, Homo sapiens
  misc_RNA (1)...(19): siRNA sense strand
ggaggaguaccuggacaau

SEQ ID NO: 1529466 - RNA, 19 nt, Homo sapiens
  misc_RNA (1)...(19): siRNA sense strand
cacuugugguggaggagua

SEQ ID NO: 1529467 - RNA, 19 nt, Homo sapiens
  misc_RNA (1)...(19): siRNA sense strand
ccagagagacccggaagag

SEQ ID NO: 1529468 - RNA, 19 nt, Homo sapiens
  misc_RNA (1)...(19): siRNA sense strand
uuggaaaucuuggaaguac

SEQ ID NO: 1529469 - RNA, 19 nt, Homo sapiens
  misc_RNA (1)...(19): siRNA sense strand
gggagacccaggaaaugug

SEQ ID NO: 1529470 - RNA, 19 nt, Homo sapiens
  misc_RNA (1)...(19): siRNA sense strand
caaauacaggugccuugca

SEQ ID NO: 1529471 - RNA, 19 nt, Homo sapiens
  misc_RNA (1)...(19): siRNA sense strand
ggauggagucucgcucugu

SEQ ID NO: 1529472 - RNA, 19 nt, Homo sapiens
  misc_RNA (1)...(19): siRNA sense strand
aagaugccacuuucgugua

SEQ ID NO: 1529473 - RNA, 19 nt, Homo sapiens
  misc_RNA (1)...(19): siRNA sense strand
ccaacaagaugagauuccu

SEQ ID NO: 1529474 - RNA, 19 nt, Homo sapiens
  misc_RNA (1)...(19): siRNA sense strand
ugaugcguguguccaacaa

SEQ ID NO: 1529475 - RNA, 19 nt, Homo sapiens
  misc_RNA (1)...(19): siRNA sense strand
gaguggcaccgcguuauuc

SEQ ID NO: 1529476 - RNA, 19 nt, Homo sapiens
  misc_RNA (1)...(19): siRNA sense strand
caaauauggaacccugcaa

SEQ ID NO: 1529477 - RNA, 19 nt, Homo sapiens
  misc_RNA (1)...(19): siRNA sense strand
acaacaaggaugaaaagua

SEQ ID NO: 1529478 - RNA, 19 nt, Homo sapiens
  misc_RNA (1)...(19): siRNA sense strand
acuaguaacccacugaaag

SEQ ID NO: 1529479 - RNA, 19 nt, Homo sapiens
  misc_RNA (1)...(19): siRNA sense strand
uggcaccgcguuauucaga

SEQ ID NO: 1529480 - RNA, 19 nt, Homo sapiens
  misc_RNA (1)...(19): siRNA sense strand
uacaucugcuccuucaagu

SEQ ID NO: 1529481 - RNA, 19 nt, Homo sapiens
  misc_RNA (1)...(19): siRNA sense strand
aggacugucuguaccugaa

SEQ ID NO: 1529482 - RNA, 19 nt, Homo sapiens
  misc_RNA (1)...(19): siRNA sense strand
cagcgaggacugucuguac

SEQ ID NO: 1529483 - RNA, 19 nt, Homo sapiens
  misc_RNA (1)...(19): siRNA sense strand
caaaucagcucgccaagga

SEQ ID NO: 1529484 - RNA, 19 nt, Homo sapiens
  misc_RNA (1)...(19): siRNA sense strand
caaaugaauugcugaaaga

SEQ ID NO: 1529485 - RNA, 19 nt, Homo sapiens
  misc_RNA (1)...(19): siRNA sense strand
ugacuucucugcagccuua

SEQ ID NO: 1529486 - RNA, 19 nt, Homo sapiens
  misc_RNA (1)...(19): siRNA sense strand
gagcaggauuuggaacuua

SEQ ID NO: 1529487 - RNA, 19 nt, Homo sapiens
  misc_RNA (1)...(19): siRNA sense strand
ccaagccacugcucagaua

SEQ ID NO: 1529488 - RNA, 19 nt, Homo sapiens
  misc_RNA (1)...(19): siRNA sense strand
gaacuaagcaggacucaag

SEQ ID NO: 1529489 - RNA, 19 nt, Homo sapiens
  misc_RNA (1)...(19): siRNA sense strand
cuuauuaucuggcuaguuu

SEQ ID NO: 1529490 - RNA, 19 nt, Homo sapiens
  misc_RNA (1)...(19): siRNA sense strand
ggaugucaaucagauauuu

SEQ ID NO: 1529491 - RNA, 19 nt, Homo sapiens
  misc_RNA (1)...(19): siRNA sense strand
uuacaacacuccacaaauc

SEQ ID NO: 1529492 - RNA, 19 nt, Homo sapiens
  misc_RNA (1)...(19): siRNA sense strand
caaggaaacaaaugaauug

SEQ ID NO: 1529493 - RNA, 19 nt, Homo sapiens
  misc_RNA (1)...(19): siRNA sense strand
gaaggaacgccucaugaau

SEQ ID NO: 1529494 - RNA, 19 nt, Homo sapiens
  misc_RNA (1)...(19): siRNA sense strand
cugcucagauaaagaauuu

SEQ ID NO: 1529495 - RNA, 19 nt, Homo sapiens
  misc_RNA (1)...(19): siRNA sense strand
auucuaaucuugggacuua

SEQ ID NO: 1529496 - RNA, 19 nt, Homo sapiens
  misc_RNA (1)...(19): siRNA sense strand
ugaccagggugaucugauu

SEQ ID NO: 1529497 - RNA, 19 nt, Homo sapiens
  misc_RNA (1)...(19): siRNA sense strand
ccaaggaaacaaaugaauu

SEQ ID NO: 1529498 - RNA, 19 nt, Homo sapiens
  misc_RNA (1)...(19): siRNA sense strand
cauagaagccaauguggaa

SEQ ID NO: 1529499 - RNA, 19 nt, Homo sapiens
  misc_RNA (1)...(19): siRNA sense strand
acaaaugaauugcugaaag

SEQ ID NO: 1529500 - RNA, 19 nt, Homo sapiens
  misc_RNA (1)...(19): siRNA sense strand
ccacugcucagauaaagaa

SEQ ID NO: 1529501 - RNA, 19 nt, Homo sapiens
  misc_RNA (1)...(19): siRNA sense strand
cagcuggucucauuugaca

SEQ ID NO: 1529502 - RNA, 19 nt, Homo sapiens
  misc_RNA (1)...(19): siRNA sense strand
gcucagauaaagaauuuga

SEQ ID NO: 1529503 - RNA, 19 nt, Homo sapiens
  misc_RNA (1)...(19): siRNA sense strand
aggagcagcuggucucauu

SEQ ID NO: 1529504 - RNA, 19 nt, Homo sapiens
  misc_RNA (1)...(19): siRNA sense strand
agagcuggaucucgucuuu

SEQ ID NO: 1529505 - RNA, 19 nt, Homo sapiens
  misc_RNA (1)...(19): siRNA sense strand
cagaagagaggcaaagaga

SEQ ID NO: 1529506 - RNA, 19 nt, Homo sapiens
  misc_RNA (1)...(19): siRNA sense strand
caagcaagcuacaggaaaa

SEQ ID NO: 1529507 - RNA, 19 nt, Homo sapiens
  misc_RNA (1)...(19): siRNA sense strand
gcaagaagauguguauccu

SEQ ID NO: 1529508 - RNA, 19 nt, Homo sapiens
  misc_RNA (1)...(19): siRNA sense strand
gaaagagaaacggcaauuc

SEQ ID NO: 1529509 - RNA, 19 nt, Homo sapiens
  misc_RNA (1)...(19): siRNA sense strand
gagcagcuggucucauuug

SEQ ID NO: 1529510 - RNA, 19 nt, Homo sapiens
  misc_RNA (1)...(19): siRNA sense strand
cgaaagagccacugaacag

SEQ ID NO: 1529511 - RNA, 19 nt, Homo sapiens
  misc_RNA (1)...(19): siRNA sense strand
uuaaagauuuggccaugau

SEQ ID NO: 1529512 - RNA, 19 nt, Homo sapiens
  misc_RNA (1)...(19): siRNA sense strand
ucacugagcaggauuugga

SEQ ID NO: 1529513 - RNA, 19 nt, Homo sapiens
  misc_RNA (1)...(19): siRNA sense strand
ugagccagcuaggaacuaa

SEQ ID NO: 1529514 - RNA, 19 nt, Homo sapiens
  misc_RNA (1)...(19): siRNA sense strand
cugcagccuuaaacaauuu

SEQ ID NO: 1529515 - RNA, 19 nt, Homo sapiens
  misc_RNA (1)...(19): siRNA sense strand
cagaaggaacgccucauga

SEQ ID NO: 1529516 - RNA, 19 nt, Homo sapiens
  misc_RNA (1)...(19): siRNA sense strand
ucccuuaucuacuucagaa

SEQ ID NO: 1529517 - RNA, 19 nt, Homo sapiens
  misc_RNA (1)...(19): siRNA sense strand
gugcuuguccugucaguga

SEQ ID NO: 1529518 - RNA, 19 nt, Homo sapiens
  misc_RNA (1)...(19): siRNA sense strand
gcuggaggcugacauuuug

SEQ ID NO: 1529519 - RNA, 19 nt, Homo sapiens
  misc_RNA (1)...(19): siRNA sense strand
agggugaucugauugauag

SEQ ID NO: 1529520 - RNA, 19 nt, Homo sapiens
  misc_RNA (1)...(19): siRNA sense strand
gcaggacucaagcaagcua

SEQ ID NO: 1529521 - RNA, 19 nt, Homo sapiens
  misc_RNA (1)...(19): siRNA sense strand
agaaggaacgccucaugaa

SEQ ID NO: 1529522 - RNA, 19 nt, Homo sapiens
  misc_RNA (1)...(19): siRNA sense strand
ucugcagccuuaaacaauu

SEQ ID NO: 1529523 - RNA, 19 nt, Homo sapiens
  misc_RNA (1)...(19): siRNA sense strand
caggauuuggaacuuauua

SEQ ID NO: 1529524 - RNA, 19 nt, Homo sapiens
  misc_RNA (1)...(19): siRNA sense strand
ucaagcaagcuacaggaaa

SEQ ID NO: 1529525 - RNA, 19 nt, Homo sapiens
  misc_RNA (1)...(19): siRNA sense strand
uagcauagaagccaaugug

SEQ ID NO: 1529526 - RNA, 19 nt, Homo sapiens
  misc_RNA (1)...(19): siRNA sense strand
ucugauugauagcauagaa

SEQ ID NO: 1529527 - RNA, 19 nt, Homo sapiens
  misc_RNA (1)...(19): siRNA sense strand
aaggaacgccucaugaaug

SEQ ID NO: 1529528 - RNA, 19 nt, Homo sapiens
  misc_RNA (1)...(19): siRNA sense strand
ugaaagaauuaggguccuu

SEQ ID NO: 1529529 - RNA, 19 nt, Homo sapiens
  misc_RNA (1)...(19): siRNA sense strand
ggacuucagcagcaucauc

SEQ ID NO: 1529530 - RNA, 19 nt, Homo sapiens
  misc_RNA (1)...(19): siRNA sense strand
ugaucugauugauagcaua

SEQ ID NO: 1529531 - RNA, 19 nt, Homo sapiens
  misc_RNA (1)...(19): siRNA sense strand
ggccaucacugagcaggau

SEQ ID NO: 1529532 - RNA, 19 nt, Homo sapiens
  misc_RNA (1)...(19): siRNA sense strand
ggaaaaucugcaacaguua

SEQ ID NO: 1529533 - RNA, 19 nt, Homo sapiens
  misc_RNA (1)...(19): siRNA sense strand
aggaaaaucugcaacaguu

SEQ ID NO: 1529534 - RNA, 19 nt, Homo sapiens
  misc_RNA (1)...(19): siRNA sense strand
cagggugaucugauugaua

SEQ ID NO: 1529535 - RNA, 19 nt, Homo sapiens
  misc_RNA (1)...(19): siRNA sense strand
agaaagagaaacggcaauu

SEQ ID NO: 1529536 - RNA, 19 nt, Homo sapiens
  misc_RNA (1)...(19): siRNA sense strand
gcagaagagaggcaaagag

SEQ ID NO: 1529537 - RNA, 19 nt, Homo sapiens
  misc_RNA (1)...(19): siRNA sense strand
ugagcaggauuuggaacuu

SEQ ID NO: 1529538 - RNA, 19 nt, Homo sapiens
  misc_RNA (1)...(19): siRNA sense strand
gagcugcuuacuaucagaa

SEQ ID NO: 1529539 - RNA, 19 nt, Homo sapiens
  misc_RNA (1)...(19): siRNA sense strand
gaucugauugauagcauag

SEQ ID NO: 1529540 - RNA, 19 nt, Homo sapiens
  misc_RNA (1)...(19): siRNA sense strand
ucagaaggaacgccucaug

SEQ ID NO: 1529541 - RNA, 19 nt, Homo sapiens
  misc_RNA (1)...(19): siRNA sense strand
ggagcagcuggucucauuu

SEQ ID NO: 1529542 - RNA, 19 nt, Homo sapiens
  misc_RNA (1)...(19): siRNA sense strand
aaucagcucgccaaggaaa

SEQ ID NO: 1529543 - RNA, 19 nt, Homo sapiens
  misc_RNA (1)...(19): siRNA sense strand
gaccagggugaucugauug

SEQ ID NO: 1529544 - RNA, 19 nt, Homo sapiens
  misc_RNA (1)...(19): siRNA sense strand
aaagauuuggccaugauga

SEQ ID NO: 1529545 - RNA, 19 nt, Homo sapiens
  misc_RNA (1)...(19): siRNA sense strand
aaagagaaacggcaauucg

SEQ ID NO: 1529546 - RNA, 19 nt, Homo sapiens
  misc_RNA (1)...(19): siRNA sense strand
gcaggauuuggaacuuauu

SEQ ID NO: 1529547 - RNA, 19 nt, Homo sapiens
  misc_RNA (1)...(19): siRNA sense strand
guuacaacacuccacaaau

SEQ ID NO: 1529548 - RNA, 19 nt, Homo sapiens
  misc_RNA (1)...(19): siRNA sense strand
agagaaggguaucugaaaa

SEQ ID NO: 1529549 - RNA, 19 nt, Homo sapiens
  misc_RNA (1)...(19): siRNA sense strand
gccaaggaaacaaaugaau

SEQ ID NO: 1529550 - RNA, 19 nt, Homo sapiens
  misc_RNA (1)...(19): siRNA sense strand
gcgagcugcuuacuaucag

SEQ ID NO: 1529551 - RNA, 19 nt, Homo sapiens
  misc_RNA (1)...(19): siRNA sense strand
caagccacugcucagauaa

SEQ ID NO: 1529552 - RNA, 19 nt, Homo sapiens
  misc_RNA (1)...(19): siRNA sense strand
aaggguaucugaaaaggaa

SEQ ID NO: 1529553 - RNA, 19 nt, Homo sapiens
  misc_RNA (1)...(19): siRNA sense strand
uugaugagccagcuaggaa

SEQ ID NO: 1529554 - RNA, 19 nt, Homo sapiens
  misc_RNA (1)...(19): siRNA sense strand
cuuguccugucagugauua

SEQ ID NO: 1529555 - RNA, 19 nt, Homo sapiens
  misc_RNA (1)...(19): siRNA sense strand
uuuaaagauuuggccauga

SEQ ID NO: 1529556 - RNA, 19 nt, Homo sapiens
  misc_RNA (1)...(19): siRNA sense strand
gaauuugaugagccagcua

SEQ ID NO: 1529557 - RNA, 19 nt, Homo sapiens
  misc_RNA (1)...(19): siRNA sense strand
gaaaaggaaaaggagagua

SEQ ID NO: 1529558 - RNA, 19 nt, Homo sapiens
  misc_RNA (1)...(19): siRNA sense strand
gucauacggucccuuagac

SEQ ID NO: 1529559 - RNA, 19 nt, Homo sapiens
  misc_RNA (1)...(19): siRNA sense strand
uacaacacuccacaaauca

SEQ ID NO: 1529560 - RNA, 19 nt, Homo sapiens
  misc_RNA (1)...(19): siRNA sense strand
cgagcugcuuacuaucaga

SEQ ID NO: 1529561 - RNA, 19 nt, Homo sapiens
  misc_RNA (1)...(19): siRNA sense strand
agaggugcacgucgaaaga

SEQ ID NO: 1529562 - RNA, 19 nt, Homo sapiens
  misc_RNA (1)...(19): siRNA sense strand
cuaagcaggacucaagcaa

SEQ ID NO: 1529563 - RNA, 19 nt, Homo sapiens
  misc_RNA (1)...(19): siRNA sense strand
ccagggugaucugauugau

SEQ ID NO: 1529564 - RNA, 19 nt, Homo sapiens
  misc_RNA (1)...(19): siRNA sense strand
agacuuaacuugguucuua

SEQ ID NO: 1529565 - RNA, 19 nt, Homo sapiens
  misc_RNA (1)...(19): siRNA sense strand
ggauugugcugagaaauua

SEQ ID NO: 1529566 - RNA, 19 nt, Homo sapiens
  misc_RNA (1)...(19): siRNA sense strand
ggaaauuggugguuugaug

SEQ ID NO: 1529567 - RNA, 19 nt, Homo sapiens
  misc_RNA (1)...(19): siRNA sense strand
gaagagcacuggaggaaag

SEQ ID NO: 1529568 - RNA, 19 nt, Homo sapiens
  misc_RNA (1)...(19): siRNA sense strand
agacugaccugaacuuauu

SEQ ID NO: 1529569 - RNA, 19 nt, Homo sapiens
  misc_RNA (1)...(19): siRNA sense strand
uagaacagcuugaaagaga

SEQ ID NO: 1529570 - RNA, 19 nt, Homo sapiens
  misc_RNA (1)...(19): siRNA sense strand
gaaggagaauaaucuugaa

SEQ ID NO: 1529571 - RNA, 19 nt, Homo sapiens
  misc_RNA (1)...(19): siRNA sense strand
cacaagaaaugaagacuga

SEQ ID NO: 1529572 - RNA, 19 nt, Homo sapiens
  misc_RNA (1)...(19): siRNA sense strand
ccuauuugcucauuuauug

SEQ ID NO: 1529573 - RNA, 19 nt, Homo sapiens
  misc_RNA (1)...(19): siRNA sense strand
gagauaauucgcccuauuu

SEQ ID NO: 1529574 - RNA, 19 nt, Homo sapiens
  misc_RNA (1)...(19): siRNA sense strand
gaccugaacuuauuauugg

SEQ ID NO: 1529575 - RNA, 19 nt, Homo sapiens
  misc_RNA (1)...(19): siRNA sense strand
gaagcagccuuauauacau

SEQ ID NO: 1529576 - RNA, 19 nt, Homo sapiens
  misc_RNA (1)...(19): siRNA sense strand
agagaaacagguuguauua

SEQ ID NO: 1529577 - RNA, 19 nt, Homo sapiens
  misc_RNA (1)...(19): siRNA sense strand
cuagacaguuacagaguua

SEQ ID NO: 1529578 - RNA, 19 nt, Homo sapiens
  misc_RNA (1)...(19): siRNA sense strand
gaaagcaaaggaaauucua

SEQ ID NO: 1529579 - RNA, 19 nt, Homo sapiens
  misc_RNA (1)...(19): siRNA sense strand
cagaauacauggaaacauc

SEQ ID NO: 1529580 - RNA, 19 nt, Homo sapiens
  misc_RNA (1)...(19): siRNA sense strand
gaagacugaccugaacuua

SEQ ID NO: 1529581 - RNA, 19 nt, Homo sapiens
  misc_RNA (1)...(19): siRNA sense strand
gaaaugaggaagaaauaca

SEQ ID NO: 1529582 - RNA, 19 nt, Homo sapiens
  misc_RNA (1)...(19): siRNA sense strand
gacucacucuugcaaauaa

SEQ ID NO: 1529583 - RNA, 19 nt, Homo sapiens
  misc_RNA (1)...(19): siRNA sense strand
agaguuguuugaagacuua

SEQ ID NO: 1529584 - RNA, 19 nt, Homo sapiens
  misc_RNA (1)...(19): siRNA sense strand
caaaugaagacaccguuaa

SEQ ID NO: 1529585 - RNA, 19 nt, Homo sapiens
  misc_RNA (1)...(19): siRNA sense strand
gcaauuaaaggacauaagu

SEQ ID NO: 1529586 - RNA, 19 nt, Homo sapiens
  misc_RNA (1)...(19): siRNA sense strand
ucaugcagcuggaaucuga

SEQ ID NO: 1529587 - RNA, 19 nt, Homo sapiens
  misc_RNA (1)...(19): siRNA sense strand
gagagaaacagguuguauu

SEQ ID NO: 1529588 - RNA, 19 nt, Homo sapiens
  misc_RNA (1)...(19): siRNA sense strand
gcacgacaccugagauaau

SEQ ID NO: 1529589 - RNA, 19 nt, Homo sapiens
  misc_RNA (1)...(19): siRNA sense strand
gaauagaacagcuugaaag

SEQ ID NO: 1529590 - RNA, 19 nt, Homo sapiens
  misc_RNA (1)...(19): siRNA sense strand
gagaauauccuuuugauga

SEQ ID NO: 1529591 - RNA, 19 nt, Homo sapiens
  misc_RNA (1)...(19): siRNA sense strand
cagcagacuuuguguacuu

SEQ ID NO: 1529592 - RNA, 19 nt, Homo sapiens
  misc_RNA (1)...(19): siRNA sense strand
gaggaaagcaaaggaaauu

SEQ ID NO: 1529593 - RNA, 19 nt, Homo sapiens
  misc_RNA (1)...(19): siRNA sense strand
gaguuggauuugucagaua

SEQ ID NO: 1529594 - RNA, 19 nt, Homo sapiens
  misc_RNA (1)...(19): siRNA sense strand
ucaggacaguuauuucaaa

SEQ ID NO: 1529595 - RNA, 19 nt, Homo sapiens
  misc_RNA (1)...(19): siRNA sense strand
gaaauuggugguuugaugu

SEQ ID NO: 1529596 - RNA, 19 nt, Homo sapiens
  misc_RNA (1)...(19): siRNA sense strand
caaucaagauccauuuaca

SEQ ID NO: 1529597 - RNA, 19 nt, Homo sapiens
  misc_RNA (1)...(19): siRNA sense strand
caaaugaugaccaaaugaa

SEQ ID NO: 1529598 - RNA, 19 nt, Homo sapiens
  misc_RNA (1)...(19): siRNA sense strand
guacaaaugaugaccaaau

SEQ ID NO: 1529599 - RNA, 19 nt, Homo sapiens
  misc_RNA (1)...(19): siRNA sense strand
ggacucacucuugcaaaua

SEQ ID NO: 1529600 - RNA, 19 nt, Homo sapiens
  misc_RNA (1)...(19): siRNA sense strand
ugagauaauucgcccuauu

SEQ ID NO: 1529601 - RNA, 19 nt, Homo sapiens
  misc_RNA (1)...(19): siRNA sense strand
gaaagugaagacacaaaga

SEQ ID NO: 1529602 - RNA, 19 nt, Homo sapiens
  misc_RNA (1)...(19): siRNA sense strand
aaaggaaauucuacacaga

SEQ ID NO: 1529603 - RNA, 19 nt, Homo sapiens
  misc_RNA (1)...(19): siRNA sense strand
ucuaaagcauguacaaaug

SEQ ID NO: 1529604 - RNA, 19 nt, Homo sapiens
  misc_RNA (1)...(19): siRNA sense strand
ggauaacauuucaucuaug

SEQ ID NO: 1529605 - RNA, 19 nt, Homo sapiens
  misc_RNA (1)...(19): siRNA sense strand
ggaagaaauacaaagagaa

SEQ ID NO: 1529606 - RNA, 19 nt, Homo sapiens
  misc_RNA (1)...(19): siRNA sense strand
agaaggaaaugaggaagaa

SEQ ID NO: 1529607 - RNA, 19 nt, Homo sapiens
  misc_RNA (1)...(19): siRNA sense strand
aaacacagcaauuaaagga

SEQ ID NO: 1529608 - RNA, 19 nt, Homo sapiens
  misc_RNA (1)...(19): siRNA sense strand
caggauaacauuucaucua

SEQ ID NO: 1529609 - RNA, 19 nt, Homo sapiens
  misc_RNA (1)...(19): siRNA sense strand
aaacaugaguuggauuugu

SEQ ID NO: 1529610 - RNA, 19 nt, Homo sapiens
  misc_RNA (1)...(19): siRNA sense strand
ugaaggagaauaaucuuga

SEQ ID NO: 1529611 - RNA, 19 nt, Homo sapiens
  misc_RNA (1)...(19): siRNA sense strand
uuucuaaacuucuggcauu

SEQ ID NO: 1529612 - RNA, 19 nt, Homo sapiens
  misc_RNA (1)...(19): siRNA sense strand
guaccacauuguuucuaaa

SEQ ID NO: 1529613 - RNA, 19 nt, Homo sapiens
  misc_RNA (1)...(19): siRNA sense strand
aaagaagcagccuuauaua

SEQ ID NO: 1529614 - RNA, 19 nt, Homo sapiens
  misc_RNA (1)...(19): siRNA sense strand
uacaaaugaugaccaaaug

SEQ ID NO: 1529615 - RNA, 19 nt, Homo sapiens
  misc_RNA (1)...(19): siRNA sense strand
ggagucaugucuaaagcau

SEQ ID NO: 1529616 - RNA, 19 nt, Homo sapiens
  misc_RNA (1)...(19): siRNA sense strand
gcaaaggaaauucuacaca

SEQ ID NO: 1529617 - RNA, 19 nt, Homo sapiens
  misc_RNA (1)...(19): siRNA sense strand
uggcauuacugcuucauga

SEQ ID NO: 1529618 - RNA, 19 nt, Homo sapiens
  misc_RNA (1)...(19): siRNA sense strand
gcaaagucaagugaacaua

SEQ ID NO: 1529619 - RNA, 19 nt, Homo sapiens
  misc_RNA (1)...(19): siRNA sense strand
aagucaagcugcaaucaaa

SEQ ID NO: 1529620 - RNA, 19 nt, Homo sapiens
  misc_RNA (1)...(19): siRNA sense strand
ccaaaugaagacaccguua

SEQ ID NO: 1529621 - RNA, 19 nt, Homo sapiens
  misc_RNA (1)...(19): siRNA sense strand
cacgacaccugagauaauu

SEQ ID NO: 1529622 - RNA, 19 nt, Homo sapiens
  misc_RNA (1)...(19): siRNA sense strand
gaacauagcaugguaaaag

SEQ ID NO: 1529623 - RNA, 19 nt, Homo sapiens
  misc_RNA (1)...(19): siRNA sense strand
uaagugugaaggagaauaa

SEQ ID NO: 1529624 - RNA, 19 nt, Homo sapiens
  misc_RNA (1)...(19): siRNA sense strand
gcauuacugcuucaugaaa

SEQ ID NO: 1529625 - RNA, 19 nt, Homo sapiens
  misc_RNA (1)...(19): siRNA sense strand
gauguauugucucaaguuc

SEQ ID NO: 1529626 - RNA, 19 nt, Homo sapiens
  misc_RNA (1)...(19): siRNA sense strand
gagacucuuuccagugcua

SEQ ID NO: 1529627 - RNA, 19 nt, Homo sapiens
  misc_RNA (1)...(19): siRNA sense strand
uaaaggacauaagugugaa

SEQ ID NO: 1529628 - RNA, 19 nt, Homo sapiens
  misc_RNA (1)...(19): siRNA sense strand
uuaaaggacauaaguguga

SEQ ID NO: 1529629 - RNA, 19 nt, Homo sapiens
  misc_RNA (1)...(19): siRNA sense strand
ggucacuauucauucaauu

SEQ ID NO: 1529630 - RNA, 19 nt, Homo sapiens
  misc_RNA (1)...(19): siRNA sense strand
gcaaauccaguccaugcuu

SEQ ID NO: 1529631 - RNA, 19 nt, Homo sapiens
  misc_RNA (1)...(19): siRNA sense strand
gagaaggaaaugaggaaga

SEQ ID NO: 1529632 - RNA, 19 nt, Homo sapiens
  misc_RNA (1)...(19): siRNA sense strand
ccaaguaccacauuguuuc

SEQ ID NO: 1529633 - RNA, 19 nt, Homo sapiens
  misc_RNA (1)...(19): siRNA sense strand
cgcccuauuugcucauuua

SEQ ID NO: 1529634 - RNA, 19 nt, Homo sapiens
  misc_RNA (1)...(19): siRNA sense strand
guacuucagaguuguuuga

SEQ ID NO: 1529635 - RNA, 19 nt, Homo sapiens
  misc_RNA (1)...(19): siRNA sense strand
gaacuuauuauuggagugu

SEQ ID NO: 1529636 - RNA, 19 nt, Homo sapiens
  misc_RNA (1)...(19): siRNA sense strand
ggaaagcaaaggaaauucu

SEQ ID NO: 1529637 - RNA, 19 nt, Homo sapiens
  misc_RNA (1)...(19): siRNA sense strand
ggacaguuauuucaaaaca

SEQ ID NO: 1529638 - RNA, 19 nt, Homo sapiens
  misc_RNA (1)...(19): siRNA sense strand
gguaaaagaagcagccuua

SEQ ID NO: 1529639 - RNA, 19 nt, Homo sapiens
  misc_RNA (1)...(19): siRNA sense strand
uggagugucuaaaguauca

SEQ ID NO: 1529640 - RNA, 19 nt, Homo sapiens
  misc_RNA (1)...(19): siRNA sense strand
aagcagaagaugaggauaa

SEQ ID NO: 1529641 - RNA, 19 nt, Homo sapiens
  misc_RNA (1)...(19): siRNA sense strand
gaucggauuggucgaggua

SEQ ID NO: 1529642 - RNA, 19 nt, Homo sapiens
  misc_RNA (1)...(19): siRNA sense strand
aggaagaaauacaaagaga

SEQ ID NO: 1529643 - RNA, 19 nt, Homo sapiens
  misc_RNA (1)...(19): siRNA sense strand
ggaggaaagcaaaggaaau

SEQ ID NO: 1529644 - RNA, 19 nt, Homo sapiens
  misc_RNA (1)...(19): siRNA sense strand
uaggagcuauugcagagaa

SEQ ID NO: 1529645 - RNA, 19 nt, Homo sapiens
  misc_RNA (1)...(19): siRNA sense strand
guuguggucuucagugugu

SEQ ID NO: 1529646 - RNA, 19 nt, Homo sapiens
  misc_RNA (1)...(19): siRNA sense strand
aagccauucuagacaguua

SEQ ID NO: 1529647 - RNA, 19 nt, Homo sapiens
  misc_RNA (1)...(19): siRNA sense strand
ugaccugaacuuauuauug

SEQ ID NO: 1529648 - RNA, 19 nt, Homo sapiens
  misc_RNA (1)...(19): siRNA sense strand
uaaaagaagcagccuuaua

SEQ ID NO: 1529649 - RNA, 19 nt, Homo sapiens
  misc_RNA (1)...(19): siRNA sense strand
gagcgcaaauccaguccau

SEQ ID NO: 1529650 - RNA, 19 nt, Homo sapiens
  misc_RNA (1)...(19): siRNA sense strand
aaagugaagacacaaagaa

SEQ ID NO: 1529651 - RNA, 19 nt, Homo sapiens
  misc_RNA (1)...(19): siRNA sense strand
ggaaagugaagacacaaag

SEQ ID NO: 1529652 - RNA, 19 nt, Homo sapiens
  misc_RNA (1)...(19): siRNA sense strand
agaagcagccuuauauaca

SEQ ID NO: 1529653 - RNA, 19 nt, Homo sapiens
  misc_RNA (1)...(19): siRNA sense strand
aaaagaagcagccuuauau

SEQ ID NO: 1529654 - RNA, 19 nt, Homo sapiens
  misc_RNA (1)...(19): siRNA sense strand
caaagucaagugaacauag

SEQ ID NO: 1529655 - RNA, 19 nt, Homo sapiens
  misc_RNA (1)...(19): siRNA sense strand
gugguuugauguuuguaaa

SEQ ID NO: 1529656 - RNA, 19 nt, Homo sapiens
  misc_RNA (1)...(19): siRNA sense strand
cuaaagcauguacaaauga

SEQ ID NO: 1529657 - RNA, 19 nt, Homo sapiens
  misc_RNA (1)...(19): siRNA sense strand
acauaagugugaaggagaa

SEQ ID NO: 1529658 - RNA, 19 nt, Homo sapiens
  misc_RNA (1)...(19): siRNA sense strand
uaauaggaccggacaaaca

SEQ ID NO: 1529659 - RNA, 19 nt, Homo sapiens
  misc_RNA (1)...(19): siRNA sense strand
gacuuaacuugguucuuau

SEQ ID NO: 1529660 - RNA, 19 nt, Homo sapiens
  misc_RNA (1)...(19): siRNA sense strand
ggauguauugucucaaguu

SEQ ID NO: 1529661 - RNA, 19 nt, Homo sapiens
  misc_RNA (1)...(19): siRNA sense strand
caacaauccucaaaaugau

SEQ ID NO: 1529662 - RNA, 19 nt, Homo sapiens
  misc_RNA (1)...(19): siRNA sense strand
aaaugaagacaccguuaaa

SEQ ID NO: 1529663 - RNA, 19 nt, Homo sapiens
  misc_RNA (1)...(19): siRNA sense strand
caacaaaacaguaaugcaa

SEQ ID NO: 1529664 - RNA, 19 nt, Homo sapiens
  misc_RNA (1)...(19): siRNA sense strand
gcacauaaguggaacaaga

SEQ ID NO: 1529665 - RNA, 19 nt, Homo sapiens
  misc_RNA (1)...(19): siRNA sense strand
cagcaaaccugcagaagua

SEQ ID NO: 1529666 - RNA, 19 nt, Homo sapiens
  misc_RNA (1)...(19): siRNA sense strand
ggagauagcucgcuguugu

SEQ ID NO: 1529667 - RNA, 19 nt, Homo sapiens
  misc_RNA (1)...(19): siRNA sense strand
gugagaagcuggugggaua

SEQ ID NO: 1529668 - RNA, 19 nt, Homo sapiens
  misc_RNA (1)...(19): siRNA sense strand
aaagacagcugcauggaaa

SEQ ID NO: 1529669 - RNA, 19 nt, Homo sapiens
  misc_RNA (1)...(19): siRNA sense strand
guacagagaugaaaacuug

SEQ ID NO: 1529670 - RNA, 19 nt, Homo sapiens
  misc_RNA (1)...(19): siRNA sense strand
ggauguaucuuguauucau

SEQ ID NO: 1529671 - RNA, 19 nt, Homo sapiens
  misc_RNA (1)...(19): siRNA sense strand
auacgcagcuccugaauug

SEQ ID NO: 1529672 - RNA, 19 nt, Homo sapiens
  misc_RNA (1)...(19): siRNA sense strand
caacaaccguggcucacaa

SEQ ID NO: 1529673 - RNA, 19 nt, Homo sapiens
  misc_RNA (1)...(19): siRNA sense strand
uggaauggcuuguuucuuc

SEQ ID NO: 1529674 - RNA, 19 nt, Homo sapiens
  misc_RNA (1)...(19): siRNA sense strand
gucaagaccuguacagaga

SEQ ID NO: 1529675 - RNA, 19 nt, Homo sapiens
  misc_RNA (1)...(19): siRNA sense strand
gagcucauauucacaaugg

SEQ ID NO: 1529676 - RNA, 19 nt, Homo sapiens
  misc_RNA (1)...(19): siRNA sense strand
gaaaggcaccgucuacauc

SEQ ID NO: 1529677 - RNA, 19 nt, Homo sapiens
  misc_RNA (1)...(19): siRNA sense strand
gaaagacagcugcauggaa

SEQ ID NO: 1529678 - RNA, 19 nt, Homo sapiens
  misc_RNA (1)...(19): siRNA sense strand
cucaggagcuuucuucauu

SEQ ID NO: 1529679 - RNA, 19 nt, Homo sapiens
  misc_RNA (1)...(19): siRNA sense strand
gaagaaaggcaccgucuac

SEQ ID NO: 1529680 - RNA, 19 nt, Homo sapiens
  misc_RNA (1)...(19): siRNA sense strand
gggauauucugccguguau

SEQ ID NO: 1529681 - RNA, 19 nt, Homo sapiens
  misc_RNA (1)...(19): siRNA sense strand
cuuccuagcuucccuguau

SEQ ID NO: 1529682 - RNA, 19 nt, Homo sapiens
  misc_RNA (1)...(19): siRNA sense strand
gauauucugccguguauag

SEQ ID NO: 1529683 - RNA, 19 nt, Homo sapiens
  misc_RNA (1)...(19): siRNA sense strand
gaugaaaacuuggugacua

SEQ ID NO: 1529684 - RNA, 19 nt, Homo sapiens
  misc_RNA (1)...(19): siRNA sense strand
cuacugaccuugaaaauca

SEQ ID NO: 1529685 - RNA, 19 nt, Homo sapiens
  misc_RNA (1)...(19): siRNA sense strand
ggaauggcuuguuucuucu

SEQ ID NO: 1529686 - RNA, 19 nt, Homo sapiens
  misc_RNA (1)...(19): siRNA sense strand
guucaaccauguaagaagu

SEQ ID NO: 1529687 - RNA, 19 nt, Homo sapiens
  misc_RNA (1)...(19): siRNA sense strand
aaucggauguaucuuguau

SEQ ID NO: 1529688 - RNA, 19 nt, Homo sapiens
  misc_RNA (1)...(19): siRNA sense strand
caagaccuguacagagaug

SEQ ID NO: 1529689 - RNA, 19 nt, Homo sapiens
  misc_RNA (1)...(19): siRNA sense strand
guagagcucauauucacaa

SEQ ID NO: 1529690 - RNA, 19 nt, Homo sapiens
  misc_RNA (1)...(19): siRNA sense strand
ucggauguaucuuguauuc

SEQ ID NO: 1529691 - RNA, 19 nt, Homo sapiens
  misc_RNA (1)...(19): siRNA sense strand
uggugacgcucaucaugua

SEQ ID NO: 1529692 - RNA, 19 nt, Homo sapiens
  misc_RNA (1)...(19): siRNA sense strand
ccaguaacaagcuguggua

SEQ ID NO: 1529693 - RNA, 19 nt, Homo sapiens
  misc_RNA (1)...(19): siRNA sense strand
caacaagaucgaguucuga

SEQ ID NO: 1529694 - RNA, 19 nt, Homo sapiens
  misc_RNA (1)...(19): siRNA sense strand
acaacaagaucgaguucug

SEQ ID NO: 1529695 - RNA, 19 nt, Homo sapiens
  misc_RNA (1)...(19): siRNA sense strand
gauguaucuuguauucaug

SEQ ID NO: 1529696 - RNA, 19 nt, Homo sapiens
  misc_RNA (1)...(19): siRNA sense strand
ucucagcucuguccagcaa

SEQ ID NO: 1529697 - RNA, 19 nt, Homo sapiens
  misc_RNA (1)...(19): siRNA sense strand
aaccguggcucacaagaug

SEQ ID NO: 1529698 - RNA, 19 nt, Homo sapiens
  misc_RNA (1)...(19): siRNA sense strand
ucguggaguuugcacauaa

SEQ ID NO: 1529699 - RNA, 19 nt, Homo sapiens
  misc_RNA (1)...(19): siRNA sense strand
gaaaaucaacaacagcaaa

SEQ ID NO: 1529700 - RNA, 19 nt, Homo sapiens
  misc_RNA (1)...(19): siRNA sense strand
gauacgcagcuccugaauu

SEQ ID NO: 1529701 - RNA, 19 nt, Homo sapiens
  misc_RNA (1)...(19): siRNA sense strand
caacaacaagaucgaguuc

SEQ ID NO: 1529702 - RNA, 19 nt, Homo sapiens
  misc_RNA (1)...(19): siRNA sense strand
ggccugugccugcuuauau

SEQ ID NO: 1529703 - RNA, 19 nt, Homo sapiens
  misc_RNA (1)...(19): siRNA sense strand
gcuuguuucuucuuuaucu

SEQ ID NO: 1529704 - RNA, 19 nt, Homo sapiens
  misc_RNA (1)...(19): siRNA sense strand
cuacaucuacuccuacuuc

SEQ ID NO: 1529705 - RNA, 19 nt, Homo sapiens
  misc_RNA (1)...(19): siRNA sense strand
cauguacgcccucuacuuc

SEQ ID NO: 1529706 - RNA, 19 nt, Homo sapiens
  misc_RNA (1)...(19): siRNA sense strand
uagcuucccuguaugugau

SEQ ID NO: 1529707 - RNA, 19 nt, Homo sapiens
  misc_RNA (1)...(19): siRNA sense strand
uuaaucggauguaucuugu

SEQ ID NO: 1529708 - RNA, 19 nt, Homo sapiens
  misc_RNA (1)...(19): siRNA sense strand
ucaccuaccucaccuucuc

SEQ ID NO: 1529709 - RNA, 19 nt, Homo sapiens
  misc_RNA (1)...(19): siRNA sense strand
ugacgcucaucauguauuc

SEQ ID NO: 1529710 - RNA, 19 nt, Homo sapiens
  misc_RNA (1)...(19): siRNA sense strand
ucuuuaaacuucugcuguu

SEQ ID NO: 1529711 - RNA, 19 nt, Homo sapiens
  misc_RNA (1)...(19): siRNA sense strand
ucaggagcuuucuucauuc

SEQ ID NO: 1529712 - RNA, 19 nt, Homo sapiens
  misc_RNA (1)...(19): siRNA sense strand
guccucugcugcaucauga

SEQ ID NO: 1529713 - RNA, 19 nt, Homo sapiens
  misc_RNA (1)...(19): siRNA sense strand
caagaugaaagagcacauu

SEQ ID NO: 1529714 - RNA, 19 nt, Homo sapiens
  misc_RNA (1)...(19): siRNA sense strand
gcugcucucucugcuguga

SEQ ID NO: 1529715 - RNA, 19 nt, Homo sapiens
  misc_RNA (1)...(19): siRNA sense strand
gagaagcuggugggauauu

SEQ ID NO: 1529716 - RNA, 19 nt, Homo sapiens
  misc_RNA (1)...(19): siRNA sense strand
ccacuucguguucuuccua

SEQ ID NO: 1529717 - RNA, 19 nt, Homo sapiens
  misc_RNA (1)...(19): siRNA sense strand
gcgauacgcagcuccugaa

SEQ ID NO: 1529718 - RNA, 19 nt, Homo sapiens
  misc_RNA (1)...(19): siRNA sense strand
caaaccugcagaaguaguu

SEQ ID NO: 1529719 - RNA, 19 nt, Homo sapiens
  misc_RNA (1)...(19): siRNA sense strand
cagcaggcacagccaguaa

SEQ ID NO: 1529720 - RNA, 19 nt, Homo sapiens
  misc_RNA (1)...(19): siRNA sense strand
uggcuuguuucuucuuuau

SEQ ID NO: 1529721 - RNA, 19 nt, Homo sapiens
  misc_RNA (1)...(19): siRNA sense strand
cacauaaguggaacaagaa

SEQ ID NO: 1529722 - RNA, 19 nt, Homo sapiens
  misc_RNA (1)...(19): siRNA sense strand
gagauagcucgcuguuguu

SEQ ID NO: 1529723 - RNA, 19 nt, Homo sapiens
  misc_RNA (1)...(19): siRNA sense strand
agauauguguaaaggcauu

SEQ ID NO: 1529724 - RNA, 19 nt, Homo sapiens
  misc_RNA (1)...(19): siRNA sense strand
gcucaucauguauuccauu

SEQ ID NO: 1529725 - RNA, 19 nt, Homo sapiens
  misc_RNA (1)...(19): siRNA sense strand
guggagaggacacugaaga

SEQ ID NO: 1529726 - RNA, 19 nt, Homo sapiens
  misc_RNA (1)...(19): siRNA sense strand
uauagagucuguuuuggaa

SEQ ID NO: 1529727 - RNA, 19 nt, Homo sapiens
  misc_RNA (1)...(19): siRNA sense strand
gauauguguaaaggcauua

SEQ ID NO: 1529728 - RNA, 19 nt, Homo sapiens
  misc_RNA (1)...(19): siRNA sense strand
gcacagccaguaacaagcu

SEQ ID NO: 1529729 - RNA, 19 nt, Homo sapiens
  misc_RNA (1)...(19): siRNA sense strand
ccucagcacccgcuucaug

SEQ ID NO: 1529730 - RNA, 19 nt, Homo sapiens
  misc_RNA (1)...(19): siRNA sense strand
cuuaaucggauguaucuug

SEQ ID NO: 1529731 - RNA, 19 nt, Homo sapiens
  misc_RNA (1)...(19): siRNA sense strand
caaucugugugccugacuu

SEQ ID NO: 1529732 - RNA, 19 nt, Homo sapiens
  misc_RNA (1)...(19): siRNA sense strand
gcaggcacagccaguaaca

SEQ ID NO: 1529733 - RNA, 19 nt, Homo sapiens
  misc_RNA (1)...(19): siRNA sense strand
guacgcccucuacuucauu

SEQ ID NO: 1529734 - RNA, 19 nt, Homo sapiens
  misc_RNA (1)...(19): siRNA sense strand
ccagcaaaccugcagaagu

SEQ ID NO: 1529735 - RNA, 19 nt, Homo sapiens
  misc_RNA (1)...(19): siRNA sense strand
ucaacaacaagaucgaguu

SEQ ID NO: 1529736 - RNA, 19 nt, Homo sapiens
  misc_RNA (1)...(19): siRNA sense strand
ugacaucaacaacaagauc

SEQ ID NO: 1529737 - RNA, 19 nt, Homo sapiens
  misc_RNA (1)...(19): siRNA sense strand
uuuaucuucugucuacuga

SEQ ID NO: 1529738 - RNA, 19 nt, Homo sapiens
  misc_RNA (1)...(19): siRNA sense strand
cuacuuccacuucguguuc

SEQ ID NO: 1529739 - RNA, 19 nt, Homo sapiens
  misc_RNA (1)...(19): siRNA sense strand
gggaccagccucuuaaucg

SEQ ID NO: 1529740 - RNA, 19 nt, Homo sapiens
  misc_RNA (1)...(19): siRNA sense strand
aauggcuuguuucuucuuu

SEQ ID NO: 1529741 - RNA, 19 nt, Homo sapiens
  misc_RNA (1)...(19): siRNA sense strand
gccugugccugcuuauauc

SEQ ID NO: 1529742 - RNA, 19 nt, Homo sapiens
  misc_RNA (1)...(19): siRNA sense strand
caaccguggcucacaagau

SEQ ID NO: 1529743 - RNA, 19 nt, Homo sapiens
  misc_RNA (1)...(19): siRNA sense strand
ccgucuacaucuacuccua

SEQ ID NO: 1529744 - RNA, 19 nt, Homo sapiens
  misc_RNA (1)...(19): siRNA sense strand
gaauggcuuguuucuucuu

SEQ ID NO: 1529745 - RNA, 19 nt, Homo sapiens
  misc_RNA (1)...(19): siRNA sense strand
uugaagauauguguaaagg

SEQ ID NO: 1529746 - RNA, 19 nt, Homo sapiens
  misc_RNA (1)...(19): siRNA sense strand
agaagaaaggcaccgucua

SEQ ID NO: 1529747 - RNA, 19 nt, Homo sapiens
  misc_RNA (1)...(19): siRNA sense strand
gcaaaccugcagaaguagu

SEQ ID NO: 1529748 - RNA, 19 nt, Homo sapiens
  misc_RNA (1)...(19): siRNA sense strand
gugccugcuuauaucauug

SEQ ID NO: 1529749 - RNA, 19 nt, Homo sapiens
  misc_RNA (1)...(19): siRNA sense strand
ugugccugcuuauaucauu

SEQ ID NO: 1529750 - RNA, 19 nt, Homo sapiens
  misc_RNA (1)...(19): siRNA sense strand
aaauucugcugggaguaaa

SEQ ID NO: 1529751 - RNA, 19 nt, Homo sapiens
  misc_RNA (1)...(19): siRNA sense strand
gaugaaagagcacauuccu

SEQ ID NO: 1529752 - RNA, 19 nt, Homo sapiens
  misc_RNA (1)...(19): siRNA sense strand
agaagcuggugggauauuc

SEQ ID NO: 1529753 - RNA, 19 nt, Homo sapiens
  misc_RNA (1)...(19): siRNA sense strand
ucagcacccgcuucaugua

SEQ ID NO: 1529754 - RNA, 19 nt, Homo sapiens
  misc_RNA (1)...(19): siRNA sense strand
gaagcuggugggauauucu

SEQ ID NO: 1529755 - RNA, 19 nt, Homo sapiens
  misc_RNA (1)...(19): siRNA sense strand
uguaagaagugccuuucac

SEQ ID NO: 1529756 - RNA, 19 nt, Homo sapiens
  misc_RNA (1)...(19): siRNA sense strand
agaaaggcaccgucuacau

SEQ ID NO: 1529757 - RNA, 19 nt, Homo sapiens
  misc_RNA (1)...(19): siRNA sense strand
ucauguacgcccucuacuu

SEQ ID NO: 1529758 - RNA, 19 nt, Homo sapiens
  misc_RNA (1)...(19): siRNA sense strand
cucaucauguauuccauug

SEQ ID NO: 1529759 - RNA, 19 nt, Homo sapiens
  misc_RNA (1)...(19): siRNA sense strand
ccauguaagaagugccuuu

SEQ ID NO: 1529760 - RNA, 19 nt, Homo sapiens
  misc_RNA (1)...(19): siRNA sense strand
gcacaaggauccuacauug

SEQ ID NO: 1529761 - RNA, 19 nt, Homo sapiens
  misc_RNA (1)...(19): siRNA sense strand
gagcagggcugacguugaa

SEQ ID NO: 1529762 - RNA, 19 nt, Homo sapiens
  misc_RNA (1)...(19): siRNA sense strand
gaaaugggcgugagaaugu

SEQ ID NO: 1529763 - RNA, 19 nt, Homo sapiens
  misc_RNA (1)...(19): siRNA sense strand
ccuaguaucuugacauuga

SEQ ID NO: 1529764 - RNA, 19 nt, Homo sapiens
  misc_RNA (1)...(19): siRNA sense strand
ggagacagaugcucaugga

SEQ ID NO: 1529765 - RNA, 19 nt, Homo sapiens
  misc_RNA (1)...(19): siRNA sense strand
gagcaccucuacuuugaaa

SEQ ID NO: 1529766 - RNA, 19 nt, Homo sapiens
  misc_RNA (1)...(19): siRNA sense strand
ggagaugguagaugaguua

SEQ ID NO: 1529767 - RNA, 19 nt, Homo sapiens
  misc_RNA (1)...(19): siRNA sense strand
gggagaggauuaccuuuga

SEQ ID NO: 1529768 - RNA, 19 nt, Homo sapiens
  misc_RNA (1)...(19): siRNA sense strand
ggcguaagcuuugagauaa

SEQ ID NO: 1529769 - RNA, 19 nt, Homo sapiens
  misc_RNA (1)...(19): siRNA sense strand
cagaacgacugcagcauuu

SEQ ID NO: 1529770 - RNA, 19 nt, Homo sapiens
  misc_RNA (1)...(19): siRNA sense strand
ggaauaaugacaucgauga

SEQ ID NO: 1529771 - RNA, 19 nt, Homo sapiens
  misc_RNA (1)...(19): siRNA sense strand
ugacaaaggugccuacagu

SEQ ID NO: 1529772 - RNA, 19 nt, Homo sapiens
  misc_RNA (1)...(19): siRNA sense strand
gaacggacccgaaggagau

SEQ ID NO: 1529773 - RNA, 19 nt, Homo sapiens
  misc_RNA (1)...(19): siRNA sense strand
ccaaaggagucaaccgauu

SEQ ID NO: 1529774 - RNA, 19 nt, Homo sapiens
  misc_RNA (1)...(19): siRNA sense strand
cgaggaagcugccugaaca

SEQ ID NO: 1529775 - RNA, 19 nt, Homo sapiens
  misc_RNA (1)...(19): siRNA sense strand
gaugguagaugaguuacaa

SEQ ID NO: 1529776 - RNA, 19 nt, Homo sapiens
  misc_RNA (1)...(19): siRNA sense strand
agauaaagcuguacaccaa

SEQ ID NO: 1529777 - RNA, 19 nt, Homo sapiens
  misc_RNA (1)...(19): siRNA sense strand
gcaguagucacccugaaua

SEQ ID NO: 1529778 - RNA, 19 nt, Homo sapiens
  misc_RNA (1)...(19): siRNA sense strand
gggaaagucucuuguuugg

SEQ ID NO: 1529779 - RNA, 19 nt, Homo sapiens
  misc_RNA (1)...(19): siRNA sense strand
ugauugagguugggaauaa

SEQ ID NO: 1529780 - RNA, 19 nt, Homo sapiens
  misc_RNA (1)...(19): siRNA sense strand
gcagugggcuaccauaaac

SEQ ID NO: 1529781 - RNA, 19 nt, Homo sapiens
  misc_RNA (1)...(19): siRNA sense strand
acgagagucugguguauuu

SEQ ID NO: 1529782 - RNA, 19 nt, Homo sapiens
  misc_RNA (1)...(19): siRNA sense strand
gagaagacaccgugacaga

SEQ ID NO: 1529783 - RNA, 19 nt, Homo sapiens
  misc_RNA (1)...(19): siRNA sense strand
gacagaugcucauggauca

SEQ ID NO: 1529784 - RNA, 19 nt, Homo sapiens
  misc_RNA (1)...(19): siRNA sense strand
gagauugucaucagugaaa

SEQ ID NO: 1529785 - RNA, 19 nt, Homo sapiens
  misc_RNA (1)...(19): siRNA sense strand
gcacagugucuuccuuaaa

SEQ ID NO: 1529786 - RNA, 19 nt, Homo sapiens
  misc_RNA (1)...(19): siRNA sense strand
gaggauuggugcuggaaga

SEQ ID NO: 1529787 - RNA, 19 nt, Homo sapiens
  misc_RNA (1)...(19): siRNA sense strand
gcaaagagacaagccaaga

SEQ ID NO: 1529788 - RNA, 19 nt, Homo sapiens
  misc_RNA (1)...(19): siRNA sense strand
gcaacaggguucagugucu

SEQ ID NO: 1529789 - RNA, 19 nt, Homo sapiens
  misc_RNA (1)...(19): siRNA sense strand
guggaaaugugaucacuuc

SEQ ID NO: 1529790 - RNA, 19 nt, Homo sapiens
  misc_RNA (1)...(19): siRNA sense strand
cagggaagcugaucgagau

SEQ ID NO: 1529791 - RNA, 19 nt, Homo sapiens
  misc_RNA (1)...(19): siRNA sense strand
cgccaugacuuucaccuuu

SEQ ID NO: 1529792 - RNA, 19 nt, Homo sapiens
  misc_RNA (1)...(19): siRNA sense strand
cauaguugcuggcuacaau

SEQ ID NO: 1529793 - RNA, 19 nt, Homo sapiens
  misc_RNA (1)...(19): siRNA sense strand
ggagagaaaaucacuguua

SEQ ID NO: 1529794 - RNA, 19 nt, Homo sapiens
  misc_RNA (1)...(19): siRNA sense strand
uggaagugcuggaggauga

SEQ ID NO: 1529795 - RNA, 19 nt, Homo sapiens
  misc_RNA (1)...(19): siRNA sense strand
cgagaacuauguugugcuu

SEQ ID NO: 1529796 - RNA, 19 nt, Homo sapiens
  misc_RNA (1)...(19): siRNA sense strand
ugaaggaguuccgguuuga

SEQ ID NO: 1529797 - RNA, 19 nt, Homo sapiens
  misc_RNA (1)...(19): siRNA sense strand
ggaaaugggcgugagaaug

SEQ ID NO: 1529798 - RNA, 19 nt, Homo sapiens
  misc_RNA (1)...(19): siRNA sense strand
cgccaucacucuggaauuu

SEQ ID NO: 1529799 - RNA, 19 nt, Homo sapiens
  misc_RNA (1)...(19): siRNA sense strand
caccauccaugcucagaaa

SEQ ID NO: 1529800 - RNA, 19 nt, Homo sapiens
  misc_RNA (1)...(19): siRNA sense strand
gaagagggcaaguucagau

SEQ ID NO: 1529801 - RNA, 19 nt, Homo sapiens
  misc_RNA (1)...(19): siRNA sense strand
ucaaacccaugaugaagga

SEQ ID NO: 1529802 - RNA, 19 nt, Homo sapiens
  misc_RNA (1)...(19): siRNA sense strand
aaaggugccuacaguguug

SEQ ID NO: 1529803 - RNA, 19 nt, Homo sapiens
  misc_RNA (1)...(19): siRNA sense strand
aagauccaguccacaguua

SEQ ID NO: 1529804 - RNA, 19 nt, Homo sapiens
  misc_RNA (1)...(19): siRNA sense strand
gaugaaggaguuccgguuu

SEQ ID NO: 1529805 - RNA, 19 nt, Homo sapiens
  misc_RNA (1)...(19): siRNA sense strand
cgaaggagaugguguucca

SEQ ID NO: 1529806 - RNA, 19 nt, Homo sapiens
  misc_RNA (1)...(19): siRNA sense strand
gcaugggacuuugaaauac

SEQ ID NO: 1529807 - RNA, 19 nt, Homo sapiens
  misc_RNA (1)...(19): siRNA sense strand
gaaggcaacgaccacauug

SEQ ID NO: 1529808 - RNA, 19 nt, Homo sapiens
  misc_RNA (1)...(19): siRNA sense strand
ggccagaaccugaagauca

SEQ ID NO: 1529809 - RNA, 19 nt, Homo sapiens
  misc_RNA (1)...(19): siRNA sense strand
gcugagauguucccugucu

SEQ ID NO: 1529810 - RNA, 19 nt, Homo sapiens
  misc_RNA (1)...(19): siRNA sense strand
cccagaagaugcaaagaga

SEQ ID NO: 1529811 - RNA, 19 nt, Homo sapiens
  misc_RNA (1)...(19): siRNA sense strand
ggacaacggcauucugaca

SEQ ID NO: 1529812 - RNA, 19 nt, Homo sapiens
  misc_RNA (1)...(19): siRNA sense strand
ugcaggagaugguagauga

SEQ ID NO: 1529813 - RNA, 19 nt, Homo sapiens
  misc_RNA (1)...(19): siRNA sense strand
caccuaguaucuugacauu

SEQ ID NO: 1529814 - RNA, 19 nt, Homo sapiens
  misc_RNA (1)...(19): siRNA sense strand
ucagugacaucugcacaaa

SEQ ID NO: 1529815 - RNA, 19 nt, Homo sapiens
  misc_RNA (1)...(19): siRNA sense strand
caaagagacaagccaagaa

SEQ ID NO: 1529816 - RNA, 19 nt, Homo sapiens
  misc_RNA (1)...(19): siRNA sense strand
guucaccgcugaucacagu

SEQ ID NO: 1529817 - RNA, 19 nt, Homo sapiens
  misc_RNA (1)...(19): siRNA sense strand
gaaauccucgcaacucauc

SEQ ID NO: 1529818 - RNA, 19 nt, Homo sapiens
  misc_RNA (1)...(19): siRNA sense strand
aaagagacaagccaagaaa

SEQ ID NO: 1529819 - RNA, 19 nt, Homo sapiens
  misc_RNA (1)...(19): siRNA sense strand
gcguaagcuuugagauaaa

SEQ ID NO: 1529820 - RNA, 19 nt, Homo sapiens
  misc_RNA (1)...(19): siRNA sense strand
caaaggugccuacaguguu

SEQ ID NO: 1529821 - RNA, 19 nt, Homo sapiens
  misc_RNA (1)...(19): siRNA sense strand
ucucguaugauuucucuua

SEQ ID NO: 1529822 - RNA, 19 nt, Homo sapiens
  misc_RNA (1)...(19): siRNA sense strand
uaugacacgucuucaccua

SEQ ID NO: 1529823 - RNA, 19 nt, Homo sapiens
  misc_RNA (1)...(19): siRNA sense strand
acacugugauuccguucua

SEQ ID NO: 1529824 - RNA, 19 nt, Homo sapiens
  misc_RNA (1)...(19): siRNA sense strand
gcucauggaucauuuuguu

SEQ ID NO: 1529825 - RNA, 19 nt, Homo sapiens
  misc_RNA (1)...(19): siRNA sense strand
caaaggagucaaccgauuc

SEQ ID NO: 1529826 - RNA, 19 nt, Homo sapiens
  misc_RNA (1)...(19): siRNA sense strand
cugggaaagucucuuguuu

SEQ ID NO: 1529827 - RNA, 19 nt, Homo sapiens
  misc_RNA (1)...(19): siRNA sense strand
ggagaggauuaccuuugau

SEQ ID NO: 1529828 - RNA, 19 nt, Homo sapiens
  misc_RNA (1)...(19): siRNA sense strand
cauaaacacaucaccuuga

SEQ ID NO: 1529829 - RNA, 19 nt, Homo sapiens
  misc_RNA (1)...(19): siRNA sense strand
gaaggagggcuauguucug

SEQ ID NO: 1529830 - RNA, 19 nt, Homo sapiens
  misc_RNA (1)...(19): siRNA sense strand
gaaggagucgagauuguca

SEQ ID NO: 1529831 - RNA, 19 nt, Homo sapiens
  misc_RNA (1)...(19): siRNA sense strand
gccaugacuuucaccuuug

SEQ ID NO: 1529832 - RNA, 19 nt, Homo sapiens
  misc_RNA (1)...(19): siRNA sense strand
gauuggugcuggaagaaca

SEQ ID NO: 1529833 - RNA, 19 nt, Homo sapiens
  misc_RNA (1)...(19): siRNA sense strand
gaacaggacaucgcacaag

SEQ ID NO: 1529834 - RNA, 19 nt, Homo sapiens
  misc_RNA (1)...(19): siRNA sense strand
ccagaucccaguaugacua

SEQ ID NO: 1529835 - RNA, 19 nt, Homo sapiens
  misc_RNA (1)...(19): siRNA sense strand
ccagaacgacugcagcauu

SEQ ID NO: 1529836 - RNA, 19 nt, Homo sapiens
  misc_RNA (1)...(19): siRNA sense strand
ccugagcccuggccaguau

SEQ ID NO: 1529837 - RNA, 19 nt, Homo sapiens
  misc_RNA (1)...(19): siRNA sense strand
gaacuaucaccaccgacaa

SEQ ID NO: 1529838 - RNA, 19 nt, Homo sapiens
  misc_RNA (1)...(19): siRNA sense strand
ccaagaaacagaagacaag

SEQ ID NO: 1529839 - RNA, 19 nt, Homo sapiens
  misc_RNA (1)...(19): siRNA sense strand
gaacuauguugugcuucug

SEQ ID NO: 1529840 - RNA, 19 nt, Homo sapiens
  misc_RNA (1)...(19): siRNA sense strand
gagggcaaguucagauuac

SEQ ID NO: 1529841 - RNA, 19 nt, Homo sapiens
  misc_RNA (1)...(19): siRNA sense strand
acaacggcauucugacauu

SEQ ID NO: 1529842 - RNA, 19 nt, Homo sapiens
  misc_RNA (1)...(19): siRNA sense strand
ccugagugguggccuguuu

SEQ ID NO: 1529843 - RNA, 19 nt, Homo sapiens
  misc_RNA (1)...(19): siRNA sense strand
ugacacgucuucaccuagu

SEQ ID NO: 1529844 - RNA, 19 nt, Homo sapiens
  misc_RNA (1)...(19): siRNA sense strand
caacggcauucugacauuc

SEQ ID NO: 1529845 - RNA, 19 nt, Homo sapiens
  misc_RNA (1)...(19): siRNA sense strand
ggagggcuauguucugacu

SEQ ID NO: 1529846 - RNA, 19 nt, Homo sapiens
  misc_RNA (1)...(19): siRNA sense strand
gcaagguccucagcaaagg

SEQ ID NO: 1529847 - RNA, 19 nt, Homo sapiens
  misc_RNA (1)...(19): siRNA sense strand
ucaucgagauaaagcugua

SEQ ID NO: 1529848 - RNA, 19 nt, Homo sapiens
  misc_RNA (1)...(19): siRNA sense strand
aaacggagagcccgaacaa

SEQ ID NO: 1529849 - RNA, 19 nt, Homo sapiens
  misc_RNA (1)...(19): siRNA sense strand
ggcacagugucuuccuuaa

SEQ ID NO: 1529850 - RNA, 19 nt, Homo sapiens
  misc_RNA (1)...(19): siRNA sense strand
agucuuuacugaugacaaa

SEQ ID NO: 1529851 - RNA, 19 nt, Homo sapiens
  misc_RNA (1)...(19): siRNA sense strand
gaacccgccuuggucuuag

SEQ ID NO: 1529852 - RNA, 19 nt, Homo sapiens
  misc_RNA (1)...(19): siRNA sense strand
gauguggccuuuguacagu

SEQ ID NO: 1529853 - RNA, 19 nt, Homo sapiens
  misc_RNA (1)...(19): siRNA sense strand
ccccagacauuuccucuua

SEQ ID NO: 1529854 - RNA, 19 nt, Homo sapiens
  misc_RNA (1)...(19): siRNA sense strand
ccaugacuuucaccuuuga

SEQ ID NO: 1529855 - RNA, 19 nt, Homo sapiens
  misc_RNA (1)...(19): siRNA sense strand
ugugaucacuuccucugaa

SEQ ID NO: 1529856 - RNA, 19 nt, Homo sapiens
  misc_RNA (1)...(19): siRNA sense strand
gaacgacugcagcauuuac

SEQ ID NO: 1529857 - RNA, 19 nt, Homo sapiens
  misc_RNA (1)...(19): siRNA sense strand
cacagugucuuccuuaaac

SEQ ID NO: 1529858 - RNA, 19 nt, Homo sapiens
  misc_RNA (1)...(19): siRNA sense strand
guaccgaaccgcuuacagu

SEQ ID NO: 1529859 - RNA, 19 nt, Homo sapiens
  misc_RNA (1)...(19): siRNA sense strand
acaacgugcucccuggaaa

SEQ ID NO: 1529860 - RNA, 19 nt, Homo sapiens
  misc_RNA (1)...(19): siRNA sense strand
gcccacagcuuccguauca

SEQ ID NO: 1529861 - RNA, 19 nt, Homo sapiens
  misc_RNA (1)...(19): siRNA sense strand
uggaggagaugcugaauga

SEQ ID NO: 1529862 - RNA, 19 nt, Homo sapiens
  misc_RNA (1)...(19): siRNA sense strand
ggaccuggcaccugguuua

SEQ ID NO: 1529863 - RNA, 19 nt, Homo sapiens
  misc_RNA (1)...(19): siRNA sense strand
ggaagccggugauagugaa

SEQ ID NO: 1529864 - RNA, 19 nt, Homo sapiens
  misc_RNA (1)...(19): siRNA sense strand
ccauggagguucaggauug

SEQ ID NO: 1529865 - RNA, 19 nt, Homo sapiens
  misc_RNA (1)...(19): siRNA sense strand
ucaccugguucaagaauga

SEQ ID NO: 1529866 - RNA, 19 nt, Homo sapiens
  misc_RNA (1)...(19): siRNA sense strand
gggccuggcugacauggaa

SEQ ID NO: 1529867 - RNA, 19 nt, Homo sapiens
  misc_RNA (1)...(19): siRNA sense strand
gugcaagccaugccuguua

SEQ ID NO: 1529868 - RNA, 19 nt, Homo sapiens
  misc_RNA (1)...(19): siRNA sense strand
ggaguuccacauccagaua

SEQ ID NO: 1529869 - RNA, 19 nt, Homo sapiens
  misc_RNA (1)...(19): siRNA sense strand
gagccaggcaggaaguaua

SEQ ID NO: 1529870 - RNA, 19 nt, Homo sapiens
  misc_RNA (1)...(19): siRNA sense strand
cggcagggcugucaguaug

SEQ ID NO: 1529871 - RNA, 19 nt, Homo sapiens
  misc_RNA (1)...(19): siRNA sense strand
ggagagaggagagaugcua

SEQ ID NO: 1529872 - RNA, 19 nt, Homo sapiens
  misc_RNA (1)...(19): siRNA sense strand
ggugacagcaguuaaugaa

SEQ ID NO: 1529873 - RNA, 19 nt, Homo sapiens
  misc_RNA (1)...(19): siRNA sense strand
gugcacagccucuucauca

SEQ ID NO: 1529874 - RNA, 19 nt, Homo sapiens
  misc_RNA (1)...(19): siRNA sense strand
gacagcaguuaaugaagga

SEQ ID NO: 1529875 - RNA, 19 nt, Homo sapiens
  misc_RNA (1)...(19): siRNA sense strand
ggugaggaaucuccaaguc

SEQ ID NO: 1529876 - RNA, 19 nt, Homo sapiens
  misc_RNA (1)...(19): siRNA sense strand
gaggagaugcugaaugaag

SEQ ID NO: 1529877 - RNA, 19 nt, Homo sapiens
  misc_RNA (1)...(19): siRNA sense strand
gcacugccacccucauugu

SEQ ID NO: 1529878 - RNA, 19 nt, Homo sapiens
  misc_RNA (1)...(19): siRNA sense strand
ugacagagaaacugagaga

SEQ ID NO: 1529879 - RNA, 19 nt, Homo sapiens
  misc_RNA (1)...(19): siRNA sense strand
ccuggagucugaggagaua

SEQ ID NO: 1529880 - RNA, 19 nt, Homo sapiens
  misc_RNA (1)...(19): siRNA sense strand
acaaggcuguggcugagaa

SEQ ID NO: 1529881 - RNA, 19 nt, Homo sapiens
  misc_RNA (1)...(19): siRNA sense strand
ucagggugguggccaagaa

SEQ ID NO: 1529882 - RNA, 19 nt, Homo sapiens
  misc_RNA (1)...(19): siRNA sense strand
uaccauugcuccagaugug

SEQ ID NO: 1529883 - RNA, 19 nt, Homo sapiens
  misc_RNA (1)...(19): siRNA sense strand
gaugugacagagaaacuga

SEQ ID NO: 1529884 - RNA, 19 nt, Homo sapiens
  misc_RNA (1)...(19): siRNA sense strand
cacgucaccugguucaaga

SEQ ID NO: 1529885 - RNA, 19 nt, Homo sapiens
  misc_RNA (1)...(19): siRNA sense strand
aggagaugcugaaugaaga

SEQ ID NO: 1529886 - RNA, 19 nt, Homo sapiens
  misc_RNA (1)...(19): siRNA sense strand
cuccagaugugacagagaa

SEQ ID NO: 1529887 - RNA, 19 nt, Homo sapiens
  misc_RNA (1)...(19): siRNA sense strand
gcacuacgcgguguucaca

SEQ ID NO: 1529888 - RNA, 19 nt, Homo sapiens
  misc_RNA (1)...(19): siRNA sense strand
gcaaagacggcagguugga

SEQ ID NO: 1529889 - RNA, 19 nt, Homo sapiens
  misc_RNA (1)...(19): siRNA sense strand
caggagaaguggcaaagac

SEQ ID NO: 1529890 - RNA, 19 nt, Homo sapiens
  misc_RNA (1)...(19): siRNA sense strand
gggaagccggugauaguga

SEQ ID NO: 1529891 - RNA, 19 nt, Homo sapiens
  misc_RNA (1)...(19): siRNA sense strand
ccauccaccugcaggagaa

SEQ ID NO: 1529892 - RNA, 19 nt, Homo sapiens
  misc_RNA (1)...(19): siRNA sense strand
guuacugucugucccaagu

SEQ ID NO: 1529893 - RNA, 19 nt, Homo sapiens
  misc_RNA (1)...(19): siRNA sense strand
guuuaaggauggcgucaag

SEQ ID NO: 1529894 - RNA, 19 nt, Homo sapiens
  misc_RNA (1)...(19): siRNA sense strand
ucauagaacccagcaccua

SEQ ID NO: 1529895 - RNA, 19 nt, Homo sapiens
  misc_RNA (1)...(19): siRNA sense strand
gaccgcagccuggaaggaa

SEQ ID NO: 1529896 - RNA, 19 nt, Homo sapiens
  misc_RNA (1)...(19): siRNA sense strand
gagcucacucugcaaguca

SEQ ID NO: 1529897 - RNA, 19 nt, Homo sapiens
  misc_RNA (1)...(19): siRNA sense strand
gaccuggcaccugguuuaa

SEQ ID NO: 1529898 - RNA, 19 nt, Homo sapiens
  misc_RNA (1)...(19): siRNA sense strand
gagguucaggauugccaua

SEQ ID NO: 1529899 - RNA, 19 nt, Homo sapiens
  misc_RNA (1)...(19): siRNA sense strand
cacccucauugucauagaa

SEQ ID NO: 1529900 - RNA, 19 nt, Homo sapiens
  misc_RNA (1)...(19): siRNA sense strand
gaaugaccgcagccuggaa

SEQ ID NO: 1529901 - RNA, 19 nt, Homo sapiens
  misc_RNA (1)...(19): siRNA sense strand
caggagcacuuggcugaag

SEQ ID NO: 1529902 - RNA, 19 nt, Homo sapiens
  misc_RNA (1)...(19): siRNA sense strand
gcagggcugucaguaugag

SEQ ID NO: 1529903 - RNA, 19 nt, Homo sapiens
  misc_RNA (1)...(19): siRNA sense strand
gcagguuggacaucuaugg

SEQ ID NO: 1529904 - RNA, 19 nt, Homo sapiens
  misc_RNA (1)...(19): siRNA sense strand
gcaggagaaguggcaaaga

SEQ ID NO: 1529905 - RNA, 19 nt, Homo sapiens
  misc_RNA (1)...(19): siRNA sense strand
cagugaaggcuccgugcua

SEQ ID NO: 1529906 - RNA, 19 nt, Homo sapiens
  misc_RNA (1)...(19): siRNA sense strand
ccuggcaccugguuuaagg

SEQ ID NO: 1529907 - RNA, 19 nt, Homo sapiens
  misc_RNA (1)...(19): siRNA sense strand
ggagaugcugaaugaagau

SEQ ID NO: 1529908 - RNA, 19 nt, Homo sapiens
  misc_RNA (1)...(19): siRNA sense strand
ccacccucauugucauaga

SEQ ID NO: 1529909 - RNA, 19 nt, Homo sapiens
  misc_RNA (1)...(19): siRNA sense strand
ggccucacccagcuucuga

SEQ ID NO: 1529910 - RNA, 19 nt, Homo sapiens
  misc_RNA (1)...(19): siRNA sense strand
gccggacuguagagugcua

SEQ ID NO: 1529911 - RNA, 19 nt, Homo sapiens
  misc_RNA (1)...(19): siRNA sense strand
cagcacugccacccucauu

SEQ ID NO: 1529912 - RNA, 19 nt, Homo sapiens
  misc_RNA (1)...(19): siRNA sense strand
ggaaucuccaagucacaga

SEQ ID NO: 1529913 - RNA, 19 nt, Homo sapiens
  misc_RNA (1)...(19): siRNA sense strand
gugaggaaucuccaaguca

SEQ ID NO: 1529914 - RNA, 19 nt, Homo sapiens
  misc_RNA (1)...(19): siRNA sense strand
cgagcucacucugcaaguc

SEQ ID NO: 1529915 - RNA, 19 nt, Homo sapiens
  misc_RNA (1)...(19): siRNA sense strand
gagaugcuacccggaguuc

SEQ ID NO: 1529916 - RNA, 19 nt, Homo sapiens
  misc_RNA (1)...(19): siRNA sense strand
ggagucugaggagauauug

SEQ ID NO: 1529917 - RNA, 19 nt, Homo sapiens
  misc_RNA (1)...(19): siRNA sense strand
cuucacggaugcccaugug

SEQ ID NO: 1529918 - RNA, 19 nt, Homo sapiens
  misc_RNA (1)...(19): siRNA sense strand
gggugguggccaagaauga

SEQ ID NO: 1529919 - RNA, 19 nt, Homo sapiens
  misc_RNA (1)...(19): siRNA sense strand
gaucgagaggcguaagaag

SEQ ID NO: 1529920 - RNA, 19 nt, Homo sapiens
  misc_RNA (1)...(19): siRNA sense strand
gacggcagguuggacaucu

SEQ ID NO: 1529921 - RNA, 19 nt, Homo sapiens
  misc_RNA (1)...(19): siRNA sense strand
ggccacgaauaccacuuca

SEQ ID NO: 1529922 - RNA, 19 nt, Homo sapiens
  misc_RNA (1)...(19): siRNA sense strand
ccgccacacucuccuguac

SEQ ID NO: 1529923 - RNA, 19 nt, Homo sapiens
  misc_RNA (1)...(19): siRNA sense strand
cccuguggcuggacucuca

SEQ ID NO: 1529924 - RNA, 19 nt, Homo sapiens
  misc_RNA (1)...(19): siRNA sense strand
gggugacagcaguuaauga

SEQ ID NO: 1529925 - RNA, 19 nt, Homo sapiens
  misc_RNA (1)...(19): siRNA sense strand
gcgggugacagcaguuaau

SEQ ID NO: 1529926 - RNA, 19 nt, Homo sapiens
  misc_RNA (1)...(19): siRNA sense strand
gcucacucugcaagucaua

SEQ ID NO: 1529927 - RNA, 19 nt, Homo sapiens
  misc_RNA (1)...(19): siRNA sense strand
ggagggagauggacucgaa

SEQ ID NO: 1529928 - RNA, 19 nt, Homo sapiens
  misc_RNA (1)...(19): siRNA sense strand
gucagcagcuccagcaauu

SEQ ID NO: 1529929 - RNA, 19 nt, Homo sapiens
  misc_RNA (1)...(19): siRNA sense strand
gcaauuaggcugggacaga

SEQ ID NO: 1529930 - RNA, 19 nt, Homo sapiens
  misc_RNA (1)...(19): siRNA sense strand
gcccagagaaggcacauuu

SEQ ID NO: 1529931 - RNA, 19 nt, Homo sapiens
  misc_RNA (1)...(19): siRNA sense strand
gauggugccuggugacaca

SEQ ID NO: 1529932 - RNA, 19 nt, Homo sapiens
  misc_RNA (1)...(19): siRNA sense strand
ggaacaaggccacguuucu

SEQ ID NO: 1529933 - RNA, 19 nt, Homo sapiens
  misc_RNA (1)...(19): siRNA sense strand
caauuaggcugggacagau

SEQ ID NO: 1529934 - RNA, 19 nt, Homo sapiens
  misc_RNA (1)...(19): siRNA sense strand
gaacaaggccacguuucuc

SEQ ID NO: 1529935 - RNA, 19 nt, Homo sapiens
  misc_RNA (1)...(19): siRNA sense strand
ggacauuccugugguucuc

SEQ ID NO: 1529936 - RNA, 19 nt, Homo sapiens
  misc_RNA (1)...(19): siRNA sense strand
gggcagacaggccaggaaa

SEQ ID NO: 1529937 - RNA, 19 nt, Homo sapiens
  misc_RNA (1)...(19): siRNA sense strand
gggcaucugugggaacaag

SEQ ID NO: 1529938 - RNA, 19 nt, Homo sapiens
  misc_RNA (1)...(19): siRNA sense strand
cagcagcuccagcaauuag

SEQ ID NO: 1529939 - RNA, 19 nt, Homo sapiens
  misc_RNA (1)...(19): siRNA sense strand
ggaagagcgccugcaagug

SEQ ID NO: 1529940 - RNA, 19 nt, Homo sapiens
  misc_RNA (1)...(19): siRNA sense strand
gcagacaggccaggaagag

SEQ ID NO: 1529941 - RNA, 19 nt, Homo sapiens
  misc_RNA (1)...(19): siRNA sense strand
gaccaaccaggcccucgaa

SEQ ID NO: 1529942 - RNA, 19 nt, Homo sapiens
  misc_RNA (1)...(19): siRNA sense strand
caggaugccgugccucaga

SEQ ID NO: 1529943 - RNA, 19 nt, Homo sapiens
  misc_RNA (1)...(19): siRNA sense strand
cagagaaggcacauuugca

SEQ ID NO: 1529944 - RNA, 19 nt, Homo sapiens
  misc_RNA (1)...(19): siRNA sense strand
gggaacaaggccacguuuc

SEQ ID NO: 1529945 - RNA, 19 nt, Homo sapiens
  misc_RNA (1)...(19): siRNA sense strand
aggaagagcgccugcaagu

SEQ ID NO: 1529946 - RNA, 19 nt, Homo sapiens
  misc_RNA (1)...(19): siRNA sense strand
gcaggagauuugcacauua

SEQ ID NO: 1529947 - RNA, 19 nt, Homo sapiens
  misc_RNA (1)...(19): siRNA sense strand
uaaaggagcuacaggagaa

SEQ ID NO: 1529948 - RNA, 19 nt, Homo sapiens
  misc_RNA (1)...(19): siRNA sense strand
ggaaggaacuagagagagu

SEQ ID NO: 1529949 - RNA, 19 nt, Homo sapiens
  misc_RNA (1)...(19): siRNA sense strand
gagaggagcuuguccaaac

SEQ ID NO: 1529950 - RNA, 19 nt, Homo sapiens
  misc_RNA (1)...(19): siRNA sense strand
caacaacuccaauuagaaa

SEQ ID NO: 1529951 - RNA, 19 nt, Homo sapiens
  misc_RNA (1)...(19): siRNA sense strand
ugaauaugcugaacaucua

SEQ ID NO: 1529952 - RNA, 19 nt, Homo sapiens
  misc_RNA (1)...(19): siRNA sense strand
gaagaaggcaaaccaguug

SEQ ID NO: 1529953 - RNA, 19 nt, Homo sapiens
  misc_RNA (1)...(19): siRNA sense strand
gaacauacagaaagaggaa

SEQ ID NO: 1529954 - RNA, 19 nt, Homo sapiens
  misc_RNA (1)...(19): siRNA sense strand
caggagauuugcacauuaa

SEQ ID NO: 1529955 - RNA, 19 nt, Homo sapiens
  misc_RNA (1)...(19): siRNA sense strand
gaaacguucucucagauac

SEQ ID NO: 1529956 - RNA, 19 nt, Homo sapiens
  misc_RNA (1)...(19): siRNA sense strand
caugaaacguucucucaga

SEQ ID NO: 1529957 - RNA, 19 nt, Homo sapiens
  misc_RNA (1)...(19): siRNA sense strand
gaaggagucauuucaacaa

SEQ ID NO: 1529958 - RNA, 19 nt, Homo sapiens
  misc_RNA (1)...(19): siRNA sense strand
ggaggaggcacuacugaaa

SEQ ID NO: 1529959 - RNA, 19 nt, Homo sapiens
  misc_RNA (1)...(19): siRNA sense strand
gagauuugcacauuaaaga

SEQ ID NO: 1529960 - RNA, 19 nt, Homo sapiens
  misc_RNA (1)...(19): siRNA sense strand
aaagagaagcagcaagaua

SEQ ID NO: 1529961 - RNA, 19 nt, Homo sapiens
  misc_RNA (1)...(19): siRNA sense strand
gagcuuguccaaacucaaa

SEQ ID NO: 1529962 - RNA, 19 nt, Homo sapiens
  misc_RNA (1)...(19): siRNA sense strand
gcgcauaagucuccugaac

SEQ ID NO: 1529963 - RNA, 19 nt, Homo sapiens
  misc_RNA (1)...(19): siRNA sense strand
cagaaagaggaacuaaaua

SEQ ID NO: 1529964 - RNA, 19 nt, Homo sapiens
  misc_RNA (1)...(19): siRNA sense strand
gcacauuaaagaaagagaa

SEQ ID NO: 1529965 - RNA, 19 nt, Homo sapiens
  misc_RNA (1)...(19): siRNA sense strand
ggaccuguaccacaugaaa

SEQ ID NO: 1529966 - RNA, 19 nt, Homo sapiens
  misc_RNA (1)...(19): siRNA sense strand
acagaaagaggaacuaaau

SEQ ID NO: 1529967 - RNA, 19 nt, Homo sapiens
  misc_RNA (1)...(19): siRNA sense strand
gcaguccuguuucuugcuu

SEQ ID NO: 1529968 - RNA, 19 nt, Homo sapiens
  misc_RNA (1)...(19): siRNA sense strand
ucgaggagccaaacaauga

SEQ ID NO: 1529969 - RNA, 19 nt, Homo sapiens
  misc_RNA (1)...(19): siRNA sense strand
agaaagagaagcagcaaga

SEQ ID NO: 1529970 - RNA, 19 nt, Homo sapiens
  misc_RNA (1)...(19): siRNA sense strand
gaauaugcugaacaucuaa

SEQ ID NO: 1529971 - RNA, 19 nt, Homo sapiens
  misc_RNA (1)...(19): siRNA sense strand
ccaauuagaaagacaugaa

SEQ ID NO: 1529972 - RNA, 19 nt, Homo sapiens
  misc_RNA (1)...(19): siRNA sense strand
ucucagauacuuugaagaa

SEQ ID NO: 1529973 - RNA, 19 nt, Homo sapiens
  misc_RNA (1)...(19): siRNA sense strand
uaaaggagaguuagagagu

SEQ ID NO: 1529974 - RNA, 19 nt, Homo sapiens
  misc_RNA (1)...(19): siRNA sense strand
gcaguuggagcagcaagua

SEQ ID NO: 1529975 - RNA, 19 nt, Homo sapiens
  misc_RNA (1)...(19): siRNA sense strand
cauugaacauacagaaaga

SEQ ID NO: 1529976 - RNA, 19 nt, Homo sapiens
  misc_RNA (1)...(19): siRNA sense strand
aagagaagcagcaagauau

SEQ ID NO: 1529977 - RNA, 19 nt, Homo sapiens
  misc_RNA (1)...(19): siRNA sense strand
agaaagacaugaauaugcu

SEQ ID NO: 1529978 - RNA, 19 nt, Homo sapiens
  misc_RNA (1)...(19): siRNA sense strand
caagaaacagaaagccaaa

SEQ ID NO: 1529979 - RNA, 19 nt, Homo sapiens
  misc_RNA (1)...(19): siRNA sense strand
guacggaguggaaguuaga

SEQ ID NO: 1529980 - RNA, 19 nt, Homo sapiens
  misc_RNA (1)...(19): siRNA sense strand
caagagcgcacugcaguug

SEQ ID NO: 1529981 - RNA, 19 nt, Homo sapiens
  misc_RNA (1)...(19): siRNA sense strand
gaggaaggaacuagagaga

SEQ ID NO: 1529982 - RNA, 19 nt, Homo sapiens
  misc_RNA (1)...(19): siRNA sense strand
ugaaacguucucucagaua

SEQ ID NO: 1529983 - RNA, 19 nt, Homo sapiens
  misc_RNA (1)...(19): siRNA sense strand
ggacaagaagagaggauuc

SEQ ID NO: 1529984 - RNA, 19 nt, Homo sapiens
  misc_RNA (1)...(19): siRNA sense strand
gaaagaggaacuaaauacg

SEQ ID NO: 1529985 - RNA, 19 nt, Homo sapiens
  misc_RNA (1)...(19): siRNA sense strand
cgcaggagauuugcacauu

SEQ ID NO: 1529986 - RNA, 19 nt, Homo sapiens
  misc_RNA (1)...(19): siRNA sense strand
gacauugaacauacagaaa

SEQ ID NO: 1529987 - RNA, 19 nt, Homo sapiens
  misc_RNA (1)...(19): siRNA sense strand
gggcauugguggcauucug

SEQ ID NO: 1529988 - RNA, 19 nt, Homo sapiens
  misc_RNA (1)...(19): siRNA sense strand
uucaacaacuccaauuaga

SEQ ID NO: 1529989 - RNA, 19 nt, Homo sapiens
  misc_RNA (1)...(19): siRNA sense strand
agaaagaggaacuaaauac

SEQ ID NO: 1529990 - RNA, 19 nt, Homo sapiens
  misc_RNA (1)...(19): siRNA sense strand
gaaagagaagcagcaagau

SEQ ID NO: 1529991 - RNA, 19 nt, Homo sapiens
  misc_RNA (1)...(19): siRNA sense strand
ucaacaacuccaauuagaa

SEQ ID NO: 1529992 - RNA, 19 nt, Homo sapiens
  misc_RNA (1)...(19): siRNA sense strand
gcagcguaaaggagaguua

SEQ ID NO: 1529993 - RNA, 19 nt, Homo sapiens
  misc_RNA (1)...(19): siRNA sense strand
auacggaccuguaccacau

SEQ ID NO: 1529994 - RNA, 19 nt, Homo sapiens
  misc_RNA (1)...(19): siRNA sense strand
ggagaggagcuuguccaaa

SEQ ID NO: 1529995 - RNA, 19 nt, Homo sapiens
  misc_RNA (1)...(19): siRNA sense strand
agaagaaggcaaaccaguu

SEQ ID NO: 1529996 - RNA, 19 nt, Homo sapiens
  misc_RNA (1)...(19): siRNA sense strand
gcuguccgccugcaacauu

SEQ ID NO: 1529997 - RNA, 19 nt, Homo sapiens
  misc_RNA (1)...(19): siRNA sense strand
aagugcagcugacacaguu

SEQ ID NO: 1529998 - RNA, 19 nt, Homo sapiens
  misc_RNA (1)...(19): siRNA sense strand
aaggagaguuagagagugu

SEQ ID NO: 1529999 - RNA, 19 nt, Homo sapiens
  misc_RNA (1)...(19): siRNA sense strand
aaagggugcuagagguuca

SEQ ID NO: 1530000 - RNA, 19 nt, Homo sapiens
  misc_RNA (1)...(19): siRNA sense strand
acaugaauaugcugaacau

SEQ ID NO: 1530001 - RNA, 19 nt, Homo sapiens
  misc_RNA (1)...(19): siRNA sense strand
ggagauuugcacauuaaag

SEQ ID NO: 1530002 - RNA, 19 nt, Homo sapiens
  misc_RNA (1)...(19): siRNA sense strand
caaacaaugagaacaagag

SEQ ID NO: 1530003 - RNA, 19 nt, Homo sapiens
  misc_RNA (1)...(19): siRNA sense strand
cacagaagaagaaggcaaa

SEQ ID NO: 1530004 - RNA, 19 nt, Homo sapiens
  misc_RNA (1)...(19): siRNA sense strand
gaagcuuggugaggugaag

SEQ ID NO: 1530005 - RNA, 19 nt, Homo sapiens
  misc_RNA (1)...(19): siRNA sense strand
gggaggaggcacuacugaa

SEQ ID NO: 1530006 - RNA, 19 nt, Homo sapiens
  misc_RNA (1)...(19): siRNA sense strand
agacauugaacauacagaa

SEQ ID NO: 1530007 - RNA, 19 nt, Homo sapiens
  misc_RNA (1)...(19): siRNA sense strand
gccaaacaaugagaacaag

SEQ ID NO: 1530008 - RNA, 19 nt, Homo sapiens
  misc_RNA (1)...(19): siRNA sense strand
gguacggaguggaaguuag

SEQ ID NO: 1530009 - RNA, 19 nt, Homo sapiens
  misc_RNA (1)...(19): siRNA sense strand
cacaugaaacguucucuca

SEQ ID NO: 1530010 - RNA, 19 nt, Homo sapiens
  misc_RNA (1)...(19): siRNA sense strand
ggaagcaggaagagaggau

SEQ ID NO: 1530011 - RNA, 19 nt, Homo sapiens
  misc_RNA (1)...(19): siRNA sense strand
ggcagcagaggaugagaaa

SEQ ID NO: 1530012 - RNA, 19 nt, Homo sapiens
  misc_RNA (1)...(19): siRNA sense strand
uagaaagacaugaauaugc

SEQ ID NO: 1530013 - RNA, 19 nt, Homo sapiens
  misc_RNA (1)...(19): siRNA sense strand
caacuccaauuagaaagac

SEQ ID NO: 1530014 - RNA, 19 nt, Homo sapiens
  misc_RNA (1)...(19): siRNA sense strand
ugaaagugcagcugacaca

SEQ ID NO: 1530015 - RNA, 19 nt, Homo sapiens
  misc_RNA (1)...(19): siRNA sense strand
gaggaggcacuacugaaag

SEQ ID NO: 1530016 - RNA, 19 nt, Homo sapiens
  misc_RNA (1)...(19): siRNA sense strand
aacauucauugcagcguaa

SEQ ID NO: 1530017 - RNA, 19 nt, Homo sapiens
  misc_RNA (1)...(19): siRNA sense strand
gaagcaggaagagaggauu

SEQ ID NO: 1530018 - RNA, 19 nt, Homo sapiens
  misc_RNA (1)...(19): siRNA sense strand
gcuccaggcccaggucaaa

SEQ ID NO: 1530019 - RNA, 19 nt, Homo sapiens
  misc_RNA (1)...(19): siRNA sense strand
acaaucagcgcauaagucu

SEQ ID NO: 1530020 - RNA, 19 nt, Homo sapiens
  misc_RNA (1)...(19): siRNA sense strand
ucucucagauacuuugaag

SEQ ID NO: 1530021 - RNA, 19 nt, Homo sapiens
  misc_RNA (1)...(19): siRNA sense strand
gauaugcgucggguagaga

SEQ ID NO: 1530022 - RNA, 19 nt, Homo sapiens
  misc_RNA (1)...(19): siRNA sense strand
ggugcuagagguucaaauc

SEQ ID NO: 1530023 - RNA, 19 nt, Homo sapiens
  misc_RNA (1)...(19): siRNA sense strand
uaaauacggaccuguacca

SEQ ID NO: 1530024 - RNA, 19 nt, Homo sapiens
  misc_RNA (1)...(19): siRNA sense strand
ggauucaggagcagcacaa

SEQ ID NO: 1530025 - RNA, 19 nt, Homo sapiens
  misc_RNA (1)...(19): siRNA sense strand
ccaaacaaugagaacaaga

SEQ ID NO: 1530026 - RNA, 19 nt, Homo sapiens
  misc_RNA (1)...(19): siRNA sense strand
gaugucauggccacacaga

SEQ ID NO: 1530027 - RNA, 19 nt, Homo sapiens
  misc_RNA (1)...(19): siRNA sense strand
gaggugaaggagucggaaa

SEQ ID NO: 1530028 - RNA, 19 nt, Homo sapiens
  misc_RNA (1)...(19): siRNA sense strand
agagcgcacugcaguugga

SEQ ID NO: 1530029 - RNA, 19 nt, Homo sapiens
  misc_RNA (1)...(19): siRNA sense strand
gaggagccaaacaaugaga

SEQ ID NO: 1530030 - RNA, 19 nt, Homo sapiens
  misc_RNA (1)...(19): siRNA sense strand
caaauccagacauugaaca

SEQ ID NO: 1530031 - RNA, 19 nt, Homo sapiens
  misc_RNA (1)...(19): siRNA sense strand
gcaaguaaaggagcuacag

SEQ ID NO: 1530032 - RNA, 19 nt, Homo sapiens
  misc_RNA (1)...(19): siRNA sense strand
cguaaaggagaguuagaga

SEQ ID NO: 1530033 - RNA, 19 nt, Homo sapiens
  misc_RNA (1)...(19): siRNA sense strand
aaacaaucagcgcauaagu

SEQ ID NO: 1530034 - RNA, 19 nt, Homo sapiens
  misc_RNA (1)...(19): siRNA sense strand
auacagaaagaggaacuaa

SEQ ID NO: 1530035 - RNA, 19 nt, Homo sapiens
  misc_RNA (1)...(19): siRNA sense strand
gacaugaauaugcugaaca

SEQ ID NO: 1530036 - RNA, 19 nt, Homo sapiens
  misc_RNA (1)...(19): siRNA sense strand
aggaggcacuacugaaagu

SEQ ID NO: 1530037 - RNA, 19 nt, Homo sapiens
  misc_RNA (1)...(19): siRNA sense strand
agaagaagaaggcaaacca

SEQ ID NO: 1530038 - RNA, 19 nt, Homo sapiens
  misc_RNA (1)...(19): siRNA sense strand
ggagaguuagagaguguuc

SEQ ID NO: 1530039 - RNA, 19 nt, Homo sapiens
  misc_RNA (1)...(19): siRNA sense strand
acaacuccaauuagaaaga

SEQ ID NO: 1530040 - RNA, 19 nt, Homo sapiens
  misc_RNA (1)...(19): siRNA sense strand
uacagaaagaggaacuaaa

SEQ ID NO: 1530041 - RNA, 19 nt, Homo sapiens
  misc_RNA (1)...(19): siRNA sense strand
gggacaagaagagaggauu

SEQ ID NO: 1530042 - RNA, 19 nt, Homo sapiens
  misc_RNA (1)...(19): siRNA sense strand
gugcagcugacacaguuga

SEQ ID NO: 1530043 - RNA, 19 nt, Homo sapiens
  misc_RNA (1)...(19): siRNA sense strand
gcagguacggaguggaagu

SEQ ID NO: 1530044 - RNA, 19 nt, Homo sapiens
  misc_RNA (1)...(19): siRNA sense strand
aagcagguacggaguggaa

SEQ ID NO: 1530045 - RNA, 19 nt, Homo sapiens
  misc_RNA (1)...(19): siRNA sense strand
gaagacagauguucucaaa

SEQ ID NO: 1530046 - RNA, 19 nt, Homo sapiens
  misc_RNA (1)...(19): siRNA sense strand
uaagugaggucaagucaua

SEQ ID NO: 1530047 - RNA, 19 nt, Homo sapiens
  misc_RNA (1)...(19): siRNA sense strand
caggagaucucgauuggua

SEQ ID NO: 1530048 - RNA, 19 nt, Homo sapiens
  misc_RNA (1)...(19): siRNA sense strand
guaucuaccugggcuauua

SEQ ID NO: 1530049 - RNA, 19 nt, Homo sapiens
  misc_RNA (1)...(19): siRNA sense strand
gaacauagacagugaaacu

SEQ ID NO: 1530050 - RNA, 19 nt, Homo sapiens
  misc_RNA (1)...(19): siRNA sense strand
caagauggauguuguugau

SEQ ID NO: 1530051 - RNA, 19 nt, Homo sapiens
  misc_RNA (1)...(19): siRNA sense strand
cggcagagcuccaagguau

SEQ ID NO: 1530052 - RNA, 19 nt, Homo sapiens
  misc_RNA (1)...(19): siRNA sense strand
gaagaaugcccgacagaga

SEQ ID NO: 1530053 - RNA, 19 nt, Homo sapiens
  misc_RNA (1)...(19): siRNA sense strand
gagcaguacuugaagacaa

SEQ ID NO: 1530054 - RNA, 19 nt, Homo sapiens
  misc_RNA (1)...(19): siRNA sense strand
agacagauguucucaaagu

SEQ ID NO: 1530055 - RNA, 19 nt, Homo sapiens
  misc_RNA (1)...(19): siRNA sense strand
auacaagugucuuaaggua

SEQ ID NO: 1530056 - RNA, 19 nt, Homo sapiens
  misc_RNA (1)...(19): siRNA sense strand
ugacaaaccuuggcaugau

SEQ ID NO: 1530057 - RNA, 19 nt, Homo sapiens
  misc_RNA (1)...(19): siRNA sense strand
cagauguucucaaagugua

SEQ ID NO: 1530058 - RNA, 19 nt, Homo sapiens
  misc_RNA (1)...(19): siRNA sense strand
cauagacagugaaacuaaa

SEQ ID NO: 1530059 - RNA, 19 nt, Homo sapiens
  misc_RNA (1)...(19): siRNA sense strand
uuaagguacuggagaauau

SEQ ID NO: 1530060 - RNA, 19 nt, Homo sapiens
  misc_RNA (1)...(19): siRNA sense strand
ccacggagcccaaguucaa

SEQ ID NO: 1530061 - RNA, 19 nt, Homo sapiens
  misc_RNA (1)...(19): siRNA sense strand
caaauaauggagagaagaa

SEQ ID NO: 1530062 - RNA, 19 nt, Homo sapiens
  misc_RNA (1)...(19): siRNA sense strand
gcaauuaaggcugcaaaga

SEQ ID NO: 1530063 - RNA, 19 nt, Homo sapiens
  misc_RNA (1)...(19): siRNA sense strand
gcagagcuccaagguauga

SEQ ID NO: 1530064 - RNA, 19 nt, Homo sapiens
  misc_RNA (1)...(19): siRNA sense strand
ccucuacaaucucuucuug

SEQ ID NO: 1530065 - RNA, 19 nt, Homo sapiens
  misc_RNA (1)...(19): siRNA sense strand
cauauuugcucagacuuga

SEQ ID NO: 1530066 - RNA, 19 nt, Homo sapiens
  misc_RNA (1)...(19): siRNA sense strand
ugaaguuuaucauggaaga

SEQ ID NO: 1530067 - RNA, 19 nt, Homo sapiens
  misc_RNA (1)...(19): siRNA sense strand
guuuacaaccgugcaauua

SEQ ID NO: 1530068 - RNA, 19 nt, Homo sapiens
  misc_RNA (1)...(19): siRNA sense strand
gcaaauaauggagagaaga

SEQ ID NO: 1530069 - RNA, 19 nt, Homo sapiens
  misc_RNA (1)...(19): siRNA sense strand
gaggucaagucauacaagu

SEQ ID NO: 1530070 - RNA, 19 nt, Homo sapiens
  misc_RNA (1)...(19): siRNA sense strand
cugcugacacucaucauua

SEQ ID NO: 1530071 - RNA, 19 nt, Homo sapiens
  misc_RNA (1)...(19): siRNA sense strand
ggauguuguugauggcaaa

SEQ ID NO: 1530072 - RNA, 19 nt, Homo sapiens
  misc_RNA (1)...(19): siRNA sense strand
caaugcuacuccugacaaa

SEQ ID NO: 1530073 - RNA, 19 nt, Homo sapiens
  misc_RNA (1)...(19): siRNA sense strand
cacuguggcugcauaaguu

SEQ ID NO: 1530074 - RNA, 19 nt, Homo sapiens
  misc_RNA (1)...(19): siRNA sense strand
cagugaaacuaaagcaaau

SEQ ID NO: 1530075 - RNA, 19 nt, Homo sapiens
  misc_RNA (1)...(19): siRNA sense strand
ggucaagucauacaagugu

SEQ ID NO: 1530076 - RNA, 19 nt, Homo sapiens
  misc_RNA (1)...(19): siRNA sense strand
cagcugcuccucauauuug

SEQ ID NO: 1530077 - RNA, 19 nt, Homo sapiens
  misc_RNA (1)...(19): siRNA sense strand
gcagcugcuccucauauuu

SEQ ID NO: 1530078 - RNA, 19 nt, Homo sapiens
  misc_RNA (1)...(19): siRNA sense strand
gacaaaccuuggcaugauc

SEQ ID NO: 1530079 - RNA, 19 nt, Homo sapiens
  misc_RNA (1)...(19): siRNA sense strand
cauggaagaacuugacaaa

SEQ ID NO: 1530080 - RNA, 19 nt, Homo sapiens
  misc_RNA (1)...(19): siRNA sense strand
ucuacaaucucuucuugga

SEQ ID NO: 1530081 - RNA, 19 nt, Homo sapiens
  misc_RNA (1)...(19): siRNA sense strand
gacagauguucucaaagug

SEQ ID NO: 1530082 - RNA, 19 nt, Homo sapiens
  misc_RNA (1)...(19): siRNA sense strand
gaguuugugugcagcauca

SEQ ID NO: 1530083 - RNA, 19 nt, Homo sapiens
  misc_RNA (1)...(19): siRNA sense strand
uuacaaccgugcaauuaag

SEQ ID NO: 1530084 - RNA, 19 nt, Homo sapiens
  misc_RNA (1)...(19): siRNA sense strand
gagaagaaugcccgacaga

SEQ ID NO: 1530085 - RNA, 19 nt, Homo sapiens
  misc_RNA (1)...(19): siRNA sense strand
gaguacguguucucggauu

SEQ ID NO: 1530086 - RNA, 19 nt, Homo sapiens
  misc_RNA (1)...(19): siRNA sense strand
ggagcuggcuguggacaag

SEQ ID NO: 1530087 - RNA, 19 nt, Homo sapiens
  misc_RNA (1)...(19): siRNA sense strand
caauuaaggcugcaaagag

SEQ ID NO: 1530088 - RNA, 19 nt, Homo sapiens
  misc_RNA (1)...(19): siRNA sense strand
acauagacagugaaacuaa

SEQ ID NO: 1530089 - RNA, 19 nt, Homo sapiens
  misc_RNA (1)...(19): siRNA sense strand
guacuugaagacaaagaaa

SEQ ID NO: 1530090 - RNA, 19 nt, Homo sapiens
  misc_RNA (1)...(19): siRNA sense strand
aauuaaggcugcaaagagu

SEQ ID NO: 1530091 - RNA, 19 nt, Homo sapiens
  misc_RNA (1)...(19): siRNA sense strand
guacuggagaauauuaaga

SEQ ID NO: 1530092 - RNA, 19 nt, Homo sapiens
  misc_RNA (1)...(19): siRNA sense strand
gaucaagauggauguuguu

SEQ ID NO: 1530093 - RNA, 19 nt, Homo sapiens
  misc_RNA (1)...(19): siRNA sense strand
gcugacacucaucauuaua

SEQ ID NO: 1530094 - RNA, 19 nt, Homo sapiens
  misc_RNA (1)...(19): siRNA sense strand
ucccaugucugcagagaug

SEQ ID NO: 1530095 - RNA, 19 nt, Homo sapiens
  misc_RNA (1)...(19): siRNA sense strand
gaaauccuccccacuuuug

SEQ ID NO: 1530096 - RNA, 19 nt, Homo sapiens
  misc_RNA (1)...(19): siRNA sense strand
aaauauaagugaggucaag

SEQ ID NO: 1530097 - RNA, 19 nt, Homo sapiens
  misc_RNA (1)...(19): siRNA sense strand
acagugaaacuaaagcaaa

SEQ ID NO: 1530098 - RNA, 19 nt, Homo sapiens
  misc_RNA (1)...(19): siRNA sense strand
ugaucaagauggauguugu

SEQ ID NO: 1530099 - RNA, 19 nt, Homo sapiens
  misc_RNA (1)...(19): siRNA sense strand
caccgugcccgaucaguuu

SEQ ID NO: 1530100 - RNA, 19 nt, Homo sapiens
  misc_RNA (1)...(19): siRNA sense strand
agagacuucuggauucuuc

SEQ ID NO: 1530101 - RNA, 19 nt, Homo sapiens
  misc_RNA (1)...(19): siRNA sense strand
ucauacaagugucuuaagg

SEQ ID NO: 1530102 - RNA, 19 nt, Homo sapiens
  misc_RNA (1)...(19): siRNA sense strand
gaccuugacaugagagaug

SEQ ID NO: 1530103 - RNA, 19 nt, Homo sapiens
  misc_RNA (1)...(19): siRNA sense strand
acaagugucuuaagguacu

SEQ ID NO: 1530104 - RNA, 19 nt, Homo sapiens
  misc_RNA (1)...(19): siRNA sense strand
gcgcaggagaucucgauug

SEQ ID NO: 1530105 - RNA, 19 nt, Homo sapiens
  misc_RNA (1)...(19): siRNA sense strand
uaccugggcuauuacuuca

SEQ ID NO: 1530106 - RNA, 19 nt, Homo sapiens
  misc_RNA (1)...(19): siRNA sense strand
gcgcgugaccuugacauga

SEQ ID NO: 1530107 - RNA, 19 nt, Homo sapiens
  misc_RNA (1)...(19): siRNA sense strand
ucugaaggguacaacgauu

SEQ ID NO: 1530108 - RNA, 19 nt, Homo sapiens
  misc_RNA (1)...(19): siRNA sense strand
guggagcaguacuugaaga

SEQ ID NO: 1530109 - RNA, 19 nt, Homo sapiens
  misc_RNA (1)...(19): siRNA sense strand
acacucaucauuauacugu

SEQ ID NO: 1530110 - RNA, 19 nt, Homo sapiens
  misc_RNA (1)...(19): siRNA sense strand
cgacagaagacagauguuc

SEQ ID NO: 1530111 - RNA, 19 nt, Homo sapiens
  misc_RNA (1)...(19): siRNA sense strand
ccgaucaguuucagugcaa

SEQ ID NO: 1530112 - RNA, 19 nt, Homo sapiens
  misc_RNA (1)...(19): siRNA sense strand
ccucauauuugcucagacu

SEQ ID NO: 1530113 - RNA, 19 nt, Homo sapiens
  misc_RNA (1)...(19): siRNA sense strand
ccaaugcuacuccugacaa

SEQ ID NO: 1530114 - RNA, 19 nt, Homo sapiens
  misc_RNA (1)...(19): siRNA sense strand
cgcaggagaucucgauugg

SEQ ID NO: 1530115 - RNA, 19 nt, Homo sapiens
  misc_RNA (1)...(19): siRNA sense strand
ggagaucucgauugguaca

SEQ ID NO: 1530116 - RNA, 19 nt, Homo sapiens
  misc_RNA (1)...(19): siRNA sense strand
agcaguacuugaagacaaa

SEQ ID NO: 1530117 - RNA, 19 nt, Homo sapiens
  misc_RNA (1)...(19): siRNA sense strand
ucucggauuucuugcugaa

SEQ ID NO: 1530118 - RNA, 19 nt, Homo sapiens
  misc_RNA (1)...(19): siRNA sense strand
ugaaggguacaacgauuug

SEQ ID NO: 1530119 - RNA, 19 nt, Homo sapiens
  misc_RNA (1)...(19): siRNA sense strand
cgcagcugcuccucauauu

SEQ ID NO: 1530120 - RNA, 19 nt, Homo sapiens
  misc_RNA (1)...(19): siRNA sense strand
gaaggguacaacgauuuga

SEQ ID NO: 1530121 - RNA, 19 nt, Homo sapiens
  misc_RNA (1)...(19): siRNA sense strand
ucucaaaguguacgaaauc

SEQ ID NO: 1530122 - RNA, 19 nt, Homo sapiens
  misc_RNA (1)...(19): siRNA sense strand
aagguacuggagaauauua

SEQ ID NO: 1530123 - RNA, 19 nt, Homo sapiens
  misc_RNA (1)...(19): siRNA sense strand
gucuuaagguacuggagaa

SEQ ID NO: 1530124 - RNA, 19 nt, Homo sapiens
  misc_RNA (1)...(19): siRNA sense strand
uuuacaaccgugcaauuaa

SEQ ID NO: 1530125 - RNA, 19 nt, Homo sapiens
  misc_RNA (1)...(19): siRNA sense strand
ucuuugcgauccuccugua

SEQ ID NO: 1530126 - RNA, 19 nt, Homo sapiens
  misc_RNA (1)...(19): siRNA sense strand
cugccuuuguggauucaua

SEQ ID NO: 1530127 - RNA, 19 nt, Homo sapiens
  misc_RNA (1)...(19): siRNA sense strand
cuuaagguacuggagaaua

SEQ ID NO: 1530128 - RNA, 19 nt, Homo sapiens
  misc_RNA (1)...(19): siRNA sense strand
ucagugucauuaaccuugu

SEQ ID NO: 1530129 - RNA, 19 nt, Homo sapiens
  misc_RNA (1)...(19): siRNA sense strand
cuaccugggcuauuacuuc

SEQ ID NO: 1530130 - RNA, 19 nt, Homo sapiens
  misc_RNA (1)...(19): siRNA sense strand
gcgugaccuugacaugaga

SEQ ID NO: 1530131 - RNA, 19 nt, Homo sapiens
  misc_RNA (1)...(19): siRNA sense strand
acacgcuguuuguuccauu

SEQ ID NO: 1530132 - RNA, 19 nt, Homo sapiens
  misc_RNA (1)...(19): siRNA sense strand
caguugcucagugucauua

SEQ ID NO: 1530133 - RNA, 19 nt, Homo sapiens
  misc_RNA (1)...(19): siRNA sense strand
ugacacucaucauuauacu

SEQ ID NO: 1530134 - RNA, 19 nt, Homo sapiens
  misc_RNA (1)...(19): siRNA sense strand
cucgauugguacacagaua

SEQ ID NO: 1530135 - RNA, 19 nt, Homo sapiens
  misc_RNA (1)...(19): siRNA sense strand
gaaguuuaucauggaagaa

SEQ ID NO: 1530136 - RNA, 19 nt, Homo sapiens
  misc_RNA (1)...(19): siRNA sense strand
gacagugaaacuaaagcaa

SEQ ID NO: 1530137 - RNA, 19 nt, Homo sapiens
  misc_RNA (1)...(19): siRNA sense strand
aagauggucacgugcauug

SEQ ID NO: 1530138 - RNA, 19 nt, Homo sapiens
  misc_RNA (1)...(19): siRNA sense strand
uaagguacuggagaauauu

SEQ ID NO: 1530139 - RNA, 19 nt, Homo sapiens
  misc_RNA (1)...(19): siRNA sense strand
acaagauggucacgugcau

SEQ ID NO: 1530140 - RNA, 19 nt, Homo sapiens
  misc_RNA (1)...(19): siRNA sense strand
cugaaggguacaacgauuu

SEQ ID NO: 1530141 - RNA, 19 nt, Homo sapiens
  misc_RNA (1)...(19): siRNA sense strand
accgagaacuuagggcaaa

SEQ ID NO: 1530142 - RNA, 19 nt, Homo sapiens
  misc_RNA (1)...(19): siRNA sense strand
agagugcgcgugaccuuga

SEQ ID NO: 1530143 - RNA, 19 nt, Homo sapiens
  misc_RNA (1)...(19): siRNA sense strand
ucgauugguacacagauaa

SEQ ID NO: 1530144 - RNA, 19 nt, Homo sapiens
  misc_RNA (1)...(19): siRNA sense strand
aauaauggagagaagaaug

SEQ ID NO: 1530145 - RNA, 19 nt, Homo sapiens
  misc_RNA (1)...(19): siRNA sense strand
guauaaaggaccauuguua

SEQ ID NO: 1530146 - RNA, 19 nt, Homo sapiens
  misc_RNA (1)...(19): siRNA sense strand
gaaggaggacuguuugaaa

SEQ ID NO: 1530147 - RNA, 19 nt, Homo sapiens
  misc_RNA (1)...(19): siRNA sense strand
ucacagauauuacagaaca

SEQ ID NO: 1530148 - RNA, 19 nt, Homo sapiens
  misc_RNA (1)...(19): siRNA sense strand
ggugaaagauauucucuca

SEQ ID NO: 1530149 - RNA, 19 nt, Homo sapiens
  misc_RNA (1)...(19): siRNA sense strand
gaaaaccacugcugaaaau

SEQ ID NO: 1530150 - RNA, 19 nt, Homo sapiens
  misc_RNA (1)...(19): siRNA sense strand
uaaaccaaguggaaucaaa

SEQ ID NO: 1530151 - RNA, 19 nt, Homo sapiens
  misc_RNA (1)...(19): siRNA sense strand
gaacaacuggaaagaauca

SEQ ID NO: 1530152 - RNA, 19 nt, Homo sapiens
  misc_RNA (1)...(19): siRNA sense strand
gaaucaaaggugaaagaua

SEQ ID NO: 1530153 - RNA, 19 nt, Homo sapiens
  misc_RNA (1)...(19): siRNA sense strand
ugguuaggcucucaaauaa

SEQ ID NO: 1530154 - RNA, 19 nt, Homo sapiens
  misc_RNA (1)...(19): siRNA sense strand
gaagaccgcaugugccauu

SEQ ID NO: 1530155 - RNA, 19 nt, Homo sapiens
  misc_RNA (1)...(19): siRNA sense strand
gaaagauauucucucaaag

SEQ ID NO: 1530156 - RNA, 19 nt, Homo sapiens
  misc_RNA (1)...(19): siRNA sense strand
gaacuucaagcuucacaga

SEQ ID NO: 1530157 - RNA, 19 nt, Homo sapiens
  misc_RNA (1)...(19): siRNA sense strand
cggaacaacuggaaagaau

SEQ ID NO: 1530158 - RNA, 19 nt, Homo sapiens
  misc_RNA (1)...(19): siRNA sense strand
ggauuuaaauucagaacag

SEQ ID NO: 1530159 - RNA, 19 nt, Homo sapiens
  misc_RNA (1)...(19): siRNA sense strand
cgacgaauguuaaugaaac

SEQ ID NO: 1530160 - RNA, 19 nt, Homo sapiens
  misc_RNA (1)...(19): siRNA sense strand
uaaaggaccauuguuagaa

SEQ ID NO: 1530161 - RNA, 19 nt, Homo sapiens
  misc_RNA (1)...(19): siRNA sense strand
gauuagaugugacuguaca

SEQ ID NO: 1530162 - RNA, 19 nt, Homo sapiens
  misc_RNA (1)...(19): siRNA sense strand
gaagagcaagcccuuacaa

SEQ ID NO: 1530163 - RNA, 19 nt, Homo sapiens
  misc_RNA (1)...(19): siRNA sense strand
cagaugauauagcaagaau

SEQ ID NO: 1530164 - RNA, 19 nt, Homo sapiens
  misc_RNA (1)...(19): siRNA sense strand
acuucaagcuucacagaua

SEQ ID NO: 1530165 - RNA, 19 nt, Homo sapiens
  misc_RNA (1)...(19): siRNA sense strand
ccgcaugugccauuaauaa

SEQ ID NO: 1530166 - RNA, 19 nt, Homo sapiens
  misc_RNA (1)...(19): siRNA sense strand
gaaguucaagcuauguuug

SEQ ID NO: 1530167 - RNA, 19 nt, Homo sapiens
  misc_RNA (1)...(19): siRNA sense strand
ggaaguucaagcuauguuu

SEQ ID NO: 1530168 - RNA, 19 nt, Homo sapiens
  misc_RNA (1)...(19): siRNA sense strand
uaucacgucugcuggaaga

SEQ ID NO: 1530169 - RNA, 19 nt, Homo sapiens
  misc_RNA (1)...(19): siRNA sense strand
ucaggaaguucaagcuaug

SEQ ID NO: 1530170 - RNA, 19 nt, Homo sapiens
  misc_RNA (1)...(19): siRNA sense strand
uccauauucuguacucaua

SEQ ID NO: 1530171 - RNA, 19 nt, Homo sapiens
  misc_RNA (1)...(19): siRNA sense strand
gaccgcaugugccauuaau

SEQ ID NO: 1530172 - RNA, 19 nt, Homo sapiens
  misc_RNA (1)...(19): siRNA sense strand
guuaggcucucaaauaaaa

SEQ ID NO: 1530173 - RNA, 19 nt, Homo sapiens
  misc_RNA (1)...(19): siRNA sense strand
uaagguugguguuucuuuc

SEQ ID NO: 1530174 - RNA, 19 nt, Homo sapiens
  misc_RNA (1)...(19): siRNA sense strand
uuaauaagguugguguuuc

SEQ ID NO: 1530175 - RNA, 19 nt, Homo sapiens
  misc_RNA (1)...(19): siRNA sense strand
uuuaucagccuaagcguua

SEQ ID NO: 1530176 - RNA, 19 nt, Homo sapiens
  misc_RNA (1)...(19): siRNA sense strand
cuucacagauauuacagaa

SEQ ID NO: 1530177 - RNA, 19 nt, Homo sapiens
  misc_RNA (1)...(19): siRNA sense strand
caagacaacgauuacaaug

SEQ ID NO: 1530178 - RNA, 19 nt, Homo sapiens
  misc_RNA (1)...(19): siRNA sense strand
ggcagaggguggauuaucu

SEQ ID NO: 1530179 - RNA, 19 nt, Homo sapiens
  misc_RNA (1)...(19): siRNA sense strand
uaauaagguugguguuucu

SEQ ID NO: 1530180 - RNA, 19 nt, Homo sapiens
  misc_RNA (1)...(19): siRNA sense strand
cuucugacauuccgcauau

SEQ ID NO: 1530181 - RNA, 19 nt, Homo sapiens
  misc_RNA (1)...(19): siRNA sense strand
caacuggaaagaaucaaug

SEQ ID NO: 1530182 - RNA, 19 nt, Homo sapiens
  misc_RNA (1)...(19): siRNA sense strand
guugguguuucuuucagua

SEQ ID NO: 1530183 - RNA, 19 nt, Homo sapiens
  misc_RNA (1)...(19): siRNA sense strand
uugguuaggcucucaaaua

SEQ ID NO: 1530184 - RNA, 19 nt, Homo sapiens
  misc_RNA (1)...(19): siRNA sense strand
uagugaaguuuaucaggaa

SEQ ID NO: 1530185 - RNA, 19 nt, Homo sapiens
  misc_RNA (1)...(19): siRNA sense strand
ggaaaaccacugcugaaaa

SEQ ID NO: 1530186 - RNA, 19 nt, Homo sapiens
  misc_RNA (1)...(19): siRNA sense strand
acgauuagaugugacugua

SEQ ID NO: 1530187 - RNA, 19 nt, Homo sapiens
  misc_RNA (1)...(19): siRNA sense strand
gcucuuuccugugaauaug

SEQ ID NO: 1530188 - RNA, 19 nt, Homo sapiens
  misc_RNA (1)...(19): siRNA sense strand
agagcucuguauuugguua

SEQ ID NO: 1530189 - RNA, 19 nt, Homo sapiens
  misc_RNA (1)...(19): siRNA sense strand
aaaggaccauuguuagaag

SEQ ID NO: 1530190 - RNA, 19 nt, Homo sapiens
  misc_RNA (1)...(19): siRNA sense strand
ccaagacaacgauuacaau

SEQ ID NO: 1530191 - RNA, 19 nt, Homo sapiens
  misc_RNA (1)...(19): siRNA sense strand
ugaaguuuaucaggaaguu

SEQ ID NO: 1530192 - RNA, 19 nt, Homo sapiens
  misc_RNA (1)...(19): siRNA sense strand
ucacccaagacaacgauua

SEQ ID NO: 1530193 - RNA, 19 nt, Homo sapiens
  misc_RNA (1)...(19): siRNA sense strand
ucugauagagcaaagguaa

SEQ ID NO: 1530194 - RNA, 19 nt, Homo sapiens
  misc_RNA (1)...(19): siRNA sense strand
gcauguccauauucuguac

SEQ ID NO: 1530195 - RNA, 19 nt, Homo sapiens
  misc_RNA (1)...(19): siRNA sense strand
guacaguccuuuggauggu

SEQ ID NO: 1530196 - RNA, 19 nt, Homo sapiens
  misc_RNA (1)...(19): siRNA sense strand
gccgacgaauguuaaugaa

SEQ ID NO: 1530197 - RNA, 19 nt, Homo sapiens
  misc_RNA (1)...(19): siRNA sense strand
augaugcucuuuccuguga

SEQ ID NO: 1530198 - RNA, 19 nt, Homo sapiens
  misc_RNA (1)...(19): siRNA sense strand
ugacauuccgcauaugcua

SEQ ID NO: 1530199 - RNA, 19 nt, Homo sapiens
  misc_RNA (1)...(19): siRNA sense strand
gcagaggguggauuaucuu

SEQ ID NO: 1530200 - RNA, 19 nt, Homo sapiens
  misc_RNA (1)...(19): siRNA sense strand
aaagaaggaggacuguuug

SEQ ID NO: 1530201 - RNA, 19 nt, Homo sapiens
  misc_RNA (1)...(19): siRNA sense strand
uauaaaggaccauuguuag

SEQ ID NO: 1530202 - RNA, 19 nt, Homo sapiens
  misc_RNA (1)...(19): siRNA sense strand
cuucaagcuucacagauau

SEQ ID NO: 1530203 - RNA, 19 nt, Homo sapiens
  misc_RNA (1)...(19): siRNA sense strand
ucaagcuucacagauauua

SEQ ID NO: 1530204 - RNA, 19 nt, Homo sapiens
  misc_RNA (1)...(19): siRNA sense strand
gcuuccagcuugagauaag

SEQ ID NO: 1530205 - RNA, 19 nt, Homo sapiens
  misc_RNA (1)...(19): siRNA sense strand
caugugccauuaauaaggu

SEQ ID NO: 1530206 - RNA, 19 nt, Homo sapiens
  misc_RNA (1)...(19): siRNA sense strand
uacaauggcacaucuacuu

SEQ ID NO: 1530207 - RNA, 19 nt, Homo sapiens
  misc_RNA (1)...(19): siRNA sense strand
augaaacgauuagauguga

SEQ ID NO: 1530208 - RNA, 19 nt, Homo sapiens
  misc_RNA (1)...(19): siRNA sense strand
gagacgugcuggacacacu

SEQ ID NO: 1530209 - RNA, 19 nt, Homo sapiens
  misc_RNA (1)...(19): siRNA sense strand
uuaugcaacuuggaagaaa

SEQ ID NO: 1530210 - RNA, 19 nt, Homo sapiens
  misc_RNA (1)...(19): siRNA sense strand
gaugcucuuuccugugaau

SEQ ID NO: 1530211 - RNA, 19 nt, Homo sapiens
  misc_RNA (1)...(19): siRNA sense strand
gacauuccgcauaugcuaa

SEQ ID NO: 1530212 - RNA, 19 nt, Homo sapiens
  misc_RNA (1)...(19): siRNA sense strand
ucaacaacuucugacauuc

SEQ ID NO: 1530213 - RNA, 19 nt, Homo sapiens
  misc_RNA (1)...(19): siRNA sense strand
ggcggcagaggguggauua

SEQ ID NO: 1530214 - RNA, 19 nt, Homo sapiens
  misc_RNA (1)...(19): siRNA sense strand
caagaauuuaucagccuaa

SEQ ID NO: 1530215 - RNA, 19 nt, Homo sapiens
  misc_RNA (1)...(19): siRNA sense strand
uccuuuggauggucugaua

SEQ ID NO: 1530216 - RNA, 19 nt, Homo sapiens
  misc_RNA (1)...(19): siRNA sense strand
aaagauauucucucaaagg

SEQ ID NO: 1530217 - RNA, 19 nt, Homo sapiens
  misc_RNA (1)...(19): siRNA sense strand
ggaaucaaaggugaaagau

SEQ ID NO: 1530218 - RNA, 19 nt, Homo sapiens
  misc_RNA (1)...(19): siRNA sense strand
aaaagaaggaggacuguuu

SEQ ID NO: 1530219 - RNA, 19 nt, Homo sapiens
  misc_RNA (1)...(19): siRNA sense strand
ucaguacaguggaaaauga

SEQ ID NO: 1530220 - RNA, 19 nt, Homo sapiens
  misc_RNA (1)...(19): siRNA sense strand
auaaaggaccauuguuaga

SEQ ID NO: 1530221 - RNA, 19 nt, Homo sapiens
  misc_RNA (1)...(19): siRNA sense strand
ggaacaacuggaaagaauc

SEQ ID NO: 1530222 - RNA, 19 nt, Homo sapiens
  misc_RNA (1)...(19): siRNA sense strand
gguauaaaggaccauuguu

SEQ ID NO: 1530223 - RNA, 19 nt, Homo sapiens
  misc_RNA (1)...(19): siRNA sense strand
aagauauucucucaaaggu

SEQ ID NO: 1530224 - RNA, 19 nt, Homo sapiens
  misc_RNA (1)...(19): siRNA sense strand
gaggguggauuaucuucac

SEQ ID NO: 1530225 - RNA, 19 nt, Homo sapiens
  misc_RNA (1)...(19): siRNA sense strand
uaucaggaaguucaagcua

SEQ ID NO: 1530226 - RNA, 19 nt, Homo sapiens
  misc_RNA (1)...(19): siRNA sense strand
ggagauauuaaagaucguu

SEQ ID NO: 1530227 - RNA, 19 nt, Homo sapiens
  misc_RNA (1)...(19): siRNA sense strand
gcaugugccauuaauaagg

SEQ ID NO: 1530228 - RNA, 19 nt, Homo sapiens
  misc_RNA (1)...(19): siRNA sense strand
cgauuacaauggcacaucu

SEQ ID NO: 1530229 - RNA, 19 nt, Homo sapiens
  misc_RNA (1)...(19): siRNA sense strand
gaaacgauuagaugugacu

SEQ ID NO: 1530230 - RNA, 19 nt, Homo sapiens
  misc_RNA (1)...(19): siRNA sense strand
gguauacccaagucaacaa

SEQ ID NO: 1530231 - RNA, 19 nt, Homo sapiens
  misc_RNA (1)...(19): siRNA sense strand
uacagaacuucaagcuuca

SEQ ID NO: 1530232 - RNA, 19 nt, Homo sapiens
  misc_RNA (1)...(19): siRNA sense strand
gcuaaaccaaguggaauca

SEQ ID NO: 1530233 - RNA, 19 nt, Homo sapiens
  misc_RNA (1)...(19): siRNA sense strand
caagaucauuaggacaagu

SEQ ID NO: 1530234 - RNA, 19 nt, Homo sapiens
  misc_RNA (1)...(19): siRNA sense strand
gguuaggcucucaaauaaa

SEQ ID NO: 1530235 - RNA, 19 nt, Homo sapiens
  misc_RNA (1)...(19): siRNA sense strand
gcggaacaacuggaaagaa

SEQ ID NO: 1530236 - RNA, 19 nt, Homo sapiens
  misc_RNA (1)...(19): siRNA sense strand
agagcaagcccuuacaaag

SEQ ID NO: 1530237 - RNA, 19 nt, Homo sapiens
  misc_RNA (1)...(19): siRNA sense strand
ggguauaaaggaccauugu

SEQ ID NO: 1530238 - RNA, 19 nt, Homo sapiens
  misc_RNA (1)...(19): siRNA sense strand
uuucuuucauguccuggua

SEQ ID NO: 1530239 - RNA, 19 nt, Homo sapiens
  misc_RNA (1)...(19): siRNA sense strand
caagcuauguuugauacac

SEQ ID NO: 1530240 - RNA, 19 nt, Homo sapiens
  misc_RNA (1)...(19): siRNA sense strand
aagagcaagcccuuacaaa

SEQ ID NO: 1530241 - RNA, 19 nt, Homo sapiens
  misc_RNA (1)...(19): siRNA sense strand
acaauggcacaucuacuug

SEQ ID NO: 1530242 - RNA, 19 nt, Homo sapiens
  misc_RNA (1)...(19): siRNA sense strand
gauuacaauggcacaucua

SEQ ID NO: 1530243 - RNA, 19 nt, Homo sapiens
  misc_RNA (1)...(19): siRNA sense strand
uggaaucaaaggugaaaga

SEQ ID NO: 1530244 - RNA, 19 nt, Homo sapiens
  misc_RNA (1)...(19): siRNA sense strand
uggagacgcugggguauaa

SEQ ID NO: 1530245 - RNA, 19 nt, Homo sapiens
  misc_RNA (1)...(19): siRNA sense strand
gaaaaugccucaccgauug

SEQ ID NO: 1530246 - RNA, 19 nt, Homo sapiens
  misc_RNA (1)...(19): siRNA sense strand
gaagaugccucuguccuau

SEQ ID NO: 1530247 - RNA, 19 nt, Homo sapiens
  misc_RNA (1)...(19): siRNA sense strand
ggaggucccuucugugaug

SEQ ID NO: 1530248 - RNA, 19 nt, Homo sapiens
  misc_RNA (1)...(19): siRNA sense strand
gcucugagauggcacaaag

SEQ ID NO: 1530249 - RNA, 19 nt, Homo sapiens
  misc_RNA (1)...(19): siRNA sense strand
gaggaggucccuucuguga

SEQ ID NO: 1530250 - RNA, 19 nt, Homo sapiens
  misc_RNA (1)...(19): siRNA sense strand
gaugcuaugugcucugaga

SEQ ID NO: 1530251 - RNA, 19 nt, Homo sapiens
  misc_RNA (1)...(19): siRNA sense strand
gacaaucucaccuggauga

SEQ ID NO: 1530252 - RNA, 19 nt, Homo sapiens
  misc_RNA (1)...(19): siRNA sense strand
aaucucaccuggaugaugu

SEQ ID NO: 1530253 - RNA, 19 nt, Homo sapiens
  misc_RNA (1)...(19): siRNA sense strand
caaagccucguucccauga

SEQ ID NO: 1530254 - RNA, 19 nt, Homo sapiens
  misc_RNA (1)...(19): siRNA sense strand
cucagaggcuuccuucuug

SEQ ID NO: 1530255 - RNA, 19 nt, Homo sapiens
  misc_RNA (1)...(19): siRNA sense strand
agaugccucuguccuauga

SEQ ID NO: 1530256 - RNA, 19 nt, Homo sapiens
  misc_RNA (1)...(19): siRNA sense strand
guucuaugguguccucaga

SEQ ID NO: 1530257 - RNA, 19 nt, Homo sapiens
  misc_RNA (1)...(19): siRNA sense strand
ggaaaaugccucaccgauu

SEQ ID NO: 1530258 - RNA, 19 nt, Homo sapiens
  misc_RNA (1)...(19): siRNA sense strand
agaagaugccucuguccua

SEQ ID NO: 1530259 - RNA, 19 nt, Homo sapiens
  misc_RNA (1)...(19): siRNA sense strand
aggaggaggucccuucugu

SEQ ID NO: 1530260 - RNA, 19 nt, Homo sapiens
  misc_RNA (1)...(19): siRNA sense strand
ugagauggcacaaagagau

SEQ ID NO: 1530261 - RNA, 19 nt, Homo sapiens
  misc_RNA (1)...(19): siRNA sense strand
ccgauuguguccucacuag

SEQ ID NO: 1530262 - RNA, 19 nt, Homo sapiens
  misc_RNA (1)...(19): siRNA sense strand
gagauggcacaaagagaug

SEQ ID NO: 1530263 - RNA, 19 nt, Homo sapiens
  misc_RNA (1)...(19): siRNA sense strand
cagagacgacgccuuguuc

SEQ ID NO: 1530264 - RNA, 19 nt, Homo sapiens
  misc_RNA (1)...(19): siRNA sense strand
ccacugcugccaccauguu

SEQ ID NO: 1530265 - RNA, 19 nt, Homo sapiens
  misc_RNA (1)...(19): siRNA sense strand
ucagaggcuuccuucuugu

SEQ ID NO: 1530266 - RNA, 19 nt, Homo sapiens
  misc_RNA (1)...(19): siRNA sense strand
aggcuuccuucuuguggua

SEQ ID NO: 1530267 - RNA, 19 nt, Homo sapiens
  misc_RNA (1)...(19): siRNA sense strand
gcuuccuucuugugguaua

SEQ ID NO: 1530268 - RNA, 19 nt, Homo sapiens
  misc_RNA (1)...(19): siRNA sense strand
ccagggaagaugccagaga

SEQ ID NO: 1530269 - RNA, 19 nt, Homo sapiens
  misc_RNA (1)...(19): siRNA sense strand
cugccaccauguuguagaa

SEQ ID NO: 1530270 - RNA, 19 nt, Homo sapiens
  misc_RNA (1)...(19): siRNA sense strand
acagagacgacgccuuguu

SEQ ID NO: 1530271 - RNA, 19 nt, Homo sapiens
  misc_RNA (1)...(19): siRNA sense strand
cuaacuccaaggccucuuu

SEQ ID NO: 1530272 - RNA, 19 nt, Homo sapiens
  misc_RNA (1)...(19): siRNA sense strand
gaagagaagugaccaucaa

SEQ ID NO: 1530273 - RNA, 19 nt, Homo sapiens
  misc_RNA (1)...(19): siRNA sense strand
caaagugaguggcaagguu

SEQ ID NO: 1530274 - RNA, 19 nt, Homo sapiens
  misc_RNA (1)...(19): siRNA sense strand
ggaagugggagcucaauug

SEQ ID NO: 1530275 - RNA, 19 nt, Homo sapiens
  misc_RNA (1)...(19): siRNA sense strand
caaagacugggcuaaauuu

SEQ ID NO: 1530276 - RNA, 19 nt, Homo sapiens
  misc_RNA (1)...(19): siRNA sense strand
gagcucaauuggucaagaa

SEQ ID NO: 1530277 - RNA, 19 nt, Homo sapiens
  misc_RNA (1)...(19): siRNA sense strand
gacauuaggcuucacauca

SEQ ID NO: 1530278 - RNA, 19 nt, Homo sapiens
  misc_RNA (1)...(19): siRNA sense strand
gccggaaaguucaaaguga

SEQ ID NO: 1530279 - RNA, 19 nt, Homo sapiens
  misc_RNA (1)...(19): siRNA sense strand
gaucaaagcagaggaugga

SEQ ID NO: 1530280 - RNA, 19 nt, Homo sapiens
  misc_RNA (1)...(19): siRNA sense strand
ucaaagacugggcuaaauu

SEQ ID NO: 1530281 - RNA, 19 nt, Homo sapiens
  misc_RNA (1)...(19): siRNA sense strand
uuugagagcuucccagugu

SEQ ID NO: 1530282 - RNA, 19 nt, Homo sapiens
  misc_RNA (1)...(19): siRNA sense strand
cucuagagcugucagaauu

SEQ ID NO: 1530283 - RNA, 19 nt, Homo sapiens
  misc_RNA (1)...(19): siRNA sense strand
ggaagagaagugaccauca

SEQ ID NO: 1530284 - RNA, 19 nt, Homo sapiens
  misc_RNA (1)...(19): siRNA sense strand
cuagagcugucagaauuug

SEQ ID NO: 1530285 - RNA, 19 nt, Homo sapiens
  misc_RNA (1)...(19): siRNA sense strand
ggagcucaauuggucaaga

SEQ ID NO: 1530286 - RNA, 19 nt, Homo sapiens
  misc_RNA (1)...(19): siRNA sense strand
gaagugggagcucaauugg

SEQ ID NO: 1530287 - RNA, 19 nt, Homo sapiens
  misc_RNA (1)...(19): siRNA sense strand
gaaccugccaugccacauc

SEQ ID NO: 1530288 - RNA, 19 nt, Homo sapiens
  misc_RNA (1)...(19): siRNA sense strand
ugucagaauuugagagcuu

SEQ ID NO: 1530289 - RNA, 19 nt, Homo sapiens
  misc_RNA (1)...(19): siRNA sense strand
gaccaucaacccaagauca

SEQ ID NO: 1530290 - RNA, 19 nt, Homo sapiens
  misc_RNA (1)...(19): siRNA sense strand
ugagagcuucccaguguuu

SEQ ID NO: 1530291 - RNA, 19 nt, Homo sapiens
  misc_RNA (1)...(19): siRNA sense strand
ggacauuaggcuucacauc

SEQ ID NO: 1530292 - RNA, 19 nt, Homo sapiens
  misc_RNA (1)...(19): siRNA sense strand
cggagucugucuuuaugga

SEQ ID NO: 1530293 - RNA, 19 nt, Homo sapiens
  misc_RNA (1)...(19): siRNA sense strand
guggcaagguucugcuuag

SEQ ID NO: 1530294 - RNA, 19 nt, Homo sapiens
  misc_RNA (1)...(19): siRNA sense strand
caagaucaaagcagaggau

SEQ ID NO: 1530295 - RNA, 19 nt, Homo sapiens
  misc_RNA (1)...(19): siRNA sense strand
cccggagucugucuuuaug

SEQ ID NO: 1530296 - RNA, 19 nt, Homo sapiens
  misc_RNA (1)...(19): siRNA sense strand
ugaacccgcagaaggcuuu

SEQ ID NO: 1530297 - RNA, 19 nt, Homo sapiens
  misc_RNA (1)...(19): siRNA sense strand
acauuaggcuucacaucag

SEQ ID NO: 1530298 - RNA, 19 nt, Homo sapiens
  misc_RNA (1)...(19): siRNA sense strand
caauuggucaagaaaguca

SEQ ID NO: 1530299 - RNA, 19 nt, Homo sapiens
  misc_RNA (1)...(19): siRNA sense strand
cucaauuggucaagaaagu

SEQ ID NO: 1530300 - RNA, 19 nt, Homo sapiens
  misc_RNA (1)...(19): siRNA sense strand
gggaagugggagcucaauu

SEQ ID NO: 1530301 - RNA, 19 nt, Homo sapiens
  misc_RNA (1)...(19): siRNA sense strand
uuacaaucccggagucugu

SEQ ID NO: 1530302 - RNA, 19 nt, Homo sapiens
  misc_RNA (1)...(19): siRNA sense strand
uucaaagacugggcuaaau

SEQ ID NO: 1530303 - RNA, 19 nt, Homo sapiens
  misc_RNA (1)...(19): siRNA sense strand
ucuagagcugucagaauuu

SEQ ID NO: 1530304 - RNA, 19 nt, Homo sapiens
  misc_RNA (1)...(19): siRNA sense strand
uuucaaagacugggcuaaa

SEQ ID NO: 1530305 - RNA, 19 nt, Homo sapiens
  misc_RNA (1)...(19): siRNA sense strand
caucaacccaagaucaaag

SEQ ID NO: 1530306 - RNA, 19 nt, Homo sapiens
  misc_RNA (1)...(19): siRNA sense strand
cuucacagcugaugagaua

SEQ ID NO: 1530307 - RNA, 19 nt, Homo sapiens
  misc_RNA (1)...(19): siRNA sense strand
gcagugaacgccuugauaa

SEQ ID NO: 1530308 - RNA, 19 nt, Homo sapiens
  misc_RNA (1)...(19): siRNA sense strand
caaggcagcugcaauagca

SEQ ID NO: 1530309 - RNA, 19 nt, Homo sapiens
  misc_RNA (1)...(19): siRNA sense strand
ugaaugccuuacuggauua

SEQ ID NO: 1530310 - RNA, 19 nt, Homo sapiens
  misc_RNA (1)...(19): siRNA sense strand
uaucaaggcagcugcaaua

SEQ ID NO: 1530311 - RNA, 19 nt, Homo sapiens
  misc_RNA (1)...(19): siRNA sense strand
ccaacaaguucacgugguu

SEQ ID NO: 1530312 - RNA, 19 nt, Homo sapiens
  misc_RNA (1)...(19): siRNA sense strand
cagaaccucuccauccauu

SEQ ID NO: 1530313 - RNA, 19 nt, Homo sapiens
  misc_RNA (1)...(19): siRNA sense strand
cggcauaccuggucugcaa

SEQ ID NO: 1530314 - RNA, 19 nt, Homo sapiens
  misc_RNA (1)...(19): siRNA sense strand
gggcugaaauccaacaagu

SEQ ID NO: 1530315 - RNA, 19 nt, Homo sapiens
  misc_RNA (1)...(19): siRNA sense strand
gaggagaaguggcauuacu

SEQ ID NO: 1530316 - RNA, 19 nt, Homo sapiens
  misc_RNA (1)...(19): siRNA sense strand
gcugaaauccaacaaguuc

SEQ ID NO: 1530317 - RNA, 19 nt, Homo sapiens
  misc_RNA (1)...(19): siRNA sense strand
agacaugaaugccuuacug

SEQ ID NO: 1530318 - RNA, 19 nt, Homo sapiens
  misc_RNA (1)...(19): siRNA sense strand
ugagauacgugggccagaa

SEQ ID NO: 1530319 - RNA, 19 nt, Homo sapiens
  misc_RNA (1)...(19): siRNA sense strand
gugaacgccuugauaaugc

SEQ ID NO: 1530320 - RNA, 19 nt, Homo sapiens
  misc_RNA (1)...(19): siRNA sense strand
augaaugccuuacuggauu

SEQ ID NO: 1530321 - RNA, 19 nt, Homo sapiens
  misc_RNA (1)...(19): siRNA sense strand
ggcagugaacgccuugaua

SEQ ID NO: 1530322 - RNA, 19 nt, Homo sapiens
  misc_RNA (1)...(19): siRNA sense strand
uaguggaucucaugaaguc

SEQ ID NO: 1530323 - RNA, 19 nt, Homo sapiens
  misc_RNA (1)...(19): siRNA sense strand
gaaccucuccauccauucu

SEQ ID NO: 1530324 - RNA, 19 nt, Homo sapiens
  misc_RNA (1)...(19): siRNA sense strand
cguaguggaucucaugaag

SEQ ID NO: 1530325 - RNA, 19 nt, Homo sapiens
  misc_RNA (1)...(19): siRNA sense strand
gccagaaccucuccaucca

SEQ ID NO: 1530326 - RNA, 19 nt, Homo sapiens
  misc_RNA (1)...(19): siRNA sense strand
cagcugcaauagcaacaug

SEQ ID NO: 1530327 - RNA, 19 nt, Homo sapiens
  misc_RNA (1)...(19): siRNA sense strand
gagagacaugaaugccuua

SEQ ID NO: 1530328 - RNA, 19 nt, Homo sapiens
  misc_RNA (1)...(19): siRNA sense strand
ggaagcgccacaucucugu

SEQ ID NO: 1530329 - RNA, 19 nt, Homo sapiens
  misc_RNA (1)...(19): siRNA sense strand
ggucugcaacuaugccauu

SEQ ID NO: 1530330 - RNA, 19 nt, Homo sapiens
  misc_RNA (1)...(19): siRNA sense strand
caaguucacgugguucuga

SEQ ID NO: 1530331 - RNA, 19 nt, Homo sapiens
  misc_RNA (1)...(19): siRNA sense strand
uaccuggucugcaacuaug

SEQ ID NO: 1530332 - RNA, 19 nt, Homo sapiens
  misc_RNA (1)...(19): siRNA sense strand
ucaaggggcugaaauccaa

SEQ ID NO: 1530333 - RNA, 19 nt, Homo sapiens
  misc_RNA (1)...(19): siRNA sense strand
gccauccacaccuguagua

SEQ ID NO: 1530334 - RNA, 19 nt, Homo sapiens
  misc_RNA (1)...(19): siRNA sense strand
cccaccugcucccauuaua

SEQ ID NO: 1530335 - RNA, 19 nt, Homo sapiens
  misc_RNA (1)...(19): siRNA sense strand
caugaaugccuuacuggau

SEQ ID NO: 1530336 - RNA, 19 nt, Homo sapiens
  misc_RNA (1)...(19): siRNA sense strand
gucugcaacuaugccauua

SEQ ID NO: 1530337 - RNA, 19 nt, Homo sapiens
  misc_RNA (1)...(19): siRNA sense strand
cugaggagaaguggcauua

SEQ ID NO: 1530338 - RNA, 19 nt, Homo sapiens
  misc_RNA (1)...(19): siRNA sense strand
ccgccaacauggaauacau

SEQ ID NO: 1530339 - RNA, 19 nt, Homo sapiens
  misc_RNA (1)...(19): siRNA sense strand
cugcaacuaugccauuaag

SEQ ID NO: 1530340 - RNA, 19 nt, Homo sapiens
  misc_RNA (1)...(19): siRNA sense strand
guaccgguccguaguggau

SEQ ID NO: 1530341 - RNA, 19 nt, Homo sapiens
  misc_RNA (1)...(19): siRNA sense strand
uguaguagcaucagugucu

SEQ ID NO: 1530342 - RNA, 19 nt, Homo sapiens
  misc_RNA (1)...(19): siRNA sense strand
uugauaaugccuaaugcua

SEQ ID NO: 1530343 - RNA, 19 nt, Homo sapiens
  misc_RNA (1)...(19): siRNA sense strand
cauccauucuggccaguac

SEQ ID NO: 1530344 - RNA, 19 nt, Homo sapiens
  misc_RNA (1)...(19): siRNA sense strand
ggugugggcauccuccaau

SEQ ID NO: 1530345 - RNA, 19 nt, Homo sapiens
  misc_RNA (1)...(19): siRNA sense strand
agugaacgccuugauaaug

SEQ ID NO: 1530346 - RNA, 19 nt, Homo sapiens
  misc_RNA (1)...(19): siRNA sense strand
ccauuaagggcaacuggau

SEQ ID NO: 1530347 - RNA, 19 nt, Homo sapiens
  misc_RNA (1)...(19): siRNA sense strand
caacaucucugcugaagcu

SEQ ID NO: 1530348 - RNA, 19 nt, Homo sapiens
  misc_RNA (1)...(19): siRNA sense strand
gcaacucuuccgucuauuu

SEQ ID NO: 1530349 - RNA, 19 nt, Homo sapiens
  misc_RNA (1)...(19): siRNA sense strand
uggcaacucuuccgucuau

SEQ ID NO: 1530350 - RNA, 19 nt, Homo sapiens
  misc_RNA (1)...(19): siRNA sense strand
gaaaaugaagggaggguua

SEQ ID NO: 1530351 - RNA, 19 nt, Homo sapiens
  misc_RNA (1)...(19): siRNA sense strand
cauccuugcucuauuucuu

SEQ ID NO: 1530352 - RNA, 19 nt, Homo sapiens
  misc_RNA (1)...(19): siRNA sense strand
caucucugcugaagcucua

SEQ ID NO: 1530353 - RNA, 19 nt, Homo sapiens
  misc_RNA (1)...(19): siRNA sense strand
cuaacuuuaugccaucuuc

SEQ ID NO: 1530354 - RNA, 19 nt, Homo sapiens
  misc_RNA (1)...(19): siRNA sense strand
caacucuuccgucuauuuu

SEQ ID NO: 1530355 - RNA, 19 nt, Homo sapiens
  misc_RNA (1)...(19): siRNA sense strand
augaagggaggguuacuaa

SEQ ID NO: 1530356 - RNA, 19 nt, Homo sapiens
  misc_RNA (1)...(19): siRNA sense strand
gcaacaacgugaugaauau

SEQ ID NO: 1530357 - RNA, 19 nt, Homo sapiens
  misc_RNA (1)...(19): siRNA sense strand
gaaagacauucguaacuau

SEQ ID NO: 1530358 - RNA, 19 nt, Homo sapiens
  misc_RNA (1)...(19): siRNA sense strand
caagauggcuaccaggaaa

SEQ ID NO: 1530359 - RNA, 19 nt, Homo sapiens
  misc_RNA (1)...(19): siRNA sense strand
ugaaagacauucguaacua

SEQ ID NO: 1530360 - RNA, 19 nt, Homo sapiens
  misc_RNA (1)...(19): siRNA sense strand
ggucaagaauguugcguuu

SEQ ID NO: 1530361 - RNA, 19 nt, Homo sapiens
  misc_RNA (1)...(19): siRNA sense strand
caacauccuugccagcuuu

SEQ ID NO: 1530362 - RNA, 19 nt, Homo sapiens
  misc_RNA (1)...(19): siRNA sense strand
gaagggcuuuguccagaaa

SEQ ID NO: 1530363 - RNA, 19 nt, Homo sapiens
  misc_RNA (1)...(19): siRNA sense strand
ugagaacgcagacaaguua

SEQ ID NO: 1530364 - RNA, 19 nt, Homo sapiens
  misc_RNA (1)...(19): siRNA sense strand
gagacuagcucgcccaaca

SEQ ID NO: 1530365 - RNA, 19 nt, Homo sapiens
  misc_RNA (1)...(19): siRNA sense strand
ggaaugaccuacaaugacu

SEQ ID NO: 1530366 - RNA, 19 nt, Homo sapiens
  misc_RNA (1)...(19): siRNA sense strand
gcauggugcugcugaagaa

SEQ ID NO: 1530367 - RNA, 19 nt, Homo sapiens
  misc_RNA (1)...(19): siRNA sense strand
ucaaagauauggagaagca

SEQ ID NO: 1530368 - RNA, 19 nt, Homo sapiens
  misc_RNA (1)...(19): siRNA sense strand
gaaggacgauguguacugu

SEQ ID NO: 1530369 - RNA, 19 nt, Homo sapiens
  misc_RNA (1)...(19): siRNA sense strand
gaggagcgcuauccauauc

SEQ ID NO: 1530370 - RNA, 19 nt, Homo sapiens
  misc_RNA (1)...(19): siRNA sense strand
gaagaaggagggcauuguu

SEQ ID NO: 1530371 - RNA, 19 nt, Homo sapiens
  misc_RNA (1)...(19): siRNA sense strand
caauaacaaugaagucugu

SEQ ID NO: 1530372 - RNA, 19 nt, Homo sapiens
  misc_RNA (1)...(19): siRNA sense strand
uuggagagcuucacaaaug

SEQ ID NO: 1530373 - RNA, 19 nt, Homo sapiens
  misc_RNA (1)...(19): siRNA sense strand
gacaggaaauggcgauuca

SEQ ID NO: 1530374 - RNA, 19 nt, Homo sapiens
  misc_RNA (1)...(19): siRNA sense strand
gggugaagguccugagaaa

SEQ ID NO: 1530375 - RNA, 19 nt, Homo sapiens
  misc_RNA (1)...(19): siRNA sense strand
gaugaagacugggccuauu

SEQ ID NO: 1530376 - RNA, 19 nt, Homo sapiens
  misc_RNA (1)...(19): siRNA sense strand
ggagggcauuguuugcaaa

SEQ ID NO: 1530377 - RNA, 19 nt, Homo sapiens
  misc_RNA (1)...(19): siRNA sense strand
gcuaguguguggaucagaa

SEQ ID NO: 1530378 - RNA, 19 nt, Homo sapiens
  misc_RNA (1)...(19): siRNA sense strand
caagcaauacuaugaggua

SEQ ID NO: 1530379 - RNA, 19 nt, Homo sapiens
  misc_RNA (1)...(19): siRNA sense strand
gaccuacaaugacuucuuc

SEQ ID NO: 1530380 - RNA, 19 nt, Homo sapiens
  misc_RNA (1)...(19): siRNA sense strand
caacaacagcaccaugaaa

SEQ ID NO: 1530381 - RNA, 19 nt, Homo sapiens
  misc_RNA (1)...(19): siRNA sense strand
gaggaaagaguacggaaug

SEQ ID NO: 1530382 - RNA, 19 nt, Homo sapiens
  misc_RNA (1)...(19): siRNA sense strand
gaacaggauggcuaucaga

SEQ ID NO: 1530383 - RNA, 19 nt, Homo sapiens
  misc_RNA (1)...(19): siRNA sense strand
gcagcgagaagaagaaaga

SEQ ID NO: 1530384 - RNA, 19 nt, Homo sapiens
  misc_RNA (1)...(19): siRNA sense strand
ucagaaacccaccaacaaa

SEQ ID NO: 1530385 - RNA, 19 nt, Homo sapiens
  misc_RNA (1)...(19): siRNA sense strand
gcacaagucccaccaacca

SEQ ID NO: 1530386 - RNA, 19 nt, Homo sapiens
  misc_RNA (1)...(19): siRNA sense strand
caaugaagucuguguuuga

SEQ ID NO: 1530387 - RNA, 19 nt, Homo sapiens
  misc_RNA (1)...(19): siRNA sense strand
gccaggagacccucaguuu

SEQ ID NO: 1530388 - RNA, 19 nt, Homo sapiens
  misc_RNA (1)...(19): siRNA sense strand
cgugagaccugagcaaaga

SEQ ID NO: 1530389 - RNA, 19 nt, Homo sapiens
  misc_RNA (1)...(19): siRNA sense strand
ccacauaaccauucugaag

SEQ ID NO: 1530390 - RNA, 19 nt, Homo sapiens
  misc_RNA (1)...(19): siRNA sense strand
gaucucugcuccuaacgau

SEQ ID NO: 1530391 - RNA, 19 nt, Homo sapiens
  misc_RNA (1)...(19): siRNA sense strand
gguggaugaugaagacuug

SEQ ID NO: 1530392 - RNA, 19 nt, Homo sapiens
  misc_RNA (1)...(19): siRNA sense strand
caauauguaugugcaacaa

SEQ ID NO: 1530393 - RNA, 19 nt, Homo sapiens
  misc_RNA (1)...(19): siRNA sense strand
guaaugaguaugaggagaa

SEQ ID NO: 1530394 - RNA, 19 nt, Homo sapiens
  misc_RNA (1)...(19): siRNA sense strand
gaacagaguaugggucauc

SEQ ID NO: 1530395 - RNA, 19 nt, Homo sapiens
  misc_RNA (1)...(19): siRNA sense strand
aaugggagcucuguuguug

SEQ ID NO: 1530396 - RNA, 19 nt, Homo sapiens
  misc_RNA (1)...(19): siRNA sense strand
ggaggagugugcccguguu

SEQ ID NO: 1530397 - RNA, 19 nt, Homo sapiens
  misc_RNA (1)...(19): siRNA sense strand
gcaagauggcuaccaggaa

SEQ ID NO: 1530398 - RNA, 19 nt, Homo sapiens
  misc_RNA (1)...(19): siRNA sense strand
gcaagcaagagaaagagaa

SEQ ID NO: 1530399 - RNA, 19 nt, Homo sapiens
  misc_RNA (1)...(19): siRNA sense strand
gaucugagagucaagcaau

SEQ ID NO: 1530400 - RNA, 19 nt, Homo sapiens
  misc_RNA (1)...(19): siRNA sense strand
caacuucggagacaggaaa

SEQ ID NO: 1530401 - RNA, 19 nt, Homo sapiens
  misc_RNA (1)...(19): siRNA sense strand
gaaaugucaaauccuggua

SEQ ID NO: 1530402 - RNA, 19 nt, Homo sapiens
  misc_RNA (1)...(19): siRNA sense strand
aaagaaggcccaggacaaa

SEQ ID NO: 1530403 - RNA, 19 nt, Homo sapiens
  misc_RNA (1)...(19): siRNA sense strand
acaaugaagucuguguuug

SEQ ID NO: 1530404 - RNA, 19 nt, Homo sapiens
  misc_RNA (1)...(19): siRNA sense strand
gagguaccaauaacaauga

SEQ ID NO: 1530405 - RNA, 19 nt, Homo sapiens
  misc_RNA (1)...(19): siRNA sense strand
gcaauacuaugagguacca

SEQ ID NO: 1530406 - RNA, 19 nt, Homo sapiens
  misc_RNA (1)...(19): siRNA sense strand
gagucaagcaauacuauga

SEQ ID NO: 1530407 - RNA, 19 nt, Homo sapiens
  misc_RNA (1)...(19): siRNA sense strand
ggaggagcgcuauccauau

SEQ ID NO: 1530408 - RNA, 19 nt, Homo sapiens
  misc_RNA (1)...(19): siRNA sense strand
gguccauggugauugugua

SEQ ID NO: 1530409 - RNA, 19 nt, Homo sapiens
  misc_RNA (1)...(19): siRNA sense strand
ggagguugcuggugaucuc

SEQ ID NO: 1530410 - RNA, 19 nt, Homo sapiens
  misc_RNA (1)...(19): siRNA sense strand
gagaagagcaagaagaaaa

SEQ ID NO: 1530411 - RNA, 19 nt, Homo sapiens
  misc_RNA (1)...(19): siRNA sense strand
ucagcucggucaagaaugu

SEQ ID NO: 1530412 - RNA, 19 nt, Homo sapiens
  misc_RNA (1)...(19): siRNA sense strand
ggugauuguguacgauuua

SEQ ID NO: 1530413 - RNA, 19 nt, Homo sapiens
  misc_RNA (1)...(19): siRNA sense strand
gaaucaaagauauggagaa

SEQ ID NO: 1530414 - RNA, 19 nt, Homo sapiens
  misc_RNA (1)...(19): siRNA sense strand
ugaagucuguguuugaucu

SEQ ID NO: 1530415 - RNA, 19 nt, Homo sapiens
  misc_RNA (1)...(19): siRNA sense strand
gagagucaagcaauacuau

SEQ ID NO: 1530416 - RNA, 19 nt, Homo sapiens
  misc_RNA (1)...(19): siRNA sense strand
caaaugaagaagucugaga

SEQ ID NO: 1530417 - RNA, 19 nt, Homo sapiens
  misc_RNA (1)...(19): siRNA sense strand
caggagacccucaguuuca

SEQ ID NO: 1530418 - RNA, 19 nt, Homo sapiens
  misc_RNA (1)...(19): siRNA sense strand
gagaggcacauccaacaga

SEQ ID NO: 1530419 - RNA, 19 nt, Homo sapiens
  misc_RNA (1)...(19): siRNA sense strand
ugggaggucucgcggaauu

SEQ ID NO: 1530420 - RNA, 19 nt, Homo sapiens
  misc_RNA (1)...(19): siRNA sense strand
gaacaauauguaugugcaa

SEQ ID NO: 1530421 - RNA, 19 nt, Homo sapiens
  misc_RNA (1)...(19): siRNA sense strand
gacccucaguuucagagaa

SEQ ID NO: 1530422 - RNA, 19 nt, Homo sapiens
  misc_RNA (1)...(19): siRNA sense strand
ggaaggaggcaaggugaga

SEQ ID NO: 1530423 - RNA, 19 nt, Homo sapiens
  misc_RNA (1)...(19): siRNA sense strand
agaaagagaagagcaagaa

SEQ ID NO: 1530424 - RNA, 19 nt, Homo sapiens
  misc_RNA (1)...(19): siRNA sense strand
ugaugagccugcugaagga

SEQ ID NO: 1530425 - RNA, 19 nt, Homo sapiens
  misc_RNA (1)...(19): siRNA sense strand
gugauuguguacgauuuaa

SEQ ID NO: 1530426 - RNA, 19 nt, Homo sapiens
  misc_RNA (1)...(19): siRNA sense strand
ggaggagguugcuggugau

SEQ ID NO: 1530427 - RNA, 19 nt, Homo sapiens
  misc_RNA (1)...(19): siRNA sense strand
acuuucagcuagauaauga

SEQ ID NO: 1530428 - RNA, 19 nt, Homo sapiens
  misc_RNA (1)...(19): siRNA sense strand
ccaaggcugagaacaauau

SEQ ID NO: 1530429 - RNA, 19 nt, Homo sapiens
  misc_RNA (1)...(19): siRNA sense strand
aaaaggagguaaaacagaa

SEQ ID NO: 1530430 - RNA, 19 nt, Homo sapiens
  misc_RNA (1)...(19): siRNA sense strand
aaagagaagagcaagaaga

SEQ ID NO: 1530431 - RNA, 19 nt, Homo sapiens
  misc_RNA (1)...(19): siRNA sense strand
caggauggcuaucagaaac

SEQ ID NO: 1530432 - RNA, 19 nt, Homo sapiens
  misc_RNA (1)...(19): siRNA sense strand
agacguaccagcccauuug

SEQ ID NO: 1530433 - RNA, 19 nt, Homo sapiens
  misc_RNA (1)...(19): siRNA sense strand
gggcauuguuugcaaagag

SEQ ID NO: 1530434 - RNA, 19 nt, Homo sapiens
  misc_RNA (1)...(19): siRNA sense strand
guccagcucucccaacauc

SEQ ID NO: 1530435 - RNA, 19 nt, Homo sapiens
  misc_RNA (1)...(19): siRNA sense strand
aagagaagagcaagaagaa

SEQ ID NO: 1530436 - RNA, 19 nt, Homo sapiens
  misc_RNA (1)...(19): siRNA sense strand
gcagggaagaacagaguau

SEQ ID NO: 1530437 - RNA, 19 nt, Homo sapiens
  misc_RNA (1)...(19): siRNA sense strand
gaaggaggcaaggugagaa

SEQ ID NO: 1530438 - RNA, 19 nt, Homo sapiens
  misc_RNA (1)...(19): siRNA sense strand
ccauggauacccuuacuga

SEQ ID NO: 1530439 - RNA, 19 nt, Homo sapiens
  misc_RNA (1)...(19): siRNA sense strand
agacggaaaugucaaaucc

SEQ ID NO: 1530440 - RNA, 19 nt, Homo sapiens
  misc_RNA (1)...(19): siRNA sense strand
ggugaucucugcuccuaac

SEQ ID NO: 1530441 - RNA, 19 nt, Homo sapiens
  misc_RNA (1)...(19): siRNA sense strand
cgcgugagaugaucagaga

SEQ ID NO: 1530442 - RNA, 19 nt, Homo sapiens
  misc_RNA (1)...(19): siRNA sense strand
aaagagcaagcaagagaaa

SEQ ID NO: 1530443 - RNA, 19 nt, Homo sapiens
  misc_RNA (1)...(19): siRNA sense strand
ucgagaagaucaggcagaa

SEQ ID NO: 1530444 - RNA, 19 nt, Homo sapiens
  misc_RNA (1)...(19): siRNA sense strand
gugagaugaucagagauga

SEQ ID NO: 1530445 - RNA, 19 nt, Homo sapiens
  misc_RNA (1)...(19): siRNA sense strand
ggaugaugaagacuuggua

SEQ ID NO: 1530446 - RNA, 19 nt, Homo sapiens
  misc_RNA (1)...(19): siRNA sense strand
ucagcuagauaaugagaag

SEQ ID NO: 1530447 - RNA, 19 nt, Homo sapiens
  misc_RNA (1)...(19): siRNA sense strand
ugcaacaacgugaugaaua

SEQ ID NO: 1530448 - RNA, 19 nt, Homo sapiens
  misc_RNA (1)...(19): siRNA sense strand
aguaugaggagaaguauga

SEQ ID NO: 1530449 - RNA, 19 nt, Homo sapiens
  misc_RNA (1)...(19): siRNA sense strand
gagaaucuuuacccuccau

SEQ ID NO: 1530450 - RNA, 19 nt, Homo sapiens
  misc_RNA (1)...(19): siRNA sense strand
ucaagaauguugcguuucc

SEQ ID NO: 1530451 - RNA, 19 nt, Homo sapiens
  misc_RNA (1)...(19): siRNA sense strand
cgugaugaauaucuggaaa

SEQ ID NO: 1530452 - RNA, 19 nt, Homo sapiens
  misc_RNA (1)...(19): siRNA sense strand
gucaaauccugguauccuu

SEQ ID NO: 1530453 - RNA, 19 nt, Homo sapiens
  misc_RNA (1)...(19): siRNA sense strand
ggaaaagacggaaauguca

SEQ ID NO: 1530454 - RNA, 19 nt, Homo sapiens
  misc_RNA (1)...(19): siRNA sense strand
agaaggagggcauuguuug

SEQ ID NO: 1530455 - RNA, 19 nt, Homo sapiens
  misc_RNA (1)...(19): siRNA sense strand
aaucaaagauauggagaag

SEQ ID NO: 1530456 - RNA, 19 nt, Homo sapiens
  misc_RNA (1)...(19): siRNA sense strand
ggcaguggcugacuuucua

SEQ ID NO: 1530457 - RNA, 19 nt, Homo sapiens
  misc_RNA (1)...(19): siRNA sense strand
aagaagaacugcugugugu

SEQ ID NO: 1530458 - RNA, 19 nt, Homo sapiens
  misc_RNA (1)...(19): siRNA sense strand
caggugagccagauaauaa

SEQ ID NO: 1530459 - RNA, 19 nt, Homo sapiens
  misc_RNA (1)...(19): siRNA sense strand
cagcagccaucaucucuug

SEQ ID NO: 1530460 - RNA, 19 nt, Homo sapiens
  misc_RNA (1)...(19): siRNA sense strand
gaccuggcguucuuuauca

SEQ ID NO: 1530461 - RNA, 19 nt, Homo sapiens
  misc_RNA (1)...(19): siRNA sense strand
gcagaauugugaaguguac

SEQ ID NO: 1530462 - RNA, 19 nt, Homo sapiens
  misc_RNA (1)...(19): siRNA sense strand
caucaucucuugccuucug

SEQ ID NO: 1530463 - RNA, 19 nt, Homo sapiens
  misc_RNA (1)...(19): siRNA sense strand
ugaacaagaucuccaaucg

SEQ ID NO: 1530464 - RNA, 19 nt, Homo sapiens
  misc_RNA (1)...(19): siRNA sense strand
gaagaugccgauccagaau

SEQ ID NO: 1530465 - RNA, 19 nt, Homo sapiens
  misc_RNA (1)...(19): siRNA sense strand
ggaccggcaugccaagauc

SEQ ID NO: 1530466 - RNA, 19 nt, Homo sapiens
  misc_RNA (1)...(19): siRNA sense strand
ggaaauagacaagaagaac

SEQ ID NO: 1530467 - RNA, 19 nt, Homo sapiens
  misc_RNA (1)...(19): siRNA sense strand
guggcugacuuucuacuga

SEQ ID NO: 1530468 - RNA, 19 nt, Homo sapiens
  misc_RNA (1)...(19): siRNA sense strand
ggaccuggcguucuuuauc

SEQ ID NO: 1530469 - RNA, 19 nt, Homo sapiens
  misc_RNA (1)...(19): siRNA sense strand
ggugguggccaucgucuuu

SEQ ID NO: 1530470 - RNA, 19 nt, Homo sapiens
  misc_RNA (1)...(19): siRNA sense strand
gaaauagacaagaagaacu

SEQ ID NO: 1530471 - RNA, 19 nt, Homo sapiens
  misc_RNA (1)...(19): siRNA sense strand
ggccuugcccuguggauuu

SEQ ID NO: 1530472 - RNA, 19 nt, Homo sapiens
  misc_RNA (1)...(19): siRNA sense strand
ccaacuucuucuccacuuu

SEQ ID NO: 1530473 - RNA, 19 nt, Homo sapiens
  misc_RNA (1)...(19): siRNA sense strand
agaagaagaugccgaucca

SEQ ID NO: 1530474 - RNA, 19 nt, Homo sapiens
  misc_RNA (1)...(19): siRNA sense strand
caacuucuucuccacuuug

SEQ ID NO: 1530475 - RNA, 19 nt, Homo sapiens
  misc_RNA (1)...(19): siRNA sense strand
gcccauccuuucccaacuu

SEQ ID NO: 1530476 - RNA, 19 nt, Homo sapiens
  misc_RNA (1)...(19): siRNA sense strand
ggcaccaucugcaggauca

SEQ ID NO: 1530477 - RNA, 19 nt, Homo sapiens
  misc_RNA (1)...(19): siRNA sense strand
gggcccaaccucuccuuaa

SEQ ID NO: 1530478 - RNA, 19 nt, Homo sapiens
  misc_RNA (1)...(19): siRNA sense strand
ucaccuacaugaacagcau

SEQ ID NO: 1530479 - RNA, 19 nt, Homo sapiens
  misc_RNA (1)...(19): siRNA sense strand
ggacagcagccaucaucuc

SEQ ID NO: 1530480 - RNA, 19 nt, Homo sapiens
  misc_RNA (1)...(19): siRNA sense strand
gcaggaucacuuucuggaa

SEQ ID NO: 1530481 - RNA, 19 nt, Homo sapiens
  misc_RNA (1)...(19): siRNA sense strand
agaagaugccgauccagaa

SEQ ID NO: 1530482 - RNA, 19 nt, Homo sapiens
  misc_RNA (1)...(19): siRNA sense strand
caguccaccuccugaagaa

SEQ ID NO: 1530483 - RNA, 19 nt, Homo sapiens
  misc_RNA (1)...(19): siRNA sense strand
caccucaaguccuggaaau

SEQ ID NO: 1530484 - RNA, 19 nt, Homo sapiens
  misc_RNA (1)...(19): siRNA sense strand
gcugaugcucuucauguug

SEQ ID NO: 1530485 - RNA, 19 nt, Homo sapiens
  misc_RNA (1)...(19): siRNA sense strand
ggcugaugcucuucauguu

SEQ ID NO: 1530486 - RNA, 19 nt, Homo sapiens
  misc_RNA (1)...(19): siRNA sense strand
ucacggugguggcgguaga

SEQ ID NO: 1530487 - RNA, 19 nt, Homo sapiens
  misc_RNA (1)...(19): siRNA sense strand
acucucagcuucaccuaca

SEQ ID NO: 1530488 - RNA, 19 nt, Homo sapiens
  misc_RNA (1)...(19): siRNA sense strand
cguugggacuggaaguuug

SEQ ID NO: 1530489 - RNA, 19 nt, Homo sapiens
  misc_RNA (1)...(19): siRNA sense strand
acaggugagccagauaaua

SEQ ID NO: 1530490 - RNA, 19 nt, Homo sapiens
  misc_RNA (1)...(19): siRNA sense strand
gcacgcagaauugugaagu

SEQ ID NO: 1530491 - RNA, 19 nt, Homo sapiens
  misc_RNA (1)...(19): siRNA sense strand
gacagcagccaucaucucu

SEQ ID NO: 1530492 - RNA, 19 nt, Homo sapiens
  misc_RNA (1)...(19): siRNA sense strand
ccagaauggcggugcaaau

SEQ ID NO: 1530493 - RNA, 19 nt, Homo sapiens
  misc_RNA (1)...(19): siRNA sense strand
ugcagcagcuucagcaucu

SEQ ID NO: 1530494 - RNA, 19 nt, Homo sapiens
  misc_RNA (1)...(19): siRNA sense strand
aaauagacaagaagaacug

SEQ ID NO: 1530495 - RNA, 19 nt, Homo sapiens
  misc_RNA (1)...(19): siRNA sense strand
agagagccaucaccuucau

SEQ ID NO: 1530496 - RNA, 19 nt, Homo sapiens
  misc_RNA (1)...(19): siRNA sense strand
cgguggaccuggcguucuu

SEQ ID NO: 1530497 - RNA, 19 nt, Homo sapiens
  misc_RNA (1)...(19): siRNA sense strand
gcuguguguuccgagauga

SEQ ID NO: 1530498 - RNA, 19 nt, Homo sapiens
  misc_RNA (1)...(19): siRNA sense strand
cggcugaugcucuucaugu

SEQ ID NO: 1530499 - RNA, 19 nt, Homo sapiens
  misc_RNA (1)...(19): siRNA sense strand
ucaagagagccaucaccuu

SEQ ID NO: 1530500 - RNA, 19 nt, Homo sapiens
  misc_RNA (1)...(19): siRNA sense strand
ggccaucgucuuugucauc

SEQ ID NO: 1530501 - RNA, 19 nt, Homo sapiens
  misc_RNA (1)...(19): siRNA sense strand
gcguugggacuggaaguuu

SEQ ID NO: 1530502 - RNA, 19 nt, Homo sapiens
  misc_RNA (1)...(19): siRNA sense strand
caccacgcccugaacaaga

SEQ ID NO: 1530503 - RNA, 19 nt, Homo sapiens
  misc_RNA (1)...(19): siRNA sense strand
guccaccuccugaagaaga

SEQ ID NO: 1530504 - RNA, 19 nt, Homo sapiens
  misc_RNA (1)...(19): siRNA sense strand
acaagaagaacugcugugu

SEQ ID NO: 1530505 - RNA, 19 nt, Homo sapiens
  misc_RNA (1)...(19): siRNA sense strand
acgcagaauugugaagugu

SEQ ID NO: 1530506 - RNA, 19 nt, Homo sapiens
  misc_RNA (1)...(19): siRNA sense strand
acacuucgggcacgcagaa

SEQ ID NO: 1530507 - RNA, 19 nt, Homo sapiens
  misc_RNA (1)...(19): siRNA sense strand
ggcaguggcugacuuucua

SEQ ID NO: 1530508 - RNA, 19 nt, Homo sapiens
  misc_RNA (1)...(19): siRNA sense strand
aagaagaacugcugugugu

SEQ ID NO: 1530509 - RNA, 19 nt, Homo sapiens
  misc_RNA (1)...(19): siRNA sense strand
caggugagccagauaauaa

SEQ ID NO: 1530510 - RNA, 19 nt, Homo sapiens
  misc_RNA (1)...(19): siRNA sense strand
cagcagccaucaucucuug

SEQ ID NO: 1530511 - RNA, 19 nt, Homo sapiens
  misc_RNA (1)...(19): siRNA sense strand
gaccuggcguucuuuauca

SEQ ID NO: 1530512 - RNA, 19 nt, Homo sapiens
  misc_RNA (1)...(19): siRNA sense strand
gcagaauugugaaguguac

SEQ ID NO: 1530513 - RNA, 19 nt, Homo sapiens
  misc_RNA (1)...(19): siRNA sense strand
caucaucucuugccuucug

SEQ ID NO: 1530514 - RNA, 19 nt, Homo sapiens
  misc_RNA (1)...(19): siRNA sense strand
ugaacaagaucuccaaucg

SEQ ID NO: 1530515 - RNA, 19 nt, Homo sapiens
  misc_RNA (1)...(19): siRNA sense strand
gaagaugccgauccagaau

SEQ ID NO: 1530516 - RNA, 19 nt, Homo sapiens
  misc_RNA (1)...(19): siRNA sense strand
ggaccggcaugccaagauc

SEQ ID NO: 1530517 - RNA, 19 nt, Homo sapiens
  misc_RNA (1)...(19): siRNA sense strand
ggaaauagacaagaagaac

SEQ ID NO: 1530518 - RNA, 19 nt, Homo sapiens
  misc_RNA (1)...(19): siRNA sense strand
guggcugacuuucuacuga

SEQ ID NO: 1530519 - RNA, 19 nt, Homo sapiens
  misc_RNA (1)...(19): siRNA sense strand
ggaccuggcguucuuuauc

SEQ ID NO: 1530520 - RNA, 19 nt, Homo sapiens
  misc_RNA (1)...(19): siRNA sense strand
ggugguggccaucgucuuu

SEQ ID NO: 1530521 - RNA, 19 nt, Homo sapiens
  misc_RNA (1)...(19): siRNA sense strand
gaaauagacaagaagaacu

SEQ ID NO: 1530522 - RNA, 19 nt, Homo sapiens
  misc_RNA (1)...(19): siRNA sense strand
ggccuugcccuguggauuu

SEQ ID NO: 1530523 - RNA, 19 nt, Homo sapiens
  misc_RNA (1)...(19): siRNA sense strand
ccaacuucuucuccacuuu

SEQ ID NO: 1530524 - RNA, 19 nt, Homo sapiens
  misc_RNA (1)...(19): siRNA sense strand
agaagaagaugccgaucca

SEQ ID NO: 1530525 - RNA, 19 nt, Homo sapiens
  misc_RNA (1)...(19): siRNA sense strand
caacuucuucuccacuuug

SEQ ID NO: 1530526 - RNA, 19 nt, Homo sapiens
  misc_RNA (1)...(19): siRNA sense strand
gcccauccuuucccaacuu

SEQ ID NO: 1530527 - RNA, 19 nt, Homo sapiens
  misc_RNA (1)...(19): siRNA sense strand
ggcaccaucugcaggauca

SEQ ID NO: 1530528 - RNA, 19 nt, Homo sapiens
  misc_RNA (1)...(19): siRNA sense strand
gggcccaaccucuccuuaa

SEQ ID NO: 1530529 - RNA, 19 nt, Homo sapiens
  misc_RNA (1)...(19): siRNA sense strand
ucaccuacaugaacagcau

SEQ ID NO: 1530530 - RNA, 19 nt, Homo sapiens
  misc_RNA (1)...(19): siRNA sense strand
ggacagcagccaucaucuc

SEQ ID NO: 1530531 - RNA, 19 nt, Homo sapiens
  misc_RNA (1)...(19): siRNA sense strand
gcaggaucacuuucuggaa

SEQ ID NO: 1530532 - RNA, 19 nt, Homo sapiens
  misc_RNA (1)...(19): siRNA sense strand
agaagaugccgauccagaa

SEQ ID NO: 1530533 - RNA, 19 nt, Homo sapiens
  misc_RNA (1)...(19): siRNA sense strand
caguccaccuccugaagaa

SEQ ID NO: 1530534 - RNA, 19 nt, Homo sapiens
  misc_RNA (1)...(19): siRNA sense strand
caccucaaguccuggaaau

SEQ ID NO: 1530535 - RNA, 19 nt, Homo sapiens
  misc_RNA (1)...(19): siRNA sense strand
gcugaugcucuucauguug

SEQ ID NO: 1530536 - RNA, 19 nt, Homo sapiens
  misc_RNA (1)...(19): siRNA sense strand
ggcugaugcucuucauguu

SEQ ID NO: 1530537 - RNA, 19 nt, Homo sapiens
  misc_RNA (1)...(19): siRNA sense strand
ucacggugguggcgguaga

SEQ ID NO: 1530538 - RNA, 19 nt, Homo sapiens
  misc_RNA (1)...(19): siRNA sense strand
acucucagcuucaccuaca

SEQ ID NO: 1530539 - RNA, 19 nt, Homo sapiens
  misc_RNA (1)...(19): siRNA sense strand
cguugggacuggaaguuug

SEQ ID NO: 1530540 - RNA, 19 nt, Homo sapiens
  misc_RNA (1)...(19): siRNA sense strand
acaggugagccagauaaua

SEQ ID NO: 1530541 - RNA, 19 nt, Homo sapiens
  misc_RNA (1)...(19): siRNA sense strand
gcacgcagaauugugaagu

SEQ ID NO: 1530542 - RNA, 19 nt, Homo sapiens
  misc_RNA (1)...(19): siRNA sense strand
gacagcagccaucaucucu

SEQ ID NO: 1530543 - RNA, 19 nt, Homo sapiens
  misc_RNA (1)...(19): siRNA sense strand
ccagaauggcggugcaaau

SEQ ID NO: 1530544 - RNA, 19 nt, Homo sapiens
  misc_RNA (1)...(19): siRNA sense strand
ugcagcagcuucagcaucu

SEQ ID NO: 1530545 - RNA, 19 nt, Homo sapiens
  misc_RNA (1)...(19): siRNA sense strand
aaauagacaagaagaacug

SEQ ID NO: 1530546 - RNA, 19 nt, Homo sapiens
  misc_RNA (1)...(19): siRNA sense strand
agagagccaucaccuucau

SEQ ID NO: 1530547 - RNA, 19 nt, Homo sapiens
  misc_RNA (1)...(19): siRNA sense strand
cgguggaccuggcguucuu

SEQ ID NO: 1530548 - RNA, 19 nt, Homo sapiens
  misc_RNA (1)...(19): siRNA sense strand
gcuguguguuccgagauga

SEQ ID NO: 1530549 - RNA, 19 nt, Homo sapiens
  misc_RNA (1)...(19): siRNA sense strand
cggcugaugcucuucaugu

SEQ ID NO: 1530550 - RNA, 19 nt, Homo sapiens
  misc_RNA (1)...(19): siRNA sense strand
ucaagagagccaucaccuu

SEQ ID NO: 1530551 - RNA, 19 nt, Homo sapiens
  misc_RNA (1)...(19): siRNA sense strand
ggccaucgucuuugucauc

SEQ ID NO: 1530552 - RNA, 19 nt, Homo sapiens
  misc_RNA (1)...(19): siRNA sense strand
gcguugggacuggaaguuu

SEQ ID NO: 1530553 - RNA, 19 nt, Homo sapiens
  misc_RNA (1)...(19): siRNA sense strand
caccacgcccugaacaaga

SEQ ID NO: 1530554 - RNA, 19 nt, Homo sapiens
  misc_RNA (1)...(19): siRNA sense strand
guccaccuccugaagaaga

SEQ ID NO: 1530555 - RNA, 19 nt, Homo sapiens
  misc_RNA (1)...(19): siRNA sense strand
acaagaagaacugcugugu

SEQ ID NO: 1530556 - RNA, 19 nt, Homo sapiens
  misc_RNA (1)...(19): siRNA sense strand
acgcagaauugugaagugu

SEQ ID NO: 1530557 - RNA, 19 nt, Homo sapiens
  misc_RNA (1)...(19): siRNA sense strand
acacuucgggcacgcagaa

SEQ ID NO: 1530558 - RNA, 19 nt, Homo sapiens
  misc_RNA (1)...(19): siRNA sense strand
gcaaagauaugcauuuacu

SEQ ID NO: 1530559 - RNA, 19 nt, Homo sapiens
  misc_RNA (1)...(19): siRNA sense strand
gaagguaccuacagagaag

SEQ ID NO: 1530560 - RNA, 19 nt, Homo sapiens
  misc_RNA (1)...(19): siRNA sense strand
gagagaagguaccuacaga

SEQ ID NO: 1530561 - RNA, 19 nt, Homo sapiens
  misc_RNA (1)...(19): siRNA sense strand
gaauagaaaugcacaaagc

SEQ ID NO: 1530562 - RNA, 19 nt, Homo sapiens
  misc_RNA (1)...(19): siRNA sense strand
gaagaugagucuggaagug

SEQ ID NO: 1530563 - RNA, 19 nt, Homo sapiens
  misc_RNA (1)...(19): siRNA sense strand
uuacuucucuggcuacaaa

SEQ ID NO: 1530564 - RNA, 19 nt, Homo sapiens
  misc_RNA (1)...(19): siRNA sense strand
gcacaaagcagagcagugu

SEQ ID NO: 1530565 - RNA, 19 nt, Homo sapiens
  misc_RNA (1)...(19): siRNA sense strand
gaaaggccucugcaaagaa

SEQ ID NO: 1530566 - RNA, 19 nt, Homo sapiens
  misc_RNA (1)...(19): siRNA sense strand
gaauaacccugcagaaaau

SEQ ID NO: 1530567 - RNA, 19 nt, Homo sapiens
  misc_RNA (1)...(19): siRNA sense strand
gggaauaacccugcagaaa

SEQ ID NO: 1530568 - RNA, 19 nt, Homo sapiens
  misc_RNA (1)...(19): siRNA sense strand
cagagaagauccacaaggu

SEQ ID NO: 1530569 - RNA, 19 nt, Homo sapiens
  misc_RNA (1)...(19): siRNA sense strand
caagugaagugugugcauu

SEQ ID NO: 1530570 - RNA, 19 nt, Homo sapiens
  misc_RNA (1)...(19): siRNA sense strand
agaaaggccucugcaaaga

SEQ ID NO: 1530571 - RNA, 19 nt, Homo sapiens
  misc_RNA (1)...(19): siRNA sense strand
aguguuaguugcaaagaua

SEQ ID NO: 1530572 - RNA, 19 nt, Homo sapiens
  misc_RNA (1)...(19): siRNA sense strand
ggaauaacccugcagaaaa

SEQ ID NO: 1530573 - RNA, 19 nt, Homo sapiens
  misc_RNA (1)...(19): siRNA sense strand
gagaagguaccuacagaga

SEQ ID NO: 1530574 - RNA, 19 nt, Homo sapiens
  misc_RNA (1)...(19): siRNA sense strand
gauaugcauuuacuucucu

SEQ ID NO: 1530575 - RNA, 19 nt, Homo sapiens
  misc_RNA (1)...(19): siRNA sense strand
cuacagagaagaagggaaa

SEQ ID NO: 1530576 - RNA, 19 nt, Homo sapiens
  misc_RNA (1)...(19): siRNA sense strand
gcagagcagugugaagaag

SEQ ID NO: 1530577 - RNA, 19 nt, Homo sapiens
  misc_RNA (1)...(19): siRNA sense strand
ggagaugccaagugaagug

SEQ ID NO: 1530578 - RNA, 19 nt, Homo sapiens
  misc_RNA (1)...(19): siRNA sense strand
gaugagucuggaaguguua

SEQ ID NO: 1530579 - RNA, 19 nt, Homo sapiens
  misc_RNA (1)...(19): siRNA sense strand
gaugccaagugaagugugu

SEQ ID NO: 1530580 - RNA, 19 nt, Homo sapiens
  misc_RNA (1)...(19): siRNA sense strand
caaagaagagagagaaggu

SEQ ID NO: 1530581 - RNA, 19 nt, Homo sapiens
  misc_RNA (1)...(19): siRNA sense strand
gaagaagaagaggcgauga

SEQ ID NO: 1530582 - RNA, 19 nt, Homo sapiens
  misc_RNA (1)...(19): siRNA sense strand
uuugauaacuguguacuuc

SEQ ID NO: 1530583 - RNA, 19 nt, Homo sapiens
  misc_RNA (1)...(19): siRNA sense strand
aaacagacuaggcacagaa

SEQ ID NO: 1530584 - RNA, 19 nt, Homo sapiens
  misc_RNA (1)...(19): siRNA sense strand
agagcagugugaagaagaa

SEQ ID NO: 1530585 - RNA, 19 nt, Homo sapiens
  misc_RNA (1)...(19): siRNA sense strand
uaaaccugcuccuccaaag

SEQ ID NO: 1530586 - RNA, 19 nt, Homo sapiens
  misc_RNA (1)...(19): siRNA sense strand
aaaggccucugcaaagaag

SEQ ID NO: 1530587 - RNA, 19 nt, Homo sapiens
  misc_RNA (1)...(19): siRNA sense strand
agaugagucuggaaguguu

SEQ ID NO: 1530588 - RNA, 19 nt, Homo sapiens
  misc_RNA (1)...(19): siRNA sense strand
acaaagcagagcaguguga

SEQ ID NO: 1530589 - RNA, 19 nt, Homo sapiens
  misc_RNA (1)...(19): siRNA sense strand
ugauaacuguguacuucug

SEQ ID NO: 1530590 - RNA, 19 nt, Homo sapiens
  misc_RNA (1)...(19): siRNA sense strand
gaaguguuaguugcaaaga

SEQ ID NO: 1530591 - RNA, 19 nt, Homo sapiens
  misc_RNA (1)...(19): siRNA sense strand
aagcagagcagugugaaga

SEQ ID NO: 1530592 - RNA, 19 nt, Homo sapiens
  misc_RNA (1)...(19): siRNA sense strand
ugaaggggaugcuaaagga

SEQ ID NO: 1530593 - RNA, 19 nt, Homo sapiens
  misc_RNA (1)...(19): siRNA sense strand
gaaaauggagaugccaaaa

SEQ ID NO: 1530594 - RNA, 19 nt, Homo sapiens
  misc_RNA (1)...(19): siRNA sense strand
agaagguaccuacagagaa

SEQ ID NO: 1530595 - RNA, 19 nt, Homo sapiens
  misc_RNA (1)...(19): siRNA sense strand
ugcuggagaugccaaguga

SEQ ID NO: 1530596 - RNA, 19 nt, Homo sapiens
  misc_RNA (1)...(19): siRNA sense strand
ggaaguguuaguugcaaag

SEQ ID NO: 1530597 - RNA, 19 nt, Homo sapiens
  misc_RNA (1)...(19): siRNA sense strand
caaagcagagcagugugaa

SEQ ID NO: 1530598 - RNA, 19 nt, Homo sapiens
  misc_RNA (1)...(19): siRNA sense strand
aaauggagaugccaaaaca

SEQ ID NO: 1530599 - RNA, 19 nt, Homo sapiens
  misc_RNA (1)...(19): siRNA sense strand
aaagaagagagagaaggua

SEQ ID NO: 1530600 - RNA, 19 nt, Homo sapiens
  misc_RNA (1)...(19): siRNA sense strand
cuaaaccugcuccuccaaa

SEQ ID NO: 1530601 - RNA, 19 nt, Homo sapiens
  misc_RNA (1)...(19): siRNA sense strand
uggaaguguuaguugcaaa

SEQ ID NO: 1530602 - RNA, 19 nt, Homo sapiens
  misc_RNA (1)...(19): siRNA sense strand
ccacccugcccgagagaaa

SEQ ID NO: 1530603 - RNA, 19 nt, Homo sapiens
  misc_RNA (1)...(19): siRNA sense strand
gcagugugaagaagaagag

SEQ ID NO: 1530604 - RNA, 19 nt, Homo sapiens
  misc_RNA (1)...(19): siRNA sense strand
agauaugcauuuacuucuc

SEQ ID NO: 1530605 - RNA, 19 nt, Homo sapiens
  misc_RNA (1)...(19): siRNA sense strand
gaagagagagaagguaccu

SEQ ID NO: 1530606 - RNA, 19 nt, Homo sapiens
  misc_RNA (1)...(19): siRNA sense strand
cagagcagugugaagaaga

SEQ ID NO: 1530607 - RNA, 19 nt, Homo sapiens
  misc_RNA (1)...(19): siRNA sense strand
gaacuuugcuuccugguuu

SEQ ID NO: 1530608 - RNA, 19 nt, Homo sapiens
  misc_RNA (1)...(19): siRNA sense strand
gaacauaauuggagucuuc

SEQ ID NO: 1530609 - RNA, 19 nt, Homo sapiens
  misc_RNA (1)...(19): siRNA sense strand
ugacacauauugagacuua

SEQ ID NO: 1530610 - RNA, 19 nt, Homo sapiens
  misc_RNA (1)...(19): siRNA sense strand
gcaaggaccucgugaacuu

SEQ ID NO: 1530611 - RNA, 19 nt, Homo sapiens
  misc_RNA (1)...(19): siRNA sense strand
ucacagaagcccaaguuua

SEQ ID NO: 1530612 - RNA, 19 nt, Homo sapiens
  misc_RNA (1)...(19): siRNA sense strand
gaagguaacccaggagaaa

SEQ ID NO: 1530613 - RNA, 19 nt, Homo sapiens
  misc_RNA (1)...(19): siRNA sense strand
cacagaagcccaaguuuaa

SEQ ID NO: 1530614 - RNA, 19 nt, Homo sapiens
  misc_RNA (1)...(19): siRNA sense strand
cgagaaggcugcccucaag

SEQ ID NO: 1530615 - RNA, 19 nt, Homo sapiens
  misc_RNA (1)...(19): siRNA sense strand
gcauuugccuuucccaaca

SEQ ID NO: 1530616 - RNA, 19 nt, Homo sapiens
  misc_RNA (1)...(19): siRNA sense strand
cggaagagguuguguaagg

SEQ ID NO: 1530617 - RNA, 19 nt, Homo sapiens
  misc_RNA (1)...(19): siRNA sense strand
ugacugggcuaaugugaca

SEQ ID NO: 1530618 - RNA, 19 nt, Homo sapiens
  misc_RNA (1)...(19): siRNA sense strand
gcuggaaccugcacaagag

SEQ ID NO: 1530619 - RNA, 19 nt, Homo sapiens
  misc_RNA (1)...(19): siRNA sense strand
gaaaacaggagucauaaug

SEQ ID NO: 1530620 - RNA, 19 nt, Homo sapiens
  misc_RNA (1)...(19): siRNA sense strand
ugagcuaugucuccaaguu

SEQ ID NO: 1530621 - RNA, 19 nt, Homo sapiens
  misc_RNA (1)...(19): siRNA sense strand
gcagguguguguccaguac

SEQ ID NO: 1530622 - RNA, 19 nt, Homo sapiens
  misc_RNA (1)...(19): siRNA sense strand
gccagggagucaagugauu

SEQ ID NO: 1530623 - RNA, 19 nt, Homo sapiens
  misc_RNA (1)...(19): siRNA sense strand
ggccauauuugacuuggau

SEQ ID NO: 1530624 - RNA, 19 nt, Homo sapiens
  misc_RNA (1)...(19): siRNA sense strand
gagcggaagagguugugua

SEQ ID NO: 1530625 - RNA, 19 nt, Homo sapiens
  misc_RNA (1)...(19): siRNA sense strand
ucaauccgcuguacaucau

SEQ ID NO: 1530626 - RNA, 19 nt, Homo sapiens
  misc_RNA (1)...(19): siRNA sense strand
gauuugcucuggcuaaagg

SEQ ID NO: 1530627 - RNA, 19 nt, Homo sapiens
  misc_RNA (1)...(19): siRNA sense strand
ucucaugccugucuugcuu

SEQ ID NO: 1530628 - RNA, 19 nt, Homo sapiens
  misc_RNA (1)...(19): siRNA sense strand
ccucaagguugcugacaug

SEQ ID NO: 1530629 - RNA, 19 nt, Homo sapiens
  misc_RNA (1)...(19): siRNA sense strand
ccaguuuguuuacaugaga

SEQ ID NO: 1530630 - RNA, 19 nt, Homo sapiens
  misc_RNA (1)...(19): siRNA sense strand
uaauuggagucuucugugu

SEQ ID NO: 1530631 - RNA, 19 nt, Homo sapiens
  misc_RNA (1)...(19): siRNA sense strand
gccuggagcugguggacaa

SEQ ID NO: 1530632 - RNA, 19 nt, Homo sapiens
  misc_RNA (1)...(19): siRNA sense strand
ccgagacccuggcuucaug

SEQ ID NO: 1530633 - RNA, 19 nt, Homo sapiens
  misc_RNA (1)...(19): siRNA sense strand
ucaacgugcugaucugcuu

SEQ ID NO: 1530634 - RNA, 19 nt, Homo sapiens
  misc_RNA (1)...(19): siRNA sense strand
ccagaugaacgaguuguuu

SEQ ID NO: 1530635 - RNA, 19 nt, Homo sapiens
  misc_RNA (1)...(19): siRNA sense strand
gaucuuguccuugcucguu

SEQ ID NO: 1530636 - RNA, 19 nt, Homo sapiens
  misc_RNA (1)...(19): siRNA sense strand
caucguggaggccauauug

SEQ ID NO: 1530637 - RNA, 19 nt, Homo sapiens
  misc_RNA (1)...(19): siRNA sense strand
ggaagguaacccaggagaa

SEQ ID NO: 1530638 - RNA, 19 nt, Homo sapiens
  misc_RNA (1)...(19): siRNA sense strand
gcagccagacugaggaaga

SEQ ID NO: 1530639 - RNA, 19 nt, Homo sapiens
  misc_RNA (1)...(19): siRNA sense strand
ccucggcgcugagcuaugu

SEQ ID NO: 1530640 - RNA, 19 nt, Homo sapiens
  misc_RNA (1)...(19): siRNA sense strand
gcuccaguuuguuuacaug

SEQ ID NO: 1530641 - RNA, 19 nt, Homo sapiens
  misc_RNA (1)...(19): siRNA sense strand
cagccagacugaggaagaa

SEQ ID NO: 1530642 - RNA, 19 nt, Homo sapiens
  misc_RNA (1)...(19): siRNA sense strand
ggugaaaacaggagucaua

SEQ ID NO: 1530643 - RNA, 19 nt, Homo sapiens
  misc_RNA (1)...(19): siRNA sense strand
guucaaguccuucgugauc

SEQ ID NO: 1530644 - RNA, 19 nt, Homo sapiens
  misc_RNA (1)...(19): siRNA sense strand
ucaaguccuucgugaucuu

SEQ ID NO: 1530645 - RNA, 19 nt, Homo sapiens
  misc_RNA (1)...(19): siRNA sense strand
ggcuguggcuccaguuugu

SEQ ID NO: 1530646 - RNA, 19 nt, Homo sapiens
  misc_RNA (1)...(19): siRNA sense strand
caaaugccaucguguucac

SEQ ID NO: 1530647 - RNA, 19 nt, Homo sapiens
  misc_RNA (1)...(19): siRNA sense strand
cggauuugcucuggcuaaa

SEQ ID NO: 1530648 - RNA, 19 nt, Homo sapiens
  misc_RNA (1)...(19): siRNA sense strand
ggacgggccauauuugacu

SEQ ID NO: 1530649 - RNA, 19 nt, Homo sapiens
  misc_RNA (1)...(19): siRNA sense strand
ucaccuugaucuuguccuu

SEQ ID NO: 1530650 - RNA, 19 nt, Homo sapiens
  misc_RNA (1)...(19): siRNA sense strand
gaagaccaagagcggaaga

SEQ ID NO: 1530651 - RNA, 19 nt, Homo sapiens
  misc_RNA (1)...(19): siRNA sense strand
gagcuaugucuccaaguuc

SEQ ID NO: 1530652 - RNA, 19 nt, Homo sapiens
  misc_RNA (1)...(19): siRNA sense strand
gcugcgggcuagagagcaa

SEQ ID NO: 1530653 - RNA, 19 nt, Homo sapiens
  misc_RNA (1)...(19): siRNA sense strand
ccagggagucaagugauuu

SEQ ID NO: 1530654 - RNA, 19 nt, Homo sapiens
  misc_RNA (1)...(19): siRNA sense strand
agacugaggaagaaaggaa

SEQ ID NO: 1530655 - RNA, 19 nt, Homo sapiens
  misc_RNA (1)...(19): siRNA sense strand
ggguggagggugagacaaa

SEQ ID NO: 1530656 - RNA, 19 nt, Homo sapiens
  misc_RNA (1)...(19): siRNA sense strand
gccaugacccugugcaucu

SEQ ID NO: 1530657 - RNA, 19 nt, Homo sapiens
  misc_RNA (1)...(19): siRNA sense strand
gcggauuugcucuggcuaa

SEQ ID NO: 1530658 - RNA, 19 nt, Homo sapiens
  misc_RNA (1)...(19): siRNA sense strand
ucuccaaguucaaguccuu

SEQ ID NO: 1530659 - RNA, 19 nt, Homo sapiens
  misc_RNA (1)...(19): siRNA sense strand
caaggaccucgugaacuuu

SEQ ID NO: 1530660 - RNA, 19 nt, Homo sapiens
  misc_RNA (1)...(19): siRNA sense strand
cagaugaacgaguuguuuc

SEQ ID NO: 1530661 - RNA, 19 nt, Homo sapiens
  misc_RNA (1)...(19): siRNA sense strand
gacgggccauauuugacuu

SEQ ID NO: 1530662 - RNA, 19 nt, Homo sapiens
  misc_RNA (1)...(19): siRNA sense strand
cauaauuggagucuucugu

SEQ ID NO: 1530663 - RNA, 19 nt, Homo sapiens
  misc_RNA (1)...(19): siRNA sense strand
cugcuggauuggaagguaa

SEQ ID NO: 1530664 - RNA, 19 nt, Homo sapiens
  misc_RNA (1)...(19): siRNA sense strand
ggagggugagacaaaguau

SEQ ID NO: 1530665 - RNA, 19 nt, Homo sapiens
  misc_RNA (1)...(19): siRNA sense strand
ccaacaugcuggugaugcu

SEQ ID NO: 1530666 - RNA, 19 nt, Homo sapiens
  misc_RNA (1)...(19): siRNA sense strand
ccaaaugccaucguguuca

SEQ ID NO: 1530667 - RNA, 19 nt, Homo sapiens
  misc_RNA (1)...(19): siRNA sense strand
ucauccucauggccauuua

SEQ ID NO: 1530668 - RNA, 19 nt, Homo sapiens
  misc_RNA (1)...(19): siRNA sense strand
gcuauucauugugccuuca

SEQ ID NO: 1530669 - RNA, 19 nt, Homo sapiens
  misc_RNA (1)...(19): siRNA sense strand
gguggagggugagacaaag

SEQ ID NO: 1530670 - RNA, 19 nt, Homo sapiens
  misc_RNA (1)...(19): siRNA sense strand
gggcaucgugcugcuacua

SEQ ID NO: 1530671 - RNA, 19 nt, Homo sapiens
  misc_RNA (1)...(19): siRNA sense strand
uggcuacccugcuauucau

SEQ ID NO: 1530672 - RNA, 19 nt, Homo sapiens
  misc_RNA (1)...(19): siRNA sense strand
accaagagcggaagagguu

SEQ ID NO: 1530673 - RNA, 19 nt, Homo sapiens
  misc_RNA (1)...(19): siRNA sense strand
gccaucguguucaccuaug

SEQ ID NO: 1530674 - RNA, 19 nt, Homo sapiens
  misc_RNA (1)...(19): siRNA sense strand
uacccugagugccuccuuu

SEQ ID NO: 1530675 - RNA, 19 nt, Homo sapiens
  misc_RNA (1)...(19): siRNA sense strand
caucuuugccuccaugucu

SEQ ID NO: 1530676 - RNA, 19 nt, Homo sapiens
  misc_RNA (1)...(19): siRNA sense strand
ccugcuggauuggaaggua

SEQ ID NO: 1530677 - RNA, 19 nt, Homo sapiens
  misc_RNA (1)...(19): siRNA sense strand
caagagcggaagagguugu

SEQ ID NO: 1530678 - RNA, 19 nt, Homo sapiens
  misc_RNA (1)...(19): siRNA sense strand
cuacccugcuauucauugu

SEQ ID NO: 1530679 - RNA, 19 nt, Homo sapiens
  misc_RNA (1)...(19): siRNA sense strand
cagcaaggaccucgugaac

SEQ ID NO: 1530680 - RNA, 19 nt, Homo sapiens
  misc_RNA (1)...(19): siRNA sense strand
gcuacccugcuauucauug

SEQ ID NO: 1530681 - RNA, 19 nt, Homo sapiens
  misc_RNA (1)...(19): siRNA sense strand
guggcuacccugcuauuca

SEQ ID NO: 1530682 - RNA, 19 nt, Homo sapiens
  misc_RNA (1)...(19): siRNA sense strand
uggagggugagacaaagua

SEQ ID NO: 1530683 - RNA, 19 nt, Homo sapiens
  misc_RNA (1)...(19): siRNA sense strand
cuuuguggcuacccugcua

SEQ ID NO: 1530684 - RNA, 19 nt, Homo sapiens
  misc_RNA (1)...(19): siRNA sense strand
ggaaauggcacugaaauua

SEQ ID NO: 1530685 - RNA, 19 nt, Homo sapiens
  misc_RNA (1)...(19): siRNA sense strand
gacaauccaugauaaagua

SEQ ID NO: 1530686 - RNA, 19 nt, Homo sapiens
  misc_RNA (1)...(19): siRNA sense strand
gaaagaauaugccagaaag

SEQ ID NO: 1530687 - RNA, 19 nt, Homo sapiens
  misc_RNA (1)...(19): siRNA sense strand
gagcaauaauucugaacua

SEQ ID NO: 1530688 - RNA, 19 nt, Homo sapiens
  misc_RNA (1)...(19): siRNA sense strand
ggaagaaccuuguuguuuu

SEQ ID NO: 1530689 - RNA, 19 nt, Homo sapiens
  misc_RNA (1)...(19): siRNA sense strand
caaacgagaagaaagaaua

SEQ ID NO: 1530690 - RNA, 19 nt, Homo sapiens
  misc_RNA (1)...(19): siRNA sense strand
gaaauggcacugaaauuau

SEQ ID NO: 1530691 - RNA, 19 nt, Homo sapiens
  misc_RNA (1)...(19): siRNA sense strand
ccaaagcccuauaaauguu

SEQ ID NO: 1530692 - RNA, 19 nt, Homo sapiens
  misc_RNA (1)...(19): siRNA sense strand
caccaaaccuguuccacua

SEQ ID NO: 1530693 - RNA, 19 nt, Homo sapiens
  misc_RNA (1)...(19): siRNA sense strand
gauuaugguuguuguggua

SEQ ID NO: 1530694 - RNA, 19 nt, Homo sapiens
  misc_RNA (1)...(19): siRNA sense strand
gggagaauuuacugcaaua

SEQ ID NO: 1530695 - RNA, 19 nt, Homo sapiens
  misc_RNA (1)...(19): siRNA sense strand
aaauguaucuggucaaugu

SEQ ID NO: 1530696 - RNA, 19 nt, Homo sapiens
  misc_RNA (1)...(19): siRNA sense strand
caagaaguaucaguauuga

SEQ ID NO: 1530697 - RNA, 19 nt, Homo sapiens
  misc_RNA (1)...(19): siRNA sense strand
caucagcuaccauauauaa

SEQ ID NO: 1530698 - RNA, 19 nt, Homo sapiens
  misc_RNA (1)...(19): siRNA sense strand
gaaagucaccuaagauucu

SEQ ID NO: 1530699 - RNA, 19 nt, Homo sapiens
  misc_RNA (1)...(19): siRNA sense strand
gccagaaagugaucauuga

SEQ ID NO: 1530700 - RNA, 19 nt, Homo sapiens
  misc_RNA (1)...(19): siRNA sense strand
gcacugaaauuauguacac

SEQ ID NO: 1530701 - RNA, 19 nt, Homo sapiens
  misc_RNA (1)...(19): siRNA sense strand
cuauaaauguugcaucuug

SEQ ID NO: 1530702 - RNA, 19 nt, Homo sapiens
  misc_RNA (1)...(19): siRNA sense strand
uaaugagacugaaugcaaa

SEQ ID NO: 1530703 - RNA, 19 nt, Homo sapiens
  misc_RNA (1)...(19): siRNA sense strand
gggaauuucucacaguaga

SEQ ID NO: 1530704 - RNA, 19 nt, Homo sapiens
  misc_RNA (1)...(19): siRNA sense strand
aaugaaggcuguugcaaga

SEQ ID NO: 1530705 - RNA, 19 nt, Homo sapiens
  misc_RNA (1)...(19): siRNA sense strand
gaaggagcaauaauucuga

SEQ ID NO: 1530706 - RNA, 19 nt, Homo sapiens
  misc_RNA (1)...(19): siRNA sense strand
guaccuggcacuacaauug

SEQ ID NO: 1530707 - RNA, 19 nt, Homo sapiens
  misc_RNA (1)...(19): siRNA sense strand
gaagggauugugaagcuuu

SEQ ID NO: 1530708 - RNA, 19 nt, Homo sapiens
  misc_RNA (1)...(19): siRNA sense strand
gaugaaggagcaauaauuc

SEQ ID NO: 1530709 - RNA, 19 nt, Homo sapiens
  misc_RNA (1)...(19): siRNA sense strand
ucaagaaguaucaguauug

SEQ ID NO: 1530710 - RNA, 19 nt, Homo sapiens
  misc_RNA (1)...(19): siRNA sense strand
gggaguaccuggcacuaca

SEQ ID NO: 1530711 - RNA, 19 nt, Homo sapiens
  misc_RNA (1)...(19): siRNA sense strand
gaugauguguguguauuuc

SEQ ID NO: 1530712 - RNA, 19 nt, Homo sapiens
  misc_RNA (1)...(19): siRNA sense strand
aaauggcacugaaauuaug

SEQ ID NO: 1530713 - RNA, 19 nt, Homo sapiens
  misc_RNA (1)...(19): siRNA sense strand
ggacaauccaugauaaagu

SEQ ID NO: 1530714 - RNA, 19 nt, Homo sapiens
  misc_RNA (1)...(19): siRNA sense strand
ucuguuguccucaguauua

SEQ ID NO: 1530715 - RNA, 19 nt, Homo sapiens
  misc_RNA (1)...(19): siRNA sense strand
ggauugugaagcuuuauaa

SEQ ID NO: 1530716 - RNA, 19 nt, Homo sapiens
  misc_RNA (1)...(19): siRNA sense strand
caaaaugaaugaagggauu

SEQ ID NO: 1530717 - RNA, 19 nt, Homo sapiens
  misc_RNA (1)...(19): siRNA sense strand
gaaaauggaacaucaguug

SEQ ID NO: 1530718 - RNA, 19 nt, Homo sapiens
  misc_RNA (1)...(19): siRNA sense strand
guguguauuucaagaagua

SEQ ID NO: 1530719 - RNA, 19 nt, Homo sapiens
  misc_RNA (1)...(19): siRNA sense strand
uuacugcaauagaccauaa

SEQ ID NO: 1530720 - RNA, 19 nt, Homo sapiens
  misc_RNA (1)...(19): siRNA sense strand
caacauggcacugugaaug

SEQ ID NO: 1530721 - RNA, 19 nt, Homo sapiens
  misc_RNA (1)...(19): siRNA sense strand
cccaucagcuaccauauau

SEQ ID NO: 1530722 - RNA, 19 nt, Homo sapiens
  misc_RNA (1)...(19): siRNA sense strand
agaaagugaucauugaauc

SEQ ID NO: 1530723 - RNA, 19 nt, Homo sapiens
  misc_RNA (1)...(19): siRNA sense strand
gccaaagcccuauaaaugu

SEQ ID NO: 1530724 - RNA, 19 nt, Homo sapiens
  misc_RNA (1)...(19): siRNA sense strand
gaaaauguaucuggucaau

SEQ ID NO: 1530725 - RNA, 19 nt, Homo sapiens
  misc_RNA (1)...(19): siRNA sense strand
caccuaagauucugcaagu

SEQ ID NO: 1530726 - RNA, 19 nt, Homo sapiens
  misc_RNA (1)...(19): siRNA sense strand
gcccaucagcuaccauaua

SEQ ID NO: 1530727 - RNA, 19 nt, Homo sapiens
  misc_RNA (1)...(19): siRNA sense strand
gagaauuuacugcaauaga

SEQ ID NO: 1530728 - RNA, 19 nt, Homo sapiens
  misc_RNA (1)...(19): siRNA sense strand
gauucaaguucgacaggaa

SEQ ID NO: 1530729 - RNA, 19 nt, Homo sapiens
  misc_RNA (1)...(19): siRNA sense strand
uauugaaagucaccuaaga

SEQ ID NO: 1530730 - RNA, 19 nt, Homo sapiens
  misc_RNA (1)...(19): siRNA sense strand
gagccaaagcccuauaaau

SEQ ID NO: 1530731 - RNA, 19 nt, Homo sapiens
  misc_RNA (1)...(19): siRNA sense strand
gaucauugaaucggucaua

SEQ ID NO: 1530732 - RNA, 19 nt, Homo sapiens
  misc_RNA (1)...(19): siRNA sense strand
ccaaaccuguuccacuaug

SEQ ID NO: 1530733 - RNA, 19 nt, Homo sapiens
  misc_RNA (1)...(19): siRNA sense strand
gcaauaauucugaacuaca

SEQ ID NO: 1530734 - RNA, 19 nt, Homo sapiens
  misc_RNA (1)...(19): siRNA sense strand
caacugugcagaagauaug

SEQ ID NO: 1530735 - RNA, 19 nt, Homo sapiens
  misc_RNA (1)...(19): siRNA sense strand
uauguacacucuccaggaa

SEQ ID NO: 1530736 - RNA, 19 nt, Homo sapiens
  misc_RNA (1)...(19): siRNA sense strand
ggaagaagacuuuuguuau

SEQ ID NO: 1530737 - RNA, 19 nt, Homo sapiens
  misc_RNA (1)...(19): siRNA sense strand
guauuacuguguaugugaa

SEQ ID NO: 1530738 - RNA, 19 nt, Homo sapiens
  misc_RNA (1)...(19): siRNA sense strand
aaauggaacaucaguugua

SEQ ID NO: 1530739 - RNA, 19 nt, Homo sapiens
  misc_RNA (1)...(19): siRNA sense strand
guauuuggaagaagacuuu

SEQ ID NO: 1530740 - RNA, 19 nt, Homo sapiens
  misc_RNA (1)...(19): siRNA sense strand
gauuguggaugcauacagu

SEQ ID NO: 1530741 - RNA, 19 nt, Homo sapiens
  misc_RNA (1)...(19): siRNA sense strand
gagugauuguggaugcaua

SEQ ID NO: 1530742 - RNA, 19 nt, Homo sapiens
  misc_RNA (1)...(19): siRNA sense strand
acaauugcaccacauauga

SEQ ID NO: 1530743 - RNA, 19 nt, Homo sapiens
  misc_RNA (1)...(19): siRNA sense strand
uugaaucggucauaaggaa

SEQ ID NO: 1530744 - RNA, 19 nt, Homo sapiens
  misc_RNA (1)...(19): siRNA sense strand
gauguucaccagguauaua

SEQ ID NO: 1530745 - RNA, 19 nt, Homo sapiens
  misc_RNA (1)...(19): siRNA sense strand
cuaagauucugcaaguguu

SEQ ID NO: 1530746 - RNA, 19 nt, Homo sapiens
  misc_RNA (1)...(19): siRNA sense strand
agccaaagcccuauaaaug

SEQ ID NO: 1530747 - RNA, 19 nt, Homo sapiens
  misc_RNA (1)...(19): siRNA sense strand
gaucugcaaacgagaagaa

SEQ ID NO: 1530748 - RNA, 19 nt, Homo sapiens
  misc_RNA (1)...(19): siRNA sense strand
ugaugaaggagcaauaauu

SEQ ID NO: 1530749 - RNA, 19 nt, Homo sapiens
  misc_RNA (1)...(19): siRNA sense strand
cugcaaauuucacauggaa

SEQ ID NO: 1530750 - RNA, 19 nt, Homo sapiens
  misc_RNA (1)...(19): siRNA sense strand
ugaaggcuguugcaagauc

SEQ ID NO: 1530751 - RNA, 19 nt, Homo sapiens
  misc_RNA (1)...(19): siRNA sense strand
uuaaugagacugaaugcaa

SEQ ID NO: 1530752 - RNA, 19 nt, Homo sapiens
  misc_RNA (1)...(19): siRNA sense strand
gcuaccauauauaacauca

SEQ ID NO: 1530753 - RNA, 19 nt, Homo sapiens
  misc_RNA (1)...(19): siRNA sense strand
gaauaugccagaaagugau

SEQ ID NO: 1530754 - RNA, 19 nt, Homo sapiens
  misc_RNA (1)...(19): siRNA sense strand
gagacugaaugcaaaauga

SEQ ID NO: 1530755 - RNA, 19 nt, Homo sapiens
  misc_RNA (1)...(19): siRNA sense strand
gcacugugaauguaacugu

SEQ ID NO: 1530756 - RNA, 19 nt, Homo sapiens
  misc_RNA (1)...(19): siRNA sense strand
agaaagaauaugccagaaa

SEQ ID NO: 1530757 - RNA, 19 nt, Homo sapiens
  misc_RNA (1)...(19): siRNA sense strand
aggaagaaccuuguuguuu

SEQ ID NO: 1530758 - RNA, 19 nt, Homo sapiens
  misc_RNA (1)...(19): siRNA sense strand
gaagugggagaauuuacug

SEQ ID NO: 1530759 - RNA, 19 nt, Homo sapiens
  misc_RNA (1)...(19): siRNA sense strand
caagaucugcaaacgagaa

SEQ ID NO: 1530760 - RNA, 19 nt, Homo sapiens
  misc_RNA (1)...(19): siRNA sense strand
uuacacuggugaauuguuc

SEQ ID NO: 1530761 - RNA, 19 nt, Homo sapiens
  misc_RNA (1)...(19): siRNA sense strand
ggaugauguguguguauuu

SEQ ID NO: 1530762 - RNA, 19 nt, Homo sapiens
  misc_RNA (1)...(19): siRNA sense strand
ugaaaaggaugaugugugu

SEQ ID NO: 1530763 - RNA, 19 nt, Homo sapiens
  misc_RNA (1)...(19): siRNA sense strand
uauagagugucuggaagaa

SEQ ID NO: 1530764 - RNA, 19 nt, Homo sapiens
  misc_RNA (1)...(19): siRNA sense strand
gaacuacacaauggucugu

SEQ ID NO: 1530765 - RNA, 19 nt, Homo sapiens
  misc_RNA (1)...(19): siRNA sense strand
caauaauucugaacuacac

SEQ ID NO: 1530766 - RNA, 19 nt, Homo sapiens
  misc_RNA (1)...(19): siRNA sense strand
caaaccuguuccacuaugu

SEQ ID NO: 1530767 - RNA, 19 nt, Homo sapiens
  misc_RNA (1)...(19): siRNA sense strand
cacaguagaucuuaauagc

SEQ ID NO: 1530768 - RNA, 19 nt, Homo sapiens
  misc_RNA (1)...(19): siRNA sense strand
gaaggcuguugcaagaucu

SEQ ID NO: 1530769 - RNA, 19 nt, Homo sapiens
  misc_RNA (1)...(19): siRNA sense strand
gggauugugaagcuuuaua

SEQ ID NO: 1530770 - RNA, 19 nt, Homo sapiens
  misc_RNA (1)...(19): siRNA sense strand
aaaggaugaugugugugua

SEQ ID NO: 1530771 - RNA, 19 nt, Homo sapiens
  misc_RNA (1)...(19): siRNA sense strand
agaauaugccagaaaguga

SEQ ID NO: 1530772 - RNA, 19 nt, Homo sapiens
  misc_RNA (1)...(19): siRNA sense strand
aagggauugugaagcuuua

SEQ ID NO: 1530773 - RNA, 19 nt, Homo sapiens
  misc_RNA (1)...(19): siRNA sense strand
gaaugaagggauugugaag

SEQ ID NO: 1530774 - RNA, 19 nt, Homo sapiens
  misc_RNA (1)...(19): siRNA sense strand
guaugugaaccaaaccuuu

SEQ ID NO: 1530775 - RNA, 19 nt, Homo sapiens
  misc_RNA (1)...(19): siRNA sense strand
agauaaccauacaggcuuu

SEQ ID NO: 1530776 - RNA, 19 nt, Homo sapiens
  misc_RNA (1)...(19): siRNA sense strand
ugcaauagaccauaacuuc

SEQ ID NO: 1530777 - RNA, 19 nt, Homo sapiens
  misc_RNA (1)...(19): siRNA sense strand
gaaagugaucauugaaucg

SEQ ID NO: 1530778 - RNA, 19 nt, Homo sapiens
  misc_RNA (1)...(19): siRNA sense strand
ccagaaagugaucauugaa

SEQ ID NO: 1530779 - RNA, 19 nt, Homo sapiens
  misc_RNA (1)...(19): siRNA sense strand
guuccacuaugucaugaug

SEQ ID NO: 1530780 - RNA, 19 nt, Homo sapiens
  misc_RNA (1)...(19): siRNA sense strand
gaaguaucaguauugaauc

SEQ ID NO: 1530781 - RNA, 19 nt, Homo sapiens
  misc_RNA (1)...(19): siRNA sense strand
ccaggaacccauagacugu

SEQ ID NO: 1530782 - RNA, 19 nt, Homo sapiens
  misc_RNA (1)...(19): siRNA sense strand
cagcuaccauauauaacau

SEQ ID NO: 1530783 - RNA, 19 nt, Homo sapiens
  misc_RNA (1)...(19): siRNA sense strand
caauugcaccacauaugaa

SEQ ID NO: 1530784 - RNA, 19 nt, Homo sapiens
  misc_RNA (1)...(19): siRNA sense strand
gaacaaggauuccaagaag

SEQ ID NO: 1530785 - RNA, 19 nt, Homo sapiens
  misc_RNA (1)...(19): siRNA sense strand
gaacaaagaacgugcuaaa

SEQ ID NO: 1530786 - RNA, 19 nt, Homo sapiens
  misc_RNA (1)...(19): siRNA sense strand
aaagagaaauggucaugua

SEQ ID NO: 1530787 - RNA, 19 nt, Homo sapiens
  misc_RNA (1)...(19): siRNA sense strand
gagaaauggucauguauuc

SEQ ID NO: 1530788 - RNA, 19 nt, Homo sapiens
  misc_RNA (1)...(19): siRNA sense strand
ggaauauacugaaggcauu

SEQ ID NO: 1530789 - RNA, 19 nt, Homo sapiens
  misc_RNA (1)...(19): siRNA sense strand
cagcagaucuugaccuuau

SEQ ID NO: 1530790 - RNA, 19 nt, Homo sapiens
  misc_RNA (1)...(19): siRNA sense strand
gaagaaauccgagcaguug

SEQ ID NO: 1530791 - RNA, 19 nt, Homo sapiens
  misc_RNA (1)...(19): siRNA sense strand
ucacuaagacgacagauaa

SEQ ID NO: 1530792 - RNA, 19 nt, Homo sapiens
  misc_RNA (1)...(19): siRNA sense strand
cgacagauaaucaaacuaa

SEQ ID NO: 1530793 - RNA, 19 nt, Homo sapiens
  misc_RNA (1)...(19): siRNA sense strand
gaaauggaauauacugaag

SEQ ID NO: 1530794 - RNA, 19 nt, Homo sapiens
  misc_RNA (1)...(19): siRNA sense strand
gccaaacgcugaccuggaa

SEQ ID NO: 1530795 - RNA, 19 nt, Homo sapiens
  misc_RNA (1)...(19): siRNA sense strand
ucagucaacucccuuuaaa

SEQ ID NO: 1530796 - RNA, 19 nt, Homo sapiens
  misc_RNA (1)...(19): siRNA sense strand
gaaauggucauguauucaa

SEQ ID NO: 1530797 - RNA, 19 nt, Homo sapiens
  misc_RNA (1)...(19): siRNA sense strand
guacuuacgcugagugaaa

SEQ ID NO: 1530798 - RNA, 19 nt, Homo sapiens
  misc_RNA (1)...(19): siRNA sense strand
guagcuuucuggcugcuua

SEQ ID NO: 1530799 - RNA, 19 nt, Homo sapiens
  misc_RNA (1)...(19): siRNA sense strand
cagaugaccugacuguugu

SEQ ID NO: 1530800 - RNA, 19 nt, Homo sapiens
  misc_RNA (1)...(19): siRNA sense strand
caaagaacgugcuaaaaga

SEQ ID NO: 1530801 - RNA, 19 nt, Homo sapiens
  misc_RNA (1)...(19): siRNA sense strand
caagaaggaguuccaaaug

SEQ ID NO: 1530802 - RNA, 19 nt, Homo sapiens
  misc_RNA (1)...(19): siRNA sense strand
agaugcagcuucacuaaga

SEQ ID NO: 1530803 - RNA, 19 nt, Homo sapiens
  misc_RNA (1)...(19): siRNA sense strand
ggacagcuggucagaaaug

SEQ ID NO: 1530804 - RNA, 19 nt, Homo sapiens
  misc_RNA (1)...(19): siRNA sense strand
gcugagauggcagaaauua

SEQ ID NO: 1530805 - RNA, 19 nt, Homo sapiens
  misc_RNA (1)...(19): siRNA sense strand
ggagaggauuguuguagca

SEQ ID NO: 1530806 - RNA, 19 nt, Homo sapiens
  misc_RNA (1)...(19): siRNA sense strand
gcaccggaguacacuguga

SEQ ID NO: 1530807 - RNA, 19 nt, Homo sapiens
  misc_RNA (1)...(19): siRNA sense strand
ggaagaggagaacaaagaa

SEQ ID NO: 1530808 - RNA, 19 nt, Homo sapiens
  misc_RNA (1)...(19): siRNA sense strand
gaauauacugaaggcauua

SEQ ID NO: 1530809 - RNA, 19 nt, Homo sapiens
  misc_RNA (1)...(19): siRNA sense strand
uauguuaccugaagaugga

SEQ ID NO: 1530810 - RNA, 19 nt, Homo sapiens
  misc_RNA (1)...(19): siRNA sense strand
cgaaugagggucccagaaa

SEQ ID NO: 1530811 - RNA, 19 nt, Homo sapiens
  misc_RNA (1)...(19): siRNA sense strand
gugaaagaccacuagauuu

SEQ ID NO: 1530812 - RNA, 19 nt, Homo sapiens
  misc_RNA (1)...(19): siRNA sense strand
gaaggaguuccaaaugcua

SEQ ID NO: 1530813 - RNA, 19 nt, Homo sapiens
  misc_RNA (1)...(19): siRNA sense strand
ggucauguauucaauuacu

SEQ ID NO: 1530814 - RNA, 19 nt, Homo sapiens
  misc_RNA (1)...(19): siRNA sense strand
guagaugcagcuucacuaa

SEQ ID NO: 1530815 - RNA, 19 nt, Homo sapiens
  misc_RNA (1)...(19): siRNA sense strand
uccaaaugcuagugugaua

SEQ ID NO: 1530816 - RNA, 19 nt, Homo sapiens
  misc_RNA (1)...(19): siRNA sense strand
gaucuugaccuuauucagu

SEQ ID NO: 1530817 - RNA, 19 nt, Homo sapiens
  misc_RNA (1)...(19): siRNA sense strand
ugaccugacuguuguagau

SEQ ID NO: 1530818 - RNA, 19 nt, Homo sapiens
  misc_RNA (1)...(19): siRNA sense strand
cgaaauggaauauacugaa

SEQ ID NO: 1530819 - RNA, 19 nt, Homo sapiens
  misc_RNA (1)...(19): siRNA sense strand
gaaugagggucccagaaaa

SEQ ID NO: 1530820 - RNA, 19 nt, Homo sapiens
  misc_RNA (1)...(19): siRNA sense strand
ccaagaaggaguuccaaau

SEQ ID NO: 1530821 - RNA, 19 nt, Homo sapiens
  misc_RNA (1)...(19): siRNA sense strand
uuagaaagaccuccuacaa

SEQ ID NO: 1530822 - RNA, 19 nt, Homo sapiens
  misc_RNA (1)...(19): siRNA sense strand
cgucagguauggcauuuca

SEQ ID NO: 1530823 - RNA, 19 nt, Homo sapiens
  misc_RNA (1)...(19): siRNA sense strand
gacgacagauaaucaaacu

SEQ ID NO: 1530824 - RNA, 19 nt, Homo sapiens
  misc_RNA (1)...(19): siRNA sense strand
ccagaaaaguuaaaaguag

SEQ ID NO: 1530825 - RNA, 19 nt, Homo sapiens
  misc_RNA (1)...(19): siRNA sense strand
caaaugcuagugugauaau

SEQ ID NO: 1530826 - RNA, 19 nt, Homo sapiens
  misc_RNA (1)...(19): siRNA sense strand
auggacagcuggucagaaa

SEQ ID NO: 1530827 - RNA, 19 nt, Homo sapiens
  misc_RNA (1)...(19): siRNA sense strand
ugaaagaccacuagauuuu

SEQ ID NO: 1530828 - RNA, 19 nt, Homo sapiens
  misc_RNA (1)...(19): siRNA sense strand
uggaagaggagaacaaaga

SEQ ID NO: 1530829 - RNA, 19 nt, Homo sapiens
  misc_RNA (1)...(19): siRNA sense strand
gagaacaaagaacgugcua

SEQ ID NO: 1530830 - RNA, 19 nt, Homo sapiens
  misc_RNA (1)...(19): siRNA sense strand
gacagcuggucagaaauga

SEQ ID NO: 1530831 - RNA, 19 nt, Homo sapiens
  misc_RNA (1)...(19): siRNA sense strand
cagcuggucagaaaugauu

SEQ ID NO: 1530832 - RNA, 19 nt, Homo sapiens
  misc_RNA (1)...(19): siRNA sense strand
aaagagagcggucuaugag

SEQ ID NO: 1530833 - RNA, 19 nt, Homo sapiens
  misc_RNA (1)...(19): siRNA sense strand
gauacaaccauugaaggaa

SEQ ID NO: 1530834 - RNA, 19 nt, Homo sapiens
  misc_RNA (1)...(19): siRNA sense strand
ucagguauggcauuucaaa

SEQ ID NO: 1530835 - RNA, 19 nt, Homo sapiens
  misc_RNA (1)...(19): siRNA sense strand
caacgucagguauggcauu

SEQ ID NO: 1530836 - RNA, 19 nt, Homo sapiens
  misc_RNA (1)...(19): siRNA sense strand
gagagcggucuaugaguga

SEQ ID NO: 1530837 - RNA, 19 nt, Homo sapiens
  misc_RNA (1)...(19): siRNA sense strand
ccgagcaguuggcagacua

SEQ ID NO: 1530838 - RNA, 19 nt, Homo sapiens
  misc_RNA (1)...(19): siRNA sense strand
ugagauggcagaaauuagu

SEQ ID NO: 1530839 - RNA, 19 nt, Homo sapiens
  misc_RNA (1)...(19): siRNA sense strand
cuaagacgacagauaauca

SEQ ID NO: 1530840 - RNA, 19 nt, Homo sapiens
  misc_RNA (1)...(19): siRNA sense strand
ggauuguuguagcaggaaa

SEQ ID NO: 1530841 - RNA, 19 nt, Homo sapiens
  misc_RNA (1)...(19): siRNA sense strand
aagaaggaguuccaaaugc

SEQ ID NO: 1530842 - RNA, 19 nt, Homo sapiens
  misc_RNA (1)...(19): siRNA sense strand
agagaaauggucauguauu

SEQ ID NO: 1530843 - RNA, 19 nt, Homo sapiens
  misc_RNA (1)...(19): siRNA sense strand
ugaagaaauccgagcaguu

SEQ ID NO: 1530844 - RNA, 19 nt, Homo sapiens
  misc_RNA (1)...(19): siRNA sense strand
gcagaucuugaccuuauuc

SEQ ID NO: 1530845 - RNA, 19 nt, Homo sapiens
  misc_RNA (1)...(19): siRNA sense strand
caggaaauaaugaagaugu

SEQ ID NO: 1530846 - RNA, 19 nt, Homo sapiens
  misc_RNA (1)...(19): siRNA sense strand
ccaaaugcuagugugauaa

SEQ ID NO: 1530847 - RNA, 19 nt, Homo sapiens
  misc_RNA (1)...(19): siRNA sense strand
ggugagcagggcagcauuu

SEQ ID NO: 1530848 - RNA, 19 nt, Homo sapiens
  misc_RNA (1)...(19): siRNA sense strand
gaauucaguacgaaaugga

SEQ ID NO: 1530849 - RNA, 19 nt, Homo sapiens
  misc_RNA (1)...(19): siRNA sense strand
cuacaaccccucaaaauga

SEQ ID NO: 1530850 - RNA, 19 nt, Homo sapiens
  misc_RNA (1)...(19): siRNA sense strand
uaagacgacagauaaucaa

SEQ ID NO: 1530851 - RNA, 19 nt, Homo sapiens
  misc_RNA (1)...(19): siRNA sense strand
cgaauucaguacgaaaugg

SEQ ID NO: 1530852 - RNA, 19 nt, Homo sapiens
  misc_RNA (1)...(19): siRNA sense strand
uggcagaaauuagucgaau

SEQ ID NO: 1530853 - RNA, 19 nt, Homo sapiens
  misc_RNA (1)...(19): siRNA sense strand
agaaggaguuccaaaugcu

SEQ ID NO: 1530854 - RNA, 19 nt, Homo sapiens
  misc_RNA (1)...(19): siRNA sense strand
uaauagcuggcucugguuu

SEQ ID NO: 1530855 - RNA, 19 nt, Homo sapiens
  misc_RNA (1)...(19): siRNA sense strand
aguacgaaauggaauauac

SEQ ID NO: 1530856 - RNA, 19 nt, Homo sapiens
  misc_RNA (1)...(19): siRNA sense strand
gagggucccagaaaaguua

SEQ ID NO: 1530857 - RNA, 19 nt, Homo sapiens
  misc_RNA (1)...(19): siRNA sense strand
ccacuucuaauccucauca

SEQ ID NO: 1530858 - RNA, 19 nt, Homo sapiens
  misc_RNA (1)...(19): siRNA sense strand
uagcaggaaauaaugaaga

SEQ ID NO: 1530859 - RNA, 19 nt, Homo sapiens
  misc_RNA (1)...(19): siRNA sense strand
gcuuucuggcugcuuaaua

SEQ ID NO: 1530860 - RNA, 19 nt, Homo sapiens
  misc_RNA (1)...(19): siRNA sense strand
acaaggauuccaagaagga

SEQ ID NO: 1530861 - RNA, 19 nt, Homo sapiens
  misc_RNA (1)...(19): siRNA sense strand
ucgcuuauccagucuucua

SEQ ID NO: 1530862 - RNA, 19 nt, Homo sapiens
  misc_RNA (1)...(19): siRNA sense strand
gcgaaugagggucccagaa

SEQ ID NO: 1530863 - RNA, 19 nt, Homo sapiens
  misc_RNA (1)...(19): siRNA sense strand
caauuacuguagcuuucug

SEQ ID NO: 1530864 - RNA, 19 nt, Homo sapiens
  misc_RNA (1)...(19): siRNA sense strand
uguuguagaugcagcuuca

SEQ ID NO: 1530865 - RNA, 19 nt, Homo sapiens
  misc_RNA (1)...(19): siRNA sense strand
gaagaggagaacaaagaac

SEQ ID NO: 1530866 - RNA, 19 nt, Homo sapiens
  misc_RNA (1)...(19): siRNA sense strand
gcaaguuccggagaggauu

SEQ ID NO: 1530867 - RNA, 19 nt, Homo sapiens
  misc_RNA (1)...(19): siRNA sense strand
gauuuagaaagaccuccua

SEQ ID NO: 1530868 - RNA, 19 nt, Homo sapiens
  misc_RNA (1)...(19): siRNA sense strand
cuuucuggcugcuuaauag

SEQ ID NO: 1530869 - RNA, 19 nt, Homo sapiens
  misc_RNA (1)...(19): siRNA sense strand
gaaaaugcuguucgccaaa

SEQ ID NO: 1530870 - RNA, 19 nt, Homo sapiens
  misc_RNA (1)...(19): siRNA sense strand
uagaaagaccuccuacaac

SEQ ID NO: 1530871 - RNA, 19 nt, Homo sapiens
  misc_RNA (1)...(19): siRNA sense strand
caaguuccggagaggauug

SEQ ID NO: 1530872 - RNA, 19 nt, Homo sapiens
  misc_RNA (1)...(19): siRNA sense strand
guacgaaauggaauauacu

SEQ ID NO: 1530873 - RNA, 19 nt, Homo sapiens
  misc_RNA (1)...(19): siRNA sense strand
ccacuagauuuucuggauu

SEQ ID NO: 1530874 - RNA, 19 nt, Homo sapiens
  misc_RNA (1)...(19): siRNA sense strand
gagcagggcagcauuuccu

SEQ ID NO: 1530875 - RNA, 19 nt, Homo sapiens
  misc_RNA (1)...(19): siRNA sense strand
agauacaaccauugaagga

SEQ ID NO: 1530876 - RNA, 19 nt, Homo sapiens
  misc_RNA (1)...(19): siRNA sense strand
ucccacugcugcugagaug

SEQ ID NO: 1530877 - RNA, 19 nt, Homo sapiens
  misc_RNA (1)...(19): siRNA sense strand
cuagugugauaaugcaagu

SEQ ID NO: 1530878 - RNA, 19 nt, Homo sapiens
  misc_RNA (1)...(19): siRNA sense strand
gagauggcagaaauuaguc

SEQ ID NO: 1530879 - RNA, 19 nt, Homo sapiens
  misc_RNA (1)...(19): siRNA sense strand
uugaaggaacgucagauga

SEQ ID NO: 1530880 - RNA, 19 nt, Homo sapiens
  misc_RNA (1)...(19): siRNA sense strand
ugaccuggaacaaggauuc

SEQ ID NO: 1530881 - RNA, 19 nt, Homo sapiens
  misc_RNA (1)...(19): siRNA sense strand
uuagucgaauucaguacga

SEQ ID NO: 1530882 - RNA, 19 nt, Homo sapiens
  misc_RNA (1)...(19): siRNA sense strand
aaaaugcuguucgccaaaa

SEQ ID NO: 1530883 - RNA, 19 nt, Homo sapiens
  misc_RNA (1)...(19): siRNA sense strand
auacugaaggcauuaguca

SEQ ID NO: 1530884 - RNA, 19 nt, Homo sapiens
  misc_RNA (1)...(19): siRNA sense strand
gcacugauaucacguggau

SEQ ID NO: 1530885 - RNA, 19 nt, Homo sapiens
  misc_RNA (1)...(19): siRNA sense strand
gcccagcccugcuuuauca

SEQ ID NO: 1530886 - RNA, 19 nt, Homo sapiens
  misc_RNA (1)...(19): siRNA sense strand
gaaugaggauugucugaac

SEQ ID NO: 1530887 - RNA, 19 nt, Homo sapiens
  misc_RNA (1)...(19): siRNA sense strand
ccugggaccucgucuacua

SEQ ID NO: 1530888 - RNA, 19 nt, Homo sapiens
  misc_RNA (1)...(19): siRNA sense strand
gcagugggauggcccuuca

SEQ ID NO: 1530889 - RNA, 19 nt, Homo sapiens
  misc_RNA (1)...(19): siRNA sense strand
caacuuggauccggagaau

SEQ ID NO: 1530890 - RNA, 19 nt, Homo sapiens
  misc_RNA (1)...(19): siRNA sense strand
gcagacaauuccacacaca

SEQ ID NO: 1530891 - RNA, 19 nt, Homo sapiens
  misc_RNA (1)...(19): siRNA sense strand
cuacacaaccucacugaug

SEQ ID NO: 1530892 - RNA, 19 nt, Homo sapiens
  misc_RNA (1)...(19): siRNA sense strand
ggacagcaugggccucuga

SEQ ID NO: 1530893 - RNA, 19 nt, Homo sapiens
  misc_RNA (1)...(19): siRNA sense strand
agcaggagcagaaccauua

SEQ ID NO: 1530894 - RNA, 19 nt, Homo sapiens
  misc_RNA (1)...(19): siRNA sense strand
ggugcugccuucucugaug

SEQ ID NO: 1530895 - RNA, 19 nt, Homo sapiens
  misc_RNA (1)...(19): siRNA sense strand
ccacgaacugggugacuuu

SEQ ID NO: 1530896 - RNA, 19 nt, Homo sapiens
  misc_RNA (1)...(19): siRNA sense strand
aaacgaaggaaucucgaaa

SEQ ID NO: 1530897 - RNA, 19 nt, Homo sapiens
  misc_RNA (1)...(19): siRNA sense strand
cauaggugcugccuucucu

SEQ ID NO: 1530898 - RNA, 19 nt, Homo sapiens
  misc_RNA (1)...(19): siRNA sense strand
gcuaccgcaugcacaagaa

SEQ ID NO: 1530899 - RNA, 19 nt, Homo sapiens
  misc_RNA (1)...(19): siRNA sense strand
gagcaggagcagaaccauu

SEQ ID NO: 1530900 - RNA, 19 nt, Homo sapiens
  misc_RNA (1)...(19): siRNA sense strand
gagauggucuacacaaccu

SEQ ID NO: 1530901 - RNA, 19 nt, Homo sapiens
  misc_RNA (1)...(19): siRNA sense strand
uggcugaccaccugaauga

SEQ ID NO: 1530902 - RNA, 19 nt, Homo sapiens
  misc_RNA (1)...(19): siRNA sense strand
ucuacuaucugcccugcuu

SEQ ID NO: 1530903 - RNA, 19 nt, Homo sapiens
  misc_RNA (1)...(19): siRNA sense strand
acgaaggaaucucgaaaca

SEQ ID NO: 1530904 - RNA, 19 nt, Homo sapiens
  misc_RNA (1)...(19): siRNA sense strand
ccacacacaggccacagaa

SEQ ID NO: 1530905 - RNA, 19 nt, Homo sapiens
  misc_RNA (1)...(19): siRNA sense strand
ucucgaaacacgcaacuug

SEQ ID NO: 1530906 - RNA, 19 nt, Homo sapiens
  misc_RNA (1)...(19): siRNA sense strand
gcaccaaggccacagucau

SEQ ID NO: 1530907 - RNA, 19 nt, Homo sapiens
  misc_RNA (1)...(19): siRNA sense strand
gggagauggucuacacaac

SEQ ID NO: 1530908 - RNA, 19 nt, Homo sapiens
  misc_RNA (1)...(19): siRNA sense strand
cggccucaguaccaccuua

SEQ ID NO: 1530909 - RNA, 19 nt, Homo sapiens
  misc_RNA (1)...(19): siRNA sense strand
caccaaggccacagucaug

SEQ ID NO: 1530910 - RNA, 19 nt, Homo sapiens
  misc_RNA (1)...(19): siRNA sense strand
ccaccugaaugaggauugu

SEQ ID NO: 1530911 - RNA, 19 nt, Homo sapiens
  misc_RNA (1)...(19): siRNA sense strand
agucagggcuguccuuucg

SEQ ID NO: 1530912 - RNA, 19 nt, Homo sapiens
  misc_RNA (1)...(19): siRNA sense strand
gcaacuuggauccggagaa

SEQ ID NO: 1530913 - RNA, 19 nt, Homo sapiens
  misc_RNA (1)...(19): siRNA sense strand
acagaacccugagcugagu

SEQ ID NO: 1530914 - RNA, 19 nt, Homo sapiens
  misc_RNA (1)...(19): siRNA sense strand
ugaaugaggauugucugaa

SEQ ID NO: 1530915 - RNA, 19 nt, Homo sapiens
  misc_RNA (1)...(19): siRNA sense strand
cgaaacacgcaacuuggau

SEQ ID NO: 1530916 - RNA, 19 nt, Homo sapiens
  misc_RNA (1)...(19): siRNA sense strand
cagcccugcuuuaucagau

SEQ ID NO: 1530917 - RNA, 19 nt, Homo sapiens
  misc_RNA (1)...(19): siRNA sense strand
gcggugggcacucuuugug

SEQ ID NO: 1530918 - RNA, 19 nt, Homo sapiens
  misc_RNA (1)...(19): siRNA sense strand
ggccucaugcuugccauaa

SEQ ID NO: 1530919 - RNA, 19 nt, Homo sapiens
  misc_RNA (1)...(19): siRNA sense strand
gaaauggaaucacacuuca

SEQ ID NO: 1530920 - RNA, 19 nt, Homo sapiens
  misc_RNA (1)...(19): siRNA sense strand
ggaaucacacuucaaauga

SEQ ID NO: 1530921 - RNA, 19 nt, Homo sapiens
  misc_RNA (1)...(19): siRNA sense strand
auacuugggucuaugaaua

SEQ ID NO: 1530922 - RNA, 19 nt, Homo sapiens
  misc_RNA (1)...(19): siRNA sense strand
cuucuugccuguacagaua

SEQ ID NO: 1530923 - RNA, 19 nt, Homo sapiens
  misc_RNA (1)...(19): siRNA sense strand
caagauggcguacaacuuc

SEQ ID NO: 1530924 - RNA, 19 nt, Homo sapiens
  misc_RNA (1)...(19): siRNA sense strand
gaggagaguguuugggaua

SEQ ID NO: 1530925 - RNA, 19 nt, Homo sapiens
  misc_RNA (1)...(19): siRNA sense strand
acaagccucuuucuccuuu

SEQ ID NO: 1530926 - RNA, 19 nt, Homo sapiens
  misc_RNA (1)...(19): siRNA sense strand
cuagggcuauugaccauuu

SEQ ID NO: 1530927 - RNA, 19 nt, Homo sapiens
  misc_RNA (1)...(19): siRNA sense strand
ggagaguguuugggauauu

SEQ ID NO: 1530928 - RNA, 19 nt, Homo sapiens
  misc_RNA (1)...(19): siRNA sense strand
auauuucucuugugccuua

SEQ ID NO: 1530929 - RNA, 19 nt, Homo sapiens
  misc_RNA (1)...(19): siRNA sense strand
ggcguguucugaaggcuua

SEQ ID NO: 1530930 - RNA, 19 nt, Homo sapiens
  misc_RNA (1)...(19): siRNA sense strand
acauuuaacuguagugauc

SEQ ID NO: 1530931 - RNA, 19 nt, Homo sapiens
  misc_RNA (1)...(19): siRNA sense strand
ucuaucauaugcacucaaa

SEQ ID NO: 1530932 - RNA, 19 nt, Homo sapiens
  misc_RNA (1)...(19): siRNA sense strand
gagaguguuugggauauuc

SEQ ID NO: 1530933 - RNA, 19 nt, Homo sapiens
  misc_RNA (1)...(19): siRNA sense strand
gauguggugugcaaagcuu

SEQ ID NO: 1530934 - RNA, 19 nt, Homo sapiens
  misc_RNA (1)...(19): siRNA sense strand
uauccuauccgcaugagua

SEQ ID NO: 1530935 - RNA, 19 nt, Homo sapiens
  misc_RNA (1)...(19): siRNA sense strand
caacacauuuaacuguagu

SEQ ID NO: 1530936 - RNA, 19 nt, Homo sapiens
  misc_RNA (1)...(19): siRNA sense strand
guacagauacuugggucua

SEQ ID NO: 1530937 - RNA, 19 nt, Homo sapiens
  misc_RNA (1)...(19): siRNA sense strand
ucagccagcucucccuuau

SEQ ID NO: 1530938 - RNA, 19 nt, Homo sapiens
  misc_RNA (1)...(19): siRNA sense strand
guggguaacucggccauga

SEQ ID NO: 1530939 - RNA, 19 nt, Homo sapiens
  misc_RNA (1)...(19): siRNA sense strand
gaccauggcguguucugaa

SEQ ID NO: 1530940 - RNA, 19 nt, Homo sapiens
  misc_RNA (1)...(19): siRNA sense strand
ccagccauguugcuucuug

SEQ ID NO: 1530941 - RNA, 19 nt, Homo sapiens
  misc_RNA (1)...(19): siRNA sense strand
ucuacagccugaggaauaa

SEQ ID NO: 1530942 - RNA, 19 nt, Homo sapiens
  misc_RNA (1)...(19): siRNA sense strand
acacaccgauguacuuucu

SEQ ID NO: 1530943 - RNA, 19 nt, Homo sapiens
  misc_RNA (1)...(19): siRNA sense strand
ccaaaucaaacuggaauau

SEQ ID NO: 1530944 - RNA, 19 nt, Homo sapiens
  misc_RNA (1)...(19): siRNA sense strand
gcaggucuagggcuauuga

SEQ ID NO: 1530945 - RNA, 19 nt, Homo sapiens
  misc_RNA (1)...(19): siRNA sense strand
ccgauguacuuucuucuca

SEQ ID NO: 1530946 - RNA, 19 nt, Homo sapiens
  misc_RNA (1)...(19): siRNA sense strand
guaacucggccaugauuca

SEQ ID NO: 1530947 - RNA, 19 nt, Homo sapiens
  misc_RNA (1)...(19): siRNA sense strand
guaaguacaagccucuuuc

SEQ ID NO: 1530948 - RNA, 19 nt, Homo sapiens
  misc_RNA (1)...(19): siRNA sense strand
agaaauggaaucacacuuc

SEQ ID NO: 1530949 - RNA, 19 nt, Homo sapiens
  misc_RNA (1)...(19): siRNA sense strand
ccacacaccgauguacuuu

SEQ ID NO: 1530950 - RNA, 19 nt, Homo sapiens
  misc_RNA (1)...(19): siRNA sense strand
caccauuucaacacauuua

SEQ ID NO: 1530951 - RNA, 19 nt, Homo sapiens
  misc_RNA (1)...(19): siRNA sense strand
acaccgauguacuuucuuc

SEQ ID NO: 1530952 - RNA, 19 nt, Homo sapiens
  misc_RNA (1)...(19): siRNA sense strand
ucaacacauuuaacuguag

SEQ ID NO: 1530953 - RNA, 19 nt, Homo sapiens
  misc_RNA (1)...(19): siRNA sense strand
ggccuacgaccguuauuug

SEQ ID NO: 1530954 - RNA, 19 nt, Homo sapiens
  misc_RNA (1)...(19): siRNA sense strand
uuauggaccugauguacau

SEQ ID NO: 1530955 - RNA, 19 nt, Homo sapiens
  misc_RNA (1)...(19): siRNA sense strand
ucauuggcaucacuucuuc

SEQ ID NO: 1530956 - RNA, 19 nt, Homo sapiens
  misc_RNA (1)...(19): siRNA sense strand
uguuugggauauucucuuu

SEQ ID NO: 1530957 - RNA, 19 nt, Homo sapiens
  misc_RNA (1)...(19): siRNA sense strand
uggaaucacacuucaaaug

SEQ ID NO: 1530958 - RNA, 19 nt, Homo sapiens
  misc_RNA (1)...(19): siRNA sense strand
aauggaaucacacuucaaa

SEQ ID NO: 1530959 - RNA, 19 nt, Homo sapiens
  misc_RNA (1)...(19): siRNA sense strand
ucaccaccauuucaacaca

SEQ ID NO: 1530960 - RNA, 19 nt, Homo sapiens
  misc_RNA (1)...(19): siRNA sense strand
ccuauuugcugucuaucau

SEQ ID NO: 1530961 - RNA, 19 nt, Homo sapiens
  misc_RNA (1)...(19): siRNA sense strand
ccaagauggcguacaacuu

SEQ ID NO: 1530962 - RNA, 19 nt, Homo sapiens
  misc_RNA (1)...(19): siRNA sense strand
cugccacucucucuauuau

SEQ ID NO: 1530963 - RNA, 19 nt, Homo sapiens
  misc_RNA (1)...(19): siRNA sense strand
caaacuggaauauuucucu

SEQ ID NO: 1530964 - RNA, 19 nt, Homo sapiens
  misc_RNA (1)...(19): siRNA sense strand
gacaagauccuggcagucu

SEQ ID NO: 1530965 - RNA, 19 nt, Homo sapiens
  misc_RNA (1)...(19): siRNA sense strand
ggucuaugaauauaugguu

SEQ ID NO: 1530966 - RNA, 19 nt, Homo sapiens
  misc_RNA (1)...(19): siRNA sense strand
caucugccacucucucuau

SEQ ID NO: 1530967 - RNA, 19 nt, Homo sapiens
  misc_RNA (1)...(19): siRNA sense strand
gcuaugaggagaguguuug

SEQ ID NO: 1530968 - RNA, 19 nt, Homo sapiens
  misc_RNA (1)...(19): siRNA sense strand
gauccuggcagucuucuac

SEQ ID NO: 1530969 - RNA, 19 nt, Homo sapiens
  misc_RNA (1)...(19): siRNA sense strand
ggguaacucggccaugauu

SEQ ID NO: 1530970 - RNA, 19 nt, Homo sapiens
  misc_RNA (1)...(19): siRNA sense strand
ccugggauguggugugcaa

SEQ ID NO: 1530971 - RNA, 19 nt, Homo sapiens
  misc_RNA (1)...(19): siRNA sense strand
ucaaucccauuaucuacag

SEQ ID NO: 1530972 - RNA, 19 nt, Homo sapiens
  misc_RNA (1)...(19): siRNA sense strand
ggagaaauggaaucacacu

SEQ ID NO: 1530973 - RNA, 19 nt, Homo sapiens
  misc_RNA (1)...(19): siRNA sense strand
ugaccuccauggccuacga

SEQ ID NO: 1530974 - RNA, 19 nt, Homo sapiens
  misc_RNA (1)...(19): siRNA sense strand
cagauacuugggucuauga

SEQ ID NO: 1530975 - RNA, 19 nt, Homo sapiens
  misc_RNA (1)...(19): siRNA sense strand
gagaaauggaaucacacuu

SEQ ID NO: 1530976 - RNA, 19 nt, Homo sapiens
  misc_RNA (1)...(19): siRNA sense strand
aaaaugaugugugugaaga

SEQ ID NO: 1530977 - RNA, 19 nt, Homo sapiens
  misc_RNA (1)...(19): siRNA sense strand
ugaguaaaaugaugugugu

SEQ ID NO: 1530978 - RNA, 19 nt, Homo sapiens
  misc_RNA (1)...(19): siRNA sense strand
ugaugugugugaagaugau

SEQ ID NO: 1530979 - RNA, 19 nt, Homo sapiens
  misc_RNA (1)...(19): siRNA sense strand
acagauacuugggucuaug

SEQ ID NO: 1530980 - RNA, 19 nt, Homo sapiens
  misc_RNA (1)...(19): siRNA sense strand
acuggaauauuucucuugu

SEQ ID NO: 1530981 - RNA, 19 nt, Homo sapiens
  misc_RNA (1)...(19): siRNA sense strand
gccacucucucuauuaucc

SEQ ID NO: 1530982 - RNA, 19 nt, Homo sapiens
  misc_RNA (1)...(19): siRNA sense strand
cccaugcucaaucccauua

SEQ ID NO: 1530983 - RNA, 19 nt, Homo sapiens
  misc_RNA (1)...(19): siRNA sense strand
aguccuauuugcugucuau

SEQ ID NO: 1530984 - RNA, 19 nt, Homo sapiens
  misc_RNA (1)...(19): siRNA sense strand
agucuuugcccuucauauu

SEQ ID NO: 1530985 - RNA, 19 nt, Homo sapiens
  misc_RNA (1)...(19): siRNA sense strand
agccagcucucccuuaugg

SEQ ID NO: 1530986 - RNA, 19 nt, Homo sapiens
  misc_RNA (1)...(19): siRNA sense strand
aaugaugugugugaagaug

SEQ ID NO: 1530987 - RNA, 19 nt, Homo sapiens
  misc_RNA (1)...(19): siRNA sense strand
guaaaaugaugugugugaa

SEQ ID NO: 1530988 - RNA, 19 nt, Homo sapiens
  misc_RNA (1)...(19): siRNA sense strand
gcucaaucccauuaucuac

SEQ ID NO: 1530989 - RNA, 19 nt, Homo sapiens
  misc_RNA (1)...(19): siRNA sense strand
uaucauaugcacucaaagg

SEQ ID NO: 1530990 - RNA, 19 nt, Homo sapiens
  misc_RNA (1)...(19): siRNA sense strand
gccuuaucauccucauauu

SEQ ID NO: 1530991 - RNA, 19 nt, Homo sapiens
  misc_RNA (1)...(19): siRNA sense strand
uacagauacuugggucuau

SEQ ID NO: 1530992 - RNA, 19 nt, Homo sapiens
  misc_RNA (1)...(19): siRNA sense strand
caugcucaaucccauuauc

SEQ ID NO: 1530993 - RNA, 19 nt, Homo sapiens
  misc_RNA (1)...(19): siRNA sense strand
gcucaccagcugaagacaa

SEQ ID NO: 1530994 - RNA, 19 nt, Homo sapiens
  misc_RNA (1)...(19): siRNA sense strand
ugccuuaucauccucauau

SEQ ID NO: 1530995 - RNA, 19 nt, Homo sapiens
  misc_RNA (1)...(19): siRNA sense strand
gauacuugggucuaugaau

SEQ ID NO: 1530996 - RNA, 19 nt, Homo sapiens
  misc_RNA (1)...(19): siRNA sense strand
acacagucuuugcccuuca

SEQ ID NO: 1530997 - RNA, 19 nt, Homo sapiens
  misc_RNA (1)...(19): siRNA sense strand
cgaugucccagccauguug

SEQ ID NO: 1530998 - RNA, 19 nt, Homo sapiens
  misc_RNA (1)...(19): siRNA sense strand
gcuauugaccauuucuucu

SEQ ID NO: 1530999 - RNA, 19 nt, Homo sapiens
  misc_RNA (1)...(19): siRNA sense strand
ggauauucucuuuccugaa

SEQ ID NO: 1531000 - RNA, 19 nt, Homo sapiens
  misc_RNA (1)...(19): siRNA sense strand
uugggucuaugaauauaug

SEQ ID NO: 1531001 - RNA, 19 nt, Homo sapiens
  misc_RNA (1)...(19): siRNA sense strand
ggccuucaccaccauuuca

SEQ ID NO: 1531002 - RNA, 19 nt, Homo sapiens
  misc_RNA (1)...(19): siRNA sense strand
gcccuggucucaucuggau

SEQ ID NO: 1531003 - RNA, 19 nt, Homo sapiens
  misc_RNA (1)...(19): siRNA sense strand
ccaucugucugucacugaa

SEQ ID NO: 1531004 - RNA, 19 nt, Homo sapiens
  misc_RNA (1)...(19): siRNA sense strand
gggcagcuguggugaucag

SEQ ID NO: 1531005 - RNA, 19 nt, Homo sapiens
  misc_RNA (1)...(19): siRNA sense strand
ugugccagauccaccugua

SEQ ID NO: 1531006 - RNA, 19 nt, Homo sapiens
  misc_RNA (1)...(19): siRNA sense strand
ggugcuacgucgacuacag

SEQ ID NO: 1531007 - RNA, 19 nt, Homo sapiens
  misc_RNA (1)...(19): siRNA sense strand
cacagcgaccagagccuua

SEQ ID NO: 1531008 - RNA, 19 nt, Homo sapiens
  misc_RNA (1)...(19): siRNA sense strand
agacagagauggugauuug

SEQ ID NO: 1531009 - RNA, 19 nt, Homo sapiens
  misc_RNA (1)...(19): siRNA sense strand
ggucagcacuagaacagua

SEQ ID NO: 1531010 - RNA, 19 nt, Homo sapiens
  misc_RNA (1)...(19): siRNA sense strand
gggaagauauucacgacaa

SEQ ID NO: 1531011 - RNA, 19 nt, Homo sapiens
  misc_RNA (1)...(19): siRNA sense strand
gaccuggaaugguaacuuu

SEQ ID NO: 1531012 - RNA, 19 nt, Homo sapiens
  misc_RNA (1)...(19): siRNA sense strand
gucaggaacuggucacuuu

SEQ ID NO: 1531013 - RNA, 19 nt, Homo sapiens
  misc_RNA (1)...(19): siRNA sense strand
gcgccgaccuggaauggua

SEQ ID NO: 1531014 - RNA, 19 nt, Homo sapiens
  misc_RNA (1)...(19): siRNA sense strand
gaacuggucacuuugaaug

SEQ ID NO: 1531015 - RNA, 19 nt, Homo sapiens
  misc_RNA (1)...(19): siRNA sense strand
cagagauggugauuuguuu

SEQ ID NO: 1531016 - RNA, 19 nt, Homo sapiens
  misc_RNA (1)...(19): siRNA sense strand
ggauuacaguguuuacaga

SEQ ID NO: 1531017 - RNA, 19 nt, Homo sapiens
  misc_RNA (1)...(19): siRNA sense strand
gauggugauuuguuuaguu

SEQ ID NO: 1531018 - RNA, 19 nt, Homo sapiens
  misc_RNA (1)...(19): siRNA sense strand
ggagguacauuuccuaagc

SEQ ID NO: 1531019 - RNA, 19 nt, Homo sapiens
  misc_RNA (1)...(19): siRNA sense strand
ggagucagguauguuucua

SEQ ID NO: 1531020 - RNA, 19 nt, Homo sapiens
  misc_RNA (1)...(19): siRNA sense strand
gaagugcucaucacgaaug

SEQ ID NO: 1531021 - RNA, 19 nt, Homo sapiens
  misc_RNA (1)...(19): siRNA sense strand
gaugguugguggccagauu

SEQ ID NO: 1531022 - RNA, 19 nt, Homo sapiens
  misc_RNA (1)...(19): siRNA sense strand
agucagguauguuucuaua

SEQ ID NO: 1531023 - RNA, 19 nt, Homo sapiens
  misc_RNA (1)...(19): siRNA sense strand
gcagagaccaagaauucaa

SEQ ID NO: 1531024 - RNA, 19 nt, Homo sapiens
  misc_RNA (1)...(19): siRNA sense strand
gcuuacugauugacacuuu

SEQ ID NO: 1531025 - RNA, 19 nt, Homo sapiens
  misc_RNA (1)...(19): siRNA sense strand
gauauucacgacaagguuu

SEQ ID NO: 1531026 - RNA, 19 nt, Homo sapiens
  misc_RNA (1)...(19): siRNA sense strand
ugaaugcuauagcuuugaa

SEQ ID NO: 1531027 - RNA, 19 nt, Homo sapiens
  misc_RNA (1)...(19): siRNA sense strand
agacaaaacugaaugcuau

SEQ ID NO: 1531028 - RNA, 19 nt, Homo sapiens
  misc_RNA (1)...(19): siRNA sense strand
ggugauuuguuuaguuuca

SEQ ID NO: 1531029 - RNA, 19 nt, Homo sapiens
  misc_RNA (1)...(19): siRNA sense strand
guccucggcuuacugauug

SEQ ID NO: 1531030 - RNA, 19 nt, Homo sapiens
  misc_RNA (1)...(19): siRNA sense strand
aaggaaggcuuucauuugg

SEQ ID NO: 1531031 - RNA, 19 nt, Homo sapiens
  misc_RNA (1)...(19): siRNA sense strand
uggcagagaccaagaauuc

SEQ ID NO: 1531032 - RNA, 19 nt, Homo sapiens
  misc_RNA (1)...(19): siRNA sense strand
gcacuagaacaguaucuuc

SEQ ID NO: 1531033 - RNA, 19 nt, Homo sapiens
  misc_RNA (1)...(19): siRNA sense strand
gaaugugggagggaagaua

SEQ ID NO: 1531034 - RNA, 19 nt, Homo sapiens
  misc_RNA (1)...(19): siRNA sense strand
cugaagugcucaucacgaa

SEQ ID NO: 1531035 - RNA, 19 nt, Homo sapiens
  misc_RNA (1)...(19): siRNA sense strand
ggaagauauucacgacaag

SEQ ID NO: 1531036 - RNA, 19 nt, Homo sapiens
  misc_RNA (1)...(19): siRNA sense strand
aaacuggagucagguaugu

SEQ ID NO: 1531037 - RNA, 19 nt, Homo sapiens
  misc_RNA (1)...(19): siRNA sense strand
ugacagcacuacugauaac

SEQ ID NO: 1531038 - RNA, 19 nt, Homo sapiens
  misc_RNA (1)...(19): siRNA sense strand
ucugacagcacuacugaua

SEQ ID NO: 1531039 - RNA, 19 nt, Homo sapiens
  misc_RNA (1)...(19): siRNA sense strand
gaacucaccagcuuuuauu

SEQ ID NO: 1531040 - RNA, 19 nt, Homo sapiens
  misc_RNA (1)...(19): siRNA sense strand
uaacagggaggauuacagu

SEQ ID NO: 1531041 - RNA, 19 nt, Homo sapiens
  misc_RNA (1)...(19): siRNA sense strand
cagcacuacugauaaccaa

SEQ ID NO: 1531042 - RNA, 19 nt, Homo sapiens
  misc_RNA (1)...(19): siRNA sense strand
cagggaggauuacaguguu

SEQ ID NO: 1531043 - RNA, 19 nt, Homo sapiens
  misc_RNA (1)...(19): siRNA sense strand
accagagacuaucaucaua

SEQ ID NO: 1531044 - RNA, 19 nt, Homo sapiens
  misc_RNA (1)...(19): siRNA sense strand
cagacuaucuuaggcuuca

SEQ ID NO: 1531045 - RNA, 19 nt, Homo sapiens
  misc_RNA (1)...(19): siRNA sense strand
gacaagguuuucuacgaua

SEQ ID NO: 1531046 - RNA, 19 nt, Homo sapiens
  misc_RNA (1)...(19): siRNA sense strand
gagauggugauuuguuuag

SEQ ID NO: 1531047 - RNA, 19 nt, Homo sapiens
  misc_RNA (1)...(19): siRNA sense strand
gauuacaguguuuacagaa

SEQ ID NO: 1531048 - RNA, 19 nt, Homo sapiens
  misc_RNA (1)...(19): siRNA sense strand
cuuacugauugacacuuua

SEQ ID NO: 1531049 - RNA, 19 nt, Homo sapiens
  misc_RNA (1)...(19): siRNA sense strand
guucugacagcacuacuga

SEQ ID NO: 1531050 - RNA, 19 nt, Homo sapiens
  misc_RNA (1)...(19): siRNA sense strand
agagauggugauuuguuua

SEQ ID NO: 1531051 - RNA, 19 nt, Homo sapiens
  misc_RNA (1)...(19): siRNA sense strand
gggaggauuacaguguuua

SEQ ID NO: 1531052 - RNA, 19 nt, Homo sapiens
  misc_RNA (1)...(19): siRNA sense strand
caaaacaauugagaugcua

SEQ ID NO: 1531053 - RNA, 19 nt, Homo sapiens
  misc_RNA (1)...(19): siRNA sense strand
acagagauggugauuuguu

SEQ ID NO: 1531054 - RNA, 19 nt, Homo sapiens
  misc_RNA (1)...(19): siRNA sense strand
ggaacuggucacuuugaau

SEQ ID NO: 1531055 - RNA, 19 nt, Homo sapiens
  misc_RNA (1)...(19): siRNA sense strand
agaccaagaauucaagaug

SEQ ID NO: 1531056 - RNA, 19 nt, Homo sapiens
  misc_RNA (1)...(19): siRNA sense strand
caucauaccagagcaaucu

SEQ ID NO: 1531057 - RNA, 19 nt, Homo sapiens
  misc_RNA (1)...(19): siRNA sense strand
gccggaacacucaagcuuu

SEQ ID NO: 1531058 - RNA, 19 nt, Homo sapiens
  misc_RNA (1)...(19): siRNA sense strand
gcaaaacaauugagaugcu

SEQ ID NO: 1531059 - RNA, 19 nt, Homo sapiens
  misc_RNA (1)...(19): siRNA sense strand
ucguuuggcacgcauguua

SEQ ID NO: 1531060 - RNA, 19 nt, Homo sapiens
  misc_RNA (1)...(19): siRNA sense strand
acugaaugcuauagcuuug

SEQ ID NO: 1531061 - RNA, 19 nt, Homo sapiens
  misc_RNA (1)...(19): siRNA sense strand
caaauguccucggcuuacu

SEQ ID NO: 1531062 - RNA, 19 nt, Homo sapiens
  misc_RNA (1)...(19): siRNA sense strand
caaacuggagucagguaug

SEQ ID NO: 1531063 - RNA, 19 nt, Homo sapiens
  misc_RNA (1)...(19): siRNA sense strand
gcacuacugauaaccaaac

SEQ ID NO: 1531064 - RNA, 19 nt, Homo sapiens
  misc_RNA (1)...(19): siRNA sense strand
uuucuacgauaaagcaguu

SEQ ID NO: 1531065 - RNA, 19 nt, Homo sapiens
  misc_RNA (1)...(19): siRNA sense strand
ucacgaaugaaacaccaaa

SEQ ID NO: 1531066 - RNA, 19 nt, Homo sapiens
  misc_RNA (1)...(19): siRNA sense strand
ccucagaugaccuuacuuc

SEQ ID NO: 1531067 - RNA, 19 nt, Homo sapiens
  misc_RNA (1)...(19): siRNA sense strand
cuucagcgccgaccuggaa

SEQ ID NO: 1531068 - RNA, 19 nt, Homo sapiens
  misc_RNA (1)...(19): siRNA sense strand
guagacagagauggugauu

SEQ ID NO: 1531069 - RNA, 19 nt, Homo sapiens
  misc_RNA (1)...(19): siRNA sense strand
aaacugaaugcuauagcuu

SEQ ID NO: 1531070 - RNA, 19 nt, Homo sapiens
  misc_RNA (1)...(19): siRNA sense strand
cgacaagguuuucuacgau

SEQ ID NO: 1531071 - RNA, 19 nt, Homo sapiens
  misc_RNA (1)...(19): siRNA sense strand
ucuaguugaucucuuaaac

SEQ ID NO: 1531072 - RNA, 19 nt, Homo sapiens
  misc_RNA (1)...(19): siRNA sense strand
uccacugccuccacaaaga

SEQ ID NO: 1531073 - RNA, 19 nt, Homo sapiens
  misc_RNA (1)...(19): siRNA sense strand
caggaacuggucacuuuga

SEQ ID NO: 1531074 - RNA, 19 nt, Homo sapiens
  misc_RNA (1)...(19): siRNA sense strand
uucucuaguugaucucuua

SEQ ID NO: 1531075 - RNA, 19 nt, Homo sapiens
  misc_RNA (1)...(19): siRNA sense strand
ccggaacacucaagcuuuu

SEQ ID NO: 1531076 - RNA, 19 nt, Homo sapiens
  misc_RNA (1)...(19): siRNA sense strand
cuuaaacccauaccugcua

SEQ ID NO: 1531077 - RNA, 19 nt, Homo sapiens
  misc_RNA (1)...(19): siRNA sense strand
guggagguacauuuccuaa

SEQ ID NO: 1531078 - RNA, 19 nt, Homo sapiens
  misc_RNA (1)...(19): siRNA sense strand
augcuaacagggaggauua

SEQ ID NO: 1531079 - RNA, 19 nt, Homo sapiens
  misc_RNA (1)...(19): siRNA sense strand
acagggaggauuacagugu

SEQ ID NO: 1531080 - RNA, 19 nt, Homo sapiens
  misc_RNA (1)...(19): siRNA sense strand
aggaacuggucacuuugaa

SEQ ID NO: 1531081 - RNA, 19 nt, Homo sapiens
  misc_RNA (1)...(19): siRNA sense strand
gaugcuaacagggaggauu

SEQ ID NO: 1531082 - RNA, 19 nt, Homo sapiens
  misc_RNA (1)...(19): siRNA sense strand
ccagagacuaucaucauac

SEQ ID NO: 1531083 - RNA, 19 nt, Homo sapiens
  misc_RNA (1)...(19): siRNA sense strand
ucagaugaccuuacuucca

SEQ ID NO: 1531084 - RNA, 19 nt, Homo sapiens
  misc_RNA (1)...(19): siRNA sense strand
agggaggauuacaguguuu

SEQ ID NO: 1531085 - RNA, 19 nt, Homo sapiens
  misc_RNA (1)...(19): siRNA sense strand
aacaaauguccucggcuua

SEQ ID NO: 1531086 - RNA, 19 nt, Homo sapiens
  misc_RNA (1)...(19): siRNA sense strand
gauggcagagaccaagaau

SEQ ID NO: 1531087 - RNA, 19 nt, Homo sapiens
  misc_RNA (1)...(19): siRNA sense strand
cauuuggucagcacuagaa

SEQ ID NO: 1531088 - RNA, 19 nt, Homo sapiens
  misc_RNA (1)...(19): siRNA sense strand
ccaagaauucaagaugguu

SEQ ID NO: 1531089 - RNA, 19 nt, Homo sapiens
  misc_RNA (1)...(19): siRNA sense strand
ccaaacuggagucagguau

SEQ ID NO: 1531090 - RNA, 19 nt, Homo sapiens
  misc_RNA (1)...(19): siRNA sense strand
gcaaaugcauuagauguuu

SEQ ID NO: 1531091 - RNA, 19 nt, Homo sapiens
  misc_RNA (1)...(19): siRNA sense strand
caagaaaggacaacuauaa

SEQ ID NO: 1531092 - RNA, 19 nt, Homo sapiens
  misc_RNA (1)...(19): siRNA sense strand
aguaucagcuuucauguua

SEQ ID NO: 1531093 - RNA, 19 nt, Homo sapiens
  misc_RNA (1)...(19): siRNA sense strand
uggcaaagcuggguuauuu

SEQ ID NO: 1531094 - RNA, 19 nt, Homo sapiens
  misc_RNA (1)...(19): siRNA sense strand
gcggaaauaucuaguauca

SEQ ID NO: 1531095 - RNA, 19 nt, Homo sapiens
  misc_RNA (1)...(19): siRNA sense strand
aaagggcuaugaacgauua

SEQ ID NO: 1531096 - RNA, 19 nt, Homo sapiens
  misc_RNA (1)...(19): siRNA sense strand
ugaaguagcugcauugaag

SEQ ID NO: 1531097 - RNA, 19 nt, Homo sapiens
  misc_RNA (1)...(19): siRNA sense strand
gcaaagaggcugacuuauc

SEQ ID NO: 1531098 - RNA, 19 nt, Homo sapiens
  misc_RNA (1)...(19): siRNA sense strand
gaaagcuucugcaguugaa

SEQ ID NO: 1531099 - RNA, 19 nt, Homo sapiens
  misc_RNA (1)...(19): siRNA sense strand
acucacagcuagucuauuu

SEQ ID NO: 1531100 - RNA, 19 nt, Homo sapiens
  misc_RNA (1)...(19): siRNA sense strand
uuacgaagcccaucuguuu

SEQ ID NO: 1531101 - RNA, 19 nt, Homo sapiens
  misc_RNA (1)...(19): siRNA sense strand
caaagaggcugacuuaucc

SEQ ID NO: 1531102 - RNA, 19 nt, Homo sapiens
  misc_RNA (1)...(19): siRNA sense strand
ugugaaagcuucugcaguu

SEQ ID NO: 1531103 - RNA, 19 nt, Homo sapiens
  misc_RNA (1)...(19): siRNA sense strand
caggaucacuucuguaugu

SEQ ID NO: 1531104 - RNA, 19 nt, Homo sapiens
  misc_RNA (1)...(19): siRNA sense strand
ccagugggauuacaaccua

SEQ ID NO: 1531105 - RNA, 19 nt, Homo sapiens
  misc_RNA (1)...(19): siRNA sense strand
caacuauaaugcagagaga

SEQ ID NO: 1531106 - RNA, 19 nt, Homo sapiens
  misc_RNA (1)...(19): siRNA sense strand
gccacacccuucagcuuua

SEQ ID NO: 1531107 - RNA, 19 nt, Homo sapiens
  misc_RNA (1)...(19): siRNA sense strand
aaagcuggguuauuucaaa

SEQ ID NO: 1531108 - RNA, 19 nt, Homo sapiens
  misc_RNA (1)...(19): siRNA sense strand
gaacucacagcuagucuau

SEQ ID NO: 1531109 - RNA, 19 nt, Homo sapiens
  misc_RNA (1)...(19): siRNA sense strand
gaaaggacaacuauaaugc

SEQ ID NO: 1531110 - RNA, 19 nt, Homo sapiens
  misc_RNA (1)...(19): siRNA sense strand
ggauguugaucagauguuu

SEQ ID NO: 1531111 - RNA, 19 nt, Homo sapiens
  misc_RNA (1)...(19): siRNA sense strand
cagacuaccucaccaagug

SEQ ID NO: 1531112 - RNA, 19 nt, Homo sapiens
  misc_RNA (1)...(19): siRNA sense strand
gcagauacaggaucacuuc

SEQ ID NO: 1531113 - RNA, 19 nt, Homo sapiens
  misc_RNA (1)...(19): siRNA sense strand
ugaguuggcuucagcuguu

SEQ ID NO: 1531114 - RNA, 19 nt, Homo sapiens
  misc_RNA (1)...(19): siRNA sense strand
gauagucugucucguuuac

SEQ ID NO: 1531115 - RNA, 19 nt, Homo sapiens
  misc_RNA (1)...(19): siRNA sense strand
gcaaagcuggguuauuuca

SEQ ID NO: 1531116 - RNA, 19 nt, Homo sapiens
  misc_RNA (1)...(19): siRNA sense strand
gugcggaaauaucuaguau

SEQ ID NO: 1531117 - RNA, 19 nt, Homo sapiens
  misc_RNA (1)...(19): siRNA sense strand
gcaggauguugaucagaug

SEQ ID NO: 1531118 - RNA, 19 nt, Homo sapiens
  misc_RNA (1)...(19): siRNA sense strand
cugcaaagaggcugacuua

SEQ ID NO: 1531119 - RNA, 19 nt, Homo sapiens
  misc_RNA (1)...(19): siRNA sense strand
caucaggaccucaguguga

SEQ ID NO: 1531120 - RNA, 19 nt, Homo sapiens
  misc_RNA (1)...(19): siRNA sense strand
ggacucaagcaacuauuau

SEQ ID NO: 1531121 - RNA, 19 nt, Homo sapiens
  misc_RNA (1)...(19): siRNA sense strand
gagagaagcaaauaucaag

SEQ ID NO: 1531122 - RNA, 19 nt, Homo sapiens
  misc_RNA (1)...(19): siRNA sense strand
gggacucaagcaacuauua

SEQ ID NO: 1531123 - RNA, 19 nt, Homo sapiens
  misc_RNA (1)...(19): siRNA sense strand
acacuuguauuguccaguu

SEQ ID NO: 1531124 - RNA, 19 nt, Homo sapiens
  misc_RNA (1)...(19): siRNA sense strand
cagcuggauuaacuaaauu

SEQ ID NO: 1531125 - RNA, 19 nt, Homo sapiens
  misc_RNA (1)...(19): siRNA sense strand
cagaguaaguccuguaaac

SEQ ID NO: 1531126 - RNA, 19 nt, Homo sapiens
  misc_RNA (1)...(19): siRNA sense strand
ggacaggaauuggaagaac

SEQ ID NO: 1531127 - RNA, 19 nt, Homo sapiens
  misc_RNA (1)...(19): siRNA sense strand
cugauagucugucucguuu

SEQ ID NO: 1531128 - RNA, 19 nt, Homo sapiens
  misc_RNA (1)...(19): siRNA sense strand
ccaggcaaaugcauuagau

SEQ ID NO: 1531129 - RNA, 19 nt, Homo sapiens
  misc_RNA (1)...(19): siRNA sense strand
gcugacuuauccuuguaua

SEQ ID NO: 1531130 - RNA, 19 nt, Homo sapiens
  misc_RNA (1)...(19): siRNA sense strand
ggaauuggaagaacucaca

SEQ ID NO: 1531131 - RNA, 19 nt, Homo sapiens
  misc_RNA (1)...(19): siRNA sense strand
caaaugcauuagauguuuc

SEQ ID NO: 1531132 - RNA, 19 nt, Homo sapiens
  misc_RNA (1)...(19): siRNA sense strand
cgauggcagugaugauauu

SEQ ID NO: 1531133 - RNA, 19 nt, Homo sapiens
  misc_RNA (1)...(19): siRNA sense strand
ggaaggaugagcccacaau

SEQ ID NO: 1531134 - RNA, 19 nt, Homo sapiens
  misc_RNA (1)...(19): siRNA sense strand
gaaaagggcuaugaacgau

SEQ ID NO: 1531135 - RNA, 19 nt, Homo sapiens
  misc_RNA (1)...(19): siRNA sense strand
acagcuggauuaacuaaau

SEQ ID NO: 1531136 - RNA, 19 nt, Homo sapiens
  misc_RNA (1)...(19): siRNA sense strand
gcauugaaccagugggauu

SEQ ID NO: 1531137 - RNA, 19 nt, Homo sapiens
  misc_RNA (1)...(19): siRNA sense strand
uuacagggugcuacuauaa

SEQ ID NO: 1531138 - RNA, 19 nt, Homo sapiens
  misc_RNA (1)...(19): siRNA sense strand
ggccacacccuucagcuuu

SEQ ID NO: 1531139 - RNA, 19 nt, Homo sapiens
  misc_RNA (1)...(19): siRNA sense strand
gaggcugacuuauccuugu

SEQ ID NO: 1531140 - RNA, 19 nt, Homo sapiens
  misc_RNA (1)...(19): siRNA sense strand
gcauugaagacacuuguau

SEQ ID NO: 1531141 - RNA, 19 nt, Homo sapiens
  misc_RNA (1)...(19): siRNA sense strand
ugcauuagauguuucugaa

SEQ ID NO: 1531142 - RNA, 19 nt, Homo sapiens
  misc_RNA (1)...(19): siRNA sense strand
ggaccuucuugguguguau

SEQ ID NO: 1531143 - RNA, 19 nt, Homo sapiens
  misc_RNA (1)...(19): siRNA sense strand
ucacagcuagucuauuuga

SEQ ID NO: 1531144 - RNA, 19 nt, Homo sapiens
  misc_RNA (1)...(19): siRNA sense strand
agucacagcuggauuaacu

SEQ ID NO: 1531145 - RNA, 19 nt, Homo sapiens
  misc_RNA (1)...(19): siRNA sense strand
uauccaggcaaaugcauua

SEQ ID NO: 1531146 - RNA, 19 nt, Homo sapiens
  misc_RNA (1)...(19): siRNA sense strand
gaacucaagagcagacuac

SEQ ID NO: 1531147 - RNA, 19 nt, Homo sapiens
  misc_RNA (1)...(19): siRNA sense strand
gaagaacucacagcuaguc

SEQ ID NO: 1531148 - RNA, 19 nt, Homo sapiens
  misc_RNA (1)...(19): siRNA sense strand
cuacaagaaaggacaacua

SEQ ID NO: 1531149 - RNA, 19 nt, Homo sapiens
  misc_RNA (1)...(19): siRNA sense strand
ucacagcuggauuaacuaa

SEQ ID NO: 1531150 - RNA, 19 nt, Homo sapiens
  misc_RNA (1)...(19): siRNA sense strand
gaucacuucuguauguaac

SEQ ID NO: 1531151 - RNA, 19 nt, Homo sapiens
  misc_RNA (1)...(19): siRNA sense strand
gaagaaugugagaggcuuu

SEQ ID NO: 1531152 - RNA, 19 nt, Homo sapiens
  misc_RNA (1)...(19): siRNA sense strand
uuucugaacuuccuacaca

SEQ ID NO: 1531153 - RNA, 19 nt, Homo sapiens
  misc_RNA (1)...(19): siRNA sense strand
gaaguagcugcauugaaga

SEQ ID NO: 1531154 - RNA, 19 nt, Homo sapiens
  misc_RNA (1)...(19): siRNA sense strand
aaaagaagcacaaggaaaa

SEQ ID NO: 1531155 - RNA, 19 nt, Homo sapiens
  misc_RNA (1)...(19): siRNA sense strand
gagaagcaaauaucaagca

SEQ ID NO: 1531156 - RNA, 19 nt, Homo sapiens
  misc_RNA (1)...(19): siRNA sense strand
ggugagagaagcaaauauc

SEQ ID NO: 1531157 - RNA, 19 nt, Homo sapiens
  misc_RNA (1)...(19): siRNA sense strand
agaaaggacaacuauaaug

SEQ ID NO: 1531158 - RNA, 19 nt, Homo sapiens
  misc_RNA (1)...(19): siRNA sense strand
uaaauugugcggaaauauc

SEQ ID NO: 1531159 - RNA, 19 nt, Homo sapiens
  misc_RNA (1)...(19): siRNA sense strand
uaucagcuuucauguuaca

SEQ ID NO: 1531160 - RNA, 19 nt, Homo sapiens
  misc_RNA (1)...(19): siRNA sense strand
gagguuaugcaguugagaa

SEQ ID NO: 1531161 - RNA, 19 nt, Homo sapiens
  misc_RNA (1)...(19): siRNA sense strand
gaaggaugagcccacaaug

SEQ ID NO: 1531162 - RNA, 19 nt, Homo sapiens
  misc_RNA (1)...(19): siRNA sense strand
guccaguucuccaacauca

SEQ ID NO: 1531163 - RNA, 19 nt, Homo sapiens
  misc_RNA (1)...(19): siRNA sense strand
uggagucacagcuggauua

SEQ ID NO: 1531164 - RNA, 19 nt, Homo sapiens
  misc_RNA (1)...(19): siRNA sense strand
ggcaaaugcauuagauguu

SEQ ID NO: 1531165 - RNA, 19 nt, Homo sapiens
  misc_RNA (1)...(19): siRNA sense strand
gacaggaauuggaagaacu

SEQ ID NO: 1531166 - RNA, 19 nt, Homo sapiens
  misc_RNA (1)...(19): siRNA sense strand
cauuagauguuucugaacu

SEQ ID NO: 1531167 - RNA, 19 nt, Homo sapiens
  misc_RNA (1)...(19): siRNA sense strand
ggagucacagcuggauuaa

SEQ ID NO: 1531168 - RNA, 19 nt, Homo sapiens
  misc_RNA (1)...(19): siRNA sense strand
ggaucacuucuguauguaa

SEQ ID NO: 1531169 - RNA, 19 nt, Homo sapiens
  misc_RNA (1)...(19): siRNA sense strand
guauaaugaauuccgauug

SEQ ID NO: 1531170 - RNA, 19 nt, Homo sapiens
  misc_RNA (1)...(19): siRNA sense strand
gggcauacaagaaauaaaa

SEQ ID NO: 1531171 - RNA, 19 nt, Homo sapiens
  misc_RNA (1)...(19): siRNA sense strand
uuuacagggugcuacuaua

SEQ ID NO: 1531172 - RNA, 19 nt, Homo sapiens
  misc_RNA (1)...(19): siRNA sense strand
acaagaaaggacaacuaua

SEQ ID NO: 1531173 - RNA, 19 nt, Homo sapiens
  misc_RNA (1)...(19): siRNA sense strand
guaccuauccaggcaaaug

SEQ ID NO: 1531174 - RNA, 19 nt, Homo sapiens
  misc_RNA (1)...(19): siRNA sense strand
uuugggagguuaugcaguu

SEQ ID NO: 1531175 - RNA, 19 nt, Homo sapiens
  misc_RNA (1)...(19): siRNA sense strand
gugaaagcuucugcaguug

SEQ ID NO: 1531176 - RNA, 19 nt, Homo sapiens
  misc_RNA (1)...(19): siRNA sense strand
cauugaaccagugggauua

SEQ ID NO: 1531177 - RNA, 19 nt, Homo sapiens
  misc_RNA (1)...(19): siRNA sense strand
acagggugcuacuauaaca

SEQ ID NO: 1531178 - RNA, 19 nt, Homo sapiens
  misc_RNA (1)...(19): siRNA sense strand
gagcagacuaccucaccaa

SEQ ID NO: 1531179 - RNA, 19 nt, Homo sapiens
  misc_RNA (1)...(19): siRNA sense strand
ccacacccuucagcuuuau

SEQ ID NO: 1531180 - RNA, 19 nt, Homo sapiens
  misc_RNA (1)...(19): siRNA sense strand
ucacuucuguauguaacuu

SEQ ID NO: 1531181 - RNA, 19 nt, Homo sapiens
  misc_RNA (1)...(19): siRNA sense strand
ugaaagcuucugcaguuga

SEQ ID NO: 1531182 - RNA, 19 nt, Homo sapiens
  misc_RNA (1)...(19): siRNA sense strand
uaucuaguaucagcuuuca

SEQ ID NO: 1531183 - RNA, 19 nt, Homo sapiens
  misc_RNA (1)...(19): siRNA sense strand
ugagagaagcaaauaucaa

SEQ ID NO: 1531184 - RNA, 19 nt, Homo sapiens
  misc_RNA (1)...(19): siRNA sense strand
uacaagaaaggacaacuau

SEQ ID NO: 1531185 - RNA, 19 nt, Homo sapiens
  misc_RNA (1)...(19): siRNA sense strand
ggcuaaugaucccuuggaa

SEQ ID NO: 1531186 - RNA, 19 nt, Homo sapiens
  misc_RNA (1)...(19): siRNA sense strand
ucuaguaucagcuuucaug

SEQ ID NO: 1531187 - RNA, 19 nt, Homo sapiens
  misc_RNA (1)...(19): siRNA sense strand
aguaaguccuguaaacaca

SEQ ID NO: 1531188 - RNA, 19 nt, Homo sapiens
  misc_RNA (1)...(19): siRNA sense strand
aaugugagaggcuuucaaa

SEQ ID NO: 1531189 - RNA, 19 nt, Homo sapiens
  misc_RNA (1)...(19): siRNA sense strand
uaaugcagagagagaguuu

SEQ ID NO: 1531190 - RNA, 19 nt, Homo sapiens
  misc_RNA (1)...(19): siRNA sense strand
caaaugaccugcuuacuuu

SEQ ID NO: 1531191 - RNA, 19 nt, Homo sapiens
  misc_RNA (1)...(19): siRNA sense strand
gauaguaaaucccaaguaa

SEQ ID NO: 1531192 - RNA, 19 nt, Homo sapiens
  misc_RNA (1)...(19): siRNA sense strand
gauuugagcuuucuucuug

SEQ ID NO: 1531193 - RNA, 19 nt, Homo sapiens
  misc_RNA (1)...(19): siRNA sense strand
gacaguaaaucccaaguaa

SEQ ID NO: 1531194 - RNA, 19 nt, Homo sapiens
  misc_RNA (1)...(19): siRNA sense strand
gcaaaugaccugcuuacuu

SEQ ID NO: 1531195 - RNA, 19 nt, Homo sapiens
  misc_RNA (1)...(19): siRNA sense strand
ucugguagauugcaaauaa

SEQ ID NO: 1531196 - RNA, 19 nt, Homo sapiens
  misc_RNA (1)...(19): siRNA sense strand
uacaaaggcuuggcuuaua

SEQ ID NO: 1531197 - RNA, 19 nt, Homo sapiens
  misc_RNA (1)...(19): siRNA sense strand
gcaaauaacaagcuuucuu

SEQ ID NO: 1531198 - RNA, 19 nt, Homo sapiens
  misc_RNA (1)...(19): siRNA sense strand
uaacaagcuuucuuucugu

SEQ ID NO: 1531199 - RNA, 19 nt, Homo sapiens
  misc_RNA (1)...(19): siRNA sense strand
ucugguagauugcaaauga

SEQ ID NO: 1531200 - RNA, 19 nt, Homo sapiens
  misc_RNA (1)...(19): siRNA sense strand
ccacagcuccugagaauuc

SEQ ID NO: 1531201 - RNA, 19 nt, Homo sapiens
  misc_RNA (1)...(19): siRNA sense strand
ggacaguaaaucccaagua

SEQ ID NO: 1531202 - RNA, 19 nt, Homo sapiens
  misc_RNA (1)...(19): siRNA sense strand
gaaagacuugcuguuguua

SEQ ID NO: 1531203 - RNA, 19 nt, Homo sapiens
  misc_RNA (1)...(19): siRNA sense strand
guaaaucccaaguaaggua

SEQ ID NO: 1531204 - RNA, 19 nt, Homo sapiens
  misc_RNA (1)...(19): siRNA sense strand
acaaaggcuuggcuuauau

SEQ ID NO: 1531205 - RNA, 19 nt, Homo sapiens
  misc_RNA (1)...(19): siRNA sense strand
uggcuuauauugcaaaguu

SEQ ID NO: 1531206 - RNA, 19 nt, Homo sapiens
  misc_RNA (1)...(19): siRNA sense strand
ccacaguccuccagucaau

SEQ ID NO: 1531207 - RNA, 19 nt, Homo sapiens
  misc_RNA (1)...(19): siRNA sense strand
auaacaagcuuucuuucug

SEQ ID NO: 1531208 - RNA, 19 nt, Homo sapiens
  misc_RNA (1)...(19): siRNA sense strand
cuuaggcucugguagauug

SEQ ID NO: 1531209 - RNA, 19 nt, Homo sapiens
  misc_RNA (1)...(19): siRNA sense strand
cauacaaaggcuuggcuua

SEQ ID NO: 1531210 - RNA, 19 nt, Homo sapiens
  misc_RNA (1)...(19): siRNA sense strand
uccagucaaucccaauuaa

SEQ ID NO: 1531211 - RNA, 19 nt, Homo sapiens
  misc_RNA (1)...(19): siRNA sense strand
caaaggcuuggcuuauauu

SEQ ID NO: 1531212 - RNA, 19 nt, Homo sapiens
  misc_RNA (1)...(19): siRNA sense strand
gauugcaaaugaccugcuu

SEQ ID NO: 1531213 - RNA, 19 nt, Homo sapiens
  misc_RNA (1)...(19): siRNA sense strand
gauugcaaauaacaagcuu

SEQ ID NO: 1531214 - RNA, 19 nt, Homo sapiens
  misc_RNA (1)...(19): siRNA sense strand
gcagauuugagcuuucuuc

SEQ ID NO: 1531215 - RNA, 19 nt, Homo sapiens
  misc_RNA (1)...(19): siRNA sense strand
aggcuuggcuuauauugca

SEQ ID NO: 1531216 - RNA, 19 nt, Homo sapiens
  misc_RNA (1)...(19): siRNA sense strand
gggauccacagucuacaaa

SEQ ID NO: 1531217 - RNA, 19 nt, Homo sapiens
  misc_RNA (1)...(19): siRNA sense strand
gcccuuaggcucugguaga

SEQ ID NO: 1531218 - RNA, 19 nt, Homo sapiens
  misc_RNA (1)...(19): siRNA sense strand
gucaaucccaauuaaggua

SEQ ID NO: 1531219 - RNA, 19 nt, Homo sapiens
  misc_RNA (1)...(19): siRNA sense strand
guagauugcaaauaacaag

SEQ ID NO: 1531220 - RNA, 19 nt, Homo sapiens
  misc_RNA (1)...(19): siRNA sense strand
cgauaguaaaucccaagua

SEQ ID NO: 1531221 - RNA, 19 nt, Homo sapiens
  misc_RNA (1)...(19): siRNA sense strand
auacaaaggcuuggcuuau

SEQ ID NO: 1531222 - RNA, 19 nt, Homo sapiens
  misc_RNA (1)...(19): siRNA sense strand
uaguaaaucccaaguaagg

SEQ ID NO: 1531223 - RNA, 19 nt, Homo sapiens
  misc_RNA (1)...(19): siRNA sense strand
ggcuuauauugcaaaguuu

SEQ ID NO: 1531224 - RNA, 19 nt, Homo sapiens
  misc_RNA (1)...(19): siRNA sense strand
gacuugcuguuguuaggau

SEQ ID NO: 1531225 - RNA, 19 nt, Homo sapiens
  misc_RNA (1)...(19): siRNA sense strand
gucggcagauuugagcuuu

SEQ ID NO: 1531226 - RNA, 19 nt, Homo sapiens
  misc_RNA (1)...(19): siRNA sense strand
gucggcagauuugagcuuu

SEQ ID NO: 1531227 - RNA, 19 nt, Homo sapiens
  misc_RNA (1)...(19): siRNA sense strand
gguagauugcaaauaacaa

SEQ ID NO: 1531228 - RNA, 19 nt, Homo sapiens
  misc_RNA (1)...(19): siRNA sense strand
cggcagauuugagcuuucu

SEQ ID NO: 1531229 - RNA, 19 nt, Homo sapiens
  misc_RNA (1)...(19): siRNA sense strand
ugaccugcuuacuuucugu

SEQ ID NO: 1531230 - RNA, 19 nt, Homo sapiens
  misc_RNA (1)...(19): siRNA sense strand
cggcagauuugagcuuucu

SEQ ID NO: 1531231 - RNA, 19 nt, Homo sapiens
  misc_RNA (1)...(19): siRNA sense strand
gagcagagcuuccggauuc

SEQ ID NO: 1531232 - RNA, 19 nt, Homo sapiens
  misc_RNA (1)...(19): siRNA sense strand
gaagaacgcugaccaaguc

SEQ ID NO: 1531233 - RNA, 19 nt, Homo sapiens
  misc_RNA (1)...(19): siRNA sense strand
ggaaccagcuggaagauga

SEQ ID NO: 1531234 - RNA, 19 nt, Homo sapiens
  misc_RNA (1)...(19): siRNA sense strand
caacugcccuuccacaauu

SEQ ID NO: 1531235 - RNA, 19 nt, Homo sapiens
  misc_RNA (1)...(19): siRNA sense strand
ggaaauggaugcuaaagag

SEQ ID NO: 1531236 - RNA, 19 nt, Homo sapiens
  misc_RNA (1)...(19): siRNA sense strand
ggagagggcugcauuucuu

SEQ ID NO: 1531237 - RNA, 19 nt, Homo sapiens
  misc_RNA (1)...(19): siRNA sense strand
ggaugaggcugacacauug

SEQ ID NO: 1531238 - RNA, 19 nt, Homo sapiens
  misc_RNA (1)...(19): siRNA sense strand
caacaugacucagcucuau

SEQ ID NO: 1531239 - RNA, 19 nt, Homo sapiens
  misc_RNA (1)...(19): siRNA sense strand
ucucugagcugaagacauu

SEQ ID NO: 1531240 - RNA, 19 nt, Homo sapiens
  misc_RNA (1)...(19): siRNA sense strand
gagcuggacuugucuaaca

SEQ ID NO: 1531241 - RNA, 19 nt, Homo sapiens
  misc_RNA (1)...(19): siRNA sense strand
gaguggaccuggagaagaa

SEQ ID NO: 1531242 - RNA, 19 nt, Homo sapiens
  misc_RNA (1)...(19): siRNA sense strand
caacagcauuucucaggaa

SEQ ID NO: 1531243 - RNA, 19 nt, Homo sapiens
  misc_RNA (1)...(19): siRNA sense strand
acacuuacccaguauguua

SEQ ID NO: 1531244 - RNA, 19 nt, Homo sapiens
  misc_RNA (1)...(19): siRNA sense strand
agaaucagaucacagcuuu

SEQ ID NO: 1531245 - RNA, 19 nt, Homo sapiens
  misc_RNA (1)...(19): siRNA sense strand
gagaucagcuuggcggaaa

SEQ ID NO: 1531246 - RNA, 19 nt, Homo sapiens
  misc_RNA (1)...(19): siRNA sense strand
gcaagaagcagcagcuaga

SEQ ID NO: 1531247 - RNA, 19 nt, Homo sapiens
  misc_RNA (1)...(19): siRNA sense strand
gcaauuguccugugaguuc

SEQ ID NO: 1531248 - RNA, 19 nt, Homo sapiens
  misc_RNA (1)...(19): siRNA sense strand
ccucugagcucccgaagga

SEQ ID NO: 1531249 - RNA, 19 nt, Homo sapiens
  misc_RNA (1)...(19): siRNA sense strand
agagacaacugcagagcua

SEQ ID NO: 1531250 - RNA, 19 nt, Homo sapiens
  misc_RNA (1)...(19): siRNA sense strand
ugacucagcucuauaugca

SEQ ID NO: 1531251 - RNA, 19 nt, Homo sapiens
  misc_RNA (1)...(19): siRNA sense strand
gggaagacacucaggcuaa

SEQ ID NO: 1531252 - RNA, 19 nt, Homo sapiens
  misc_RNA (1)...(19): siRNA sense strand
aaacugugaucuucauguu

SEQ ID NO: 1531253 - RNA, 19 nt, Homo sapiens
  misc_RNA (1)...(19): siRNA sense strand
gacaagacaagcagggaua

SEQ ID NO: 1531254 - RNA, 19 nt, Homo sapiens
  misc_RNA (1)...(19): siRNA sense strand
ggagaagaaucagaucaca

SEQ ID NO: 1531255 - RNA, 19 nt, Homo sapiens
  misc_RNA (1)...(19): siRNA sense strand
ggaagagaauccagaagcu

SEQ ID NO: 1531256 - RNA, 19 nt, Homo sapiens
  misc_RNA (1)...(19): siRNA sense strand
gcagacaggcuaugcuuuc

SEQ ID NO: 1531257 - RNA, 19 nt, Homo sapiens
  misc_RNA (1)...(19): siRNA sense strand
guacagcggaccaaagcua

SEQ ID NO: 1531258 - RNA, 19 nt, Homo sapiens
  misc_RNA (1)...(19): siRNA sense strand
guccacagcugaaagaagu

SEQ ID NO: 1531259 - RNA, 19 nt, Homo sapiens
  misc_RNA (1)...(19): siRNA sense strand
gguaggcugugggcagaua

SEQ ID NO: 1531260 - RNA, 19 nt, Homo sapiens
  misc_RNA (1)...(19): siRNA sense strand
aagguuaucuucuaugcaa

SEQ ID NO: 1531261 - RNA, 19 nt, Homo sapiens
  misc_RNA (1)...(19): siRNA sense strand
gcuggacuuugccuucuuu

SEQ ID NO: 1531262 - RNA, 19 nt, Homo sapiens
  misc_RNA (1)...(19): siRNA sense strand
gaccugguuuccuguaaga

SEQ ID NO: 1531263 - RNA, 19 nt, Homo sapiens
  misc_RNA (1)...(19): siRNA sense strand
uagaggagcuggacuugag

SEQ ID NO: 1531264 - RNA, 19 nt, Homo sapiens
  misc_RNA (1)...(19): siRNA sense strand
aagacacacuuacccagua

SEQ ID NO: 1531265 - RNA, 19 nt, Homo sapiens
  misc_RNA (1)...(19): siRNA sense strand
ggaagacacucaggcuaag

SEQ ID NO: 1531266 - RNA, 19 nt, Homo sapiens
  misc_RNA (1)...(19): siRNA sense strand
gagcaucucggaccucuuc

SEQ ID NO: 1531267 - RNA, 19 nt, Homo sapiens
  misc_RNA (1)...(19): siRNA sense strand
gaacaaagacacacuuacc

SEQ ID NO: 1531268 - RNA, 19 nt, Homo sapiens
  misc_RNA (1)...(19): siRNA sense strand
accaucaucuuccuucuuu

SEQ ID NO: 1531269 - RNA, 19 nt, Homo sapiens
  misc_RNA (1)...(19): siRNA sense strand
ccugugaguuccugaguga

SEQ ID NO: 1531270 - RNA, 19 nt, Homo sapiens
  misc_RNA (1)...(19): siRNA sense strand
ggcagucuuucauucauug

SEQ ID NO: 1531271 - RNA, 19 nt, Homo sapiens
  misc_RNA (1)...(19): siRNA sense strand
ggaacaguaucggugaugu

SEQ ID NO: 1531272 - RNA, 19 nt, Homo sapiens
  misc_RNA (1)...(19): siRNA sense strand
cuguggagcugucuuguga

SEQ ID NO: 1531273 - RNA, 19 nt, Homo sapiens
  misc_RNA (1)...(19): siRNA sense strand
acugugaucuucauguuug

SEQ ID NO: 1531274 - RNA, 19 nt, Homo sapiens
  misc_RNA (1)...(19): siRNA sense strand
gcuccacccuugauagcuu

SEQ ID NO: 1531275 - RNA, 19 nt, Homo sapiens
  misc_RNA (1)...(19): siRNA sense strand
ggagaagaacgcugaccaa

SEQ ID NO: 1531276 - RNA, 19 nt, Homo sapiens
  misc_RNA (1)...(19): siRNA sense strand
gugaacaaagacacacuua

SEQ ID NO: 1531277 - RNA, 19 nt, Homo sapiens
  misc_RNA (1)...(19): siRNA sense strand
gaggugcuucugcuaagua

SEQ ID NO: 1531278 - RNA, 19 nt, Homo sapiens
  misc_RNA (1)...(19): siRNA sense strand
gcacucagguuggcucacu

SEQ ID NO: 1531279 - RNA, 19 nt, Homo sapiens
  misc_RNA (1)...(19): siRNA sense strand
uaaucuugcuguccuggaa

SEQ ID NO: 1531280 - RNA, 19 nt, Homo sapiens
  misc_RNA (1)...(19): siRNA sense strand
ggaccucagucaccuucug

SEQ ID NO: 1531281 - RNA, 19 nt, Homo sapiens
  misc_RNA (1)...(19): siRNA sense strand
gaggggaaauggaugcuaa

SEQ ID NO: 1531282 - RNA, 19 nt, Homo sapiens
  misc_RNA (1)...(19): siRNA sense strand
uggaggagcuggacuuguc

SEQ ID NO: 1531283 - RNA, 19 nt, Homo sapiens
  misc_RNA (1)...(19): siRNA sense strand
gcagggcaaugaggacugu

SEQ ID NO: 1531284 - RNA, 19 nt, Homo sapiens
  misc_RNA (1)...(19): siRNA sense strand
gggaaauggaugcuaaaga

SEQ ID NO: 1531285 - RNA, 19 nt, Homo sapiens
  misc_RNA (1)...(19): siRNA sense strand
caacuuugcacuucagauc

SEQ ID NO: 1531286 - RNA, 19 nt, Homo sapiens
  misc_RNA (1)...(19): siRNA sense strand
caacagcaucugcguguca

SEQ ID NO: 1531287 - RNA, 19 nt, Homo sapiens
  misc_RNA (1)...(19): siRNA sense strand
gcacaaagccuccccuauc

SEQ ID NO: 1531288 - RNA, 19 nt, Homo sapiens
  misc_RNA (1)...(19): siRNA sense strand
gugcagguguugaagaagu

SEQ ID NO: 1531289 - RNA, 19 nt, Homo sapiens
  misc_RNA (1)...(19): siRNA sense strand
uagugcagguguugaagaa

SEQ ID NO: 1531290 - RNA, 19 nt, Homo sapiens
  misc_RNA (1)...(19): siRNA sense strand
uccaggagcuugccgacaa

SEQ ID NO: 1531291 - RNA, 19 nt, Homo sapiens
  misc_RNA (1)...(19): siRNA sense strand
gacuuugccuucuuugaca

SEQ ID NO: 1531292 - RNA, 19 nt, Homo sapiens
  misc_RNA (1)...(19): siRNA sense strand
auagaccucucagggaaua

SEQ ID NO: 1531293 - RNA, 19 nt, Homo sapiens
  misc_RNA (1)...(19): siRNA sense strand
gaagcagcagcuagaguug

SEQ ID NO: 1531294 - RNA, 19 nt, Homo sapiens
  misc_RNA (1)...(19): siRNA sense strand
ugccagagcucaggaagau

SEQ ID NO: 1531295 - RNA, 19 nt, Homo sapiens
  misc_RNA (1)...(19): siRNA sense strand
caccaaagacccagaaugg

SEQ ID NO: 1531296 - RNA, 19 nt, Homo sapiens
  misc_RNA (1)...(19): siRNA sense strand
gcuuggacaucagcuuuga

SEQ ID NO: 1531297 - RNA, 19 nt, Homo sapiens
  misc_RNA (1)...(19): siRNA sense strand
gggacaaccagcucaguga

SEQ ID NO: 1531298 - RNA, 19 nt, Homo sapiens
  misc_RNA (1)...(19): siRNA sense strand
agacacacuuacccaguau

SEQ ID NO: 1531299 - RNA, 19 nt, Homo sapiens
  misc_RNA (1)...(19): siRNA sense strand
gguggaagaauaugugaau

SEQ ID NO: 1531300 - RNA, 19 nt, Homo sapiens
  misc_RNA (1)...(19): siRNA sense strand
uagaguuggccaagaagua

SEQ ID NO: 1531301 - RNA, 19 nt, Homo sapiens
  misc_RNA (1)...(19): siRNA sense strand
gucauccgccucuggaaua

SEQ ID NO: 1531302 - RNA, 19 nt, Homo sapiens
  misc_RNA (1)...(19): siRNA sense strand
gcccugcccuggaaguaau

SEQ ID NO: 1531303 - RNA, 19 nt, Homo sapiens
  misc_RNA (1)...(19): siRNA sense strand
ccuguaagauugacaacca

SEQ ID NO: 1531304 - RNA, 19 nt, Homo sapiens
  misc_RNA (1)...(19): siRNA sense strand
cagugaaccugggcucuga

SEQ ID NO: 1531305 - RNA, 19 nt, Homo sapiens
  misc_RNA (1)...(19): siRNA sense strand
gcucacagggccaaagguu

SEQ ID NO: 1531306 - RNA, 19 nt, Homo sapiens
  misc_RNA (1)...(19): siRNA sense strand
gaccaaguccugcugaucu

SEQ ID NO: 1531307 - RNA, 19 nt, Homo sapiens
  misc_RNA (1)...(19): siRNA sense strand
ggacuuugccuucuuugac

SEQ ID NO: 1531308 - RNA, 19 nt, Homo sapiens
  misc_RNA (1)...(19): siRNA sense strand
ggacagagccaggguucuc

SEQ ID NO: 1531309 - RNA, 19 nt, Homo sapiens
  misc_RNA (1)...(19): siRNA sense strand
cauuguggccuccaagaaa

SEQ ID NO: 1531310 - RNA, 19 nt, Homo sapiens
  misc_RNA (1)...(19): siRNA sense strand
agaagcagcagcuagaguu

SEQ ID NO: 1531311 - RNA, 19 nt, Homo sapiens
  misc_RNA (1)...(19): siRNA sense strand
gcaccaaggcgcugaugag

SEQ ID NO: 1531312 - RNA, 19 nt, Homo sapiens
  misc_RNA (1)...(19): siRNA sense strand
gcugugggcagauagagaa

SEQ ID NO: 1531313 - RNA, 19 nt, Homo sapiens
  misc_RNA (1)...(19): siRNA sense strand
ucacagggccaaagguugu

SEQ ID NO: 1531314 - RNA, 19 nt, Homo sapiens
  misc_RNA (1)...(19): siRNA sense strand
gauauugcuccacccuuga

SEQ ID NO: 1531315 - RNA, 19 nt, Homo sapiens
  misc_RNA (1)...(19): siRNA sense strand
agacagauagaccugguuu

SEQ ID NO: 1531316 - RNA, 19 nt, Homo sapiens
  misc_RNA (1)...(19): siRNA sense strand
ggaagcagugcaagaagca

SEQ ID NO: 1531317 - RNA, 19 nt, Homo sapiens
  misc_RNA (1)...(19): siRNA sense strand
ggaggugcuucugcuaagu

SEQ ID NO: 1531318 - RNA, 19 nt, Homo sapiens
  misc_RNA (1)...(19): siRNA sense strand
uagaccugguuuccuguaa

SEQ ID NO: 1531319 - RNA, 19 nt, Homo sapiens
  misc_RNA (1)...(19): siRNA sense strand
gguccugcguuucuguaug

SEQ ID NO: 1531320 - RNA, 19 nt, Homo sapiens
  misc_RNA (1)...(19): siRNA sense strand
ggagugcaguuggcagagu

SEQ ID NO: 1531321 - RNA, 19 nt, Homo sapiens
  misc_RNA (1)...(19): siRNA sense strand
ccagagcucaggaagauag

SEQ ID NO: 1531322 - RNA, 19 nt, Homo sapiens
  misc_RNA (1)...(19): siRNA sense strand
gucgguugcugccaccuuu

SEQ ID NO: 1531323 - RNA, 19 nt, Homo sapiens
  misc_RNA (1)...(19): siRNA sense strand
gaacaguaucggugauguc

SEQ ID NO: 1531324 - RNA, 19 nt, Homo sapiens
  misc_RNA (1)...(19): siRNA sense strand
gcuaaguacuuuuggcuau

SEQ ID NO: 1531325 - RNA, 19 nt, Homo sapiens
  misc_RNA (1)...(19): siRNA sense strand
gaaccagcuggaagaugaa

SEQ ID NO: 1531326 - RNA, 19 nt, Homo sapiens
  misc_RNA (1)...(19): siRNA sense strand
ugucaacccuacucugcuu

SEQ ID NO: 1531327 - RNA, 19 nt, Homo sapiens
  misc_RNA (1)...(19): siRNA sense strand
ggaguuacagacaaaugga

SEQ ID NO: 1531328 - RNA, 19 nt, Homo sapiens
  misc_RNA (1)...(19): siRNA sense strand
aggaugaggcugacacauu

SEQ ID NO: 1531329 - RNA, 19 nt, Homo sapiens
  misc_RNA (1)...(19): siRNA sense strand
gguccuacaccuaccauuc

SEQ ID NO: 1531330 - RNA, 19 nt, Homo sapiens
  misc_RNA (1)...(19): siRNA sense strand
ccaggaagagaauccagaa

SEQ ID NO: 1531331 - RNA, 19 nt, Homo sapiens
  misc_RNA (1)...(19): siRNA sense strand
caacagagcuuacagaaug

SEQ ID NO: 1531332 - RNA, 19 nt, Homo sapiens
  misc_RNA (1)...(19): siRNA sense strand
gaucagauauccacacaga

SEQ ID NO: 1531333 - RNA, 19 nt, Homo sapiens
  misc_RNA (1)...(19): siRNA sense strand
ggauacagcugaugguguu

SEQ ID NO: 1531334 - RNA, 19 nt, Homo sapiens
  misc_RNA (1)...(19): siRNA sense strand
cgaagaaauuguggaagua

SEQ ID NO: 1531335 - RNA, 19 nt, Homo sapiens
  misc_RNA (1)...(19): siRNA sense strand
gcaaaaugcuccugucuga

SEQ ID NO: 1531336 - RNA, 19 nt, Homo sapiens
  misc_RNA (1)...(19): siRNA sense strand
ccaaacuccuaucuccuua

SEQ ID NO: 1531337 - RNA, 19 nt, Homo sapiens
  misc_RNA (1)...(19): siRNA sense strand
ggaugacuccgaagaaauu

SEQ ID NO: 1531338 - RNA, 19 nt, Homo sapiens
  misc_RNA (1)...(19): siRNA sense strand
gucucuagcugauguauuu

SEQ ID NO: 1531339 - RNA, 19 nt, Homo sapiens
  misc_RNA (1)...(19): siRNA sense strand
guacagaaagaacuuagaa

SEQ ID NO: 1531340 - RNA, 19 nt, Homo sapiens
  misc_RNA (1)...(19): siRNA sense strand
gaagggcuaugaaaagaaa

SEQ ID NO: 1531341 - RNA, 19 nt, Homo sapiens
  misc_RNA (1)...(19): siRNA sense strand
uccaacagguccagccuua

SEQ ID NO: 1531342 - RNA, 19 nt, Homo sapiens
  misc_RNA (1)...(19): siRNA sense strand
agaaagaacuuagaaacca

SEQ ID NO: 1531343 - RNA, 19 nt, Homo sapiens
  misc_RNA (1)...(19): siRNA sense strand
uaacuggccuccugcucuu

SEQ ID NO: 1531344 - RNA, 19 nt, Homo sapiens
  misc_RNA (1)...(19): siRNA sense strand
caacagguccagccuuaug

SEQ ID NO: 1531345 - RNA, 19 nt, Homo sapiens
  misc_RNA (1)...(19): siRNA sense strand
ccagacaccugcuccaucu

SEQ ID NO: 1531346 - RNA, 19 nt, Homo sapiens
  misc_RNA (1)...(19): siRNA sense strand
ccgaagaaauuguggaagu

SEQ ID NO: 1531347 - RNA, 19 nt, Homo sapiens
  misc_RNA (1)...(19): siRNA sense strand
aaacuucugcucccucuaa

SEQ ID NO: 1531348 - RNA, 19 nt, Homo sapiens
  misc_RNA (1)...(19): siRNA sense strand
gcacaccuccugacacauc

SEQ ID NO: 1531349 - RNA, 19 nt, Homo sapiens
  misc_RNA (1)...(19): siRNA sense strand
gaucaaccguucaauucag

SEQ ID NO: 1531350 - RNA, 19 nt, Homo sapiens
  misc_RNA (1)...(19): siRNA sense strand
gaaaagguccaaacuccua

SEQ ID NO: 1531351 - RNA, 19 nt, Homo sapiens
  misc_RNA (1)...(19): siRNA sense strand
guggaugacuccgaagaaa

SEQ ID NO: 1531352 - RNA, 19 nt, Homo sapiens
  misc_RNA (1)...(19): siRNA sense strand
ugaacgauaucgaucagau

SEQ ID NO: 1531353 - RNA, 19 nt, Homo sapiens
  misc_RNA (1)...(19): siRNA sense strand
caguuuacacucuuacaua

SEQ ID NO: 1531354 - RNA, 19 nt, Homo sapiens
  misc_RNA (1)...(19): siRNA sense strand
gcauaaagaacagaagaug

SEQ ID NO: 1531355 - RNA, 19 nt, Homo sapiens
  misc_RNA (1)...(19): siRNA sense strand
ggagagccuuuaggaguca

SEQ ID NO: 1531356 - RNA, 19 nt, Homo sapiens
  misc_RNA (1)...(19): siRNA sense strand
ccacggagaggucaaagga

SEQ ID NO: 1531357 - RNA, 19 nt, Homo sapiens
  misc_RNA (1)...(19): siRNA sense strand
gcaguacagaaagaacuua

SEQ ID NO: 1531358 - RNA, 19 nt, Homo sapiens
  misc_RNA (1)...(19): siRNA sense strand
gcaacagagcuuacagaau

SEQ ID NO: 1531359 - RNA, 19 nt, Homo sapiens
  misc_RNA (1)...(19): siRNA sense strand
gagccagggaugaacgaua

SEQ ID NO: 1531360 - RNA, 19 nt, Homo sapiens
  misc_RNA (1)...(19): siRNA sense strand
cucaucaucuuccucaauu

SEQ ID NO: 1531361 - RNA, 19 nt, Homo sapiens
  misc_RNA (1)...(19): siRNA sense strand
gaugaacgauaucgaucag

SEQ ID NO: 1531362 - RNA, 19 nt, Homo sapiens
  misc_RNA (1)...(19): siRNA sense strand
uuaaaggcaugcacaaagg

SEQ ID NO: 1531363 - RNA, 19 nt, Homo sapiens
  misc_RNA (1)...(19): siRNA sense strand
gcucucugcugccuugcaa

SEQ ID NO: 1531364 - RNA, 19 nt, Homo sapiens
  misc_RNA (1)...(19): siRNA sense strand
aaaaggcgauccacauuug

SEQ ID NO: 1531365 - RNA, 19 nt, Homo sapiens
  misc_RNA (1)...(19): siRNA sense strand
uggcaaagcauaaagaaca

SEQ ID NO: 1531366 - RNA, 19 nt, Homo sapiens
  misc_RNA (1)...(19): siRNA sense strand
aaacuccuaucuccuuaca

SEQ ID NO: 1531367 - RNA, 19 nt, Homo sapiens
  misc_RNA (1)...(19): siRNA sense strand
ggaucaaccguucaauuca

SEQ ID NO: 1531368 - RNA, 19 nt, Homo sapiens
  misc_RNA (1)...(19): siRNA sense strand
gaacagaagauggcuuugc

SEQ ID NO: 1531369 - RNA, 19 nt, Homo sapiens
  misc_RNA (1)...(19): siRNA sense strand
ggaugaacgauaucgauca

SEQ ID NO: 1531370 - RNA, 19 nt, Homo sapiens
  misc_RNA (1)...(19): siRNA sense strand
cuuuaggagucaucuguaa

SEQ ID NO: 1531371 - RNA, 19 nt, Homo sapiens
  misc_RNA (1)...(19): siRNA sense strand
gcagaugaccccugugaaa

SEQ ID NO: 1531372 - RNA, 19 nt, Homo sapiens
  misc_RNA (1)...(19): siRNA sense strand
ccaauacucgaauagagaa

SEQ ID NO: 1531373 - RNA, 19 nt, Homo sapiens
  misc_RNA (1)...(19): siRNA sense strand
gccaauacucgaauagaga

SEQ ID NO: 1531374 - RNA, 19 nt, Homo sapiens
  misc_RNA (1)...(19): siRNA sense strand
cuucugcucccucuaagua

SEQ ID NO: 1531375 - RNA, 19 nt, Homo sapiens
  misc_RNA (1)...(19): siRNA sense strand
gaggaugagggcucucuga

SEQ ID NO: 1531376 - RNA, 19 nt, Homo sapiens
  misc_RNA (1)...(19): siRNA sense strand
caaagcauaaagaacagaa

SEQ ID NO: 1531377 - RNA, 19 nt, Homo sapiens
  misc_RNA (1)...(19): siRNA sense strand
ugauucagcaguacagaaa

SEQ ID NO: 1531378 - RNA, 19 nt, Homo sapiens
  misc_RNA (1)...(19): siRNA sense strand
agccagggaugaacgauau

SEQ ID NO: 1531379 - RNA, 19 nt, Homo sapiens
  misc_RNA (1)...(19): siRNA sense strand
gaagaaauuguggaaguac

SEQ ID NO: 1531380 - RNA, 19 nt, Homo sapiens
  misc_RNA (1)...(19): siRNA sense strand
guuaaaggcaugcacaaag

SEQ ID NO: 1531381 - RNA, 19 nt, Homo sapiens
  misc_RNA (1)...(19): siRNA sense strand
gaucguccacuucuucauc

SEQ ID NO: 1531382 - RNA, 19 nt, Homo sapiens
  misc_RNA (1)...(19): siRNA sense strand
aagaacagaagauggcuuu

SEQ ID NO: 1531383 - RNA, 19 nt, Homo sapiens
  misc_RNA (1)...(19): siRNA sense strand
ucagauauccacacagaag

SEQ ID NO: 1531384 - RNA, 19 nt, Homo sapiens
  misc_RNA (1)...(19): siRNA sense strand
ucaauucgcccagcaaaca

SEQ ID NO: 1531385 - RNA, 19 nt, Homo sapiens
  misc_RNA (1)...(19): siRNA sense strand
ccugaugucacuacaacua

SEQ ID NO: 1531386 - RNA, 19 nt, Homo sapiens
  misc_RNA (1)...(19): siRNA sense strand
ucacuacaacuaccucuuc

SEQ ID NO: 1531387 - RNA, 19 nt, Homo sapiens
  misc_RNA (1)...(19): siRNA sense strand
ugacugcacuggacaugac

SEQ ID NO: 1531388 - RNA, 19 nt, Homo sapiens
  misc_RNA (1)...(19): siRNA sense strand
cugcacaccuccugacaca

SEQ ID NO: 1531389 - RNA, 19 nt, Homo sapiens
  misc_RNA (1)...(19): siRNA sense strand
uggaucaaccguucaauuc

SEQ ID NO: 1531390 - RNA, 19 nt, Homo sapiens
  misc_RNA (1)...(19): siRNA sense strand
caaaaggcgauccacauuu

SEQ ID NO: 1531391 - RNA, 19 nt, Homo sapiens
  misc_RNA (1)...(19): siRNA sense strand
ggacaugacagggaaacca

SEQ ID NO: 1531392 - RNA, 19 nt, Homo sapiens
  misc_RNA (1)...(19): siRNA sense strand
cagaagggcuaugaaaaga

SEQ ID NO: 1531393 - RNA, 19 nt, Homo sapiens
  misc_RNA (1)...(19): siRNA sense strand
gcacuggcaaagcauaaag

SEQ ID NO: 1531394 - RNA, 19 nt, Homo sapiens
  misc_RNA (1)...(19): siRNA sense strand
gcagacacaagaaacugau

SEQ ID NO: 1531395 - RNA, 19 nt, Homo sapiens
  misc_RNA (1)...(19): siRNA sense strand
gugggucucuagcugaugu

SEQ ID NO: 1531396 - RNA, 19 nt, Homo sapiens
  misc_RNA (1)...(19): siRNA sense strand
acacaucuucggccucuga

SEQ ID NO: 1531397 - RNA, 19 nt, Homo sapiens
  misc_RNA (1)...(19): siRNA sense strand
gaaaagaaaagguccaaac

SEQ ID NO: 1531398 - RNA, 19 nt, Homo sapiens
  misc_RNA (1)...(19): siRNA sense strand
ggcaaagcauaaagaacag

SEQ ID NO: 1531399 - RNA, 19 nt, Homo sapiens
  misc_RNA (1)...(19): siRNA sense strand
uuuacacucuuacauaugg

SEQ ID NO: 1531400 - RNA, 19 nt, Homo sapiens
  misc_RNA (1)...(19): siRNA sense strand
caucugcagcucaaacuuc

SEQ ID NO: 1531401 - RNA, 19 nt, Homo sapiens
  misc_RNA (1)...(19): siRNA sense strand
gacacaagaaacugauuca

SEQ ID NO: 1531402 - RNA, 19 nt, Homo sapiens
  misc_RNA (1)...(19): siRNA sense strand
acagaaagaacuuagaaac

SEQ ID NO: 1531403 - RNA, 19 nt, Homo sapiens
  misc_RNA (1)...(19): siRNA sense strand
gucaguagcagaguaucua

SEQ ID NO: 1531404 - RNA, 19 nt, Homo sapiens
  misc_RNA (1)...(19): siRNA sense strand
ucgaucagauauccacaca

SEQ ID NO: 1531405 - RNA, 19 nt, Homo sapiens
  misc_RNA (1)...(19): siRNA sense strand
ucugaacacucugaaacga

SEQ ID NO: 1531406 - RNA, 19 nt, Homo sapiens
  misc_RNA (1)...(19): siRNA sense strand
uaaaggcaugcacaaagga

SEQ ID NO: 1531407 - RNA, 19 nt, Homo sapiens
  misc_RNA (1)...(19): siRNA sense strand
ggaaccagugggucucuag

SEQ ID NO: 1531408 - RNA, 19 nt, Homo sapiens
  misc_RNA (1)...(19): siRNA sense strand
auucagcaguacagaaaga

SEQ ID NO: 1531409 - RNA, 19 nt, Homo sapiens
  misc_RNA (1)...(19): siRNA sense strand
gcaaagcauaaagaacaga

SEQ ID NO: 1531410 - RNA, 19 nt, Homo sapiens
  misc_RNA (1)...(19): siRNA sense strand
aagcauaaagaacagaaga

SEQ ID NO: 1531411 - RNA, 19 nt, Homo sapiens
  misc_RNA (1)...(19): siRNA sense strand
uggugagucugcaagauuc

SEQ ID NO: 1531412 - RNA, 19 nt, Homo sapiens
  misc_RNA (1)...(19): siRNA sense strand
auucagggaucguccacuu

SEQ ID NO: 1531413 - RNA, 19 nt, Homo sapiens
  misc_RNA (1)...(19): siRNA sense strand
ccaaaaggcgauccacauu

SEQ ID NO: 1531414 - RNA, 19 nt, Homo sapiens
  misc_RNA (1)...(19): siRNA sense strand
aggcugcacuggcaaagca

SEQ ID NO: 1531415 - RNA, 19 nt, Homo sapiens
  misc_RNA (1)...(19): siRNA sense strand
gaugguguuccugucagua

SEQ ID NO: 1531416 - RNA, 19 nt, Homo sapiens
  misc_RNA (1)...(19): siRNA sense strand
gcugaugguguuccuguca

SEQ ID NO: 1531417 - RNA, 19 nt, Homo sapiens
  misc_RNA (1)...(19): siRNA sense strand
ugccaauacucgaauagag

SEQ ID NO: 1531418 - RNA, 19 nt, Homo sapiens
  misc_RNA (1)...(19): siRNA sense strand
ggguaccacucaagcaaaa

SEQ ID NO: 1531419 - RNA, 19 nt, Homo sapiens
  misc_RNA (1)...(19): siRNA sense strand
gguaagaccauuuauguuu

SEQ ID NO: 1531420 - RNA, 19 nt, Homo sapiens
  misc_RNA (1)...(19): siRNA sense strand
gaucuucggugacugacaa

SEQ ID NO: 1531421 - RNA, 19 nt, Homo sapiens
  misc_RNA (1)...(19): siRNA sense strand
ccugaaugcugccaccuua

SEQ ID NO: 1531422 - RNA, 19 nt, Homo sapiens
  misc_RNA (1)...(19): siRNA sense strand
gaauguuguugccuuguga

SEQ ID NO: 1531423 - RNA, 19 nt, Homo sapiens
  misc_RNA (1)...(19): siRNA sense strand
guucagugcugcagguauu

SEQ ID NO: 1531424 - RNA, 19 nt, Homo sapiens
  misc_RNA (1)...(19): siRNA sense strand
guacugcaguuucuagcuu

SEQ ID NO: 1531425 - RNA, 19 nt, Homo sapiens
  misc_RNA (1)...(19): siRNA sense strand
gagcuacugugagaaauuc

SEQ ID NO: 1531426 - RNA, 19 nt, Homo sapiens
  misc_RNA (1)...(19): siRNA sense strand
auacggagcuacugugaga

SEQ ID NO: 1531427 - RNA, 19 nt, Homo sapiens
  misc_RNA (1)...(19): siRNA sense strand
gcugagagcugugcugaag

SEQ ID NO: 1531428 - RNA, 19 nt, Homo sapiens
  misc_RNA (1)...(19): siRNA sense strand
ccacaugguucuaggaucu

SEQ ID NO: 1531429 - RNA, 19 nt, Homo sapiens
  misc_RNA (1)...(19): siRNA sense strand
caucacaucucugggaaga

SEQ ID NO: 1531430 - RNA, 19 nt, Homo sapiens
  misc_RNA (1)...(19): siRNA sense strand
cagaauguaucagaacuau

SEQ ID NO: 1531431 - RNA, 19 nt, Homo sapiens
  misc_RNA (1)...(19): siRNA sense strand
caucucauauuuccuguca

SEQ ID NO: 1531432 - RNA, 19 nt, Homo sapiens
  misc_RNA (1)...(19): siRNA sense strand
gggagucagugauuuaucu

SEQ ID NO: 1531433 - RNA, 19 nt, Homo sapiens
  misc_RNA (1)...(19): siRNA sense strand
guagggcucuccagcuuca

SEQ ID NO: 1531434 - RNA, 19 nt, Homo sapiens
  misc_RNA (1)...(19): siRNA sense strand
ugucuucuauugugugaaa

SEQ ID NO: 1531435 - RNA, 19 nt, Homo sapiens
  misc_RNA (1)...(19): siRNA sense strand
cuacaaccuuggaauguca

SEQ ID NO: 1531436 - RNA, 19 nt, Homo sapiens
  misc_RNA (1)...(19): siRNA sense strand
ucacaucucugggaagaca

SEQ ID NO: 1531437 - RNA, 19 nt, Homo sapiens
  misc_RNA (1)...(19): siRNA sense strand
gaaugucacuggcgauagc

SEQ ID NO: 1531438 - RNA, 19 nt, Homo sapiens
  misc_RNA (1)...(19): siRNA sense strand
ggagcuacugugagaaauu

SEQ ID NO: 1531439 - RNA, 19 nt, Homo sapiens
  misc_RNA (1)...(19): siRNA sense strand
ccucuggacuuuaaauucu

SEQ ID NO: 1531440 - RNA, 19 nt, Homo sapiens
  misc_RNA (1)...(19): siRNA sense strand
gcauacggagcuacuguga

SEQ ID NO: 1531441 - RNA, 19 nt, Homo sapiens
  misc_RNA (1)...(19): siRNA sense strand
guuguugccuugugauaag

SEQ ID NO: 1531442 - RNA, 19 nt, Homo sapiens
  misc_RNA (1)...(19): siRNA sense strand
cagugggacuuccugaaug

SEQ ID NO: 1531443 - RNA, 19 nt, Homo sapiens
  misc_RNA (1)...(19): siRNA sense strand
ugagagcugugcugaagag

SEQ ID NO: 1531444 - RNA, 19 nt, Homo sapiens
  misc_RNA (1)...(19): siRNA sense strand
gaccauuuauguuuucuug

SEQ ID NO: 1531445 - RNA, 19 nt, Homo sapiens
  misc_RNA (1)...(19): siRNA sense strand
guugccuugugauaaguua

SEQ ID NO: 1531446 - RNA, 19 nt, Homo sapiens
  misc_RNA (1)...(19): siRNA sense strand
gcaaccacagaauguauca

SEQ ID NO: 1531447 - RNA, 19 nt, Homo sapiens
  misc_RNA (1)...(19): siRNA sense strand
cuucaccaccauucuauuu

SEQ ID NO: 1531448 - RNA, 19 nt, Homo sapiens
  misc_RNA (1)...(19): siRNA sense strand
uggguaagaccauuuaugu

SEQ ID NO: 1531449 - RNA, 19 nt, Homo sapiens
  misc_RNA (1)...(19): siRNA sense strand
agucagugguaauggguaa

SEQ ID NO: 1531450 - RNA, 19 nt, Homo sapiens
  misc_RNA (1)...(19): siRNA sense strand
uucuaucucuucccucuaa

SEQ ID NO: 1531451 - RNA, 19 nt, Homo sapiens
  misc_RNA (1)...(19): siRNA sense strand
cagcuucaccaccauucua

SEQ ID NO: 1531452 - RNA, 19 nt, Homo sapiens
  misc_RNA (1)...(19): siRNA sense strand
cacccacccugucuucuuc

SEQ ID NO: 1531453 - RNA, 19 nt, Homo sapiens
  misc_RNA (1)...(19): siRNA sense strand
ccagugggacuuccugaau

SEQ ID NO: 1531454 - RNA, 19 nt, Homo sapiens
  misc_RNA (1)...(19): siRNA sense strand
ggguaagaccauuuauguu

SEQ ID NO: 1531455 - RNA, 19 nt, Homo sapiens
  misc_RNA (1)...(19): siRNA sense strand
gacaagaaggccaucaucu

SEQ ID NO: 1531456 - RNA, 19 nt, Homo sapiens
  misc_RNA (1)...(19): siRNA sense strand
ugugggagucagugauuua

SEQ ID NO: 1531457 - RNA, 19 nt, Homo sapiens
  misc_RNA (1)...(19): siRNA sense strand
ggugugggagucagugauu

SEQ ID NO: 1531458 - RNA, 19 nt, Homo sapiens
  misc_RNA (1)...(19): siRNA sense strand
gcucuucaucucauauuuc

SEQ ID NO: 1531459 - RNA, 19 nt, Homo sapiens
  misc_RNA (1)...(19): siRNA sense strand
gccaugcucuucaucucau

SEQ ID NO: 1531460 - RNA, 19 nt, Homo sapiens
  misc_RNA (1)...(19): siRNA sense strand
caucuacaaccuuggaaug

SEQ ID NO: 1531461 - RNA, 19 nt, Homo sapiens
  misc_RNA (1)...(19): siRNA sense strand
ugaaugcugccaccuuaug

SEQ ID NO: 1531462 - RNA, 19 nt, Homo sapiens
  misc_RNA (1)...(19): siRNA sense strand
aaugcccacugcugucuuu

SEQ ID NO: 1531463 - RNA, 19 nt, Homo sapiens
  misc_RNA (1)...(19): siRNA sense strand
gcucagugucuucuauugu

SEQ ID NO: 1531464 - RNA, 19 nt, Homo sapiens
  misc_RNA (1)...(19): siRNA sense strand
ggcucagugucuucuauug

SEQ ID NO: 1531465 - RNA, 19 nt, Homo sapiens
  misc_RNA (1)...(19): siRNA sense strand
agaauguuguugccuugug

SEQ ID NO: 1531466 - RNA, 19 nt, Homo sapiens
  misc_RNA (1)...(19): siRNA sense strand
ucucauauuuccugucacu

SEQ ID NO: 1531467 - RNA, 19 nt, Homo sapiens
  misc_RNA (1)...(19): siRNA sense strand
ccaugcucuucaucucaua

SEQ ID NO: 1531468 - RNA, 19 nt, Homo sapiens
  misc_RNA (1)...(19): siRNA sense strand
aaugauuacuuggacaaug

SEQ ID NO: 1531469 - RNA, 19 nt, Homo sapiens
  misc_RNA (1)...(19): siRNA sense strand
cauaggcaaccacagaaug

SEQ ID NO: 1531470 - RNA, 19 nt, Homo sapiens
  misc_RNA (1)...(19): siRNA sense strand
ccugucuucuucuggcuaa

SEQ ID NO: 1531471 - RNA, 19 nt, Homo sapiens
  misc_RNA (1)...(19): siRNA sense strand
agaaggccaucaucuuggu

SEQ ID NO: 1531472 - RNA, 19 nt, Homo sapiens
  misc_RNA (1)...(19): siRNA sense strand
gucagugauuuaucugugu

SEQ ID NO: 1531473 - RNA, 19 nt, Homo sapiens
  misc_RNA (1)...(19): siRNA sense strand
ugucugcagucagugguaa

SEQ ID NO: 1531474 - RNA, 19 nt, Homo sapiens
  misc_RNA (1)...(19): siRNA sense strand
uacugcaguuucuagcuuu

SEQ ID NO: 1531475 - RNA, 19 nt, Homo sapiens
  misc_RNA (1)...(19): siRNA sense strand
ugcuggcucuccucucuuu

SEQ ID NO: 1531476 - RNA, 19 nt, Homo sapiens
  misc_RNA (1)...(19): siRNA sense strand
ccacagaauguaucagaac

SEQ ID NO: 1531477 - RNA, 19 nt, Homo sapiens
  misc_RNA (1)...(19): siRNA sense strand
cuguagggcucuccagcuu

SEQ ID NO: 1531478 - RNA, 19 nt, Homo sapiens
  misc_RNA (1)...(19): siRNA sense strand
cucagugucuucuauugug

SEQ ID NO: 1531479 - RNA, 19 nt, Homo sapiens
  misc_RNA (1)...(19): siRNA sense strand
cuaccuggcucagugucuu

SEQ ID NO: 1531480 - RNA, 19 nt, Homo sapiens
  misc_RNA (1)...(19): siRNA sense strand
gaaugcugccaccuuaugg

SEQ ID NO: 1531481 - RNA, 19 nt, Homo sapiens
  misc_RNA (1)...(19): siRNA sense strand
ucagugucuucuauugugu

SEQ ID NO: 1531482 - RNA, 19 nt, Homo sapiens
  misc_RNA (1)...(19): siRNA sense strand
gugugggagucagugauuu

SEQ ID NO: 1531483 - RNA, 19 nt, Homo sapiens
  misc_RNA (1)...(19): siRNA sense strand
gcaggcaauggcuucauca

SEQ ID NO: 1531484 - RNA, 19 nt, Homo sapiens
  misc_RNA (1)...(19): siRNA sense strand
ugacaagaaggccaucauc

SEQ ID NO: 1531485 - RNA, 19 nt, Homo sapiens
  misc_RNA (1)...(19): siRNA sense strand
gcuucugucugcagucagu

SEQ ID NO: 1531486 - RNA, 19 nt, Homo sapiens
  misc_RNA (1)...(19): siRNA sense strand
cacagaauguaucagaacu

SEQ ID NO: 1531487 - RNA, 19 nt, Homo sapiens
  misc_RNA (1)...(19): siRNA sense strand
gaaggccaucaucuugguu

SEQ ID NO: 1531488 - RNA, 19 nt, Homo sapiens
  misc_RNA (1)...(19): siRNA sense strand
uaccauggaugcucuucag

SEQ ID NO: 1531489 - RNA, 19 nt, Homo sapiens
  misc_RNA (1)...(19): siRNA sense strand
gcaguucaccccaucauuc

SEQ ID NO: 1531490 - RNA, 19 nt, Homo sapiens
  misc_RNA (1)...(19): siRNA sense strand
acagaauguaucagaacua

SEQ ID NO: 1531491 - RNA, 19 nt, Homo sapiens
  misc_RNA (1)...(19): siRNA sense strand
uuucauaggcaaccacaga

SEQ ID NO: 1531492 - RNA, 19 nt, Homo sapiens
  misc_RNA (1)...(19): siRNA sense strand
gugcugaagagucgucguu

SEQ ID NO: 1531493 - RNA, 19 nt, Homo sapiens
  misc_RNA (1)...(19): siRNA sense strand
ucacccacccugucuucuu

SEQ ID NO: 1531494 - RNA, 19 nt, Homo sapiens
  misc_RNA (1)...(19): siRNA sense strand
ccuuacaaccucaggauuc

SEQ ID NO: 1531495 - RNA, 19 nt, Homo sapiens
  misc_RNA (1)...(19): siRNA sense strand
ggaaugucacuggcgauag

SEQ ID NO: 1531496 - RNA, 19 nt, Homo sapiens
  misc_RNA (1)...(19): siRNA sense strand
gaaaugaucuuaguacauc

SEQ ID NO: 1531497 - RNA, 19 nt, Homo sapiens
  misc_RNA (1)...(19): siRNA sense strand
ggcauggacucauauagua

SEQ ID NO: 1531498 - RNA, 19 nt, Homo sapiens
  misc_RNA (1)...(19): siRNA sense strand
gaccagcgcaguacuguua

SEQ ID NO: 1531499 - RNA, 19 nt, Homo sapiens
  misc_RNA (1)...(19): siRNA sense strand
ccaagcagcucugaaagaa

SEQ ID NO: 1531500 - RNA, 19 nt, Homo sapiens
  misc_RNA (1)...(19): siRNA sense strand
uaaaagcccugcuguaauu

SEQ ID NO: 1531501 - RNA, 19 nt, Homo sapiens
  misc_RNA (1)...(19): siRNA sense strand
cacaaggcauggacucaua

SEQ ID NO: 1531502 - RNA, 19 nt, Homo sapiens
  misc_RNA (1)...(19): siRNA sense strand
uagaagcacggaugaaaua

SEQ ID NO: 1531503 - RNA, 19 nt, Homo sapiens
  misc_RNA (1)...(19): siRNA sense strand
ggagauacuuguguaguca

SEQ ID NO: 1531504 - RNA, 19 nt, Homo sapiens
  misc_RNA (1)...(19): siRNA sense strand
aaacauagaugagcaaagg

SEQ ID NO: 1531505 - RNA, 19 nt, Homo sapiens
  misc_RNA (1)...(19): siRNA sense strand
ucagaaacuugcauaugaa

SEQ ID NO: 1531506 - RNA, 19 nt, Homo sapiens
  misc_RNA (1)...(19): siRNA sense strand
cucagaaacuugcauauga

SEQ ID NO: 1531507 - RNA, 19 nt, Homo sapiens
  misc_RNA (1)...(19): siRNA sense strand
ucagagagaguauaacaaa

SEQ ID NO: 1531508 - RNA, 19 nt, Homo sapiens
  misc_RNA (1)...(19): siRNA sense strand
ucuaaacucugccuugaug

SEQ ID NO: 1531509 - RNA, 19 nt, Homo sapiens
  misc_RNA (1)...(19): siRNA sense strand
aagcacggaugaaauaaga

SEQ ID NO: 1531510 - RNA, 19 nt, Homo sapiens
  misc_RNA (1)...(19): siRNA sense strand
acuguuaacuguucugauu

SEQ ID NO: 1531511 - RNA, 19 nt, Homo sapiens
  misc_RNA (1)...(19): siRNA sense strand
caauguaaacugucaaaga

SEQ ID NO: 1531512 - RNA, 19 nt, Homo sapiens
  misc_RNA (1)...(19): siRNA sense strand
uguaaacugucaaagacua

SEQ ID NO: 1531513 - RNA, 19 nt, Homo sapiens
  misc_RNA (1)...(19): siRNA sense strand
caagugugauuaugauagu

SEQ ID NO: 1531514 - RNA, 19 nt, Homo sapiens
  misc_RNA (1)...(19): siRNA sense strand
gaugaagauuguagaagca

SEQ ID NO: 1531515 - RNA, 19 nt, Homo sapiens
  misc_RNA (1)...(19): siRNA sense strand
uaugggagauacuugugua

SEQ ID NO: 1531516 - RNA, 19 nt, Homo sapiens
  misc_RNA (1)...(19): siRNA sense strand
aaaccaauguaaacuguca

SEQ ID NO: 1531517 - RNA, 19 nt, Homo sapiens
  misc_RNA (1)...(19): siRNA sense strand
gaaaaugauuaccaagaga

SEQ ID NO: 1531518 - RNA, 19 nt, Homo sapiens
  misc_RNA (1)...(19): siRNA sense strand
ucagaaauauccagcaaac

SEQ ID NO: 1531519 - RNA, 19 nt, Homo sapiens
  misc_RNA (1)...(19): siRNA sense strand
agaaaccaauguaaacugu

SEQ ID NO: 1531520 - RNA, 19 nt, Homo sapiens
  misc_RNA (1)...(19): siRNA sense strand
caagagaagacaccacaga

SEQ ID NO: 1531521 - RNA, 19 nt, Homo sapiens
  misc_RNA (1)...(19): siRNA sense strand
acugacagaugcauuagaa

SEQ ID NO: 1531522 - RNA, 19 nt, Homo sapiens
  misc_RNA (1)...(19): siRNA sense strand
ucaguggaguuaccuucua

SEQ ID NO: 1531523 - RNA, 19 nt, Homo sapiens
  misc_RNA (1)...(19): siRNA sense strand
uaaacagucuaggaaauag

SEQ ID NO: 1531524 - RNA, 19 nt, Homo sapiens
  misc_RNA (1)...(19): siRNA sense strand
ugaauaaugaccugcaauu

SEQ ID NO: 1531525 - RNA, 19 nt, Homo sapiens
  misc_RNA (1)...(19): siRNA sense strand
acucauccauuauguguug

SEQ ID NO: 1531526 - RNA, 19 nt, Homo sapiens
  misc_RNA (1)...(19): siRNA sense strand
gagcaaaggauaaagaaaa

SEQ ID NO: 1531527 - RNA, 19 nt, Homo sapiens
  misc_RNA (1)...(19): siRNA sense strand
gaugagcaaaggauaaaga

SEQ ID NO: 1531528 - RNA, 19 nt, Homo sapiens
  misc_RNA (1)...(19): siRNA sense strand
gaaccagucuacuccuaac

SEQ ID NO: 1531529 - RNA, 19 nt, Homo sapiens
  misc_RNA (1)...(19): siRNA sense strand
caguggaguuaccuucuaa

SEQ ID NO: 1531530 - RNA, 19 nt, Homo sapiens
  misc_RNA (1)...(19): siRNA sense strand
gggagauacuuguguaguc

SEQ ID NO: 1531531 - RNA, 19 nt, Homo sapiens
  misc_RNA (1)...(19): siRNA sense strand
cagaaugaccagcgcagua

SEQ ID NO: 1531532 - RNA, 19 nt, Homo sapiens
  misc_RNA (1)...(19): siRNA sense strand
gaaauauccagcaaacucu

SEQ ID NO: 1531533 - RNA, 19 nt, Homo sapiens
  misc_RNA (1)...(19): siRNA sense strand
gugaaccagucuacuccua

SEQ ID NO: 1531534 - RNA, 19 nt, Homo sapiens
  misc_RNA (1)...(19): siRNA sense strand
gauuaaacagucuaggaaa

SEQ ID NO: 1531535 - RNA, 19 nt, Homo sapiens
  misc_RNA (1)...(19): siRNA sense strand
cuccuaaccuucuaucaga

SEQ ID NO: 1531536 - RNA, 19 nt, Homo sapiens
  misc_RNA (1)...(19): siRNA sense strand
aaacaagaaguaucagaga

SEQ ID NO: 1531537 - RNA, 19 nt, Homo sapiens
  misc_RNA (1)...(19): siRNA sense strand
cagaugcauuagaaacauu

SEQ ID NO: 1531538 - RNA, 19 nt, Homo sapiens
  misc_RNA (1)...(19): siRNA sense strand
caaugucgccucacugugu

SEQ ID NO: 1531539 - RNA, 19 nt, Homo sapiens
  misc_RNA (1)...(19): siRNA sense strand
guucugaguuuaaggugau

SEQ ID NO: 1531540 - RNA, 19 nt, Homo sapiens
  misc_RNA (1)...(19): siRNA sense strand
gaagaugugaaccagucua

SEQ ID NO: 1531541 - RNA, 19 nt, Homo sapiens
  misc_RNA (1)...(19): siRNA sense strand
guaaacugucaaagacuaa

SEQ ID NO: 1531542 - RNA, 19 nt, Homo sapiens
  misc_RNA (1)...(19): siRNA sense strand
gagaagacaccacagaaaa

SEQ ID NO: 1531543 - RNA, 19 nt, Homo sapiens
  misc_RNA (1)...(19): siRNA sense strand
guagaagcacggaugaaau

SEQ ID NO: 1531544 - RNA, 19 nt, Homo sapiens
  misc_RNA (1)...(19): siRNA sense strand
gaugauacagaaaccaaug

SEQ ID NO: 1531545 - RNA, 19 nt, Homo sapiens
  misc_RNA (1)...(19): siRNA sense strand
uuccuugcuuuccaaauua

SEQ ID NO: 1531546 - RNA, 19 nt, Homo sapiens
  misc_RNA (1)...(19): siRNA sense strand
gauuugggacauuauuuga

SEQ ID NO: 1531547 - RNA, 19 nt, Homo sapiens
  misc_RNA (1)...(19): siRNA sense strand
uccauuauguguugauguu

SEQ ID NO: 1531548 - RNA, 19 nt, Homo sapiens
  misc_RNA (1)...(19): siRNA sense strand
agaaguaucagagagagua

SEQ ID NO: 1531549 - RNA, 19 nt, Homo sapiens
  misc_RNA (1)...(19): siRNA sense strand
aaacucugccuugaugaua

SEQ ID NO: 1531550 - RNA, 19 nt, Homo sapiens
  misc_RNA (1)...(19): siRNA sense strand
caaggcauggacucauaua

SEQ ID NO: 1531551 - RNA, 19 nt, Homo sapiens
  misc_RNA (1)...(19): siRNA sense strand
cuucuaaacucugccuuga

SEQ ID NO: 1531552 - RNA, 19 nt, Homo sapiens
  misc_RNA (1)...(19): siRNA sense strand
gcacggaugaaauaagaca

SEQ ID NO: 1531553 - RNA, 19 nt, Homo sapiens
  misc_RNA (1)...(19): siRNA sense strand
aauguaaacugucaaagac

SEQ ID NO: 1531554 - RNA, 19 nt, Homo sapiens
  misc_RNA (1)...(19): siRNA sense strand
uuucacaucuggaauagca

SEQ ID NO: 1531555 - RNA, 19 nt, Homo sapiens
  misc_RNA (1)...(19): siRNA sense strand
ugucaaagacuaaguagca

SEQ ID NO: 1531556 - RNA, 19 nt, Homo sapiens
  misc_RNA (1)...(19): siRNA sense strand
uacacgauuugggacauua

SEQ ID NO: 1531557 - RNA, 19 nt, Homo sapiens
  misc_RNA (1)...(19): siRNA sense strand
uuacacucauccauuaugu

SEQ ID NO: 1531558 - RNA, 19 nt, Homo sapiens
  misc_RNA (1)...(19): siRNA sense strand
agagaagacaccacagaaa

SEQ ID NO: 1531559 - RNA, 19 nt, Homo sapiens
  misc_RNA (1)...(19): siRNA sense strand
uaucagagagaguauaaca

SEQ ID NO: 1531560 - RNA, 19 nt, Homo sapiens
  misc_RNA (1)...(19): siRNA sense strand
gaaagauuaaacagucuag

SEQ ID NO: 1531561 - RNA, 19 nt, Homo sapiens
  misc_RNA (1)...(19): siRNA sense strand
agaaauauccagcaaacuc

SEQ ID NO: 1531562 - RNA, 19 nt, Homo sapiens
  misc_RNA (1)...(19): siRNA sense strand
aagcagcucugaaagaaaa

SEQ ID NO: 1531563 - RNA, 19 nt, Homo sapiens
  misc_RNA (1)...(19): siRNA sense strand
gacagaugcauuagaaaca

SEQ ID NO: 1531564 - RNA, 19 nt, Homo sapiens
  misc_RNA (1)...(19): siRNA sense strand
gcauggacucauauaguau

SEQ ID NO: 1531565 - RNA, 19 nt, Homo sapiens
  misc_RNA (1)...(19): siRNA sense strand
gaagcacggaugaaauaag

SEQ ID NO: 1531566 - RNA, 19 nt, Homo sapiens
  misc_RNA (1)...(19): siRNA sense strand
cagaaacuugcauaugaaa

SEQ ID NO: 1531567 - RNA, 19 nt, Homo sapiens
  misc_RNA (1)...(19): siRNA sense strand
cuaaauuucacaucuggaa

SEQ ID NO: 1531568 - RNA, 19 nt, Homo sapiens
  misc_RNA (1)...(19): siRNA sense strand
auuccuugcuuuccaaauu

SEQ ID NO: 1531569 - RNA, 19 nt, Homo sapiens
  misc_RNA (1)...(19): siRNA sense strand
caaacucuaucugguguac

SEQ ID NO: 1531570 - RNA, 19 nt, Homo sapiens
  misc_RNA (1)...(19): siRNA sense strand
ccaaacaagaaguaucaga

SEQ ID NO: 1531571 - RNA, 19 nt, Homo sapiens
  misc_RNA (1)...(19): siRNA sense strand
uaugauaguaugggagaua

SEQ ID NO: 1531572 - RNA, 19 nt, Homo sapiens
  misc_RNA (1)...(19): siRNA sense strand
cauagaugagcaaaggaua

SEQ ID NO: 1531573 - RNA, 19 nt, Homo sapiens
  misc_RNA (1)...(19): siRNA sense strand
cagacuacauuacugaaaa

SEQ ID NO: 1531574 - RNA, 19 nt, Homo sapiens
  misc_RNA (1)...(19): siRNA sense strand
acaagaaguaucagagaga

SEQ ID NO: 1531575 - RNA, 19 nt, Homo sapiens
  misc_RNA (1)...(19): siRNA sense strand
uagaugagcaaaggauaaa

SEQ ID NO: 1531576 - RNA, 19 nt, Homo sapiens
  misc_RNA (1)...(19): siRNA sense strand
ccuucuaacagacauauuu

SEQ ID NO: 1531577 - RNA, 19 nt, Homo sapiens
  misc_RNA (1)...(19): siRNA sense strand
gaaguaucagagagaguau

SEQ ID NO: 1531578 - RNA, 19 nt, Homo sapiens
  misc_RNA (1)...(19): siRNA sense strand
guuccagaguugacuuuua

SEQ ID NO: 1531579 - RNA, 19 nt, Homo sapiens
  misc_RNA (1)...(19): siRNA sense strand
ugaaccagucuacuccuaa

SEQ ID NO: 1531580 - RNA, 19 nt, Homo sapiens
  misc_RNA (1)...(19): siRNA sense strand
gaugugaaccagucuacuc

SEQ ID NO: 1531581 - RNA, 19 nt, Homo sapiens
  misc_RNA (1)...(19): siRNA sense strand
cgauuugggacauuauuug

SEQ ID NO: 1531582 - RNA, 19 nt, Homo sapiens
  misc_RNA (1)...(19): siRNA sense strand
caguuucacuccaucaucu

SEQ ID NO: 1531583 - RNA, 19 nt, Homo sapiens
  misc_RNA (1)...(19): siRNA sense strand
ccagucuacuccuaaccuu

SEQ ID NO: 1531584 - RNA, 19 nt, Homo sapiens
  misc_RNA (1)...(19): siRNA sense strand
aagacuaaguagcaaggaa

SEQ ID NO: 1531585 - RNA, 19 nt, Homo sapiens
  misc_RNA (1)...(19): siRNA sense strand
aaugucgccucacugugua

SEQ ID NO: 1531586 - RNA, 19 nt, Homo sapiens
  misc_RNA (1)...(19): siRNA sense strand
cuacacgauuugggacauu

SEQ ID NO: 1531587 - RNA, 19 nt, Homo sapiens
  misc_RNA (1)...(19): siRNA sense strand
guacaucuuuugagaacga

SEQ ID NO: 1531588 - RNA, 19 nt, Homo sapiens
  misc_RNA (1)...(19): siRNA sense strand
aaugucagccaaacaagaa

SEQ ID NO: 1531589 - RNA, 19 nt, Homo sapiens
  misc_RNA (1)...(19): siRNA sense strand
aaacacucaauacagcaua

SEQ ID NO: 1531590 - RNA, 19 nt, Homo sapiens
  misc_RNA (1)...(19): siRNA sense strand
uguagaagcacggaugaaa

SEQ ID NO: 1531591 - RNA, 19 nt, Homo sapiens
  misc_RNA (1)...(19): siRNA sense strand
cugcuguaauuauggauga

SEQ ID NO: 1531592 - RNA, 19 nt, Homo sapiens
  misc_RNA (1)...(19): siRNA sense strand
agauuaaacagucuaggaa

SEQ ID NO: 1531593 - RNA, 19 nt, Homo sapiens
  misc_RNA (1)...(19): siRNA sense strand
caagcagcucugaaagaaa

SEQ ID NO: 1531594 - RNA, 19 nt, Homo sapiens
  misc_RNA (1)...(19): siRNA sense strand
uacccaagcagcucugaaa

SEQ ID NO: 1531595 - RNA, 19 nt, Homo sapiens
  misc_RNA (1)...(19): siRNA sense strand
gaucuuaguacaucuuuug

SEQ ID NO: 1531596 - RNA, 19 nt, Homo sapiens
  misc_RNA (1)...(19): siRNA sense strand
uagcuuggcucucuaccua

SEQ ID NO: 1531597 - RNA, 19 nt, Homo sapiens
  misc_RNA (1)...(19): siRNA sense strand
ggacaagaaagccagauga

SEQ ID NO: 1531598 - RNA, 19 nt, Homo sapiens
  misc_RNA (1)...(19): siRNA sense strand
auacuucccuggacaagaa

SEQ ID NO: 1531599 - RNA, 19 nt, Homo sapiens
  misc_RNA (1)...(19): siRNA sense strand
gguccuagcuuggcucucu

SEQ ID NO: 1531600 - RNA, 19 nt, Homo sapiens
  misc_RNA (1)...(19): siRNA sense strand
gauucuagccuugguccua

SEQ ID NO: 1531601 - RNA, 19 nt, Homo sapiens
  misc_RNA (1)...(19): siRNA sense strand
ccugggcgcuauuguguca

SEQ ID NO: 1531602 - RNA, 19 nt, Homo sapiens
  misc_RNA (1)...(19): siRNA sense strand
caaauacuucccuggacaa

SEQ ID NO: 1531603 - RNA, 19 nt, Homo sapiens
  misc_RNA (1)...(19): siRNA sense strand
ucauugaggguguggguaa

SEQ ID NO: 1531604 - RNA, 19 nt, Homo sapiens
  misc_RNA (1)...(19): siRNA sense strand
ucugaugucacccucauug

SEQ ID NO: 1531605 - RNA, 19 nt, Homo sapiens
  misc_RNA (1)...(19): siRNA sense strand
uugaggguguggguaauga

SEQ ID NO: 1531606 - RNA, 19 nt, Homo sapiens
  misc_RNA (1)...(19): siRNA sense strand
gaacauuaccgacaacugu

SEQ ID NO: 1531607 - RNA, 19 nt, Homo sapiens
  misc_RNA (1)...(19): siRNA sense strand
uagcuuggcucucuaccua

SEQ ID NO: 1531608 - RNA, 19 nt, Homo sapiens
  misc_RNA (1)...(19): siRNA sense strand
ggacaagaaagccagauga

SEQ ID NO: 1531609 - RNA, 19 nt, Homo sapiens
  misc_RNA (1)...(19): siRNA sense strand
auacuucccuggacaagaa

SEQ ID NO: 1531610 - RNA, 19 nt, Homo sapiens
  misc_RNA (1)...(19): siRNA sense strand
gaaagccagaugaaacuga

SEQ ID NO: 1531611 - RNA, 19 nt, Homo sapiens
  misc_RNA (1)...(19): siRNA sense strand
caagaaagccagaugaaac

SEQ ID NO: 1531612 - RNA, 19 nt, Homo sapiens
  misc_RNA (1)...(19): siRNA sense strand
ugggauguauggacgauaa

SEQ ID NO: 1531613 - RNA, 19 nt, Homo sapiens
  misc_RNA (1)...(19): siRNA sense strand
gacaagaaagccagaugaa

SEQ ID NO: 1531614 - RNA, 19 nt, Homo sapiens
  misc_RNA (1)...(19): siRNA sense strand
gguccuagcuuggcucucu

SEQ ID NO: 1531615 - RNA, 19 nt, Homo sapiens
  misc_RNA (1)...(19): siRNA sense strand
gguacuuccgaaucaauua

SEQ ID NO: 1531616 - RNA, 19 nt, Homo sapiens
  misc_RNA (1)...(19): siRNA sense strand
gcacacugcguucucugaa

SEQ ID NO: 1531617 - RNA, 19 nt, Homo sapiens
  misc_RNA (1)...(19): siRNA sense strand
cauggugccugucuuugug

SEQ ID NO: 1531618 - RNA, 19 nt, Homo sapiens
  misc_RNA (1)...(19): siRNA sense strand
gggagucaccgucuucuuc

SEQ ID NO: 1531619 - RNA, 19 nt, Homo sapiens
  misc_RNA (1)...(19): siRNA sense strand
ggagucaccgucuucuuca

SEQ ID NO: 1531620 - RNA, 19 nt, Homo sapiens
  misc_RNA (1)...(19): siRNA sense strand
gauucuagccuugguccua

SEQ ID NO: 1531621 - RNA, 19 nt, Homo sapiens
  misc_RNA (1)...(19): siRNA sense strand
ccuaguauuugggauguau

SEQ ID NO: 1531622 - RNA, 19 nt, Homo sapiens
  misc_RNA (1)...(19): siRNA sense strand
ccugggcgcuauuguguca

SEQ ID NO: 1531623 - RNA, 19 nt, Homo sapiens
  misc_RNA (1)...(19): siRNA sense strand
acaagaaagccagaugaaa

SEQ ID NO: 1531624 - RNA, 19 nt, Homo sapiens
  misc_RNA (1)...(19): siRNA sense strand
caaauacuucccuggacaa

SEQ ID NO: 1531625 - RNA, 19 nt, Homo sapiens
  misc_RNA (1)...(19): siRNA sense strand
cuucagcuuccuaguauuu

SEQ ID NO: 1531626 - RNA, 19 nt, Homo sapiens
  misc_RNA (1)...(19): siRNA sense strand
ucauugaggguguggguaa

SEQ ID NO: 1531627 - RNA, 19 nt, Homo sapiens
  misc_RNA (1)...(19): siRNA sense strand
aaagccagaugaaacugau

SEQ ID NO: 1531628 - RNA, 19 nt, Homo sapiens
  misc_RNA (1)...(19): siRNA sense strand
cgaaucaauuaccgccaau

SEQ ID NO: 1531629 - RNA, 19 nt, Homo sapiens
  misc_RNA (1)...(19): siRNA sense strand
ccucauggugccugucuuu

SEQ ID NO: 1531630 - RNA, 19 nt, Homo sapiens
  misc_RNA (1)...(19): siRNA sense strand
cuucuucagcuuccuagua

SEQ ID NO: 1531631 - RNA, 19 nt, Homo sapiens
  misc_RNA (1)...(19): siRNA sense strand
ggucugguacuuccgaauc

SEQ ID NO: 1531632 - RNA, 19 nt, Homo sapiens
  misc_RNA (1)...(19): siRNA sense strand
ucugaugucacccucauug

SEQ ID NO: 1531633 - RNA, 19 nt, Homo sapiens
  misc_RNA (1)...(19): siRNA sense strand
uucuucagcuuccuaguau

SEQ ID NO: 1531634 - RNA, 19 nt, Homo sapiens
  misc_RNA (1)...(19): siRNA sense strand
uguuggguguggucuggua

SEQ ID NO: 1531635 - RNA, 19 nt, Homo sapiens
  misc_RNA (1)...(19): siRNA sense strand
uugaggguguggguaauga

SEQ ID NO: 1531636 - RNA, 19 nt, Homo sapiens
  misc_RNA (1)...(19): siRNA sense strand
caaugugggcagccucaug

SEQ ID NO: 1531637 - RNA, 19 nt, Homo sapiens
  misc_RNA (1)...(19): siRNA sense strand
guaggaagguugcugaaua

SEQ ID NO: 1531638 - RNA, 19 nt, Homo sapiens
  misc_RNA (1)...(19): siRNA sense strand
gaacacaacacuccugaua

SEQ ID NO: 1531639 - RNA, 19 nt, Homo sapiens
  misc_RNA (1)...(19): siRNA sense strand
ggucacaacugcccucaua

SEQ ID NO: 1531640 - RNA, 19 nt, Homo sapiens
  misc_RNA (1)...(19): siRNA sense strand
gaucaaauuugcccugaaa

SEQ ID NO: 1531641 - RNA, 19 nt, Homo sapiens
  misc_RNA (1)...(19): siRNA sense strand
gaccagaaauuaccaaaga

SEQ ID NO: 1531642 - RNA, 19 nt, Homo sapiens
  misc_RNA (1)...(19): siRNA sense strand
caacugcccucauaaauag

SEQ ID NO: 1531643 - RNA, 19 nt, Homo sapiens
  misc_RNA (1)...(19): siRNA sense strand
uaaaguauguugcugugua

SEQ ID NO: 1531644 - RNA, 19 nt, Homo sapiens
  misc_RNA (1)...(19): siRNA sense strand
gauuaaaccugaugagaau

SEQ ID NO: 1531645 - RNA, 19 nt, Homo sapiens
  misc_RNA (1)...(19): siRNA sense strand
gaaggaagagccaggauuu

SEQ ID NO: 1531646 - RNA, 19 nt, Homo sapiens
  misc_RNA (1)...(19): siRNA sense strand
gaagguugcugaauaugga

SEQ ID NO: 1531647 - RNA, 19 nt, Homo sapiens
  misc_RNA (1)...(19): siRNA sense strand
gaagauuguuguacgagaa

SEQ ID NO: 1531648 - RNA, 19 nt, Homo sapiens
  misc_RNA (1)...(19): siRNA sense strand
acacaacacuccugauaaa

SEQ ID NO: 1531649 - RNA, 19 nt, Homo sapiens
  misc_RNA (1)...(19): siRNA sense strand
caucagcucugguuuaaau

SEQ ID NO: 1531650 - RNA, 19 nt, Homo sapiens
  misc_RNA (1)...(19): siRNA sense strand
ccucauaaauagugacaua

SEQ ID NO: 1531651 - RNA, 19 nt, Homo sapiens
  misc_RNA (1)...(19): siRNA sense strand
caaacugucucuaaagaug

SEQ ID NO: 1531652 - RNA, 19 nt, Homo sapiens
  misc_RNA (1)...(19): siRNA sense strand
gcaagcagcauccaauuga

SEQ ID NO: 1531653 - RNA, 19 nt, Homo sapiens
  misc_RNA (1)...(19): siRNA sense strand
cgagaauccuguaucuuaa

SEQ ID NO: 1531654 - RNA, 19 nt, Homo sapiens
  misc_RNA (1)...(19): siRNA sense strand
gcacaucaucuuagcagua

SEQ ID NO: 1531655 - RNA, 19 nt, Homo sapiens
  misc_RNA (1)...(19): siRNA sense strand
gcaauaugacuaugacaaa

SEQ ID NO: 1531656 - RNA, 19 nt, Homo sapiens
  misc_RNA (1)...(19): siRNA sense strand
gaugaucauuacagacuaa

SEQ ID NO: 1531657 - RNA, 19 nt, Homo sapiens
  misc_RNA (1)...(19): siRNA sense strand
gagagaauguuagaagaga

SEQ ID NO: 1531658 - RNA, 19 nt, Homo sapiens
  misc_RNA (1)...(19): siRNA sense strand
gccaucagcucugguuuaa

SEQ ID NO: 1531659 - RNA, 19 nt, Homo sapiens
  misc_RNA (1)...(19): siRNA sense strand
gccaaacugucucuaaaga

SEQ ID NO: 1531660 - RNA, 19 nt, Homo sapiens
  misc_RNA (1)...(19): siRNA sense strand
gaccaaguauaaaguaugu

SEQ ID NO: 1531661 - RNA, 19 nt, Homo sapiens
  misc_RNA (1)...(19): siRNA sense strand
gcagaugcucuucgcaaua

SEQ ID NO: 1531662 - RNA, 19 nt, Homo sapiens
  misc_RNA (1)...(19): siRNA sense strand
cuugaugcauccaaauuua

SEQ ID NO: 1531663 - RNA, 19 nt, Homo sapiens
  misc_RNA (1)...(19): siRNA sense strand
uaagaauccuguacaaugg

SEQ ID NO: 1531664 - RNA, 19 nt, Homo sapiens
  misc_RNA (1)...(19): siRNA sense strand
aaacuggucuuaacagaag

SEQ ID NO: 1531665 - RNA, 19 nt, Homo sapiens
  misc_RNA (1)...(19): siRNA sense strand
gggcuuugcuugcacaguu

SEQ ID NO: 1531666 - RNA, 19 nt, Homo sapiens
  misc_RNA (1)...(19): siRNA sense strand
guacgagaauccuguaucu

SEQ ID NO: 1531667 - RNA, 19 nt, Homo sapiens
  misc_RNA (1)...(19): siRNA sense strand
ugauaaagcucagggaaau

SEQ ID NO: 1531668 - RNA, 19 nt, Homo sapiens
  misc_RNA (1)...(19): siRNA sense strand
acgagaauccuguaucuua

SEQ ID NO: 1531669 - RNA, 19 nt, Homo sapiens
  misc_RNA (1)...(19): siRNA sense strand
gugccaaacugucucuaaa

SEQ ID NO: 1531670 - RNA, 19 nt, Homo sapiens
  misc_RNA (1)...(19): siRNA sense strand
caggauuucucacugguuu

SEQ ID NO: 1531671 - RNA, 19 nt, Homo sapiens
  misc_RNA (1)...(19): siRNA sense strand
guacaauggaccagaaauu

SEQ ID NO: 1531672 - RNA, 19 nt, Homo sapiens
  misc_RNA (1)...(19): siRNA sense strand
cgaaagacuuggugaaggu

SEQ ID NO: 1531673 - RNA, 19 nt, Homo sapiens
  misc_RNA (1)...(19): siRNA sense strand
cagaugcucuucgcaauau

SEQ ID NO: 1531674 - RNA, 19 nt, Homo sapiens
  misc_RNA (1)...(19): siRNA sense strand
cagacuaaaugaugaacuu

SEQ ID NO: 1531675 - RNA, 19 nt, Homo sapiens
  misc_RNA (1)...(19): siRNA sense strand
uaggaagguugcugaauau

SEQ ID NO: 1531676 - RNA, 19 nt, Homo sapiens
  misc_RNA (1)...(19): siRNA sense strand
gcuguucccugaugagaga

SEQ ID NO: 1531677 - RNA, 19 nt, Homo sapiens
  misc_RNA (1)...(19): siRNA sense strand
acaacugcccucauaaaua

SEQ ID NO: 1531678 - RNA, 19 nt, Homo sapiens
  misc_RNA (1)...(19): siRNA sense strand
gugaugaaguguuggaaau

SEQ ID NO: 1531679 - RNA, 19 nt, Homo sapiens
  misc_RNA (1)...(19): siRNA sense strand
ugaaaggaaucgagacauc

SEQ ID NO: 1531680 - RNA, 19 nt, Homo sapiens
  misc_RNA (1)...(19): siRNA sense strand
guacccaggugaaacugaa

SEQ ID NO: 1531681 - RNA, 19 nt, Homo sapiens
  misc_RNA (1)...(19): siRNA sense strand
gcaacacacugggauaugg

SEQ ID NO: 1531682 - RNA, 19 nt, Homo sapiens
  misc_RNA (1)...(19): siRNA sense strand
gaccauagaggaagacaga

SEQ ID NO: 1531683 - RNA, 19 nt, Homo sapiens
  misc_RNA (1)...(19): siRNA sense strand
cuauugcgguccaaacuuu

SEQ ID NO: 1531684 - RNA, 19 nt, Homo sapiens
  misc_RNA (1)...(19): siRNA sense strand
uacaauggaccagaaauua

SEQ ID NO: 1531685 - RNA, 19 nt, Homo sapiens
  misc_RNA (1)...(19): siRNA sense strand
uaacagaaggagagagaaa

SEQ ID NO: 1531686 - RNA, 19 nt, Homo sapiens
  misc_RNA (1)...(19): siRNA sense strand
gaagagccaggauuucuca

SEQ ID NO: 1531687 - RNA, 19 nt, Homo sapiens
  misc_RNA (1)...(19): siRNA sense strand
ggaugaucauuacagacua

SEQ ID NO: 1531688 - RNA, 19 nt, Homo sapiens
  misc_RNA (1)...(19): siRNA sense strand
uggcagccguagugucuua

SEQ ID NO: 1531689 - RNA, 19 nt, Homo sapiens
  misc_RNA (1)...(19): siRNA sense strand
guuagcuuguuccauguua

SEQ ID NO: 1531690 - RNA, 19 nt, Homo sapiens
  misc_RNA (1)...(19): siRNA sense strand
gaaaggaaucgagacauca

SEQ ID NO: 1531691 - RNA, 19 nt, Homo sapiens
  misc_RNA (1)...(19): siRNA sense strand
uuaagaauccuguacaaug

SEQ ID NO: 1531692 - RNA, 19 nt, Homo sapiens
  misc_RNA (1)...(19): siRNA sense strand
uaaagaaacgguccauauc

SEQ ID NO: 1531693 - RNA, 19 nt, Homo sapiens
  misc_RNA (1)...(19): siRNA sense strand
uuaaagaaacgguccauau

SEQ ID NO: 1531694 - RNA, 19 nt, Homo sapiens
  misc_RNA (1)...(19): siRNA sense strand
caagcagcauccaauugaa

SEQ ID NO: 1531695 - RNA, 19 nt, Homo sapiens
  misc_RNA (1)...(19): siRNA sense strand
cagacggcguugcugcuua

SEQ ID NO: 1531696 - RNA, 19 nt, Homo sapiens
  misc_RNA (1)...(19): siRNA sense strand
ucaggaggcuugcccuuuc

SEQ ID NO: 1531697 - RNA, 19 nt, Homo sapiens
  misc_RNA (1)...(19): siRNA sense strand
cgucagagacaacuauaaa

SEQ ID NO: 1531698 - RNA, 19 nt, Homo sapiens
  misc_RNA (1)...(19): siRNA sense strand
gaugagagaauguuagaag

SEQ ID NO: 1531699 - RNA, 19 nt, Homo sapiens
  misc_RNA (1)...(19): siRNA sense strand
ucacaacugcccucauaaa

SEQ ID NO: 1531700 - RNA, 19 nt, Homo sapiens
  misc_RNA (1)...(19): siRNA sense strand
gaaauuaccaaagaagaag

SEQ ID NO: 1531701 - RNA, 19 nt, Homo sapiens
  misc_RNA (1)...(19): siRNA sense strand
gaacugguuggccgaaaga

SEQ ID NO: 1531702 - RNA, 19 nt, Homo sapiens
  misc_RNA (1)...(19): siRNA sense strand
caucuuagcaguauuugug

SEQ ID NO: 1531703 - RNA, 19 nt, Homo sapiens
  misc_RNA (1)...(19): siRNA sense strand
ggauauggcagccguagug

SEQ ID NO: 1531704 - RNA, 19 nt, Homo sapiens
  misc_RNA (1)...(19): siRNA sense strand
gggccuaacacaaacagua

SEQ ID NO: 1531705 - RNA, 19 nt, Homo sapiens
  misc_RNA (1)...(19): siRNA sense strand
agacggcguugcugcuuaa

SEQ ID NO: 1531706 - RNA, 19 nt, Homo sapiens
  misc_RNA (1)...(19): siRNA sense strand
acagucaccuucuccuuug

SEQ ID NO: 1531707 - RNA, 19 nt, Homo sapiens
  misc_RNA (1)...(19): siRNA sense strand
cgugcuagaccucaauuua

SEQ ID NO: 1531708 - RNA, 19 nt, Homo sapiens
  misc_RNA (1)...(19): siRNA sense strand
gaaguggccgugaacacaa

SEQ ID NO: 1531709 - RNA, 19 nt, Homo sapiens
  misc_RNA (1)...(19): siRNA sense strand
ugaggaugaucauuacaga

SEQ ID NO: 1531710 - RNA, 19 nt, Homo sapiens
  misc_RNA (1)...(19): siRNA sense strand
ggaacugguuggccgaaag

SEQ ID NO: 1531711 - RNA, 19 nt, Homo sapiens
  misc_RNA (1)...(19): siRNA sense strand
ucaccuucuuccaguguua

SEQ ID NO: 1531712 - RNA, 19 nt, Homo sapiens
  misc_RNA (1)...(19): siRNA sense strand
caucaucuuagcaguauuu

SEQ ID NO: 1531713 - RNA, 19 nt, Homo sapiens
  misc_RNA (1)...(19): siRNA sense strand
ucuuucaggugguauuuaa

SEQ ID NO: 1531714 - RNA, 19 nt, Homo sapiens
  misc_RNA (1)...(19): siRNA sense strand
ccaaguauaaaguauguug

SEQ ID NO: 1531715 - RNA, 19 nt, Homo sapiens
  misc_RNA (1)...(19): siRNA sense strand
guuggaaacuacuuugauc

SEQ ID NO: 1531716 - RNA, 19 nt, Homo sapiens
  misc_RNA (1)...(19): siRNA sense strand
gagaaggccaugguuaaug

SEQ ID NO: 1531717 - RNA, 19 nt, Homo sapiens
  misc_RNA (1)...(19): siRNA sense strand
gcucgcugccuguaccuua

SEQ ID NO: 1531718 - RNA, 19 nt, Homo sapiens
  misc_RNA (1)...(19): siRNA sense strand
ggugaaacugaaaucaaua

SEQ ID NO: 1531719 - RNA, 19 nt, Homo sapiens
  misc_RNA (1)...(19): siRNA sense strand
gaagguggaaggagauaca

SEQ ID NO: 1531720 - RNA, 19 nt, Homo sapiens
  misc_RNA (1)...(19): siRNA sense strand
ggagaaggccaugguuaau

SEQ ID NO: 1531721 - RNA, 19 nt, Homo sapiens
  misc_RNA (1)...(19): siRNA sense strand
cauaaauagugacauagca

SEQ ID NO: 1531722 - RNA, 19 nt, Homo sapiens
  misc_RNA (1)...(19): siRNA sense strand
gacuggaugugaugaagug

SEQ ID NO: 1531723 - RNA, 19 nt, Homo sapiens
  misc_RNA (1)...(19): siRNA sense strand
ugauuaaaccugaugagaa

SEQ ID NO: 1531724 - RNA, 19 nt, Homo sapiens
  misc_RNA (1)...(19): siRNA sense strand
gagcuaaaagucaguauuu

SEQ ID NO: 1531725 - RNA, 19 nt, Homo sapiens
  misc_RNA (1)...(19): siRNA sense strand
cacaucaucuuagcaguau

SEQ ID NO: 1531726 - RNA, 19 nt, Homo sapiens
  misc_RNA (1)...(19): siRNA sense strand
gcucuucgcaauaugacua

SEQ ID NO: 1531727 - RNA, 19 nt, Homo sapiens
  misc_RNA (1)...(19): siRNA sense strand
gccuguaccuuagauuuga

SEQ ID NO: 1531728 - RNA, 19 nt, Homo sapiens
  misc_RNA (1)...(19): siRNA sense strand
ggucgggauugcuucuuug

SEQ ID NO: 1531729 - RNA, 19 nt, Homo sapiens
  misc_RNA (1)...(19): siRNA sense strand
ucucacugguuuaaagauu

SEQ ID NO: 1531730 - RNA, 19 nt, Homo sapiens
  misc_RNA (1)...(19): siRNA sense strand
ggauuucucacugguuuaa

SEQ ID NO: 1531731 - RNA, 19 nt, Homo sapiens
  misc_RNA (1)...(19): siRNA sense strand
uagcaguauuugugacauu

SEQ ID NO: 1531732 - RNA, 19 nt, Homo sapiens
  misc_RNA (1)...(19): siRNA sense strand
gagagacauugaagguaca

SEQ ID NO: 1531733 - RNA, 19 nt, Homo sapiens
  misc_RNA (1)...(19): siRNA sense strand
gugcauacaccaacucaau

SEQ ID NO: 1531734 - RNA, 19 nt, Homo sapiens
  misc_RNA (1)...(19): siRNA sense strand
gaugaaguguuggaaaugc

SEQ ID NO: 1531735 - RNA, 19 nt, Homo sapiens
  misc_RNA (1)...(19): siRNA sense strand
uggagaaggccaugguuaa

SEQ ID NO: 1531736 - RNA, 19 nt, Homo sapiens
  misc_RNA (1)...(19): siRNA sense strand
ugcuagaccucaauuuaga

SEQ ID NO: 1531737 - RNA, 19 nt, Homo sapiens
  misc_RNA (1)...(19): siRNA sense strand
gaaagugcuucagcuaauu

SEQ ID NO: 1531738 - RNA, 19 nt, Homo sapiens
  misc_RNA (1)...(19): siRNA sense strand
gaucacagcugagcggaaa

SEQ ID NO: 1531739 - RNA, 19 nt, Homo sapiens
  misc_RNA (1)...(19): siRNA sense strand
gaaagacggcuacacagaa

SEQ ID NO: 1531740 - RNA, 19 nt, Homo sapiens
  misc_RNA (1)...(19): siRNA sense strand
guacucagcucucaaaggu

SEQ ID NO: 1531741 - RNA, 19 nt, Homo sapiens
  misc_RNA (1)...(19): siRNA sense strand
gaagugggcaaucuuuaaa

SEQ ID NO: 1531742 - RNA, 19 nt, Homo sapiens
  misc_RNA (1)...(19): siRNA sense strand
cgaaagugcuucagcuaau

SEQ ID NO: 1531743 - RNA, 19 nt, Homo sapiens
  misc_RNA (1)...(19): siRNA sense strand
ggaaccuggugcagaagua

SEQ ID NO: 1531744 - RNA, 19 nt, Homo sapiens
  misc_RNA (1)...(19): siRNA sense strand
aaagacggcuacacagaaa

SEQ ID NO: 1531745 - RNA, 19 nt, Homo sapiens
  misc_RNA (1)...(19): siRNA sense strand
ggaaagacggcuacacaga

SEQ ID NO: 1531746 - RNA, 19 nt, Homo sapiens
  misc_RNA (1)...(19): siRNA sense strand
ugaggaaccuggugcagaa

SEQ ID NO: 1531747 - RNA, 19 nt, Homo sapiens
  misc_RNA (1)...(19): siRNA sense strand
acucagcucucaaagguaa

SEQ ID NO: 1531748 - RNA, 19 nt, Homo sapiens
  misc_RNA (1)...(19): siRNA sense strand
cagcggcaacucauucuua

SEQ ID NO: 1531749 - RNA, 19 nt, Homo sapiens
  misc_RNA (1)...(19): siRNA sense strand
gguaagaagugggcaaucu

SEQ ID NO: 1531750 - RNA, 19 nt, Homo sapiens
  misc_RNA (1)...(19): siRNA sense strand
aaagguaguuacaagugaa

SEQ ID NO: 1531751 - RNA, 19 nt, Homo sapiens
  misc_RNA (1)...(19): siRNA sense strand
uaaaucaacccuuugucaa

SEQ ID NO: 1531752 - RNA, 19 nt, Homo sapiens
  misc_RNA (1)...(19): siRNA sense strand
aaagugcuucagcuaauua

SEQ ID NO: 1531753 - RNA, 19 nt, Homo sapiens
  misc_RNA (1)...(19): siRNA sense strand
caacucauucuuacucaga

SEQ ID NO: 1531754 - RNA, 19 nt, Homo sapiens
  misc_RNA (1)...(19): siRNA sense strand
gauagaugaaggagacauu

SEQ ID NO: 1531755 - RNA, 19 nt, Homo sapiens
  misc_RNA (1)...(19): siRNA sense strand
agaagugggcaaucuuuaa

SEQ ID NO: 1531756 - RNA, 19 nt, Homo sapiens
  misc_RNA (1)...(19): siRNA sense strand
cggcuacacagaaaguuua

SEQ ID NO: 1531757 - RNA, 19 nt, Homo sapiens
  misc_RNA (1)...(19): siRNA sense strand
gugucccggucauuaaaua

SEQ ID NO: 1531758 - RNA, 19 nt, Homo sapiens
  misc_RNA (1)...(19): siRNA sense strand
gaugaaggagacauuaauc

SEQ ID NO: 1531759 - RNA, 19 nt, Homo sapiens
  misc_RNA (1)...(19): siRNA sense strand
aaucaacccuuugucaaca

SEQ ID NO: 1531760 - RNA, 19 nt, Homo sapiens
  misc_RNA (1)...(19): siRNA sense strand
cagcugagcggaaagcaau

SEQ ID NO: 1531761 - RNA, 19 nt, Homo sapiens
  misc_RNA (1)...(19): siRNA sense strand
uuaaaucaacccuuuguca

SEQ ID NO: 1531762 - RNA, 19 nt, Homo sapiens
  misc_RNA (1)...(19): siRNA sense strand
ccgaaagugcuucagcuaa

SEQ ID NO: 1531763 - RNA, 19 nt, Homo sapiens
  misc_RNA (1)...(19): siRNA sense strand
ucaacagucggauagauga

SEQ ID NO: 1531764 - RNA, 19 nt, Homo sapiens
  misc_RNA (1)...(19): siRNA sense strand
cagcuuacgugguggaacu

SEQ ID NO: 1531765 - RNA, 19 nt, Homo sapiens
  misc_RNA (1)...(19): siRNA sense strand
uagaugaaggagacauuaa

SEQ ID NO: 1531766 - RNA, 19 nt, Homo sapiens
  misc_RNA (1)...(19): siRNA sense strand
uauggugucccggucauua

SEQ ID NO: 1531767 - RNA, 19 nt, Homo sapiens
  misc_RNA (1)...(19): siRNA sense strand
agacauuaauccgaaagug

SEQ ID NO: 1531768 - RNA, 19 nt, Homo sapiens
  misc_RNA (1)...(19): siRNA sense strand
ggcaacucauucuuacuca

SEQ ID NO: 1531769 - RNA, 19 nt, Homo sapiens
  misc_RNA (1)...(19): siRNA sense strand
aaaagguaguuacaaguga

SEQ ID NO: 1531770 - RNA, 19 nt, Homo sapiens
  misc_RNA (1)...(19): siRNA sense strand
caacagucggauagaugaa

SEQ ID NO: 1531771 - RNA, 19 nt, Homo sapiens
  misc_RNA (1)...(19): siRNA sense strand
aaggaaagacggcuacaca

SEQ ID NO: 1531772 - RNA, 19 nt, Homo sapiens
  misc_RNA (1)...(19): siRNA sense strand
aguuacaagugaaaucuuc

SEQ ID NO: 1531773 - RNA, 19 nt, Homo sapiens
  misc_RNA (1)...(19): siRNA sense strand
auagaugaaggagacauua

SEQ ID NO: 1531774 - RNA, 19 nt, Homo sapiens
  misc_RNA (1)...(19): siRNA sense strand
ugucaacagucggauagau

SEQ ID NO: 1531775 - RNA, 19 nt, Homo sapiens
  misc_RNA (1)...(19): siRNA sense strand
guaguuacaagugaaaucu

SEQ ID NO: 1531776 - RNA, 19 nt, Homo sapiens
  misc_RNA (1)...(19): siRNA sense strand
aaagcaaugaugcagcaaa

SEQ ID NO: 1531777 - RNA, 19 nt, Homo sapiens
  misc_RNA (1)...(19): siRNA sense strand
ugacagaaaaggcuucaaa

SEQ ID NO: 1531778 - RNA, 19 nt, Homo sapiens
  misc_RNA (1)...(19): siRNA sense strand
caaaagguaguuacaagug

SEQ ID NO: 1531779 - RNA, 19 nt, Homo sapiens
  misc_RNA (1)...(19): siRNA sense strand
aagcaaugaugcagcaaaa

SEQ ID NO: 1531780 - RNA, 19 nt, Homo sapiens
  misc_RNA (1)...(19): siRNA sense strand
gucaacagucggauagaug

SEQ ID NO: 1531781 - RNA, 19 nt, Homo sapiens
  misc_RNA (1)...(19): siRNA sense strand
gcugagcggaaagcaauga

SEQ ID NO: 1531782 - RNA, 19 nt, Homo sapiens
  misc_RNA (1)...(19): siRNA sense strand
guuuaaaucaacccuuugu

SEQ ID NO: 1531783 - RNA, 19 nt, Homo sapiens
  misc_RNA (1)...(19): siRNA sense strand
agaugaaggagacauuaau

SEQ ID NO: 1531784 - RNA, 19 nt, Homo sapiens
  misc_RNA (1)...(19): siRNA sense strand
gaaggacuguggaugauua

SEQ ID NO: 1531785 - RNA, 19 nt, Homo sapiens
  misc_RNA (1)...(19): siRNA sense strand
gaauagaaccucuuaauga

SEQ ID NO: 1531786 - RNA, 19 nt, Homo sapiens
  misc_RNA (1)...(19): siRNA sense strand
gcacugaaaugggacuuua

SEQ ID NO: 1531787 - RNA, 19 nt, Homo sapiens
  misc_RNA (1)...(19): siRNA sense strand
gaagaggcaugguguguug

SEQ ID NO: 1531788 - RNA, 19 nt, Homo sapiens
  misc_RNA (1)...(19): siRNA sense strand
gaauuugacuucauggaaa

SEQ ID NO: 1531789 - RNA, 19 nt, Homo sapiens
  misc_RNA (1)...(19): siRNA sense strand
gccagaaucuuaagguaua

SEQ ID NO: 1531790 - RNA, 19 nt, Homo sapiens
  misc_RNA (1)...(19): siRNA sense strand
caacugggaggucuuauua

SEQ ID NO: 1531791 - RNA, 19 nt, Homo sapiens
  misc_RNA (1)...(19): siRNA sense strand
ccaaagaaguaagagauaa

SEQ ID NO: 1531792 - RNA, 19 nt, Homo sapiens
  misc_RNA (1)...(19): siRNA sense strand
gaaaacagcuccuugaaca

SEQ ID NO: 1531793 - RNA, 19 nt, Homo sapiens
  misc_RNA (1)...(19): siRNA sense strand
caaagcggcugcaaucuuc

SEQ ID NO: 1531794 - RNA, 19 nt, Homo sapiens
  misc_RNA (1)...(19): siRNA sense strand
gagauaaauuguuggaguu

SEQ ID NO: 1531795 - RNA, 19 nt, Homo sapiens
  misc_RNA (1)...(19): siRNA sense strand
gagcauaauaggagaauuu

SEQ ID NO: 1531796 - RNA, 19 nt, Homo sapiens
  misc_RNA (1)...(19): siRNA sense strand
ggaguuacaugugaauuau

SEQ ID NO: 1531797 - RNA, 19 nt, Homo sapiens
  misc_RNA (1)...(19): siRNA sense strand
gaaccaagcaaauuucaga

SEQ ID NO: 1531798 - RNA, 19 nt, Homo sapiens
  misc_RNA (1)...(19): siRNA sense strand
ucaaagcugugaaggauug

SEQ ID NO: 1531799 - RNA, 19 nt, Homo sapiens
  misc_RNA (1)...(19): siRNA sense strand
uuacgaagaugcagacuug

SEQ ID NO: 1531800 - RNA, 19 nt, Homo sapiens
  misc_RNA (1)...(19): siRNA sense strand
cguaaucaauggagcauaa

SEQ ID NO: 1531801 - RNA, 19 nt, Homo sapiens
  misc_RNA (1)...(19): siRNA sense strand
uguuauggcuuccuugaua

SEQ ID NO: 1531802 - RNA, 19 nt, Homo sapiens
  misc_RNA (1)...(19): siRNA sense strand
ccaagcaaauuucagaaga

SEQ ID NO: 1531803 - RNA, 19 nt, Homo sapiens
  misc_RNA (1)...(19): siRNA sense strand
ccauguauguugugggaua

SEQ ID NO: 1531804 - RNA, 19 nt, Homo sapiens
  misc_RNA (1)...(19): siRNA sense strand
uaacagugaugucaauaca

SEQ ID NO: 1531805 - RNA, 19 nt, Homo sapiens
  misc_RNA (1)...(19): siRNA sense strand
ggcaauaauucuaaagaga

SEQ ID NO: 1531806 - RNA, 19 nt, Homo sapiens
  misc_RNA (1)...(19): siRNA sense strand
guacuucagauguguauuu

SEQ ID NO: 1531807 - RNA, 19 nt, Homo sapiens
  misc_RNA (1)...(19): siRNA sense strand
gcaguaugcuugaaaucug

SEQ ID NO: 1531808 - RNA, 19 nt, Homo sapiens
  misc_RNA (1)...(19): siRNA sense strand
gcaaaccuccguaaucaau

SEQ ID NO: 1531809 - RNA, 19 nt, Homo sapiens
  misc_RNA (1)...(19): siRNA sense strand
uauagcagccagaaucuua

SEQ ID NO: 1531810 - RNA, 19 nt, Homo sapiens
  misc_RNA (1)...(19): siRNA sense strand
uuaaugacgugggcaauaa

SEQ ID NO: 1531811 - RNA, 19 nt, Homo sapiens
  misc_RNA (1)...(19): siRNA sense strand
uuacacagauagcaucauu

SEQ ID NO: 1531812 - RNA, 19 nt, Homo sapiens
  misc_RNA (1)...(19): siRNA sense strand
caaauacaguaccacauca

SEQ ID NO: 1531813 - RNA, 19 nt, Homo sapiens
  misc_RNA (1)...(19): siRNA sense strand
guacagaguauuaaagguu

SEQ ID NO: 1531814 - RNA, 19 nt, Homo sapiens
  misc_RNA (1)...(19): siRNA sense strand
ucucucaccucucaucuuu

SEQ ID NO: 1531815 - RNA, 19 nt, Homo sapiens
  misc_RNA (1)...(19): siRNA sense strand
ggacuguggaugauuauga

SEQ ID NO: 1531816 - RNA, 19 nt, Homo sapiens
  misc_RNA (1)...(19): siRNA sense strand
gaaugucaccagaauagaa

SEQ ID NO: 1531817 - RNA, 19 nt, Homo sapiens
  misc_RNA (1)...(19): siRNA sense strand
uaccugugcucccgaauuu

SEQ ID NO: 1531818 - RNA, 19 nt, Homo sapiens
  misc_RNA (1)...(19): siRNA sense strand
gggagauccugcuugcuuu

SEQ ID NO: 1531819 - RNA, 19 nt, Homo sapiens
  misc_RNA (1)...(19): siRNA sense strand
acuaagaccugcuggaaug

SEQ ID NO: 1531820 - RNA, 19 nt, Homo sapiens
  misc_RNA (1)...(19): siRNA sense strand
gcaucaagcugucuacacu

SEQ ID NO: 1531821 - RNA, 19 nt, Homo sapiens
  misc_RNA (1)...(19): siRNA sense strand
aagguuaucuuuggcauuu

SEQ ID NO: 1531822 - RNA, 19 nt, Homo sapiens
  misc_RNA (1)...(19): siRNA sense strand
ccgcugagauacacaaaga

SEQ ID NO: 1531823 - RNA, 19 nt, Homo sapiens
  misc_RNA (1)...(19): siRNA sense strand
cagauagcaucauuauuuc

SEQ ID NO: 1531824 - RNA, 19 nt, Homo sapiens
  misc_RNA (1)...(19): siRNA sense strand
cggcaucgcugucuuugug

SEQ ID NO: 1531825 - RNA, 19 nt, Homo sapiens
  misc_RNA (1)...(19): siRNA sense strand
gagauacacaaagacauua

SEQ ID NO: 1531826 - RNA, 19 nt, Homo sapiens
  misc_RNA (1)...(19): siRNA sense strand
ugacaggcuuacugaauau

SEQ ID NO: 1531827 - RNA, 19 nt, Homo sapiens
  misc_RNA (1)...(19): siRNA sense strand
auaaaacgcuuccaucuuu

SEQ ID NO: 1531828 - RNA, 19 nt, Homo sapiens
  misc_RNA (1)...(19): siRNA sense strand
caagcaaauuucagaagau

SEQ ID NO: 1531829 - RNA, 19 nt, Homo sapiens
  misc_RNA (1)...(19): siRNA sense strand
caucauuauuucccaugua

SEQ ID NO: 1531830 - RNA, 19 nt, Homo sapiens
  misc_RNA (1)...(19): siRNA sense strand
aaucauagccuccugguau

SEQ ID NO: 1531831 - RNA, 19 nt, Homo sapiens
  misc_RNA (1)...(19): siRNA sense strand
ggauuguucuucauguaug

SEQ ID NO: 1531832 - RNA, 19 nt, Homo sapiens
  misc_RNA (1)...(19): siRNA sense strand
gcucaaagcggcugcaauc

SEQ ID NO: 1531833 - RNA, 19 nt, Homo sapiens
  misc_RNA (1)...(19): siRNA sense strand
gaacaugauuucaguuacc

SEQ ID NO: 1531834 - RNA, 19 nt, Homo sapiens
  misc_RNA (1)...(19): siRNA sense strand
gggaggauccaaagucuga

SEQ ID NO: 1531835 - RNA, 19 nt, Homo sapiens
  misc_RNA (1)...(19): siRNA sense strand
cagccagaaucuuaaggua

SEQ ID NO: 1531836 - RNA, 19 nt, Homo sapiens
  misc_RNA (1)...(19): siRNA sense strand
cagaauagaaccucuuaau

SEQ ID NO: 1531837 - RNA, 19 nt, Homo sapiens
  misc_RNA (1)...(19): siRNA sense strand
uaauuugccucaggaagaa

SEQ ID NO: 1531838 - RNA, 19 nt, Homo sapiens
  misc_RNA (1)...(19): siRNA sense strand
aaacucaacuuuuggcuaa

SEQ ID NO: 1531839 - RNA, 19 nt, Homo sapiens
  misc_RNA (1)...(19): siRNA sense strand
gacuguggaugauuaugaa

SEQ ID NO: 1531840 - RNA, 19 nt, Homo sapiens
  misc_RNA (1)...(19): siRNA sense strand
gcagcuaacccucccuuau

SEQ ID NO: 1531841 - RNA, 19 nt, Homo sapiens
  misc_RNA (1)...(19): siRNA sense strand
ugaugucaauacaagguua

SEQ ID NO: 1531842 - RNA, 19 nt, Homo sapiens
  misc_RNA (1)...(19): siRNA sense strand
augacaggcuuacugaaua

SEQ ID NO: 1531843 - RNA, 19 nt, Homo sapiens
  misc_RNA (1)...(19): siRNA sense strand
gaauaguguguacagagua

SEQ ID NO: 1531844 - RNA, 19 nt, Homo sapiens
  misc_RNA (1)...(19): siRNA sense strand
gccaaagaaguaagagaua

SEQ ID NO: 1531845 - RNA, 19 nt, Homo sapiens
  misc_RNA (1)...(19): siRNA sense strand
ucaguuacccuuaguuuca

SEQ ID NO: 1531846 - RNA, 19 nt, Homo sapiens
  misc_RNA (1)...(19): siRNA sense strand
uagaaccucuuaaugaagu

SEQ ID NO: 1531847 - RNA, 19 nt, Homo sapiens
  misc_RNA (1)...(19): siRNA sense strand
acacagauagcaucauuau

SEQ ID NO: 1531848 - RNA, 19 nt, Homo sapiens
  misc_RNA (1)...(19): siRNA sense strand
ugagauacacaaagacauu

SEQ ID NO: 1531849 - RNA, 19 nt, Homo sapiens
  misc_RNA (1)...(19): siRNA sense strand
gggcaauaauucuaaagag

SEQ ID NO: 1531850 - RNA, 19 nt, Homo sapiens
  misc_RNA (1)...(19): siRNA sense strand
ucauuucucucaccucuca

SEQ ID NO: 1531851 - RNA, 19 nt, Homo sapiens
  misc_RNA (1)...(19): siRNA sense strand
cagcuaacccucccuuaug

SEQ ID NO: 1531852 - RNA, 19 nt, Homo sapiens
  misc_RNA (1)...(19): siRNA sense strand
uguggaugauuaugaauga

SEQ ID NO: 1531853 - RNA, 19 nt, Homo sapiens
  misc_RNA (1)...(19): siRNA sense strand
ucgaaaaucugccaaagaa

SEQ ID NO: 1531854 - RNA, 19 nt, Homo sapiens
  misc_RNA (1)...(19): siRNA sense strand
aaagacuguucgugauauu

SEQ ID NO: 1531855 - RNA, 19 nt, Homo sapiens
  misc_RNA (1)...(19): siRNA sense strand
ugaaugacaggcuuacuga

SEQ ID NO: 1531856 - RNA, 19 nt, Homo sapiens
  misc_RNA (1)...(19): siRNA sense strand
gaaaaggcuuggagcuaga

SEQ ID NO: 1531857 - RNA, 19 nt, Homo sapiens
  misc_RNA (1)...(19): siRNA sense strand
guuauggcuuccuugauau

SEQ ID NO: 1531858 - RNA, 19 nt, Homo sapiens
  misc_RNA (1)...(19): siRNA sense strand
aaacuaagaccugcuggaa

SEQ ID NO: 1531859 - RNA, 19 nt, Homo sapiens
  misc_RNA (1)...(19): siRNA sense strand
ggcaugguguguugugaga

SEQ ID NO: 1531860 - RNA, 19 nt, Homo sapiens
  misc_RNA (1)...(19): siRNA sense strand
uggaguuacaugugaauua

SEQ ID NO: 1531861 - RNA, 19 nt, Homo sapiens
  misc_RNA (1)...(19): siRNA sense strand
gcaagcaucaagcugucua

SEQ ID NO: 1531862 - RNA, 19 nt, Homo sapiens
  misc_RNA (1)...(19): siRNA sense strand
acagugaugucaauacaag

SEQ ID NO: 1531863 - RNA, 19 nt, Homo sapiens
  misc_RNA (1)...(19): siRNA sense strand
cgaauuugacuucauggaa

SEQ ID NO: 1531864 - RNA, 19 nt, Homo sapiens
  misc_RNA (1)...(19): siRNA sense strand
gcaaauuucagaagaucau

SEQ ID NO: 1531865 - RNA, 19 nt, Homo sapiens
  misc_RNA (1)...(19): siRNA sense strand
cuuacugaauauccucuua

SEQ ID NO: 1531866 - RNA, 19 nt, Homo sapiens
  misc_RNA (1)...(19): siRNA sense strand
gcaggugccaugccuacaa

SEQ ID NO: 1531867 - RNA, 19 nt, Homo sapiens
  misc_RNA (1)...(19): siRNA sense strand
cauuauugcuuccaguugu

SEQ ID NO: 1531868 - RNA, 19 nt, Homo sapiens
  misc_RNA (1)...(19): siRNA sense strand
ucgccugagugaucuuaua

SEQ ID NO: 1531869 - RNA, 19 nt, Homo sapiens
  misc_RNA (1)...(19): siRNA sense strand
guuaaugacgugggcaaua

SEQ ID NO: 1531870 - RNA, 19 nt, Homo sapiens
  misc_RNA (1)...(19): siRNA sense strand
gauccaaagucugaaagag

SEQ ID NO: 1531871 - RNA, 19 nt, Homo sapiens
  misc_RNA (1)...(19): siRNA sense strand
gacaccaccucuccgugaa

SEQ ID NO: 1531872 - RNA, 19 nt, Homo sapiens
  misc_RNA (1)...(19): siRNA sense strand
agaauagaaccucuuaaug

SEQ ID NO: 1531873 - RNA, 19 nt, Homo sapiens
  misc_RNA (1)...(19): siRNA sense strand
agaauaguguguacagagu

SEQ ID NO: 1531874 - RNA, 19 nt, Homo sapiens
  misc_RNA (1)...(19): siRNA sense strand
ucaaagcggcugcaaucuu

SEQ ID NO: 1531875 - RNA, 19 nt, Homo sapiens
  misc_RNA (1)...(19): siRNA sense strand
ucaaauacaguaccacauc

SEQ ID NO: 1531876 - RNA, 19 nt, Homo sapiens
  misc_RNA (1)...(19): siRNA sense strand
cauugaaccaagcaaauuu

SEQ ID NO: 1531877 - RNA, 19 nt, Homo sapiens
  misc_RNA (1)...(19): siRNA sense strand
ggacuaaugaugggauugu

SEQ ID NO: 1531878 - RNA, 19 nt, Homo sapiens
  misc_RNA (1)...(19): siRNA sense strand
uuaugaggcuaaagauguu

SEQ ID NO: 1531879 - RNA, 19 nt, Homo sapiens
  misc_RNA (1)...(19): siRNA sense strand
ggaaggacuguggaugauu

SEQ ID NO: 1531880 - RNA, 19 nt, Homo sapiens
  misc_RNA (1)...(19): siRNA sense strand
augcaaaccuccguaauca

SEQ ID NO: 1531881 - RNA, 19 nt, Homo sapiens
  misc_RNA (1)...(19): siRNA sense strand
caauacaagguuaugcaaa

SEQ ID NO: 1531882 - RNA, 19 nt, Homo sapiens
  misc_RNA (1)...(19): siRNA sense strand
gaagguuaucuuuggcauu

SEQ ID NO: 1531883 - RNA, 19 nt, Homo sapiens
  misc_RNA (1)...(19): siRNA sense strand
ucacacauugcaguuguua

SEQ ID NO: 1531884 - RNA, 19 nt, Homo sapiens
  misc_RNA (1)...(19): siRNA sense strand
gaggaggacuuccgguuau

SEQ ID NO: 1531885 - RNA, 19 nt, Homo sapiens
  misc_RNA (1)...(19): siRNA sense strand
ggagggcgguucauguuca

SEQ ID NO: 1531886 - RNA, 19 nt, Homo sapiens
  misc_RNA (1)...(19): siRNA sense strand
ccaacuaccuggaggacuu

SEQ ID NO: 1531887 - RNA, 19 nt, Homo sapiens
  misc_RNA (1)...(19): siRNA sense strand
ggaggagggugccaacaag

SEQ ID NO: 1531888 - RNA, 19 nt, Homo sapiens
  misc_RNA (1)...(19): siRNA sense strand
uugugaaccuguacagaua

SEQ ID NO: 1531889 - RNA, 19 nt, Homo sapiens
  misc_RNA (1)...(19): siRNA sense strand
ggaggaagcggagcggauu

SEQ ID NO: 1531890 - RNA, 19 nt, Homo sapiens
  misc_RNA (1)...(19): siRNA sense strand
gaaccuguacagauacuuc

SEQ ID NO: 1531891 - RNA, 19 nt, Homo sapiens
  misc_RNA (1)...(19): siRNA sense strand
gaagguccagcucaccauu

SEQ ID NO: 1531892 - RNA, 19 nt, Homo sapiens
  misc_RNA (1)...(19): siRNA sense strand
agaggaggacuuccgguua

SEQ ID NO: 1531893 - RNA, 19 nt, Homo sapiens
  misc_RNA (1)...(19): siRNA sense strand
ggucgcgucuccuucuuca

SEQ ID NO: 1531894 - RNA, 19 nt, Homo sapiens
  misc_RNA (1)...(19): siRNA sense strand
ugaccaagcccaccuucuu

SEQ ID NO: 1531895 - RNA, 19 nt, Homo sapiens
  misc_RNA (1)...(19): siRNA sense strand
cagaggccguggcuaagga

SEQ ID NO: 1531896 - RNA, 19 nt, Homo sapiens
  misc_RNA (1)...(19): siRNA sense strand
uggcagaggccguggcuaa

SEQ ID NO: 1531897 - RNA, 19 nt, Homo sapiens
  misc_RNA (1)...(19): siRNA sense strand
ggaagcacuuugugaaccu

SEQ ID NO: 1531898 - RNA, 19 nt, Homo sapiens
  misc_RNA (1)...(19): siRNA sense strand
gcggagggcgguucauguu

SEQ ID NO: 1531899 - RNA, 19 nt, Homo sapiens
  misc_RNA (1)...(19): siRNA sense strand
gaccaagcccaccuucuuc

SEQ ID NO: 1531900 - RNA, 19 nt, Homo sapiens
  misc_RNA (1)...(19): siRNA sense strand
ugcuguaccucuccaacua

SEQ ID NO: 1531901 - RNA, 19 nt, Homo sapiens
  misc_RNA (1)...(19): siRNA sense strand
ggagcagcaccaagaagga

SEQ ID NO: 1531902 - RNA, 19 nt, Homo sapiens
  misc_RNA (1)...(19): siRNA sense strand
gaggagggugccaacaaga

SEQ ID NO: 1531903 - RNA, 19 nt, Homo sapiens
  misc_RNA (1)...(19): siRNA sense strand
aggaggacuuccgguuaua

SEQ ID NO: 1531904 - RNA, 19 nt, Homo sapiens
  misc_RNA (1)...(19): siRNA sense strand
ggucguggcagggagauuc

SEQ ID NO: 1531905 - RNA, 19 nt, Homo sapiens
  misc_RNA (1)...(19): siRNA sense strand
gagggcgguucauguucau

SEQ ID NO: 1531906 - RNA, 19 nt, Homo sapiens
  misc_RNA (1)...(19): siRNA sense strand
gggauaaaauacagaacau

SEQ ID NO: 1531907 - RNA, 19 nt, Homo sapiens
  misc_RNA (1)...(19): siRNA sense strand
gcccugcucugaggacuac

SEQ ID NO: 1531908 - RNA, 19 nt, Homo sapiens
  misc_RNA (1)...(19): siRNA sense strand
acaccucgcugcuguaccu

SEQ ID NO: 1531909 - RNA, 19 nt, Homo sapiens
  misc_RNA (1)...(19): siRNA sense strand
cuacggcuccuucgacuac

SEQ ID NO: 1531910 - RNA, 19 nt, Homo sapiens
  misc_RNA (1)...(19): siRNA sense strand
ggcaugcgcacguggacaa

SEQ ID NO: 1531911 - RNA, 19 nt, Homo sapiens
  misc_RNA (1)...(19): siRNA sense strand
aaccggagcagcaccaaga

SEQ ID NO: 1531912 - RNA, 19 nt, Homo sapiens
  misc_RNA (1)...(19): siRNA sense strand
gaggaggacuuccgguuau

SEQ ID NO: 1531913 - RNA, 19 nt, Homo sapiens
  misc_RNA (1)...(19): siRNA sense strand
ggagggcgguucauguuca

SEQ ID NO: 1531914 - RNA, 19 nt, Homo sapiens
  misc_RNA (1)...(19): siRNA sense strand
ccaacuaccuggaggacuu

SEQ ID NO: 1531915 - RNA, 19 nt, Homo sapiens
  misc_RNA (1)...(19): siRNA sense strand
ggaggagggugccaacaag

SEQ ID NO: 1531916 - RNA, 19 nt, Homo sapiens
  misc_RNA (1)...(19): siRNA sense strand
uugugaaccuguacagaua

SEQ ID NO: 1531917 - RNA, 19 nt, Homo sapiens
  misc_RNA (1)...(19): siRNA sense strand
ggaggaagcggagcggauu

SEQ ID NO: 1531918 - RNA, 19 nt, Homo sapiens
  misc_RNA (1)...(19): siRNA sense strand
gaaccuguacagauacuuc

SEQ ID NO: 1531919 - RNA, 19 nt, Homo sapiens
  misc_RNA (1)...(19): siRNA sense strand
gaagguccagcucaccauu

SEQ ID NO: 1531920 - RNA, 19 nt, Homo sapiens
  misc_RNA (1)...(19): siRNA sense strand
agaggaggacuuccgguua

SEQ ID NO: 1531921 - RNA, 19 nt, Homo sapiens
  misc_RNA (1)...(19): siRNA sense strand
ugaccaagcccaccuucuu

SEQ ID NO: 1531922 - RNA, 19 nt, Homo sapiens
  misc_RNA (1)...(19): siRNA sense strand
cagaggccguggcuaagga

SEQ ID NO: 1531923 - RNA, 19 nt, Homo sapiens
  misc_RNA (1)...(19): siRNA sense strand
uggcagaggccguggcuaa

SEQ ID NO: 1531924 - RNA, 19 nt, Homo sapiens
  misc_RNA (1)...(19): siRNA sense strand
ggaagcacuuugugaaccu

SEQ ID NO: 1531925 - RNA, 19 nt, Homo sapiens
  misc_RNA (1)...(19): siRNA sense strand
gcggagggcgguucauguu

SEQ ID NO: 1531926 - RNA, 19 nt, Homo sapiens
  misc_RNA (1)...(19): siRNA sense strand
gaccaagcccaccuucuuc

SEQ ID NO: 1531927 - RNA, 19 nt, Homo sapiens
  misc_RNA (1)...(19): siRNA sense strand
ugcuguaccucuccaacua

SEQ ID NO: 1531928 - RNA, 19 nt, Homo sapiens
  misc_RNA (1)...(19): siRNA sense strand
ggagcagcaccaagaagga

SEQ ID NO: 1531929 - RNA, 19 nt, Homo sapiens
  misc_RNA (1)...(19): siRNA sense strand
gaggagggugccaacaaga

SEQ ID NO: 1531930 - RNA, 19 nt, Homo sapiens
  misc_RNA (1)...(19): siRNA sense strand
aggaggacuuccgguuaua

SEQ ID NO: 1531931 - RNA, 19 nt, Homo sapiens
  misc_RNA (1)...(19): siRNA sense strand
ggucguggcagggagauuc

SEQ ID NO: 1531932 - RNA, 19 nt, Homo sapiens
  misc_RNA (1)...(19): siRNA sense strand
gagggcgguucauguucau

SEQ ID NO: 1531933 - RNA, 19 nt, Homo sapiens
  misc_RNA (1)...(19): siRNA sense strand
gggauaaaauacagaacau

SEQ ID NO: 1531934 - RNA, 19 nt, Homo sapiens
  misc_RNA (1)...(19): siRNA sense strand
gcccugcucugaggacuac

SEQ ID NO: 1531935 - RNA, 19 nt, Homo sapiens
  misc_RNA (1)...(19): siRNA sense strand
acaccucgcugcuguaccu

SEQ ID NO: 1531936 - RNA, 19 nt, Homo sapiens
  misc_RNA (1)...(19): siRNA sense strand
cuacggcuccuucgacuac

SEQ ID NO: 1531937 - RNA, 19 nt, Homo sapiens
  misc_RNA (1)...(19): siRNA sense strand
ggcaugcgcacguggacaa

SEQ ID NO: 1531938 - RNA, 19 nt, Homo sapiens
  misc_RNA (1)...(19): siRNA sense strand
aaccggagcagcaccaaga

SEQ ID NO: 1531939 - RNA, 19 nt, Homo sapiens
  misc_RNA (1)...(19): siRNA sense strand
gcauagaccucgugaagga

SEQ ID NO: 1531940 - RNA, 19 nt, Homo sapiens
  misc_RNA (1)...(19): siRNA sense strand
gaucugagcuguaacacau

SEQ ID NO: 1531941 - RNA, 19 nt, Homo sapiens
  misc_RNA (1)...(19): siRNA sense strand
ugagugagguguucgagua

SEQ ID NO: 1531942 - RNA, 19 nt, Homo sapiens
  misc_RNA (1)...(19): siRNA sense strand
ggaucgaucugagcuguaa

SEQ ID NO: 1531943 - RNA, 19 nt, Homo sapiens
  misc_RNA (1)...(19): siRNA sense strand
guacagcaauucaucaaag

SEQ ID NO: 1531944 - RNA, 19 nt, Homo sapiens
  misc_RNA (1)...(19): siRNA sense strand
ugaagaaccugccucagau

SEQ ID NO: 1531945 - RNA, 19 nt, Homo sapiens
  misc_RNA (1)...(19): siRNA sense strand
ugaaccagguggagucgua

SEQ ID NO: 1531946 - RNA, 19 nt, Homo sapiens
  misc_RNA (1)...(19): siRNA sense strand
caagaccgguucagcuuuc

SEQ ID NO: 1531947 - RNA, 19 nt, Homo sapiens
  misc_RNA (1)...(19): siRNA sense strand
gggagaguuugggaaauuu

SEQ ID NO: 1531948 - RNA, 19 nt, Homo sapiens
  misc_RNA (1)...(19): siRNA sense strand
caaaugagacguuccuaca

SEQ ID NO: 1531949 - RNA, 19 nt, Homo sapiens
  misc_RNA (1)...(19): siRNA sense strand
gcacaacccugaggaagcu

SEQ ID NO: 1531950 - RNA, 19 nt, Homo sapiens
  misc_RNA (1)...(19): siRNA sense strand
ccaaauggaccaacuaugg

SEQ ID NO: 1531951 - RNA, 19 nt, Homo sapiens
  misc_RNA (1)...(19): siRNA sense strand
gugaagaaccugccucaga

SEQ ID NO: 1531952 - RNA, 19 nt, Homo sapiens
  misc_RNA (1)...(19): siRNA sense strand
ggagccaaguucaccauca

SEQ ID NO: 1531953 - RNA, 19 nt, Homo sapiens
  misc_RNA (1)...(19): siRNA sense strand
acauggagacccacaauaa

SEQ ID NO: 1531954 - RNA, 19 nt, Homo sapiens
  misc_RNA (1)...(19): siRNA sense strand
aaugagacguuccuacaga

SEQ ID NO: 1531955 - RNA, 19 nt, Homo sapiens
  misc_RNA (1)...(19): siRNA sense strand
ggauaugagugagguguuc

SEQ ID NO: 1531956 - RNA, 19 nt, Homo sapiens
  misc_RNA (1)...(19): siRNA sense strand
ggaagaagaggaggaggaa

SEQ ID NO: 1531957 - RNA, 19 nt, Homo sapiens
  misc_RNA (1)...(19): siRNA sense strand
cgggagaguuugggaaauu

SEQ ID NO: 1531958 - RNA, 19 nt, Homo sapiens
  misc_RNA (1)...(19): siRNA sense strand
ggacuccgguuuguucauc

SEQ ID NO: 1531959 - RNA, 19 nt, Homo sapiens
  misc_RNA (1)...(19): siRNA sense strand
ggaggaagaggauaugagu

SEQ ID NO: 1531960 - RNA, 19 nt, Homo sapiens
  misc_RNA (1)...(19): siRNA sense strand
ggaaaacgccuacuaccaa

SEQ ID NO: 1531961 - RNA, 19 nt, Homo sapiens
  misc_RNA (1)...(19): siRNA sense strand
gcaugaacaccaaggaguu

SEQ ID NO: 1531962 - RNA, 19 nt, Homo sapiens
  misc_RNA (1)...(19): siRNA sense strand
guacaucgcagagcagaga

SEQ ID NO: 1531963 - RNA, 19 nt, Homo sapiens
  misc_RNA (1)...(19): siRNA sense strand
ggauugaccagccugagaa

SEQ ID NO: 1531964 - RNA, 19 nt, Homo sapiens
  misc_RNA (1)...(19): siRNA sense strand
gugccaaccugcauguguu

SEQ ID NO: 1531965 - RNA, 19 nt, Homo sapiens
  misc_RNA (1)...(19): siRNA sense strand
guacguaccuguguuugac

SEQ ID NO: 1531966 - RNA, 19 nt, Homo sapiens
  misc_RNA (1)...(19): siRNA sense strand
gagccaaguucaccaucau

SEQ ID NO: 1531967 - RNA, 19 nt, Homo sapiens
  misc_RNA (1)...(19): siRNA sense strand
caaccugcauguguuugaa

SEQ ID NO: 1531968 - RNA, 19 nt, Homo sapiens
  misc_RNA (1)...(19): siRNA sense strand
guucaucugucuuuuguuu

SEQ ID NO: 1531969 - RNA, 19 nt, Homo sapiens
  misc_RNA (1)...(19): siRNA sense strand
gaauuucuuccaucauuuc

SEQ ID NO: 1531970 - RNA, 19 nt, Homo sapiens
  misc_RNA (1)...(19): siRNA sense strand
gaagaaccugccucagaug

SEQ ID NO: 1531971 - RNA, 19 nt, Homo sapiens
  misc_RNA (1)...(19): siRNA sense strand
uaacagcagcuacuugaag

SEQ ID NO: 1531972 - RNA, 19 nt, Homo sapiens
  misc_RNA (1)...(19): siRNA sense strand
gcaauucaucaaagacaug

SEQ ID NO: 1531973 - RNA, 19 nt, Homo sapiens
  misc_RNA (1)...(19): siRNA sense strand
ucacgcgagucuucuugaa

SEQ ID NO: 1531974 - RNA, 19 nt, Homo sapiens
  misc_RNA (1)...(19): siRNA sense strand
ccagagaagaggaagcaaa

SEQ ID NO: 1531975 - RNA, 19 nt, Homo sapiens
  misc_RNA (1)...(19): siRNA sense strand
cauggagacccacaauaaa

SEQ ID NO: 1531976 - RNA, 19 nt, Homo sapiens
  misc_RNA (1)...(19): siRNA sense strand
ggagacccacaauaaaugu

SEQ ID NO: 1531977 - RNA, 19 nt, Homo sapiens
  misc_RNA (1)...(19): siRNA sense strand
ucaacaucgucaucacuga

SEQ ID NO: 1531978 - RNA, 19 nt, Homo sapiens
  misc_RNA (1)...(19): siRNA sense strand
ggaggucacgcgagucuuc

SEQ ID NO: 1531979 - RNA, 19 nt, Homo sapiens
  misc_RNA (1)...(19): siRNA sense strand
cuagaagagucccaguaug

SEQ ID NO: 1531980 - RNA, 19 nt, Homo sapiens
  misc_RNA (1)...(19): siRNA sense strand
gcaagaugccacugacuac

SEQ ID NO: 1531981 - RNA, 19 nt, Homo sapiens
  misc_RNA (1)...(19): siRNA sense strand
ggagcuaccaguacgugaa

SEQ ID NO: 1531982 - RNA, 19 nt, Homo sapiens
  misc_RNA (1)...(19): siRNA sense strand
gggaggaccagccacauuc

SEQ ID NO: 1531983 - RNA, 19 nt, Homo sapiens
  misc_RNA (1)...(19): siRNA sense strand
gaaaauccaguuugccauu

SEQ ID NO: 1531984 - RNA, 19 nt, Homo sapiens
  misc_RNA (1)...(19): siRNA sense strand
uacagcaauucaucaaaga

SEQ ID NO: 1531985 - RNA, 19 nt, Homo sapiens
  misc_RNA (1)...(19): siRNA sense strand
gcaccgaccacguggaagu

SEQ ID NO: 1531986 - RNA, 19 nt, Homo sapiens
  misc_RNA (1)...(19): siRNA sense strand
gaccuucagugcccggaau

SEQ ID NO: 1531987 - RNA, 19 nt, Homo sapiens
  misc_RNA (1)...(19): siRNA sense strand
aggaagaggauaugaguga

SEQ ID NO: 1531988 - RNA, 19 nt, Homo sapiens
  misc_RNA (1)...(19): siRNA sense strand
uagaagagucccaguaugg

SEQ ID NO: 1531989 - RNA, 19 nt, Homo sapiens
  misc_RNA (1)...(19): siRNA sense strand
ccaaguucaccaucauuga

SEQ ID NO: 1531990 - RNA, 19 nt, Homo sapiens
  misc_RNA (1)...(19): siRNA sense strand
ccaagaccgguucagcuuu

SEQ ID NO: 1531991 - RNA, 19 nt, Homo sapiens
  misc_RNA (1)...(19): siRNA sense strand
cgaguacguaccuguguuu

SEQ ID NO: 1531992 - RNA, 19 nt, Homo sapiens
  misc_RNA (1)...(19): siRNA sense strand
aagaagaggaggaggaaga

SEQ ID NO: 1531993 - RNA, 19 nt, Homo sapiens
  misc_RNA (1)...(19): siRNA sense strand
gcucuggacucuguaucug

SEQ ID NO: 1531994 - RNA, 19 nt, Homo sapiens
  misc_RNA (1)...(19): siRNA sense strand
cagcuacagcgcauuguga

SEQ ID NO: 1531995 - RNA, 19 nt, Homo sapiens
  misc_RNA (1)...(19): siRNA sense strand
gggagcugcuggacaggau

SEQ ID NO: 1531996 - RNA, 19 nt, Homo sapiens
  misc_RNA (1)...(19): siRNA sense strand
gugaugaggcugcauugug

SEQ ID NO: 1531997 - RNA, 19 nt, Homo sapiens
  misc_RNA (1)...(19): siRNA sense strand
ggaccacgacauugaccaa

SEQ ID NO: 1531998 - RNA, 19 nt, Homo sapiens
  misc_RNA (1)...(19): siRNA sense strand
cuacaaacccagcuaucug

SEQ ID NO: 1531999 - RNA, 19 nt, Homo sapiens
  misc_RNA (1)...(19): siRNA sense strand
cagccaagauucaccucau

SEQ ID NO: 1532000 - RNA, 19 nt, Homo sapiens
  misc_RNA (1)...(19): siRNA sense strand
aggaguacaucaggauuga

SEQ ID NO: 1532001 - RNA, 19 nt, Homo sapiens
  misc_RNA (1)...(19): siRNA sense strand
gacccacaauaaauguuuc

SEQ ID NO: 1532002 - RNA, 19 nt, Homo sapiens
  misc_RNA (1)...(19): siRNA sense strand
gcaucaucuuccucuguga

SEQ ID NO: 1532003 - RNA, 19 nt, Homo sapiens
  misc_RNA (1)...(19): siRNA sense strand
ggacugacuggaucgaucu

SEQ ID NO: 1532004 - RNA, 19 nt, Homo sapiens
  misc_RNA (1)...(19): siRNA sense strand
gcagccagguuuugaggaa

SEQ ID NO: 1532005 - RNA, 19 nt, Homo sapiens
  misc_RNA (1)...(19): siRNA sense strand
gccaaguucaccaucauug

SEQ ID NO: 1532006 - RNA, 19 nt, Homo sapiens
  misc_RNA (1)...(19): siRNA sense strand
ucuagaagagucccaguau

SEQ ID NO: 1532007 - RNA, 19 nt, Homo sapiens
  misc_RNA (1)...(19): siRNA sense strand
ccacauggagacccacaau

SEQ ID NO: 1532008 - RNA, 19 nt, Homo sapiens
  misc_RNA (1)...(19): siRNA sense strand
gccugacugucccuacaaa

SEQ ID NO: 1532009 - RNA, 19 nt, Homo sapiens
  misc_RNA (1)...(19): siRNA sense strand
ccucgaggaccacgacauu

SEQ ID NO: 1532010 - RNA, 19 nt, Homo sapiens
  misc_RNA (1)...(19): siRNA sense strand
ucgaggaccacgacauuga

SEQ ID NO: 1532011 - RNA, 19 nt, Homo sapiens
  misc_RNA (1)...(19): siRNA sense strand
ugaaggacccgcacagcau

SEQ ID NO: 1532012 - RNA, 19 nt, Homo sapiens
  misc_RNA (1)...(19): siRNA sense strand
gguacagcaauucaucaaa

SEQ ID NO: 1532013 - RNA, 19 nt, Homo sapiens
  misc_RNA (1)...(19): siRNA sense strand
uccaagcccugaggacuga

SEQ ID NO: 1532014 - RNA, 19 nt, Homo sapiens
  misc_RNA (1)...(19): siRNA sense strand
agacccacaauaaauguuu

SEQ ID NO: 1532015 - RNA, 19 nt, Homo sapiens
  misc_RNA (1)...(19): siRNA sense strand
gguucagcuuucaggagua

SEQ ID NO: 1532016 - RNA, 19 nt, Homo sapiens
  misc_RNA (1)...(19): siRNA sense strand
uaaauguuucuaccaggaa

SEQ ID NO: 1532017 - RNA, 19 nt, Homo sapiens
  misc_RNA (1)...(19): siRNA sense strand
agacguuccuacagaugga

SEQ ID NO: 1532018 - RNA, 19 nt, Homo sapiens
  misc_RNA (1)...(19): siRNA sense strand
uggcauagaccucgugaag

SEQ ID NO: 1532019 - RNA, 19 nt, Homo sapiens
  misc_RNA (1)...(19): siRNA sense strand
guugagauggcacugaaga

SEQ ID NO: 1532020 - RNA, 19 nt, Homo sapiens
  misc_RNA (1)...(19): siRNA sense strand
uccuggagcuugaacuguu

SEQ ID NO: 1532021 - RNA, 19 nt, Homo sapiens
  misc_RNA (1)...(19): siRNA sense strand
ggaggaggaagaggauaug

SEQ ID NO: 1532022 - RNA, 19 nt, Homo sapiens
  misc_RNA (1)...(19): siRNA sense strand
guaacagcagcuacuugaa

SEQ ID NO: 1532023 - RNA, 19 nt, Homo sapiens
  misc_RNA (1)...(19): siRNA sense strand
auccacaccuccaguucua

SEQ ID NO: 1532024 - RNA, 19 nt, Homo sapiens
  misc_RNA (1)...(19): siRNA sense strand
cagaugacaacgcggaguu

SEQ ID NO: 1532025 - RNA, 19 nt, Homo sapiens
  misc_RNA (1)...(19): siRNA sense strand
uggugcggcucucggagua

SEQ ID NO: 1532026 - RNA, 19 nt, Homo sapiens
  misc_RNA (1)...(19): siRNA sense strand
ccuggagcuugaacuguug

SEQ ID NO: 1532027 - RNA, 19 nt, Homo sapiens
  misc_RNA (1)...(19): siRNA sense strand
cacauggagacccacaaua

SEQ ID NO: 1532028 - RNA, 19 nt, Homo sapiens
  misc_RNA (1)...(19): siRNA sense strand
gguuuguucaucugucuuu

SEQ ID NO: 1532029 - RNA, 19 nt, Homo sapiens
  misc_RNA (1)...(19): siRNA sense strand
cccugucccucuucacaaa

SEQ ID NO: 1532030 - RNA, 19 nt, Homo sapiens
  misc_RNA (1)...(19): siRNA sense strand
ggagaguuugggaaauuuc

SEQ ID NO: 1532031 - RNA, 19 nt, Homo sapiens
  misc_RNA (1)...(19): siRNA sense strand
cagggacuccgguuuguuc

SEQ ID NO: 1532032 - RNA, 19 nt, Homo sapiens
  misc_RNA (1)...(19): siRNA sense strand
cuucccagcuggagucauc

SEQ ID NO: 1532033 - RNA, 19 nt, Homo sapiens
  misc_RNA (1)...(19): siRNA sense strand
ggucacgcgagucuucuug

SEQ ID NO: 1532034 - RNA, 19 nt, Homo sapiens
  misc_RNA (1)...(19): siRNA sense strand
ucgaguacguaccuguguu

SEQ ID NO: 1532035 - RNA, 19 nt, Homo sapiens
  misc_RNA (1)...(19): siRNA sense strand
gaggaggaagaggauauga

SEQ ID NO: 1532036 - RNA, 19 nt, Homo sapiens
  misc_RNA (1)...(19): siRNA sense strand
caggaguacaucaggauug

SEQ ID NO: 1532037 - RNA, 19 nt, Homo sapiens
  misc_RNA (1)...(19): siRNA sense strand
cagcaauucaucaaagaca

SEQ ID NO: 1532038 - RNA, 19 nt, Homo sapiens
  misc_RNA (1)...(19): siRNA sense strand
cagcaucaucuuccucugu

SEQ ID NO: 1532039 - RNA, 19 nt, Homo sapiens
  misc_RNA (1)...(19): siRNA sense strand
gaagaaagcuauggcaauu

SEQ ID NO: 1532040 - RNA, 19 nt, Homo sapiens
  misc_RNA (1)...(19): siRNA sense strand
gaaauagccucugaaauuc

SEQ ID NO: 1532041 - RNA, 19 nt, Homo sapiens
  misc_RNA (1)...(19): siRNA sense strand
agaaauagccucugaaauu

SEQ ID NO: 1532042 - RNA, 19 nt, Homo sapiens
  misc_RNA (1)...(19): siRNA sense strand
gcaggaguuuguuuaauga

SEQ ID NO: 1532043 - RNA, 19 nt, Homo sapiens
  misc_RNA (1)...(19): siRNA sense strand
caucgaaucuugcgaacaa

SEQ ID NO: 1532044 - RNA, 19 nt, Homo sapiens
  misc_RNA (1)...(19): siRNA sense strand
gaucaauggucucagaaau

SEQ ID NO: 1532045 - RNA, 19 nt, Homo sapiens
  misc_RNA (1)...(19): siRNA sense strand
caaagcgcauggagacuaa

SEQ ID NO: 1532046 - RNA, 19 nt, Homo sapiens
  misc_RNA (1)...(19): siRNA sense strand
gaauuugaagccuacauua

SEQ ID NO: 1532047 - RNA, 19 nt, Homo sapiens
  misc_RNA (1)...(19): siRNA sense strand
gaacauggaauugugguuu

SEQ ID NO: 1532048 - RNA, 19 nt, Homo sapiens
  misc_RNA (1)...(19): siRNA sense strand
ggagugacccugaauguuc

SEQ ID NO: 1532049 - RNA, 19 nt, Homo sapiens
  misc_RNA (1)...(19): siRNA sense strand
ggcaauugcugaugcuuug

SEQ ID NO: 1532050 - RNA, 19 nt, Homo sapiens
  misc_RNA (1)...(19): siRNA sense strand
ucaauggucucagaaauuc

SEQ ID NO: 1532051 - RNA, 19 nt, Homo sapiens
  misc_RNA (1)...(19): siRNA sense strand
gcaaagcgcauggagacua

SEQ ID NO: 1532052 - RNA, 19 nt, Homo sapiens
  misc_RNA (1)...(19): siRNA sense strand
ggaauuugaagccuacauu

SEQ ID NO: 1532053 - RNA, 19 nt, Homo sapiens
  misc_RNA (1)...(19): siRNA sense strand
uaagaaagcccacaaaucc

SEQ ID NO: 1532054 - RNA, 19 nt, Homo sapiens
  misc_RNA (1)...(19): siRNA sense strand
gaccgggaauucauggauu

SEQ ID NO: 1532055 - RNA, 19 nt, Homo sapiens
  misc_RNA (1)...(19): siRNA sense strand
gcgaacaacacgauacuug

SEQ ID NO: 1532056 - RNA, 19 nt, Homo sapiens
  misc_RNA (1)...(19): siRNA sense strand
gaauugugguuuucucuuu

SEQ ID NO: 1532057 - RNA, 19 nt, Homo sapiens
  misc_RNA (1)...(19): siRNA sense strand
gagcuggagugacccugaa

SEQ ID NO: 1532058 - RNA, 19 nt, Homo sapiens
  misc_RNA (1)...(19): siRNA sense strand
ucucagaugccaugacuuu

SEQ ID NO: 1532059 - RNA, 19 nt, Homo sapiens
  misc_RNA (1)...(19): siRNA sense strand
acacaucaauuugguuguu

SEQ ID NO: 1532060 - RNA, 19 nt, Homo sapiens
  misc_RNA (1)...(19): siRNA sense strand
cagggaagcugcugguagu

SEQ ID NO: 1532061 - RNA, 19 nt, Homo sapiens
  misc_RNA (1)...(19): siRNA sense strand
ucaauggaaagcacaagua

SEQ ID NO: 1532062 - RNA, 19 nt, Homo sapiens
  misc_RNA (1)...(19): siRNA sense strand
gaaagcacaaguacgaagu

SEQ ID NO: 1532063 - RNA, 19 nt, Homo sapiens
  misc_RNA (1)...(19): siRNA sense strand
ugcaggaguuuguuuaaug

SEQ ID NO: 1532064 - RNA, 19 nt, Homo sapiens
  misc_RNA (1)...(19): siRNA sense strand
ggcaugaggugguuguagu

SEQ ID NO: 1532065 - RNA, 19 nt, Homo sapiens
  misc_RNA (1)...(19): siRNA sense strand
cgugauugguuuccucuug

SEQ ID NO: 1532066 - RNA, 19 nt, Homo sapiens
  misc_RNA (1)...(19): siRNA sense strand
gacccugaauguucuggaa

SEQ ID NO: 1532067 - RNA, 19 nt, Homo sapiens
  misc_RNA (1)...(19): siRNA sense strand
cagaugccaugacuuucaa

SEQ ID NO: 1532068 - RNA, 19 nt, Homo sapiens
  misc_RNA (1)...(19): siRNA sense strand
ugaggugguuguagucaug

SEQ ID NO: 1532069 - RNA, 19 nt, Homo sapiens
  misc_RNA (1)...(19): siRNA sense strand
cccacgaccucaccuggua

SEQ ID NO: 1532070 - RNA, 19 nt, Homo sapiens
  misc_RNA (1)...(19): siRNA sense strand
gugaucagauggacaaugc

SEQ ID NO: 1532071 - RNA, 19 nt, Homo sapiens
  misc_RNA (1)...(19): siRNA sense strand
gaucuucauuggugguauc

SEQ ID NO: 1532072 - RNA, 19 nt, Homo sapiens
  misc_RNA (1)...(19): siRNA sense strand
cuagaaauagccucugaaa

SEQ ID NO: 1532073 - RNA, 19 nt, Homo sapiens
  misc_RNA (1)...(19): siRNA sense strand
gaugacccgugccuuuauc

SEQ ID NO: 1532074 - RNA, 19 nt, Homo sapiens
  misc_RNA (1)...(19): siRNA sense strand
gaucagauggacaaugcaa

SEQ ID NO: 1532075 - RNA, 19 nt, Homo sapiens
  misc_RNA (1)...(19): siRNA sense strand
cuucaucaccuuuaaaugu

SEQ ID NO: 1532076 - RNA, 19 nt, Homo sapiens
  misc_RNA (1)...(19): siRNA sense strand
agacuuacucaaccucaua

SEQ ID NO: 1532077 - RNA, 19 nt, Homo sapiens
  misc_RNA (1)...(19): siRNA sense strand
gaaauuccagagaagaaag

SEQ ID NO: 1532078 - RNA, 19 nt, Homo sapiens
  misc_RNA (1)...(19): siRNA sense strand
caacugccaucagggaaag

SEQ ID NO: 1532079 - RNA, 19 nt, Homo sapiens
  misc_RNA (1)...(19): siRNA sense strand
ccuuggacgugauugguuu

SEQ ID NO: 1532080 - RNA, 19 nt, Homo sapiens
  misc_RNA (1)...(19): siRNA sense strand
ccgaugacccgugccuuua

SEQ ID NO: 1532081 - RNA, 19 nt, Homo sapiens
  misc_RNA (1)...(19): siRNA sense strand
agaaagcuauggcaauugc

SEQ ID NO: 1532082 - RNA, 19 nt, Homo sapiens
  misc_RNA (1)...(19): siRNA sense strand
cagaaauuccagagaagaa

SEQ ID NO: 1532083 - RNA, 19 nt, Homo sapiens
  misc_RNA (1)...(19): siRNA sense strand
uggagaacauggaauugug

SEQ ID NO: 1532084 - RNA, 19 nt, Homo sapiens
  misc_RNA (1)...(19): siRNA sense strand
uuugaagccuacauuaaug

SEQ ID NO: 1532085 - RNA, 19 nt, Homo sapiens
  misc_RNA (1)...(19): siRNA sense strand
ggaucaauggucucagaaa

SEQ ID NO: 1532086 - RNA, 19 nt, Homo sapiens
  misc_RNA (1)...(19): siRNA sense strand
cauacacucuggaggaucu

SEQ ID NO: 1532087 - RNA, 19 nt, Homo sapiens
  misc_RNA (1)...(19): siRNA sense strand
guuaagaaagcccacaaau

SEQ ID NO: 1532088 - RNA, 19 nt, Homo sapiens
  misc_RNA (1)...(19): siRNA sense strand
gagugacccugaauguucu

SEQ ID NO: 1532089 - RNA, 19 nt, Homo sapiens
  misc_RNA (1)...(19): siRNA sense strand
gaucuggaccgggaauuca

SEQ ID NO: 1532090 - RNA, 19 nt, Homo sapiens
  misc_RNA (1)...(19): siRNA sense strand
uuaagaaagcccacaaauc

SEQ ID NO: 1532091 - RNA, 19 nt, Homo sapiens
  misc_RNA (1)...(19): siRNA sense strand
gcacagugaagacuuacuc

SEQ ID NO: 1532092 - RNA, 19 nt, Homo sapiens
  misc_RNA (1)...(19): siRNA sense strand
ccucugaaauucuccaaac

SEQ ID NO: 1532093 - RNA, 19 nt, Homo sapiens
  misc_RNA (1)...(19): siRNA sense strand
gcccugcuccucuuuccua

SEQ ID NO: 1532094 - RNA, 19 nt, Homo sapiens
  misc_RNA (1)...(19): siRNA sense strand
acaaauccaagacccauug

SEQ ID NO: 1532095 - RNA, 19 nt, Homo sapiens
  misc_RNA (1)...(19): siRNA sense strand
gugaugaugcccuuguuug

SEQ ID NO: 1532096 - RNA, 19 nt, Homo sapiens
  misc_RNA (1)...(19): siRNA sense strand
ucagaugccaugacuuuca

SEQ ID NO: 1532097 - RNA, 19 nt, Homo sapiens
  misc_RNA (1)...(19): siRNA sense strand
gcauugcaggaguuuguuu

SEQ ID NO: 1532098 - RNA, 19 nt, Homo sapiens
  misc_RNA (1)...(19): siRNA sense strand
gaacccgaccaucgaaucu

SEQ ID NO: 1532099 - RNA, 19 nt, Homo sapiens
  misc_RNA (1)...(19): siRNA sense strand
ugggaucaauggucucaga

SEQ ID NO: 1532100 - RNA, 19 nt, Homo sapiens
  misc_RNA (1)...(19): siRNA sense strand
guucucagaugccaugacu

SEQ ID NO: 1532101 - RNA, 19 nt, Homo sapiens
  misc_RNA (1)...(19): siRNA sense strand
cauugcaggaguuuguuua

SEQ ID NO: 1532102 - RNA, 19 nt, Homo sapiens
  misc_RNA (1)...(19): siRNA sense strand
cugcuccucuuuccuaugu

SEQ ID NO: 1532103 - RNA, 19 nt, Homo sapiens
  misc_RNA (1)...(19): siRNA sense strand
agaaagcccacaaauccaa

SEQ ID NO: 1532104 - RNA, 19 nt, Homo sapiens
  misc_RNA (1)...(19): siRNA sense strand
cauugccuauggaauuuga

SEQ ID NO: 1532105 - RNA, 19 nt, Homo sapiens
  misc_RNA (1)...(19): siRNA sense strand
agaagaaagcuauggcaau

SEQ ID NO: 1532106 - RNA, 19 nt, Homo sapiens
  misc_RNA (1)...(19): siRNA sense strand
ugaauguucuggaaaugac

SEQ ID NO: 1532107 - RNA, 19 nt, Homo sapiens
  misc_RNA (1)...(19): siRNA sense strand
ggugaugaugcccuuguuu

SEQ ID NO: 1532108 - RNA, 19 nt, Homo sapiens
  misc_RNA (1)...(19): siRNA sense strand
ggaccgggaauucauggau

SEQ ID NO: 1532109 - RNA, 19 nt, Homo sapiens
  misc_RNA (1)...(19): siRNA sense strand
gcugcugaccuguggcuuu

SEQ ID NO: 1532110 - RNA, 19 nt, Homo sapiens
  misc_RNA (1)...(19): siRNA sense strand
ucaucaccuuuaaauguug

SEQ ID NO: 1532111 - RNA, 19 nt, Homo sapiens
  misc_RNA (1)...(19): siRNA sense strand
cugcugaccuguggcuuug

SEQ ID NO: 1532112 - RNA, 19 nt, Homo sapiens
  misc_RNA (1)...(19): siRNA sense strand
uuaaguggcuaccccaaaa

SEQ ID NO: 1532113 - RNA, 19 nt, Homo sapiens
  misc_RNA (1)...(19): siRNA sense strand
ggaacccgaccaucgaauc

SEQ ID NO: 1532114 - RNA, 19 nt, Homo sapiens
  misc_RNA (1)...(19): siRNA sense strand
caaauccaagacccauuga

SEQ ID NO: 1532115 - RNA, 19 nt, Homo sapiens
  misc_RNA (1)...(19): siRNA sense strand
ugaguucauccaaugguuu

SEQ ID NO: 1532116 - RNA, 19 nt, Homo sapiens
  misc_RNA (1)...(19): siRNA sense strand
auugcacagugaagacuua

SEQ ID NO: 1532117 - RNA, 19 nt, Homo sapiens
  misc_RNA (1)...(19): siRNA sense strand
cacaucaauuugguuguug

SEQ ID NO: 1532118 - RNA, 19 nt, Homo sapiens
  misc_RNA (1)...(19): siRNA sense strand
cccuagaaauagccucuga

SEQ ID NO: 1532119 - RNA, 19 nt, Homo sapiens
  misc_RNA (1)...(19): siRNA sense strand
acagugcccugcuccucuu

SEQ ID NO: 1532120 - RNA, 19 nt, Homo sapiens
  misc_RNA (1)...(19): siRNA sense strand
ggguggaguuugugaugag

SEQ ID NO: 1532121 - RNA, 19 nt, Homo sapiens
  misc_RNA (1)...(19): siRNA sense strand
ugcagucggugguggagaa

SEQ ID NO: 1532122 - RNA, 19 nt, Homo sapiens
  misc_RNA (1)...(19): siRNA sense strand
uggccuucaucaccuuuaa

SEQ ID NO: 1532123 - RNA, 19 nt, Homo sapiens
  misc_RNA (1)...(19): siRNA sense strand
ucagaaauuccagagaaga

SEQ ID NO: 1532124 - RNA, 19 nt, Homo sapiens
  misc_RNA (1)...(19): siRNA sense strand
caucaccuuuaaauguugu

SEQ ID NO: 1532125 - RNA, 19 nt, Homo sapiens
  misc_RNA (1)...(19): siRNA sense strand
accgggaauucauggauuu

SEQ ID NO: 1532126 - RNA, 19 nt, Homo sapiens
  misc_RNA (1)...(19): siRNA sense strand
uuacaaggagaacaucaug

SEQ ID NO: 1532127 - RNA, 19 nt, Homo sapiens
  misc_RNA (1)...(19): siRNA sense strand
agaaauuccagagaagaaa

SEQ ID NO: 1532128 - RNA, 19 nt, Homo sapiens
  misc_RNA (1)...(19): siRNA sense strand
ucaacugccaucagggaaa

SEQ ID NO: 1532129 - RNA, 19 nt, Homo sapiens
  misc_RNA (1)...(19): siRNA sense strand
aaaguuacaaggagaacau

SEQ ID NO: 1532130 - RNA, 19 nt, Homo sapiens
  misc_RNA (1)...(19): siRNA sense strand
gaugggagucacugguuca

SEQ ID NO: 1532131 - RNA, 19 nt, Homo sapiens
  misc_RNA (1)...(19): siRNA sense strand
agggaaagccauugccuau

SEQ ID NO: 1532132 - RNA, 19 nt, Homo sapiens
  misc_RNA (1)...(19): siRNA sense strand
gaccgaaaauuaguagaau

SEQ ID NO: 1532133 - RNA, 19 nt, Homo sapiens
  misc_RNA (1)...(19): siRNA sense strand
ucagauggacaaugcaaag

SEQ ID NO: 1532134 - RNA, 19 nt, Homo sapiens
  misc_RNA (1)...(19): siRNA sense strand
gaugaugcccuuguuuggu

SEQ ID NO: 1532135 - RNA, 19 nt, Homo sapiens
  misc_RNA (1)...(19): siRNA sense strand
guucccaugguguuuauga

SEQ ID NO: 1532136 - RNA, 19 nt, Homo sapiens
  misc_RNA (1)...(19): siRNA sense strand
caauggaaagcacaaguac

SEQ ID NO: 1532137 - RNA, 19 nt, Homo sapiens
  misc_RNA (1)...(19): siRNA sense strand
ccugaauguucuggaaaug

SEQ ID NO: 1532138 - RNA, 19 nt, Homo sapiens
  misc_RNA (1)...(19): siRNA sense strand
gaguuaagaaagcccacaa

SEQ ID NO: 1532139 - RNA, 19 nt, Homo sapiens
  misc_RNA (1)...(19): siRNA sense strand
gaaugaagcucgacugaga

SEQ ID NO: 1532140 - RNA, 19 nt, Homo sapiens
  misc_RNA (1)...(19): siRNA sense strand
ggaaaguccugaagaaauc

SEQ ID NO: 1532141 - RNA, 19 nt, Homo sapiens
  misc_RNA (1)...(19): siRNA sense strand
ucaaguaggucucuuucua

SEQ ID NO: 1532142 - RNA, 19 nt, Homo sapiens
  misc_RNA (1)...(19): siRNA sense strand
gaagaaauccagugguuug

SEQ ID NO: 1532143 - RNA, 19 nt, Homo sapiens
  misc_RNA (1)...(19): siRNA sense strand
guaaagaaacccuggauau

SEQ ID NO: 1532144 - RNA, 19 nt, Homo sapiens
  misc_RNA (1)...(19): siRNA sense strand
gaacaucaacaauuaggaa

SEQ ID NO: 1532145 - RNA, 19 nt, Homo sapiens
  misc_RNA (1)...(19): siRNA sense strand
gccaugggcuucacuggua

SEQ ID NO: 1532146 - RNA, 19 nt, Homo sapiens
  misc_RNA (1)...(19): siRNA sense strand
gagcugggcugcuuagaca

SEQ ID NO: 1532147 - RNA, 19 nt, Homo sapiens
  misc_RNA (1)...(19): siRNA sense strand
gaucugggcccuacugaaa

SEQ ID NO: 1532148 - RNA, 19 nt, Homo sapiens
  misc_RNA (1)...(19): siRNA sense strand
gcaaaagauuguugucaua

SEQ ID NO: 1532149 - RNA, 19 nt, Homo sapiens
  misc_RNA (1)...(19): siRNA sense strand
guaggucucuuucuagaug

SEQ ID NO: 1532150 - RNA, 19 nt, Homo sapiens
  misc_RNA (1)...(19): siRNA sense strand
gaagcucgacugagaauug

SEQ ID NO: 1532151 - RNA, 19 nt, Homo sapiens
  misc_RNA (1)...(19): siRNA sense strand
gaaggucgggccucaagua

SEQ ID NO: 1532152 - RNA, 19 nt, Homo sapiens
  misc_RNA (1)...(19): siRNA sense strand
ggagggcagugcuuuaugu

SEQ ID NO: 1532153 - RNA, 19 nt, Homo sapiens
  misc_RNA (1)...(19): siRNA sense strand
cagcauaggugcaacaagu

SEQ ID NO: 1532154 - RNA, 19 nt, Homo sapiens
  misc_RNA (1)...(19): siRNA sense strand
gguggaaaguccugaagaa

SEQ ID NO: 1532155 - RNA, 19 nt, Homo sapiens
  misc_RNA (1)...(19): siRNA sense strand
uaagugggcugaagaacug

SEQ ID NO: 1532156 - RNA, 19 nt, Homo sapiens
  misc_RNA (1)...(19): siRNA sense strand
caauggguuugcucaauuu

SEQ ID NO: 1532157 - RNA, 19 nt, Homo sapiens
  misc_RNA (1)...(19): siRNA sense strand
gcaacaaguaguaaagaaa

SEQ ID NO: 1532158 - RNA, 19 nt, Homo sapiens
  misc_RNA (1)...(19): siRNA sense strand
gaacugauugcugccuuua

SEQ ID NO: 1532159 - RNA, 19 nt, Homo sapiens
  misc_RNA (1)...(19): siRNA sense strand
uaaagaaacccuggauauu

SEQ ID NO: 1532160 - RNA, 19 nt, Homo sapiens
  misc_RNA (1)...(19): siRNA sense strand
uggaguggcugcaaacaaa

SEQ ID NO: 1532161 - RNA, 19 nt, Homo sapiens
  misc_RNA (1)...(19): siRNA sense strand
gauucacccuaaccaaauu

SEQ ID NO: 1532162 - RNA, 19 nt, Homo sapiens
  misc_RNA (1)...(19): siRNA sense strand
aaagaaacccuggauauuc

SEQ ID NO: 1532163 - RNA, 19 nt, Homo sapiens
  misc_RNA (1)...(19): siRNA sense strand
cugaagaaauccagugguu

SEQ ID NO: 1532164 - RNA, 19 nt, Homo sapiens
  misc_RNA (1)...(19): siRNA sense strand
ccucaucccaucacaagua

SEQ ID NO: 1532165 - RNA, 19 nt, Homo sapiens
  misc_RNA (1)...(19): siRNA sense strand
uacauugacuuucgagaug

SEQ ID NO: 1532166 - RNA, 19 nt, Homo sapiens
  misc_RNA (1)...(19): siRNA sense strand
aaacuugaacaaccaauga

SEQ ID NO: 1532167 - RNA, 19 nt, Homo sapiens
  misc_RNA (1)...(19): siRNA sense strand
acugauugcugccuuuaaa

SEQ ID NO: 1532168 - RNA, 19 nt, Homo sapiens
  misc_RNA (1)...(19): siRNA sense strand
gcugaaagcgucucuagca

SEQ ID NO: 1532169 - RNA, 19 nt, Homo sapiens
  misc_RNA (1)...(19): siRNA sense strand
ggucgggccucaaguaggu

SEQ ID NO: 1532170 - RNA, 19 nt, Homo sapiens
  misc_RNA (1)...(19): siRNA sense strand
guagaucugguguacauug

SEQ ID NO: 1532171 - RNA, 19 nt, Homo sapiens
  misc_RNA (1)...(19): siRNA sense strand
gcucgacugagaauuguaa

SEQ ID NO: 1532172 - RNA, 19 nt, Homo sapiens
  misc_RNA (1)...(19): siRNA sense strand
guacauugacuuucgagau

SEQ ID NO: 1532173 - RNA, 19 nt, Homo sapiens
  misc_RNA (1)...(19): siRNA sense strand
uuauguaccuggaaaugau

SEQ ID NO: 1532174 - RNA, 19 nt, Homo sapiens
  misc_RNA (1)...(19): siRNA sense strand
uagaucugguguacauuga

SEQ ID NO: 1532175 - RNA, 19 nt, Homo sapiens
  misc_RNA (1)...(19): siRNA sense strand
gaagaccuagagacccuuu

SEQ ID NO: 1532176 - RNA, 19 nt, Homo sapiens
  misc_RNA (1)...(19): siRNA sense strand
ccguagaucugguguacau

SEQ ID NO: 1532177 - RNA, 19 nt, Homo sapiens
  misc_RNA (1)...(19): siRNA sense strand
caaguaggucucuuucuag

SEQ ID NO: 1532178 - RNA, 19 nt, Homo sapiens
  misc_RNA (1)...(19): siRNA sense strand
cgacaugccauuacugaag

SEQ ID NO: 1532179 - RNA, 19 nt, Homo sapiens
  misc_RNA (1)...(19): siRNA sense strand
caacaaguaguaaagaaac

SEQ ID NO: 1532180 - RNA, 19 nt, Homo sapiens
  misc_RNA (1)...(19): siRNA sense strand
caucaacaauuaggaaagg

SEQ ID NO: 1532181 - RNA, 19 nt, Homo sapiens
  misc_RNA (1)...(19): siRNA sense strand
gagggcagugcuuuaugua

SEQ ID NO: 1532182 - RNA, 19 nt, Homo sapiens
  misc_RNA (1)...(19): siRNA sense strand
ugcaacaaguaguaaagaa

SEQ ID NO: 1532183 - RNA, 19 nt, Homo sapiens
  misc_RNA (1)...(19): siRNA sense strand
uaugaucgacaugccauua

SEQ ID NO: 1532184 - RNA, 19 nt, Homo sapiens
  misc_RNA (1)...(19): siRNA sense strand
gauugcugccuuuaaagaa

SEQ ID NO: 1532185 - RNA, 19 nt, Homo sapiens
  misc_RNA (1)...(19): siRNA sense strand
gaucugguguacauugacu

SEQ ID NO: 1532186 - RNA, 19 nt, Homo sapiens
  misc_RNA (1)...(19): siRNA sense strand
aaguaggucucuuucuaga

SEQ ID NO: 1532187 - RNA, 19 nt, Homo sapiens
  misc_RNA (1)...(19): siRNA sense strand
agaacugauugcugccuuu

SEQ ID NO: 1532188 - RNA, 19 nt, Homo sapiens
  misc_RNA (1)...(19): siRNA sense strand
ccaugggcuucacugguaa

SEQ ID NO: 1532189 - RNA, 19 nt, Homo sapiens
  misc_RNA (1)...(19): siRNA sense strand
uggaaaguccugaagaaau

SEQ ID NO: 1532190 - RNA, 19 nt, Homo sapiens
  misc_RNA (1)...(19): siRNA sense strand
uaaggcagugugugaagaa

SEQ ID NO: 1532191 - RNA, 19 nt, Homo sapiens
  misc_RNA (1)...(19): siRNA sense strand
gugaagaaacccugaaggu

SEQ ID NO: 1532192 - RNA, 19 nt, Homo sapiens
  misc_RNA (1)...(19): siRNA sense strand
ugaagaaauccagugguuu

SEQ ID NO: 1532193 - RNA, 19 nt, Homo sapiens
  misc_RNA (1)...(19): siRNA sense strand
uuaaaaggccgaaaacuug

SEQ ID NO: 1532194 - RNA, 19 nt, Homo sapiens
  misc_RNA (1)...(19): siRNA sense strand
guggaaaguccugaagaaa

SEQ ID NO: 1532195 - RNA, 19 nt, Homo sapiens
  misc_RNA (1)...(19): siRNA sense strand
gauggagcugggcugcuua

SEQ ID NO: 1532196 - RNA, 19 nt, Homo sapiens
  misc_RNA (1)...(19): siRNA sense strand
gcugauauccccagacuug

SEQ ID NO: 1532197 - RNA, 19 nt, Homo sapiens
  misc_RNA (1)...(19): siRNA sense strand
gcauaggugcaacaaguag

SEQ ID NO: 1532198 - RNA, 19 nt, Homo sapiens
  misc_RNA (1)...(19): siRNA sense strand
uuaaggcagugugugaaga

SEQ ID NO: 1532199 - RNA, 19 nt, Homo sapiens
  misc_RNA (1)...(19): siRNA sense strand
agauggagcugggcugcuu

SEQ ID NO: 1532200 - RNA, 19 nt, Homo sapiens
  misc_RNA (1)...(19): siRNA sense strand
gcucgacugugaggaugga

SEQ ID NO: 1532201 - RNA, 19 nt, Homo sapiens
  misc_RNA (1)...(19): siRNA sense strand
gcuuagacagucacgagaa

SEQ ID NO: 1532202 - RNA, 19 nt, Homo sapiens
  misc_RNA (1)...(19): siRNA sense strand
uuccaucccugaauguaga

SEQ ID NO: 1532203 - RNA, 19 nt, Homo sapiens
  misc_RNA (1)...(19): siRNA sense strand
gguguacauugacuuucga

SEQ ID NO: 1532204 - RNA, 19 nt, Homo sapiens
  misc_RNA (1)...(19): siRNA sense strand
aagaaugaagcucgacuga

SEQ ID NO: 1532205 - RNA, 19 nt, Homo sapiens
  misc_RNA (1)...(19): siRNA sense strand
ugauugcugccuuuaaaga

SEQ ID NO: 1532206 - RNA, 19 nt, Homo sapiens
  misc_RNA (1)...(19): siRNA sense strand
ugauucacccuaaccaaau

SEQ ID NO: 1532207 - RNA, 19 nt, Homo sapiens
  misc_RNA (1)...(19): siRNA sense strand
ccagccugaugcuaccaaa

SEQ ID NO: 1532208 - RNA, 19 nt, Homo sapiens
  misc_RNA (1)...(19): siRNA sense strand
ccaccuccaucaaggaaaa

SEQ ID NO: 1532209 - RNA, 19 nt, Homo sapiens
  misc_RNA (1)...(19): siRNA sense strand
gaagcaggcccagaacacu

SEQ ID NO: 1532210 - RNA, 19 nt, Homo sapiens
  misc_RNA (1)...(19): siRNA sense strand
aggauggaguggcugcaaa

SEQ ID NO: 1532211 - RNA, 19 nt, Homo sapiens
  misc_RNA (1)...(19): siRNA sense strand
aaauuaagugggcugaaga

SEQ ID NO: 1532212 - RNA, 19 nt, Homo sapiens
  misc_RNA (1)...(19): siRNA sense strand
uggguuugcucaauuuuaa

SEQ ID NO: 1532213 - RNA, 19 nt, Homo sapiens
  misc_RNA (1)...(19): siRNA sense strand
cuugaacaaccaaugaauu

SEQ ID NO: 1532214 - RNA, 19 nt, Homo sapiens
  misc_RNA (1)...(19): siRNA sense strand
gugcaacaaguaguaaaga

SEQ ID NO: 1532215 - RNA, 19 nt, Homo sapiens
  misc_RNA (1)...(19): siRNA sense strand
ggcaaaagauuguugucau

SEQ ID NO: 1532216 - RNA, 19 nt, Homo sapiens
  misc_RNA (1)...(19): siRNA sense strand
aguaaagaaacccuggaua

SEQ ID NO: 1532217 - RNA, 19 nt, Homo sapiens
  misc_RNA (1)...(19): siRNA sense strand
gcagacaaauuuucauucc

SEQ ID NO: 1532218 - RNA, 19 nt, Homo sapiens
  misc_RNA (1)...(19): siRNA sense strand
cuuucuagaugcagucguu

SEQ ID NO: 1532219 - RNA, 19 nt, Homo sapiens
  misc_RNA (1)...(19): siRNA sense strand
guaccuggaaaugaugaaa

SEQ ID NO: 1532220 - RNA, 19 nt, Homo sapiens
  misc_RNA (1)...(19): siRNA sense strand
ggagaaaggaggcgaauua

SEQ ID NO: 1532221 - RNA, 19 nt, Homo sapiens
  misc_RNA (1)...(19): siRNA sense strand
ggaauugaaucaccaguuu

SEQ ID NO: 1532222 - RNA, 19 nt, Homo sapiens
  misc_RNA (1)...(19): siRNA sense strand
gaaagagggucaugaaaca

SEQ ID NO: 1532223 - RNA, 19 nt, Homo sapiens
  misc_RNA (1)...(19): siRNA sense strand
ggaaagagauacccuggaa

SEQ ID NO: 1532224 - RNA, 19 nt, Homo sapiens
  misc_RNA (1)...(19): siRNA sense strand
caagauaccugugaaacua

SEQ ID NO: 1532225 - RNA, 19 nt, Homo sapiens
  misc_RNA (1)...(19): siRNA sense strand
cagcugaccugaacuguaa

SEQ ID NO: 1532226 - RNA, 19 nt, Homo sapiens
  misc_RNA (1)...(19): siRNA sense strand
acaaagccaugucauauaa

SEQ ID NO: 1532227 - RNA, 19 nt, Homo sapiens
  misc_RNA (1)...(19): siRNA sense strand
gagacucacuuccagguua

SEQ ID NO: 1532228 - RNA, 19 nt, Homo sapiens
  misc_RNA (1)...(19): siRNA sense strand
gcaccauugugauuacuua

SEQ ID NO: 1532229 - RNA, 19 nt, Homo sapiens
  misc_RNA (1)...(19): siRNA sense strand
gagcagagggcauacauaa

SEQ ID NO: 1532230 - RNA, 19 nt, Homo sapiens
  misc_RNA (1)...(19): siRNA sense strand
ccucagaacuggacaagaa

SEQ ID NO: 1532231 - RNA, 19 nt, Homo sapiens
  misc_RNA (1)...(19): siRNA sense strand
ccaagacauugaaagaaua

SEQ ID NO: 1532232 - RNA, 19 nt, Homo sapiens
  misc_RNA (1)...(19): siRNA sense strand
ggaagcagcucgugagucu

SEQ ID NO: 1532233 - RNA, 19 nt, Homo sapiens
  misc_RNA (1)...(19): siRNA sense strand
ccaaauacuuguugacgaa

SEQ ID NO: 1532234 - RNA, 19 nt, Homo sapiens
  misc_RNA (1)...(19): siRNA sense strand
gcaggcaaauaaauucaaa

SEQ ID NO: 1532235 - RNA, 19 nt, Homo sapiens
  misc_RNA (1)...(19): siRNA sense strand
agaaagcacuuacaucaga

SEQ ID NO: 1532236 - RNA, 19 nt, Homo sapiens
  misc_RNA (1)...(19): siRNA sense strand
gaaaggaggcgaauuaacu

SEQ ID NO: 1532237 - RNA, 19 nt, Homo sapiens
  misc_RNA (1)...(19): siRNA sense strand
aaacaccgauggacauuga

SEQ ID NO: 1532238 - RNA, 19 nt, Homo sapiens
  misc_RNA (1)...(19): siRNA sense strand
caacaaagccaugucauau

SEQ ID NO: 1532239 - RNA, 19 nt, Homo sapiens
  misc_RNA (1)...(19): siRNA sense strand
gagaaaagauuugguguaa

SEQ ID NO: 1532240 - RNA, 19 nt, Homo sapiens
  misc_RNA (1)...(19): siRNA sense strand
gaaacuauuugcugccaau

SEQ ID NO: 1532241 - RNA, 19 nt, Homo sapiens
  misc_RNA (1)...(19): siRNA sense strand
gaauacagcgaacugcaua

SEQ ID NO: 1532242 - RNA, 19 nt, Homo sapiens
  misc_RNA (1)...(19): siRNA sense strand
aaagagauacccuggaaua

SEQ ID NO: 1532243 - RNA, 19 nt, Homo sapiens
  misc_RNA (1)...(19): siRNA sense strand
gaacacgagaccucaaauu

SEQ ID NO: 1532244 - RNA, 19 nt, Homo sapiens
  misc_RNA (1)...(19): siRNA sense strand
acaguaagcaggcaaauaa

SEQ ID NO: 1532245 - RNA, 19 nt, Homo sapiens
  misc_RNA (1)...(19): siRNA sense strand
gcugaaagccaaaggaauu

SEQ ID NO: 1532246 - RNA, 19 nt, Homo sapiens
  misc_RNA (1)...(19): siRNA sense strand
ggacaccauuaguaacaaa

SEQ ID NO: 1532247 - RNA, 19 nt, Homo sapiens
  misc_RNA (1)...(19): siRNA sense strand
gaaguucccuugccuuacu

SEQ ID NO: 1532248 - RNA, 19 nt, Homo sapiens
  misc_RNA (1)...(19): siRNA sense strand
ccucaaauuucuucacuga

SEQ ID NO: 1532249 - RNA, 19 nt, Homo sapiens
  misc_RNA (1)...(19): siRNA sense strand
gacccaagaugacauuuca

SEQ ID NO: 1532250 - RNA, 19 nt, Homo sapiens
  misc_RNA (1)...(19): siRNA sense strand
guaagcaggcaaauaaauu

SEQ ID NO: 1532251 - RNA, 19 nt, Homo sapiens
  misc_RNA (1)...(19): siRNA sense strand
ggagagcaccaaauacuug

SEQ ID NO: 1532252 - RNA, 19 nt, Homo sapiens
  misc_RNA (1)...(19): siRNA sense strand
gaaagcaggcauacaaaca

SEQ ID NO: 1532253 - RNA, 19 nt, Homo sapiens
  misc_RNA (1)...(19): siRNA sense strand
ccaaagagcagagggcaua

SEQ ID NO: 1532254 - RNA, 19 nt, Homo sapiens
  misc_RNA (1)...(19): siRNA sense strand
gaauugaaucaccaguuua

SEQ ID NO: 1532255 - RNA, 19 nt, Homo sapiens
  misc_RNA (1)...(19): siRNA sense strand
ggacauugauagcgaugau

SEQ ID NO: 1532256 - RNA, 19 nt, Homo sapiens
  misc_RNA (1)...(19): siRNA sense strand
ucaaauuucuucacugaca

SEQ ID NO: 1532257 - RNA, 19 nt, Homo sapiens
  misc_RNA (1)...(19): siRNA sense strand
caacaugaaggacauauuc

SEQ ID NO: 1532258 - RNA, 19 nt, Homo sapiens
  misc_RNA (1)...(19): siRNA sense strand
gaaaagauuugguguaaac

SEQ ID NO: 1532259 - RNA, 19 nt, Homo sapiens
  misc_RNA (1)...(19): siRNA sense strand
gaacuggacaagaaggaaa

SEQ ID NO: 1532260 - RNA, 19 nt, Homo sapiens
  misc_RNA (1)...(19): siRNA sense strand
caaauauggucuguuuaga

SEQ ID NO: 1532261 - RNA, 19 nt, Homo sapiens
  misc_RNA (1)...(19): siRNA sense strand
ugauagcgaugauuccaaa

SEQ ID NO: 1532262 - RNA, 19 nt, Homo sapiens
  misc_RNA (1)...(19): siRNA sense strand
gagauacccuggaauacag

SEQ ID NO: 1532263 - RNA, 19 nt, Homo sapiens
  misc_RNA (1)...(19): siRNA sense strand
gggcaucugugucaucugu

SEQ ID NO: 1532264 - RNA, 19 nt, Homo sapiens
  misc_RNA (1)...(19): siRNA sense strand
gagagggacagcugcauuu

SEQ ID NO: 1532265 - RNA, 19 nt, Homo sapiens
  misc_RNA (1)...(19): siRNA sense strand
cauacuugccugauaauaa

SEQ ID NO: 1532266 - RNA, 19 nt, Homo sapiens
  misc_RNA (1)...(19): siRNA sense strand
gcgaagcaguauguucuaa

SEQ ID NO: 1532267 - RNA, 19 nt, Homo sapiens
  misc_RNA (1)...(19): siRNA sense strand
agaccaaguuugcugauga

SEQ ID NO: 1532268 - RNA, 19 nt, Homo sapiens
  misc_RNA (1)...(19): siRNA sense strand
ggagauaucagagaucgaa

SEQ ID NO: 1532269 - RNA, 19 nt, Homo sapiens
  misc_RNA (1)...(19): siRNA sense strand
cuccaaauauggucuguuu

SEQ ID NO: 1532270 - RNA, 19 nt, Homo sapiens
  misc_RNA (1)...(19): siRNA sense strand
gagaaaggaggcgaauuaa

SEQ ID NO: 1532271 - RNA, 19 nt, Homo sapiens
  misc_RNA (1)...(19): siRNA sense strand
gggguacucucgcguauua

SEQ ID NO: 1532272 - RNA, 19 nt, Homo sapiens
  misc_RNA (1)...(19): siRNA sense strand
cugcauacuugccugauaa

SEQ ID NO: 1532273 - RNA, 19 nt, Homo sapiens
  misc_RNA (1)...(19): siRNA sense strand
acagcgaacugcauacuug

SEQ ID NO: 1532274 - RNA, 19 nt, Homo sapiens
  misc_RNA (1)...(19): siRNA sense strand
ucaacaaagccaugucaua

SEQ ID NO: 1532275 - RNA, 19 nt, Homo sapiens
  misc_RNA (1)...(19): siRNA sense strand
gaagcaguauguucuaaaa

SEQ ID NO: 1532276 - RNA, 19 nt, Homo sapiens
  misc_RNA (1)...(19): siRNA sense strand
cauuucagcugccaaacaa

SEQ ID NO: 1532277 - RNA, 19 nt, Homo sapiens
  misc_RNA (1)...(19): siRNA sense strand
agagaaagcacuuacauca

SEQ ID NO: 1532278 - RNA, 19 nt, Homo sapiens
  misc_RNA (1)...(19): siRNA sense strand
ccauugugauuacuuauuc

SEQ ID NO: 1532279 - RNA, 19 nt, Homo sapiens
  misc_RNA (1)...(19): siRNA sense strand
caaugacuuugacugguuu

SEQ ID NO: 1532280 - RNA, 19 nt, Homo sapiens
  misc_RNA (1)...(19): siRNA sense strand
gauuugguguaaacauuga

SEQ ID NO: 1532281 - RNA, 19 nt, Homo sapiens
  misc_RNA (1)...(19): siRNA sense strand
gcaucugugucaucuguau

SEQ ID NO: 1532282 - RNA, 19 nt, Homo sapiens
  misc_RNA (1)...(19): siRNA sense strand
ccaaauauggucuguuuag

SEQ ID NO: 1532283 - RNA, 19 nt, Homo sapiens
  misc_RNA (1)...(19): siRNA sense strand
ugaaucaccaguuuacaaa

SEQ ID NO: 1532284 - RNA, 19 nt, Homo sapiens
  misc_RNA (1)...(19): siRNA sense strand
ccacaugccagacuuccua

SEQ ID NO: 1532285 - RNA, 19 nt, Homo sapiens
  misc_RNA (1)...(19): siRNA sense strand
caaagugcaagcaugaauu

SEQ ID NO: 1532286 - RNA, 19 nt, Homo sapiens
  misc_RNA (1)...(19): siRNA sense strand
gaaaagggcaucuguguca

SEQ ID NO: 1532287 - RNA, 19 nt, Homo sapiens
  misc_RNA (1)...(19): siRNA sense strand
caaaggcgaagcaguaugu

SEQ ID NO: 1532288 - RNA, 19 nt, Homo sapiens
  misc_RNA (1)...(19): siRNA sense strand
gauuucaccucaagucgau

SEQ ID NO: 1532289 - RNA, 19 nt, Homo sapiens
  misc_RNA (1)...(19): siRNA sense strand
cacgagaccucaaauuucu

SEQ ID NO: 1532290 - RNA, 19 nt, Homo sapiens
  misc_RNA (1)...(19): siRNA sense strand
ugaauguaauugagguuga

SEQ ID NO: 1532291 - RNA, 19 nt, Homo sapiens
  misc_RNA (1)...(19): siRNA sense strand
ggaaggucacgauggaauu

SEQ ID NO: 1532292 - RNA, 19 nt, Homo sapiens
  misc_RNA (1)...(19): siRNA sense strand
ggagagaaagcacuuacau

SEQ ID NO: 1532293 - RNA, 19 nt, Homo sapiens
  misc_RNA (1)...(19): siRNA sense strand
gcaaggagagaaagcacuu

SEQ ID NO: 1532294 - RNA, 19 nt, Homo sapiens
  misc_RNA (1)...(19): siRNA sense strand
gaauguaauugagguugau

SEQ ID NO: 1532295 - RNA, 19 nt, Homo sapiens
  misc_RNA (1)...(19): siRNA sense strand
ggagagggacagcugcauu

SEQ ID NO: 1532296 - RNA, 19 nt, Homo sapiens
  misc_RNA (1)...(19): siRNA sense strand
gagcugaaagccaaaggaa

SEQ ID NO: 1532297 - RNA, 19 nt, Homo sapiens
  misc_RNA (1)...(19): siRNA sense strand
gaaggucacgauggaauug

SEQ ID NO: 1532298 - RNA, 19 nt, Homo sapiens
  misc_RNA (1)...(19): siRNA sense strand
gacaguaagcaggcaaaua

SEQ ID NO: 1532299 - RNA, 19 nt, Homo sapiens
  misc_RNA (1)...(19): siRNA sense strand
uccaagacauugaaagaau

SEQ ID NO: 1532300 - RNA, 19 nt, Homo sapiens
  misc_RNA (1)...(19): siRNA sense strand
aaagugagcagaaacaaca

SEQ ID NO: 1532301 - RNA, 19 nt, Homo sapiens
  misc_RNA (1)...(19): siRNA sense strand
uucauuggcuggaaagaaa

SEQ ID NO: 1532302 - RNA, 19 nt, Homo sapiens
  misc_RNA (1)...(19): siRNA sense strand
gaagcaagaaugugucucu

SEQ ID NO: 1532303 - RNA, 19 nt, Homo sapiens
  misc_RNA (1)...(19): siRNA sense strand
uguaacagcugaccugaac

SEQ ID NO: 1532304 - RNA, 19 nt, Homo sapiens
  misc_RNA (1)...(19): siRNA sense strand
gcuauccugauccuucuua

SEQ ID NO: 1532305 - RNA, 19 nt, Homo sapiens
  misc_RNA (1)...(19): siRNA sense strand
caugucaguugaugagaga

SEQ ID NO: 1532306 - RNA, 19 nt, Homo sapiens
  misc_RNA (1)...(19): siRNA sense strand
aaaaggagagcaccaaaua

SEQ ID NO: 1532307 - RNA, 19 nt, Homo sapiens
  misc_RNA (1)...(19): siRNA sense strand
gggcauacauaaccacacu

SEQ ID NO: 1532308 - RNA, 19 nt, Homo sapiens
  misc_RNA (1)...(19): siRNA sense strand
gagcaccaaauacuuguug

SEQ ID NO: 1532309 - RNA, 19 nt, Homo sapiens
  misc_RNA (1)...(19): siRNA sense strand
auacuugccugauaauaag

SEQ ID NO: 1532310 - RNA, 19 nt, Homo sapiens
  misc_RNA (1)...(19): siRNA sense strand
ccagagggaagcaugguuu

SEQ ID NO: 1532311 - RNA, 19 nt, Homo sapiens
  misc_RNA (1)...(19): siRNA sense strand
ugccagacuuccuauggua

SEQ ID NO: 1532312 - RNA, 19 nt, Homo sapiens
  misc_RNA (1)...(19): siRNA sense strand
gagcagaaacaacaauuuu

SEQ ID NO: 1532313 - RNA, 19 nt, Homo sapiens
  misc_RNA (1)...(19): siRNA sense strand
gaagaacacgagaccucaa

SEQ ID NO: 1532314 - RNA, 19 nt, Homo sapiens
  misc_RNA (1)...(19): siRNA sense strand
uauggucuguuuagauuuc

SEQ ID NO: 1532315 - RNA, 19 nt, Homo sapiens
  misc_RNA (1)...(19): siRNA sense strand
gcaucaacaugaaggacau

SEQ ID NO: 1532316 - RNA, 19 nt, Homo sapiens
  misc_RNA (1)...(19): siRNA sense strand
aacaaagccaugucauaua

SEQ ID NO: 1532317 - RNA, 19 nt, Homo sapiens
  misc_RNA (1)...(19): siRNA sense strand
uugcaaaggcgaagcagua

SEQ ID NO: 1532318 - RNA, 19 nt, Homo sapiens
  misc_RNA (1)...(19): siRNA sense strand
cuaaaucaagagucaauga

SEQ ID NO: 1532319 - RNA, 19 nt, Homo sapiens
  misc_RNA (1)...(19): siRNA sense strand
aauguacacuuugugcuaa

SEQ ID NO: 1532320 - RNA, 19 nt, Homo sapiens
  misc_RNA (1)...(19): siRNA sense strand
gcaaacaacuuggaacuug

SEQ ID NO: 1532321 - RNA, 19 nt, Homo sapiens
  misc_RNA (1)...(19): siRNA sense strand
gaucagagauugguguauu

SEQ ID NO: 1532322 - RNA, 19 nt, Homo sapiens
  misc_RNA (1)...(19): siRNA sense strand
ucaaaggccuggauuaaug

SEQ ID NO: 1532323 - RNA, 19 nt, Homo sapiens
  misc_RNA (1)...(19): siRNA sense strand
gaaugagaauguucaaaug

SEQ ID NO: 1532324 - RNA, 19 nt, Homo sapiens
  misc_RNA (1)...(19): siRNA sense strand
caacaauaaugccgaaguu

SEQ ID NO: 1532325 - RNA, 19 nt, Homo sapiens
  misc_RNA (1)...(19): siRNA sense strand
gcaaggaaauguagacaac

SEQ ID NO: 1532326 - RNA, 19 nt, Homo sapiens
  misc_RNA (1)...(19): siRNA sense strand
gagccaugcuacugguuua

SEQ ID NO: 1532327 - RNA, 19 nt, Homo sapiens
  misc_RNA (1)...(19): siRNA sense strand
ucauaugguucaucuagua

SEQ ID NO: 1532328 - RNA, 19 nt, Homo sapiens
  misc_RNA (1)...(19): siRNA sense strand
gaaauacagugaccagacu

SEQ ID NO: 1532329 - RNA, 19 nt, Homo sapiens
  misc_RNA (1)...(19): siRNA sense strand
guaucaagcugcaguuuca

SEQ ID NO: 1532330 - RNA, 19 nt, Homo sapiens
  misc_RNA (1)...(19): siRNA sense strand
acuauuagcugcuucuuga

SEQ ID NO: 1532331 - RNA, 19 nt, Homo sapiens
  misc_RNA (1)...(19): siRNA sense strand
caaacaacuuggaacuuga

SEQ ID NO: 1532332 - RNA, 19 nt, Homo sapiens
  misc_RNA (1)...(19): siRNA sense strand
gcaaaccauugacgaagga

SEQ ID NO: 1532333 - RNA, 19 nt, Homo sapiens
  misc_RNA (1)...(19): siRNA sense strand
acagggagguccaguacua

SEQ ID NO: 1532334 - RNA, 19 nt, Homo sapiens
  misc_RNA (1)...(19): siRNA sense strand
cuucacagccucuaaauuu

SEQ ID NO: 1532335 - RNA, 19 nt, Homo sapiens
  misc_RNA (1)...(19): siRNA sense strand
gagaaagucaugaagcauu

SEQ ID NO: 1532336 - RNA, 19 nt, Homo sapiens
  misc_RNA (1)...(19): siRNA sense strand
caacuuggaacuugaagaa

SEQ ID NO: 1532337 - RNA, 19 nt, Homo sapiens
  misc_RNA (1)...(19): siRNA sense strand
gagcugcgauucuccuuag

SEQ ID NO: 1532338 - RNA, 19 nt, Homo sapiens
  misc_RNA (1)...(19): siRNA sense strand
gaaauggagcgucuuaugg

SEQ ID NO: 1532339 - RNA, 19 nt, Homo sapiens
  misc_RNA (1)...(19): siRNA sense strand
ccugugacccucaucauua

SEQ ID NO: 1532340 - RNA, 19 nt, Homo sapiens
  misc_RNA (1)...(19): siRNA sense strand
gaaauguagacaaccaauu

SEQ ID NO: 1532341 - RNA, 19 nt, Homo sapiens
  misc_RNA (1)...(19): siRNA sense strand
gaagaugccagugcaauuc

SEQ ID NO: 1532342 - RNA, 19 nt, Homo sapiens
  misc_RNA (1)...(19): siRNA sense strand
gacgaaggaucagagauug

SEQ ID NO: 1532343 - RNA, 19 nt, Homo sapiens
  misc_RNA (1)...(19): siRNA sense strand
uguaugcucaucaguauua

SEQ ID NO: 1532344 - RNA, 19 nt, Homo sapiens
  misc_RNA (1)...(19): siRNA sense strand
agaaagucaugaagcauug

SEQ ID NO: 1532345 - RNA, 19 nt, Homo sapiens
  misc_RNA (1)...(19): siRNA sense strand
ccaugcuacugguuuauuu

SEQ ID NO: 1532346 - RNA, 19 nt, Homo sapiens
  misc_RNA (1)...(19): siRNA sense strand
gcgauucuccuuagcauug

SEQ ID NO: 1532347 - RNA, 19 nt, Homo sapiens
  misc_RNA (1)...(19): siRNA sense strand
caacccagccuacuacuuc

SEQ ID NO: 1532348 - RNA, 19 nt, Homo sapiens
  misc_RNA (1)...(19): siRNA sense strand
gcacagagucaccaguuuc

SEQ ID NO: 1532349 - RNA, 19 nt, Homo sapiens
  misc_RNA (1)...(19): siRNA sense strand
acaauaaugccgaaguuaa

SEQ ID NO: 1532350 - RNA, 19 nt, Homo sapiens
  misc_RNA (1)...(19): siRNA sense strand
gagguccaguacuaaauga

SEQ ID NO: 1532351 - RNA, 19 nt, Homo sapiens
  misc_RNA (1)...(19): siRNA sense strand
gaaaaucgacccaugaaug

SEQ ID NO: 1532352 - RNA, 19 nt, Homo sapiens
  misc_RNA (1)...(19): siRNA sense strand
gcaucuaucuaacguuuac

SEQ ID NO: 1532353 - RNA, 19 nt, Homo sapiens
  misc_RNA (1)...(19): siRNA sense strand
gcaauucuaguucagauca

SEQ ID NO: 1532354 - RNA, 19 nt, Homo sapiens
  misc_RNA (1)...(19): siRNA sense strand
cagcagcaauucuaguuca

SEQ ID NO: 1532355 - RNA, 19 nt, Homo sapiens
  misc_RNA (1)...(19): siRNA sense strand
ugacgaaggaucagagauu

SEQ ID NO: 1532356 - RNA, 19 nt, Homo sapiens
  misc_RNA (1)...(19): siRNA sense strand
gagacuggcuagacuggau

SEQ ID NO: 1532357 - RNA, 19 nt, Homo sapiens
  misc_RNA (1)...(19): siRNA sense strand
caagcuggaugguuuccuu

SEQ ID NO: 1532358 - RNA, 19 nt, Homo sapiens
  misc_RNA (1)...(19): siRNA sense strand
uacagugaccagacuauua

SEQ ID NO: 1532359 - RNA, 19 nt, Homo sapiens
  misc_RNA (1)...(19): siRNA sense strand
gaagauggaggugaagaug

SEQ ID NO: 1532360 - RNA, 19 nt, Homo sapiens
  misc_RNA (1)...(19): siRNA sense strand
gcucaggccacaucaaaug

SEQ ID NO: 1532361 - RNA, 19 nt, Homo sapiens
  misc_RNA (1)...(19): siRNA sense strand
gcucaucaguauuauaugc

SEQ ID NO: 1532362 - RNA, 19 nt, Homo sapiens
  misc_RNA (1)...(19): siRNA sense strand
uagagaaagucaugaagca

SEQ ID NO: 1532363 - RNA, 19 nt, Homo sapiens
  misc_RNA (1)...(19): siRNA sense strand
acgcaucuaucuaacguuu

SEQ ID NO: 1532364 - RNA, 19 nt, Homo sapiens
  misc_RNA (1)...(19): siRNA sense strand
ucaccaguuuccauaugua

SEQ ID NO: 1532365 - RNA, 19 nt, Homo sapiens
  misc_RNA (1)...(19): siRNA sense strand
gaucaacaacuccaucauc

SEQ ID NO: 1532366 - RNA, 19 nt, Homo sapiens
  misc_RNA (1)...(19): siRNA sense strand
uuaaagcaccgaaucagaa

SEQ ID NO: 1532367 - RNA, 19 nt, Homo sapiens
  misc_RNA (1)...(19): siRNA sense strand
augaugggcuugaagauga

SEQ ID NO: 1532368 - RNA, 19 nt, Homo sapiens
  misc_RNA (1)...(19): siRNA sense strand
uaaagcaccgaaucagaaa

SEQ ID NO: 1532369 - RNA, 19 nt, Homo sapiens
  misc_RNA (1)...(19): siRNA sense strand
uggagaagauggaggugaa

SEQ ID NO: 1532370 - RNA, 19 nt, Homo sapiens
  misc_RNA (1)...(19): siRNA sense strand
ucagcaggcucccaacaau

SEQ ID NO: 1532371 - RNA, 19 nt, Homo sapiens
  misc_RNA (1)...(19): siRNA sense strand
cauauguaaugcaaggaaa

SEQ ID NO: 1532372 - RNA, 19 nt, Homo sapiens
  misc_RNA (1)...(19): siRNA sense strand
caauagagaaagucaugaa

SEQ ID NO: 1532373 - RNA, 19 nt, Homo sapiens
  misc_RNA (1)...(19): siRNA sense strand
gaaaacaagaugaguauca

SEQ ID NO: 1532374 - RNA, 19 nt, Homo sapiens
  misc_RNA (1)...(19): siRNA sense strand
uccaucaucuggucaagaa

SEQ ID NO: 1532375 - RNA, 19 nt, Homo sapiens
  misc_RNA (1)...(19): siRNA sense strand
ggagguccaguacuaaaug

SEQ ID NO: 1532376 - RNA, 19 nt, Homo sapiens
  misc_RNA (1)...(19): siRNA sense strand
gcacagggagguccaguac

SEQ ID NO: 1532377 - RNA, 19 nt, Homo sapiens
  misc_RNA (1)...(19): siRNA sense strand
aaacgcaucuaucuaacgu

SEQ ID NO: 1532378 - RNA, 19 nt, Homo sapiens
  misc_RNA (1)...(19): siRNA sense strand
aagcaccgaaucagaaaua

SEQ ID NO: 1532379 - RNA, 19 nt, Homo sapiens
  misc_RNA (1)...(19): siRNA sense strand
uagacuggauguacacguu

SEQ ID NO: 1532380 - RNA, 19 nt, Homo sapiens
  misc_RNA (1)...(19): siRNA sense strand
cgaaucagaaauacaguga

SEQ ID NO: 1532381 - RNA, 19 nt, Homo sapiens
  misc_RNA (1)...(19): siRNA sense strand
ccgaucaucugcagcugaa

SEQ ID NO: 1532382 - RNA, 19 nt, Homo sapiens
  misc_RNA (1)...(19): siRNA sense strand
uggagcgucuuauggauga

SEQ ID NO: 1532383 - RNA, 19 nt, Homo sapiens
  misc_RNA (1)...(19): siRNA sense strand
cagcaggcucccaacaaua

SEQ ID NO: 1532384 - RNA, 19 nt, Homo sapiens
  misc_RNA (1)...(19): siRNA sense strand
cagcucaggccacaucaaa

SEQ ID NO: 1532385 - RNA, 19 nt, Homo sapiens
  misc_RNA (1)...(19): siRNA sense strand
cagcaauucuaguucagau

SEQ ID NO: 1532386 - RNA, 19 nt, Homo sapiens
  misc_RNA (1)...(19): siRNA sense strand
ggaaauguagacaaccaau

SEQ ID NO: 1532387 - RNA, 19 nt, Homo sapiens
  misc_RNA (1)...(19): siRNA sense strand
gcuggaugguuuccuuuua

SEQ ID NO: 1532388 - RNA, 19 nt, Homo sapiens
  misc_RNA (1)...(19): siRNA sense strand
ggagccaugcuacugguuu

SEQ ID NO: 1532389 - RNA, 19 nt, Homo sapiens
  misc_RNA (1)...(19): siRNA sense strand
gaugaugggcuugaagaug

SEQ ID NO: 1532390 - RNA, 19 nt, Homo sapiens
  misc_RNA (1)...(19): siRNA sense strand
ugaagaugccagugcaauu

SEQ ID NO: 1532391 - RNA, 19 nt, Homo sapiens
  misc_RNA (1)...(19): siRNA sense strand
uaucauaugguucaucuag

SEQ ID NO: 1532392 - RNA, 19 nt, Homo sapiens
  misc_RNA (1)...(19): siRNA sense strand
guccaguacuaaaugaaga

SEQ ID NO: 1532393 - RNA, 19 nt, Homo sapiens
  misc_RNA (1)...(19): siRNA sense strand
cugugacccucaucauuaa

SEQ ID NO: 1532394 - RNA, 19 nt, Homo sapiens
  misc_RNA (1)...(19): siRNA sense strand
cccaccagcuccaaaccua

SEQ ID NO: 1532395 - RNA, 19 nt, Homo sapiens
  misc_RNA (1)...(19): siRNA sense strand
guaaugcaaggaaauguag

SEQ ID NO: 1532396 - RNA, 19 nt, Homo sapiens
  misc_RNA (1)...(19): siRNA sense strand
gcaccaauagagaaaguca

SEQ ID NO: 1532397 - RNA, 19 nt, Homo sapiens
  misc_RNA (1)...(19): siRNA sense strand
gcaagaaggaggucaucag

SEQ ID NO: 1532398 - RNA, 19 nt, Homo sapiens
  misc_RNA (1)...(19): siRNA sense strand
agaaauggagcgucuuaug

SEQ ID NO: 1532399 - RNA, 19 nt, Homo sapiens
  misc_RNA (1)...(19): siRNA sense strand
acauguuccuggagaagaa

SEQ ID NO: 1532400 - RNA, 19 nt, Homo sapiens
  misc_RNA (1)...(19): siRNA sense strand
ggucuuucaucaccaccuu

SEQ ID NO: 1532401 - RNA, 19 nt, Homo sapiens
  misc_RNA (1)...(19): siRNA sense strand
augccgaaguuaacaauga

SEQ ID NO: 1532402 - RNA, 19 nt, Homo sapiens
  misc_RNA (1)...(19): siRNA sense strand
caugcuacugguuuauuua

SEQ ID NO: 1532403 - RNA, 19 nt, Homo sapiens
  misc_RNA (1)...(19): siRNA sense strand
cagcaccaauagagaaagu

SEQ ID NO: 1532404 - RNA, 19 nt, Homo sapiens
  misc_RNA (1)...(19): siRNA sense strand
ucaccaccuucuuuacuuc

SEQ ID NO: 1532405 - RNA, 19 nt, Homo sapiens
  misc_RNA (1)...(19): siRNA sense strand
gcaauucaaaggccuggau

SEQ ID NO: 1532406 - RNA, 19 nt, Homo sapiens
  misc_RNA (1)...(19): siRNA sense strand
aaauggagcgucuuaugga

SEQ ID NO: 1532407 - RNA, 19 nt, Homo sapiens
  misc_RNA (1)...(19): siRNA sense strand
acuuggaacuugaagaaau

SEQ ID NO: 1532408 - RNA, 19 nt, Homo sapiens
  misc_RNA (1)...(19): siRNA sense strand
uaacguuuacccuagcaaa

SEQ ID NO: 1532409 - RNA, 19 nt, Homo sapiens
  misc_RNA (1)...(19): siRNA sense strand
gaaagucaugaagcauuga

SEQ ID NO: 1532410 - RNA, 19 nt, Homo sapiens
  misc_RNA (1)...(19): siRNA sense strand
ggauuaauggcuucagcuu

SEQ ID NO: 1532411 - RNA, 19 nt, Homo sapiens
  misc_RNA (1)...(19): siRNA sense strand
cuuggaacuugaagaaaug

SEQ ID NO: 1532412 - RNA, 19 nt, Homo sapiens
  misc_RNA (1)...(19): siRNA sense strand
aaacaacuuggaacuugaa

SEQ ID NO: 1532413 - RNA, 19 nt, Homo sapiens
  misc_RNA (1)...(19): siRNA sense strand
gcaaaaugcaaacaacuug

SEQ ID NO: 1532414 - RNA, 19 nt, Homo sapiens
  misc_RNA (1)...(19): siRNA sense strand
agagucaccaguuuccaua

SEQ ID NO: 1532415 - RNA, 19 nt, Homo sapiens
  misc_RNA (1)...(19): siRNA sense strand
cagcguacccuuccacaag

SEQ ID NO: 1532416 - RNA, 19 nt, Homo sapiens
  misc_RNA (1)...(19): siRNA sense strand
cuacuucacagccucuaaa

SEQ ID NO: 1532417 - RNA, 19 nt, Homo sapiens
  misc_RNA (1)...(19): siRNA sense strand
caaagugggauggagauuc

SEQ ID NO: 1532418 - RNA, 19 nt, Homo sapiens
  misc_RNA (1)...(19): siRNA sense strand
caauaaugccgaaguuaac

SEQ ID NO: 1532419 - RNA, 19 nt, Homo sapiens
  misc_RNA (1)...(19): siRNA sense strand
aaaccuaguggcccaagaa

SEQ ID NO: 1532420 - RNA, 19 nt, Homo sapiens
  misc_RNA (1)...(19): siRNA sense strand
cgagaucacuggcuauaug

SEQ ID NO: 1532421 - RNA, 19 nt, Homo sapiens
  misc_RNA (1)...(19): siRNA sense strand
ccaguucgaugagaaguau

SEQ ID NO: 1532422 - RNA, 19 nt, Homo sapiens
  misc_RNA (1)...(19): siRNA sense strand
gcacucugcccaccugguu

SEQ ID NO: 1532423 - RNA, 19 nt, Homo sapiens
  misc_RNA (1)...(19): siRNA sense strand
caccaccuauguccaguuc

SEQ ID NO: 1532424 - RNA, 19 nt, Homo sapiens
  misc_RNA (1)...(19): siRNA sense strand
ucaaccuacuggcguaugu

SEQ ID NO: 1532425 - RNA, 19 nt, Homo sapiens
  misc_RNA (1)...(19): siRNA sense strand
ccaccacgacgucaucuuc

SEQ ID NO: 1532426 - RNA, 19 nt, Homo sapiens
  misc_RNA (1)...(19): siRNA sense strand
ggcgagaucacuggcuaua

SEQ ID NO: 1532427 - RNA, 19 nt, Homo sapiens
  misc_RNA (1)...(19): siRNA sense strand
gggcaacugguccauguuc

SEQ ID NO: 1532428 - RNA, 19 nt, Homo sapiens
  misc_RNA (1)...(19): siRNA sense strand
gcaucgcguguguggcuua

SEQ ID NO: 1532429 - RNA, 19 nt, Homo sapiens
  misc_RNA (1)...(19): siRNA sense strand
ggcaacugguccauguuca

SEQ ID NO: 1532430 - RNA, 19 nt, Homo sapiens
  misc_RNA (1)...(19): siRNA sense strand
ccgcagccaugccuacuac

SEQ ID NO: 1532431 - RNA, 19 nt, Homo sapiens
  misc_RNA (1)...(19): siRNA sense strand
ucuaccaguucgaugagaa

SEQ ID NO: 1532432 - RNA, 19 nt, Homo sapiens
  misc_RNA (1)...(19): siRNA sense strand
guaacccgcaccaccauca

SEQ ID NO: 1532433 - RNA, 19 nt, Homo sapiens
  misc_RNA (1)...(19): siRNA sense strand
caaccaccacgacgucauc

SEQ ID NO: 1532434 - RNA, 19 nt, Homo sapiens
  misc_RNA (1)...(19): siRNA sense strand
gagaucacuggcuauaugg

SEQ ID NO: 1532435 - RNA, 19 nt, Homo sapiens
  misc_RNA (1)...(19): siRNA sense strand
ccaccuauguccaguuccu

SEQ ID NO: 1532436 - RNA, 19 nt, Homo sapiens
  misc_RNA (1)...(19): siRNA sense strand
ugacggccaucaaccuacu

SEQ ID NO: 1532437 - RNA, 19 nt, Homo sapiens
  misc_RNA (1)...(19): siRNA sense strand
ggaaagaauucaaauaugc

SEQ ID NO: 1532438 - RNA, 19 nt, Homo sapiens
  misc_RNA (1)...(19): siRNA sense strand
ccacacagccacacaaaua

SEQ ID NO: 1532439 - RNA, 19 nt, Homo sapiens
  misc_RNA (1)...(19): siRNA sense strand
gaacaugugccucgugaau

SEQ ID NO: 1532440 - RNA, 19 nt, Homo sapiens
  misc_RNA (1)...(19): siRNA sense strand
ggaggagaguuaugagaug

SEQ ID NO: 1532441 - RNA, 19 nt, Homo sapiens
  misc_RNA (1)...(19): siRNA sense strand
gaggagaguuaugagauga

SEQ ID NO: 1532442 - RNA, 19 nt, Homo sapiens
  misc_RNA (1)...(19): siRNA sense strand
acaugugccucgugaauuu

SEQ ID NO: 1532443 - RNA, 19 nt, Homo sapiens
  misc_RNA (1)...(19): siRNA sense strand
uaauuggcuuuguugcuua

SEQ ID NO: 1532444 - RNA, 19 nt, Homo sapiens
  misc_RNA (1)...(19): siRNA sense strand
guuaugagaugaacauugg

SEQ ID NO: 1532445 - RNA, 19 nt, Homo sapiens
  misc_RNA (1)...(19): siRNA sense strand
gcacuggaaagaauucaaa

SEQ ID NO: 1532446 - RNA, 19 nt, Homo sapiens
  misc_RNA (1)...(19): siRNA sense strand
ccagaacccacaucuaauu

SEQ ID NO: 1532447 - RNA, 19 nt, Homo sapiens
  misc_RNA (1)...(19): siRNA sense strand
gcaccuggcucccuucacu

SEQ ID NO: 1532448 - RNA, 19 nt, Homo sapiens
  misc_RNA (1)...(19): siRNA sense strand
gggaauggcugggauuugg

SEQ ID NO: 1532449 - RNA, 19 nt, Homo sapiens
  misc_RNA (1)...(19): siRNA sense strand
acugaaaucugucuuguca

SEQ ID NO: 1532450 - RNA, 19 nt, Homo sapiens
  misc_RNA (1)...(19): siRNA sense strand
cuaauuggcuuuguugcuu

SEQ ID NO: 1532451 - RNA, 19 nt, Homo sapiens
  misc_RNA (1)...(19): siRNA sense strand
gaggaaggccgcaucuguu

SEQ ID NO: 1532452 - RNA, 19 nt, Homo sapiens
  misc_RNA (1)...(19): siRNA sense strand
ggauuugggcguugccuuu

SEQ ID NO: 1532453 - RNA, 19 nt, Homo sapiens
  misc_RNA (1)...(19): siRNA sense strand
aauacuggcugcuccuuga

SEQ ID NO: 1532454 - RNA, 19 nt, Homo sapiens
  misc_RNA (1)...(19): siRNA sense strand
agggauaccugcaugucua

SEQ ID NO: 1532455 - RNA, 19 nt, Homo sapiens
  misc_RNA (1)...(19): siRNA sense strand
gaugaacauuggcugucaa

SEQ ID NO: 1532456 - RNA, 19 nt, Homo sapiens
  misc_RNA (1)...(19): siRNA sense strand
gaaggccgcaucuguugug

SEQ ID NO: 1532457 - RNA, 19 nt, Homo sapiens
  misc_RNA (1)...(19): siRNA sense strand
gauuugggcguugccuuua

SEQ ID NO: 1532458 - RNA, 19 nt, Homo sapiens
  misc_RNA (1)...(19): siRNA sense strand
cuggcucccuucacuauuu

SEQ ID NO: 1532459 - RNA, 19 nt, Homo sapiens
  misc_RNA (1)...(19): siRNA sense strand
guggugacuuguccugcua

SEQ ID NO: 1532460 - RNA, 19 nt, Homo sapiens
  misc_RNA (1)...(19): siRNA sense strand
gggaggagaguuaugagau

SEQ ID NO: 1532461 - RNA, 19 nt, Homo sapiens
  misc_RNA (1)...(19): siRNA sense strand
gggcagggacgaacaugug

SEQ ID NO: 1532462 - RNA, 19 nt, Homo sapiens
  misc_RNA (1)...(19): siRNA sense strand
gcucauucuuacugaaauc

SEQ ID NO: 1532463 - RNA, 19 nt, Homo sapiens
  misc_RNA (1)...(19): siRNA sense strand
agucugcacuggaaagaau

SEQ ID NO: 1532464 - RNA, 19 nt, Homo sapiens
  misc_RNA (1)...(19): siRNA sense strand
gaagaggaaggccgcaucu

SEQ ID NO: 1532465 - RNA, 19 nt, Homo sapiens
  misc_RNA (1)...(19): siRNA sense strand
caucuaauuggcuuuguug

SEQ ID NO: 1532466 - RNA, 19 nt, Homo sapiens
  misc_RNA (1)...(19): siRNA sense strand
uuacugaaaucugucuugu

SEQ ID NO: 1532467 - RNA, 19 nt, Homo sapiens
  misc_RNA (1)...(19): siRNA sense strand
gcugggaggagaguuauga

SEQ ID NO: 1532468 - RNA, 19 nt, Homo sapiens
  misc_RNA (1)...(19): siRNA sense strand
ggagaguuaugagaugaac

SEQ ID NO: 1532469 - RNA, 19 nt, Homo sapiens
  misc_RNA (1)...(19): siRNA sense strand
cagaacccacaucuaauug

SEQ ID NO: 1532470 - RNA, 19 nt, Homo sapiens
  misc_RNA (1)...(19): siRNA sense strand
gauaccugcaugucuaguu

SEQ ID NO: 1532471 - RNA, 19 nt, Homo sapiens
  misc_RNA (1)...(19): siRNA sense strand
gggaagcccagacuguuca

SEQ ID NO: 1532472 - RNA, 19 nt, Homo sapiens
  misc_RNA (1)...(19): siRNA sense strand
agcccagacuguucacuuu

SEQ ID NO: 1532473 - RNA, 19 nt, Homo sapiens
  misc_RNA (1)...(19): siRNA sense strand
cugcuaccauguugacaga

SEQ ID NO: 1532474 - RNA, 19 nt, Homo sapiens
  misc_RNA (1)...(19): siRNA sense strand
gugcucauucuuacugaaa

SEQ ID NO: 1532475 - RNA, 19 nt, Homo sapiens
  misc_RNA (1)...(19): siRNA sense strand
agaggaaggccgcaucugu

SEQ ID NO: 1532476 - RNA, 19 nt, Homo sapiens
  misc_RNA (1)...(19): siRNA sense strand
cacaagcacucaggcaucu

SEQ ID NO: 1532477 - RNA, 19 nt, Homo sapiens
  misc_RNA (1)...(19): siRNA sense strand
ggaaggccgcaucuguugu

SEQ ID NO: 1532478 - RNA, 19 nt, Homo sapiens
  misc_RNA (1)...(19): siRNA sense strand
ccacaucuaauuggcuuug

SEQ ID NO: 1532479 - RNA, 19 nt, Homo sapiens
  misc_RNA (1)...(19): siRNA sense strand
auaccugcaugucuaguuc

SEQ ID NO: 1532480 - RNA, 19 nt, Homo sapiens
  misc_RNA (1)...(19): siRNA sense strand
acaucuaauuggcuuuguu

SEQ ID NO: 1532481 - RNA, 19 nt, Homo sapiens
  misc_RNA (1)...(19): siRNA sense strand
uacuguggguggugacuug

SEQ ID NO: 1532482 - RNA, 19 nt, Homo sapiens
  misc_RNA (1)...(19): siRNA sense strand
ugacuuguccugcuaccau

SEQ ID NO: 1532483 - RNA, 19 nt, Homo sapiens
  misc_RNA (1)...(19): siRNA sense strand
agaugaacauuggcuguca

SEQ ID NO: 1532484 - RNA, 19 nt, Homo sapiens
  misc_RNA (1)...(19): siRNA sense strand
cauucuuacugaaaucugu

SEQ ID NO: 1532485 - RNA, 19 nt, Homo sapiens
  misc_RNA (1)...(19): siRNA sense strand
gcccagacuguucacuuug

SEQ ID NO: 1532486 - RNA, 19 nt, Homo sapiens
  misc_RNA (1)...(19): siRNA sense strand
caccacacagccacacaaa

SEQ ID NO: 1532487 - RNA, 19 nt, Homo sapiens
  misc_RNA (1)...(19): siRNA sense strand
ggagggauaccugcauguc

SEQ ID NO: 1532488 - RNA, 19 nt, Homo sapiens
  misc_RNA (1)...(19): siRNA sense strand
gagaaaggguuaaauauag

SEQ ID NO: 1532489 - RNA, 19 nt, Homo sapiens
  misc_RNA (1)...(19): siRNA sense strand
gaacaacagugcacauauc

SEQ ID NO: 1532490 - RNA, 19 nt, Homo sapiens
  misc_RNA (1)...(19): siRNA sense strand
aaacagaaguggcaagaaa

SEQ ID NO: 1532491 - RNA, 19 nt, Homo sapiens
  misc_RNA (1)...(19): siRNA sense strand
caacagugcacauaucuua

SEQ ID NO: 1532492 - RNA, 19 nt, Homo sapiens
  misc_RNA (1)...(19): siRNA sense strand
gaaaggacauggagucuac

SEQ ID NO: 1532493 - RNA, 19 nt, Homo sapiens
  misc_RNA (1)...(19): siRNA sense strand
ggaaaugaaugucuuugug

SEQ ID NO: 1532494 - RNA, 19 nt, Homo sapiens
  misc_RNA (1)...(19): siRNA sense strand
gaagaagaccacuggauuu

SEQ ID NO: 1532495 - RNA, 19 nt, Homo sapiens
  misc_RNA (1)...(19): siRNA sense strand
gcaaagagcagagaagaaa

SEQ ID NO: 1532496 - RNA, 19 nt, Homo sapiens
  misc_RNA (1)...(19): siRNA sense strand
gagaaacuguggaagaaga

SEQ ID NO: 1532497 - RNA, 19 nt, Homo sapiens
  misc_RNA (1)...(19): siRNA sense strand
gcauugaaauugaagaaga

SEQ ID NO: 1532498 - RNA, 19 nt, Homo sapiens
  misc_RNA (1)...(19): siRNA sense strand
guacaaaccaguagacuau

SEQ ID NO: 1532499 - RNA, 19 nt, Homo sapiens
  misc_RNA (1)...(19): siRNA sense strand
gaaaugaaugucuuuguga

SEQ ID NO: 1532500 - RNA, 19 nt, Homo sapiens
  misc_RNA (1)...(19): siRNA sense strand
uaaaaucccuucucaauga

SEQ ID NO: 1532501 - RNA, 19 nt, Homo sapiens
  misc_RNA (1)...(19): siRNA sense strand
caauaucgcuuugcuauag

SEQ ID NO: 1532502 - RNA, 19 nt, Homo sapiens
  misc_RNA (1)...(19): siRNA sense strand
ugaaugaagucagauguaa

SEQ ID NO: 1532503 - RNA, 19 nt, Homo sapiens
  misc_RNA (1)...(19): siRNA sense strand
gauaauuucugacccuaga

SEQ ID NO: 1532504 - RNA, 19 nt, Homo sapiens
  misc_RNA (1)...(19): siRNA sense strand
ugagaaacaucaaguacaa

SEQ ID NO: 1532505 - RNA, 19 nt, Homo sapiens
  misc_RNA (1)...(19): siRNA sense strand
gaaauaaaaucccuucuca

SEQ ID NO: 1532506 - RNA, 19 nt, Homo sapiens
  misc_RNA (1)...(19): siRNA sense strand
ggagucuacuguauuuaaa

SEQ ID NO: 1532507 - RNA, 19 nt, Homo sapiens
  misc_RNA (1)...(19): siRNA sense strand
ggaagaagaaggaauuguu

SEQ ID NO: 1532508 - RNA, 19 nt, Homo sapiens
  misc_RNA (1)...(19): siRNA sense strand
ucagugaguucuauaaguu

SEQ ID NO: 1532509 - RNA, 19 nt, Homo sapiens
  misc_RNA (1)...(19): siRNA sense strand
cgagaaauauugugaccaa

SEQ ID NO: 1532510 - RNA, 19 nt, Homo sapiens
  misc_RNA (1)...(19): siRNA sense strand
gaagaaggacucuguaucu

SEQ ID NO: 1532511 - RNA, 19 nt, Homo sapiens
  misc_RNA (1)...(19): siRNA sense strand
gaagacauauacagaaacu

SEQ ID NO: 1532512 - RNA, 19 nt, Homo sapiens
  misc_RNA (1)...(19): siRNA sense strand
ggacauggagucuacugua

SEQ ID NO: 1532513 - RNA, 19 nt, Homo sapiens
  misc_RNA (1)...(19): siRNA sense strand
gcuagaagcccuuaggaaa

SEQ ID NO: 1532514 - RNA, 19 nt, Homo sapiens
  misc_RNA (1)...(19): siRNA sense strand
ucaagaagcucaugaagac

SEQ ID NO: 1532515 - RNA, 19 nt, Homo sapiens
  misc_RNA (1)...(19): siRNA sense strand
gaagaagaaggaauuguug

SEQ ID NO: 1532516 - RNA, 19 nt, Homo sapiens
  misc_RNA (1)...(19): siRNA sense strand
ggaagagguugacuuugug

SEQ ID NO: 1532517 - RNA, 19 nt, Homo sapiens
  misc_RNA (1)...(19): siRNA sense strand
cauggagucuacuguauuu

SEQ ID NO: 1532518 - RNA, 19 nt, Homo sapiens
  misc_RNA (1)...(19): siRNA sense strand
gaaaagcaauguugacuuc

SEQ ID NO: 1532519 - RNA, 19 nt, Homo sapiens
  misc_RNA (1)...(19): siRNA sense strand
gaaugucuuugugaccuua

SEQ ID NO: 1532520 - RNA, 19 nt, Homo sapiens
  misc_RNA (1)...(19): siRNA sense strand
gauaaucugguauuccaua

SEQ ID NO: 1532521 - RNA, 19 nt, Homo sapiens
  misc_RNA (1)...(19): siRNA sense strand
gauucuagaucauucuuug

SEQ ID NO: 1532522 - RNA, 19 nt, Homo sapiens
  misc_RNA (1)...(19): siRNA sense strand
acacagaaauaucagaaga

SEQ ID NO: 1532523 - RNA, 19 nt, Homo sapiens
  misc_RNA (1)...(19): siRNA sense strand
uuagugaacugcccauuga

SEQ ID NO: 1532524 - RNA, 19 nt, Homo sapiens
  misc_RNA (1)...(19): siRNA sense strand
gaaaguauuggaagagguu

SEQ ID NO: 1532525 - RNA, 19 nt, Homo sapiens
  misc_RNA (1)...(19): siRNA sense strand
cagauacaauggcaucaaa

SEQ ID NO: 1532526 - RNA, 19 nt, Homo sapiens
  misc_RNA (1)...(19): siRNA sense strand
acagagaaaggguuaaaua

SEQ ID NO: 1532527 - RNA, 19 nt, Homo sapiens
  misc_RNA (1)...(19): siRNA sense strand
uggaagagguugacuuugu

SEQ ID NO: 1532528 - RNA, 19 nt, Homo sapiens
  misc_RNA (1)...(19): siRNA sense strand
gacauggagucuacuguau

SEQ ID NO: 1532529 - RNA, 19 nt, Homo sapiens
  misc_RNA (1)...(19): siRNA sense strand
ggaauugugugcugaucug

SEQ ID NO: 1532530 - RNA, 19 nt, Homo sapiens
  misc_RNA (1)...(19): siRNA sense strand
ugaacugcccauugaauua

SEQ ID NO: 1532531 - RNA, 19 nt, Homo sapiens
  misc_RNA (1)...(19): siRNA sense strand
aaucugguauuccauauga

SEQ ID NO: 1532532 - RNA, 19 nt, Homo sapiens
  misc_RNA (1)...(19): siRNA sense strand
gaaacugucaacuaaguga

SEQ ID NO: 1532533 - RNA, 19 nt, Homo sapiens
  misc_RNA (1)...(19): siRNA sense strand
cagaaacugucaacuaagu

SEQ ID NO: 1532534 - RNA, 19 nt, Homo sapiens
  misc_RNA (1)...(19): siRNA sense strand
uggaagacauauacagaaa

SEQ ID NO: 1532535 - RNA, 19 nt, Homo sapiens
  misc_RNA (1)...(19): siRNA sense strand
uagcaagacuggaaaugga

SEQ ID NO: 1532536 - RNA, 19 nt, Homo sapiens
  misc_RNA (1)...(19): siRNA sense strand
gagguugacuuugugaaga

SEQ ID NO: 1532537 - RNA, 19 nt, Homo sapiens
  misc_RNA (1)...(19): siRNA sense strand
ggacauguuacaaagauau

SEQ ID NO: 1532538 - RNA, 19 nt, Homo sapiens
  misc_RNA (1)...(19): siRNA sense strand
gagcaacagagaauagaaa

SEQ ID NO: 1532539 - RNA, 19 nt, Homo sapiens
  misc_RNA (1)...(19): siRNA sense strand
gaagucagauguaaaaugg

SEQ ID NO: 1532540 - RNA, 19 nt, Homo sapiens
  misc_RNA (1)...(19): siRNA sense strand
ggacuucauagaacacuuu

SEQ ID NO: 1532541 - RNA, 19 nt, Homo sapiens
  misc_RNA (1)...(19): siRNA sense strand
aagagaaacuguggaagaa

SEQ ID NO: 1532542 - RNA, 19 nt, Homo sapiens
  misc_RNA (1)...(19): siRNA sense strand
ggaagaggagaaagagaaa

SEQ ID NO: 1532543 - RNA, 19 nt, Homo sapiens
  misc_RNA (1)...(19): siRNA sense strand
gcccauacccugauuugaa

SEQ ID NO: 1532544 - RNA, 19 nt, Homo sapiens
  misc_RNA (1)...(19): siRNA sense strand
ugaagaagaccacuggauu

SEQ ID NO: 1532545 - RNA, 19 nt, Homo sapiens
  misc_RNA (1)...(19): siRNA sense strand
gcaagaaauggaaaugaga

SEQ ID NO: 1532546 - RNA, 19 nt, Homo sapiens
  misc_RNA (1)...(19): siRNA sense strand
cuucaaaguuauccaaaga

SEQ ID NO: 1532547 - RNA, 19 nt, Homo sapiens
  misc_RNA (1)...(19): siRNA sense strand
cgaguuagcacuucgagaa

SEQ ID NO: 1532548 - RNA, 19 nt, Homo sapiens
  misc_RNA (1)...(19): siRNA sense strand
ccaguagacuaucaacaau

SEQ ID NO: 1532549 - RNA, 19 nt, Homo sapiens
  misc_RNA (1)...(19): siRNA sense strand
aagaaggaauuguugcaaa

SEQ ID NO: 1532550 - RNA, 19 nt, Homo sapiens
  misc_RNA (1)...(19): siRNA sense strand
acagacagcaucacacuuu

SEQ ID NO: 1532551 - RNA, 19 nt, Homo sapiens
  misc_RNA (1)...(19): siRNA sense strand
gaaugaagucagauguaaa

SEQ ID NO: 1532552 - RNA, 19 nt, Homo sapiens
  misc_RNA (1)...(19): siRNA sense strand
gauguaaaauggaaucuga

SEQ ID NO: 1532553 - RNA, 19 nt, Homo sapiens
  misc_RNA (1)...(19): siRNA sense strand
guuagaaugaugucagaua

SEQ ID NO: 1532554 - RNA, 19 nt, Homo sapiens
  misc_RNA (1)...(19): siRNA sense strand
gaaauuaaucgcugaacag

SEQ ID NO: 1532555 - RNA, 19 nt, Homo sapiens
  misc_RNA (1)...(19): siRNA sense strand
gaaauggaaaugagagauc

SEQ ID NO: 1532556 - RNA, 19 nt, Homo sapiens
  misc_RNA (1)...(19): siRNA sense strand
aaucuucaauucucaguga

SEQ ID NO: 1532557 - RNA, 19 nt, Homo sapiens
  misc_RNA (1)...(19): siRNA sense strand
cccauacccugauuugaaa

SEQ ID NO: 1532558 - RNA, 19 nt, Homo sapiens
  misc_RNA (1)...(19): siRNA sense strand
gacaagaauuauuggaaag

SEQ ID NO: 1532559 - RNA, 19 nt, Homo sapiens
  misc_RNA (1)...(19): siRNA sense strand
aaagagaaacuguggaaga

SEQ ID NO: 1532560 - RNA, 19 nt, Homo sapiens
  misc_RNA (1)...(19): siRNA sense strand
ccaagaagagguagcaaga

SEQ ID NO: 1532561 - RNA, 19 nt, Homo sapiens
  misc_RNA (1)...(19): siRNA sense strand
ucacaaaucuaggcaugau

SEQ ID NO: 1532562 - RNA, 19 nt, Homo sapiens
  misc_RNA (1)...(19): siRNA sense strand
aagaagaccacuggauuua

SEQ ID NO: 1532563 - RNA, 19 nt, Homo sapiens
  misc_RNA (1)...(19): siRNA sense strand
gcaaagcuaaagaucagaa

SEQ ID NO: 1532564 - RNA, 19 nt, Homo sapiens
  misc_RNA (1)...(19): siRNA sense strand
agaaugaugucagauacaa

SEQ ID NO: 1532565 - RNA, 19 nt, Homo sapiens
  misc_RNA (1)...(19): siRNA sense strand
gaacugaagaaauuaaucg

SEQ ID NO: 1532566 - RNA, 19 nt, Homo sapiens
  misc_RNA (1)...(19): siRNA sense strand
ggaagaaggacucuguauc

SEQ ID NO: 1532567 - RNA, 19 nt, Homo sapiens
  misc_RNA (1)...(19): siRNA sense strand
agacuggaguauaaagauu

SEQ ID NO: 1532568 - RNA, 19 nt, Homo sapiens
  misc_RNA (1)...(19): siRNA sense strand
caucacacuuugcagcauu

SEQ ID NO: 1532569 - RNA, 19 nt, Homo sapiens
  misc_RNA (1)...(19): siRNA sense strand
gaacugcccauugaauuag

SEQ ID NO: 1532570 - RNA, 19 nt, Homo sapiens
  misc_RNA (1)...(19): siRNA sense strand
cagagaaaggguuaaauau

SEQ ID NO: 1532571 - RNA, 19 nt, Homo sapiens
  misc_RNA (1)...(19): siRNA sense strand
aaagacagagaaaggguua

SEQ ID NO: 1532572 - RNA, 19 nt, Homo sapiens
  misc_RNA (1)...(19): siRNA sense strand
auuaaucgcugaacaguca

SEQ ID NO: 1532573 - RNA, 19 nt, Homo sapiens
  misc_RNA (1)...(19): siRNA sense strand
ggcaagaaauggaaaugag

SEQ ID NO: 1532574 - RNA, 19 nt, Homo sapiens
  misc_RNA (1)...(19): siRNA sense strand
gaaguggcaagaaauggaa

SEQ ID NO: 1532575 - RNA, 19 nt, Homo sapiens
  misc_RNA (1)...(19): siRNA sense strand
gaagaccacuggauuuacc

SEQ ID NO: 1532576 - RNA, 19 nt, Homo sapiens
  misc_RNA (1)...(19): siRNA sense strand
aguagacuaucaacaauug

SEQ ID NO: 1532577 - RNA, 19 nt, Homo sapiens
  misc_RNA (1)...(19): siRNA sense strand
gaaugcccauacccugauu

SEQ ID NO: 1532578 - RNA, 19 nt, Homo sapiens
  misc_RNA (1)...(19): siRNA sense strand
caacaauugcgugcauuaa

SEQ ID NO: 1532579 - RNA, 19 nt, Homo sapiens
  misc_RNA (1)...(19): siRNA sense strand
gaagaaggaauuguugcaa

SEQ ID NO: 1532580 - RNA, 19 nt, Homo sapiens
  misc_RNA (1)...(19): siRNA sense strand
acccacauauugaguuuaa

SEQ ID NO: 1532581 - RNA, 19 nt, Homo sapiens
  misc_RNA (1)...(19): siRNA sense strand
uagaagcccuuaggaaaca

SEQ ID NO: 1532582 - RNA, 19 nt, Homo sapiens
  misc_RNA (1)...(19): siRNA sense strand
gaagaaauuaaucgcugaa

SEQ ID NO: 1532583 - RNA, 19 nt, Homo sapiens
  misc_RNA (1)...(19): siRNA sense strand
ccaaagaacaaacacuaau

SEQ ID NO: 1532584 - RNA, 19 nt, Homo sapiens
  misc_RNA (1)...(19): siRNA sense strand
ccaugaaaguauuggaaga

SEQ ID NO: 1532585 - RNA, 19 nt, Homo sapiens
  misc_RNA (1)...(19): siRNA sense strand
gaagagguugacuuuguga

SEQ ID NO: 1532586 - RNA, 19 nt, Homo sapiens
  misc_RNA (1)...(19): siRNA sense strand
aagccacucuucacauuga

SEQ ID NO: 1532587 - RNA, 19 nt, Homo sapiens
  misc_RNA (1)...(19): siRNA sense strand
gaaggaauuguugcaaaga

SEQ ID NO: 1532588 - RNA, 19 nt, Homo sapiens
  misc_RNA (1)...(19): siRNA sense strand
gagcaucucuauuaacuua

SEQ ID NO: 1532589 - RNA, 19 nt, Homo sapiens
  misc_RNA (1)...(19): siRNA sense strand
ggaaaucacuucugcaaca

SEQ ID NO: 1532590 - RNA, 19 nt, Homo sapiens
  misc_RNA (1)...(19): siRNA sense strand
ggacuuggcuucggaaauc

SEQ ID NO: 1532591 - RNA, 19 nt, Homo sapiens
  misc_RNA (1)...(19): siRNA sense strand
cuacccagcucccggcauu

SEQ ID NO: 1532592 - RNA, 19 nt, Homo sapiens
  misc_RNA (1)...(19): siRNA sense strand
acuuggagcaucucuauua

SEQ ID NO: 1532593 - RNA, 19 nt, Homo sapiens
  misc_RNA (1)...(19): siRNA sense strand
ggugaaacuuggagcaucu

SEQ ID NO: 1532594 - RNA, 19 nt, Homo sapiens
  misc_RNA (1)...(19): siRNA sense strand
aaacuuggagcaucucuau

SEQ ID NO: 1532595 - RNA, 19 nt, Homo sapiens
  misc_RNA (1)...(19): siRNA sense strand
gcaucucuauuaacuuagu

SEQ ID NO: 1532596 - RNA, 19 nt, Homo sapiens
  misc_RNA (1)...(19): siRNA sense strand
gaaacuuggagcaucucua

SEQ ID NO: 1532597 - RNA, 19 nt, Homo sapiens
  misc_RNA (1)...(19): siRNA sense strand
cuuggagcaucucuauuaa

SEQ ID NO: 1532598 - RNA, 19 nt, Homo sapiens
  misc_RNA (1)...(19): siRNA sense strand
uggagcaucucuauuaacu

SEQ ID NO: 1532599 - RNA, 19 nt, Homo sapiens
  misc_RNA (1)...(19): siRNA sense strand
ugcgcaaggugaagaguuu

SEQ ID NO: 1532600 - RNA, 19 nt, Homo sapiens
  misc_RNA (1)...(19): siRNA sense strand
gaaaucacuucugcaacac

SEQ ID NO: 1532601 - RNA, 19 nt, Homo sapiens
  misc_RNA (1)...(19): siRNA sense strand
ccacagugcgcaaggugaa

SEQ ID NO: 1532602 - RNA, 19 nt, Homo sapiens
  misc_RNA (1)...(19): siRNA sense strand
ccaggccuguuucaacuag

SEQ ID NO: 1532603 - RNA, 19 nt, Homo sapiens
  misc_RNA (1)...(19): siRNA sense strand
aaucacuucugcaacacaa

SEQ ID NO: 1532604 - RNA, 19 nt, Homo sapiens
  misc_RNA (1)...(19): siRNA sense strand
guccaggccuguuucaacu

SEQ ID NO: 1532605 - RNA, 19 nt, Homo sapiens
  misc_RNA (1)...(19): siRNA sense strand
uuaccugccuccuguuugg

SEQ ID NO: 1532606 - RNA, 19 nt, Homo sapiens
  misc_RNA (1)...(19): siRNA sense strand
gcuuaccugccuccuguuu

SEQ ID NO: 1532607 - RNA, 19 nt, Homo sapiens
  misc_RNA (1)...(19): siRNA sense strand
ucggaaaucacuucugcaa

SEQ ID NO: 1532608 - RNA, 19 nt, Homo sapiens
  misc_RNA (1)...(19): siRNA sense strand
ccagcucccggcauuguug

SEQ ID NO: 1532609 - RNA, 19 nt, Homo sapiens
  misc_RNA (1)...(19): siRNA sense strand
gaaccaagaugaaucagaa

SEQ ID NO: 1532610 - RNA, 19 nt, Homo sapiens
  misc_RNA (1)...(19): siRNA sense strand
gaagucagaucgauaaaga

SEQ ID NO: 1532611 - RNA, 19 nt, Homo sapiens
  misc_RNA (1)...(19): siRNA sense strand
gcagaaagccuuaaaugaa

SEQ ID NO: 1532612 - RNA, 19 nt, Homo sapiens
  misc_RNA (1)...(19): siRNA sense strand
gaauuacgaucacaaaguu

SEQ ID NO: 1532613 - RNA, 19 nt, Homo sapiens
  misc_RNA (1)...(19): siRNA sense strand
ggaaagaaacaaagcauuu

SEQ ID NO: 1532614 - RNA, 19 nt, Homo sapiens
  misc_RNA (1)...(19): siRNA sense strand
uaaggaagcuucuacugaa

SEQ ID NO: 1532615 - RNA, 19 nt, Homo sapiens
  misc_RNA (1)...(19): siRNA sense strand
cagggaagcuuacuugaaa

SEQ ID NO: 1532616 - RNA, 19 nt, Homo sapiens
  misc_RNA (1)...(19): siRNA sense strand
gaaggcagcaugacuguuu

SEQ ID NO: 1532617 - RNA, 19 nt, Homo sapiens
  misc_RNA (1)...(19): siRNA sense strand
gaaagaguguuggccauug

SEQ ID NO: 1532618 - RNA, 19 nt, Homo sapiens
  misc_RNA (1)...(19): siRNA sense strand
cauuggaacucuuaacuaa

SEQ ID NO: 1532619 - RNA, 19 nt, Homo sapiens
  misc_RNA (1)...(19): siRNA sense strand
caaaggaucuacauugaag

SEQ ID NO: 1532620 - RNA, 19 nt, Homo sapiens
  misc_RNA (1)...(19): siRNA sense strand
ucagaucgauaaagaauug

SEQ ID NO: 1532621 - RNA, 19 nt, Homo sapiens
  misc_RNA (1)...(19): siRNA sense strand
caaggaguguuucauuuga

SEQ ID NO: 1532622 - RNA, 19 nt, Homo sapiens
  misc_RNA (1)...(19): siRNA sense strand
gaagaaauugcacuuaaga

SEQ ID NO: 1532623 - RNA, 19 nt, Homo sapiens
  misc_RNA (1)...(19): siRNA sense strand
gaacaggcaguacgaauuc

SEQ ID NO: 1532624 - RNA, 19 nt, Homo sapiens
  misc_RNA (1)...(19): siRNA sense strand
gcaaggaguguuucauuug

SEQ ID NO: 1532625 - RNA, 19 nt, Homo sapiens
  misc_RNA (1)...(19): siRNA sense strand
aaacgaagacaacggcuua

SEQ ID NO: 1532626 - RNA, 19 nt, Homo sapiens
  misc_RNA (1)...(19): siRNA sense strand
gaaggcauuggaacucuua

SEQ ID NO: 1532627 - RNA, 19 nt, Homo sapiens
  misc_RNA (1)...(19): siRNA sense strand
gauaaagaauuggcuagug

SEQ ID NO: 1532628 - RNA, 19 nt, Homo sapiens
  misc_RNA (1)...(19): siRNA sense strand
cugaagaaauugcacuuaa

SEQ ID NO: 1532629 - RNA, 19 nt, Homo sapiens
  misc_RNA (1)...(19): siRNA sense strand
gcagaagccaucaguaaga

SEQ ID NO: 1532630 - RNA, 19 nt, Homo sapiens
  misc_RNA (1)...(19): siRNA sense strand
gaucuacauugaaggcauu

SEQ ID NO: 1532631 - RNA, 19 nt, Homo sapiens
  misc_RNA (1)...(19): siRNA sense strand
gaagcuuacuugaaagagu

SEQ ID NO: 1532632 - RNA, 19 nt, Homo sapiens
  misc_RNA (1)...(19): siRNA sense strand
cccaaaggaucuacauuga

SEQ ID NO: 1532633 - RNA, 19 nt, Homo sapiens
  misc_RNA (1)...(19): siRNA sense strand
cagaaagccuuaaaugaac

SEQ ID NO: 1532634 - RNA, 19 nt, Homo sapiens
  misc_RNA (1)...(19): siRNA sense strand
gaagacaacggcuuauugg

SEQ ID NO: 1532635 - RNA, 19 nt, Homo sapiens
  misc_RNA (1)...(19): siRNA sense strand
aauaaaggcuaaacaagca

SEQ ID NO: 1532636 - RNA, 19 nt, Homo sapiens
  misc_RNA (1)...(19): siRNA sense strand
ggaggcagaugaaaagaaa

SEQ ID NO: 1532637 - RNA, 19 nt, Homo sapiens
  misc_RNA (1)...(19): siRNA sense strand
ggagaaccaagaugaauca

SEQ ID NO: 1532638 - RNA, 19 nt, Homo sapiens
  misc_RNA (1)...(19): siRNA sense strand
cgaagacaacggcuuauug

SEQ ID NO: 1532639 - RNA, 19 nt, Homo sapiens
  misc_RNA (1)...(19): siRNA sense strand
gcaauaaaggcuaaacaag

SEQ ID NO: 1532640 - RNA, 19 nt, Homo sapiens
  misc_RNA (1)...(19): siRNA sense strand
gaaggcaaaucagaagaag

SEQ ID NO: 1532641 - RNA, 19 nt, Homo sapiens
  misc_RNA (1)...(19): siRNA sense strand
agaauuggcuaguggugaa

SEQ ID NO: 1532642 - RNA, 19 nt, Homo sapiens
  misc_RNA (1)...(19): siRNA sense strand
gcauuggaacucuuaacua

SEQ ID NO: 1532643 - RNA, 19 nt, Homo sapiens
  misc_RNA (1)...(19): siRNA sense strand
caaaauacagggaagcuua

SEQ ID NO: 1532644 - RNA, 19 nt, Homo sapiens
  misc_RNA (1)...(19): siRNA sense strand
aagcagaagccaucaguaa

SEQ ID NO: 1532645 - RNA, 19 nt, Homo sapiens
  misc_RNA (1)...(19): siRNA sense strand
ugaagaaauugcacuuaag

SEQ ID NO: 1532646 - RNA, 19 nt, Homo sapiens
  misc_RNA (1)...(19): siRNA sense strand
cuaaggaagcuucuacuga

SEQ ID NO: 1532647 - RNA, 19 nt, Homo sapiens
  misc_RNA (1)...(19): siRNA sense strand
aaauugcacuuaagaugga

SEQ ID NO: 1532648 - RNA, 19 nt, Homo sapiens
  misc_RNA (1)...(19): siRNA sense strand
aggaugauguugcauguga

SEQ ID NO: 1532649 - RNA, 19 nt, Homo sapiens
  misc_RNA (1)...(19): siRNA sense strand
aagcauuuauuccaccuaa

SEQ ID NO: 1532650 - RNA, 19 nt, Homo sapiens
  misc_RNA (1)...(19): siRNA sense strand
ggcuaguggugaauacuuu

SEQ ID NO: 1532651 - RNA, 19 nt, Homo sapiens
  misc_RNA (1)...(19): siRNA sense strand
caggaagucagaucgauaa

SEQ ID NO: 1532652 - RNA, 19 nt, Homo sapiens
  misc_RNA (1)...(19): siRNA sense strand
ucacaaaguugggagagau

SEQ ID NO: 1532653 - RNA, 19 nt, Homo sapiens
  misc_RNA (1)...(19): siRNA sense strand
ggaauaaagagagauuugu

SEQ ID NO: 1532654 - RNA, 19 nt, Homo sapiens
  misc_RNA (1)...(19): siRNA sense strand
gaaaauggaagcaauaaag

SEQ ID NO: 1532655 - RNA, 19 nt, Homo sapiens
  misc_RNA (1)...(19): siRNA sense strand
uggaagcaauaaaggcuaa

SEQ ID NO: 1532656 - RNA, 19 nt, Homo sapiens
  misc_RNA (1)...(19): siRNA sense strand
gugcagaaagccuuaaaug

SEQ ID NO: 1532657 - RNA, 19 nt, Homo sapiens
  misc_RNA (1)...(19): siRNA sense strand
uaagauggaggcagaugaa

SEQ ID NO: 1532658 - RNA, 19 nt, Homo sapiens
  misc_RNA (1)...(19): siRNA sense strand
ccaaaggaucuacauugaa

SEQ ID NO: 1532659 - RNA, 19 nt, Homo sapiens
  misc_RNA (1)...(19): siRNA sense strand
uacgaauucuucaggauga

SEQ ID NO: 1532660 - RNA, 19 nt, Homo sapiens
  misc_RNA (1)...(19): siRNA sense strand
agcaaggaguguuucauuu

SEQ ID NO: 1532661 - RNA, 19 nt, Homo sapiens
  misc_RNA (1)...(19): siRNA sense strand
cagcaugacuguuuguacu

SEQ ID NO: 1532662 - RNA, 19 nt, Homo sapiens
  misc_RNA (1)...(19): siRNA sense strand
uagcaaggaguguuucauu

SEQ ID NO: 1532663 - RNA, 19 nt, Homo sapiens
  misc_RNA (1)...(19): siRNA sense strand
gacaaucccagaggacuuu

SEQ ID NO: 1532664 - RNA, 19 nt, Homo sapiens
  misc_RNA (1)...(19): siRNA sense strand
gcugaagaaauugcacuua

SEQ ID NO: 1532665 - RNA, 19 nt, Homo sapiens
  misc_RNA (1)...(19): siRNA sense strand
gaaacugggagcucuuaca

SEQ ID NO: 1532666 - RNA, 19 nt, Homo sapiens
  misc_RNA (1)...(19): siRNA sense strand
gaaaaguaguccuugauac

SEQ ID NO: 1532667 - RNA, 19 nt, Homo sapiens
  misc_RNA (1)...(19): siRNA sense strand
ugaacaggcaguacgaauu

SEQ ID NO: 1532668 - RNA, 19 nt, Homo sapiens
  misc_RNA (1)...(19): siRNA sense strand
agaaauugcacuuaagaug

SEQ ID NO: 1532669 - RNA, 19 nt, Homo sapiens
  misc_RNA (1)...(19): siRNA sense strand
ccaggaagucagaucgaua

SEQ ID NO: 1532670 - RNA, 19 nt, Homo sapiens
  misc_RNA (1)...(19): siRNA sense strand
ggacaaucccagaggacuu

SEQ ID NO: 1532671 - RNA, 19 nt, Homo sapiens
  misc_RNA (1)...(19): siRNA sense strand
ucaggaugauguugcaugu

SEQ ID NO: 1532672 - RNA, 19 nt, Homo sapiens
  misc_RNA (1)...(19): siRNA sense strand
uaagagacaagaggaaaga

SEQ ID NO: 1532673 - RNA, 19 nt, Homo sapiens
  misc_RNA (1)...(19): siRNA sense strand
gcagaaaauggaagcaaua

SEQ ID NO: 1532674 - RNA, 19 nt, Homo sapiens
  misc_RNA (1)...(19): siRNA sense strand
gaugaaucagaacuccuua

SEQ ID NO: 1532675 - RNA, 19 nt, Homo sapiens
  misc_RNA (1)...(19): siRNA sense strand
aaccaauugugaaaccuaa

SEQ ID NO: 1532676 - RNA, 19 nt, Homo sapiens
  misc_RNA (1)...(19): siRNA sense strand
ugaauuacgaucacaaagu

SEQ ID NO: 1532677 - RNA, 19 nt, Homo sapiens
  misc_RNA (1)...(19): siRNA sense strand
ccacaaccaggaagucaga

SEQ ID NO: 1532678 - RNA, 19 nt, Homo sapiens
  misc_RNA (1)...(19): siRNA sense strand
gggaagcuuacuugaaaga

SEQ ID NO: 1532679 - RNA, 19 nt, Homo sapiens
  misc_RNA (1)...(19): siRNA sense strand
ugaaggcaaaucagaagaa

SEQ ID NO: 1532680 - RNA, 19 nt, Homo sapiens
  misc_RNA (1)...(19): siRNA sense strand
agaaagccuuaaaugaaca

SEQ ID NO: 1532681 - RNA, 19 nt, Homo sapiens
  misc_RNA (1)...(19): siRNA sense strand
gaaacaaagcauuuauucc

SEQ ID NO: 1532682 - RNA, 19 nt, Homo sapiens
  misc_RNA (1)...(19): siRNA sense strand
agaaagaauauacgccauu

SEQ ID NO: 1532683 - RNA, 19 nt, Homo sapiens
  misc_RNA (1)...(19): siRNA sense strand
agagagaguuggcaaaaga

SEQ ID NO: 1532684 - RNA, 19 nt, Homo sapiens
  misc_RNA (1)...(19): siRNA sense strand
aguaaggaauaaagagaga

SEQ ID NO: 1532685 - RNA, 19 nt, Homo sapiens
  misc_RNA (1)...(19): siRNA sense strand
ugcagaaagccuuaaauga

SEQ ID NO: 1532686 - RNA, 19 nt, Homo sapiens
  misc_RNA (1)...(19): siRNA sense strand
caagaggaaagaaacaaag

SEQ ID NO: 1532687 - RNA, 19 nt, Homo sapiens
  misc_RNA (1)...(19): siRNA sense strand
gacaagaggaaagaaacaa

SEQ ID NO: 1532688 - RNA, 19 nt, Homo sapiens
  misc_RNA (1)...(19): siRNA sense strand
gcaugacuguuuguacuac

SEQ ID NO: 1532689 - RNA, 19 nt, Homo sapiens
  misc_RNA (1)...(19): siRNA sense strand
auacagggaagcuuacuug

SEQ ID NO: 1532690 - RNA, 19 nt, Homo sapiens
  misc_RNA (1)...(19): siRNA sense strand
gaggaaagaaacaaagcau

SEQ ID NO: 1532691 - RNA, 19 nt, Homo sapiens
  misc_RNA (1)...(19): siRNA sense strand
aauagguucuuuaguaagg

SEQ ID NO: 1532692 - RNA, 19 nt, Homo sapiens
  misc_RNA (1)...(19): siRNA sense strand
gaagacuuuugauccauau

SEQ ID NO: 1532693 - RNA, 19 nt, Homo sapiens
  misc_RNA (1)...(19): siRNA sense strand
acaagaggaaagaaacaaa

SEQ ID NO: 1532694 - RNA, 19 nt, Homo sapiens
  misc_RNA (1)...(19): siRNA sense strand
cagaagccaucaguaagag

SEQ ID NO: 1532695 - RNA, 19 nt, Homo sapiens
  misc_RNA (1)...(19): siRNA sense strand
caagcagaagccaucagua

SEQ ID NO: 1532696 - RNA, 19 nt, Homo sapiens
  misc_RNA (1)...(19): siRNA sense strand
ucccaaaggaucuacauug

SEQ ID NO: 1532697 - RNA, 19 nt, Homo sapiens
  misc_RNA (1)...(19): siRNA sense strand
aaagaguguuggccauugg

SEQ ID NO: 1532698 - RNA, 19 nt, Homo sapiens
  misc_RNA (1)...(19): siRNA sense strand
acagggaagcuuacuugaa

SEQ ID NO: 1532699 - RNA, 19 nt, Homo sapiens
  misc_RNA (1)...(19): siRNA sense strand
aaauugauguggccagcau

SEQ ID NO: 1532700 - RNA, 19 nt, Homo sapiens
  misc_RNA (1)...(19): siRNA sense strand
gaucgaaggcagcaugacu

SEQ ID NO: 1532701 - RNA, 19 nt, Homo sapiens
  misc_RNA (1)...(19): siRNA sense strand
gugaauuucguaaccagaa

SEQ ID NO: 1532702 - RNA, 19 nt, Homo sapiens
  misc_RNA (1)...(19): siRNA sense strand
gagacaagaggaaagaaac

SEQ ID NO: 1532703 - RNA, 19 nt, Homo sapiens
  misc_RNA (1)...(19): siRNA sense strand
ugaaagaguguuggccauu

SEQ ID NO: 1532704 - RNA, 19 nt, Homo sapiens
  misc_RNA (1)...(19): siRNA sense strand
acauuaugguucagggaaa

SEQ ID NO: 1532705 - RNA, 19 nt, Homo sapiens
  misc_RNA (1)...(19): siRNA sense strand
ugaaggcauuggaacucuu

SEQ ID NO: 1532706 - RNA, 19 nt, Homo sapiens
  misc_RNA (1)...(19): siRNA sense strand
agagacaagaggaaagaaa

SEQ ID NO: 1532707 - RNA, 19 nt, Homo sapiens
  misc_RNA (1)...(19): siRNA sense strand
aaaccaauugugaaaccua

SEQ ID NO: 1532708 - RNA, 19 nt, Homo sapiens
  misc_RNA (1)...(19): siRNA sense strand
gcauuuauuccaccuaagg

SEQ ID NO: 1532709 - RNA, 19 nt, Homo sapiens
  misc_RNA (1)...(19): siRNA sense strand
ggaagaagcaccagaccaa

SEQ ID NO: 1532710 - RNA, 19 nt, Homo sapiens
  misc_RNA (1)...(19): siRNA sense strand
ugaagaaguuugugaagau

SEQ ID NO: 1532711 - RNA, 19 nt, Homo sapiens
  misc_RNA (1)...(19): siRNA sense strand
ggagcuaccuggcacauac

SEQ ID NO: 1532712 - RNA, 19 nt, Homo sapiens
  misc_RNA (1)...(19): siRNA sense strand
gaagaaguuugugaagauc

SEQ ID NO: 1532713 - RNA, 19 nt, Homo sapiens
  misc_RNA (1)...(19): siRNA sense strand
gugaagaaguuugugaaga

SEQ ID NO: 1532714 - RNA, 19 nt, Homo sapiens
  misc_RNA (1)...(19): siRNA sense strand
gcagagagacucggagaug

SEQ ID NO: 1532715 - RNA, 19 nt, Homo sapiens
  misc_RNA (1)...(19): siRNA sense strand
caccugggcuccuaugaau

SEQ ID NO: 1532716 - RNA, 19 nt, Homo sapiens
  misc_RNA (1)...(19): siRNA sense strand
cagauugacuacccugaga

SEQ ID NO: 1532717 - RNA, 19 nt, Homo sapiens
  misc_RNA (1)...(19): siRNA sense strand
caacaaggacccguacuuc

SEQ ID NO: 1532718 - RNA, 19 nt, Homo sapiens
  misc_RNA (1)...(19): siRNA sense strand
gcuacaaagugaccaagca

SEQ ID NO: 1532719 - RNA, 19 nt, Homo sapiens
  misc_RNA (1)...(19): siRNA sense strand
gggcuccuaugaaugcaaa

SEQ ID NO: 1532720 - RNA, 19 nt, Homo sapiens
  misc_RNA (1)...(19): siRNA sense strand
ccaucgacaucaacaagga

SEQ ID NO: 1532721 - RNA, 19 nt, Homo sapiens
  misc_RNA (1)...(19): siRNA sense strand
ccacgucaccgcuucaugu

SEQ ID NO: 1532722 - RNA, 19 nt, Homo sapiens
  misc_RNA (1)...(19): siRNA sense strand
ugacacuucacaacaauga

SEQ ID NO: 1532723 - RNA, 19 nt, Homo sapiens
  misc_RNA (1)...(19): siRNA sense strand
gagcagagagaucgacaag

SEQ ID NO: 1532724 - RNA, 19 nt, Homo sapiens
  misc_RNA (1)...(19): siRNA sense strand
caaggacccguacuucaug

SEQ ID NO: 1532725 - RNA, 19 nt, Homo sapiens
  misc_RNA (1)...(19): siRNA sense strand
gccugacacuucacaacaa

SEQ ID NO: 1532726 - RNA, 19 nt, Homo sapiens
  misc_RNA (1)...(19): siRNA sense strand
cgaaggcccagggaacaua

SEQ ID NO: 1532727 - RNA, 19 nt, Homo sapiens
  misc_RNA (1)...(19): siRNA sense strand
gaggugaagaaguuuguga

SEQ ID NO: 1532728 - RNA, 19 nt, Homo sapiens
  misc_RNA (1)...(19): siRNA sense strand
caaagugaccaagcagaga

SEQ ID NO: 1532729 - RNA, 19 nt, Homo sapiens
  misc_RNA (1)...(19): siRNA sense strand
agguggaggugaagaaguu

SEQ ID NO: 1532730 - RNA, 19 nt, Homo sapiens
  misc_RNA (1)...(19): siRNA sense strand
ccaguuccacuuuaagaug

SEQ ID NO: 1532731 - RNA, 19 nt, Homo sapiens
  misc_RNA (1)...(19): siRNA sense strand
gcaguucuuccuccaguuc

SEQ ID NO: 1532732 - RNA, 19 nt, Homo sapiens
  misc_RNA (1)...(19): siRNA sense strand
ccaccugggcuccuaugaa

SEQ ID NO: 1532733 - RNA, 19 nt, Homo sapiens
  misc_RNA (1)...(19): siRNA sense strand
aaacucugccugacacuuc

SEQ ID NO: 1532734 - RNA, 19 nt, Homo sapiens
  misc_RNA (1)...(19): siRNA sense strand
gaccaucgacaucaacaag

SEQ ID NO: 1532735 - RNA, 19 nt, Homo sapiens
  misc_RNA (1)...(19): siRNA sense strand
ucaacaaggacccguacuu

SEQ ID NO: 1532736 - RNA, 19 nt, Homo sapiens
  misc_RNA (1)...(19): siRNA sense strand
ccugacacuucacaacaau

SEQ ID NO: 1532737 - RNA, 19 nt, Homo sapiens
  misc_RNA (1)...(19): siRNA sense strand
agaaccaccugggcuccua

SEQ ID NO: 1532738 - RNA, 19 nt, Homo sapiens
  misc_RNA (1)...(19): siRNA sense strand
ggcaaguucuggacacacu

SEQ ID NO: 1532739 - RNA, 19 nt, Homo sapiens
  misc_RNA (1)...(19): siRNA sense strand
acaaggacccguacuucau

SEQ ID NO: 1532740 - RNA, 19 nt, Homo sapiens
  misc_RNA (1)...(19): siRNA sense strand
gagccuccucuuccagauu

SEQ ID NO: 1532741 - RNA, 19 nt, Homo sapiens
  misc_RNA (1)...(19): siRNA sense strand
ucaagguggaggugaagaa

SEQ ID NO: 1532742 - RNA, 19 nt, Homo sapiens
  misc_RNA (1)...(19): siRNA sense strand
gaucgccgagggcaucaug

SEQ ID NO: 1532743 - RNA, 19 nt, Homo sapiens
  misc_RNA (1)...(19): siRNA sense strand
gaaccaccugggcuccuau

SEQ ID NO: 1532744 - RNA, 19 nt, Homo sapiens
  misc_RNA (1)...(19): siRNA sense strand
uggagaccaucgacaucaa

SEQ ID NO: 1532745 - RNA, 19 nt, Homo sapiens
  misc_RNA (1)...(19): siRNA sense strand
cgagaccauugccuucaag

SEQ ID NO: 1532746 - RNA, 19 nt, Homo sapiens
  misc_RNA (1)...(19): siRNA sense strand
caccgcugccugagucuuu

SEQ ID NO: 1532747 - RNA, 19 nt, Homo sapiens
  misc_RNA (1)...(19): siRNA sense strand
aaggacccguacuucauga

SEQ ID NO: 1532748 - RNA, 19 nt, Homo sapiens
  misc_RNA (1)...(19): siRNA sense strand
ggaguucaccccucaaauc

SEQ ID NO: 1532749 - RNA, 19 nt, Homo sapiens
  misc_RNA (1)...(19): siRNA sense strand
gggagcuaccuggcacaua

SEQ ID NO: 1532750 - RNA, 19 nt, Homo sapiens
  misc_RNA (1)...(19): siRNA sense strand
uuccuccaguuccacuuua

SEQ ID NO: 1532751 - RNA, 19 nt, Homo sapiens
  misc_RNA (1)...(19): siRNA sense strand
agccuccucuuccagauug

SEQ ID NO: 1532752 - RNA, 19 nt, Homo sapiens
  misc_RNA (1)...(19): siRNA sense strand
ggcaaaggcugaagaauuu

SEQ ID NO: 1532753 - RNA, 19 nt, Homo sapiens
  misc_RNA (1)...(19): siRNA sense strand
gaagagcucuauagccuuu

SEQ ID NO: 1532754 - RNA, 19 nt, Homo sapiens
  misc_RNA (1)...(19): siRNA sense strand
ggaggaaaguggagaaauu

SEQ ID NO: 1532755 - RNA, 19 nt, Homo sapiens
  misc_RNA (1)...(19): siRNA sense strand
ggaagaaacuuaaccaucu

SEQ ID NO: 1532756 - RNA, 19 nt, Homo sapiens
  misc_RNA (1)...(19): siRNA sense strand
caacacagcuucuaaaggu

SEQ ID NO: 1532757 - RNA, 19 nt, Homo sapiens
  misc_RNA (1)...(19): siRNA sense strand
guugaagcauuuccuauua

SEQ ID NO: 1532758 - RNA, 19 nt, Homo sapiens
  misc_RNA (1)...(19): siRNA sense strand
caagaucccuuuauucaug

SEQ ID NO: 1532759 - RNA, 19 nt, Homo sapiens
  misc_RNA (1)...(19): siRNA sense strand
uaagacaggugcagacgua

SEQ ID NO: 1532760 - RNA, 19 nt, Homo sapiens
  misc_RNA (1)...(19): siRNA sense strand
gaaagaagagggaagaaga

SEQ ID NO: 1532761 - RNA, 19 nt, Homo sapiens
  misc_RNA (1)...(19): siRNA sense strand
gaagagaugcuuuauagau

SEQ ID NO: 1532762 - RNA, 19 nt, Homo sapiens
  misc_RNA (1)...(19): siRNA sense strand
ugacagauguguuguuaga

SEQ ID NO: 1532763 - RNA, 19 nt, Homo sapiens
  misc_RNA (1)...(19): siRNA sense strand
ggaagaggauagcauugaa

SEQ ID NO: 1532764 - RNA, 19 nt, Homo sapiens
  misc_RNA (1)...(19): siRNA sense strand
cuaaagacauucauggaaa

SEQ ID NO: 1532765 - RNA, 19 nt, Homo sapiens
  misc_RNA (1)...(19): siRNA sense strand
gcaauuacaucugugauuc

SEQ ID NO: 1532766 - RNA, 19 nt, Homo sapiens
  misc_RNA (1)...(19): siRNA sense strand
gcaaagcugauucacguua

SEQ ID NO: 1532767 - RNA, 19 nt, Homo sapiens
  misc_RNA (1)...(19): siRNA sense strand
gacaagagcuacugcacuu

SEQ ID NO: 1532768 - RNA, 19 nt, Homo sapiens
  misc_RNA (1)...(19): siRNA sense strand
cauaaaagcucaaaaguga

SEQ ID NO: 1532769 - RNA, 19 nt, Homo sapiens
  misc_RNA (1)...(19): siRNA sense strand
cuacuggaauguguuauua

SEQ ID NO: 1532770 - RNA, 19 nt, Homo sapiens
  misc_RNA (1)...(19): siRNA sense strand
guaaagauguuguuauggu

SEQ ID NO: 1532771 - RNA, 19 nt, Homo sapiens
  misc_RNA (1)...(19): siRNA sense strand
gaaguuccuugauucagaa

SEQ ID NO: 1532772 - RNA, 19 nt, Homo sapiens
  misc_RNA (1)...(19): siRNA sense strand
cuugagugcuucauaaaua

SEQ ID NO: 1532773 - RNA, 19 nt, Homo sapiens
  misc_RNA (1)...(19): siRNA sense strand
uggaagagaugcuuuauag

SEQ ID NO: 1532774 - RNA, 19 nt, Homo sapiens
  misc_RNA (1)...(19): siRNA sense strand
gaggaaaguggagaaauua

SEQ ID NO: 1532775 - RNA, 19 nt, Homo sapiens
  misc_RNA (1)...(19): siRNA sense strand
ugaaagauaugaggacuug

SEQ ID NO: 1532776 - RNA, 19 nt, Homo sapiens
  misc_RNA (1)...(19): siRNA sense strand
ugagauaagucaccagcua

SEQ ID NO: 1532777 - RNA, 19 nt, Homo sapiens
  misc_RNA (1)...(19): siRNA sense strand
ggaaacagaaagaagaauu

SEQ ID NO: 1532778 - RNA, 19 nt, Homo sapiens
  misc_RNA (1)...(19): siRNA sense strand
cagccuaaaugaauuacua

SEQ ID NO: 1532779 - RNA, 19 nt, Homo sapiens
  misc_RNA (1)...(19): siRNA sense strand
gaagggagaaggagaaugu

SEQ ID NO: 1532780 - RNA, 19 nt, Homo sapiens
  misc_RNA (1)...(19): siRNA sense strand
gguauacauugcagaaauu

SEQ ID NO: 1532781 - RNA, 19 nt, Homo sapiens
  misc_RNA (1)...(19): siRNA sense strand
gcagacguaugucggcuuu

SEQ ID NO: 1532782 - RNA, 19 nt, Homo sapiens
  misc_RNA (1)...(19): siRNA sense strand
ugaaauggauagugaaauc

SEQ ID NO: 1532783 - RNA, 19 nt, Homo sapiens
  misc_RNA (1)...(19): siRNA sense strand
ggauagcauugaaagauau

SEQ ID NO: 1532784 - RNA, 19 nt, Homo sapiens
  misc_RNA (1)...(19): siRNA sense strand
ugugagggcugcuaaguuu

SEQ ID NO: 1532785 - RNA, 19 nt, Homo sapiens
  misc_RNA (1)...(19): siRNA sense strand
gcguauccaucaagcuuua

SEQ ID NO: 1532786 - RNA, 19 nt, Homo sapiens
  misc_RNA (1)...(19): siRNA sense strand
ggagcugguuggagaguuu

SEQ ID NO: 1532787 - RNA, 19 nt, Homo sapiens
  misc_RNA (1)...(19): siRNA sense strand
ggaaaguggagaaauuaaa

SEQ ID NO: 1532788 - RNA, 19 nt, Homo sapiens
  misc_RNA (1)...(19): siRNA sense strand
gaagagggaagaagauuuc

SEQ ID NO: 1532789 - RNA, 19 nt, Homo sapiens
  misc_RNA (1)...(19): siRNA sense strand
gcugcaagaucccuuuauu

SEQ ID NO: 1532790 - RNA, 19 nt, Homo sapiens
  misc_RNA (1)...(19): siRNA sense strand
gccaaacuuuacacgauua

SEQ ID NO: 1532791 - RNA, 19 nt, Homo sapiens
  misc_RNA (1)...(19): siRNA sense strand
caacauagcaaagcugauu

SEQ ID NO: 1532792 - RNA, 19 nt, Homo sapiens
  misc_RNA (1)...(19): siRNA sense strand
uuacuugagugcuucauaa

SEQ ID NO: 1532793 - RNA, 19 nt, Homo sapiens
  misc_RNA (1)...(19): siRNA sense strand
caacuggaauaucaacuuc

SEQ ID NO: 1532794 - RNA, 19 nt, Homo sapiens
  misc_RNA (1)...(19): siRNA sense strand
ggaaauuacuuuggaagag

SEQ ID NO: 1532795 - RNA, 19 nt, Homo sapiens
  misc_RNA (1)...(19): siRNA sense strand
gauccaaaccuucaugcua

SEQ ID NO: 1532796 - RNA, 19 nt, Homo sapiens
  misc_RNA (1)...(19): siRNA sense strand
acagauguguuguuagaaa

SEQ ID NO: 1532797 - RNA, 19 nt, Homo sapiens
  misc_RNA (1)...(19): siRNA sense strand
guguaaagauguuguuaug

SEQ ID NO: 1532798 - RNA, 19 nt, Homo sapiens
  misc_RNA (1)...(19): siRNA sense strand
ccaggagguucuaucagua

SEQ ID NO: 1532799 - RNA, 19 nt, Homo sapiens
  misc_RNA (1)...(19): siRNA sense strand
agaguucuauucaggauuu

SEQ ID NO: 1532800 - RNA, 19 nt, Homo sapiens
  misc_RNA (1)...(19): siRNA sense strand
cauggcagguuuacuagaa

SEQ ID NO: 1532801 - RNA, 19 nt, Homo sapiens
  misc_RNA (1)...(19): siRNA sense strand
gaaaguggagaaauuaaag

SEQ ID NO: 1532802 - RNA, 19 nt, Homo sapiens
  misc_RNA (1)...(19): siRNA sense strand
caaggaaacagaaagaaga

SEQ ID NO: 1532803 - RNA, 19 nt, Homo sapiens
  misc_RNA (1)...(19): siRNA sense strand
gaaggaaagguguauuugu

SEQ ID NO: 1532804 - RNA, 19 nt, Homo sapiens
  misc_RNA (1)...(19): siRNA sense strand
gauacagucuccacgacaa

SEQ ID NO: 1532805 - RNA, 19 nt, Homo sapiens
  misc_RNA (1)...(19): siRNA sense strand
uauauaagcccauccuuug

SEQ ID NO: 1532806 - RNA, 19 nt, Homo sapiens
  misc_RNA (1)...(19): siRNA sense strand
ggccaaacuuuacacgauu

SEQ ID NO: 1532807 - RNA, 19 nt, Homo sapiens
  misc_RNA (1)...(19): siRNA sense strand
cuagaugaauuaucaagga

SEQ ID NO: 1532808 - RNA, 19 nt, Homo sapiens
  misc_RNA (1)...(19): siRNA sense strand
gaagaggauagcauugaaa

SEQ ID NO: 1532809 - RNA, 19 nt, Homo sapiens
  misc_RNA (1)...(19): siRNA sense strand
gagcaacacagcuucuaaa

SEQ ID NO: 1532810 - RNA, 19 nt, Homo sapiens
  misc_RNA (1)...(19): siRNA sense strand
cuacgaagcccuacuggaa

SEQ ID NO: 1532811 - RNA, 19 nt, Homo sapiens
  misc_RNA (1)...(19): siRNA sense strand
gcugaagaauuuauugaca

SEQ ID NO: 1532812 - RNA, 19 nt, Homo sapiens
  misc_RNA (1)...(19): siRNA sense strand
uuauugaccuccugaagaa

SEQ ID NO: 1532813 - RNA, 19 nt, Homo sapiens
  misc_RNA (1)...(19): siRNA sense strand
gauccuugguguuuguaaa

SEQ ID NO: 1532814 - RNA, 19 nt, Homo sapiens
  misc_RNA (1)...(19): siRNA sense strand
ugcgggagguucugaguua

SEQ ID NO: 1532815 - RNA, 19 nt, Homo sapiens
  misc_RNA (1)...(19): siRNA sense strand
ggaaucaugcaaacaguga

SEQ ID NO: 1532816 - RNA, 19 nt, Homo sapiens
  misc_RNA (1)...(19): siRNA sense strand
gaaggagaaugugacuguu

SEQ ID NO: 1532817 - RNA, 19 nt, Homo sapiens
  misc_RNA (1)...(19): siRNA sense strand
caaagcugauucacguuau

SEQ ID NO: 1532818 - RNA, 19 nt, Homo sapiens
  misc_RNA (1)...(19): siRNA sense strand
gacaugcuguugaagauca

SEQ ID NO: 1532819 - RNA, 19 nt, Homo sapiens
  misc_RNA (1)...(19): siRNA sense strand
cagaaggaaagguguauuu

SEQ ID NO: 1532820 - RNA, 19 nt, Homo sapiens
  misc_RNA (1)...(19): siRNA sense strand
aggauagcauugaaagaua

SEQ ID NO: 1532821 - RNA, 19 nt, Homo sapiens
  misc_RNA (1)...(19): siRNA sense strand
gaggauagcauugaaagau

SEQ ID NO: 1532822 - RNA, 19 nt, Homo sapiens
  misc_RNA (1)...(19): siRNA sense strand
gaacuacgaagcccuacug

SEQ ID NO: 1532823 - RNA, 19 nt, Homo sapiens
  misc_RNA (1)...(19): siRNA sense strand
ccacgacaauucggagaaa

SEQ ID NO: 1532824 - RNA, 19 nt, Homo sapiens
  misc_RNA (1)...(19): siRNA sense strand
gagcaucuuucugaucuuc

SEQ ID NO: 1532825 - RNA, 19 nt, Homo sapiens
  misc_RNA (1)...(19): siRNA sense strand
ccauucagcugugguguga

SEQ ID NO: 1532826 - RNA, 19 nt, Homo sapiens
  misc_RNA (1)...(19): siRNA sense strand
gccaggagguucuaucagu

SEQ ID NO: 1532827 - RNA, 19 nt, Homo sapiens
  misc_RNA (1)...(19): siRNA sense strand
uggcaaaggcugaagaauu

SEQ ID NO: 1532828 - RNA, 19 nt, Homo sapiens
  misc_RNA (1)...(19): siRNA sense strand
gcaaaggcugaagaauuua

SEQ ID NO: 1532829 - RNA, 19 nt, Homo sapiens
  misc_RNA (1)...(19): siRNA sense strand
gcauccaucuucagcacaa

SEQ ID NO: 1532830 - RNA, 19 nt, Homo sapiens
  misc_RNA (1)...(19): siRNA sense strand
caaagaaccgcgagugcuu

SEQ ID NO: 1532831 - RNA, 19 nt, Homo sapiens
  misc_RNA (1)...(19): siRNA sense strand
acaacuggcugcccacaga

SEQ ID NO: 1532832 - RNA, 19 nt, Homo sapiens
  misc_RNA (1)...(19): siRNA sense strand
aaacugagccacccauugu

SEQ ID NO: 1532833 - RNA, 19 nt, Homo sapiens
  misc_RNA (1)...(19): siRNA sense strand
ccaucaagcuuuauauugc

SEQ ID NO: 1532834 - RNA, 19 nt, Homo sapiens
  misc_RNA (1)...(19): siRNA sense strand
gugcauauuauccugguua

SEQ ID NO: 1532835 - RNA, 19 nt, Homo sapiens
  misc_RNA (1)...(19): siRNA sense strand
aggcauguguggcuucuaa

SEQ ID NO: 1532836 - RNA, 19 nt, Homo sapiens
  misc_RNA (1)...(19): siRNA sense strand
ucaagguguuuaauaggaa

SEQ ID NO: 1532837 - RNA, 19 nt, Homo sapiens
  misc_RNA (1)...(19): siRNA sense strand
uuucugaucuuccaccauu

SEQ ID NO: 1532838 - RNA, 19 nt, Homo sapiens
  misc_RNA (1)...(19): siRNA sense strand
gguguacuuucuacucuga

SEQ ID NO: 1532839 - RNA, 19 nt, Homo sapiens
  misc_RNA (1)...(19): siRNA sense strand
gcauuggucuacauugagu

SEQ ID NO: 1532840 - RNA, 19 nt, Homo sapiens
  misc_RNA (1)...(19): siRNA sense strand
uaauaaagaggccaaacuu

SEQ ID NO: 1532841 - RNA, 19 nt, Homo sapiens
  misc_RNA (1)...(19): siRNA sense strand
ugaguuacuuucaccauca

SEQ ID NO: 1532842 - RNA, 19 nt, Homo sapiens
  misc_RNA (1)...(19): siRNA sense strand
auucaggauuuguguguua

SEQ ID NO: 1532843 - RNA, 19 nt, Homo sapiens
  misc_RNA (1)...(19): siRNA sense strand
uaugaggacuugcuguguu

SEQ ID NO: 1532844 - RNA, 19 nt, Homo sapiens
  misc_RNA (1)...(19): siRNA sense strand
uggcauuggucuacauuga

SEQ ID NO: 1532845 - RNA, 19 nt, Homo sapiens
  misc_RNA (1)...(19): siRNA sense strand
gugauucucuggaaaagua

SEQ ID NO: 1532846 - RNA, 19 nt, Homo sapiens
  misc_RNA (1)...(19): siRNA sense strand
uaaacgauguugcaugcau

SEQ ID NO: 1532847 - RNA, 19 nt, Homo sapiens
  misc_RNA (1)...(19): siRNA sense strand
ggaagacacaggaaagaca

SEQ ID NO: 1532848 - RNA, 19 nt, Homo sapiens
  misc_RNA (1)...(19): siRNA sense strand
caagaaagaagagggaaga

SEQ ID NO: 1532849 - RNA, 19 nt, Homo sapiens
  misc_RNA (1)...(19): siRNA sense strand
caagagcuacugcacuuug

SEQ ID NO: 1532850 - RNA, 19 nt, Homo sapiens
  misc_RNA (1)...(19): siRNA sense strand
ggaaaaguauugacagaag

SEQ ID NO: 1532851 - RNA, 19 nt, Homo sapiens
  misc_RNA (1)...(19): siRNA sense strand
gaguggaagagaugcuuua

SEQ ID NO: 1532852 - RNA, 19 nt, Homo sapiens
  misc_RNA (1)...(19): siRNA sense strand
ccaaagaaguuccaacaaa

SEQ ID NO: 1532853 - RNA, 19 nt, Homo sapiens
  misc_RNA (1)...(19): siRNA sense strand
ccagacagcuucuauuuua

SEQ ID NO: 1532854 - RNA, 19 nt, Homo sapiens
  misc_RNA (1)...(19): siRNA sense strand
aaagggaaguuguuuguuu

SEQ ID NO: 1532855 - RNA, 19 nt, Homo sapiens
  misc_RNA (1)...(19): siRNA sense strand
gcaacuggcugugacauug

SEQ ID NO: 1532856 - RNA, 19 nt, Homo sapiens
  misc_RNA (1)...(19): siRNA sense strand
caaauuggcuaccagacuu

SEQ ID NO: 1532857 - RNA, 19 nt, Homo sapiens
  misc_RNA (1)...(19): siRNA sense strand
acaaguaccuggaagaguu

SEQ ID NO: 1532858 - RNA, 19 nt, Homo sapiens
  misc_RNA (1)...(19): siRNA sense strand
caacacaacaugcugauga

SEQ ID NO: 1532859 - RNA, 19 nt, Homo sapiens
  misc_RNA (1)...(19): siRNA sense strand
gcuaugcucuguccuacaa

SEQ ID NO: 1532860 - RNA, 19 nt, Homo sapiens
  misc_RNA (1)...(19): siRNA sense strand
gaccaaaccagcauccaua

SEQ ID NO: 1532861 - RNA, 19 nt, Homo sapiens
  misc_RNA (1)...(19): siRNA sense strand
acaacaugcugaugaaauu

SEQ ID NO: 1532862 - RNA, 19 nt, Homo sapiens
  misc_RNA (1)...(19): siRNA sense strand
caaagaaguuccaacaaaa

SEQ ID NO: 1532863 - RNA, 19 nt, Homo sapiens
  misc_RNA (1)...(19): siRNA sense strand
aaagagugccuuccacaua

SEQ ID NO: 1532864 - RNA, 19 nt, Homo sapiens
  misc_RNA (1)...(19): siRNA sense strand
gaaauacucguuugcaaag

SEQ ID NO: 1532865 - RNA, 19 nt, Homo sapiens
  misc_RNA (1)...(19): siRNA sense strand
gagaagagagugcugaugu

SEQ ID NO: 1532866 - RNA, 19 nt, Homo sapiens
  misc_RNA (1)...(19): siRNA sense strand
agaagagagugcugaugua

SEQ ID NO: 1532867 - RNA, 19 nt, Homo sapiens
  misc_RNA (1)...(19): siRNA sense strand
gaugaccuguguaaagaug

SEQ ID NO: 1532868 - RNA, 19 nt, Homo sapiens
  misc_RNA (1)...(19): siRNA sense strand
caacagugaugugguguca

SEQ ID NO: 1532869 - RNA, 19 nt, Homo sapiens
  misc_RNA (1)...(19): siRNA sense strand
gaugaacgcuaugcucugu

SEQ ID NO: 1532870 - RNA, 19 nt, Homo sapiens
  misc_RNA (1)...(19): siRNA sense strand
agaauuagauggcaguaca

SEQ ID NO: 1532871 - RNA, 19 nt, Homo sapiens
  misc_RNA (1)...(19): siRNA sense strand
agaauugcguguuggugua

SEQ ID NO: 1532872 - RNA, 19 nt, Homo sapiens
  misc_RNA (1)...(19): siRNA sense strand
uauaaacucugcucuacuc

SEQ ID NO: 1532873 - RNA, 19 nt, Homo sapiens
  misc_RNA (1)...(19): siRNA sense strand
caccagacagcuucuauuu

SEQ ID NO: 1532874 - RNA, 19 nt, Homo sapiens
  misc_RNA (1)...(19): siRNA sense strand
gaggaugggccagugcuua

SEQ ID NO: 1532875 - RNA, 19 nt, Homo sapiens
  misc_RNA (1)...(19): siRNA sense strand
ucaguuacuucccuagcua

SEQ ID NO: 1532876 - RNA, 19 nt, Homo sapiens
  misc_RNA (1)...(19): siRNA sense strand
caaaggaggagcucacugu

SEQ ID NO: 1532877 - RNA, 19 nt, Homo sapiens
  misc_RNA (1)...(19): siRNA sense strand
gacaguugguggaagcaaa

SEQ ID NO: 1532878 - RNA, 19 nt, Homo sapiens
  misc_RNA (1)...(19): siRNA sense strand
ucgaauugcugcagaagga

SEQ ID NO: 1532879 - RNA, 19 nt, Homo sapiens
  misc_RNA (1)...(19): siRNA sense strand
gcaaaucaagaacaaagug

SEQ ID NO: 1532880 - RNA, 19 nt, Homo sapiens
  misc_RNA (1)...(19): siRNA sense strand
cugcuuggcucccugauau

SEQ ID NO: 1532881 - RNA, 19 nt, Homo sapiens
  misc_RNA (1)...(19): siRNA sense strand
auacuauccuucuugauug

SEQ ID NO: 1532882 - RNA, 19 nt, Homo sapiens
  misc_RNA (1)...(19): siRNA sense strand
ucaggcaaaucaagaacaa

SEQ ID NO: 1532883 - RNA, 19 nt, Homo sapiens
  misc_RNA (1)...(19): siRNA sense strand
gcaccucacaggcaagauu

SEQ ID NO: 1532884 - RNA, 19 nt, Homo sapiens
  misc_RNA (1)...(19): siRNA sense strand
ugaaauuuaucaccagaca

SEQ ID NO: 1532885 - RNA, 19 nt, Homo sapiens
  misc_RNA (1)...(19): siRNA sense strand
acagugauguggugucaga

SEQ ID NO: 1532886 - RNA, 19 nt, Homo sapiens
  misc_RNA (1)...(19): siRNA sense strand
cagcagcagucuuaaagca

SEQ ID NO: 1532887 - RNA, 19 nt, Homo sapiens
  misc_RNA (1)...(19): siRNA sense strand
uaccagacuuuauguggaa

SEQ ID NO: 1532888 - RNA, 19 nt, Homo sapiens
  misc_RNA (1)...(19): siRNA sense strand
gcaagacagcuuuaaagag

SEQ ID NO: 1532889 - RNA, 19 nt, Homo sapiens
  misc_RNA (1)...(19): siRNA sense strand
agagagugcugauguacug

SEQ ID NO: 1532890 - RNA, 19 nt, Homo sapiens
  misc_RNA (1)...(19): siRNA sense strand
agaguuuccugauggcuuu

SEQ ID NO: 1532891 - RNA, 19 nt, Homo sapiens
  misc_RNA (1)...(19): siRNA sense strand
gucagcagcuauucacaga

SEQ ID NO: 1532892 - RNA, 19 nt, Homo sapiens
  misc_RNA (1)...(19): siRNA sense strand
caaaucaagaacaaaguga

SEQ ID NO: 1532893 - RNA, 19 nt, Homo sapiens
  misc_RNA (1)...(19): siRNA sense strand
aagaaauacucguuugcaa

SEQ ID NO: 1532894 - RNA, 19 nt, Homo sapiens
  misc_RNA (1)...(19): siRNA sense strand
agaaauacucguuugcaaa

SEQ ID NO: 1532895 - RNA, 19 nt, Homo sapiens
  misc_RNA (1)...(19): siRNA sense strand
ggaaucaaugggacaguug

SEQ ID NO: 1532896 - RNA, 19 nt, Homo sapiens
  misc_RNA (1)...(19): siRNA sense strand
uuacuucccuagcuacguu

SEQ ID NO: 1532897 - RNA, 19 nt, Homo sapiens
  misc_RNA (1)...(19): siRNA sense strand
aggaugaccuguguaaaga

SEQ ID NO: 1532898 - RNA, 19 nt, Homo sapiens
  misc_RNA (1)...(19): siRNA sense strand
ggaagcaaauuggcuacca

SEQ ID NO: 1532899 - RNA, 19 nt, Homo sapiens
  misc_RNA (1)...(19): siRNA sense strand
aagagugccuuccacauag

SEQ ID NO: 1532900 - RNA, 19 nt, Homo sapiens
  misc_RNA (1)...(19): siRNA sense strand
caagaacaaagugauacua

SEQ ID NO: 1532901 - RNA, 19 nt, Homo sapiens
  misc_RNA (1)...(19): siRNA sense strand
guuuaaggaugaccugugu

SEQ ID NO: 1532902 - RNA, 19 nt, Homo sapiens
  misc_RNA (1)...(19): siRNA sense strand
caacaugcugaugaaauuu

SEQ ID NO: 1532903 - RNA, 19 nt, Homo sapiens
  misc_RNA (1)...(19): siRNA sense strand
gaccugcccugccugucaa

SEQ ID NO: 1532904 - RNA, 19 nt, Homo sapiens
  misc_RNA (1)...(19): siRNA sense strand
ggguucagccuaccucaaa

SEQ ID NO: 1532905 - RNA, 19 nt, Homo sapiens
  misc_RNA (1)...(19): siRNA sense strand
ccagacaucaggaaauuca

SEQ ID NO: 1532906 - RNA, 19 nt, Homo sapiens
  misc_RNA (1)...(19): siRNA sense strand
uuaaggaugaccuguguaa

SEQ ID NO: 1532907 - RNA, 19 nt, Homo sapiens
  misc_RNA (1)...(19): siRNA sense strand
uaacccugaugagcugaua

SEQ ID NO: 1532908 - RNA, 19 nt, Homo sapiens
  misc_RNA (1)...(19): siRNA sense strand
aaucccagcagcagucuua

SEQ ID NO: 1532909 - RNA, 19 nt, Homo sapiens
  misc_RNA (1)...(19): siRNA sense strand
agacagcuuuaaagaggaa

SEQ ID NO: 1532910 - RNA, 19 nt, Homo sapiens
  misc_RNA (1)...(19): siRNA sense strand
aaagaucuccuacaagaag

SEQ ID NO: 1532911 - RNA, 19 nt, Homo sapiens
  misc_RNA (1)...(19): siRNA sense strand
aauacucguuugcaaagaa

SEQ ID NO: 1532912 - RNA, 19 nt, Homo sapiens
  misc_RNA (1)...(19): siRNA sense strand
gauucgaauugcugcagaa

SEQ ID NO: 1532913 - RNA, 19 nt, Homo sapiens
  misc_RNA (1)...(19): siRNA sense strand
gaagagagugcugauguac

SEQ ID NO: 1532914 - RNA, 19 nt, Homo sapiens
  misc_RNA (1)...(19): siRNA sense strand
gcaaauuggcuaccagacu

SEQ ID NO: 1532915 - RNA, 19 nt, Homo sapiens
  misc_RNA (1)...(19): siRNA sense strand
cagcauccauagacaugug

SEQ ID NO: 1532916 - RNA, 19 nt, Homo sapiens
  misc_RNA (1)...(19): siRNA sense strand
ccaagggagugugcaagga

SEQ ID NO: 1532917 - RNA, 19 nt, Homo sapiens
  misc_RNA (1)...(19): siRNA sense strand
guugguguauuugaagaaa

SEQ ID NO: 1532918 - RNA, 19 nt, Homo sapiens
  misc_RNA (1)...(19): siRNA sense strand
aaaccagcauccauagaca

SEQ ID NO: 1532919 - RNA, 19 nt, Homo sapiens
  misc_RNA (1)...(19): siRNA sense strand
caaguaccuggaagaguuu

SEQ ID NO: 1532920 - RNA, 19 nt, Homo sapiens
  misc_RNA (1)...(19): siRNA sense strand
ucaggaaauucaguuacuu

SEQ ID NO: 1532921 - RNA, 19 nt, Homo sapiens
  misc_RNA (1)...(19): siRNA sense strand
caacuggcugugacauuga

SEQ ID NO: 1532922 - RNA, 19 nt, Homo sapiens
  misc_RNA (1)...(19): siRNA sense strand
gcguguugguguauuugaa

SEQ ID NO: 1532923 - RNA, 19 nt, Homo sapiens
  misc_RNA (1)...(19): siRNA sense strand
ccauagacauguggcaaca

SEQ ID NO: 1532924 - RNA, 19 nt, Homo sapiens
  misc_RNA (1)...(19): siRNA sense strand
gcuuggcucccugauauaa

SEQ ID NO: 1532925 - RNA, 19 nt, Homo sapiens
  misc_RNA (1)...(19): siRNA sense strand
caaaauaggacgauuccaa

SEQ ID NO: 1532926 - RNA, 19 nt, Homo sapiens
  misc_RNA (1)...(19): siRNA sense strand
gauguggugucagaguguu

SEQ ID NO: 1532927 - RNA, 19 nt, Homo sapiens
  misc_RNA (1)...(19): siRNA sense strand
cgacggccacgcauaccua

SEQ ID NO: 1532928 - RNA, 19 nt, Homo sapiens
  misc_RNA (1)...(19): siRNA sense strand
gucagaguguucauacugu

SEQ ID NO: 1532929 - RNA, 19 nt, Homo sapiens
  misc_RNA (1)...(19): siRNA sense strand
ucccauuguuuaaggauga

SEQ ID NO: 1532930 - RNA, 19 nt, Homo sapiens
  misc_RNA (1)...(19): siRNA sense strand
aggaggagcucacuguuuu

SEQ ID NO: 1532931 - RNA, 19 nt, Homo sapiens
  misc_RNA (1)...(19): siRNA sense strand
gaauuagauggcaguacaa

SEQ ID NO: 1532932 - RNA, 19 nt, Homo sapiens
  misc_RNA (1)...(19): siRNA sense strand
caguauaaacucugcucua

SEQ ID NO: 1532933 - RNA, 19 nt, Homo sapiens
  misc_RNA (1)...(19): siRNA sense strand
caaaccagcauccauagac

SEQ ID NO: 1532934 - RNA, 19 nt, Homo sapiens
  misc_RNA (1)...(19): siRNA sense strand
aacacaacaugcugaugaa

SEQ ID NO: 1532935 - RNA, 19 nt, Homo sapiens
  misc_RNA (1)...(19): siRNA sense strand
auacucguuugcaaagaaa

SEQ ID NO: 1532936 - RNA, 19 nt, Homo sapiens
  misc_RNA (1)...(19): siRNA sense strand
gaggugcuccuuuauuacu

SEQ ID NO: 1532937 - RNA, 19 nt, Homo sapiens
  misc_RNA (1)...(19): siRNA sense strand
aguauaaacucugcucuac

SEQ ID NO: 1532938 - RNA, 19 nt, Homo sapiens
  misc_RNA (1)...(19): siRNA sense strand
gacaucaggaaauucaguu

SEQ ID NO: 1532939 - RNA, 19 nt, Homo sapiens
  misc_RNA (1)...(19): siRNA sense strand
aaggaggagcucacuguuu

SEQ ID NO: 1532940 - RNA, 19 nt, Homo sapiens
  misc_RNA (1)...(19): siRNA sense strand
cagcagucuuaaagcagaa

SEQ ID NO: 1532941 - RNA, 19 nt, Homo sapiens
  misc_RNA (1)...(19): siRNA sense strand
cacaacaugcugaugaaau

SEQ ID NO: 1532942 - RNA, 19 nt, Homo sapiens
  misc_RNA (1)...(19): siRNA sense strand
gaauugcguguugguguau

SEQ ID NO: 1532943 - RNA, 19 nt, Homo sapiens
  misc_RNA (1)...(19): siRNA sense strand
gaugggccagugcuuaugu

SEQ ID NO: 1532944 - RNA, 19 nt, Homo sapiens
  misc_RNA (1)...(19): siRNA sense strand
uaugcaagacagcuuuaaa

SEQ ID NO: 1532945 - RNA, 19 nt, Homo sapiens
  misc_RNA (1)...(19): siRNA sense strand
ucaaggacaaggauucaca

SEQ ID NO: 1532946 - RNA, 19 nt, Homo sapiens
  misc_RNA (1)...(19): siRNA sense strand
gagagaagagagugcugau

SEQ ID NO: 1532947 - RNA, 19 nt, Homo sapiens
  misc_RNA (1)...(19): siRNA sense strand
uaucucaggcaaaucaaga

SEQ ID NO: 1532948 - RNA, 19 nt, Homo sapiens
  misc_RNA (1)...(19): siRNA sense strand
ccaaaccagcauccauaga

SEQ ID NO: 1532949 - RNA, 19 nt, Homo sapiens
  misc_RNA (1)...(19): siRNA sense strand
ugcaagacagcuuuaaaga

SEQ ID NO: 1532950 - RNA, 19 nt, Homo sapiens
  misc_RNA (1)...(19): siRNA sense strand
gaauugcugcagaaggaau

SEQ ID NO: 1532951 - RNA, 19 nt, Homo sapiens
  misc_RNA (1)...(19): siRNA sense strand
gggaacucuugcagcaugu

SEQ ID NO: 1532952 - RNA, 19 nt, Homo sapiens
  misc_RNA (1)...(19): siRNA sense strand
ggaaugaauuguagguuua

SEQ ID NO: 1532953 - RNA, 19 nt, Homo sapiens
  misc_RNA (1)...(19): siRNA sense strand
gaaagaagacgguguuaaa

SEQ ID NO: 1532954 - RNA, 19 nt, Homo sapiens
  misc_RNA (1)...(19): siRNA sense strand
aaacagagccguaucauaa

SEQ ID NO: 1532955 - RNA, 19 nt, Homo sapiens
  misc_RNA (1)...(19): siRNA sense strand
ggaagaaggugaagugaag

SEQ ID NO: 1532956 - RNA, 19 nt, Homo sapiens
  misc_RNA (1)...(19): siRNA sense strand
gggaggagcugcugaaaca

SEQ ID NO: 1532957 - RNA, 19 nt, Homo sapiens
  misc_RNA (1)...(19): siRNA sense strand
gggaaugaauuguagguuu

SEQ ID NO: 1532958 - RNA, 19 nt, Homo sapiens
  misc_RNA (1)...(19): siRNA sense strand
gaauaaggcggcugauaaa

SEQ ID NO: 1532959 - RNA, 19 nt, Homo sapiens
  misc_RNA (1)...(19): siRNA sense strand
gaaacagagccguaucaua

SEQ ID NO: 1532960 - RNA, 19 nt, Homo sapiens
  misc_RNA (1)...(19): siRNA sense strand
acacaguacucgagccuua

SEQ ID NO: 1532961 - RNA, 19 nt, Homo sapiens
  misc_RNA (1)...(19): siRNA sense strand
ggagagaagucagugaaga

SEQ ID NO: 1532962 - RNA, 19 nt, Homo sapiens
  misc_RNA (1)...(19): siRNA sense strand
ggacgaugauggagaaauc

SEQ ID NO: 1532963 - RNA, 19 nt, Homo sapiens
  misc_RNA (1)...(19): siRNA sense strand
ugaauaaggcggcugauaa

SEQ ID NO: 1532964 - RNA, 19 nt, Homo sapiens
  misc_RNA (1)...(19): siRNA sense strand
gaaagaggacgaugaugga

SEQ ID NO: 1532965 - RNA, 19 nt, Homo sapiens
  misc_RNA (1)...(19): siRNA sense strand
ccacauagaccuuccauca

SEQ ID NO: 1532966 - RNA, 19 nt, Homo sapiens
  misc_RNA (1)...(19): siRNA sense strand
gccgguaguugaugaaauu

SEQ ID NO: 1532967 - RNA, 19 nt, Homo sapiens
  misc_RNA (1)...(19): siRNA sense strand
gaagcgcuaugaaccauca

SEQ ID NO: 1532968 - RNA, 19 nt, Homo sapiens
  misc_RNA (1)...(19): siRNA sense strand
uaaggcggcugauaaagga

SEQ ID NO: 1532969 - RNA, 19 nt, Homo sapiens
  misc_RNA (1)...(19): siRNA sense strand
caagcgaccuuagggauga

SEQ ID NO: 1532970 - RNA, 19 nt, Homo sapiens
  misc_RNA (1)...(19): siRNA sense strand
acauagaccuuccaucaga

SEQ ID NO: 1532971 - RNA, 19 nt, Homo sapiens
  misc_RNA (1)...(19): siRNA sense strand
ggaaauagacgaugaugac

SEQ ID NO: 1532972 - RNA, 19 nt, Homo sapiens
  misc_RNA (1)...(19): siRNA sense strand
cuucugaucuggaggauga

SEQ ID NO: 1532973 - RNA, 19 nt, Homo sapiens
  misc_RNA (1)...(19): siRNA sense strand
ccaagucucccaagaagaa

SEQ ID NO: 1532974 - RNA, 19 nt, Homo sapiens
  misc_RNA (1)...(19): siRNA sense strand
ggugagggcuucugaucug

SEQ ID NO: 1532975 - RNA, 19 nt, Homo sapiens
  misc_RNA (1)...(19): siRNA sense strand
acgcagacccuuauuauga

SEQ ID NO: 1532976 - RNA, 19 nt, Homo sapiens
  misc_RNA (1)...(19): siRNA sense strand
gagagaagucagugaagaa

SEQ ID NO: 1532977 - RNA, 19 nt, Homo sapiens
  misc_RNA (1)...(19): siRNA sense strand
acagagccguaucauaauu

SEQ ID NO: 1532978 - RNA, 19 nt, Homo sapiens
  misc_RNA (1)...(19): siRNA sense strand
gauccaagucucccaagaa

SEQ ID NO: 1532979 - RNA, 19 nt, Homo sapiens
  misc_RNA (1)...(19): siRNA sense strand
gcggacaguaugagaauuu

SEQ ID NO: 1532980 - RNA, 19 nt, Homo sapiens
  misc_RNA (1)...(19): siRNA sense strand
aguugacacuguugaauaa

SEQ ID NO: 1532981 - RNA, 19 nt, Homo sapiens
  misc_RNA (1)...(19): siRNA sense strand
uaagaaagaagacgguguu

SEQ ID NO: 1532982 - RNA, 19 nt, Homo sapiens
  misc_RNA (1)...(19): siRNA sense strand
ggaggacgaggcugagaaa

SEQ ID NO: 1532983 - RNA, 19 nt, Homo sapiens
  misc_RNA (1)...(19): siRNA sense strand
gagccaagcgggacgagaa

SEQ ID NO: 1532984 - RNA, 19 nt, Homo sapiens
  misc_RNA (1)...(19): siRNA sense strand
gccaggaggaggaagauaa

SEQ ID NO: 1532985 - RNA, 19 nt, Homo sapiens
  misc_RNA (1)...(19): siRNA sense strand
agaagacgguguuaaagag

SEQ ID NO: 1532986 - RNA, 19 nt, Homo sapiens
  misc_RNA (1)...(19): siRNA sense strand
gaaagcaggagagaaguca

SEQ ID NO: 1532987 - RNA, 19 nt, Homo sapiens
  misc_RNA (1)...(19): siRNA sense strand
agaggacgaugauggagaa

SEQ ID NO: 1532988 - RNA, 19 nt, Homo sapiens
  misc_RNA (1)...(19): siRNA sense strand
gaaggcugguguucagagu

SEQ ID NO: 1532989 - RNA, 19 nt, Homo sapiens
  misc_RNA (1)...(19): siRNA sense strand
cagagccguaucauaauua

SEQ ID NO: 1532990 - RNA, 19 nt, Homo sapiens
  misc_RNA (1)...(19): siRNA sense strand
ccacaaggagaucaaguug

SEQ ID NO: 1532991 - RNA, 19 nt, Homo sapiens
  misc_RNA (1)...(19): siRNA sense strand
cgaagacgaacgggaauuu

SEQ ID NO: 1532992 - RNA, 19 nt, Homo sapiens
  misc_RNA (1)...(19): siRNA sense strand
gcuaugaaccaucagacaa

SEQ ID NO: 1532993 - RNA, 19 nt, Homo sapiens
  misc_RNA (1)...(19): siRNA sense strand
ccacacaaccacccaaauc

SEQ ID NO: 1532994 - RNA, 19 nt, Homo sapiens
  misc_RNA (1)...(19): siRNA sense strand
gaagacgaacgggaauuug

SEQ ID NO: 1532995 - RNA, 19 nt, Homo sapiens
  misc_RNA (1)...(19): siRNA sense strand
agacgaugaugaccuggaa

SEQ ID NO: 1532996 - RNA, 19 nt, Homo sapiens
  misc_RNA (1)...(19): siRNA sense strand
cauagaccuuccaucagaa

SEQ ID NO: 1532997 - RNA, 19 nt, Homo sapiens
  misc_RNA (1)...(19): siRNA sense strand
aagcugagccaccaaagaa

SEQ ID NO: 1532998 - RNA, 19 nt, Homo sapiens
  misc_RNA (1)...(19): siRNA sense strand
agaaggagcgggagaagga

SEQ ID NO: 1532999 - RNA, 19 nt, Homo sapiens
  misc_RNA (1)...(19): siRNA sense strand
ccaggaaggagaaaggaaa

SEQ ID NO: 1533000 - RNA, 19 nt, Homo sapiens
  misc_RNA (1)...(19): siRNA sense strand
gaagcaggaagcgcuauga

SEQ ID NO: 1533001 - RNA, 19 nt, Homo sapiens
  misc_RNA (1)...(19): siRNA sense strand
agacuacgaugaggagguu

SEQ ID NO: 1533002 - RNA, 19 nt, Homo sapiens
  misc_RNA (1)...(19): siRNA sense strand
aaagaaagaggacgaugau

SEQ ID NO: 1533003 - RNA, 19 nt, Homo sapiens
  misc_RNA (1)...(19): siRNA sense strand
aagaagacgguguuaaaga

SEQ ID NO: 1533004 - RNA, 19 nt, Homo sapiens
  misc_RNA (1)...(19): siRNA sense strand
uuacgcagacccuuauuau

SEQ ID NO: 1533005 - RNA, 19 nt, Homo sapiens
  misc_RNA (1)...(19): siRNA sense strand
gguaguugaugaaauuuug

SEQ ID NO: 1533006 - RNA, 19 nt, Homo sapiens
  misc_RNA (1)...(19): siRNA sense strand
gagcagaugaguggaagga

SEQ ID NO: 1533007 - RNA, 19 nt, Homo sapiens
  misc_RNA (1)...(19): siRNA sense strand
gaccauuggcgaagacgaa

SEQ ID NO: 1533008 - RNA, 19 nt, Homo sapiens
  misc_RNA (1)...(19): siRNA sense strand
ugaacgggauccucacucu

SEQ ID NO: 1533009 - RNA, 19 nt, Homo sapiens
  misc_RNA (1)...(19): siRNA sense strand
gggaaauagacgaugauga

SEQ ID NO: 1533010 - RNA, 19 nt, Homo sapiens
  misc_RNA (1)...(19): siRNA sense strand
aaguugacacuguugaaua

SEQ ID NO: 1533011 - RNA, 19 nt, Homo sapiens
  misc_RNA (1)...(19): siRNA sense strand
agaaagaagacgguguuaa

SEQ ID NO: 1533012 - RNA, 19 nt, Homo sapiens
  misc_RNA (1)...(19): siRNA sense strand
ggaaagcaggagagaaguc

SEQ ID NO: 1533013 - RNA, 19 nt, Homo sapiens
  misc_RNA (1)...(19): siRNA sense strand
gaccggacaagcgaccuua

SEQ ID NO: 1533014 - RNA, 19 nt, Homo sapiens
  misc_RNA (1)...(19): siRNA sense strand
gaaaagcggaaaagggauu

SEQ ID NO: 1533015 - RNA, 19 nt, Homo sapiens
  misc_RNA (1)...(19): siRNA sense strand
caggagagaagucagugaa

SEQ ID NO: 1533016 - RNA, 19 nt, Homo sapiens
  misc_RNA (1)...(19): siRNA sense strand
gaccuuccaucagaaccaa

SEQ ID NO: 1533017 - RNA, 19 nt, Homo sapiens
  misc_RNA (1)...(19): siRNA sense strand
caagcugagccaccaaaga

SEQ ID NO: 1533018 - RNA, 19 nt, Homo sapiens
  misc_RNA (1)...(19): siRNA sense strand
cagaaacagagccguauca

SEQ ID NO: 1533019 - RNA, 19 nt, Homo sapiens
  misc_RNA (1)...(19): siRNA sense strand
gguuuacggugaccauugg

SEQ ID NO: 1533020 - RNA, 19 nt, Homo sapiens
  misc_RNA (1)...(19): siRNA sense strand
guaucauaauuaccgagaa

SEQ ID NO: 1533021 - RNA, 19 nt, Homo sapiens
  misc_RNA (1)...(19): siRNA sense strand
gcaggagagaagucaguga

SEQ ID NO: 1533022 - RNA, 19 nt, Homo sapiens
  misc_RNA (1)...(19): siRNA sense strand
agcaugagcuagacuacga

SEQ ID NO: 1533023 - RNA, 19 nt, Homo sapiens
  misc_RNA (1)...(19): siRNA sense strand
ggaagcaggaagcgcuaug

SEQ ID NO: 1533024 - RNA, 19 nt, Homo sapiens
  misc_RNA (1)...(19): siRNA sense strand
gggcaagugagccuaaauc

SEQ ID NO: 1533025 - RNA, 19 nt, Homo sapiens
  misc_RNA (1)...(19): siRNA sense strand
gaugaugaccuggaagaag

SEQ ID NO: 1533026 - RNA, 19 nt, Homo sapiens
  misc_RNA (1)...(19): siRNA sense strand
ggccgguaguugaugaaau

SEQ ID NO: 1533027 - RNA, 19 nt, Homo sapiens
  misc_RNA (1)...(19): siRNA sense strand
caaguugacacuguugaau

SEQ ID NO: 1533028 - RNA, 19 nt, Homo sapiens
  misc_RNA (1)...(19): siRNA sense strand
ggacucggaggacauguac

SEQ ID NO: 1533029 - RNA, 19 nt, Homo sapiens
  misc_RNA (1)...(19): siRNA sense strand
uggaugagcaugagcuaga

SEQ ID NO: 1533030 - RNA, 19 nt, Homo sapiens
  misc_RNA (1)...(19): siRNA sense strand
gguccgaucaggauuugga

SEQ ID NO: 1533031 - RNA, 19 nt, Homo sapiens
  misc_RNA (1)...(19): siRNA sense strand
cuaugaaauugagcgguuu

SEQ ID NO: 1533032 - RNA, 19 nt, Homo sapiens
  misc_RNA (1)...(19): siRNA sense strand
aagacgaacgggaauuuga

SEQ ID NO: 1533033 - RNA, 19 nt, Homo sapiens
  misc_RNA (1)...(19): siRNA sense strand
guucagagugugggagaaa

SEQ ID NO: 1533034 - RNA, 19 nt, Homo sapiens
  misc_RNA (1)...(19): siRNA sense strand
gagaaaggaaaaucuaaga

SEQ ID NO: 1533035 - RNA, 19 nt, Homo sapiens
  misc_RNA (1)...(19): siRNA sense strand
cgucagccucugccucuaa

SEQ ID NO: 1533036 - RNA, 19 nt, Homo sapiens
  misc_RNA (1)...(19): siRNA sense strand
cgauccaagucucccaaga

SEQ ID NO: 1533037 - RNA, 19 nt, Homo sapiens
  misc_RNA (1)...(19): siRNA sense strand
gcagacccuuauuaugacu

SEQ ID NO: 1533038 - RNA, 19 nt, Homo sapiens
  misc_RNA (1)...(19): siRNA sense strand
ccaggaggaggaagauaau

SEQ ID NO: 1533039 - RNA, 19 nt, Homo sapiens
  misc_RNA (1)...(19): siRNA sense strand
agacgguguuaaagaggaa

SEQ ID NO: 1533040 - RNA, 19 nt, Homo sapiens
  misc_RNA (1)...(19): siRNA sense strand
gagagagagagaacagaca

SEQ ID NO: 1533041 - RNA, 19 nt, Homo sapiens
  misc_RNA (1)...(19): siRNA sense strand
ggacaguaugagaauuuca

SEQ ID NO: 1533042 - RNA, 19 nt, Homo sapiens
  misc_RNA (1)...(19): siRNA sense strand
cgaggacuccggcaugcaa

SEQ ID NO: 1533043 - RNA, 19 nt, Homo sapiens
  misc_RNA (1)...(19): siRNA sense strand
ggagcuggaugagcaugag

SEQ ID NO: 1533044 - RNA, 19 nt, Homo sapiens
  misc_RNA (1)...(19): siRNA sense strand
cccaagaccaggacucaga

SEQ ID NO: 1533045 - RNA, 19 nt, Homo sapiens
  misc_RNA (1)...(19): siRNA sense strand
cgggaaagcaggagagaag

SEQ ID NO: 1533046 - RNA, 19 nt, Homo sapiens
  misc_RNA (1)...(19): siRNA sense strand
gcggguccgaucaggauuu

SEQ ID NO: 1533047 - RNA, 19 nt, Homo sapiens
  misc_RNA (1)...(19): siRNA sense strand
gcucgaaggcgucggaaaa

SEQ ID NO: 1533048 - RNA, 19 nt, Homo sapiens
  misc_RNA (1)...(19): siRNA sense strand
uauacacccuggagugaac

SEQ ID NO: 1533049 - RNA, 19 nt, Homo sapiens
  misc_RNA (1)...(19): siRNA sense strand
aaagaagacgguguuaaag

SEQ ID NO: 1533050 - RNA, 19 nt, Homo sapiens
  misc_RNA (1)...(19): siRNA sense strand
gaucccggucuucauccua

SEQ ID NO: 1533051 - RNA, 19 nt, Homo sapiens
  misc_RNA (1)...(19): siRNA sense strand
agacccuuauuaugacuau

SEQ ID NO: 1533052 - RNA, 19 nt, Homo sapiens
  misc_RNA (1)...(19): siRNA sense strand
ggucaucccucgacauuug

SEQ ID NO: 1533053 - RNA, 19 nt, Homo sapiens
  misc_RNA (1)...(19): siRNA sense strand
ggaauuugaugcugaugaa

SEQ ID NO: 1533054 - RNA, 19 nt, Homo sapiens
  misc_RNA (1)...(19): siRNA sense strand
gaucgggucucauuauguu

SEQ ID NO: 1533055 - RNA, 19 nt, Homo sapiens
  misc_RNA (1)...(19): siRNA sense strand
gcacauccguucacacaca

SEQ ID NO: 1533056 - RNA, 19 nt, Homo sapiens
  misc_RNA (1)...(19): siRNA sense strand
gagaugcaauccuauuaug

SEQ ID NO: 1533057 - RNA, 19 nt, Homo sapiens
  misc_RNA (1)...(19): siRNA sense strand
gacaaugacuggccaaucu

SEQ ID NO: 1533058 - RNA, 19 nt, Homo sapiens
  misc_RNA (1)...(19): siRNA sense strand
ccaaagugcuggcauuaca

SEQ ID NO: 1533059 - RNA, 19 nt, Homo sapiens
  misc_RNA (1)...(19): siRNA sense strand
ggagaggacucaggugaug

SEQ ID NO: 1533060 - RNA, 19 nt, Homo sapiens
  misc_RNA (1)...(19): siRNA sense strand
ugaaugacguggugaacuu

SEQ ID NO: 1533061 - RNA, 19 nt, Homo sapiens
  misc_RNA (1)...(19): siRNA sense strand
ggagaacauucacgaguca

SEQ ID NO: 1533062 - RNA, 19 nt, Homo sapiens
  misc_RNA (1)...(19): siRNA sense strand
gccgaaagauggagaagga

SEQ ID NO: 1533063 - RNA, 19 nt, Homo sapiens
  misc_RNA (1)...(19): siRNA sense strand
gaaugugauugaagugaug

SEQ ID NO: 1533064 - RNA, 19 nt, Homo sapiens
  misc_RNA (1)...(19): siRNA sense strand
gggagaaugugauugaagu

SEQ ID NO: 1533065 - RNA, 19 nt, Homo sapiens
  misc_RNA (1)...(19): siRNA sense strand
guggugaacuucugcaaga

SEQ ID NO: 1533066 - RNA, 19 nt, Homo sapiens
  misc_RNA (1)...(19): siRNA sense strand
ccagcuaccugcagaugaa

SEQ ID NO: 1533067 - RNA, 19 nt, Homo sapiens
  misc_RNA (1)...(19): siRNA sense strand
ccaucaagcuccacaagug

SEQ ID NO: 1533068 - RNA, 19 nt, Homo sapiens
  misc_RNA (1)...(19): siRNA sense strand
ggagcugaaugaacagaga

SEQ ID NO: 1533069 - RNA, 19 nt, Homo sapiens
  misc_RNA (1)...(19): siRNA sense strand
ggagaugcaauccuauuau

SEQ ID NO: 1533070 - RNA, 19 nt, Homo sapiens
  misc_RNA (1)...(19): siRNA sense strand
gagguucacucgacaagag

SEQ ID NO: 1533071 - RNA, 19 nt, Homo sapiens
  misc_RNA (1)...(19): siRNA sense strand
cgaugaugaugaugauuug

SEQ ID NO: 1533072 - RNA, 19 nt, Homo sapiens
  misc_RNA (1)...(19): siRNA sense strand
agacauacauuaggucauc

SEQ ID NO: 1533073 - RNA, 19 nt, Homo sapiens
  misc_RNA (1)...(19): siRNA sense strand
gaccaucacuuuucuagga

SEQ ID NO: 1533074 - RNA, 19 nt, Homo sapiens
  misc_RNA (1)...(19): siRNA sense strand
gcaacuaccacgugaagca

SEQ ID NO: 1533075 - RNA, 19 nt, Homo sapiens
  misc_RNA (1)...(19): siRNA sense strand
accagaaggugcaggagua

SEQ ID NO: 1533076 - RNA, 19 nt, Homo sapiens
  misc_RNA (1)...(19): siRNA sense strand
gaaaagagcgacacagaca

SEQ ID NO: 1533077 - RNA, 19 nt, Homo sapiens
  misc_RNA (1)...(19): siRNA sense strand
gagaaugugauugaaguga

SEQ ID NO: 1533078 - RNA, 19 nt, Homo sapiens
  misc_RNA (1)...(19): siRNA sense strand
ggagguggacguuggugaa

SEQ ID NO: 1533079 - RNA, 19 nt, Homo sapiens
  misc_RNA (1)...(19): siRNA sense strand
gaacugguggugagagaca

SEQ ID NO: 1533080 - RNA, 19 nt, Homo sapiens
  misc_RNA (1)...(19): siRNA sense strand
ggaaggaagaccagaaggu

SEQ ID NO: 1533081 - RNA, 19 nt, Homo sapiens
  misc_RNA (1)...(19): siRNA sense strand
ccgaugaugaugaugauuu

SEQ ID NO: 1533082 - RNA, 19 nt, Homo sapiens
  misc_RNA (1)...(19): siRNA sense strand
ugaugaugaugauuugaug

SEQ ID NO: 1533083 - RNA, 19 nt, Homo sapiens
  misc_RNA (1)...(19): siRNA sense strand
gcccugcucauucacuaua

SEQ ID NO: 1533084 - RNA, 19 nt, Homo sapiens
  misc_RNA (1)...(19): siRNA sense strand
caaggaugaugcagaccau

SEQ ID NO: 1533085 - RNA, 19 nt, Homo sapiens
  misc_RNA (1)...(19): siRNA sense strand
gagcguggagugccugaga

SEQ ID NO: 1533086 - RNA, 19 nt, Homo sapiens
  misc_RNA (1)...(19): siRNA sense strand
uuacagacacacccgauga

SEQ ID NO: 1533087 - RNA, 19 nt, Homo sapiens
  misc_RNA (1)...(19): siRNA sense strand
cucaucagguugacaguga

SEQ ID NO: 1533088 - RNA, 19 nt, Homo sapiens
  misc_RNA (1)...(19): siRNA sense strand
cgacauuugccgaaagaug

SEQ ID NO: 1533089 - RNA, 19 nt, Homo sapiens
  misc_RNA (1)...(19): siRNA sense strand
cagacacacccgaugauga

SEQ ID NO: 1533090 - RNA, 19 nt, Homo sapiens
  misc_RNA (1)...(19): siRNA sense strand
gacagcugcaccugcguua

SEQ ID NO: 1533091 - RNA, 19 nt, Homo sapiens
  misc_RNA (1)...(19): siRNA sense strand
ugugagaccugcggcaaga

SEQ ID NO: 1533092 - RNA, 19 nt, Homo sapiens
  misc_RNA (1)...(19): siRNA sense strand
gcaggaguagccaugaguu

SEQ ID NO: 1533093 - RNA, 19 nt, Homo sapiens
  misc_RNA (1)...(19): siRNA sense strand
agaaugugauugaagugau

SEQ ID NO: 1533094 - RNA, 19 nt, Homo sapiens
  misc_RNA (1)...(19): siRNA sense strand
agacacacccgaugaugau

SEQ ID NO: 1533095 - RNA, 19 nt, Homo sapiens
  misc_RNA (1)...(19): siRNA sense strand
gguggaauuugaugcugau

SEQ ID NO: 1533096 - RNA, 19 nt, Homo sapiens
  misc_RNA (1)...(19): siRNA sense strand
agcccaagguggaauuuga

SEQ ID NO: 1533097 - RNA, 19 nt, Homo sapiens
  misc_RNA (1)...(19): siRNA sense strand
ucuaggaguuuggaaggaa

SEQ ID NO: 1533098 - RNA, 19 nt, Homo sapiens
  misc_RNA (1)...(19): siRNA sense strand
ugccuucuccaucaucuua

SEQ ID NO: 1533099 - RNA, 19 nt, Homo sapiens
  misc_RNA (1)...(19): siRNA sense strand
aaagagcgacacagacaau

SEQ ID NO: 1533100 - RNA, 19 nt, Homo sapiens
  misc_RNA (1)...(19): siRNA sense strand
gcgguugacuuggcuuaca

SEQ ID NO: 1533101 - RNA, 19 nt, Homo sapiens
  misc_RNA (1)...(19): siRNA sense strand
ccucuauucugggaaguug

SEQ ID NO: 1533102 - RNA, 19 nt, Homo sapiens
  misc_RNA (1)...(19): siRNA sense strand
gaacuucugcaagacauac

SEQ ID NO: 1533103 - RNA, 19 nt, Homo sapiens
  misc_RNA (1)...(19): siRNA sense strand
gcccuuacacugccaaaca

SEQ ID NO: 1533104 - RNA, 19 nt, Homo sapiens
  misc_RNA (1)...(19): siRNA sense strand
gagcugaaugaacagagaa

SEQ ID NO: 1533105 - RNA, 19 nt, Homo sapiens
  misc_RNA (1)...(19): siRNA sense strand
uaggucaucccucgacauu

SEQ ID NO: 1533106 - RNA, 19 nt, Homo sapiens
  misc_RNA (1)...(19): siRNA sense strand
gcuaccugcagaugaauga

SEQ ID NO: 1533107 - RNA, 19 nt, Homo sapiens
  misc_RNA (1)...(19): siRNA sense strand
gauccaaccguccaaucau

SEQ ID NO: 1533108 - RNA, 19 nt, Homo sapiens
  misc_RNA (1)...(19): siRNA sense strand
gauagagcccaagguggaa

SEQ ID NO: 1533109 - RNA, 19 nt, Homo sapiens
  misc_RNA (1)...(19): siRNA sense strand
gacagcaaccucucuacuc

SEQ ID NO: 1533110 - RNA, 19 nt, Homo sapiens
  misc_RNA (1)...(19): siRNA sense strand
ggagaaugugauugaagug

SEQ ID NO: 1533111 - RNA, 19 nt, Homo sapiens
  misc_RNA (1)...(19): siRNA sense strand
caaugacuggccaaucuau

SEQ ID NO: 1533112 - RNA, 19 nt, Homo sapiens
  misc_RNA (1)...(19): siRNA sense strand
ccucucuacuccacccaaa

SEQ ID NO: 1533113 - RNA, 19 nt, Homo sapiens
  misc_RNA (1)...(19): siRNA sense strand
ugcaagacauacauuaggu

SEQ ID NO: 1533114 - RNA, 19 nt, Homo sapiens
  misc_RNA (1)...(19): siRNA sense strand
gugaacuucugcaagacau

SEQ ID NO: 1533115 - RNA, 19 nt, Homo sapiens
  misc_RNA (1)...(19): siRNA sense strand
ugaaugaacagagaaagag

SEQ ID NO: 1533116 - RNA, 19 nt, Homo sapiens
  misc_RNA (1)...(19): siRNA sense strand
cggcacauccguucacaca

SEQ ID NO: 1533117 - RNA, 19 nt, Homo sapiens
  misc_RNA (1)...(19): siRNA sense strand
uggaacugguggugagaga

SEQ ID NO: 1533118 - RNA, 19 nt, Homo sapiens
  misc_RNA (1)...(19): siRNA sense strand
caucaagcuccacaagugu

SEQ ID NO: 1533119 - RNA, 19 nt, Homo sapiens
  misc_RNA (1)...(19): siRNA sense strand
acaaugacuggccaaucua

SEQ ID NO: 1533120 - RNA, 19 nt, Homo sapiens
  misc_RNA (1)...(19): siRNA sense strand
cagcugcaccugcguuaca

SEQ ID NO: 1533121 - RNA, 19 nt, Homo sapiens
  misc_RNA (1)...(19): siRNA sense strand
cugggaaguuggauuugug

SEQ ID NO: 1533122 - RNA, 19 nt, Homo sapiens
  misc_RNA (1)...(19): siRNA sense strand
ucccaaagugcuggcauua

SEQ ID NO: 1533123 - RNA, 19 nt, Homo sapiens
  misc_RNA (1)...(19): siRNA sense strand
cagcaacuaccacgugaag

SEQ ID NO: 1533124 - RNA, 19 nt, Homo sapiens
  misc_RNA (1)...(19): siRNA sense strand
gguggacguuggugaacag

SEQ ID NO: 1533125 - RNA, 19 nt, Homo sapiens
  misc_RNA (1)...(19): siRNA sense strand
ggaguagccaugaguucca

SEQ ID NO: 1533126 - RNA, 19 nt, Homo sapiens
  misc_RNA (1)...(19): siRNA sense strand
acacacccgaugaugauga

SEQ ID NO: 1533127 - RNA, 19 nt, Homo sapiens
  misc_RNA (1)...(19): siRNA sense strand
gaaugacguggugaacuuc

SEQ ID NO: 1533128 - RNA, 19 nt, Homo sapiens
  misc_RNA (1)...(19): siRNA sense strand
aaagugcuggcauuacaga

SEQ ID NO: 1533129 - RNA, 19 nt, Homo sapiens
  misc_RNA (1)...(19): siRNA sense strand
agagcgacacagacaauga

SEQ ID NO: 1533130 - RNA, 19 nt, Homo sapiens
  misc_RNA (1)...(19): siRNA sense strand
caagagguucacucgacaa

SEQ ID NO: 1533131 - RNA, 19 nt, Homo sapiens
  misc_RNA (1)...(19): siRNA sense strand
gaguagccaugaguuccau

SEQ ID NO: 1533132 - RNA, 19 nt, Homo sapiens
  misc_RNA (1)...(19): siRNA sense strand
ggagacaacucuucuuuga

SEQ ID NO: 1533133 - RNA, 19 nt, Homo sapiens
  misc_RNA (1)...(19): siRNA sense strand
gaagagagauuuugacuuu

SEQ ID NO: 1533134 - RNA, 19 nt, Homo sapiens
  misc_RNA (1)...(19): siRNA sense strand
aaaccuagcuucagugauu

SEQ ID NO: 1533135 - RNA, 19 nt, Homo sapiens
  misc_RNA (1)...(19): siRNA sense strand
gagcuuaaauggccuauuc

SEQ ID NO: 1533136 - RNA, 19 nt, Homo sapiens
  misc_RNA (1)...(19): siRNA sense strand
agacaacucuucuuugaaa

SEQ ID NO: 1533137 - RNA, 19 nt, Homo sapiens
  misc_RNA (1)...(19): siRNA sense strand
gaagaggccugaggauuau

SEQ ID NO: 1533138 - RNA, 19 nt, Homo sapiens
  misc_RNA (1)...(19): siRNA sense strand
ggaagaagacaguauugua

SEQ ID NO: 1533139 - RNA, 19 nt, Homo sapiens
  misc_RNA (1)...(19): siRNA sense strand
gagguuagcugccgugguu

SEQ ID NO: 1533140 - RNA, 19 nt, Homo sapiens
  misc_RNA (1)...(19): siRNA sense strand
ggaaaggacugcucugaag

SEQ ID NO: 1533141 - RNA, 19 nt, Homo sapiens
  misc_RNA (1)...(19): siRNA sense strand
gaagagauccgccaugugu

SEQ ID NO: 1533142 - RNA, 19 nt, Homo sapiens
  misc_RNA (1)...(19): siRNA sense strand
ugaagaggccugaggauua

SEQ ID NO: 1533143 - RNA, 19 nt, Homo sapiens
  misc_RNA (1)...(19): siRNA sense strand
ucacagagcgcuuccauuu

SEQ ID NO: 1533144 - RNA, 19 nt, Homo sapiens
  misc_RNA (1)...(19): siRNA sense strand
gagcaucccuucuaugaca

SEQ ID NO: 1533145 - RNA, 19 nt, Homo sapiens
  misc_RNA (1)...(19): siRNA sense strand
gaugaccacuucaggauug

SEQ ID NO: 1533146 - RNA, 19 nt, Homo sapiens
  misc_RNA (1)...(19): siRNA sense strand
gaagcaaagccacagauuu

SEQ ID NO: 1533147 - RNA, 19 nt, Homo sapiens
  misc_RNA (1)...(19): siRNA sense strand
gagcauguccugcauuuga

SEQ ID NO: 1533148 - RNA, 19 nt, Homo sapiens
  misc_RNA (1)...(19): siRNA sense strand
cagacuacuugcuacauua

SEQ ID NO: 1533149 - RNA, 19 nt, Homo sapiens
  misc_RNA (1)...(19): siRNA sense strand
gaagaagacaguauuguag

SEQ ID NO: 1533150 - RNA, 19 nt, Homo sapiens
  misc_RNA (1)...(19): siRNA sense strand
ggagagaccacccaacuug

SEQ ID NO: 1533151 - RNA, 19 nt, Homo sapiens
  misc_RNA (1)...(19): siRNA sense strand
cccaaaggauauugacuua

SEQ ID NO: 1533152 - RNA, 19 nt, Homo sapiens
  misc_RNA (1)...(19): siRNA sense strand
gcacuguucucuacuccaa

SEQ ID NO: 1533153 - RNA, 19 nt, Homo sapiens
  misc_RNA (1)...(19): siRNA sense strand
gggagcauguccugcauuu

SEQ ID NO: 1533154 - RNA, 19 nt, Homo sapiens
  misc_RNA (1)...(19): siRNA sense strand
gcgcuuccauuucuacaaa

SEQ ID NO: 1533155 - RNA, 19 nt, Homo sapiens
  misc_RNA (1)...(19): siRNA sense strand
ccucuaaguuucagaaguu

SEQ ID NO: 1533156 - RNA, 19 nt, Homo sapiens
  misc_RNA (1)...(19): siRNA sense strand
gauggaagcugaaaaccua

SEQ ID NO: 1533157 - RNA, 19 nt, Homo sapiens
  misc_RNA (1)...(19): siRNA sense strand
caaguacugugucaacaug

SEQ ID NO: 1533158 - RNA, 19 nt, Homo sapiens
  misc_RNA (1)...(19): siRNA sense strand
gaaagccucucaagaucca

SEQ ID NO: 1533159 - RNA, 19 nt, Homo sapiens
  misc_RNA (1)...(19): siRNA sense strand
gggaagagauccgccaugu

SEQ ID NO: 1533160 - RNA, 19 nt, Homo sapiens
  misc_RNA (1)...(19): siRNA sense strand
gagagaagaagagagauuu

SEQ ID NO: 1533161 - RNA, 19 nt, Homo sapiens
  misc_RNA (1)...(19): siRNA sense strand
caauauugaugaccacuuc

SEQ ID NO: 1533162 - RNA, 19 nt, Homo sapiens
  misc_RNA (1)...(19): siRNA sense strand
gggagaauauggaucagau

SEQ ID NO: 1533163 - RNA, 19 nt, Homo sapiens
  misc_RNA (1)...(19): siRNA sense strand
gccgacauauccacacuuu

SEQ ID NO: 1533164 - RNA, 19 nt, Homo sapiens
  misc_RNA (1)...(19): siRNA sense strand
gaaaugaacgaugaagaug

SEQ ID NO: 1533165 - RNA, 19 nt, Homo sapiens
  misc_RNA (1)...(19): siRNA sense strand
cgacauauccacacuuuua

SEQ ID NO: 1533166 - RNA, 19 nt, Homo sapiens
  misc_RNA (1)...(19): siRNA sense strand
ggauguggagccucaauaa

SEQ ID NO: 1533167 - RNA, 19 nt, Homo sapiens
  misc_RNA (1)...(19): siRNA sense strand
gaaaggacugcucugaaga

SEQ ID NO: 1533168 - RNA, 19 nt, Homo sapiens
  misc_RNA (1)...(19): siRNA sense strand
cuucagagaccaaggguua

SEQ ID NO: 1533169 - RNA, 19 nt, Homo sapiens
  misc_RNA (1)...(19): siRNA sense strand
acauuuaccugaugcagaa

SEQ ID NO: 1533170 - RNA, 19 nt, Homo sapiens
  misc_RNA (1)...(19): siRNA sense strand
gcgaggagcaucccuucua

SEQ ID NO: 1533171 - RNA, 19 nt, Homo sapiens
  misc_RNA (1)...(19): siRNA sense strand
ggagagaagaagagagauu

SEQ ID NO: 1533172 - RNA, 19 nt, Homo sapiens
  misc_RNA (1)...(19): siRNA sense strand
caucauugguggagaagga

SEQ ID NO: 1533173 - RNA, 19 nt, Homo sapiens
  misc_RNA (1)...(19): siRNA sense strand
uauuguagaugaugcagaa

SEQ ID NO: 1533174 - RNA, 19 nt, Homo sapiens
  misc_RNA (1)...(19): siRNA sense strand
ggaagcaaagccacagauu

SEQ ID NO: 1533175 - RNA, 19 nt, Homo sapiens
  misc_RNA (1)...(19): siRNA sense strand
acagagcgcuuccauuucu

SEQ ID NO: 1533176 - RNA, 19 nt, Homo sapiens
  misc_RNA (1)...(19): siRNA sense strand
gcugagagccaccaacaga

SEQ ID NO: 1533177 - RNA, 19 nt, Homo sapiens
  misc_RNA (1)...(19): siRNA sense strand
gaccugcacuguucucuac

SEQ ID NO: 1533178 - RNA, 19 nt, Homo sapiens
  misc_RNA (1)...(19): siRNA sense strand
gaguucagauucuucagau

SEQ ID NO: 1533179 - RNA, 19 nt, Homo sapiens
  misc_RNA (1)...(19): siRNA sense strand
caagaaggaggaauugaau

SEQ ID NO: 1533180 - RNA, 19 nt, Homo sapiens
  misc_RNA (1)...(19): siRNA sense strand
caaguacuaucgccagaca

SEQ ID NO: 1533181 - RNA, 19 nt, Homo sapiens
  misc_RNA (1)...(19): siRNA sense strand
cgaggagcaucccuucuau

SEQ ID NO: 1533182 - RNA, 19 nt, Homo sapiens
  misc_RNA (1)...(19): siRNA sense strand
agagauggcugcagagucu

SEQ ID NO: 1533183 - RNA, 19 nt, Homo sapiens
  misc_RNA (1)...(19): siRNA sense strand
ggauuaugaagccguauuu

SEQ ID NO: 1533184 - RNA, 19 nt, Homo sapiens
  misc_RNA (1)...(19): siRNA sense strand
ggaagaagaggaagaugag

SEQ ID NO: 1533185 - RNA, 19 nt, Homo sapiens
  misc_RNA (1)...(19): siRNA sense strand
ugaucaagcugacauuuac

SEQ ID NO: 1533186 - RNA, 19 nt, Homo sapiens
  misc_RNA (1)...(19): siRNA sense strand
uaaaucacauccucaaagc

SEQ ID NO: 1533187 - RNA, 19 nt, Homo sapiens
  misc_RNA (1)...(19): siRNA sense strand
augcagaaaugaacgauga

SEQ ID NO: 1533188 - RNA, 19 nt, Homo sapiens
  misc_RNA (1)...(19): siRNA sense strand
gagugaaccacaacaaguu

SEQ ID NO: 1533189 - RNA, 19 nt, Homo sapiens
  misc_RNA (1)...(19): siRNA sense strand
agugaaaucuguaauaugc

SEQ ID NO: 1533190 - RNA, 19 nt, Homo sapiens
  misc_RNA (1)...(19): siRNA sense strand
acagacuacuugcuacauu

SEQ ID NO: 1533191 - RNA, 19 nt, Homo sapiens
  misc_RNA (1)...(19): siRNA sense strand
ccaaugacaggcucuauca

SEQ ID NO: 1533192 - RNA, 19 nt, Homo sapiens
  misc_RNA (1)...(19): siRNA sense strand
ggagaaggagagaagaaga

SEQ ID NO: 1533193 - RNA, 19 nt, Homo sapiens
  misc_RNA (1)...(19): siRNA sense strand
gagaagcauccgacucuau

SEQ ID NO: 1533194 - RNA, 19 nt, Homo sapiens
  misc_RNA (1)...(19): siRNA sense strand
gauaaaucacauccucaaa

SEQ ID NO: 1533195 - RNA, 19 nt, Homo sapiens
  misc_RNA (1)...(19): siRNA sense strand
aaacuacccacgagcuuaa

SEQ ID NO: 1533196 - RNA, 19 nt, Homo sapiens
  misc_RNA (1)...(19): siRNA sense strand
cagagaauguagcuuuauc

SEQ ID NO: 1533197 - RNA, 19 nt, Homo sapiens
  misc_RNA (1)...(19): siRNA sense strand
uccagagaauguagcuuua

SEQ ID NO: 1533198 - RNA, 19 nt, Homo sapiens
  misc_RNA (1)...(19): siRNA sense strand
gaagacaguauuguagaug

SEQ ID NO: 1533199 - RNA, 19 nt, Homo sapiens
  misc_RNA (1)...(19): siRNA sense strand
ucagagaguucagauucuu

SEQ ID NO: 1533200 - RNA, 19 nt, Homo sapiens
  misc_RNA (1)...(19): siRNA sense strand
ggaagaggaagaagacagu

SEQ ID NO: 1533201 - RNA, 19 nt, Homo sapiens
  misc_RNA (1)...(19): siRNA sense strand
uaucgagcuucucaucauu

SEQ ID NO: 1533202 - RNA, 19 nt, Homo sapiens
  misc_RNA (1)...(19): siRNA sense strand
gaaaguccagagaauguag

SEQ ID NO: 1533203 - RNA, 19 nt, Homo sapiens
  misc_RNA (1)...(19): siRNA sense strand
gcugcagagucuacugaaa

SEQ ID NO: 1533204 - RNA, 19 nt, Homo sapiens
  misc_RNA (1)...(19): siRNA sense strand
gaagaggaagaagacagua

SEQ ID NO: 1533205 - RNA, 19 nt, Homo sapiens
  misc_RNA (1)...(19): siRNA sense strand
guccagagaauguagcuuu

SEQ ID NO: 1533206 - RNA, 19 nt, Homo sapiens
  misc_RNA (1)...(19): siRNA sense strand
gugaugcagucaugucuca

SEQ ID NO: 1533207 - RNA, 19 nt, Homo sapiens
  misc_RNA (1)...(19): siRNA sense strand
gccagacacugcuauuugg

SEQ ID NO: 1533208 - RNA, 19 nt, Homo sapiens
  misc_RNA (1)...(19): siRNA sense strand
cuacucaacacccuaacua

SEQ ID NO: 1533209 - RNA, 19 nt, Homo sapiens
  misc_RNA (1)...(19): siRNA sense strand
gaggaagaagacaguauug

SEQ ID NO: 1533210 - RNA, 19 nt, Homo sapiens
  misc_RNA (1)...(19): siRNA sense strand
gagagaccacccaacuuga

SEQ ID NO: 1533211 - RNA, 19 nt, Homo sapiens
  misc_RNA (1)...(19): siRNA sense strand
uaacaaggcccaagguacu

SEQ ID NO: 1533212 - RNA, 19 nt, Homo sapiens
  misc_RNA (1)...(19): siRNA sense strand
guggagacaacucuucuuu

SEQ ID NO: 1533213 - RNA, 19 nt, Homo sapiens
  misc_RNA (1)...(19): siRNA sense strand
gaaaguggagacaacucuu

SEQ ID NO: 1533214 - RNA, 19 nt, Homo sapiens
  misc_RNA (1)...(19): siRNA sense strand
uguagaugaugcagaaaug

SEQ ID NO: 1533215 - RNA, 19 nt, Homo sapiens
  misc_RNA (1)...(19): siRNA sense strand
aagacaguauuguagauga

SEQ ID NO: 1533216 - RNA, 19 nt, Homo sapiens
  misc_RNA (1)...(19): siRNA sense strand
ccaccgggcacaucacaaa

SEQ ID NO: 1533217 - RNA, 19 nt, Homo sapiens
  misc_RNA (1)...(19): siRNA sense strand
gaaccugauuuucuaugaa

SEQ ID NO: 1533218 - RNA, 19 nt, Homo sapiens
  misc_RNA (1)...(19): siRNA sense strand
ccagacacuucuuccuuca

SEQ ID NO: 1533219 - RNA, 19 nt, Homo sapiens
  misc_RNA (1)...(19): siRNA sense strand
cucacacgcucaucuauau

SEQ ID NO: 1533220 - RNA, 19 nt, Homo sapiens
  misc_RNA (1)...(19): siRNA sense strand
caacaaguacugugucaac

SEQ ID NO: 1533221 - RNA, 19 nt, Homo sapiens
  misc_RNA (1)...(19): siRNA sense strand
caacagccaguuccuaucu

SEQ ID NO: 1533222 - RNA, 19 nt, Homo sapiens
  misc_RNA (1)...(19): siRNA sense strand
gagacaacucuucuuugaa

SEQ ID NO: 1533223 - RNA, 19 nt, Homo sapiens
  misc_RNA (1)...(19): siRNA sense strand
agaagacaguauuguagau

SEQ ID NO: 1533224 - RNA, 19 nt, Homo sapiens
  misc_RNA (1)...(19): siRNA sense strand
ggaaccugauuuucuauga

SEQ ID NO: 1533225 - RNA, 19 nt, Homo sapiens
  misc_RNA (1)...(19): siRNA sense strand
cagaucaacucaguguuca

SEQ ID NO: 1533226 - RNA, 19 nt, Homo sapiens
  misc_RNA (1)...(19): siRNA sense strand
guucagauucuucagauuc

SEQ ID NO: 1533227 - RNA, 19 nt, Homo sapiens
  misc_RNA (1)...(19): siRNA sense strand
gaccuguucuacccggaaa

SEQ ID NO: 1533228 - RNA, 19 nt, Homo sapiens
  misc_RNA (1)...(19): siRNA sense strand
agaaaugaacgaugaagau

SEQ ID NO: 1533229 - RNA, 19 nt, Homo sapiens
  misc_RNA (1)...(19): siRNA sense strand
ccagaucaacucaguguuc

SEQ ID NO: 1533230 - RNA, 19 nt, Homo sapiens
  misc_RNA (1)...(19): siRNA sense strand
cagaaguuggaaacauuua

SEQ ID NO: 1533231 - RNA, 19 nt, Homo sapiens
  misc_RNA (1)...(19): siRNA sense strand
guucucuacuccaaauaug

SEQ ID NO: 1533232 - RNA, 19 nt, Homo sapiens
  misc_RNA (1)...(19): siRNA sense strand
gaagaagaaugugagauua

SEQ ID NO: 1533233 - RNA, 19 nt, Homo sapiens
  misc_RNA (1)...(19): siRNA sense strand
caucacagcuggucuuuga

SEQ ID NO: 1533234 - RNA, 19 nt, Homo sapiens
  misc_RNA (1)...(19): siRNA sense strand
gcacguacauccuguggaa

SEQ ID NO: 1533235 - RNA, 19 nt, Homo sapiens
  misc_RNA (1)...(19): siRNA sense strand
ggaagaagaaugugagauu

SEQ ID NO: 1533236 - RNA, 19 nt, Homo sapiens
  misc_RNA (1)...(19): siRNA sense strand
gagcugggcuacuccauau

SEQ ID NO: 1533237 - RNA, 19 nt, Homo sapiens
  misc_RNA (1)...(19): siRNA sense strand
gaagguagcgagacgauga

SEQ ID NO: 1533238 - RNA, 19 nt, Homo sapiens
  misc_RNA (1)...(19): siRNA sense strand
gcaaguccuuuaccuguug

SEQ ID NO: 1533239 - RNA, 19 nt, Homo sapiens
  misc_RNA (1)...(19): siRNA sense strand
ccaguucauuccauucuuu

SEQ ID NO: 1533240 - RNA, 19 nt, Homo sapiens
  misc_RNA (1)...(19): siRNA sense strand
gcugggcuacuccauauua

SEQ ID NO: 1533241 - RNA, 19 nt, Homo sapiens
  misc_RNA (1)...(19): siRNA sense strand
acaagcaacuggagcagaa

SEQ ID NO: 1533242 - RNA, 19 nt, Homo sapiens
  misc_RNA (1)...(19): siRNA sense strand
ggacacauaccacaugcaa

SEQ ID NO: 1533243 - RNA, 19 nt, Homo sapiens
  misc_RNA (1)...(19): siRNA sense strand
ggaacuggaucggugcuau

SEQ ID NO: 1533244 - RNA, 19 nt, Homo sapiens
  misc_RNA (1)...(19): siRNA sense strand
gagccucauuucugucuug

SEQ ID NO: 1533245 - RNA, 19 nt, Homo sapiens
  misc_RNA (1)...(19): siRNA sense strand
ccucauuucugucuuggaa

SEQ ID NO: 1533246 - RNA, 19 nt, Homo sapiens
  misc_RNA (1)...(19): siRNA sense strand
aauaugauccagacucuaa

SEQ ID NO: 1533247 - RNA, 19 nt, Homo sapiens
  misc_RNA (1)...(19): siRNA sense strand
ggagaagcauaaggcucua

SEQ ID NO: 1533248 - RNA, 19 nt, Homo sapiens
  misc_RNA (1)...(19): siRNA sense strand
caugugcccuguguugaaa

SEQ ID NO: 1533249 - RNA, 19 nt, Homo sapiens
  misc_RNA (1)...(19): siRNA sense strand
gaacuggaucggugcuaug

SEQ ID NO: 1533250 - RNA, 19 nt, Homo sapiens
  misc_RNA (1)...(19): siRNA sense strand
ggcagcagcuccaguucau

SEQ ID NO: 1533251 - RNA, 19 nt, Homo sapiens
  misc_RNA (1)...(19): siRNA sense strand
gcagauaaccucuuuugug

SEQ ID NO: 1533252 - RNA, 19 nt, Homo sapiens
  misc_RNA (1)...(19): siRNA sense strand
cugguugacuacaugauuu

SEQ ID NO: 1533253 - RNA, 19 nt, Homo sapiens
  misc_RNA (1)...(19): siRNA sense strand
acacauaccacaugcaaca

SEQ ID NO: 1533254 - RNA, 19 nt, Homo sapiens
  misc_RNA (1)...(19): siRNA sense strand
cuccagaaauuccuagaga

SEQ ID NO: 1533255 - RNA, 19 nt, Homo sapiens
  misc_RNA (1)...(19): siRNA sense strand
agaagaaugugagauuaca

SEQ ID NO: 1533256 - RNA, 19 nt, Homo sapiens
  misc_RNA (1)...(19): siRNA sense strand
ugcaucgacuccagaaauu

SEQ ID NO: 1533257 - RNA, 19 nt, Homo sapiens
  misc_RNA (1)...(19): siRNA sense strand
cagcuggucuuugaugauc

SEQ ID NO: 1533258 - RNA, 19 nt, Homo sapiens
  misc_RNA (1)...(19): siRNA sense strand
ugcaggagcuacacucugu

SEQ ID NO: 1533259 - RNA, 19 nt, Homo sapiens
  misc_RNA (1)...(19): siRNA sense strand
cuacaucuucucucccuuu

SEQ ID NO: 1533260 - RNA, 19 nt, Homo sapiens
  misc_RNA (1)...(19): siRNA sense strand
uagccgaggagaagcauaa

SEQ ID NO: 1533261 - RNA, 19 nt, Homo sapiens
  misc_RNA (1)...(19): siRNA sense strand
cagcagcuccaguucauuc

SEQ ID NO: 1533262 - RNA, 19 nt, Homo sapiens
  misc_RNA (1)...(19): siRNA sense strand
cuaaaccucugcacaucca

SEQ ID NO: 1533263 - RNA, 19 nt, Homo sapiens
  misc_RNA (1)...(19): siRNA sense strand
ggccaaggcuccauauacc

SEQ ID NO: 1533264 - RNA, 19 nt, Homo sapiens
  misc_RNA (1)...(19): siRNA sense strand
ggcugcagcugggaaaguu

SEQ ID NO: 1533265 - RNA, 19 nt, Homo sapiens
  misc_RNA (1)...(19): siRNA sense strand
cacagcuggucuuugauga

SEQ ID NO: 1533266 - RNA, 19 nt, Homo sapiens
  misc_RNA (1)...(19): siRNA sense strand
gccuaaaccucugcacauc

SEQ ID NO: 1533267 - RNA, 19 nt, Homo sapiens
  misc_RNA (1)...(19): siRNA sense strand
ucacagcuggucuuugaug

SEQ ID NO: 1533268 - RNA, 19 nt, Homo sapiens
  misc_RNA (1)...(19): siRNA sense strand
gagcagauaaccucuuuug

SEQ ID NO: 1533269 - RNA, 19 nt, Homo sapiens
  misc_RNA (1)...(19): siRNA sense strand
caccaucacuguguucucu

SEQ ID NO: 1533270 - RNA, 19 nt, Homo sapiens
  misc_RNA (1)...(19): siRNA sense strand
uccagaaauuccuagagaa

SEQ ID NO: 1533271 - RNA, 19 nt, Homo sapiens
  misc_RNA (1)...(19): siRNA sense strand
guacauccuguggaaggua

SEQ ID NO: 1533272 - RNA, 19 nt, Homo sapiens
  misc_RNA (1)...(19): siRNA sense strand
cgcaaguccuuuaccuguu

SEQ ID NO: 1533273 - RNA, 19 nt, Homo sapiens
  misc_RNA (1)...(19): siRNA sense strand
gacaggccaaggcuccaua

SEQ ID NO: 1533274 - RNA, 19 nt, Homo sapiens
  misc_RNA (1)...(19): siRNA sense strand
cgaggacacauaccacaug

SEQ ID NO: 1533275 - RNA, 19 nt, Homo sapiens
  misc_RNA (1)...(19): siRNA sense strand
uccuuuaccuguuggaaga

SEQ ID NO: 1533276 - RNA, 19 nt, Homo sapiens
  misc_RNA (1)...(19): siRNA sense strand
cuacaggagcgaguacaaa

SEQ ID NO: 1533277 - RNA, 19 nt, Homo sapiens
  misc_RNA (1)...(19): siRNA sense strand
gaggguacagcacaagcaa

SEQ ID NO: 1533278 - RNA, 19 nt, Homo sapiens
  misc_RNA (1)...(19): siRNA sense strand
caguucauuccauucuuua

SEQ ID NO: 1533279 - RNA, 19 nt, Homo sapiens
  misc_RNA (1)...(19): siRNA sense strand
gaugaucauggucaacugu

SEQ ID NO: 1533280 - RNA, 19 nt, Homo sapiens
  misc_RNA (1)...(19): siRNA sense strand
ugucucaugugcccugugu

SEQ ID NO: 1533281 - RNA, 19 nt, Homo sapiens
  misc_RNA (1)...(19): siRNA sense strand
ucucaugugcccuguguug

SEQ ID NO: 1533282 - RNA, 19 nt, Homo sapiens
  misc_RNA (1)...(19): siRNA sense strand
ucaugugcccuguguugaa

SEQ ID NO: 1533283 - RNA, 19 nt, Homo sapiens
  misc_RNA (1)...(19): siRNA sense strand
ccgccugguugacuacaug

SEQ ID NO: 1533284 - RNA, 19 nt, Homo sapiens
  misc_RNA (1)...(19): siRNA sense strand
cugcaucgacuccagaaau

SEQ ID NO: 1533285 - RNA, 19 nt, Homo sapiens
  misc_RNA (1)...(19): siRNA sense strand
uacaucuucucucccuuug

SEQ ID NO: 1533286 - RNA, 19 nt, Homo sapiens
  misc_RNA (1)...(19): siRNA sense strand
guagcgagacgaugacacu

SEQ ID NO: 1533287 - RNA, 19 nt, Homo sapiens
  misc_RNA (1)...(19): siRNA sense strand
gacuacaugauuugucaga

SEQ ID NO: 1533288 - RNA, 19 nt, Homo sapiens
  misc_RNA (1)...(19): siRNA sense strand
cuacggcugcuccaucguu

SEQ ID NO: 1533289 - RNA, 19 nt, Homo sapiens
  misc_RNA (1)...(19): siRNA sense strand
gaaagaagccugaagguuu

SEQ ID NO: 1533290 - RNA, 19 nt, Homo sapiens
  misc_RNA (1)...(19): siRNA sense strand
aaagaagccugaagguuua

SEQ ID NO: 1533291 - RNA, 19 nt, Homo sapiens
  misc_RNA (1)...(19): siRNA sense strand
ucacacaggucaugaguuu

SEQ ID NO: 1533292 - RNA, 19 nt, Homo sapiens
  misc_RNA (1)...(19): siRNA sense strand
gaccuuggcugaucacaaa

SEQ ID NO: 1533293 - RNA, 19 nt, Homo sapiens
  misc_RNA (1)...(19): siRNA sense strand
gcgcagagcuuuauuuaac

SEQ ID NO: 1533294 - RNA, 19 nt, Homo sapiens
  misc_RNA (1)...(19): siRNA sense strand
gaaggaaguuguccaagca

SEQ ID NO: 1533295 - RNA, 19 nt, Homo sapiens
  misc_RNA (1)...(19): siRNA sense strand
gaggaugacaugauuauaa

SEQ ID NO: 1533296 - RNA, 19 nt, Homo sapiens
  misc_RNA (1)...(19): siRNA sense strand
ggaugaacguacuaacuuu

SEQ ID NO: 1533297 - RNA, 19 nt, Homo sapiens
  misc_RNA (1)...(19): siRNA sense strand
gcagagcuuuauuuaacua

SEQ ID NO: 1533298 - RNA, 19 nt, Homo sapiens
  misc_RNA (1)...(19): siRNA sense strand
ggaaagugcugcggaagga

SEQ ID NO: 1533299 - RNA, 19 nt, Homo sapiens
  misc_RNA (1)...(19): siRNA sense strand
gguaugaugacuaugauua

SEQ ID NO: 1533300 - RNA, 19 nt, Homo sapiens
  misc_RNA (1)...(19): siRNA sense strand
gaagaggcgucucaagaag

SEQ ID NO: 1533301 - RNA, 19 nt, Homo sapiens
  misc_RNA (1)...(19): siRNA sense strand
agagagagauccagaaauc

SEQ ID NO: 1533302 - RNA, 19 nt, Homo sapiens
  misc_RNA (1)...(19): siRNA sense strand
ucugaugucucucgauaua

SEQ ID NO: 1533303 - RNA, 19 nt, Homo sapiens
  misc_RNA (1)...(19): siRNA sense strand
gaagaaaugagcacucguu

SEQ ID NO: 1533304 - RNA, 19 nt, Homo sapiens
  misc_RNA (1)...(19): siRNA sense strand
gccugaagguuuacauuaa

SEQ ID NO: 1533305 - RNA, 19 nt, Homo sapiens
  misc_RNA (1)...(19): siRNA sense strand
gaagagcauuugccaacau

SEQ ID NO: 1533306 - RNA, 19 nt, Homo sapiens
  misc_RNA (1)...(19): siRNA sense strand
ggucuacaaucucacauau

SEQ ID NO: 1533307 - RNA, 19 nt, Homo sapiens
  misc_RNA (1)...(19): siRNA sense strand
cuagaggccuuaauggaaa

SEQ ID NO: 1533308 - RNA, 19 nt, Homo sapiens
  misc_RNA (1)...(19): siRNA sense strand
gaaaugagcacucguuuug

SEQ ID NO: 1533309 - RNA, 19 nt, Homo sapiens
  misc_RNA (1)...(19): siRNA sense strand
gcuaauaucagucaacaau

SEQ ID NO: 1533310 - RNA, 19 nt, Homo sapiens
  misc_RNA (1)...(19): siRNA sense strand
aauaauggcugcagcuaga

SEQ ID NO: 1533311 - RNA, 19 nt, Homo sapiens
  misc_RNA (1)...(19): siRNA sense strand
caucaguguucuuacuuaa

SEQ ID NO: 1533312 - RNA, 19 nt, Homo sapiens
  misc_RNA (1)...(19): siRNA sense strand
uuugugaucuugcuaauga

SEQ ID NO: 1533313 - RNA, 19 nt, Homo sapiens
  misc_RNA (1)...(19): siRNA sense strand
ugacuaugauuauggagaa

SEQ ID NO: 1533314 - RNA, 19 nt, Homo sapiens
  misc_RNA (1)...(19): siRNA sense strand
ugaugucucucgauauauu

SEQ ID NO: 1533315 - RNA, 19 nt, Homo sapiens
  misc_RNA (1)...(19): siRNA sense strand
gaacguacuaacuuucuug

SEQ ID NO: 1533316 - RNA, 19 nt, Homo sapiens
  misc_RNA (1)...(19): siRNA sense strand
gcuagaggccuuaauggaa

SEQ ID NO: 1533317 - RNA, 19 nt, Homo sapiens
  misc_RNA (1)...(19): siRNA sense strand
ccaacuaccugcucuguac

SEQ ID NO: 1533318 - RNA, 19 nt, Homo sapiens
  misc_RNA (1)...(19): siRNA sense strand
gauuguggauucucuaagu

SEQ ID NO: 1533319 - RNA, 19 nt, Homo sapiens
  misc_RNA (1)...(19): siRNA sense strand
ugaaugguuuggaauaugu

SEQ ID NO: 1533320 - RNA, 19 nt, Homo sapiens
  misc_RNA (1)...(19): siRNA sense strand
gaacuucuuuaugcucuuc

SEQ ID NO: 1533321 - RNA, 19 nt, Homo sapiens
  misc_RNA (1)...(19): siRNA sense strand
cucaguaccuggagucuuu

SEQ ID NO: 1533322 - RNA, 19 nt, Homo sapiens
  misc_RNA (1)...(19): siRNA sense strand
uauguucacuguauguuug

SEQ ID NO: 1533323 - RNA, 19 nt, Homo sapiens
  misc_RNA (1)...(19): siRNA sense strand
caaaagagcacauucagaa

SEQ ID NO: 1533324 - RNA, 19 nt, Homo sapiens
  misc_RNA (1)...(19): siRNA sense strand
ggaccaagugccuuuauuc

SEQ ID NO: 1533325 - RNA, 19 nt, Homo sapiens
  misc_RNA (1)...(19): siRNA sense strand
aagcugaacuucuuuaugc

SEQ ID NO: 1533326 - RNA, 19 nt, Homo sapiens
  misc_RNA (1)...(19): siRNA sense strand
gcugagugguugaaugguu

SEQ ID NO: 1533327 - RNA, 19 nt, Homo sapiens
  misc_RNA (1)...(19): siRNA sense strand
ugaagaggcgucucaagaa

SEQ ID NO: 1533328 - RNA, 19 nt, Homo sapiens
  misc_RNA (1)...(19): siRNA sense strand
gaccugcuauccugagaga

SEQ ID NO: 1533329 - RNA, 19 nt, Homo sapiens
  misc_RNA (1)...(19): siRNA sense strand
acaucaguguucuuacuua

SEQ ID NO: 1533330 - RNA, 19 nt, Homo sapiens
  misc_RNA (1)...(19): siRNA sense strand
caacauagagaaugcaucu

SEQ ID NO: 1533331 - RNA, 19 nt, Homo sapiens
  misc_RNA (1)...(19): siRNA sense strand
uuuaaagacuggagguauu

SEQ ID NO: 1533332 - RNA, 19 nt, Homo sapiens
  misc_RNA (1)...(19): siRNA sense strand
uaacuauguucacuguaug

SEQ ID NO: 1533333 - RNA, 19 nt, Homo sapiens
  misc_RNA (1)...(19): siRNA sense strand
ggucaugaguuuacacacu

SEQ ID NO: 1533334 - RNA, 19 nt, Homo sapiens
  misc_RNA (1)...(19): siRNA sense strand
guucaugucaaucuacuuu

SEQ ID NO: 1533335 - RNA, 19 nt, Homo sapiens
  misc_RNA (1)...(19): siRNA sense strand
uuaagacagugaccugcua

SEQ ID NO: 1533336 - RNA, 19 nt, Homo sapiens
  misc_RNA (1)...(19): siRNA sense strand
ccagagagagauccagaaa

SEQ ID NO: 1533337 - RNA, 19 nt, Homo sapiens
  misc_RNA (1)...(19): siRNA sense strand
gcaauaauggcugcagcua

SEQ ID NO: 1533338 - RNA, 19 nt, Homo sapiens
  misc_RNA (1)...(19): siRNA sense strand
ggcagcaacuuugggauug

SEQ ID NO: 1533339 - RNA, 19 nt, Homo sapiens
  misc_RNA (1)...(19): siRNA sense strand
gucaacaauuucugcguuu

SEQ ID NO: 1533340 - RNA, 19 nt, Homo sapiens
  misc_RNA (1)...(19): siRNA sense strand
cuagacaucaguguucuua

SEQ ID NO: 1533341 - RNA, 19 nt, Homo sapiens
  misc_RNA (1)...(19): siRNA sense strand
guugaaugguuuggaauau

SEQ ID NO: 1533342 - RNA, 19 nt, Homo sapiens
  misc_RNA (1)...(19): siRNA sense strand
aaugcaagcugaacuucuu

SEQ ID NO: 1533343 - RNA, 19 nt, Homo sapiens
  misc_RNA (1)...(19): siRNA sense strand
ucagguaugaugacuauga

SEQ ID NO: 1533344 - RNA, 19 nt, Homo sapiens
  misc_RNA (1)...(19): siRNA sense strand
agaggcgucucaagaagaa

SEQ ID NO: 1533345 - RNA, 19 nt, Homo sapiens
  misc_RNA (1)...(19): siRNA sense strand
ccauacaggcacuauauug

SEQ ID NO: 1533346 - RNA, 19 nt, Homo sapiens
  misc_RNA (1)...(19): siRNA sense strand
aaacgcauguaugauaguu

SEQ ID NO: 1533347 - RNA, 19 nt, Homo sapiens
  misc_RNA (1)...(19): siRNA sense strand
caacaucacacaggucaug

SEQ ID NO: 1533348 - RNA, 19 nt, Homo sapiens
  misc_RNA (1)...(19): siRNA sense strand
gacauuggacaucuucuug

SEQ ID NO: 1533349 - RNA, 19 nt, Homo sapiens
  misc_RNA (1)...(19): siRNA sense strand
ugucaaaacuggagaaaau

SEQ ID NO: 1533350 - RNA, 19 nt, Homo sapiens
  misc_RNA (1)...(19): siRNA sense strand
gagcacauucagaaacuug

SEQ ID NO: 1533351 - RNA, 19 nt, Homo sapiens
  misc_RNA (1)...(19): siRNA sense strand
gguugaaugguuuggaaua

SEQ ID NO: 1533352 - RNA, 19 nt, Homo sapiens
  misc_RNA (1)...(19): siRNA sense strand
gaaguuguccaagcaaaca

SEQ ID NO: 1533353 - RNA, 19 nt, Homo sapiens
  misc_RNA (1)...(19): siRNA sense strand
gaagaaagggaagaugaag

SEQ ID NO: 1533354 - RNA, 19 nt, Homo sapiens
  misc_RNA (1)...(19): siRNA sense strand
guaccuggagucuuucuug

SEQ ID NO: 1533355 - RNA, 19 nt, Homo sapiens
  misc_RNA (1)...(19): siRNA sense strand
gcaguucaaacacucagaa

SEQ ID NO: 1533356 - RNA, 19 nt, Homo sapiens
  misc_RNA (1)...(19): siRNA sense strand
acaaaacgcauguaugaua

SEQ ID NO: 1533357 - RNA, 19 nt, Homo sapiens
  misc_RNA (1)...(19): siRNA sense strand
ccaugaggauguugacaca

SEQ ID NO: 1533358 - RNA, 19 nt, Homo sapiens
  misc_RNA (1)...(19): siRNA sense strand
gauucaggcuaauaucagu

SEQ ID NO: 1533359 - RNA, 19 nt, Homo sapiens
  misc_RNA (1)...(19): siRNA sense strand
gugguugaaugguuuggaa

SEQ ID NO: 1533360 - RNA, 19 nt, Homo sapiens
  misc_RNA (1)...(19): siRNA sense strand
gcaagcugaacuucuuuau

SEQ ID NO: 1533361 - RNA, 19 nt, Homo sapiens
  misc_RNA (1)...(19): siRNA sense strand
cggauggucuacaaucuca

SEQ ID NO: 1533362 - RNA, 19 nt, Homo sapiens
  misc_RNA (1)...(19): siRNA sense strand
aagaagaaagggaagauga

SEQ ID NO: 1533363 - RNA, 19 nt, Homo sapiens
  misc_RNA (1)...(19): siRNA sense strand
agacaucaguguucuuacu

SEQ ID NO: 1533364 - RNA, 19 nt, Homo sapiens
  misc_RNA (1)...(19): siRNA sense strand
ugaaagaagccugaagguu

SEQ ID NO: 1533365 - RNA, 19 nt, Homo sapiens
  misc_RNA (1)...(19): siRNA sense strand
gcuaaugacaacaacauag

SEQ ID NO: 1533366 - RNA, 19 nt, Homo sapiens
  misc_RNA (1)...(19): siRNA sense strand
cugagugguugaaugguuu

SEQ ID NO: 1533367 - RNA, 19 nt, Homo sapiens
  misc_RNA (1)...(19): siRNA sense strand
gcagcuagacaucaguguu

SEQ ID NO: 1533368 - RNA, 19 nt, Homo sapiens
  misc_RNA (1)...(19): siRNA sense strand
aagagcauuugccaacauu

SEQ ID NO: 1533369 - RNA, 19 nt, Homo sapiens
  misc_RNA (1)...(19): siRNA sense strand
gauaaaagaaucagagugu

SEQ ID NO: 1533370 - RNA, 19 nt, Homo sapiens
  misc_RNA (1)...(19): siRNA sense strand
gcagcaacuuugggauugu

SEQ ID NO: 1533371 - RNA, 19 nt, Homo sapiens
  misc_RNA (1)...(19): siRNA sense strand
cuaaugacaacaacauaga

SEQ ID NO: 1533372 - RNA, 19 nt, Homo sapiens
  misc_RNA (1)...(19): siRNA sense strand
uaccauacaggcacuauau

SEQ ID NO: 1533373 - RNA, 19 nt, Homo sapiens
  misc_RNA (1)...(19): siRNA sense strand
caaaacgcauguaugauag

SEQ ID NO: 1533374 - RNA, 19 nt, Homo sapiens
  misc_RNA (1)...(19): siRNA sense strand
cugcgcagagcuuuauuua

SEQ ID NO: 1533375 - RNA, 19 nt, Homo sapiens
  misc_RNA (1)...(19): siRNA sense strand
gaaaaggagaagaaagaaa

SEQ ID NO: 1533376 - RNA, 19 nt, Homo sapiens
  misc_RNA (1)...(19): siRNA sense strand
aaagugcugcggaaggaua

SEQ ID NO: 1533377 - RNA, 19 nt, Homo sapiens
  misc_RNA (1)...(19): siRNA sense strand
gacaacaacauagagaaug

SEQ ID NO: 1533378 - RNA, 19 nt, Homo sapiens
  misc_RNA (1)...(19): siRNA sense strand
ugaugacuaugauuaugga

SEQ ID NO: 1533379 - RNA, 19 nt, Homo sapiens
  misc_RNA (1)...(19): siRNA sense strand
caucgaccuuggcugauca

SEQ ID NO: 1533380 - RNA, 19 nt, Homo sapiens
  misc_RNA (1)...(19): siRNA sense strand
ccugaagguuuacauuaag

SEQ ID NO: 1533381 - RNA, 19 nt, Homo sapiens
  misc_RNA (1)...(19): siRNA sense strand
aagcaaacacaguggauga

SEQ ID NO: 1533382 - RNA, 19 nt, Homo sapiens
  misc_RNA (1)...(19): siRNA sense strand
cauuggacaucuucuugau

SEQ ID NO: 1533383 - RNA, 19 nt, Homo sapiens
  misc_RNA (1)...(19): siRNA sense strand
ggagauacuuuucauucau

SEQ ID NO: 1533384 - RNA, 19 nt, Homo sapiens
  misc_RNA (1)...(19): siRNA sense strand
gggauuguggauucucuaa

SEQ ID NO: 1533385 - RNA, 19 nt, Homo sapiens
  misc_RNA (1)...(19): siRNA sense strand
ugacaacaacauagagaau

SEQ ID NO: 1533386 - RNA, 19 nt, Homo sapiens
  misc_RNA (1)...(19): siRNA sense strand
caauggauucaggcuaaua

SEQ ID NO: 1533387 - RNA, 19 nt, Homo sapiens
  misc_RNA (1)...(19): siRNA sense strand
uaauuggucucugccugaa

SEQ ID NO: 1533388 - RNA, 19 nt, Homo sapiens
  misc_RNA (1)...(19): siRNA sense strand
gccauaacucggcauuuga

SEQ ID NO: 1533389 - RNA, 19 nt, Homo sapiens
  misc_RNA (1)...(19): siRNA sense strand
gaaauuuccugucaacuuu

SEQ ID NO: 1533390 - RNA, 19 nt, Homo sapiens
  misc_RNA (1)...(19): siRNA sense strand
gcaaaguaguguugauaua

SEQ ID NO: 1533391 - RNA, 19 nt, Homo sapiens
  misc_RNA (1)...(19): siRNA sense strand
gcagagagaugucaaucaa

SEQ ID NO: 1533392 - RNA, 19 nt, Homo sapiens
  misc_RNA (1)...(19): siRNA sense strand
ucaaauccauuccgaaauu

SEQ ID NO: 1533393 - RNA, 19 nt, Homo sapiens
  misc_RNA (1)...(19): siRNA sense strand
gaauaacagcuacugauuu

SEQ ID NO: 1533394 - RNA, 19 nt, Homo sapiens
  misc_RNA (1)...(19): siRNA sense strand
aagauaaacugcaagcuuu

SEQ ID NO: 1533395 - RNA, 19 nt, Homo sapiens
  misc_RNA (1)...(19): siRNA sense strand
ugaacaagguccugugaaa

SEQ ID NO: 1533396 - RNA, 19 nt, Homo sapiens
  misc_RNA (1)...(19): siRNA sense strand
agaaacagcccaacaauug

SEQ ID NO: 1533397 - RNA, 19 nt, Homo sapiens
  misc_RNA (1)...(19): siRNA sense strand
gcacuucaaagcuucaaua

SEQ ID NO: 1533398 - RNA, 19 nt, Homo sapiens
  misc_RNA (1)...(19): siRNA sense strand
gacaucagcucuugugcaa

SEQ ID NO: 1533399 - RNA, 19 nt, Homo sapiens
  misc_RNA (1)...(19): siRNA sense strand
gcucaacccauauuuguuu

SEQ ID NO: 1533400 - RNA, 19 nt, Homo sapiens
  misc_RNA (1)...(19): siRNA sense strand
cgaaagcugugaugagaau

SEQ ID NO: 1533401 - RNA, 19 nt, Homo sapiens
  misc_RNA (1)...(19): siRNA sense strand
cagcagaaccagaauguaa

SEQ ID NO: 1533402 - RNA, 19 nt, Homo sapiens
  misc_RNA (1)...(19): siRNA sense strand
ucaaagagcaaaccacaaa

SEQ ID NO: 1533403 - RNA, 19 nt, Homo sapiens
  misc_RNA (1)...(19): siRNA sense strand
ugucauugcucaacccaua

SEQ ID NO: 1533404 - RNA, 19 nt, Homo sapiens
  misc_RNA (1)...(19): siRNA sense strand
gaaacagcccaacaauuga

SEQ ID NO: 1533405 - RNA, 19 nt, Homo sapiens
  misc_RNA (1)...(19): siRNA sense strand
ucaagaacagacucuauua

SEQ ID NO: 1533406 - RNA, 19 nt, Homo sapiens
  misc_RNA (1)...(19): siRNA sense strand
gaagacacccuguaugaag

SEQ ID NO: 1533407 - RNA, 19 nt, Homo sapiens
  misc_RNA (1)...(19): siRNA sense strand
uaagagaccugcagaagac

SEQ ID NO: 1533408 - RNA, 19 nt, Homo sapiens
  misc_RNA (1)...(19): siRNA sense strand
cagaagacacccuguauga

SEQ ID NO: 1533409 - RNA, 19 nt, Homo sapiens
  misc_RNA (1)...(19): siRNA sense strand
caagaacagacucuauuaa

SEQ ID NO: 1533410 - RNA, 19 nt, Homo sapiens
  misc_RNA (1)...(19): siRNA sense strand
ggaggaaacagaacauaau

SEQ ID NO: 1533411 - RNA, 19 nt, Homo sapiens
  misc_RNA (1)...(19): siRNA sense strand
gcaguuugcacaccuguaa

SEQ ID NO: 1533412 - RNA, 19 nt, Homo sapiens
  misc_RNA (1)...(19): siRNA sense strand
uauaaagagugcugaacaa

SEQ ID NO: 1533413 - RNA, 19 nt, Homo sapiens
  misc_RNA (1)...(19): siRNA sense strand
gaacguugagacugaauga

SEQ ID NO: 1533414 - RNA, 19 nt, Homo sapiens
  misc_RNA (1)...(19): siRNA sense strand
guuauuagaccugcuauuu

SEQ ID NO: 1533415 - RNA, 19 nt, Homo sapiens
  misc_RNA (1)...(19): siRNA sense strand
caucagcucuugugcaaag

SEQ ID NO: 1533416 - RNA, 19 nt, Homo sapiens
  misc_RNA (1)...(19): siRNA sense strand
uaacagcuacugauuuaga

SEQ ID NO: 1533417 - RNA, 19 nt, Homo sapiens
  misc_RNA (1)...(19): siRNA sense strand
agaggaacguugagacuga

SEQ ID NO: 1533418 - RNA, 19 nt, Homo sapiens
  misc_RNA (1)...(19): siRNA sense strand
aaagagugcugaacaaggu

SEQ ID NO: 1533419 - RNA, 19 nt, Homo sapiens
  misc_RNA (1)...(19): siRNA sense strand
caagauacagcauauuugu

SEQ ID NO: 1533420 - RNA, 19 nt, Homo sapiens
  misc_RNA (1)...(19): siRNA sense strand
gaaaaugcuugcuggagaa

SEQ ID NO: 1533421 - RNA, 19 nt, Homo sapiens
  misc_RNA (1)...(19): siRNA sense strand
caguccagcugucuacuaa

SEQ ID NO: 1533422 - RNA, 19 nt, Homo sapiens
  misc_RNA (1)...(19): siRNA sense strand
gggaggaaacagaacauaa

SEQ ID NO: 1533423 - RNA, 19 nt, Homo sapiens
  misc_RNA (1)...(19): siRNA sense strand
cgaauaacagcuacugauu

SEQ ID NO: 1533424 - RNA, 19 nt, Homo sapiens
  misc_RNA (1)...(19): siRNA sense strand
uugcacaccuguaaacuga

SEQ ID NO: 1533425 - RNA, 19 nt, Homo sapiens
  misc_RNA (1)...(19): siRNA sense strand
gugaaacauucuaaacaug

SEQ ID NO: 1533426 - RNA, 19 nt, Homo sapiens
  misc_RNA (1)...(19): siRNA sense strand
gcacaccuguaaacugaag

SEQ ID NO: 1533427 - RNA, 19 nt, Homo sapiens
  misc_RNA (1)...(19): siRNA sense strand
agaagacuauagcaucaaa

SEQ ID NO: 1533428 - RNA, 19 nt, Homo sapiens
  misc_RNA (1)...(19): siRNA sense strand
cuacugauuuagaagacua

SEQ ID NO: 1533429 - RNA, 19 nt, Homo sapiens
  misc_RNA (1)...(19): siRNA sense strand
cgaaauuuccugucaacuu

SEQ ID NO: 1533430 - RNA, 19 nt, Homo sapiens
  misc_RNA (1)...(19): siRNA sense strand
ucaguaggaugucaaccaa

SEQ ID NO: 1533431 - RNA, 19 nt, Homo sapiens
  misc_RNA (1)...(19): siRNA sense strand
uuagaagacuauagcauca

SEQ ID NO: 1533432 - RNA, 19 nt, Homo sapiens
  misc_RNA (1)...(19): siRNA sense strand
gaggaaacagaacauaaug

SEQ ID NO: 1533433 - RNA, 19 nt, Homo sapiens
  misc_RNA (1)...(19): siRNA sense strand
gagaaaacaugguagaaag

SEQ ID NO: 1533434 - RNA, 19 nt, Homo sapiens
  misc_RNA (1)...(19): siRNA sense strand
cacugacuguggaacauua

SEQ ID NO: 1533435 - RNA, 19 nt, Homo sapiens
  misc_RNA (1)...(19): siRNA sense strand
aaagauaaacugcaagcuu

SEQ ID NO: 1533436 - RNA, 19 nt, Homo sapiens
  misc_RNA (1)...(19): siRNA sense strand
gugaugagaaugaggauga

SEQ ID NO: 1533437 - RNA, 19 nt, Homo sapiens
  misc_RNA (1)...(19): siRNA sense strand
cagaaacagcccaacaauu

SEQ ID NO: 1533438 - RNA, 19 nt, Homo sapiens
  misc_RNA (1)...(19): siRNA sense strand
gcagaagacacccuguaug

SEQ ID NO: 1533439 - RNA, 19 nt, Homo sapiens
  misc_RNA (1)...(19): siRNA sense strand
gcagaaccagaauguaaug

SEQ ID NO: 1533440 - RNA, 19 nt, Homo sapiens
  misc_RNA (1)...(19): siRNA sense strand
gcaauacaucaucgucuug

SEQ ID NO: 1533441 - RNA, 19 nt, Homo sapiens
  misc_RNA (1)...(19): siRNA sense strand
gaaagcguguacggucuuc

SEQ ID NO: 1533442 - RNA, 19 nt, Homo sapiens
  misc_RNA (1)...(19): siRNA sense strand
cccaagauacagcauauuu

SEQ ID NO: 1533443 - RNA, 19 nt, Homo sapiens
  misc_RNA (1)...(19): siRNA sense strand
ugaagcagcagaaccagaa

SEQ ID NO: 1533444 - RNA, 19 nt, Homo sapiens
  misc_RNA (1)...(19): siRNA sense strand
gaugucaaccaaaugaaga

SEQ ID NO: 1533445 - RNA, 19 nt, Homo sapiens
  misc_RNA (1)...(19): siRNA sense strand
gugcaaaguaguguugaua

SEQ ID NO: 1533446 - RNA, 19 nt, Homo sapiens
  misc_RNA (1)...(19): siRNA sense strand
gaggaacguugagacugaa

SEQ ID NO: 1533447 - RNA, 19 nt, Homo sapiens
  misc_RNA (1)...(19): siRNA sense strand
aaacaugguagaaagaguu

SEQ ID NO: 1533448 - RNA, 19 nt, Homo sapiens
  misc_RNA (1)...(19): siRNA sense strand
ucaauaagcagagagaugu

SEQ ID NO: 1533449 - RNA, 19 nt, Homo sapiens
  misc_RNA (1)...(19): siRNA sense strand
ggacacaaggcacuggaau

SEQ ID NO: 1533450 - RNA, 19 nt, Homo sapiens
  misc_RNA (1)...(19): siRNA sense strand
ccaagauacagcauauuug

SEQ ID NO: 1533451 - RNA, 19 nt, Homo sapiens
  misc_RNA (1)...(19): siRNA sense strand
guacggucuucaucuuuua

SEQ ID NO: 1533452 - RNA, 19 nt, Homo sapiens
  misc_RNA (1)...(19): siRNA sense strand
ugcgaaagcugugaugaga

SEQ ID NO: 1533453 - RNA, 19 nt, Homo sapiens
  misc_RNA (1)...(19): siRNA sense strand
aaacagcccaacaauugaa

SEQ ID NO: 1533454 - RNA, 19 nt, Homo sapiens
  misc_RNA (1)...(19): siRNA sense strand
ugauucauaugccaaggaa

SEQ ID NO: 1533455 - RNA, 19 nt, Homo sapiens
  misc_RNA (1)...(19): siRNA sense strand
gaacaagguccugugaaac

SEQ ID NO: 1533456 - RNA, 19 nt, Homo sapiens
  misc_RNA (1)...(19): siRNA sense strand
ucagauccuucuaguugga

SEQ ID NO: 1533457 - RNA, 19 nt, Homo sapiens
  misc_RNA (1)...(19): siRNA sense strand
caauugaacugcgaaagcu

SEQ ID NO: 1533458 - RNA, 19 nt, Homo sapiens
  misc_RNA (1)...(19): siRNA sense strand
gcacugacuguggaacauu

SEQ ID NO: 1533459 - RNA, 19 nt, Homo sapiens
  misc_RNA (1)...(19): siRNA sense strand
aguaggaugucaaccaaau

SEQ ID NO: 1533460 - RNA, 19 nt, Homo sapiens
  misc_RNA (1)...(19): siRNA sense strand
uauuagaccugcuauuuug

SEQ ID NO: 1533461 - RNA, 19 nt, Homo sapiens
  misc_RNA (1)...(19): siRNA sense strand
auacuucccuaauugaauc

SEQ ID NO: 1533462 - RNA, 19 nt, Homo sapiens
  misc_RNA (1)...(19): siRNA sense strand
uuaagagaccugcagaaga

SEQ ID NO: 1533463 - RNA, 19 nt, Homo sapiens
  misc_RNA (1)...(19): siRNA sense strand
gaaaagggagaacaaacuu

SEQ ID NO: 1533464 - RNA, 19 nt, Homo sapiens
  misc_RNA (1)...(19): siRNA sense strand
ggagaaaacaugguagaaa

SEQ ID NO: 1533465 - RNA, 19 nt, Homo sapiens
  misc_RNA (1)...(19): siRNA sense strand
gaacugcgaaagcugugau

SEQ ID NO: 1533466 - RNA, 19 nt, Homo sapiens
  misc_RNA (1)...(19): siRNA sense strand
uaggaugucaaccaaauga

SEQ ID NO: 1533467 - RNA, 19 nt, Homo sapiens
  misc_RNA (1)...(19): siRNA sense strand
gaccggcgacagcaagaaa

SEQ ID NO: 1533468 - RNA, 19 nt, Homo sapiens
  misc_RNA (1)...(19): siRNA sense strand
cuaauuaugcgcaaucaag

SEQ ID NO: 1533469 - RNA, 19 nt, Homo sapiens
  misc_RNA (1)...(19): siRNA sense strand
gcugaacaagguccuguga

SEQ ID NO: 1533470 - RNA, 19 nt, Homo sapiens
  misc_RNA (1)...(19): siRNA sense strand
ucagaaacagcccaacaau

SEQ ID NO: 1533471 - RNA, 19 nt, Homo sapiens
  misc_RNA (1)...(19): siRNA sense strand
aaagcugcaguuccaauuu

SEQ ID NO: 1533472 - RNA, 19 nt, Homo sapiens
  misc_RNA (1)...(19): siRNA sense strand
cguguacggucuucaucuu

SEQ ID NO: 1533473 - RNA, 19 nt, Homo sapiens
  misc_RNA (1)...(19): siRNA sense strand
uuaucaagggcuagaauuu

SEQ ID NO: 1533474 - RNA, 19 nt, Homo sapiens
  misc_RNA (1)...(19): siRNA sense strand
caaacucugggcccaaaug

SEQ ID NO: 1533475 - RNA, 19 nt, Homo sapiens
  misc_RNA (1)...(19): siRNA sense strand
gcagaggaacguugagacu

SEQ ID NO: 1533476 - RNA, 19 nt, Homo sapiens
  misc_RNA (1)...(19): siRNA sense strand
gcagcagaaccagaaugua

SEQ ID NO: 1533477 - RNA, 19 nt, Homo sapiens
  misc_RNA (1)...(19): siRNA sense strand
ggagaacaaacuuuuaaga

SEQ ID NO: 1533478 - RNA, 19 nt, Homo sapiens
  misc_RNA (1)...(19): siRNA sense strand
caacaauugaacugcgaaa

SEQ ID NO: 1533479 - RNA, 19 nt, Homo sapiens
  misc_RNA (1)...(19): siRNA sense strand
uuuaugacaucagcucuug

SEQ ID NO: 1533480 - RNA, 19 nt, Homo sapiens
  misc_RNA (1)...(19): siRNA sense strand
guaugaagcagcagaacca

SEQ ID NO: 1533481 - RNA, 19 nt, Homo sapiens
  misc_RNA (1)...(19): siRNA sense strand
gucuaaggcugauccucaa

SEQ ID NO: 1533482 - RNA, 19 nt, Homo sapiens
  misc_RNA (1)...(19): siRNA sense strand
caagguccugugaaacauu

SEQ ID NO: 1533483 - RNA, 19 nt, Homo sapiens
  misc_RNA (1)...(19): siRNA sense strand
uaucaagggcuagaauuuc

SEQ ID NO: 1533484 - RNA, 19 nt, Homo sapiens
  misc_RNA (1)...(19): siRNA sense strand
aacagcuacugauuuagaa

SEQ ID NO: 1533485 - RNA, 19 nt, Homo sapiens
  misc_RNA (1)...(19): siRNA sense strand
ggaugucaaccaaaugaag

SEQ ID NO: 1533486 - RNA, 19 nt, Homo sapiens
  misc_RNA (1)...(19): siRNA sense strand
gacuaauuaugcgcaauca

SEQ ID NO: 1533487 - RNA, 19 nt, Homo sapiens
  misc_RNA (1)...(19): siRNA sense strand
gcgaaagcugugaugagaa

SEQ ID NO: 1533488 - RNA, 19 nt, Homo sapiens
  misc_RNA (1)...(19): siRNA sense strand
ugcccaagauacagcauau

SEQ ID NO: 1533489 - RNA, 19 nt, Homo sapiens
  misc_RNA (1)...(19): siRNA sense strand
gcauauggcugcuuguuaa

SEQ ID NO: 1533490 - RNA, 19 nt, Homo sapiens
  misc_RNA (1)...(19): siRNA sense strand
gagaagcucuuuauauuca

SEQ ID NO: 1533491 - RNA, 19 nt, Homo sapiens
  misc_RNA (1)...(19): siRNA sense strand
gaaugaaauuggacaagaa

SEQ ID NO: 1533492 - RNA, 19 nt, Homo sapiens
  misc_RNA (1)...(19): siRNA sense strand
gccaugggcucauuccuua

SEQ ID NO: 1533493 - RNA, 19 nt, Homo sapiens
  misc_RNA (1)...(19): siRNA sense strand
gaacacaaaucagcaagga

SEQ ID NO: 1533494 - RNA, 19 nt, Homo sapiens
  misc_RNA (1)...(19): siRNA sense strand
gaacagaacacagcugaaa

SEQ ID NO: 1533495 - RNA, 19 nt, Homo sapiens
  misc_RNA (1)...(19): siRNA sense strand
gaaagcagagcauauuaaa

SEQ ID NO: 1533496 - RNA, 19 nt, Homo sapiens
  misc_RNA (1)...(19): siRNA sense strand
ggaaugaaauuggacaaga

SEQ ID NO: 1533497 - RNA, 19 nt, Homo sapiens
  misc_RNA (1)...(19): siRNA sense strand
gcaacaagaagaagacuuu

SEQ ID NO: 1533498 - RNA, 19 nt, Homo sapiens
  misc_RNA (1)...(19): siRNA sense strand
guggaaugcugucacuuua

SEQ ID NO: 1533499 - RNA, 19 nt, Homo sapiens
  misc_RNA (1)...(19): siRNA sense strand
gaaacaugcucaccagaca

SEQ ID NO: 1533500 - RNA, 19 nt, Homo sapiens
  misc_RNA (1)...(19): siRNA sense strand
gaggaagucucucgcuuug

SEQ ID NO: 1533501 - RNA, 19 nt, Homo sapiens
  misc_RNA (1)...(19): siRNA sense strand
gagaaagcagagcauauua

SEQ ID NO: 1533502 - RNA, 19 nt, Homo sapiens
  misc_RNA (1)...(19): siRNA sense strand
gcagcaggguucuucauug

SEQ ID NO: 1533503 - RNA, 19 nt, Homo sapiens
  misc_RNA (1)...(19): siRNA sense strand
aguaagagguaucaucuaa

SEQ ID NO: 1533504 - RNA, 19 nt, Homo sapiens
  misc_RNA (1)...(19): siRNA sense strand
ggagaugccuuugcuguca

SEQ ID NO: 1533505 - RNA, 19 nt, Homo sapiens
  misc_RNA (1)...(19): siRNA sense strand
ggagguccauggcugcuuu

SEQ ID NO: 1533506 - RNA, 19 nt, Homo sapiens
  misc_RNA (1)...(19): siRNA sense strand
ugacucaccucauucagaa

SEQ ID NO: 1533507 - RNA, 19 nt, Homo sapiens
  misc_RNA (1)...(19): siRNA sense strand
ggaagucucucgcuuugca

SEQ ID NO: 1533508 - RNA, 19 nt, Homo sapiens
  misc_RNA (1)...(19): siRNA sense strand
ggaaugcugucacuuuaag

SEQ ID NO: 1533509 - RNA, 19 nt, Homo sapiens
  misc_RNA (1)...(19): siRNA sense strand
uaagagguaucaucuaagu

SEQ ID NO: 1533510 - RNA, 19 nt, Homo sapiens
  misc_RNA (1)...(19): siRNA sense strand
cagaaaccauugaucuauu

SEQ ID NO: 1533511 - RNA, 19 nt, Homo sapiens
  misc_RNA (1)...(19): siRNA sense strand
acacaaaucagcaaggaua

SEQ ID NO: 1533512 - RNA, 19 nt, Homo sapiens
  misc_RNA (1)...(19): siRNA sense strand
ggagaauguagaagaguua

SEQ ID NO: 1533513 - RNA, 19 nt, Homo sapiens
  misc_RNA (1)...(19): siRNA sense strand
gagcaagagccagacauua

SEQ ID NO: 1533514 - RNA, 19 nt, Homo sapiens
  misc_RNA (1)...(19): siRNA sense strand
cuagaagacuugugggaaa

SEQ ID NO: 1533515 - RNA, 19 nt, Homo sapiens
  misc_RNA (1)...(19): siRNA sense strand
gcucauuccuuauuugcuu

SEQ ID NO: 1533516 - RNA, 19 nt, Homo sapiens
  misc_RNA (1)...(19): siRNA sense strand
gcagaaaccauugaucuau

SEQ ID NO: 1533517 - RNA, 19 nt, Homo sapiens
  misc_RNA (1)...(19): siRNA sense strand
aagcagagcauauuaaaga

SEQ ID NO: 1533518 - RNA, 19 nt, Homo sapiens
  misc_RNA (1)...(19): siRNA sense strand
ggagguggauucugaaagg

SEQ ID NO: 1533519 - RNA, 19 nt, Homo sapiens
  misc_RNA (1)...(19): siRNA sense strand
ggcagagacugaaggauga

SEQ ID NO: 1533520 - RNA, 19 nt, Homo sapiens
  misc_RNA (1)...(19): siRNA sense strand
gccaguaccugcaccagaa

SEQ ID NO: 1533521 - RNA, 19 nt, Homo sapiens
  misc_RNA (1)...(19): siRNA sense strand
gaaagaagauggaaaacca

SEQ ID NO: 1533522 - RNA, 19 nt, Homo sapiens
  misc_RNA (1)...(19): siRNA sense strand
gcacagacagcccgcauau

SEQ ID NO: 1533523 - RNA, 19 nt, Homo sapiens
  misc_RNA (1)...(19): siRNA sense strand
ggaugaagaccaaauggaa

SEQ ID NO: 1533524 - RNA, 19 nt, Homo sapiens
  misc_RNA (1)...(19): siRNA sense strand
gcaagugggagaugccuuu

SEQ ID NO: 1533525 - RNA, 19 nt, Homo sapiens
  misc_RNA (1)...(19): siRNA sense strand
cagagcauauuaaagaaga

SEQ ID NO: 1533526 - RNA, 19 nt, Homo sapiens
  misc_RNA (1)...(19): siRNA sense strand
ggaggaggcagaagaguug

SEQ ID NO: 1533527 - RNA, 19 nt, Homo sapiens
  misc_RNA (1)...(19): siRNA sense strand
ggaguacgaucggaagaug

SEQ ID NO: 1533528 - RNA, 19 nt, Homo sapiens
  misc_RNA (1)...(19): siRNA sense strand
agagagagaugauggcaau

SEQ ID NO: 1533529 - RNA, 19 nt, Homo sapiens
  misc_RNA (1)...(19): siRNA sense strand
gcagaagaguugcugaaac

SEQ ID NO: 1533530 - RNA, 19 nt, Homo sapiens
  misc_RNA (1)...(19): siRNA sense strand
gauaagcagaggauuagaa

SEQ ID NO: 1533531 - RNA, 19 nt, Homo sapiens
  misc_RNA (1)...(19): siRNA sense strand
gaauguagaagaguuaaug

SEQ ID NO: 1533532 - RNA, 19 nt, Homo sapiens
  misc_RNA (1)...(19): siRNA sense strand
gaagugcaucgaagacaaa

SEQ ID NO: 1533533 - RNA, 19 nt, Homo sapiens
  misc_RNA (1)...(19): siRNA sense strand
agacgagaguugcuacaaa

SEQ ID NO: 1533534 - RNA, 19 nt, Homo sapiens
  misc_RNA (1)...(19): siRNA sense strand
guaccuggaugaagaccaa

SEQ ID NO: 1533535 - RNA, 19 nt, Homo sapiens
  misc_RNA (1)...(19): siRNA sense strand
ggacauuucaagagaaguu

SEQ ID NO: 1533536 - RNA, 19 nt, Homo sapiens
  misc_RNA (1)...(19): siRNA sense strand
gaagcucuuuauauucaga

SEQ ID NO: 1533537 - RNA, 19 nt, Homo sapiens
  misc_RNA (1)...(19): siRNA sense strand
ucagagagaggaugauauu

SEQ ID NO: 1533538 - RNA, 19 nt, Homo sapiens
  misc_RNA (1)...(19): siRNA sense strand
ccagcugacucaccucauu

SEQ ID NO: 1533539 - RNA, 19 nt, Homo sapiens
  misc_RNA (1)...(19): siRNA sense strand
gagagaugauggcaaugga

SEQ ID NO: 1533540 - RNA, 19 nt, Homo sapiens
  misc_RNA (1)...(19): siRNA sense strand
ggaagcaccacuuggaaug

SEQ ID NO: 1533541 - RNA, 19 nt, Homo sapiens
  misc_RNA (1)...(19): siRNA sense strand
caucguaccuggcgaggau

SEQ ID NO: 1533542 - RNA, 19 nt, Homo sapiens
  misc_RNA (1)...(19): siRNA sense strand
agagguaucaucuaaguaa

SEQ ID NO: 1533543 - RNA, 19 nt, Homo sapiens
  misc_RNA (1)...(19): siRNA sense strand
gaaaccagaggcagcuaaa

SEQ ID NO: 1533544 - RNA, 19 nt, Homo sapiens
  misc_RNA (1)...(19): siRNA sense strand
gagguaucaucuaaguaaa

SEQ ID NO: 1533545 - RNA, 19 nt, Homo sapiens
  misc_RNA (1)...(19): siRNA sense strand
gaaagucacgguccaagag

SEQ ID NO: 1533546 - RNA, 19 nt, Homo sapiens
  misc_RNA (1)...(19): siRNA sense strand
gaugaagaccaaauggaaa

SEQ ID NO: 1533547 - RNA, 19 nt, Homo sapiens
  misc_RNA (1)...(19): siRNA sense strand
ggugagaggucugcuguag

SEQ ID NO: 1533548 - RNA, 19 nt, Homo sapiens
  misc_RNA (1)...(19): siRNA sense strand
gauauucucuggaaaagga

SEQ ID NO: 1533549 - RNA, 19 nt, Homo sapiens
  misc_RNA (1)...(19): siRNA sense strand
gaacagugucgugcuagaa

SEQ ID NO: 1533550 - RNA, 19 nt, Homo sapiens
  misc_RNA (1)...(19): siRNA sense strand
aaaggcaggucucuacugu

SEQ ID NO: 1533551 - RNA, 19 nt, Homo sapiens
  misc_RNA (1)...(19): siRNA sense strand
uaagagaagacgagaguug

SEQ ID NO: 1533552 - RNA, 19 nt, Homo sapiens
  misc_RNA (1)...(19): siRNA sense strand
uagaagaguuaauggacuu

SEQ ID NO: 1533553 - RNA, 19 nt, Homo sapiens
  misc_RNA (1)...(19): siRNA sense strand
ugagaggucugcuguagag

SEQ ID NO: 1533554 - RNA, 19 nt, Homo sapiens
  misc_RNA (1)...(19): siRNA sense strand
caagagaaagcagagcaua

SEQ ID NO: 1533555 - RNA, 19 nt, Homo sapiens
  misc_RNA (1)...(19): siRNA sense strand
acagaacagugucgugcua

SEQ ID NO: 1533556 - RNA, 19 nt, Homo sapiens
  misc_RNA (1)...(19): siRNA sense strand
cugcagaacucagccauga

SEQ ID NO: 1533557 - RNA, 19 nt, Homo sapiens
  misc_RNA (1)...(19): siRNA sense strand
aaugaggaccuuucccuua

SEQ ID NO: 1533558 - RNA, 19 nt, Homo sapiens
  misc_RNA (1)...(19): siRNA sense strand
gagcugguggcaagccuua

SEQ ID NO: 1533559 - RNA, 19 nt, Homo sapiens
  misc_RNA (1)...(19): siRNA sense strand
aaauggaaaugcuauugga

SEQ ID NO: 1533560 - RNA, 19 nt, Homo sapiens
  misc_RNA (1)...(19): siRNA sense strand
augaggaccuuucccuuaa

SEQ ID NO: 1533561 - RNA, 19 nt, Homo sapiens
  misc_RNA (1)...(19): siRNA sense strand
agaaagcagagcauauuaa

SEQ ID NO: 1533562 - RNA, 19 nt, Homo sapiens
  misc_RNA (1)...(19): siRNA sense strand
agacauuacuggagcaaca

SEQ ID NO: 1533563 - RNA, 19 nt, Homo sapiens
  misc_RNA (1)...(19): siRNA sense strand
cagaagaguugcugaaacg

SEQ ID NO: 1533564 - RNA, 19 nt, Homo sapiens
  misc_RNA (1)...(19): siRNA sense strand
gacaucggguuuggcagua

SEQ ID NO: 1533565 - RNA, 19 nt, Homo sapiens
  misc_RNA (1)...(19): siRNA sense strand
cuaaaaugcugcugcaaaa

SEQ ID NO: 1533566 - RNA, 19 nt, Homo sapiens
  misc_RNA (1)...(19): siRNA sense strand
gaagaugguggcauugaca

SEQ ID NO: 1533567 - RNA, 19 nt, Homo sapiens
  misc_RNA (1)...(19): siRNA sense strand
uagaagaguuggagauugc

SEQ ID NO: 1533568 - RNA, 19 nt, Homo sapiens
  misc_RNA (1)...(19): siRNA sense strand
ggagcaacaucagcagugu

SEQ ID NO: 1533569 - RNA, 19 nt, Homo sapiens
  misc_RNA (1)...(19): siRNA sense strand
uaacacaccgccuguaugg

SEQ ID NO: 1533570 - RNA, 19 nt, Homo sapiens
  misc_RNA (1)...(19): siRNA sense strand
gagggaggcuuugcacagu

SEQ ID NO: 1533571 - RNA, 19 nt, Homo sapiens
  misc_RNA (1)...(19): siRNA sense strand
ggaaaagguucgaggugaa

SEQ ID NO: 1533572 - RNA, 19 nt, Homo sapiens
  misc_RNA (1)...(19): siRNA sense strand
gggagcaccugaucuucau

SEQ ID NO: 1533573 - RNA, 19 nt, Homo sapiens
  misc_RNA (1)...(19): siRNA sense strand
caaaucagcaaggauauca

SEQ ID NO: 1533574 - RNA, 19 nt, Homo sapiens
  misc_RNA (1)...(19): siRNA sense strand
gaaugugaccuggaaacaa

SEQ ID NO: 1533575 - RNA, 19 nt, Homo sapiens
  misc_RNA (1)...(19): siRNA sense strand
aggaugauauucucuggaa

SEQ ID NO: 1533576 - RNA, 19 nt, Homo sapiens
  misc_RNA (1)...(19): siRNA sense strand
gaagcaccacuuggaauga

SEQ ID NO: 1533577 - RNA, 19 nt, Homo sapiens
  misc_RNA (1)...(19): siRNA sense strand
agagaaagcagagcauauu

SEQ ID NO: 1533578 - RNA, 19 nt, Homo sapiens
  misc_RNA (1)...(19): siRNA sense strand
gaaaggcaggucucuacug

SEQ ID NO: 1533579 - RNA, 19 nt, Homo sapiens
  misc_RNA (1)...(19): siRNA sense strand
gagcugagugcaucugaga

SEQ ID NO: 1533580 - RNA, 19 nt, Homo sapiens
  misc_RNA (1)...(19): siRNA sense strand
agcagaaguuggacaauga

SEQ ID NO: 1533581 - RNA, 19 nt, Homo sapiens
  misc_RNA (1)...(19): siRNA sense strand
ccuuaacgaccaaaugaua

SEQ ID NO: 1533582 - RNA, 19 nt, Homo sapiens
  misc_RNA (1)...(19): siRNA sense strand
caaaggagccagagaucuc

SEQ ID NO: 1533583 - RNA, 19 nt, Homo sapiens
  misc_RNA (1)...(19): siRNA sense strand
ggcagaaaccauugaucua

SEQ ID NO: 1533584 - RNA, 19 nt, Homo sapiens
  misc_RNA (1)...(19): siRNA sense strand
gacgagaguugcuacaaaa

SEQ ID NO: 1533585 - RNA, 19 nt, Homo sapiens
  misc_RNA (1)...(19): siRNA sense strand
gagaagacgagaguugcua

SEQ ID NO: 1533586 - RNA, 19 nt, Homo sapiens
  misc_RNA (1)...(19): siRNA sense strand
caagaaagaagauggaaaa

SEQ ID NO: 1533587 - RNA, 19 nt, Homo sapiens
  misc_RNA (1)...(19): siRNA sense strand
ggaagaugguggcauugac

SEQ ID NO: 1533588 - RNA, 19 nt, Homo sapiens
  misc_RNA (1)...(19): siRNA sense strand
gggcagaaaccauugaucu

SEQ ID NO: 1533589 - RNA, 19 nt, Homo sapiens
  misc_RNA (1)...(19): siRNA sense strand
gaacuaaggagcccuauua

SEQ ID NO: 1533590 - RNA, 19 nt, Homo sapiens
  misc_RNA (1)...(19): siRNA sense strand
gaaagcgcauugccaagaa

SEQ ID NO: 1533591 - RNA, 19 nt, Homo sapiens
  misc_RNA (1)...(19): siRNA sense strand
gaacccaccauacaaguuu

SEQ ID NO: 1533592 - RNA, 19 nt, Homo sapiens
  misc_RNA (1)...(19): siRNA sense strand
gaucuuguauagaccaauu

SEQ ID NO: 1533593 - RNA, 19 nt, Homo sapiens
  misc_RNA (1)...(19): siRNA sense strand
ucaaaggcaucagcauaua

SEQ ID NO: 1533594 - RNA, 19 nt, Homo sapiens
  misc_RNA (1)...(19): siRNA sense strand
gcucaaaggcaucagcaua

SEQ ID NO: 1533595 - RNA, 19 nt, Homo sapiens
  misc_RNA (1)...(19): siRNA sense strand
cgaccuagcuuugaugugu

SEQ ID NO: 1533596 - RNA, 19 nt, Homo sapiens
  misc_RNA (1)...(19): siRNA sense strand
aaaggaauauccagaagug

SEQ ID NO: 1533597 - RNA, 19 nt, Homo sapiens
  misc_RNA (1)...(19): siRNA sense strand
cuaaggagcccuauuacaa

SEQ ID NO: 1533598 - RNA, 19 nt, Homo sapiens
  misc_RNA (1)...(19): siRNA sense strand
gaccauccuuccugacaaa

SEQ ID NO: 1533599 - RNA, 19 nt, Homo sapiens
  misc_RNA (1)...(19): siRNA sense strand
ucaccggucucucagguaa

SEQ ID NO: 1533600 - RNA, 19 nt, Homo sapiens
  misc_RNA (1)...(19): siRNA sense strand
gcaagccuguggccaagug

SEQ ID NO: 1533601 - RNA, 19 nt, Homo sapiens
  misc_RNA (1)...(19): siRNA sense strand
ccucaaagccagacacuug

SEQ ID NO: 1533602 - RNA, 19 nt, Homo sapiens
  misc_RNA (1)...(19): siRNA sense strand
gacgagaccuucaccuucu

SEQ ID NO: 1533603 - RNA, 19 nt, Homo sapiens
  misc_RNA (1)...(19): siRNA sense strand
gccagacacuugccgaaga

SEQ ID NO: 1533604 - RNA, 19 nt, Homo sapiens
  misc_RNA (1)...(19): siRNA sense strand
ggauaucaccggucucuca

SEQ ID NO: 1533605 - RNA, 19 nt, Homo sapiens
  misc_RNA (1)...(19): siRNA sense strand
agaggaggaugucaugcua

SEQ ID NO: 1533606 - RNA, 19 nt, Homo sapiens
  misc_RNA (1)...(19): siRNA sense strand
ccaggugucucugucauau

SEQ ID NO: 1533607 - RNA, 19 nt, Homo sapiens
  misc_RNA (1)...(19): siRNA sense strand
cagagaagaagcacaagaa

SEQ ID NO: 1533608 - RNA, 19 nt, Homo sapiens
  misc_RNA (1)...(19): siRNA sense strand
ccauacaaguuuauucaca

SEQ ID NO: 1533609 - RNA, 19 nt, Homo sapiens
  misc_RNA (1)...(19): siRNA sense strand
gcacaagaacccaccauac

SEQ ID NO: 1533610 - RNA, 19 nt, Homo sapiens
  misc_RNA (1)...(19): siRNA sense strand
gaccagggacaucaucaaa

SEQ ID NO: 1533611 - RNA, 19 nt, Homo sapiens
  misc_RNA (1)...(19): siRNA sense strand
gggccuagcucuggaucuu

SEQ ID NO: 1533612 - RNA, 19 nt, Homo sapiens
  misc_RNA (1)...(19): siRNA sense strand
gacuauaacuucccgaaaa

SEQ ID NO: 1533613 - RNA, 19 nt, Homo sapiens
  misc_RNA (1)...(19): siRNA sense strand
gcagagaagaagcacaaga

SEQ ID NO: 1533614 - RNA, 19 nt, Homo sapiens
  misc_RNA (1)...(19): siRNA sense strand
aaacccaugugaagaagug

SEQ ID NO: 1533615 - RNA, 19 nt, Homo sapiens
  misc_RNA (1)...(19): siRNA sense strand
gaagaaaacccaugugaag

SEQ ID NO: 1533616 - RNA, 19 nt, Homo sapiens
  misc_RNA (1)...(19): siRNA sense strand
ggacuauaacuucccgaaa

SEQ ID NO: 1533617 - RNA, 19 nt, Homo sapiens
  misc_RNA (1)...(19): siRNA sense strand
ccagagacccucagcaaca

SEQ ID NO: 1533618 - RNA, 19 nt, Homo sapiens
  misc_RNA (1)...(19): siRNA sense strand
gaucgcaccaccaagaaug

SEQ ID NO: 1533619 - RNA, 19 nt, Homo sapiens
  misc_RNA (1)...(19): siRNA sense strand
cagagacccucagcaacaa

SEQ ID NO: 1533620 - RNA, 19 nt, Homo sapiens
  misc_RNA (1)...(19): siRNA sense strand
ccagacacuugccgaagau

SEQ ID NO: 1533621 - RNA, 19 nt, Homo sapiens
  misc_RNA (1)...(19): siRNA sense strand
caacugaccagggacauca

SEQ ID NO: 1533622 - RNA, 19 nt, Homo sapiens
  misc_RNA (1)...(19): siRNA sense strand
acaagaacccaccauacaa

SEQ ID NO: 1533623 - RNA, 19 nt, Homo sapiens
  misc_RNA (1)...(19): siRNA sense strand
ugacaguggugguccucaa

SEQ ID NO: 1533624 - RNA, 19 nt, Homo sapiens
  misc_RNA (1)...(19): siRNA sense strand
gacccuggacccuguguuu

SEQ ID NO: 1533625 - RNA, 19 nt, Homo sapiens
  misc_RNA (1)...(19): siRNA sense strand
caagaacccaccauacaag

SEQ ID NO: 1533626 - RNA, 19 nt, Homo sapiens
  misc_RNA (1)...(19): siRNA sense strand
cacaagaacccaccauaca

SEQ ID NO: 1533627 - RNA, 19 nt, Homo sapiens
  misc_RNA (1)...(19): siRNA sense strand
caauauccgaccuagcuuu

SEQ ID NO: 1533628 - RNA, 19 nt, Homo sapiens
  misc_RNA (1)...(19): siRNA sense strand
ggcacagucugagcgagua

SEQ ID NO: 1533629 - RNA, 19 nt, Homo sapiens
  misc_RNA (1)...(19): siRNA sense strand
caaagugcggagagacaaa

SEQ ID NO: 1533630 - RNA, 19 nt, Homo sapiens
  misc_RNA (1)...(19): siRNA sense strand
gaggaugucaugcuaggau

SEQ ID NO: 1533631 - RNA, 19 nt, Homo sapiens
  misc_RNA (1)...(19): siRNA sense strand
uaaggagcccuauuacaag

SEQ ID NO: 1533632 - RNA, 19 nt, Homo sapiens
  misc_RNA (1)...(19): siRNA sense strand
ccuucucaguggacuauaa

SEQ ID NO: 1533633 - RNA, 19 nt, Homo sapiens
  misc_RNA (1)...(19): siRNA sense strand
gcgcauugccaagaagaaa

SEQ ID NO: 1533634 - RNA, 19 nt, Homo sapiens
  misc_RNA (1)...(19): siRNA sense strand
cagguaauccuuaugucaa

SEQ ID NO: 1533635 - RNA, 19 nt, Homo sapiens
  misc_RNA (1)...(19): siRNA sense strand
caccauacaaguuuauuca

SEQ ID NO: 1533636 - RNA, 19 nt, Homo sapiens
  misc_RNA (1)...(19): siRNA sense strand
ugaccauccuuccugacaa

SEQ ID NO: 1533637 - RNA, 19 nt, Homo sapiens
  misc_RNA (1)...(19): siRNA sense strand
ucucucagguaauccuuau

SEQ ID NO: 1533638 - RNA, 19 nt, Homo sapiens
  misc_RNA (1)...(19): siRNA sense strand
uauccgaccuagcuuugau

SEQ ID NO: 1533639 - RNA, 19 nt, Homo sapiens
  misc_RNA (1)...(19): siRNA sense strand
gccuagcucuggaucuugu

SEQ ID NO: 1533640 - RNA, 19 nt, Homo sapiens
  misc_RNA (1)...(19): siRNA sense strand
ucaaggugaacgucuacua

SEQ ID NO: 1533641 - RNA, 19 nt, Homo sapiens
  misc_RNA (1)...(19): siRNA sense strand
gaagaaaaucaucaaagug

SEQ ID NO: 1533642 - RNA, 19 nt, Homo sapiens
  misc_RNA (1)...(19): siRNA sense strand
agaaagcgcauugccaaga

SEQ ID NO: 1533643 - RNA, 19 nt, Homo sapiens
  misc_RNA (1)...(19): siRNA sense strand
ccaauuacccaucaaaaug

SEQ ID NO: 1533644 - RNA, 19 nt, Homo sapiens
  misc_RNA (1)...(19): siRNA sense strand
gcuaagccgagacaaagau

SEQ ID NO: 1533645 - RNA, 19 nt, Homo sapiens
  misc_RNA (1)...(19): siRNA sense strand
gcacaggcaagguacaacu

SEQ ID NO: 1533646 - RNA, 19 nt, Homo sapiens
  misc_RNA (1)...(19): siRNA sense strand
gaccuucaccuucuauguc

SEQ ID NO: 1533647 - RNA, 19 nt, Homo sapiens
  misc_RNA (1)...(19): siRNA sense strand
caaaaggaauauccagaag

SEQ ID NO: 1533648 - RNA, 19 nt, Homo sapiens
  misc_RNA (1)...(19): siRNA sense strand
ucagguaauccuuauguca

SEQ ID NO: 1533649 - RNA, 19 nt, Homo sapiens
  misc_RNA (1)...(19): siRNA sense strand
gacaguggugguccucaaa

SEQ ID NO: 1533650 - RNA, 19 nt, Homo sapiens
  misc_RNA (1)...(19): siRNA sense strand
ggaauauccagaagugcau

SEQ ID NO: 1533651 - RNA, 19 nt, Homo sapiens
  misc_RNA (1)...(19): siRNA sense strand
auagaccaauuacccauca

SEQ ID NO: 1533652 - RNA, 19 nt, Homo sapiens
  misc_RNA (1)...(19): siRNA sense strand
gcugagaucaccaauaucc

SEQ ID NO: 1533653 - RNA, 19 nt, Homo sapiens
  misc_RNA (1)...(19): siRNA sense strand
caaggugaacgucuacuac

SEQ ID NO: 1533654 - RNA, 19 nt, Homo sapiens
  misc_RNA (1)...(19): siRNA sense strand
aacccaccauacaaguuua

SEQ ID NO: 1533655 - RNA, 19 nt, Homo sapiens
  misc_RNA (1)...(19): siRNA sense strand
gaaaacccaugugaagaag

SEQ ID NO: 1533656 - RNA, 19 nt, Homo sapiens
  misc_RNA (1)...(19): siRNA sense strand
aggugucucugucauauca

SEQ ID NO: 1533657 - RNA, 19 nt, Homo sapiens
  misc_RNA (1)...(19): siRNA sense strand
gaucugaccccuacaucaa

SEQ ID NO: 1533658 - RNA, 19 nt, Homo sapiens
  misc_RNA (1)...(19): siRNA sense strand
uaggaucccucaccuucuc

SEQ ID NO: 1533659 - RNA, 19 nt, Homo sapiens
  misc_RNA (1)...(19): siRNA sense strand
caaaggcaucagcauauac

SEQ ID NO: 1533660 - RNA, 19 nt, Homo sapiens
  misc_RNA (1)...(19): siRNA sense strand
caaacggcaucgggugaag

SEQ ID NO: 1533661 - RNA, 19 nt, Homo sapiens
  misc_RNA (1)...(19): siRNA sense strand
ccagggacaucaucaaaag

SEQ ID NO: 1533662 - RNA, 19 nt, Homo sapiens
  misc_RNA (1)...(19): siRNA sense strand
ccagagugcugcggaagac

SEQ ID NO: 1533663 - RNA, 19 nt, Homo sapiens
  misc_RNA (1)...(19): siRNA sense strand
gcggagagacaaagauggu

SEQ ID NO: 1533664 - RNA, 19 nt, Homo sapiens
  misc_RNA (1)...(19): siRNA sense strand
caaaaccaccucuccauca

SEQ ID NO: 1533665 - RNA, 19 nt, Homo sapiens
  misc_RNA (1)...(19): siRNA sense strand
cucaaaggcaucagcauau

SEQ ID NO: 1533666 - RNA, 19 nt, Homo sapiens
  misc_RNA (1)...(19): siRNA sense strand
gagacccucagcaacaaga

SEQ ID NO: 1533667 - RNA, 19 nt, Homo sapiens
  misc_RNA (1)...(19): siRNA sense strand
guuccucguuaucgacuuc

SEQ ID NO: 1533668 - RNA, 19 nt, Homo sapiens
  misc_RNA (1)...(19): siRNA sense strand
gugcggagagacaaagaug

SEQ ID NO: 1533669 - RNA, 19 nt, Homo sapiens
  misc_RNA (1)...(19): siRNA sense strand
acugaccuccugccugaua

SEQ ID NO: 1533670 - RNA, 19 nt, Homo sapiens
  misc_RNA (1)...(19): siRNA sense strand
gacacuugccgaagaugga

SEQ ID NO: 1533671 - RNA, 19 nt, Homo sapiens
  misc_RNA (1)...(19): siRNA sense strand
ggacuauggggaagaacua

SEQ ID NO: 1533672 - RNA, 19 nt, Homo sapiens
  misc_RNA (1)...(19): siRNA sense strand
aaccaccucuccaucaucu

SEQ ID NO: 1533673 - RNA, 19 nt, Homo sapiens
  misc_RNA (1)...(19): siRNA sense strand
ucucagguaauccuuaugu

SEQ ID NO: 1533674 - RNA, 19 nt, Homo sapiens
  misc_RNA (1)...(19): siRNA sense strand
gacaucaucaaaaggaaua

SEQ ID NO: 1533675 - RNA, 19 nt, Homo sapiens
  misc_RNA (1)...(19): siRNA sense strand
ggaaauggauuacucuuug

SEQ ID NO: 1533676 - RNA, 19 nt, Homo sapiens
  misc_RNA (1)...(19): siRNA sense strand
ggaaagagacaguaauaaa

SEQ ID NO: 1533677 - RNA, 19 nt, Homo sapiens
  misc_RNA (1)...(19): siRNA sense strand
uaaguuggcccucuaguua

SEQ ID NO: 1533678 - RNA, 19 nt, Homo sapiens
  misc_RNA (1)...(19): siRNA sense strand
gcacacaggaaauggauua

SEQ ID NO: 1533679 - RNA, 19 nt, Homo sapiens
  misc_RNA (1)...(19): siRNA sense strand
ggauuacucuuuggauaua

SEQ ID NO: 1533680 - RNA, 19 nt, Homo sapiens
  misc_RNA (1)...(19): siRNA sense strand
cgggagaguugauuuauaa

SEQ ID NO: 1533681 - RNA, 19 nt, Homo sapiens
  misc_RNA (1)...(19): siRNA sense strand
ggaaagagauuuuaaagca

SEQ ID NO: 1533682 - RNA, 19 nt, Homo sapiens
  misc_RNA (1)...(19): siRNA sense strand
guaaauagcagaauucagu

SEQ ID NO: 1533683 - RNA, 19 nt, Homo sapiens
  misc_RNA (1)...(19): siRNA sense strand
gcacggaccuagcuaugau

SEQ ID NO: 1533684 - RNA, 19 nt, Homo sapiens
  misc_RNA (1)...(19): siRNA sense strand
ggaccuagcuaugaugugu

SEQ ID NO: 1533685 - RNA, 19 nt, Homo sapiens
  misc_RNA (1)...(19): siRNA sense strand
ggaagaacuugaaggaucu

SEQ ID NO: 1533686 - RNA, 19 nt, Homo sapiens
  misc_RNA (1)...(19): siRNA sense strand
caucaacaccucugacuuu

SEQ ID NO: 1533687 - RNA, 19 nt, Homo sapiens
  misc_RNA (1)...(19): siRNA sense strand
gcacauuucaccugauuug

SEQ ID NO: 1533688 - RNA, 19 nt, Homo sapiens
  misc_RNA (1)...(19): siRNA sense strand
ugacuucuguuucuguaaa

SEQ ID NO: 1533689 - RNA, 19 nt, Homo sapiens
  misc_RNA (1)...(19): siRNA sense strand
ccaacgcuauugaauuuau

SEQ ID NO: 1533690 - RNA, 19 nt, Homo sapiens
  misc_RNA (1)...(19): siRNA sense strand
gaagacaguaauaacauug

SEQ ID NO: 1533691 - RNA, 19 nt, Homo sapiens
  misc_RNA (1)...(19): siRNA sense strand
gagacugaaugugaaauug

SEQ ID NO: 1533692 - RNA, 19 nt, Homo sapiens
  misc_RNA (1)...(19): siRNA sense strand
uaucagguggcacaaauua

SEQ ID NO: 1533693 - RNA, 19 nt, Homo sapiens
  misc_RNA (1)...(19): siRNA sense strand
caacaccucugacuuugag

SEQ ID NO: 1533694 - RNA, 19 nt, Homo sapiens
  misc_RNA (1)...(19): siRNA sense strand
gaaauggauuacucuuugg

SEQ ID NO: 1533695 - RNA, 19 nt, Homo sapiens
  misc_RNA (1)...(19): siRNA sense strand
uuccaacgcuauugaauuu

SEQ ID NO: 1533696 - RNA, 19 nt, Homo sapiens
  misc_RNA (1)...(19): siRNA sense strand
gcuaagcaaaucuauguuu

SEQ ID NO: 1533697 - RNA, 19 nt, Homo sapiens
  misc_RNA (1)...(19): siRNA sense strand
cagcacauuucaccugauu

SEQ ID NO: 1533698 - RNA, 19 nt, Homo sapiens
  misc_RNA (1)...(19): siRNA sense strand
ucgaagcucuguaagaaga

SEQ ID NO: 1533699 - RNA, 19 nt, Homo sapiens
  misc_RNA (1)...(19): siRNA sense strand
acaagaaacuccuucacau

SEQ ID NO: 1533700 - RNA, 19 nt, Homo sapiens
  misc_RNA (1)...(19): siRNA sense strand
guggaaagagacaguaaua

SEQ ID NO: 1533701 - RNA, 19 nt, Homo sapiens
  misc_RNA (1)...(19): siRNA sense strand
gauuuaaguuggcccucua

SEQ ID NO: 1533702 - RNA, 19 nt, Homo sapiens
  misc_RNA (1)...(19): siRNA sense strand
acagaagccuggauacaau

SEQ ID NO: 1533703 - RNA, 19 nt, Homo sapiens
  misc_RNA (1)...(19): siRNA sense strand
ggccagauuuggauaagug

SEQ ID NO: 1533704 - RNA, 19 nt, Homo sapiens
  misc_RNA (1)...(19): siRNA sense strand
gggcuaagcaaaucuaugu

SEQ ID NO: 1533705 - RNA, 19 nt, Homo sapiens
  misc_RNA (1)...(19): siRNA sense strand
agucgaagcucuguaagaa

SEQ ID NO: 1533706 - RNA, 19 nt, Homo sapiens
  misc_RNA (1)...(19): siRNA sense strand
gauauaacaccaccuucaa

SEQ ID NO: 1533707 - RNA, 19 nt, Homo sapiens
  misc_RNA (1)...(19): siRNA sense strand
gacugaaugugaaauuguu

SEQ ID NO: 1533708 - RNA, 19 nt, Homo sapiens
  misc_RNA (1)...(19): siRNA sense strand
aaacucaucucagcgauuc

SEQ ID NO: 1533709 - RNA, 19 nt, Homo sapiens
  misc_RNA (1)...(19): siRNA sense strand
uggaucgguuugugauuua

SEQ ID NO: 1533710 - RNA, 19 nt, Homo sapiens
  misc_RNA (1)...(19): siRNA sense strand
guuaucagguggcacaaau

SEQ ID NO: 1533711 - RNA, 19 nt, Homo sapiens
  misc_RNA (1)...(19): siRNA sense strand
gaagcucuguaagaagaaa

SEQ ID NO: 1533712 - RNA, 19 nt, Homo sapiens
  misc_RNA (1)...(19): siRNA sense strand
ccaaaccagugcauuucaa

SEQ ID NO: 1533713 - RNA, 19 nt, Homo sapiens
  misc_RNA (1)...(19): siRNA sense strand
uggcaaagaaguaccauuu

SEQ ID NO: 1533714 - RNA, 19 nt, Homo sapiens
  misc_RNA (1)...(19): siRNA sense strand
ggauauaacaccaccuuca

SEQ ID NO: 1533715 - RNA, 19 nt, Homo sapiens
  misc_RNA (1)...(19): siRNA sense strand
uaaagcagcagucccaaau

SEQ ID NO: 1533716 - RNA, 19 nt, Homo sapiens
  misc_RNA (1)...(19): siRNA sense strand
gcucgggagaguugauuua

SEQ ID NO: 1533717 - RNA, 19 nt, Homo sapiens
  misc_RNA (1)...(19): siRNA sense strand
gcaguaaauagcagaauuc

SEQ ID NO: 1533718 - RNA, 19 nt, Homo sapiens
  misc_RNA (1)...(19): siRNA sense strand
gaagaaaaccauuggagaa

SEQ ID NO: 1533719 - RNA, 19 nt, Homo sapiens
  misc_RNA (1)...(19): siRNA sense strand
ggagacugaaugugaaauu

SEQ ID NO: 1533720 - RNA, 19 nt, Homo sapiens
  misc_RNA (1)...(19): siRNA sense strand
gcagaauucaguuacaaau

SEQ ID NO: 1533721 - RNA, 19 nt, Homo sapiens
  misc_RNA (1)...(19): siRNA sense strand
ggagaguugauuuauaaga

SEQ ID NO: 1533722 - RNA, 19 nt, Homo sapiens
  misc_RNA (1)...(19): siRNA sense strand
gaagugacgagacuguaug

SEQ ID NO: 1533723 - RNA, 19 nt, Homo sapiens
  misc_RNA (1)...(19): siRNA sense strand
ucgggagaguugauuuaua

SEQ ID NO: 1533724 - RNA, 19 nt, Homo sapiens
  misc_RNA (1)...(19): siRNA sense strand
ucagguggcacaaauuaaa

SEQ ID NO: 1533725 - RNA, 19 nt, Homo sapiens
  misc_RNA (1)...(19): siRNA sense strand
aagcagcagucccaaauag

SEQ ID NO: 1533726 - RNA, 19 nt, Homo sapiens
  misc_RNA (1)...(19): siRNA sense strand
gaauuuauggaaacguuug

SEQ ID NO: 1533727 - RNA, 19 nt, Homo sapiens
  misc_RNA (1)...(19): siRNA sense strand
ggauaagugaagacaguaa

SEQ ID NO: 1533728 - RNA, 19 nt, Homo sapiens
  misc_RNA (1)...(19): siRNA sense strand
gugaaggugggaauguuua

SEQ ID NO: 1533729 - RNA, 19 nt, Homo sapiens
  misc_RNA (1)...(19): siRNA sense strand
uagcagaauucaguuacaa

SEQ ID NO: 1533730 - RNA, 19 nt, Homo sapiens
  misc_RNA (1)...(19): siRNA sense strand
gcuguacugaggauuauuu

SEQ ID NO: 1533731 - RNA, 19 nt, Homo sapiens
  misc_RNA (1)...(19): siRNA sense strand
gcagugaaccaguggaaag

SEQ ID NO: 1533732 - RNA, 19 nt, Homo sapiens
  misc_RNA (1)...(19): siRNA sense strand
caagaaacuccuucacauc

SEQ ID NO: 1533733 - RNA, 19 nt, Homo sapiens
  misc_RNA (1)...(19): siRNA sense strand
caacccaggacacaagaaa

SEQ ID NO: 1533734 - RNA, 19 nt, Homo sapiens
  misc_RNA (1)...(19): siRNA sense strand
ugauuugagucgacgcuuu

SEQ ID NO: 1533735 - RNA, 19 nt, Homo sapiens
  misc_RNA (1)...(19): siRNA sense strand
gugaaccaguggaaagaga

SEQ ID NO: 1533736 - RNA, 19 nt, Homo sapiens
  misc_RNA (1)...(19): siRNA sense strand
caacgcuauugaauuuaug

SEQ ID NO: 1533737 - RNA, 19 nt, Homo sapiens
  misc_RNA (1)...(19): siRNA sense strand
guucagaagugacgagacu

SEQ ID NO: 1533738 - RNA, 19 nt, Homo sapiens
  misc_RNA (1)...(19): siRNA sense strand
caaaccagugcauuucaaa

SEQ ID NO: 1533739 - RNA, 19 nt, Homo sapiens
  misc_RNA (1)...(19): siRNA sense strand
ggaaacguuuguauuugcu

SEQ ID NO: 1533740 - RNA, 19 nt, Homo sapiens
  misc_RNA (1)...(19): siRNA sense strand
ggaucgguuugugauuuaa

SEQ ID NO: 1533741 - RNA, 19 nt, Homo sapiens
  misc_RNA (1)...(19): siRNA sense strand
gcacaaauuaaauccaucu

SEQ ID NO: 1533742 - RNA, 19 nt, Homo sapiens
  misc_RNA (1)...(19): siRNA sense strand
cuagcuaugauguguauaa

SEQ ID NO: 1533743 - RNA, 19 nt, Homo sapiens
  misc_RNA (1)...(19): siRNA sense strand
ggggagagacuaugauuuu

SEQ ID NO: 1533744 - RNA, 19 nt, Homo sapiens
  misc_RNA (1)...(19): siRNA sense strand
ucagaacccuuagcacaca

SEQ ID NO: 1533745 - RNA, 19 nt, Homo sapiens
  misc_RNA (1)...(19): siRNA sense strand
caaacuguaagacuuguau

SEQ ID NO: 1533746 - RNA, 19 nt, Homo sapiens
  misc_RNA (1)...(19): siRNA sense strand
gaguugcuguggaggaugu

SEQ ID NO: 1533747 - RNA, 19 nt, Homo sapiens
  misc_RNA (1)...(19): siRNA sense strand
ggcaacagaauuuauaaag

SEQ ID NO: 1533748 - RNA, 19 nt, Homo sapiens
  misc_RNA (1)...(19): siRNA sense strand
uaacagaagccuggauaca

SEQ ID NO: 1533749 - RNA, 19 nt, Homo sapiens
  misc_RNA (1)...(19): siRNA sense strand
gauaagugaagacaguaau

SEQ ID NO: 1533750 - RNA, 19 nt, Homo sapiens
  misc_RNA (1)...(19): siRNA sense strand
guaccuccauugacuucug

SEQ ID NO: 1533751 - RNA, 19 nt, Homo sapiens
  misc_RNA (1)...(19): siRNA sense strand
gagacacuccuacuguuuc

SEQ ID NO: 1533752 - RNA, 19 nt, Homo sapiens
  misc_RNA (1)...(19): siRNA sense strand
cauuucaccugauuugagu

SEQ ID NO: 1533753 - RNA, 19 nt, Homo sapiens
  misc_RNA (1)...(19): siRNA sense strand
ccaugcagaacuugaauug

SEQ ID NO: 1533754 - RNA, 19 nt, Homo sapiens
  misc_RNA (1)...(19): siRNA sense strand
cacaggaaauggauuacuc

SEQ ID NO: 1533755 - RNA, 19 nt, Homo sapiens
  misc_RNA (1)...(19): siRNA sense strand
guuccaacgcuauugaauu

SEQ ID NO: 1533756 - RNA, 19 nt, Homo sapiens
  misc_RNA (1)...(19): siRNA sense strand
gcagcagucccaaauaguc

SEQ ID NO: 1533757 - RNA, 19 nt, Homo sapiens
  misc_RNA (1)...(19): siRNA sense strand
gugcccaaguuuaaguuau

SEQ ID NO: 1533758 - RNA, 19 nt, Homo sapiens
  misc_RNA (1)...(19): siRNA sense strand
gaaacguuuguauuugcua

SEQ ID NO: 1533759 - RNA, 19 nt, Homo sapiens
  misc_RNA (1)...(19): siRNA sense strand
uuacagugcagagauuuaa

SEQ ID NO: 1533760 - RNA, 19 nt, Homo sapiens
  misc_RNA (1)...(19): siRNA sense strand
cccaguaguucuucuucaa

SEQ ID NO: 1533761 - RNA, 19 nt, Homo sapiens
  misc_RNA (1)...(19): siRNA sense strand
auggauuacucuuuggaua

SEQ ID NO: 1533762 - RNA, 19 nt, Homo sapiens
  misc_RNA (1)...(19): siRNA sense strand
agaagccuggauacaauua

SEQ ID NO: 1533763 - RNA, 19 nt, Homo sapiens
  misc_RNA (1)...(19): siRNA sense strand
aaagcagcagucccaaaua

SEQ ID NO: 1533764 - RNA, 19 nt, Homo sapiens
  misc_RNA (1)...(19): siRNA sense strand
cuccuacuguuucuauaaa

SEQ ID NO: 1533765 - RNA, 19 nt, Homo sapiens
  misc_RNA (1)...(19): siRNA sense strand
guaguucuucuucaaggaa

SEQ ID NO: 1533766 - RNA, 19 nt, Homo sapiens
  misc_RNA (1)...(19): siRNA sense strand
uggcacaaauuaaauccau

SEQ ID NO: 1533767 - RNA, 19 nt, Homo sapiens
  misc_RNA (1)...(19): siRNA sense strand
gugaagacaguaauaacau

SEQ ID NO: 1533768 - RNA, 19 nt, Homo sapiens
  misc_RNA (1)...(19): siRNA sense strand
gaacuugaauuggggacuu

SEQ ID NO: 1533769 - RNA, 19 nt, Homo sapiens
  misc_RNA (1)...(19): siRNA sense strand
guacugaggauuauuugcu

SEQ ID NO: 1533770 - RNA, 19 nt, Homo sapiens
  misc_RNA (1)...(19): siRNA sense strand
gaagguuccaacgcuauug

SEQ ID NO: 1533771 - RNA, 19 nt, Homo sapiens
  misc_RNA (1)...(19): siRNA sense strand
auacuuacauugcccaaac

SEQ ID NO: 1533772 - RNA, 19 nt, Homo sapiens
  misc_RNA (1)...(19): siRNA sense strand
cauuuguggugcccaaguu

SEQ ID NO: 1533773 - RNA, 19 nt, Homo sapiens
  misc_RNA (1)...(19): siRNA sense strand
agcaguaaauagcagaauu

SEQ ID NO: 1533774 - RNA, 19 nt, Homo sapiens
  misc_RNA (1)...(19): siRNA sense strand
gaggcacgguaccuuccaa

SEQ ID NO: 1533775 - RNA, 19 nt, Homo sapiens
  misc_RNA (1)...(19): siRNA sense strand
ggaaggaguucaccaccau

SEQ ID NO: 1533776 - RNA, 19 nt, Homo sapiens
  misc_RNA (1)...(19): siRNA sense strand
guaccagccucagccuaua

SEQ ID NO: 1533777 - RNA, 19 nt, Homo sapiens
  misc_RNA (1)...(19): siRNA sense strand
ggacuuauaccgggacuug

SEQ ID NO: 1533778 - RNA, 19 nt, Homo sapiens
  misc_RNA (1)...(19): siRNA sense strand
ggaggacgccagccuguau

SEQ ID NO: 1533779 - RNA, 19 nt, Homo sapiens
  misc_RNA (1)...(19): siRNA sense strand
ugaagggugugcucucaga

SEQ ID NO: 1533780 - RNA, 19 nt, Homo sapiens
  misc_RNA (1)...(19): siRNA sense strand
gagcagagugccaaacugu

SEQ ID NO: 1533781 - RNA, 19 nt, Homo sapiens
  misc_RNA (1)...(19): siRNA sense strand
cagacgaccuccuccugaa

SEQ ID NO: 1533782 - RNA, 19 nt, Homo sapiens
  misc_RNA (1)...(19): siRNA sense strand
gugcacagauggacacucu

SEQ ID NO: 1533783 - RNA, 19 nt, Homo sapiens
  misc_RNA (1)...(19): siRNA sense strand
gcugaagggugugcucuca

SEQ ID NO: 1533784 - RNA, 19 nt, Homo sapiens
  misc_RNA (1)...(19): siRNA sense strand
ggagcagagugccaaacug

SEQ ID NO: 1533785 - RNA, 19 nt, Homo sapiens
  misc_RNA (1)...(19): siRNA sense strand
gcuacagcgugcacagaug

SEQ ID NO: 1533786 - RNA, 19 nt, Homo sapiens
  misc_RNA (1)...(19): siRNA sense strand
gauggacacucugcucuac

SEQ ID NO: 1533787 - RNA, 19 nt, Homo sapiens
  misc_RNA (1)...(19): siRNA sense strand
gguaccagccucagccuau

SEQ ID NO: 1533788 - RNA, 19 nt, Homo sapiens
  misc_RNA (1)...(19): siRNA sense strand
gccagcagcccaccauaug

SEQ ID NO: 1533789 - RNA, 19 nt, Homo sapiens
  misc_RNA (1)...(19): siRNA sense strand
ucaccaccaucaagaccuu

SEQ ID NO: 1533790 - RNA, 19 nt, Homo sapiens
  misc_RNA (1)...(19): siRNA sense strand
uggacacucugcucuacaa

SEQ ID NO: 1533791 - RNA, 19 nt, Homo sapiens
  misc_RNA (1)...(19): siRNA sense strand
ggaguucaccaccaucaag

SEQ ID NO: 1533792 - RNA, 19 nt, Homo sapiens
  misc_RNA (1)...(19): siRNA sense strand
gcugcaugcugcccacugu

SEQ ID NO: 1533793 - RNA, 19 nt, Homo sapiens
  misc_RNA (1)...(19): siRNA sense strand
gacgaccuccuccugaaga

SEQ ID NO: 1533794 - RNA, 19 nt, Homo sapiens
  misc_RNA (1)...(19): siRNA sense strand
ccagaagaugggcuacgua

SEQ ID NO: 1533795 - RNA, 19 nt, Homo sapiens
  misc_RNA (1)...(19): siRNA sense strand
gaguucaccaccaucaaga

SEQ ID NO: 1533796 - RNA, 19 nt, Homo sapiens
  misc_RNA (1)...(19): siRNA sense strand
ggccagcagcccaccauau

SEQ ID NO: 1533797 - RNA, 19 nt, Homo sapiens
  misc_RNA (1)...(19): siRNA sense strand
acacucugcucuacaacag

SEQ ID NO: 1533798 - RNA, 19 nt, Homo sapiens
  misc_RNA (1)...(19): siRNA sense strand
ccacaaagcuugaagagua

SEQ ID NO: 1533799 - RNA, 19 nt, Homo sapiens
  misc_RNA (1)...(19): siRNA sense strand
gaaagaggcuucaaaucua

SEQ ID NO: 1533800 - RNA, 19 nt, Homo sapiens
  misc_RNA (1)...(19): siRNA sense strand
ggaauacucugucuaguuu

SEQ ID NO: 1533801 - RNA, 19 nt, Homo sapiens
  misc_RNA (1)...(19): siRNA sense strand
ggaguuagaugacuuugua

SEQ ID NO: 1533802 - RNA, 19 nt, Homo sapiens
  misc_RNA (1)...(19): siRNA sense strand
gagaaagaguuuacaagua

SEQ ID NO: 1533803 - RNA, 19 nt, Homo sapiens
  misc_RNA (1)...(19): siRNA sense strand
uaaagaagcugcuaacauc

SEQ ID NO: 1533804 - RNA, 19 nt, Homo sapiens
  misc_RNA (1)...(19): siRNA sense strand
gagcaugccuugaaauguu

SEQ ID NO: 1533805 - RNA, 19 nt, Homo sapiens
  misc_RNA (1)...(19): siRNA sense strand
gcuggaaggugacaugaua

SEQ ID NO: 1533806 - RNA, 19 nt, Homo sapiens
  misc_RNA (1)...(19): siRNA sense strand
gaugauggcucuaauucuu

SEQ ID NO: 1533807 - RNA, 19 nt, Homo sapiens
  misc_RNA (1)...(19): siRNA sense strand
gaaauuacuucagacagaa

SEQ ID NO: 1533808 - RNA, 19 nt, Homo sapiens
  misc_RNA (1)...(19): siRNA sense strand
ggaaagaggcuucaaaucu

SEQ ID NO: 1533809 - RNA, 19 nt, Homo sapiens
  misc_RNA (1)...(19): siRNA sense strand
gauaacauggugaacauua

SEQ ID NO: 1533810 - RNA, 19 nt, Homo sapiens
  misc_RNA (1)...(19): siRNA sense strand
gcuaacaucuugucacaug

SEQ ID NO: 1533811 - RNA, 19 nt, Homo sapiens
  misc_RNA (1)...(19): siRNA sense strand
caggaugccuugaagauuu

SEQ ID NO: 1533812 - RNA, 19 nt, Homo sapiens
  misc_RNA (1)...(19): siRNA sense strand
ugaugaaggugacaaagua

SEQ ID NO: 1533813 - RNA, 19 nt, Homo sapiens
  misc_RNA (1)...(19): siRNA sense strand
gaaaggagacggugagugu

SEQ ID NO: 1533814 - RNA, 19 nt, Homo sapiens
  misc_RNA (1)...(19): siRNA sense strand
gaagaaaaguccucugauu

SEQ ID NO: 1533815 - RNA, 19 nt, Homo sapiens
  misc_RNA (1)...(19): siRNA sense strand
gaagccagcuguaagaaag

SEQ ID NO: 1533816 - RNA, 19 nt, Homo sapiens
  misc_RNA (1)...(19): siRNA sense strand
ggagaaugaugaccuugaa

SEQ ID NO: 1533817 - RNA, 19 nt, Homo sapiens
  misc_RNA (1)...(19): siRNA sense strand
caagaaccauauucaaaga

SEQ ID NO: 1533818 - RNA, 19 nt, Homo sapiens
  misc_RNA (1)...(19): siRNA sense strand
ugucuuagcugcugauuug

SEQ ID NO: 1533819 - RNA, 19 nt, Homo sapiens
  misc_RNA (1)...(19): siRNA sense strand
uaaaugcucucgccaagga

SEQ ID NO: 1533820 - RNA, 19 nt, Homo sapiens
  misc_RNA (1)...(19): siRNA sense strand
gaacuuggaagacuuucua

SEQ ID NO: 1533821 - RNA, 19 nt, Homo sapiens
  misc_RNA (1)...(19): siRNA sense strand
gaugaagaauuccagaaga

SEQ ID NO: 1533822 - RNA, 19 nt, Homo sapiens
  misc_RNA (1)...(19): siRNA sense strand
ucauacagcuaaugcuaua

SEQ ID NO: 1533823 - RNA, 19 nt, Homo sapiens
  misc_RNA (1)...(19): siRNA sense strand
gauaauggcaagauuggua

SEQ ID NO: 1533824 - RNA, 19 nt, Homo sapiens
  misc_RNA (1)...(19): siRNA sense strand
ggaagaacuuggaagacuu

SEQ ID NO: 1533825 - RNA, 19 nt, Homo sapiens
  misc_RNA (1)...(19): siRNA sense strand
gacagaaaguuaucaagug

SEQ ID NO: 1533826 - RNA, 19 nt, Homo sapiens
  misc_RNA (1)...(19): siRNA sense strand
guccaaggcuacacagaua

SEQ ID NO: 1533827 - RNA, 19 nt, Homo sapiens
  misc_RNA (1)...(19): siRNA sense strand
guaugaggauguuucaauu

SEQ ID NO: 1533828 - RNA, 19 nt, Homo sapiens
  misc_RNA (1)...(19): siRNA sense strand
uaaagaagagguagagaaa

SEQ ID NO: 1533829 - RNA, 19 nt, Homo sapiens
  misc_RNA (1)...(19): siRNA sense strand
uaacgucagugauaauaug

SEQ ID NO: 1533830 - RNA, 19 nt, Homo sapiens
  misc_RNA (1)...(19): siRNA sense strand
aaagaggcuucaaaucuaa

SEQ ID NO: 1533831 - RNA, 19 nt, Homo sapiens
  misc_RNA (1)...(19): siRNA sense strand
ugaaugagcuacaggaaca

SEQ ID NO: 1533832 - RNA, 19 nt, Homo sapiens
  misc_RNA (1)...(19): siRNA sense strand
auacaggauucgauaguua

SEQ ID NO: 1533833 - RNA, 19 nt, Homo sapiens
  misc_RNA (1)...(19): siRNA sense strand
gcacuaaagacuguugaua

SEQ ID NO: 1533834 - RNA, 19 nt, Homo sapiens
  misc_RNA (1)...(19): siRNA sense strand
ugaaagaaaguccacauuu

SEQ ID NO: 1533835 - RNA, 19 nt, Homo sapiens
  misc_RNA (1)...(19): siRNA sense strand
gggauuaagucaccuaaag

SEQ ID NO: 1533836 - RNA, 19 nt, Homo sapiens
  misc_RNA (1)...(19): siRNA sense strand
gaagaacuuggaagacuuu

SEQ ID NO: 1533837 - RNA, 19 nt, Homo sapiens
  misc_RNA (1)...(19): siRNA sense strand
gaagaauuccagaagauug

SEQ ID NO: 1533838 - RNA, 19 nt, Homo sapiens
  misc_RNA (1)...(19): siRNA sense strand
gcauggguaucccuauaaa

SEQ ID NO: 1533839 - RNA, 19 nt, Homo sapiens
  misc_RNA (1)...(19): siRNA sense strand
gauaaaagguggucgaguu

SEQ ID NO: 1533840 - RNA, 19 nt, Homo sapiens
  misc_RNA (1)...(19): siRNA sense strand
ucucugaccucaagacauu

SEQ ID NO: 1533841 - RNA, 19 nt, Homo sapiens
  misc_RNA (1)...(19): siRNA sense strand
gacugaagcuggugaaaca

SEQ ID NO: 1533842 - RNA, 19 nt, Homo sapiens
  misc_RNA (1)...(19): siRNA sense strand
agaaagaguuuacaaguac

SEQ ID NO: 1533843 - RNA, 19 nt, Homo sapiens
  misc_RNA (1)...(19): siRNA sense strand
guuaagacauguaccugaa

SEQ ID NO: 1533844 - RNA, 19 nt, Homo sapiens
  misc_RNA (1)...(19): siRNA sense strand
agaaugaucuaguugaugu

SEQ ID NO: 1533845 - RNA, 19 nt, Homo sapiens
  misc_RNA (1)...(19): siRNA sense strand
gcaauuaguacucuggaaa

SEQ ID NO: 1533846 - RNA, 19 nt, Homo sapiens
  misc_RNA (1)...(19): siRNA sense strand
gcaaaauuauggagaauga

SEQ ID NO: 1533847 - RNA, 19 nt, Homo sapiens
  misc_RNA (1)...(19): siRNA sense strand
gaaguaacccauggauauu

SEQ ID NO: 1533848 - RNA, 19 nt, Homo sapiens
  misc_RNA (1)...(19): siRNA sense strand
ugaaguaacccauggauau

SEQ ID NO: 1533849 - RNA, 19 nt, Homo sapiens
  misc_RNA (1)...(19): siRNA sense strand
ggagaaagaguuuacaagu

SEQ ID NO: 1533850 - RNA, 19 nt, Homo sapiens
  misc_RNA (1)...(19): siRNA sense strand
cagauacucuuagcuacua

SEQ ID NO: 1533851 - RNA, 19 nt, Homo sapiens
  misc_RNA (1)...(19): siRNA sense strand
uagcauggguaucccuaua

SEQ ID NO: 1533852 - RNA, 19 nt, Homo sapiens
  misc_RNA (1)...(19): siRNA sense strand
gaaaugcgacaggcacuaa

SEQ ID NO: 1533853 - RNA, 19 nt, Homo sapiens
  misc_RNA (1)...(19): siRNA sense strand
ugaaugaucuuccagugau

SEQ ID NO: 1533854 - RNA, 19 nt, Homo sapiens
  misc_RNA (1)...(19): siRNA sense strand
augaugaccuugaaucuaa

SEQ ID NO: 1533855 - RNA, 19 nt, Homo sapiens
  misc_RNA (1)...(19): siRNA sense strand
ucuaagaaauguugggauu

SEQ ID NO: 1533856 - RNA, 19 nt, Homo sapiens
  misc_RNA (1)...(19): siRNA sense strand
guacaagccucaguaaguc

SEQ ID NO: 1533857 - RNA, 19 nt, Homo sapiens
  misc_RNA (1)...(19): siRNA sense strand
caaugaagcccuuaacugu

SEQ ID NO: 1533858 - RNA, 19 nt, Homo sapiens
  misc_RNA (1)...(19): siRNA sense strand
uugcuaagcuuaacccaaa

SEQ ID NO: 1533859 - RNA, 19 nt, Homo sapiens
  misc_RNA (1)...(19): siRNA sense strand
gcagugguuuacauguuaa

SEQ ID NO: 1533860 - RNA, 19 nt, Homo sapiens
  misc_RNA (1)...(19): siRNA sense strand
gugguaagauuuaugugaa

SEQ ID NO: 1533861 - RNA, 19 nt, Homo sapiens
  misc_RNA (1)...(19): siRNA sense strand
gaagauaacauggugaaca

SEQ ID NO: 1533862 - RNA, 19 nt, Homo sapiens
  misc_RNA (1)...(19): siRNA sense strand
aguaacccauggauauuua

SEQ ID NO: 1533863 - RNA, 19 nt, Homo sapiens
  misc_RNA (1)...(19): siRNA sense strand
gcgugaugcugccagguua

SEQ ID NO: 1533864 - RNA, 19 nt, Homo sapiens
  misc_RNA (1)...(19): siRNA sense strand
caaagaauggcauaaacuu

SEQ ID NO: 1533865 - RNA, 19 nt, Homo sapiens
  misc_RNA (1)...(19): siRNA sense strand
gaucaccuuugaaugaaau

SEQ ID NO: 1533866 - RNA, 19 nt, Homo sapiens
  misc_RNA (1)...(19): siRNA sense strand
gaacuauuaaccacaagaa

SEQ ID NO: 1533867 - RNA, 19 nt, Homo sapiens
  misc_RNA (1)...(19): siRNA sense strand
gaagugguaagauuuaugu

SEQ ID NO: 1533868 - RNA, 19 nt, Homo sapiens
  misc_RNA (1)...(19): siRNA sense strand
gaaagaguuuacaaguaca

SEQ ID NO: 1533869 - RNA, 19 nt, Homo sapiens
  misc_RNA (1)...(19): siRNA sense strand
gacagacacuaguagaaau

SEQ ID NO: 1533870 - RNA, 19 nt, Homo sapiens
  misc_RNA (1)...(19): siRNA sense strand
ccuauaaaccgugaaauuu

SEQ ID NO: 1533871 - RNA, 19 nt, Homo sapiens
  misc_RNA (1)...(19): siRNA sense strand
aaaaggaaaugcugucuaa

SEQ ID NO: 1533872 - RNA, 19 nt, Homo sapiens
  misc_RNA (1)...(19): siRNA sense strand
ccauggauauuuacacuca

SEQ ID NO: 1533873 - RNA, 19 nt, Homo sapiens
  misc_RNA (1)...(19): siRNA sense strand
caauagagaaggaaauuuc

SEQ ID NO: 1533874 - RNA, 19 nt, Homo sapiens
  misc_RNA (1)...(19): siRNA sense strand
uaagaaagcauuccagucu

SEQ ID NO: 1533875 - RNA, 19 nt, Homo sapiens
  misc_RNA (1)...(19): siRNA sense strand
gaugacguguuugcuguuu

SEQ ID NO: 1533876 - RNA, 19 nt, Homo sapiens
  misc_RNA (1)...(19): siRNA sense strand
ucaguaagucucuggauaa

SEQ ID NO: 1533877 - RNA, 19 nt, Homo sapiens
  misc_RNA (1)...(19): siRNA sense strand
uuaaagcacagguaaguaa

SEQ ID NO: 1533878 - RNA, 19 nt, Homo sapiens
  misc_RNA (1)...(19): siRNA sense strand
acacagauacucuuagcua

SEQ ID NO: 1533879 - RNA, 19 nt, Homo sapiens
  misc_RNA (1)...(19): siRNA sense strand
ggaguuugagcccagaaua

SEQ ID NO: 1533880 - RNA, 19 nt, Homo sapiens
  misc_RNA (1)...(19): siRNA sense strand
caugaaaguggcaagguua

SEQ ID NO: 1533881 - RNA, 19 nt, Homo sapiens
  misc_RNA (1)...(19): siRNA sense strand
guuguaacgucagugauaa

SEQ ID NO: 1533882 - RNA, 19 nt, Homo sapiens
  misc_RNA (1)...(19): siRNA sense strand
gagggacacccagaaauuu

SEQ ID NO: 1533883 - RNA, 19 nt, Homo sapiens
  misc_RNA (1)...(19): siRNA sense strand
gauuaagucaccuaaagaa

SEQ ID NO: 1533884 - RNA, 19 nt, Homo sapiens
  misc_RNA (1)...(19): siRNA sense strand
guacagcguucacaagacu

SEQ ID NO: 1533885 - RNA, 19 nt, Homo sapiens
  misc_RNA (1)...(19): siRNA sense strand
gguaaacgagauuaaagaa

SEQ ID NO: 1533886 - RNA, 19 nt, Homo sapiens
  misc_RNA (1)...(19): siRNA sense strand
gaacauuaaagacuguaug

SEQ ID NO: 1533887 - RNA, 19 nt, Homo sapiens
  misc_RNA (1)...(19): siRNA sense strand
gggaagaacuuggaagacu

SEQ ID NO: 1533888 - RNA, 19 nt, Homo sapiens
  misc_RNA (1)...(19): siRNA sense strand
acagaaaguuaucaagugu

SEQ ID NO: 1533889 - RNA, 19 nt, Homo sapiens
  misc_RNA (1)...(19): siRNA sense strand
cuuugcaucuugagaauuu

SEQ ID NO: 1533890 - RNA, 19 nt, Homo sapiens
  misc_RNA (1)...(19): siRNA sense strand
caccggaaauuaggaguuu

SEQ ID NO: 1533891 - RNA, 19 nt, Homo sapiens
  misc_RNA (1)...(19): siRNA sense strand
ccagaaugaucuaguugau

SEQ ID NO: 1533892 - RNA, 19 nt, Homo sapiens
  misc_RNA (1)...(19): siRNA sense strand
auauggagguggauuuaaa

SEQ ID NO: 1533893 - RNA, 19 nt, Homo sapiens
  misc_RNA (1)...(19): siRNA sense strand
gcaaaaguaguaaggaaua

SEQ ID NO: 1533894 - RNA, 19 nt, Homo sapiens
  misc_RNA (1)...(19): siRNA sense strand
gaauggaaugguggaguua

SEQ ID NO: 1533895 - RNA, 19 nt, Homo sapiens
  misc_RNA (1)...(19): siRNA sense strand
uuaagaagaucacagaacu

SEQ ID NO: 1533896 - RNA, 19 nt, Homo sapiens
  misc_RNA (1)...(19): siRNA sense strand
uaauauggagguggauuua

SEQ ID NO: 1533897 - RNA, 19 nt, Homo sapiens
  misc_RNA (1)...(19): siRNA sense strand
ggauuaagucaccuaaaga

SEQ ID NO: 1533898 - RNA, 19 nt, Homo sapiens
  misc_RNA (1)...(19): siRNA sense strand
aagcauggcuacaacauug

SEQ ID NO: 1533899 - RNA, 19 nt, Homo sapiens
  misc_RNA (1)...(19): siRNA sense strand
gaugaugagguccagauua

SEQ ID NO: 1533900 - RNA, 19 nt, Homo sapiens
  misc_RNA (1)...(19): siRNA sense strand
ugacccaggugaagacuuu

SEQ ID NO: 1533901 - RNA, 19 nt, Homo sapiens
  misc_RNA (1)...(19): siRNA sense strand
gaugcugccugacaaguug

SEQ ID NO: 1533902 - RNA, 19 nt, Homo sapiens
  misc_RNA (1)...(19): siRNA sense strand
ggacaaagaagacagugau

SEQ ID NO: 1533903 - RNA, 19 nt, Homo sapiens
  misc_RNA (1)...(19): siRNA sense strand
ggagaagcauggcuacaac

SEQ ID NO: 1533904 - RNA, 19 nt, Homo sapiens
  misc_RNA (1)...(19): siRNA sense strand
gaagcauggcuacaacauu

SEQ ID NO: 1533905 - RNA, 19 nt, Homo sapiens
  misc_RNA (1)...(19): siRNA sense strand
ugaaauacuacuacucuug

SEQ ID NO: 1533906 - RNA, 19 nt, Homo sapiens
  misc_RNA (1)...(19): siRNA sense strand
cagccgaacuagugugaug

SEQ ID NO: 1533907 - RNA, 19 nt, Homo sapiens
  misc_RNA (1)...(19): siRNA sense strand
gaccacagaugagcagcuu

SEQ ID NO: 1533908 - RNA, 19 nt, Homo sapiens
  misc_RNA (1)...(19): siRNA sense strand
gcuccgaggucuugacucu

SEQ ID NO: 1533909 - RNA, 19 nt, Homo sapiens
  misc_RNA (1)...(19): siRNA sense strand
aggacaaggugcuguuuga

SEQ ID NO: 1533910 - RNA, 19 nt, Homo sapiens
  misc_RNA (1)...(19): siRNA sense strand
caaagaagacagugaugag

SEQ ID NO: 1533911 - RNA, 19 nt, Homo sapiens
  misc_RNA (1)...(19): siRNA sense strand
ggacaaggugcuguuugaa

SEQ ID NO: 1533912 - RNA, 19 nt, Homo sapiens
  misc_RNA (1)...(19): siRNA sense strand
ggugaaauacuacuacucu

SEQ ID NO: 1533913 - RNA, 19 nt, Homo sapiens
  misc_RNA (1)...(19): siRNA sense strand
agacagugaugagcucgaa

SEQ ID NO: 1533914 - RNA, 19 nt, Homo sapiens
  misc_RNA (1)...(19): siRNA sense strand
gaugagguccagauuacau

SEQ ID NO: 1533915 - RNA, 19 nt, Homo sapiens
  misc_RNA (1)...(19): siRNA sense strand
gcaugaagcagacgaacag

SEQ ID NO: 1533916 - RNA, 19 nt, Homo sapiens
  misc_RNA (1)...(19): siRNA sense strand
cugcagaucccaagagaga

SEQ ID NO: 1533917 - RNA, 19 nt, Homo sapiens
  misc_RNA (1)...(19): siRNA sense strand
gugaaauacuacuacucuu

SEQ ID NO: 1533918 - RNA, 19 nt, Homo sapiens
  misc_RNA (1)...(19): siRNA sense strand
ggagggcgguauugaucca

SEQ ID NO: 1533919 - RNA, 19 nt, Homo sapiens
  misc_RNA (1)...(19): siRNA sense strand
gcgcugggcaugcuucugu

SEQ ID NO: 1533920 - RNA, 19 nt, Homo sapiens
  misc_RNA (1)...(19): siRNA sense strand
gggcgguauugauccacua

SEQ ID NO: 1533921 - RNA, 19 nt, Homo sapiens
  misc_RNA (1)...(19): siRNA sense strand
acaaagaagacagugauga

SEQ ID NO: 1533922 - RNA, 19 nt, Homo sapiens
  misc_RNA (1)...(19): siRNA sense strand
acauugcgauggccaagga

SEQ ID NO: 1533923 - RNA, 19 nt, Homo sapiens
  misc_RNA (1)...(19): siRNA sense strand
agacuuucuuugugagcua

SEQ ID NO: 1533924 - RNA, 19 nt, Homo sapiens
  misc_RNA (1)...(19): siRNA sense strand
gaggacaaggugcuguuug

SEQ ID NO: 1533925 - RNA, 19 nt, Homo sapiens
  misc_RNA (1)...(19): siRNA sense strand
guagguauggcaaagacuu

SEQ ID NO: 1533926 - RNA, 19 nt, Homo sapiens
  misc_RNA (1)...(19): siRNA sense strand
ugucagaugccaagcuuga

SEQ ID NO: 1533927 - RNA, 19 nt, Homo sapiens
  misc_RNA (1)...(19): siRNA sense strand
caaccacugugugucagau

SEQ ID NO: 1533928 - RNA, 19 nt, Homo sapiens
  misc_RNA (1)...(19): siRNA sense strand
cagaggugauugggaacaa

SEQ ID NO: 1533929 - RNA, 19 nt, Homo sapiens
  misc_RNA (1)...(19): siRNA sense strand
uccgaggucuugacucuca

SEQ ID NO: 1533930 - RNA, 19 nt, Homo sapiens
  misc_RNA (1)...(19): siRNA sense strand
gaggugauugggaacaaga

SEQ ID NO: 1533931 - RNA, 19 nt, Homo sapiens
  misc_RNA (1)...(19): siRNA sense strand
caagccauccguagguaug

SEQ ID NO: 1533932 - RNA, 19 nt, Homo sapiens
  misc_RNA (1)...(19): siRNA sense strand
aggaggugcugcaggaaug

SEQ ID NO: 1533933 - RNA, 19 nt, Homo sapiens
  misc_RNA (1)...(19): siRNA sense strand
ggacaguagaggacaaggu

SEQ ID NO: 1533934 - RNA, 19 nt, Homo sapiens
  misc_RNA (1)...(19): siRNA sense strand
gaggaggugcugcaggaau

SEQ ID NO: 1533935 - RNA, 19 nt, Homo sapiens
  misc_RNA (1)...(19): siRNA sense strand
cuagugugauggacagaca

SEQ ID NO: 1533936 - RNA, 19 nt, Homo sapiens
  misc_RNA (1)...(19): siRNA sense strand
gagaagcauggcuacaaca

SEQ ID NO: 1533937 - RNA, 19 nt, Homo sapiens
  misc_RNA (1)...(19): siRNA sense strand
augaugagguccagauuac

SEQ ID NO: 1533938 - RNA, 19 nt, Homo sapiens
  misc_RNA (1)...(19): siRNA sense strand
ugugucagaugccaagcuu

SEQ ID NO: 1533939 - RNA, 19 nt, Homo sapiens
  misc_RNA (1)...(19): siRNA sense strand
gacaaagaagacagugaug

SEQ ID NO: 1533940 - RNA, 19 nt, Homo sapiens
  misc_RNA (1)...(19): siRNA sense strand
uaagcacgauguggagaag

SEQ ID NO: 1533941 - RNA, 19 nt, Homo sapiens
  misc_RNA (1)...(19): siRNA sense strand
gacaaggugcuguuugaac

SEQ ID NO: 1533942 - RNA, 19 nt, Homo sapiens
  misc_RNA (1)...(19): siRNA sense strand
aaauacuacuacucuugga

SEQ ID NO: 1533943 - RNA, 19 nt, Homo sapiens
  misc_RNA (1)...(19): siRNA sense strand
ccacagaugagcagcuuuu

SEQ ID NO: 1533944 - RNA, 19 nt, Homo sapiens
  misc_RNA (1)...(19): siRNA sense strand
caaggacaaagaagacagu

SEQ ID NO: 1533945 - RNA, 19 nt, Homo sapiens
  misc_RNA (1)...(19): siRNA sense strand
guucaagccauccguaggu

SEQ ID NO: 1533946 - RNA, 19 nt, Homo sapiens
  misc_RNA (1)...(19): siRNA sense strand
ggacaaggauugauagaaa

SEQ ID NO: 1533947 - RNA, 19 nt, Homo sapiens
  misc_RNA (1)...(19): siRNA sense strand
ggacuacgguauucaagaa

SEQ ID NO: 1533948 - RNA, 19 nt, Homo sapiens
  misc_RNA (1)...(19): siRNA sense strand
gaaaacggacgauguauua

SEQ ID NO: 1533949 - RNA, 19 nt, Homo sapiens
  misc_RNA (1)...(19): siRNA sense strand
aaucagagguggcuuauca

SEQ ID NO: 1533950 - RNA, 19 nt, Homo sapiens
  misc_RNA (1)...(19): siRNA sense strand
gaaacaaaucgacaaucua

SEQ ID NO: 1533951 - RNA, 19 nt, Homo sapiens
  misc_RNA (1)...(19): siRNA sense strand
gcauuuacguguggcuuaa

SEQ ID NO: 1533952 - RNA, 19 nt, Homo sapiens
  misc_RNA (1)...(19): siRNA sense strand
agaaacaaaucgacaaucu

SEQ ID NO: 1533953 - RNA, 19 nt, Homo sapiens
  misc_RNA (1)...(19): siRNA sense strand
ggauugauagaaagguuua

SEQ ID NO: 1533954 - RNA, 19 nt, Homo sapiens
  misc_RNA (1)...(19): siRNA sense strand
gauggugucuggaguguac

SEQ ID NO: 1533955 - RNA, 19 nt, Homo sapiens
  misc_RNA (1)...(19): siRNA sense strand
uguaacagcugaagugucu

SEQ ID NO: 1533956 - RNA, 19 nt, Homo sapiens
  misc_RNA (1)...(19): siRNA sense strand
ugaguuagauaucaugaag

SEQ ID NO: 1533957 - RNA, 19 nt, Homo sapiens
  misc_RNA (1)...(19): siRNA sense strand
guucaaggaugaguuagau

SEQ ID NO: 1533958 - RNA, 19 nt, Homo sapiens
  misc_RNA (1)...(19): siRNA sense strand
gacaaggauugauagaaag

SEQ ID NO: 1533959 - RNA, 19 nt, Homo sapiens
  misc_RNA (1)...(19): siRNA sense strand
aaggacaaaucaucaguau

SEQ ID NO: 1533960 - RNA, 19 nt, Homo sapiens
  misc_RNA (1)...(19): siRNA sense strand
gcaaauuucaggugaugau

SEQ ID NO: 1533961 - RNA, 19 nt, Homo sapiens
  misc_RNA (1)...(19): siRNA sense strand
agagguggcuuaucaaacu

SEQ ID NO: 1533962 - RNA, 19 nt, Homo sapiens
  misc_RNA (1)...(19): siRNA sense strand
cugcaagguucaaggauga

SEQ ID NO: 1533963 - RNA, 19 nt, Homo sapiens
  misc_RNA (1)...(19): siRNA sense strand
ucaaggaugaguuagauau

SEQ ID NO: 1533964 - RNA, 19 nt, Homo sapiens
  misc_RNA (1)...(19): siRNA sense strand
caagaaacaaaucgacaau

SEQ ID NO: 1533965 - RNA, 19 nt, Homo sapiens
  misc_RNA (1)...(19): siRNA sense strand
gagauggugucuggagugu

SEQ ID NO: 1533966 - RNA, 19 nt, Homo sapiens
  misc_RNA (1)...(19): siRNA sense strand
uaaggacaaaucaucagua

SEQ ID NO: 1533967 - RNA, 19 nt, Homo sapiens
  misc_RNA (1)...(19): siRNA sense strand
aacggacgauguauuacua

SEQ ID NO: 1533968 - RNA, 19 nt, Homo sapiens
  misc_RNA (1)...(19): siRNA sense strand
caaaagauacugcaagguu

SEQ ID NO: 1533969 - RNA, 19 nt, Homo sapiens
  misc_RNA (1)...(19): siRNA sense strand
gacgauguauuacuaagcu

SEQ ID NO: 1533970 - RNA, 19 nt, Homo sapiens
  misc_RNA (1)...(19): siRNA sense strand
aaugccugcuugcaaauuu

SEQ ID NO: 1533971 - RNA, 19 nt, Homo sapiens
  misc_RNA (1)...(19): siRNA sense strand
caaauuucaggugaugaua

SEQ ID NO: 1533972 - RNA, 19 nt, Homo sapiens
  misc_RNA (1)...(19): siRNA sense strand
uuacuaagcuggaaaacau

SEQ ID NO: 1533973 - RNA, 19 nt, Homo sapiens
  misc_RNA (1)...(19): siRNA sense strand
gagguggcuuaucaaacuu

SEQ ID NO: 1533974 - RNA, 19 nt, Homo sapiens
  misc_RNA (1)...(19): siRNA sense strand
gacaaucuaaggacaaauc

SEQ ID NO: 1533975 - RNA, 19 nt, Homo sapiens
  misc_RNA (1)...(19): siRNA sense strand
ucaagaaacaaaucgacaa

SEQ ID NO: 1533976 - RNA, 19 nt, Homo sapiens
  misc_RNA (1)...(19): siRNA sense strand
caaaucgacaaucuaagga

SEQ ID NO: 1533977 - RNA, 19 nt, Homo sapiens
  misc_RNA (1)...(19): siRNA sense strand
aaggaugaguuagauauca

SEQ ID NO: 1533978 - RNA, 19 nt, Homo sapiens
  misc_RNA (1)...(19): siRNA sense strand
uucaaugccugcuugcaaa

SEQ ID NO: 1533979 - RNA, 19 nt, Homo sapiens
  misc_RNA (1)...(19): siRNA sense strand
ggaaaacggacgauguauu

SEQ ID NO: 1533980 - RNA, 19 nt, Homo sapiens
  misc_RNA (1)...(19): siRNA sense strand
ucagagguggcuuaucaaa

SEQ ID NO: 1533981 - RNA, 19 nt, Homo sapiens
  misc_RNA (1)...(19): siRNA sense strand
ucgacaaucuaaggacaaa

SEQ ID NO: 1533982 - RNA, 19 nt, Homo sapiens
  misc_RNA (1)...(19): siRNA sense strand
gggacaaggauugauagaa

SEQ ID NO: 1533983 - RNA, 19 nt, Homo sapiens
  misc_RNA (1)...(19): siRNA sense strand
aaggauugauagaaagguu

SEQ ID NO: 1533984 - RNA, 19 nt, Homo sapiens
  misc_RNA (1)...(19): siRNA sense strand
aagguucaaggaugaguua

SEQ ID NO: 1533985 - RNA, 19 nt, Homo sapiens
  misc_RNA (1)...(19): siRNA sense strand
cuuaaucagagguggcuua

SEQ ID NO: 1533986 - RNA, 19 nt, Homo sapiens
  misc_RNA (1)...(19): siRNA sense strand
cuacgguauucaagaaaca

SEQ ID NO: 1533987 - RNA, 19 nt, Homo sapiens
  misc_RNA (1)...(19): siRNA sense strand
acaaaucgacaaucuaagg

SEQ ID NO: 1533988 - RNA, 19 nt, Homo sapiens
  misc_RNA (1)...(19): siRNA sense strand
aaucuaaggacaaaucauc

SEQ ID NO: 1533989 - RNA, 19 nt, Homo sapiens
  misc_RNA (1)...(19): siRNA sense strand
caaggaugaguuagauauc

SEQ ID NO: 1533990 - RNA, 19 nt, Homo sapiens
  misc_RNA (1)...(19): siRNA sense strand
aauuucaggugaugauaca

SEQ ID NO: 1533991 - RNA, 19 nt, Homo sapiens
  misc_RNA (1)...(19): siRNA sense strand
gguauucaagaaacaaauc

SEQ ID NO: 1533992 - RNA, 19 nt, Homo sapiens
  misc_RNA (1)...(19): siRNA sense strand
ugucuggaguguacaaguc

SEQ ID NO: 1533993 - RNA, 19 nt, Homo sapiens
  misc_RNA (1)...(19): siRNA sense strand
aaagauacugcaagguuca

SEQ ID NO: 1533994 - RNA, 19 nt, Homo sapiens
  misc_RNA (1)...(19): siRNA sense strand
uugcaaauuucaggugaug

SEQ ID NO: 1533995 - RNA, 19 nt, Homo sapiens
  misc_RNA (1)...(19): siRNA sense strand
cuuaucaaacuugggaaua

SEQ ID NO: 1533996 - RNA, 19 nt, Homo sapiens
  misc_RNA (1)...(19): siRNA sense strand
uauuguaacagcugaagug

SEQ ID NO: 1533997 - RNA, 19 nt, Homo sapiens
  misc_RNA (1)...(19): siRNA sense strand
gaagagggaugacaaguau

SEQ ID NO: 1533998 - RNA, 19 nt, Homo sapiens
  misc_RNA (1)...(19): siRNA sense strand
ucaaagagaugaagaagaa

SEQ ID NO: 1533999 - RNA, 19 nt, Homo sapiens
  misc_RNA (1)...(19): siRNA sense strand
gcaaggagaucacggacuu

SEQ ID NO: 1534000 - RNA, 19 nt, Homo sapiens
  misc_RNA (1)...(19): siRNA sense strand
agaagaagguggcaaauga

SEQ ID NO: 1534001 - RNA, 19 nt, Homo sapiens
  misc_RNA (1)...(19): siRNA sense strand
guacaaggauggcauggaa

SEQ ID NO: 1534002 - RNA, 19 nt, Homo sapiens
  misc_RNA (1)...(19): siRNA sense strand
ugacugaugugacuaaaga

SEQ ID NO: 1534003 - RNA, 19 nt, Homo sapiens
  misc_RNA (1)...(19): siRNA sense strand
gcgcaugccuggaguguga

SEQ ID NO: 1534004 - RNA, 19 nt, Homo sapiens
  misc_RNA (1)...(19): siRNA sense strand
ggaugacucugacaacuau

SEQ ID NO: 1534005 - RNA, 19 nt, Homo sapiens
  misc_RNA (1)...(19): siRNA sense strand
ggccaaggauccuguuaaa

SEQ ID NO: 1534006 - RNA, 19 nt, Homo sapiens
  misc_RNA (1)...(19): siRNA sense strand
ccaaguacaugcugguuau

SEQ ID NO: 1534007 - RNA, 19 nt, Homo sapiens
  misc_RNA (1)...(19): siRNA sense strand
ucaggaagcucaaagagau

SEQ ID NO: 1534008 - RNA, 19 nt, Homo sapiens
  misc_RNA (1)...(19): siRNA sense strand
gaagguggcaaaugagaaa

SEQ ID NO: 1534009 - RNA, 19 nt, Homo sapiens
  misc_RNA (1)...(19): siRNA sense strand
agaaagagaugcuggagau

SEQ ID NO: 1534010 - RNA, 19 nt, Homo sapiens
  misc_RNA (1)...(19): siRNA sense strand
caaggaguccgccaagaua

SEQ ID NO: 1534011 - RNA, 19 nt, Homo sapiens
  misc_RNA (1)...(19): siRNA sense strand
ccaaagugcccaagaaaga

SEQ ID NO: 1534012 - RNA, 19 nt, Homo sapiens
  misc_RNA (1)...(19): siRNA sense strand
aagcagagcugaucaucga

SEQ ID NO: 1534013 - RNA, 19 nt, Homo sapiens
  misc_RNA (1)...(19): siRNA sense strand
gaaagugaagccucuguau

SEQ ID NO: 1534014 - RNA, 19 nt, Homo sapiens
  misc_RNA (1)...(19): siRNA sense strand
aagcucaucuuucccagua

SEQ ID NO: 1534015 - RNA, 19 nt, Homo sapiens
  misc_RNA (1)...(19): siRNA sense strand
ccaagaagaagcagaagaa

SEQ ID NO: 1534016 - RNA, 19 nt, Homo sapiens
  misc_RNA (1)...(19): siRNA sense strand
uaacagaaggucaagagaa

SEQ ID NO: 1534017 - RNA, 19 nt, Homo sapiens
  misc_RNA (1)...(19): siRNA sense strand
acaaagagaccaagguuga

SEQ ID NO: 1534018 - RNA, 19 nt, Homo sapiens
  misc_RNA (1)...(19): siRNA sense strand
aacagaaggucaagagaaa

SEQ ID NO: 1534019 - RNA, 19 nt, Homo sapiens
  misc_RNA (1)...(19): siRNA sense strand
guacugccaucgucacugu

SEQ ID NO: 1534020 - RNA, 19 nt, Homo sapiens
  misc_RNA (1)...(19): siRNA sense strand
gaaaaccacugcccaaagu

SEQ ID NO: 1534021 - RNA, 19 nt, Homo sapiens
  misc_RNA (1)...(19): siRNA sense strand
ggaaagugaagccucugua

SEQ ID NO: 1534022 - RNA, 19 nt, Homo sapiens
  misc_RNA (1)...(19): siRNA sense strand
gaugacaaguaugaaauca

SEQ ID NO: 1534023 - RNA, 19 nt, Homo sapiens
  misc_RNA (1)...(19): siRNA sense strand
ugaagagggaugacaagua

SEQ ID NO: 1534024 - RNA, 19 nt, Homo sapiens
  misc_RNA (1)...(19): siRNA sense strand
gaaauacuucuuccgaauc

SEQ ID NO: 1534025 - RNA, 19 nt, Homo sapiens
  misc_RNA (1)...(19): siRNA sense strand
cgacagcauuaacaaggaa

SEQ ID NO: 1534026 - RNA, 19 nt, Homo sapiens
  misc_RNA (1)...(19): siRNA sense strand
cgaguuauagcuguaaaua

SEQ ID NO: 1534027 - RNA, 19 nt, Homo sapiens
  misc_RNA (1)...(19): siRNA sense strand
ggaggacacagaauaugaa

SEQ ID NO: 1534028 - RNA, 19 nt, Homo sapiens
  misc_RNA (1)...(19): siRNA sense strand
gauauucuacgacagcauu

SEQ ID NO: 1534029 - RNA, 19 nt, Homo sapiens
  misc_RNA (1)...(19): siRNA sense strand
gagcccagcugaguugugu

SEQ ID NO: 1534030 - RNA, 19 nt, Homo sapiens
  misc_RNA (1)...(19): siRNA sense strand
ggagagaugaagccuguga

SEQ ID NO: 1534031 - RNA, 19 nt, Homo sapiens
  misc_RNA (1)...(19): siRNA sense strand
guacugagccacugaggau

SEQ ID NO: 1534032 - RNA, 19 nt, Homo sapiens
  misc_RNA (1)...(19): siRNA sense strand
aaagagaugcuggagauuu

SEQ ID NO: 1534033 - RNA, 19 nt, Homo sapiens
  misc_RNA (1)...(19): siRNA sense strand
ucccugagcucguggagaa

SEQ ID NO: 1534034 - RNA, 19 nt, Homo sapiens
  misc_RNA (1)...(19): siRNA sense strand
ggucugacgcacacgcuua

SEQ ID NO: 1534035 - RNA, 19 nt, Homo sapiens
  misc_RNA (1)...(19): siRNA sense strand
gcaaguacgaugugaagca

SEQ ID NO: 1534036 - RNA, 19 nt, Homo sapiens
  misc_RNA (1)...(19): siRNA sense strand
gcucaucuuucccaguaug

SEQ ID NO: 1534037 - RNA, 19 nt, Homo sapiens
  misc_RNA (1)...(19): siRNA sense strand
agacagcuguguuugagau

SEQ ID NO: 1534038 - RNA, 19 nt, Homo sapiens
  misc_RNA (1)...(19): siRNA sense strand
caaaggagugguccaagug

SEQ ID NO: 1534039 - RNA, 19 nt, Homo sapiens
  misc_RNA (1)...(19): siRNA sense strand
ggaccugcauguaucugau

SEQ ID NO: 1534040 - RNA, 19 nt, Homo sapiens
  misc_RNA (1)...(19): siRNA sense strand
gcucaguaguggccaagga

SEQ ID NO: 1534041 - RNA, 19 nt, Homo sapiens
  misc_RNA (1)...(19): siRNA sense strand
ucaagugacugaugugacu

SEQ ID NO: 1534042 - RNA, 19 nt, Homo sapiens
  misc_RNA (1)...(19): siRNA sense strand
ggauggagacccuacugaa

SEQ ID NO: 1534043 - RNA, 19 nt, Homo sapiens
  misc_RNA (1)...(19): siRNA sense strand
ugacaacuauaagugcauu

SEQ ID NO: 1534044 - RNA, 19 nt, Homo sapiens
  misc_RNA (1)...(19): siRNA sense strand
gaauccgggcugugaauga

SEQ ID NO: 1534045 - RNA, 19 nt, Homo sapiens
  misc_RNA (1)...(19): siRNA sense strand
gcacuaaguacagcaugaa

SEQ ID NO: 1534046 - RNA, 19 nt, Homo sapiens
  misc_RNA (1)...(19): siRNA sense strand
ccagacagcuguguuugag

SEQ ID NO: 1534047 - RNA, 19 nt, Homo sapiens
  misc_RNA (1)...(19): siRNA sense strand
acgcacacgcuuaagauua

SEQ ID NO: 1534048 - RNA, 19 nt, Homo sapiens
  misc_RNA (1)...(19): siRNA sense strand
acaaaggagugguccaagu

SEQ ID NO: 1534049 - RNA, 19 nt, Homo sapiens
  misc_RNA (1)...(19): siRNA sense strand
gauggagacccuacugaau

SEQ ID NO: 1534050 - RNA, 19 nt, Homo sapiens
  misc_RNA (1)...(19): siRNA sense strand
ggcacuaaguacagcauga

SEQ ID NO: 1534051 - RNA, 19 nt, Homo sapiens
  misc_RNA (1)...(19): siRNA sense strand
agugugagcugacauccaa

SEQ ID NO: 1534052 - RNA, 19 nt, Homo sapiens
  misc_RNA (1)...(19): siRNA sense strand
ggucuuugacugcauaaug

SEQ ID NO: 1534053 - RNA, 19 nt, Homo sapiens
  misc_RNA (1)...(19): siRNA sense strand
ugcucaagcucaagaauga

SEQ ID NO: 1534054 - RNA, 19 nt, Homo sapiens
  misc_RNA (1)...(19): siRNA sense strand
aggcccagcucacuauuga

SEQ ID NO: 1534055 - RNA, 19 nt, Homo sapiens
  misc_RNA (1)...(19): siRNA sense strand
ucaucgagaggcagaaaua

SEQ ID NO: 1534056 - RNA, 19 nt, Homo sapiens
  misc_RNA (1)...(19): siRNA sense strand
aaagugaagccucuguauu

SEQ ID NO: 1534057 - RNA, 19 nt, Homo sapiens
  misc_RNA (1)...(19): siRNA sense strand
ccaagggcacggaaaguga

SEQ ID NO: 1534058 - RNA, 19 nt, Homo sapiens
  misc_RNA (1)...(19): siRNA sense strand
gagcauaguggaguucuuc

SEQ ID NO: 1534059 - RNA, 19 nt, Homo sapiens
  misc_RNA (1)...(19): siRNA sense strand
uggaugagccacugaaguu

SEQ ID NO: 1534060 - RNA, 19 nt, Homo sapiens
  misc_RNA (1)...(19): siRNA sense strand
uguccaaagugcccaagaa

SEQ ID NO: 1534061 - RNA, 19 nt, Homo sapiens
  misc_RNA (1)...(19): siRNA sense strand
gaaagagaugcuggagauu

SEQ ID NO: 1534062 - RNA, 19 nt, Homo sapiens
  misc_RNA (1)...(19): siRNA sense strand
agaagaagcagaagaaggu

SEQ ID NO: 1534063 - RNA, 19 nt, Homo sapiens
  misc_RNA (1)...(19): siRNA sense strand
ugacuucggaugacucuga

SEQ ID NO: 1534064 - RNA, 19 nt, Homo sapiens
  misc_RNA (1)...(19): siRNA sense strand
gaggccauccggauucuga

SEQ ID NO: 1534065 - RNA, 19 nt, Homo sapiens
  misc_RNA (1)...(19): siRNA sense strand
gggaugacaaguaugaaau

SEQ ID NO: 1534066 - RNA, 19 nt, Homo sapiens
  misc_RNA (1)...(19): siRNA sense strand
ccaagaaagagcccaacuu

SEQ ID NO: 1534067 - RNA, 19 nt, Homo sapiens
  misc_RNA (1)...(19): siRNA sense strand
gagaugaagaagaaaguag

SEQ ID NO: 1534068 - RNA, 19 nt, Homo sapiens
  misc_RNA (1)...(19): siRNA sense strand
ggaagugacggaggaggaa

SEQ ID NO: 1534069 - RNA, 19 nt, Homo sapiens
  misc_RNA (1)...(19): siRNA sense strand
ccacacggcccacaucaag

SEQ ID NO: 1534070 - RNA, 19 nt, Homo sapiens
  misc_RNA (1)...(19): siRNA sense strand
auggagacccuacugaaua

SEQ ID NO: 1534071 - RNA, 19 nt, Homo sapiens
  misc_RNA (1)...(19): siRNA sense strand
uuagcaacgugaacaugaa

SEQ ID NO: 1534072 - RNA, 19 nt, Homo sapiens
  misc_RNA (1)...(19): siRNA sense strand
agacaaagagaccaagguu

SEQ ID NO: 1534073 - RNA, 19 nt, Homo sapiens
  misc_RNA (1)...(19): siRNA sense strand
gaagaagguggcaaaugag

SEQ ID NO: 1534074 - RNA, 19 nt, Homo sapiens
  misc_RNA (1)...(19): siRNA sense strand
aagugaagccucuguauuc

SEQ ID NO: 1534075 - RNA, 19 nt, Homo sapiens
  misc_RNA (1)...(19): siRNA sense strand
gagacccuacugaauacua

SEQ ID NO: 1534076 - RNA, 19 nt, Homo sapiens
  misc_RNA (1)...(19): siRNA sense strand
ccaucaaguuugugagcaa

SEQ ID NO: 1534077 - RNA, 19 nt, Homo sapiens
  misc_RNA (1)...(19): siRNA sense strand
gcagaugggcaccaaguac

SEQ ID NO: 1534078 - RNA, 19 nt, Homo sapiens
  misc_RNA (1)...(19): siRNA sense strand
ugaagcagaugggcaccaa

SEQ ID NO: 1534079 - RNA, 19 nt, Homo sapiens
  misc_RNA (1)...(19): siRNA sense strand
agagggaugacaaguauga

SEQ ID NO: 1534080 - RNA, 19 nt, Homo sapiens
  misc_RNA (1)...(19): siRNA sense strand
guagaacgaaggaagaaag

SEQ ID NO: 1534081 - RNA, 19 nt, Homo sapiens
  misc_RNA (1)...(19): siRNA sense strand
aaagaagccgugaccauca

SEQ ID NO: 1534082 - RNA, 19 nt, Homo sapiens
  misc_RNA (1)...(19): siRNA sense strand
ucaaggaguccgccaagau

SEQ ID NO: 1534083 - RNA, 19 nt, Homo sapiens
  misc_RNA (1)...(19): siRNA sense strand
gggcugaagacacaaagga

SEQ ID NO: 1534084 - RNA, 19 nt, Homo sapiens
  misc_RNA (1)...(19): siRNA sense strand
caagugcacuguggauggu

SEQ ID NO: 1534085 - RNA, 19 nt, Homo sapiens
  misc_RNA (1)...(19): siRNA sense strand
ccagugcucggcuacauug

SEQ ID NO: 1534086 - RNA, 19 nt, Homo sapiens
  misc_RNA (1)...(19): siRNA sense strand
gcgugcagauugugaagca

SEQ ID NO: 1534087 - RNA, 19 nt, Homo sapiens
  misc_RNA (1)...(19): siRNA sense strand
gagcgucuggccacaguga

SEQ ID NO: 1534088 - RNA, 19 nt, Homo sapiens
  misc_RNA (1)...(19): siRNA sense strand
gcugaugcauggcacuaag

SEQ ID NO: 1534089 - RNA, 19 nt, Homo sapiens
  misc_RNA (1)...(19): siRNA sense strand
gcacguguccauggaguuc

SEQ ID NO: 1534090 - RNA, 19 nt, Homo sapiens
  misc_RNA (1)...(19): siRNA sense strand
aaaucacgguguccgaaga

SEQ ID NO: 1534091 - RNA, 19 nt, Homo sapiens
  misc_RNA (1)...(19): siRNA sense strand
ggaguccgccaagauauuc

SEQ ID NO: 1534092 - RNA, 19 nt, Homo sapiens
  misc_RNA (1)...(19): siRNA sense strand
gcgccagacagcuguguuu

SEQ ID NO: 1534093 - RNA, 19 nt, Homo sapiens
  misc_RNA (1)...(19): siRNA sense strand
gcauaauggaacugaaaga

SEQ ID NO: 1534094 - RNA, 19 nt, Homo sapiens
  misc_RNA (1)...(19): siRNA sense strand
ugcccaaagugacauggua

SEQ ID NO: 1534095 - RNA, 19 nt, Homo sapiens
  misc_RNA (1)...(19): siRNA sense strand
ccaaggauccuguuaaacc

SEQ ID NO: 1534096 - RNA, 19 nt, Homo sapiens
  misc_RNA (1)...(19): siRNA sense strand
gaaggaagaaaggcagcaa

SEQ ID NO: 1534097 - RNA, 19 nt, Homo sapiens
  misc_RNA (1)...(19): siRNA sense strand
ggagggagauauacagaaa

SEQ ID NO: 1534098 - RNA, 19 nt, Homo sapiens
  misc_RNA (1)...(19): siRNA sense strand
aaagauggcuucacuauag

SEQ ID NO: 1534099 - RNA, 19 nt, Homo sapiens
  misc_RNA (1)...(19): siRNA sense strand
ggacaaagauggcuucacu

SEQ ID NO: 1534100 - RNA, 19 nt, Homo sapiens
  misc_RNA (1)...(19): siRNA sense strand
caaagauggcuucacuaua

SEQ ID NO: 1534101 - RNA, 19 nt, Homo sapiens
  misc_RNA (1)...(19): siRNA sense strand
gaugugcacugcuuuccaa

SEQ ID NO: 1534102 - RNA, 19 nt, Homo sapiens
  misc_RNA (1)...(19): siRNA sense strand
ggugauggagggagauaua

SEQ ID NO: 1534103 - RNA, 19 nt, Homo sapiens
  misc_RNA (1)...(19): siRNA sense strand
gacaggaugugcacugcuu

SEQ ID NO: 1534104 - RNA, 19 nt, Homo sapiens
  misc_RNA (1)...(19): siRNA sense strand
gagcuuacuucuggugaug

SEQ ID NO: 1534105 - RNA, 19 nt, Homo sapiens
  misc_RNA (1)...(19): siRNA sense strand
acaaagauggcuucacuau

SEQ ID NO: 1534106 - RNA, 19 nt, Homo sapiens
  misc_RNA (1)...(19): siRNA sense strand
gacaaagauggcuucacua

SEQ ID NO: 1534107 - RNA, 19 nt, Homo sapiens
  misc_RNA (1)...(19): siRNA sense strand
aagauggcuucacuauaga

SEQ ID NO: 1534108 - RNA, 19 nt, Homo sapiens
  misc_RNA (1)...(19): siRNA sense strand
ggagauauacagaaaagau

SEQ ID NO: 1534109 - RNA, 19 nt, Homo sapiens
  misc_RNA (1)...(19): siRNA sense strand
gcuuacuucuggugaugga

SEQ ID NO: 1534110 - RNA, 19 nt, Homo sapiens
  misc_RNA (1)...(19): siRNA sense strand
gaagaccucuccuauguga

SEQ ID NO: 1534111 - RNA, 19 nt, Homo sapiens
  misc_RNA (1)...(19): siRNA sense strand
gaaagggccucacaguuca

SEQ ID NO: 1534112 - RNA, 19 nt, Homo sapiens
  misc_RNA (1)...(19): siRNA sense strand
ccagagaaauccagccaua

SEQ ID NO: 1534113 - RNA, 19 nt, Homo sapiens
  misc_RNA (1)...(19): siRNA sense strand
ggaaagggccucacaguuc

SEQ ID NO: 1534114 - RNA, 19 nt, Homo sapiens
  misc_RNA (1)...(19): siRNA sense strand
gcaguucauuuauuacuug

SEQ ID NO: 1534115 - RNA, 19 nt, Homo sapiens
  misc_RNA (1)...(19): siRNA sense strand
ccacggcaguucauuuauu

SEQ ID NO: 1534116 - RNA, 19 nt, Homo sapiens
  misc_RNA (1)...(19): siRNA sense strand
cacggcaguucauuuauua

SEQ ID NO: 1534117 - RNA, 19 nt, Homo sapiens
  misc_RNA (1)...(19): siRNA sense strand
cugaagaccucuccuaugu

SEQ ID NO: 1534118 - RNA, 19 nt, Homo sapiens
  misc_RNA (1)...(19): siRNA sense strand
gauggugugugacauuaga

SEQ ID NO: 1534119 - RNA, 19 nt, Homo sapiens
  misc_RNA (1)...(19): siRNA sense strand
caaugucacugaagcacuu

SEQ ID NO: 1534120 - RNA, 19 nt, Homo sapiens
  misc_RNA (1)...(19): siRNA sense strand
gcaguacucaccagagaaa

SEQ ID NO: 1534121 - RNA, 19 nt, Homo sapiens
  misc_RNA (1)...(19): siRNA sense strand
cuucgaaccuggcucauga

SEQ ID NO: 1534122 - RNA, 19 nt, Homo sapiens
  misc_RNA (1)...(19): siRNA sense strand
gacaguuccuucuuucuuc

SEQ ID NO: 1534123 - RNA, 19 nt, Homo sapiens
  misc_RNA (1)...(19): siRNA sense strand
uggaugaugugacugauga

SEQ ID NO: 1534124 - RNA, 19 nt, Homo sapiens
  misc_RNA (1)...(19): siRNA sense strand
ucugaaggaugaauucuau

SEQ ID NO: 1534125 - RNA, 19 nt, Homo sapiens
  misc_RNA (1)...(19): siRNA sense strand
acugugaccucuugcuaua

SEQ ID NO: 1534126 - RNA, 19 nt, Homo sapiens
  misc_RNA (1)...(19): siRNA sense strand
uaaugaccguggagacaaa

SEQ ID NO: 1534127 - RNA, 19 nt, Homo sapiens
  misc_RNA (1)...(19): siRNA sense strand
gagcaugggauggauguuu

SEQ ID NO: 1534128 - RNA, 19 nt, Homo sapiens
  misc_RNA (1)...(19): siRNA sense strand
gcagcagucuucccucagu

SEQ ID NO: 1534129 - RNA, 19 nt, Homo sapiens
  misc_RNA (1)...(19): siRNA sense strand
gagaaauccagccauauca

SEQ ID NO: 1534130 - RNA, 19 nt, Homo sapiens
  misc_RNA (1)...(19): siRNA sense strand
gggugacaguuccuucuuu

SEQ ID NO: 1534131 - RNA, 19 nt, Homo sapiens
  misc_RNA (1)...(19): siRNA sense strand
ggugacaguuccuucuuuc

SEQ ID NO: 1534132 - RNA, 19 nt, Homo sapiens
  misc_RNA (1)...(19): siRNA sense strand
cuuagaggcugaccguauu

SEQ ID NO: 1534133 - RNA, 19 nt, Homo sapiens
  misc_RNA (1)...(19): siRNA sense strand
gaaauccagccauaucauc

SEQ ID NO: 1534134 - RNA, 19 nt, Homo sapiens
  misc_RNA (1)...(19): siRNA sense strand
cagaauaucgcuauaacau

SEQ ID NO: 1534135 - RNA, 19 nt, Homo sapiens
  misc_RNA (1)...(19): siRNA sense strand
ggagaugccauuggaauca

SEQ ID NO: 1534136 - RNA, 19 nt, Homo sapiens
  misc_RNA (1)...(19): siRNA sense strand
ugaugugacugaugaauac

SEQ ID NO: 1534137 - RNA, 19 nt, Homo sapiens
  misc_RNA (1)...(19): siRNA sense strand
gcggguaugcacaaagaua

SEQ ID NO: 1534138 - RNA, 19 nt, Homo sapiens
  misc_RNA (1)...(19): siRNA sense strand
cagcagucuucccucagua

SEQ ID NO: 1534139 - RNA, 19 nt, Homo sapiens
  misc_RNA (1)...(19): siRNA sense strand
ccagcagaauaucgcuaua

SEQ ID NO: 1534140 - RNA, 19 nt, Homo sapiens
  misc_RNA (1)...(19): siRNA sense strand
cugauggugugugacauua

SEQ ID NO: 1534141 - RNA, 19 nt, Homo sapiens
  misc_RNA (1)...(19): siRNA sense strand
aagcggguaugcacaaaga

SEQ ID NO: 1534142 - RNA, 19 nt, Homo sapiens
  misc_RNA (1)...(19): siRNA sense strand
aauacuugauguccaugua

SEQ ID NO: 1534143 - RNA, 19 nt, Homo sapiens
  misc_RNA (1)...(19): siRNA sense strand
cauaucaucuuggccuguu

SEQ ID NO: 1534144 - RNA, 19 nt, Homo sapiens
  misc_RNA (1)...(19): siRNA sense strand
cagcagaauaucgcuauaa

SEQ ID NO: 1534145 - RNA, 19 nt, Homo sapiens
  misc_RNA (1)...(19): siRNA sense strand
ggcaguucauuuauuacuu

SEQ ID NO: 1534146 - RNA, 19 nt, Homo sapiens
  misc_RNA (1)...(19): siRNA sense strand
gcuugacugugaccucuug

SEQ ID NO: 1534147 - RNA, 19 nt, Homo sapiens
  misc_RNA (1)...(19): siRNA sense strand
ugacaggacccauggaaca

SEQ ID NO: 1534148 - RNA, 19 nt, Homo sapiens
  misc_RNA (1)...(19): siRNA sense strand
gaaucagucaggcgucuau

SEQ ID NO: 1534149 - RNA, 19 nt, Homo sapiens
  misc_RNA (1)...(19): siRNA sense strand
cugaaacuccagcagaaua

SEQ ID NO: 1534150 - RNA, 19 nt, Homo sapiens
  misc_RNA (1)...(19): siRNA sense strand
cugaagcacuuguggaaag

SEQ ID NO: 1534151 - RNA, 19 nt, Homo sapiens
  misc_RNA (1)...(19): siRNA sense strand
gcugaagaccucuccuaug

SEQ ID NO: 1534152 - RNA, 19 nt, Homo sapiens
  misc_RNA (1)...(19): siRNA sense strand
gcagaauaucgcuauaaca

SEQ ID NO: 1534153 - RNA, 19 nt, Homo sapiens
  misc_RNA (1)...(19): siRNA sense strand
ugacaguuccuucuuucuu

SEQ ID NO: 1534154 - RNA, 19 nt, Homo sapiens
  misc_RNA (1)...(19): siRNA sense strand
ucuccuaugugaaccgaaa

SEQ ID NO: 1534155 - RNA, 19 nt, Homo sapiens
  misc_RNA (1)...(19): siRNA sense strand
ugugaccucuugcuauaug

SEQ ID NO: 1534156 - RNA, 19 nt, Homo sapiens
  misc_RNA (1)...(19): siRNA sense strand
ugaaacuccagcagaauau

SEQ ID NO: 1534157 - RNA, 19 nt, Homo sapiens
  misc_RNA (1)...(19): siRNA sense strand
cacagguccuugcagcauu

SEQ ID NO: 1534158 - RNA, 19 nt, Homo sapiens
  misc_RNA (1)...(19): siRNA sense strand
cugcaguacucaccagaga

SEQ ID NO: 1534159 - RNA, 19 nt, Homo sapiens
  misc_RNA (1)...(19): siRNA sense strand
uaagcuggaugaugugacu

SEQ ID NO: 1534160 - RNA, 19 nt, Homo sapiens
  misc_RNA (1)...(19): siRNA sense strand
ucuaugagucguuguguug

SEQ ID NO: 1534161 - RNA, 19 nt, Homo sapiens
  misc_RNA (1)...(19): siRNA sense strand
ugacugugaccucuugcua

SEQ ID NO: 1534162 - RNA, 19 nt, Homo sapiens
  misc_RNA (1)...(19): siRNA sense strand
ugugacugaugaauacuug

SEQ ID NO: 1534163 - RNA, 19 nt, Homo sapiens
  misc_RNA (1)...(19): siRNA sense strand
ugaagcggguaugcacaaa

SEQ ID NO: 1534164 - RNA, 19 nt, Homo sapiens
  misc_RNA (1)...(19): siRNA sense strand
cagcgauccagggcuauua

SEQ ID NO: 1534165 - RNA, 19 nt, Homo sapiens
  misc_RNA (1)...(19): siRNA sense strand
agagaaauccagccauauc

SEQ ID NO: 1534166 - RNA, 19 nt, Homo sapiens
  misc_RNA (1)...(19): siRNA sense strand
acagguccuugcagcauug

SEQ ID NO: 1534167 - RNA, 19 nt, Homo sapiens
  misc_RNA (1)...(19): siRNA sense strand
gucguuguguugccaaugu

SEQ ID NO: 1534168 - RNA, 19 nt, Homo sapiens
  misc_RNA (1)...(19): siRNA sense strand
guuuuaagcuggaugaugu

SEQ ID NO: 1534169 - RNA, 19 nt, Homo sapiens
  misc_RNA (1)...(19): siRNA sense strand
cgaaaaggccugcauucuu

SEQ ID NO: 1534170 - RNA, 19 nt, Homo sapiens
  misc_RNA (1)...(19): siRNA sense strand
uggaaagggccucacaguu

SEQ ID NO: 1534171 - RNA, 19 nt, Homo sapiens
  misc_RNA (1)...(19): siRNA sense strand
uuccacggcaguucauuua

SEQ ID NO: 1534172 - RNA, 19 nt, Homo sapiens
  misc_RNA (1)...(19): siRNA sense strand
guauccauguggccaucaa

SEQ ID NO: 1534173 - RNA, 19 nt, Homo sapiens
  misc_RNA (1)...(19): siRNA sense strand
uccugaaacuccagcagaa

SEQ ID NO: 1534174 - RNA, 19 nt, Homo sapiens
  misc_RNA (1)...(19): siRNA sense strand
ucacaguucauucgcuuuc

SEQ ID NO: 1534175 - RNA, 19 nt, Homo sapiens
  misc_RNA (1)...(19): siRNA sense strand
agcaugggauggauguuug

SEQ ID NO: 1534176 - RNA, 19 nt, Homo sapiens
  misc_RNA (1)...(19): siRNA sense strand
ggccugcauucuuuaaacu

SEQ ID NO: 1534177 - RNA, 19 nt, Homo sapiens
  misc_RNA (1)...(19): siRNA sense strand
ugaaggaugaauucuaugg

SEQ ID NO: 1534178 - RNA, 19 nt, Homo sapiens
  misc_RNA (1)...(19): siRNA sense strand
gagaugccauuggaaucag

SEQ ID NO: 1534179 - RNA, 19 nt, Homo sapiens
  misc_RNA (1)...(19): siRNA sense strand
gcucacucauuuuagcuaa

SEQ ID NO: 1534180 - RNA, 19 nt, Homo sapiens
  misc_RNA (1)...(19): siRNA sense strand
gaaacuccagcagaauauc

SEQ ID NO: 1534181 - RNA, 19 nt, Homo sapiens
  misc_RNA (1)...(19): siRNA sense strand
ccucaguagucaguuugaa

SEQ ID NO: 1534182 - RNA, 19 nt, Homo sapiens
  misc_RNA (1)...(19): siRNA sense strand
caaggcaccaaaugcugaa

SEQ ID NO: 1534183 - RNA, 19 nt, Homo sapiens
  misc_RNA (1)...(19): siRNA sense strand
gcugaugaagccuccauuc

SEQ ID NO: 1534184 - RNA, 19 nt, Homo sapiens
  misc_RNA (1)...(19): siRNA sense strand
ccaauaacagugcuugacu

SEQ ID NO: 1534185 - RNA, 19 nt, Homo sapiens
  misc_RNA (1)...(19): siRNA sense strand
gggagaugccauuggaauc

SEQ ID NO: 1534186 - RNA, 19 nt, Homo sapiens
  misc_RNA (1)...(19): siRNA sense strand
gacugugaccucuugcuau

SEQ ID NO: 1534187 - RNA, 19 nt, Homo sapiens
  misc_RNA (1)...(19): siRNA sense strand
gaauacuugauguccaugu

SEQ ID NO: 1534188 - RNA, 19 nt, Homo sapiens
  misc_RNA (1)...(19): siRNA sense strand
ggaaucagucaggcgucua

SEQ ID NO: 1534189 - RNA, 19 nt, Homo sapiens
  misc_RNA (1)...(19): siRNA sense strand
cacugaagcacuuguggaa

SEQ ID NO: 1534190 - RNA, 19 nt, Homo sapiens
  misc_RNA (1)...(19): siRNA sense strand
agaggaguaugagcacaug

SEQ ID NO: 1534191 - RNA, 19 nt, Homo sapiens
  misc_RNA (1)...(19): siRNA sense strand
gaugaugugacugaugaau

SEQ ID NO: 1534192 - RNA, 19 nt, Homo sapiens
  misc_RNA (1)...(19): siRNA sense strand
agaauaucgcuauaacaug

SEQ ID NO: 1534193 - RNA, 19 nt, Homo sapiens
  misc_RNA (1)...(19): siRNA sense strand
acugaugaauacuugaugu

SEQ ID NO: 1534194 - RNA, 19 nt, Homo sapiens
  misc_RNA (1)...(19): siRNA sense strand
agucuucccucaguaguca

SEQ ID NO: 1534195 - RNA, 19 nt, Homo sapiens
  misc_RNA (1)...(19): siRNA sense strand
caucaaggcaccaaaugcu

SEQ ID NO: 1534196 - RNA, 19 nt, Homo sapiens
  misc_RNA (1)...(19): siRNA sense strand
cagagaaauccagccauau

SEQ ID NO: 1534197 - RNA, 19 nt, Homo sapiens
  misc_RNA (1)...(19): siRNA sense strand
uacuugauguccauguaug

SEQ ID NO: 1534198 - RNA, 19 nt, Homo sapiens
  misc_RNA (1)...(19): siRNA sense strand
gaagcggguaugcacaaag

SEQ ID NO: 1534199 - RNA, 19 nt, Homo sapiens
  misc_RNA (1)...(19): siRNA sense strand
ggacauuggaccguuuuaa

SEQ ID NO: 1534200 - RNA, 19 nt, Homo sapiens
  misc_RNA (1)...(19): siRNA sense strand
gcugggaggucuaauauau

SEQ ID NO: 1534201 - RNA, 19 nt, Homo sapiens
  misc_RNA (1)...(19): siRNA sense strand
gaagaucauaugcaaauug

SEQ ID NO: 1534202 - RNA, 19 nt, Homo sapiens
  misc_RNA (1)...(19): siRNA sense strand
gcaggguucuccaccauga

SEQ ID NO: 1534203 - RNA, 19 nt, Homo sapiens
  misc_RNA (1)...(19): siRNA sense strand
gcucccaccuuccuuguuu

SEQ ID NO: 1534204 - RNA, 19 nt, Homo sapiens
  misc_RNA (1)...(19): siRNA sense strand
ccacauucuuugccuguaa

SEQ ID NO: 1534205 - RNA, 19 nt, Homo sapiens
  misc_RNA (1)...(19): siRNA sense strand
gacggaagaucauaugcaa

SEQ ID NO: 1534206 - RNA, 19 nt, Homo sapiens
  misc_RNA (1)...(19): siRNA sense strand
gcuauuauguuccuacagu

SEQ ID NO: 1534207 - RNA, 19 nt, Homo sapiens
  misc_RNA (1)...(19): siRNA sense strand
ggaagaucauaugcaaauu

SEQ ID NO: 1534208 - RNA, 19 nt, Homo sapiens
  misc_RNA (1)...(19): siRNA sense strand
gaucauaugcaaauugugu

SEQ ID NO: 1534209 - RNA, 19 nt, Homo sapiens
  misc_RNA (1)...(19): siRNA sense strand
uaugaacaaucuccacauu

SEQ ID NO: 1534210 - RNA, 19 nt, Homo sapiens
  misc_RNA (1)...(19): siRNA sense strand
ugaacaaucuccacauucu

SEQ ID NO: 1534211 - RNA, 19 nt, Homo sapiens
  misc_RNA (1)...(19): siRNA sense strand
agauuugucugauagcuuu

SEQ ID NO: 1534212 - RNA, 19 nt, Homo sapiens
  misc_RNA (1)...(19): siRNA sense strand
ucuaauauauggccaucuu

SEQ ID NO: 1534213 - RNA, 19 nt, Homo sapiens
  misc_RNA (1)...(19): siRNA sense strand
uggcacauauugcaacuga

SEQ ID NO: 1534214 - RNA, 19 nt, Homo sapiens
  misc_RNA (1)...(19): siRNA sense strand
ggaaacacuuuuauucuca

SEQ ID NO: 1534215 - RNA, 19 nt, Homo sapiens
  misc_RNA (1)...(19): siRNA sense strand
gaacaaucuccacauucuu

SEQ ID NO: 1534216 - RNA, 19 nt, Homo sapiens
  misc_RNA (1)...(19): siRNA sense strand
cuacuguucccuaauauug

SEQ ID NO: 1534217 - RNA, 19 nt, Homo sapiens
  misc_RNA (1)...(19): siRNA sense strand
cuaauauuguguuggagaa

SEQ ID NO: 1534218 - RNA, 19 nt, Homo sapiens
  misc_RNA (1)...(19): siRNA sense strand
gccaugauguccauaguac

SEQ ID NO: 1534219 - RNA, 19 nt, Homo sapiens
  misc_RNA (1)...(19): siRNA sense strand
gcaacugacugugucuaca

SEQ ID NO: 1534220 - RNA, 19 nt, Homo sapiens
  misc_RNA (1)...(19): siRNA sense strand
agugggaccugguauguga

SEQ ID NO: 1534221 - RNA, 19 nt, Homo sapiens
  misc_RNA (1)...(19): siRNA sense strand
cggaagaucauaugcaaau

SEQ ID NO: 1534222 - RNA, 19 nt, Homo sapiens
  misc_RNA (1)...(19): siRNA sense strand
cacgaucuaugacaauaau

SEQ ID NO: 1534223 - RNA, 19 nt, Homo sapiens
  misc_RNA (1)...(19): siRNA sense strand
auucaggacuggcacauau

SEQ ID NO: 1534224 - RNA, 19 nt, Homo sapiens
  misc_RNA (1)...(19): siRNA sense strand
augguucaaucccuauuua

SEQ ID NO: 1534225 - RNA, 19 nt, Homo sapiens
  misc_RNA (1)...(19): siRNA sense strand
ccaccuuccuuguuuacug

SEQ ID NO: 1534226 - RNA, 19 nt, Homo sapiens
  misc_RNA (1)...(19): siRNA sense strand
ggacggaagaucauaugca

SEQ ID NO: 1534227 - RNA, 19 nt, Homo sapiens
  misc_RNA (1)...(19): siRNA sense strand
gaugaccuccugagaaucu
